United States Patent Application Publication US 2015/0232836 A1 - sequence listing, part 10

SEQ ID NO: 266683 - DNA, 15 bp, Homo sapiens
aagaaagtgaactct

SEQ ID NO: 266684 - DNA, 15 bp, Homo sapiens
aaagaaagtgaactc

SEQ ID NO: 266685 - DNA, 15 bp, Homo sapiens
caaagaaagtgaact

SEQ ID NO: 266686 - DNA, 15 bp, Homo sapiens
ccaaagaaagtgaac

SEQ ID NO: 266687 - DNA, 15 bp, Homo sapiens
tccaaagaaagtgaa

SEQ ID NO: 266688 - DNA, 15 bp, Homo sapiens
gtccaaagaaagtga

SEQ ID NO: 266689 - DNA, 15 bp, Homo sapiens
agtccaaagaaagtg

SEQ ID NO: 266690 - DNA, 15 bp, Homo sapiens
gagtccaaagaaagt

SEQ ID NO: 266691 - DNA, 15 bp, Homo sapiens
agagtccaaagaaag

SEQ ID NO: 266692 - DNA, 15 bp, Homo sapiens
cagagtccaaagaaa

SEQ ID NO: 266693 - DNA, 15 bp, Homo sapiens
gcagagtccaaagaa

SEQ ID NO: 266694 - DNA, 15 bp, Homo sapiens
ggcagagtccaaaga

SEQ ID NO: 266695 - DNA, 15 bp, Homo sapiens
aggcagagtccaaag

SEQ ID NO: 266696 - DNA, 15 bp, Homo sapiens
taggcagagtccaaa

SEQ ID NO: 266697 - DNA, 15 bp, Homo sapiens
ataggcagagtccaa

SEQ ID NO: 266698 - DNA, 15 bp, Homo sapiens
tataggcagagtcca

SEQ ID NO: 266699 - DNA, 15 bp, Homo sapiens
atataggcagagtcc

SEQ ID NO: 266700 - DNA, 15 bp, Homo sapiens
aatataggcagagtc

SEQ ID NO: 266701 - DNA, 15 bp, Homo sapiens
aaatataggcagagt

SEQ ID NO: 266702 - DNA, 15 bp, Homo sapiens
aaaatataggcagag

SEQ ID NO: 266703 - DNA, 15 bp, Homo sapiens
gaaaatataggcaga

SEQ ID NO: 266704 - DNA, 15 bp, Homo sapiens
agaaaatataggcag

SEQ ID NO: 266705 - DNA, 15 bp, Homo sapiens
aagaaaatataggca

SEQ ID NO: 266706 - DNA, 15 bp, Homo sapiens
taagaaaatataggc

SEQ ID NO: 266707 - DNA, 15 bp, Homo sapiens
gtaagaaaatatagg

SEQ ID NO: 266708 - DNA, 15 bp, Homo sapiens
ggtaagaaaatatag

SEQ ID NO: 266709 - DNA, 15 bp, Homo sapiens
aggtaagaaaatata

SEQ ID NO: 266710 - DNA, 15 bp, Homo sapiens
caggtaagaaaatat

SEQ ID NO: 266711 - DNA, 15 bp, Homo sapiens
tcaggtaagaaaata

SEQ ID NO: 266712 - DNA, 15 bp, Homo sapiens
ttcaggtaagaaaat

SEQ ID NO: 266713 - DNA, 15 bp, Homo sapiens
gttcaggtaagaaaa

SEQ ID NO: 266714 - DNA, 15 bp, Homo sapiens
agttcaggtaagaaa

SEQ ID NO: 266715 - DNA, 15 bp, Homo sapiens
aagttcaggtaagaa

SEQ ID NO: 266716 - DNA, 15 bp, Homo sapiens
aaagttcaggtaaga

SEQ ID NO: 266717 - DNA, 15 bp, Homo sapiens
aaaagttcaggtaag

SEQ ID NO: 266718 - DNA, 15 bp, Homo sapiens
caaaagttcaggtaa

SEQ ID NO: 266719 - DNA, 15 bp, Homo sapiens
gcaaaagttcaggta

SEQ ID NO: 266720 - DNA, 15 bp, Homo sapiens
tgcaaaagttcaggt

SEQ ID NO: 266721 - DNA, 15 bp, Homo sapiens
ttgcaaaagttcagg

SEQ ID NO: 266722 - DNA, 15 bp, Homo sapiens
cttgcaaaagttcag

SEQ ID NO: 266723 - DNA, 15 bp, Homo sapiens
acttgcaaaagttca

SEQ ID NO: 266724 - DNA, 15 bp, Homo sapiens
aacttgcaaaagttc

SEQ ID NO: 266725 - DNA, 15 bp, Homo sapiens
aaacttgcaaaagtt

SEQ ID NO: 266726 - DNA, 15 bp, Homo sapiens
aaaacttgcaaaagt

SEQ ID NO: 266727 - DNA, 15 bp, Homo sapiens
gaaaacttgcaaaag

SEQ ID NO: 266728 - DNA, 15 bp, Homo sapiens
tgaaaacttgcaaaa

SEQ ID NO: 266729 - DNA, 15 bp, Homo sapiens
ctgaaaacttgcaaa

SEQ ID NO: 266730 - DNA, 15 bp, Homo sapiens
cctgaaaacttgcaa

SEQ ID NO: 266731 - DNA, 15 bp, Homo sapiens
acctgaaaacttgca

SEQ ID NO: 266732 - DNA, 15 bp, Homo sapiens
tacctgaaaacttgc

SEQ ID NO: 266733 - DNA, 15 bp, Homo sapiens
ttacctgaaaacttg

SEQ ID NO: 266734 - DNA, 15 bp, Homo sapiens
tttacctgaaaactt

SEQ ID NO: 266735 - DNA, 15 bp, Homo sapiens
gtttacctgaaaact

SEQ ID NO: 266736 - DNA, 15 bp, Homo sapiens
ggtttacctgaaaac

SEQ ID NO: 266737 - DNA, 15 bp, Homo sapiens
aggtttacctgaaaa

SEQ ID NO: 266738 - DNA, 15 bp, Homo sapiens
gaggtttacctgaaa

SEQ ID NO: 266739 - DNA, 15 bp, Homo sapiens
tgaggtttacctgaa

SEQ ID NO: 266740 - DNA, 15 bp, Homo sapiens
ctgaggtttacctga

SEQ ID NO: 266741 - DNA, 15 bp, Homo sapiens
gctgaggtttacctg

SEQ ID NO: 266742 - DNA, 15 bp, Homo sapiens
agctgaggtttacct

SEQ ID NO: 266743 - DNA, 15 bp, Homo sapiens
gagctgaggtttacc

SEQ ID NO: 266744 - DNA, 15 bp, Homo sapiens
tgagctgaggtttac

SEQ ID NO: 266745 - DNA, 15 bp, Homo sapiens
ctgagctgaggttta

SEQ ID NO: 266746 - DNA, 15 bp, Homo sapiens
cctgagctgaggttt

SEQ ID NO: 266747 - DNA, 15 bp, Homo sapiens
tcctgagctgaggtt

SEQ ID NO: 266748 - DNA, 15 bp, Homo sapiens
gtcctgagctgaggt

SEQ ID NO: 266749 - DNA, 15 bp, Homo sapiens
agtcctgagctgagg

SEQ ID NO: 266750 - DNA, 15 bp, Homo sapiens
cagtcctgagctgag

SEQ ID NO: 266751 - DNA, 15 bp, Homo sapiens
gcagtcctgagctga

SEQ ID NO: 266752 - DNA, 15 bp, Homo sapiens
agcagtcctgagctg

SEQ ID NO: 266753 - DNA, 15 bp, Homo sapiens
tagcagtcctgagct

SEQ ID NO: 266754 - DNA, 15 bp, Homo sapiens
atagcagtcctgagc

SEQ ID NO: 266755 - DNA, 15 bp, Homo sapiens
aatagcagtcctgag

SEQ ID NO: 266756 - DNA, 15 bp, Homo sapiens
aaatagcagtcctga

SEQ ID NO: 266757 - DNA, 15 bp, Homo sapiens
taaatagcagtcctg

SEQ ID NO: 266758 - DNA, 15 bp, Homo sapiens
ctaaatagcagtcct

SEQ ID NO: 266759 - DNA, 15 bp, Homo sapiens
gctaaatagcagtcc

SEQ ID NO: 266760 - DNA, 15 bp, Homo sapiens
agctaaatagcagtc

SEQ ID NO: 266761 - DNA, 15 bp, Homo sapiens
gagctaaatagcagt

SEQ ID NO: 266762 - DNA, 15 bp, Homo sapiens
ggagctaaatagcag

SEQ ID NO: 266763 - DNA, 15 bp, Homo sapiens
aggagctaaatagca

SEQ ID NO: 266764 - DNA, 15 bp, Homo sapiens
gaggagctaaatagc

SEQ ID NO: 266765 - DNA, 15 bp, Homo sapiens
agaggagctaaatag

SEQ ID NO: 266766 - DNA, 15 bp, Homo sapiens
aagaggagctaaata

SEQ ID NO: 266767 - DNA, 15 bp, Homo sapiens
taagaggagctaaat

SEQ ID NO: 266768 - DNA, 15 bp, Homo sapiens
ttaagaggagctaaa

SEQ ID NO: 266769 - DNA, 15 bp, Homo sapiens
cttaagaggagctaa

SEQ ID NO: 266770 - DNA, 15 bp, Homo sapiens
tcttaagaggagcta

SEQ ID NO: 266771 - DNA, 15 bp, Homo sapiens
ttcttaagaggagct

SEQ ID NO: 266772 - DNA, 15 bp, Homo sapiens
cttcttaagaggagc

SEQ ID NO: 266773 - DNA, 15 bp, Homo sapiens
tcttcttaagaggag

SEQ ID NO: 266774 - DNA, 15 bp, Homo sapiens
atcttcttaagagga

SEQ ID NO: 266775 - DNA, 15 bp, Homo sapiens
aatcttcttaagagg

SEQ ID NO: 266776 - DNA, 15 bp, Homo sapiens
taatcttcttaagag

SEQ ID NO: 266777 - DNA, 15 bp, Homo sapiens
ttaatcttcttaaga

SEQ ID NO: 266778 - DNA, 15 bp, Homo sapiens
tttaatcttcttaag

SEQ ID NO: 266779 - DNA, 15 bp, Homo sapiens
ttttaatcttcttaa

SEQ ID NO: 266780 - DNA, 15 bp, Homo sapiens
cttttaatcttctta

SEQ ID NO: 266781 - DNA, 15 bp, Homo sapiens
tcttttaatcttctt

SEQ ID NO: 266782 - DNA, 15 bp, Homo sapiens
ctcttttaatcttct

SEQ ID NO: 266783 - DNA, 15 bp, Homo sapiens
tctcttttaatcttc

SEQ ID NO: 266784 - DNA, 15 bp, Homo sapiens
ttctcttttaatctt

SEQ ID NO: 266785 - DNA, 15 bp, Homo sapiens
tttctcttttaatct

SEQ ID NO: 266786 - DNA, 15 bp, Homo sapiens
ttttctcttttaatc

SEQ ID NO: 266787 - DNA, 15 bp, Homo sapiens
tttttctcttttaat

SEQ ID NO: 266788 - DNA, 15 bp, Homo sapiens
ttttttctcttttaa

SEQ ID NO: 266789 - DNA, 15 bp, Homo sapiens
tttttttctctttta

SEQ ID NO: 266790 - DNA, 15 bp, Homo sapiens
ttttttttctctttt

SEQ ID NO: 266791 - DNA, 15 bp, Homo sapiens
tttttttttctcttt

SEQ ID NO: 266792 - DNA, 15 bp, Homo sapiens
ctttttttttctctt

SEQ ID NO: 266793 - DNA, 15 bp, Homo sapiens
cctttttttttctct

SEQ ID NO: 266794 - DNA, 15 bp, Homo sapiens
gcctttttttttctc

SEQ ID NO: 266795 - DNA, 15 bp, Homo sapiens
ggcctttttttttct

SEQ ID NO: 266796 - DNA, 15 bp, Homo sapiens
gggcctttttttttc

SEQ ID NO: 266797 - DNA, 15 bp, Homo sapiens
agggccttttttttt

SEQ ID NO: 266798 - DNA, 15 bp, Homo sapiens
aagggcctttttttt

SEQ ID NO: 266799 - DNA, 15 bp, Homo sapiens
aaagggccttttttt

SEQ ID NO: 266800 - DNA, 15 bp, Homo sapiens
aaaagggcctttttt

SEQ ID NO: 266801 - DNA, 15 bp, Homo sapiens
taaaagggccttttt

SEQ ID NO: 266802 - DNA, 15 bp, Homo sapiens
ttaaaagggcctttt

SEQ ID NO: 266803 - DNA, 15 bp, Homo sapiens
tttaaaagggccttt

SEQ ID NO: 266804 - DNA, 15 bp, Homo sapiens
ttttaaaagggcctt

SEQ ID NO: 266805 - DNA, 15 bp, Homo sapiens
tttttaaaagggcct

SEQ ID NO: 266806 - DNA, 15 bp, Homo sapiens
atttttaaaagggcc

SEQ ID NO: 266807 - DNA, 15 bp, Homo sapiens
tatttttaaaagggc

SEQ ID NO: 266808 - DNA, 15 bp, Homo sapiens
ctatttttaaaaggg

SEQ ID NO: 266809 - DNA, 15 bp, Homo sapiens
actatttttaaaagg

SEQ ID NO: 266810 - DNA, 15 bp, Homo sapiens
tactatttttaaaag

SEQ ID NO: 266811 - DNA, 15 bp, Homo sapiens
atactatttttaaaa

SEQ ID NO: 266812 - DNA, 15 bp, Homo sapiens
tatactatttttaaa

SEQ ID NO: 266813 - DNA, 15 bp, Homo sapiens
gtatactatttttaa

SEQ ID NO: 266814 - DNA, 15 bp, Homo sapiens
tgtatactattttta

SEQ ID NO: 266815 - DNA, 15 bp, Homo sapiens
gtgtatactattttt

SEQ ID NO: 266816 - DNA, 15 bp, Homo sapiens
agtgtatactatttt

SEQ ID NO: 266817 - DNA, 15 bp, Homo sapiens
aagtgtatactattt

SEQ ID NO: 266818 - DNA, 15 bp, Homo sapiens
taagtgtatactatt

SEQ ID NO: 266819 - DNA, 15 bp, Homo sapiens
ataagtgtatactat

SEQ ID NO: 266820 - DNA, 15 bp, Homo sapiens
aataagtgtatacta

SEQ ID NO: 266821 - DNA, 15 bp, Homo sapiens
aaataagtgtatact

SEQ ID NO: 266822 - DNA, 15 bp, Homo sapiens
aaaataagtgtatac

SEQ ID NO: 266823 - DNA, 15 bp, Homo sapiens
taaaataagtgtata

SEQ ID NO: 266824 - DNA, 15 bp, Homo sapiens
ttaaaataagtgtat

SEQ ID NO: 266825 - DNA, 15 bp, Homo sapiens
cttaaaataagtgta

SEQ ID NO: 266826 - DNA, 15 bp, Homo sapiens
acttaaaataagtgt

SEQ ID NO: 266827 - DNA, 15 bp, Homo sapiens
cacttaaaataagtg

SEQ ID NO: 266828 - DNA, 15 bp, Homo sapiens
tcacttaaaataagt

SEQ ID NO: 266829 - DNA, 15 bp, Homo sapiens
ttcacttaaaataag

SEQ ID NO: 266830 - DNA, 15 bp, Homo sapiens
tttcacttaaaataa

SEQ ID NO: 266831 - DNA, 15 bp, Homo sapiens
ttttcacttaaaata

SEQ ID NO: 266832 - DNA, 15 bp, Homo sapiens
cttttcacttaaaat

SEQ ID NO: 266833 - DNA, 15 bp, Homo sapiens
gcttttcacttaaaa

SEQ ID NO: 266834 - DNA, 15 bp, Homo sapiens
tgcttttcacttaaa

SEQ ID NO: 266835 - DNA, 15 bp, Homo sapiens
ctgcttttcacttaa

SEQ ID NO: 266836 - DNA, 15 bp, Homo sapiens
tctgcttttcactta

SEQ ID NO: 266837 - DNA, 15 bp, Homo sapiens
ctctgcttttcactt

SEQ ID NO: 266838 - DNA, 15 bp, Homo sapiens
tctctgcttttcact

SEQ ID NO: 266839 - DNA, 15 bp, Homo sapiens
ttctctgcttttcac

SEQ ID NO: 266840 - DNA, 15 bp, Homo sapiens
attctctgcttttca

SEQ ID NO: 266841 - DNA, 15 bp, Homo sapiens
aattctctgcttttc

SEQ ID NO: 266842 - DNA, 15 bp, Homo sapiens
aaattctctgctttt

SEQ ID NO: 266843 - DNA, 15 bp, Homo sapiens
aaaattctctgcttt

SEQ ID NO: 266844 - DNA, 15 bp, Homo sapiens
taaaattctctgctt

SEQ ID NO: 266845 - DNA, 15 bp, Homo sapiens
ataaaattctctgct

SEQ ID NO: 266846 - DNA, 15 bp, Homo sapiens
aataaaattctctgc

SEQ ID NO: 266847 - DNA, 15 bp, Homo sapiens
aaataaaattctctg

SEQ ID NO: 266848 - DNA, 15 bp, Homo sapiens
taaataaaattctct

SEQ ID NO: 266849 - DNA, 15 bp, Homo sapiens
ataaataaaattctc

SEQ ID NO: 266850 - DNA, 15 bp, Homo sapiens
tataaataaaattct

SEQ ID NO: 266851 - DNA, 15 bp, Homo sapiens
ctataaataaaattc

SEQ ID NO: 266852 - DNA, 15 bp, Homo sapiens
gctataaataaaatt

SEQ ID NO: 266853 - DNA, 15 bp, Homo sapiens
agctataaataaaat

SEQ ID NO: 266854 - DNA, 15 bp, Homo sapiens
tagctataaataaaa

SEQ ID NO: 266855 - DNA, 15 bp, Homo sapiens
ttagctataaataaa

SEQ ID NO: 266856 - DNA, 15 bp, Homo sapiens
attagctataaataa

SEQ ID NO: 266857 - DNA, 15 bp, Homo sapiens
aattagctataaata

SEQ ID NO: 266858 - DNA, 15 bp, Homo sapiens
aaattagctataaat

SEQ ID NO: 266859 - DNA, 15 bp, Homo sapiens
aaaattagctataaa

SEQ ID NO: 266860 - DNA, 15 bp, Homo sapiens
taaaattagctataa

SEQ ID NO: 266861 - DNA, 15 bp, Homo sapiens
ctaaaattagctata

SEQ ID NO: 266862 - DNA, 15 bp, Homo sapiens
gctaaaattagctat

SEQ ID NO: 266863 - DNA, 15 bp, Homo sapiens
agctaaaattagcta

SEQ ID NO: 266864 - DNA, 15 bp, Homo sapiens
tagctaaaattagct

SEQ ID NO: 266865 - DNA, 15 bp, Homo sapiens
atagctaaaattagc

SEQ ID NO: 266866 - DNA, 15 bp, Homo sapiens
gatagctaaaattag

SEQ ID NO: 266867 - DNA, 15 bp, Homo sapiens
agatagctaaaatta

SEQ ID NO: 266868 - DNA, 15 bp, Homo sapiens
cagatagctaaaatt

SEQ ID NO: 266869 - DNA, 15 bp, Homo sapiens
acagatagctaaaat

SEQ ID NO: 266870 - DNA, 15 bp, Homo sapiens
tacagatagctaaaa

SEQ ID NO: 266871 - DNA, 15 bp, Homo sapiens
ttacagatagctaaa

SEQ ID NO: 266872 - DNA, 15 bp, Homo sapiens
gttacagatagctaa

SEQ ID NO: 266873 - DNA, 15 bp, Homo sapiens
ggttacagatagcta

SEQ ID NO: 266874 - DNA, 15 bp, Homo sapiens
tggttacagatagct

SEQ ID NO: 266875 - DNA, 15 bp, Homo sapiens
ttggttacagatagc

SEQ ID NO: 266876 - DNA, 15 bp, Homo sapiens
cttggttacagatag

SEQ ID NO: 266877 - DNA, 15 bp, Homo sapiens
tcttggttacagata

SEQ ID NO: 266878 - DNA, 15 bp, Homo sapiens
atcttggttacagat

SEQ ID NO: 266879 - DNA, 15 bp, Homo sapiens
catcttggttacaga

SEQ ID NO: 266880 - DNA, 15 bp, Homo sapiens
ccatcttggttacag

SEQ ID NO: 266881 - DNA, 15 bp, Homo sapiens
tccatcttggttaca

SEQ ID NO: 266882 - DNA, 15 bp, Homo sapiens
atccatcttggttac

SEQ ID NO: 266883 - DNA, 15 bp, Homo sapiens
catccatcttggtta

SEQ ID NO: 266884 - DNA, 15 bp, Homo sapiens
gcatccatcttggtt

SEQ ID NO: 266885 - DNA, 15 bp, Homo sapiens
tgcatccatcttggt

SEQ ID NO: 266886 - DNA, 15 bp, Homo sapiens
ttgcatccatcttgg

SEQ ID NO: 266887 - DNA, 15 bp, Homo sapiens
tttgcatccatcttg

SEQ ID NO: 266888 - DNA, 15 bp, Homo sapiens
ctttgcatccatctt

SEQ ID NO: 266889 - DNA, 15 bp, Homo sapiens
tctttgcatccatct

SEQ ID NO: 266890 - DNA, 15 bp, Homo sapiens
ctctttgcatccatc

SEQ ID NO: 266891 - DNA, 15 bp, Homo sapiens
cctctttgcatccat

SEQ ID NO: 266892 - DNA, 15 bp, Homo sapiens
gcctctttgcatcca

SEQ ID NO: 266893 - DNA, 15 bp, Homo sapiens
agcctctttgcatcc

SEQ ID NO: 266894 - DNA, 15 bp, Homo sapiens
tagcctctttgcatc

SEQ ID NO: 266895 - DNA, 15 bp, Homo sapiens
ctagcctctttgcat

SEQ ID NO: 266896 - DNA, 15 bp, Homo sapiens
actagcctctttgca

SEQ ID NO: 266897 - DNA, 15 bp, Homo sapiens
cactagcctctttgc

SEQ ID NO: 266898 - DNA, 15 bp, Homo sapiens
gcactagcctctttg

SEQ ID NO: 266899 - DNA, 15 bp, Homo sapiens
ggcactagcctcttt

SEQ ID NO: 266900 - DNA, 15 bp, Homo sapiens
aggcactagcctctt

SEQ ID NO: 266901 - DNA, 15 bp, Homo sapiens
gaggcactagcctct

SEQ ID NO: 266902 - DNA, 15 bp, Homo sapiens
tgaggcactagcctc

SEQ ID NO: 266903 - DNA, 15 bp, Homo sapiens
ctgaggcactagcct

SEQ ID NO: 266904 - DNA, 15 bp, Homo sapiens
tctgaggcactagcc

SEQ ID NO: 266905 - DNA, 15 bp, Homo sapiens
ctctgaggcactagc

SEQ ID NO: 266906 - DNA, 15 bp, Homo sapiens
tctctgaggcactag

SEQ ID NO: 266907 - DNA, 15 bp, Homo sapiens
ctctctgaggcacta

SEQ ID NO: 266908 - DNA, 15 bp, Homo sapiens
tctctctgaggcact

SEQ ID NO: 266909 - DNA, 15 bp, Homo sapiens
ttctctctgaggcac

SEQ ID NO: 266910 - DNA, 15 bp, Homo sapiens
gttctctctgaggca

SEQ ID NO: 266911 - DNA, 15 bp, Homo sapiens
agttctctctgaggc

SEQ ID NO: 266912 - DNA, 15 bp, Homo sapiens
cagttctctctgagg

SEQ ID NO: 266913 - DNA, 15 bp, Homo sapiens
acagttctctctgag

SEQ ID NO: 266914 - DNA, 15 bp, Homo sapiens
tacagttctctctga

SEQ ID NO: 266915 - DNA, 15 bp, Homo sapiens
gtacagttctctctg

SEQ ID NO: 266916 - DNA, 15 bp, Homo sapiens
cgtacagttctctct

SEQ ID NO: 266917 - DNA, 15 bp, Homo sapiens
ccgtacagttctctc

SEQ ID NO: 266918 - DNA, 15 bp, Homo sapiens
cccgtacagttctct

SEQ ID NO: 266919 - DNA, 15 bp, Homo sapiens
ccccgtacagttctc

SEQ ID NO: 266920 - DNA, 15 bp, Homo sapiens
accccgtacagttct

SEQ ID NO: 266921 - DNA, 15 bp, Homo sapiens
aaccccgtacagttc

SEQ ID NO: 266922 - DNA, 15 bp, Homo sapiens
aaaccccgtacagtt

SEQ ID NO: 266923 - DNA, 15 bp, Homo sapiens
caaaccccgtacagt

SEQ ID NO: 266924 - DNA, 15 bp, Homo sapiens
acaaaccccgtacag

SEQ ID NO: 266925 - DNA, 15 bp, Homo sapiens
cacaaaccccgtaca

SEQ ID NO: 266926 - DNA, 15 bp, Homo sapiens
tcacaaaccccgtac

SEQ ID NO: 266927 - DNA, 15 bp, Homo sapiens
gtcacaaaccccgta

SEQ ID NO: 266928 - DNA, 15 bp, Homo sapiens
agtcacaaaccccgt

SEQ ID NO: 266929 - DNA, 15 bp, Homo sapiens
cagtcacaaaccccg

SEQ ID NO: 266930 - DNA, 15 bp, Homo sapiens
ccagtcacaaacccc

SEQ ID NO: 266931 - DNA, 15 bp, Homo sapiens
tccagtcacaaaccc

SEQ ID NO: 266932 - DNA, 15 bp, Homo sapiens
ttccagtcacaaacc

SEQ ID NO: 266933 - DNA, 15 bp, Homo sapiens
tttccagtcacaaac

SEQ ID NO: 266934 - DNA, 15 bp, Homo sapiens
ttttccagtcacaaa

SEQ ID NO: 266935 - DNA, 15 bp, Homo sapiens
tttttccagtcacaa

SEQ ID NO: 266936 - DNA, 15 bp, Homo sapiens
ctttttccagtcaca

SEQ ID NO: 266937 - DNA, 15 bp, Homo sapiens
actttttccagtcac

SEQ ID NO: 266938 - DNA, 15 bp, Homo sapiens
aactttttccagtca

SEQ ID NO: 266939 - DNA, 15 bp, Homo sapiens
taactttttccagtc

SEQ ID NO: 266940 - DNA, 15 bp, Homo sapiens
gtaactttttccagt

SEQ ID NO: 266941 - DNA, 15 bp, Homo sapiens
cgtaactttttccag

SEQ ID NO: 266942 - DNA, 15 bp, Homo sapiens
acgtaactttttcca

SEQ ID NO: 266943 - DNA, 15 bp, Homo sapiens
aacgtaactttttcc

SEQ ID NO: 266944 - DNA, 15 bp, Homo sapiens
gaacgtaactttttc

SEQ ID NO: 266945 - DNA, 15 bp, Homo sapiens
ggaacgtaacttttt

SEQ ID NO: 266946 - DNA, 15 bp, Homo sapiens
gggaacgtaactttt

SEQ ID NO: 266947 - DNA, 15 bp, Homo sapiens
tgggaacgtaacttt

SEQ ID NO: 266948 - DNA, 15 bp, Homo sapiens
atgggaacgtaactt

SEQ ID NO: 266949 - DNA, 15 bp, Homo sapiens
aatgggaacgtaact

SEQ ID NO: 266950 - DNA, 15 bp, Homo sapiens
gaatgggaacgtaac

SEQ ID NO: 266951 - DNA, 15 bp, Homo sapiens
agaatgggaacgtaa

SEQ ID NO: 266952 - DNA, 15 bp, Homo sapiens
tagaatgggaacgta

SEQ ID NO: 266953 - DNA, 15 bp, Homo sapiens
ttagaatgggaacgt

SEQ ID NO: 266954 - DNA, 15 bp, Homo sapiens
attagaatgggaacg

SEQ ID NO: 266955 - DNA, 15 bp, Homo sapiens
aattagaatgggaac

SEQ ID NO: 266956 - DNA, 15 bp, Homo sapiens
taattagaatgggaa

SEQ ID NO: 266957 - DNA, 15 bp, Homo sapiens
ttaattagaatggga

SEQ ID NO: 266958 - DNA, 15 bp, Homo sapiens
attaattagaatggg

SEQ ID NO: 266959 - DNA, 15 bp, Homo sapiens
cattaattagaatgg

SEQ ID NO: 266960 - DNA, 15 bp, Homo sapiens
gcattaattagaatg

SEQ ID NO: 266961 - DNA, 15 bp, Homo sapiens
ggcattaattagaat

SEQ ID NO: 266962 - DNA, 15 bp, Homo sapiens
gggcattaattagaa

SEQ ID NO: 266963 - DNA, 15 bp, Homo sapiens
agggcattaattaga

SEQ ID NO: 266964 - DNA, 15 bp, Homo sapiens
aagggcattaattag

SEQ ID NO: 266965 - DNA, 15 bp, Homo sapiens
aaagggcattaatta

SEQ ID NO: 266966 - DNA, 15 bp, Homo sapiens
gaaagggcattaatt

SEQ ID NO: 266967 - DNA, 15 bp, Homo sapiens
agaaagggcattaat

SEQ ID NO: 266968 - DNA, 15 bp, Homo sapiens
aagaaagggcattaa

SEQ ID NO: 266969 - DNA, 15 bp, Homo sapiens
taagaaagggcatta

SEQ ID NO: 266970 - DNA, 15 bp, Homo sapiens
ataagaaagggcatt

SEQ ID NO: 266971 - DNA, 15 bp, Homo sapiens
aataagaaagggcat

SEQ ID NO: 266972 - DNA, 15 bp, Homo sapiens
aaataagaaagggca

SEQ ID NO: 266973 - DNA, 15 bp, Homo sapiens
taaataagaaagggc

SEQ ID NO: 266974 - DNA, 15 bp, Homo sapiens
ttaaataagaaaggg

SEQ ID NO: 266975 - DNA, 15 bp, Homo sapiens
tttaaataagaaagg

SEQ ID NO: 266976 - DNA, 15 bp, Homo sapiens
ttttaaataagaaag

SEQ ID NO: 266977 - DNA, 15 bp, Homo sapiens
tttttaaataagaaa

SEQ ID NO: 266978 - DNA, 15 bp, Homo sapiens
gtttttaaataagaa

SEQ ID NO: 266979 - DNA, 15 bp, Homo sapiens
tgtttttaaataaga

SEQ ID NO: 266980 - DNA, 15 bp, Homo sapiens
ttgtttttaaataag

SEQ ID NO: 266981 - DNA, 15 bp, Homo sapiens
tttgtttttaaataa

SEQ ID NO: 266982 - DNA, 15 bp, Homo sapiens
ttttgtttttaaata

SEQ ID NO: 266983 - DNA, 15 bp, Homo sapiens
gttttgtttttaaat

SEQ ID NO: 266984 - DNA, 15 bp, Homo sapiens
ggttttgtttttaaa

SEQ ID NO: 266985 - DNA, 15 bp, Homo sapiens
tggttttgtttttaa

SEQ ID NO: 266986 - DNA, 15 bp, Homo sapiens
ttggttttgttttta

SEQ ID NO: 266987 - DNA, 15 bp, Homo sapiens
tttggttttgttttt

SEQ ID NO: 266988 - DNA, 15 bp, Homo sapiens
atttggttttgtttt

SEQ ID NO: 266989 - DNA, 15 bp, Homo sapiens
catttggttttgttt

SEQ ID NO: 266990 - DNA, 15 bp, Homo sapiens
tcatttggttttgtt

SEQ ID NO: 266991 - DNA, 15 bp, Homo sapiens
atcatttggttttgt

SEQ ID NO: 266992 - DNA, 15 bp, Homo sapiens
tatcatttggttttg

SEQ ID NO: 266993 - DNA, 15 bp, Homo sapiens
atatcatttggtttt

SEQ ID NO: 266994 - DNA, 15 bp, Homo sapiens
gatatcatttggttt

SEQ ID NO: 266995 - DNA, 15 bp, Homo sapiens
agatatcatttggtt

SEQ ID NO: 266996 - DNA, 15 bp, Homo sapiens
tagatatcatttggt

SEQ ID NO: 266997 - DNA, 15 bp, Homo sapiens
ttagatatcatttgg

SEQ ID NO: 266998 - DNA, 15 bp, Homo sapiens
cttagatatcatttg

SEQ ID NO: 266999 - DNA, 15 bp, Homo sapiens
acttagatatcattt

SEQ ID NO: 267000 - DNA, 15 bp, Homo sapiens
tacttagatatcatt

SEQ ID NO: 267001 - DNA, 15 bp, Homo sapiens
ctacttagatatcat

SEQ ID NO: 267002 - DNA, 15 bp, Homo sapiens
actacttagatatca

SEQ ID NO: 267003 - DNA, 15 bp, Homo sapiens
aactacttagatatc

SEQ ID NO: 267004 - DNA, 15 bp, Homo sapiens
gaactacttagatat

SEQ ID NO: 267005 - DNA, 15 bp, Homo sapiens
agaactacttagata

SEQ ID NO: 267006 - DNA, 15 bp, Homo sapiens
gagaactacttagat

SEQ ID NO: 267007 - DNA, 15 bp, Homo sapiens
tgagaactacttaga

SEQ ID NO: 267008 - DNA, 15 bp, Homo sapiens
ctgagaactacttag

SEQ ID NO: 267009 - DNA, 15 bp, Homo sapiens
gctgagaactactta

SEQ ID NO: 267010 - DNA, 15 bp, Homo sapiens
tgctgagaactactt

SEQ ID NO: 267011 - DNA, 15 bp, Homo sapiens
ttgctgagaactact

SEQ ID NO: 267012 - DNA, 15 bp, Homo sapiens
attgctgagaactac

SEQ ID NO: 267013 - DNA, 15 bp, Homo sapiens
tattgctgagaacta

SEQ ID NO: 267014 - DNA, 15 bp, Homo sapiens
ttattgctgagaact

SEQ ID NO: 267015 - DNA, 15 bp, Homo sapiens
attattgctgagaac

SEQ ID NO: 267016 - DNA, 15 bp, Homo sapiens
tattattgctgagaa

SEQ ID NO: 267017 - DNA, 15 bp, Homo sapiens
ttattattgctgaga

SEQ ID NO: 267018 - DNA, 15 bp, Homo sapiens
attattattgctgag

SEQ ID NO: 267019 - DNA, 15 bp, Homo sapiens
tattattattgctga

SEQ ID NO: 267020 - DNA, 15 bp, Homo sapiens
ttattattattgctg

SEQ ID NO: 267021 - DNA, 15 bp, Homo sapiens
attattattattgct

SEQ ID NO: 267022 - DNA, 15 bp, Homo sapiens
cattattattattgc

SEQ ID NO: 267023 - DNA, 15 bp, Homo sapiens
tcattattattattg

SEQ ID NO: 267024 - DNA, 15 bp, Homo sapiens
gtcattattattatt

SEQ ID NO: 267025 - DNA, 15 bp, Homo sapiens
cgtcattattattat

SEQ ID NO: 267026 - DNA, 15 bp, Homo sapiens
tcgtcattattatta

SEQ ID NO: 267027 - DNA, 15 bp, Homo sapiens
atcgtcattattatt

SEQ ID NO: 267028 - DNA, 15 bp, Homo sapiens
tatcgtcattattat

SEQ ID NO: 267029 - DNA, 15 bp, Homo sapiens
ttatcgtcattatta

SEQ ID NO: 267030 - DNA, 15 bp, Homo sapiens
attatcgtcattatt

SEQ ID NO: 267031 - DNA, 15 bp, Homo sapiens
tattatcgtcattat

SEQ ID NO: 267032 - DNA, 15 bp, Homo sapiens
gtattatcgtcatta

SEQ ID NO: 267033 - DNA, 15 bp, Homo sapiens
agtattatcgtcatt

SEQ ID NO: 267034 - DNA, 15 bp, Homo sapiens
aagtattatcgtcat

SEQ ID NO: 267035 - DNA, 15 bp, Homo sapiens
gaagtattatcgtca

SEQ ID NO: 267036 - DNA, 15 bp, Homo sapiens
agaagtattatcgtc

SEQ ID NO: 267037 - DNA, 15 bp, Homo sapiens
aagaagtattatcgt

SEQ ID NO: 267038 - DNA, 15 bp, Homo sapiens
aaagaagtattatcg

SEQ ID NO: 267039 - DNA, 15 bp, Homo sapiens
aaaagaagtattatc

SEQ ID NO: 267040 - DNA, 15 bp, Homo sapiens
gaaaagaagtattat

SEQ ID NO: 267041 - DNA, 15 bp, Homo sapiens
ggaaaagaagtatta

SEQ ID NO: 267042 - DNA, 15 bp, Homo sapiens
tggaaaagaagtatt

SEQ ID NO: 267043 - DNA, 15 bp, Homo sapiens
gtggaaaagaagtat

SEQ ID NO: 267044 - DNA, 15 bp, Homo sapiens
tgtggaaaagaagta

SEQ ID NO: 267045 - DNA, 15 bp, Homo sapiens
atgtggaaaagaagt

SEQ ID NO: 267046 - DNA, 15 bp, Homo sapiens
gatgtggaaaagaag

SEQ ID NO: 267047 - DNA, 15 bp, Homo sapiens
agatgtggaaaagaa

SEQ ID NO: 267048 - DNA, 15 bp, Homo sapiens
gagatgtggaaaaga

SEQ ID NO: 267049 - DNA, 15 bp, Homo sapiens
tgagatgtggaaaag

SEQ ID NO: 267050 - DNA, 15 bp, Homo sapiens
atgagatgtggaaaa

SEQ ID NO: 267051 - DNA, 15 bp, Homo sapiens
aatgagatgtggaaa

SEQ ID NO: 267052 - DNA, 15 bp, Homo sapiens
caatgagatgtggaa

SEQ ID NO: 267053 - DNA, 15 bp, Homo sapiens
acaatgagatgtgga

SEQ ID NO: 267054 - DNA, 15 bp, Homo sapiens
gacaatgagatgtgg

SEQ ID NO: 267055 - DNA, 15 bp, Homo sapiens
tgacaatgagatgtg

SEQ ID NO: 267056 - DNA, 15 bp, Homo sapiens
gtgacaatgagatgt

SEQ ID NO: 267057 - DNA, 15 bp, Homo sapiens
agtgacaatgagatg

SEQ ID NO: 267058 - DNA, 15 bp, Homo sapiens
cagtgacaatgagat

SEQ ID NO: 267059 - DNA, 15 bp, Homo sapiens
tcagtgacaatgaga

SEQ ID NO: 267060 - DNA, 15 bp, Homo sapiens
gtcagtgacaatgag

SEQ ID NO: 267061 - DNA, 15 bp, Homo sapiens
tgtcagtgacaatga

SEQ ID NO: 267062 - DNA, 15 bp, Homo sapiens
atgtcagtgacaatg

SEQ ID NO: 267063 - DNA, 15 bp, Homo sapiens
aatgtcagtgacaat

SEQ ID NO: 267064 - DNA, 15 bp, Homo sapiens
aaatgtcagtgacaa

SEQ ID NO: 267065 - DNA, 15 bp, Homo sapiens
taaatgtcagtgaca

SEQ ID NO: 267066 - DNA, 15 bp, Homo sapiens
ttaaatgtcagtgac

SEQ ID NO: 267067 - DNA, 15 bp, Homo sapiens
attaaatgtcagtga

SEQ ID NO: 267068 - DNA, 15 bp, Homo sapiens
cattaaatgtcagtg

SEQ ID NO: 267069 - DNA, 15 bp, Homo sapiens
ccattaaatgtcagt

SEQ ID NO: 267070 - DNA, 15 bp, Homo sapiens
accattaaatgtcag

SEQ ID NO: 267071 - DNA, 15 bp, Homo sapiens
taccattaaatgtca

SEQ ID NO: 267072 - DNA, 15 bp, Homo sapiens
gtaccattaaatgtc

SEQ ID NO: 267073 - DNA, 15 bp, Homo sapiens
agtaccattaaatgt

SEQ ID NO: 267074 - DNA, 15 bp, Homo sapiens
cagtaccattaaatg

SEQ ID NO: 267075 - DNA, 15 bp, Homo sapiens
acagtaccattaaat

SEQ ID NO: 267076 - DNA, 15 bp, Homo sapiens
tacagtaccattaaa

SEQ ID NO: 267077 - DNA, 15 bp, Homo sapiens
atacagtaccattaa

SEQ ID NO: 267078 - DNA, 15 bp, Homo sapiens
tatacagtaccatta

SEQ ID NO: 267079 - DNA, 15 bp, Homo sapiens
atatacagtaccatt

SEQ ID NO: 267080 - DNA, 15 bp, Homo sapiens
aatatacagtaccat

SEQ ID NO: 267081 - DNA, 15 bp, Homo sapiens
taatatacagtacca

SEQ ID NO: 267082 - DNA, 15 bp, Homo sapiens
gtaatatacagtacc

SEQ ID NO: 267083 - DNA, 15 bp, Homo sapiens
agtaatatacagtac

SEQ ID NO: 267084 - DNA, 15 bp, Homo sapiens
aagtaatatacagta

SEQ ID NO: 267085 - DNA, 15 bp, Homo sapiens
taagtaatatacagt

SEQ ID NO: 267086 - DNA, 15 bp, Homo sapiens
ttaagtaatatacag

SEQ ID NO: 267087 - DNA, 15 bp, Homo sapiens
attaagtaatataca

SEQ ID NO: 267088 - DNA, 15 bp, Homo sapiens
aattaagtaatatac

SEQ ID NO: 267089 - DNA, 15 bp, Homo sapiens
aaattaagtaatata

SEQ ID NO: 267090 - DNA, 15 bp, Homo sapiens
taaattaagtaatat

SEQ ID NO: 267091 - DNA, 15 bp, Homo sapiens
ataaattaagtaata

SEQ ID NO: 267092 - DNA, 15 bp, Homo sapiens
aataaattaagtaat

SEQ ID NO: 267093 - DNA, 15 bp, Homo sapiens
caataaattaagtaa

SEQ ID NO: 267094 - DNA, 15 bp, Homo sapiens
tcaataaattaagta

SEQ ID NO: 267095 - DNA, 15 bp, Homo sapiens
ttcaataaattaagt

SEQ ID NO: 267096 - DNA, 15 bp, Homo sapiens
cttcaataaattaag

SEQ ID NO: 267097 - DNA, 15 bp, Homo sapiens
tcttcaataaattaa

SEQ ID NO: 267098 - DNA, 15 bp, Homo sapiens
atcttcaataaatta

SEQ ID NO: 267099 - DNA, 15 bp, Homo sapiens
aatcttcaataaatt

SEQ ID NO: 267100 - DNA, 15 bp, Homo sapiens
taatcttcaataaat

SEQ ID NO: 267101 - DNA, 15 bp, Homo sapiens
ataatcttcaataaa

SEQ ID NO: 267102 - DNA, 15 bp, Homo sapiens
aataatcttcaataa

SEQ ID NO: 267103 - DNA, 15 bp, Homo sapiens
taataatcttcaata

SEQ ID NO: 267104 - DNA, 15 bp, Homo sapiens
ataataatcttcaat

SEQ ID NO: 267105 - DNA, 15 bp, Homo sapiens
aataataatcttcaa

SEQ ID NO: 267106 - DNA, 15 bp, Homo sapiens
aaataataatcttca

SEQ ID NO: 267107 - DNA, 15 bp, Homo sapiens
taaataataatcttc

SEQ ID NO: 267108 - DNA, 15 bp, Homo sapiens
ataaataataatctt

SEQ ID NO: 267109 - DNA, 15 bp, Homo sapiens
cataaataataatct

SEQ ID NO: 267110 - DNA, 15 bp, Homo sapiens
acataaataataatc

SEQ ID NO: 267111 - DNA, 15 bp, Homo sapiens
gacataaataataat

SEQ ID NO: 267112 - DNA, 15 bp, Homo sapiens
agacataaataataa

SEQ ID NO: 267113 - DNA, 15 bp, Homo sapiens
aagacataaataata

SEQ ID NO: 267114 - DNA, 15 bp, Homo sapiens
taagacataaataat

SEQ ID NO: 267115 - DNA, 15 bp, Homo sapiens
ataagacataaataa

SEQ ID NO: 267116 - DNA, 15 bp, Homo sapiens
aataagacataaata

SEQ ID NO: 267117 - DNA, 15 bp, Homo sapiens
taataagacataaat

SEQ ID NO: 267118 - DNA, 15 bp, Homo sapiens
ctaataagacataaa

SEQ ID NO: 267119 - DNA, 15 bp, Homo sapiens
cctaataagacataa

SEQ ID NO: 267120 - DNA, 15 bp, Homo sapiens
tcctaataagacata

SEQ ID NO: 267121 - DNA, 15 bp, Homo sapiens
gtcctaataagacat

SEQ ID NO: 267122 - DNA, 15 bp, Homo sapiens
tgtcctaataagaca

SEQ ID NO: 267123 - DNA, 15 bp, Homo sapiens
gtgtcctaataagac

SEQ ID NO: 267124 - DNA, 15 bp, Homo sapiens
agtgtcctaataaga

SEQ ID NO: 267125 - DNA, 15 bp, Homo sapiens
tagtgtcctaataag

SEQ ID NO: 267126 - DNA, 15 bp, Homo sapiens
atagtgtcctaataa

SEQ ID NO: 267127 - DNA, 15 bp, Homo sapiens
catagtgtcctaata

SEQ ID NO: 267128 - DNA, 15 bp, Homo sapiens
ccatagtgtcctaat

SEQ ID NO: 267129 - DNA, 15 bp, Homo sapiens
accatagtgtcctaa

SEQ ID NO: 267130 - DNA, 15 bp, Homo sapiens
aaccatagtgtccta

SEQ ID NO: 267131 - DNA, 15 bp, Homo sapiens
taaccatagtgtcct

SEQ ID NO: 267132 - DNA, 15 bp, Homo sapiens
ataaccatagtgtcc

SEQ ID NO: 267133 - DNA, 15 bp, Homo sapiens
tataaccatagtgtc

SEQ ID NO: 267134 - DNA, 15 bp, Homo sapiens
ttataaccatagtgt

SEQ ID NO: 267135 - DNA, 15 bp, Homo sapiens
tttataaccatagtg

SEQ ID NO: 267136 - DNA, 15 bp, Homo sapiens
gtttataaccatagt

SEQ ID NO: 267137 - DNA, 15 bp, Homo sapiens
agtttataaccatag

SEQ ID NO: 267138 - DNA, 15 bp, Homo sapiens
cagtttataaccata

SEQ ID NO: 267139 - DNA, 15 bp, Homo sapiens
acagtttataaccat

SEQ ID NO: 267140 - DNA, 15 bp, Homo sapiens
cacagtttataacca

SEQ ID NO: 267141 - DNA, 15 bp, Homo sapiens
acacagtttataacc

SEQ ID NO: 267142 - DNA, 15 bp, Homo sapiens
aacacagtttataac

SEQ ID NO: 267143 - DNA, 15 bp, Homo sapiens
aaacacagtttataa

SEQ ID NO: 267144 - DNA, 15 bp, Homo sapiens
taaacacagtttata

SEQ ID NO: 267145 - DNA, 15 bp, Homo sapiens
ttaaacacagtttat

SEQ ID NO: 267146 - DNA, 15 bp, Homo sapiens
cttaaacacagttta

SEQ ID NO: 267147 - DNA, 15 bp, Homo sapiens
gcttaaacacagttt

SEQ ID NO: 267148 - DNA, 15 bp, Homo sapiens
ggcttaaacacagtt

SEQ ID NO: 267149 - DNA, 15 bp, Homo sapiens
aggcttaaacacagt

SEQ ID NO: 267150 - DNA, 15 bp, Homo sapiens
taggcttaaacacag

SEQ ID NO: 267151 - DNA, 15 bp, Homo sapiens
gtaggcttaaacaca

SEQ ID NO: 267152 - DNA, 15 bp, Homo sapiens
tgtaggcttaaacac

SEQ ID NO: 267153 - DNA, 15 bp, Homo sapiens
ttgtaggcttaaaca

SEQ ID NO: 267154 - DNA, 15 bp, Homo sapiens
attgtaggcttaaac

SEQ ID NO: 267155 - DNA, 15 bp, Homo sapiens
gattgtaggcttaaa

SEQ ID NO: 267156 - DNA, 15 bp, Homo sapiens
tgattgtaggcttaa

SEQ ID NO: 267157 - DNA, 15 bp, Homo sapiens
atgattgtaggctta

SEQ ID NO: 267158 - DNA, 15 bp, Homo sapiens
aatgattgtaggctt

SEQ ID NO: 267159 - DNA, 15 bp, Homo sapiens
caatgattgtaggct

SEQ ID NO: 267160 - DNA, 15 bp, Homo sapiens
tcaatgattgtaggc

SEQ ID NO: 267161 - DNA, 15 bp, Homo sapiens
atcaatgattgtagg

SEQ ID NO: 267162 - DNA, 15 bp, Homo sapiens
aatcaatgattgtag

SEQ ID NO: 267163 - DNA, 15 bp, Homo sapiens
aaatcaatgattgta

SEQ ID NO: 267164 - DNA, 15 bp, Homo sapiens
aaaatcaatgattgt

SEQ ID NO: 267165 - DNA, 15 bp, Homo sapiens
aaaaatcaatgattg

SEQ ID NO: 267166 - DNA, 15 bp, Homo sapiens
aaaaaatcaatgatt

SEQ ID NO: 267167 - DNA, 15 bp, Homo sapiens
aaaaaaatcaatgat

SEQ ID NO: 267168 - DNA, 15 bp, Homo sapiens
aaaaaaaatcaatga

SEQ ID NO: 267169 - DNA, 15 bp, Homo sapiens
aaaaaaaaatcaatg

SEQ ID NO: 267170 - DNA, 15 bp, Homo sapiens
caaaaaaaaatcaat

SEQ ID NO: 267171 - DNA, 15 bp, Homo sapiens
acaaaaaaaaatcaa

SEQ ID NO: 267172 - DNA, 15 bp, Homo sapiens
aacaaaaaaaaatca

SEQ ID NO: 267173 - DNA, 15 bp, Homo sapiens
taacaaaaaaaaatc

SEQ ID NO: 267174 - DNA, 15 bp, Homo sapiens
ataacaaaaaaaaat

SEQ ID NO: 267175 - DNA, 15 bp, Homo sapiens
cataacaaaaaaaaa

SEQ ID NO: 267176 - DNA, 15 bp, Homo sapiens
acataacaaaaaaaa

SEQ ID NO: 267177 - DNA, 15 bp, Homo sapiens
gacataacaaaaaaa

SEQ ID NO: 267178 - DNA, 15 bp, Homo sapiens
tgacataacaaaaaa

SEQ ID NO: 267179 - DNA, 15 bp, Homo sapiens
gtgacataacaaaaa

SEQ ID NO: 267180 - DNA, 15 bp, Homo sapiens
tgtgacataacaaaa

SEQ ID NO: 267181 - DNA, 15 bp, Homo sapiens
ttgtgacataacaaa

SEQ ID NO: 267182 - DNA, 15 bp, Homo sapiens
attgtgacataacaa

SEQ ID NO: 267183 - DNA, 15 bp, Homo sapiens
gattgtgacataaca

SEQ ID NO: 267184 - DNA, 15 bp, Homo sapiens
tgattgtgacataac

SEQ ID NO: 267185 - DNA, 15 bp, Homo sapiens
ctgattgtgacataa

SEQ ID NO: 267186 - DNA, 15 bp, Homo sapiens
actgattgtgacata

SEQ ID NO: 267187 - DNA, 15 bp, Homo sapiens
tactgattgtgacat

SEQ ID NO: 267188 - DNA, 15 bp, Homo sapiens
atactgattgtgaca

SEQ ID NO: 267189 - DNA, 15 bp, Homo sapiens
tatactgattgtgac

SEQ ID NO: 267190 - DNA, 15 bp, Homo sapiens
atatactgattgtga

SEQ ID NO: 267191 - DNA, 15 bp, Homo sapiens
gatatactgattgtg

SEQ ID NO: 267192 - DNA, 15 bp, Homo sapiens
agatatactgattgt

SEQ ID NO: 267193 - DNA, 15 bp, Homo sapiens
aagatatactgattg

SEQ ID NO: 267194 - DNA, 15 bp, Homo sapiens
gaagatatactgatt

SEQ ID NO: 267195 - DNA, 15 bp, Homo sapiens
agaagatatactgat

SEQ ID NO: 267196 - DNA, 15 bp, Homo sapiens
aagaagatatactga

SEQ ID NO: 267197 - DNA, 15 bp, Homo sapiens
aaagaagatatactg

SEQ ID NO: 267198 - DNA, 15 bp, Homo sapiens
caaagaagatatact

SEQ ID NO: 267199 - DNA, 15 bp, Homo sapiens
ccaaagaagatatac

SEQ ID NO: 267200 - DNA, 15 bp, Homo sapiens
cccaaagaagatata

SEQ ID NO: 267201 - DNA, 15 bp, Homo sapiens
ccccaaagaagatat

SEQ ID NO: 267202 - DNA, 15 bp, Homo sapiens
accccaaagaagata

SEQ ID NO: 267203 - DNA, 15 bp, Homo sapiens
aaccccaaagaagat

SEQ ID NO: 267204 - DNA, 15 bp, Homo sapiens
taaccccaaagaaga

SEQ ID NO: 267205 - DNA, 15 bp, Homo sapiens
gtaaccccaaagaag

SEQ ID NO: 267206 - DNA, 15 bp, Homo sapiens
ggtaaccccaaagaa

SEQ ID NO: 267207 - DNA, 15 bp, Homo sapiens
aggtaaccccaaaga

SEQ ID NO: 267208 - DNA, 15 bp, Homo sapiens
gaggtaaccccaaag

SEQ ID NO: 267209 - DNA, 15 bp, Homo sapiens
agaggtaaccccaaa

SEQ ID NO: 267210 - DNA, 15 bp, Homo sapiens
gagaggtaaccccaa

SEQ ID NO: 267211 - DNA, 15 bp, Homo sapiens
agagaggtaacccca

SEQ ID NO: 267212 - DNA, 15 bp, Homo sapiens
cagagaggtaacccc

SEQ ID NO: 267213 - DNA, 15 bp, Homo sapiens
tcagagaggtaaccc

SEQ ID NO: 267214 - DNA, 15 bp, Homo sapiens
ttcagagaggtaacc

SEQ ID NO: 267215 - DNA, 15 bp, Homo sapiens
attcagagaggtaac

SEQ ID NO: 267216 - DNA, 15 bp, Homo sapiens
tattcagagaggtaa

SEQ ID NO: 267217 - DNA, 15 bp, Homo sapiens
atattcagagaggta

SEQ ID NO: 267218 - DNA, 15 bp, Homo sapiens
aatattcagagaggt

SEQ ID NO: 267219 - DNA, 15 bp, Homo sapiens
taatattcagagagg

SEQ ID NO: 267220 - DNA, 15 bp, Homo sapiens
ataatattcagagag

SEQ ID NO: 267221 - DNA, 15 bp, Homo sapiens
cataatattcagaga

SEQ ID NO: 267222 - DNA, 15 bp, Homo sapiens
acataatattcagag

SEQ ID NO: 267223 - DNA, 15 bp, Homo sapiens
tacataatattcaga

SEQ ID NO: 267224 - DNA, 15 bp, Homo sapiens
ttacataatattcag

SEQ ID NO: 267225 - DNA, 15 bp, Homo sapiens
tttacataatattca

SEQ ID NO: 267226 - DNA, 15 bp, Homo sapiens
gtttacataatattc

SEQ ID NO: 267227 - DNA, 15 bp, Homo sapiens
tgtttacataatatt

SEQ ID NO: 267228 - DNA, 15 bp, Homo sapiens
ttgtttacataatat

SEQ ID NO: 267229 - DNA, 15 bp, Homo sapiens
attgtttacataata

SEQ ID NO: 267230 - DNA, 15 bp, Homo sapiens
gattgtttacataat

SEQ ID NO: 267231 - DNA, 15 bp, Homo sapiens
ggattgtttacataa

SEQ ID NO: 267232 - DNA, 15 bp, Homo sapiens
tggattgtttacata

SEQ ID NO: 267233 - DNA, 15 bp, Homo sapiens
ttggattgtttacat

SEQ ID NO: 267234 - DNA, 15 bp, Homo sapiens
tttggattgtttaca

SEQ ID NO: 267235 - DNA, 15 bp, Homo sapiens
ctttggattgtttac

SEQ ID NO: 267236 - DNA, 15 bp, Homo sapiens
tctttggattgttta

SEQ ID NO: 267237 - DNA, 15 bp, Homo sapiens
ttctttggattgttt

SEQ ID NO: 267238 - DNA, 15 bp, Homo sapiens
tttctttggattgtt

SEQ ID NO: 267239 - DNA, 15 bp, Homo sapiens
atttctttggattgt

SEQ ID NO: 267240 - DNA, 15 bp, Homo sapiens
catttctttggattg

SEQ ID NO: 267241 - DNA, 15 bp, Homo sapiens
tcatttctttggatt

SEQ ID NO: 267242 - DNA, 15 bp, Homo sapiens
atcatttctttggat

SEQ ID NO: 267243 - DNA, 15 bp, Homo sapiens
aatcatttctttgga

SEQ ID NO: 267244 - DNA, 15 bp, Homo sapiens
caatcatttctttgg

SEQ ID NO: 267245 - DNA, 15 bp, Homo sapiens
acaatcatttctttg

SEQ ID NO: 267246 - DNA, 15 bp, Homo sapiens
tacaatcatttcttt

SEQ ID NO: 267247 - DNA, 15 bp, Homo sapiens
atacaatcatttctt

SEQ ID NO: 267248 - DNA, 15 bp, Homo sapiens
aatacaatcatttct

SEQ ID NO: 267249 - DNA, 15 bp, Homo sapiens
taatacaatcatttc

SEQ ID NO: 267250 - DNA, 15 bp, Homo sapiens
ttaatacaatcattt

SEQ ID NO: 267251 - DNA, 15 bp, Homo sapiens
cttaatacaatcatt

SEQ ID NO: 267252 - DNA, 15 bp, Homo sapiens
tcttaatacaatcat

SEQ ID NO: 267253 - DNA, 15 bp, Homo sapiens
atcttaatacaatca

SEQ ID NO: 267254 - DNA, 15 bp, Homo sapiens
aatcttaatacaatc

SEQ ID NO: 267255 - DNA, 15 bp, Homo sapiens
aaatcttaatacaat

SEQ ID NO: 267256 - DNA, 15 bp, Homo sapiens
caaatcttaatacaa

SEQ ID NO: 267257 - DNA, 15 bp, Homo sapiens
acaaatcttaataca

SEQ ID NO: 267258 - DNA, 15 bp, Homo sapiens
cacaaatcttaatac

SEQ ID NO: 267259 - DNA, 15 bp, Homo sapiens
tcacaaatcttaata

SEQ ID NO: 267260 - DNA, 15 bp, Homo sapiens
ttcacaaatcttaat

SEQ ID NO: 267261 - DNA, 15 bp, Homo sapiens
attcacaaatcttaa

SEQ ID NO: 267262 - DNA, 15 bp, Homo sapiens
tattcacaaatctta

SEQ ID NO: 267263 - DNA, 15 bp, Homo sapiens
ttattcacaaatctt

SEQ ID NO: 267264 - DNA, 15 bp, Homo sapiens
tttattcacaaatct

SEQ ID NO: 267265 - DNA, 15 bp, Homo sapiens
atttattcacaaatc

SEQ ID NO: 267266 - DNA, 15 bp, Homo sapiens
aatttattcacaaat

SEQ ID NO: 267267 - DNA, 15 bp, Homo sapiens
aaatttattcacaaa

SEQ ID NO: 267268 - DNA, 15 bp, Homo sapiens
aaaatttattcacaa

SEQ ID NO: 267269 - DNA, 15 bp, Homo sapiens
aaaaatttattcaca

SEQ ID NO: 267270 - DNA, 15 bp, Homo sapiens
taaaaatttattcac

SEQ ID NO: 267271 - DNA, 15 bp, Homo sapiens
ctaaaaatttattca

SEQ ID NO: 267272 - DNA, 15 bp, Homo sapiens
tctaaaaatttattc

SEQ ID NO: 267273 - DNA, 15 bp, Homo sapiens
ttctaaaaatttatt

SEQ ID NO: 267274 - DNA, 15 bp, Homo sapiens
tttctaaaaatttat

SEQ ID NO: 267275 - DNA, 15 bp, Homo sapiens
atttctaaaaattta

SEQ ID NO: 267276 - DNA, 15 bp, Homo sapiens
gatttctaaaaattt

SEQ ID NO: 267277 - DNA, 15 bp, Homo sapiens
agatttctaaaaatt

SEQ ID NO: 267278 - DNA, 15 bp, Homo sapiens
cagatttctaaaaat

SEQ ID NO: 267279 - DNA, 15 bp, Homo sapiens
tcagatttctaaaaa

SEQ ID NO: 267280 - DNA, 15 bp, Homo sapiens
atcagatttctaaaa

SEQ ID NO: 267281 - DNA, 15 bp, Homo sapiens
aatcagatttctaaa

SEQ ID NO: 267282 - DNA, 15 bp, Homo sapiens
caatcagatttctaa

SEQ ID NO: 267283 - DNA, 15 bp, Homo sapiens
ccaatcagatttcta

SEQ ID NO: 267284 - DNA, 15 bp, Homo sapiens
gccaatcagatttct

SEQ ID NO: 267285 - DNA, 15 bp, Homo sapiens
tgccaatcagatttc

SEQ ID NO: 267286 - DNA, 15 bp, Homo sapiens
atgccaatcagattt

SEQ ID NO: 267287 - DNA, 15 bp, Homo sapiens
tatgccaatcagatt

SEQ ID NO: 267288 - DNA, 15 bp, Homo sapiens
atatgccaatcagat

SEQ ID NO: 267289 - DNA, 15 bp, Homo sapiens
aatatgccaatcaga

SEQ ID NO: 267290 - DNA, 15 bp, Homo sapiens
caatatgccaatcag

SEQ ID NO: 267291 - DNA, 15 bp, Homo sapiens
tcaatatgccaatca

SEQ ID NO: 267292 - DNA, 15 bp, Homo sapiens
ctcaatatgccaatc

SEQ ID NO: 267293 - DNA, 15 bp, Homo sapiens
tctcaatatgccaat

SEQ ID NO: 267294 - DNA, 15 bp, Homo sapiens
atctcaatatgccaa

SEQ ID NO: 267295 - DNA, 15 bp, Homo sapiens
tatctcaatatgcca

SEQ ID NO: 267296 - DNA, 15 bp, Homo sapiens
atatctcaatatgcc

SEQ ID NO: 267297 - DNA, 15 bp, Homo sapiens
aatatctcaatatgc

SEQ ID NO: 267298 - DNA, 15 bp, Homo sapiens
aaatatctcaatatg

SEQ ID NO: 267299 - DNA, 15 bp, Homo sapiens
taaatatctcaatat

SEQ ID NO: 267300 - DNA, 15 bp, Homo sapiens
ttaaatatctcaata

SEQ ID NO: 267301 - DNA, 15 bp, Homo sapiens
cttaaatatctcaat

SEQ ID NO: 267302 - DNA, 15 bp, Homo sapiens
ccttaaatatctcaa

SEQ ID NO: 267303 - DNA, 15 bp, Homo sapiens
accttaaatatctca

SEQ ID NO: 267304 - DNA, 15 bp, Homo sapiens
aaccttaaatatctc

SEQ ID NO: 267305 - DNA, 15 bp, Homo sapiens
caaccttaaatatct

SEQ ID NO: 267306 - DNA, 15 bp, Homo sapiens
tcaaccttaaatatc

SEQ ID NO: 267307 - DNA, 15 bp, Homo sapiens
ttcaaccttaaatat

SEQ ID NO: 267308 - DNA, 15 bp, Homo sapiens
attcaaccttaaata

SEQ ID NO: 267309 - DNA, 15 bp, Homo sapiens
cattcaaccttaaat

SEQ ID NO: 267310 - DNA, 15 bp, Homo sapiens
acattcaaccttaaa

SEQ ID NO: 267311 - DNA, 15 bp, Homo sapiens
aacattcaaccttaa

SEQ ID NO: 267312 - DNA, 15 bp, Homo sapiens
aaacattcaacctta

SEQ ID NO: 267313 - DNA, 15 bp, Homo sapiens
caaacattcaacctt

SEQ ID NO: 267314 - DNA, 15 bp, Homo sapiens
acaaacattcaacct

SEQ ID NO: 267315 - DNA, 15 bp, Homo sapiens
gacaaacattcaacc

SEQ ID NO: 267316 - DNA, 15 bp, Homo sapiens
ggacaaacattcaac

SEQ ID NO: 267317 - DNA, 15 bp, Homo sapiens
aggacaaacattcaa

SEQ ID NO: 267318 - DNA, 15 bp, Homo sapiens
aaggacaaacattca

SEQ ID NO: 267319 - DNA, 15 bp, Homo sapiens
taaggacaaacattc

SEQ ID NO: 267320 - DNA, 15 bp, Homo sapiens
ctaaggacaaacatt

SEQ ID NO: 267321 - DNA, 15 bp, Homo sapiens
cctaaggacaaacat

SEQ ID NO: 267322 - DNA, 15 bp, Homo sapiens
tcctaaggacaaaca

SEQ ID NO: 267323 - DNA, 15 bp, Homo sapiens
atcctaaggacaaac

SEQ ID NO: 267324 - DNA, 15 bp, Homo sapiens
tatcctaaggacaaa

SEQ ID NO: 267325 - DNA, 15 bp, Homo sapiens
ctatcctaaggacaa

SEQ ID NO: 267326 - DNA, 15 bp, Homo sapiens
cctatcctaaggaca

SEQ ID NO: 267327 - DNA, 15 bp, Homo sapiens
gcctatcctaaggac

SEQ ID NO: 267328 - DNA, 15 bp, Homo sapiens
ggcctatcctaagga

SEQ ID NO: 267329 - DNA, 15 bp, Homo sapiens
aggcctatcctaagg

SEQ ID NO: 267330 - DNA, 15 bp, Homo sapiens
taggcctatcctaag

SEQ ID NO: 267331 - DNA, 15 bp, Homo sapiens
ataggcctatcctaa

SEQ ID NO: 267332 - DNA, 15 bp, Homo sapiens
cataggcctatccta

SEQ ID NO: 267333 - DNA, 15 bp, Homo sapiens
acataggcctatcct

SEQ ID NO: 267334 - DNA, 15 bp, Homo sapiens
cacataggcctatcc

SEQ ID NO: 267335 - DNA, 15 bp, Homo sapiens
gcacataggcctatc

SEQ ID NO: 267336 - DNA, 15 bp, Homo sapiens
agcacataggcctat

SEQ ID NO: 267337 - DNA, 15 bp, Homo sapiens
tagcacataggccta

SEQ ID NO: 267338 - DNA, 15 bp, Homo sapiens
ctagcacataggcct

SEQ ID NO: 267339 - DNA, 15 bp, Homo sapiens
gctagcacataggcc

SEQ ID NO: 267340 - DNA, 15 bp, Homo sapiens
ggctagcacataggc

SEQ ID NO: 267341 - DNA, 15 bp, Homo sapiens
gggctagcacatagg

SEQ ID NO: 267342 - DNA, 15 bp, Homo sapiens
tgggctagcacatag

SEQ ID NO: 267343 - DNA, 15 bp, Homo sapiens
gtgggctagcacata

SEQ ID NO: 267344 - DNA, 15 bp, Homo sapiens
tgtgggctagcacat

SEQ ID NO: 267345 - DNA, 15 bp, Homo sapiens
ttgtgggctagcaca

SEQ ID NO: 267346 - DNA, 15 bp, Homo sapiens
tttgtgggctagcac

SEQ ID NO: 267347 - DNA, 15 bp, Homo sapiens
ctttgtgggctagca

SEQ ID NO: 267348 - DNA, 15 bp, Homo sapiens
tctttgtgggctagc

SEQ ID NO: 267349 - DNA, 15 bp, Homo sapiens
ttctttgtgggctag

SEQ ID NO: 267350 - DNA, 15 bp, Homo sapiens
attctttgtgggcta

SEQ ID NO: 267351 - DNA, 15 bp, Homo sapiens
tattctttgtgggct

SEQ ID NO: 267352 - DNA, 15 bp, Homo sapiens
atattctttgtgggc

SEQ ID NO: 267353 - DNA, 15 bp, Homo sapiens
aatattctttgtggg

SEQ ID NO: 267354 - DNA, 15 bp, Homo sapiens
caatattctttgtgg

SEQ ID NO: 267355 - DNA, 15 bp, Homo sapiens
acaatattctttgtg

SEQ ID NO: 267356 - DNA, 15 bp, Homo sapiens
gacaatattctttgt

SEQ ID NO: 267357 - DNA, 15 bp, Homo sapiens
agacaatattctttg

SEQ ID NO: 267358 - DNA, 15 bp, Homo sapiens
gagacaatattcttt

SEQ ID NO: 267359 - DNA, 15 bp, Homo sapiens
tgagacaatattctt

SEQ ID NO: 267360 - DNA, 15 bp, Homo sapiens
atgagacaatattct

SEQ ID NO: 267361 - DNA, 15 bp, Homo sapiens
aatgagacaatattc

SEQ ID NO: 267362 - DNA, 15 bp, Homo sapiens
taatgagacaatatt

SEQ ID NO: 267363 - DNA, 15 bp, Homo sapiens
ctaatgagacaatat

SEQ ID NO: 267364 - DNA, 15 bp, Homo sapiens
gctaatgagacaata

SEQ ID NO: 267365 - DNA, 15 bp, Homo sapiens
ggctaatgagacaat

SEQ ID NO: 267366 - DNA, 15 bp, Homo sapiens
aggctaatgagacaa

SEQ ID NO: 267367 - DNA, 15 bp, Homo sapiens
caggctaatgagaca

SEQ ID NO: 267368 - DNA, 15 bp, Homo sapiens
tcaggctaatgagac

SEQ ID NO: 267369 - DNA, 15 bp, Homo sapiens
ttcaggctaatgaga

SEQ ID NO: 267370 - DNA, 15 bp, Homo sapiens
attcaggctaatgag

SEQ ID NO: 267371 - DNA, 15 bp, Homo sapiens
cattcaggctaatga

SEQ ID NO: 267372 - DNA, 15 bp, Homo sapiens
acattcaggctaatg

SEQ ID NO: 267373 - DNA, 15 bp, Homo sapiens
cacattcaggctaat

SEQ ID NO: 267374 - DNA, 15 bp, Homo sapiens
gcacattcaggctaa

SEQ ID NO: 267375 - DNA, 15 bp, Homo sapiens
ggcacattcaggcta

SEQ ID NO: 267376 - DNA, 15 bp, Homo sapiens
tggcacattcaggct

SEQ ID NO: 267377 - DNA, 15 bp, Homo sapiens
atggcacattcaggc

SEQ ID NO: 267378 - DNA, 15 bp, Homo sapiens
tatggcacattcagg

SEQ ID NO: 267379 - DNA, 15 bp, Homo sapiens
ttatggcacattcag

SEQ ID NO: 267380 - DNA, 15 bp, Homo sapiens
cttatggcacattca

SEQ ID NO: 267381 - DNA, 15 bp, Homo sapiens
tcttatggcacattc

SEQ ID NO: 267382 - DNA, 15 bp, Homo sapiens
gtcttatggcacatt

SEQ ID NO: 267383 - DNA, 15 bp, Homo sapiens
agtcttatggcacat

SEQ ID NO: 267384 - DNA, 15 bp, Homo sapiens
cagtcttatggcaca

SEQ ID NO: 267385 - DNA, 15 bp, Homo sapiens
tcagtcttatggcac

SEQ ID NO: 267386 - DNA, 15 bp, Homo sapiens
gtcagtcttatggca

SEQ ID NO: 267387 - DNA, 15 bp, Homo sapiens
ggtcagtcttatggc

SEQ ID NO: 267388 - DNA, 15 bp, Homo sapiens
aggtcagtcttatgg

SEQ ID NO: 267389 - DNA, 15 bp, Homo sapiens
aaggtcagtcttatg

SEQ ID NO: 267390 - DNA, 15 bp, Homo sapiens
aaaggtcagtcttat

SEQ ID NO: 267391 - DNA, 15 bp, Homo sapiens
aaaaggtcagtctta

SEQ ID NO: 267392 - DNA, 15 bp, Homo sapiens
taaaaggtcagtctt

SEQ ID NO: 267393 - DNA, 15 bp, Homo sapiens
ttaaaaggtcagtct

SEQ ID NO: 267394 - DNA, 15 bp, Homo sapiens
tttaaaaggtcagtc

SEQ ID NO: 267395 - DNA, 15 bp, Homo sapiens
ttttaaaaggtcagt

SEQ ID NO: 267396 - DNA, 15 bp, Homo sapiens
attttaaaaggtcag

SEQ ID NO: 267397 - DNA, 15 bp, Homo sapiens
cattttaaaaggtca

SEQ ID NO: 267398 - DNA, 15 bp, Homo sapiens
acattttaaaaggtc

SEQ ID NO: 267399 - DNA, 15 bp, Homo sapiens
aacattttaaaaggt

SEQ ID NO: 267400 - DNA, 15 bp, Homo sapiens
aaacattttaaaagg

SEQ ID NO: 267401 - DNA, 15 bp, Homo sapiens
aaaacattttaaaag

SEQ ID NO: 267402 - DNA, 15 bp, Homo sapiens
caaaacattttaaaa

SEQ ID NO: 267403 - DNA, 15 bp, Homo sapiens
tcaaaacattttaaa

SEQ ID NO: 267404 - DNA, 15 bp, Homo sapiens
ctcaaaacattttaa

SEQ ID NO: 267405 - DNA, 15 bp, Homo sapiens
cctcaaaacatttta

SEQ ID NO: 267406 - DNA, 15 bp, Homo sapiens
ccctcaaaacatttt

SEQ ID NO: 267407 - DNA, 15 bp, Homo sapiens
tccctcaaaacattt

SEQ ID NO: 267408 - DNA, 15 bp, Homo sapiens
atccctcaaaacatt

SEQ ID NO: 267409 - DNA, 15 bp, Homo sapiens
gatccctcaaaacat

SEQ ID NO: 267410 - DNA, 15 bp, Homo sapiens
agatccctcaaaaca

SEQ ID NO: 267411 - DNA, 15 bp, Homo sapiens
cagatccctcaaaac

SEQ ID NO: 267412 - DNA, 15 bp, Homo sapiens
acagatccctcaaaa

SEQ ID NO: 267413 - DNA, 15 bp, Homo sapiens
cacagatccctcaaa

SEQ ID NO: 267414 - DNA, 15 bp, Homo sapiens
ccacagatccctcaa

SEQ ID NO: 267415 - DNA, 15 bp, Homo sapiens
tccacagatccctca

SEQ ID NO: 267416 - DNA, 15 bp, Homo sapiens
atccacagatccctc

SEQ ID NO: 267417 - DNA, 15 bp, Homo sapiens
catccacagatccct

SEQ ID NO: 267418 - DNA, 15 bp, Homo sapiens
gcatccacagatccc

SEQ ID NO: 267419 - DNA, 15 bp, Homo sapiens
agcatccacagatcc

SEQ ID NO: 267420 - DNA, 15 bp, Homo sapiens
aagcatccacagatc

SEQ ID NO: 267421 - DNA, 15 bp, Homo sapiens
gaagcatccacagat

SEQ ID NO: 267422 - DNA, 15 bp, Homo sapiens
cgaagcatccacaga

SEQ ID NO: 267423 - DNA, 15 bp, Homo sapiens
acgaagcatccacag

SEQ ID NO: 267424 - DNA, 15 bp, Homo sapiens
aacgaagcatccaca

SEQ ID NO: 267425 - DNA, 15 bp, Homo sapiens
taacgaagcatccac

SEQ ID NO: 267426 - DNA, 15 bp, Homo sapiens
ttaacgaagcatcca

SEQ ID NO: 267427 - DNA, 15 bp, Homo sapiens
attaacgaagcatcc

SEQ ID NO: 267428 - DNA, 15 bp, Homo sapiens
aattaacgaagcatc

SEQ ID NO: 267429 - DNA, 15 bp, Homo sapiens
aaattaacgaagcat

SEQ ID NO: 267430 - DNA, 15 bp, Homo sapiens
caaattaacgaagca

SEQ ID NO: 267431 - DNA, 15 bp, Homo sapiens
acaaattaacgaagc

SEQ ID NO: 267432 - DNA, 15 bp, Homo sapiens
aacaaattaacgaag

SEQ ID NO: 267433 - DNA, 15 bp, Homo sapiens
gaacaaattaacgaa

SEQ ID NO: 267434 - DNA, 15 bp, Homo sapiens
tgaacaaattaacga

SEQ ID NO: 267435 - DNA, 15 bp, Homo sapiens
ctgaacaaattaacg

SEQ ID NO: 267436 - DNA, 15 bp, Homo sapiens
gctgaacaaattaac

SEQ ID NO: 267437 - DNA, 15 bp, Homo sapiens
ggctgaacaaattaa

SEQ ID NO: 267438 - DNA, 15 bp, Homo sapiens
tggctgaacaaatta

SEQ ID NO: 267439 - DNA, 15 bp, Homo sapiens
gtggctgaacaaatt

SEQ ID NO: 267440 - DNA, 15 bp, Homo sapiens
tgtggctgaacaaat

SEQ ID NO: 267441 - DNA, 15 bp, Homo sapiens
ttgtggctgaacaaa

SEQ ID NO: 267442 - DNA, 15 bp, Homo sapiens
attgtggctgaacaa

SEQ ID NO: 267443 - DNA, 15 bp, Homo sapiens
aattgtggctgaaca

SEQ ID NO: 267444 - DNA, 15 bp, Homo sapiens
aaattgtggctgaac

SEQ ID NO: 267445 - DNA, 15 bp, Homo sapiens
taaattgtggctgaa

SEQ ID NO: 267446 - DNA, 15 bp, Homo sapiens
ataaattgtggctga

SEQ ID NO: 267447 - DNA, 15 bp, Homo sapiens
aataaattgtggctg

SEQ ID NO: 267448 - DNA, 15 bp, Homo sapiens
caataaattgtggct

SEQ ID NO: 267449 - DNA, 15 bp, Homo sapiens
tcaataaattgtggc

SEQ ID NO: 267450 - DNA, 15 bp, Homo sapiens
ctcaataaattgtgg

SEQ ID NO: 267451 - DNA, 15 bp, Homo sapiens
tctcaataaattgtg

SEQ ID NO: 267452 - DNA, 15 bp, Homo sapiens
ttctcaataaattgt

SEQ ID NO: 267453 - DNA, 15 bp, Homo sapiens
tttctcaataaattg

SEQ ID NO: 267454 - DNA, 15 bp, Homo sapiens
ttttctcaataaatt

SEQ ID NO: 267455 - DNA, 15 bp, Homo sapiens
attttctcaataaat

SEQ ID NO: 267456 - DNA, 15 bp, Homo sapiens
tattttctcaataaa

SEQ ID NO: 267457 - DNA, 15 bp, Homo sapiens
atattttctcaataa

SEQ ID NO: 267458 - DNA, 15 bp, Homo sapiens
aatattttctcaata

SEQ ID NO: 267459 - DNA, 15 bp, Homo sapiens
gaatattttctcaat

SEQ ID NO: 267460 - DNA, 15 bp, Homo sapiens
agaatattttctcaa

SEQ ID NO: 267461 - DNA, 15 bp, Homo sapiens
cagaatattttctca

SEQ ID NO: 267462 - DNA, 15 bp, Homo sapiens
acagaatattttctc

SEQ ID NO: 267463 - DNA, 15 bp, Homo sapiens
cacagaatattttct

SEQ ID NO: 267464 - DNA, 15 bp, Homo sapiens
acacagaatattttc

SEQ ID NO: 267465 - DNA, 15 bp, Homo sapiens
gacacagaatatttt

SEQ ID NO: 267466 - DNA, 15 bp, Homo sapiens
tgacacagaatattt

SEQ ID NO: 267467 - DNA, 15 bp, Homo sapiens
ttgacacagaatatt

SEQ ID NO: 267468 - DNA, 15 bp, Homo sapiens
cttgacacagaatat

SEQ ID NO: 267469 - DNA, 15 bp, Homo sapiens
gcttgacacagaata

SEQ ID NO: 267470 - DNA, 15 bp, Homo sapiens
tgcttgacacagaat

SEQ ID NO: 267471 - DNA, 15 bp, Homo sapiens
gtgcttgacacagaa

SEQ ID NO: 267472 - DNA, 15 bp, Homo sapiens
agtgcttgacacaga

SEQ ID NO: 267473 - DNA, 15 bp, Homo sapiens
cagtgcttgacacag

SEQ ID NO: 267474 - DNA, 15 bp, Homo sapiens
acagtgcttgacaca

SEQ ID NO: 267475 - DNA, 15 bp, Homo sapiens
cacagtgcttgacac

SEQ ID NO: 267476 - DNA, 15 bp, Homo sapiens
ccacagtgcttgaca

SEQ ID NO: 267477 - DNA, 15 bp, Homo sapiens
cccacagtgcttgac

SEQ ID NO: 267478 - DNA, 15 bp, Homo sapiens
acccacagtgcttga

SEQ ID NO: 267479 - DNA, 15 bp, Homo sapiens
aacccacagtgcttg

SEQ ID NO: 267480 - DNA, 15 bp, Homo sapiens
aaacccacagtgctt

SEQ ID NO: 267481 - DNA, 15 bp, Homo sapiens
aaaacccacagtgct

SEQ ID NO: 267482 - DNA, 15 bp, Homo sapiens
taaaacccacagtgc

SEQ ID NO: 267483 - DNA, 15 bp, Homo sapiens
ttaaaacccacagtg

SEQ ID NO: 267484 - DNA, 15 bp, Homo sapiens
attaaaacccacagt

SEQ ID NO: 267485 - DNA, 15 bp, Homo sapiens
tattaaaacccacag

SEQ ID NO: 267486 - DNA, 15 bp, Homo sapiens
atattaaaacccaca

SEQ ID NO: 267487 - DNA, 15 bp, Homo sapiens
aatattaaaacccac

SEQ ID NO: 267488 - DNA, 15 bp, Homo sapiens
aaatattaaaaccca

SEQ ID NO: 267489 - DNA, 15 bp, Homo sapiens
aaaatattaaaaccc

SEQ ID NO: 267490 - DNA, 15 bp, Homo sapiens
aaaaatattaaaacc

SEQ ID NO: 267491 - DNA, 15 bp, Homo sapiens
taaaaatattaaaac

SEQ ID NO: 267492 - DNA, 15 bp, Homo sapiens
ttaaaaatattaaaa

SEQ ID NO: 267493 - DNA, 15 bp, Homo sapiens
tttaaaaatattaaa

SEQ ID NO: 267494 - DNA, 15 bp, Homo sapiens
atttaaaaatattaa

SEQ ID NO: 267495 - DNA, 15 bp, Homo sapiens
gatttaaaaatatta

SEQ ID NO: 267496 - DNA, 15 bp, Homo sapiens
tgatttaaaaatatt

SEQ ID NO: 267497 - DNA, 15 bp, Homo sapiens
ttgatttaaaaatat

SEQ ID NO: 267498 - DNA, 15 bp, Homo sapiens
tttgatttaaaaata

SEQ ID NO: 267499 - DNA, 15 bp, Homo sapiens
gtttgatttaaaaat

SEQ ID NO: 267500 - DNA, 15 bp, Homo sapiens
cgtttgatttaaaaa

SEQ ID NO: 267501 - DNA, 15 bp, Homo sapiens
gcgtttgatttaaaa

SEQ ID NO: 267502 - DNA, 15 bp, Homo sapiens
agcgtttgatttaaa

SEQ ID NO: 267503 - DNA, 15 bp, Homo sapiens
cagcgtttgatttaa

SEQ ID NO: 267504 - DNA, 15 bp, Homo sapiens
tcagcgtttgattta

SEQ ID NO: 267505 - DNA, 15 bp, Homo sapiens
atcagcgtttgattt

SEQ ID NO: 267506 - DNA, 15 bp, Homo sapiens
aatcagcgtttgatt

SEQ ID NO: 267507 - DNA, 15 bp, Homo sapiens
taatcagcgtttgat

SEQ ID NO: 267508 - DNA, 15 bp, Homo sapiens
gtaatcagcgtttga

SEQ ID NO: 267509 - DNA, 15 bp, Homo sapiens
tgtaatcagcgtttg

SEQ ID NO: 267510 - DNA, 15 bp, Homo sapiens
ctgtaatcagcgttt

SEQ ID NO: 267511 - DNA, 15 bp, Homo sapiens
tctgtaatcagcgtt

SEQ ID NO: 267512 - DNA, 15 bp, Homo sapiens
atctgtaatcagcgt

SEQ ID NO: 267513 - DNA, 15 bp, Homo sapiens
tatctgtaatcagcg

SEQ ID NO: 267514 - DNA, 15 bp, Homo sapiens
ttatctgtaatcagc

SEQ ID NO: 267515 - DNA, 15 bp, Homo sapiens
attatctgtaatcag

SEQ ID NO: 267516 - DNA, 15 bp, Homo sapiens
tattatctgtaatca

SEQ ID NO: 267517 - DNA, 15 bp, Homo sapiens
ctattatctgtaatc

SEQ ID NO: 267518 - DNA, 15 bp, Homo sapiens
actattatctgtaat

SEQ ID NO: 267519 - DNA, 15 bp, Homo sapiens
tactattatctgtaa

SEQ ID NO: 267520 - DNA, 15 bp, Homo sapiens
atactattatctgta

SEQ ID NO: 267521 - DNA, 15 bp, Homo sapiens
aatactattatctgt

SEQ ID NO: 267522 - DNA, 15 bp, Homo sapiens
aaatactattatctg

SEQ ID NO: 267523 - DNA, 15 bp, Homo sapiens
taaatactattatct

SEQ ID NO: 267524 - DNA, 15 bp, Homo sapiens
ataaatactattatc

SEQ ID NO: 267525 - DNA, 15 bp, Homo sapiens
tataaatactattat

SEQ ID NO: 267526 - DNA, 15 bp, Homo sapiens
atataaatactatta

SEQ ID NO: 267527 - DNA, 15 bp, Homo sapiens
tatataaatactatt

SEQ ID NO: 267528 - DNA, 15 bp, Homo sapiens
ttatataaatactat

SEQ ID NO: 267529 - DNA, 15 bp, Homo sapiens
tttatataaatacta

SEQ ID NO: 267530 - DNA, 15 bp, Homo sapiens
atttatataaatact

SEQ ID NO: 267531 - DNA, 15 bp, Homo sapiens
tatttatataaatac

SEQ ID NO: 267532 - DNA, 15 bp, Homo sapiens
ttatttatataaata

SEQ ID NO: 267533 - DNA, 15 bp, Homo sapiens
attatttatataaat

SEQ ID NO: 267534 - DNA, 15 bp, Homo sapiens
aattatttatataaa

SEQ ID NO: 267535 - DNA, 15 bp, Homo sapiens
caattatttatataa

SEQ ID NO: 267536 - DNA, 15 bp, Homo sapiens
tcaattatttatata

SEQ ID NO: 267537 - DNA, 15 bp, Homo sapiens
ttcaattatttatat

SEQ ID NO: 267538 - DNA, 15 bp, Homo sapiens
tttcaattatttata

SEQ ID NO: 267539 - DNA, 15 bp, Homo sapiens
ttttcaattatttat

SEQ ID NO: 267540 - DNA, 15 bp, Homo sapiens
tttttcaattattta

SEQ ID NO: 267541 - DNA, 15 bp, Homo sapiens
ttttttcaattattt

SEQ ID NO: 267542 - DNA, 15 bp, Homo sapiens
tttttttcaattatt

SEQ ID NO: 267543 - DNA, 15 bp, Homo sapiens
atttttttcaattat

SEQ ID NO: 267544 - DNA, 15 bp, Homo sapiens
aatttttttcaatta

SEQ ID NO: 267545 - DNA, 15 bp, Homo sapiens
aaatttttttcaatt

SEQ ID NO: 267546 - DNA, 15 bp, Homo sapiens
aaaatttttttcaat

SEQ ID NO: 267547 - DNA, 15 bp, Homo sapiens
gaaaatttttttcaa

SEQ ID NO: 267548 - DNA, 15 bp, Homo sapiens
agaaaatttttttca

SEQ ID NO: 267549 - DNA, 15 bp, Homo sapiens
aagaaaatttttttc

SEQ ID NO: 267550 - DNA, 15 bp, Homo sapiens
aaagaaaattttttt

SEQ ID NO: 267551 - DNA, 15 bp, Homo sapiens
aaaagaaaatttttt

SEQ ID NO: 267552 - DNA, 15 bp, Homo sapiens
caaaagaaaattttt

SEQ ID NO: 267553 - DNA, 15 bp, Homo sapiens
ccaaaagaaaatttt

SEQ ID NO: 267554 - DNA, 15 bp, Homo sapiens
cccaaaagaaaattt

SEQ ID NO: 267555 - DNA, 15 bp, Homo sapiens
tcccaaaagaaaatt

SEQ ID NO: 267556 - DNA, 15 bp, Homo sapiens
ttcccaaaagaaaat

SEQ ID NO: 267557 - DNA, 15 bp, Homo sapiens
cttcccaaaagaaaa

SEQ ID NO: 267558 - DNA, 15 bp, Homo sapiens
tcttcccaaaagaaa

SEQ ID NO: 267559 - DNA, 15 bp, Homo sapiens
ctcttcccaaaagaa

SEQ ID NO: 267560 - DNA, 15 bp, Homo sapiens
cctcttcccaaaaga

SEQ ID NO: 267561 - DNA, 15 bp, Homo sapiens
ccctcttcccaaaag

SEQ ID NO: 267562 - DNA, 15 bp, Homo sapiens
tccctcttcccaaaa

SEQ ID NO: 267563 - DNA, 15 bp, Homo sapiens
ctccctcttcccaaa

SEQ ID NO: 267564 - DNA, 15 bp, Homo sapiens
tctccctcttcccaa

SEQ ID NO: 267565 - DNA, 15 bp, Homo sapiens
ttctccctcttccca

SEQ ID NO: 267566 - DNA, 15 bp, Homo sapiens
tttctccctcttccc

SEQ ID NO: 267567 - DNA, 15 bp, Homo sapiens
ttttctccctcttcc

SEQ ID NO: 267568 - DNA, 15 bp, Homo sapiens
attttctccctcttc

SEQ ID NO: 267569 - DNA, 15 bp, Homo sapiens
cattttctccctctt

SEQ ID NO: 267570 - DNA, 15 bp, Homo sapiens
tcattttctccctct

SEQ ID NO: 267571 - DNA, 15 bp, Homo sapiens
ttcattttctccctc

SEQ ID NO: 267572 - DNA, 15 bp, Homo sapiens
tttcattttctccct

SEQ ID NO: 267573 - DNA, 15 bp, Homo sapiens
atttcattttctccc

SEQ ID NO: 267574 - DNA, 15 bp, Homo sapiens
tatttcattttctcc

SEQ ID NO: 267575 - DNA, 15 bp, Homo sapiens
ttatttcattttctc

SEQ ID NO: 267576 - DNA, 15 bp, Homo sapiens
tttatttcattttct

SEQ ID NO: 267577 - DNA, 15 bp, Homo sapiens
atttatttcattttc

SEQ ID NO: 267578 - DNA, 15 bp, Homo sapiens
tatttatttcatttt

SEQ ID NO: 267579 - DNA, 15 bp, Homo sapiens
atatttatttcattt

SEQ ID NO: 267580 - DNA, 15 bp, Homo sapiens
gatatttatttcatt

SEQ ID NO: 267581 - DNA, 15 bp, Homo sapiens
tgatatttatttcat

SEQ ID NO: 267582 - DNA, 15 bp, Homo sapiens
atgatatttatttca

SEQ ID NO: 267583 - DNA, 15 bp, Homo sapiens
aatgatatttatttc

SEQ ID NO: 267584 - DNA, 15 bp, Homo sapiens
taatgatatttattt

SEQ ID NO: 267585 - DNA, 15 bp, Homo sapiens
ttaatgatatttatt

SEQ ID NO: 267586 - DNA, 15 bp, Homo sapiens
tttaatgatatttat

SEQ ID NO: 267587 - DNA, 15 bp, Homo sapiens
ctttaatgatattta

SEQ ID NO: 267588 - DNA, 15 bp, Homo sapiens
tctttaatgatattt

SEQ ID NO: 267589 - DNA, 15 bp, Homo sapiens
atctttaatgatatt

SEQ ID NO: 267590 - DNA, 15 bp, Homo sapiens
tatctttaatgatat

SEQ ID NO: 267591 - DNA, 15 bp, Homo sapiens
ttatctttaatgata

SEQ ID NO: 267592 - DNA, 15 bp, Homo sapiens
gttatctttaatgat

SEQ ID NO: 267593 - DNA, 15 bp, Homo sapiens
agttatctttaatga

SEQ ID NO: 267594 - DNA, 15 bp, Homo sapiens
gagttatctttaatg

SEQ ID NO: 267595 - DNA, 15 bp, Homo sapiens
tgagttatctttaat

SEQ ID NO: 267596 - DNA, 15 bp, Homo sapiens
ctgagttatctttaa

SEQ ID NO: 267597 - DNA, 15 bp, Homo sapiens
cctgagttatcttta

SEQ ID NO: 267598 - DNA, 15 bp, Homo sapiens
tcctgagttatcttt

SEQ ID NO: 267599 - DNA, 15 bp, Homo sapiens
ctcctgagttatctt

SEQ ID NO: 267600 - DNA, 15 bp, Homo sapiens
tctcctgagttatct

SEQ ID NO: 267601 - DNA, 15 bp, Homo sapiens
ttctcctgagttatc

SEQ ID NO: 267602 - DNA, 15 bp, Homo sapiens
attctcctgagttat

SEQ ID NO: 267603 - DNA, 15 bp, Homo sapiens
gattctcctgagtta

SEQ ID NO: 267604 - DNA, 15 bp, Homo sapiens
agattctcctgagtt

SEQ ID NO: 267605 - DNA, 15 bp, Homo sapiens
aagattctcctgagt

SEQ ID NO: 267606 - DNA, 15 bp, Homo sapiens
gaagattctcctgag

SEQ ID NO: 267607 - DNA, 15 bp, Homo sapiens
agaagattctcctga

SEQ ID NO: 267608 - DNA, 15 bp, Homo sapiens
aagaagattctcctg

SEQ ID NO: 267609 - DNA, 15 bp, Homo sapiens
aaagaagattctcct

SEQ ID NO: 267610 - DNA, 15 bp, Homo sapiens
taaagaagattctcc

SEQ ID NO: 267611 - DNA, 15 bp, Homo sapiens
gtaaagaagattctc

SEQ ID NO: 267612 - DNA, 15 bp, Homo sapiens
tgtaaagaagattct

SEQ ID NO: 267613 - DNA, 15 bp, Homo sapiens
ttgtaaagaagattc

SEQ ID NO: 267614 - DNA, 15 bp, Homo sapiens
attgtaaagaagatt

SEQ ID NO: 267615 - DNA, 15 bp, Homo sapiens
aattgtaaagaagat

SEQ ID NO: 267616 - DNA, 15 bp, Homo sapiens
aaattgtaaagaaga

SEQ ID NO: 267617 - DNA, 15 bp, Homo sapiens
aaaattgtaaagaag

SEQ ID NO: 267618 - DNA, 15 bp, Homo sapiens
taaaattgtaaagaa

SEQ ID NO: 267619 - DNA, 15 bp, Homo sapiens
gtaaaattgtaaaga

SEQ ID NO: 267620 - DNA, 15 bp, Homo sapiens
cgtaaaattgtaaag

SEQ ID NO: 267621 - DNA, 15 bp, Homo sapiens
acgtaaaattgtaaa

SEQ ID NO: 267622 - DNA, 15 bp, Homo sapiens
aacgtaaaattgtaa

SEQ ID NO: 267623 - DNA, 15 bp, Homo sapiens
aaacgtaaaattgta

SEQ ID NO: 267624 - DNA, 15 bp, Homo sapiens
taaacgtaaaattgt

SEQ ID NO: 267625 - DNA, 15 bp, Homo sapiens
ctaaacgtaaaattg

SEQ ID NO: 267626 - DNA, 15 bp, Homo sapiens
tctaaacgtaaaatt

SEQ ID NO: 267627 - DNA, 15 bp, Homo sapiens
ttctaaacgtaaaat

SEQ ID NO: 267628 - DNA, 15 bp, Homo sapiens
attctaaacgtaaaa

SEQ ID NO: 267629 - DNA, 15 bp, Homo sapiens
cattctaaacgtaaa

SEQ ID NO: 267630 - DNA, 15 bp, Homo sapiens
acattctaaacgtaa

SEQ ID NO: 267631 - DNA, 15 bp, Homo sapiens
aacattctaaacgta

SEQ ID NO: 267632 - DNA, 15 bp, Homo sapiens
aaacattctaaacgt

SEQ ID NO: 267633 - DNA, 15 bp, Homo sapiens
taaacattctaaacg

SEQ ID NO: 267634 - DNA, 15 bp, Homo sapiens
ttaaacattctaaac

SEQ ID NO: 267635 - DNA, 15 bp, Homo sapiens
cttaaacattctaaa

SEQ ID NO: 267636 - DNA, 15 bp, Homo sapiens
ccttaaacattctaa

SEQ ID NO: 267637 - DNA, 15 bp, Homo sapiens
accttaaacattcta

SEQ ID NO: 267638 - DNA, 15 bp, Homo sapiens
aaccttaaacattct

SEQ ID NO: 267639 - DNA, 15 bp, Homo sapiens
taaccttaaacattc

SEQ ID NO: 267640 - DNA, 15 bp, Homo sapiens
ttaaccttaaacatt

SEQ ID NO: 267641 - DNA, 15 bp, Homo sapiens
cttaaccttaaacat

SEQ ID NO: 267642 - DNA, 15 bp, Homo sapiens
tcttaaccttaaaca

SEQ ID NO: 267643 - DNA, 15 bp, Homo sapiens
ttcttaaccttaaac

SEQ ID NO: 267644 - DNA, 15 bp, Homo sapiens
tttcttaaccttaaa

SEQ ID NO: 267645 - DNA, 15 bp, Homo sapiens
ctttcttaaccttaa

SEQ ID NO: 267646 - DNA, 15 bp, Homo sapiens
tctttcttaacctta

SEQ ID NO: 267647 - DNA, 15 bp, Homo sapiens
ttctttcttaacctt

SEQ ID NO: 267648 - DNA, 15 bp, Homo sapiens
tttctttcttaacct

SEQ ID NO: 267649 - DNA, 15 bp, Homo sapiens
atttctttcttaacc

SEQ ID NO: 267650 - DNA, 15 bp, Homo sapiens
tatttctttcttaac

SEQ ID NO: 267651 - DNA, 15 bp, Homo sapiens
ctatttctttcttaa

SEQ ID NO: 267652 - DNA, 15 bp, Homo sapiens
actatttctttctta

SEQ ID NO: 267653 - DNA, 15 bp, Homo sapiens
gactatttctttctt

SEQ ID NO: 267654 - DNA, 15 bp, Homo sapiens
tgactatttctttct

SEQ ID NO: 267655 - DNA, 15 bp, Homo sapiens
ttgactatttctttc

SEQ ID NO: 267656 - DNA, 15 bp, Homo sapiens
attgactatttcttt

SEQ ID NO: 267657 - DNA, 15 bp, Homo sapiens
tattgactatttctt

SEQ ID NO: 267658 - DNA, 15 bp, Homo sapiens
atattgactatttct

SEQ ID NO: 267659 - DNA, 15 bp, Homo sapiens
catattgactatttc

SEQ ID NO: 267660 - DNA, 15 bp, Homo sapiens
gcatattgactattt

SEQ ID NO: 267661 - DNA, 15 bp, Homo sapiens
agcatattgactatt

SEQ ID NO: 267662 - DNA, 15 bp, Homo sapiens
aagcatattgactat

SEQ ID NO: 267663 - DNA, 15 bp, Homo sapiens
caagcatattgacta

SEQ ID NO: 267664 - DNA, 15 bp, Homo sapiens
acaagcatattgact

SEQ ID NO: 267665 - DNA, 15 bp, Homo sapiens
tacaagcatattgac

SEQ ID NO: 267666 - DNA, 15 bp, Homo sapiens
atacaagcatattga

SEQ ID NO: 267667 - DNA, 15 bp, Homo sapiens
tatacaagcatattg

SEQ ID NO: 267668 - DNA, 15 bp, Homo sapiens
ttatacaagcatatt

SEQ ID NO: 267669 - DNA, 15 bp, Homo sapiens
tttatacaagcatat

SEQ ID NO: 267670 - DNA, 15 bp, Homo sapiens
ttttatacaagcata

SEQ ID NO: 267671 - DNA, 15 bp, Homo sapiens
gttttatacaagcat

SEQ ID NO: 267672 - DNA, 15 bp, Homo sapiens
tgttttatacaagca

SEQ ID NO: 267673 - DNA, 15 bp, Homo sapiens
gtgttttatacaagc

SEQ ID NO: 267674 - DNA, 15 bp, Homo sapiens
agtgttttatacaag

SEQ ID NO: 267675 - DNA, 15 bp, Homo sapiens
cagtgttttatacaa

SEQ ID NO: 267676 - DNA, 15 bp, Homo sapiens
acagtgttttataca

SEQ ID NO: 267677 - DNA, 15 bp, Homo sapiens
aacagtgttttatac

SEQ ID NO: 267678 - DNA, 15 bp, Homo sapiens
gaacagtgttttata

SEQ ID NO: 267679 - DNA, 15 bp, Homo sapiens
tgaacagtgttttat

SEQ ID NO: 267680 - DNA, 15 bp, Homo sapiens
gtgaacagtgtttta

SEQ ID NO: 267681 - DNA, 15 bp, Homo sapiens
agtgaacagtgtttt

SEQ ID NO: 267682 - DNA, 15 bp, Homo sapiens
cagtgaacagtgttt

SEQ ID NO: 267683 - DNA, 15 bp, Homo sapiens
acagtgaacagtgtt

SEQ ID NO: 267684 - DNA, 15 bp, Homo sapiens
aacagtgaacagtgt

SEQ ID NO: 267685 - DNA, 15 bp, Homo sapiens
aaacagtgaacagtg

SEQ ID NO: 267686 - DNA, 15 bp, Homo sapiens
aaaacagtgaacagt

SEQ ID NO: 267687 - DNA, 15 bp, Homo sapiens
aaaaacagtgaacag

SEQ ID NO: 267688 - DNA, 15 bp, Homo sapiens
aaaaaacagtgaaca

SEQ ID NO: 267689 - DNA, 15 bp, Homo sapiens
aaaaaaacagtgaac

SEQ ID NO: 267690 - DNA, 15 bp, Homo sapiens
aaaaaaaacagtgaa

SEQ ID NO: 267691 - DNA, 15 bp, Homo sapiens
taaaaaaaacagtga

SEQ ID NO: 267692 - DNA, 15 bp, Homo sapiens
ttaaaaaaaacagtg

SEQ ID NO: 267693 - DNA, 15 bp, Homo sapiens
tttaaaaaaaacagt

SEQ ID NO: 267694 - DNA, 15 bp, Homo sapiens
ttttaaaaaaaacag

SEQ ID NO: 267695 - DNA, 15 bp, Homo sapiens
tttttaaaaaaaaca

SEQ ID NO: 267696 - DNA, 15 bp, Homo sapiens
ttttttaaaaaaaac

SEQ ID NO: 267697 - DNA, 15 bp, Homo sapiens
tttttttaaaaaaaa

SEQ ID NO: 267698 - DNA, 15 bp, Homo sapiens
ttttttttaaaaaaa

SEQ ID NO: 267699 - DNA, 15 bp, Homo sapiens
tttttttttaaaaaa

SEQ ID NO: 267700 - DNA, 15 bp, Homo sapiens
ttttttttttaaaaa

SEQ ID NO: 267701 - DNA, 15 bp, Homo sapiens
gttttttttttaaaa

SEQ ID NO: 267702 - DNA, 15 bp, Homo sapiens
agttttttttttaaa

SEQ ID NO: 267703 - DNA, 15 bp, Homo sapiens
aagttttttttttaa

SEQ ID NO: 267704 - DNA, 15 bp, Homo sapiens
caagtttttttttta

SEQ ID NO: 267705 - DNA, 15 bp, Homo sapiens
tcaagtttttttttt

SEQ ID NO: 267706 - DNA, 15 bp, Homo sapiens
atcaagttttttttt

SEQ ID NO: 267707 - DNA, 15 bp, Homo sapiens
aatcaagtttttttt

SEQ ID NO: 267708 - DNA, 15 bp, Homo sapiens
aaatcaagttttttt

SEQ ID NO: 267709 - DNA, 15 bp, Homo sapiens
caaatcaagtttttt

SEQ ID NO: 267710 - DNA, 15 bp, Homo sapiens
acaaatcaagttttt

SEQ ID NO: 267711 - DNA, 15 bp, Homo sapiens
aacaaatcaagtttt

SEQ ID NO: 267712 - DNA, 15 bp, Homo sapiens
taacaaatcaagttt

SEQ ID NO: 267713 - DNA, 15 bp, Homo sapiens
ataacaaatcaagtt

SEQ ID NO: 267714 - DNA, 15 bp, Homo sapiens
aataacaaatcaagt

SEQ ID NO: 267715 - DNA, 15 bp, Homo sapiens
taataacaaatcaag

SEQ ID NO: 267716 - DNA, 15 bp, Homo sapiens
ttaataacaaatcaa

SEQ ID NO: 267717 - DNA, 15 bp, Homo sapiens
gttaataacaaatca

SEQ ID NO: 267718 - DNA, 15 bp, Homo sapiens
tgttaataacaaatc

SEQ ID NO: 267719 - DNA, 15 bp, Homo sapiens
atgttaataacaaat

SEQ ID NO: 267720 - DNA, 15 bp, Homo sapiens
aatgttaataacaaa

SEQ ID NO: 267721 - DNA, 15 bp, Homo sapiens
caatgttaataacaa

SEQ ID NO: 267722 - DNA, 15 bp, Homo sapiens
tcaatgttaataaca

SEQ ID NO: 267723 - DNA, 15 bp, Homo sapiens
atcaatgttaataac

SEQ ID NO: 267724 - DNA, 15 bp, Homo sapiens
gatcaatgttaataa

SEQ ID NO: 267725 - DNA, 15 bp, Homo sapiens
agatcaatgttaata

SEQ ID NO: 267726 - DNA, 15 bp, Homo sapiens
cagatcaatgttaat

SEQ ID NO: 267727 - DNA, 15 bp, Homo sapiens
gcagatcaatgttaa

SEQ ID NO: 267728 - DNA, 15 bp, Homo sapiens
agcagatcaatgtta

SEQ ID NO: 267729 - DNA, 15 bp, Homo sapiens
cagcagatcaatgtt

SEQ ID NO: 267730 - DNA, 15 bp, Homo sapiens
tcagcagatcaatgt

SEQ ID NO: 267731 - DNA, 15 bp, Homo sapiens
gtcagcagatcaatg

SEQ ID NO: 267732 - DNA, 15 bp, Homo sapiens
tgtcagcagatcaat

SEQ ID NO: 267733 - DNA, 15 bp, Homo sapiens
ttgtcagcagatcaa

SEQ ID NO: 267734 - DNA, 15 bp, Homo sapiens
tttgtcagcagatca

SEQ ID NO: 267735 - DNA, 15 bp, Homo sapiens
ttttgtcagcagatc

SEQ ID NO: 267736 - DNA, 15 bp, Homo sapiens
gttttgtcagcagat

SEQ ID NO: 267737 - DNA, 15 bp, Homo sapiens
ggttttgtcagcaga

SEQ ID NO: 267738 - DNA, 15 bp, Homo sapiens
aggttttgtcagcag

SEQ ID NO: 267739 - DNA, 15 bp, Homo sapiens
caggttttgtcagca

SEQ ID NO: 267740 - DNA, 15 bp, Homo sapiens
ccaggttttgtcagc

SEQ ID NO: 267741 - DNA, 15 bp, Homo sapiens
cccaggttttgtcag

SEQ ID NO: 267742 - DNA, 15 bp, Homo sapiens
tcccaggttttgtca

SEQ ID NO: 267743 - DNA, 15 bp, Homo sapiens
ttcccaggttttgtc

SEQ ID NO: 267744 - DNA, 15 bp, Homo sapiens
attcccaggttttgt

SEQ ID NO: 267745 - DNA, 15 bp, Homo sapiens
aattcccaggttttg

SEQ ID NO: 267746 - DNA, 15 bp, Homo sapiens
aaattcccaggtttt

SEQ ID NO: 267747 - DNA, 15 bp, Homo sapiens
caaattcccaggttt

SEQ ID NO: 267748 - DNA, 15 bp, Homo sapiens
ccaaattcccaggtt

SEQ ID NO: 267749 - DNA, 15 bp, Homo sapiens
cccaaattcccaggt

SEQ ID NO: 267750 - DNA, 15 bp, Homo sapiens
acccaaattcccagg

SEQ ID NO: 267751 - DNA, 15 bp, Homo sapiens
aacccaaattcccag

SEQ ID NO: 267752 - DNA, 15 bp, Homo sapiens
caacccaaattccca

SEQ ID NO: 267753 - DNA, 15 bp, Homo sapiens
acaacccaaattccc

SEQ ID NO: 267754 - DNA, 15 bp, Homo sapiens
cacaacccaaattcc

SEQ ID NO: 267755 - DNA, 15 bp, Homo sapiens
acacaacccaaattc

SEQ ID NO: 267756 - DNA, 15 bp, Homo sapiens
tacacaacccaaatt

SEQ ID NO: 267757 - DNA, 15 bp, Homo sapiens
atacacaacccaaat

SEQ ID NO: 267758 - DNA, 15 bp, Homo sapiens
catacacaacccaaa

SEQ ID NO: 267759 - DNA, 15 bp, Homo sapiens
gcatacacaacccaa

SEQ ID NO: 267760 - DNA, 15 bp, Homo sapiens
cgcatacacaaccca

SEQ ID NO: 267761 - DNA, 15 bp, Homo sapiens
tcgcatacacaaccc

SEQ ID NO: 267762 - DNA, 15 bp, Homo sapiens
ttcgcatacacaacc

SEQ ID NO: 267763 - DNA, 15 bp, Homo sapiens
attcgcatacacaac

SEQ ID NO: 267764 - DNA, 15 bp, Homo sapiens
cattcgcatacacaa

SEQ ID NO: 267765 - DNA, 15 bp, Homo sapiens
acattcgcatacaca

SEQ ID NO: 267766 - DNA, 15 bp, Homo sapiens
aacattcgcatacac

SEQ ID NO: 267767 - DNA, 15 bp, Homo sapiens
aaacattcgcataca

SEQ ID NO: 267768 - DNA, 15 bp, Homo sapiens
gaaacattcgcatac

SEQ ID NO: 267769 - DNA, 15 bp, Homo sapiens
tgaaacattcgcata

SEQ ID NO: 267770 - DNA, 15 bp, Homo sapiens
ctgaaacattcgcat

SEQ ID NO: 267771 - DNA, 15 bp, Homo sapiens
actgaaacattcgca

SEQ ID NO: 267772 - DNA, 15 bp, Homo sapiens
cactgaaacattcgc

SEQ ID NO: 267773 - DNA, 15 bp, Homo sapiens
gcactgaaacattcg

SEQ ID NO: 267774 - DNA, 15 bp, Homo sapiens
ggcactgaaacattc

SEQ ID NO: 267775 - DNA, 15 bp, Homo sapiens
aggcactgaaacatt

SEQ ID NO: 267776 - DNA, 15 bp, Homo sapiens
gaggcactgaaacat

SEQ ID NO: 267777 - DNA, 15 bp, Homo sapiens
tgaggcactgaaaca

SEQ ID NO: 267778 - DNA, 15 bp, Homo sapiens
ctgaggcactgaaac

SEQ ID NO: 267779 - DNA, 15 bp, Homo sapiens
tctgaggcactgaaa

SEQ ID NO: 267780 - DNA, 15 bp, Homo sapiens
gtctgaggcactgaa

SEQ ID NO: 267781 - DNA, 15 bp, Homo sapiens
tgtctgaggcactga

SEQ ID NO: 267782 - DNA, 15 bp, Homo sapiens
ttgtctgaggcactg

SEQ ID NO: 267783 - DNA, 15 bp, Homo sapiens
tttgtctgaggcact

SEQ ID NO: 267784 - DNA, 15 bp, Homo sapiens
atttgtctgaggcac

SEQ ID NO: 267785 - DNA, 15 bp, Homo sapiens
catttgtctgaggca

SEQ ID NO: 267786 - DNA, 15 bp, Homo sapiens
acatttgtctgaggc

SEQ ID NO: 267787 - DNA, 15 bp, Homo sapiens
cacatttgtctgagg

SEQ ID NO: 267788 - DNA, 15 bp, Homo sapiens
acacatttgtctgag

SEQ ID NO: 267789 - DNA, 15 bp, Homo sapiens
tacacatttgtctga

SEQ ID NO: 267790 - DNA, 15 bp, Homo sapiens
atacacatttgtctg

SEQ ID NO: 267791 - DNA, 15 bp, Homo sapiens
aatacacatttgtct

SEQ ID NO: 267792 - DNA, 15 bp, Homo sapiens
aaatacacatttgtc

SEQ ID NO: 267793 - DNA, 15 bp, Homo sapiens
taaatacacatttgt

SEQ ID NO: 267794 - DNA, 15 bp, Homo sapiens
ttaaatacacatttg

SEQ ID NO: 267795 - DNA, 15 bp, Homo sapiens
gttaaatacacattt

SEQ ID NO: 267796 - DNA, 15 bp, Homo sapiens
agttaaatacacatt

SEQ ID NO: 267797 - DNA, 15 bp, Homo sapiens
aagttaaatacacat

SEQ ID NO: 267798 - DNA, 15 bp, Homo sapiens
taagttaaatacaca

SEQ ID NO: 267799 - DNA, 15 bp, Homo sapiens
ataagttaaatacac

SEQ ID NO: 267800 - DNA, 15 bp, Homo sapiens
cataagttaaataca

SEQ ID NO: 267801 - DNA, 15 bp, Homo sapiens
acataagttaaatac

SEQ ID NO: 267802 - DNA, 15 bp, Homo sapiens
tacataagttaaata

SEQ ID NO: 267803 - DNA, 15 bp, Homo sapiens
ttacataagttaaat

SEQ ID NO: 267804 - DNA, 15 bp, Homo sapiens
tttacataagttaaa

SEQ ID NO: 267805 - DNA, 15 bp, Homo sapiens
ttttacataagttaa

SEQ ID NO: 267806 - DNA, 15 bp, Homo sapiens
cttttacataagtta

SEQ ID NO: 267807 - DNA, 15 bp, Homo sapiens
tcttttacataagtt

SEQ ID NO: 267808 - DNA, 15 bp, Homo sapiens
atcttttacataagt

SEQ ID NO: 267809 - DNA, 15 bp, Homo sapiens
tatcttttacataag

SEQ ID NO: 267810 - DNA, 15 bp, Homo sapiens
ttatcttttacataa

SEQ ID NO: 267811 - DNA, 15 bp, Homo sapiens
cttatcttttacata

SEQ ID NO: 267812 - DNA, 15 bp, Homo sapiens
acttatcttttacat

SEQ ID NO: 267813 - DNA, 15 bp, Homo sapiens
gacttatcttttaca

SEQ ID NO: 267814 - DNA, 15 bp, Homo sapiens
agacttatcttttac

SEQ ID NO: 267815 - DNA, 15 bp, Homo sapiens
cagacttatctttta

SEQ ID NO: 267816 - DNA, 15 bp, Homo sapiens
ccagacttatctttt

SEQ ID NO: 267817 - DNA, 15 bp, Homo sapiens
tccagacttatcttt

SEQ ID NO: 267818 - DNA, 15 bp, Homo sapiens
ttccagacttatctt

SEQ ID NO: 267819 - DNA, 15 bp, Homo sapiens
tttccagacttatct

SEQ ID NO: 267820 - DNA, 15 bp, Homo sapiens
atttccagacttatc

SEQ ID NO: 267821 - DNA, 15 bp, Homo sapiens
tatttccagacttat

SEQ ID NO: 267822 - DNA, 15 bp, Homo sapiens
ttatttccagactta

SEQ ID NO: 267823 - DNA, 15 bp, Homo sapiens
tttatttccagactt

SEQ ID NO: 267824 - DNA, 15 bp, Homo sapiens
atttatttccagact

SEQ ID NO: 267825 - DNA, 15 bp, Homo sapiens
catttatttccagac

SEQ ID NO: 267826 - DNA, 15 bp, Homo sapiens
acatttatttccaga

SEQ ID NO: 267827 - DNA, 15 bp, Homo sapiens
gacatttatttccag

SEQ ID NO: 267828 - DNA, 15 bp, Homo sapiens
agacatttatttcca

SEQ ID NO: 267829 - DNA, 15 bp, Homo sapiens
cagacatttatttcc

SEQ ID NO: 267830 - DNA, 15 bp, Homo sapiens
acagacatttatttc

SEQ ID NO: 267831 - DNA, 15 bp, Homo sapiens
aacagacatttattt

SEQ ID NO: 267832 - DNA, 15 bp, Homo sapiens
aaacagacatttatt

SEQ ID NO: 267833 - DNA, 15 bp, Homo sapiens
taaacagacatttat

SEQ ID NO: 267834 - DNA, 15 bp, Homo sapiens
ataaacagacattta

SEQ ID NO: 267835 - DNA, 15 bp, Homo sapiens
aataaacagacattt

SEQ ID NO: 267836 - DNA, 15 bp, Homo sapiens
aaataaacagacatt

SEQ ID NO: 267837 - DNA, 15 bp, Homo sapiens
aaaataaacagacat

SEQ ID NO: 267838 - DNA, 15 bp, Homo sapiens
aaaaataaacagaca

SEQ ID NO: 267839 - DNA, 15 bp, Homo sapiens
caaaaataaacagac

SEQ ID NO: 267840 - DNA, 15 bp, Homo sapiens
acaaaaataaacaga

SEQ ID NO: 267841 - DNA, 15 bp, Homo sapiens
tacaaaaataaacag

SEQ ID NO: 267842 - DNA, 15 bp, Homo sapiens
gtacaaaaataaaca

SEQ ID NO: 267843 - DNA, 15 bp, Homo sapiens
agtacaaaaataaac

SEQ ID NO: 267844 - DNA, 15 bp, Homo sapiens
tagtacaaaaataaa

SEQ ID NO: 267845 - DNA, 15 bp, Homo sapiens
atagtacaaaaataa

SEQ ID NO: 267846 - DNA, 15 bp, Homo sapiens
aatagtacaaaaata

SEQ ID NO: 267847 - DNA, 15 bp, Homo sapiens
aaatagtacaaaaat

SEQ ID NO: 267848 - DNA, 15 bp, Homo sapiens
taaatagtacaaaaa

SEQ ID NO: 267849 - DNA, 15 bp, Homo sapiens
ttaaatagtacaaaa

SEQ ID NO: 267850 - DNA, 15 bp, Homo sapiens
tttaaatagtacaaa

SEQ ID NO: 267851 - DNA, 15 bp, Homo sapiens
ttttaaatagtacaa

SEQ ID NO: 267852 - DNA, 15 bp, Homo sapiens
tttttaaatagtaca

SEQ ID NO: 267853 - DNA, 15 bp, Homo sapiens
atttttaaatagtac

SEQ ID NO: 267854 - DNA, 15 bp, Homo sapiens
aatttttaaatagta

SEQ ID NO: 267855 - DNA, 15 bp, Homo sapiens
caatttttaaatagt

SEQ ID NO: 267856 - DNA, 15 bp, Homo sapiens
tcaatttttaaatag

SEQ ID NO: 267857 - DNA, 15 bp, Homo sapiens
gtcaatttttaaata

SEQ ID NO: 267858 - DNA, 15 bp, Homo sapiens
tgtcaatttttaaat

SEQ ID NO: 267859 - DNA, 15 bp, Homo sapiens
ctgtcaatttttaaa

SEQ ID NO: 267860 - DNA, 15 bp, Homo sapiens
tctgtcaatttttaa

SEQ ID NO: 267861 - DNA, 15 bp, Homo sapiens
atctgtcaattttta

SEQ ID NO: 267862 - DNA, 15 bp, Homo sapiens
gatctgtcaattttt

SEQ ID NO: 267863 - DNA, 15 bp, Homo sapiens
agatctgtcaatttt

SEQ ID NO: 267864 - DNA, 15 bp, Homo sapiens
aagatctgtcaattt

SEQ ID NO: 267865 - DNA, 15 bp, Homo sapiens
aaagatctgtcaatt

SEQ ID NO: 267866 - DNA, 15 bp, Homo sapiens
aaaagatctgtcaat

SEQ ID NO: 267867 - DNA, 15 bp, Homo sapiens
gaaaagatctgtcaa

SEQ ID NO: 267868 - DNA, 15 bp, Homo sapiens
agaaaagatctgtca

SEQ ID NO: 267869 - DNA, 15 bp, Homo sapiens
cagaaaagatctgtc

SEQ ID NO: 267870 - DNA, 15 bp, Homo sapiens
tcagaaaagatctgt

SEQ ID NO: 267871 - DNA, 15 bp, Homo sapiens
ttcagaaaagatctg

SEQ ID NO: 267872 - DNA, 15 bp, Homo sapiens
cttcagaaaagatct

SEQ ID NO: 267873 - DNA, 15 bp, Homo sapiens
tcttcagaaaagatc

SEQ ID NO: 267874 - DNA, 15 bp, Homo sapiens
atcttcagaaaagat

SEQ ID NO: 267875 - DNA, 15 bp, Homo sapiens
tatcttcagaaaaga

SEQ ID NO: 267876 - DNA, 15 bp, Homo sapiens
ttatcttcagaaaag

SEQ ID NO: 267877 - DNA, 15 bp, Homo sapiens
tttatcttcagaaaa

SEQ ID NO: 267878 - DNA, 15 bp, Homo sapiens
gtttatcttcagaaa

SEQ ID NO: 267879 - DNA, 15 bp, Homo sapiens
agtttatcttcagaa

SEQ ID NO: 267880 - DNA, 15 bp, Homo sapiens
aagtttatcttcaga

SEQ ID NO: 267881 - DNA, 15 bp, Homo sapiens
aaagtttatcttcag

SEQ ID NO: 267882 - DNA, 15 bp, Homo sapiens
caaagtttatcttca

SEQ ID NO: 267883 - DNA, 15 bp, Homo sapiens
tcaaagtttatcttc

SEQ ID NO: 267884 - DNA, 15 bp, Homo sapiens
atcaaagtttatctt

SEQ ID NO: 267885 - DNA, 15 bp, Homo sapiens
aatcaaagtttatct

SEQ ID NO: 267886 - DNA, 15 bp, Homo sapiens
caatcaaagtttatc

SEQ ID NO: 267887 - DNA, 15 bp, Homo sapiens
acaatcaaagtttat

SEQ ID NO: 267888 - DNA, 15 bp, Homo sapiens
aacaatcaaagttta

SEQ ID NO: 267889 - DNA, 15 bp, Homo sapiens
aaacaatcaaagttt

SEQ ID NO: 267890 - DNA, 15 bp, Homo sapiens
gaaacaatcaaagtt

SEQ ID NO: 267891 - DNA, 15 bp, Homo sapiens
agaaacaatcaaagt

SEQ ID NO: 267892 - DNA, 15 bp, Homo sapiens
tagaaacaatcaaag

SEQ ID NO: 267893 - DNA, 15 bp, Homo sapiens
atagaaacaatcaaa

SEQ ID NO: 267894 - DNA, 15 bp, Homo sapiens
tatagaaacaatcaa

SEQ ID NO: 267895 - DNA, 15 bp, Homo sapiens
gtatagaaacaatca

SEQ ID NO: 267896 - DNA, 15 bp, Homo sapiens
tgtatagaaacaatc

SEQ ID NO: 267897 - DNA, 15 bp, Homo sapiens
atgtatagaaacaat

SEQ ID NO: 267898 - DNA, 15 bp, Homo sapiens
gatgtatagaaacaa

SEQ ID NO: 267899 - DNA, 15 bp, Homo sapiens
agatgtatagaaaca

SEQ ID NO: 267900 - DNA, 15 bp, Homo sapiens
aagatgtatagaaac

SEQ ID NO: 267901 - DNA, 15 bp, Homo sapiens
aaagatgtatagaaa

SEQ ID NO: 267902 - DNA, 15 bp, Homo sapiens
caaagatgtatagaa

SEQ ID NO: 267903 - DNA, 15 bp, Homo sapiens
acaaagatgtataga

SEQ ID NO: 267904 - DNA, 15 bp, Homo sapiens
gacaaagatgtatag

SEQ ID NO: 267905 - DNA, 15 bp, Homo sapiens
tgacaaagatgtata

SEQ ID NO: 267906 - DNA, 15 bp, Homo sapiens
atgacaaagatgtat

SEQ ID NO: 267907 - DNA, 15 bp, Homo sapiens
tatgacaaagatgta

SEQ ID NO: 267908 - DNA, 15 bp, Homo sapiens
atatgacaaagatgt

SEQ ID NO: 267909 - DNA, 15 bp, Homo sapiens
catatgacaaagatg

SEQ ID NO: 267910 - DNA, 15 bp, Homo sapiens
tcatatgacaaagat

SEQ ID NO: 267911 - DNA, 15 bp, Homo sapiens
gtcatatgacaaaga

SEQ ID NO: 267912 - DNA, 15 bp, Homo sapiens
tgtcatatgacaaag

SEQ ID NO: 267913 - DNA, 15 bp, Homo sapiens
atgtcatatgacaaa

SEQ ID NO: 267914 - DNA, 15 bp, Homo sapiens
tatgtcatatgacaa

SEQ ID NO: 267915 - DNA, 15 bp, Homo sapiens
ttatgtcatatgaca

SEQ ID NO: 267916 - DNA, 15 bp, Homo sapiens
cttatgtcatatgac

SEQ ID NO: 267917 - DNA, 15 bp, Homo sapiens
tcttatgtcatatga

SEQ ID NO: 267918 - DNA, 15 bp, Homo sapiens
atcttatgtcatatg

SEQ ID NO: 267919 - DNA, 15 bp, Homo sapiens
aatcttatgtcatat

SEQ ID NO: 267920 - DNA, 15 bp, Homo sapiens
aaatcttatgtcata

SEQ ID NO: 267921 - DNA, 15 bp, Homo sapiens
gaaatcttatgtcat

SEQ ID NO: 267922 - DNA, 15 bp, Homo sapiens
agaaatcttatgtca

SEQ ID NO: 267923 - DNA, 15 bp, Homo sapiens
gagaaatcttatgtc

SEQ ID NO: 267924 - DNA, 15 bp, Homo sapiens
agagaaatcttatgt

SEQ ID NO: 267925 - DNA, 15 bp, Homo sapiens
cagagaaatcttatg

SEQ ID NO: 267926 - DNA, 15 bp, Homo sapiens
tcagagaaatcttat

SEQ ID NO: 267927 - DNA, 15 bp, Homo sapiens
ttcagagaaatctta

SEQ ID NO: 267928 - DNA, 15 bp, Homo sapiens
cttcagagaaatctt

SEQ ID NO: 267929 - DNA, 15 bp, Homo sapiens
gcttcagagaaatct

SEQ ID NO: 267930 - DNA, 15 bp, Homo sapiens
tgcttcagagaaatc

SEQ ID NO: 267931 - DNA, 15 bp, Homo sapiens
atgcttcagagaaat

SEQ ID NO: 267932 - DNA, 15 bp, Homo sapiens
aatgcttcagagaaa

SEQ ID NO: 267933 - DNA, 15 bp, Homo sapiens
taatgcttcagagaa

SEQ ID NO: 267934 - DNA, 15 bp, Homo sapiens
gtaatgcttcagaga

SEQ ID NO: 267935 - DNA, 15 bp, Homo sapiens
agtaatgcttcagag

SEQ ID NO: 267936 - DNA, 15 bp, Homo sapiens
gagtaatgcttcaga

SEQ ID NO: 267937 - DNA, 15 bp, Homo sapiens
agagtaatgcttcag

SEQ ID NO: 267938 - DNA, 15 bp, Homo sapiens
aagagtaatgcttca

SEQ ID NO: 267939 - DNA, 15 bp, Homo sapiens
taagagtaatgcttc

SEQ ID NO: 267940 - DNA, 15 bp, Homo sapiens
ttaagagtaatgctt

SEQ ID NO: 267941 - DNA, 15 bp, Homo sapiens
tttaagagtaatgct

SEQ ID NO: 267942 - DNA, 15 bp, Homo sapiens
gtttaagagtaatgc

SEQ ID NO: 267943 - DNA, 15 bp, Homo sapiens
ggtttaagagtaatg

SEQ ID NO: 267944 - DNA, 15 bp, Homo sapiens
tggtttaagagtaat

SEQ ID NO: 267945 - DNA, 15 bp, Homo sapiens
atggtttaagagtaa

SEQ ID NO: 267946 - DNA, 15 bp, Homo sapiens
aatggtttaagagta

SEQ ID NO: 267947 - DNA, 15 bp, Homo sapiens
taatggtttaagagt

SEQ ID NO: 267948 - DNA, 15 bp, Homo sapiens
ataatggtttaagag

SEQ ID NO: 267949 - DNA, 15 bp, Homo sapiens
gataatggtttaaga

SEQ ID NO: 267950 - DNA, 15 bp, Homo sapiens
agataatggtttaag

SEQ ID NO: 267951 - DNA, 15 bp, Homo sapiens
aagataatggtttaa

SEQ ID NO: 267952 - DNA, 15 bp, Homo sapiens
caagataatggttta

SEQ ID NO: 267953 - DNA, 15 bp, Homo sapiens
gcaagataatggttt

SEQ ID NO: 267954 - DNA, 15 bp, Homo sapiens
tgcaagataatggtt

SEQ ID NO: 267955 - DNA, 15 bp, Homo sapiens
atgcaagataatggt

SEQ ID NO: 267956 - DNA, 15 bp, Homo sapiens
aatgcaagataatgg

SEQ ID NO: 267957 - DNA, 15 bp, Homo sapiens
gaatgcaagataatg

SEQ ID NO: 267958 - DNA, 15 bp, Homo sapiens
agaatgcaagataat

SEQ ID NO: 267959 - DNA, 15 bp, Homo sapiens
gagaatgcaagataa

SEQ ID NO: 267960 - DNA, 15 bp, Homo sapiens
ggagaatgcaagata

SEQ ID NO: 267961 - DNA, 15 bp, Homo sapiens
aggagaatgcaagat

SEQ ID NO: 267962 - DNA, 15 bp, Homo sapiens
taggagaatgcaaga

SEQ ID NO: 267963 - DNA, 15 bp, Homo sapiens
gtaggagaatgcaag

SEQ ID NO: 267964 - DNA, 15 bp, Homo sapiens
ggtaggagaatgcaa

SEQ ID NO: 267965 - DNA, 15 bp, Homo sapiens
aggtaggagaatgca

SEQ ID NO: 267966 - DNA, 15 bp, Homo sapiens
taggtaggagaatgc

SEQ ID NO: 267967 - DNA, 15 bp, Homo sapiens
ataggtaggagaatg

SEQ ID NO: 267968 - DNA, 15 bp, Homo sapiens
aataggtaggagaat

SEQ ID NO: 267969 - DNA, 15 bp, Homo sapiens
gaataggtaggagaa

SEQ ID NO: 267970 - DNA, 15 bp, Homo sapiens
tgaataggtaggaga

SEQ ID NO: 267971 - DNA, 15 bp, Homo sapiens
ttgaataggtaggag

SEQ ID NO: 267972 - DNA, 15 bp, Homo sapiens
tttgaataggtagga

SEQ ID NO: 267973 - DNA, 15 bp, Homo sapiens
ttttgaataggtagg

SEQ ID NO: 267974 - DNA, 15 bp, Homo sapiens
gttttgaataggtag

SEQ ID NO: 267975 - DNA, 15 bp, Homo sapiens
agttttgaataggta

SEQ ID NO: 267976 - DNA, 15 bp, Homo sapiens
tagttttgaataggt

SEQ ID NO: 267977 - DNA, 15 bp, Homo sapiens
ctagttttgaatagg

SEQ ID NO: 267978 - DNA, 15 bp, Homo sapiens
cctagttttgaatag

SEQ ID NO: 267979 - DNA, 15 bp, Homo sapiens
tcctagttttgaata

SEQ ID NO: 267980 - DNA, 15 bp, Homo sapiens
gtcctagttttgaat

SEQ ID NO: 267981 - DNA, 15 bp, Homo sapiens
agtcctagttttgaa

SEQ ID NO: 267982 - DNA, 15 bp, Homo sapiens
cagtcctagttttga

SEQ ID NO: 267983 - DNA, 15 bp, Homo sapiens
ccagtcctagttttg

SEQ ID NO: 267984 - DNA, 15 bp, Homo sapiens
gccagtcctagtttt

SEQ ID NO: 267985 - DNA, 15 bp, Homo sapiens
ggccagtcctagttt

SEQ ID NO: 267986 - DNA, 15 bp, Homo sapiens
gggccagtcctagtt

SEQ ID NO: 267987 - DNA, 15 bp, Homo sapiens
agggccagtcctagt

SEQ ID NO: 267988 - DNA, 15 bp, Homo sapiens
aagggccagtcctag

SEQ ID NO: 267989 - DNA, 15 bp, Homo sapiens
gaagggccagtccta

SEQ ID NO: 267990 - DNA, 15 bp, Homo sapiens
tgaagggccagtcct

SEQ ID NO: 267991 - DNA, 15 bp, Homo sapiens
atgaagggccagtcc

SEQ ID NO: 267992 - DNA, 15 bp, Homo sapiens
catgaagggccagtc

SEQ ID NO: 267993 - DNA, 15 bp, Homo sapiens
tcatgaagggccagt

SEQ ID NO: 267994 - DNA, 15 bp, Homo sapiens
ttcatgaagggccag

SEQ ID NO: 267995 - DNA, 15 bp, Homo sapiens
tttcatgaagggcca

SEQ ID NO: 267996 - DNA, 15 bp, Homo sapiens
atttcatgaagggcc

SEQ ID NO: 267997 - DNA, 15 bp, Homo sapiens
catttcatgaagggc

SEQ ID NO: 267998 - DNA, 15 bp, Homo sapiens
ccatttcatgaaggg

SEQ ID NO: 267999 - DNA, 15 bp, Homo sapiens
accatttcatgaagg

SEQ ID NO: 268000 - DNA, 15 bp, Homo sapiens
aaccatttcatgaag

SEQ ID NO: 268001 - DNA, 15 bp, Homo sapiens
aaaccatttcatgaa

SEQ ID NO: 268002 - DNA, 15 bp, Homo sapiens
aaaaccatttcatga

SEQ ID NO: 268003 - DNA, 15 bp, Homo sapiens
caaaaccatttcatg

SEQ ID NO: 268004 - DNA, 15 bp, Homo sapiens
gcaaaaccatttcat

SEQ ID NO: 268005 - DNA, 15 bp, Homo sapiens
ggcaaaaccatttca

SEQ ID NO: 268006 - DNA, 15 bp, Homo sapiens
gggcaaaaccatttc

SEQ ID NO: 268007 - DNA, 15 bp, Homo sapiens
agggcaaaaccattt

SEQ ID NO: 268008 - DNA, 15 bp, Homo sapiens
gagggcaaaaccatt

SEQ ID NO: 268009 - DNA, 15 bp, Homo sapiens
tgagggcaaaaccat

SEQ ID NO: 268010 - DNA, 15 bp, Homo sapiens
ttgagggcaaaacca

SEQ ID NO: 268011 - DNA, 15 bp, Homo sapiens
attgagggcaaaacc

SEQ ID NO: 268012 - DNA, 15 bp, Homo sapiens
aattgagggcaaaac

SEQ ID NO: 268013 - DNA, 15 bp, Homo sapiens
taattgagggcaaaa

SEQ ID NO: 268014 - DNA, 15 bp, Homo sapiens
ataattgagggcaaa

SEQ ID NO: 268015 - DNA, 15 bp, Homo sapiens
tataattgagggcaa

SEQ ID NO: 268016 - DNA, 15 bp, Homo sapiens
atataattgagggca

SEQ ID NO: 268017 - DNA, 15 bp, Homo sapiens
tatataattgagggc

SEQ ID NO: 268018 - DNA, 15 bp, Homo sapiens
ctatataattgaggg

SEQ ID NO: 268019 - DNA, 15 bp, Homo sapiens
tctatataattgagg

SEQ ID NO: 268020 - DNA, 15 bp, Homo sapiens
ctctatataattgag

SEQ ID NO: 268021 - DNA, 15 bp, Homo sapiens
cctctatataattga

SEQ ID NO: 268022 - DNA, 15 bp, Homo sapiens
gcctctatataattg

SEQ ID NO: 268023 - DNA, 15 bp, Homo sapiens
agcctctatataatt

SEQ ID NO: 268024 - DNA, 15 bp, Homo sapiens
aagcctctatataat

SEQ ID NO: 268025 - DNA, 15 bp, Homo sapiens
gaagcctctatataa

SEQ ID NO: 268026 - DNA, 15 bp, Homo sapiens
ggaagcctctatata

SEQ ID NO: 268027 - DNA, 15 bp, Homo sapiens
aggaagcctctatat

SEQ ID NO: 268028 - DNA, 15 bp, Homo sapiens
taggaagcctctata

SEQ ID NO: 268029 - DNA, 15 bp, Homo sapiens
ctaggaagcctctat

SEQ ID NO: 268030 - DNA, 15 bp, Homo sapiens
tctaggaagcctcta

SEQ ID NO: 268031 - DNA, 15 bp, Homo sapiens
ctctaggaagcctct

SEQ ID NO: 268032 - DNA, 15 bp, Homo sapiens
actctaggaagcctc

SEQ ID NO: 268033 - DNA, 15 bp, Homo sapiens
gactctaggaagcct

SEQ ID NO: 268034 - DNA, 15 bp, Homo sapiens
tgactctaggaagcc

SEQ ID NO: 268035 - DNA, 15 bp, Homo sapiens
gtgactctaggaagc

SEQ ID NO: 268036 - DNA, 15 bp, Homo sapiens
agtgactctaggaag

SEQ ID NO: 268037 - DNA, 15 bp, Homo sapiens
tagtgactctaggaa

SEQ ID NO: 268038 - DNA, 15 bp, Homo sapiens
atagtgactctagga

SEQ ID NO: 268039 - DNA, 15 bp, Homo sapiens
aatagtgactctagg

SEQ ID NO: 268040 - DNA, 15 bp, Homo sapiens
aaatagtgactctag

SEQ ID NO: 268041 - DNA, 15 bp, Homo sapiens
taaatagtgactcta

SEQ ID NO: 268042 - DNA, 15 bp, Homo sapiens
ttaaatagtgactct

SEQ ID NO: 268043 - DNA, 15 bp, Homo sapiens
tttaaatagtgactc

SEQ ID NO: 268044 - DNA, 15 bp, Homo sapiens
atttaaatagtgact

SEQ ID NO: 268045 - DNA, 15 bp, Homo sapiens
gatttaaatagtgac

SEQ ID NO: 268046 - DNA, 15 bp, Homo sapiens
agatttaaatagtga

SEQ ID NO: 268047 - DNA, 15 bp, Homo sapiens
gagatttaaatagtg

SEQ ID NO: 268048 - DNA, 15 bp, Homo sapiens
tgagatttaaatagt

SEQ ID NO: 268049 - DNA, 15 bp, Homo sapiens
atgagatttaaatag

SEQ ID NO: 268050 - DNA, 15 bp, Homo sapiens
tatgagatttaaata

SEQ ID NO: 268051 - DNA, 15 bp, Homo sapiens
ttatgagatttaaat

SEQ ID NO: 268052 - DNA, 15 bp, Homo sapiens
attatgagatttaaa

SEQ ID NO: 268053 - DNA, 15 bp, Homo sapiens
gattatgagatttaa

SEQ ID NO: 268054 - DNA, 15 bp, Homo sapiens
ggattatgagattta

SEQ ID NO: 268055 - DNA, 15 bp, Homo sapiens
aggattatgagattt

SEQ ID NO: 268056 - DNA, 15 bp, Homo sapiens
aaggattatgagatt

SEQ ID NO: 268057 - DNA, 15 bp, Homo sapiens
taaggattatgagat

SEQ ID NO: 268058 - DNA, 15 bp, Homo sapiens
ataaggattatgaga

SEQ ID NO: 268059 - DNA, 15 bp, Homo sapiens
aataaggattatgag

SEQ ID NO: 268060 - DNA, 15 bp, Homo sapiens
gaataaggattatga

SEQ ID NO: 268061 - DNA, 15 bp, Homo sapiens
tgaataaggattatg

SEQ ID NO: 268062 - DNA, 15 bp, Homo sapiens
gtgaataaggattat

SEQ ID NO: 268063 - DNA, 15 bp, Homo sapiens
agtgaataaggatta

SEQ ID NO: 268064 - DNA, 15 bp, Homo sapiens
cagtgaataaggatt

SEQ ID NO: 268065 - DNA, 15 bp, Homo sapiens
gcagtgaataaggat

SEQ ID NO: 268066 - DNA, 15 bp, Homo sapiens
cgcagtgaataagga

SEQ ID NO: 268067 - DNA, 15 bp, Homo sapiens
tcgcagtgaataagg

SEQ ID NO: 268068 - DNA, 15 bp, Homo sapiens
gtcgcagtgaataag

SEQ ID NO: 268069 - DNA, 15 bp, Homo sapiens
tgtcgcagtgaataa

SEQ ID NO: 268070 - DNA, 15 bp, Homo sapiens
gtgtcgcagtgaata

SEQ ID NO: 268071 - DNA, 15 bp, Homo sapiens
agtgtcgcagtgaat

SEQ ID NO: 268072 - DNA, 15 bp, Homo sapiens
cagtgtcgcagtgaa

SEQ ID NO: 268073 - DNA, 15 bp, Homo sapiens
acagtgtcgcagtga

SEQ ID NO: 268074 - DNA, 15 bp, Homo sapiens
cacagtgtcgcagtg

SEQ ID NO: 268075 - DNA, 15 bp, Homo sapiens
acacagtgtcgcagt

SEQ ID NO: 268076 - DNA, 15 bp, Homo sapiens
aacacagtgtcgcag

SEQ ID NO: 268077 - DNA, 15 bp, Homo sapiens
caacacagtgtcgca

SEQ ID NO: 268078 - DNA, 15 bp, Homo sapiens
ccaacacagtgtcgc

SEQ ID NO: 268079 - DNA, 15 bp, Homo sapiens
tccaacacagtgtcg

SEQ ID NO: 268080 - DNA, 15 bp, Homo sapiens
ttccaacacagtgtc

SEQ ID NO: 268081 - DNA, 15 bp, Homo sapiens
tttccaacacagtgt

SEQ ID NO: 268082 - DNA, 15 bp, Homo sapiens
ttttccaacacagtg

SEQ ID NO: 268083 - DNA, 15 bp, Homo sapiens
attttccaacacagt

SEQ ID NO: 268084 - DNA, 15 bp, Homo sapiens
cattttccaacacag

SEQ ID NO: 268085 - DNA, 15 bp, Homo sapiens
acattttccaacaca

SEQ ID NO: 268086 - DNA, 15 bp, Homo sapiens
gacattttccaacac

SEQ ID NO: 268087 - DNA, 15 bp, Homo sapiens
agacattttccaaca

SEQ ID NO: 268088 - DNA, 15 bp, Homo sapiens
tagacattttccaac

SEQ ID NO: 268089 - DNA, 15 bp, Homo sapiens
ctagacattttccaa

SEQ ID NO: 268090 - DNA, 15 bp, Homo sapiens
actagacattttcca

SEQ ID NO: 268091 - DNA, 15 bp, Homo sapiens
aactagacattttcc

SEQ ID NO: 268092 - DNA, 15 bp, Homo sapiens
aaactagacattttc

SEQ ID NO: 268093 - DNA, 15 bp, Homo sapiens
caaactagacatttt

SEQ ID NO: 268094 - DNA, 15 bp, Homo sapiens
acaaactagacattt

SEQ ID NO: 268095 - DNA, 15 bp, Homo sapiens
cacaaactagacatt

SEQ ID NO: 268096 - DNA, 15 bp, Homo sapiens
acacaaactagacat

SEQ ID NO: 268097 - DNA, 15 bp, Homo sapiens
tacacaaactagaca

SEQ ID NO: 268098 - DNA, 15 bp, Homo sapiens
atacacaaactagac

SEQ ID NO: 268099 - DNA, 15 bp, Homo sapiens
gatacacaaactaga

SEQ ID NO: 268100 - DNA, 15 bp, Homo sapiens
agatacacaaactag

SEQ ID NO: 268101 - DNA, 15 bp, Homo sapiens
aagatacacaaacta

SEQ ID NO: 268102 - DNA, 15 bp, Homo sapiens
aaagatacacaaact

SEQ ID NO: 268103 - DNA, 15 bp, Homo sapiens
taaagatacacaaac

SEQ ID NO: 268104 - DNA, 15 bp, Homo sapiens
gtaaagatacacaaa

SEQ ID NO: 268105 - DNA, 15 bp, Homo sapiens
tgtaaagatacacaa

SEQ ID NO: 268106 - DNA, 15 bp, Homo sapiens
ctgtaaagatacaca

SEQ ID NO: 268107 - DNA, 15 bp, Homo sapiens
tctgtaaagatacac

SEQ ID NO: 268108 - DNA, 15 bp, Homo sapiens
ttctgtaaagataca

SEQ ID NO: 268109 - DNA, 15 bp, Homo sapiens
cttctgtaaagatac

SEQ ID NO: 268110 - DNA, 15 bp, Homo sapiens
tcttctgtaaagata

SEQ ID NO: 268111 - DNA, 15 bp, Homo sapiens
atcttctgtaaagat

SEQ ID NO: 268112 - DNA, 15 bp, Homo sapiens
catcttctgtaaaga

SEQ ID NO: 268113 - DNA, 15 bp, Homo sapiens
ccatcttctgtaaag

SEQ ID NO: 268114 - DNA, 15 bp, Homo sapiens
gccatcttctgtaaa

SEQ ID NO: 268115 - DNA, 15 bp, Homo sapiens
tgccatcttctgtaa

SEQ ID NO: 268116 - DNA, 15 bp, Homo sapiens
ttgccatcttctgta

SEQ ID NO: 268117 - DNA, 15 bp, Homo sapiens
tttgccatcttctgt

SEQ ID NO: 268118 - DNA, 15 bp, Homo sapiens
gtttgccatcttctg

SEQ ID NO: 268119 - DNA, 15 bp, Homo sapiens
tgtttgccatcttct

SEQ ID NO: 268120 - DNA, 15 bp, Homo sapiens
ttgtttgccatcttc

SEQ ID NO: 268121 - DNA, 15 bp, Homo sapiens
cttgtttgccatctt

SEQ ID NO: 268122 - DNA, 15 bp, Homo sapiens
gcttgtttgccatct

SEQ ID NO: 268123 - DNA, 15 bp, Homo sapiens
agcttgtttgccatc

SEQ ID NO: 268124 - DNA, 15 bp, Homo sapiens
aagcttgtttgccat

SEQ ID NO: 268125 - DNA, 15 bp, Homo sapiens
taagcttgtttgcca

SEQ ID NO: 268126 - DNA, 15 bp, Homo sapiens
ataagcttgtttgcc

SEQ ID NO: 268127 - DNA, 15 bp, Homo sapiens
aataagcttgtttgc

SEQ ID NO: 268128 - DNA, 15 bp, Homo sapiens
aaataagcttgtttg

SEQ ID NO: 268129 - DNA, 15 bp, Homo sapiens
aaaataagcttgttt

SEQ ID NO: 268130 - DNA, 15 bp, Homo sapiens
gaaaataagcttgtt

SEQ ID NO: 268131 - DNA, 15 bp, Homo sapiens
tgaaaataagcttgt

SEQ ID NO: 268132 - DNA, 15 bp, Homo sapiens
atgaaaataagcttg

SEQ ID NO: 268133 - DNA, 15 bp, Homo sapiens
aatgaaaataagctt

SEQ ID NO: 268134 - DNA, 15 bp, Homo sapiens
caatgaaaataagct

SEQ ID NO: 268135 - DNA, 15 bp, Homo sapiens
gcaatgaaaataagc

SEQ ID NO: 268136 - DNA, 15 bp, Homo sapiens
ggcaatgaaaataag

SEQ ID NO: 268137 - DNA, 15 bp, Homo sapiens
aggcaatgaaaataa

SEQ ID NO: 268138 - DNA, 15 bp, Homo sapiens
taggcaatgaaaata

SEQ ID NO: 268139 - DNA, 15 bp, Homo sapiens
ctaggcaatgaaaat

SEQ ID NO: 268140 - DNA, 15 bp, Homo sapiens
actaggcaatgaaaa

SEQ ID NO: 268141 - DNA, 15 bp, Homo sapiens
gactaggcaatgaaa

SEQ ID NO: 268142 - DNA, 15 bp, Homo sapiens
agactaggcaatgaa

SEQ ID NO: 268143 - DNA, 15 bp, Homo sapiens
tagactaggcaatga

SEQ ID NO: 268144 - DNA, 15 bp, Homo sapiens
ctagactaggcaatg

SEQ ID NO: 268145 - DNA, 15 bp, Homo sapiens
tctagactaggcaat

SEQ ID NO: 268146 - DNA, 15 bp, Homo sapiens
ttctagactaggcaa

SEQ ID NO: 268147 - DNA, 15 bp, Homo sapiens
cttctagactaggca

SEQ ID NO: 268148 - DNA, 15 bp, Homo sapiens
tcttctagactaggc

SEQ ID NO: 268149 - DNA, 15 bp, Homo sapiens
ttcttctagactagg

SEQ ID NO: 268150 - DNA, 15 bp, Homo sapiens
cttcttctagactag

SEQ ID NO: 268151 - DNA, 15 bp, Homo sapiens
tcttcttctagacta

SEQ ID NO: 268152 - DNA, 15 bp, Homo sapiens
ttcttcttctagact

SEQ ID NO: 268153 - DNA, 15 bp, Homo sapiens
cttcttcttctagac

SEQ ID NO: 268154 - DNA, 15 bp, Homo sapiens
tcttcttcttctaga

SEQ ID NO: 268155 - DNA, 15 bp, Homo sapiens
ttcttcttcttctag

SEQ ID NO: 268156 - DNA, 15 bp, Homo sapiens
tttcttcttcttcta

SEQ ID NO: 268157 - DNA, 15 bp, Homo sapiens
ttttcttcttcttct

SEQ ID NO: 268158 - DNA, 15 bp, Homo sapiens
tttttcttcttcttc

SEQ ID NO: 268159 - DNA, 15 bp, Homo sapiens
ttttttcttcttctt

SEQ ID NO: 268160 - DNA, 15 bp, Homo sapiens
tttttttcttcttct

SEQ ID NO: 268161 - DNA, 15 bp, Homo sapiens
atttttttcttcttc

SEQ ID NO: 268162 - DNA, 15 bp, Homo sapiens
tatttttttcttctt

SEQ ID NO: 268163 - DNA, 15 bp, Homo sapiens
gtatttttttcttct

SEQ ID NO: 268164 - DNA, 15 bp, Homo sapiens
tgtatttttttcttc

SEQ ID NO: 268165 - DNA, 15 bp, Homo sapiens
gtgtatttttttctt

SEQ ID NO: 268166 - DNA, 15 bp, Homo sapiens
tgtgtatttttttct

SEQ ID NO: 268167 - DNA, 15 bp, Homo sapiens
ttgtgtatttttttc

SEQ ID NO: 268168 - DNA, 15 bp, Homo sapiens
attgtgtattttttt

SEQ ID NO: 268169 - DNA, 15 bp, Homo sapiens
tattgtgtatttttt

SEQ ID NO: 268170 - DNA, 15 bp, Homo sapiens
ttattgtgtattttt

SEQ ID NO: 268171 - DNA, 15 bp, Homo sapiens
cttattgtgtatttt

SEQ ID NO: 268172 - DNA, 15 bp, Homo sapiens
ccttattgtgtattt

SEQ ID NO: 268173 - DNA, 15 bp, Homo sapiens
gccttattgtgtatt

SEQ ID NO: 268174 - DNA, 15 bp, Homo sapiens
tgccttattgtgtat

SEQ ID NO: 268175 - DNA, 15 bp, Homo sapiens
ttgccttattgtgta

SEQ ID NO: 268176 - DNA, 15 bp, Homo sapiens
tttgccttattgtgt

SEQ ID NO: 268177 - DNA, 15 bp, Homo sapiens
ctttgccttattgtg

SEQ ID NO: 268178 - DNA, 15 bp, Homo sapiens
tctttgccttattgt

SEQ ID NO: 268179 - DNA, 15 bp, Homo sapiens
ttctttgccttattg

SEQ ID NO: 268180 - DNA, 15 bp, Homo sapiens
attctttgccttatt

SEQ ID NO: 268181 - DNA, 15 bp, Homo sapiens
tattctttgccttat

SEQ ID NO: 268182 - DNA, 15 bp, Homo sapiens
ttattctttgcctta

SEQ ID NO: 268183 - DNA, 15 bp, Homo sapiens
cttattctttgcctt

SEQ ID NO: 268184 - DNA, 15 bp, Homo sapiens
tcttattctttgcct

SEQ ID NO: 268185 - DNA, 15 bp, Homo sapiens
gtcttattctttgcc

SEQ ID NO: 268186 - DNA, 15 bp, Homo sapiens
tgtcttattctttgc

SEQ ID NO: 268187 - DNA, 15 bp, Homo sapiens
atgtcttattctttg

SEQ ID NO: 268188 - DNA, 15 bp, Homo sapiens
tatgtcttattcttt

SEQ ID NO: 268189 - DNA, 15 bp, Homo sapiens
atatgtcttattctt

SEQ ID NO: 268190 - DNA, 15 bp, Homo sapiens
tatatgtcttattct

SEQ ID NO: 268191 - DNA, 15 bp, Homo sapiens
atatatgtcttattc

SEQ ID NO: 268192 - DNA, 15 bp, Homo sapiens
aatatatgtcttatt

SEQ ID NO: 268193 - DNA, 15 bp, Homo sapiens
taatatatgtcttat

SEQ ID NO: 268194 - DNA, 15 bp, Homo sapiens
ataatatatgtctta

SEQ ID NO: 268195 - DNA, 15 bp, Homo sapiens
cataatatatgtctt

SEQ ID NO: 268196 - DNA, 15 bp, Homo sapiens
tcataatatatgtct

SEQ ID NO: 268197 - DNA, 15 bp, Homo sapiens
ttcataatatatgtc

SEQ ID NO: 268198 - DNA, 15 bp, Homo sapiens
cttcataatatatgt

SEQ ID NO: 268199 - DNA, 15 bp, Homo sapiens
ccttcataatatatg

SEQ ID NO: 268200 - DNA, 15 bp, Homo sapiens
cccttcataatatat

SEQ ID NO: 268201 - DNA, 15 bp, Homo sapiens
ccccttcataatata

SEQ ID NO: 268202 - DNA, 15 bp, Homo sapiens
cccccttcataatat

SEQ ID NO: 268203 - DNA, 15 bp, Homo sapiens
gcccccttcataata

SEQ ID NO: 268204 - DNA, 15 bp, Homo sapiens
tgcccccttcataat

SEQ ID NO: 268205 - DNA, 15 bp, Homo sapiens
gtgcccccttcataa

SEQ ID NO: 268206 - DNA, 15 bp, Homo sapiens
tgtgcccccttcata

SEQ ID NO: 268207 - DNA, 15 bp, Homo sapiens
ttgtgcccccttcat

SEQ ID NO: 268208 - DNA, 15 bp, Homo sapiens
tttgtgcccccttca

SEQ ID NO: 268209 - DNA, 15 bp, Homo sapiens
ctttgtgcccccttc

SEQ ID NO: 268210 - DNA, 15 bp, Homo sapiens
actttgtgccccctt

SEQ ID NO: 268211 - DNA, 15 bp, Homo sapiens
aactttgtgccccct

SEQ ID NO: 268212 - DNA, 15 bp, Homo sapiens
taactttgtgccccc

SEQ ID NO: 268213 - DNA, 15 bp, Homo sapiens
ttaactttgtgcccc

SEQ ID NO: 268214 - DNA, 15 bp, Homo sapiens
cttaactttgtgccc

SEQ ID NO: 268215 - DNA, 15 bp, Homo sapiens
tcttaactttgtgcc

SEQ ID NO: 268216 - DNA, 15 bp, Homo sapiens
ttcttaactttgtgc

SEQ ID NO: 268217 - DNA, 15 bp, Homo sapiens
cttcttaactttgtg

SEQ ID NO: 268218 - DNA, 15 bp, Homo sapiens
acttcttaactttgt

SEQ ID NO: 268219 - DNA, 15 bp, Homo sapiens
aacttcttaactttg

SEQ ID NO: 268220 - DNA, 15 bp, Homo sapiens
gaacttcttaacttt

SEQ ID NO: 268221 - DNA, 15 bp, Homo sapiens
tgaacttcttaactt

SEQ ID NO: 268222 - DNA, 15 bp, Homo sapiens
ttgaacttcttaact

SEQ ID NO: 268223 - DNA, 15 bp, Homo sapiens
tttgaacttcttaac

SEQ ID NO: 268224 - DNA, 15 bp, Homo sapiens
ctttgaacttcttaa

SEQ ID NO: 268225 - DNA, 15 bp, Homo sapiens
tctttgaacttctta

SEQ ID NO: 268226 - DNA, 15 bp, Homo sapiens
ctctttgaacttctt

SEQ ID NO: 268227 - DNA, 15 bp, Homo sapiens
cctctttgaacttct

SEQ ID NO: 268228 - DNA, 15 bp, Homo sapiens
tcctctttgaacttc

SEQ ID NO: 268229 - DNA, 15 bp, Homo sapiens
ctcctctttgaactt

SEQ ID NO: 268230 - DNA, 15 bp, Homo sapiens
cctcctctttgaact

SEQ ID NO: 268231 - DNA, 15 bp, Homo sapiens
tcctcctctttgaac

SEQ ID NO: 268232 - DNA, 15 bp, Homo sapiens
ttcctcctctttgaa

SEQ ID NO: 268233 - DNA, 15 bp, Homo sapiens
tttcctcctctttga

SEQ ID NO: 268234 - DNA, 15 bp, Homo sapiens
atttcctcctctttg

SEQ ID NO: 268235 - DNA, 15 bp, Homo sapiens
aatttcctcctcttt

SEQ ID NO: 268236 - DNA, 15 bp, Homo sapiens
taatttcctcctctt

SEQ ID NO: 268237 - DNA, 15 bp, Homo sapiens
ataatttcctcctct

SEQ ID NO: 268238 - DNA, 15 bp, Homo sapiens
tataatttcctcctc

SEQ ID NO: 268239 - DNA, 15 bp, Homo sapiens
gtataatttcctcct

SEQ ID NO: 268240 - DNA, 15 bp, Homo sapiens
tgtataatttcctcc

SEQ ID NO: 268241 - DNA, 15 bp, Homo sapiens
ttgtataatttcctc

SEQ ID NO: 268242 - DNA, 15 bp, Homo sapiens
tttgtataatttcct

SEQ ID NO: 268243 - DNA, 15 bp, Homo sapiens
ctttgtataatttcc

SEQ ID NO: 268244 - DNA, 15 bp, Homo sapiens
actttgtataatttc

SEQ ID NO: 268245 - DNA, 15 bp, Homo sapiens
aactttgtataattt

SEQ ID NO: 268246 - DNA, 15 bp, Homo sapiens
caactttgtataatt

SEQ ID NO: 268247 - DNA, 15 bp, Homo sapiens
ccaactttgtataat

SEQ ID NO: 268248 - DNA, 15 bp, Homo sapiens
cccaactttgtataa

SEQ ID NO: 268249 - DNA, 15 bp, Homo sapiens
gcccaactttgtata

SEQ ID NO: 268250 - DNA, 15 bp, Homo sapiens
tgcccaactttgtat

SEQ ID NO: 268251 - DNA, 15 bp, Homo sapiens
ttgcccaactttgta

SEQ ID NO: 268252 - DNA, 15 bp, Homo sapiens
tttgcccaactttgt

SEQ ID NO: 268253 - DNA, 15 bp, Homo sapiens
atttgcccaactttg

SEQ ID NO: 268254 - DNA, 15 bp, Homo sapiens
gatttgcccaacttt

SEQ ID NO: 268255 - DNA, 15 bp, Homo sapiens
tgatttgcccaactt

SEQ ID NO: 268256 - DNA, 15 bp, Homo sapiens
atgatttgcccaact

SEQ ID NO: 268257 - DNA, 15 bp, Homo sapiens
aatgatttgcccaac

SEQ ID NO: 268258 - DNA, 15 bp, Homo sapiens
caatgatttgcccaa

SEQ ID NO: 268259 - DNA, 15 bp, Homo sapiens
tcaatgatttgccca

SEQ ID NO: 268260 - DNA, 15 bp, Homo sapiens
atcaatgatttgccc

SEQ ID NO: 268261 - DNA, 15 bp, Homo sapiens
catcaatgatttgcc

SEQ ID NO: 268262 - DNA, 15 bp, Homo sapiens
gcatcaatgatttgc

SEQ ID NO: 268263 - DNA, 15 bp, Homo sapiens
tgcatcaatgatttg

SEQ ID NO: 268264 - DNA, 15 bp, Homo sapiens
ttgcatcaatgattt

SEQ ID NO: 268265 - DNA, 15 bp, Homo sapiens
tttgcatcaatgatt

SEQ ID NO: 268266 - DNA, 15 bp, Homo sapiens
ttttgcatcaatgat

SEQ ID NO: 268267 - DNA, 15 bp, Homo sapiens
cttttgcatcaatga

SEQ ID NO: 268268 - DNA, 15 bp, Homo sapiens
gcttttgcatcaatg

SEQ ID NO: 268269 - DNA, 15 bp, Homo sapiens
agcttttgcatcaat

SEQ ID NO: 268270 - DNA, 15 bp, Homo sapiens
gagcttttgcatcaa

SEQ ID NO: 268271 - DNA, 15 bp, Homo sapiens
tgagcttttgcatca

SEQ ID NO: 268272 - DNA, 15 bp, Homo sapiens
atgagcttttgcatc

SEQ ID NO: 268273 - DNA, 15 bp, Homo sapiens
tatgagcttttgcat

SEQ ID NO: 268274 - DNA, 15 bp, Homo sapiens
ctatgagcttttgca

SEQ ID NO: 268275 - DNA, 15 bp, Homo sapiens
cctatgagcttttgc

SEQ ID NO: 268276 - DNA, 15 bp, Homo sapiens
gcctatgagcttttg

SEQ ID NO: 268277 - DNA, 15 bp, Homo sapiens
agcctatgagctttt

SEQ ID NO: 268278 - DNA, 15 bp, Homo sapiens
aagcctatgagcttt

SEQ ID NO: 268279 - DNA, 15 bp, Homo sapiens
aaagcctatgagctt

SEQ ID NO: 268280 - DNA, 15 bp, Homo sapiens
aaaagcctatgagct

SEQ ID NO: 268281 - DNA, 15 bp, Homo sapiens
caaaagcctatgagc

SEQ ID NO: 268282 - DNA, 15 bp, Homo sapiens
acaaaagcctatgag

SEQ ID NO: 268283 - DNA, 15 bp, Homo sapiens
aacaaaagcctatga

SEQ ID NO: 268284 - DNA, 15 bp, Homo sapiens
caacaaaagcctatg

SEQ ID NO: 268285 - DNA, 15 bp, Homo sapiens
acaacaaaagcctat

SEQ ID NO: 268286 - DNA, 15 bp, Homo sapiens
tacaacaaaagccta

SEQ ID NO: 268287 - DNA, 15 bp, Homo sapiens
gtacaacaaaagcct

SEQ ID NO: 268288 - DNA, 15 bp, Homo sapiens
ggtacaacaaaagcc

SEQ ID NO: 268289 - DNA, 15 bp, Homo sapiens
aggtacaacaaaagc

SEQ ID NO: 268290 - DNA, 15 bp, Homo sapiens
gaggtacaacaaaag

SEQ ID NO: 268291 - DNA, 15 bp, Homo sapiens
agaggtacaacaaaa

SEQ ID NO: 268292 - DNA, 15 bp, Homo sapiens
tagaggtacaacaaa

SEQ ID NO: 268293 - DNA, 15 bp, Homo sapiens
atagaggtacaacaa

SEQ ID NO: 268294 - DNA, 15 bp, Homo sapiens
gatagaggtacaaca

SEQ ID NO: 268295 - DNA, 15 bp, Homo sapiens
ggatagaggtacaac

SEQ ID NO: 268296 - DNA, 15 bp, Homo sapiens
aggatagaggtacaa

SEQ ID NO: 268297 - DNA, 15 bp, Homo sapiens
aaggatagaggtaca

SEQ ID NO: 268298 - DNA, 15 bp, Homo sapiens
caaggatagaggtac

SEQ ID NO: 268299 - DNA, 15 bp, Homo sapiens
tcaaggatagaggta

SEQ ID NO: 268300 - DNA, 15 bp, Homo sapiens
gtcaaggatagaggt

SEQ ID NO: 268301 - DNA, 15 bp, Homo sapiens
tgtcaaggatagagg

SEQ ID NO: 268302 - DNA, 15 bp, Homo sapiens
atgtcaaggatagag

SEQ ID NO: 268303 - DNA, 15 bp, Homo sapiens
gatgtcaaggataga

SEQ ID NO: 268304 - DNA, 15 bp, Homo sapiens
agatgtcaaggatag

SEQ ID NO: 268305 - DNA, 15 bp, Homo sapiens
aagatgtcaaggata

SEQ ID NO: 268306 - DNA, 15 bp, Homo sapiens
caagatgtcaaggat

SEQ ID NO: 268307 - DNA, 15 bp, Homo sapiens
ccaagatgtcaagga

SEQ ID NO: 268308 - DNA, 15 bp, Homo sapiens
accaagatgtcaagg

SEQ ID NO: 268309 - DNA, 15 bp, Homo sapiens
taccaagatgtcaag

SEQ ID NO: 268310 - DNA, 15 bp, Homo sapiens
ttaccaagatgtcaa

SEQ ID NO: 268311 - DNA, 15 bp, Homo sapiens
attaccaagatgtca

SEQ ID NO: 268312 - DNA, 15 bp, Homo sapiens
aattaccaagatgtc

SEQ ID NO: 268313 - DNA, 15 bp, Homo sapiens
aaattaccaagatgt

SEQ ID NO: 268314 - DNA, 15 bp, Homo sapiens
gaaattaccaagatg

SEQ ID NO: 268315 - DNA, 15 bp, Homo sapiens
tgaaattaccaagat

SEQ ID NO: 268316 - DNA, 15 bp, Homo sapiens
ttgaaattaccaaga

SEQ ID NO: 268317 - DNA, 15 bp, Homo sapiens
attgaaattaccaag

SEQ ID NO: 268318 - DNA, 15 bp, Homo sapiens
tattgaaattaccaa

SEQ ID NO: 268319 - DNA, 15 bp, Homo sapiens
atattgaaattacca

SEQ ID NO: 268320 - DNA, 15 bp, Homo sapiens
gatattgaaattacc

SEQ ID NO: 268321 - DNA, 15 bp, Homo sapiens
agatattgaaattac

SEQ ID NO: 268322 - DNA, 15 bp, Homo sapiens
tagatattgaaatta

SEQ ID NO: 268323 - DNA, 15 bp, Homo sapiens
gtagatattgaaatt

SEQ ID NO: 268324 - DNA, 15 bp, Homo sapiens
tgtagatattgaaat

SEQ ID NO: 268325 - DNA, 15 bp, Homo sapiens
atgtagatattgaaa

SEQ ID NO: 268326 - DNA, 15 bp, Homo sapiens
catgtagatattgaa

SEQ ID NO: 268327 - DNA, 15 bp, Homo sapiens
ccatgtagatattga

SEQ ID NO: 268328 - DNA, 15 bp, Homo sapiens
tccatgtagatattg

SEQ ID NO: 268329 - DNA, 15 bp, Homo sapiens
gtccatgtagatatt

SEQ ID NO: 268330 - DNA, 15 bp, Homo sapiens
ggtccatgtagatat

SEQ ID NO: 268331 - DNA, 15 bp, Homo sapiens
tggtccatgtagata

SEQ ID NO: 268332 - DNA, 15 bp, Homo sapiens
gtggtccatgtagat

SEQ ID NO: 268333 - DNA, 15 bp, Homo sapiens
tgtggtccatgtaga

SEQ ID NO: 268334 - DNA, 15 bp, Homo sapiens
atgtggtccatgtag

SEQ ID NO: 268335 - DNA, 15 bp, Homo sapiens
tatgtggtccatgta

SEQ ID NO: 268336 - DNA, 15 bp, Homo sapiens
atatgtggtccatgt

SEQ ID NO: 268337 - DNA, 15 bp, Homo sapiens
aatatgtggtccatg

SEQ ID NO: 268338 - DNA, 15 bp, Homo sapiens
aaatatgtggtccat

SEQ ID NO: 268339 - DNA, 15 bp, Homo sapiens
taaatatgtggtcca

SEQ ID NO: 268340 - DNA, 15 bp, Homo sapiens
ctaaatatgtggtcc

SEQ ID NO: 268341 - DNA, 15 bp, Homo sapiens
gctaaatatgtggtc

SEQ ID NO: 268342 - DNA, 15 bp, Homo sapiens
tgctaaatatgtggt

SEQ ID NO: 268343 - DNA, 15 bp, Homo sapiens
atgctaaatatgtgg

SEQ ID NO: 268344 - DNA, 15 bp, Homo sapiens
gatgctaaatatgtg

SEQ ID NO: 268345 - DNA, 15 bp, Homo sapiens
agatgctaaatatgt

SEQ ID NO: 268346 - DNA, 15 bp, Homo sapiens
aagatgctaaatatg

SEQ ID NO: 268347 - DNA, 15 bp, Homo sapiens
gaagatgctaaatat

SEQ ID NO: 268348 - DNA, 15 bp, Homo sapiens
ggaagatgctaaata

SEQ ID NO: 268349 - DNA, 15 bp, Homo sapiens
gggaagatgctaaat

SEQ ID NO: 268350 - DNA, 15 bp, Homo sapiens
agggaagatgctaaa

SEQ ID NO: 268351 - DNA, 15 bp, Homo sapiens
cagggaagatgctaa

SEQ ID NO: 268352 - DNA, 15 bp, Homo sapiens
ccagggaagatgcta

SEQ ID NO: 268353 - DNA, 15 bp, Homo sapiens
gccagggaagatgct

SEQ ID NO: 268354 - DNA, 15 bp, Homo sapiens
ggccagggaagatgc

SEQ ID NO: 268355 - DNA, 15 bp, Homo sapiens
aggccagggaagatg

SEQ ID NO: 268356 - DNA, 15 bp, Homo sapiens
gaggccagggaagat

SEQ ID NO: 268357 - DNA, 15 bp, Homo sapiens
agaggccagggaaga

SEQ ID NO: 268358 - DNA, 15 bp, Homo sapiens
gagaggccagggaag

SEQ ID NO: 268359 - DNA, 15 bp, Homo sapiens
ggagaggccagggaa

SEQ ID NO: 268360 - DNA, 15 bp, Homo sapiens
aggagaggccaggga

SEQ ID NO: 268361 - DNA, 15 bp, Homo sapiens
gaggagaggccaggg

SEQ ID NO: 268362 - DNA, 15 bp, Homo sapiens
agaggagaggccagg

SEQ ID NO: 268363 - DNA, 15 bp, Homo sapiens
aagaggagaggccag

SEQ ID NO: 268364 - DNA, 15 bp, Homo sapiens
aaagaggagaggcca

SEQ ID NO: 268365 - DNA, 15 bp, Homo sapiens
caaagaggagaggcc

SEQ ID NO: 268366 - DNA, 15 bp, Homo sapiens
ccaaagaggagaggc

SEQ ID NO: 268367 - DNA, 15 bp, Homo sapiens
gccaaagaggagagg

SEQ ID NO: 268368 - DNA, 15 bp, Homo sapiens
ggccaaagaggagag

SEQ ID NO: 268369 - DNA, 15 bp, Homo sapiens
aggccaaagaggaga

SEQ ID NO: 268370 - DNA, 15 bp, Homo sapiens
aaggccaaagaggag

SEQ ID NO: 268371 - DNA, 15 bp, Homo sapiens
gaaggccaaagagga

SEQ ID NO: 268372 - DNA, 15 bp, Homo sapiens
agaaggccaaagagg

SEQ ID NO: 268373 - DNA, 15 bp, Homo sapiens
gagaaggccaaagag

SEQ ID NO: 268374 - DNA, 15 bp, Homo sapiens
ggagaaggccaaaga

SEQ ID NO: 268375 - DNA, 15 bp, Homo sapiens
tggagaaggccaaag

SEQ ID NO: 268376 - DNA, 15 bp, Homo sapiens
atggagaaggccaaa

SEQ ID NO: 268377 - DNA, 15 bp, Homo sapiens
aatggagaaggccaa

SEQ ID NO: 268378 - DNA, 15 bp, Homo sapiens
gaatggagaaggcca

SEQ ID NO: 268379 - DNA, 15 bp, Homo sapiens
ggaatggagaaggcc

SEQ ID NO: 268380 - DNA, 15 bp, Homo sapiens
tggaatggagaaggc

SEQ ID NO: 268381 - DNA, 15 bp, Homo sapiens
ctggaatggagaagg

SEQ ID NO: 268382 - DNA, 15 bp, Homo sapiens
cctggaatggagaag

SEQ ID NO: 268383 - DNA, 15 bp, Homo sapiens
ccctggaatggagaa

SEQ ID NO: 268384 - DNA, 15 bp, Homo sapiens
tccctggaatggaga

SEQ ID NO: 268385 - DNA, 15 bp, Homo sapiens
atccctggaatggag

SEQ ID NO: 268386 - DNA, 15 bp, Homo sapiens
catccctggaatgga

SEQ ID NO: 268387 - DNA, 15 bp, Homo sapiens
ccatccctggaatgg

SEQ ID NO: 268388 - DNA, 15 bp, Homo sapiens
gccatccctggaatg

SEQ ID NO: 268389 - DNA, 15 bp, Homo sapiens
ggccatccctggaat

SEQ ID NO: 268390 - DNA, 15 bp, Homo sapiens
aggccatccctggaa

SEQ ID NO: 268391 - DNA, 15 bp, Homo sapiens
gaggccatccctgga

SEQ ID NO: 268392 - DNA, 15 bp, Homo sapiens
agaggccatccctgg

SEQ ID NO: 268393 - DNA, 15 bp, Homo sapiens
aagaggccatccctg

SEQ ID NO: 268394 - DNA, 15 bp, Homo sapiens
gaagaggccatccct

SEQ ID NO: 268395 - DNA, 15 bp, Homo sapiens
ggaagaggccatccc

SEQ ID NO: 268396 - DNA, 15 bp, Homo sapiens
tggaagaggccatcc

SEQ ID NO: 268397 - DNA, 15 bp, Homo sapiens
gtggaagaggccatc

SEQ ID NO: 268398 - DNA, 15 bp, Homo sapiens
ggtggaagaggccat

SEQ ID NO: 268399 - DNA, 15 bp, Homo sapiens
tggtggaagaggcca

SEQ ID NO: 268400 - DNA, 15 bp, Homo sapiens
atggtggaagaggcc

SEQ ID NO: 268401 - DNA, 15 bp, Homo sapiens
tatggtggaagaggc

SEQ ID NO: 268402 - DNA, 15 bp, Homo sapiens
atatggtggaagagg

SEQ ID NO: 268403 - DNA, 15 bp, Homo sapiens
aatatggtggaagag

SEQ ID NO: 268404 - DNA, 15 bp, Homo sapiens
aaatatggtggaaga

SEQ ID NO: 268405 - DNA, 15 bp, Homo sapiens
gaaatatggtggaag

SEQ ID NO: 268406 - DNA, 15 bp, Homo sapiens
ggaaatatggtggaa

SEQ ID NO: 268407 - DNA, 15 bp, Homo sapiens
aggaaatatggtgga

SEQ ID NO: 268408 - DNA, 15 bp, Homo sapiens
caggaaatatggtgg

SEQ ID NO: 268409 - DNA, 15 bp, Homo sapiens
tcaggaaatatggtg

SEQ ID NO: 268410 - DNA, 15 bp, Homo sapiens
ttcaggaaatatggt

SEQ ID NO: 268411 - DNA, 15 bp, Homo sapiens
tttcaggaaatatgg

SEQ ID NO: 268412 - DNA, 15 bp, Homo sapiens
atttcaggaaatatg

SEQ ID NO: 268413 - DNA, 15 bp, Homo sapiens
gatttcaggaaatat

SEQ ID NO: 268414 - DNA, 15 bp, Homo sapiens
tgatttcaggaaata

SEQ ID NO: 268415 - DNA, 15 bp, Homo sapiens
atgatttcaggaaat

SEQ ID NO: 268416 - DNA, 15 bp, Homo sapiens
tatgatttcaggaaa

SEQ ID NO: 268417 - DNA, 15 bp, Homo sapiens
gtatgatttcaggaa

SEQ ID NO: 268418 - DNA, 15 bp, Homo sapiens
tgtatgatttcagga

SEQ ID NO: 268419 - DNA, 15 bp, Homo sapiens
atgtatgatttcagg

SEQ ID NO: 268420 - DNA, 15 bp, Homo sapiens
tatgtatgatttcag

SEQ ID NO: 268421 - DNA, 15 bp, Homo sapiens
atatgtatgatttca

SEQ ID NO: 268422 - DNA, 15 bp, Homo sapiens
gatatgtatgatttc

SEQ ID NO: 268423 - DNA, 15 bp, Homo sapiens
agatatgtatgattt

SEQ ID NO: 268424 - DNA, 15 bp, Homo sapiens
aagatatgtatgatt

SEQ ID NO: 268425 - DNA, 15 bp, Homo sapiens
caagatatgtatgat

SEQ ID NO: 268426 - DNA, 15 bp, Homo sapiens
tcaagatatgtatga

SEQ ID NO: 268427 - DNA, 15 bp, Homo sapiens
atcaagatatgtatg

SEQ ID NO: 268428 - DNA, 15 bp, Homo sapiens
tatcaagatatgtat

SEQ ID NO: 268429 - DNA, 15 bp, Homo sapiens
atatcaagatatgta

SEQ ID NO: 268430 - DNA, 15 bp, Homo sapiens
gatatcaagatatgt

SEQ ID NO: 268431 - DNA, 15 bp, Homo sapiens
tgatatcaagatatg

SEQ ID NO: 268432 - DNA, 15 bp, Homo sapiens
atgatatcaagatat

SEQ ID NO: 268433 - DNA, 15 bp, Homo sapiens
aatgatatcaagata

SEQ ID NO: 268434 - DNA, 15 bp, Homo sapiens
taatgatatcaagat

SEQ ID NO: 268435 - DNA, 15 bp, Homo sapiens
ataatgatatcaaga

SEQ ID NO: 268436 - DNA, 15 bp, Homo sapiens
cataatgatatcaag

SEQ ID NO: 268437 - DNA, 15 bp, Homo sapiens
tcataatgatatcaa

SEQ ID NO: 268438 - DNA, 15 bp, Homo sapiens
atcataatgatatca

SEQ ID NO: 268439 - DNA, 15 bp, Homo sapiens
aatcataatgatatc

SEQ ID NO: 268440 - DNA, 15 bp, Homo sapiens
taatcataatgatat

SEQ ID NO: 268441 - DNA, 15 bp, Homo sapiens
ttaatcataatgata

SEQ ID NO: 268442 - DNA, 15 bp, Homo sapiens
attaatcataatgat

SEQ ID NO: 268443 - DNA, 15 bp, Homo sapiens
aattaatcataatga

SEQ ID NO: 268444 - DNA, 15 bp, Homo sapiens
taattaatcataatg

SEQ ID NO: 268445 - DNA, 15 bp, Homo sapiens
gtaattaatcataat

SEQ ID NO: 268446 - DNA, 15 bp, Homo sapiens
tgtaattaatcataa

SEQ ID NO: 268447 - DNA, 15 bp, Homo sapiens
ctgtaattaatcata

SEQ ID NO: 268448 - DNA, 15 bp, Homo sapiens
gctgtaattaatcat

SEQ ID NO: 268449 - DNA, 15 bp, Homo sapiens
tgctgtaattaatca

SEQ ID NO: 268450 - DNA, 15 bp, Homo sapiens
gtgctgtaattaatc

SEQ ID NO: 268451 - DNA, 15 bp, Homo sapiens
ggtgctgtaattaat

SEQ ID NO: 268452 - DNA, 15 bp, Homo sapiens
tggtgctgtaattaa

SEQ ID NO: 268453 - DNA, 15 bp, Homo sapiens
gtggtgctgtaatta

SEQ ID NO: 268454 - DNA, 15 bp, Homo sapiens
agtggtgctgtaatt

SEQ ID NO: 268455 - DNA, 15 bp, Homo sapiens
aagtggtgctgtaat

SEQ ID NO: 268456 - DNA, 15 bp, Homo sapiens
aaagtggtgctgtaa

SEQ ID NO: 268457 - DNA, 15 bp, Homo sapiens
gaaagtggtgctgta

SEQ ID NO: 268458 - DNA, 15 bp, Homo sapiens
tgaaagtggtgctgt

SEQ ID NO: 268459 - DNA, 15 bp, Homo sapiens
ttgaaagtggtgctg

SEQ ID NO: 268460 - DNA, 15 bp, Homo sapiens
tttgaaagtggtgct

SEQ ID NO: 268461 - DNA, 15 bp, Homo sapiens
ttttgaaagtggtgc

SEQ ID NO: 268462 - DNA, 15 bp, Homo sapiens
attttgaaagtggtg

SEQ ID NO: 268463 - DNA, 15 bp, Homo sapiens
gattttgaaagtggt

SEQ ID NO: 268464 - DNA, 15 bp, Homo sapiens
agattttgaaagtgg

SEQ ID NO: 268465 - DNA, 15 bp, Homo sapiens
aagattttgaaagtg

SEQ ID NO: 268466 - DNA, 15 bp, Homo sapiens
caagattttgaaagt

SEQ ID NO: 268467 - DNA, 15 bp, Homo sapiens
tcaagattttgaaag

SEQ ID NO: 268468 - DNA, 15 bp, Homo sapiens
atcaagattttgaaa

SEQ ID NO: 268469 - DNA, 15 bp, Homo sapiens
aatcaagattttgaa

SEQ ID NO: 268470 - DNA, 15 bp, Homo sapiens
gaatcaagattttga

SEQ ID NO: 268471 - DNA, 15 bp, Homo sapiens
ggaatcaagattttg

SEQ ID NO: 268472 - DNA, 15 bp, Homo sapiens
tggaatcaagatttt

SEQ ID NO: 268473 - DNA, 15 bp, Homo sapiens
ttggaatcaagattt

SEQ ID NO: 268474 - DNA, 15 bp, Homo sapiens
cttggaatcaagatt

SEQ ID NO: 268475 - DNA, 15 bp, Homo sapiens
gcttggaatcaagat

SEQ ID NO: 268476 - DNA, 15 bp, Homo sapiens
tgcttggaatcaaga

SEQ ID NO: 268477 - DNA, 15 bp, Homo sapiens
atgcttggaatcaag

SEQ ID NO: 268478 - DNA, 15 bp, Homo sapiens
gatgcttggaatcaa

SEQ ID NO: 268479 - DNA, 15 bp, Homo sapiens
agatgcttggaatca

SEQ ID NO: 268480 - DNA, 15 bp, Homo sapiens
aagatgcttggaatc

SEQ ID NO: 268481 - DNA, 15 bp, Homo sapiens
gaagatgcttggaat

SEQ ID NO: 268482 - DNA, 15 bp, Homo sapiens
ggaagatgcttggaa

SEQ ID NO: 268483 - DNA, 15 bp, Homo sapiens
tggaagatgcttgga

SEQ ID NO: 268484 - DNA, 15 bp, Homo sapiens
ctggaagatgcttgg

SEQ ID NO: 268485 - DNA, 15 bp, Homo sapiens
gctggaagatgcttg

SEQ ID NO: 268486 - DNA, 15 bp, Homo sapiens
agctggaagatgctt

SEQ ID NO: 268487 - DNA, 15 bp, Homo sapiens
gagctggaagatgct

SEQ ID NO: 268488 - DNA, 15 bp, Homo sapiens
tgagctggaagatgc

SEQ ID NO: 268489 - DNA, 15 bp, Homo sapiens
gtgagctggaagatg

SEQ ID NO: 268490 - DNA, 15 bp, Homo sapiens
ggtgagctggaagat

SEQ ID NO: 268491 - DNA, 15 bp, Homo sapiens
aggtgagctggaaga

SEQ ID NO: 268492 - DNA, 15 bp, Homo sapiens
taggtgagctggaag

SEQ ID NO: 268493 - DNA, 15 bp, Homo sapiens
ataggtgagctggaa

SEQ ID NO: 268494 - DNA, 15 bp, Homo sapiens
aataggtgagctgga

SEQ ID NO: 268495 - DNA, 15 bp, Homo sapiens
aaataggtgagctgg

SEQ ID NO: 268496 - DNA, 15 bp, Homo sapiens
aaaataggtgagctg

SEQ ID NO: 268497 - DNA, 15 bp, Homo sapiens
taaaataggtgagct

SEQ ID NO: 268498 - DNA, 15 bp, Homo sapiens
ataaaataggtgagc

SEQ ID NO: 268499 - DNA, 15 bp, Homo sapiens
aataaaataggtgag

SEQ ID NO: 268500 - DNA, 15 bp, Homo sapiens
caataaaataggtga

SEQ ID NO: 268501 - DNA, 15 bp, Homo sapiens
gcaataaaataggtg

SEQ ID NO: 268502 - DNA, 15 bp, Homo sapiens
agcaataaaataggt

SEQ ID NO: 268503 - DNA, 15 bp, Homo sapiens
aagcaataaaatagg

SEQ ID NO: 268504 - DNA, 15 bp, Homo sapiens
taagcaataaaatag

SEQ ID NO: 268505 - DNA, 15 bp, Homo sapiens
gtaagcaataaaata

SEQ ID NO: 268506 - DNA, 15 bp, Homo sapiens
tgtaagcaataaaat

SEQ ID NO: 268507 - DNA, 15 bp, Homo sapiens
gtgtaagcaataaaa

SEQ ID NO: 268508 - DNA, 15 bp, Homo sapiens
agtgtaagcaataaa

SEQ ID NO: 268509 - DNA, 15 bp, Homo sapiens
gagtgtaagcaataa

SEQ ID NO: 268510 - DNA, 15 bp, Homo sapiens
agagtgtaagcaata

SEQ ID NO: 268511 - DNA, 15 bp, Homo sapiens
tagagtgtaagcaat

SEQ ID NO: 268512 - DNA, 15 bp, Homo sapiens
ttagagtgtaagcaa

SEQ ID NO: 268513 - DNA, 15 bp, Homo sapiens
gttagagtgtaagca

SEQ ID NO: 268514 - DNA, 15 bp, Homo sapiens
tgttagagtgtaagc

SEQ ID NO: 268515 - DNA, 15 bp, Homo sapiens
atgttagagtgtaag

SEQ ID NO: 268516 - DNA, 15 bp, Homo sapiens
gatgttagagtgtaa

SEQ ID NO: 268517 - DNA, 15 bp, Homo sapiens
agatgttagagtgta

SEQ ID NO: 268518 - DNA, 15 bp, Homo sapiens
tagatgttagagtgt

SEQ ID NO: 268519 - DNA, 15 bp, Homo sapiens
ttagatgttagagtg

SEQ ID NO: 268520 - DNA, 15 bp, Homo sapiens
gttagatgttagagt

SEQ ID NO: 268521 - DNA, 15 bp, Homo sapiens
agttagatgttagag

SEQ ID NO: 268522 - DNA, 15 bp, Homo sapiens
gagttagatgttaga

SEQ ID NO: 268523 - DNA, 15 bp, Homo sapiens
agagttagatgttag

SEQ ID NO: 268524 - DNA, 15 bp, Homo sapiens
gagagttagatgtta

SEQ ID NO: 268525 - DNA, 15 bp, Homo sapiens
tgagagttagatgtt

SEQ ID NO: 268526 - DNA, 15 bp, Homo sapiens
ctgagagttagatgt

SEQ ID NO: 268527 - DNA, 15 bp, Homo sapiens
actgagagttagatg

SEQ ID NO: 268528 - DNA, 15 bp, Homo sapiens
gactgagagttagat

SEQ ID NO: 268529 - DNA, 15 bp, Homo sapiens
agactgagagttaga

SEQ ID NO: 268530 - DNA, 15 bp, Homo sapiens
gagactgagagttag

SEQ ID NO: 268531 - DNA, 15 bp, Homo sapiens
tgagactgagagtta

SEQ ID NO: 268532 - DNA, 15 bp, Homo sapiens
gtgagactgagagtt

SEQ ID NO: 268533 - DNA, 15 bp, Homo sapiens
agtgagactgagagt

SEQ ID NO: 268534 - DNA, 15 bp, Homo sapiens
cagtgagactgagag

SEQ ID NO: 268535 - DNA, 15 bp, Homo sapiens
tcagtgagactgaga

SEQ ID NO: 268536 - DNA, 15 bp, Homo sapiens
ttcagtgagactgag

SEQ ID NO: 268537 - DNA, 15 bp, Homo sapiens
gttcagtgagactga

SEQ ID NO: 268538 - DNA, 15 bp, Homo sapiens
ggttcagtgagactg

SEQ ID NO: 268539 - DNA, 15 bp, Homo sapiens
aggttcagtgagact

SEQ ID NO: 268540 - DNA, 15 bp, Homo sapiens
taggttcagtgagac

SEQ ID NO: 268541 - DNA, 15 bp, Homo sapiens
gtaggttcagtgaga

SEQ ID NO: 268542 - DNA, 15 bp, Homo sapiens
ggtaggttcagtgag

SEQ ID NO: 268543 - DNA, 15 bp, Homo sapiens
cggtaggttcagtga

SEQ ID NO: 268544 - DNA, 15 bp, Homo sapiens
tcggtaggttcagtg

SEQ ID NO: 268545 - DNA, 15 bp, Homo sapiens
atcggtaggttcagt

SEQ ID NO: 268546 - DNA, 15 bp, Homo sapiens
gatcggtaggttcag

SEQ ID NO: 268547 - DNA, 15 bp, Homo sapiens
ggatcggtaggttca

SEQ ID NO: 268548 - DNA, 15 bp, Homo sapiens
tggatcggtaggttc

SEQ ID NO: 268549 - DNA, 15 bp, Homo sapiens
gtggatcggtaggtt

SEQ ID NO: 268550 - DNA, 15 bp, Homo sapiens
ggtggatcggtaggt

SEQ ID NO: 268551 - DNA, 15 bp, Homo sapiens
tggtggatcggtagg

SEQ ID NO: 268552 - DNA, 15 bp, Homo sapiens
ttggtggatcggtag

SEQ ID NO: 268553 - DNA, 15 bp, Homo sapiens
gttggtggatcggta

SEQ ID NO: 268554 - DNA, 15 bp, Homo sapiens
ggttggtggatcggt

SEQ ID NO: 268555 - DNA, 15 bp, Homo sapiens
aggttggtggatcgg

SEQ ID NO: 268556 - DNA, 15 bp, Homo sapiens
gaggttggtggatcg

SEQ ID NO: 268557 - DNA, 15 bp, Homo sapiens
tgaggttggtggatc

SEQ ID NO: 268558 - DNA, 15 bp, Homo sapiens
atgaggttggtggat

SEQ ID NO: 268559 - DNA, 15 bp, Homo sapiens
gatgaggttggtgga

SEQ ID NO: 268560 - DNA, 15 bp, Homo sapiens
tgatgaggttggtgg

SEQ ID NO: 268561 - DNA, 15 bp, Homo sapiens
gtgatgaggttggtg

SEQ ID NO: 268562 - DNA, 15 bp, Homo sapiens
agtgatgaggttggt

SEQ ID NO: 268563 - DNA, 15 bp, Homo sapiens
aagtgatgaggttgg

SEQ ID NO: 268564 - DNA, 15 bp, Homo sapiens
gaagtgatgaggttg

SEQ ID NO: 268565 - DNA, 15 bp, Homo sapiens
tgaagtgatgaggtt

SEQ ID NO: 268566 - DNA, 15 bp, Homo sapiens
gtgaagtgatgaggt

SEQ ID NO: 268567 - DNA, 15 bp, Homo sapiens
agtgaagtgatgagg

SEQ ID NO: 268568 - DNA, 15 bp, Homo sapiens
tagtgaagtgatgag

SEQ ID NO: 268569 - DNA, 15 bp, Homo sapiens
atagtgaagtgatga

SEQ ID NO: 268570 - DNA, 15 bp, Homo sapiens
aatagtgaagtgatg

SEQ ID NO: 268571 - DNA, 15 bp, Homo sapiens
aaatagtgaagtgat

SEQ ID NO: 268572 - DNA, 15 bp, Homo sapiens
taaatagtgaagtga

SEQ ID NO: 268573 - DNA, 15 bp, Homo sapiens
ataaatagtgaagtg

SEQ ID NO: 268574 - DNA, 15 bp, Homo sapiens
gataaatagtgaagt

SEQ ID NO: 268575 - DNA, 15 bp, Homo sapiens
tgataaatagtgaag

SEQ ID NO: 268576 - DNA, 15 bp, Homo sapiens
gtgataaatagtgaa

SEQ ID NO: 268577 - DNA, 15 bp, Homo sapiens
ggtgataaatagtga

SEQ ID NO: 268578 - DNA, 15 bp, Homo sapiens
aggtgataaatagtg

SEQ ID NO: 268579 - DNA, 15 bp, Homo sapiens
caggtgataaatagt

SEQ ID NO: 268580 - DNA, 15 bp, Homo sapiens
acaggtgataaatag

SEQ ID NO: 268581 - DNA, 15 bp, Homo sapiens
aacaggtgataaata

SEQ ID NO: 268582 - DNA, 15 bp, Homo sapiens
aaacaggtgataaat

SEQ ID NO: 268583 - DNA, 15 bp, Homo sapiens
aaaacaggtgataaa

SEQ ID NO: 268584 - DNA, 15 bp, Homo sapiens
taaaacaggtgataa

SEQ ID NO: 268585 - DNA, 15 bp, Homo sapiens
ataaaacaggtgata

SEQ ID NO: 268586 - DNA, 15 bp, Homo sapiens
gataaaacaggtgat

SEQ ID NO: 268587 - DNA, 15 bp, Homo sapiens
agataaaacaggtga

SEQ ID NO: 268588 - DNA, 15 bp, Homo sapiens
aagataaaacaggtg

SEQ ID NO: 268589 - DNA, 15 bp, Homo sapiens
aaagataaaacaggt

SEQ ID NO: 268590 - DNA, 15 bp, Homo sapiens
gaaagataaaacagg

SEQ ID NO: 268591 - DNA, 15 bp, Homo sapiens
ggaaagataaaacag

SEQ ID NO: 268592 - DNA, 15 bp, Homo sapiens
tggaaagataaaaca

SEQ ID NO: 268593 - DNA, 15 bp, Homo sapiens
atggaaagataaaac

SEQ ID NO: 268594 - DNA, 15 bp, Homo sapiens
aatggaaagataaaa

SEQ ID NO: 268595 - DNA, 15 bp, Homo sapiens
aaatggaaagataaa

SEQ ID NO: 268596 - DNA, 15 bp, Homo sapiens
taaatggaaagataa

SEQ ID NO: 268597 - DNA, 15 bp, Homo sapiens
gtaaatggaaagata

SEQ ID NO: 268598 - DNA, 15 bp, Homo sapiens
agtaaatggaaagat

SEQ ID NO: 268599 - DNA, 15 bp, Homo sapiens
aagtaaatggaaaga

SEQ ID NO: 268600 - DNA, 15 bp, Homo sapiens
gaagtaaatggaaag

SEQ ID NO: 268601 - DNA, 15 bp, Homo sapiens
ggaagtaaatggaaa

SEQ ID NO: 268602 - DNA, 15 bp, Homo sapiens
tggaagtaaatggaa

SEQ ID NO: 268603 - DNA, 15 bp, Homo sapiens
atggaagtaaatgga

SEQ ID NO: 268604 - DNA, 15 bp, Homo sapiens
tatggaagtaaatgg

SEQ ID NO: 268605 - DNA, 15 bp, Homo sapiens
atatggaagtaaatg

SEQ ID NO: 268606 - DNA, 15 bp, Homo sapiens
catatggaagtaaat

SEQ ID NO: 268607 - DNA, 15 bp, Homo sapiens
gcatatggaagtaaa

SEQ ID NO: 268608 - DNA, 15 bp, Homo sapiens
tgcatatggaagtaa

SEQ ID NO: 268609 - DNA, 15 bp, Homo sapiens
atgcatatggaagta

SEQ ID NO: 268610 - DNA, 15 bp, Homo sapiens
gatgcatatggaagt

SEQ ID NO: 268611 - DNA, 15 bp, Homo sapiens
agatgcatatggaag

SEQ ID NO: 268612 - DNA, 15 bp, Homo sapiens
tagatgcatatggaa

SEQ ID NO: 268613 - DNA, 15 bp, Homo sapiens
ctagatgcatatgga

SEQ ID NO: 268614 - DNA, 15 bp, Homo sapiens
gctagatgcatatgg

SEQ ID NO: 268615 - DNA, 15 bp, Homo sapiens
agctagatgcatatg

SEQ ID NO: 268616 - DNA, 15 bp, Homo sapiens
gagctagatgcatat

SEQ ID NO: 268617 - DNA, 15 bp, Homo sapiens
tgagctagatgcata

SEQ ID NO: 268618 - DNA, 15 bp, Homo sapiens
ctgagctagatgcat

SEQ ID NO: 268619 - DNA, 15 bp, Homo sapiens
tctgagctagatgca

SEQ ID NO: 268620 - DNA, 15 bp, Homo sapiens
atctgagctagatgc

SEQ ID NO: 268621 - DNA, 15 bp, Homo sapiens
aatctgagctagatg

SEQ ID NO: 268622 - DNA, 15 bp, Homo sapiens
gaatctgagctagat

SEQ ID NO: 268623 - DNA, 15 bp, Homo sapiens
agaatctgagctaga

SEQ ID NO: 268624 - DNA, 15 bp, Homo sapiens
tagaatctgagctag

SEQ ID NO: 268625 - DNA, 15 bp, Homo sapiens
atagaatctgagcta

SEQ ID NO: 268626 - DNA, 15 bp, Homo sapiens
aatagaatctgagct

SEQ ID NO: 268627 - DNA, 15 bp, Homo sapiens
caatagaatctgagc

SEQ ID NO: 268628 - DNA, 15 bp, Homo sapiens
acaatagaatctgag

SEQ ID NO: 268629 - DNA, 15 bp, Homo sapiens
gacaatagaatctga

SEQ ID NO: 268630 - DNA, 15 bp, Homo sapiens
ggacaatagaatctg

SEQ ID NO: 268631 - DNA, 15 bp, Homo sapiens
tggacaatagaatct

SEQ ID NO: 268632 - DNA, 15 bp, Homo sapiens
atggacaatagaatc

SEQ ID NO: 268633 - DNA, 15 bp, Homo sapiens
gatggacaatagaat

SEQ ID NO: 268634 - DNA, 15 bp, Homo sapiens
tgatggacaatagaa

SEQ ID NO: 268635 - DNA, 15 bp, Homo sapiens
atgatggacaataga

SEQ ID NO: 268636 - DNA, 15 bp, Homo sapiens
aatgatggacaatag

SEQ ID NO: 268637 - DNA, 15 bp, Homo sapiens
gaatgatggacaata

SEQ ID NO: 268638 - DNA, 15 bp, Homo sapiens
agaatgatggacaat

SEQ ID NO: 268639 - DNA, 15 bp, Homo sapiens
tagaatgatggacaa

SEQ ID NO: 268640 - DNA, 15 bp, Homo sapiens
ttagaatgatggaca

SEQ ID NO: 268641 - DNA, 15 bp, Homo sapiens
attagaatgatggac

SEQ ID NO: 268642 - DNA, 15 bp, Homo sapiens
gattagaatgatgga

SEQ ID NO: 268643 - DNA, 15 bp, Homo sapiens
tgattagaatgatgg

SEQ ID NO: 268644 - DNA, 15 bp, Homo sapiens
atgattagaatgatg

SEQ ID NO: 268645 - DNA, 15 bp, Homo sapiens
aatgattagaatgat

SEQ ID NO: 268646 - DNA, 15 bp, Homo sapiens
gaatgattagaatga

SEQ ID NO: 268647 - DNA, 15 bp, Homo sapiens
ggaatgattagaatg

SEQ ID NO: 268648 - DNA, 15 bp, Homo sapiens
gggaatgattagaat

SEQ ID NO: 268649 - DNA, 15 bp, Homo sapiens
ggggaatgattagaa

SEQ ID NO: 268650 - DNA, 15 bp, Homo sapiens
aggggaatgattaga

SEQ ID NO: 268651 - DNA, 15 bp, Homo sapiens
gaggggaatgattag

SEQ ID NO: 268652 - DNA, 15 bp, Homo sapiens
agaggggaatgatta

SEQ ID NO: 268653 - DNA, 15 bp, Homo sapiens
cagaggggaatgatt

SEQ ID NO: 268654 - DNA, 15 bp, Homo sapiens
gcagaggggaatgat

SEQ ID NO: 268655 - DNA, 15 bp, Homo sapiens
agcagaggggaatga

SEQ ID NO: 268656 - DNA, 15 bp, Homo sapiens
gagcagaggggaatg

SEQ ID NO: 268657 - DNA, 15 bp, Homo sapiens
agagcagaggggaat

SEQ ID NO: 268658 - DNA, 15 bp, Homo sapiens
cagagcagaggggaa

SEQ ID NO: 268659 - DNA, 15 bp, Homo sapiens
acagagcagagggga

SEQ ID NO: 268660 - DNA, 15 bp, Homo sapiens
tacagagcagagggg

SEQ ID NO: 268661 - DNA, 15 bp, Homo sapiens
atacagagcagaggg

SEQ ID NO: 268662 - DNA, 15 bp, Homo sapiens
tatacagagcagagg

SEQ ID NO: 268663 - DNA, 15 bp, Homo sapiens
atatacagagcagag

SEQ ID NO: 268664 - DNA, 15 bp, Homo sapiens
aatatacagagcaga

SEQ ID NO: 268665 - DNA, 15 bp, Homo sapiens
gaatatacagagcag

SEQ ID NO: 268666 - DNA, 15 bp, Homo sapiens
agaatatacagagca

SEQ ID NO: 268667 - DNA, 15 bp, Homo sapiens
gagaatatacagagc

SEQ ID NO: 268668 - DNA, 15 bp, Homo sapiens
ggagaatatacagag

SEQ ID NO: 268669 - DNA, 15 bp, Homo sapiens
gggagaatatacaga

SEQ ID NO: 268670 - DNA, 15 bp, Homo sapiens
agggagaatatacag

SEQ ID NO: 268671 - DNA, 15 bp, Homo sapiens
gagggagaatataca

SEQ ID NO: 268672 - DNA, 15 bp, Homo sapiens
agagggagaatatac

SEQ ID NO: 268673 - DNA, 15 bp, Homo sapiens
tagagggagaatata

SEQ ID NO: 268674 - DNA, 15 bp, Homo sapiens
gtagagggagaatat

SEQ ID NO: 268675 - DNA, 15 bp, Homo sapiens
agtagagggagaata

SEQ ID NO: 268676 - DNA, 15 bp, Homo sapiens
cagtagagggagaat

SEQ ID NO: 268677 - DNA, 15 bp, Homo sapiens
acagtagagggagaa

SEQ ID NO: 268678 - DNA, 15 bp, Homo sapiens
cacagtagagggaga

SEQ ID NO: 268679 - DNA, 15 bp, Homo sapiens
gcacagtagagggag

SEQ ID NO: 268680 - DNA, 15 bp, Homo sapiens
agcacagtagaggga

SEQ ID NO: 268681 - DNA, 15 bp, Homo sapiens
cagcacagtagaggg

SEQ ID NO: 268682 - DNA, 15 bp, Homo sapiens
tcagcacagtagagg

SEQ ID NO: 268683 - DNA, 15 bp, Homo sapiens
ttcagcacagtagag

SEQ ID NO: 268684 - DNA, 15 bp, Homo sapiens
attcagcacagtaga

SEQ ID NO: 268685 - DNA, 15 bp, Homo sapiens
aattcagcacagtag

SEQ ID NO: 268686 - DNA, 15 bp, Homo sapiens
caattcagcacagta

SEQ ID NO: 268687 - DNA, 15 bp, Homo sapiens
tcaattcagcacagt

SEQ ID NO: 268688 - DNA, 15 bp, Homo sapiens
gtcaattcagcacag

SEQ ID NO: 268689 - DNA, 15 bp, Homo sapiens
tgtcaattcagcaca

SEQ ID NO: 268690 - DNA, 15 bp, Homo sapiens
gtgtcaattcagcac

SEQ ID NO: 268691 - DNA, 15 bp, Homo sapiens
tgtgtcaattcagca

SEQ ID NO: 268692 - DNA, 15 bp, Homo sapiens
ttgtgtcaattcagc

SEQ ID NO: 268693 - DNA, 15 bp, Homo sapiens
cttgtgtcaattcag

SEQ ID NO: 268694 - DNA, 15 bp, Homo sapiens
acttgtgtcaattca

SEQ ID NO: 268695 - DNA, 15 bp, Homo sapiens
aacttgtgtcaattc

SEQ ID NO: 268696 - DNA, 15 bp, Homo sapiens
caacttgtgtcaatt

SEQ ID NO: 268697 - DNA, 15 bp, Homo sapiens
tcaacttgtgtcaat

SEQ ID NO: 268698 - DNA, 15 bp, Homo sapiens
atcaacttgtgtcaa

SEQ ID NO: 268699 - DNA, 15 bp, Homo sapiens
aatcaacttgtgtca

SEQ ID NO: 268700 - DNA, 15 bp, Homo sapiens
taatcaacttgtgtc

SEQ ID NO: 268701 - DNA, 15 bp, Homo sapiens
ttaatcaacttgtgt

SEQ ID NO: 268702 - DNA, 15 bp, Homo sapiens
tttaatcaacttgtg

SEQ ID NO: 268703 - DNA, 15 bp, Homo sapiens
atttaatcaacttgt

SEQ ID NO: 268704 - DNA, 15 bp, Homo sapiens
gatttaatcaacttg

SEQ ID NO: 268705 - DNA, 15 bp, Homo sapiens
ggatttaatcaactt

SEQ ID NO: 268706 - DNA, 15 bp, Homo sapiens
tggatttaatcaact

SEQ ID NO: 268707 - DNA, 15 bp, Homo sapiens
ctggatttaatcaac

SEQ ID NO: 268708 - DNA, 15 bp, Homo sapiens
gctggatttaatcaa

SEQ ID NO: 268709 - DNA, 15 bp, Homo sapiens
ggctggatttaatca

SEQ ID NO: 268710 - DNA, 15 bp, Homo sapiens
tggctggatttaatc

SEQ ID NO: 268711 - DNA, 15 bp, Homo sapiens
atggctggatttaat

SEQ ID NO: 268712 - DNA, 15 bp, Homo sapiens
aatggctggatttaa

SEQ ID NO: 268713 - DNA, 15 bp, Homo sapiens
gaatggctggattta

SEQ ID NO: 268714 - DNA, 15 bp, Homo sapiens
agaatggctggattt

SEQ ID NO: 268715 - DNA, 15 bp, Homo sapiens
gagaatggctggatt

SEQ ID NO: 268716 - DNA, 15 bp, Homo sapiens
ggagaatggctggat

SEQ ID NO: 268717 - DNA, 15 bp, Homo sapiens
aggagaatggctgga

SEQ ID NO: 268718 - DNA, 15 bp, Homo sapiens
taggagaatggctgg

SEQ ID NO: 268719 - DNA, 15 bp, Homo sapiens
ttaggagaatggctg

SEQ ID NO: 268720 - DNA, 15 bp, Homo sapiens
attaggagaatggct

SEQ ID NO: 268721 - DNA, 15 bp, Homo sapiens
gattaggagaatggc

SEQ ID NO: 268722 - DNA, 15 bp, Homo sapiens
agattaggagaatgg

SEQ ID NO: 268723 - DNA, 15 bp, Homo sapiens
cagattaggagaatg

SEQ ID NO: 268724 - DNA, 15 bp, Homo sapiens
acagattaggagaat

SEQ ID NO: 268725 - DNA, 15 bp, Homo sapiens
aacagattaggagaa

SEQ ID NO: 268726 - DNA, 15 bp, Homo sapiens
aaacagattaggaga

SEQ ID NO: 268727 - DNA, 15 bp, Homo sapiens
aaaacagattaggag

SEQ ID NO: 268728 - DNA, 15 bp, Homo sapiens
aaaaacagattagga

SEQ ID NO: 268729 - DNA, 15 bp, Homo sapiens
aaaaaacagattagg

SEQ ID NO: 268730 - DNA, 15 bp, Homo sapiens
taaaaaacagattag

SEQ ID NO: 268731 - DNA, 15 bp, Homo sapiens
ataaaaaacagatta

SEQ ID NO: 268732 - DNA, 15 bp, Homo sapiens
aataaaaaacagatt

SEQ ID NO: 268733 - DNA, 15 bp, Homo sapiens
aaataaaaaacagat

SEQ ID NO: 268734 - DNA, 15 bp, Homo sapiens
caaataaaaaacaga

SEQ ID NO: 268735 - DNA, 15 bp, Homo sapiens
ccaaataaaaaacag

SEQ ID NO: 268736 - DNA, 15 bp, Homo sapiens
gccaaataaaaaaca

SEQ ID NO: 268737 - DNA, 15 bp, Homo sapiens
agccaaataaaaaac

SEQ ID NO: 268738 - DNA, 15 bp, Homo sapiens
aagccaaataaaaaa

SEQ ID NO: 268739 - DNA, 15 bp, Homo sapiens
gaagccaaataaaaa

SEQ ID NO: 268740 - DNA, 15 bp, Homo sapiens
agaagccaaataaaa

SEQ ID NO: 268741 - DNA, 15 bp, Homo sapiens
gagaagccaaataaa

SEQ ID NO: 268742 - DNA, 15 bp, Homo sapiens
tgagaagccaaataa

SEQ ID NO: 268743 - DNA, 15 bp, Homo sapiens
ctgagaagccaaata

SEQ ID NO: 268744 - DNA, 15 bp, Homo sapiens
actgagaagccaaat

SEQ ID NO: 268745 - DNA, 15 bp, Homo sapiens
tactgagaagccaaa

SEQ ID NO: 268746 - DNA, 15 bp, Homo sapiens
ctactgagaagccaa

SEQ ID NO: 268747 - DNA, 15 bp, Homo sapiens
gctactgagaagcca

SEQ ID NO: 268748 - DNA, 15 bp, Homo sapiens
tgctactgagaagcc

SEQ ID NO: 268749 - DNA, 15 bp, Homo sapiens
atgctactgagaagc

SEQ ID NO: 268750 - DNA, 15 bp, Homo sapiens
aatgctactgagaag

SEQ ID NO: 268751 - DNA, 15 bp, Homo sapiens
gaatgctactgagaa

SEQ ID NO: 268752 - DNA, 15 bp, Homo sapiens
tgaatgctactgaga

SEQ ID NO: 268753 - DNA, 15 bp, Homo sapiens
ttgaatgctactgag

SEQ ID NO: 268754 - DNA, 15 bp, Homo sapiens
gttgaatgctactga

SEQ ID NO: 268755 - DNA, 15 bp, Homo sapiens
tgttgaatgctactg

SEQ ID NO: 268756 - DNA, 15 bp, Homo sapiens
gtgttgaatgctact

SEQ ID NO: 268757 - DNA, 15 bp, Homo sapiens
tgtgttgaatgctac

SEQ ID NO: 268758 - DNA, 15 bp, Homo sapiens
ttgtgttgaatgcta

SEQ ID NO: 268759 - DNA, 15 bp, Homo sapiens
tttgtgttgaatgct

SEQ ID NO: 268760 - DNA, 15 bp, Homo sapiens
atttgtgttgaatgc

SEQ ID NO: 268761 - DNA, 15 bp, Homo sapiens
tatttgtgttgaatg

SEQ ID NO: 268762 - DNA, 15 bp, Homo sapiens
ctatttgtgttgaat

SEQ ID NO: 268763 - DNA, 15 bp, Homo sapiens
gctatttgtgttgaa

SEQ ID NO: 268764 - DNA, 15 bp, Homo sapiens
agctatttgtgttga

SEQ ID NO: 268765 - DNA, 15 bp, Homo sapiens
tagctatttgtgttg

SEQ ID NO: 268766 - DNA, 15 bp, Homo sapiens
atagctatttgtgtt

SEQ ID NO: 268767 - DNA, 15 bp, Homo sapiens
tatagctatttgtgt

SEQ ID NO: 268768 - DNA, 15 bp, Homo sapiens
ttatagctatttgtg

SEQ ID NO: 268769 - DNA, 15 bp, Homo sapiens
attatagctatttgt

SEQ ID NO: 268770 - DNA, 15 bp, Homo sapiens
gattatagctatttg

SEQ ID NO: 268771 - DNA, 15 bp, Homo sapiens
agattatagctattt

SEQ ID NO: 268772 - DNA, 15 bp, Homo sapiens
gagattatagctatt

SEQ ID NO: 268773 - DNA, 15 bp, Homo sapiens
agagattatagctat

SEQ ID NO: 268774 - DNA, 15 bp, Homo sapiens
aagagattatagcta

SEQ ID NO: 268775 - DNA, 15 bp, Homo sapiens
aaagagattatagct

SEQ ID NO: 268776 - DNA, 15 bp, Homo sapiens
taaagagattatagc

SEQ ID NO: 268777 - DNA, 15 bp, Homo sapiens
gtaaagagattatag

SEQ ID NO: 268778 - DNA, 15 bp, Homo sapiens
agtaaagagattata

SEQ ID NO: 268779 - DNA, 15 bp, Homo sapiens
cagtaaagagattat

SEQ ID NO: 268780 - DNA, 15 bp, Homo sapiens
tcagtaaagagatta

SEQ ID NO: 268781 - DNA, 15 bp, Homo sapiens
ttcagtaaagagatt

SEQ ID NO: 268782 - DNA, 15 bp, Homo sapiens
tttcagtaaagagat

SEQ ID NO: 268783 - DNA, 15 bp, Homo sapiens
ctttcagtaaagaga

SEQ ID NO: 268784 - DNA, 15 bp, Homo sapiens
tctttcagtaaagag

SEQ ID NO: 268785 - DNA, 15 bp, Homo sapiens
ttctttcagtaaaga

SEQ ID NO: 268786 - DNA, 15 bp, Homo sapiens
gttctttcagtaaag

SEQ ID NO: 268787 - DNA, 15 bp, Homo sapiens
ggttctttcagtaaa

SEQ ID NO: 268788 - DNA, 15 bp, Homo sapiens
gggttctttcagtaa

SEQ ID NO: 268789 - DNA, 15 bp, Homo sapiens
ggggttctttcagta

SEQ ID NO: 268790 - DNA, 15 bp, Homo sapiens
aggggttctttcagt

SEQ ID NO: 268791 - DNA, 15 bp, Homo sapiens
caggggttctttcag

SEQ ID NO: 268792 - DNA, 15 bp, Homo sapiens
gcaggggttctttca

SEQ ID NO: 268793 - DNA, 15 bp, Homo sapiens
ggcaggggttctttc

SEQ ID NO: 268794 - DNA, 15 bp, Homo sapiens
gggcaggggttcttt

SEQ ID NO: 268795 - DNA, 15 bp, Homo sapiens
ggggcaggggttctt

SEQ ID NO: 268796 - DNA, 15 bp, Homo sapiens
tggggcaggggttct

SEQ ID NO: 268797 - DNA, 15 bp, Homo sapiens
ttggggcaggggttc

SEQ ID NO: 268798 - DNA, 15 bp, Homo sapiens
gttggggcaggggtt

SEQ ID NO: 268799 - DNA, 15 bp, Homo sapiens
ggttggggcaggggt

SEQ ID NO: 268800 - DNA, 15 bp, Homo sapiens
aggttggggcagggg

SEQ ID NO: 268801 - DNA, 15 bp, Homo sapiens
aaggttggggcaggg

SEQ ID NO: 268802 - DNA, 15 bp, Homo sapiens
caaggttggggcagg

SEQ ID NO: 268803 - DNA, 15 bp, Homo sapiens
ccaaggttggggcag

SEQ ID NO: 268804 - DNA, 15 bp, Homo sapiens
gccaaggttggggca

SEQ ID NO: 268805 - DNA, 15 bp, Homo sapiens
agccaaggttggggc

SEQ ID NO: 268806 - DNA, 15 bp, Homo sapiens
aagccaaggttgggg

SEQ ID NO: 268807 - DNA, 15 bp, Homo sapiens
gaagccaaggttggg

SEQ ID NO: 268808 - DNA, 15 bp, Homo sapiens
tgaagccaaggttgg

SEQ ID NO: 268809 - DNA, 15 bp, Homo sapiens
atgaagccaaggttg

SEQ ID NO: 268810 - DNA, 15 bp, Homo sapiens
catgaagccaaggtt

SEQ ID NO: 268811 - DNA, 15 bp, Homo sapiens
ccatgaagccaaggt

SEQ ID NO: 268812 - DNA, 15 bp, Homo sapiens
accatgaagccaagg

SEQ ID NO: 268813 - DNA, 15 bp, Homo sapiens
aaccatgaagccaag

SEQ ID NO: 268814 - DNA, 15 bp, Homo sapiens
aaaccatgaagccaa

SEQ ID NO: 268815 - DNA, 15 bp, Homo sapiens
caaaccatgaagcca

SEQ ID NO: 268816 - DNA, 15 bp, Homo sapiens
tcaaaccatgaagcc

SEQ ID NO: 268817 - DNA, 15 bp, Homo sapiens
atcaaaccatgaagc

SEQ ID NO: 268818 - DNA, 15 bp, Homo sapiens
tatcaaaccatgaag

SEQ ID NO: 268819 - DNA, 15 bp, Homo sapiens
gtatcaaaccatgaa

SEQ ID NO: 268820 - DNA, 15 bp, Homo sapiens
agtatcaaaccatga

SEQ ID NO: 268821 - DNA, 15 bp, Homo sapiens
gagtatcaaaccatg

SEQ ID NO: 268822 - DNA, 15 bp, Homo sapiens
agagtatcaaaccat

SEQ ID NO: 268823 - DNA, 15 bp, Homo sapiens
gagagtatcaaacca

SEQ ID NO: 268824 - DNA, 15 bp, Homo sapiens
ggagagtatcaaacc

SEQ ID NO: 268825 - DNA, 15 bp, Homo sapiens
aggagagtatcaaac

SEQ ID NO: 268826 - DNA, 15 bp, Homo sapiens
caggagagtatcaaa

SEQ ID NO: 268827 - DNA, 15 bp, Homo sapiens
ccaggagagtatcaa

SEQ ID NO: 268828 - DNA, 15 bp, Homo sapiens
accaggagagtatca

SEQ ID NO: 268829 - DNA, 15 bp, Homo sapiens
gaccaggagagtatc

SEQ ID NO: 268830 - DNA, 15 bp, Homo sapiens
agaccaggagagtat

SEQ ID NO: 268831 - DNA, 15 bp, Homo sapiens
aagaccaggagagta

SEQ ID NO: 268832 - DNA, 15 bp, Homo sapiens
aaagaccaggagagt

SEQ ID NO: 268833 - DNA, 15 bp, Homo sapiens
gaaagaccaggagag

SEQ ID NO: 268834 - DNA, 15 bp, Homo sapiens
agaaagaccaggaga

SEQ ID NO: 268835 - DNA, 15 bp, Homo sapiens
gagaaagaccaggag

SEQ ID NO: 268836 - DNA, 15 bp, Homo sapiens
agagaaagaccagga

SEQ ID NO: 268837 - DNA, 15 bp, Homo sapiens
tagagaaagaccagg

SEQ ID NO: 268838 - DNA, 15 bp, Homo sapiens
gtagagaaagaccag

SEQ ID NO: 268839 - DNA, 15 bp, Homo sapiens
ggtagagaaagacca

SEQ ID NO: 268840 - DNA, 15 bp, Homo sapiens
aggtagagaaagacc

SEQ ID NO: 268841 - DNA, 15 bp, Homo sapiens
aaggtagagaaagac

SEQ ID NO: 268842 - DNA, 15 bp, Homo sapiens
aaaggtagagaaaga

SEQ ID NO: 268843 - DNA, 15 bp, Homo sapiens
gaaaggtagagaaag

SEQ ID NO: 268844 - DNA, 15 bp, Homo sapiens
agaaaggtagagaaa

SEQ ID NO: 268845 - DNA, 15 bp, Homo sapiens
gagaaaggtagagaa

SEQ ID NO: 268846 - DNA, 15 bp, Homo sapiens
tgagaaaggtagaga

SEQ ID NO: 268847 - DNA, 15 bp, Homo sapiens
ctgagaaaggtagag

SEQ ID NO: 268848 - DNA, 15 bp, Homo sapiens
tctgagaaaggtaga

SEQ ID NO: 268849 - DNA, 15 bp, Homo sapiens
ctctgagaaaggtag

SEQ ID NO: 268850 - DNA, 15 bp, Homo sapiens
gctctgagaaaggta

SEQ ID NO: 268851 - DNA, 15 bp, Homo sapiens
tgctctgagaaaggt

SEQ ID NO: 268852 - DNA, 15 bp, Homo sapiens
gtgctctgagaaagg

SEQ ID NO: 268853 - DNA, 15 bp, Homo sapiens
agtgctctgagaaag

SEQ ID NO: 268854 - DNA, 15 bp, Homo sapiens
tagtgctctgagaaa

SEQ ID NO: 268855 - DNA, 15 bp, Homo sapiens
atagtgctctgagaa

SEQ ID NO: 268856 - DNA, 15 bp, Homo sapiens
aatagtgctctgaga

SEQ ID NO: 268857 - DNA, 15 bp, Homo sapiens
caatagtgctctgag

SEQ ID NO: 268858 - DNA, 15 bp, Homo sapiens
gcaatagtgctctga

SEQ ID NO: 268859 - DNA, 15 bp, Homo sapiens
agcaatagtgctctg

SEQ ID NO: 268860 - DNA, 15 bp, Homo sapiens
gagcaatagtgctct

SEQ ID NO: 268861 - DNA, 15 bp, Homo sapiens
tgagcaatagtgctc

SEQ ID NO: 268862 - DNA, 15 bp, Homo sapiens
ctgagcaatagtgct

SEQ ID NO: 268863 - DNA, 15 bp, Homo sapiens
actgagcaatagtgc

SEQ ID NO: 268864 - DNA, 15 bp, Homo sapiens
gactgagcaatagtg

SEQ ID NO: 268865 - DNA, 15 bp, Homo sapiens
agactgagcaatagt

SEQ ID NO: 268866 - DNA, 15 bp, Homo sapiens
aagactgagcaatag

SEQ ID NO: 268867 - DNA, 15 bp, Homo sapiens
aaagactgagcaata

SEQ ID NO: 268868 - DNA, 15 bp, Homo sapiens
aaaagactgagcaat

SEQ ID NO: 268869 - DNA, 15 bp, Homo sapiens
gaaaagactgagcaa

SEQ ID NO: 268870 - DNA, 15 bp, Homo sapiens
agaaaagactgagca

SEQ ID NO: 268871 - DNA, 15 bp, Homo sapiens
gagaaaagactgagc

SEQ ID NO: 268872 - DNA, 15 bp, Homo sapiens
agagaaaagactgag

SEQ ID NO: 268873 - DNA, 15 bp, Homo sapiens
gagagaaaagactga

SEQ ID NO: 268874 - DNA, 15 bp, Homo sapiens
agagagaaaagactg

SEQ ID NO: 268875 - DNA, 15 bp, Homo sapiens
gagagagaaaagact

SEQ ID NO: 268876 - DNA, 15 bp, Homo sapiens
agagagagaaaagac

SEQ ID NO: 268877 - DNA, 15 bp, Homo sapiens
gagagagagaaaaga

SEQ ID NO: 268878 - DNA, 15 bp, Homo sapiens
agagagagagaaaag

SEQ ID NO: 268879 - DNA, 15 bp, Homo sapiens
aagagagagagaaaa

SEQ ID NO: 268880 - DNA, 15 bp, Homo sapiens
aaagagagagagaaa

SEQ ID NO: 268881 - DNA, 15 bp, Homo sapiens
aaaagagagagagaa

SEQ ID NO: 268882 - DNA, 15 bp, Homo sapiens
aaaaagagagagaga

SEQ ID NO: 268883 - DNA, 15 bp, Homo sapiens
aaaaaagagagagag

SEQ ID NO: 268884 - DNA, 15 bp, Homo sapiens
aaaaaaagagagaga

SEQ ID NO: 268885 - DNA, 15 bp, Homo sapiens
aaaaaaaagagagag

SEQ ID NO: 268886 - DNA, 15 bp, Homo sapiens
taaaaaaaagagaga

SEQ ID NO: 268887 - DNA, 15 bp, Homo sapiens
ttaaaaaaaagagag

SEQ ID NO: 268888 - DNA, 15 bp, Homo sapiens
cttaaaaaaaagaga

SEQ ID NO: 268889 - DNA, 15 bp, Homo sapiens
gcttaaaaaaaagag

SEQ ID NO: 268890 - DNA, 15 bp, Homo sapiens
agcttaaaaaaaaga

SEQ ID NO: 268891 - DNA, 15 bp, Homo sapiens
gagcttaaaaaaaag

SEQ ID NO: 268892 - DNA, 15 bp, Homo sapiens
agagcttaaaaaaaa

SEQ ID NO: 268893 - DNA, 15 bp, Homo sapiens
aagagcttaaaaaaa

SEQ ID NO: 268894 - DNA, 15 bp, Homo sapiens
aaagagcttaaaaaa

SEQ ID NO: 268895 - DNA, 15 bp, Homo sapiens
gaaagagcttaaaaa

SEQ ID NO: 268896 - DNA, 15 bp, Homo sapiens
agaaagagcttaaaa

SEQ ID NO: 268897 - DNA, 15 bp, Homo sapiens
gagaaagagcttaaa

SEQ ID NO: 268898 - DNA, 15 bp, Homo sapiens
agagaaagagcttaa

SEQ ID NO: 268899 - DNA, 15 bp, Homo sapiens
aagagaaagagctta

SEQ ID NO: 268900 - DNA, 15 bp, Homo sapiens
gaagagaaagagctt

SEQ ID NO: 268901 - DNA, 15 bp, Homo sapiens
agaagagaaagagct

SEQ ID NO: 268902 - DNA, 15 bp, Homo sapiens
tagaagagaaagagc

SEQ ID NO: 268903 - DNA, 15 bp, Homo sapiens
gtagaagagaaagag

SEQ ID NO: 268904 - DNA, 15 bp, Homo sapiens
agtagaagagaaaga

SEQ ID NO: 268905 - DNA, 15 bp, Homo sapiens
cagtagaagagaaag

SEQ ID NO: 268906 - DNA, 15 bp, Homo sapiens
acagtagaagagaaa

SEQ ID NO: 268907 - DNA, 15 bp, Homo sapiens
tacagtagaagagaa

SEQ ID NO: 268908 - DNA, 15 bp, Homo sapiens
atacagtagaagaga

SEQ ID NO: 268909 - DNA, 15 bp, Homo sapiens
catacagtagaagag

SEQ ID NO: 268910 - DNA, 15 bp, Homo sapiens
acatacagtagaaga

SEQ ID NO: 268911 - DNA, 15 bp, Homo sapiens
tacatacagtagaag

SEQ ID NO: 268912 - DNA, 15 bp, Homo sapiens
atacatacagtagaa

SEQ ID NO: 268913 - DNA, 15 bp, Homo sapiens
tatacatacagtaga

SEQ ID NO: 268914 - DNA, 15 bp, Homo sapiens
ttatacatacagtag

SEQ ID NO: 268915 - DNA, 15 bp, Homo sapiens
cttatacatacagta

SEQ ID NO: 268916 - DNA, 15 bp, Homo sapiens
acttatacatacagt

SEQ ID NO: 268917 - DNA, 15 bp, Homo sapiens
aacttatacatacag

SEQ ID NO: 268918 - DNA, 15 bp, Homo sapiens
caacttatacataca

SEQ ID NO: 268919 - DNA, 15 bp, Homo sapiens
tcaacttatacatac

SEQ ID NO: 268920 - DNA, 15 bp, Homo sapiens
ttcaacttatacata

SEQ ID NO: 268921 - DNA, 15 bp, Homo sapiens
cttcaacttatacat

SEQ ID NO: 268922 - DNA, 15 bp, Homo sapiens
acttcaacttataca

SEQ ID NO: 268923 - DNA, 15 bp, Homo sapiens
cacttcaacttatac

SEQ ID NO: 268924 - DNA, 15 bp, Homo sapiens
acacttcaacttata

SEQ ID NO: 268925 - DNA, 15 bp, Homo sapiens
gacacttcaacttat

SEQ ID NO: 268926 - DNA, 15 bp, Homo sapiens
agacacttcaactta

SEQ ID NO: 268927 - DNA, 15 bp, Homo sapiens
aagacacttcaactt

SEQ ID NO: 268928 - DNA, 15 bp, Homo sapiens
caagacacttcaact

SEQ ID NO: 268929 - DNA, 15 bp, Homo sapiens
tcaagacacttcaac

SEQ ID NO: 268930 - DNA, 15 bp, Homo sapiens
atcaagacacttcaa

SEQ ID NO: 268931 - DNA, 15 bp, Homo sapiens
tatcaagacacttca

SEQ ID NO: 268932 - DNA, 15 bp, Homo sapiens
atatcaagacacttc

SEQ ID NO: 268933 - DNA, 15 bp, Homo sapiens
gatatcaagacactt

SEQ ID NO: 268934 - DNA, 15 bp, Homo sapiens
agatatcaagacact

SEQ ID NO: 268935 - DNA, 15 bp, Homo sapiens
cagatatcaagacac

SEQ ID NO: 268936 - DNA, 15 bp, Homo sapiens
gcagatatcaagaca

SEQ ID NO: 268937 - DNA, 15 bp, Homo sapiens
agcagatatcaagac

SEQ ID NO: 268938 - DNA, 15 bp, Homo sapiens
gagcagatatcaaga

SEQ ID NO: 268939 - DNA, 15 bp, Homo sapiens
agagcagatatcaag

SEQ ID NO: 268940 - DNA, 15 bp, Homo sapiens
cagagcagatatcaa

SEQ ID NO: 268941 - DNA, 15 bp, Homo sapiens
acagagcagatatca

SEQ ID NO: 268942 - DNA, 15 bp, Homo sapiens
gacagagcagatatc

SEQ ID NO: 268943 - DNA, 15 bp, Homo sapiens
agacagagcagatat

SEQ ID NO: 268944 - DNA, 15 bp, Homo sapiens
cagacagagcagata

SEQ ID NO: 268945 - DNA, 15 bp, Homo sapiens
gcagacagagcagat

SEQ ID NO: 268946 - DNA, 15 bp, Homo sapiens
tgcagacagagcaga

SEQ ID NO: 268947 - DNA, 15 bp, Homo sapiens
atgcagacagagcag

SEQ ID NO: 268948 - DNA, 15 bp, Homo sapiens
aatgcagacagagca

SEQ ID NO: 268949 - DNA, 15 bp, Homo sapiens
gaatgcagacagagc

SEQ ID NO: 268950 - DNA, 15 bp, Homo sapiens
ggaatgcagacagag

SEQ ID NO: 268951 - DNA, 15 bp, Homo sapiens
aggaatgcagacaga

SEQ ID NO: 268952 - DNA, 15 bp, Homo sapiens
gaggaatgcagacag

SEQ ID NO: 268953 - DNA, 15 bp, Homo sapiens
ggaggaatgcagaca

SEQ ID NO: 268954 - DNA, 15 bp, Homo sapiens
tggaggaatgcagac

SEQ ID NO: 268955 - DNA, 15 bp, Homo sapiens
ctggaggaatgcaga

SEQ ID NO: 268956 - DNA, 15 bp, Homo sapiens
tctggaggaatgcag

SEQ ID NO: 268957 - DNA, 15 bp, Homo sapiens
atctggaggaatgca

SEQ ID NO: 268958 - DNA, 15 bp, Homo sapiens
aatctggaggaatgc

SEQ ID NO: 268959 - DNA, 15 bp, Homo sapiens
taatctggaggaatg

SEQ ID NO: 268960 - DNA, 15 bp, Homo sapiens
ttaatctggaggaat

SEQ ID NO: 268961 - DNA, 15 bp, Homo sapiens
attaatctggaggaa

SEQ ID NO: 268962 - DNA, 15 bp, Homo sapiens
gattaatctggagga

SEQ ID NO: 268963 - DNA, 15 bp, Homo sapiens
tgattaatctggagg

SEQ ID NO: 268964 - DNA, 15 bp, Homo sapiens
gtgattaatctggag

SEQ ID NO: 268965 - DNA, 15 bp, Homo sapiens
tgtgattaatctgga

SEQ ID NO: 268966 - DNA, 15 bp, Homo sapiens
atgtgattaatctgg

SEQ ID NO: 268967 - DNA, 15 bp, Homo sapiens
aatgtgattaatctg

SEQ ID NO: 268968 - DNA, 15 bp, Homo sapiens
aaatgtgattaatct

SEQ ID NO: 268969 - DNA, 15 bp, Homo sapiens
taaatgtgattaatc

SEQ ID NO: 268970 - DNA, 15 bp, Homo sapiens
ttaaatgtgattaat

SEQ ID NO: 268971 - DNA, 15 bp, Homo sapiens
cttaaatgtgattaa

SEQ ID NO: 268972 - DNA, 15 bp, Homo sapiens
gcttaaatgtgatta

SEQ ID NO: 268973 - DNA, 15 bp, Homo sapiens
agcttaaatgtgatt

SEQ ID NO: 268974 - DNA, 15 bp, Homo sapiens
gagcttaaatgtgat

SEQ ID NO: 268975 - DNA, 15 bp, Homo sapiens
tgagcttaaatgtga

SEQ ID NO: 268976 - DNA, 15 bp, Homo sapiens
atgagcttaaatgtg

SEQ ID NO: 268977 - DNA, 15 bp, Homo sapiens
aatgagcttaaatgt

SEQ ID NO: 268978 - DNA, 15 bp, Homo sapiens
taatgagcttaaatg

SEQ ID NO: 268979 - DNA, 15 bp, Homo sapiens
ataatgagcttaaat

SEQ ID NO: 268980 - DNA, 15 bp, Homo sapiens
aataatgagcttaaa

SEQ ID NO: 268981 - DNA, 15 bp, Homo sapiens
aaataatgagcttaa

SEQ ID NO: 268982 - DNA, 15 bp, Homo sapiens
caaataatgagctta

SEQ ID NO: 268983 - DNA, 15 bp, Homo sapiens
tcaaataatgagctt

SEQ ID NO: 268984 - DNA, 15 bp, Homo sapiens
ttcaaataatgagct

SEQ ID NO: 268985 - DNA, 15 bp, Homo sapiens
tttcaaataatgagc

SEQ ID NO: 268986 - DNA, 15 bp, Homo sapiens
atttcaaataatgag

SEQ ID NO: 268987 - DNA, 15 bp, Homo sapiens
tatttcaaataatga

SEQ ID NO: 268988 - DNA, 15 bp, Homo sapiens
ttatttcaaataatg

SEQ ID NO: 268989 - DNA, 15 bp, Homo sapiens
attatttcaaataat

SEQ ID NO: 268990 - DNA, 15 bp, Homo sapiens
tattatttcaaataa

SEQ ID NO: 268991 - DNA, 15 bp, Homo sapiens
ttattatttcaaata

SEQ ID NO: 268992 - DNA, 15 bp, Homo sapiens
cttattatttcaaat

SEQ ID NO: 268993 - DNA, 15 bp, Homo sapiens
gcttattatttcaaa

SEQ ID NO: 268994 - DNA, 15 bp, Homo sapiens
tgcttattatttcaa

SEQ ID NO: 268995 - DNA, 15 bp, Homo sapiens
gtgcttattatttca

SEQ ID NO: 268996 - DNA, 15 bp, Homo sapiens
agtgcttattatttc

SEQ ID NO: 268997 - DNA, 15 bp, Homo sapiens
gagtgcttattattt

SEQ ID NO: 268998 - DNA, 15 bp, Homo sapiens
tgagtgcttattatt

SEQ ID NO: 268999 - DNA, 15 bp, Homo sapiens
ctgagtgcttattat

SEQ ID NO: 269000 - DNA, 15 bp, Homo sapiens
tctgagtgcttatta

SEQ ID NO: 269001 - DNA, 15 bp, Homo sapiens
ttctgagtgcttatt

SEQ ID NO: 269002 - DNA, 15 bp, Homo sapiens
tttctgagtgcttat

SEQ ID NO: 269003 - DNA, 15 bp, Homo sapiens
atttctgagtgctta

SEQ ID NO: 269004 - DNA, 15 bp, Homo sapiens
tatttctgagtgctt

SEQ ID NO: 269005 - DNA, 15 bp, Homo sapiens
ttatttctgagtgct

SEQ ID NO: 269006 - DNA, 15 bp, Homo sapiens
cttatttctgagtgc

SEQ ID NO: 269007 - DNA, 15 bp, Homo sapiens
gcttatttctgagtg

SEQ ID NO: 269008 - DNA, 15 bp, Homo sapiens
tgcttatttctgagt

SEQ ID NO: 269009 - DNA, 15 bp, Homo sapiens
gtgcttatttctgag

SEQ ID NO: 269010 - DNA, 15 bp, Homo sapiens
agtgcttatttctga

SEQ ID NO: 269011 - DNA, 15 bp, Homo sapiens
gagtgcttatttctg

SEQ ID NO: 269012 - DNA, 15 bp, Homo sapiens
ggagtgcttatttct

SEQ ID NO: 269013 - DNA, 15 bp, Homo sapiens
tggagtgcttatttc

SEQ ID NO: 269014 - DNA, 15 bp, Homo sapiens
ctggagtgcttattt

SEQ ID NO: 269015 - DNA, 15 bp, Homo sapiens
cctggagtgcttatt

SEQ ID NO: 269016 - DNA, 15 bp, Homo sapiens
tcctggagtgcttat

SEQ ID NO: 269017 - DNA, 15 bp, Homo sapiens
gtcctggagtgctta

SEQ ID NO: 269018 - DNA, 15 bp, Homo sapiens
ggtcctggagtgctt

SEQ ID NO: 269019 - DNA, 15 bp, Homo sapiens
tggtcctggagtgct

SEQ ID NO: 269020 - DNA, 15 bp, Homo sapiens
ttggtcctggagtgc

SEQ ID NO: 269021 - DNA, 15 bp, Homo sapiens
gttggtcctggagtg

SEQ ID NO: 269022 - DNA, 15 bp, Homo sapiens
cgttggtcctggagt

SEQ ID NO: 269023 - DNA, 15 bp, Homo sapiens
acgttggtcctggag

SEQ ID NO: 269024 - DNA, 15 bp, Homo sapiens
gacgttggtcctgga

SEQ ID NO: 269025 - DNA, 15 bp, Homo sapiens
agacgttggtcctgg

SEQ ID NO: 269026 - DNA, 15 bp, Homo sapiens
tagacgttggtcctg

SEQ ID NO: 269027 - DNA, 15 bp, Homo sapiens
ttagacgttggtcct

SEQ ID NO: 269028 - DNA, 15 bp, Homo sapiens
attagacgttggtcc

SEQ ID NO: 269029 - DNA, 15 bp, Homo sapiens
aattagacgttggtc

SEQ ID NO: 269030 - DNA, 15 bp, Homo sapiens
caattagacgttggt

SEQ ID NO: 269031 - DNA, 15 bp, Homo sapiens
acaattagacgttgg

SEQ ID NO: 269032 - DNA, 15 bp, Homo sapiens
gacaattagacgttg

SEQ ID NO: 269033 - DNA, 15 bp, Homo sapiens
tgacaattagacgtt

SEQ ID NO: 269034 - DNA, 15 bp, Homo sapiens
ttgacaattagacgt

SEQ ID NO: 269035 - DNA, 15 bp, Homo sapiens
attgacaattagacg

SEQ ID NO: 269036 - DNA, 15 bp, Homo sapiens
aattgacaattagac

SEQ ID NO: 269037 - DNA, 15 bp, Homo sapiens
caattgacaattaga

SEQ ID NO: 269038 - DNA, 15 bp, Homo sapiens
tcaattgacaattag

SEQ ID NO: 269039 - DNA, 15 bp, Homo sapiens
gtcaattgacaatta

SEQ ID NO: 269040 - DNA, 15 bp, Homo sapiens
tgtcaattgacaatt

SEQ ID NO: 269041 - DNA, 15 bp, Homo sapiens
ttgtcaattgacaat

SEQ ID NO: 269042 - DNA, 15 bp, Homo sapiens
gttgtcaattgacaa

SEQ ID NO: 269043 - DNA, 15 bp, Homo sapiens
tgttgtcaattgaca

SEQ ID NO: 269044 - DNA, 15 bp, Homo sapiens
atgttgtcaattgac

SEQ ID NO: 269045 - DNA, 15 bp, Homo sapiens
gatgttgtcaattga

SEQ ID NO: 269046 - DNA, 15 bp, Homo sapiens
agatgttgtcaattg

SEQ ID NO: 269047 - DNA, 15 bp, Homo sapiens
gagatgttgtcaatt

SEQ ID NO: 269048 - DNA, 15 bp, Homo sapiens
ggagatgttgtcaat

SEQ ID NO: 269049 - DNA, 15 bp, Homo sapiens
tggagatgttgtcaa

SEQ ID NO: 269050 - DNA, 15 bp, Homo sapiens
ttggagatgttgtca

SEQ ID NO: 269051 - DNA, 15 bp, Homo sapiens
tttggagatgttgtc

SEQ ID NO: 269052 - DNA, 15 bp, Homo sapiens
atttggagatgttgt

SEQ ID NO: 269053 - DNA, 15 bp, Homo sapiens
aatttggagatgttg

SEQ ID NO: 269054 - DNA, 15 bp, Homo sapiens
caatttggagatgtt

SEQ ID NO: 269055 - DNA, 15 bp, Homo sapiens
acaatttggagatgt

SEQ ID NO: 269056 - DNA, 15 bp, Homo sapiens
gacaatttggagatg

SEQ ID NO: 269057 - DNA, 15 bp, Homo sapiens
tgacaatttggagat

SEQ ID NO: 269058 - DNA, 15 bp, Homo sapiens
ttgacaatttggaga

SEQ ID NO: 269059 - DNA, 15 bp, Homo sapiens
attgacaatttggag

SEQ ID NO: 269060 - DNA, 15 bp, Homo sapiens
aattgacaatttgga

SEQ ID NO: 269061 - DNA, 15 bp, Homo sapiens
caattgacaatttgg

SEQ ID NO: 269062 - DNA, 15 bp, Homo sapiens
tcaattgacaatttg

SEQ ID NO: 269063 - DNA, 15 bp, Homo sapiens
gtcaattgacaattt

SEQ ID NO: 269064 - DNA, 15 bp, Homo sapiens
ggttgtcaattgaca

SEQ ID NO: 269065 - DNA, 15 bp, Homo sapiens
aggttgtcaattgac

SEQ ID NO: 269066 - DNA, 15 bp, Homo sapiens
gaggttgtcaattga

SEQ ID NO: 269067 - DNA, 15 bp, Homo sapiens
agaggttgtcaattg

SEQ ID NO: 269068 - DNA, 15 bp, Homo sapiens
gagaggttgtcaatt

SEQ ID NO: 269069 - DNA, 15 bp, Homo sapiens
ggagaggttgtcaat

SEQ ID NO: 269070 - DNA, 15 bp, Homo sapiens
tggagaggttgtcaa

SEQ ID NO: 269071 - DNA, 15 bp, Homo sapiens
gtggagaggttgtca

SEQ ID NO: 269072 - DNA, 15 bp, Homo sapiens
agtggagaggttgtc

SEQ ID NO: 269073 - DNA, 15 bp, Homo sapiens
gagtggagaggttgt

SEQ ID NO: 269074 - DNA, 15 bp, Homo sapiens
tgagtggagaggttg

SEQ ID NO: 269075 - DNA, 15 bp, Homo sapiens
ttgagtggagaggtt

SEQ ID NO: 269076 - DNA, 15 bp, Homo sapiens
tttgagtggagaggt

SEQ ID NO: 269077 - DNA, 15 bp, Homo sapiens
ctttgagtggagagg

SEQ ID NO: 269078 - DNA, 15 bp, Homo sapiens
actttgagtggagag

SEQ ID NO: 269079 - DNA, 15 bp, Homo sapiens
gactttgagtggaga

SEQ ID NO: 269080 - DNA, 15 bp, Homo sapiens
tgactttgagtggag

SEQ ID NO: 269081 - DNA, 15 bp, Homo sapiens
atgactttgagtgga

SEQ ID NO: 269082 - DNA, 15 bp, Homo sapiens
gatgactttgagtgg

SEQ ID NO: 269083 - DNA, 15 bp, Homo sapiens
tgatgactttgagtg

SEQ ID NO: 269084 - DNA, 15 bp, Homo sapiens
ttgatgactttgagt

SEQ ID NO: 269085 - DNA, 15 bp, Homo sapiens
attgatgactttgag

SEQ ID NO: 269086 - DNA, 15 bp, Homo sapiens
aattgatgactttga

SEQ ID NO: 269087 - DNA, 15 bp, Homo sapiens
aaattgatgactttg

SEQ ID NO: 269088 - DNA, 15 bp, Homo sapiens
taaattgatgacttt

SEQ ID NO: 269089 - DNA, 15 bp, Homo sapiens
ttaaattgatgactt

SEQ ID NO: 269090 - DNA, 15 bp, Homo sapiens
attaaattgatgact

SEQ ID NO: 269091 - DNA, 15 bp, Homo sapiens
aattaaattgatgac

SEQ ID NO: 269092 - DNA, 15 bp, Homo sapiens
caattaaattgatga

SEQ ID NO: 269093 - DNA, 15 bp, Homo sapiens
gcaattaaattgatg

SEQ ID NO: 269094 - DNA, 15 bp, Homo sapiens
agcaattaaattgat

SEQ ID NO: 269095 - DNA, 15 bp, Homo sapiens
aagcaattaaattga

SEQ ID NO: 269096 - DNA, 15 bp, Homo sapiens
gaagcaattaaattg

SEQ ID NO: 269097 - DNA, 15 bp, Homo sapiens
agaagcaattaaatt

SEQ ID NO: 269098 - DNA, 15 bp, Homo sapiens
aagaagcaattaaat

SEQ ID NO: 269099 - DNA, 15 bp, Homo sapiens
aaagaagcaattaaa

SEQ ID NO: 269100 - DNA, 15 bp, Homo sapiens
aaaagaagcaattaa

SEQ ID NO: 269101 - DNA, 15 bp, Homo sapiens
taaaagaagcaatta

SEQ ID NO: 269102 - DNA, 15 bp, Homo sapiens
gtaaaagaagcaatt

SEQ ID NO: 269103 - DNA, 15 bp, Homo sapiens
tgtaaaagaagcaat

SEQ ID NO: 269104 - DNA, 15 bp, Homo sapiens
atgtaaaagaagcaa

SEQ ID NO: 269105 - DNA, 15 bp, Homo sapiens
aatgtaaaagaagca

SEQ ID NO: 269106 - DNA, 15 bp, Homo sapiens
gaatgtaaaagaagc

SEQ ID NO: 269107 - DNA, 15 bp, Homo sapiens
agaatgtaaaagaag

SEQ ID NO: 269108 - DNA, 15 bp, Homo sapiens
aagaatgtaaaagaa

SEQ ID NO: 269109 - DNA, 15 bp, Homo sapiens
gaagaatgtaaaaga

SEQ ID NO: 269110 - DNA, 15 bp, Homo sapiens
ggaagaatgtaaaag

SEQ ID NO: 269111 - DNA, 15 bp, Homo sapiens
gggaagaatgtaaaa

SEQ ID NO: 269112 - DNA, 15 bp, Homo sapiens
agggaagaatgtaaa

SEQ ID NO: 269113 - DNA, 15 bp, Homo sapiens
gagggaagaatgtaa

SEQ ID NO: 269114 - DNA, 15 bp, Homo sapiens
ggagggaagaatgta

SEQ ID NO: 269115 - DNA, 15 bp, Homo sapiens
gggagggaagaatgt

SEQ ID NO: 269116 - DNA, 15 bp, Homo sapiens
tgggagggaagaatg

SEQ ID NO: 269117 - DNA, 15 bp, Homo sapiens
ctgggagggaagaat

SEQ ID NO: 269118 - DNA, 15 bp, Homo sapiens
tctgggagggaagaa

SEQ ID NO: 269119 - DNA, 15 bp, Homo sapiens
ttctgggagggaaga

SEQ ID NO: 269120 - DNA, 15 bp, Homo sapiens
gttctgggagggaag

SEQ ID NO: 269121 - DNA, 15 bp, Homo sapiens
ggttctgggagggaa

SEQ ID NO: 269122 - DNA, 15 bp, Homo sapiens
tggttctgggaggga

SEQ ID NO: 269123 - DNA, 15 bp, Homo sapiens
atggttctgggaggg

SEQ ID NO: 269124 - DNA, 15 bp, Homo sapiens
tatggttctgggagg

SEQ ID NO: 269125 - DNA, 15 bp, Homo sapiens
atatggttctgggag

SEQ ID NO: 269126 - DNA, 15 bp, Homo sapiens
tatatggttctggga

SEQ ID NO: 269127 - DNA, 15 bp, Homo sapiens
atatatggttctggg

SEQ ID NO: 269128 - DNA, 15 bp, Homo sapiens
gatatatggttctgg

SEQ ID NO: 269129 - DNA, 15 bp, Homo sapiens
ggatatatggttctg

SEQ ID NO: 269130 - DNA, 15 bp, Homo sapiens
gggatatatggttct

SEQ ID NO: 269131 - DNA, 15 bp, Homo sapiens
tgggatatatggttc

SEQ ID NO: 269132 - DNA, 15 bp, Homo sapiens
ttgggatatatggtt

SEQ ID NO: 269133 - DNA, 15 bp, Homo sapiens
tttgggatatatggt

SEQ ID NO: 269134 - DNA, 15 bp, Homo sapiens
atttgggatatatgg

SEQ ID NO: 269135 - DNA, 15 bp, Homo sapiens
tatttgggatatatg

SEQ ID NO: 269136 - DNA, 15 bp, Homo sapiens
ttatttgggatatat

SEQ ID NO: 269137 - DNA, 15 bp, Homo sapiens
attatttgggatata

SEQ ID NO: 269138 - DNA, 15 bp, Homo sapiens
tattatttgggatat

SEQ ID NO: 269139 - DNA, 15 bp, Homo sapiens
ttattatttgggata

SEQ ID NO: 269140 - DNA, 15 bp, Homo sapiens
attattatttgggat

SEQ ID NO: 269141 - DNA, 15 bp, Homo sapiens
aattattatttggga

SEQ ID NO: 269142 - DNA, 15 bp, Homo sapiens
caattattatttggg

SEQ ID NO: 269143 - DNA, 15 bp, Homo sapiens
acaattattatttgg

SEQ ID NO: 269144 - DNA, 15 bp, Homo sapiens
gacaattattatttg

SEQ ID NO: 269145 - DNA, 15 bp, Homo sapiens
ggacaattattattt

SEQ ID NO: 269146 - DNA, 15 bp, Homo sapiens
tggacaattattatt

SEQ ID NO: 269147 - DNA, 15 bp, Homo sapiens
ttggacaattattat

SEQ ID NO: 269148 - DNA, 15 bp, Homo sapiens
gttggacaattatta

SEQ ID NO: 269149 - DNA, 15 bp, Homo sapiens
cgttggacaattatt

SEQ ID NO: 269150 - DNA, 15 bp, Homo sapiens
acgttggacaattat

SEQ ID NO: 269151 - DNA, 15 bp, Homo sapiens
aacgttggacaatta

SEQ ID NO: 269152 - DNA, 15 bp, Homo sapiens
taacgttggacaatt

SEQ ID NO: 269153 - DNA, 15 bp, Homo sapiens
ttaacgttggacaat

SEQ ID NO: 269154 - DNA, 15 bp, Homo sapiens
tttaacgttggacaa

SEQ ID NO: 269155 - DNA, 15 bp, Homo sapiens
ctttaacgttggaca

SEQ ID NO: 269156 - DNA, 15 bp, Homo sapiens
tctttaacgttggac

SEQ ID NO: 269157 - DNA, 15 bp, Homo sapiens
gtctttaacgttgga

SEQ ID NO: 269158 - DNA, 15 bp, Homo sapiens
tgtctttaacgttgg

SEQ ID NO: 269159 - DNA, 15 bp, Homo sapiens
gtgtctttaacgttg

SEQ ID NO: 269160 - DNA, 15 bp, Homo sapiens
ggtgtctttaacgtt

SEQ ID NO: 269161 - DNA, 15 bp, Homo sapiens
tggtgtctttaacgt

SEQ ID NO: 269162 - DNA, 15 bp, Homo sapiens
gtggtgtctttaacg

SEQ ID NO: 269163 - DNA, 15 bp, Homo sapiens
ggtggtgtctttaac

SEQ ID NO: 269164 - DNA, 15 bp, Homo sapiens
tggtggtgtctttaa

SEQ ID NO: 269165 - DNA, 15 bp, Homo sapiens
atggtggtgtcttta

SEQ ID NO: 269166 - DNA, 15 bp, Homo sapiens
tatggtggtgtcttt

SEQ ID NO: 269167 - DNA, 15 bp, Homo sapiens
gtatggtggtgtctt

SEQ ID NO: 269168 - DNA, 15 bp, Homo sapiens
agtatggtggtgtct

SEQ ID NO: 269169 - DNA, 15 bp, Homo sapiens
gagtatggtggtgtc

SEQ ID NO: 269170 - DNA, 15 bp, Homo sapiens
agagtatggtggtgt

SEQ ID NO: 269171 - DNA, 15 bp, Homo sapiens
aagagtatggtggtg

SEQ ID NO: 269172 - DNA, 15 bp, Homo sapiens
aaagagtatggtggt

SEQ ID NO: 269173 - DNA, 15 bp, Homo sapiens
gaaagagtatggtgg

SEQ ID NO: 269174 - DNA, 15 bp, Homo sapiens
ggaaagagtatggtg

SEQ ID NO: 269175 - DNA, 15 bp, Homo sapiens
aggaaagagtatggt

SEQ ID NO: 269176 - DNA, 15 bp, Homo sapiens
aaggaaagagtatgg

SEQ ID NO: 269177 - DNA, 15 bp, Homo sapiens
gaaggaaagagtatg

SEQ ID NO: 269178 - DNA, 15 bp, Homo sapiens
tgaaggaaagagtat

SEQ ID NO: 269179 - DNA, 15 bp, Homo sapiens
gtgaaggaaagagta

SEQ ID NO: 269180 - DNA, 15 bp, Homo sapiens
agtgaaggaaagagt

SEQ ID NO: 269181 - DNA, 15 bp, Homo sapiens
aagtgaaggaaagag

SEQ ID NO: 269182 - DNA, 15 bp, Homo sapiens
caagtgaaggaaaga

SEQ ID NO: 269183 - DNA, 15 bp, Homo sapiens
gcaagtgaaggaaag

SEQ ID NO: 269184 - DNA, 15 bp, Homo sapiens
tgcaagtgaaggaaa

SEQ ID NO: 269185 - DNA, 15 bp, Homo sapiens
atgcaagtgaaggaa

SEQ ID NO: 269186 - DNA, 15 bp, Homo sapiens
tatgcaagtgaagga

SEQ ID NO: 269187 - DNA, 15 bp, Homo sapiens
ctatgcaagtgaagg

SEQ ID NO: 269188 - DNA, 15 bp, Homo sapiens
gctatgcaagtgaag

SEQ ID NO: 269189 - DNA, 15 bp, Homo sapiens
ggctatgcaagtgaa

SEQ ID NO: 269190 - DNA, 15 bp, Homo sapiens
tggctatgcaagtga

SEQ ID NO: 269191 - DNA, 15 bp, Homo sapiens
ttggctatgcaagtg

SEQ ID NO: 269192 - DNA, 15 bp, Homo sapiens
attggctatgcaagt

SEQ ID NO: 269193 - DNA, 15 bp, Homo sapiens
gattggctatgcaag

SEQ ID NO: 269194 - DNA, 15 bp, Homo sapiens
ggattggctatgcaa

SEQ ID NO: 269195 - DNA, 15 bp, Homo sapiens
tggattggctatgca

SEQ ID NO: 269196 - DNA, 15 bp, Homo sapiens
ttggattggctatgc

SEQ ID NO: 269197 - DNA, 15 bp, Homo sapiens
gttggattggctatg

SEQ ID NO: 269198 - DNA, 15 bp, Homo sapiens
tgttggattggctat

SEQ ID NO: 269199 - DNA, 15 bp, Homo sapiens
ctgttggattggcta

SEQ ID NO: 269200 - DNA, 15 bp, Homo sapiens
gctgttggattggct

SEQ ID NO: 269201 - DNA, 15 bp, Homo sapiens
tgctgttggattggc

SEQ ID NO: 269202 - DNA, 15 bp, Homo sapiens
ttgctgttggattgg

SEQ ID NO: 269203 - DNA, 15 bp, Homo sapiens
attgctgttggattg

SEQ ID NO: 269204 - DNA, 15 bp, Homo sapiens
gattgctgttggatt

SEQ ID NO: 269205 - DNA, 15 bp, Homo sapiens
ggattgctgttggat

SEQ ID NO: 269206 - DNA, 15 bp, Homo sapiens
aggattgctgttgga

SEQ ID NO: 269207 - DNA, 15 bp, Homo sapiens
caggattgctgttgg

SEQ ID NO: 269208 - DNA, 15 bp, Homo sapiens
acaggattgctgttg

SEQ ID NO: 269209 - DNA, 15 bp, Homo sapiens
aacaggattgctgtt

SEQ ID NO: 269210 - DNA, 15 bp, Homo sapiens
caacaggattgctgt

SEQ ID NO: 269211 - DNA, 15 bp, Homo sapiens
tcaacaggattgctg

SEQ ID NO: 269212 - DNA, 15 bp, Homo sapiens
gtcaacaggattgct

SEQ ID NO: 269213 - DNA, 15 bp, Homo sapiens
agtcaacaggattgc

SEQ ID NO: 269214 - DNA, 15 bp, Homo sapiens
tagtcaacaggattg

SEQ ID NO: 269215 - DNA, 15 bp, Homo sapiens
gtagtcaacaggatt

SEQ ID NO: 269216 - DNA, 15 bp, Homo sapiens
tgtagtcaacaggat

SEQ ID NO: 269217 - DNA, 15 bp, Homo sapiens
ttgtagtcaacagga

SEQ ID NO: 269218 - DNA, 15 bp, Homo sapiens
gttgtagtcaacagg

SEQ ID NO: 269219 - DNA, 15 bp, Homo sapiens
ggttgtagtcaacag

SEQ ID NO: 269220 - DNA, 15 bp, Homo sapiens
gggttgtagtcaaca

SEQ ID NO: 269221 - DNA, 15 bp, Homo sapiens
tgggttgtagtcaac

SEQ ID NO: 269222 - DNA, 15 bp, Homo sapiens
gtgggttgtagtcaa

SEQ ID NO: 269223 - DNA, 15 bp, Homo sapiens
tgtgggttgtagtca

SEQ ID NO: 269224 - DNA, 15 bp, Homo sapiens
ttgtgggttgtagtc

SEQ ID NO: 269225 - DNA, 15 bp, Homo sapiens
tttgtgggttgtagt

SEQ ID NO: 269226 - DNA, 15 bp, Homo sapiens
atttgtgggttgtag

SEQ ID NO: 269227 - DNA, 15 bp, Homo sapiens
tatttgtgggttgta

SEQ ID NO: 269228 - DNA, 15 bp, Homo sapiens
ttatttgtgggttgt

SEQ ID NO: 269229 - DNA, 15 bp, Homo sapiens
tttatttgtgggttg

SEQ ID NO: 269230 - DNA, 15 bp, Homo sapiens
atttatttgtgggtt

SEQ ID NO: 269231 - DNA, 15 bp, Homo sapiens
gatttatttgtgggt

SEQ ID NO: 269232 - DNA, 15 bp, Homo sapiens
agatttatttgtggg

SEQ ID NO: 269233 - DNA, 15 bp, Homo sapiens
aagatttatttgtgg

SEQ ID NO: 269234 - DNA, 15 bp, Homo sapiens
taagatttatttgtg

SEQ ID NO: 269235 - DNA, 15 bp, Homo sapiens
ttaagatttatttgt

SEQ ID NO: 269236 - DNA, 15 bp, Homo sapiens
tttaagatttatttg

SEQ ID NO: 269237 - DNA, 15 bp, Homo sapiens
atttaagatttattt

SEQ ID NO: 269238 - DNA, 15 bp, Homo sapiens
gatttaagatttatt

SEQ ID NO: 269239 - DNA, 15 bp, Homo sapiens
agatttaagatttat

SEQ ID NO: 269240 - DNA, 15 bp, Homo sapiens
cagatttaagattta

SEQ ID NO: 269241 - DNA, 15 bp, Homo sapiens
acagatttaagattt

SEQ ID NO: 269242 - DNA, 15 bp, Homo sapiens
gacagatttaagatt

SEQ ID NO: 269243 - DNA, 15 bp, Homo sapiens
tgacagatttaagat

SEQ ID NO: 269244 - DNA, 15 bp, Homo sapiens
gtgacagatttaaga

SEQ ID NO: 269245 - DNA, 15 bp, Homo sapiens
ggtgacagatttaag

SEQ ID NO: 269246 - DNA, 15 bp, Homo sapiens
aggtgacagatttaa

SEQ ID NO: 269247 - DNA, 15 bp, Homo sapiens
aaggtgacagattta

SEQ ID NO: 269248 - DNA, 15 bp, Homo sapiens
aaaggtgacagattt

SEQ ID NO: 269249 - DNA, 15 bp, Homo sapiens
aaaaggtgacagatt

SEQ ID NO: 269250 - DNA, 15 bp, Homo sapiens
aaaaaggtgacagat

SEQ ID NO: 269251 - DNA, 15 bp, Homo sapiens
aaaaaaggtgacaga

SEQ ID NO: 269252 - DNA, 15 bp, Homo sapiens
gaaaaaaggtgacag

SEQ ID NO: 269253 - DNA, 15 bp, Homo sapiens
ggaaaaaaggtgaca

SEQ ID NO: 269254 - DNA, 15 bp, Homo sapiens
tggaaaaaaggtgac

SEQ ID NO: 269255 - DNA, 15 bp, Homo sapiens
ttggaaaaaaggtga

SEQ ID NO: 269256 - DNA, 15 bp, Homo sapiens
gttggaaaaaaggtg

SEQ ID NO: 269257 - DNA, 15 bp, Homo sapiens
agttggaaaaaaggt

SEQ ID NO: 269258 - DNA, 15 bp, Homo sapiens
aagttggaaaaaagg

SEQ ID NO: 269259 - DNA, 15 bp, Homo sapiens
gaagttggaaaaaag

SEQ ID NO: 269260 - DNA, 15 bp, Homo sapiens
tgaagttggaaaaaa

SEQ ID NO: 269261 - DNA, 15 bp, Homo sapiens
gtgaagttggaaaaa

SEQ ID NO: 269262 - DNA, 15 bp, Homo sapiens
tgtgaagttggaaaa

SEQ ID NO: 269263 - DNA, 15 bp, Homo sapiens
ttgtgaagttggaaa

SEQ ID NO: 269264 - DNA, 15 bp, Homo sapiens
gttgtgaagttggaa

SEQ ID NO: 269265 - DNA, 15 bp, Homo sapiens
ggttgtgaagttgga

SEQ ID NO: 269266 - DNA, 15 bp, Homo sapiens
aggttgtgaagttgg

SEQ ID NO: 269267 - DNA, 15 bp, Homo sapiens
taggttgtgaagttg

SEQ ID NO: 269268 - DNA, 15 bp, Homo sapiens
ctaggttgtgaagtt

SEQ ID NO: 269269 - DNA, 15 bp, Homo sapiens
gctaggttgtgaagt

SEQ ID NO: 269270 - DNA, 15 bp, Homo sapiens
tgctaggttgtgaag

SEQ ID NO: 269271 - DNA, 15 bp, Homo sapiens
ctgctaggttgtgaa

SEQ ID NO: 269272 - DNA, 15 bp, Homo sapiens
actgctaggttgtga

SEQ ID NO: 269273 - DNA, 15 bp, Homo sapiens
cactgctaggttgtg

SEQ ID NO: 269274 - DNA, 15 bp, Homo sapiens
acactgctaggttgt

SEQ ID NO: 269275 - DNA, 15 bp, Homo sapiens
tacactgctaggttg

SEQ ID NO: 269276 - DNA, 15 bp, Homo sapiens
ttacactgctaggtt

SEQ ID NO: 269277 - DNA, 15 bp, Homo sapiens
attacactgctaggt

SEQ ID NO: 269278 - DNA, 15 bp, Homo sapiens
tattacactgctagg

SEQ ID NO: 269279 - DNA, 15 bp, Homo sapiens
ctattacactgctag

SEQ ID NO: 269280 - DNA, 15 bp, Homo sapiens
actattacactgcta

SEQ ID NO: 269281 - DNA, 15 bp, Homo sapiens
gactattacactgct

SEQ ID NO: 269282 - DNA, 15 bp, Homo sapiens
agactattacactgc

SEQ ID NO: 269283 - DNA, 15 bp, Homo sapiens
tagactattacactg

SEQ ID NO: 269284 - DNA, 15 bp, Homo sapiens
atagactattacact

SEQ ID NO: 269285 - DNA, 15 bp, Homo sapiens
aatagactattacac

SEQ ID NO: 269286 - DNA, 15 bp, Homo sapiens
taatagactattaca

SEQ ID NO: 269287 - DNA, 15 bp, Homo sapiens
ttaatagactattac

SEQ ID NO: 269288 - DNA, 15 bp, Homo sapiens
attaatagactatta

SEQ ID NO: 269289 - DNA, 15 bp, Homo sapiens
aattaatagactatt

SEQ ID NO: 269290 - DNA, 15 bp, Homo sapiens
caattaatagactat

SEQ ID NO: 269291 - DNA, 15 bp, Homo sapiens
ccaattaatagacta

SEQ ID NO: 269292 - DNA, 15 bp, Homo sapiens
accaattaatagact

SEQ ID NO: 269293 - DNA, 15 bp, Homo sapiens
caccaattaatagac

SEQ ID NO: 269294 - DNA, 15 bp, Homo sapiens
acaccaattaataga

SEQ ID NO: 269295 - DNA, 15 bp, Homo sapiens
aacaccaattaatag

SEQ ID NO: 269296 - DNA, 15 bp, Homo sapiens
gaacaccaattaata

SEQ ID NO: 269297 - DNA, 15 bp, Homo sapiens
agaacaccaattaat

SEQ ID NO: 269298 - DNA, 15 bp, Homo sapiens
gagaacaccaattaa

SEQ ID NO: 269299 - DNA, 15 bp, Homo sapiens
agagaacaccaatta

SEQ ID NO: 269300 - DNA, 15 bp, Homo sapiens
aagagaacaccaatt

SEQ ID NO: 269301 - DNA, 15 bp, Homo sapiens
caagagaacaccaat

SEQ ID NO: 269302 - DNA, 15 bp, Homo sapiens
acaagagaacaccaa

SEQ ID NO: 269303 - DNA, 15 bp, Homo sapiens
gacaagagaacacca

SEQ ID NO: 269304 - DNA, 15 bp, Homo sapiens
agacaagagaacacc

SEQ ID NO: 269305 - DNA, 15 bp, Homo sapiens
tagacaagagaacac

SEQ ID NO: 269306 - DNA, 15 bp, Homo sapiens
atagacaagagaaca

SEQ ID NO: 269307 - DNA, 15 bp, Homo sapiens
aatagacaagagaac

SEQ ID NO: 269308 - DNA, 15 bp, Homo sapiens
gaatagacaagagaa

SEQ ID NO: 269309 - DNA, 15 bp, Homo sapiens
agaatagacaagaga

SEQ ID NO: 269310 - DNA, 15 bp, Homo sapiens
aagaatagacaagag

SEQ ID NO: 269311 - DNA, 15 bp, Homo sapiens
aaagaatagacaaga

SEQ ID NO: 269312 - DNA, 15 bp, Homo sapiens
gaaagaatagacaag

SEQ ID NO: 269313 - DNA, 15 bp, Homo sapiens
ggaaagaatagacaa

SEQ ID NO: 269314 - DNA, 15 bp, Homo sapiens
aggaaagaatagaca

SEQ ID NO: 269315 - DNA, 15 bp, Homo sapiens
gaggaaagaatagac

SEQ ID NO: 269316 - DNA, 15 bp, Homo sapiens
tgaggaaagaataga

SEQ ID NO: 269317 - DNA, 15 bp, Homo sapiens
ctgaggaaagaatag

SEQ ID NO: 269318 - DNA, 15 bp, Homo sapiens
gctgaggaaagaata

SEQ ID NO: 269319 - DNA, 15 bp, Homo sapiens
ggctgaggaaagaat

SEQ ID NO: 269320 - DNA, 15 bp, Homo sapiens
gggctgaggaaagaa

SEQ ID NO: 269321 - DNA, 15 bp, Homo sapiens
tgggctgaggaaaga

SEQ ID NO: 269322 - DNA, 15 bp, Homo sapiens
ttgggctgaggaaag

SEQ ID NO: 269323 - DNA, 15 bp, Homo sapiens
tttgggctgaggaaa

SEQ ID NO: 269324 - DNA, 15 bp, Homo sapiens
gtttgggctgaggaa

SEQ ID NO: 269325 - DNA, 15 bp, Homo sapiens
ggtttgggctgagga

SEQ ID NO: 269326 - DNA, 15 bp, Homo sapiens
tggtttgggctgagg

SEQ ID NO: 269327 - DNA, 15 bp, Homo sapiens
atggtttgggctgag

SEQ ID NO: 269328 - DNA, 15 bp, Homo sapiens
aatggtttgggctga

SEQ ID NO: 269329 - DNA, 15 bp, Homo sapiens
gaatggtttgggctg

SEQ ID NO: 269330 - DNA, 15 bp, Homo sapiens
agaatggtttgggct

SEQ ID NO: 269331 - DNA, 15 bp, Homo sapiens
gagaatggtttgggc

SEQ ID NO: 269332 - DNA, 15 bp, Homo sapiens
ggagaatggtttggg

SEQ ID NO: 269333 - DNA, 15 bp, Homo sapiens
aggagaatggtttgg

SEQ ID NO: 269334 - DNA, 15 bp, Homo sapiens
aaggagaatggtttg

SEQ ID NO: 269335 - DNA, 15 bp, Homo sapiens
taaggagaatggttt

SEQ ID NO: 269336 - DNA, 15 bp, Homo sapiens
ataaggagaatggtt

SEQ ID NO: 269337 - DNA, 15 bp, Homo sapiens
cataaggagaatggt

SEQ ID NO: 269338 - DNA, 15 bp, Homo sapiens
ccataaggagaatgg

SEQ ID NO: 269339 - DNA, 15 bp, Homo sapiens
gccataaggagaatg

SEQ ID NO: 269340 - DNA, 15 bp, Homo sapiens
tgccataaggagaat

SEQ ID NO: 269341 - DNA, 15 bp, Homo sapiens
ctgccataaggagaa

SEQ ID NO: 269342 - DNA, 15 bp, Homo sapiens
actgccataaggaga

SEQ ID NO: 269343 - DNA, 15 bp, Homo sapiens
cactgccataaggag

SEQ ID NO: 269344 - DNA, 15 bp, Homo sapiens
ccactgccataagga

SEQ ID NO: 269345 - DNA, 15 bp, Homo sapiens
gccactgccataagg

SEQ ID NO: 269346 - DNA, 15 bp, Homo sapiens
tgccactgccataag

SEQ ID NO: 269347 - DNA, 15 bp, Homo sapiens
ctgccactgccataa

SEQ ID NO: 269348 - DNA, 15 bp, Homo sapiens
actgccactgccata

SEQ ID NO: 269349 - DNA, 15 bp, Homo sapiens
tactgccactgccat

SEQ ID NO: 269350 - DNA, 15 bp, Homo sapiens
ttactgccactgcca

SEQ ID NO: 269351 - DNA, 15 bp, Homo sapiens
attactgccactgcc

SEQ ID NO: 269352 - DNA, 15 bp, Homo sapiens
aattactgccactgc

SEQ ID NO: 269353 - DNA, 15 bp, Homo sapiens
aaattactgccactg

SEQ ID NO: 269354 - DNA, 15 bp, Homo sapiens
aaaattactgccact

SEQ ID NO: 269355 - DNA, 15 bp, Homo sapiens
taaaattactgccac

SEQ ID NO: 269356 - DNA, 15 bp, Homo sapiens
ataaaattactgcca

SEQ ID NO: 269357 - DNA, 15 bp, Homo sapiens
tataaaattactgcc

SEQ ID NO: 269358 - DNA, 15 bp, Homo sapiens
atataaaattactgc

SEQ ID NO: 269359 - DNA, 15 bp, Homo sapiens
tatataaaattactg

SEQ ID NO: 269360 - DNA, 15 bp, Homo sapiens
atatataaaattact

SEQ ID NO: 269361 - DNA, 15 bp, Homo sapiens
tatatataaaattac

SEQ ID NO: 269362 - DNA, 15 bp, Homo sapiens
atatatataaaatta

SEQ ID NO: 269363 - DNA, 15 bp, Homo sapiens
tatatatataaaatt

SEQ ID NO: 269364 - DNA, 15 bp, Homo sapiens
atatatatataaaat

SEQ ID NO: 269365 - DNA, 15 bp, Homo sapiens
tatatatatataaaa

SEQ ID NO: 269366 - DNA, 15 bp, Homo sapiens
atatatatatataaa

SEQ ID NO: 269367 - DNA, 15 bp, Homo sapiens
tatatatatatataa

SEQ ID NO: 269368 - DNA, 15 bp, Homo sapiens
gtatatatatatata

SEQ ID NO: 269369 - DNA, 15 bp, Homo sapiens
tgtatatatatatat

SEQ ID NO: 269370 - DNA, 15 bp, Homo sapiens
gtgtatatatatata

SEQ ID NO: 269371 - DNA, 15 bp, Homo sapiens
tgtgtatatatatat

SEQ ID NO: 269372 - DNA, 15 bp, Homo sapiens
gtgtgtatatatata

SEQ ID NO: 269373 - DNA, 15 bp, Homo sapiens
tgtgtgtatatatat

SEQ ID NO: 269374 - DNA, 15 bp, Homo sapiens
agtgtgtgtgtatat

SEQ ID NO: 269375 - DNA, 15 bp, Homo sapiens
aagtgtgtgtgtata

SEQ ID NO: 269376 - DNA, 15 bp, Homo sapiens
aaagtgtgtgtgtat

SEQ ID NO: 269377 - DNA, 15 bp, Homo sapiens
taaagtgtgtgtgta

SEQ ID NO: 269378 - DNA, 15 bp, Homo sapiens
ataaagtgtgtgtgt

SEQ ID NO: 269379 - DNA, 15 bp, Homo sapiens
tataaagtgtgtgtg

SEQ ID NO: 269380 - DNA, 15 bp, Homo sapiens
gtataaagtgtgtgt

SEQ ID NO: 269381 - DNA, 15 bp, Homo sapiens
agtataaagtgtgtg

SEQ ID NO: 269382 - DNA, 15 bp, Homo sapiens
aagtataaagtgtgt

SEQ ID NO: 269383 - DNA, 15 bp, Homo sapiens
aaagtataaagtgtg

SEQ ID NO: 269384 - DNA, 15 bp, Homo sapiens
taaagtataaagtgt

SEQ ID NO: 269385 - DNA, 15 bp, Homo sapiens
ttaaagtataaagtg

SEQ ID NO: 269386 - DNA, 15 bp, Homo sapiens
cttaaagtataaagt

SEQ ID NO: 269387 - DNA, 15 bp, Homo sapiens
acttaaagtataaag

SEQ ID NO: 269388 - DNA, 15 bp, Homo sapiens
aacttaaagtataaa

SEQ ID NO: 269389 - DNA, 15 bp, Homo sapiens
gaacttaaagtataa

SEQ ID NO: 269390 - DNA, 15 bp, Homo sapiens
agaacttaaagtata

SEQ ID NO: 269391 - DNA, 15 bp, Homo sapiens
cagaacttaaagtat

SEQ ID NO: 269392 - DNA, 15 bp, Homo sapiens
ccagaacttaaagta

SEQ ID NO: 269393 - DNA, 15 bp, Homo sapiens
cccagaacttaaagt

SEQ ID NO: 269394 - DNA, 15 bp, Homo sapiens
tcccagaacttaaag

SEQ ID NO: 269395 - DNA, 15 bp, Homo sapiens
gtcccagaacttaaa

SEQ ID NO: 269396 - DNA, 15 bp, Homo sapiens
tgtcccagaacttaa

SEQ ID NO: 269397 - DNA, 15 bp, Homo sapiens
gtgtcccagaactta

SEQ ID NO: 269398 - DNA, 15 bp, Homo sapiens
tgtgtcccagaactt

SEQ ID NO: 269399 - DNA, 15 bp, Homo sapiens
atgtgtcccagaact

SEQ ID NO: 269400 - DNA, 15 bp, Homo sapiens
catgtgtcccagaac

SEQ ID NO: 269401 - DNA, 15 bp, Homo sapiens
acatgtgtcccagaa

SEQ ID NO: 269402 - DNA, 15 bp, Homo sapiens
cacatgtgtcccaga

SEQ ID NO: 269403 - DNA, 15 bp, Homo sapiens
gcacatgtgtcccag

SEQ ID NO: 269404 - DNA, 15 bp, Homo sapiens
tgcacatgtgtccca

SEQ ID NO: 269405 - DNA, 15 bp, Homo sapiens
ctgcacatgtgtccc

SEQ ID NO: 269406 - DNA, 15 bp, Homo sapiens
tctgcacatgtgtcc

SEQ ID NO: 269407 - DNA, 15 bp, Homo sapiens
ttctgcacatgtgtc

SEQ ID NO: 269408 - DNA, 15 bp, Homo sapiens
gttctgcacatgtgt

SEQ ID NO: 269409 - DNA, 15 bp, Homo sapiens
cgttctgcacatgtg

SEQ ID NO: 269410 - DNA, 15 bp, Homo sapiens
acgttctgcacatgt

SEQ ID NO: 269411 - DNA, 15 bp, Homo sapiens
cacgttctgcacatg

SEQ ID NO: 269412 - DNA, 15 bp, Homo sapiens
gcacgttctgcacat

SEQ ID NO: 269413 - DNA, 15 bp, Homo sapiens
tgcacgttctgcaca

SEQ ID NO: 269414 - DNA, 15 bp, Homo sapiens
ctgcacgttctgcac

SEQ ID NO: 269415 - DNA, 15 bp, Homo sapiens
cctgcacgttctgca

SEQ ID NO: 269416 - DNA, 15 bp, Homo sapiens
acctgcacgttctgc

SEQ ID NO: 269417 - DNA, 15 bp, Homo sapiens
aacctgcacgttctg

SEQ ID NO: 269418 - DNA, 15 bp, Homo sapiens
aaacctgcacgttct

SEQ ID NO: 269419 - DNA, 15 bp, Homo sapiens
caaacctgcacgttc

SEQ ID NO: 269420 - DNA, 15 bp, Homo sapiens
acaaacctgcacgtt

SEQ ID NO: 269421 - DNA, 15 bp, Homo sapiens
aacaaacctgcacgt

SEQ ID NO: 269422 - DNA, 15 bp, Homo sapiens
taacaaacctgcacg

SEQ ID NO: 269423 - DNA, 15 bp, Homo sapiens
gtaacaaacctgcac

SEQ ID NO: 269424 - DNA, 15 bp, Homo sapiens
tgtaacaaacctgca

SEQ ID NO: 269425 - DNA, 15 bp, Homo sapiens
atgtaacaaacctgc

SEQ ID NO: 269426 - DNA, 15 bp, Homo sapiens
tatgtaacaaacctg

SEQ ID NO: 269427 - DNA, 15 bp, Homo sapiens
ctatgtaacaaacct

SEQ ID NO: 269428 - DNA, 15 bp, Homo sapiens
cctatgtaacaaacc

SEQ ID NO: 269429 - DNA, 15 bp, Homo sapiens
acctatgtaacaaac

SEQ ID NO: 269430 - DNA, 15 bp, Homo sapiens
tacctatgtaacaaa

SEQ ID NO: 269431 - DNA, 15 bp, Homo sapiens
atacctatgtaacaa

SEQ ID NO: 269432 - DNA, 15 bp, Homo sapiens
tatacctatgtaaca

SEQ ID NO: 269433 - DNA, 15 bp, Homo sapiens
gtatacctatgtaac

SEQ ID NO: 269434 - DNA, 15 bp, Homo sapiens
tgtatacctatgtaa

SEQ ID NO: 269435 - DNA, 15 bp, Homo sapiens
atgtatacctatgta

SEQ ID NO: 269436 - DNA, 15 bp, Homo sapiens
catgtatacctatgt

SEQ ID NO: 269437 - DNA, 15 bp, Homo sapiens
gcatgtatacctatg

SEQ ID NO: 269438 - DNA, 15 bp, Homo sapiens
cgcatgtatacctat

SEQ ID NO: 269439 - DNA, 15 bp, Homo sapiens
gcgcatgtataccta

SEQ ID NO: 269440 - DNA, 15 bp, Homo sapiens
ggcgcatgtatacct

SEQ ID NO: 269441 - DNA, 15 bp, Homo sapiens
tggcgcatgtatacc

SEQ ID NO: 269442 - DNA, 15 bp, Homo sapiens
atggcgcatgtatac

SEQ ID NO: 269443 - DNA, 15 bp, Homo sapiens
catggcgcatgtata

SEQ ID NO: 269444 - DNA, 15 bp, Homo sapiens
ccatggcgcatgtat

SEQ ID NO: 269445 - DNA, 15 bp, Homo sapiens
accatggcgcatgta

SEQ ID NO: 269446 - DNA, 15 bp, Homo sapiens
caccatggcgcatgt

SEQ ID NO: 269447 - DNA, 15 bp, Homo sapiens
ccaccatggcgcatg

SEQ ID NO: 269448 - DNA, 15 bp, Homo sapiens
accaccatggcgcat

SEQ ID NO: 269449 - DNA, 15 bp, Homo sapiens
aaccaccatggcgca

SEQ ID NO: 269450 - DNA, 15 bp, Homo sapiens
aaaccaccatggcgc

SEQ ID NO: 269451 - DNA, 15 bp, Homo sapiens
caaaccaccatggcg

SEQ ID NO: 269452 - DNA, 15 bp, Homo sapiens
gcaaaccaccatggc

SEQ ID NO: 269453 - DNA, 15 bp, Homo sapiens
agcaaaccaccatgg

SEQ ID NO: 269454 - DNA, 15 bp, Homo sapiens
cagcaaaccaccatg

SEQ ID NO: 269455 - DNA, 15 bp, Homo sapiens
gcagcaaaccaccat

SEQ ID NO: 269456 - DNA, 15 bp, Homo sapiens
tgcagcaaaccacca

SEQ ID NO: 269457 - DNA, 15 bp, Homo sapiens
gtgcagcaaaccacc

SEQ ID NO: 269458 - DNA, 15 bp, Homo sapiens
ggtgcagcaaaccac

SEQ ID NO: 269459 - DNA, 15 bp, Homo sapiens
gggtgcagcaaacca

SEQ ID NO: 269460 - DNA, 15 bp, Homo sapiens
tgggtgcagcaaacc

SEQ ID NO: 269461 - DNA, 15 bp, Homo sapiens
atgggtgcagcaaac

SEQ ID NO: 269462 - DNA, 15 bp, Homo sapiens
gatgggtgcagcaaa

SEQ ID NO: 269463 - DNA, 15 bp, Homo sapiens
tgatgggtgcagcaa

SEQ ID NO: 269464 - DNA, 15 bp, Homo sapiens
ttgatgggtgcagca

SEQ ID NO: 269465 - DNA, 15 bp, Homo sapiens
gttgatgggtgcagc

SEQ ID NO: 269466 - DNA, 15 bp, Homo sapiens
agttgatgggtgcag

SEQ ID NO: 269467 - DNA, 15 bp, Homo sapiens
aagttgatgggtgca

SEQ ID NO: 269468 - DNA, 15 bp, Homo sapiens
caagttgatgggtgc

SEQ ID NO: 269469 - DNA, 15 bp, Homo sapiens
acaagttgatgggtg

SEQ ID NO: 269470 - DNA, 15 bp, Homo sapiens
gacaagttgatgggt

SEQ ID NO: 269471 - DNA, 15 bp, Homo sapiens
tgacaagttgatggg

SEQ ID NO: 269472 - DNA, 15 bp, Homo sapiens
atgacaagttgatgg

SEQ ID NO: 269473 - DNA, 15 bp, Homo sapiens
gatgacaagttgatg

SEQ ID NO: 269474 - DNA, 15 bp, Homo sapiens
agatgacaagttgat

SEQ ID NO: 269475 - DNA, 15 bp, Homo sapiens
tagatgacaagttga

SEQ ID NO: 269476 - DNA, 15 bp, Homo sapiens
gtagatgacaagttg

SEQ ID NO: 269477 - DNA, 15 bp, Homo sapiens
cgtagatgacaagtt

SEQ ID NO: 269478 - DNA, 15 bp, Homo sapiens
acgtagatgacaagt

SEQ ID NO: 269479 - DNA, 15 bp, Homo sapiens
aacgtagatgacaag

SEQ ID NO: 269480 - DNA, 15 bp, Homo sapiens
taacgtagatgacaa

SEQ ID NO: 269481 - DNA, 15 bp, Homo sapiens
ctaacgtagatgaca

SEQ ID NO: 269482 - DNA, 15 bp, Homo sapiens
cctaacgtagatgac

SEQ ID NO: 269483 - DNA, 15 bp, Homo sapiens
acctaacgtagatga

SEQ ID NO: 269484 - DNA, 15 bp, Homo sapiens
tacctaacgtagatg

SEQ ID NO: 269485 - DNA, 15 bp, Homo sapiens
atacctaacgtagat

SEQ ID NO: 269486 - DNA, 15 bp, Homo sapiens
aatacctaacgtaga

SEQ ID NO: 269487 - DNA, 15 bp, Homo sapiens
aaatacctaacgtag

SEQ ID NO: 269488 - DNA, 15 bp, Homo sapiens
gaaatacctaacgta

SEQ ID NO: 269489 - DNA, 15 bp, Homo sapiens
agaaatacctaacgt

SEQ ID NO: 269490 - DNA, 15 bp, Homo sapiens
gagaaatacctaacg

SEQ ID NO: 269491 - DNA, 15 bp, Homo sapiens
agagaaatacctaac

SEQ ID NO: 269492 - DNA, 15 bp, Homo sapiens
aagagaaatacctaa

SEQ ID NO: 269493 - DNA, 15 bp, Homo sapiens
taagagaaataccta

SEQ ID NO: 269494 - DNA, 15 bp, Homo sapiens
ttaagagaaatacct

SEQ ID NO: 269495 - DNA, 15 bp, Homo sapiens
attaagagaaatacc

SEQ ID NO: 269496 - DNA, 15 bp, Homo sapiens
cattaagagaaatac

SEQ ID NO: 269497 - DNA, 15 bp, Homo sapiens
gcattaagagaaata

SEQ ID NO: 269498 - DNA, 15 bp, Homo sapiens
agcattaagagaaat

SEQ ID NO: 269499 - DNA, 15 bp, Homo sapiens
tagcattaagagaaa

SEQ ID NO: 269500 - DNA, 15 bp, Homo sapiens
atagcattaagagaa

SEQ ID NO: 269501 - DNA, 15 bp, Homo sapiens
gatagcattaagaga

SEQ ID NO: 269502 - DNA, 15 bp, Homo sapiens
ggatagcattaagag

SEQ ID NO: 269503 - DNA, 15 bp, Homo sapiens
gggatagcattaaga

SEQ ID NO: 269504 - DNA, 15 bp, Homo sapiens
agggatagcattaag

SEQ ID NO: 269505 - DNA, 15 bp, Homo sapiens
gagggatagcattaa

SEQ ID NO: 269506 - DNA, 15 bp, Homo sapiens
ggagggatagcatta

SEQ ID NO: 269507 - DNA, 15 bp, Homo sapiens
gggagggatagcatt

SEQ ID NO: 269508 - DNA, 15 bp, Homo sapiens
ggggagggatagcat

SEQ ID NO: 269509 - DNA, 15 bp, Homo sapiens
aggggagggatagca

SEQ ID NO: 269510 - DNA, 15 bp, Homo sapiens
taggggagggatagc

SEQ ID NO: 269511 - DNA, 15 bp, Homo sapiens
ctaggggagggatag

SEQ ID NO: 269512 - DNA, 15 bp, Homo sapiens
gctaggggagggata

SEQ ID NO: 269513 - DNA, 15 bp, Homo sapiens
ggctaggggagggat

SEQ ID NO: 269514 - DNA, 15 bp, Homo sapiens
gggctaggggaggga

SEQ ID NO: 269515 - DNA, 15 bp, Homo sapiens
ggggctaggggaggg

SEQ ID NO: 269516 - DNA, 15 bp, Homo sapiens
gggggctaggggagg

SEQ ID NO: 269517 - DNA, 15 bp, Homo sapiens
ggggggctaggggag

SEQ ID NO: 269518 - DNA, 15 bp, Homo sapiens
tggggggctagggga

SEQ ID NO: 269519 - DNA, 15 bp, Homo sapiens
gtggggggctagggg

SEQ ID NO: 269520 - DNA, 15 bp, Homo sapiens
ggtggggggctaggg

SEQ ID NO: 269521 - DNA, 15 bp, Homo sapiens
gggtggggggctagg

SEQ ID NO: 269522 - DNA, 15 bp, Homo sapiens
agggtggggggctag

SEQ ID NO: 269523 - DNA, 15 bp, Homo sapiens
aagggtggggggcta

SEQ ID NO: 269524 - DNA, 15 bp, Homo sapiens
gaagggtggggggct

SEQ ID NO: 269525 - DNA, 15 bp, Homo sapiens
cgaagggtggggggc

SEQ ID NO: 269526 - DNA, 15 bp, Homo sapiens
tcgaagggtgggggg

SEQ ID NO: 269527 - DNA, 15 bp, Homo sapiens
gtcgaagggtggggg

SEQ ID NO: 269528 - DNA, 15 bp, Homo sapiens
tgtcgaagggtgggg

SEQ ID NO: 269529 - DNA, 15 bp, Homo sapiens
ttgtcgaagggtggg

SEQ ID NO: 269530 - DNA, 15 bp, Homo sapiens
cttgtcgaagggtgg

SEQ ID NO: 269531 - DNA, 15 bp, Homo sapiens
gcttgtcgaagggtg

SEQ ID NO: 269532 - DNA, 15 bp, Homo sapiens
ggcttgtcgaagggt

SEQ ID NO: 269533 - DNA, 15 bp, Homo sapiens
gggcttgtcgaaggg

SEQ ID NO: 269534 - DNA, 15 bp, Homo sapiens
ggggcttgtcgaagg

SEQ ID NO: 269535 - DNA, 15 bp, Homo sapiens
tggggcttgtcgaag

SEQ ID NO: 269536 - DNA, 15 bp, Homo sapiens
ctggggcttgtcgaa

SEQ ID NO: 269537 - DNA, 15 bp, Homo sapiens
actggggcttgtcga

SEQ ID NO: 269538 - DNA, 15 bp, Homo sapiens
cactggggcttgtcg

SEQ ID NO: 269539 - DNA, 15 bp, Homo sapiens
acactggggcttgtc

SEQ ID NO: 269540 - DNA, 15 bp, Homo sapiens
tacactggggcttgt

SEQ ID NO: 269541 - DNA, 15 bp, Homo sapiens
atacactggggcttg

SEQ ID NO: 269542 - DNA, 15 bp, Homo sapiens
catacactggggctt

SEQ ID NO: 269543 - DNA, 15 bp, Homo sapiens
tcatacactggggct

SEQ ID NO: 269544 - DNA, 15 bp, Homo sapiens
atcatacactggggc

SEQ ID NO: 269545 - DNA, 15 bp, Homo sapiens
catcatacactgggg

SEQ ID NO: 269546 - DNA, 15 bp, Homo sapiens
acatcatacactggg

SEQ ID NO: 269547 - DNA, 15 bp, Homo sapiens
aacatcatacactgg

SEQ ID NO: 269548 - DNA, 15 bp, Homo sapiens
gaacatcatacactg

SEQ ID NO: 269549 - DNA, 15 bp, Homo sapiens
ggaacatcatacact

SEQ ID NO: 269550 - DNA, 15 bp, Homo sapiens
gggaacatcatacac

SEQ ID NO: 269551 - DNA, 15 bp, Homo sapiens
ggggaacatcataca

SEQ ID NO: 269552 - DNA, 15 bp, Homo sapiens
aggggaacatcatac

SEQ ID NO: 269553 - DNA, 15 bp, Homo sapiens
gaggggaacatcata

SEQ ID NO: 269554 - DNA, 15 bp, Homo sapiens
ggaggggaacatcat

SEQ ID NO: 269555 - DNA, 15 bp, Homo sapiens
gggaggggaacatca

SEQ ID NO: 269556 - DNA, 15 bp, Homo sapiens
agggaggggaacatc

SEQ ID NO: 269557 - DNA, 15 bp, Homo sapiens
cagggaggggaacat

SEQ ID NO: 269558 - DNA, 15 bp, Homo sapiens
acagggaggggaaca

SEQ ID NO: 269559 - DNA, 15 bp, Homo sapiens
cacagggaggggaac

SEQ ID NO: 269560 - DNA, 15 bp, Homo sapiens
acacagggaggggaa

SEQ ID NO: 269561 - DNA, 15 bp, Homo sapiens
gacacagggagggga

SEQ ID NO: 269562 - DNA, 15 bp, Homo sapiens
ggacacagggagggg

SEQ ID NO: 269563 - DNA, 15 bp, Homo sapiens
cggacacagggaggg

SEQ ID NO: 269564 - DNA, 15 bp, Homo sapiens
acggacacagggagg

SEQ ID NO: 269565 - DNA, 15 bp, Homo sapiens
cacggacacagggag

SEQ ID NO: 269566 - DNA, 15 bp, Homo sapiens
acacggacacaggga

SEQ ID NO: 269567 - DNA, 15 bp, Homo sapiens
cacacggacacaggg

SEQ ID NO: 269568 - DNA, 15 bp, Homo sapiens
ccacacggacacagg

SEQ ID NO: 269569 - DNA, 15 bp, Homo sapiens
accacacggacacag

SEQ ID NO: 269570 - DNA, 15 bp, Homo sapiens
gaccacacggacaca

SEQ ID NO: 269571 - DNA, 15 bp, Homo sapiens
agaccacacggacac

SEQ ID NO: 269572 - DNA, 15 bp, Homo sapiens
gagaccacacggaca

SEQ ID NO: 269573 - DNA, 15 bp, Homo sapiens
tgagaccacacggac

SEQ ID NO: 269574 - DNA, 15 bp, Homo sapiens
atgagaccacacgga

SEQ ID NO: 269575 - DNA, 15 bp, Homo sapiens
aatgagaccacacgg

SEQ ID NO: 269576 - DNA, 15 bp, Homo sapiens
caatgagaccacacg

SEQ ID NO: 269577 - DNA, 15 bp, Homo sapiens
acaatgagaccacac

SEQ ID NO: 269578 - DNA, 15 bp, Homo sapiens
aacaatgagaccaca

SEQ ID NO: 269579 - DNA, 15 bp, Homo sapiens
gaacaatgagaccac

SEQ ID NO: 269580 - DNA, 15 bp, Homo sapiens
tgaacaatgagacca

SEQ ID NO: 269581 - DNA, 15 bp, Homo sapiens
ttgaacaatgagacc

SEQ ID NO: 269582 - DNA, 15 bp, Homo sapiens
gttgaacaatgagac

SEQ ID NO: 269583 - DNA, 15 bp, Homo sapiens
agttgaacaatgaga

SEQ ID NO: 269584 - DNA, 15 bp, Homo sapiens
gagttgaacaatgag

SEQ ID NO: 269585 - DNA, 15 bp, Homo sapiens
ggagttgaacaatga

SEQ ID NO: 269586 - DNA, 15 bp, Homo sapiens
gggagttgaacaatg

SEQ ID NO: 269587 - DNA, 15 bp, Homo sapiens
tgggagttgaacaat

SEQ ID NO: 269588 - DNA, 15 bp, Homo sapiens
gtgggagttgaacaa

SEQ ID NO: 269589 - DNA, 15 bp, Homo sapiens
agtgggagttgaaca

SEQ ID NO: 269590 - DNA, 15 bp, Homo sapiens
aagtgggagttgaac

SEQ ID NO: 269591 - DNA, 15 bp, Homo sapiens
taagtgggagttgaa

SEQ ID NO: 269592 - DNA, 15 bp, Homo sapiens
ataagtgggagttga

SEQ ID NO: 269593 - DNA, 15 bp, Homo sapiens
cataagtgggagttg

SEQ ID NO: 269594 - DNA, 15 bp, Homo sapiens
tcataagtgggagtt

SEQ ID NO: 269595 - DNA, 15 bp, Homo sapiens
ctcataagtgggagt

SEQ ID NO: 269596 - DNA, 15 bp, Homo sapiens
actcataagtgggag

SEQ ID NO: 269597 - DNA, 15 bp, Homo sapiens
cactcataagtggga

SEQ ID NO: 269598 - DNA, 15 bp, Homo sapiens
tcactcataagtggg

SEQ ID NO: 269599 - DNA, 15 bp, Homo sapiens
ctcactcataagtgg

SEQ ID NO: 269600 - DNA, 15 bp, Homo sapiens
tctcactcataagtg

SEQ ID NO: 269601 - DNA, 15 bp, Homo sapiens
ttctcactcataagt

SEQ ID NO: 269602 - DNA, 15 bp, Homo sapiens
attctcactcataag

SEQ ID NO: 269603 - DNA, 15 bp, Homo sapiens
tattctcactcataa

SEQ ID NO: 269604 - DNA, 15 bp, Homo sapiens
atattctcactcata

SEQ ID NO: 269605 - DNA, 15 bp, Homo sapiens
catattctcactcat

SEQ ID NO: 269606 - DNA, 15 bp, Homo sapiens
gcatattctcactca

SEQ ID NO: 269607 - DNA, 15 bp, Homo sapiens
tgcatattctcactc

SEQ ID NO: 269608 - DNA, 15 bp, Homo sapiens
ctgcatattctcact

SEQ ID NO: 269609 - DNA, 15 bp, Homo sapiens
gctgcatattctcac

SEQ ID NO: 269610 - DNA, 15 bp, Homo sapiens
cgctgcatattctca

SEQ ID NO: 269611 - DNA, 15 bp, Homo sapiens
acgctgcatattctc

SEQ ID NO: 269612 - DNA, 15 bp, Homo sapiens
aacgctgcatattct

SEQ ID NO: 269613 - DNA, 15 bp, Homo sapiens
aaacgctgcatattc

SEQ ID NO: 269614 - DNA, 15 bp, Homo sapiens
caaacgctgcatatt

SEQ ID NO: 269615 - DNA, 15 bp, Homo sapiens
ccaaacgctgcatat

SEQ ID NO: 269616 - DNA, 15 bp, Homo sapiens
accaaacgctgcata

SEQ ID NO: 269617 - DNA, 15 bp, Homo sapiens
aaccaaacgctgcat

SEQ ID NO: 269618 - DNA, 15 bp, Homo sapiens
aaaccaaacgctgca

SEQ ID NO: 269619 - DNA, 15 bp, Homo sapiens
aaaaccaaacgctgc

SEQ ID NO: 269620 - DNA, 15 bp, Homo sapiens
gaaaaccaaacgctg

SEQ ID NO: 269621 - DNA, 15 bp, Homo sapiens
agaaaaccaaacgct

SEQ ID NO: 269622 - DNA, 15 bp, Homo sapiens
cagaaaaccaaacgc

SEQ ID NO: 269623 - DNA, 15 bp, Homo sapiens
acagaaaaccaaacg

SEQ ID NO: 269624 - DNA, 15 bp, Homo sapiens
aacagaaaaccaaac

SEQ ID NO: 269625 - DNA, 15 bp, Homo sapiens
gaacagaaaaccaaa

SEQ ID NO: 269626 - DNA, 15 bp, Homo sapiens
ggaacagaaaaccaa

SEQ ID NO: 269627 - DNA, 15 bp, Homo sapiens
aggaacagaaaacca

SEQ ID NO: 269628 - DNA, 15 bp, Homo sapiens
caggaacagaaaacc

SEQ ID NO: 269629 - DNA, 15 bp, Homo sapiens
acaggaacagaaaac

SEQ ID NO: 269630 - DNA, 15 bp, Homo sapiens
cacaggaacagaaaa

SEQ ID NO: 269631 - DNA, 15 bp, Homo sapiens
acacaggaacagaaa

SEQ ID NO: 269632 - DNA, 15 bp, Homo sapiens
aacacaggaacagaa

SEQ ID NO: 269633 - DNA, 15 bp, Homo sapiens
taacacaggaacaga

SEQ ID NO: 269634 - DNA, 15 bp, Homo sapiens
ctaacacaggaacag

SEQ ID NO: 269635 - DNA, 15 bp, Homo sapiens
actaacacaggaaca

SEQ ID NO: 269636 - DNA, 15 bp, Homo sapiens
aactaacacaggaac

SEQ ID NO: 269637 - DNA, 15 bp, Homo sapiens
aaactaacacaggaa

SEQ ID NO: 269638 - DNA, 15 bp, Homo sapiens
caaactaacacagga

SEQ ID NO: 269639 - DNA, 15 bp, Homo sapiens
gcaaactaacacagg

SEQ ID NO: 269640 - DNA, 15 bp, Homo sapiens
agcaaactaacacag

SEQ ID NO: 269641 - DNA, 15 bp, Homo sapiens
cagcaaactaacaca

SEQ ID NO: 269642 - DNA, 15 bp, Homo sapiens
tcagcaaactaacac

SEQ ID NO: 269643 - DNA, 15 bp, Homo sapiens
ttcagcaaactaaca

SEQ ID NO: 269644 - DNA, 15 bp, Homo sapiens
tttcagcaaactaac

SEQ ID NO: 269645 - DNA, 15 bp, Homo sapiens
ttttcagcaaactaa

SEQ ID NO: 269646 - DNA, 15 bp, Homo sapiens
attttcagcaaacta

SEQ ID NO: 269647 - DNA, 15 bp, Homo sapiens
cattttcagcaaact

SEQ ID NO: 269648 - DNA, 15 bp, Homo sapiens
tcattttcagcaaac

SEQ ID NO: 269649 - DNA, 15 bp, Homo sapiens
atcattttcagcaaa

SEQ ID NO: 269650 - DNA, 15 bp, Homo sapiens
catcattttcagcaa

SEQ ID NO: 269651 - DNA, 15 bp, Homo sapiens
ccatcattttcagca

SEQ ID NO: 269652 - DNA, 15 bp, Homo sapiens
accatcattttcagc

SEQ ID NO: 269653 - DNA, 15 bp, Homo sapiens
aaccatcattttcag

SEQ ID NO: 269654 - DNA, 15 bp, Homo sapiens
aaaccatcattttca

SEQ ID NO: 269655 - DNA, 15 bp, Homo sapiens
gaaaccatcattttc

SEQ ID NO: 269656 - DNA, 15 bp, Homo sapiens
ggaaaccatcatttt

SEQ ID NO: 269657 - DNA, 15 bp, Homo sapiens
tggaaaccatcattt

SEQ ID NO: 269658 - DNA, 15 bp, Homo sapiens
ctggaaaccatcatt

SEQ ID NO: 269659 - DNA, 15 bp, Homo sapiens
gctggaaaccatcat

SEQ ID NO: 269660 - DNA, 15 bp, Homo sapiens
agctggaaaccatca

SEQ ID NO: 269661 - DNA, 15 bp, Homo sapiens
aagctggaaaccatc

SEQ ID NO: 269662 - DNA, 15 bp, Homo sapiens
gaagctggaaaccat

SEQ ID NO: 269663 - DNA, 15 bp, Homo sapiens
tgaagctggaaacca

SEQ ID NO: 269664 - DNA, 15 bp, Homo sapiens
ttgaagctggaaacc

SEQ ID NO: 269665 - DNA, 15 bp, Homo sapiens
gttgaagctggaaac

SEQ ID NO: 269666 - DNA, 15 bp, Homo sapiens
ggttgaagctggaaa

SEQ ID NO: 269667 - DNA, 15 bp, Homo sapiens
tggttgaagctggaa

SEQ ID NO: 269668 - DNA, 15 bp, Homo sapiens
atggttgaagctgga

SEQ ID NO: 269669 - DNA, 15 bp, Homo sapiens
aatggttgaagctgg

SEQ ID NO: 269670 - DNA, 15 bp, Homo sapiens
aaatggttgaagctg

SEQ ID NO: 269671 - DNA, 15 bp, Homo sapiens
gaaatggttgaagct

SEQ ID NO: 269672 - DNA, 15 bp, Homo sapiens
ggaaatggttgaagc

SEQ ID NO: 269673 - DNA, 15 bp, Homo sapiens
gggaaatggttgaag

SEQ ID NO: 269674 - DNA, 15 bp, Homo sapiens
agggaaatggttgaa

SEQ ID NO: 269675 - DNA, 15 bp, Homo sapiens
cagggaaatggttga

SEQ ID NO: 269676 - DNA, 15 bp, Homo sapiens
ccagggaaatggttg

SEQ ID NO: 269677 - DNA, 15 bp, Homo sapiens
tccagggaaatggtt

SEQ ID NO: 269678 - DNA, 15 bp, Homo sapiens
ttccagggaaatggt

SEQ ID NO: 269679 - DNA, 15 bp, Homo sapiens
tttccagggaaatgg

SEQ ID NO: 269680 - DNA, 15 bp, Homo sapiens
ctttccagggaaatg

SEQ ID NO: 269681 - DNA, 15 bp, Homo sapiens
cctttccagggaaat

SEQ ID NO: 269682 - DNA, 15 bp, Homo sapiens
tcctttccagggaaa

SEQ ID NO: 269683 - DNA, 15 bp, Homo sapiens
gtcctttccagggaa

SEQ ID NO: 269684 - DNA, 15 bp, Homo sapiens
tgtcctttccaggga

SEQ ID NO: 269685 - DNA, 15 bp, Homo sapiens
atgtcctttccaggg

SEQ ID NO: 269686 - DNA, 15 bp, Homo sapiens
catgtcctttccagg

SEQ ID NO: 269687 - DNA, 15 bp, Homo sapiens
tcatgtcctttccag

SEQ ID NO: 269688 - DNA, 15 bp, Homo sapiens
ttcatgtcctttcca

SEQ ID NO: 269689 - DNA, 15 bp, Homo sapiens
attcatgtcctttcc

SEQ ID NO: 269690 - DNA, 15 bp, Homo sapiens
aattcatgtcctttc

SEQ ID NO: 269691 - DNA, 15 bp, Homo sapiens
gaattcatgtccttt

SEQ ID NO: 269692 - DNA, 15 bp, Homo sapiens
tgaattcatgtcctt

SEQ ID NO: 269693 - DNA, 15 bp, Homo sapiens
atgaattcatgtcct

SEQ ID NO: 269694 - DNA, 15 bp, Homo sapiens
gatgaattcatgtcc

SEQ ID NO: 269695 - DNA, 15 bp, Homo sapiens
ggatgaattcatgtc

SEQ ID NO: 269696 - DNA, 15 bp, Homo sapiens
aggatgaattcatgt

SEQ ID NO: 269697 - DNA, 15 bp, Homo sapiens
aaggatgaattcatg

SEQ ID NO: 269698 - DNA, 15 bp, Homo sapiens
aaaggatgaattcat

SEQ ID NO: 269699 - DNA, 15 bp, Homo sapiens
aaaaggatgaattca

SEQ ID NO: 269700 - DNA, 15 bp, Homo sapiens
aaaaaggatgaattc

SEQ ID NO: 269701 - DNA, 15 bp, Homo sapiens
taaaaaggatgaatt

SEQ ID NO: 269702 - DNA, 15 bp, Homo sapiens
ttaaaaaggatgaat

SEQ ID NO: 269703 - DNA, 15 bp, Homo sapiens
attaaaaaggatgaa

SEQ ID NO: 269704 - DNA, 15 bp, Homo sapiens
cattaaaaaggatga

SEQ ID NO: 269705 - DNA, 15 bp, Homo sapiens
ccattaaaaaggatg

SEQ ID NO: 269706 - DNA, 15 bp, Homo sapiens
gccattaaaaaggat

SEQ ID NO: 269707 - DNA, 15 bp, Homo sapiens
agccattaaaaagga

SEQ ID NO: 269708 - DNA, 15 bp, Homo sapiens
cagccattaaaaagg

SEQ ID NO: 269709 - DNA, 15 bp, Homo sapiens
gcagccattaaaaag

SEQ ID NO: 269710 - DNA, 15 bp, Homo sapiens
tgcagccattaaaaa

SEQ ID NO: 269711 - DNA, 15 bp, Homo sapiens
atgcagccattaaaa

SEQ ID NO: 269712 - DNA, 15 bp, Homo sapiens
tatgcagccattaaa

SEQ ID NO: 269713 - DNA, 15 bp, Homo sapiens
ctatgcagccattaa

SEQ ID NO: 269714 - DNA, 15 bp, Homo sapiens
actatgcagccatta

SEQ ID NO: 269715 - DNA, 15 bp, Homo sapiens
tactatgcagccatt

SEQ ID NO: 269716 - DNA, 15 bp, Homo sapiens
atactatgcagccat

SEQ ID NO: 269717 - DNA, 15 bp, Homo sapiens
aatactatgcagcca

SEQ ID NO: 269718 - DNA, 15 bp, Homo sapiens
gaatactatgcagcc

SEQ ID NO: 269719 - DNA, 15 bp, Homo sapiens
ggaatactatgcagc

SEQ ID NO: 269720 - DNA, 15 bp, Homo sapiens
tggaatactatgcag

SEQ ID NO: 269721 - DNA, 15 bp, Homo sapiens
atggaatactatgca

SEQ ID NO: 269722 - DNA, 15 bp, Homo sapiens
catggaatactatgc

SEQ ID NO: 269723 - DNA, 15 bp, Homo sapiens
ccatggaatactatg

SEQ ID NO: 269724 - DNA, 15 bp, Homo sapiens
gccatggaatactat

SEQ ID NO: 269725 - DNA, 15 bp, Homo sapiens
tgccatggaatacta

SEQ ID NO: 269726 - DNA, 15 bp, Homo sapiens
atgccatggaatact

SEQ ID NO: 269727 - DNA, 15 bp, Homo sapiens
tatgccatggaatac

SEQ ID NO: 269728 - DNA, 15 bp, Homo sapiens
atatgccatggaata

SEQ ID NO: 269729 - DNA, 15 bp, Homo sapiens
tatatgccatggaat

SEQ ID NO: 269730 - DNA, 15 bp, Homo sapiens
atatatgccatggaa

SEQ ID NO: 269731 - DNA, 15 bp, Homo sapiens
catatatgccatgga

SEQ ID NO: 269732 - DNA, 15 bp, Homo sapiens
acatatatgccatgg

SEQ ID NO: 269733 - DNA, 15 bp, Homo sapiens
aacatatatgccatg

SEQ ID NO: 269734 - DNA, 15 bp, Homo sapiens
gaacatatatgccat

SEQ ID NO: 269735 - DNA, 15 bp, Homo sapiens
ggaacatatatgcca

SEQ ID NO: 269736 - DNA, 15 bp, Homo sapiens
tggaacatatatgcc

SEQ ID NO: 269737 - DNA, 15 bp, Homo sapiens
gtggaacatatatgc

SEQ ID NO: 269738 - DNA, 15 bp, Homo sapiens
tgtggaacatatatg

SEQ ID NO: 269739 - DNA, 15 bp, Homo sapiens
atgtggaacatatat

SEQ ID NO: 269740 - DNA, 15 bp, Homo sapiens
aatgtggaacatata

SEQ ID NO: 269741 - DNA, 15 bp, Homo sapiens
aaatgtggaacatat

SEQ ID NO: 269742 - DNA, 15 bp, Homo sapiens
aaaatgtggaacata

SEQ ID NO: 269743 - DNA, 15 bp, Homo sapiens
gaaaatgtggaacat

SEQ ID NO: 269744 - DNA, 15 bp, Homo sapiens
agaaaatgtggaaca

SEQ ID NO: 269745 - DNA, 15 bp, Homo sapiens
aagaaaatgtggaac

SEQ ID NO: 269746 - DNA, 15 bp, Homo sapiens
aaagaaaatgtggaa

SEQ ID NO: 269747 - DNA, 15 bp, Homo sapiens
taaagaaaatgtgga

SEQ ID NO: 269748 - DNA, 15 bp, Homo sapiens
ataaagaaaatgtgg

SEQ ID NO: 269749 - DNA, 15 bp, Homo sapiens
aataaagaaaatgtg

SEQ ID NO: 269750 - DNA, 15 bp, Homo sapiens
gaataaagaaaatgt

SEQ ID NO: 269751 - DNA, 15 bp, Homo sapiens
tgaataaagaaaatg

SEQ ID NO: 269752 - DNA, 15 bp, Homo sapiens
ctgaataaagaaaat

SEQ ID NO: 269753 - DNA, 15 bp, Homo sapiens
actgaataaagaaaa

SEQ ID NO: 269754 - DNA, 15 bp, Homo sapiens
gactgaataaagaaa

SEQ ID NO: 269755 - DNA, 15 bp, Homo sapiens
agactgaataaagaa

SEQ ID NO: 269756 - DNA, 15 bp, Homo sapiens
cagactgaataaaga

SEQ ID NO: 269757 - DNA, 15 bp, Homo sapiens
acagactgaataaag

SEQ ID NO: 269758 - DNA, 15 bp, Homo sapiens
gacagactgaataaa

SEQ ID NO: 269759 - DNA, 15 bp, Homo sapiens
tgacagactgaataa

SEQ ID NO: 269760 - DNA, 15 bp, Homo sapiens
atgacagactgaata

SEQ ID NO: 269761 - DNA, 15 bp, Homo sapiens
aatgacagactgaat

SEQ ID NO: 269762 - DNA, 15 bp, Homo sapiens
caatgacagactgaa

SEQ ID NO: 269763 - DNA, 15 bp, Homo sapiens
tcaatgacagactga

SEQ ID NO: 269764 - DNA, 15 bp, Homo sapiens
atcaatgacagactg

SEQ ID NO: 269765 - DNA, 15 bp, Homo sapiens
catcaatgacagact

SEQ ID NO: 269766 - DNA, 15 bp, Homo sapiens
ccatcaatgacagac

SEQ ID NO: 269767 - DNA, 15 bp, Homo sapiens
cccatcaatgacaga

SEQ ID NO: 269768 - DNA, 15 bp, Homo sapiens
gcccatcaatgacag

SEQ ID NO: 269769 - DNA, 15 bp, Homo sapiens
tgcccatcaatgaca

SEQ ID NO: 269770 - DNA, 15 bp, Homo sapiens
atgcccatcaatgac

SEQ ID NO: 269771 - DNA, 15 bp, Homo sapiens
aatgcccatcaatga

SEQ ID NO: 269772 - DNA, 15 bp, Homo sapiens
aaatgcccatcaatg

SEQ ID NO: 269773 - DNA, 15 bp, Homo sapiens
caaatgcccatcaat

SEQ ID NO: 269774 - DNA, 15 bp, Homo sapiens
ccaaatgcccatcaa

SEQ ID NO: 269775 - DNA, 15 bp, Homo sapiens
cccaaatgcccatca

SEQ ID NO: 269776 - DNA, 15 bp, Homo sapiens
acccaaatgcccatc

SEQ ID NO: 269777 - DNA, 15 bp, Homo sapiens
aacccaaatgcccat

SEQ ID NO: 269778 - DNA, 15 bp, Homo sapiens
caacccaaatgccca

SEQ ID NO: 269779 - DNA, 15 bp, Homo sapiens
ccaacccaaatgccc

SEQ ID NO: 269780 - DNA, 15 bp, Homo sapiens
accaacccaaatgcc

SEQ ID NO: 269781 - DNA, 15 bp, Homo sapiens
aaccaacccaaatgc

SEQ ID NO: 269782 - DNA, 15 bp, Homo sapiens
gaaccaacccaaatg

SEQ ID NO: 269783 - DNA, 15 bp, Homo sapiens
gggcagggagggcgc

SEQ ID NO: 269784 - DNA, 15 bp, Homo sapiens
ggggcagggagggcg

SEQ ID NO: 269785 - DNA, 15 bp, Homo sapiens
gggggcagggagggc

SEQ ID NO: 269786 - DNA, 15 bp, Homo sapiens
ggggggcagggaggg

SEQ ID NO: 269787 - DNA, 15 bp, Homo sapiens
cggggggcagggagg

SEQ ID NO: 269788 - DNA, 15 bp, Homo sapiens
gcggggggcagggag

SEQ ID NO: 269789 - DNA, 15 bp, Homo sapiens
ggcggggggcaggga

SEQ ID NO: 269790 - DNA, 15 bp, Homo sapiens
tggcggggggcaggg

SEQ ID NO: 269791 - DNA, 15 bp, Homo sapiens
gtggcggggggcagg

SEQ ID NO: 269792 - DNA, 15 bp, Homo sapiens
cgtggcggggggcag

SEQ ID NO: 269793 - DNA, 15 bp, Homo sapiens
ccgtggcggggggca

SEQ ID NO: 269794 - DNA, 15 bp, Homo sapiens
gccgtggcggggggc

SEQ ID NO: 269795 - DNA, 15 bp, Homo sapiens
cgccgtggcgggggg

SEQ ID NO: 269796 - DNA, 15 bp, Homo sapiens
ccgccgtggcggggg

SEQ ID NO: 269797 - DNA, 15 bp, Homo sapiens
tccgccgtggcgggg

SEQ ID NO: 269798 - DNA, 15 bp, Homo sapiens
ctccgccgtggcggg

SEQ ID NO: 269799 - DNA, 15 bp, Homo sapiens
gctccgccgtggcgg

SEQ ID NO: 269800 - DNA, 15 bp, Homo sapiens
cgctccgccgtggcg

SEQ ID NO: 269801 - DNA, 15 bp, Homo sapiens
acgctccgccgtggc

SEQ ID NO: 269802 - DNA, 15 bp, Homo sapiens
gacgctccgccgtgg

SEQ ID NO: 269803 - DNA, 15 bp, Homo sapiens
agacgctccgccgtg

SEQ ID NO: 269804 - DNA, 15 bp, Homo sapiens
cagacgctccgccgt

SEQ ID NO: 269805 - DNA, 15 bp, Homo sapiens
gcagacgctccgccg

SEQ ID NO: 269806 - DNA, 15 bp, Homo sapiens
tgcagacgctccgcc

SEQ ID NO: 269807 - DNA, 15 bp, Homo sapiens
ctgcagacgctccgc

SEQ ID NO: 269808 - DNA, 15 bp, Homo sapiens
tctgcagacgctccg

SEQ ID NO: 269809 - DNA, 15 bp, Homo sapiens
ttctgcagacgctcc

SEQ ID NO: 269810 - DNA, 15 bp, Homo sapiens
attctgcagacgctc

SEQ ID NO: 269811 - DNA, 15 bp, Homo sapiens
cattctgcagacgct

SEQ ID NO: 269812 - DNA, 15 bp, Homo sapiens
ccattctgcagacgc

SEQ ID NO: 269813 - DNA, 15 bp, Homo sapiens
accattctgcagacg

SEQ ID NO: 269814 - DNA, 15 bp, Homo sapiens
caccattctgcagac

SEQ ID NO: 269815 - DNA, 15 bp, Homo sapiens
tcaccattctgcaga

SEQ ID NO: 269816 - DNA, 15 bp, Homo sapiens
gtcaccattctgcag

SEQ ID NO: 269817 - DNA, 15 bp, Homo sapiens
tgtcaccattctgca

SEQ ID NO: 269818 - DNA, 15 bp, Homo sapiens
ctgtcaccattctgc

SEQ ID NO: 269819 - DNA, 15 bp, Homo sapiens
cctgtcaccattctg

SEQ ID NO: 269820 - DNA, 15 bp, Homo sapiens
tcctgtcaccattct

SEQ ID NO: 269821 - DNA, 15 bp, Homo sapiens
atcctgtcaccattc

SEQ ID NO: 269822 - DNA, 15 bp, Homo sapiens
aatcctgtcaccatt

SEQ ID NO: 269823 - DNA, 15 bp, Homo sapiens
gaatcctgtcaccat

SEQ ID NO: 269824 - DNA, 15 bp, Homo sapiens
agaatcctgtcacca

SEQ ID NO: 269825 - DNA, 15 bp, Homo sapiens
cagaatcctgtcacc

SEQ ID NO: 269826 - DNA, 15 bp, Homo sapiens
ccagaatcctgtcac

SEQ ID NO: 269827 - DNA, 15 bp, Homo sapiens
cccagaatcctgtca

SEQ ID NO: 269828 - DNA, 15 bp, Homo sapiens
acccagaatcctgtc

SEQ ID NO: 269829 - DNA, 15 bp, Homo sapiens
aacccagaatcctgt

SEQ ID NO: 269830 - DNA, 15 bp, Homo sapiens
gaacccagaatcctg

SEQ ID NO: 269831 - DNA, 15 bp, Homo sapiens
agaacccagaatcct

SEQ ID NO: 269832 - DNA, 15 bp, Homo sapiens
aagaacccagaatcc

SEQ ID NO: 269833 - DNA, 15 bp, Homo sapiens
caagaacccagaatc

SEQ ID NO: 269834 - DNA, 15 bp, Homo sapiens
ccaagaacccagaat

SEQ ID NO: 269835 - DNA, 15 bp, Homo sapiens
cccaagaacccagaa

SEQ ID NO: 269836 - DNA, 15 bp, Homo sapiens
gcccaagaacccaga

SEQ ID NO: 269837 - DNA, 15 bp, Homo sapiens
cgcccaagaacccag

SEQ ID NO: 269838 - DNA, 15 bp, Homo sapiens
tcgcccaagaaccca

SEQ ID NO: 269839 - DNA, 15 bp, Homo sapiens
ctcgcccaagaaccc

SEQ ID NO: 269840 - DNA, 15 bp, Homo sapiens
cctcgcccaagaacc

SEQ ID NO: 269841 - DNA, 15 bp, Homo sapiens
ccctcgcccaagaac

SEQ ID NO: 269842 - DNA, 15 bp, Homo sapiens
cccctcgcccaagaa

SEQ ID NO: 269843 - DNA, 15 bp, Homo sapiens
acccctcgcccaaga

SEQ ID NO: 269844 - DNA, 15 bp, Homo sapiens
gacccctcgcccaag

SEQ ID NO: 269845 - DNA, 15 bp, Homo sapiens
agacccctcgcccaa

SEQ ID NO: 269846 - DNA, 15 bp, Homo sapiens
gagacccctcgccca

SEQ ID NO: 269847 - DNA, 15 bp, Homo sapiens
cgagacccctcgccc

SEQ ID NO: 269848 - DNA, 15 bp, Homo sapiens
ccgagacccctcgcc

SEQ ID NO: 269849 - DNA, 15 bp, Homo sapiens
gccgagacccctcgc

SEQ ID NO: 269850 - DNA, 15 bp, Homo sapiens
agccgagacccctcg

SEQ ID NO: 269851 - DNA, 15 bp, Homo sapiens
aagccgagacccctc

SEQ ID NO: 269852 - DNA, 15 bp, Homo sapiens
gaagccgagacccct

SEQ ID NO: 269853 - DNA, 15 bp, Homo sapiens
tgaagccgagacccc

SEQ ID NO: 269854 - DNA, 15 bp, Homo sapiens
ttgaagccgagaccc

SEQ ID NO: 269855 - DNA, 15 bp, Homo sapiens
gttgaagccgagacc

SEQ ID NO: 269856 - DNA, 15 bp, Homo sapiens
agttgaagccgagac

SEQ ID NO: 269857 - DNA, 15 bp, Homo sapiens
aagttgaagccgaga

SEQ ID NO: 269858 - DNA, 15 bp, Homo sapiens
caagttgaagccgag

SEQ ID NO: 269859 - DNA, 15 bp, Homo sapiens
tcaagttgaagccga

SEQ ID NO: 269860 - DNA, 15 bp, Homo sapiens
gtcaagttgaagccg

SEQ ID NO: 269861 - DNA, 15 bp, Homo sapiens
tgtcaagttgaagcc

SEQ ID NO: 269862 - DNA, 15 bp, Homo sapiens
ctgtcaagttgaagc

SEQ ID NO: 269863 - DNA, 15 bp, Homo sapiens
cctgtcaagttgaag

SEQ ID NO: 269864 - DNA, 15 bp, Homo sapiens
acctgtcaagttgaa

SEQ ID NO: 269865 - DNA, 15 bp, Homo sapiens
cacctgtcaagttga

SEQ ID NO: 269866 - DNA, 15 bp, Homo sapiens
acacctgtcaagttg

SEQ ID NO: 269867 - DNA, 15 bp, Homo sapiens
gacacctgtcaagtt

SEQ ID NO: 269868 - DNA, 15 bp, Homo sapiens
cgacacctgtcaagt

SEQ ID NO: 269869 - DNA, 15 bp, Homo sapiens
ccgacacctgtcaag

SEQ ID NO: 269870 - DNA, 15 bp, Homo sapiens
cccgacacctgtcaa

SEQ ID NO: 269871 - DNA, 15 bp, Homo sapiens
gcccgacacctgtca

SEQ ID NO: 269872 - DNA, 15 bp, Homo sapiens
cgcccgacacctgtc

SEQ ID NO: 269873 - DNA, 15 bp, Homo sapiens
ccgcccgacacctgt

SEQ ID NO: 269874 - DNA, 15 bp, Homo sapiens
cccgcccgacacctg

SEQ ID NO: 269875 - DNA, 15 bp, Homo sapiens
acccgcccgacacct

SEQ ID NO: 269876 - DNA, 15 bp, Homo sapiens
cacccgcccgacacc

SEQ ID NO: 269877 - DNA, 15 bp, Homo sapiens
ccacccgcccgacac

SEQ ID NO: 269878 - DNA, 15 bp, Homo sapiens
cccacccgcccgaca

SEQ ID NO: 269879 - DNA, 15 bp, Homo sapiens
ccccacccgcccgac

SEQ ID NO: 269880 - DNA, 15 bp, Homo sapiens
gccccacccgcccga

SEQ ID NO: 269881 - DNA, 15 bp, Homo sapiens
agccccacccgcccg

SEQ ID NO: 269882 - DNA, 15 bp, Homo sapiens
tagccccacccgccc

SEQ ID NO: 269883 - DNA, 15 bp, Homo sapiens
ctagccccacccgcc

SEQ ID NO: 269884 - DNA, 15 bp, Homo sapiens
cctagccccacccgc

SEQ ID NO: 269885 - DNA, 15 bp, Homo sapiens
ccctagccccacccg

SEQ ID NO: 269886 - DNA, 15 bp, Homo sapiens
accctagccccaccc

SEQ ID NO: 269887 - DNA, 15 bp, Homo sapiens
gaccctagccccacc

SEQ ID NO: 269888 - DNA, 15 bp, Homo sapiens
ggaccctagccccac

SEQ ID NO: 269889 - DNA, 15 bp, Homo sapiens
aggaccctagcccca

SEQ ID NO: 269890 - DNA, 15 bp, Homo sapiens
caggaccctagcccc

SEQ ID NO: 269891 - DNA, 15 bp, Homo sapiens
tcaggaccctagccc

SEQ ID NO: 269892 - DNA, 15 bp, Homo sapiens
ctcaggaccctagcc

SEQ ID NO: 269893 - DNA, 15 bp, Homo sapiens
gctcaggaccctagc

SEQ ID NO: 269894 - DNA, 15 bp, Homo sapiens
cgctcaggaccctag

SEQ ID NO: 269895 - DNA, 15 bp, Homo sapiens
tcgctcaggacccta

SEQ ID NO: 269896 - DNA, 15 bp, Homo sapiens
ttcgctcaggaccct

SEQ ID NO: 269897 - DNA, 15 bp, Homo sapiens
cttcgctcaggaccc

SEQ ID NO: 269898 - DNA, 15 bp, Homo sapiens
acttcgctcaggacc

SEQ ID NO: 269899 - DNA, 15 bp, Homo sapiens
cacttcgctcaggac

SEQ ID NO: 269900 - DNA, 15 bp, Homo sapiens
tcacttcgctcagga

SEQ ID NO: 269901 - DNA, 15 bp, Homo sapiens
gtcacttcgctcagg

SEQ ID NO: 269902 - DNA, 15 bp, Homo sapiens
tgtcacttcgctcag

SEQ ID NO: 269903 - DNA, 15 bp, Homo sapiens
ctgtcacttcgctca

SEQ ID NO: 269904 - DNA, 15 bp, Homo sapiens
cctgtcacttcgctc

SEQ ID NO: 269905 - DNA, 15 bp, Homo sapiens
acctgtcacttcgct

SEQ ID NO: 269906 - DNA, 15 bp, Homo sapiens
cacctgtcacttcgc

SEQ ID NO: 269907 - DNA, 15 bp, Homo sapiens
gcacctgtcacttcg

SEQ ID NO: 269908 - DNA, 15 bp, Homo sapiens
tgcacctgtcacttc

SEQ ID NO: 269909 - DNA, 15 bp, Homo sapiens
ctgcacctgtcactt

SEQ ID NO: 269910 - DNA, 15 bp, Homo sapiens
actgcacctgtcact

SEQ ID NO: 269911 - DNA, 15 bp, Homo sapiens
aactgcacctgtcac

SEQ ID NO: 269912 - DNA, 15 bp, Homo sapiens
gaactgcacctgtca

SEQ ID NO: 269913 - DNA, 15 bp, Homo sapiens
ggaactgcacctgtc

SEQ ID NO: 269914 - DNA, 15 bp, Homo sapiens
gggaactgcacctgt

SEQ ID NO: 269915 - DNA, 15 bp, Homo sapiens
agggaactgcacctg

SEQ ID NO: 269916 - DNA, 15 bp, Homo sapiens
gagggaactgcacct

SEQ ID NO: 269917 - DNA, 15 bp, Homo sapiens
agagggaactgcacc

SEQ ID NO: 269918 - DNA, 15 bp, Homo sapiens
aagagggaactgcac

SEQ ID NO: 269919 - DNA, 15 bp, Homo sapiens
caagagggaactgca

SEQ ID NO: 269920 - DNA, 15 bp, Homo sapiens
acaagagggaactgc

SEQ ID NO: 269921 - DNA, 15 bp, Homo sapiens
cacaagagggaactg

SEQ ID NO: 269922 - DNA, 15 bp, Homo sapiens
tcacaagagggaact

SEQ ID NO: 269923 - DNA, 15 bp, Homo sapiens
ctcacaagagggaac

SEQ ID NO: 269924 - DNA, 15 bp, Homo sapiens
cctcacaagagggaa

SEQ ID NO: 269925 - DNA, 15 bp, Homo sapiens
gcctcacaagaggga

SEQ ID NO: 269926 - DNA, 15 bp, Homo sapiens
agcctcacaagaggg

SEQ ID NO: 269927 - DNA, 15 bp, Homo sapiens
gagcctcacaagagg

SEQ ID NO: 269928 - DNA, 15 bp, Homo sapiens
cgagcctcacaagag

SEQ ID NO: 269929 - DNA, 15 bp, Homo sapiens
ccgagcctcacaaga

SEQ ID NO: 269930 - DNA, 15 bp, Homo sapiens
tccgagcctcacaag

SEQ ID NO: 269931 - DNA, 15 bp, Homo sapiens
ctccgagcctcacaa

SEQ ID NO: 269932 - DNA, 15 bp, Homo sapiens
cctccgagcctcaca

SEQ ID NO: 269933 - DNA, 15 bp, Homo sapiens
gcctccgagcctcac

SEQ ID NO: 269934 - DNA, 15 bp, Homo sapiens
tgcctccgagcctca

SEQ ID NO: 269935 - DNA, 15 bp, Homo sapiens
ctgcctccgagcctc

SEQ ID NO: 269936 - DNA, 15 bp, Homo sapiens
tctgcctccgagcct

SEQ ID NO: 269937 - DNA, 15 bp, Homo sapiens
ctctgcctccgagcc

SEQ ID NO: 269938 - DNA, 15 bp, Homo sapiens
cctctgcctccgagc

SEQ ID NO: 269939 - DNA, 15 bp, Homo sapiens
ccctctgcctccgag

SEQ ID NO: 269940 - DNA, 15 bp, Homo sapiens
accctctgcctccga

SEQ ID NO: 269941 - DNA, 15 bp, Homo sapiens
gaccctctgcctccg

SEQ ID NO: 269942 - DNA, 15 bp, Homo sapiens
cgaccctctgcctcc

SEQ ID NO: 269943 - DNA, 15 bp, Homo sapiens
acgaccctctgcctc

SEQ ID NO: 269944 - DNA, 15 bp, Homo sapiens
aacgaccctctgcct

SEQ ID NO: 269945 - DNA, 15 bp, Homo sapiens
caacgaccctctgcc

SEQ ID NO: 269946 - DNA, 15 bp, Homo sapiens
gcaacgaccctctgc

SEQ ID NO: 269947 - DNA, 15 bp, Homo sapiens
cgcaacgaccctctg

SEQ ID NO: 269948 - DNA, 15 bp, Homo sapiens
tcgcaacgaccctct

SEQ ID NO: 269949 - DNA, 15 bp, Homo sapiens
ctcgcaacgaccctc

SEQ ID NO: 269950 - DNA, 15 bp, Homo sapiens
gctcgcaacgaccct

SEQ ID NO: 269951 - DNA, 15 bp, Homo sapiens
cgctcgcaacgaccc

SEQ ID NO: 269952 - DNA, 15 bp, Homo sapiens
acgctcgcaacgacc

SEQ ID NO: 269953 - DNA, 15 bp, Homo sapiens
gacgctcgcaacgac

SEQ ID NO: 269954 - DNA, 15 bp, Homo sapiens
ggacgctcgcaacga

SEQ ID NO: 269955 - DNA, 15 bp, Homo sapiens
tggacgctcgcaacg

SEQ ID NO: 269956 - DNA, 15 bp, Homo sapiens
atggacgctcgcaac

SEQ ID NO: 269957 - DNA, 15 bp, Homo sapiens
gatggacgctcgcaa

SEQ ID NO: 269958 - DNA, 15 bp, Homo sapiens
tgatggacgctcgca

SEQ ID NO: 269959 - DNA, 15 bp, Homo sapiens
ctgatggacgctcgc

SEQ ID NO: 269960 - DNA, 15 bp, Homo sapiens
tctgatggacgctcg

SEQ ID NO: 269961 - DNA, 15 bp, Homo sapiens
gtctgatggacgctc

SEQ ID NO: 269962 - DNA, 15 bp, Homo sapiens
cgtctgatggacgct

SEQ ID NO: 269963 - DNA, 15 bp, Homo sapiens
gcgtctgatggacgc

SEQ ID NO: 269964 - DNA, 15 bp, Homo sapiens
tgcgtctgatggacg

SEQ ID NO: 269965 - DNA, 15 bp, Homo sapiens
ttgcgtctgatggac

SEQ ID NO: 269966 - DNA, 15 bp, Homo sapiens
tttgcgtctgatgga

SEQ ID NO: 269967 - DNA, 15 bp, Homo sapiens
ttttgcgtctgatgg

SEQ ID NO: 269968 - DNA, 15 bp, Homo sapiens
tttttgcgtctgatg

SEQ ID NO: 269969 - DNA, 15 bp, Homo sapiens
ttttttgcgtctgat

SEQ ID NO: 269970 - DNA, 15 bp, Homo sapiens
attttttgcgtctga

SEQ ID NO: 269971 - DNA, 15 bp, Homo sapiens
cattttttgcgtctg

SEQ ID NO: 269972 - DNA, 15 bp, Homo sapiens
tcattttttgcgtct

SEQ ID NO: 269973 - DNA, 15 bp, Homo sapiens
ttcattttttgcgtc

SEQ ID NO: 269974 - DNA, 15 bp, Homo sapiens
tttcattttttgcgt

SEQ ID NO: 269975 - DNA, 15 bp, Homo sapiens
ttttcattttttgcg

SEQ ID NO: 269976 - DNA, 15 bp, Homo sapiens
tttttcattttttgc

SEQ ID NO: 269977 - DNA, 15 bp, Homo sapiens
atttttcattttttg

SEQ ID NO: 269978 - DNA, 15 bp, Homo sapiens
tatttttcatttttt

SEQ ID NO: 269979 - DNA, 15 bp, Homo sapiens
ttatttttcattttt

SEQ ID NO: 269980 - DNA, 15 bp, Homo sapiens
tttatttttcatttt

SEQ ID NO: 269981 - DNA, 15 bp, Homo sapiens
ttttatttttcattt

SEQ ID NO: 269982 - DNA, 15 bp, Homo sapiens
tttttatttttcatt

SEQ ID NO: 269983 - DNA, 15 bp, Homo sapiens
atttttatttttcat

SEQ ID NO: 269984 - DNA, 15 bp, Homo sapiens
tatttttatttttca

SEQ ID NO: 269985 - DNA, 15 bp, Homo sapiens
gtatttttatttttc

SEQ ID NO: 269986 - DNA, 15 bp, Homo sapiens
tgtatttttattttt

SEQ ID NO: 269987 - DNA, 15 bp, Homo sapiens
ttgtatttttatttt

SEQ ID NO: 269988 - DNA, 15 bp, Homo sapiens
tttgtatttttattt

SEQ ID NO: 269989 - DNA, 15 bp, Homo sapiens
ttttgtatttttatt

SEQ ID NO: 269990 - DNA, 15 bp, Homo sapiens
tttttgtatttttat

SEQ ID NO: 269991 - DNA, 15 bp, Homo sapiens
atttttgtattttta

SEQ ID NO: 269992 - DNA, 15 bp, Homo sapiens
catttttgtattttt

SEQ ID NO: 269993 - DNA, 15 bp, Homo sapiens
ccatttttgtatttt

SEQ ID NO: 269994 - DNA, 15 bp, Homo sapiens
accatttttgtattt

SEQ ID NO: 269995 - DNA, 15 bp, Homo sapiens
caccatttttgtatt

SEQ ID NO: 269996 - DNA, 15 bp, Homo sapiens
acaccatttttgtat

SEQ ID NO: 269997 - DNA, 15 bp, Homo sapiens
gacaccatttttgta

SEQ ID NO: 269998 - DNA, 15 bp, Homo sapiens
agacaccatttttgt

SEQ ID NO: 269999 - DNA, 15 bp, Homo sapiens
cagacaccatttttg

SEQ ID NO: 270000 - DNA, 15 bp, Homo sapiens
acagacaccattttt

SEQ ID NO: 270001 - DNA, 15 bp, Homo sapiens
cacagacaccatttt

SEQ ID NO: 270002 - DNA, 15 bp, Homo sapiens
ccacagacaccattt

SEQ ID NO: 270003 - DNA, 15 bp, Homo sapiens
cccacagacaccatt

SEQ ID NO: 270004 - DNA, 15 bp, Homo sapiens
tcccacagacaccat

SEQ ID NO: 270005 - DNA, 15 bp, Homo sapiens
ctcccacagacacca

SEQ ID NO: 270006 - DNA, 15 bp, Homo sapiens
tctcccacagacacc

SEQ ID NO: 270007 - DNA, 15 bp, Homo sapiens
ctctcccacagacac

SEQ ID NO: 270008 - DNA, 15 bp, Homo sapiens
actctcccacagaca

SEQ ID NO: 270009 - DNA, 15 bp, Homo sapiens
aactctcccacagac

SEQ ID NO: 270010 - DNA, 15 bp, Homo sapiens
aaactctcccacaga

SEQ ID NO: 270011 - DNA, 15 bp, Homo sapiens
aaaactctcccacag

SEQ ID NO: 270012 - DNA, 15 bp, Homo sapiens
aaaaactctcccaca

SEQ ID NO: 270013 - DNA, 15 bp, Homo sapiens
gaaaaactctcccac

SEQ ID NO: 270014 - DNA, 15 bp, Homo sapiens
tgaaaaactctccca

SEQ ID NO: 270015 - DNA, 15 bp, Homo sapiens
gtgaaaaactctccc

SEQ ID NO: 270016 - DNA, 15 bp, Homo sapiens
ggtgaaaaactctcc

SEQ ID NO: 270017 - DNA, 15 bp, Homo sapiens
cggtgaaaaactctc

SEQ ID NO: 270018 - DNA, 15 bp, Homo sapiens
ccggtgaaaaactct

SEQ ID NO: 270019 - DNA, 15 bp, Homo sapiens
tccggtgaaaaactc

SEQ ID NO: 270020 - DNA, 15 bp, Homo sapiens
ctccggtgaaaaact

SEQ ID NO: 270021 - DNA, 15 bp, Homo sapiens
tctccggtgaaaaac

SEQ ID NO: 270022 - DNA, 15 bp, Homo sapiens
ttctccggtgaaaaa

SEQ ID NO: 270023 - DNA, 15 bp, Homo sapiens
attctccggtgaaaa

SEQ ID NO: 270024 - DNA, 15 bp, Homo sapiens
aattctccggtgaaa

SEQ ID NO: 270025 - DNA, 15 bp, Homo sapiens
caattctccggtgaa

SEQ ID NO: 270026 - DNA, 15 bp, Homo sapiens
ccaattctccggtga

SEQ ID NO: 270027 - DNA, 15 bp, Homo sapiens
tccaattctccggtg

SEQ ID NO: 270028 - DNA, 15 bp, Homo sapiens
ctccaattctccggt

SEQ ID NO: 270029 - DNA, 15 bp, Homo sapiens
actccaattctccgg

SEQ ID NO: 270030 - DNA, 15 bp, Homo sapiens
tactccaattctccg

SEQ ID NO: 270031 - DNA, 15 bp, Homo sapiens
gtactccaattctcc

SEQ ID NO: 270032 - DNA, 15 bp, Homo sapiens
agtactccaattctc

SEQ ID NO: 270033 - DNA, 15 bp, Homo sapiens
gagtactccaattct

SEQ ID NO: 270034 - DNA, 15 bp, Homo sapiens
ggagtactccaattc

SEQ ID NO: 270035 - DNA, 15 bp, Homo sapiens
cggagtactccaatt

SEQ ID NO: 270036 - DNA, 15 bp, Homo sapiens
ccggagtactccaat

SEQ ID NO: 270037 - DNA, 15 bp, Homo sapiens
accggagtactccaa

SEQ ID NO: 270038 - DNA, 15 bp, Homo sapiens
caccggagtactcca

SEQ ID NO: 270039 - DNA, 15 bp, Homo sapiens
ccaccggagtactcc

SEQ ID NO: 270040 - DNA, 15 bp, Homo sapiens
accaccggagtactc

SEQ ID NO: 270041 - DNA, 15 bp, Homo sapiens
gaccaccggagtact

SEQ ID NO: 270042 - DNA, 15 bp, Homo sapiens
cgaccaccggagtac

SEQ ID NO: 270043 - DNA, 15 bp, Homo sapiens
acgaccaccggagta

SEQ ID NO: 270044 - DNA, 15 bp, Homo sapiens
gacgaccaccggagt

SEQ ID NO: 270045 - DNA, 15 bp, Homo sapiens
agacgaccaccggag

SEQ ID NO: 270046 - DNA, 15 bp, Homo sapiens
cagacgaccaccgga

SEQ ID NO: 270047 - DNA, 15 bp, Homo sapiens
tcagacgaccaccgg

SEQ ID NO: 270048 - DNA, 15 bp, Homo sapiens
gtcagacgaccaccg

SEQ ID NO: 270049 - DNA, 15 bp, Homo sapiens
agtcagacgaccacc

SEQ ID NO: 270050 - DNA, 15 bp, Homo sapiens
aagtcagacgaccac

SEQ ID NO: 270051 - DNA, 15 bp, Homo sapiens
aaagtcagacgacca

SEQ ID NO: 270052 - DNA, 15 bp, Homo sapiens
gaaagtcagacgacc

SEQ ID NO: 270053 - DNA, 15 bp, Homo sapiens
agaaagtcagacgac

SEQ ID NO: 270054 - DNA, 15 bp, Homo sapiens
cagaaagtcagacga

SEQ ID NO: 270055 - DNA, 15 bp, Homo sapiens
acagaaagtcagacg

SEQ ID NO: 270056 - DNA, 15 bp, Homo sapiens
aacagaaagtcagac

SEQ ID NO: 270057 - DNA, 15 bp, Homo sapiens
aaacagaaagtcaga

SEQ ID NO: 270058 - DNA, 15 bp, Homo sapiens
aaaacagaaagtcag

SEQ ID NO: 270059 - DNA, 15 bp, Homo sapiens
caaaacagaaagtca

SEQ ID NO: 270060 - DNA, 15 bp, Homo sapiens
ccaaaacagaaagtc

SEQ ID NO: 270061 - DNA, 15 bp, Homo sapiens
accaaaacagaaagt

SEQ ID NO: 270062 - DNA, 15 bp, Homo sapiens
aaccaaaacagaaag

SEQ ID NO: 270063 - DNA, 15 bp, Homo sapiens
gaaccaaaacagaaa

SEQ ID NO: 270064 - DNA, 15 bp, Homo sapiens
tgaaccaaaacagaa

SEQ ID NO: 270065 - DNA, 15 bp, Homo sapiens
gtgaaccaaaacaga

SEQ ID NO: 270066 - DNA, 15 bp, Homo sapiens
cgtgaaccaaaacag

SEQ ID NO: 270067 - DNA, 15 bp, Homo sapiens
gcgtgaaccaaaaca

SEQ ID NO: 270068 - DNA, 15 bp, Homo sapiens
cgcgtgaaccaaaac

SEQ ID NO: 270069 - DNA, 15 bp, Homo sapiens
tcgcgtgaaccaaaa

SEQ ID NO: 270070 - DNA, 15 bp, Homo sapiens
atcgcgtgaaccaaa

SEQ ID NO: 270071 - DNA, 15 bp, Homo sapiens
catcgcgtgaaccaa

SEQ ID NO: 270072 - DNA, 15 bp, Homo sapiens
gcatcgcgtgaacca

SEQ ID NO: 270073 - DNA, 15 bp, Homo sapiens
tgcatcgcgtgaacc

SEQ ID NO: 270074 - DNA, 15 bp, Homo sapiens
ttgcatcgcgtgaac

SEQ ID NO: 270075 - DNA, 15 bp, Homo sapiens
gttgcatcgcgtgaa

SEQ ID NO: 270076 - DNA, 15 bp, Homo sapiens
tgttgcatcgcgtga

SEQ ID NO: 270077 - DNA, 15 bp, Homo sapiens
ctgttgcatcgcgtg

SEQ ID NO: 270078 - DNA, 15 bp, Homo sapiens
actgttgcatcgcgt

SEQ ID NO: 270079 - DNA, 15 bp, Homo sapiens
aactgttgcatcgcg

SEQ ID NO: 270080 - DNA, 15 bp, Homo sapiens
caactgttgcatcgc

SEQ ID NO: 270081 - DNA, 15 bp, Homo sapiens
ccaactgttgcatcg

SEQ ID NO: 270082 - DNA, 15 bp, Homo sapiens
cccaactgttgcatc

SEQ ID NO: 270083 - DNA, 15 bp, Homo sapiens
tcccaactgttgcat

SEQ ID NO: 270084 - DNA, 15 bp, Homo sapiens
ttcccaactgttgca

SEQ ID NO: 270085 - DNA, 15 bp, Homo sapiens
cttcccaactgttgc

SEQ ID NO: 270086 - DNA, 15 bp, Homo sapiens
acttcccaactgttg

SEQ ID NO: 270087 - DNA, 15 bp, Homo sapiens
tacttcccaactgtt

SEQ ID NO: 270088 - DNA, 15 bp, Homo sapiens
atacttcccaactgt

SEQ ID NO: 270089 - DNA, 15 bp, Homo sapiens
aatacttcccaactg

SEQ ID NO: 270090 - DNA, 15 bp, Homo sapiens
aaatacttcccaact

SEQ ID NO: 270091 - DNA, 15 bp, Homo sapiens
aaaatacttcccaac

SEQ ID NO: 270092 - DNA, 15 bp, Homo sapiens
gaaaatacttcccaa

SEQ ID NO: 270093 - DNA, 15 bp, Homo sapiens
agaaaatacttccca

SEQ ID NO: 270094 - DNA, 15 bp, Homo sapiens
aagaaaatacttccc

SEQ ID NO: 270095 - DNA, 15 bp, Homo sapiens
gaagaaaatacttcc

SEQ ID NO: 270096 - DNA, 15 bp, Homo sapiens
ggaagaaaatacttc

SEQ ID NO: 270097 - DNA, 15 bp, Homo sapiens
cggaagaaaatactt

SEQ ID NO: 270098 - DNA, 15 bp, Homo sapiens
ccggaagaaaatact

SEQ ID NO: 270099 - DNA, 15 bp, Homo sapiens
cccggaagaaaatac

SEQ ID NO: 270100 - DNA, 15 bp, Homo sapiens
gcccggaagaaaata

SEQ ID NO: 270101 - DNA, 15 bp, Homo sapiens
cgcccggaagaaaat

SEQ ID NO: 270102 - DNA, 15 bp, Homo sapiens
acgcccggaagaaaa

SEQ ID NO: 270103 - DNA, 15 bp, Homo sapiens
cacgcccggaagaaa

SEQ ID NO: 270104 - DNA, 15 bp, Homo sapiens
gcacgcccggaagaa

SEQ ID NO: 270105 - DNA, 15 bp, Homo sapiens
tgcacgcccggaaga

SEQ ID NO: 270106 - DNA, 15 bp, Homo sapiens
gtgcacgcccggaag

SEQ ID NO: 270107 - DNA, 15 bp, Homo sapiens
agtgcacgcccggaa

SEQ ID NO: 270108 - DNA, 15 bp, Homo sapiens
cagtgcacgcccgga

SEQ ID NO: 270109 - DNA, 15 bp, Homo sapiens
gcagtgcacgcccgg

SEQ ID NO: 270110 - DNA, 15 bp, Homo sapiens
tgcagtgcacgcccg

SEQ ID NO: 270111 - DNA, 15 bp, Homo sapiens
atgcagtgcacgccc

SEQ ID NO: 270112 - DNA, 15 bp, Homo sapiens
gatgcagtgcacgcc

SEQ ID NO: 270113 - DNA, 15 bp, Homo sapiens
agatgcagtgcacgc

SEQ ID NO: 270114 - DNA, 15 bp, Homo sapiens
cagatgcagtgcacg

SEQ ID NO: 270115 - DNA, 15 bp, Homo sapiens
tcagatgcagtgcac

SEQ ID NO: 270116 - DNA, 15 bp, Homo sapiens
ttcagatgcagtgca

SEQ ID NO: 270117 - DNA, 15 bp, Homo sapiens
cttcagatgcagtgc

SEQ ID NO: 270118 - DNA, 15 bp, Homo sapiens
acttcagatgcagtg

SEQ ID NO: 270119 - DNA, 15 bp, Homo sapiens
gacttcagatgcagt

SEQ ID NO: 270120 - DNA, 15 bp, Homo sapiens
ggacttcagatgcag

SEQ ID NO: 270121 - DNA, 15 bp, Homo sapiens
tggacttcagatgca

SEQ ID NO: 270122 - DNA, 15 bp, Homo sapiens
atggacttcagatgc

SEQ ID NO: 270123 - DNA, 15 bp, Homo sapiens
aatggacttcagatg

SEQ ID NO: 270124 - DNA, 15 bp, Homo sapiens
aaatggacttcagat

SEQ ID NO: 270125 - DNA, 15 bp, Homo sapiens
caaatggacttcaga

SEQ ID NO: 270126 - DNA, 15 bp, Homo sapiens
acaaatggacttcag

SEQ ID NO: 270127 - DNA, 15 bp, Homo sapiens
cacaaatggacttca

SEQ ID NO: 270128 - DNA, 15 bp, Homo sapiens
ccacaaatggacttc

SEQ ID NO: 270129 - DNA, 15 bp, Homo sapiens
cccacaaatggactt

SEQ ID NO: 270130 - DNA, 15 bp, Homo sapiens
tcccacaaatggact

SEQ ID NO: 270131 - DNA, 15 bp, Homo sapiens
ctcccacaaatggac

SEQ ID NO: 270132 - DNA, 15 bp, Homo sapiens
tctcccacaaatgga

SEQ ID NO: 270133 - DNA, 15 bp, Homo sapiens
ctctcccacaaatgg

SEQ ID NO: 270134 - DNA, 15 bp, Homo sapiens
cctctcccacaaatg

SEQ ID NO: 270135 - DNA, 15 bp, Homo sapiens
gcctctcccacaaat

SEQ ID NO: 270136 - DNA, 15 bp, Homo sapiens
ggcctctcccacaaa

SEQ ID NO: 270137 - DNA, 15 bp, Homo sapiens
cggcctctcccacaa

SEQ ID NO: 270138 - DNA, 15 bp, Homo sapiens
tcggcctctcccaca

SEQ ID NO: 270139 - DNA, 15 bp, Homo sapiens
gtcggcctctcccac

SEQ ID NO: 270140 - DNA, 15 bp, Homo sapiens
ggtcggcctctccca

SEQ ID NO: 270141 - DNA, 15 bp, Homo sapiens
tggtcggcctctccc

SEQ ID NO: 270142 - DNA, 15 bp, Homo sapiens
ctggtcggcctctcc

SEQ ID NO: 270143 - DNA, 15 bp, Homo sapiens
tctggtcggcctctc

SEQ ID NO: 270144 - DNA, 15 bp, Homo sapiens
ttctggtcggcctct

SEQ ID NO: 270145 - DNA, 15 bp, Homo sapiens
tttctggtcggcctc

SEQ ID NO: 270146 - DNA, 15 bp, Homo sapiens
ctttctggtcggcct

SEQ ID NO: 270147 - DNA, 15 bp, Homo sapiens
gctttctggtcggcc

SEQ ID NO: 270148 - DNA, 15 bp, Homo sapiens
ggctttctggtcggc

SEQ ID NO: 270149 - DNA, 15 bp, Homo sapiens
aggctttctggtcgg

SEQ ID NO: 270150 - DNA, 15 bp, Homo sapiens
aaggctttctggtcg

SEQ ID NO: 270151 - DNA, 15 bp, Homo sapiens
caaggctttctggtc

SEQ ID NO: 270152 - DNA, 15 bp, Homo sapiens
ccaaggctttctggt

SEQ ID NO: 270153 - DNA, 15 bp, Homo sapiens
tccaaggctttctgg

SEQ ID NO: 270154 - DNA, 15 bp, Homo sapiens
gtccaaggctttctg

SEQ ID NO: 270155 - DNA, 15 bp, Homo sapiens
tgtccaaggctttct

SEQ ID NO: 270156 - DNA, 15 bp, Homo sapiens
ttgtccaaggctttc

SEQ ID NO: 270157 - DNA, 15 bp, Homo sapiens
cttgtccaaggcttt

SEQ ID NO: 270158 - DNA, 15 bp, Homo sapiens
tcttgtccaaggctt

SEQ ID NO: 270159 - DNA, 15 bp, Homo sapiens
ttcttgtccaaggct

SEQ ID NO: 270160 - DNA, 15 bp, Homo sapiens
cttcttgtccaaggc

SEQ ID NO: 270161 - DNA, 15 bp, Homo sapiens
gcttcttgtccaagg

SEQ ID NO: 270162 - DNA, 15 bp, Homo sapiens
cgcttcttgtccaag

SEQ ID NO: 270163 - DNA, 15 bp, Homo sapiens
gcgcttcttgtccaa

SEQ ID NO: 270164 - DNA, 15 bp, Homo sapiens
tgcgcttcttgtcca

SEQ ID NO: 270165 - DNA, 15 bp, Homo sapiens
ctgcgcttcttgtcc

SEQ ID NO: 270166 - DNA, 15 bp, Homo sapiens
cctgcgcttcttgtc

SEQ ID NO: 270167 - DNA, 15 bp, Homo sapiens
ccctgcgcttcttgt

SEQ ID NO: 270168 - DNA, 15 bp, Homo sapiens
accctgcgcttcttg

SEQ ID NO: 270169 - DNA, 15 bp, Homo sapiens
gaccctgcgcttctt

SEQ ID NO: 270170 - DNA, 15 bp, Homo sapiens
ggaccctgcgcttct

SEQ ID NO: 270171 - DNA, 15 bp, Homo sapiens
aggaccctgcgcttc

SEQ ID NO: 270172 - DNA, 15 bp, Homo sapiens
caggaccctgcgctt

SEQ ID NO: 270173 - DNA, 15 bp, Homo sapiens
tcaggaccctgcgct

SEQ ID NO: 270174 - DNA, 15 bp, Homo sapiens
ctcaggaccctgcgc

SEQ ID NO: 270175 - DNA, 15 bp, Homo sapiens
actcaggaccctgcg

SEQ ID NO: 270176 - DNA, 15 bp, Homo sapiens
cactcaggaccctgc

SEQ ID NO: 270177 - DNA, 15 bp, Homo sapiens
acactcaggaccctg

SEQ ID NO: 270178 - DNA, 15 bp, Homo sapiens
gacactcaggaccct

SEQ ID NO: 270179 - DNA, 15 bp, Homo sapiens
ggacactcaggaccc

SEQ ID NO: 270180 - DNA, 15 bp, Homo sapiens
tggacactcaggacc

SEQ ID NO: 270181 - DNA, 15 bp, Homo sapiens
atggacactcaggac

SEQ ID NO: 270182 - DNA, 15 bp, Homo sapiens
aatggacactcagga

SEQ ID NO: 270183 - DNA, 15 bp, Homo sapiens
caatggacactcagg

SEQ ID NO: 270184 - DNA, 15 bp, Homo sapiens
gcaatggacactcag

SEQ ID NO: 270185 - DNA, 15 bp, Homo sapiens
ggcaatggacactca

SEQ ID NO: 270186 - DNA, 15 bp, Homo sapiens
gggcaatggacactc

SEQ ID NO: 270187 - DNA, 15 bp, Homo sapiens
tgggcaatggacact

SEQ ID NO: 270188 - DNA, 15 bp, Homo sapiens
gtgggcaatggacac

SEQ ID NO: 270189 - DNA, 15 bp, Homo sapiens
tgtgggcaatggaca

SEQ ID NO: 270190 - DNA, 15 bp, Homo sapiens
ctgtgggcaatggac

SEQ ID NO: 270191 - DNA, 15 bp, Homo sapiens
cctgtgggcaatgga

SEQ ID NO: 270192 - DNA, 15 bp, Homo sapiens
tcctgtgggcaatgg

SEQ ID NO: 270193 - DNA, 15 bp, Homo sapiens
atcctgtgggcaatg

SEQ ID NO: 270194 - DNA, 15 bp, Homo sapiens
tatcctgtgggcaat

SEQ ID NO: 270195 - DNA, 15 bp, Homo sapiens
gtatcctgtgggcaa

SEQ ID NO: 270196 - DNA, 15 bp, Homo sapiens
agtatcctgtgggca

SEQ ID NO: 270197 - DNA, 15 bp, Homo sapiens
gagtatcctgtgggc

SEQ ID NO: 270198 - DNA, 15 bp, Homo sapiens
cgagtatcctgtggg

SEQ ID NO: 270199 - DNA, 15 bp, Homo sapiens
ccgagtatcctgtgg

SEQ ID NO: 270200 - DNA, 15 bp, Homo sapiens
gccgagtatcctgtg

SEQ ID NO: 270201 - DNA, 15 bp, Homo sapiens
agccgagtatcctgt

SEQ ID NO: 270202 - DNA, 15 bp, Homo sapiens
gagccgagtatcctg

SEQ ID NO: 270203 - DNA, 15 bp, Homo sapiens
tgagccgagtatcct

SEQ ID NO: 270204 - DNA, 15 bp, Homo sapiens
ctgagccgagtatcc

SEQ ID NO: 270205 - DNA, 15 bp, Homo sapiens
cctgagccgagtatc

SEQ ID NO: 270206 - DNA, 15 bp, Homo sapiens
tcctgagccgagtat

SEQ ID NO: 270207 - DNA, 15 bp, Homo sapiens
ctcctgagccgagta

SEQ ID NO: 270208 - DNA, 15 bp, Homo sapiens
gctcctgagccgagt

SEQ ID NO: 270209 - DNA, 15 bp, Homo sapiens
agctcctgagccgag

SEQ ID NO: 270210 - DNA, 15 bp, Homo sapiens
aagctcctgagccga

SEQ ID NO: 270211 - DNA, 15 bp, Homo sapiens
aaagctcctgagccg

SEQ ID NO: 270212 - DNA, 15 bp, Homo sapiens
caaagctcctgagcc

SEQ ID NO: 270213 - DNA, 15 bp, Homo sapiens
gcaaagctcctgagc

SEQ ID NO: 270214 - DNA, 15 bp, Homo sapiens
cgcaaagctcctgag

SEQ ID NO: 270215 - DNA, 15 bp, Homo sapiens
ccgcaaagctcctga

SEQ ID NO: 270216 - DNA, 15 bp, Homo sapiens
gccgcaaagctcctg

SEQ ID NO: 270217 - DNA, 15 bp, Homo sapiens
cgccgcaaagctcct

SEQ ID NO: 270218 - DNA, 15 bp, Homo sapiens
acgccgcaaagctcc

SEQ ID NO: 270219 - DNA, 15 bp, Homo sapiens
aacgccgcaaagctc

SEQ ID NO: 270220 - DNA, 15 bp, Homo sapiens
aaacgccgcaaagct

SEQ ID NO: 270221 - DNA, 15 bp, Homo sapiens
gaaacgccgcaaagc

SEQ ID NO: 270222 - DNA, 15 bp, Homo sapiens
ggaaacgccgcaaag

SEQ ID NO: 270223 - DNA, 15 bp, Homo sapiens
aggaaacgccgcaaa

SEQ ID NO: 270224 - DNA, 15 bp, Homo sapiens
aaggaaacgccgcaa

SEQ ID NO: 270225 - DNA, 15 bp, Homo sapiens
taaggaaacgccgca

SEQ ID NO: 270226 - DNA, 15 bp, Homo sapiens
ctaaggaaacgccgc

SEQ ID NO: 270227 - DNA, 15 bp, Homo sapiens
tctaaggaaacgccg

SEQ ID NO: 270228 - DNA, 15 bp, Homo sapiens
ttctaaggaaacgcc

SEQ ID NO: 270229 - DNA, 15 bp, Homo sapiens
gttctaaggaaacgc

SEQ ID NO: 270230 - DNA, 15 bp, Homo sapiens
tgttctaaggaaacg

SEQ ID NO: 270231 - DNA, 15 bp, Homo sapiens
ttgttctaaggaaac

SEQ ID NO: 270232 - DNA, 15 bp, Homo sapiens
attgttctaaggaaa

SEQ ID NO: 270233 - DNA, 15 bp, Homo sapiens
tattgttctaaggaa

SEQ ID NO: 270234 - DNA, 15 bp, Homo sapiens
ttattgttctaagga

SEQ ID NO: 270235 - DNA, 15 bp, Homo sapiens
attattgttctaagg

SEQ ID NO: 270236 - DNA, 15 bp, Homo sapiens
cattattgttctaag

SEQ ID NO: 270237 - DNA, 15 bp, Homo sapiens
gcattattgttctaa

SEQ ID NO: 270238 - DNA, 15 bp, Homo sapiens
tgcattattgttcta

SEQ ID NO: 270239 - DNA, 15 bp, Homo sapiens
atgcattattgttct

SEQ ID NO: 270240 - DNA, 15 bp, Homo sapiens
gatgcattattgttc

SEQ ID NO: 270241 - DNA, 15 bp, Homo sapiens
cgatgcattattgtt

SEQ ID NO: 270242 - DNA, 15 bp, Homo sapiens
tcgatgcattattgt

SEQ ID NO: 270243 - DNA, 15 bp, Homo sapiens
ctcgatgcattattg

SEQ ID NO: 270244 - DNA, 15 bp, Homo sapiens
cctcgatgcattatt

SEQ ID NO: 270245 - DNA, 15 bp, Homo sapiens
gcctcgatgcattat

SEQ ID NO: 270246 - DNA, 15 bp, Homo sapiens
ggcctcgatgcatta

SEQ ID NO: 270247 - DNA, 15 bp, Homo sapiens
aggcctcgatgcatt

SEQ ID NO: 270248 - DNA, 15 bp, Homo sapiens
aaggcctcgatgcat

SEQ ID NO: 270249 - DNA, 15 bp, Homo sapiens
caaggcctcgatgca

SEQ ID NO: 270250 - DNA, 15 bp, Homo sapiens
ccaaggcctcgatgc

SEQ ID NO: 270251 - DNA, 15 bp, Homo sapiens
cccaaggcctcgatg

SEQ ID NO: 270252 - DNA, 15 bp, Homo sapiens
ccccaaggcctcgat

SEQ ID NO: 270253 - DNA, 15 bp, Homo sapiens
tccccaaggcctcga

SEQ ID NO: 270254 - DNA, 15 bp, Homo sapiens
gtccccaaggcctcg

SEQ ID NO: 270255 - DNA, 15 bp, Homo sapiens
agtccccaaggcctc

SEQ ID NO: 270256 - DNA, 15 bp, Homo sapiens
gagtccccaaggcct

SEQ ID NO: 270257 - DNA, 15 bp, Homo sapiens
tgagtccccaaggcc

SEQ ID NO: 270258 - DNA, 15 bp, Homo sapiens
ttgagtccccaaggc

SEQ ID NO: 270259 - DNA, 15 bp, Homo sapiens
tttgagtccccaagg

SEQ ID NO: 270260 - DNA, 15 bp, Homo sapiens
ctttgagtccccaag

SEQ ID NO: 270261 - DNA, 15 bp, Homo sapiens
gctttgagtccccaa

SEQ ID NO: 270262 - DNA, 15 bp, Homo sapiens
ggctttgagtcccca

SEQ ID NO: 270263 - DNA, 15 bp, Homo sapiens
tggctttgagtcccc

SEQ ID NO: 270264 - DNA, 15 bp, Homo sapiens
atggctttgagtccc

SEQ ID NO: 270265 - DNA, 15 bp, Homo sapiens
gatggctttgagtcc

SEQ ID NO: 270266 - DNA, 15 bp, Homo sapiens
agatggctttgagtc

SEQ ID NO: 270267 - DNA, 15 bp, Homo sapiens
cagatggctttgagt

SEQ ID NO: 270268 - DNA, 15 bp, Homo sapiens
acagatggctttgag

SEQ ID NO: 270269 - DNA, 15 bp, Homo sapiens
tacagatggctttga

SEQ ID NO: 270270 - DNA, 15 bp, Homo sapiens
ctacagatggctttg

SEQ ID NO: 270271 - DNA, 15 bp, Homo sapiens
actacagatggcttt

SEQ ID NO: 270272 - DNA, 15 bp, Homo sapiens
cactacagatggctt

SEQ ID NO: 270273 - DNA, 15 bp, Homo sapiens
tcactacagatggct

SEQ ID NO: 270274 - DNA, 15 bp, Homo sapiens
atcactacagatggc

SEQ ID NO: 270275 - DNA, 15 bp, Homo sapiens
aatcactacagatgg

SEQ ID NO: 270276 - DNA, 15 bp, Homo sapiens
caatcactacagatg

SEQ ID NO: 270277 - DNA, 15 bp, Homo sapiens
tcaatcactacagat

SEQ ID NO: 270278 - DNA, 15 bp, Homo sapiens
atcaatcactacaga

SEQ ID NO: 270279 - DNA, 15 bp, Homo sapiens
catcaatcactacag

SEQ ID NO: 270280 - DNA, 15 bp, Homo sapiens
ccatcaatcactaca

SEQ ID NO: 270281 - DNA, 15 bp, Homo sapiens
tccatcaatcactac

SEQ ID NO: 270282 - DNA, 15 bp, Homo sapiens
ctccatcaatcacta

SEQ ID NO: 270283 - DNA, 15 bp, Homo sapiens
gctccatcaatcact

SEQ ID NO: 270284 - DNA, 15 bp, Homo sapiens
cgctccatcaatcac

SEQ ID NO: 270285 - DNA, 15 bp, Homo sapiens
acgctccatcaatca

SEQ ID NO: 270286 - DNA, 15 bp, Homo sapiens
tacgctccatcaatc

SEQ ID NO: 270287 - DNA, 15 bp, Homo sapiens
ttacgctccatcaat

SEQ ID NO: 270288 - DNA, 15 bp, Homo sapiens
gttacgctccatcaa

SEQ ID NO: 270289 - DNA, 15 bp, Homo sapiens
agttacgctccatca

SEQ ID NO: 270290 - DNA, 15 bp, Homo sapiens
gagttacgctccatc

SEQ ID NO: 270291 - DNA, 15 bp, Homo sapiens
agagttacgctccat

SEQ ID NO: 270292 - DNA, 15 bp, Homo sapiens
aagagttacgctcca

SEQ ID NO: 270293 - DNA, 15 bp, Homo sapiens
aaagagttacgctcc

SEQ ID NO: 270294 - DNA, 15 bp, Homo sapiens
taaagagttacgctc

SEQ ID NO: 270295 - DNA, 15 bp, Homo sapiens
ctaaagagttacgct

SEQ ID NO: 270296 - DNA, 15 bp, Homo sapiens
tctaaagagttacgc

SEQ ID NO: 270297 - DNA, 15 bp, Homo sapiens
ctctaaagagttacg

SEQ ID NO: 270298 - DNA, 15 bp, Homo sapiens
cctctaaagagttac

SEQ ID NO: 270299 - DNA, 15 bp, Homo sapiens
tcctctaaagagtta

SEQ ID NO: 270300 - DNA, 15 bp, Homo sapiens
ttcctctaaagagtt

SEQ ID NO: 270301 - DNA, 15 bp, Homo sapiens
gttcctctaaagagt

SEQ ID NO: 270302 - DNA, 15 bp, Homo sapiens
agttcctctaaagag

SEQ ID NO: 270303 - DNA, 15 bp, Homo sapiens
cagttcctctaaaga

SEQ ID NO: 270304 - DNA, 15 bp, Homo sapiens
tcagttcctctaaag

SEQ ID NO: 270305 - DNA, 15 bp, Homo sapiens
ttcagttcctctaaa

SEQ ID NO: 270306 - DNA, 15 bp, Homo sapiens
tttcagttcctctaa

SEQ ID NO: 270307 - DNA, 15 bp, Homo sapiens
gtttcagttcctcta

SEQ ID NO: 270308 - DNA, 15 bp, Homo sapiens
tgtttcagttcctct

SEQ ID NO: 270309 - DNA, 15 bp, Homo sapiens
atgtttcagttcctc

SEQ ID NO: 270310 - DNA, 15 bp, Homo sapiens
catgtttcagttcct

SEQ ID NO: 270311 - DNA, 15 bp, Homo sapiens
ccatgtttcagttcc

SEQ ID NO: 270312 - DNA, 15 bp, Homo sapiens
cccatgtttcagttc

SEQ ID NO: 270313 - DNA, 15 bp, Homo sapiens
gcccatgtttcagtt

SEQ ID NO: 270314 - DNA, 15 bp, Homo sapiens
tgcccatgtttcagt

SEQ ID NO: 270315 - DNA, 15 bp, Homo sapiens
ttgcccatgtttcag

SEQ ID NO: 270316 - DNA, 15 bp, Homo sapiens
tttgcccatgtttca

SEQ ID NO: 270317 - DNA, 15 bp, Homo sapiens
ttttgcccatgtttc

SEQ ID NO: 270318 - DNA, 15 bp, Homo sapiens
gttttgcccatgttt

SEQ ID NO: 270319 - DNA, 15 bp, Homo sapiens
agttttgcccatgtt

SEQ ID NO: 270320 - DNA, 15 bp, Homo sapiens
aagttttgcccatgt

SEQ ID NO: 270321 - DNA, 15 bp, Homo sapiens
aaagttttgcccatg

SEQ ID NO: 270322 - DNA, 15 bp, Homo sapiens
gaaagttttgcccat

SEQ ID NO: 270323 - DNA, 15 bp, Homo sapiens
tgaaagttttgccca

SEQ ID NO: 270324 - DNA, 15 bp, Homo sapiens
atgaaagttttgccc

SEQ ID NO: 270325 - DNA, 15 bp, Homo sapiens
catgaaagttttgcc

SEQ ID NO: 270326 - DNA, 15 bp, Homo sapiens
tcatgaaagttttgc

SEQ ID NO: 270327 - DNA, 15 bp, Homo sapiens
ctcatgaaagttttg

SEQ ID NO: 270328 - DNA, 15 bp, Homo sapiens
tctcatgaaagtttt

SEQ ID NO: 270329 - DNA, 15 bp, Homo sapiens
gtctcatgaaagttt

SEQ ID NO: 270330 - DNA, 15 bp, Homo sapiens
tgtctcatgaaagtt

SEQ ID NO: 270331 - DNA, 15 bp, Homo sapiens
atgtctcatgaaagt

SEQ ID NO: 270332 - DNA, 15 bp, Homo sapiens
aatgtctcatgaaag

SEQ ID NO: 270333 - DNA, 15 bp, Homo sapiens
aaatgtctcatgaaa

SEQ ID NO: 270334 - DNA, 15 bp, Homo sapiens
taaatgtctcatgaa

SEQ ID NO: 270335 - DNA, 15 bp, Homo sapiens
gtaaatgtctcatga

SEQ ID NO: 270336 - DNA, 15 bp, Homo sapiens
ggtaaatgtctcatg

SEQ ID NO: 270337 - DNA, 15 bp, Homo sapiens
tggtaaatgtctcat

SEQ ID NO: 270338 - DNA, 15 bp, Homo sapiens
ctggtaaatgtctca

SEQ ID NO: 270339 - DNA, 15 bp, Homo sapiens
tctggtaaatgtctc

SEQ ID NO: 270340 - DNA, 15 bp, Homo sapiens
ttctggtaaatgtct

SEQ ID NO: 270341 - DNA, 15 bp, Homo sapiens
cttctggtaaatgtc

SEQ ID NO: 270342 - DNA, 15 bp, Homo sapiens
acttctggtaaatgt

SEQ ID NO: 270343 - DNA, 15 bp, Homo sapiens
cacttctggtaaatg

SEQ ID NO: 270344 - DNA, 15 bp, Homo sapiens
gcacttctggtaaat

SEQ ID NO: 270345 - DNA, 15 bp, Homo sapiens
agcacttctggtaaa

SEQ ID NO: 270346 - DNA, 15 bp, Homo sapiens
aagcacttctggtaa

SEQ ID NO: 270347 - DNA, 15 bp, Homo sapiens
caagcacttctggta

SEQ ID NO: 270348 - DNA, 15 bp, Homo sapiens
tcaagcacttctggt

SEQ ID NO: 270349 - DNA, 15 bp, Homo sapiens
ttcaagcacttctgg

SEQ ID NO: 270350 - DNA, 15 bp, Homo sapiens
tttcaagcacttctg

SEQ ID NO: 270351 - DNA, 15 bp, Homo sapiens
ctttcaagcacttct

SEQ ID NO: 270352 - DNA, 15 bp, Homo sapiens
actttcaagcacttc

SEQ ID NO: 270353 - DNA, 15 bp, Homo sapiens
aactttcaagcactt

SEQ ID NO: 270354 - DNA, 15 bp, Homo sapiens
aaactttcaagcact

SEQ ID NO: 270355 - DNA, 15 bp, Homo sapiens
gaaactttcaagcac

SEQ ID NO: 270356 - DNA, 15 bp, Homo sapiens
agaaactttcaagca

SEQ ID NO: 270357 - DNA, 15 bp, Homo sapiens
tagaaactttcaagc

SEQ ID NO: 270358 - DNA, 15 bp, Homo sapiens
ttagaaactttcaag

SEQ ID NO: 270359 - DNA, 15 bp, Homo sapiens
tttagaaactttcaa

SEQ ID NO: 270360 - DNA, 15 bp, Homo sapiens
gtttagaaactttca

SEQ ID NO: 270361 - DNA, 15 bp, Homo sapiens
agtttagaaactttc

SEQ ID NO: 270362 - DNA, 15 bp, Homo sapiens
aagtttagaaacttt

SEQ ID NO: 270363 - DNA, 15 bp, Homo sapiens
aaagtttagaaactt

SEQ ID NO: 270364 - DNA, 15 bp, Homo sapiens
aaaagtttagaaact

SEQ ID NO: 270365 - DNA, 15 bp, Homo sapiens
aaaaagtttagaaac

SEQ ID NO: 270366 - DNA, 15 bp, Homo sapiens
aaaaaagtttagaaa

SEQ ID NO: 270367 - DNA, 15 bp, Homo sapiens
aaaaaaagtttagaa

SEQ ID NO: 270368 - DNA, 15 bp, Homo sapiens
aaaaaaaagtttaga

SEQ ID NO: 270369 - DNA, 15 bp, Homo sapiens
aaaaaaaaagtttag

SEQ ID NO: 270370 - DNA, 15 bp, Homo sapiens
aaaaaaaaaagttta

SEQ ID NO: 270371 - DNA, 15 bp, Homo sapiens
gaaaaaaaaaagttt

SEQ ID NO: 270372 - DNA, 15 bp, Homo sapiens
ggaaaaaaaaaagtt

SEQ ID NO: 270373 - DNA, 15 bp, Homo sapiens
aggaaaaaaaaaagt

SEQ ID NO: 270374 - DNA, 15 bp, Homo sapiens
caggaaaaaaaaaag

SEQ ID NO: 270375 - DNA, 15 bp, Homo sapiens
acaggaaaaaaaaaa

SEQ ID NO: 270376 - DNA, 15 bp, Homo sapiens
aacaggaaaaaaaaa

SEQ ID NO: 270377 - DNA, 15 bp, Homo sapiens
aaacaggaaaaaaaa

SEQ ID NO: 270378 - DNA, 15 bp, Homo sapiens
caaacaggaaaaaaa

SEQ ID NO: 270379 - DNA, 15 bp, Homo sapiens
tcaaacaggaaaaaa

SEQ ID NO: 270380 - DNA, 15 bp, Homo sapiens
atcaaacaggaaaaa

SEQ ID NO: 270381 - DNA, 15 bp, Homo sapiens
catcaaacaggaaaa

SEQ ID NO: 270382 - DNA, 15 bp, Homo sapiens
tcatcaaacaggaaa

SEQ ID NO: 270383 - DNA, 15 bp, Homo sapiens
ttcatcaaacaggaa

SEQ ID NO: 270384 - DNA, 15 bp, Homo sapiens
gttcatcaaacagga

SEQ ID NO: 270385 - DNA, 15 bp, Homo sapiens
agttcatcaaacagg

SEQ ID NO: 270386 - DNA, 15 bp, Homo sapiens
gagttcatcaaacag

SEQ ID NO: 270387 - DNA, 15 bp, Homo sapiens
agagttcatcaaaca

SEQ ID NO: 270388 - DNA, 15 bp, Homo sapiens
aagagttcatcaaac

SEQ ID NO: 270389 - DNA, 15 bp, Homo sapiens
gaagagttcatcaaa

SEQ ID NO: 270390 - DNA, 15 bp, Homo sapiens
agaagagttcatcaa

SEQ ID NO: 270391 - DNA, 15 bp, Homo sapiens
aagaagagttcatca

SEQ ID NO: 270392 - DNA, 15 bp, Homo sapiens
caagaagagttcatc

SEQ ID NO: 270393 - DNA, 15 bp, Homo sapiens
gcaagaagagttcat

SEQ ID NO: 270394 - DNA, 15 bp, Homo sapiens
cgcaagaagagttca

SEQ ID NO: 270395 - DNA, 15 bp, Homo sapiens
acgcaagaagagttc

SEQ ID NO: 270396 - DNA, 15 bp, Homo sapiens
cacgcaagaagagtt

SEQ ID NO: 270397 - DNA, 15 bp, Homo sapiens
acacgcaagaagagt

SEQ ID NO: 270398 - DNA, 15 bp, Homo sapiens
aacacgcaagaagag

SEQ ID NO: 270399 - DNA, 15 bp, Homo sapiens
taacacgcaagaaga

SEQ ID NO: 270400 - DNA, 15 bp, Homo sapiens
ctaacacgcaagaag

SEQ ID NO: 270401 - DNA, 15 bp, Homo sapiens
actaacacgcaagaa

SEQ ID NO: 270402 - DNA, 15 bp, Homo sapiens
gactaacacgcaaga

SEQ ID NO: 270403 - DNA, 15 bp, Homo sapiens
cgactaacacgcaag

SEQ ID NO: 270404 - DNA, 15 bp, Homo sapiens
ccgactaacacgcaa

SEQ ID NO: 270405 - DNA, 15 bp, Homo sapiens
gccgactaacacgca

SEQ ID NO: 270406 - DNA, 15 bp, Homo sapiens
agccgactaacacgc

SEQ ID NO: 270407 - DNA, 15 bp, Homo sapiens
aagccgactaacacg

SEQ ID NO: 270408 - DNA, 15 bp, Homo sapiens
gaagccgactaacac

SEQ ID NO: 270409 - DNA, 15 bp, Homo sapiens
cgaagccgactaaca

SEQ ID NO: 270410 - DNA, 15 bp, Homo sapiens
ccgaagccgactaac

SEQ ID NO: 270411 - DNA, 15 bp, Homo sapiens
gccgaagccgactaa

SEQ ID NO: 270412 - DNA, 15 bp, Homo sapiens
agccgaagccgacta

SEQ ID NO: 270413 - DNA, 15 bp, Homo sapiens
aagccgaagccgact

SEQ ID NO: 270414 - DNA, 15 bp, Homo sapiens
caagccgaagccgac

SEQ ID NO: 270415 - DNA, 15 bp, Homo sapiens
acaagccgaagccga

SEQ ID NO: 270416 - DNA, 15 bp, Homo sapiens
gacaagccgaagccg

SEQ ID NO: 270417 - DNA, 15 bp, Homo sapiens
agacaagccgaagcc

SEQ ID NO: 270418 - DNA, 15 bp, Homo sapiens
gagacaagccgaagc

SEQ ID NO: 270419 - DNA, 15 bp, Homo sapiens
tgagacaagccgaag

SEQ ID NO: 270420 - DNA, 15 bp, Homo sapiens
atgagacaagccgaa

SEQ ID NO: 270421 - DNA, 15 bp, Homo sapiens
aatgagacaagccga

SEQ ID NO: 270422 - DNA, 15 bp, Homo sapiens
taatgagacaagccg

SEQ ID NO: 270423 - DNA, 15 bp, Homo sapiens
ataatgagacaagcc

SEQ ID NO: 270424 - DNA, 15 bp, Homo sapiens
aataatgagacaagc

SEQ ID NO: 270425 - DNA, 15 bp, Homo sapiens
aaataatgagacaag

SEQ ID NO: 270426 - DNA, 15 bp, Homo sapiens
gaaataatgagacaa

SEQ ID NO: 270427 - DNA, 15 bp, Homo sapiens
agaaataatgagaca

SEQ ID NO: 270428 - DNA, 15 bp, Homo sapiens
aagaaataatgagac

SEQ ID NO: 270429 - DNA, 15 bp, Homo sapiens
gaagaaataatgaga

SEQ ID NO: 270430 - DNA, 15 bp, Homo sapiens
ggaagaaataatgag

SEQ ID NO: 270431 - DNA, 15 bp, Homo sapiens
tggaagaaataatga

SEQ ID NO: 270432 - DNA, 15 bp, Homo sapiens
atggaagaaataatg

SEQ ID NO: 270433 - DNA, 15 bp, Homo sapiens
aatggaagaaataat

SEQ ID NO: 270434 - DNA, 15 bp, Homo sapiens
aaatggaagaaataa

SEQ ID NO: 270435 - DNA, 15 bp, Homo sapiens
aaaatggaagaaata

SEQ ID NO: 270436 - DNA, 15 bp, Homo sapiens
caaaatggaagaaat

SEQ ID NO: 270437 - DNA, 15 bp, Homo sapiens
gcaaaatggaagaaa

SEQ ID NO: 270438 - DNA, 15 bp, Homo sapiens
ggcaaaatggaagaa

SEQ ID NO: 270439 - DNA, 15 bp, Homo sapiens
aggcaaaatggaaga

SEQ ID NO: 270440 - DNA, 15 bp, Homo sapiens
aaggcaaaatggaag

SEQ ID NO: 270441 - DNA, 15 bp, Homo sapiens
aaaggcaaaatggaa

SEQ ID NO: 270442 - DNA, 15 bp, Homo sapiens
aaaaggcaaaatgga

SEQ ID NO: 270443 - DNA, 15 bp, Homo sapiens
caaaaggcaaaatgg

SEQ ID NO: 270444 - DNA, 15 bp, Homo sapiens
tcaaaaggcaaaatg

SEQ ID NO: 270445 - DNA, 15 bp, Homo sapiens
gtcaaaaggcaaaat

SEQ ID NO: 270446 - DNA, 15 bp, Homo sapiens
agtcaaaaggcaaaa

SEQ ID NO: 270447 - DNA, 15 bp, Homo sapiens
aagtcaaaaggcaaa

SEQ ID NO: 270448 - DNA, 15 bp, Homo sapiens
aaagtcaaaaggcaa

SEQ ID NO: 270449 - DNA, 15 bp, Homo sapiens
caaagtcaaaaggca

SEQ ID NO: 270450 - DNA, 15 bp, Homo sapiens
tcaaagtcaaaaggc

SEQ ID NO: 270451 - DNA, 15 bp, Homo sapiens
ttcaaagtcaaaagg

SEQ ID NO: 270452 - DNA, 15 bp, Homo sapiens
gttcaaagtcaaaag

SEQ ID NO: 270453 - DNA, 15 bp, Homo sapiens
ggttcaaagtcaaaa

SEQ ID NO: 270454 - DNA, 15 bp, Homo sapiens
tggttcaaagtcaaa

SEQ ID NO: 270455 - DNA, 15 bp, Homo sapiens
ctggttcaaagtcaa

SEQ ID NO: 270456 - DNA, 15 bp, Homo sapiens
gctggttcaaagtca

SEQ ID NO: 270457 - DNA, 15 bp, Homo sapiens
tgctggttcaaagtc

SEQ ID NO: 270458 - DNA, 15 bp, Homo sapiens
ttgctggttcaaagt

SEQ ID NO: 270459 - DNA, 15 bp, Homo sapiens
cttgctggttcaaag

SEQ ID NO: 270460 - DNA, 15 bp, Homo sapiens
ccttgctggttcaaa

SEQ ID NO: 270461 - DNA, 15 bp, Homo sapiens
tccttgctggttcaa

SEQ ID NO: 270462 - DNA, 15 bp, Homo sapiens
atccttgctggttca

SEQ ID NO: 270463 - DNA, 15 bp, Homo sapiens
gatccttgctggttc

SEQ ID NO: 270464 - DNA, 15 bp, Homo sapiens
agatccttgctggtt

SEQ ID NO: 270465 - DNA, 15 bp, Homo sapiens
aagatccttgctggt

SEQ ID NO: 270466 - DNA, 15 bp, Homo sapiens
caagatccttgctgg

SEQ ID NO: 270467 - DNA, 15 bp, Homo sapiens
ccaagatccttgctg

SEQ ID NO: 270468 - DNA, 15 bp, Homo sapiens
accaagatccttgct

SEQ ID NO: 270469 - DNA, 15 bp, Homo sapiens
caccaagatccttgc

SEQ ID NO: 270470 - DNA, 15 bp, Homo sapiens
acaccaagatccttg

SEQ ID NO: 270471 - DNA, 15 bp, Homo sapiens
gacaccaagatcctt

SEQ ID NO: 270472 - DNA, 15 bp, Homo sapiens
ggacaccaagatcct

SEQ ID NO: 270473 - DNA, 15 bp, Homo sapiens
gggacaccaagatcc

SEQ ID NO: 270474 - DNA, 15 bp, Homo sapiens
ggggacaccaagatc

SEQ ID NO: 270475 - DNA, 15 bp, Homo sapiens
aggggacaccaagat

SEQ ID NO: 270476 - DNA, 15 bp, Homo sapiens
gaggggacaccaaga

SEQ ID NO: 270477 - DNA, 15 bp, Homo sapiens
agaggggacaccaag

SEQ ID NO: 270478 - DNA, 15 bp, Homo sapiens
aagaggggacaccaa

SEQ ID NO: 270479 - DNA, 15 bp, Homo sapiens
aaagaggggacacca

SEQ ID NO: 270480 - DNA, 15 bp, Homo sapiens
aaaagaggggacacc

SEQ ID NO: 270481 - DNA, 15 bp, Homo sapiens
aaaaagaggggacac

SEQ ID NO: 270482 - DNA, 15 bp, Homo sapiens
caaaaagaggggaca

SEQ ID NO: 270483 - DNA, 15 bp, Homo sapiens
gcaaaaagaggggac

SEQ ID NO: 270484 - DNA, 15 bp, Homo sapiens
ggcaaaaagagggga

SEQ ID NO: 270485 - DNA, 15 bp, Homo sapiens
aggcaaaaagagggg

SEQ ID NO: 270486 - DNA, 15 bp, Homo sapiens
aaggcaaaaagaggg

SEQ ID NO: 270487 - DNA, 15 bp, Homo sapiens
aaaggcaaaaagagg

SEQ ID NO: 270488 - DNA, 15 bp, Homo sapiens
caaaggcaaaaagag

SEQ ID NO: 270489 - DNA, 15 bp, Homo sapiens
acaaaggcaaaaaga

SEQ ID NO: 270490 - DNA, 15 bp, Homo sapiens
aacaaaggcaaaaag

SEQ ID NO: 270491 - DNA, 15 bp, Homo sapiens
aaacaaaggcaaaaa

SEQ ID NO: 270492 - DNA, 15 bp, Homo sapiens
aaaacaaaggcaaaa

SEQ ID NO: 270493 - DNA, 15 bp, Homo sapiens
aaaaacaaaggcaaa

SEQ ID NO: 270494 - DNA, 15 bp, Homo sapiens
caaaaacaaaggcaa

SEQ ID NO: 270495 - DNA, 15 bp, Homo sapiens
ccaaaaacaaaggca

SEQ ID NO: 270496 - DNA, 15 bp, Homo sapiens
gccaaaaacaaaggc

SEQ ID NO: 270497 - DNA, 15 bp, Homo sapiens
tgccaaaaacaaagg

SEQ ID NO: 270498 - DNA, 15 bp, Homo sapiens
gtgccaaaaacaaag

SEQ ID NO: 270499 - DNA, 15 bp, Homo sapiens
tgtgccaaaaacaaa

SEQ ID NO: 270500 - DNA, 15 bp, Homo sapiens
ttgtgccaaaaacaa

SEQ ID NO: 270501 - DNA, 15 bp, Homo sapiens
tttgtgccaaaaaca

SEQ ID NO: 270502 - DNA, 15 bp, Homo sapiens
ttttgtgccaaaaac

SEQ ID NO: 270503 - DNA, 15 bp, Homo sapiens
attttgtgccaaaaa

SEQ ID NO: 270504 - DNA, 15 bp, Homo sapiens
aattttgtgccaaaa

SEQ ID NO: 270505 - DNA, 15 bp, Homo sapiens
taattttgtgccaaa

SEQ ID NO: 270506 - DNA, 15 bp, Homo sapiens
ctaattttgtgccaa

SEQ ID NO: 270507 - DNA, 15 bp, Homo sapiens
actaattttgtgcca

SEQ ID NO: 270508 - DNA, 15 bp, Homo sapiens
cactaattttgtgcc

SEQ ID NO: 270509 - DNA, 15 bp, Homo sapiens
ccactaattttgtgc

SEQ ID NO: 270510 - DNA, 15 bp, Homo sapiens
accactaattttgtg

SEQ ID NO: 270511 - DNA, 15 bp, Homo sapiens
aaccactaattttgt

SEQ ID NO: 270512 - DNA, 15 bp, Homo sapiens
gaaccactaattttg

SEQ ID NO: 270513 - DNA, 15 bp, Homo sapiens
agaaccactaatttt

SEQ ID NO: 270514 - DNA, 15 bp, Homo sapiens
cagaaccactaattt

SEQ ID NO: 270515 - DNA, 15 bp, Homo sapiens
acagaaccactaatt

SEQ ID NO: 270516 - DNA, 15 bp, Homo sapiens
cacagaaccactaat

SEQ ID NO: 270517 - DNA, 15 bp, Homo sapiens
gcacagaaccactaa

SEQ ID NO: 270518 - DNA, 15 bp, Homo sapiens
cgcacagaaccacta

SEQ ID NO: 270519 - DNA, 15 bp, Homo sapiens
gcgcacagaaccact

SEQ ID NO: 270520 - DNA, 15 bp, Homo sapiens
tgcgcacagaaccac

SEQ ID NO: 270521 - DNA, 15 bp, Homo sapiens
ttgcgcacagaacca

SEQ ID NO: 270522 - DNA, 15 bp, Homo sapiens
tttgcgcacagaacc

SEQ ID NO: 270523 - DNA, 15 bp, Homo sapiens
atttgcgcacagaac

SEQ ID NO: 270524 - DNA, 15 bp, Homo sapiens
catttgcgcacagaa

SEQ ID NO: 270525 - DNA, 15 bp, Homo sapiens
ccatttgcgcacaga

SEQ ID NO: 270526 - DNA, 15 bp, Homo sapiens
tccatttgcgcacag

SEQ ID NO: 270527 - DNA, 15 bp, Homo sapiens
ttccatttgcgcaca

SEQ ID NO: 270528 - DNA, 15 bp, Homo sapiens
tttccatttgcgcac

SEQ ID NO: 270529 - DNA, 15 bp, Homo sapiens
atttccatttgcgca

SEQ ID NO: 270530 - DNA, 15 bp, Homo sapiens
aatttccatttgcgc

SEQ ID NO: 270531 - DNA, 15 bp, Homo sapiens
aaatttccatttgcg

SEQ ID NO: 270532 - DNA, 15 bp, Homo sapiens
aaaatttccatttgc

SEQ ID NO: 270533 - DNA, 15 bp, Homo sapiens
gaaaatttccatttg

SEQ ID NO: 270534 - DNA, 15 bp, Homo sapiens
cgaaaatttccattt

SEQ ID NO: 270535 - DNA, 15 bp, Homo sapiens
acgaaaatttccatt

SEQ ID NO: 270536 - DNA, 15 bp, Homo sapiens
aacgaaaatttccat

SEQ ID NO: 270537 - DNA, 15 bp, Homo sapiens
aaacgaaaatttcca

SEQ ID NO: 270538 - DNA, 15 bp, Homo sapiens
aaaacgaaaatttcc

SEQ ID NO: 270539 - DNA, 15 bp, Homo sapiens
gaaaacgaaaatttc

SEQ ID NO: 270540 - DNA, 15 bp, Homo sapiens
ggaaaacgaaaattt

SEQ ID NO: 270541 - DNA, 15 bp, Homo sapiens
gggaaaacgaaaatt

SEQ ID NO: 270542 - DNA, 15 bp, Homo sapiens
agggaaaacgaaaat

SEQ ID NO: 270543 - DNA, 15 bp, Homo sapiens
aagggaaaacgaaaa

SEQ ID NO: 270544 - DNA, 15 bp, Homo sapiens
taagggaaaacgaaa

SEQ ID NO: 270545 - DNA, 15 bp, Homo sapiens
ataagggaaaacgaa

SEQ ID NO: 270546 - DNA, 15 bp, Homo sapiens
aataagggaaaacga

SEQ ID NO: 270547 - DNA, 15 bp, Homo sapiens
taataagggaaaacg

SEQ ID NO: 270548 - DNA, 15 bp, Homo sapiens
ttaataagggaaaac

SEQ ID NO: 270549 - DNA, 15 bp, Homo sapiens
cttaataagggaaaa

SEQ ID NO: 270550 - DNA, 15 bp, Homo sapiens
acttaataagggaaa

SEQ ID NO: 270551 - DNA, 15 bp, Homo sapiens
cacttaataagggaa

SEQ ID NO: 270552 - DNA, 15 bp, Homo sapiens
ccacttaataaggga

SEQ ID NO: 270553 - DNA, 15 bp, Homo sapiens
tccacttaataaggg

SEQ ID NO: 270554 - DNA, 15 bp, Homo sapiens
ttccacttaataagg

SEQ ID NO: 270555 - DNA, 15 bp, Homo sapiens
attccacttaataag

SEQ ID NO: 270556 - DNA, 15 bp, Homo sapiens
gattccacttaataa

SEQ ID NO: 270557 - DNA, 15 bp, Homo sapiens
agattccacttaata

SEQ ID NO: 270558 - DNA, 15 bp, Homo sapiens
tagattccacttaat

SEQ ID NO: 270559 - DNA, 15 bp, Homo sapiens
ttagattccacttaa

SEQ ID NO: 270560 - DNA, 15 bp, Homo sapiens
tttagattccactta

SEQ ID NO: 270561 - DNA, 15 bp, Homo sapiens
atttagattccactt

SEQ ID NO: 270562 - DNA, 15 bp, Homo sapiens
aatttagattccact

SEQ ID NO: 270563 - DNA, 15 bp, Homo sapiens
aaatttagattccac

SEQ ID NO: 270564 - DNA, 15 bp, Homo sapiens
taaatttagattcca

SEQ ID NO: 270565 - DNA, 15 bp, Homo sapiens
ttaaatttagattcc

SEQ ID NO: 270566 - DNA, 15 bp, Homo sapiens
cttaaatttagattc

SEQ ID NO: 270567 - DNA, 15 bp, Homo sapiens
gcttaaatttagatt

SEQ ID NO: 270568 - DNA, 15 bp, Homo sapiens
tgcttaaatttagat

SEQ ID NO: 270569 - DNA, 15 bp, Homo sapiens
ttgcttaaatttaga

SEQ ID NO: 270570 - DNA, 15 bp, Homo sapiens
cttgcttaaatttag

SEQ ID NO: 270571 - DNA, 15 bp, Homo sapiens
acttgcttaaattta

SEQ ID NO: 270572 - DNA, 15 bp, Homo sapiens
gacttgcttaaattt

SEQ ID NO: 270573 - DNA, 15 bp, Homo sapiens
ggacttgcttaaatt

SEQ ID NO: 270574 - DNA, 15 bp, Homo sapiens
tggacttgcttaaat

SEQ ID NO: 270575 - DNA, 15 bp, Homo sapiens
atggacttgcttaaa

SEQ ID NO: 270576 - DNA, 15 bp, Homo sapiens
tatggacttgcttaa

SEQ ID NO: 270577 - DNA, 15 bp, Homo sapiens
gtatggacttgctta

SEQ ID NO: 270578 - DNA, 15 bp, Homo sapiens
cgtatggacttgctt

SEQ ID NO: 270579 - DNA, 15 bp, Homo sapiens
tcgtatggacttgct

SEQ ID NO: 270580 - DNA, 15 bp, Homo sapiens
ttcgtatggacttgc

SEQ ID NO: 270581 - DNA, 15 bp, Homo sapiens
attcgtatggacttg

SEQ ID NO: 270582 - DNA, 15 bp, Homo sapiens
cattcgtatggactt

SEQ ID NO: 270583 - DNA, 15 bp, Homo sapiens
gcattcgtatggact

SEQ ID NO: 270584 - DNA, 15 bp, Homo sapiens
tgcattcgtatggac

SEQ ID NO: 270585 - DNA, 15 bp, Homo sapiens
gtgcattcgtatgga

SEQ ID NO: 270586 - DNA, 15 bp, Homo sapiens
agtgcattcgtatgg

SEQ ID NO: 270587 - DNA, 15 bp, Homo sapiens
tagtgcattcgtatg

SEQ ID NO: 270588 - DNA, 15 bp, Homo sapiens
ctagtgcattcgtat

SEQ ID NO: 270589 - DNA, 15 bp, Homo sapiens
tctagtgcattcgta

SEQ ID NO: 270590 - DNA, 15 bp, Homo sapiens
atctagtgcattcgt

SEQ ID NO: 270591 - DNA, 15 bp, Homo sapiens
gatctagtgcattcg

SEQ ID NO: 270592 - DNA, 15 bp, Homo sapiens
agatctagtgcattc

SEQ ID NO: 270593 - DNA, 15 bp, Homo sapiens
aagatctagtgcatt

SEQ ID NO: 270594 - DNA, 15 bp, Homo sapiens
caagatctagtgcat

SEQ ID NO: 270595 - DNA, 15 bp, Homo sapiens
tcaagatctagtgca

SEQ ID NO: 270596 - DNA, 15 bp, Homo sapiens
ttcaagatctagtgc

SEQ ID NO: 270597 - DNA, 15 bp, Homo sapiens
cttcaagatctagtg

SEQ ID NO: 270598 - DNA, 15 bp, Homo sapiens
ccttcaagatctagt

SEQ ID NO: 270599 - DNA, 15 bp, Homo sapiens
cccttcaagatctag

SEQ ID NO: 270600 - DNA, 15 bp, Homo sapiens
tcccttcaagatcta

SEQ ID NO: 270601 - DNA, 15 bp, Homo sapiens
ttcccttcaagatct

SEQ ID NO: 270602 - DNA, 15 bp, Homo sapiens
cttcccttcaagatc

SEQ ID NO: 270603 - DNA, 15 bp, Homo sapiens
acttcccttcaagat

SEQ ID NO: 270604 - DNA, 15 bp, Homo sapiens
tacttcccttcaaga

SEQ ID NO: 270605 - DNA, 15 bp, Homo sapiens
atacttcccttcaag

SEQ ID NO: 270606 - DNA, 15 bp, Homo sapiens
aatacttcccttcaa

SEQ ID NO: 270607 - DNA, 15 bp, Homo sapiens
aaatacttcccttca

SEQ ID NO: 270608 - DNA, 15 bp, Homo sapiens
taaatacttcccttc

SEQ ID NO: 270609 - DNA, 15 bp, Homo sapiens
ataaatacttccctt

SEQ ID NO: 270610 - DNA, 15 bp, Homo sapiens
aataaatacttccct

SEQ ID NO: 270611 - DNA, 15 bp, Homo sapiens
caataaatacttccc

SEQ ID NO: 270612 - DNA, 15 bp, Homo sapiens
acaataaatacttcc

SEQ ID NO: 270613 - DNA, 15 bp, Homo sapiens
tacaataaatacttc

SEQ ID NO: 270614 - DNA, 15 bp, Homo sapiens
atacaataaatactt

SEQ ID NO: 270615 - DNA, 15 bp, Homo sapiens
aatacaataaatact

SEQ ID NO: 270616 - DNA, 15 bp, Homo sapiens
taatacaataaatac

SEQ ID NO: 270617 - DNA, 15 bp, Homo sapiens
gtaatacaataaata

SEQ ID NO: 270618 - DNA, 15 bp, Homo sapiens
tgtaatacaataaat

SEQ ID NO: 270619 - DNA, 15 bp, Homo sapiens
ttgtaatacaataaa

SEQ ID NO: 270620 - DNA, 15 bp, Homo sapiens
gttgtaatacaataa

SEQ ID NO: 270621 - DNA, 15 bp, Homo sapiens
tgttgtaatacaata

SEQ ID NO: 270622 - DNA, 15 bp, Homo sapiens
atgttgtaatacaat

SEQ ID NO: 270623 - DNA, 15 bp, Homo sapiens
gatgttgtaatacaa

SEQ ID NO: 270624 - DNA, 15 bp, Homo sapiens
agatgttgtaataca

SEQ ID NO: 270625 - DNA, 15 bp, Homo sapiens
aagatgttgtaatac

SEQ ID NO: 270626 - DNA, 15 bp, Homo sapiens
taagatgttgtaata

SEQ ID NO: 270627 - DNA, 15 bp, Homo sapiens
gtaagatgttgtaat

SEQ ID NO: 270628 - DNA, 15 bp, Homo sapiens
agtaagatgttgtaa

SEQ ID NO: 270629 - DNA, 15 bp, Homo sapiens
aagtaagatgttgta

SEQ ID NO: 270630 - DNA, 15 bp, Homo sapiens
aaagtaagatgttgt

SEQ ID NO: 270631 - DNA, 15 bp, Homo sapiens
aaaagtaagatgttg

SEQ ID NO: 270632 - DNA, 15 bp, Homo sapiens
gaaaagtaagatgtt

SEQ ID NO: 270633 - DNA, 15 bp, Homo sapiens
agaaaagtaagatgt

SEQ ID NO: 270634 - DNA, 15 bp, Homo sapiens
aagaaaagtaagatg

SEQ ID NO: 270635 - DNA, 15 bp, Homo sapiens
caagaaaagtaagat

SEQ ID NO: 270636 - DNA, 15 bp, Homo sapiens
tcaagaaaagtaaga

SEQ ID NO: 270637 - DNA, 15 bp, Homo sapiens
atcaagaaaagtaag

SEQ ID NO: 270638 - DNA, 15 bp, Homo sapiens
aatcaagaaaagtaa

SEQ ID NO: 270639 - DNA, 15 bp, Homo sapiens
aaatcaagaaaagta

SEQ ID NO: 270640 - DNA, 15 bp, Homo sapiens
aaaatcaagaaaagt

SEQ ID NO: 270641 - DNA, 15 bp, Homo sapiens
aaaaatcaagaaaag

SEQ ID NO: 270642 - DNA, 15 bp, Homo sapiens
gaaaaatcaagaaaa

SEQ ID NO: 270643 - DNA, 15 bp, Homo sapiens
agaaaaatcaagaaa

SEQ ID NO: 270644 - DNA, 15 bp, Homo sapiens
tagaaaaatcaagaa

SEQ ID NO: 270645 - DNA, 15 bp, Homo sapiens
gtagaaaaatcaaga

SEQ ID NO: 270646 - DNA, 15 bp, Homo sapiens
agtagaaaaatcaag

SEQ ID NO: 270647 - DNA, 15 bp, Homo sapiens
aagtagaaaaatcaa

SEQ ID NO: 270648 - DNA, 15 bp, Homo sapiens
aaagtagaaaaatca

SEQ ID NO: 270649 - DNA, 15 bp, Homo sapiens
taaagtagaaaaatc

SEQ ID NO: 270650 - DNA, 15 bp, Homo sapiens
ataaagtagaaaaat

SEQ ID NO: 270651 - DNA, 15 bp, Homo sapiens
cataaagtagaaaaa

SEQ ID NO: 270652 - DNA, 15 bp, Homo sapiens
ccataaagtagaaaa

SEQ ID NO: 270653 - DNA, 15 bp, Homo sapiens
accataaagtagaaa

SEQ ID NO: 270654 - DNA, 15 bp, Homo sapiens
aaccataaagtagaa

SEQ ID NO: 270655 - DNA, 15 bp, Homo sapiens
taaccataaagtaga

SEQ ID NO: 270656 - DNA, 15 bp, Homo sapiens
ttaaccataaagtag

SEQ ID NO: 270657 - DNA, 15 bp, Homo sapiens
tttaaccataaagta

SEQ ID NO: 270658 - DNA, 15 bp, Homo sapiens
atttaaccataaagt

SEQ ID NO: 270659 - DNA, 15 bp, Homo sapiens
tatttaaccataaag

SEQ ID NO: 270660 - DNA, 15 bp, Homo sapiens
ctatttaaccataaa

SEQ ID NO: 270661 - DNA, 15 bp, Homo sapiens
gctatttaaccataa

SEQ ID NO: 270662 - DNA, 15 bp, Homo sapiens
agctatttaaccata

SEQ ID NO: 270663 - DNA, 15 bp, Homo sapiens
tagctatttaaccat

SEQ ID NO: 270664 - DNA, 15 bp, Homo sapiens
atagctatttaacca

SEQ ID NO: 270665 - DNA, 15 bp, Homo sapiens
catagctatttaacc

SEQ ID NO: 270666 - DNA, 15 bp, Homo sapiens
tcatagctatttaac

SEQ ID NO: 270667 - DNA, 15 bp, Homo sapiens
atcatagctatttaa

SEQ ID NO: 270668 - DNA, 15 bp, Homo sapiens
aatcatagctattta

SEQ ID NO: 270669 - DNA, 15 bp, Homo sapiens
caatcatagctattt

SEQ ID NO: 270670 - DNA, 15 bp, Homo sapiens
tcaatcatagctatt

SEQ ID NO: 270671 - DNA, 15 bp, Homo sapiens
ttcaatcatagctat

SEQ ID NO: 270672 - DNA, 15 bp, Homo sapiens
tttcaatcatagcta

SEQ ID NO: 270673 - DNA, 15 bp, Homo sapiens
ctttcaatcatagct

SEQ ID NO: 270674 - DNA, 15 bp, Homo sapiens
tctttcaatcatagc

SEQ ID NO: 270675 - DNA, 15 bp, Homo sapiens
ctctttcaatcatag

SEQ ID NO: 270676 - DNA, 15 bp, Homo sapiens
actctttcaatcata

SEQ ID NO: 270677 - DNA, 15 bp, Homo sapiens
cactctttcaatcat

SEQ ID NO: 270678 - DNA, 15 bp, Homo sapiens
acactctttcaatca

SEQ ID NO: 270679 - DNA, 15 bp, Homo sapiens
tacactctttcaatc

SEQ ID NO: 270680 - DNA, 15 bp, Homo sapiens
ttacactctttcaat

SEQ ID NO: 270681 - DNA, 15 bp, Homo sapiens
attacactctttcaa

SEQ ID NO: 270682 - DNA, 15 bp, Homo sapiens
aattacactctttca

SEQ ID NO: 270683 - DNA, 15 bp, Homo sapiens
caattacactctttc

SEQ ID NO: 270684 - DNA, 15 bp, Homo sapiens
acaattacactcttt

SEQ ID NO: 270685 - DNA, 15 bp, Homo sapiens
gacaattacactctt

SEQ ID NO: 270686 - DNA, 15 bp, Homo sapiens
tgacaattacactct

SEQ ID NO: 270687 - DNA, 15 bp, Homo sapiens
atgacaattacactc

SEQ ID NO: 270688 - DNA, 15 bp, Homo sapiens
aatgacaattacact

SEQ ID NO: 270689 - DNA, 15 bp, Homo sapiens
taatgacaattacac

SEQ ID NO: 270690 - DNA, 15 bp, Homo sapiens
ataatgacaattaca

SEQ ID NO: 270691 - DNA, 15 bp, Homo sapiens
aataatgacaattac

SEQ ID NO: 270692 - DNA, 15 bp, Homo sapiens
caataatgacaatta

SEQ ID NO: 270693 - DNA, 15 bp, Homo sapiens
acaataatgacaatt

SEQ ID NO: 270694 - DNA, 15 bp, Homo sapiens
gacaataatgacaat

SEQ ID NO: 270695 - DNA, 15 bp, Homo sapiens
tgacaataatgacaa

SEQ ID NO: 270696 - DNA, 15 bp, Homo sapiens
ctgacaataatgaca

SEQ ID NO: 270697 - DNA, 15 bp, Homo sapiens
gctgacaataatgac

SEQ ID NO: 270698 - DNA, 15 bp, Homo sapiens
tgctgacaataatga

SEQ ID NO: 270699 - DNA, 15 bp, Homo sapiens
gtgctgacaataatg

SEQ ID NO: 270700 - DNA, 15 bp, Homo sapiens
agtgctgacaataat

SEQ ID NO: 270701 - DNA, 15 bp, Homo sapiens
cagtgctgacaataa

SEQ ID NO: 270702 - DNA, 15 bp, Homo sapiens
ccagtgctgacaata

SEQ ID NO: 270703 - DNA, 15 bp, Homo sapiens
accagtgctgacaat

SEQ ID NO: 270704 - DNA, 15 bp, Homo sapiens
aaccagtgctgacaa

SEQ ID NO: 270705 - DNA, 15 bp, Homo sapiens
gaaccagtgctgaca

SEQ ID NO: 270706 - DNA, 15 bp, Homo sapiens
agaaccagtgctgac

SEQ ID NO: 270707 - DNA, 15 bp, Homo sapiens
tagaaccagtgctga

SEQ ID NO: 270708 - DNA, 15 bp, Homo sapiens
gtagaaccagtgctg

SEQ ID NO: 270709 - DNA, 15 bp, Homo sapiens
agtagaaccagtgct

SEQ ID NO: 270710 - DNA, 15 bp, Homo sapiens
aagtagaaccagtgc

SEQ ID NO: 270711 - DNA, 15 bp, Homo sapiens
aaagtagaaccagtg

SEQ ID NO: 270712 - DNA, 15 bp, Homo sapiens
caaagtagaaccagt

SEQ ID NO: 270713 - DNA, 15 bp, Homo sapiens
tcaaagtagaaccag

SEQ ID NO: 270714 - DNA, 15 bp, Homo sapiens
ctcaaagtagaacca

SEQ ID NO: 270715 - DNA, 15 bp, Homo sapiens
tctcaaagtagaacc

SEQ ID NO: 270716 - DNA, 15 bp, Homo sapiens
gtctcaaagtagaac

SEQ ID NO: 270717 - DNA, 15 bp, Homo sapiens
tgtctcaaagtagaa

SEQ ID NO: 270718 - DNA, 15 bp, Homo sapiens
ttgtctcaaagtaga

SEQ ID NO: 270719 - DNA, 15 bp, Homo sapiens
cttgtctcaaagtag

SEQ ID NO: 270720 - DNA, 15 bp, Homo sapiens
acttgtctcaaagta

SEQ ID NO: 270721 - DNA, 15 bp, Homo sapiens
aacttgtctcaaagt

SEQ ID NO: 270722 - DNA, 15 bp, Homo sapiens
gaacttgtctcaaag

SEQ ID NO: 270723 - DNA, 15 bp, Homo sapiens
tgaacttgtctcaaa

SEQ ID NO: 270724 - DNA, 15 bp, Homo sapiens
atgaacttgtctcaa

SEQ ID NO: 270725 - DNA, 15 bp, Homo sapiens
aatgaacttgtctca

SEQ ID NO: 270726 - DNA, 15 bp, Homo sapiens
caatgaacttgtctc

SEQ ID NO: 270727 - DNA, 15 bp, Homo sapiens
gcaatgaacttgtct

SEQ ID NO: 270728 - DNA, 15 bp, Homo sapiens
tgcaatgaacttgtc

SEQ ID NO: 270729 - DNA, 15 bp, Homo sapiens
ctgcaatgaacttgt

SEQ ID NO: 270730 - DNA, 15 bp, Homo sapiens
tctgcaatgaacttg

SEQ ID NO: 270731 - DNA, 15 bp, Homo sapiens
ctctgcaatgaactt

SEQ ID NO: 270732 - DNA, 15 bp, Homo sapiens
cctctgcaatgaact

SEQ ID NO: 270733 - DNA, 15 bp, Homo sapiens
ccctctgcaatgaac

SEQ ID NO: 270734 - DNA, 15 bp, Homo sapiens
tccctctgcaatgaa

SEQ ID NO: 270735 - DNA, 15 bp, Homo sapiens
ttccctctgcaatga

SEQ ID NO: 270736 - DNA, 15 bp, Homo sapiens
attccctctgcaatg

SEQ ID NO: 270737 - DNA, 15 bp, Homo sapiens
cattccctctgcaat

SEQ ID NO: 270738 - DNA, 15 bp, Homo sapiens
ccattccctctgcaa

SEQ ID NO: 270739 - DNA, 15 bp, Homo sapiens
cccattccctctgca

SEQ ID NO: 270740 - DNA, 15 bp, Homo sapiens
tcccattccctctgc

SEQ ID NO: 270741 - DNA, 15 bp, Homo sapiens
gtcccattccctctg

SEQ ID NO: 270742 - DNA, 15 bp, Homo sapiens
agtcccattccctct

SEQ ID NO: 270743 - DNA, 15 bp, Homo sapiens
aagtcccattccctc

SEQ ID NO: 270744 - DNA, 15 bp, Homo sapiens
caagtcccattccct

SEQ ID NO: 270745 - DNA, 15 bp, Homo sapiens
acaagtcccattccc

SEQ ID NO: 270746 - DNA, 15 bp, Homo sapiens
aacaagtcccattcc

SEQ ID NO: 270747 - DNA, 15 bp, Homo sapiens
aaacaagtcccattc

SEQ ID NO: 270748 - DNA, 15 bp, Homo sapiens
gaaacaagtcccatt

SEQ ID NO: 270749 - DNA, 15 bp, Homo sapiens
agaaacaagtcccat

SEQ ID NO: 270750 - DNA, 15 bp, Homo sapiens
cagaaacaagtccca

SEQ ID NO: 270751 - DNA, 15 bp, Homo sapiens
acagaaacaagtccc

SEQ ID NO: 270752 - DNA, 15 bp, Homo sapiens
aacagaaacaagtcc

SEQ ID NO: 270753 - DNA, 15 bp, Homo sapiens
aaacagaaacaagtc

SEQ ID NO: 270754 - DNA, 15 bp, Homo sapiens
aaaacagaaacaagt

SEQ ID NO: 270755 - DNA, 15 bp, Homo sapiens
aaaaacagaaacaag

SEQ ID NO: 270756 - DNA, 15 bp, Homo sapiens
gaaaaacagaaacaa

SEQ ID NO: 270757 - DNA, 15 bp, Homo sapiens
tgaaaaacagaaaca

SEQ ID NO: 270758 - DNA, 15 bp, Homo sapiens
gtgaaaaacagaaac

SEQ ID NO: 270759 - DNA, 15 bp, Homo sapiens
agtgaaaaacagaaa

SEQ ID NO: 270760 - DNA, 15 bp, Homo sapiens
tagtgaaaaacagaa

SEQ ID NO: 270761 - DNA, 15 bp, Homo sapiens
atagtgaaaaacaga

SEQ ID NO: 270762 - DNA, 15 bp, Homo sapiens
aatagtgaaaaacag

SEQ ID NO: 270763 - DNA, 15 bp, Homo sapiens
aaatagtgaaaaaca

SEQ ID NO: 270764 - DNA, 15 bp, Homo sapiens
aaaatagtgaaaaac

SEQ ID NO: 270765 - DNA, 15 bp, Homo sapiens
gaaaatagtgaaaaa

SEQ ID NO: 270766 - DNA, 15 bp, Homo sapiens
agaaaatagtgaaaa

SEQ ID NO: 270767 - DNA, 15 bp, Homo sapiens
gagaaaatagtgaaa

SEQ ID NO: 270768 - DNA, 15 bp, Homo sapiens
agagaaaatagtgaa

SEQ ID NO: 270769 - DNA, 15 bp, Homo sapiens
gagagaaaatagtga

SEQ ID NO: 270770 - DNA, 15 bp, Homo sapiens
ggagagaaaatagtg

SEQ ID NO: 270771 - DNA, 15 bp, Homo sapiens
gggagagaaaatagt

SEQ ID NO: 270772 - DNA, 15 bp, Homo sapiens
tgggagagaaaatag

SEQ ID NO: 270773 - DNA, 15 bp, Homo sapiens
atgggagagaaaata

SEQ ID NO: 270774 - DNA, 15 bp, Homo sapiens
aatgggagagaaaat

SEQ ID NO: 270775 - DNA, 15 bp, Homo sapiens
gaatgggagagaaaa

SEQ ID NO: 270776 - DNA, 15 bp, Homo sapiens
agaatgggagagaaa

SEQ ID NO: 270777 - DNA, 15 bp, Homo sapiens
aagaatgggagagaa

SEQ ID NO: 270778 - DNA, 15 bp, Homo sapiens
caagaatgggagaga

SEQ ID NO: 270779 - DNA, 15 bp, Homo sapiens
acaagaatgggagag

SEQ ID NO: 270780 - DNA, 15 bp, Homo sapiens
gacaagaatgggaga

SEQ ID NO: 270781 - DNA, 15 bp, Homo sapiens
agacaagaatgggag

SEQ ID NO: 270782 - DNA, 15 bp, Homo sapiens
tagacaagaatggga

SEQ ID NO: 270783 - DNA, 15 bp, Homo sapiens
atagacaagaatggg

SEQ ID NO: 270784 - DNA, 15 bp, Homo sapiens
gatagacaagaatgg

SEQ ID NO: 270785 - DNA, 15 bp, Homo sapiens
tgatagacaagaatg

SEQ ID NO: 270786 - DNA, 15 bp, Homo sapiens
gtgatagacaagaat

SEQ ID NO: 270787 - DNA, 15 bp, Homo sapiens
ggtgatagacaagaa

SEQ ID NO: 270788 - DNA, 15 bp, Homo sapiens
tggtgatagacaaga

SEQ ID NO: 270789 - DNA, 15 bp, Homo sapiens
ttggtgatagacaag

SEQ ID NO: 270790 - DNA, 15 bp, Homo sapiens
tttggtgatagacaa

SEQ ID NO: 270791 - DNA, 15 bp, Homo sapiens
atttggtgatagaca

SEQ ID NO: 270792 - DNA, 15 bp, Homo sapiens
gatttggtgatagac

SEQ ID NO: 270793 - DNA, 15 bp, Homo sapiens
ggatttggtgataga

SEQ ID NO: 270794 - DNA, 15 bp, Homo sapiens
aggatttggtgatag

SEQ ID NO: 270795 - DNA, 15 bp, Homo sapiens
aaggatttggtgata

SEQ ID NO: 270796 - DNA, 15 bp, Homo sapiens
aaaggatttggtgat

SEQ ID NO: 270797 - DNA, 15 bp, Homo sapiens
gaaaggatttggtga

SEQ ID NO: 270798 - DNA, 15 bp, Homo sapiens
tgaaaggatttggtg

SEQ ID NO: 270799 - DNA, 15 bp, Homo sapiens
gtgaaaggatttggt

SEQ ID NO: 270800 - DNA, 15 bp, Homo sapiens
ggtgaaaggatttgg

SEQ ID NO: 270801 - DNA, 15 bp, Homo sapiens
gggtgaaaggatttg

SEQ ID NO: 270802 - DNA, 15 bp, Homo sapiens
agggtgaaaggattt

SEQ ID NO: 270803 - DNA, 15 bp, Homo sapiens
gagggtgaaaggatt

SEQ ID NO: 270804 - DNA, 15 bp, Homo sapiens
tgagggtgaaaggat

SEQ ID NO: 270805 - DNA, 15 bp, Homo sapiens
gtgagggtgaaagga

SEQ ID NO: 270806 - DNA, 15 bp, Homo sapiens
ggtgagggtgaaagg

SEQ ID NO: 270807 - DNA, 15 bp, Homo sapiens
gggtgagggtgaaag

SEQ ID NO: 270808 - DNA, 15 bp, Homo sapiens
tgggtgagggtgaaa

SEQ ID NO: 270809 - DNA, 15 bp, Homo sapiens
atgggtgagggtgaa

SEQ ID NO: 270810 - DNA, 15 bp, Homo sapiens
aatgggtgagggtga

SEQ ID NO: 270811 - DNA, 15 bp, Homo sapiens
aaatgggtgagggtg

SEQ ID NO: 270812 - DNA, 15 bp, Homo sapiens
gaaatgggtgagggt

SEQ ID NO: 270813 - DNA, 15 bp, Homo sapiens
agaaatgggtgaggg

SEQ ID NO: 270814 - DNA, 15 bp, Homo sapiens
aagaaatgggtgagg

SEQ ID NO: 270815 - DNA, 15 bp, Homo sapiens
aaagaaatgggtgag

SEQ ID NO: 270816 - DNA, 15 bp, Homo sapiens
gaaagaaatgggtga

SEQ ID NO: 270817 - DNA, 15 bp, Homo sapiens
ggaaagaaatgggtg

SEQ ID NO: 270818 - DNA, 15 bp, Homo sapiens
tggaaagaaatgggt

SEQ ID NO: 270819 - DNA, 15 bp, Homo sapiens
gtggaaagaaatggg

SEQ ID NO: 270820 - DNA, 15 bp, Homo sapiens
agtggaaagaaatgg

SEQ ID NO: 270821 - DNA, 15 bp, Homo sapiens
gagtggaaagaaatg

SEQ ID NO: 270822 - DNA, 15 bp, Homo sapiens
cgagtggaaagaaat

SEQ ID NO: 270823 - DNA, 15 bp, Homo sapiens
ccgagtggaaagaaa

SEQ ID NO: 270824 - DNA, 15 bp, Homo sapiens
accgagtggaaagaa

SEQ ID NO: 270825 - DNA, 15 bp, Homo sapiens
taccgagtggaaaga

SEQ ID NO: 270826 - DNA, 15 bp, Homo sapiens
ataccgagtggaaag

SEQ ID NO: 270827 - DNA, 15 bp, Homo sapiens
tataccgagtggaaa

SEQ ID NO: 270828 - DNA, 15 bp, Homo sapiens
gtataccgagtggaa

SEQ ID NO: 270829 - DNA, 15 bp, Homo sapiens
tgtataccgagtgga

SEQ ID NO: 270830 - DNA, 15 bp, Homo sapiens
gtgtataccgagtgg

SEQ ID NO: 270831 - DNA, 15 bp, Homo sapiens
agtgtataccgagtg

SEQ ID NO: 270832 - DNA, 15 bp, Homo sapiens
tagtgtataccgagt

SEQ ID NO: 270833 - DNA, 15 bp, Homo sapiens
ttagtgtataccgag

SEQ ID NO: 270834 - DNA, 15 bp, Homo sapiens
gttagtgtataccga

SEQ ID NO: 270835 - DNA, 15 bp, Homo sapiens
tgttagtgtataccg

SEQ ID NO: 270836 - DNA, 15 bp, Homo sapiens
ttgttagtgtatacc

SEQ ID NO: 270837 - DNA, 15 bp, Homo sapiens
attgttagtgtatac

SEQ ID NO: 270838 - DNA, 15 bp, Homo sapiens
aattgttagtgtata

SEQ ID NO: 270839 - DNA, 15 bp, Homo sapiens
gaattgttagtgtat

SEQ ID NO: 270840 - DNA, 15 bp, Homo sapiens
tgaattgttagtgta

SEQ ID NO: 270841 - DNA, 15 bp, Homo sapiens
gtgaattgttagtgt

SEQ ID NO: 270842 - DNA, 15 bp, Homo sapiens
cgtgaattgttagtg

SEQ ID NO: 270843 - DNA, 15 bp, Homo sapiens
ccgtgaattgttagt

SEQ ID NO: 270844 - DNA, 15 bp, Homo sapiens
gccgtgaattgttag

SEQ ID NO: 270845 - DNA, 15 bp, Homo sapiens
tgccgtgaattgtta

SEQ ID NO: 270846 - DNA, 15 bp, Homo sapiens
ctgccgtgaattgtt

SEQ ID NO: 270847 - DNA, 15 bp, Homo sapiens
tctgccgtgaattgt

SEQ ID NO: 270848 - DNA, 15 bp, Homo sapiens
ttctgccgtgaattg

SEQ ID NO: 270849 - DNA, 15 bp, Homo sapiens
tttctgccgtgaatt

SEQ ID NO: 270850 - DNA, 15 bp, Homo sapiens
ttttctgccgtgaat

SEQ ID NO: 270851 - DNA, 15 bp, Homo sapiens
cttttctgccgtgaa

SEQ ID NO: 270852 - DNA, 15 bp, Homo sapiens
tcttttctgccgtga

SEQ ID NO: 270853 - DNA, 15 bp, Homo sapiens
atcttttctgccgtg

SEQ ID NO: 270854 - DNA, 15 bp, Homo sapiens
aatcttttctgccgt

SEQ ID NO: 270855 - DNA, 15 bp, Homo sapiens
caatcttttctgccg

SEQ ID NO: 270856 - DNA, 15 bp, Homo sapiens
tcaatcttttctgcc

SEQ ID NO: 270857 - DNA, 15 bp, Homo sapiens
ttcaatcttttctgc

SEQ ID NO: 270858 - DNA, 15 bp, Homo sapiens
cttcaatcttttctg

SEQ ID NO: 270859 - DNA, 15 bp, Homo sapiens
acttcaatcttttct

SEQ ID NO: 270860 - DNA, 15 bp, Homo sapiens
cacttcaatcttttc

SEQ ID NO: 270861 - DNA, 15 bp, Homo sapiens
ccacttcaatctttt

SEQ ID NO: 270862 - DNA, 15 bp, Homo sapiens
cccacttcaatcttt

SEQ ID NO: 270863 - DNA, 15 bp, Homo sapiens
tcccacttcaatctt

SEQ ID NO: 270864 - DNA, 15 bp, Homo sapiens
atcccacttcaatct

SEQ ID NO: 270865 - DNA, 15 bp, Homo sapiens
aatcccacttcaatc

SEQ ID NO: 270866 - DNA, 15 bp, Homo sapiens
aaatcccacttcaat

SEQ ID NO: 270867 - DNA, 15 bp, Homo sapiens
taaatcccacttcaa

SEQ ID NO: 270868 - DNA, 15 bp, Homo sapiens
ctaaatcccacttca

SEQ ID NO: 270869 - DNA, 15 bp, Homo sapiens
cctaaatcccacttc

SEQ ID NO: 270870 - DNA, 15 bp, Homo sapiens
tcctaaatcccactt

SEQ ID NO: 270871 - DNA, 15 bp, Homo sapiens
ttcctaaatcccact

SEQ ID NO: 270872 - DNA, 15 bp, Homo sapiens
tttcctaaatcccac

SEQ ID NO: 270873 - DNA, 15 bp, Homo sapiens
atttcctaaatccca

SEQ ID NO: 270874 - DNA, 15 bp, Homo sapiens
catttcctaaatccc

SEQ ID NO: 270875 - DNA, 15 bp, Homo sapiens
ccatttcctaaatcc

SEQ ID NO: 270876 - DNA, 15 bp, Homo sapiens
gccatttcctaaatc

SEQ ID NO: 270877 - DNA, 15 bp, Homo sapiens
ggccatttcctaaat

SEQ ID NO: 270878 - DNA, 15 bp, Homo sapiens
gggccatttcctaaa

SEQ ID NO: 270879 - DNA, 15 bp, Homo sapiens
ggggccatttcctaa

SEQ ID NO: 270880 - DNA, 15 bp, Homo sapiens
aggggccatttccta

SEQ ID NO: 270881 - DNA, 15 bp, Homo sapiens
caggggccatttcct

SEQ ID NO: 270882 - DNA, 15 bp, Homo sapiens
ccaggggccatttcc

SEQ ID NO: 270883 - DNA, 15 bp, Homo sapiens
tccaggggccatttc

SEQ ID NO: 270884 - DNA, 15 bp, Homo sapiens
ttccaggggccattt

SEQ ID NO: 270885 - DNA, 15 bp, Homo sapiens
cttccaggggccatt

SEQ ID NO: 270886 - DNA, 15 bp, Homo sapiens
ccttccaggggccat

SEQ ID NO: 270887 - DNA, 15 bp, Homo sapiens
gccttccaggggcca

SEQ ID NO: 270888 - DNA, 15 bp, Homo sapiens
agccttccaggggcc

SEQ ID NO: 270889 - DNA, 15 bp, Homo sapiens
tagccttccaggggc

SEQ ID NO: 270890 - DNA, 15 bp, Homo sapiens
atagccttccagggg

SEQ ID NO: 270891 - DNA, 15 bp, Homo sapiens
aatagccttccaggg

SEQ ID NO: 270892 - DNA, 15 bp, Homo sapiens
taatagccttccagg

SEQ ID NO: 270893 - DNA, 15 bp, Homo sapiens
ttaatagccttccag

SEQ ID NO: 270894 - DNA, 15 bp, Homo sapiens
tttaatagccttcca

SEQ ID NO: 270895 - DNA, 15 bp, Homo sapiens
ttttaatagccttcc

SEQ ID NO: 270896 - DNA, 15 bp, Homo sapiens
tttttaatagccttc

SEQ ID NO: 270897 - DNA, 15 bp, Homo sapiens
atttttaatagcctt

SEQ ID NO: 270898 - DNA, 15 bp, Homo sapiens
aatttttaatagcct

SEQ ID NO: 270899 - DNA, 15 bp, Homo sapiens
aaatttttaatagcc

SEQ ID NO: 270900 - DNA, 15 bp, Homo sapiens
taaatttttaatagc

SEQ ID NO: 270901 - DNA, 15 bp, Homo sapiens
ataaatttttaatag

SEQ ID NO: 270902 - DNA, 15 bp, Homo sapiens
tataaatttttaata

SEQ ID NO: 270903 - DNA, 15 bp, Homo sapiens
atataaatttttaat

SEQ ID NO: 270904 - DNA, 15 bp, Homo sapiens
tatataaatttttaa

SEQ ID NO: 270905 - DNA, 15 bp, Homo sapiens
atatataaattttta

SEQ ID NO: 270906 - DNA, 15 bp, Homo sapiens
aatatataaattttt

SEQ ID NO: 270907 - DNA, 15 bp, Homo sapiens
aaatatataaatttt

SEQ ID NO: 270908 - DNA, 15 bp, Homo sapiens
taaatatataaattt

SEQ ID NO: 270909 - DNA, 15 bp, Homo sapiens
ttaaatatataaatt

SEQ ID NO: 270910 - DNA, 15 bp, Homo sapiens
tttaaatatataaat

SEQ ID NO: 270911 - DNA, 15 bp, Homo sapiens
atttaaatatataaa

SEQ ID NO: 270912 - DNA, 15 bp, Homo sapiens
catttaaatatataa

SEQ ID NO: 270913 - DNA, 15 bp, Homo sapiens
ccatttaaatatata

SEQ ID NO: 270914 - DNA, 15 bp, Homo sapiens
tccatttaaatatat

SEQ ID NO: 270915 - DNA, 15 bp, Homo sapiens
gtccatttaaatata

SEQ ID NO: 270916 - DNA, 15 bp, Homo sapiens
agtccatttaaatat

SEQ ID NO: 270917 - DNA, 15 bp, Homo sapiens
cagtccatttaaata

SEQ ID NO: 270918 - DNA, 15 bp, Homo sapiens
acagtccatttaaat

SEQ ID NO: 270919 - DNA, 15 bp, Homo sapiens
gacagtccatttaaa

SEQ ID NO: 270920 - DNA, 15 bp, Homo sapiens
agacagtccatttaa

SEQ ID NO: 270921 - DNA, 15 bp, Homo sapiens
aagacagtccattta

SEQ ID NO: 270922 - DNA, 15 bp, Homo sapiens
taagacagtccattt

SEQ ID NO: 270923 - DNA, 15 bp, Homo sapiens
ataagacagtccatt

SEQ ID NO: 270924 - DNA, 15 bp, Homo sapiens
tataagacagtccat

SEQ ID NO: 270925 - DNA, 15 bp, Homo sapiens
ctataagacagtcca

SEQ ID NO: 270926 - DNA, 15 bp, Homo sapiens
cctataagacagtcc

SEQ ID NO: 270927 - DNA, 15 bp, Homo sapiens
acctataagacagtc

SEQ ID NO: 270928 - DNA, 15 bp, Homo sapiens
gacctataagacagt

SEQ ID NO: 270929 - DNA, 15 bp, Homo sapiens
tgacctataagacag

SEQ ID NO: 270930 - DNA, 15 bp, Homo sapiens
ctgacctataagaca

SEQ ID NO: 270931 - DNA, 15 bp, Homo sapiens
actgacctataagac

SEQ ID NO: 270932 - DNA, 15 bp, Homo sapiens
aactgacctataaga

SEQ ID NO: 270933 - DNA, 15 bp, Homo sapiens
taactgacctataag

SEQ ID NO: 270934 - DNA, 15 bp, Homo sapiens
ttaactgacctataa

SEQ ID NO: 270935 - DNA, 15 bp, Homo sapiens
tttaactgacctata

SEQ ID NO: 270936 - DNA, 15 bp, Homo sapiens
ttttaactgacctat

SEQ ID NO: 270937 - DNA, 15 bp, Homo sapiens
tttttaactgaccta

SEQ ID NO: 270938 - DNA, 15 bp, Homo sapiens
gtttttaactgacct

SEQ ID NO: 270939 - DNA, 15 bp, Homo sapiens
ggtttttaactgacc

SEQ ID NO: 270940 - DNA, 15 bp, Homo sapiens
tggtttttaactgac

SEQ ID NO: 270941 - DNA, 15 bp, Homo sapiens
atggtttttaactga

SEQ ID NO: 270942 - DNA, 15 bp, Homo sapiens
tatggtttttaactg

SEQ ID NO: 270943 - DNA, 15 bp, Homo sapiens
atatggtttttaact

SEQ ID NO: 270944 - DNA, 15 bp, Homo sapiens
aatatggtttttaac

SEQ ID NO: 270945 - DNA, 15 bp, Homo sapiens
gaatatggtttttaa

SEQ ID NO: 270946 - DNA, 15 bp, Homo sapiens
cgaatatggttttta

SEQ ID NO: 270947 - DNA, 15 bp, Homo sapiens
acgaatatggttttt

SEQ ID NO: 270948 - DNA, 15 bp, Homo sapiens
aacgaatatggtttt

SEQ ID NO: 270949 - DNA, 15 bp, Homo sapiens
taacgaatatggttt

SEQ ID NO: 270950 - DNA, 15 bp, Homo sapiens
ttaacgaatatggtt

SEQ ID NO: 270951 - DNA, 15 bp, Homo sapiens
tttaacgaatatggt

SEQ ID NO: 270952 - DNA, 15 bp, Homo sapiens
ttttaacgaatatgg

SEQ ID NO: 270953 - DNA, 15 bp, Homo sapiens
tttttaacgaatatg

SEQ ID NO: 270954 - DNA, 15 bp, Homo sapiens
ttttttaacgaatat

SEQ ID NO: 270955 - DNA, 15 bp, Homo sapiens
gttttttaacgaata

SEQ ID NO: 270956 - DNA, 15 bp, Homo sapiens
ggttttttaacgaat

SEQ ID NO: 270957 - DNA, 15 bp, Homo sapiens
tggttttttaacgaa

SEQ ID NO: 270958 - DNA, 15 bp, Homo sapiens
ttggttttttaacga

SEQ ID NO: 270959 - DNA, 15 bp, Homo sapiens
tttggttttttaacg

SEQ ID NO: 270960 - DNA, 15 bp, Homo sapiens
ttttggttttttaac

SEQ ID NO: 270961 - DNA, 15 bp, Homo sapiens
attttggttttttaa

SEQ ID NO: 270962 - DNA, 15 bp, Homo sapiens
tattttggtttttta

SEQ ID NO: 270963 - DNA, 15 bp, Homo sapiens
ttattttggtttttt

SEQ ID NO: 270964 - DNA, 15 bp, Homo sapiens
gttattttggttttt

SEQ ID NO: 270965 - DNA, 15 bp, Homo sapiens
tgttattttggtttt

SEQ ID NO: 270966 - DNA, 15 bp, Homo sapiens
ttgttattttggttt

SEQ ID NO: 270967 - DNA, 15 bp, Homo sapiens
gttgttattttggtt

SEQ ID NO: 270968 - DNA, 15 bp, Homo sapiens
tgttgttattttggt

SEQ ID NO: 270969 - DNA, 15 bp, Homo sapiens
ttgttgttattttgg

SEQ ID NO: 270970 - DNA, 15 bp, Homo sapiens
gttgttgttattttg

SEQ ID NO: 270971 - DNA, 15 bp, Homo sapiens
tgttgttgttatttt

SEQ ID NO: 270972 - DNA, 15 bp, Homo sapiens
ttgttgttgttattt

SEQ ID NO: 270973 - DNA, 15 bp, Homo sapiens
tttgttgttgttatt

SEQ ID NO: 270974 - DNA, 15 bp, Homo sapiens
ttttgttgttgttat

SEQ ID NO: 270975 - DNA, 15 bp, Homo sapiens
tttttgttgttgtta

SEQ ID NO: 270976 - DNA, 15 bp, Homo sapiens
ttttttgttgttgtt

SEQ ID NO: 270977 - DNA, 15 bp, Homo sapiens
attttttgttgttgt

SEQ ID NO: 270978 - DNA, 15 bp, Homo sapiens
aattttttgttgttg

SEQ ID NO: 270979 - DNA, 15 bp, Homo sapiens
taattttttgttgtt

SEQ ID NO: 270980 - DNA, 15 bp, Homo sapiens
ttaattttttgttgt

SEQ ID NO: 270981 - DNA, 15 bp, Homo sapiens
tttaattttttgttg

SEQ ID NO: 270982 - DNA, 15 bp, Homo sapiens
ttttaattttttgtt

SEQ ID NO: 270983 - DNA, 15 bp, Homo sapiens
tttttaattttttgt

SEQ ID NO: 270984 - DNA, 15 bp, Homo sapiens
gtttttaattttttg

SEQ ID NO: 270985 - DNA, 15 bp, Homo sapiens
ggtttttaatttttt

SEQ ID NO: 270986 - DNA, 15 bp, Homo sapiens
tggtttttaattttt

SEQ ID NO: 270987 - DNA, 15 bp, Homo sapiens
gtggtttttaatttt

SEQ ID NO: 270988 - DNA, 15 bp, Homo sapiens
cgtggtttttaattt

SEQ ID NO: 270989 - DNA, 15 bp, Homo sapiens
acgtggtttttaatt

SEQ ID NO: 270990 - DNA, 15 bp, Homo sapiens
gacgtggtttttaat

SEQ ID NO: 270991 - DNA, 15 bp, Homo sapiens
agacgtggtttttaa

SEQ ID NO: 270992 - DNA, 15 bp, Homo sapiens
cagacgtggttttta

SEQ ID NO: 270993 - DNA, 15 bp, Homo sapiens
ccagacgtggttttt

SEQ ID NO: 270994 - DNA, 15 bp, Homo sapiens
cccagacgtggtttt

SEQ ID NO: 270995 - DNA, 15 bp, Homo sapiens
ccccagacgtggttt

SEQ ID NO: 270996 - DNA, 15 bp, Homo sapiens
gccccagacgtggtt

SEQ ID NO: 270997 - DNA, 15 bp, Homo sapiens
tgccccagacgtggt

SEQ ID NO: 270998 - DNA, 15 bp, Homo sapiens
atgccccagacgtgg

SEQ ID NO: 270999 - DNA, 15 bp, Homo sapiens
catgccccagacgtg

SEQ ID NO: 271000 - DNA, 15 bp, Homo sapiens
acatgccccagacgt

SEQ ID NO: 271001 - DNA, 15 bp, Homo sapiens
aacatgccccagacg

SEQ ID NO: 271002 - DNA, 15 bp, Homo sapiens
gaacatgccccagac

SEQ ID NO: 271003 - DNA, 15 bp, Homo sapiens
agaacatgccccaga

SEQ ID NO: 271004 - DNA, 15 bp, Homo sapiens
cagaacatgccccag

SEQ ID NO: 271005 - DNA, 15 bp, Homo sapiens
ccagaacatgcccca

SEQ ID NO: 271006 - DNA, 15 bp, Homo sapiens
cccagaacatgcccc

SEQ ID NO: 271007 - DNA, 15 bp, Homo sapiens
tcccagaacatgccc

SEQ ID NO: 271008 - DNA, 15 bp, Homo sapiens
ttcccagaacatgcc

SEQ ID NO: 271009 - DNA, 15 bp, Homo sapiens
tttcccagaacatgc

SEQ ID NO: 271010 - DNA, 15 bp, Homo sapiens
ttttcccagaacatg

SEQ ID NO: 271011 - DNA, 15 bp, Homo sapiens
cttttcccagaacat

SEQ ID NO: 271012 - DNA, 15 bp, Homo sapiens
tcttttcccagaaca

SEQ ID NO: 271013 - DNA, 15 bp, Homo sapiens
gtcttttcccagaac

SEQ ID NO: 271014 - DNA, 15 bp, Homo sapiens
tgtcttttcccagaa

SEQ ID NO: 271015 - DNA, 15 bp, Homo sapiens
atgtcttttcccaga

SEQ ID NO: 271016 - DNA, 15 bp, Homo sapiens
catgtcttttcccag

SEQ ID NO: 271017 - DNA, 15 bp, Homo sapiens
ccatgtcttttccca

SEQ ID NO: 271018 - DNA, 15 bp, Homo sapiens
gccatgtcttttccc

SEQ ID NO: 271019 - DNA, 15 bp, Homo sapiens
agccatgtcttttcc

SEQ ID NO: 271020 - DNA, 15 bp, Homo sapiens
aagccatgtcttttc

SEQ ID NO: 271021 - DNA, 15 bp, Homo sapiens
aaagccatgtctttt

SEQ ID NO: 271022 - DNA, 15 bp, Homo sapiens
taaagccatgtcttt

SEQ ID NO: 271023 - DNA, 15 bp, Homo sapiens
ctaaagccatgtctt

SEQ ID NO: 271024 - DNA, 15 bp, Homo sapiens
actaaagccatgtct

SEQ ID NO: 271025 - DNA, 15 bp, Homo sapiens
aactaaagccatgtc

SEQ ID NO: 271026 - DNA, 15 bp, Homo sapiens
aaactaaagccatgt

SEQ ID NO: 271027 - DNA, 15 bp, Homo sapiens
gaaactaaagccatg

SEQ ID NO: 271028 - DNA, 15 bp, Homo sapiens
agaaactaaagccat

SEQ ID NO: 271029 - DNA, 15 bp, Homo sapiens
cagaaactaaagcca

SEQ ID NO: 271030 - DNA, 15 bp, Homo sapiens
tcagaaactaaagcc

SEQ ID NO: 271031 - DNA, 15 bp, Homo sapiens
atcagaaactaaagc

SEQ ID NO: 271032 - DNA, 15 bp, Homo sapiens
aatcagaaactaaag

SEQ ID NO: 271033 - DNA, 15 bp, Homo sapiens
taatcagaaactaaa

SEQ ID NO: 271034 - DNA, 15 bp, Homo sapiens
ttaatcagaaactaa

SEQ ID NO: 271035 - DNA, 15 bp, Homo sapiens
tttaatcagaaacta

SEQ ID NO: 271036 - DNA, 15 bp, Homo sapiens
atttaatcagaaact

SEQ ID NO: 271037 - DNA, 15 bp, Homo sapiens
aatttaatcagaaac

SEQ ID NO: 271038 - DNA, 15 bp, Homo sapiens
gaatttaatcagaaa

SEQ ID NO: 271039 - DNA, 15 bp, Homo sapiens
agaatttaatcagaa

SEQ ID NO: 271040 - DNA, 15 bp, Homo sapiens
cagaatttaatcaga

SEQ ID NO: 271041 - DNA, 15 bp, Homo sapiens
tcagaatttaatcag

SEQ ID NO: 271042 - DNA, 15 bp, Homo sapiens
atcagaatttaatca

SEQ ID NO: 271043 - DNA, 15 bp, Homo sapiens
catcagaatttaatc

SEQ ID NO: 271044 - DNA, 15 bp, Homo sapiens
acatcagaatttaat

SEQ ID NO: 271045 - DNA, 15 bp, Homo sapiens
tacatcagaatttaa

SEQ ID NO: 271046 - DNA, 15 bp, Homo sapiens
atacatcagaattta

SEQ ID NO: 271047 - DNA, 15 bp, Homo sapiens
gatacatcagaattt

SEQ ID NO: 271048 - DNA, 15 bp, Homo sapiens
ggatacatcagaatt

SEQ ID NO: 271049 - DNA, 15 bp, Homo sapiens
tggatacatcagaat

SEQ ID NO: 271050 - DNA, 15 bp, Homo sapiens
ttggatacatcagaa

SEQ ID NO: 271051 - DNA, 15 bp, Homo sapiens
attggatacatcaga

SEQ ID NO: 271052 - DNA, 15 bp, Homo sapiens
aattggatacatcag

SEQ ID NO: 271053 - DNA, 15 bp, Homo sapiens
gaattggatacatca

SEQ ID NO: 271054 - DNA, 15 bp, Homo sapiens
agaattggatacatc

SEQ ID NO: 271055 - DNA, 15 bp, Homo sapiens
aagaattggatacat

SEQ ID NO: 271056 - DNA, 15 bp, Homo sapiens
caagaattggataca

SEQ ID NO: 271057 - DNA, 15 bp, Homo sapiens
gcaagaattggatac

SEQ ID NO: 271058 - DNA, 15 bp, Homo sapiens
tgcaagaattggata

SEQ ID NO: 271059 - DNA, 15 bp, Homo sapiens
ttgcaagaattggat

SEQ ID NO: 271060 - DNA, 15 bp, Homo sapiens
tttgcaagaattgga

SEQ ID NO: 271061 - DNA, 15 bp, Homo sapiens
atttgcaagaattgg

SEQ ID NO: 271062 - DNA, 15 bp, Homo sapiens
aatttgcaagaattg

SEQ ID NO: 271063 - DNA, 15 bp, Homo sapiens
aaatttgcaagaatt

SEQ ID NO: 271064 - DNA, 15 bp, Homo sapiens
gaaatttgcaagaat

SEQ ID NO: 271065 - DNA, 15 bp, Homo sapiens
ggaaatttgcaagaa

SEQ ID NO: 271066 - DNA, 15 bp, Homo sapiens
gggaaatttgcaaga

SEQ ID NO: 271067 - DNA, 15 bp, Homo sapiens
agggaaatttgcaag

SEQ ID NO: 271068 - DNA, 15 bp, Homo sapiens
aagggaaatttgcaa

SEQ ID NO: 271069 - DNA, 15 bp, Homo sapiens
caagggaaatttgca

SEQ ID NO: 271070 - DNA, 15 bp, Homo sapiens
ccaagggaaatttgc

SEQ ID NO: 271071 - DNA, 15 bp, Homo sapiens
cccaagggaaatttg

SEQ ID NO: 271072 - DNA, 15 bp, Homo sapiens
tcccaagggaaattt

SEQ ID NO: 271073 - DNA, 15 bp, Homo sapiens
ttcccaagggaaatt

SEQ ID NO: 271074 - DNA, 15 bp, Homo sapiens
tttcccaagggaaat

SEQ ID NO: 271075 - DNA, 15 bp, Homo sapiens
ttttcccaagggaaa

SEQ ID NO: 271076 - DNA, 15 bp, Homo sapiens
attttcccaagggaa

SEQ ID NO: 271077 - DNA, 15 bp, Homo sapiens
cattttcccaaggga

SEQ ID NO: 271078 - DNA, 15 bp, Homo sapiens
gcattttcccaaggg

SEQ ID NO: 271079 - DNA, 15 bp, Homo sapiens
tgcattttcccaagg

SEQ ID NO: 271080 - DNA, 15 bp, Homo sapiens
ctgcattttcccaag

SEQ ID NO: 271081 - DNA, 15 bp, Homo sapiens
actgcattttcccaa

SEQ ID NO: 271082 - DNA, 15 bp, Homo sapiens
tactgcattttccca

SEQ ID NO: 271083 - DNA, 15 bp, Homo sapiens
ttactgcattttccc

SEQ ID NO: 271084 - DNA, 15 bp, Homo sapiens
attactgcattttcc

SEQ ID NO: 271085 - DNA, 15 bp, Homo sapiens
cattactgcattttc

SEQ ID NO: 271086 - DNA, 15 bp, Homo sapiens
ccattactgcatttt

SEQ ID NO: 271087 - DNA, 15 bp, Homo sapiens
gccattactgcattt

SEQ ID NO: 271088 - DNA, 15 bp, Homo sapiens
agccattactgcatt

SEQ ID NO: 271089 - DNA, 15 bp, Homo sapiens
tagccattactgcat

SEQ ID NO: 271090 - DNA, 15 bp, Homo sapiens
gtagccattactgca

SEQ ID NO: 271091 - DNA, 15 bp, Homo sapiens
agtagccattactgc

SEQ ID NO: 271092 - DNA, 15 bp, Homo sapiens
gagtagccattactg

SEQ ID NO: 271093 - DNA, 15 bp, Homo sapiens
agagtagccattact

SEQ ID NO: 271094 - DNA, 15 bp, Homo sapiens
tagagtagccattac

SEQ ID NO: 271095 - DNA, 15 bp, Homo sapiens
ttagagtagccatta

SEQ ID NO: 271096 - DNA, 15 bp, Homo sapiens
tttagagtagccatt

SEQ ID NO: 271097 - DNA, 15 bp, Homo sapiens
ctttagagtagccat

SEQ ID NO: 271098 - DNA, 15 bp, Homo sapiens
tctttagagtagcca

SEQ ID NO: 271099 - DNA, 15 bp, Homo sapiens
ttctttagagtagcc

SEQ ID NO: 271100 - DNA, 15 bp, Homo sapiens
attctttagagtagc

SEQ ID NO: 271101 - DNA, 15 bp, Homo sapiens
aattctttagagtag

SEQ ID NO: 271102 - DNA, 15 bp, Homo sapiens
gaattctttagagta

SEQ ID NO: 271103 - DNA, 15 bp, Homo sapiens
ggaattctttagagt

SEQ ID NO: 271104 - DNA, 15 bp, Homo sapiens
tggaattctttagag

SEQ ID NO: 271105 - DNA, 15 bp, Homo sapiens
atggaattctttaga

SEQ ID NO: 271106 - DNA, 15 bp, Homo sapiens
catggaattctttag

SEQ ID NO: 271107 - DNA, 15 bp, Homo sapiens
acatggaattcttta

SEQ ID NO: 271108 - DNA, 15 bp, Homo sapiens
aacatggaattcttt

SEQ ID NO: 271109 - DNA, 15 bp, Homo sapiens
taacatggaattctt

SEQ ID NO: 271110 - DNA, 15 bp, Homo sapiens
ataacatggaattct

SEQ ID NO: 271111 - DNA, 15 bp, Homo sapiens
cataacatggaattc

SEQ ID NO: 271112 - DNA, 15 bp, Homo sapiens
gcataacatggaatt

SEQ ID NO: 271113 - DNA, 15 bp, Homo sapiens
tgcataacatggaat

SEQ ID NO: 271114 - DNA, 15 bp, Homo sapiens
gtgcataacatggaa

SEQ ID NO: 271115 - DNA, 15 bp, Homo sapiens
tgtgcataacatgga

SEQ ID NO: 271116 - DNA, 15 bp, Homo sapiens
gtgtgcataacatgg

SEQ ID NO: 271117 - DNA, 15 bp, Homo sapiens
tgtgtgcataacatg

SEQ ID NO: 271118 - DNA, 15 bp, Homo sapiens
ctgtgtgcataacat

SEQ ID NO: 271119 - DNA, 15 bp, Homo sapiens
gctgtgtgcataaca

SEQ ID NO: 271120 - DNA, 15 bp, Homo sapiens
agctgtgtgcataac

SEQ ID NO: 271121 - DNA, 15 bp, Homo sapiens
aagctgtgtgcataa

SEQ ID NO: 271122 - DNA, 15 bp, Homo sapiens
aaagctgtgtgcata

SEQ ID NO: 271123 - DNA, 15 bp, Homo sapiens
caaagctgtgtgcat

SEQ ID NO: 271124 - DNA, 15 bp, Homo sapiens
ccaaagctgtgtgca

SEQ ID NO: 271125 - DNA, 15 bp, Homo sapiens
tccaaagctgtgtgc

SEQ ID NO: 271126 - DNA, 15 bp, Homo sapiens
ttccaaagctgtgtg

SEQ ID NO: 271127 - DNA, 15 bp, Homo sapiens
cttccaaagctgtgt

SEQ ID NO: 271128 - DNA, 15 bp, Homo sapiens
gcttccaaagctgtg

SEQ ID NO: 271129 - DNA, 15 bp, Homo sapiens
tgcttccaaagctgt

SEQ ID NO: 271130 - DNA, 15 bp, Homo sapiens
atgcttccaaagctg

SEQ ID NO: 271131 - DNA, 15 bp, Homo sapiens
tatgcttccaaagct

SEQ ID NO: 271132 - DNA, 15 bp, Homo sapiens
gtatgcttccaaagc

SEQ ID NO: 271133 - DNA, 15 bp, Homo sapiens
agtatgcttccaaag

SEQ ID NO: 271134 - DNA, 15 bp, Homo sapiens
gagtatgcttccaaa

SEQ ID NO: 271135 - DNA, 15 bp, Homo sapiens
agagtatgcttccaa

SEQ ID NO: 271136 - DNA, 15 bp, Homo sapiens
tagagtatgcttcca

SEQ ID NO: 271137 - DNA, 15 bp, Homo sapiens
ttagagtatgcttcc

SEQ ID NO: 271138 - DNA, 15 bp, Homo sapiens
attagagtatgcttc

SEQ ID NO: 271139 - DNA, 15 bp, Homo sapiens
cattagagtatgctt

SEQ ID NO: 271140 - DNA, 15 bp, Homo sapiens
acattagagtatgct

SEQ ID NO: 271141 - DNA, 15 bp, Homo sapiens
tacattagagtatgc

SEQ ID NO: 271142 - DNA, 15 bp, Homo sapiens
ctacattagagtatg

SEQ ID NO: 271143 - DNA, 15 bp, Homo sapiens
cctacattagagtat

SEQ ID NO: 271144 - DNA, 15 bp, Homo sapiens
ccctacattagagta

SEQ ID NO: 271145 - DNA, 15 bp, Homo sapiens
accctacattagagt

SEQ ID NO: 271146 - DNA, 15 bp, Homo sapiens
taccctacattagag

SEQ ID NO: 271147 - DNA, 15 bp, Homo sapiens
ttaccctacattaga

SEQ ID NO: 271148 - DNA, 15 bp, Homo sapiens
gttaccctacattag

SEQ ID NO: 271149 - DNA, 15 bp, Homo sapiens
ggttaccctacatta

SEQ ID NO: 271150 - DNA, 15 bp, Homo sapiens
tggttaccctacatt

SEQ ID NO: 271151 - DNA, 15 bp, Homo sapiens
ctggttaccctacat

SEQ ID NO: 271152 - DNA, 15 bp, Homo sapiens
cctggttaccctaca

SEQ ID NO: 271153 - DNA, 15 bp, Homo sapiens
tcctggttaccctac

SEQ ID NO: 271154 - DNA, 15 bp, Homo sapiens
ttcctggttacccta

SEQ ID NO: 271155 - DNA, 15 bp, Homo sapiens
attcctggttaccct

SEQ ID NO: 271156 - DNA, 15 bp, Homo sapiens
tattcctggttaccc

SEQ ID NO: 271157 - DNA, 15 bp, Homo sapiens
atattcctggttacc

SEQ ID NO: 271158 - DNA, 15 bp, Homo sapiens
aatattcctggttac

SEQ ID NO: 271159 - DNA, 15 bp, Homo sapiens
caatattcctggtta

SEQ ID NO: 271160 - DNA, 15 bp, Homo sapiens
tcaatattcctggtt

SEQ ID NO: 271161 - DNA, 15 bp, Homo sapiens
gtcaatattcctggt

SEQ ID NO: 271162 - DNA, 15 bp, Homo sapiens
cgtcaatattcctgg

SEQ ID NO: 271163 - DNA, 15 bp, Homo sapiens
acgtcaatattcctg

SEQ ID NO: 271164 - DNA, 15 bp, Homo sapiens
aacgtcaatattcct

SEQ ID NO: 271165 - DNA, 15 bp, Homo sapiens
caacgtcaatattcc

SEQ ID NO: 271166 - DNA, 15 bp, Homo sapiens
acaacgtcaatattc

SEQ ID NO: 271167 - DNA, 15 bp, Homo sapiens
cacaacgtcaatatt

SEQ ID NO: 271168 - DNA, 15 bp, Homo sapiens
ccacaacgtcaatat

SEQ ID NO: 271169 - DNA, 15 bp, Homo sapiens
gccacaacgtcaata

SEQ ID NO: 271170 - DNA, 15 bp, Homo sapiens
ggccacaacgtcaat

SEQ ID NO: 271171 - DNA, 15 bp, Homo sapiens
tggccacaacgtcaa

SEQ ID NO: 271172 - DNA, 15 bp, Homo sapiens
gtggccacaacgtca

SEQ ID NO: 271173 - DNA, 15 bp, Homo sapiens
agtggccacaacgtc

SEQ ID NO: 271174 - DNA, 15 bp, Homo sapiens
cagtggccacaacgt

SEQ ID NO: 271175 - DNA, 15 bp, Homo sapiens
gcagtggccacaacg

SEQ ID NO: 271176 - DNA, 15 bp, Homo sapiens
agcagtggccacaac

SEQ ID NO: 271177 - DNA, 15 bp, Homo sapiens
aagcagtggccacaa

SEQ ID NO: 271178 - DNA, 15 bp, Homo sapiens
caagcagtggccaca

SEQ ID NO: 271179 - DNA, 15 bp, Homo sapiens
ccaagcagtggccac

SEQ ID NO: 271180 - DNA, 15 bp, Homo sapiens
tccaagcagtggcca

SEQ ID NO: 271181 - DNA, 15 bp, Homo sapiens
ttccaagcagtggcc

SEQ ID NO: 271182 - DNA, 15 bp, Homo sapiens
tttccaagcagtggc

SEQ ID NO: 271183 - DNA, 15 bp, Homo sapiens
ttttccaagcagtgg

SEQ ID NO: 271184 - DNA, 15 bp, Homo sapiens
tttttccaagcagtg

SEQ ID NO: 271185 - DNA, 15 bp, Homo sapiens
ttttttccaagcagt

SEQ ID NO: 271186 - DNA, 15 bp, Homo sapiens
cttttttccaagcag

SEQ ID NO: 271187 - DNA, 15 bp, Homo sapiens
tcttttttccaagca

SEQ ID NO: 271188 - DNA, 15 bp, Homo sapiens
ctcttttttccaagc

SEQ ID NO: 271189 - DNA, 15 bp, Homo sapiens
cctcttttttccaag

SEQ ID NO: 271190 - DNA, 15 bp, Homo sapiens
tcctcttttttccaa

SEQ ID NO: 271191 - DNA, 15 bp, Homo sapiens
gtcctcttttttcca

SEQ ID NO: 271192 - DNA, 15 bp, Homo sapiens
agtcctcttttttcc

SEQ ID NO: 271193 - DNA, 15 bp, Homo sapiens
cagtcctcttttttc

SEQ ID NO: 271194 - DNA, 15 bp, Homo sapiens
acagtcctctttttt

SEQ ID NO: 271195 - DNA, 15 bp, Homo sapiens
aacagtcctcttttt

SEQ ID NO: 271196 - DNA, 15 bp, Homo sapiens
aaacagtcctctttt

SEQ ID NO: 271197 - DNA, 15 bp, Homo sapiens
gaaacagtcctcttt

SEQ ID NO: 271198 - DNA, 15 bp, Homo sapiens
agaaacagtcctctt

SEQ ID NO: 271199 - DNA, 15 bp, Homo sapiens
aagaaacagtcctct

SEQ ID NO: 271200 - DNA, 15 bp, Homo sapiens
aaagaaacagtcctc

SEQ ID NO: 271201 - DNA, 15 bp, Homo sapiens
gaaagaaacagtcct

SEQ ID NO: 271202 - DNA, 15 bp, Homo sapiens
tgaaagaaacagtcc

SEQ ID NO: 271203 - DNA, 15 bp, Homo sapiens
atgaaagaaacagtc

SEQ ID NO: 271204 - DNA, 15 bp, Homo sapiens
aatgaaagaaacagt

SEQ ID NO: 271205 - DNA, 15 bp, Homo sapiens
aaatgaaagaaacag

SEQ ID NO: 271206 - DNA, 15 bp, Homo sapiens
aaaatgaaagaaaca

SEQ ID NO: 271207 - DNA, 15 bp, Homo sapiens
aaaaatgaaagaaac

SEQ ID NO: 271208 - DNA, 15 bp, Homo sapiens
aaaaaatgaaagaaa

SEQ ID NO: 271209 - DNA, 15 bp, Homo sapiens
taaaaaatgaaagaa

SEQ ID NO: 271210 - DNA, 15 bp, Homo sapiens
ttaaaaaatgaaaga

SEQ ID NO: 271211 - DNA, 15 bp, Homo sapiens
gttaaaaaatgaaag

SEQ ID NO: 271212 - DNA, 15 bp, Homo sapiens
agttaaaaaatgaaa

SEQ ID NO: 271213 - DNA, 15 bp, Homo sapiens
gagttaaaaaatgaa

SEQ ID NO: 271214 - DNA, 15 bp, Homo sapiens
tgagttaaaaaatga

SEQ ID NO: 271215 - DNA, 15 bp, Homo sapiens
atgagttaaaaaatg

SEQ ID NO: 271216 - DNA, 15 bp, Homo sapiens
aatgagttaaaaaat

SEQ ID NO: 271217 - DNA, 15 bp, Homo sapiens
aaatgagttaaaaaa

SEQ ID NO: 271218 - DNA, 15 bp, Homo sapiens
aaaatgagttaaaaa

SEQ ID NO: 271219 - DNA, 15 bp, Homo sapiens
taaaatgagttaaaa

SEQ ID NO: 271220 - DNA, 15 bp, Homo sapiens
ataaaatgagttaaa

SEQ ID NO: 271221 - DNA, 15 bp, Homo sapiens
tataaaatgagttaa

SEQ ID NO: 271222 - DNA, 15 bp, Homo sapiens
atataaaatgagtta

SEQ ID NO: 271223 - DNA, 15 bp, Homo sapiens
tatataaaatgagtt

SEQ ID NO: 271224 - DNA, 15 bp, Homo sapiens
atatataaaatgagt

SEQ ID NO: 271225 - DNA, 15 bp, Homo sapiens
aatatataaaatgag

SEQ ID NO: 271226 - DNA, 15 bp, Homo sapiens
aaatatataaaatga

SEQ ID NO: 271227 - DNA, 15 bp, Homo sapiens
aaaatatataaaatg

SEQ ID NO: 271228 - DNA, 15 bp, Homo sapiens
taaaatatataaaat

SEQ ID NO: 271229 - DNA, 15 bp, Homo sapiens
ttaaaatatataaaa

SEQ ID NO: 271230 - DNA, 15 bp, Homo sapiens
cttaaaatatataaa

SEQ ID NO: 271231 - DNA, 15 bp, Homo sapiens
acttaaaatatataa

SEQ ID NO: 271232 - DNA, 15 bp, Homo sapiens
tacttaaaatatata

SEQ ID NO: 271233 - DNA, 15 bp, Homo sapiens
ttacttaaaatatat

SEQ ID NO: 271234 - DNA, 15 bp, Homo sapiens
attacttaaaatata

SEQ ID NO: 271235 - DNA, 15 bp, Homo sapiens
cattacttaaaatat

SEQ ID NO: 271236 - DNA, 15 bp, Homo sapiens
ccattacttaaaata

SEQ ID NO: 271237 - DNA, 15 bp, Homo sapiens
tccattacttaaaat

SEQ ID NO: 271238 - DNA, 15 bp, Homo sapiens
ttccattacttaaaa

SEQ ID NO: 271239 - DNA, 15 bp, Homo sapiens
gttccattacttaaa

SEQ ID NO: 271240 - DNA, 15 bp, Homo sapiens
agttccattacttaa

SEQ ID NO: 271241 - DNA, 15 bp, Homo sapiens
tagttccattactta

SEQ ID NO: 271242 - DNA, 15 bp, Homo sapiens
atagttccattactt

SEQ ID NO: 271243 - DNA, 15 bp, Homo sapiens
tatagttccattact

SEQ ID NO: 271244 - DNA, 15 bp, Homo sapiens
ttatagttccattac

SEQ ID NO: 271245 - DNA, 15 bp, Homo sapiens
tttatagttccatta

SEQ ID NO: 271246 - DNA, 15 bp, Homo sapiens
ttttatagttccatt

SEQ ID NO: 271247 - DNA, 15 bp, Homo sapiens
tttttatagttccat

SEQ ID NO: 271248 - DNA, 15 bp, Homo sapiens
ttttttatagttcca

SEQ ID NO: 271249 - DNA, 15 bp, Homo sapiens
attttttatagttcc

SEQ ID NO: 271250 - DNA, 15 bp, Homo sapiens
aattttttatagttc

SEQ ID NO: 271251 - DNA, 15 bp, Homo sapiens
gaattttttatagtt

SEQ ID NO: 271252 - DNA, 15 bp, Homo sapiens
agaattttttatagt

SEQ ID NO: 271253 - DNA, 15 bp, Homo sapiens
gagaattttttatag

SEQ ID NO: 271254 - DNA, 15 bp, Homo sapiens
agagaattttttata

SEQ ID NO: 271255 - DNA, 15 bp, Homo sapiens
aagagaattttttat

SEQ ID NO: 271256 - DNA, 15 bp, Homo sapiens
taagagaatttttta

SEQ ID NO: 271257 - DNA, 15 bp, Homo sapiens
ataagagaatttttt

SEQ ID NO: 271258 - DNA, 15 bp, Homo sapiens
tataagagaattttt

SEQ ID NO: 271259 - DNA, 15 bp, Homo sapiens
ttataagagaatttt

SEQ ID NO: 271260 - DNA, 15 bp, Homo sapiens
cttataagagaattt

SEQ ID NO: 271261 - DNA, 15 bp, Homo sapiens
acttataagagaatt

SEQ ID NO: 271262 - DNA, 15 bp, Homo sapiens
gacttataagagaat

SEQ ID NO: 271263 - DNA, 15 bp, Homo sapiens
tgacttataagagaa

SEQ ID NO: 271264 - DNA, 15 bp, Homo sapiens
ttgacttataagaga

SEQ ID NO: 271265 - DNA, 15 bp, Homo sapiens
tttgacttataagag

SEQ ID NO: 271266 - DNA, 15 bp, Homo sapiens
ttttgacttataaga

SEQ ID NO: 271267 - DNA, 15 bp, Homo sapiens
gttttgacttataag

SEQ ID NO: 271268 - DNA, 15 bp, Homo sapiens
ggttttgacttataa

SEQ ID NO: 271269 - DNA, 15 bp, Homo sapiens
tggttttgacttata

SEQ ID NO: 271270 - DNA, 15 bp, Homo sapiens
atggttttgacttat

SEQ ID NO: 271271 - DNA, 15 bp, Homo sapiens
tatggttttgactta

SEQ ID NO: 271272 - DNA, 15 bp, Homo sapiens
gtatggttttgactt

SEQ ID NO: 271273 - DNA, 15 bp, Homo sapiens
tgtatggttttgact

SEQ ID NO: 271274 - DNA, 15 bp, Homo sapiens
ttgtatggttttgac

SEQ ID NO: 271275 - DNA, 15 bp, Homo sapiens
cttgtatggttttga

SEQ ID NO: 271276 - DNA, 15 bp, Homo sapiens
tcttgtatggttttg

SEQ ID NO: 271277 - DNA, 15 bp, Homo sapiens
atcttgtatggtttt

SEQ ID NO: 271278 - DNA, 15 bp, Homo sapiens
tatcttgtatggttt

SEQ ID NO: 271279 - DNA, 15 bp, Homo sapiens
gtatcttgtatggtt

SEQ ID NO: 271280 - DNA, 15 bp, Homo sapiens
tgtatcttgtatggt

SEQ ID NO: 271281 - DNA, 15 bp, Homo sapiens
ctgtatcttgtatgg

SEQ ID NO: 271282 - DNA, 15 bp, Homo sapiens
actgtatcttgtatg

SEQ ID NO: 271283 - DNA, 15 bp, Homo sapiens
gactgtatcttgtat

SEQ ID NO: 271284 - DNA, 15 bp, Homo sapiens
agactgtatcttgta

SEQ ID NO: 271285 - DNA, 15 bp, Homo sapiens
cagactgtatcttgt

SEQ ID NO: 271286 - DNA, 15 bp, Homo sapiens
acagactgtatcttg

SEQ ID NO: 271287 - DNA, 15 bp, Homo sapiens
aacagactgtatctt

SEQ ID NO: 271288 - DNA, 15 bp, Homo sapiens
gaacagactgtatct

SEQ ID NO: 271289 - DNA, 15 bp, Homo sapiens
agaacagactgtatc

SEQ ID NO: 271290 - DNA, 15 bp, Homo sapiens
aagaacagactgtat

SEQ ID NO: 271291 - DNA, 15 bp, Homo sapiens
caagaacagactgta

SEQ ID NO: 271292 - DNA, 15 bp, Homo sapiens
tcaagaacagactgt

SEQ ID NO: 271293 - DNA, 15 bp, Homo sapiens
atcaagaacagactg

SEQ ID NO: 271294 - DNA, 15 bp, Homo sapiens
aatcaagaacagact

SEQ ID NO: 271295 - DNA, 15 bp, Homo sapiens
taatcaagaacagac

SEQ ID NO: 271296 - DNA, 15 bp, Homo sapiens
ataatcaagaacaga

SEQ ID NO: 271297 - DNA, 15 bp, Homo sapiens
gataatcaagaacag

SEQ ID NO: 271298 - DNA, 15 bp, Homo sapiens
ggataatcaagaaca

SEQ ID NO: 271299 - DNA, 15 bp, Homo sapiens
tggataatcaagaac

SEQ ID NO: 271300 - DNA, 15 bp, Homo sapiens
atggataatcaagaa

SEQ ID NO: 271301 - DNA, 15 bp, Homo sapiens
tatggataatcaaga

SEQ ID NO: 271302 - DNA, 15 bp, Homo sapiens
gtatggataatcaag

SEQ ID NO: 271303 - DNA, 15 bp, Homo sapiens
ggtatggataatcaa

SEQ ID NO: 271304 - DNA, 15 bp, Homo sapiens
gggtatggataatca

SEQ ID NO: 271305 - DNA, 15 bp, Homo sapiens
tgggtatggataatc

SEQ ID NO: 271306 - DNA, 15 bp, Homo sapiens
gtgggtatggataat

SEQ ID NO: 271307 - DNA, 15 bp, Homo sapiens
tgtgggtatggataa

SEQ ID NO: 271308 - DNA, 15 bp, Homo sapiens
ttgtgggtatggata

SEQ ID NO: 271309 - DNA, 15 bp, Homo sapiens
tttgtgggtatggat

SEQ ID NO: 271310 - DNA, 15 bp, Homo sapiens
ctttgtgggtatgga

SEQ ID NO: 271311 - DNA, 15 bp, Homo sapiens
cctttgtgggtatgg

SEQ ID NO: 271312 - DNA, 15 bp, Homo sapiens
ccctttgtgggtatg

SEQ ID NO: 271313 - DNA, 15 bp, Homo sapiens
accctttgtgggtat

SEQ ID NO: 271314 - DNA, 15 bp, Homo sapiens
aaccctttgtgggta

SEQ ID NO: 271315 - DNA, 15 bp, Homo sapiens
aaaccctttgtgggt

SEQ ID NO: 271316 - DNA, 15 bp, Homo sapiens
gaaaccctttgtggg

SEQ ID NO: 271317 - DNA, 15 bp, Homo sapiens
tgaaaccctttgtgg

SEQ ID NO: 271318 - DNA, 15 bp, Homo sapiens
atgaaaccctttgtg

SEQ ID NO: 271319 - DNA, 15 bp, Homo sapiens
aatgaaaccctttgt

SEQ ID NO: 271320 - DNA, 15 bp, Homo sapiens
taatgaaaccctttg

SEQ ID NO: 271321 - DNA, 15 bp, Homo sapiens
ttaatgaaacccttt

SEQ ID NO: 271322 - DNA, 15 bp, Homo sapiens
gttaatgaaaccctt

SEQ ID NO: 271323 - DNA, 15 bp, Homo sapiens
tgttaatgaaaccct

SEQ ID NO: 271324 - DNA, 15 bp, Homo sapiens
atgttaatgaaaccc

SEQ ID NO: 271325 - DNA, 15 bp, Homo sapiens
tatgttaatgaaacc

SEQ ID NO: 271326 - DNA, 15 bp, Homo sapiens
ctatgttaatgaaac

SEQ ID NO: 271327 - DNA, 15 bp, Homo sapiens
tctatgttaatgaaa

SEQ ID NO: 271328 - DNA, 15 bp, Homo sapiens
gtctatgttaatgaa

SEQ ID NO: 271329 - DNA, 15 bp, Homo sapiens
tgtctatgttaatga

SEQ ID NO: 271330 - DNA, 15 bp, Homo sapiens
ctgtctatgttaatg

SEQ ID NO: 271331 - DNA, 15 bp, Homo sapiens
actgtctatgttaat

SEQ ID NO: 271332 - DNA, 15 bp, Homo sapiens
aactgtctatgttaa

SEQ ID NO: 271333 - DNA, 15 bp, Homo sapiens
caactgtctatgtta

SEQ ID NO: 271334 - DNA, 15 bp, Homo sapiens
tcaactgtctatgtt

SEQ ID NO: 271335 - DNA, 15 bp, Homo sapiens
ttcaactgtctatgt

SEQ ID NO: 271336 - DNA, 15 bp, Homo sapiens
gttcaactgtctatg

SEQ ID NO: 271337 - DNA, 15 bp, Homo sapiens
agttcaactgtctat

SEQ ID NO: 271338 - DNA, 15 bp, Homo sapiens
gagttcaactgtcta

SEQ ID NO: 271339 - DNA, 15 bp, Homo sapiens
agagttcaactgtct

SEQ ID NO: 271340 - DNA, 15 bp, Homo sapiens
tagagttcaactgtc

SEQ ID NO: 271341 - DNA, 15 bp, Homo sapiens
atagagttcaactgt

SEQ ID NO: 271342 - DNA, 15 bp, Homo sapiens
tatagagttcaactg

SEQ ID NO: 271343 - DNA, 15 bp, Homo sapiens
ttatagagttcaact

SEQ ID NO: 271344 - DNA, 15 bp, Homo sapiens
tttatagagttcaac

SEQ ID NO: 271345 - DNA, 15 bp, Homo sapiens
atttatagagttcaa

SEQ ID NO: 271346 - DNA, 15 bp, Homo sapiens
aatttatagagttca

SEQ ID NO: 271347 - DNA, 15 bp, Homo sapiens
taatttatagagttc

SEQ ID NO: 271348 - DNA, 15 bp, Homo sapiens
ttaatttatagagtt

SEQ ID NO: 271349 - DNA, 15 bp, Homo sapiens
gttaatttatagagt

SEQ ID NO: 271350 - DNA, 15 bp, Homo sapiens
ggttaatttatagag

SEQ ID NO: 271351 - DNA, 15 bp, Homo sapiens
tggttaatttataga

SEQ ID NO: 271352 - DNA, 15 bp, Homo sapiens
ctggttaatttatag

SEQ ID NO: 271353 - DNA, 15 bp, Homo sapiens
gctggttaatttata

SEQ ID NO: 271354 - DNA, 15 bp, Homo sapiens
tgctggttaatttat

SEQ ID NO: 271355 - DNA, 15 bp, Homo sapiens
ttgctggttaattta

SEQ ID NO: 271356 - DNA, 15 bp, Homo sapiens
cttgctggttaattt

SEQ ID NO: 271357 - DNA, 15 bp, Homo sapiens
ccttgctggttaatt

SEQ ID NO: 271358 - DNA, 15 bp, Homo sapiens
cccttgctggttaat

SEQ ID NO: 271359 - DNA, 15 bp, Homo sapiens
acccttgctggttaa

SEQ ID NO: 271360 - DNA, 15 bp, Homo sapiens
tacccttgctggtta

SEQ ID NO: 271361 - DNA, 15 bp, Homo sapiens
ctacccttgctggtt

SEQ ID NO: 271362 - DNA, 15 bp, Homo sapiens
tctacccttgctggt

SEQ ID NO: 271363 - DNA, 15 bp, Homo sapiens
ttctacccttgctgg

SEQ ID NO: 271364 - DNA, 15 bp, Homo sapiens
gttctacccttgctg

SEQ ID NO: 271365 - DNA, 15 bp, Homo sapiens
ggttctacccttgct

SEQ ID NO: 271366 - DNA, 15 bp, Homo sapiens
cggttctacccttgc

SEQ ID NO: 271367 - DNA, 15 bp, Homo sapiens
gcggttctacccttg

SEQ ID NO: 271368 - DNA, 15 bp, Homo sapiens
agcggttctaccctt

SEQ ID NO: 271369 - DNA, 15 bp, Homo sapiens
cagcggttctaccct

SEQ ID NO: 271370 - DNA, 15 bp, Homo sapiens
gcagcggttctaccc

SEQ ID NO: 271371 - DNA, 15 bp, Homo sapiens
ggcagcggttctacc

SEQ ID NO: 271372 - DNA, 15 bp, Homo sapiens
cggcagcggttctac

SEQ ID NO: 271373 - DNA, 15 bp, Homo sapiens
acggcagcggttcta

SEQ ID NO: 271374 - DNA, 15 bp, Homo sapiens
cacggcagcggttct

SEQ ID NO: 271375 - DNA, 15 bp, Homo sapiens
gcacggcagcggttc

SEQ ID NO: 271376 - DNA, 15 bp, Homo sapiens
tgcacggcagcggtt

SEQ ID NO: 271377 - DNA, 15 bp, Homo sapiens
ctgcacggcagcggt

SEQ ID NO: 271378 - DNA, 15 bp, Homo sapiens
actgcacggcagcgg

SEQ ID NO: 271379 - DNA, 15 bp, Homo sapiens
gactgcacggcagcg

SEQ ID NO: 271380 - DNA, 15 bp, Homo sapiens
agactgcacggcagc

SEQ ID NO: 271381 - DNA, 15 bp, Homo sapiens
cagactgcacggcag

SEQ ID NO: 271382 - DNA, 15 bp, Homo sapiens
tcagactgcacggca

SEQ ID NO: 271383 - DNA, 15 bp, Homo sapiens
atcagactgcacggc

SEQ ID NO: 271384 - DNA, 15 bp, Homo sapiens
tatcagactgcacgg

SEQ ID NO: 271385 - DNA, 15 bp, Homo sapiens
gtatcagactgcacg

SEQ ID NO: 271386 - DNA, 15 bp, Homo sapiens
agtatcagactgcac

SEQ ID NO: 271387 - DNA, 15 bp, Homo sapiens
cagtatcagactgca

SEQ ID NO: 271388 - DNA, 15 bp, Homo sapiens
tcagtatcagactgc

SEQ ID NO: 271389 - DNA, 15 bp, Homo sapiens
ctcagtatcagactg

SEQ ID NO: 271390 - DNA, 15 bp, Homo sapiens
gctcagtatcagact

SEQ ID NO: 271391 - DNA, 15 bp, Homo sapiens
tgctcagtatcagac

SEQ ID NO: 271392 - DNA, 15 bp, Homo sapiens
atgctcagtatcaga

SEQ ID NO: 271393 - DNA, 15 bp, Homo sapiens
gatgctcagtatcag

SEQ ID NO: 271394 - DNA, 15 bp, Homo sapiens
agatgctcagtatca

SEQ ID NO: 271395 - DNA, 15 bp, Homo sapiens
aagatgctcagtatc

SEQ ID NO: 271396 - DNA, 15 bp, Homo sapiens
caagatgctcagtat

SEQ ID NO: 271397 - DNA, 15 bp, Homo sapiens
gcaagatgctcagta

SEQ ID NO: 271398 - DNA, 15 bp, Homo sapiens
ggcaagatgctcagt

SEQ ID NO: 271399 - DNA, 15 bp, Homo sapiens
aggcaagatgctcag

SEQ ID NO: 271400 - DNA, 15 bp, Homo sapiens
caggcaagatgctca

SEQ ID NO: 271401 - DNA, 15 bp, Homo sapiens
ccaggcaagatgctc

SEQ ID NO: 271402 - DNA, 15 bp, Homo sapiens
tccaggcaagatgct

SEQ ID NO: 271403 - DNA, 15 bp, Homo sapiens
ctccaggcaagatgc

SEQ ID NO: 271404 - DNA, 15 bp, Homo sapiens
tctccaggcaagatg

SEQ ID NO: 271405 - DNA, 15 bp, Homo sapiens
atctccaggcaagat

SEQ ID NO: 271406 - DNA, 15 bp, Homo sapiens
catctccaggcaaga

SEQ ID NO: 271407 - DNA, 15 bp, Homo sapiens
ccatctccaggcaag

SEQ ID NO: 271408 - DNA, 15 bp, Homo sapiens
tccatctccaggcaa

SEQ ID NO: 271409 - DNA, 15 bp, Homo sapiens
ttccatctccaggca

SEQ ID NO: 271410 - DNA, 15 bp, Homo sapiens
attccatctccaggc

SEQ ID NO: 271411 - DNA, 15 bp, Homo sapiens
gattccatctccagg

SEQ ID NO: 271412 - DNA, 15 bp, Homo sapiens
tgattccatctccag

SEQ ID NO: 271413 - DNA, 15 bp, Homo sapiens
ttgattccatctcca

SEQ ID NO: 271414 - DNA, 15 bp, Homo sapiens
cttgattccatctcc

SEQ ID NO: 271415 - DNA, 15 bp, Homo sapiens
ccttgattccatctc

SEQ ID NO: 271416 - DNA, 15 bp, Homo sapiens
gccttgattccatct

SEQ ID NO: 271417 - DNA, 15 bp, Homo sapiens
agccttgattccatc

SEQ ID NO: 271418 - DNA, 15 bp, Homo sapiens
gagccttgattccat

SEQ ID NO: 271419 - DNA, 15 bp, Homo sapiens
tgagccttgattcca

SEQ ID NO: 271420 - DNA, 15 bp, Homo sapiens
ctgagccttgattcc

SEQ ID NO: 271421 - DNA, 15 bp, Homo sapiens
actgagccttgattc

SEQ ID NO: 271422 - DNA, 15 bp, Homo sapiens
gactgagccttgatt

SEQ ID NO: 271423 - DNA, 15 bp, Homo sapiens
ggactgagccttgat

SEQ ID NO: 271424 - DNA, 15 bp, Homo sapiens
tggactgagccttga

SEQ ID NO: 271425 - DNA, 15 bp, Homo sapiens
ttggactgagccttg

SEQ ID NO: 271426 - DNA, 15 bp, Homo sapiens
gttggactgagcctt

SEQ ID NO: 271427 - DNA, 15 bp, Homo sapiens
agttggactgagcct

SEQ ID NO: 271428 - DNA, 15 bp, Homo sapiens
cagttggactgagcc

SEQ ID NO: 271429 - DNA, 15 bp, Homo sapiens
gcagttggactgagc

SEQ ID NO: 271430 - DNA, 15 bp, Homo sapiens
tgcagttggactgag

SEQ ID NO: 271431 - DNA, 15 bp, Homo sapiens
gtgcagttggactga

SEQ ID NO: 271432 - DNA, 15 bp, Homo sapiens
ggtgcagttggactg

SEQ ID NO: 271433 - DNA, 15 bp, Homo sapiens
aggtgcagttggact

SEQ ID NO: 271434 - DNA, 15 bp, Homo sapiens
gaggtgcagttggac

SEQ ID NO: 271435 - DNA, 15 bp, Homo sapiens
ggaggtgcagttgga

SEQ ID NO: 271436 - DNA, 15 bp, Homo sapiens
tggaggtgcagttgg

SEQ ID NO: 271437 - DNA, 15 bp, Homo sapiens
ctggaggtgcagttg

SEQ ID NO: 271438 - DNA, 15 bp, Homo sapiens
actggaggtgcagtt

SEQ ID NO: 271439 - DNA, 15 bp, Homo sapiens
cactggaggtgcagt

SEQ ID NO: 271440 - DNA, 15 bp, Homo sapiens
tcactggaggtgcag

SEQ ID NO: 271441 - DNA, 15 bp, Homo sapiens
gtcactggaggtgca

SEQ ID NO: 271442 - DNA, 15 bp, Homo sapiens
tgtcactggaggtgc

SEQ ID NO: 271443 - DNA, 15 bp, Homo sapiens
ctgtcactggaggtg

SEQ ID NO: 271444 - DNA, 15 bp, Homo sapiens
tctgtcactggaggt

SEQ ID NO: 271445 - DNA, 15 bp, Homo sapiens
atctgtcactggagg

SEQ ID NO: 271446 - DNA, 15 bp, Homo sapiens
aatctgtcactggag

SEQ ID NO: 271447 - DNA, 15 bp, Homo sapiens
gaatctgtcactgga

SEQ ID NO: 271448 - DNA, 15 bp, Homo sapiens
ggaatctgtcactgg

SEQ ID NO: 271449 - DNA, 15 bp, Homo sapiens
tggaatctgtcactg

SEQ ID NO: 271450 - DNA, 15 bp, Homo sapiens
atggaatctgtcact

SEQ ID NO: 271451 - DNA, 15 bp, Homo sapiens
aatggaatctgtcac

SEQ ID NO: 271452 - DNA, 15 bp, Homo sapiens
gaatggaatctgtca

SEQ ID NO: 271453 - DNA, 15 bp, Homo sapiens
ggaatggaatctgtc

SEQ ID NO: 271454 - DNA, 15 bp, Homo sapiens
aggaatggaatctgt

SEQ ID NO: 271455 - DNA, 15 bp, Homo sapiens
caggaatggaatctg

SEQ ID NO: 271456 - DNA, 15 bp, Homo sapiens
tcaggaatggaatct

SEQ ID NO: 271457 - DNA, 15 bp, Homo sapiens
atcaggaatggaatc

SEQ ID NO: 271458 - DNA, 15 bp, Homo sapiens
aatcaggaatggaat

SEQ ID NO: 271459 - DNA, 15 bp, Homo sapiens
aaatcaggaatggaa

SEQ ID NO: 271460 - DNA, 15 bp, Homo sapiens
caaatcaggaatgga

SEQ ID NO: 271461 - DNA, 15 bp, Homo sapiens
tcaaatcaggaatgg

SEQ ID NO: 271462 - DNA, 15 bp, Homo sapiens
ctcaaatcaggaatg

SEQ ID NO: 271463 - DNA, 15 bp, Homo sapiens
tctcaaatcaggaat

SEQ ID NO: 271464 - DNA, 15 bp, Homo sapiens
ctctcaaatcaggaa

SEQ ID NO: 271465 - DNA, 15 bp, Homo sapiens
actctcaaatcagga

SEQ ID NO: 271466 - DNA, 15 bp, Homo sapiens
aactctcaaatcagg

SEQ ID NO: 271467 - DNA, 15 bp, Homo sapiens
aaactctcaaatcag

SEQ ID NO: 271468 - DNA, 15 bp, Homo sapiens
taaactctcaaatca

SEQ ID NO: 271469 - DNA, 15 bp, Homo sapiens
ctaaactctcaaatc

SEQ ID NO: 271470 - DNA, 15 bp, Homo sapiens
tctaaactctcaaat

SEQ ID NO: 271471 - DNA, 15 bp, Homo sapiens
atctaaactctcaaa

SEQ ID NO: 271472 - DNA, 15 bp, Homo sapiens
gatctaaactctcaa

SEQ ID NO: 271473 - DNA, 15 bp, Homo sapiens
agatctaaactctca

SEQ ID NO: 271474 - DNA, 15 bp, Homo sapiens
aagatctaaactctc

SEQ ID NO: 271475 - DNA, 15 bp, Homo sapiens
taagatctaaactct

SEQ ID NO: 271476 - DNA, 15 bp, Homo sapiens
ataagatctaaactc

SEQ ID NO: 271477 - DNA, 15 bp, Homo sapiens
aataagatctaaact

SEQ ID NO: 271478 - DNA, 15 bp, Homo sapiens
aaataagatctaaac

SEQ ID NO: 271479 - DNA, 15 bp, Homo sapiens
gaaataagatctaaa

SEQ ID NO: 271480 - DNA, 15 bp, Homo sapiens
agaaataagatctaa

SEQ ID NO: 271481 - DNA, 15 bp, Homo sapiens
cagaaataagatcta

SEQ ID NO: 271482 - DNA, 15 bp, Homo sapiens
acagaaataagatct

SEQ ID NO: 271483 - DNA, 15 bp, Homo sapiens
aacagaaataagatc

SEQ ID NO: 271484 - DNA, 15 bp, Homo sapiens
caacagaaataagat

SEQ ID NO: 271485 - DNA, 15 bp, Homo sapiens
gcaacagaaataaga

SEQ ID NO: 271486 - DNA, 15 bp, Homo sapiens
ggcaacagaaataag

SEQ ID NO: 271487 - DNA, 15 bp, Homo sapiens
aggcaacagaaataa

SEQ ID NO: 271488 - DNA, 15 bp, Homo sapiens
aaggcaacagaaata

SEQ ID NO: 271489 - DNA, 15 bp, Homo sapiens
taaggcaacagaaat

SEQ ID NO: 271490 - DNA, 15 bp, Homo sapiens
ataaggcaacagaaa

SEQ ID NO: 271491 - DNA, 15 bp, Homo sapiens
gataaggcaacagaa

SEQ ID NO: 271492 - DNA, 15 bp, Homo sapiens
agataaggcaacaga

SEQ ID NO: 271493 - DNA, 15 bp, Homo sapiens
gagataaggcaacag

SEQ ID NO: 271494 - DNA, 15 bp, Homo sapiens
agagataaggcaaca

SEQ ID NO: 271495 - DNA, 15 bp, Homo sapiens
cagagataaggcaac

SEQ ID NO: 271496 - DNA, 15 bp, Homo sapiens
ccagagataaggcaa

SEQ ID NO: 271497 - DNA, 15 bp, Homo sapiens
gccagagataaggca

SEQ ID NO: 271498 - DNA, 15 bp, Homo sapiens
ggccagagataaggc

SEQ ID NO: 271499 - DNA, 15 bp, Homo sapiens
aggccagagataagg

SEQ ID NO: 271500 - DNA, 15 bp, Homo sapiens
taggccagagataag

SEQ ID NO: 271501 - DNA, 15 bp, Homo sapiens
ttaggccagagataa

SEQ ID NO: 271502 - DNA, 15 bp, Homo sapiens
cttaggccagagata

SEQ ID NO: 271503 - DNA, 15 bp, Homo sapiens
acttaggccagagat

SEQ ID NO: 271504 - DNA, 15 bp, Homo sapiens
tacttaggccagaga

SEQ ID NO: 271505 - DNA, 15 bp, Homo sapiens
ttacttaggccagag

SEQ ID NO: 271506 - DNA, 15 bp, Homo sapiens
attacttaggccaga

SEQ ID NO: 271507 - DNA, 15 bp, Homo sapiens
cattacttaggccag

SEQ ID NO: 271508 - DNA, 15 bp, Homo sapiens
acattacttaggcca

SEQ ID NO: 271509 - DNA, 15 bp, Homo sapiens
tacattacttaggcc

SEQ ID NO: 271510 - DNA, 15 bp, Homo sapiens
ctacattacttaggc

SEQ ID NO: 271511 - DNA, 15 bp, Homo sapiens
gctacattacttagg

SEQ ID NO: 271512 - DNA, 15 bp, Homo sapiens
agctacattacttag

SEQ ID NO: 271513 - DNA, 15 bp, Homo sapiens
cagctacattactta

SEQ ID NO: 271514 - DNA, 15 bp, Homo sapiens
ccagctacattactt

SEQ ID NO: 271515 - DNA, 15 bp, Homo sapiens
tccagctacattact

SEQ ID NO: 271516 - DNA, 15 bp, Homo sapiens
ttccagctacattac

SEQ ID NO: 271517 - DNA, 15 bp, Homo sapiens
cttccagctacatta

SEQ ID NO: 271518 - DNA, 15 bp, Homo sapiens
ccttccagctacatt

SEQ ID NO: 271519 - DNA, 15 bp, Homo sapiens
cccttccagctacat

SEQ ID NO: 271520 - DNA, 15 bp, Homo sapiens
tcccttccagctaca

SEQ ID NO: 271521 - DNA, 15 bp, Homo sapiens
ttcccttccagctac

SEQ ID NO: 271522 - DNA, 15 bp, Homo sapiens
tttcccttccagcta

SEQ ID NO: 271523 - DNA, 15 bp, Homo sapiens
gtttcccttccagct

SEQ ID NO: 271524 - DNA, 15 bp, Homo sapiens
agtttcccttccagc

SEQ ID NO: 271525 - DNA, 15 bp, Homo sapiens
cagtttcccttccag

SEQ ID NO: 271526 - DNA, 15 bp, Homo sapiens
acagtttcccttcca

SEQ ID NO: 271527 - DNA, 15 bp, Homo sapiens
gacagtttcccttcc

SEQ ID NO: 271528 - DNA, 15 bp, Homo sapiens
tgacagtttcccttc

SEQ ID NO: 271529 - DNA, 15 bp, Homo sapiens
gtgacagtttccctt

SEQ ID NO: 271530 - DNA, 15 bp, Homo sapiens
agtgacagtttccct

SEQ ID NO: 271531 - DNA, 15 bp, Homo sapiens
tagtgacagtttccc

SEQ ID NO: 271532 - DNA, 15 bp, Homo sapiens
ctagtgacagtttcc

SEQ ID NO: 271533 - DNA, 15 bp, Homo sapiens
cctagtgacagtttc

SEQ ID NO: 271534 - DNA, 15 bp, Homo sapiens
tcctagtgacagttt

SEQ ID NO: 271535 - DNA, 15 bp, Homo sapiens
ttcctagtgacagtt

SEQ ID NO: 271536 - DNA, 15 bp, Homo sapiens
gttcctagtgacagt

SEQ ID NO: 271537 - DNA, 15 bp, Homo sapiens
tgttcctagtgacag

SEQ ID NO: 271538 - DNA, 15 bp, Homo sapiens
ctgttcctagtgaca

SEQ ID NO: 271539 - DNA, 15 bp, Homo sapiens
gctgttcctagtgac

SEQ ID NO: 271540 - DNA, 15 bp, Homo sapiens
tgctgttcctagtga

SEQ ID NO: 271541 - DNA, 15 bp, Homo sapiens
atgctgttcctagtg

SEQ ID NO: 271542 - DNA, 15 bp, Homo sapiens
tatgctgttcctagt

SEQ ID NO: 271543 - DNA, 15 bp, Homo sapiens
gtatgctgttcctag

SEQ ID NO: 271544 - DNA, 15 bp, Homo sapiens
ggtatgctgttccta

SEQ ID NO: 271545 - DNA, 15 bp, Homo sapiens
tggtatgctgttcct

SEQ ID NO: 271546 - DNA, 15 bp, Homo sapiens
gtggtatgctgttcc

SEQ ID NO: 271547 - DNA, 15 bp, Homo sapiens
tgtggtatgctgttc

SEQ ID NO: 271548 - DNA, 15 bp, Homo sapiens
atgtggtatgctgtt

SEQ ID NO: 271549 - DNA, 15 bp, Homo sapiens
aatgtggtatgctgt

SEQ ID NO: 271550 - DNA, 15 bp, Homo sapiens
gaatgtggtatgctg

SEQ ID NO: 271551 - DNA, 15 bp, Homo sapiens
tgaatgtggtatgct

SEQ ID NO: 271552 - DNA, 15 bp, Homo sapiens
atgaatgtggtatgc

SEQ ID NO: 271553 - DNA, 15 bp, Homo sapiens
aatgaatgtggtatg

SEQ ID NO: 271554 - DNA, 15 bp, Homo sapiens
caatgaatgtggtat

SEQ ID NO: 271555 - DNA, 15 bp, Homo sapiens
acaatgaatgtggta

SEQ ID NO: 271556 - DNA, 15 bp, Homo sapiens
aacaatgaatgtggt

SEQ ID NO: 271557 - DNA, 15 bp, Homo sapiens
caacaatgaatgtgg

SEQ ID NO: 271558 - DNA, 15 bp, Homo sapiens
tcaacaatgaatgtg

SEQ ID NO: 271559 - DNA, 15 bp, Homo sapiens
ttcaacaatgaatgt

SEQ ID NO: 271560 - DNA, 15 bp, Homo sapiens
tttcaacaatgaatg

SEQ ID NO: 271561 - DNA, 15 bp, Homo sapiens
atttcaacaatgaat

SEQ ID NO: 271562 - DNA, 15 bp, Homo sapiens
tatttcaacaatgaa

SEQ ID NO: 271563 - DNA, 15 bp, Homo sapiens
ttatttcaacaatga

SEQ ID NO: 271564 - DNA, 15 bp, Homo sapiens
attatttcaacaatg

SEQ ID NO: 271565 - DNA, 15 bp, Homo sapiens
gattatttcaacaat

SEQ ID NO: 271566 - DNA, 15 bp, Homo sapiens
tgattatttcaacaa

SEQ ID NO: 271567 - DNA, 15 bp, Homo sapiens
ttgattatttcaaca

SEQ ID NO: 271568 - DNA, 15 bp, Homo sapiens
tttgattatttcaac

SEQ ID NO: 271569 - DNA, 15 bp, Homo sapiens
ctttgattatttcaa

SEQ ID NO: 271570 - DNA, 15 bp, Homo sapiens
cctttgattatttca

SEQ ID NO: 271571 - DNA, 15 bp, Homo sapiens
acctttgattatttc

SEQ ID NO: 271572 - DNA, 15 bp, Homo sapiens
aacctttgattattt

SEQ ID NO: 271573 - DNA, 15 bp, Homo sapiens
taacctttgattatt

SEQ ID NO: 271574 - DNA, 15 bp, Homo sapiens
ttaacctttgattat

SEQ ID NO: 271575 - DNA, 15 bp, Homo sapiens
attaacctttgatta

SEQ ID NO: 271576 - DNA, 15 bp, Homo sapiens
gattaacctttgatt

SEQ ID NO: 271577 - DNA, 15 bp, Homo sapiens
tgattaacctttgat

SEQ ID NO: 271578 - DNA, 15 bp, Homo sapiens
atgattaacctttga

SEQ ID NO: 271579 - DNA, 15 bp, Homo sapiens
catgattaacctttg

SEQ ID NO: 271580 - DNA, 15 bp, Homo sapiens
acatgattaaccttt

SEQ ID NO: 271581 - DNA, 15 bp, Homo sapiens
aacatgattaacctt

SEQ ID NO: 271582 - DNA, 15 bp, Homo sapiens
aaacatgattaacct

SEQ ID NO: 271583 - DNA, 15 bp, Homo sapiens
gaaacatgattaacc

SEQ ID NO: 271584 - DNA, 15 bp, Homo sapiens
cgaaacatgattaac

SEQ ID NO: 271585 - DNA, 15 bp, Homo sapiens
tcgaaacatgattaa

SEQ ID NO: 271586 - DNA, 15 bp, Homo sapiens
ctcgaaacatgatta

SEQ ID NO: 271587 - DNA, 15 bp, Homo sapiens
gctcgaaacatgatt

SEQ ID NO: 271588 - DNA, 15 bp, Homo sapiens
agctcgaaacatgat

SEQ ID NO: 271589 - DNA, 15 bp, Homo sapiens
cagctcgaaacatga

SEQ ID NO: 271590 - DNA, 15 bp, Homo sapiens
ccagctcgaaacatg

SEQ ID NO: 271591 - DNA, 15 bp, Homo sapiens
cccagctcgaaacat

SEQ ID NO: 271592 - DNA, 15 bp, Homo sapiens
acccagctcgaaaca

SEQ ID NO: 271593 - DNA, 15 bp, Homo sapiens
cacccagctcgaaac

SEQ ID NO: 271594 - DNA, 15 bp, Homo sapiens
acacccagctcgaaa

SEQ ID NO: 271595 - DNA, 15 bp, Homo sapiens
cacacccagctcgaa

SEQ ID NO: 271596 - DNA, 15 bp, Homo sapiens
tcacacccagctcga

SEQ ID NO: 271597 - DNA, 15 bp, Homo sapiens
atcacacccagctcg

SEQ ID NO: 271598 - DNA, 15 bp, Homo sapiens
catcacacccagctc

SEQ ID NO: 271599 - DNA, 15 bp, Homo sapiens
ccatcacacccagct

SEQ ID NO: 271600 - DNA, 15 bp, Homo sapiens
gccatcacacccagc

SEQ ID NO: 271601 - DNA, 15 bp, Homo sapiens
cgccatcacacccag

SEQ ID NO: 271602 - DNA, 15 bp, Homo sapiens
gcgccatcacaccca

SEQ ID NO: 271603 - DNA, 15 bp, Homo sapiens
cgcgccatcacaccc

SEQ ID NO: 271604 - DNA, 15 bp, Homo sapiens
acgcgccatcacacc

SEQ ID NO: 271605 - DNA, 15 bp, Homo sapiens
tacgcgccatcacac

SEQ ID NO: 271606 - DNA, 15 bp, Homo sapiens
gtacgcgccatcaca

SEQ ID NO: 271607 - DNA, 15 bp, Homo sapiens
ggtacgcgccatcac

SEQ ID NO: 271608 - DNA, 15 bp, Homo sapiens
aggtacgcgccatca

SEQ ID NO: 271609 - DNA, 15 bp, Homo sapiens
caggtacgcgccatc

SEQ ID NO: 271610 - DNA, 15 bp, Homo sapiens
acaggtacgcgccat

SEQ ID NO: 271611 - DNA, 15 bp, Homo sapiens
tacaggtacgcgcca

SEQ ID NO: 271612 - DNA, 15 bp, Homo sapiens
ctacaggtacgcgcc

SEQ ID NO: 271613 - DNA, 15 bp, Homo sapiens
actacaggtacgcgc

SEQ ID NO: 271614 - DNA, 15 bp, Homo sapiens
gactacaggtacgcg

SEQ ID NO: 271615 - DNA, 15 bp, Homo sapiens
ggactacaggtacgc

SEQ ID NO: 271616 - DNA, 15 bp, Homo sapiens
tggactacaggtacg

SEQ ID NO: 271617 - DNA, 15 bp, Homo sapiens
atggactacaggtac

SEQ ID NO: 271618 - DNA, 15 bp, Homo sapiens
catggactacaggta

SEQ ID NO: 271619 - DNA, 15 bp, Homo sapiens
gcatggactacaggt

SEQ ID NO: 271620 - DNA, 15 bp, Homo sapiens
agcatggactacagg

SEQ ID NO: 271621 - DNA, 15 bp, Homo sapiens
tagcatggactacag

SEQ ID NO: 271622 - DNA, 15 bp, Homo sapiens
gtagcatggactaca

SEQ ID NO: 271623 - DNA, 15 bp, Homo sapiens
agtagcatggactac

SEQ ID NO: 271624 - DNA, 15 bp, Homo sapiens
gagtagcatggacta

SEQ ID NO: 271625 - DNA, 15 bp, Homo sapiens
tgagtagcatggact

SEQ ID NO: 271626 - DNA, 15 bp, Homo sapiens
ctgagtagcatggac

SEQ ID NO: 271627 - DNA, 15 bp, Homo sapiens
cctgagtagcatgga

SEQ ID NO: 271628 - DNA, 15 bp, Homo sapiens
tcctgagtagcatgg

SEQ ID NO: 271629 - DNA, 15 bp, Homo sapiens
ctcctgagtagcatg

SEQ ID NO: 271630 - DNA, 15 bp, Homo sapiens
cctcctgagtagcat

SEQ ID NO: 271631 - DNA, 15 bp, Homo sapiens
gcctcctgagtagca

SEQ ID NO: 271632 - DNA, 15 bp, Homo sapiens
agcctcctgagtagc

SEQ ID NO: 271633 - DNA, 15 bp, Homo sapiens
cagcctcctgagtag

SEQ ID NO: 271634 - DNA, 15 bp, Homo sapiens
tcagcctcctgagta

SEQ ID NO: 271635 - DNA, 15 bp, Homo sapiens
ctcagcctcctgagt

SEQ ID NO: 271636 - DNA, 15 bp, Homo sapiens
cctcagcctcctgag

SEQ ID NO: 271637 - DNA, 15 bp, Homo sapiens
gcctcagcctcctga

SEQ ID NO: 271638 - DNA, 15 bp, Homo sapiens
tgcctcagcctcctg

SEQ ID NO: 271639 - DNA, 15 bp, Homo sapiens
ctgcctcagcctcct

SEQ ID NO: 271640 - DNA, 15 bp, Homo sapiens
cctgcctcagcctcc

SEQ ID NO: 271641 - DNA, 15 bp, Homo sapiens
tcctgcctcagcctc

SEQ ID NO: 271642 - DNA, 15 bp, Homo sapiens
ctcctgcctcagcct

SEQ ID NO: 271643 - DNA, 15 bp, Homo sapiens
cctcctgcctcagcc

SEQ ID NO: 271644 - DNA, 15 bp, Homo sapiens
tcctcctgcctcagc

SEQ ID NO: 271645 - DNA, 15 bp, Homo sapiens
atcctcctgcctcag

SEQ ID NO: 271646 - DNA, 15 bp, Homo sapiens
gatcctcctgcctca

SEQ ID NO: 271647 - DNA, 15 bp, Homo sapiens
tgatcctcctgcctc

SEQ ID NO: 271648 - DNA, 15 bp, Homo sapiens
gtgatcctcctgcct

SEQ ID NO: 271649 - DNA, 15 bp, Homo sapiens
tgtgatcctcctgcc

SEQ ID NO: 271650 - DNA, 15 bp, Homo sapiens
atgtgatcctcctgc

SEQ ID NO: 271651 - DNA, 15 bp, Homo sapiens
catgtgatcctcctg

SEQ ID NO: 271652 - DNA, 15 bp, Homo sapiens
tcatgtgatcctcct

SEQ ID NO: 271653 - DNA, 15 bp, Homo sapiens
ctcatgtgatcctcc

SEQ ID NO: 271654 - DNA, 15 bp, Homo sapiens
gctcatgtgatcctc

SEQ ID NO: 271655 - DNA, 15 bp, Homo sapiens
agctcatgtgatcct

SEQ ID NO: 271656 - DNA, 15 bp, Homo sapiens
aagctcatgtgatcc

SEQ ID NO: 271657 - DNA, 15 bp, Homo sapiens
caagctcatgtgatc

SEQ ID NO: 271658 - DNA, 15 bp, Homo sapiens
ccaagctcatgtgat

SEQ ID NO: 271659 - DNA, 15 bp, Homo sapiens
cccaagctcatgtga

SEQ ID NO: 271660 - DNA, 15 bp, Homo sapiens
tcccaagctcatgtg

SEQ ID NO: 271661 - DNA, 15 bp, Homo sapiens
ctcccaagctcatgt

SEQ ID NO: 271662 - DNA, 15 bp, Homo sapiens
actcccaagctcatg

SEQ ID NO: 271663 - DNA, 15 bp, Homo sapiens
aactcccaagctcat

SEQ ID NO: 271664 - DNA, 15 bp, Homo sapiens
caactcccaagctca

SEQ ID NO: 271665 - DNA, 15 bp, Homo sapiens
ccaactcccaagctc

SEQ ID NO: 271666 - DNA, 15 bp, Homo sapiens
tccaactcccaagct

SEQ ID NO: 271667 - DNA, 15 bp, Homo sapiens
ctccaactcccaagc

SEQ ID NO: 271668 - DNA, 15 bp, Homo sapiens
cctccaactcccaag

SEQ ID NO: 271669 - DNA, 15 bp, Homo sapiens
gcctccaactcccaa

SEQ ID NO: 271670 - DNA, 15 bp, Homo sapiens
ggcctccaactccca

SEQ ID NO: 271671 - DNA, 15 bp, Homo sapiens
tggcctccaactccc

SEQ ID NO: 271672 - DNA, 15 bp, Homo sapiens
ctggcctccaactcc

SEQ ID NO: 271673 - DNA, 15 bp, Homo sapiens
gctggcctccaactc

SEQ ID NO: 271674 - DNA, 15 bp, Homo sapiens
ggctggcctccaact

SEQ ID NO: 271675 - DNA, 15 bp, Homo sapiens
aggctggcctccaac

SEQ ID NO: 271676 - DNA, 15 bp, Homo sapiens
caggctggcctccaa

SEQ ID NO: 271677 - DNA, 15 bp, Homo sapiens
ccaggctggcctcca

SEQ ID NO: 271678 - DNA, 15 bp, Homo sapiens
cccaggctggcctcc

SEQ ID NO: 271679 - DNA, 15 bp, Homo sapiens
gcccaggctggcctc

SEQ ID NO: 271680 - DNA, 15 bp, Homo sapiens
tgcccaggctggcct

SEQ ID NO: 271681 - DNA, 15 bp, Homo sapiens
ttgcccaggctggcc

SEQ ID NO: 271682 - DNA, 15 bp, Homo sapiens
gttgcccaggctggc

SEQ ID NO: 271683 - DNA, 15 bp, Homo sapiens
tgttgcccaggctgg

SEQ ID NO: 271684 - DNA, 15 bp, Homo sapiens
ttgttgcccaggctg

SEQ ID NO: 271685 - DNA, 15 bp, Homo sapiens
tttgttgcccaggct

SEQ ID NO: 271686 - DNA, 15 bp, Homo sapiens
ctttgttgcccaggc

SEQ ID NO: 271687 - DNA, 15 bp, Homo sapiens
gctttgttgcccagg

SEQ ID NO: 271688 - DNA, 15 bp, Homo sapiens
tgctttgttgcccag

SEQ ID NO: 271689 - DNA, 15 bp, Homo sapiens
ttgctttgttgccca

SEQ ID NO: 271690 - DNA, 15 bp, Homo sapiens
cttgctttgttgccc

SEQ ID NO: 271691 - DNA, 15 bp, Homo sapiens
tcttgctttgttgcc

SEQ ID NO: 271692 - DNA, 15 bp, Homo sapiens
gtcttgctttgttgc

SEQ ID NO: 271693 - DNA, 15 bp, Homo sapiens
ggtcttgctttgttg

SEQ ID NO: 271694 - DNA, 15 bp, Homo sapiens
gggtcttgctttgtt

SEQ ID NO: 271695 - DNA, 15 bp, Homo sapiens
ggggtcttgctttgt

SEQ ID NO: 271696 - DNA, 15 bp, Homo sapiens
tggggtcttgctttg

SEQ ID NO: 271697 - DNA, 15 bp, Homo sapiens
ctggggtcttgcttt

SEQ ID NO: 271698 - DNA, 15 bp, Homo sapiens
actggggtcttgctt

SEQ ID NO: 271699 - DNA, 15 bp, Homo sapiens
gactggggtcttgct

SEQ ID NO: 271700 - DNA, 15 bp, Homo sapiens
agactggggtcttgc

SEQ ID NO: 271701 - DNA, 15 bp, Homo sapiens
aagactggggtcttg

SEQ ID NO: 271702 - DNA, 15 bp, Homo sapiens
aaagactggggtctt

SEQ ID NO: 271703 - DNA, 15 bp, Homo sapiens
taaagactggggtct

SEQ ID NO: 271704 - DNA, 15 bp, Homo sapiens
ttaaagactggggtc

SEQ ID NO: 271705 - DNA, 15 bp, Homo sapiens
tttaaagactggggt

SEQ ID NO: 271706 - DNA, 15 bp, Homo sapiens
ttttaaagactgggg

SEQ ID NO: 271707 - DNA, 15 bp, Homo sapiens
tttttaaagactggg

SEQ ID NO: 271708 - DNA, 15 bp, Homo sapiens
ttttttaaagactgg

SEQ ID NO: 271709 - DNA, 15 bp, Homo sapiens
tttttttaaagactg

SEQ ID NO: 271710 - DNA, 15 bp, Homo sapiens
gtttttttaaagact

SEQ ID NO: 271711 - DNA, 15 bp, Homo sapiens
tgtttttttaaagac

SEQ ID NO: 271712 - DNA, 15 bp, Homo sapiens
ttgtttttttaaaga

SEQ ID NO: 271713 - DNA, 15 bp, Homo sapiens
tttgtttttttaaag

SEQ ID NO: 271714 - DNA, 15 bp, Homo sapiens
ttttgtttttttaaa

SEQ ID NO: 271715 - DNA, 15 bp, Homo sapiens
tttttgtttttttaa

SEQ ID NO: 271716 - DNA, 15 bp, Homo sapiens
ttttttgttttttta

SEQ ID NO: 271717 - DNA, 15 bp, Homo sapiens
cttttttgttttttt

SEQ ID NO: 271718 - DNA, 15 bp, Homo sapiens
gcttttttgtttttt

SEQ ID NO: 271719 - DNA, 15 bp, Homo sapiens
agcttttttgttttt

SEQ ID NO: 271720 - DNA, 15 bp, Homo sapiens
cagcttttttgtttt

SEQ ID NO: 271721 - DNA, 15 bp, Homo sapiens
tcagcttttttgttt

SEQ ID NO: 271722 - DNA, 15 bp, Homo sapiens
gtcagcttttttgtt

SEQ ID NO: 271723 - DNA, 15 bp, Homo sapiens
ggtcagcttttttgt

SEQ ID NO: 271724 - DNA, 15 bp, Homo sapiens
tggtcagcttttttg

SEQ ID NO: 271725 - DNA, 15 bp, Homo sapiens
ctggtcagctttttt

SEQ ID NO: 271726 - DNA, 15 bp, Homo sapiens
cctggtcagcttttt

SEQ ID NO: 271727 - DNA, 15 bp, Homo sapiens
gcctggtcagctttt

SEQ ID NO: 271728 - DNA, 15 bp, Homo sapiens
tgcctggtcagcttt

SEQ ID NO: 271729 - DNA, 15 bp, Homo sapiens
atgcctggtcagctt

SEQ ID NO: 271730 - DNA, 15 bp, Homo sapiens
catgcctggtcagct

SEQ ID NO: 271731 - DNA, 15 bp, Homo sapiens
acatgcctggtcagc

SEQ ID NO: 271732 - DNA, 15 bp, Homo sapiens
aacatgcctggtcag

SEQ ID NO: 271733 - DNA, 15 bp, Homo sapiens
caacatgcctggtca

SEQ ID NO: 271734 - DNA, 15 bp, Homo sapiens
ccaacatgcctggtc

SEQ ID NO: 271735 - DNA, 15 bp, Homo sapiens
gccaacatgcctggt

SEQ ID NO: 271736 - DNA, 15 bp, Homo sapiens
agccaacatgcctgg

SEQ ID NO: 271737 - DNA, 15 bp, Homo sapiens
gagccaacatgcctg

SEQ ID NO: 271738 - DNA, 15 bp, Homo sapiens
tgagccaacatgcct

SEQ ID NO: 271739 - DNA, 15 bp, Homo sapiens
gtgagccaacatgcc

SEQ ID NO: 271740 - DNA, 15 bp, Homo sapiens
cgtgagccaacatgc

SEQ ID NO: 271741 - DNA, 15 bp, Homo sapiens
gcgtgagccaacatg

SEQ ID NO: 271742 - DNA, 15 bp, Homo sapiens
ggcgtgagccaacat

SEQ ID NO: 271743 - DNA, 15 bp, Homo sapiens
aggcgtgagccaaca

SEQ ID NO: 271744 - DNA, 15 bp, Homo sapiens
caggcgtgagccaac

SEQ ID NO: 271745 - DNA, 15 bp, Homo sapiens
acaggcgtgagccaa

SEQ ID NO: 271746 - DNA, 15 bp, Homo sapiens
tacaggcgtgagcca

SEQ ID NO: 271747 - DNA, 15 bp, Homo sapiens
ttacaggcgtgagcc

SEQ ID NO: 271748 - DNA, 15 bp, Homo sapiens
attacaggcgtgagc

SEQ ID NO: 271749 - DNA, 15 bp, Homo sapiens
cattacaggcgtgag

SEQ ID NO: 271750 - DNA, 15 bp, Homo sapiens
gcattacaggcgtga

SEQ ID NO: 271751 - DNA, 15 bp, Homo sapiens
ggcattacaggcgtg

SEQ ID NO: 271752 - DNA, 15 bp, Homo sapiens
tggcattacaggcgt

SEQ ID NO: 271753 - DNA, 15 bp, Homo sapiens
ctggcattacaggcg

SEQ ID NO: 271754 - DNA, 15 bp, Homo sapiens
gctggcattacaggc

SEQ ID NO: 271755 - DNA, 15 bp, Homo sapiens
tgctggcattacagg

SEQ ID NO: 271756 - DNA, 15 bp, Homo sapiens
gtgctggcattacag

SEQ ID NO: 271757 - DNA, 15 bp, Homo sapiens
agtgctggcattaca

SEQ ID NO: 271758 - DNA, 15 bp, Homo sapiens
aagtgctggcattac

SEQ ID NO: 271759 - DNA, 15 bp, Homo sapiens
aaagtgctggcatta

SEQ ID NO: 271760 - DNA, 15 bp, Homo sapiens
caaagtgctggcatt

SEQ ID NO: 271761 - DNA, 15 bp, Homo sapiens
ccaaagtgctggcat

SEQ ID NO: 271762 - DNA, 15 bp, Homo sapiens
cccaaagtgctggca

SEQ ID NO: 271763 - DNA, 15 bp, Homo sapiens
tcccaaagtgctggc

SEQ ID NO: 271764 - DNA, 15 bp, Homo sapiens
ctcccaaagtgctgg

SEQ ID NO: 271765 - DNA, 15 bp, Homo sapiens
cctcccaaagtgctg

SEQ ID NO: 271766 - DNA, 15 bp, Homo sapiens
gcctcccaaagtgct

SEQ ID NO: 271767 - DNA, 15 bp, Homo sapiens
ggcctcccaaagtgc

SEQ ID NO: 271768 - DNA, 15 bp, Homo sapiens
tggcctcccaaagtg

SEQ ID NO: 271769 - DNA, 15 bp, Homo sapiens
ttggcctcccaaagt

SEQ ID NO: 271770 - DNA, 15 bp, Homo sapiens
cttggcctcccaaag

SEQ ID NO: 271771 - DNA, 15 bp, Homo sapiens
tcttggcctcccaaa

SEQ ID NO: 271772 - DNA, 15 bp, Homo sapiens
atcttggcctcccaa

SEQ ID NO: 271773 - DNA, 15 bp, Homo sapiens
catcttggcctccca

SEQ ID NO: 271774 - DNA, 15 bp, Homo sapiens
ccatcttggcctccc

SEQ ID NO: 271775 - DNA, 15 bp, Homo sapiens
cccatcttggcctcc

SEQ ID NO: 271776 - DNA, 15 bp, Homo sapiens
tcccatcttggcctc

SEQ ID NO: 271777 - DNA, 15 bp, Homo sapiens
ttcccatcttggcct

SEQ ID NO: 271778 - DNA, 15 bp, Homo sapiens
cttcccatcttggcc

SEQ ID NO: 271779 - DNA, 15 bp, Homo sapiens
tcttcccatcttggc

SEQ ID NO: 271780 - DNA, 15 bp, Homo sapiens
atcttcccatcttgg

SEQ ID NO: 271781 - DNA, 15 bp, Homo sapiens
aatcttcccatcttg

SEQ ID NO: 271782 - DNA, 15 bp, Homo sapiens
caatcttcccatctt

SEQ ID NO: 271783 - DNA, 15 bp, Homo sapiens
gcaatcttcccatct

SEQ ID NO: 271784 - DNA, 15 bp, Homo sapiens
agcaatcttcccatc

SEQ ID NO: 271785 - DNA, 15 bp, Homo sapiens
aagcaatcttcccat

SEQ ID NO: 271786 - DNA, 15 bp, Homo sapiens
caagcaatcttccca

SEQ ID NO: 271787 - DNA, 15 bp, Homo sapiens
tcaagcaatcttccc

SEQ ID NO: 271788 - DNA, 15 bp, Homo sapiens
ctcaagcaatcttcc

SEQ ID NO: 271789 - DNA, 15 bp, Homo sapiens
cctcaagcaatcttc

SEQ ID NO: 271790 - DNA, 15 bp, Homo sapiens
gcctcaagcaatctt

SEQ ID NO: 271791 - DNA, 15 bp, Homo sapiens
ggcctcaagcaatct

SEQ ID NO: 271792 - DNA, 15 bp, Homo sapiens
tggcctcaagcaatc

SEQ ID NO: 271793 - DNA, 15 bp, Homo sapiens
ctggcctcaagcaat

SEQ ID NO: 271794 - DNA, 15 bp, Homo sapiens
cctggcctcaagcaa

SEQ ID NO: 271795 - DNA, 15 bp, Homo sapiens
tcctggcctcaagca

SEQ ID NO: 271796 - DNA, 15 bp, Homo sapiens
ctcctggcctcaagc

SEQ ID NO: 271797 - DNA, 15 bp, Homo sapiens
actcctggcctcaag

SEQ ID NO: 271798 - DNA, 15 bp, Homo sapiens
aactcctggcctcaa

SEQ ID NO: 271799 - DNA, 15 bp, Homo sapiens
aaactcctggcctca

SEQ ID NO: 271800 - DNA, 15 bp, Homo sapiens
caaactcctggcctc

SEQ ID NO: 271801 - DNA, 15 bp, Homo sapiens
tcaaactcctggcct

SEQ ID NO: 271802 - DNA, 15 bp, Homo sapiens
ctcaaactcctggcc

SEQ ID NO: 271803 - DNA, 15 bp, Homo sapiens
tctcaaactcctggc

SEQ ID NO: 271804 - DNA, 15 bp, Homo sapiens
ctctcaaactcctgg

SEQ ID NO: 271805 - DNA, 15 bp, Homo sapiens
cctctcaaactcctg

SEQ ID NO: 271806 - DNA, 15 bp, Homo sapiens
tcctctcaaactcct

SEQ ID NO: 271807 - DNA, 15 bp, Homo sapiens
ctcctctcaaactcc

SEQ ID NO: 271808 - DNA, 15 bp, Homo sapiens
gctcctctcaaactc

SEQ ID NO: 271809 - DNA, 15 bp, Homo sapiens
ggctcctctcaaact

SEQ ID NO: 271810 - DNA, 15 bp, Homo sapiens
aggctcctctcaaac

SEQ ID NO: 271811 - DNA, 15 bp, Homo sapiens
caggctcctctcaaa

SEQ ID NO: 271812 - DNA, 15 bp, Homo sapiens
ccaggctcctctcaa

SEQ ID NO: 271813 - DNA, 15 bp, Homo sapiens
cccaggctcctctca

SEQ ID NO: 271814 - DNA, 15 bp, Homo sapiens
gcccaggctcctctc

SEQ ID NO: 271815 - DNA, 15 bp, Homo sapiens
tgcccaggctcctct

SEQ ID NO: 271816 - DNA, 15 bp, Homo sapiens
ttgcccaggctcctc

SEQ ID NO: 271817 - DNA, 15 bp, Homo sapiens
gttgcccaggctcct

SEQ ID NO: 271818 - DNA, 15 bp, Homo sapiens
tgttgcccaggctcc

SEQ ID NO: 271819 - DNA, 15 bp, Homo sapiens
ttgttgcccaggctc

SEQ ID NO: 271820 - DNA, 15 bp, Homo sapiens
ttttgttgcccaggc

SEQ ID NO: 271821 - DNA, 15 bp, Homo sapiens
gttttgttgcccagg

SEQ ID NO: 271822 - DNA, 15 bp, Homo sapiens
tgttttgttgcccag

SEQ ID NO: 271823 - DNA, 15 bp, Homo sapiens
ttgttttgttgccca

SEQ ID NO: 271824 - DNA, 15 bp, Homo sapiens
cttgttttgttgccc

SEQ ID NO: 271825 - DNA, 15 bp, Homo sapiens
tcttgttttgttgcc

SEQ ID NO: 271826 - DNA, 15 bp, Homo sapiens
gtcttgttttgttgc

SEQ ID NO: 271827 - DNA, 15 bp, Homo sapiens
ggtcttgttttgttg

SEQ ID NO: 271828 - DNA, 15 bp, Homo sapiens
gggtcttgttttgtt

SEQ ID NO: 271829 - DNA, 15 bp, Homo sapiens
agggtcttgttttgt

SEQ ID NO: 271830 - DNA, 15 bp, Homo sapiens
cagggtcttgttttg

SEQ ID NO: 271831 - DNA, 15 bp, Homo sapiens
acagggtcttgtttt

SEQ ID NO: 271832 - DNA, 15 bp, Homo sapiens
gacagggtcttgttt

SEQ ID NO: 271833 - DNA, 15 bp, Homo sapiens
agacagggtcttgtt

SEQ ID NO: 271834 - DNA, 15 bp, Homo sapiens
gagacagggtcttgt

SEQ ID NO: 271835 - DNA, 15 bp, Homo sapiens
agagacagggtcttg

SEQ ID NO: 271836 - DNA, 15 bp, Homo sapiens
tagagacagggtctt

SEQ ID NO: 271837 - DNA, 15 bp, Homo sapiens
ttagagacagggtct

SEQ ID NO: 271838 - DNA, 15 bp, Homo sapiens
tttagagacagggtc

SEQ ID NO: 271839 - DNA, 15 bp, Homo sapiens
ttttagagacagggt

SEQ ID NO: 271840 - DNA, 15 bp, Homo sapiens
gttttagagacaggg

SEQ ID NO: 271841 - DNA, 15 bp, Homo sapiens
tgttttagagacagg

SEQ ID NO: 271842 - DNA, 15 bp, Homo sapiens
ttgttttagagacag

SEQ ID NO: 271843 - DNA, 15 bp, Homo sapiens
tttgttttagagaca

SEQ ID NO: 271844 - DNA, 15 bp, Homo sapiens
atttgttttagagac

SEQ ID NO: 271845 - DNA, 15 bp, Homo sapiens
aatttgttttagaga

SEQ ID NO: 271846 - DNA, 15 bp, Homo sapiens
aaatttgttttagag

SEQ ID NO: 271847 - DNA, 15 bp, Homo sapiens
aaaatttgttttaga

SEQ ID NO: 271848 - DNA, 15 bp, Homo sapiens
taaaatttgttttag

SEQ ID NO: 271849 - DNA, 15 bp, Homo sapiens
ttaaaatttgtttta

SEQ ID NO: 271850 - DNA, 15 bp, Homo sapiens
tttaaaatttgtttt

SEQ ID NO: 271851 - DNA, 15 bp, Homo sapiens
ttttaaaatttgttt

SEQ ID NO: 271852 - DNA, 15 bp, Homo sapiens
tttttaaaatttgtt

SEQ ID NO: 271853 - DNA, 15 bp, Homo sapiens
ttttttaaaatttgt

SEQ ID NO: 271854 - DNA, 15 bp, Homo sapiens
attttttaaaatttg

SEQ ID NO: 271855 - DNA, 15 bp, Homo sapiens
aattttttaaaattt

SEQ ID NO: 271856 - DNA, 15 bp, Homo sapiens
taattttttaaaatt

SEQ ID NO: 271857 - DNA, 15 bp, Homo sapiens
ctaattttttaaaat

SEQ ID NO: 271858 - DNA, 15 bp, Homo sapiens
gctaattttttaaaa

SEQ ID NO: 271859 - DNA, 15 bp, Homo sapiens
ggctaattttttaaa

SEQ ID NO: 271860 - DNA, 15 bp, Homo sapiens
tggctaattttttaa

SEQ ID NO: 271861 - DNA, 15 bp, Homo sapiens
ctggctaatttttta

SEQ ID NO: 271862 - DNA, 15 bp, Homo sapiens
actggctaatttttt

SEQ ID NO: 271863 - DNA, 15 bp, Homo sapiens
cactggctaattttt

SEQ ID NO: 271864 - DNA, 15 bp, Homo sapiens
ccactggctaatttt

SEQ ID NO: 271865 - DNA, 15 bp, Homo sapiens
gccactggctaattt

SEQ ID NO: 271866 - DNA, 15 bp, Homo sapiens
agccactggctaatt

SEQ ID NO: 271867 - DNA, 15 bp, Homo sapiens
cagccactggctaat

SEQ ID NO: 271868 - DNA, 15 bp, Homo sapiens
acagccactggctaa

SEQ ID NO: 271869 - DNA, 15 bp, Homo sapiens
cacagccactggcta

SEQ ID NO: 271870 - DNA, 15 bp, Homo sapiens
ccacagccactggct

SEQ ID NO: 271871 - DNA, 15 bp, Homo sapiens
gccacagccactggc

SEQ ID NO: 271872 - DNA, 15 bp, Homo sapiens
tgccacagccactgg

SEQ ID NO: 271873 - DNA, 15 bp, Homo sapiens
gtgccacagccactg

SEQ ID NO: 271874 - DNA, 15 bp, Homo sapiens
tgtgccacagccact

SEQ ID NO: 271875 - DNA, 15 bp, Homo sapiens
gtgtgccacagccac

SEQ ID NO: 271876 - DNA, 15 bp, Homo sapiens
ggtgtgccacagcca

SEQ ID NO: 271877 - DNA, 15 bp, Homo sapiens
aggtgtgccacagcc

SEQ ID NO: 271878 - DNA, 15 bp, Homo sapiens
caggtgtgccacagc

SEQ ID NO: 271879 - DNA, 15 bp, Homo sapiens
acaggtgtgccacag

SEQ ID NO: 271880 - DNA, 15 bp, Homo sapiens
tacaggtgtgccaca

SEQ ID NO: 271881 - DNA, 15 bp, Homo sapiens
ctacaggtgtgccac

SEQ ID NO: 271882 - DNA, 15 bp, Homo sapiens
cctacaggtgtgcca

SEQ ID NO: 271883 - DNA, 15 bp, Homo sapiens
gcctacaggtgtgcc

SEQ ID NO: 271884 - DNA, 15 bp, Homo sapiens
agcctacaggtgtgc

SEQ ID NO: 271885 - DNA, 15 bp, Homo sapiens
gagcctacaggtgtg

SEQ ID NO: 271886 - DNA, 15 bp, Homo sapiens
tgagcctacaggtgt

SEQ ID NO: 271887 - DNA, 15 bp, Homo sapiens
atgagcctacaggtg

SEQ ID NO: 271888 - DNA, 15 bp, Homo sapiens
gatgagcctacaggt

SEQ ID NO: 271889 - DNA, 15 bp, Homo sapiens
agatgagcctacagg

SEQ ID NO: 271890 - DNA, 15 bp, Homo sapiens
tagatgagcctacag

SEQ ID NO: 271891 - DNA, 15 bp, Homo sapiens
gtagatgagcctaca

SEQ ID NO: 271892 - DNA, 15 bp, Homo sapiens
agtagatgagcctac

SEQ ID NO: 271893 - DNA, 15 bp, Homo sapiens
gagtagatgagccta

SEQ ID NO: 271894 - DNA, 15 bp, Homo sapiens
tgagtagatgagcct

SEQ ID NO: 271895 - DNA, 15 bp, Homo sapiens
ctgagtagatgagcc

SEQ ID NO: 271896 - DNA, 15 bp, Homo sapiens
cctgagtagatgagc

SEQ ID NO: 271897 - DNA, 15 bp, Homo sapiens
tcctgagtagatgag

SEQ ID NO: 271898 - DNA, 15 bp, Homo sapiens
ctcctgagtagatga

SEQ ID NO: 271899 - DNA, 15 bp, Homo sapiens
cctcctgagtagatg

SEQ ID NO: 271900 - DNA, 15 bp, Homo sapiens
gcctcctgagtagat

SEQ ID NO: 271901 - DNA, 15 bp, Homo sapiens
agcctcctgagtaga

SEQ ID NO: 271902 - DNA, 15 bp, Homo sapiens
acctcagcctcctga

SEQ ID NO: 271903 - DNA, 15 bp, Homo sapiens
cacctcagcctcctg

SEQ ID NO: 271904 - DNA, 15 bp, Homo sapiens
ccacctcagcctcct

SEQ ID NO: 271905 - DNA, 15 bp, Homo sapiens
cccacctcagcctcc

SEQ ID NO: 271906 - DNA, 15 bp, Homo sapiens
tcccacctcagcctc

SEQ ID NO: 271907 - DNA, 15 bp, Homo sapiens
ctcccacctcagcct

SEQ ID NO: 271908 - DNA, 15 bp, Homo sapiens
cctcccacctcagcc

SEQ ID NO: 271909 - DNA, 15 bp, Homo sapiens
tcctcccacctcagc

SEQ ID NO: 271910 - DNA, 15 bp, Homo sapiens
atcctcccacctcag

SEQ ID NO: 271911 - DNA, 15 bp, Homo sapiens
gatcctcccacctca

SEQ ID NO: 271912 - DNA, 15 bp, Homo sapiens
ggatcctcccacctc

SEQ ID NO: 271913 - DNA, 15 bp, Homo sapiens
gggatcctcccacct

SEQ ID NO: 271914 - DNA, 15 bp, Homo sapiens
agggatcctcccacc

SEQ ID NO: 271915 - DNA, 15 bp, Homo sapiens
aagggatcctcccac

SEQ ID NO: 271916 - DNA, 15 bp, Homo sapiens
caagggatcctccca

SEQ ID NO: 271917 - DNA, 15 bp, Homo sapiens
tcaagggatcctccc

SEQ ID NO: 271918 - DNA, 15 bp, Homo sapiens
ctcaagggatcctcc

SEQ ID NO: 271919 - DNA, 15 bp, Homo sapiens
gctcaagggatcctc

SEQ ID NO: 271920 - DNA, 15 bp, Homo sapiens
ggctcaagggatcct

SEQ ID NO: 271921 - DNA, 15 bp, Homo sapiens
gggctcaagggatcc

SEQ ID NO: 271922 - DNA, 15 bp, Homo sapiens
tgggctcaagggatc

SEQ ID NO: 271923 - DNA, 15 bp, Homo sapiens
ctgggctcaagggat

SEQ ID NO: 271924 - DNA, 15 bp, Homo sapiens
cctgggctcaaggga

SEQ ID NO: 271925 - DNA, 15 bp, Homo sapiens
tcctgggctcaaggg

SEQ ID NO: 271926 - DNA, 15 bp, Homo sapiens
ctcctgggctcaagg

SEQ ID NO: 271927 - DNA, 15 bp, Homo sapiens
actcctgggctcaag

SEQ ID NO: 271928 - DNA, 15 bp, Homo sapiens
aactcctgggctcaa

SEQ ID NO: 271929 - DNA, 15 bp, Homo sapiens
aaactcctgggctca

SEQ ID NO: 271930 - DNA, 15 bp, Homo sapiens
caaactcctgggctc

SEQ ID NO: 271931 - DNA, 15 bp, Homo sapiens
tcaaactcctgggct

SEQ ID NO: 271932 - DNA, 15 bp, Homo sapiens
ctcaaactcctgggc

SEQ ID NO: 271933 - DNA, 15 bp, Homo sapiens
tctcaaactcctggg

SEQ ID NO: 271934 - DNA, 15 bp, Homo sapiens
gtctcaaactcctgg

SEQ ID NO: 271935 - DNA, 15 bp, Homo sapiens
agtctcaaactcctg

SEQ ID NO: 271936 - DNA, 15 bp, Homo sapiens
cagtctcaaactcct

SEQ ID NO: 271937 - DNA, 15 bp, Homo sapiens
gcagtctcaaactcc

SEQ ID NO: 271938 - DNA, 15 bp, Homo sapiens
tgcagtctcaaactc

SEQ ID NO: 271939 - DNA, 15 bp, Homo sapiens
ctgcagtctcaaact

SEQ ID NO: 271940 - DNA, 15 bp, Homo sapiens
actgcagtctcaaac

SEQ ID NO: 271941 - DNA, 15 bp, Homo sapiens
cactgcagtctcaaa

SEQ ID NO: 271942 - DNA, 15 bp, Homo sapiens
tcactgcagtctcaa

SEQ ID NO: 271943 - DNA, 15 bp, Homo sapiens
ctcactgcagtctca

SEQ ID NO: 271944 - DNA, 15 bp, Homo sapiens
gctcactgcagtctc

SEQ ID NO: 271945 - DNA, 15 bp, Homo sapiens
ggctcactgcagtct

SEQ ID NO: 271946 - DNA, 15 bp, Homo sapiens
tggctcactgcagtc

SEQ ID NO: 271947 - DNA, 15 bp, Homo sapiens
atggctcactgcagt

SEQ ID NO: 271948 - DNA, 15 bp, Homo sapiens
catggctcactgcag

SEQ ID NO: 271949 - DNA, 15 bp, Homo sapiens
tcatggctcactgca

SEQ ID NO: 271950 - DNA, 15 bp, Homo sapiens
atcatggctcactgc

SEQ ID NO: 271951 - DNA, 15 bp, Homo sapiens
aatcatggctcactg

SEQ ID NO: 271952 - DNA, 15 bp, Homo sapiens
aaatcatggctcact

SEQ ID NO: 271953 - DNA, 15 bp, Homo sapiens
gaaatcatggctcac

SEQ ID NO: 271954 - DNA, 15 bp, Homo sapiens
tgaaatcatggctca

SEQ ID NO: 271955 - DNA, 15 bp, Homo sapiens
gtgaaatcatggctc

SEQ ID NO: 271956 - DNA, 15 bp, Homo sapiens
ggtgaaatcatggct

SEQ ID NO: 271957 - DNA, 15 bp, Homo sapiens
tggtgaaatcatggc

SEQ ID NO: 271958 - DNA, 15 bp, Homo sapiens
gtggtgaaatcatgg

SEQ ID NO: 271959 - DNA, 15 bp, Homo sapiens
agtggtgaaatcatg

SEQ ID NO: 271960 - DNA, 15 bp, Homo sapiens
cagtggtgaaatcat

SEQ ID NO: 271961 - DNA, 15 bp, Homo sapiens
gcagtggtgaaatca

SEQ ID NO: 271962 - DNA, 15 bp, Homo sapiens
tgcagtggtgaaatc

SEQ ID NO: 271963 - DNA, 15 bp, Homo sapiens
gtgcagtggtgaaat

SEQ ID NO: 271964 - DNA, 15 bp, Homo sapiens
ggtgcagtggtgaaa

SEQ ID NO: 271965 - DNA, 15 bp, Homo sapiens
gggtgcagtggtgaa

SEQ ID NO: 271966 - DNA, 15 bp, Homo sapiens
ggggtgcagtggtga

SEQ ID NO: 271967 - DNA, 15 bp, Homo sapiens
tggggtgcagtggtg

SEQ ID NO: 271968 - DNA, 15 bp, Homo sapiens
ctggggtgcagtggt

SEQ ID NO: 271969 - DNA, 15 bp, Homo sapiens
gctggggtgcagtgg

SEQ ID NO: 271970 - DNA, 15 bp, Homo sapiens
ggctggggtgcagtg

SEQ ID NO: 271971 - DNA, 15 bp, Homo sapiens
aggctggggtgcagt

SEQ ID NO: 271972 - DNA, 15 bp, Homo sapiens
caggctggggtgcag

SEQ ID NO: 271973 - DNA, 15 bp, Homo sapiens
ccaggctggggtgca

SEQ ID NO: 271974 - DNA, 15 bp, Homo sapiens
tccaggctggggtgc

SEQ ID NO: 271975 - DNA, 15 bp, Homo sapiens
atccaggctggggtg

SEQ ID NO: 271976 - DNA, 15 bp, Homo sapiens
catccaggctggggt

SEQ ID NO: 271977 - DNA, 15 bp, Homo sapiens
tcatccaggctgggg

SEQ ID NO: 271978 - DNA, 15 bp, Homo sapiens
gtcatccaggctggg

SEQ ID NO: 271979 - DNA, 15 bp, Homo sapiens
tgtcatccaggctgg

SEQ ID NO: 271980 - DNA, 15 bp, Homo sapiens
ctgtcatccaggctg

SEQ ID NO: 271981 - DNA, 15 bp, Homo sapiens
tctgtcatccaggct

SEQ ID NO: 271982 - DNA, 15 bp, Homo sapiens
ctctgtcatccaggc

SEQ ID NO: 271983 - DNA, 15 bp, Homo sapiens
actctgtcatccagg

SEQ ID NO: 271984 - DNA, 15 bp, Homo sapiens
cactctgtcatccag

SEQ ID NO: 271985 - DNA, 15 bp, Homo sapiens
tcactctgtcatcca

SEQ ID NO: 271986 - DNA, 15 bp, Homo sapiens
ttcactctgtcatcc

SEQ ID NO: 271987 - DNA, 15 bp, Homo sapiens
tttcactctgtcatc

SEQ ID NO: 271988 - DNA, 15 bp, Homo sapiens
gtttcactctgtcat

SEQ ID NO: 271989 - DNA, 15 bp, Homo sapiens
ggtttcactctgtca

SEQ ID NO: 271990 - DNA, 15 bp, Homo sapiens
gggtttcactctgtc

SEQ ID NO: 271991 - DNA, 15 bp, Homo sapiens
agggtttcactctgt

SEQ ID NO: 271992 - DNA, 15 bp, Homo sapiens
tagggtttcactctg

SEQ ID NO: 271993 - DNA, 15 bp, Homo sapiens
atagggtttcactct

SEQ ID NO: 271994 - DNA, 15 bp, Homo sapiens
aatagggtttcactc

SEQ ID NO: 271995 - DNA, 15 bp, Homo sapiens
aaatagggtttcact

SEQ ID NO: 271996 - DNA, 15 bp, Homo sapiens
gaaatagggtttcac

SEQ ID NO: 271997 - DNA, 15 bp, Homo sapiens
tgaaatagggtttca

SEQ ID NO: 271998 - DNA, 15 bp, Homo sapiens
ttgaaatagggtttc

SEQ ID NO: 271999 - DNA, 15 bp, Homo sapiens
tttgaaatagggttt

SEQ ID NO: 272000 - DNA, 15 bp, Homo sapiens
ttttgaaatagggtt

SEQ ID NO: 272001 - DNA, 15 bp, Homo sapiens
gttttgaaatagggt

SEQ ID NO: 272002 - DNA, 15 bp, Homo sapiens
tgttttgaaataggg

SEQ ID NO: 272003 - DNA, 15 bp, Homo sapiens
ttgttttgaaatagg

SEQ ID NO: 272004 - DNA, 15 bp, Homo sapiens
cttgttttgaaatag

SEQ ID NO: 272005 - DNA, 15 bp, Homo sapiens
tcttgttttgaaata

SEQ ID NO: 272006 - DNA, 15 bp, Homo sapiens
ttcttgttttgaaat

SEQ ID NO: 272007 - DNA, 15 bp, Homo sapiens
tttcttgttttgaaa

SEQ ID NO: 272008 - DNA, 15 bp, Homo sapiens
ttttcttgttttgaa

SEQ ID NO: 272009 - DNA, 15 bp, Homo sapiens
tttttcttgttttga

SEQ ID NO: 272010 - DNA, 15 bp, Homo sapiens
ttttttcttgttttg

SEQ ID NO: 272011 - DNA, 15 bp, Homo sapiens
tttttttcttgtttt

SEQ ID NO: 272012 - DNA, 15 bp, Homo sapiens
ttttttttcttgttt

SEQ ID NO: 272013 - DNA, 15 bp, Homo sapiens
tttttttttcttgtt

SEQ ID NO: 272014 - DNA, 15 bp, Homo sapiens
gtttttttttcttgt

SEQ ID NO: 272015 - DNA, 15 bp, Homo sapiens
tgtttttttttcttg

SEQ ID NO: 272016 - DNA, 15 bp, Homo sapiens
ttgtttttttttctt

SEQ ID NO: 272017 - DNA, 15 bp, Homo sapiens
tttgtttttttttct

SEQ ID NO: 272018 - DNA, 15 bp, Homo sapiens
ttttgtttttttttc

SEQ ID NO: 272019 - DNA, 15 bp, Homo sapiens
tttttgttttttttt

SEQ ID NO: 272020 - DNA, 15 bp, Homo sapiens
gtttttgtttttttt

SEQ ID NO: 272021 - DNA, 15 bp, Homo sapiens
agtttttgttttttt

SEQ ID NO: 272022 - DNA, 15 bp, Homo sapiens
tagtttttgtttttt

SEQ ID NO: 272023 - DNA, 15 bp, Homo sapiens
ttagtttttgttttt

SEQ ID NO: 272024 - DNA, 15 bp, Homo sapiens
attagtttttgtttt

SEQ ID NO: 272025 - DNA, 15 bp, Homo sapiens
aattagtttttgttt

SEQ ID NO: 272026 - DNA, 15 bp, Homo sapiens
taattagtttttgtt

SEQ ID NO: 272027 - DNA, 15 bp, Homo sapiens
ataattagtttttgt

SEQ ID NO: 272028 - DNA, 15 bp, Homo sapiens
cataattagtttttg

SEQ ID NO: 272029 - DNA, 15 bp, Homo sapiens
acataattagttttt

SEQ ID NO: 272030 - DNA, 15 bp, Homo sapiens
aacataattagtttt

SEQ ID NO: 272031 - DNA, 15 bp, Homo sapiens
tccttgtatcatagt

SEQ ID NO: 272032 - DNA, 15 bp, Homo sapiens
gtccttgtatcatag

SEQ ID NO: 272033 - DNA, 15 bp, Homo sapiens
agtccttgtatcata

SEQ ID NO: 272034 - DNA, 15 bp, Homo sapiens
aagtccttgtatcat

SEQ ID NO: 272035 - DNA, 15 bp, Homo sapiens
aaagtccttgtatca

SEQ ID NO: 272036 - DNA, 15 bp, Homo sapiens
aaaagtccttgtatc

SEQ ID NO: 272037 - DNA, 15 bp, Homo sapiens
taaaagtccttgtat

SEQ ID NO: 272038 - DNA, 15 bp, Homo sapiens
ttaaaagtccttgta

SEQ ID NO: 272039 - DNA, 15 bp, Homo sapiens
tttaaaagtccttgt

SEQ ID NO: 272040 - DNA, 15 bp, Homo sapiens
ttttaaaagtccttg

SEQ ID NO: 272041 - DNA, 15 bp, Homo sapiens
tttttaaaagtcctt

SEQ ID NO: 272042 - DNA, 15 bp, Homo sapiens
ttttttaaaagtcct

SEQ ID NO: 272043 - DNA, 15 bp, Homo sapiens
tttttttaaaagtcc

SEQ ID NO: 272044 - DNA, 15 bp, Homo sapiens
gtttttttaaaagtc

SEQ ID NO: 272045 - DNA, 15 bp, Homo sapiens
tgtttttttaaaagt

SEQ ID NO: 272046 - DNA, 15 bp, Homo sapiens
gtgtttttttaaaag

SEQ ID NO: 272047 - DNA, 15 bp, Homo sapiens
ggtgtttttttaaaa

SEQ ID NO: 272048 - DNA, 15 bp, Homo sapiens
cggtgtttttttaaa

SEQ ID NO: 272049 - DNA, 15 bp, Homo sapiens
gcggtgtttttttaa

SEQ ID NO: 272050 - DNA, 15 bp, Homo sapiens
ggcggtgttttttta

SEQ ID NO: 272051 - DNA, 15 bp, Homo sapiens
tggcggtgttttttt

SEQ ID NO: 272052 - DNA, 15 bp, Homo sapiens
atggcggtgtttttt

SEQ ID NO: 272053 - DNA, 15 bp, Homo sapiens
tatggcggtgttttt

SEQ ID NO: 272054 - DNA, 15 bp, Homo sapiens
gtatggcggtgtttt

SEQ ID NO: 272055 - DNA, 15 bp, Homo sapiens
ggtatggcggtgttt

SEQ ID NO: 272056 - DNA, 15 bp, Homo sapiens
aggtatggcggtgtt

SEQ ID NO: 272057 - DNA, 15 bp, Homo sapiens
aaggtatggcggtgt

SEQ ID NO: 272058 - DNA, 15 bp, Homo sapiens
taaggtatggcggtg

SEQ ID NO: 272059 - DNA, 15 bp, Homo sapiens
ataaggtatggcggt

SEQ ID NO: 272060 - DNA, 15 bp, Homo sapiens
tataaggtatggcgg

SEQ ID NO: 272061 - DNA, 15 bp, Homo sapiens
ttataaggtatggcg

SEQ ID NO: 272062 - DNA, 15 bp, Homo sapiens
tttataaggtatggc

SEQ ID NO: 272063 - DNA, 15 bp, Homo sapiens
ttttataaggtatgg

SEQ ID NO: 272064 - DNA, 15 bp, Homo sapiens
attttataaggtatg

SEQ ID NO: 272065 - DNA, 15 bp, Homo sapiens
tattttataaggtat

SEQ ID NO: 272066 - DNA, 15 bp, Homo sapiens
ttattttataaggta

SEQ ID NO: 272067 - DNA, 15 bp, Homo sapiens
attattttataaggt

SEQ ID NO: 272068 - DNA, 15 bp, Homo sapiens
aattattttataagg

SEQ ID NO: 272069 - DNA, 15 bp, Homo sapiens
aaattattttataag

SEQ ID NO: 272070 - DNA, 15 bp, Homo sapiens
aaaattattttataa

SEQ ID NO: 272071 - DNA, 15 bp, Homo sapiens
aaaaattattttata

SEQ ID NO: 272072 - DNA, 15 bp, Homo sapiens
taaaaattattttat

SEQ ID NO: 272073 - DNA, 15 bp, Homo sapiens
ataaaaattatttta

SEQ ID NO: 272074 - DNA, 15 bp, Homo sapiens
tataaaaattatttt

SEQ ID NO: 272075 - DNA, 15 bp, Homo sapiens
gtataaaaattattt

SEQ ID NO: 272076 - DNA, 15 bp, Homo sapiens
ggtataaaaattatt

SEQ ID NO: 272077 - DNA, 15 bp, Homo sapiens
aggtataaaaattat

SEQ ID NO: 272078 - DNA, 15 bp, Homo sapiens
aaggtataaaaatta

SEQ ID NO: 272079 - DNA, 15 bp, Homo sapiens
gaaggtataaaaatt

SEQ ID NO: 272080 - DNA, 15 bp, Homo sapiens
agaaggtataaaaat

SEQ ID NO: 272081 - DNA, 15 bp, Homo sapiens
tagaaggtataaaaa

SEQ ID NO: 272082 - DNA, 15 bp, Homo sapiens
ttagaaggtataaaa

SEQ ID NO: 272083 - DNA, 15 bp, Homo sapiens
attagaaggtataaa

SEQ ID NO: 272084 - DNA, 15 bp, Homo sapiens
tattagaaggtataa

SEQ ID NO: 272085 - DNA, 15 bp, Homo sapiens
atattagaaggtata

SEQ ID NO: 272086 - DNA, 15 bp, Homo sapiens
catattagaaggtat

SEQ ID NO: 272087 - DNA, 15 bp, Homo sapiens
gcatattagaaggta

SEQ ID NO: 272088 - DNA, 15 bp, Homo sapiens
tgcatattagaaggt

SEQ ID NO: 272089 - DNA, 15 bp, Homo sapiens
ttgcatattagaagg

SEQ ID NO: 272090 - DNA, 15 bp, Homo sapiens
attgcatattagaag

SEQ ID NO: 272091 - DNA, 15 bp, Homo sapiens
gattgcatattagaa

SEQ ID NO: 272092 - DNA, 15 bp, Homo sapiens
tgattgcatattaga

SEQ ID NO: 272093 - DNA, 15 bp, Homo sapiens
ctgattgcatattag

SEQ ID NO: 272094 - DNA, 15 bp, Homo sapiens
actgattgcatatta

SEQ ID NO: 272095 - DNA, 15 bp, Homo sapiens
cactgattgcatatt

SEQ ID NO: 272096 - DNA, 15 bp, Homo sapiens
acactgattgcatat

SEQ ID NO: 272097 - DNA, 15 bp, Homo sapiens
aacactgattgcata

SEQ ID NO: 272098 - DNA, 15 bp, Homo sapiens
gaacactgattgcat

SEQ ID NO: 272099 - DNA, 15 bp, Homo sapiens
tgaacactgattgca

SEQ ID NO: 272100 - DNA, 15 bp, Homo sapiens
ctgaacactgattgc

SEQ ID NO: 272101 - DNA, 15 bp, Homo sapiens
tctgaacactgattg

SEQ ID NO: 272102 - DNA, 15 bp, Homo sapiens
atctgaacactgatt

SEQ ID NO: 272103 - DNA, 15 bp, Homo sapiens
aatctgaacactgat

SEQ ID NO: 272104 - DNA, 15 bp, Homo sapiens
aaatctgaacactga

SEQ ID NO: 272105 - DNA, 15 bp, Homo sapiens
gaaatctgaacactg

SEQ ID NO: 272106 - DNA, 15 bp, Homo sapiens
ggaaatctgaacact

SEQ ID NO: 272107 - DNA, 15 bp, Homo sapiens
aggaaatctgaacac

SEQ ID NO: 272108 - DNA, 15 bp, Homo sapiens
caggaaatctgaaca

SEQ ID NO: 272109 - DNA, 15 bp, Homo sapiens
tcaggaaatctgaac

SEQ ID NO: 272110 - DNA, 15 bp, Homo sapiens
gtcaggaaatctgaa

SEQ ID NO: 272111 - DNA, 15 bp, Homo sapiens
agtcaggaaatctga

SEQ ID NO: 272112 - DNA, 15 bp, Homo sapiens
cagtcaggaaatctg

SEQ ID NO: 272113 - DNA, 15 bp, Homo sapiens
tcagtcaggaaatct

SEQ ID NO: 272114 - DNA, 15 bp, Homo sapiens
gtcagtcaggaaatc

SEQ ID NO: 272115 - DNA, 15 bp, Homo sapiens
agtcagtcaggaaat

SEQ ID NO: 272116 - DNA, 15 bp, Homo sapiens
gagtcagtcaggaaa

SEQ ID NO: 272117 - DNA, 15 bp, Homo sapiens
tgagtcagtcaggaa

SEQ ID NO: 272118 - DNA, 15 bp, Homo sapiens
ctgagtcagtcagga

SEQ ID NO: 272119 - DNA, 15 bp, Homo sapiens
tctgagtcagtcagg

SEQ ID NO: 272120 - DNA, 15 bp, Homo sapiens
ttctgagtcagtcag

SEQ ID NO: 272121 - DNA, 15 bp, Homo sapiens
attctgagtcagtca

SEQ ID NO: 272122 - DNA, 15 bp, Homo sapiens
aattctgagtcagtc

SEQ ID NO: 272123 - DNA, 15 bp, Homo sapiens
taattctgagtcagt

SEQ ID NO: 272124 - DNA, 15 bp, Homo sapiens
ctaattctgagtcag

SEQ ID NO: 272125 - DNA, 15 bp, Homo sapiens
actaattctgagtca

SEQ ID NO: 272126 - DNA, 15 bp, Homo sapiens
aactaattctgagtc

SEQ ID NO: 272127 - DNA, 15 bp, Homo sapiens
aaactaattctgagt

SEQ ID NO: 272128 - DNA, 15 bp, Homo sapiens
aaaactaattctgag

SEQ ID NO: 272129 - DNA, 15 bp, Homo sapiens
caaaactaattctga

SEQ ID NO: 272130 - DNA, 15 bp, Homo sapiens
acaaaactaattctg

SEQ ID NO: 272131 - DNA, 15 bp, Homo sapiens
aacaaaactaattct

SEQ ID NO: 272132 - DNA, 15 bp, Homo sapiens
taacaaaactaattc

SEQ ID NO: 272133 - DNA, 15 bp, Homo sapiens
ctaacaaaactaatt

SEQ ID NO: 272134 - DNA, 15 bp, Homo sapiens
tctaacaaaactaat

SEQ ID NO: 272135 - DNA, 15 bp, Homo sapiens
ttctaacaaaactaa

SEQ ID NO: 272136 - DNA, 15 bp, Homo sapiens
attctaacaaaacta

SEQ ID NO: 272137 - DNA, 15 bp, Homo sapiens
aattctaacaaaact

SEQ ID NO: 272138 - DNA, 15 bp, Homo sapiens
gaattctaacaaaac

SEQ ID NO: 272139 - DNA, 15 bp, Homo sapiens
tgaattctaacaaaa

SEQ ID NO: 272140 - DNA, 15 bp, Homo sapiens
ctgaattctaacaaa

SEQ ID NO: 272141 - DNA, 15 bp, Homo sapiens
cctgaattctaacaa

SEQ ID NO: 272142 - DNA, 15 bp, Homo sapiens
tcctgaattctaaca

SEQ ID NO: 272143 - DNA, 15 bp, Homo sapiens
atcctgaattctaac

SEQ ID NO: 272144 - DNA, 15 bp, Homo sapiens
gatcctgaattctaa

SEQ ID NO: 272145 - DNA, 15 bp, Homo sapiens
agatcctgaattcta

SEQ ID NO: 272146 - DNA, 15 bp, Homo sapiens
aagatcctgaattct

SEQ ID NO: 272147 - DNA, 15 bp, Homo sapiens
caagatcctgaattc

SEQ ID NO: 272148 - DNA, 15 bp, Homo sapiens
tcaagatcctgaatt

SEQ ID NO: 272149 - DNA, 15 bp, Homo sapiens
ttcaagatcctgaat

SEQ ID NO: 272150 - DNA, 15 bp, Homo sapiens
tttcaagatcctgaa

SEQ ID NO: 272151 - DNA, 15 bp, Homo sapiens
ttttcaagatcctga

SEQ ID NO: 272152 - DNA, 15 bp, Homo sapiens
attttcaagatcctg

SEQ ID NO: 272153 - DNA, 15 bp, Homo sapiens
tattttcaagatcct

SEQ ID NO: 272154 - DNA, 15 bp, Homo sapiens
atattttcaagatcc

SEQ ID NO: 272155 - DNA, 15 bp, Homo sapiens
tatattttcaagatc

SEQ ID NO: 272156 - DNA, 15 bp, Homo sapiens
atatattttcaagat

SEQ ID NO: 272157 - DNA, 15 bp, Homo sapiens
aatatattttcaaga

SEQ ID NO: 272158 - DNA, 15 bp, Homo sapiens
caatatattttcaag

SEQ ID NO: 272159 - DNA, 15 bp, Homo sapiens
tcaatatattttcaa

SEQ ID NO: 272160 - DNA, 15 bp, Homo sapiens
atcaatatattttca

SEQ ID NO: 272161 - DNA, 15 bp, Homo sapiens
tatcaatatattttc

SEQ ID NO: 272162 - DNA, 15 bp, Homo sapiens
atatcaatatatttt

SEQ ID NO: 272163 - DNA, 15 bp, Homo sapiens
tatatcaatatattt

SEQ ID NO: 272164 - DNA, 15 bp, Homo sapiens
atatatcaatatatt

SEQ ID NO: 272165 - DNA, 15 bp, Homo sapiens
aatatatcaatatat

SEQ ID NO: 272166 - DNA, 15 bp, Homo sapiens
gaatatatcaatata

SEQ ID NO: 272167 - DNA, 15 bp, Homo sapiens
ggaatatatcaatat

SEQ ID NO: 272168 - DNA, 15 bp, Homo sapiens
aggaatatatcaata

SEQ ID NO: 272169 - DNA, 15 bp, Homo sapiens
aaggaatatatcaat

SEQ ID NO: 272170 - DNA, 15 bp, Homo sapiens
aaaggaatatatcaa

SEQ ID NO: 272171 - DNA, 15 bp, Homo sapiens
gaaaggaatatatca

SEQ ID NO: 272172 - DNA, 15 bp, Homo sapiens
tgaaaggaatatatc

SEQ ID NO: 272173 - DNA, 15 bp, Homo sapiens
atgaaaggaatatat

SEQ ID NO: 272174 - DNA, 15 bp, Homo sapiens
aatgaaaggaatata

SEQ ID NO: 272175 - DNA, 15 bp, Homo sapiens
aaatgaaaggaatat

SEQ ID NO: 272176 - DNA, 15 bp, Homo sapiens
aaaatgaaaggaata

SEQ ID NO: 272177 - DNA, 15 bp, Homo sapiens
aaaaatgaaaggaat

SEQ ID NO: 272178 - DNA, 15 bp, Homo sapiens
aaaaaatgaaaggaa

SEQ ID NO: 272179 - DNA, 15 bp, Homo sapiens
gaaaaaatgaaagga

SEQ ID NO: 272180 - DNA, 15 bp, Homo sapiens
agaaaaaatgaaagg

SEQ ID NO: 272181 - DNA, 15 bp, Homo sapiens
aagaaaaaatgaaag

SEQ ID NO: 272182 - DNA, 15 bp, Homo sapiens
aaagaaaaaatgaaa

SEQ ID NO: 272183 - DNA, 15 bp, Homo sapiens
caaagaaaaaatgaa

SEQ ID NO: 272184 - DNA, 15 bp, Homo sapiens
gcaaagaaaaaatga

SEQ ID NO: 272185 - DNA, 15 bp, Homo sapiens
cgcaaagaaaaaatg

SEQ ID NO: 272186 - DNA, 15 bp, Homo sapiens
acgcaaagaaaaaat

SEQ ID NO: 272187 - DNA, 15 bp, Homo sapiens
tacgcaaagaaaaaa

SEQ ID NO: 272188 - DNA, 15 bp, Homo sapiens
ttacgcaaagaaaaa

SEQ ID NO: 272189 - DNA, 15 bp, Homo sapiens
cttacgcaaagaaaa

SEQ ID NO: 272190 - DNA, 15 bp, Homo sapiens
acttacgcaaagaaa

SEQ ID NO: 272191 - DNA, 15 bp, Homo sapiens
tacttacgcaaagaa

SEQ ID NO: 272192 - DNA, 15 bp, Homo sapiens
atacttacgcaaaga

SEQ ID NO: 272193 - DNA, 15 bp, Homo sapiens
tatacttacgcaaag

SEQ ID NO: 272194 - DNA, 15 bp, Homo sapiens
ctatacttacgcaaa

SEQ ID NO: 272195 - DNA, 15 bp, Homo sapiens
tctatacttacgcaa

SEQ ID NO: 272196 - DNA, 15 bp, Homo sapiens
atctatacttacgca

SEQ ID NO: 272197 - DNA, 15 bp, Homo sapiens
catctatacttacgc

SEQ ID NO: 272198 - DNA, 15 bp, Homo sapiens
acatctatacttacg

SEQ ID NO: 272199 - DNA, 15 bp, Homo sapiens
tacatctatacttac

SEQ ID NO: 272200 - DNA, 15 bp, Homo sapiens
atacatctatactta

SEQ ID NO: 272201 - DNA, 15 bp, Homo sapiens
tatacatctatactt

SEQ ID NO: 272202 - DNA, 15 bp, Homo sapiens
atatacatctatact

SEQ ID NO: 272203 - DNA, 15 bp, Homo sapiens
catatacatctatac

SEQ ID NO: 272204 - DNA, 15 bp, Homo sapiens
acatatacatctata

SEQ ID NO: 272205 - DNA, 15 bp, Homo sapiens
aacatatacatctat

SEQ ID NO: 272206 - DNA, 15 bp, Homo sapiens
aaacatatacatcta

SEQ ID NO: 272207 - DNA, 15 bp, Homo sapiens
taaacatatacatct

SEQ ID NO: 272208 - DNA, 15 bp, Homo sapiens
ttaaacatatacatc

SEQ ID NO: 272209 - DNA, 15 bp, Homo sapiens
attaaacatatacat

SEQ ID NO: 272210 - DNA, 15 bp, Homo sapiens
tattaaacatataca

SEQ ID NO: 272211 - DNA, 15 bp, Homo sapiens
ttattaaacatatac

SEQ ID NO: 272212 - DNA, 15 bp, Homo sapiens
tttattaaacatata

SEQ ID NO: 272213 - DNA, 15 bp, Homo sapiens
ttttattaaacatat

SEQ ID NO: 272214 - DNA, 15 bp, Homo sapiens
cttttattaaacata

SEQ ID NO: 272215 - DNA, 15 bp, Homo sapiens
ccttttattaaacat

SEQ ID NO: 272216 - DNA, 15 bp, Homo sapiens
tccttttattaaaca

SEQ ID NO: 272217 - DNA, 15 bp, Homo sapiens
ctccttttattaaac

SEQ ID NO: 272218 - DNA, 15 bp, Homo sapiens
gctccttttattaaa

SEQ ID NO: 272219 - DNA, 15 bp, Homo sapiens
tgctccttttattaa

SEQ ID NO: 272220 - DNA, 15 bp, Homo sapiens
ttgctccttttatta

SEQ ID NO: 272221 - DNA, 15 bp, Homo sapiens
tttgctccttttatt

SEQ ID NO: 272222 - DNA, 15 bp, Homo sapiens
atttgctccttttat

SEQ ID NO: 272223 - DNA, 15 bp, Homo sapiens
tatttgctcctttta

SEQ ID NO: 272224 - DNA, 15 bp, Homo sapiens
ttatttgctcctttt

SEQ ID NO: 272225 - DNA, 15 bp, Homo sapiens
attatttgctccttt

SEQ ID NO: 272226 - DNA, 15 bp, Homo sapiens
aattatttgctcctt

SEQ ID NO: 272227 - DNA, 15 bp, Homo sapiens
taattatttgctcct

SEQ ID NO: 272228 - DNA, 15 bp, Homo sapiens
gtaattatttgctcc

SEQ ID NO: 272229 - DNA, 15 bp, Homo sapiens
agtaattatttgctc

SEQ ID NO: 272230 - DNA, 15 bp, Homo sapiens
tagtaattatttgct

SEQ ID NO: 272231 - DNA, 15 bp, Homo sapiens
ctagtaattatttgc

SEQ ID NO: 272232 - DNA, 15 bp, Homo sapiens
tctagtaattatttg

SEQ ID NO: 272233 - DNA, 15 bp, Homo sapiens
ctctagtaattattt

SEQ ID NO: 272234 - DNA, 15 bp, Homo sapiens
actctagtaattatt

SEQ ID NO: 272235 - DNA, 15 bp, Homo sapiens
aactctagtaattat

SEQ ID NO: 272236 - DNA, 15 bp, Homo sapiens
aaactctagtaatta

SEQ ID NO: 272237 - DNA, 15 bp, Homo sapiens
aaaactctagtaatt

SEQ ID NO: 272238 - DNA, 15 bp, Homo sapiens
taaaactctagtaat

SEQ ID NO: 272239 - DNA, 15 bp, Homo sapiens
ataaaactctagtaa

SEQ ID NO: 272240 - DNA, 15 bp, Homo sapiens
tataaaactctagta

SEQ ID NO: 272241 - DNA, 15 bp, Homo sapiens
atataaaactctagt

SEQ ID NO: 272242 - DNA, 15 bp, Homo sapiens
catataaaactctag

SEQ ID NO: 272243 - DNA, 15 bp, Homo sapiens
acatataaaactcta

SEQ ID NO: 272244 - DNA, 15 bp, Homo sapiens
tacatataaaactct

SEQ ID NO: 272245 - DNA, 15 bp, Homo sapiens
gtacatataaaactc

SEQ ID NO: 272246 - DNA, 15 bp, Homo sapiens
agtacatataaaact

SEQ ID NO: 272247 - DNA, 15 bp, Homo sapiens
cagtacatataaaac

SEQ ID NO: 272248 - DNA, 15 bp, Homo sapiens
ccagtacatataaaa

SEQ ID NO: 272249 - DNA, 15 bp, Homo sapiens
cccagtacatataaa

SEQ ID NO: 272250 - DNA, 15 bp, Homo sapiens
ccccagtacatataa

SEQ ID NO: 272251 - DNA, 15 bp, Homo sapiens
gccccagtacatata

SEQ ID NO: 272252 - DNA, 15 bp, Homo sapiens
tgccccagtacatat

SEQ ID NO: 272253 - DNA, 15 bp, Homo sapiens
ttgccccagtacata

SEQ ID NO: 272254 - DNA, 15 bp, Homo sapiens
attgccccagtacat

SEQ ID NO: 272255 - DNA, 15 bp, Homo sapiens
tattgccccagtaca

SEQ ID NO: 272256 - DNA, 15 bp, Homo sapiens
ctattgccccagtac

SEQ ID NO: 272257 - DNA, 15 bp, Homo sapiens
actattgccccagta

SEQ ID NO: 272258 - DNA, 15 bp, Homo sapiens
tactattgccccagt

SEQ ID NO: 272259 - DNA, 15 bp, Homo sapiens
atactattgccccag

SEQ ID NO: 272260 - DNA, 15 bp, Homo sapiens
tatactattgcccca

SEQ ID NO: 272261 - DNA, 15 bp, Homo sapiens
ttatactattgcccc

SEQ ID NO: 272262 - DNA, 15 bp, Homo sapiens
cttatactattgccc

SEQ ID NO: 272263 - DNA, 15 bp, Homo sapiens
tcttatactattgcc

SEQ ID NO: 272264 - DNA, 15 bp, Homo sapiens
ttcttatactattgc

SEQ ID NO: 272265 - DNA, 15 bp, Homo sapiens
attcttatactattg

SEQ ID NO: 272266 - DNA, 15 bp, Homo sapiens
aattcttatactatt

SEQ ID NO: 272267 - DNA, 15 bp, Homo sapiens
aaattcttatactat

SEQ ID NO: 272268 - DNA, 15 bp, Homo sapiens
aaaattcttatacta

SEQ ID NO: 272269 - DNA, 15 bp, Homo sapiens
taaaattcttatact

SEQ ID NO: 272270 - DNA, 15 bp, Homo sapiens
gtaaaattcttatac

SEQ ID NO: 272271 - DNA, 15 bp, Homo sapiens
tgtaaaattcttata

SEQ ID NO: 272272 - DNA, 15 bp, Homo sapiens
atgtaaaattcttat

SEQ ID NO: 272273 - DNA, 15 bp, Homo sapiens
tatgtaaaattctta

SEQ ID NO: 272274 - DNA, 15 bp, Homo sapiens
ctatgtaaaattctt

SEQ ID NO: 272275 - DNA, 15 bp, Homo sapiens
gctatgtaaaattct

SEQ ID NO: 272276 - DNA, 15 bp, Homo sapiens
ggctatgtaaaattc

SEQ ID NO: 272277 - DNA, 15 bp, Homo sapiens
cggctatgtaaaatt

SEQ ID NO: 272278 - DNA, 15 bp, Homo sapiens
ccggctatgtaaaat

SEQ ID NO: 272279 - DNA, 15 bp, Homo sapiens
cccggctatgtaaaa

SEQ ID NO: 272280 - DNA, 15 bp, Homo sapiens
gcccggctatgtaaa

SEQ ID NO: 272281 - DNA, 15 bp, Homo sapiens
tgcccggctatgtaa

SEQ ID NO: 272282 - DNA, 15 bp, Homo sapiens
atgcccggctatgta

SEQ ID NO: 272283 - DNA, 15 bp, Homo sapiens
catgcccggctatgt

SEQ ID NO: 272284 - DNA, 15 bp, Homo sapiens
ccatgcccggctatg

SEQ ID NO: 272285 - DNA, 15 bp, Homo sapiens
accatgcccggctat

SEQ ID NO: 272286 - DNA, 15 bp, Homo sapiens
caccatgcccggcta

SEQ ID NO: 272287 - DNA, 15 bp, Homo sapiens
ccaccatgcccggct

SEQ ID NO: 272288 - DNA, 15 bp, Homo sapiens
accaccatgcccggc

SEQ ID NO: 272289 - DNA, 15 bp, Homo sapiens
caccaccatgcccgg

SEQ ID NO: 272290 - DNA, 15 bp, Homo sapiens
acaccaccatgcccg

SEQ ID NO: 272291 - DNA, 15 bp, Homo sapiens
cacaccaccatgccc

SEQ ID NO: 272292 - DNA, 15 bp, Homo sapiens
acacaccaccatgcc

SEQ ID NO: 272293 - DNA, 15 bp, Homo sapiens
cacacaccaccatgc

SEQ ID NO: 272294 - DNA, 15 bp, Homo sapiens
gcacacaccaccatg

SEQ ID NO: 272295 - DNA, 15 bp, Homo sapiens
ggcacacaccaccat

SEQ ID NO: 272296 - DNA, 15 bp, Homo sapiens
aggcacacaccacca

SEQ ID NO: 272297 - DNA, 15 bp, Homo sapiens
taggcacacaccacc

SEQ ID NO: 272298 - DNA, 15 bp, Homo sapiens
ataggcacacaccac

SEQ ID NO: 272299 - DNA, 15 bp, Homo sapiens
tataggcacacacca

SEQ ID NO: 272300 - DNA, 15 bp, Homo sapiens
ctataggcacacacc

SEQ ID NO: 272301 - DNA, 15 bp, Homo sapiens
actataggcacacac

SEQ ID NO: 272302 - DNA, 15 bp, Homo sapiens
gactataggcacaca

SEQ ID NO: 272303 - DNA, 15 bp, Homo sapiens
ggactataggcacac

SEQ ID NO: 272304 - DNA, 15 bp, Homo sapiens
gggactataggcaca

SEQ ID NO: 272305 - DNA, 15 bp, Homo sapiens
tgggactataggcac

SEQ ID NO: 272306 - DNA, 15 bp, Homo sapiens
ctgggactataggca

SEQ ID NO: 272307 - DNA, 15 bp, Homo sapiens
gctgggactataggc

SEQ ID NO: 272308 - DNA, 15 bp, Homo sapiens
agctgggactatagg

SEQ ID NO: 272309 - DNA, 15 bp, Homo sapiens
tagctgggactatag

SEQ ID NO: 272310 - DNA, 15 bp, Homo sapiens
gtagctgggactata

SEQ ID NO: 272311 - DNA, 15 bp, Homo sapiens
agtagctgggactat

SEQ ID NO: 272312 - DNA, 15 bp, Homo sapiens
aagtagctgggacta

SEQ ID NO: 272313 - DNA, 15 bp, Homo sapiens
caagtagctgggact

SEQ ID NO: 272314 - DNA, 15 bp, Homo sapiens
ccaagtagctgggac

SEQ ID NO: 272315 - DNA, 15 bp, Homo sapiens
cccaagtagctggga

SEQ ID NO: 272316 - DNA, 15 bp, Homo sapiens
tcccaagtagctggg

SEQ ID NO: 272317 - DNA, 15 bp, Homo sapiens
ctcccaagtagctgg

SEQ ID NO: 272318 - DNA, 15 bp, Homo sapiens
cctcccaagtagctg

SEQ ID NO: 272319 - DNA, 15 bp, Homo sapiens
gcctcccaagtagct

SEQ ID NO: 272320 - DNA, 15 bp, Homo sapiens
agcctcccaagtagc

SEQ ID NO: 272321 - DNA, 15 bp, Homo sapiens
cagcctcccaagtag

SEQ ID NO: 272322 - DNA, 15 bp, Homo sapiens
tcagcctcccaagta

SEQ ID NO: 272323 - DNA, 15 bp, Homo sapiens
ctcagcctcccaagt

SEQ ID NO: 272324 - DNA, 15 bp, Homo sapiens
cctcagcctcccaag

SEQ ID NO: 272325 - DNA, 15 bp, Homo sapiens
acctcagcctcccaa

SEQ ID NO: 272326 - DNA, 15 bp, Homo sapiens
cacctcagcctccca

SEQ ID NO: 272327 - DNA, 15 bp, Homo sapiens
ccacctcagcctccc

SEQ ID NO: 272328 - DNA, 15 bp, Homo sapiens
gtcccacctcagcct

SEQ ID NO: 272329 - DNA, 15 bp, Homo sapiens
cgtcccacctcagcc

SEQ ID NO: 272330 - DNA, 15 bp, Homo sapiens
tcgtcccacctcagc

SEQ ID NO: 272331 - DNA, 15 bp, Homo sapiens
atcgtcccacctcag

SEQ ID NO: 272332 - DNA, 15 bp, Homo sapiens
gatcgtcccacctca

SEQ ID NO: 272333 - DNA, 15 bp, Homo sapiens
tgatcgtcccacctc

SEQ ID NO: 272334 - DNA, 15 bp, Homo sapiens
gtgatcgtcccacct

SEQ ID NO: 272335 - DNA, 15 bp, Homo sapiens
agtgatcgtcccacc

SEQ ID NO: 272336 - DNA, 15 bp, Homo sapiens
aagtgatcgtcccac

SEQ ID NO: 272337 - DNA, 15 bp, Homo sapiens
caagtgatcgtccca

SEQ ID NO: 272338 - DNA, 15 bp, Homo sapiens
tcaagtgatcgtccc

SEQ ID NO: 272339 - DNA, 15 bp, Homo sapiens
ttcaagtgatcgtcc

SEQ ID NO: 272340 - DNA, 15 bp, Homo sapiens
gttcaagtgatcgtc

SEQ ID NO: 272341 - DNA, 15 bp, Homo sapiens
ggttcaagtgatcgt

SEQ ID NO: 272342 - DNA, 15 bp, Homo sapiens
aggttcaagtgatcg

SEQ ID NO: 272343 - DNA, 15 bp, Homo sapiens
caggttcaagtgatc

SEQ ID NO: 272344 - DNA, 15 bp, Homo sapiens
ccaggttcaagtgat

SEQ ID NO: 272345 - DNA, 15 bp, Homo sapiens
cccaggttcaagtga

SEQ ID NO: 272346 - DNA, 15 bp, Homo sapiens
tcccaggttcaagtg

SEQ ID NO: 272347 - DNA, 15 bp, Homo sapiens
ctcccaggttcaagt

SEQ ID NO: 272348 - DNA, 15 bp, Homo sapiens
cctcccaggttcaag

SEQ ID NO: 272349 - DNA, 15 bp, Homo sapiens
acctcccaggttcaa

SEQ ID NO: 272350 - DNA, 15 bp, Homo sapiens
cacctcccaggttca

SEQ ID NO: 272351 - DNA, 15 bp, Homo sapiens
ccacctcccaggttc

SEQ ID NO: 272352 - DNA, 15 bp, Homo sapiens
tccacctcccaggtt

SEQ ID NO: 272353 - DNA, 15 bp, Homo sapiens
ctccacctcccaggt

SEQ ID NO: 272354 - DNA, 15 bp, Homo sapiens
cctccacctcccagg

SEQ ID NO: 272355 - DNA, 15 bp, Homo sapiens
acctccacctcccag

SEQ ID NO: 272356 - DNA, 15 bp, Homo sapiens
aacctccacctccca

SEQ ID NO: 272357 - DNA, 15 bp, Homo sapiens
taacctccacctccc

SEQ ID NO: 272358 - DNA, 15 bp, Homo sapiens
tactgtaacctccac

SEQ ID NO: 272359 - DNA, 15 bp, Homo sapiens
ttactgtaacctcca

SEQ ID NO: 272360 - DNA, 15 bp, Homo sapiens
cttactgtaacctcc

SEQ ID NO: 272361 - DNA, 15 bp, Homo sapiens
gcttactgtaacctc

SEQ ID NO: 272362 - DNA, 15 bp, Homo sapiens
ggcttactgtaacct

SEQ ID NO: 272363 - DNA, 15 bp, Homo sapiens
tggcttactgtaacc

SEQ ID NO: 272364 - DNA, 15 bp, Homo sapiens
ttggcttactgtaac

SEQ ID NO: 272365 - DNA, 15 bp, Homo sapiens
cttggcttactgtaa

SEQ ID NO: 272366 - DNA, 15 bp, Homo sapiens
tcttggcttactgta

SEQ ID NO: 272367 - DNA, 15 bp, Homo sapiens
atcttggcttactgt

SEQ ID NO: 272368 - DNA, 15 bp, Homo sapiens
gatcttggcttactg

SEQ ID NO: 272369 - DNA, 15 bp, Homo sapiens
cgatcttggcttact

SEQ ID NO: 272370 - DNA, 15 bp, Homo sapiens
gcgatcttggcttac

SEQ ID NO: 272371 - DNA, 15 bp, Homo sapiens
tgcgatcttggctta

SEQ ID NO: 272372 - DNA, 15 bp, Homo sapiens
gtgcgatcttggctt

SEQ ID NO: 272373 - DNA, 15 bp, Homo sapiens
ggtgcgatcttggct

SEQ ID NO: 272374 - DNA, 15 bp, Homo sapiens
tggtgcgatcttggc

SEQ ID NO: 272375 - DNA, 15 bp, Homo sapiens
gtggtgcgatcttgg

SEQ ID NO: 272376 - DNA, 15 bp, Homo sapiens
agtggtgcgatcttg

SEQ ID NO: 272377 - DNA, 15 bp, Homo sapiens
cagtggtgcgatctt

SEQ ID NO: 272378 - DNA, 15 bp, Homo sapiens
gcagtggtgcgatct

SEQ ID NO: 272379 - DNA, 15 bp, Homo sapiens
tgcagtggtgcgatc

SEQ ID NO: 272380 - DNA, 15 bp, Homo sapiens
gtgcagtggtgcgat

SEQ ID NO: 272381 - DNA, 15 bp, Homo sapiens
agtgcagtggtgcga

SEQ ID NO: 272382 - DNA, 15 bp, Homo sapiens
gagtgcagtggtgcg

SEQ ID NO: 272383 - DNA, 15 bp, Homo sapiens
ggagtgcagtggtgc

SEQ ID NO: 272384 - DNA, 15 bp, Homo sapiens
tggagtgcagtggtg

SEQ ID NO: 272385 - DNA, 15 bp, Homo sapiens
ctggagtgcagtggt

SEQ ID NO: 272386 - DNA, 15 bp, Homo sapiens
cccaggctggagtgc

SEQ ID NO: 272387 - DNA, 15 bp, Homo sapiens
gcccaggctggagtg

SEQ ID NO: 272388 - DNA, 15 bp, Homo sapiens
tgcccaggctggagt

SEQ ID NO: 272389 - DNA, 15 bp, Homo sapiens
ttgcccaggctggag

SEQ ID NO: 272390 - DNA, 15 bp, Homo sapiens
gttgcccaggctgga

SEQ ID NO: 272391 - DNA, 15 bp, Homo sapiens
gtgttgcccaggctg

SEQ ID NO: 272392 - DNA, 15 bp, Homo sapiens
tgtgttgcccaggct

SEQ ID NO: 272393 - DNA, 15 bp, Homo sapiens
ctgtgttgcccaggc

SEQ ID NO: 272394 - DNA, 15 bp, Homo sapiens
cctgtgttgcccagg

SEQ ID NO: 272395 - DNA, 15 bp, Homo sapiens
tcctgtgttgcccag

SEQ ID NO: 272396 - DNA, 15 bp, Homo sapiens
ttcctgtgttgccca

SEQ ID NO: 272397 - DNA, 15 bp, Homo sapiens
cttcctgtgttgccc

SEQ ID NO: 272398 - DNA, 15 bp, Homo sapiens
tcttcctgtgttgcc

SEQ ID NO: 272399 - DNA, 15 bp, Homo sapiens
gtcttcctgtgttgc

SEQ ID NO: 272400 - DNA, 15 bp, Homo sapiens
ggtcttcctgtgttg

SEQ ID NO: 272401 - DNA, 15 bp, Homo sapiens
gggtcttcctgtgtt

SEQ ID NO: 272402 - DNA, 15 bp, Homo sapiens
agggtcttcctgtgt

SEQ ID NO: 272403 - DNA, 15 bp, Homo sapiens
cagggtcttcctgtg

SEQ ID NO: 272404 - DNA, 15 bp, Homo sapiens
acagggtcttcctgt

SEQ ID NO: 272405 - DNA, 15 bp, Homo sapiens
aacagggtcttcctg

SEQ ID NO: 272406 - DNA, 15 bp, Homo sapiens
caacagggtcttcct

SEQ ID NO: 272407 - DNA, 15 bp, Homo sapiens
gcaacagggtcttcc

SEQ ID NO: 272408 - DNA, 15 bp, Homo sapiens
tgcaacagggtcttc

SEQ ID NO: 272409 - DNA, 15 bp, Homo sapiens
ttgcaacagggtctt

SEQ ID NO: 272410 - DNA, 15 bp, Homo sapiens
tttgcaacagggtct

SEQ ID NO: 272411 - DNA, 15 bp, Homo sapiens
ttttgcaacagggtc

SEQ ID NO: 272412 - DNA, 15 bp, Homo sapiens
tttttgcaacagggt

SEQ ID NO: 272413 - DNA, 15 bp, Homo sapiens
ttttttgcaacaggg

SEQ ID NO: 272414 - DNA, 15 bp, Homo sapiens
tttttttgcaacagg

SEQ ID NO: 272415 - DNA, 15 bp, Homo sapiens
ttttttttgcaacag

SEQ ID NO: 272416 - DNA, 15 bp, Homo sapiens
tttttttttgcaaca

SEQ ID NO: 272417 - DNA, 15 bp, Homo sapiens
atttttttttgcaac

SEQ ID NO: 272418 - DNA, 15 bp, Homo sapiens
tatttttttttgcaa

SEQ ID NO: 272419 - DNA, 15 bp, Homo sapiens
ttatttttttttgca

SEQ ID NO: 272420 - DNA, 15 bp, Homo sapiens
tttatttttttttgc

SEQ ID NO: 272421 - DNA, 15 bp, Homo sapiens
atttatttttttttg

SEQ ID NO: 272422 - DNA, 15 bp, Homo sapiens
tatttattttttttt

SEQ ID NO: 272423 - DNA, 15 bp, Homo sapiens
ttatttatttttttt

SEQ ID NO: 272424 - DNA, 15 bp, Homo sapiens
tttatttattttttt

SEQ ID NO: 272425 - DNA, 15 bp, Homo sapiens
ttttatttatttttt

SEQ ID NO: 272426 - DNA, 15 bp, Homo sapiens
tttttatttattttt

SEQ ID NO: 272427 - DNA, 15 bp, Homo sapiens
atttttatttatttt

SEQ ID NO: 272428 - DNA, 15 bp, Homo sapiens
tatttttatttattt

SEQ ID NO: 272429 - DNA, 15 bp, Homo sapiens
ttatttttatttatt

SEQ ID NO: 272430 - DNA, 15 bp, Homo sapiens
cttatttttatttat

SEQ ID NO: 272431 - DNA, 15 bp, Homo sapiens
ccttatttttattta

SEQ ID NO: 272432 - DNA, 15 bp, Homo sapiens
gccttatttttattt

SEQ ID NO: 272433 - DNA, 15 bp, Homo sapiens
agccttatttttatt

SEQ ID NO: 272434 - DNA, 15 bp, Homo sapiens
cagccttatttttat

SEQ ID NO: 272435 - DNA, 15 bp, Homo sapiens
ccagccttattttta

SEQ ID NO: 272436 - DNA, 15 bp, Homo sapiens
cccagccttattttt

SEQ ID NO: 272437 - DNA, 15 bp, Homo sapiens
gcccagccttatttt

SEQ ID NO: 272438 - DNA, 15 bp, Homo sapiens
cgcccagccttattt

SEQ ID NO: 272439 - DNA, 15 bp, Homo sapiens
acgcccagccttatt

SEQ ID NO: 272440 - DNA, 15 bp, Homo sapiens
cacgcccagccttat

SEQ ID NO: 272441 - DNA, 15 bp, Homo sapiens
ccacgcccagcctta

SEQ ID NO: 272442 - DNA, 15 bp, Homo sapiens
accacgcccagcctt

SEQ ID NO: 272443 - DNA, 15 bp, Homo sapiens
caccacgcccagcct

SEQ ID NO: 272444 - DNA, 15 bp, Homo sapiens
ccaccacgcccagcc

SEQ ID NO: 272445 - DNA, 15 bp, Homo sapiens
gccaccacgcccagc

SEQ ID NO: 272446 - DNA, 15 bp, Homo sapiens
agccaccacgcccag

SEQ ID NO: 272447 - DNA, 15 bp, Homo sapiens
gagccaccacgccca

SEQ ID NO: 272448 - DNA, 15 bp, Homo sapiens
tgagccaccacgccc

SEQ ID NO: 272449 - DNA, 15 bp, Homo sapiens
ttgagccaccacgcc

SEQ ID NO: 272450 - DNA, 15 bp, Homo sapiens
tttgagccaccacgc

SEQ ID NO: 272451 - DNA, 15 bp, Homo sapiens
gtttgagccaccacg

SEQ ID NO: 272452 - DNA, 15 bp, Homo sapiens
ggtttgagccaccac

SEQ ID NO: 272453 - DNA, 15 bp, Homo sapiens
aggtttgagccacca

SEQ ID NO: 272454 - DNA, 15 bp, Homo sapiens
caggtttgagccacc

SEQ ID NO: 272455 - DNA, 15 bp, Homo sapiens
acaggtttgagccac

SEQ ID NO: 272456 - DNA, 15 bp, Homo sapiens
tacaggtttgagcca

SEQ ID NO: 272457 - DNA, 15 bp, Homo sapiens
ttacaggtttgagcc

SEQ ID NO: 272458 - DNA, 15 bp, Homo sapiens
attacaggtttgagc

SEQ ID NO: 272459 - DNA, 15 bp, Homo sapiens
gattacaggtttgag

SEQ ID NO: 272460 - DNA, 15 bp, Homo sapiens
ggattacaggtttga

SEQ ID NO: 272461 - DNA, 15 bp, Homo sapiens
gggattacaggtttg

SEQ ID NO: 272462 - DNA, 15 bp, Homo sapiens
tgggattacaggttt

SEQ ID NO: 272463 - DNA, 15 bp, Homo sapiens
ctgggattacaggtt

SEQ ID NO: 272464 - DNA, 15 bp, Homo sapiens
gctgggattacaggt

SEQ ID NO: 272465 - DNA, 15 bp, Homo sapiens
tgctgggattacagg

SEQ ID NO: 272466 - DNA, 15 bp, Homo sapiens
gtgctgggattacag

SEQ ID NO: 272467 - DNA, 15 bp, Homo sapiens
agtgctgggattaca

SEQ ID NO: 272468 - DNA, 15 bp, Homo sapiens
aagtgctgggattac

SEQ ID NO: 272469 - DNA, 15 bp, Homo sapiens
aaagtgctgggatta

SEQ ID NO: 272470 - DNA, 15 bp, Homo sapiens
caaagtgctgggatt

SEQ ID NO: 272471 - DNA, 15 bp, Homo sapiens
ccaaagtgctgggat

SEQ ID NO: 272472 - DNA, 15 bp, Homo sapiens
cccaaagtgctggga

SEQ ID NO: 272473 - DNA, 15 bp, Homo sapiens
tcccaaagtgctggg

SEQ ID NO: 272474 - DNA, 15 bp, Homo sapiens
gggcctcccaaagtg

SEQ ID NO: 272475 - DNA, 15 bp, Homo sapiens
tgggcctcccaaagt

SEQ ID NO: 272476 - DNA, 15 bp, Homo sapiens
ctgggcctcccaaag

SEQ ID NO: 272477 - DNA, 15 bp, Homo sapiens
cctgggcctcccaaa

SEQ ID NO: 272478 - DNA, 15 bp, Homo sapiens
gcctgggcctcccaa

SEQ ID NO: 272479 - DNA, 15 bp, Homo sapiens
tgcctgggcctccca

SEQ ID NO: 272480 - DNA, 15 bp, Homo sapiens
ctgcctgggcctccc

SEQ ID NO: 272481 - DNA, 15 bp, Homo sapiens
cctgcctgggcctcc

SEQ ID NO: 272482 - DNA, 15 bp, Homo sapiens
acctgcctgggcctc

SEQ ID NO: 272483 - DNA, 15 bp, Homo sapiens
cacctgcctgggcct

SEQ ID NO: 272484 - DNA, 15 bp, Homo sapiens
tcacctgcctgggcc

SEQ ID NO: 272485 - DNA, 15 bp, Homo sapiens
atcacctgcctgggc

SEQ ID NO: 272486 - DNA, 15 bp, Homo sapiens
gatcacctgcctggg

SEQ ID NO: 272487 - DNA, 15 bp, Homo sapiens
tgatcacctgcctgg

SEQ ID NO: 272488 - DNA, 15 bp, Homo sapiens
gtgatcacctgcctg

SEQ ID NO: 272489 - DNA, 15 bp, Homo sapiens
agtgatcacctgcct

SEQ ID NO: 272490 - DNA, 15 bp, Homo sapiens
aagtgatcacctgcc

SEQ ID NO: 272491 - DNA, 15 bp, Homo sapiens
caagtgatcacctgc

SEQ ID NO: 272492 - DNA, 15 bp, Homo sapiens
tcaagtgatcacctg

SEQ ID NO: 272493 - DNA, 15 bp, Homo sapiens
ctcaagtgatcacct

SEQ ID NO: 272494 - DNA, 15 bp, Homo sapiens
cctcaagtgatcacc

SEQ ID NO: 272495 - DNA, 15 bp, Homo sapiens
acctcaagtgatcac

SEQ ID NO: 272496 - DNA, 15 bp, Homo sapiens
gacctcaagtgatca

SEQ ID NO: 272497 - DNA, 15 bp, Homo sapiens
tgacctcaagtgatc

SEQ ID NO: 272498 - DNA, 15 bp, Homo sapiens
ctgacctcaagtgat

SEQ ID NO: 272499 - DNA, 15 bp, Homo sapiens
cctgacctcaagtga

SEQ ID NO: 272500 - DNA, 15 bp, Homo sapiens
tcctgacctcaagtg

SEQ ID NO: 272501 - DNA, 15 bp, Homo sapiens
ctcctgacctcaagt

SEQ ID NO: 272502 - DNA, 15 bp, Homo sapiens
actcctgacctcaag

SEQ ID NO: 272503 - DNA, 15 bp, Homo sapiens
aactcctgacctcaa

SEQ ID NO: 272504 - DNA, 15 bp, Homo sapiens
gaactcctgacctca

SEQ ID NO: 272505 - DNA, 15 bp, Homo sapiens
agaactcctgacctc

SEQ ID NO: 272506 - DNA, 15 bp, Homo sapiens
tagaactcctgacct

SEQ ID NO: 272507 - DNA, 15 bp, Homo sapiens
ctagaactcctgacc

SEQ ID NO: 272508 - DNA, 15 bp, Homo sapiens
tctagaactcctgac

SEQ ID NO: 272509 - DNA, 15 bp, Homo sapiens
gtctagaactcctga

SEQ ID NO: 272510 - DNA, 15 bp, Homo sapiens
ggtctagaactcctg

SEQ ID NO: 272511 - DNA, 15 bp, Homo sapiens
tggtctagaactcct

SEQ ID NO: 272512 - DNA, 15 bp, Homo sapiens
ctggtctagaactcc

SEQ ID NO: 272513 - DNA, 15 bp, Homo sapiens
gctggtctagaactc

SEQ ID NO: 272514 - DNA, 15 bp, Homo sapiens
ggctggtctagaact

SEQ ID NO: 272515 - DNA, 15 bp, Homo sapiens
aggctggtctagaac

SEQ ID NO: 272516 - DNA, 15 bp, Homo sapiens
caggctggtctagaa

SEQ ID NO: 272517 - DNA, 15 bp, Homo sapiens
ccaggctggtctaga

SEQ ID NO: 272518 - DNA, 15 bp, Homo sapiens
gccaggctggtctag

SEQ ID NO: 272519 - DNA, 15 bp, Homo sapiens
ggccaggctggtcta

SEQ ID NO: 272520 - DNA, 15 bp, Homo sapiens
tggccaggctggtct

SEQ ID NO: 272521 - DNA, 15 bp, Homo sapiens
ttggccaggctggtc

SEQ ID NO: 272522 - DNA, 15 bp, Homo sapiens
gttggccaggctggt

SEQ ID NO: 272523 - DNA, 15 bp, Homo sapiens
tgttggccaggctgg

SEQ ID NO: 272524 - DNA, 15 bp, Homo sapiens
atgttggccaggctg

SEQ ID NO: 272525 - DNA, 15 bp, Homo sapiens
catgttggccaggct

SEQ ID NO: 272526 - DNA, 15 bp, Homo sapiens
ccatgttggccaggc

SEQ ID NO: 272527 - DNA, 15 bp, Homo sapiens
accatgttggccagg

SEQ ID NO: 272528 - DNA, 15 bp, Homo sapiens
caccatgttggccag

SEQ ID NO: 272529 - DNA, 15 bp, Homo sapiens
tcaccatgttggcca

SEQ ID NO: 272530 - DNA, 15 bp, Homo sapiens
ttcaccatgttggcc

SEQ ID NO: 272531 - DNA, 15 bp, Homo sapiens
tttcaccatgttggc

SEQ ID NO: 272532 - DNA, 15 bp, Homo sapiens
gtttcaccatgttgg

SEQ ID NO: 272533 - DNA, 15 bp, Homo sapiens
ggggtttcaccatgt

SEQ ID NO: 272534 - DNA, 15 bp, Homo sapiens
tggggtttcaccatg

SEQ ID NO: 272535 - DNA, 15 bp, Homo sapiens
atggggtttcaccat

SEQ ID NO: 272536 - DNA, 15 bp, Homo sapiens
gatggggtttcacca

SEQ ID NO: 272537 - DNA, 15 bp, Homo sapiens
agatggggtttcacc

SEQ ID NO: 272538 - DNA, 15 bp, Homo sapiens
gagatggggtttcac

SEQ ID NO: 272539 - DNA, 15 bp, Homo sapiens
agagatggggtttca

SEQ ID NO: 272540 - DNA, 15 bp, Homo sapiens
tagagatggggtttc

SEQ ID NO: 272541 - DNA, 15 bp, Homo sapiens
gtagagatggggttt

SEQ ID NO: 272542 - DNA, 15 bp, Homo sapiens
agtagagatggggtt

SEQ ID NO: 272543 - DNA, 15 bp, Homo sapiens
tagtagagatggggt

SEQ ID NO: 272544 - DNA, 15 bp, Homo sapiens
ttagtagagatgggg

SEQ ID NO: 272545 - DNA, 15 bp, Homo sapiens
tttagtagagatggg

SEQ ID NO: 272546 - DNA, 15 bp, Homo sapiens
ttttagtagagatgg

SEQ ID NO: 272547 - DNA, 15 bp, Homo sapiens
tttttagtagagatg

SEQ ID NO: 272548 - DNA, 15 bp, Homo sapiens
atttttagtagagat

SEQ ID NO: 272549 - DNA, 15 bp, Homo sapiens
tatttttagtagaga

SEQ ID NO: 272550 - DNA, 15 bp, Homo sapiens
gtatttttagtagag

SEQ ID NO: 272551 - DNA, 15 bp, Homo sapiens
tgtatttttagtaga

SEQ ID NO: 272552 - DNA, 15 bp, Homo sapiens
ttgtatttttagtag

SEQ ID NO: 272553 - DNA, 15 bp, Homo sapiens
tttgtatttttagta

SEQ ID NO: 272554 - DNA, 15 bp, Homo sapiens
ttttgtatttttagt

SEQ ID NO: 272555 - DNA, 15 bp, Homo sapiens
tttttgtatttttag

SEQ ID NO: 272556 - DNA, 15 bp, Homo sapiens
aatttttgtattttt

SEQ ID NO: 272557 - DNA, 15 bp, Homo sapiens
taatttttgtatttt

SEQ ID NO: 272558 - DNA, 15 bp, Homo sapiens
ctaatttttgtattt

SEQ ID NO: 272559 - DNA, 15 bp, Homo sapiens
gctaatttttgtatt

SEQ ID NO: 272560 - DNA, 15 bp, Homo sapiens
ggctaatttttgtat

SEQ ID NO: 272561 - DNA, 15 bp, Homo sapiens
tggctaatttttgta

SEQ ID NO: 272562 - DNA, 15 bp, Homo sapiens
ctggctaatttttgt

SEQ ID NO: 272563 - DNA, 15 bp, Homo sapiens
cctggctaatttttg

SEQ ID NO: 272564 - DNA, 15 bp, Homo sapiens
gcctggctaattttt

SEQ ID NO: 272565 - DNA, 15 bp, Homo sapiens
tgcctggctaatttt

SEQ ID NO: 272566 - DNA, 15 bp, Homo sapiens
atgcctggctaattt

SEQ ID NO: 272567 - DNA, 15 bp, Homo sapiens
catgcctggctaatt

SEQ ID NO: 272568 - DNA, 15 bp, Homo sapiens
ccatgcctggctaat

SEQ ID NO: 272569 - DNA, 15 bp, Homo sapiens
accatgcctggctaa

SEQ ID NO: 272570 - DNA, 15 bp, Homo sapiens
taccatgcctggcta

SEQ ID NO: 272571 - DNA, 15 bp, Homo sapiens
ctaccatgcctggct

SEQ ID NO: 272572 - DNA, 15 bp, Homo sapiens
gctaccatgcctggc

SEQ ID NO: 272573 - DNA, 15 bp, Homo sapiens
tgctaccatgcctgg

SEQ ID NO: 272574 - DNA, 15 bp, Homo sapiens
ctgctaccatgcctg

SEQ ID NO: 272575 - DNA, 15 bp, Homo sapiens
tctgctaccatgcct

SEQ ID NO: 272576 - DNA, 15 bp, Homo sapiens
atctgctaccatgcc

SEQ ID NO: 272577 - DNA, 15 bp, Homo sapiens
catctgctaccatgc

SEQ ID NO: 272578 - DNA, 15 bp, Homo sapiens
gcatctgctaccatg

SEQ ID NO: 272579 - DNA, 15 bp, Homo sapiens
ggcatctgctaccat

SEQ ID NO: 272580 - DNA, 15 bp, Homo sapiens
aggcatctgctacca

SEQ ID NO: 272581 - DNA, 15 bp, Homo sapiens
caggcatctgctacc

SEQ ID NO: 272582 - DNA, 15 bp, Homo sapiens
acaggcatctgctac

SEQ ID NO: 272583 - DNA, 15 bp, Homo sapiens
tacaggcatctgcta

SEQ ID NO: 272584 - DNA, 15 bp, Homo sapiens
ttacaggcatctgct

SEQ ID NO: 272585 - DNA, 15 bp, Homo sapiens
attacaggcatctgc

SEQ ID NO: 272586 - DNA, 15 bp, Homo sapiens
gattacaggcatctg

SEQ ID NO: 272587 - DNA, 15 bp, Homo sapiens
agattacaggcatct

SEQ ID NO: 272588 - DNA, 15 bp, Homo sapiens
gagattacaggcatc

SEQ ID NO: 272589 - DNA, 15 bp, Homo sapiens
tgagattacaggcat

SEQ ID NO: 272590 - DNA, 15 bp, Homo sapiens
ctgagattacaggca

SEQ ID NO: 272591 - DNA, 15 bp, Homo sapiens
gctgagattacaggc

SEQ ID NO: 272592 - DNA, 15 bp, Homo sapiens
agctgagattacagg

SEQ ID NO: 272593 - DNA, 15 bp, Homo sapiens
tagctgagattacag

SEQ ID NO: 272594 - DNA, 15 bp, Homo sapiens
gtagctgagattaca

SEQ ID NO: 272595 - DNA, 15 bp, Homo sapiens
agtagctgagattac

SEQ ID NO: 272596 - DNA, 15 bp, Homo sapiens
aagtagctgagatta

SEQ ID NO: 272597 - DNA, 15 bp, Homo sapiens
caagtagctgagatt

SEQ ID NO: 272598 - DNA, 15 bp, Homo sapiens
ccaagtagctgagat

SEQ ID NO: 272599 - DNA, 15 bp, Homo sapiens
cccaagtagctgaga

SEQ ID NO: 272600 - DNA, 15 bp, Homo sapiens
tcccaagtagctgag

SEQ ID NO: 272601 - DNA, 15 bp, Homo sapiens
ctcccaagtagctga

SEQ ID NO: 272602 - DNA, 15 bp, Homo sapiens
ccctcccaagtagct

SEQ ID NO: 272603 - DNA, 15 bp, Homo sapiens
accctcccaagtagc

SEQ ID NO: 272604 - DNA, 15 bp, Homo sapiens
caccctcccaagtag

SEQ ID NO: 272605 - DNA, 15 bp, Homo sapiens
tcaccctcccaagta

SEQ ID NO: 272606 - DNA, 15 bp, Homo sapiens
ctcaccctcccaagt

SEQ ID NO: 272607 - DNA, 15 bp, Homo sapiens
cctcaccctcccaag

SEQ ID NO: 272608 - DNA, 15 bp, Homo sapiens
gcctcaccctcccaa

SEQ ID NO: 272609 - DNA, 15 bp, Homo sapiens
tgcctcaccctccca

SEQ ID NO: 272610 - DNA, 15 bp, Homo sapiens
ctgcctcaccctccc

SEQ ID NO: 272611 - DNA, 15 bp, Homo sapiens
cctgcctcaccctcc

SEQ ID NO: 272612 - DNA, 15 bp, Homo sapiens
tcctgcctcaccctc

SEQ ID NO: 272613 - DNA, 15 bp, Homo sapiens
ctcctgcctcaccct

SEQ ID NO: 272614 - DNA, 15 bp, Homo sapiens
tctcctgcctcaccc

SEQ ID NO: 272615 - DNA, 15 bp, Homo sapiens
ttctcctgcctcacc

SEQ ID NO: 272616 - DNA, 15 bp, Homo sapiens
attctcctgcctcac

SEQ ID NO: 272617 - DNA, 15 bp, Homo sapiens
aggttcaagcaattc

SEQ ID NO: 272618 - DNA, 15 bp, Homo sapiens
caggttcaagcaatt

SEQ ID NO: 272619 - DNA, 15 bp, Homo sapiens
ccaggttcaagcaat

SEQ ID NO: 272620 - DNA, 15 bp, Homo sapiens
cccaggttcaagcaa

SEQ ID NO: 272621 - DNA, 15 bp, Homo sapiens
tcccaggttcaagca

SEQ ID NO: 272622 - DNA, 15 bp, Homo sapiens
ctcccaggttcaagc

SEQ ID NO: 272623 - DNA, 15 bp, Homo sapiens
gcctcccaggttcaa

SEQ ID NO: 272624 - DNA, 15 bp, Homo sapiens
tgcctcccaggttca

SEQ ID NO: 272625 - DNA, 15 bp, Homo sapiens
ctgcctcccaggttc

SEQ ID NO: 272626 - DNA, 15 bp, Homo sapiens
tctgcctcccaggtt

SEQ ID NO: 272627 - DNA, 15 bp, Homo sapiens
ctctgcctcccaggt

SEQ ID NO: 272628 - DNA, 15 bp, Homo sapiens
actctgcctcccagg

SEQ ID NO: 272629 - DNA, 15 bp, Homo sapiens
aactctgcctcccag

SEQ ID NO: 272630 - DNA, 15 bp, Homo sapiens
aaactctgcctccca

SEQ ID NO: 272631 - DNA, 15 bp, Homo sapiens
caaactctgcctccc

SEQ ID NO: 272632 - DNA, 15 bp, Homo sapiens
gcaaactctgcctcc

SEQ ID NO: 272633 - DNA, 15 bp, Homo sapiens
tgcaaactctgcctc

SEQ ID NO: 272634 - DNA, 15 bp, Homo sapiens
ctgcaaactctgcct

SEQ ID NO: 272635 - DNA, 15 bp, Homo sapiens
actgcaaactctgcc

SEQ ID NO: 272636 - DNA, 15 bp, Homo sapiens
cactgcaaactctgc

SEQ ID NO: 272637 - DNA, 15 bp, Homo sapiens
tcactgcaaactctg

SEQ ID NO: 272638 - DNA, 15 bp, Homo sapiens
ctcactgcaaactct

SEQ ID NO: 272639 - DNA, 15 bp, Homo sapiens
gctcactgcaaactc

SEQ ID NO: 272640 - DNA, 15 bp, Homo sapiens
ggctcactgcaaact

SEQ ID NO: 272641 - DNA, 15 bp, Homo sapiens
cggctcactgcaaac

SEQ ID NO: 272642 - DNA, 15 bp, Homo sapiens
acggctcactgcaaa

SEQ ID NO: 272643 - DNA, 15 bp, Homo sapiens
cacggctcactgcaa

SEQ ID NO: 272644 - DNA, 15 bp, Homo sapiens
tcacggctcactgca

SEQ ID NO: 272645 - DNA, 15 bp, Homo sapiens
atcacggctcactgc

SEQ ID NO: 272646 - DNA, 15 bp, Homo sapiens
gatcacggctcactg

SEQ ID NO: 272647 - DNA, 15 bp, Homo sapiens
tgatcacggctcact

SEQ ID NO: 272648 - DNA, 15 bp, Homo sapiens
atgatcacggctcac

SEQ ID NO: 272649 - DNA, 15 bp, Homo sapiens
catgatcacggctca

SEQ ID NO: 272650 - DNA, 15 bp, Homo sapiens
gcatgatcacggctc

SEQ ID NO: 272651 - DNA, 15 bp, Homo sapiens
ggcatgatcacggct

SEQ ID NO: 272652 - DNA, 15 bp, Homo sapiens
tggcatgatcacggc

SEQ ID NO: 272653 - DNA, 15 bp, Homo sapiens
gtggcatgatcacgg

SEQ ID NO: 272654 - DNA, 15 bp, Homo sapiens
agtggcatgatcacg

SEQ ID NO: 272655 - DNA, 15 bp, Homo sapiens
cagtggcatgatcac

SEQ ID NO: 272656 - DNA, 15 bp, Homo sapiens
gcagtggcatgatca

SEQ ID NO: 272657 - DNA, 15 bp, Homo sapiens
tgcagtggcatgatc

SEQ ID NO: 272658 - DNA, 15 bp, Homo sapiens
gtgcagtggcatgat

SEQ ID NO: 272659 - DNA, 15 bp, Homo sapiens
agtgcagtggcatga

SEQ ID NO: 272660 - DNA, 15 bp, Homo sapiens
gagtgcagtggcatg

SEQ ID NO: 272661 - DNA, 15 bp, Homo sapiens
ggagtgcagtggcat

SEQ ID NO: 272662 - DNA, 15 bp, Homo sapiens
tctggagtgcagtgg

SEQ ID NO: 272663 - DNA, 15 bp, Homo sapiens
gtctggagtgcagtg

SEQ ID NO: 272664 - DNA, 15 bp, Homo sapiens
agtctggagtgcagt

SEQ ID NO: 272665 - DNA, 15 bp, Homo sapiens
tagtctggagtgcag

SEQ ID NO: 272666 - DNA, 15 bp, Homo sapiens
ctagtctggagtgca

SEQ ID NO: 272667 - DNA, 15 bp, Homo sapiens
cctagtctggagtgc

SEQ ID NO: 272668 - DNA, 15 bp, Homo sapiens
gcctagtctggagtg

SEQ ID NO: 272669 - DNA, 15 bp, Homo sapiens
tgcctagtctggagt

SEQ ID NO: 272670 - DNA, 15 bp, Homo sapiens
ttgcctagtctggag

SEQ ID NO: 272671 - DNA, 15 bp, Homo sapiens
gttgcctagtctgga

SEQ ID NO: 272672 - DNA, 15 bp, Homo sapiens
tgttgcctagtctgg

SEQ ID NO: 272673 - DNA, 15 bp, Homo sapiens
ctgttgcctagtctg

SEQ ID NO: 272674 - DNA, 15 bp, Homo sapiens
tctgttgcctagtct

SEQ ID NO: 272675 - DNA, 15 bp, Homo sapiens
ctctgttgcctagtc

SEQ ID NO: 272676 - DNA, 15 bp, Homo sapiens
tctctgttgcctagt

SEQ ID NO: 272677 - DNA, 15 bp, Homo sapiens
ttctctgttgcctag

SEQ ID NO: 272678 - DNA, 15 bp, Homo sapiens
cttctctgttgccta

SEQ ID NO: 272679 - DNA, 15 bp, Homo sapiens
tcttctctgttgcct

SEQ ID NO: 272680 - DNA, 15 bp, Homo sapiens
gtcttctctgttgcc

SEQ ID NO: 272681 - DNA, 15 bp, Homo sapiens
agtcttctctgttgc

SEQ ID NO: 272682 - DNA, 15 bp, Homo sapiens
gagtcttctctgttg

SEQ ID NO: 272683 - DNA, 15 bp, Homo sapiens
ggagtcttctctgtt

SEQ ID NO: 272684 - DNA, 15 bp, Homo sapiens
tggagtcttctctgt

SEQ ID NO: 272685 - DNA, 15 bp, Homo sapiens
atggagtcttctctg

SEQ ID NO: 272686 - DNA, 15 bp, Homo sapiens
gatggagtcttctct

SEQ ID NO: 272687 - DNA, 15 bp, Homo sapiens
agatggagtcttctc

SEQ ID NO: 272688 - DNA, 15 bp, Homo sapiens
gagatggagtcttct

SEQ ID NO: 272689 - DNA, 15 bp, Homo sapiens
tgagatggagtcttc

SEQ ID NO: 272690 - DNA, 15 bp, Homo sapiens
ttgagatggagtctt

SEQ ID NO: 272691 - DNA, 15 bp, Homo sapiens
tttgagatggagtct

SEQ ID NO: 272692 - DNA, 15 bp, Homo sapiens
ttttgagatggagtc

SEQ ID NO: 272693 - DNA, 15 bp, Homo sapiens
tttttgagatggagt

SEQ ID NO: 272694 - DNA, 15 bp, Homo sapiens
ttttttgagatggag

SEQ ID NO: 272695 - DNA, 15 bp, Homo sapiens
tttttttgagatgga

SEQ ID NO: 272696 - DNA, 15 bp, Homo sapiens
ttttttttgagatgg

SEQ ID NO: 272697 - DNA, 15 bp, Homo sapiens
tttttttttgagatg

SEQ ID NO: 272698 - DNA, 15 bp, Homo sapiens
ttttttttttgagat

SEQ ID NO: 272699 - DNA, 15 bp, Homo sapiens
gttttttttttgaga

SEQ ID NO: 272700 - DNA, 15 bp, Homo sapiens
tgttttttttttgag

SEQ ID NO: 272701 - DNA, 15 bp, Homo sapiens
ttgttttttttttga

SEQ ID NO: 272702 - DNA, 15 bp, Homo sapiens
tttgttttttttttg

SEQ ID NO: 272703 - DNA, 15 bp, Homo sapiens
ttttgtttttttttt

SEQ ID NO: 272704 - DNA, 15 bp, Homo sapiens
ttttttgtttttttt

SEQ ID NO: 272705 - DNA, 15 bp, Homo sapiens
tttttttgttttttt

SEQ ID NO: 272706 - DNA, 15 bp, Homo sapiens
ttttttttgtttttt

SEQ ID NO: 272707 - DNA, 15 bp, Homo sapiens
gttttttttgttttt

SEQ ID NO: 272708 - DNA, 15 bp, Homo sapiens
ggttttttttgtttt

SEQ ID NO: 272709 - DNA, 15 bp, Homo sapiens
gggttttttttgttt

SEQ ID NO: 272710 - DNA, 15 bp, Homo sapiens
ggggttttttttgtt

SEQ ID NO: 272711 - DNA, 15 bp, Homo sapiens
tggggttttttttgt

SEQ ID NO: 272712 - DNA, 15 bp, Homo sapiens
ctggggttttttttg

SEQ ID NO: 272713 - DNA, 15 bp, Homo sapiens
tctggggtttttttt

SEQ ID NO: 272714 - DNA, 15 bp, Homo sapiens
ttctggggttttttt

SEQ ID NO: 272715 - DNA, 15 bp, Homo sapiens
gttctggggtttttt

SEQ ID NO: 272716 - DNA, 15 bp, Homo sapiens
agttctggggttttt

SEQ ID NO: 272717 - DNA, 15 bp, Homo sapiens
aagttctggggtttt

SEQ ID NO: 272718 - DNA, 15 bp, Homo sapiens
aaagttctggggttt

SEQ ID NO: 272719 - DNA, 15 bp, Homo sapiens
taaagttctggggtt

SEQ ID NO: 272720 - DNA, 15 bp, Homo sapiens
gtaaagttctggggt

SEQ ID NO: 272721 - DNA, 15 bp, Homo sapiens
tgtaaagttctgggg

SEQ ID NO: 272722 - DNA, 15 bp, Homo sapiens
ttgtaaagttctggg

SEQ ID NO: 272723 - DNA, 15 bp, Homo sapiens
tttgtaaagttctgg

SEQ ID NO: 272724 - DNA, 15 bp, Homo sapiens
atttgtaaagttctg

SEQ ID NO: 272725 - DNA, 15 bp, Homo sapiens
gatttgtaaagttct

SEQ ID NO: 272726 - DNA, 15 bp, Homo sapiens
agatttgtaaagttc

SEQ ID NO: 272727 - DNA, 15 bp, Homo sapiens
tagatttgtaaagtt

SEQ ID NO: 272728 - DNA, 15 bp, Homo sapiens
gtagatttgtaaagt

SEQ ID NO: 272729 - DNA, 15 bp, Homo sapiens
cgtagatttgtaaag

SEQ ID NO: 272730 - DNA, 15 bp, Homo sapiens
tcgtagatttgtaaa

SEQ ID NO: 272731 - DNA, 15 bp, Homo sapiens
ttcgtagatttgtaa

SEQ ID NO: 272732 - DNA, 15 bp, Homo sapiens
attcgtagatttgta

SEQ ID NO: 272733 - DNA, 15 bp, Homo sapiens
tattcgtagatttgt

SEQ ID NO: 272734 - DNA, 15 bp, Homo sapiens
ttattcgtagatttg

SEQ ID NO: 272735 - DNA, 15 bp, Homo sapiens
gttattcgtagattt

SEQ ID NO: 272736 - DNA, 15 bp, Homo sapiens
agttattcgtagatt

SEQ ID NO: 272737 - DNA, 15 bp, Homo sapiens
gagttattcgtagat

SEQ ID NO: 272738 - DNA, 15 bp, Homo sapiens
tgagttattcgtaga

SEQ ID NO: 272739 - DNA, 15 bp, Homo sapiens
atgagttattcgtag

SEQ ID NO: 272740 - DNA, 15 bp, Homo sapiens
aatgagttattcgta

SEQ ID NO: 272741 - DNA, 15 bp, Homo sapiens
aaatgagttattcgt

SEQ ID NO: 272742 - DNA, 15 bp, Homo sapiens
taaatgagttattcg

SEQ ID NO: 272743 - DNA, 15 bp, Homo sapiens
ttaaatgagttattc

SEQ ID NO: 272744 - DNA, 15 bp, Homo sapiens
tttaaatgagttatt

SEQ ID NO: 272745 - DNA, 15 bp, Homo sapiens
ttttaaatgagttat

SEQ ID NO: 272746 - DNA, 15 bp, Homo sapiens
tttttaaatgagtta

SEQ ID NO: 272747 - DNA, 15 bp, Homo sapiens
atttttaaatgagtt

SEQ ID NO: 272748 - DNA, 15 bp, Homo sapiens
gatttttaaatgagt

SEQ ID NO: 272749 - DNA, 15 bp, Homo sapiens
tgatttttaaatgag

SEQ ID NO: 272750 - DNA, 15 bp, Homo sapiens
atgatttttaaatga

SEQ ID NO: 272751 - DNA, 15 bp, Homo sapiens
aatgatttttaaatg

SEQ ID NO: 272752 - DNA, 15 bp, Homo sapiens
caatgatttttaaat

SEQ ID NO: 272753 - DNA, 15 bp, Homo sapiens
tcaatgatttttaaa

SEQ ID NO: 272754 - DNA, 15 bp, Homo sapiens
ctcaatgatttttaa

SEQ ID NO: 272755 - DNA, 15 bp, Homo sapiens
tctcaatgattttta

SEQ ID NO: 272756 - DNA, 15 bp, Homo sapiens
atctcaatgattttt

SEQ ID NO: 272757 - DNA, 15 bp, Homo sapiens
tatctcaatgatttt

SEQ ID NO: 272758 - DNA, 15 bp, Homo sapiens
atatctcaatgattt

SEQ ID NO: 272759 - DNA, 15 bp, Homo sapiens
catatctcaatgatt

SEQ ID NO: 272760 - DNA, 15 bp, Homo sapiens
tcatatctcaatgat

SEQ ID NO: 272761 - DNA, 15 bp, Homo sapiens
ttcatatctcaatga

SEQ ID NO: 272762 - DNA, 15 bp, Homo sapiens
tttcatatctcaatg

SEQ ID NO: 272763 - DNA, 15 bp, Homo sapiens
atttcatatctcaat

SEQ ID NO: 272764 - DNA, 15 bp, Homo sapiens
tatttcatatctcaa

SEQ ID NO: 272765 - DNA, 15 bp, Homo sapiens
atatttcatatctca

SEQ ID NO: 272766 - DNA, 15 bp, Homo sapiens
tatatttcatatctc

SEQ ID NO: 272767 - DNA, 15 bp, Homo sapiens
ttatatttcatatct

SEQ ID NO: 272768 - DNA, 15 bp, Homo sapiens
tttatatttcatatc

SEQ ID NO: 272769 - DNA, 15 bp, Homo sapiens
ttttatatttcatat

SEQ ID NO: 272770 - DNA, 15 bp, Homo sapiens
attttatatttcata

SEQ ID NO: 272771 - DNA, 15 bp, Homo sapiens
gattttatatttcat

SEQ ID NO: 272772 - DNA, 15 bp, Homo sapiens
agattttatatttca

SEQ ID NO: 272773 - DNA, 15 bp, Homo sapiens
aagattttatatttc

SEQ ID NO: 272774 - DNA, 15 bp, Homo sapiens
aaagattttatattt

SEQ ID NO: 272775 - DNA, 15 bp, Homo sapiens
aaaagattttatatt

SEQ ID NO: 272776 - DNA, 15 bp, Homo sapiens
aaaaagattttatat

SEQ ID NO: 272777 - DNA, 15 bp, Homo sapiens
aaaaaagattttata

SEQ ID NO: 272778 - DNA, 15 bp, Homo sapiens
aaaaaaagattttat

SEQ ID NO: 272779 - DNA, 15 bp, Homo sapiens
taaaaaaagatttta

SEQ ID NO: 272780 - DNA, 15 bp, Homo sapiens
ataaaaaaagatttt

SEQ ID NO: 272781 - DNA, 15 bp, Homo sapiens
cataaaaaaagattt

SEQ ID NO: 272782 - DNA, 15 bp, Homo sapiens
acataaaaaaagatt

SEQ ID NO: 272783 - DNA, 15 bp, Homo sapiens
cacataaaaaaagat

SEQ ID NO: 272784 - DNA, 15 bp, Homo sapiens
acacataaaaaaaga

SEQ ID NO: 272785 - DNA, 15 bp, Homo sapiens
tacacataaaaaaag

SEQ ID NO: 272786 - DNA, 15 bp, Homo sapiens
ttacacataaaaaaa

SEQ ID NO: 272787 - DNA, 15 bp, Homo sapiens
tttacacataaaaaa

SEQ ID NO: 272788 - DNA, 15 bp, Homo sapiens
ttttacacataaaaa

SEQ ID NO: 272789 - DNA, 15 bp, Homo sapiens
attttacacataaaa

SEQ ID NO: 272790 - DNA, 15 bp, Homo sapiens
cattttacacataaa

SEQ ID NO: 272791 - DNA, 15 bp, Homo sapiens
acattttacacataa

SEQ ID NO: 272792 - DNA, 15 bp, Homo sapiens
cacattttacacata

SEQ ID NO: 272793 - DNA, 15 bp, Homo sapiens
tcacattttacacat

SEQ ID NO: 272794 - DNA, 15 bp, Homo sapiens
ttcacattttacaca

SEQ ID NO: 272795 - DNA, 15 bp, Homo sapiens
tttcacattttacac

SEQ ID NO: 272796 - DNA, 15 bp, Homo sapiens
atttcacattttaca

SEQ ID NO: 272797 - DNA, 15 bp, Homo sapiens
catttcacattttac

SEQ ID NO: 272798 - DNA, 15 bp, Homo sapiens
acatttcacatttta

SEQ ID NO: 272799 - DNA, 15 bp, Homo sapiens
aacatttcacatttt

SEQ ID NO: 272800 - DNA, 15 bp, Homo sapiens
gaacatttcacattt

SEQ ID NO: 272801 - DNA, 15 bp, Homo sapiens
tgaacatttcacatt

SEQ ID NO: 272802 - DNA, 15 bp, Homo sapiens
atgaacatttcacat

SEQ ID NO: 272803 - DNA, 15 bp, Homo sapiens
aatgaacatttcaca

SEQ ID NO: 272804 - DNA, 15 bp, Homo sapiens
aaatgaacatttcac

SEQ ID NO: 272805 - DNA, 15 bp, Homo sapiens
taaatgaacatttca

SEQ ID NO: 272806 - DNA, 15 bp, Homo sapiens
ttaaatgaacatttc

SEQ ID NO: 272807 - DNA, 15 bp, Homo sapiens
gttaaatgaacattt

SEQ ID NO: 272808 - DNA, 15 bp, Homo sapiens
tgttaaatgaacatt

SEQ ID NO: 272809 - DNA, 15 bp, Homo sapiens
ctgttaaatgaacat

SEQ ID NO: 272810 - DNA, 15 bp, Homo sapiens
tctgttaaatgaaca

SEQ ID NO: 272811 - DNA, 15 bp, Homo sapiens
atctgttaaatgaac

SEQ ID NO: 272812 - DNA, 15 bp, Homo sapiens
catctgttaaatgaa

SEQ ID NO: 272813 - DNA, 15 bp, Homo sapiens
tcatctgttaaatga

SEQ ID NO: 272814 - DNA, 15 bp, Homo sapiens
ttcatctgttaaatg

SEQ ID NO: 272815 - DNA, 15 bp, Homo sapiens
cttcatctgttaaat

SEQ ID NO: 272816 - DNA, 15 bp, Homo sapiens
tcttcatctgttaaa

SEQ ID NO: 272817 - DNA, 15 bp, Homo sapiens
gtcttcatctgttaa

SEQ ID NO: 272818 - DNA, 15 bp, Homo sapiens
tgtcttcatctgtta

SEQ ID NO: 272819 - DNA, 15 bp, Homo sapiens
gtgtcttcatctgtt

SEQ ID NO: 272820 - DNA, 15 bp, Homo sapiens
agtgtcttcatctgt

SEQ ID NO: 272821 - DNA, 15 bp, Homo sapiens
cagtgtcttcatctg

SEQ ID NO: 272822 - DNA, 15 bp, Homo sapiens
tcagtgtcttcatct

SEQ ID NO: 272823 - DNA, 15 bp, Homo sapiens
ctcagtgtcttcatc

SEQ ID NO: 272824 - DNA, 15 bp, Homo sapiens
actcagtgtcttcat

SEQ ID NO: 272825 - DNA, 15 bp, Homo sapiens
tactcagtgtcttca

SEQ ID NO: 272826 - DNA, 15 bp, Homo sapiens
ctactcagtgtcttc

SEQ ID NO: 272827 - DNA, 15 bp, Homo sapiens
tctactcagtgtctt

SEQ ID NO: 272828 - DNA, 15 bp, Homo sapiens
ctctactcagtgtct

SEQ ID NO: 272829 - DNA, 15 bp, Homo sapiens
actctactcagtgtc

SEQ ID NO: 272830 - DNA, 15 bp, Homo sapiens
cactctactcagtgt

SEQ ID NO: 272831 - DNA, 15 bp, Homo sapiens
tcactctactcagtg

SEQ ID NO: 272832 - DNA, 15 bp, Homo sapiens
ctcactctactcagt

SEQ ID NO: 272833 - DNA, 15 bp, Homo sapiens
cctcactctactcag

SEQ ID NO: 272834 - DNA, 15 bp, Homo sapiens
acctcactctactca

SEQ ID NO: 272835 - DNA, 15 bp, Homo sapiens
aacctcactctactc

SEQ ID NO: 272836 - DNA, 15 bp, Homo sapiens
caacctcactctact

SEQ ID NO: 272837 - DNA, 15 bp, Homo sapiens
tcaacctcactctac

SEQ ID NO: 272838 - DNA, 15 bp, Homo sapiens
ctcaacctcactcta

SEQ ID NO: 272839 - DNA, 15 bp, Homo sapiens
actcaacctcactct

SEQ ID NO: 272840 - DNA, 15 bp, Homo sapiens
tactcaacctcactc

SEQ ID NO: 272841 - DNA, 15 bp, Homo sapiens
ttactcaacctcact

SEQ ID NO: 272842 - DNA, 15 bp, Homo sapiens
gttactcaacctcac

SEQ ID NO: 272843 - DNA, 15 bp, Homo sapiens
agttactcaacctca

SEQ ID NO: 272844 - DNA, 15 bp, Homo sapiens
aagttactcaacctc

SEQ ID NO: 272845 - DNA, 15 bp, Homo sapiens
caagttactcaacct

SEQ ID NO: 272846 - DNA, 15 bp, Homo sapiens
tcaagttactcaacc

SEQ ID NO: 272847 - DNA, 15 bp, Homo sapiens
gtcaagttactcaac

SEQ ID NO: 272848 - DNA, 15 bp, Homo sapiens
ggtcaagttactcaa

SEQ ID NO: 272849 - DNA, 15 bp, Homo sapiens
tggtcaagttactca

SEQ ID NO: 272850 - DNA, 15 bp, Homo sapiens
ttggtcaagttactc

SEQ ID NO: 272851 - DNA, 15 bp, Homo sapiens
cttggtcaagttact

SEQ ID NO: 272852 - DNA, 15 bp, Homo sapiens
ccttggtcaagttac

SEQ ID NO: 272853 - DNA, 15 bp, Homo sapiens
accttggtcaagtta

SEQ ID NO: 272854 - DNA, 15 bp, Homo sapiens
gaccttggtcaagtt

SEQ ID NO: 272855 - DNA, 15 bp, Homo sapiens
ggaccttggtcaagt

SEQ ID NO: 272856 - DNA, 15 bp, Homo sapiens
gggaccttggtcaag

SEQ ID NO: 272857 - DNA, 15 bp, Homo sapiens
agggaccttggtcaa

SEQ ID NO: 272858 - DNA, 15 bp, Homo sapiens
tagggaccttggtca

SEQ ID NO: 272859 - DNA, 15 bp, Homo sapiens
ctagggaccttggtc

SEQ ID NO: 272860 - DNA, 15 bp, Homo sapiens
cctagggaccttggt

SEQ ID NO: 272861 - DNA, 15 bp, Homo sapiens
tcctagggaccttgg

SEQ ID NO: 272862 - DNA, 15 bp, Homo sapiens
ttcctagggaccttg

SEQ ID NO: 272863 - DNA, 15 bp, Homo sapiens
tttcctagggacctt

SEQ ID NO: 272864 - DNA, 15 bp, Homo sapiens
atttcctagggacct

SEQ ID NO: 272865 - DNA, 15 bp, Homo sapiens
tatttcctagggacc

SEQ ID NO: 272866 - DNA, 15 bp, Homo sapiens
ttatttcctagggac

SEQ ID NO: 272867 - DNA, 15 bp, Homo sapiens
cttatttcctaggga

SEQ ID NO: 272868 - DNA, 15 bp, Homo sapiens
tcttatttcctaggg

SEQ ID NO: 272869 - DNA, 15 bp, Homo sapiens
atcttatttcctagg

SEQ ID NO: 272870 - DNA, 15 bp, Homo sapiens
gatcttatttcctag

SEQ ID NO: 272871 - DNA, 15 bp, Homo sapiens
agatcttatttccta

SEQ ID NO: 272872 - DNA, 15 bp, Homo sapiens
gagatcttatttcct

SEQ ID NO: 272873 - DNA, 15 bp, Homo sapiens
tgagatcttatttcc

SEQ ID NO: 272874 - DNA, 15 bp, Homo sapiens
ttgagatcttatttc

SEQ ID NO: 272875 - DNA, 15 bp, Homo sapiens
tttgagatcttattt

SEQ ID NO: 272876 - DNA, 15 bp, Homo sapiens
atttgagatcttatt

SEQ ID NO: 272877 - DNA, 15 bp, Homo sapiens
tatttgagatcttat

SEQ ID NO: 272878 - DNA, 15 bp, Homo sapiens
atatttgagatctta

SEQ ID NO: 272879 - DNA, 15 bp, Homo sapiens
tatatttgagatctt

SEQ ID NO: 272880 - DNA, 15 bp, Homo sapiens
ttatatttgagatct

SEQ ID NO: 272881 - DNA, 15 bp, Homo sapiens
tttatatttgagatc

SEQ ID NO: 272882 - DNA, 15 bp, Homo sapiens
atttatatttgagat

SEQ ID NO: 272883 - DNA, 15 bp, Homo sapiens
aatttatatttgaga

SEQ ID NO: 272884 - DNA, 15 bp, Homo sapiens
aaatttatatttgag

SEQ ID NO: 272885 - DNA, 15 bp, Homo sapiens
caaatttatatttga

SEQ ID NO: 272886 - DNA, 15 bp, Homo sapiens
tcaaatttatatttg

SEQ ID NO: 272887 - DNA, 15 bp, Homo sapiens
ctcaaatttatattt

SEQ ID NO: 272888 - DNA, 15 bp, Homo sapiens
tctcaaatttatatt

SEQ ID NO: 272889 - DNA, 15 bp, Homo sapiens
atctcaaatttatat

SEQ ID NO: 272890 - DNA, 15 bp, Homo sapiens
aatctcaaatttata

SEQ ID NO: 272891 - DNA, 15 bp, Homo sapiens
taatctcaaatttat

SEQ ID NO: 272892 - DNA, 15 bp, Homo sapiens
ataatctcaaattta

SEQ ID NO: 272893 - DNA, 15 bp, Homo sapiens
tataatctcaaattt

SEQ ID NO: 272894 - DNA, 15 bp, Homo sapiens
gtataatctcaaatt

SEQ ID NO: 272895 - DNA, 15 bp, Homo sapiens
tgtataatctcaaat

SEQ ID NO: 272896 - DNA, 15 bp, Homo sapiens
atgtataatctcaaa

SEQ ID NO: 272897 - DNA, 15 bp, Homo sapiens
catgtataatctcaa

SEQ ID NO: 272898 - DNA, 15 bp, Homo sapiens
acatgtataatctca

SEQ ID NO: 272899 - DNA, 15 bp, Homo sapiens
tacatgtataatctc

SEQ ID NO: 272900 - DNA, 15 bp, Homo sapiens
ctacatgtataatct

SEQ ID NO: 272901 - DNA, 15 bp, Homo sapiens
actacatgtataatc

SEQ ID NO: 272902 - DNA, 15 bp, Homo sapiens
aactacatgtataat

SEQ ID NO: 272903 - DNA, 15 bp, Homo sapiens
taactacatgtataa

SEQ ID NO: 272904 - DNA, 15 bp, Homo sapiens
ataactacatgtata

SEQ ID NO: 272905 - DNA, 15 bp, Homo sapiens
cataactacatgtat

SEQ ID NO: 272906 - DNA, 15 bp, Homo sapiens
acataactacatgta

SEQ ID NO: 272907 - DNA, 15 bp, Homo sapiens
tacataactacatgt

SEQ ID NO: 272908 - DNA, 15 bp, Homo sapiens
atacataactacatg

SEQ ID NO: 272909 - DNA, 15 bp, Homo sapiens
tatacataactacat

SEQ ID NO: 272910 - DNA, 15 bp, Homo sapiens
ctatacataactaca

SEQ ID NO: 272911 - DNA, 15 bp, Homo sapiens
actatacataactac

SEQ ID NO: 272912 - DNA, 15 bp, Homo sapiens
aactatacataacta

SEQ ID NO: 272913 - DNA, 15 bp, Homo sapiens
taactatacataact

SEQ ID NO: 272914 - DNA, 15 bp, Homo sapiens
gtaactatacataac

SEQ ID NO: 272915 - DNA, 15 bp, Homo sapiens
ggtaactatacataa

SEQ ID NO: 272916 - DNA, 15 bp, Homo sapiens
aggtaactatacata

SEQ ID NO: 272917 - DNA, 15 bp, Homo sapiens
caggtaactatacat

SEQ ID NO: 272918 - DNA, 15 bp, Homo sapiens
acaggtaactataca

SEQ ID NO: 272919 - DNA, 15 bp, Homo sapiens
tacaggtaactatac

SEQ ID NO: 272920 - DNA, 15 bp, Homo sapiens
ctacaggtaactata

SEQ ID NO: 272921 - DNA, 15 bp, Homo sapiens
actacaggtaactat

SEQ ID NO: 272922 - DNA, 15 bp, Homo sapiens
aactacaggtaacta

SEQ ID NO: 272923 - DNA, 15 bp, Homo sapiens
taactacaggtaact

SEQ ID NO: 272924 - DNA, 15 bp, Homo sapiens
gtaactacaggtaac

SEQ ID NO: 272925 - DNA, 15 bp, Homo sapiens
tgtaactacaggtaa

SEQ ID NO: 272926 - DNA, 15 bp, Homo sapiens
gtgtaactacaggta

SEQ ID NO: 272927 - DNA, 15 bp, Homo sapiens
tgtgtaactacaggt

SEQ ID NO: 272928 - DNA, 15 bp, Homo sapiens
atgtgtaactacagg

SEQ ID NO: 272929 - DNA, 15 bp, Homo sapiens
tatgtgtaactacag

SEQ ID NO: 272930 - DNA, 15 bp, Homo sapiens
ctatgtgtaactaca

SEQ ID NO: 272931 - DNA, 15 bp, Homo sapiens
actatgtgtaactac

SEQ ID NO: 272932 - DNA, 15 bp, Homo sapiens
aactatgtgtaacta

SEQ ID NO: 272933 - DNA, 15 bp, Homo sapiens
aaactatgtgtaact

SEQ ID NO: 272934 - DNA, 15 bp, Homo sapiens
aaaactatgtgtaac

SEQ ID NO: 272935 - DNA, 15 bp, Homo sapiens
caaaactatgtgtaa

SEQ ID NO: 272936 - DNA, 15 bp, Homo sapiens
acaaaactatgtgta

SEQ ID NO: 272937 - DNA, 15 bp, Homo sapiens
tacaaaactatgtgt

SEQ ID NO: 272938 - DNA, 15 bp, Homo sapiens
atacaaaactatgtg

SEQ ID NO: 272939 - DNA, 15 bp, Homo sapiens
aatacaaaactatgt

SEQ ID NO: 272940 - DNA, 15 bp, Homo sapiens
aaatacaaaactatg

SEQ ID NO: 272941 - DNA, 15 bp, Homo sapiens
aaaatacaaaactat

SEQ ID NO: 272942 - DNA, 15 bp, Homo sapiens
gaaaatacaaaacta

SEQ ID NO: 272943 - DNA, 15 bp, Homo sapiens
ggaaaatacaaaact

SEQ ID NO: 272944 - DNA, 15 bp, Homo sapiens
aggaaaatacaaaac

SEQ ID NO: 272945 - DNA, 15 bp, Homo sapiens
caggaaaatacaaaa

SEQ ID NO: 272946 - DNA, 15 bp, Homo sapiens
acaggaaaatacaaa

SEQ ID NO: 272947 - DNA, 15 bp, Homo sapiens
aacaggaaaatacaa

SEQ ID NO: 272948 - DNA, 15 bp, Homo sapiens
aaacaggaaaataca

SEQ ID NO: 272949 - DNA, 15 bp, Homo sapiens
aaaacaggaaaatac

SEQ ID NO: 272950 - DNA, 15 bp, Homo sapiens
aaaaacaggaaaata

SEQ ID NO: 272951 - DNA, 15 bp, Homo sapiens
aaaaaacaggaaaat

SEQ ID NO: 272952 - DNA, 15 bp, Homo sapiens
aaaaaaacaggaaaa

SEQ ID NO: 272953 - DNA, 15 bp, Homo sapiens
gaaaaaaacaggaaa

SEQ ID NO: 272954 - DNA, 15 bp, Homo sapiens
agaaaaaaacaggaa

SEQ ID NO: 272955 - DNA, 15 bp, Homo sapiens
gagaaaaaaacagga

SEQ ID NO: 272956 - DNA, 15 bp, Homo sapiens
tgagaaaaaaacagg

SEQ ID NO: 272957 - DNA, 15 bp, Homo sapiens
atgagaaaaaaacag

SEQ ID NO: 272958 - DNA, 15 bp, Homo sapiens
tatgagaaaaaaaca

SEQ ID NO: 272959 - DNA, 15 bp, Homo sapiens
atatgagaaaaaaac

SEQ ID NO: 272960 - DNA, 15 bp, Homo sapiens
catatgagaaaaaaa

SEQ ID NO: 272961 - DNA, 15 bp, Homo sapiens
tcatatgagaaaaaa

SEQ ID NO: 272962 - DNA, 15 bp, Homo sapiens
ctcatatgagaaaaa

SEQ ID NO: 272963 - DNA, 15 bp, Homo sapiens
gctcatatgagaaaa

SEQ ID NO: 272964 - DNA, 15 bp, Homo sapiens
tgctcatatgagaaa

SEQ ID NO: 272965 - DNA, 15 bp, Homo sapiens
atgctcatatgagaa

SEQ ID NO: 272966 - DNA, 15 bp, Homo sapiens
aatgctcatatgaga

SEQ ID NO: 272967 - DNA, 15 bp, Homo sapiens
aaatgctcatatgag

SEQ ID NO: 272968 - DNA, 15 bp, Homo sapiens
aaaatgctcatatga

SEQ ID NO: 272969 - DNA, 15 bp, Homo sapiens
gaaaatgctcatatg

SEQ ID NO: 272970 - DNA, 15 bp, Homo sapiens
agaaaatgctcatat

SEQ ID NO: 272971 - DNA, 15 bp, Homo sapiens
aagaaaatgctcata

SEQ ID NO: 272972 - DNA, 15 bp, Homo sapiens
taagaaaatgctcat

SEQ ID NO: 272973 - DNA, 15 bp, Homo sapiens
ataagaaaatgctca

SEQ ID NO: 272974 - DNA, 15 bp, Homo sapiens
aataagaaaatgctc

SEQ ID NO: 272975 - DNA, 15 bp, Homo sapiens
taataagaaaatgct

SEQ ID NO: 272976 - DNA, 15 bp, Homo sapiens
ttaataagaaaatgc

SEQ ID NO: 272977 - DNA, 15 bp, Homo sapiens
tttaataagaaaatg

SEQ ID NO: 272978 - DNA, 15 bp, Homo sapiens
ctttaataagaaaat

SEQ ID NO: 272979 - DNA, 15 bp, Homo sapiens
actttaataagaaaa

SEQ ID NO: 272980 - DNA, 15 bp, Homo sapiens
aactttaataagaaa

SEQ ID NO: 272981 - DNA, 15 bp, Homo sapiens
aaactttaataagaa

SEQ ID NO: 272982 - DNA, 15 bp, Homo sapiens
aaaactttaataaga

SEQ ID NO: 272983 - DNA, 15 bp, Homo sapiens
aaaaactttaataag

SEQ ID NO: 272984 - DNA, 15 bp, Homo sapiens
aaaaaactttaataa

SEQ ID NO: 272985 - DNA, 15 bp, Homo sapiens
aaaaaaactttaata

SEQ ID NO: 272986 - DNA, 15 bp, Homo sapiens
caaaaaaactttaat

SEQ ID NO: 272987 - DNA, 15 bp, Homo sapiens
acaaaaaaactttaa

SEQ ID NO: 272988 - DNA, 15 bp, Homo sapiens
tacaaaaaaacttta

SEQ ID NO: 272989 - DNA, 15 bp, Homo sapiens
ttacaaaaaaacttt

SEQ ID NO: 272990 - DNA, 15 bp, Homo sapiens
attacaaaaaaactt

SEQ ID NO: 272991 - DNA, 15 bp, Homo sapiens
tattacaaaaaaact

SEQ ID NO: 272992 - DNA, 15 bp, Homo sapiens
atattacaaaaaaac

SEQ ID NO: 272993 - DNA, 15 bp, Homo sapiens
tatattacaaaaaaa

SEQ ID NO: 272994 - DNA, 15 bp, Homo sapiens
ctatattacaaaaaa

SEQ ID NO: 272995 - DNA, 15 bp, Homo sapiens
actatattacaaaaa

SEQ ID NO: 272996 - DNA, 15 bp, Homo sapiens
aactatattacaaaa

SEQ ID NO: 272997 - DNA, 15 bp, Homo sapiens
aaactatattacaaa

SEQ ID NO: 272998 - DNA, 15 bp, Homo sapiens
gaaactatattacaa

SEQ ID NO: 272999 - DNA, 15 bp, Homo sapiens
agaaactatattaca

SEQ ID NO: 273000 - DNA, 15 bp, Homo sapiens
tagaaactatattac

SEQ ID NO: 273001 - DNA, 15 bp, Homo sapiens
ctagaaactatatta

SEQ ID NO: 273002 - DNA, 15 bp, Homo sapiens
actagaaactatatt

SEQ ID NO: 273003 - DNA, 15 bp, Homo sapiens
cactagaaactatat

SEQ ID NO: 273004 - DNA, 15 bp, Homo sapiens
tcactagaaactata

SEQ ID NO: 273005 - DNA, 15 bp, Homo sapiens
atcactagaaactat

SEQ ID NO: 273006 - DNA, 15 bp, Homo sapiens
tatcactagaaacta

SEQ ID NO: 273007 - DNA, 15 bp, Homo sapiens
ctatcactagaaact

SEQ ID NO: 273008 - DNA, 15 bp, Homo sapiens
actatcactagaaac

SEQ ID NO: 273009 - DNA, 15 bp, Homo sapiens
tactatcactagaaa

SEQ ID NO: 273010 - DNA, 15 bp, Homo sapiens
atactatcactagaa

SEQ ID NO: 273011 - DNA, 15 bp, Homo sapiens
tatactatcactaga

SEQ ID NO: 273012 - DNA, 15 bp, Homo sapiens
ttatactatcactag

SEQ ID NO: 273013 - DNA, 15 bp, Homo sapiens
attatactatcacta

SEQ ID NO: 273014 - DNA, 15 bp, Homo sapiens
tattatactatcact

SEQ ID NO: 273015 - DNA, 15 bp, Homo sapiens
atattatactatcac

SEQ ID NO: 273016 - DNA, 15 bp, Homo sapiens
aatattatactatca

SEQ ID NO: 273017 - DNA, 15 bp, Homo sapiens
aaatattatactatc

SEQ ID NO: 273018 - DNA, 15 bp, Homo sapiens
aaaatattatactat

SEQ ID NO: 273019 - DNA, 15 bp, Homo sapiens
taaaatattatacta

SEQ ID NO: 273020 - DNA, 15 bp, Homo sapiens
ctaaaatattatact

SEQ ID NO: 273021 - DNA, 15 bp, Homo sapiens
gctaaaatattatac

SEQ ID NO: 273022 - DNA, 15 bp, Homo sapiens
agctaaaatattata

SEQ ID NO: 273023 - DNA, 15 bp, Homo sapiens
tagctaaaatattat

SEQ ID NO: 273024 - DNA, 15 bp, Homo sapiens
ctagctaaaatatta

SEQ ID NO: 273025 - DNA, 15 bp, Homo sapiens
actagctaaaatatt

SEQ ID NO: 273026 - DNA, 15 bp, Homo sapiens
cactagctaaaatat

SEQ ID NO: 273027 - DNA, 15 bp, Homo sapiens
ccactagctaaaata

SEQ ID NO: 273028 - DNA, 15 bp, Homo sapiens
tccactagctaaaat

SEQ ID NO: 273029 - DNA, 15 bp, Homo sapiens
atccactagctaaaa

SEQ ID NO: 273030 - DNA, 15 bp, Homo sapiens
catccactagctaaa

SEQ ID NO: 273031 - DNA, 15 bp, Homo sapiens
acatccactagctaa

SEQ ID NO: 273032 - DNA, 15 bp, Homo sapiens
tacatccactagcta

SEQ ID NO: 273033 - DNA, 15 bp, Homo sapiens
atacatccactagct

SEQ ID NO: 273034 - DNA, 15 bp, Homo sapiens
aatacatccactagc

SEQ ID NO: 273035 - DNA, 15 bp, Homo sapiens
aaatacatccactag

SEQ ID NO: 273036 - DNA, 15 bp, Homo sapiens
aaaatacatccacta

SEQ ID NO: 273037 - DNA, 15 bp, Homo sapiens
taaaatacatccact

SEQ ID NO: 273038 - DNA, 15 bp, Homo sapiens
ttaaaatacatccac

SEQ ID NO: 273039 - DNA, 15 bp, Homo sapiens
attaaaatacatcca

SEQ ID NO: 273040 - DNA, 15 bp, Homo sapiens
aattaaaatacatcc

SEQ ID NO: 273041 - DNA, 15 bp, Homo sapiens
aaattaaaatacatc

SEQ ID NO: 273042 - DNA, 15 bp, Homo sapiens
caaattaaaatacat

SEQ ID NO: 273043 - DNA, 15 bp, Homo sapiens
acaaattaaaataca

SEQ ID NO: 273044 - DNA, 15 bp, Homo sapiens
aacaaattaaaatac

SEQ ID NO: 273045 - DNA, 15 bp, Homo sapiens
taacaaattaaaata

SEQ ID NO: 273046 - DNA, 15 bp, Homo sapiens
ttaacaaattaaaat

SEQ ID NO: 273047 - DNA, 15 bp, Homo sapiens
gttaacaaattaaaa

SEQ ID NO: 273048 - DNA, 15 bp, Homo sapiens
agttaacaaattaaa

SEQ ID NO: 273049 - DNA, 15 bp, Homo sapiens
gagttaacaaattaa

SEQ ID NO: 273050 - DNA, 15 bp, Homo sapiens
agagttaacaaatta

SEQ ID NO: 273051 - DNA, 15 bp, Homo sapiens
aagagttaacaaatt

SEQ ID NO: 273052 - DNA, 15 bp, Homo sapiens
taagagttaacaaat

SEQ ID NO: 273053 - DNA, 15 bp, Homo sapiens
gtaagagttaacaaa

SEQ ID NO: 273054 - DNA, 15 bp, Homo sapiens
agtaagagttaacaa

SEQ ID NO: 273055 - DNA, 15 bp, Homo sapiens
cagtaagagttaaca

SEQ ID NO: 273056 - DNA, 15 bp, Homo sapiens
ccagtaagagttaac

SEQ ID NO: 273057 - DNA, 15 bp, Homo sapiens
tccagtaagagttaa

SEQ ID NO: 273058 - DNA, 15 bp, Homo sapiens
atccagtaagagtta

SEQ ID NO: 273059 - DNA, 15 bp, Homo sapiens
tatccagtaagagtt

SEQ ID NO: 273060 - DNA, 15 bp, Homo sapiens
atatccagtaagagt

SEQ ID NO: 273061 - DNA, 15 bp, Homo sapiens
aatatccagtaagag

SEQ ID NO: 273062 - DNA, 15 bp, Homo sapiens
aaatatccagtaaga

SEQ ID NO: 273063 - DNA, 15 bp, Homo sapiens
caaatatccagtaag

SEQ ID NO: 273064 - DNA, 15 bp, Homo sapiens
ccaaatatccagtaa

SEQ ID NO: 273065 - DNA, 15 bp, Homo sapiens
cccaaatatccagta

SEQ ID NO: 273066 - DNA, 15 bp, Homo sapiens
acccaaatatccagt

SEQ ID NO: 273067 - DNA, 15 bp, Homo sapiens
aacccaaatatccag

SEQ ID NO: 273068 - DNA, 15 bp, Homo sapiens
aaacccaaatatcca

SEQ ID NO: 273069 - DNA, 15 bp, Homo sapiens
aaaacccaaatatcc

SEQ ID NO: 273070 - DNA, 15 bp, Homo sapiens
aaaaacccaaatatc

SEQ ID NO: 273071 - DNA, 15 bp, Homo sapiens
aaaaaacccaaatat

SEQ ID NO: 273072 - DNA, 15 bp, Homo sapiens
gaaaaaacccaaata

SEQ ID NO: 273073 - DNA, 15 bp, Homo sapiens
ggaaaaaacccaaat

SEQ ID NO: 273074 - DNA, 15 bp, Homo sapiens
tggaaaaaacccaaa

SEQ ID NO: 273075 - DNA, 15 bp, Homo sapiens
ttggaaaaaacccaa

SEQ ID NO: 273076 - DNA, 15 bp, Homo sapiens
gttggaaaaaaccca

SEQ ID NO: 273077 - DNA, 15 bp, Homo sapiens
agttggaaaaaaccc

SEQ ID NO: 273078 - DNA, 15 bp, Homo sapiens
aagttggaaaaaacc

SEQ ID NO: 273079 - DNA, 15 bp, Homo sapiens
aaagttggaaaaaac

SEQ ID NO: 273080 - DNA, 15 bp, Homo sapiens
aaaagttggaaaaaa

SEQ ID NO: 273081 - DNA, 15 bp, Homo sapiens
aaaaagttggaaaaa

SEQ ID NO: 273082 - DNA, 15 bp, Homo sapiens
caaaaagttggaaaa

SEQ ID NO: 273083 - DNA, 15 bp, Homo sapiens
tcaaaaagttggaaa

SEQ ID NO: 273084 - DNA, 15 bp, Homo sapiens
atcaaaaagttggaa

SEQ ID NO: 273085 - DNA, 15 bp, Homo sapiens
catcaaaaagttgga

SEQ ID NO: 273086 - DNA, 15 bp, Homo sapiens
gcatcaaaaagttgg

SEQ ID NO: 273087 - DNA, 15 bp, Homo sapiens
agcatcaaaaagttg

SEQ ID NO: 273088 - DNA, 15 bp, Homo sapiens
tagcatcaaaaagtt

SEQ ID NO: 273089 - DNA, 15 bp, Homo sapiens
atagcatcaaaaagt

SEQ ID NO: 273090 - DNA, 15 bp, Homo sapiens
tatagcatcaaaaag

SEQ ID NO: 273091 - DNA, 15 bp, Homo sapiens
ttatagcatcaaaaa

SEQ ID NO: 273092 - DNA, 15 bp, Homo sapiens
tttatagcatcaaaa

SEQ ID NO: 273093 - DNA, 15 bp, Homo sapiens
ttttatagcatcaaa

SEQ ID NO: 273094 - DNA, 15 bp, Homo sapiens
attttatagcatcaa

SEQ ID NO: 273095 - DNA, 15 bp, Homo sapiens
tattttatagcatca

SEQ ID NO: 273096 - DNA, 15 bp, Homo sapiens
ttattttatagcatc

SEQ ID NO: 273097 - DNA, 15 bp, Homo sapiens
attattttatagcat

SEQ ID NO: 273098 - DNA, 15 bp, Homo sapiens
cattattttatagca

SEQ ID NO: 273099 - DNA, 15 bp, Homo sapiens
acattattttatagc

SEQ ID NO: 273100 - DNA, 15 bp, Homo sapiens
tacattattttatag

SEQ ID NO: 273101 - DNA, 15 bp, Homo sapiens
ttacattattttata

SEQ ID NO: 273102 - DNA, 15 bp, Homo sapiens
attacattattttat

SEQ ID NO: 273103 - DNA, 15 bp, Homo sapiens
tattacattatttta

SEQ ID NO: 273104 - DNA, 15 bp, Homo sapiens
ttattacattatttt

SEQ ID NO: 273105 - DNA, 15 bp, Homo sapiens
tttattacattattt

SEQ ID NO: 273106 - DNA, 15 bp, Homo sapiens
gtttattacattatt

SEQ ID NO: 273107 - DNA, 15 bp, Homo sapiens
tgtttattacattat

SEQ ID NO: 273108 - DNA, 15 bp, Homo sapiens
atgtttattacatta

SEQ ID NO: 273109 - DNA, 15 bp, Homo sapiens
aatgtttattacatt

SEQ ID NO: 273110 - DNA, 15 bp, Homo sapiens
aaatgtttattacat

SEQ ID NO: 273111 - DNA, 15 bp, Homo sapiens
caaatgtttattaca

SEQ ID NO: 273112 - DNA, 15 bp, Homo sapiens
acaaatgtttattac

SEQ ID NO: 273113 - DNA, 15 bp, Homo sapiens
tacaaatgtttatta

SEQ ID NO: 273114 - DNA, 15 bp, Homo sapiens
atacaaatgtttatt

SEQ ID NO: 273115 - DNA, 15 bp, Homo sapiens
aatacaaatgtttat

SEQ ID NO: 273116 - DNA, 15 bp, Homo sapiens
gaatacaaatgttta

SEQ ID NO: 273117 - DNA, 15 bp, Homo sapiens
cgaatacaaatgttt

SEQ ID NO: 273118 - DNA, 15 bp, Homo sapiens
acgaatacaaatgtt

SEQ ID NO: 273119 - DNA, 15 bp, Homo sapiens
tacgaatacaaatgt

SEQ ID NO: 273120 - DNA, 15 bp, Homo sapiens
ttacgaatacaaatg

SEQ ID NO: 273121 - DNA, 15 bp, Homo sapiens
cttacgaatacaaat

SEQ ID NO: 273122 - DNA, 15 bp, Homo sapiens
tcttacgaatacaaa

SEQ ID NO: 273123 - DNA, 15 bp, Homo sapiens
ttcttacgaatacaa

SEQ ID NO: 273124 - DNA, 15 bp, Homo sapiens
attcttacgaataca

SEQ ID NO: 273125 - DNA, 15 bp, Homo sapiens
tattcttacgaatac

SEQ ID NO: 273126 - DNA, 15 bp, Homo sapiens
ttattcttacgaata

SEQ ID NO: 273127 - DNA, 15 bp, Homo sapiens
attattcttacgaat

SEQ ID NO: 273128 - DNA, 15 bp, Homo sapiens
cattattcttacgaa

SEQ ID NO: 273129 - DNA, 15 bp, Homo sapiens
gcattattcttacga

SEQ ID NO: 273130 - DNA, 15 bp, Homo sapiens
ggcattattcttacg

SEQ ID NO: 273131 - DNA, 15 bp, Homo sapiens
aggcattattcttac

SEQ ID NO: 273132 - DNA, 15 bp, Homo sapiens
caggcattattctta

SEQ ID NO: 273133 - DNA, 15 bp, Homo sapiens
ccaggcattattctt

SEQ ID NO: 273134 - DNA, 15 bp, Homo sapiens
gccaggcattattct

SEQ ID NO: 273135 - DNA, 15 bp, Homo sapiens
tgccaggcattattc

SEQ ID NO: 273136 - DNA, 15 bp, Homo sapiens
gtgccaggcattatt

SEQ ID NO: 273137 - DNA, 15 bp, Homo sapiens
tgtgccaggcattat

SEQ ID NO: 273138 - DNA, 15 bp, Homo sapiens
ttgtgccaggcatta

SEQ ID NO: 273139 - DNA, 15 bp, Homo sapiens
tttgtgccaggcatt

SEQ ID NO: 273140 - DNA, 15 bp, Homo sapiens
ctttgtgccaggcat

SEQ ID NO: 273141 - DNA, 15 bp, Homo sapiens
actttgtgccaggca

SEQ ID NO: 273142 - DNA, 15 bp, Homo sapiens
cactttgtgccaggc

SEQ ID NO: 273143 - DNA, 15 bp, Homo sapiens
tcactttgtgccagg

SEQ ID NO: 273144 - DNA, 15 bp, Homo sapiens
ctcactttgtgccag

SEQ ID NO: 273145 - DNA, 15 bp, Homo sapiens
actcactttgtgcca

SEQ ID NO: 273146 - DNA, 15 bp, Homo sapiens
gactcactttgtgcc

SEQ ID NO: 273147 - DNA, 15 bp, Homo sapiens
ggactcactttgtgc

SEQ ID NO: 273148 - DNA, 15 bp, Homo sapiens
aggactcactttgtg

SEQ ID NO: 273149 - DNA, 15 bp, Homo sapiens
aaggactcactttgt

SEQ ID NO: 273150 - DNA, 15 bp, Homo sapiens
caaggactcactttg

SEQ ID NO: 273151 - DNA, 15 bp, Homo sapiens
tcaaggactcacttt

SEQ ID NO: 273152 - DNA, 15 bp, Homo sapiens
atcaaggactcactt

SEQ ID NO: 273153 - DNA, 15 bp, Homo sapiens
tatcaaggactcact

SEQ ID NO: 273154 - DNA, 15 bp, Homo sapiens
ttatcaaggactcac

SEQ ID NO: 273155 - DNA, 15 bp, Homo sapiens
gttatcaaggactca

SEQ ID NO: 273156 - DNA, 15 bp, Homo sapiens
agttatcaaggactc

SEQ ID NO: 273157 - DNA, 15 bp, Homo sapiens
aagttatcaaggact

SEQ ID NO: 273158 - DNA, 15 bp, Homo sapiens
caagttatcaaggac

SEQ ID NO: 273159 - DNA, 15 bp, Homo sapiens
acaagttatcaagga

SEQ ID NO: 273160 - DNA, 15 bp, Homo sapiens
aacaagttatcaagg

SEQ ID NO: 273161 - DNA, 15 bp, Homo sapiens
taacaagttatcaag

SEQ ID NO: 273162 - DNA, 15 bp, Homo sapiens
ttaacaagttatcaa

SEQ ID NO: 273163 - DNA, 15 bp, Homo sapiens
tttaacaagttatca

SEQ ID NO: 273164 - DNA, 15 bp, Homo sapiens
atttaacaagttatc

SEQ ID NO: 273165 - DNA, 15 bp, Homo sapiens
tatttaacaagttat

SEQ ID NO: 273166 - DNA, 15 bp, Homo sapiens
ttatttaacaagtta

SEQ ID NO: 273167 - DNA, 15 bp, Homo sapiens
tttatttaacaagtt

SEQ ID NO: 273168 - DNA, 15 bp, Homo sapiens
atttatttaacaagt

SEQ ID NO: 273169 - DNA, 15 bp, Homo sapiens
aatttatttaacaag

SEQ ID NO: 273170 - DNA, 15 bp, Homo sapiens
taatttatttaacaa

SEQ ID NO: 273171 - DNA, 15 bp, Homo sapiens
ttaatttatttaaca

SEQ ID NO: 273172 - DNA, 15 bp, Homo sapiens
attaatttatttaac

SEQ ID NO: 273173 - DNA, 15 bp, Homo sapiens
cattaatttatttaa

SEQ ID NO: 273174 - DNA, 15 bp, Homo sapiens
tcattaatttattta

SEQ ID NO: 273175 - DNA, 15 bp, Homo sapiens
ttcattaatttattt

SEQ ID NO: 273176 - DNA, 15 bp, Homo sapiens
attcattaatttatt

SEQ ID NO: 273177 - DNA, 15 bp, Homo sapiens
cattcattaatttat

SEQ ID NO: 273178 - DNA, 15 bp, Homo sapiens
tcattcattaattta

SEQ ID NO: 273179 - DNA, 15 bp, Homo sapiens
ttcattcattaattt

SEQ ID NO: 273180 - DNA, 15 bp, Homo sapiens
attcattcattaatt

SEQ ID NO: 273181 - DNA, 15 bp, Homo sapiens
gattcattcattaat

SEQ ID NO: 273182 - DNA, 15 bp, Homo sapiens
agattcattcattaa

SEQ ID NO: 273183 - DNA, 15 bp, Homo sapiens
gagattcattcatta

SEQ ID NO: 273184 - DNA, 15 bp, Homo sapiens
agagattcattcatt

SEQ ID NO: 273185 - DNA, 15 bp, Homo sapiens
cagagattcattcat

SEQ ID NO: 273186 - DNA, 15 bp, Homo sapiens
tcagagattcattca

SEQ ID NO: 273187 - DNA, 15 bp, Homo sapiens
atcagagattcattc

SEQ ID NO: 273188 - DNA, 15 bp, Homo sapiens
aatcagagattcatt

SEQ ID NO: 273189 - DNA, 15 bp, Homo sapiens
taatcagagattcat

SEQ ID NO: 273190 - DNA, 15 bp, Homo sapiens
ataatcagagattca

SEQ ID NO: 273191 - DNA, 15 bp, Homo sapiens
aataatcagagattc

SEQ ID NO: 273192 - DNA, 15 bp, Homo sapiens
aaataatcagagatt

SEQ ID NO: 273193 - DNA, 15 bp, Homo sapiens
aaaataatcagagat

SEQ ID NO: 273194 - DNA, 15 bp, Homo sapiens
taaaataatcagaga

SEQ ID NO: 273195 - DNA, 15 bp, Homo sapiens
ataaaataatcagag

SEQ ID NO: 273196 - DNA, 15 bp, Homo sapiens
aataaaataatcaga

SEQ ID NO: 273197 - DNA, 15 bp, Homo sapiens
taataaaataatcag

SEQ ID NO: 273198 - DNA, 15 bp, Homo sapiens
ctaataaaataatca

SEQ ID NO: 273199 - DNA, 15 bp, Homo sapiens
tctaataaaataatc

SEQ ID NO: 273200 - DNA, 15 bp, Homo sapiens
ttctaataaaataat

SEQ ID NO: 273201 - DNA, 15 bp, Homo sapiens
attctaataaaataa

SEQ ID NO: 273202 - DNA, 15 bp, Homo sapiens
tattctaataaaata

SEQ ID NO: 273203 - DNA, 15 bp, Homo sapiens
ttattctaataaaat

SEQ ID NO: 273204 - DNA, 15 bp, Homo sapiens
tttattctaataaaa

SEQ ID NO: 273205 - DNA, 15 bp, Homo sapiens
atttattctaataaa

SEQ ID NO: 273206 - DNA, 15 bp, Homo sapiens
aatttattctaataa

SEQ ID NO: 273207 - DNA, 15 bp, Homo sapiens
gaatttattctaata

SEQ ID NO: 273208 - DNA, 15 bp, Homo sapiens
agaatttattctaat

SEQ ID NO: 273209 - DNA, 15 bp, Homo sapiens
aagaatttattctaa

SEQ ID NO: 273210 - DNA, 15 bp, Homo sapiens
taagaatttattcta

SEQ ID NO: 273211 - DNA, 15 bp, Homo sapiens
ataagaatttattct

SEQ ID NO: 273212 - DNA, 15 bp, Homo sapiens
tataagaatttattc

SEQ ID NO: 273213 - DNA, 15 bp, Homo sapiens
ttataagaatttatt

SEQ ID NO: 273214 - DNA, 15 bp, Homo sapiens
cttataagaatttat

SEQ ID NO: 273215 - DNA, 15 bp, Homo sapiens
acttataagaattta

SEQ ID NO: 273216 - DNA, 15 bp, Homo sapiens
aacttataagaattt

SEQ ID NO: 273217 - DNA, 15 bp, Homo sapiens
caacttataagaatt

SEQ ID NO: 273218 - DNA, 15 bp, Homo sapiens
tcaacttataagaat

SEQ ID NO: 273219 - DNA, 15 bp, Homo sapiens
ttcaacttataagaa

SEQ ID NO: 273220 - DNA, 15 bp, Homo sapiens
attcaacttataaga

SEQ ID NO: 273221 - DNA, 15 bp, Homo sapiens
aattcaacttataag

SEQ ID NO: 273222 - DNA, 15 bp, Homo sapiens
taattcaacttataa

SEQ ID NO: 273223 - DNA, 15 bp, Homo sapiens
gtaattcaacttata

SEQ ID NO: 273224 - DNA, 15 bp, Homo sapiens
agtaattcaacttat

SEQ ID NO: 273225 - DNA, 15 bp, Homo sapiens
tagtaattcaactta

SEQ ID NO: 273226 - DNA, 15 bp, Homo sapiens
ttagtaattcaactt

SEQ ID NO: 273227 - DNA, 15 bp, Homo sapiens
tttagtaattcaact

SEQ ID NO: 273228 - DNA, 15 bp, Homo sapiens
atttagtaattcaac

SEQ ID NO: 273229 - DNA, 15 bp, Homo sapiens
gatttagtaattcaa

SEQ ID NO: 273230 - DNA, 15 bp, Homo sapiens
tgatttagtaattca

SEQ ID NO: 273231 - DNA, 15 bp, Homo sapiens
ttgatttagtaattc

SEQ ID NO: 273232 - DNA, 15 bp, Homo sapiens
tttgatttagtaatt

SEQ ID NO: 273233 - DNA, 15 bp, Homo sapiens
ttttgatttagtaat

SEQ ID NO: 273234 - DNA, 15 bp, Homo sapiens
cttttgatttagtaa

SEQ ID NO: 273235 - DNA, 15 bp, Homo sapiens
gcttttgatttagta

SEQ ID NO: 273236 - DNA, 15 bp, Homo sapiens
agcttttgatttagt

SEQ ID NO: 273237 - DNA, 15 bp, Homo sapiens
tagcttttgatttag

SEQ ID NO: 273238 - DNA, 15 bp, Homo sapiens
atagcttttgattta

SEQ ID NO: 273239 - DNA, 15 bp, Homo sapiens
catagcttttgattt

SEQ ID NO: 273240 - DNA, 15 bp, Homo sapiens
tcatagcttttgatt

SEQ ID NO: 273241 - DNA, 15 bp, Homo sapiens
ttcatagcttttgat

SEQ ID NO: 273242 - DNA, 15 bp, Homo sapiens
gttcatagcttttga

SEQ ID NO: 273243 - DNA, 15 bp, Homo sapiens
tgttcatagcttttg

SEQ ID NO: 273244 - DNA, 15 bp, Homo sapiens
atgttcatagctttt

SEQ ID NO: 273245 - DNA, 15 bp, Homo sapiens
aatgttcatagcttt

SEQ ID NO: 273246 - DNA, 15 bp, Homo sapiens
aaatgttcatagctt

SEQ ID NO: 273247 - DNA, 15 bp, Homo sapiens
aaaatgttcatagct

SEQ ID NO: 273248 - DNA, 15 bp, Homo sapiens
aaaaatgttcatagc

SEQ ID NO: 273249 - DNA, 15 bp, Homo sapiens
taaaaatgttcatag

SEQ ID NO: 273250 - DNA, 15 bp, Homo sapiens
ataaaaatgttcata

SEQ ID NO: 273251 - DNA, 15 bp, Homo sapiens
cataaaaatgttcat

SEQ ID NO: 273252 - DNA, 15 bp, Homo sapiens
tcataaaaatgttca

SEQ ID NO: 273253 - DNA, 15 bp, Homo sapiens
gtcataaaaatgttc

SEQ ID NO: 273254 - DNA, 15 bp, Homo sapiens
agtcataaaaatgtt

SEQ ID NO: 273255 - DNA, 15 bp, Homo sapiens
gagtcataaaaatgt

SEQ ID NO: 273256 - DNA, 15 bp, Homo sapiens
agagtcataaaaatg

SEQ ID NO: 273257 - DNA, 15 bp, Homo sapiens
aagagtcataaaaat

SEQ ID NO: 273258 - DNA, 15 bp, Homo sapiens
caagagtcataaaaa

SEQ ID NO: 273259 - DNA, 15 bp, Homo sapiens
tcaagagtcataaaa

SEQ ID NO: 273260 - DNA, 15 bp, Homo sapiens
atcaagagtcataaa

SEQ ID NO: 273261 - DNA, 15 bp, Homo sapiens
catcaagagtcataa

SEQ ID NO: 273262 - DNA, 15 bp, Homo sapiens
tcatcaagagtcata

SEQ ID NO: 273263 - DNA, 15 bp, Homo sapiens
atcatcaagagtcat

SEQ ID NO: 273264 - DNA, 15 bp, Homo sapiens
aatcatcaagagtca

SEQ ID NO: 273265 - DNA, 15 bp, Homo sapiens
taatcatcaagagtc

SEQ ID NO: 273266 - DNA, 15 bp, Homo sapiens
ataatcatcaagagt

SEQ ID NO: 273267 - DNA, 15 bp, Homo sapiens
aataatcatcaagag

SEQ ID NO: 273268 - DNA, 15 bp, Homo sapiens
caataatcatcaaga

SEQ ID NO: 273269 - DNA, 15 bp, Homo sapiens
gcaataatcatcaag

SEQ ID NO: 273270 - DNA, 15 bp, Homo sapiens
agcaataatcatcaa

SEQ ID NO: 273271 - DNA, 15 bp, Homo sapiens
tagcaataatcatca

SEQ ID NO: 273272 - DNA, 15 bp, Homo sapiens
ctagcaataatcatc

SEQ ID NO: 273273 - DNA, 15 bp, Homo sapiens
tctagcaataatcat

SEQ ID NO: 273274 - DNA, 15 bp, Homo sapiens
atctagcaataatca

SEQ ID NO: 273275 - DNA, 15 bp, Homo sapiens
aatctagcaataatc

SEQ ID NO: 273276 - DNA, 15 bp, Homo sapiens
taatctagcaataat

SEQ ID NO: 273277 - DNA, 15 bp, Homo sapiens
gtaatctagcaataa

SEQ ID NO: 273278 - DNA, 15 bp, Homo sapiens
tgtaatctagcaata

SEQ ID NO: 273279 - DNA, 15 bp, Homo sapiens
gtgtaatctagcaat

SEQ ID NO: 273280 - DNA, 15 bp, Homo sapiens
agtgtaatctagcaa

SEQ ID NO: 273281 - DNA, 15 bp, Homo sapiens
aagtgtaatctagca

SEQ ID NO: 273282 - DNA, 15 bp, Homo sapiens
gaagtgtaatctagc

SEQ ID NO: 273283 - DNA, 15 bp, Homo sapiens
tgaagtgtaatctag

SEQ ID NO: 273284 - DNA, 15 bp, Homo sapiens
ctgaagtgtaatcta

SEQ ID NO: 273285 - DNA, 15 bp, Homo sapiens
tctgaagtgtaatct

SEQ ID NO: 273286 - DNA, 15 bp, Homo sapiens
gtctgaagtgtaatc

SEQ ID NO: 273287 - DNA, 15 bp, Homo sapiens
tgtctgaagtgtaat

SEQ ID NO: 273288 - DNA, 15 bp, Homo sapiens
ctgtctgaagtgtaa

SEQ ID NO: 273289 - DNA, 15 bp, Homo sapiens
tctgtctgaagtgta

SEQ ID NO: 273290 - DNA, 15 bp, Homo sapiens
atctgtctgaagtgt

SEQ ID NO: 273291 - DNA, 15 bp, Homo sapiens
tatctgtctgaagtg

SEQ ID NO: 273292 - DNA, 15 bp, Homo sapiens
gtatctgtctgaagt

SEQ ID NO: 273293 - DNA, 15 bp, Homo sapiens
agtatctgtctgaag

SEQ ID NO: 273294 - DNA, 15 bp, Homo sapiens
aagtatctgtctgaa

SEQ ID NO: 273295 - DNA, 15 bp, Homo sapiens
aaagtatctgtctga

SEQ ID NO: 273296 - DNA, 15 bp, Homo sapiens
aaaagtatctgtctg

SEQ ID NO: 273297 - DNA, 15 bp, Homo sapiens
taaaagtatctgtct

SEQ ID NO: 273298 - DNA, 15 bp, Homo sapiens
ttaaaagtatctgtc

SEQ ID NO: 273299 - DNA, 15 bp, Homo sapiens
attaaaagtatctgt

SEQ ID NO: 273300 - DNA, 15 bp, Homo sapiens
cattaaaagtatctg

SEQ ID NO: 273301 - DNA, 15 bp, Homo sapiens
tcattaaaagtatct

SEQ ID NO: 273302 - DNA, 15 bp, Homo sapiens
ttcattaaaagtatc

SEQ ID NO: 273303 - DNA, 15 bp, Homo sapiens
attcattaaaagtat

SEQ ID NO: 273304 - DNA, 15 bp, Homo sapiens
aattcattaaaagta

SEQ ID NO: 273305 - DNA, 15 bp, Homo sapiens
aaattcattaaaagt

SEQ ID NO: 273306 - DNA, 15 bp, Homo sapiens
taaattcattaaaag

SEQ ID NO: 273307 - DNA, 15 bp, Homo sapiens
gtaaattcattaaaa

SEQ ID NO: 273308 - DNA, 15 bp, Homo sapiens
agtaaattcattaaa

SEQ ID NO: 273309 - DNA, 15 bp, Homo sapiens
aagtaaattcattaa

SEQ ID NO: 273310 - DNA, 15 bp, Homo sapiens
aaagtaaattcatta

SEQ ID NO: 273311 - DNA, 15 bp, Homo sapiens
gaaagtaaattcatt

SEQ ID NO: 273312 - DNA, 15 bp, Homo sapiens
agaaagtaaattcat

SEQ ID NO: 273313 - DNA, 15 bp, Homo sapiens
gagaaagtaaattca

SEQ ID NO: 273314 - DNA, 15 bp, Homo sapiens
tgagaaagtaaattc

SEQ ID NO: 273315 - DNA, 15 bp, Homo sapiens
ttgagaaagtaaatt

SEQ ID NO: 273316 - DNA, 15 bp, Homo sapiens
gttgagaaagtaaat

SEQ ID NO: 273317 - DNA, 15 bp, Homo sapiens
tgttgagaaagtaaa

SEQ ID NO: 273318 - DNA, 15 bp, Homo sapiens
atgttgagaaagtaa

SEQ ID NO: 273319 - DNA, 15 bp, Homo sapiens
tatgttgagaaagta

SEQ ID NO: 273320 - DNA, 15 bp, Homo sapiens
ctatgttgagaaagt

SEQ ID NO: 273321 - DNA, 15 bp, Homo sapiens
actatgttgagaaag

SEQ ID NO: 273322 - DNA, 15 bp, Homo sapiens
tactatgttgagaaa

SEQ ID NO: 273323 - DNA, 15 bp, Homo sapiens
ctactatgttgagaa

SEQ ID NO: 273324 - DNA, 15 bp, Homo sapiens
actactatgttgaga

SEQ ID NO: 273325 - DNA, 15 bp, Homo sapiens
tactactatgttgag

SEQ ID NO: 273326 - DNA, 15 bp, Homo sapiens
atactactatgttga

SEQ ID NO: 273327 - DNA, 15 bp, Homo sapiens
tatactactatgttg

SEQ ID NO: 273328 - DNA, 15 bp, Homo sapiens
ttatactactatgtt

SEQ ID NO: 273329 - DNA, 15 bp, Homo sapiens
cttatactactatgt

SEQ ID NO: 273330 - DNA, 15 bp, Homo sapiens
tcttatactactatg

SEQ ID NO: 273331 - DNA, 15 bp, Homo sapiens
ctcttatactactat

SEQ ID NO: 273332 - DNA, 15 bp, Homo sapiens
actcttatactacta

SEQ ID NO: 273333 - DNA, 15 bp, Homo sapiens
tactcttatactact

SEQ ID NO: 273334 - DNA, 15 bp, Homo sapiens
atactcttatactac

SEQ ID NO: 273335 - DNA, 15 bp, Homo sapiens
tatactcttatacta

SEQ ID NO: 273336 - DNA, 15 bp, Homo sapiens
atatactcttatact

SEQ ID NO: 273337 - DNA, 15 bp, Homo sapiens
tatatactcttatac

SEQ ID NO: 273338 - DNA, 15 bp, Homo sapiens
atatatactcttata

SEQ ID NO: 273339 - DNA, 15 bp, Homo sapiens
gatatatactcttat

SEQ ID NO: 273340 - DNA, 15 bp, Homo sapiens
agatatatactctta

SEQ ID NO: 273341 - DNA, 15 bp, Homo sapiens
cagatatatactctt

SEQ ID NO: 273342 - DNA, 15 bp, Homo sapiens
acagatatatactct

SEQ ID NO: 273343 - DNA, 15 bp, Homo sapiens
aacagatatatactc

SEQ ID NO: 273344 - DNA, 15 bp, Homo sapiens
aaacagatatatact

SEQ ID NO: 273345 - DNA, 15 bp, Homo sapiens
aaaacagatatatac

SEQ ID NO: 273346 - DNA, 15 bp, Homo sapiens
aaaaacagatatata

SEQ ID NO: 273347 - DNA, 15 bp, Homo sapiens
taaaaacagatatat

SEQ ID NO: 273348 - DNA, 15 bp, Homo sapiens
gtaaaaacagatata

SEQ ID NO: 273349 - DNA, 15 bp, Homo sapiens
agtaaaaacagatat

SEQ ID NO: 273350 - DNA, 15 bp, Homo sapiens
cagtaaaaacagata

SEQ ID NO: 273351 - DNA, 15 bp, Homo sapiens
tcagtaaaaacagat

SEQ ID NO: 273352 - DNA, 15 bp, Homo sapiens
atcagtaaaaacaga

SEQ ID NO: 273353 - DNA, 15 bp, Homo sapiens
gatcagtaaaaacag

SEQ ID NO: 273354 - DNA, 15 bp, Homo sapiens
agatcagtaaaaaca

SEQ ID NO: 273355 - DNA, 15 bp, Homo sapiens
cagatcagtaaaaac

SEQ ID NO: 273356 - DNA, 15 bp, Homo sapiens
tcagatcagtaaaaa

SEQ ID NO: 273357 - DNA, 15 bp, Homo sapiens
atcagatcagtaaaa

SEQ ID NO: 273358 - DNA, 15 bp, Homo sapiens
aatcagatcagtaaa

SEQ ID NO: 273359 - DNA, 15 bp, Homo sapiens
taatcagatcagtaa

SEQ ID NO: 273360 - DNA, 15 bp, Homo sapiens
ttaatcagatcagta

SEQ ID NO: 273361 - DNA, 15 bp, Homo sapiens
gttaatcagatcagt

SEQ ID NO: 273362 - DNA, 15 bp, Homo sapiens
tgttaatcagatcag

SEQ ID NO: 273363 - DNA, 15 bp, Homo sapiens
gtgttaatcagatca

SEQ ID NO: 273364 - DNA, 15 bp, Homo sapiens
tgtgttaatcagatc

SEQ ID NO: 273365 - DNA, 15 bp, Homo sapiens
ctgtgttaatcagat

SEQ ID NO: 273366 - DNA, 15 bp, Homo sapiens
gctgtgttaatcaga

SEQ ID NO: 273367 - DNA, 15 bp, Homo sapiens
cgctgtgttaatcag

SEQ ID NO: 273368 - DNA, 15 bp, Homo sapiens
ccgctgtgttaatca

SEQ ID NO: 273369 - DNA, 15 bp, Homo sapiens
tccgctgtgttaatc

SEQ ID NO: 273370 - DNA, 15 bp, Homo sapiens
ttccgctgtgttaat

SEQ ID NO: 273371 - DNA, 15 bp, Homo sapiens
attccgctgtgttaa

SEQ ID NO: 273372 - DNA, 15 bp, Homo sapiens
cattccgctgtgtta

SEQ ID NO: 273373 - DNA, 15 bp, Homo sapiens
acattccgctgtgtt

SEQ ID NO: 273374 - DNA, 15 bp, Homo sapiens
cacattccgctgtgt

SEQ ID NO: 273375 - DNA, 15 bp, Homo sapiens
acacattccgctgtg

SEQ ID NO: 273376 - DNA, 15 bp, Homo sapiens
aacacattccgctgt

SEQ ID NO: 273377 - DNA, 15 bp, Homo sapiens
aaacacattccgctg

SEQ ID NO: 273378 - DNA, 15 bp, Homo sapiens
taaacacattccgct

SEQ ID NO: 273379 - DNA, 15 bp, Homo sapiens
ataaacacattccgc

SEQ ID NO: 273380 - DNA, 15 bp, Homo sapiens
cataaacacattccg

SEQ ID NO: 273381 - DNA, 15 bp, Homo sapiens
acataaacacattcc

SEQ ID NO: 273382 - DNA, 15 bp, Homo sapiens
tacataaacacattc

SEQ ID NO: 273383 - DNA, 15 bp, Homo sapiens
atacataaacacatt

SEQ ID NO: 273384 - DNA, 15 bp, Homo sapiens
catacataaacacat

SEQ ID NO: 273385 - DNA, 15 bp, Homo sapiens
acatacataaacaca

SEQ ID NO: 273386 - DNA, 15 bp, Homo sapiens
gacatacataaacac

SEQ ID NO: 273387 - DNA, 15 bp, Homo sapiens
ggacatacataaaca

SEQ ID NO: 273388 - DNA, 15 bp, Homo sapiens
gggacatacataaac

SEQ ID NO: 273389 - DNA, 15 bp, Homo sapiens
tgggacatacataaa

SEQ ID NO: 273390 - DNA, 15 bp, Homo sapiens
atgggacatacataa

SEQ ID NO: 273391 - DNA, 15 bp, Homo sapiens
tatgggacatacata

SEQ ID NO: 273392 - DNA, 15 bp, Homo sapiens
ttatgggacatacat

SEQ ID NO: 273393 - DNA, 15 bp, Homo sapiens
cttatgggacataca

SEQ ID NO: 273394 - DNA, 15 bp, Homo sapiens
tcttatgggacatac

SEQ ID NO: 273395 - DNA, 15 bp, Homo sapiens
ttcttatgggacata

SEQ ID NO: 273396 - DNA, 15 bp, Homo sapiens
tttcttatgggacat

SEQ ID NO: 273397 - DNA, 15 bp, Homo sapiens
ttttcttatgggaca

SEQ ID NO: 273398 - DNA, 15 bp, Homo sapiens
attttcttatgggac

SEQ ID NO: 273399 - DNA, 15 bp, Homo sapiens
aattttcttatggga

SEQ ID NO: 273400 - DNA, 15 bp, Homo sapiens
caattttcttatggg

SEQ ID NO: 273401 - DNA, 15 bp, Homo sapiens
acaattttcttatgg

SEQ ID NO: 273402 - DNA, 15 bp, Homo sapiens
aacaattttcttatg

SEQ ID NO: 273403 - DNA, 15 bp, Homo sapiens
aaacaattttcttat

SEQ ID NO: 273404 - DNA, 15 bp, Homo sapiens
taaacaattttctta

SEQ ID NO: 273405 - DNA, 15 bp, Homo sapiens
ttaaacaattttctt

SEQ ID NO: 273406 - DNA, 15 bp, Homo sapiens
tttaaacaattttct

SEQ ID NO: 273407 - DNA, 15 bp, Homo sapiens
ttttaaacaattttc

SEQ ID NO: 273408 - DNA, 15 bp, Homo sapiens
gttttaaacaatttt

SEQ ID NO: 273409 - DNA, 15 bp, Homo sapiens
ggttttaaacaattt

SEQ ID NO: 273410 - DNA, 15 bp, Homo sapiens
tggttttaaacaatt

SEQ ID NO: 273411 - DNA, 15 bp, Homo sapiens
atggttttaaacaat

SEQ ID NO: 273412 - DNA, 15 bp, Homo sapiens
aatggttttaaacaa

SEQ ID NO: 273413 - DNA, 15 bp, Homo sapiens
taatggttttaaaca

SEQ ID NO: 273414 - DNA, 15 bp, Homo sapiens
ttaatggttttaaac

SEQ ID NO: 273415 - DNA, 15 bp, Homo sapiens
tttaatggttttaaa

SEQ ID NO: 273416 - DNA, 15 bp, Homo sapiens
atttaatggttttaa

SEQ ID NO: 273417 - DNA, 15 bp, Homo sapiens
tatttaatggtttta

SEQ ID NO: 273418 - DNA, 15 bp, Homo sapiens
ttatttaatggtttt

SEQ ID NO: 273419 - DNA, 15 bp, Homo sapiens
tttatttaatggttt

SEQ ID NO: 273420 - DNA, 15 bp, Homo sapiens
ttttatttaatggtt

SEQ ID NO: 273421 - DNA, 15 bp, Homo sapiens
attttatttaatggt

SEQ ID NO: 273422 - DNA, 15 bp, Homo sapiens
gattttatttaatgg

SEQ ID NO: 273423 - DNA, 15 bp, Homo sapiens
agattttatttaatg

SEQ ID NO: 273424 - DNA, 15 bp, Homo sapiens
gagattttatttaat

SEQ ID NO: 273425 - DNA, 15 bp, Homo sapiens
agagattttatttaa

SEQ ID NO: 273426 - DNA, 15 bp, Homo sapiens
cagagattttattta

SEQ ID NO: 273427 - DNA, 15 bp, Homo sapiens
ccagagattttattt

SEQ ID NO: 273428 - DNA, 15 bp, Homo sapiens
gccagagattttatt

SEQ ID NO: 273429 - DNA, 15 bp, Homo sapiens
tgccagagattttat

SEQ ID NO: 273430 - DNA, 15 bp, Homo sapiens
ctgccagagatttta

SEQ ID NO: 273431 - DNA, 15 bp, Homo sapiens
actgccagagatttt

SEQ ID NO: 273432 - DNA, 15 bp, Homo sapiens
tactgccagagattt

SEQ ID NO: 273433 - DNA, 15 bp, Homo sapiens
ttactgccagagatt

SEQ ID NO: 273434 - DNA, 15 bp, Homo sapiens
tttactgccagagat

SEQ ID NO: 273435 - DNA, 15 bp, Homo sapiens
ttttactgccagaga

SEQ ID NO: 273436 - DNA, 15 bp, Homo sapiens
tttttactgccagag

SEQ ID NO: 273437 - DNA, 15 bp, Homo sapiens
ctttttactgccaga

SEQ ID NO: 273438 - DNA, 15 bp, Homo sapiens
cctttttactgccag

SEQ ID NO: 273439 - DNA, 15 bp, Homo sapiens
tcctttttactgcca

SEQ ID NO: 273440 - DNA, 15 bp, Homo sapiens
ctcctttttactgcc

SEQ ID NO: 273441 - DNA, 15 bp, Homo sapiens
tctcctttttactgc

SEQ ID NO: 273442 - DNA, 15 bp, Homo sapiens
ttctcctttttactg

SEQ ID NO: 273443 - DNA, 15 bp, Homo sapiens
tttctcctttttact

SEQ ID NO: 273444 - DNA, 15 bp, Homo sapiens
ttttctcctttttac

SEQ ID NO: 273445 - DNA, 15 bp, Homo sapiens
gttttctccttttta

SEQ ID NO: 273446 - DNA, 15 bp, Homo sapiens
tgttttctccttttt

SEQ ID NO: 273447 - DNA, 15 bp, Homo sapiens
ttgttttctcctttt

SEQ ID NO: 273448 - DNA, 15 bp, Homo sapiens
cttgttttctccttt

SEQ ID NO: 273449 - DNA, 15 bp, Homo sapiens
acttgttttctcctt

SEQ ID NO: 273450 - DNA, 15 bp, Homo sapiens
cacttgttttctcct

SEQ ID NO: 273451 - DNA, 15 bp, Homo sapiens
acacttgttttctcc

SEQ ID NO: 273452 - DNA, 15 bp, Homo sapiens
gacacttgttttctc

SEQ ID NO: 273453 - DNA, 15 bp, Homo sapiens
tgacacttgttttct

SEQ ID NO: 273454 - DNA, 15 bp, Homo sapiens
atgacacttgttttc

SEQ ID NO: 273455 - DNA, 15 bp, Homo sapiens
catgacacttgtttt

SEQ ID NO: 273456 - DNA, 15 bp, Homo sapiens
tcatgacacttgttt

SEQ ID NO: 273457 - DNA, 15 bp, Homo sapiens
atcatgacacttgtt

SEQ ID NO: 273458 - DNA, 15 bp, Homo sapiens
aatcatgacacttgt

SEQ ID NO: 273459 - DNA, 15 bp, Homo sapiens
aaatcatgacacttg

SEQ ID NO: 273460 - DNA, 15 bp, Homo sapiens
gaaatcatgacactt

SEQ ID NO: 273461 - DNA, 15 bp, Homo sapiens
ggaaatcatgacact

SEQ ID NO: 273462 - DNA, 15 bp, Homo sapiens
tggaaatcatgacac

SEQ ID NO: 273463 - DNA, 15 bp, Homo sapiens
ttggaaatcatgaca

SEQ ID NO: 273464 - DNA, 15 bp, Homo sapiens
tttggaaatcatgac

SEQ ID NO: 273465 - DNA, 15 bp, Homo sapiens
ctttggaaatcatga

SEQ ID NO: 273466 - DNA, 15 bp, Homo sapiens
tctttggaaatcatg

SEQ ID NO: 273467 - DNA, 15 bp, Homo sapiens
ttctttggaaatcat

SEQ ID NO: 273468 - DNA, 15 bp, Homo sapiens
attctttggaaatca

SEQ ID NO: 273469 - DNA, 15 bp, Homo sapiens
aattctttggaaatc

SEQ ID NO: 273470 - DNA, 15 bp, Homo sapiens
caattctttggaaat

SEQ ID NO: 273471 - DNA, 15 bp, Homo sapiens
tcaattctttggaaa

SEQ ID NO: 273472 - DNA, 15 bp, Homo sapiens
ttcaattctttggaa

SEQ ID NO: 273473 - DNA, 15 bp, Homo sapiens
gttcaattctttgga

SEQ ID NO: 273474 - DNA, 15 bp, Homo sapiens
tgttcaattctttgg

SEQ ID NO: 273475 - DNA, 15 bp, Homo sapiens
atgttcaattctttg

SEQ ID NO: 273476 - DNA, 15 bp, Homo sapiens
tatgttcaattcttt

SEQ ID NO: 273477 - DNA, 15 bp, Homo sapiens
ctatgttcaattctt

SEQ ID NO: 273478 - DNA, 15 bp, Homo sapiens
actatgttcaattct

SEQ ID NO: 273479 - DNA, 15 bp, Homo sapiens
gactatgttcaattc

SEQ ID NO: 273480 - DNA, 15 bp, Homo sapiens
agactatgttcaatt

SEQ ID NO: 273481 - DNA, 15 bp, Homo sapiens
gagactatgttcaat

SEQ ID NO: 273482 - DNA, 15 bp, Homo sapiens
tgagactatgttcaa

SEQ ID NO: 273483 - DNA, 15 bp, Homo sapiens
gtgagactatgttca

SEQ ID NO: 273484 - DNA, 15 bp, Homo sapiens
tgtgagactatgttc

SEQ ID NO: 273485 - DNA, 15 bp, Homo sapiens
atgtgagactatgtt

SEQ ID NO: 273486 - DNA, 15 bp, Homo sapiens
aatgtgagactatgt

SEQ ID NO: 273487 - DNA, 15 bp, Homo sapiens
aaatgtgagactatg

SEQ ID NO: 273488 - DNA, 15 bp, Homo sapiens
gaaatgtgagactat

SEQ ID NO: 273489 - DNA, 15 bp, Homo sapiens
agaaatgtgagacta

SEQ ID NO: 273490 - DNA, 15 bp, Homo sapiens
aagaaatgtgagact

SEQ ID NO: 273491 - DNA, 15 bp, Homo sapiens
taagaaatgtgagac

SEQ ID NO: 273492 - DNA, 15 bp, Homo sapiens
ataagaaatgtgaga

SEQ ID NO: 273493 - DNA, 15 bp, Homo sapiens
cataagaaatgtgag

SEQ ID NO: 273494 - DNA, 15 bp, Homo sapiens
acataagaaatgtga

SEQ ID NO: 273495 - DNA, 15 bp, Homo sapiens
tacataagaaatgtg

SEQ ID NO: 273496 - DNA, 15 bp, Homo sapiens
ttacataagaaatgt

SEQ ID NO: 273497 - DNA, 15 bp, Homo sapiens
tttacataagaaatg

SEQ ID NO: 273498 - DNA, 15 bp, Homo sapiens
ttttacataagaaat

SEQ ID NO: 273499 - DNA, 15 bp, Homo sapiens
tttttacataagaaa

SEQ ID NO: 273500 - DNA, 15 bp, Homo sapiens
ctttttacataagaa

SEQ ID NO: 273501 - DNA, 15 bp, Homo sapiens
tctttttacataaga

SEQ ID NO: 273502 - DNA, 15 bp, Homo sapiens
ctctttttacataag

SEQ ID NO: 273503 - DNA, 15 bp, Homo sapiens
tctctttttacataa

SEQ ID NO: 273504 - DNA, 15 bp, Homo sapiens
ctctctttttacata

SEQ ID NO: 273505 - DNA, 15 bp, Homo sapiens
cctctctttttacat

SEQ ID NO: 273506 - DNA, 15 bp, Homo sapiens
tcctctctttttaca

SEQ ID NO: 273507 - DNA, 15 bp, Homo sapiens
ttcctctctttttac

SEQ ID NO: 273508 - DNA, 15 bp, Homo sapiens
attcctctcttttta

SEQ ID NO: 273509 - DNA, 15 bp, Homo sapiens
tattcctctcttttt

SEQ ID NO: 273510 - DNA, 15 bp, Homo sapiens
gtattcctctctttt

SEQ ID NO: 273511 - DNA, 15 bp, Homo sapiens
agtattcctctcttt

SEQ ID NO: 273512 - DNA, 15 bp, Homo sapiens
cagtattcctctctt

SEQ ID NO: 273513 - DNA, 15 bp, Homo sapiens
tcagtattcctctct

SEQ ID NO: 273514 - DNA, 15 bp, Homo sapiens
ttcagtattcctctc

SEQ ID NO: 273515 - DNA, 15 bp, Homo sapiens
cttcagtattcctct

SEQ ID NO: 273516 - DNA, 15 bp, Homo sapiens
acttcagtattcctc

SEQ ID NO: 273517 - DNA, 15 bp, Homo sapiens
tacttcagtattcct

SEQ ID NO: 273518 - DNA, 15 bp, Homo sapiens
atacttcagtattcc

SEQ ID NO: 273519 - DNA, 15 bp, Homo sapiens
gatacttcagtattc

SEQ ID NO: 273520 - DNA, 15 bp, Homo sapiens
agatacttcagtatt

SEQ ID NO: 273521 - DNA, 15 bp, Homo sapiens
aagatacttcagtat

SEQ ID NO: 273522 - DNA, 15 bp, Homo sapiens
caagatacttcagta

SEQ ID NO: 273523 - DNA, 15 bp, Homo sapiens
tcaagatacttcagt

SEQ ID NO: 273524 - DNA, 15 bp, Homo sapiens
ttcaagatacttcag

SEQ ID NO: 273525 - DNA, 15 bp, Homo sapiens
attcaagatacttca

SEQ ID NO: 273526 - DNA, 15 bp, Homo sapiens
cattcaagatacttc

SEQ ID NO: 273527 - DNA, 15 bp, Homo sapiens
acattcaagatactt

SEQ ID NO: 273528 - DNA, 15 bp, Homo sapiens
tacattcaagatact

SEQ ID NO: 273529 - DNA, 15 bp, Homo sapiens
atacattcaagatac

SEQ ID NO: 273530 - DNA, 15 bp, Homo sapiens
catacattcaagata

SEQ ID NO: 273531 - DNA, 15 bp, Homo sapiens
tcatacattcaagat

SEQ ID NO: 273532 - DNA, 15 bp, Homo sapiens
gtcatacattcaaga

SEQ ID NO: 273533 - DNA, 15 bp, Homo sapiens
agtcatacattcaag

SEQ ID NO: 273534 - DNA, 15 bp, Homo sapiens
aagtcatacattcaa

SEQ ID NO: 273535 - DNA, 15 bp, Homo sapiens
caagtcatacattca

SEQ ID NO: 273536 - DNA, 15 bp, Homo sapiens
ccaagtcatacattc

SEQ ID NO: 273537 - DNA, 15 bp, Homo sapiens
cccaagtcatacatt

SEQ ID NO: 273538 - DNA, 15 bp, Homo sapiens
acccaagtcatacat

SEQ ID NO: 273539 - DNA, 15 bp, Homo sapiens
tacccaagtcataca

SEQ ID NO: 273540 - DNA, 15 bp, Homo sapiens
atacccaagtcatac

SEQ ID NO: 273541 - DNA, 15 bp, Homo sapiens
aatacccaagtcata

SEQ ID NO: 273542 - DNA, 15 bp, Homo sapiens
taatacccaagtcat

SEQ ID NO: 273543 - DNA, 15 bp, Homo sapiens
ataatacccaagtca

SEQ ID NO: 273544 - DNA, 15 bp, Homo sapiens
tataatacccaagtc

SEQ ID NO: 273545 - DNA, 15 bp, Homo sapiens
ttataatacccaagt

SEQ ID NO: 273546 - DNA, 15 bp, Homo sapiens
attataatacccaag

SEQ ID NO: 273547 - DNA, 15 bp, Homo sapiens
gattataatacccaa

SEQ ID NO: 273548 - DNA, 15 bp, Homo sapiens
ggattataataccca

SEQ ID NO: 273549 - DNA, 15 bp, Homo sapiens
gggattataataccc

SEQ ID NO: 273550 - DNA, 15 bp, Homo sapiens
ggggattataatacc

SEQ ID NO: 273551 - DNA, 15 bp, Homo sapiens
tggggattataatac

SEQ ID NO: 273552 - DNA, 15 bp, Homo sapiens
ctggggattataata

SEQ ID NO: 273553 - DNA, 15 bp, Homo sapiens
cctggggattataat

SEQ ID NO: 273554 - DNA, 15 bp, Homo sapiens
gcctggggattataa

SEQ ID NO: 273555 - DNA, 15 bp, Homo sapiens
tgcctggggattata

SEQ ID NO: 273556 - DNA, 15 bp, Homo sapiens
atgcctggggattat

SEQ ID NO: 273557 - DNA, 15 bp, Homo sapiens
gatgcctggggatta

SEQ ID NO: 273558 - DNA, 15 bp, Homo sapiens
agatgcctggggatt

SEQ ID NO: 273559 - DNA, 15 bp, Homo sapiens
tagatgcctggggat

SEQ ID NO: 273560 - DNA, 15 bp, Homo sapiens
ttagatgcctgggga

SEQ ID NO: 273561 - DNA, 15 bp, Homo sapiens
attagatgcctgggg

SEQ ID NO: 273562 - DNA, 15 bp, Homo sapiens
cattagatgcctggg

SEQ ID NO: 273563 - DNA, 15 bp, Homo sapiens
acattagatgcctgg

SEQ ID NO: 273564 - DNA, 15 bp, Homo sapiens
tacattagatgcctg

SEQ ID NO: 273565 - DNA, 15 bp, Homo sapiens
atacattagatgcct

SEQ ID NO: 273566 - DNA, 15 bp, Homo sapiens
tatacattagatgcc

SEQ ID NO: 273567 - DNA, 15 bp, Homo sapiens
atatacattagatgc

SEQ ID NO: 273568 - DNA, 15 bp, Homo sapiens
aatatacattagatg

SEQ ID NO: 273569 - DNA, 15 bp, Homo sapiens
aaatatacattagat

SEQ ID NO: 273570 - DNA, 15 bp, Homo sapiens
aaaatatacattaga

SEQ ID NO: 273571 - DNA, 15 bp, Homo sapiens
taaaatatacattag

SEQ ID NO: 273572 - DNA, 15 bp, Homo sapiens
ttaaaatatacatta

SEQ ID NO: 273573 - DNA, 15 bp, Homo sapiens
gttaaaatatacatt

SEQ ID NO: 273574 - DNA, 15 bp, Homo sapiens
agttaaaatatacat

SEQ ID NO: 273575 - DNA, 15 bp, Homo sapiens
cagttaaaatataca

SEQ ID NO: 273576 - DNA, 15 bp, Homo sapiens
tcagttaaaatatac

SEQ ID NO: 273577 - DNA, 15 bp, Homo sapiens
gtcagttaaaatata

SEQ ID NO: 273578 - DNA, 15 bp, Homo sapiens
agtcagttaaaatat

SEQ ID NO: 273579 - DNA, 15 bp, Homo sapiens
aagtcagttaaaata

SEQ ID NO: 273580 - DNA, 15 bp, Homo sapiens
caagtcagttaaaat

SEQ ID NO: 273581 - DNA, 15 bp, Homo sapiens
ccaagtcagttaaaa

SEQ ID NO: 273582 - DNA, 15 bp, Homo sapiens
cccaagtcagttaaa

SEQ ID NO: 273583 - DNA, 15 bp, Homo sapiens
acccaagtcagttaa

SEQ ID NO: 273584 - DNA, 15 bp, Homo sapiens
tacccaagtcagtta

SEQ ID NO: 273585 - DNA, 15 bp, Homo sapiens
gtacccaagtcagtt

SEQ ID NO: 273586 - DNA, 15 bp, Homo sapiens
ggtacccaagtcagt

SEQ ID NO: 273587 - DNA, 15 bp, Homo sapiens
aggtacccaagtcag

SEQ ID NO: 273588 - DNA, 15 bp, Homo sapiens
gaggtacccaagtca

SEQ ID NO: 273589 - DNA, 15 bp, Homo sapiens
tgaggtacccaagtc

SEQ ID NO: 273590 - DNA, 15 bp, Homo sapiens
atgaggtacccaagt

SEQ ID NO: 273591 - DNA, 15 bp, Homo sapiens
catgaggtacccaag

SEQ ID NO: 273592 - DNA, 15 bp, Homo sapiens
acatgaggtacccaa

SEQ ID NO: 273593 - DNA, 15 bp, Homo sapiens
tacatgaggtaccca

SEQ ID NO: 273594 - DNA, 15 bp, Homo sapiens
gtacatgaggtaccc

SEQ ID NO: 273595 - DNA, 15 bp, Homo sapiens
tgtacatgaggtacc

SEQ ID NO: 273596 - DNA, 15 bp, Homo sapiens
ttgtacatgaggtac

SEQ ID NO: 273597 - DNA, 15 bp, Homo sapiens
tttgtacatgaggta

SEQ ID NO: 273598 - DNA, 15 bp, Homo sapiens
ctttgtacatgaggt

SEQ ID NO: 273599 - DNA, 15 bp, Homo sapiens
gctttgtacatgagg

SEQ ID NO: 273600 - DNA, 15 bp, Homo sapiens
agctttgtacatgag

SEQ ID NO: 273601 - DNA, 15 bp, Homo sapiens
cagctttgtacatga

SEQ ID NO: 273602 - DNA, 15 bp, Homo sapiens
acagctttgtacatg

SEQ ID NO: 273603 - DNA, 15 bp, Homo sapiens
aacagctttgtacat

SEQ ID NO: 273604 - DNA, 15 bp, Homo sapiens
aaacagctttgtaca

SEQ ID NO: 273605 - DNA, 15 bp, Homo sapiens
aaaacagctttgtac

SEQ ID NO: 273606 - DNA, 15 bp, Homo sapiens
aaaaacagctttgta

SEQ ID NO: 273607 - DNA, 15 bp, Homo sapiens
caaaaacagctttgt

SEQ ID NO: 273608 - DNA, 15 bp, Homo sapiens
acaaaaacagctttg

SEQ ID NO: 273609 - DNA, 15 bp, Homo sapiens
cacaaaaacagcttt

SEQ ID NO: 273610 - DNA, 15 bp, Homo sapiens
gcacaaaaacagctt

SEQ ID NO: 273611 - DNA, 15 bp, Homo sapiens
tgcacaaaaacagct

SEQ ID NO: 273612 - DNA, 15 bp, Homo sapiens
atgcacaaaaacagc

SEQ ID NO: 273613 - DNA, 15 bp, Homo sapiens
tatgcacaaaaacag

SEQ ID NO: 273614 - DNA, 15 bp, Homo sapiens
atatgcacaaaaaca

SEQ ID NO: 273615 - DNA, 15 bp, Homo sapiens
tatatgcacaaaaac

SEQ ID NO: 273616 - DNA, 15 bp, Homo sapiens
gtatatgcacaaaaa

SEQ ID NO: 273617 - DNA, 15 bp, Homo sapiens
tgtatatgcacaaaa

SEQ ID NO: 273618 - DNA, 15 bp, Homo sapiens
ttgtatatgcacaaa

SEQ ID NO: 273619 - DNA, 15 bp, Homo sapiens
attgtatatgcacaa

SEQ ID NO: 273620 - DNA, 15 bp, Homo sapiens
aattgtatatgcaca

SEQ ID NO: 273621 - DNA, 15 bp, Homo sapiens
taattgtatatgcac

SEQ ID NO: 273622 - DNA, 15 bp, Homo sapiens
ttaattgtatatgca

SEQ ID NO: 273623 - DNA, 15 bp, Homo sapiens
tttaattgtatatgc

SEQ ID NO: 273624 - DNA, 15 bp, Homo sapiens
atttaattgtatatg

SEQ ID NO: 273625 - DNA, 15 bp, Homo sapiens
catttaattgtatat

SEQ ID NO: 273626 - DNA, 15 bp, Homo sapiens
ccatttaattgtata

SEQ ID NO: 273627 - DNA, 15 bp, Homo sapiens
cccatttaattgtat

SEQ ID NO: 273628 - DNA, 15 bp, Homo sapiens
tcccatttaattgta

SEQ ID NO: 273629 - DNA, 15 bp, Homo sapiens
atcccatttaattgt

SEQ ID NO: 273630 - DNA, 15 bp, Homo sapiens
gatcccatttaattg

SEQ ID NO: 273631 - DNA, 15 bp, Homo sapiens
tgatcccatttaatt

SEQ ID NO: 273632 - DNA, 15 bp, Homo sapiens
ctgatcccatttaat

SEQ ID NO: 273633 - DNA, 15 bp, Homo sapiens
tctgatcccatttaa

SEQ ID NO: 273634 - DNA, 15 bp, Homo sapiens
ctctgatcccattta

SEQ ID NO: 273635 - DNA, 15 bp, Homo sapiens
gctctgatcccattt

SEQ ID NO: 273636 - DNA, 15 bp, Homo sapiens
agctctgatcccatt

SEQ ID NO: 273637 - DNA, 15 bp, Homo sapiens
gagctctgatcccat

SEQ ID NO: 273638 - DNA, 15 bp, Homo sapiens
ggagctctgatccca

SEQ ID NO: 273639 - DNA, 15 bp, Homo sapiens
aggagctctgatccc

SEQ ID NO: 273640 - DNA, 15 bp, Homo sapiens
aaggagctctgatcc

SEQ ID NO: 273641 - DNA, 15 bp, Homo sapiens
gaaggagctctgatc

SEQ ID NO: 273642 - DNA, 15 bp, Homo sapiens
tgaaggagctctgat

SEQ ID NO: 273643 - DNA, 15 bp, Homo sapiens
gtgaaggagctctga

SEQ ID NO: 273644 - DNA, 15 bp, Homo sapiens
agtgaaggagctctg

SEQ ID NO: 273645 - DNA, 15 bp, Homo sapiens
aagtgaaggagctct

SEQ ID NO: 273646 - DNA, 15 bp, Homo sapiens
aaagtgaaggagctc

SEQ ID NO: 273647 - DNA, 15 bp, Homo sapiens
aaaagtgaaggagct

SEQ ID NO: 273648 - DNA, 15 bp, Homo sapiens
gaaaagtgaaggagc

SEQ ID NO: 273649 - DNA, 15 bp, Homo sapiens
agaaaagtgaaggag

SEQ ID NO: 273650 - DNA, 15 bp, Homo sapiens
gagaaaagtgaagga

SEQ ID NO: 273651 - DNA, 15 bp, Homo sapiens
agagaaaagtgaagg

SEQ ID NO: 273652 - DNA, 15 bp, Homo sapiens
aagagaaaagtgaag

SEQ ID NO: 273653 - DNA, 15 bp, Homo sapiens
gaagagaaaagtgaa

SEQ ID NO: 273654 - DNA, 15 bp, Homo sapiens
ggaagagaaaagtga

SEQ ID NO: 273655 - DNA, 15 bp, Homo sapiens
aggaagagaaaagtg

SEQ ID NO: 273656 - DNA, 15 bp, Homo sapiens
taggaagagaaaagt

SEQ ID NO: 273657 - DNA, 15 bp, Homo sapiens
ttaggaagagaaaag

SEQ ID NO: 273658 - DNA, 15 bp, Homo sapiens
tttaggaagagaaaa

SEQ ID NO: 273659 - DNA, 15 bp, Homo sapiens
ttttaggaagagaaa

SEQ ID NO: 273660 - DNA, 15 bp, Homo sapiens
attttaggaagagaa

SEQ ID NO: 273661 - DNA, 15 bp, Homo sapiens
tattttaggaagaga

SEQ ID NO: 273662 - DNA, 15 bp, Homo sapiens
gtattttaggaagag

SEQ ID NO: 273663 - DNA, 15 bp, Homo sapiens
agtattttaggaaga

SEQ ID NO: 273664 - DNA, 15 bp, Homo sapiens
tagtattttaggaag

SEQ ID NO: 273665 - DNA, 15 bp, Homo sapiens
ctagtattttaggaa

SEQ ID NO: 273666 - DNA, 15 bp, Homo sapiens
tctagtattttagga

SEQ ID NO: 273667 - DNA, 15 bp, Homo sapiens
atctagtattttagg

SEQ ID NO: 273668 - DNA, 15 bp, Homo sapiens
aatctagtattttag

SEQ ID NO: 273669 - DNA, 15 bp, Homo sapiens
aaatctagtatttta

SEQ ID NO: 273670 - DNA, 15 bp, Homo sapiens
aaaatctagtatttt

SEQ ID NO: 273671 - DNA, 15 bp, Homo sapiens
aaaaatctagtattt

SEQ ID NO: 273672 - DNA, 15 bp, Homo sapiens
taaaaatctagtatt

SEQ ID NO: 273673 - DNA, 15 bp, Homo sapiens
ctaaaaatctagtat

SEQ ID NO: 273674 - DNA, 15 bp, Homo sapiens
actaaaaatctagta

SEQ ID NO: 273675 - DNA, 15 bp, Homo sapiens
cactaaaaatctagt

SEQ ID NO: 273676 - DNA, 15 bp, Homo sapiens
acactaaaaatctag

SEQ ID NO: 273677 - DNA, 15 bp, Homo sapiens
aacactaaaaatcta

SEQ ID NO: 273678 - DNA, 15 bp, Homo sapiens
gaacactaaaaatct

SEQ ID NO: 273679 - DNA, 15 bp, Homo sapiens
tgaacactaaaaatc

SEQ ID NO: 273680 - DNA, 15 bp, Homo sapiens
ctgaacactaaaaat

SEQ ID NO: 273681 - DNA, 15 bp, Homo sapiens
tctgaacactaaaaa

SEQ ID NO: 273682 - DNA, 15 bp, Homo sapiens
ttctgaacactaaaa

SEQ ID NO: 273683 - DNA, 15 bp, Homo sapiens
tttctgaacactaaa

SEQ ID NO: 273684 - DNA, 15 bp, Homo sapiens
atttctgaacactaa

SEQ ID NO: 273685 - DNA, 15 bp, Homo sapiens
aatttctgaacacta

SEQ ID NO: 273686 - DNA, 15 bp, Homo sapiens
aaatttctgaacact

SEQ ID NO: 273687 - DNA, 15 bp, Homo sapiens
aaaatttctgaacac

SEQ ID NO: 273688 - DNA, 15 bp, Homo sapiens
caaaatttctgaaca

SEQ ID NO: 273689 - DNA, 15 bp, Homo sapiens
ccaaaatttctgaac

SEQ ID NO: 273690 - DNA, 15 bp, Homo sapiens
tccaaaatttctgaa

SEQ ID NO: 273691 - DNA, 15 bp, Homo sapiens
ttccaaaatttctga

SEQ ID NO: 273692 - DNA, 15 bp, Homo sapiens
cttccaaaatttctg

SEQ ID NO: 273693 - DNA, 15 bp, Homo sapiens
ccttccaaaatttct

SEQ ID NO: 273694 - DNA, 15 bp, Homo sapiens
cccttccaaaatttc

SEQ ID NO: 273695 - DNA, 15 bp, Homo sapiens
tcccttccaaaattt

SEQ ID NO: 273696 - DNA, 15 bp, Homo sapiens
atcccttccaaaatt

SEQ ID NO: 273697 - DNA, 15 bp, Homo sapiens
tatcccttccaaaat

SEQ ID NO: 273698 - DNA, 15 bp, Homo sapiens
ctatcccttccaaaa

SEQ ID NO: 273699 - DNA, 15 bp, Homo sapiens
gctatcccttccaaa

SEQ ID NO: 273700 - DNA, 15 bp, Homo sapiens
agctatcccttccaa

SEQ ID NO: 273701 - DNA, 15 bp, Homo sapiens
cagctatcccttcca

SEQ ID NO: 273702 - DNA, 15 bp, Homo sapiens
tcagctatcccttcc

SEQ ID NO: 273703 - DNA, 15 bp, Homo sapiens
atcagctatcccttc

SEQ ID NO: 273704 - DNA, 15 bp, Homo sapiens
aatcagctatccctt

SEQ ID NO: 273705 - DNA, 15 bp, Homo sapiens
taatcagctatccct

SEQ ID NO: 273706 - DNA, 15 bp, Homo sapiens
ataatcagctatccc

SEQ ID NO: 273707 - DNA, 15 bp, Homo sapiens
tataatcagctatcc

SEQ ID NO: 273708 - DNA, 15 bp, Homo sapiens
ttataatcagctatc

SEQ ID NO: 273709 - DNA, 15 bp, Homo sapiens
tttataatcagctat

SEQ ID NO: 273710 - DNA, 15 bp, Homo sapiens
ctttataatcagcta

SEQ ID NO: 273711 - DNA, 15 bp, Homo sapiens
tctttataatcagct

SEQ ID NO: 273712 - DNA, 15 bp, Homo sapiens
ctctttataatcagc

SEQ ID NO: 273713 - DNA, 15 bp, Homo sapiens
gctctttataatcag

SEQ ID NO: 273714 - DNA, 15 bp, Homo sapiens
tgctctttataatca

SEQ ID NO: 273715 - DNA, 15 bp, Homo sapiens
atgctctttataatc

SEQ ID NO: 273716 - DNA, 15 bp, Homo sapiens
aatgctctttataat

SEQ ID NO: 273717 - DNA, 15 bp, Homo sapiens
taatgctctttataa

SEQ ID NO: 273718 - DNA, 15 bp, Homo sapiens
ctaatgctctttata

SEQ ID NO: 273719 - DNA, 15 bp, Homo sapiens
actaatgctctttat

SEQ ID NO: 273720 - DNA, 15 bp, Homo sapiens
cactaatgctcttta

SEQ ID NO: 273721 - DNA, 15 bp, Homo sapiens
tcactaatgctcttt

SEQ ID NO: 273722 - DNA, 15 bp, Homo sapiens
ttcactaatgctctt

SEQ ID NO: 273723 - DNA, 15 bp, Homo sapiens
attcactaatgctct

SEQ ID NO: 273724 - DNA, 15 bp, Homo sapiens
tattcactaatgctc

SEQ ID NO: 273725 - DNA, 15 bp, Homo sapiens
atattcactaatgct

SEQ ID NO: 273726 - DNA, 15 bp, Homo sapiens
tatattcactaatgc

SEQ ID NO: 273727 - DNA, 15 bp, Homo sapiens
gtatattcactaatg

SEQ ID NO: 273728 - DNA, 15 bp, Homo sapiens
tgtatattcactaat

SEQ ID NO: 273729 - DNA, 15 bp, Homo sapiens
atgtatattcactaa

SEQ ID NO: 273730 - DNA, 15 bp, Homo sapiens
tatgtatattcacta

SEQ ID NO: 273731 - DNA, 15 bp, Homo sapiens
gtatgtatattcact

SEQ ID NO: 273732 - DNA, 15 bp, Homo sapiens
agtatgtatattcac

SEQ ID NO: 273733 - DNA, 15 bp, Homo sapiens
cagtatgtatattca

SEQ ID NO: 273734 - DNA, 15 bp, Homo sapiens
acagtatgtatattc

SEQ ID NO: 273735 - DNA, 15 bp, Homo sapiens
tacagtatgtatatt

SEQ ID NO: 273736 - DNA, 15 bp, Homo sapiens
ctacagtatgtatat

SEQ ID NO: 273737 - DNA, 15 bp, Homo sapiens
actacagtatgtata

SEQ ID NO: 273738 - DNA, 15 bp, Homo sapiens
aactacagtatgtat

SEQ ID NO: 273739 - DNA, 15 bp, Homo sapiens
aaactacagtatgta

SEQ ID NO: 273740 - DNA, 15 bp, Homo sapiens
aaaactacagtatgt

SEQ ID NO: 273741 - DNA, 15 bp, Homo sapiens
gaaaactacagtatg

SEQ ID NO: 273742 - DNA, 15 bp, Homo sapiens
tgaaaactacagtat

SEQ ID NO: 273743 - DNA, 15 bp, Homo sapiens
ttgaaaactacagta

SEQ ID NO: 273744 - DNA, 15 bp, Homo sapiens
attgaaaactacagt

SEQ ID NO: 273745 - DNA, 15 bp, Homo sapiens
aattgaaaactacag

SEQ ID NO: 273746 - DNA, 15 bp, Homo sapiens
aaattgaaaactaca

SEQ ID NO: 273747 - DNA, 15 bp, Homo sapiens
taaattgaaaactac

SEQ ID NO: 273748 - DNA, 15 bp, Homo sapiens
ataaattgaaaacta

SEQ ID NO: 273749 - DNA, 15 bp, Homo sapiens
tataaattgaaaact

SEQ ID NO: 273750 - DNA, 15 bp, Homo sapiens
ttataaattgaaaac

SEQ ID NO: 273751 - DNA, 15 bp, Homo sapiens
cttataaattgaaaa

SEQ ID NO: 273752 - DNA, 15 bp, Homo sapiens
acttataaattgaaa

SEQ ID NO: 273753 - DNA, 15 bp, Homo sapiens
cacttataaattgaa

SEQ ID NO: 273754 - DNA, 15 bp, Homo sapiens
gcacttataaattga

SEQ ID NO: 273755 - DNA, 15 bp, Homo sapiens
tgcacttataaattg

SEQ ID NO: 273756 - DNA, 15 bp, Homo sapiens
atgcacttataaatt

SEQ ID NO: 273757 - DNA, 15 bp, Homo sapiens
aatgcacttataaat

SEQ ID NO: 273758 - DNA, 15 bp, Homo sapiens
caatgcacttataaa

SEQ ID NO: 273759 - DNA, 15 bp, Homo sapiens
acaatgcacttataa

SEQ ID NO: 273760 - DNA, 15 bp, Homo sapiens
cacaatgcacttata

SEQ ID NO: 273761 - DNA, 15 bp, Homo sapiens
acacaatgcacttat

SEQ ID NO: 273762 - DNA, 15 bp, Homo sapiens
aacacaatgcactta

SEQ ID NO: 273763 - DNA, 15 bp, Homo sapiens
gaacacaatgcactt

SEQ ID NO: 273764 - DNA, 15 bp, Homo sapiens
ggaacacaatgcact

SEQ ID NO: 273765 - DNA, 15 bp, Homo sapiens
tggaacacaatgcac

SEQ ID NO: 273766 - DNA, 15 bp, Homo sapiens
ttggaacacaatgca

SEQ ID NO: 273767 - DNA, 15 bp, Homo sapiens
tttggaacacaatgc

SEQ ID NO: 273768 - DNA, 15 bp, Homo sapiens
atttggaacacaatg

SEQ ID NO: 273769 - DNA, 15 bp, Homo sapiens
gatttggaacacaat

SEQ ID NO: 273770 - DNA, 15 bp, Homo sapiens
agatttggaacacaa

SEQ ID NO: 273771 - DNA, 15 bp, Homo sapiens
cagatttggaacaca

SEQ ID NO: 273772 - DNA, 15 bp, Homo sapiens
acagatttggaacac

SEQ ID NO: 273773 - DNA, 15 bp, Homo sapiens
aacagatttggaaca

SEQ ID NO: 273774 - DNA, 15 bp, Homo sapiens
aaacagatttggaac

SEQ ID NO: 273775 - DNA, 15 bp, Homo sapiens
caaacagatttggaa

SEQ ID NO: 273776 - DNA, 15 bp, Homo sapiens
gcaaacagatttgga

SEQ ID NO: 273777 - DNA, 15 bp, Homo sapiens
tgcaaacagatttgg

SEQ ID NO: 273778 - DNA, 15 bp, Homo sapiens
ttgcaaacagatttg

SEQ ID NO: 273779 - DNA, 15 bp, Homo sapiens
cttgcaaacagattt

SEQ ID NO: 273780 - DNA, 15 bp, Homo sapiens
acttgcaaacagatt

SEQ ID NO: 273781 - DNA, 15 bp, Homo sapiens
aacttgcaaacagat

SEQ ID NO: 273782 - DNA, 15 bp, Homo sapiens
aaacttgcaaacaga

SEQ ID NO: 273783 - DNA, 15 bp, Homo sapiens
caaacttgcaaacag

SEQ ID NO: 273784 - DNA, 15 bp, Homo sapiens
tcaaacttgcaaaca

SEQ ID NO: 273785 - DNA, 15 bp, Homo sapiens
atcaaacttgcaaac

SEQ ID NO: 273786 - DNA, 15 bp, Homo sapiens
tatcaaacttgcaaa

SEQ ID NO: 273787 - DNA, 15 bp, Homo sapiens
atatcaaacttgcaa

SEQ ID NO: 273788 - DNA, 15 bp, Homo sapiens
tatatcaaacttgca

SEQ ID NO: 273789 - DNA, 15 bp, Homo sapiens
ctatatcaaacttgc

SEQ ID NO: 273790 - DNA, 15 bp, Homo sapiens
actatatcaaacttg

SEQ ID NO: 273791 - DNA, 15 bp, Homo sapiens
tactatatcaaactt

SEQ ID NO: 273792 - DNA, 15 bp, Homo sapiens
ctactatatcaaact

SEQ ID NO: 273793 - DNA, 15 bp, Homo sapiens
actactatatcaaac

SEQ ID NO: 273794 - DNA, 15 bp, Homo sapiens
aactactatatcaaa

SEQ ID NO: 273795 - DNA, 15 bp, Homo sapiens
taactactatatcaa

SEQ ID NO: 273796 - DNA, 15 bp, Homo sapiens
ctaactactatatca

SEQ ID NO: 273797 - DNA, 15 bp, Homo sapiens
cctaactactatatc

SEQ ID NO: 273798 - DNA, 15 bp, Homo sapiens
acctaactactatat

SEQ ID NO: 273799 - DNA, 15 bp, Homo sapiens
aacctaactactata

SEQ ID NO: 273800 - DNA, 15 bp, Homo sapiens
aaacctaactactat

SEQ ID NO: 273801 - DNA, 15 bp, Homo sapiens
gaaacctaactacta

SEQ ID NO: 273802 - DNA, 15 bp, Homo sapiens
ggaaacctaactact

SEQ ID NO: 273803 - DNA, 15 bp, Homo sapiens
tggaaacctaactac

SEQ ID NO: 273804 - DNA, 15 bp, Homo sapiens
ctggaaacctaacta

SEQ ID NO: 273805 - DNA, 15 bp, Homo sapiens
gctggaaacctaact

SEQ ID NO: 273806 - DNA, 15 bp, Homo sapiens
ggctggaaacctaac

SEQ ID NO: 273807 - DNA, 15 bp, Homo sapiens
aggctggaaacctaa

SEQ ID NO: 273808 - DNA, 15 bp, Homo sapiens
caggctggaaaccta

SEQ ID NO: 273809 - DNA, 15 bp, Homo sapiens
ccaggctggaaacct

SEQ ID NO: 273810 - DNA, 15 bp, Homo sapiens
accaggctggaaacc

SEQ ID NO: 273811 - DNA, 15 bp, Homo sapiens
aaccaggctggaaac

SEQ ID NO: 273812 - DNA, 15 bp, Homo sapiens
gaaccaggctggaaa

SEQ ID NO: 273813 - DNA, 15 bp, Homo sapiens
tgaaccaggctggaa

SEQ ID NO: 273814 - DNA, 15 bp, Homo sapiens
gtgaaccaggctgga

SEQ ID NO: 273815 - DNA, 15 bp, Homo sapiens
tgtgaaccaggctgg

SEQ ID NO: 273816 - DNA, 15 bp, Homo sapiens
atgtgaaccaggctg

SEQ ID NO: 273817 - DNA, 15 bp, Homo sapiens
tatgtgaaccaggct

SEQ ID NO: 273818 - DNA, 15 bp, Homo sapiens
ttatgtgaaccaggc

SEQ ID NO: 273819 - DNA, 15 bp, Homo sapiens
gttatgtgaaccagg

SEQ ID NO: 273820 - DNA, 15 bp, Homo sapiens
agttatgtgaaccag

SEQ ID NO: 273821 - DNA, 15 bp, Homo sapiens
aagttatgtgaacca

SEQ ID NO: 273822 - DNA, 15 bp, Homo sapiens
taagttatgtgaacc

SEQ ID NO: 273823 - DNA, 15 bp, Homo sapiens
ataagttatgtgaac

SEQ ID NO: 273824 - DNA, 15 bp, Homo sapiens
aataagttatgtgaa

SEQ ID NO: 273825 - DNA, 15 bp, Homo sapiens
aaataagttatgtga

SEQ ID NO: 273826 - DNA, 15 bp, Homo sapiens
aaaataagttatgtg

SEQ ID NO: 273827 - DNA, 15 bp, Homo sapiens
aaaaataagttatgt

SEQ ID NO: 273828 - DNA, 15 bp, Homo sapiens
aaaaaataagttatg

SEQ ID NO: 273829 - DNA, 15 bp, Homo sapiens
aaaaaaataagttat

SEQ ID NO: 273830 - DNA, 15 bp, Homo sapiens
aaaaaaaataagtta

SEQ ID NO: 273831 - DNA, 15 bp, Homo sapiens
aaaaaaaaataagtt

SEQ ID NO: 273832 - DNA, 15 bp, Homo sapiens
caaaaaaaaataagt

SEQ ID NO: 273833 - DNA, 15 bp, Homo sapiens
acaaaaaaaaataag

SEQ ID NO: 273834 - DNA, 15 bp, Homo sapiens
tacaaaaaaaaataa

SEQ ID NO: 273835 - DNA, 15 bp, Homo sapiens
gtacaaaaaaaaata

SEQ ID NO: 273836 - DNA, 15 bp, Homo sapiens
agtacaaaaaaaaat

SEQ ID NO: 273837 - DNA, 15 bp, Homo sapiens
tagtacaaaaaaaaa

SEQ ID NO: 273838 - DNA, 15 bp, Homo sapiens
ttagtacaaaaaaaa

SEQ ID NO: 273839 - DNA, 15 bp, Homo sapiens
tttagtacaaaaaaa

SEQ ID NO: 273840 - DNA, 15 bp, Homo sapiens
gtttagtacaaaaaa

SEQ ID NO: 273841 - DNA, 15 bp, Homo sapiens
agtttagtacaaaaa

SEQ ID NO: 273842 - DNA, 15 bp, Homo sapiens
tagtttagtacaaaa

SEQ ID NO: 273843 - DNA, 15 bp, Homo sapiens
atagtttagtacaaa

SEQ ID NO: 273844 - DNA, 15 bp, Homo sapiens
tatagtttagtacaa

SEQ ID NO: 273845 - DNA, 15 bp, Homo sapiens
ttatagtttagtaca

SEQ ID NO: 273846 - DNA, 15 bp, Homo sapiens
gttatagtttagtac

SEQ ID NO: 273847 - DNA, 15 bp, Homo sapiens
tgttatagtttagta

SEQ ID NO: 273848 - DNA, 15 bp, Homo sapiens
ttgttatagtttagt

SEQ ID NO: 273849 - DNA, 15 bp, Homo sapiens
attgttatagtttag

SEQ ID NO: 273850 - DNA, 15 bp, Homo sapiens
tattgttatagttta

SEQ ID NO: 273851 - DNA, 15 bp, Homo sapiens
ttattgttatagttt

SEQ ID NO: 273852 - DNA, 15 bp, Homo sapiens
attattgttatagtt

SEQ ID NO: 273853 - DNA, 15 bp, Homo sapiens
tattattgttatagt

SEQ ID NO: 273854 - DNA, 15 bp, Homo sapiens
ctattattgttatag

SEQ ID NO: 273855 - DNA, 15 bp, Homo sapiens
actattattgttata

SEQ ID NO: 273856 - DNA, 15 bp, Homo sapiens
aactattattgttat

SEQ ID NO: 273857 - DNA, 15 bp, Homo sapiens
aaactattattgtta

SEQ ID NO: 273858 - DNA, 15 bp, Homo sapiens
aaaactattattgtt

SEQ ID NO: 273859 - DNA, 15 bp, Homo sapiens
taaaactattattgt

SEQ ID NO: 273860 - DNA, 15 bp, Homo sapiens
ttaaaactattattg

SEQ ID NO: 273861 - DNA, 15 bp, Homo sapiens
gttaaaactattatt

SEQ ID NO: 273862 - DNA, 15 bp, Homo sapiens
tgttaaaactattat

SEQ ID NO: 273863 - DNA, 15 bp, Homo sapiens
ctgttaaaactatta

SEQ ID NO: 273864 - DNA, 15 bp, Homo sapiens
actgttaaaactatt

SEQ ID NO: 273865 - DNA, 15 bp, Homo sapiens
tactgttaaaactat

SEQ ID NO: 273866 - DNA, 15 bp, Homo sapiens
ctactgttaaaacta

SEQ ID NO: 273867 - DNA, 15 bp, Homo sapiens
tctactgttaaaact

SEQ ID NO: 273868 - DNA, 15 bp, Homo sapiens
ctctactgttaaaac

SEQ ID NO: 273869 - DNA, 15 bp, Homo sapiens
cctctactgttaaaa

SEQ ID NO: 273870 - DNA, 15 bp, Homo sapiens
gcctctactgttaaa

SEQ ID NO: 273871 - DNA, 15 bp, Homo sapiens
agcctctactgttaa

SEQ ID NO: 273872 - DNA, 15 bp, Homo sapiens
gagcctctactgtta

SEQ ID NO: 273873 - DNA, 15 bp, Homo sapiens
agagcctctactgtt

SEQ ID NO: 273874 - DNA, 15 bp, Homo sapiens
aagagcctctactgt

SEQ ID NO: 273875 - DNA, 15 bp, Homo sapiens
aaagagcctctactg

SEQ ID NO: 273876 - DNA, 15 bp, Homo sapiens
aaaagagcctctact

SEQ ID NO: 273877 - DNA, 15 bp, Homo sapiens
caaaagagcctctac

SEQ ID NO: 273878 - DNA, 15 bp, Homo sapiens
tcaaaagagcctcta

SEQ ID NO: 273879 - DNA, 15 bp, Homo sapiens
ctcaaaagagcctct

SEQ ID NO: 273880 - DNA, 15 bp, Homo sapiens
gctcaaaagagcctc

SEQ ID NO: 273881 - DNA, 15 bp, Homo sapiens
agctcaaaagagcct

SEQ ID NO: 273882 - DNA, 15 bp, Homo sapiens
aagctcaaaagagcc

SEQ ID NO: 273883 - DNA, 15 bp, Homo sapiens
gaagctcaaaagagc

SEQ ID NO: 273884 - DNA, 15 bp, Homo sapiens
tgaagctcaaaagag

SEQ ID NO: 273885 - DNA, 15 bp, Homo sapiens
ctgaagctcaaaaga

SEQ ID NO: 273886 - DNA, 15 bp, Homo sapiens
tctgaagctcaaaag

SEQ ID NO: 273887 - DNA, 15 bp, Homo sapiens
ttctgaagctcaaaa

SEQ ID NO: 273888 - DNA, 15 bp, Homo sapiens
attctgaagctcaaa

SEQ ID NO: 273889 - DNA, 15 bp, Homo sapiens
aattctgaagctcaa

SEQ ID NO: 273890 - DNA, 15 bp, Homo sapiens
caattctgaagctca

SEQ ID NO: 273891 - DNA, 15 bp, Homo sapiens
tcaattctgaagctc

SEQ ID NO: 273892 - DNA, 15 bp, Homo sapiens
ttcaattctgaagct

SEQ ID NO: 273893 - DNA, 15 bp, Homo sapiens
attcaattctgaagc

SEQ ID NO: 273894 - DNA, 15 bp, Homo sapiens
tattcaattctgaag

SEQ ID NO: 273895 - DNA, 15 bp, Homo sapiens
gtattcaattctgaa

SEQ ID NO: 273896 - DNA, 15 bp, Homo sapiens
tgtattcaattctga

SEQ ID NO: 273897 - DNA, 15 bp, Homo sapiens
atgtattcaattctg

SEQ ID NO: 273898 - DNA, 15 bp, Homo sapiens
tatgtattcaattct

SEQ ID NO: 273899 - DNA, 15 bp, Homo sapiens
atatgtattcaattc

SEQ ID NO: 273900 - DNA, 15 bp, Homo sapiens
tatatgtattcaatt

SEQ ID NO: 273901 - DNA, 15 bp, Homo sapiens
atatatgtattcaat

SEQ ID NO: 273902 - DNA, 15 bp, Homo sapiens
tatatatgtattcaa

SEQ ID NO: 273903 - DNA, 15 bp, Homo sapiens
ttatatatgtattca

SEQ ID NO: 273904 - DNA, 15 bp, Homo sapiens
cttatatatgtattc

SEQ ID NO: 273905 - DNA, 15 bp, Homo sapiens
gcttatatatgtatt

SEQ ID NO: 273906 - DNA, 15 bp, Homo sapiens
tgcttatatatgtat

SEQ ID NO: 273907 - DNA, 15 bp, Homo sapiens
ttgcttatatatgta

SEQ ID NO: 273908 - DNA, 15 bp, Homo sapiens
tttgcttatatatgt

SEQ ID NO: 273909 - DNA, 15 bp, Homo sapiens
atttgcttatatatg

SEQ ID NO: 273910 - DNA, 15 bp, Homo sapiens
catttgcttatatat

SEQ ID NO: 273911 - DNA, 15 bp, Homo sapiens
acatttgcttatata

SEQ ID NO: 273912 - DNA, 15 bp, Homo sapiens
aacatttgcttatat

SEQ ID NO: 273913 - DNA, 15 bp, Homo sapiens
taacatttgcttata

SEQ ID NO: 273914 - DNA, 15 bp, Homo sapiens
gtaacatttgcttat

SEQ ID NO: 273915 - DNA, 15 bp, Homo sapiens
agtaacatttgctta

SEQ ID NO: 273916 - DNA, 15 bp, Homo sapiens
cagtaacatttgctt

SEQ ID NO: 273917 - DNA, 15 bp, Homo sapiens
gcagtaacatttgct

SEQ ID NO: 273918 - DNA, 15 bp, Homo sapiens
agcagtaacatttgc

SEQ ID NO: 273919 - DNA, 15 bp, Homo sapiens
aagcagtaacatttg

SEQ ID NO: 273920 - DNA, 15 bp, Homo sapiens
aaagcagtaacattt

SEQ ID NO: 273921 - DNA, 15 bp, Homo sapiens
taaagcagtaacatt

SEQ ID NO: 273922 - DNA, 15 bp, Homo sapiens
ataaagcagtaacat

SEQ ID NO: 273923 - DNA, 15 bp, Homo sapiens
aataaagcagtaaca

SEQ ID NO: 273924 - DNA, 15 bp, Homo sapiens
taataaagcagtaac

SEQ ID NO: 273925 - DNA, 15 bp, Homo sapiens
gtaataaagcagtaa

SEQ ID NO: 273926 - DNA, 15 bp, Homo sapiens
ggtaataaagcagta

SEQ ID NO: 273927 - DNA, 15 bp, Homo sapiens
gggtaataaagcagt

SEQ ID NO: 273928 - DNA, 15 bp, Homo sapiens
agggtaataaagcag

SEQ ID NO: 273929 - DNA, 15 bp, Homo sapiens
aagggtaataaagca

SEQ ID NO: 273930 - DNA, 15 bp, Homo sapiens
aaagggtaataaagc

SEQ ID NO: 273931 - DNA, 15 bp, Homo sapiens
aaaagggtaataaag

SEQ ID NO: 273932 - DNA, 15 bp, Homo sapiens
aaaaagggtaataaa

SEQ ID NO: 273933 - DNA, 15 bp, Homo sapiens
gaaaaagggtaataa

SEQ ID NO: 273934 - DNA, 15 bp, Homo sapiens
tgaaaaagggtaata

SEQ ID NO: 273935 - DNA, 15 bp, Homo sapiens
atgaaaaagggtaat

SEQ ID NO: 273936 - DNA, 15 bp, Homo sapiens
gatgaaaaagggtaa

SEQ ID NO: 273937 - DNA, 15 bp, Homo sapiens
ggatgaaaaagggta

SEQ ID NO: 273938 - DNA, 15 bp, Homo sapiens
aggatgaaaaagggt

SEQ ID NO: 273939 - DNA, 15 bp, Homo sapiens
caggatgaaaaaggg

SEQ ID NO: 273940 - DNA, 15 bp, Homo sapiens
ccaggatgaaaaagg

SEQ ID NO: 273941 - DNA, 15 bp, Homo sapiens
gccaggatgaaaaag

SEQ ID NO: 273942 - DNA, 15 bp, Homo sapiens
agccaggatgaaaaa

SEQ ID NO: 273943 - DNA, 15 bp, Homo sapiens
aagccaggatgaaaa

SEQ ID NO: 273944 - DNA, 15 bp, Homo sapiens
aaagccaggatgaaa

SEQ ID NO: 273945 - DNA, 15 bp, Homo sapiens
caaagccaggatgaa

SEQ ID NO: 273946 - DNA, 15 bp, Homo sapiens
acaaagccaggatga

SEQ ID NO: 273947 - DNA, 15 bp, Homo sapiens
gacaaagccaggatg

SEQ ID NO: 273948 - DNA, 15 bp, Homo sapiens
agacaaagccaggat

SEQ ID NO: 273949 - DNA, 15 bp, Homo sapiens
gagacaaagccagga

SEQ ID NO: 273950 - DNA, 15 bp, Homo sapiens
agagacaaagccagg

SEQ ID NO: 273951 - DNA, 15 bp, Homo sapiens
tagagacaaagccag

SEQ ID NO: 273952 - DNA, 15 bp, Homo sapiens
gtagagacaaagcca

SEQ ID NO: 273953 - DNA, 15 bp, Homo sapiens
ggtagagacaaagcc

SEQ ID NO: 273954 - DNA, 15 bp, Homo sapiens
aggtagagacaaagc

SEQ ID NO: 273955 - DNA, 15 bp, Homo sapiens
aaggtagagacaaag

SEQ ID NO: 273956 - DNA, 15 bp, Homo sapiens
gaaggtagagacaaa

SEQ ID NO: 273957 - DNA, 15 bp, Homo sapiens
ggaaggtagagacaa

SEQ ID NO: 273958 - DNA, 15 bp, Homo sapiens
gggaaggtagagaca

SEQ ID NO: 273959 - DNA, 15 bp, Homo sapiens
agggaaggtagagac

SEQ ID NO: 273960 - DNA, 15 bp, Homo sapiens
cagggaaggtagaga

SEQ ID NO: 273961 - DNA, 15 bp, Homo sapiens
ccagggaaggtagag

SEQ ID NO: 273962 - DNA, 15 bp, Homo sapiens
cccagggaaggtaga

SEQ ID NO: 273963 - DNA, 15 bp, Homo sapiens
tcccagggaaggtag

SEQ ID NO: 273964 - DNA, 15 bp, Homo sapiens
ttcccagggaaggta

SEQ ID NO: 273965 - DNA, 15 bp, Homo sapiens
gttcccagggaaggt

SEQ ID NO: 273966 - DNA, 15 bp, Homo sapiens
agttcccagggaagg

SEQ ID NO: 273967 - DNA, 15 bp, Homo sapiens
cagttcccagggaag

SEQ ID NO: 273968 - DNA, 15 bp, Homo sapiens
ccagttcccagggaa

SEQ ID NO: 273969 - DNA, 15 bp, Homo sapiens
gccagttcccaggga

SEQ ID NO: 273970 - DNA, 15 bp, Homo sapiens
ggccagttcccaggg

SEQ ID NO: 273971 - DNA, 15 bp, Homo sapiens
gggccagttcccagg

SEQ ID NO: 273972 - DNA, 15 bp, Homo sapiens
tgggccagttcccag

SEQ ID NO: 273973 - DNA, 15 bp, Homo sapiens
ctgggccagttccca

SEQ ID NO: 273974 - DNA, 15 bp, Homo sapiens
actgggccagttccc

SEQ ID NO: 273975 - DNA, 15 bp, Homo sapiens
aactgggccagttcc

SEQ ID NO: 273976 - DNA, 15 bp, Homo sapiens
aaactgggccagttc

SEQ ID NO: 273977 - DNA, 15 bp, Homo sapiens
caaactgggccagtt

SEQ ID NO: 273978 - DNA, 15 bp, Homo sapiens
tcaaactgggccagt

SEQ ID NO: 273979 - DNA, 15 bp, Homo sapiens
ttcaaactgggccag

SEQ ID NO: 273980 - DNA, 15 bp, Homo sapiens
attcaaactgggcca

SEQ ID NO: 273981 - DNA, 15 bp, Homo sapiens
gattcaaactgggcc

SEQ ID NO: 273982 - DNA, 15 bp, Homo sapiens
agattcaaactgggc

SEQ ID NO: 273983 - DNA, 15 bp, Homo sapiens
aagattcaaactggg

SEQ ID NO: 273984 - DNA, 15 bp, Homo sapiens
taagattcaaactgg

SEQ ID NO: 273985 - DNA, 15 bp, Homo sapiens
ataagattcaaactg

SEQ ID NO: 273986 - DNA, 15 bp, Homo sapiens
aataagattcaaact

SEQ ID NO: 273987 - DNA, 15 bp, Homo sapiens
aaataagattcaaac

SEQ ID NO: 273988 - DNA, 15 bp, Homo sapiens
gaaataagattcaaa

SEQ ID NO: 273989 - DNA, 15 bp, Homo sapiens
ggaaataagattcaa

SEQ ID NO: 273990 - DNA, 15 bp, Homo sapiens
aggaaataagattca

SEQ ID NO: 273991 - DNA, 15 bp, Homo sapiens
taggaaataagattc

SEQ ID NO: 273992 - DNA, 15 bp, Homo sapiens
ttaggaaataagatt

SEQ ID NO: 273993 - DNA, 15 bp, Homo sapiens
attaggaaataagat

SEQ ID NO: 273994 - DNA, 15 bp, Homo sapiens
cattaggaaataaga

SEQ ID NO: 273995 - DNA, 15 bp, Homo sapiens
ccattaggaaataag

SEQ ID NO: 273996 - DNA, 15 bp, Homo sapiens
tccattaggaaataa

SEQ ID NO: 273997 - DNA, 15 bp, Homo sapiens
ctccattaggaaata

SEQ ID NO: 273998 - DNA, 15 bp, Homo sapiens
gctccattaggaaat

SEQ ID NO: 273999 - DNA, 15 bp, Homo sapiens
agctccattaggaaa

SEQ ID NO: 274000 - DNA, 15 bp, Homo sapiens
gagctccattaggaa

SEQ ID NO: 274001 - DNA, 15 bp, Homo sapiens
tgagctccattagga

SEQ ID NO: 274002 - DNA, 15 bp, Homo sapiens
atgagctccattagg

SEQ ID NO: 274003 - DNA, 15 bp, Homo sapiens
tatgagctccattag

SEQ ID NO: 274004 - DNA, 15 bp, Homo sapiens
ttatgagctccatta

SEQ ID NO: 274005 - DNA, 15 bp, Homo sapiens
attatgagctccatt

SEQ ID NO: 274006 - DNA, 15 bp, Homo sapiens
cattatgagctccat

SEQ ID NO: 274007 - DNA, 15 bp, Homo sapiens
ccattatgagctcca

SEQ ID NO: 274008 - DNA, 15 bp, Homo sapiens
cccattatgagctcc

SEQ ID NO: 274009 - DNA, 15 bp, Homo sapiens
ccccattatgagctc

SEQ ID NO: 274010 - DNA, 15 bp, Homo sapiens
tccccattatgagct

SEQ ID NO: 274011 - DNA, 15 bp, Homo sapiens
gtccccattatgagc

SEQ ID NO: 274012 - DNA, 15 bp, Homo sapiens
agtccccattatgag

SEQ ID NO: 274013 - DNA, 15 bp, Homo sapiens
tagtccccattatga

SEQ ID NO: 274014 - DNA, 15 bp, Homo sapiens
ctagtccccattatg

SEQ ID NO: 274015 - DNA, 15 bp, Homo sapiens
cctagtccccattat

SEQ ID NO: 274016 - DNA, 15 bp, Homo sapiens
tcctagtccccatta

SEQ ID NO: 274017 - DNA, 15 bp, Homo sapiens
atcctagtccccatt

SEQ ID NO: 274018 - DNA, 15 bp, Homo sapiens
catcctagtccccat

SEQ ID NO: 274019 - DNA, 15 bp, Homo sapiens
acatcctagtcccca

SEQ ID NO: 274020 - DNA, 15 bp, Homo sapiens
cacatcctagtcccc

SEQ ID NO: 274021 - DNA, 15 bp, Homo sapiens
acacatcctagtccc

SEQ ID NO: 274022 - DNA, 15 bp, Homo sapiens
cacacatcctagtcc

SEQ ID NO: 274023 - DNA, 15 bp, Homo sapiens
tcacacatcctagtc

SEQ ID NO: 274024 - DNA, 15 bp, Homo sapiens
ttcacacatcctagt

SEQ ID NO: 274025 - DNA, 15 bp, Homo sapiens
tttcacacatcctag

SEQ ID NO: 274026 - DNA, 15 bp, Homo sapiens
atttcacacatccta

SEQ ID NO: 274027 - DNA, 15 bp, Homo sapiens
aatttcacacatcct

SEQ ID NO: 274028 - DNA, 15 bp, Homo sapiens
taatttcacacatcc

SEQ ID NO: 274029 - DNA, 15 bp, Homo sapiens
ataatttcacacatc

SEQ ID NO: 274030 - DNA, 15 bp, Homo sapiens
aataatttcacacat

SEQ ID NO: 274031 - DNA, 15 bp, Homo sapiens
aaataatttcacaca

SEQ ID NO: 274032 - DNA, 15 bp, Homo sapiens
taaataatttcacac

SEQ ID NO: 274033 - DNA, 15 bp, Homo sapiens
ataaataatttcaca

SEQ ID NO: 274034 - DNA, 15 bp, Homo sapiens
cataaataatttcac

SEQ ID NO: 274035 - DNA, 15 bp, Homo sapiens
ccataaataatttca

SEQ ID NO: 274036 - DNA, 15 bp, Homo sapiens
gccataaataatttc

SEQ ID NO: 274037 - DNA, 15 bp, Homo sapiens
agccataaataattt

SEQ ID NO: 274038 - DNA, 15 bp, Homo sapiens
tagccataaataatt

SEQ ID NO: 274039 - DNA, 15 bp, Homo sapiens
ctagccataaataat

SEQ ID NO: 274040 - DNA, 15 bp, Homo sapiens
cctagccataaataa

SEQ ID NO: 274041 - DNA, 15 bp, Homo sapiens
acctagccataaata

SEQ ID NO: 274042 - DNA, 15 bp, Homo sapiens
tacctagccataaat

SEQ ID NO: 274043 - DNA, 15 bp, Homo sapiens
gtacctagccataaa

SEQ ID NO: 274044 - DNA, 15 bp, Homo sapiens
agtacctagccataa

SEQ ID NO: 274045 - DNA, 15 bp, Homo sapiens
cagtacctagccata

SEQ ID NO: 274046 - DNA, 15 bp, Homo sapiens
ccagtacctagccat

SEQ ID NO: 274047 - DNA, 15 bp, Homo sapiens
tccagtacctagcca

SEQ ID NO: 274048 - DNA, 15 bp, Homo sapiens
ctccagtacctagcc

SEQ ID NO: 274049 - DNA, 15 bp, Homo sapiens
cctccagtacctagc

SEQ ID NO: 274050 - DNA, 15 bp, Homo sapiens
tcctccagtacctag

SEQ ID NO: 274051 - DNA, 15 bp, Homo sapiens
ttcctccagtaccta

SEQ ID NO: 274052 - DNA, 15 bp, Homo sapiens
cttcctccagtacct

SEQ ID NO: 274053 - DNA, 15 bp, Homo sapiens
ccttcctccagtacc

SEQ ID NO: 274054 - DNA, 15 bp, Homo sapiens
accttcctccagtac

SEQ ID NO: 274055 - DNA, 15 bp, Homo sapiens
taccttcctccagta

SEQ ID NO: 274056 - DNA, 15 bp, Homo sapiens
ttaccttcctccagt

SEQ ID NO: 274057 - DNA, 15 bp, Homo sapiens
cttaccttcctccag

SEQ ID NO: 274058 - DNA, 15 bp, Homo sapiens
tcttaccttcctcca

SEQ ID NO: 274059 - DNA, 15 bp, Homo sapiens
ttcttaccttcctcc

SEQ ID NO: 274060 - DNA, 15 bp, Homo sapiens
tttcttaccttcctc

SEQ ID NO: 274061 - DNA, 15 bp, Homo sapiens
ctttcttaccttcct

SEQ ID NO: 274062 - DNA, 15 bp, Homo sapiens
cctttcttaccttcc

SEQ ID NO: 274063 - DNA, 15 bp, Homo sapiens
tcctttcttaccttc

SEQ ID NO: 274064 - DNA, 15 bp, Homo sapiens
ttcctttcttacctt

SEQ ID NO: 274065 - DNA, 15 bp, Homo sapiens
attcctttcttacct

SEQ ID NO: 274066 - DNA, 15 bp, Homo sapiens
aattcctttcttacc

SEQ ID NO: 274067 - DNA, 15 bp, Homo sapiens
aaattcctttcttac

SEQ ID NO: 274068 - DNA, 15 bp, Homo sapiens
gaaattcctttctta

SEQ ID NO: 274069 - DNA, 15 bp, Homo sapiens
tgaaattcctttctt

SEQ ID NO: 274070 - DNA, 15 bp, Homo sapiens
atgaaattcctttct

SEQ ID NO: 274071 - DNA, 15 bp, Homo sapiens
catgaaattcctttc

SEQ ID NO: 274072 - DNA, 15 bp, Homo sapiens
acatgaaattccttt

SEQ ID NO: 274073 - DNA, 15 bp, Homo sapiens
aacatgaaattcctt

SEQ ID NO: 274074 - DNA, 15 bp, Homo sapiens
taacatgaaattcct

SEQ ID NO: 274075 - DNA, 15 bp, Homo sapiens
ataacatgaaattcc

SEQ ID NO: 274076 - DNA, 15 bp, Homo sapiens
aataacatgaaattc

SEQ ID NO: 274077 - DNA, 15 bp, Homo sapiens
aaataacatgaaatt

SEQ ID NO: 274078 - DNA, 15 bp, Homo sapiens
aaaataacatgaaat

SEQ ID NO: 274079 - DNA, 15 bp, Homo sapiens
aaaaataacatgaaa

SEQ ID NO: 274080 - DNA, 15 bp, Homo sapiens
caaaaataacatgaa

SEQ ID NO: 274081 - DNA, 15 bp, Homo sapiens
ccaaaaataacatga

SEQ ID NO: 274082 - DNA, 15 bp, Homo sapiens
cccaaaaataacatg

SEQ ID NO: 274083 - DNA, 15 bp, Homo sapiens
tcccaaaaataacat

SEQ ID NO: 274084 - DNA, 15 bp, Homo sapiens
atcccaaaaataaca

SEQ ID NO: 274085 - DNA, 15 bp, Homo sapiens
aatcccaaaaataac

SEQ ID NO: 274086 - DNA, 15 bp, Homo sapiens
aaatcccaaaaataa

SEQ ID NO: 274087 - DNA, 15 bp, Homo sapiens
caaatcccaaaaata

SEQ ID NO: 274088 - DNA, 15 bp, Homo sapiens
tcaaatcccaaaaat

SEQ ID NO: 274089 - DNA, 15 bp, Homo sapiens
ctcaaatcccaaaaa

SEQ ID NO: 274090 - DNA, 15 bp, Homo sapiens
cctcaaatcccaaaa

SEQ ID NO: 274091 - DNA, 15 bp, Homo sapiens
acctcaaatcccaaa

SEQ ID NO: 274092 - DNA, 15 bp, Homo sapiens
cacctcaaatcccaa

SEQ ID NO: 274093 - DNA, 15 bp, Homo sapiens
acacctcaaatccca

SEQ ID NO: 274094 - DNA, 15 bp, Homo sapiens
cacacctcaaatccc

SEQ ID NO: 274095 - DNA, 15 bp, Homo sapiens
gcacacctcaaatcc

SEQ ID NO: 274096 - DNA, 15 bp, Homo sapiens
agcacacctcaaatc

SEQ ID NO: 274097 - DNA, 15 bp, Homo sapiens
aagcacacctcaaat

SEQ ID NO: 274098 - DNA, 15 bp, Homo sapiens
aaagcacacctcaaa

SEQ ID NO: 274099 - DNA, 15 bp, Homo sapiens
aaaagcacacctcaa

SEQ ID NO: 274100 - DNA, 15 bp, Homo sapiens
caaaagcacacctca

SEQ ID NO: 274101 - DNA, 15 bp, Homo sapiens
tcaaaagcacacctc

SEQ ID NO: 274102 - DNA, 15 bp, Homo sapiens
ttcaaaagcacacct

SEQ ID NO: 274103 - DNA, 15 bp, Homo sapiens
cttcaaaagcacacc

SEQ ID NO: 274104 - DNA, 15 bp, Homo sapiens
ccttcaaaagcacac

SEQ ID NO: 274105 - DNA, 15 bp, Homo sapiens
cccttcaaaagcaca

SEQ ID NO: 274106 - DNA, 15 bp, Homo sapiens
acccttcaaaagcac

SEQ ID NO: 274107 - DNA, 15 bp, Homo sapiens
tacccttcaaaagca

SEQ ID NO: 274108 - DNA, 15 bp, Homo sapiens
atacccttcaaaagc

SEQ ID NO: 274109 - DNA, 15 bp, Homo sapiens
catacccttcaaaag

SEQ ID NO: 274110 - DNA, 15 bp, Homo sapiens
tcatacccttcaaaa

SEQ ID NO: 274111 - DNA, 15 bp, Homo sapiens
atcatacccttcaaa

SEQ ID NO: 274112 - DNA, 15 bp, Homo sapiens
catcatacccttcaa

SEQ ID NO: 274113 - DNA, 15 bp, Homo sapiens
ccatcatacccttca

SEQ ID NO: 274114 - DNA, 15 bp, Homo sapiens
tccatcatacccttc

SEQ ID NO: 274115 - DNA, 15 bp, Homo sapiens
ttccatcataccctt

SEQ ID NO: 274116 - DNA, 15 bp, Homo sapiens
cttccatcataccct

SEQ ID NO: 274117 - DNA, 15 bp, Homo sapiens
tcttccatcataccc

SEQ ID NO: 274118 - DNA, 15 bp, Homo sapiens
atcttccatcatacc

SEQ ID NO: 274119 - DNA, 15 bp, Homo sapiens
catcttccatcatac

SEQ ID NO: 274120 - DNA, 15 bp, Homo sapiens
tcatcttccatcata

SEQ ID NO: 274121 - DNA, 15 bp, Homo sapiens
atcatcttccatcat

SEQ ID NO: 274122 - DNA, 15 bp, Homo sapiens
catcatcttccatca

SEQ ID NO: 274123 - DNA, 15 bp, Homo sapiens
acatcatcttccatc

SEQ ID NO: 274124 - DNA, 15 bp, Homo sapiens
gacatcatcttccat

SEQ ID NO: 274125 - DNA, 15 bp, Homo sapiens
ggacatcatcttcca

SEQ ID NO: 274126 - DNA, 15 bp, Homo sapiens
aggacatcatcttcc

SEQ ID NO: 274127 - DNA, 15 bp, Homo sapiens
caggacatcatcttc

SEQ ID NO: 274128 - DNA, 15 bp, Homo sapiens
acaggacatcatctt

SEQ ID NO: 274129 - DNA, 15 bp, Homo sapiens
aacaggacatcatct

SEQ ID NO: 274130 - DNA, 15 bp, Homo sapiens
caacaggacatcatc

SEQ ID NO: 274131 - DNA, 15 bp, Homo sapiens
acaacaggacatcat

SEQ ID NO: 274132 - DNA, 15 bp, Homo sapiens
gacaacaggacatca

SEQ ID NO: 274133 - DNA, 15 bp, Homo sapiens
ggacaacaggacatc

SEQ ID NO: 274134 - DNA, 15 bp, Homo sapiens
aggacaacaggacat

SEQ ID NO: 274135 - DNA, 15 bp, Homo sapiens
caggacaacaggaca

SEQ ID NO: 274136 - DNA, 15 bp, Homo sapiens
acaggacaacaggac

SEQ ID NO: 274137 - DNA, 15 bp, Homo sapiens
aacaggacaacagga

SEQ ID NO: 274138 - DNA, 15 bp, Homo sapiens
caacaggacaacagg

SEQ ID NO: 274139 - DNA, 15 bp, Homo sapiens
acaacaggacaacag

SEQ ID NO: 274140 - DNA, 15 bp, Homo sapiens
tacaacaggacaaca

SEQ ID NO: 274141 - DNA, 15 bp, Homo sapiens
ttacaacaggacaac

SEQ ID NO: 274142 - DNA, 15 bp, Homo sapiens
tttacaacaggacaa

SEQ ID NO: 274143 - DNA, 15 bp, Homo sapiens
atttacaacaggaca

SEQ ID NO: 274144 - DNA, 15 bp, Homo sapiens
gatttacaacaggac

SEQ ID NO: 274145 - DNA, 15 bp, Homo sapiens
tgatttacaacagga

SEQ ID NO: 274146 - DNA, 15 bp, Homo sapiens
ttgatttacaacagg

SEQ ID NO: 274147 - DNA, 15 bp, Homo sapiens
gttgatttacaacag

SEQ ID NO: 274148 - DNA, 15 bp, Homo sapiens
tgttgatttacaaca

SEQ ID NO: 274149 - DNA, 15 bp, Homo sapiens
ctgttgatttacaac

SEQ ID NO: 274150 - DNA, 15 bp, Homo sapiens
tctgttgatttacaa

SEQ ID NO: 274151 - DNA, 15 bp, Homo sapiens
gtctgttgatttaca

SEQ ID NO: 274152 - DNA, 15 bp, Homo sapiens
agtctgttgatttac

SEQ ID NO: 274153 - DNA, 15 bp, Homo sapiens
aagtctgttgattta

SEQ ID NO: 274154 - DNA, 15 bp, Homo sapiens
aaagtctgttgattt

SEQ ID NO: 274155 - DNA, 15 bp, Homo sapiens
aaaagtctgttgatt

SEQ ID NO: 274156 - DNA, 15 bp, Homo sapiens
gaaaagtctgttgat

SEQ ID NO: 274157 - DNA, 15 bp, Homo sapiens
ggaaaagtctgttga

SEQ ID NO: 274158 - DNA, 15 bp, Homo sapiens
aggaaaagtctgttg

SEQ ID NO: 274159 - DNA, 15 bp, Homo sapiens
aaggaaaagtctgtt

SEQ ID NO: 274160 - DNA, 15 bp, Homo sapiens
caaggaaaagtctgt

SEQ ID NO: 274161 - DNA, 15 bp, Homo sapiens
tcaaggaaaagtctg

SEQ ID NO: 274162 - DNA, 15 bp, Homo sapiens
ttcaaggaaaagtct

SEQ ID NO: 274163 - DNA, 15 bp, Homo sapiens
tttcaaggaaaagtc

SEQ ID NO: 274164 - DNA, 15 bp, Homo sapiens
atttcaaggaaaagt

SEQ ID NO: 274165 - DNA, 15 bp, Homo sapiens
tatttcaaggaaaag

SEQ ID NO: 274166 - DNA, 15 bp, Homo sapiens
atatttcaaggaaaa

SEQ ID NO: 274167 - DNA, 15 bp, Homo sapiens
catatttcaaggaaa

SEQ ID NO: 274168 - DNA, 15 bp, Homo sapiens
tcatatttcaaggaa

SEQ ID NO: 274169 - DNA, 15 bp, Homo sapiens
atcatatttcaagga

SEQ ID NO: 274170 - DNA, 15 bp, Homo sapiens
aatcatatttcaagg

SEQ ID NO: 274171 - DNA, 15 bp, Homo sapiens
aaatcatatttcaag

SEQ ID NO: 274172 - DNA, 15 bp, Homo sapiens
aaaatcatatttcaa

SEQ ID NO: 274173 - DNA, 15 bp, Homo sapiens
taaaatcatatttca

SEQ ID NO: 274174 - DNA, 15 bp, Homo sapiens
ttaaaatcatatttc

SEQ ID NO: 274175 - DNA, 15 bp, Homo sapiens
cttaaaatcatattt

SEQ ID NO: 274176 - DNA, 15 bp, Homo sapiens
acttaaaatcatatt

SEQ ID NO: 274177 - DNA, 15 bp, Homo sapiens
aacttaaaatcatat

SEQ ID NO: 274178 - DNA, 15 bp, Homo sapiens
taacttaaaatcata

SEQ ID NO: 274179 - DNA, 15 bp, Homo sapiens
ctaacttaaaatcat

SEQ ID NO: 274180 - DNA, 15 bp, Homo sapiens
tctaacttaaaatca

SEQ ID NO: 274181 - DNA, 15 bp, Homo sapiens
ctctaacttaaaatc

SEQ ID NO: 274182 - DNA, 15 bp, Homo sapiens
actctaacttaaaat

SEQ ID NO: 274183 - DNA, 15 bp, Homo sapiens
aactctaacttaaaa

SEQ ID NO: 274184 - DNA, 15 bp, Homo sapiens
taactctaacttaaa

SEQ ID NO: 274185 - DNA, 15 bp, Homo sapiens
gtaactctaacttaa

SEQ ID NO: 274186 - DNA, 15 bp, Homo sapiens
cgtaactctaactta

SEQ ID NO: 274187 - DNA, 15 bp, Homo sapiens
acgtaactctaactt

SEQ ID NO: 274188 - DNA, 15 bp, Homo sapiens
aacgtaactctaact

SEQ ID NO: 274189 - DNA, 15 bp, Homo sapiens
aaacgtaactctaac

SEQ ID NO: 274190 - DNA, 15 bp, Homo sapiens
aaaacgtaactctaa

SEQ ID NO: 274191 - DNA, 15 bp, Homo sapiens
aaaaacgtaactcta

SEQ ID NO: 274192 - DNA, 15 bp, Homo sapiens
caaaaacgtaactct

SEQ ID NO: 274193 - DNA, 15 bp, Homo sapiens
tcaaaaacgtaactc

SEQ ID NO: 274194 - DNA, 15 bp, Homo sapiens
ctcaaaaacgtaact

SEQ ID NO: 274195 - DNA, 15 bp, Homo sapiens
cctcaaaaacgtaac

SEQ ID NO: 274196 - DNA, 15 bp, Homo sapiens
acctcaaaaacgtaa

SEQ ID NO: 274197 - DNA, 15 bp, Homo sapiens
aacctcaaaaacgta

SEQ ID NO: 274198 - DNA, 15 bp, Homo sapiens
aaacctcaaaaacgt

SEQ ID NO: 274199 - DNA, 15 bp, Homo sapiens
caaacctcaaaaacg

SEQ ID NO: 274200 - DNA, 15 bp, Homo sapiens
ccaaacctcaaaaac

SEQ ID NO: 274201 - DNA, 15 bp, Homo sapiens
gccaaacctcaaaaa

SEQ ID NO: 274202 - DNA, 15 bp, Homo sapiens
ggccaaacctcaaaa

SEQ ID NO: 274203 - DNA, 15 bp, Homo sapiens
aggccaaacctcaaa

SEQ ID NO: 274204 - DNA, 15 bp, Homo sapiens
caggccaaacctcaa

SEQ ID NO: 274205 - DNA, 15 bp, Homo sapiens
tcaggccaaacctca

SEQ ID NO: 274206 - DNA, 15 bp, Homo sapiens
ctcaggccaaacctc

SEQ ID NO: 274207 - DNA, 15 bp, Homo sapiens
tctcaggccaaacct

SEQ ID NO: 274208 - DNA, 15 bp, Homo sapiens
ttctcaggccaaacc

SEQ ID NO: 274209 - DNA, 15 bp, Homo sapiens
attctcaggccaaac

SEQ ID NO: 274210 - DNA, 15 bp, Homo sapiens
aattctcaggccaaa

SEQ ID NO: 274211 - DNA, 15 bp, Homo sapiens
aaattctcaggccaa

SEQ ID NO: 274212 - DNA, 15 bp, Homo sapiens
taaattctcaggcca

SEQ ID NO: 274213 - DNA, 15 bp, Homo sapiens
ttaaattctcaggcc

SEQ ID NO: 274214 - DNA, 15 bp, Homo sapiens
gttaaattctcaggc

SEQ ID NO: 274215 - DNA, 15 bp, Homo sapiens
ggttaaattctcagg

SEQ ID NO: 274216 - DNA, 15 bp, Homo sapiens
aggttaaattctcag

SEQ ID NO: 274217 - DNA, 15 bp, Homo sapiens
aaggttaaattctca

SEQ ID NO: 274218 - DNA, 15 bp, Homo sapiens
gaaggttaaattctc

SEQ ID NO: 274219 - DNA, 15 bp, Homo sapiens
tgaaggttaaattct

SEQ ID NO: 274220 - DNA, 15 bp, Homo sapiens
atgaaggttaaattc

SEQ ID NO: 274221 - DNA, 15 bp, Homo sapiens
aatgaaggttaaatt

SEQ ID NO: 274222 - DNA, 15 bp, Homo sapiens
aaatgaaggttaaat

SEQ ID NO: 274223 - DNA, 15 bp, Homo sapiens
taaatgaaggttaaa

SEQ ID NO: 274224 - DNA, 15 bp, Homo sapiens
ataaatgaaggttaa

SEQ ID NO: 274225 - DNA, 15 bp, Homo sapiens
tataaatgaaggtta

SEQ ID NO: 274226 - DNA, 15 bp, Homo sapiens
atataaatgaaggtt

SEQ ID NO: 274227 - DNA, 15 bp, Homo sapiens
tatataaatgaaggt

SEQ ID NO: 274228 - DNA, 15 bp, Homo sapiens
ttatataaatgaagg

SEQ ID NO: 274229 - DNA, 15 bp, Homo sapiens
attatataaatgaag

SEQ ID NO: 274230 - DNA, 15 bp, Homo sapiens
tattatataaatgaa

SEQ ID NO: 274231 - DNA, 15 bp, Homo sapiens
ttattatataaatga

SEQ ID NO: 274232 - DNA, 15 bp, Homo sapiens
attattatataaatg

SEQ ID NO: 274233 - DNA, 15 bp, Homo sapiens
tattattatataaat

SEQ ID NO: 274234 - DNA, 15 bp, Homo sapiens
atattattatataaa

SEQ ID NO: 274235 - DNA, 15 bp, Homo sapiens
gatattattatataa

SEQ ID NO: 274236 - DNA, 15 bp, Homo sapiens
agatattattatata

SEQ ID NO: 274237 - DNA, 15 bp, Homo sapiens
tagatattattatat

SEQ ID NO: 274238 - DNA, 15 bp, Homo sapiens
ttagatattattata

SEQ ID NO: 274239 - DNA, 15 bp, Homo sapiens
cttagatattattat

SEQ ID NO: 274240 - DNA, 15 bp, Homo sapiens
ccttagatattatta

SEQ ID NO: 274241 - DNA, 15 bp, Homo sapiens
cccttagatattatt

SEQ ID NO: 274242 - DNA, 15 bp, Homo sapiens
tcccttagatattat

SEQ ID NO: 274243 - DNA, 15 bp, Homo sapiens
ctcccttagatatta

SEQ ID NO: 274244 - DNA, 15 bp, Homo sapiens
tctcccttagatatt

SEQ ID NO: 274245 - DNA, 15 bp, Homo sapiens
ttctcccttagatat

SEQ ID NO: 274246 - DNA, 15 bp, Homo sapiens
attctcccttagata

SEQ ID NO: 274247 - DNA, 15 bp, Homo sapiens
cattctcccttagat

SEQ ID NO: 274248 - DNA, 15 bp, Homo sapiens
acattctcccttaga

SEQ ID NO: 274249 - DNA, 15 bp, Homo sapiens
cacattctcccttag

SEQ ID NO: 274250 - DNA, 15 bp, Homo sapiens
tcacattctccctta

SEQ ID NO: 274251 - DNA, 15 bp, Homo sapiens
atcacattctccctt

SEQ ID NO: 274252 - DNA, 15 bp, Homo sapiens
tatcacattctccct

SEQ ID NO: 274253 - DNA, 15 bp, Homo sapiens
gtatcacattctccc

SEQ ID NO: 274254 - DNA, 15 bp, Homo sapiens
tgtatcacattctcc

SEQ ID NO: 274255 - DNA, 15 bp, Homo sapiens
ctgtatcacattctc

SEQ ID NO: 274256 - DNA, 15 bp, Homo sapiens
actgtatcacattct

SEQ ID NO: 274257 - DNA, 15 bp, Homo sapiens
cactgtatcacattc

SEQ ID NO: 274258 - DNA, 15 bp, Homo sapiens
acactgtatcacatt

SEQ ID NO: 274259 - DNA, 15 bp, Homo sapiens
cacactgtatcacat

SEQ ID NO: 274260 - DNA, 15 bp, Homo sapiens
acacactgtatcaca

SEQ ID NO: 274261 - DNA, 15 bp, Homo sapiens
aacacactgtatcac

SEQ ID NO: 274262 - DNA, 15 bp, Homo sapiens
gaacacactgtatca

SEQ ID NO: 274263 - DNA, 15 bp, Homo sapiens
agaacacactgtatc

SEQ ID NO: 274264 - DNA, 15 bp, Homo sapiens
tagaacacactgtat

SEQ ID NO: 274265 - DNA, 15 bp, Homo sapiens
ttagaacacactgta

SEQ ID NO: 274266 - DNA, 15 bp, Homo sapiens
cttagaacacactgt

SEQ ID NO: 274267 - DNA, 15 bp, Homo sapiens
tcttagaacacactg

SEQ ID NO: 274268 - DNA, 15 bp, Homo sapiens
ttcttagaacacact

SEQ ID NO: 274269 - DNA, 15 bp, Homo sapiens
cttcttagaacacac

SEQ ID NO: 274270 - DNA, 15 bp, Homo sapiens
gcttcttagaacaca

SEQ ID NO: 274271 - DNA, 15 bp, Homo sapiens
tgcttcttagaacac

SEQ ID NO: 274272 - DNA, 15 bp, Homo sapiens
ttgcttcttagaaca

SEQ ID NO: 274273 - DNA, 15 bp, Homo sapiens
tttgcttcttagaac

SEQ ID NO: 274274 - DNA, 15 bp, Homo sapiens
atttgcttcttagaa

SEQ ID NO: 274275 - DNA, 15 bp, Homo sapiens
catttgcttcttaga

SEQ ID NO: 274276 - DNA, 15 bp, Homo sapiens
acatttgcttcttag

SEQ ID NO: 274277 - DNA, 15 bp, Homo sapiens
tacatttgcttctta

SEQ ID NO: 274278 - DNA, 15 bp, Homo sapiens
ttacatttgcttctt

SEQ ID NO: 274279 - DNA, 15 bp, Homo sapiens
attacatttgcttct

SEQ ID NO: 274280 - DNA, 15 bp, Homo sapiens
cattacatttgcttc

SEQ ID NO: 274281 - DNA, 15 bp, Homo sapiens
tcattacatttgctt

SEQ ID NO: 274282 - DNA, 15 bp, Homo sapiens
gtcattacatttgct

SEQ ID NO: 274283 - DNA, 15 bp, Homo sapiens
tgtcattacatttgc

SEQ ID NO: 274284 - DNA, 15 bp, Homo sapiens
ctgtcattacatttg

SEQ ID NO: 274285 - DNA, 15 bp, Homo sapiens
tctgtcattacattt

SEQ ID NO: 274286 - DNA, 15 bp, Homo sapiens
ttctgtcattacatt

SEQ ID NO: 274287 - DNA, 15 bp, Homo sapiens
attctgtcattacat

SEQ ID NO: 274288 - DNA, 15 bp, Homo sapiens
tattctgtcattaca

SEQ ID NO: 274289 - DNA, 15 bp, Homo sapiens
ttattctgtcattac

SEQ ID NO: 274290 - DNA, 15 bp, Homo sapiens
tttattctgtcatta

SEQ ID NO: 274291 - DNA, 15 bp, Homo sapiens
atttattctgtcatt

SEQ ID NO: 274292 - DNA, 15 bp, Homo sapiens
catttattctgtcat

SEQ ID NO: 274293 - DNA, 15 bp, Homo sapiens
acatttattctgtca

SEQ ID NO: 274294 - DNA, 15 bp, Homo sapiens
cacatttattctgtc

SEQ ID NO: 274295 - DNA, 15 bp, Homo sapiens
acacatttattctgt

SEQ ID NO: 274296 - DNA, 15 bp, Homo sapiens
aacacatttattctg

SEQ ID NO: 274297 - DNA, 15 bp, Homo sapiens
aaacacatttattct

SEQ ID NO: 274298 - DNA, 15 bp, Homo sapiens
gaaacacatttattc

SEQ ID NO: 274299 - DNA, 15 bp, Homo sapiens
ggaaacacatttatt

SEQ ID NO: 274300 - DNA, 15 bp, Homo sapiens
tggaaacacatttat

SEQ ID NO: 274301 - DNA, 15 bp, Homo sapiens
ctggaaacacattta

SEQ ID NO: 274302 - DNA, 15 bp, Homo sapiens
actggaaacacattt

SEQ ID NO: 274303 - DNA, 15 bp, Homo sapiens
cactggaaacacatt

SEQ ID NO: 274304 - DNA, 15 bp, Homo sapiens
gcactggaaacacat

SEQ ID NO: 274305 - DNA, 15 bp, Homo sapiens
tgcactggaaacaca

SEQ ID NO: 274306 - DNA, 15 bp, Homo sapiens
ctgcactggaaacac

SEQ ID NO: 274307 - DNA, 15 bp, Homo sapiens
gctgcactggaaaca

SEQ ID NO: 274308 - DNA, 15 bp, Homo sapiens
agctgcactggaaac

SEQ ID NO: 274309 - DNA, 15 bp, Homo sapiens
tagctgcactggaaa

SEQ ID NO: 274310 - DNA, 15 bp, Homo sapiens
atagctgcactggaa

SEQ ID NO: 274311 - DNA, 15 bp, Homo sapiens
aatagctgcactgga

SEQ ID NO: 274312 - DNA, 15 bp, Homo sapiens
gaatagctgcactgg

SEQ ID NO: 274313 - DNA, 15 bp, Homo sapiens
agaatagctgcactg

SEQ ID NO: 274314 - DNA, 15 bp, Homo sapiens
tagaatagctgcact

SEQ ID NO: 274315 - DNA, 15 bp, Homo sapiens
ctagaatagctgcac

SEQ ID NO: 274316 - DNA, 15 bp, Homo sapiens
actagaatagctgca

SEQ ID NO: 274317 - DNA, 15 bp, Homo sapiens
cactagaatagctgc

SEQ ID NO: 274318 - DNA, 15 bp, Homo sapiens
ccactagaatagctg

SEQ ID NO: 274319 - DNA, 15 bp, Homo sapiens
gccactagaatagct

SEQ ID NO: 274320 - DNA, 15 bp, Homo sapiens
tgccactagaatagc

SEQ ID NO: 274321 - DNA, 15 bp, Homo sapiens
ctgccactagaatag

SEQ ID NO: 274322 - DNA, 15 bp, Homo sapiens
actgccactagaata

SEQ ID NO: 274323 - DNA, 15 bp, Homo sapiens
aactgccactagaat

SEQ ID NO: 274324 - DNA, 15 bp, Homo sapiens
caactgccactagaa

SEQ ID NO: 274325 - DNA, 15 bp, Homo sapiens
acaactgccactaga

SEQ ID NO: 274326 - DNA, 15 bp, Homo sapiens
gacaactgccactag

SEQ ID NO: 274327 - DNA, 15 bp, Homo sapiens
agacaactgccacta

SEQ ID NO: 274328 - DNA, 15 bp, Homo sapiens
gagacaactgccact

SEQ ID NO: 274329 - DNA, 15 bp, Homo sapiens
agagacaactgccac

SEQ ID NO: 274330 - DNA, 15 bp, Homo sapiens
gagagacaactgcca

SEQ ID NO: 274331 - DNA, 15 bp, Homo sapiens
agagagacaactgcc

SEQ ID NO: 274332 - DNA, 15 bp, Homo sapiens
aagagagacaactgc

SEQ ID NO: 274333 - DNA, 15 bp, Homo sapiens
gaagagagacaactg

SEQ ID NO: 274334 - DNA, 15 bp, Homo sapiens
agaagagagacaact

SEQ ID NO: 274335 - DNA, 15 bp, Homo sapiens
aagaagagagacaac

SEQ ID NO: 274336 - DNA, 15 bp, Homo sapiens
aaagaagagagacaa

SEQ ID NO: 274337 - DNA, 15 bp, Homo sapiens
caaagaagagagaca

SEQ ID NO: 274338 - DNA, 15 bp, Homo sapiens
tcaaagaagagagac

SEQ ID NO: 274339 - DNA, 15 bp, Homo sapiens
ttcaaagaagagaga

SEQ ID NO: 274340 - DNA, 15 bp, Homo sapiens
tttcaaagaagagag

SEQ ID NO: 274341 - DNA, 15 bp, Homo sapiens
gtttcaaagaagaga

SEQ ID NO: 274342 - DNA, 15 bp, Homo sapiens
tgtttcaaagaagag

SEQ ID NO: 274343 - DNA, 15 bp, Homo sapiens
ttgtttcaaagaaga

SEQ ID NO: 274344 - DNA, 15 bp, Homo sapiens
cttgtttcaaagaag

SEQ ID NO: 274345 - DNA, 15 bp, Homo sapiens
tcttgtttcaaagaa

SEQ ID NO: 274346 - DNA, 15 bp, Homo sapiens
ctcttgtttcaaaga

SEQ ID NO: 274347 - DNA, 15 bp, Homo sapiens
cctcttgtttcaaag

SEQ ID NO: 274348 - DNA, 15 bp, Homo sapiens
tcctcttgtttcaaa

SEQ ID NO: 274349 - DNA, 15 bp, Homo sapiens
ctcctcttgtttcaa

SEQ ID NO: 274350 - DNA, 15 bp, Homo sapiens
cctcctcttgtttca

SEQ ID NO: 274351 - DNA, 15 bp, Homo sapiens
tcctcctcttgtttc

SEQ ID NO: 274352 - DNA, 15 bp, Homo sapiens
ttcctcctcttgttt

SEQ ID NO: 274353 - DNA, 15 bp, Homo sapiens
attcctcctcttgtt

SEQ ID NO: 274354 - DNA, 15 bp, Homo sapiens
tattcctcctcttgt

SEQ ID NO: 274355 - DNA, 15 bp, Homo sapiens
atattcctcctcttg

SEQ ID NO: 274356 - DNA, 15 bp, Homo sapiens
aatattcctcctctt

SEQ ID NO: 274357 - DNA, 15 bp, Homo sapiens
caatattcctcctct

SEQ ID NO: 274358 - DNA, 15 bp, Homo sapiens
acaatattcctcctc

SEQ ID NO: 274359 - DNA, 15 bp, Homo sapiens
gacaatattcctcct

SEQ ID NO: 274360 - DNA, 15 bp, Homo sapiens
tgacaatattcctcc

SEQ ID NO: 274361 - DNA, 15 bp, Homo sapiens
ttgacaatattcctc

SEQ ID NO: 274362 - DNA, 15 bp, Homo sapiens
tttgacaatattcct

SEQ ID NO: 274363 - DNA, 15 bp, Homo sapiens
ttttgacaatattcc

SEQ ID NO: 274364 - DNA, 15 bp, Homo sapiens
tttttgacaatattc

SEQ ID NO: 274365 - DNA, 15 bp, Homo sapiens
ctttttgacaatatt

SEQ ID NO: 274366 - DNA, 15 bp, Homo sapiens
cctttttgacaatat

SEQ ID NO: 274367 - DNA, 15 bp, Homo sapiens
tcctttttgacaata

SEQ ID NO: 274368 - DNA, 15 bp, Homo sapiens
ttcctttttgacaat

SEQ ID NO: 274369 - DNA, 15 bp, Homo sapiens
tttcctttttgacaa

SEQ ID NO: 274370 - DNA, 15 bp, Homo sapiens
gtttcctttttgaca

SEQ ID NO: 274371 - DNA, 15 bp, Homo sapiens
ggtttcctttttgac

SEQ ID NO: 274372 - DNA, 15 bp, Homo sapiens
gggtttcctttttga

SEQ ID NO: 274373 - DNA, 15 bp, Homo sapiens
agggtttcctttttg

SEQ ID NO: 274374 - DNA, 15 bp, Homo sapiens
aagggtttccttttt

SEQ ID NO: 274375 - DNA, 15 bp, Homo sapiens
aaagggtttcctttt

SEQ ID NO: 274376 - DNA, 15 bp, Homo sapiens
aaaagggtttccttt

SEQ ID NO: 274377 - DNA, 15 bp, Homo sapiens
aaaaagggtttcctt

SEQ ID NO: 274378 - DNA, 15 bp, Homo sapiens
taaaaagggtttcct

SEQ ID NO: 274379 - DNA, 15 bp, Homo sapiens
ttaaaaagggtttcc

SEQ ID NO: 274380 - DNA, 15 bp, Homo sapiens
gttaaaaagggtttc

SEQ ID NO: 274381 - DNA, 15 bp, Homo sapiens
tgttaaaaagggttt

SEQ ID NO: 274382 - DNA, 15 bp, Homo sapiens
ttgttaaaaagggtt

SEQ ID NO: 274383 - DNA, 15 bp, Homo sapiens
attgttaaaaagggt

SEQ ID NO: 274384 - DNA, 15 bp, Homo sapiens
tattgttaaaaaggg

SEQ ID NO: 274385 - DNA, 15 bp, Homo sapiens
ctattgttaaaaagg

SEQ ID NO: 274386 - DNA, 15 bp, Homo sapiens
tctattgttaaaaag

SEQ ID NO: 274387 - DNA, 15 bp, Homo sapiens
ttctattgttaaaaa

SEQ ID NO: 274388 - DNA, 15 bp, Homo sapiens
tttctattgttaaaa

SEQ ID NO: 274389 - DNA, 15 bp, Homo sapiens
ctttctattgttaaa

SEQ ID NO: 274390 - DNA, 15 bp, Homo sapiens
actttctattgttaa

SEQ ID NO: 274391 - DNA, 15 bp, Homo sapiens
tactttctattgtta

SEQ ID NO: 274392 - DNA, 15 bp, Homo sapiens
ctactttctattgtt

SEQ ID NO: 274393 - DNA, 15 bp, Homo sapiens
cctactttctattgt

SEQ ID NO: 274394 - DNA, 15 bp, Homo sapiens
acctactttctattg

SEQ ID NO: 274395 - DNA, 15 bp, Homo sapiens
cacctactttctatt

SEQ ID NO: 274396 - DNA, 15 bp, Homo sapiens
tcacctactttctat

SEQ ID NO: 274397 - DNA, 15 bp, Homo sapiens
atcacctactttcta

SEQ ID NO: 274398 - DNA, 15 bp, Homo sapiens
catcacctactttct

SEQ ID NO: 274399 - DNA, 15 bp, Homo sapiens
acatcacctactttc

SEQ ID NO: 274400 - DNA, 15 bp, Homo sapiens
aacatcacctacttt

SEQ ID NO: 274401 - DNA, 15 bp, Homo sapiens
aaacatcacctactt

SEQ ID NO: 274402 - DNA, 15 bp, Homo sapiens
taaacatcacctact

SEQ ID NO: 274403 - DNA, 15 bp, Homo sapiens
ataaacatcacctac

SEQ ID NO: 274404 - DNA, 15 bp, Homo sapiens
aataaacatcaccta

SEQ ID NO: 274405 - DNA, 15 bp, Homo sapiens
caataaacatcacct

SEQ ID NO: 274406 - DNA, 15 bp, Homo sapiens
ccaataaacatcacc

SEQ ID NO: 274407 - DNA, 15 bp, Homo sapiens
cccaataaacatcac

SEQ ID NO: 274408 - DNA, 15 bp, Homo sapiens
tcccaataaacatca

SEQ ID NO: 274409 - DNA, 15 bp, Homo sapiens
atcccaataaacatc

SEQ ID NO: 274410 - DNA, 15 bp, Homo sapiens
tatcccaataaacat

SEQ ID NO: 274411 - DNA, 15 bp, Homo sapiens
ctatcccaataaaca

SEQ ID NO: 274412 - DNA, 15 bp, Homo sapiens
tctatcccaataaac

SEQ ID NO: 274413 - DNA, 15 bp, Homo sapiens
ctctatcccaataaa

SEQ ID NO: 274414 - DNA, 15 bp, Homo sapiens
cctctatcccaataa

SEQ ID NO: 274415 - DNA, 15 bp, Homo sapiens
tcctctatcccaata

SEQ ID NO: 274416 - DNA, 15 bp, Homo sapiens
atcctctatcccaat

SEQ ID NO: 274417 - DNA, 15 bp, Homo sapiens
catcctctatcccaa

SEQ ID NO: 274418 - DNA, 15 bp, Homo sapiens
ccatcctctatccca

SEQ ID NO: 274419 - DNA, 15 bp, Homo sapiens
cccatcctctatccc

SEQ ID NO: 274420 - DNA, 15 bp, Homo sapiens
acccatcctctatcc

SEQ ID NO: 274421 - DNA, 15 bp, Homo sapiens
aacccatcctctatc

SEQ ID NO: 274422 - DNA, 15 bp, Homo sapiens
taacccatcctctat

SEQ ID NO: 274423 - DNA, 15 bp, Homo sapiens
ttaacccatcctcta

SEQ ID NO: 274424 - DNA, 15 bp, Homo sapiens
cttaacccatcctct

SEQ ID NO: 274425 - DNA, 15 bp, Homo sapiens
tcttaacccatcctc

SEQ ID NO: 274426 - DNA, 15 bp, Homo sapiens
ctcttaacccatcct

SEQ ID NO: 274427 - DNA, 15 bp, Homo sapiens
gctcttaacccatcc

SEQ ID NO: 274428 - DNA, 15 bp, Homo sapiens
tgctcttaacccatc

SEQ ID NO: 274429 - DNA, 15 bp, Homo sapiens
ttgctcttaacccat

SEQ ID NO: 274430 - DNA, 15 bp, Homo sapiens
cttgctcttaaccca

SEQ ID NO: 274431 - DNA, 15 bp, Homo sapiens
ccttgctcttaaccc

SEQ ID NO: 274432 - DNA, 15 bp, Homo sapiens
tccttgctcttaacc

SEQ ID NO: 274433 - DNA, 15 bp, Homo sapiens
atccttgctcttaac

SEQ ID NO: 274434 - DNA, 15 bp, Homo sapiens
aatccttgctcttaa

SEQ ID NO: 274435 - DNA, 15 bp, Homo sapiens
taatccttgctctta

SEQ ID NO: 274436 - DNA, 15 bp, Homo sapiens
ttaatccttgctctt

SEQ ID NO: 274437 - DNA, 15 bp, Homo sapiens
cttaatccttgctct

SEQ ID NO: 274438 - DNA, 15 bp, Homo sapiens
tcttaatccttgctc

SEQ ID NO: 274439 - DNA, 15 bp, Homo sapiens
ctcttaatccttgct

SEQ ID NO: 274440 - DNA, 15 bp, Homo sapiens
actcttaatccttgc

SEQ ID NO: 274441 - DNA, 15 bp, Homo sapiens
gactcttaatccttg

SEQ ID NO: 274442 - DNA, 15 bp, Homo sapiens
tgactcttaatcctt

SEQ ID NO: 274443 - DNA, 15 bp, Homo sapiens
ttgactcttaatcct

SEQ ID NO: 274444 - DNA, 15 bp, Homo sapiens
tttgactcttaatcc

SEQ ID NO: 274445 - DNA, 15 bp, Homo sapiens
gtttgactcttaatc

SEQ ID NO: 274446 - DNA, 15 bp, Homo sapiens
tgtttgactcttaat

SEQ ID NO: 274447 - DNA, 15 bp, Homo sapiens
ctgtttgactcttaa

SEQ ID NO: 274448 - DNA, 15 bp, Homo sapiens
tctgtttgactctta

SEQ ID NO: 274449 - DNA, 15 bp, Homo sapiens
atctgtttgactctt

SEQ ID NO: 274450 - DNA, 15 bp, Homo sapiens
tatctgtttgactct

SEQ ID NO: 274451 - DNA, 15 bp, Homo sapiens
atatctgtttgactc

SEQ ID NO: 274452 - DNA, 15 bp, Homo sapiens
tatatctgtttgact

SEQ ID NO: 274453 - DNA, 15 bp, Homo sapiens
gtatatctgtttgac

SEQ ID NO: 274454 - DNA, 15 bp, Homo sapiens
ggtatatctgtttga

SEQ ID NO: 274455 - DNA, 15 bp, Homo sapiens
tggtatatctgtttg

SEQ ID NO: 274456 - DNA, 15 bp, Homo sapiens
atggtatatctgttt

SEQ ID NO: 274457 - DNA, 15 bp, Homo sapiens
catggtatatctgtt

SEQ ID NO: 274458 - DNA, 15 bp, Homo sapiens
acatggtatatctgt

SEQ ID NO: 274459 - DNA, 15 bp, Homo sapiens
gacatggtatatctg

SEQ ID NO: 274460 - DNA, 15 bp, Homo sapiens
ggacatggtatatct

SEQ ID NO: 274461 - DNA, 15 bp, Homo sapiens
cggacatggtatatc

SEQ ID NO: 274462 - DNA, 15 bp, Homo sapiens
tcggacatggtatat

SEQ ID NO: 274463 - DNA, 15 bp, Homo sapiens
ttcggacatggtata

SEQ ID NO: 274464 - DNA, 15 bp, Homo sapiens
gttcggacatggtat

SEQ ID NO: 274465 - DNA, 15 bp, Homo sapiens
agttcggacatggta

SEQ ID NO: 274466 - DNA, 15 bp, Homo sapiens
gagttcggacatggt

SEQ ID NO: 274467 - DNA, 15 bp, Homo sapiens
ggagttcggacatgg

SEQ ID NO: 274468 - DNA, 15 bp, Homo sapiens
tggagttcggacatg

SEQ ID NO: 274469 - DNA, 15 bp, Homo sapiens
atggagttcggacat

SEQ ID NO: 274470 - DNA, 15 bp, Homo sapiens
aatggagttcggaca

SEQ ID NO: 274471 - DNA, 15 bp, Homo sapiens
taatggagttcggac

SEQ ID NO: 274472 - DNA, 15 bp, Homo sapiens
ataatggagttcgga

SEQ ID NO: 274473 - DNA, 15 bp, Homo sapiens
gataatggagttcgg

SEQ ID NO: 274474 - DNA, 15 bp, Homo sapiens
agataatggagttcg

SEQ ID NO: 274475 - DNA, 15 bp, Homo sapiens
aagataatggagttc

SEQ ID NO: 274476 - DNA, 15 bp, Homo sapiens
caagataatggagtt

SEQ ID NO: 274477 - DNA, 15 bp, Homo sapiens
tcaagataatggagt

SEQ ID NO: 274478 - DNA, 15 bp, Homo sapiens
ttcaagataatggag

SEQ ID NO: 274479 - DNA, 15 bp, Homo sapiens
gttcaagataatgga

SEQ ID NO: 274480 - DNA, 15 bp, Homo sapiens
tgttcaagataatgg

SEQ ID NO: 274481 - DNA, 15 bp, Homo sapiens
atgttcaagataatg

SEQ ID NO: 274482 - DNA, 15 bp, Homo sapiens
catgttcaagataat

SEQ ID NO: 274483 - DNA, 15 bp, Homo sapiens
acatgttcaagataa

SEQ ID NO: 274484 - DNA, 15 bp, Homo sapiens
aacatgttcaagata

SEQ ID NO: 274485 - DNA, 15 bp, Homo sapiens
taacatgttcaagat

SEQ ID NO: 274486 - DNA, 15 bp, Homo sapiens
ataacatgttcaaga

SEQ ID NO: 274487 - DNA, 15 bp, Homo sapiens
gataacatgttcaag

SEQ ID NO: 274488 - DNA, 15 bp, Homo sapiens
agataacatgttcaa

SEQ ID NO: 274489 - DNA, 15 bp, Homo sapiens
tagataacatgttca

SEQ ID NO: 274490 - DNA, 15 bp, Homo sapiens
gtagataacatgttc

SEQ ID NO: 274491 - DNA, 15 bp, Homo sapiens
tgtagataacatgtt

SEQ ID NO: 274492 - DNA, 15 bp, Homo sapiens
ttgtagataacatgt

SEQ ID NO: 274493 - DNA, 15 bp, Homo sapiens
attgtagataacatg

SEQ ID NO: 274494 - DNA, 15 bp, Homo sapiens
aattgtagataacat

SEQ ID NO: 274495 - DNA, 15 bp, Homo sapiens
aaattgtagataaca

SEQ ID NO: 274496 - DNA, 15 bp, Homo sapiens
aaaattgtagataac

SEQ ID NO: 274497 - DNA, 15 bp, Homo sapiens
gaaaattgtagataa

SEQ ID NO: 274498 - DNA, 15 bp, Homo sapiens
tgaaaattgtagata

SEQ ID NO: 274499 - DNA, 15 bp, Homo sapiens
ttgaaaattgtagat

SEQ ID NO: 274500 - DNA, 15 bp, Homo sapiens
cttgaaaattgtaga

SEQ ID NO: 274501 - DNA, 15 bp, Homo sapiens
gcttgaaaattgtag

SEQ ID NO: 274502 - DNA, 15 bp, Homo sapiens
ggcttgaaaattgta

SEQ ID NO: 274503 - DNA, 15 bp, Homo sapiens
aggcttgaaaattgt

SEQ ID NO: 274504 - DNA, 15 bp, Homo sapiens
aaggcttgaaaattg

SEQ ID NO: 274505 - DNA, 15 bp, Homo sapiens
taaggcttgaaaatt

SEQ ID NO: 274506 - DNA, 15 bp, Homo sapiens
ctaaggcttgaaaat

SEQ ID NO: 274507 - DNA, 15 bp, Homo sapiens
actaaggcttgaaaa

SEQ ID NO: 274508 - DNA, 15 bp, Homo sapiens
aactaaggcttgaaa

SEQ ID NO: 274509 - DNA, 15 bp, Homo sapiens
aaactaaggcttgaa

SEQ ID NO: 274510 - DNA, 15 bp, Homo sapiens
aaaactaaggcttga

SEQ ID NO: 274511 - DNA, 15 bp, Homo sapiens
gaaaactaaggcttg

SEQ ID NO: 274512 - DNA, 15 bp, Homo sapiens
agaaaactaaggctt

SEQ ID NO: 274513 - DNA, 15 bp, Homo sapiens
aagaaaactaaggct

SEQ ID NO: 274514 - DNA, 15 bp, Homo sapiens
taagaaaactaaggc

SEQ ID NO: 274515 - DNA, 15 bp, Homo sapiens
gtaagaaaactaagg

SEQ ID NO: 274516 - DNA, 15 bp, Homo sapiens
ggtaagaaaactaag

SEQ ID NO: 274517 - DNA, 15 bp, Homo sapiens
aggtaagaaaactaa

SEQ ID NO: 274518 - DNA, 15 bp, Homo sapiens
caggtaagaaaacta

SEQ ID NO: 274519 - DNA, 15 bp, Homo sapiens
acaggtaagaaaact

SEQ ID NO: 274520 - DNA, 15 bp, Homo sapiens
tacaggtaagaaaac

SEQ ID NO: 274521 - DNA, 15 bp, Homo sapiens
ttacaggtaagaaaa

SEQ ID NO: 274522 - DNA, 15 bp, Homo sapiens
tttacaggtaagaaa

SEQ ID NO: 274523 - DNA, 15 bp, Homo sapiens
ttttacaggtaagaa

SEQ ID NO: 274524 - DNA, 15 bp, Homo sapiens
cttttacaggtaaga

SEQ ID NO: 274525 - DNA, 15 bp, Homo sapiens
ccttttacaggtaag

SEQ ID NO: 274526 - DNA, 15 bp, Homo sapiens
cccttttacaggtaa

SEQ ID NO: 274527 - DNA, 15 bp, Homo sapiens
tcccttttacaggta

SEQ ID NO: 274528 - DNA, 15 bp, Homo sapiens
gtcccttttacaggt

SEQ ID NO: 274529 - DNA, 15 bp, Homo sapiens
agtcccttttacagg

SEQ ID NO: 274530 - DNA, 15 bp, Homo sapiens
cagtcccttttacag

SEQ ID NO: 274531 - DNA, 15 bp, Homo sapiens
tcagtcccttttaca

SEQ ID NO: 274532 - DNA, 15 bp, Homo sapiens
gtcagtcccttttac

SEQ ID NO: 274533 - DNA, 15 bp, Homo sapiens
tgtcagtccctttta

SEQ ID NO: 274534 - DNA, 15 bp, Homo sapiens
ctgtcagtccctttt

SEQ ID NO: 274535 - DNA, 15 bp, Homo sapiens
actgtcagtcccttt

SEQ ID NO: 274536 - DNA, 15 bp, Homo sapiens
tactgtcagtccctt

SEQ ID NO: 274537 - DNA, 15 bp, Homo sapiens
ttactgtcagtccct

SEQ ID NO: 274538 - DNA, 15 bp, Homo sapiens
attactgtcagtccc

SEQ ID NO: 274539 - DNA, 15 bp, Homo sapiens
aattactgtcagtcc

SEQ ID NO: 274540 - DNA, 15 bp, Homo sapiens
aaattactgtcagtc

SEQ ID NO: 274541 - DNA, 15 bp, Homo sapiens
gaaattactgtcagt

SEQ ID NO: 274542 - DNA, 15 bp, Homo sapiens
agaaattactgtcag

SEQ ID NO: 274543 - DNA, 15 bp, Homo sapiens
cagaaattactgtca

SEQ ID NO: 274544 - DNA, 15 bp, Homo sapiens
ccagaaattactgtc

SEQ ID NO: 274545 - DNA, 15 bp, Homo sapiens
tccagaaattactgt

SEQ ID NO: 274546 - DNA, 15 bp, Homo sapiens
atccagaaattactg

SEQ ID NO: 274547 - DNA, 15 bp, Homo sapiens
gatccagaaattact

SEQ ID NO: 274548 - DNA, 15 bp, Homo sapiens
agatccagaaattac

SEQ ID NO: 274549 - DNA, 15 bp, Homo sapiens
aagatccagaaatta

SEQ ID NO: 274550 - DNA, 15 bp, Homo sapiens
caagatccagaaatt

SEQ ID NO: 274551 - DNA, 15 bp, Homo sapiens
ccaagatccagaaat

SEQ ID NO: 274552 - DNA, 15 bp, Homo sapiens
tccaagatccagaaa

SEQ ID NO: 274553 - DNA, 15 bp, Homo sapiens
ctccaagatccagaa

SEQ ID NO: 274554 - DNA, 15 bp, Homo sapiens
actccaagatccaga

SEQ ID NO: 274555 - DNA, 15 bp, Homo sapiens
aactccaagatccag

SEQ ID NO: 274556 - DNA, 15 bp, Homo sapiens
taactccaagatcca

SEQ ID NO: 274557 - DNA, 15 bp, Homo sapiens
ataactccaagatcc

SEQ ID NO: 274558 - DNA, 15 bp, Homo sapiens
cataactccaagatc

SEQ ID NO: 274559 - DNA, 15 bp, Homo sapiens
acataactccaagat

SEQ ID NO: 274560 - DNA, 15 bp, Homo sapiens
cacataactccaaga

SEQ ID NO: 274561 - DNA, 15 bp, Homo sapiens
gcacataactccaag

SEQ ID NO: 274562 - DNA, 15 bp, Homo sapiens
tgcacataactccaa

SEQ ID NO: 274563 - DNA, 15 bp, Homo sapiens
ctgcacataactcca

SEQ ID NO: 274564 - DNA, 15 bp, Homo sapiens
tctgcacataactcc

SEQ ID NO: 274565 - DNA, 15 bp, Homo sapiens
atctgcacataactc

SEQ ID NO: 274566 - DNA, 15 bp, Homo sapiens
aatctgcacataact

SEQ ID NO: 274567 - DNA, 15 bp, Homo sapiens
taatctgcacataac

SEQ ID NO: 274568 - DNA, 15 bp, Homo sapiens
ttaatctgcacataa

SEQ ID NO: 274569 - DNA, 15 bp, Homo sapiens
tttaatctgcacata

SEQ ID NO: 274570 - DNA, 15 bp, Homo sapiens
atttaatctgcacat

SEQ ID NO: 274571 - DNA, 15 bp, Homo sapiens
tatttaatctgcaca

SEQ ID NO: 274572 - DNA, 15 bp, Homo sapiens
ttatttaatctgcac

SEQ ID NO: 274573 - DNA, 15 bp, Homo sapiens
tttatttaatctgca

SEQ ID NO: 274574 - DNA, 15 bp, Homo sapiens
atttatttaatctgc

SEQ ID NO: 274575 - DNA, 15 bp, Homo sapiens
aatttatttaatctg

SEQ ID NO: 274576 - DNA, 15 bp, Homo sapiens
taatttatttaatct

SEQ ID NO: 274577 - DNA, 15 bp, Homo sapiens
ttaatttatttaatc

SEQ ID NO: 274578 - DNA, 15 bp, Homo sapiens
attaatttatttaat

SEQ ID NO: 274579 - DNA, 15 bp, Homo sapiens
gcattaatttattta

SEQ ID NO: 274580 - DNA, 15 bp, Homo sapiens
tgcattaatttattt

SEQ ID NO: 274581 - DNA, 15 bp, Homo sapiens
atgcattaatttatt

SEQ ID NO: 274582 - DNA, 15 bp, Homo sapiens
tatgcattaatttat

SEQ ID NO: 274583 - DNA, 15 bp, Homo sapiens
atatgcattaattta

SEQ ID NO: 274584 - DNA, 15 bp, Homo sapiens
tatatgcattaattt

SEQ ID NO: 274585 - DNA, 15 bp, Homo sapiens
ttatatgcattaatt

SEQ ID NO: 274586 - DNA, 15 bp, Homo sapiens
tttatatgcattaat

SEQ ID NO: 274587 - DNA, 15 bp, Homo sapiens
ctttatatgcattaa

SEQ ID NO: 274588 - DNA, 15 bp, Homo sapiens
gctttatatgcatta

SEQ ID NO: 274589 - DNA, 15 bp, Homo sapiens
agctttatatgcatt

SEQ ID NO: 274590 - DNA, 15 bp, Homo sapiens
gagctttatatgcat

SEQ ID NO: 274591 - DNA, 15 bp, Homo sapiens
agagctttatatgca

SEQ ID NO: 274592 - DNA, 15 bp, Homo sapiens
aagagctttatatgc

SEQ ID NO: 274593 - DNA, 15 bp, Homo sapiens
taagagctttatatg

SEQ ID NO: 274594 - DNA, 15 bp, Homo sapiens
ataagagctttatat

SEQ ID NO: 274595 - DNA, 15 bp, Homo sapiens
aataagagctttata

SEQ ID NO: 274596 - DNA, 15 bp, Homo sapiens
taataagagctttat

SEQ ID NO: 274597 - DNA, 15 bp, Homo sapiens
ctaataagagcttta

SEQ ID NO: 274598 - DNA, 15 bp, Homo sapiens
tctaataagagcttt

SEQ ID NO: 274599 - DNA, 15 bp, Homo sapiens
ctctaataagagctt

SEQ ID NO: 274600 - DNA, 15 bp, Homo sapiens
actctaataagagct

SEQ ID NO: 274601 - DNA, 15 bp, Homo sapiens
gactctaataagagc

SEQ ID NO: 274602 - DNA, 15 bp, Homo sapiens
tgactctaataagag

SEQ ID NO: 274603 - DNA, 15 bp, Homo sapiens
ttgactctaataaga

SEQ ID NO: 274604 - DNA, 15 bp, Homo sapiens
attgactctaataag

SEQ ID NO: 274605 - DNA, 15 bp, Homo sapiens
cattgactctaataa

SEQ ID NO: 274606 - DNA, 15 bp, Homo sapiens
tcattgactctaata

SEQ ID NO: 274607 - DNA, 15 bp, Homo sapiens
ctcattgactctaat

SEQ ID NO: 274608 - DNA, 15 bp, Homo sapiens
actcattgactctaa

SEQ ID NO: 274609 - DNA, 15 bp, Homo sapiens
tactcattgactcta

SEQ ID NO: 274610 - DNA, 15 bp, Homo sapiens
atactcattgactct

SEQ ID NO: 274611 - DNA, 15 bp, Homo sapiens
catactcattgactc

SEQ ID NO: 274612 - DNA, 15 bp, Homo sapiens
acatactcattgact

SEQ ID NO: 274613 - DNA, 15 bp, Homo sapiens
tacatactcattgac

SEQ ID NO: 274614 - DNA, 15 bp, Homo sapiens
atacatactcattga

SEQ ID NO: 274615 - DNA, 15 bp, Homo sapiens
tatacatactcattg

SEQ ID NO: 274616 - DNA, 15 bp, Homo sapiens
atatacatactcatt

SEQ ID NO: 274617 - DNA, 15 bp, Homo sapiens
aatatacatactcat

SEQ ID NO: 274618 - DNA, 15 bp, Homo sapiens
taatatacatactca

SEQ ID NO: 274619 - DNA, 15 bp, Homo sapiens
ctaatatacatactc

SEQ ID NO: 274620 - DNA, 15 bp, Homo sapiens
cctaatatacatact

SEQ ID NO: 274621 - DNA, 15 bp, Homo sapiens
acctaatatacatac

SEQ ID NO: 274622 - DNA, 15 bp, Homo sapiens
gacctaatatacata

SEQ ID NO: 274623 - DNA, 15 bp, Homo sapiens
agacctaatatacat

SEQ ID NO: 274624 - DNA, 15 bp, Homo sapiens
aagacctaatataca

SEQ ID NO: 274625 - DNA, 15 bp, Homo sapiens
caagacctaatatac

SEQ ID NO: 274626 - DNA, 15 bp, Homo sapiens
gcaagacctaatata

SEQ ID NO: 274627 - DNA, 15 bp, Homo sapiens
tgcaagacctaatat

SEQ ID NO: 274628 - DNA, 15 bp, Homo sapiens
ttgcaagacctaata

SEQ ID NO: 274629 - DNA, 15 bp, Homo sapiens
tttgcaagacctaat

SEQ ID NO: 274630 - DNA, 15 bp, Homo sapiens
gtttgcaagacctaa

SEQ ID NO: 274631 - DNA, 15 bp, Homo sapiens
tgtttgcaagaccta

SEQ ID NO: 274632 - DNA, 15 bp, Homo sapiens
ctgtttgcaagacct

SEQ ID NO: 274633 - DNA, 15 bp, Homo sapiens
tctgtttgcaagacc

SEQ ID NO: 274634 - DNA, 15 bp, Homo sapiens
ttctgtttgcaagac

SEQ ID NO: 274635 - DNA, 15 bp, Homo sapiens
attctgtttgcaaga

SEQ ID NO: 274636 - DNA, 15 bp, Homo sapiens
tattctgtttgcaag

SEQ ID NO: 274637 - DNA, 15 bp, Homo sapiens
ttattctgtttgcaa

SEQ ID NO: 274638 - DNA, 15 bp, Homo sapiens
attattctgtttgca

SEQ ID NO: 274639 - DNA, 15 bp, Homo sapiens
aattattctgtttgc

SEQ ID NO: 274640 - DNA, 15 bp, Homo sapiens
aaattattctgtttg

SEQ ID NO: 274641 - DNA, 15 bp, Homo sapiens
aaaattattctgttt

SEQ ID NO: 274642 - DNA, 15 bp, Homo sapiens
taaaattattctgtt

SEQ ID NO: 274643 - DNA, 15 bp, Homo sapiens
gtaaaattattctgt

SEQ ID NO: 274644 - DNA, 15 bp, Homo sapiens
agtaaaattattctg

SEQ ID NO: 274645 - DNA, 15 bp, Homo sapiens
aagtaaaattattct

SEQ ID NO: 274646 - DNA, 15 bp, Homo sapiens
taagtaaaattattc

SEQ ID NO: 274647 - DNA, 15 bp, Homo sapiens
ttaagtaaaattatt

SEQ ID NO: 274648 - DNA, 15 bp, Homo sapiens
cttaagtaaaattat

SEQ ID NO: 274649 - DNA, 15 bp, Homo sapiens
tcttaagtaaaatta

SEQ ID NO: 274650 - DNA, 15 bp, Homo sapiens
ttcttaagtaaaatt

SEQ ID NO: 274651 - DNA, 15 bp, Homo sapiens
tttcttaagtaaaat

SEQ ID NO: 274652 - DNA, 15 bp, Homo sapiens
atttcttaagtaaaa

SEQ ID NO: 274653 - DNA, 15 bp, Homo sapiens
tatttcttaagtaaa

SEQ ID NO: 274654 - DNA, 15 bp, Homo sapiens
gtatttcttaagtaa

SEQ ID NO: 274655 - DNA, 15 bp, Homo sapiens
ggtatttcttaagta

SEQ ID NO: 274656 - DNA, 15 bp, Homo sapiens
gggtatttcttaagt

SEQ ID NO: 274657 - DNA, 15 bp, Homo sapiens
ggggtatttcttaag

SEQ ID NO: 274658 - DNA, 15 bp, Homo sapiens
tggggtatttcttaa

SEQ ID NO: 274659 - DNA, 15 bp, Homo sapiens
ctggggtatttctta

SEQ ID NO: 274660 - DNA, 15 bp, Homo sapiens
tctggggtatttctt

SEQ ID NO: 274661 - DNA, 15 bp, Homo sapiens
ttctggggtatttct

SEQ ID NO: 274662 - DNA, 15 bp, Homo sapiens
tttctggggtatttc

SEQ ID NO: 274663 - DNA, 15 bp, Homo sapiens
ttttctggggtattt

SEQ ID NO: 274664 - DNA, 15 bp, Homo sapiens
attttctggggtatt

SEQ ID NO: 274665 - DNA, 15 bp, Homo sapiens
aattttctggggtat

SEQ ID NO: 274666 - DNA, 15 bp, Homo sapiens
aaattttctggggta

SEQ ID NO: 274667 - DNA, 15 bp, Homo sapiens
aaaattttctggggt

SEQ ID NO: 274668 - DNA, 15 bp, Homo sapiens
taaaattttctgggg

SEQ ID NO: 274669 - DNA, 15 bp, Homo sapiens
ataaaattttctggg

SEQ ID NO: 274670 - DNA, 15 bp, Homo sapiens
gataaaattttctgg

SEQ ID NO: 274671 - DNA, 15 bp, Homo sapiens
tgataaaattttctg

SEQ ID NO: 274672 - DNA, 15 bp, Homo sapiens
atgataaaattttct

SEQ ID NO: 274673 - DNA, 15 bp, Homo sapiens
aatgataaaattttc

SEQ ID NO: 274674 - DNA, 15 bp, Homo sapiens
caatgataaaatttt

SEQ ID NO: 274675 - DNA, 15 bp, Homo sapiens
tcaatgataaaattt

SEQ ID NO: 274676 - DNA, 15 bp, Homo sapiens
atcaatgataaaatt

SEQ ID NO: 274677 - DNA, 15 bp, Homo sapiens
catcaatgataaaat

SEQ ID NO: 274678 - DNA, 15 bp, Homo sapiens
acatcaatgataaaa

SEQ ID NO: 274679 - DNA, 15 bp, Homo sapiens
tacatcaatgataaa

SEQ ID NO: 274680 - DNA, 15 bp, Homo sapiens
atacatcaatgataa

SEQ ID NO: 274681 - DNA, 15 bp, Homo sapiens
aatacatcaatgata

SEQ ID NO: 274682 - DNA, 15 bp, Homo sapiens
aaatacatcaatgat

SEQ ID NO: 274683 - DNA, 15 bp, Homo sapiens
aaaatacatcaatga

SEQ ID NO: 274684 - DNA, 15 bp, Homo sapiens
aaaaatacatcaatg

SEQ ID NO: 274685 - DNA, 15 bp, Homo sapiens
aaaaaatacatcaat

SEQ ID NO: 274686 - DNA, 15 bp, Homo sapiens
aaaaaaatacatcaa

SEQ ID NO: 274687 - DNA, 15 bp, Homo sapiens
aaaaaaaatacatca

SEQ ID NO: 274688 - DNA, 15 bp, Homo sapiens
aaaaaaaaatacatc

SEQ ID NO: 274689 - DNA, 15 bp, Homo sapiens
taaaaaaaaatacat

SEQ ID NO: 274690 - DNA, 15 bp, Homo sapiens
ctaaaaaaaaataca

SEQ ID NO: 274691 - DNA, 15 bp, Homo sapiens
cctaaaaaaaaatac

SEQ ID NO: 274692 - DNA, 15 bp, Homo sapiens
tcctaaaaaaaaata

SEQ ID NO: 274693 - DNA, 15 bp, Homo sapiens
ctcctaaaaaaaaat

SEQ ID NO: 274694 - DNA, 15 bp, Homo sapiens
tctcctaaaaaaaaa

SEQ ID NO: 274695 - DNA, 15 bp, Homo sapiens
ttctcctaaaaaaaa

SEQ ID NO: 274696 - DNA, 15 bp, Homo sapiens
gttctcctaaaaaaa

SEQ ID NO: 274697 - DNA, 15 bp, Homo sapiens
agttctcctaaaaaa

SEQ ID NO: 274698 - DNA, 15 bp, Homo sapiens
aagttctcctaaaaa

SEQ ID NO: 274699 - DNA, 15 bp, Homo sapiens
taagttctcctaaaa

SEQ ID NO: 274700 - DNA, 15 bp, Homo sapiens
ctaagttctcctaaa

SEQ ID NO: 274701 - DNA, 15 bp, Homo sapiens
cctaagttctcctaa

SEQ ID NO: 274702 - DNA, 15 bp, Homo sapiens
tcctaagttctccta

SEQ ID NO: 274703 - DNA, 15 bp, Homo sapiens
atcctaagttctcct

SEQ ID NO: 274704 - DNA, 15 bp, Homo sapiens
tatcctaagttctcc

SEQ ID NO: 274705 - DNA, 15 bp, Homo sapiens
atatcctaagttctc

SEQ ID NO: 274706 - DNA, 15 bp, Homo sapiens
gatatcctaagttct

SEQ ID NO: 274707 - DNA, 15 bp, Homo sapiens
tgatatcctaagttc

SEQ ID NO: 274708 - DNA, 15 bp, Homo sapiens
ctgatatcctaagtt

SEQ ID NO: 274709 - DNA, 15 bp, Homo sapiens
actgatatcctaagt

SEQ ID NO: 274710 - DNA, 15 bp, Homo sapiens
aactgatatcctaag

SEQ ID NO: 274711 - DNA, 15 bp, Homo sapiens
taactgatatcctaa

SEQ ID NO: 274712 - DNA, 15 bp, Homo sapiens
ttaactgatatccta

SEQ ID NO: 274713 - DNA, 15 bp, Homo sapiens
tttaactgatatcct

SEQ ID NO: 274714 - DNA, 15 bp, Homo sapiens
ttttaactgatatcc

SEQ ID NO: 274715 - DNA, 15 bp, Homo sapiens
attttaactgatatc

SEQ ID NO: 274716 - DNA, 15 bp, Homo sapiens
cattttaactgatat

SEQ ID NO: 274717 - DNA, 15 bp, Homo sapiens
ccattttaactgata

SEQ ID NO: 274718 - DNA, 15 bp, Homo sapiens
accattttaactgat

SEQ ID NO: 274719 - DNA, 15 bp, Homo sapiens
aaccattttaactga

SEQ ID NO: 274720 - DNA, 15 bp, Homo sapiens
taaccattttaactg

SEQ ID NO: 274721 - DNA, 15 bp, Homo sapiens
gtaaccattttaact

SEQ ID NO: 274722 - DNA, 15 bp, Homo sapiens
tgtaaccattttaac

SEQ ID NO: 274723 - DNA, 15 bp, Homo sapiens
ttgtaaccattttaa

SEQ ID NO: 274724 - DNA, 15 bp, Homo sapiens
attgtaaccatttta

SEQ ID NO: 274725 - DNA, 15 bp, Homo sapiens
aattgtaaccatttt

SEQ ID NO: 274726 - DNA, 15 bp, Homo sapiens
aaattgtaaccattt

SEQ ID NO: 274727 - DNA, 15 bp, Homo sapiens
aaaattgtaaccatt

SEQ ID NO: 274728 - DNA, 15 bp, Homo sapiens
taaaattgtaaccat

SEQ ID NO: 274729 - DNA, 15 bp, Homo sapiens
ttaaaattgtaacca

SEQ ID NO: 274730 - DNA, 15 bp, Homo sapiens
tttaaaattgtaacc

SEQ ID NO: 274731 - DNA, 15 bp, Homo sapiens
atttaaaattgtaac

SEQ ID NO: 274732 - DNA, 15 bp, Homo sapiens
catttaaaattgtaa

SEQ ID NO: 274733 - DNA, 15 bp, Homo sapiens
gcatttaaaattgta

SEQ ID NO: 274734 - DNA, 15 bp, Homo sapiens
tgcatttaaaattgt

SEQ ID NO: 274735 - DNA, 15 bp, Homo sapiens
atgcatttaaaattg

SEQ ID NO: 274736 - DNA, 15 bp, Homo sapiens
aatgcatttaaaatt

SEQ ID NO: 274737 - DNA, 15 bp, Homo sapiens
caatgcatttaaaat

SEQ ID NO: 274738 - DNA, 15 bp, Homo sapiens
acaatgcatttaaaa

SEQ ID NO: 274739 - DNA, 15 bp, Homo sapiens
tacaatgcatttaaa

SEQ ID NO: 274740 - DNA, 15 bp, Homo sapiens
ctacaatgcatttaa

SEQ ID NO: 274741 - DNA, 15 bp, Homo sapiens
actacaatgcattta

SEQ ID NO: 274742 - DNA, 15 bp, Homo sapiens
cactacaatgcattt

SEQ ID NO: 274743 - DNA, 15 bp, Homo sapiens
tcactacaatgcatt

SEQ ID NO: 274744 - DNA, 15 bp, Homo sapiens
atcactacaatgcat

SEQ ID NO: 274745 - DNA, 15 bp, Homo sapiens
aatcactacaatgca

SEQ ID NO: 274746 - DNA, 15 bp, Homo sapiens
aaatcactacaatgc

SEQ ID NO: 274747 - DNA, 15 bp, Homo sapiens
aaaatcactacaatg

SEQ ID NO: 274748 - DNA, 15 bp, Homo sapiens
caaaatcactacaat

SEQ ID NO: 274749 - DNA, 15 bp, Homo sapiens
tcaaaatcactacaa

SEQ ID NO: 274750 - DNA, 15 bp, Homo sapiens
atcaaaatcactaca

SEQ ID NO: 274751 - DNA, 15 bp, Homo sapiens
catcaaaatcactac

SEQ ID NO: 274752 - DNA, 15 bp, Homo sapiens
acatcaaaatcacta

SEQ ID NO: 274753 - DNA, 15 bp, Homo sapiens
tacatcaaaatcact

SEQ ID NO: 274754 - DNA, 15 bp, Homo sapiens
ctacatcaaaatcac

SEQ ID NO: 274755 - DNA, 15 bp, Homo sapiens
actacatcaaaatca

SEQ ID NO: 274756 - DNA, 15 bp, Homo sapiens
tactacatcaaaatc

SEQ ID NO: 274757 - DNA, 15 bp, Homo sapiens
ttactacatcaaaat

SEQ ID NO: 274758 - DNA, 15 bp, Homo sapiens
attactacatcaaaa

SEQ ID NO: 274759 - DNA, 15 bp, Homo sapiens
cattactacatcaaa

SEQ ID NO: 274760 - DNA, 15 bp, Homo sapiens
acattactacatcaa

SEQ ID NO: 274761 - DNA, 15 bp, Homo sapiens
aacattactacatca

SEQ ID NO: 274762 - DNA, 15 bp, Homo sapiens
aaacattactacatc

SEQ ID NO: 274763 - DNA, 15 bp, Homo sapiens
caaacattactacat

SEQ ID NO: 274764 - DNA, 15 bp, Homo sapiens
acaaacattactaca

SEQ ID NO: 274765 - DNA, 15 bp, Homo sapiens
aacaaacattactac

SEQ ID NO: 274766 - DNA, 15 bp, Homo sapiens
taacaaacattacta

SEQ ID NO: 274767 - DNA, 15 bp, Homo sapiens
ttaacaaacattact

SEQ ID NO: 274768 - DNA, 15 bp, Homo sapiens
tttaacaaacattac

SEQ ID NO: 274769 - DNA, 15 bp, Homo sapiens
ttttaacaaacatta

SEQ ID NO: 274770 - DNA, 15 bp, Homo sapiens
attttaacaaacatt

SEQ ID NO: 274771 - DNA, 15 bp, Homo sapiens
aattttaacaaacat

SEQ ID NO: 274772 - DNA, 15 bp, Homo sapiens
gaattttaacaaaca

SEQ ID NO: 274773 - DNA, 15 bp, Homo sapiens
agaattttaacaaac

SEQ ID NO: 274774 - DNA, 15 bp, Homo sapiens
aagaattttaacaaa

SEQ ID NO: 274775 - DNA, 15 bp, Homo sapiens
taagaattttaacaa

SEQ ID NO: 274776 - DNA, 15 bp, Homo sapiens
ataagaattttaaca

SEQ ID NO: 274777 - DNA, 15 bp, Homo sapiens
aataagaattttaac

SEQ ID NO: 274778 - DNA, 15 bp, Homo sapiens
aaataagaattttaa

SEQ ID NO: 274779 - DNA, 15 bp, Homo sapiens
aaaataagaatttta

SEQ ID NO: 274780 - DNA, 15 bp, Homo sapiens
aaaaataagaatttt

SEQ ID NO: 274781 - DNA, 15 bp, Homo sapiens
taaaaataagaattt

SEQ ID NO: 274782 - DNA, 15 bp, Homo sapiens
ttaaaaataagaatt

SEQ ID NO: 274783 - DNA, 15 bp, Homo sapiens
cttaaaaataagaat

SEQ ID NO: 274784 - DNA, 15 bp, Homo sapiens
acttaaaaataagaa

SEQ ID NO: 274785 - DNA, 15 bp, Homo sapiens
tacttaaaaataaga

SEQ ID NO: 274786 - DNA, 15 bp, Homo sapiens
gtacttaaaaataag

SEQ ID NO: 274787 - DNA, 15 bp, Homo sapiens
agtacttaaaaataa

SEQ ID NO: 274788 - DNA, 15 bp, Homo sapiens
aagtacttaaaaata

SEQ ID NO: 274789 - DNA, 15 bp, Homo sapiens
aaagtacttaaaaat

SEQ ID NO: 274790 - DNA, 15 bp, Homo sapiens
taaagtacttaaaaa

SEQ ID NO: 274791 - DNA, 15 bp, Homo sapiens
ctaaagtacttaaaa

SEQ ID NO: 274792 - DNA, 15 bp, Homo sapiens
gctaaagtacttaaa

SEQ ID NO: 274793 - DNA, 15 bp, Homo sapiens
tgctaaagtacttaa

SEQ ID NO: 274794 - DNA, 15 bp, Homo sapiens
atgctaaagtactta

SEQ ID NO: 274795 - DNA, 15 bp, Homo sapiens
gatgctaaagtactt

SEQ ID NO: 274796 - DNA, 15 bp, Homo sapiens
tgatgctaaagtact

SEQ ID NO: 274797 - DNA, 15 bp, Homo sapiens
ctgatgctaaagtac

SEQ ID NO: 274798 - DNA, 15 bp, Homo sapiens
tctgatgctaaagta

SEQ ID NO: 274799 - DNA, 15 bp, Homo sapiens
ttctgatgctaaagt

SEQ ID NO: 274800 - DNA, 15 bp, Homo sapiens
tttctgatgctaaag

SEQ ID NO: 274801 - DNA, 15 bp, Homo sapiens
ttttctgatgctaaa

SEQ ID NO: 274802 - DNA, 15 bp, Homo sapiens
cttttctgatgctaa

SEQ ID NO: 274803 - DNA, 15 bp, Homo sapiens
acttttctgatgcta

SEQ ID NO: 274804 - DNA, 15 bp, Homo sapiens
aacttttctgatgct

SEQ ID NO: 274805 - DNA, 15 bp, Homo sapiens
caacttttctgatgc

SEQ ID NO: 274806 - DNA, 15 bp, Homo sapiens
acaacttttctgatg

SEQ ID NO: 274807 - DNA, 15 bp, Homo sapiens
aacaacttttctgat

SEQ ID NO: 274808 - DNA, 15 bp, Homo sapiens
aaacaacttttctga

SEQ ID NO: 274809 - DNA, 15 bp, Homo sapiens
taaacaacttttctg

SEQ ID NO: 274810 - DNA, 15 bp, Homo sapiens
ataaacaacttttct

SEQ ID NO: 274811 - DNA, 15 bp, Homo sapiens
cataaacaacttttc

SEQ ID NO: 274812 - DNA, 15 bp, Homo sapiens
gcataaacaactttt

SEQ ID NO: 274813 - DNA, 15 bp, Homo sapiens
tgcataaacaacttt

SEQ ID NO: 274814 - DNA, 15 bp, Homo sapiens
atgcataaacaactt

SEQ ID NO: 274815 - DNA, 15 bp, Homo sapiens
tatgcataaacaact

SEQ ID NO: 274816 - DNA, 15 bp, Homo sapiens
gtatgcataaacaac

SEQ ID NO: 274817 - DNA, 15 bp, Homo sapiens
tgtatgcataaacaa

SEQ ID NO: 274818 - DNA, 15 bp, Homo sapiens
atgtatgcataaaca

SEQ ID NO: 274819 - DNA, 15 bp, Homo sapiens
catgtatgcataaac

SEQ ID NO: 274820 - DNA, 15 bp, Homo sapiens
tcatgtatgcataaa

SEQ ID NO: 274821 - DNA, 15 bp, Homo sapiens
ttcatgtatgcataa

SEQ ID NO: 274822 - DNA, 15 bp, Homo sapiens
tttcatgtatgcata

SEQ ID NO: 274823 - DNA, 15 bp, Homo sapiens
ctttcatgtatgcat

SEQ ID NO: 274824 - DNA, 15 bp, Homo sapiens
gctttcatgtatgca

SEQ ID NO: 274825 - DNA, 15 bp, Homo sapiens
tgctttcatgtatgc

SEQ ID NO: 274826 - DNA, 15 bp, Homo sapiens
atgctttcatgtatg

SEQ ID NO: 274827 - DNA, 15 bp, Homo sapiens
tatgctttcatgtat

SEQ ID NO: 274828 - DNA, 15 bp, Homo sapiens
atatgctttcatgta

SEQ ID NO: 274829 - DNA, 15 bp, Homo sapiens
tatatgctttcatgt

SEQ ID NO: 274830 - DNA, 15 bp, Homo sapiens
atatatgctttcatg

SEQ ID NO: 274831 - DNA, 15 bp, Homo sapiens
aatatatgctttcat

SEQ ID NO: 274832 - DNA, 15 bp, Homo sapiens
taatatatgctttca

SEQ ID NO: 274833 - DNA, 15 bp, Homo sapiens
ttaatatatgctttc

SEQ ID NO: 274834 - DNA, 15 bp, Homo sapiens
attaatatatgcttt

SEQ ID NO: 274835 - DNA, 15 bp, Homo sapiens
gattaatatatgctt

SEQ ID NO: 274836 - DNA, 15 bp, Homo sapiens
ggattaatatatgct

SEQ ID NO: 274837 - DNA, 15 bp, Homo sapiens
gggattaatatatgc

SEQ ID NO: 274838 - DNA, 15 bp, Homo sapiens
agggattaatatatg

SEQ ID NO: 274839 - DNA, 15 bp, Homo sapiens
aagggattaatatat

SEQ ID NO: 274840 - DNA, 15 bp, Homo sapiens
aaagggattaatata

SEQ ID NO: 274841 - DNA, 15 bp, Homo sapiens
taaagggattaatat

SEQ ID NO: 274842 - DNA, 15 bp, Homo sapiens
ttaaagggattaata

SEQ ID NO: 274843 - DNA, 15 bp, Homo sapiens
tttaaagggattaat

SEQ ID NO: 274844 - DNA, 15 bp, Homo sapiens
ctttaaagggattaa

SEQ ID NO: 274845 - DNA, 15 bp, Homo sapiens
cctttaaagggatta

SEQ ID NO: 274846 - DNA, 15 bp, Homo sapiens
tcctttaaagggatt

SEQ ID NO: 274847 - DNA, 15 bp, Homo sapiens
ttcctttaaagggat

SEQ ID NO: 274848 - DNA, 15 bp, Homo sapiens
tttcctttaaaggga

SEQ ID NO: 274849 - DNA, 15 bp, Homo sapiens
ttttcctttaaaggg

SEQ ID NO: 274850 - DNA, 15 bp, Homo sapiens
cttttcctttaaagg

SEQ ID NO: 274851 - DNA, 15 bp, Homo sapiens
acttttcctttaaag

SEQ ID NO: 274852 - DNA, 15 bp, Homo sapiens
aacttttcctttaaa

SEQ ID NO: 274853 - DNA, 15 bp, Homo sapiens
aaacttttcctttaa

SEQ ID NO: 274854 - DNA, 15 bp, Homo sapiens
caaacttttccttta

SEQ ID NO: 274855 - DNA, 15 bp, Homo sapiens
acaaacttttccttt

SEQ ID NO: 274856 - DNA, 15 bp, Homo sapiens
cacaaacttttcctt

SEQ ID NO: 274857 - DNA, 15 bp, Homo sapiens
ccacaaacttttcct

SEQ ID NO: 274858 - DNA, 15 bp, Homo sapiens
accacaaacttttcc

SEQ ID NO: 274859 - DNA, 15 bp, Homo sapiens
taccacaaacttttc

SEQ ID NO: 274860 - DNA, 15 bp, Homo sapiens
ataccacaaactttt

SEQ ID NO: 274861 - DNA, 15 bp, Homo sapiens
aataccacaaacttt

SEQ ID NO: 274862 - DNA, 15 bp, Homo sapiens
aaataccacaaactt

SEQ ID NO: 274863 - DNA, 15 bp, Homo sapiens
aaaataccacaaact

SEQ ID NO: 274864 - DNA, 15 bp, Homo sapiens
caaaataccacaaac

SEQ ID NO: 274865 - DNA, 15 bp, Homo sapiens
acaaaataccacaaa

SEQ ID NO: 274866 - DNA, 15 bp, Homo sapiens
gacaaaataccacaa

SEQ ID NO: 274867 - DNA, 15 bp, Homo sapiens
agacaaaataccaca

SEQ ID NO: 274868 - DNA, 15 bp, Homo sapiens
tagacaaaataccac

SEQ ID NO: 274869 - DNA, 15 bp, Homo sapiens
ctagacaaaatacca

SEQ ID NO: 274870 - DNA, 15 bp, Homo sapiens
tctagacaaaatacc

SEQ ID NO: 274871 - DNA, 15 bp, Homo sapiens
ttctagacaaaatac

SEQ ID NO: 274872 - DNA, 15 bp, Homo sapiens
tttctagacaaaata

SEQ ID NO: 274873 - DNA, 15 bp, Homo sapiens
ttttctagacaaaat

SEQ ID NO: 274874 - DNA, 15 bp, Homo sapiens
cttttctagacaaaa

SEQ ID NO: 274875 - DNA, 15 bp, Homo sapiens
acttttctagacaaa

SEQ ID NO: 274876 - DNA, 15 bp, Homo sapiens
cacttttctagacaa

SEQ ID NO: 274877 - DNA, 15 bp, Homo sapiens
acacttttctagaca

SEQ ID NO: 274878 - DNA, 15 bp, Homo sapiens
aacacttttctagac

SEQ ID NO: 274879 - DNA, 15 bp, Homo sapiens
aaacacttttctaga

SEQ ID NO: 274880 - DNA, 15 bp, Homo sapiens
aaaacacttttctag

SEQ ID NO: 274881 - DNA, 15 bp, Homo sapiens
gaaaacacttttcta

SEQ ID NO: 274882 - DNA, 15 bp, Homo sapiens
agaaaacacttttct

SEQ ID NO: 274883 - DNA, 15 bp, Homo sapiens
aagaaaacacttttc

SEQ ID NO: 274884 - DNA, 15 bp, Homo sapiens
aaagaaaacactttt

SEQ ID NO: 274885 - DNA, 15 bp, Homo sapiens
aaaagaaaacacttt

SEQ ID NO: 274886 - DNA, 15 bp, Homo sapiens
aaaaagaaaacactt

SEQ ID NO: 274887 - DNA, 15 bp, Homo sapiens
aaaaaagaaaacact

SEQ ID NO: 274888 - DNA, 15 bp, Homo sapiens
aaaaaaagaaaacac

SEQ ID NO: 274889 - DNA, 15 bp, Homo sapiens
taaaaaaagaaaaca

SEQ ID NO: 274890 - DNA, 15 bp, Homo sapiens
ttaaaaaaagaaaac

SEQ ID NO: 274891 - DNA, 15 bp, Homo sapiens
attttaaaaaaagaa

SEQ ID NO: 274892 - DNA, 15 bp, Homo sapiens
tattttaaaaaaaga

SEQ ID NO: 274893 - DNA, 15 bp, Homo sapiens
ttattttaaaaaaag

SEQ ID NO: 274894 - DNA, 15 bp, Homo sapiens
tttattttaaaaaaa

SEQ ID NO: 274895 - DNA, 15 bp, Homo sapiens
atttattttaaaaaa

SEQ ID NO: 274896 - DNA, 15 bp, Homo sapiens
tatttattttaaaaa

SEQ ID NO: 274897 - DNA, 15 bp, Homo sapiens
atatttattttaaaa

SEQ ID NO: 274898 - DNA, 15 bp, Homo sapiens
aatatttattttaaa

SEQ ID NO: 274899 - DNA, 15 bp, Homo sapiens
aaatatttattttaa

SEQ ID NO: 274900 - DNA, 15 bp, Homo sapiens
taaatatttatttta

SEQ ID NO: 274901 - DNA, 15 bp, Homo sapiens
ctaaatatttatttt

SEQ ID NO: 274902 - DNA, 15 bp, Homo sapiens
actaaatatttattt

SEQ ID NO: 274903 - DNA, 15 bp, Homo sapiens
tactaaatatttatt

SEQ ID NO: 274904 - DNA, 15 bp, Homo sapiens
ttactaaatatttat

SEQ ID NO: 274905 - DNA, 15 bp, Homo sapiens
tttactaaatattta

SEQ ID NO: 274906 - DNA, 15 bp, Homo sapiens
ctttactaaatattt

SEQ ID NO: 274907 - DNA, 15 bp, Homo sapiens
actttactaaatatt

SEQ ID NO: 274908 - DNA, 15 bp, Homo sapiens
cactttactaaatat

SEQ ID NO: 274909 - DNA, 15 bp, Homo sapiens
acactttactaaata

SEQ ID NO: 274910 - DNA, 15 bp, Homo sapiens
tacactttactaaat

SEQ ID NO: 274911 - DNA, 15 bp, Homo sapiens
ttacactttactaaa

SEQ ID NO: 274912 - DNA, 15 bp, Homo sapiens
attacactttactaa

SEQ ID NO: 274913 - DNA, 15 bp, Homo sapiens
tattacactttacta

SEQ ID NO: 274914 - DNA, 15 bp, Homo sapiens
ttattacactttact

SEQ ID NO: 274915 - DNA, 15 bp, Homo sapiens
attattacactttac

SEQ ID NO: 274916 - DNA, 15 bp, Homo sapiens
tattattacacttta

SEQ ID NO: 274917 - DNA, 15 bp, Homo sapiens
ttattattacacttt

SEQ ID NO: 274918 - DNA, 15 bp, Homo sapiens
tttattattacactt

SEQ ID NO: 274919 - DNA, 15 bp, Homo sapiens
ctttattattacact

SEQ ID NO: 274920 - DNA, 15 bp, Homo sapiens
tctttattattacac

SEQ ID NO: 274921 - DNA, 15 bp, Homo sapiens
atctttattattaca

SEQ ID NO: 274922 - DNA, 15 bp, Homo sapiens
aatctttattattac

SEQ ID NO: 274923 - DNA, 15 bp, Homo sapiens
taatctttattatta

SEQ ID NO: 274924 - DNA, 15 bp, Homo sapiens
ctaatctttattatt

SEQ ID NO: 274925 - DNA, 15 bp, Homo sapiens
gctaatctttattat

SEQ ID NO: 274926 - DNA, 15 bp, Homo sapiens
agctaatctttatta

SEQ ID NO: 274927 - DNA, 15 bp, Homo sapiens
aagctaatctttatt

SEQ ID NO: 274928 - DNA, 15 bp, Homo sapiens
aaagctaatctttat

SEQ ID NO: 274929 - DNA, 15 bp, Homo sapiens
caaagctaatcttta

SEQ ID NO: 274930 - DNA, 15 bp, Homo sapiens
acaaagctaatcttt

SEQ ID NO: 274931 - DNA, 15 bp, Homo sapiens
aacaaagctaatctt

SEQ ID NO: 274932 - DNA, 15 bp, Homo sapiens
gaacaaagctaatct

SEQ ID NO: 274933 - DNA, 15 bp, Homo sapiens
tgaacaaagctaatc

SEQ ID NO: 274934 - DNA, 15 bp, Homo sapiens
atgaacaaagctaat

SEQ ID NO: 274935 - DNA, 15 bp, Homo sapiens
tatgaacaaagctaa

SEQ ID NO: 274936 - DNA, 15 bp, Homo sapiens
ttatgaacaaagcta

SEQ ID NO: 274937 - DNA, 15 bp, Homo sapiens
cttatgaacaaagct

SEQ ID NO: 274938 - DNA, 15 bp, Homo sapiens
ccttatgaacaaagc

SEQ ID NO: 274939 - DNA, 15 bp, Homo sapiens
accttatgaacaaag

SEQ ID NO: 274940 - DNA, 15 bp, Homo sapiens
aaccttatgaacaaa

SEQ ID NO: 274941 - DNA, 15 bp, Homo sapiens
taaccttatgaacaa

SEQ ID NO: 274942 - DNA, 15 bp, Homo sapiens
ctaaccttatgaaca

SEQ ID NO: 274943 - DNA, 15 bp, Homo sapiens
tctaaccttatgaac

SEQ ID NO: 274944 - DNA, 15 bp, Homo sapiens
atctaaccttatgaa

SEQ ID NO: 274945 - DNA, 15 bp, Homo sapiens
aatctaaccttatga

SEQ ID NO: 274946 - DNA, 15 bp, Homo sapiens
caatctaaccttatg

SEQ ID NO: 274947 - DNA, 15 bp, Homo sapiens
acaatctaaccttat

SEQ ID NO: 274948 - DNA, 15 bp, Homo sapiens
tacaatctaacctta

SEQ ID NO: 274949 - DNA, 15 bp, Homo sapiens
atacaatctaacctt

SEQ ID NO: 274950 - DNA, 15 bp, Homo sapiens
aatacaatctaacct

SEQ ID NO: 274951 - DNA, 15 bp, Homo sapiens
aaatacaatctaacc

SEQ ID NO: 274952 - DNA, 15 bp, Homo sapiens
taaatacaatctaac

SEQ ID NO: 274953 - DNA, 15 bp, Homo sapiens
ataaatacaatctaa

SEQ ID NO: 274954 - DNA, 15 bp, Homo sapiens
cataaatacaatcta

SEQ ID NO: 274955 - DNA, 15 bp, Homo sapiens
gcataaatacaatct

SEQ ID NO: 274956 - DNA, 15 bp, Homo sapiens
agcataaatacaatc

SEQ ID NO: 274957 - DNA, 15 bp, Homo sapiens
cagcataaatacaat

SEQ ID NO: 274958 - DNA, 15 bp, Homo sapiens
tcagcataaatacaa

SEQ ID NO: 274959 - DNA, 15 bp, Homo sapiens
atcagcataaataca

SEQ ID NO: 274960 - DNA, 15 bp, Homo sapiens
aatcagcataaatac

SEQ ID NO: 274961 - DNA, 15 bp, Homo sapiens
taatcagcataaata

SEQ ID NO: 274962 - DNA, 15 bp, Homo sapiens
ataatcagcataaat

SEQ ID NO: 274963 - DNA, 15 bp, Homo sapiens
tataatcagcataaa

SEQ ID NO: 274964 - DNA, 15 bp, Homo sapiens
ctataatcagcataa

SEQ ID NO: 274965 - DNA, 15 bp, Homo sapiens
gctataatcagcata

SEQ ID NO: 274966 - DNA, 15 bp, Homo sapiens
tgctataatcagcat

SEQ ID NO: 274967 - DNA, 15 bp, Homo sapiens
atgctataatcagca

SEQ ID NO: 274968 - DNA, 15 bp, Homo sapiens
tatgctataatcagc

SEQ ID NO: 274969 - DNA, 15 bp, Homo sapiens
atatgctataatcag

SEQ ID NO: 274970 - DNA, 15 bp, Homo sapiens
catatgctataatca

SEQ ID NO: 274971 - DNA, 15 bp, Homo sapiens
tcatatgctataatc

SEQ ID NO: 274972 - DNA, 15 bp, Homo sapiens
ttcatatgctataat

SEQ ID NO: 274973 - DNA, 15 bp, Homo sapiens
attcatatgctataa

SEQ ID NO: 274974 - DNA, 15 bp, Homo sapiens
tattcatatgctata

SEQ ID NO: 274975 - DNA, 15 bp, Homo sapiens
ctattcatatgctat

SEQ ID NO: 274976 - DNA, 15 bp, Homo sapiens
cctattcatatgcta

SEQ ID NO: 274977 - DNA, 15 bp, Homo sapiens
tcctattcatatgct

SEQ ID NO: 274978 - DNA, 15 bp, Homo sapiens
gtcctattcatatgc

SEQ ID NO: 274979 - DNA, 15 bp, Homo sapiens
agtcctattcatatg

SEQ ID NO: 274980 - DNA, 15 bp, Homo sapiens
aagtcctattcatat

SEQ ID NO: 274981 - DNA, 15 bp, Homo sapiens
aaagtcctattcata

SEQ ID NO: 274982 - DNA, 15 bp, Homo sapiens
gaaagtcctattcat

SEQ ID NO: 274983 - DNA, 15 bp, Homo sapiens
ggaaagtcctattca

SEQ ID NO: 274984 - DNA, 15 bp, Homo sapiens
tggaaagtcctattc

SEQ ID NO: 274985 - DNA, 15 bp, Homo sapiens
atggaaagtcctatt

SEQ ID NO: 274986 - DNA, 15 bp, Homo sapiens
aatggaaagtcctat

SEQ ID NO: 274987 - DNA, 15 bp, Homo sapiens
taatggaaagtccta

SEQ ID NO: 274988 - DNA, 15 bp, Homo sapiens
ttaatggaaagtcct

SEQ ID NO: 274989 - DNA, 15 bp, Homo sapiens
cttaatggaaagtcc

SEQ ID NO: 274990 - DNA, 15 bp, Homo sapiens
tcttaatggaaagtc

SEQ ID NO: 274991 - DNA, 15 bp, Homo sapiens
ttcttaatggaaagt

SEQ ID NO: 274992 - DNA, 15 bp, Homo sapiens
tttcttaatggaaag

SEQ ID NO: 274993 - DNA, 15 bp, Homo sapiens
atttcttaatggaaa

SEQ ID NO: 274994 - DNA, 15 bp, Homo sapiens
aatttcttaatggaa

SEQ ID NO: 274995 - DNA, 15 bp, Homo sapiens
caatttcttaatgga

SEQ ID NO: 274996 - DNA, 15 bp, Homo sapiens
ccaatttcttaatgg

SEQ ID NO: 274997 - DNA, 15 bp, Homo sapiens
gccaatttcttaatg

SEQ ID NO: 274998 - DNA, 15 bp, Homo sapiens
agccaatttcttaat

SEQ ID NO: 274999 - DNA, 15 bp, Homo sapiens
tagccaatttcttaa

SEQ ID NO: 275000 - DNA, 15 bp, Homo sapiens
ttagccaatttctta

SEQ ID NO: 275001 - DNA, 15 bp, Homo sapiens
cttagccaatttctt

SEQ ID NO: 275002 - DNA, 15 bp, Homo sapiens
ccttagccaatttct

SEQ ID NO: 275003 - DNA, 15 bp, Homo sapiens
accttagccaatttc

SEQ ID NO: 275004 - DNA, 15 bp, Homo sapiens
caccttagccaattt

SEQ ID NO: 275005 - DNA, 15 bp, Homo sapiens
tcaccttagccaatt

SEQ ID NO: 275006 - DNA, 15 bp, Homo sapiens
atcaccttagccaat

SEQ ID NO: 275007 - DNA, 15 bp, Homo sapiens
catcaccttagccaa

SEQ ID NO: 275008 - DNA, 15 bp, Homo sapiens
acatcaccttagcca

SEQ ID NO: 275009 - DNA, 15 bp, Homo sapiens
aacatcaccttagcc

SEQ ID NO: 275010 - DNA, 15 bp, Homo sapiens
gaacatcaccttagc

SEQ ID NO: 275011 - DNA, 15 bp, Homo sapiens
tgaacatcaccttag

SEQ ID NO: 275012 - DNA, 15 bp, Homo sapiens
atgaacatcacctta

SEQ ID NO: 275013 - DNA, 15 bp, Homo sapiens
tatgaacatcacctt

SEQ ID NO: 275014 - DNA, 15 bp, Homo sapiens
atatgaacatcacct

SEQ ID NO: 275015 - DNA, 15 bp, Homo sapiens
aatatgaacatcacc

SEQ ID NO: 275016 - DNA, 15 bp, Homo sapiens
caatatgaacatcac

SEQ ID NO: 275017 - DNA, 15 bp, Homo sapiens
acaatatgaacatca

SEQ ID NO: 275018 - DNA, 15 bp, Homo sapiens
cacaatatgaacatc

SEQ ID NO: 275019 - DNA, 15 bp, Homo sapiens
tcacaatatgaacat

SEQ ID NO: 275020 - DNA, 15 bp, Homo sapiens
gtcacaatatgaaca

SEQ ID NO: 275021 - DNA, 15 bp, Homo sapiens
agtcacaatatgaac

SEQ ID NO: 275022 - DNA, 15 bp, Homo sapiens
aagtcacaatatgaa

SEQ ID NO: 275023 - DNA, 15 bp, Homo sapiens
taagtcacaatatga

SEQ ID NO: 275024 - DNA, 15 bp, Homo sapiens
ttaagtcacaatatg

SEQ ID NO: 275025 - DNA, 15 bp, Homo sapiens
cttaagtcacaatat

SEQ ID NO: 275026 - DNA, 15 bp, Homo sapiens
ccttaagtcacaata

SEQ ID NO: 275027 - DNA, 15 bp, Homo sapiens
accttaagtcacaat

SEQ ID NO: 275028 - DNA, 15 bp, Homo sapiens
caccttaagtcacaa

SEQ ID NO: 275029 - DNA, 15 bp, Homo sapiens
ttcaccttaagtcac

SEQ ID NO: 275030 - DNA, 15 bp, Homo sapiens
attcaccttaagtca

SEQ ID NO: 275031 - DNA, 15 bp, Homo sapiens
gattcaccttaagtc

SEQ ID NO: 275032 - DNA, 15 bp, Homo sapiens
tgattcaccttaagt

SEQ ID NO: 275033 - DNA, 15 bp, Homo sapiens
ctgattcaccttaag

SEQ ID NO: 275034 - DNA, 15 bp, Homo sapiens
gctgattcaccttaa

SEQ ID NO: 275035 - DNA, 15 bp, Homo sapiens
agctgattcacctta

SEQ ID NO: 275036 - DNA, 15 bp, Homo sapiens
cagctgattcacctt

SEQ ID NO: 275037 - DNA, 15 bp, Homo sapiens
acagctgattcacct

SEQ ID NO: 275038 - DNA, 15 bp, Homo sapiens
aacagctgattcacc

SEQ ID NO: 275039 - DNA, 15 bp, Homo sapiens
taacagctgattcac

SEQ ID NO: 275040 - DNA, 15 bp, Homo sapiens
ctaacagctgattca

SEQ ID NO: 275041 - DNA, 15 bp, Homo sapiens
tctaacagctgattc

SEQ ID NO: 275042 - DNA, 15 bp, Homo sapiens
ttctaacagctgatt

SEQ ID NO: 275043 - DNA, 15 bp, Homo sapiens
attctaacagctgat

SEQ ID NO: 275044 - DNA, 15 bp, Homo sapiens
aattctaacagctga

SEQ ID NO: 275045 - DNA, 15 bp, Homo sapiens
aaattctaacagctg

SEQ ID NO: 275046 - DNA, 15 bp, Homo sapiens
aaaattctaacagct

SEQ ID NO: 275047 - DNA, 15 bp, Homo sapiens
caaaattctaacagc

SEQ ID NO: 275048 - DNA, 15 bp, Homo sapiens
ccaaaattctaacag

SEQ ID NO: 275049 - DNA, 15 bp, Homo sapiens
accaaaattctaaca

SEQ ID NO: 275050 - DNA, 15 bp, Homo sapiens
aaccaaaattctaac

SEQ ID NO: 275051 - DNA, 15 bp, Homo sapiens
aaaccaaaattctaa

SEQ ID NO: 275052 - DNA, 15 bp, Homo sapiens
taaaccaaaattcta

SEQ ID NO: 275053 - DNA, 15 bp, Homo sapiens
gtaaaccaaaattct

SEQ ID NO: 275054 - DNA, 15 bp, Homo sapiens
agtaaaccaaaattc

SEQ ID NO: 275055 - DNA, 15 bp, Homo sapiens
aagtaaaccaaaatt

SEQ ID NO: 275056 - DNA, 15 bp, Homo sapiens
aaagtaaaccaaaat

SEQ ID NO: 275057 - DNA, 15 bp, Homo sapiens
gaaagtaaaccaaaa

SEQ ID NO: 275058 - DNA, 15 bp, Homo sapiens
agaaagtaaaccaaa

SEQ ID NO: 275059 - DNA, 15 bp, Homo sapiens
cagaaagtaaaccaa

SEQ ID NO: 275060 - DNA, 15 bp, Homo sapiens
gcagaaagtaaacca

SEQ ID NO: 275061 - DNA, 15 bp, Homo sapiens
tgcagaaagtaaacc

SEQ ID NO: 275062 - DNA, 15 bp, Homo sapiens
atgcagaaagtaaac

SEQ ID NO: 275063 - DNA, 15 bp, Homo sapiens
gatgcagaaagtaaa

SEQ ID NO: 275064 - DNA, 15 bp, Homo sapiens
agatgcagaaagtaa

SEQ ID NO: 275065 - DNA, 15 bp, Homo sapiens
aagatgcagaaagta

SEQ ID NO: 275066 - DNA, 15 bp, Homo sapiens
caagatgcagaaagt

SEQ ID NO: 275067 - DNA, 15 bp, Homo sapiens
tcaagatgcagaaag

SEQ ID NO: 275068 - DNA, 15 bp, Homo sapiens
atcaagatgcagaaa

SEQ ID NO: 275069 - DNA, 15 bp, Homo sapiens
aatcaagatgcagaa

SEQ ID NO: 275070 - DNA, 15 bp, Homo sapiens
caatcaagatgcaga

SEQ ID NO: 275071 - DNA, 15 bp, Homo sapiens
ccaatcaagatgcag

SEQ ID NO: 275072 - DNA, 15 bp, Homo sapiens
accaatcaagatgca

SEQ ID NO: 275073 - DNA, 15 bp, Homo sapiens
taccaatcaagatgc

SEQ ID NO: 275074 - DNA, 15 bp, Homo sapiens
ctaccaatcaagatg

SEQ ID NO: 275075 - DNA, 15 bp, Homo sapiens
actaccaatcaagat

SEQ ID NO: 275076 - DNA, 15 bp, Homo sapiens
tactaccaatcaaga

SEQ ID NO: 275077 - DNA, 15 bp, Homo sapiens
atactaccaatcaag

SEQ ID NO: 275078 - DNA, 15 bp, Homo sapiens
catactaccaatcaa

SEQ ID NO: 275079 - DNA, 15 bp, Homo sapiens
ccatactaccaatca

SEQ ID NO: 275080 - DNA, 15 bp, Homo sapiens
accatactaccaatc

SEQ ID NO: 275081 - DNA, 15 bp, Homo sapiens
taccatactaccaat

SEQ ID NO: 275082 - DNA, 15 bp, Homo sapiens
ctaccatactaccaa

SEQ ID NO: 275083 - DNA, 15 bp, Homo sapiens
tctaccatactacca

SEQ ID NO: 275084 - DNA, 15 bp, Homo sapiens
ttctaccatactacc

SEQ ID NO: 275085 - DNA, 15 bp, Homo sapiens
attctaccatactac

SEQ ID NO: 275086 - DNA, 15 bp, Homo sapiens
cattctaccatacta

SEQ ID NO: 275087 - DNA, 15 bp, Homo sapiens
ccattctaccatact

SEQ ID NO: 275088 - DNA, 15 bp, Homo sapiens
tccattctaccatac

SEQ ID NO: 275089 - DNA, 15 bp, Homo sapiens
ttccattctaccata

SEQ ID NO: 275090 - DNA, 15 bp, Homo sapiens
tttccattctaccat

SEQ ID NO: 275091 - DNA, 15 bp, Homo sapiens
ttttccattctacca

SEQ ID NO: 275092 - DNA, 15 bp, Homo sapiens
attttccattctacc

SEQ ID NO: 275093 - DNA, 15 bp, Homo sapiens
cattttccattctac

SEQ ID NO: 275094 - DNA, 15 bp, Homo sapiens
gcattttccattcta

SEQ ID NO: 275095 - DNA, 15 bp, Homo sapiens
ggcattttccattct

SEQ ID NO: 275096 - DNA, 15 bp, Homo sapiens
aggcattttccattc

SEQ ID NO: 275097 - DNA, 15 bp, Homo sapiens
aaggcattttccatt

SEQ ID NO: 275098 - DNA, 15 bp, Homo sapiens
caaggcattttccat

SEQ ID NO: 275099 - DNA, 15 bp, Homo sapiens
ccaaggcattttcca

SEQ ID NO: 275100 - DNA, 15 bp, Homo sapiens
tccaaggcattttcc

SEQ ID NO: 275101 - DNA, 15 bp, Homo sapiens
gtccaaggcattttc

SEQ ID NO: 275102 - DNA, 15 bp, Homo sapiens
ggtccaaggcatttt

SEQ ID NO: 275103 - DNA, 15 bp, Homo sapiens
aggtccaaggcattt

SEQ ID NO: 275104 - DNA, 15 bp, Homo sapiens
gaggtccaaggcatt

SEQ ID NO: 275105 - DNA, 15 bp, Homo sapiens
tgaggtccaaggcat

SEQ ID NO: 275106 - DNA, 15 bp, Homo sapiens
ttgaggtccaaggca

SEQ ID NO: 275107 - DNA, 15 bp, Homo sapiens
cttgaggtccaaggc

SEQ ID NO: 275108 - DNA, 15 bp, Homo sapiens
ccttgaggtccaagg

SEQ ID NO: 275109 - DNA, 15 bp, Homo sapiens
gccttgaggtccaag

SEQ ID NO: 275110 - DNA, 15 bp, Homo sapiens
tgccttgaggtccaa

SEQ ID NO: 275111 - DNA, 15 bp, Homo sapiens
ctgccttgaggtcca

SEQ ID NO: 275112 - DNA, 15 bp, Homo sapiens
cctgccttgaggtcc

SEQ ID NO: 275113 - DNA, 15 bp, Homo sapiens
tcctgccttgaggtc

SEQ ID NO: 275114 - DNA, 15 bp, Homo sapiens
ttcctgccttgaggt

SEQ ID NO: 275115 - DNA, 15 bp, Homo sapiens
tttcctgccttgagg

SEQ ID NO: 275116 - DNA, 15 bp, Homo sapiens
gtttcctgccttgag

SEQ ID NO: 275117 - DNA, 15 bp, Homo sapiens
agtttcctgccttga

SEQ ID NO: 275118 - DNA, 15 bp, Homo sapiens
aagtttcctgccttg

SEQ ID NO: 275119 - DNA, 15 bp, Homo sapiens
aaagtttcctgcctt

SEQ ID NO: 275120 - DNA, 15 bp, Homo sapiens
caaagtttcctgcct

SEQ ID NO: 275121 - DNA, 15 bp, Homo sapiens
ccaaagtttcctgcc

SEQ ID NO: 275122 - DNA, 15 bp, Homo sapiens
accaaagtttcctgc

SEQ ID NO: 275123 - DNA, 15 bp, Homo sapiens
aaccaaagtttcctg

SEQ ID NO: 275124 - DNA, 15 bp, Homo sapiens
caaccaaagtttcct

SEQ ID NO: 275125 - DNA, 15 bp, Homo sapiens
acaaccaaagtttcc

SEQ ID NO: 275126 - DNA, 15 bp, Homo sapiens
tacaaccaaagtttc

SEQ ID NO: 275127 - DNA, 15 bp, Homo sapiens
ttacaaccaaagttt

SEQ ID NO: 275128 - DNA, 15 bp, Homo sapiens
attacaaccaaagtt

SEQ ID NO: 275129 - DNA, 15 bp, Homo sapiens
aattacaaccaaagt

SEQ ID NO: 275130 - DNA, 15 bp, Homo sapiens
taattacaaccaaag

SEQ ID NO: 275131 - DNA, 15 bp, Homo sapiens
ataattacaaccaaa

SEQ ID NO: 275132 - DNA, 15 bp, Homo sapiens
tataattacaaccaa

SEQ ID NO: 275133 - DNA, 15 bp, Homo sapiens
atataattacaacca

SEQ ID NO: 275134 - DNA, 15 bp, Homo sapiens
aatataattacaacc

SEQ ID NO: 275135 - DNA, 15 bp, Homo sapiens
caatataattacaac

SEQ ID NO: 275136 - DNA, 15 bp, Homo sapiens
acaatataattacaa

SEQ ID NO: 275137 - DNA, 15 bp, Homo sapiens
tacaatataattaca

SEQ ID NO: 275138 - DNA, 15 bp, Homo sapiens
ctacaatataattac

SEQ ID NO: 275139 - DNA, 15 bp, Homo sapiens
gctacaatataatta

SEQ ID NO: 275140 - DNA, 15 bp, Homo sapiens
agctacaatataatt

SEQ ID NO: 275141 - DNA, 15 bp, Homo sapiens
tagctacaatataat

SEQ ID NO: 275142 - DNA, 15 bp, Homo sapiens
atagctacaatataa

SEQ ID NO: 275143 - DNA, 15 bp, Homo sapiens
tatagctacaatata

SEQ ID NO: 275144 - DNA, 15 bp, Homo sapiens
atatagctacaatat

SEQ ID NO: 275145 - DNA, 15 bp, Homo sapiens
catatagctacaata

SEQ ID NO: 275146 - DNA, 15 bp, Homo sapiens
tcatatagctacaat

SEQ ID NO: 275147 - DNA, 15 bp, Homo sapiens
atcatatagctacaa

SEQ ID NO: 275148 - DNA, 15 bp, Homo sapiens
aatcatatagctaca

SEQ ID NO: 275149 - DNA, 15 bp, Homo sapiens
aaatcatatagctac

SEQ ID NO: 275150 - DNA, 15 bp, Homo sapiens
aaaatcatatagcta

SEQ ID NO: 275151 - DNA, 15 bp, Homo sapiens
taaaatcatatagct

SEQ ID NO: 275152 - DNA, 15 bp, Homo sapiens
ctaaaatcatatagc

SEQ ID NO: 275153 - DNA, 15 bp, Homo sapiens
cctaaaatcatatag

SEQ ID NO: 275154 - DNA, 15 bp, Homo sapiens
gcctaaaatcatata

SEQ ID NO: 275155 - DNA, 15 bp, Homo sapiens
tgcctaaaatcatat

SEQ ID NO: 275156 - DNA, 15 bp, Homo sapiens
ttgcctaaaatcata

SEQ ID NO: 275157 - DNA, 15 bp, Homo sapiens
tttgcctaaaatcat

SEQ ID NO: 275158 - DNA, 15 bp, Homo sapiens
atttgcctaaaatca

SEQ ID NO: 275159 - DNA, 15 bp, Homo sapiens
aatttgcctaaaatc

SEQ ID NO: 275160 - DNA, 15 bp, Homo sapiens
caatttgcctaaaat

SEQ ID NO: 275161 - DNA, 15 bp, Homo sapiens
ccaatttgcctaaaa

SEQ ID NO: 275162 - DNA, 15 bp, Homo sapiens
accaatttgcctaaa

SEQ ID NO: 275163 - DNA, 15 bp, Homo sapiens
aaccaatttgcctaa

SEQ ID NO: 275164 - DNA, 15 bp, Homo sapiens
taaccaatttgccta

SEQ ID NO: 275165 - DNA, 15 bp, Homo sapiens
ttaaccaatttgcct

SEQ ID NO: 275166 - DNA, 15 bp, Homo sapiens
attaaccaatttgcc

SEQ ID NO: 275167 - DNA, 15 bp, Homo sapiens
aattaaccaatttgc

SEQ ID NO: 275168 - DNA, 15 bp, Homo sapiens
gaattaaccaatttg

SEQ ID NO: 275169 - DNA, 15 bp, Homo sapiens
agaattaaccaattt

SEQ ID NO: 275170 - DNA, 15 bp, Homo sapiens
cagaattaaccaatt

SEQ ID NO: 275171 - DNA, 15 bp, Homo sapiens
acagaattaaccaat

SEQ ID NO: 275172 - DNA, 15 bp, Homo sapiens
cacagaattaaccaa

SEQ ID NO: 275173 - DNA, 15 bp, Homo sapiens
tcacagaattaacca

SEQ ID NO: 275174 - DNA, 15 bp, Homo sapiens
ctcacagaattaacc

SEQ ID NO: 275175 - DNA, 15 bp, Homo sapiens
actcacagaattaac

SEQ ID NO: 275176 - DNA, 15 bp, Homo sapiens
gactcacagaattaa

SEQ ID NO: 275177 - DNA, 15 bp, Homo sapiens
agactcacagaatta

SEQ ID NO: 275178 - DNA, 15 bp, Homo sapiens
gagactcacagaatt

SEQ ID NO: 275179 - DNA, 15 bp, Homo sapiens
tgagactcacagaat

SEQ ID NO: 275180 - DNA, 15 bp, Homo sapiens
ctgagactcacagaa

SEQ ID NO: 275181 - DNA, 15 bp, Homo sapiens
actgagactcacaga

SEQ ID NO: 275182 - DNA, 15 bp, Homo sapiens
aactgagactcacag

SEQ ID NO: 275183 - DNA, 15 bp, Homo sapiens
aaactgagactcaca

SEQ ID NO: 275184 - DNA, 15 bp, Homo sapiens
caaactgagactcac

SEQ ID NO: 275185 - DNA, 15 bp, Homo sapiens
gcaaactgagactca

SEQ ID NO: 275186 - DNA, 15 bp, Homo sapiens
agcaaactgagactc

SEQ ID NO: 275187 - DNA, 15 bp, Homo sapiens
gagcaaactgagact

SEQ ID NO: 275188 - DNA, 15 bp, Homo sapiens
tgagcaaactgagac

SEQ ID NO: 275189 - DNA, 15 bp, Homo sapiens
gtgagcaaactgaga

SEQ ID NO: 275190 - DNA, 15 bp, Homo sapiens
ggtgagcaaactgag

SEQ ID NO: 275191 - DNA, 15 bp, Homo sapiens
aggtgagcaaactga

SEQ ID NO: 275192 - DNA, 15 bp, Homo sapiens
caggtgagcaaactg

SEQ ID NO: 275193 - DNA, 15 bp, Homo sapiens
acaggtgagcaaact

SEQ ID NO: 275194 - DNA, 15 bp, Homo sapiens
tacaggtgagcaaac

SEQ ID NO: 275195 - DNA, 15 bp, Homo sapiens
ttacaggtgagcaaa

SEQ ID NO: 275196 - DNA, 15 bp, Homo sapiens
cttacaggtgagcaa

SEQ ID NO: 275197 - DNA, 15 bp, Homo sapiens
ccttacaggtgagca

SEQ ID NO: 275198 - DNA, 15 bp, Homo sapiens
gccttacaggtgagc

SEQ ID NO: 275199 - DNA, 15 bp, Homo sapiens
tgccttacaggtgag

SEQ ID NO: 275200 - DNA, 15 bp, Homo sapiens
ctgccttacaggtga

SEQ ID NO: 275201 - DNA, 15 bp, Homo sapiens
tctgccttacaggtg

SEQ ID NO: 275202 - DNA, 15 bp, Homo sapiens
ttctgccttacaggt

SEQ ID NO: 275203 - DNA, 15 bp, Homo sapiens
tttctgccttacagg

SEQ ID NO: 275204 - DNA, 15 bp, Homo sapiens
atttctgccttacag

SEQ ID NO: 275205 - DNA, 15 bp, Homo sapiens
tatttctgccttaca

SEQ ID NO: 275206 - DNA, 15 bp, Homo sapiens
ttatttctgccttac

SEQ ID NO: 275207 - DNA, 15 bp, Homo sapiens
attatttctgcctta

SEQ ID NO: 275208 - DNA, 15 bp, Homo sapiens
cattatttctgcctt

SEQ ID NO: 275209 - DNA, 15 bp, Homo sapiens
gcattatttctgcct

SEQ ID NO: 275210 - DNA, 15 bp, Homo sapiens
ggcattatttctgcc

SEQ ID NO: 275211 - DNA, 15 bp, Homo sapiens
aggcattatttctgc

SEQ ID NO: 275212 - DNA, 15 bp, Homo sapiens
caggcattatttctg

SEQ ID NO: 275213 - DNA, 15 bp, Homo sapiens
tcaggcattatttct

SEQ ID NO: 275214 - DNA, 15 bp, Homo sapiens
ttcaggcattatttc

SEQ ID NO: 275215 - DNA, 15 bp, Homo sapiens
attcaggcattattt

SEQ ID NO: 275216 - DNA, 15 bp, Homo sapiens
cattcaggcattatt

SEQ ID NO: 275217 - DNA, 15 bp, Homo sapiens
acattcaggcattat

SEQ ID NO: 275218 - DNA, 15 bp, Homo sapiens
cacattcaggcatta

SEQ ID NO: 275219 - DNA, 15 bp, Homo sapiens
tcacattcaggcatt

SEQ ID NO: 275220 - DNA, 15 bp, Homo sapiens
ttcacattcaggcat

SEQ ID NO: 275221 - DNA, 15 bp, Homo sapiens
gttcacattcaggca

SEQ ID NO: 275222 - DNA, 15 bp, Homo sapiens
ggttcacattcaggc

SEQ ID NO: 275223 - DNA, 15 bp, Homo sapiens
aggttcacattcagg

SEQ ID NO: 275224 - DNA, 15 bp, Homo sapiens
gaggttcacattcag

SEQ ID NO: 275225 - DNA, 15 bp, Homo sapiens
tgaggttcacattca

SEQ ID NO: 275226 - DNA, 15 bp, Homo sapiens
atgaggttcacattc

SEQ ID NO: 275227 - DNA, 15 bp, Homo sapiens
tatgaggttcacatt

SEQ ID NO: 275228 - DNA, 15 bp, Homo sapiens
ctatgaggttcacat

SEQ ID NO: 275229 - DNA, 15 bp, Homo sapiens
cctatgaggttcaca

SEQ ID NO: 275230 - DNA, 15 bp, Homo sapiens
gcctatgaggttcac

SEQ ID NO: 275231 - DNA, 15 bp, Homo sapiens
agcctatgaggttca

SEQ ID NO: 275232 - DNA, 15 bp, Homo sapiens
aagcctatgaggttc

SEQ ID NO: 275233 - DNA, 15 bp, Homo sapiens
aaagcctatgaggtt

SEQ ID NO: 275234 - DNA, 15 bp, Homo sapiens
aaaagcctatgaggt

SEQ ID NO: 275235 - DNA, 15 bp, Homo sapiens
aaaaagcctatgagg

SEQ ID NO: 275236 - DNA, 15 bp, Homo sapiens
caaaaagcctatgag

SEQ ID NO: 275237 - DNA, 15 bp, Homo sapiens
acaaaaagcctatga

SEQ ID NO: 275238 - DNA, 15 bp, Homo sapiens
aacaaaaagcctatg

SEQ ID NO: 275239 - DNA, 15 bp, Homo sapiens
taacaaaaagcctat

SEQ ID NO: 275240 - DNA, 15 bp, Homo sapiens
ataacaaaaagccta

SEQ ID NO: 275241 - DNA, 15 bp, Homo sapiens
tataacaaaaagcct

SEQ ID NO: 275242 - DNA, 15 bp, Homo sapiens
gtataacaaaaagcc

SEQ ID NO: 275243 - DNA, 15 bp, Homo sapiens
tgtataacaaaaagc

SEQ ID NO: 275244 - DNA, 15 bp, Homo sapiens
atgtataacaaaaag

SEQ ID NO: 275245 - DNA, 15 bp, Homo sapiens
tatgtataacaaaaa

SEQ ID NO: 275246 - DNA, 15 bp, Homo sapiens
gtatgtataacaaaa

SEQ ID NO: 275247 - DNA, 15 bp, Homo sapiens
tgtatgtataacaaa

SEQ ID NO: 275248 - DNA, 15 bp, Homo sapiens
atgtatgtataacaa

SEQ ID NO: 275249 - DNA, 15 bp, Homo sapiens
tatgtatgtataaca

SEQ ID NO: 275250 - DNA, 15 bp, Homo sapiens
atatgtatgtataac

SEQ ID NO: 275251 - DNA, 15 bp, Homo sapiens
tatatgtatgtataa

SEQ ID NO: 275252 - DNA, 15 bp, Homo sapiens
atatatgtatgtata

SEQ ID NO: 275253 - DNA, 15 bp, Homo sapiens
tatatatgtatgtat

SEQ ID NO: 275254 - DNA, 15 bp, Homo sapiens
atatatatgtatgta

SEQ ID NO: 275255 - DNA, 15 bp, Homo sapiens
catatatatgtatgt

SEQ ID NO: 275256 - DNA, 15 bp, Homo sapiens
acatatatatgtatg

SEQ ID NO: 275257 - DNA, 15 bp, Homo sapiens
tacatatatatgtat

SEQ ID NO: 275258 - DNA, 15 bp, Homo sapiens
atacatatatatgta

SEQ ID NO: 275259 - DNA, 15 bp, Homo sapiens
tatacatatatatgt

SEQ ID NO: 275260 - DNA, 15 bp, Homo sapiens
atatacatatatatg

SEQ ID NO: 275261 - DNA, 15 bp, Homo sapiens
catatacatatatat

SEQ ID NO: 275262 - DNA, 15 bp, Homo sapiens
tcatatacatatata

SEQ ID NO: 275263 - DNA, 15 bp, Homo sapiens
ttcatatacatatat

SEQ ID NO: 275264 - DNA, 15 bp, Homo sapiens
tttcatatacatata

SEQ ID NO: 275265 - DNA, 15 bp, Homo sapiens
atttcatatacatat

SEQ ID NO: 275266 - DNA, 15 bp, Homo sapiens
catttcatatacata

SEQ ID NO: 275267 - DNA, 15 bp, Homo sapiens
acatttcatatacat

SEQ ID NO: 275268 - DNA, 15 bp, Homo sapiens
tacatttcatataca

SEQ ID NO: 275269 - DNA, 15 bp, Homo sapiens
atacatttcatatac

SEQ ID NO: 275270 - DNA, 15 bp, Homo sapiens
catacatttcatata

SEQ ID NO: 275271 - DNA, 15 bp, Homo sapiens
tcatacatttcatat

SEQ ID NO: 275272 - DNA, 15 bp, Homo sapiens
atcatacatttcata

SEQ ID NO: 275273 - DNA, 15 bp, Homo sapiens
tatcatacatttcat

SEQ ID NO: 275274 - DNA, 15 bp, Homo sapiens
atatcatacatttca

SEQ ID NO: 275275 - DNA, 15 bp, Homo sapiens
tatatcatacatttc

SEQ ID NO: 275276 - DNA, 15 bp, Homo sapiens
gtatatcatacattt

SEQ ID NO: 275277 - DNA, 15 bp, Homo sapiens
tgtatatcatacatt

SEQ ID NO: 275278 - DNA, 15 bp, Homo sapiens
atgtatatcatacat

SEQ ID NO: 275279 - DNA, 15 bp, Homo sapiens
tatgtatatcataca

SEQ ID NO: 275280 - DNA, 15 bp, Homo sapiens
atatgtatatcatac

SEQ ID NO: 275281 - DNA, 15 bp, Homo sapiens
gatatgtatatcata

SEQ ID NO: 275282 - DNA, 15 bp, Homo sapiens
agatatgtatatcat

SEQ ID NO: 275283 - DNA, 15 bp, Homo sapiens
gagatatgtatatca

SEQ ID NO: 275284 - DNA, 15 bp, Homo sapiens
tgagatatgtatatc

SEQ ID NO: 275285 - DNA, 15 bp, Homo sapiens
ttgagatatgtatat

SEQ ID NO: 275286 - DNA, 15 bp, Homo sapiens
tttgagatatgtata

SEQ ID NO: 275287 - DNA, 15 bp, Homo sapiens
ctttgagatatgtat

SEQ ID NO: 275288 - DNA, 15 bp, Homo sapiens
tctttgagatatgta

SEQ ID NO: 275289 - DNA, 15 bp, Homo sapiens
ctctttgagatatgt

SEQ ID NO: 275290 - DNA, 15 bp, Homo sapiens
gctctttgagatatg

SEQ ID NO: 275291 - DNA, 15 bp, Homo sapiens
agctctttgagatat

SEQ ID NO: 275292 - DNA, 15 bp, Homo sapiens
aagctctttgagata

SEQ ID NO: 275293 - DNA, 15 bp, Homo sapiens
aaagctctttgagat

SEQ ID NO: 275294 - DNA, 15 bp, Homo sapiens
caaagctctttgaga

SEQ ID NO: 275295 - DNA, 15 bp, Homo sapiens
ccaaagctctttgag

SEQ ID NO: 275296 - DNA, 15 bp, Homo sapiens
cccaaagctctttga

SEQ ID NO: 275297 - DNA, 15 bp, Homo sapiens
tcccaaagctctttg

SEQ ID NO: 275298 - DNA, 15 bp, Homo sapiens
atcccaaagctcttt

SEQ ID NO: 275299 - DNA, 15 bp, Homo sapiens
tatcccaaagctctt

SEQ ID NO: 275300 - DNA, 15 bp, Homo sapiens
atatcccaaagctct

SEQ ID NO: 275301 - DNA, 15 bp, Homo sapiens
tatatcccaaagctc

SEQ ID NO: 275302 - DNA, 15 bp, Homo sapiens
atatatcccaaagct

SEQ ID NO: 275303 - DNA, 15 bp, Homo sapiens
aatatatcccaaagc

SEQ ID NO: 275304 - DNA, 15 bp, Homo sapiens
caatatatcccaaag

SEQ ID NO: 275305 - DNA, 15 bp, Homo sapiens
gcaatatatcccaaa

SEQ ID NO: 275306 - DNA, 15 bp, Homo sapiens
agcaatatatcccaa

SEQ ID NO: 275307 - DNA, 15 bp, Homo sapiens
gagcaatatatccca

SEQ ID NO: 275308 - DNA, 15 bp, Homo sapiens
agagcaatatatccc

SEQ ID NO: 275309 - DNA, 15 bp, Homo sapiens
aagagcaatatatcc

SEQ ID NO: 275310 - DNA, 15 bp, Homo sapiens
caagagcaatatatc

SEQ ID NO: 275311 - DNA, 15 bp, Homo sapiens
tcaagagcaatatat

SEQ ID NO: 275312 - DNA, 15 bp, Homo sapiens
atcaagagcaatata

SEQ ID NO: 275313 - DNA, 15 bp, Homo sapiens
tatcaagagcaatat

SEQ ID NO: 275314 - DNA, 15 bp, Homo sapiens
ctatcaagagcaata

SEQ ID NO: 275315 - DNA, 15 bp, Homo sapiens
tctatcaagagcaat

SEQ ID NO: 275316 - DNA, 15 bp, Homo sapiens
ttctatcaagagcaa

SEQ ID NO: 275317 - DNA, 15 bp, Homo sapiens
gttctatcaagagca

SEQ ID NO: 275318 - DNA, 15 bp, Homo sapiens
ggttctatcaagagc

SEQ ID NO: 275319 - DNA, 15 bp, Homo sapiens
tggttctatcaagag

SEQ ID NO: 275320 - DNA, 15 bp, Homo sapiens
gtggttctatcaaga

SEQ ID NO: 275321 - DNA, 15 bp, Homo sapiens
agtggttctatcaag

SEQ ID NO: 275322 - DNA, 15 bp, Homo sapiens
aagtggttctatcaa

SEQ ID NO: 275323 - DNA, 15 bp, Homo sapiens
taagtggttctatca

SEQ ID NO: 275324 - DNA, 15 bp, Homo sapiens
gtaagtggttctatc

SEQ ID NO: 275325 - DNA, 15 bp, Homo sapiens
agtaagtggttctat

SEQ ID NO: 275326 - DNA, 15 bp, Homo sapiens
aagtaagtggttcta

SEQ ID NO: 275327 - DNA, 15 bp, Homo sapiens
taagtaagtggttct

SEQ ID NO: 275328 - DNA, 15 bp, Homo sapiens
ataagtaagtggttc

SEQ ID NO: 275329 - DNA, 15 bp, Homo sapiens
aataagtaagtggtt

SEQ ID NO: 275330 - DNA, 15 bp, Homo sapiens
aaataagtaagtggt

SEQ ID NO: 275331 - DNA, 15 bp, Homo sapiens
aaaataagtaagtgg

SEQ ID NO: 275332 - DNA, 15 bp, Homo sapiens
aaaaataagtaagtg

SEQ ID NO: 275333 - DNA, 15 bp, Homo sapiens
caaaaataagtaagt

SEQ ID NO: 275334 - DNA, 15 bp, Homo sapiens
acaaaaataagtaag

SEQ ID NO: 275335 - DNA, 15 bp, Homo sapiens
cacaaaaataagtaa

SEQ ID NO: 275336 - DNA, 15 bp, Homo sapiens
tcacaaaaataagta

SEQ ID NO: 275337 - DNA, 15 bp, Homo sapiens
atcacaaaaataagt

SEQ ID NO: 275338 - DNA, 15 bp, Homo sapiens
tatcacaaaaataag

SEQ ID NO: 275339 - DNA, 15 bp, Homo sapiens
atatcacaaaaataa

SEQ ID NO: 275340 - DNA, 15 bp, Homo sapiens
catatcacaaaaata

SEQ ID NO: 275341 - DNA, 15 bp, Homo sapiens
ccatatcacaaaaat

SEQ ID NO: 275342 - DNA, 15 bp, Homo sapiens
accatatcacaaaaa

SEQ ID NO: 275343 - DNA, 15 bp, Homo sapiens
caccatatcacaaaa

SEQ ID NO: 275344 - DNA, 15 bp, Homo sapiens
ccaccatatcacaaa

SEQ ID NO: 275345 - DNA, 15 bp, Homo sapiens
accaccatatcacaa

SEQ ID NO: 275346 - DNA, 15 bp, Homo sapiens
aaccaccatatcaca

SEQ ID NO: 275347 - DNA, 15 bp, Homo sapiens
taaccaccatatcac

SEQ ID NO: 275348 - DNA, 15 bp, Homo sapiens
ataaccaccatatca

SEQ ID NO: 275349 - DNA, 15 bp, Homo sapiens
tataaccaccatatc

SEQ ID NO: 275350 - DNA, 15 bp, Homo sapiens
atataaccaccatat

SEQ ID NO: 275351 - DNA, 15 bp, Homo sapiens
aatataaccaccata

SEQ ID NO: 275352 - DNA, 15 bp, Homo sapiens
aaatataaccaccat

SEQ ID NO: 275353 - DNA, 15 bp, Homo sapiens
aaaatataaccacca

SEQ ID NO: 275354 - DNA, 15 bp, Homo sapiens
taaaatataaccacc

SEQ ID NO: 275355 - DNA, 15 bp, Homo sapiens
ttaaaatataaccac

SEQ ID NO: 275356 - DNA, 15 bp, Homo sapiens
tttaaaatataacca

SEQ ID NO: 275357 - DNA, 15 bp, Homo sapiens
atttaaaatataacc

SEQ ID NO: 275358 - DNA, 15 bp, Homo sapiens
tatttaaaatataac

SEQ ID NO: 275359 - DNA, 15 bp, Homo sapiens
ttatttaaaatataa

SEQ ID NO: 275360 - DNA, 15 bp, Homo sapiens
tttatttaaaatata

SEQ ID NO: 275361 - DNA, 15 bp, Homo sapiens
atttatttaaaatat

SEQ ID NO: 275362 - DNA, 15 bp, Homo sapiens
tatttatttaaaata

SEQ ID NO: 275363 - DNA, 15 bp, Homo sapiens
gtatttatttaaaat

SEQ ID NO: 275364 - DNA, 15 bp, Homo sapiens
tgtatttatttaaaa

SEQ ID NO: 275365 - DNA, 15 bp, Homo sapiens
ctgtatttatttaaa

SEQ ID NO: 275366 - DNA, 15 bp, Homo sapiens
actgtatttatttaa

SEQ ID NO: 275367 - DNA, 15 bp, Homo sapiens
gactgtatttattta

SEQ ID NO: 275368 - DNA, 15 bp, Homo sapiens
tgactgtatttattt

SEQ ID NO: 275369 - DNA, 15 bp, Homo sapiens
atgactgtatttatt

SEQ ID NO: 275370 - DNA, 15 bp, Homo sapiens
catgactgtatttat

SEQ ID NO: 275371 - DNA, 15 bp, Homo sapiens
acatgactgtattta

SEQ ID NO: 275372 - DNA, 15 bp, Homo sapiens
cacatgactgtattt

SEQ ID NO: 275373 - DNA, 15 bp, Homo sapiens
acacatgactgtatt

SEQ ID NO: 275374 - DNA, 15 bp, Homo sapiens
aacacatgactgtat

SEQ ID NO: 275375 - DNA, 15 bp, Homo sapiens
caacacatgactgta

SEQ ID NO: 275376 - DNA, 15 bp, Homo sapiens
gcaacacatgactgt

SEQ ID NO: 275377 - DNA, 15 bp, Homo sapiens
agcaacacatgactg

SEQ ID NO: 275378 - DNA, 15 bp, Homo sapiens
aagcaacacatgact

SEQ ID NO: 275379 - DNA, 15 bp, Homo sapiens
taagcaacacatgac

SEQ ID NO: 275380 - DNA, 15 bp, Homo sapiens
ttaagcaacacatga

SEQ ID NO: 275381 - DNA, 15 bp, Homo sapiens
gttaagcaacacatg

SEQ ID NO: 275382 - DNA, 15 bp, Homo sapiens
tgttaagcaacacat

SEQ ID NO: 275383 - DNA, 15 bp, Homo sapiens
ttgttaagcaacaca

SEQ ID NO: 275384 - DNA, 15 bp, Homo sapiens
attgttaagcaacac

SEQ ID NO: 275385 - DNA, 15 bp, Homo sapiens
cattgttaagcaaca

SEQ ID NO: 275386 - DNA, 15 bp, Homo sapiens
ccattgttaagcaac

SEQ ID NO: 275387 - DNA, 15 bp, Homo sapiens
cccattgttaagcaa

SEQ ID NO: 275388 - DNA, 15 bp, Homo sapiens
tcccattgttaagca

SEQ ID NO: 275389 - DNA, 15 bp, Homo sapiens
ttcccattgttaagc

SEQ ID NO: 275390 - DNA, 15 bp, Homo sapiens
gttcccattgttaag

SEQ ID NO: 275391 - DNA, 15 bp, Homo sapiens
tgttcccattgttaa

SEQ ID NO: 275392 - DNA, 15 bp, Homo sapiens
gtgttcccattgtta

SEQ ID NO: 275393 - DNA, 15 bp, Homo sapiens
tgtgttcccattgtt

SEQ ID NO: 275394 - DNA, 15 bp, Homo sapiens
atgtgttcccattgt

SEQ ID NO: 275395 - DNA, 15 bp, Homo sapiens
gatgtgttcccattg

SEQ ID NO: 275396 - DNA, 15 bp, Homo sapiens
agatgtgttcccatt

SEQ ID NO: 275397 - DNA, 15 bp, Homo sapiens
cagatgtgttcccat

SEQ ID NO: 275398 - DNA, 15 bp, Homo sapiens
tcagatgtgttccca

SEQ ID NO: 275399 - DNA, 15 bp, Homo sapiens
ctcagatgtgttccc

SEQ ID NO: 275400 - DNA, 15 bp, Homo sapiens
tctcagatgtgttcc

SEQ ID NO: 275401 - DNA, 15 bp, Homo sapiens
ttctcagatgtgttc

SEQ ID NO: 275402 - DNA, 15 bp, Homo sapiens
tttctcagatgtgtt

SEQ ID NO: 275403 - DNA, 15 bp, Homo sapiens
atttctcagatgtgt

SEQ ID NO: 275404 - DNA, 15 bp, Homo sapiens
catttctcagatgtg

SEQ ID NO: 275405 - DNA, 15 bp, Homo sapiens
gcatttctcagatgt

SEQ ID NO: 275406 - DNA, 15 bp, Homo sapiens
tgcatttctcagatg

SEQ ID NO: 275407 - DNA, 15 bp, Homo sapiens
atgcatttctcagat

SEQ ID NO: 275408 - DNA, 15 bp, Homo sapiens
gatgcatttctcaga

SEQ ID NO: 275409 - DNA, 15 bp, Homo sapiens
tgatgcatttctcag

SEQ ID NO: 275410 - DNA, 15 bp, Homo sapiens
atgatgcatttctca

SEQ ID NO: 275411 - DNA, 15 bp, Homo sapiens
aatgatgcatttctc

SEQ ID NO: 275412 - DNA, 15 bp, Homo sapiens
taatgatgcatttct

SEQ ID NO: 275413 - DNA, 15 bp, Homo sapiens
ctaatgatgcatttc

SEQ ID NO: 275414 - DNA, 15 bp, Homo sapiens
cctaatgatgcattt

SEQ ID NO: 275415 - DNA, 15 bp, Homo sapiens
acctaatgatgcatt

SEQ ID NO: 275416 - DNA, 15 bp, Homo sapiens
cacctaatgatgcat

SEQ ID NO: 275417 - DNA, 15 bp, Homo sapiens
tcacctaatgatgca

SEQ ID NO: 275418 - DNA, 15 bp, Homo sapiens
atcacctaatgatgc

SEQ ID NO: 275419 - DNA, 15 bp, Homo sapiens
aatcacctaatgatg

SEQ ID NO: 275420 - DNA, 15 bp, Homo sapiens
aaatcacctaatgat

SEQ ID NO: 275421 - DNA, 15 bp, Homo sapiens
gaaatcacctaatga

SEQ ID NO: 275422 - DNA, 15 bp, Homo sapiens
tgaaatcacctaatg

SEQ ID NO: 275423 - DNA, 15 bp, Homo sapiens
atgaaatcacctaat

SEQ ID NO: 275424 - DNA, 15 bp, Homo sapiens
gatgaaatcacctaa

SEQ ID NO: 275425 - DNA, 15 bp, Homo sapiens
cgatgaaatcaccta

SEQ ID NO: 275426 - DNA, 15 bp, Homo sapiens
acgatgaaatcacct

SEQ ID NO: 275427 - DNA, 15 bp, Homo sapiens
aacgatgaaatcacc

SEQ ID NO: 275428 - DNA, 15 bp, Homo sapiens
caacgatgaaatcac

SEQ ID NO: 275429 - DNA, 15 bp, Homo sapiens
acaacgatgaaatca

SEQ ID NO: 275430 - DNA, 15 bp, Homo sapiens
cacaacgatgaaatc

SEQ ID NO: 275431 - DNA, 15 bp, Homo sapiens
acacaacgatgaaat

SEQ ID NO: 275432 - DNA, 15 bp, Homo sapiens
cacacaacgatgaaa

SEQ ID NO: 275433 - DNA, 15 bp, Homo sapiens
tcacacaacgatgaa

SEQ ID NO: 275434 - DNA, 15 bp, Homo sapiens
ttcacacaacgatga

SEQ ID NO: 275435 - DNA, 15 bp, Homo sapiens
gttcacacaacgatg

SEQ ID NO: 275436 - DNA, 15 bp, Homo sapiens
tgttcacacaacgat

SEQ ID NO: 275437 - DNA, 15 bp, Homo sapiens
atgttcacacaacga

SEQ ID NO: 275438 - DNA, 15 bp, Homo sapiens
gatgttcacacaacg

SEQ ID NO: 275439 - DNA, 15 bp, Homo sapiens
tgatgttcacacaac

SEQ ID NO: 275440 - DNA, 15 bp, Homo sapiens
atgatgttcacacaa

SEQ ID NO: 275441 - DNA, 15 bp, Homo sapiens
tatgatgttcacaca

SEQ ID NO: 275442 - DNA, 15 bp, Homo sapiens
ctatgatgttcacac

SEQ ID NO: 275443 - DNA, 15 bp, Homo sapiens
gctatgatgttcaca

SEQ ID NO: 275444 - DNA, 15 bp, Homo sapiens
tgctatgatgttcac

SEQ ID NO: 275445 - DNA, 15 bp, Homo sapiens
atgctatgatgttca

SEQ ID NO: 275446 - DNA, 15 bp, Homo sapiens
catgctatgatgttc

SEQ ID NO: 275447 - DNA, 15 bp, Homo sapiens
acatgctatgatgtt

SEQ ID NO: 275448 - DNA, 15 bp, Homo sapiens
tacatgctatgatgt

SEQ ID NO: 275449 - DNA, 15 bp, Homo sapiens
gtacatgctatgatg

SEQ ID NO: 275450 - DNA, 15 bp, Homo sapiens
agtacatgctatgat

SEQ ID NO: 275451 - DNA, 15 bp, Homo sapiens
aagtacatgctatga

SEQ ID NO: 275452 - DNA, 15 bp, Homo sapiens
taagtacatgctatg

SEQ ID NO: 275453 - DNA, 15 bp, Homo sapiens
gtaagtacatgctat

SEQ ID NO: 275454 - DNA, 15 bp, Homo sapiens
tgtaagtacatgcta

SEQ ID NO: 275455 - DNA, 15 bp, Homo sapiens
gtgtaagtacatgct

SEQ ID NO: 275456 - DNA, 15 bp, Homo sapiens
tgtgtaagtacatgc

SEQ ID NO: 275457 - DNA, 15 bp, Homo sapiens
ttgtgtaagtacatg

SEQ ID NO: 275458 - DNA, 15 bp, Homo sapiens
tttgtgtaagtacat

SEQ ID NO: 275459 - DNA, 15 bp, Homo sapiens
gtttgtgtaagtaca

SEQ ID NO: 275460 - DNA, 15 bp, Homo sapiens
ggtttgtgtaagtac

SEQ ID NO: 275461 - DNA, 15 bp, Homo sapiens
aggtttgtgtaagta

SEQ ID NO: 275462 - DNA, 15 bp, Homo sapiens
caggtttgtgtaagt

SEQ ID NO: 275463 - DNA, 15 bp, Homo sapiens
ccaggtttgtgtaag

SEQ ID NO: 275464 - DNA, 15 bp, Homo sapiens
tccaggtttgtgtaa

SEQ ID NO: 275465 - DNA, 15 bp, Homo sapiens
atccaggtttgtgta

SEQ ID NO: 275466 - DNA, 15 bp, Homo sapiens
catccaggtttgtgt

SEQ ID NO: 275467 - DNA, 15 bp, Homo sapiens
ccatccaggtttgtg

SEQ ID NO: 275468 - DNA, 15 bp, Homo sapiens
accatccaggtttgt

SEQ ID NO: 275469 - DNA, 15 bp, Homo sapiens
taccatccaggtttg

SEQ ID NO: 275470 - DNA, 15 bp, Homo sapiens
ataccatccaggttt

SEQ ID NO: 275471 - DNA, 15 bp, Homo sapiens
tataccatccaggtt

SEQ ID NO: 275472 - DNA, 15 bp, Homo sapiens
ctataccatccaggt

SEQ ID NO: 275473 - DNA, 15 bp, Homo sapiens
gctataccatccagg

SEQ ID NO: 275474 - DNA, 15 bp, Homo sapiens
ggctataccatccag

SEQ ID NO: 275475 - DNA, 15 bp, Homo sapiens
aggctataccatcca

SEQ ID NO: 275476 - DNA, 15 bp, Homo sapiens
taggctataccatcc

SEQ ID NO: 275477 - DNA, 15 bp, Homo sapiens
ataggctataccatc

SEQ ID NO: 275478 - DNA, 15 bp, Homo sapiens
cataggctataccat

SEQ ID NO: 275479 - DNA, 15 bp, Homo sapiens
tcataggctatacca

SEQ ID NO: 275480 - DNA, 15 bp, Homo sapiens
gtcataggctatacc

SEQ ID NO: 275481 - DNA, 15 bp, Homo sapiens
tgtcataggctatac

SEQ ID NO: 275482 - DNA, 15 bp, Homo sapiens
gtgtcataggctata

SEQ ID NO: 275483 - DNA, 15 bp, Homo sapiens
tgtgtcataggctat

SEQ ID NO: 275484 - DNA, 15 bp, Homo sapiens
gtgtgtcataggcta

SEQ ID NO: 275485 - DNA, 15 bp, Homo sapiens
ggtgtgtcataggct

SEQ ID NO: 275486 - DNA, 15 bp, Homo sapiens
aggtgtgtcataggc

SEQ ID NO: 275487 - DNA, 15 bp, Homo sapiens
taggtgtgtcatagg

SEQ ID NO: 275488 - DNA, 15 bp, Homo sapiens
ataggtgtgtcatag

SEQ ID NO: 275489 - DNA, 15 bp, Homo sapiens
cataggtgtgtcata

SEQ ID NO: 275490 - DNA, 15 bp, Homo sapiens
gcataggtgtgtcat

SEQ ID NO: 275491 - DNA, 15 bp, Homo sapiens
agcataggtgtgtca

SEQ ID NO: 275492 - DNA, 15 bp, Homo sapiens
cagcataggtgtgtc

SEQ ID NO: 275493 - DNA, 15 bp, Homo sapiens
acagcataggtgtgt

SEQ ID NO: 275494 - DNA, 15 bp, Homo sapiens
cacagcataggtgtg

SEQ ID NO: 275495 - DNA, 15 bp, Homo sapiens
acacagcataggtgt

SEQ ID NO: 275496 - DNA, 15 bp, Homo sapiens
cacacagcataggtg

SEQ ID NO: 275497 - DNA, 15 bp, Homo sapiens
ccacacagcataggt

SEQ ID NO: 275498 - DNA, 15 bp, Homo sapiens
accacacagcatagg

SEQ ID NO: 275499 - DNA, 15 bp, Homo sapiens
taccacacagcatag

SEQ ID NO: 275500 - DNA, 15 bp, Homo sapiens
ataccacacagcata

SEQ ID NO: 275501 - DNA, 15 bp, Homo sapiens
tataccacacagcat

SEQ ID NO: 275502 - DNA, 15 bp, Homo sapiens
atataccacacagca

SEQ ID NO: 275503 - DNA, 15 bp, Homo sapiens
tatataccacacagc

SEQ ID NO: 275504 - DNA, 15 bp, Homo sapiens
ctatataccacacag

SEQ ID NO: 275505 - DNA, 15 bp, Homo sapiens
gctatataccacaca

SEQ ID NO: 275506 - DNA, 15 bp, Homo sapiens
tgctatataccacac

SEQ ID NO: 275507 - DNA, 15 bp, Homo sapiens
atgctatataccaca

SEQ ID NO: 275508 - DNA, 15 bp, Homo sapiens
catgctatataccac

SEQ ID NO: 275509 - DNA, 15 bp, Homo sapiens
acatgctatatacca

SEQ ID NO: 275510 - DNA, 15 bp, Homo sapiens
aacatgctatatacc

SEQ ID NO: 275511 - DNA, 15 bp, Homo sapiens
caacatgctatatac

SEQ ID NO: 275512 - DNA, 15 bp, Homo sapiens
gcaacatgctatata

SEQ ID NO: 275513 - DNA, 15 bp, Homo sapiens
agcaacatgctatat

SEQ ID NO: 275514 - DNA, 15 bp, Homo sapiens
gagcaacatgctata

SEQ ID NO: 275515 - DNA, 15 bp, Homo sapiens
ggagcaacatgctat

SEQ ID NO: 275516 - DNA, 15 bp, Homo sapiens
aggagcaacatgcta

SEQ ID NO: 275517 - DNA, 15 bp, Homo sapiens
taggagcaacatgct

SEQ ID NO: 275518 - DNA, 15 bp, Homo sapiens
ctaggagcaacatgc

SEQ ID NO: 275519 - DNA, 15 bp, Homo sapiens
actaggagcaacatg

SEQ ID NO: 275520 - DNA, 15 bp, Homo sapiens
gactaggagcaacat

SEQ ID NO: 275521 - DNA, 15 bp, Homo sapiens
agactaggagcaaca

SEQ ID NO: 275522 - DNA, 15 bp, Homo sapiens
cagactaggagcaac

SEQ ID NO: 275523 - DNA, 15 bp, Homo sapiens
gcagactaggagcaa

SEQ ID NO: 275524 - DNA, 15 bp, Homo sapiens
tgcagactaggagca

SEQ ID NO: 275525 - DNA, 15 bp, Homo sapiens
ttgcagactaggagc

SEQ ID NO: 275526 - DNA, 15 bp, Homo sapiens
tttgcagactaggag

SEQ ID NO: 275527 - DNA, 15 bp, Homo sapiens
atttgcagactagga

SEQ ID NO: 275528 - DNA, 15 bp, Homo sapiens
catttgcagactagg

SEQ ID NO: 275529 - DNA, 15 bp, Homo sapiens
acatttgcagactag

SEQ ID NO: 275530 - DNA, 15 bp, Homo sapiens
cacatttgcagacta

SEQ ID NO: 275531 - DNA, 15 bp, Homo sapiens
acacatttgcagact

SEQ ID NO: 275532 - DNA, 15 bp, Homo sapiens
tacacatttgcagac

SEQ ID NO: 275533 - DNA, 15 bp, Homo sapiens
gtacacatttgcaga

SEQ ID NO: 275534 - DNA, 15 bp, Homo sapiens
tgtacacatttgcag

SEQ ID NO: 275535 - DNA, 15 bp, Homo sapiens
ctgtacacatttgca

SEQ ID NO: 275536 - DNA, 15 bp, Homo sapiens
gctgtacacatttgc

SEQ ID NO: 275537 - DNA, 15 bp, Homo sapiens
tgctgtacacatttg

SEQ ID NO: 275538 - DNA, 15 bp, Homo sapiens
atgctgtacacattt

SEQ ID NO: 275539 - DNA, 15 bp, Homo sapiens
catgctgtacacatt

SEQ ID NO: 275540 - DNA, 15 bp, Homo sapiens
acatgctgtacacat

SEQ ID NO: 275541 - DNA, 15 bp, Homo sapiens
aacatgctgtacaca

SEQ ID NO: 275542 - DNA, 15 bp, Homo sapiens
taacatgctgtacac

SEQ ID NO: 275543 - DNA, 15 bp, Homo sapiens
gtaacatgctgtaca

SEQ ID NO: 275544 - DNA, 15 bp, Homo sapiens
agtaacatgctgtac

SEQ ID NO: 275545 - DNA, 15 bp, Homo sapiens
cagtaacatgctgta

SEQ ID NO: 275546 - DNA, 15 bp, Homo sapiens
acagtaacatgctgt

SEQ ID NO: 275547 - DNA, 15 bp, Homo sapiens
tacagtaacatgctg

SEQ ID NO: 275548 - DNA, 15 bp, Homo sapiens
gtacagtaacatgct

SEQ ID NO: 275549 - DNA, 15 bp, Homo sapiens
agtacagtaacatgc

SEQ ID NO: 275550 - DNA, 15 bp, Homo sapiens
cagtacagtaacatg

SEQ ID NO: 275551 - DNA, 15 bp, Homo sapiens
tcagtacagtaacat

SEQ ID NO: 275552 - DNA, 15 bp, Homo sapiens
ttcagtacagtaaca

SEQ ID NO: 275553 - DNA, 15 bp, Homo sapiens
gttcagtacagtaac

SEQ ID NO: 275554 - DNA, 15 bp, Homo sapiens
tgttcagtacagtaa

SEQ ID NO: 275555 - DNA, 15 bp, Homo sapiens
atgttcagtacagta

SEQ ID NO: 275556 - DNA, 15 bp, Homo sapiens
aatgttcagtacagt

SEQ ID NO: 275557 - DNA, 15 bp, Homo sapiens
caatgttcagtacag

SEQ ID NO: 275558 - DNA, 15 bp, Homo sapiens
acaatgttcagtaca

SEQ ID NO: 275559 - DNA, 15 bp, Homo sapiens
tacaatgttcagtac

SEQ ID NO: 275560 - DNA, 15 bp, Homo sapiens
ctacaatgttcagta

SEQ ID NO: 275561 - DNA, 15 bp, Homo sapiens
cctacaatgttcagt

SEQ ID NO: 275562 - DNA, 15 bp, Homo sapiens
gcctacaatgttcag

SEQ ID NO: 275563 - DNA, 15 bp, Homo sapiens
tgcctacaatgttca

SEQ ID NO: 275564 - DNA, 15 bp, Homo sapiens
ttgcctacaatgttc

SEQ ID NO: 275565 - DNA, 15 bp, Homo sapiens
attgcctacaatgtt

SEQ ID NO: 275566 - DNA, 15 bp, Homo sapiens
aattgcctacaatgt

SEQ ID NO: 275567 - DNA, 15 bp, Homo sapiens
caattgcctacaatg

SEQ ID NO: 275568 - DNA, 15 bp, Homo sapiens
acaattgcctacaat

SEQ ID NO: 275569 - DNA, 15 bp, Homo sapiens
tacaattgcctacaa

SEQ ID NO: 275570 - DNA, 15 bp, Homo sapiens
ttacaattgcctaca

SEQ ID NO: 275571 - DNA, 15 bp, Homo sapiens
gttacaattgcctac

SEQ ID NO: 275572 - DNA, 15 bp, Homo sapiens
tgttacaattgccta

SEQ ID NO: 275573 - DNA, 15 bp, Homo sapiens
gtgttacaattgcct

SEQ ID NO: 275574 - DNA, 15 bp, Homo sapiens
tgtgttacaattgcc

SEQ ID NO: 275575 - DNA, 15 bp, Homo sapiens
ttgtgttacaattgc

SEQ ID NO: 275576 - DNA, 15 bp, Homo sapiens
attgtgttacaattg

SEQ ID NO: 275577 - DNA, 15 bp, Homo sapiens
cattgtgttacaatt

SEQ ID NO: 275578 - DNA, 15 bp, Homo sapiens
ccattgtgttacaat

SEQ ID NO: 275579 - DNA, 15 bp, Homo sapiens
accattgtgttacaa

SEQ ID NO: 275580 - DNA, 15 bp, Homo sapiens
taccattgtgttaca

SEQ ID NO: 275581 - DNA, 15 bp, Homo sapiens
ttaccattgtgttac

SEQ ID NO: 275582 - DNA, 15 bp, Homo sapiens
cttaccattgtgtta

SEQ ID NO: 275583 - DNA, 15 bp, Homo sapiens
acttaccattgtgtt

SEQ ID NO: 275584 - DNA, 15 bp, Homo sapiens
tacttaccattgtgt

SEQ ID NO: 275585 - DNA, 15 bp, Homo sapiens
atacttaccattgtg

SEQ ID NO: 275586 - DNA, 15 bp, Homo sapiens
aatacttaccattgt

SEQ ID NO: 275587 - DNA, 15 bp, Homo sapiens
aaatacttaccattg

SEQ ID NO: 275588 - DNA, 15 bp, Homo sapiens
caaatacttaccatt

SEQ ID NO: 275589 - DNA, 15 bp, Homo sapiens
acaaatacttaccat

SEQ ID NO: 275590 - DNA, 15 bp, Homo sapiens
tacaaatacttacca

SEQ ID NO: 275591 - DNA, 15 bp, Homo sapiens
atacaaatacttacc

SEQ ID NO: 275592 - DNA, 15 bp, Homo sapiens
tatacaaatacttac

SEQ ID NO: 275593 - DNA, 15 bp, Homo sapiens
atatacaaatactta

SEQ ID NO: 275594 - DNA, 15 bp, Homo sapiens
gatatacaaatactt

SEQ ID NO: 275595 - DNA, 15 bp, Homo sapiens
agatatacaaatact

SEQ ID NO: 275596 - DNA, 15 bp, Homo sapiens
tagatatacaaatac

SEQ ID NO: 275597 - DNA, 15 bp, Homo sapiens
atagatatacaaata

SEQ ID NO: 275598 - DNA, 15 bp, Homo sapiens
tatagatatacaaat

SEQ ID NO: 275599 - DNA, 15 bp, Homo sapiens
gtatagatatacaaa

SEQ ID NO: 275600 - DNA, 15 bp, Homo sapiens
tgtatagatatacaa

SEQ ID NO: 275601 - DNA, 15 bp, Homo sapiens
atgtatagatataca

SEQ ID NO: 275602 - DNA, 15 bp, Homo sapiens
tatgtatagatatac

SEQ ID NO: 275603 - DNA, 15 bp, Homo sapiens
ctatgtatagatata

SEQ ID NO: 275604 - DNA, 15 bp, Homo sapiens
tctatgtatagatat

SEQ ID NO: 275605 - DNA, 15 bp, Homo sapiens
ttctatgtatagata

SEQ ID NO: 275606 - DNA, 15 bp, Homo sapiens
tttctatgtatagat

SEQ ID NO: 275607 - DNA, 15 bp, Homo sapiens
ttttctatgtataga

SEQ ID NO: 275608 - DNA, 15 bp, Homo sapiens
cttttctatgtatag

SEQ ID NO: 275609 - DNA, 15 bp, Homo sapiens
ccttttctatgtata

SEQ ID NO: 275610 - DNA, 15 bp, Homo sapiens
accttttctatgtat

SEQ ID NO: 275611 - DNA, 15 bp, Homo sapiens
taccttttctatgta

SEQ ID NO: 275612 - DNA, 15 bp, Homo sapiens
gtaccttttctatgt

SEQ ID NO: 275613 - DNA, 15 bp, Homo sapiens
tgtaccttttctatg

SEQ ID NO: 275614 - DNA, 15 bp, Homo sapiens
ctgtaccttttctat

SEQ ID NO: 275615 - DNA, 15 bp, Homo sapiens
actgtaccttttcta

SEQ ID NO: 275616 - DNA, 15 bp, Homo sapiens
tactgtaccttttct

SEQ ID NO: 275617 - DNA, 15 bp, Homo sapiens
ctactgtaccttttc

SEQ ID NO: 275618 - DNA, 15 bp, Homo sapiens
tctactgtacctttt

SEQ ID NO: 275619 - DNA, 15 bp, Homo sapiens
atctactgtaccttt

SEQ ID NO: 275620 - DNA, 15 bp, Homo sapiens
gatctactgtacctt

SEQ ID NO: 275621 - DNA, 15 bp, Homo sapiens
tgatctactgtacct

SEQ ID NO: 275622 - DNA, 15 bp, Homo sapiens
atgatctactgtacc

SEQ ID NO: 275623 - DNA, 15 bp, Homo sapiens
gatgatctactgtac

SEQ ID NO: 275624 - DNA, 15 bp, Homo sapiens
ggatgatctactgta

SEQ ID NO: 275625 - DNA, 15 bp, Homo sapiens
tggatgatctactgt

SEQ ID NO: 275626 - DNA, 15 bp, Homo sapiens
atggatgatctactg

SEQ ID NO: 275627 - DNA, 15 bp, Homo sapiens
tatggatgatctact

SEQ ID NO: 275628 - DNA, 15 bp, Homo sapiens
atatggatgatctac

SEQ ID NO: 275629 - DNA, 15 bp, Homo sapiens
gatatggatgatcta

SEQ ID NO: 275630 - DNA, 15 bp, Homo sapiens
ggatatggatgatct

SEQ ID NO: 275631 - DNA, 15 bp, Homo sapiens
aggatatggatgatc

SEQ ID NO: 275632 - DNA, 15 bp, Homo sapiens
aaggatatggatgat

SEQ ID NO: 275633 - DNA, 15 bp, Homo sapiens
taaggatatggatga

SEQ ID NO: 275634 - DNA, 15 bp, Homo sapiens
gtaaggatatggatg

SEQ ID NO: 275635 - DNA, 15 bp, Homo sapiens
agtaaggatatggat

SEQ ID NO: 275636 - DNA, 15 bp, Homo sapiens
cagtaaggatatgga

SEQ ID NO: 275637 - DNA, 15 bp, Homo sapiens
tcagtaaggatatgg

SEQ ID NO: 275638 - DNA, 15 bp, Homo sapiens
atcagtaaggatatg

SEQ ID NO: 275639 - DNA, 15 bp, Homo sapiens
aatcagtaaggatat

SEQ ID NO: 275640 - DNA, 15 bp, Homo sapiens
aaatcagtaaggata

SEQ ID NO: 275641 - DNA, 15 bp, Homo sapiens
aaaatcagtaaggat

SEQ ID NO: 275642 - DNA, 15 bp, Homo sapiens
gaaaatcagtaagga

SEQ ID NO: 275643 - DNA, 15 bp, Homo sapiens
agaaaatcagtaagg

SEQ ID NO: 275644 - DNA, 15 bp, Homo sapiens
aagaaaatcagtaag

SEQ ID NO: 275645 - DNA, 15 bp, Homo sapiens
aaagaaaatcagtaa

SEQ ID NO: 275646 - DNA, 15 bp, Homo sapiens
gaaagaaaatcagta

SEQ ID NO: 275647 - DNA, 15 bp, Homo sapiens
agaaagaaaatcagt

SEQ ID NO: 275648 - DNA, 15 bp, Homo sapiens
tagaaagaaaatcag

SEQ ID NO: 275649 - DNA, 15 bp, Homo sapiens
atagaaagaaaatca

SEQ ID NO: 275650 - DNA, 15 bp, Homo sapiens
catagaaagaaaatc

SEQ ID NO: 275651 - DNA, 15 bp, Homo sapiens
acatagaaagaaaat

SEQ ID NO: 275652 - DNA, 15 bp, Homo sapiens
cacatagaaagaaaa

SEQ ID NO: 275653 - DNA, 15 bp, Homo sapiens
acacatagaaagaaa

SEQ ID NO: 275654 - DNA, 15 bp, Homo sapiens
aacacatagaaagaa

SEQ ID NO: 275655 - DNA, 15 bp, Homo sapiens
aaacacatagaaaga

SEQ ID NO: 275656 - DNA, 15 bp, Homo sapiens
aaaacacatagaaag

SEQ ID NO: 275657 - DNA, 15 bp, Homo sapiens
taaaacacatagaaa

SEQ ID NO: 275658 - DNA, 15 bp, Homo sapiens
gtaaaacacatagaa

SEQ ID NO: 275659 - DNA, 15 bp, Homo sapiens
agtaaaacacataga

SEQ ID NO: 275660 - DNA, 15 bp, Homo sapiens
tagtaaaacacatag

SEQ ID NO: 275661 - DNA, 15 bp, Homo sapiens
ttagtaaaacacata

SEQ ID NO: 275662 - DNA, 15 bp, Homo sapiens
attagtaaaacacat

SEQ ID NO: 275663 - DNA, 15 bp, Homo sapiens
aattagtaaaacaca

SEQ ID NO: 275664 - DNA, 15 bp, Homo sapiens
taattagtaaaacac

SEQ ID NO: 275665 - DNA, 15 bp, Homo sapiens
ataattagtaaaaca

SEQ ID NO: 275666 - DNA, 15 bp, Homo sapiens
aataattagtaaaac

SEQ ID NO: 275667 - DNA, 15 bp, Homo sapiens
caataattagtaaaa

SEQ ID NO: 275668 - DNA, 15 bp, Homo sapiens
tcaataattagtaaa

SEQ ID NO: 275669 - DNA, 15 bp, Homo sapiens
ctcaataattagtaa

SEQ ID NO: 275670 - DNA, 15 bp, Homo sapiens
cctcaataattagta

SEQ ID NO: 275671 - DNA, 15 bp, Homo sapiens
ccctcaataattagt

SEQ ID NO: 275672 - DNA, 15 bp, Homo sapiens
tccctcaataattag

SEQ ID NO: 275673 - DNA, 15 bp, Homo sapiens
ctccctcaataatta

SEQ ID NO: 275674 - DNA, 15 bp, Homo sapiens
tctccctcaataatt

SEQ ID NO: 275675 - DNA, 15 bp, Homo sapiens
ttctccctcaataat

SEQ ID NO: 275676 - DNA, 15 bp, Homo sapiens
tttctccctcaataa

SEQ ID NO: 275677 - DNA, 15 bp, Homo sapiens
atttctccctcaata

SEQ ID NO: 275678 - DNA, 15 bp, Homo sapiens
tatttctccctcaat

SEQ ID NO: 275679 - DNA, 15 bp, Homo sapiens
atatttctccctcaa

SEQ ID NO: 275680 - DNA, 15 bp, Homo sapiens
catatttctccctca

SEQ ID NO: 275681 - DNA, 15 bp, Homo sapiens
tcatatttctccctc

SEQ ID NO: 275682 - DNA, 15 bp, Homo sapiens
ttcatatttctccct

SEQ ID NO: 275683 - DNA, 15 bp, Homo sapiens
cttcatatttctccc

SEQ ID NO: 275684 - DNA, 15 bp, Homo sapiens
gcttcatatttctcc

SEQ ID NO: 275685 - DNA, 15 bp, Homo sapiens
ggcttcatatttctc

SEQ ID NO: 275686 - DNA, 15 bp, Homo sapiens
aggcttcatatttct

SEQ ID NO: 275687 - DNA, 15 bp, Homo sapiens
gaggcttcatatttc

SEQ ID NO: 275688 - DNA, 15 bp, Homo sapiens
ggaggcttcatattt

SEQ ID NO: 275689 - DNA, 15 bp, Homo sapiens
tggaggcttcatatt

SEQ ID NO: 275690 - DNA, 15 bp, Homo sapiens
ttggaggcttcatat

SEQ ID NO: 275691 - DNA, 15 bp, Homo sapiens
gttggaggcttcata

SEQ ID NO: 275692 - DNA, 15 bp, Homo sapiens
agttggaggcttcat

SEQ ID NO: 275693 - DNA, 15 bp, Homo sapiens
tagttggaggcttca

SEQ ID NO: 275694 - DNA, 15 bp, Homo sapiens
atagttggaggcttc

SEQ ID NO: 275695 - DNA, 15 bp, Homo sapiens
tatagttggaggctt

SEQ ID NO: 275696 - DNA, 15 bp, Homo sapiens
ttatagttggaggct

SEQ ID NO: 275697 - DNA, 15 bp, Homo sapiens
attatagttggaggc

SEQ ID NO: 275698 - DNA, 15 bp, Homo sapiens
aattatagttggagg

SEQ ID NO: 275699 - DNA, 15 bp, Homo sapiens
taattatagttggag

SEQ ID NO: 275700 - DNA, 15 bp, Homo sapiens
ctaattatagttgga

SEQ ID NO: 275701 - DNA, 15 bp, Homo sapiens
tctaattatagttgg

SEQ ID NO: 275702 - DNA, 15 bp, Homo sapiens
ttctaattatagttg

SEQ ID NO: 275703 - DNA, 15 bp, Homo sapiens
attctaattatagtt

SEQ ID NO: 275704 - DNA, 15 bp, Homo sapiens
cattctaattatagt

SEQ ID NO: 275705 - DNA, 15 bp, Homo sapiens
ccattctaattatag

SEQ ID NO: 275706 - DNA, 15 bp, Homo sapiens
accattctaattata

SEQ ID NO: 275707 - DNA, 15 bp, Homo sapiens
gaccattctaattat

SEQ ID NO: 275708 - DNA, 15 bp, Homo sapiens
ggaccattctaatta

SEQ ID NO: 275709 - DNA, 15 bp, Homo sapiens
aggaccattctaatt

SEQ ID NO: 275710 - DNA, 15 bp, Homo sapiens
aaggaccattctaat

SEQ ID NO: 275711 - DNA, 15 bp, Homo sapiens
aaaggaccattctaa

SEQ ID NO: 275712 - DNA, 15 bp, Homo sapiens
aaaaggaccattcta

SEQ ID NO: 275713 - DNA, 15 bp, Homo sapiens
taaaaggaccattct

SEQ ID NO: 275714 - DNA, 15 bp, Homo sapiens
ttaaaaggaccattc

SEQ ID NO: 275715 - DNA, 15 bp, Homo sapiens
tttaaaaggaccatt

SEQ ID NO: 275716 - DNA, 15 bp, Homo sapiens
atttaaaaggaccat

SEQ ID NO: 275717 - DNA, 15 bp, Homo sapiens
aatttaaaaggacca

SEQ ID NO: 275718 - DNA, 15 bp, Homo sapiens
gaatttaaaaggacc

SEQ ID NO: 275719 - DNA, 15 bp, Homo sapiens
agaatttaaaaggac

SEQ ID NO: 275720 - DNA, 15 bp, Homo sapiens
cagaatttaaaagga

SEQ ID NO: 275721 - DNA, 15 bp, Homo sapiens
acagaatttaaaagg

SEQ ID NO: 275722 - DNA, 15 bp, Homo sapiens
aacagaatttaaaag

SEQ ID NO: 275723 - DNA, 15 bp, Homo sapiens
aaacagaatttaaaa

SEQ ID NO: 275724 - DNA, 15 bp, Homo sapiens
aaaacagaatttaaa

SEQ ID NO: 275725 - DNA, 15 bp, Homo sapiens
aaaaacagaatttaa

SEQ ID NO: 275726 - DNA, 15 bp, Homo sapiens
aaaaaacagaattta

SEQ ID NO: 275727 - DNA, 15 bp, Homo sapiens
taaaaaacagaattt

SEQ ID NO: 275728 - DNA, 15 bp, Homo sapiens
ataaaaaacagaatt

SEQ ID NO: 275729 - DNA, 15 bp, Homo sapiens
aataaaaaacagaat

SEQ ID NO: 275730 - DNA, 15 bp, Homo sapiens
taataaaaaacagaa

SEQ ID NO: 275731 - DNA, 15 bp, Homo sapiens
ttaataaaaaacaga

SEQ ID NO: 275732 - DNA, 15 bp, Homo sapiens
attaataaaaaacag

SEQ ID NO: 275733 - DNA, 15 bp, Homo sapiens
cattaataaaaaaca

SEQ ID NO: 275734 - DNA, 15 bp, Homo sapiens
acattaataaaaaac

SEQ ID NO: 275735 - DNA, 15 bp, Homo sapiens
tacattaataaaaaa

SEQ ID NO: 275736 - DNA, 15 bp, Homo sapiens
atacattaataaaaa

SEQ ID NO: 275737 - DNA, 15 bp, Homo sapiens
aatacattaataaaa

SEQ ID NO: 275738 - DNA, 15 bp, Homo sapiens
aaatacattaataaa

SEQ ID NO: 275739 - DNA, 15 bp, Homo sapiens
aaaatacattaataa

SEQ ID NO: 275740 - DNA, 15 bp, Homo sapiens
aaaaatacattaata

SEQ ID NO: 275741 - DNA, 15 bp, Homo sapiens
aaaaaatacattaat

SEQ ID NO: 275742 - DNA, 15 bp, Homo sapiens
taaaaaatacattaa

SEQ ID NO: 275743 - DNA, 15 bp, Homo sapiens
ataaaaaatacatta

SEQ ID NO: 275744 - DNA, 15 bp, Homo sapiens
aataaaaaatacatt

SEQ ID NO: 275745 - DNA, 15 bp, Homo sapiens
aaataaaaaatacat

SEQ ID NO: 275746 - DNA, 15 bp, Homo sapiens
aaaataaaaaataca

SEQ ID NO: 275747 - DNA, 15 bp, Homo sapiens
taaaataaaaaatac

SEQ ID NO: 275748 - DNA, 15 bp, Homo sapiens
ataaaataaaaaata

SEQ ID NO: 275749 - DNA, 15 bp, Homo sapiens
aataaaataaaaaat

SEQ ID NO: 275750 - DNA, 15 bp, Homo sapiens
aaataaaataaaaaa

SEQ ID NO: 275751 - DNA, 15 bp, Homo sapiens
aaaataaaataaaaa

SEQ ID NO: 275752 - DNA, 15 bp, Homo sapiens
taaaataaaataaaa

SEQ ID NO: 275753 - DNA, 15 bp, Homo sapiens
ataaaataaaataaa

SEQ ID NO: 275754 - DNA, 15 bp, Homo sapiens
aataaaataaaataa

SEQ ID NO: 275755 - DNA, 15 bp, Homo sapiens
aaataaaataaaata

SEQ ID NO: 275756 - DNA, 15 bp, Homo sapiens
aaaataaaataaaat

SEQ ID NO: 275757 - DNA, 15 bp, Homo sapiens
caaaataaaataaaa

SEQ ID NO: 275758 - DNA, 15 bp, Homo sapiens
tcaaaataaaataaa

SEQ ID NO: 275759 - DNA, 15 bp, Homo sapiens
ctcaaaataaaataa

SEQ ID NO: 275760 - DNA, 15 bp, Homo sapiens
tctcaaaataaaata

SEQ ID NO: 275761 - DNA, 15 bp, Homo sapiens
atctcaaaataaaat

SEQ ID NO: 275762 - DNA, 15 bp, Homo sapiens
catctcaaaataaaa

SEQ ID NO: 275763 - DNA, 15 bp, Homo sapiens
ccatctcaaaataaa

SEQ ID NO: 275764 - DNA, 15 bp, Homo sapiens
tccatctcaaaataa

SEQ ID NO: 275765 - DNA, 15 bp, Homo sapiens
ctccatctcaaaata

SEQ ID NO: 275766 - DNA, 15 bp, Homo sapiens
actccatctcaaaat

SEQ ID NO: 275767 - DNA, 15 bp, Homo sapiens
gactccatctcaaaa

SEQ ID NO: 275768 - DNA, 15 bp, Homo sapiens
agactccatctcaaa

SEQ ID NO: 275769 - DNA, 15 bp, Homo sapiens
aagactccatctcaa

SEQ ID NO: 275770 - DNA, 15 bp, Homo sapiens
caagactccatctca

SEQ ID NO: 275771 - DNA, 15 bp, Homo sapiens
gcaagactccatctc

SEQ ID NO: 275772 - DNA, 15 bp, Homo sapiens
agcaagactccatct

SEQ ID NO: 275773 - DNA, 15 bp, Homo sapiens
gagcaagactccatc

SEQ ID NO: 275774 - DNA, 15 bp, Homo sapiens
agagcaagactccat

SEQ ID NO: 275775 - DNA, 15 bp, Homo sapiens
cagagcaagactcca

SEQ ID NO: 275776 - DNA, 15 bp, Homo sapiens
acagagcaagactcc

SEQ ID NO: 275777 - DNA, 15 bp, Homo sapiens
gacagagcaagactc

SEQ ID NO: 275778 - DNA, 15 bp, Homo sapiens
tgacagagcaagact

SEQ ID NO: 275779 - DNA, 15 bp, Homo sapiens
gtgacagagcaagac

SEQ ID NO: 275780 - DNA, 15 bp, Homo sapiens
ggtgacagagcaaga

SEQ ID NO: 275781 - DNA, 15 bp, Homo sapiens
gggtgacagagcaag

SEQ ID NO: 275782 - DNA, 15 bp, Homo sapiens
tgggtgacagagcaa

SEQ ID NO: 275783 - DNA, 15 bp, Homo sapiens
ctgggtgacagagca

SEQ ID NO: 275784 - DNA, 15 bp, Homo sapiens
cctgggtgacagagc

SEQ ID NO: 275785 - DNA, 15 bp, Homo sapiens
gcctgggtgacagag

SEQ ID NO: 275786 - DNA, 15 bp, Homo sapiens
agcctgggtgacaga

SEQ ID NO: 275787 - DNA, 15 bp, Homo sapiens
cagcctgggtgacag

SEQ ID NO: 275788 - DNA, 15 bp, Homo sapiens
ccagcctgggtgaca

SEQ ID NO: 275789 - DNA, 15 bp, Homo sapiens
tccagcctgggtgac

SEQ ID NO: 275790 - DNA, 15 bp, Homo sapiens
ctccagcctgggtga

SEQ ID NO: 275791 - DNA, 15 bp, Homo sapiens
actccagcctgggtg

SEQ ID NO: 275792 - DNA, 15 bp, Homo sapiens
cactccagcctgggt

SEQ ID NO: 275793 - DNA, 15 bp, Homo sapiens
gcactccagcctggg

SEQ ID NO: 275794 - DNA, 15 bp, Homo sapiens
cgcactccagcctgg

SEQ ID NO: 275795 - DNA, 15 bp, Homo sapiens
acgcactccagcctg

SEQ ID NO: 275796 - DNA, 15 bp, Homo sapiens
cacgcactccagcct

SEQ ID NO: 275797 - DNA, 15 bp, Homo sapiens
ccacgcactccagcc

SEQ ID NO: 275798 - DNA, 15 bp, Homo sapiens
gccacgcactccagc

SEQ ID NO: 275799 - DNA, 15 bp, Homo sapiens
tgccacgcactccag

SEQ ID NO: 275800 - DNA, 15 bp, Homo sapiens
gtgccacgcactcca

SEQ ID NO: 275801 - DNA, 15 bp, Homo sapiens
cgtgccacgcactcc

SEQ ID NO: 275802 - DNA, 15 bp, Homo sapiens
tcgtgccacgcactc

SEQ ID NO: 275803 - DNA, 15 bp, Homo sapiens
atcgtgccacgcact

SEQ ID NO: 275804 - DNA, 15 bp, Homo sapiens
gatcgtgccacgcac

SEQ ID NO: 275805 - DNA, 15 bp, Homo sapiens
agatcgtgccacgca

SEQ ID NO: 275806 - DNA, 15 bp, Homo sapiens
gagatcgtgccacgc

SEQ ID NO: 275807 - DNA, 15 bp, Homo sapiens
cgagatcgtgccacg

SEQ ID NO: 275808 - DNA, 15 bp, Homo sapiens
ccgagatcgtgccac

SEQ ID NO: 275809 - DNA, 15 bp, Homo sapiens
gccgagatcgtgcca

SEQ ID NO: 275810 - DNA, 15 bp, Homo sapiens
agccgagatcgtgcc

SEQ ID NO: 275811 - DNA, 15 bp, Homo sapiens
gagccgagatcgtgc

SEQ ID NO: 275812 - DNA, 15 bp, Homo sapiens
tgagccgagatcgtg

SEQ ID NO: 275813 - DNA, 15 bp, Homo sapiens
gtgagccgagatcgt

SEQ ID NO: 275814 - DNA, 15 bp, Homo sapiens
agtgagccgagatcg

SEQ ID NO: 275815 - DNA, 15 bp, Homo sapiens
cagtgagccgagatc

SEQ ID NO: 275816 - DNA, 15 bp, Homo sapiens
gcagtgagccgagat

SEQ ID NO: 275817 - DNA, 15 bp, Homo sapiens
tgcagtgagccgaga

SEQ ID NO: 275818 - DNA, 15 bp, Homo sapiens
ttgcagtgagccgag

SEQ ID NO: 275819 - DNA, 15 bp, Homo sapiens
gttgcagtgagccga

SEQ ID NO: 275820 - DNA, 15 bp, Homo sapiens
ggttgcagtgagccg

SEQ ID NO: 275821 - DNA, 15 bp, Homo sapiens
aggttgcagtgagcc

SEQ ID NO: 275822 - DNA, 15 bp, Homo sapiens
gggaggcagaggttg

SEQ ID NO: 275823 - DNA, 15 bp, Homo sapiens
cgggaggcagaggtt

SEQ ID NO: 275824 - DNA, 15 bp, Homo sapiens
ccgggaggcagaggt

SEQ ID NO: 275825 - DNA, 15 bp, Homo sapiens
cccgggaggcagagg

SEQ ID NO: 275826 - DNA, 15 bp, Homo sapiens
acccgggaggcagag

SEQ ID NO: 275827 - DNA, 15 bp, Homo sapiens
gacccgggaggcaga

SEQ ID NO: 275828 - DNA, 15 bp, Homo sapiens
ggacccgggaggcag

SEQ ID NO: 275829 - DNA, 15 bp, Homo sapiens
tggacccgggaggca

SEQ ID NO: 275830 - DNA, 15 bp, Homo sapiens
ttggacccgggaggc

SEQ ID NO: 275831 - DNA, 15 bp, Homo sapiens
cttggacccgggagg

SEQ ID NO: 275832 - DNA, 15 bp, Homo sapiens
gcttggacccgggag

SEQ ID NO: 275833 - DNA, 15 bp, Homo sapiens
cgcttggacccggga

SEQ ID NO: 275834 - DNA, 15 bp, Homo sapiens
tcgcttggacccggg

SEQ ID NO: 275835 - DNA, 15 bp, Homo sapiens
atcgcttggacccgg

SEQ ID NO: 275836 - DNA, 15 bp, Homo sapiens
aatcgcttggacccg

SEQ ID NO: 275837 - DNA, 15 bp, Homo sapiens
gaatcgcttggaccc

SEQ ID NO: 275838 - DNA, 15 bp, Homo sapiens
agaatcgcttggacc

SEQ ID NO: 275839 - DNA, 15 bp, Homo sapiens
gagaatcgcttggac

SEQ ID NO: 275840 - DNA, 15 bp, Homo sapiens
ggagaatcgcttgga

SEQ ID NO: 275841 - DNA, 15 bp, Homo sapiens
aggagaatcgcttgg

SEQ ID NO: 275842 - DNA, 15 bp, Homo sapiens
caggagaatcgcttg

SEQ ID NO: 275843 - DNA, 15 bp, Homo sapiens
acaggagaatcgctt

SEQ ID NO: 275844 - DNA, 15 bp, Homo sapiens
gacaggagaatcgct

SEQ ID NO: 275845 - DNA, 15 bp, Homo sapiens
agacaggagaatcgc

SEQ ID NO: 275846 - DNA, 15 bp, Homo sapiens
gagacaggagaatcg

SEQ ID NO: 275847 - DNA, 15 bp, Homo sapiens
tgagacaggagaatc

SEQ ID NO: 275848 - DNA, 15 bp, Homo sapiens
ctgagacaggagaat

SEQ ID NO: 275849 - DNA, 15 bp, Homo sapiens
gctgagacaggagaa

SEQ ID NO: 275850 - DNA, 15 bp, Homo sapiens
ggctgagacaggaga

SEQ ID NO: 275851 - DNA, 15 bp, Homo sapiens
aggctgagacaggag

SEQ ID NO: 275852 - DNA, 15 bp, Homo sapiens
gaggctgagacagga

SEQ ID NO: 275853 - DNA, 15 bp, Homo sapiens
ggaggctgagacagg

SEQ ID NO: 275854 - DNA, 15 bp, Homo sapiens
gggaggctgagacag

SEQ ID NO: 275855 - DNA, 15 bp, Homo sapiens
cgggaggctgagaca

SEQ ID NO: 275856 - DNA, 15 bp, Homo sapiens
tcgggaggctgagac

SEQ ID NO: 275857 - DNA, 15 bp, Homo sapiens
ctcgggaggctgaga

SEQ ID NO: 275858 - DNA, 15 bp, Homo sapiens
actcgggaggctgag

SEQ ID NO: 275859 - DNA, 15 bp, Homo sapiens
tactcgggaggctga

SEQ ID NO: 275860 - DNA, 15 bp, Homo sapiens
ctactcgggaggctg

SEQ ID NO: 275861 - DNA, 15 bp, Homo sapiens
gctactcgggaggct

SEQ ID NO: 275862 - DNA, 15 bp, Homo sapiens
agctactcgggaggc

SEQ ID NO: 275863 - DNA, 15 bp, Homo sapiens
cagctactcgggagg

SEQ ID NO: 275864 - DNA, 15 bp, Homo sapiens
ccagctactcgggag

SEQ ID NO: 275865 - DNA, 15 bp, Homo sapiens
cccagctactcggga

SEQ ID NO: 275866 - DNA, 15 bp, Homo sapiens
tcccagctactcggg

SEQ ID NO: 275867 - DNA, 15 bp, Homo sapiens
atcccagctactcgg

SEQ ID NO: 275868 - DNA, 15 bp, Homo sapiens
aatcccagctactcg

SEQ ID NO: 275869 - DNA, 15 bp, Homo sapiens
ataatcccagctact

SEQ ID NO: 275870 - DNA, 15 bp, Homo sapiens
tataatcccagctac

SEQ ID NO: 275871 - DNA, 15 bp, Homo sapiens
ctataatcccagcta

SEQ ID NO: 275872 - DNA, 15 bp, Homo sapiens
cctataatcccagct

SEQ ID NO: 275873 - DNA, 15 bp, Homo sapiens
gcctataatcccagc

SEQ ID NO: 275874 - DNA, 15 bp, Homo sapiens
tgcctataatcccag

SEQ ID NO: 275875 - DNA, 15 bp, Homo sapiens
atgcctataatccca

SEQ ID NO: 275876 - DNA, 15 bp, Homo sapiens
catgcctataatccc

SEQ ID NO: 275877 - DNA, 15 bp, Homo sapiens
gcatgcctataatcc

SEQ ID NO: 275878 - DNA, 15 bp, Homo sapiens
cgcatgcctataatc

SEQ ID NO: 275879 - DNA, 15 bp, Homo sapiens
gcgcatgcctataat

SEQ ID NO: 275880 - DNA, 15 bp, Homo sapiens
ggcgcatgcctataa

SEQ ID NO: 275881 - DNA, 15 bp, Homo sapiens
tggcgcatgcctata

SEQ ID NO: 275882 - DNA, 15 bp, Homo sapiens
gtggcgcatgcctat

SEQ ID NO: 275883 - DNA, 15 bp, Homo sapiens
ggtggcgcatgccta

SEQ ID NO: 275884 - DNA, 15 bp, Homo sapiens
tggtggcgcatgcct

SEQ ID NO: 275885 - DNA, 15 bp, Homo sapiens
gtggtggcgcatgcc

SEQ ID NO: 275886 - DNA, 15 bp, Homo sapiens
tgtggtggcgcatgc

SEQ ID NO: 275887 - DNA, 15 bp, Homo sapiens
gtgtggtggcgcatg

SEQ ID NO: 275888 - DNA, 15 bp, Homo sapiens
ggtgtggtggcgcat

SEQ ID NO: 275889 - DNA, 15 bp, Homo sapiens
gggtgtggtggcgca

SEQ ID NO: 275890 - DNA, 15 bp, Homo sapiens
cgggtgtggtggcgc

SEQ ID NO: 275891 - DNA, 15 bp, Homo sapiens
ccgggtgtggtggcg

SEQ ID NO: 275892 - DNA, 15 bp, Homo sapiens
gccgggtgtggtggc

SEQ ID NO: 275893 - DNA, 15 bp, Homo sapiens
agccgggtgtggtgg

SEQ ID NO: 275894 - DNA, 15 bp, Homo sapiens
tagccgggtgtggtg

SEQ ID NO: 275895 - DNA, 15 bp, Homo sapiens
ttagccgggtgtggt

SEQ ID NO: 275896 - DNA, 15 bp, Homo sapiens
attagccgggtgtgg

SEQ ID NO: 275897 - DNA, 15 bp, Homo sapiens
aattagccgggtgtg

SEQ ID NO: 275898 - DNA, 15 bp, Homo sapiens
aaattagccgggtgt

SEQ ID NO: 275899 - DNA, 15 bp, Homo sapiens
aaaattagccgggtg

SEQ ID NO: 275900 - DNA, 15 bp, Homo sapiens
aaaaattagccgggt

SEQ ID NO: 275901 - DNA, 15 bp, Homo sapiens
caaaaattagccggg

SEQ ID NO: 275902 - DNA, 15 bp, Homo sapiens
acaaaaattagccgg

SEQ ID NO: 275903 - DNA, 15 bp, Homo sapiens
tacaaaaattagccg

SEQ ID NO: 275904 - DNA, 15 bp, Homo sapiens
atacaaaaattagcc

SEQ ID NO: 275905 - DNA, 15 bp, Homo sapiens
aatacaaaaattagc

SEQ ID NO: 275906 - DNA, 15 bp, Homo sapiens
aaatacaaaaattag

SEQ ID NO: 275907 - DNA, 15 bp, Homo sapiens
ctactaaaaatacaa

SEQ ID NO: 275908 - DNA, 15 bp, Homo sapiens
tctactaaaaataca

SEQ ID NO: 275909 - DNA, 15 bp, Homo sapiens
ctctactaaaaatac

SEQ ID NO: 275910 - DNA, 15 bp, Homo sapiens
tctctactaaaaata

SEQ ID NO: 275911 - DNA, 15 bp, Homo sapiens
gtctctactaaaaat

SEQ ID NO: 275912 - DNA, 15 bp, Homo sapiens
cgtctctactaaaaa

SEQ ID NO: 275913 - DNA, 15 bp, Homo sapiens
ccgtctctactaaaa

SEQ ID NO: 275914 - DNA, 15 bp, Homo sapiens
cccgtctctactaaa

SEQ ID NO: 275915 - DNA, 15 bp, Homo sapiens
ccccgtctctactaa

SEQ ID NO: 275916 - DNA, 15 bp, Homo sapiens
accccgtctctacta

SEQ ID NO: 275917 - DNA, 15 bp, Homo sapiens
aaccccgtctctact

SEQ ID NO: 275918 - DNA, 15 bp, Homo sapiens
aaaccccgtctctac

SEQ ID NO: 275919 - DNA, 15 bp, Homo sapiens
gaaaccccgtctcta

SEQ ID NO: 275920 - DNA, 15 bp, Homo sapiens
tgaaaccccgtctct

SEQ ID NO: 275921 - DNA, 15 bp, Homo sapiens
gtgaaaccccgtctc

SEQ ID NO: 275922 - DNA, 15 bp, Homo sapiens
ggtgaaaccccgtct

SEQ ID NO: 275923 - DNA, 15 bp, Homo sapiens
cggtgaaaccccgtc

SEQ ID NO: 275924 - DNA, 15 bp, Homo sapiens
acggtgaaaccccgt

SEQ ID NO: 275925 - DNA, 15 bp, Homo sapiens
cacggtgaaaccccg

SEQ ID NO: 275926 - DNA, 15 bp, Homo sapiens
acacggtgaaacccc

SEQ ID NO: 275927 - DNA, 15 bp, Homo sapiens
aacacggtgaaaccc

SEQ ID NO: 275928 - DNA, 15 bp, Homo sapiens
taacacggtgaaacc

SEQ ID NO: 275929 - DNA, 15 bp, Homo sapiens
ctaacacggtgaaac

SEQ ID NO: 275930 - DNA, 15 bp, Homo sapiens
actaacacggtgaaa

SEQ ID NO: 275931 - DNA, 15 bp, Homo sapiens
gactaacacggtgaa

SEQ ID NO: 275932 - DNA, 15 bp, Homo sapiens
tgactaacacggtga

SEQ ID NO: 275933 - DNA, 15 bp, Homo sapiens
ctgactaacacggtg

SEQ ID NO: 275934 - DNA, 15 bp, Homo sapiens
cctgactaacacggt

SEQ ID NO: 275935 - DNA, 15 bp, Homo sapiens
gcctgactaacacgg

SEQ ID NO: 275936 - DNA, 15 bp, Homo sapiens
agcctgactaacacg

SEQ ID NO: 275937 - DNA, 15 bp, Homo sapiens
cagcctgactaacac

SEQ ID NO: 275938 - DNA, 15 bp, Homo sapiens
ccagcctgactaaca

SEQ ID NO: 275939 - DNA, 15 bp, Homo sapiens
accagcctgactaac

SEQ ID NO: 275940 - DNA, 15 bp, Homo sapiens
gaccagcctgactaa

SEQ ID NO: 275941 - DNA, 15 bp, Homo sapiens
agaccagcctgacta

SEQ ID NO: 275942 - DNA, 15 bp, Homo sapiens
gagaccagcctgact

SEQ ID NO: 275943 - DNA, 15 bp, Homo sapiens
cgagaccagcctgac

SEQ ID NO: 275944 - DNA, 15 bp, Homo sapiens
tcgagaccagcctga

SEQ ID NO: 275945 - DNA, 15 bp, Homo sapiens
ttcgagaccagcctg

SEQ ID NO: 275946 - DNA, 15 bp, Homo sapiens
gttcgagaccagcct

SEQ ID NO: 275947 - DNA, 15 bp, Homo sapiens
agttcgagaccagcc

SEQ ID NO: 275948 - DNA, 15 bp, Homo sapiens
gagttcgagaccagc

SEQ ID NO: 275949 - DNA, 15 bp, Homo sapiens
ggagttcgagaccag

SEQ ID NO: 275950 - DNA, 15 bp, Homo sapiens
aggagttcgagacca

SEQ ID NO: 275951 - DNA, 15 bp, Homo sapiens
caggagttcgagacc

SEQ ID NO: 275952 - DNA, 15 bp, Homo sapiens
tcaggagttcgagac

SEQ ID NO: 275953 - DNA, 15 bp, Homo sapiens
gtcaggagttcgaga

SEQ ID NO: 275954 - DNA, 15 bp, Homo sapiens
ggtcaggagttcgag

SEQ ID NO: 275955 - DNA, 15 bp, Homo sapiens
aggtcaggagttcga

SEQ ID NO: 275956 - DNA, 15 bp, Homo sapiens
gaggtcaggagttcg

SEQ ID NO: 275957 - DNA, 15 bp, Homo sapiens
tgaggtcaggagttc

SEQ ID NO: 275958 - DNA, 15 bp, Homo sapiens
atgaggtcaggagtt

SEQ ID NO: 275959 - DNA, 15 bp, Homo sapiens
catgaggtcaggagt

SEQ ID NO: 275960 - DNA, 15 bp, Homo sapiens
tcatgaggtcaggag

SEQ ID NO: 275961 - DNA, 15 bp, Homo sapiens
atcatgaggtcagga

SEQ ID NO: 275962 - DNA, 15 bp, Homo sapiens
gatcatgaggtcagg

SEQ ID NO: 275963 - DNA, 15 bp, Homo sapiens
agatcatgaggtcag

SEQ ID NO: 275964 - DNA, 15 bp, Homo sapiens
cagatcatgaggtca

SEQ ID NO: 275965 - DNA, 15 bp, Homo sapiens
gcagatcatgaggtc

SEQ ID NO: 275966 - DNA, 15 bp, Homo sapiens
ggcagatcatgaggt

SEQ ID NO: 275967 - DNA, 15 bp, Homo sapiens
gggcagatcatgagg

SEQ ID NO: 275968 - DNA, 15 bp, Homo sapiens
agggcagatcatgag

SEQ ID NO: 275969 - DNA, 15 bp, Homo sapiens
gagggcagatcatga

SEQ ID NO: 275970 - DNA, 15 bp, Homo sapiens
cgagggcagatcatg

SEQ ID NO: 275971 - DNA, 15 bp, Homo sapiens
ccgagggcagatcat

SEQ ID NO: 275972 - DNA, 15 bp, Homo sapiens
gccgagggcagatca

SEQ ID NO: 275973 - DNA, 15 bp, Homo sapiens
ggccgagggcagatc

SEQ ID NO: 275974 - DNA, 15 bp, Homo sapiens
aggccgagggcagat

SEQ ID NO: 275975 - DNA, 15 bp, Homo sapiens
gaggccgagggcaga

SEQ ID NO: 275976 - DNA, 15 bp, Homo sapiens
ggaggccgagggcag

SEQ ID NO: 275977 - DNA, 15 bp, Homo sapiens
gggaggccgagggca

SEQ ID NO: 275978 - DNA, 15 bp, Homo sapiens
tgggaggccgagggc

SEQ ID NO: 275979 - DNA, 15 bp, Homo sapiens
ttgggaggccgaggg

SEQ ID NO: 275980 - DNA, 15 bp, Homo sapiens
tttgggaggccgagg

SEQ ID NO: 275981 - DNA, 15 bp, Homo sapiens
ctttgggaggccgag

SEQ ID NO: 275982 - DNA, 15 bp, Homo sapiens
actttgggaggccga

SEQ ID NO: 275983 - DNA, 15 bp, Homo sapiens
cactttgggaggccg

SEQ ID NO: 275984 - DNA, 15 bp, Homo sapiens
gcactttgggaggcc

SEQ ID NO: 275985 - DNA, 15 bp, Homo sapiens
agcactttgggaggc

SEQ ID NO: 275986 - DNA, 15 bp, Homo sapiens
cagcactttgggagg

SEQ ID NO: 275987 - DNA, 15 bp, Homo sapiens
ccagcactttgggag

SEQ ID NO: 275988 - DNA, 15 bp, Homo sapiens
gccagcactttggga

SEQ ID NO: 275989 - DNA, 15 bp, Homo sapiens
tgccagcactttggg

SEQ ID NO: 275990 - DNA, 15 bp, Homo sapiens
atgccagcactttgg

SEQ ID NO: 275991 - DNA, 15 bp, Homo sapiens
aatgccagcactttg

SEQ ID NO: 275992 - DNA, 15 bp, Homo sapiens
taatgccagcacttt

SEQ ID NO: 275993 - DNA, 15 bp, Homo sapiens
gtaatgccagcactt

SEQ ID NO: 275994 - DNA, 15 bp, Homo sapiens
tgtaatgccagcact

SEQ ID NO: 275995 - DNA, 15 bp, Homo sapiens
ctgtaatgccagcac

SEQ ID NO: 275996 - DNA, 15 bp, Homo sapiens
cctgtaatgccagca

SEQ ID NO: 275997 - DNA, 15 bp, Homo sapiens
gcctgtaatgccagc

SEQ ID NO: 275998 - DNA, 15 bp, Homo sapiens
cgcctgtaatgccag

SEQ ID NO: 275999 - DNA, 15 bp, Homo sapiens
acgcctgtaatgcca

SEQ ID NO: 276000 - DNA, 15 bp, Homo sapiens
cacgcctgtaatgcc

SEQ ID NO: 276001 - DNA, 15 bp, Homo sapiens
tcacgcctgtaatgc

SEQ ID NO: 276002 - DNA, 15 bp, Homo sapiens
ctcacgcctgtaatg

SEQ ID NO: 276003 - DNA, 15 bp, Homo sapiens
agtggctcacgcctg

SEQ ID NO: 276004 - DNA, 15 bp, Homo sapiens
cagtggctcacgcct

SEQ ID NO: 276005 - DNA, 15 bp, Homo sapiens
acagtggctcacgcc

SEQ ID NO: 276006 - DNA, 15 bp, Homo sapiens
cacagtggctcacgc

SEQ ID NO: 276007 - DNA, 15 bp, Homo sapiens
gcacagtggctcacg

SEQ ID NO: 276008 - DNA, 15 bp, Homo sapiens
ggcacagtggctcac

SEQ ID NO: 276009 - DNA, 15 bp, Homo sapiens
aggcacagtggctca

SEQ ID NO: 276010 - DNA, 15 bp, Homo sapiens
caggcacagtggctc

SEQ ID NO: 276011 - DNA, 15 bp, Homo sapiens
ccaggcacagtggct

SEQ ID NO: 276012 - DNA, 15 bp, Homo sapiens
gccaggcacagtggc

SEQ ID NO: 276013 - DNA, 15 bp, Homo sapiens
ggccaggcacagtgg

SEQ ID NO: 276014 - DNA, 15 bp, Homo sapiens
aggccaggcacagtg

SEQ ID NO: 276015 - DNA, 15 bp, Homo sapiens
aaggccaggcacagt

SEQ ID NO: 276016 - DNA, 15 bp, Homo sapiens
aaaggccaggcacag

SEQ ID NO: 276017 - DNA, 15 bp, Homo sapiens
taaaggccaggcaca

SEQ ID NO: 276018 - DNA, 15 bp, Homo sapiens
ataaaggccaggcac

SEQ ID NO: 276019 - DNA, 15 bp, Homo sapiens
aataaaggccaggca

SEQ ID NO: 276020 - DNA, 15 bp, Homo sapiens
taataaaggccaggc

SEQ ID NO: 276021 - DNA, 15 bp, Homo sapiens
ctaataaaggccagg

SEQ ID NO: 276022 - DNA, 15 bp, Homo sapiens
actaataaaggccag

SEQ ID NO: 276023 - DNA, 15 bp, Homo sapiens
cactaataaaggcca

SEQ ID NO: 276024 - DNA, 15 bp, Homo sapiens
acactaataaaggcc

SEQ ID NO: 276025 - DNA, 15 bp, Homo sapiens
tacactaataaaggc

SEQ ID NO: 276026 - DNA, 15 bp, Homo sapiens
atacactaataaagg

SEQ ID NO: 276027 - DNA, 15 bp, Homo sapiens
aatacactaataaag

SEQ ID NO: 276028 - DNA, 15 bp, Homo sapiens
aaatacactaataaa

SEQ ID NO: 276029 - DNA, 15 bp, Homo sapiens
aaaatacactaataa

SEQ ID NO: 276030 - DNA, 15 bp, Homo sapiens
taaaatacactaata

SEQ ID NO: 276031 - DNA, 15 bp, Homo sapiens
ttaaaatacactaat

SEQ ID NO: 276032 - DNA, 15 bp, Homo sapiens
tttaaaatacactaa

SEQ ID NO: 276033 - DNA, 15 bp, Homo sapiens
ctttaaaatacacta

SEQ ID NO: 276034 - DNA, 15 bp, Homo sapiens
gctttaaaatacact

SEQ ID NO: 276035 - DNA, 15 bp, Homo sapiens
ttgctaccaaagtaa

SEQ ID NO: 276036 - DNA, 15 bp, Homo sapiens
tttgctaccaaagta

SEQ ID NO: 276037 - DNA, 15 bp, Homo sapiens
atttgctaccaaagt

SEQ ID NO: 276038 - DNA, 15 bp, Homo sapiens
catttgctaccaaag

SEQ ID NO: 276039 - DNA, 15 bp, Homo sapiens
ccatttgctaccaaa

SEQ ID NO: 276040 - DNA, 15 bp, Homo sapiens
accatttgctaccaa

SEQ ID NO: 276041 - DNA, 15 bp, Homo sapiens
aaccatttgctacca

SEQ ID NO: 276042 - DNA, 15 bp, Homo sapiens
aaaccatttgctacc

SEQ ID NO: 276043 - DNA, 15 bp, Homo sapiens
aaaaccatttgctac

SEQ ID NO: 276044 - DNA, 15 bp, Homo sapiens
aaaaaccatttgcta

SEQ ID NO: 276045 - DNA, 15 bp, Homo sapiens
gaaaaaccatttgct

SEQ ID NO: 276046 - DNA, 15 bp, Homo sapiens
agaaaaaccatttgc

SEQ ID NO: 276047 - DNA, 15 bp, Homo sapiens
aagaaaaaccatttg

SEQ ID NO: 276048 - DNA, 15 bp, Homo sapiens
aaagaaaaaccattt

SEQ ID NO: 276049 - DNA, 15 bp, Homo sapiens
caaagaaaaaccatt

SEQ ID NO: 276050 - DNA, 15 bp, Homo sapiens
tcaaagaaaaaccat

SEQ ID NO: 276051 - DNA, 15 bp, Homo sapiens
ttcaaagaaaaacca

SEQ ID NO: 276052 - DNA, 15 bp, Homo sapiens
cttcaaagaaaaacc

SEQ ID NO: 276053 - DNA, 15 bp, Homo sapiens
tcttcaaagaaaaac

SEQ ID NO: 276054 - DNA, 15 bp, Homo sapiens
atcttcaaagaaaaa

SEQ ID NO: 276055 - DNA, 15 bp, Homo sapiens
aatcttcaaagaaaa

SEQ ID NO: 276056 - DNA, 15 bp, Homo sapiens
taatcttcaaagaaa

SEQ ID NO: 276057 - DNA, 15 bp, Homo sapiens
ttaatcttcaaagaa

SEQ ID NO: 276058 - DNA, 15 bp, Homo sapiens
attaatcttcaaaga

SEQ ID NO: 276059 - DNA, 15 bp, Homo sapiens
cattaatcttcaaag

SEQ ID NO: 276060 - DNA, 15 bp, Homo sapiens
tcattaatcttcaaa

SEQ ID NO: 276061 - DNA, 15 bp, Homo sapiens
ttcattaatcttcaa

SEQ ID NO: 276062 - DNA, 15 bp, Homo sapiens
cttcattaatcttca

SEQ ID NO: 276063 - DNA, 15 bp, Homo sapiens
tcttcattaatcttc

SEQ ID NO: 276064 - DNA, 15 bp, Homo sapiens
atcttcattaatctt

SEQ ID NO: 276065 - DNA, 15 bp, Homo sapiens
tatcttcattaatct

SEQ ID NO: 276066 - DNA, 15 bp, Homo sapiens
ctatcttcattaatc

SEQ ID NO: 276067 - DNA, 15 bp, Homo sapiens
tctatcttcattaat

SEQ ID NO: 276068 - DNA, 15 bp, Homo sapiens
gtctatcttcattaa

SEQ ID NO: 276069 - DNA, 15 bp, Homo sapiens
tgtctatcttcatta

SEQ ID NO: 276070 - DNA, 15 bp, Homo sapiens
ttgtctatcttcatt

SEQ ID NO: 276071 - DNA, 15 bp, Homo sapiens
cttgtctatcttcat

SEQ ID NO: 276072 - DNA, 15 bp, Homo sapiens
tcttgtctatcttca

SEQ ID NO: 276073 - DNA, 15 bp, Homo sapiens
gtcttgtctatcttc

SEQ ID NO: 276074 - DNA, 15 bp, Homo sapiens
ggtcttgtctatctt

SEQ ID NO: 276075 - DNA, 15 bp, Homo sapiens
gggtcttgtctatct

SEQ ID NO: 276076 - DNA, 15 bp, Homo sapiens
tgggtcttgtctatc

SEQ ID NO: 276077 - DNA, 15 bp, Homo sapiens
atgggtcttgtctat

SEQ ID NO: 276078 - DNA, 15 bp, Homo sapiens
aatgggtcttgtcta

SEQ ID NO: 276079 - DNA, 15 bp, Homo sapiens
taatgggtcttgtct

SEQ ID NO: 276080 - DNA, 15 bp, Homo sapiens
ttaatgggtcttgtc

SEQ ID NO: 276081 - DNA, 15 bp, Homo sapiens
cttaatgggtcttgt

SEQ ID NO: 276082 - DNA, 15 bp, Homo sapiens
ccttaatgggtcttg

SEQ ID NO: 276083 - DNA, 15 bp, Homo sapiens
accttaatgggtctt

SEQ ID NO: 276084 - DNA, 15 bp, Homo sapiens
caccttaatgggtct

SEQ ID NO: 276085 - DNA, 15 bp, Homo sapiens
tcaccttaatgggtc

SEQ ID NO: 276086 - DNA, 15 bp, Homo sapiens
ttcaccttaatgggt

SEQ ID NO: 276087 - DNA, 15 bp, Homo sapiens
cttcaccttaatggg

SEQ ID NO: 276088 - DNA, 15 bp, Homo sapiens
acttcaccttaatgg

SEQ ID NO: 276089 - DNA, 15 bp, Homo sapiens
cacttcaccttaatg

SEQ ID NO: 276090 - DNA, 15 bp, Homo sapiens
ccacttcaccttaat

SEQ ID NO: 276091 - DNA, 15 bp, Homo sapiens
cccacttcaccttaa

SEQ ID NO: 276092 - DNA, 15 bp, Homo sapiens
gcccacttcacctta

SEQ ID NO: 276093 - DNA, 15 bp, Homo sapiens
agcccacttcacctt

SEQ ID NO: 276094 - DNA, 15 bp, Homo sapiens
tagcccacttcacct

SEQ ID NO: 276095 - DNA, 15 bp, Homo sapiens
atagcccacttcacc

SEQ ID NO: 276096 - DNA, 15 bp, Homo sapiens
aatagcccacttcac

SEQ ID NO: 276097 - DNA, 15 bp, Homo sapiens
aaatagcccacttca

SEQ ID NO: 276098 - DNA, 15 bp, Homo sapiens
gaaatagcccacttc

SEQ ID NO: 276099 - DNA, 15 bp, Homo sapiens
tgaaatagcccactt

SEQ ID NO: 276100 - DNA, 15 bp, Homo sapiens
ttgaaatagcccact

SEQ ID NO: 276101 - DNA, 15 bp, Homo sapiens
tttgaaatagcccac

SEQ ID NO: 276102 - DNA, 15 bp, Homo sapiens
atttgaaatagccca

SEQ ID NO: 276103 - DNA, 15 bp, Homo sapiens
tatttgaaatagccc

SEQ ID NO: 276104 - DNA, 15 bp, Homo sapiens
atatttgaaatagcc

SEQ ID NO: 276105 - DNA, 15 bp, Homo sapiens
aatatttgaaatagc

SEQ ID NO: 276106 - DNA, 15 bp, Homo sapiens
gaatatttgaaatag

SEQ ID NO: 276107 - DNA, 15 bp, Homo sapiens
tgaatatttgaaata

SEQ ID NO: 276108 - DNA, 15 bp, Homo sapiens
ttgaatatttgaaat

SEQ ID NO: 276109 - DNA, 15 bp, Homo sapiens
gttgaatatttgaaa

SEQ ID NO: 276110 - DNA, 15 bp, Homo sapiens
tgttgaatatttgaa

SEQ ID NO: 276111 - DNA, 15 bp, Homo sapiens
ctgttgaatatttga

SEQ ID NO: 276112 - DNA, 15 bp, Homo sapiens
actgttgaatatttg

SEQ ID NO: 276113 - DNA, 15 bp, Homo sapiens
aactgttgaatattt

SEQ ID NO: 276114 - DNA, 15 bp, Homo sapiens
aaactgttgaatatt

SEQ ID NO: 276115 - DNA, 15 bp, Homo sapiens
taaactgttgaatat

SEQ ID NO: 276116 - DNA, 15 bp, Homo sapiens
gtaaactgttgaata

SEQ ID NO: 276117 - DNA, 15 bp, Homo sapiens
tgtaaactgttgaat

SEQ ID NO: 276118 - DNA, 15 bp, Homo sapiens
atgtaaactgttgaa

SEQ ID NO: 276119 - DNA, 15 bp, Homo sapiens
tatgtaaactgttga

SEQ ID NO: 276120 - DNA, 15 bp, Homo sapiens
atatgtaaactgttg

SEQ ID NO: 276121 - DNA, 15 bp, Homo sapiens
tatatgtaaactgtt

SEQ ID NO: 276122 - DNA, 15 bp, Homo sapiens
ttatatgtaaactgt

SEQ ID NO: 276123 - DNA, 15 bp, Homo sapiens
tttatatgtaaactg

SEQ ID NO: 276124 - DNA, 15 bp, Homo sapiens
ttttatatgtaaact

SEQ ID NO: 276125 - DNA, 15 bp, Homo sapiens
tttttatatgtaaac

SEQ ID NO: 276126 - DNA, 15 bp, Homo sapiens
ttttttatatgtaaa

SEQ ID NO: 276127 - DNA, 15 bp, Homo sapiens
cttttttatatgtaa

SEQ ID NO: 276128 - DNA, 15 bp, Homo sapiens
acttttttatatgta

SEQ ID NO: 276129 - DNA, 15 bp, Homo sapiens
aacttttttatatgt

SEQ ID NO: 276130 - DNA, 15 bp, Homo sapiens
taacttttttatatg

SEQ ID NO: 276131 - DNA, 15 bp, Homo sapiens
ataacttttttatat

SEQ ID NO: 276132 - DNA, 15 bp, Homo sapiens
aataacttttttata

SEQ ID NO: 276133 - DNA, 15 bp, Homo sapiens
aaataacttttttat

SEQ ID NO: 276134 - DNA, 15 bp, Homo sapiens
aaaataactttttta

SEQ ID NO: 276135 - DNA, 15 bp, Homo sapiens
taaaataactttttt

SEQ ID NO: 276136 - DNA, 15 bp, Homo sapiens
ttaaaataacttttt

SEQ ID NO: 276137 - DNA, 15 bp, Homo sapiens
cttaaaataactttt

SEQ ID NO: 276138 - DNA, 15 bp, Homo sapiens
tcttaaaataacttt

SEQ ID NO: 276139 - DNA, 15 bp, Homo sapiens
ctcttaaaataactt

SEQ ID NO: 276140 - DNA, 15 bp, Homo sapiens
gctcttaaaataact

SEQ ID NO: 276141 - DNA, 15 bp, Homo sapiens
agctcttaaaataac

SEQ ID NO: 276142 - DNA, 15 bp, Homo sapiens
tagctcttaaaataa

SEQ ID NO: 276143 - DNA, 15 bp, Homo sapiens
ttagctcttaaaata

SEQ ID NO: 276144 - DNA, 15 bp, Homo sapiens
cttagctcttaaaat

SEQ ID NO: 276145 - DNA, 15 bp, Homo sapiens
gcttagctcttaaaa

SEQ ID NO: 276146 - DNA, 15 bp, Homo sapiens
cgcttagctcttaaa

SEQ ID NO: 276147 - DNA, 15 bp, Homo sapiens
acgcttagctcttaa

SEQ ID NO: 276148 - DNA, 15 bp, Homo sapiens
gacgcttagctctta

SEQ ID NO: 276149 - DNA, 15 bp, Homo sapiens
agacgcttagctctt

SEQ ID NO: 276150 - DNA, 15 bp, Homo sapiens
cagacgcttagctct

SEQ ID NO: 276151 - DNA, 15 bp, Homo sapiens
acagacgcttagctc

SEQ ID NO: 276152 - DNA, 15 bp, Homo sapiens
tacagacgcttagct

SEQ ID NO: 276153 - DNA, 15 bp, Homo sapiens
atacagacgcttagc

SEQ ID NO: 276154 - DNA, 15 bp, Homo sapiens
gatacagacgcttag

SEQ ID NO: 276155 - DNA, 15 bp, Homo sapiens
ggatacagacgctta

SEQ ID NO: 276156 - DNA, 15 bp, Homo sapiens
tggatacagacgctt

SEQ ID NO: 276157 - DNA, 15 bp, Homo sapiens
gtggatacagacgct

SEQ ID NO: 276158 - DNA, 15 bp, Homo sapiens
agtggatacagacgc

SEQ ID NO: 276159 - DNA, 15 bp, Homo sapiens
cagtggatacagacg

SEQ ID NO: 276160 - DNA, 15 bp, Homo sapiens
tcagtggatacagac

SEQ ID NO: 276161 - DNA, 15 bp, Homo sapiens
atcagtggatacaga

SEQ ID NO: 276162 - DNA, 15 bp, Homo sapiens
tatcagtggatacag

SEQ ID NO: 276163 - DNA, 15 bp, Homo sapiens
ctatcagtggataca

SEQ ID NO: 276164 - DNA, 15 bp, Homo sapiens
gctatcagtggatac

SEQ ID NO: 276165 - DNA, 15 bp, Homo sapiens
tgctatcagtggata

SEQ ID NO: 276166 - DNA, 15 bp, Homo sapiens
ttgctatcagtggat

SEQ ID NO: 276167 - DNA, 15 bp, Homo sapiens
attgctatcagtgga

SEQ ID NO: 276168 - DNA, 15 bp, Homo sapiens
cattgctatcagtgg

SEQ ID NO: 276169 - DNA, 15 bp, Homo sapiens
gcattgctatcagtg

SEQ ID NO: 276170 - DNA, 15 bp, Homo sapiens
tgcattgctatcagt

SEQ ID NO: 276171 - DNA, 15 bp, Homo sapiens
ttgcattgctatcag

SEQ ID NO: 276172 - DNA, 15 bp, Homo sapiens
gttgcattgctatca

SEQ ID NO: 276173 - DNA, 15 bp, Homo sapiens
tgttgcattgctatc

SEQ ID NO: 276174 - DNA, 15 bp, Homo sapiens
gtgttgcattgctat

SEQ ID NO: 276175 - DNA, 15 bp, Homo sapiens
ggtgttgcattgcta

SEQ ID NO: 276176 - DNA, 15 bp, Homo sapiens
aggtgttgcattgct

SEQ ID NO: 276177 - DNA, 15 bp, Homo sapiens
taggtgttgcattgc

SEQ ID NO: 276178 - DNA, 15 bp, Homo sapiens
ctaggtgttgcattg

SEQ ID NO: 276179 - DNA, 15 bp, Homo sapiens
actaggtgttgcatt

SEQ ID NO: 276180 - DNA, 15 bp, Homo sapiens
aactaggtgttgcat

SEQ ID NO: 276181 - DNA, 15 bp, Homo sapiens
aaactaggtgttgca

SEQ ID NO: 276182 - DNA, 15 bp, Homo sapiens
taaactaggtgttgc

SEQ ID NO: 276183 - DNA, 15 bp, Homo sapiens
ataaactaggtgttg

SEQ ID NO: 276184 - DNA, 15 bp, Homo sapiens
cataaactaggtgtt

SEQ ID NO: 276185 - DNA, 15 bp, Homo sapiens
tcataaactaggtgt

SEQ ID NO: 276186 - DNA, 15 bp, Homo sapiens
atcataaactaggtg

SEQ ID NO: 276187 - DNA, 15 bp, Homo sapiens
catcataaactaggt

SEQ ID NO: 276188 - DNA, 15 bp, Homo sapiens
tcatcataaactagg

SEQ ID NO: 276189 - DNA, 15 bp, Homo sapiens
gtcatcataaactag

SEQ ID NO: 276190 - DNA, 15 bp, Homo sapiens
agtcatcataaacta

SEQ ID NO: 276191 - DNA, 15 bp, Homo sapiens
aagtcatcataaact

SEQ ID NO: 276192 - DNA, 15 bp, Homo sapiens
caagtcatcataaac

SEQ ID NO: 276193 - DNA, 15 bp, Homo sapiens
tcaagtcatcataaa

SEQ ID NO: 276194 - DNA, 15 bp, Homo sapiens
ttcaagtcatcataa

SEQ ID NO: 276195 - DNA, 15 bp, Homo sapiens
tttcaagtcatcata

SEQ ID NO: 276196 - DNA, 15 bp, Homo sapiens
ctttcaagtcatcat

SEQ ID NO: 276197 - DNA, 15 bp, Homo sapiens
tctttcaagtcatca

SEQ ID NO: 276198 - DNA, 15 bp, Homo sapiens
ttctttcaagtcatc

SEQ ID NO: 276199 - DNA, 15 bp, Homo sapiens
tttctttcaagtcat

SEQ ID NO: 276200 - DNA, 15 bp, Homo sapiens
ttttctttcaagtca

SEQ ID NO: 276201 - DNA, 15 bp, Homo sapiens
gttttctttcaagtc

SEQ ID NO: 276202 - DNA, 15 bp, Homo sapiens
tgttttctttcaagt

SEQ ID NO: 276203 - DNA, 15 bp, Homo sapiens
ttgttttctttcaag

SEQ ID NO: 276204 - DNA, 15 bp, Homo sapiens
tttgttttctttcaa

SEQ ID NO: 276205 - DNA, 15 bp, Homo sapiens
atttgttttctttca

SEQ ID NO: 276206 - DNA, 15 bp, Homo sapiens
catttgttttctttc

SEQ ID NO: 276207 - DNA, 15 bp, Homo sapiens
gcatttgttttcttt

SEQ ID NO: 276208 - DNA, 15 bp, Homo sapiens
ggcatttgttttctt

SEQ ID NO: 276209 - DNA, 15 bp, Homo sapiens
gggcatttgttttct

SEQ ID NO: 276210 - DNA, 15 bp, Homo sapiens
tgggcatttgttttc

SEQ ID NO: 276211 - DNA, 15 bp, Homo sapiens
atgggcatttgtttt

SEQ ID NO: 276212 - DNA, 15 bp, Homo sapiens
catgggcatttgttt

SEQ ID NO: 276213 - DNA, 15 bp, Homo sapiens
tcatgggcatttgtt

SEQ ID NO: 276214 - DNA, 15 bp, Homo sapiens
ttcatgggcatttgt

SEQ ID NO: 276215 - DNA, 15 bp, Homo sapiens
cttcatgggcatttg

SEQ ID NO: 276216 - DNA, 15 bp, Homo sapiens
tcttcatgggcattt

SEQ ID NO: 276217 - DNA, 15 bp, Homo sapiens
ttcttcatgggcatt

SEQ ID NO: 276218 - DNA, 15 bp, Homo sapiens
tttcttcatgggcat

SEQ ID NO: 276219 - DNA, 15 bp, Homo sapiens
ttttcttcatgggca

SEQ ID NO: 276220 - DNA, 15 bp, Homo sapiens
tttttcttcatgggc

SEQ ID NO: 276221 - DNA, 15 bp, Homo sapiens
ttttttcttcatggg

SEQ ID NO: 276222 - DNA, 15 bp, Homo sapiens
cttttttcttcatgg

SEQ ID NO: 276223 - DNA, 15 bp, Homo sapiens
gcttttttcttcatg

SEQ ID NO: 276224 - DNA, 15 bp, Homo sapiens
agcttttttcttcat

SEQ ID NO: 276225 - DNA, 15 bp, Homo sapiens
cagcttttttcttca

SEQ ID NO: 276226 - DNA, 15 bp, Homo sapiens
acagcttttttcttc

SEQ ID NO: 276227 - DNA, 15 bp, Homo sapiens
tacagcttttttctt

SEQ ID NO: 276228 - DNA, 15 bp, Homo sapiens
atacagcttttttct

SEQ ID NO: 276229 - DNA, 15 bp, Homo sapiens
aatacagcttttttc

SEQ ID NO: 276230 - DNA, 15 bp, Homo sapiens
aaatacagctttttt

SEQ ID NO: 276231 - DNA, 15 bp, Homo sapiens
aaaatacagcttttt

SEQ ID NO: 276232 - DNA, 15 bp, Homo sapiens
taaaatacagctttt

SEQ ID NO: 276233 - DNA, 15 bp, Homo sapiens
ttaaaatacagcttt

SEQ ID NO: 276234 - DNA, 15 bp, Homo sapiens
attaaaatacagctt

SEQ ID NO: 276235 - DNA, 15 bp, Homo sapiens
aattaaaatacagct

SEQ ID NO: 276236 - DNA, 15 bp, Homo sapiens
aaattaaaatacagc

SEQ ID NO: 276237 - DNA, 15 bp, Homo sapiens
aaaattaaaatacag

SEQ ID NO: 276238 - DNA, 15 bp, Homo sapiens
taaaattaaaataca

SEQ ID NO: 276239 - DNA, 15 bp, Homo sapiens
ataaaattaaaatac

SEQ ID NO: 276240 - DNA, 15 bp, Homo sapiens
gataaaattaaaata

SEQ ID NO: 276241 - DNA, 15 bp, Homo sapiens
agataaaattaaaat

SEQ ID NO: 276242 - DNA, 15 bp, Homo sapiens
tagataaaattaaaa

SEQ ID NO: 276243 - DNA, 15 bp, Homo sapiens
ttagataaaattaaa

SEQ ID NO: 276244 - DNA, 15 bp, Homo sapiens
tttagataaaattaa

SEQ ID NO: 276245 - DNA, 15 bp, Homo sapiens
atttagataaaatta

SEQ ID NO: 276246 - DNA, 15 bp, Homo sapiens
catttagataaaatt

SEQ ID NO: 276247 - DNA, 15 bp, Homo sapiens
acatttagataaaat

SEQ ID NO: 276248 - DNA, 15 bp, Homo sapiens
tacatttagataaaa

SEQ ID NO: 276249 - DNA, 15 bp, Homo sapiens
gtacatttagataaa

SEQ ID NO: 276250 - DNA, 15 bp, Homo sapiens
agtacatttagataa

SEQ ID NO: 276251 - DNA, 15 bp, Homo sapiens
aagtacatttagata

SEQ ID NO: 276252 - DNA, 15 bp, Homo sapiens
aaagtacatttagat

SEQ ID NO: 276253 - DNA, 15 bp, Homo sapiens
gaaagtacatttaga

SEQ ID NO: 276254 - DNA, 15 bp, Homo sapiens
tgaaagtacatttag

SEQ ID NO: 276255 - DNA, 15 bp, Homo sapiens
ctgaaagtacattta

SEQ ID NO: 276256 - DNA, 15 bp, Homo sapiens
actgaaagtacattt

SEQ ID NO: 276257 - DNA, 15 bp, Homo sapiens
gactgaaagtacatt

SEQ ID NO: 276258 - DNA, 15 bp, Homo sapiens
tgactgaaagtacat

SEQ ID NO: 276259 - DNA, 15 bp, Homo sapiens
ttgactgaaagtaca

SEQ ID NO: 276260 - DNA, 15 bp, Homo sapiens
attgactgaaagtac

SEQ ID NO: 276261 - DNA, 15 bp, Homo sapiens
tattgactgaaagta

SEQ ID NO: 276262 - DNA, 15 bp, Homo sapiens
ctattgactgaaagt

SEQ ID NO: 276263 - DNA, 15 bp, Homo sapiens
actattgactgaaag

SEQ ID NO: 276264 - DNA, 15 bp, Homo sapiens
aactattgactgaaa

SEQ ID NO: 276265 - DNA, 15 bp, Homo sapiens
gaactattgactgaa

SEQ ID NO: 276266 - DNA, 15 bp, Homo sapiens
tgaactattgactga

SEQ ID NO: 276267 - DNA, 15 bp, Homo sapiens
ctgaactattgactg

SEQ ID NO: 276268 - DNA, 15 bp, Homo sapiens
actgaactattgact

SEQ ID NO: 276269 - DNA, 15 bp, Homo sapiens
tactgaactattgac

SEQ ID NO: 276270 - DNA, 15 bp, Homo sapiens
ttactgaactattga

SEQ ID NO: 276271 - DNA, 15 bp, Homo sapiens
gttactgaactattg

SEQ ID NO: 276272 - DNA, 15 bp, Homo sapiens
tgttactgaactatt

SEQ ID NO: 276273 - DNA, 15 bp, Homo sapiens
atgttactgaactat

SEQ ID NO: 276274 - DNA, 15 bp, Homo sapiens
aatgttactgaacta

SEQ ID NO: 276275 - DNA, 15 bp, Homo sapiens
aaatgttactgaact

SEQ ID NO: 276276 - DNA, 15 bp, Homo sapiens
aaaatgttactgaac

SEQ ID NO: 276277 - DNA, 15 bp, Homo sapiens
gaaaatgttactgaa

SEQ ID NO: 276278 - DNA, 15 bp, Homo sapiens
ggaaaatgttactga

SEQ ID NO: 276279 - DNA, 15 bp, Homo sapiens
aggaaaatgttactg

SEQ ID NO: 276280 - DNA, 15 bp, Homo sapiens
gaggaaaatgttact

SEQ ID NO: 276281 - DNA, 15 bp, Homo sapiens
ggaggaaaatgttac

SEQ ID NO: 276282 - DNA, 15 bp, Homo sapiens
gggaggaaaatgtta

SEQ ID NO: 276283 - DNA, 15 bp, Homo sapiens
tgggaggaaaatgtt

SEQ ID NO: 276284 - DNA, 15 bp, Homo sapiens
ttgggaggaaaatgt

SEQ ID NO: 276285 - DNA, 15 bp, Homo sapiens
attgggaggaaaatg

SEQ ID NO: 276286 - DNA, 15 bp, Homo sapiens
tattgggaggaaaat

SEQ ID NO: 276287 - DNA, 15 bp, Homo sapiens
gtattgggaggaaaa

SEQ ID NO: 276288 - DNA, 15 bp, Homo sapiens
tgtattgggaggaaa

SEQ ID NO: 276289 - DNA, 15 bp, Homo sapiens
ttgtattgggaggaa

SEQ ID NO: 276290 - DNA, 15 bp, Homo sapiens
attgtattgggagga

SEQ ID NO: 276291 - DNA, 15 bp, Homo sapiens
tattgtattgggagg

SEQ ID NO: 276292 - DNA, 15 bp, Homo sapiens
gtattgtattgggag

SEQ ID NO: 276293 - DNA, 15 bp, Homo sapiens
agtattgtattggga

SEQ ID NO: 276294 - DNA, 15 bp, Homo sapiens
gagtattgtattggg

SEQ ID NO: 276295 - DNA, 15 bp, Homo sapiens
ggagtattgtattgg

SEQ ID NO: 276296 - DNA, 15 bp, Homo sapiens
gggagtattgtattg

SEQ ID NO: 276297 - DNA, 15 bp, Homo sapiens
agggagtattgtatt

SEQ ID NO: 276298 - DNA, 15 bp, Homo sapiens
gagggagtattgtat

SEQ ID NO: 276299 - DNA, 15 bp, Homo sapiens
agagggagtattgta

SEQ ID NO: 276300 - DNA, 15 bp, Homo sapiens
gagagggagtattgt

SEQ ID NO: 276301 - DNA, 15 bp, Homo sapiens
agagagggagtattg

SEQ ID NO: 276302 - DNA, 15 bp, Homo sapiens
gagagagggagtatt

SEQ ID NO: 276303 - DNA, 15 bp, Homo sapiens
agagagagggagtat

SEQ ID NO: 276304 - DNA, 15 bp, Homo sapiens
tagagagagggagta

SEQ ID NO: 276305 - DNA, 15 bp, Homo sapiens
atagagagagggagt

SEQ ID NO: 276306 - DNA, 15 bp, Homo sapiens
tatagagagagggag

SEQ ID NO: 276307 - DNA, 15 bp, Homo sapiens
ttatagagagaggga

SEQ ID NO: 276308 - DNA, 15 bp, Homo sapiens
cttatagagagaggg

SEQ ID NO: 276309 - DNA, 15 bp, Homo sapiens
ccttatagagagagg

SEQ ID NO: 276310 - DNA, 15 bp, Homo sapiens
gccttatagagagag

SEQ ID NO: 276311 - DNA, 15 bp, Homo sapiens
agccttatagagaga

SEQ ID NO: 276312 - DNA, 15 bp, Homo sapiens
tagccttatagagag

SEQ ID NO: 276313 - DNA, 15 bp, Homo sapiens
atagccttatagaga

SEQ ID NO: 276314 - DNA, 15 bp, Homo sapiens
aatagccttatagag

SEQ ID NO: 276315 - DNA, 15 bp, Homo sapiens
gaatagccttataga

SEQ ID NO: 276316 - DNA, 15 bp, Homo sapiens
ggaatagccttatag

SEQ ID NO: 276317 - DNA, 15 bp, Homo sapiens
aggaatagccttata

SEQ ID NO: 276318 - DNA, 15 bp, Homo sapiens
caggaatagccttat

SEQ ID NO: 276319 - DNA, 15 bp, Homo sapiens
ccaggaatagcctta

SEQ ID NO: 276320 - DNA, 15 bp, Homo sapiens
cccaggaatagcctt

SEQ ID NO: 276321 - DNA, 15 bp, Homo sapiens
tcccaggaatagcct

SEQ ID NO: 276322 - DNA, 15 bp, Homo sapiens
ctcccaggaatagcc

SEQ ID NO: 276323 - DNA, 15 bp, Homo sapiens
gctcccaggaatagc

SEQ ID NO: 276324 - DNA, 15 bp, Homo sapiens
ggctcccaggaatag

SEQ ID NO: 276325 - DNA, 15 bp, Homo sapiens
tggctcccaggaata

SEQ ID NO: 276326 - DNA, 15 bp, Homo sapiens
ctggctcccaggaat

SEQ ID NO: 276327 - DNA, 15 bp, Homo sapiens
tctggctcccaggaa

SEQ ID NO: 276328 - DNA, 15 bp, Homo sapiens
gtctggctcccagga

SEQ ID NO: 276329 - DNA, 15 bp, Homo sapiens
tgtctggctcccagg

SEQ ID NO: 276330 - DNA, 15 bp, Homo sapiens
ttgtctggctcccag

SEQ ID NO: 276331 - DNA, 15 bp, Homo sapiens
cttgtctggctccca

SEQ ID NO: 276332 - DNA, 15 bp, Homo sapiens
acttgtctggctccc

SEQ ID NO: 276333 - DNA, 15 bp, Homo sapiens
aacttgtctggctcc

SEQ ID NO: 276334 - DNA, 15 bp, Homo sapiens
aaacttgtctggctc

SEQ ID NO: 276335 - DNA, 15 bp, Homo sapiens
taaacttgtctggct

SEQ ID NO: 276336 - DNA, 15 bp, Homo sapiens
ctaaacttgtctggc

SEQ ID NO: 276337 - DNA, 15 bp, Homo sapiens
cctaaacttgtctgg

SEQ ID NO: 276338 - DNA, 15 bp, Homo sapiens
acctaaacttgtctg

SEQ ID NO: 276339 - DNA, 15 bp, Homo sapiens
tacctaaacttgtct

SEQ ID NO: 276340 - DNA, 15 bp, Homo sapiens
ttacctaaacttgtc

SEQ ID NO: 276341 - DNA, 15 bp, Homo sapiens
attacctaaacttgt

SEQ ID NO: 276342 - DNA, 15 bp, Homo sapiens
tattacctaaacttg

SEQ ID NO: 276343 - DNA, 15 bp, Homo sapiens
ttattacctaaactt

SEQ ID NO: 276344 - DNA, 15 bp, Homo sapiens
cttattacctaaact

SEQ ID NO: 276345 - DNA, 15 bp, Homo sapiens
ccttattacctaaac

SEQ ID NO: 276346 - DNA, 15 bp, Homo sapiens
cccttattacctaaa

SEQ ID NO: 276347 - DNA, 15 bp, Homo sapiens
tcccttattacctaa

SEQ ID NO: 276348 - DNA, 15 bp, Homo sapiens
ctcccttattaccta

SEQ ID NO: 276349 - DNA, 15 bp, Homo sapiens
actcccttattacct

SEQ ID NO: 276350 - DNA, 15 bp, Homo sapiens
aactcccttattacc

SEQ ID NO: 276351 - DNA, 15 bp, Homo sapiens
taactcccttattac

SEQ ID NO: 276352 - DNA, 15 bp, Homo sapiens
ttaactcccttatta

SEQ ID NO: 276353 - DNA, 15 bp, Homo sapiens
cttaactcccttatt

SEQ ID NO: 276354 - DNA, 15 bp, Homo sapiens
tcttaactcccttat

SEQ ID NO: 276355 - DNA, 15 bp, Homo sapiens
ctcttaactccctta

SEQ ID NO: 276356 - DNA, 15 bp, Homo sapiens
tctcttaactccctt

SEQ ID NO: 276357 - DNA, 15 bp, Homo sapiens
ctctcttaactccct

SEQ ID NO: 276358 - DNA, 15 bp, Homo sapiens
actctcttaactccc

SEQ ID NO: 276359 - DNA, 15 bp, Homo sapiens
tactctcttaactcc

SEQ ID NO: 276360 - DNA, 15 bp, Homo sapiens
ttactctcttaactc

SEQ ID NO: 276361 - DNA, 15 bp, Homo sapiens
gttactctcttaact

SEQ ID NO: 276362 - DNA, 15 bp, Homo sapiens
agttactctcttaac

SEQ ID NO: 276363 - DNA, 15 bp, Homo sapiens
cagttactctcttaa

SEQ ID NO: 276364 - DNA, 15 bp, Homo sapiens
gcagttactctctta

SEQ ID NO: 276365 - DNA, 15 bp, Homo sapiens
agcagttactctctt

SEQ ID NO: 276366 - DNA, 15 bp, Homo sapiens
aagcagttactctct

SEQ ID NO: 276367 - DNA, 15 bp, Homo sapiens
caagcagttactctc

SEQ ID NO: 276368 - DNA, 15 bp, Homo sapiens
gcaagcagttactct

SEQ ID NO: 276369 - DNA, 15 bp, Homo sapiens
tgcaagcagttactc

SEQ ID NO: 276370 - DNA, 15 bp, Homo sapiens
ctgcaagcagttact

SEQ ID NO: 276371 - DNA, 15 bp, Homo sapiens
actgcaagcagttac

SEQ ID NO: 276372 - DNA, 15 bp, Homo sapiens
aactgcaagcagtta

SEQ ID NO: 276373 - DNA, 15 bp, Homo sapiens
aaactgcaagcagtt

SEQ ID NO: 276374 - DNA, 15 bp, Homo sapiens
aaaactgcaagcagt

SEQ ID NO: 276375 - DNA, 15 bp, Homo sapiens
taaaactgcaagcag

SEQ ID NO: 276376 - DNA, 15 bp, Homo sapiens
ttaaaactgcaagca

SEQ ID NO: 276377 - DNA, 15 bp, Homo sapiens
tttaaaactgcaagc

SEQ ID NO: 276378 - DNA, 15 bp, Homo sapiens
atttaaaactgcaag

SEQ ID NO: 276379 - DNA, 15 bp, Homo sapiens
tatttaaaactgcaa

SEQ ID NO: 276380 - DNA, 15 bp, Homo sapiens
ctatttaaaactgca

SEQ ID NO: 276381 - DNA, 15 bp, Homo sapiens
tctatttaaaactgc

SEQ ID NO: 276382 - DNA, 15 bp, Homo sapiens
gtctatttaaaactg

SEQ ID NO: 276383 - DNA, 15 bp, Homo sapiens
tgtctatttaaaact

SEQ ID NO: 276384 - DNA, 15 bp, Homo sapiens
ttgtctatttaaaac

SEQ ID NO: 276385 - DNA, 15 bp, Homo sapiens
attgtctatttaaaa

SEQ ID NO: 276386 - DNA, 15 bp, Homo sapiens
aattgtctatttaaa

SEQ ID NO: 276387 - DNA, 15 bp, Homo sapiens
taattgtctatttaa

SEQ ID NO: 276388 - DNA, 15 bp, Homo sapiens
ttaattgtctattta

SEQ ID NO: 276389 - DNA, 15 bp, Homo sapiens
gttaattgtctattt

SEQ ID NO: 276390 - DNA, 15 bp, Homo sapiens
agttaattgtctatt

SEQ ID NO: 276391 - DNA, 15 bp, Homo sapiens
aagttaattgtctat

SEQ ID NO: 276392 - DNA, 15 bp, Homo sapiens
aaagttaattgtcta

SEQ ID NO: 276393 - DNA, 15 bp, Homo sapiens
aaaagttaattgtct

SEQ ID NO: 276394 - DNA, 15 bp, Homo sapiens
aaaaagttaattgtc

SEQ ID NO: 276395 - DNA, 15 bp, Homo sapiens
caaaaagttaattgt

SEQ ID NO: 276396 - DNA, 15 bp, Homo sapiens
gcaaaaagttaattg

SEQ ID NO: 276397 - DNA, 15 bp, Homo sapiens
agcaaaaagttaatt

SEQ ID NO: 276398 - DNA, 15 bp, Homo sapiens
aagcaaaaagttaat

SEQ ID NO: 276399 - DNA, 15 bp, Homo sapiens
gaagcaaaaagttaa

SEQ ID NO: 276400 - DNA, 15 bp, Homo sapiens
ggaagcaaaaagtta

SEQ ID NO: 276401 - DNA, 15 bp, Homo sapiens
gggaagcaaaaagtt

SEQ ID NO: 276402 - DNA, 15 bp, Homo sapiens
agggaagcaaaaagt

SEQ ID NO: 276403 - DNA, 15 bp, Homo sapiens
gagggaagcaaaaag

SEQ ID NO: 276404 - DNA, 15 bp, Homo sapiens
agagggaagcaaaaa

SEQ ID NO: 276405 - DNA, 15 bp, Homo sapiens
aagagggaagcaaaa

SEQ ID NO: 276406 - DNA, 15 bp, Homo sapiens
taagagggaagcaaa

SEQ ID NO: 276407 - DNA, 15 bp, Homo sapiens
ttaagagggaagcaa

SEQ ID NO: 276408 - DNA, 15 bp, Homo sapiens
attaagagggaagca

SEQ ID NO: 276409 - DNA, 15 bp, Homo sapiens
cattaagagggaagc

SEQ ID NO: 276410 - DNA, 15 bp, Homo sapiens
acattaagagggaag

SEQ ID NO: 276411 - DNA, 15 bp, Homo sapiens
cacattaagagggaa

SEQ ID NO: 276412 - DNA, 15 bp, Homo sapiens
gcacattaagaggga

SEQ ID NO: 276413 - DNA, 15 bp, Homo sapiens
agcacattaagaggg

SEQ ID NO: 276414 - DNA, 15 bp, Homo sapiens
tagcacattaagagg

SEQ ID NO: 276415 - DNA, 15 bp, Homo sapiens
ttagcacattaagag

SEQ ID NO: 276416 - DNA, 15 bp, Homo sapiens
attagcacattaaga

SEQ ID NO: 276417 - DNA, 15 bp, Homo sapiens
tattagcacattaag

SEQ ID NO: 276418 - DNA, 15 bp, Homo sapiens
ctattagcacattaa

SEQ ID NO: 276419 - DNA, 15 bp, Homo sapiens
actattagcacatta

SEQ ID NO: 276420 - DNA, 15 bp, Homo sapiens
aactattagcacatt

SEQ ID NO: 276421 - DNA, 15 bp, Homo sapiens
caactattagcacat

SEQ ID NO: 276422 - DNA, 15 bp, Homo sapiens
acaactattagcaca

SEQ ID NO: 276423 - DNA, 15 bp, Homo sapiens
cacaactattagcac

SEQ ID NO: 276424 - DNA, 15 bp, Homo sapiens
acacaactattagca

SEQ ID NO: 276425 - DNA, 15 bp, Homo sapiens
gacacaactattagc

SEQ ID NO: 276426 - DNA, 15 bp, Homo sapiens
agacacaactattag

SEQ ID NO: 276427 - DNA, 15 bp, Homo sapiens
tagacacaactatta

SEQ ID NO: 276428 - DNA, 15 bp, Homo sapiens
ttagacacaactatt

SEQ ID NO: 276429 - DNA, 15 bp, Homo sapiens
tttagacacaactat

SEQ ID NO: 276430 - DNA, 15 bp, Homo sapiens
ttttagacacaacta

SEQ ID NO: 276431 - DNA, 15 bp, Homo sapiens
tttttagacacaact

SEQ ID NO: 276432 - DNA, 15 bp, Homo sapiens
ttttttagacacaac

SEQ ID NO: 276433 - DNA, 15 bp, Homo sapiens
tttttttagacacaa

SEQ ID NO: 276434 - DNA, 15 bp, Homo sapiens
atttttttagacaca

SEQ ID NO: 276435 - DNA, 15 bp, Homo sapiens
tatttttttagacac

SEQ ID NO: 276436 - DNA, 15 bp, Homo sapiens
ctatttttttagaca

SEQ ID NO: 276437 - DNA, 15 bp, Homo sapiens
cctatttttttagac

SEQ ID NO: 276438 - DNA, 15 bp, Homo sapiens
gcctatttttttaga

SEQ ID NO: 276439 - DNA, 15 bp, Homo sapiens
tgcctatttttttag

SEQ ID NO: 276440 - DNA, 15 bp, Homo sapiens
ttgcctattttttta

SEQ ID NO: 276441 - DNA, 15 bp, Homo sapiens
attgcctattttttt

SEQ ID NO: 276442 - DNA, 15 bp, Homo sapiens
aattgcctatttttt

SEQ ID NO: 276443 - DNA, 15 bp, Homo sapiens
gaattgcctattttt

SEQ ID NO: 276444 - DNA, 15 bp, Homo sapiens
agaattgcctatttt

SEQ ID NO: 276445 - DNA, 15 bp, Homo sapiens
aagaattgcctattt

SEQ ID NO: 276446 - DNA, 15 bp, Homo sapiens
taagaattgcctatt

SEQ ID NO: 276447 - DNA, 15 bp, Homo sapiens
ttaagaattgcctat

SEQ ID NO: 276448 - DNA, 15 bp, Homo sapiens
tttaagaattgccta

SEQ ID NO: 276449 - DNA, 15 bp, Homo sapiens
ttttaagaattgcct

SEQ ID NO: 276450 - DNA, 15 bp, Homo sapiens
tttttaagaattgcc

SEQ ID NO: 276451 - DNA, 15 bp, Homo sapiens
ctttttaagaattgc

SEQ ID NO: 276452 - DNA, 15 bp, Homo sapiens
cctttttaagaattg

SEQ ID NO: 276453 - DNA, 15 bp, Homo sapiens
acctttttaagaatt

SEQ ID NO: 276454 - DNA, 15 bp, Homo sapiens
tacctttttaagaat

SEQ ID NO: 276455 - DNA, 15 bp, Homo sapiens
gtacctttttaagaa

SEQ ID NO: 276456 - DNA, 15 bp, Homo sapiens
ggtacctttttaaga

SEQ ID NO: 276457 - DNA, 15 bp, Homo sapiens
tggtacctttttaag

SEQ ID NO: 276458 - DNA, 15 bp, Homo sapiens
atggtacctttttaa

SEQ ID NO: 276459 - DNA, 15 bp, Homo sapiens
aatggtaccttttta

SEQ ID NO: 276460 - DNA, 15 bp, Homo sapiens
aaatggtaccttttt

SEQ ID NO: 276461 - DNA, 15 bp, Homo sapiens
gaaatggtacctttt

SEQ ID NO: 276462 - DNA, 15 bp, Homo sapiens
agaaatggtaccttt

SEQ ID NO: 276463 - DNA, 15 bp, Homo sapiens
cagaaatggtacctt

SEQ ID NO: 276464 - DNA, 15 bp, Homo sapiens
tcagaaatggtacct

SEQ ID NO: 276465 - DNA, 15 bp, Homo sapiens
atcagaaatggtacc

SEQ ID NO: 276466 - DNA, 15 bp, Homo sapiens
aatcagaaatggtac

SEQ ID NO: 276467 - DNA, 15 bp, Homo sapiens
aaatcagaaatggta

SEQ ID NO: 276468 - DNA, 15 bp, Homo sapiens
gaaatcagaaatggt

SEQ ID NO: 276469 - DNA, 15 bp, Homo sapiens
agaaatcagaaatgg

SEQ ID NO: 276470 - DNA, 15 bp, Homo sapiens
aagaaatcagaaatg

SEQ ID NO: 276471 - DNA, 15 bp, Homo sapiens
aaagaaatcagaaat

SEQ ID NO: 276472 - DNA, 15 bp, Homo sapiens
taaagaaatcagaaa

SEQ ID NO: 276473 - DNA, 15 bp, Homo sapiens
ataaagaaatcagaa

SEQ ID NO: 276474 - DNA, 15 bp, Homo sapiens
aataaagaaatcaga

SEQ ID NO: 276475 - DNA, 15 bp, Homo sapiens
taataaagaaatcag

SEQ ID NO: 276476 - DNA, 15 bp, Homo sapiens
ataataaagaaatca

SEQ ID NO: 276477 - DNA, 15 bp, Homo sapiens
gataataaagaaatc

SEQ ID NO: 276478 - DNA, 15 bp, Homo sapiens
agataataaagaaat

SEQ ID NO: 276479 - DNA, 15 bp, Homo sapiens
cagataataaagaaa

SEQ ID NO: 276480 - DNA, 15 bp, Homo sapiens
acagataataaagaa

SEQ ID NO: 276481 - DNA, 15 bp, Homo sapiens
tacagataataaaga

SEQ ID NO: 276482 - DNA, 15 bp, Homo sapiens
ttacagataataaag

SEQ ID NO: 276483 - DNA, 15 bp, Homo sapiens
tttacagataataaa

SEQ ID NO: 276484 - DNA, 15 bp, Homo sapiens
gtttacagataataa

SEQ ID NO: 276485 - DNA, 15 bp, Homo sapiens
agtttacagataata

SEQ ID NO: 276486 - DNA, 15 bp, Homo sapiens
aagtttacagataat

SEQ ID NO: 276487 - DNA, 15 bp, Homo sapiens
aaagtttacagataa

SEQ ID NO: 276488 - DNA, 15 bp, Homo sapiens
caaagtttacagata

SEQ ID NO: 276489 - DNA, 15 bp, Homo sapiens
ccaaagtttacagat

SEQ ID NO: 276490 - DNA, 15 bp, Homo sapiens
tccaaagtttacaga

SEQ ID NO: 276491 - DNA, 15 bp, Homo sapiens
ttccaaagtttacag

SEQ ID NO: 276492 - DNA, 15 bp, Homo sapiens
tttccaaagtttaca

SEQ ID NO: 276493 - DNA, 15 bp, Homo sapiens
gtttccaaagtttac

SEQ ID NO: 276494 - DNA, 15 bp, Homo sapiens
agtttccaaagttta

SEQ ID NO: 276495 - DNA, 15 bp, Homo sapiens
tagtttccaaagttt

SEQ ID NO: 276496 - DNA, 15 bp, Homo sapiens
ttagtttccaaagtt

SEQ ID NO: 276497 - DNA, 15 bp, Homo sapiens
attagtttccaaagt

SEQ ID NO: 276498 - DNA, 15 bp, Homo sapiens
gattagtttccaaag

SEQ ID NO: 276499 - DNA, 15 bp, Homo sapiens
tgattagtttccaaa

SEQ ID NO: 276500 - DNA, 15 bp, Homo sapiens
gtgattagtttccaa

SEQ ID NO: 276501 - DNA, 15 bp, Homo sapiens
tgtgattagtttcca

SEQ ID NO: 276502 - DNA, 15 bp, Homo sapiens
gtgtgattagtttcc

SEQ ID NO: 276503 - DNA, 15 bp, Homo sapiens
tgtgtgattagtttc

SEQ ID NO: 276504 - DNA, 15 bp, Homo sapiens
ttgtgtgattagttt

SEQ ID NO: 276505 - DNA, 15 bp, Homo sapiens
tttgtgtgattagtt

SEQ ID NO: 276506 - DNA, 15 bp, Homo sapiens
ttttgtgtgattagt

SEQ ID NO: 276507 - DNA, 15 bp, Homo sapiens
gttttgtgtgattag

SEQ ID NO: 276508 - DNA, 15 bp, Homo sapiens
agttttgtgtgatta

SEQ ID NO: 276509 - DNA, 15 bp, Homo sapiens
tagttttgtgtgatt

SEQ ID NO: 276510 - DNA, 15 bp, Homo sapiens
gtagttttgtgtgat

SEQ ID NO: 276511 - DNA, 15 bp, Homo sapiens
ggtagttttgtgtga

SEQ ID NO: 276512 - DNA, 15 bp, Homo sapiens
tggtagttttgtgtg

SEQ ID NO: 276513 - DNA, 15 bp, Homo sapiens
ttggtagttttgtgt

SEQ ID NO: 276514 - DNA, 15 bp, Homo sapiens
tttggtagttttgtg

SEQ ID NO: 276515 - DNA, 15 bp, Homo sapiens
atttggtagttttgt

SEQ ID NO: 276516 - DNA, 15 bp, Homo sapiens
aatttggtagttttg

SEQ ID NO: 276517 - DNA, 15 bp, Homo sapiens
taatttggtagtttt

SEQ ID NO: 276518 - DNA, 15 bp, Homo sapiens
ctaatttggtagttt

SEQ ID NO: 276519 - DNA, 15 bp, Homo sapiens
gctaatttggtagtt

SEQ ID NO: 276520 - DNA, 15 bp, Homo sapiens
tgctaatttggtagt

SEQ ID NO: 276521 - DNA, 15 bp, Homo sapiens
ttgctaatttggtag

SEQ ID NO: 276522 - DNA, 15 bp, Homo sapiens
tttgctaatttggta

SEQ ID NO: 276523 - DNA, 15 bp, Homo sapiens
atttgctaatttggt

SEQ ID NO: 276524 - DNA, 15 bp, Homo sapiens
catttgctaatttgg

SEQ ID NO: 276525 - DNA, 15 bp, Homo sapiens
acatttgctaatttg

SEQ ID NO: 276526 - DNA, 15 bp, Homo sapiens
gacatttgctaattt

SEQ ID NO: 276527 - DNA, 15 bp, Homo sapiens
agacatttgctaatt

SEQ ID NO: 276528 - DNA, 15 bp, Homo sapiens
aagacatttgctaat

SEQ ID NO: 276529 - DNA, 15 bp, Homo sapiens
caagacatttgctaa

SEQ ID NO: 276530 - DNA, 15 bp, Homo sapiens
tcaagacatttgcta

SEQ ID NO: 276531 - DNA, 15 bp, Homo sapiens
ttcaagacatttgct

SEQ ID NO: 276532 - DNA, 15 bp, Homo sapiens
tttcaagacatttgc

SEQ ID NO: 276533 - DNA, 15 bp, Homo sapiens
atttcaagacatttg

SEQ ID NO: 276534 - DNA, 15 bp, Homo sapiens
gatttcaagacattt

SEQ ID NO: 276535 - DNA, 15 bp, Homo sapiens
agatttcaagacatt

SEQ ID NO: 276536 - DNA, 15 bp, Homo sapiens
cagatttcaagacat

SEQ ID NO: 276537 - DNA, 15 bp, Homo sapiens
acagatttcaagaca

SEQ ID NO: 276538 - DNA, 15 bp, Homo sapiens
tacagatttcaagac

SEQ ID NO: 276539 - DNA, 15 bp, Homo sapiens
atacagatttcaaga

SEQ ID NO: 276540 - DNA, 15 bp, Homo sapiens
tatacagatttcaag

SEQ ID NO: 276541 - DNA, 15 bp, Homo sapiens
gtatacagatttcaa

SEQ ID NO: 276542 - DNA, 15 bp, Homo sapiens
tgtatacagatttca

SEQ ID NO: 276543 - DNA, 15 bp, Homo sapiens
ttgtatacagatttc

SEQ ID NO: 276544 - DNA, 15 bp, Homo sapiens
tttgtatacagattt

SEQ ID NO: 276545 - DNA, 15 bp, Homo sapiens
ttttgtatacagatt

SEQ ID NO: 276546 - DNA, 15 bp, Homo sapiens
gttttgtatacagat

SEQ ID NO: 276547 - DNA, 15 bp, Homo sapiens
tgttttgtatacaga

SEQ ID NO: 276548 - DNA, 15 bp, Homo sapiens
atgttttgtatacag

SEQ ID NO: 276549 - DNA, 15 bp, Homo sapiens
tatgttttgtataca

SEQ ID NO: 276550 - DNA, 15 bp, Homo sapiens
ttatgttttgtatac

SEQ ID NO: 276551 - DNA, 15 bp, Homo sapiens
tttatgttttgtata

SEQ ID NO: 276552 - DNA, 15 bp, Homo sapiens
atttatgttttgtat

SEQ ID NO: 276553 - DNA, 15 bp, Homo sapiens
aatttatgttttgta

SEQ ID NO: 276554 - DNA, 15 bp, Homo sapiens
taatttatgttttgt

SEQ ID NO: 276555 - DNA, 15 bp, Homo sapiens
gtaatttatgttttg

SEQ ID NO: 276556 - DNA, 15 bp, Homo sapiens
ggtaatttatgtttt

SEQ ID NO: 276557 - DNA, 15 bp, Homo sapiens
aggtaatttatgttt

SEQ ID NO: 276558 - DNA, 15 bp, Homo sapiens
gaggtaatttatgtt

SEQ ID NO: 276559 - DNA, 15 bp, Homo sapiens
agaggtaatttatgt

SEQ ID NO: 276560 - DNA, 15 bp, Homo sapiens
tagaggtaatttatg

SEQ ID NO: 276561 - DNA, 15 bp, Homo sapiens
ttagaggtaatttat

SEQ ID NO: 276562 - DNA, 15 bp, Homo sapiens
attagaggtaattta

SEQ ID NO: 276563 - DNA, 15 bp, Homo sapiens
aattagaggtaattt

SEQ ID NO: 276564 - DNA, 15 bp, Homo sapiens
aaattagaggtaatt

SEQ ID NO: 276565 - DNA, 15 bp, Homo sapiens
gaaattagaggtaat

SEQ ID NO: 276566 - DNA, 15 bp, Homo sapiens
tgaaattagaggtaa

SEQ ID NO: 276567 - DNA, 15 bp, Homo sapiens
ttgaaattagaggta

SEQ ID NO: 276568 - DNA, 15 bp, Homo sapiens
tttgaaattagaggt

SEQ ID NO: 276569 - DNA, 15 bp, Homo sapiens
gtttgaaattagagg

SEQ ID NO: 276570 - DNA, 15 bp, Homo sapiens
agtttgaaattagag

SEQ ID NO: 276571 - DNA, 15 bp, Homo sapiens
gagtttgaaattaga

SEQ ID NO: 276572 - DNA, 15 bp, Homo sapiens
agagtttgaaattag

SEQ ID NO: 276573 - DNA, 15 bp, Homo sapiens
gagagtttgaaatta

SEQ ID NO: 276574 - DNA, 15 bp, Homo sapiens
tgagagtttgaaatt

SEQ ID NO: 276575 - DNA, 15 bp, Homo sapiens
atgagagtttgaaat

SEQ ID NO: 276576 - DNA, 15 bp, Homo sapiens
aatgagagtttgaaa

SEQ ID NO: 276577 - DNA, 15 bp, Homo sapiens
aaatgagagtttgaa

SEQ ID NO: 276578 - DNA, 15 bp, Homo sapiens
taaatgagagtttga

SEQ ID NO: 276579 - DNA, 15 bp, Homo sapiens
ataaatgagagtttg

SEQ ID NO: 276580 - DNA, 15 bp, Homo sapiens
aataaatgagagttt

SEQ ID NO: 276581 - DNA, 15 bp, Homo sapiens
caataaatgagagtt

SEQ ID NO: 276582 - DNA, 15 bp, Homo sapiens
ccaataaatgagagt

SEQ ID NO: 276583 - DNA, 15 bp, Homo sapiens
accaataaatgagag

SEQ ID NO: 276584 - DNA, 15 bp, Homo sapiens
caccaataaatgaga

SEQ ID NO: 276585 - DNA, 15 bp, Homo sapiens
acaccaataaatgag

SEQ ID NO: 276586 - DNA, 15 bp, Homo sapiens
tacaccaataaatga

SEQ ID NO: 276587 - DNA, 15 bp, Homo sapiens
gtacaccaataaatg

SEQ ID NO: 276588 - DNA, 15 bp, Homo sapiens
ggtacaccaataaat

SEQ ID NO: 276589 - DNA, 15 bp, Homo sapiens
tggtacaccaataaa

SEQ ID NO: 276590 - DNA, 15 bp, Homo sapiens
gtggtacaccaataa

SEQ ID NO: 276591 - DNA, 15 bp, Homo sapiens
agtggtacaccaata

SEQ ID NO: 276592 - DNA, 15 bp, Homo sapiens
gagtggtacaccaat

SEQ ID NO: 276593 - DNA, 15 bp, Homo sapiens
tgagtggtacaccaa

SEQ ID NO: 276594 - DNA, 15 bp, Homo sapiens
ttgagtggtacacca

SEQ ID NO: 276595 - DNA, 15 bp, Homo sapiens
attgagtggtacacc

SEQ ID NO: 276596 - DNA, 15 bp, Homo sapiens
gattgagtggtacac

SEQ ID NO: 276597 - DNA, 15 bp, Homo sapiens
agattgagtggtaca

SEQ ID NO: 276598 - DNA, 15 bp, Homo sapiens
aagattgagtggtac

SEQ ID NO: 276599 - DNA, 15 bp, Homo sapiens
aaagattgagtggta

SEQ ID NO: 276600 - DNA, 15 bp, Homo sapiens
aaaagattgagtggt

SEQ ID NO: 276601 - DNA, 15 bp, Homo sapiens
taaaagattgagtgg

SEQ ID NO: 276602 - DNA, 15 bp, Homo sapiens
ttaaaagattgagtg

SEQ ID NO: 276603 - DNA, 15 bp, Homo sapiens
tttaaaagattgagt

SEQ ID NO: 276604 - DNA, 15 bp, Homo sapiens
ttttaaaagattgag

SEQ ID NO: 276605 - DNA, 15 bp, Homo sapiens
tttttaaaagattga

SEQ ID NO: 276606 - DNA, 15 bp, Homo sapiens
ctttttaaaagattg

SEQ ID NO: 276607 - DNA, 15 bp, Homo sapiens
tctttttaaaagatt

SEQ ID NO: 276608 - DNA, 15 bp, Homo sapiens
atctttttaaaagat

SEQ ID NO: 276609 - DNA, 15 bp, Homo sapiens
catctttttaaaaga

SEQ ID NO: 276610 - DNA, 15 bp, Homo sapiens
tcatctttttaaaag

SEQ ID NO: 276611 - DNA, 15 bp, Homo sapiens
ttcatctttttaaaa

SEQ ID NO: 276612 - DNA, 15 bp, Homo sapiens
tttcatctttttaaa

SEQ ID NO: 276613 - DNA, 15 bp, Homo sapiens
ttttcatctttttaa

SEQ ID NO: 276614 - DNA, 15 bp, Homo sapiens
tttttcatcttttta

SEQ ID NO: 276615 - DNA, 15 bp, Homo sapiens
ctttttcatcttttt

SEQ ID NO: 276616 - DNA, 15 bp, Homo sapiens
tctttttcatctttt

SEQ ID NO: 276617 - DNA, 15 bp, Homo sapiens
ttctttttcatcttt

SEQ ID NO: 276618 - DNA, 15 bp, Homo sapiens
tttctttttcatctt

SEQ ID NO: 276619 - DNA, 15 bp, Homo sapiens
ttttctttttcatct

SEQ ID NO: 276620 - DNA, 15 bp, Homo sapiens
tttttctttttcatc

SEQ ID NO: 276621 - DNA, 15 bp, Homo sapiens
ttttttctttttcat

SEQ ID NO: 276622 - DNA, 15 bp, Homo sapiens
tttttttctttttca

SEQ ID NO: 276623 - DNA, 15 bp, Homo sapiens
ctttttttttctttt

SEQ ID NO: 276624 - DNA, 15 bp, Homo sapiens
actttttttttcttt

SEQ ID NO: 276625 - DNA, 15 bp, Homo sapiens
cactttttttttctt

SEQ ID NO: 276626 - DNA, 15 bp, Homo sapiens
ccactttttttttct

SEQ ID NO: 276627 - DNA, 15 bp, Homo sapiens
gccactttttttttc

SEQ ID NO: 276628 - DNA, 15 bp, Homo sapiens
agccacttttttttt

SEQ ID NO: 276629 - DNA, 15 bp, Homo sapiens
gagccactttttttt

SEQ ID NO: 276630 - DNA, 15 bp, Homo sapiens
ggagccacttttttt

SEQ ID NO: 276631 - DNA, 15 bp, Homo sapiens
tggagccactttttt

SEQ ID NO: 276632 - DNA, 15 bp, Homo sapiens
ttggagccacttttt

SEQ ID NO: 276633 - DNA, 15 bp, Homo sapiens
tttggagccactttt

SEQ ID NO: 276634 - DNA, 15 bp, Homo sapiens
ctttggagccacttt

SEQ ID NO: 276635 - DNA, 15 bp, Homo sapiens
cctttggagccactt

SEQ ID NO: 276636 - DNA, 15 bp, Homo sapiens
aagttccagccgcag

SEQ ID NO: 276637 - DNA, 15 bp, Homo sapiens
aaagttccagccgca

SEQ ID NO: 276638 - DNA, 15 bp, Homo sapiens
gaaagttccagccgc

SEQ ID NO: 276639 - DNA, 15 bp, Homo sapiens
ggaaagttccagccg

SEQ ID NO: 276640 - DNA, 15 bp, Homo sapiens
aggaaagttccagcc

SEQ ID NO: 276641 - DNA, 15 bp, Homo sapiens
gaggaaagttccagc

SEQ ID NO: 276642 - DNA, 15 bp, Homo sapiens
agaggaaagttccag

SEQ ID NO: 276643 - DNA, 15 bp, Homo sapiens
gagaggaaagttcca

SEQ ID NO: 276644 - DNA, 15 bp, Homo sapiens
ggagaggaaagttcc

SEQ ID NO: 276645 - DNA, 15 bp, Homo sapiens
tggagaggaaagttc

SEQ ID NO: 276646 - DNA, 15 bp, Homo sapiens
atggagaggaaagtt

SEQ ID NO: 276647 - DNA, 15 bp, Homo sapiens
aatggagaggaaagt

SEQ ID NO: 276648 - DNA, 15 bp, Homo sapiens
taatggagaggaaag

SEQ ID NO: 276649 - DNA, 15 bp, Homo sapiens
gtaatggagaggaaa

SEQ ID NO: 276650 - DNA, 15 bp, Homo sapiens
agtaatggagaggaa

SEQ ID NO: 276651 - DNA, 15 bp, Homo sapiens
gagtaatggagagga

SEQ ID NO: 276652 - DNA, 15 bp, Homo sapiens
ggagtaatggagagg

SEQ ID NO: 276653 - DNA, 15 bp, Homo sapiens
tggagtaatggagag

SEQ ID NO: 276654 - DNA, 15 bp, Homo sapiens
ctggagtaatggaga

SEQ ID NO: 276655 - DNA, 15 bp, Homo sapiens
gctggagtaatggag

SEQ ID NO: 276656 - DNA, 15 bp, Homo sapiens
tgctggagtaatgga

SEQ ID NO: 276657 - DNA, 15 bp, Homo sapiens
ctgctggagtaatgg

SEQ ID NO: 276658 - DNA, 15 bp, Homo sapiens
gctgctggagtaatg

SEQ ID NO: 276659 - DNA, 15 bp, Homo sapiens
agctgctggagtaat

SEQ ID NO: 276660 - DNA, 15 bp, Homo sapiens
gagctgctggagtaa

SEQ ID NO: 276661 - DNA, 15 bp, Homo sapiens
ggagctgctggagta

SEQ ID NO: 276662 - DNA, 15 bp, Homo sapiens
tggagctgctggagt

SEQ ID NO: 276663 - DNA, 15 bp, Homo sapiens
ctggagctgctggag

SEQ ID NO: 276664 - DNA, 15 bp, Homo sapiens
gctggagctgctgga

SEQ ID NO: 276665 - DNA, 15 bp, Homo sapiens
agctggagctgctgg

SEQ ID NO: 276666 - DNA, 15 bp, Homo sapiens
gagctggagctgctg

SEQ ID NO: 276667 - DNA, 15 bp, Homo sapiens
tgagctggagctgct

SEQ ID NO: 276668 - DNA, 15 bp, Homo sapiens
atgagctggagctgc

SEQ ID NO: 276669 - DNA, 15 bp, Homo sapiens
aatgagctggagctg

SEQ ID NO: 276670 - DNA, 15 bp, Homo sapiens
caatgagctggagct

SEQ ID NO: 276671 - DNA, 15 bp, Homo sapiens
gcaatgagctggagc

SEQ ID NO: 276672 - DNA, 15 bp, Homo sapiens
cgcaatgagctggag

SEQ ID NO: 276673 - DNA, 15 bp, Homo sapiens
tcgcaatgagctgga

SEQ ID NO: 276674 - DNA, 15 bp, Homo sapiens
gtcgcaatgagctgg

SEQ ID NO: 276675 - DNA, 15 bp, Homo sapiens
agtcgcaatgagctg

SEQ ID NO: 276676 - DNA, 15 bp, Homo sapiens
aagtcgcaatgagct

SEQ ID NO: 276677 - DNA, 15 bp, Homo sapiens
aaagtcgcaatgagc

SEQ ID NO: 276678 - DNA, 15 bp, Homo sapiens
aaaagtcgcaatgag

SEQ ID NO: 276679 - DNA, 15 bp, Homo sapiens
gaaaagtcgcaatga

SEQ ID NO: 276680 - DNA, 15 bp, Homo sapiens
ggaaaagtcgcaatg

SEQ ID NO: 276681 - DNA, 15 bp, Homo sapiens
cggaaaagtcgcaat

SEQ ID NO: 276682 - DNA, 15 bp, Homo sapiens
ccggaaaagtcgcaa

SEQ ID NO: 276683 - DNA, 15 bp, Homo sapiens
gccggaaaagtcgca

SEQ ID NO: 276684 - DNA, 15 bp, Homo sapiens
agccggaaaagtcgc

SEQ ID NO: 276685 - DNA, 15 bp, Homo sapiens
aagccggaaaagtcg

SEQ ID NO: 276686 - DNA, 15 bp, Homo sapiens
gaagccggaaaagtc

SEQ ID NO: 276687 - DNA, 15 bp, Homo sapiens
agaagccggaaaagt

SEQ ID NO: 276688 - DNA, 15 bp, Homo sapiens
gagaagccggaaaag

SEQ ID NO: 276689 - DNA, 15 bp, Homo sapiens
ggagaagccggaaaa

SEQ ID NO: 276690 - DNA, 15 bp, Homo sapiens
aggagaagccggaaa

SEQ ID NO: 276691 - DNA, 15 bp, Homo sapiens
gaggagaagccggaa

SEQ ID NO: 276692 - DNA, 15 bp, Homo sapiens
agaggagaagccgga

SEQ ID NO: 276693 - DNA, 15 bp, Homo sapiens
gagaggagaagccgg

SEQ ID NO: 276694 - DNA, 15 bp, Homo sapiens
ggagaggagaagccg

SEQ ID NO: 276695 - DNA, 15 bp, Homo sapiens
gggagaggagaagcc

SEQ ID NO: 276696 - DNA, 15 bp, Homo sapiens
cgggagaggagaagc

SEQ ID NO: 276697 - DNA, 15 bp, Homo sapiens
gcgggagaggagaag

SEQ ID NO: 276698 - DNA, 15 bp, Homo sapiens
ggcgggagaggagaa

SEQ ID NO: 276699 - DNA, 15 bp, Homo sapiens
aggcgggagaggaga

SEQ ID NO: 276700 - DNA, 15 bp, Homo sapiens
aaggcgggagaggag

SEQ ID NO: 276701 - DNA, 15 bp, Homo sapiens
gaaggcgggagagga

SEQ ID NO: 276702 - DNA, 15 bp, Homo sapiens
ggaaggcgggagagg

SEQ ID NO: 276703 - DNA, 15 bp, Homo sapiens
gggaaggcgggagag

SEQ ID NO: 276704 - DNA, 15 bp, Homo sapiens
tgggaaggcgggaga

SEQ ID NO: 276705 - DNA, 15 bp, Homo sapiens
atgggaaggcgggag

SEQ ID NO: 276706 - DNA, 15 bp, Homo sapiens
gatgggaaggcggga

SEQ ID NO: 276707 - DNA, 15 bp, Homo sapiens
tgatgggaaggcggg

SEQ ID NO: 276708 - DNA, 15 bp, Homo sapiens
ctgatgggaaggcgg

SEQ ID NO: 276709 - DNA, 15 bp, Homo sapiens
gctgatgggaaggcg

SEQ ID NO: 276710 - DNA, 15 bp, Homo sapiens
ggctgatgggaaggc

SEQ ID NO: 276711 - DNA, 15 bp, Homo sapiens
tggctgatgggaagg

SEQ ID NO: 276712 - DNA, 15 bp, Homo sapiens
atggctgatgggaag

SEQ ID NO: 276713 - DNA, 15 bp, Homo sapiens
aatggctgatgggaa

SEQ ID NO: 276714 - DNA, 15 bp, Homo sapiens
aaatggctgatggga

SEQ ID NO: 276715 - DNA, 15 bp, Homo sapiens
gaaatggctgatggg

SEQ ID NO: 276716 - DNA, 15 bp, Homo sapiens
ggaaatggctgatgg

SEQ ID NO: 276717 - DNA, 15 bp, Homo sapiens
gggaaatggctgatg

SEQ ID NO: 276718 - DNA, 15 bp, Homo sapiens
ggggaaatggctgat

SEQ ID NO: 276719 - DNA, 15 bp, Homo sapiens
gggggaaatggctga

SEQ ID NO: 276720 - DNA, 15 bp, Homo sapiens
cgggggaaatggctg

SEQ ID NO: 276721 - DNA, 15 bp, Homo sapiens
gcgggggaaatggct

SEQ ID NO: 276722 - DNA, 15 bp, Homo sapiens
ggcgggggaaatggc

SEQ ID NO: 276723 - DNA, 15 bp, Homo sapiens
cggcgggggaaatgg

SEQ ID NO: 276724 - DNA, 15 bp, Homo sapiens
gcggcgggggaaatg

SEQ ID NO: 276725 - DNA, 15 bp, Homo sapiens
tgcggcgggggaaat

SEQ ID NO: 276726 - DNA, 15 bp, Homo sapiens
atgcggcgggggaaa

SEQ ID NO: 276727 - DNA, 15 bp, Homo sapiens
aatgcggcgggggaa

SEQ ID NO: 276728 - DNA, 15 bp, Homo sapiens
caatgcggcggggga

SEQ ID NO: 276729 - DNA, 15 bp, Homo sapiens
acaatgcggcggggg

SEQ ID NO: 276730 - DNA, 15 bp, Homo sapiens
aacaatgcggcgggg

SEQ ID NO: 276731 - DNA, 15 bp, Homo sapiens
aaacaatgcggcggg

SEQ ID NO: 276732 - DNA, 15 bp, Homo sapiens
aaaacaatgcggcgg

SEQ ID NO: 276733 - DNA, 15 bp, Homo sapiens
aaaaacaatgcggcg

SEQ ID NO: 276734 - DNA, 15 bp, Homo sapiens
aaaaaacaatgcggc

SEQ ID NO: 276735 - DNA, 15 bp, Homo sapiens
aaaaaaacaatgcgg

SEQ ID NO: 276736 - DNA, 15 bp, Homo sapiens
taaaaaaacaatgcg

SEQ ID NO: 276737 - DNA, 15 bp, Homo sapiens
ttaaaaaaacaatgc

SEQ ID NO: 276738 - DNA, 15 bp, Homo sapiens
cttaaaaaaacaatg

SEQ ID NO: 276739 - DNA, 15 bp, Homo sapiens
tcttaaaaaaacaat

SEQ ID NO: 276740 - DNA, 15 bp, Homo sapiens
atcttaaaaaaacaa

SEQ ID NO: 276741 - DNA, 15 bp, Homo sapiens
aatcttaaaaaaaca

SEQ ID NO: 276742 - DNA, 15 bp, Homo sapiens
aaatcttaaaaaaac

SEQ ID NO: 276743 - DNA, 15 bp, Homo sapiens
gaaatcttaaaaaaa

SEQ ID NO: 276744 - DNA, 15 bp, Homo sapiens
tgaaatcttaaaaaa

SEQ ID NO: 276745 - DNA, 15 bp, Homo sapiens
ctgaaatcttaaaaa

SEQ ID NO: 276746 - DNA, 15 bp, Homo sapiens
tctgaaatcttaaaa

SEQ ID NO: 276747 - DNA, 15 bp, Homo sapiens
ttctgaaatcttaaa

SEQ ID NO: 276748 - DNA, 15 bp, Homo sapiens
tttctgaaatcttaa

SEQ ID NO: 276749 - DNA, 15 bp, Homo sapiens
atttctgaaatctta

SEQ ID NO: 276750 - DNA, 15 bp, Homo sapiens
gatttctgaaatctt

SEQ ID NO: 276751 - DNA, 15 bp, Homo sapiens
agatttctgaaatct

SEQ ID NO: 276752 - DNA, 15 bp, Homo sapiens
aagatttctgaaatc

SEQ ID NO: 276753 - DNA, 15 bp, Homo sapiens
aaagatttctgaaat

SEQ ID NO: 276754 - DNA, 15 bp, Homo sapiens
gaaagatttctgaaa

SEQ ID NO: 276755 - DNA, 15 bp, Homo sapiens
agaaagatttctgaa

SEQ ID NO: 276756 - DNA, 15 bp, Homo sapiens
tagaaagatttctga

SEQ ID NO: 276757 - DNA, 15 bp, Homo sapiens
ttagaaagatttctg

SEQ ID NO: 276758 - DNA, 15 bp, Homo sapiens
attagaaagatttct

SEQ ID NO: 276759 - DNA, 15 bp, Homo sapiens
tattagaaagatttc

SEQ ID NO: 276760 - DNA, 15 bp, Homo sapiens
gtattagaaagattt

SEQ ID NO: 276761 - DNA, 15 bp, Homo sapiens
tgtattagaaagatt

SEQ ID NO: 276762 - DNA, 15 bp, Homo sapiens
ttgtattagaaagat

SEQ ID NO: 276763 - DNA, 15 bp, Homo sapiens
cttgtattagaaaga

SEQ ID NO: 276764 - DNA, 15 bp, Homo sapiens
acttgtattagaaag

SEQ ID NO: 276765 - DNA, 15 bp, Homo sapiens
aacttgtattagaaa

SEQ ID NO: 276766 - DNA, 15 bp, Homo sapiens
caacttgtattagaa

SEQ ID NO: 276767 - DNA, 15 bp, Homo sapiens
ccaacttgtattaga

SEQ ID NO: 276768 - DNA, 15 bp, Homo sapiens
cccaacttgtattag

SEQ ID NO: 276769 - DNA, 15 bp, Homo sapiens
tcccaacttgtatta

SEQ ID NO: 276770 - DNA, 15 bp, Homo sapiens
atcccaacttgtatt

SEQ ID NO: 276771 - DNA, 15 bp, Homo sapiens
tatcccaacttgtat

SEQ ID NO: 276772 - DNA, 15 bp, Homo sapiens
atatcccaacttgta

SEQ ID NO: 276773 - DNA, 15 bp, Homo sapiens
tatatcccaacttgt

SEQ ID NO: 276774 - DNA, 15 bp, Homo sapiens
ttatatcccaacttg

SEQ ID NO: 276775 - DNA, 15 bp, Homo sapiens
tttatatcccaactt

SEQ ID NO: 276776 - DNA, 15 bp, Homo sapiens
atttatatcccaact

SEQ ID NO: 276777 - DNA, 15 bp, Homo sapiens
tatttatatcccaac

SEQ ID NO: 276778 - DNA, 15 bp, Homo sapiens
ttatttatatcccaa

SEQ ID NO: 276779 - DNA, 15 bp, Homo sapiens
attatttatatccca

SEQ ID NO: 276780 - DNA, 15 bp, Homo sapiens
aattatttatatccc

SEQ ID NO: 276781 - DNA, 15 bp, Homo sapiens
taattatttatatcc

SEQ ID NO: 276782 - DNA, 15 bp, Homo sapiens
ctaattatttatatc

SEQ ID NO: 276783 - DNA, 15 bp, Homo sapiens
tctaattatttatat

SEQ ID NO: 276784 - DNA, 15 bp, Homo sapiens
atctaattatttata

SEQ ID NO: 276785 - DNA, 15 bp, Homo sapiens
tatctaattatttat

SEQ ID NO: 276786 - DNA, 15 bp, Homo sapiens
atatctaattattta

SEQ ID NO: 276787 - DNA, 15 bp, Homo sapiens
tatatctaattattt

SEQ ID NO: 276788 - DNA, 15 bp, Homo sapiens
ctatatctaattatt

SEQ ID NO: 276789 - DNA, 15 bp, Homo sapiens
tctatatctaattat

SEQ ID NO: 276790 - DNA, 15 bp, Homo sapiens
ttctatatctaatta

SEQ ID NO: 276791 - DNA, 15 bp, Homo sapiens
tttctatatctaatt

SEQ ID NO: 276792 - DNA, 15 bp, Homo sapiens
ttttctatatctaat

SEQ ID NO: 276793 - DNA, 15 bp, Homo sapiens
attttctatatctaa

SEQ ID NO: 276794 - DNA, 15 bp, Homo sapiens
tattttctatatcta

SEQ ID NO: 276795 - DNA, 15 bp, Homo sapiens
ctattttctatatct

SEQ ID NO: 276796 - DNA, 15 bp, Homo sapiens
gctattttctatatc

SEQ ID NO: 276797 - DNA, 15 bp, Homo sapiens
agctattttctatat

SEQ ID NO: 276798 - DNA, 15 bp, Homo sapiens
tagctattttctata

SEQ ID NO: 276799 - DNA, 15 bp, Homo sapiens
gtagctattttctat

SEQ ID NO: 276800 - DNA, 15 bp, Homo sapiens
tgtagctattttcta

SEQ ID NO: 276801 - DNA, 15 bp, Homo sapiens
ttgtagctattttct

SEQ ID NO: 276802 - DNA, 15 bp, Homo sapiens
cttgtagctattttc

SEQ ID NO: 276803 - DNA, 15 bp, Homo sapiens
ccttgtagctatttt

SEQ ID NO: 276804 - DNA, 15 bp, Homo sapiens
accttgtagctattt

SEQ ID NO: 276805 - DNA, 15 bp, Homo sapiens
taccttgtagctatt

SEQ ID NO: 276806 - DNA, 15 bp, Homo sapiens
ataccttgtagctat

SEQ ID NO: 276807 - DNA, 15 bp, Homo sapiens
aataccttgtagcta

SEQ ID NO: 276808 - DNA, 15 bp, Homo sapiens
aaataccttgtagct

SEQ ID NO: 276809 - DNA, 15 bp, Homo sapiens
gaaataccttgtagc

SEQ ID NO: 276810 - DNA, 15 bp, Homo sapiens
agaaataccttgtag

SEQ ID NO: 276811 - DNA, 15 bp, Homo sapiens
aagaaataccttgta

SEQ ID NO: 276812 - DNA, 15 bp, Homo sapiens
aaagaaataccttgt

SEQ ID NO: 276813 - DNA, 15 bp, Homo sapiens
aaaagaaataccttg

SEQ ID NO: 276814 - DNA, 15 bp, Homo sapiens
taaaagaaatacctt

SEQ ID NO: 276815 - DNA, 15 bp, Homo sapiens
ttaaaagaaatacct

SEQ ID NO: 276816 - DNA, 15 bp, Homo sapiens
gttaaaagaaatacc

SEQ ID NO: 276817 - DNA, 15 bp, Homo sapiens
agttaaaagaaatac

SEQ ID NO: 276818 - DNA, 15 bp, Homo sapiens
aagttaaaagaaata

SEQ ID NO: 276819 - DNA, 15 bp, Homo sapiens
aaagttaaaagaaat

SEQ ID NO: 276820 - DNA, 15 bp, Homo sapiens
gaaagttaaaagaaa

SEQ ID NO: 276821 - DNA, 15 bp, Homo sapiens
agaaagttaaaagaa

SEQ ID NO: 276822 - DNA, 15 bp, Homo sapiens
gagaaagttaaaaga

SEQ ID NO: 276823 - DNA, 15 bp, Homo sapiens
ggagaaagttaaaag

SEQ ID NO: 276824 - DNA, 15 bp, Homo sapiens
tggagaaagttaaaa

SEQ ID NO: 276825 - DNA, 15 bp, Homo sapiens
gtggagaaagttaaa

SEQ ID NO: 276826 - DNA, 15 bp, Homo sapiens
ggtggagaaagttaa

SEQ ID NO: 276827 - DNA, 15 bp, Homo sapiens
gggtggagaaagtta

SEQ ID NO: 276828 - DNA, 15 bp, Homo sapiens
ggggtggagaaagtt

SEQ ID NO: 276829 - DNA, 15 bp, Homo sapiens
gggggtggagaaagt

SEQ ID NO: 276830 - DNA, 15 bp, Homo sapiens
tgggggtggagaaag

SEQ ID NO: 276831 - DNA, 15 bp, Homo sapiens
ctgggggtggagaaa

SEQ ID NO: 276832 - DNA, 15 bp, Homo sapiens
gctgggggtggagaa

SEQ ID NO: 276833 - DNA, 15 bp, Homo sapiens
agctgggggtggaga

SEQ ID NO: 276834 - DNA, 15 bp, Homo sapiens
gagctgggggtggag

SEQ ID NO: 276835 - DNA, 15 bp, Homo sapiens
ggagctgggggtgga

SEQ ID NO: 276836 - DNA, 15 bp, Homo sapiens
gggagctgggggtgg

SEQ ID NO: 276837 - DNA, 15 bp, Homo sapiens
tgggagctgggggtg

SEQ ID NO: 276838 - DNA, 15 bp, Homo sapiens
ctgggagctgggggt

SEQ ID NO: 276839 - DNA, 15 bp, Homo sapiens
gctgggagctggggg

SEQ ID NO: 276840 - DNA, 15 bp, Homo sapiens
tgctgggagctgggg

SEQ ID NO: 276841 - DNA, 15 bp, Homo sapiens
ctgctgggagctggg

SEQ ID NO: 276842 - DNA, 15 bp, Homo sapiens
actgctgggagctgg

SEQ ID NO: 276843 - DNA, 15 bp, Homo sapiens
gactgctgggagctg

SEQ ID NO: 276844 - DNA, 15 bp, Homo sapiens
tgactgctgggagct

SEQ ID NO: 276845 - DNA, 15 bp, Homo sapiens
ttgactgctgggagc

SEQ ID NO: 276846 - DNA, 15 bp, Homo sapiens
cttgactgctgggag

SEQ ID NO: 276847 - DNA, 15 bp, Homo sapiens
tcttgactgctggga

SEQ ID NO: 276848 - DNA, 15 bp, Homo sapiens
ctcttgactgctggg

SEQ ID NO: 276849 - DNA, 15 bp, Homo sapiens
actcttgactgctgg

SEQ ID NO: 276850 - DNA, 15 bp, Homo sapiens
gactcttgactgctg

SEQ ID NO: 276851 - DNA, 15 bp, Homo sapiens
tgactcttgactgct

SEQ ID NO: 276852 - DNA, 15 bp, Homo sapiens
ttgactcttgactgc

SEQ ID NO: 276853 - DNA, 15 bp, Homo sapiens
cttgactcttgactg

SEQ ID NO: 276854 - DNA, 15 bp, Homo sapiens
gcttgactcttgact

SEQ ID NO: 276855 - DNA, 15 bp, Homo sapiens
ggcttgactcttgac

SEQ ID NO: 276856 - DNA, 15 bp, Homo sapiens
gggcttgactcttga

SEQ ID NO: 276857 - DNA, 15 bp, Homo sapiens
agggcttgactcttg

SEQ ID NO: 276858 - DNA, 15 bp, Homo sapiens
tagggcttgactctt

SEQ ID NO: 276859 - DNA, 15 bp, Homo sapiens
ttagggcttgactct

SEQ ID NO: 276860 - DNA, 15 bp, Homo sapiens
cttagggcttgactc

SEQ ID NO: 276861 - DNA, 15 bp, Homo sapiens
acttagggcttgact

SEQ ID NO: 276862 - DNA, 15 bp, Homo sapiens
gacttagggcttgac

SEQ ID NO: 276863 - DNA, 15 bp, Homo sapiens
agacttagggcttga

SEQ ID NO: 276864 - DNA, 15 bp, Homo sapiens
aagacttagggcttg

SEQ ID NO: 276865 - DNA, 15 bp, Homo sapiens
caagacttagggctt

SEQ ID NO: 276866 - DNA, 15 bp, Homo sapiens
acaagacttagggct

SEQ ID NO: 276867 - DNA, 15 bp, Homo sapiens
gacaagacttagggc

SEQ ID NO: 276868 - DNA, 15 bp, Homo sapiens
ggacaagacttaggg

SEQ ID NO: 276869 - DNA, 15 bp, Homo sapiens
aggacaagacttagg

SEQ ID NO: 276870 - DNA, 15 bp, Homo sapiens
aaggacaagacttag

SEQ ID NO: 276871 - DNA, 15 bp, Homo sapiens
aaaggacaagactta

SEQ ID NO: 276872 - DNA, 15 bp, Homo sapiens
gaaaggacaagactt

SEQ ID NO: 276873 - DNA, 15 bp, Homo sapiens
agaaaggacaagact

SEQ ID NO: 276874 - DNA, 15 bp, Homo sapiens
cagaaaggacaagac

SEQ ID NO: 276875 - DNA, 15 bp, Homo sapiens
acagaaaggacaaga

SEQ ID NO: 276876 - DNA, 15 bp, Homo sapiens
gacagaaaggacaag

SEQ ID NO: 276877 - DNA, 15 bp, Homo sapiens
tgacagaaaggacaa

SEQ ID NO: 276878 - DNA, 15 bp, Homo sapiens
ctgacagaaaggaca

SEQ ID NO: 276879 - DNA, 15 bp, Homo sapiens
tctgacagaaaggac

SEQ ID NO: 276880 - DNA, 15 bp, Homo sapiens
ttctgacagaaagga

SEQ ID NO: 276881 - DNA, 15 bp, Homo sapiens
tttctgacagaaagg

SEQ ID NO: 276882 - DNA, 15 bp, Homo sapiens
atttctgacagaaag

SEQ ID NO: 276883 - DNA, 15 bp, Homo sapiens
tatttctgacagaaa

SEQ ID NO: 276884 - DNA, 15 bp, Homo sapiens
ctatttctgacagaa

SEQ ID NO: 276885 - DNA, 15 bp, Homo sapiens
tctatttctgacaga

SEQ ID NO: 276886 - DNA, 15 bp, Homo sapiens
atctatttctgacag

SEQ ID NO: 276887 - DNA, 15 bp, Homo sapiens
tatctatttctgaca

SEQ ID NO: 276888 - DNA, 15 bp, Homo sapiens
gtatctatttctgac

SEQ ID NO: 276889 - DNA, 15 bp, Homo sapiens
tgtatctatttctga

SEQ ID NO: 276890 - DNA, 15 bp, Homo sapiens
ttgtatctatttctg

SEQ ID NO: 276891 - DNA, 15 bp, Homo sapiens
cttgtatctatttct

SEQ ID NO: 276892 - DNA, 15 bp, Homo sapiens
tcttgtatctatttc

SEQ ID NO: 276893 - DNA, 15 bp, Homo sapiens
ttcttgtatctattt

SEQ ID NO: 276894 - DNA, 15 bp, Homo sapiens
cttcttgtatctatt

SEQ ID NO: 276895 - DNA, 15 bp, Homo sapiens
ccttcttgtatctat

SEQ ID NO: 276896 - DNA, 15 bp, Homo sapiens
tccttcttgtatcta

SEQ ID NO: 276897 - DNA, 15 bp, Homo sapiens
atccttcttgtatct

SEQ ID NO: 276898 - DNA, 15 bp, Homo sapiens
tatccttcttgtatc

SEQ ID NO: 276899 - DNA, 15 bp, Homo sapiens
gtatccttcttgtat

SEQ ID NO: 276900 - DNA, 15 bp, Homo sapiens
tgtatccttcttgta

SEQ ID NO: 276901 - DNA, 15 bp, Homo sapiens
ctgtatccttcttgt

SEQ ID NO: 276902 - DNA, 15 bp, Homo sapiens
gctgtatccttcttg

SEQ ID NO: 276903 - DNA, 15 bp, Homo sapiens
tgctgtatccttctt

SEQ ID NO: 276904 - DNA, 15 bp, Homo sapiens
ttgctgtatccttct

SEQ ID NO: 276905 - DNA, 15 bp, Homo sapiens
tttgctgtatccttc

SEQ ID NO: 276906 - DNA, 15 bp, Homo sapiens
gtttgctgtatcctt

SEQ ID NO: 276907 - DNA, 15 bp, Homo sapiens
tgtttgctgtatcct

SEQ ID NO: 276908 - DNA, 15 bp, Homo sapiens
gtgtttgctgtatcc

SEQ ID NO: 276909 - DNA, 15 bp, Homo sapiens
agtgtttgctgtatc

SEQ ID NO: 276910 - DNA, 15 bp, Homo sapiens
cagtgtttgctgtat

SEQ ID NO: 276911 - DNA, 15 bp, Homo sapiens
gcagtgtttgctgta

SEQ ID NO: 276912 - DNA, 15 bp, Homo sapiens
agcagtgtttgctgt

SEQ ID NO: 276913 - DNA, 15 bp, Homo sapiens
tagcagtgtttgctg

SEQ ID NO: 276914 - DNA, 15 bp, Homo sapiens
atagcagtgtttgct

SEQ ID NO: 276915 - DNA, 15 bp, Homo sapiens
tatagcagtgtttgc

SEQ ID NO: 276916 - DNA, 15 bp, Homo sapiens
ttatagcagtgtttg

SEQ ID NO: 276917 - DNA, 15 bp, Homo sapiens
gttatagcagtgttt

SEQ ID NO: 276918 - DNA, 15 bp, Homo sapiens
tgttatagcagtgtt

SEQ ID NO: 276919 - DNA, 15 bp, Homo sapiens
gtgttatagcagtgt

SEQ ID NO: 276920 - DNA, 15 bp, Homo sapiens
ggtgttatagcagtg

SEQ ID NO: 276921 - DNA, 15 bp, Homo sapiens
aggtgttatagcagt

SEQ ID NO: 276922 - DNA, 15 bp, Homo sapiens
gaggtgttatagcag

SEQ ID NO: 276923 - DNA, 15 bp, Homo sapiens
agaggtgttatagca

SEQ ID NO: 276924 - DNA, 15 bp, Homo sapiens
gagaggtgttatagc

SEQ ID NO: 276925 - DNA, 15 bp, Homo sapiens
agagaggtgttatag

SEQ ID NO: 276926 - DNA, 15 bp, Homo sapiens
gagagaggtgttata

SEQ ID NO: 276927 - DNA, 15 bp, Homo sapiens
tgagagaggtgttat

SEQ ID NO: 276928 - DNA, 15 bp, Homo sapiens
atgagagaggtgtta

SEQ ID NO: 276929 - DNA, 15 bp, Homo sapiens
tatgagagaggtgtt

SEQ ID NO: 276930 - DNA, 15 bp, Homo sapiens
ctatgagagaggtgt

SEQ ID NO: 276931 - DNA, 15 bp, Homo sapiens
cctatgagagaggtg

SEQ ID NO: 276932 - DNA, 15 bp, Homo sapiens
tcctatgagagaggt

SEQ ID NO: 276933 - DNA, 15 bp, Homo sapiens
atcctatgagagagg

SEQ ID NO: 276934 - DNA, 15 bp, Homo sapiens
aatcctatgagagag

SEQ ID NO: 276935 - DNA, 15 bp, Homo sapiens
gaatcctatgagaga

SEQ ID NO: 276936 - DNA, 15 bp, Homo sapiens
tgaatcctatgagag

SEQ ID NO: 276937 - DNA, 15 bp, Homo sapiens
ttgaatcctatgaga

SEQ ID NO: 276938 - DNA, 15 bp, Homo sapiens
tttgaatcctatgag

SEQ ID NO: 276939 - DNA, 15 bp, Homo sapiens
atttgaatcctatga

SEQ ID NO: 276940 - DNA, 15 bp, Homo sapiens
gatttgaatcctatg

SEQ ID NO: 276941 - DNA, 15 bp, Homo sapiens
tgatttgaatcctat

SEQ ID NO: 276942 - DNA, 15 bp, Homo sapiens
ctgatttgaatccta

SEQ ID NO: 276943 - DNA, 15 bp, Homo sapiens
actgatttgaatcct

SEQ ID NO: 276944 - DNA, 15 bp, Homo sapiens
cactgatttgaatcc

SEQ ID NO: 276945 - DNA, 15 bp, Homo sapiens
acactgatttgaatc

SEQ ID NO: 276946 - DNA, 15 bp, Homo sapiens
cacactgatttgaat

SEQ ID NO: 276947 - DNA, 15 bp, Homo sapiens
ccacactgatttgaa

SEQ ID NO: 276948 - DNA, 15 bp, Homo sapiens
tccacactgatttga

SEQ ID NO: 276949 - DNA, 15 bp, Homo sapiens
ctccacactgatttg

SEQ ID NO: 276950 - DNA, 15 bp, Homo sapiens
tctccacactgattt

SEQ ID NO: 276951 - DNA, 15 bp, Homo sapiens
atctccacactgatt

SEQ ID NO: 276952 - DNA, 15 bp, Homo sapiens
aatctccacactgat

SEQ ID NO: 276953 - DNA, 15 bp, Homo sapiens
taatctccacactga

SEQ ID NO: 276954 - DNA, 15 bp, Homo sapiens
ataatctccacactg

SEQ ID NO: 276955 - DNA, 15 bp, Homo sapiens
aataatctccacact

SEQ ID NO: 276956 - DNA, 15 bp, Homo sapiens
taataatctccacac

SEQ ID NO: 276957 - DNA, 15 bp, Homo sapiens
ataataatctccaca

SEQ ID NO: 276958 - DNA, 15 bp, Homo sapiens
tataataatctccac

SEQ ID NO: 276959 - DNA, 15 bp, Homo sapiens
ctataataatctcca

SEQ ID NO: 276960 - DNA, 15 bp, Homo sapiens
cctataataatctcc

SEQ ID NO: 276961 - DNA, 15 bp, Homo sapiens
gcctataataatctc

SEQ ID NO: 276962 - DNA, 15 bp, Homo sapiens
agcctataataatct

SEQ ID NO: 276963 - DNA, 15 bp, Homo sapiens
gagcctataataatc

SEQ ID NO: 276964 - DNA, 15 bp, Homo sapiens
ggagcctataataat

SEQ ID NO: 276965 - DNA, 15 bp, Homo sapiens
tggagcctataataa

SEQ ID NO: 276966 - DNA, 15 bp, Homo sapiens
ctggagcctataata

SEQ ID NO: 276967 - DNA, 15 bp, Homo sapiens
tctggagcctataat

SEQ ID NO: 276968 - DNA, 15 bp, Homo sapiens
atctggagcctataa

SEQ ID NO: 276969 - DNA, 15 bp, Homo sapiens
catctggagcctata

SEQ ID NO: 276970 - DNA, 15 bp, Homo sapiens
tcatctggagcctat

SEQ ID NO: 276971 - DNA, 15 bp, Homo sapiens
ctcatctggagccta

SEQ ID NO: 276972 - DNA, 15 bp, Homo sapiens
actcatctggagcct

SEQ ID NO: 276973 - DNA, 15 bp, Homo sapiens
aactcatctggagcc

SEQ ID NO: 276974 - DNA, 15 bp, Homo sapiens
taactcatctggagc

SEQ ID NO: 276975 - DNA, 15 bp, Homo sapiens
ctaactcatctggag

SEQ ID NO: 276976 - DNA, 15 bp, Homo sapiens
cctaactcatctgga

SEQ ID NO: 276977 - DNA, 15 bp, Homo sapiens
tcctaactcatctgg

SEQ ID NO: 276978 - DNA, 15 bp, Homo sapiens
atcctaactcatctg

SEQ ID NO: 276979 - DNA, 15 bp, Homo sapiens
tatcctaactcatct

SEQ ID NO: 276980 - DNA, 15 bp, Homo sapiens
atatcctaactcatc

SEQ ID NO: 276981 - DNA, 15 bp, Homo sapiens
gatatcctaactcat

SEQ ID NO: 276982 - DNA, 15 bp, Homo sapiens
agatatcctaactca

SEQ ID NO: 276983 - DNA, 15 bp, Homo sapiens
aagatatcctaactc

SEQ ID NO: 276984 - DNA, 15 bp, Homo sapiens
aaagatatcctaact

SEQ ID NO: 276985 - DNA, 15 bp, Homo sapiens
taaagatatcctaac

SEQ ID NO: 276986 - DNA, 15 bp, Homo sapiens
ttaaagatatcctaa

SEQ ID NO: 276987 - DNA, 15 bp, Homo sapiens
cttaaagatatccta

SEQ ID NO: 276988 - DNA, 15 bp, Homo sapiens
acttaaagatatcct

SEQ ID NO: 276989 - DNA, 15 bp, Homo sapiens
gacttaaagatatcc

SEQ ID NO: 276990 - DNA, 15 bp, Homo sapiens
agacttaaagatatc

SEQ ID NO: 276991 - DNA, 15 bp, Homo sapiens
gagacttaaagatat

SEQ ID NO: 276992 - DNA, 15 bp, Homo sapiens
tgagacttaaagata

SEQ ID NO: 276993 - DNA, 15 bp, Homo sapiens
ttgagacttaaagat

SEQ ID NO: 276994 - DNA, 15 bp, Homo sapiens
attgagacttaaaga

SEQ ID NO: 276995 - DNA, 15 bp, Homo sapiens
aattgagacttaaag

SEQ ID NO: 276996 - DNA, 15 bp, Homo sapiens
aaattgagacttaaa

SEQ ID NO: 276997 - DNA, 15 bp, Homo sapiens
taaattgagacttaa

SEQ ID NO: 276998 - DNA, 15 bp, Homo sapiens
ttaaattgagactta

SEQ ID NO: 276999 - DNA, 15 bp, Homo sapiens
attaaattgagactt

SEQ ID NO: 277000 - DNA, 15 bp, Homo sapiens
tattaaattgagact

SEQ ID NO: 277001 - DNA, 15 bp, Homo sapiens
ttattaaattgagac

SEQ ID NO: 277002 - DNA, 15 bp, Homo sapiens
tttattaaattgaga

SEQ ID NO: 277003 - DNA, 15 bp, Homo sapiens
ttttattaaattgag

SEQ ID NO: 277004 - DNA, 15 bp, Homo sapiens
gttttattaaattga

SEQ ID NO: 277005 - DNA, 15 bp, Homo sapiens
agttttattaaattg

SEQ ID NO: 277006 - DNA, 15 bp, Homo sapiens
tagttttattaaatt

SEQ ID NO: 277007 - DNA, 15 bp, Homo sapiens
ttagttttattaaat

SEQ ID NO: 277008 - DNA, 15 bp, Homo sapiens
attagttttattaaa

SEQ ID NO: 277009 - DNA, 15 bp, Homo sapiens
aattagttttattaa

SEQ ID NO: 277010 - DNA, 15 bp, Homo sapiens
caattagttttatta

SEQ ID NO: 277011 - DNA, 15 bp, Homo sapiens
acaattagttttatt

SEQ ID NO: 277012 - DNA, 15 bp, Homo sapiens
aacaattagttttat

SEQ ID NO: 277013 - DNA, 15 bp, Homo sapiens
aaacaattagtttta

SEQ ID NO: 277014 - DNA, 15 bp, Homo sapiens
aaaacaattagtttt

SEQ ID NO: 277015 - DNA, 15 bp, Homo sapiens
gaaaacaattagttt

SEQ ID NO: 277016 - DNA, 15 bp, Homo sapiens
ggaaaacaattagtt

SEQ ID NO: 277017 - DNA, 15 bp, Homo sapiens
aggaaaacaattagt

SEQ ID NO: 277018 - DNA, 15 bp, Homo sapiens
caggaaaacaattag

SEQ ID NO: 277019 - DNA, 15 bp, Homo sapiens
acaggaaaacaatta

SEQ ID NO: 277020 - DNA, 15 bp, Homo sapiens
cacaggaaaacaatt

SEQ ID NO: 277021 - DNA, 15 bp, Homo sapiens
gcacaggaaaacaat

SEQ ID NO: 277022 - DNA, 15 bp, Homo sapiens
agcacaggaaaacaa

SEQ ID NO: 277023 - DNA, 15 bp, Homo sapiens
aagcacaggaaaaca

SEQ ID NO: 277024 - DNA, 15 bp, Homo sapiens
aaagcacaggaaaac

SEQ ID NO: 277025 - DNA, 15 bp, Homo sapiens
taaagcacaggaaaa

SEQ ID NO: 277026 - DNA, 15 bp, Homo sapiens
ttaaagcacaggaaa

SEQ ID NO: 277027 - DNA, 15 bp, Homo sapiens
tttaaagcacaggaa

SEQ ID NO: 277028 - DNA, 15 bp, Homo sapiens
atttaaagcacagga

SEQ ID NO: 277029 - DNA, 15 bp, Homo sapiens
tatttaaagcacagg

SEQ ID NO: 277030 - DNA, 15 bp, Homo sapiens
atatttaaagcacag

SEQ ID NO: 277031 - DNA, 15 bp, Homo sapiens
gatatttaaagcaca

SEQ ID NO: 277032 - DNA, 15 bp, Homo sapiens
agatatttaaagcac

SEQ ID NO: 277033 - DNA, 15 bp, Homo sapiens
gagatatttaaagca

SEQ ID NO: 277034 - DNA, 15 bp, Homo sapiens
agagatatttaaagc

SEQ ID NO: 277035 - DNA, 15 bp, Homo sapiens
gagagatatttaaag

SEQ ID NO: 277036 - DNA, 15 bp, Homo sapiens
ggagagatatttaaa

SEQ ID NO: 277037 - DNA, 15 bp, Homo sapiens
tggagagatatttaa

SEQ ID NO: 277038 - DNA, 15 bp, Homo sapiens
atggagagatattta

SEQ ID NO: 277039 - DNA, 15 bp, Homo sapiens
aatggagagatattt

SEQ ID NO: 277040 - DNA, 15 bp, Homo sapiens
gaatggagagatatt

SEQ ID NO: 277041 - DNA, 15 bp, Homo sapiens
agaatggagagatat

SEQ ID NO: 277042 - DNA, 15 bp, Homo sapiens
tagaatggagagata

SEQ ID NO: 277043 - DNA, 15 bp, Homo sapiens
atagaatggagagat

SEQ ID NO: 277044 - DNA, 15 bp, Homo sapiens
tatagaatggagaga

SEQ ID NO: 277045 - DNA, 15 bp, Homo sapiens
atatagaatggagag

SEQ ID NO: 277046 - DNA, 15 bp, Homo sapiens
tatatagaatggaga

SEQ ID NO: 277047 - DNA, 15 bp, Homo sapiens
ttatatagaatggag

SEQ ID NO: 277048 - DNA, 15 bp, Homo sapiens
tttatatagaatgga

SEQ ID NO: 277049 - DNA, 15 bp, Homo sapiens
atttatatagaatgg

SEQ ID NO: 277050 - DNA, 15 bp, Homo sapiens
tatttatatagaatg

SEQ ID NO: 277051 - DNA, 15 bp, Homo sapiens
atatttatatagaat

SEQ ID NO: 277052 - DNA, 15 bp, Homo sapiens
tatatttatatagaa

SEQ ID NO: 277053 - DNA, 15 bp, Homo sapiens
ttatatttatataga

SEQ ID NO: 277054 - DNA, 15 bp, Homo sapiens
attatatttatatag

SEQ ID NO: 277055 - DNA, 15 bp, Homo sapiens
tattatatttatata

SEQ ID NO: 277056 - DNA, 15 bp, Homo sapiens
atattatatttatat

SEQ ID NO: 277057 - DNA, 15 bp, Homo sapiens
tatattatatttata

SEQ ID NO: 277058 - DNA, 15 bp, Homo sapiens
ctatattatatttat

SEQ ID NO: 277059 - DNA, 15 bp, Homo sapiens
tctatattatattta

SEQ ID NO: 277060 - DNA, 15 bp, Homo sapiens
atctatattatattt

SEQ ID NO: 277061 - DNA, 15 bp, Homo sapiens
gatctatattatatt

SEQ ID NO: 277062 - DNA, 15 bp, Homo sapiens
agatctatattatat

SEQ ID NO: 277063 - DNA, 15 bp, Homo sapiens
tagatctatattata

SEQ ID NO: 277064 - DNA, 15 bp, Homo sapiens
ttagatctatattat

SEQ ID NO: 277065 - DNA, 15 bp, Homo sapiens
gttagatctatatta

SEQ ID NO: 277066 - DNA, 15 bp, Homo sapiens
tgttagatctatatt

SEQ ID NO: 277067 - DNA, 15 bp, Homo sapiens
ctgttagatctatat

SEQ ID NO: 277068 - DNA, 15 bp, Homo sapiens
tctgttagatctata

SEQ ID NO: 277069 - DNA, 15 bp, Homo sapiens
atctgttagatctat

SEQ ID NO: 277070 - DNA, 15 bp, Homo sapiens
catctgttagatcta

SEQ ID NO: 277071 - DNA, 15 bp, Homo sapiens
acatctgttagatct

SEQ ID NO: 277072 - DNA, 15 bp, Homo sapiens
tacatctgttagatc

SEQ ID NO: 277073 - DNA, 15 bp, Homo sapiens
ctacatctgttagat

SEQ ID NO: 277074 - DNA, 15 bp, Homo sapiens
actacatctgttaga

SEQ ID NO: 277075 - DNA, 15 bp, Homo sapiens
gactacatctgttag

SEQ ID NO: 277076 - DNA, 15 bp, Homo sapiens
agactacatctgtta

SEQ ID NO: 277077 - DNA, 15 bp, Homo sapiens
aagactacatctgtt

SEQ ID NO: 277078 - DNA, 15 bp, Homo sapiens
caagactacatctgt

SEQ ID NO: 277079 - DNA, 15 bp, Homo sapiens
tcaagactacatctg

SEQ ID NO: 277080 - DNA, 15 bp, Homo sapiens
ttcaagactacatct

SEQ ID NO: 277081 - DNA, 15 bp, Homo sapiens
tttcaagactacatc

SEQ ID NO: 277082 - DNA, 15 bp, Homo sapiens
atttcaagactacat

SEQ ID NO: 277083 - DNA, 15 bp, Homo sapiens
tatttcaagactaca

SEQ ID NO: 277084 - DNA, 15 bp, Homo sapiens
ctatttcaagactac

SEQ ID NO: 277085 - DNA, 15 bp, Homo sapiens
tctatttcaagacta

SEQ ID NO: 277086 - DNA, 15 bp, Homo sapiens
atctatttcaagact

SEQ ID NO: 277087 - DNA, 15 bp, Homo sapiens
catctatttcaagac

SEQ ID NO: 277088 - DNA, 15 bp, Homo sapiens
ccatctatttcaaga

SEQ ID NO: 277089 - DNA, 15 bp, Homo sapiens
gccatctatttcaag

SEQ ID NO: 277090 - DNA, 15 bp, Homo sapiens
agccatctatttcaa

SEQ ID NO: 277091 - DNA, 15 bp, Homo sapiens
tagccatctatttca

SEQ ID NO: 277092 - DNA, 15 bp, Homo sapiens
atagccatctatttc

SEQ ID NO: 277093 - DNA, 15 bp, Homo sapiens
tatagccatctattt

SEQ ID NO: 277094 - DNA, 15 bp, Homo sapiens
ttatagccatctatt

SEQ ID NO: 277095 - DNA, 15 bp, Homo sapiens
attatagccatctat

SEQ ID NO: 277096 - DNA, 15 bp, Homo sapiens
cattatagccatcta

SEQ ID NO: 277097 - DNA, 15 bp, Homo sapiens
acattatagccatct

SEQ ID NO: 277098 - DNA, 15 bp, Homo sapiens
gacattatagccatc

SEQ ID NO: 277099 - DNA, 15 bp, Homo sapiens
tgacattatagccat

SEQ ID NO: 277100 - DNA, 15 bp, Homo sapiens
ctgacattatagcca

SEQ ID NO: 277101 - DNA, 15 bp, Homo sapiens
actgacattatagcc

SEQ ID NO: 277102 - DNA, 15 bp, Homo sapiens
cactgacattatagc

SEQ ID NO: 277103 - DNA, 15 bp, Homo sapiens
tcactgacattatag

SEQ ID NO: 277104 - DNA, 15 bp, Homo sapiens
ttcactgacattata

SEQ ID NO: 277105 - DNA, 15 bp, Homo sapiens
cttcactgacattat

SEQ ID NO: 277106 - DNA, 15 bp, Homo sapiens
acttcactgacatta

SEQ ID NO: 277107 - DNA, 15 bp, Homo sapiens
tacttcactgacatt

SEQ ID NO: 277108 - DNA, 15 bp, Homo sapiens
atacttcactgacat

SEQ ID NO: 277109 - DNA, 15 bp, Homo sapiens
aatacttcactgaca

SEQ ID NO: 277110 - DNA, 15 bp, Homo sapiens
aaatacttcactgac

SEQ ID NO: 277111 - DNA, 15 bp, Homo sapiens
aaaatacttcactga

SEQ ID NO: 277112 - DNA, 15 bp, Homo sapiens
aaaaatacttcactg

SEQ ID NO: 277113 - DNA, 15 bp, Homo sapiens
aaaaaatacttcact

SEQ ID NO: 277114 - DNA, 15 bp, Homo sapiens
aaaaaaatacttcac

SEQ ID NO: 277115 - DNA, 15 bp, Homo sapiens
gaaaaaaatacttca

SEQ ID NO: 277116 - DNA, 15 bp, Homo sapiens
ggaaaaaaatacttc

SEQ ID NO: 277117 - DNA, 15 bp, Homo sapiens
aggaaaaaaatactt

SEQ ID NO: 277118 - DNA, 15 bp, Homo sapiens
aaggaaaaaaatact

SEQ ID NO: 277119 - DNA, 15 bp, Homo sapiens
taaggaaaaaaatac

SEQ ID NO: 277120 - DNA, 15 bp, Homo sapiens
ataaggaaaaaaata

SEQ ID NO: 277121 - DNA, 15 bp, Homo sapiens
aataaggaaaaaaat

SEQ ID NO: 277122 - DNA, 15 bp, Homo sapiens
aaataaggaaaaaaa

SEQ ID NO: 277123 - DNA, 15 bp, Homo sapiens
taaataaggaaaaaa

SEQ ID NO: 277124 - DNA, 15 bp, Homo sapiens
ataaataaggaaaaa

SEQ ID NO: 277125 - DNA, 15 bp, Homo sapiens
tataaataaggaaaa

SEQ ID NO: 277126 - DNA, 15 bp, Homo sapiens
atataaataaggaaa

SEQ ID NO: 277127 - DNA, 15 bp, Homo sapiens
tatataaataaggaa

SEQ ID NO: 277128 - DNA, 15 bp, Homo sapiens
gtatataaataagga

SEQ ID NO: 277129 - DNA, 15 bp, Homo sapiens
tgtatataaataagg

SEQ ID NO: 277130 - DNA, 15 bp, Homo sapiens
atgtatataaataag

SEQ ID NO: 277131 - DNA, 15 bp, Homo sapiens
aatgtatataaataa

SEQ ID NO: 277132 - DNA, 15 bp, Homo sapiens
taatgtatataaata

SEQ ID NO: 277133 - DNA, 15 bp, Homo sapiens
ataatgtatataaat

SEQ ID NO: 277134 - DNA, 15 bp, Homo sapiens
tataatgtatataaa

SEQ ID NO: 277135 - DNA, 15 bp, Homo sapiens
ttataatgtatataa

SEQ ID NO: 277136 - DNA, 15 bp, Homo sapiens
gttataatgtatata

SEQ ID NO: 277137 - DNA, 15 bp, Homo sapiens
agttataatgtatat

SEQ ID NO: 277138 - DNA, 15 bp, Homo sapiens
aagttataatgtata

SEQ ID NO: 277139 - DNA, 15 bp, Homo sapiens
aaagttataatgtat

SEQ ID NO: 277140 - DNA, 15 bp, Homo sapiens
gaaagttataatgta

SEQ ID NO: 277141 - DNA, 15 bp, Homo sapiens
ggaaagttataatgt

SEQ ID NO: 277142 - DNA, 15 bp, Homo sapiens
aggaaagttataatg

SEQ ID NO: 277143 - DNA, 15 bp, Homo sapiens
aaggaaagttataat

SEQ ID NO: 277144 - DNA, 15 bp, Homo sapiens
taaggaaagttataa

SEQ ID NO: 277145 - DNA, 15 bp, Homo sapiens
ataaggaaagttata

SEQ ID NO: 277146 - DNA, 15 bp, Homo sapiens
aataaggaaagttat

SEQ ID NO: 277147 - DNA, 15 bp, Homo sapiens
aaataaggaaagtta

SEQ ID NO: 277148 - DNA, 15 bp, Homo sapiens
taaataaggaaagtt

SEQ ID NO: 277149 - DNA, 15 bp, Homo sapiens
ataaataaggaaagt

SEQ ID NO: 277150 - DNA, 15 bp, Homo sapiens
cataaataaggaaag

SEQ ID NO: 277151 - DNA, 15 bp, Homo sapiens
acataaataaggaaa

SEQ ID NO: 277152 - DNA, 15 bp, Homo sapiens
tacataaataaggaa

SEQ ID NO: 277153 - DNA, 15 bp, Homo sapiens
gtacataaataagga

SEQ ID NO: 277154 - DNA, 15 bp, Homo sapiens
tgtacataaataagg

SEQ ID NO: 277155 - DNA, 15 bp, Homo sapiens
atgtacataaataag

SEQ ID NO: 277156 - DNA, 15 bp, Homo sapiens
aatgtacataaataa

SEQ ID NO: 277157 - DNA, 15 bp, Homo sapiens
taatgtacataaata

SEQ ID NO: 277158 - DNA, 15 bp, Homo sapiens
ataatgtacataaat

SEQ ID NO: 277159 - DNA, 15 bp, Homo sapiens
tataatgtacataaa

SEQ ID NO: 277160 - DNA, 15 bp, Homo sapiens
ttataatgtacataa

SEQ ID NO: 277161 - DNA, 15 bp, Homo sapiens
attataatgtacata

SEQ ID NO: 277162 - DNA, 15 bp, Homo sapiens
aattataatgtacat

SEQ ID NO: 277163 - DNA, 15 bp, Homo sapiens
aaattataatgtaca

SEQ ID NO: 277164 - DNA, 15 bp, Homo sapiens
aaaattataatgtac

SEQ ID NO: 277165 - DNA, 15 bp, Homo sapiens
taaaattataatgta

SEQ ID NO: 277166 - DNA, 15 bp, Homo sapiens
ttaaaattataatgt

SEQ ID NO: 277167 - DNA, 15 bp, Homo sapiens
tttaaaattataatg

SEQ ID NO: 277168 - DNA, 15 bp, Homo sapiens
ctttaaaattataat

SEQ ID NO: 277169 - DNA, 15 bp, Homo sapiens
cctttaaaattataa

SEQ ID NO: 277170 - DNA, 15 bp, Homo sapiens
gcctttaaaattata

SEQ ID NO: 277171 - DNA, 15 bp, Homo sapiens
ggcctttaaaattat

SEQ ID NO: 277172 - DNA, 15 bp, Homo sapiens
aggcctttaaaatta

SEQ ID NO: 277173 - DNA, 15 bp, Homo sapiens
caggcctttaaaatt

SEQ ID NO: 277174 - DNA, 15 bp, Homo sapiens
tcaggcctttaaaat

SEQ ID NO: 277175 - DNA, 15 bp, Homo sapiens
atcaggcctttaaaa

SEQ ID NO: 277176 - DNA, 15 bp, Homo sapiens
tatcaggcctttaaa

SEQ ID NO: 277177 - DNA, 15 bp, Homo sapiens
ctatcaggcctttaa

SEQ ID NO: 277178 - DNA, 15 bp, Homo sapiens
actatcaggccttta

SEQ ID NO: 277179 - DNA, 15 bp, Homo sapiens
gactatcaggccttt

SEQ ID NO: 277180 - DNA, 15 bp, Homo sapiens
tgactatcaggcctt

SEQ ID NO: 277181 - DNA, 15 bp, Homo sapiens
atgactatcaggcct

SEQ ID NO: 277182 - DNA, 15 bp, Homo sapiens
tatgactatcaggcc

SEQ ID NO: 277183 - DNA, 15 bp, Homo sapiens
ttatgactatcaggc

SEQ ID NO: 277184 - DNA, 15 bp, Homo sapiens
attatgactatcagg

SEQ ID NO: 277185 - DNA, 15 bp, Homo sapiens
aattatgactatcag

SEQ ID NO: 277186 - DNA, 15 bp, Homo sapiens
taattatgactatca

SEQ ID NO: 277187 - DNA, 15 bp, Homo sapiens
ataattatgactatc

SEQ ID NO: 277188 - DNA, 15 bp, Homo sapiens
aataattatgactat

SEQ ID NO: 277189 - DNA, 15 bp, Homo sapiens
caataattatgacta

SEQ ID NO: 277190 - DNA, 15 bp, Homo sapiens
tcaataattatgact

SEQ ID NO: 277191 - DNA, 15 bp, Homo sapiens
atcaataattatgac

SEQ ID NO: 277192 - DNA, 15 bp, Homo sapiens
catcaataattatga

SEQ ID NO: 277193 - DNA, 15 bp, Homo sapiens
acatcaataattatg

SEQ ID NO: 277194 - DNA, 15 bp, Homo sapiens
aacatcaataattat

SEQ ID NO: 277195 - DNA, 15 bp, Homo sapiens
gaacatcaataatta

SEQ ID NO: 277196 - DNA, 15 bp, Homo sapiens
tgaacatcaataatt

SEQ ID NO: 277197 - DNA, 15 bp, Homo sapiens
ctgaacatcaataat

SEQ ID NO: 277198 - DNA, 15 bp, Homo sapiens
tctgaacatcaataa

SEQ ID NO: 277199 - DNA, 15 bp, Homo sapiens
atctgaacatcaata

SEQ ID NO: 277200 - DNA, 15 bp, Homo sapiens
aatctgaacatcaat

SEQ ID NO: 277201 - DNA, 15 bp, Homo sapiens
caatctgaacatcaa

SEQ ID NO: 277202 - DNA, 15 bp, Homo sapiens
ccaatctgaacatca

SEQ ID NO: 277203 - DNA, 15 bp, Homo sapiens
accaatctgaacatc

SEQ ID NO: 277204 - DNA, 15 bp, Homo sapiens
taccaatctgaacat

SEQ ID NO: 277205 - DNA, 15 bp, Homo sapiens
ctaccaatctgaaca

SEQ ID NO: 277206 - DNA, 15 bp, Homo sapiens
actaccaatctgaac

SEQ ID NO: 277207 - DNA, 15 bp, Homo sapiens
aactaccaatctgaa

SEQ ID NO: 277208 - DNA, 15 bp, Homo sapiens
taactaccaatctga

SEQ ID NO: 277209 - DNA, 15 bp, Homo sapiens
ataactaccaatctg

SEQ ID NO: 277210 - DNA, 15 bp, Homo sapiens
aataactaccaatct

SEQ ID NO: 277211 - DNA, 15 bp, Homo sapiens
aaataactaccaatc

SEQ ID NO: 277212 - DNA, 15 bp, Homo sapiens
gaaataactaccaat

SEQ ID NO: 277213 - DNA, 15 bp, Homo sapiens
agaaataactaccaa

SEQ ID NO: 277214 - DNA, 15 bp, Homo sapiens
cagaaataactacca

SEQ ID NO: 277215 - DNA, 15 bp, Homo sapiens
acagaaataactacc

SEQ ID NO: 277216 - DNA, 15 bp, Homo sapiens
gacagaaataactac

SEQ ID NO: 277217 - DNA, 15 bp, Homo sapiens
agacagaaataacta

SEQ ID NO: 277218 - DNA, 15 bp, Homo sapiens
gagacagaaataact

SEQ ID NO: 277219 - DNA, 15 bp, Homo sapiens
agagacagaaataac

SEQ ID NO: 277220 - DNA, 15 bp, Homo sapiens
aagagacagaaataa

SEQ ID NO: 277221 - DNA, 15 bp, Homo sapiens
taagagacagaaata

SEQ ID NO: 277222 - DNA, 15 bp, Homo sapiens
ataagagacagaaat

SEQ ID NO: 277223 - DNA, 15 bp, Homo sapiens
cataagagacagaaa

SEQ ID NO: 277224 - DNA, 15 bp, Homo sapiens
acataagagacagaa

SEQ ID NO: 277225 - DNA, 15 bp, Homo sapiens
tacataagagacaga

SEQ ID NO: 277226 - DNA, 15 bp, Homo sapiens
atacataagagacag

SEQ ID NO: 277227 - DNA, 15 bp, Homo sapiens
aatacataagagaca

SEQ ID NO: 277228 - DNA, 15 bp, Homo sapiens
gaatacataagagac

SEQ ID NO: 277229 - DNA, 15 bp, Homo sapiens
tgaatacataagaga

SEQ ID NO: 277230 - DNA, 15 bp, Homo sapiens
ttgaatacataagag

SEQ ID NO: 277231 - DNA, 15 bp, Homo sapiens
gttgaatacataaga

SEQ ID NO: 277232 - DNA, 15 bp, Homo sapiens
agttgaatacataag

SEQ ID NO: 277233 - DNA, 15 bp, Homo sapiens
tagttgaatacataa

SEQ ID NO: 277234 - DNA, 15 bp, Homo sapiens
atagttgaatacata

SEQ ID NO: 277235 - DNA, 15 bp, Homo sapiens
tatagttgaatacat

SEQ ID NO: 277236 - DNA, 15 bp, Homo sapiens
ttatagttgaataca

SEQ ID NO: 277237 - DNA, 15 bp, Homo sapiens
tttatagttgaatac

SEQ ID NO: 277238 - DNA, 15 bp, Homo sapiens
gtttatagttgaata

SEQ ID NO: 277239 - DNA, 15 bp, Homo sapiens
tgtttatagttgaat

SEQ ID NO: 277240 - DNA, 15 bp, Homo sapiens
atgtttatagttgaa

SEQ ID NO: 277241 - DNA, 15 bp, Homo sapiens
aatgtttatagttga

SEQ ID NO: 277242 - DNA, 15 bp, Homo sapiens
aaatgtttatagttg

SEQ ID NO: 277243 - DNA, 15 bp, Homo sapiens
taaatgtttatagtt

SEQ ID NO: 277244 - DNA, 15 bp, Homo sapiens
ttaaatgtttatagt

SEQ ID NO: 277245 - DNA, 15 bp, Homo sapiens
attaaatgtttatag

SEQ ID NO: 277246 - DNA, 15 bp, Homo sapiens
gattaaatgtttata

SEQ ID NO: 277247 - DNA, 15 bp, Homo sapiens
tgattaaatgtttat

SEQ ID NO: 277248 - DNA, 15 bp, Homo sapiens
ttgattaaatgttta

SEQ ID NO: 277249 - DNA, 15 bp, Homo sapiens
cttgattaaatgttt

SEQ ID NO: 277250 - DNA, 15 bp, Homo sapiens
acttgattaaatgtt

SEQ ID NO: 277251 - DNA, 15 bp, Homo sapiens
aacttgattaaatgt

SEQ ID NO: 277252 - DNA, 15 bp, Homo sapiens
aaacttgattaaatg

SEQ ID NO: 277253 - DNA, 15 bp, Homo sapiens
taaacttgattaaat

SEQ ID NO: 277254 - DNA, 15 bp, Homo sapiens
ataaacttgattaaa

SEQ ID NO: 277255 - DNA, 15 bp, Homo sapiens
cataaacttgattaa

SEQ ID NO: 277256 - DNA, 15 bp, Homo sapiens
tcataaacttgatta

SEQ ID NO: 277257 - DNA, 15 bp, Homo sapiens
ctcataaacttgatt

SEQ ID NO: 277258 - DNA, 15 bp, Homo sapiens
tctcataaacttgat

SEQ ID NO: 277259 - DNA, 15 bp, Homo sapiens
gtctcataaacttga

SEQ ID NO: 277260 - DNA, 15 bp, Homo sapiens
ggtctcataaacttg

SEQ ID NO: 277261 - DNA, 15 bp, Homo sapiens
aggtctcataaactt

SEQ ID NO: 277262 - DNA, 15 bp, Homo sapiens
taggtctcataaact

SEQ ID NO: 277263 - DNA, 15 bp, Homo sapiens
ctaggtctcataaac

SEQ ID NO: 277264 - DNA, 15 bp, Homo sapiens
tctaggtctcataaa

SEQ ID NO: 277265 - DNA, 15 bp, Homo sapiens
atctaggtctcataa

SEQ ID NO: 277266 - DNA, 15 bp, Homo sapiens
tatctaggtctcata

SEQ ID NO: 277267 - DNA, 15 bp, Homo sapiens
atatctaggtctcat

SEQ ID NO: 277268 - DNA, 15 bp, Homo sapiens
aatatctaggtctca

SEQ ID NO: 277269 - DNA, 15 bp, Homo sapiens
aaatatctaggtctc

SEQ ID NO: 277270 - DNA, 15 bp, Homo sapiens
taaatatctaggtct

SEQ ID NO: 277271 - DNA, 15 bp, Homo sapiens
ctaaatatctaggtc

SEQ ID NO: 277272 - DNA, 15 bp, Homo sapiens
gctaaatatctaggt

SEQ ID NO: 277273 - DNA, 15 bp, Homo sapiens
tgctaaatatctagg

SEQ ID NO: 277274 - DNA, 15 bp, Homo sapiens
ctgctaaatatctag

SEQ ID NO: 277275 - DNA, 15 bp, Homo sapiens
tctgctaaatatcta

SEQ ID NO: 277276 - DNA, 15 bp, Homo sapiens
ctctgctaaatatct

SEQ ID NO: 277277 - DNA, 15 bp, Homo sapiens
actctgctaaatatc

SEQ ID NO: 277278 - DNA, 15 bp, Homo sapiens
aactctgctaaatat

SEQ ID NO: 277279 - DNA, 15 bp, Homo sapiens
aaactctgctaaata

SEQ ID NO: 277280 - DNA, 15 bp, Homo sapiens
aaaactctgctaaat

SEQ ID NO: 277281 - DNA, 15 bp, Homo sapiens
caaaactctgctaaa

SEQ ID NO: 277282 - DNA, 15 bp, Homo sapiens
ccaaaactctgctaa

SEQ ID NO: 277283 - DNA, 15 bp, Homo sapiens
tccaaaactctgcta

SEQ ID NO: 277284 - DNA, 15 bp, Homo sapiens
ctccaaaactctgct

SEQ ID NO: 277285 - DNA, 15 bp, Homo sapiens
actccaaaactctgc

SEQ ID NO: 277286 - DNA, 15 bp, Homo sapiens
tactccaaaactctg

SEQ ID NO: 277287 - DNA, 15 bp, Homo sapiens
ttactccaaaactct

SEQ ID NO: 277288 - DNA, 15 bp, Homo sapiens
tttactccaaaactc

SEQ ID NO: 277289 - DNA, 15 bp, Homo sapiens
atttactccaaaact

SEQ ID NO: 277290 - DNA, 15 bp, Homo sapiens
aatttactccaaaac

SEQ ID NO: 277291 - DNA, 15 bp, Homo sapiens
taatttactccaaaa

SEQ ID NO: 277292 - DNA, 15 bp, Homo sapiens
ataatttactccaaa

SEQ ID NO: 277293 - DNA, 15 bp, Homo sapiens
aataatttactccaa

SEQ ID NO: 277294 - DNA, 15 bp, Homo sapiens
aaataatttactcca

SEQ ID NO: 277295 - DNA, 15 bp, Homo sapiens
aaaataatttactcc

SEQ ID NO: 277296 - DNA, 15 bp, Homo sapiens
taaaataatttactc

SEQ ID NO: 277297 - DNA, 15 bp, Homo sapiens
ataaaataatttact

SEQ ID NO: 277298 - DNA, 15 bp, Homo sapiens
aataaaataatttac

SEQ ID NO: 277299 - DNA, 15 bp, Homo sapiens
taataaaataattta

SEQ ID NO: 277300 - DNA, 15 bp, Homo sapiens
ttaataaaataattt

SEQ ID NO: 277301 - DNA, 15 bp, Homo sapiens
tttaataaaataatt

SEQ ID NO: 277302 - DNA, 15 bp, Homo sapiens
gtttaataaaataat

SEQ ID NO: 277303 - DNA, 15 bp, Homo sapiens
tgtttaataaaataa

SEQ ID NO: 277304 - DNA, 15 bp, Homo sapiens
ttgtttaataaaata

SEQ ID NO: 277305 - DNA, 15 bp, Homo sapiens
tttgtttaataaaat

SEQ ID NO: 277306 - DNA, 15 bp, Homo sapiens
ctttgtttaataaaa

SEQ ID NO: 277307 - DNA, 15 bp, Homo sapiens
tctttgtttaataaa

SEQ ID NO: 277308 - DNA, 15 bp, Homo sapiens
ttctttgtttaataa

SEQ ID NO: 277309 - DNA, 15 bp, Homo sapiens
attctttgtttaata

SEQ ID NO: 277310 - DNA, 15 bp, Homo sapiens
tattctttgtttaat

SEQ ID NO: 277311 - DNA, 15 bp, Homo sapiens
atattctttgtttaa

SEQ ID NO: 277312 - DNA, 15 bp, Homo sapiens
tatattctttgttta

SEQ ID NO: 277313 - DNA, 15 bp, Homo sapiens
ttatattctttgttt

SEQ ID NO: 277314 - DNA, 15 bp, Homo sapiens
tttatattctttgtt

SEQ ID NO: 277315 - DNA, 15 bp, Homo sapiens
ttttatattctttgt

SEQ ID NO: 277316 - DNA, 15 bp, Homo sapiens
attttatattctttg

SEQ ID NO: 277317 - DNA, 15 bp, Homo sapiens
tattttatattcttt

SEQ ID NO: 277318 - DNA, 15 bp, Homo sapiens
ttattttatattctt

SEQ ID NO: 277319 - DNA, 15 bp, Homo sapiens
tttattttatattct

SEQ ID NO: 277320 - DNA, 15 bp, Homo sapiens
gtttattttatattc

SEQ ID NO: 277321 - DNA, 15 bp, Homo sapiens
tgtttattttatatt

SEQ ID NO: 277322 - DNA, 15 bp, Homo sapiens
atgtttattttatat

SEQ ID NO: 277323 - DNA, 15 bp, Homo sapiens
aatgtttattttata

SEQ ID NO: 277324 - DNA, 15 bp, Homo sapiens
aaatgtttattttat

SEQ ID NO: 277325 - DNA, 15 bp, Homo sapiens
gaaatgtttatttta

SEQ ID NO: 277326 - DNA, 15 bp, Homo sapiens
agaaatgtttatttt

SEQ ID NO: 277327 - DNA, 15 bp, Homo sapiens
tagaaatgtttattt

SEQ ID NO: 277328 - DNA, 15 bp, Homo sapiens
gtagaaatgtttatt

SEQ ID NO: 277329 - DNA, 15 bp, Homo sapiens
agtagaaatgtttat

SEQ ID NO: 277330 - DNA, 15 bp, Homo sapiens
aagtagaaatgttta

SEQ ID NO: 277331 - DNA, 15 bp, Homo sapiens
taagtagaaatgttt

SEQ ID NO: 277332 - DNA, 15 bp, Homo sapiens
ataagtagaaatgtt

SEQ ID NO: 277333 - DNA, 15 bp, Homo sapiens
cataagtagaaatgt

SEQ ID NO: 277334 - DNA, 15 bp, Homo sapiens
acataagtagaaatg

SEQ ID NO: 277335 - DNA, 15 bp, Homo sapiens
aacataagtagaaat

SEQ ID NO: 277336 - DNA, 15 bp, Homo sapiens
gaacataagtagaaa

SEQ ID NO: 277337 - DNA, 15 bp, Homo sapiens
ggaacataagtagaa

SEQ ID NO: 277338 - DNA, 15 bp, Homo sapiens
aggaacataagtaga

SEQ ID NO: 277339 - DNA, 15 bp, Homo sapiens
caggaacataagtag

SEQ ID NO: 277340 - DNA, 15 bp, Homo sapiens
acaggaacataagta

SEQ ID NO: 277341 - DNA, 15 bp, Homo sapiens
aacaggaacataagt

SEQ ID NO: 277342 - DNA, 15 bp, Homo sapiens
aaacaggaacataag

SEQ ID NO: 277343 - DNA, 15 bp, Homo sapiens
aaaacaggaacataa

SEQ ID NO: 277344 - DNA, 15 bp, Homo sapiens
taaaacaggaacata

SEQ ID NO: 277345 - DNA, 15 bp, Homo sapiens
ttaaaacaggaacat

SEQ ID NO: 277346 - DNA, 15 bp, Homo sapiens
attaaaacaggaaca

SEQ ID NO: 277347 - DNA, 15 bp, Homo sapiens
aattaaaacaggaac

SEQ ID NO: 277348 - DNA, 15 bp, Homo sapiens
aaattaaaacaggaa

SEQ ID NO: 277349 - DNA, 15 bp, Homo sapiens
taaattaaaacagga

SEQ ID NO: 277350 - DNA, 15 bp, Homo sapiens
gtaaattaaaacagg

SEQ ID NO: 277351 - DNA, 15 bp, Homo sapiens
ggtaaattaaaacag

SEQ ID NO: 277352 - DNA, 15 bp, Homo sapiens
aggtaaattaaaaca

SEQ ID NO: 277353 - DNA, 15 bp, Homo sapiens
gaggtaaattaaaac

SEQ ID NO: 277354 - DNA, 15 bp, Homo sapiens
tgaggtaaattaaaa

SEQ ID NO: 277355 - DNA, 15 bp, Homo sapiens
atgaggtaaattaaa

SEQ ID NO: 277356 - DNA, 15 bp, Homo sapiens
aatgaggtaaattaa

SEQ ID NO: 277357 - DNA, 15 bp, Homo sapiens
aaatgaggtaaatta

SEQ ID NO: 277358 - DNA, 15 bp, Homo sapiens
taaatgaggtaaatt

SEQ ID NO: 277359 - DNA, 15 bp, Homo sapiens
ataaatgaggtaaat

SEQ ID NO: 277360 - DNA, 15 bp, Homo sapiens
tataaatgaggtaaa

SEQ ID NO: 277361 - DNA, 15 bp, Homo sapiens
atataaatgaggtaa

SEQ ID NO: 277362 - DNA, 15 bp, Homo sapiens
catataaatgaggta

SEQ ID NO: 277363 - DNA, 15 bp, Homo sapiens
gcatataaatgaggt

SEQ ID NO: 277364 - DNA, 15 bp, Homo sapiens
tgcatataaatgagg

SEQ ID NO: 277365 - DNA, 15 bp, Homo sapiens
atgcatataaatgag

SEQ ID NO: 277366 - DNA, 15 bp, Homo sapiens
gatgcatataaatga

SEQ ID NO: 277367 - DNA, 15 bp, Homo sapiens
agatgcatataaatg

SEQ ID NO: 277368 - DNA, 15 bp, Homo sapiens
aagatgcatataaat

SEQ ID NO: 277369 - DNA, 15 bp, Homo sapiens
caagatgcatataaa

SEQ ID NO: 277370 - DNA, 15 bp, Homo sapiens
tcaagatgcatataa

SEQ ID NO: 277371 - DNA, 15 bp, Homo sapiens
atcaagatgcatata

SEQ ID NO: 277372 - DNA, 15 bp, Homo sapiens
tatcaagatgcatat

SEQ ID NO: 277373 - DNA, 15 bp, Homo sapiens
atatcaagatgcata

SEQ ID NO: 277374 - DNA, 15 bp, Homo sapiens
aatatcaagatgcat

SEQ ID NO: 277375 - DNA, 15 bp, Homo sapiens
caatatcaagatgca

SEQ ID NO: 277376 - DNA, 15 bp, Homo sapiens
gcaatatcaagatgc

SEQ ID NO: 277377 - DNA, 15 bp, Homo sapiens
tgcaatatcaagatg

SEQ ID NO: 277378 - DNA, 15 bp, Homo sapiens
atgcaatatcaagat

SEQ ID NO: 277379 - DNA, 15 bp, Homo sapiens
aatgcaatatcaaga

SEQ ID NO: 277380 - DNA, 15 bp, Homo sapiens
aaatgcaatatcaag

SEQ ID NO: 277381 - DNA, 15 bp, Homo sapiens
aaaatgcaatatcaa

SEQ ID NO: 277382 - DNA, 15 bp, Homo sapiens
gaaaatgcaatatca

SEQ ID NO: 277383 - DNA, 15 bp, Homo sapiens
tgaaaatgcaatatc

SEQ ID NO: 277384 - DNA, 15 bp, Homo sapiens
atgaaaatgcaatat

SEQ ID NO: 277385 - DNA, 15 bp, Homo sapiens
tatgaaaatgcaata

SEQ ID NO: 277386 - DNA, 15 bp, Homo sapiens
atatgaaaatgcaat

SEQ ID NO: 277387 - DNA, 15 bp, Homo sapiens
aatatgaaaatgcaa

SEQ ID NO: 277388 - DNA, 15 bp, Homo sapiens
gaatatgaaaatgca

SEQ ID NO: 277389 - DNA, 15 bp, Homo sapiens
agaatatgaaaatgc

SEQ ID NO: 277390 - DNA, 15 bp, Homo sapiens
tagaatatgaaaatg

SEQ ID NO: 277391 - DNA, 15 bp, Homo sapiens
ttagaatatgaaaat

SEQ ID NO: 277392 - DNA, 15 bp, Homo sapiens
tttagaatatgaaaa

SEQ ID NO: 277393 - DNA, 15 bp, Homo sapiens
ttttagaatatgaaa

SEQ ID NO: 277394 - DNA, 15 bp, Homo sapiens
tttttagaatatgaa

SEQ ID NO: 277395 - DNA, 15 bp, Homo sapiens
gtttttagaatatga

SEQ ID NO: 277396 - DNA, 15 bp, Homo sapiens
agtttttagaatatg

SEQ ID NO: 277397 - DNA, 15 bp, Homo sapiens
tagtttttagaatat

SEQ ID NO: 277398 - DNA, 15 bp, Homo sapiens
atagtttttagaata

SEQ ID NO: 277399 - DNA, 15 bp, Homo sapiens
aatagtttttagaat

SEQ ID NO: 277400 - DNA, 15 bp, Homo sapiens
aaatagtttttagaa

SEQ ID NO: 277401 - DNA, 15 bp, Homo sapiens
aaaatagtttttaga

SEQ ID NO: 277402 - DNA, 15 bp, Homo sapiens
aaaaatagtttttag

SEQ ID NO: 277403 - DNA, 15 bp, Homo sapiens
taaaaatagttttta

SEQ ID NO: 277404 - DNA, 15 bp, Homo sapiens
ttaaaaatagttttt

SEQ ID NO: 277405 - DNA, 15 bp, Homo sapiens
tttaaaaatagtttt

SEQ ID NO: 277406 - DNA, 15 bp, Homo sapiens
ctttaaaaatagttt

SEQ ID NO: 277407 - DNA, 15 bp, Homo sapiens
tctttaaaaatagtt

SEQ ID NO: 277408 - DNA, 15 bp, Homo sapiens
gtctttaaaaatagt

SEQ ID NO: 277409 - DNA, 15 bp, Homo sapiens
tgtctttaaaaatag

SEQ ID NO: 277410 - DNA, 15 bp, Homo sapiens
ctgtctttaaaaata

SEQ ID NO: 277411 - DNA, 15 bp, Homo sapiens
cctgtctttaaaaat

SEQ ID NO: 277412 - DNA, 15 bp, Homo sapiens
acctgtctttaaaaa

SEQ ID NO: 277413 - DNA, 15 bp, Homo sapiens
aacctgtctttaaaa

SEQ ID NO: 277414 - DNA, 15 bp, Homo sapiens
caacctgtctttaaa

SEQ ID NO: 277415 - DNA, 15 bp, Homo sapiens
tcaacctgtctttaa

SEQ ID NO: 277416 - DNA, 15 bp, Homo sapiens
atcaacctgtcttta

SEQ ID NO: 277417 - DNA, 15 bp, Homo sapiens
aatcaacctgtcttt

SEQ ID NO: 277418 - DNA, 15 bp, Homo sapiens
gaatcaacctgtctt

SEQ ID NO: 277419 - DNA, 15 bp, Homo sapiens
tgaatcaacctgtct

SEQ ID NO: 277420 - DNA, 15 bp, Homo sapiens
ctgaatcaacctgtc

SEQ ID NO: 277421 - DNA, 15 bp, Homo sapiens
tctgaatcaacctgt

SEQ ID NO: 277422 - DNA, 15 bp, Homo sapiens
ttctgaatcaacctg

SEQ ID NO: 277423 - DNA, 15 bp, Homo sapiens
attctgaatcaacct

SEQ ID NO: 277424 - DNA, 15 bp, Homo sapiens
aattctgaatcaacc

SEQ ID NO: 277425 - DNA, 15 bp, Homo sapiens
taattctgaatcaac

SEQ ID NO: 277426 - DNA, 15 bp, Homo sapiens
gtaattctgaatcaa

SEQ ID NO: 277427 - DNA, 15 bp, Homo sapiens
tgtaattctgaatca

SEQ ID NO: 277428 - DNA, 15 bp, Homo sapiens
ctgtaattctgaatc

SEQ ID NO: 277429 - DNA, 15 bp, Homo sapiens
actgtaattctgaat

SEQ ID NO: 277430 - DNA, 15 bp, Homo sapiens
cactgtaattctgaa

SEQ ID NO: 277431 - DNA, 15 bp, Homo sapiens
acactgtaattctga

SEQ ID NO: 277432 - DNA, 15 bp, Homo sapiens
tacactgtaattctg

SEQ ID NO: 277433 - DNA, 15 bp, Homo sapiens
gtacactgtaattct

SEQ ID NO: 277434 - DNA, 15 bp, Homo sapiens
agtacactgtaattc

SEQ ID NO: 277435 - DNA, 15 bp, Homo sapiens
aagtacactgtaatt

SEQ ID NO: 277436 - DNA, 15 bp, Homo sapiens
caagtacactgtaat

SEQ ID NO: 277437 - DNA, 15 bp, Homo sapiens
tcaagtacactgtaa

SEQ ID NO: 277438 - DNA, 15 bp, Homo sapiens
ttcaagtacactgta

SEQ ID NO: 277439 - DNA, 15 bp, Homo sapiens
tttcaagtacactgt

SEQ ID NO: 277440 - DNA, 15 bp, Homo sapiens
ttttcaagtacactg

SEQ ID NO: 277441 - DNA, 15 bp, Homo sapiens
attttcaagtacact

SEQ ID NO: 277442 - DNA, 15 bp, Homo sapiens
gattttcaagtacac

SEQ ID NO: 277443 - DNA, 15 bp, Homo sapiens
tgattttcaagtaca

SEQ ID NO: 277444 - DNA, 15 bp, Homo sapiens
atgattttcaagtac

SEQ ID NO: 277445 - DNA, 15 bp, Homo sapiens
gatgattttcaagta

SEQ ID NO: 277446 - DNA, 15 bp, Homo sapiens
tgatgattttcaagt

SEQ ID NO: 277447 - DNA, 15 bp, Homo sapiens
ctgatgattttcaag

SEQ ID NO: 277448 - DNA, 15 bp, Homo sapiens
cctgatgattttcaa

SEQ ID NO: 277449 - DNA, 15 bp, Homo sapiens
acctgatgattttca

SEQ ID NO: 277450 - DNA, 15 bp, Homo sapiens
tacctgatgattttc

SEQ ID NO: 277451 - DNA, 15 bp, Homo sapiens
gtacctgatgatttt

SEQ ID NO: 277452 - DNA, 15 bp, Homo sapiens
ggtacctgatgattt

SEQ ID NO: 277453 - DNA, 15 bp, Homo sapiens
aggtacctgatgatt

SEQ ID NO: 277454 - DNA, 15 bp, Homo sapiens
taggtacctgatgat

SEQ ID NO: 277455 - DNA, 15 bp, Homo sapiens
ataggtacctgatga

SEQ ID NO: 277456 - DNA, 15 bp, Homo sapiens
aataggtacctgatg

SEQ ID NO: 277457 - DNA, 15 bp, Homo sapiens
taataggtacctgat

SEQ ID NO: 277458 - DNA, 15 bp, Homo sapiens
ataataggtacctga

SEQ ID NO: 277459 - DNA, 15 bp, Homo sapiens
aataataggtacctg

SEQ ID NO: 277460 - DNA, 15 bp, Homo sapiens
taataataggtacct

SEQ ID NO: 277461 - DNA, 15 bp, Homo sapiens
ctaataataggtacc

SEQ ID NO: 277462 - DNA, 15 bp, Homo sapiens
actaataataggtac

SEQ ID NO: 277463 - DNA, 15 bp, Homo sapiens
aactaataataggta

SEQ ID NO: 277464 - DNA, 15 bp, Homo sapiens
aaactaataataggt

SEQ ID NO: 277465 - DNA, 15 bp, Homo sapiens
aaaactaataatagg

SEQ ID NO: 277466 - DNA, 15 bp, Homo sapiens
gaaaactaataatag

SEQ ID NO: 277467 - DNA, 15 bp, Homo sapiens
tgaaaactaataata

SEQ ID NO: 277468 - DNA, 15 bp, Homo sapiens
gtgaaaactaataat

SEQ ID NO: 277469 - DNA, 15 bp, Homo sapiens
ggtgaaaactaataa

SEQ ID NO: 277470 - DNA, 15 bp, Homo sapiens
gggtgaaaactaata

SEQ ID NO: 277471 - DNA, 15 bp, Homo sapiens
tgggtgaaaactaat

SEQ ID NO: 277472 - DNA, 15 bp, Homo sapiens
gtgggtgaaaactaa

SEQ ID NO: 277473 - DNA, 15 bp, Homo sapiens
tgtgggtgaaaacta

SEQ ID NO: 277474 - DNA, 15 bp, Homo sapiens
atgtgggtgaaaact

SEQ ID NO: 277475 - DNA, 15 bp, Homo sapiens
aatgtgggtgaaaac

SEQ ID NO: 277476 - DNA, 15 bp, Homo sapiens
caatgtgggtgaaaa

SEQ ID NO: 277477 - DNA, 15 bp, Homo sapiens
tcaatgtgggtgaaa

SEQ ID NO: 277478 - DNA, 15 bp, Homo sapiens
ttcaatgtgggtgaa

SEQ ID NO: 277479 - DNA, 15 bp, Homo sapiens
attcaatgtgggtga

SEQ ID NO: 277480 - DNA, 15 bp, Homo sapiens
gattcaatgtgggtg

SEQ ID NO: 277481 - DNA, 15 bp, Homo sapiens
agattcaatgtgggt

SEQ ID NO: 277482 - DNA, 15 bp, Homo sapiens
cagattcaatgtggg

SEQ ID NO: 277483 - DNA, 15 bp, Homo sapiens
acagattcaatgtgg

SEQ ID NO: 277484 - DNA, 15 bp, Homo sapiens
cacagattcaatgtg

SEQ ID NO: 277485 - DNA, 15 bp, Homo sapiens
acacagattcaatgt

SEQ ID NO: 277486 - DNA, 15 bp, Homo sapiens
aacacagattcaatg

SEQ ID NO: 277487 - DNA, 15 bp, Homo sapiens
aaacacagattcaat

SEQ ID NO: 277488 - DNA, 15 bp, Homo sapiens
gaaacacagattcaa

SEQ ID NO: 277489 - DNA, 15 bp, Homo sapiens
tgaaacacagattca

SEQ ID NO: 277490 - DNA, 15 bp, Homo sapiens
ctgaaacacagattc

SEQ ID NO: 277491 - DNA, 15 bp, Homo sapiens
tctgaaacacagatt

SEQ ID NO: 277492 - DNA, 15 bp, Homo sapiens
ttctgaaacacagat

SEQ ID NO: 277493 - DNA, 15 bp, Homo sapiens
tttctgaaacacaga

SEQ ID NO: 277494 - DNA, 15 bp, Homo sapiens
gtttctgaaacacag

SEQ ID NO: 277495 - DNA, 15 bp, Homo sapiens
agtttctgaaacaca

SEQ ID NO: 277496 - DNA, 15 bp, Homo sapiens
cagtttctgaaacac

SEQ ID NO: 277497 - DNA, 15 bp, Homo sapiens
acagtttctgaaaca

SEQ ID NO: 277498 - DNA, 15 bp, Homo sapiens
gacagtttctgaaac

SEQ ID NO: 277499 - DNA, 15 bp, Homo sapiens
agacagtttctgaaa

SEQ ID NO: 277500 - DNA, 15 bp, Homo sapiens
tagacagtttctgaa

SEQ ID NO: 277501 - DNA, 15 bp, Homo sapiens
gtagacagtttctga

SEQ ID NO: 277502 - DNA, 15 bp, Homo sapiens
ggtagacagtttctg

SEQ ID NO: 277503 - DNA, 15 bp, Homo sapiens
tggtagacagtttct

SEQ ID NO: 277504 - DNA, 15 bp, Homo sapiens
ttggtagacagtttc

SEQ ID NO: 277505 - DNA, 15 bp, Homo sapiens
tttggtagacagttt

SEQ ID NO: 277506 - DNA, 15 bp, Homo sapiens
gtttggtagacagtt

SEQ ID NO: 277507 - DNA, 15 bp, Homo sapiens
agtttggtagacagt

SEQ ID NO: 277508 - DNA, 15 bp, Homo sapiens
aagtttggtagacag

SEQ ID NO: 277509 - DNA, 15 bp, Homo sapiens
aaagtttggtagaca

SEQ ID NO: 277510 - DNA, 15 bp, Homo sapiens
caaagtttggtagac

SEQ ID NO: 277511 - DNA, 15 bp, Homo sapiens
acaaagtttggtaga

SEQ ID NO: 277512 - DNA, 15 bp, Homo sapiens
aacaaagtttggtag

SEQ ID NO: 277513 - DNA, 15 bp, Homo sapiens
aaacaaagtttggta

SEQ ID NO: 277514 - DNA, 15 bp, Homo sapiens
taaacaaagtttggt

SEQ ID NO: 277515 - DNA, 15 bp, Homo sapiens
ataaacaaagtttgg

SEQ ID NO: 277516 - DNA, 15 bp, Homo sapiens
aataaacaaagtttg

SEQ ID NO: 277517 - DNA, 15 bp, Homo sapiens
taataaacaaagttt

SEQ ID NO: 277518 - DNA, 15 bp, Homo sapiens
ttaataaacaaagtt

SEQ ID NO: 277519 - DNA, 15 bp, Homo sapiens
cttaataaacaaagt

SEQ ID NO: 277520 - DNA, 15 bp, Homo sapiens
acttaataaacaaag

SEQ ID NO: 277521 - DNA, 15 bp, Homo sapiens
tacttaataaacaaa

SEQ ID NO: 277522 - DNA, 15 bp, Homo sapiens
ttacttaataaacaa

SEQ ID NO: 277523 - DNA, 15 bp, Homo sapiens
attacttaataaaca

SEQ ID NO: 277524 - DNA, 15 bp, Homo sapiens
aattacttaataaac

SEQ ID NO: 277525 - DNA, 15 bp, Homo sapiens
taattacttaataaa

SEQ ID NO: 277526 - DNA, 15 bp, Homo sapiens
ataattacttaataa

SEQ ID NO: 277527 - DNA, 15 bp, Homo sapiens
aataattacttaata

SEQ ID NO: 277528 - DNA, 15 bp, Homo sapiens
aaataattacttaat

SEQ ID NO: 277529 - DNA, 15 bp, Homo sapiens
aaaataattacttaa

SEQ ID NO: 277530 - DNA, 15 bp, Homo sapiens
gaaaataattactta

SEQ ID NO: 277531 - DNA, 15 bp, Homo sapiens
ggaaaataattactt

SEQ ID NO: 277532 - DNA, 15 bp, Homo sapiens
gggaaaataattact

SEQ ID NO: 277533 - DNA, 15 bp, Homo sapiens
agggaaaataattac

SEQ ID NO: 277534 - DNA, 15 bp, Homo sapiens
tagggaaaataatta

SEQ ID NO: 277535 - DNA, 15 bp, Homo sapiens
ctagggaaaataatt

SEQ ID NO: 277536 - DNA, 15 bp, Homo sapiens
actagggaaaataat

SEQ ID NO: 277537 - DNA, 15 bp, Homo sapiens
aactagggaaaataa

SEQ ID NO: 277538 - DNA, 15 bp, Homo sapiens
aaactagggaaaata

SEQ ID NO: 277539 - DNA, 15 bp, Homo sapiens
aaaactagggaaaat

SEQ ID NO: 277540 - DNA, 15 bp, Homo sapiens
taaaactagggaaaa

SEQ ID NO: 277541 - DNA, 15 bp, Homo sapiens
ataaaactagggaaa

SEQ ID NO: 277542 - DNA, 15 bp, Homo sapiens
aataaaactagggaa

SEQ ID NO: 277543 - DNA, 15 bp, Homo sapiens
gaataaaactaggga

SEQ ID NO: 277544 - DNA, 15 bp, Homo sapiens
tgaataaaactaggg

SEQ ID NO: 277545 - DNA, 15 bp, Homo sapiens
ttgaataaaactagg

SEQ ID NO: 277546 - DNA, 15 bp, Homo sapiens
cttgaataaaactag

SEQ ID NO: 277547 - DNA, 15 bp, Homo sapiens
tcttgaataaaacta

SEQ ID NO: 277548 - DNA, 15 bp, Homo sapiens
atcttgaataaaact

SEQ ID NO: 277549 - DNA, 15 bp, Homo sapiens
tatcttgaataaaac

SEQ ID NO: 277550 - DNA, 15 bp, Homo sapiens
atatcttgaataaaa

SEQ ID NO: 277551 - DNA, 15 bp, Homo sapiens
tatatcttgaataaa

SEQ ID NO: 277552 - DNA, 15 bp, Homo sapiens
gtatatcttgaataa

SEQ ID NO: 277553 - DNA, 15 bp, Homo sapiens
tgtatatcttgaata

SEQ ID NO: 277554 - DNA, 15 bp, Homo sapiens
ttgtatatcttgaat

SEQ ID NO: 277555 - DNA, 15 bp, Homo sapiens
tttgtatatcttgaa

SEQ ID NO: 277556 - DNA, 15 bp, Homo sapiens
ctttgtatatcttga

SEQ ID NO: 277557 - DNA, 15 bp, Homo sapiens
gctttgtatatcttg

SEQ ID NO: 277558 - DNA, 15 bp, Homo sapiens
agctttgtatatctt

SEQ ID NO: 277559 - DNA, 15 bp, Homo sapiens
cagctttgtatatct

SEQ ID NO: 277560 - DNA, 15 bp, Homo sapiens
gcagctttgtatatc

SEQ ID NO: 277561 - DNA, 15 bp, Homo sapiens
ggcagctttgtatat

SEQ ID NO: 277562 - DNA, 15 bp, Homo sapiens
tggcagctttgtata

SEQ ID NO: 277563 - DNA, 15 bp, Homo sapiens
ttggcagctttgtat

SEQ ID NO: 277564 - DNA, 15 bp, Homo sapiens
gttggcagctttgta

SEQ ID NO: 277565 - DNA, 15 bp, Homo sapiens
agttggcagctttgt

SEQ ID NO: 277566 - DNA, 15 bp, Homo sapiens
tagttggcagctttg

SEQ ID NO: 277567 - DNA, 15 bp, Homo sapiens
ctagttggcagcttt

SEQ ID NO: 277568 - DNA, 15 bp, Homo sapiens
actagttggcagctt

SEQ ID NO: 277569 - DNA, 15 bp, Homo sapiens
cactagttggcagct

SEQ ID NO: 277570 - DNA, 15 bp, Homo sapiens
gcactagttggcagc

SEQ ID NO: 277571 - DNA, 15 bp, Homo sapiens
agcactagttggcag

SEQ ID NO: 277572 - DNA, 15 bp, Homo sapiens
aagcactagttggca

SEQ ID NO: 277573 - DNA, 15 bp, Homo sapiens
aaagcactagttggc

SEQ ID NO: 277574 - DNA, 15 bp, Homo sapiens
aaaagcactagttgg

SEQ ID NO: 277575 - DNA, 15 bp, Homo sapiens
gaaaagcactagttg

SEQ ID NO: 277576 - DNA, 15 bp, Homo sapiens
tgaaaagcactagtt

SEQ ID NO: 277577 - DNA, 15 bp, Homo sapiens
atgaaaagcactagt

SEQ ID NO: 277578 - DNA, 15 bp, Homo sapiens
gatgaaaagcactag

SEQ ID NO: 277579 - DNA, 15 bp, Homo sapiens
tgatgaaaagcacta

SEQ ID NO: 277580 - DNA, 15 bp, Homo sapiens
ctgatgaaaagcact

SEQ ID NO: 277581 - DNA, 15 bp, Homo sapiens
gctgatgaaaagcac

SEQ ID NO: 277582 - DNA, 15 bp, Homo sapiens
tgctgatgaaaagca

SEQ ID NO: 277583 - DNA, 15 bp, Homo sapiens
atgctgatgaaaagc

SEQ ID NO: 277584 - DNA, 15 bp, Homo sapiens
gatgctgatgaaaag

SEQ ID NO: 277585 - DNA, 15 bp, Homo sapiens
tgatgctgatgaaaa

SEQ ID NO: 277586 - DNA, 15 bp, Homo sapiens
ctgatgctgatgaaa

SEQ ID NO: 277587 - DNA, 15 bp, Homo sapiens
cctgatgctgatgaa

SEQ ID NO: 277588 - DNA, 15 bp, Homo sapiens
acctgatgctgatga

SEQ ID NO: 277589 - DNA, 15 bp, Homo sapiens
tacctgatgctgatg

SEQ ID NO: 277590 - DNA, 15 bp, Homo sapiens
ttacctgatgctgat

SEQ ID NO: 277591 - DNA, 15 bp, Homo sapiens
tttacctgatgctga

SEQ ID NO: 277592 - DNA, 15 bp, Homo sapiens
atttacctgatgctg

SEQ ID NO: 277593 - DNA, 15 bp, Homo sapiens
aatttacctgatgct

SEQ ID NO: 277594 - DNA, 15 bp, Homo sapiens
caatttacctgatgc

SEQ ID NO: 277595 - DNA, 15 bp, Homo sapiens
acaatttacctgatg

SEQ ID NO: 277596 - DNA, 15 bp, Homo sapiens
cacaatttacctgat

SEQ ID NO: 277597 - DNA, 15 bp, Homo sapiens
acacaatttacctga

SEQ ID NO: 277598 - DNA, 15 bp, Homo sapiens
aacacaatttacctg

SEQ ID NO: 277599 - DNA, 15 bp, Homo sapiens
taacacaatttacct

SEQ ID NO: 277600 - DNA, 15 bp, Homo sapiens
gtaacacaatttacc

SEQ ID NO: 277601 - DNA, 15 bp, Homo sapiens
agtaacacaatttac

SEQ ID NO: 277602 - DNA, 15 bp, Homo sapiens
tagtaacacaattta

SEQ ID NO: 277603 - DNA, 15 bp, Homo sapiens
atagtaacacaattt

SEQ ID NO: 277604 - DNA, 15 bp, Homo sapiens
tatagtaacacaatt

SEQ ID NO: 277605 - DNA, 15 bp, Homo sapiens
gtatagtaacacaat

SEQ ID NO: 277606 - DNA, 15 bp, Homo sapiens
agtatagtaacacaa

SEQ ID NO: 277607 - DNA, 15 bp, Homo sapiens
cagtatagtaacaca

SEQ ID NO: 277608 - DNA, 15 bp, Homo sapiens
gcagtatagtaacac

SEQ ID NO: 277609 - DNA, 15 bp, Homo sapiens
cgcagtatagtaaca

SEQ ID NO: 277610 - DNA, 15 bp, Homo sapiens
acgcagtatagtaac

SEQ ID NO: 277611 - DNA, 15 bp, Homo sapiens
aacgcagtatagtaa

SEQ ID NO: 277612 - DNA, 15 bp, Homo sapiens
caacgcagtatagta

SEQ ID NO: 277613 - DNA, 15 bp, Homo sapiens
tcaacgcagtatagt

SEQ ID NO: 277614 - DNA, 15 bp, Homo sapiens
ttcaacgcagtatag

SEQ ID NO: 277615 - DNA, 15 bp, Homo sapiens
attcaacgcagtata

SEQ ID NO: 277616 - DNA, 15 bp, Homo sapiens
aattcaacgcagtat

SEQ ID NO: 277617 - DNA, 15 bp, Homo sapiens
aaattcaacgcagta

SEQ ID NO: 277618 - DNA, 15 bp, Homo sapiens
aaaattcaacgcagt

SEQ ID NO: 277619 - DNA, 15 bp, Homo sapiens
taaaattcaacgcag

SEQ ID NO: 277620 - DNA, 15 bp, Homo sapiens
ctaaaattcaacgca

SEQ ID NO: 277621 - DNA, 15 bp, Homo sapiens
gctaaaattcaacgc

SEQ ID NO: 277622 - DNA, 15 bp, Homo sapiens
tgctaaaattcaacg

SEQ ID NO: 277623 - DNA, 15 bp, Homo sapiens
ttgctaaaattcaac

SEQ ID NO: 277624 - DNA, 15 bp, Homo sapiens
tttgctaaaattcaa

SEQ ID NO: 277625 - DNA, 15 bp, Homo sapiens
ctttgctaaaattca

SEQ ID NO: 277626 - DNA, 15 bp, Homo sapiens
cctttgctaaaattc

SEQ ID NO: 277627 - DNA, 15 bp, Homo sapiens
acctttgctaaaatt

SEQ ID NO: 277628 - DNA, 15 bp, Homo sapiens
tacctttgctaaaat

SEQ ID NO: 277629 - DNA, 15 bp, Homo sapiens
ttacctttgctaaaa

SEQ ID NO: 277630 - DNA, 15 bp, Homo sapiens
tttacctttgctaaa

SEQ ID NO: 277631 - DNA, 15 bp, Homo sapiens
ctttacctttgctaa

SEQ ID NO: 277632 - DNA, 15 bp, Homo sapiens
actttacctttgcta

SEQ ID NO: 277633 - DNA, 15 bp, Homo sapiens
tactttacctttgct

SEQ ID NO: 277634 - DNA, 15 bp, Homo sapiens
atactttacctttgc

SEQ ID NO: 277635 - DNA, 15 bp, Homo sapiens
aatactttacctttg

SEQ ID NO: 277636 - DNA, 15 bp, Homo sapiens
aaatactttaccttt

SEQ ID NO: 277637 - DNA, 15 bp, Homo sapiens
caaatactttacctt

SEQ ID NO: 277638 - DNA, 15 bp, Homo sapiens
gcaaatactttacct

SEQ ID NO: 277639 - DNA, 15 bp, Homo sapiens
agcaaatactttacc

SEQ ID NO: 277640 - DNA, 15 bp, Homo sapiens
tagcaaatactttac

SEQ ID NO: 277641 - DNA, 15 bp, Homo sapiens
atagcaaatacttta

SEQ ID NO: 277642 - DNA, 15 bp, Homo sapiens
aatagcaaatacttt

SEQ ID NO: 277643 - DNA, 15 bp, Homo sapiens
aaatagcaaatactt

SEQ ID NO: 277644 - DNA, 15 bp, Homo sapiens
aaaatagcaaatact

SEQ ID NO: 277645 - DNA, 15 bp, Homo sapiens
taaaatagcaaatac

SEQ ID NO: 277646 - DNA, 15 bp, Homo sapiens
ctaaaatagcaaata

SEQ ID NO: 277647 - DNA, 15 bp, Homo sapiens
actaaaatagcaaat

SEQ ID NO: 277648 - DNA, 15 bp, Homo sapiens
aactaaaatagcaaa

SEQ ID NO: 277649 - DNA, 15 bp, Homo sapiens
taactaaaatagcaa

SEQ ID NO: 277650 - DNA, 15 bp, Homo sapiens
ataactaaaatagca

SEQ ID NO: 277651 - DNA, 15 bp, Homo sapiens
aataactaaaatagc

SEQ ID NO: 277652 - DNA, 15 bp, Homo sapiens
caataactaaaatag

SEQ ID NO: 277653 - DNA, 15 bp, Homo sapiens
acaataactaaaata

SEQ ID NO: 277654 - DNA, 15 bp, Homo sapiens
tacaataactaaaat

SEQ ID NO: 277655 - DNA, 15 bp, Homo sapiens
ctacaataactaaaa

SEQ ID NO: 277656 - DNA, 15 bp, Homo sapiens
gctacaataactaaa

SEQ ID NO: 277657 - DNA, 15 bp, Homo sapiens
agctacaataactaa

SEQ ID NO: 277658 - DNA, 15 bp, Homo sapiens
aagctacaataacta

SEQ ID NO: 277659 - DNA, 15 bp, Homo sapiens
aaagctacaataact

SEQ ID NO: 277660 - DNA, 15 bp, Homo sapiens
taaagctacaataac

SEQ ID NO: 277661 - DNA, 15 bp, Homo sapiens
ataaagctacaataa

SEQ ID NO: 277662 - DNA, 15 bp, Homo sapiens
aataaagctacaata

SEQ ID NO: 277663 - DNA, 15 bp, Homo sapiens
caataaagctacaat

SEQ ID NO: 277664 - DNA, 15 bp, Homo sapiens
tcaataaagctacaa

SEQ ID NO: 277665 - DNA, 15 bp, Homo sapiens
ttcaataaagctaca

SEQ ID NO: 277666 - DNA, 15 bp, Homo sapiens
tttcaataaagctac

SEQ ID NO: 277667 - DNA, 15 bp, Homo sapiens
ctttcaataaagcta

SEQ ID NO: 277668 - DNA, 15 bp, Homo sapiens
gctttcaataaagct

SEQ ID NO: 277669 - DNA, 15 bp, Homo sapiens
tgctttcaataaagc

SEQ ID NO: 277670 - DNA, 15 bp, Homo sapiens
ttgctttcaataaag

SEQ ID NO: 277671 - DNA, 15 bp, Homo sapiens
tttgctttcaataaa

SEQ ID NO: 277672 - DNA, 15 bp, Homo sapiens
gtttgctttcaataa

SEQ ID NO: 277673 - DNA, 15 bp, Homo sapiens
tgtttgctttcaata

SEQ ID NO: 277674 - DNA, 15 bp, Homo sapiens
atgtttgctttcaat

SEQ ID NO: 277675 - DNA, 15 bp, Homo sapiens
tatgtttgctttcaa

SEQ ID NO: 277676 - DNA, 15 bp, Homo sapiens
atatgtttgctttca

SEQ ID NO: 277677 - DNA, 15 bp, Homo sapiens
tatatgtttgctttc

SEQ ID NO: 277678 - DNA, 15 bp, Homo sapiens
ctatatgtttgcttt

SEQ ID NO: 277679 - DNA, 15 bp, Homo sapiens
cctatatgtttgctt

SEQ ID NO: 277680 - DNA, 15 bp, Homo sapiens
acctatatgtttgct

SEQ ID NO: 277681 - DNA, 15 bp, Homo sapiens
aacctatatgtttgc

SEQ ID NO: 277682 - DNA, 15 bp, Homo sapiens
aaacctatatgtttg

SEQ ID NO: 277683 - DNA, 15 bp, Homo sapiens
aaaacctatatgttt

SEQ ID NO: 277684 - DNA, 15 bp, Homo sapiens
aaaaacctatatgtt

SEQ ID NO: 277685 - DNA, 15 bp, Homo sapiens
aaaaaacctatatgt

SEQ ID NO: 277686 - DNA, 15 bp, Homo sapiens
taaaaaacctatatg

SEQ ID NO: 277687 - DNA, 15 bp, Homo sapiens
ttaaaaaacctatat

SEQ ID NO: 277688 - DNA, 15 bp, Homo sapiens
tttaaaaaacctata

SEQ ID NO: 277689 - DNA, 15 bp, Homo sapiens
ctttaaaaaacctat

SEQ ID NO: 277690 - DNA, 15 bp, Homo sapiens
actttaaaaaaccta

SEQ ID NO: 277691 - DNA, 15 bp, Homo sapiens
tactttaaaaaacct

SEQ ID NO: 277692 - DNA, 15 bp, Homo sapiens
atactttaaaaaacc

SEQ ID NO: 277693 - DNA, 15 bp, Homo sapiens
aatactttaaaaaac

SEQ ID NO: 277694 - DNA, 15 bp, Homo sapiens
caatactttaaaaaa

SEQ ID NO: 277695 - DNA, 15 bp, Homo sapiens
ccaatactttaaaaa

SEQ ID NO: 277696 - DNA, 15 bp, Homo sapiens
tccaatactttaaaa

SEQ ID NO: 277697 - DNA, 15 bp, Homo sapiens
ttccaatactttaaa

SEQ ID NO: 277698 - DNA, 15 bp, Homo sapiens
tttccaatactttaa

SEQ ID NO: 277699 - DNA, 15 bp, Homo sapiens
ttttccaatacttta

SEQ ID NO: 277700 - DNA, 15 bp, Homo sapiens
gttttccaatacttt

SEQ ID NO: 277701 - DNA, 15 bp, Homo sapiens
agttttccaatactt

SEQ ID NO: 277702 - DNA, 15 bp, Homo sapiens
gagttttccaatact

SEQ ID NO: 277703 - DNA, 15 bp, Homo sapiens
cgagttttccaatac

SEQ ID NO: 277704 - DNA, 15 bp, Homo sapiens
gcgagttttccaata

SEQ ID NO: 277705 - DNA, 15 bp, Homo sapiens
ggcgagttttccaat

SEQ ID NO: 277706 - DNA, 15 bp, Homo sapiens
tggcgagttttccaa

SEQ ID NO: 277707 - DNA, 15 bp, Homo sapiens
ctggcgagttttcca

SEQ ID NO: 277708 - DNA, 15 bp, Homo sapiens
tctggcgagttttcc

SEQ ID NO: 277709 - DNA, 15 bp, Homo sapiens
atctggcgagttttc

SEQ ID NO: 277710 - DNA, 15 bp, Homo sapiens
aatctggcgagtttt

SEQ ID NO: 277711 - DNA, 15 bp, Homo sapiens
taatctggcgagttt

SEQ ID NO: 277712 - DNA, 15 bp, Homo sapiens
ataatctggcgagtt

SEQ ID NO: 277713 - DNA, 15 bp, Homo sapiens
gataatctggcgagt

SEQ ID NO: 277714 - DNA, 15 bp, Homo sapiens
tgataatctggcgag

SEQ ID NO: 277715 - DNA, 15 bp, Homo sapiens
atgataatctggcga

SEQ ID NO: 277716 - DNA, 15 bp, Homo sapiens
aatgataatctggcg

SEQ ID NO: 277717 - DNA, 15 bp, Homo sapiens
taatgataatctggc

SEQ ID NO: 277718 - DNA, 15 bp, Homo sapiens
ataatgataatctgg

SEQ ID NO: 277719 - DNA, 15 bp, Homo sapiens
tataatgataatctg

SEQ ID NO: 277720 - DNA, 15 bp, Homo sapiens
atataatgataatct

SEQ ID NO: 277721 - DNA, 15 bp, Homo sapiens
catataatgataatc

SEQ ID NO: 277722 - DNA, 15 bp, Homo sapiens
tcatataatgataat

SEQ ID NO: 277723 - DNA, 15 bp, Homo sapiens
gtcatataatgataa

SEQ ID NO: 277724 - DNA, 15 bp, Homo sapiens
agtcatataatgata

SEQ ID NO: 277725 - DNA, 15 bp, Homo sapiens
aagtcatataatgat

SEQ ID NO: 277726 - DNA, 15 bp, Homo sapiens
caagtcatataatga

SEQ ID NO: 277727 - DNA, 15 bp, Homo sapiens
ccaagtcatataatg

SEQ ID NO: 277728 - DNA, 15 bp, Homo sapiens
tccaagtcatataat

SEQ ID NO: 277729 - DNA, 15 bp, Homo sapiens
ttccaagtcatataa

SEQ ID NO: 277730 - DNA, 15 bp, Homo sapiens
gttccaagtcatata

SEQ ID NO: 277731 - DNA, 15 bp, Homo sapiens
ggttccaagtcatat

SEQ ID NO: 277732 - DNA, 15 bp, Homo sapiens
gggttccaagtcata

SEQ ID NO: 277733 - DNA, 15 bp, Homo sapiens
agggttccaagtcat

SEQ ID NO: 277734 - DNA, 15 bp, Homo sapiens
tagggttccaagtca

SEQ ID NO: 277735 - DNA, 15 bp, Homo sapiens
ctagggttccaagtc

SEQ ID NO: 277736 - DNA, 15 bp, Homo sapiens
tctagggttccaagt

SEQ ID NO: 277737 - DNA, 15 bp, Homo sapiens
ttctagggttccaag

SEQ ID NO: 277738 - DNA, 15 bp, Homo sapiens
tttctagggttccaa

SEQ ID NO: 277739 - DNA, 15 bp, Homo sapiens
gtttctagggttcca

SEQ ID NO: 277740 - DNA, 15 bp, Homo sapiens
agtttctagggttcc

SEQ ID NO: 277741 - DNA, 15 bp, Homo sapiens
gagtttctagggttc

SEQ ID NO: 277742 - DNA, 15 bp, Homo sapiens
ggagtttctagggtt

SEQ ID NO: 277743 - DNA, 15 bp, Homo sapiens
gggagtttctagggt

SEQ ID NO: 277744 - DNA, 15 bp, Homo sapiens
tgggagtttctaggg

SEQ ID NO: 277745 - DNA, 15 bp, Homo sapiens
ctgggagtttctagg

SEQ ID NO: 277746 - DNA, 15 bp, Homo sapiens
tctgggagtttctag

SEQ ID NO: 277747 - DNA, 15 bp, Homo sapiens
gtctgggagtttcta

SEQ ID NO: 277748 - DNA, 15 bp, Homo sapiens
ggtctgggagtttct

SEQ ID NO: 277749 - DNA, 15 bp, Homo sapiens
tggtctgggagtttc

SEQ ID NO: 277750 - DNA, 15 bp, Homo sapiens
gtggtctgggagttt

SEQ ID NO: 277751 - DNA, 15 bp, Homo sapiens
cgtggtctgggagtt

SEQ ID NO: 277752 - DNA, 15 bp, Homo sapiens
tcgtggtctgggagt

SEQ ID NO: 277753 - DNA, 15 bp, Homo sapiens
ctcgtggtctgggag

SEQ ID NO: 277754 - DNA, 15 bp, Homo sapiens
tctcgtggtctggga

SEQ ID NO: 277755 - DNA, 15 bp, Homo sapiens
gtctcgtggtctggg

SEQ ID NO: 277756 - DNA, 15 bp, Homo sapiens
agtctcgtggtctgg

SEQ ID NO: 277757 - DNA, 15 bp, Homo sapiens
aagtctcgtggtctg

SEQ ID NO: 277758 - DNA, 15 bp, Homo sapiens
taagtctcgtggtct

SEQ ID NO: 277759 - DNA, 15 bp, Homo sapiens
ttaagtctcgtggtc

SEQ ID NO: 277760 - DNA, 15 bp, Homo sapiens
attaagtctcgtggt

SEQ ID NO: 277761 - DNA, 15 bp, Homo sapiens
cattaagtctcgtgg

SEQ ID NO: 277762 - DNA, 15 bp, Homo sapiens
ccattaagtctcgtg

SEQ ID NO: 277763 - DNA, 15 bp, Homo sapiens
accattaagtctcgt

SEQ ID NO: 277764 - DNA, 15 bp, Homo sapiens
aaccattaagtctcg

SEQ ID NO: 277765 - DNA, 15 bp, Homo sapiens
taaccattaagtctc

SEQ ID NO: 277766 - DNA, 15 bp, Homo sapiens
ttaaccattaagtct

SEQ ID NO: 277767 - DNA, 15 bp, Homo sapiens
attaaccattaagtc

SEQ ID NO: 277768 - DNA, 15 bp, Homo sapiens
cattaaccattaagt

SEQ ID NO: 277769 - DNA, 15 bp, Homo sapiens
tcattaaccattaag

SEQ ID NO: 277770 - DNA, 15 bp, Homo sapiens
atcattaaccattaa

SEQ ID NO: 277771 - DNA, 15 bp, Homo sapiens
gatcattaaccatta

SEQ ID NO: 277772 - DNA, 15 bp, Homo sapiens
agatcattaaccatt

SEQ ID NO: 277773 - DNA, 15 bp, Homo sapiens
gagatcattaaccat

SEQ ID NO: 277774 - DNA, 15 bp, Homo sapiens
agagatcattaacca

SEQ ID NO: 277775 - DNA, 15 bp, Homo sapiens
aagagatcattaacc

SEQ ID NO: 277776 - DNA, 15 bp, Homo sapiens
aaagagatcattaac

SEQ ID NO: 277777 - DNA, 15 bp, Homo sapiens
gaaagagatcattaa

SEQ ID NO: 277778 - DNA, 15 bp, Homo sapiens
tgaaagagatcatta

SEQ ID NO: 277779 - DNA, 15 bp, Homo sapiens
ctgaaagagatcatt

SEQ ID NO: 277780 - DNA, 15 bp, Homo sapiens
actgaaagagatcat

SEQ ID NO: 277781 - DNA, 15 bp, Homo sapiens
aactgaaagagatca

SEQ ID NO: 277782 - DNA, 15 bp, Homo sapiens
gaactgaaagagatc

SEQ ID NO: 277783 - DNA, 15 bp, Homo sapiens
agaactgaaagagat

SEQ ID NO: 277784 - DNA, 15 bp, Homo sapiens
gagaactgaaagaga

SEQ ID NO: 277785 - DNA, 15 bp, Homo sapiens
agagaactgaaagag

SEQ ID NO: 277786 - DNA, 15 bp, Homo sapiens
aagagaactgaaaga

SEQ ID NO: 277787 - DNA, 15 bp, Homo sapiens
aaagagaactgaaag

SEQ ID NO: 277788 - DNA, 15 bp, Homo sapiens
gaaagagaactgaaa

SEQ ID NO: 277789 - DNA, 15 bp, Homo sapiens
tgaaagagaactgaa

SEQ ID NO: 277790 - DNA, 15 bp, Homo sapiens
ttgaaagagaactga

SEQ ID NO: 277791 - DNA, 15 bp, Homo sapiens
gttgaaagagaactg

SEQ ID NO: 277792 - DNA, 15 bp, Homo sapiens
agttgaaagagaact

SEQ ID NO: 277793 - DNA, 15 bp, Homo sapiens
aagttgaaagagaac

SEQ ID NO: 277794 - DNA, 15 bp, Homo sapiens
caagttgaaagagaa

SEQ ID NO: 277795 - DNA, 15 bp, Homo sapiens
ccaagttgaaagaga

SEQ ID NO: 277796 - DNA, 15 bp, Homo sapiens
tccaagttgaaagag

SEQ ID NO: 277797 - DNA, 15 bp, Homo sapiens
ttccaagttgaaaga

SEQ ID NO: 277798 - DNA, 15 bp, Homo sapiens
attccaagttgaaag

SEQ ID NO: 277799 - DNA, 15 bp, Homo sapiens
aattccaagttgaaa

SEQ ID NO: 277800 - DNA, 15 bp, Homo sapiens
gaattccaagttgaa

SEQ ID NO: 277801 - DNA, 15 bp, Homo sapiens
agaattccaagttga

SEQ ID NO: 277802 - DNA, 15 bp, Homo sapiens
gagaattccaagttg

SEQ ID NO: 277803 - DNA, 15 bp, Homo sapiens
agagaattccaagtt

SEQ ID NO: 277804 - DNA, 15 bp, Homo sapiens
aagagaattccaagt

SEQ ID NO: 277805 - DNA, 15 bp, Homo sapiens
taagagaattccaag

SEQ ID NO: 277806 - DNA, 15 bp, Homo sapiens
ataagagaattccaa

SEQ ID NO: 277807 - DNA, 15 bp, Homo sapiens
aataagagaattcca

SEQ ID NO: 277808 - DNA, 15 bp, Homo sapiens
gaataagagaattcc

SEQ ID NO: 277809 - DNA, 15 bp, Homo sapiens
ggaataagagaattc

SEQ ID NO: 277810 - DNA, 15 bp, Homo sapiens
tggaataagagaatt

SEQ ID NO: 277811 - DNA, 15 bp, Homo sapiens
ttggaataagagaat

SEQ ID NO: 277812 - DNA, 15 bp, Homo sapiens
attggaataagagaa

SEQ ID NO: 277813 - DNA, 15 bp, Homo sapiens
cattggaataagaga

SEQ ID NO: 277814 - DNA, 15 bp, Homo sapiens
gcattggaataagag

SEQ ID NO: 277815 - DNA, 15 bp, Homo sapiens
ggcattggaataaga

SEQ ID NO: 277816 - DNA, 15 bp, Homo sapiens
tggcattggaataag

SEQ ID NO: 277817 - DNA, 15 bp, Homo sapiens
ttggcattggaataa

SEQ ID NO: 277818 - DNA, 15 bp, Homo sapiens
gttggcattggaata

SEQ ID NO: 277819 - DNA, 15 bp, Homo sapiens
agttggcattggaat

SEQ ID NO: 277820 - DNA, 15 bp, Homo sapiens
gagttggcattggaa

SEQ ID NO: 277821 - DNA, 15 bp, Homo sapiens
tgagttggcattgga

SEQ ID NO: 277822 - DNA, 15 bp, Homo sapiens
atgagttggcattgg

SEQ ID NO: 277823 - DNA, 15 bp, Homo sapiens
aatgagttggcattg

SEQ ID NO: 277824 - DNA, 15 bp, Homo sapiens
caatgagttggcatt

SEQ ID NO: 277825 - DNA, 15 bp, Homo sapiens
gcaatgagttggcat

SEQ ID NO: 277826 - DNA, 15 bp, Homo sapiens
agcaatgagttggca

SEQ ID NO: 277827 - DNA, 15 bp, Homo sapiens
gagcaatgagttggc

SEQ ID NO: 277828 - DNA, 15 bp, Homo sapiens
agagcaatgagttgg

SEQ ID NO: 277829 - DNA, 15 bp, Homo sapiens
aagagcaatgagttg

SEQ ID NO: 277830 - DNA, 15 bp, Homo sapiens
aaagagcaatgagtt

SEQ ID NO: 277831 - DNA, 15 bp, Homo sapiens
aaaagagcaatgagt

SEQ ID NO: 277832 - DNA, 15 bp, Homo sapiens
caaaagagcaatgag

SEQ ID NO: 277833 - DNA, 15 bp, Homo sapiens
ccaaaagagcaatga

SEQ ID NO: 277834 - DNA, 15 bp, Homo sapiens
tccaaaagagcaatg

SEQ ID NO: 277835 - DNA, 15 bp, Homo sapiens
ttccaaaagagcaat

SEQ ID NO: 277836 - DNA, 15 bp, Homo sapiens
tttccaaaagagcaa

SEQ ID NO: 277837 - DNA, 15 bp, Homo sapiens
ctttccaaaagagca

SEQ ID NO: 277838 - DNA, 15 bp, Homo sapiens
tctttccaaaagagc

SEQ ID NO: 277839 - DNA, 15 bp, Homo sapiens
gtctttccaaaagag

SEQ ID NO: 277840 - DNA, 15 bp, Homo sapiens
ggtctttccaaaaga

SEQ ID NO: 277841 - DNA, 15 bp, Homo sapiens
gggtctttccaaaag

SEQ ID NO: 277842 - DNA, 15 bp, Homo sapiens
tgggtctttccaaaa

SEQ ID NO: 277843 - DNA, 15 bp, Homo sapiens
atgggtctttccaaa

SEQ ID NO: 277844 - DNA, 15 bp, Homo sapiens
aatgggtctttccaa

SEQ ID NO: 277845 - DNA, 15 bp, Homo sapiens
gaatgggtctttcca

SEQ ID NO: 277846 - DNA, 15 bp, Homo sapiens
agaatgggtctttcc

SEQ ID NO: 277847 - DNA, 15 bp, Homo sapiens
aagaatgggtctttc

SEQ ID NO: 277848 - DNA, 15 bp, Homo sapiens
aaagaatgggtcttt

SEQ ID NO: 277849 - DNA, 15 bp, Homo sapiens
gaaagaatgggtctt

SEQ ID NO: 277850 - DNA, 15 bp, Homo sapiens
ggaaagaatgggtct

SEQ ID NO: 277851 - DNA, 15 bp, Homo sapiens
aggaaagaatgggtc

SEQ ID NO: 277852 - DNA, 15 bp, Homo sapiens
gaggaaagaatgggt

SEQ ID NO: 277853 - DNA, 15 bp, Homo sapiens
agaggaaagaatggg

SEQ ID NO: 277854 - DNA, 15 bp, Homo sapiens
tagaggaaagaatgg

SEQ ID NO: 277855 - DNA, 15 bp, Homo sapiens
atagaggaaagaatg

SEQ ID NO: 277856 - DNA, 15 bp, Homo sapiens
aatagaggaaagaat

SEQ ID NO: 277857 - DNA, 15 bp, Homo sapiens
caatagaggaaagaa

SEQ ID NO: 277858 - DNA, 15 bp, Homo sapiens
acaatagaggaaaga

SEQ ID NO: 277859 - DNA, 15 bp, Homo sapiens
gacaatagaggaaag

SEQ ID NO: 277860 - DNA, 15 bp, Homo sapiens
agacaatagaggaaa

SEQ ID NO: 277861 - DNA, 15 bp, Homo sapiens
aagacaatagaggaa

SEQ ID NO: 277862 - DNA, 15 bp, Homo sapiens
caagacaatagagga

SEQ ID NO: 277863 - DNA, 15 bp, Homo sapiens
ccaagacaatagagg

SEQ ID NO: 277864 - DNA, 15 bp, Homo sapiens
accaagacaatagag

SEQ ID NO: 277865 - DNA, 15 bp, Homo sapiens
taccaagacaataga

SEQ ID NO: 277866 - DNA, 15 bp, Homo sapiens
gtaccaagacaatag

SEQ ID NO: 277867 - DNA, 15 bp, Homo sapiens
ggtaccaagacaata

SEQ ID NO: 277868 - DNA, 15 bp, Homo sapiens
aggtaccaagacaat

SEQ ID NO: 277869 - DNA, 15 bp, Homo sapiens
gaggtaccaagacaa

SEQ ID NO: 277870 - DNA, 15 bp, Homo sapiens
ggaggtaccaagaca

SEQ ID NO: 277871 - DNA, 15 bp, Homo sapiens
aggaggtaccaagac

SEQ ID NO: 277872 - DNA, 15 bp, Homo sapiens
gaggaggtaccaaga

SEQ ID NO: 277873 - DNA, 15 bp, Homo sapiens
tgaggaggtaccaag

SEQ ID NO: 277874 - DNA, 15 bp, Homo sapiens
ctgaggaggtaccaa

SEQ ID NO: 277875 - DNA, 15 bp, Homo sapiens
cctgaggaggtacca

SEQ ID NO: 277876 - DNA, 15 bp, Homo sapiens
tcctgaggaggtacc

SEQ ID NO: 277877 - DNA, 15 bp, Homo sapiens
gtcctgaggaggtac

SEQ ID NO: 277878 - DNA, 15 bp, Homo sapiens
tgtcctgaggaggta

SEQ ID NO: 277879 - DNA, 15 bp, Homo sapiens
atgtcctgaggaggt

SEQ ID NO: 277880 - DNA, 15 bp, Homo sapiens
tatgtcctgaggagg

SEQ ID NO: 277881 - DNA, 15 bp, Homo sapiens
atatgtcctgaggag

SEQ ID NO: 277882 - DNA, 15 bp, Homo sapiens
aatatgtcctgagga

SEQ ID NO: 277883 - DNA, 15 bp, Homo sapiens
gaatatgtcctgagg

SEQ ID NO: 277884 - DNA, 15 bp, Homo sapiens
ggaatatgtcctgag

SEQ ID NO: 277885 - DNA, 15 bp, Homo sapiens
gggaatatgtcctga

SEQ ID NO: 277886 - DNA, 15 bp, Homo sapiens
ggggaatatgtcctg

SEQ ID NO: 277887 - DNA, 15 bp, Homo sapiens
tggggaatatgtcct

SEQ ID NO: 277888 - DNA, 15 bp, Homo sapiens
ttggggaatatgtcc

SEQ ID NO: 277889 - DNA, 15 bp, Homo sapiens
tttggggaatatgtc

SEQ ID NO: 277890 - DNA, 15 bp, Homo sapiens
ctttggggaatatgt

SEQ ID NO: 277891 - DNA, 15 bp, Homo sapiens
actttggggaatatg

SEQ ID NO: 277892 - DNA, 15 bp, Homo sapiens
cactttggggaatat

SEQ ID NO: 277893 - DNA, 15 bp, Homo sapiens
ccactttggggaata

SEQ ID NO: 277894 - DNA, 15 bp, Homo sapiens
tccactttggggaat

SEQ ID NO: 277895 - DNA, 15 bp, Homo sapiens
ttccactttggggaa

SEQ ID NO: 277896 - DNA, 15 bp, Homo sapiens
tttccactttgggga

SEQ ID NO: 277897 - DNA, 15 bp, Homo sapiens
atttccactttgggg

SEQ ID NO: 277898 - DNA, 15 bp, Homo sapiens
catttccactttggg

SEQ ID NO: 277899 - DNA, 15 bp, Homo sapiens
acatttccactttgg

SEQ ID NO: 277900 - DNA, 15 bp, Homo sapiens
gacatttccactttg

SEQ ID NO: 277901 - DNA, 15 bp, Homo sapiens
tgacatttccacttt

SEQ ID NO: 277902 - DNA, 15 bp, Homo sapiens
ctgacatttccactt

SEQ ID NO: 277903 - DNA, 15 bp, Homo sapiens
actgacatttccact

SEQ ID NO: 277904 - DNA, 15 bp, Homo sapiens
aactgacatttccac

SEQ ID NO: 277905 - DNA, 15 bp, Homo sapiens
aaactgacatttcca

SEQ ID NO: 277906 - DNA, 15 bp, Homo sapiens
taaactgacatttcc

SEQ ID NO: 277907 - DNA, 15 bp, Homo sapiens
ttaaactgacatttc

SEQ ID NO: 277908 - DNA, 15 bp, Homo sapiens
cttaaactgacattt

SEQ ID NO: 277909 - DNA, 15 bp, Homo sapiens
tcttaaactgacatt

SEQ ID NO: 277910 - DNA, 15 bp, Homo sapiens
atcttaaactgacat

SEQ ID NO: 277911 - DNA, 15 bp, Homo sapiens
tatcttaaactgaca

SEQ ID NO: 277912 - DNA, 15 bp, Homo sapiens
ttatcttaaactgac

SEQ ID NO: 277913 - DNA, 15 bp, Homo sapiens
attatcttaaactga

SEQ ID NO: 277914 - DNA, 15 bp, Homo sapiens
aattatcttaaactg

SEQ ID NO: 277915 - DNA, 15 bp, Homo sapiens
aaattatcttaaact

SEQ ID NO: 277916 - DNA, 15 bp, Homo sapiens
aaaattatcttaaac

SEQ ID NO: 277917 - DNA, 15 bp, Homo sapiens
gaaaattatcttaaa

SEQ ID NO: 277918 - DNA, 15 bp, Homo sapiens
tgaaaattatcttaa

SEQ ID NO: 277919 - DNA, 15 bp, Homo sapiens
ctgaaaattatctta

SEQ ID NO: 277920 - DNA, 15 bp, Homo sapiens
gctgaaaattatctt

SEQ ID NO: 277921 - DNA, 15 bp, Homo sapiens
tgctgaaaattatct

SEQ ID NO: 277922 - DNA, 15 bp, Homo sapiens
atgctgaaaattatc

SEQ ID NO: 277923 - DNA, 15 bp, Homo sapiens
aatgctgaaaattat

SEQ ID NO: 277924 - DNA, 15 bp, Homo sapiens
caatgctgaaaatta

SEQ ID NO: 277925 - DNA, 15 bp, Homo sapiens
acaatgctgaaaatt

SEQ ID NO: 277926 - DNA, 15 bp, Homo sapiens
cacaatgctgaaaat

SEQ ID NO: 277927 - DNA, 15 bp, Homo sapiens
acacaatgctgaaaa

SEQ ID NO: 277928 - DNA, 15 bp, Homo sapiens
tacacaatgctgaaa

SEQ ID NO: 277929 - DNA, 15 bp, Homo sapiens
ctacacaatgctgaa

SEQ ID NO: 277930 - DNA, 15 bp, Homo sapiens
tctacacaatgctga

SEQ ID NO: 277931 - DNA, 15 bp, Homo sapiens
ttctacacaatgctg

SEQ ID NO: 277932 - DNA, 15 bp, Homo sapiens
attctacacaatgct

SEQ ID NO: 277933 - DNA, 15 bp, Homo sapiens
tattctacacaatgc

SEQ ID NO: 277934 - DNA, 15 bp, Homo sapiens
ttattctacacaatg

SEQ ID NO: 277935 - DNA, 15 bp, Homo sapiens
cttattctacacaat

SEQ ID NO: 277936 - DNA, 15 bp, Homo sapiens
tcttattctacacaa

SEQ ID NO: 277937 - DNA, 15 bp, Homo sapiens
ttcttattctacaca

SEQ ID NO: 277938 - DNA, 15 bp, Homo sapiens
attcttattctacac

SEQ ID NO: 277939 - DNA, 15 bp, Homo sapiens
cattcttattctaca

SEQ ID NO: 277940 - DNA, 15 bp, Homo sapiens
ccattcttattctac

SEQ ID NO: 277941 - DNA, 15 bp, Homo sapiens
accattcttattcta

SEQ ID NO: 277942 - DNA, 15 bp, Homo sapiens
aaccattcttattct

SEQ ID NO: 277943 - DNA, 15 bp, Homo sapiens
taaccattcttattc

SEQ ID NO: 277944 - DNA, 15 bp, Homo sapiens
ctaaccattcttatt

SEQ ID NO: 277945 - DNA, 15 bp, Homo sapiens
tctaaccattcttat

SEQ ID NO: 277946 - DNA, 15 bp, Homo sapiens
gtctaaccattctta

SEQ ID NO: 277947 - DNA, 15 bp, Homo sapiens
tgtctaaccattctt

SEQ ID NO: 277948 - DNA, 15 bp, Homo sapiens
ctgtctaaccattct

SEQ ID NO: 277949 - DNA, 15 bp, Homo sapiens
gctgtctaaccattc

SEQ ID NO: 277950 - DNA, 15 bp, Homo sapiens
agctgtctaaccatt

SEQ ID NO: 277951 - DNA, 15 bp, Homo sapiens
cagctgtctaaccat

SEQ ID NO: 277952 - DNA, 15 bp, Homo sapiens
tcagctgtctaacca

SEQ ID NO: 277953 - DNA, 15 bp, Homo sapiens
atcagctgtctaacc

SEQ ID NO: 277954 - DNA, 15 bp, Homo sapiens
catcagctgtctaac

SEQ ID NO: 277955 - DNA, 15 bp, Homo sapiens
acatcagctgtctaa

SEQ ID NO: 277956 - DNA, 15 bp, Homo sapiens
gacatcagctgtcta

SEQ ID NO: 277957 - DNA, 15 bp, Homo sapiens
tgacatcagctgtct

SEQ ID NO: 277958 - DNA, 15 bp, Homo sapiens
ctgacatcagctgtc

SEQ ID NO: 277959 - DNA, 15 bp, Homo sapiens
gctgacatcagctgt

SEQ ID NO: 277960 - DNA, 15 bp, Homo sapiens
tgctgacatcagctg

SEQ ID NO: 277961 - DNA, 15 bp, Homo sapiens
ttgctgacatcagct

SEQ ID NO: 277962 - DNA, 15 bp, Homo sapiens
cttgctgacatcagc

SEQ ID NO: 277963 - DNA, 15 bp, Homo sapiens
tcttgctgacatcag

SEQ ID NO: 277964 - DNA, 15 bp, Homo sapiens
atcttgctgacatca

SEQ ID NO: 277965 - DNA, 15 bp, Homo sapiens
catcttgctgacatc

SEQ ID NO: 277966 - DNA, 15 bp, Homo sapiens
ccatcttgctgacat

SEQ ID NO: 277967 - DNA, 15 bp, Homo sapiens
accatcttgctgaca

SEQ ID NO: 277968 - DNA, 15 bp, Homo sapiens
caccatcttgctgac

SEQ ID NO: 277969 - DNA, 15 bp, Homo sapiens
ccaccatcttgctga

SEQ ID NO: 277970 - DNA, 15 bp, Homo sapiens
tccaccatcttgctg

SEQ ID NO: 277971 - DNA, 15 bp, Homo sapiens
ttccaccatcttgct

SEQ ID NO: 277972 - DNA, 15 bp, Homo sapiens
attccaccatcttgc

SEQ ID NO: 277973 - DNA, 15 bp, Homo sapiens
tattccaccatcttg

SEQ ID NO: 277974 - DNA, 15 bp, Homo sapiens
ctattccaccatctt

SEQ ID NO: 277975 - DNA, 15 bp, Homo sapiens
actattccaccatct

SEQ ID NO: 277976 - DNA, 15 bp, Homo sapiens
tactattccaccatc

SEQ ID NO: 277977 - DNA, 15 bp, Homo sapiens
ctactattccaccat

SEQ ID NO: 277978 - DNA, 15 bp, Homo sapiens
gctactattccacca

SEQ ID NO: 277979 - DNA, 15 bp, Homo sapiens
cgctactattccacc

SEQ ID NO: 277980 - DNA, 15 bp, Homo sapiens
gcgctactattccac

SEQ ID NO: 277981 - DNA, 15 bp, Homo sapiens
agcgctactattcca

SEQ ID NO: 277982 - DNA, 15 bp, Homo sapiens
cagcgctactattcc

SEQ ID NO: 277983 - DNA, 15 bp, Homo sapiens
acagcgctactattc

SEQ ID NO: 277984 - DNA, 15 bp, Homo sapiens
gacagcgctactatt

SEQ ID NO: 277985 - DNA, 15 bp, Homo sapiens
ggacagcgctactat

SEQ ID NO: 277986 - DNA, 15 bp, Homo sapiens
aggacagcgctacta

SEQ ID NO: 277987 - DNA, 15 bp, Homo sapiens
aaggacagcgctact

SEQ ID NO: 277988 - DNA, 15 bp, Homo sapiens
gaaggacagcgctac

SEQ ID NO: 277989 - DNA, 15 bp, Homo sapiens
tgaaggacagcgcta

SEQ ID NO: 277990 - DNA, 15 bp, Homo sapiens
ctgaaggacagcgct

SEQ ID NO: 277991 - DNA, 15 bp, Homo sapiens
tctgaaggacagcgc

SEQ ID NO: 277992 - DNA, 15 bp, Homo sapiens
ttctgaaggacagcg

SEQ ID NO: 277993 - DNA, 15 bp, Homo sapiens
tttctgaaggacagc

SEQ ID NO: 277994 - DNA, 15 bp, Homo sapiens
gtttctgaaggacag

SEQ ID NO: 277995 - DNA, 15 bp, Homo sapiens
tgtttctgaaggaca

SEQ ID NO: 277996 - DNA, 15 bp, Homo sapiens
gtgtttctgaaggac

SEQ ID NO: 277997 - DNA, 15 bp, Homo sapiens
ggtgtttctgaagga

SEQ ID NO: 277998 - DNA, 15 bp, Homo sapiens
tggtgtttctgaagg

SEQ ID NO: 277999 - DNA, 15 bp, Homo sapiens
ttggtgtttctgaag

SEQ ID NO: 278000 - DNA, 15 bp, Homo sapiens
attggtgtttctgaa

SEQ ID NO: 278001 - DNA, 15 bp, Homo sapiens
aattggtgtttctga

SEQ ID NO: 278002 - DNA, 15 bp, Homo sapiens
aaattggtgtttctg

SEQ ID NO: 278003 - DNA, 15 bp, Homo sapiens
aaaattggtgtttct

SEQ ID NO: 278004 - DNA, 15 bp, Homo sapiens
caaaattggtgtttc

SEQ ID NO: 278005 - DNA, 15 bp, Homo sapiens
tcaaaattggtgttt

SEQ ID NO: 278006 - DNA, 15 bp, Homo sapiens
gtcaaaattggtgtt

SEQ ID NO: 278007 - DNA, 15 bp, Homo sapiens
tgtcaaaattggtgt

SEQ ID NO: 278008 - DNA, 15 bp, Homo sapiens
ttgtcaaaattggtg

SEQ ID NO: 278009 - DNA, 15 bp, Homo sapiens
gttgtcaaaattggt

SEQ ID NO: 278010 - DNA, 15 bp, Homo sapiens
agttgtcaaaattgg

SEQ ID NO: 278011 - DNA, 15 bp, Homo sapiens
tagttgtcaaaattg

SEQ ID NO: 278012 - DNA, 15 bp, Homo sapiens
gtagttgtcaaaatt

SEQ ID NO: 278013 - DNA, 15 bp, Homo sapiens
ggtagttgtcaaaat

SEQ ID NO: 278014 - DNA, 15 bp, Homo sapiens
tggtagttgtcaaaa

SEQ ID NO: 278015 - DNA, 15 bp, Homo sapiens
atggtagttgtcaaa

SEQ ID NO: 278016 - DNA, 15 bp, Homo sapiens
tatggtagttgtcaa

SEQ ID NO: 278017 - DNA, 15 bp, Homo sapiens
ctatggtagttgtca

SEQ ID NO: 278018 - DNA, 15 bp, Homo sapiens
tctatggtagttgtc

SEQ ID NO: 278019 - DNA, 15 bp, Homo sapiens
ttctatggtagttgt

SEQ ID NO: 278020 - DNA, 15 bp, Homo sapiens
tttctatggtagttg

SEQ ID NO: 278021 - DNA, 15 bp, Homo sapiens
ctttctatggtagtt

SEQ ID NO: 278022 - DNA, 15 bp, Homo sapiens
tctttctatggtagt

SEQ ID NO: 278023 - DNA, 15 bp, Homo sapiens
ttctttctatggtag

SEQ ID NO: 278024 - DNA, 15 bp, Homo sapiens
attctttctatggta

SEQ ID NO: 278025 - DNA, 15 bp, Homo sapiens
cattctttctatggt

SEQ ID NO: 278026 - DNA, 15 bp, Homo sapiens
gcattctttctatgg

SEQ ID NO: 278027 - DNA, 15 bp, Homo sapiens
ggcattctttctatg

SEQ ID NO: 278028 - DNA, 15 bp, Homo sapiens
aggcattctttctat

SEQ ID NO: 278029 - DNA, 15 bp, Homo sapiens
aaggcattctttcta

SEQ ID NO: 278030 - DNA, 15 bp, Homo sapiens
aaaggcattctttct

SEQ ID NO: 278031 - DNA, 15 bp, Homo sapiens
taaaggcattctttc

SEQ ID NO: 278032 - DNA, 15 bp, Homo sapiens
ataaaggcattcttt

SEQ ID NO: 278033 - DNA, 15 bp, Homo sapiens
tataaaggcattctt

SEQ ID NO: 278034 - DNA, 15 bp, Homo sapiens
atataaaggcattct

SEQ ID NO: 278035 - DNA, 15 bp, Homo sapiens
aatataaaggcattc

SEQ ID NO: 278036 - DNA, 15 bp, Homo sapiens
aaatataaaggcatt

SEQ ID NO: 278037 - DNA, 15 bp, Homo sapiens
caaatataaaggcat

SEQ ID NO: 278038 - DNA, 15 bp, Homo sapiens
tcaaatataaaggca

SEQ ID NO: 278039 - DNA, 15 bp, Homo sapiens
ctcaaatataaaggc

SEQ ID NO: 278040 - DNA, 15 bp, Homo sapiens
gctcaaatataaagg

SEQ ID NO: 278041 - DNA, 15 bp, Homo sapiens
tgctcaaatataaag

SEQ ID NO: 278042 - DNA, 15 bp, Homo sapiens
atgctcaaatataaa

SEQ ID NO: 278043 - DNA, 15 bp, Homo sapiens
tatgctcaaatataa

SEQ ID NO: 278044 - DNA, 15 bp, Homo sapiens
gtatgctcaaatata

SEQ ID NO: 278045 - DNA, 15 bp, Homo sapiens
tgtatgctcaaatat

SEQ ID NO: 278046 - DNA, 15 bp, Homo sapiens
atgtatgctcaaata

SEQ ID NO: 278047 - DNA, 15 bp, Homo sapiens
catgtatgctcaaat

SEQ ID NO: 278048 - DNA, 15 bp, Homo sapiens
ccatgtatgctcaaa

SEQ ID NO: 278049 - DNA, 15 bp, Homo sapiens
tccatgtatgctcaa

SEQ ID NO: 278050 - DNA, 15 bp, Homo sapiens
ttccatgtatgctca

SEQ ID NO: 278051 - DNA, 15 bp, Homo sapiens
gttccatgtatgctc

SEQ ID NO: 278052 - DNA, 15 bp, Homo sapiens
tgttccatgtatgct

SEQ ID NO: 278053 - DNA, 15 bp, Homo sapiens
atgttccatgtatgc

SEQ ID NO: 278054 - DNA, 15 bp, Homo sapiens
aatgttccatgtatg

SEQ ID NO: 278055 - DNA, 15 bp, Homo sapiens
gaatgttccatgtat

SEQ ID NO: 278056 - DNA, 15 bp, Homo sapiens
agaatgttccatgta

SEQ ID NO: 278057 - DNA, 15 bp, Homo sapiens
gagaatgttccatgt

SEQ ID NO: 278058 - DNA, 15 bp, Homo sapiens
ggagaatgttccatg

SEQ ID NO: 278059 - DNA, 15 bp, Homo sapiens
tggagaatgttccat

SEQ ID NO: 278060 - DNA, 15 bp, Homo sapiens
ctggagaatgttcca

SEQ ID NO: 278061 - DNA, 15 bp, Homo sapiens
cctggagaatgttcc

SEQ ID NO: 278062 - DNA, 15 bp, Homo sapiens
tcctggagaatgttc

SEQ ID NO: 278063 - DNA, 15 bp, Homo sapiens
atcctggagaatgtt

SEQ ID NO: 278064 - DNA, 15 bp, Homo sapiens
gatcctggagaatgt

SEQ ID NO: 278065 - DNA, 15 bp, Homo sapiens
tgatcctggagaatg

SEQ ID NO: 278066 - DNA, 15 bp, Homo sapiens
ttgatcctggagaat

SEQ ID NO: 278067 - DNA, 15 bp, Homo sapiens
attgatcctggagaa

SEQ ID NO: 278068 - DNA, 15 bp, Homo sapiens
gattgatcctggaga

SEQ ID NO: 278069 - DNA, 15 bp, Homo sapiens
tgattgatcctggag

SEQ ID NO: 278070 - DNA, 15 bp, Homo sapiens
atgattgatcctgga

SEQ ID NO: 278071 - DNA, 15 bp, Homo sapiens
tatgattgatcctgg

SEQ ID NO: 278072 - DNA, 15 bp, Homo sapiens
atatgattgatcctg

SEQ ID NO: 278073 - DNA, 15 bp, Homo sapiens
catatgattgatcct

SEQ ID NO: 278074 - DNA, 15 bp, Homo sapiens
acatatgattgatcc

SEQ ID NO: 278075 - DNA, 15 bp, Homo sapiens
gacatatgattgatc

SEQ ID NO: 278076 - DNA, 15 bp, Homo sapiens
tgacatatgattgat

SEQ ID NO: 278077 - DNA, 15 bp, Homo sapiens
ctgacatatgattga

SEQ ID NO: 278078 - DNA, 15 bp, Homo sapiens
cctgacatatgattg

SEQ ID NO: 278079 - DNA, 15 bp, Homo sapiens
gcctgacatatgatt

SEQ ID NO: 278080 - DNA, 15 bp, Homo sapiens
ggcctgacatatgat

SEQ ID NO: 278081 - DNA, 15 bp, Homo sapiens
tggcctgacatatga

SEQ ID NO: 278082 - DNA, 15 bp, Homo sapiens
atggcctgacatatg

SEQ ID NO: 278083 - DNA, 15 bp, Homo sapiens
tatggcctgacatat

SEQ ID NO: 278084 - DNA, 15 bp, Homo sapiens
ttatggcctgacata

SEQ ID NO: 278085 - DNA, 15 bp, Homo sapiens
tttatggcctgacat

SEQ ID NO: 278086 - DNA, 15 bp, Homo sapiens
ttttatggcctgaca

SEQ ID NO: 278087 - DNA, 15 bp, Homo sapiens
gttttatggcctgac

SEQ ID NO: 278088 - DNA, 15 bp, Homo sapiens
tgttttatggcctga

SEQ ID NO: 278089 - DNA, 15 bp, Homo sapiens
ttgttttatggcctg

SEQ ID NO: 278090 - DNA, 15 bp, Homo sapiens
cttgttttatggcct

SEQ ID NO: 278091 - DNA, 15 bp, Homo sapiens
acttgttttatggcc

SEQ ID NO: 278092 - DNA, 15 bp, Homo sapiens
tacttgttttatggc

SEQ ID NO: 278093 - DNA, 15 bp, Homo sapiens
atacttgttttatgg

SEQ ID NO: 278094 - DNA, 15 bp, Homo sapiens
aatacttgttttatg

SEQ ID NO: 278095 - DNA, 15 bp, Homo sapiens
taatacttgttttat

SEQ ID NO: 278096 - DNA, 15 bp, Homo sapiens
ttaatacttgtttta

SEQ ID NO: 278097 - DNA, 15 bp, Homo sapiens
attaatacttgtttt

SEQ ID NO: 278098 - DNA, 15 bp, Homo sapiens
tattaatacttgttt

SEQ ID NO: 278099 - DNA, 15 bp, Homo sapiens
atattaatacttgtt

SEQ ID NO: 278100 - DNA, 15 bp, Homo sapiens
tatattaatacttgt

SEQ ID NO: 278101 - DNA, 15 bp, Homo sapiens
atatattaatacttg

SEQ ID NO: 278102 - DNA, 15 bp, Homo sapiens
aatatattaatactt

SEQ ID NO: 278103 - DNA, 15 bp, Homo sapiens
aaatatattaatact

SEQ ID NO: 278104 - DNA, 15 bp, Homo sapiens
taaatatattaatac

SEQ ID NO: 278105 - DNA, 15 bp, Homo sapiens
ttaaatatattaata

SEQ ID NO: 278106 - DNA, 15 bp, Homo sapiens
cttaaatatattaat

SEQ ID NO: 278107 - DNA, 15 bp, Homo sapiens
tcttaaatatattaa

SEQ ID NO: 278108 - DNA, 15 bp, Homo sapiens
ttcttaaatatatta

SEQ ID NO: 278109 - DNA, 15 bp, Homo sapiens
cttcttaaatatatt

SEQ ID NO: 278110 - DNA, 15 bp, Homo sapiens
tcttcttaaatatat

SEQ ID NO: 278111 - DNA, 15 bp, Homo sapiens
atcttcttaaatata

SEQ ID NO: 278112 - DNA, 15 bp, Homo sapiens
aatcttcttaaatat

SEQ ID NO: 278113 - DNA, 15 bp, Homo sapiens
caatcttcttaaata

SEQ ID NO: 278114 - DNA, 15 bp, Homo sapiens
tcaatcttcttaaat

SEQ ID NO: 278115 - DNA, 15 bp, Homo sapiens
ctcaatcttcttaaa

SEQ ID NO: 278116 - DNA, 15 bp, Homo sapiens
tctcaatcttcttaa

SEQ ID NO: 278117 - DNA, 15 bp, Homo sapiens
atctcaatcttctta

SEQ ID NO: 278118 - DNA, 15 bp, Homo sapiens
tatctcaatcttctt

SEQ ID NO: 278119 - DNA, 15 bp, Homo sapiens
ttatctcaatcttct

SEQ ID NO: 278120 - DNA, 15 bp, Homo sapiens
attatctcaatcttc

SEQ ID NO: 278121 - DNA, 15 bp, Homo sapiens
tattatctcaatctt

SEQ ID NO: 278122 - DNA, 15 bp, Homo sapiens
atattatctcaatct

SEQ ID NO: 278123 - DNA, 15 bp, Homo sapiens
gatattatctcaatc

SEQ ID NO: 278124 - DNA, 15 bp, Homo sapiens
tgatattatctcaat

SEQ ID NO: 278125 - DNA, 15 bp, Homo sapiens
ttgatattatctcaa

SEQ ID NO: 278126 - DNA, 15 bp, Homo sapiens
cttgatattatctca

SEQ ID NO: 278127 - DNA, 15 bp, Homo sapiens
gcttgatattatctc

SEQ ID NO: 278128 - DNA, 15 bp, Homo sapiens
tgcttgatattatct

SEQ ID NO: 278129 - DNA, 15 bp, Homo sapiens
atgcttgatattatc

SEQ ID NO: 278130 - DNA, 15 bp, Homo sapiens
gatgcttgatattat

SEQ ID NO: 278131 - DNA, 15 bp, Homo sapiens
agatgcttgatatta

SEQ ID NO: 278132 - DNA, 15 bp, Homo sapiens
aagatgcttgatatt

SEQ ID NO: 278133 - DNA, 15 bp, Homo sapiens
aaagatgcttgatat

SEQ ID NO: 278134 - DNA, 15 bp, Homo sapiens
aaaagatgcttgata

SEQ ID NO: 278135 - DNA, 15 bp, Homo sapiens
gaaaagatgcttgat

SEQ ID NO: 278136 - DNA, 15 bp, Homo sapiens
agaaaagatgcttga

SEQ ID NO: 278137 - DNA, 15 bp, Homo sapiens
gagaaaagatgcttg

SEQ ID NO: 278138 - DNA, 15 bp, Homo sapiens
tgagaaaagatgctt

SEQ ID NO: 278139 - DNA, 15 bp, Homo sapiens
gtgagaaaagatgct

SEQ ID NO: 278140 - DNA, 15 bp, Homo sapiens
ggtgagaaaagatgc

SEQ ID NO: 278141 - DNA, 15 bp, Homo sapiens
tggtgagaaaagatg

SEQ ID NO: 278142 - DNA, 15 bp, Homo sapiens
atggtgagaaaagat

SEQ ID NO: 278143 - DNA, 15 bp, Homo sapiens
tatggtgagaaaaga

SEQ ID NO: 278144 - DNA, 15 bp, Homo sapiens
ttatggtgagaaaag

SEQ ID NO: 278145 - DNA, 15 bp, Homo sapiens
attatggtgagaaaa

SEQ ID NO: 278146 - DNA, 15 bp, Homo sapiens
cattatggtgagaaa

SEQ ID NO: 278147 - DNA, 15 bp, Homo sapiens
ccattatggtgagaa

SEQ ID NO: 278148 - DNA, 15 bp, Homo sapiens
gccattatggtgaga

SEQ ID NO: 278149 - DNA, 15 bp, Homo sapiens
tgccattatggtgag

SEQ ID NO: 278150 - DNA, 15 bp, Homo sapiens
atgccattatggtga

SEQ ID NO: 278151 - DNA, 15 bp, Homo sapiens
tatgccattatggtg

SEQ ID NO: 278152 - DNA, 15 bp, Homo sapiens
ttatgccattatggt

SEQ ID NO: 278153 - DNA, 15 bp, Homo sapiens
tttatgccattatgg

SEQ ID NO: 278154 - DNA, 15 bp, Homo sapiens
ttttatgccattatg

SEQ ID NO: 278155 - DNA, 15 bp, Homo sapiens
gttttatgccattat

SEQ ID NO: 278156 - DNA, 15 bp, Homo sapiens
agttttatgccatta

SEQ ID NO: 278157 - DNA, 15 bp, Homo sapiens
tagttttatgccatt

SEQ ID NO: 278158 - DNA, 15 bp, Homo sapiens
ctagttttatgccat

SEQ ID NO: 278159 - DNA, 15 bp, Homo sapiens
gctagttttatgcca

SEQ ID NO: 278160 - DNA, 15 bp, Homo sapiens
tgctagttttatgcc

SEQ ID NO: 278161 - DNA, 15 bp, Homo sapiens
ttgctagttttatgc

SEQ ID NO: 278162 - DNA, 15 bp, Homo sapiens
cttgctagttttatg

SEQ ID NO: 278163 - DNA, 15 bp, Homo sapiens
gcttgctagttttat

SEQ ID NO: 278164 - DNA, 15 bp, Homo sapiens
tgcttgctagtttta

SEQ ID NO: 278165 - DNA, 15 bp, Homo sapiens
ttgcttgctagtttt

SEQ ID NO: 278166 - DNA, 15 bp, Homo sapiens
tttgcttgctagttt

SEQ ID NO: 278167 - DNA, 15 bp, Homo sapiens
ttttgcttgctagtt

SEQ ID NO: 278168 - DNA, 15 bp, Homo sapiens
tttttgcttgctagt

SEQ ID NO: 278169 - DNA, 15 bp, Homo sapiens
atttttgcttgctag

SEQ ID NO: 278170 - DNA, 15 bp, Homo sapiens
tatttttgcttgcta

SEQ ID NO: 278171 - DNA, 15 bp, Homo sapiens
ttatttttgcttgct

SEQ ID NO: 278172 - DNA, 15 bp, Homo sapiens
gttatttttgcttgc

SEQ ID NO: 278173 - DNA, 15 bp, Homo sapiens
tgttatttttgcttg

SEQ ID NO: 278174 - DNA, 15 bp, Homo sapiens
ctgttatttttgctt

SEQ ID NO: 278175 - DNA, 15 bp, Homo sapiens
cctgttatttttgct

SEQ ID NO: 278176 - DNA, 15 bp, Homo sapiens
tcctgttatttttgc

SEQ ID NO: 278177 - DNA, 15 bp, Homo sapiens
ttcctgttatttttg

SEQ ID NO: 278178 - DNA, 15 bp, Homo sapiens
tttcctgttattttt

SEQ ID NO: 278179 - DNA, 15 bp, Homo sapiens
ttttcctgttatttt

SEQ ID NO: 278180 - DNA, 15 bp, Homo sapiens
gttttcctgttattt

SEQ ID NO: 278181 - DNA, 15 bp, Homo sapiens
agttttcctgttatt

SEQ ID NO: 278182 - DNA, 15 bp, Homo sapiens
cagttttcctgttat

SEQ ID NO: 278183 - DNA, 15 bp, Homo sapiens
ccagttttcctgtta

SEQ ID NO: 278184 - DNA, 15 bp, Homo sapiens
cccagttttcctgtt

SEQ ID NO: 278185 - DNA, 15 bp, Homo sapiens
tcccagttttcctgt

SEQ ID NO: 278186 - DNA, 15 bp, Homo sapiens
ttcccagttttcctg

SEQ ID NO: 278187 - DNA, 15 bp, Homo sapiens
tttcccagttttcct

SEQ ID NO: 278188 - DNA, 15 bp, Homo sapiens
atttcccagttttcc

SEQ ID NO: 278189 - DNA, 15 bp, Homo sapiens
tatttcccagttttc

SEQ ID NO: 278190 - DNA, 15 bp, Homo sapiens
gtatttcccagtttt

SEQ ID NO: 278191 - DNA, 15 bp, Homo sapiens
agtatttcccagttt

SEQ ID NO: 278192 - DNA, 15 bp, Homo sapiens
gagtatttcccagtt

SEQ ID NO: 278193 - DNA, 15 bp, Homo sapiens
tgagtatttcccagt

SEQ ID NO: 278194 - DNA, 15 bp, Homo sapiens
ttgagtatttcccag

SEQ ID NO: 278195 - DNA, 15 bp, Homo sapiens
tttgagtatttccca

SEQ ID NO: 278196 - DNA, 15 bp, Homo sapiens
atttgagtatttccc

SEQ ID NO: 278197 - DNA, 15 bp, Homo sapiens
tatttgagtatttcc

SEQ ID NO: 278198 - DNA, 15 bp, Homo sapiens
atatttgagtatttc

SEQ ID NO: 278199 - DNA, 15 bp, Homo sapiens
catatttgagtattt

SEQ ID NO: 278200 - DNA, 15 bp, Homo sapiens
acatatttgagtatt

SEQ ID NO: 278201 - DNA, 15 bp, Homo sapiens
cacatatttgagtat

SEQ ID NO: 278202 - DNA, 15 bp, Homo sapiens
tcacatatttgagta

SEQ ID NO: 278203 - DNA, 15 bp, Homo sapiens
ttcacatatttgagt

SEQ ID NO: 278204 - DNA, 15 bp, Homo sapiens
tttcacatatttgag

SEQ ID NO: 278205 - DNA, 15 bp, Homo sapiens
ttttcacatatttga

SEQ ID NO: 278206 - DNA, 15 bp, Homo sapiens
attttcacatatttg

SEQ ID NO: 278207 - DNA, 15 bp, Homo sapiens
aattttcacatattt

SEQ ID NO: 278208 - DNA, 15 bp, Homo sapiens
taattttcacatatt

SEQ ID NO: 278209 - DNA, 15 bp, Homo sapiens
ttaattttcacatat

SEQ ID NO: 278210 - DNA, 15 bp, Homo sapiens
tttaattttcacata

SEQ ID NO: 278211 - DNA, 15 bp, Homo sapiens
gtttaattttcacat

SEQ ID NO: 278212 - DNA, 15 bp, Homo sapiens
tgtttaattttcaca

SEQ ID NO: 278213 - DNA, 15 bp, Homo sapiens
atgtttaattttcac

SEQ ID NO: 278214 - DNA, 15 bp, Homo sapiens
catgtttaattttca

SEQ ID NO: 278215 - DNA, 15 bp, Homo sapiens
acatgtttaattttc

SEQ ID NO: 278216 - DNA, 15 bp, Homo sapiens
aacatgtttaatttt

SEQ ID NO: 278217 - DNA, 15 bp, Homo sapiens
gaacatgtttaattt

SEQ ID NO: 278218 - DNA, 15 bp, Homo sapiens
ggaacatgtttaatt

SEQ ID NO: 278219 - DNA, 15 bp, Homo sapiens
aggaacatgtttaat

SEQ ID NO: 278220 - DNA, 15 bp, Homo sapiens
caggaacatgtttaa

SEQ ID NO: 278221 - DNA, 15 bp, Homo sapiens
tcaggaacatgttta

SEQ ID NO: 278222 - DNA, 15 bp, Homo sapiens
ttcaggaacatgttt

SEQ ID NO: 278223 - DNA, 15 bp, Homo sapiens
gttcaggaacatgtt

SEQ ID NO: 278224 - DNA, 15 bp, Homo sapiens
tgttcaggaacatgt

SEQ ID NO: 278225 - DNA, 15 bp, Homo sapiens
ttgttcaggaacatg

SEQ ID NO: 278226 - DNA, 15 bp, Homo sapiens
gttgttcaggaacat

SEQ ID NO: 278227 - DNA, 15 bp, Homo sapiens
ggttgttcaggaaca

SEQ ID NO: 278228 - DNA, 15 bp, Homo sapiens
tggttgttcaggaac

SEQ ID NO: 278229 - DNA, 15 bp, Homo sapiens
ttggttgttcaggaa

SEQ ID NO: 278230 - DNA, 15 bp, Homo sapiens
attggttgttcagga

SEQ ID NO: 278231 - DNA, 15 bp, Homo sapiens
tattggttgttcagg

SEQ ID NO: 278232 - DNA, 15 bp, Homo sapiens
ctattggttgttcag

SEQ ID NO: 278233 - DNA, 15 bp, Homo sapiens
actattggttgttca

SEQ ID NO: 278234 - DNA, 15 bp, Homo sapiens
gactattggttgttc

SEQ ID NO: 278235 - DNA, 15 bp, Homo sapiens
tgactattggttgtt

SEQ ID NO: 278236 - DNA, 15 bp, Homo sapiens
ttgactattggttgt

SEQ ID NO: 278237 - DNA, 15 bp, Homo sapiens
tttgactattggttg

SEQ ID NO: 278238 - DNA, 15 bp, Homo sapiens
atttgactattggtt

SEQ ID NO: 278239 - DNA, 15 bp, Homo sapiens
tatttgactattggt

SEQ ID NO: 278240 - DNA, 15 bp, Homo sapiens
ttatttgactattgg

SEQ ID NO: 278241 - DNA, 15 bp, Homo sapiens
cttatttgactattg

SEQ ID NO: 278242 - DNA, 15 bp, Homo sapiens
tcttatttgactatt

SEQ ID NO: 278243 - DNA, 15 bp, Homo sapiens
ttcttatttgactat

SEQ ID NO: 278244 - DNA, 15 bp, Homo sapiens
tttcttatttgacta

SEQ ID NO: 278245 - DNA, 15 bp, Homo sapiens
atttcttatttgact

SEQ ID NO: 278246 - DNA, 15 bp, Homo sapiens
gatttcttatttgac

SEQ ID NO: 278247 - DNA, 15 bp, Homo sapiens
tgatttcttatttga

SEQ ID NO: 278248 - DNA, 15 bp, Homo sapiens
ttgatttcttatttg

SEQ ID NO: 278249 - DNA, 15 bp, Homo sapiens
tttgatttcttattt

SEQ ID NO: 278250 - DNA, 15 bp, Homo sapiens
ttttgatttcttatt

SEQ ID NO: 278251 - DNA, 15 bp, Homo sapiens
attttgatttcttat

SEQ ID NO: 278252 - DNA, 15 bp, Homo sapiens
cattttgatttctta

SEQ ID NO: 278253 - DNA, 15 bp, Homo sapiens
ccattttgatttctt

SEQ ID NO: 278254 - DNA, 15 bp, Homo sapiens
tccattttgatttct

SEQ ID NO: 278255 - DNA, 15 bp, Homo sapiens
ttccattttgatttc

SEQ ID NO: 278256 - DNA, 15 bp, Homo sapiens
tttccattttgattt

SEQ ID NO: 278257 - DNA, 15 bp, Homo sapiens
atttccattttgatt

SEQ ID NO: 278258 - DNA, 15 bp, Homo sapiens
aatttccattttgat

SEQ ID NO: 278259 - DNA, 15 bp, Homo sapiens
taatttccattttga

SEQ ID NO: 278260 - DNA, 15 bp, Homo sapiens
ttaatttccattttg

SEQ ID NO: 278261 - DNA, 15 bp, Homo sapiens
tttaatttccatttt

SEQ ID NO: 278262 - DNA, 15 bp, Homo sapiens
ttttaatttccattt

SEQ ID NO: 278263 - DNA, 15 bp, Homo sapiens
tttttaatttccatt

SEQ ID NO: 278264 - DNA, 15 bp, Homo sapiens
ttttttaatttccat

SEQ ID NO: 278265 - DNA, 15 bp, Homo sapiens
tttttttaatttcca

SEQ ID NO: 278266 - DNA, 15 bp, Homo sapiens
ttttttttaatttcc

SEQ ID NO: 278267 - DNA, 15 bp, Homo sapiens
tttttttttaatttc

SEQ ID NO: 278268 - DNA, 15 bp, Homo sapiens
ttttttttttaattt

SEQ ID NO: 278269 - DNA, 15 bp, Homo sapiens
tttttttttttaatt

SEQ ID NO: 278270 - DNA, 15 bp, Homo sapiens
ttttttttttttaat

SEQ ID NO: 278271 - DNA, 15 bp, Homo sapiens
attttttttttttaa

SEQ ID NO: 278272 - DNA, 15 bp, Homo sapiens
catttttttttttta

SEQ ID NO: 278273 - DNA, 15 bp, Homo sapiens
acatttttttttttt

SEQ ID NO: 278274 - DNA, 15 bp, Homo sapiens
cacattttttttttt

SEQ ID NO: 278275 - DNA, 15 bp, Homo sapiens
tcacatttttttttt

SEQ ID NO: 278276 - DNA, 15 bp, Homo sapiens
atcacattttttttt

SEQ ID NO: 278277 - DNA, 15 bp, Homo sapiens
tatcacatttttttt

SEQ ID NO: 278278 - DNA, 15 bp, Homo sapiens
gtatcacattttttt

SEQ ID NO: 278279 - DNA, 15 bp, Homo sapiens
tgtatcacatttttt

SEQ ID NO: 278280 - DNA, 15 bp, Homo sapiens
ttgtatcacattttt

SEQ ID NO: 278281 - DNA, 15 bp, Homo sapiens
tttgtatcacatttt

SEQ ID NO: 278282 - DNA, 15 bp, Homo sapiens
atttgtatcacattt

SEQ ID NO: 278283 - DNA, 15 bp, Homo sapiens
catttgtatcacatt

SEQ ID NO: 278284 - DNA, 15 bp, Homo sapiens
tcatttgtatcacat

SEQ ID NO: 278285 - DNA, 15 bp, Homo sapiens
ttcatttgtatcaca

SEQ ID NO: 278286 - DNA, 15 bp, Homo sapiens
gttcatttgtatcac

SEQ ID NO: 278287 - DNA, 15 bp, Homo sapiens
tgttcatttgtatca

SEQ ID NO: 278288 - DNA, 15 bp, Homo sapiens
atgttcatttgtatc

SEQ ID NO: 278289 - DNA, 15 bp, Homo sapiens
catgttcatttgtat

SEQ ID NO: 278290 - DNA, 15 bp, Homo sapiens
ccatgttcatttgta

SEQ ID NO: 278291 - DNA, 15 bp, Homo sapiens
tccatgttcatttgt

SEQ ID NO: 278292 - DNA, 15 bp, Homo sapiens
ttccatgttcatttg

SEQ ID NO: 278293 - DNA, 15 bp, Homo sapiens
tttccatgttcattt

SEQ ID NO: 278294 - DNA, 15 bp, Homo sapiens
gtttccatgttcatt

SEQ ID NO: 278295 - DNA, 15 bp, Homo sapiens
tgtttccatgttcat

SEQ ID NO: 278296 - DNA, 15 bp, Homo sapiens
ctgtttccatgttca

SEQ ID NO: 278297 - DNA, 15 bp, Homo sapiens
gctgtttccatgttc

SEQ ID NO: 278298 - DNA, 15 bp, Homo sapiens
tgctgtttccatgtt

SEQ ID NO: 278299 - DNA, 15 bp, Homo sapiens
gtgctgtttccatgt

SEQ ID NO: 278300 - DNA, 15 bp, Homo sapiens
tgtgctgtttccatg

SEQ ID NO: 278301 - DNA, 15 bp, Homo sapiens
atgtgctgtttccat

SEQ ID NO: 278302 - DNA, 15 bp, Homo sapiens
gatgtgctgtttcca

SEQ ID NO: 278303 - DNA, 15 bp, Homo sapiens
tgatgtgctgtttcc

SEQ ID NO: 278304 - DNA, 15 bp, Homo sapiens
ttgatgtgctgtttc

SEQ ID NO: 278305 - DNA, 15 bp, Homo sapiens
cttgatgtgctgttt

SEQ ID NO: 278306 - DNA, 15 bp, Homo sapiens
tcttgatgtgctgtt

SEQ ID NO: 278307 - DNA, 15 bp, Homo sapiens
atcttgatgtgctgt

SEQ ID NO: 278308 - DNA, 15 bp, Homo sapiens
aatcttgatgtgctg

SEQ ID NO: 278309 - DNA, 15 bp, Homo sapiens
aaatcttgatgtgct

SEQ ID NO: 278310 - DNA, 15 bp, Homo sapiens
caaatcttgatgtgc

SEQ ID NO: 278311 - DNA, 15 bp, Homo sapiens
acaaatcttgatgtg

SEQ ID NO: 278312 - DNA, 15 bp, Homo sapiens
cacaaatcttgatgt

SEQ ID NO: 278313 - DNA, 15 bp, Homo sapiens
ccacaaatcttgatg

SEQ ID NO: 278314 - DNA, 15 bp, Homo sapiens
tccacaaatcttgat

SEQ ID NO: 278315 - DNA, 15 bp, Homo sapiens
ttccacaaatcttga

SEQ ID NO: 278316 - DNA, 15 bp, Homo sapiens
attccacaaatcttg

SEQ ID NO: 278317 - DNA, 15 bp, Homo sapiens
cattccacaaatctt

SEQ ID NO: 278318 - DNA, 15 bp, Homo sapiens
gcattccacaaatct

SEQ ID NO: 278319 - DNA, 15 bp, Homo sapiens
tgcattccacaaatc

SEQ ID NO: 278320 - DNA, 15 bp, Homo sapiens
ctgcattccacaaat

SEQ ID NO: 278321 - DNA, 15 bp, Homo sapiens
gctgcattccacaaa

SEQ ID NO: 278322 - DNA, 15 bp, Homo sapiens
tgctgcattccacaa

SEQ ID NO: 278323 - DNA, 15 bp, Homo sapiens
ttgctgcattccaca

SEQ ID NO: 278324 - DNA, 15 bp, Homo sapiens
tttgctgcattccac

SEQ ID NO: 278325 - DNA, 15 bp, Homo sapiens
ttttgctgcattcca

SEQ ID NO: 278326 - DNA, 15 bp, Homo sapiens
gttttgctgcattcc

SEQ ID NO: 278327 - DNA, 15 bp, Homo sapiens
tgttttgctgcattc

SEQ ID NO: 278328 - DNA, 15 bp, Homo sapiens
ctgttttgctgcatt

SEQ ID NO: 278329 - DNA, 15 bp, Homo sapiens
actgttttgctgcat

SEQ ID NO: 278330 - DNA, 15 bp, Homo sapiens
aactgttttgctgca

SEQ ID NO: 278331 - DNA, 15 bp, Homo sapiens
gaactgttttgctgc

SEQ ID NO: 278332 - DNA, 15 bp, Homo sapiens
ggaactgttttgctg

SEQ ID NO: 278333 - DNA, 15 bp, Homo sapiens
tggaactgttttgct

SEQ ID NO: 278334 - DNA, 15 bp, Homo sapiens
ttggaactgttttgc

SEQ ID NO: 278335 - DNA, 15 bp, Homo sapiens
attggaactgttttg

SEQ ID NO: 278336 - DNA, 15 bp, Homo sapiens
tattggaactgtttt

SEQ ID NO: 278337 - DNA, 15 bp, Homo sapiens
ctattggaactgttt

SEQ ID NO: 278338 - DNA, 15 bp, Homo sapiens
cctattggaactgtt

SEQ ID NO: 278339 - DNA, 15 bp, Homo sapiens
tcctattggaactgt

SEQ ID NO: 278340 - DNA, 15 bp, Homo sapiens
ctcctattggaactg

SEQ ID NO: 278341 - DNA, 15 bp, Homo sapiens
tctcctattggaact

SEQ ID NO: 278342 - DNA, 15 bp, Homo sapiens
atctcctattggaac

SEQ ID NO: 278343 - DNA, 15 bp, Homo sapiens
aatctcctattggaa

SEQ ID NO: 278344 - DNA, 15 bp, Homo sapiens
aaatctcctattgga

SEQ ID NO: 278345 - DNA, 15 bp, Homo sapiens
gaaatctcctattgg

SEQ ID NO: 278346 - DNA, 15 bp, Homo sapiens
tgaaatctcctattg

SEQ ID NO: 278347 - DNA, 15 bp, Homo sapiens
atgaaatctcctatt

SEQ ID NO: 278348 - DNA, 15 bp, Homo sapiens
tatgaaatctcctat

SEQ ID NO: 278349 - DNA, 15 bp, Homo sapiens
ctatgaaatctccta

SEQ ID NO: 278350 - DNA, 15 bp, Homo sapiens
actatgaaatctcct

SEQ ID NO: 278351 - DNA, 15 bp, Homo sapiens
cactatgaaatctcc

SEQ ID NO: 278352 - DNA, 15 bp, Homo sapiens
tcactatgaaatctc

SEQ ID NO: 278353 - DNA, 15 bp, Homo sapiens
atcactatgaaatct

SEQ ID NO: 278354 - DNA, 15 bp, Homo sapiens
tatcactatgaaatc

SEQ ID NO: 278355 - DNA, 15 bp, Homo sapiens
ttatcactatgaaat

SEQ ID NO: 278356 - DNA, 15 bp, Homo sapiens
tttatcactatgaaa

SEQ ID NO: 278357 - DNA, 15 bp, Homo sapiens
gtttatcactatgaa

SEQ ID NO: 278358 - DNA, 15 bp, Homo sapiens
tgtttatcactatga

SEQ ID NO: 278359 - DNA, 15 bp, Homo sapiens
gtgtttatcactatg

SEQ ID NO: 278360 - DNA, 15 bp, Homo sapiens
ggtgtttatcactat

SEQ ID NO: 278361 - DNA, 15 bp, Homo sapiens
tggtgtttatcacta

SEQ ID NO: 278362 - DNA, 15 bp, Homo sapiens
ttggtgtttatcact

SEQ ID NO: 278363 - DNA, 15 bp, Homo sapiens
gttggtgtttatcac

SEQ ID NO: 278364 - DNA, 15 bp, Homo sapiens
tgttggtgtttatca

SEQ ID NO: 278365 - DNA, 15 bp, Homo sapiens
atgttggtgtttatc

SEQ ID NO: 278366 - DNA, 15 bp, Homo sapiens
catgttggtgtttat

SEQ ID NO: 278367 - DNA, 15 bp, Homo sapiens
tcatgttggtgttta

SEQ ID NO: 278368 - DNA, 15 bp, Homo sapiens
ttcatgttggtgttt

SEQ ID NO: 278369 - DNA, 15 bp, Homo sapiens
cttcatgttggtgtt

SEQ ID NO: 278370 - DNA, 15 bp, Homo sapiens
ccttcatgttggtgt

SEQ ID NO: 278371 - DNA, 15 bp, Homo sapiens
tccttcatgttggtg

SEQ ID NO: 278372 - DNA, 15 bp, Homo sapiens
ttccttcatgttggt

SEQ ID NO: 278373 - DNA, 15 bp, Homo sapiens
tttccttcatgttgg

SEQ ID NO: 278374 - DNA, 15 bp, Homo sapiens
gtttccttcatgttg

SEQ ID NO: 278375 - DNA, 15 bp, Homo sapiens
tgtttccttcatgtt

SEQ ID NO: 278376 - DNA, 15 bp, Homo sapiens
ctgtttccttcatgt

SEQ ID NO: 278377 - DNA, 15 bp, Homo sapiens
actgtttccttcatg

SEQ ID NO: 278378 - DNA, 15 bp, Homo sapiens
tactgtttccttcat

SEQ ID NO: 278379 - DNA, 15 bp, Homo sapiens
ctactgtttccttca

SEQ ID NO: 278380 - DNA, 15 bp, Homo sapiens
cctactgtttccttc

SEQ ID NO: 278381 - DNA, 15 bp, Homo sapiens
tcctactgtttcctt

SEQ ID NO: 278382 - DNA, 15 bp, Homo sapiens
gtcctactgtttcct

SEQ ID NO: 278383 - DNA, 15 bp, Homo sapiens
ggtcctactgtttcc

SEQ ID NO: 278384 - DNA, 15 bp, Homo sapiens
gggtcctactgtttc

SEQ ID NO: 278385 - DNA, 15 bp, Homo sapiens
ggggtcctactgttt

SEQ ID NO: 278386 - DNA, 15 bp, Homo sapiens
tggggtcctactgtt

SEQ ID NO: 278387 - DNA, 15 bp, Homo sapiens
ctggggtcctactgt

SEQ ID NO: 278388 - DNA, 15 bp, Homo sapiens
tctggggtcctactg

SEQ ID NO: 278389 - DNA, 15 bp, Homo sapiens
atctggggtcctact

SEQ ID NO: 278390 - DNA, 15 bp, Homo sapiens
tatctggggtcctac

SEQ ID NO: 278391 - DNA, 15 bp, Homo sapiens
ttatctggggtccta

SEQ ID NO: 278392 - DNA, 15 bp, Homo sapiens
cttatctggggtcct

SEQ ID NO: 278393 - DNA, 15 bp, Homo sapiens
acttatctggggtcc

SEQ ID NO: 278394 - DNA, 15 bp, Homo sapiens
tacttatctggggtc

SEQ ID NO: 278395 - DNA, 15 bp, Homo sapiens
ttacttatctggggt

SEQ ID NO: 278396 - DNA, 15 bp, Homo sapiens
gttacttatctgggg

SEQ ID NO: 278397 - DNA, 15 bp, Homo sapiens
ggttacttatctggg

SEQ ID NO: 278398 - DNA, 15 bp, Homo sapiens
aggttacttatctgg

SEQ ID NO: 278399 - DNA, 15 bp, Homo sapiens
taggttacttatctg

SEQ ID NO: 278400 - DNA, 15 bp, Homo sapiens
ttaggttacttatct

SEQ ID NO: 278401 - DNA, 15 bp, Homo sapiens
gttaggttacttatc

SEQ ID NO: 278402 - DNA, 15 bp, Homo sapiens
agttaggttacttat

SEQ ID NO: 278403 - DNA, 15 bp, Homo sapiens
aagttaggttactta

SEQ ID NO: 278404 - DNA, 15 bp, Homo sapiens
aaagttaggttactt

SEQ ID NO: 278405 - DNA, 15 bp, Homo sapiens
taaagttaggttact

SEQ ID NO: 278406 - DNA, 15 bp, Homo sapiens
gtaaagttaggttac

SEQ ID NO: 278407 - DNA, 15 bp, Homo sapiens
tgtaaagttaggtta

SEQ ID NO: 278408 - DNA, 15 bp, Homo sapiens
atgtaaagttaggtt

SEQ ID NO: 278409 - DNA, 15 bp, Homo sapiens
gatgtaaagttaggt

SEQ ID NO: 278410 - DNA, 15 bp, Homo sapiens
agatgtaaagttagg

SEQ ID NO: 278411 - DNA, 15 bp, Homo sapiens
gagatgtaaagttag

SEQ ID NO: 278412 - DNA, 15 bp, Homo sapiens
agagatgtaaagtta

SEQ ID NO: 278413 - DNA, 15 bp, Homo sapiens
gagagatgtaaagtt

SEQ ID NO: 278414 - DNA, 15 bp, Homo sapiens
tgagagatgtaaagt

SEQ ID NO: 278415 - DNA, 15 bp, Homo sapiens
ctgagagatgtaaag

SEQ ID NO: 278416 - DNA, 15 bp, Homo sapiens
tctgagagatgtaaa

SEQ ID NO: 278417 - DNA, 15 bp, Homo sapiens
ttctgagagatgtaa

SEQ ID NO: 278418 - DNA, 15 bp, Homo sapiens
gttctgagagatgta

SEQ ID NO: 278419 - DNA, 15 bp, Homo sapiens
agttctgagagatgt

SEQ ID NO: 278420 - DNA, 15 bp, Homo sapiens
tagttctgagagatg

SEQ ID NO: 278421 - DNA, 15 bp, Homo sapiens
ctagttctgagagat

SEQ ID NO: 278422 - DNA, 15 bp, Homo sapiens
cctagttctgagaga

SEQ ID NO: 278423 - DNA, 15 bp, Homo sapiens
acctagttctgagag

SEQ ID NO: 278424 - DNA, 15 bp, Homo sapiens
tacctagttctgaga

SEQ ID NO: 278425 - DNA, 15 bp, Homo sapiens
ctacctagttctgag

SEQ ID NO: 278426 - DNA, 15 bp, Homo sapiens
tctacctagttctga

SEQ ID NO: 278427 - DNA, 15 bp, Homo sapiens
ttctacctagttctg

SEQ ID NO: 278428 - DNA, 15 bp, Homo sapiens
tttctacctagttct

SEQ ID NO: 278429 - DNA, 15 bp, Homo sapiens
ttttctacctagttc

SEQ ID NO: 278430 - DNA, 15 bp, Homo sapiens
tttttctacctagtt

SEQ ID NO: 278431 - DNA, 15 bp, Homo sapiens
ctttttctacctagt

SEQ ID NO: 278432 - DNA, 15 bp, Homo sapiens
tctttttctacctag

SEQ ID NO: 278433 - DNA, 15 bp, Homo sapiens
ttctttttctaccta

SEQ ID NO: 278434 - DNA, 15 bp, Homo sapiens
gttctttttctacct

SEQ ID NO: 278435 - DNA, 15 bp, Homo sapiens
tgttctttttctacc

SEQ ID NO: 278436 - DNA, 15 bp, Homo sapiens
ttgttctttttctac

SEQ ID NO: 278437 - DNA, 15 bp, Homo sapiens
tttgttctttttcta

SEQ ID NO: 278438 - DNA, 15 bp, Homo sapiens
atttgttctttttct

SEQ ID NO: 278439 - DNA, 15 bp, Homo sapiens
tatttgttctttttc

SEQ ID NO: 278440 - DNA, 15 bp, Homo sapiens
ttatttgttcttttt

SEQ ID NO: 278441 - DNA, 15 bp, Homo sapiens
cttatttgttctttt

SEQ ID NO: 278442 - DNA, 15 bp, Homo sapiens
gcttatttgttcttt

SEQ ID NO: 278443 - DNA, 15 bp, Homo sapiens
ggcttatttgttctt

SEQ ID NO: 278444 - DNA, 15 bp, Homo sapiens
gggcttatttgttct

SEQ ID NO: 278445 - DNA, 15 bp, Homo sapiens
tgggcttatttgttc

SEQ ID NO: 278446 - DNA, 15 bp, Homo sapiens
ttgggcttatttgtt

SEQ ID NO: 278447 - DNA, 15 bp, Homo sapiens
tttgggcttatttgt

SEQ ID NO: 278448 - DNA, 15 bp, Homo sapiens
ctttgggcttatttg

SEQ ID NO: 278449 - DNA, 15 bp, Homo sapiens
actttgggcttattt

SEQ ID NO: 278450 - DNA, 15 bp, Homo sapiens
tactttgggcttatt

SEQ ID NO: 278451 - DNA, 15 bp, Homo sapiens
ttactttgggcttat

SEQ ID NO: 278452 - DNA, 15 bp, Homo sapiens
attactttgggctta

SEQ ID NO: 278453 - DNA, 15 bp, Homo sapiens
tattactttgggctt

SEQ ID NO: 278454 - DNA, 15 bp, Homo sapiens
ctattactttgggct

SEQ ID NO: 278455 - DNA, 15 bp, Homo sapiens
tctattactttgggc

SEQ ID NO: 278456 - DNA, 15 bp, Homo sapiens
ttctattactttggg

SEQ ID NO: 278457 - DNA, 15 bp, Homo sapiens
cttctattactttgg

SEQ ID NO: 278458 - DNA, 15 bp, Homo sapiens
ccttctattactttg

SEQ ID NO: 278459 - DNA, 15 bp, Homo sapiens
tccttctattacttt

SEQ ID NO: 278460 - DNA, 15 bp, Homo sapiens
ctccttctattactt

SEQ ID NO: 278461 - DNA, 15 bp, Homo sapiens
cctccttctattact

SEQ ID NO: 278462 - DNA, 15 bp, Homo sapiens
ccctccttctattac

SEQ ID NO: 278463 - DNA, 15 bp, Homo sapiens
cccctccttctatta

SEQ ID NO: 278464 - DNA, 15 bp, Homo sapiens
ccccctccttctatt

SEQ ID NO: 278465 - DNA, 15 bp, Homo sapiens
tccccctccttctat

SEQ ID NO: 278466 - DNA, 15 bp, Homo sapiens
atccccctccttcta

SEQ ID NO: 278467 - DNA, 15 bp, Homo sapiens
tatccccctccttct

SEQ ID NO: 278468 - DNA, 15 bp, Homo sapiens
ttatccccctccttc

SEQ ID NO: 278469 - DNA, 15 bp, Homo sapiens
cttatccccctcctt

SEQ ID NO: 278470 - DNA, 15 bp, Homo sapiens
tcttatccccctcct

SEQ ID NO: 278471 - DNA, 15 bp, Homo sapiens
ttcttatccccctcc

SEQ ID NO: 278472 - DNA, 15 bp, Homo sapiens
tttcttatccccctc

SEQ ID NO: 278473 - DNA, 15 bp, Homo sapiens
ctttcttatccccct

SEQ ID NO: 278474 - DNA, 15 bp, Homo sapiens
tctttcttatccccc

SEQ ID NO: 278475 - DNA, 15 bp, Homo sapiens
atctttcttatcccc

SEQ ID NO: 278476 - DNA, 15 bp, Homo sapiens
gatctttcttatccc

SEQ ID NO: 278477 - DNA, 15 bp, Homo sapiens
tgatctttcttatcc

SEQ ID NO: 278478 - DNA, 15 bp, Homo sapiens
gtgatctttcttatc

SEQ ID NO: 278479 - DNA, 15 bp, Homo sapiens
tgtgatctttcttat

SEQ ID NO: 278480 - DNA, 15 bp, Homo sapiens
ctgtgatctttctta

SEQ ID NO: 278481 - DNA, 15 bp, Homo sapiens
gctgtgatctttctt

SEQ ID NO: 278482 - DNA, 15 bp, Homo sapiens
tgctgtgatctttct

SEQ ID NO: 278483 - DNA, 15 bp, Homo sapiens
ctgctgtgatctttc

SEQ ID NO: 278484 - DNA, 15 bp, Homo sapiens
tctgctgtgatcttt

SEQ ID NO: 278485 - DNA, 15 bp, Homo sapiens
ttctgctgtgatctt

SEQ ID NO: 278486 - DNA, 15 bp, Homo sapiens
tttctgctgtgatct

SEQ ID NO: 278487 - DNA, 15 bp, Homo sapiens
atttctgctgtgatc

SEQ ID NO: 278488 - DNA, 15 bp, Homo sapiens
tatttctgctgtgat

SEQ ID NO: 278489 - DNA, 15 bp, Homo sapiens
ttatttctgctgtga

SEQ ID NO: 278490 - DNA, 15 bp, Homo sapiens
tttatttctgctgtg

SEQ ID NO: 278491 - DNA, 15 bp, Homo sapiens
atttatttctgctgt

SEQ ID NO: 278492 - DNA, 15 bp, Homo sapiens
catttatttctgctg

SEQ ID NO: 278493 - DNA, 15 bp, Homo sapiens
tcatttatttctgct

SEQ ID NO: 278494 - DNA, 15 bp, Homo sapiens
ttcatttatttctgc

SEQ ID NO: 278495 - DNA, 15 bp, Homo sapiens
tttcatttatttctg

SEQ ID NO: 278496 - DNA, 15 bp, Homo sapiens
ctttcatttatttct

SEQ ID NO: 278497 - DNA, 15 bp, Homo sapiens
tctttcatttatttc

SEQ ID NO: 278498 - DNA, 15 bp, Homo sapiens
gtctttcatttattt

SEQ ID NO: 278499 - DNA, 15 bp, Homo sapiens
agtctttcatttatt

SEQ ID NO: 278500 - DNA, 15 bp, Homo sapiens
gagtctttcatttat

SEQ ID NO: 278501 - DNA, 15 bp, Homo sapiens
tgagtctttcattta

SEQ ID NO: 278502 - DNA, 15 bp, Homo sapiens
ttgagtctttcattt

SEQ ID NO: 278503 - DNA, 15 bp, Homo sapiens
tttgagtctttcatt

SEQ ID NO: 278504 - DNA, 15 bp, Homo sapiens
ttttgagtctttcat

SEQ ID NO: 278505 - DNA, 15 bp, Homo sapiens
tttttgagtctttca

SEQ ID NO: 278506 - DNA, 15 bp, Homo sapiens
ttttttgagtctttc

SEQ ID NO: 278507 - DNA, 15 bp, Homo sapiens
gttttttgagtcttt

SEQ ID NO: 278508 - DNA, 15 bp, Homo sapiens
tgttttttgagtctt

SEQ ID NO: 278509 - DNA, 15 bp, Homo sapiens
ttgttttttgagtct

SEQ ID NO: 278510 - DNA, 15 bp, Homo sapiens
attgttttttgagtc

SEQ ID NO: 278511 - DNA, 15 bp, Homo sapiens
tattgttttttgagt

SEQ ID NO: 278512 - DNA, 15 bp, Homo sapiens
ctattgttttttgag

SEQ ID NO: 278513 - DNA, 15 bp, Homo sapiens
tctattgttttttga

SEQ ID NO: 278514 - DNA, 15 bp, Homo sapiens
ttctattgttttttg

SEQ ID NO: 278515 - DNA, 15 bp, Homo sapiens
tttctattgtttttt

SEQ ID NO: 278516 - DNA, 15 bp, Homo sapiens
ttttctattgttttt

SEQ ID NO: 278517 - DNA, 15 bp, Homo sapiens
cttttctattgtttt

SEQ ID NO: 278518 - DNA, 15 bp, Homo sapiens
tcttttctattgttt

SEQ ID NO: 278519 - DNA, 15 bp, Homo sapiens
ctcttttctattgtt

SEQ ID NO: 278520 - DNA, 15 bp, Homo sapiens
gctcttttctattgt

SEQ ID NO: 278521 - DNA, 15 bp, Homo sapiens
tgctcttttctattg

SEQ ID NO: 278522 - DNA, 15 bp, Homo sapiens
ttgctcttttctatt

SEQ ID NO: 278523 - DNA, 15 bp, Homo sapiens
gttgctcttttctat

SEQ ID NO: 278524 - DNA, 15 bp, Homo sapiens
tgttgctcttttcta

SEQ ID NO: 278525 - DNA, 15 bp, Homo sapiens
ttgttgctcttttct

SEQ ID NO: 278526 - DNA, 15 bp, Homo sapiens
tttgttgctcttttc

SEQ ID NO: 278527 - DNA, 15 bp, Homo sapiens
ttttgttgctctttt

SEQ ID NO: 278528 - DNA, 15 bp, Homo sapiens
attttgttgctcttt

SEQ ID NO: 278529 - DNA, 15 bp, Homo sapiens
cattttgttgctctt

SEQ ID NO: 278530 - DNA, 15 bp, Homo sapiens
tcattttgttgctct

SEQ ID NO: 278531 - DNA, 15 bp, Homo sapiens
ttcattttgttgctc

SEQ ID NO: 278532 - DNA, 15 bp, Homo sapiens
cttcattttgttgct

SEQ ID NO: 278533 - DNA, 15 bp, Homo sapiens
tcttcattttgttgc

SEQ ID NO: 278534 - DNA, 15 bp, Homo sapiens
ctcttcattttgttg

SEQ ID NO: 278535 - DNA, 15 bp, Homo sapiens
actcttcattttgtt

SEQ ID NO: 278536 - DNA, 15 bp, Homo sapiens
aactcttcattttgt

SEQ ID NO: 278537 - DNA, 15 bp, Homo sapiens
aaactcttcattttg

SEQ ID NO: 278538 - DNA, 15 bp, Homo sapiens
aaaactcttcatttt

SEQ ID NO: 278539 - DNA, 15 bp, Homo sapiens
aaaaactcttcattt

SEQ ID NO: 278540 - DNA, 15 bp, Homo sapiens
aaaaaactcttcatt

SEQ ID NO: 278541 - DNA, 15 bp, Homo sapiens
aaaaaaactcttcat

SEQ ID NO: 278542 - DNA, 15 bp, Homo sapiens
caaaaaaactcttca

SEQ ID NO: 278543 - DNA, 15 bp, Homo sapiens
tcaaaaaaactcttc

SEQ ID NO: 278544 - DNA, 15 bp, Homo sapiens
ttcaaaaaaactctt

SEQ ID NO: 278545 - DNA, 15 bp, Homo sapiens
tttcaaaaaaactct

SEQ ID NO: 278546 - DNA, 15 bp, Homo sapiens
ttttcaaaaaaactc

SEQ ID NO: 278547 - DNA, 15 bp, Homo sapiens
cttttcaaaaaaact

SEQ ID NO: 278548 - DNA, 15 bp, Homo sapiens
tcttttcaaaaaaac

SEQ ID NO: 278549 - DNA, 15 bp, Homo sapiens
atcttttcaaaaaaa

SEQ ID NO: 278550 - DNA, 15 bp, Homo sapiens
tatcttttcaaaaaa

SEQ ID NO: 278551 - DNA, 15 bp, Homo sapiens
ttatcttttcaaaaa

SEQ ID NO: 278552 - DNA, 15 bp, Homo sapiens
tttatcttttcaaaa

SEQ ID NO: 278553 - DNA, 15 bp, Homo sapiens
gtttatcttttcaaa

SEQ ID NO: 278554 - DNA, 15 bp, Homo sapiens
tgtttatcttttcaa

SEQ ID NO: 278555 - DNA, 15 bp, Homo sapiens
ttgtttatcttttca

SEQ ID NO: 278556 - DNA, 15 bp, Homo sapiens
tttgtttatcttttc

SEQ ID NO: 278557 - DNA, 15 bp, Homo sapiens
ttttgtttatctttt

SEQ ID NO: 278558 - DNA, 15 bp, Homo sapiens
attttgtttatcttt

SEQ ID NO: 278559 - DNA, 15 bp, Homo sapiens
aattttgtttatctt

SEQ ID NO: 278560 - DNA, 15 bp, Homo sapiens
caattttgtttatct

SEQ ID NO: 278561 - DNA, 15 bp, Homo sapiens
tcaattttgtttatc

SEQ ID NO: 278562 - DNA, 15 bp, Homo sapiens
atcaattttgtttat

SEQ ID NO: 278563 - DNA, 15 bp, Homo sapiens
tatcaattttgttta

SEQ ID NO: 278564 - DNA, 15 bp, Homo sapiens
ttatcaattttgttt

SEQ ID NO: 278565 - DNA, 15 bp, Homo sapiens
tttatcaattttgtt

SEQ ID NO: 278566 - DNA, 15 bp, Homo sapiens
gtttatcaattttgt

SEQ ID NO: 278567 - DNA, 15 bp, Homo sapiens
agtttatcaattttg

SEQ ID NO: 278568 - DNA, 15 bp, Homo sapiens
aagtttatcaatttt

SEQ ID NO: 278569 - DNA, 15 bp, Homo sapiens
aaagtttatcaattt

SEQ ID NO: 278570 - DNA, 15 bp, Homo sapiens
aaaagtttatcaatt

SEQ ID NO: 278571 - DNA, 15 bp, Homo sapiens
taaaagtttatcaat

SEQ ID NO: 278572 - DNA, 15 bp, Homo sapiens
ctaaaagtttatcaa

SEQ ID NO: 278573 - DNA, 15 bp, Homo sapiens
gctaaaagtttatca

SEQ ID NO: 278574 - DNA, 15 bp, Homo sapiens
agctaaaagtttatc

SEQ ID NO: 278575 - DNA, 15 bp, Homo sapiens
tagctaaaagtttat

SEQ ID NO: 278576 - DNA, 15 bp, Homo sapiens
ctagctaaaagttta

SEQ ID NO: 278577 - DNA, 15 bp, Homo sapiens
tctagctaaaagttt

SEQ ID NO: 278578 - DNA, 15 bp, Homo sapiens
ttctagctaaaagtt

SEQ ID NO: 278579 - DNA, 15 bp, Homo sapiens
attctagctaaaagt

SEQ ID NO: 278580 - DNA, 15 bp, Homo sapiens
tattctagctaaaag

SEQ ID NO: 278581 - DNA, 15 bp, Homo sapiens
ttattctagctaaaa

SEQ ID NO: 278582 - DNA, 15 bp, Homo sapiens
cttattctagctaaa

SEQ ID NO: 278583 - DNA, 15 bp, Homo sapiens
tcttattctagctaa

SEQ ID NO: 278584 - DNA, 15 bp, Homo sapiens
ttcttattctagcta

SEQ ID NO: 278585 - DNA, 15 bp, Homo sapiens
tttcttattctagct

SEQ ID NO: 278586 - DNA, 15 bp, Homo sapiens
ttttcttattctagc

SEQ ID NO: 278587 - DNA, 15 bp, Homo sapiens
tttttcttattctag

SEQ ID NO: 278588 - DNA, 15 bp, Homo sapiens
ttttttcttattcta

SEQ ID NO: 278589 - DNA, 15 bp, Homo sapiens
tttttttcttattct

SEQ ID NO: 278590 - DNA, 15 bp, Homo sapiens
ctttttttcttattc

SEQ ID NO: 278591 - DNA, 15 bp, Homo sapiens
tctttttttcttatt

SEQ ID NO: 278592 - DNA, 15 bp, Homo sapiens
ttctttttttcttat

SEQ ID NO: 278593 - DNA, 15 bp, Homo sapiens
cttctttttttctta

SEQ ID NO: 278594 - DNA, 15 bp, Homo sapiens
tcttctttttttctt

SEQ ID NO: 278595 - DNA, 15 bp, Homo sapiens
atcttctttttttct

SEQ ID NO: 278596 - DNA, 15 bp, Homo sapiens
aatcttctttttttc

SEQ ID NO: 278597 - DNA, 15 bp, Homo sapiens
gaatcttcttttttt

SEQ ID NO: 278598 - DNA, 15 bp, Homo sapiens
tgaatcttctttttt

SEQ ID NO: 278599 - DNA, 15 bp, Homo sapiens
ttgaatcttcttttt

SEQ ID NO: 278600 - DNA, 15 bp, Homo sapiens
tttgaatcttctttt

SEQ ID NO: 278601 - DNA, 15 bp, Homo sapiens
atttgaatcttcttt

SEQ ID NO: 278602 - DNA, 15 bp, Homo sapiens
tatttgaatcttctt

SEQ ID NO: 278603 - DNA, 15 bp, Homo sapiens
ttatttgaatcttct

SEQ ID NO: 278604 - DNA, 15 bp, Homo sapiens
tttatttgaatcttc

SEQ ID NO: 278605 - DNA, 15 bp, Homo sapiens
atttatttgaatctt

SEQ ID NO: 278606 - DNA, 15 bp, Homo sapiens
tatttatttgaatct

SEQ ID NO: 278607 - DNA, 15 bp, Homo sapiens
ttatttatttgaatc

SEQ ID NO: 278608 - DNA, 15 bp, Homo sapiens
tttatttatttgaat

SEQ ID NO: 278609 - DNA, 15 bp, Homo sapiens
ttttatttatttgaa

SEQ ID NO: 278610 - DNA, 15 bp, Homo sapiens
attttatttatttga

SEQ ID NO: 278611 - DNA, 15 bp, Homo sapiens
gattttatttatttg

SEQ ID NO: 278612 - DNA, 15 bp, Homo sapiens
tgattttatttattt

SEQ ID NO: 278613 - DNA, 15 bp, Homo sapiens
ctgattttatttatt

SEQ ID NO: 278614 - DNA, 15 bp, Homo sapiens
cctgattttatttat

SEQ ID NO: 278615 - DNA, 15 bp, Homo sapiens
tcctgattttattta

SEQ ID NO: 278616 - DNA, 15 bp, Homo sapiens
ttcctgattttattt

SEQ ID NO: 278617 - DNA, 15 bp, Homo sapiens
attcctgattttatt

SEQ ID NO: 278618 - DNA, 15 bp, Homo sapiens
cattcctgattttat

SEQ ID NO: 278619 - DNA, 15 bp, Homo sapiens
tcattcctgatttta

SEQ ID NO: 278620 - DNA, 15 bp, Homo sapiens
ttcattcctgatttt

SEQ ID NO: 278621 - DNA, 15 bp, Homo sapiens
tttcattcctgattt

SEQ ID NO: 278622 - DNA, 15 bp, Homo sapiens
ctttcattcctgatt

SEQ ID NO: 278623 - DNA, 15 bp, Homo sapiens
tctttcattcctgat

SEQ ID NO: 278624 - DNA, 15 bp, Homo sapiens
ctctttcattcctga

SEQ ID NO: 278625 - DNA, 15 bp, Homo sapiens
cctctttcattcctg

SEQ ID NO: 278626 - DNA, 15 bp, Homo sapiens
tcctctttcattcct

SEQ ID NO: 278627 - DNA, 15 bp, Homo sapiens
ctcctctttcattcc

SEQ ID NO: 278628 - DNA, 15 bp, Homo sapiens
tctcctctttcattc

SEQ ID NO: 278629 - DNA, 15 bp, Homo sapiens
gtctcctctttcatt

SEQ ID NO: 278630 - DNA, 15 bp, Homo sapiens
tgtctcctctttcat

SEQ ID NO: 278631 - DNA, 15 bp, Homo sapiens
atgtctcctctttca

SEQ ID NO: 278632 - DNA, 15 bp, Homo sapiens
aatgtctcctctttc

SEQ ID NO: 278633 - DNA, 15 bp, Homo sapiens
taatgtctcctcttt

SEQ ID NO: 278634 - DNA, 15 bp, Homo sapiens
ataatgtctcctctt

SEQ ID NO: 278635 - DNA, 15 bp, Homo sapiens
cataatgtctcctct

SEQ ID NO: 278636 - DNA, 15 bp, Homo sapiens
tcataatgtctcctc

SEQ ID NO: 278637 - DNA, 15 bp, Homo sapiens
gtcataatgtctcct

SEQ ID NO: 278638 - DNA, 15 bp, Homo sapiens
agtcataatgtctcc

SEQ ID NO: 278639 - DNA, 15 bp, Homo sapiens
cagtcataatgtctc

SEQ ID NO: 278640 - DNA, 15 bp, Homo sapiens
tcagtcataatgtct

SEQ ID NO: 278641 - DNA, 15 bp, Homo sapiens
atcagtcataatgtc

SEQ ID NO: 278642 - DNA, 15 bp, Homo sapiens
tatcagtcataatgt

SEQ ID NO: 278643 - DNA, 15 bp, Homo sapiens
atatcagtcataatg

SEQ ID NO: 278644 - DNA, 15 bp, Homo sapiens
gatatcagtcataat

SEQ ID NO: 278645 - DNA, 15 bp, Homo sapiens
tgatatcagtcataa

SEQ ID NO: 278646 - DNA, 15 bp, Homo sapiens
gtgatatcagtcata

SEQ ID NO: 278647 - DNA, 15 bp, Homo sapiens
tgtgatatcagtcat

SEQ ID NO: 278648 - DNA, 15 bp, Homo sapiens
ctgtgatatcagtca

SEQ ID NO: 278649 - DNA, 15 bp, Homo sapiens
tctgtgatatcagtc

SEQ ID NO: 278650 - DNA, 15 bp, Homo sapiens
ttctgtgatatcagt

SEQ ID NO: 278651 - DNA, 15 bp, Homo sapiens
tttctgtgatatcag

SEQ ID NO: 278652 - DNA, 15 bp, Homo sapiens
atttctgtgatatca

SEQ ID NO: 278653 - DNA, 15 bp, Homo sapiens
tatttctgtgatatc

SEQ ID NO: 278654 - DNA, 15 bp, Homo sapiens
gtatttctgtgatat

SEQ ID NO: 278655 - DNA, 15 bp, Homo sapiens
tgtatttctgtgata

SEQ ID NO: 278656 - DNA, 15 bp, Homo sapiens
ttgtatttctgtgat

SEQ ID NO: 278657 - DNA, 15 bp, Homo sapiens
tttgtatttctgtga

SEQ ID NO: 278658 - DNA, 15 bp, Homo sapiens
ctttgtatttctgtg

SEQ ID NO: 278659 - DNA, 15 bp, Homo sapiens
tctttgtatttctgt

SEQ ID NO: 278660 - DNA, 15 bp, Homo sapiens
ttctttgtatttctg

SEQ ID NO: 278661 - DNA, 15 bp, Homo sapiens
attctttgtatttct

SEQ ID NO: 278662 - DNA, 15 bp, Homo sapiens
gattctttgtatttc

SEQ ID NO: 278663 - DNA, 15 bp, Homo sapiens
ggattctttgtattt

SEQ ID NO: 278664 - DNA, 15 bp, Homo sapiens
aggattctttgtatt

SEQ ID NO: 278665 - DNA, 15 bp, Homo sapiens
caggattctttgtat

SEQ ID NO: 278666 - DNA, 15 bp, Homo sapiens
tcaggattctttgta

SEQ ID NO: 278667 - DNA, 15 bp, Homo sapiens
ctcaggattctttgt

SEQ ID NO: 278668 - DNA, 15 bp, Homo sapiens
tctcaggattctttg

SEQ ID NO: 278669 - DNA, 15 bp, Homo sapiens
ttctcaggattcttt

SEQ ID NO: 278670 - DNA, 15 bp, Homo sapiens
attctcaggattctt

SEQ ID NO: 278671 - DNA, 15 bp, Homo sapiens
tattctcaggattct

SEQ ID NO: 278672 - DNA, 15 bp, Homo sapiens
gtattctcaggattc

SEQ ID NO: 278673 - DNA, 15 bp, Homo sapiens
agtattctcaggatt

SEQ ID NO: 278674 - DNA, 15 bp, Homo sapiens
aagtattctcaggat

SEQ ID NO: 278675 - DNA, 15 bp, Homo sapiens
aaagtattctcagga

SEQ ID NO: 278676 - DNA, 15 bp, Homo sapiens
caaagtattctcagg

SEQ ID NO: 278677 - DNA, 15 bp, Homo sapiens
tcaaagtattctcag

SEQ ID NO: 278678 - DNA, 15 bp, Homo sapiens
ttcaaagtattctca

SEQ ID NO: 278679 - DNA, 15 bp, Homo sapiens
gttcaaagtattctc

SEQ ID NO: 278680 - DNA, 15 bp, Homo sapiens
tgttcaaagtattct

SEQ ID NO: 278681 - DNA, 15 bp, Homo sapiens
ttgttcaaagtattc

SEQ ID NO: 278682 - DNA, 15 bp, Homo sapiens
tttgttcaaagtatt

SEQ ID NO: 278683 - DNA, 15 bp, Homo sapiens
atttgttcaaagtat

SEQ ID NO: 278684 - DNA, 15 bp, Homo sapiens
aatttgttcaaagta

SEQ ID NO: 278685 - DNA, 15 bp, Homo sapiens
taatttgttcaaagt

SEQ ID NO: 278686 - DNA, 15 bp, Homo sapiens
ataatttgttcaaag

SEQ ID NO: 278687 - DNA, 15 bp, Homo sapiens
tataatttgttcaaa

SEQ ID NO: 278688 - DNA, 15 bp, Homo sapiens
atataatttgttcaa

SEQ ID NO: 278689 - DNA, 15 bp, Homo sapiens
tatataatttgttca

SEQ ID NO: 278690 - DNA, 15 bp, Homo sapiens
gtatataatttgttc

SEQ ID NO: 278691 - DNA, 15 bp, Homo sapiens
agtatataatttgtt

SEQ ID NO: 278692 - DNA, 15 bp, Homo sapiens
tagtatataatttgt

SEQ ID NO: 278693 - DNA, 15 bp, Homo sapiens
ttagtatataatttg

SEQ ID NO: 278694 - DNA, 15 bp, Homo sapiens
gttagtatataattt

SEQ ID NO: 278695 - DNA, 15 bp, Homo sapiens
tgttagtatataatt

SEQ ID NO: 278696 - DNA, 15 bp, Homo sapiens
ttgttagtatataat

SEQ ID NO: 278697 - DNA, 15 bp, Homo sapiens
tttgttagtatataa

SEQ ID NO: 278698 - DNA, 15 bp, Homo sapiens
atttgttagtatata

SEQ ID NO: 278699 - DNA, 15 bp, Homo sapiens
aatttgttagtatat

SEQ ID NO: 278700 - DNA, 15 bp, Homo sapiens
caatttgttagtata

SEQ ID NO: 278701 - DNA, 15 bp, Homo sapiens
ccaatttgttagtat

SEQ ID NO: 278702 - DNA, 15 bp, Homo sapiens
tccaatttgttagta

SEQ ID NO: 278703 - DNA, 15 bp, Homo sapiens
atccaatttgttagt

SEQ ID NO: 278704 - DNA, 15 bp, Homo sapiens
catccaatttgttag

SEQ ID NO: 278705 - DNA, 15 bp, Homo sapiens
tcatccaatttgtta

SEQ ID NO: 278706 - DNA, 15 bp, Homo sapiens
gtcatccaatttgtt

SEQ ID NO: 278707 - DNA, 15 bp, Homo sapiens
ggtcatccaatttgt

SEQ ID NO: 278708 - DNA, 15 bp, Homo sapiens
aggtcatccaatttg

SEQ ID NO: 278709 - DNA, 15 bp, Homo sapiens
caggtcatccaattt

SEQ ID NO: 278710 - DNA, 15 bp, Homo sapiens
tcaggtcatccaatt

SEQ ID NO: 278711 - DNA, 15 bp, Homo sapiens
ttcaggtcatccaat

SEQ ID NO: 278712 - DNA, 15 bp, Homo sapiens
tttcaggtcatccaa

SEQ ID NO: 278713 - DNA, 15 bp, Homo sapiens
ctttcaggtcatcca

SEQ ID NO: 278714 - DNA, 15 bp, Homo sapiens
tctttcaggtcatcc

SEQ ID NO: 278715 - DNA, 15 bp, Homo sapiens
ctctttcaggtcatc

SEQ ID NO: 278716 - DNA, 15 bp, Homo sapiens
tctctttcaggtcat

SEQ ID NO: 278717 - DNA, 15 bp, Homo sapiens
gtctctttcaggtca

SEQ ID NO: 278718 - DNA, 15 bp, Homo sapiens
tgtctctttcaggtc

SEQ ID NO: 278719 - DNA, 15 bp, Homo sapiens
ctgtctctttcaggt

SEQ ID NO: 278720 - DNA, 15 bp, Homo sapiens
tctgtctctttcagg

SEQ ID NO: 278721 - DNA, 15 bp, Homo sapiens
atctgtctctttcag

SEQ ID NO: 278722 - DNA, 15 bp, Homo sapiens
aatctgtctctttca

SEQ ID NO: 278723 - DNA, 15 bp, Homo sapiens
caatctgtctctttc

SEQ ID NO: 278724 - DNA, 15 bp, Homo sapiens
acaatctgtctcttt

SEQ ID NO: 278725 - DNA, 15 bp, Homo sapiens
aacaatctgtctctt

SEQ ID NO: 278726 - DNA, 15 bp, Homo sapiens
aaacaatctgtctct

SEQ ID NO: 278727 - DNA, 15 bp, Homo sapiens
caaacaatctgtctc

SEQ ID NO: 278728 - DNA, 15 bp, Homo sapiens
gcaaacaatctgtct

SEQ ID NO: 278729 - DNA, 15 bp, Homo sapiens
ggcaaacaatctgtc

SEQ ID NO: 278730 - DNA, 15 bp, Homo sapiens
tggcaaacaatctgt

SEQ ID NO: 278731 - DNA, 15 bp, Homo sapiens
gtggcaaacaatctg

SEQ ID NO: 278732 - DNA, 15 bp, Homo sapiens
tgtggcaaacaatct

SEQ ID NO: 278733 - DNA, 15 bp, Homo sapiens
atgtggcaaacaatc

SEQ ID NO: 278734 - DNA, 15 bp, Homo sapiens
tatgtggcaaacaat

SEQ ID NO: 278735 - DNA, 15 bp, Homo sapiens
gtatgtggcaaacaa

SEQ ID NO: 278736 - DNA, 15 bp, Homo sapiens
agtatgtggcaaaca

SEQ ID NO: 278737 - DNA, 15 bp, Homo sapiens
tagtatgtggcaaac

SEQ ID NO: 278738 - DNA, 15 bp, Homo sapiens
gtagtatgtggcaaa

SEQ ID NO: 278739 - DNA, 15 bp, Homo sapiens
gatgatcaaacttct

SEQ ID NO: 278740 - DNA, 15 bp, Homo sapiens
agatgatcaaacttc

SEQ ID NO: 278741 - DNA, 15 bp, Homo sapiens
cagatgatcaaactt

SEQ ID NO: 278742 - DNA, 15 bp, Homo sapiens
tcagatgatcaaact

SEQ ID NO: 278743 - DNA, 15 bp, Homo sapiens
ttcagatgatcaaac

SEQ ID NO: 278744 - DNA, 15 bp, Homo sapiens
cttcagatgatcaaa

SEQ ID NO: 278745 - DNA, 15 bp, Homo sapiens
gcttcagatgatcaa

SEQ ID NO: 278746 - DNA, 15 bp, Homo sapiens
ggcttcagatgatca

SEQ ID NO: 278747 - DNA, 15 bp, Homo sapiens
aggcttcagatgatc

SEQ ID NO: 278748 - DNA, 15 bp, Homo sapiens
aaggcttcagatgat

SEQ ID NO: 278749 - DNA, 15 bp, Homo sapiens
gaaggcttcagatga

SEQ ID NO: 278750 - DNA, 15 bp, Homo sapiens
agaaggcttcagatg

SEQ ID NO: 278751 - DNA, 15 bp, Homo sapiens
aagaaggcttcagat

SEQ ID NO: 278752 - DNA, 15 bp, Homo sapiens
gaagaaggcttcaga

SEQ ID NO: 278753 - DNA, 15 bp, Homo sapiens
agaagaaggcttcag

SEQ ID NO: 278754 - DNA, 15 bp, Homo sapiens
aagaagaaggcttca

SEQ ID NO: 278755 - DNA, 15 bp, Homo sapiens
aaagaagaaggcttc

SEQ ID NO: 278756 - DNA, 15 bp, Homo sapiens
gaaagaagaaggctt

SEQ ID NO: 278757 - DNA, 15 bp, Homo sapiens
tgaaagaagaaggct

SEQ ID NO: 278758 - DNA, 15 bp, Homo sapiens
ttgaaagaagaaggc

SEQ ID NO: 278759 - DNA, 15 bp, Homo sapiens
tttgaaagaagaagg

SEQ ID NO: 278760 - DNA, 15 bp, Homo sapiens
atttgaaagaagaag

SEQ ID NO: 278761 - DNA, 15 bp, Homo sapiens
gatttgaaagaagaa

SEQ ID NO: 278762 - DNA, 15 bp, Homo sapiens
cgatttgaaagaaga

SEQ ID NO: 278763 - DNA, 15 bp, Homo sapiens
acgatttgaaagaag

SEQ ID NO: 278764 - DNA, 15 bp, Homo sapiens
gacgatttgaaagaa

SEQ ID NO: 278765 - DNA, 15 bp, Homo sapiens
tgacgatttgaaaga

SEQ ID NO: 278766 - DNA, 15 bp, Homo sapiens
ttgacgatttgaaag

SEQ ID NO: 278767 - DNA, 15 bp, Homo sapiens
tttgacgatttgaaa

SEQ ID NO: 278768 - DNA, 15 bp, Homo sapiens
ctttgacgatttgaa

SEQ ID NO: 278769 - DNA, 15 bp, Homo sapiens
actttgacgatttga

SEQ ID NO: 278770 - DNA, 15 bp, Homo sapiens
gactttgacgatttg

SEQ ID NO: 278771 - DNA, 15 bp, Homo sapiens
tgactttgacgattt

SEQ ID NO: 278772 - DNA, 15 bp, Homo sapiens
atgactttgacgatt

SEQ ID NO: 278773 - DNA, 15 bp, Homo sapiens
aatgactttgacgat

SEQ ID NO: 278774 - DNA, 15 bp, Homo sapiens
gaatgactttgacga

SEQ ID NO: 278775 - DNA, 15 bp, Homo sapiens
agaatgactttgacg

SEQ ID NO: 278776 - DNA, 15 bp, Homo sapiens
gagaatgactttgac

SEQ ID NO: 278777 - DNA, 15 bp, Homo sapiens
ggagaatgactttga

SEQ ID NO: 278778 - DNA, 15 bp, Homo sapiens
tggagaatgactttg

SEQ ID NO: 278779 - DNA, 15 bp, Homo sapiens
atggagaatgacttt

SEQ ID NO: 278780 - DNA, 15 bp, Homo sapiens
gatggagaatgactt

SEQ ID NO: 278781 - DNA, 15 bp, Homo sapiens
ggatggagaatgact

SEQ ID NO: 278782 - DNA, 15 bp, Homo sapiens
tggatggagaatgac

SEQ ID NO: 278783 - DNA, 15 bp, Homo sapiens
ctggatggagaatga

SEQ ID NO: 278784 - DNA, 15 bp, Homo sapiens
gctggatggagaatg

SEQ ID NO: 278785 - DNA, 15 bp, Homo sapiens
agctggatggagaat

SEQ ID NO: 278786 - DNA, 15 bp, Homo sapiens
aagctggatggagaa

SEQ ID NO: 278787 - DNA, 15 bp, Homo sapiens
aaagctggatggaga

SEQ ID NO: 278788 - DNA, 15 bp, Homo sapiens
caaagctggatggag

SEQ ID NO: 278789 - DNA, 15 bp, Homo sapiens
acaaagctggatgga

SEQ ID NO: 278790 - DNA, 15 bp, Homo sapiens
aacaaagctggatgg

SEQ ID NO: 278791 - DNA, 15 bp, Homo sapiens
gaacaaagctggatg

SEQ ID NO: 278792 - DNA, 15 bp, Homo sapiens
ggaacaaagctggat

SEQ ID NO: 278793 - DNA, 15 bp, Homo sapiens
cggaacaaagctgga

SEQ ID NO: 278794 - DNA, 15 bp, Homo sapiens
acggaacaaagctgg

SEQ ID NO: 278795 - DNA, 15 bp, Homo sapiens
aacggaacaaagctg

SEQ ID NO: 278796 - DNA, 15 bp, Homo sapiens
caacggaacaaagct

SEQ ID NO: 278797 - DNA, 15 bp, Homo sapiens
gcaacggaacaaagc

SEQ ID NO: 278798 - DNA, 15 bp, Homo sapiens
agcaacggaacaaag

SEQ ID NO: 278799 - DNA, 15 bp, Homo sapiens
tagcaacggaacaaa

SEQ ID NO: 278800 - DNA, 15 bp, Homo sapiens
ctagcaacggaacaa

SEQ ID NO: 278801 - DNA, 15 bp, Homo sapiens
gctagcaacggaaca

SEQ ID NO: 278802 - DNA, 15 bp, Homo sapiens
cgctagcaacggaac

SEQ ID NO: 278803 - DNA, 15 bp, Homo sapiens
tcgctagcaacggaa

SEQ ID NO: 278804 - DNA, 15 bp, Homo sapiens
ctcgctagcaacgga

SEQ ID NO: 278805 - DNA, 15 bp, Homo sapiens
cctcgctagcaacgg

SEQ ID NO: 278806 - DNA, 15 bp, Homo sapiens
tcctcgctagcaacg

SEQ ID NO: 278807 - DNA, 15 bp, Homo sapiens
ctcctcgctagcaac

SEQ ID NO: 278808 - DNA, 15 bp, Homo sapiens
gctcctcgctagcaa

SEQ ID NO: 278809 - DNA, 15 bp, Homo sapiens
agctcctcgctagca

SEQ ID NO: 278810 - DNA, 15 bp, Homo sapiens
cagctcctcgctagc

SEQ ID NO: 278811 - DNA, 15 bp, Homo sapiens
gcagctcctcgctag

SEQ ID NO: 278812 - DNA, 15 bp, Homo sapiens
cgcagctcctcgcta

SEQ ID NO: 278813 - DNA, 15 bp, Homo sapiens
acgcagctcctcgct

SEQ ID NO: 278814 - DNA, 15 bp, Homo sapiens
aacgcagctcctcgc

SEQ ID NO: 278815 - DNA, 15 bp, Homo sapiens
gaacgcagctcctcg

SEQ ID NO: 278816 - DNA, 15 bp, Homo sapiens
ggaacgcagctcctc

SEQ ID NO: 278817 - DNA, 15 bp, Homo sapiens
aggaacgcagctcct

SEQ ID NO: 278818 - DNA, 15 bp, Homo sapiens
aaggaacgcagctcc

SEQ ID NO: 278819 - DNA, 15 bp, Homo sapiens
aaaggaacgcagctc

SEQ ID NO: 278820 - DNA, 15 bp, Homo sapiens
caaaggaacgcagct

SEQ ID NO: 278821 - DNA, 15 bp, Homo sapiens
ccaaaggaacgcagc

SEQ ID NO: 278822 - DNA, 15 bp, Homo sapiens
tccaaaggaacgcag

SEQ ID NO: 278823 - DNA, 15 bp, Homo sapiens
ctccaaaggaacgca

SEQ ID NO: 278824 - DNA, 15 bp, Homo sapiens
cctccaaaggaacgc

SEQ ID NO: 278825 - DNA, 15 bp, Homo sapiens
ccctccaaaggaacg

SEQ ID NO: 278826 - DNA, 15 bp, Homo sapiens
cccctccaaaggaac

SEQ ID NO: 278827 - DNA, 15 bp, Homo sapiens
ccccctccaaaggaa

SEQ ID NO: 278828 - DNA, 15 bp, Homo sapiens
tccccctccaaagga

SEQ ID NO: 278829 - DNA, 15 bp, Homo sapiens
ctccccctccaaagg

SEQ ID NO: 278830 - DNA, 15 bp, Homo sapiens
tctccccctccaaag

SEQ ID NO: 278831 - DNA, 15 bp, Homo sapiens
ctctccccctccaaa

SEQ ID NO: 278832 - DNA, 15 bp, Homo sapiens
cctctccccctccaa

SEQ ID NO: 278833 - DNA, 15 bp, Homo sapiens
gcctctccccctcca

SEQ ID NO: 278834 - DNA, 15 bp, Homo sapiens
tgcctctccccctcc

SEQ ID NO: 278835 - DNA, 15 bp, Homo sapiens
gtgcctctccccctc

SEQ ID NO: 278836 - DNA, 15 bp, Homo sapiens
agtgcctctccccct

SEQ ID NO: 278837 - DNA, 15 bp, Homo sapiens
gagtgcctctccccc

SEQ ID NO: 278838 - DNA, 15 bp, Homo sapiens
agagtgcctctcccc

SEQ ID NO: 278839 - DNA, 15 bp, Homo sapiens
cagagtgcctctccc

SEQ ID NO: 278840 - DNA, 15 bp, Homo sapiens
tcagagtgcctctcc

SEQ ID NO: 278841 - DNA, 15 bp, Homo sapiens
atcagagtgcctctc

SEQ ID NO: 278842 - DNA, 15 bp, Homo sapiens
aatcagagtgcctct

SEQ ID NO: 278843 - DNA, 15 bp, Homo sapiens
aaatcagagtgcctc

SEQ ID NO: 278844 - DNA, 15 bp, Homo sapiens
aaaatcagagtgcct

SEQ ID NO: 278845 - DNA, 15 bp, Homo sapiens
aaaaatcagagtgcc

SEQ ID NO: 278846 - DNA, 15 bp, Homo sapiens
taaaaatcagagtgc

SEQ ID NO: 278847 - DNA, 15 bp, Homo sapiens
ctaaaaatcagagtg

SEQ ID NO: 278848 - DNA, 15 bp, Homo sapiens
tctaaaaatcagagt

SEQ ID NO: 278849 - DNA, 15 bp, Homo sapiens
ttctaaaaatcagag

SEQ ID NO: 278850 - DNA, 15 bp, Homo sapiens
attctaaaaatcaga

SEQ ID NO: 278851 - DNA, 15 bp, Homo sapiens
aattctaaaaatcag

SEQ ID NO: 278852 - DNA, 15 bp, Homo sapiens
aaattctaaaaatca

SEQ ID NO: 278853 - DNA, 15 bp, Homo sapiens
aaaattctaaaaatc

SEQ ID NO: 278854 - DNA, 15 bp, Homo sapiens
gaaaattctaaaaat

SEQ ID NO: 278855 - DNA, 15 bp, Homo sapiens
tgaaaattctaaaaa

SEQ ID NO: 278856 - DNA, 15 bp, Homo sapiens
ctgaaaattctaaaa

SEQ ID NO: 278857 - DNA, 15 bp, Homo sapiens
gctgaaaattctaaa

SEQ ID NO: 278858 - DNA, 15 bp, Homo sapiens
agctgaaaattctaa

SEQ ID NO: 278859 - DNA, 15 bp, Homo sapiens
aagctgaaaattcta

SEQ ID NO: 278860 - DNA, 15 bp, Homo sapiens
aaagctgaaaattct

SEQ ID NO: 278861 - DNA, 15 bp, Homo sapiens
aaaagctgaaaattc

SEQ ID NO: 278862 - DNA, 15 bp, Homo sapiens
gaaaagctgaaaatt

SEQ ID NO: 278863 - DNA, 15 bp, Homo sapiens
agaaaagctgaaaat

SEQ ID NO: 278864 - DNA, 15 bp, Homo sapiens
cagaaaagctgaaaa

SEQ ID NO: 278865 - DNA, 15 bp, Homo sapiens
gcagaaaagctgaaa

SEQ ID NO: 278866 - DNA, 15 bp, Homo sapiens
agcagaaaagctgaa

SEQ ID NO: 278867 - DNA, 15 bp, Homo sapiens
cagcagaaaagctga

SEQ ID NO: 278868 - DNA, 15 bp, Homo sapiens
acagcagaaaagctg

SEQ ID NO: 278869 - DNA, 15 bp, Homo sapiens
aacagcagaaaagct

SEQ ID NO: 278870 - DNA, 15 bp, Homo sapiens
aaacagcagaaaagc

SEQ ID NO: 278871 - DNA, 15 bp, Homo sapiens
aaaacagcagaaaag

SEQ ID NO: 278872 - DNA, 15 bp, Homo sapiens
aaaaacagcagaaaa

SEQ ID NO: 278873 - DNA, 15 bp, Homo sapiens
aaaaaacagcagaaa

SEQ ID NO: 278874 - DNA, 15 bp, Homo sapiens
gaaaaaacagcagaa

SEQ ID NO: 278875 - DNA, 15 bp, Homo sapiens
ggaaaaaacagcaga

SEQ ID NO: 278876 - DNA, 15 bp, Homo sapiens
gggaaaaaacagcag

SEQ ID NO: 278877 - DNA, 15 bp, Homo sapiens
ggggaaaaaacagca

SEQ ID NO: 278878 - DNA, 15 bp, Homo sapiens
tggggaaaaaacagc

SEQ ID NO: 278879 - DNA, 15 bp, Homo sapiens
atggggaaaaaacag

SEQ ID NO: 278880 - DNA, 15 bp, Homo sapiens
gatggggaaaaaaca

SEQ ID NO: 278881 - DNA, 15 bp, Homo sapiens
agatggggaaaaaac

SEQ ID NO: 278882 - DNA, 15 bp, Homo sapiens
aagatggggaaaaaa

SEQ ID NO: 278883 - DNA, 15 bp, Homo sapiens
aaagatggggaaaaa

SEQ ID NO: 278884 - DNA, 15 bp, Homo sapiens
caaagatggggaaaa

SEQ ID NO: 278885 - DNA, 15 bp, Homo sapiens
acaaagatggggaaa

SEQ ID NO: 278886 - DNA, 15 bp, Homo sapiens
cacaaagatggggaa

SEQ ID NO: 278887 - DNA, 15 bp, Homo sapiens
ccacaaagatgggga

SEQ ID NO: 278888 - DNA, 15 bp, Homo sapiens
accacaaagatgggg

SEQ ID NO: 278889 - DNA, 15 bp, Homo sapiens
aaccacaaagatggg

SEQ ID NO: 278890 - DNA, 15 bp, Homo sapiens
aaaccacaaagatgg

SEQ ID NO: 278891 - DNA, 15 bp, Homo sapiens
aaaaccacaaagatg

SEQ ID NO: 278892 - DNA, 15 bp, Homo sapiens
taaaaccacaaagat

SEQ ID NO: 278893 - DNA, 15 bp, Homo sapiens
ataaaaccacaaaga

SEQ ID NO: 278894 - DNA, 15 bp, Homo sapiens
gataaaaccacaaag

SEQ ID NO: 278895 - DNA, 15 bp, Homo sapiens
agataaaaccacaaa

SEQ ID NO: 278896 - DNA, 15 bp, Homo sapiens
tagataaaaccacaa

SEQ ID NO: 278897 - DNA, 15 bp, Homo sapiens
gtagataaaaccaca

SEQ ID NO: 278898 - DNA, 15 bp, Homo sapiens
ggtagataaaaccac

SEQ ID NO: 278899 - DNA, 15 bp, Homo sapiens
aggtagataaaacca

SEQ ID NO: 278900 - DNA, 15 bp, Homo sapiens
aaggtagataaaacc

SEQ ID NO: 278901 - DNA, 15 bp, Homo sapiens
aaaggtagataaaac

SEQ ID NO: 278902 - DNA, 15 bp, Homo sapiens
caaaggtagataaaa

SEQ ID NO: 278903 - DNA, 15 bp, Homo sapiens
ccaaaggtagataaa

SEQ ID NO: 278904 - DNA, 15 bp, Homo sapiens
accaaaggtagataa

SEQ ID NO: 278905 - DNA, 15 bp, Homo sapiens
gaccaaaggtagata

SEQ ID NO: 278906 - DNA, 15 bp, Homo sapiens
agaccaaaggtagat

SEQ ID NO: 278907 - DNA, 15 bp, Homo sapiens
aagaccaaaggtaga

SEQ ID NO: 278908 - DNA, 15 bp, Homo sapiens
aaagaccaaaggtag

SEQ ID NO: 278909 - DNA, 15 bp, Homo sapiens
caaagaccaaaggta

SEQ ID NO: 278910 - DNA, 15 bp, Homo sapiens
tcaaagaccaaaggt

SEQ ID NO: 278911 - DNA, 15 bp, Homo sapiens
atcaaagaccaaagg

SEQ ID NO: 278912 - DNA, 15 bp, Homo sapiens
catcaaagaccaaag

SEQ ID NO: 278913 - DNA, 15 bp, Homo sapiens
tcatcaaagaccaaa

SEQ ID NO: 278914 - DNA, 15 bp, Homo sapiens
atcatcaaagaccaa

SEQ ID NO: 278915 - DNA, 15 bp, Homo sapiens
catcatcaaagacca

SEQ ID NO: 278916 - DNA, 15 bp, Homo sapiens
ccatcatcaaagacc

SEQ ID NO: 278917 - DNA, 15 bp, Homo sapiens
accatcatcaaagac

SEQ ID NO: 278918 - DNA, 15 bp, Homo sapiens
caccatcatcaaaga

SEQ ID NO: 278919 - DNA, 15 bp, Homo sapiens
tcaccatcatcaaag

SEQ ID NO: 278920 - DNA, 15 bp, Homo sapiens
gtcaccatcatcaaa

SEQ ID NO: 278921 - DNA, 15 bp, Homo sapiens
cgtcaccatcatcaa

SEQ ID NO: 278922 - DNA, 15 bp, Homo sapiens
acgtcaccatcatca

SEQ ID NO: 278923 - DNA, 15 bp, Homo sapiens
tacgtcaccatcatc

SEQ ID NO: 278924 - DNA, 15 bp, Homo sapiens
gtacgtcaccatcat

SEQ ID NO: 278925 - DNA, 15 bp, Homo sapiens
tgtacgtcaccatca

SEQ ID NO: 278926 - DNA, 15 bp, Homo sapiens
ctgtacgtcaccatc

SEQ ID NO: 278927 - DNA, 15 bp, Homo sapiens
tctgtacgtcaccat

SEQ ID NO: 278928 - DNA, 15 bp, Homo sapiens
atctgtacgtcacca

SEQ ID NO: 278929 - DNA, 15 bp, Homo sapiens
catctgtacgtcacc

SEQ ID NO: 278930 - DNA, 15 bp, Homo sapiens
ccatctgtacgtcac

SEQ ID NO: 278931 - DNA, 15 bp, Homo sapiens
cccatctgtacgtca

SEQ ID NO: 278932 - DNA, 15 bp, Homo sapiens
ccccatctgtacgtc

SEQ ID NO: 278933 - DNA, 15 bp, Homo sapiens
cccccatctgtacgt

SEQ ID NO: 278934 - DNA, 15 bp, Homo sapiens
acccccatctgtacg

SEQ ID NO: 278935 - DNA, 15 bp, Homo sapiens
tacccccatctgtac

SEQ ID NO: 278936 - DNA, 15 bp, Homo sapiens
atacccccatctgta

SEQ ID NO: 278937 - DNA, 15 bp, Homo sapiens
catacccccatctgt

SEQ ID NO: 278938 - DNA, 15 bp, Homo sapiens
ccatacccccatctg

SEQ ID NO: 278939 - DNA, 15 bp, Homo sapiens
accatacccccatct

SEQ ID NO: 278940 - DNA, 15 bp, Homo sapiens
caccatacccccatc

SEQ ID NO: 278941 - DNA, 15 bp, Homo sapiens
acaccatacccccat

SEQ ID NO: 278942 - DNA, 15 bp, Homo sapiens
cacaccataccccca

SEQ ID NO: 278943 - DNA, 15 bp, Homo sapiens
ccacaccataccccc

SEQ ID NO: 278944 - DNA, 15 bp, Homo sapiens
tccacaccatacccc

SEQ ID NO: 278945 - DNA, 15 bp, Homo sapiens
atccacaccataccc

SEQ ID NO: 278946 - DNA, 15 bp, Homo sapiens
catccacaccatacc

SEQ ID NO: 278947 - DNA, 15 bp, Homo sapiens
acatccacaccatac

SEQ ID NO: 278948 - DNA, 15 bp, Homo sapiens
gacatccacaccata

SEQ ID NO: 278949 - DNA, 15 bp, Homo sapiens
cgacatccacaccat

SEQ ID NO: 278950 - DNA, 15 bp, Homo sapiens
acgacatccacacca

SEQ ID NO: 278951 - DNA, 15 bp, Homo sapiens
aacgacatccacacc

SEQ ID NO: 278952 - DNA, 15 bp, Homo sapiens
aaacgacatccacac

SEQ ID NO: 278953 - DNA, 15 bp, Homo sapiens
gaaacgacatccaca

SEQ ID NO: 278954 - DNA, 15 bp, Homo sapiens
agaaacgacatccac

SEQ ID NO: 278955 - DNA, 15 bp, Homo sapiens
cagaaacgacatcca

SEQ ID NO: 278956 - DNA, 15 bp, Homo sapiens
acagaaacgacatcc

SEQ ID NO: 278957 - DNA, 15 bp, Homo sapiens
aacagaaacgacatc

SEQ ID NO: 278958 - DNA, 15 bp, Homo sapiens
aaacagaaacgacat

SEQ ID NO: 278959 - DNA, 15 bp, Homo sapiens
caaacagaaacgaca

SEQ ID NO: 278960 - DNA, 15 bp, Homo sapiens
acaaacagaaacgac

SEQ ID NO: 278961 - DNA, 15 bp, Homo sapiens
aacaaacagaaacga

SEQ ID NO: 278962 - DNA, 15 bp, Homo sapiens
taacaaacagaaacg

SEQ ID NO: 278963 - DNA, 15 bp, Homo sapiens
ctaacaaacagaaac

SEQ ID NO: 278964 - DNA, 15 bp, Homo sapiens
actaacaaacagaaa

SEQ ID NO: 278965 - DNA, 15 bp, Homo sapiens
aactaacaaacagaa

SEQ ID NO: 278966 - DNA, 15 bp, Homo sapiens
aaactaacaaacaga

SEQ ID NO: 278967 - DNA, 15 bp, Homo sapiens
aaaactaacaaacag

SEQ ID NO: 278968 - DNA, 15 bp, Homo sapiens
gaaaactaacaaaca

SEQ ID NO: 278969 - DNA, 15 bp, Homo sapiens
ggaaaactaacaaac

SEQ ID NO: 278970 - DNA, 15 bp, Homo sapiens
aggaaaactaacaaa

SEQ ID NO: 278971 - DNA, 15 bp, Homo sapiens
aaggaaaactaacaa

SEQ ID NO: 278972 - DNA, 15 bp, Homo sapiens
gaaggaaaactaaca

SEQ ID NO: 278973 - DNA, 15 bp, Homo sapiens
agaaggaaaactaac

SEQ ID NO: 278974 - DNA, 15 bp, Homo sapiens
tagaaggaaaactaa

SEQ ID NO: 278975 - DNA, 15 bp, Homo sapiens
ttagaaggaaaacta

SEQ ID NO: 278976 - DNA, 15 bp, Homo sapiens
gttagaaggaaaact

SEQ ID NO: 278977 - DNA, 15 bp, Homo sapiens
tgttagaaggaaaac

SEQ ID NO: 278978 - DNA, 15 bp, Homo sapiens
ctgttagaaggaaaa

SEQ ID NO: 278979 - DNA, 15 bp, Homo sapiens
cctgttagaaggaaa

SEQ ID NO: 278980 - DNA, 15 bp, Homo sapiens
tcctgttagaaggaa

SEQ ID NO: 278981 - DNA, 15 bp, Homo sapiens
gtcctgttagaagga

SEQ ID NO: 278982 - DNA, 15 bp, Homo sapiens
ggtcctgttagaagg

SEQ ID NO: 278983 - DNA, 15 bp, Homo sapiens
gggtcctgttagaag

SEQ ID NO: 278984 - DNA, 15 bp, Homo sapiens
agggtcctgttagaa

SEQ ID NO: 278985 - DNA, 15 bp, Homo sapiens
gagggtcctgttaga

SEQ ID NO: 278986 - DNA, 15 bp, Homo sapiens
tgagggtcctgttag

SEQ ID NO: 278987 - DNA, 15 bp, Homo sapiens
ctgagggtcctgtta

SEQ ID NO: 278988 - DNA, 15 bp, Homo sapiens
gctgagggtcctgtt

SEQ ID NO: 278989 - DNA, 15 bp, Homo sapiens
agctgagggtcctgt

SEQ ID NO: 278990 - DNA, 15 bp, Homo sapiens
cagctgagggtcctg

SEQ ID NO: 278991 - DNA, 15 bp, Homo sapiens
gcagctgagggtcct

SEQ ID NO: 278992 - DNA, 15 bp, Homo sapiens
tgcagctgagggtcc

SEQ ID NO: 278993 - DNA, 15 bp, Homo sapiens
ctgcagctgagggtc

SEQ ID NO: 278994 - DNA, 15 bp, Homo sapiens
cctgcagctgagggt

SEQ ID NO: 278995 - DNA, 15 bp, Homo sapiens
acctgcagctgaggg

SEQ ID NO: 278996 - DNA, 15 bp, Homo sapiens
gacctgcagctgagg

SEQ ID NO: 278997 - DNA, 15 bp, Homo sapiens
agacctgcagctgag

SEQ ID NO: 278998 - DNA, 15 bp, Homo sapiens
cagacctgcagctga

SEQ ID NO: 278999 - DNA, 15 bp, Homo sapiens
acagacctgcagctg

SEQ ID NO: 279000 - DNA, 15 bp, Homo sapiens
aacagacctgcagct

SEQ ID NO: 279001 - DNA, 15 bp, Homo sapiens
caacagacctgcagc

SEQ ID NO: 279002 - DNA, 15 bp, Homo sapiens
ccaacagacctgcag

SEQ ID NO: 279003 - DNA, 15 bp, Homo sapiens
tccaacagacctgca

SEQ ID NO: 279004 - DNA, 15 bp, Homo sapiens
ctccaacagacctgc

SEQ ID NO: 279005 - DNA, 15 bp, Homo sapiens
actccaacagacctg

SEQ ID NO: 279006 - DNA, 15 bp, Homo sapiens
aactccaacagacct

SEQ ID NO: 279007 - DNA, 15 bp, Homo sapiens
aaactccaacagacc

SEQ ID NO: 279008 - DNA, 15 bp, Homo sapiens
caaactccaacagac

SEQ ID NO: 279009 - DNA, 15 bp, Homo sapiens
gcaaactccaacaga

SEQ ID NO: 279010 - DNA, 15 bp, Homo sapiens
agcaaactccaacag

SEQ ID NO: 279011 - DNA, 15 bp, Homo sapiens
cagcaaactccaaca

SEQ ID NO: 279012 - DNA, 15 bp, Homo sapiens
ccagcaaactccaac

SEQ ID NO: 279013 - DNA, 15 bp, Homo sapiens
tccagcaaactccaa

SEQ ID NO: 279014 - DNA, 15 bp, Homo sapiens
ctccagcaaactcca

SEQ ID NO: 279015 - DNA, 15 bp, Homo sapiens
cctccagcaaactcc

SEQ ID NO: 279016 - DNA, 15 bp, Homo sapiens
acctccagcaaactc

SEQ ID NO: 279017 - DNA, 15 bp, Homo sapiens
aacctccagcaaact

SEQ ID NO: 279018 - DNA, 15 bp, Homo sapiens
caacctccagcaaac

SEQ ID NO: 279019 - DNA, 15 bp, Homo sapiens
tcaacctccagcaaa

SEQ ID NO: 279020 - DNA, 15 bp, Homo sapiens
gtcaacctccagcaa

SEQ ID NO: 279021 - DNA, 15 bp, Homo sapiens
agtcaacctccagca

SEQ ID NO: 279022 - DNA, 15 bp, Homo sapiens
gagtcaacctccagc

SEQ ID NO: 279023 - DNA, 15 bp, Homo sapiens
ggagtcaacctccag

SEQ ID NO: 279024 - DNA, 15 bp, Homo sapiens
tggagtcaacctcca

SEQ ID NO: 279025 - DNA, 15 bp, Homo sapiens
ctggagtcaacctcc

SEQ ID NO: 279026 - DNA, 15 bp, Homo sapiens
tctggagtcaacctc

SEQ ID NO: 279027 - DNA, 15 bp, Homo sapiens
gtctggagtcaacct

SEQ ID NO: 279028 - DNA, 15 bp, Homo sapiens
ggtctggagtcaacc

SEQ ID NO: 279029 - DNA, 15 bp, Homo sapiens
gggtctggagtcaac

SEQ ID NO: 279030 - DNA, 15 bp, Homo sapiens
agggtctggagtcaa

SEQ ID NO: 279031 - DNA, 15 bp, Homo sapiens
cagggtctggagtca

SEQ ID NO: 279032 - DNA, 15 bp, Homo sapiens
acagggtctggagtc

SEQ ID NO: 279033 - DNA, 15 bp, Homo sapiens
aacagggtctggagt

SEQ ID NO: 279034 - DNA, 15 bp, Homo sapiens
aaacagggtctggag

SEQ ID NO: 279035 - DNA, 15 bp, Homo sapiens
caaacagggtctgga

SEQ ID NO: 279036 - DNA, 15 bp, Homo sapiens
gcaaacagggtctgg

SEQ ID NO: 279037 - DNA, 15 bp, Homo sapiens
ggcaaacagggtctg

SEQ ID NO: 279038 - DNA, 15 bp, Homo sapiens
aggcaaacagggtct

SEQ ID NO: 279039 - DNA, 15 bp, Homo sapiens
caggcaaacagggtc

SEQ ID NO: 279040 - DNA, 15 bp, Homo sapiens
ccaggcaaacagggt

SEQ ID NO: 279041 - DNA, 15 bp, Homo sapiens
cccaggcaaacaggg

SEQ ID NO: 279042 - DNA, 15 bp, Homo sapiens
acccaggcaaacagg

SEQ ID NO: 279043 - DNA, 15 bp, Homo sapiens
tacccaggcaaacag

SEQ ID NO: 279044 - DNA, 15 bp, Homo sapiens
atacccaggcaaaca

SEQ ID NO: 279045 - DNA, 15 bp, Homo sapiens
gatacccaggcaaac

SEQ ID NO: 279046 - DNA, 15 bp, Homo sapiens
tgatacccaggcaaa

SEQ ID NO: 279047 - DNA, 15 bp, Homo sapiens
ctgatacccaggcaa

SEQ ID NO: 279048 - DNA, 15 bp, Homo sapiens
gctgatacccaggca

SEQ ID NO: 279049 - DNA, 15 bp, Homo sapiens
tgctgatacccaggc

SEQ ID NO: 279050 - DNA, 15 bp, Homo sapiens
ctgctgatacccagg

SEQ ID NO: 279051 - DNA, 15 bp, Homo sapiens
actgctgatacccag

SEQ ID NO: 279052 - DNA, 15 bp, Homo sapiens
cactgctgataccca

SEQ ID NO: 279053 - DNA, 15 bp, Homo sapiens
ccactgctgataccc

SEQ ID NO: 279054 - DNA, 15 bp, Homo sapiens
tccactgctgatacc

SEQ ID NO: 279055 - DNA, 15 bp, Homo sapiens
ctccactgctgatac

SEQ ID NO: 279056 - DNA, 15 bp, Homo sapiens
cctccactgctgata

SEQ ID NO: 279057 - DNA, 15 bp, Homo sapiens
gcctccactgctgat

SEQ ID NO: 279058 - DNA, 15 bp, Homo sapiens
agcctccactgctga

SEQ ID NO: 279059 - DNA, 15 bp, Homo sapiens
cagcctccactgctg

SEQ ID NO: 279060 - DNA, 15 bp, Homo sapiens
gcagcctccactgct

SEQ ID NO: 279061 - DNA, 15 bp, Homo sapiens
tgcagcctccactgc

SEQ ID NO: 279062 - DNA, 15 bp, Homo sapiens
ctgcagcctccactg

SEQ ID NO: 279063 - DNA, 15 bp, Homo sapiens
tctgcagcctccact

SEQ ID NO: 279064 - DNA, 15 bp, Homo sapiens
ttctgcagcctccac

SEQ ID NO: 279065 - DNA, 15 bp, Homo sapiens
gttctgcagcctcca

SEQ ID NO: 279066 - DNA, 15 bp, Homo sapiens
tgttctgcagcctcc

SEQ ID NO: 279067 - DNA, 15 bp, Homo sapiens
ctgttctgcagcctc

SEQ ID NO: 279068 - DNA, 15 bp, Homo sapiens
actgttctgcagcct

SEQ ID NO: 279069 - DNA, 15 bp, Homo sapiens
cactgttctgcagcc

SEQ ID NO: 279070 - DNA, 15 bp, Homo sapiens
tcactgttctgcagc

SEQ ID NO: 279071 - DNA, 15 bp, Homo sapiens
ttcactgttctgcag

SEQ ID NO: 279072 - DNA, 15 bp, Homo sapiens
attcactgttctgca

SEQ ID NO: 279073 - DNA, 15 bp, Homo sapiens
tattcactgttctgc

SEQ ID NO: 279074 - DNA, 15 bp, Homo sapiens
atattcactgttctg

SEQ ID NO: 279075 - DNA, 15 bp, Homo sapiens
aatattcactgttct

SEQ ID NO: 279076 - DNA, 15 bp, Homo sapiens
caatattcactgttc

SEQ ID NO: 279077 - DNA, 15 bp, Homo sapiens
gcaatattcactgtt

SEQ ID NO: 279078 - DNA, 15 bp, Homo sapiens
agcaatattcactgt

SEQ ID NO: 279079 - DNA, 15 bp, Homo sapiens
cagcaatattcactg

SEQ ID NO: 279080 - DNA, 15 bp, Homo sapiens
tcagcaatattcact

SEQ ID NO: 279081 - DNA, 15 bp, Homo sapiens
ttcagcaatattcac

SEQ ID NO: 279082 - DNA, 15 bp, Homo sapiens
gttcagcaatattca

SEQ ID NO: 279083 - DNA, 15 bp, Homo sapiens
tgttcagcaatattc

SEQ ID NO: 279084 - DNA, 15 bp, Homo sapiens
ctgttcagcaatatt

SEQ ID NO: 279085 - DNA, 15 bp, Homo sapiens
gctgttcagcaatat

SEQ ID NO: 279086 - DNA, 15 bp, Homo sapiens
tgctgttcagcaata

SEQ ID NO: 279087 - DNA, 15 bp, Homo sapiens
ctgctgttcagcaat

SEQ ID NO: 279088 - DNA, 15 bp, Homo sapiens
tctgctgttcagcaa

SEQ ID NO: 279089 - DNA, 15 bp, Homo sapiens
atctgctgttcagca

SEQ ID NO: 279090 - DNA, 15 bp, Homo sapiens
catctgctgttcagc

SEQ ID NO: 279091 - DNA, 15 bp, Homo sapiens
acatctgctgttcag

SEQ ID NO: 279092 - DNA, 15 bp, Homo sapiens
aacatctgctgttca

SEQ ID NO: 279093 - DNA, 15 bp, Homo sapiens
caacatctgctgttc

SEQ ID NO: 279094 - DNA, 15 bp, Homo sapiens
gcaacatctgctgtt

SEQ ID NO: 279095 - DNA, 15 bp, Homo sapiens
agcaacatctgctgt

SEQ ID NO: 279096 - DNA, 15 bp, Homo sapiens
tagcaacatctgctg

SEQ ID NO: 279097 - DNA, 15 bp, Homo sapiens
gtagcaacatctgct

SEQ ID NO: 279098 - DNA, 15 bp, Homo sapiens
ggtagcaacatctgc

SEQ ID NO: 279099 - DNA, 15 bp, Homo sapiens
aggtagcaacatctg

SEQ ID NO: 279100 - DNA, 15 bp, Homo sapiens
caggtagcaacatct

SEQ ID NO: 279101 - DNA, 15 bp, Homo sapiens
tcaggtagcaacatc

SEQ ID NO: 279102 - DNA, 15 bp, Homo sapiens
atcaggtagcaacat

SEQ ID NO: 279103 - DNA, 15 bp, Homo sapiens
gatcaggtagcaaca

SEQ ID NO: 279104 - DNA, 15 bp, Homo sapiens
cgatcaggtagcaac

SEQ ID NO: 279105 - DNA, 15 bp, Homo sapiens
acgatcaggtagcaa

SEQ ID NO: 279106 - DNA, 15 bp, Homo sapiens
aacgatcaggtagca

SEQ ID NO: 279107 - DNA, 15 bp, Homo sapiens
gaacgatcaggtagc

SEQ ID NO: 279108 - DNA, 15 bp, Homo sapiens
ggaacgatcaggtag

SEQ ID NO: 279109 - DNA, 15 bp, Homo sapiens
aggaacgatcaggta

SEQ ID NO: 279110 - DNA, 15 bp, Homo sapiens
gaggaacgatcaggt

SEQ ID NO: 279111 - DNA, 15 bp, Homo sapiens
agaggaacgatcagg

SEQ ID NO: 279112 - DNA, 15 bp, Homo sapiens
cagaggaacgatcag

SEQ ID NO: 279113 - DNA, 15 bp, Homo sapiens
ccagaggaacgatca

SEQ ID NO: 279114 - DNA, 15 bp, Homo sapiens
tccagaggaacgatc

SEQ ID NO: 279115 - DNA, 15 bp, Homo sapiens
ttccagaggaacgat

SEQ ID NO: 279116 - DNA, 15 bp, Homo sapiens
cttccagaggaacga

SEQ ID NO: 279117 - DNA, 15 bp, Homo sapiens
gcttccagaggaacg

SEQ ID NO: 279118 - DNA, 15 bp, Homo sapiens
agcttccagaggaac

SEQ ID NO: 279119 - DNA, 15 bp, Homo sapiens
aagcttccagaggaa

SEQ ID NO: 279120 - DNA, 15 bp, Homo sapiens
gaagcttccagagga

SEQ ID NO: 279121 - DNA, 15 bp, Homo sapiens
cgaagcttccagagg

SEQ ID NO: 279122 - DNA, 15 bp, Homo sapiens
acgaagcttccagag

SEQ ID NO: 279123 - DNA, 15 bp, Homo sapiens
gacgaagcttccaga

SEQ ID NO: 279124 - DNA, 15 bp, Homo sapiens
agacgaagcttccag

SEQ ID NO: 279125 - DNA, 15 bp, Homo sapiens
gagacgaagcttcca

SEQ ID NO: 279126 - DNA, 15 bp, Homo sapiens
tgagacgaagcttcc

SEQ ID NO: 279127 - DNA, 15 bp, Homo sapiens
ctgagacgaagcttc

SEQ ID NO: 279128 - DNA, 15 bp, Homo sapiens
tctgagacgaagctt

SEQ ID NO: 279129 - DNA, 15 bp, Homo sapiens
ctctgagacgaagct

SEQ ID NO: 279130 - DNA, 15 bp, Homo sapiens
cctctgagacgaagc

SEQ ID NO: 279131 - DNA, 15 bp, Homo sapiens
ccctctgagacgaag

SEQ ID NO: 279132 - DNA, 15 bp, Homo sapiens
cccctctgagacgaa

SEQ ID NO: 279133 - DNA, 15 bp, Homo sapiens
acccctctgagacga

SEQ ID NO: 279134 - DNA, 15 bp, Homo sapiens
tacccctctgagacg

SEQ ID NO: 279135 - DNA, 15 bp, Homo sapiens
gtacccctctgagac

SEQ ID NO: 279136 - DNA, 15 bp, Homo sapiens
agtacccctctgaga

SEQ ID NO: 279137 - DNA, 15 bp, Homo sapiens
gagtacccctctgag

SEQ ID NO: 279138 - DNA, 15 bp, Homo sapiens
tgagtacccctctga

SEQ ID NO: 279139 - DNA, 15 bp, Homo sapiens
ctgagtacccctctg

SEQ ID NO: 279140 - DNA, 15 bp, Homo sapiens
gctgagtacccctct

SEQ ID NO: 279141 - DNA, 15 bp, Homo sapiens
agctgagtacccctc

SEQ ID NO: 279142 - DNA, 15 bp, Homo sapiens
cagctgagtacccct

SEQ ID NO: 279143 - DNA, 15 bp, Homo sapiens
gcagctgagtacccc

SEQ ID NO: 279144 - DNA, 15 bp, Homo sapiens
cgcagctgagtaccc

SEQ ID NO: 279145 - DNA, 15 bp, Homo sapiens
acgcagctgagtacc

SEQ ID NO: 279146 - DNA, 15 bp, Homo sapiens
cacgcagctgagtac

SEQ ID NO: 279147 - DNA, 15 bp, Homo sapiens
acacgcagctgagta

SEQ ID NO: 279148 - DNA, 15 bp, Homo sapiens
cacacgcagctgagt

SEQ ID NO: 279149 - DNA, 15 bp, Homo sapiens
ccacacgcagctgag

SEQ ID NO: 279150 - DNA, 15 bp, Homo sapiens
accacacgcagctga

SEQ ID NO: 279151 - DNA, 15 bp, Homo sapiens
caccacacgcagctg

SEQ ID NO: 279152 - DNA, 15 bp, Homo sapiens
acaccacacgcagct

SEQ ID NO: 279153 - DNA, 15 bp, Homo sapiens
aacaccacacgcagc

SEQ ID NO: 279154 - DNA, 15 bp, Homo sapiens
taacaccacacgcag

SEQ ID NO: 279155 - DNA, 15 bp, Homo sapiens
ctaacaccacacgca

SEQ ID NO: 279156 - DNA, 15 bp, Homo sapiens
actaacaccacacgc

SEQ ID NO: 279157 - DNA, 15 bp, Homo sapiens
gactaacaccacacg

SEQ ID NO: 279158 - DNA, 15 bp, Homo sapiens
agactaacaccacac

SEQ ID NO: 279159 - DNA, 15 bp, Homo sapiens
cagactaacaccaca

SEQ ID NO: 279160 - DNA, 15 bp, Homo sapiens
gcagactaacaccac

SEQ ID NO: 279161 - DNA, 15 bp, Homo sapiens
ggcagactaacacca

SEQ ID NO: 279162 - DNA, 15 bp, Homo sapiens
gggcagactaacacc

SEQ ID NO: 279163 - DNA, 15 bp, Homo sapiens
ggggcagactaacac

SEQ ID NO: 279164 - DNA, 15 bp, Homo sapiens
aggggcagactaaca

SEQ ID NO: 279165 - DNA, 15 bp, Homo sapiens
taggggcagactaac

SEQ ID NO: 279166 - DNA, 15 bp, Homo sapiens
ctaggggcagactaa

SEQ ID NO: 279167 - DNA, 15 bp, Homo sapiens
actaggggcagacta

SEQ ID NO: 279168 - DNA, 15 bp, Homo sapiens
cactaggggcagact

SEQ ID NO: 279169 - DNA, 15 bp, Homo sapiens
ccactaggggcagac

SEQ ID NO: 279170 - DNA, 15 bp, Homo sapiens
cccactaggggcaga

SEQ ID NO: 279171 - DNA, 15 bp, Homo sapiens
ccccactaggggcag

SEQ ID NO: 279172 - DNA, 15 bp, Homo sapiens
accccactaggggca

SEQ ID NO: 279173 - DNA, 15 bp, Homo sapiens
caccccactaggggc

SEQ ID NO: 279174 - DNA, 15 bp, Homo sapiens
acaccccactagggg

SEQ ID NO: 279175 - DNA, 15 bp, Homo sapiens
cacaccccactaggg

SEQ ID NO: 279176 - DNA, 15 bp, Homo sapiens
gcacaccccactagg

SEQ ID NO: 279177 - DNA, 15 bp, Homo sapiens
ggcacaccccactag

SEQ ID NO: 279178 - DNA, 15 bp, Homo sapiens
aggcacaccccacta

SEQ ID NO: 279179 - DNA, 15 bp, Homo sapiens
gaggcacaccccact

SEQ ID NO: 279180 - DNA, 15 bp, Homo sapiens
ggaggcacaccccac

SEQ ID NO: 279181 - DNA, 15 bp, Homo sapiens
gggaggcacacccca

SEQ ID NO: 279182 - DNA, 15 bp, Homo sapiens
tgggaggcacacccc

SEQ ID NO: 279183 - DNA, 15 bp, Homo sapiens
ctgggaggcacaccc

SEQ ID NO: 279184 - DNA, 15 bp, Homo sapiens
actgggaggcacacc

SEQ ID NO: 279185 - DNA, 15 bp, Homo sapiens
aactgggaggcacac

SEQ ID NO: 279186 - DNA, 15 bp, Homo sapiens
taactgggaggcaca

SEQ ID NO: 279187 - DNA, 15 bp, Homo sapiens
ctaactgggaggcac

SEQ ID NO: 279188 - DNA, 15 bp, Homo sapiens
cctaactgggaggca

SEQ ID NO: 279189 - DNA, 15 bp, Homo sapiens
gcctaactgggaggc

SEQ ID NO: 279190 - DNA, 15 bp, Homo sapiens
agcctaactgggagg

SEQ ID NO: 279191 - DNA, 15 bp, Homo sapiens
tagcctaactgggag

SEQ ID NO: 279192 - DNA, 15 bp, Homo sapiens
gtagcctaactggga

SEQ ID NO: 279193 - DNA, 15 bp, Homo sapiens
agtagcctaactggg

SEQ ID NO: 279194 - DNA, 15 bp, Homo sapiens
gagtagcctaactgg

SEQ ID NO: 279195 - DNA, 15 bp, Homo sapiens
tgagtagcctaactg

SEQ ID NO: 279196 - DNA, 15 bp, Homo sapiens
ctgagtagcctaact

SEQ ID NO: 279197 - DNA, 15 bp, Homo sapiens
cctgagtagcctaac

SEQ ID NO: 279198 - DNA, 15 bp, Homo sapiens
ccctgagtagcctaa

SEQ ID NO: 279199 - DNA, 15 bp, Homo sapiens
cccctgagtagccta

SEQ ID NO: 279200 - DNA, 15 bp, Homo sapiens
acccctgagtagcct

SEQ ID NO: 279201 - DNA, 15 bp, Homo sapiens
gacccctgagtagcc

SEQ ID NO: 279202 - DNA, 15 bp, Homo sapiens
tgacccctgagtagc

SEQ ID NO: 279203 - DNA, 15 bp, Homo sapiens
ctgacccctgagtag

SEQ ID NO: 279204 - DNA, 15 bp, Homo sapiens
cctgacccctgagta

SEQ ID NO: 279205 - DNA, 15 bp, Homo sapiens
ccctgacccctgagt

SEQ ID NO: 279206 - DNA, 15 bp, Homo sapiens
tccctgacccctgag

SEQ ID NO: 279207 - DNA, 15 bp, Homo sapiens
gtccctgacccctga

SEQ ID NO: 279208 - DNA, 15 bp, Homo sapiens
ggtccctgacccctg

SEQ ID NO: 279209 - DNA, 15 bp, Homo sapiens
gggtccctgacccct

SEQ ID NO: 279210 - DNA, 15 bp, Homo sapiens
tgggtccctgacccc

SEQ ID NO: 279211 - DNA, 15 bp, Homo sapiens
gtgggtccctgaccc

SEQ ID NO: 279212 - DNA, 15 bp, Homo sapiens
agtgggtccctgacc

SEQ ID NO: 279213 - DNA, 15 bp, Homo sapiens
aagtgggtccctgac

SEQ ID NO: 279214 - DNA, 15 bp, Homo sapiens
caagtgggtccctga

SEQ ID NO: 279215 - DNA, 15 bp, Homo sapiens
tcaagtgggtccctg

SEQ ID NO: 279216 - DNA, 15 bp, Homo sapiens
ctcaagtgggtccct

SEQ ID NO: 279217 - DNA, 15 bp, Homo sapiens
cctcaagtgggtccc

SEQ ID NO: 279218 - DNA, 15 bp, Homo sapiens
tcctcaagtgggtcc

SEQ ID NO: 279219 - DNA, 15 bp, Homo sapiens
ctcctcaagtgggtc

SEQ ID NO: 279220 - DNA, 15 bp, Homo sapiens
cctcctcaagtgggt

SEQ ID NO: 279221 - DNA, 15 bp, Homo sapiens
gcctcctcaagtggg

SEQ ID NO: 279222 - DNA, 15 bp, Homo sapiens
tgcctcctcaagtgg

SEQ ID NO: 279223 - DNA, 15 bp, Homo sapiens
ctgcctcctcaagtg

SEQ ID NO: 279224 - DNA, 15 bp, Homo sapiens
actgcctcctcaagt

SEQ ID NO: 279225 - DNA, 15 bp, Homo sapiens
gactgcctcctcaag

SEQ ID NO: 279226 - DNA, 15 bp, Homo sapiens
agactgcctcctcaa

SEQ ID NO: 279227 - DNA, 15 bp, Homo sapiens
cagactgcctcctca

SEQ ID NO: 279228 - DNA, 15 bp, Homo sapiens
acagactgcctcctc

SEQ ID NO: 279229 - DNA, 15 bp, Homo sapiens
gacagactgcctcct

SEQ ID NO: 279230 - DNA, 15 bp, Homo sapiens
ggacagactgcctcc

SEQ ID NO: 279231 - DNA, 15 bp, Homo sapiens
tggacagactgcctc

SEQ ID NO: 279232 - DNA, 15 bp, Homo sapiens
atggacagactgcct

SEQ ID NO: 279233 - DNA, 15 bp, Homo sapiens
aatggacagactgcc

SEQ ID NO: 279234 - DNA, 15 bp, Homo sapiens
gaatggacagactgc

SEQ ID NO: 279235 - DNA, 15 bp, Homo sapiens
agaatggacagactg

SEQ ID NO: 279236 - DNA, 15 bp, Homo sapiens
gagaatggacagact

SEQ ID NO: 279237 - DNA, 15 bp, Homo sapiens
tgagaatggacagac

SEQ ID NO: 279238 - DNA, 15 bp, Homo sapiens
ctgagaatggacaga

SEQ ID NO: 279239 - DNA, 15 bp, Homo sapiens
tctgagaatggacag

SEQ ID NO: 279240 - DNA, 15 bp, Homo sapiens
atctgagaatggaca

SEQ ID NO: 279241 - DNA, 15 bp, Homo sapiens
gatctgagaatggac

SEQ ID NO: 279242 - DNA, 15 bp, Homo sapiens
agatctgagaatgga

SEQ ID NO: 279243 - DNA, 15 bp, Homo sapiens
gagatctgagaatgg

SEQ ID NO: 279244 - DNA, 15 bp, Homo sapiens
tgagatctgagaatg

SEQ ID NO: 279245 - DNA, 15 bp, Homo sapiens
ttgagatctgagaat

SEQ ID NO: 279246 - DNA, 15 bp, Homo sapiens
tttgagatctgagaa

SEQ ID NO: 279247 - DNA, 15 bp, Homo sapiens
gtttgagatctgaga

SEQ ID NO: 279248 - DNA, 15 bp, Homo sapiens
agtttgagatctgag

SEQ ID NO: 279249 - DNA, 15 bp, Homo sapiens
aagtttgagatctga

SEQ ID NO: 279250 - DNA, 15 bp, Homo sapiens
gaagtttgagatctg

SEQ ID NO: 279251 - DNA, 15 bp, Homo sapiens
tgaagtttgagatct

SEQ ID NO: 279252 - DNA, 15 bp, Homo sapiens
atgaagtttgagatc

SEQ ID NO: 279253 - DNA, 15 bp, Homo sapiens
catgaagtttgagat

SEQ ID NO: 279254 - DNA, 15 bp, Homo sapiens
gcatgaagtttgaga

SEQ ID NO: 279255 - DNA, 15 bp, Homo sapiens
agcatgaagtttgag

SEQ ID NO: 279256 - DNA, 15 bp, Homo sapiens
cagcatgaagtttga

SEQ ID NO: 279257 - DNA, 15 bp, Homo sapiens
ccagcatgaagtttg

SEQ ID NO: 279258 - DNA, 15 bp, Homo sapiens
cccagcatgaagttt

SEQ ID NO: 279259 - DNA, 15 bp, Homo sapiens
tcccagcatgaagtt

SEQ ID NO: 279260 - DNA, 15 bp, Homo sapiens
ctcccagcatgaagt

SEQ ID NO: 279261 - DNA, 15 bp, Homo sapiens
tctcccagcatgaag

SEQ ID NO: 279262 - DNA, 15 bp, Homo sapiens
ttctcccagcatgaa

SEQ ID NO: 279263 - DNA, 15 bp, Homo sapiens
gttctcccagcatga

SEQ ID NO: 279264 - DNA, 15 bp, Homo sapiens
ggttctcccagcatg

SEQ ID NO: 279265 - DNA, 15 bp, Homo sapiens
tggttctcccagcat

SEQ ID NO: 279266 - DNA, 15 bp, Homo sapiens
gtggttctcccagca

SEQ ID NO: 279267 - DNA, 15 bp, Homo sapiens
agtggttctcccagc

SEQ ID NO: 279268 - DNA, 15 bp, Homo sapiens
tagtggttctcccag

SEQ ID NO: 279269 - DNA, 15 bp, Homo sapiens
gtagtggttctccca

SEQ ID NO: 279270 - DNA, 15 bp, Homo sapiens
cgtagtggttctccc

SEQ ID NO: 279271 - DNA, 15 bp, Homo sapiens
gcgtagtggttctcc

SEQ ID NO: 279272 - DNA, 15 bp, Homo sapiens
agcgtagtggttctc

SEQ ID NO: 279273 - DNA, 15 bp, Homo sapiens
gagcgtagtggttct

SEQ ID NO: 279274 - DNA, 15 bp, Homo sapiens
agagcgtagtggttc

SEQ ID NO: 279275 - DNA, 15 bp, Homo sapiens
aagagcgtagtggtt

SEQ ID NO: 279276 - DNA, 15 bp, Homo sapiens
gaagagcgtagtggt

SEQ ID NO: 279277 - DNA, 15 bp, Homo sapiens
tgaagagcgtagtgg

SEQ ID NO: 279278 - DNA, 15 bp, Homo sapiens
ttgaagagcgtagtg

SEQ ID NO: 279279 - DNA, 15 bp, Homo sapiens
tttgaagagcgtagt

SEQ ID NO: 279280 - DNA, 15 bp, Homo sapiens
ctttgaagagcgtag

SEQ ID NO: 279281 - DNA, 15 bp, Homo sapiens
gctttgaagagcgta

SEQ ID NO: 279282 - DNA, 15 bp, Homo sapiens
agctttgaagagcgt

SEQ ID NO: 279283 - DNA, 15 bp, Homo sapiens
cagctttgaagagcg

SEQ ID NO: 279284 - DNA, 15 bp, Homo sapiens
acagctttgaagagc

SEQ ID NO: 279285 - DNA, 15 bp, Homo sapiens
gacagctttgaagag

SEQ ID NO: 279286 - DNA, 15 bp, Homo sapiens
tgacagctttgaaga

SEQ ID NO: 279287 - DNA, 15 bp, Homo sapiens
ctgacagctttgaag

SEQ ID NO: 279288 - DNA, 15 bp, Homo sapiens
tctgacagctttgaa

SEQ ID NO: 279289 - DNA, 15 bp, Homo sapiens
gtctgacagctttga

SEQ ID NO: 279290 - DNA, 15 bp, Homo sapiens
tgtctgacagctttg

SEQ ID NO: 279291 - DNA, 15 bp, Homo sapiens
ctgtctgacagcttt

SEQ ID NO: 279292 - DNA, 15 bp, Homo sapiens
cctgtctgacagctt

SEQ ID NO: 279293 - DNA, 15 bp, Homo sapiens
ccctgtctgacagct

SEQ ID NO: 279294 - DNA, 15 bp, Homo sapiens
tccctgtctgacagc

SEQ ID NO: 279295 - DNA, 15 bp, Homo sapiens
gtccctgtctgacag

SEQ ID NO: 279296 - DNA, 15 bp, Homo sapiens
tgtccctgtctgaca

SEQ ID NO: 279297 - DNA, 15 bp, Homo sapiens
atgtccctgtctgac

SEQ ID NO: 279298 - DNA, 15 bp, Homo sapiens
aatgtccctgtctga

SEQ ID NO: 279299 - DNA, 15 bp, Homo sapiens
aaatgtccctgtctg

SEQ ID NO: 279300 - DNA, 15 bp, Homo sapiens
taaatgtccctgtct

SEQ ID NO: 279301 - DNA, 15 bp, Homo sapiens
ttaaatgtccctgtc

SEQ ID NO: 279302 - DNA, 15 bp, Homo sapiens
cttaaatgtccctgt

SEQ ID NO: 279303 - DNA, 15 bp, Homo sapiens
acttaaatgtccctg

SEQ ID NO: 279304 - DNA, 15 bp, Homo sapiens
gacttaaatgtccct

SEQ ID NO: 279305 - DNA, 15 bp, Homo sapiens
agacttaaatgtccc

SEQ ID NO: 279306 - DNA, 15 bp, Homo sapiens
cagacttaaatgtcc

SEQ ID NO: 279307 - DNA, 15 bp, Homo sapiens
gcagacttaaatgtc

SEQ ID NO: 279308 - DNA, 15 bp, Homo sapiens
tgcagacttaaatgt

SEQ ID NO: 279309 - DNA, 15 bp, Homo sapiens
ctgcagacttaaatg

SEQ ID NO: 279310 - DNA, 15 bp, Homo sapiens
tctgcagacttaaat

SEQ ID NO: 279311 - DNA, 15 bp, Homo sapiens
ctctgcagacttaaa

SEQ ID NO: 279312 - DNA, 15 bp, Homo sapiens
cctctgcagacttaa

SEQ ID NO: 279313 - DNA, 15 bp, Homo sapiens
acctctgcagactta

SEQ ID NO: 279314 - DNA, 15 bp, Homo sapiens
aacctctgcagactt

SEQ ID NO: 279315 - DNA, 15 bp, Homo sapiens
aaacctctgcagact

SEQ ID NO: 279316 - DNA, 15 bp, Homo sapiens
gaaacctctgcagac

SEQ ID NO: 279317 - DNA, 15 bp, Homo sapiens
agaaacctctgcaga

SEQ ID NO: 279318 - DNA, 15 bp, Homo sapiens
cagaaacctctgcag

SEQ ID NO: 279319 - DNA, 15 bp, Homo sapiens
gcagaaacctctgca

SEQ ID NO: 279320 - DNA, 15 bp, Homo sapiens
agcagaaacctctgc

SEQ ID NO: 279321 - DNA, 15 bp, Homo sapiens
cagcagaaacctctg

SEQ ID NO: 279322 - DNA, 15 bp, Homo sapiens
gcagcagaaacctct

SEQ ID NO: 279323 - DNA, 15 bp, Homo sapiens
ggcagcagaaacctc

SEQ ID NO: 279324 - DNA, 15 bp, Homo sapiens
aggcagcagaaacct

SEQ ID NO: 279325 - DNA, 15 bp, Homo sapiens
aaggcagcagaaacc

SEQ ID NO: 279326 - DNA, 15 bp, Homo sapiens
aaaggcagcagaaac

SEQ ID NO: 279327 - DNA, 15 bp, Homo sapiens
aaaaggcagcagaaa

SEQ ID NO: 279328 - DNA, 15 bp, Homo sapiens
caaaaggcagcagaa

SEQ ID NO: 279329 - DNA, 15 bp, Homo sapiens
acaaaaggcagcaga

SEQ ID NO: 279330 - DNA, 15 bp, Homo sapiens
aacaaaaggcagcag

SEQ ID NO: 279331 - DNA, 15 bp, Homo sapiens
gaacaaaaggcagca

SEQ ID NO: 279332 - DNA, 15 bp, Homo sapiens
cgaacaaaaggcagc

SEQ ID NO: 279333 - DNA, 15 bp, Homo sapiens
ccgaacaaaaggcag

SEQ ID NO: 279334 - DNA, 15 bp, Homo sapiens
gccgaacaaaaggca

SEQ ID NO: 279335 - DNA, 15 bp, Homo sapiens
agccgaacaaaaggc

SEQ ID NO: 279336 - DNA, 15 bp, Homo sapiens
tagccgaacaaaagg

SEQ ID NO: 279337 - DNA, 15 bp, Homo sapiens
atagccgaacaaaag

SEQ ID NO: 279338 - DNA, 15 bp, Homo sapiens
catagccgaacaaaa

SEQ ID NO: 279339 - DNA, 15 bp, Homo sapiens
gcatagccgaacaaa

SEQ ID NO: 279340 - DNA, 15 bp, Homo sapiens
ggcatagccgaacaa

SEQ ID NO: 279341 - DNA, 15 bp, Homo sapiens
gggcatagccgaaca

SEQ ID NO: 279342 - DNA, 15 bp, Homo sapiens
agggcatagccgaac

SEQ ID NO: 279343 - DNA, 15 bp, Homo sapiens
cagggcatagccgaa

SEQ ID NO: 279344 - DNA, 15 bp, Homo sapiens
gcagggcatagccga

SEQ ID NO: 279345 - DNA, 15 bp, Homo sapiens
ggcagggcatagccg

SEQ ID NO: 279346 - DNA, 15 bp, Homo sapiens
gggcagggcatagcc

SEQ ID NO: 279347 - DNA, 15 bp, Homo sapiens
ggggcagggcatagc

SEQ ID NO: 279348 - DNA, 15 bp, Homo sapiens
gggggcagggcatag

SEQ ID NO: 279349 - DNA, 15 bp, Homo sapiens
tgggggcagggcata

SEQ ID NO: 279350 - DNA, 15 bp, Homo sapiens
ctgggggcagggcat

SEQ ID NO: 279351 - DNA, 15 bp, Homo sapiens
tctgggggcagggca

SEQ ID NO: 279352 - DNA, 15 bp, Homo sapiens
ctctgggggcagggc

SEQ ID NO: 279353 - DNA, 15 bp, Homo sapiens
cctctgggggcaggg

SEQ ID NO: 279354 - DNA, 15 bp, Homo sapiens
acctctgggggcagg

SEQ ID NO: 279355 - DNA, 15 bp, Homo sapiens
cacctctgggggcag

SEQ ID NO: 279356 - DNA, 15 bp, Homo sapiens
ccacctctgggggca

SEQ ID NO: 279357 - DNA, 15 bp, Homo sapiens
tccacctctgggggc

SEQ ID NO: 279358 - DNA, 15 bp, Homo sapiens
ttccacctctggggg

SEQ ID NO: 279359 - DNA, 15 bp, Homo sapiens
attccacctctgggg

SEQ ID NO: 279360 - DNA, 15 bp, Homo sapiens
gattccacctctggg

SEQ ID NO: 279361 - DNA, 15 bp, Homo sapiens
agattccacctctgg

SEQ ID NO: 279362 - DNA, 15 bp, Homo sapiens
tagattccacctctg

SEQ ID NO: 279363 - DNA, 15 bp, Homo sapiens
gtagattccacctct

SEQ ID NO: 279364 - DNA, 15 bp, Homo sapiens
tgtagattccacctc

SEQ ID NO: 279365 - DNA, 15 bp, Homo sapiens
ctgtagattccacct

SEQ ID NO: 279366 - DNA, 15 bp, Homo sapiens
tctgtagattccacc

SEQ ID NO: 279367 - DNA, 15 bp, Homo sapiens
ctctgtagattccac

SEQ ID NO: 279368 - DNA, 15 bp, Homo sapiens
cctctgtagattcca

SEQ ID NO: 279369 - DNA, 15 bp, Homo sapiens
gcctctgtagattcc

SEQ ID NO: 279370 - DNA, 15 bp, Homo sapiens
tgcctctgtagattc

SEQ ID NO: 279371 - DNA, 15 bp, Homo sapiens
ctgcctctgtagatt

SEQ ID NO: 279372 - DNA, 15 bp, Homo sapiens
cctgcctctgtagat

SEQ ID NO: 279373 - DNA, 15 bp, Homo sapiens
gcctgcctctgtaga

SEQ ID NO: 279374 - DNA, 15 bp, Homo sapiens
tgcctgcctctgtag

SEQ ID NO: 279375 - DNA, 15 bp, Homo sapiens
ctgcctgcctctgta

SEQ ID NO: 279376 - DNA, 15 bp, Homo sapiens
cctgcctgcctctgt

SEQ ID NO: 279377 - DNA, 15 bp, Homo sapiens
gcctgcctgcctctg

SEQ ID NO: 279378 - DNA, 15 bp, Homo sapiens
ggcctgcctgcctct

SEQ ID NO: 279379 - DNA, 15 bp, Homo sapiens
aggcctgcctgcctc

SEQ ID NO: 279380 - DNA, 15 bp, Homo sapiens
gaggcctgcctgcct

SEQ ID NO: 279381 - DNA, 15 bp, Homo sapiens
ggaggcctgcctgcc

SEQ ID NO: 279382 - DNA, 15 bp, Homo sapiens
aggaggcctgcctgc

SEQ ID NO: 279383 - DNA, 15 bp, Homo sapiens
aaggaggcctgcctg

SEQ ID NO: 279384 - DNA, 15 bp, Homo sapiens
caaggaggcctgcct

SEQ ID NO: 279385 - DNA, 15 bp, Homo sapiens
tcaaggaggcctgcc

SEQ ID NO: 279386 - DNA, 15 bp, Homo sapiens
gtcaaggaggcctgc

SEQ ID NO: 279387 - DNA, 15 bp, Homo sapiens
ggtcaaggaggcctg

SEQ ID NO: 279388 - DNA, 15 bp, Homo sapiens
aggtcaaggaggcct

SEQ ID NO: 279389 - DNA, 15 bp, Homo sapiens
caggtcaaggaggcc

SEQ ID NO: 279390 - DNA, 15 bp, Homo sapiens
gcaggtcaaggaggc

SEQ ID NO: 279391 - DNA, 15 bp, Homo sapiens
cgcaggtcaaggagg

SEQ ID NO: 279392 - DNA, 15 bp, Homo sapiens
ccgcaggtcaaggag

SEQ ID NO: 279393 - DNA, 15 bp, Homo sapiens
accgcaggtcaagga

SEQ ID NO: 279394 - DNA, 15 bp, Homo sapiens
caccgcaggtcaagg

SEQ ID NO: 279395 - DNA, 15 bp, Homo sapiens
ccaccgcaggtcaag

SEQ ID NO: 279396 - DNA, 15 bp, Homo sapiens
cccaccgcaggtcaa

SEQ ID NO: 279397 - DNA, 15 bp, Homo sapiens
gcccaccgcaggtca

SEQ ID NO: 279398 - DNA, 15 bp, Homo sapiens
agcccaccgcaggtc

SEQ ID NO: 279399 - DNA, 15 bp, Homo sapiens
gagcccaccgcaggt

SEQ ID NO: 279400 - DNA, 15 bp, Homo sapiens
ggagcccaccgcagg

SEQ ID NO: 279401 - DNA, 15 bp, Homo sapiens
tggagcccaccgcag

SEQ ID NO: 279402 - DNA, 15 bp, Homo sapiens
gtggagcccaccgca

SEQ ID NO: 279403 - DNA, 15 bp, Homo sapiens
ggtggagcccaccgc

SEQ ID NO: 279404 - DNA, 15 bp, Homo sapiens
gggtggagcccaccg

SEQ ID NO: 279405 - DNA, 15 bp, Homo sapiens
tgggtggagcccacc

SEQ ID NO: 279406 - DNA, 15 bp, Homo sapiens
ctgggtggagcccac

SEQ ID NO: 279407 - DNA, 15 bp, Homo sapiens
actgggtggagccca

SEQ ID NO: 279408 - DNA, 15 bp, Homo sapiens
aactgggtggagccc

SEQ ID NO: 279409 - DNA, 15 bp, Homo sapiens
gaactgggtggagcc

SEQ ID NO: 279410 - DNA, 15 bp, Homo sapiens
tgaactgggtggagc

SEQ ID NO: 279411 - DNA, 15 bp, Homo sapiens
ttgaactgggtggag

SEQ ID NO: 279412 - DNA, 15 bp, Homo sapiens
cttgaactgggtgga

SEQ ID NO: 279413 - DNA, 15 bp, Homo sapiens
gcttgaactgggtgg

SEQ ID NO: 279414 - DNA, 15 bp, Homo sapiens
agcttgaactgggtg

SEQ ID NO: 279415 - DNA, 15 bp, Homo sapiens
aagcttgaactgggt

SEQ ID NO: 279416 - DNA, 15 bp, Homo sapiens
gaagcttgaactggg

SEQ ID NO: 279417 - DNA, 15 bp, Homo sapiens
ggaagcttgaactgg

SEQ ID NO: 279418 - DNA, 15 bp, Homo sapiens
aggaagcttgaactg

SEQ ID NO: 279419 - DNA, 15 bp, Homo sapiens
caggaagcttgaact

SEQ ID NO: 279420 - DNA, 15 bp, Homo sapiens
ccaggaagcttgaac

SEQ ID NO: 279421 - DNA, 15 bp, Homo sapiens
gccaggaagcttgaa

SEQ ID NO: 279422 - DNA, 15 bp, Homo sapiens
ggccaggaagcttga

SEQ ID NO: 279423 - DNA, 15 bp, Homo sapiens
cggccaggaagcttg

SEQ ID NO: 279424 - DNA, 15 bp, Homo sapiens
gcggccaggaagctt

SEQ ID NO: 279425 - DNA, 15 bp, Homo sapiens
agcggccaggaagct

SEQ ID NO: 279426 - DNA, 15 bp, Homo sapiens
aagcggccaggaagc

SEQ ID NO: 279427 - DNA, 15 bp, Homo sapiens
aaagcggccaggaag

SEQ ID NO: 279428 - DNA, 15 bp, Homo sapiens
caaagcggccaggaa

SEQ ID NO: 279429 - DNA, 15 bp, Homo sapiens
acaaagcggccagga

SEQ ID NO: 279430 - DNA, 15 bp, Homo sapiens
aacaaagcggccagg

SEQ ID NO: 279431 - DNA, 15 bp, Homo sapiens
aaacaaagcggccag

SEQ ID NO: 279432 - DNA, 15 bp, Homo sapiens
taaacaaagcggcca

SEQ ID NO: 279433 - DNA, 15 bp, Homo sapiens
gtaaacaaagcggcc

SEQ ID NO: 279434 - DNA, 15 bp, Homo sapiens
ggtaaacaaagcggc

SEQ ID NO: 279435 - DNA, 15 bp, Homo sapiens
aggtaaacaaagcgg

SEQ ID NO: 279436 - DNA, 15 bp, Homo sapiens
taggtaaacaaagcg

SEQ ID NO: 279437 - DNA, 15 bp, Homo sapiens
gtaggtaaacaaagc

SEQ ID NO: 279438 - DNA, 15 bp, Homo sapiens
agtaggtaaacaaag

SEQ ID NO: 279439 - DNA, 15 bp, Homo sapiens
gagtaggtaaacaaa

SEQ ID NO: 279440 - DNA, 15 bp, Homo sapiens
tgagtaggtaaacaa

SEQ ID NO: 279441 - DNA, 15 bp, Homo sapiens
ttgagtaggtaaaca

SEQ ID NO: 279442 - DNA, 15 bp, Homo sapiens
cttgagtaggtaaac

SEQ ID NO: 279443 - DNA, 15 bp, Homo sapiens
gcttgagtaggtaaa

SEQ ID NO: 279444 - DNA, 15 bp, Homo sapiens
agcttgagtaggtaa

SEQ ID NO: 279445 - DNA, 15 bp, Homo sapiens
aagcttgagtaggta

SEQ ID NO: 279446 - DNA, 15 bp, Homo sapiens
gaagcttgagtaggt

SEQ ID NO: 279447 - DNA, 15 bp, Homo sapiens
tgaagcttgagtagg

SEQ ID NO: 279448 - DNA, 15 bp, Homo sapiens
ctgaagcttgagtag

SEQ ID NO: 279449 - DNA, 15 bp, Homo sapiens
gctgaagcttgagta

SEQ ID NO: 279450 - DNA, 15 bp, Homo sapiens
tgctgaagcttgagt

SEQ ID NO: 279451 - DNA, 15 bp, Homo sapiens
ttgctgaagcttgag

SEQ ID NO: 279452 - DNA, 15 bp, Homo sapiens
attgctgaagcttga

SEQ ID NO: 279453 - DNA, 15 bp, Homo sapiens
cattgctgaagcttg

SEQ ID NO: 279454 - DNA, 15 bp, Homo sapiens
ccattgctgaagctt

SEQ ID NO: 279455 - DNA, 15 bp, Homo sapiens
gccattgctgaagct

SEQ ID NO: 279456 - DNA, 15 bp, Homo sapiens
cgccattgctgaagc

SEQ ID NO: 279457 - DNA, 15 bp, Homo sapiens
ccgccattgctgaag

SEQ ID NO: 279458 - DNA, 15 bp, Homo sapiens
cccgccattgctgaa

SEQ ID NO: 279459 - DNA, 15 bp, Homo sapiens
gcccgccattgctga

SEQ ID NO: 279460 - DNA, 15 bp, Homo sapiens
cgcccgccattgctg

SEQ ID NO: 279461 - DNA, 15 bp, Homo sapiens
gcgcccgccattgct

SEQ ID NO: 279462 - DNA, 15 bp, Homo sapiens
ggcgcccgccattgc

SEQ ID NO: 279463 - DNA, 15 bp, Homo sapiens
gggcgcccgccattg

SEQ ID NO: 279464 - DNA, 15 bp, Homo sapiens
ggggcgcccgccatt

SEQ ID NO: 279465 - DNA, 15 bp, Homo sapiens
aggggcgcccgccat

SEQ ID NO: 279466 - DNA, 15 bp, Homo sapiens
gaggggcgcccgcca

SEQ ID NO: 279467 - DNA, 15 bp, Homo sapiens
agaggggcgcccgcc

SEQ ID NO: 279468 - DNA, 15 bp, Homo sapiens
gagaggggcgcccgc

SEQ ID NO: 279469 - DNA, 15 bp, Homo sapiens
ggagaggggcgcccg

SEQ ID NO: 279470 - DNA, 15 bp, Homo sapiens
aggagaggggcgccc

SEQ ID NO: 279471 - DNA, 15 bp, Homo sapiens
taggagaggggcgcc

SEQ ID NO: 279472 - DNA, 15 bp, Homo sapiens
ctaggagaggggcgc

SEQ ID NO: 279473 - DNA, 15 bp, Homo sapiens
gctaggagaggggcg

SEQ ID NO: 279474 - DNA, 15 bp, Homo sapiens
ggctaggagaggggc

SEQ ID NO: 279475 - DNA, 15 bp, Homo sapiens
aggctaggagagggg

SEQ ID NO: 279476 - DNA, 15 bp, Homo sapiens
gaggctaggagaggg

SEQ ID NO: 279477 - DNA, 15 bp, Homo sapiens
cgaggctaggagagg

SEQ ID NO: 279478 - DNA, 15 bp, Homo sapiens
gcgaggctaggagag

SEQ ID NO: 279479 - DNA, 15 bp, Homo sapiens
agcgaggctaggaga

SEQ ID NO: 279480 - DNA, 15 bp, Homo sapiens
tagcgaggctaggag

SEQ ID NO: 279481 - DNA, 15 bp, Homo sapiens
gtagcgaggctagga

SEQ ID NO: 279482 - DNA, 15 bp, Homo sapiens
agtagcgaggctagg

SEQ ID NO: 279483 - DNA, 15 bp, Homo sapiens
cagtagcgaggctag

SEQ ID NO: 279484 - DNA, 15 bp, Homo sapiens
gcagtagcgaggcta

SEQ ID NO: 279485 - DNA, 15 bp, Homo sapiens
ggcagtagcgaggct

SEQ ID NO: 279486 - DNA, 15 bp, Homo sapiens
aggcagtagcgaggc

SEQ ID NO: 279487 - DNA, 15 bp, Homo sapiens
aaggcagtagcgagg

SEQ ID NO: 279488 - DNA, 15 bp, Homo sapiens
caaggcagtagcgag

SEQ ID NO: 279489 - DNA, 15 bp, Homo sapiens
gcaaggcagtagcga

SEQ ID NO: 279490 - DNA, 15 bp, Homo sapiens
tgcaaggcagtagcg

SEQ ID NO: 279491 - DNA, 15 bp, Homo sapiens
ctgcaaggcagtagc

SEQ ID NO: 279492 - DNA, 15 bp, Homo sapiens
actgcaaggcagtag

SEQ ID NO: 279493 - DNA, 15 bp, Homo sapiens
aactgcaaggcagta

SEQ ID NO: 279494 - DNA, 15 bp, Homo sapiens
aaactgcaaggcagt

SEQ ID NO: 279495 - DNA, 15 bp, Homo sapiens
caaactgcaaggcag

SEQ ID NO: 279496 - DNA, 15 bp, Homo sapiens
tcaaactgcaaggca

SEQ ID NO: 279497 - DNA, 15 bp, Homo sapiens
atcaaactgcaaggc

SEQ ID NO: 279498 - DNA, 15 bp, Homo sapiens
gatcaaactgcaagg

SEQ ID NO: 279499 - DNA, 15 bp, Homo sapiens
agatcaaactgcaag

SEQ ID NO: 279500 - DNA, 15 bp, Homo sapiens
gagatcaaactgcaa

SEQ ID NO: 279501 - DNA, 15 bp, Homo sapiens
tgagatcaaactgca

SEQ ID NO: 279502 - DNA, 15 bp, Homo sapiens
ctgagatcaaactgc

SEQ ID NO: 279503 - DNA, 15 bp, Homo sapiens
tctgagatcaaactg

SEQ ID NO: 279504 - DNA, 15 bp, Homo sapiens
gtctgagatcaaact

SEQ ID NO: 279505 - DNA, 15 bp, Homo sapiens
agtctgagatcaaac

SEQ ID NO: 279506 - DNA, 15 bp, Homo sapiens
cagtctgagatcaaa

SEQ ID NO: 279507 - DNA, 15 bp, Homo sapiens
gcagtctgagatcaa

SEQ ID NO: 279508 - DNA, 15 bp, Homo sapiens
agcagtctgagatca

SEQ ID NO: 279509 - DNA, 15 bp, Homo sapiens
cagcagtctgagatc

SEQ ID NO: 279510 - DNA, 15 bp, Homo sapiens
acagcagtctgagat

SEQ ID NO: 279511 - DNA, 15 bp, Homo sapiens
cacagcagtctgaga

SEQ ID NO: 279512 - DNA, 15 bp, Homo sapiens
gcacagcagtctgag

SEQ ID NO: 279513 - DNA, 15 bp, Homo sapiens
agcacagcagtctga

SEQ ID NO: 279514 - DNA, 15 bp, Homo sapiens
tagcacagcagtctg

SEQ ID NO: 279515 - DNA, 15 bp, Homo sapiens
ctagcacagcagtct

SEQ ID NO: 279516 - DNA, 15 bp, Homo sapiens
gctagcacagcagtc

SEQ ID NO: 279517 - DNA, 15 bp, Homo sapiens
tgctagcacagcagt

SEQ ID NO: 279518 - DNA, 15 bp, Homo sapiens
ttgctagcacagcag

SEQ ID NO: 279519 - DNA, 15 bp, Homo sapiens
attgctagcacagca

SEQ ID NO: 279520 - DNA, 15 bp, Homo sapiens
cattgctagcacagc

SEQ ID NO: 279521 - DNA, 15 bp, Homo sapiens
tcattgctagcacag

SEQ ID NO: 279522 - DNA, 15 bp, Homo sapiens
ctcattgctagcaca

SEQ ID NO: 279523 - DNA, 15 bp, Homo sapiens
gctcattgctagcac

SEQ ID NO: 279524 - DNA, 15 bp, Homo sapiens
cgctcattgctagca

SEQ ID NO: 279525 - DNA, 15 bp, Homo sapiens
tcgctcattgctagc

SEQ ID NO: 279526 - DNA, 15 bp, Homo sapiens
ctcgctcattgctag

SEQ ID NO: 279527 - DNA, 15 bp, Homo sapiens
cctcgctcattgcta

SEQ ID NO: 279528 - DNA, 15 bp, Homo sapiens
gcctcgctcattgct

SEQ ID NO: 279529 - DNA, 15 bp, Homo sapiens
agcctcgctcattgc

SEQ ID NO: 279530 - DNA, 15 bp, Homo sapiens
gagcctcgctcattg

SEQ ID NO: 279531 - DNA, 15 bp, Homo sapiens
ggagcctcgctcatt

SEQ ID NO: 279532 - DNA, 15 bp, Homo sapiens
cggagcctcgctcat

SEQ ID NO: 279533 - DNA, 15 bp, Homo sapiens
acggagcctcgctca

SEQ ID NO: 279534 - DNA, 15 bp, Homo sapiens
cacggagcctcgctc

SEQ ID NO: 279535 - DNA, 15 bp, Homo sapiens
ccacggagcctcgct

SEQ ID NO: 279536 - DNA, 15 bp, Homo sapiens
cccacggagcctcgc

SEQ ID NO: 279537 - DNA, 15 bp, Homo sapiens
acccacggagcctcg

SEQ ID NO: 279538 - DNA, 15 bp, Homo sapiens
cacccacggagcctc

SEQ ID NO: 279539 - DNA, 15 bp, Homo sapiens
acacccacggagcct

SEQ ID NO: 279540 - DNA, 15 bp, Homo sapiens
cacacccacggagcc

SEQ ID NO: 279541 - DNA, 15 bp, Homo sapiens
ccacacccacggagc

SEQ ID NO: 279542 - DNA, 15 bp, Homo sapiens
cccacacccacggag

SEQ ID NO: 279543 - DNA, 15 bp, Homo sapiens
tcccacacccacgga

SEQ ID NO: 279544 - DNA, 15 bp, Homo sapiens
gtcccacacccacgg

SEQ ID NO: 279545 - DNA, 15 bp, Homo sapiens
ggtcccacacccacg

SEQ ID NO: 279546 - DNA, 15 bp, Homo sapiens
gggtcccacacccac

SEQ ID NO: 279547 - DNA, 15 bp, Homo sapiens
agggtcccacaccca

SEQ ID NO: 279548 - DNA, 15 bp, Homo sapiens
gagggtcccacaccc

SEQ ID NO: 279549 - DNA, 15 bp, Homo sapiens
ggagggtcccacacc

SEQ ID NO: 279550 - DNA, 15 bp, Homo sapiens
cggagggtcccacac

SEQ ID NO: 279551 - DNA, 15 bp, Homo sapiens
tcggagggtcccaca

SEQ ID NO: 279552 - DNA, 15 bp, Homo sapiens
ctcggagggtcccac

SEQ ID NO: 279553 - DNA, 15 bp, Homo sapiens
gctcggagggtccca

SEQ ID NO: 279554 - DNA, 15 bp, Homo sapiens
ggctcggagggtccc

SEQ ID NO: 279555 - DNA, 15 bp, Homo sapiens
tggctcggagggtcc

SEQ ID NO: 279556 - DNA, 15 bp, Homo sapiens
ctggctcggagggtc

SEQ ID NO: 279557 - DNA, 15 bp, Homo sapiens
cctggctcggagggt

SEQ ID NO: 279558 - DNA, 15 bp, Homo sapiens
gcctggctcggaggg

SEQ ID NO: 279559 - DNA, 15 bp, Homo sapiens
tgcctggctcggagg

SEQ ID NO: 279560 - DNA, 15 bp, Homo sapiens
gtgcctggctcggag

SEQ ID NO: 279561 - DNA, 15 bp, Homo sapiens
tgtgcctggctcgga

SEQ ID NO: 279562 - DNA, 15 bp, Homo sapiens
ctgtgcctggctcgg

SEQ ID NO: 279563 - DNA, 15 bp, Homo sapiens
cctgtgcctggctcg

SEQ ID NO: 279564 - DNA, 15 bp, Homo sapiens
tcctgtgcctggctc

SEQ ID NO: 279565 - DNA, 15 bp, Homo sapiens
atcctgtgcctggct

SEQ ID NO: 279566 - DNA, 15 bp, Homo sapiens
tatcctgtgcctggc

SEQ ID NO: 279567 - DNA, 15 bp, Homo sapiens
atatcctgtgcctgg

SEQ ID NO: 279568 - DNA, 15 bp, Homo sapiens
tatatcctgtgcctg

SEQ ID NO: 279569 - DNA, 15 bp, Homo sapiens
ttatatcctgtgcct

SEQ ID NO: 279570 - DNA, 15 bp, Homo sapiens
attatatcctgtgcc

SEQ ID NO: 279571 - DNA, 15 bp, Homo sapiens
gattatatcctgtgc

SEQ ID NO: 279572 - DNA, 15 bp, Homo sapiens
agattatatcctgtg

SEQ ID NO: 279573 - DNA, 15 bp, Homo sapiens
gagattatatcctgt

SEQ ID NO: 279574 - DNA, 15 bp, Homo sapiens
ggagattatatcctg

SEQ ID NO: 279575 - DNA, 15 bp, Homo sapiens
aggagattatatcct

SEQ ID NO: 279576 - DNA, 15 bp, Homo sapiens
caggagattatatcc

SEQ ID NO: 279577 - DNA, 15 bp, Homo sapiens
ccaggagattatatc

SEQ ID NO: 279578 - DNA, 15 bp, Homo sapiens
accaggagattatat

SEQ ID NO: 279579 - DNA, 15 bp, Homo sapiens
caccaggagattata

SEQ ID NO: 279580 - DNA, 15 bp, Homo sapiens
acaccaggagattat

SEQ ID NO: 279581 - DNA, 15 bp, Homo sapiens
cacaccaggagatta

SEQ ID NO: 279582 - DNA, 15 bp, Homo sapiens
gcacaccaggagatt

SEQ ID NO: 279583 - DNA, 15 bp, Homo sapiens
agcacaccaggagat

SEQ ID NO: 279584 - DNA, 15 bp, Homo sapiens
cagcacaccaggaga

SEQ ID NO: 279585 - DNA, 15 bp, Homo sapiens
acagcacaccaggag

SEQ ID NO: 279586 - DNA, 15 bp, Homo sapiens
aacagcacaccagga

SEQ ID NO: 279587 - DNA, 15 bp, Homo sapiens
aaacagcacaccagg

SEQ ID NO: 279588 - DNA, 15 bp, Homo sapiens
caaacagcacaccag

SEQ ID NO: 279589 - DNA, 15 bp, Homo sapiens
gcaaacagcacacca

SEQ ID NO: 279590 - DNA, 15 bp, Homo sapiens
agcaaacagcacacc

SEQ ID NO: 279591 - DNA, 15 bp, Homo sapiens
cagcaaacagcacac

SEQ ID NO: 279592 - DNA, 15 bp, Homo sapiens
tcagcaaacagcaca

SEQ ID NO: 279593 - DNA, 15 bp, Homo sapiens
ctcagcaaacagcac

SEQ ID NO: 279594 - DNA, 15 bp, Homo sapiens
tctcagcaaacagca

SEQ ID NO: 279595 - DNA, 15 bp, Homo sapiens
gtctcagcaaacagc

SEQ ID NO: 279596 - DNA, 15 bp, Homo sapiens
ggtctcagcaaacag

SEQ ID NO: 279597 - DNA, 15 bp, Homo sapiens
tggtctcagcaaaca

SEQ ID NO: 279598 - DNA, 15 bp, Homo sapiens
atggtctcagcaaac

SEQ ID NO: 279599 - DNA, 15 bp, Homo sapiens
aatggtctcagcaaa

SEQ ID NO: 279600 - DNA, 15 bp, Homo sapiens
caatggtctcagcaa

SEQ ID NO: 279601 - DNA, 15 bp, Homo sapiens
ccaatggtctcagca

SEQ ID NO: 279602 - DNA, 15 bp, Homo sapiens
tccaatggtctcagc

SEQ ID NO: 279603 - DNA, 15 bp, Homo sapiens
ttccaatggtctcag

SEQ ID NO: 279604 - DNA, 15 bp, Homo sapiens
tttccaatggtctca

SEQ ID NO: 279605 - DNA, 15 bp, Homo sapiens
ttttccaatggtctc

SEQ ID NO: 279606 - DNA, 15 bp, Homo sapiens
cttttccaatggtct

SEQ ID NO: 279607 - DNA, 15 bp, Homo sapiens
gcttttccaatggtc

SEQ ID NO: 279608 - DNA, 15 bp, Homo sapiens
cgcttttccaatggt

SEQ ID NO: 279609 - DNA, 15 bp, Homo sapiens
gcgcttttccaatgg

SEQ ID NO: 279610 - DNA, 15 bp, Homo sapiens
tgcgcttttccaatg

SEQ ID NO: 279611 - DNA, 15 bp, Homo sapiens
ctgcgcttttccaat

SEQ ID NO: 279612 - DNA, 15 bp, Homo sapiens
actgcgcttttccaa

SEQ ID NO: 279613 - DNA, 15 bp, Homo sapiens
tactgcgcttttcca

SEQ ID NO: 279614 - DNA, 15 bp, Homo sapiens
atactgcgcttttcc

SEQ ID NO: 279615 - DNA, 15 bp, Homo sapiens
aatactgcgcttttc

SEQ ID NO: 279616 - DNA, 15 bp, Homo sapiens
taatactgcgctttt

SEQ ID NO: 279617 - DNA, 15 bp, Homo sapiens
ctaatactgcgcttt

SEQ ID NO: 279618 - DNA, 15 bp, Homo sapiens
cctaatactgcgctt

SEQ ID NO: 279619 - DNA, 15 bp, Homo sapiens
ccctaatactgcgct

SEQ ID NO: 279620 - DNA, 15 bp, Homo sapiens
accctaatactgcgc

SEQ ID NO: 279621 - DNA, 15 bp, Homo sapiens
caccctaatactgcg

SEQ ID NO: 279622 - DNA, 15 bp, Homo sapiens
ccaccctaatactgc

SEQ ID NO: 279623 - DNA, 15 bp, Homo sapiens
cccaccctaatactg

SEQ ID NO: 279624 - DNA, 15 bp, Homo sapiens
tcccaccctaatact

SEQ ID NO: 279625 - DNA, 15 bp, Homo sapiens
ctcccaccctaatac

SEQ ID NO: 279626 - DNA, 15 bp, Homo sapiens
actcccaccctaata

SEQ ID NO: 279627 - DNA, 15 bp, Homo sapiens
cactcccaccctaat

SEQ ID NO: 279628 - DNA, 15 bp, Homo sapiens
tcactcccaccctaa

SEQ ID NO: 279629 - DNA, 15 bp, Homo sapiens
gtcactcccacccta

SEQ ID NO: 279630 - DNA, 15 bp, Homo sapiens
ggtcactcccaccct

SEQ ID NO: 279631 - DNA, 15 bp, Homo sapiens
gggtcactcccaccc

SEQ ID NO: 279632 - DNA, 15 bp, Homo sapiens
cgggtcactcccacc

SEQ ID NO: 279633 - DNA, 15 bp, Homo sapiens
tcgggtcactcccac

SEQ ID NO: 279634 - DNA, 15 bp, Homo sapiens
atcgggtcactccca

SEQ ID NO: 279635 - DNA, 15 bp, Homo sapiens
aatcgggtcactccc

SEQ ID NO: 279636 - DNA, 15 bp, Homo sapiens
aaatcgggtcactcc

SEQ ID NO: 279637 - DNA, 15 bp, Homo sapiens
aaaatcgggtcactc

SEQ ID NO: 279638 - DNA, 15 bp, Homo sapiens
gaaaatcgggtcact

SEQ ID NO: 279639 - DNA, 15 bp, Homo sapiens
ggaaaatcgggtcac

SEQ ID NO: 279640 - DNA, 15 bp, Homo sapiens
tggaaaatcgggtca

SEQ ID NO: 279641 - DNA, 15 bp, Homo sapiens
ctggaaaatcgggtc

SEQ ID NO: 279642 - DNA, 15 bp, Homo sapiens
cctggaaaatcgggt

SEQ ID NO: 279643 - DNA, 15 bp, Homo sapiens
acctggaaaatcggg

SEQ ID NO: 279644 - DNA, 15 bp, Homo sapiens
cacctggaaaatcgg

SEQ ID NO: 279645 - DNA, 15 bp, Homo sapiens
gcacctggaaaatcg

SEQ ID NO: 279646 - DNA, 15 bp, Homo sapiens
ggcacctggaaaatc

SEQ ID NO: 279647 - DNA, 15 bp, Homo sapiens
tggcacctggaaaat

SEQ ID NO: 279648 - DNA, 15 bp, Homo sapiens
atggcacctggaaaa

SEQ ID NO: 279649 - DNA, 15 bp, Homo sapiens
gatggcacctggaaa

SEQ ID NO: 279650 - DNA, 15 bp, Homo sapiens
agatggcacctggaa

SEQ ID NO: 279651 - DNA, 15 bp, Homo sapiens
cagatggcacctgga

SEQ ID NO: 279652 - DNA, 15 bp, Homo sapiens
acagatggcacctgg

SEQ ID NO: 279653 - DNA, 15 bp, Homo sapiens
gacagatggcacctg

SEQ ID NO: 279654 - DNA, 15 bp, Homo sapiens
tgacagatggcacct

SEQ ID NO: 279655 - DNA, 15 bp, Homo sapiens
gtgacagatggcacc

SEQ ID NO: 279656 - DNA, 15 bp, Homo sapiens
tgtgacagatggcac

SEQ ID NO: 279657 - DNA, 15 bp, Homo sapiens
ctgtgacagatggca

SEQ ID NO: 279658 - DNA, 15 bp, Homo sapiens
gctgtgacagatggc

SEQ ID NO: 279659 - DNA, 15 bp, Homo sapiens
agctgtgacagatgg

SEQ ID NO: 279660 - DNA, 15 bp, Homo sapiens
aagctgtgacagatg

SEQ ID NO: 279661 - DNA, 15 bp, Homo sapiens
gaagctgtgacagat

SEQ ID NO: 279662 - DNA, 15 bp, Homo sapiens
ggaagctgtgacaga

SEQ ID NO: 279663 - DNA, 15 bp, Homo sapiens
gggaagctgtgacag

SEQ ID NO: 279664 - DNA, 15 bp, Homo sapiens
agggaagctgtgaca

SEQ ID NO: 279665 - DNA, 15 bp, Homo sapiens
aagggaagctgtgac

SEQ ID NO: 279666 - DNA, 15 bp, Homo sapiens
caagggaagctgtga

SEQ ID NO: 279667 - DNA, 15 bp, Homo sapiens
ccaagggaagctgtg

SEQ ID NO: 279668 - DNA, 15 bp, Homo sapiens
gccaagggaagctgt

SEQ ID NO: 279669 - DNA, 15 bp, Homo sapiens
agccaagggaagctg

SEQ ID NO: 279670 - DNA, 15 bp, Homo sapiens
tagccaagggaagct

SEQ ID NO: 279671 - DNA, 15 bp, Homo sapiens
ctagccaagggaagc

SEQ ID NO: 279672 - DNA, 15 bp, Homo sapiens
cctagccaagggaag

SEQ ID NO: 279673 - DNA, 15 bp, Homo sapiens
tcctagccaagggaa

SEQ ID NO: 279674 - DNA, 15 bp, Homo sapiens
ttcctagccaaggga

SEQ ID NO: 279675 - DNA, 15 bp, Homo sapiens
tttcctagccaaggg

SEQ ID NO: 279676 - DNA, 15 bp, Homo sapiens
ctttcctagccaagg

SEQ ID NO: 279677 - DNA, 15 bp, Homo sapiens
cctttcctagccaag

SEQ ID NO: 279678 - DNA, 15 bp, Homo sapiens
ccctttcctagccaa

SEQ ID NO: 279679 - DNA, 15 bp, Homo sapiens
tccctttcctagcca

SEQ ID NO: 279680 - DNA, 15 bp, Homo sapiens
ttccctttcctagcc

SEQ ID NO: 279681 - DNA, 15 bp, Homo sapiens
attccctttcctagc

SEQ ID NO: 279682 - DNA, 15 bp, Homo sapiens
aattccctttcctag

SEQ ID NO: 279683 - DNA, 15 bp, Homo sapiens
gaattccctttccta

SEQ ID NO: 279684 - DNA, 15 bp, Homo sapiens
ggaattccctttcct

SEQ ID NO: 279685 - DNA, 15 bp, Homo sapiens
cggaattccctttcc

SEQ ID NO: 279686 - DNA, 15 bp, Homo sapiens
acggaattccctttc

SEQ ID NO: 279687 - DNA, 15 bp, Homo sapiens
cacggaattcccttt

SEQ ID NO: 279688 - DNA, 15 bp, Homo sapiens
tcacggaattccctt

SEQ ID NO: 279689 - DNA, 15 bp, Homo sapiens
gtcacggaattccct

SEQ ID NO: 279690 - DNA, 15 bp, Homo sapiens
ggtcacggaattccc

SEQ ID NO: 279691 - DNA, 15 bp, Homo sapiens
gggtcacggaattcc

SEQ ID NO: 279692 - DNA, 15 bp, Homo sapiens
ggggtcacggaattc

SEQ ID NO: 279693 - DNA, 15 bp, Homo sapiens
gggggtcacggaatt

SEQ ID NO: 279694 - DNA, 15 bp, Homo sapiens
agggggtcacggaat

SEQ ID NO: 279695 - DNA, 15 bp, Homo sapiens
cagggggtcacggaa

SEQ ID NO: 279696 - DNA, 15 bp, Homo sapiens
acagggggtcacgga

SEQ ID NO: 279697 - DNA, 15 bp, Homo sapiens
cacagggggtcacgg

SEQ ID NO: 279698 - DNA, 15 bp, Homo sapiens
gcacagggggtcacg

SEQ ID NO: 279699 - DNA, 15 bp, Homo sapiens
agcacagggggtcac

SEQ ID NO: 279700 - DNA, 15 bp, Homo sapiens
aagcacagggggtca

SEQ ID NO: 279701 - DNA, 15 bp, Homo sapiens
gaagcacagggggtc

SEQ ID NO: 279702 - DNA, 15 bp, Homo sapiens
ggaagcacagggggt

SEQ ID NO: 279703 - DNA, 15 bp, Homo sapiens
gggaagcacaggggg

SEQ ID NO: 279704 - DNA, 15 bp, Homo sapiens
tgggaagcacagggg

SEQ ID NO: 279705 - DNA, 15 bp, Homo sapiens
ctgggaagcacaggg

SEQ ID NO: 279706 - DNA, 15 bp, Homo sapiens
cctgggaagcacagg

SEQ ID NO: 279707 - DNA, 15 bp, Homo sapiens
acctgggaagcacag

SEQ ID NO: 279708 - DNA, 15 bp, Homo sapiens
cacctgggaagcaca

SEQ ID NO: 279709 - DNA, 15 bp, Homo sapiens
tcacctgggaagcac

SEQ ID NO: 279710 - DNA, 15 bp, Homo sapiens
ctcacctgggaagca

SEQ ID NO: 279711 - DNA, 15 bp, Homo sapiens
cctcacctgggaagc

SEQ ID NO: 279712 - DNA, 15 bp, Homo sapiens
acctcacctgggaag

SEQ ID NO: 279713 - DNA, 15 bp, Homo sapiens
cacctcacctgggaa

SEQ ID NO: 279714 - DNA, 15 bp, Homo sapiens
tcacctcacctggga

SEQ ID NO: 279715 - DNA, 15 bp, Homo sapiens
atcacctcacctggg

SEQ ID NO: 279716 - DNA, 15 bp, Homo sapiens
catcacctcacctgg

SEQ ID NO: 279717 - DNA, 15 bp, Homo sapiens
gcatcacctcacctg

SEQ ID NO: 279718 - DNA, 15 bp, Homo sapiens
ggcatcacctcacct

SEQ ID NO: 279719 - DNA, 15 bp, Homo sapiens
aggcatcacctcacc

SEQ ID NO: 279720 - DNA, 15 bp, Homo sapiens
gaggcatcacctcac

SEQ ID NO: 279721 - DNA, 15 bp, Homo sapiens
cgaggcatcacctca

SEQ ID NO: 279722 - DNA, 15 bp, Homo sapiens
gcgaggcatcacctc

SEQ ID NO: 279723 - DNA, 15 bp, Homo sapiens
ggcgaggcatcacct

SEQ ID NO: 279724 - DNA, 15 bp, Homo sapiens
gggcgaggcatcacc

SEQ ID NO: 279725 - DNA, 15 bp, Homo sapiens
agggcgaggcatcac

SEQ ID NO: 279726 - DNA, 15 bp, Homo sapiens
cagggcgaggcatca

SEQ ID NO: 279727 - DNA, 15 bp, Homo sapiens
gcagggcgaggcatc

SEQ ID NO: 279728 - DNA, 15 bp, Homo sapiens
agcagggcgaggcat

SEQ ID NO: 279729 - DNA, 15 bp, Homo sapiens
aagcagggcgaggca

SEQ ID NO: 279730 - DNA, 15 bp, Homo sapiens
aaagcagggcgaggc

SEQ ID NO: 279731 - DNA, 15 bp, Homo sapiens
caaagcagggcgagg

SEQ ID NO: 279732 - DNA, 15 bp, Homo sapiens
ccaaagcagggcgag

SEQ ID NO: 279733 - DNA, 15 bp, Homo sapiens
gccaaagcagggcga

SEQ ID NO: 279734 - DNA, 15 bp, Homo sapiens
agccaaagcagggcg

SEQ ID NO: 279735 - DNA, 15 bp, Homo sapiens
gagccaaagcagggc

SEQ ID NO: 279736 - DNA, 15 bp, Homo sapiens
tgagccaaagcaggg

SEQ ID NO: 279737 - DNA, 15 bp, Homo sapiens
gtgagccaaagcagg

SEQ ID NO: 279738 - DNA, 15 bp, Homo sapiens
tgtgagccaaagcag

SEQ ID NO: 279739 - DNA, 15 bp, Homo sapiens
gtgtgagccaaagca

SEQ ID NO: 279740 - DNA, 15 bp, Homo sapiens
agtgtgagccaaagc

SEQ ID NO: 279741 - DNA, 15 bp, Homo sapiens
aagtgtgagccaaag

SEQ ID NO: 279742 - DNA, 15 bp, Homo sapiens
caagtgtgagccaaa

SEQ ID NO: 279743 - DNA, 15 bp, Homo sapiens
ccaagtgtgagccaa

SEQ ID NO: 279744 - DNA, 15 bp, Homo sapiens
accaagtgtgagcca

SEQ ID NO: 279745 - DNA, 15 bp, Homo sapiens
aaccaagtgtgagcc

SEQ ID NO: 279746 - DNA, 15 bp, Homo sapiens
caaccaagtgtgagc

SEQ ID NO: 279747 - DNA, 15 bp, Homo sapiens
ccaaccaagtgtgag

SEQ ID NO: 279748 - DNA, 15 bp, Homo sapiens
gccaaccaagtgtga

SEQ ID NO: 279749 - DNA, 15 bp, Homo sapiens
agccaaccaagtgtg

SEQ ID NO: 279750 - DNA, 15 bp, Homo sapiens
cagccaaccaagtgt

SEQ ID NO: 279751 - DNA, 15 bp, Homo sapiens
gcagccaaccaagtg

SEQ ID NO: 279752 - DNA, 15 bp, Homo sapiens
tgcagccaaccaagt

SEQ ID NO: 279753 - DNA, 15 bp, Homo sapiens
gtgcagccaaccaag

SEQ ID NO: 279754 - DNA, 15 bp, Homo sapiens
agtgcagccaaccaa

SEQ ID NO: 279755 - DNA, 15 bp, Homo sapiens
gagtgcagccaacca

SEQ ID NO: 279756 - DNA, 15 bp, Homo sapiens
tgagtgcagccaacc

SEQ ID NO: 279757 - DNA, 15 bp, Homo sapiens
gtgagtgcagccaac

SEQ ID NO: 279758 - DNA, 15 bp, Homo sapiens
agtgagtgcagccaa

SEQ ID NO: 279759 - DNA, 15 bp, Homo sapiens
aagtgagtgcagcca

SEQ ID NO: 279760 - DNA, 15 bp, Homo sapiens
aaagtgagtgcagcc

SEQ ID NO: 279761 - DNA, 15 bp, Homo sapiens
gaaagtgagtgcagc

SEQ ID NO: 279762 - DNA, 15 bp, Homo sapiens
ggaaagtgagtgcag

SEQ ID NO: 279763 - DNA, 15 bp, Homo sapiens
aggaaagtgagtgca

SEQ ID NO: 279764 - DNA, 15 bp, Homo sapiens
caggaaagtgagtgc

SEQ ID NO: 279765 - DNA, 15 bp, Homo sapiens
gcaggaaagtgagtg

SEQ ID NO: 279766 - DNA, 15 bp, Homo sapiens
tgcaggaaagtgagt

SEQ ID NO: 279767 - DNA, 15 bp, Homo sapiens
gtgcaggaaagtgag

SEQ ID NO: 279768 - DNA, 15 bp, Homo sapiens
ggtgcaggaaagtga

SEQ ID NO: 279769 - DNA, 15 bp, Homo sapiens
gggtgcaggaaagtg

SEQ ID NO: 279770 - DNA, 15 bp, Homo sapiens
tgggtgcaggaaagt

SEQ ID NO: 279771 - DNA, 15 bp, Homo sapiens
gtgggtgcaggaaag

SEQ ID NO: 279772 - DNA, 15 bp, Homo sapiens
agtgggtgcaggaaa

SEQ ID NO: 279773 - DNA, 15 bp, Homo sapiens
cagtgggtgcaggaa

SEQ ID NO: 279774 - DNA, 15 bp, Homo sapiens
acagtgggtgcagga

SEQ ID NO: 279775 - DNA, 15 bp, Homo sapiens
gacagtgggtgcagg

SEQ ID NO: 279776 - DNA, 15 bp, Homo sapiens
agacagtgggtgcag

SEQ ID NO: 279777 - DNA, 15 bp, Homo sapiens
cagacagtgggtgca

SEQ ID NO: 279778 - DNA, 15 bp, Homo sapiens
tcagacagtgggtgc

SEQ ID NO: 279779 - DNA, 15 bp, Homo sapiens
gtcagacagtgggtg

SEQ ID NO: 279780 - DNA, 15 bp, Homo sapiens
tgtcagacagtgggt

SEQ ID NO: 279781 - DNA, 15 bp, Homo sapiens
ttgtcagacagtggg

SEQ ID NO: 279782 - DNA, 15 bp, Homo sapiens
cttgtcagacagtgg

SEQ ID NO: 279783 - DNA, 15 bp, Homo sapiens
gcttgtcagacagtg

SEQ ID NO: 279784 - DNA, 15 bp, Homo sapiens
ggcttgtcagacagt

SEQ ID NO: 279785 - DNA, 15 bp, Homo sapiens
gggcttgtcagacag

SEQ ID NO: 279786 - DNA, 15 bp, Homo sapiens
ggggcttgtcagaca

SEQ ID NO: 279787 - DNA, 15 bp, Homo sapiens
tggggcttgtcagac

SEQ ID NO: 279788 - DNA, 15 bp, Homo sapiens
ctggggcttgtcaga

SEQ ID NO: 279789 - DNA, 15 bp, Homo sapiens
actggggcttgtcag

SEQ ID NO: 279790 - DNA, 15 bp, Homo sapiens
cactggggcttgtca

SEQ ID NO: 279791 - DNA, 15 bp, Homo sapiens
tcactggggcttgtc

SEQ ID NO: 279792 - DNA, 15 bp, Homo sapiens
ctcactggggcttgt

SEQ ID NO: 279793 - DNA, 15 bp, Homo sapiens
tctcactggggcttg

SEQ ID NO: 279794 - DNA, 15 bp, Homo sapiens
atctcactggggctt

SEQ ID NO: 279795 - DNA, 15 bp, Homo sapiens
catctcactggggct

SEQ ID NO: 279796 - DNA, 15 bp, Homo sapiens
tcatctcactggggc

SEQ ID NO: 279797 - DNA, 15 bp, Homo sapiens
ttcatctcactgggg

SEQ ID NO: 279798 - DNA, 15 bp, Homo sapiens
gttcatctcactggg

SEQ ID NO: 279799 - DNA, 15 bp, Homo sapiens
ggttcatctcactgg

SEQ ID NO: 279800 - DNA, 15 bp, Homo sapiens
aggttcatctcactg

SEQ ID NO: 279801 - DNA, 15 bp, Homo sapiens
caggttcatctcact

SEQ ID NO: 279802 - DNA, 15 bp, Homo sapiens
ccaggttcatctcac

SEQ ID NO: 279803 - DNA, 15 bp, Homo sapiens
accaggttcatctca

SEQ ID NO: 279804 - DNA, 15 bp, Homo sapiens
taccaggttcatctc

SEQ ID NO: 279805 - DNA, 15 bp, Homo sapiens
gtaccaggttcatct

SEQ ID NO: 279806 - DNA, 15 bp, Homo sapiens
ggtaccaggttcatc

SEQ ID NO: 279807 - DNA, 15 bp, Homo sapiens
aggtaccaggttcat

SEQ ID NO: 279808 - DNA, 15 bp, Homo sapiens
gaggtaccaggttca

SEQ ID NO: 279809 - DNA, 15 bp, Homo sapiens
tgaggtaccaggttc

SEQ ID NO: 279810 - DNA, 15 bp, Homo sapiens
ctgaggtaccaggtt

SEQ ID NO: 279811 - DNA, 15 bp, Homo sapiens
actgaggtaccaggt

SEQ ID NO: 279812 - DNA, 15 bp, Homo sapiens
aactgaggtaccagg

SEQ ID NO: 279813 - DNA, 15 bp, Homo sapiens
caactgaggtaccag

SEQ ID NO: 279814 - DNA, 15 bp, Homo sapiens
ccaactgaggtacca

SEQ ID NO: 279815 - DNA, 15 bp, Homo sapiens
tccaactgaggtacc

SEQ ID NO: 279816 - DNA, 15 bp, Homo sapiens
ttccaactgaggtac

SEQ ID NO: 279817 - DNA, 15 bp, Homo sapiens
tttccaactgaggta

SEQ ID NO: 279818 - DNA, 15 bp, Homo sapiens
atttccaactgaggt

SEQ ID NO: 279819 - DNA, 15 bp, Homo sapiens
catttccaactgagg

SEQ ID NO: 279820 - DNA, 15 bp, Homo sapiens
gcatttccaactgag

SEQ ID NO: 279821 - DNA, 15 bp, Homo sapiens
tgcatttccaactga

SEQ ID NO: 279822 - DNA, 15 bp, Homo sapiens
ttgcatttccaactg

SEQ ID NO: 279823 - DNA, 15 bp, Homo sapiens
tttgcatttccaact

SEQ ID NO: 279824 - DNA, 15 bp, Homo sapiens
ttttgcatttccaac

SEQ ID NO: 279825 - DNA, 15 bp, Homo sapiens
tttttgcatttccaa

SEQ ID NO: 279826 - DNA, 15 bp, Homo sapiens
atttttgcatttcca

SEQ ID NO: 279827 - DNA, 15 bp, Homo sapiens
gatttttgcatttcc

SEQ ID NO: 279828 - DNA, 15 bp, Homo sapiens
tgatttttgcatttc

SEQ ID NO: 279829 - DNA, 15 bp, Homo sapiens
gtgatttttgcattt

SEQ ID NO: 279830 - DNA, 15 bp, Homo sapiens
ggtgatttttgcatt

SEQ ID NO: 279831 - DNA, 15 bp, Homo sapiens
aggtgatttttgcat

SEQ ID NO: 279832 - DNA, 15 bp, Homo sapiens
caggtgatttttgca

SEQ ID NO: 279833 - DNA, 15 bp, Homo sapiens
acaggtgatttttgc

SEQ ID NO: 279834 - DNA, 15 bp, Homo sapiens
gacaggtgatttttg

SEQ ID NO: 279835 - DNA, 15 bp, Homo sapiens
agacaggtgattttt

SEQ ID NO: 279836 - DNA, 15 bp, Homo sapiens
aagacaggtgatttt

SEQ ID NO: 279837 - DNA, 15 bp, Homo sapiens
gaagacaggtgattt

SEQ ID NO: 279838 - DNA, 15 bp, Homo sapiens
agaagacaggtgatt

SEQ ID NO: 279839 - DNA, 15 bp, Homo sapiens
cagaagacaggtgat

SEQ ID NO: 279840 - DNA, 15 bp, Homo sapiens
gcagaagacaggtga

SEQ ID NO: 279841 - DNA, 15 bp, Homo sapiens
tgcagaagacaggtg

SEQ ID NO: 279842 - DNA, 15 bp, Homo sapiens
atgcagaagacaggt

SEQ ID NO: 279843 - DNA, 15 bp, Homo sapiens
gatgcagaagacagg

SEQ ID NO: 279844 - DNA, 15 bp, Homo sapiens
cgatgcagaagacag

SEQ ID NO: 279845 - DNA, 15 bp, Homo sapiens
gcgatgcagaagaca

SEQ ID NO: 279846 - DNA, 15 bp, Homo sapiens
agcgatgcagaagac

SEQ ID NO: 279847 - DNA, 15 bp, Homo sapiens
gagcgatgcagaaga

SEQ ID NO: 279848 - DNA, 15 bp, Homo sapiens
tgagcgatgcagaag

SEQ ID NO: 279849 - DNA, 15 bp, Homo sapiens
gtgagcgatgcagaa

SEQ ID NO: 279850 - DNA, 15 bp, Homo sapiens
tgtgagcgatgcaga

SEQ ID NO: 279851 - DNA, 15 bp, Homo sapiens
gtgtgagcgatgcag

SEQ ID NO: 279852 - DNA, 15 bp, Homo sapiens
agtgtgagcgatgca

SEQ ID NO: 279853 - DNA, 15 bp, Homo sapiens
cagtgtgagcgatgc

SEQ ID NO: 279854 - DNA, 15 bp, Homo sapiens
ccagtgtgagcgatg

SEQ ID NO: 279855 - DNA, 15 bp, Homo sapiens
cccagtgtgagcgat

SEQ ID NO: 279856 - DNA, 15 bp, Homo sapiens
tcccagtgtgagcga

SEQ ID NO: 279857 - DNA, 15 bp, Homo sapiens
ctcccagtgtgagcg

SEQ ID NO: 279858 - DNA, 15 bp, Homo sapiens
gctcccagtgtgagc

SEQ ID NO: 279859 - DNA, 15 bp, Homo sapiens
agctcccagtgtgag

SEQ ID NO: 279860 - DNA, 15 bp, Homo sapiens
cagctcccagtgtga

SEQ ID NO: 279861 - DNA, 15 bp, Homo sapiens
acagctcccagtgtg

SEQ ID NO: 279862 - DNA, 15 bp, Homo sapiens
tacagctcccagtgt

SEQ ID NO: 279863 - DNA, 15 bp, Homo sapiens
ctacagctcccagtg

SEQ ID NO: 279864 - DNA, 15 bp, Homo sapiens
tctacagctcccagt

SEQ ID NO: 279865 - DNA, 15 bp, Homo sapiens
gtctacagctcccag

SEQ ID NO: 279866 - DNA, 15 bp, Homo sapiens
agtctacagctccca

SEQ ID NO: 279867 - DNA, 15 bp, Homo sapiens
cagtctacagctccc

SEQ ID NO: 279868 - DNA, 15 bp, Homo sapiens
ccagtctacagctcc

SEQ ID NO: 279869 - DNA, 15 bp, Homo sapiens
tccagtctacagctc

SEQ ID NO: 279870 - DNA, 15 bp, Homo sapiens
ctccagtctacagct

SEQ ID NO: 279871 - DNA, 15 bp, Homo sapiens
gctccagtctacagc

SEQ ID NO: 279872 - DNA, 15 bp, Homo sapiens
agctccagtctacag

SEQ ID NO: 279873 - DNA, 15 bp, Homo sapiens
aagctccagtctaca

SEQ ID NO: 279874 - DNA, 15 bp, Homo sapiens
aaagctccagtctac

SEQ ID NO: 279875 - DNA, 15 bp, Homo sapiens
aaaagctccagtcta

SEQ ID NO: 279876 - DNA, 15 bp, Homo sapiens
gaaaagctccagtct

SEQ ID NO: 279877 - DNA, 15 bp, Homo sapiens
ggaaaagctccagtc

SEQ ID NO: 279878 - DNA, 15 bp, Homo sapiens
aggaaaagctccagt

SEQ ID NO: 279879 - DNA, 15 bp, Homo sapiens
taggaaaagctccag

SEQ ID NO: 279880 - DNA, 15 bp, Homo sapiens
ataggaaaagctcca

SEQ ID NO: 279881 - DNA, 15 bp, Homo sapiens
aataggaaaagctcc

SEQ ID NO: 279882 - DNA, 15 bp, Homo sapiens
gaataggaaaagctc

SEQ ID NO: 279883 - DNA, 15 bp, Homo sapiens
cgaataggaaaagct

SEQ ID NO: 279884 - DNA, 15 bp, Homo sapiens
ccgaataggaaaagc

SEQ ID NO: 279885 - DNA, 15 bp, Homo sapiens
gccgaataggaaaag

SEQ ID NO: 279886 - DNA, 15 bp, Homo sapiens
ggccgaataggaaaa

SEQ ID NO: 279887 - DNA, 15 bp, Homo sapiens
tggccgaataggaaa

SEQ ID NO: 279888 - DNA, 15 bp, Homo sapiens
atggccgaataggaa

SEQ ID NO: 279889 - DNA, 15 bp, Homo sapiens
gatggccgaatagga

SEQ ID NO: 279890 - DNA, 15 bp, Homo sapiens
agatggccgaatagg

SEQ ID NO: 279891 - DNA, 15 bp, Homo sapiens
aagatggccgaatag

SEQ ID NO: 279892 - DNA, 15 bp, Homo sapiens
gaagatggccgaata

SEQ ID NO: 279893 - DNA, 15 bp, Homo sapiens
agaagatggccgaat

SEQ ID NO: 279894 - DNA, 15 bp, Homo sapiens
tagaagatggccgaa

SEQ ID NO: 279895 - DNA, 15 bp, Homo sapiens
ctagaagatggccga

SEQ ID NO: 279896 - DNA, 15 bp, Homo sapiens
actagaagatggccg

SEQ ID NO: 279897 - DNA, 15 bp, Homo sapiens
gactagaagatggcc

SEQ ID NO: 279898 - DNA, 15 bp, Homo sapiens
agactagaagatggc

SEQ ID NO: 279899 - DNA, 15 bp, Homo sapiens
aagactagaagatgg

SEQ ID NO: 279900 - DNA, 15 bp, Homo sapiens
aaagactagaagatg

SEQ ID NO: 279901 - DNA, 15 bp, Homo sapiens
taaagactagaagat

SEQ ID NO: 279902 - DNA, 15 bp, Homo sapiens
ttaaagactagaaga

SEQ ID NO: 279903 - DNA, 15 bp, Homo sapiens
attaaagactagaag

SEQ ID NO: 279904 - DNA, 15 bp, Homo sapiens
aattaaagactagaa

SEQ ID NO: 279905 - DNA, 15 bp, Homo sapiens
aaattaaagactaga

SEQ ID NO: 279906 - DNA, 15 bp, Homo sapiens
aaaattaaagactag

SEQ ID NO: 279907 - DNA, 15 bp, Homo sapiens
aaaaattaaagacta

SEQ ID NO: 279908 - DNA, 15 bp, Homo sapiens
gaaaaattaaagact

SEQ ID NO: 279909 - DNA, 15 bp, Homo sapiens
tgaaaaattaaagac

SEQ ID NO: 279910 - DNA, 15 bp, Homo sapiens
atgaaaaattaaaga

SEQ ID NO: 279911 - DNA, 15 bp, Homo sapiens
gatgaaaaattaaag

SEQ ID NO: 279912 - DNA, 15 bp, Homo sapiens
agatgaaaaattaaa

SEQ ID NO: 279913 - DNA, 15 bp, Homo sapiens
cagatgaaaaattaa

SEQ ID NO: 279914 - DNA, 15 bp, Homo sapiens
acagatgaaaaatta

SEQ ID NO: 279915 - DNA, 15 bp, Homo sapiens
tacagatgaaaaatt

SEQ ID NO: 279916 - DNA, 15 bp, Homo sapiens
atacagatgaaaaat

SEQ ID NO: 279917 - DNA, 15 bp, Homo sapiens
catacagatgaaaaa

SEQ ID NO: 279918 - DNA, 15 bp, Homo sapiens
tcatacagatgaaaa

SEQ ID NO: 279919 - DNA, 15 bp, Homo sapiens
atcatacagatgaaa

SEQ ID NO: 279920 - DNA, 15 bp, Homo sapiens
catcatacagatgaa

SEQ ID NO: 279921 - DNA, 15 bp, Homo sapiens
tcatcatacagatga

SEQ ID NO: 279922 - DNA, 15 bp, Homo sapiens
ctcatcatacagatg

SEQ ID NO: 279923 - DNA, 15 bp, Homo sapiens
tctcatcatacagat

SEQ ID NO: 279924 - DNA, 15 bp, Homo sapiens
ttctcatcatacaga

SEQ ID NO: 279925 - DNA, 15 bp, Homo sapiens
cttctcatcatacag

SEQ ID NO: 279926 - DNA, 15 bp, Homo sapiens
acttctcatcataca

SEQ ID NO: 279927 - DNA, 15 bp, Homo sapiens
cacttctcatcatac

SEQ ID NO: 279928 - DNA, 15 bp, Homo sapiens
tcacttctcatcata

SEQ ID NO: 279929 - DNA, 15 bp, Homo sapiens
ttcacttctcatcat

SEQ ID NO: 279930 - DNA, 15 bp, Homo sapiens
attcacttctcatca

SEQ ID NO: 279931 - DNA, 15 bp, Homo sapiens
gattcacttctcatc

SEQ ID NO: 279932 - DNA, 15 bp, Homo sapiens
ggattcacttctcat

SEQ ID NO: 279933 - DNA, 15 bp, Homo sapiens
tggattcacttctca

SEQ ID NO: 279934 - DNA, 15 bp, Homo sapiens
ttggattcacttctc

SEQ ID NO: 279935 - DNA, 15 bp, Homo sapiens
attggattcacttct

SEQ ID NO: 279936 - DNA, 15 bp, Homo sapiens
cattggattcacttc

SEQ ID NO: 279937 - DNA, 15 bp, Homo sapiens
tcattggattcactt

SEQ ID NO: 279938 - DNA, 15 bp, Homo sapiens
gtcattggattcact

SEQ ID NO: 279939 - DNA, 15 bp, Homo sapiens
agtcattggattcac

SEQ ID NO: 279940 - DNA, 15 bp, Homo sapiens
aagtcattggattca

SEQ ID NO: 279941 - DNA, 15 bp, Homo sapiens
aaagtcattggattc

SEQ ID NO: 279942 - DNA, 15 bp, Homo sapiens
aaaagtcattggatt

SEQ ID NO: 279943 - DNA, 15 bp, Homo sapiens
aaaaagtcattggat

SEQ ID NO: 279944 - DNA, 15 bp, Homo sapiens
aaaaaagtcattgga

SEQ ID NO: 279945 - DNA, 15 bp, Homo sapiens
taaaaaagtcattgg

SEQ ID NO: 279946 - DNA, 15 bp, Homo sapiens
ctaaaaaagtcattg

SEQ ID NO: 279947 - DNA, 15 bp, Homo sapiens
tctaaaaaagtcatt

SEQ ID NO: 279948 - DNA, 15 bp, Homo sapiens
atctaaaaaagtcat

SEQ ID NO: 279949 - DNA, 15 bp, Homo sapiens
aatctaaaaaagtca

SEQ ID NO: 279950 - DNA, 15 bp, Homo sapiens
caatctaaaaaagtc

SEQ ID NO: 279951 - DNA, 15 bp, Homo sapiens
tcaatctaaaaaagt

SEQ ID NO: 279952 - DNA, 15 bp, Homo sapiens
ttcaatctaaaaaag

SEQ ID NO: 279953 - DNA, 15 bp, Homo sapiens
tttcaatctaaaaaa

SEQ ID NO: 279954 - DNA, 15 bp, Homo sapiens
ttttcaatctaaaaa

SEQ ID NO: 279955 - DNA, 15 bp, Homo sapiens
tttttcaatctaaaa

SEQ ID NO: 279956 - DNA, 15 bp, Homo sapiens
atttttcaatctaaa

SEQ ID NO: 279957 - DNA, 15 bp, Homo sapiens
aatttttcaatctaa

SEQ ID NO: 279958 - DNA, 15 bp, Homo sapiens
aaatttttcaatcta

SEQ ID NO: 279959 - DNA, 15 bp, Homo sapiens
aaaatttttcaatct

SEQ ID NO: 279960 - DNA, 15 bp, Homo sapiens
caaaatttttcaatc

SEQ ID NO: 279961 - DNA, 15 bp, Homo sapiens
tcaaaatttttcaat

SEQ ID NO: 279962 - DNA, 15 bp, Homo sapiens
ttcaaaatttttcaa

SEQ ID NO: 279963 - DNA, 15 bp, Homo sapiens
attcaaaatttttca

SEQ ID NO: 279964 - DNA, 15 bp, Homo sapiens
gattcaaaatttttc

SEQ ID NO: 279965 - DNA, 15 bp, Homo sapiens
tgattcaaaattttt

SEQ ID NO: 279966 - DNA, 15 bp, Homo sapiens
ttgattcaaaatttt

SEQ ID NO: 279967 - DNA, 15 bp, Homo sapiens
tttgattcaaaattt

SEQ ID NO: 279968 - DNA, 15 bp, Homo sapiens
gtttgattcaaaatt

SEQ ID NO: 279969 - DNA, 15 bp, Homo sapiens
agtttgattcaaaat

SEQ ID NO: 279970 - DNA, 15 bp, Homo sapiens
gagtttgattcaaaa

SEQ ID NO: 279971 - DNA, 15 bp, Homo sapiens
tgagtttgattcaaa

SEQ ID NO: 279972 - DNA, 15 bp, Homo sapiens
ttgagtttgattcaa

SEQ ID NO: 279973 - DNA, 15 bp, Homo sapiens
gttgagtttgattca

SEQ ID NO: 279974 - DNA, 15 bp, Homo sapiens
agttgagtttgattc

SEQ ID NO: 279975 - DNA, 15 bp, Homo sapiens
tagttgagtttgatt

SEQ ID NO: 279976 - DNA, 15 bp, Homo sapiens
ttagttgagtttgat

SEQ ID NO: 279977 - DNA, 15 bp, Homo sapiens
tttagttgagtttga

SEQ ID NO: 279978 - DNA, 15 bp, Homo sapiens
ttttagttgagtttg

SEQ ID NO: 279979 - DNA, 15 bp, Homo sapiens
attttagttgagttt

SEQ ID NO: 279980 - DNA, 15 bp, Homo sapiens
cattttagttgagtt

SEQ ID NO: 279981 - DNA, 15 bp, Homo sapiens
tcattttagttgagt

SEQ ID NO: 279982 - DNA, 15 bp, Homo sapiens
ttcattttagttgag

SEQ ID NO: 279983 - DNA, 15 bp, Homo sapiens
gttcattttagttga

SEQ ID NO: 279984 - DNA, 15 bp, Homo sapiens
tgttcattttagttg

SEQ ID NO: 279985 - DNA, 15 bp, Homo sapiens
ttgttcattttagtt

SEQ ID NO: 279986 - DNA, 15 bp, Homo sapiens
tttgttcattttagt

SEQ ID NO: 279987 - DNA, 15 bp, Homo sapiens
ttttgttcattttag

SEQ ID NO: 279988 - DNA, 15 bp, Homo sapiens
attttgttcatttta

SEQ ID NO: 279989 - DNA, 15 bp, Homo sapiens
tattttgttcatttt

SEQ ID NO: 279990 - DNA, 15 bp, Homo sapiens
atattttgttcattt

SEQ ID NO: 279991 - DNA, 15 bp, Homo sapiens
tatattttgttcatt

SEQ ID NO: 279992 - DNA, 15 bp, Homo sapiens
atatattttgttcat

SEQ ID NO: 279993 - DNA, 15 bp, Homo sapiens
catatattttgttca

SEQ ID NO: 279994 - DNA, 15 bp, Homo sapiens
tcatatattttgttc

SEQ ID NO: 279995 - DNA, 15 bp, Homo sapiens
ttcatatattttgtt

SEQ ID NO: 279996 - DNA, 15 bp, Homo sapiens
tttcatatattttgt

SEQ ID NO: 279997 - DNA, 15 bp, Homo sapiens
gtttcatatattttg

SEQ ID NO: 279998 - DNA, 15 bp, Homo sapiens
agtttcatatatttt

SEQ ID NO: 279999 - DNA, 15 bp, Homo sapiens
tagtttcatatattt

SEQ ID NO: 280000 - DNA, 15 bp, Homo sapiens
gtagtttcatatatt

SEQ ID NO: 280001 - DNA, 15 bp, Homo sapiens
tgtagtttcatatat

SEQ ID NO: 280002 - DNA, 15 bp, Homo sapiens
ttgtagtttcatata

SEQ ID NO: 280003 - DNA, 15 bp, Homo sapiens
attgtagtttcatat

SEQ ID NO: 280004 - DNA, 15 bp, Homo sapiens
tattgtagtttcata

SEQ ID NO: 280005 - DNA, 15 bp, Homo sapiens
ttattgtagtttcat

SEQ ID NO: 280006 - DNA, 15 bp, Homo sapiens
attattgtagtttca

SEQ ID NO: 280007 - DNA, 15 bp, Homo sapiens
cattattgtagtttc

SEQ ID NO: 280008 - DNA, 15 bp, Homo sapiens
tcattattgtagttt

SEQ ID NO: 280009 - DNA, 15 bp, Homo sapiens
ttcattattgtagtt

SEQ ID NO: 280010 - DNA, 15 bp, Homo sapiens
cttcattattgtagt

SEQ ID NO: 280011 - DNA, 15 bp, Homo sapiens
tcttcattattgtag

SEQ ID NO: 280012 - DNA, 15 bp, Homo sapiens
gtcttcattattgta

SEQ ID NO: 280013 - DNA, 15 bp, Homo sapiens
cgtcttcattattgt

SEQ ID NO: 280014 - DNA, 15 bp, Homo sapiens
acgtcttcattattg

SEQ ID NO: 280015 - DNA, 15 bp, Homo sapiens
aacgtcttcattatt

SEQ ID NO: 280016 - DNA, 15 bp, Homo sapiens
taacgtcttcattat

SEQ ID NO: 280017 - DNA, 15 bp, Homo sapiens
ataacgtcttcatta

SEQ ID NO: 280018 - DNA, 15 bp, Homo sapiens
cataacgtcttcatt

SEQ ID NO: 280019 - DNA, 15 bp, Homo sapiens
tcataacgtcttcat

SEQ ID NO: 280020 - DNA, 15 bp, Homo sapiens
atcataacgtcttca

SEQ ID NO: 280021 - DNA, 15 bp, Homo sapiens
tatcataacgtcttc

SEQ ID NO: 280022 - DNA, 15 bp, Homo sapiens
atatcataacgtctt

SEQ ID NO: 280023 - DNA, 15 bp, Homo sapiens
aatatcataacgtct

SEQ ID NO: 280024 - DNA, 15 bp, Homo sapiens
caatatcataacgtc

SEQ ID NO: 280025 - DNA, 15 bp, Homo sapiens
ccaatatcataacgt

SEQ ID NO: 280026 - DNA, 15 bp, Homo sapiens
accaatatcataacg

SEQ ID NO: 280027 - DNA, 15 bp, Homo sapiens
caccaatatcataac

SEQ ID NO: 280028 - DNA, 15 bp, Homo sapiens
tcaccaatatcataa

SEQ ID NO: 280029 - DNA, 15 bp, Homo sapiens
ttcaccaatatcata

SEQ ID NO: 280030 - DNA, 15 bp, Homo sapiens
tttcaccaatatcat

SEQ ID NO: 280031 - DNA, 15 bp, Homo sapiens
ttttcaccaatatca

SEQ ID NO: 280032 - DNA, 15 bp, Homo sapiens
tttttcaccaatatc

SEQ ID NO: 280033 - DNA, 15 bp, Homo sapiens
ttttttcaccaatat

SEQ ID NO: 280034 - DNA, 15 bp, Homo sapiens
cttttttcaccaata

SEQ ID NO: 280035 - DNA, 15 bp, Homo sapiens
tcttttttcaccaat

SEQ ID NO: 280036 - DNA, 15 bp, Homo sapiens
gtcttttttcaccaa

SEQ ID NO: 280037 - DNA, 15 bp, Homo sapiens
tgtcttttttcacca

SEQ ID NO: 280038 - DNA, 15 bp, Homo sapiens
ttgtcttttttcacc

SEQ ID NO: 280039 - DNA, 15 bp, Homo sapiens
cttgtcttttttcac

SEQ ID NO: 280040 - DNA, 15 bp, Homo sapiens
acttgtcttttttca

SEQ ID NO: 280041 - DNA, 15 bp, Homo sapiens
tacttgtcttttttc

SEQ ID NO: 280042 - DNA, 15 bp, Homo sapiens
ttacttgtctttttt

SEQ ID NO: 280043 - DNA, 15 bp, Homo sapiens
tttacttgtcttttt

SEQ ID NO: 280044 - DNA, 15 bp, Homo sapiens
atttacttgtctttt

SEQ ID NO: 280045 - DNA, 15 bp, Homo sapiens
gatttacttgtcttt

SEQ ID NO: 280046 - DNA, 15 bp, Homo sapiens
tgatttacttgtctt

SEQ ID NO: 280047 - DNA, 15 bp, Homo sapiens
ttgatttacttgtct

SEQ ID NO: 280048 - DNA, 15 bp, Homo sapiens
attgatttacttgtc

SEQ ID NO: 280049 - DNA, 15 bp, Homo sapiens
cattgatttacttgt

SEQ ID NO: 280050 - DNA, 15 bp, Homo sapiens
ccattgatttacttg

SEQ ID NO: 280051 - DNA, 15 bp, Homo sapiens
tccattgatttactt

SEQ ID NO: 280052 - DNA, 15 bp, Homo sapiens
ttccattgatttact

SEQ ID NO: 280053 - DNA, 15 bp, Homo sapiens
gttccattgatttac

SEQ ID NO: 280054 - DNA, 15 bp, Homo sapiens
tgttccattgattta

SEQ ID NO: 280055 - DNA, 15 bp, Homo sapiens
ctgttccattgattt

SEQ ID NO: 280056 - DNA, 15 bp, Homo sapiens
tctgttccattgatt

SEQ ID NO: 280057 - DNA, 15 bp, Homo sapiens
ttctgttccattgat

SEQ ID NO: 280058 - DNA, 15 bp, Homo sapiens
gttctgttccattga

SEQ ID NO: 280059 - DNA, 15 bp, Homo sapiens
tgttctgttccattg

SEQ ID NO: 280060 - DNA, 15 bp, Homo sapiens
ctgttctgttccatt

SEQ ID NO: 280061 - DNA, 15 bp, Homo sapiens
tctgttctgttccat

SEQ ID NO: 280062 - DNA, 15 bp, Homo sapiens
atctgttctgttcca

SEQ ID NO: 280063 - DNA, 15 bp, Homo sapiens
tatctgttctgttcc

SEQ ID NO: 280064 - DNA, 15 bp, Homo sapiens
ttatctgttctgttc

SEQ ID NO: 280065 - DNA, 15 bp, Homo sapiens
attatctgttctgtt

SEQ ID NO: 280066 - DNA, 15 bp, Homo sapiens
gattatctgttctgt

SEQ ID NO: 280067 - DNA, 15 bp, Homo sapiens
ggattatctgttctg

SEQ ID NO: 280068 - DNA, 15 bp, Homo sapiens
tggattatctgttct

SEQ ID NO: 280069 - DNA, 15 bp, Homo sapiens
ctggattatctgttc

SEQ ID NO: 280070 - DNA, 15 bp, Homo sapiens
tctggattatctgtt

SEQ ID NO: 280071 - DNA, 15 bp, Homo sapiens
ttctggattatctgt

SEQ ID NO: 280072 - DNA, 15 bp, Homo sapiens
cttctggattatctg

SEQ ID NO: 280073 - DNA, 15 bp, Homo sapiens
acttctggattatct

SEQ ID NO: 280074 - DNA, 15 bp, Homo sapiens
tacttctggattatc

SEQ ID NO: 280075 - DNA, 15 bp, Homo sapiens
ctacttctggattat

SEQ ID NO: 280076 - DNA, 15 bp, Homo sapiens
tctacttctggatta

SEQ ID NO: 280077 - DNA, 15 bp, Homo sapiens
gtctacttctggatt

SEQ ID NO: 280078 - DNA, 15 bp, Homo sapiens
ggtctacttctggat

SEQ ID NO: 280079 - DNA, 15 bp, Homo sapiens
gggtctacttctgga

SEQ ID NO: 280080 - DNA, 15 bp, Homo sapiens
tgggtctacttctgg

SEQ ID NO: 280081 - DNA, 15 bp, Homo sapiens
gtgggtctacttctg

SEQ ID NO: 280082 - DNA, 15 bp, Homo sapiens
tgtgggtctacttct

SEQ ID NO: 280083 - DNA, 15 bp, Homo sapiens
atgtgggtctacttc

SEQ ID NO: 280084 - DNA, 15 bp, Homo sapiens
tatgtgggtctactt

SEQ ID NO: 280085 - DNA, 15 bp, Homo sapiens
atatgtgggtctact

SEQ ID NO: 280086 - DNA, 15 bp, Homo sapiens
tatatgtgggtctac

SEQ ID NO: 280087 - DNA, 15 bp, Homo sapiens
atatatgtgggtcta

SEQ ID NO: 280088 - DNA, 15 bp, Homo sapiens
tatatatgtgggtct

SEQ ID NO: 280089 - DNA, 15 bp, Homo sapiens
atatatatgtgggtc

SEQ ID NO: 280090 - DNA, 15 bp, Homo sapiens
tatatatatgtgggt

SEQ ID NO: 280091 - DNA, 15 bp, Homo sapiens
atatatatatgtggg

SEQ ID NO: 280092 - DNA, 15 bp, Homo sapiens
aatatatatatgtgg

SEQ ID NO: 280093 - DNA, 15 bp, Homo sapiens
taatatatatatgtg

SEQ ID NO: 280094 - DNA, 15 bp, Homo sapiens
ataatatatatatgt

SEQ ID NO: 280095 - DNA, 15 bp, Homo sapiens
aataatatatatatg

SEQ ID NO: 280096 - DNA, 15 bp, Homo sapiens
taataatatatatat

SEQ ID NO: 280097 - DNA, 15 bp, Homo sapiens
ataataatatatata

SEQ ID NO: 280098 - DNA, 15 bp, Homo sapiens
tataataatatatat

SEQ ID NO: 280099 - DNA, 15 bp, Homo sapiens
ttataataatatata

SEQ ID NO: 280100 - DNA, 15 bp, Homo sapiens
cttataataatatat

SEQ ID NO: 280101 - DNA, 15 bp, Homo sapiens
acttataataatata

SEQ ID NO: 280102 - DNA, 15 bp, Homo sapiens
aacttataataatat

SEQ ID NO: 280103 - DNA, 15 bp, Homo sapiens
gaacttataataata

SEQ ID NO: 280104 - DNA, 15 bp, Homo sapiens
tgaacttataataat

SEQ ID NO: 280105 - DNA, 15 bp, Homo sapiens
atgaacttataataa

SEQ ID NO: 280106 - DNA, 15 bp, Homo sapiens
aatgaacttataata

SEQ ID NO: 280107 - DNA, 15 bp, Homo sapiens
aaatgaacttataat

SEQ ID NO: 280108 - DNA, 15 bp, Homo sapiens
aaaatgaacttataa

SEQ ID NO: 280109 - DNA, 15 bp, Homo sapiens
gaaaatgaacttata

SEQ ID NO: 280110 - DNA, 15 bp, Homo sapiens
agaaaatgaacttat

SEQ ID NO: 280111 - DNA, 15 bp, Homo sapiens
tagaaaatgaactta

SEQ ID NO: 280112 - DNA, 15 bp, Homo sapiens
gtagaaaatgaactt

SEQ ID NO: 280113 - DNA, 15 bp, Homo sapiens
tgtagaaaatgaact

SEQ ID NO: 280114 - DNA, 15 bp, Homo sapiens
ctgtagaaaatgaac

SEQ ID NO: 280115 - DNA, 15 bp, Homo sapiens
tctgtagaaaatgaa

SEQ ID NO: 280116 - DNA, 15 bp, Homo sapiens
ctctgtagaaaatga

SEQ ID NO: 280117 - DNA, 15 bp, Homo sapiens
cctctgtagaaaatg

SEQ ID NO: 280118 - DNA, 15 bp, Homo sapiens
acctctgtagaaaat

SEQ ID NO: 280119 - DNA, 15 bp, Homo sapiens
cacctctgtagaaaa

SEQ ID NO: 280120 - DNA, 15 bp, Homo sapiens
gcacctctgtagaaa

SEQ ID NO: 280121 - DNA, 15 bp, Homo sapiens
cgcacctctgtagaa

SEQ ID NO: 280122 - DNA, 15 bp, Homo sapiens
tcgcacctctgtaga

SEQ ID NO: 280123 - DNA, 15 bp, Homo sapiens
ttcgcacctctgtag

SEQ ID NO: 280124 - DNA, 15 bp, Homo sapiens
cttcgcacctctgta

SEQ ID NO: 280125 - DNA, 15 bp, Homo sapiens
ccttcgcacctctgt

SEQ ID NO: 280126 - DNA, 15 bp, Homo sapiens
accttcgcacctctg

SEQ ID NO: 280127 - DNA, 15 bp, Homo sapiens
taccttcgcacctct

SEQ ID NO: 280128 - DNA, 15 bp, Homo sapiens
ttaccttcgcacctc

SEQ ID NO: 280129 - DNA, 15 bp, Homo sapiens
attaccttcgcacct

SEQ ID NO: 280130 - DNA, 15 bp, Homo sapiens
cattaccttcgcacc

SEQ ID NO: 280131 - DNA, 15 bp, Homo sapiens
ccattaccttcgcac

SEQ ID NO: 280132 - DNA, 15 bp, Homo sapiens
tccattaccttcgca

SEQ ID NO: 280133 - DNA, 15 bp, Homo sapiens
ctccattaccttcgc

SEQ ID NO: 280134 - DNA, 15 bp, Homo sapiens
cctccattaccttcg

SEQ ID NO: 280135 - DNA, 15 bp, Homo sapiens
tcctccattaccttc

SEQ ID NO: 280136 - DNA, 15 bp, Homo sapiens
ttcctccattacctt

SEQ ID NO: 280137 - DNA, 15 bp, Homo sapiens
cttcctccattacct

SEQ ID NO: 280138 - DNA, 15 bp, Homo sapiens
ccttcctccattacc

SEQ ID NO: 280139 - DNA, 15 bp, Homo sapiens
tccttcctccattac

SEQ ID NO: 280140 - DNA, 15 bp, Homo sapiens
atccttcctccatta

SEQ ID NO: 280141 - DNA, 15 bp, Homo sapiens
tatccttcctccatt

SEQ ID NO: 280142 - DNA, 15 bp, Homo sapiens
atatccttcctccat

SEQ ID NO: 280143 - DNA, 15 bp, Homo sapiens
aatatccttcctcca

SEQ ID NO: 280144 - DNA, 15 bp, Homo sapiens
gaatatccttcctcc

SEQ ID NO: 280145 - DNA, 15 bp, Homo sapiens
agaatatccttcctc

SEQ ID NO: 280146 - DNA, 15 bp, Homo sapiens
aagaatatccttcct

SEQ ID NO: 280147 - DNA, 15 bp, Homo sapiens
gaagaatatccttcc

SEQ ID NO: 280148 - DNA, 15 bp, Homo sapiens
agaagaatatccttc

SEQ ID NO: 280149 - DNA, 15 bp, Homo sapiens
gagaagaatatcctt

SEQ ID NO: 280150 - DNA, 15 bp, Homo sapiens
tgagaagaatatcct

SEQ ID NO: 280151 - DNA, 15 bp, Homo sapiens
ttgagaagaatatcc

SEQ ID NO: 280152 - DNA, 15 bp, Homo sapiens
gttgagaagaatatc

SEQ ID NO: 280153 - DNA, 15 bp, Homo sapiens
tgttgagaagaatat

SEQ ID NO: 280154 - DNA, 15 bp, Homo sapiens
ttgttgagaagaata

SEQ ID NO: 280155 - DNA, 15 bp, Homo sapiens
tttgttgagaagaat

SEQ ID NO: 280156 - DNA, 15 bp, Homo sapiens
atttgttgagaagaa

SEQ ID NO: 280157 - DNA, 15 bp, Homo sapiens
tatttgttgagaaga

SEQ ID NO: 280158 - DNA, 15 bp, Homo sapiens
ttatttgttgagaag

SEQ ID NO: 280159 - DNA, 15 bp, Homo sapiens
attatttgttgagaa

SEQ ID NO: 280160 - DNA, 15 bp, Homo sapiens
cattatttgttgaga

SEQ ID NO: 280161 - DNA, 15 bp, Homo sapiens
gcattatttgttgag

SEQ ID NO: 280162 - DNA, 15 bp, Homo sapiens
agcattatttgttga

SEQ ID NO: 280163 - DNA, 15 bp, Homo sapiens
cagcattatttgttg

SEQ ID NO: 280164 - DNA, 15 bp, Homo sapiens
ccagcattatttgtt

SEQ ID NO: 280165 - DNA, 15 bp, Homo sapiens
tccagcattatttgt

SEQ ID NO: 280166 - DNA, 15 bp, Homo sapiens
ctccagcattatttg

SEQ ID NO: 280167 - DNA, 15 bp, Homo sapiens
gctccagcattattt

SEQ ID NO: 280168 - DNA, 15 bp, Homo sapiens
tgctccagcattatt

SEQ ID NO: 280169 - DNA, 15 bp, Homo sapiens
ttgctccagcattat

SEQ ID NO: 280170 - DNA, 15 bp, Homo sapiens
attgctccagcatta

SEQ ID NO: 280171 - DNA, 15 bp, Homo sapiens
aattgctccagcatt

SEQ ID NO: 280172 - DNA, 15 bp, Homo sapiens
caattgctccagcat

SEQ ID NO: 280173 - DNA, 15 bp, Homo sapiens
ccaattgctccagca

SEQ ID NO: 280174 - DNA, 15 bp, Homo sapiens
cccaattgctccagc

SEQ ID NO: 280175 - DNA, 15 bp, Homo sapiens
acccaattgctccag

SEQ ID NO: 280176 - DNA, 15 bp, Homo sapiens
tacccaattgctcca

SEQ ID NO: 280177 - DNA, 15 bp, Homo sapiens
atacccaattgctcc

SEQ ID NO: 280178 - DNA, 15 bp, Homo sapiens
gatacccaattgctc

SEQ ID NO: 280179 - DNA, 15 bp, Homo sapiens
ggatacccaattgct

SEQ ID NO: 280180 - DNA, 15 bp, Homo sapiens
tggatacccaattgc

SEQ ID NO: 280181 - DNA, 15 bp, Homo sapiens
ttggatacccaattg

SEQ ID NO: 280182 - DNA, 15 bp, Homo sapiens
tttggatacccaatt

SEQ ID NO: 280183 - DNA, 15 bp, Homo sapiens
atttggatacccaat

SEQ ID NO: 280184 - DNA, 15 bp, Homo sapiens
catttggatacccaa

SEQ ID NO: 280185 - DNA, 15 bp, Homo sapiens
gcatttggataccca

SEQ ID NO: 280186 - DNA, 15 bp, Homo sapiens
tgcatttggataccc

SEQ ID NO: 280187 - DNA, 15 bp, Homo sapiens
ctgcatttggatacc

SEQ ID NO: 280188 - DNA, 15 bp, Homo sapiens
tctgcatttggatac

SEQ ID NO: 280189 - DNA, 15 bp, Homo sapiens
ttctgcatttggata

SEQ ID NO: 280190 - DNA, 15 bp, Homo sapiens
tttctgcatttggat

SEQ ID NO: 280191 - DNA, 15 bp, Homo sapiens
ttttctgcatttgga

SEQ ID NO: 280192 - DNA, 15 bp, Homo sapiens
attttctgcatttgg

SEQ ID NO: 280193 - DNA, 15 bp, Homo sapiens
cattttctgcatttg

SEQ ID NO: 280194 - DNA, 15 bp, Homo sapiens
tcattttctgcattt

SEQ ID NO: 280195 - DNA, 15 bp, Homo sapiens
ttcattttctgcatt

SEQ ID NO: 280196 - DNA, 15 bp, Homo sapiens
gttcattttctgcat

SEQ ID NO: 280197 - DNA, 15 bp, Homo sapiens
agttcattttctgca

SEQ ID NO: 280198 - DNA, 15 bp, Homo sapiens
aagttcattttctgc

SEQ ID NO: 280199 - DNA, 15 bp, Homo sapiens
gaagttcattttctg

SEQ ID NO: 280200 - DNA, 15 bp, Homo sapiens
tgaagttcattttct

SEQ ID NO: 280201 - DNA, 15 bp, Homo sapiens
ttgaagttcattttc

SEQ ID NO: 280202 - DNA, 15 bp, Homo sapiens
attgaagttcatttt

SEQ ID NO: 280203 - DNA, 15 bp, Homo sapiens
gattgaagttcattt

SEQ ID NO: 280204 - DNA, 15 bp, Homo sapiens
ggattgaagttcatt

SEQ ID NO: 280205 - DNA, 15 bp, Homo sapiens
aggattgaagttcat

SEQ ID NO: 280206 - DNA, 15 bp, Homo sapiens
aaggattgaagttca

SEQ ID NO: 280207 - DNA, 15 bp, Homo sapiens
taaggattgaagttc

SEQ ID NO: 280208 - DNA, 15 bp, Homo sapiens
gtaaggattgaagtt

SEQ ID NO: 280209 - DNA, 15 bp, Homo sapiens
ggtaaggattgaagt

SEQ ID NO: 280210 - DNA, 15 bp, Homo sapiens
aggtaaggattgaag

SEQ ID NO: 280211 - DNA, 15 bp, Homo sapiens
gaggtaaggattgaa

SEQ ID NO: 280212 - DNA, 15 bp, Homo sapiens
tgaggtaaggattga

SEQ ID NO: 280213 - DNA, 15 bp, Homo sapiens
gtgaggtaaggattg

SEQ ID NO: 280214 - DNA, 15 bp, Homo sapiens
tgtgaggtaaggatt

SEQ ID NO: 280215 - DNA, 15 bp, Homo sapiens
gtgtgaggtaaggat

SEQ ID NO: 280216 - DNA, 15 bp, Homo sapiens
ggtgtgaggtaagga

SEQ ID NO: 280217 - DNA, 15 bp, Homo sapiens
tggtgtgaggtaagg

SEQ ID NO: 280218 - DNA, 15 bp, Homo sapiens
atggtgtgaggtaag

SEQ ID NO: 280219 - DNA, 15 bp, Homo sapiens
aatggtgtgaggtaa

SEQ ID NO: 280220 - DNA, 15 bp, Homo sapiens
aaatggtgtgaggta

SEQ ID NO: 280221 - DNA, 15 bp, Homo sapiens
taaatggtgtgaggt

SEQ ID NO: 280222 - DNA, 15 bp, Homo sapiens
ataaatggtgtgagg

SEQ ID NO: 280223 - DNA, 15 bp, Homo sapiens
tataaatggtgtgag

SEQ ID NO: 280224 - DNA, 15 bp, Homo sapiens
ttataaatggtgtga

SEQ ID NO: 280225 - DNA, 15 bp, Homo sapiens
tttataaatggtgtg

SEQ ID NO: 280226 - DNA, 15 bp, Homo sapiens
ttttataaatggtgt

SEQ ID NO: 280227 - DNA, 15 bp, Homo sapiens
tttttataaatggtg

SEQ ID NO: 280228 - DNA, 15 bp, Homo sapiens
gtttttataaatggt

SEQ ID NO: 280229 - DNA, 15 bp, Homo sapiens
agtttttataaatgg

SEQ ID NO: 280230 - DNA, 15 bp, Homo sapiens
tagtttttataaatg

SEQ ID NO: 280231 - DNA, 15 bp, Homo sapiens
ttagtttttataaat

SEQ ID NO: 280232 - DNA, 15 bp, Homo sapiens
gttagtttttataaa

SEQ ID NO: 280233 - DNA, 15 bp, Homo sapiens
ggttagtttttataa

SEQ ID NO: 280234 - DNA, 15 bp, Homo sapiens
tggttagtttttata

SEQ ID NO: 280235 - DNA, 15 bp, Homo sapiens
ctggttagtttttat

SEQ ID NO: 280236 - DNA, 15 bp, Homo sapiens
tctggttagttttta

SEQ ID NO: 280237 - DNA, 15 bp, Homo sapiens
ttctggttagttttt

SEQ ID NO: 280238 - DNA, 15 bp, Homo sapiens
tttctggttagtttt

SEQ ID NO: 280239 - DNA, 15 bp, Homo sapiens
atttctggttagttt

SEQ ID NO: 280240 - DNA, 15 bp, Homo sapiens
catttctggttagtt

SEQ ID NO: 280241 - DNA, 15 bp, Homo sapiens
tcatttctggttagt

SEQ ID NO: 280242 - DNA, 15 bp, Homo sapiens
ttcatttctggttag

SEQ ID NO: 280243 - DNA, 15 bp, Homo sapiens
cttcatttctggtta

SEQ ID NO: 280244 - DNA, 15 bp, Homo sapiens
gcttcatttctggtt

SEQ ID NO: 280245 - DNA, 15 bp, Homo sapiens
tgcttcatttctggt

SEQ ID NO: 280246 - DNA, 15 bp, Homo sapiens
atgcttcatttctgg

SEQ ID NO: 280247 - DNA, 15 bp, Homo sapiens
tatgcttcatttctg

SEQ ID NO: 280248 - DNA, 15 bp, Homo sapiens
ctatgcttcatttct

SEQ ID NO: 280249 - DNA, 15 bp, Homo sapiens
tctatgcttcatttc

SEQ ID NO: 280250 - DNA, 15 bp, Homo sapiens
gtctatgcttcattt

SEQ ID NO: 280251 - DNA, 15 bp, Homo sapiens
ggtctatgcttcatt

SEQ ID NO: 280252 - DNA, 15 bp, Homo sapiens
aggtctatgcttcat

SEQ ID NO: 280253 - DNA, 15 bp, Homo sapiens
taggtctatgcttca

SEQ ID NO: 280254 - DNA, 15 bp, Homo sapiens
ttaggtctatgcttc

SEQ ID NO: 280255 - DNA, 15 bp, Homo sapiens
tttaggtctatgctt

SEQ ID NO: 280256 - DNA, 15 bp, Homo sapiens
gtttaggtctatgct

SEQ ID NO: 280257 - DNA, 15 bp, Homo sapiens
agtttaggtctatgc

SEQ ID NO: 280258 - DNA, 15 bp, Homo sapiens
aagtttaggtctatg

SEQ ID NO: 280259 - DNA, 15 bp, Homo sapiens
gaagtttaggtctat

SEQ ID NO: 280260 - DNA, 15 bp, Homo sapiens
agaagtttaggtcta

SEQ ID NO: 280261 - DNA, 15 bp, Homo sapiens
tagaagtttaggtct

SEQ ID NO: 280262 - DNA, 15 bp, Homo sapiens
ctagaagtttaggtc

SEQ ID NO: 280263 - DNA, 15 bp, Homo sapiens
tctagaagtttaggt

SEQ ID NO: 280264 - DNA, 15 bp, Homo sapiens
ttctagaagtttagg

SEQ ID NO: 280265 - DNA, 15 bp, Homo sapiens
cttctagaagtttag

SEQ ID NO: 280266 - DNA, 15 bp, Homo sapiens
tcttctagaagttta

SEQ ID NO: 280267 - DNA, 15 bp, Homo sapiens
atcttctagaagttt

SEQ ID NO: 280268 - DNA, 15 bp, Homo sapiens
catcttctagaagtt

SEQ ID NO: 280269 - DNA, 15 bp, Homo sapiens
tcatcttctagaagt

SEQ ID NO: 280270 - DNA, 15 bp, Homo sapiens
gtcatcttctagaag

SEQ ID NO: 280271 - DNA, 15 bp, Homo sapiens
tgtcatcttctagaa

SEQ ID NO: 280272 - DNA, 15 bp, Homo sapiens
atgtcatcttctaga

SEQ ID NO: 280273 - DNA, 15 bp, Homo sapiens
tatgtcatcttctag

SEQ ID NO: 280274 - DNA, 15 bp, Homo sapiens
ctatgtcatcttcta

SEQ ID NO: 280275 - DNA, 15 bp, Homo sapiens
cctatgtcatcttct

SEQ ID NO: 280276 - DNA, 15 bp, Homo sapiens
tcctatgtcatcttc

SEQ ID NO: 280277 - DNA, 15 bp, Homo sapiens
ctcctatgtcatctt

SEQ ID NO: 280278 - DNA, 15 bp, Homo sapiens
tctcctatgtcatct

SEQ ID NO: 280279 - DNA, 15 bp, Homo sapiens
ttctcctatgtcatc

SEQ ID NO: 280280 - DNA, 15 bp, Homo sapiens
tttctcctatgtcat

SEQ ID NO: 280281 - DNA, 15 bp, Homo sapiens
ctttctcctatgtca

SEQ ID NO: 280282 - DNA, 15 bp, Homo sapiens
actttctcctatgtc

SEQ ID NO: 280283 - DNA, 15 bp, Homo sapiens
gactttctcctatgt

SEQ ID NO: 280284 - DNA, 15 bp, Homo sapiens
agactttctcctatg

SEQ ID NO: 280285 - DNA, 15 bp, Homo sapiens
aagactttctcctat

SEQ ID NO: 280286 - DNA, 15 bp, Homo sapiens
taagactttctccta

SEQ ID NO: 280287 - DNA, 15 bp, Homo sapiens
ttaagactttctcct

SEQ ID NO: 280288 - DNA, 15 bp, Homo sapiens
attaagactttctcc

SEQ ID NO: 280289 - DNA, 15 bp, Homo sapiens
cattaagactttctc

SEQ ID NO: 280290 - DNA, 15 bp, Homo sapiens
tcattaagactttct

SEQ ID NO: 280291 - DNA, 15 bp, Homo sapiens
ctcattaagactttc

SEQ ID NO: 280292 - DNA, 15 bp, Homo sapiens
gctcattaagacttt

SEQ ID NO: 280293 - DNA, 15 bp, Homo sapiens
agctcattaagactt

SEQ ID NO: 280294 - DNA, 15 bp, Homo sapiens
aagctcattaagact

SEQ ID NO: 280295 - DNA, 15 bp, Homo sapiens
caagctcattaagac

SEQ ID NO: 280296 - DNA, 15 bp, Homo sapiens
ccaagctcattaaga

SEQ ID NO: 280297 - DNA, 15 bp, Homo sapiens
cccaagctcattaag

SEQ ID NO: 280298 - DNA, 15 bp, Homo sapiens
acccaagctcattaa

SEQ ID NO: 280299 - DNA, 15 bp, Homo sapiens
aacccaagctcatta

SEQ ID NO: 280300 - DNA, 15 bp, Homo sapiens
taacccaagctcatt

SEQ ID NO: 280301 - DNA, 15 bp, Homo sapiens
ctaacccaagctcat

SEQ ID NO: 280302 - DNA, 15 bp, Homo sapiens
cctaacccaagctca

SEQ ID NO: 280303 - DNA, 15 bp, Homo sapiens
gcctaacccaagctc

SEQ ID NO: 280304 - DNA, 15 bp, Homo sapiens
tgcctaacccaagct

SEQ ID NO: 280305 - DNA, 15 bp, Homo sapiens
ttgcctaacccaagc

SEQ ID NO: 280306 - DNA, 15 bp, Homo sapiens
tttgcctaacccaag

SEQ ID NO: 280307 - DNA, 15 bp, Homo sapiens
ctttgcctaacccaa

SEQ ID NO: 280308 - DNA, 15 bp, Homo sapiens
tctttgcctaaccca

SEQ ID NO: 280309 - DNA, 15 bp, Homo sapiens
atctttgcctaaccc

SEQ ID NO: 280310 - DNA, 15 bp, Homo sapiens
aatctttgcctaacc

SEQ ID NO: 280311 - DNA, 15 bp, Homo sapiens
aaatctttgcctaac

SEQ ID NO: 280312 - DNA, 15 bp, Homo sapiens
gaaatctttgcctaa

SEQ ID NO: 280313 - DNA, 15 bp, Homo sapiens
tgaaatctttgccta

SEQ ID NO: 280314 - DNA, 15 bp, Homo sapiens
atgaaatctttgcct

SEQ ID NO: 280315 - DNA, 15 bp, Homo sapiens
tatgaaatctttgcc

SEQ ID NO: 280316 - DNA, 15 bp, Homo sapiens
ctatgaaatctttgc

SEQ ID NO: 280317 - DNA, 15 bp, Homo sapiens
tctatgaaatctttg

SEQ ID NO: 280318 - DNA, 15 bp, Homo sapiens
atctatgaaatcttt

SEQ ID NO: 280319 - DNA, 15 bp, Homo sapiens
tatctatgaaatctt

SEQ ID NO: 280320 - DNA, 15 bp, Homo sapiens
gtatctatgaaatct

SEQ ID NO: 280321 - DNA, 15 bp, Homo sapiens
ggtatctatgaaatc

SEQ ID NO: 280322 - DNA, 15 bp, Homo sapiens
aggtatctatgaaat

SEQ ID NO: 280323 - DNA, 15 bp, Homo sapiens
taggtatctatgaaa

SEQ ID NO: 280324 - DNA, 15 bp, Homo sapiens
gtaggtatctatgaa

SEQ ID NO: 280325 - DNA, 15 bp, Homo sapiens
ggtaggtatctatga

SEQ ID NO: 280326 - DNA, 15 bp, Homo sapiens
tggtaggtatctatg

SEQ ID NO: 280327 - DNA, 15 bp, Homo sapiens
gtggtaggtatctat

SEQ ID NO: 280328 - DNA, 15 bp, Homo sapiens
agtggtaggtatcta

SEQ ID NO: 280329 - DNA, 15 bp, Homo sapiens
cagtggtaggtatct

SEQ ID NO: 280330 - DNA, 15 bp, Homo sapiens
tcagtggtaggtatc

SEQ ID NO: 280331 - DNA, 15 bp, Homo sapiens
ttcagtggtaggtat

SEQ ID NO: 280332 - DNA, 15 bp, Homo sapiens
tttcagtggtaggta

SEQ ID NO: 280333 - DNA, 15 bp, Homo sapiens
ttttcagtggtaggt

SEQ ID NO: 280334 - DNA, 15 bp, Homo sapiens
gttttcagtggtagg

SEQ ID NO: 280335 - DNA, 15 bp, Homo sapiens
tgttttcagtggtag

SEQ ID NO: 280336 - DNA, 15 bp, Homo sapiens
atgttttcagtggta

SEQ ID NO: 280337 - DNA, 15 bp, Homo sapiens
tatgttttcagtggt

SEQ ID NO: 280338 - DNA, 15 bp, Homo sapiens
ttatgttttcagtgg

SEQ ID NO: 280339 - DNA, 15 bp, Homo sapiens
gttatgttttcagtg

SEQ ID NO: 280340 - DNA, 15 bp, Homo sapiens
ggttatgttttcagt

SEQ ID NO: 280341 - DNA, 15 bp, Homo sapiens
gggttatgttttcag

SEQ ID NO: 280342 - DNA, 15 bp, Homo sapiens
tgggttatgttttca

SEQ ID NO: 280343 - DNA, 15 bp, Homo sapiens
atgggttatgttttc

SEQ ID NO: 280344 - DNA, 15 bp, Homo sapiens
tatgggttatgtttt

SEQ ID NO: 280345 - DNA, 15 bp, Homo sapiens
ttatgggttatgttt

SEQ ID NO: 280346 - DNA, 15 bp, Homo sapiens
tttatgggttatgtt

SEQ ID NO: 280347 - DNA, 15 bp, Homo sapiens
ttttatgggttatgt

SEQ ID NO: 280348 - DNA, 15 bp, Homo sapiens
cttttatgggttatg

SEQ ID NO: 280349 - DNA, 15 bp, Homo sapiens
tcttttatgggttat

SEQ ID NO: 280350 - DNA, 15 bp, Homo sapiens
ttcttttatgggtta

SEQ ID NO: 280351 - DNA, 15 bp, Homo sapiens
tttcttttatgggtt

SEQ ID NO: 280352 - DNA, 15 bp, Homo sapiens
ttttcttttatgggt

SEQ ID NO: 280353 - DNA, 15 bp, Homo sapiens
tttttcttttatggg

SEQ ID NO: 280354 - DNA, 15 bp, Homo sapiens
ttttttcttttatgg

SEQ ID NO: 280355 - DNA, 15 bp, Homo sapiens
tttttttcttttatg

SEQ ID NO: 280356 - DNA, 15 bp, Homo sapiens
ttttttttcttttat

SEQ ID NO: 280357 - DNA, 15 bp, Homo sapiens
attttttttctttta

SEQ ID NO: 280358 - DNA, 15 bp, Homo sapiens
cattttttttctttt

SEQ ID NO: 280359 - DNA, 15 bp, Homo sapiens
tcattttttttcttt

SEQ ID NO: 280360 - DNA, 15 bp, Homo sapiens
ttcattttttttctt

SEQ ID NO: 280361 - DNA, 15 bp, Homo sapiens
attcattttttttct

SEQ ID NO: 280362 - DNA, 15 bp, Homo sapiens
tattcattttttttc

SEQ ID NO: 280363 - DNA, 15 bp, Homo sapiens
ttattcatttttttt

SEQ ID NO: 280364 - DNA, 15 bp, Homo sapiens
tttattcattttttt

SEQ ID NO: 280365 - DNA, 15 bp, Homo sapiens
atttattcatttttt

SEQ ID NO: 280366 - DNA, 15 bp, Homo sapiens
aatttattcattttt

SEQ ID NO: 280367 - DNA, 15 bp, Homo sapiens
caatttattcatttt

SEQ ID NO: 280368 - DNA, 15 bp, Homo sapiens
tcaatttattcattt

SEQ ID NO: 280369 - DNA, 15 bp, Homo sapiens
ctcaatttattcatt

SEQ ID NO: 280370 - DNA, 15 bp, Homo sapiens
gctcaatttattcat

SEQ ID NO: 280371 - DNA, 15 bp, Homo sapiens
agctcaatttattca

SEQ ID NO: 280372 - DNA, 15 bp, Homo sapiens
aagctcaatttattc

SEQ ID NO: 280373 - DNA, 15 bp, Homo sapiens
taagctcaatttatt

SEQ ID NO: 280374 - DNA, 15 bp, Homo sapiens
ttaagctcaatttat

SEQ ID NO: 280375 - DNA, 15 bp, Homo sapiens
attaagctcaattta

SEQ ID NO: 280376 - DNA, 15 bp, Homo sapiens
gattaagctcaattt

SEQ ID NO: 280377 - DNA, 15 bp, Homo sapiens
tgattaagctcaatt

SEQ ID NO: 280378 - DNA, 15 bp, Homo sapiens
ttgattaagctcaat

SEQ ID NO: 280379 - DNA, 15 bp, Homo sapiens
tttgattaagctcaa

SEQ ID NO: 280380 - DNA, 15 bp, Homo sapiens
ttttgattaagctca

SEQ ID NO: 280381 - DNA, 15 bp, Homo sapiens
attttgattaagctc

SEQ ID NO: 280382 - DNA, 15 bp, Homo sapiens
aattttgattaagct

SEQ ID NO: 280383 - DNA, 15 bp, Homo sapiens
taattttgattaagc

SEQ ID NO: 280384 - DNA, 15 bp, Homo sapiens
ttaattttgattaag

SEQ ID NO: 280385 - DNA, 15 bp, Homo sapiens
tttaattttgattaa

SEQ ID NO: 280386 - DNA, 15 bp, Homo sapiens
ttttaattttgatta

SEQ ID NO: 280387 - DNA, 15 bp, Homo sapiens
tttttaattttgatt

SEQ ID NO: 280388 - DNA, 15 bp, Homo sapiens
gtttttaattttgat

SEQ ID NO: 280389 - DNA, 15 bp, Homo sapiens
agtttttaattttga

SEQ ID NO: 280390 - DNA, 15 bp, Homo sapiens
aagtttttaattttg

SEQ ID NO: 280391 - DNA, 15 bp, Homo sapiens
gaagtttttaatttt

SEQ ID NO: 280392 - DNA, 15 bp, Homo sapiens
agaagtttttaattt

SEQ ID NO: 280393 - DNA, 15 bp, Homo sapiens
tagaagtttttaatt

SEQ ID NO: 280394 - DNA, 15 bp, Homo sapiens
atagaagtttttaat

SEQ ID NO: 280395 - DNA, 15 bp, Homo sapiens
aatagaagtttttaa

SEQ ID NO: 280396 - DNA, 15 bp, Homo sapiens
gaatagaagttttta

SEQ ID NO: 280397 - DNA, 15 bp, Homo sapiens
ggaatagaagttttt

SEQ ID NO: 280398 - DNA, 15 bp, Homo sapiens
aggaatagaagtttt

SEQ ID NO: 280399 - DNA, 15 bp, Homo sapiens
aaggaatagaagttt

SEQ ID NO: 280400 - DNA, 15 bp, Homo sapiens
caaggaatagaagtt

SEQ ID NO: 280401 - DNA, 15 bp, Homo sapiens
tcaaggaatagaagt

SEQ ID NO: 280402 - DNA, 15 bp, Homo sapiens
ttcaaggaatagaag

SEQ ID NO: 280403 - DNA, 15 bp, Homo sapiens
tttcaaggaatagaa

SEQ ID NO: 280404 - DNA, 15 bp, Homo sapiens
atttcaaggaataga

SEQ ID NO: 280405 - DNA, 15 bp, Homo sapiens
tatttcaaggaatag

SEQ ID NO: 280406 - DNA, 15 bp, Homo sapiens
atatttcaaggaata

SEQ ID NO: 280407 - DNA, 15 bp, Homo sapiens
tatatttcaaggaat

SEQ ID NO: 280408 - DNA, 15 bp, Homo sapiens
gtatatttcaaggaa

SEQ ID NO: 280409 - DNA, 15 bp, Homo sapiens
agtatatttcaagga

SEQ ID NO: 280410 - DNA, 15 bp, Homo sapiens
aagtatatttcaagg

SEQ ID NO: 280411 - DNA, 15 bp, Homo sapiens
gaagtatatttcaag

SEQ ID NO: 280412 - DNA, 15 bp, Homo sapiens
agaagtatatttcaa

SEQ ID NO: 280413 - DNA, 15 bp, Homo sapiens
aagaagtatatttca

SEQ ID NO: 280414 - DNA, 15 bp, Homo sapiens
taagaagtatatttc

SEQ ID NO: 280415 - DNA, 15 bp, Homo sapiens
ataagaagtatattt

SEQ ID NO: 280416 - DNA, 15 bp, Homo sapiens
cataagaagtatatt

SEQ ID NO: 280417 - DNA, 15 bp, Homo sapiens
ccataagaagtatat

SEQ ID NO: 280418 - DNA, 15 bp, Homo sapiens
tccataagaagtata

SEQ ID NO: 280419 - DNA, 15 bp, Homo sapiens
ttccataagaagtat

SEQ ID NO: 280420 - DNA, 15 bp, Homo sapiens
cttccataagaagta

SEQ ID NO: 280421 - DNA, 15 bp, Homo sapiens
acttccataagaagt

SEQ ID NO: 280422 - DNA, 15 bp, Homo sapiens
gacttccataagaag

SEQ ID NO: 280423 - DNA, 15 bp, Homo sapiens
tgacttccataagaa

SEQ ID NO: 280424 - DNA, 15 bp, Homo sapiens
ttgacttccataaga

SEQ ID NO: 280425 - DNA, 15 bp, Homo sapiens
tttgacttccataag

SEQ ID NO: 280426 - DNA, 15 bp, Homo sapiens
ttttgacttccataa

SEQ ID NO: 280427 - DNA, 15 bp, Homo sapiens
gttttgacttccata

SEQ ID NO: 280428 - DNA, 15 bp, Homo sapiens
tgttttgacttccat

SEQ ID NO: 280429 - DNA, 15 bp, Homo sapiens
gtgttttgacttcca

SEQ ID NO: 280430 - DNA, 15 bp, Homo sapiens
tgtgttttgacttcc

SEQ ID NO: 280431 - DNA, 15 bp, Homo sapiens
ttgtgttttgacttc

SEQ ID NO: 280432 - DNA, 15 bp, Homo sapiens
cttgtgttttgactt

SEQ ID NO: 280433 - DNA, 15 bp, Homo sapiens
gcttgtgttttgact

SEQ ID NO: 280434 - DNA, 15 bp, Homo sapiens
agcttgtgttttgac

SEQ ID NO: 280435 - DNA, 15 bp, Homo sapiens
cagcttgtgttttga

SEQ ID NO: 280436 - DNA, 15 bp, Homo sapiens
gcagcttgtgttttg

SEQ ID NO: 280437 - DNA, 15 bp, Homo sapiens
tgcagcttgtgtttt

SEQ ID NO: 280438 - DNA, 15 bp, Homo sapiens
atgcagcttgtgttt

SEQ ID NO: 280439 - DNA, 15 bp, Homo sapiens
gatgcagcttgtgtt

SEQ ID NO: 280440 - DNA, 15 bp, Homo sapiens
agatgcagcttgtgt

SEQ ID NO: 280441 - DNA, 15 bp, Homo sapiens
cagatgcagcttgtg

SEQ ID NO: 280442 - DNA, 15 bp, Homo sapiens
tcagatgcagcttgt

SEQ ID NO: 280443 - DNA, 15 bp, Homo sapiens
ttcagatgcagcttg

SEQ ID NO: 280444 - DNA, 15 bp, Homo sapiens
tttcagatgcagctt

SEQ ID NO: 280445 - DNA, 15 bp, Homo sapiens
atttcagatgcagct

SEQ ID NO: 280446 - DNA, 15 bp, Homo sapiens
tatttcagatgcagc

SEQ ID NO: 280447 - DNA, 15 bp, Homo sapiens
ttatttcagatgcag

SEQ ID NO: 280448 - DNA, 15 bp, Homo sapiens
tttatttcagatgca

SEQ ID NO: 280449 - DNA, 15 bp, Homo sapiens
ctttatttcagatgc

SEQ ID NO: 280450 - DNA, 15 bp, Homo sapiens
cctttatttcagatg

SEQ ID NO: 280451 - DNA, 15 bp, Homo sapiens
acctttatttcagat

SEQ ID NO: 280452 - DNA, 15 bp, Homo sapiens
aacctttatttcaga

SEQ ID NO: 280453 - DNA, 15 bp, Homo sapiens
taacctttatttcag

SEQ ID NO: 280454 - DNA, 15 bp, Homo sapiens
gtaacctttatttca

SEQ ID NO: 280455 - DNA, 15 bp, Homo sapiens
tgtaacctttatttc

SEQ ID NO: 280456 - DNA, 15 bp, Homo sapiens
atgtaacctttattt

SEQ ID NO: 280457 - DNA, 15 bp, Homo sapiens
aatgtaacctttatt

SEQ ID NO: 280458 - DNA, 15 bp, Homo sapiens
aaatgtaacctttat

SEQ ID NO: 280459 - DNA, 15 bp, Homo sapiens
aaaatgtaaccttta

SEQ ID NO: 280460 - DNA, 15 bp, Homo sapiens
caaaatgtaaccttt

SEQ ID NO: 280461 - DNA, 15 bp, Homo sapiens
gcaaaatgtaacctt

SEQ ID NO: 280462 - DNA, 15 bp, Homo sapiens
agcaaaatgtaacct

SEQ ID NO: 280463 - DNA, 15 bp, Homo sapiens
gagcaaaatgtaacc

SEQ ID NO: 280464 - DNA, 15 bp, Homo sapiens
tgagcaaaatgtaac

SEQ ID NO: 280465 - DNA, 15 bp, Homo sapiens
atgagcaaaatgtaa

SEQ ID NO: 280466 - DNA, 15 bp, Homo sapiens
tatgagcaaaatgta

SEQ ID NO: 280467 - DNA, 15 bp, Homo sapiens
ctatgagcaaaatgt

SEQ ID NO: 280468 - DNA, 15 bp, Homo sapiens
cctatgagcaaaatg

SEQ ID NO: 280469 - DNA, 15 bp, Homo sapiens
tcctatgagcaaaat

SEQ ID NO: 280470 - DNA, 15 bp, Homo sapiens
ttcctatgagcaaaa

SEQ ID NO: 280471 - DNA, 15 bp, Homo sapiens
tttcctatgagcaaa

SEQ ID NO: 280472 - DNA, 15 bp, Homo sapiens
ctttcctatgagcaa

SEQ ID NO: 280473 - DNA, 15 bp, Homo sapiens
actttcctatgagca

SEQ ID NO: 280474 - DNA, 15 bp, Homo sapiens
aactttcctatgagc

SEQ ID NO: 280475 - DNA, 15 bp, Homo sapiens
gaactttcctatgag

SEQ ID NO: 280476 - DNA, 15 bp, Homo sapiens
agaactttcctatga

SEQ ID NO: 280477 - DNA, 15 bp, Homo sapiens
aagaactttcctatg

SEQ ID NO: 280478 - DNA, 15 bp, Homo sapiens
gaagaactttcctat

SEQ ID NO: 280479 - DNA, 15 bp, Homo sapiens
tgaagaactttccta

SEQ ID NO: 280480 - DNA, 15 bp, Homo sapiens
ctgaagaactttcct

SEQ ID NO: 280481 - DNA, 15 bp, Homo sapiens
cctgaagaactttcc

SEQ ID NO: 280482 - DNA, 15 bp, Homo sapiens
acctgaagaactttc

SEQ ID NO: 280483 - DNA, 15 bp, Homo sapiens
gacctgaagaacttt

SEQ ID NO: 280484 - DNA, 15 bp, Homo sapiens
ggacctgaagaactt

SEQ ID NO: 280485 - DNA, 15 bp, Homo sapiens
aggacctgaagaact

SEQ ID NO: 280486 - DNA, 15 bp, Homo sapiens
aaggacctgaagaac

SEQ ID NO: 280487 - DNA, 15 bp, Homo sapiens
taaggacctgaagaa

SEQ ID NO: 280488 - DNA, 15 bp, Homo sapiens
ttaaggacctgaaga

SEQ ID NO: 280489 - DNA, 15 bp, Homo sapiens
tttaaggacctgaag

SEQ ID NO: 280490 - DNA, 15 bp, Homo sapiens
ttttaaggacctgaa

SEQ ID NO: 280491 - DNA, 15 bp, Homo sapiens
tttttaaggacctga

SEQ ID NO: 280492 - DNA, 15 bp, Homo sapiens
atttttaaggacctg

SEQ ID NO: 280493 - DNA, 15 bp, Homo sapiens
gatttttaaggacct

SEQ ID NO: 280494 - DNA, 15 bp, Homo sapiens
tgatttttaaggacc

SEQ ID NO: 280495 - DNA, 15 bp, Homo sapiens
ctgatttttaaggac

SEQ ID NO: 280496 - DNA, 15 bp, Homo sapiens
tctgatttttaagga

SEQ ID NO: 280497 - DNA, 15 bp, Homo sapiens
ttctgatttttaagg

SEQ ID NO: 280498 - DNA, 15 bp, Homo sapiens
gttctgatttttaag

SEQ ID NO: 280499 - DNA, 15 bp, Homo sapiens
ggttctgatttttaa

SEQ ID NO: 280500 - DNA, 15 bp, Homo sapiens
aggttctgattttta

SEQ ID NO: 280501 - DNA, 15 bp, Homo sapiens
taggttctgattttt

SEQ ID NO: 280502 - DNA, 15 bp, Homo sapiens
gtaggttctgatttt

SEQ ID NO: 280503 - DNA, 15 bp, Homo sapiens
agtaggttctgattt

SEQ ID NO: 280504 - DNA, 15 bp, Homo sapiens
aagtaggttctgatt

SEQ ID NO: 280505 - DNA, 15 bp, Homo sapiens
caagtaggttctgat

SEQ ID NO: 280506 - DNA, 15 bp, Homo sapiens
acaagtaggttctga

SEQ ID NO: 280507 - DNA, 15 bp, Homo sapiens
tacaagtaggttctg

SEQ ID NO: 280508 - DNA, 15 bp, Homo sapiens
ctacaagtaggttct

SEQ ID NO: 280509 - DNA, 15 bp, Homo sapiens
tctacaagtaggttc

SEQ ID NO: 280510 - DNA, 15 bp, Homo sapiens
ttctacaagtaggtt

SEQ ID NO: 280511 - DNA, 15 bp, Homo sapiens
gttctacaagtaggt

SEQ ID NO: 280512 - DNA, 15 bp, Homo sapiens
tgttctacaagtagg

SEQ ID NO: 280513 - DNA, 15 bp, Homo sapiens
atgttctacaagtag

SEQ ID NO: 280514 - DNA, 15 bp, Homo sapiens
aatgttctacaagta

SEQ ID NO: 280515 - DNA, 15 bp, Homo sapiens
aaatgttctacaagt

SEQ ID NO: 280516 - DNA, 15 bp, Homo sapiens
gaaatgttctacaag

SEQ ID NO: 280517 - DNA, 15 bp, Homo sapiens
tgaaatgttctacaa

SEQ ID NO: 280518 - DNA, 15 bp, Homo sapiens
gtgaaatgttctaca

SEQ ID NO: 280519 - DNA, 15 bp, Homo sapiens
agtgaaatgttctac

SEQ ID NO: 280520 - DNA, 15 bp, Homo sapiens
aagtgaaatgttcta

SEQ ID NO: 280521 - DNA, 15 bp, Homo sapiens
taagtgaaatgttct

SEQ ID NO: 280522 - DNA, 15 bp, Homo sapiens
ataagtgaaatgttc

SEQ ID NO: 280523 - DNA, 15 bp, Homo sapiens
cataagtgaaatgtt

SEQ ID NO: 280524 - DNA, 15 bp, Homo sapiens
gcataagtgaaatgt

SEQ ID NO: 280525 - DNA, 15 bp, Homo sapiens
tgcataagtgaaatg

SEQ ID NO: 280526 - DNA, 15 bp, Homo sapiens
atgcataagtgaaat

SEQ ID NO: 280527 - DNA, 15 bp, Homo sapiens
aatgcataagtgaaa

SEQ ID NO: 280528 - DNA, 15 bp, Homo sapiens
aaatgcataagtgaa

SEQ ID NO: 280529 - DNA, 15 bp, Homo sapiens
aaaatgcataagtga

SEQ ID NO: 280530 - DNA, 15 bp, Homo sapiens
taaaatgcataagtg

SEQ ID NO: 280531 - DNA, 15 bp, Homo sapiens
ataaaatgcataagt

SEQ ID NO: 280532 - DNA, 15 bp, Homo sapiens
gataaaatgcataag

SEQ ID NO: 280533 - DNA, 15 bp, Homo sapiens
tgataaaatgcataa

SEQ ID NO: 280534 - DNA, 15 bp, Homo sapiens
atgataaaatgcata

SEQ ID NO: 280535 - DNA, 15 bp, Homo sapiens
tatgataaaatgcat

SEQ ID NO: 280536 - DNA, 15 bp, Homo sapiens
atatgataaaatgca

SEQ ID NO: 280537 - DNA, 15 bp, Homo sapiens
gatatgataaaatgc

SEQ ID NO: 280538 - DNA, 15 bp, Homo sapiens
tgatatgataaaatg

SEQ ID NO: 280539 - DNA, 15 bp, Homo sapiens
ctgatatgataaaat

SEQ ID NO: 280540 - DNA, 15 bp, Homo sapiens
tctgatatgataaaa

SEQ ID NO: 280541 - DNA, 15 bp, Homo sapiens
atctgatatgataaa

SEQ ID NO: 280542 - DNA, 15 bp, Homo sapiens
catctgatatgataa

SEQ ID NO: 280543 - DNA, 15 bp, Homo sapiens
tcatctgatatgata

SEQ ID NO: 280544 - DNA, 15 bp, Homo sapiens
atcatctgatatgat

SEQ ID NO: 280545 - DNA, 15 bp, Homo sapiens
gatcatctgatatga

SEQ ID NO: 280546 - DNA, 15 bp, Homo sapiens
ggatcatctgatatg

SEQ ID NO: 280547 - DNA, 15 bp, Homo sapiens
aggatcatctgatat

SEQ ID NO: 280548 - DNA, 15 bp, Homo sapiens
caggatcatctgata

SEQ ID NO: 280549 - DNA, 15 bp, Homo sapiens
acaggatcatctgat

SEQ ID NO: 280550 - DNA, 15 bp, Homo sapiens
cacaggatcatctga

SEQ ID NO: 280551 - DNA, 15 bp, Homo sapiens
acacaggatcatctg

SEQ ID NO: 280552 - DNA, 15 bp, Homo sapiens
aacacaggatcatct

SEQ ID NO: 280553 - DNA, 15 bp, Homo sapiens
aaacacaggatcatc

SEQ ID NO: 280554 - DNA, 15 bp, Homo sapiens
gaaacacaggatcat

SEQ ID NO: 280555 - DNA, 15 bp, Homo sapiens
tgaaacacaggatca

SEQ ID NO: 280556 - DNA, 15 bp, Homo sapiens
atgaaacacaggatc

SEQ ID NO: 280557 - DNA, 15 bp, Homo sapiens
aatgaaacacaggat

SEQ ID NO: 280558 - DNA, 15 bp, Homo sapiens
caatgaaacacagga

SEQ ID NO: 280559 - DNA, 15 bp, Homo sapiens
acaatgaaacacagg

SEQ ID NO: 280560 - DNA, 15 bp, Homo sapiens
aacaatgaaacacag

SEQ ID NO: 280561 - DNA, 15 bp, Homo sapiens
aaacaatgaaacaca

SEQ ID NO: 280562 - DNA, 15 bp, Homo sapiens
aaaacaatgaaacac

SEQ ID NO: 280563 - DNA, 15 bp, Homo sapiens
caaaacaatgaaaca

SEQ ID NO: 280564 - DNA, 15 bp, Homo sapiens
tcaaaacaatgaaac

SEQ ID NO: 280565 - DNA, 15 bp, Homo sapiens
gtcaaaacaatgaaa

SEQ ID NO: 280566 - DNA, 15 bp, Homo sapiens
agtcaaaacaatgaa

SEQ ID NO: 280567 - DNA, 15 bp, Homo sapiens
tagtcaaaacaatga

SEQ ID NO: 280568 - DNA, 15 bp, Homo sapiens
gtagtcaaaacaatg

SEQ ID NO: 280569 - DNA, 15 bp, Homo sapiens
agtagtcaaaacaat

SEQ ID NO: 280570 - DNA, 15 bp, Homo sapiens
tagtagtcaaaacaa

SEQ ID NO: 280571 - DNA, 15 bp, Homo sapiens
ttagtagtcaaaaca

SEQ ID NO: 280572 - DNA, 15 bp, Homo sapiens
tttagtagtcaaaac

SEQ ID NO: 280573 - DNA, 15 bp, Homo sapiens
atttagtagtcaaaa

SEQ ID NO: 280574 - DNA, 15 bp, Homo sapiens
catttagtagtcaaa

SEQ ID NO: 280575 - DNA, 15 bp, Homo sapiens
acatttagtagtcaa

SEQ ID NO: 280576 - DNA, 15 bp, Homo sapiens
aacatttagtagtca

SEQ ID NO: 280577 - DNA, 15 bp, Homo sapiens
gaacatttagtagtc

SEQ ID NO: 280578 - DNA, 15 bp, Homo sapiens
agaacatttagtagt

SEQ ID NO: 280579 - DNA, 15 bp, Homo sapiens
tagaacatttagtag

SEQ ID NO: 280580 - DNA, 15 bp, Homo sapiens
ttagaacatttagta

SEQ ID NO: 280581 - DNA, 15 bp, Homo sapiens
attagaacatttagt

SEQ ID NO: 280582 - DNA, 15 bp, Homo sapiens
tattagaacatttag

SEQ ID NO: 280583 - DNA, 15 bp, Homo sapiens
ttattagaacattta

SEQ ID NO: 280584 - DNA, 15 bp, Homo sapiens
tttattagaacattt

SEQ ID NO: 280585 - DNA, 15 bp, Homo sapiens
ttttattagaacatt

SEQ ID NO: 280586 - DNA, 15 bp, Homo sapiens
attttattagaacat

SEQ ID NO: 280587 - DNA, 15 bp, Homo sapiens
aattttattagaaca

SEQ ID NO: 280588 - DNA, 15 bp, Homo sapiens
gaattttattagaac

SEQ ID NO: 280589 - DNA, 15 bp, Homo sapiens
cgaattttattagaa

SEQ ID NO: 280590 - DNA, 15 bp, Homo sapiens
gcgaattttattaga

SEQ ID NO: 280591 - DNA, 15 bp, Homo sapiens
agcgaattttattag

SEQ ID NO: 280592 - DNA, 15 bp, Homo sapiens
cagcgaattttatta

SEQ ID NO: 280593 - DNA, 15 bp, Homo sapiens
acagcgaattttatt

SEQ ID NO: 280594 - DNA, 15 bp, Homo sapiens
aacagcgaattttat

SEQ ID NO: 280595 - DNA, 15 bp, Homo sapiens
aaacagcgaatttta

SEQ ID NO: 280596 - DNA, 15 bp, Homo sapiens
aaaacagcgaatttt

SEQ ID NO: 280597 - DNA, 15 bp, Homo sapiens
taaaacagcgaattt

SEQ ID NO: 280598 - DNA, 15 bp, Homo sapiens
ttaaaacagcgaatt

SEQ ID NO: 280599 - DNA, 15 bp, Homo sapiens
tttaaaacagcgaat

SEQ ID NO: 280600 - DNA, 15 bp, Homo sapiens
ttttaaaacagcgaa

SEQ ID NO: 280601 - DNA, 15 bp, Homo sapiens
tttttaaaacagcga

SEQ ID NO: 280602 - DNA, 15 bp, Homo sapiens
ttttttaaaacagcg

SEQ ID NO: 280603 - DNA, 15 bp, Homo sapiens
tttttttaaaacagc

SEQ ID NO: 280604 - DNA, 15 bp, Homo sapiens
atttttttaaaacag

SEQ ID NO: 280605 - DNA, 15 bp, Homo sapiens
catttttttaaaaca

SEQ ID NO: 280606 - DNA, 15 bp, Homo sapiens
tcatttttttaaaac

SEQ ID NO: 280607 - DNA, 15 bp, Homo sapiens
ttcatttttttaaaa

SEQ ID NO: 280608 - DNA, 15 bp, Homo sapiens
attcatttttttaaa

SEQ ID NO: 280609 - DNA, 15 bp, Homo sapiens
tattcatttttttaa

SEQ ID NO: 280610 - DNA, 15 bp, Homo sapiens
ttattcattttttta

SEQ ID NO: 280611 - DNA, 15 bp, Homo sapiens
gtttattcatttttt

SEQ ID NO: 280612 - DNA, 15 bp, Homo sapiens
tgtttattcattttt

SEQ ID NO: 280613 - DNA, 15 bp, Homo sapiens
ttgtttattcatttt

SEQ ID NO: 280614 - DNA, 15 bp, Homo sapiens
gttgtttattcattt

SEQ ID NO: 280615 - DNA, 15 bp, Homo sapiens
tgttgtttattcatt

SEQ ID NO: 280616 - DNA, 15 bp, Homo sapiens
atgttgtttattcat

SEQ ID NO: 280617 - DNA, 15 bp, Homo sapiens
tatgttgtttattca

SEQ ID NO: 280618 - DNA, 15 bp, Homo sapiens
gtatgttgtttattc

SEQ ID NO: 280619 - DNA, 15 bp, Homo sapiens
agtatgttgtttatt

SEQ ID NO: 280620 - DNA, 15 bp, Homo sapiens
tagtatgttgtttat

SEQ ID NO: 280621 - DNA, 15 bp, Homo sapiens
ttagtatgttgttta

SEQ ID NO: 280622 - DNA, 15 bp, Homo sapiens
tttagtatgttgttt

SEQ ID NO: 280623 - DNA, 15 bp, Homo sapiens
atttagtatgttgtt

SEQ ID NO: 280624 - DNA, 15 bp, Homo sapiens
aatttagtatgttgt

SEQ ID NO: 280625 - DNA, 15 bp, Homo sapiens
aaatttagtatgttg

SEQ ID NO: 280626 - DNA, 15 bp, Homo sapiens
aaaatttagtatgtt

SEQ ID NO: 280627 - DNA, 15 bp, Homo sapiens
taaaatttagtatgt

SEQ ID NO: 280628 - DNA, 15 bp, Homo sapiens
ctaaaatttagtatg

SEQ ID NO: 280629 - DNA, 15 bp, Homo sapiens
gctaaaatttagtat

SEQ ID NO: 280630 - DNA, 15 bp, Homo sapiens
tgctaaaatttagta

SEQ ID NO: 280631 - DNA, 15 bp, Homo sapiens
ttgctaaaatttagt

SEQ ID NO: 280632 - DNA, 15 bp, Homo sapiens
gttgctaaaatttag

SEQ ID NO: 280633 - DNA, 15 bp, Homo sapiens
agttgctaaaattta

SEQ ID NO: 280634 - DNA, 15 bp, Homo sapiens
aagttgctaaaattt

SEQ ID NO: 280635 - DNA, 15 bp, Homo sapiens
aaagttgctaaaatt

SEQ ID NO: 280636 - DNA, 15 bp, Homo sapiens
gaaagttgctaaaat

SEQ ID NO: 280637 - DNA, 15 bp, Homo sapiens
cgaaagttgctaaaa

SEQ ID NO: 280638 - DNA, 15 bp, Homo sapiens
gcgaaagttgctaaa

SEQ ID NO: 280639 - DNA, 15 bp, Homo sapiens
agcgaaagttgctaa

SEQ ID NO: 280640 - DNA, 15 bp, Homo sapiens
aagcgaaagttgcta

SEQ ID NO: 280641 - DNA, 15 bp, Homo sapiens
gaagcgaaagttgct

SEQ ID NO: 280642 - DNA, 15 bp, Homo sapiens
tgaagcgaaagttgc

SEQ ID NO: 280643 - DNA, 15 bp, Homo sapiens
atgaagcgaaagttg

SEQ ID NO: 280644 - DNA, 15 bp, Homo sapiens
aatgaagcgaaagtt

SEQ ID NO: 280645 - DNA, 15 bp, Homo sapiens
aaatgaagcgaaagt

SEQ ID NO: 280646 - DNA, 15 bp, Homo sapiens
aaaatgaagcgaaag

SEQ ID NO: 280647 - DNA, 15 bp, Homo sapiens
aaaaatgaagcgaaa

SEQ ID NO: 280648 - DNA, 15 bp, Homo sapiens
aaaaaatgaagcgaa

SEQ ID NO: 280649 - DNA, 15 bp, Homo sapiens
taaaaaatgaagcga

SEQ ID NO: 280650 - DNA, 15 bp, Homo sapiens
ttaaaaaatgaagcg

SEQ ID NO: 280651 - DNA, 15 bp, Homo sapiens
attaaaaaatgaagc

SEQ ID NO: 280652 - DNA, 15 bp, Homo sapiens
gattaaaaaatgaag

SEQ ID NO: 280653 - DNA, 15 bp, Homo sapiens
agattaaaaaatgaa

SEQ ID NO: 280654 - DNA, 15 bp, Homo sapiens
aagattaaaaaatga

SEQ ID NO: 280655 - DNA, 15 bp, Homo sapiens
aaagattaaaaaatg

SEQ ID NO: 280656 - DNA, 15 bp, Homo sapiens
taaagattaaaaaat

SEQ ID NO: 280657 - DNA, 15 bp, Homo sapiens
ttaaagattaaaaaa

SEQ ID NO: 280658 - DNA, 15 bp, Homo sapiens
tttaaagattaaaaa

SEQ ID NO: 280659 - DNA, 15 bp, Homo sapiens
ttttaaagattaaaa

SEQ ID NO: 280660 - DNA, 15 bp, Homo sapiens
cttttaaagattaaa

SEQ ID NO: 280661 - DNA, 15 bp, Homo sapiens
tcttttaaagattaa

SEQ ID NO: 280662 - DNA, 15 bp, Homo sapiens
ctcttttaaagatta

SEQ ID NO: 280663 - DNA, 15 bp, Homo sapiens
tctcttttaaagatt

SEQ ID NO: 280664 - DNA, 15 bp, Homo sapiens
ctctcttttaaagat

SEQ ID NO: 280665 - DNA, 15 bp, Homo sapiens
tctctcttttaaaga

SEQ ID NO: 280666 - DNA, 15 bp, Homo sapiens
ctctctcttttaaag

SEQ ID NO: 280667 - DNA, 15 bp, Homo sapiens
tctctctcttttaaa

SEQ ID NO: 280668 - DNA, 15 bp, Homo sapiens
ctctctctcttttaa

SEQ ID NO: 280669 - DNA, 15 bp, Homo sapiens
tctctctctctttta

SEQ ID NO: 280670 - DNA, 15 bp, Homo sapiens
ctctctctctctttt

SEQ ID NO: 280671 - DNA, 15 bp, Homo sapiens
tctctctctctcttt

SEQ ID NO: 280672 - DNA, 15 bp, Homo sapiens
ttctctctctctctt

SEQ ID NO: 280673 - DNA, 15 bp, Homo sapiens
tttctctctctctct

SEQ ID NO: 280674 - DNA, 15 bp, Homo sapiens
ttttctctctctctc

SEQ ID NO: 280675 - DNA, 15 bp, Homo sapiens
tttttctctctctct

SEQ ID NO: 280676 - DNA, 15 bp, Homo sapiens
ttttttctctctctc

SEQ ID NO: 280677 - DNA, 15 bp, Homo sapiens
tttttttctctctct

SEQ ID NO: 280678 - DNA, 15 bp, Homo sapiens
ttttttttctctctc

SEQ ID NO: 280679 - DNA, 15 bp, Homo sapiens
tttttttttctctct

SEQ ID NO: 280680 - DNA, 15 bp, Homo sapiens
ctttttttttctctc

SEQ ID NO: 280681 - DNA, 15 bp, Homo sapiens
cctttttttttctct

SEQ ID NO: 280682 - DNA, 15 bp, Homo sapiens
gcctttttttttctc

SEQ ID NO: 280683 - DNA, 15 bp, Homo sapiens
agcctttttttttct

SEQ ID NO: 280684 - DNA, 15 bp, Homo sapiens
cagcctttttttttc

SEQ ID NO: 280685 - DNA, 15 bp, Homo sapiens
ccagccttttttttt

SEQ ID NO: 280686 - DNA, 15 bp, Homo sapiens
tccagcctttttttt

SEQ ID NO: 280687 - DNA, 15 bp, Homo sapiens
ttccagccttttttt

SEQ ID NO: 280688 - DNA, 15 bp, Homo sapiens
attccagcctttttt

SEQ ID NO: 280689 - DNA, 15 bp, Homo sapiens
aattccagccttttt

SEQ ID NO: 280690 - DNA, 15 bp, Homo sapiens
caattccagcctttt

SEQ ID NO: 280691 - DNA, 15 bp, Homo sapiens
tcaattccagccttt

SEQ ID NO: 280692 - DNA, 15 bp, Homo sapiens
atcaattccagcctt

SEQ ID NO: 280693 - DNA, 15 bp, Homo sapiens
catcaattccagcct

SEQ ID NO: 280694 - DNA, 15 bp, Homo sapiens
tcatcaattccagcc

SEQ ID NO: 280695 - DNA, 15 bp, Homo sapiens
ttcatcaattccagc

SEQ ID NO: 280696 - DNA, 15 bp, Homo sapiens
tttcatcaattccag

SEQ ID NO: 280697 - DNA, 15 bp, Homo sapiens
ctttcatcaattcca

SEQ ID NO: 280698 - DNA, 15 bp, Homo sapiens
cctttcatcaattcc

SEQ ID NO: 280699 - DNA, 15 bp, Homo sapiens
tcctttcatcaattc

SEQ ID NO: 280700 - DNA, 15 bp, Homo sapiens
gtcctttcatcaatt

SEQ ID NO: 280701 - DNA, 15 bp, Homo sapiens
tgtcctttcatcaat

SEQ ID NO: 280702 - DNA, 15 bp, Homo sapiens
atgtcctttcatcaa

SEQ ID NO: 280703 - DNA, 15 bp, Homo sapiens
tatgtcctttcatca

SEQ ID NO: 280704 - DNA, 15 bp, Homo sapiens
atatgtcctttcatc

SEQ ID NO: 280705 - DNA, 15 bp, Homo sapiens
tatatgtcctttcat

SEQ ID NO: 280706 - DNA, 15 bp, Homo sapiens
atatatgtcctttca

SEQ ID NO: 280707 - DNA, 15 bp, Homo sapiens
aatatatgtcctttc

SEQ ID NO: 280708 - DNA, 15 bp, Homo sapiens
caatatatgtccttt

SEQ ID NO: 280709 - DNA, 15 bp, Homo sapiens
tcaatatatgtcctt

SEQ ID NO: 280710 - DNA, 15 bp, Homo sapiens
ctcaatatatgtcct

SEQ ID NO: 280711 - DNA, 15 bp, Homo sapiens
tctcaatatatgtcc

SEQ ID NO: 280712 - DNA, 15 bp, Homo sapiens
ctctcaatatatgtc

SEQ ID NO: 280713 - DNA, 15 bp, Homo sapiens
gctctcaatatatgt

SEQ ID NO: 280714 - DNA, 15 bp, Homo sapiens
tgctctcaatatatg

SEQ ID NO: 280715 - DNA, 15 bp, Homo sapiens
ctgctctcaatatat

SEQ ID NO: 280716 - DNA, 15 bp, Homo sapiens
actgctctcaatata

SEQ ID NO: 280717 - DNA, 15 bp, Homo sapiens
aactgctctcaatat

SEQ ID NO: 280718 - DNA, 15 bp, Homo sapiens
taactgctctcaata

SEQ ID NO: 280719 - DNA, 15 bp, Homo sapiens
ataactgctctcaat

SEQ ID NO: 280720 - DNA, 15 bp, Homo sapiens
aataactgctctcaa

SEQ ID NO: 280721 - DNA, 15 bp, Homo sapiens
caataactgctctca

SEQ ID NO: 280722 - DNA, 15 bp, Homo sapiens
gcaataactgctctc

SEQ ID NO: 280723 - DNA, 15 bp, Homo sapiens
ggcaataactgctct

SEQ ID NO: 280724 - DNA, 15 bp, Homo sapiens
aggcaataactgctc

SEQ ID NO: 280725 - DNA, 15 bp, Homo sapiens
caggcaataactgct

SEQ ID NO: 280726 - DNA, 15 bp, Homo sapiens
tcaggcaataactgc

SEQ ID NO: 280727 - DNA, 15 bp, Homo sapiens
ctcaggcaataactg

SEQ ID NO: 280728 - DNA, 15 bp, Homo sapiens
actcaggcaataact

SEQ ID NO: 280729 - DNA, 15 bp, Homo sapiens
cactcaggcaataac

SEQ ID NO: 280730 - DNA, 15 bp, Homo sapiens
gcactcaggcaataa

SEQ ID NO: 280731 - DNA, 15 bp, Homo sapiens
tgcactcaggcaata

SEQ ID NO: 280732 - DNA, 15 bp, Homo sapiens
ttgcactcaggcaat

SEQ ID NO: 280733 - DNA, 15 bp, Homo sapiens
tttgcactcaggcaa

SEQ ID NO: 280734 - DNA, 15 bp, Homo sapiens
ctttgcactcaggca

SEQ ID NO: 280735 - DNA, 15 bp, Homo sapiens
tctttgcactcaggc

SEQ ID NO: 280736 - DNA, 15 bp, Homo sapiens
ttctttgcactcagg

SEQ ID NO: 280737 - DNA, 15 bp, Homo sapiens
tttctttgcactcag

SEQ ID NO: 280738 - DNA, 15 bp, Homo sapiens
gtttctttgcactca

SEQ ID NO: 280739 - DNA, 15 bp, Homo sapiens
tgtttctttgcactc

SEQ ID NO: 280740 - DNA, 15 bp, Homo sapiens
ttgtttctttgcact

SEQ ID NO: 280741 - DNA, 15 bp, Homo sapiens
tttgtttctttgcac

SEQ ID NO: 280742 - DNA, 15 bp, Homo sapiens
gtttgtttctttgca

SEQ ID NO: 280743 - DNA, 15 bp, Homo sapiens
ggtttgtttctttgc

SEQ ID NO: 280744 - DNA, 15 bp, Homo sapiens
tggtttgtttctttg

SEQ ID NO: 280745 - DNA, 15 bp, Homo sapiens
ttggtttgtttcttt

SEQ ID NO: 280746 - DNA, 15 bp, Homo sapiens
tttggtttgtttctt

SEQ ID NO: 280747 - DNA, 15 bp, Homo sapiens
ttttggtttgtttct

SEQ ID NO: 280748 - DNA, 15 bp, Homo sapiens
attttggtttgtttc

SEQ ID NO: 280749 - DNA, 15 bp, Homo sapiens
cattttggtttgttt

SEQ ID NO: 280750 - DNA, 15 bp, Homo sapiens
ccattttggtttgtt

SEQ ID NO: 280751 - DNA, 15 bp, Homo sapiens
accattttggtttgt

SEQ ID NO: 280752 - DNA, 15 bp, Homo sapiens
taccattttggtttg

SEQ ID NO: 280753 - DNA, 15 bp, Homo sapiens
ttaccattttggttt

SEQ ID NO: 280754 - DNA, 15 bp, Homo sapiens
cttaccattttggtt

SEQ ID NO: 280755 - DNA, 15 bp, Homo sapiens
tcttaccattttggt

SEQ ID NO: 280756 - DNA, 15 bp, Homo sapiens
ttcttaccattttgg

SEQ ID NO: 280757 - DNA, 15 bp, Homo sapiens
tttcttaccattttg

SEQ ID NO: 280758 - DNA, 15 bp, Homo sapiens
atttcttaccatttt

SEQ ID NO: 280759 - DNA, 15 bp, Homo sapiens
tatttcttaccattt

SEQ ID NO: 280760 - DNA, 15 bp, Homo sapiens
ttatttcttaccatt

SEQ ID NO: 280761 - DNA, 15 bp, Homo sapiens
cttatttcttaccat

SEQ ID NO: 280762 - DNA, 15 bp, Homo sapiens
gcttatttcttacca

SEQ ID NO: 280763 - DNA, 15 bp, Homo sapiens
tgcttatttcttacc

SEQ ID NO: 280764 - DNA, 15 bp, Homo sapiens
atgcttatttcttac

SEQ ID NO: 280765 - DNA, 15 bp, Homo sapiens
tatgcttatttctta

SEQ ID NO: 280766 - DNA, 15 bp, Homo sapiens
ttatgcttatttctt

SEQ ID NO: 280767 - DNA, 15 bp, Homo sapiens
tttatgcttatttct

SEQ ID NO: 280768 - DNA, 15 bp, Homo sapiens
ttttatgcttatttc

SEQ ID NO: 280769 - DNA, 15 bp, Homo sapiens
tttttatgcttattt

SEQ ID NO: 280770 - DNA, 15 bp, Homo sapiens
atttttatgcttatt

SEQ ID NO: 280771 - DNA, 15 bp, Homo sapiens
aatttttatgcttat

SEQ ID NO: 280772 - DNA, 15 bp, Homo sapiens
aaatttttatgctta

SEQ ID NO: 280773 - DNA, 15 bp, Homo sapiens
taaatttttatgctt

SEQ ID NO: 280774 - DNA, 15 bp, Homo sapiens
ttaaatttttatgct

SEQ ID NO: 280775 - DNA, 15 bp, Homo sapiens
tttaaatttttatgc

SEQ ID NO: 280776 - DNA, 15 bp, Homo sapiens
ctttaaatttttatg

SEQ ID NO: 280777 - DNA, 15 bp, Homo sapiens
tctttaaatttttat

SEQ ID NO: 280778 - DNA, 15 bp, Homo sapiens
gtctttaaattttta

SEQ ID NO: 280779 - DNA, 15 bp, Homo sapiens
agtctttaaattttt

SEQ ID NO: 280780 - DNA, 15 bp, Homo sapiens
tagtctttaaatttt

SEQ ID NO: 280781 - DNA, 15 bp, Homo sapiens
atagtctttaaattt

SEQ ID NO: 280782 - DNA, 15 bp, Homo sapiens
catagtctttaaatt

SEQ ID NO: 280783 - DNA, 15 bp, Homo sapiens
ccatagtctttaaat

SEQ ID NO: 280784 - DNA, 15 bp, Homo sapiens
accatagtctttaaa

SEQ ID NO: 280785 - DNA, 15 bp, Homo sapiens
taccatagtctttaa

SEQ ID NO: 280786 - DNA, 15 bp, Homo sapiens
ctaccatagtcttta

SEQ ID NO: 280787 - DNA, 15 bp, Homo sapiens
actaccatagtcttt

SEQ ID NO: 280788 - DNA, 15 bp, Homo sapiens
aactaccatagtctt

SEQ ID NO: 280789 - DNA, 15 bp, Homo sapiens
caactaccatagtct

SEQ ID NO: 280790 - DNA, 15 bp, Homo sapiens
ccaactaccatagtc

SEQ ID NO: 280791 - DNA, 15 bp, Homo sapiens
cccaactaccatagt

SEQ ID NO: 280792 - DNA, 15 bp, Homo sapiens
ccccaactaccatag

SEQ ID NO: 280793 - DNA, 15 bp, Homo sapiens
accccaactaccata

SEQ ID NO: 280794 - DNA, 15 bp, Homo sapiens
aaccccaactaccat

SEQ ID NO: 280795 - DNA, 15 bp, Homo sapiens
taaccccaactacca

SEQ ID NO: 280796 - DNA, 15 bp, Homo sapiens
ataaccccaactacc

SEQ ID NO: 280797 - DNA, 15 bp, Homo sapiens
aataaccccaactac

SEQ ID NO: 280798 - DNA, 15 bp, Homo sapiens
aaataaccccaacta

SEQ ID NO: 280799 - DNA, 15 bp, Homo sapiens
taaataaccccaact

SEQ ID NO: 280800 - DNA, 15 bp, Homo sapiens
ataaataaccccaac

SEQ ID NO: 280801 - DNA, 15 bp, Homo sapiens
aataaataaccccaa

SEQ ID NO: 280802 - DNA, 15 bp, Homo sapiens
taataaataacccca

SEQ ID NO: 280803 - DNA, 15 bp, Homo sapiens
ttaataaataacccc

SEQ ID NO: 280804 - DNA, 15 bp, Homo sapiens
tttaataaataaccc

SEQ ID NO: 280805 - DNA, 15 bp, Homo sapiens
ctttaataaataacc

SEQ ID NO: 280806 - DNA, 15 bp, Homo sapiens
tctttaataaataac

SEQ ID NO: 280807 - DNA, 15 bp, Homo sapiens
ctctttaataaataa

SEQ ID NO: 280808 - DNA, 15 bp, Homo sapiens
tctctttaataaata

SEQ ID NO: 280809 - DNA, 15 bp, Homo sapiens
gtctctttaataaat

SEQ ID NO: 280810 - DNA, 15 bp, Homo sapiens
tgtctctttaataaa

SEQ ID NO: 280811 - DNA, 15 bp, Homo sapiens
ttgtctctttaataa

SEQ ID NO: 280812 - DNA, 15 bp, Homo sapiens
tttgtctctttaata

SEQ ID NO: 280813 - DNA, 15 bp, Homo sapiens
gtttgtctctttaat

SEQ ID NO: 280814 - DNA, 15 bp, Homo sapiens
tgtttgtctctttaa

SEQ ID NO: 280815 - DNA, 15 bp, Homo sapiens
ttgtttgtctcttta

SEQ ID NO: 280816 - DNA, 15 bp, Homo sapiens
gttgtttgtctcttt

SEQ ID NO: 280817 - DNA, 15 bp, Homo sapiens
ggttgtttgtctctt

SEQ ID NO: 280818 - DNA, 15 bp, Homo sapiens
aggttgtttgtctct

SEQ ID NO: 280819 - DNA, 15 bp, Homo sapiens
aaggttgtttgtctc

SEQ ID NO: 280820 - DNA, 15 bp, Homo sapiens
aaaggttgtttgtct

SEQ ID NO: 280821 - DNA, 15 bp, Homo sapiens
caaaggttgtttgtc

SEQ ID NO: 280822 - DNA, 15 bp, Homo sapiens
tcaaaggttgtttgt

SEQ ID NO: 280823 - DNA, 15 bp, Homo sapiens
gtcaaaggttgtttg

SEQ ID NO: 280824 - DNA, 15 bp, Homo sapiens
tgtcaaaggttgttt

SEQ ID NO: 280825 - DNA, 15 bp, Homo sapiens
atgtcaaaggttgtt

SEQ ID NO: 280826 - DNA, 15 bp, Homo sapiens
gatgtcaaaggttgt

SEQ ID NO: 280827 - DNA, 15 bp, Homo sapiens
agatgtcaaaggttg

SEQ ID NO: 280828 - DNA, 15 bp, Homo sapiens
aagatgtcaaaggtt

SEQ ID NO: 280829 - DNA, 15 bp, Homo sapiens
taagatgtcaaaggt

SEQ ID NO: 280830 - DNA, 15 bp, Homo sapiens
ataagatgtcaaagg

SEQ ID NO: 280831 - DNA, 15 bp, Homo sapiens
aataagatgtcaaag

SEQ ID NO: 280832 - DNA, 15 bp, Homo sapiens
taataagatgtcaaa

SEQ ID NO: 280833 - DNA, 15 bp, Homo sapiens
ctaataagatgtcaa

SEQ ID NO: 280834 - DNA, 15 bp, Homo sapiens
actaataagatgtca

SEQ ID NO: 280835 - DNA, 15 bp, Homo sapiens
aactaataagatgtc

SEQ ID NO: 280836 - DNA, 15 bp, Homo sapiens
gaactaataagatgt

SEQ ID NO: 280837 - DNA, 15 bp, Homo sapiens
ggaactaataagatg

SEQ ID NO: 280838 - DNA, 15 bp, Homo sapiens
gggaactaataagat

SEQ ID NO: 280839 - DNA, 15 bp, Homo sapiens
tgggaactaataaga

SEQ ID NO: 280840 - DNA, 15 bp, Homo sapiens
ttgggaactaataag

SEQ ID NO: 280841 - DNA, 15 bp, Homo sapiens
cttgggaactaataa

SEQ ID NO: 280842 - DNA, 15 bp, Homo sapiens
tcttgggaactaata

SEQ ID NO: 280843 - DNA, 15 bp, Homo sapiens
ttcttgggaactaat

SEQ ID NO: 280844 - DNA, 15 bp, Homo sapiens
tttcttgggaactaa

SEQ ID NO: 280845 - DNA, 15 bp, Homo sapiens
atttcttgggaacta

SEQ ID NO: 280846 - DNA, 15 bp, Homo sapiens
aatttcttgggaact

SEQ ID NO: 280847 - DNA, 15 bp, Homo sapiens
caatttcttgggaac

SEQ ID NO: 280848 - DNA, 15 bp, Homo sapiens
tcaatttcttgggaa

SEQ ID NO: 280849 - DNA, 15 bp, Homo sapiens
gtcaatttcttggga

SEQ ID NO: 280850 - DNA, 15 bp, Homo sapiens
ggtcaatttcttggg

SEQ ID NO: 280851 - DNA, 15 bp, Homo sapiens
tggtcaatttcttgg

SEQ ID NO: 280852 - DNA, 15 bp, Homo sapiens
atggtcaatttcttg

SEQ ID NO: 280853 - DNA, 15 bp, Homo sapiens
tatggtcaatttctt

SEQ ID NO: 280854 - DNA, 15 bp, Homo sapiens
atatggtcaatttct

SEQ ID NO: 280855 - DNA, 15 bp, Homo sapiens
aatatggtcaatttc

SEQ ID NO: 280856 - DNA, 15 bp, Homo sapiens
taatatggtcaattt

SEQ ID NO: 280857 - DNA, 15 bp, Homo sapiens
ttaatatggtcaatt

SEQ ID NO: 280858 - DNA, 15 bp, Homo sapiens
gttaatatggtcaat

SEQ ID NO: 280859 - DNA, 15 bp, Homo sapiens
tgttaatatggtcaa

SEQ ID NO: 280860 - DNA, 15 bp, Homo sapiens
atgttaatatggtca

SEQ ID NO: 280861 - DNA, 15 bp, Homo sapiens
tatgttaatatggtc

SEQ ID NO: 280862 - DNA, 15 bp, Homo sapiens
ttatgttaatatggt

SEQ ID NO: 280863 - DNA, 15 bp, Homo sapiens
tttatgttaatatgg

SEQ ID NO: 280864 - DNA, 15 bp, Homo sapiens
gtttatgttaatatg

SEQ ID NO: 280865 - DNA, 15 bp, Homo sapiens
tgtttatgttaatat

SEQ ID NO: 280866 - DNA, 15 bp, Homo sapiens
gtgtttatgttaata

SEQ ID NO: 280867 - DNA, 15 bp, Homo sapiens
tgtgtttatgttaat

SEQ ID NO: 280868 - DNA, 15 bp, Homo sapiens
ttgtgtttatgttaa

SEQ ID NO: 280869 - DNA, 15 bp, Homo sapiens
tttgtgtttatgtta

SEQ ID NO: 280870 - DNA, 15 bp, Homo sapiens
atttgtgtttatgtt

SEQ ID NO: 280871 - DNA, 15 bp, Homo sapiens
tatttgtgtttatgt

SEQ ID NO: 280872 - DNA, 15 bp, Homo sapiens
gtatttgtgtttatg

SEQ ID NO: 280873 - DNA, 15 bp, Homo sapiens
tgtatttgtgtttat

SEQ ID NO: 280874 - DNA, 15 bp, Homo sapiens
ctgtatttgtgttta

SEQ ID NO: 280875 - DNA, 15 bp, Homo sapiens
tctgtatttgtgttt

SEQ ID NO: 280876 - DNA, 15 bp, Homo sapiens
ttctgtatttgtgtt

SEQ ID NO: 280877 - DNA, 15 bp, Homo sapiens
cttctgtatttgtgt

SEQ ID NO: 280878 - DNA, 15 bp, Homo sapiens
acttctgtatttgtg

SEQ ID NO: 280879 - DNA, 15 bp, Homo sapiens
aacttctgtatttgt

SEQ ID NO: 280880 - DNA, 15 bp, Homo sapiens
caacttctgtatttg

SEQ ID NO: 280881 - DNA, 15 bp, Homo sapiens
tcaacttctgtattt

SEQ ID NO: 280882 - DNA, 15 bp, Homo sapiens
atcaacttctgtatt

SEQ ID NO: 280883 - DNA, 15 bp, Homo sapiens
aatcaacttctgtat

SEQ ID NO: 280884 - DNA, 15 bp, Homo sapiens
aaatcaacttctgta

SEQ ID NO: 280885 - DNA, 15 bp, Homo sapiens
aaaatcaacttctgt

SEQ ID NO: 280886 - DNA, 15 bp, Homo sapiens
aaaaatcaacttctg

SEQ ID NO: 280887 - DNA, 15 bp, Homo sapiens
caaaaatcaacttct

SEQ ID NO: 280888 - DNA, 15 bp, Homo sapiens
acaaaaatcaacttc

SEQ ID NO: 280889 - DNA, 15 bp, Homo sapiens
aacaaaaatcaactt

SEQ ID NO: 280890 - DNA, 15 bp, Homo sapiens
gaacaaaaatcaact

SEQ ID NO: 280891 - DNA, 15 bp, Homo sapiens
tgaacaaaaatcaac

SEQ ID NO: 280892 - DNA, 15 bp, Homo sapiens
atgaacaaaaatcaa

SEQ ID NO: 280893 - DNA, 15 bp, Homo sapiens
aatgaacaaaaatca

SEQ ID NO: 280894 - DNA, 15 bp, Homo sapiens
aaatgaacaaaaatc

SEQ ID NO: 280895 - DNA, 15 bp, Homo sapiens
aaaatgaacaaaaat

SEQ ID NO: 280896 - DNA, 15 bp, Homo sapiens
taaaatgaacaaaaa

SEQ ID NO: 280897 - DNA, 15 bp, Homo sapiens
ataaaatgaacaaaa

SEQ ID NO: 280898 - DNA, 15 bp, Homo sapiens
aataaaatgaacaaa

SEQ ID NO: 280899 - DNA, 15 bp, Homo sapiens
taataaaatgaacaa

SEQ ID NO: 280900 - DNA, 15 bp, Homo sapiens
ttaataaaatgaaca

SEQ ID NO: 280901 - DNA, 15 bp, Homo sapiens
tttaataaaatgaac

SEQ ID NO: 280902 - DNA, 15 bp, Homo sapiens
ttttaataaaatgaa

SEQ ID NO: 280903 - DNA, 15 bp, Homo sapiens
attttaataaaatga

SEQ ID NO: 280904 - DNA, 15 bp, Homo sapiens
tattttaataaaatg

SEQ ID NO: 280905 - DNA, 15 bp, Homo sapiens
atattttaataaaat

SEQ ID NO: 280906 - DNA, 15 bp, Homo sapiens
tatattttaataaaa

SEQ ID NO: 280907 - DNA, 15 bp, Homo sapiens
atatattttaataaa

SEQ ID NO: 280908 - DNA, 15 bp, Homo sapiens
tatatattttaataa

SEQ ID NO: 280909 - DNA, 15 bp, Homo sapiens
atatatattttaata

SEQ ID NO: 280910 - DNA, 15 bp, Homo sapiens
aatatatattttaat

SEQ ID NO: 280911 - DNA, 15 bp, Homo sapiens
aaatatatattttaa

SEQ ID NO: 280912 - DNA, 15 bp, Homo sapiens
aaaatatatatttta

SEQ ID NO: 280913 - DNA, 15 bp, Homo sapiens
aaaaatatatatttt

SEQ ID NO: 280914 - DNA, 15 bp, Homo sapiens
taaaaatatatattt

SEQ ID NO: 280915 - DNA, 15 bp, Homo sapiens
ttaaaaatatatatt

SEQ ID NO: 280916 - DNA, 15 bp, Homo sapiens
attaaaaatatatat

SEQ ID NO: 280917 - DNA, 15 bp, Homo sapiens
aattaaaaatatata

SEQ ID NO: 280918 - DNA, 15 bp, Homo sapiens
taattaaaaatatat

SEQ ID NO: 280919 - DNA, 15 bp, Homo sapiens
ctaattaaaaatata

SEQ ID NO: 280920 - DNA, 15 bp, Homo sapiens
actaattaaaaatat

SEQ ID NO: 280921 - DNA, 15 bp, Homo sapiens
gactaattaaaaata

SEQ ID NO: 280922 - DNA, 15 bp, Homo sapiens
agactaattaaaaat

SEQ ID NO: 280923 - DNA, 15 bp, Homo sapiens
aagactaattaaaaa

SEQ ID NO: 280924 - DNA, 15 bp, Homo sapiens
caagactaattaaaa

SEQ ID NO: 280925 - DNA, 15 bp, Homo sapiens
tcaagactaattaaa

SEQ ID NO: 280926 - DNA, 15 bp, Homo sapiens
ttcaagactaattaa

SEQ ID NO: 280927 - DNA, 15 bp, Homo sapiens
tttcaagactaatta

SEQ ID NO: 280928 - DNA, 15 bp, Homo sapiens
ttttcaagactaatt

SEQ ID NO: 280929 - DNA, 15 bp, Homo sapiens
gttttcaagactaat

SEQ ID NO: 280930 - DNA, 15 bp, Homo sapiens
tgttttcaagactaa

SEQ ID NO: 280931 - DNA, 15 bp, Homo sapiens
ctgttttcaagacta

SEQ ID NO: 280932 - DNA, 15 bp, Homo sapiens
actgttttcaagact

SEQ ID NO: 280933 - DNA, 15 bp, Homo sapiens
cactgttttcaagac

SEQ ID NO: 280934 - DNA, 15 bp, Homo sapiens
tcactgttttcaaga

SEQ ID NO: 280935 - DNA, 15 bp, Homo sapiens
ttcactgttttcaag

SEQ ID NO: 280936 - DNA, 15 bp, Homo sapiens
cttcactgttttcaa

SEQ ID NO: 280937 - DNA, 15 bp, Homo sapiens
gcttcactgttttca

SEQ ID NO: 280938 - DNA, 15 bp, Homo sapiens
tgcttcactgttttc

SEQ ID NO: 280939 - DNA, 15 bp, Homo sapiens
ctgcttcactgtttt

SEQ ID NO: 280940 - DNA, 15 bp, Homo sapiens
actgcttcactgttt

SEQ ID NO: 280941 - DNA, 15 bp, Homo sapiens
cactgcttcactgtt

SEQ ID NO: 280942 - DNA, 15 bp, Homo sapiens
acactgcttcactgt

SEQ ID NO: 280943 - DNA, 15 bp, Homo sapiens
tacactgcttcactg

SEQ ID NO: 280944 - DNA, 15 bp, Homo sapiens
atacactgcttcact

SEQ ID NO: 280945 - DNA, 15 bp, Homo sapiens
tatacactgcttcac

SEQ ID NO: 280946 - DNA, 15 bp, Homo sapiens
gtatacactgcttca

SEQ ID NO: 280947 - DNA, 15 bp, Homo sapiens
agtatacactgcttc

SEQ ID NO: 280948 - DNA, 15 bp, Homo sapiens
aagtatacactgctt

SEQ ID NO: 280949 - DNA, 15 bp, Homo sapiens
aaagtatacactgct

SEQ ID NO: 280950 - DNA, 15 bp, Homo sapiens
caaagtatacactgc

SEQ ID NO: 280951 - DNA, 15 bp, Homo sapiens
acaaagtatacactg

SEQ ID NO: 280952 - DNA, 15 bp, Homo sapiens
tacaaagtatacact

SEQ ID NO: 280953 - DNA, 15 bp, Homo sapiens
atacaaagtatacac

SEQ ID NO: 280954 - DNA, 15 bp, Homo sapiens
gatacaaagtataca

SEQ ID NO: 280955 - DNA, 15 bp, Homo sapiens
agatacaaagtatac

SEQ ID NO: 280956 - DNA, 15 bp, Homo sapiens
aagatacaaagtata

SEQ ID NO: 280957 - DNA, 15 bp, Homo sapiens
gaagatacaaagtat

SEQ ID NO: 280958 - DNA, 15 bp, Homo sapiens
tgaagatacaaagta

SEQ ID NO: 280959 - DNA, 15 bp, Homo sapiens
ttgaagatacaaagt

SEQ ID NO: 280960 - DNA, 15 bp, Homo sapiens
attgaagatacaaag

SEQ ID NO: 280961 - DNA, 15 bp, Homo sapiens
aattgaagatacaaa

SEQ ID NO: 280962 - DNA, 15 bp, Homo sapiens
aaattgaagatacaa

SEQ ID NO: 280963 - DNA, 15 bp, Homo sapiens
gaaattgaagataca

SEQ ID NO: 280964 - DNA, 15 bp, Homo sapiens
tgaaattgaagatac

SEQ ID NO: 280965 - DNA, 15 bp, Homo sapiens
ctgaaattgaagata

SEQ ID NO: 280966 - DNA, 15 bp, Homo sapiens
tctgaaattgaagat

SEQ ID NO: 280967 - DNA, 15 bp, Homo sapiens
ttctgaaattgaaga

SEQ ID NO: 280968 - DNA, 15 bp, Homo sapiens
tttctgaaattgaag

SEQ ID NO: 280969 - DNA, 15 bp, Homo sapiens
gtttctgaaattgaa

SEQ ID NO: 280970 - DNA, 15 bp, Homo sapiens
tgtttctgaaattga

SEQ ID NO: 280971 - DNA, 15 bp, Homo sapiens
ctgtttctgaaattg

SEQ ID NO: 280972 - DNA, 15 bp, Homo sapiens
actgtttctgaaatt

SEQ ID NO: 280973 - DNA, 15 bp, Homo sapiens
tactgtttctgaaat

SEQ ID NO: 280974 - DNA, 15 bp, Homo sapiens
ttactgtttctgaaa

SEQ ID NO: 280975 - DNA, 15 bp, Homo sapiens
cttactgtttctgaa

SEQ ID NO: 280976 - DNA, 15 bp, Homo sapiens
acttactgtttctga

SEQ ID NO: 280977 - DNA, 15 bp, Homo sapiens
tacttactgtttctg

SEQ ID NO: 280978 - DNA, 15 bp, Homo sapiens
atacttactgtttct

SEQ ID NO: 280979 - DNA, 15 bp, Homo sapiens
catacttactgtttc

SEQ ID NO: 280980 - DNA, 15 bp, Homo sapiens
acatacttactgttt

SEQ ID NO: 280981 - DNA, 15 bp, Homo sapiens
tacatacttactgtt

SEQ ID NO: 280982 - DNA, 15 bp, Homo sapiens
ttacatacttactgt

SEQ ID NO: 280983 - DNA, 15 bp, Homo sapiens
gttacatacttactg

SEQ ID NO: 280984 - DNA, 15 bp, Homo sapiens
tgttacatacttact

SEQ ID NO: 280985 - DNA, 15 bp, Homo sapiens
atgttacatacttac

SEQ ID NO: 280986 - DNA, 15 bp, Homo sapiens
tatgttacatactta

SEQ ID NO: 280987 - DNA, 15 bp, Homo sapiens
ctatgttacatactt

SEQ ID NO: 280988 - DNA, 15 bp, Homo sapiens
actatgttacatact

SEQ ID NO: 280989 - DNA, 15 bp, Homo sapiens
aactatgttacatac

SEQ ID NO: 280990 - DNA, 15 bp, Homo sapiens
aaactatgttacata

SEQ ID NO: 280991 - DNA, 15 bp, Homo sapiens
gaaactatgttacat

SEQ ID NO: 280992 - DNA, 15 bp, Homo sapiens
tgaaactatgttaca

SEQ ID NO: 280993 - DNA, 15 bp, Homo sapiens
ttgaaactatgttac

SEQ ID NO: 280994 - DNA, 15 bp, Homo sapiens
tttgaaactatgtta

SEQ ID NO: 280995 - DNA, 15 bp, Homo sapiens
ttttgaaactatgtt

SEQ ID NO: 280996 - DNA, 15 bp, Homo sapiens
attttgaaactatgt

SEQ ID NO: 280997 - DNA, 15 bp, Homo sapiens
gattttgaaactatg

SEQ ID NO: 280998 - DNA, 15 bp, Homo sapiens
tgattttgaaactat

SEQ ID NO: 280999 - DNA, 15 bp, Homo sapiens
ctgattttgaaacta

SEQ ID NO: 281000 - DNA, 15 bp, Homo sapiens
tctgattttgaaact

SEQ ID NO: 281001 - DNA, 15 bp, Homo sapiens
atctgattttgaaac

SEQ ID NO: 281002 - DNA, 15 bp, Homo sapiens
aatctgattttgaaa

SEQ ID NO: 281003 - DNA, 15 bp, Homo sapiens
aaatctgattttgaa

SEQ ID NO: 281004 - DNA, 15 bp, Homo sapiens
taaatctgattttga

SEQ ID NO: 281005 - DNA, 15 bp, Homo sapiens
ataaatctgattttg

SEQ ID NO: 281006 - DNA, 15 bp, Homo sapiens
aataaatctgatttt

SEQ ID NO: 281007 - DNA, 15 bp, Homo sapiens
caataaatctgattt

SEQ ID NO: 281008 - DNA, 15 bp, Homo sapiens
tcaataaatctgatt

SEQ ID NO: 281009 - DNA, 15 bp, Homo sapiens
ctcaataaatctgat

SEQ ID NO: 281010 - DNA, 15 bp, Homo sapiens
cctcaataaatctga

SEQ ID NO: 281011 - DNA, 15 bp, Homo sapiens
acctcaataaatctg

SEQ ID NO: 281012 - DNA, 15 bp, Homo sapiens
tacctcaataaatct

SEQ ID NO: 281013 - DNA, 15 bp, Homo sapiens
atacctcaataaatc

SEQ ID NO: 281014 - DNA, 15 bp, Homo sapiens
tatacctcaataaat

SEQ ID NO: 281015 - DNA, 15 bp, Homo sapiens
ttatacctcaataaa

SEQ ID NO: 281016 - DNA, 15 bp, Homo sapiens
attatacctcaataa

SEQ ID NO: 281017 - DNA, 15 bp, Homo sapiens
aattatacctcaata

SEQ ID NO: 281018 - DNA, 15 bp, Homo sapiens
aaattatacctcaat

SEQ ID NO: 281019 - DNA, 15 bp, Homo sapiens
taaattatacctcaa

SEQ ID NO: 281020 - DNA, 15 bp, Homo sapiens
gtaaattatacctca

SEQ ID NO: 281021 - DNA, 15 bp, Homo sapiens
tgtaaattatacctc

SEQ ID NO: 281022 - DNA, 15 bp, Homo sapiens
atgtaaattatacct

SEQ ID NO: 281023 - DNA, 15 bp, Homo sapiens
tatgtaaattatacc

SEQ ID NO: 281024 - DNA, 15 bp, Homo sapiens
gtatgtaaattatac

SEQ ID NO: 281025 - DNA, 15 bp, Homo sapiens
tgtatgtaaattata

SEQ ID NO: 281026 - DNA, 15 bp, Homo sapiens
gtgtatgtaaattat

SEQ ID NO: 281027 - DNA, 15 bp, Homo sapiens
tgtgtatgtaaatta

SEQ ID NO: 281028 - DNA, 15 bp, Homo sapiens
ttgtgtatgtaaatt

SEQ ID NO: 281029 - DNA, 15 bp, Homo sapiens
tttgtgtatgtaaat

SEQ ID NO: 281030 - DNA, 15 bp, Homo sapiens
ttttgtgtatgtaaa

SEQ ID NO: 281031 - DNA, 15 bp, Homo sapiens
attttgtgtatgtaa

SEQ ID NO: 281032 - DNA, 15 bp, Homo sapiens
tattttgtgtatgta

SEQ ID NO: 281033 - DNA, 15 bp, Homo sapiens
atattttgtgtatgt

SEQ ID NO: 281034 - DNA, 15 bp, Homo sapiens
catattttgtgtatg

SEQ ID NO: 281035 - DNA, 15 bp, Homo sapiens
gcatattttgtgtat

SEQ ID NO: 281036 - DNA, 15 bp, Homo sapiens
ggcatattttgtgta

SEQ ID NO: 281037 - DNA, 15 bp, Homo sapiens
tggcatattttgtgt

SEQ ID NO: 281038 - DNA, 15 bp, Homo sapiens
ttggcatattttgtg

SEQ ID NO: 281039 - DNA, 15 bp, Homo sapiens
attggcatattttgt

SEQ ID NO: 281040 - DNA, 15 bp, Homo sapiens
aattggcatattttg

SEQ ID NO: 281041 - DNA, 15 bp, Homo sapiens
aaattggcatatttt

SEQ ID NO: 281042 - DNA, 15 bp, Homo sapiens
aaaattggcatattt

SEQ ID NO: 281043 - DNA, 15 bp, Homo sapiens
taaaattggcatatt

SEQ ID NO: 281044 - DNA, 15 bp, Homo sapiens
ttaaaattggcatat

SEQ ID NO: 281045 - DNA, 15 bp, Homo sapiens
cttaaaattggcata

SEQ ID NO: 281046 - DNA, 15 bp, Homo sapiens
acttaaaattggcat

SEQ ID NO: 281047 - DNA, 15 bp, Homo sapiens
cacttaaaattggca

SEQ ID NO: 281048 - DNA, 15 bp, Homo sapiens
gcacttaaaattggc

SEQ ID NO: 281049 - DNA, 15 bp, Homo sapiens
tgcacttaaaattgg

SEQ ID NO: 281050 - DNA, 15 bp, Homo sapiens
gtgcacttaaaattg

SEQ ID NO: 281051 - DNA, 15 bp, Homo sapiens
tgtgcacttaaaatt

SEQ ID NO: 281052 - DNA, 15 bp, Homo sapiens
ctgtgcacttaaaat

SEQ ID NO: 281053 - DNA, 15 bp, Homo sapiens
actgtgcacttaaaa

SEQ ID NO: 281054 - DNA, 15 bp, Homo sapiens
aactgtgcacttaaa

SEQ ID NO: 281055 - DNA, 15 bp, Homo sapiens
gaactgtgcacttaa

SEQ ID NO: 281056 - DNA, 15 bp, Homo sapiens
tgaactgtgcactta

SEQ ID NO: 281057 - DNA, 15 bp, Homo sapiens
ttgaactgtgcactt

SEQ ID NO: 281058 - DNA, 15 bp, Homo sapiens
attgaactgtgcact

SEQ ID NO: 281059 - DNA, 15 bp, Homo sapiens
tattgaactgtgcac

SEQ ID NO: 281060 - DNA, 15 bp, Homo sapiens
gtattgaactgtgca

SEQ ID NO: 281061 - DNA, 15 bp, Homo sapiens
cgtattgaactgtgc

SEQ ID NO: 281062 - DNA, 15 bp, Homo sapiens
acgtattgaactgtg

SEQ ID NO: 281063 - DNA, 15 bp, Homo sapiens
aacgtattgaactgt

SEQ ID NO: 281064 - DNA, 15 bp, Homo sapiens
aaacgtattgaactg

SEQ ID NO: 281065 - DNA, 15 bp, Homo sapiens
aaaacgtattgaact

SEQ ID NO: 281066 - DNA, 15 bp, Homo sapiens
taaaacgtattgaac

SEQ ID NO: 281067 - DNA, 15 bp, Homo sapiens
ttaaaacgtattgaa

SEQ ID NO: 281068 - DNA, 15 bp, Homo sapiens
gttaaaacgtattga

SEQ ID NO: 281069 - DNA, 15 bp, Homo sapiens
tgttaaaacgtattg

SEQ ID NO: 281070 - DNA, 15 bp, Homo sapiens
ctgttaaaacgtatt

SEQ ID NO: 281071 - DNA, 15 bp, Homo sapiens
tctgttaaaacgtat

SEQ ID NO: 281072 - DNA, 15 bp, Homo sapiens
gtctgttaaaacgta

SEQ ID NO: 281073 - DNA, 15 bp, Homo sapiens
tgtctgttaaaacgt

SEQ ID NO: 281074 - DNA, 15 bp, Homo sapiens
atgtctgttaaaacg

SEQ ID NO: 281075 - DNA, 15 bp, Homo sapiens
tatgtctgttaaaac

SEQ ID NO: 281076 - DNA, 15 bp, Homo sapiens
atatgtctgttaaaa

SEQ ID NO: 281077 - DNA, 15 bp, Homo sapiens
aatatgtctgttaaa

SEQ ID NO: 281078 - DNA, 15 bp, Homo sapiens
gaatatgtctgttaa

SEQ ID NO: 281079 - DNA, 15 bp, Homo sapiens
tgaatatgtctgtta

SEQ ID NO: 281080 - DNA, 15 bp, Homo sapiens
gtgaatatgtctgtt

SEQ ID NO: 281081 - DNA, 15 bp, Homo sapiens
agtgaatatgtctgt

SEQ ID NO: 281082 - DNA, 15 bp, Homo sapiens
gagtgaatatgtctg

SEQ ID NO: 281083 - DNA, 15 bp, Homo sapiens
tgagtgaatatgtct

SEQ ID NO: 281084 - DNA, 15 bp, Homo sapiens
atgagtgaatatgtc

SEQ ID NO: 281085 - DNA, 15 bp, Homo sapiens
tatgagtgaatatgt

SEQ ID NO: 281086 - DNA, 15 bp, Homo sapiens
atatgagtgaatatg

SEQ ID NO: 281087 - DNA, 15 bp, Homo sapiens
tatatgagtgaatat

SEQ ID NO: 281088 - DNA, 15 bp, Homo sapiens
ttatatgagtgaata

SEQ ID NO: 281089 - DNA, 15 bp, Homo sapiens
attatatgagtgaat

SEQ ID NO: 281090 - DNA, 15 bp, Homo sapiens
gattatatgagtgaa

SEQ ID NO: 281091 - DNA, 15 bp, Homo sapiens
tgattatatgagtga

SEQ ID NO: 281092 - DNA, 15 bp, Homo sapiens
gtgattatatgagtg

SEQ ID NO: 281093 - DNA, 15 bp, Homo sapiens
ggtgattatatgagt

SEQ ID NO: 281094 - DNA, 15 bp, Homo sapiens
tggtgattatatgag

SEQ ID NO: 281095 - DNA, 15 bp, Homo sapiens
gtggtgattatatga

SEQ ID NO: 281096 - DNA, 15 bp, Homo sapiens
ggtggtgattatatg

SEQ ID NO: 281097 - DNA, 15 bp, Homo sapiens
tggtggtgattatat

SEQ ID NO: 281098 - DNA, 15 bp, Homo sapiens
atggtggtgattata

SEQ ID NO: 281099 - DNA, 15 bp, Homo sapiens
aatggtggtgattat

SEQ ID NO: 281100 - DNA, 15 bp, Homo sapiens
taatggtggtgatta

SEQ ID NO: 281101 - DNA, 15 bp, Homo sapiens
ttaatggtggtgatt

SEQ ID NO: 281102 - DNA, 15 bp, Homo sapiens
cttaatggtggtgat

SEQ ID NO: 281103 - DNA, 15 bp, Homo sapiens
tcttaatggtggtga

SEQ ID NO: 281104 - DNA, 15 bp, Homo sapiens
atcttaatggtggtg

SEQ ID NO: 281105 - DNA, 15 bp, Homo sapiens
tatcttaatggtggt

SEQ ID NO: 281106 - DNA, 15 bp, Homo sapiens
atatcttaatggtgg

SEQ ID NO: 281107 - DNA, 15 bp, Homo sapiens
tatatcttaatggtg

SEQ ID NO: 281108 - DNA, 15 bp, Homo sapiens
ctatatcttaatggt

SEQ ID NO: 281109 - DNA, 15 bp, Homo sapiens
tctatatcttaatgg

SEQ ID NO: 281110 - DNA, 15 bp, Homo sapiens
ttctatatcttaatg

SEQ ID NO: 281111 - DNA, 15 bp, Homo sapiens
gttctatatcttaat

SEQ ID NO: 281112 - DNA, 15 bp, Homo sapiens
agttctatatcttaa

SEQ ID NO: 281113 - DNA, 15 bp, Homo sapiens
aagttctatatctta

SEQ ID NO: 281114 - DNA, 15 bp, Homo sapiens
aaagttctatatctt

SEQ ID NO: 281115 - DNA, 15 bp, Homo sapiens
aaaagttctatatct

SEQ ID NO: 281116 - DNA, 15 bp, Homo sapiens
aaaaagttctatatc

SEQ ID NO: 281117 - DNA, 15 bp, Homo sapiens
caaaaagttctatat

SEQ ID NO: 281118 - DNA, 15 bp, Homo sapiens
tcaaaaagttctata

SEQ ID NO: 281119 - DNA, 15 bp, Homo sapiens
atcaaaaagttctat

SEQ ID NO: 281120 - DNA, 15 bp, Homo sapiens
gatcaaaaagttcta

SEQ ID NO: 281121 - DNA, 15 bp, Homo sapiens
tgatcaaaaagttct

SEQ ID NO: 281122 - DNA, 15 bp, Homo sapiens
gtgatcaaaaagttc

SEQ ID NO: 281123 - DNA, 15 bp, Homo sapiens
agtgatcaaaaagtt

SEQ ID NO: 281124 - DNA, 15 bp, Homo sapiens
gagtgatcaaaaagt

SEQ ID NO: 281125 - DNA, 15 bp, Homo sapiens
ggagtgatcaaaaag

SEQ ID NO: 281126 - DNA, 15 bp, Homo sapiens
tggagtgatcaaaaa

SEQ ID NO: 281127 - DNA, 15 bp, Homo sapiens
ctggagtgatcaaaa

SEQ ID NO: 281128 - DNA, 15 bp, Homo sapiens
tctggagtgatcaaa

SEQ ID NO: 281129 - DNA, 15 bp, Homo sapiens
ttctggagtgatcaa

SEQ ID NO: 281130 - DNA, 15 bp, Homo sapiens
tttctggagtgatca

SEQ ID NO: 281131 - DNA, 15 bp, Homo sapiens
ctttctggagtgatc

SEQ ID NO: 281132 - DNA, 15 bp, Homo sapiens
actttctggagtgat

SEQ ID NO: 281133 - DNA, 15 bp, Homo sapiens
aactttctggagtga

SEQ ID NO: 281134 - DNA, 15 bp, Homo sapiens
gaactttctggagtg

SEQ ID NO: 281135 - DNA, 15 bp, Homo sapiens
agaactttctggagt

SEQ ID NO: 281136 - DNA, 15 bp, Homo sapiens
aagaactttctggag

SEQ ID NO: 281137 - DNA, 15 bp, Homo sapiens
aaagaactttctgga

SEQ ID NO: 281138 - DNA, 15 bp, Homo sapiens
gaaagaactttctgg

SEQ ID NO: 281139 - DNA, 15 bp, Homo sapiens
tgaaagaactttctg

SEQ ID NO: 281140 - DNA, 15 bp, Homo sapiens
atgaaagaactttct

SEQ ID NO: 281141 - DNA, 15 bp, Homo sapiens
aatgaaagaactttc

SEQ ID NO: 281142 - DNA, 15 bp, Homo sapiens
gaatgaaagaacttt

SEQ ID NO: 281143 - DNA, 15 bp, Homo sapiens
ggaatgaaagaactt

SEQ ID NO: 281144 - DNA, 15 bp, Homo sapiens
gggaatgaaagaact

SEQ ID NO: 281145 - DNA, 15 bp, Homo sapiens
ggggaatgaaagaac

SEQ ID NO: 281146 - DNA, 15 bp, Homo sapiens
aggggaatgaaagaa

SEQ ID NO: 281147 - DNA, 15 bp, Homo sapiens
aaggggaatgaaaga

SEQ ID NO: 281148 - DNA, 15 bp, Homo sapiens
aaaggggaatgaaag

SEQ ID NO: 281149 - DNA, 15 bp, Homo sapiens
caaaggggaatgaaa

SEQ ID NO: 281150 - DNA, 15 bp, Homo sapiens
gcaaaggggaatgaa

SEQ ID NO: 281151 - DNA, 15 bp, Homo sapiens
tgcaaaggggaatga

SEQ ID NO: 281152 - DNA, 15 bp, Homo sapiens
ctgcaaaggggaatg

SEQ ID NO: 281153 - DNA, 15 bp, Homo sapiens
actgcaaaggggaat

SEQ ID NO: 281154 - DNA, 15 bp, Homo sapiens
gactgcaaaggggaa

SEQ ID NO: 281155 - DNA, 15 bp, Homo sapiens
tgactgcaaagggga

SEQ ID NO: 281156 - DNA, 15 bp, Homo sapiens
atgactgcaaagggg

SEQ ID NO: 281157 - DNA, 15 bp, Homo sapiens
aatgactgcaaaggg

SEQ ID NO: 281158 - DNA, 15 bp, Homo sapiens
aaatgactgcaaagg

SEQ ID NO: 281159 - DNA, 15 bp, Homo sapiens
gaaatgactgcaaag

SEQ ID NO: 281160 - DNA, 15 bp, Homo sapiens
ggaaatgactgcaaa

SEQ ID NO: 281161 - DNA, 15 bp, Homo sapiens
gggaaatgactgcaa

SEQ ID NO: 281162 - DNA, 15 bp, Homo sapiens
tgggaaatgactgca

SEQ ID NO: 281163 - DNA, 15 bp, Homo sapiens
ttgggaaatgactgc

SEQ ID NO: 281164 - DNA, 15 bp, Homo sapiens
gttgggaaatgactg

SEQ ID NO: 281165 - DNA, 15 bp, Homo sapiens
tgttgggaaatgact

SEQ ID NO: 281166 - DNA, 15 bp, Homo sapiens
gtgttgggaaatgac

SEQ ID NO: 281167 - DNA, 15 bp, Homo sapiens
ggtgttgggaaatga

SEQ ID NO: 281168 - DNA, 15 bp, Homo sapiens
aggtgttgggaaatg

SEQ ID NO: 281169 - DNA, 15 bp, Homo sapiens
gaggtgttgggaaat

SEQ ID NO: 281170 - DNA, 15 bp, Homo sapiens
ggaggtgttgggaaa

SEQ ID NO: 281171 - DNA, 15 bp, Homo sapiens
gggaggtgttgggaa

SEQ ID NO: 281172 - DNA, 15 bp, Homo sapiens
ggggaggtgttggga

SEQ ID NO: 281173 - DNA, 15 bp, Homo sapiens
aggggaggtgttggg

SEQ ID NO: 281174 - DNA, 15 bp, Homo sapiens
gaggggaggtgttgg

SEQ ID NO: 281175 - DNA, 15 bp, Homo sapiens
agaggggaggtgttg

SEQ ID NO: 281176 - DNA, 15 bp, Homo sapiens
cagaggggaggtgtt

SEQ ID NO: 281177 - DNA, 15 bp, Homo sapiens
acagaggggaggtgt

SEQ ID NO: 281178 - DNA, 15 bp, Homo sapiens
aacagaggggaggtg

SEQ ID NO: 281179 - DNA, 15 bp, Homo sapiens
gaacagaggggaggt

SEQ ID NO: 281180 - DNA, 15 bp, Homo sapiens
ggaacagaggggagg

SEQ ID NO: 281181 - DNA, 15 bp, Homo sapiens
cggaacagaggggag

SEQ ID NO: 281182 - DNA, 15 bp, Homo sapiens
gcggaacagagggga

SEQ ID NO: 281183 - DNA, 15 bp, Homo sapiens
tgcggaacagagggg

SEQ ID NO: 281184 - DNA, 15 bp, Homo sapiens
ctgcggaacagaggg

SEQ ID NO: 281185 - DNA, 15 bp, Homo sapiens
cctgcggaacagagg

SEQ ID NO: 281186 - DNA, 15 bp, Homo sapiens
gcctgcggaacagag

SEQ ID NO: 281187 - DNA, 15 bp, Homo sapiens
tgcctgcggaacaga

SEQ ID NO: 281188 - DNA, 15 bp, Homo sapiens
ttgcctgcggaacag

SEQ ID NO: 281189 - DNA, 15 bp, Homo sapiens
gttgcctgcggaaca

SEQ ID NO: 281190 - DNA, 15 bp, Homo sapiens
agttgcctgcggaac

SEQ ID NO: 281191 - DNA, 15 bp, Homo sapiens
tagttgcctgcggaa

SEQ ID NO: 281192 - DNA, 15 bp, Homo sapiens
gtagttgcctgcgga

SEQ ID NO: 281193 - DNA, 15 bp, Homo sapiens
tgtagttgcctgcgg

SEQ ID NO: 281194 - DNA, 15 bp, Homo sapiens
ctgtagttgcctgcg

SEQ ID NO: 281195 - DNA, 15 bp, Homo sapiens
tctgtagttgcctgc

SEQ ID NO: 281196 - DNA, 15 bp, Homo sapiens
atctgtagttgcctg

SEQ ID NO: 281197 - DNA, 15 bp, Homo sapiens
gatctgtagttgcct

SEQ ID NO: 281198 - DNA, 15 bp, Homo sapiens
agatctgtagttgcc

SEQ ID NO: 281199 - DNA, 15 bp, Homo sapiens
tagatctgtagttgc

SEQ ID NO: 281200 - DNA, 15 bp, Homo sapiens
gtagatctgtagttg

SEQ ID NO: 281201 - DNA, 15 bp, Homo sapiens
agtagatctgtagtt

SEQ ID NO: 281202 - DNA, 15 bp, Homo sapiens
aagtagatctgtagt

SEQ ID NO: 281203 - DNA, 15 bp, Homo sapiens
aaagtagatctgtag

SEQ ID NO: 281204 - DNA, 15 bp, Homo sapiens
aaaagtagatctgta

SEQ ID NO: 281205 - DNA, 15 bp, Homo sapiens
aaaaagtagatctgt

SEQ ID NO: 281206 - DNA, 15 bp, Homo sapiens
caaaaagtagatctg

SEQ ID NO: 281207 - DNA, 15 bp, Homo sapiens
tcaaaaagtagatct

SEQ ID NO: 281208 - DNA, 15 bp, Homo sapiens
gtcaaaaagtagatc

SEQ ID NO: 281209 - DNA, 15 bp, Homo sapiens
agtcaaaaagtagat

SEQ ID NO: 281210 - DNA, 15 bp, Homo sapiens
aagtcaaaaagtaga

SEQ ID NO: 281211 - DNA, 15 bp, Homo sapiens
aaagtcaaaaagtag

SEQ ID NO: 281212 - DNA, 15 bp, Homo sapiens
taaagtcaaaaagta

SEQ ID NO: 281213 - DNA, 15 bp, Homo sapiens
ttaaagtcaaaaagt

SEQ ID NO: 281214 - DNA, 15 bp, Homo sapiens
tttaaagtcaaaaag

SEQ ID NO: 281215 - DNA, 15 bp, Homo sapiens
ctttaaagtcaaaaa

SEQ ID NO: 281216 - DNA, 15 bp, Homo sapiens
tctttaaagtcaaaa

SEQ ID NO: 281217 - DNA, 15 bp, Homo sapiens
atctttaaagtcaaa

SEQ ID NO: 281218 - DNA, 15 bp, Homo sapiens
aatctttaaagtcaa

SEQ ID NO: 281219 - DNA, 15 bp, Homo sapiens
caatctttaaagtca

SEQ ID NO: 281220 - DNA, 15 bp, Homo sapiens
ccaatctttaaagtc

SEQ ID NO: 281221 - DNA, 15 bp, Homo sapiens
accaatctttaaagt

SEQ ID NO: 281222 - DNA, 15 bp, Homo sapiens
aaccaatctttaaag

SEQ ID NO: 281223 - DNA, 15 bp, Homo sapiens
aaaccaatctttaaa

SEQ ID NO: 281224 - DNA, 15 bp, Homo sapiens
aaaaccaatctttaa

SEQ ID NO: 281225 - DNA, 15 bp, Homo sapiens
caaaaccaatcttta

SEQ ID NO: 281226 - DNA, 15 bp, Homo sapiens
gcaaaaccaatcttt

SEQ ID NO: 281227 - DNA, 15 bp, Homo sapiens
ggcaaaaccaatctt

SEQ ID NO: 281228 - DNA, 15 bp, Homo sapiens
aggcaaaaccaatct

SEQ ID NO: 281229 - DNA, 15 bp, Homo sapiens
aaggcaaaaccaatc

SEQ ID NO: 281230 - DNA, 15 bp, Homo sapiens
aaaggcaaaaccaat

SEQ ID NO: 281231 - DNA, 15 bp, Homo sapiens
aaaaggcaaaaccaa

SEQ ID NO: 281232 - DNA, 15 bp, Homo sapiens
gaaaaggcaaaacca

SEQ ID NO: 281233 - DNA, 15 bp, Homo sapiens
agaaaaggcaaaacc

SEQ ID NO: 281234 - DNA, 15 bp, Homo sapiens
tagaaaaggcaaaac

SEQ ID NO: 281235 - DNA, 15 bp, Homo sapiens
ctagaaaaggcaaaa

SEQ ID NO: 281236 - DNA, 15 bp, Homo sapiens
tctagaaaaggcaaa

SEQ ID NO: 281237 - DNA, 15 bp, Homo sapiens
ttctagaaaaggcaa

SEQ ID NO: 281238 - DNA, 15 bp, Homo sapiens
attctagaaaaggca

SEQ ID NO: 281239 - DNA, 15 bp, Homo sapiens
aattctagaaaaggc

SEQ ID NO: 281240 - DNA, 15 bp, Homo sapiens
aaattctagaaaagg

SEQ ID NO: 281241 - DNA, 15 bp, Homo sapiens
gaaattctagaaaag

SEQ ID NO: 281242 - DNA, 15 bp, Homo sapiens
tgaaattctagaaaa

SEQ ID NO: 281243 - DNA, 15 bp, Homo sapiens
atgaaattctagaaa

SEQ ID NO: 281244 - DNA, 15 bp, Homo sapiens
tatgaaattctagaa

SEQ ID NO: 281245 - DNA, 15 bp, Homo sapiens
atatgaaattctaga

SEQ ID NO: 281246 - DNA, 15 bp, Homo sapiens
catatgaaattctag

SEQ ID NO: 281247 - DNA, 15 bp, Homo sapiens
tcatatgaaattcta

SEQ ID NO: 281248 - DNA, 15 bp, Homo sapiens
ttcatatgaaattct

SEQ ID NO: 281249 - DNA, 15 bp, Homo sapiens
tttcatatgaaattc

SEQ ID NO: 281250 - DNA, 15 bp, Homo sapiens
ctttcatatgaaatt

SEQ ID NO: 281251 - DNA, 15 bp, Homo sapiens
cctttcatatgaaat

SEQ ID NO: 281252 - DNA, 15 bp, Homo sapiens
tcctttcatatgaaa

SEQ ID NO: 281253 - DNA, 15 bp, Homo sapiens
ttcctttcatatgaa

SEQ ID NO: 281254 - DNA, 15 bp, Homo sapiens
attcctttcatatga

SEQ ID NO: 281255 - DNA, 15 bp, Homo sapiens
aattcctttcatatg

SEQ ID NO: 281256 - DNA, 15 bp, Homo sapiens
taattcctttcatat

SEQ ID NO: 281257 - DNA, 15 bp, Homo sapiens
ataattcctttcata

SEQ ID NO: 281258 - DNA, 15 bp, Homo sapiens
aataattcctttcat

SEQ ID NO: 281259 - DNA, 15 bp, Homo sapiens
gaataattcctttca

SEQ ID NO: 281260 - DNA, 15 bp, Homo sapiens
tgaataattcctttc

SEQ ID NO: 281261 - DNA, 15 bp, Homo sapiens
ttgaataattccttt

SEQ ID NO: 281262 - DNA, 15 bp, Homo sapiens
attgaataattcctt

SEQ ID NO: 281263 - DNA, 15 bp, Homo sapiens
cattgaataattcct

SEQ ID NO: 281264 - DNA, 15 bp, Homo sapiens
gcattgaataattcc

SEQ ID NO: 281265 - DNA, 15 bp, Homo sapiens
tgcattgaataattc

SEQ ID NO: 281266 - DNA, 15 bp, Homo sapiens
atgcattgaataatt

SEQ ID NO: 281267 - DNA, 15 bp, Homo sapiens
gatgcattgaataat

SEQ ID NO: 281268 - DNA, 15 bp, Homo sapiens
ggatgcattgaataa

SEQ ID NO: 281269 - DNA, 15 bp, Homo sapiens
aggatgcattgaata

SEQ ID NO: 281270 - DNA, 15 bp, Homo sapiens
aaggatgcattgaat

SEQ ID NO: 281271 - DNA, 15 bp, Homo sapiens
aaaggatgcattgaa

SEQ ID NO: 281272 - DNA, 15 bp, Homo sapiens
aaaaggatgcattga

SEQ ID NO: 281273 - DNA, 15 bp, Homo sapiens
caaaaggatgcattg

SEQ ID NO: 281274 - DNA, 15 bp, Homo sapiens
tcaaaaggatgcatt

SEQ ID NO: 281275 - DNA, 15 bp, Homo sapiens
ctcaaaaggatgcat

SEQ ID NO: 281276 - DNA, 15 bp, Homo sapiens
actcaaaaggatgca

SEQ ID NO: 281277 - DNA, 15 bp, Homo sapiens
gactcaaaaggatgc

SEQ ID NO: 281278 - DNA, 15 bp, Homo sapiens
agactcaaaaggatg

SEQ ID NO: 281279 - DNA, 15 bp, Homo sapiens
cagactcaaaaggat

SEQ ID NO: 281280 - DNA, 15 bp, Homo sapiens
ccagactcaaaagga

SEQ ID NO: 281281 - DNA, 15 bp, Homo sapiens
gccagactcaaaagg

SEQ ID NO: 281282 - DNA, 15 bp, Homo sapiens
agccagactcaaaag

SEQ ID NO: 281283 - DNA, 15 bp, Homo sapiens
aagccagactcaaaa

SEQ ID NO: 281284 - DNA, 15 bp, Homo sapiens
aaagccagactcaaa

SEQ ID NO: 281285 - DNA, 15 bp, Homo sapiens
aaaagccagactcaa

SEQ ID NO: 281286 - DNA, 15 bp, Homo sapiens
aaaaagccagactca

SEQ ID NO: 281287 - DNA, 15 bp, Homo sapiens
gaaaaagccagactc

SEQ ID NO: 281288 - DNA, 15 bp, Homo sapiens
agaaaaagccagact

SEQ ID NO: 281289 - DNA, 15 bp, Homo sapiens
gagaaaaagccagac

SEQ ID NO: 281290 - DNA, 15 bp, Homo sapiens
tgagaaaaagccaga

SEQ ID NO: 281291 - DNA, 15 bp, Homo sapiens
ctgagaaaaagccag

SEQ ID NO: 281292 - DNA, 15 bp, Homo sapiens
actgagaaaaagcca

SEQ ID NO: 281293 - DNA, 15 bp, Homo sapiens
cactgagaaaaagcc

SEQ ID NO: 281294 - DNA, 15 bp, Homo sapiens
acactgagaaaaagc

SEQ ID NO: 281295 - DNA, 15 bp, Homo sapiens
tacactgagaaaaag

SEQ ID NO: 281296 - DNA, 15 bp, Homo sapiens
ttacactgagaaaaa

SEQ ID NO: 281297 - DNA, 15 bp, Homo sapiens
attacactgagaaaa

SEQ ID NO: 281298 - DNA, 15 bp, Homo sapiens
tattacactgagaaa

SEQ ID NO: 281299 - DNA, 15 bp, Homo sapiens
ttattacactgagaa

SEQ ID NO: 281300 - DNA, 15 bp, Homo sapiens
attattacactgaga

SEQ ID NO: 281301 - DNA, 15 bp, Homo sapiens
aattattacactgag

SEQ ID NO: 281302 - DNA, 15 bp, Homo sapiens
aaattattacactga

SEQ ID NO: 281303 - DNA, 15 bp, Homo sapiens
aaaattattacactg

SEQ ID NO: 281304 - DNA, 15 bp, Homo sapiens
caaaattattacact

SEQ ID NO: 281305 - DNA, 15 bp, Homo sapiens
tcaaaattattacac

SEQ ID NO: 281306 - DNA, 15 bp, Homo sapiens
ctcaaaattattaca

SEQ ID NO: 281307 - DNA, 15 bp, Homo sapiens
tctcaaaattattac

SEQ ID NO: 281308 - DNA, 15 bp, Homo sapiens
atctcaaaattatta

SEQ ID NO: 281309 - DNA, 15 bp, Homo sapiens
aatctcaaaattatt

SEQ ID NO: 281310 - DNA, 15 bp, Homo sapiens
aaatctcaaaattat

SEQ ID NO: 281311 - DNA, 15 bp, Homo sapiens
taaatctcaaaatta

SEQ ID NO: 281312 - DNA, 15 bp, Homo sapiens
ataaatctcaaaatt

SEQ ID NO: 281313 - DNA, 15 bp, Homo sapiens
gataaatctcaaaat

SEQ ID NO: 281314 - DNA, 15 bp, Homo sapiens
agataaatctcaaaa

SEQ ID NO: 281315 - DNA, 15 bp, Homo sapiens
tagataaatctcaaa

SEQ ID NO: 281316 - DNA, 15 bp, Homo sapiens
atagataaatctcaa

SEQ ID NO: 281317 - DNA, 15 bp, Homo sapiens
tatagataaatctca

SEQ ID NO: 281318 - DNA, 15 bp, Homo sapiens
atatagataaatctc

SEQ ID NO: 281319 - DNA, 15 bp, Homo sapiens
aatatagataaatct

SEQ ID NO: 281320 - DNA, 15 bp, Homo sapiens
caatatagataaatc

SEQ ID NO: 281321 - DNA, 15 bp, Homo sapiens
acaatatagataaat

SEQ ID NO: 281322 - DNA, 15 bp, Homo sapiens
aacaatatagataaa

SEQ ID NO: 281323 - DNA, 15 bp, Homo sapiens
taacaatatagataa

SEQ ID NO: 281324 - DNA, 15 bp, Homo sapiens
ataacaatatagata

SEQ ID NO: 281325 - DNA, 15 bp, Homo sapiens
tataacaatatagat

SEQ ID NO: 281326 - DNA, 15 bp, Homo sapiens
atataacaatataga

SEQ ID NO: 281327 - DNA, 15 bp, Homo sapiens
tatataacaatatag

SEQ ID NO: 281328 - DNA, 15 bp, Homo sapiens
atatataacaatata

SEQ ID NO: 281329 - DNA, 15 bp, Homo sapiens
tatatataacaatat

SEQ ID NO: 281330 - DNA, 15 bp, Homo sapiens
atatatataacaata

SEQ ID NO: 281331 - DNA, 15 bp, Homo sapiens
aatatatataacaat

SEQ ID NO: 281332 - DNA, 15 bp, Homo sapiens
taatatatataacaa

SEQ ID NO: 281333 - DNA, 15 bp, Homo sapiens
ctaatatatataaca

SEQ ID NO: 281334 - DNA, 15 bp, Homo sapiens
cctaatatatataac

SEQ ID NO: 281335 - DNA, 15 bp, Homo sapiens
tcctaatatatataa

SEQ ID NO: 281336 - DNA, 15 bp, Homo sapiens
gtcctaatatatata

SEQ ID NO: 281337 - DNA, 15 bp, Homo sapiens
tgtcctaatatatat

SEQ ID NO: 281338 - DNA, 15 bp, Homo sapiens
atgtcctaatatata

SEQ ID NO: 281339 - DNA, 15 bp, Homo sapiens
aatgtcctaatatat

SEQ ID NO: 281340 - DNA, 15 bp, Homo sapiens
aaatgtcctaatata

SEQ ID NO: 281341 - DNA, 15 bp, Homo sapiens
gaaatgtcctaatat

SEQ ID NO: 281342 - DNA, 15 bp, Homo sapiens
ggaaatgtcctaata

SEQ ID NO: 281343 - DNA, 15 bp, Homo sapiens
aggaaatgtcctaat

SEQ ID NO: 281344 - DNA, 15 bp, Homo sapiens
aaggaaatgtcctaa

SEQ ID NO: 281345 - DNA, 15 bp, Homo sapiens
aaaggaaatgtccta

SEQ ID NO: 281346 - DNA, 15 bp, Homo sapiens
aaaaggaaatgtcct

SEQ ID NO: 281347 - DNA, 15 bp, Homo sapiens
caaaaggaaatgtcc

SEQ ID NO: 281348 - DNA, 15 bp, Homo sapiens
tcaaaaggaaatgtc

SEQ ID NO: 281349 - DNA, 15 bp, Homo sapiens
atcaaaaggaaatgt

SEQ ID NO: 281350 - DNA, 15 bp, Homo sapiens
aatcaaaaggaaatg

SEQ ID NO: 281351 - DNA, 15 bp, Homo sapiens
aaatcaaaaggaaat

SEQ ID NO: 281352 - DNA, 15 bp, Homo sapiens
aaaatcaaaaggaaa

SEQ ID NO: 281353 - DNA, 15 bp, Homo sapiens
gaaaatcaaaaggaa

SEQ ID NO: 281354 - DNA, 15 bp, Homo sapiens
tgaaaatcaaaagga

SEQ ID NO: 281355 - DNA, 15 bp, Homo sapiens
ttgaaaatcaaaagg

SEQ ID NO: 281356 - DNA, 15 bp, Homo sapiens
tttgaaaatcaaaag

SEQ ID NO: 281357 - DNA, 15 bp, Homo sapiens
atttgaaaatcaaaa

SEQ ID NO: 281358 - DNA, 15 bp, Homo sapiens
tatttgaaaatcaaa

SEQ ID NO: 281359 - DNA, 15 bp, Homo sapiens
ttatttgaaaatcaa

SEQ ID NO: 281360 - DNA, 15 bp, Homo sapiens
gttatttgaaaatca

SEQ ID NO: 281361 - DNA, 15 bp, Homo sapiens
tgttatttgaaaatc

SEQ ID NO: 281362 - DNA, 15 bp, Homo sapiens
atgttatttgaaaat

SEQ ID NO: 281363 - DNA, 15 bp, Homo sapiens
aatgttatttgaaaa

SEQ ID NO: 281364 - DNA, 15 bp, Homo sapiens
gaatgttatttgaaa

SEQ ID NO: 281365 - DNA, 15 bp, Homo sapiens
ggaatgttatttgaa

SEQ ID NO: 281366 - DNA, 15 bp, Homo sapiens
tggaatgttatttga

SEQ ID NO: 281367 - DNA, 15 bp, Homo sapiens
atggaatgttatttg

SEQ ID NO: 281368 - DNA, 15 bp, Homo sapiens
aatggaatgttattt

SEQ ID NO: 281369 - DNA, 15 bp, Homo sapiens
tacaatggaatgtta

SEQ ID NO: 281370 - DNA, 15 bp, Homo sapiens
ctacaatggaatgtt

SEQ ID NO: 281371 - DNA, 15 bp, Homo sapiens
cctacaatggaatgt

SEQ ID NO: 281372 - DNA, 15 bp, Homo sapiens
ccctacaatggaatg

SEQ ID NO: 281373 - DNA, 15 bp, Homo sapiens
tccctacaatggaat

SEQ ID NO: 281374 - DNA, 15 bp, Homo sapiens
atccctacaatggaa

SEQ ID NO: 281375 - DNA, 15 bp, Homo sapiens
tatccctacaatgga

SEQ ID NO: 281376 - DNA, 15 bp, Homo sapiens
atatccctacaatgg

SEQ ID NO: 281377 - DNA, 15 bp, Homo sapiens
tatatccctacaatg

SEQ ID NO: 281378 - DNA, 15 bp, Homo sapiens
gtatatccctacaat

SEQ ID NO: 281379 - DNA, 15 bp, Homo sapiens
ggtatatccctacaa

SEQ ID NO: 281380 - DNA, 15 bp, Homo sapiens
gggtatatccctaca

SEQ ID NO: 281381 - DNA, 15 bp, Homo sapiens
ggggtatatccctac

SEQ ID NO: 281382 - DNA, 15 bp, Homo sapiens
tggggtatatcccta

SEQ ID NO: 281383 - DNA, 15 bp, Homo sapiens
ttggggtatatccct

SEQ ID NO: 281384 - DNA, 15 bp, Homo sapiens
attggggtatatccc

SEQ ID NO: 281385 - DNA, 15 bp, Homo sapiens
aattggggtatatcc

SEQ ID NO: 281386 - DNA, 15 bp, Homo sapiens
aaattggggtatatc

SEQ ID NO: 281387 - DNA, 15 bp, Homo sapiens
taaattggggtatat

SEQ ID NO: 281388 - DNA, 15 bp, Homo sapiens
ataaattggggtata

SEQ ID NO: 281389 - DNA, 15 bp, Homo sapiens
aataaattggggtat

SEQ ID NO: 281390 - DNA, 15 bp, Homo sapiens
aaataaattggggta

SEQ ID NO: 281391 - DNA, 15 bp, Homo sapiens
aaaataaattggggt

SEQ ID NO: 281392 - DNA, 15 bp, Homo sapiens
aaaaataaattgggg

SEQ ID NO: 281393 - DNA, 15 bp, Homo sapiens
gaaaaataaattggg

SEQ ID NO: 281394 - DNA, 15 bp, Homo sapiens
ggaaaaataaattgg

SEQ ID NO: 281395 - DNA, 15 bp, Homo sapiens
tggaaaaataaattg

SEQ ID NO: 281396 - DNA, 15 bp, Homo sapiens
atggaaaaataaatt

SEQ ID NO: 281397 - DNA, 15 bp, Homo sapiens
catggaaaaataaat

SEQ ID NO: 281398 - DNA, 15 bp, Homo sapiens
gcatggaaaaataaa

SEQ ID NO: 281399 - DNA, 15 bp, Homo sapiens
tgcatggaaaaataa

SEQ ID NO: 281400 - DNA, 15 bp, Homo sapiens
gtgcatggaaaaata

SEQ ID NO: 281401 - DNA, 15 bp, Homo sapiens
agtgcatggaaaaat

SEQ ID NO: 281402 - DNA, 15 bp, Homo sapiens
aagtgcatggaaaaa

SEQ ID NO: 281403 - DNA, 15 bp, Homo sapiens
gaagtgcatggaaaa

SEQ ID NO: 281404 - DNA, 15 bp, Homo sapiens
agaagtgcatggaaa

SEQ ID NO: 281405 - DNA, 15 bp, Homo sapiens
aagaagtgcatggaa

SEQ ID NO: 281406 - DNA, 15 bp, Homo sapiens
aaagaagtgcatgga

SEQ ID NO: 281407 - DNA, 15 bp, Homo sapiens
aaaagaagtgcatgg

SEQ ID NO: 281408 - DNA, 15 bp, Homo sapiens
aaaaagaagtgcatg

SEQ ID NO: 281409 - DNA, 15 bp, Homo sapiens
aaaaaagaagtgcat

SEQ ID NO: 281410 - DNA, 15 bp, Homo sapiens
aaaaaaagaagtgca

SEQ ID NO: 281411 - DNA, 15 bp, Homo sapiens
aaaaaaaagaagtgc

SEQ ID NO: 281412 - DNA, 15 bp, Homo sapiens
aaaaaaaaagaagtg

SEQ ID NO: 281413 - DNA, 15 bp, Homo sapiens
aaaaaaaaaagaagt

SEQ ID NO: 281414 - DNA, 15 bp, Homo sapiens
taaaaaaaaaagaag

SEQ ID NO: 281415 - DNA, 15 bp, Homo sapiens
ataaaaaaaaaagaa

SEQ ID NO: 281416 - DNA, 15 bp, Homo sapiens
tataaaaaaaaaaga

SEQ ID NO: 281417 - DNA, 15 bp, Homo sapiens
atataaaaaaaaaag

SEQ ID NO: 281418 - DNA, 15 bp, Homo sapiens
aatataaaaaaaaaa

SEQ ID NO: 281419 - DNA, 15 bp, Homo sapiens
aaatataaaaaaaaa

SEQ ID NO: 281420 - DNA, 15 bp, Homo sapiens
caaatataaaaaaaa

SEQ ID NO: 281421 - DNA, 15 bp, Homo sapiens
ccaaatataaaaaaa

SEQ ID NO: 281422 - DNA, 15 bp, Homo sapiens
cccaaatataaaaaa

SEQ ID NO: 281423 - DNA, 15 bp, Homo sapiens
acccaaatataaaaa

SEQ ID NO: 281424 - DNA, 15 bp, Homo sapiens
aacccaaatataaaa

SEQ ID NO: 281425 - DNA, 15 bp, Homo sapiens
caacccaaatataaa

SEQ ID NO: 281426 - DNA, 15 bp, Homo sapiens
acaacccaaatataa

SEQ ID NO: 281427 - DNA, 15 bp, Homo sapiens
aacaacccaaatata

SEQ ID NO: 281428 - DNA, 15 bp, Homo sapiens
aaacaacccaaatat

SEQ ID NO: 281429 - DNA, 15 bp, Homo sapiens
caaacaacccaaata

SEQ ID NO: 281430 - DNA, 15 bp, Homo sapiens
acaaacaacccaaat

SEQ ID NO: 281431 - DNA, 15 bp, Homo sapiens
tacaaacaacccaaa

SEQ ID NO: 281432 - DNA, 15 bp, Homo sapiens
ctacaaacaacccaa

SEQ ID NO: 281433 - DNA, 15 bp, Homo sapiens
actacaaacaaccca

SEQ ID NO: 281434 - DNA, 15 bp, Homo sapiens
aactacaaacaaccc

SEQ ID NO: 281435 - DNA, 15 bp, Homo sapiens
aaactacaaacaacc

SEQ ID NO: 281436 - DNA, 15 bp, Homo sapiens
aaaactacaaacaac

SEQ ID NO: 281437 - DNA, 15 bp, Homo sapiens
aaaaactacaaacaa

SEQ ID NO: 281438 - DNA, 15 bp, Homo sapiens
caaaaactacaaaca

SEQ ID NO: 281439 - DNA, 15 bp, Homo sapiens
ccaaaaactacaaac

SEQ ID NO: 281440 - DNA, 15 bp, Homo sapiens
gccaaaaactacaaa

SEQ ID NO: 281441 - DNA, 15 bp, Homo sapiens
ggccaaaaactacaa

SEQ ID NO: 281442 - DNA, 15 bp, Homo sapiens
tggccaaaaactaca

SEQ ID NO: 281443 - DNA, 15 bp, Homo sapiens
atggccaaaaactac

SEQ ID NO: 281444 - DNA, 15 bp, Homo sapiens
aatggccaaaaacta

SEQ ID NO: 281445 - DNA, 15 bp, Homo sapiens
taatggccaaaaact

SEQ ID NO: 281446 - DNA, 15 bp, Homo sapiens
ataatggccaaaaac

SEQ ID NO: 281447 - DNA, 15 bp, Homo sapiens
cataatggccaaaaa

SEQ ID NO: 281448 - DNA, 15 bp, Homo sapiens
tcataatggccaaaa

SEQ ID NO: 281449 - DNA, 15 bp, Homo sapiens
gtcataatggccaaa

SEQ ID NO: 281450 - DNA, 15 bp, Homo sapiens
agtcataatggccaa

SEQ ID NO: 281451 - DNA, 15 bp, Homo sapiens
cagtcataatggcca

SEQ ID NO: 281452 - DNA, 15 bp, Homo sapiens
tcagtcataatggcc

SEQ ID NO: 281453 - DNA, 15 bp, Homo sapiens
ttcagtcataatggc

SEQ ID NO: 281454 - DNA, 15 bp, Homo sapiens
cttcagtcataatgg

SEQ ID NO: 281455 - DNA, 15 bp, Homo sapiens
gcttcagtcataatg

SEQ ID NO: 281456 - DNA, 15 bp, Homo sapiens
agcttcagtcataat

SEQ ID NO: 281457 - DNA, 15 bp, Homo sapiens
cagcttcagtcataa

SEQ ID NO: 281458 - DNA, 15 bp, Homo sapiens
gcagcttcagtcata

SEQ ID NO: 281459 - DNA, 15 bp, Homo sapiens
agcagcttcagtcat

SEQ ID NO: 281460 - DNA, 15 bp, Homo sapiens
tagcagcttcagtca

SEQ ID NO: 281461 - DNA, 15 bp, Homo sapiens
atagcagcttcagtc

SEQ ID NO: 281462 - DNA, 15 bp, Homo sapiens
catagcagcttcagt

SEQ ID NO: 281463 - DNA, 15 bp, Homo sapiens
tcatagcagcttcag

SEQ ID NO: 281464 - DNA, 15 bp, Homo sapiens
ttcatagcagcttca

SEQ ID NO: 281465 - DNA, 15 bp, Homo sapiens
gttcatagcagcttc

SEQ ID NO: 281466 - DNA, 15 bp, Homo sapiens
tgttcatagcagctt

SEQ ID NO: 281467 - DNA, 15 bp, Homo sapiens
atgttcatagcagct

SEQ ID NO: 281468 - DNA, 15 bp, Homo sapiens
aatgttcatagcagc

SEQ ID NO: 281469 - DNA, 15 bp, Homo sapiens
gaatgttcatagcag

SEQ ID NO: 281470 - DNA, 15 bp, Homo sapiens
tgaatgttcatagca

SEQ ID NO: 281471 - DNA, 15 bp, Homo sapiens
gtgaatgttcatagc

SEQ ID NO: 281472 - DNA, 15 bp, Homo sapiens
tgtgaatgttcatag

SEQ ID NO: 281473 - DNA, 15 bp, Homo sapiens
atgtgaatgttcata

SEQ ID NO: 281474 - DNA, 15 bp, Homo sapiens
tatgtgaatgttcat

SEQ ID NO: 281475 - DNA, 15 bp, Homo sapiens
atatgtgaatgttca

SEQ ID NO: 281476 - DNA, 15 bp, Homo sapiens
tatatgtgaatgttc

SEQ ID NO: 281477 - DNA, 15 bp, Homo sapiens
ttatatgtgaatgtt

SEQ ID NO: 281478 - DNA, 15 bp, Homo sapiens
attatatgtgaatgt

SEQ ID NO: 281479 - DNA, 15 bp, Homo sapiens
cattatatgtgaatg

SEQ ID NO: 281480 - DNA, 15 bp, Homo sapiens
acattatatgtgaat

SEQ ID NO: 281481 - DNA, 15 bp, Homo sapiens
aacattatatgtgaa

SEQ ID NO: 281482 - DNA, 15 bp, Homo sapiens
aaacattatatgtga

SEQ ID NO: 281483 - DNA, 15 bp, Homo sapiens
aaaacattatatgtg

SEQ ID NO: 281484 - DNA, 15 bp, Homo sapiens
gaaaacattatatgt

SEQ ID NO: 281485 - DNA, 15 bp, Homo sapiens
tgaaaacattatatg

SEQ ID NO: 281486 - DNA, 15 bp, Homo sapiens
atgaaaacattatat

SEQ ID NO: 281487 - DNA, 15 bp, Homo sapiens
aatgaaaacattata

SEQ ID NO: 281488 - DNA, 15 bp, Homo sapiens
aaatgaaaacattat

SEQ ID NO: 281489 - DNA, 15 bp, Homo sapiens
gaaatgaaaacatta

SEQ ID NO: 281490 - DNA, 15 bp, Homo sapiens
agaaatgaaaacatt

SEQ ID NO: 281491 - DNA, 15 bp, Homo sapiens
gagaaatgaaaacat

SEQ ID NO: 281492 - DNA, 15 bp, Homo sapiens
agagaaatgaaaaca

SEQ ID NO: 281493 - DNA, 15 bp, Homo sapiens
aagagaaatgaaaac

SEQ ID NO: 281494 - DNA, 15 bp, Homo sapiens
caagagaaatgaaaa

SEQ ID NO: 281495 - DNA, 15 bp, Homo sapiens
ccaagagaaatgaaa

SEQ ID NO: 281496 - DNA, 15 bp, Homo sapiens
cccaagagaaatgaa

SEQ ID NO: 281497 - DNA, 15 bp, Homo sapiens
acccaagagaaatga

SEQ ID NO: 281498 - DNA, 15 bp, Homo sapiens
tacccaagagaaatg

SEQ ID NO: 281499 - DNA, 15 bp, Homo sapiens
atacccaagagaaat

SEQ ID NO: 281500 - DNA, 15 bp, Homo sapiens
catacccaagagaaa

SEQ ID NO: 281501 - DNA, 15 bp, Homo sapiens
tcatacccaagagaa

SEQ ID NO: 281502 - DNA, 15 bp, Homo sapiens
ttcatacccaagaga

SEQ ID NO: 281503 - DNA, 15 bp, Homo sapiens
attcatacccaagag

SEQ ID NO: 281504 - DNA, 15 bp, Homo sapiens
tattcatacccaaga

SEQ ID NO: 281505 - DNA, 15 bp, Homo sapiens
atattcatacccaag

SEQ ID NO: 281506 - DNA, 15 bp, Homo sapiens
gatattcatacccaa

SEQ ID NO: 281507 - DNA, 15 bp, Homo sapiens
agatattcataccca

SEQ ID NO: 281508 - DNA, 15 bp, Homo sapiens
cagatattcataccc

SEQ ID NO: 281509 - DNA, 15 bp, Homo sapiens
ccagatattcatacc

SEQ ID NO: 281510 - DNA, 15 bp, Homo sapiens
cccagatattcatac

SEQ ID NO: 281511 - DNA, 15 bp, Homo sapiens
tcccagatattcata

SEQ ID NO: 281512 - DNA, 15 bp, Homo sapiens
ctcccagatattcat

SEQ ID NO: 281513 - DNA, 15 bp, Homo sapiens
actcccagatattca

SEQ ID NO: 281514 - DNA, 15 bp, Homo sapiens
tactcccagatattc

SEQ ID NO: 281515 - DNA, 15 bp, Homo sapiens
ctactcccagatatt

SEQ ID NO: 281516 - DNA, 15 bp, Homo sapiens
tctactcccagatat

SEQ ID NO: 281517 - DNA, 15 bp, Homo sapiens
ttctactcccagata

SEQ ID NO: 281518 - DNA, 15 bp, Homo sapiens
attctactcccagat

SEQ ID NO: 281519 - DNA, 15 bp, Homo sapiens
aattctactcccaga

SEQ ID NO: 281520 - DNA, 15 bp, Homo sapiens
caattctactcccag

SEQ ID NO: 281521 - DNA, 15 bp, Homo sapiens
gcaattctactccca

SEQ ID NO: 281522 - DNA, 15 bp, Homo sapiens
agcaattctactccc

SEQ ID NO: 281523 - DNA, 15 bp, Homo sapiens
tagcaattctactcc

SEQ ID NO: 281524 - DNA, 15 bp, Homo sapiens
atagcaattctactc

SEQ ID NO: 281525 - DNA, 15 bp, Homo sapiens
catagcaattctact

SEQ ID NO: 281526 - DNA, 15 bp, Homo sapiens
acatagcaattctac

SEQ ID NO: 281527 - DNA, 15 bp, Homo sapiens
cacatagcaattcta

SEQ ID NO: 281528 - DNA, 15 bp, Homo sapiens
acacatagcaattct

SEQ ID NO: 281529 - DNA, 15 bp, Homo sapiens
aacacatagcaattc

SEQ ID NO: 281530 - DNA, 15 bp, Homo sapiens
taacacatagcaatt

SEQ ID NO: 281531 - DNA, 15 bp, Homo sapiens
ataacacatagcaat

SEQ ID NO: 281532 - DNA, 15 bp, Homo sapiens
cataacacatagcaa

SEQ ID NO: 281533 - DNA, 15 bp, Homo sapiens
tcataacacatagca

SEQ ID NO: 281534 - DNA, 15 bp, Homo sapiens
ttcataacacatagc

SEQ ID NO: 281535 - DNA, 15 bp, Homo sapiens
tttcataacacatag

SEQ ID NO: 281536 - DNA, 15 bp, Homo sapiens
ttttcataacacata

SEQ ID NO: 281537 - DNA, 15 bp, Homo sapiens
cttttcataacacat

SEQ ID NO: 281538 - DNA, 15 bp, Homo sapiens
acttttcataacaca

SEQ ID NO: 281539 - DNA, 15 bp, Homo sapiens
cacttttcataacac

SEQ ID NO: 281540 - DNA, 15 bp, Homo sapiens
gcacttttcataaca

SEQ ID NO: 281541 - DNA, 15 bp, Homo sapiens
tgcacttttcataac

SEQ ID NO: 281542 - DNA, 15 bp, Homo sapiens
atgcacttttcataa

SEQ ID NO: 281543 - DNA, 15 bp, Homo sapiens
tatgcacttttcata

SEQ ID NO: 281544 - DNA, 15 bp, Homo sapiens
atatgcacttttcat

SEQ ID NO: 281545 - DNA, 15 bp, Homo sapiens
aatatgcacttttca

SEQ ID NO: 281546 - DNA, 15 bp, Homo sapiens
aaatatgcacttttc

SEQ ID NO: 281547 - DNA, 15 bp, Homo sapiens
taaatatgcactttt

SEQ ID NO: 281548 - DNA, 15 bp, Homo sapiens
ttaaatatgcacttt

SEQ ID NO: 281549 - DNA, 15 bp, Homo sapiens
gttaaatatgcactt

SEQ ID NO: 281550 - DNA, 15 bp, Homo sapiens
agttaaatatgcact

SEQ ID NO: 281551 - DNA, 15 bp, Homo sapiens
aagttaaatatgcac

SEQ ID NO: 281552 - DNA, 15 bp, Homo sapiens
aaagttaaatatgca

SEQ ID NO: 281553 - DNA, 15 bp, Homo sapiens
taaagttaaatatgc

SEQ ID NO: 281554 - DNA, 15 bp, Homo sapiens
ataaagttaaatatg

SEQ ID NO: 281555 - DNA, 15 bp, Homo sapiens
tataaagttaaatat

SEQ ID NO: 281556 - DNA, 15 bp, Homo sapiens
ttataaagttaaata

SEQ ID NO: 281557 - DNA, 15 bp, Homo sapiens
cttataaagttaaat

SEQ ID NO: 281558 - DNA, 15 bp, Homo sapiens
tcttataaagttaaa

SEQ ID NO: 281559 - DNA, 15 bp, Homo sapiens
ttcttataaagttaa

SEQ ID NO: 281560 - DNA, 15 bp, Homo sapiens
gttcttataaagtta

SEQ ID NO: 281561 - DNA, 15 bp, Homo sapiens
agttcttataaagtt

SEQ ID NO: 281562 - DNA, 15 bp, Homo sapiens
aagttcttataaagt

SEQ ID NO: 281563 - DNA, 15 bp, Homo sapiens
gaagttcttataaag

SEQ ID NO: 281564 - DNA, 15 bp, Homo sapiens
ggaagttcttataaa

SEQ ID NO: 281565 - DNA, 15 bp, Homo sapiens
tggaagttcttataa

SEQ ID NO: 281566 - DNA, 15 bp, Homo sapiens
ttggaagttcttata

SEQ ID NO: 281567 - DNA, 15 bp, Homo sapiens
tttggaagttcttat

SEQ ID NO: 281568 - DNA, 15 bp, Homo sapiens
gtttggaagttctta

SEQ ID NO: 281569 - DNA, 15 bp, Homo sapiens
agtttggaagttctt

SEQ ID NO: 281570 - DNA, 15 bp, Homo sapiens
aagtttggaagttct

SEQ ID NO: 281571 - DNA, 15 bp, Homo sapiens
caagtttggaagttc

SEQ ID NO: 281572 - DNA, 15 bp, Homo sapiens
acaagtttggaagtt

SEQ ID NO: 281573 - DNA, 15 bp, Homo sapiens
aacaagtttggaagt

SEQ ID NO: 281574 - DNA, 15 bp, Homo sapiens
aaacaagtttggaag

SEQ ID NO: 281575 - DNA, 15 bp, Homo sapiens
aaaacaagtttggaa

SEQ ID NO: 281576 - DNA, 15 bp, Homo sapiens
gaaaacaagtttgga

SEQ ID NO: 281577 - DNA, 15 bp, Homo sapiens
ggaaaacaagtttgg

SEQ ID NO: 281578 - DNA, 15 bp, Homo sapiens
tggaaaacaagtttg

SEQ ID NO: 281579 - DNA, 15 bp, Homo sapiens
ttggaaaacaagttt

SEQ ID NO: 281580 - DNA, 15 bp, Homo sapiens
tttggaaaacaagtt

SEQ ID NO: 281581 - DNA, 15 bp, Homo sapiens
ttttggaaaacaagt

SEQ ID NO: 281582 - DNA, 15 bp, Homo sapiens
attttggaaaacaag

SEQ ID NO: 281583 - DNA, 15 bp, Homo sapiens
cattttggaaaacaa

SEQ ID NO: 281584 - DNA, 15 bp, Homo sapiens
tcattttggaaaaca

SEQ ID NO: 281585 - DNA, 15 bp, Homo sapiens
atcattttggaaaac

SEQ ID NO: 281586 - DNA, 15 bp, Homo sapiens
aatcattttggaaaa

SEQ ID NO: 281587 - DNA, 15 bp, Homo sapiens
caatcattttggaaa

SEQ ID NO: 281588 - DNA, 15 bp, Homo sapiens
acaatcattttggaa

SEQ ID NO: 281589 - DNA, 15 bp, Homo sapiens
cacaatcattttgga

SEQ ID NO: 281590 - DNA, 15 bp, Homo sapiens
gcacaatcattttgg

SEQ ID NO: 281591 - DNA, 15 bp, Homo sapiens
ggcacaatcattttg

SEQ ID NO: 281592 - DNA, 15 bp, Homo sapiens
tggcacaatcatttt

SEQ ID NO: 281593 - DNA, 15 bp, Homo sapiens
atggcacaatcattt

SEQ ID NO: 281594 - DNA, 15 bp, Homo sapiens
aatggcacaatcatt

SEQ ID NO: 281595 - DNA, 15 bp, Homo sapiens
aaatggcacaatcat

SEQ ID NO: 281596 - DNA, 15 bp, Homo sapiens
aaaatggcacaatca

SEQ ID NO: 281597 - DNA, 15 bp, Homo sapiens
taaaatggcacaatc

SEQ ID NO: 281598 - DNA, 15 bp, Homo sapiens
gtaaaatggcacaat

SEQ ID NO: 281599 - DNA, 15 bp, Homo sapiens
tgtaaaatggcacaa

SEQ ID NO: 281600 - DNA, 15 bp, Homo sapiens
atgtaaaatggcaca

SEQ ID NO: 281601 - DNA, 15 bp, Homo sapiens
aatgtaaaatggcac

SEQ ID NO: 281602 - DNA, 15 bp, Homo sapiens
aaatgtaaaatggca

SEQ ID NO: 281603 - DNA, 15 bp, Homo sapiens
aaaatgtaaaatggc

SEQ ID NO: 281604 - DNA, 15 bp, Homo sapiens
gaaaatgtaaaatgg

SEQ ID NO: 281605 - DNA, 15 bp, Homo sapiens
tgaaaatgtaaaatg

SEQ ID NO: 281606 - DNA, 15 bp, Homo sapiens
gtgaaaatgtaaaat

SEQ ID NO: 281607 - DNA, 15 bp, Homo sapiens
ggtgaaaatgtaaaa

SEQ ID NO: 281608 - DNA, 15 bp, Homo sapiens
tggtgaaaatgtaaa

SEQ ID NO: 281609 - DNA, 15 bp, Homo sapiens
ctggtgaaaatgtaa

SEQ ID NO: 281610 - DNA, 15 bp, Homo sapiens
actggtgaaaatgta

SEQ ID NO: 281611 - DNA, 15 bp, Homo sapiens
cactggtgaaaatgt

SEQ ID NO: 281612 - DNA, 15 bp, Homo sapiens
tcactggtgaaaatg

SEQ ID NO: 281613 - DNA, 15 bp, Homo sapiens
atcactggtgaaaat

SEQ ID NO: 281614 - DNA, 15 bp, Homo sapiens
catcactggtgaaaa

SEQ ID NO: 281615 - DNA, 15 bp, Homo sapiens
acatcactggtgaaa

SEQ ID NO: 281616 - DNA, 15 bp, Homo sapiens
aacatcactggtgaa

SEQ ID NO: 281617 - DNA, 15 bp, Homo sapiens
aaacatcactggtga

SEQ ID NO: 281618 - DNA, 15 bp, Homo sapiens
taaacatcactggtg

SEQ ID NO: 281619 - DNA, 15 bp, Homo sapiens
ttaaacatcactggt

SEQ ID NO: 281620 - DNA, 15 bp, Homo sapiens
cttaaacatcactgg

SEQ ID NO: 281621 - DNA, 15 bp, Homo sapiens
acttaaacatcactg

SEQ ID NO: 281622 - DNA, 15 bp, Homo sapiens
cacttaaacatcact

SEQ ID NO: 281623 - DNA, 15 bp, Homo sapiens
acacttaaacatcac

SEQ ID NO: 281624 - DNA, 15 bp, Homo sapiens
aacacttaaacatca

SEQ ID NO: 281625 - DNA, 15 bp, Homo sapiens
gaacacttaaacatc

SEQ ID NO: 281626 - DNA, 15 bp, Homo sapiens
ggaacacttaaacat

SEQ ID NO: 281627 - DNA, 15 bp, Homo sapiens
tggaacacttaaaca

SEQ ID NO: 281628 - DNA, 15 bp, Homo sapiens
atggaacacttaaac

SEQ ID NO: 281629 - DNA, 15 bp, Homo sapiens
aatggaacacttaaa

SEQ ID NO: 281630 - DNA, 15 bp, Homo sapiens
caatggaacacttaa

SEQ ID NO: 281631 - DNA, 15 bp, Homo sapiens
gcaatggaacactta

SEQ ID NO: 281632 - DNA, 15 bp, Homo sapiens
tgcaatggaacactt

SEQ ID NO: 281633 - DNA, 15 bp, Homo sapiens
gtgcaatggaacact

SEQ ID NO: 281634 - DNA, 15 bp, Homo sapiens
agtgcaatggaacac

SEQ ID NO: 281635 - DNA, 15 bp, Homo sapiens
tagtgcaatggaaca

SEQ ID NO: 281636 - DNA, 15 bp, Homo sapiens
gtagtgcaatggaac

SEQ ID NO: 281637 - DNA, 15 bp, Homo sapiens
tgtagtgcaatggaa

SEQ ID NO: 281638 - DNA, 15 bp, Homo sapiens
atgtagtgcaatgga

SEQ ID NO: 281639 - DNA, 15 bp, Homo sapiens
gatgtagtgcaatgg

SEQ ID NO: 281640 - DNA, 15 bp, Homo sapiens
ggatgtagtgcaatg

SEQ ID NO: 281641 - DNA, 15 bp, Homo sapiens
aggatgtagtgcaat

SEQ ID NO: 281642 - DNA, 15 bp, Homo sapiens
gaggatgtagtgcaa

SEQ ID NO: 281643 - DNA, 15 bp, Homo sapiens
tgaggatgtagtgca

SEQ ID NO: 281644 - DNA, 15 bp, Homo sapiens
gtgaggatgtagtgc

SEQ ID NO: 281645 - DNA, 15 bp, Homo sapiens
agtgaggatgtagtg

SEQ ID NO: 281646 - DNA, 15 bp, Homo sapiens
cagtgaggatgtagt

SEQ ID NO: 281647 - DNA, 15 bp, Homo sapiens
tcagtgaggatgtag

SEQ ID NO: 281648 - DNA, 15 bp, Homo sapiens
gtcagtgaggatgta

SEQ ID NO: 281649 - DNA, 15 bp, Homo sapiens
ggtcagtgaggatgt

SEQ ID NO: 281650 - DNA, 15 bp, Homo sapiens
gggtcagtgaggatg

SEQ ID NO: 281651 - DNA, 15 bp, Homo sapiens
agggtcagtgaggat

SEQ ID NO: 281652 - DNA, 15 bp, Homo sapiens
aagggtcagtgagga

SEQ ID NO: 281653 - DNA, 15 bp, Homo sapiens
caagggtcagtgagg

SEQ ID NO: 281654 - DNA, 15 bp, Homo sapiens
tcaagggtcagtgag

SEQ ID NO: 281655 - DNA, 15 bp, Homo sapiens
atcaagggtcagtga

SEQ ID NO: 281656 - DNA, 15 bp, Homo sapiens
tatcaagggtcagtg

SEQ ID NO: 281657 - DNA, 15 bp, Homo sapiens
atatcaagggtcagt

SEQ ID NO: 281658 - DNA, 15 bp, Homo sapiens
aatatcaagggtcag

SEQ ID NO: 281659 - DNA, 15 bp, Homo sapiens
caatatcaagggtca

SEQ ID NO: 281660 - DNA, 15 bp, Homo sapiens
acaatatcaagggtc

SEQ ID NO: 281661 - DNA, 15 bp, Homo sapiens
gacaatatcaagggt

SEQ ID NO: 281662 - DNA, 15 bp, Homo sapiens
tgacaatatcaaggg

SEQ ID NO: 281663 - DNA, 15 bp, Homo sapiens
ctgacaatatcaagg

SEQ ID NO: 281664 - DNA, 15 bp, Homo sapiens
actgacaatatcaag

SEQ ID NO: 281665 - DNA, 15 bp, Homo sapiens
gactgacaatatcaa

SEQ ID NO: 281666 - DNA, 15 bp, Homo sapiens
agactgacaatatca

SEQ ID NO: 281667 - DNA, 15 bp, Homo sapiens
aagactgacaatatc

SEQ ID NO: 281668 - DNA, 15 bp, Homo sapiens
aaagactgacaatat

SEQ ID NO: 281669 - DNA, 15 bp, Homo sapiens
aaaagactgacaata

SEQ ID NO: 281670 - DNA, 15 bp, Homo sapiens
taaaagactgacaat

SEQ ID NO: 281671 - DNA, 15 bp, Homo sapiens
gtaaaagactgacaa

SEQ ID NO: 281672 - DNA, 15 bp, Homo sapiens
tgtaaaagactgaca

SEQ ID NO: 281673 - DNA, 15 bp, Homo sapiens
atgtaaaagactgac

SEQ ID NO: 281674 - DNA, 15 bp, Homo sapiens
aatgtaaaagactga

SEQ ID NO: 281675 - DNA, 15 bp, Homo sapiens
aaatgtaaaagactg

SEQ ID NO: 281676 - DNA, 15 bp, Homo sapiens
aaaatgtaaaagact

SEQ ID NO: 281677 - DNA, 15 bp, Homo sapiens
taaaatgtaaaagac

SEQ ID NO: 281678 - DNA, 15 bp, Homo sapiens
ctaaaatgtaaaaga

SEQ ID NO: 281679 - DNA, 15 bp, Homo sapiens
gctaaaatgtaaaag

SEQ ID NO: 281680 - DNA, 15 bp, Homo sapiens
agctaaaatgtaaaa

SEQ ID NO: 281681 - DNA, 15 bp, Homo sapiens
tagctaaaatgtaaa

SEQ ID NO: 281682 - DNA, 15 bp, Homo sapiens
atagctaaaatgtaa

SEQ ID NO: 281683 - DNA, 15 bp, Homo sapiens
aatagctaaaatgta

SEQ ID NO: 281684 - DNA, 15 bp, Homo sapiens
gaatagctaaaatgt

SEQ ID NO: 281685 - DNA, 15 bp, Homo sapiens
agaatagctaaaatg

SEQ ID NO: 281686 - DNA, 15 bp, Homo sapiens
tagaatagctaaaat

SEQ ID NO: 281687 - DNA, 15 bp, Homo sapiens
ctagaatagctaaaa

SEQ ID NO: 281688 - DNA, 15 bp, Homo sapiens
actagaatagctaaa

SEQ ID NO: 281689 - DNA, 15 bp, Homo sapiens
cactagaatagctaa

SEQ ID NO: 281690 - DNA, 15 bp, Homo sapiens
ccactagaatagcta

SEQ ID NO: 281691 - DNA, 15 bp, Homo sapiens
cccactagaatagct

SEQ ID NO: 281692 - DNA, 15 bp, Homo sapiens
acccactagaatagc

SEQ ID NO: 281693 - DNA, 15 bp, Homo sapiens
cacccactagaatag

SEQ ID NO: 281694 - DNA, 15 bp, Homo sapiens
acacccactagaata

SEQ ID NO: 281695 - DNA, 15 bp, Homo sapiens
tacacccactagaat

SEQ ID NO: 281696 - DNA, 15 bp, Homo sapiens
atacacccactagaa

SEQ ID NO: 281697 - DNA, 15 bp, Homo sapiens
tatacacccactaga

SEQ ID NO: 281698 - DNA, 15 bp, Homo sapiens
ttatacacccactag

SEQ ID NO: 281699 - DNA, 15 bp, Homo sapiens
attatacacccacta

SEQ ID NO: 281700 - DNA, 15 bp, Homo sapiens
aattatacacccact

SEQ ID NO: 281701 - DNA, 15 bp, Homo sapiens
caattatacacccac

SEQ ID NO: 281702 - DNA, 15 bp, Homo sapiens
acaattatacaccca

SEQ ID NO: 281703 - DNA, 15 bp, Homo sapiens
tacaattatacaccc

SEQ ID NO: 281704 - DNA, 15 bp, Homo sapiens
ttacaattatacacc

SEQ ID NO: 281705 - DNA, 15 bp, Homo sapiens
attacaattatacac

SEQ ID NO: 281706 - DNA, 15 bp, Homo sapiens
aattacaattataca

SEQ ID NO: 281707 - DNA, 15 bp, Homo sapiens
aaattacaattatac

SEQ ID NO: 281708 - DNA, 15 bp, Homo sapiens
taaattacaattata

SEQ ID NO: 281709 - DNA, 15 bp, Homo sapiens
ttaaattacaattat

SEQ ID NO: 281710 - DNA, 15 bp, Homo sapiens
cttaaattacaatta

SEQ ID NO: 281711 - DNA, 15 bp, Homo sapiens
acttaaattacaatt

SEQ ID NO: 281712 - DNA, 15 bp, Homo sapiens
aacttaaattacaat

SEQ ID NO: 281713 - DNA, 15 bp, Homo sapiens
caacttaaattacaa

SEQ ID NO: 281714 - DNA, 15 bp, Homo sapiens
acaacttaaattaca

SEQ ID NO: 281715 - DNA, 15 bp, Homo sapiens
tacaacttaaattac

SEQ ID NO: 281716 - DNA, 15 bp, Homo sapiens
ttacaacttaaatta

SEQ ID NO: 281717 - DNA, 15 bp, Homo sapiens
tttacaacttaaatt

SEQ ID NO: 281718 - DNA, 15 bp, Homo sapiens
ttttacaacttaaat

SEQ ID NO: 281719 - DNA, 15 bp, Homo sapiens
attttacaacttaaa

SEQ ID NO: 281720 - DNA, 15 bp, Homo sapiens
tattttacaacttaa

SEQ ID NO: 281721 - DNA, 15 bp, Homo sapiens
atattttacaactta

SEQ ID NO: 281722 - DNA, 15 bp, Homo sapiens
aatattttacaactt

SEQ ID NO: 281723 - DNA, 15 bp, Homo sapiens
aaatattttacaact

SEQ ID NO: 281724 - DNA, 15 bp, Homo sapiens
taaatattttacaac

SEQ ID NO: 281725 - DNA, 15 bp, Homo sapiens
gtaaatattttacaa

SEQ ID NO: 281726 - DNA, 15 bp, Homo sapiens
tgtaaatattttaca

SEQ ID NO: 281727 - DNA, 15 bp, Homo sapiens
atgtaaatattttac

SEQ ID NO: 281728 - DNA, 15 bp, Homo sapiens
gatgtaaatatttta

SEQ ID NO: 281729 - DNA, 15 bp, Homo sapiens
ggatgtaaatatttt

SEQ ID NO: 281730 - DNA, 15 bp, Homo sapiens
gggatgtaaatattt

SEQ ID NO: 281731 - DNA, 15 bp, Homo sapiens
tgggatgtaaatatt

SEQ ID NO: 281732 - DNA, 15 bp, Homo sapiens
ttgggatgtaaatat

SEQ ID NO: 281733 - DNA, 15 bp, Homo sapiens
cttgggatgtaaata

SEQ ID NO: 281734 - DNA, 15 bp, Homo sapiens
acttgggatgtaaat

SEQ ID NO: 281735 - DNA, 15 bp, Homo sapiens
tacttgggatgtaaa

SEQ ID NO: 281736 - DNA, 15 bp, Homo sapiens
ctacttgggatgtaa

SEQ ID NO: 281737 - DNA, 15 bp, Homo sapiens
gctacttgggatgta

SEQ ID NO: 281738 - DNA, 15 bp, Homo sapiens
agctacttgggatgt

SEQ ID NO: 281739 - DNA, 15 bp, Homo sapiens
tagctacttgggatg

SEQ ID NO: 281740 - DNA, 15 bp, Homo sapiens
ttagctacttgggat

SEQ ID NO: 281741 - DNA, 15 bp, Homo sapiens
tttagctacttggga

SEQ ID NO: 281742 - DNA, 15 bp, Homo sapiens
ttttagctacttggg

SEQ ID NO: 281743 - DNA, 15 bp, Homo sapiens
attttagctacttgg

SEQ ID NO: 281744 - DNA, 15 bp, Homo sapiens
aattttagctacttg

SEQ ID NO: 281745 - DNA, 15 bp, Homo sapiens
taattttagctactt

SEQ ID NO: 281746 - DNA, 15 bp, Homo sapiens
ttaattttagctact

SEQ ID NO: 281747 - DNA, 15 bp, Homo sapiens
cttaattttagctac

SEQ ID NO: 281748 - DNA, 15 bp, Homo sapiens
tcttaattttagcta

SEQ ID NO: 281749 - DNA, 15 bp, Homo sapiens
ttcttaattttagct

SEQ ID NO: 281750 - DNA, 15 bp, Homo sapiens
tttcttaattttagc

SEQ ID NO: 281751 - DNA, 15 bp, Homo sapiens
ttttcttaattttag

SEQ ID NO: 281752 - DNA, 15 bp, Homo sapiens
tttttcttaatttta

SEQ ID NO: 281753 - DNA, 15 bp, Homo sapiens
ctttttcttaatttt

SEQ ID NO: 281754 - DNA, 15 bp, Homo sapiens
actttttcttaattt

SEQ ID NO: 281755 - DNA, 15 bp, Homo sapiens
aactttttcttaatt

SEQ ID NO: 281756 - DNA, 15 bp, Homo sapiens
aaactttttcttaat

SEQ ID NO: 281757 - DNA, 15 bp, Homo sapiens
taaactttttcttaa

SEQ ID NO: 281758 - DNA, 15 bp, Homo sapiens
ctaaactttttctta

SEQ ID NO: 281759 - DNA, 15 bp, Homo sapiens
tctaaactttttctt

SEQ ID NO: 281760 - DNA, 15 bp, Homo sapiens
ctctaaactttttct

SEQ ID NO: 281761 - DNA, 15 bp, Homo sapiens
actctaaactttttc

SEQ ID NO: 281762 - DNA, 15 bp, Homo sapiens
aactctaaacttttt

SEQ ID NO: 281763 - DNA, 15 bp, Homo sapiens
caactctaaactttt

SEQ ID NO: 281764 - DNA, 15 bp, Homo sapiens
ccaactctaaacttt

SEQ ID NO: 281765 - DNA, 15 bp, Homo sapiens
tccaactctaaactt

SEQ ID NO: 281766 - DNA, 15 bp, Homo sapiens
atccaactctaaact

SEQ ID NO: 281767 - DNA, 15 bp, Homo sapiens
catccaactctaaac

SEQ ID NO: 281768 - DNA, 15 bp, Homo sapiens
ccatccaactctaaa

SEQ ID NO: 281769 - DNA, 15 bp, Homo sapiens
accatccaactctaa

SEQ ID NO: 281770 - DNA, 15 bp, Homo sapiens
caccatccaactcta

SEQ ID NO: 281771 - DNA, 15 bp, Homo sapiens
ccaccatccaactct

SEQ ID NO: 281772 - DNA, 15 bp, Homo sapiens
accaccatccaactc

SEQ ID NO: 281773 - DNA, 15 bp, Homo sapiens
taccaccatccaact

SEQ ID NO: 281774 - DNA, 15 bp, Homo sapiens
ttaccaccatccaac

SEQ ID NO: 281775 - DNA, 15 bp, Homo sapiens
tttaccaccatccaa

SEQ ID NO: 281776 - DNA, 15 bp, Homo sapiens
gtttaccaccatcca

SEQ ID NO: 281777 - DNA, 15 bp, Homo sapiens
ggtttaccaccatcc

SEQ ID NO: 281778 - DNA, 15 bp, Homo sapiens
aggtttaccaccatc

SEQ ID NO: 281779 - DNA, 15 bp, Homo sapiens
aaggtttaccaccat

SEQ ID NO: 281780 - DNA, 15 bp, Homo sapiens
aaaggtttaccacca

SEQ ID NO: 281781 - DNA, 15 bp, Homo sapiens
taaaggtttaccacc

SEQ ID NO: 281782 - DNA, 15 bp, Homo sapiens
ttaaaggtttaccac

SEQ ID NO: 281783 - DNA, 15 bp, Homo sapiens
attaaaggtttacca

SEQ ID NO: 281784 - DNA, 15 bp, Homo sapiens
aattaaaggtttacc

SEQ ID NO: 281785 - DNA, 15 bp, Homo sapiens
taattaaaggtttac

SEQ ID NO: 281786 - DNA, 15 bp, Homo sapiens
gtaattaaaggttta

SEQ ID NO: 281787 - DNA, 15 bp, Homo sapiens
ggtaattaaaggttt

SEQ ID NO: 281788 - DNA, 15 bp, Homo sapiens
aggtaattaaaggtt

SEQ ID NO: 281789 - DNA, 15 bp, Homo sapiens
caggtaattaaaggt

SEQ ID NO: 281790 - DNA, 15 bp, Homo sapiens
acaggtaattaaagg

SEQ ID NO: 281791 - DNA, 15 bp, Homo sapiens
tacaggtaattaaag

SEQ ID NO: 281792 - DNA, 15 bp, Homo sapiens
ttacaggtaattaaa

SEQ ID NO: 281793 - DNA, 15 bp, Homo sapiens
tttacaggtaattaa

SEQ ID NO: 281794 - DNA, 15 bp, Homo sapiens
ttttacaggtaatta

SEQ ID NO: 281795 - DNA, 15 bp, Homo sapiens
attttacaggtaatt

SEQ ID NO: 281796 - DNA, 15 bp, Homo sapiens
aattttacaggtaat

SEQ ID NO: 281797 - DNA, 15 bp, Homo sapiens
aaattttacaggtaa

SEQ ID NO: 281798 - DNA, 15 bp, Homo sapiens
caaattttacaggta

SEQ ID NO: 281799 - DNA, 15 bp, Homo sapiens
ccaaattttacaggt

SEQ ID NO: 281800 - DNA, 15 bp, Homo sapiens
accaaattttacagg

SEQ ID NO: 281801 - DNA, 15 bp, Homo sapiens
taccaaattttacag

SEQ ID NO: 281802 - DNA, 15 bp, Homo sapiens
ttaccaaattttaca

SEQ ID NO: 281803 - DNA, 15 bp, Homo sapiens
attaccaaattttac

SEQ ID NO: 281804 - DNA, 15 bp, Homo sapiens
gattaccaaatttta

SEQ ID NO: 281805 - DNA, 15 bp, Homo sapiens
agattaccaaatttt

SEQ ID NO: 281806 - DNA, 15 bp, Homo sapiens
cagattaccaaattt

SEQ ID NO: 281807 - DNA, 15 bp, Homo sapiens
ccagattaccaaatt

SEQ ID NO: 281808 - DNA, 15 bp, Homo sapiens
tccagattaccaaat

SEQ ID NO: 281809 - DNA, 15 bp, Homo sapiens
ttccagattaccaaa

SEQ ID NO: 281810 - DNA, 15 bp, Homo sapiens
gttccagattaccaa

SEQ ID NO: 281811 - DNA, 15 bp, Homo sapiens
tgttccagattacca

SEQ ID NO: 281812 - DNA, 15 bp, Homo sapiens
ttgttccagattacc

SEQ ID NO: 281813 - DNA, 15 bp, Homo sapiens
gttgttccagattac

SEQ ID NO: 281814 - DNA, 15 bp, Homo sapiens
agttgttccagatta

SEQ ID NO: 281815 - DNA, 15 bp, Homo sapiens
gagttgttccagatt

SEQ ID NO: 281816 - DNA, 15 bp, Homo sapiens
tgagttgttccagat

SEQ ID NO: 281817 - DNA, 15 bp, Homo sapiens
gtgagttgttccaga

SEQ ID NO: 281818 - DNA, 15 bp, Homo sapiens
agtgagttgttccag

SEQ ID NO: 281819 - DNA, 15 bp, Homo sapiens
aagtgagttgttcca

SEQ ID NO: 281820 - DNA, 15 bp, Homo sapiens
taagtgagttgttcc

SEQ ID NO: 281821 - DNA, 15 bp, Homo sapiens
ataagtgagttgttc

SEQ ID NO: 281822 - DNA, 15 bp, Homo sapiens
gataagtgagttgtt

SEQ ID NO: 281823 - DNA, 15 bp, Homo sapiens
ggataagtgagttgt

SEQ ID NO: 281824 - DNA, 15 bp, Homo sapiens
aggataagtgagttg

SEQ ID NO: 281825 - DNA, 15 bp, Homo sapiens
taggataagtgagtt

SEQ ID NO: 281826 - DNA, 15 bp, Homo sapiens
ttaggataagtgagt

SEQ ID NO: 281827 - DNA, 15 bp, Homo sapiens
tttaggataagtgag

SEQ ID NO: 281828 - DNA, 15 bp, Homo sapiens
ctttaggataagtga

SEQ ID NO: 281829 - DNA, 15 bp, Homo sapiens
gctttaggataagtg

SEQ ID NO: 281830 - DNA, 15 bp, Homo sapiens
agctttaggataagt

SEQ ID NO: 281831 - DNA, 15 bp, Homo sapiens
aagctttaggataag

SEQ ID NO: 281832 - DNA, 15 bp, Homo sapiens
aaagctttaggataa

SEQ ID NO: 281833 - DNA, 15 bp, Homo sapiens
aaaagctttaggata

SEQ ID NO: 281834 - DNA, 15 bp, Homo sapiens
taaaagctttaggat

SEQ ID NO: 281835 - DNA, 15 bp, Homo sapiens
ataaaagctttagga

SEQ ID NO: 281836 - DNA, 15 bp, Homo sapiens
tataaaagctttagg

SEQ ID NO: 281837 - DNA, 15 bp, Homo sapiens
atataaaagctttag

SEQ ID NO: 281838 - DNA, 15 bp, Homo sapiens
tatataaaagcttta

SEQ ID NO: 281839 - DNA, 15 bp, Homo sapiens
ttatataaaagcttt

SEQ ID NO: 281840 - DNA, 15 bp, Homo sapiens
attatataaaagctt

SEQ ID NO: 281841 - DNA, 15 bp, Homo sapiens
aattatataaaagct

SEQ ID NO: 281842 - DNA, 15 bp, Homo sapiens
caattatataaaagc

SEQ ID NO: 281843 - DNA, 15 bp, Homo sapiens
tcaattatataaaag

SEQ ID NO: 281844 - DNA, 15 bp, Homo sapiens
atcaattatataaaa

SEQ ID NO: 281845 - DNA, 15 bp, Homo sapiens
tatcaattatataaa

SEQ ID NO: 281846 - DNA, 15 bp, Homo sapiens
atatcaattatataa

SEQ ID NO: 281847 - DNA, 15 bp, Homo sapiens
aatatcaattatata

SEQ ID NO: 281848 - DNA, 15 bp, Homo sapiens
aaatatcaattatat

SEQ ID NO: 281849 - DNA, 15 bp, Homo sapiens
gaaatatcaattata

SEQ ID NO: 281850 - DNA, 15 bp, Homo sapiens
tgaaatatcaattat

SEQ ID NO: 281851 - DNA, 15 bp, Homo sapiens
ttgaaatatcaatta

SEQ ID NO: 281852 - DNA, 15 bp, Homo sapiens
tttgaaatatcaatt

SEQ ID NO: 281853 - DNA, 15 bp, Homo sapiens
ttttgaaatatcaat

SEQ ID NO: 281854 - DNA, 15 bp, Homo sapiens
attttgaaatatcaa

SEQ ID NO: 281855 - DNA, 15 bp, Homo sapiens
tattttgaaatatca

SEQ ID NO: 281856 - DNA, 15 bp, Homo sapiens
ttattttgaaatatc

SEQ ID NO: 281857 - DNA, 15 bp, Homo sapiens
attattttgaaatat

SEQ ID NO: 281858 - DNA, 15 bp, Homo sapiens
cattattttgaaata

SEQ ID NO: 281859 - DNA, 15 bp, Homo sapiens
acattattttgaaat

SEQ ID NO: 281860 - DNA, 15 bp, Homo sapiens
tacattattttgaaa

SEQ ID NO: 281861 - DNA, 15 bp, Homo sapiens
ttacattattttgaa

SEQ ID NO: 281862 - DNA, 15 bp, Homo sapiens
cttacattattttga

SEQ ID NO: 281863 - DNA, 15 bp, Homo sapiens
tcttacattattttg

SEQ ID NO: 281864 - DNA, 15 bp, Homo sapiens
atcttacattatttt

SEQ ID NO: 281865 - DNA, 15 bp, Homo sapiens
catcttacattattt

SEQ ID NO: 281866 - DNA, 15 bp, Homo sapiens
ccatcttacattatt

SEQ ID NO: 281867 - DNA, 15 bp, Homo sapiens
accatcttacattat

SEQ ID NO: 281868 - DNA, 15 bp, Homo sapiens
taccatcttacatta

SEQ ID NO: 281869 - DNA, 15 bp, Homo sapiens
ataccatcttacatt

SEQ ID NO: 281870 - DNA, 15 bp, Homo sapiens
aataccatcttacat

SEQ ID NO: 281871 - DNA, 15 bp, Homo sapiens
taataccatcttaca

SEQ ID NO: 281872 - DNA, 15 bp, Homo sapiens
gtaataccatcttac

SEQ ID NO: 281873 - DNA, 15 bp, Homo sapiens
tgtaataccatctta

SEQ ID NO: 281874 - DNA, 15 bp, Homo sapiens
atgtaataccatctt

SEQ ID NO: 281875 - DNA, 15 bp, Homo sapiens
catgtaataccatct

SEQ ID NO: 281876 - DNA, 15 bp, Homo sapiens
gcatgtaataccatc

SEQ ID NO: 281877 - DNA, 15 bp, Homo sapiens
agcatgtaataccat

SEQ ID NO: 281878 - DNA, 15 bp, Homo sapiens
aagcatgtaatacca

SEQ ID NO: 281879 - DNA, 15 bp, Homo sapiens
aaagcatgtaatacc

SEQ ID NO: 281880 - DNA, 15 bp, Homo sapiens
aaaagcatgtaatac

SEQ ID NO: 281881 - DNA, 15 bp, Homo sapiens
aaaaagcatgtaata

SEQ ID NO: 281882 - DNA, 15 bp, Homo sapiens
taaaaagcatgtaat

SEQ ID NO: 281883 - DNA, 15 bp, Homo sapiens
ctaaaaagcatgtaa

SEQ ID NO: 281884 - DNA, 15 bp, Homo sapiens
gctaaaaagcatgta

SEQ ID NO: 281885 - DNA, 15 bp, Homo sapiens
agctaaaaagcatgt

SEQ ID NO: 281886 - DNA, 15 bp, Homo sapiens
gagctaaaaagcatg

SEQ ID NO: 281887 - DNA, 15 bp, Homo sapiens
agagctaaaaagcat

SEQ ID NO: 281888 - DNA, 15 bp, Homo sapiens
tagagctaaaaagca

SEQ ID NO: 281889 - DNA, 15 bp, Homo sapiens
atagagctaaaaagc

SEQ ID NO: 281890 - DNA, 15 bp, Homo sapiens
aatagagctaaaaag

SEQ ID NO: 281891 - DNA, 15 bp, Homo sapiens
caatagagctaaaaa

SEQ ID NO: 281892 - DNA, 15 bp, Homo sapiens
acaatagagctaaaa

SEQ ID NO: 281893 - DNA, 15 bp, Homo sapiens
tacaatagagctaaa

SEQ ID NO: 281894 - DNA, 15 bp, Homo sapiens
ttacaatagagctaa

SEQ ID NO: 281895 - DNA, 15 bp, Homo sapiens
attacaatagagcta

SEQ ID NO: 281896 - DNA, 15 bp, Homo sapiens
gattacaatagagct

SEQ ID NO: 281897 - DNA, 15 bp, Homo sapiens
agattacaatagagc

SEQ ID NO: 281898 - DNA, 15 bp, Homo sapiens
gagattacaatagag

SEQ ID NO: 281899 - DNA, 15 bp, Homo sapiens
ggagattacaataga

SEQ ID NO: 281900 - DNA, 15 bp, Homo sapiens
tggagattacaatag

SEQ ID NO: 281901 - DNA, 15 bp, Homo sapiens
ctggagattacaata

SEQ ID NO: 281902 - DNA, 15 bp, Homo sapiens
actggagattacaat

SEQ ID NO: 281903 - DNA, 15 bp, Homo sapiens
aactggagattacaa

SEQ ID NO: 281904 - DNA, 15 bp, Homo sapiens
taactggagattaca

SEQ ID NO: 281905 - DNA, 15 bp, Homo sapiens
ttaactggagattac

SEQ ID NO: 281906 - DNA, 15 bp, Homo sapiens
cttaactggagatta

SEQ ID NO: 281907 - DNA, 15 bp, Homo sapiens
tcttaactggagatt

SEQ ID NO: 281908 - DNA, 15 bp, Homo sapiens
ctcttaactggagat

SEQ ID NO: 281909 - DNA, 15 bp, Homo sapiens
actcttaactggaga

SEQ ID NO: 281910 - DNA, 15 bp, Homo sapiens
tactcttaactggag

SEQ ID NO: 281911 - DNA, 15 bp, Homo sapiens
ttactcttaactgga

SEQ ID NO: 281912 - DNA, 15 bp, Homo sapiens
cttactcttaactgg

SEQ ID NO: 281913 - DNA, 15 bp, Homo sapiens
acttactcttaactg

SEQ ID NO: 281914 - DNA, 15 bp, Homo sapiens
tacttactcttaact

SEQ ID NO: 281915 - DNA, 15 bp, Homo sapiens
ttacttactcttaac

SEQ ID NO: 281916 - DNA, 15 bp, Homo sapiens
tttacttactcttaa

SEQ ID NO: 281917 - DNA, 15 bp, Homo sapiens
atttacttactctta

SEQ ID NO: 281918 - DNA, 15 bp, Homo sapiens
tatttacttactctt

SEQ ID NO: 281919 - DNA, 15 bp, Homo sapiens
ctatttacttactct

SEQ ID NO: 281920 - DNA, 15 bp, Homo sapiens
actatttacttactc

SEQ ID NO: 281921 - DNA, 15 bp, Homo sapiens
aactatttacttact

SEQ ID NO: 281922 - DNA, 15 bp, Homo sapiens
gaactatttacttac

SEQ ID NO: 281923 - DNA, 15 bp, Homo sapiens
ggaactatttactta

SEQ ID NO: 281924 - DNA, 15 bp, Homo sapiens
tggaactatttactt

SEQ ID NO: 281925 - DNA, 15 bp, Homo sapiens
ttggaactatttact

SEQ ID NO: 281926 - DNA, 15 bp, Homo sapiens
gttggaactatttac

SEQ ID NO: 281927 - DNA, 15 bp, Homo sapiens
agttggaactattta

SEQ ID NO: 281928 - DNA, 15 bp, Homo sapiens
tagttggaactattt

SEQ ID NO: 281929 - DNA, 15 bp, Homo sapiens
atagttggaactatt

SEQ ID NO: 281930 - DNA, 15 bp, Homo sapiens
aatagttggaactat

SEQ ID NO: 281931 - DNA, 15 bp, Homo sapiens
aaatagttggaacta

SEQ ID NO: 281932 - DNA, 15 bp, Homo sapiens
taaatagttggaact

SEQ ID NO: 281933 - DNA, 15 bp, Homo sapiens
ttaaatagttggaac

SEQ ID NO: 281934 - DNA, 15 bp, Homo sapiens
attaaatagttggaa

SEQ ID NO: 281935 - DNA, 15 bp, Homo sapiens
cattaaatagttgga

SEQ ID NO: 281936 - DNA, 15 bp, Homo sapiens
tcattaaatagttgg

SEQ ID NO: 281937 - DNA, 15 bp, Homo sapiens
ttcattaaatagttg

SEQ ID NO: 281938 - DNA, 15 bp, Homo sapiens
gttcattaaatagtt

SEQ ID NO: 281939 - DNA, 15 bp, Homo sapiens
tgttcattaaatagt

SEQ ID NO: 281940 - DNA, 15 bp, Homo sapiens
atgttcattaaatag

SEQ ID NO: 281941 - DNA, 15 bp, Homo sapiens
aatgttcattaaata

SEQ ID NO: 281942 - DNA, 15 bp, Homo sapiens
taatgttcattaaat

SEQ ID NO: 281943 - DNA, 15 bp, Homo sapiens
ttaatgttcattaaa

SEQ ID NO: 281944 - DNA, 15 bp, Homo sapiens
attaatgttcattaa

SEQ ID NO: 281945 - DNA, 15 bp, Homo sapiens
aattaatgttcatta

SEQ ID NO: 281946 - DNA, 15 bp, Homo sapiens
aaattaatgttcatt

SEQ ID NO: 281947 - DNA, 15 bp, Homo sapiens
caaattaatgttcat

SEQ ID NO: 281948 - DNA, 15 bp, Homo sapiens
tcaaattaatgttca

SEQ ID NO: 281949 - DNA, 15 bp, Homo sapiens
gtcaaattaatgttc

SEQ ID NO: 281950 - DNA, 15 bp, Homo sapiens
tgtcaaattaatgtt

SEQ ID NO: 281951 - DNA, 15 bp, Homo sapiens
atgtcaaattaatgt

SEQ ID NO: 281952 - DNA, 15 bp, Homo sapiens
aatgtcaaattaatg

SEQ ID NO: 281953 - DNA, 15 bp, Homo sapiens
aaatgtcaaattaat

SEQ ID NO: 281954 - DNA, 15 bp, Homo sapiens
gaaatgtcaaattaa

SEQ ID NO: 281955 - DNA, 15 bp, Homo sapiens
agaaatgtcaaatta

SEQ ID NO: 281956 - DNA, 15 bp, Homo sapiens
aagaaatgtcaaatt

SEQ ID NO: 281957 - DNA, 15 bp, Homo sapiens
aaagaaatgtcaaat

SEQ ID NO: 281958 - DNA, 15 bp, Homo sapiens
aaaagaaatgtcaaa

SEQ ID NO: 281959 - DNA, 15 bp, Homo sapiens
caaaagaaatgtcaa

SEQ ID NO: 281960 - DNA, 15 bp, Homo sapiens
acaaaagaaatgtca

SEQ ID NO: 281961 - DNA, 15 bp, Homo sapiens
aacaaaagaaatgtc

SEQ ID NO: 281962 - DNA, 15 bp, Homo sapiens
aaacaaaagaaatgt

SEQ ID NO: 281963 - DNA, 15 bp, Homo sapiens
gaaacaaaagaaatg

SEQ ID NO: 281964 - DNA, 15 bp, Homo sapiens
ggaaacaaaagaaat

SEQ ID NO: 281965 - DNA, 15 bp, Homo sapiens
tggaaacaaaagaaa

SEQ ID NO: 281966 - DNA, 15 bp, Homo sapiens
ttggaaacaaaagaa

SEQ ID NO: 281967 - DNA, 15 bp, Homo sapiens
gttggaaacaaaaga

SEQ ID NO: 281968 - DNA, 15 bp, Homo sapiens
agttggaaacaaaag

SEQ ID NO: 281969 - DNA, 15 bp, Homo sapiens
aagttggaaacaaaa

SEQ ID NO: 281970 - DNA, 15 bp, Homo sapiens
taagttggaaacaaa

SEQ ID NO: 281971 - DNA, 15 bp, Homo sapiens
ttaagttggaaacaa

SEQ ID NO: 281972 - DNA, 15 bp, Homo sapiens
attaagttggaaaca

SEQ ID NO: 281973 - DNA, 15 bp, Homo sapiens
cattaagttggaaac

SEQ ID NO: 281974 - DNA, 15 bp, Homo sapiens
acattaagttggaaa

SEQ ID NO: 281975 - DNA, 15 bp, Homo sapiens
tacattaagttggaa

SEQ ID NO: 281976 - DNA, 15 bp, Homo sapiens
ttacattaagttgga

SEQ ID NO: 281977 - DNA, 15 bp, Homo sapiens
attacattaagttgg

SEQ ID NO: 281978 - DNA, 15 bp, Homo sapiens
gattacattaagttg

SEQ ID NO: 281979 - DNA, 15 bp, Homo sapiens
ggattacattaagtt

SEQ ID NO: 281980 - DNA, 15 bp, Homo sapiens
tggattacattaagt

SEQ ID NO: 281981 - DNA, 15 bp, Homo sapiens
ttggattacattaag

SEQ ID NO: 281982 - DNA, 15 bp, Homo sapiens
tttggattacattaa

SEQ ID NO: 281983 - DNA, 15 bp, Homo sapiens
ttttggattacatta

SEQ ID NO: 281984 - DNA, 15 bp, Homo sapiens
attttggattacatt

SEQ ID NO: 281985 - DNA, 15 bp, Homo sapiens
aattttggattacat

SEQ ID NO: 281986 - DNA, 15 bp, Homo sapiens
taattttggattaca

SEQ ID NO: 281987 - DNA, 15 bp, Homo sapiens
gtaattttggattac

SEQ ID NO: 281988 - DNA, 15 bp, Homo sapiens
ggtaattttggatta

SEQ ID NO: 281989 - DNA, 15 bp, Homo sapiens
gggtaattttggatt

SEQ ID NO: 281990 - DNA, 15 bp, Homo sapiens
tgggtaattttggat

SEQ ID NO: 281991 - DNA, 15 bp, Homo sapiens
atgggtaattttgga

SEQ ID NO: 281992 - DNA, 15 bp, Homo sapiens
tatgggtaattttgg

SEQ ID NO: 281993 - DNA, 15 bp, Homo sapiens
ttatgggtaattttg

SEQ ID NO: 281994 - DNA, 15 bp, Homo sapiens
tttatgggtaatttt

SEQ ID NO: 281995 - DNA, 15 bp, Homo sapiens
ttttatgggtaattt

SEQ ID NO: 281996 - DNA, 15 bp, Homo sapiens
attttatgggtaatt

SEQ ID NO: 281997 - DNA, 15 bp, Homo sapiens
cattttatgggtaat

SEQ ID NO: 281998 - DNA, 15 bp, Homo sapiens
acattttatgggtaa

SEQ ID NO: 281999 - DNA, 15 bp, Homo sapiens
tacattttatgggta

SEQ ID NO: 282000 - DNA, 15 bp, Homo sapiens
ttacattttatgggt

SEQ ID NO: 282001 - DNA, 15 bp, Homo sapiens
attacattttatggg

SEQ ID NO: 282002 - DNA, 15 bp, Homo sapiens
tattacattttatgg

SEQ ID NO: 282003 - DNA, 15 bp, Homo sapiens
atattacattttatg

SEQ ID NO: 282004 - DNA, 15 bp, Homo sapiens
aatattacattttat

SEQ ID NO: 282005 - DNA, 15 bp, Homo sapiens
aaatattacatttta

SEQ ID NO: 282006 - DNA, 15 bp, Homo sapiens
taaatattacatttt

SEQ ID NO: 282007 - DNA, 15 bp, Homo sapiens
ctaaatattacattt

SEQ ID NO: 282008 - DNA, 15 bp, Homo sapiens
cctaaatattacatt

SEQ ID NO: 282009 - DNA, 15 bp, Homo sapiens
ccctaaatattacat

SEQ ID NO: 282010 - DNA, 15 bp, Homo sapiens
cccctaaatattaca

SEQ ID NO: 282011 - DNA, 15 bp, Homo sapiens
acccctaaatattac

SEQ ID NO: 282012 - DNA, 15 bp, Homo sapiens
cacccctaaatatta

SEQ ID NO: 282013 - DNA, 15 bp, Homo sapiens
ccacccctaaatatt

SEQ ID NO: 282014 - DNA, 15 bp, Homo sapiens
accacccctaaatat

SEQ ID NO: 282015 - DNA, 15 bp, Homo sapiens
taccacccctaaata

SEQ ID NO: 282016 - DNA, 15 bp, Homo sapiens
ataccacccctaaat

SEQ ID NO: 282017 - DNA, 15 bp, Homo sapiens
tataccacccctaaa

SEQ ID NO: 282018 - DNA, 15 bp, Homo sapiens
atataccacccctaa

SEQ ID NO: 282019 - DNA, 15 bp, Homo sapiens
tatataccaccccta

SEQ ID NO: 282020 - DNA, 15 bp, Homo sapiens
atatataccacccct

SEQ ID NO: 282021 - DNA, 15 bp, Homo sapiens
aatatataccacccc

SEQ ID NO: 282022 - DNA, 15 bp, Homo sapiens
caatatataccaccc

SEQ ID NO: 282023 - DNA, 15 bp, Homo sapiens
acaatatataccacc

SEQ ID NO: 282024 - DNA, 15 bp, Homo sapiens
cacaatatataccac

SEQ ID NO: 282025 - DNA, 15 bp, Homo sapiens
ccacaatatatacca

SEQ ID NO: 282026 - DNA, 15 bp, Homo sapiens
cccacaatatatacc

SEQ ID NO: 282027 - DNA, 15 bp, Homo sapiens
ccccacaatatatac

SEQ ID NO: 282028 - DNA, 15 bp, Homo sapiens
tccccacaatatata

SEQ ID NO: 282029 - DNA, 15 bp, Homo sapiens
ttccccacaatatat

SEQ ID NO: 282030 - DNA, 15 bp, Homo sapiens
tttccccacaatata

SEQ ID NO: 282031 - DNA, 15 bp, Homo sapiens
ttttccccacaatat

SEQ ID NO: 282032 - DNA, 15 bp, Homo sapiens
tttttccccacaata

SEQ ID NO: 282033 - DNA, 15 bp, Homo sapiens
atttttccccacaat

SEQ ID NO: 282034 - DNA, 15 bp, Homo sapiens
catttttccccacaa

SEQ ID NO: 282035 - DNA, 15 bp, Homo sapiens
acatttttccccaca

SEQ ID NO: 282036 - DNA, 15 bp, Homo sapiens
cacatttttccccac

SEQ ID NO: 282037 - DNA, 15 bp, Homo sapiens
acacatttttcccca

SEQ ID NO: 282038 - DNA, 15 bp, Homo sapiens
aacacatttttcccc

SEQ ID NO: 282039 - DNA, 15 bp, Homo sapiens
gaacacatttttccc

SEQ ID NO: 282040 - DNA, 15 bp, Homo sapiens
agaacacatttttcc

SEQ ID NO: 282041 - DNA, 15 bp, Homo sapiens
tagaacacatttttc

SEQ ID NO: 282042 - DNA, 15 bp, Homo sapiens
ttagaacacattttt

SEQ ID NO: 282043 - DNA, 15 bp, Homo sapiens
tttagaacacatttt

SEQ ID NO: 282044 - DNA, 15 bp, Homo sapiens
ctttagaacacattt

SEQ ID NO: 282045 - DNA, 15 bp, Homo sapiens
tctttagaacacatt

SEQ ID NO: 282046 - DNA, 15 bp, Homo sapiens
atctttagaacacat

SEQ ID NO: 282047 - DNA, 15 bp, Homo sapiens
tatctttagaacaca

SEQ ID NO: 282048 - DNA, 15 bp, Homo sapiens
ttatctttagaacac

SEQ ID NO: 282049 - DNA, 15 bp, Homo sapiens
attatctttagaaca

SEQ ID NO: 282050 - DNA, 15 bp, Homo sapiens
cattatctttagaac

SEQ ID NO: 282051 - DNA, 15 bp, Homo sapiens
tcattatctttagaa

SEQ ID NO: 282052 - DNA, 15 bp, Homo sapiens
ttcattatctttaga

SEQ ID NO: 282053 - DNA, 15 bp, Homo sapiens
tttcattatctttag

SEQ ID NO: 282054 - DNA, 15 bp, Homo sapiens
ttttcattatcttta

SEQ ID NO: 282055 - DNA, 15 bp, Homo sapiens
tttttcattatcttt

SEQ ID NO: 282056 - DNA, 15 bp, Homo sapiens
ctttttcattatctt

SEQ ID NO: 282057 - DNA, 15 bp, Homo sapiens
actttttcattatct

SEQ ID NO: 282058 - DNA, 15 bp, Homo sapiens
tactttttcattatc

SEQ ID NO: 282059 - DNA, 15 bp, Homo sapiens
gtactttttcattat

SEQ ID NO: 282060 - DNA, 15 bp, Homo sapiens
agtactttttcatta

SEQ ID NO: 282061 - DNA, 15 bp, Homo sapiens
gagtactttttcatt

SEQ ID NO: 282062 - DNA, 15 bp, Homo sapiens
agagtactttttcat

SEQ ID NO: 282063 - DNA, 15 bp, Homo sapiens
tagagtactttttca

SEQ ID NO: 282064 - DNA, 15 bp, Homo sapiens
ctagagtactttttc

SEQ ID NO: 282065 - DNA, 15 bp, Homo sapiens
actagagtacttttt

SEQ ID NO: 282066 - DNA, 15 bp, Homo sapiens
cactagagtactttt

SEQ ID NO: 282067 - DNA, 15 bp, Homo sapiens
tcactagagtacttt

SEQ ID NO: 282068 - DNA, 15 bp, Homo sapiens
atcactagagtactt

SEQ ID NO: 282069 - DNA, 15 bp, Homo sapiens
tatcactagagtact

SEQ ID NO: 282070 - DNA, 15 bp, Homo sapiens
ttatcactagagtac

SEQ ID NO: 282071 - DNA, 15 bp, Homo sapiens
attatcactagagta

SEQ ID NO: 282072 - DNA, 15 bp, Homo sapiens
cattatcactagagt

SEQ ID NO: 282073 - DNA, 15 bp, Homo sapiens
tcattatcactagag

SEQ ID NO: 282074 - DNA, 15 bp, Homo sapiens
atcattatcactaga

SEQ ID NO: 282075 - DNA, 15 bp, Homo sapiens
tatcattatcactag

SEQ ID NO: 282076 - DNA, 15 bp, Homo sapiens
ctatcattatcacta

SEQ ID NO: 282077 - DNA, 15 bp, Homo sapiens
gctatcattatcact

SEQ ID NO: 282078 - DNA, 15 bp, Homo sapiens
ggctatcattatcac

SEQ ID NO: 282079 - DNA, 15 bp, Homo sapiens
tggctatcattatca

SEQ ID NO: 282080 - DNA, 15 bp, Homo sapiens
atggctatcattatc

SEQ ID NO: 282081 - DNA, 15 bp, Homo sapiens
gatggctatcattat

SEQ ID NO: 282082 - DNA, 15 bp, Homo sapiens
tgatggctatcatta

SEQ ID NO: 282083 - DNA, 15 bp, Homo sapiens
ttgatggctatcatt

SEQ ID NO: 282084 - DNA, 15 bp, Homo sapiens
attgatggctatcat

SEQ ID NO: 282085 - DNA, 15 bp, Homo sapiens
gattgatggctatca

SEQ ID NO: 282086 - DNA, 15 bp, Homo sapiens
tgattgatggctatc

SEQ ID NO: 282087 - DNA, 15 bp, Homo sapiens
atgattgatggctat

SEQ ID NO: 282088 - DNA, 15 bp, Homo sapiens
aatgattgatggcta

SEQ ID NO: 282089 - DNA, 15 bp, Homo sapiens
taatgattgatggct

SEQ ID NO: 282090 - DNA, 15 bp, Homo sapiens
ttaatgattgatggc

SEQ ID NO: 282091 - DNA, 15 bp, Homo sapiens
cttaatgattgatgg

SEQ ID NO: 282092 - DNA, 15 bp, Homo sapiens
tcttaatgattgatg

SEQ ID NO: 282093 - DNA, 15 bp, Homo sapiens
ttcttaatgattgat

SEQ ID NO: 282094 - DNA, 15 bp, Homo sapiens
gttcttaatgattga

SEQ ID NO: 282095 - DNA, 15 bp, Homo sapiens
agttcttaatgattg

SEQ ID NO: 282096 - DNA, 15 bp, Homo sapiens
cagttcttaatgatt

SEQ ID NO: 282097 - DNA, 15 bp, Homo sapiens
tcagttcttaatgat

SEQ ID NO: 282098 - DNA, 15 bp, Homo sapiens
gtcagttcttaatga

SEQ ID NO: 282099 - DNA, 15 bp, Homo sapiens
agtcagttcttaatg

SEQ ID NO: 282100 - DNA, 15 bp, Homo sapiens
cagtcagttcttaat

SEQ ID NO: 282101 - DNA, 15 bp, Homo sapiens
acagtcagttcttaa

SEQ ID NO: 282102 - DNA, 15 bp, Homo sapiens
tacagtcagttctta

SEQ ID NO: 282103 - DNA, 15 bp, Homo sapiens
atacagtcagttctt

SEQ ID NO: 282104 - DNA, 15 bp, Homo sapiens
tatacagtcagttct

SEQ ID NO: 282105 - DNA, 15 bp, Homo sapiens
gtatacagtcagttc

SEQ ID NO: 282106 - DNA, 15 bp, Homo sapiens
agtatacagtcagtt

SEQ ID NO: 282107 - DNA, 15 bp, Homo sapiens
tagtatacagtcagt

SEQ ID NO: 282108 - DNA, 15 bp, Homo sapiens
atagtatacagtcag

SEQ ID NO: 282109 - DNA, 15 bp, Homo sapiens
tatagtatacagtca

SEQ ID NO: 282110 - DNA, 15 bp, Homo sapiens
atatagtatacagtc

SEQ ID NO: 282111 - DNA, 15 bp, Homo sapiens
tatatagtatacagt

SEQ ID NO: 282112 - DNA, 15 bp, Homo sapiens
gtatatagtatacag

SEQ ID NO: 282113 - DNA, 15 bp, Homo sapiens
agtatatagtataca

SEQ ID NO: 282114 - DNA, 15 bp, Homo sapiens
tagtatatagtatac

SEQ ID NO: 282115 - DNA, 15 bp, Homo sapiens
gtagtatatagtata

SEQ ID NO: 282116 - DNA, 15 bp, Homo sapiens
cgtagtatatagtat

SEQ ID NO: 282117 - DNA, 15 bp, Homo sapiens
gcgtagtatatagta

SEQ ID NO: 282118 - DNA, 15 bp, Homo sapiens
ggcgtagtatatagt

SEQ ID NO: 282119 - DNA, 15 bp, Homo sapiens
tggcgtagtatatag

SEQ ID NO: 282120 - DNA, 15 bp, Homo sapiens
ttggcgtagtatata

SEQ ID NO: 282121 - DNA, 15 bp, Homo sapiens
tttggcgtagtatat

SEQ ID NO: 282122 - DNA, 15 bp, Homo sapiens
ctttggcgtagtata

SEQ ID NO: 282123 - DNA, 15 bp, Homo sapiens
cctttggcgtagtat

SEQ ID NO: 282124 - DNA, 15 bp, Homo sapiens
gcctttggcgtagta

SEQ ID NO: 282125 - DNA, 15 bp, Homo sapiens
agcctttggcgtagt

SEQ ID NO: 282126 - DNA, 15 bp, Homo sapiens
aagcctttggcgtag

SEQ ID NO: 282127 - DNA, 15 bp, Homo sapiens
aaagcctttggcgta

SEQ ID NO: 282128 - DNA, 15 bp, Homo sapiens
taaagcctttggcgt

SEQ ID NO: 282129 - DNA, 15 bp, Homo sapiens
ataaagcctttggcg

SEQ ID NO: 282130 - DNA, 15 bp, Homo sapiens
tataaagcctttggc

SEQ ID NO: 282131 - DNA, 15 bp, Homo sapiens
ttataaagcctttgg

SEQ ID NO: 282132 - DNA, 15 bp, Homo sapiens
tttataaagcctttg

SEQ ID NO: 282133 - DNA, 15 bp, Homo sapiens
atttataaagccttt

SEQ ID NO: 282134 - DNA, 15 bp, Homo sapiens
tatttataaagcctt

SEQ ID NO: 282135 - DNA, 15 bp, Homo sapiens
atatttataaagcct

SEQ ID NO: 282136 - DNA, 15 bp, Homo sapiens
tatatttataaagcc

SEQ ID NO: 282137 - DNA, 15 bp, Homo sapiens
ttatatttataaagc

SEQ ID NO: 282138 - DNA, 15 bp, Homo sapiens
attatatttataaag

SEQ ID NO: 282139 - DNA, 15 bp, Homo sapiens
aattatatttataaa

SEQ ID NO: 282140 - DNA, 15 bp, Homo sapiens
aaattatatttataa

SEQ ID NO: 282141 - DNA, 15 bp, Homo sapiens
gaaattatatttata

SEQ ID NO: 282142 - DNA, 15 bp, Homo sapiens
tgaaattatatttat

SEQ ID NO: 282143 - DNA, 15 bp, Homo sapiens
atgaaattatattta

SEQ ID NO: 282144 - DNA, 15 bp, Homo sapiens
aatgaaattatattt

SEQ ID NO: 282145 - DNA, 15 bp, Homo sapiens
aaatgaaattatatt

SEQ ID NO: 282146 - DNA, 15 bp, Homo sapiens
taaatgaaattatat

SEQ ID NO: 282147 - DNA, 15 bp, Homo sapiens
ttaaatgaaattata

SEQ ID NO: 282148 - DNA, 15 bp, Homo sapiens
attaaatgaaattat

SEQ ID NO: 282149 - DNA, 15 bp, Homo sapiens
aattaaatgaaatta

SEQ ID NO: 282150 - DNA, 15 bp, Homo sapiens
caattaaatgaaatt

SEQ ID NO: 282151 - DNA, 15 bp, Homo sapiens
acaattaaatgaaat

SEQ ID NO: 282152 - DNA, 15 bp, Homo sapiens
aacaattaaatgaaa

SEQ ID NO: 282153 - DNA, 15 bp, Homo sapiens
taacaattaaatgaa

SEQ ID NO: 282154 - DNA, 15 bp, Homo sapiens
gtaacaattaaatga

SEQ ID NO: 282155 - DNA, 15 bp, Homo sapiens
tgtaacaattaaatg

SEQ ID NO: 282156 - DNA, 15 bp, Homo sapiens
ttgtaacaattaaat

SEQ ID NO: 282157 - DNA, 15 bp, Homo sapiens
tttgtaacaattaaa

SEQ ID NO: 282158 - DNA, 15 bp, Homo sapiens
ttttgtaacaattaa

SEQ ID NO: 282159 - DNA, 15 bp, Homo sapiens
attttgtaacaatta

SEQ ID NO: 282160 - DNA, 15 bp, Homo sapiens
cattttgtaacaatt

SEQ ID NO: 282161 - DNA, 15 bp, Homo sapiens
ccattttgtaacaat

SEQ ID NO: 282162 - DNA, 15 bp, Homo sapiens
cccattttgtaacaa

SEQ ID NO: 282163 - DNA, 15 bp, Homo sapiens
ccccattttgtaaca

SEQ ID NO: 282164 - DNA, 15 bp, Homo sapiens
accccattttgtaac

SEQ ID NO: 282165 - DNA, 15 bp, Homo sapiens
taccccattttgtaa

SEQ ID NO: 282166 - DNA, 15 bp, Homo sapiens
gtaccccattttgta

SEQ ID NO: 282167 - DNA, 15 bp, Homo sapiens
tgtaccccattttgt

SEQ ID NO: 282168 - DNA, 15 bp, Homo sapiens
atgtaccccattttg

SEQ ID NO: 282169 - DNA, 15 bp, Homo sapiens
tatgtaccccatttt

SEQ ID NO: 282170 - DNA, 15 bp, Homo sapiens
atatgtaccccattt

SEQ ID NO: 282171 - DNA, 15 bp, Homo sapiens
aatatgtaccccatt

SEQ ID NO: 282172 - DNA, 15 bp, Homo sapiens
gaatatgtaccccat

SEQ ID NO: 282173 - DNA, 15 bp, Homo sapiens
agaatatgtacccca

SEQ ID NO: 282174 - DNA, 15 bp, Homo sapiens
aagaatatgtacccc

SEQ ID NO: 282175 - DNA, 15 bp, Homo sapiens
taagaatatgtaccc

SEQ ID NO: 282176 - DNA, 15 bp, Homo sapiens
ataagaatatgtacc

SEQ ID NO: 282177 - DNA, 15 bp, Homo sapiens
aataagaatatgtac

SEQ ID NO: 282178 - DNA, 15 bp, Homo sapiens
aaataagaatatgta

SEQ ID NO: 282179 - DNA, 15 bp, Homo sapiens
aaaataagaatatgt

SEQ ID NO: 282180 - DNA, 15 bp, Homo sapiens
caaaataagaatatg

SEQ ID NO: 282181 - DNA, 15 bp, Homo sapiens
tcaaaataagaatat

SEQ ID NO: 282182 - DNA, 15 bp, Homo sapiens
atcaaaataagaata

SEQ ID NO: 282183 - DNA, 15 bp, Homo sapiens
aatcaaaataagaat

SEQ ID NO: 282184 - DNA, 15 bp, Homo sapiens
aaatcaaaataagaa

SEQ ID NO: 282185 - DNA, 15 bp, Homo sapiens
aaaatcaaaataaga

SEQ ID NO: 282186 - DNA, 15 bp, Homo sapiens
taaaatcaaaataag

SEQ ID NO: 282187 - DNA, 15 bp, Homo sapiens
gtaaaatcaaaataa

SEQ ID NO: 282188 - DNA, 15 bp, Homo sapiens
tgtaaaatcaaaata

SEQ ID NO: 282189 - DNA, 15 bp, Homo sapiens
ttgtaaaatcaaaat

SEQ ID NO: 282190 - DNA, 15 bp, Homo sapiens
tttgtaaaatcaaaa

SEQ ID NO: 282191 - DNA, 15 bp, Homo sapiens
ctttgtaaaatcaaa

SEQ ID NO: 282192 - DNA, 15 bp, Homo sapiens
tctttgtaaaatcaa

SEQ ID NO: 282193 - DNA, 15 bp, Homo sapiens
gtctttgtaaaatca

SEQ ID NO: 282194 - DNA, 15 bp, Homo sapiens
tgtctttgtaaaatc

SEQ ID NO: 282195 - DNA, 15 bp, Homo sapiens
ctgtctttgtaaaat

SEQ ID NO: 282196 - DNA, 15 bp, Homo sapiens
actgtctttgtaaaa

SEQ ID NO: 282197 - DNA, 15 bp, Homo sapiens
aactgtctttgtaaa

SEQ ID NO: 282198 - DNA, 15 bp, Homo sapiens
taactgtctttgtaa

SEQ ID NO: 282199 - DNA, 15 bp, Homo sapiens
ttaactgtctttgta

SEQ ID NO: 282200 - DNA, 15 bp, Homo sapiens
cttaactgtctttgt

SEQ ID NO: 282201 - DNA, 15 bp, Homo sapiens
ccttaactgtctttg

SEQ ID NO: 282202 - DNA, 15 bp, Homo sapiens
tccttaactgtcttt

SEQ ID NO: 282203 - DNA, 15 bp, Homo sapiens
ttccttaactgtctt

SEQ ID NO: 282204 - DNA, 15 bp, Homo sapiens
gttccttaactgtct

SEQ ID NO: 282205 - DNA, 15 bp, Homo sapiens
agttccttaactgtc

SEQ ID NO: 282206 - DNA, 15 bp, Homo sapiens
cagttccttaactgt

SEQ ID NO: 282207 - DNA, 15 bp, Homo sapiens
tcagttccttaactg

SEQ ID NO: 282208 - DNA, 15 bp, Homo sapiens
ttcagttccttaact

SEQ ID NO: 282209 - DNA, 15 bp, Homo sapiens
tttcagttccttaac

SEQ ID NO: 282210 - DNA, 15 bp, Homo sapiens
gtttcagttccttaa

SEQ ID NO: 282211 - DNA, 15 bp, Homo sapiens
tgtttcagttcctta

SEQ ID NO: 282212 - DNA, 15 bp, Homo sapiens
atgtttcagttcctt

SEQ ID NO: 282213 - DNA, 15 bp, Homo sapiens
tcatgtttcagttcc

SEQ ID NO: 282214 - DNA, 15 bp, Homo sapiens
ttcatgtttcagttc

SEQ ID NO: 282215 - DNA, 15 bp, Homo sapiens
tttcatgtttcagtt

SEQ ID NO: 282216 - DNA, 15 bp, Homo sapiens
atttcatgtttcagt

SEQ ID NO: 282217 - DNA, 15 bp, Homo sapiens
tatttcatgtttcag

SEQ ID NO: 282218 - DNA, 15 bp, Homo sapiens
gtatttcatgtttca

SEQ ID NO: 282219 - DNA, 15 bp, Homo sapiens
tgtatttcatgtttc

SEQ ID NO: 282220 - DNA, 15 bp, Homo sapiens
ttgtatttcatgttt

SEQ ID NO: 282221 - DNA, 15 bp, Homo sapiens
cttgtatttcatgtt

SEQ ID NO: 282222 - DNA, 15 bp, Homo sapiens
ccttgtatttcatgt

SEQ ID NO: 282223 - DNA, 15 bp, Homo sapiens
accttgtatttcatg

SEQ ID NO: 282224 - DNA, 15 bp, Homo sapiens
aaccttgtatttcat

SEQ ID NO: 282225 - DNA, 15 bp, Homo sapiens
taaccttgtatttca

SEQ ID NO: 282226 - DNA, 15 bp, Homo sapiens
ttaaccttgtatttc

SEQ ID NO: 282227 - DNA, 15 bp, Homo sapiens
tttaaccttgtattt

SEQ ID NO: 282228 - DNA, 15 bp, Homo sapiens
ttttaaccttgtatt

SEQ ID NO: 282229 - DNA, 15 bp, Homo sapiens
tttttaaccttgtat

SEQ ID NO: 282230 - DNA, 15 bp, Homo sapiens
atttttaaccttgta

SEQ ID NO: 282231 - DNA, 15 bp, Homo sapiens
tatttttaaccttgt

SEQ ID NO: 282232 - DNA, 15 bp, Homo sapiens
ttatttttaaccttg

SEQ ID NO: 282233 - DNA, 15 bp, Homo sapiens
attatttttaacctt

SEQ ID NO: 282234 - DNA, 15 bp, Homo sapiens
aattatttttaacct

SEQ ID NO: 282235 - DNA, 15 bp, Homo sapiens
caattatttttaacc

SEQ ID NO: 282236 - DNA, 15 bp, Homo sapiens
tcaattatttttaac

SEQ ID NO: 282237 - DNA, 15 bp, Homo sapiens
ttcaattatttttaa

SEQ ID NO: 282238 - DNA, 15 bp, Homo sapiens
attcaattattttta

SEQ ID NO: 282239 - DNA, 15 bp, Homo sapiens
tattcaattattttt

SEQ ID NO: 282240 - DNA, 15 bp, Homo sapiens
ttattcaattatttt

SEQ ID NO: 282241 - DNA, 15 bp, Homo sapiens
tttattcaattattt

SEQ ID NO: 282242 - DNA, 15 bp, Homo sapiens
atttattcaattatt

SEQ ID NO: 282243 - DNA, 15 bp, Homo sapiens
tatttattcaattat

SEQ ID NO: 282244 - DNA, 15 bp, Homo sapiens
ttatttattcaatta

SEQ ID NO: 282245 - DNA, 15 bp, Homo sapiens
tttatttattcaatt

SEQ ID NO: 282246 - DNA, 15 bp, Homo sapiens
atttatttattcaat

SEQ ID NO: 282247 - DNA, 15 bp, Homo sapiens
aatttatttattcaa

SEQ ID NO: 282248 - DNA, 15 bp, Homo sapiens
caatttatttattca

SEQ ID NO: 282249 - DNA, 15 bp, Homo sapiens
tcaatttatttattc

SEQ ID NO: 282250 - DNA, 15 bp, Homo sapiens
atcaatttatttatt

SEQ ID NO: 282251 - DNA, 15 bp, Homo sapiens
tatcaatttatttat

SEQ ID NO: 282252 - DNA, 15 bp, Homo sapiens
ttatcaatttattta

SEQ ID NO: 282253 - DNA, 15 bp, Homo sapiens
tttatcaatttattt

SEQ ID NO: 282254 - DNA, 15 bp, Homo sapiens
ttttatcaatttatt

SEQ ID NO: 282255 - DNA, 15 bp, Homo sapiens
cttttatcaatttat

SEQ ID NO: 282256 - DNA, 15 bp, Homo sapiens
ccttttatcaattta

SEQ ID NO: 282257 - DNA, 15 bp, Homo sapiens
tccttttatcaattt

SEQ ID NO: 282258 - DNA, 15 bp, Homo sapiens
ttccttttatcaatt

SEQ ID NO: 282259 - DNA, 15 bp, Homo sapiens
attccttttatcaat

SEQ ID NO: 282260 - DNA, 15 bp, Homo sapiens
cattccttttatcaa

SEQ ID NO: 282261 - DNA, 15 bp, Homo sapiens
tcattccttttatca

SEQ ID NO: 282262 - DNA, 15 bp, Homo sapiens
ttcattccttttatc

SEQ ID NO: 282263 - DNA, 15 bp, Homo sapiens
attcattccttttat

SEQ ID NO: 282264 - DNA, 15 bp, Homo sapiens
cattcattcctttta

SEQ ID NO: 282265 - DNA, 15 bp, Homo sapiens
tcattcattcctttt

SEQ ID NO: 282266 - DNA, 15 bp, Homo sapiens
ttcattcattccttt

SEQ ID NO: 282267 - DNA, 15 bp, Homo sapiens
attcattcattcctt

SEQ ID NO: 282268 - DNA, 15 bp, Homo sapiens
tattcattcattcct

SEQ ID NO: 282269 - DNA, 15 bp, Homo sapiens
ctattcattcattcc

SEQ ID NO: 282270 - DNA, 15 bp, Homo sapiens
tctattcattcattc

SEQ ID NO: 282271 - DNA, 15 bp, Homo sapiens
ctctattcattcatt

SEQ ID NO: 282272 - DNA, 15 bp, Homo sapiens
gctctattcattcat

SEQ ID NO: 282273 - DNA, 15 bp, Homo sapiens
tgctctattcattca

SEQ ID NO: 282274 - DNA, 15 bp, Homo sapiens
ttgctctattcattc

SEQ ID NO: 282275 - DNA, 15 bp, Homo sapiens
cttgctctattcatt

SEQ ID NO: 282276 - DNA, 15 bp, Homo sapiens
ccttgctctattcat

SEQ ID NO: 282277 - DNA, 15 bp, Homo sapiens
tccttgctctattca

SEQ ID NO: 282278 - DNA, 15 bp, Homo sapiens
ttccttgctctattc

SEQ ID NO: 282279 - DNA, 15 bp, Homo sapiens
tttccttgctctatt

SEQ ID NO: 282280 - DNA, 15 bp, Homo sapiens
ctttccttgctctat

SEQ ID NO: 282281 - DNA, 15 bp, Homo sapiens
tctttccttgctcta

SEQ ID NO: 282282 - DNA, 15 bp, Homo sapiens
ttctttccttgctct

SEQ ID NO: 282283 - DNA, 15 bp, Homo sapiens
attctttccttgctc

SEQ ID NO: 282284 - DNA, 15 bp, Homo sapiens
tattctttccttgct

SEQ ID NO: 282285 - DNA, 15 bp, Homo sapiens
ttattctttccttgc

SEQ ID NO: 282286 - DNA, 15 bp, Homo sapiens
cttattctttccttg

SEQ ID NO: 282287 - DNA, 15 bp, Homo sapiens
gcttattctttcctt

SEQ ID NO: 282288 - DNA, 15 bp, Homo sapiens
cgcttattctttcct

SEQ ID NO: 282289 - DNA, 15 bp, Homo sapiens
tcgcttattctttcc

SEQ ID NO: 282290 - DNA, 15 bp, Homo sapiens
ttcgcttattctttc

SEQ ID NO: 282291 - DNA, 15 bp, Homo sapiens
attcgcttattcttt

SEQ ID NO: 282292 - DNA, 15 bp, Homo sapiens
tattcgcttattctt

SEQ ID NO: 282293 - DNA, 15 bp, Homo sapiens
ttattcgcttattct

SEQ ID NO: 282294 - DNA, 15 bp, Homo sapiens
cttattcgcttattc

SEQ ID NO: 282295 - DNA, 15 bp, Homo sapiens
tcttattcgcttatt

SEQ ID NO: 282296 - DNA, 15 bp, Homo sapiens
ttcttattcgcttat

SEQ ID NO: 282297 - DNA, 15 bp, Homo sapiens
gttcttattcgctta

SEQ ID NO: 282298 - DNA, 15 bp, Homo sapiens
cgttcttattcgctt

SEQ ID NO: 282299 - DNA, 15 bp, Homo sapiens
acgttcttattcgct

SEQ ID NO: 282300 - DNA, 15 bp, Homo sapiens
cacgttcttattcgc

SEQ ID NO: 282301 - DNA, 15 bp, Homo sapiens
ccacgttcttattcg

SEQ ID NO: 282302 - DNA, 15 bp, Homo sapiens
cccacgttcttattc

SEQ ID NO: 282303 - DNA, 15 bp, Homo sapiens
gcccacgttcttatt

SEQ ID NO: 282304 - DNA, 15 bp, Homo sapiens
agcccacgttcttat

SEQ ID NO: 282305 - DNA, 15 bp, Homo sapiens
aagcccacgttctta

SEQ ID NO: 282306 - DNA, 15 bp, Homo sapiens
caagcccacgttctt

SEQ ID NO: 282307 - DNA, 15 bp, Homo sapiens
acaagcccacgttct

SEQ ID NO: 282308 - DNA, 15 bp, Homo sapiens
aacaagcccacgttc

SEQ ID NO: 282309 - DNA, 15 bp, Homo sapiens
aaacaagcccacgtt

SEQ ID NO: 282310 - DNA, 15 bp, Homo sapiens
aaaacaagcccacgt

SEQ ID NO: 282311 - DNA, 15 bp, Homo sapiens
aaaaacaagcccacg

SEQ ID NO: 282312 - DNA, 15 bp, Homo sapiens
aaaaaacaagcccac

SEQ ID NO: 282313 - DNA, 15 bp, Homo sapiens
aaaaaaacaagccca

SEQ ID NO: 282314 - DNA, 15 bp, Homo sapiens
gaaaaaaacaagccc

SEQ ID NO: 282315 - DNA, 15 bp, Homo sapiens
tgaaaaaaacaagcc

SEQ ID NO: 282316 - DNA, 15 bp, Homo sapiens
ttgaaaaaaacaagc

SEQ ID NO: 282317 - DNA, 15 bp, Homo sapiens
tttgaaaaaaacaag

SEQ ID NO: 282318 - DNA, 15 bp, Homo sapiens
gtttgaaaaaaacaa

SEQ ID NO: 282319 - DNA, 15 bp, Homo sapiens
tgtttgaaaaaaaca

SEQ ID NO: 282320 - DNA, 15 bp, Homo sapiens
ttgtttgaaaaaaac

SEQ ID NO: 282321 - DNA, 15 bp, Homo sapiens
tttgtttgaaaaaaa

SEQ ID NO: 282322 - DNA, 15 bp, Homo sapiens
atttgtttgaaaaaa

SEQ ID NO: 282323 - DNA, 15 bp, Homo sapiens
aatttgtttgaaaaa

SEQ ID NO: 282324 - DNA, 15 bp, Homo sapiens
taatttgtttgaaaa

SEQ ID NO: 282325 - DNA, 15 bp, Homo sapiens
ataatttgtttgaaa

SEQ ID NO: 282326 - DNA, 15 bp, Homo sapiens
tataatttgtttgaa

SEQ ID NO: 282327 - DNA, 15 bp, Homo sapiens
atataatttgtttga

SEQ ID NO: 282328 - DNA, 15 bp, Homo sapiens
catataatttgtttg

SEQ ID NO: 282329 - DNA, 15 bp, Homo sapiens
acatataatttgttt

SEQ ID NO: 282330 - DNA, 15 bp, Homo sapiens
aacatataatttgtt

SEQ ID NO: 282331 - DNA, 15 bp, Homo sapiens
taacatataatttgt

SEQ ID NO: 282332 - DNA, 15 bp, Homo sapiens
ataacatataatttg

SEQ ID NO: 282333 - DNA, 15 bp, Homo sapiens
cataacatataattt

SEQ ID NO: 282334 - DNA, 15 bp, Homo sapiens
ccataacatataatt

SEQ ID NO: 282335 - DNA, 15 bp, Homo sapiens
tccataacatataat

SEQ ID NO: 282336 - DNA, 15 bp, Homo sapiens
gtccataacatataa

SEQ ID NO: 282337 - DNA, 15 bp, Homo sapiens
agtccataacatata

SEQ ID NO: 282338 - DNA, 15 bp, Homo sapiens
gagtccataacatat

SEQ ID NO: 282339 - DNA, 15 bp, Homo sapiens
agagtccataacata

SEQ ID NO: 282340 - DNA, 15 bp, Homo sapiens
tagagtccataacat

SEQ ID NO: 282341 - DNA, 15 bp, Homo sapiens
ctagagtccataaca

SEQ ID NO: 282342 - DNA, 15 bp, Homo sapiens
tctagagtccataac

SEQ ID NO: 282343 - DNA, 15 bp, Homo sapiens
atctagagtccataa

SEQ ID NO: 282344 - DNA, 15 bp, Homo sapiens
gatctagagtccata

SEQ ID NO: 282345 - DNA, 15 bp, Homo sapiens
agatctagagtccat

SEQ ID NO: 282346 - DNA, 15 bp, Homo sapiens
gagatctagagtcca

SEQ ID NO: 282347 - DNA, 15 bp, Homo sapiens
agagatctagagtcc

SEQ ID NO: 282348 - DNA, 15 bp, Homo sapiens
aagagatctagagtc

SEQ ID NO: 282349 - DNA, 15 bp, Homo sapiens
taagagatctagagt

SEQ ID NO: 282350 - DNA, 15 bp, Homo sapiens
ttaagagatctagag

SEQ ID NO: 282351 - DNA, 15 bp, Homo sapiens
gttaagagatctaga

SEQ ID NO: 282352 - DNA, 15 bp, Homo sapiens
agttaagagatctag

SEQ ID NO: 282353 - DNA, 15 bp, Homo sapiens
aagttaagagatcta

SEQ ID NO: 282354 - DNA, 15 bp, Homo sapiens
taagttaagagatct

SEQ ID NO: 282355 - DNA, 15 bp, Homo sapiens
ctaagttaagagatc

SEQ ID NO: 282356 - DNA, 15 bp, Homo sapiens
gctaagttaagagat

SEQ ID NO: 282357 - DNA, 15 bp, Homo sapiens
agctaagttaagaga

SEQ ID NO: 282358 - DNA, 15 bp, Homo sapiens
aagctaagttaagag

SEQ ID NO: 282359 - DNA, 15 bp, Homo sapiens
gaagctaagttaaga

SEQ ID NO: 282360 - DNA, 15 bp, Homo sapiens
tgaagctaagttaag

SEQ ID NO: 282361 - DNA, 15 bp, Homo sapiens
ctgaagctaagttaa

SEQ ID NO: 282362 - DNA, 15 bp, Homo sapiens
actgaagctaagtta

SEQ ID NO: 282363 - DNA, 15 bp, Homo sapiens
cactgaagctaagtt

SEQ ID NO: 282364 - DNA, 15 bp, Homo sapiens
tcactgaagctaagt

SEQ ID NO: 282365 - DNA, 15 bp, Homo sapiens
gtcactgaagctaag

SEQ ID NO: 282366 - DNA, 15 bp, Homo sapiens
tgtcactgaagctaa

SEQ ID NO: 282367 - DNA, 15 bp, Homo sapiens
atgtcactgaagcta

SEQ ID NO: 282368 - DNA, 15 bp, Homo sapiens
aatgtcactgaagct

SEQ ID NO: 282369 - DNA, 15 bp, Homo sapiens
caatgtcactgaagc

SEQ ID NO: 282370 - DNA, 15 bp, Homo sapiens
ccaatgtcactgaag

SEQ ID NO: 282371 - DNA, 15 bp, Homo sapiens
tccaatgtcactgaa

SEQ ID NO: 282372 - DNA, 15 bp, Homo sapiens
atccaatgtcactga

SEQ ID NO: 282373 - DNA, 15 bp, Homo sapiens
aatccaatgtcactg

SEQ ID NO: 282374 - DNA, 15 bp, Homo sapiens
taatccaatgtcact

SEQ ID NO: 282375 - DNA, 15 bp, Homo sapiens
ataatccaatgtcac

SEQ ID NO: 282376 - DNA, 15 bp, Homo sapiens
aataatccaatgtca

SEQ ID NO: 282377 - DNA, 15 bp, Homo sapiens
caataatccaatgtc

SEQ ID NO: 282378 - DNA, 15 bp, Homo sapiens
tcaataatccaatgt

SEQ ID NO: 282379 - DNA, 15 bp, Homo sapiens
ttcaataatccaatg

SEQ ID NO: 282380 - DNA, 15 bp, Homo sapiens
tttcaataatccaat

SEQ ID NO: 282381 - DNA, 15 bp, Homo sapiens
ttttcaataatccaa

SEQ ID NO: 282382 - DNA, 15 bp, Homo sapiens
tttttcaataatcca

SEQ ID NO: 282383 - DNA, 15 bp, Homo sapiens
atttttcaataatcc

SEQ ID NO: 282384 - DNA, 15 bp, Homo sapiens
catttttcaataatc

SEQ ID NO: 282385 - DNA, 15 bp, Homo sapiens
tcatttttcaataat

SEQ ID NO: 282386 - DNA, 15 bp, Homo sapiens
ttcatttttcaataa

SEQ ID NO: 282387 - DNA, 15 bp, Homo sapiens
tttcatttttcaata

SEQ ID NO: 282388 - DNA, 15 bp, Homo sapiens
gtttcatttttcaat

SEQ ID NO: 282389 - DNA, 15 bp, Homo sapiens
agtttcatttttcaa

SEQ ID NO: 282390 - DNA, 15 bp, Homo sapiens
tagtttcatttttca

SEQ ID NO: 282391 - DNA, 15 bp, Homo sapiens
atagtttcatttttc

SEQ ID NO: 282392 - DNA, 15 bp, Homo sapiens
aatagtttcattttt

SEQ ID NO: 282393 - DNA, 15 bp, Homo sapiens
aaatagtttcatttt

SEQ ID NO: 282394 - DNA, 15 bp, Homo sapiens
aaaatagtttcattt

SEQ ID NO: 282395 - DNA, 15 bp, Homo sapiens
caaaatagtttcatt

SEQ ID NO: 282396 - DNA, 15 bp, Homo sapiens
tcaaaatagtttcat

SEQ ID NO: 282397 - DNA, 15 bp, Homo sapiens
ctcaaaatagtttca

SEQ ID NO: 282398 - DNA, 15 bp, Homo sapiens
cctcaaaatagtttc

SEQ ID NO: 282399 - DNA, 15 bp, Homo sapiens
tcctcaaaatagttt

SEQ ID NO: 282400 - DNA, 15 bp, Homo sapiens
ttcctcaaaatagtt

SEQ ID NO: 282401 - DNA, 15 bp, Homo sapiens
attcctcaaaatagt

SEQ ID NO: 282402 - DNA, 15 bp, Homo sapiens
aattcctcaaaatag

SEQ ID NO: 282403 - DNA, 15 bp, Homo sapiens
caattcctcaaaata

SEQ ID NO: 282404 - DNA, 15 bp, Homo sapiens
tcaattcctcaaaat

SEQ ID NO: 282405 - DNA, 15 bp, Homo sapiens
gtcaattcctcaaaa

SEQ ID NO: 282406 - DNA, 15 bp, Homo sapiens
agtcaattcctcaaa

SEQ ID NO: 282407 - DNA, 15 bp, Homo sapiens
cagtcaattcctcaa

SEQ ID NO: 282408 - DNA, 15 bp, Homo sapiens
tcagtcaattcctca

SEQ ID NO: 282409 - DNA, 15 bp, Homo sapiens
gtcagtcaattcctc

SEQ ID NO: 282410 - DNA, 15 bp, Homo sapiens
ggtcagtcaattcct

SEQ ID NO: 282411 - DNA, 15 bp, Homo sapiens
gggtcagtcaattcc

SEQ ID NO: 282412 - DNA, 15 bp, Homo sapiens
ggggtcagtcaattc

SEQ ID NO: 282413 - DNA, 15 bp, Homo sapiens
aggggtcagtcaatt

SEQ ID NO: 282414 - DNA, 15 bp, Homo sapiens
taggggtcagtcaat

SEQ ID NO: 282415 - DNA, 15 bp, Homo sapiens
ttaggggtcagtcaa

SEQ ID NO: 282416 - DNA, 15 bp, Homo sapiens
tttaggggtcagtca

SEQ ID NO: 282417 - DNA, 15 bp, Homo sapiens
ctttaggggtcagtc

SEQ ID NO: 282418 - DNA, 15 bp, Homo sapiens
actttaggggtcagt

SEQ ID NO: 282419 - DNA, 15 bp, Homo sapiens
aactttaggggtcag

SEQ ID NO: 282420 - DNA, 15 bp, Homo sapiens
aaactttaggggtca

SEQ ID NO: 282421 - DNA, 15 bp, Homo sapiens
gaaactttaggggtc

SEQ ID NO: 282422 - DNA, 15 bp, Homo sapiens
ggaaactttaggggt

SEQ ID NO: 282423 - DNA, 15 bp, Homo sapiens
tggaaactttagggg

SEQ ID NO: 282424 - DNA, 15 bp, Homo sapiens
gtggaaactttaggg

SEQ ID NO: 282425 - DNA, 15 bp, Homo sapiens
tgtggaaactttagg

SEQ ID NO: 282426 - DNA, 15 bp, Homo sapiens
ttgtggaaactttag

SEQ ID NO: 282427 - DNA, 15 bp, Homo sapiens
attgtggaaacttta

SEQ ID NO: 282428 - DNA, 15 bp, Homo sapiens
tattgtggaaacttt

SEQ ID NO: 282429 - DNA, 15 bp, Homo sapiens
ttattgtggaaactt

SEQ ID NO: 282430 - DNA, 15 bp, Homo sapiens
gttattgtggaaact

SEQ ID NO: 282431 - DNA, 15 bp, Homo sapiens
agttattgtggaaac

SEQ ID NO: 282432 - DNA, 15 bp, Homo sapiens
aagttattgtggaaa

SEQ ID NO: 282433 - DNA, 15 bp, Homo sapiens
taagttattgtggaa

SEQ ID NO: 282434 - DNA, 15 bp, Homo sapiens
ataagttattgtgga

SEQ ID NO: 282435 - DNA, 15 bp, Homo sapiens
aataagttattgtgg

SEQ ID NO: 282436 - DNA, 15 bp, Homo sapiens
aaataagttattgtg

SEQ ID NO: 282437 - DNA, 15 bp, Homo sapiens
taaataagttattgt

SEQ ID NO: 282438 - DNA, 15 bp, Homo sapiens
ttaaataagttattg

SEQ ID NO: 282439 - DNA, 15 bp, Homo sapiens
attaaataagttatt

SEQ ID NO: 282440 - DNA, 15 bp, Homo sapiens
aattaaataagttat

SEQ ID NO: 282441 - DNA, 15 bp, Homo sapiens
aaattaaataagtta

SEQ ID NO: 282442 - DNA, 15 bp, Homo sapiens
aaaattaaataagtt

SEQ ID NO: 282443 - DNA, 15 bp, Homo sapiens
aaaaattaaataagt

SEQ ID NO: 282444 - DNA, 15 bp, Homo sapiens
aaaaaattaaataag

SEQ ID NO: 282445 - DNA, 15 bp, Homo sapiens
taaaaaattaaataa

SEQ ID NO: 282446 - DNA, 15 bp, Homo sapiens
ataaaaaattaaata

SEQ ID NO: 282447 - DNA, 15 bp, Homo sapiens
gataaaaaattaaat

SEQ ID NO: 282448 - DNA, 15 bp, Homo sapiens
agataaaaaattaaa

SEQ ID NO: 282449 - DNA, 15 bp, Homo sapiens
aagataaaaaattaa

SEQ ID NO: 282450 - DNA, 15 bp, Homo sapiens
aaagataaaaaatta

SEQ ID NO: 282451 - DNA, 15 bp, Homo sapiens
gaaagataaaaaatt

SEQ ID NO: 282452 - DNA, 15 bp, Homo sapiens
agaaagataaaaaat

SEQ ID NO: 282453 - DNA, 15 bp, Homo sapiens
tagaaagataaaaaa

SEQ ID NO: 282454 - DNA, 15 bp, Homo sapiens
ttagaaagataaaaa

SEQ ID NO: 282455 - DNA, 15 bp, Homo sapiens
attagaaagataaaa

SEQ ID NO: 282456 - DNA, 15 bp, Homo sapiens
tattagaaagataaa

SEQ ID NO: 282457 - DNA, 15 bp, Homo sapiens
gtattagaaagataa

SEQ ID NO: 282458 - DNA, 15 bp, Homo sapiens
agtattagaaagata

SEQ ID NO: 282459 - DNA, 15 bp, Homo sapiens
aagtattagaaagat

SEQ ID NO: 282460 - DNA, 15 bp, Homo sapiens
aaagtattagaaaga

SEQ ID NO: 282461 - DNA, 15 bp, Homo sapiens
aaaagtattagaaag

SEQ ID NO: 282462 - DNA, 15 bp, Homo sapiens
aaaaagtattagaaa

SEQ ID NO: 282463 - DNA, 15 bp, Homo sapiens
aaaaaagtattagaa

SEQ ID NO: 282464 - DNA, 15 bp, Homo sapiens
caaaaaagtattaga

SEQ ID NO: 282465 - DNA, 15 bp, Homo sapiens
gcaaaaaagtattag

SEQ ID NO: 282466 - DNA, 15 bp, Homo sapiens
ggcaaaaaagtatta

SEQ ID NO: 282467 - DNA, 15 bp, Homo sapiens
aggcaaaaaagtatt

SEQ ID NO: 282468 - DNA, 15 bp, Homo sapiens
aaggcaaaaaagtat

SEQ ID NO: 282469 - DNA, 15 bp, Homo sapiens
taaggcaaaaaagta

SEQ ID NO: 282470 - DNA, 15 bp, Homo sapiens
ataaggcaaaaaagt

SEQ ID NO: 282471 - DNA, 15 bp, Homo sapiens
tataaggcaaaaaag

SEQ ID NO: 282472 - DNA, 15 bp, Homo sapiens
ttataaggcaaaaaa

SEQ ID NO: 282473 - DNA, 15 bp, Homo sapiens
attataaggcaaaaa

SEQ ID NO: 282474 - DNA, 15 bp, Homo sapiens
tattataaggcaaaa

SEQ ID NO: 282475 - DNA, 15 bp, Homo sapiens
atattataaggcaaa

SEQ ID NO: 282476 - DNA, 15 bp, Homo sapiens
tatattataaggcaa

SEQ ID NO: 282477 - DNA, 15 bp, Homo sapiens
ttatattataaggca

SEQ ID NO: 282478 - DNA, 15 bp, Homo sapiens
tttatattataaggc

SEQ ID NO: 282479 - DNA, 15 bp, Homo sapiens
ttttatattataagg

SEQ ID NO: 282480 - DNA, 15 bp, Homo sapiens
attttatattataag

SEQ ID NO: 282481 - DNA, 15 bp, Homo sapiens
aattttatattataa

SEQ ID NO: 282482 - DNA, 15 bp, Homo sapiens
aaattttatattata

SEQ ID NO: 282483 - DNA, 15 bp, Homo sapiens
caaattttatattat

SEQ ID NO: 282484 - DNA, 15 bp, Homo sapiens
tcaaattttatatta

SEQ ID NO: 282485 - DNA, 15 bp, Homo sapiens
ttcaaattttatatt

SEQ ID NO: 282486 - DNA, 15 bp, Homo sapiens
attcaaattttatat

SEQ ID NO: 282487 - DNA, 15 bp, Homo sapiens
cattcaaattttata

SEQ ID NO: 282488 - DNA, 15 bp, Homo sapiens
acattcaaattttat

SEQ ID NO: 282489 - DNA, 15 bp, Homo sapiens
aacattcaaatttta

SEQ ID NO: 282490 - DNA, 15 bp, Homo sapiens
aaacattcaaatttt

SEQ ID NO: 282491 - DNA, 15 bp, Homo sapiens
caaacattcaaattt

SEQ ID NO: 282492 - DNA, 15 bp, Homo sapiens
acaaacattcaaatt

SEQ ID NO: 282493 - DNA, 15 bp, Homo sapiens
aacaaacattcaaat

SEQ ID NO: 282494 - DNA, 15 bp, Homo sapiens
taacaaacattcaaa

SEQ ID NO: 282495 - DNA, 15 bp, Homo sapiens
ataacaaacattcaa

SEQ ID NO: 282496 - DNA, 15 bp, Homo sapiens
aataacaaacattca

SEQ ID NO: 282497 - DNA, 15 bp, Homo sapiens
taataacaaacattc

SEQ ID NO: 282498 - DNA, 15 bp, Homo sapiens
ctaataacaaacatt

SEQ ID NO: 282499 - DNA, 15 bp, Homo sapiens
actaataacaaacat

SEQ ID NO: 282500 - DNA, 15 bp, Homo sapiens
cactaataacaaaca

SEQ ID NO: 282501 - DNA, 15 bp, Homo sapiens
acactaataacaaac

SEQ ID NO: 282502 - DNA, 15 bp, Homo sapiens
cacactaataacaaa

SEQ ID NO: 282503 - DNA, 15 bp, Homo sapiens
tcacactaataacaa

SEQ ID NO: 282504 - DNA, 15 bp, Homo sapiens
ttcacactaataaca

SEQ ID NO: 282505 - DNA, 15 bp, Homo sapiens
tttcacactaataac

SEQ ID NO: 282506 - DNA, 15 bp, Homo sapiens
atttcacactaataa

SEQ ID NO: 282507 - DNA, 15 bp, Homo sapiens
catttcacactaata

SEQ ID NO: 282508 - DNA, 15 bp, Homo sapiens
tcatttcacactaat

SEQ ID NO: 282509 - DNA, 15 bp, Homo sapiens
ttcatttcacactaa

SEQ ID NO: 282510 - DNA, 15 bp, Homo sapiens
tttcatttcacacta

SEQ ID NO: 282511 - DNA, 15 bp, Homo sapiens
atttcatttcacact

SEQ ID NO: 282512 - DNA, 15 bp, Homo sapiens
gatttcatttcacac

SEQ ID NO: 282513 - DNA, 15 bp, Homo sapiens
ggatttcatttcaca

SEQ ID NO: 282514 - DNA, 15 bp, Homo sapiens
aggatttcatttcac

SEQ ID NO: 282515 - DNA, 15 bp, Homo sapiens
aaggatttcatttca

SEQ ID NO: 282516 - DNA, 15 bp, Homo sapiens
aaaggatttcatttc

SEQ ID NO: 282517 - DNA, 15 bp, Homo sapiens
gaaaggatttcattt

SEQ ID NO: 282518 - DNA, 15 bp, Homo sapiens
tgaaaggatttcatt

SEQ ID NO: 282519 - DNA, 15 bp, Homo sapiens
ttgaaaggatttcat

SEQ ID NO: 282520 - DNA, 15 bp, Homo sapiens
tttgaaaggatttca

SEQ ID NO: 282521 - DNA, 15 bp, Homo sapiens
atttgaaaggatttc

SEQ ID NO: 282522 - DNA, 15 bp, Homo sapiens
tatttgaaaggattt

SEQ ID NO: 282523 - DNA, 15 bp, Homo sapiens
atatttgaaaggatt

SEQ ID NO: 282524 - DNA, 15 bp, Homo sapiens
tatatttgaaaggat

SEQ ID NO: 282525 - DNA, 15 bp, Homo sapiens
atatatttgaaagga

SEQ ID NO: 282526 - DNA, 15 bp, Homo sapiens
catatatttgaaagg

SEQ ID NO: 282527 - DNA, 15 bp, Homo sapiens
gcatatatttgaaag

SEQ ID NO: 282528 - DNA, 15 bp, Homo sapiens
ggcatatatttgaaa

SEQ ID NO: 282529 - DNA, 15 bp, Homo sapiens
tggcatatatttgaa

SEQ ID NO: 282530 - DNA, 15 bp, Homo sapiens
atggcatatatttga

SEQ ID NO: 282531 - DNA, 15 bp, Homo sapiens
gatggcatatatttg

SEQ ID NO: 282532 - DNA, 15 bp, Homo sapiens
tgatggcatatattt

SEQ ID NO: 282533 - DNA, 15 bp, Homo sapiens
ctgatggcatatatt

SEQ ID NO: 282534 - DNA, 15 bp, Homo sapiens
tctgatggcatatat

SEQ ID NO: 282535 - DNA, 15 bp, Homo sapiens
ttctgatggcatata

SEQ ID NO: 282536 - DNA, 15 bp, Homo sapiens
cttctgatggcatat

SEQ ID NO: 282537 - DNA, 15 bp, Homo sapiens
ccttctgatggcata

SEQ ID NO: 282538 - DNA, 15 bp, Homo sapiens
tccttctgatggcat

SEQ ID NO: 282539 - DNA, 15 bp, Homo sapiens
atccttctgatggca

SEQ ID NO: 282540 - DNA, 15 bp, Homo sapiens
catccttctgatggc

SEQ ID NO: 282541 - DNA, 15 bp, Homo sapiens
acatccttctgatgg

SEQ ID NO: 282542 - DNA, 15 bp, Homo sapiens
cacatccttctgatg

SEQ ID NO: 282543 - DNA, 15 bp, Homo sapiens
acacatccttctgat

SEQ ID NO: 282544 - DNA, 15 bp, Homo sapiens
aacacatccttctga

SEQ ID NO: 282545 - DNA, 15 bp, Homo sapiens
taacacatccttctg

SEQ ID NO: 282546 - DNA, 15 bp, Homo sapiens
gtaacacatccttct

SEQ ID NO: 282547 - DNA, 15 bp, Homo sapiens
tgtaacacatccttc

SEQ ID NO: 282548 - DNA, 15 bp, Homo sapiens
ttgtaacacatcctt

SEQ ID NO: 282549 - DNA, 15 bp, Homo sapiens
tttgtaacacatcct

SEQ ID NO: 282550 - DNA, 15 bp, Homo sapiens
atttgtaacacatcc

SEQ ID NO: 282551 - DNA, 15 bp, Homo sapiens
tatttgtaacacatc

SEQ ID NO: 282552 - DNA, 15 bp, Homo sapiens
atatttgtaacacat

SEQ ID NO: 282553 - DNA, 15 bp, Homo sapiens
tatatttgtaacaca

SEQ ID NO: 282554 - DNA, 15 bp, Homo sapiens
gtatatttgtaacac

SEQ ID NO: 282555 - DNA, 15 bp, Homo sapiens
tgtatatttgtaaca

SEQ ID NO: 282556 - DNA, 15 bp, Homo sapiens
ctgtatatttgtaac

SEQ ID NO: 282557 - DNA, 15 bp, Homo sapiens
actgtatatttgtaa

SEQ ID NO: 282558 - DNA, 15 bp, Homo sapiens
tactgtatatttgta

SEQ ID NO: 282559 - DNA, 15 bp, Homo sapiens
atactgtatatttgt

SEQ ID NO: 282560 - DNA, 15 bp, Homo sapiens
aatactgtatatttg

SEQ ID NO: 282561 - DNA, 15 bp, Homo sapiens
taatactgtatattt

SEQ ID NO: 282562 - DNA, 15 bp, Homo sapiens
gtaatactgtatatt

SEQ ID NO: 282563 - DNA, 15 bp, Homo sapiens
tgtaatactgtatat

SEQ ID NO: 282564 - DNA, 15 bp, Homo sapiens
ttgtaatactgtata

SEQ ID NO: 282565 - DNA, 15 bp, Homo sapiens
tttgtaatactgtat

SEQ ID NO: 282566 - DNA, 15 bp, Homo sapiens
gtttgtaatactgta

SEQ ID NO: 282567 - DNA, 15 bp, Homo sapiens
tgtttgtaatactgt

SEQ ID NO: 282568 - DNA, 15 bp, Homo sapiens
atgtttgtaatactg

SEQ ID NO: 282569 - DNA, 15 bp, Homo sapiens
aatgtttgtaatact

SEQ ID NO: 282570 - DNA, 15 bp, Homo sapiens
aaatgtttgtaatac

SEQ ID NO: 282571 - DNA, 15 bp, Homo sapiens
taaatgtttgtaata

SEQ ID NO: 282572 - DNA, 15 bp, Homo sapiens
ataaatgtttgtaat

SEQ ID NO: 282573 - DNA, 15 bp, Homo sapiens
aataaatgtttgtaa

SEQ ID NO: 282574 - DNA, 15 bp, Homo sapiens
aaataaatgtttgta

SEQ ID NO: 282575 - DNA, 15 bp, Homo sapiens
aaaataaatgtttgt

SEQ ID NO: 282576 - DNA, 15 bp, Homo sapiens
caaaataaatgtttg

SEQ ID NO: 282577 - DNA, 15 bp, Homo sapiens
acaaaataaatgttt

SEQ ID NO: 282578 - DNA, 15 bp, Homo sapiens
tacaaaataaatgtt

SEQ ID NO: 282579 - DNA, 15 bp, Homo sapiens
atacaaaataaatgt

SEQ ID NO: 282580 - DNA, 15 bp, Homo sapiens
catacaaaataaatg

SEQ ID NO: 282581 - DNA, 15 bp, Homo sapiens
gcatacaaaataaat

SEQ ID NO: 282582 - DNA, 15 bp, Homo sapiens
agcatacaaaataaa

SEQ ID NO: 282583 - DNA, 15 bp, Homo sapiens
cagcatacaaaataa

SEQ ID NO: 282584 - DNA, 15 bp, Homo sapiens
tcagcatacaaaata

SEQ ID NO: 282585 - DNA, 15 bp, Homo sapiens
ttcagcatacaaaat

SEQ ID NO: 282586 - DNA, 15 bp, Homo sapiens
attcagcatacaaaa

SEQ ID NO: 282587 - DNA, 15 bp, Homo sapiens
tattcagcatacaaa

SEQ ID NO: 282588 - DNA, 15 bp, Homo sapiens
ttattcagcatacaa

SEQ ID NO: 282589 - DNA, 15 bp, Homo sapiens
cttattcagcataca

SEQ ID NO: 282590 - DNA, 15 bp, Homo sapiens
tcttattcagcatac

SEQ ID NO: 282591 - DNA, 15 bp, Homo sapiens
ttcttattcagcata

SEQ ID NO: 282592 - DNA, 15 bp, Homo sapiens
tttcttattcagcat

SEQ ID NO: 282593 - DNA, 15 bp, Homo sapiens
ttttcttattcagca

SEQ ID NO: 282594 - DNA, 15 bp, Homo sapiens
tttttcttattcagc

SEQ ID NO: 282595 - DNA, 15 bp, Homo sapiens
ttttttcttattcag

SEQ ID NO: 282596 - DNA, 15 bp, Homo sapiens
attttttcttattca

SEQ ID NO: 282597 - DNA, 15 bp, Homo sapiens
gattttttcttattc

SEQ ID NO: 282598 - DNA, 15 bp, Homo sapiens
tgattttttcttatt

SEQ ID NO: 282599 - DNA, 15 bp, Homo sapiens
ctgattttttcttat

SEQ ID NO: 282600 - DNA, 15 bp, Homo sapiens
actgattttttctta

SEQ ID NO: 282601 - DNA, 15 bp, Homo sapiens
aactgattttttctt

SEQ ID NO: 282602 - DNA, 15 bp, Homo sapiens
taactgattttttct

SEQ ID NO: 282603 - DNA, 15 bp, Homo sapiens
ataactgattttttc

SEQ ID NO: 282604 - DNA, 15 bp, Homo sapiens
tataactgatttttt

SEQ ID NO: 282605 - DNA, 15 bp, Homo sapiens
ttataactgattttt

SEQ ID NO: 282606 - DNA, 15 bp, Homo sapiens
attataactgatttt

SEQ ID NO: 282607 - DNA, 15 bp, Homo sapiens
tattataactgattt

SEQ ID NO: 282608 - DNA, 15 bp, Homo sapiens
gtattataactgatt

SEQ ID NO: 282609 - DNA, 15 bp, Homo sapiens
tgtattataactgat

SEQ ID NO: 282610 - DNA, 15 bp, Homo sapiens
ctgtattataactga

SEQ ID NO: 282611 - DNA, 15 bp, Homo sapiens
actgtattataactg

SEQ ID NO: 282612 - DNA, 15 bp, Homo sapiens
aactgtattataact

SEQ ID NO: 282613 - DNA, 15 bp, Homo sapiens
aaactgtattataac

SEQ ID NO: 282614 - DNA, 15 bp, Homo sapiens
aaaactgtattataa

SEQ ID NO: 282615 - DNA, 15 bp, Homo sapiens
taaaactgtattata

SEQ ID NO: 282616 - DNA, 15 bp, Homo sapiens
ttaaaactgtattat

SEQ ID NO: 282617 - DNA, 15 bp, Homo sapiens
gttaaaactgtatta

SEQ ID NO: 282618 - DNA, 15 bp, Homo sapiens
tgttaaaactgtatt

SEQ ID NO: 282619 - DNA, 15 bp, Homo sapiens
atgttaaaactgtat

SEQ ID NO: 282620 - DNA, 15 bp, Homo sapiens
tatgttaaaactgta

SEQ ID NO: 282621 - DNA, 15 bp, Homo sapiens
ctatgttaaaactgt

SEQ ID NO: 282622 - DNA, 15 bp, Homo sapiens
actatgttaaaactg

SEQ ID NO: 282623 - DNA, 15 bp, Homo sapiens
tactatgttaaaact

SEQ ID NO: 282624 - DNA, 15 bp, Homo sapiens
atactatgttaaaac

SEQ ID NO: 282625 - DNA, 15 bp, Homo sapiens
gatactatgttaaaa

SEQ ID NO: 282626 - DNA, 15 bp, Homo sapiens
ggatactatgttaaa

SEQ ID NO: 282627 - DNA, 15 bp, Homo sapiens
tggatactatgttaa

SEQ ID NO: 282628 - DNA, 15 bp, Homo sapiens
ctggatactatgtta

SEQ ID NO: 282629 - DNA, 15 bp, Homo sapiens
actggatactatgtt

SEQ ID NO: 282630 - DNA, 15 bp, Homo sapiens
cactggatactatgt

SEQ ID NO: 282631 - DNA, 15 bp, Homo sapiens
acactggatactatg

SEQ ID NO: 282632 - DNA, 15 bp, Homo sapiens
cacactggatactat

SEQ ID NO: 282633 - DNA, 15 bp, Homo sapiens
acacactggatacta

SEQ ID NO: 282634 - DNA, 15 bp, Homo sapiens
cacacactggatact

SEQ ID NO: 282635 - DNA, 15 bp, Homo sapiens
tcacacactggatac

SEQ ID NO: 282636 - DNA, 15 bp, Homo sapiens
ttcacacactggata

SEQ ID NO: 282637 - DNA, 15 bp, Homo sapiens
attcacacactggat

SEQ ID NO: 282638 - DNA, 15 bp, Homo sapiens
aattcacacactgga

SEQ ID NO: 282639 - DNA, 15 bp, Homo sapiens
taattcacacactgg

SEQ ID NO: 282640 - DNA, 15 bp, Homo sapiens
ataattcacacactg

SEQ ID NO: 282641 - DNA, 15 bp, Homo sapiens
aataattcacacact

SEQ ID NO: 282642 - DNA, 15 bp, Homo sapiens
aaataattcacacac

SEQ ID NO: 282643 - DNA, 15 bp, Homo sapiens
taaataattcacaca

SEQ ID NO: 282644 - DNA, 15 bp, Homo sapiens
ttaaataattcacac

SEQ ID NO: 282645 - DNA, 15 bp, Homo sapiens
attaaataattcaca

SEQ ID NO: 282646 - DNA, 15 bp, Homo sapiens
cattaaataattcac

SEQ ID NO: 282647 - DNA, 15 bp, Homo sapiens
tcattaaataattca

SEQ ID NO: 282648 - DNA, 15 bp, Homo sapiens
ttcattaaataattc

SEQ ID NO: 282649 - DNA, 15 bp, Homo sapiens
tttcattaaataatt

SEQ ID NO: 282650 - DNA, 15 bp, Homo sapiens
atttcattaaataat

SEQ ID NO: 282651 - DNA, 15 bp, Homo sapiens
tatttcattaaataa

SEQ ID NO: 282652 - DNA, 15 bp, Homo sapiens
atatttcattaaata

SEQ ID NO: 282653 - DNA, 15 bp, Homo sapiens
aatatttcattaaat

SEQ ID NO: 282654 - DNA, 15 bp, Homo sapiens
aaatatttcattaaa

SEQ ID NO: 282655 - DNA, 15 bp, Homo sapiens
caaatatttcattaa

SEQ ID NO: 282656 - DNA, 15 bp, Homo sapiens
tcaaatatttcatta

SEQ ID NO: 282657 - DNA, 15 bp, Homo sapiens
atcaaatatttcatt

SEQ ID NO: 282658 - DNA, 15 bp, Homo sapiens
gatcaaatatttcat

SEQ ID NO: 282659 - DNA, 15 bp, Homo sapiens
agatcaaatatttca

SEQ ID NO: 282660 - DNA, 15 bp, Homo sapiens
aagatcaaatatttc

SEQ ID NO: 282661 - DNA, 15 bp, Homo sapiens
aaagatcaaatattt

SEQ ID NO: 282662 - DNA, 15 bp, Homo sapiens
taaagatcaaatatt

SEQ ID NO: 282663 - DNA, 15 bp, Homo sapiens
ataaagatcaaatat

SEQ ID NO: 282664 - DNA, 15 bp, Homo sapiens
aataaagatcaaata

SEQ ID NO: 282665 - DNA, 15 bp, Homo sapiens
aaataaagatcaaat

SEQ ID NO: 282666 - DNA, 15 bp, Homo sapiens
aaaataaagatcaaa

SEQ ID NO: 282667 - DNA, 15 bp, Homo sapiens
aaaaataaagatcaa

SEQ ID NO: 282668 - DNA, 15 bp, Homo sapiens
aaaaaataaagatca

SEQ ID NO: 282669 - DNA, 15 bp, Homo sapiens
caaaaaataaagatc

SEQ ID NO: 282670 - DNA, 15 bp, Homo sapiens
acaaaaaataaagat

SEQ ID NO: 282671 - DNA, 15 bp, Homo sapiens
aacaaaaaataaaga

SEQ ID NO: 282672 - DNA, 15 bp, Homo sapiens
gaacaaaaaataaag

SEQ ID NO: 282673 - DNA, 15 bp, Homo sapiens
ggaacaaaaaataaa

SEQ ID NO: 282674 - DNA, 15 bp, Homo sapiens
gggaacaaaaaataa

SEQ ID NO: 282675 - DNA, 15 bp, Homo sapiens
tgggaacaaaaaata

SEQ ID NO: 282676 - DNA, 15 bp, Homo sapiens
ctgggaacaaaaaat

SEQ ID NO: 282677 - DNA, 15 bp, Homo sapiens
cctgggaacaaaaaa

SEQ ID NO: 282678 - DNA, 15 bp, Homo sapiens
ccctgggaacaaaaa

SEQ ID NO: 282679 - DNA, 15 bp, Homo sapiens
tccctgggaacaaaa

SEQ ID NO: 282680 - DNA, 15 bp, Homo sapiens
ctccctgggaacaaa

SEQ ID NO: 282681 - DNA, 15 bp, Homo sapiens
cctccctgggaacaa

SEQ ID NO: 282682 - DNA, 15 bp, Homo sapiens
acctccctgggaaca

SEQ ID NO: 282683 - DNA, 15 bp, Homo sapiens
aacctccctgggaac

SEQ ID NO: 282684 - DNA, 15 bp, Homo sapiens
taacctccctgggaa

SEQ ID NO: 282685 - DNA, 15 bp, Homo sapiens
ataacctccctggga

SEQ ID NO: 282686 - DNA, 15 bp, Homo sapiens
tataacctccctggg

SEQ ID NO: 282687 - DNA, 15 bp, Homo sapiens
atataacctccctgg

SEQ ID NO: 282688 - DNA, 15 bp, Homo sapiens
aatataacctccctg

SEQ ID NO: 282689 - DNA, 15 bp, Homo sapiens
gaatataacctccct

SEQ ID NO: 282690 - DNA, 15 bp, Homo sapiens
tgaatataacctccc

SEQ ID NO: 282691 - DNA, 15 bp, Homo sapiens
ttgaatataacctcc

SEQ ID NO: 282692 - DNA, 15 bp, Homo sapiens
tttgaatataacctc

SEQ ID NO: 282693 - DNA, 15 bp, Homo sapiens
ttttgaatataacct

SEQ ID NO: 282694 - DNA, 15 bp, Homo sapiens
cttttgaatataacc

SEQ ID NO: 282695 - DNA, 15 bp, Homo sapiens
tcttttgaatataac

SEQ ID NO: 282696 - DNA, 15 bp, Homo sapiens
ttcttttgaatataa

SEQ ID NO: 282697 - DNA, 15 bp, Homo sapiens
tttcttttgaatata

SEQ ID NO: 282698 - DNA, 15 bp, Homo sapiens
ttttcttttgaatat

SEQ ID NO: 282699 - DNA, 15 bp, Homo sapiens
tttttcttttgaata

SEQ ID NO: 282700 - DNA, 15 bp, Homo sapiens
ctttttcttttgaat

SEQ ID NO: 282701 - DNA, 15 bp, Homo sapiens
cctttttcttttgaa

SEQ ID NO: 282702 - DNA, 15 bp, Homo sapiens
tcctttttcttttga

SEQ ID NO: 282703 - DNA, 15 bp, Homo sapiens
ttcctttttcttttg

SEQ ID NO: 282704 - DNA, 15 bp, Homo sapiens
gttcctttttctttt

SEQ ID NO: 282705 - DNA, 15 bp, Homo sapiens
agttcctttttcttt

SEQ ID NO: 282706 - DNA, 15 bp, Homo sapiens
cagttcctttttctt

SEQ ID NO: 282707 - DNA, 15 bp, Homo sapiens
acagttcctttttct

SEQ ID NO: 282708 - DNA, 15 bp, Homo sapiens
cacagttcctttttc

SEQ ID NO: 282709 - DNA, 15 bp, Homo sapiens
ccacagttccttttt

SEQ ID NO: 282710 - DNA, 15 bp, Homo sapiens
cccacagttcctttt

SEQ ID NO: 282711 - DNA, 15 bp, Homo sapiens
ccccacagttccttt

SEQ ID NO: 282712 - DNA, 15 bp, Homo sapiens
tccccacagttcctt

SEQ ID NO: 282713 - DNA, 15 bp, Homo sapiens
ttccccacagttcct

SEQ ID NO: 282714 - DNA, 15 bp, Homo sapiens
attccccacagttcc

SEQ ID NO: 282715 - DNA, 15 bp, Homo sapiens
gattccccacagttc

SEQ ID NO: 282716 - DNA, 15 bp, Homo sapiens
agattccccacagtt

SEQ ID NO: 282717 - DNA, 15 bp, Homo sapiens
cagattccccacagt

SEQ ID NO: 282718 - DNA, 15 bp, Homo sapiens
acagattccccacag

SEQ ID NO: 282719 - DNA, 15 bp, Homo sapiens
tacagattccccaca

SEQ ID NO: 282720 - DNA, 15 bp, Homo sapiens
atacagattccccac

SEQ ID NO: 282721 - DNA, 15 bp, Homo sapiens
gatacagattcccca

SEQ ID NO: 282722 - DNA, 15 bp, Homo sapiens
agatacagattcccc

SEQ ID NO: 282723 - DNA, 15 bp, Homo sapiens
aagatacagattccc

SEQ ID NO: 282724 - DNA, 15 bp, Homo sapiens
aaagatacagattcc

SEQ ID NO: 282725 - DNA, 15 bp, Homo sapiens
taaagatacagattc

SEQ ID NO: 282726 - DNA, 15 bp, Homo sapiens
ataaagatacagatt

SEQ ID NO: 282727 - DNA, 15 bp, Homo sapiens
aataaagatacagat

SEQ ID NO: 282728 - DNA, 15 bp, Homo sapiens
caataaagatacaga

SEQ ID NO: 282729 - DNA, 15 bp, Homo sapiens
gcaataaagatacag

SEQ ID NO: 282730 - DNA, 15 bp, Homo sapiens
tgcaataaagataca

SEQ ID NO: 282731 - DNA, 15 bp, Homo sapiens
ctgcaataaagatac

SEQ ID NO: 282732 - DNA, 15 bp, Homo sapiens
gctgcaataaagata

SEQ ID NO: 282733 - DNA, 15 bp, Homo sapiens
tgctgcaataaagat

SEQ ID NO: 282734 - DNA, 15 bp, Homo sapiens
ctgctgcaataaaga

SEQ ID NO: 282735 - DNA, 15 bp, Homo sapiens
actgctgcaataaag

SEQ ID NO: 282736 - DNA, 15 bp, Homo sapiens
aactgctgcaataaa

SEQ ID NO: 282737 - DNA, 15 bp, Homo sapiens
caactgctgcaataa

SEQ ID NO: 282738 - DNA, 15 bp, Homo sapiens
tcaactgctgcaata

SEQ ID NO: 282739 - DNA, 15 bp, Homo sapiens
gtcaactgctgcaat

SEQ ID NO: 282740 - DNA, 15 bp, Homo sapiens
ggtcaactgctgcaa

SEQ ID NO: 282741 - DNA, 15 bp, Homo sapiens
aggtcaactgctgca

SEQ ID NO: 282742 - DNA, 15 bp, Homo sapiens
taggtcaactgctgc

SEQ ID NO: 282743 - DNA, 15 bp, Homo sapiens
ctaggtcaactgctg

SEQ ID NO: 282744 - DNA, 15 bp, Homo sapiens
tctaggtcaactgct

SEQ ID NO: 282745 - DNA, 15 bp, Homo sapiens
atctaggtcaactgc

SEQ ID NO: 282746 - DNA, 15 bp, Homo sapiens
catctaggtcaactg

SEQ ID NO: 282747 - DNA, 15 bp, Homo sapiens
tcatctaggtcaact

SEQ ID NO: 282748 - DNA, 15 bp, Homo sapiens
ctcatctaggtcaac

SEQ ID NO: 282749 - DNA, 15 bp, Homo sapiens
tctcatctaggtcaa

SEQ ID NO: 282750 - DNA, 15 bp, Homo sapiens
atctcatctaggtca

SEQ ID NO: 282751 - DNA, 15 bp, Homo sapiens
catctcatctaggtc

SEQ ID NO: 282752 - DNA, 15 bp, Homo sapiens
acatctcatctaggt

SEQ ID NO: 282753 - DNA, 15 bp, Homo sapiens
gacatctcatctagg

SEQ ID NO: 282754 - DNA, 15 bp, Homo sapiens
cgacatctcatctag

SEQ ID NO: 282755 - DNA, 15 bp, Homo sapiens
acgacatctcatcta

SEQ ID NO: 282756 - DNA, 15 bp, Homo sapiens
aacgacatctcatct

SEQ ID NO: 282757 - DNA, 15 bp, Homo sapiens
gaacgacatctcatc

SEQ ID NO: 282758 - DNA, 15 bp, Homo sapiens
tgaacgacatctcat

SEQ ID NO: 282759 - DNA, 15 bp, Homo sapiens
gtgaacgacatctca

SEQ ID NO: 282760 - DNA, 15 bp, Homo sapiens
agtgaacgacatctc

SEQ ID NO: 282761 - DNA, 15 bp, Homo sapiens
aagtgaacgacatct

SEQ ID NO: 282762 - DNA, 15 bp, Homo sapiens
aaagtgaacgacatc

SEQ ID NO: 282763 - DNA, 15 bp, Homo sapiens
aaaagtgaacgacat

SEQ ID NO: 282764 - DNA, 15 bp, Homo sapiens
taaaagtgaacgaca

SEQ ID NO: 282765 - DNA, 15 bp, Homo sapiens
gtaaaagtgaacgac

SEQ ID NO: 282766 - DNA, 15 bp, Homo sapiens
agtaaaagtgaacga

SEQ ID NO: 282767 - DNA, 15 bp, Homo sapiens
cagtaaaagtgaacg

SEQ ID NO: 282768 - DNA, 15 bp, Homo sapiens
tcagtaaaagtgaac

SEQ ID NO: 282769 - DNA, 15 bp, Homo sapiens
ctcagtaaaagtgaa

SEQ ID NO: 282770 - DNA, 15 bp, Homo sapiens
gctcagtaaaagtga

SEQ ID NO: 282771 - DNA, 15 bp, Homo sapiens
agctcagtaaaagtg

SEQ ID NO: 282772 - DNA, 15 bp, Homo sapiens
tagctcagtaaaagt

SEQ ID NO: 282773 - DNA, 15 bp, Homo sapiens
gtagctcagtaaaag

SEQ ID NO: 282774 - DNA, 15 bp, Homo sapiens
tgtagctcagtaaaa

SEQ ID NO: 282775 - DNA, 15 bp, Homo sapiens
ctgtagctcagtaaa

SEQ ID NO: 282776 - DNA, 15 bp, Homo sapiens
tctgtagctcagtaa

SEQ ID NO: 282777 - DNA, 15 bp, Homo sapiens
ttctgtagctcagta

SEQ ID NO: 282778 - DNA, 15 bp, Homo sapiens
tttctgtagctcagt

SEQ ID NO: 282779 - DNA, 15 bp, Homo sapiens
ttttctgtagctcag

SEQ ID NO: 282780 - DNA, 15 bp, Homo sapiens
tttttctgtagctca

SEQ ID NO: 282781 - DNA, 15 bp, Homo sapiens
gtttttctgtagctc

SEQ ID NO: 282782 - DNA, 15 bp, Homo sapiens
tgtttttctgtagct

SEQ ID NO: 282783 - DNA, 15 bp, Homo sapiens
atgtttttctgtagc

SEQ ID NO: 282784 - DNA, 15 bp, Homo sapiens
tatgtttttctgtag

SEQ ID NO: 282785 - DNA, 15 bp, Homo sapiens
ctatgtttttctgta

SEQ ID NO: 282786 - DNA, 15 bp, Homo sapiens
tctatgtttttctgt

SEQ ID NO: 282787 - DNA, 15 bp, Homo sapiens
ttctatgtttttctg

SEQ ID NO: 282788 - DNA, 15 bp, Homo sapiens
tttctatgtttttct

SEQ ID NO: 282789 - DNA, 15 bp, Homo sapiens
atttctatgtttttc

SEQ ID NO: 282790 - DNA, 15 bp, Homo sapiens
gatttctatgttttt

SEQ ID NO: 282791 - DNA, 15 bp, Homo sapiens
tgatttctatgtttt

SEQ ID NO: 282792 - DNA, 15 bp, Homo sapiens
gggatacggtgttca

SEQ ID NO: 282793 - DNA, 15 bp, Homo sapiens
agggatacggtgttc

SEQ ID NO: 282794 - DNA, 15 bp, Homo sapiens
aagggatacggtgtt

SEQ ID NO: 282795 - DNA, 15 bp, Homo sapiens
aaagggatacggtgt

SEQ ID NO: 282796 - DNA, 15 bp, Homo sapiens
aaaagggatacggtg

SEQ ID NO: 282797 - DNA, 15 bp, Homo sapiens
aaaaagggatacggt

SEQ ID NO: 282798 - DNA, 15 bp, Homo sapiens
taaaaagggatacgg

SEQ ID NO: 282799 - DNA, 15 bp, Homo sapiens
ttaaaaagggatacg

SEQ ID NO: 282800 - DNA, 15 bp, Homo sapiens
tttaaaaagggatac

SEQ ID NO: 282801 - DNA, 15 bp, Homo sapiens
gtttaaaaagggata

SEQ ID NO: 282802 - DNA, 15 bp, Homo sapiens
agtttaaaaagggat

SEQ ID NO: 282803 - DNA, 15 bp, Homo sapiens
cagtttaaaaaggga

SEQ ID NO: 282804 - DNA, 15 bp, Homo sapiens
tcagtttaaaaaggg

SEQ ID NO: 282805 - DNA, 15 bp, Homo sapiens
ttcagtttaaaaagg

SEQ ID NO: 282806 - DNA, 15 bp, Homo sapiens
cttcagtttaaaaag

SEQ ID NO: 282807 - DNA, 15 bp, Homo sapiens
ccttcagtttaaaaa

SEQ ID NO: 282808 - DNA, 15 bp, Homo sapiens
accttcagtttaaaa

SEQ ID NO: 282809 - DNA, 15 bp, Homo sapiens
aaccttcagtttaaa

SEQ ID NO: 282810 - DNA, 15 bp, Homo sapiens
gaaccttcagtttaa

SEQ ID NO: 282811 - DNA, 15 bp, Homo sapiens
agaaccttcagttta

SEQ ID NO: 282812 - DNA, 15 bp, Homo sapiens
cagaaccttcagttt

SEQ ID NO: 282813 - DNA, 15 bp, Homo sapiens
gcagaaccttcagtt

SEQ ID NO: 282814 - DNA, 15 bp, Homo sapiens
agcagaaccttcagt

SEQ ID NO: 282815 - DNA, 15 bp, Homo sapiens
cagcagaaccttcag

SEQ ID NO: 282816 - DNA, 15 bp, Homo sapiens
acagcagaaccttca

SEQ ID NO: 282817 - DNA, 15 bp, Homo sapiens
aacagcagaaccttc

SEQ ID NO: 282818 - DNA, 15 bp, Homo sapiens
gaacagcagaacctt

SEQ ID NO: 282819 - DNA, 15 bp, Homo sapiens
tgaacagcagaacct

SEQ ID NO: 282820 - DNA, 15 bp, Homo sapiens
atgaacagcagaacc

SEQ ID NO: 282821 - DNA, 15 bp, Homo sapiens
aatgaacagcagaac

SEQ ID NO: 282822 - DNA, 15 bp, Homo sapiens
aaatgaacagcagaa

SEQ ID NO: 282823 - DNA, 15 bp, Homo sapiens
aaaatgaacagcaga

SEQ ID NO: 282824 - DNA, 15 bp, Homo sapiens
taaaatgaacagcag

SEQ ID NO: 282825 - DNA, 15 bp, Homo sapiens
ctaaaatgaacagca

SEQ ID NO: 282826 - DNA, 15 bp, Homo sapiens
tctaaaatgaacagc

SEQ ID NO: 282827 - DNA, 15 bp, Homo sapiens
ttctaaaatgaacag

SEQ ID NO: 282828 - DNA, 15 bp, Homo sapiens
tttctaaaatgaaca

SEQ ID NO: 282829 - DNA, 15 bp, Homo sapiens
ttttctaaaatgaac

SEQ ID NO: 282830 - DNA, 15 bp, Homo sapiens
attttctaaaatgaa

SEQ ID NO: 282831 - DNA, 15 bp, Homo sapiens
gattttctaaaatga

SEQ ID NO: 282832 - DNA, 15 bp, Homo sapiens
agattttctaaaatg

SEQ ID NO: 282833 - DNA, 15 bp, Homo sapiens
aagattttctaaaat

SEQ ID NO: 282834 - DNA, 15 bp, Homo sapiens
taagattttctaaaa

SEQ ID NO: 282835 - DNA, 15 bp, Homo sapiens
ttaagattttctaaa

SEQ ID NO: 282836 - DNA, 15 bp, Homo sapiens
gttaagattttctaa

SEQ ID NO: 282837 - DNA, 15 bp, Homo sapiens
tgttaagattttcta

SEQ ID NO: 282838 - DNA, 15 bp, Homo sapiens
atgttaagattttct

SEQ ID NO: 282839 - DNA, 15 bp, Homo sapiens
tatgttaagattttc

SEQ ID NO: 282840 - DNA, 15 bp, Homo sapiens
gtatgttaagatttt

SEQ ID NO: 282841 - DNA, 15 bp, Homo sapiens
agtatgttaagattt

SEQ ID NO: 282842 - DNA, 15 bp, Homo sapiens
gagtatgttaagatt

SEQ ID NO: 282843 - DNA, 15 bp, Homo sapiens
agagtatgttaagat

SEQ ID NO: 282844 - DNA, 15 bp, Homo sapiens
tagagtatgttaaga

SEQ ID NO: 282845 - DNA, 15 bp, Homo sapiens
atagagtatgttaag

SEQ ID NO: 282846 - DNA, 15 bp, Homo sapiens
aatagagtatgttaa

SEQ ID NO: 282847 - DNA, 15 bp, Homo sapiens
aaatagagtatgtta

SEQ ID NO: 282848 - DNA, 15 bp, Homo sapiens
taaatagagtatgtt

SEQ ID NO: 282849 - DNA, 15 bp, Homo sapiens
ttaaatagagtatgt

SEQ ID NO: 282850 - DNA, 15 bp, Homo sapiens
tttaaatagagtatg

SEQ ID NO: 282851 - DNA, 15 bp, Homo sapiens
ttttaaatagagtat

SEQ ID NO: 282852 - DNA, 15 bp, Homo sapiens
tttttaaatagagta

SEQ ID NO: 282853 - DNA, 15 bp, Homo sapiens
atttttaaatagagt

SEQ ID NO: 282854 - DNA, 15 bp, Homo sapiens
tatttttaaatagag

SEQ ID NO: 282855 - DNA, 15 bp, Homo sapiens
atatttttaaataga

SEQ ID NO: 282856 - DNA, 15 bp, Homo sapiens
aatatttttaaatag

SEQ ID NO: 282857 - DNA, 15 bp, Homo sapiens
gaatatttttaaata

SEQ ID NO: 282858 - DNA, 15 bp, Homo sapiens
agaatatttttaaat

SEQ ID NO: 282859 - DNA, 15 bp, Homo sapiens
tagaatatttttaaa

SEQ ID NO: 282860 - DNA, 15 bp, Homo sapiens
atagaatatttttaa

SEQ ID NO: 282861 - DNA, 15 bp, Homo sapiens
aatagaatattttta

SEQ ID NO: 282862 - DNA, 15 bp, Homo sapiens
gaatagaatattttt

SEQ ID NO: 282863 - DNA, 15 bp, Homo sapiens
tgaatagaatatttt

SEQ ID NO: 282864 - DNA, 15 bp, Homo sapiens
ctgaatagaatattt

SEQ ID NO: 282865 - DNA, 15 bp, Homo sapiens
gctgaatagaatatt

SEQ ID NO: 282866 - DNA, 15 bp, Homo sapiens
agctgaatagaatat

SEQ ID NO: 282867 - DNA, 15 bp, Homo sapiens
tagctgaatagaata

SEQ ID NO: 282868 - DNA, 15 bp, Homo sapiens
ctagctgaatagaat

SEQ ID NO: 282869 - DNA, 15 bp, Homo sapiens
cctagctgaatagaa

SEQ ID NO: 282870 - DNA, 15 bp, Homo sapiens
acctagctgaataga

SEQ ID NO: 282871 - DNA, 15 bp, Homo sapiens
aacctagctgaatag

SEQ ID NO: 282872 - DNA, 15 bp, Homo sapiens
caacctagctgaata

SEQ ID NO: 282873 - DNA, 15 bp, Homo sapiens
acaacctagctgaat

SEQ ID NO: 282874 - DNA, 15 bp, Homo sapiens
aacaacctagctgaa

SEQ ID NO: 282875 - DNA, 15 bp, Homo sapiens
gaacaacctagctga

SEQ ID NO: 282876 - DNA, 15 bp, Homo sapiens
agaacaacctagctg

SEQ ID NO: 282877 - DNA, 15 bp, Homo sapiens
tagaacaacctagct

SEQ ID NO: 282878 - DNA, 15 bp, Homo sapiens
atagaacaacctagc

SEQ ID NO: 282879 - DNA, 15 bp, Homo sapiens
tatagaacaacctag

SEQ ID NO: 282880 - DNA, 15 bp, Homo sapiens
gtatagaacaaccta

SEQ ID NO: 282881 - DNA, 15 bp, Homo sapiens
ggtatagaacaacct

SEQ ID NO: 282882 - DNA, 15 bp, Homo sapiens
tggtatagaacaacc

SEQ ID NO: 282883 - DNA, 15 bp, Homo sapiens
atggtatagaacaac

SEQ ID NO: 282884 - DNA, 15 bp, Homo sapiens
aatggtatagaacaa

SEQ ID NO: 282885 - DNA, 15 bp, Homo sapiens
caatggtatagaaca

SEQ ID NO: 282886 - DNA, 15 bp, Homo sapiens
acaatggtatagaac

SEQ ID NO: 282887 - DNA, 15 bp, Homo sapiens
tacaatggtatagaa

SEQ ID NO: 282888 - DNA, 15 bp, Homo sapiens
atacaatggtataga

SEQ ID NO: 282889 - DNA, 15 bp, Homo sapiens
aatacaatggtatag

SEQ ID NO: 282890 - DNA, 15 bp, Homo sapiens
aaatacaatggtata

SEQ ID NO: 282891 - DNA, 15 bp, Homo sapiens
aaaatacaatggtat

SEQ ID NO: 282892 - DNA, 15 bp, Homo sapiens
caaaatacaatggta

SEQ ID NO: 282893 - DNA, 15 bp, Homo sapiens
ccaaaatacaatggt

SEQ ID NO: 282894 - DNA, 15 bp, Homo sapiens
cccaaaatacaatgg

SEQ ID NO: 282895 - DNA, 15 bp, Homo sapiens
tcccaaaatacaatg

SEQ ID NO: 282896 - DNA, 15 bp, Homo sapiens
ttcccaaaatacaat

SEQ ID NO: 282897 - DNA, 15 bp, Homo sapiens
gttcccaaaatacaa

SEQ ID NO: 282898 - DNA, 15 bp, Homo sapiens
tgttcccaaaataca

SEQ ID NO: 282899 - DNA, 15 bp, Homo sapiens
atgttcccaaaatac

SEQ ID NO: 282900 - DNA, 15 bp, Homo sapiens
aatgttcccaaaata

SEQ ID NO: 282901 - DNA, 15 bp, Homo sapiens
aaatgttcccaaaat

SEQ ID NO: 282902 - DNA, 15 bp, Homo sapiens
aaaatgttcccaaaa

SEQ ID NO: 282903 - DNA, 15 bp, Homo sapiens
gaaaatgttcccaaa

SEQ ID NO: 282904 - DNA, 15 bp, Homo sapiens
agaaaatgttcccaa

SEQ ID NO: 282905 - DNA, 15 bp, Homo sapiens
aagaaaatgttccca

SEQ ID NO: 282906 - DNA, 15 bp, Homo sapiens
taagaaaatgttccc

SEQ ID NO: 282907 - DNA, 15 bp, Homo sapiens
ataagaaaatgttcc

SEQ ID NO: 282908 - DNA, 15 bp, Homo sapiens
cataagaaaatgttc

SEQ ID NO: 282909 - DNA, 15 bp, Homo sapiens
acataagaaaatgtt

SEQ ID NO: 282910 - DNA, 15 bp, Homo sapiens
aacataagaaaatgt

SEQ ID NO: 282911 - DNA, 15 bp, Homo sapiens
caacataagaaaatg

SEQ ID NO: 282912 - DNA, 15 bp, Homo sapiens
ccaacataagaaaat

SEQ ID NO: 282913 - DNA, 15 bp, Homo sapiens
tccaacataagaaaa

SEQ ID NO: 282914 - DNA, 15 bp, Homo sapiens
atccaacataagaaa

SEQ ID NO: 282915 - DNA, 15 bp, Homo sapiens
aatccaacataagaa

SEQ ID NO: 282916 - DNA, 15 bp, Homo sapiens
caatccaacataaga

SEQ ID NO: 282917 - DNA, 15 bp, Homo sapiens
gcaatccaacataag

SEQ ID NO: 282918 - DNA, 15 bp, Homo sapiens
agcaatccaacataa

SEQ ID NO: 282919 - DNA, 15 bp, Homo sapiens
aagcaatccaacata

SEQ ID NO: 282920 - DNA, 15 bp, Homo sapiens
aaagcaatccaacat

SEQ ID NO: 282921 - DNA, 15 bp, Homo sapiens
aaaagcaatccaaca

SEQ ID NO: 282922 - DNA, 15 bp, Homo sapiens
taaaagcaatccaac

SEQ ID NO: 282923 - DNA, 15 bp, Homo sapiens
ataaaagcaatccaa

SEQ ID NO: 282924 - DNA, 15 bp, Homo sapiens
aataaaagcaatcca

SEQ ID NO: 282925 - DNA, 15 bp, Homo sapiens
gaataaaagcaatcc

SEQ ID NO: 282926 - DNA, 15 bp, Homo sapiens
agaataaaagcaatc

SEQ ID NO: 282927 - DNA, 15 bp, Homo sapiens
gagaataaaagcaat

SEQ ID NO: 282928 - DNA, 15 bp, Homo sapiens
ggagaataaaagcaa

SEQ ID NO: 282929 - DNA, 15 bp, Homo sapiens
gggagaataaaagca

SEQ ID NO: 282930 - DNA, 15 bp, Homo sapiens
agggagaataaaagc

SEQ ID NO: 282931 - DNA, 15 bp, Homo sapiens
tagggagaataaaag

SEQ ID NO: 282932 - DNA, 15 bp, Homo sapiens
atagggagaataaaa

SEQ ID NO: 282933 - DNA, 15 bp, Homo sapiens
aatagggagaataaa

SEQ ID NO: 282934 - DNA, 15 bp, Homo sapiens
aaatagggagaataa

SEQ ID NO: 282935 - DNA, 15 bp, Homo sapiens
taaatagggagaata

SEQ ID NO: 282936 - DNA, 15 bp, Homo sapiens
ataaatagggagaat

SEQ ID NO: 282937 - DNA, 15 bp, Homo sapiens
aataaatagggagaa

SEQ ID NO: 282938 - DNA, 15 bp, Homo sapiens
caataaatagggaga

SEQ ID NO: 282939 - DNA, 15 bp, Homo sapiens
acaataaatagggag

SEQ ID NO: 282940 - DNA, 15 bp, Homo sapiens
gacaataaataggga

SEQ ID NO: 282941 - DNA, 15 bp, Homo sapiens
agacaataaataggg

SEQ ID NO: 282942 - DNA, 15 bp, Homo sapiens
aagacaataaatagg

SEQ ID NO: 282943 - DNA, 15 bp, Homo sapiens
gaagacaataaatag

SEQ ID NO: 282944 - DNA, 15 bp, Homo sapiens
agaagacaataaata

SEQ ID NO: 282945 - DNA, 15 bp, Homo sapiens
gagaagacaataaat

SEQ ID NO: 282946 - DNA, 15 bp, Homo sapiens
agagaagacaataaa

SEQ ID NO: 282947 - DNA, 15 bp, Homo sapiens
gagagaagacaataa

SEQ ID NO: 282948 - DNA, 15 bp, Homo sapiens
tgagagaagacaata

SEQ ID NO: 282949 - DNA, 15 bp, Homo sapiens
atgagagaagacaat

SEQ ID NO: 282950 - DNA, 15 bp, Homo sapiens
tatgagagaagacaa

SEQ ID NO: 282951 - DNA, 15 bp, Homo sapiens
atatgagagaagaca

SEQ ID NO: 282952 - DNA, 15 bp, Homo sapiens
aatatgagagaagac

SEQ ID NO: 282953 - DNA, 15 bp, Homo sapiens
taatatgagagaaga

SEQ ID NO: 282954 - DNA, 15 bp, Homo sapiens
ataatatgagagaag

SEQ ID NO: 282955 - DNA, 15 bp, Homo sapiens
aataatatgagagaa

SEQ ID NO: 282956 - DNA, 15 bp, Homo sapiens
gaataatatgagaga

SEQ ID NO: 282957 - DNA, 15 bp, Homo sapiens
agaataatatgagag

SEQ ID NO: 282958 - DNA, 15 bp, Homo sapiens
cagaataatatgaga

SEQ ID NO: 282959 - DNA, 15 bp, Homo sapiens
tcagaataatatgag

SEQ ID NO: 282960 - DNA, 15 bp, Homo sapiens
ttcagaataatatga

SEQ ID NO: 282961 - DNA, 15 bp, Homo sapiens
attcagaataatatg

SEQ ID NO: 282962 - DNA, 15 bp, Homo sapiens
aattcagaataatat

SEQ ID NO: 282963 - DNA, 15 bp, Homo sapiens
aaattcagaataata

SEQ ID NO: 282964 - DNA, 15 bp, Homo sapiens
aaaattcagaataat

SEQ ID NO: 282965 - DNA, 15 bp, Homo sapiens
aaaaattcagaataa

SEQ ID NO: 282966 - DNA, 15 bp, Homo sapiens
taaaaattcagaata

SEQ ID NO: 282967 - DNA, 15 bp, Homo sapiens
ttaaaaattcagaat

SEQ ID NO: 282968 - DNA, 15 bp, Homo sapiens
tttaaaaattcagaa

SEQ ID NO: 282969 - DNA, 15 bp, Homo sapiens
atttaaaaattcaga

SEQ ID NO: 282970 - DNA, 15 bp, Homo sapiens
gatttaaaaattcag

SEQ ID NO: 282971 - DNA, 15 bp, Homo sapiens
agatttaaaaattca

SEQ ID NO: 282972 - DNA, 15 bp, Homo sapiens
aagatttaaaaattc

SEQ ID NO: 282973 - DNA, 15 bp, Homo sapiens
aaagatttaaaaatt

SEQ ID NO: 282974 - DNA, 15 bp, Homo sapiens
aaaagatttaaaaat

SEQ ID NO: 282975 - DNA, 15 bp, Homo sapiens
aaaaagatttaaaaa

SEQ ID NO: 282976 - DNA, 15 bp, Homo sapiens
gaaaaagatttaaaa

SEQ ID NO: 282977 - DNA, 15 bp, Homo sapiens
agaaaaagatttaaa

SEQ ID NO: 282978 - DNA, 15 bp, Homo sapiens
aagaaaaagatttaa

SEQ ID NO: 282979 - DNA, 15 bp, Homo sapiens
taagaaaaagattta

SEQ ID NO: 282980 - DNA, 15 bp, Homo sapiens
gtaagaaaaagattt

SEQ ID NO: 282981 - DNA, 15 bp, Homo sapiens
tgtaagaaaaagatt

SEQ ID NO: 282982 - DNA, 15 bp, Homo sapiens
atgtaagaaaaagat

SEQ ID NO: 282983 - DNA, 15 bp, Homo sapiens
tatgtaagaaaaaga

SEQ ID NO: 282984 - DNA, 15 bp, Homo sapiens
atatgtaagaaaaag

SEQ ID NO: 282985 - DNA, 15 bp, Homo sapiens
aatatgtaagaaaaa

SEQ ID NO: 282986 - DNA, 15 bp, Homo sapiens
caatatgtaagaaaa

SEQ ID NO: 282987 - DNA, 15 bp, Homo sapiens
ccaatatgtaagaaa

SEQ ID NO: 282988 - DNA, 15 bp, Homo sapiens
gccaatatgtaagaa

SEQ ID NO: 282989 - DNA, 15 bp, Homo sapiens
agccaatatgtaaga

SEQ ID NO: 282990 - DNA, 15 bp, Homo sapiens
cagccaatatgtaag

SEQ ID NO: 282991 - DNA, 15 bp, Homo sapiens
acagccaatatgtaa

SEQ ID NO: 282992 - DNA, 15 bp, Homo sapiens
aacagccaatatgta

SEQ ID NO: 282993 - DNA, 15 bp, Homo sapiens
aaacagccaatatgt

SEQ ID NO: 282994 - DNA, 15 bp, Homo sapiens
aaaacagccaatatg

SEQ ID NO: 282995 - DNA, 15 bp, Homo sapiens
aaaaacagccaatat

SEQ ID NO: 282996 - DNA, 15 bp, Homo sapiens
taaaaacagccaata

SEQ ID NO: 282997 - DNA, 15 bp, Homo sapiens
ataaaaacagccaat

SEQ ID NO: 282998 - DNA, 15 bp, Homo sapiens
gataaaaacagccaa

SEQ ID NO: 282999 - DNA, 15 bp, Homo sapiens
agataaaaacagcca

SEQ ID NO: 283000 - DNA, 15 bp, Homo sapiens
gagataaaaacagcc

SEQ ID NO: 283001 - DNA, 15 bp, Homo sapiens
tgagataaaaacagc

SEQ ID NO: 283002 - DNA, 15 bp, Homo sapiens
ttgagataaaaacag

SEQ ID NO: 283003 - DNA, 15 bp, Homo sapiens
cttgagataaaaaca

SEQ ID NO: 283004 - DNA, 15 bp, Homo sapiens
gcttgagataaaaac

SEQ ID NO: 283005 - DNA, 15 bp, Homo sapiens
tgcttgagataaaaa

SEQ ID NO: 283006 - DNA, 15 bp, Homo sapiens
atgcttgagataaaa

SEQ ID NO: 283007 - DNA, 15 bp, Homo sapiens
aatgcttgagataaa

SEQ ID NO: 283008 - DNA, 15 bp, Homo sapiens
aaatgcttgagataa

SEQ ID NO: 283009 - DNA, 15 bp, Homo sapiens
aaaatgcttgagata

SEQ ID NO: 283010 - DNA, 15 bp, Homo sapiens
aaaaatgcttgagat

SEQ ID NO: 283011 - DNA, 15 bp, Homo sapiens
aaaaaatgcttgaga

SEQ ID NO: 283012 - DNA, 15 bp, Homo sapiens
gaaaaaatgcttgag

SEQ ID NO: 283013 - DNA, 15 bp, Homo sapiens
ggaaaaaatgcttga

SEQ ID NO: 283014 - DNA, 15 bp, Homo sapiens
tggaaaaaatgcttg

SEQ ID NO: 283015 - DNA, 15 bp, Homo sapiens
atggaaaaaatgctt

SEQ ID NO: 283016 - DNA, 15 bp, Homo sapiens
aatggaaaaaatgct

SEQ ID NO: 283017 - DNA, 15 bp, Homo sapiens
aaatggaaaaaatgc

SEQ ID NO: 283018 - DNA, 15 bp, Homo sapiens
aaaatggaaaaaatg

SEQ ID NO: 283019 - DNA, 15 bp, Homo sapiens
caaaatggaaaaaat

SEQ ID NO: 283020 - DNA, 15 bp, Homo sapiens
tcaaaatggaaaaaa

SEQ ID NO: 283021 - DNA, 15 bp, Homo sapiens
ctcaaaatggaaaaa

SEQ ID NO: 283022 - DNA, 15 bp, Homo sapiens
gctcaaaatggaaaa

SEQ ID NO: 283023 - DNA, 15 bp, Homo sapiens
agctcaaaatggaaa

SEQ ID NO: 283024 - DNA, 15 bp, Homo sapiens
tagctcaaaatggaa

SEQ ID NO: 283025 - DNA, 15 bp, Homo sapiens
ttagctcaaaatgga

SEQ ID NO: 283026 - DNA, 15 bp, Homo sapiens
tttagctcaaaatgg

SEQ ID NO: 283027 - DNA, 15 bp, Homo sapiens
gtttagctcaaaatg

SEQ ID NO: 283028 - DNA, 15 bp, Homo sapiens
agtttagctcaaaat

SEQ ID NO: 283029 - DNA, 15 bp, Homo sapiens
tagtttagctcaaaa

SEQ ID NO: 283030 - DNA, 15 bp, Homo sapiens
atagtttagctcaaa

SEQ ID NO: 283031 - DNA, 15 bp, Homo sapiens
aatagtttagctcaa

SEQ ID NO: 283032 - DNA, 15 bp, Homo sapiens
aaatagtttagctca

SEQ ID NO: 283033 - DNA, 15 bp, Homo sapiens
aaaatagtttagctc

SEQ ID NO: 283034 - DNA, 15 bp, Homo sapiens
aaaaatagtttagct

SEQ ID NO: 283035 - DNA, 15 bp, Homo sapiens
caaaaatagtttagc

SEQ ID NO: 283036 - DNA, 15 bp, Homo sapiens
acaaaaatagtttag

SEQ ID NO: 283037 - DNA, 15 bp, Homo sapiens
tacaaaaatagttta

SEQ ID NO: 283038 - DNA, 15 bp, Homo sapiens
ttacaaaaatagttt

SEQ ID NO: 283039 - DNA, 15 bp, Homo sapiens
attacaaaaatagtt

SEQ ID NO: 283040 - DNA, 15 bp, Homo sapiens
cattacaaaaatagt

SEQ ID NO: 283041 - DNA, 15 bp, Homo sapiens
ccattacaaaaatag

SEQ ID NO: 283042 - DNA, 15 bp, Homo sapiens
accattacaaaaata

SEQ ID NO: 283043 - DNA, 15 bp, Homo sapiens
caccattacaaaaat

SEQ ID NO: 283044 - DNA, 15 bp, Homo sapiens
acaccattacaaaaa

SEQ ID NO: 283045 - DNA, 15 bp, Homo sapiens
aacaccattacaaaa

SEQ ID NO: 283046 - DNA, 15 bp, Homo sapiens
taacaccattacaaa

SEQ ID NO: 283047 - DNA, 15 bp, Homo sapiens
ataacaccattacaa

SEQ ID NO: 283048 - DNA, 15 bp, Homo sapiens
aataacaccattaca

SEQ ID NO: 283049 - DNA, 15 bp, Homo sapiens
aaataacaccattac

SEQ ID NO: 283050 - DNA, 15 bp, Homo sapiens
caaataacaccatta

SEQ ID NO: 283051 - DNA, 15 bp, Homo sapiens
ccaaataacaccatt

SEQ ID NO: 283052 - DNA, 15 bp, Homo sapiens
accaaataacaccat

SEQ ID NO: 283053 - DNA, 15 bp, Homo sapiens
gaccaaataacacca

SEQ ID NO: 283054 - DNA, 15 bp, Homo sapiens
ggaccaaataacacc

SEQ ID NO: 283055 - DNA, 15 bp, Homo sapiens
aggaccaaataacac

SEQ ID NO: 283056 - DNA, 15 bp, Homo sapiens
gaggaccaaataaca

SEQ ID NO: 283057 - DNA, 15 bp, Homo sapiens
tgaggaccaaataac

SEQ ID NO: 283058 - DNA, 15 bp, Homo sapiens
atgaggaccaaataa

SEQ ID NO: 283059 - DNA, 15 bp, Homo sapiens
gatgaggaccaaata

SEQ ID NO: 283060 - DNA, 15 bp, Homo sapiens
agatgaggaccaaat

SEQ ID NO: 283061 - DNA, 15 bp, Homo sapiens
aagatgaggaccaaa

SEQ ID NO: 283062 - DNA, 15 bp, Homo sapiens
aaagatgaggaccaa

SEQ ID NO: 283063 - DNA, 15 bp, Homo sapiens
aaaagatgaggacca

SEQ ID NO: 283064 - DNA, 15 bp, Homo sapiens
aaaaagatgaggacc

SEQ ID NO: 283065 - DNA, 15 bp, Homo sapiens
aaaaaagatgaggac

SEQ ID NO: 283066 - DNA, 15 bp, Homo sapiens
gaaaaaagatgagga

SEQ ID NO: 283067 - DNA, 15 bp, Homo sapiens
agaaaaaagatgagg

SEQ ID NO: 283068 - DNA, 15 bp, Homo sapiens
aagaaaaaagatgag

SEQ ID NO: 283069 - DNA, 15 bp, Homo sapiens
taagaaaaaagatga

SEQ ID NO: 283070 - DNA, 15 bp, Homo sapiens
ctaagaaaaaagatg

SEQ ID NO: 283071 - DNA, 15 bp, Homo sapiens
gctaagaaaaaagat

SEQ ID NO: 283072 - DNA, 15 bp, Homo sapiens
agctaagaaaaaaga

SEQ ID NO: 283073 - DNA, 15 bp, Homo sapiens
aagctaagaaaaaag

SEQ ID NO: 283074 - DNA, 15 bp, Homo sapiens
caagctaagaaaaaa

SEQ ID NO: 283075 - DNA, 15 bp, Homo sapiens
acaagctaagaaaaa

SEQ ID NO: 283076 - DNA, 15 bp, Homo sapiens
gacaagctaagaaaa

SEQ ID NO: 283077 - DNA, 15 bp, Homo sapiens
agacaagctaagaaa

SEQ ID NO: 283078 - DNA, 15 bp, Homo sapiens
tagacaagctaagaa

SEQ ID NO: 283079 - DNA, 15 bp, Homo sapiens
ctagacaagctaaga

SEQ ID NO: 283080 - DNA, 15 bp, Homo sapiens
actagacaagctaag

SEQ ID NO: 283081 - DNA, 15 bp, Homo sapiens
aactagacaagctaa

SEQ ID NO: 283082 - DNA, 15 bp, Homo sapiens
gaactagacaagcta

SEQ ID NO: 283083 - DNA, 15 bp, Homo sapiens
ggaactagacaagct

SEQ ID NO: 283084 - DNA, 15 bp, Homo sapiens
aggaactagacaagc

SEQ ID NO: 283085 - DNA, 15 bp, Homo sapiens
aaggaactagacaag

SEQ ID NO: 283086 - DNA, 15 bp, Homo sapiens
gaaggaactagacaa

SEQ ID NO: 283087 - DNA, 15 bp, Homo sapiens
ggaaggaactagaca

SEQ ID NO: 283088 - DNA, 15 bp, Homo sapiens
aggaaggaactagac

SEQ ID NO: 283089 - DNA, 15 bp, Homo sapiens
aaggaaggaactaga

SEQ ID NO: 283090 - DNA, 15 bp, Homo sapiens
aaaggaaggaactag

SEQ ID NO: 283091 - DNA, 15 bp, Homo sapiens
aaaaggaaggaacta

SEQ ID NO: 283092 - DNA, 15 bp, Homo sapiens
taaaaggaaggaact

SEQ ID NO: 283093 - DNA, 15 bp, Homo sapiens
ataaaaggaaggaac

SEQ ID NO: 283094 - DNA, 15 bp, Homo sapiens
tataaaaggaaggaa

SEQ ID NO: 283095 - DNA, 15 bp, Homo sapiens
atataaaaggaagga

SEQ ID NO: 283096 - DNA, 15 bp, Homo sapiens
tatataaaaggaagg

SEQ ID NO: 283097 - DNA, 15 bp, Homo sapiens
ttatataaaaggaag

SEQ ID NO: 283098 - DNA, 15 bp, Homo sapiens
attatataaaaggaa

SEQ ID NO: 283099 - DNA, 15 bp, Homo sapiens
aattatataaaagga

SEQ ID NO: 283100 - DNA, 15 bp, Homo sapiens
aaattatataaaagg

SEQ ID NO: 283101 - DNA, 15 bp, Homo sapiens
caaattatataaaag

SEQ ID NO: 283102 - DNA, 15 bp, Homo sapiens
acaaattatataaaa

SEQ ID NO: 283103 - DNA, 15 bp, Homo sapiens
aacaaattatataaa

SEQ ID NO: 283104 - DNA, 15 bp, Homo sapiens
gaacaaattatataa

SEQ ID NO: 283105 - DNA, 15 bp, Homo sapiens
tgaacaaattatata

SEQ ID NO: 283106 - DNA, 15 bp, Homo sapiens
atgaacaaattatat

SEQ ID NO: 283107 - DNA, 15 bp, Homo sapiens
aatgaacaaattata

SEQ ID NO: 283108 - DNA, 15 bp, Homo sapiens
taatgaacaaattat

SEQ ID NO: 283109 - DNA, 15 bp, Homo sapiens
ttaatgaacaaatta

SEQ ID NO: 283110 - DNA, 15 bp, Homo sapiens
attaatgaacaaatt

SEQ ID NO: 283111 - DNA, 15 bp, Homo sapiens
aattaatgaacaaat

SEQ ID NO: 283112 - DNA, 15 bp, Homo sapiens
aaattaatgaacaaa

SEQ ID NO: 283113 - DNA, 15 bp, Homo sapiens
gaaattaatgaacaa

SEQ ID NO: 283114 - DNA, 15 bp, Homo sapiens
ggaaattaatgaaca

SEQ ID NO: 283115 - DNA, 15 bp, Homo sapiens
aggaaattaatgaac

SEQ ID NO: 283116 - DNA, 15 bp, Homo sapiens
aaggaaattaatgaa

SEQ ID NO: 283117 - DNA, 15 bp, Homo sapiens
aaaggaaattaatga

SEQ ID NO: 283118 - DNA, 15 bp, Homo sapiens
aaaaggaaattaatg

SEQ ID NO: 283119 - DNA, 15 bp, Homo sapiens
aaaaaggaaattaat

SEQ ID NO: 283120 - DNA, 15 bp, Homo sapiens
cataaaaaggaaatt

SEQ ID NO: 283121 - DNA, 15 bp, Homo sapiens
tcataaaaaggaaat

SEQ ID NO: 283122 - DNA, 15 bp, Homo sapiens
atcataaaaaggaaa

SEQ ID NO: 283123 - DNA, 15 bp, Homo sapiens
tatcataaaaaggaa

SEQ ID NO: 283124 - DNA, 15 bp, Homo sapiens
gtatcataaaaagga

SEQ ID NO: 283125 - DNA, 15 bp, Homo sapiens
tgtatcataaaaagg

SEQ ID NO: 283126 - DNA, 15 bp, Homo sapiens
atgtatcataaaaag

SEQ ID NO: 283127 - DNA, 15 bp, Homo sapiens
aatgtatcataaaaa

SEQ ID NO: 283128 - DNA, 15 bp, Homo sapiens
aaatgtatcataaaa

SEQ ID NO: 283129 - DNA, 15 bp, Homo sapiens
aaaatgtatcataaa

SEQ ID NO: 283130 - DNA, 15 bp, Homo sapiens
aaaaatgtatcataa

SEQ ID NO: 283131 - DNA, 15 bp, Homo sapiens
taaaaatgtatcata

SEQ ID NO: 283132 - DNA, 15 bp, Homo sapiens
ataaaaatgtatcat

SEQ ID NO: 283133 - DNA, 15 bp, Homo sapiens
aataaaaatgtatca

SEQ ID NO: 283134 - DNA, 15 bp, Homo sapiens
caataaaaatgtatc

SEQ ID NO: 283135 - DNA, 15 bp, Homo sapiens
tcaataaaaatgtat

SEQ ID NO: 283136 - DNA, 15 bp, Homo sapiens
ttcaataaaaatgta

SEQ ID NO: 283137 - DNA, 15 bp, Homo sapiens
attcaataaaaatgt

SEQ ID NO: 283138 - DNA, 15 bp, Homo sapiens
aattcaataaaaatg

SEQ ID NO: 283139 - DNA, 15 bp, Homo sapiens
caattcaataaaaat

SEQ ID NO: 283140 - DNA, 15 bp, Homo sapiens
ccaattcaataaaaa

SEQ ID NO: 283141 - DNA, 15 bp, Homo sapiens
tccaattcaataaaa

SEQ ID NO: 283142 - DNA, 15 bp, Homo sapiens
atccaattcaataaa

SEQ ID NO: 283143 - DNA, 15 bp, Homo sapiens
aatccaattcaataa

SEQ ID NO: 283144 - DNA, 15 bp, Homo sapiens
aaatccaattcaata

SEQ ID NO: 283145 - DNA, 15 bp, Homo sapiens
taaatccaattcaat

SEQ ID NO: 283146 - DNA, 15 bp, Homo sapiens
ataaatccaattcaa

SEQ ID NO: 283147 - DNA, 15 bp, Homo sapiens
tataaatccaattca

SEQ ID NO: 283148 - DNA, 15 bp, Homo sapiens
ttataaatccaattc

SEQ ID NO: 283149 - DNA, 15 bp, Homo sapiens
attataaatccaatt

SEQ ID NO: 283150 - DNA, 15 bp, Homo sapiens
tattataaatccaat

SEQ ID NO: 283151 - DNA, 15 bp, Homo sapiens
ctattataaatccaa

SEQ ID NO: 283152 - DNA, 15 bp, Homo sapiens
tctattataaatcca

SEQ ID NO: 283153 - DNA, 15 bp, Homo sapiens
gtctattataaatcc

SEQ ID NO: 283154 - DNA, 15 bp, Homo sapiens
cgtctattataaatc

SEQ ID NO: 283155 - DNA, 15 bp, Homo sapiens
tcgtctattataaat

SEQ ID NO: 283156 - DNA, 15 bp, Homo sapiens
ttcgtctattataaa

SEQ ID NO: 283157 - DNA, 15 bp, Homo sapiens
attcgtctattataa

SEQ ID NO: 283158 - DNA, 15 bp, Homo sapiens
aattcgtctattata

SEQ ID NO: 283159 - DNA, 15 bp, Homo sapiens
taattcgtctattat

SEQ ID NO: 283160 - DNA, 15 bp, Homo sapiens
ataattcgtctatta

SEQ ID NO: 283161 - DNA, 15 bp, Homo sapiens
aataattcgtctatt

SEQ ID NO: 283162 - DNA, 15 bp, Homo sapiens
gaataattcgtctat

SEQ ID NO: 283163 - DNA, 15 bp, Homo sapiens
tgaataattcgtcta

SEQ ID NO: 283164 - DNA, 15 bp, Homo sapiens
ttgaataattcgtct

SEQ ID NO: 283165 - DNA, 15 bp, Homo sapiens
attgaataattcgtc

SEQ ID NO: 283166 - DNA, 15 bp, Homo sapiens
tattgaataattcgt

SEQ ID NO: 283167 - DNA, 15 bp, Homo sapiens
ttattgaataattcg

SEQ ID NO: 283168 - DNA, 15 bp, Homo sapiens
attattgaataattc

SEQ ID NO: 283169 - DNA, 15 bp, Homo sapiens
tattattgaataatt

SEQ ID NO: 283170 - DNA, 15 bp, Homo sapiens
atattattgaataat

SEQ ID NO: 283171 - DNA, 15 bp, Homo sapiens
catattattgaataa

SEQ ID NO: 283172 - DNA, 15 bp, Homo sapiens
acatattattgaata

SEQ ID NO: 283173 - DNA, 15 bp, Homo sapiens
tacatattattgaat

SEQ ID NO: 283174 - DNA, 15 bp, Homo sapiens
atacatattattgaa

SEQ ID NO: 283175 - DNA, 15 bp, Homo sapiens
aatacatattattga

SEQ ID NO: 283176 - DNA, 15 bp, Homo sapiens
aaatacatattattg

SEQ ID NO: 283177 - DNA, 15 bp, Homo sapiens
caaatacatattatt

SEQ ID NO: 283178 - DNA, 15 bp, Homo sapiens
ccaaatacatattat

SEQ ID NO: 283179 - DNA, 15 bp, Homo sapiens
tccaaatacatatta

SEQ ID NO: 283180 - DNA, 15 bp, Homo sapiens
atccaaatacatatt

SEQ ID NO: 283181 - DNA, 15 bp, Homo sapiens
gatccaaatacatat

SEQ ID NO: 283182 - DNA, 15 bp, Homo sapiens
tgatccaaatacata

SEQ ID NO: 283183 - DNA, 15 bp, Homo sapiens
gtgatccaaatacat

SEQ ID NO: 283184 - DNA, 15 bp, Homo sapiens
agtgatccaaataca

SEQ ID NO: 283185 - DNA, 15 bp, Homo sapiens
tagtgatccaaatac

SEQ ID NO: 283186 - DNA, 15 bp, Homo sapiens
ttagtgatccaaata

SEQ ID NO: 283187 - DNA, 15 bp, Homo sapiens
tttagtgatccaaat

SEQ ID NO: 283188 - DNA, 15 bp, Homo sapiens
gtttagtgatccaaa

SEQ ID NO: 283189 - DNA, 15 bp, Homo sapiens
tgtttagtgatccaa

SEQ ID NO: 283190 - DNA, 15 bp, Homo sapiens
ttgtttagtgatcca

SEQ ID NO: 283191 - DNA, 15 bp, Homo sapiens
tttgtttagtgatcc

SEQ ID NO: 283192 - DNA, 15 bp, Homo sapiens
atttgtttagtgatc

SEQ ID NO: 283193 - DNA, 15 bp, Homo sapiens
tatttgtttagtgat

SEQ ID NO: 283194 - DNA, 15 bp, Homo sapiens
atatttgtttagtga

SEQ ID NO: 283195 - DNA, 15 bp, Homo sapiens
tatatttgtttagtg

SEQ ID NO: 283196 - DNA, 15 bp, Homo sapiens
atatatttgtttagt

SEQ ID NO: 283197 - DNA, 15 bp, Homo sapiens
aatatatttgtttag

SEQ ID NO: 283198 - DNA, 15 bp, Homo sapiens
caatatatttgttta

SEQ ID NO: 283199 - DNA, 15 bp, Homo sapiens
tcaatatatttgttt

SEQ ID NO: 283200 - DNA, 15 bp, Homo sapiens
ctcaatatatttgtt

SEQ ID NO: 283201 - DNA, 15 bp, Homo sapiens
tctcaatatatttgt

SEQ ID NO: 283202 - DNA, 15 bp, Homo sapiens
ttctcaatatatttg

SEQ ID NO: 283203 - DNA, 15 bp, Homo sapiens
attctcaatatattt

SEQ ID NO: 283204 - DNA, 15 bp, Homo sapiens
tattctcaatatatt

SEQ ID NO: 283205 - DNA, 15 bp, Homo sapiens
ctattctcaatatat

SEQ ID NO: 283206 - DNA, 15 bp, Homo sapiens
gctattctcaatata

SEQ ID NO: 283207 - DNA, 15 bp, Homo sapiens
tgctattctcaatat

SEQ ID NO: 283208 - DNA, 15 bp, Homo sapiens
ttgctattctcaata

SEQ ID NO: 283209 - DNA, 15 bp, Homo sapiens
tttgctattctcaat

SEQ ID NO: 283210 - DNA, 15 bp, Homo sapiens
atttgctattctcaa

SEQ ID NO: 283211 - DNA, 15 bp, Homo sapiens
catttgctattctca

SEQ ID NO: 283212 - DNA, 15 bp, Homo sapiens
ccatttgctattctc

SEQ ID NO: 283213 - DNA, 15 bp, Homo sapiens
tccatttgctattct

SEQ ID NO: 283214 - DNA, 15 bp, Homo sapiens
atccatttgctattc

SEQ ID NO: 283215 - DNA, 15 bp, Homo sapiens
aatccatttgctatt

SEQ ID NO: 283216 - DNA, 15 bp, Homo sapiens
aaatccatttgctat

SEQ ID NO: 283217 - DNA, 15 bp, Homo sapiens
aaaatccatttgcta

SEQ ID NO: 283218 - DNA, 15 bp, Homo sapiens
taaaatccatttgct

SEQ ID NO: 283219 - DNA, 15 bp, Homo sapiens
ttaaaatccatttgc

SEQ ID NO: 283220 - DNA, 15 bp, Homo sapiens
gttaaaatccatttg

SEQ ID NO: 283221 - DNA, 15 bp, Homo sapiens
ggttaaaatccattt

SEQ ID NO: 283222 - DNA, 15 bp, Homo sapiens
gggttaaaatccatt

SEQ ID NO: 283223 - DNA, 15 bp, Homo sapiens
agggttaaaatccat

SEQ ID NO: 283224 - DNA, 15 bp, Homo sapiens
gagggttaaaatcca

SEQ ID NO: 283225 - DNA, 15 bp, Homo sapiens
ggagggttaaaatcc

SEQ ID NO: 283226 - DNA, 15 bp, Homo sapiens
aggagggttaaaatc

SEQ ID NO: 283227 - DNA, 15 bp, Homo sapiens
caggagggttaaaat

SEQ ID NO: 283228 - DNA, 15 bp, Homo sapiens
gcaggagggttaaaa

SEQ ID NO: 283229 - DNA, 15 bp, Homo sapiens
agcaggagggttaaa

SEQ ID NO: 283230 - DNA, 15 bp, Homo sapiens
tagcaggagggttaa

SEQ ID NO: 283231 - DNA, 15 bp, Homo sapiens
ttagcaggagggtta

SEQ ID NO: 283232 - DNA, 15 bp, Homo sapiens
gttagcaggagggtt

SEQ ID NO: 283233 - DNA, 15 bp, Homo sapiens
ggttagcaggagggt

SEQ ID NO: 283234 - DNA, 15 bp, Homo sapiens
gggttagcaggaggg

SEQ ID NO: 283235 - DNA, 15 bp, Homo sapiens
tgggttagcaggagg

SEQ ID NO: 283236 - DNA, 15 bp, Homo sapiens
ctgggttagcaggag

SEQ ID NO: 283237 - DNA, 15 bp, Homo sapiens
tctgggttagcagga

SEQ ID NO: 283238 - DNA, 15 bp, Homo sapiens
atctgggttagcagg

SEQ ID NO: 283239 - DNA, 15 bp, Homo sapiens
gatctgggttagcag

SEQ ID NO: 283240 - DNA, 15 bp, Homo sapiens
tgatctgggttagca

SEQ ID NO: 283241 - DNA, 15 bp, Homo sapiens
ttgatctgggttagc

SEQ ID NO: 283242 - DNA, 15 bp, Homo sapiens
attgatctgggttag

SEQ ID NO: 283243 - DNA, 15 bp, Homo sapiens
aattgatctgggtta

SEQ ID NO: 283244 - DNA, 15 bp, Homo sapiens
caattgatctgggtt

SEQ ID NO: 283245 - DNA, 15 bp, Homo sapiens
gcaattgatctgggt

SEQ ID NO: 283246 - DNA, 15 bp, Homo sapiens
agcaattgatctggg

SEQ ID NO: 283247 - DNA, 15 bp, Homo sapiens
tagcaattgatctgg

SEQ ID NO: 283248 - DNA, 15 bp, Homo sapiens
ctagcaattgatctg

SEQ ID NO: 283249 - DNA, 15 bp, Homo sapiens
actagcaattgatct

SEQ ID NO: 283250 - DNA, 15 bp, Homo sapiens
cactagcaattgatc

SEQ ID NO: 283251 - DNA, 15 bp, Homo sapiens
ccactagcaattgat

SEQ ID NO: 283252 - DNA, 15 bp, Homo sapiens
gccactagcaattga

SEQ ID NO: 283253 - DNA, 15 bp, Homo sapiens
agccactagcaattg

SEQ ID NO: 283254 - DNA, 15 bp, Homo sapiens
aagccactagcaatt

SEQ ID NO: 283255 - DNA, 15 bp, Homo sapiens
gaagccactagcaat

SEQ ID NO: 283256 - DNA, 15 bp, Homo sapiens
ggaagccactagcaa

SEQ ID NO: 283257 - DNA, 15 bp, Homo sapiens
gggaagccactagca

SEQ ID NO: 283258 - DNA, 15 bp, Homo sapiens
cgggaagccactagc

SEQ ID NO: 283259 - DNA, 15 bp, Homo sapiens
ccgggaagccactag

SEQ ID NO: 283260 - DNA, 15 bp, Homo sapiens
gccgggaagccacta

SEQ ID NO: 283261 - DNA, 15 bp, Homo sapiens
ggccgggaagccact

SEQ ID NO: 283262 - DNA, 15 bp, Homo sapiens
gggccgggaagccac

SEQ ID NO: 283263 - DNA, 15 bp, Homo sapiens
tgggccgggaagcca

SEQ ID NO: 283264 - DNA, 15 bp, Homo sapiens
atgggccgggaagcc

SEQ ID NO: 283265 - DNA, 15 bp, Homo sapiens
aatgggccgggaagc

SEQ ID NO: 283266 - DNA, 15 bp, Homo sapiens
caatgggccgggaag

SEQ ID NO: 283267 - DNA, 15 bp, Homo sapiens
acaatgggccgggaa

SEQ ID NO: 283268 - DNA, 15 bp, Homo sapiens
cacaatgggccggga

SEQ ID NO: 283269 - DNA, 15 bp, Homo sapiens
acacaatgggccggg

SEQ ID NO: 283270 - DNA, 15 bp, Homo sapiens
aacacaatgggccgg

SEQ ID NO: 283271 - DNA, 15 bp, Homo sapiens
taacacaatgggccg

SEQ ID NO: 283272 - DNA, 15 bp, Homo sapiens
ttaacacaatgggcc

SEQ ID NO: 283273 - DNA, 15 bp, Homo sapiens
cttaacacaatgggc

SEQ ID NO: 283274 - DNA, 15 bp, Homo sapiens
tcttaacacaatggg

SEQ ID NO: 283275 - DNA, 15 bp, Homo sapiens
ttcttaacacaatgg

SEQ ID NO: 283276 - DNA, 15 bp, Homo sapiens
cttcttaacacaatg

SEQ ID NO: 283277 - DNA, 15 bp, Homo sapiens
ccttcttaacacaat

SEQ ID NO: 283278 - DNA, 15 bp, Homo sapiens
tccttcttaacacaa

SEQ ID NO: 283279 - DNA, 15 bp, Homo sapiens
gtccttcttaacaca

SEQ ID NO: 283280 - DNA, 15 bp, Homo sapiens
agtccttcttaacac

SEQ ID NO: 283281 - DNA, 15 bp, Homo sapiens
gagtccttcttaaca

SEQ ID NO: 283282 - DNA, 15 bp, Homo sapiens
agagtccttcttaac

SEQ ID NO: 283283 - DNA, 15 bp, Homo sapiens
tagagtccttcttaa

SEQ ID NO: 283284 - DNA, 15 bp, Homo sapiens
ctagagtccttctta

SEQ ID NO: 283285 - DNA, 15 bp, Homo sapiens
tctagagtccttctt

SEQ ID NO: 283286 - DNA, 15 bp, Homo sapiens
atctagagtccttct

SEQ ID NO: 283287 - DNA, 15 bp, Homo sapiens
aatctagagtccttc

SEQ ID NO: 283288 - DNA, 15 bp, Homo sapiens
taatctagagtcctt

SEQ ID NO: 283289 - DNA, 15 bp, Homo sapiens
ctaatctagagtcct

SEQ ID NO: 283290 - DNA, 15 bp, Homo sapiens
gctaatctagagtcc

SEQ ID NO: 283291 - DNA, 15 bp, Homo sapiens
tgctaatctagagtc

SEQ ID NO: 283292 - DNA, 15 bp, Homo sapiens
atgctaatctagagt

SEQ ID NO: 283293 - DNA, 15 bp, Homo sapiens
gatgctaatctagag

SEQ ID NO: 283294 - DNA, 15 bp, Homo sapiens
tgatgctaatctaga

SEQ ID NO: 283295 - DNA, 15 bp, Homo sapiens
ctgatgctaatctag

SEQ ID NO: 283296 - DNA, 15 bp, Homo sapiens
cctgatgctaatcta

SEQ ID NO: 283297 - DNA, 15 bp, Homo sapiens
acctgatgctaatct

SEQ ID NO: 283298 - DNA, 15 bp, Homo sapiens
gacctgatgctaatc

SEQ ID NO: 283299 - DNA, 15 bp, Homo sapiens
agacctgatgctaat

SEQ ID NO: 283300 - DNA, 15 bp, Homo sapiens
gagacctgatgctaa

SEQ ID NO: 283301 - DNA, 15 bp, Homo sapiens
agagacctgatgcta

SEQ ID NO: 283302 - DNA, 15 bp, Homo sapiens
tagagacctgatgct

SEQ ID NO: 283303 - DNA, 15 bp, Homo sapiens
gtagagacctgatgc

SEQ ID NO: 283304 - DNA, 15 bp, Homo sapiens
tgtagagacctgatg

SEQ ID NO: 283305 - DNA, 15 bp, Homo sapiens
ctgtagagacctgat

SEQ ID NO: 283306 - DNA, 15 bp, Homo sapiens
cctgtagagacctga

SEQ ID NO: 283307 - DNA, 15 bp, Homo sapiens
ccctgtagagacctg

SEQ ID NO: 283308 - DNA, 15 bp, Homo sapiens
tccctgtagagacct

SEQ ID NO: 283309 - DNA, 15 bp, Homo sapiens
ctccctgtagagacc

SEQ ID NO: 283310 - DNA, 15 bp, Homo sapiens
cctccctgtagagac

SEQ ID NO: 283311 - DNA, 15 bp, Homo sapiens
ccctccctgtagaga

SEQ ID NO: 283312 - DNA, 15 bp, Homo sapiens
cccctccctgtagag

SEQ ID NO: 283313 - DNA, 15 bp, Homo sapiens
acccctccctgtaga

SEQ ID NO: 283314 - DNA, 15 bp, Homo sapiens
tacccctccctgtag

SEQ ID NO: 283315 - DNA, 15 bp, Homo sapiens
gtacccctccctgta

SEQ ID NO: 283316 - DNA, 15 bp, Homo sapiens
tgtacccctccctgt

SEQ ID NO: 283317 - DNA, 15 bp, Homo sapiens
gtgtacccctccctg

SEQ ID NO: 283318 - DNA, 15 bp, Homo sapiens
agtgtacccctccct

SEQ ID NO: 283319 - DNA, 15 bp, Homo sapiens
aagtgtacccctccc

SEQ ID NO: 283320 - DNA, 15 bp, Homo sapiens
taagtgtacccctcc

SEQ ID NO: 283321 - DNA, 15 bp, Homo sapiens
ctaagtgtacccctc

SEQ ID NO: 283322 - DNA, 15 bp, Homo sapiens
actaagtgtacccct

SEQ ID NO: 283323 - DNA, 15 bp, Homo sapiens
cactaagtgtacccc

SEQ ID NO: 283324 - DNA, 15 bp, Homo sapiens
tcactaagtgtaccc

SEQ ID NO: 283325 - DNA, 15 bp, Homo sapiens
atcactaagtgtacc

SEQ ID NO: 283326 - DNA, 15 bp, Homo sapiens
catcactaagtgtac

SEQ ID NO: 283327 - DNA, 15 bp, Homo sapiens
acatcactaagtgta

SEQ ID NO: 283328 - DNA, 15 bp, Homo sapiens
cacatcactaagtgt

SEQ ID NO: 283329 - DNA, 15 bp, Homo sapiens
tcacatcactaagtg

SEQ ID NO: 283330 - DNA, 15 bp, Homo sapiens
atcacatcactaagt

SEQ ID NO: 283331 - DNA, 15 bp, Homo sapiens
catcacatcactaag

SEQ ID NO: 283332 - DNA, 15 bp, Homo sapiens
ccatcacatcactaa

SEQ ID NO: 283333 - DNA, 15 bp, Homo sapiens
gccatcacatcacta

SEQ ID NO: 283334 - DNA, 15 bp, Homo sapiens
agccatcacatcact

SEQ ID NO: 283335 - DNA, 15 bp, Homo sapiens
cagccatcacatcac

SEQ ID NO: 283336 - DNA, 15 bp, Homo sapiens
gcagccatcacatca

SEQ ID NO: 283337 - DNA, 15 bp, Homo sapiens
ggcagccatcacatc

SEQ ID NO: 283338 - DNA, 15 bp, Homo sapiens
tggcagccatcacat

SEQ ID NO: 283339 - DNA, 15 bp, Homo sapiens
ttggcagccatcaca

SEQ ID NO: 283340 - DNA, 15 bp, Homo sapiens
cttggcagccatcac

SEQ ID NO: 283341 - DNA, 15 bp, Homo sapiens
acttggcagccatca

SEQ ID NO: 283342 - DNA, 15 bp, Homo sapiens
tacttggcagccatc

SEQ ID NO: 283343 - DNA, 15 bp, Homo sapiens
ttacttggcagccat

SEQ ID NO: 283344 - DNA, 15 bp, Homo sapiens
tttacttggcagcca

SEQ ID NO: 283345 - DNA, 15 bp, Homo sapiens
ttttacttggcagcc

SEQ ID NO: 283346 - DNA, 15 bp, Homo sapiens
cttttacttggcagc

SEQ ID NO: 283347 - DNA, 15 bp, Homo sapiens
gcttttacttggcag

SEQ ID NO: 283348 - DNA, 15 bp, Homo sapiens
agcttttacttggca

SEQ ID NO: 283349 - DNA, 15 bp, Homo sapiens
tagcttttacttggc

SEQ ID NO: 283350 - DNA, 15 bp, Homo sapiens
atagcttttacttgg

SEQ ID NO: 283351 - DNA, 15 bp, Homo sapiens
catagcttttacttg

SEQ ID NO: 283352 - DNA, 15 bp, Homo sapiens
tcatagcttttactt

SEQ ID NO: 283353 - DNA, 15 bp, Homo sapiens
ctcatagcttttact

SEQ ID NO: 283354 - DNA, 15 bp, Homo sapiens
cctcatagcttttac

SEQ ID NO: 283355 - DNA, 15 bp, Homo sapiens
acctcatagctttta

SEQ ID NO: 283356 - DNA, 15 bp, Homo sapiens
cacctcatagctttt

SEQ ID NO: 283357 - DNA, 15 bp, Homo sapiens
ccacctcatagcttt

SEQ ID NO: 283358 - DNA, 15 bp, Homo sapiens
accacctcatagctt

SEQ ID NO: 283359 - DNA, 15 bp, Homo sapiens
caccacctcatagct

SEQ ID NO: 283360 - DNA, 15 bp, Homo sapiens
tcaccacctcatagc

SEQ ID NO: 283361 - DNA, 15 bp, Homo sapiens
atcaccacctcatag

SEQ ID NO: 283362 - DNA, 15 bp, Homo sapiens
catcaccacctcata

SEQ ID NO: 283363 - DNA, 15 bp, Homo sapiens
ccatcaccacctcat

SEQ ID NO: 283364 - DNA, 15 bp, Homo sapiens
accatcaccacctca

SEQ ID NO: 283365 - DNA, 15 bp, Homo sapiens
caccatcaccacctc

SEQ ID NO: 283366 - DNA, 15 bp, Homo sapiens
tcaccatcaccacct

SEQ ID NO: 283367 - DNA, 15 bp, Homo sapiens
atcaccatcaccacc

SEQ ID NO: 283368 - DNA, 15 bp, Homo sapiens
catcaccatcaccac

SEQ ID NO: 283369 - DNA, 15 bp, Homo sapiens
gcatcaccatcacca

SEQ ID NO: 283370 - DNA, 15 bp, Homo sapiens
agcatcaccatcacc

SEQ ID NO: 283371 - DNA, 15 bp, Homo sapiens
tagcatcaccatcac

SEQ ID NO: 283372 - DNA, 15 bp, Homo sapiens
gtagcatcaccatca

SEQ ID NO: 283373 - DNA, 15 bp, Homo sapiens
ggtagcatcaccatc

SEQ ID NO: 283374 - DNA, 15 bp, Homo sapiens
gggtagcatcaccat

SEQ ID NO: 283375 - DNA, 15 bp, Homo sapiens
agggtagcatcacca

SEQ ID NO: 283376 - DNA, 15 bp, Homo sapiens
gagggtagcatcacc

SEQ ID NO: 283377 - DNA, 15 bp, Homo sapiens
agagggtagcatcac

SEQ ID NO: 283378 - DNA, 15 bp, Homo sapiens
aagagggtagcatca

SEQ ID NO: 283379 - DNA, 15 bp, Homo sapiens
taagagggtagcatc

SEQ ID NO: 283380 - DNA, 15 bp, Homo sapiens
ataagagggtagcat

SEQ ID NO: 283381 - DNA, 15 bp, Homo sapiens
gataagagggtagca

SEQ ID NO: 283382 - DNA, 15 bp, Homo sapiens
agataagagggtagc

SEQ ID NO: 283383 - DNA, 15 bp, Homo sapiens
gagataagagggtag

SEQ ID NO: 283384 - DNA, 15 bp, Homo sapiens
tgagataagagggta

SEQ ID NO: 283385 - DNA, 15 bp, Homo sapiens
ctgagataagagggt

SEQ ID NO: 283386 - DNA, 15 bp, Homo sapiens
tctgagataagaggg

SEQ ID NO: 283387 - DNA, 15 bp, Homo sapiens
ctctgagataagagg

SEQ ID NO: 283388 - DNA, 15 bp, Homo sapiens
cctctgagataagag

SEQ ID NO: 283389 - DNA, 15 bp, Homo sapiens
gcctctgagataaga

SEQ ID NO: 283390 - DNA, 15 bp, Homo sapiens
tgcctctgagataag

SEQ ID NO: 283391 - DNA, 15 bp, Homo sapiens
gtgcctctgagataa

SEQ ID NO: 283392 - DNA, 15 bp, Homo sapiens
cgtgcctctgagata

SEQ ID NO: 283393 - DNA, 15 bp, Homo sapiens
acgtgcctctgagat

SEQ ID NO: 283394 - DNA, 15 bp, Homo sapiens
aacgtgcctctgaga

SEQ ID NO: 283395 - DNA, 15 bp, Homo sapiens
aaacgtgcctctgag

SEQ ID NO: 283396 - DNA, 15 bp, Homo sapiens
taaacgtgcctctga

SEQ ID NO: 283397 - DNA, 15 bp, Homo sapiens
gtaaacgtgcctctg

SEQ ID NO: 283398 - DNA, 15 bp, Homo sapiens
tgtaaacgtgcctct

SEQ ID NO: 283399 - DNA, 15 bp, Homo sapiens
atgtaaacgtgcctc

SEQ ID NO: 283400 - DNA, 15 bp, Homo sapiens
aatgtaaacgtgcct

SEQ ID NO: 283401 - DNA, 15 bp, Homo sapiens
aaatgtaaacgtgcc

SEQ ID NO: 283402 - DNA, 15 bp, Homo sapiens
gaaatgtaaacgtgc

SEQ ID NO: 283403 - DNA, 15 bp, Homo sapiens
tgaaatgtaaacgtg

SEQ ID NO: 283404 - DNA, 15 bp, Homo sapiens
atgaaatgtaaacgt

SEQ ID NO: 283405 - DNA, 15 bp, Homo sapiens
tatgaaatgtaaacg

SEQ ID NO: 283406 - DNA, 15 bp, Homo sapiens
atatgaaatgtaaac

SEQ ID NO: 283407 - DNA, 15 bp, Homo sapiens
tatatgaaatgtaaa

SEQ ID NO: 283408 - DNA, 15 bp, Homo sapiens
ctatatgaaatgtaa

SEQ ID NO: 283409 - DNA, 15 bp, Homo sapiens
actatatgaaatgta

SEQ ID NO: 283410 - DNA, 15 bp, Homo sapiens
tactatatgaaatgt

SEQ ID NO: 283411 - DNA, 15 bp, Homo sapiens
gtactatatgaaatg

SEQ ID NO: 283412 - DNA, 15 bp, Homo sapiens
tgtactatatgaaat

SEQ ID NO: 283413 - DNA, 15 bp, Homo sapiens
atgtactatatgaaa

SEQ ID NO: 283414 - DNA, 15 bp, Homo sapiens
aatgtactatatgaa

SEQ ID NO: 283415 - DNA, 15 bp, Homo sapiens
taatgtactatatga

SEQ ID NO: 283416 - DNA, 15 bp, Homo sapiens
gtaatgtactatatg

SEQ ID NO: 283417 - DNA, 15 bp, Homo sapiens
tgtaatgtactatat

SEQ ID NO: 283418 - DNA, 15 bp, Homo sapiens
ctgtaatgtactata

SEQ ID NO: 283419 - DNA, 15 bp, Homo sapiens
cctgtaatgtactat

SEQ ID NO: 283420 - DNA, 15 bp, Homo sapiens
acctgtaatgtacta

SEQ ID NO: 283421 - DNA, 15 bp, Homo sapiens
cacctgtaatgtact

SEQ ID NO: 283422 - DNA, 15 bp, Homo sapiens
tcacctgtaatgtac

SEQ ID NO: 283423 - DNA, 15 bp, Homo sapiens
gtcacctgtaatgta

SEQ ID NO: 283424 - DNA, 15 bp, Homo sapiens
agtcacctgtaatgt

SEQ ID NO: 283425 - DNA, 15 bp, Homo sapiens
tagtcacctgtaatg

SEQ ID NO: 283426 - DNA, 15 bp, Homo sapiens
ttagtcacctgtaat

SEQ ID NO: 283427 - DNA, 15 bp, Homo sapiens
tttagtcacctgtaa

SEQ ID NO: 283428 - DNA, 15 bp, Homo sapiens
ctttagtcacctgta

SEQ ID NO: 283429 - DNA, 15 bp, Homo sapiens
cctttagtcacctgt

SEQ ID NO: 283430 - DNA, 15 bp, Homo sapiens
acctttagtcacctg

SEQ ID NO: 283431 - DNA, 15 bp, Homo sapiens
gacctttagtcacct

SEQ ID NO: 283432 - DNA, 15 bp, Homo sapiens
tgacctttagtcacc

SEQ ID NO: 283433 - DNA, 15 bp, Homo sapiens
atgacctttagtcac

SEQ ID NO: 283434 - DNA, 15 bp, Homo sapiens
catgacctttagtca

SEQ ID NO: 283435 - DNA, 15 bp, Homo sapiens
ccatgacctttagtc

SEQ ID NO: 283436 - DNA, 15 bp, Homo sapiens
accatgacctttagt

SEQ ID NO: 283437 - DNA, 15 bp, Homo sapiens
aaccatgacctttag

SEQ ID NO: 283438 - DNA, 15 bp, Homo sapiens
caaccatgaccttta

SEQ ID NO: 283439 - DNA, 15 bp, Homo sapiens
acaaccatgaccttt

SEQ ID NO: 283440 - DNA, 15 bp, Homo sapiens
cacaaccatgacctt

SEQ ID NO: 283441 - DNA, 15 bp, Homo sapiens
gcacaaccatgacct

SEQ ID NO: 283442 - DNA, 15 bp, Homo sapiens
tgcacaaccatgacc

SEQ ID NO: 283443 - DNA, 15 bp, Homo sapiens
atgcacaaccatgac

SEQ ID NO: 283444 - DNA, 15 bp, Homo sapiens
gatgcacaaccatga

SEQ ID NO: 283445 - DNA, 15 bp, Homo sapiens
tgatgcacaaccatg

SEQ ID NO: 283446 - DNA, 15 bp, Homo sapiens
ctgatgcacaaccat

SEQ ID NO: 283447 - DNA, 15 bp, Homo sapiens
tctgatgcacaacca

SEQ ID NO: 283448 - DNA, 15 bp, Homo sapiens
ctctgatgcacaacc

SEQ ID NO: 283449 - DNA, 15 bp, Homo sapiens
tctctgatgcacaac

SEQ ID NO: 283450 - DNA, 15 bp, Homo sapiens
ctctctgatgcacaa

SEQ ID NO: 283451 - DNA, 15 bp, Homo sapiens
cctctctgatgcaca

SEQ ID NO: 283452 - DNA, 15 bp, Homo sapiens
ccctctctgatgcac

SEQ ID NO: 283453 - DNA, 15 bp, Homo sapiens
accctctctgatgca

SEQ ID NO: 283454 - DNA, 15 bp, Homo sapiens
taccctctctgatgc

SEQ ID NO: 283455 - DNA, 15 bp, Homo sapiens
ttaccctctctgatg

SEQ ID NO: 283456 - DNA, 15 bp, Homo sapiens
cttaccctctctgat

SEQ ID NO: 283457 - DNA, 15 bp, Homo sapiens
tcttaccctctctga

SEQ ID NO: 283458 - DNA, 15 bp, Homo sapiens
atcttaccctctctg

SEQ ID NO: 283459 - DNA, 15 bp, Homo sapiens
catcttaccctctct

SEQ ID NO: 283460 - DNA, 15 bp, Homo sapiens
tcatcttaccctctc

SEQ ID NO: 283461 - DNA, 15 bp, Homo sapiens
atcatcttaccctct

SEQ ID NO: 283462 - DNA, 15 bp, Homo sapiens
catcatcttaccctc

SEQ ID NO: 283463 - DNA, 15 bp, Homo sapiens
tcatcatcttaccct

SEQ ID NO: 283464 - DNA, 15 bp, Homo sapiens
atcatcatcttaccc

SEQ ID NO: 283465 - DNA, 15 bp, Homo sapiens
gatcatcatcttacc

SEQ ID NO: 283466 - DNA, 15 bp, Homo sapiens
tgatcatcatcttac

SEQ ID NO: 283467 - DNA, 15 bp, Homo sapiens
ctgatcatcatctta

SEQ ID NO: 283468 - DNA, 15 bp, Homo sapiens
cctgatcatcatctt

SEQ ID NO: 283469 - DNA, 15 bp, Homo sapiens
tcctgatcatcatct

SEQ ID NO: 283470 - DNA, 15 bp, Homo sapiens
ctcctgatcatcatc

SEQ ID NO: 283471 - DNA, 15 bp, Homo sapiens
tctcctgatcatcat

SEQ ID NO: 283472 - DNA, 15 bp, Homo sapiens
ttctcctgatcatca

SEQ ID NO: 283473 - DNA, 15 bp, Homo sapiens
cttctcctgatcatc

SEQ ID NO: 283474 - DNA, 15 bp, Homo sapiens
gcttctcctgatcat

SEQ ID NO: 283475 - DNA, 15 bp, Homo sapiens
agcttctcctgatca

SEQ ID NO: 283476 - DNA, 15 bp, Homo sapiens
aagcttctcctgatc

SEQ ID NO: 283477 - DNA, 15 bp, Homo sapiens
gaagcttctcctgat

SEQ ID NO: 283478 - DNA, 15 bp, Homo sapiens
tgaagcttctcctga

SEQ ID NO: 283479 - DNA, 15 bp, Homo sapiens
ttgaagcttctcctg

SEQ ID NO: 283480 - DNA, 15 bp, Homo sapiens
attgaagcttctcct

SEQ ID NO: 283481 - DNA, 15 bp, Homo sapiens
tattgaagcttctcc

SEQ ID NO: 283482 - DNA, 15 bp, Homo sapiens
atattgaagcttctc

SEQ ID NO: 283483 - DNA, 15 bp, Homo sapiens
aatattgaagcttct

SEQ ID NO: 283484 - DNA, 15 bp, Homo sapiens
taatattgaagcttc

SEQ ID NO: 283485 - DNA, 15 bp, Homo sapiens
gtaatattgaagctt

SEQ ID NO: 283486 - DNA, 15 bp, Homo sapiens
ggtaatattgaagct

SEQ ID NO: 283487 - DNA, 15 bp, Homo sapiens
tggtaatattgaagc

SEQ ID NO: 283488 - DNA, 15 bp, Homo sapiens
atggtaatattgaag

SEQ ID NO: 283489 - DNA, 15 bp, Homo sapiens
aatggtaatattgaa

SEQ ID NO: 283490 - DNA, 15 bp, Homo sapiens
aaatggtaatattga

SEQ ID NO: 283491 - DNA, 15 bp, Homo sapiens
taaatggtaatattg

SEQ ID NO: 283492 - DNA, 15 bp, Homo sapiens
ataaatggtaatatt

SEQ ID NO: 283493 - DNA, 15 bp, Homo sapiens
aataaatggtaatat

SEQ ID NO: 283494 - DNA, 15 bp, Homo sapiens
aaataaatggtaata

SEQ ID NO: 283495 - DNA, 15 bp, Homo sapiens
taaataaatggtaat

SEQ ID NO: 283496 - DNA, 15 bp, Homo sapiens
ataaataaatggtaa

SEQ ID NO: 283497 - DNA, 15 bp, Homo sapiens
aataaataaatggta

SEQ ID NO: 283498 - DNA, 15 bp, Homo sapiens
caataaataaatggt

SEQ ID NO: 283499 - DNA, 15 bp, Homo sapiens
tcaataaataaatgg

SEQ ID NO: 283500 - DNA, 15 bp, Homo sapiens
atcaataaataaatg

SEQ ID NO: 283501 - DNA, 15 bp, Homo sapiens
aatcaataaataaat

SEQ ID NO: 283502 - DNA, 15 bp, Homo sapiens
gaatcaataaataaa

SEQ ID NO: 283503 - DNA, 15 bp, Homo sapiens
tgaatcaataaataa

SEQ ID NO: 283504 - DNA, 15 bp, Homo sapiens
ttgaatcaataaata

SEQ ID NO: 283505 - DNA, 15 bp, Homo sapiens
gttgaatcaataaat

SEQ ID NO: 283506 - DNA, 15 bp, Homo sapiens
tgttgaatcaataaa

SEQ ID NO: 283507 - DNA, 15 bp, Homo sapiens
ctgttgaatcaataa

SEQ ID NO: 283508 - DNA, 15 bp, Homo sapiens
actgttgaatcaata

SEQ ID NO: 283509 - DNA, 15 bp, Homo sapiens
aactgttgaatcaat

SEQ ID NO: 283510 - DNA, 15 bp, Homo sapiens
taactgttgaatcaa

SEQ ID NO: 283511 - DNA, 15 bp, Homo sapiens
ctaactgttgaatca

SEQ ID NO: 283512 - DNA, 15 bp, Homo sapiens
actaactgttgaatc

SEQ ID NO: 283513 - DNA, 15 bp, Homo sapiens
aactaactgttgaat

SEQ ID NO: 283514 - DNA, 15 bp, Homo sapiens
taactaactgttgaa

SEQ ID NO: 283515 - DNA, 15 bp, Homo sapiens
ataactaactgttga

SEQ ID NO: 283516 - DNA, 15 bp, Homo sapiens
aataactaactgttg

SEQ ID NO: 283517 - DNA, 15 bp, Homo sapiens
aaataactaactgtt

SEQ ID NO: 283518 - DNA, 15 bp, Homo sapiens
taaataactaactgt

SEQ ID NO: 283519 - DNA, 15 bp, Homo sapiens
ataaataactaactg

SEQ ID NO: 283520 - DNA, 15 bp, Homo sapiens
aataaataactaact

SEQ ID NO: 283521 - DNA, 15 bp, Homo sapiens
taataaataactaac

SEQ ID NO: 283522 - DNA, 15 bp, Homo sapiens
ctaataaataactaa

SEQ ID NO: 283523 - DNA, 15 bp, Homo sapiens
tctaataaataacta

SEQ ID NO: 283524 - DNA, 15 bp, Homo sapiens
ttctaataaataact

SEQ ID NO: 283525 - DNA, 15 bp, Homo sapiens
attctaataaataac

SEQ ID NO: 283526 - DNA, 15 bp, Homo sapiens
aattctaataaataa

SEQ ID NO: 283527 - DNA, 15 bp, Homo sapiens
aaattctaataaata

SEQ ID NO: 283528 - DNA, 15 bp, Homo sapiens
taaattctaataaat

SEQ ID NO: 283529 - DNA, 15 bp, Homo sapiens
gtaaattctaataaa

SEQ ID NO: 283530 - DNA, 15 bp, Homo sapiens
tgtaaattctaataa

SEQ ID NO: 283531 - DNA, 15 bp, Homo sapiens
ttgtaaattctaata

SEQ ID NO: 283532 - DNA, 15 bp, Homo sapiens
attgtaaattctaat

SEQ ID NO: 283533 - DNA, 15 bp, Homo sapiens
cattgtaaattctaa

SEQ ID NO: 283534 - DNA, 15 bp, Homo sapiens
acattgtaaattcta

SEQ ID NO: 283535 - DNA, 15 bp, Homo sapiens
gacattgtaaattct

SEQ ID NO: 283536 - DNA, 15 bp, Homo sapiens
agacattgtaaattc

SEQ ID NO: 283537 - DNA, 15 bp, Homo sapiens
gagacattgtaaatt

SEQ ID NO: 283538 - DNA, 15 bp, Homo sapiens
tgagacattgtaaat

SEQ ID NO: 283539 - DNA, 15 bp, Homo sapiens
ttgagacattgtaaa

SEQ ID NO: 283540 - DNA, 15 bp, Homo sapiens
cttgagacattgtaa

SEQ ID NO: 283541 - DNA, 15 bp, Homo sapiens
gcttgagacattgta

SEQ ID NO: 283542 - DNA, 15 bp, Homo sapiens
tgcttgagacattgt

SEQ ID NO: 283543 - DNA, 15 bp, Homo sapiens
atgcttgagacattg

SEQ ID NO: 283544 - DNA, 15 bp, Homo sapiens
catgcttgagacatt

SEQ ID NO: 283545 - DNA, 15 bp, Homo sapiens
tcatgcttgagacat

SEQ ID NO: 283546 - DNA, 15 bp, Homo sapiens
atcatgcttgagaca

SEQ ID NO: 283547 - DNA, 15 bp, Homo sapiens
tatcatgcttgagac

SEQ ID NO: 283548 - DNA, 15 bp, Homo sapiens
atatcatgcttgaga

SEQ ID NO: 283549 - DNA, 15 bp, Homo sapiens
aatatcatgcttgag

SEQ ID NO: 283550 - DNA, 15 bp, Homo sapiens
taatatcatgcttga

SEQ ID NO: 283551 - DNA, 15 bp, Homo sapiens
gtaatatcatgcttg

SEQ ID NO: 283552 - DNA, 15 bp, Homo sapiens
cgtaatatcatgctt

SEQ ID NO: 283553 - DNA, 15 bp, Homo sapiens
acgtaatatcatgct

SEQ ID NO: 283554 - DNA, 15 bp, Homo sapiens
cacgtaatatcatgc

SEQ ID NO: 283555 - DNA, 15 bp, Homo sapiens
gcacgtaatatcatg

SEQ ID NO: 283556 - DNA, 15 bp, Homo sapiens
agcacgtaatatcat

SEQ ID NO: 283557 - DNA, 15 bp, Homo sapiens
tagcacgtaatatca

SEQ ID NO: 283558 - DNA, 15 bp, Homo sapiens
ctagcacgtaatatc

SEQ ID NO: 283559 - DNA, 15 bp, Homo sapiens
cctagcacgtaatat

SEQ ID NO: 283560 - DNA, 15 bp, Homo sapiens
acctagcacgtaata

SEQ ID NO: 283561 - DNA, 15 bp, Homo sapiens
aacctagcacgtaat

SEQ ID NO: 283562 - DNA, 15 bp, Homo sapiens
taacctagcacgtaa

SEQ ID NO: 283563 - DNA, 15 bp, Homo sapiens
ttaacctagcacgta

SEQ ID NO: 283564 - DNA, 15 bp, Homo sapiens
tttaacctagcacgt

SEQ ID NO: 283565 - DNA, 15 bp, Homo sapiens
ctttaacctagcacg

SEQ ID NO: 283566 - DNA, 15 bp, Homo sapiens
actttaacctagcac

SEQ ID NO: 283567 - DNA, 15 bp, Homo sapiens
cactttaacctagca

SEQ ID NO: 283568 - DNA, 15 bp, Homo sapiens
ccactttaacctagc

SEQ ID NO: 283569 - DNA, 15 bp, Homo sapiens
accactttaacctag

SEQ ID NO: 283570 - DNA, 15 bp, Homo sapiens
caccactttaaccta

SEQ ID NO: 283571 - DNA, 15 bp, Homo sapiens
ccaccactttaacct

SEQ ID NO: 283572 - DNA, 15 bp, Homo sapiens
tccaccactttaacc

SEQ ID NO: 283573 - DNA, 15 bp, Homo sapiens
ttccaccactttaac

SEQ ID NO: 283574 - DNA, 15 bp, Homo sapiens
cttccaccactttaa

SEQ ID NO: 283575 - DNA, 15 bp, Homo sapiens
tcttccaccacttta

SEQ ID NO: 283576 - DNA, 15 bp, Homo sapiens
atcttccaccacttt

SEQ ID NO: 283577 - DNA, 15 bp, Homo sapiens
catcttccaccactt

SEQ ID NO: 283578 - DNA, 15 bp, Homo sapiens
acatcttccaccact

SEQ ID NO: 283579 - DNA, 15 bp, Homo sapiens
tacatcttccaccac

SEQ ID NO: 283580 - DNA, 15 bp, Homo sapiens
atacatcttccacca

SEQ ID NO: 283581 - DNA, 15 bp, Homo sapiens
tatacatcttccacc

SEQ ID NO: 283582 - DNA, 15 bp, Homo sapiens
atatacatcttccac

SEQ ID NO: 283583 - DNA, 15 bp, Homo sapiens
catatacatcttcca

SEQ ID NO: 283584 - DNA, 15 bp, Homo sapiens
acatatacatcttcc

SEQ ID NO: 283585 - DNA, 15 bp, Homo sapiens
aacatatacatcttc

SEQ ID NO: 283586 - DNA, 15 bp, Homo sapiens
gaacatatacatctt

SEQ ID NO: 283587 - DNA, 15 bp, Homo sapiens
ggaacatatacatct

SEQ ID NO: 283588 - DNA, 15 bp, Homo sapiens
gggaacatatacatc

SEQ ID NO: 283589 - DNA, 15 bp, Homo sapiens
agggaacatatacat

SEQ ID NO: 283590 - DNA, 15 bp, Homo sapiens
cagggaacatataca

SEQ ID NO: 283591 - DNA, 15 bp, Homo sapiens
gcagggaacatatac

SEQ ID NO: 283592 - DNA, 15 bp, Homo sapiens
agcagggaacatata

SEQ ID NO: 283593 - DNA, 15 bp, Homo sapiens
gagcagggaacatat

SEQ ID NO: 283594 - DNA, 15 bp, Homo sapiens
tgagcagggaacata

SEQ ID NO: 283595 - DNA, 15 bp, Homo sapiens
ctgagcagggaacat

SEQ ID NO: 283596 - DNA, 15 bp, Homo sapiens
gctgagcagggaaca

SEQ ID NO: 283597 - DNA, 15 bp, Homo sapiens
agctgagcagggaac

SEQ ID NO: 283598 - DNA, 15 bp, Homo sapiens
tagctgagcagggaa

SEQ ID NO: 283599 - DNA, 15 bp, Homo sapiens
ctagctgagcaggga

SEQ ID NO: 283600 - DNA, 15 bp, Homo sapiens
tctagctgagcaggg

SEQ ID NO: 283601 - DNA, 15 bp, Homo sapiens
ttctagctgagcagg

SEQ ID NO: 283602 - DNA, 15 bp, Homo sapiens
gttctagctgagcag

SEQ ID NO: 283603 - DNA, 15 bp, Homo sapiens
agttctagctgagca

SEQ ID NO: 283604 - DNA, 15 bp, Homo sapiens
aagttctagctgagc

SEQ ID NO: 283605 - DNA, 15 bp, Homo sapiens
taagttctagctgag

SEQ ID NO: 283606 - DNA, 15 bp, Homo sapiens
gtaagttctagctga

SEQ ID NO: 283607 - DNA, 15 bp, Homo sapiens
tgtaagttctagctg

SEQ ID NO: 283608 - DNA, 15 bp, Homo sapiens
ctgtaagttctagct

SEQ ID NO: 283609 - DNA, 15 bp, Homo sapiens
actgtaagttctagc

SEQ ID NO: 283610 - DNA, 15 bp, Homo sapiens
gactgtaagttctag

SEQ ID NO: 283611 - DNA, 15 bp, Homo sapiens
tgactgtaagttcta

SEQ ID NO: 283612 - DNA, 15 bp, Homo sapiens
ttgactgtaagttct

SEQ ID NO: 283613 - DNA, 15 bp, Homo sapiens
cttgactgtaagttc

SEQ ID NO: 283614 - DNA, 15 bp, Homo sapiens
acttgactgtaagtt

SEQ ID NO: 283615 - DNA, 15 bp, Homo sapiens
tacttgactgtaagt

SEQ ID NO: 283616 - DNA, 15 bp, Homo sapiens
ttacttgactgtaag

SEQ ID NO: 283617 - DNA, 15 bp, Homo sapiens
cttacttgactgtaa

SEQ ID NO: 283618 - DNA, 15 bp, Homo sapiens
ccttacttgactgta

SEQ ID NO: 283619 - DNA, 15 bp, Homo sapiens
cccttacttgactgt

SEQ ID NO: 283620 - DNA, 15 bp, Homo sapiens
tcccttacttgactg

SEQ ID NO: 283621 - DNA, 15 bp, Homo sapiens
ctcccttacttgact

SEQ ID NO: 283622 - DNA, 15 bp, Homo sapiens
tctcccttacttgac

SEQ ID NO: 283623 - DNA, 15 bp, Homo sapiens
atctcccttacttga

SEQ ID NO: 283624 - DNA, 15 bp, Homo sapiens
tatctcccttacttg

SEQ ID NO: 283625 - DNA, 15 bp, Homo sapiens
ctatctcccttactt

SEQ ID NO: 283626 - DNA, 15 bp, Homo sapiens
tctatctcccttact

SEQ ID NO: 283627 - DNA, 15 bp, Homo sapiens
gtctatctcccttac

SEQ ID NO: 283628 - DNA, 15 bp, Homo sapiens
tgtctatctccctta

SEQ ID NO: 283629 - DNA, 15 bp, Homo sapiens
atgtctatctccctt

SEQ ID NO: 283630 - DNA, 15 bp, Homo sapiens
aatgtctatctccct

SEQ ID NO: 283631 - DNA, 15 bp, Homo sapiens
taatgtctatctccc

SEQ ID NO: 283632 - DNA, 15 bp, Homo sapiens
ttaatgtctatctcc

SEQ ID NO: 283633 - DNA, 15 bp, Homo sapiens
tttaatgtctatctc

SEQ ID NO: 283634 - DNA, 15 bp, Homo sapiens
atttaatgtctatct

SEQ ID NO: 283635 - DNA, 15 bp, Homo sapiens
catttaatgtctatc

SEQ ID NO: 283636 - DNA, 15 bp, Homo sapiens
tcatttaatgtctat

SEQ ID NO: 283637 - DNA, 15 bp, Homo sapiens
ttcatttaatgtcta

SEQ ID NO: 283638 - DNA, 15 bp, Homo sapiens
gttcatttaatgtct

SEQ ID NO: 283639 - DNA, 15 bp, Homo sapiens
tgttcatttaatgtc

SEQ ID NO: 283640 - DNA, 15 bp, Homo sapiens
ttgttcatttaatgt

SEQ ID NO: 283641 - DNA, 15 bp, Homo sapiens
attgttcatttaatg

SEQ ID NO: 283642 - DNA, 15 bp, Homo sapiens
gattgttcatttaat

SEQ ID NO: 283643 - DNA, 15 bp, Homo sapiens
tgattgttcatttaa

SEQ ID NO: 283644 - DNA, 15 bp, Homo sapiens
gtgattgttcattta

SEQ ID NO: 283645 - DNA, 15 bp, Homo sapiens
tgtgattgttcattt

SEQ ID NO: 283646 - DNA, 15 bp, Homo sapiens
ctgtgattgttcatt

SEQ ID NO: 283647 - DNA, 15 bp, Homo sapiens
tctgtgattgttcat

SEQ ID NO: 283648 - DNA, 15 bp, Homo sapiens
ttctgtgattgttca

SEQ ID NO: 283649 - DNA, 15 bp, Homo sapiens
tttctgtgattgttc

SEQ ID NO: 283650 - DNA, 15 bp, Homo sapiens
atttctgtgattgtt

SEQ ID NO: 283651 - DNA, 15 bp, Homo sapiens
tatttctgtgattgt

SEQ ID NO: 283652 - DNA, 15 bp, Homo sapiens
gtatttctgtgattg

SEQ ID NO: 283653 - DNA, 15 bp, Homo sapiens
agtatttctgtgatt

SEQ ID NO: 283654 - DNA, 15 bp, Homo sapiens
aagtatttctgtgat

SEQ ID NO: 283655 - DNA, 15 bp, Homo sapiens
taagtatttctgtga

SEQ ID NO: 283656 - DNA, 15 bp, Homo sapiens
ttaagtatttctgtg

SEQ ID NO: 283657 - DNA, 15 bp, Homo sapiens
gttaagtatttctgt

SEQ ID NO: 283658 - DNA, 15 bp, Homo sapiens
agttaagtatttctg

SEQ ID NO: 283659 - DNA, 15 bp, Homo sapiens
tagttaagtatttct

SEQ ID NO: 283660 - DNA, 15 bp, Homo sapiens
gtagttaagtatttc

SEQ ID NO: 283661 - DNA, 15 bp, Homo sapiens
tgtagttaagtattt

SEQ ID NO: 283662 - DNA, 15 bp, Homo sapiens
atgtagttaagtatt

SEQ ID NO: 283663 - DNA, 15 bp, Homo sapiens
aatgtagttaagtat

SEQ ID NO: 283664 - DNA, 15 bp, Homo sapiens
aaatgtagttaagta

SEQ ID NO: 283665 - DNA, 15 bp, Homo sapiens
caaatgtagttaagt

SEQ ID NO: 283666 - DNA, 15 bp, Homo sapiens
gcaaatgtagttaag

SEQ ID NO: 283667 - DNA, 15 bp, Homo sapiens
cgcaaatgtagttaa

SEQ ID NO: 283668 - DNA, 15 bp, Homo sapiens
tcgcaaatgtagtta

SEQ ID NO: 283669 - DNA, 15 bp, Homo sapiens
atcgcaaatgtagtt

SEQ ID NO: 283670 - DNA, 15 bp, Homo sapiens
tatcgcaaatgtagt

SEQ ID NO: 283671 - DNA, 15 bp, Homo sapiens
ttatcgcaaatgtag

SEQ ID NO: 283672 - DNA, 15 bp, Homo sapiens
cttatcgcaaatgta

SEQ ID NO: 283673 - DNA, 15 bp, Homo sapiens
ccttatcgcaaatgt

SEQ ID NO: 283674 - DNA, 15 bp, Homo sapiens
tccttatcgcaaatg

SEQ ID NO: 283675 - DNA, 15 bp, Homo sapiens
ttccttatcgcaaat

SEQ ID NO: 283676 - DNA, 15 bp, Homo sapiens
attccttatcgcaaa

SEQ ID NO: 283677 - DNA, 15 bp, Homo sapiens
cattccttatcgcaa

SEQ ID NO: 283678 - DNA, 15 bp, Homo sapiens
acattccttatcgca

SEQ ID NO: 283679 - DNA, 15 bp, Homo sapiens
tacattccttatcgc

SEQ ID NO: 283680 - DNA, 15 bp, Homo sapiens
ttacattccttatcg

SEQ ID NO: 283681 - DNA, 15 bp, Homo sapiens
tttacattccttatc

SEQ ID NO: 283682 - DNA, 15 bp, Homo sapiens
ctttacattccttat

SEQ ID NO: 283683 - DNA, 15 bp, Homo sapiens
cctttacattcctta

SEQ ID NO: 283684 - DNA, 15 bp, Homo sapiens
ccctttacattcctt

SEQ ID NO: 283685 - DNA, 15 bp, Homo sapiens
tccctttacattcct

SEQ ID NO: 283686 - DNA, 15 bp, Homo sapiens
ttccctttacattcc

SEQ ID NO: 283687 - DNA, 15 bp, Homo sapiens
tttccctttacattc

SEQ ID NO: 283688 - DNA, 15 bp, Homo sapiens
ctttccctttacatt

SEQ ID NO: 283689 - DNA, 15 bp, Homo sapiens
actttccctttacat

SEQ ID NO: 283690 - DNA, 15 bp, Homo sapiens
cactttccctttaca

SEQ ID NO: 283691 - DNA, 15 bp, Homo sapiens
acactttccctttac

SEQ ID NO: 283692 - DNA, 15 bp, Homo sapiens
tacactttcccttta

SEQ ID NO: 283693 - DNA, 15 bp, Homo sapiens
ttacactttcccttt

SEQ ID NO: 283694 - DNA, 15 bp, Homo sapiens
attacactttccctt

SEQ ID NO: 283695 - DNA, 15 bp, Homo sapiens
gattacactttccct

SEQ ID NO: 283696 - DNA, 15 bp, Homo sapiens
ggattacactttccc

SEQ ID NO: 283697 - DNA, 15 bp, Homo sapiens
gggattacactttcc

SEQ ID NO: 283698 - DNA, 15 bp, Homo sapiens
ggggattacactttc

SEQ ID NO: 283699 - DNA, 15 bp, Homo sapiens
gggggattacacttt

SEQ ID NO: 283700 - DNA, 15 bp, Homo sapiens
tgggggattacactt

SEQ ID NO: 283701 - DNA, 15 bp, Homo sapiens
ttgggggattacact

SEQ ID NO: 283702 - DNA, 15 bp, Homo sapiens
attgggggattacac

SEQ ID NO: 283703 - DNA, 15 bp, Homo sapiens
cattgggggattaca

SEQ ID NO: 283704 - DNA, 15 bp, Homo sapiens
ccattgggggattac

SEQ ID NO: 283705 - DNA, 15 bp, Homo sapiens
cccattgggggatta

SEQ ID NO: 283706 - DNA, 15 bp, Homo sapiens
acccattgggggatt

SEQ ID NO: 283707 - DNA, 15 bp, Homo sapiens
aacccattgggggat

SEQ ID NO: 283708 - DNA, 15 bp, Homo sapiens
gaacccattggggga

SEQ ID NO: 283709 - DNA, 15 bp, Homo sapiens
agaacccattggggg

SEQ ID NO: 283710 - DNA, 15 bp, Homo sapiens
aagaacccattgggg

SEQ ID NO: 283711 - DNA, 15 bp, Homo sapiens
gaagaacccattggg

SEQ ID NO: 283712 - DNA, 15 bp, Homo sapiens
ggaagaacccattgg

SEQ ID NO: 283713 - DNA, 15 bp, Homo sapiens
aggaagaacccattg

SEQ ID NO: 283714 - DNA, 15 bp, Homo sapiens
caggaagaacccatt

SEQ ID NO: 283715 - DNA, 15 bp, Homo sapiens
gcaggaagaacccat

SEQ ID NO: 283716 - DNA, 15 bp, Homo sapiens
agcaggaagaaccca

SEQ ID NO: 283717 - DNA, 15 bp, Homo sapiens
cagcaggaagaaccc

SEQ ID NO: 283718 - DNA, 15 bp, Homo sapiens
ccagcaggaagaacc

SEQ ID NO: 283719 - DNA, 15 bp, Homo sapiens
gccagcaggaagaac

SEQ ID NO: 283720 - DNA, 15 bp, Homo sapiens
agccagcaggaagaa

SEQ ID NO: 283721 - DNA, 15 bp, Homo sapiens
cagccagcaggaaga

SEQ ID NO: 283722 - DNA, 15 bp, Homo sapiens
gcagccagcaggaag

SEQ ID NO: 283723 - DNA, 15 bp, Homo sapiens
tgcagccagcaggaa

SEQ ID NO: 283724 - DNA, 15 bp, Homo sapiens
gtgcagccagcagga

SEQ ID NO: 283725 - DNA, 15 bp, Homo sapiens
tgtgcagccagcagg

SEQ ID NO: 283726 - DNA, 15 bp, Homo sapiens
ctgtgcagccagcag

SEQ ID NO: 283727 - DNA, 15 bp, Homo sapiens
tctgtgcagccagca

SEQ ID NO: 283728 - DNA, 15 bp, Homo sapiens
gtctgtgcagccagc

SEQ ID NO: 283729 - DNA, 15 bp, Homo sapiens
tgtctgtgcagccag

SEQ ID NO: 283730 - DNA, 15 bp, Homo sapiens
ttgtctgtgcagcca

SEQ ID NO: 283731 - DNA, 15 bp, Homo sapiens
tttgtctgtgcagcc

SEQ ID NO: 283732 - DNA, 15 bp, Homo sapiens
ttttgtctgtgcagc

SEQ ID NO: 283733 - DNA, 15 bp, Homo sapiens
attttgtctgtgcag

SEQ ID NO: 283734 - DNA, 15 bp, Homo sapiens
gattttgtctgtgca

SEQ ID NO: 283735 - DNA, 15 bp, Homo sapiens
tgattttgtctgtgc

SEQ ID NO: 283736 - DNA, 15 bp, Homo sapiens
ttgattttgtctgtg

SEQ ID NO: 283737 - DNA, 15 bp, Homo sapiens
attgattttgtctgt

SEQ ID NO: 283738 - DNA, 15 bp, Homo sapiens
gattgattttgtctg

SEQ ID NO: 283739 - DNA, 15 bp, Homo sapiens
ggattgattttgtct

SEQ ID NO: 283740 - DNA, 15 bp, Homo sapiens
tggattgattttgtc

SEQ ID NO: 283741 - DNA, 15 bp, Homo sapiens
gtggattgattttgt

SEQ ID NO: 283742 - DNA, 15 bp, Homo sapiens
ggtggattgattttg

SEQ ID NO: 283743 - DNA, 15 bp, Homo sapiens
tggtggattgatttt

SEQ ID NO: 283744 - DNA, 15 bp, Homo sapiens
ttggtggattgattt

SEQ ID NO: 283745 - DNA, 15 bp, Homo sapiens
cttggtggattgatt

SEQ ID NO: 283746 - DNA, 15 bp, Homo sapiens
tcttggtggattgat

SEQ ID NO: 283747 - DNA, 15 bp, Homo sapiens
atcttggtggattga

SEQ ID NO: 283748 - DNA, 15 bp, Homo sapiens
aatcttggtggattg

SEQ ID NO: 283749 - DNA, 15 bp, Homo sapiens
caatcttggtggatt

SEQ ID NO: 283750 - DNA, 15 bp, Homo sapiens
acaatcttggtggat

SEQ ID NO: 283751 - DNA, 15 bp, Homo sapiens
cacaatcttggtgga

SEQ ID NO: 283752 - DNA, 15 bp, Homo sapiens
ccacaatcttggtgg

SEQ ID NO: 283753 - DNA, 15 bp, Homo sapiens
gccacaatcttggtg

SEQ ID NO: 283754 - DNA, 15 bp, Homo sapiens
tgccacaatcttggt

SEQ ID NO: 283755 - DNA, 15 bp, Homo sapiens
atgccacaatcttgg

SEQ ID NO: 283756 - DNA, 15 bp, Homo sapiens
aatgccacaatcttg

SEQ ID NO: 283757 - DNA, 15 bp, Homo sapiens
caatgccacaatctt

SEQ ID NO: 283758 - DNA, 15 bp, Homo sapiens
gcaatgccacaatct

SEQ ID NO: 283759 - DNA, 15 bp, Homo sapiens
tgcaatgccacaatc

SEQ ID NO: 283760 - DNA, 15 bp, Homo sapiens
ctgcaatgccacaat

SEQ ID NO: 283761 - DNA, 15 bp, Homo sapiens
actgcaatgccacaa

SEQ ID NO: 283762 - DNA, 15 bp, Homo sapiens
tactgcaatgccaca

SEQ ID NO: 283763 - DNA, 15 bp, Homo sapiens
ctactgcaatgccac

SEQ ID NO: 283764 - DNA, 15 bp, Homo sapiens
tctactgcaatgcca

SEQ ID NO: 283765 - DNA, 15 bp, Homo sapiens
ctctactgcaatgcc

SEQ ID NO: 283766 - DNA, 15 bp, Homo sapiens
tctctactgcaatgc

SEQ ID NO: 283767 - DNA, 15 bp, Homo sapiens
atctctactgcaatg

SEQ ID NO: 283768 - DNA, 15 bp, Homo sapiens
tatctctactgcaat

SEQ ID NO: 283769 - DNA, 15 bp, Homo sapiens
ctatctctactgcaa

SEQ ID NO: 283770 - DNA, 15 bp, Homo sapiens
actatctctactgca

SEQ ID NO: 283771 - DNA, 15 bp, Homo sapiens
aactatctctactgc

SEQ ID NO: 283772 - DNA, 15 bp, Homo sapiens
aaactatctctactg

SEQ ID NO: 283773 - DNA, 15 bp, Homo sapiens
taaactatctctact

SEQ ID NO: 283774 - DNA, 15 bp, Homo sapiens
ttaaactatctctac

SEQ ID NO: 283775 - DNA, 15 bp, Homo sapiens
attaaactatctcta

SEQ ID NO: 283776 - DNA, 15 bp, Homo sapiens
aattaaactatctct

SEQ ID NO: 283777 - DNA, 15 bp, Homo sapiens
caattaaactatctc

SEQ ID NO: 283778 - DNA, 15 bp, Homo sapiens
tcaattaaactatct

SEQ ID NO: 283779 - DNA, 15 bp, Homo sapiens
gtcaattaaactatc

SEQ ID NO: 283780 - DNA, 15 bp, Homo sapiens
ggtcaattaaactat

SEQ ID NO: 283781 - DNA, 15 bp, Homo sapiens
tggtcaattaaacta

SEQ ID NO: 283782 - DNA, 15 bp, Homo sapiens
gtggtcaattaaact

SEQ ID NO: 283783 - DNA, 15 bp, Homo sapiens
agtggtcaattaaac

SEQ ID NO: 283784 - DNA, 15 bp, Homo sapiens
tagtggtcaattaaa

SEQ ID NO: 283785 - DNA, 15 bp, Homo sapiens
ctagtggtcaattaa

SEQ ID NO: 283786 - DNA, 15 bp, Homo sapiens
cctagtggtcaatta

SEQ ID NO: 283787 - DNA, 15 bp, Homo sapiens
gcctagtggtcaatt

SEQ ID NO: 283788 - DNA, 15 bp, Homo sapiens
agcctagtggtcaat

SEQ ID NO: 283789 - DNA, 15 bp, Homo sapiens
cagcctagtggtcaa

SEQ ID NO: 283790 - DNA, 15 bp, Homo sapiens
tcagcctagtggtca

SEQ ID NO: 283791 - DNA, 15 bp, Homo sapiens
gtcagcctagtggtc

SEQ ID NO: 283792 - DNA, 15 bp, Homo sapiens
ggtcagcctagtggt

SEQ ID NO: 283793 - DNA, 15 bp, Homo sapiens
gggtcagcctagtgg

SEQ ID NO: 283794 - DNA, 15 bp, Homo sapiens
tgggtcagcctagtg

SEQ ID NO: 283795 - DNA, 15 bp, Homo sapiens
atgggtcagcctagt

SEQ ID NO: 283796 - DNA, 15 bp, Homo sapiens
catgggtcagcctag

SEQ ID NO: 283797 - DNA, 15 bp, Homo sapiens
acatgggtcagccta

SEQ ID NO: 283798 - DNA, 15 bp, Homo sapiens
cacatgggtcagcct

SEQ ID NO: 283799 - DNA, 15 bp, Homo sapiens
ccacatgggtcagcc

SEQ ID NO: 283800 - DNA, 15 bp, Homo sapiens
cccacatgggtcagc

SEQ ID NO: 283801 - DNA, 15 bp, Homo sapiens
tcccacatgggtcag

SEQ ID NO: 283802 - DNA, 15 bp, Homo sapiens
ctcccacatgggtca

SEQ ID NO: 283803 - DNA, 15 bp, Homo sapiens
tctcccacatgggtc

SEQ ID NO: 283804 - DNA, 15 bp, Homo sapiens
ttctcccacatgggt

SEQ ID NO: 283805 - DNA, 15 bp, Homo sapiens
gttctcccacatggg

SEQ ID NO: 283806 - DNA, 15 bp, Homo sapiens
agttctcccacatgg

SEQ ID NO: 283807 - DNA, 15 bp, Homo sapiens
cagttctcccacatg

SEQ ID NO: 283808 - DNA, 15 bp, Homo sapiens
ccagttctcccacat

SEQ ID NO: 283809 - DNA, 15 bp, Homo sapiens
tccagttctcccaca

SEQ ID NO: 283810 - DNA, 15 bp, Homo sapiens
ctccagttctcccac

SEQ ID NO: 283811 - DNA, 15 bp, Homo sapiens
actccagttctccca

SEQ ID NO: 283812 - DNA, 15 bp, Homo sapiens
aactccagttctccc

SEQ ID NO: 283813 - DNA, 15 bp, Homo sapiens
taactccagttctcc

SEQ ID NO: 283814 - DNA, 15 bp, Homo sapiens
ataactccagttctc

SEQ ID NO: 283815 - DNA, 15 bp, Homo sapiens
gataactccagttct

SEQ ID NO: 283816 - DNA, 15 bp, Homo sapiens
tgataactccagttc

SEQ ID NO: 283817 - DNA, 15 bp, Homo sapiens
gtgataactccagtt

SEQ ID NO: 283818 - DNA, 15 bp, Homo sapiens
agtgataactccagt

SEQ ID NO: 283819 - DNA, 15 bp, Homo sapiens
gagtgataactccag

SEQ ID NO: 283820 - DNA, 15 bp, Homo sapiens
tgagtgataactcca

SEQ ID NO: 283821 - DNA, 15 bp, Homo sapiens
ttgagtgataactcc

SEQ ID NO: 283822 - DNA, 15 bp, Homo sapiens
tttgagtgataactc

SEQ ID NO: 283823 - DNA, 15 bp, Homo sapiens
atttgagtgataact

SEQ ID NO: 283824 - DNA, 15 bp, Homo sapiens
gatttgagtgataac

SEQ ID NO: 283825 - DNA, 15 bp, Homo sapiens
tgatttgagtgataa

SEQ ID NO: 283826 - DNA, 15 bp, Homo sapiens
ctgatttgagtgata

SEQ ID NO: 283827 - DNA, 15 bp, Homo sapiens
gctgatttgagtgat

SEQ ID NO: 283828 - DNA, 15 bp, Homo sapiens
ggctgatttgagtga

SEQ ID NO: 283829 - DNA, 15 bp, Homo sapiens
aggctgatttgagtg

SEQ ID NO: 283830 - DNA, 15 bp, Homo sapiens
gaggctgatttgagt

SEQ ID NO: 283831 - DNA, 15 bp, Homo sapiens
tgaggctgatttgag

SEQ ID NO: 283832 - DNA, 15 bp, Homo sapiens
ctgaggctgatttga

SEQ ID NO: 283833 - DNA, 15 bp, Homo sapiens
gctgaggctgatttg

SEQ ID NO: 283834 - DNA, 15 bp, Homo sapiens
agctgaggctgattt

SEQ ID NO: 283835 - DNA, 15 bp, Homo sapiens
cagctgaggctgatt

SEQ ID NO: 283836 - DNA, 15 bp, Homo sapiens
ccagctgaggctgat

SEQ ID NO: 283837 - DNA, 15 bp, Homo sapiens
accagctgaggctga

SEQ ID NO: 283838 - DNA, 15 bp, Homo sapiens
aaccagctgaggctg

SEQ ID NO: 283839 - DNA, 15 bp, Homo sapiens
taaccagctgaggct

SEQ ID NO: 283840 - DNA, 15 bp, Homo sapiens
ttaaccagctgaggc

SEQ ID NO: 283841 - DNA, 15 bp, Homo sapiens
cttaaccagctgagg

SEQ ID NO: 283842 - DNA, 15 bp, Homo sapiens
acttaaccagctgag

SEQ ID NO: 283843 - DNA, 15 bp, Homo sapiens
aacttaaccagctga

SEQ ID NO: 283844 - DNA, 15 bp, Homo sapiens
gaacttaaccagctg

SEQ ID NO: 283845 - DNA, 15 bp, Homo sapiens
agaacttaaccagct

SEQ ID NO: 283846 - DNA, 15 bp, Homo sapiens
aagaacttaaccagc

SEQ ID NO: 283847 - DNA, 15 bp, Homo sapiens
taagaacttaaccag

SEQ ID NO: 283848 - DNA, 15 bp, Homo sapiens
ctaagaacttaacca

SEQ ID NO: 283849 - DNA, 15 bp, Homo sapiens
actaagaacttaacc

SEQ ID NO: 283850 - DNA, 15 bp, Homo sapiens
cactaagaacttaac

SEQ ID NO: 283851 - DNA, 15 bp, Homo sapiens
gcactaagaacttaa

SEQ ID NO: 283852 - DNA, 15 bp, Homo sapiens
tgcactaagaactta

SEQ ID NO: 283853 - DNA, 15 bp, Homo sapiens
ttgcactaagaactt

SEQ ID NO: 283854 - DNA, 15 bp, Homo sapiens
cttgcactaagaact

SEQ ID NO: 283855 - DNA, 15 bp, Homo sapiens
gcttgcactaagaac

SEQ ID NO: 283856 - DNA, 15 bp, Homo sapiens
tgcttgcactaagaa

SEQ ID NO: 283857 - DNA, 15 bp, Homo sapiens
gtgcttgcactaaga

SEQ ID NO: 283858 - DNA, 15 bp, Homo sapiens
agtgcttgcactaag

SEQ ID NO: 283859 - DNA, 15 bp, Homo sapiens
gagtgcttgcactaa

SEQ ID NO: 283860 - DNA, 15 bp, Homo sapiens
tgagtgcttgcacta

SEQ ID NO: 283861 - DNA, 15 bp, Homo sapiens
atgagtgcttgcact

SEQ ID NO: 283862 - DNA, 15 bp, Homo sapiens
tatgagtgcttgcac

SEQ ID NO: 283863 - DNA, 15 bp, Homo sapiens
ctatgagtgcttgca

SEQ ID NO: 283864 - DNA, 15 bp, Homo sapiens
cctatgagtgcttgc

SEQ ID NO: 283865 - DNA, 15 bp, Homo sapiens
ccctatgagtgcttg

SEQ ID NO: 283866 - DNA, 15 bp, Homo sapiens
gccctatgagtgctt

SEQ ID NO: 283867 - DNA, 15 bp, Homo sapiens
tgccctatgagtgct

SEQ ID NO: 283868 - DNA, 15 bp, Homo sapiens
atgccctatgagtgc

SEQ ID NO: 283869 - DNA, 15 bp, Homo sapiens
aatgccctatgagtg

SEQ ID NO: 283870 - DNA, 15 bp, Homo sapiens
aaatgccctatgagt

SEQ ID NO: 283871 - DNA, 15 bp, Homo sapiens
aaaatgccctatgag

SEQ ID NO: 283872 - DNA, 15 bp, Homo sapiens
gaaaatgccctatga

SEQ ID NO: 283873 - DNA, 15 bp, Homo sapiens
agaaaatgccctatg

SEQ ID NO: 283874 - DNA, 15 bp, Homo sapiens
aagaaaatgccctat

SEQ ID NO: 283875 - DNA, 15 bp, Homo sapiens
gaagaaaatgcccta

SEQ ID NO: 283876 - DNA, 15 bp, Homo sapiens
agaagaaaatgccct

SEQ ID NO: 283877 - DNA, 15 bp, Homo sapiens
aagaagaaaatgccc

SEQ ID NO: 283878 - DNA, 15 bp, Homo sapiens
aaagaagaaaatgcc

SEQ ID NO: 283879 - DNA, 15 bp, Homo sapiens
aaaagaagaaaatgc

SEQ ID NO: 283880 - DNA, 15 bp, Homo sapiens
taaaagaagaaaatg

SEQ ID NO: 283881 - DNA, 15 bp, Homo sapiens
ctaaaagaagaaaat

SEQ ID NO: 283882 - DNA, 15 bp, Homo sapiens
tctaaaagaagaaaa

SEQ ID NO: 283883 - DNA, 15 bp, Homo sapiens
atctaaaagaagaaa

SEQ ID NO: 283884 - DNA, 15 bp, Homo sapiens
aatctaaaagaagaa

SEQ ID NO: 283885 - DNA, 15 bp, Homo sapiens
taatctaaaagaaga

SEQ ID NO: 283886 - DNA, 15 bp, Homo sapiens
ataatctaaaagaag

SEQ ID NO: 283887 - DNA, 15 bp, Homo sapiens
gataatctaaaagaa

SEQ ID NO: 283888 - DNA, 15 bp, Homo sapiens
agataatctaaaaga

SEQ ID NO: 283889 - DNA, 15 bp, Homo sapiens
aagataatctaaaag

SEQ ID NO: 283890 - DNA, 15 bp, Homo sapiens
aaagataatctaaaa

SEQ ID NO: 283891 - DNA, 15 bp, Homo sapiens
gaaagataatctaaa

SEQ ID NO: 283892 - DNA, 15 bp, Homo sapiens
tgaaagataatctaa

SEQ ID NO: 283893 - DNA, 15 bp, Homo sapiens
ctgaaagataatcta

SEQ ID NO: 283894 - DNA, 15 bp, Homo sapiens
tctgaaagataatct

SEQ ID NO: 283895 - DNA, 15 bp, Homo sapiens
atctgaaagataatc

SEQ ID NO: 283896 - DNA, 15 bp, Homo sapiens
aatctgaaagataat

SEQ ID NO: 283897 - DNA, 15 bp, Homo sapiens
caatctgaaagataa

SEQ ID NO: 283898 - DNA, 15 bp, Homo sapiens
ccaatctgaaagata

SEQ ID NO: 283899 - DNA, 15 bp, Homo sapiens
cccaatctgaaagat

SEQ ID NO: 283900 - DNA, 15 bp, Homo sapiens
acccaatctgaaaga

SEQ ID NO: 283901 - DNA, 15 bp, Homo sapiens
aacccaatctgaaag

SEQ ID NO: 283902 - DNA, 15 bp, Homo sapiens
gaacccaatctgaaa

SEQ ID NO: 283903 - DNA, 15 bp, Homo sapiens
agaacccaatctgaa

SEQ ID NO: 283904 - DNA, 15 bp, Homo sapiens
gagaacccaatctga

SEQ ID NO: 283905 - DNA, 15 bp, Homo sapiens
agagaacccaatctg

SEQ ID NO: 283906 - DNA, 15 bp, Homo sapiens
cagagaacccaatct

SEQ ID NO: 283907 - DNA, 15 bp, Homo sapiens
acagagaacccaatc

SEQ ID NO: 283908 - DNA, 15 bp, Homo sapiens
gacagagaacccaat

SEQ ID NO: 283909 - DNA, 15 bp, Homo sapiens
agacagagaacccaa

SEQ ID NO: 283910 - DNA, 15 bp, Homo sapiens
cagacagagaaccca

SEQ ID NO: 283911 - DNA, 15 bp, Homo sapiens
tcagacagagaaccc

SEQ ID NO: 283912 - DNA, 15 bp, Homo sapiens
atcagacagagaacc

SEQ ID NO: 283913 - DNA, 15 bp, Homo sapiens
aatcagacagagaac

SEQ ID NO: 283914 - DNA, 15 bp, Homo sapiens
aaatcagacagagaa

SEQ ID NO: 283915 - DNA, 15 bp, Homo sapiens
aaaatcagacagaga

SEQ ID NO: 283916 - DNA, 15 bp, Homo sapiens
aaaaatcagacagag

SEQ ID NO: 283917 - DNA, 15 bp, Homo sapiens
aaaaaatcagacaga

SEQ ID NO: 283918 - DNA, 15 bp, Homo sapiens
aaaaaaatcagacag

SEQ ID NO: 283919 - DNA, 15 bp, Homo sapiens
gaaaaaaatcagaca

SEQ ID NO: 283920 - DNA, 15 bp, Homo sapiens
ggaaaaaaatcagac

SEQ ID NO: 283921 - DNA, 15 bp, Homo sapiens
gggaaaaaaatcaga

SEQ ID NO: 283922 - DNA, 15 bp, Homo sapiens
ggggaaaaaaatcag

SEQ ID NO: 283923 - DNA, 15 bp, Homo sapiens
aggggaaaaaaatca

SEQ ID NO: 283924 - DNA, 15 bp, Homo sapiens
aaggggaaaaaaatc

SEQ ID NO: 283925 - DNA, 15 bp, Homo sapiens
gaaggggaaaaaaat

SEQ ID NO: 283926 - DNA, 15 bp, Homo sapiens
agaaggggaaaaaaa

SEQ ID NO: 283927 - DNA, 15 bp, Homo sapiens
aagaaggggaaaaaa

SEQ ID NO: 283928 - DNA, 15 bp, Homo sapiens
taagaaggggaaaaa

SEQ ID NO: 283929 - DNA, 15 bp, Homo sapiens
ataagaaggggaaaa

SEQ ID NO: 283930 - DNA, 15 bp, Homo sapiens
cataagaaggggaaa

SEQ ID NO: 283931 - DNA, 15 bp, Homo sapiens
acataagaaggggaa

SEQ ID NO: 283932 - DNA, 15 bp, Homo sapiens
aacataagaagggga

SEQ ID NO: 283933 - DNA, 15 bp, Homo sapiens
caacataagaagggg

SEQ ID NO: 283934 - DNA, 15 bp, Homo sapiens
acaacataagaaggg

SEQ ID NO: 283935 - DNA, 15 bp, Homo sapiens
cacaacataagaagg

SEQ ID NO: 283936 - DNA, 15 bp, Homo sapiens
tcacaacataagaag

SEQ ID NO: 283937 - DNA, 15 bp, Homo sapiens
atcacaacataagaa

SEQ ID NO: 283938 - DNA, 15 bp, Homo sapiens
aatcacaacataaga

SEQ ID NO: 283939 - DNA, 15 bp, Homo sapiens
gaatcacaacataag

SEQ ID NO: 283940 - DNA, 15 bp, Homo sapiens
agaatcacaacataa

SEQ ID NO: 283941 - DNA, 15 bp, Homo sapiens
aagaatcacaacata

SEQ ID NO: 283942 - DNA, 15 bp, Homo sapiens
aaagaatcacaacat

SEQ ID NO: 283943 - DNA, 15 bp, Homo sapiens
aaaagaatcacaaca

SEQ ID NO: 283944 - DNA, 15 bp, Homo sapiens
aaaaagaatcacaac

SEQ ID NO: 283945 - DNA, 15 bp, Homo sapiens
aaaaaagaatcacaa

SEQ ID NO: 283946 - DNA, 15 bp, Homo sapiens
caaaaaagaatcaca

SEQ ID NO: 283947 - DNA, 15 bp, Homo sapiens
tcaaaaaagaatcac

SEQ ID NO: 283948 - DNA, 15 bp, Homo sapiens
atcaaaaaagaatca

SEQ ID NO: 283949 - DNA, 15 bp, Homo sapiens
aatcaaaaaagaatc

SEQ ID NO: 283950 - DNA, 15 bp, Homo sapiens
aaatcaaaaaagaat

SEQ ID NO: 283951 - DNA, 15 bp, Homo sapiens
aaaatcaaaaaagaa

SEQ ID NO: 283952 - DNA, 15 bp, Homo sapiens
gaaaatcaaaaaaga

SEQ ID NO: 283953 - DNA, 15 bp, Homo sapiens
agaaaatcaaaaaag

SEQ ID NO: 283954 - DNA, 15 bp, Homo sapiens
tagaaaatcaaaaaa

SEQ ID NO: 283955 - DNA, 15 bp, Homo sapiens
atagaaaatcaaaaa

SEQ ID NO: 283956 - DNA, 15 bp, Homo sapiens
catagaaaatcaaaa

SEQ ID NO: 283957 - DNA, 15 bp, Homo sapiens
acatagaaaatcaaa

SEQ ID NO: 283958 - DNA, 15 bp, Homo sapiens
aacatagaaaatcaa

SEQ ID NO: 283959 - DNA, 15 bp, Homo sapiens
aaacatagaaaatca

SEQ ID NO: 283960 - DNA, 15 bp, Homo sapiens
taaacatagaaaatc

SEQ ID NO: 283961 - DNA, 15 bp, Homo sapiens
gtaaacatagaaaat

SEQ ID NO: 283962 - DNA, 15 bp, Homo sapiens
tgtaaacatagaaaa

SEQ ID NO: 283963 - DNA, 15 bp, Homo sapiens
atgtaaacatagaaa

SEQ ID NO: 283964 - DNA, 15 bp, Homo sapiens
tatgtaaacatagaa

SEQ ID NO: 283965 - DNA, 15 bp, Homo sapiens
ttatgtaaacataga

SEQ ID NO: 283966 - DNA, 15 bp, Homo sapiens
attatgtaaacatag

SEQ ID NO: 283967 - DNA, 15 bp, Homo sapiens
gattatgtaaacata

SEQ ID NO: 283968 - DNA, 15 bp, Homo sapiens
tgattatgtaaacat

SEQ ID NO: 283969 - DNA, 15 bp, Homo sapiens
gtgattatgtaaaca

SEQ ID NO: 283970 - DNA, 15 bp, Homo sapiens
agtgattatgtaaac

SEQ ID NO: 283971 - DNA, 15 bp, Homo sapiens
cagtgattatgtaaa

SEQ ID NO: 283972 - DNA, 15 bp, Homo sapiens
acagtgattatgtaa

SEQ ID NO: 283973 - DNA, 15 bp, Homo sapiens
cacagtgattatgta

SEQ ID NO: 283974 - DNA, 15 bp, Homo sapiens
gcacagtgattatgt

SEQ ID NO: 283975 - DNA, 15 bp, Homo sapiens
agcacagtgattatg

SEQ ID NO: 283976 - DNA, 15 bp, Homo sapiens
aagcacagtgattat

SEQ ID NO: 283977 - DNA, 15 bp, Homo sapiens
aaagcacagtgatta

SEQ ID NO: 283978 - DNA, 15 bp, Homo sapiens
aaaagcacagtgatt

SEQ ID NO: 283979 - DNA, 15 bp, Homo sapiens
gaaaagcacagtgat

SEQ ID NO: 283980 - DNA, 15 bp, Homo sapiens
ggaaaagcacagtga

SEQ ID NO: 283981 - DNA, 15 bp, Homo sapiens
gggaaaagcacagtg

SEQ ID NO: 283982 - DNA, 15 bp, Homo sapiens
ggggaaaagcacagt

SEQ ID NO: 283983 - DNA, 15 bp, Homo sapiens
gggggaaaagcacag

SEQ ID NO: 283984 - DNA, 15 bp, Homo sapiens
agggggaaaagcaca

SEQ ID NO: 283985 - DNA, 15 bp, Homo sapiens
gagggggaaaagcac

SEQ ID NO: 283986 - DNA, 15 bp, Homo sapiens
cgagggggaaaagca

SEQ ID NO: 283987 - DNA, 15 bp, Homo sapiens
acgagggggaaaagc

SEQ ID NO: 283988 - DNA, 15 bp, Homo sapiens
tacgagggggaaaag

SEQ ID NO: 283989 - DNA, 15 bp, Homo sapiens
atacgagggggaaaa

SEQ ID NO: 283990 - DNA, 15 bp, Homo sapiens
aatacgagggggaaa

SEQ ID NO: 283991 - DNA, 15 bp, Homo sapiens
caatacgagggggaa

SEQ ID NO: 283992 - DNA, 15 bp, Homo sapiens
gcaatacgaggggga

SEQ ID NO: 283993 - DNA, 15 bp, Homo sapiens
agcaatacgaggggg

SEQ ID NO: 283994 - DNA, 15 bp, Homo sapiens
cagcaatacgagggg

SEQ ID NO: 283995 - DNA, 15 bp, Homo sapiens
ccagcaatacgaggg

SEQ ID NO: 283996 - DNA, 15 bp, Homo sapiens
cccagcaatacgagg

SEQ ID NO: 283997 - DNA, 15 bp, Homo sapiens
tcccagcaatacgag

SEQ ID NO: 283998 - DNA, 15 bp, Homo sapiens
gtcccagcaatacga

SEQ ID NO: 283999 - DNA, 15 bp, Homo sapiens
agtcccagcaatacg

SEQ ID NO: 284000 - DNA, 15 bp, Homo sapiens
cagtcccagcaatac

SEQ ID NO: 284001 - DNA, 15 bp, Homo sapiens
acagtcccagcaata

SEQ ID NO: 284002 - DNA, 15 bp, Homo sapiens
tacagtcccagcaat

SEQ ID NO: 284003 - DNA, 15 bp, Homo sapiens
atacagtcccagcaa

SEQ ID NO: 284004 - DNA, 15 bp, Homo sapiens
tatacagtcccagca

SEQ ID NO: 284005 - DNA, 15 bp, Homo sapiens
atatacagtcccagc

SEQ ID NO: 284006 - DNA, 15 bp, Homo sapiens
catatacagtcccag

SEQ ID NO: 284007 - DNA, 15 bp, Homo sapiens
acatatacagtccca

SEQ ID NO: 284008 - DNA, 15 bp, Homo sapiens
cacatatacagtccc

SEQ ID NO: 284009 - DNA, 15 bp, Homo sapiens
acacatatacagtcc

SEQ ID NO: 284010 - DNA, 15 bp, Homo sapiens
tacacatatacagtc

SEQ ID NO: 284011 - DNA, 15 bp, Homo sapiens
ttacacatatacagt

SEQ ID NO: 284012 - DNA, 15 bp, Homo sapiens
gttacacatatacag

SEQ ID NO: 284013 - DNA, 15 bp, Homo sapiens
ggttacacatataca

SEQ ID NO: 284014 - DNA, 15 bp, Homo sapiens
gggttacacatatac

SEQ ID NO: 284015 - DNA, 15 bp, Homo sapiens
agggttacacatata

SEQ ID NO: 284016 - DNA, 15 bp, Homo sapiens
cagggttacacatat

SEQ ID NO: 284017 - DNA, 15 bp, Homo sapiens
tcagggttacacata

SEQ ID NO: 284018 - DNA, 15 bp, Homo sapiens
atcagggttacacat

SEQ ID NO: 284019 - DNA, 15 bp, Homo sapiens
aatcagggttacaca

SEQ ID NO: 284020 - DNA, 15 bp, Homo sapiens
aaatcagggttacac

SEQ ID NO: 284021 - DNA, 15 bp, Homo sapiens
caaatcagggttaca

SEQ ID NO: 284022 - DNA, 15 bp, Homo sapiens
tcaaatcagggttac

SEQ ID NO: 284023 - DNA, 15 bp, Homo sapiens
atcaaatcagggtta

SEQ ID NO: 284024 - DNA, 15 bp, Homo sapiens
catcaaatcagggtt

SEQ ID NO: 284025 - DNA, 15 bp, Homo sapiens
acatcaaatcagggt

SEQ ID NO: 284026 - DNA, 15 bp, Homo sapiens
aacatcaaatcaggg

SEQ ID NO: 284027 - DNA, 15 bp, Homo sapiens
gaacatcaaatcagg

SEQ ID NO: 284028 - DNA, 15 bp, Homo sapiens
agaacatcaaatcag

SEQ ID NO: 284029 - DNA, 15 bp, Homo sapiens
cagaacatcaaatca

SEQ ID NO: 284030 - DNA, 15 bp, Homo sapiens
acagaacatcaaatc

SEQ ID NO: 284031 - DNA, 15 bp, Homo sapiens
aacagaacatcaaat

SEQ ID NO: 284032 - DNA, 15 bp, Homo sapiens
aaacagaacatcaaa

SEQ ID NO: 284033 - DNA, 15 bp, Homo sapiens
aaaacagaacatcaa

SEQ ID NO: 284034 - DNA, 15 bp, Homo sapiens
gaaaacagaacatca

SEQ ID NO: 284035 - DNA, 15 bp, Homo sapiens
agaaaacagaacatc

SEQ ID NO: 284036 - DNA, 15 bp, Homo sapiens
gagaaaacagaacat

SEQ ID NO: 284037 - DNA, 15 bp, Homo sapiens
agagaaaacagaaca

SEQ ID NO: 284038 - DNA, 15 bp, Homo sapiens
cagagaaaacagaac

SEQ ID NO: 284039 - DNA, 15 bp, Homo sapiens
tcagagaaaacagaa

SEQ ID NO: 284040 - DNA, 15 bp, Homo sapiens
atcagagaaaacaga

SEQ ID NO: 284041 - DNA, 15 bp, Homo sapiens
aatcagagaaaacag

SEQ ID NO: 284042 - DNA, 15 bp, Homo sapiens
aaatcagagaaaaca

SEQ ID NO: 284043 - DNA, 15 bp, Homo sapiens
taaatcagagaaaac

SEQ ID NO: 284044 - DNA, 15 bp, Homo sapiens
ttaaatcagagaaaa

SEQ ID NO: 284045 - DNA, 15 bp, Homo sapiens
attaaatcagagaaa

SEQ ID NO: 284046 - DNA, 15 bp, Homo sapiens
cattaaatcagagaa

SEQ ID NO: 284047 - DNA, 15 bp, Homo sapiens
acattaaatcagaga

SEQ ID NO: 284048 - DNA, 15 bp, Homo sapiens
cacattaaatcagag

SEQ ID NO: 284049 - DNA, 15 bp, Homo sapiens
tcacattaaatcaga

SEQ ID NO: 284050 - DNA, 15 bp, Homo sapiens
ctcacattaaatcag

SEQ ID NO: 284051 - DNA, 15 bp, Homo sapiens
actcacattaaatca

SEQ ID NO: 284052 - DNA, 15 bp, Homo sapiens
cactcacattaaatc

SEQ ID NO: 284053 - DNA, 15 bp, Homo sapiens
tcactcacattaaat

SEQ ID NO: 284054 - DNA, 15 bp, Homo sapiens
ttcactcacattaaa

SEQ ID NO: 284055 - DNA, 15 bp, Homo sapiens
attcactcacattaa

SEQ ID NO: 284056 - DNA, 15 bp, Homo sapiens
tattcactcacatta

SEQ ID NO: 284057 - DNA, 15 bp, Homo sapiens
atattcactcacatt

SEQ ID NO: 284058 - DNA, 15 bp, Homo sapiens
gatattcactcacat

SEQ ID NO: 284059 - DNA, 15 bp, Homo sapiens
ggatattcactcaca

SEQ ID NO: 284060 - DNA, 15 bp, Homo sapiens
gggatattcactcac

SEQ ID NO: 284061 - DNA, 15 bp, Homo sapiens
agggatattcactca

SEQ ID NO: 284062 - DNA, 15 bp, Homo sapiens
aagggatattcactc

SEQ ID NO: 284063 - DNA, 15 bp, Homo sapiens
gaagggatattcact

SEQ ID NO: 284064 - DNA, 15 bp, Homo sapiens
tgaagggatattcac

SEQ ID NO: 284065 - DNA, 15 bp, Homo sapiens
gtgaagggatattca

SEQ ID NO: 284066 - DNA, 15 bp, Homo sapiens
agtgaagggatattc

SEQ ID NO: 284067 - DNA, 15 bp, Homo sapiens
gagtgaagggatatt

SEQ ID NO: 284068 - DNA, 15 bp, Homo sapiens
agagtgaagggatat

SEQ ID NO: 284069 - DNA, 15 bp, Homo sapiens
cagagtgaagggata

SEQ ID NO: 284070 - DNA, 15 bp, Homo sapiens
gcagagtgaagggat

SEQ ID NO: 284071 - DNA, 15 bp, Homo sapiens
tgcagagtgaaggga

SEQ ID NO: 284072 - DNA, 15 bp, Homo sapiens
gtgcagagtgaaggg

SEQ ID NO: 284073 - DNA, 15 bp, Homo sapiens
agtgcagagtgaagg

SEQ ID NO: 284074 - DNA, 15 bp, Homo sapiens
aagtgcagagtgaag

SEQ ID NO: 284075 - DNA, 15 bp, Homo sapiens
taagtgcagagtgaa

SEQ ID NO: 284076 - DNA, 15 bp, Homo sapiens
ttaagtgcagagtga

SEQ ID NO: 284077 - DNA, 15 bp, Homo sapiens
attaagtgcagagtg

SEQ ID NO: 284078 - DNA, 15 bp, Homo sapiens
gattaagtgcagagt

SEQ ID NO: 284079 - DNA, 15 bp, Homo sapiens
agattaagtgcagag

SEQ ID NO: 284080 - DNA, 15 bp, Homo sapiens
cagattaagtgcaga

SEQ ID NO: 284081 - DNA, 15 bp, Homo sapiens
acagattaagtgcag

SEQ ID NO: 284082 - DNA, 15 bp, Homo sapiens
cacagattaagtgca

SEQ ID NO: 284083 - DNA, 15 bp, Homo sapiens
tcacagattaagtgc

SEQ ID NO: 284084 - DNA, 15 bp, Homo sapiens
gtcacagattaagtg

SEQ ID NO: 284085 - DNA, 15 bp, Homo sapiens
agtcacagattaagt

SEQ ID NO: 284086 - DNA, 15 bp, Homo sapiens
aagtcacagattaag

SEQ ID NO: 284087 - DNA, 15 bp, Homo sapiens
caagtcacagattaa

SEQ ID NO: 284088 - DNA, 15 bp, Homo sapiens
acaagtcacagatta

SEQ ID NO: 284089 - DNA, 15 bp, Homo sapiens
aacaagtcacagatt

SEQ ID NO: 284090 - DNA, 15 bp, Homo sapiens
aaacaagtcacagat

SEQ ID NO: 284091 - DNA, 15 bp, Homo sapiens
taaacaagtcacaga

SEQ ID NO: 284092 - DNA, 15 bp, Homo sapiens
ataaacaagtcacag

SEQ ID NO: 284093 - DNA, 15 bp, Homo sapiens
cataaacaagtcaca

SEQ ID NO: 284094 - DNA, 15 bp, Homo sapiens
acataaacaagtcac

SEQ ID NO: 284095 - DNA, 15 bp, Homo sapiens
aacataaacaagtca

SEQ ID NO: 284096 - DNA, 15 bp, Homo sapiens
gaacataaacaagtc

SEQ ID NO: 284097 - DNA, 15 bp, Homo sapiens
ggaacataaacaagt

SEQ ID NO: 284098 - DNA, 15 bp, Homo sapiens
gggaacataaacaag

SEQ ID NO: 284099 - DNA, 15 bp, Homo sapiens
ggggaacataaacaa

SEQ ID NO: 284100 - DNA, 15 bp, Homo sapiens
tggggaacataaaca

SEQ ID NO: 284101 - DNA, 15 bp, Homo sapiens
ttggggaacataaac

SEQ ID NO: 284102 - DNA, 15 bp, Homo sapiens
tttggggaacataaa

SEQ ID NO: 284103 - DNA, 15 bp, Homo sapiens
ctttggggaacataa

SEQ ID NO: 284104 - DNA, 15 bp, Homo sapiens
tctttggggaacata

SEQ ID NO: 284105 - DNA, 15 bp, Homo sapiens
ctctttggggaacat

SEQ ID NO: 284106 - DNA, 15 bp, Homo sapiens
gctctttggggaaca

SEQ ID NO: 284107 - DNA, 15 bp, Homo sapiens
agctctttggggaac

SEQ ID NO: 284108 - DNA, 15 bp, Homo sapiens
tagctctttggggaa

SEQ ID NO: 284109 - DNA, 15 bp, Homo sapiens
atagctctttgggga

SEQ ID NO: 284110 - DNA, 15 bp, Homo sapiens
catagctctttgggg

SEQ ID NO: 284111 - DNA, 15 bp, Homo sapiens
ccatagctctttggg

SEQ ID NO: 284112 - DNA, 15 bp, Homo sapiens
accatagctctttgg

SEQ ID NO: 284113 - DNA, 15 bp, Homo sapiens
taccatagctctttg

SEQ ID NO: 284114 - DNA, 15 bp, Homo sapiens
ataccatagctcttt

SEQ ID NO: 284115 - DNA, 15 bp, Homo sapiens
cataccatagctctt

SEQ ID NO: 284116 - DNA, 15 bp, Homo sapiens
ccataccatagctct

SEQ ID NO: 284117 - DNA, 15 bp, Homo sapiens
cccataccatagctc

SEQ ID NO: 284118 - DNA, 15 bp, Homo sapiens
tcccataccatagct

SEQ ID NO: 284119 - DNA, 15 bp, Homo sapiens
ctcccataccatagc

SEQ ID NO: 284120 - DNA, 15 bp, Homo sapiens
gctcccataccatag

SEQ ID NO: 284121 - DNA, 15 bp, Homo sapiens
tgctcccataccata

SEQ ID NO: 284122 - DNA, 15 bp, Homo sapiens
ctgctcccataccat

SEQ ID NO: 284123 - DNA, 15 bp, Homo sapiens
cctgctcccatacca

SEQ ID NO: 284124 - DNA, 15 bp, Homo sapiens
gcctgctcccatacc

SEQ ID NO: 284125 - DNA, 15 bp, Homo sapiens
tgcctgctcccatac

SEQ ID NO: 284126 - DNA, 15 bp, Homo sapiens
atgcctgctcccata

SEQ ID NO: 284127 - DNA, 15 bp, Homo sapiens
aatgcctgctcccat

SEQ ID NO: 284128 - DNA, 15 bp, Homo sapiens
aaatgcctgctccca

SEQ ID NO: 284129 - DNA, 15 bp, Homo sapiens
aaaatgcctgctccc

SEQ ID NO: 284130 - DNA, 15 bp, Homo sapiens
aaaaatgcctgctcc

SEQ ID NO: 284131 - DNA, 15 bp, Homo sapiens
taaaaatgcctgctc

SEQ ID NO: 284132 - DNA, 15 bp, Homo sapiens
ataaaaatgcctgct

SEQ ID NO: 284133 - DNA, 15 bp, Homo sapiens
aataaaaatgcctgc

SEQ ID NO: 284134 - DNA, 15 bp, Homo sapiens
taataaaaatgcctg

SEQ ID NO: 284135 - DNA, 15 bp, Homo sapiens
ataataaaaatgcct

SEQ ID NO: 284136 - DNA, 15 bp, Homo sapiens
tataataaaaatgcc

SEQ ID NO: 284137 - DNA, 15 bp, Homo sapiens
atataataaaaatgc

SEQ ID NO: 284138 - DNA, 15 bp, Homo sapiens
gatataataaaaatg

SEQ ID NO: 284139 - DNA, 15 bp, Homo sapiens
agatataataaaaat

SEQ ID NO: 284140 - DNA, 15 bp, Homo sapiens
cagatataataaaaa

SEQ ID NO: 284141 - DNA, 15 bp, Homo sapiens
gcagatataataaaa

SEQ ID NO: 284142 - DNA, 15 bp, Homo sapiens
agcagatataataaa

SEQ ID NO: 284143 - DNA, 15 bp, Homo sapiens
aagcagatataataa

SEQ ID NO: 284144 - DNA, 15 bp, Homo sapiens
aaagcagatataata

SEQ ID NO: 284145 - DNA, 15 bp, Homo sapiens
aaaagcagatataat

SEQ ID NO: 284146 - DNA, 15 bp, Homo sapiens
taaaagcagatataa

SEQ ID NO: 284147 - DNA, 15 bp, Homo sapiens
ctaaaagcagatata

SEQ ID NO: 284148 - DNA, 15 bp, Homo sapiens
actaaaagcagatat

SEQ ID NO: 284149 - DNA, 15 bp, Homo sapiens
gactaaaagcagata

SEQ ID NO: 284150 - DNA, 15 bp, Homo sapiens
tgactaaaagcagat

SEQ ID NO: 284151 - DNA, 15 bp, Homo sapiens
ctgactaaaagcaga

SEQ ID NO: 284152 - DNA, 15 bp, Homo sapiens
cctgactaaaagcag

SEQ ID NO: 284153 - DNA, 15 bp, Homo sapiens
tcctgactaaaagca

SEQ ID NO: 284154 - DNA, 15 bp, Homo sapiens
ctcctgactaaaagc

SEQ ID NO: 284155 - DNA, 15 bp, Homo sapiens
cctcctgactaaaag

SEQ ID NO: 284156 - DNA, 15 bp, Homo sapiens
acctcctgactaaaa

SEQ ID NO: 284157 - DNA, 15 bp, Homo sapiens
tacctcctgactaaa

SEQ ID NO: 284158 - DNA, 15 bp, Homo sapiens
ttacctcctgactaa

SEQ ID NO: 284159 - DNA, 15 bp, Homo sapiens
cttacctcctgacta

SEQ ID NO: 284160 - DNA, 15 bp, Homo sapiens
ccttacctcctgact

SEQ ID NO: 284161 - DNA, 15 bp, Homo sapiens
cccttacctcctgac

SEQ ID NO: 284162 - DNA, 15 bp, Homo sapiens
tcccttacctcctga

SEQ ID NO: 284163 - DNA, 15 bp, Homo sapiens
ctcccttacctcctg

SEQ ID NO: 284164 - DNA, 15 bp, Homo sapiens
tctcccttacctcct

SEQ ID NO: 284165 - DNA, 15 bp, Homo sapiens
ttctcccttacctcc

SEQ ID NO: 284166 - DNA, 15 bp, Homo sapiens
tttctcccttacctc

SEQ ID NO: 284167 - DNA, 15 bp, Homo sapiens
ctttctcccttacct

SEQ ID NO: 284168 - DNA, 15 bp, Homo sapiens
actttctcccttacc

SEQ ID NO: 284169 - DNA, 15 bp, Homo sapiens
tactttctcccttac

SEQ ID NO: 284170 - DNA, 15 bp, Homo sapiens
ctactttctccctta

SEQ ID NO: 284171 - DNA, 15 bp, Homo sapiens
tctactttctccctt

SEQ ID NO: 284172 - DNA, 15 bp, Homo sapiens
atctactttctccct

SEQ ID NO: 284173 - DNA, 15 bp, Homo sapiens
tatctactttctccc

SEQ ID NO: 284174 - DNA, 15 bp, Homo sapiens
ttatctactttctcc

SEQ ID NO: 284175 - DNA, 15 bp, Homo sapiens
attatctactttctc

SEQ ID NO: 284176 - DNA, 15 bp, Homo sapiens
aattatctactttct

SEQ ID NO: 284177 - DNA, 15 bp, Homo sapiens
gaattatctactttc

SEQ ID NO: 284178 - DNA, 15 bp, Homo sapiens
tgaattatctacttt

SEQ ID NO: 284179 - DNA, 15 bp, Homo sapiens
ttgaattatctactt

SEQ ID NO: 284180 - DNA, 15 bp, Homo sapiens
gttgaattatctact

SEQ ID NO: 284181 - DNA, 15 bp, Homo sapiens
agttgaattatctac

SEQ ID NO: 284182 - DNA, 15 bp, Homo sapiens
cagttgaattatcta

SEQ ID NO: 284183 - DNA, 15 bp, Homo sapiens
acagttgaattatct

SEQ ID NO: 284184 - DNA, 15 bp, Homo sapiens
tacagttgaattatc

SEQ ID NO: 284185 - DNA, 15 bp, Homo sapiens
ttacagttgaattat

SEQ ID NO: 284186 - DNA, 15 bp, Homo sapiens
attacagttgaatta

SEQ ID NO: 284187 - DNA, 15 bp, Homo sapiens
cattacagttgaatt

SEQ ID NO: 284188 - DNA, 15 bp, Homo sapiens
tcattacagttgaat

SEQ ID NO: 284189 - DNA, 15 bp, Homo sapiens
atcattacagttgaa

SEQ ID NO: 284190 - DNA, 15 bp, Homo sapiens
tatcattacagttga

SEQ ID NO: 284191 - DNA, 15 bp, Homo sapiens
gtatcattacagttg

SEQ ID NO: 284192 - DNA, 15 bp, Homo sapiens
tgtatcattacagtt

SEQ ID NO: 284193 - DNA, 15 bp, Homo sapiens
ttgtatcattacagt

SEQ ID NO: 284194 - DNA, 15 bp, Homo sapiens
cttgtatcattacag

SEQ ID NO: 284195 - DNA, 15 bp, Homo sapiens
gcttgtatcattaca

SEQ ID NO: 284196 - DNA, 15 bp, Homo sapiens
ggcttgtatcattac

SEQ ID NO: 284197 - DNA, 15 bp, Homo sapiens
cggcttgtatcatta

SEQ ID NO: 284198 - DNA, 15 bp, Homo sapiens
acggcttgtatcatt

SEQ ID NO: 284199 - DNA, 15 bp, Homo sapiens
aacggcttgtatcat

SEQ ID NO: 284200 - DNA, 15 bp, Homo sapiens
caacggcttgtatca

SEQ ID NO: 284201 - DNA, 15 bp, Homo sapiens
acaacggcttgtatc

SEQ ID NO: 284202 - DNA, 15 bp, Homo sapiens
aacaacggcttgtat

SEQ ID NO: 284203 - DNA, 15 bp, Homo sapiens
gaacaacggcttgta

SEQ ID NO: 284204 - DNA, 15 bp, Homo sapiens
agaacaacggcttgt

SEQ ID NO: 284205 - DNA, 15 bp, Homo sapiens
cagaacaacggcttg

SEQ ID NO: 284206 - DNA, 15 bp, Homo sapiens
tcagaacaacggctt

SEQ ID NO: 284207 - DNA, 15 bp, Homo sapiens
ctcagaacaacggct

SEQ ID NO: 284208 - DNA, 15 bp, Homo sapiens
actcagaacaacggc

SEQ ID NO: 284209 - DNA, 15 bp, Homo sapiens
aactcagaacaacgg

SEQ ID NO: 284210 - DNA, 15 bp, Homo sapiens
aaactcagaacaacg

SEQ ID NO: 284211 - DNA, 15 bp, Homo sapiens
aaaactcagaacaac

SEQ ID NO: 284212 - DNA, 15 bp, Homo sapiens
aaaaactcagaacaa

SEQ ID NO: 284213 - DNA, 15 bp, Homo sapiens
caaaaactcagaaca

SEQ ID NO: 284214 - DNA, 15 bp, Homo sapiens
acaaaaactcagaac

SEQ ID NO: 284215 - DNA, 15 bp, Homo sapiens
aacaaaaactcagaa

SEQ ID NO: 284216 - DNA, 15 bp, Homo sapiens
taacaaaaactcaga

SEQ ID NO: 284217 - DNA, 15 bp, Homo sapiens
ctaacaaaaactcag

SEQ ID NO: 284218 - DNA, 15 bp, Homo sapiens
tctaacaaaaactca

SEQ ID NO: 284219 - DNA, 15 bp, Homo sapiens
ttctaacaaaaactc

SEQ ID NO: 284220 - DNA, 15 bp, Homo sapiens
attctaacaaaaact

SEQ ID NO: 284221 - DNA, 15 bp, Homo sapiens
cattctaacaaaaac

SEQ ID NO: 284222 - DNA, 15 bp, Homo sapiens
tcattctaacaaaaa

SEQ ID NO: 284223 - DNA, 15 bp, Homo sapiens
ttcattctaacaaaa

SEQ ID NO: 284224 - DNA, 15 bp, Homo sapiens
gttcattctaacaaa

SEQ ID NO: 284225 - DNA, 15 bp, Homo sapiens
agttcattctaacaa

SEQ ID NO: 284226 - DNA, 15 bp, Homo sapiens
aagttcattctaaca

SEQ ID NO: 284227 - DNA, 15 bp, Homo sapiens
aaagttcattctaac

SEQ ID NO: 284228 - DNA, 15 bp, Homo sapiens
taaagttcattctaa

SEQ ID NO: 284229 - DNA, 15 bp, Homo sapiens
ataaagttcattcta

SEQ ID NO: 284230 - DNA, 15 bp, Homo sapiens
tataaagttcattct

SEQ ID NO: 284231 - DNA, 15 bp, Homo sapiens
ttataaagttcattc

SEQ ID NO: 284232 - DNA, 15 bp, Homo sapiens
gttataaagttcatt

SEQ ID NO: 284233 - DNA, 15 bp, Homo sapiens
tgttataaagttcat

SEQ ID NO: 284234 - DNA, 15 bp, Homo sapiens
ctgttataaagttca

SEQ ID NO: 284235 - DNA, 15 bp, Homo sapiens
tctgttataaagttc

SEQ ID NO: 284236 - DNA, 15 bp, Homo sapiens
ttctgttataaagtt

SEQ ID NO: 284237 - DNA, 15 bp, Homo sapiens
gttctgttataaagt

SEQ ID NO: 284238 - DNA, 15 bp, Homo sapiens
tgttctgttataaag

SEQ ID NO: 284239 - DNA, 15 bp, Homo sapiens
gtgttctgttataaa

SEQ ID NO: 284240 - DNA, 15 bp, Homo sapiens
agtgttctgttataa

SEQ ID NO: 284241 - DNA, 15 bp, Homo sapiens
aagtgttctgttata

SEQ ID NO: 284242 - DNA, 15 bp, Homo sapiens
gaagtgttctgttat

SEQ ID NO: 284243 - DNA, 15 bp, Homo sapiens
agaagtgttctgtta

SEQ ID NO: 284244 - DNA, 15 bp, Homo sapiens
tagaagtgttctgtt

SEQ ID NO: 284245 - DNA, 15 bp, Homo sapiens
ctagaagtgttctgt

SEQ ID NO: 284246 - DNA, 15 bp, Homo sapiens
actagaagtgttctg

SEQ ID NO: 284247 - DNA, 15 bp, Homo sapiens
cactagaagtgttct

SEQ ID NO: 284248 - DNA, 15 bp, Homo sapiens
ccactagaagtgttc

SEQ ID NO: 284249 - DNA, 15 bp, Homo sapiens
gccactagaagtgtt

SEQ ID NO: 284250 - DNA, 15 bp, Homo sapiens
tgccactagaagtgt

SEQ ID NO: 284251 - DNA, 15 bp, Homo sapiens
ctgccactagaagtg

SEQ ID NO: 284252 - DNA, 15 bp, Homo sapiens
actgccactagaagt

SEQ ID NO: 284253 - DNA, 15 bp, Homo sapiens
aactgccactagaag

SEQ ID NO: 284254 - DNA, 15 bp, Homo sapiens
aaactgccactagaa

SEQ ID NO: 284255 - DNA, 15 bp, Homo sapiens
aaaactgccactaga

SEQ ID NO: 284256 - DNA, 15 bp, Homo sapiens
taaaactgccactag

SEQ ID NO: 284257 - DNA, 15 bp, Homo sapiens
ataaaactgccacta

SEQ ID NO: 284258 - DNA, 15 bp, Homo sapiens
gataaaactgccact

SEQ ID NO: 284259 - DNA, 15 bp, Homo sapiens
agataaaactgccac

SEQ ID NO: 284260 - DNA, 15 bp, Homo sapiens
aagataaaactgcca

SEQ ID NO: 284261 - DNA, 15 bp, Homo sapiens
aaagataaaactgcc

SEQ ID NO: 284262 - DNA, 15 bp, Homo sapiens
aaaagataaaactgc

SEQ ID NO: 284263 - DNA, 15 bp, Homo sapiens
aaaaagataaaactg

SEQ ID NO: 284264 - DNA, 15 bp, Homo sapiens
aaaaaagataaaact

SEQ ID NO: 284265 - DNA, 15 bp, Homo sapiens
gaaaaaagataaaac

SEQ ID NO: 284266 - DNA, 15 bp, Homo sapiens
agaaaaaagataaaa

SEQ ID NO: 284267 - DNA, 15 bp, Homo sapiens
tagaaaaaagataaa

SEQ ID NO: 284268 - DNA, 15 bp, Homo sapiens
atagaaaaaagataa

SEQ ID NO: 284269 - DNA, 15 bp, Homo sapiens
tatagaaaaaagata

SEQ ID NO: 284270 - DNA, 15 bp, Homo sapiens
ctatagaaaaaagat

SEQ ID NO: 284271 - DNA, 15 bp, Homo sapiens
gctatagaaaaaaga

SEQ ID NO: 284272 - DNA, 15 bp, Homo sapiens
tgctatagaaaaaag

SEQ ID NO: 284273 - DNA, 15 bp, Homo sapiens
ctgctatagaaaaaa

SEQ ID NO: 284274 - DNA, 15 bp, Homo sapiens
cctgctatagaaaaa

SEQ ID NO: 284275 - DNA, 15 bp, Homo sapiens
tcctgctatagaaaa

SEQ ID NO: 284276 - DNA, 15 bp, Homo sapiens
atcctgctatagaaa

SEQ ID NO: 284277 - DNA, 15 bp, Homo sapiens
aatcctgctatagaa

SEQ ID NO: 284278 - DNA, 15 bp, Homo sapiens
caatcctgctataga

SEQ ID NO: 284279 - DNA, 15 bp, Homo sapiens
acaatcctgctatag

SEQ ID NO: 284280 - DNA, 15 bp, Homo sapiens
aacaatcctgctata

SEQ ID NO: 284281 - DNA, 15 bp, Homo sapiens
aaacaatcctgctat

SEQ ID NO: 284282 - DNA, 15 bp, Homo sapiens
aaaacaatcctgcta

SEQ ID NO: 284283 - DNA, 15 bp, Homo sapiens
caaaacaatcctgct

SEQ ID NO: 284284 - DNA, 15 bp, Homo sapiens
ccaaaacaatcctgc

SEQ ID NO: 284285 - DNA, 15 bp, Homo sapiens
cccaaaacaatcctg

SEQ ID NO: 284286 - DNA, 15 bp, Homo sapiens
tcccaaaacaatcct

SEQ ID NO: 284287 - DNA, 15 bp, Homo sapiens
atcccaaaacaatcc

SEQ ID NO: 284288 - DNA, 15 bp, Homo sapiens
aatcccaaaacaatc

SEQ ID NO: 284289 - DNA, 15 bp, Homo sapiens
gaatcccaaaacaat

SEQ ID NO: 284290 - DNA, 15 bp, Homo sapiens
tgaatcccaaaacaa

SEQ ID NO: 284291 - DNA, 15 bp, Homo sapiens
ttgaatcccaaaaca

SEQ ID NO: 284292 - DNA, 15 bp, Homo sapiens
tttgaatcccaaaac

SEQ ID NO: 284293 - DNA, 15 bp, Homo sapiens
atttgaatcccaaaa

SEQ ID NO: 284294 - DNA, 15 bp, Homo sapiens
aatttgaatcccaaa

SEQ ID NO: 284295 - DNA, 15 bp, Homo sapiens
caatttgaatcccaa

SEQ ID NO: 284296 - DNA, 15 bp, Homo sapiens
acaatttgaatccca

SEQ ID NO: 284297 - DNA, 15 bp, Homo sapiens
gacaatttgaatccc

SEQ ID NO: 284298 - DNA, 15 bp, Homo sapiens
ggacaatttgaatcc

SEQ ID NO: 284299 - DNA, 15 bp, Homo sapiens
gggacaatttgaatc

SEQ ID NO: 284300 - DNA, 15 bp, Homo sapiens
ggggacaatttgaat

SEQ ID NO: 284301 - DNA, 15 bp, Homo sapiens
tggggacaatttgaa

SEQ ID NO: 284302 - DNA, 15 bp, Homo sapiens
ctggggacaatttga

SEQ ID NO: 284303 - DNA, 15 bp, Homo sapiens
actggggacaatttg

SEQ ID NO: 284304 - DNA, 15 bp, Homo sapiens
aactggggacaattt

SEQ ID NO: 284305 - DNA, 15 bp, Homo sapiens
gaactggggacaatt

SEQ ID NO: 284306 - DNA, 15 bp, Homo sapiens
tgaactggggacaat

SEQ ID NO: 284307 - DNA, 15 bp, Homo sapiens
ttgaactggggacaa

SEQ ID NO: 284308 - DNA, 15 bp, Homo sapiens
gttgaactggggaca

SEQ ID NO: 284309 - DNA, 15 bp, Homo sapiens
tgttgaactggggac

SEQ ID NO: 284310 - DNA, 15 bp, Homo sapiens
gtgttgaactgggga

SEQ ID NO: 284311 - DNA, 15 bp, Homo sapiens
tgtgttgaactgggg

SEQ ID NO: 284312 - DNA, 15 bp, Homo sapiens
ctgtgttgaactggg

SEQ ID NO: 284313 - DNA, 15 bp, Homo sapiens
actgtgttgaactgg

SEQ ID NO: 284314 - DNA, 15 bp, Homo sapiens
tactgtgttgaactg

SEQ ID NO: 284315 - DNA, 15 bp, Homo sapiens
atactgtgttgaact

SEQ ID NO: 284316 - DNA, 15 bp, Homo sapiens
catactgtgttgaac

SEQ ID NO: 284317 - DNA, 15 bp, Homo sapiens
gcatactgtgttgaa

SEQ ID NO: 284318 - DNA, 15 bp, Homo sapiens
tgcatactgtgttga

SEQ ID NO: 284319 - DNA, 15 bp, Homo sapiens
ctgcatactgtgttg

SEQ ID NO: 284320 - DNA, 15 bp, Homo sapiens
tctgcatactgtgtt

SEQ ID NO: 284321 - DNA, 15 bp, Homo sapiens
ctctgcatactgtgt

SEQ ID NO: 284322 - DNA, 15 bp, Homo sapiens
actctgcatactgtg

SEQ ID NO: 284323 - DNA, 15 bp, Homo sapiens
gactctgcatactgt

SEQ ID NO: 284324 - DNA, 15 bp, Homo sapiens
agactctgcatactg

SEQ ID NO: 284325 - DNA, 15 bp, Homo sapiens
gagactctgcatact

SEQ ID NO: 284326 - DNA, 15 bp, Homo sapiens
agagactctgcatac

SEQ ID NO: 284327 - DNA, 15 bp, Homo sapiens
cagagactctgcata

SEQ ID NO: 284328 - DNA, 15 bp, Homo sapiens
acagagactctgcat

SEQ ID NO: 284329 - DNA, 15 bp, Homo sapiens
cacagagactctgca

SEQ ID NO: 284330 - DNA, 15 bp, Homo sapiens
acacagagactctgc

SEQ ID NO: 284331 - DNA, 15 bp, Homo sapiens
aacacagagactctg

SEQ ID NO: 284332 - DNA, 15 bp, Homo sapiens
caacacagagactct

SEQ ID NO: 284333 - DNA, 15 bp, Homo sapiens
acaacacagagactc

SEQ ID NO: 284334 - DNA, 15 bp, Homo sapiens
gacaacacagagact

SEQ ID NO: 284335 - DNA, 15 bp, Homo sapiens
tgacaacacagagac

SEQ ID NO: 284336 - DNA, 15 bp, Homo sapiens
ctgacaacacagaga

SEQ ID NO: 284337 - DNA, 15 bp, Homo sapiens
tctgacaacacagag

SEQ ID NO: 284338 - DNA, 15 bp, Homo sapiens
ttctgacaacacaga

SEQ ID NO: 284339 - DNA, 15 bp, Homo sapiens
tttctgacaacacag

SEQ ID NO: 284340 - DNA, 15 bp, Homo sapiens
ttttctgacaacaca

SEQ ID NO: 284341 - DNA, 15 bp, Homo sapiens
tttttctgacaacac

SEQ ID NO: 284342 - DNA, 15 bp, Homo sapiens
atttttctgacaaca

SEQ ID NO: 284343 - DNA, 15 bp, Homo sapiens
tatttttctgacaac

SEQ ID NO: 284344 - DNA, 15 bp, Homo sapiens
ttatttttctgacaa

SEQ ID NO: 284345 - DNA, 15 bp, Homo sapiens
cttatttttctgaca

SEQ ID NO: 284346 - DNA, 15 bp, Homo sapiens
gcttatttttctgac

SEQ ID NO: 284347 - DNA, 15 bp, Homo sapiens
agcttatttttctga

SEQ ID NO: 284348 - DNA, 15 bp, Homo sapiens
tagcttatttttctg

SEQ ID NO: 284349 - DNA, 15 bp, Homo sapiens
atagcttatttttct

SEQ ID NO: 284350 - DNA, 15 bp, Homo sapiens
tatagcttatttttc

SEQ ID NO: 284351 - DNA, 15 bp, Homo sapiens
ctatagcttattttt

SEQ ID NO: 284352 - DNA, 15 bp, Homo sapiens
actatagcttatttt

SEQ ID NO: 284353 - DNA, 15 bp, Homo sapiens
aactatagcttattt

SEQ ID NO: 284354 - DNA, 15 bp, Homo sapiens
caactatagcttatt

SEQ ID NO: 284355 - DNA, 15 bp, Homo sapiens
acaactatagcttat

SEQ ID NO: 284356 - DNA, 15 bp, Homo sapiens
aacaactatagctta

SEQ ID NO: 284357 - DNA, 15 bp, Homo sapiens
aaacaactatagctt

SEQ ID NO: 284358 - DNA, 15 bp, Homo sapiens
taaacaactatagct

SEQ ID NO: 284359 - DNA, 15 bp, Homo sapiens
gtaaacaactatagc

SEQ ID NO: 284360 - DNA, 15 bp, Homo sapiens
agtaaacaactatag

SEQ ID NO: 284361 - DNA, 15 bp, Homo sapiens
aagtaaacaactata

SEQ ID NO: 284362 - DNA, 15 bp, Homo sapiens
gaagtaaacaactat

SEQ ID NO: 284363 - DNA, 15 bp, Homo sapiens
ggaagtaaacaacta

SEQ ID NO: 284364 - DNA, 15 bp, Homo sapiens
aggaagtaaacaact

SEQ ID NO: 284365 - DNA, 15 bp, Homo sapiens
gaggaagtaaacaac

SEQ ID NO: 284366 - DNA, 15 bp, Homo sapiens
ggaggaagtaaacaa

SEQ ID NO: 284367 - DNA, 15 bp, Homo sapiens
tggaggaagtaaaca

SEQ ID NO: 284368 - DNA, 15 bp, Homo sapiens
atggaggaagtaaac

SEQ ID NO: 284369 - DNA, 15 bp, Homo sapiens
aatggaggaagtaaa

SEQ ID NO: 284370 - DNA, 15 bp, Homo sapiens
aaatggaggaagtaa

SEQ ID NO: 284371 - DNA, 15 bp, Homo sapiens
aaaatggaggaagta

SEQ ID NO: 284372 - DNA, 15 bp, Homo sapiens
taaaatggaggaagt

SEQ ID NO: 284373 - DNA, 15 bp, Homo sapiens
gtaaaatggaggaag

SEQ ID NO: 284374 - DNA, 15 bp, Homo sapiens
agtaaaatggaggaa

SEQ ID NO: 284375 - DNA, 15 bp, Homo sapiens
gagtaaaatggagga

SEQ ID NO: 284376 - DNA, 15 bp, Homo sapiens
agagtaaaatggagg

SEQ ID NO: 284377 - DNA, 15 bp, Homo sapiens
aagagtaaaatggag

SEQ ID NO: 284378 - DNA, 15 bp, Homo sapiens
gaagagtaaaatgga

SEQ ID NO: 284379 - DNA, 15 bp, Homo sapiens
agaagagtaaaatgg

SEQ ID NO: 284380 - DNA, 15 bp, Homo sapiens
gagaagagtaaaatg

SEQ ID NO: 284381 - DNA, 15 bp, Homo sapiens
agagaagagtaaaat

SEQ ID NO: 284382 - DNA, 15 bp, Homo sapiens
aagagaagagtaaaa

SEQ ID NO: 284383 - DNA, 15 bp, Homo sapiens
taagagaagagtaaa

SEQ ID NO: 284384 - DNA, 15 bp, Homo sapiens
ataagagaagagtaa

SEQ ID NO: 284385 - DNA, 15 bp, Homo sapiens
gataagagaagagta

SEQ ID NO: 284386 - DNA, 15 bp, Homo sapiens
tgataagagaagagt

SEQ ID NO: 284387 - DNA, 15 bp, Homo sapiens
ctgataagagaagag

SEQ ID NO: 284388 - DNA, 15 bp, Homo sapiens
gctgataagagaaga

SEQ ID NO: 284389 - DNA, 15 bp, Homo sapiens
tgctgataagagaag

SEQ ID NO: 284390 - DNA, 15 bp, Homo sapiens
ctgctgataagagaa

SEQ ID NO: 284391 - DNA, 15 bp, Homo sapiens
actgctgataagaga

SEQ ID NO: 284392 - DNA, 15 bp, Homo sapiens
aactgctgataagag

SEQ ID NO: 284393 - DNA, 15 bp, Homo sapiens
aaactgctgataaga

SEQ ID NO: 284394 - DNA, 15 bp, Homo sapiens
gaaactgctgataag

SEQ ID NO: 284395 - DNA, 15 bp, Homo sapiens
agaaactgctgataa

SEQ ID NO: 284396 - DNA, 15 bp, Homo sapiens
gagaaactgctgata

SEQ ID NO: 284397 - DNA, 15 bp, Homo sapiens
ggagaaactgctgat

SEQ ID NO: 284398 - DNA, 15 bp, Homo sapiens
gggagaaactgctga

SEQ ID NO: 284399 - DNA, 15 bp, Homo sapiens
agggagaaactgctg

SEQ ID NO: 284400 - DNA, 15 bp, Homo sapiens
gagggagaaactgct

SEQ ID NO: 284401 - DNA, 15 bp, Homo sapiens
ggagggagaaactgc

SEQ ID NO: 284402 - DNA, 15 bp, Homo sapiens
tggagggagaaactg

SEQ ID NO: 284403 - DNA, 15 bp, Homo sapiens
ttggagggagaaact

SEQ ID NO: 284404 - DNA, 15 bp, Homo sapiens
cttggagggagaaac

SEQ ID NO: 284405 - DNA, 15 bp, Homo sapiens
acttggagggagaaa

SEQ ID NO: 284406 - DNA, 15 bp, Homo sapiens
gacttggagggagaa

SEQ ID NO: 284407 - DNA, 15 bp, Homo sapiens
tgacttggagggaga

SEQ ID NO: 284408 - DNA, 15 bp, Homo sapiens
ctgacttggagggag

SEQ ID NO: 284409 - DNA, 15 bp, Homo sapiens
tctgacttggaggga

SEQ ID NO: 284410 - DNA, 15 bp, Homo sapiens
ctctgacttggaggg

SEQ ID NO: 284411 - DNA, 15 bp, Homo sapiens
tctctgacttggagg

SEQ ID NO: 284412 - DNA, 15 bp, Homo sapiens
ctctctgacttggag

SEQ ID NO: 284413 - DNA, 15 bp, Homo sapiens
cctctctgacttgga

SEQ ID NO: 284414 - DNA, 15 bp, Homo sapiens
gcctctctgacttgg

SEQ ID NO: 284415 - DNA, 15 bp, Homo sapiens
tgcctctctgacttg

SEQ ID NO: 284416 - DNA, 15 bp, Homo sapiens
ttgcctctctgactt

SEQ ID NO: 284417 - DNA, 15 bp, Homo sapiens
tttgcctctctgact

SEQ ID NO: 284418 - DNA, 15 bp, Homo sapiens
ttttgcctctctgac

SEQ ID NO: 284419 - DNA, 15 bp, Homo sapiens
cttttgcctctctga

SEQ ID NO: 284420 - DNA, 15 bp, Homo sapiens
tcttttgcctctctg

SEQ ID NO: 284421 - DNA, 15 bp, Homo sapiens
atcttttgcctctct

SEQ ID NO: 284422 - DNA, 15 bp, Homo sapiens
catcttttgcctctc

SEQ ID NO: 284423 - DNA, 15 bp, Homo sapiens
tcatcttttgcctct

SEQ ID NO: 284424 - DNA, 15 bp, Homo sapiens
ctcatcttttgcctc

SEQ ID NO: 284425 - DNA, 15 bp, Homo sapiens
cctcatcttttgcct

SEQ ID NO: 284426 - DNA, 15 bp, Homo sapiens
tcctcatcttttgcc

SEQ ID NO: 284427 - DNA, 15 bp, Homo sapiens
atcctcatcttttgc

SEQ ID NO: 284428 - DNA, 15 bp, Homo sapiens
tatcctcatcttttg

SEQ ID NO: 284429 - DNA, 15 bp, Homo sapiens
gtatcctcatctttt

SEQ ID NO: 284430 - DNA, 15 bp, Homo sapiens
ggtatcctcatcttt

SEQ ID NO: 284431 - DNA, 15 bp, Homo sapiens
cggtatcctcatctt

SEQ ID NO: 284432 - DNA, 15 bp, Homo sapiens
acggtatcctcatct

SEQ ID NO: 284433 - DNA, 15 bp, Homo sapiens
aacggtatcctcatc

SEQ ID NO: 284434 - DNA, 15 bp, Homo sapiens
aaacggtatcctcat

SEQ ID NO: 284435 - DNA, 15 bp, Homo sapiens
caaacggtatcctca

SEQ ID NO: 284436 - DNA, 15 bp, Homo sapiens
tcaaacggtatcctc

SEQ ID NO: 284437 - DNA, 15 bp, Homo sapiens
ctcaaacggtatcct

SEQ ID NO: 284438 - DNA, 15 bp, Homo sapiens
actcaaacggtatcc

SEQ ID NO: 284439 - DNA, 15 bp, Homo sapiens
aactcaaacggtatc

SEQ ID NO: 284440 - DNA, 15 bp, Homo sapiens
taactcaaacggtat

SEQ ID NO: 284441 - DNA, 15 bp, Homo sapiens
ctaactcaaacggta

SEQ ID NO: 284442 - DNA, 15 bp, Homo sapiens
actaactcaaacggt

SEQ ID NO: 284443 - DNA, 15 bp, Homo sapiens
gactaactcaaacgg

SEQ ID NO: 284444 - DNA, 15 bp, Homo sapiens
agactaactcaaacg

SEQ ID NO: 284445 - DNA, 15 bp, Homo sapiens
gagactaactcaaac

SEQ ID NO: 284446 - DNA, 15 bp, Homo sapiens
cgagactaactcaaa

SEQ ID NO: 284447 - DNA, 15 bp, Homo sapiens
gcgagactaactcaa

SEQ ID NO: 284448 - DNA, 15 bp, Homo sapiens
agcgagactaactca

SEQ ID NO: 284449 - DNA, 15 bp, Homo sapiens
gagcgagactaactc

SEQ ID NO: 284450 - DNA, 15 bp, Homo sapiens
tgagcgagactaact

SEQ ID NO: 284451 - DNA, 15 bp, Homo sapiens
ctgagcgagactaac

SEQ ID NO: 284452 - DNA, 15 bp, Homo sapiens
actgagcgagactaa

SEQ ID NO: 284453 - DNA, 15 bp, Homo sapiens
gactgagcgagacta

SEQ ID NO: 284454 - DNA, 15 bp, Homo sapiens
tgactgagcgagact

SEQ ID NO: 284455 - DNA, 15 bp, Homo sapiens
ctgactgagcgagac

SEQ ID NO: 284456 - DNA, 15 bp, Homo sapiens
actgactgagcgaga

SEQ ID NO: 284457 - DNA, 15 bp, Homo sapiens
gactgactgagcgag

SEQ ID NO: 284458 - DNA, 15 bp, Homo sapiens
agactgactgagcga

SEQ ID NO: 284459 - DNA, 15 bp, Homo sapiens
gagactgactgagcg

SEQ ID NO: 284460 - DNA, 15 bp, Homo sapiens
agagactgactgagc

SEQ ID NO: 284461 - DNA, 15 bp, Homo sapiens
gagagactgactgag

SEQ ID NO: 284462 - DNA, 15 bp, Homo sapiens
tgagagactgactga

SEQ ID NO: 284463 - DNA, 15 bp, Homo sapiens
atgagagactgactg

SEQ ID NO: 284464 - DNA, 15 bp, Homo sapiens
aatgagagactgact

SEQ ID NO: 284465 - DNA, 15 bp, Homo sapiens
aaatgagagactgac

SEQ ID NO: 284466 - DNA, 15 bp, Homo sapiens
caaatgagagactga

SEQ ID NO: 284467 - DNA, 15 bp, Homo sapiens
tcaaatgagagactg

SEQ ID NO: 284468 - DNA, 15 bp, Homo sapiens
atcaaatgagagact

SEQ ID NO: 284469 - DNA, 15 bp, Homo sapiens
tatcaaatgagagac

SEQ ID NO: 284470 - DNA, 15 bp, Homo sapiens
atatcaaatgagaga

SEQ ID NO: 284471 - DNA, 15 bp, Homo sapiens
aatatcaaatgagag

SEQ ID NO: 284472 - DNA, 15 bp, Homo sapiens
caatatcaaatgaga

SEQ ID NO: 284473 - DNA, 15 bp, Homo sapiens
ccaatatcaaatgag

SEQ ID NO: 284474 - DNA, 15 bp, Homo sapiens
accaatatcaaatga

SEQ ID NO: 284475 - DNA, 15 bp, Homo sapiens
taccaatatcaaatg

SEQ ID NO: 284476 - DNA, 15 bp, Homo sapiens
gtaccaatatcaaat

SEQ ID NO: 284477 - DNA, 15 bp, Homo sapiens
ggtaccaatatcaaa

SEQ ID NO: 284478 - DNA, 15 bp, Homo sapiens
tggtaccaatatcaa

SEQ ID NO: 284479 - DNA, 15 bp, Homo sapiens
ctggtaccaatatca

SEQ ID NO: 284480 - DNA, 15 bp, Homo sapiens
gctggtaccaatatc

SEQ ID NO: 284481 - DNA, 15 bp, Homo sapiens
tgctggtaccaatat

SEQ ID NO: 284482 - DNA, 15 bp, Homo sapiens
gtgctggtaccaata

SEQ ID NO: 284483 - DNA, 15 bp, Homo sapiens
agtgctggtaccaat

SEQ ID NO: 284484 - DNA, 15 bp, Homo sapiens
aagtgctggtaccaa

SEQ ID NO: 284485 - DNA, 15 bp, Homo sapiens
aaagtgctggtacca

SEQ ID NO: 284486 - DNA, 15 bp, Homo sapiens
taaagtgctggtacc

SEQ ID NO: 284487 - DNA, 15 bp, Homo sapiens
ttaaagtgctggtac

SEQ ID NO: 284488 - DNA, 15 bp, Homo sapiens
attaaagtgctggta

SEQ ID NO: 284489 - DNA, 15 bp, Homo sapiens
tattaaagtgctggt

SEQ ID NO: 284490 - DNA, 15 bp, Homo sapiens
gtattaaagtgctgg

SEQ ID NO: 284491 - DNA, 15 bp, Homo sapiens
ggtattaaagtgctg

SEQ ID NO: 284492 - DNA, 15 bp, Homo sapiens
aggtattaaagtgct

SEQ ID NO: 284493 - DNA, 15 bp, Homo sapiens
taggtattaaagtgc

SEQ ID NO: 284494 - DNA, 15 bp, Homo sapiens
ttaggtattaaagtg

SEQ ID NO: 284495 - DNA, 15 bp, Homo sapiens
attaggtattaaagt

SEQ ID NO: 284496 - DNA, 15 bp, Homo sapiens
tattaggtattaaag

SEQ ID NO: 284497 - DNA, 15 bp, Homo sapiens
ttattaggtattaaa

SEQ ID NO: 284498 - DNA, 15 bp, Homo sapiens
tttattaggtattaa

SEQ ID NO: 284499 - DNA, 15 bp, Homo sapiens
ttttattaggtatta

SEQ ID NO: 284500 - DNA, 15 bp, Homo sapiens
attttattaggtatt

SEQ ID NO: 284501 - DNA, 15 bp, Homo sapiens
cattttattaggtat

SEQ ID NO: 284502 - DNA, 15 bp, Homo sapiens
tcattttattaggta

SEQ ID NO: 284503 - DNA, 15 bp, Homo sapiens
ttcattttattaggt

SEQ ID NO: 284504 - DNA, 15 bp, Homo sapiens
tttcattttattagg

SEQ ID NO: 284505 - DNA, 15 bp, Homo sapiens
ctttcattttattag

SEQ ID NO: 284506 - DNA, 15 bp, Homo sapiens
gctttcattttatta

SEQ ID NO: 284507 - DNA, 15 bp, Homo sapiens
tgctttcattttatt

SEQ ID NO: 284508 - DNA, 15 bp, Homo sapiens
ttgctttcattttat

SEQ ID NO: 284509 - DNA, 15 bp, Homo sapiens
tttgctttcatttta

SEQ ID NO: 284510 - DNA, 15 bp, Homo sapiens
ttttgctttcatttt

SEQ ID NO: 284511 - DNA, 15 bp, Homo sapiens
cttttgctttcattt

SEQ ID NO: 284512 - DNA, 15 bp, Homo sapiens
tcttttgctttcatt

SEQ ID NO: 284513 - DNA, 15 bp, Homo sapiens
ttcttttgctttcat

SEQ ID NO: 284514 - DNA, 15 bp, Homo sapiens
attcttttgctttca

SEQ ID NO: 284515 - DNA, 15 bp, Homo sapiens
cattcttttgctttc

SEQ ID NO: 284516 - DNA, 15 bp, Homo sapiens
acattcttttgcttt

SEQ ID NO: 284517 - DNA, 15 bp, Homo sapiens
tacattcttttgctt

SEQ ID NO: 284518 - DNA, 15 bp, Homo sapiens
gtacattcttttgct

SEQ ID NO: 284519 - DNA, 15 bp, Homo sapiens
agtacattcttttgc

SEQ ID NO: 284520 - DNA, 15 bp, Homo sapiens
aagtacattcttttg

SEQ ID NO: 284521 - DNA, 15 bp, Homo sapiens
caagtacattctttt

SEQ ID NO: 284522 - DNA, 15 bp, Homo sapiens
tcaagtacattcttt

SEQ ID NO: 284523 - DNA, 15 bp, Homo sapiens
ctcaagtacattctt

SEQ ID NO: 284524 - DNA, 15 bp, Homo sapiens
tctcaagtacattct

SEQ ID NO: 284525 - DNA, 15 bp, Homo sapiens
ctctcaagtacattc

SEQ ID NO: 284526 - DNA, 15 bp, Homo sapiens
tctctcaagtacatt

SEQ ID NO: 284527 - DNA, 15 bp, Homo sapiens
ctctctcaagtacat

SEQ ID NO: 284528 - DNA, 15 bp, Homo sapiens
tctctctcaagtaca

SEQ ID NO: 284529 - DNA, 15 bp, Homo sapiens
atctctctcaagtac

SEQ ID NO: 284530 - DNA, 15 bp, Homo sapiens
aatctctctcaagta

SEQ ID NO: 284531 - DNA, 15 bp, Homo sapiens
gaatctctctcaagt

SEQ ID NO: 284532 - DNA, 15 bp, Homo sapiens
agaatctctctcaag

SEQ ID NO: 284533 - DNA, 15 bp, Homo sapiens
aagaatctctctcaa

SEQ ID NO: 284534 - DNA, 15 bp, Homo sapiens
aaagaatctctctca

SEQ ID NO: 284535 - DNA, 15 bp, Homo sapiens
gaaagaatctctctc

SEQ ID NO: 284536 - DNA, 15 bp, Homo sapiens
tgaaagaatctctct

SEQ ID NO: 284537 - DNA, 15 bp, Homo sapiens
atgaaagaatctctc

SEQ ID NO: 284538 - DNA, 15 bp, Homo sapiens
gatgaaagaatctct

SEQ ID NO: 284539 - DNA, 15 bp, Homo sapiens
agatgaaagaatctc

SEQ ID NO: 284540 - DNA, 15 bp, Homo sapiens
cagatgaaagaatct

SEQ ID NO: 284541 - DNA, 15 bp, Homo sapiens
tcagatgaaagaatc

SEQ ID NO: 284542 - DNA, 15 bp, Homo sapiens
gtcagatgaaagaat

SEQ ID NO: 284543 - DNA, 15 bp, Homo sapiens
agtcagatgaaagaa

SEQ ID NO: 284544 - DNA, 15 bp, Homo sapiens
aagtcagatgaaaga

SEQ ID NO: 284545 - DNA, 15 bp, Homo sapiens
gaagtcagatgaaag

SEQ ID NO: 284546 - DNA, 15 bp, Homo sapiens
tgaagtcagatgaaa

SEQ ID NO: 284547 - DNA, 15 bp, Homo sapiens
gtgaagtcagatgaa

SEQ ID NO: 284548 - DNA, 15 bp, Homo sapiens
ggtgaagtcagatga

SEQ ID NO: 284549 - DNA, 15 bp, Homo sapiens
cggtgaagtcagatg

SEQ ID NO: 284550 - DNA, 15 bp, Homo sapiens
acggtgaagtcagat

SEQ ID NO: 284551 - DNA, 15 bp, Homo sapiens
aacggtgaagtcaga

SEQ ID NO: 284552 - DNA, 15 bp, Homo sapiens
aaacggtgaagtcag

SEQ ID NO: 284553 - DNA, 15 bp, Homo sapiens
aaaacggtgaagtca

SEQ ID NO: 284554 - DNA, 15 bp, Homo sapiens
aaaaacggtgaagtc

SEQ ID NO: 284555 - DNA, 15 bp, Homo sapiens
taaaaacggtgaagt

SEQ ID NO: 284556 - DNA, 15 bp, Homo sapiens
gtaaaaacggtgaag

SEQ ID NO: 284557 - DNA, 15 bp, Homo sapiens
ggtaaaaacggtgaa

SEQ ID NO: 284558 - DNA, 15 bp, Homo sapiens
aggtaaaaacggtga

SEQ ID NO: 284559 - DNA, 15 bp, Homo sapiens
taggtaaaaacggtg

SEQ ID NO: 284560 - DNA, 15 bp, Homo sapiens
ctaggtaaaaacggt

SEQ ID NO: 284561 - DNA, 15 bp, Homo sapiens
tctaggtaaaaacgg

SEQ ID NO: 284562 - DNA, 15 bp, Homo sapiens
ttctaggtaaaaacg

SEQ ID NO: 284563 - DNA, 15 bp, Homo sapiens
tttctaggtaaaaac

SEQ ID NO: 284564 - DNA, 15 bp, Homo sapiens
atttctaggtaaaaa

SEQ ID NO: 284565 - DNA, 15 bp, Homo sapiens
gatttctaggtaaaa

SEQ ID NO: 284566 - DNA, 15 bp, Homo sapiens
ggatttctaggtaaa

SEQ ID NO: 284567 - DNA, 15 bp, Homo sapiens
aggatttctaggtaa

SEQ ID NO: 284568 - DNA, 15 bp, Homo sapiens
aaggatttctaggta

SEQ ID NO: 284569 - DNA, 15 bp, Homo sapiens
caaggatttctaggt

SEQ ID NO: 284570 - DNA, 15 bp, Homo sapiens
tcaaggatttctagg

SEQ ID NO: 284571 - DNA, 15 bp, Homo sapiens
atcaaggatttctag

SEQ ID NO: 284572 - DNA, 15 bp, Homo sapiens
tatcaaggatttcta

SEQ ID NO: 284573 - DNA, 15 bp, Homo sapiens
atatcaaggatttct

SEQ ID NO: 284574 - DNA, 15 bp, Homo sapiens
gatatcaaggatttc

SEQ ID NO: 284575 - DNA, 15 bp, Homo sapiens
cgatatcaaggattt

SEQ ID NO: 284576 - DNA, 15 bp, Homo sapiens
acgatatcaaggatt

SEQ ID NO: 284577 - DNA, 15 bp, Homo sapiens
aacgatatcaaggat

SEQ ID NO: 284578 - DNA, 15 bp, Homo sapiens
gaacgatatcaagga

SEQ ID NO: 284579 - DNA, 15 bp, Homo sapiens
agaacgatatcaagg

SEQ ID NO: 284580 - DNA, 15 bp, Homo sapiens
aagaacgatatcaag

SEQ ID NO: 284581 - DNA, 15 bp, Homo sapiens
aaagaacgatatcaa

SEQ ID NO: 284582 - DNA, 15 bp, Homo sapiens
taaagaacgatatca

SEQ ID NO: 284583 - DNA, 15 bp, Homo sapiens
gtaaagaacgatatc

SEQ ID NO: 284584 - DNA, 15 bp, Homo sapiens
ggtaaagaacgatat

SEQ ID NO: 284585 - DNA, 15 bp, Homo sapiens
tggtaaagaacgata

SEQ ID NO: 284586 - DNA, 15 bp, Homo sapiens
gtggtaaagaacgat

SEQ ID NO: 284587 - DNA, 15 bp, Homo sapiens
agtggtaaagaacga

SEQ ID NO: 284588 - DNA, 15 bp, Homo sapiens
tagtggtaaagaacg

SEQ ID NO: 284589 - DNA, 15 bp, Homo sapiens
atagtggtaaagaac

SEQ ID NO: 284590 - DNA, 15 bp, Homo sapiens
catagtggtaaagaa

SEQ ID NO: 284591 - DNA, 15 bp, Homo sapiens
ccatagtggtaaaga

SEQ ID NO: 284592 - DNA, 15 bp, Homo sapiens
accatagtggtaaag

SEQ ID NO: 284593 - DNA, 15 bp, Homo sapiens
taccatagtggtaaa

SEQ ID NO: 284594 - DNA, 15 bp, Homo sapiens
ataccatagtggtaa

SEQ ID NO: 284595 - DNA, 15 bp, Homo sapiens
aataccatagtggta

SEQ ID NO: 284596 - DNA, 15 bp, Homo sapiens
aaataccatagtggt

SEQ ID NO: 284597 - DNA, 15 bp, Homo sapiens
aaaataccatagtgg

SEQ ID NO: 284598 - DNA, 15 bp, Homo sapiens
taaaataccatagtg

SEQ ID NO: 284599 - DNA, 15 bp, Homo sapiens
ttaaaataccatagt

SEQ ID NO: 284600 - DNA, 15 bp, Homo sapiens
tttaaaataccatag

SEQ ID NO: 284601 - DNA, 15 bp, Homo sapiens
ttttaaaataccata

SEQ ID NO: 284602 - DNA, 15 bp, Homo sapiens
attttaaaataccat

SEQ ID NO: 284603 - DNA, 15 bp, Homo sapiens
tattttaaaatacca

SEQ ID NO: 284604 - DNA, 15 bp, Homo sapiens
ttattttaaaatacc

SEQ ID NO: 284605 - DNA, 15 bp, Homo sapiens
gttattttaaaatac

SEQ ID NO: 284606 - DNA, 15 bp, Homo sapiens
agttattttaaaata

SEQ ID NO: 284607 - DNA, 15 bp, Homo sapiens
ataagttattttaaa

SEQ ID NO: 284608 - DNA, 15 bp, Homo sapiens
aataagttattttaa

SEQ ID NO: 284609 - DNA, 15 bp, Homo sapiens
aaataagttatttta

SEQ ID NO: 284610 - DNA, 15 bp, Homo sapiens
caaataagttatttt

SEQ ID NO: 284611 - DNA, 15 bp, Homo sapiens
acaaataagttattt

SEQ ID NO: 284612 - DNA, 15 bp, Homo sapiens
cacaaataagttatt

SEQ ID NO: 284613 - DNA, 15 bp, Homo sapiens
tcacaaataagttat

SEQ ID NO: 284614 - DNA, 15 bp, Homo sapiens
ttcacaaataagtta

SEQ ID NO: 284615 - DNA, 15 bp, Homo sapiens
attcacaaataagtt

SEQ ID NO: 284616 - DNA, 15 bp, Homo sapiens
tattcacaaataagt

SEQ ID NO: 284617 - DNA, 15 bp, Homo sapiens
atattcacaaataag

SEQ ID NO: 284618 - DNA, 15 bp, Homo sapiens
tatattcacaaataa

SEQ ID NO: 284619 - DNA, 15 bp, Homo sapiens
atatattcacaaata

SEQ ID NO: 284620 - DNA, 15 bp, Homo sapiens
aatatattcacaaat

SEQ ID NO: 284621 - DNA, 15 bp, Homo sapiens
caatatattcacaaa

SEQ ID NO: 284622 - DNA, 15 bp, Homo sapiens
gcaatatattcacaa

SEQ ID NO: 284623 - DNA, 15 bp, Homo sapiens
tgcaatatattcaca

SEQ ID NO: 284624 - DNA, 15 bp, Homo sapiens
ctgcaatatattcac

SEQ ID NO: 284625 - DNA, 15 bp, Homo sapiens
tctgcaatatattca

SEQ ID NO: 284626 - DNA, 15 bp, Homo sapiens
gtctgcaatatattc

SEQ ID NO: 284627 - DNA, 15 bp, Homo sapiens
tgtctgcaatatatt

SEQ ID NO: 284628 - DNA, 15 bp, Homo sapiens
atgtctgcaatatat

SEQ ID NO: 284629 - DNA, 15 bp, Homo sapiens
tatgtctgcaatata

SEQ ID NO: 284630 - DNA, 15 bp, Homo sapiens
atatgtctgcaatat

SEQ ID NO: 284631 - DNA, 15 bp, Homo sapiens
aatatgtctgcaata

SEQ ID NO: 284632 - DNA, 15 bp, Homo sapiens
aaatatgtctgcaat

SEQ ID NO: 284633 - DNA, 15 bp, Homo sapiens
aaaatatgtctgcaa

SEQ ID NO: 284634 - DNA, 15 bp, Homo sapiens
aaaaatatgtctgca

SEQ ID NO: 284635 - DNA, 15 bp, Homo sapiens
aaaaaatatgtctgc

SEQ ID NO: 284636 - DNA, 15 bp, Homo sapiens
caaaaaatatgtctg

SEQ ID NO: 284637 - DNA, 15 bp, Homo sapiens
gcaaaaaatatgtct

SEQ ID NO: 284638 - DNA, 15 bp, Homo sapiens
tgcaaaaaatatgtc

SEQ ID NO: 284639 - DNA, 15 bp, Homo sapiens
gtgcaaaaaatatgt

SEQ ID NO: 284640 - DNA, 15 bp, Homo sapiens
ggtgcaaaaaatatg

SEQ ID NO: 284641 - DNA, 15 bp, Homo sapiens
tggtgcaaaaaatat

SEQ ID NO: 284642 - DNA, 15 bp, Homo sapiens
atggtgcaaaaaata

SEQ ID NO: 284643 - DNA, 15 bp, Homo sapiens
tatggtgcaaaaaat

SEQ ID NO: 284644 - DNA, 15 bp, Homo sapiens
gtatggtgcaaaaaa

SEQ ID NO: 284645 - DNA, 15 bp, Homo sapiens
ggtatggtgcaaaaa

SEQ ID NO: 284646 - DNA, 15 bp, Homo sapiens
tggtatggtgcaaaa

SEQ ID NO: 284647 - DNA, 15 bp, Homo sapiens
atggtatggtgcaaa

SEQ ID NO: 284648 - DNA, 15 bp, Homo sapiens
aatggtatggtgcaa

SEQ ID NO: 284649 - DNA, 15 bp, Homo sapiens
caatggtatggtgca

SEQ ID NO: 284650 - DNA, 15 bp, Homo sapiens
acaatggtatggtgc

SEQ ID NO: 284651 - DNA, 15 bp, Homo sapiens
tacaatggtatggtg

SEQ ID NO: 284652 - DNA, 15 bp, Homo sapiens
atacaatggtatggt

SEQ ID NO: 284653 - DNA, 15 bp, Homo sapiens
gatacaatggtatgg

SEQ ID NO: 284654 - DNA, 15 bp, Homo sapiens
agatacaatggtatg

SEQ ID NO: 284655 - DNA, 15 bp, Homo sapiens
tagatacaatggtat

SEQ ID NO: 284656 - DNA, 15 bp, Homo sapiens
ctagatacaatggta

SEQ ID NO: 284657 - DNA, 15 bp, Homo sapiens
tctagatacaatggt

SEQ ID NO: 284658 - DNA, 15 bp, Homo sapiens
ttctagatacaatgg

SEQ ID NO: 284659 - DNA, 15 bp, Homo sapiens
tttctagatacaatg

SEQ ID NO: 284660 - DNA, 15 bp, Homo sapiens
ttttctagatacaat

SEQ ID NO: 284661 - DNA, 15 bp, Homo sapiens
gttttctagatacaa

SEQ ID NO: 284662 - DNA, 15 bp, Homo sapiens
ggttttctagataca

SEQ ID NO: 284663 - DNA, 15 bp, Homo sapiens
aggttttctagatac

SEQ ID NO: 284664 - DNA, 15 bp, Homo sapiens
taggttttctagata

SEQ ID NO: 284665 - DNA, 15 bp, Homo sapiens
ataggttttctagat

SEQ ID NO: 284666 - DNA, 15 bp, Homo sapiens
tataggttttctaga

SEQ ID NO: 284667 - DNA, 15 bp, Homo sapiens
ttataggttttctag

SEQ ID NO: 284668 - DNA, 15 bp, Homo sapiens
tttataggttttcta

SEQ ID NO: 284669 - DNA, 15 bp, Homo sapiens
ctttataggttttct

SEQ ID NO: 284670 - DNA, 15 bp, Homo sapiens
tctttataggttttc

SEQ ID NO: 284671 - DNA, 15 bp, Homo sapiens
atctttataggtttt

SEQ ID NO: 284672 - DNA, 15 bp, Homo sapiens
catctttataggttt

SEQ ID NO: 284673 - DNA, 15 bp, Homo sapiens
gcatctttataggtt

SEQ ID NO: 284674 - DNA, 15 bp, Homo sapiens
tgcatctttataggt

SEQ ID NO: 284675 - DNA, 15 bp, Homo sapiens
ttgcatctttatagg

SEQ ID NO: 284676 - DNA, 15 bp, Homo sapiens
gttgcatctttatag

SEQ ID NO: 284677 - DNA, 15 bp, Homo sapiens
cgttgcatctttata

SEQ ID NO: 284678 - DNA, 15 bp, Homo sapiens
acgttgcatctttat

SEQ ID NO: 284679 - DNA, 15 bp, Homo sapiens
aacgttgcatcttta

SEQ ID NO: 284680 - DNA, 15 bp, Homo sapiens
taacgttgcatcttt

SEQ ID NO: 284681 - DNA, 15 bp, Homo sapiens
ataacgttgcatctt

SEQ ID NO: 284682 - DNA, 15 bp, Homo sapiens
gataacgttgcatct

SEQ ID NO: 284683 - DNA, 15 bp, Homo sapiens
agataacgttgcatc

SEQ ID NO: 284684 - DNA, 15 bp, Homo sapiens
cagataacgttgcat

SEQ ID NO: 284685 - DNA, 15 bp, Homo sapiens
acagataacgttgca

SEQ ID NO: 284686 - DNA, 15 bp, Homo sapiens
aacagataacgttgc

SEQ ID NO: 284687 - DNA, 15 bp, Homo sapiens
aaacagataacgttg

SEQ ID NO: 284688 - DNA, 15 bp, Homo sapiens
aaaacagataacgtt

SEQ ID NO: 284689 - DNA, 15 bp, Homo sapiens
gaaaacagataacgt

SEQ ID NO: 284690 - DNA, 15 bp, Homo sapiens
agaaaacagataacg

SEQ ID NO: 284691 - DNA, 15 bp, Homo sapiens
gagaaaacagataac

SEQ ID NO: 284692 - DNA, 15 bp, Homo sapiens
tgagaaaacagataa

SEQ ID NO: 284693 - DNA, 15 bp, Homo sapiens
gtgagaaaacagata

SEQ ID NO: 284694 - DNA, 15 bp, Homo sapiens
tgtgagaaaacagat

SEQ ID NO: 284695 - DNA, 15 bp, Homo sapiens
ttgtgagaaaacaga

SEQ ID NO: 284696 - DNA, 15 bp, Homo sapiens
tttgtgagaaaacag

SEQ ID NO: 284697 - DNA, 15 bp, Homo sapiens
ctttgtgagaaaaca

SEQ ID NO: 284698 - DNA, 15 bp, Homo sapiens
actttgtgagaaaac

SEQ ID NO: 284699 - DNA, 15 bp, Homo sapiens
aactttgtgagaaaa

SEQ ID NO: 284700 - DNA, 15 bp, Homo sapiens
aaactttgtgagaaa

SEQ ID NO: 284701 - DNA, 15 bp, Homo sapiens
gaaactttgtgagaa

SEQ ID NO: 284702 - DNA, 15 bp, Homo sapiens
agaaactttgtgaga

SEQ ID NO: 284703 - DNA, 15 bp, Homo sapiens
cagaaactttgtgag

SEQ ID NO: 284704 - DNA, 15 bp, Homo sapiens
gcagaaactttgtga

SEQ ID NO: 284705 - DNA, 15 bp, Homo sapiens
tgcagaaactttgtg

SEQ ID NO: 284706 - DNA, 15 bp, Homo sapiens
gtgcagaaactttgt

SEQ ID NO: 284707 - DNA, 15 bp, Homo sapiens
tgtgcagaaactttg

SEQ ID NO: 284708 - DNA, 15 bp, Homo sapiens
atgtgcagaaacttt

SEQ ID NO: 284709 - DNA, 15 bp, Homo sapiens
gatgtgcagaaactt

SEQ ID NO: 284710 - DNA, 15 bp, Homo sapiens
ggatgtgcagaaact

SEQ ID NO: 284711 - DNA, 15 bp, Homo sapiens
tggatgtgcagaaac

SEQ ID NO: 284712 - DNA, 15 bp, Homo sapiens
ctggatgtgcagaaa

SEQ ID NO: 284713 - DNA, 15 bp, Homo sapiens
actggatgtgcagaa

SEQ ID NO: 284714 - DNA, 15 bp, Homo sapiens
cactggatgtgcaga

SEQ ID NO: 284715 - DNA, 15 bp, Homo sapiens
acactggatgtgcag

SEQ ID NO: 284716 - DNA, 15 bp, Homo sapiens
aacactggatgtgca

SEQ ID NO: 284717 - DNA, 15 bp, Homo sapiens
aaacactggatgtgc

SEQ ID NO: 284718 - DNA, 15 bp, Homo sapiens
caaacactggatgtg

SEQ ID NO: 284719 - DNA, 15 bp, Homo sapiens
gcaaacactggatgt

SEQ ID NO: 284720 - DNA, 15 bp, Homo sapiens
agcaaacactggatg

SEQ ID NO: 284721 - DNA, 15 bp, Homo sapiens
cagcaaacactggat

SEQ ID NO: 284722 - DNA, 15 bp, Homo sapiens
tcagcaaacactgga

SEQ ID NO: 284723 - DNA, 15 bp, Homo sapiens
ctcagcaaacactgg

SEQ ID NO: 284724 - DNA, 15 bp, Homo sapiens
tctcagcaaacactg

SEQ ID NO: 284725 - DNA, 15 bp, Homo sapiens
atctcagcaaacact

SEQ ID NO: 284726 - DNA, 15 bp, Homo sapiens
aatctcagcaaacac

SEQ ID NO: 284727 - DNA, 15 bp, Homo sapiens
taatctcagcaaaca

SEQ ID NO: 284728 - DNA, 15 bp, Homo sapiens
ataatctcagcaaac

SEQ ID NO: 284729 - DNA, 15 bp, Homo sapiens
aataatctcagcaaa

SEQ ID NO: 284730 - DNA, 15 bp, Homo sapiens
taataatctcagcaa

SEQ ID NO: 284731 - DNA, 15 bp, Homo sapiens
gtaataatctcagca

SEQ ID NO: 284732 - DNA, 15 bp, Homo sapiens
agtaataatctcagc

SEQ ID NO: 284733 - DNA, 15 bp, Homo sapiens
cagtaataatctcag

SEQ ID NO: 284734 - DNA, 15 bp, Homo sapiens
ccagtaataatctca

SEQ ID NO: 284735 - DNA, 15 bp, Homo sapiens
accagtaataatctc

SEQ ID NO: 284736 - DNA, 15 bp, Homo sapiens
aaccagtaataatct

SEQ ID NO: 284737 - DNA, 15 bp, Homo sapiens
aaaccagtaataatc

SEQ ID NO: 284738 - DNA, 15 bp, Homo sapiens
taaaccagtaataat

SEQ ID NO: 284739 - DNA, 15 bp, Homo sapiens
ctaaaccagtaataa

SEQ ID NO: 284740 - DNA, 15 bp, Homo sapiens
gctaaaccagtaata

SEQ ID NO: 284741 - DNA, 15 bp, Homo sapiens
tgctaaaccagtaat

SEQ ID NO: 284742 - DNA, 15 bp, Homo sapiens
ctgctaaaccagtaa

SEQ ID NO: 284743 - DNA, 15 bp, Homo sapiens
actgctaaaccagta

SEQ ID NO: 284744 - DNA, 15 bp, Homo sapiens
gactgctaaaccagt

SEQ ID NO: 284745 - DNA, 15 bp, Homo sapiens
tgactgctaaaccag

SEQ ID NO: 284746 - DNA, 15 bp, Homo sapiens
ctgactgctaaacca

SEQ ID NO: 284747 - DNA, 15 bp, Homo sapiens
tctgactgctaaacc

SEQ ID NO: 284748 - DNA, 15 bp, Homo sapiens
atctgactgctaaac

SEQ ID NO: 284749 - DNA, 15 bp, Homo sapiens
tatctgactgctaaa

SEQ ID NO: 284750 - DNA, 15 bp, Homo sapiens
gtatctgactgctaa

SEQ ID NO: 284751 - DNA, 15 bp, Homo sapiens
agtatctgactgcta

SEQ ID NO: 284752 - DNA, 15 bp, Homo sapiens
gagtatctgactgct

SEQ ID NO: 284753 - DNA, 15 bp, Homo sapiens
tgagtatctgactgc

SEQ ID NO: 284754 - DNA, 15 bp, Homo sapiens
ctgagtatctgactg

SEQ ID NO: 284755 - DNA, 15 bp, Homo sapiens
tctgagtatctgact

SEQ ID NO: 284756 - DNA, 15 bp, Homo sapiens
ttctgagtatctgac

SEQ ID NO: 284757 - DNA, 15 bp, Homo sapiens
tttctgagtatctga

SEQ ID NO: 284758 - DNA, 15 bp, Homo sapiens
ttttctgagtatctg

SEQ ID NO: 284759 - DNA, 15 bp, Homo sapiens
attttctgagtatct

SEQ ID NO: 284760 - DNA, 15 bp, Homo sapiens
tattttctgagtatc

SEQ ID NO: 284761 - DNA, 15 bp, Homo sapiens
ctattttctgagtat

SEQ ID NO: 284762 - DNA, 15 bp, Homo sapiens
tctattttctgagta

SEQ ID NO: 284763 - DNA, 15 bp, Homo sapiens
ttctattttctgagt

SEQ ID NO: 284764 - DNA, 15 bp, Homo sapiens
tttctattttctgag

SEQ ID NO: 284765 - DNA, 15 bp, Homo sapiens
ctttctattttctga

SEQ ID NO: 284766 - DNA, 15 bp, Homo sapiens
actttctattttctg

SEQ ID NO: 284767 - DNA, 15 bp, Homo sapiens
cactttctattttct

SEQ ID NO: 284768 - DNA, 15 bp, Homo sapiens
tcactttctattttc

SEQ ID NO: 284769 - DNA, 15 bp, Homo sapiens
ttcactttctatttt

SEQ ID NO: 284770 - DNA, 15 bp, Homo sapiens
attcactttctattt

SEQ ID NO: 284771 - DNA, 15 bp, Homo sapiens
gattcactttctatt

SEQ ID NO: 284772 - DNA, 15 bp, Homo sapiens
tgattcactttctat

SEQ ID NO: 284773 - DNA, 15 bp, Homo sapiens
ttgattcactttcta

SEQ ID NO: 284774 - DNA, 15 bp, Homo sapiens
tttgattcactttct

SEQ ID NO: 284775 - DNA, 15 bp, Homo sapiens
atttgattcactttc

SEQ ID NO: 284776 - DNA, 15 bp, Homo sapiens
aatttgattcacttt

SEQ ID NO: 284777 - DNA, 15 bp, Homo sapiens
caatttgattcactt

SEQ ID NO: 284778 - DNA, 15 bp, Homo sapiens
tcaatttgattcact

SEQ ID NO: 284779 - DNA, 15 bp, Homo sapiens
ttcaatttgattcac

SEQ ID NO: 284780 - DNA, 15 bp, Homo sapiens
gttcaatttgattca

SEQ ID NO: 284781 - DNA, 15 bp, Homo sapiens
agttcaatttgattc

SEQ ID NO: 284782 - DNA, 15 bp, Homo sapiens
aagttcaatttgatt

SEQ ID NO: 284783 - DNA, 15 bp, Homo sapiens
gaagttcaatttgat

SEQ ID NO: 284784 - DNA, 15 bp, Homo sapiens
agaagttcaatttga

SEQ ID NO: 284785 - DNA, 15 bp, Homo sapiens
gagaagttcaatttg

SEQ ID NO: 284786 - DNA, 15 bp, Homo sapiens
agagaagttcaattt

SEQ ID NO: 284787 - DNA, 15 bp, Homo sapiens
aagagaagttcaatt

SEQ ID NO: 284788 - DNA, 15 bp, Homo sapiens
aaagagaagttcaat

SEQ ID NO: 284789 - DNA, 15 bp, Homo sapiens
aaaagagaagttcaa

SEQ ID NO: 284790 - DNA, 15 bp, Homo sapiens
taaaagagaagttca

SEQ ID NO: 284791 - DNA, 15 bp, Homo sapiens
ttaaaagagaagttc

SEQ ID NO: 284792 - DNA, 15 bp, Homo sapiens
tttaaaagagaagtt

SEQ ID NO: 284793 - DNA, 15 bp, Homo sapiens
ttttaaaagagaagt

SEQ ID NO: 284794 - DNA, 15 bp, Homo sapiens
tttttaaaagagaag

SEQ ID NO: 284795 - DNA, 15 bp, Homo sapiens
atttttaaaagagaa

SEQ ID NO: 284796 - DNA, 15 bp, Homo sapiens
tatttttaaaagaga

SEQ ID NO: 284797 - DNA, 15 bp, Homo sapiens
ttatttttaaaagag

SEQ ID NO: 284798 - DNA, 15 bp, Homo sapiens
attatttttaaaaga

SEQ ID NO: 284799 - DNA, 15 bp, Homo sapiens
cattatttttaaaag

SEQ ID NO: 284800 - DNA, 15 bp, Homo sapiens
acattatttttaaaa

SEQ ID NO: 284801 - DNA, 15 bp, Homo sapiens
tacattatttttaaa

SEQ ID NO: 284802 - DNA, 15 bp, Homo sapiens
atacattatttttaa

SEQ ID NO: 284803 - DNA, 15 bp, Homo sapiens
catacattattttta

SEQ ID NO: 284804 - DNA, 15 bp, Homo sapiens
tcatacattattttt

SEQ ID NO: 284805 - DNA, 15 bp, Homo sapiens
gtcatacattatttt

SEQ ID NO: 284806 - DNA, 15 bp, Homo sapiens
tgtcatacattattt

SEQ ID NO: 284807 - DNA, 15 bp, Homo sapiens
atgtcatacattatt

SEQ ID NO: 284808 - DNA, 15 bp, Homo sapiens
catgtcatacattat

SEQ ID NO: 284809 - DNA, 15 bp, Homo sapiens
ccatgtcatacatta

SEQ ID NO: 284810 - DNA, 15 bp, Homo sapiens
tccatgtcatacatt

SEQ ID NO: 284811 - DNA, 15 bp, Homo sapiens
ctccatgtcatacat

SEQ ID NO: 284812 - DNA, 15 bp, Homo sapiens
gctccatgtcataca

SEQ ID NO: 284813 - DNA, 15 bp, Homo sapiens
ggctccatgtcatac

SEQ ID NO: 284814 - DNA, 15 bp, Homo sapiens
tggctccatgtcata

SEQ ID NO: 284815 - DNA, 15 bp, Homo sapiens
atggctccatgtcat

SEQ ID NO: 284816 - DNA, 15 bp, Homo sapiens
tatggctccatgtca

SEQ ID NO: 284817 - DNA, 15 bp, Homo sapiens
ttatggctccatgtc

SEQ ID NO: 284818 - DNA, 15 bp, Homo sapiens
cttatggctccatgt

SEQ ID NO: 284819 - DNA, 15 bp, Homo sapiens
gcttatggctccatg

SEQ ID NO: 284820 - DNA, 15 bp, Homo sapiens
tgcttatggctccat

SEQ ID NO: 284821 - DNA, 15 bp, Homo sapiens
ttgcttatggctcca

SEQ ID NO: 284822 - DNA, 15 bp, Homo sapiens
tttgcttatggctcc

SEQ ID NO: 284823 - DNA, 15 bp, Homo sapiens
atttgcttatggctc

SEQ ID NO: 284824 - DNA, 15 bp, Homo sapiens
aatttgcttatggct

SEQ ID NO: 284825 - DNA, 15 bp, Homo sapiens
aaatttgcttatggc

SEQ ID NO: 284826 - DNA, 15 bp, Homo sapiens
caaatttgcttatgg

SEQ ID NO: 284827 - DNA, 15 bp, Homo sapiens
acaaatttgcttatg

SEQ ID NO: 284828 - DNA, 15 bp, Homo sapiens
tacaaatttgcttat

SEQ ID NO: 284829 - DNA, 15 bp, Homo sapiens
ttacaaatttgctta

SEQ ID NO: 284830 - DNA, 15 bp, Homo sapiens
attacaaatttgctt

SEQ ID NO: 284831 - DNA, 15 bp, Homo sapiens
tattacaaatttgct

SEQ ID NO: 284832 - DNA, 15 bp, Homo sapiens
ctattacaaatttgc

SEQ ID NO: 284833 - DNA, 15 bp, Homo sapiens
gctattacaaatttg

SEQ ID NO: 284834 - DNA, 15 bp, Homo sapiens
agctattacaaattt

SEQ ID NO: 284835 - DNA, 15 bp, Homo sapiens
cagctattacaaatt

SEQ ID NO: 284836 - DNA, 15 bp, Homo sapiens
acagctattacaaat

SEQ ID NO: 284837 - DNA, 15 bp, Homo sapiens
cacagctattacaaa

SEQ ID NO: 284838 - DNA, 15 bp, Homo sapiens
acacagctattacaa

SEQ ID NO: 284839 - DNA, 15 bp, Homo sapiens
aacacagctattaca

SEQ ID NO: 284840 - DNA, 15 bp, Homo sapiens
aaacacagctattac

SEQ ID NO: 284841 - DNA, 15 bp, Homo sapiens
aaaacacagctatta

SEQ ID NO: 284842 - DNA, 15 bp, Homo sapiens
taaaacacagctatt

SEQ ID NO: 284843 - DNA, 15 bp, Homo sapiens
ataaaacacagctat

SEQ ID NO: 284844 - DNA, 15 bp, Homo sapiens
gataaaacacagcta

SEQ ID NO: 284845 - DNA, 15 bp, Homo sapiens
tgataaaacacagct

SEQ ID NO: 284846 - DNA, 15 bp, Homo sapiens
atgataaaacacagc

SEQ ID NO: 284847 - DNA, 15 bp, Homo sapiens
catgataaaacacag

SEQ ID NO: 284848 - DNA, 15 bp, Homo sapiens
tcatgataaaacaca

SEQ ID NO: 284849 - DNA, 15 bp, Homo sapiens
atcatgataaaacac

SEQ ID NO: 284850 - DNA, 15 bp, Homo sapiens
aatcatgataaaaca

SEQ ID NO: 284851 - DNA, 15 bp, Homo sapiens
aaatcatgataaaac

SEQ ID NO: 284852 - DNA, 15 bp, Homo sapiens
caaatcatgataaaa

SEQ ID NO: 284853 - DNA, 15 bp, Homo sapiens
acaaatcatgataaa

SEQ ID NO: 284854 - DNA, 15 bp, Homo sapiens
tacaaatcatgataa

SEQ ID NO: 284855 - DNA, 15 bp, Homo sapiens
atacaaatcatgata

SEQ ID NO: 284856 - DNA, 15 bp, Homo sapiens
tatacaaatcatgat

SEQ ID NO: 284857 - DNA, 15 bp, Homo sapiens
atatacaaatcatga

SEQ ID NO: 284858 - DNA, 15 bp, Homo sapiens
aatatacaaatcatg

SEQ ID NO: 284859 - DNA, 15 bp, Homo sapiens
aaatatacaaatcat

SEQ ID NO: 284860 - DNA, 15 bp, Homo sapiens
aaaatatacaaatca

SEQ ID NO: 284861 - DNA, 15 bp, Homo sapiens
taaaatatacaaatc

SEQ ID NO: 284862 - DNA, 15 bp, Homo sapiens
ataaaatatacaaat

SEQ ID NO: 284863 - DNA, 15 bp, Homo sapiens
cataaaatatacaaa

SEQ ID NO: 284864 - DNA, 15 bp, Homo sapiens
acataaaatatacaa

SEQ ID NO: 284865 - DNA, 15 bp, Homo sapiens
tacataaaatataca

SEQ ID NO: 284866 - DNA, 15 bp, Homo sapiens
ctacataaaatatac

SEQ ID NO: 284867 - DNA, 15 bp, Homo sapiens
gctacataaaatata

SEQ ID NO: 284868 - DNA, 15 bp, Homo sapiens
agctacataaaatat

SEQ ID NO: 284869 - DNA, 15 bp, Homo sapiens
tagctacataaaata

SEQ ID NO: 284870 - DNA, 15 bp, Homo sapiens
gtagctacataaaat

SEQ ID NO: 284871 - DNA, 15 bp, Homo sapiens
tgtagctacataaaa

SEQ ID NO: 284872 - DNA, 15 bp, Homo sapiens
gtgtagctacataaa

SEQ ID NO: 284873 - DNA, 15 bp, Homo sapiens
agtgtagctacataa

SEQ ID NO: 284874 - DNA, 15 bp, Homo sapiens
tagtgtagctacata

SEQ ID NO: 284875 - DNA, 15 bp, Homo sapiens
atagtgtagctacat

SEQ ID NO: 284876 - DNA, 15 bp, Homo sapiens
aatagtgtagctaca

SEQ ID NO: 284877 - DNA, 15 bp, Homo sapiens
aaatagtgtagctac

SEQ ID NO: 284878 - DNA, 15 bp, Homo sapiens
caaatagtgtagcta

SEQ ID NO: 284879 - DNA, 15 bp, Homo sapiens
acaaatagtgtagct

SEQ ID NO: 284880 - DNA, 15 bp, Homo sapiens
aacaaatagtgtagc

SEQ ID NO: 284881 - DNA, 15 bp, Homo sapiens
aaacaaatagtgtag

SEQ ID NO: 284882 - DNA, 15 bp, Homo sapiens
aaaacaaatagtgta

SEQ ID NO: 284883 - DNA, 15 bp, Homo sapiens
gaaaacaaatagtgt

SEQ ID NO: 284884 - DNA, 15 bp, Homo sapiens
agaaaacaaatagtg

SEQ ID NO: 284885 - DNA, 15 bp, Homo sapiens
aagaaaacaaatagt

SEQ ID NO: 284886 - DNA, 15 bp, Homo sapiens
taagaaaacaaatag

SEQ ID NO: 284887 - DNA, 15 bp, Homo sapiens
ctaagaaaacaaata

SEQ ID NO: 284888 - DNA, 15 bp, Homo sapiens
cctaagaaaacaaat

SEQ ID NO: 284889 - DNA, 15 bp, Homo sapiens
acctaagaaaacaaa

SEQ ID NO: 284890 - DNA, 15 bp, Homo sapiens
tacctaagaaaacaa

SEQ ID NO: 284891 - DNA, 15 bp, Homo sapiens
atacctaagaaaaca

SEQ ID NO: 284892 - DNA, 15 bp, Homo sapiens
gatacctaagaaaac

SEQ ID NO: 284893 - DNA, 15 bp, Homo sapiens
agatacctaagaaaa

SEQ ID NO: 284894 - DNA, 15 bp, Homo sapiens
cagatacctaagaaa

SEQ ID NO: 284895 - DNA, 15 bp, Homo sapiens
acagatacctaagaa

SEQ ID NO: 284896 - DNA, 15 bp, Homo sapiens
aacagatacctaaga

SEQ ID NO: 284897 - DNA, 15 bp, Homo sapiens
taacagatacctaag

SEQ ID NO: 284898 - DNA, 15 bp, Homo sapiens
ataacagatacctaa

SEQ ID NO: 284899 - DNA, 15 bp, Homo sapiens
tataacagataccta

SEQ ID NO: 284900 - DNA, 15 bp, Homo sapiens
atataacagatacct

SEQ ID NO: 284901 - DNA, 15 bp, Homo sapiens
catataacagatacc

SEQ ID NO: 284902 - DNA, 15 bp, Homo sapiens
gcatataacagatac

SEQ ID NO: 284903 - DNA, 15 bp, Homo sapiens
tgcatataacagata

SEQ ID NO: 284904 - DNA, 15 bp, Homo sapiens
atgcatataacagat

SEQ ID NO: 284905 - DNA, 15 bp, Homo sapiens
aatgcatataacaga

SEQ ID NO: 284906 - DNA, 15 bp, Homo sapiens
aaatgcatataacag

SEQ ID NO: 284907 - DNA, 15 bp, Homo sapiens
taaatgcatataaca

SEQ ID NO: 284908 - DNA, 15 bp, Homo sapiens
ataaatgcatataac

SEQ ID NO: 284909 - DNA, 15 bp, Homo sapiens
aataaatgcatataa

SEQ ID NO: 284910 - DNA, 15 bp, Homo sapiens
aaataaatgcatata

SEQ ID NO: 284911 - DNA, 15 bp, Homo sapiens
aaaataaatgcatat

SEQ ID NO: 284912 - DNA, 15 bp, Homo sapiens
gaaaataaatgcata

SEQ ID NO: 284913 - DNA, 15 bp, Homo sapiens
agaaaataaatgcat

SEQ ID NO: 284914 - DNA, 15 bp, Homo sapiens
gagaaaataaatgca

SEQ ID NO: 284915 - DNA, 15 bp, Homo sapiens
tgagaaaataaatgc

SEQ ID NO: 284916 - DNA, 15 bp, Homo sapiens
gtgagaaaataaatg

SEQ ID NO: 284917 - DNA, 15 bp, Homo sapiens
tgtgagaaaataaat

SEQ ID NO: 284918 - DNA, 15 bp, Homo sapiens
ctgtgagaaaataaa

SEQ ID NO: 284919 - DNA, 15 bp, Homo sapiens
gctgtgagaaaataa

SEQ ID NO: 284920 - DNA, 15 bp, Homo sapiens
ggctgtgagaaaata

SEQ ID NO: 284921 - DNA, 15 bp, Homo sapiens
tggctgtgagaaaat

SEQ ID NO: 284922 - DNA, 15 bp, Homo sapiens
atggctgtgagaaaa

SEQ ID NO: 284923 - DNA, 15 bp, Homo sapiens
gatggctgtgagaaa

SEQ ID NO: 284924 - DNA, 15 bp, Homo sapiens
agatggctgtgagaa

SEQ ID NO: 284925 - DNA, 15 bp, Homo sapiens
tagatggctgtgaga

SEQ ID NO: 284926 - DNA, 15 bp, Homo sapiens
ctagatggctgtgag

SEQ ID NO: 284927 - DNA, 15 bp, Homo sapiens
actagatggctgtga

SEQ ID NO: 284928 - DNA, 15 bp, Homo sapiens
aactagatggctgtg

SEQ ID NO: 284929 - DNA, 15 bp, Homo sapiens
caactagatggctgt

SEQ ID NO: 284930 - DNA, 15 bp, Homo sapiens
acaactagatggctg

SEQ ID NO: 284931 - DNA, 15 bp, Homo sapiens
tacaactagatggct

SEQ ID NO: 284932 - DNA, 15 bp, Homo sapiens
atacaactagatggc

SEQ ID NO: 284933 - DNA, 15 bp, Homo sapiens
tatacaactagatgg

SEQ ID NO: 284934 - DNA, 15 bp, Homo sapiens
atatacaactagatg

SEQ ID NO: 284935 - DNA, 15 bp, Homo sapiens
tatatacaactagat

SEQ ID NO: 284936 - DNA, 15 bp, Homo sapiens
atatatacaactaga

SEQ ID NO: 284937 - DNA, 15 bp, Homo sapiens
tatatatacaactag

SEQ ID NO: 284938 - DNA, 15 bp, Homo sapiens
atatatatacaacta

SEQ ID NO: 284939 - DNA, 15 bp, Homo sapiens
aatatatatacaact

SEQ ID NO: 284940 - DNA, 15 bp, Homo sapiens
gaatatatatacaac

SEQ ID NO: 284941 - DNA, 15 bp, Homo sapiens
agaatatatatacaa

SEQ ID NO: 284942 - DNA, 15 bp, Homo sapiens
tagaatatatataca

SEQ ID NO: 284943 - DNA, 15 bp, Homo sapiens
ttagaatatatatac

SEQ ID NO: 284944 - DNA, 15 bp, Homo sapiens
attagaatatatata

SEQ ID NO: 284945 - DNA, 15 bp, Homo sapiens
tattagaatatatat

SEQ ID NO: 284946 - DNA, 15 bp, Homo sapiens
ttattagaatatata

SEQ ID NO: 284947 - DNA, 15 bp, Homo sapiens
gttattagaatatat

SEQ ID NO: 284948 - DNA, 15 bp, Homo sapiens
agttattagaatata

SEQ ID NO: 284949 - DNA, 15 bp, Homo sapiens
aagttattagaatat

SEQ ID NO: 284950 - DNA, 15 bp, Homo sapiens
aaagttattagaata

SEQ ID NO: 284951 - DNA, 15 bp, Homo sapiens
taaagttattagaat

SEQ ID NO: 284952 - DNA, 15 bp, Homo sapiens
ttaaagttattagaa

SEQ ID NO: 284953 - DNA, 15 bp, Homo sapiens
tttaaagttattaga

SEQ ID NO: 284954 - DNA, 15 bp, Homo sapiens
ctttaaagttattag

SEQ ID NO: 284955 - DNA, 15 bp, Homo sapiens
tctttaaagttatta

SEQ ID NO: 284956 - DNA, 15 bp, Homo sapiens
atctttaaagttatt

SEQ ID NO: 284957 - DNA, 15 bp, Homo sapiens
aatctttaaagttat

SEQ ID NO: 284958 - DNA, 15 bp, Homo sapiens
aaatctttaaagtta

SEQ ID NO: 284959 - DNA, 15 bp, Homo sapiens
aaaatctttaaagtt

SEQ ID NO: 284960 - DNA, 15 bp, Homo sapiens
taaaatctttaaagt

SEQ ID NO: 284961 - DNA, 15 bp, Homo sapiens
ataaaatctttaaag

SEQ ID NO: 284962 - DNA, 15 bp, Homo sapiens
cataaaatctttaaa

SEQ ID NO: 284963 - DNA, 15 bp, Homo sapiens
ccataaaatctttaa

SEQ ID NO: 284964 - DNA, 15 bp, Homo sapiens
accataaaatcttta

SEQ ID NO: 284965 - DNA, 15 bp, Homo sapiens
caccataaaatcttt

SEQ ID NO: 284966 - DNA, 15 bp, Homo sapiens
tcaccataaaatctt

SEQ ID NO: 284967 - DNA, 15 bp, Homo sapiens
ttcaccataaaatct

SEQ ID NO: 284968 - DNA, 15 bp, Homo sapiens
gttcaccataaaatc

SEQ ID NO: 284969 - DNA, 15 bp, Homo sapiens
tgttcaccataaaat

SEQ ID NO: 284970 - DNA, 15 bp, Homo sapiens
ttgttcaccataaaa

SEQ ID NO: 284971 - DNA, 15 bp, Homo sapiens
attgttcaccataaa

SEQ ID NO: 284972 - DNA, 15 bp, Homo sapiens
aattgttcaccataa

SEQ ID NO: 284973 - DNA, 15 bp, Homo sapiens
taattgttcaccata

SEQ ID NO: 284974 - DNA, 15 bp, Homo sapiens
ataattgttcaccat

SEQ ID NO: 284975 - DNA, 15 bp, Homo sapiens
aataattgttcacca

SEQ ID NO: 284976 - DNA, 15 bp, Homo sapiens
aaataattgttcacc

SEQ ID NO: 284977 - DNA, 15 bp, Homo sapiens
aaaataattgttcac

SEQ ID NO: 284978 - DNA, 15 bp, Homo sapiens
taaaataattgttca

SEQ ID NO: 284979 - DNA, 15 bp, Homo sapiens
ataaaataattgttc

SEQ ID NO: 284980 - DNA, 15 bp, Homo sapiens
tataaaataattgtt

SEQ ID NO: 284981 - DNA, 15 bp, Homo sapiens
ctataaaataattgt

SEQ ID NO: 284982 - DNA, 15 bp, Homo sapiens
tctataaaataattg

SEQ ID NO: 284983 - DNA, 15 bp, Homo sapiens
atctataaaataatt

SEQ ID NO: 284984 - DNA, 15 bp, Homo sapiens
catctataaaataat

SEQ ID NO: 284985 - DNA, 15 bp, Homo sapiens
tcatctataaaataa

SEQ ID NO: 284986 - DNA, 15 bp, Homo sapiens
gtcatctataaaata

SEQ ID NO: 284987 - DNA, 15 bp, Homo sapiens
agtcatctataaaat

SEQ ID NO: 284988 - DNA, 15 bp, Homo sapiens
aagtcatctataaaa

SEQ ID NO: 284989 - DNA, 15 bp, Homo sapiens
aaagtcatctataaa

SEQ ID NO: 284990 - DNA, 15 bp, Homo sapiens
taaagtcatctataa

SEQ ID NO: 284991 - DNA, 15 bp, Homo sapiens
ttaaagtcatctata

SEQ ID NO: 284992 - DNA, 15 bp, Homo sapiens
tttaaagtcatctat

SEQ ID NO: 284993 - DNA, 15 bp, Homo sapiens
atttaaagtcatcta

SEQ ID NO: 284994 - DNA, 15 bp, Homo sapiens
aatttaaagtcatct

SEQ ID NO: 284995 - DNA, 15 bp, Homo sapiens
aaatttaaagtcatc

SEQ ID NO: 284996 - DNA, 15 bp, Homo sapiens
taaatttaaagtcat

SEQ ID NO: 284997 - DNA, 15 bp, Homo sapiens
ataaatttaaagtca

SEQ ID NO: 284998 - DNA, 15 bp, Homo sapiens
tataaatttaaagtc

SEQ ID NO: 284999 - DNA, 15 bp, Homo sapiens
atataaatttaaagt

SEQ ID NO: 285000 - DNA, 15 bp, Homo sapiens
tatataaatttaaag

SEQ ID NO: 285001 - DNA, 15 bp, Homo sapiens
gtatataaatttaaa

SEQ ID NO: 285002 - DNA, 15 bp, Homo sapiens
agtatataaatttaa

SEQ ID NO: 285003 - DNA, 15 bp, Homo sapiens
tagtatataaattta

SEQ ID NO: 285004 - DNA, 15 bp, Homo sapiens
ttagtatataaattt

SEQ ID NO: 285005 - DNA, 15 bp, Homo sapiens
attagtatataaatt

SEQ ID NO: 285006 - DNA, 15 bp, Homo sapiens
aattagtatataaat

SEQ ID NO: 285007 - DNA, 15 bp, Homo sapiens
aaattagtatataaa

SEQ ID NO: 285008 - DNA, 15 bp, Homo sapiens
aaaattagtatataa

SEQ ID NO: 285009 - DNA, 15 bp, Homo sapiens
caaaattagtatata

SEQ ID NO: 285010 - DNA, 15 bp, Homo sapiens
acaaaattagtatat

SEQ ID NO: 285011 - DNA, 15 bp, Homo sapiens
aacaaaattagtata

SEQ ID NO: 285012 - DNA, 15 bp, Homo sapiens
taacaaaattagtat

SEQ ID NO: 285013 - DNA, 15 bp, Homo sapiens
ataacaaaattagta

SEQ ID NO: 285014 - DNA, 15 bp, Homo sapiens
gataacaaaattagt

SEQ ID NO: 285015 - DNA, 15 bp, Homo sapiens
agataacaaaattag

SEQ ID NO: 285016 - DNA, 15 bp, Homo sapiens
gagataacaaaatta

SEQ ID NO: 285017 - DNA, 15 bp, Homo sapiens
agagataacaaaatt

SEQ ID NO: 285018 - DNA, 15 bp, Homo sapiens
aagagataacaaaat

SEQ ID NO: 285019 - DNA, 15 bp, Homo sapiens
taagagataacaaaa

SEQ ID NO: 285020 - DNA, 15 bp, Homo sapiens
ttaagagataacaaa

SEQ ID NO: 285021 - DNA, 15 bp, Homo sapiens
attaagagataacaa

SEQ ID NO: 285022 - DNA, 15 bp, Homo sapiens
cattaagagataaca

SEQ ID NO: 285023 - DNA, 15 bp, Homo sapiens
ccattaagagataac

SEQ ID NO: 285024 - DNA, 15 bp, Homo sapiens
accattaagagataa

SEQ ID NO: 285025 - DNA, 15 bp, Homo sapiens
aaccattaagagata

SEQ ID NO: 285026 - DNA, 15 bp, Homo sapiens
aaaccattaagagat

SEQ ID NO: 285027 - DNA, 15 bp, Homo sapiens
aaaaccattaagaga

SEQ ID NO: 285028 - DNA, 15 bp, Homo sapiens
caaaaccattaagag

SEQ ID NO: 285029 - DNA, 15 bp, Homo sapiens
ccaaaaccattaaga

SEQ ID NO: 285030 - DNA, 15 bp, Homo sapiens
accaaaaccattaag

SEQ ID NO: 285031 - DNA, 15 bp, Homo sapiens
aaccaaaaccattaa

SEQ ID NO: 285032 - DNA, 15 bp, Homo sapiens
taaccaaaaccatta

SEQ ID NO: 285033 - DNA, 15 bp, Homo sapiens
ataaccaaaaccatt

SEQ ID NO: 285034 - DNA, 15 bp, Homo sapiens
aataaccaaaaccat

SEQ ID NO: 285035 - DNA, 15 bp, Homo sapiens
caataaccaaaacca

SEQ ID NO: 285036 - DNA, 15 bp, Homo sapiens
acaataaccaaaacc

SEQ ID NO: 285037 - DNA, 15 bp, Homo sapiens
tacaataaccaaaac

SEQ ID NO: 285038 - DNA, 15 bp, Homo sapiens
ttacaataaccaaaa

SEQ ID NO: 285039 - DNA, 15 bp, Homo sapiens
cttacaataaccaaa

SEQ ID NO: 285040 - DNA, 15 bp, Homo sapiens
tcttacaataaccaa

SEQ ID NO: 285041 - DNA, 15 bp, Homo sapiens
atcttacaataacca

SEQ ID NO: 285042 - DNA, 15 bp, Homo sapiens
aatcttacaataacc

SEQ ID NO: 285043 - DNA, 15 bp, Homo sapiens
aaatcttacaataac

SEQ ID NO: 285044 - DNA, 15 bp, Homo sapiens
aaaatcttacaataa

SEQ ID NO: 285045 - DNA, 15 bp, Homo sapiens
taaaatcttacaata

SEQ ID NO: 285046 - DNA, 15 bp, Homo sapiens
ctaaaatcttacaat

SEQ ID NO: 285047 - DNA, 15 bp, Homo sapiens
tctaaaatcttacaa

SEQ ID NO: 285048 - DNA, 15 bp, Homo sapiens
ctctaaaatcttaca

SEQ ID NO: 285049 - DNA, 15 bp, Homo sapiens
cctctaaaatcttac

SEQ ID NO: 285050 - DNA, 15 bp, Homo sapiens
ccctctaaaatctta

SEQ ID NO: 285051 - DNA, 15 bp, Homo sapiens
cccctctaaaatctt

SEQ ID NO: 285052 - DNA, 15 bp, Homo sapiens
acccctctaaaatct

SEQ ID NO: 285053 - DNA, 15 bp, Homo sapiens
aacccctctaaaatc

SEQ ID NO: 285054 - DNA, 15 bp, Homo sapiens
caacccctctaaaat

SEQ ID NO: 285055 - DNA, 15 bp, Homo sapiens
tcaacccctctaaaa

SEQ ID NO: 285056 - DNA, 15 bp, Homo sapiens
ttcaacccctctaaa

SEQ ID NO: 285057 - DNA, 15 bp, Homo sapiens
tttcaacccctctaa

SEQ ID NO: 285058 - DNA, 15 bp, Homo sapiens
atttcaacccctcta

SEQ ID NO: 285059 - DNA, 15 bp, Homo sapiens
aatttcaacccctct

SEQ ID NO: 285060 - DNA, 15 bp, Homo sapiens
taatttcaacccctc

SEQ ID NO: 285061 - DNA, 15 bp, Homo sapiens
ttaatttcaacccct

SEQ ID NO: 285062 - DNA, 15 bp, Homo sapiens
tttaatttcaacccc

SEQ ID NO: 285063 - DNA, 15 bp, Homo sapiens
ttttaatttcaaccc

SEQ ID NO: 285064 - DNA, 15 bp, Homo sapiens
tttttaatttcaacc

SEQ ID NO: 285065 - DNA, 15 bp, Homo sapiens
atttttaatttcaac

SEQ ID NO: 285066 - DNA, 15 bp, Homo sapiens
tatttttaatttcaa

SEQ ID NO: 285067 - DNA, 15 bp, Homo sapiens
atatttttaatttca

SEQ ID NO: 285068 - DNA, 15 bp, Homo sapiens
tatatttttaatttc

SEQ ID NO: 285069 - DNA, 15 bp, Homo sapiens
atatatttttaattt

SEQ ID NO: 285070 - DNA, 15 bp, Homo sapiens
tatatatttttaatt

SEQ ID NO: 285071 - DNA, 15 bp, Homo sapiens
ttatatatttttaat

SEQ ID NO: 285072 - DNA, 15 bp, Homo sapiens
cttatatatttttaa

SEQ ID NO: 285073 - DNA, 15 bp, Homo sapiens
ccttatatattttta

SEQ ID NO: 285074 - DNA, 15 bp, Homo sapiens
accttatatattttt

SEQ ID NO: 285075 - DNA, 15 bp, Homo sapiens
aaccttatatatttt

SEQ ID NO: 285076 - DNA, 15 bp, Homo sapiens
aaaccttatatattt

SEQ ID NO: 285077 - DNA, 15 bp, Homo sapiens
taaaccttatatatt

SEQ ID NO: 285078 - DNA, 15 bp, Homo sapiens
ctaaaccttatatat

SEQ ID NO: 285079 - DNA, 15 bp, Homo sapiens
tctaaaccttatata

SEQ ID NO: 285080 - DNA, 15 bp, Homo sapiens
atctaaaccttatat

SEQ ID NO: 285081 - DNA, 15 bp, Homo sapiens
tatctaaaccttata

SEQ ID NO: 285082 - DNA, 15 bp, Homo sapiens
atatctaaaccttat

SEQ ID NO: 285083 - DNA, 15 bp, Homo sapiens
tatatctaaacctta

SEQ ID NO: 285084 - DNA, 15 bp, Homo sapiens
ttatatctaaacctt

SEQ ID NO: 285085 - DNA, 15 bp, Homo sapiens
tttatatctaaacct

SEQ ID NO: 285086 - DNA, 15 bp, Homo sapiens
atttatatctaaacc

SEQ ID NO: 285087 - DNA, 15 bp, Homo sapiens
tatttatatctaaac

SEQ ID NO: 285088 - DNA, 15 bp, Homo sapiens
ttatttatatctaaa

SEQ ID NO: 285089 - DNA, 15 bp, Homo sapiens
attatttatatctaa

SEQ ID NO: 285090 - DNA, 15 bp, Homo sapiens
aattatttatatcta

SEQ ID NO: 285091 - DNA, 15 bp, Homo sapiens
caattatttatatct

SEQ ID NO: 285092 - DNA, 15 bp, Homo sapiens
ccaattatttatatc

SEQ ID NO: 285093 - DNA, 15 bp, Homo sapiens
tccaattatttatat

SEQ ID NO: 285094 - DNA, 15 bp, Homo sapiens
ttccaattatttata

SEQ ID NO: 285095 - DNA, 15 bp, Homo sapiens
attccaattatttat

SEQ ID NO: 285096 - DNA, 15 bp, Homo sapiens
tattccaattattta

SEQ ID NO: 285097 - DNA, 15 bp, Homo sapiens
ttattccaattattt

SEQ ID NO: 285098 - DNA, 15 bp, Homo sapiens
tttattccaattatt

SEQ ID NO: 285099 - DNA, 15 bp, Homo sapiens
ttttattccaattat

SEQ ID NO: 285100 - DNA, 15 bp, Homo sapiens
attttattccaatta

SEQ ID NO: 285101 - DNA, 15 bp, Homo sapiens
gattttattccaatt

SEQ ID NO: 285102 - DNA, 15 bp, Homo sapiens
tgattttattccaat

SEQ ID NO: 285103 - DNA, 15 bp, Homo sapiens
atgattttattccaa

SEQ ID NO: 285104 - DNA, 15 bp, Homo sapiens
tatgattttattcca

SEQ ID NO: 285105 - DNA, 15 bp, Homo sapiens
ttatgattttattcc

SEQ ID NO: 285106 - DNA, 15 bp, Homo sapiens
attatgattttattc

SEQ ID NO: 285107 - DNA, 15 bp, Homo sapiens
aattatgattttatt

SEQ ID NO: 285108 - DNA, 15 bp, Homo sapiens
aaattatgattttat

SEQ ID NO: 285109 - DNA, 15 bp, Homo sapiens
aaaattatgatttta

SEQ ID NO: 285110 - DNA, 15 bp, Homo sapiens
taaaattatgatttt

SEQ ID NO: 285111 - DNA, 15 bp, Homo sapiens
ataaaattatgattt

SEQ ID NO: 285112 - DNA, 15 bp, Homo sapiens
tataaaattatgatt

SEQ ID NO: 285113 - DNA, 15 bp, Homo sapiens
ttataaaattatgat

SEQ ID NO: 285114 - DNA, 15 bp, Homo sapiens
tttataaaattatga

SEQ ID NO: 285115 - DNA, 15 bp, Homo sapiens
atttataaaattatg

SEQ ID NO: 285116 - DNA, 15 bp, Homo sapiens
tatttataaaattat

SEQ ID NO: 285117 - DNA, 15 bp, Homo sapiens
ttatttataaaatta

SEQ ID NO: 285118 - DNA, 15 bp, Homo sapiens
tttatttataaaatt

SEQ ID NO: 285119 - DNA, 15 bp, Homo sapiens
ttttatttataaaat

SEQ ID NO: 285120 - DNA, 15 bp, Homo sapiens
attttatttataaaa

SEQ ID NO: 285121 - DNA, 15 bp, Homo sapiens
tattttatttataaa

SEQ ID NO: 285122 - DNA, 15 bp, Homo sapiens
ttattttatttataa

SEQ ID NO: 285123 - DNA, 15 bp, Homo sapiens
attattttatttata

SEQ ID NO: 285124 - DNA, 15 bp, Homo sapiens
aattattttatttat

SEQ ID NO: 285125 - DNA, 15 bp, Homo sapiens
taattattttattta

SEQ ID NO: 285126 - DNA, 15 bp, Homo sapiens
ataattattttattt

SEQ ID NO: 285127 - DNA, 15 bp, Homo sapiens
aataattattttatt

SEQ ID NO: 285128 - DNA, 15 bp, Homo sapiens
aaataattattttat

SEQ ID NO: 285129 - DNA, 15 bp, Homo sapiens
aaaataattatttta

SEQ ID NO: 285130 - DNA, 15 bp, Homo sapiens
taaaataattatttt

SEQ ID NO: 285131 - DNA, 15 bp, Homo sapiens
ttaaaataattattt

SEQ ID NO: 285132 - DNA, 15 bp, Homo sapiens
tttaaaataattatt

SEQ ID NO: 285133 - DNA, 15 bp, Homo sapiens
atttaaaataattat

SEQ ID NO: 285134 - DNA, 15 bp, Homo sapiens
aatttaaaataatta

SEQ ID NO: 285135 - DNA, 15 bp, Homo sapiens
aaatttaaaataatt

SEQ ID NO: 285136 - DNA, 15 bp, Homo sapiens
aaaatttaaaataat

SEQ ID NO: 285137 - DNA, 15 bp, Homo sapiens
aaaaatttaaaataa

SEQ ID NO: 285138 - DNA, 15 bp, Homo sapiens
taaaaatttaaaata

SEQ ID NO: 285139 - DNA, 15 bp, Homo sapiens
ctaaaaatttaaaat

SEQ ID NO: 285140 - DNA, 15 bp, Homo sapiens
tctaaaaatttaaaa

SEQ ID NO: 285141 - DNA, 15 bp, Homo sapiens
atctaaaaatttaaa

SEQ ID NO: 285142 - DNA, 15 bp, Homo sapiens
tatctaaaaatttaa

SEQ ID NO: 285143 - DNA, 15 bp, Homo sapiens
ttatctaaaaattta

SEQ ID NO: 285144 - DNA, 15 bp, Homo sapiens
attatctaaaaattt

SEQ ID NO: 285145 - DNA, 15 bp, Homo sapiens
cattatctaaaaatt

SEQ ID NO: 285146 - DNA, 15 bp, Homo sapiens
tcattatctaaaaat

SEQ ID NO: 285147 - DNA, 15 bp, Homo sapiens
ctcattatctaaaaa

SEQ ID NO: 285148 - DNA, 15 bp, Homo sapiens
tctcattatctaaaa

SEQ ID NO: 285149 - DNA, 15 bp, Homo sapiens
ttctcattatctaaa

SEQ ID NO: 285150 - DNA, 15 bp, Homo sapiens
attctcattatctaa

SEQ ID NO: 285151 - DNA, 15 bp, Homo sapiens
aattctcattatcta

SEQ ID NO: 285152 - DNA, 15 bp, Homo sapiens
taattctcattatct

SEQ ID NO: 285153 - DNA, 15 bp, Homo sapiens
ttaattctcattatc

SEQ ID NO: 285154 - DNA, 15 bp, Homo sapiens
attaattctcattat

SEQ ID NO: 285155 - DNA, 15 bp, Homo sapiens
aattaattctcatta

SEQ ID NO: 285156 - DNA, 15 bp, Homo sapiens
caattaattctcatt

SEQ ID NO: 285157 - DNA, 15 bp, Homo sapiens
tcaattaattctcat

SEQ ID NO: 285158 - DNA, 15 bp, Homo sapiens
ttcaattaattctca

SEQ ID NO: 285159 - DNA, 15 bp, Homo sapiens
attcaattaattctc

SEQ ID NO: 285160 - DNA, 15 bp, Homo sapiens
gattcaattaattct

SEQ ID NO: 285161 - DNA, 15 bp, Homo sapiens
tgattcaattaattc

SEQ ID NO: 285162 - DNA, 15 bp, Homo sapiens
atgattcaattaatt

SEQ ID NO: 285163 - DNA, 15 bp, Homo sapiens
aatgattcaattaat

SEQ ID NO: 285164 - DNA, 15 bp, Homo sapiens
caatgattcaattaa

SEQ ID NO: 285165 - DNA, 15 bp, Homo sapiens
ccaatgattcaatta

SEQ ID NO: 285166 - DNA, 15 bp, Homo sapiens
tccaatgattcaatt

SEQ ID NO: 285167 - DNA, 15 bp, Homo sapiens
ttccaatgattcaat

SEQ ID NO: 285168 - DNA, 15 bp, Homo sapiens
attccaatgattcaa

SEQ ID NO: 285169 - DNA, 15 bp, Homo sapiens
aattccaatgattca

SEQ ID NO: 285170 - DNA, 15 bp, Homo sapiens
taattccaatgattc

SEQ ID NO: 285171 - DNA, 15 bp, Homo sapiens
ctaattccaatgatt

SEQ ID NO: 285172 - DNA, 15 bp, Homo sapiens
tctaattccaatgat

SEQ ID NO: 285173 - DNA, 15 bp, Homo sapiens
ttctaattccaatga

SEQ ID NO: 285174 - DNA, 15 bp, Homo sapiens
attctaattccaatg

SEQ ID NO: 285175 - DNA, 15 bp, Homo sapiens
tattctaattccaat

SEQ ID NO: 285176 - DNA, 15 bp, Homo sapiens
ttattctaattccaa

SEQ ID NO: 285177 - DNA, 15 bp, Homo sapiens
tttattctaattcca

SEQ ID NO: 285178 - DNA, 15 bp, Homo sapiens
atttattctaattcc

SEQ ID NO: 285179 - DNA, 15 bp, Homo sapiens
aatttattctaattc

SEQ ID NO: 285180 - DNA, 15 bp, Homo sapiens
gaatttattctaatt

SEQ ID NO: 285181 - DNA, 15 bp, Homo sapiens
tagaatttattctaa

SEQ ID NO: 285182 - DNA, 15 bp, Homo sapiens
ttagaatttattcta

SEQ ID NO: 285183 - DNA, 15 bp, Homo sapiens
attagaatttattct

SEQ ID NO: 285184 - DNA, 15 bp, Homo sapiens
tattagaatttattc

SEQ ID NO: 285185 - DNA, 15 bp, Homo sapiens
ttattagaatttatt

SEQ ID NO: 285186 - DNA, 15 bp, Homo sapiens
tttattagaatttat

SEQ ID NO: 285187 - DNA, 15 bp, Homo sapiens
gtttattagaattta

SEQ ID NO: 285188 - DNA, 15 bp, Homo sapiens
agtttattagaattt

SEQ ID NO: 285189 - DNA, 15 bp, Homo sapiens
aagtttattagaatt

SEQ ID NO: 285190 - DNA, 15 bp, Homo sapiens
taagtttattagaat

SEQ ID NO: 285191 - DNA, 15 bp, Homo sapiens
ctaagtttattagaa

SEQ ID NO: 285192 - DNA, 15 bp, Homo sapiens
actaagtttattaga

SEQ ID NO: 285193 - DNA, 15 bp, Homo sapiens
tactaagtttattag

SEQ ID NO: 285194 - DNA, 15 bp, Homo sapiens
ttactaagtttatta

SEQ ID NO: 285195 - DNA, 15 bp, Homo sapiens
attactaagtttatt

SEQ ID NO: 285196 - DNA, 15 bp, Homo sapiens
aattactaagtttat

SEQ ID NO: 285197 - DNA, 15 bp, Homo sapiens
aaattactaagttta

SEQ ID NO: 285198 - DNA, 15 bp, Homo sapiens
aaaattactaagttt

SEQ ID NO: 285199 - DNA, 15 bp, Homo sapiens
taaaattactaagtt

SEQ ID NO: 285200 - DNA, 15 bp, Homo sapiens
ataaaattactaagt

SEQ ID NO: 285201 - DNA, 15 bp, Homo sapiens
tataaaattactaag

SEQ ID NO: 285202 - DNA, 15 bp, Homo sapiens
atataaaattactaa

SEQ ID NO: 285203 - DNA, 15 bp, Homo sapiens
tatataaaattacta

SEQ ID NO: 285204 - DNA, 15 bp, Homo sapiens
ttatataaaattact

SEQ ID NO: 285205 - DNA, 15 bp, Homo sapiens
attatataaaattac

SEQ ID NO: 285206 - DNA, 15 bp, Homo sapiens
tattatataaaatta

SEQ ID NO: 285207 - DNA, 15 bp, Homo sapiens
ttattatataaaatt

SEQ ID NO: 285208 - DNA, 15 bp, Homo sapiens
tttattatataaaat

SEQ ID NO: 285209 - DNA, 15 bp, Homo sapiens
atttattatataaaa

SEQ ID NO: 285210 - DNA, 15 bp, Homo sapiens
tatttattatataaa

SEQ ID NO: 285211 - DNA, 15 bp, Homo sapiens
atatttattatataa

SEQ ID NO: 285212 - DNA, 15 bp, Homo sapiens
tatatttattatata

SEQ ID NO: 285213 - DNA, 15 bp, Homo sapiens
gtatatttattatat

SEQ ID NO: 285214 - DNA, 15 bp, Homo sapiens
agtatatttattata

SEQ ID NO: 285215 - DNA, 15 bp, Homo sapiens
aagtatatttattat

SEQ ID NO: 285216 - DNA, 15 bp, Homo sapiens
taagtatatttatta

SEQ ID NO: 285217 - DNA, 15 bp, Homo sapiens
ataagtatatttatt

SEQ ID NO: 285218 - DNA, 15 bp, Homo sapiens
tataagtatatttat

SEQ ID NO: 285219 - DNA, 15 bp, Homo sapiens
ttataagtatattta

SEQ ID NO: 285220 - DNA, 15 bp, Homo sapiens
tttataagtatattt

SEQ ID NO: 285221 - DNA, 15 bp, Homo sapiens
ttttataagtatatt

SEQ ID NO: 285222 - DNA, 15 bp, Homo sapiens
cttttataagtatat

SEQ ID NO: 285223 - DNA, 15 bp, Homo sapiens
acttttataagtata

SEQ ID NO: 285224 - DNA, 15 bp, Homo sapiens
cacttttataagtat

SEQ ID NO: 285225 - DNA, 15 bp, Homo sapiens
ccacttttataagta

SEQ ID NO: 285226 - DNA, 15 bp, Homo sapiens
tccacttttataagt

SEQ ID NO: 285227 - DNA, 15 bp, Homo sapiens
ttccacttttataag

SEQ ID NO: 285228 - DNA, 15 bp, Homo sapiens
attccacttttataa

SEQ ID NO: 285229 - DNA, 15 bp, Homo sapiens
aattccacttttata

SEQ ID NO: 285230 - DNA, 15 bp, Homo sapiens
taattccacttttat

SEQ ID NO: 285231 - DNA, 15 bp, Homo sapiens
ttaattccactttta

SEQ ID NO: 285232 - DNA, 15 bp, Homo sapiens
tttaattccactttt

SEQ ID NO: 285233 - DNA, 15 bp, Homo sapiens
ttttaattccacttt

SEQ ID NO: 285234 - DNA, 15 bp, Homo sapiens
tttttaattccactt

SEQ ID NO: 285235 - DNA, 15 bp, Homo sapiens
atttttaattccact

SEQ ID NO: 285236 - DNA, 15 bp, Homo sapiens
aatttttaattccac

SEQ ID NO: 285237 - DNA, 15 bp, Homo sapiens
aaatttttaattcca

SEQ ID NO: 285238 - DNA, 15 bp, Homo sapiens
caaatttttaattcc

SEQ ID NO: 285239 - DNA, 15 bp, Homo sapiens
tcaaatttttaattc

SEQ ID NO: 285240 - DNA, 15 bp, Homo sapiens
ttcaaatttttaatt

SEQ ID NO: 285241 - DNA, 15 bp, Homo sapiens
attcaaatttttaat

SEQ ID NO: 285242 - DNA, 15 bp, Homo sapiens
aattcaaatttttaa

SEQ ID NO: 285243 - DNA, 15 bp, Homo sapiens
gaattcaaattttta

SEQ ID NO: 285244 - DNA, 15 bp, Homo sapiens
agaattcaaattttt

SEQ ID NO: 285245 - DNA, 15 bp, Homo sapiens
tagaattcaaatttt

SEQ ID NO: 285246 - DNA, 15 bp, Homo sapiens
ttagaattcaaattt

SEQ ID NO: 285247 - DNA, 15 bp, Homo sapiens
attagaattcaaatt

SEQ ID NO: 285248 - DNA, 15 bp, Homo sapiens
aattagaattcaaat

SEQ ID NO: 285249 - DNA, 15 bp, Homo sapiens
taattagaattcaaa

SEQ ID NO: 285250 - DNA, 15 bp, Homo sapiens
ataattagaattcaa

SEQ ID NO: 285251 - DNA, 15 bp, Homo sapiens
aataattagaattca

SEQ ID NO: 285252 - DNA, 15 bp, Homo sapiens
taataattagaattc

SEQ ID NO: 285253 - DNA, 15 bp, Homo sapiens
ataataattagaatt

SEQ ID NO: 285254 - DNA, 15 bp, Homo sapiens
tataataattagaat

SEQ ID NO: 285255 - DNA, 15 bp, Homo sapiens
ttataataattagaa

SEQ ID NO: 285256 - DNA, 15 bp, Homo sapiens
attataataattaga

SEQ ID NO: 285257 - DNA, 15 bp, Homo sapiens
tattataataattag

SEQ ID NO: 285258 - DNA, 15 bp, Homo sapiens
ttattataataatta

SEQ ID NO: 285259 - DNA, 15 bp, Homo sapiens
tttattataataatt

SEQ ID NO: 285260 - DNA, 15 bp, Homo sapiens
ttttattataataat

SEQ ID NO: 285261 - DNA, 15 bp, Homo sapiens
attttattataataa

SEQ ID NO: 285262 - DNA, 15 bp, Homo sapiens
tattttattataata

SEQ ID NO: 285263 - DNA, 15 bp, Homo sapiens
atattttattataat

SEQ ID NO: 285264 - DNA, 15 bp, Homo sapiens
aatattttattataa

SEQ ID NO: 285265 - DNA, 15 bp, Homo sapiens
taatattttattata

SEQ ID NO: 285266 - DNA, 15 bp, Homo sapiens
ataatattttattat

SEQ ID NO: 285267 - DNA, 15 bp, Homo sapiens
tataatattttatta

SEQ ID NO: 285268 - DNA, 15 bp, Homo sapiens
gtataatattttatt

SEQ ID NO: 285269 - DNA, 15 bp, Homo sapiens
tgtataatattttat

SEQ ID NO: 285270 - DNA, 15 bp, Homo sapiens
ttgtataatatttta

SEQ ID NO: 285271 - DNA, 15 bp, Homo sapiens
tttgtataatatttt

SEQ ID NO: 285272 - DNA, 15 bp, Homo sapiens
atttgtataatattt

SEQ ID NO: 285273 - DNA, 15 bp, Homo sapiens
tatttgtataatatt

SEQ ID NO: 285274 - DNA, 15 bp, Homo sapiens
atatttgtataatat

SEQ ID NO: 285275 - DNA, 15 bp, Homo sapiens
tatatttgtataata

SEQ ID NO: 285276 - DNA, 15 bp, Homo sapiens
ttatatttgtataat

SEQ ID NO: 285277 - DNA, 15 bp, Homo sapiens
tttatatttgtataa

SEQ ID NO: 285278 - DNA, 15 bp, Homo sapiens
atttatatttgtata

SEQ ID NO: 285279 - DNA, 15 bp, Homo sapiens
tatttatatttgtat

SEQ ID NO: 285280 - DNA, 15 bp, Homo sapiens
ttatttatatttgta

SEQ ID NO: 285281 - DNA, 15 bp, Homo sapiens
tttatttatatttgt

SEQ ID NO: 285282 - DNA, 15 bp, Homo sapiens
ttttatttatatttg

SEQ ID NO: 285283 - DNA, 15 bp, Homo sapiens
attttatttatattt

SEQ ID NO: 285284 - DNA, 15 bp, Homo sapiens
tattttatttatatt

SEQ ID NO: 285285 - DNA, 15 bp, Homo sapiens
atattttatttatat

SEQ ID NO: 285286 - DNA, 15 bp, Homo sapiens
aatattttatttata

SEQ ID NO: 285287 - DNA, 15 bp, Homo sapiens
aaatattttatttat

SEQ ID NO: 285288 - DNA, 15 bp, Homo sapiens
taaatattttattta

SEQ ID NO: 285289 - DNA, 15 bp, Homo sapiens
ataaatattttattt

SEQ ID NO: 285290 - DNA, 15 bp, Homo sapiens
tataaatattttatt

SEQ ID NO: 285291 - DNA, 15 bp, Homo sapiens
ttataaatattttat

SEQ ID NO: 285292 - DNA, 15 bp, Homo sapiens
tttataaatatttta

SEQ ID NO: 285293 - DNA, 15 bp, Homo sapiens
ttttataaatatttt

SEQ ID NO: 285294 - DNA, 15 bp, Homo sapiens
attttataaatattt

SEQ ID NO: 285295 - DNA, 15 bp, Homo sapiens
aattttataaatatt

SEQ ID NO: 285296 - DNA, 15 bp, Homo sapiens
taattttataaatat

SEQ ID NO: 285297 - DNA, 15 bp, Homo sapiens
ctaattttataaata

SEQ ID NO: 285298 - DNA, 15 bp, Homo sapiens
tctaattttataaat

SEQ ID NO: 285299 - DNA, 15 bp, Homo sapiens
ttctaattttataaa

SEQ ID NO: 285300 - DNA, 15 bp, Homo sapiens
attctaattttataa

SEQ ID NO: 285301 - DNA, 15 bp, Homo sapiens
aattctaattttata

SEQ ID NO: 285302 - DNA, 15 bp, Homo sapiens
taattctaattttat

SEQ ID NO: 285303 - DNA, 15 bp, Homo sapiens
ttaattctaatttta

SEQ ID NO: 285304 - DNA, 15 bp, Homo sapiens
tttaattctaatttt

SEQ ID NO: 285305 - DNA, 15 bp, Homo sapiens
ctttaattctaattt

SEQ ID NO: 285306 - DNA, 15 bp, Homo sapiens
tctttaattctaatt

SEQ ID NO: 285307 - DNA, 15 bp, Homo sapiens
atctttaattctaat

SEQ ID NO: 285308 - DNA, 15 bp, Homo sapiens
aatctttaattctaa

SEQ ID NO: 285309 - DNA, 15 bp, Homo sapiens
taatctttaattcta

SEQ ID NO: 285310 - DNA, 15 bp, Homo sapiens
ctaatctttaattct

SEQ ID NO: 285311 - DNA, 15 bp, Homo sapiens
gctaatctttaattc

SEQ ID NO: 285312 - DNA, 15 bp, Homo sapiens
tgctaatctttaatt

SEQ ID NO: 285313 - DNA, 15 bp, Homo sapiens
atgctaatctttaat

SEQ ID NO: 285314 - DNA, 15 bp, Homo sapiens
aatgctaatctttaa

SEQ ID NO: 285315 - DNA, 15 bp, Homo sapiens
aaatgctaatcttta

SEQ ID NO: 285316 - DNA, 15 bp, Homo sapiens
taaatgctaatcttt

SEQ ID NO: 285317 - DNA, 15 bp, Homo sapiens
ataaatgctaatctt

SEQ ID NO: 285318 - DNA, 15 bp, Homo sapiens
gataaatgctaatct

SEQ ID NO: 285319 - DNA, 15 bp, Homo sapiens
tgataaatgctaatc

SEQ ID NO: 285320 - DNA, 15 bp, Homo sapiens
atgataaatgctaat

SEQ ID NO: 285321 - DNA, 15 bp, Homo sapiens
tatgataaatgctaa

SEQ ID NO: 285322 - DNA, 15 bp, Homo sapiens
gtatgataaatgcta

SEQ ID NO: 285323 - DNA, 15 bp, Homo sapiens
agtatgataaatgct

SEQ ID NO: 285324 - DNA, 15 bp, Homo sapiens
aagtatgataaatgc

SEQ ID NO: 285325 - DNA, 15 bp, Homo sapiens
gaagtatgataaatg

SEQ ID NO: 285326 - DNA, 15 bp, Homo sapiens
tgaagtatgataaat

SEQ ID NO: 285327 - DNA, 15 bp, Homo sapiens
ttgaagtatgataaa

SEQ ID NO: 285328 - DNA, 15 bp, Homo sapiens
tttgaagtatgataa

SEQ ID NO: 285329 - DNA, 15 bp, Homo sapiens
ttttgaagtatgata

SEQ ID NO: 285330 - DNA, 15 bp, Homo sapiens
attttgaagtatgat

SEQ ID NO: 285331 - DNA, 15 bp, Homo sapiens
gattttgaagtatga

SEQ ID NO: 285332 - DNA, 15 bp, Homo sapiens
agattttgaagtatg

SEQ ID NO: 285333 - DNA, 15 bp, Homo sapiens
aagattttgaagtat

SEQ ID NO: 285334 - DNA, 15 bp, Homo sapiens
aaagattttgaagta

SEQ ID NO: 285335 - DNA, 15 bp, Homo sapiens
gaaagattttgaagt

SEQ ID NO: 285336 - DNA, 15 bp, Homo sapiens
agaaagattttgaag

SEQ ID NO: 285337 - DNA, 15 bp, Homo sapiens
gagaaagattttgaa

SEQ ID NO: 285338 - DNA, 15 bp, Homo sapiens
agagaaagattttga

SEQ ID NO: 285339 - DNA, 15 bp, Homo sapiens
cagagaaagattttg

SEQ ID NO: 285340 - DNA, 15 bp, Homo sapiens
ccagagaaagatttt

SEQ ID NO: 285341 - DNA, 15 bp, Homo sapiens
tccagagaaagattt

SEQ ID NO: 285342 - DNA, 15 bp, Homo sapiens
ctccagagaaagatt

SEQ ID NO: 285343 - DNA, 15 bp, Homo sapiens
actccagagaaagat

SEQ ID NO: 285344 - DNA, 15 bp, Homo sapiens
tactccagagaaaga

SEQ ID NO: 285345 - DNA, 15 bp, Homo sapiens
ttactccagagaaag

SEQ ID NO: 285346 - DNA, 15 bp, Homo sapiens
attactccagagaaa

SEQ ID NO: 285347 - DNA, 15 bp, Homo sapiens
tattactccagagaa

SEQ ID NO: 285348 - DNA, 15 bp, Homo sapiens
gtattactccagaga

SEQ ID NO: 285349 - DNA, 15 bp, Homo sapiens
tgtattactccagag

SEQ ID NO: 285350 - DNA, 15 bp, Homo sapiens
atgtattactccaga

SEQ ID NO: 285351 - DNA, 15 bp, Homo sapiens
aatgtattactccag

SEQ ID NO: 285352 - DNA, 15 bp, Homo sapiens
gaatgtattactcca

SEQ ID NO: 285353 - DNA, 15 bp, Homo sapiens
agaatgtattactcc

SEQ ID NO: 285354 - DNA, 15 bp, Homo sapiens
tagaatgtattactc

SEQ ID NO: 285355 - DNA, 15 bp, Homo sapiens
atagaatgtattact

SEQ ID NO: 285356 - DNA, 15 bp, Homo sapiens
tatagaatgtattac

SEQ ID NO: 285357 - DNA, 15 bp, Homo sapiens
ctatagaatgtatta

SEQ ID NO: 285358 - DNA, 15 bp, Homo sapiens
actatagaatgtatt

SEQ ID NO: 285359 - DNA, 15 bp, Homo sapiens
aactatagaatgtat

SEQ ID NO: 285360 - DNA, 15 bp, Homo sapiens
gaactatagaatgta

SEQ ID NO: 285361 - DNA, 15 bp, Homo sapiens
agaactatagaatgt

SEQ ID NO: 285362 - DNA, 15 bp, Homo sapiens
aagaactatagaatg

SEQ ID NO: 285363 - DNA, 15 bp, Homo sapiens
taagaactatagaat

SEQ ID NO: 285364 - DNA, 15 bp, Homo sapiens
ttaagaactatagaa

SEQ ID NO: 285365 - DNA, 15 bp, Homo sapiens
tttaagaactataga

SEQ ID NO: 285366 - DNA, 15 bp, Homo sapiens
ttttaagaactatag

SEQ ID NO: 285367 - DNA, 15 bp, Homo sapiens
attttaagaactata

SEQ ID NO: 285368 - DNA, 15 bp, Homo sapiens
aattttaagaactat

SEQ ID NO: 285369 - DNA, 15 bp, Homo sapiens
taattttaagaacta

SEQ ID NO: 285370 - DNA, 15 bp, Homo sapiens
ctaattttaagaact

SEQ ID NO: 285371 - DNA, 15 bp, Homo sapiens
tctaattttaagaac

SEQ ID NO: 285372 - DNA, 15 bp, Homo sapiens
ttctaattttaagaa

SEQ ID NO: 285373 - DNA, 15 bp, Homo sapiens
tttctaattttaaga

SEQ ID NO: 285374 - DNA, 15 bp, Homo sapiens
atttctaattttaag

SEQ ID NO: 285375 - DNA, 15 bp, Homo sapiens
tatttctaattttaa

SEQ ID NO: 285376 - DNA, 15 bp, Homo sapiens
ttatttctaatttta

SEQ ID NO: 285377 - DNA, 15 bp, Homo sapiens
tttatttctaatttt

SEQ ID NO: 285378 - DNA, 15 bp, Homo sapiens
atttatttctaattt

SEQ ID NO: 285379 - DNA, 15 bp, Homo sapiens
aatttatttctaatt

SEQ ID NO: 285380 - DNA, 15 bp, Homo sapiens
aaatttatttctaat

SEQ ID NO: 285381 - DNA, 15 bp, Homo sapiens
taaatttatttctaa

SEQ ID NO: 285382 - DNA, 15 bp, Homo sapiens
ttaaatttatttcta

SEQ ID NO: 285383 - DNA, 15 bp, Homo sapiens
tttaaatttatttct

SEQ ID NO: 285384 - DNA, 15 bp, Homo sapiens
ttttaaatttatttc

SEQ ID NO: 285385 - DNA, 15 bp, Homo sapiens
tttttaaatttattt

SEQ ID NO: 285386 - DNA, 15 bp, Homo sapiens
ctttttaaatttatt

SEQ ID NO: 285387 - DNA, 15 bp, Homo sapiens
gctttttaaatttat

SEQ ID NO: 285388 - DNA, 15 bp, Homo sapiens
tgctttttaaattta

SEQ ID NO: 285389 - DNA, 15 bp, Homo sapiens
ttgctttttaaattt

SEQ ID NO: 285390 - DNA, 15 bp, Homo sapiens
tttgctttttaaatt

SEQ ID NO: 285391 - DNA, 15 bp, Homo sapiens
ttttgctttttaaat

SEQ ID NO: 285392 - DNA, 15 bp, Homo sapiens
attttgctttttaaa

SEQ ID NO: 285393 - DNA, 15 bp, Homo sapiens
aattttgctttttaa

SEQ ID NO: 285394 - DNA, 15 bp, Homo sapiens
aaattttgcttttta

SEQ ID NO: 285395 - DNA, 15 bp, Homo sapiens
taaattttgcttttt

SEQ ID NO: 285396 - DNA, 15 bp, Homo sapiens
ataaattttgctttt

SEQ ID NO: 285397 - DNA, 15 bp, Homo sapiens
tataaattttgcttt

SEQ ID NO: 285398 - DNA, 15 bp, Homo sapiens
ctataaattttgctt

SEQ ID NO: 285399 - DNA, 15 bp, Homo sapiens
actataaattttgct

SEQ ID NO: 285400 - DNA, 15 bp, Homo sapiens
cactataaattttgc

SEQ ID NO: 285401 - DNA, 15 bp, Homo sapiens
tcactataaattttg

SEQ ID NO: 285402 - DNA, 15 bp, Homo sapiens
atcactataaatttt

SEQ ID NO: 285403 - DNA, 15 bp, Homo sapiens
aatcactataaattt

SEQ ID NO: 285404 - DNA, 15 bp, Homo sapiens
aaatcactataaatt

SEQ ID NO: 285405 - DNA, 15 bp, Homo sapiens
aaaatcactataaat

SEQ ID NO: 285406 - DNA, 15 bp, Homo sapiens
taaaatcactataaa

SEQ ID NO: 285407 - DNA, 15 bp, Homo sapiens
ctaaaatcactataa

SEQ ID NO: 285408 - DNA, 15 bp, Homo sapiens
tctaaaatcactata

SEQ ID NO: 285409 - DNA, 15 bp, Homo sapiens
gtctaaaatcactat

SEQ ID NO: 285410 - DNA, 15 bp, Homo sapiens
tgtctaaaatcacta

SEQ ID NO: 285411 - DNA, 15 bp, Homo sapiens
atgtctaaaatcact

SEQ ID NO: 285412 - DNA, 15 bp, Homo sapiens
tatgtctaaaatcac

SEQ ID NO: 285413 - DNA, 15 bp, Homo sapiens
ttatgtctaaaatca

SEQ ID NO: 285414 - DNA, 15 bp, Homo sapiens
tttatgtctaaaatc

SEQ ID NO: 285415 - DNA, 15 bp, Homo sapiens
ctttatgtctaaaat

SEQ ID NO: 285416 - DNA, 15 bp, Homo sapiens
tctttatgtctaaaa

SEQ ID NO: 285417 - DNA, 15 bp, Homo sapiens
ttctttatgtctaaa

SEQ ID NO: 285418 - DNA, 15 bp, Homo sapiens
attctttatgtctaa

SEQ ID NO: 285419 - DNA, 15 bp, Homo sapiens
aattctttatgtcta

SEQ ID NO: 285420 - DNA, 15 bp, Homo sapiens
taattctttatgtct

SEQ ID NO: 285421 - DNA, 15 bp, Homo sapiens
ttaattctttatgtc

SEQ ID NO: 285422 - DNA, 15 bp, Homo sapiens
attaattctttatgt

SEQ ID NO: 285423 - DNA, 15 bp, Homo sapiens
aattaattctttatg

SEQ ID NO: 285424 - DNA, 15 bp, Homo sapiens
taattaattctttat

SEQ ID NO: 285425 - DNA, 15 bp, Homo sapiens
ataattaattcttta

SEQ ID NO: 285426 - DNA, 15 bp, Homo sapiens
tataattaattcttt

SEQ ID NO: 285427 - DNA, 15 bp, Homo sapiens
ttataattaattctt

SEQ ID NO: 285428 - DNA, 15 bp, Homo sapiens
gttataattaattct

SEQ ID NO: 285429 - DNA, 15 bp, Homo sapiens
tgttataattaattc

SEQ ID NO: 285430 - DNA, 15 bp, Homo sapiens
ctgttataattaatt

SEQ ID NO: 285431 - DNA, 15 bp, Homo sapiens
tctgttataattaat

SEQ ID NO: 285432 - DNA, 15 bp, Homo sapiens
ttctgttataattaa

SEQ ID NO: 285433 - DNA, 15 bp, Homo sapiens
tttctgttataatta

SEQ ID NO: 285434 - DNA, 15 bp, Homo sapiens
atttctgttataatt

SEQ ID NO: 285435 - DNA, 15 bp, Homo sapiens
tatttctgttataat

SEQ ID NO: 285436 - DNA, 15 bp, Homo sapiens
gtatttctgttataa

SEQ ID NO: 285437 - DNA, 15 bp, Homo sapiens
agtatttctgttata

SEQ ID NO: 285438 - DNA, 15 bp, Homo sapiens
aagtatttctgttat

SEQ ID NO: 285439 - DNA, 15 bp, Homo sapiens
taagtatttctgtta

SEQ ID NO: 285440 - DNA, 15 bp, Homo sapiens
ttaagtatttctgtt

SEQ ID NO: 285441 - DNA, 15 bp, Homo sapiens
tttaagtatttctgt

SEQ ID NO: 285442 - DNA, 15 bp, Homo sapiens
atttaagtatttctg

SEQ ID NO: 285443 - DNA, 15 bp, Homo sapiens
catttaagtatttct

SEQ ID NO: 285444 - DNA, 15 bp, Homo sapiens
acatttaagtatttc

SEQ ID NO: 285445 - DNA, 15 bp, Homo sapiens
tacatttaagtattt

SEQ ID NO: 285446 - DNA, 15 bp, Homo sapiens
ttacatttaagtatt

SEQ ID NO: 285447 - DNA, 15 bp, Homo sapiens
tttacatttaagtat

SEQ ID NO: 285448 - DNA, 15 bp, Homo sapiens
ttttacatttaagta

SEQ ID NO: 285449 - DNA, 15 bp, Homo sapiens
attttacatttaagt

SEQ ID NO: 285450 - DNA, 15 bp, Homo sapiens
aattttacatttaag

SEQ ID NO: 285451 - DNA, 15 bp, Homo sapiens
gaattttacatttaa

SEQ ID NO: 285452 - DNA, 15 bp, Homo sapiens
agaattttacattta

SEQ ID NO: 285453 - DNA, 15 bp, Homo sapiens
gagaattttacattt

SEQ ID NO: 285454 - DNA, 15 bp, Homo sapiens
tgagaattttacatt

SEQ ID NO: 285455 - DNA, 15 bp, Homo sapiens
ctgagaattttacat

SEQ ID NO: 285456 - DNA, 15 bp, Homo sapiens
tctgagaattttaca

SEQ ID NO: 285457 - DNA, 15 bp, Homo sapiens
ctctgagaattttac

SEQ ID NO: 285458 - DNA, 15 bp, Homo sapiens
actctgagaatttta

SEQ ID NO: 285459 - DNA, 15 bp, Homo sapiens
tactctgagaatttt

SEQ ID NO: 285460 - DNA, 15 bp, Homo sapiens
ctactctgagaattt

SEQ ID NO: 285461 - DNA, 15 bp, Homo sapiens
tctactctgagaatt

SEQ ID NO: 285462 - DNA, 15 bp, Homo sapiens
gtctactctgagaat

SEQ ID NO: 285463 - DNA, 15 bp, Homo sapiens
agtctactctgagaa

SEQ ID NO: 285464 - DNA, 15 bp, Homo sapiens
aagtctactctgaga

SEQ ID NO: 285465 - DNA, 15 bp, Homo sapiens
taagtctactctgag

SEQ ID NO: 285466 - DNA, 15 bp, Homo sapiens
ttaagtctactctga

SEQ ID NO: 285467 - DNA, 15 bp, Homo sapiens
gttaagtctactctg

SEQ ID NO: 285468 - DNA, 15 bp, Homo sapiens
tgttaagtctactct

SEQ ID NO: 285469 - DNA, 15 bp, Homo sapiens
gtgttaagtctactc

SEQ ID NO: 285470 - DNA, 15 bp, Homo sapiens
agtgttaagtctact

SEQ ID NO: 285471 - DNA, 15 bp, Homo sapiens
aagtgttaagtctac

SEQ ID NO: 285472 - DNA, 15 bp, Homo sapiens
caagtgttaagtcta

SEQ ID NO: 285473 - DNA, 15 bp, Homo sapiens
tcaagtgttaagtct

SEQ ID NO: 285474 - DNA, 15 bp, Homo sapiens
atcaagtgttaagtc

SEQ ID NO: 285475 - DNA, 15 bp, Homo sapiens
aatcaagtgttaagt

SEQ ID NO: 285476 - DNA, 15 bp, Homo sapiens
aaatcaagtgttaag

SEQ ID NO: 285477 - DNA, 15 bp, Homo sapiens
taaatcaagtgttaa

SEQ ID NO: 285478 - DNA, 15 bp, Homo sapiens
ataaatcaagtgtta

SEQ ID NO: 285479 - DNA, 15 bp, Homo sapiens
tataaatcaagtgtt

SEQ ID NO: 285480 - DNA, 15 bp, Homo sapiens
ttataaatcaagtgt

SEQ ID NO: 285481 - DNA, 15 bp, Homo sapiens
attataaatcaagtg

SEQ ID NO: 285482 - DNA, 15 bp, Homo sapiens
aattataaatcaagt

SEQ ID NO: 285483 - DNA, 15 bp, Homo sapiens
gaattataaatcaag

SEQ ID NO: 285484 - DNA, 15 bp, Homo sapiens
ggaattataaatcaa

SEQ ID NO: 285485 - DNA, 15 bp, Homo sapiens
tggaattataaatca

SEQ ID NO: 285486 - DNA, 15 bp, Homo sapiens
atggaattataaatc

SEQ ID NO: 285487 - DNA, 15 bp, Homo sapiens
tatggaattataaat

SEQ ID NO: 285488 - DNA, 15 bp, Homo sapiens
ttatggaattataaa

SEQ ID NO: 285489 - DNA, 15 bp, Homo sapiens
gttatggaattataa

SEQ ID NO: 285490 - DNA, 15 bp, Homo sapiens
agttatggaattata

SEQ ID NO: 285491 - DNA, 15 bp, Homo sapiens
aagttatggaattat

SEQ ID NO: 285492 - DNA, 15 bp, Homo sapiens
aaagttatggaatta

SEQ ID NO: 285493 - DNA, 15 bp, Homo sapiens
taaagttatggaatt

SEQ ID NO: 285494 - DNA, 15 bp, Homo sapiens
gtaaagttatggaat

SEQ ID NO: 285495 - DNA, 15 bp, Homo sapiens
tgtaaagttatggaa

SEQ ID NO: 285496 - DNA, 15 bp, Homo sapiens
atgtaaagttatgga

SEQ ID NO: 285497 - DNA, 15 bp, Homo sapiens
tatgtaaagttatgg

SEQ ID NO: 285498 - DNA, 15 bp, Homo sapiens
atatgtaaagttatg

SEQ ID NO: 285499 - DNA, 15 bp, Homo sapiens
aatatgtaaagttat

SEQ ID NO: 285500 - DNA, 15 bp, Homo sapiens
aaatatgtaaagtta

SEQ ID NO: 285501 - DNA, 15 bp, Homo sapiens
gaaatatgtaaagtt

SEQ ID NO: 285502 - DNA, 15 bp, Homo sapiens
agaaatatgtaaagt

SEQ ID NO: 285503 - DNA, 15 bp, Homo sapiens
tagaaatatgtaaag

SEQ ID NO: 285504 - DNA, 15 bp, Homo sapiens
atagaaatatgtaaa

SEQ ID NO: 285505 - DNA, 15 bp, Homo sapiens
aatagaaatatgtaa

SEQ ID NO: 285506 - DNA, 15 bp, Homo sapiens
aaatagaaatatgta

SEQ ID NO: 285507 - DNA, 15 bp, Homo sapiens
aaaatagaaatatgt

SEQ ID NO: 285508 - DNA, 15 bp, Homo sapiens
taaaatagaaatatg

SEQ ID NO: 285509 - DNA, 15 bp, Homo sapiens
gtaaaatagaaatat

SEQ ID NO: 285510 - DNA, 15 bp, Homo sapiens
tgtaaaatagaaata

SEQ ID NO: 285511 - DNA, 15 bp, Homo sapiens
atgtaaaatagaaat

SEQ ID NO: 285512 - DNA, 15 bp, Homo sapiens
tatgtaaaatagaaa

SEQ ID NO: 285513 - DNA, 15 bp, Homo sapiens
atatgtaaaatagaa

SEQ ID NO: 285514 - DNA, 15 bp, Homo sapiens
aatatgtaaaataga

SEQ ID NO: 285515 - DNA, 15 bp, Homo sapiens
aaatatgtaaaatag

SEQ ID NO: 285516 - DNA, 15 bp, Homo sapiens
aaaatatgtaaaata

SEQ ID NO: 285517 - DNA, 15 bp, Homo sapiens
taaaatatgtaaaat

SEQ ID NO: 285518 - DNA, 15 bp, Homo sapiens
ataaaatatgtaaaa

SEQ ID NO: 285519 - DNA, 15 bp, Homo sapiens
tataaaatatgtaaa

SEQ ID NO: 285520 - DNA, 15 bp, Homo sapiens
gtataaaatatgtaa

SEQ ID NO: 285521 - DNA, 15 bp, Homo sapiens
ggtataaaatatgta

SEQ ID NO: 285522 - DNA, 15 bp, Homo sapiens
aggtataaaatatgt

SEQ ID NO: 285523 - DNA, 15 bp, Homo sapiens
aaggtataaaatatg

SEQ ID NO: 285524 - DNA, 15 bp, Homo sapiens
aaaggtataaaatat

SEQ ID NO: 285525 - DNA, 15 bp, Homo sapiens
aaaaggtataaaata

SEQ ID NO: 285526 - DNA, 15 bp, Homo sapiens
taaaaggtataaaat

SEQ ID NO: 285527 - DNA, 15 bp, Homo sapiens
ttaaaaggtataaaa

SEQ ID NO: 285528 - DNA, 15 bp, Homo sapiens
gttttaaaaggtata

SEQ ID NO: 285529 - DNA, 15 bp, Homo sapiens
tgttttaaaaggtat

SEQ ID NO: 285530 - DNA, 15 bp, Homo sapiens
ctgttttaaaaggta

SEQ ID NO: 285531 - DNA, 15 bp, Homo sapiens
tctgttttaaaaggt

SEQ ID NO: 285532 - DNA, 15 bp, Homo sapiens
atctgttttaaaagg

SEQ ID NO: 285533 - DNA, 15 bp, Homo sapiens
aatctgttttaaaag

SEQ ID NO: 285534 - DNA, 15 bp, Homo sapiens
aaatctgttttaaaa

SEQ ID NO: 285535 - DNA, 15 bp, Homo sapiens
aaaatctgttttaaa

SEQ ID NO: 285536 - DNA, 15 bp, Homo sapiens
aaaaatctgttttaa

SEQ ID NO: 285537 - DNA, 15 bp, Homo sapiens
aaaaaatctgtttta

SEQ ID NO: 285538 - DNA, 15 bp, Homo sapiens
aaaaaaatctgtttt

SEQ ID NO: 285539 - DNA, 15 bp, Homo sapiens
aaaaaaaatctgttt

SEQ ID NO: 285540 - DNA, 15 bp, Homo sapiens
aaaaaaaaatctgtt

SEQ ID NO: 285541 - DNA, 15 bp, Homo sapiens
aaaaaaaaaatctgt

SEQ ID NO: 285542 - DNA, 15 bp, Homo sapiens
aaaaaaaaaaatctg

SEQ ID NO: 285543 - DNA, 15 bp, Homo sapiens
aaaaaaaaaaaatct

SEQ ID NO: 285544 - DNA, 15 bp, Homo sapiens
aaaaaaaaaaaaatc

SEQ ID NO: 285545 - DNA, 15 bp, Homo sapiens
gtaaaaaaaaaaaaa

SEQ ID NO: 285546 - DNA, 15 bp, Homo sapiens
tgtaaaaaaaaaaaa

SEQ ID NO: 285547 - DNA, 15 bp, Homo sapiens
ttgtaaaaaaaaaaa

SEQ ID NO: 285548 - DNA, 15 bp, Homo sapiens
tttgtaaaaaaaaaa

SEQ ID NO: 285549 - DNA, 15 bp, Homo sapiens
ttttgtaaaaaaaaa

SEQ ID NO: 285550 - DNA, 15 bp, Homo sapiens
tttttgtaaaaaaaa

SEQ ID NO: 285551 - DNA, 15 bp, Homo sapiens
ttttttgtaaaaaaa

SEQ ID NO: 285552 - DNA, 15 bp, Homo sapiens
tttttttgtaaaaaa

SEQ ID NO: 285553 - DNA, 15 bp, Homo sapiens
ttttttttgtaaaaa

SEQ ID NO: 285554 - DNA, 15 bp, Homo sapiens
cttttttttgtaaaa

SEQ ID NO: 285555 - DNA, 15 bp, Homo sapiens
tcttttttttgtaaa

SEQ ID NO: 285556 - DNA, 15 bp, Homo sapiens
ttcttttttttgtaa

SEQ ID NO: 285557 - DNA, 15 bp, Homo sapiens
tttcttttttttgta

SEQ ID NO: 285558 - DNA, 15 bp, Homo sapiens
ctttcttttttttgt

SEQ ID NO: 285559 - DNA, 15 bp, Homo sapiens
tctttcttttttttg

SEQ ID NO: 285560 - DNA, 15 bp, Homo sapiens
ttctttctttttttt

SEQ ID NO: 285561 - DNA, 15 bp, Homo sapiens
tttctttcttttttt

SEQ ID NO: 285562 - DNA, 15 bp, Homo sapiens
ttttctttctttttt

SEQ ID NO: 285563 - DNA, 15 bp, Homo sapiens
attttctttcttttt

SEQ ID NO: 285564 - DNA, 15 bp, Homo sapiens
gattttctttctttt

SEQ ID NO: 285565 - DNA, 15 bp, Homo sapiens
agattttctttcttt

SEQ ID NO: 285566 - DNA, 15 bp, Homo sapiens
aagattttctttctt

SEQ ID NO: 285567 - DNA, 15 bp, Homo sapiens
aaagattttctttct

SEQ ID NO: 285568 - DNA, 15 bp, Homo sapiens
taaagattttctttc

SEQ ID NO: 285569 - DNA, 15 bp, Homo sapiens
gtaaagattttcttt

SEQ ID NO: 285570 - DNA, 15 bp, Homo sapiens
ggtaaagattttctt

SEQ ID NO: 285571 - DNA, 15 bp, Homo sapiens
tggtaaagattttct

SEQ ID NO: 285572 - DNA, 15 bp, Homo sapiens
atggtaaagattttc

SEQ ID NO: 285573 - DNA, 15 bp, Homo sapiens
catggtaaagatttt

SEQ ID NO: 285574 - DNA, 15 bp, Homo sapiens
gcatggtaaagattt

SEQ ID NO: 285575 - DNA, 15 bp, Homo sapiens
agcatggtaaagatt

SEQ ID NO: 285576 - DNA, 15 bp, Homo sapiens
cagcatggtaaagat

SEQ ID NO: 285577 - DNA, 15 bp, Homo sapiens
tcagcatggtaaaga

SEQ ID NO: 285578 - DNA, 15 bp, Homo sapiens
atcagcatggtaaag

SEQ ID NO: 285579 - DNA, 15 bp, Homo sapiens
tatcagcatggtaaa

SEQ ID NO: 285580 - DNA, 15 bp, Homo sapiens
ctatcagcatggtaa

SEQ ID NO: 285581 - DNA, 15 bp, Homo sapiens
actatcagcatggta

SEQ ID NO: 285582 - DNA, 15 bp, Homo sapiens
cactatcagcatggt

SEQ ID NO: 285583 - DNA, 15 bp, Homo sapiens
tcactatcagcatgg

SEQ ID NO: 285584 - DNA, 15 bp, Homo sapiens
atcactatcagcatg

SEQ ID NO: 285585 - DNA, 15 bp, Homo sapiens
aatcactatcagcat

SEQ ID NO: 285586 - DNA, 15 bp, Homo sapiens
caatcactatcagca

SEQ ID NO: 285587 - DNA, 15 bp, Homo sapiens
acaatcactatcagc

SEQ ID NO: 285588 - DNA, 15 bp, Homo sapiens
aacaatcactatcag

SEQ ID NO: 285589 - DNA, 15 bp, Homo sapiens
caacaatcactatca

SEQ ID NO: 285590 - DNA, 15 bp, Homo sapiens
tcaacaatcactatc

SEQ ID NO: 285591 - DNA, 15 bp, Homo sapiens
ttcaacaatcactat

SEQ ID NO: 285592 - DNA, 15 bp, Homo sapiens
attcaacaatcacta

SEQ ID NO: 285593 - DNA, 15 bp, Homo sapiens
cattcaacaatcact

SEQ ID NO: 285594 - DNA, 15 bp, Homo sapiens
tcattcaacaatcac

SEQ ID NO: 285595 - DNA, 15 bp, Homo sapiens
ttcattcaacaatca

SEQ ID NO: 285596 - DNA, 15 bp, Homo sapiens
attcattcaacaatc

SEQ ID NO: 285597 - DNA, 15 bp, Homo sapiens
tattcattcaacaat

SEQ ID NO: 285598 - DNA, 15 bp, Homo sapiens
ttattcattcaacaa

SEQ ID NO: 285599 - DNA, 15 bp, Homo sapiens
tttattcattcaaca

SEQ ID NO: 285600 - DNA, 15 bp, Homo sapiens
atttattcattcaac

SEQ ID NO: 285601 - DNA, 15 bp, Homo sapiens
aatttattcattcaa

SEQ ID NO: 285602 - DNA, 15 bp, Homo sapiens
aaatttattcattca

SEQ ID NO: 285603 - DNA, 15 bp, Homo sapiens
taaatttattcattc

SEQ ID NO: 285604 - DNA, 15 bp, Homo sapiens
ataaatttattcatt

SEQ ID NO: 285605 - DNA, 15 bp, Homo sapiens
cataaatttattcat

SEQ ID NO: 285606 - DNA, 15 bp, Homo sapiens
ccataaatttattca

SEQ ID NO: 285607 - DNA, 15 bp, Homo sapiens
tccataaatttattc

SEQ ID NO: 285608 - DNA, 15 bp, Homo sapiens
atccataaatttatt

SEQ ID NO: 285609 - DNA, 15 bp, Homo sapiens
tatccataaatttat

SEQ ID NO: 285610 - DNA, 15 bp, Homo sapiens
atatccataaattta

SEQ ID NO: 285611 - DNA, 15 bp, Homo sapiens
tatatccataaattt

SEQ ID NO: 285612 - DNA, 15 bp, Homo sapiens
gtatatccataaatt

SEQ ID NO: 285613 - DNA, 15 bp, Homo sapiens
agtatatccataaat

SEQ ID NO: 285614 - DNA, 15 bp, Homo sapiens
gagtatatccataaa

SEQ ID NO: 285615 - DNA, 15 bp, Homo sapiens
agagtatatccataa

SEQ ID NO: 285616 - DNA, 15 bp, Homo sapiens
tagagtatatccata

SEQ ID NO: 285617 - DNA, 15 bp, Homo sapiens
gtagagtatatccat

SEQ ID NO: 285618 - DNA, 15 bp, Homo sapiens
ggtagagtatatcca

SEQ ID NO: 285619 - DNA, 15 bp, Homo sapiens
gggtagagtatatcc

SEQ ID NO: 285620 - DNA, 15 bp, Homo sapiens
agggtagagtatatc

SEQ ID NO: 285621 - DNA, 15 bp, Homo sapiens
cagggtagagtatat

SEQ ID NO: 285622 - DNA, 15 bp, Homo sapiens
gcagggtagagtata

SEQ ID NO: 285623 - DNA, 15 bp, Homo sapiens
cgcagggtagagtat

SEQ ID NO: 285624 - DNA, 15 bp, Homo sapiens
tcgcagggtagagta

SEQ ID NO: 285625 - DNA, 15 bp, Homo sapiens
atcgcagggtagagt

SEQ ID NO: 285626 - DNA, 15 bp, Homo sapiens
aatcgcagggtagag

SEQ ID NO: 285627 - DNA, 15 bp, Homo sapiens
aaatcgcagggtaga

SEQ ID NO: 285628 - DNA, 15 bp, Homo sapiens
aaaatcgcagggtag

SEQ ID NO: 285629 - DNA, 15 bp, Homo sapiens
gaaaatcgcagggta

SEQ ID NO: 285630 - DNA, 15 bp, Homo sapiens
agaaaatcgcagggt

SEQ ID NO: 285631 - DNA, 15 bp, Homo sapiens
gagaaaatcgcaggg

SEQ ID NO: 285632 - DNA, 15 bp, Homo sapiens
agagaaaatcgcagg

SEQ ID NO: 285633 - DNA, 15 bp, Homo sapiens
gagagaaaatcgcag

SEQ ID NO: 285634 - DNA, 15 bp, Homo sapiens
tgagagaaaatcgca

SEQ ID NO: 285635 - DNA, 15 bp, Homo sapiens
atgagagaaaatcgc

SEQ ID NO: 285636 - DNA, 15 bp, Homo sapiens
tatgagagaaaatcg

SEQ ID NO: 285637 - DNA, 15 bp, Homo sapiens
gtatgagagaaaatc

SEQ ID NO: 285638 - DNA, 15 bp, Homo sapiens
tgtatgagagaaaat

SEQ ID NO: 285639 - DNA, 15 bp, Homo sapiens
ttgtatgagagaaaa

SEQ ID NO: 285640 - DNA, 15 bp, Homo sapiens
tttgtatgagagaaa

SEQ ID NO: 285641 - DNA, 15 bp, Homo sapiens
ctttgtatgagagaa

SEQ ID NO: 285642 - DNA, 15 bp, Homo sapiens
tctttgtatgagaga

SEQ ID NO: 285643 - DNA, 15 bp, Homo sapiens
atctttgtatgagag

SEQ ID NO: 285644 - DNA, 15 bp, Homo sapiens
gatctttgtatgaga

SEQ ID NO: 285645 - DNA, 15 bp, Homo sapiens
agatctttgtatgag

SEQ ID NO: 285646 - DNA, 15 bp, Homo sapiens
cagatctttgtatga

SEQ ID NO: 285647 - DNA, 15 bp, Homo sapiens
tcagatctttgtatg

SEQ ID NO: 285648 - DNA, 15 bp, Homo sapiens
ttcagatctttgtat

SEQ ID NO: 285649 - DNA, 15 bp, Homo sapiens
attcagatctttgta

SEQ ID NO: 285650 - DNA, 15 bp, Homo sapiens
gattcagatctttgt

SEQ ID NO: 285651 - DNA, 15 bp, Homo sapiens
agattcagatctttg

SEQ ID NO: 285652 - DNA, 15 bp, Homo sapiens
gagattcagatcttt

SEQ ID NO: 285653 - DNA, 15 bp, Homo sapiens
agagattcagatctt

SEQ ID NO: 285654 - DNA, 15 bp, Homo sapiens
tagagattcagatct

SEQ ID NO: 285655 - DNA, 15 bp, Homo sapiens
ttagagattcagatc

SEQ ID NO: 285656 - DNA, 15 bp, Homo sapiens
gttagagattcagat

SEQ ID NO: 285657 - DNA, 15 bp, Homo sapiens
agttagagattcaga

SEQ ID NO: 285658 - DNA, 15 bp, Homo sapiens
aagttagagattcag

SEQ ID NO: 285659 - DNA, 15 bp, Homo sapiens
aaagttagagattca

SEQ ID NO: 285660 - DNA, 15 bp, Homo sapiens
gaaagttagagattc

SEQ ID NO: 285661 - DNA, 15 bp, Homo sapiens
agaaagttagagatt

SEQ ID NO: 285662 - DNA, 15 bp, Homo sapiens
aagaaagttagagat

SEQ ID NO: 285663 - DNA, 15 bp, Homo sapiens
aaagaaagttagaga

SEQ ID NO: 285664 - DNA, 15 bp, Homo sapiens
taaagaaagttagag

SEQ ID NO: 285665 - DNA, 15 bp, Homo sapiens
ttaaagaaagttaga

SEQ ID NO: 285666 - DNA, 15 bp, Homo sapiens
tttaaagaaagttag

SEQ ID NO: 285667 - DNA, 15 bp, Homo sapiens
ttttaaagaaagtta

SEQ ID NO: 285668 - DNA, 15 bp, Homo sapiens
tttttaaagaaagtt

SEQ ID NO: 285669 - DNA, 15 bp, Homo sapiens
atttttaaagaaagt

SEQ ID NO: 285670 - DNA, 15 bp, Homo sapiens
catttttaaagaaag

SEQ ID NO: 285671 - DNA, 15 bp, Homo sapiens
acatttttaaagaaa

SEQ ID NO: 285672 - DNA, 15 bp, Homo sapiens
tacatttttaaagaa

SEQ ID NO: 285673 - DNA, 15 bp, Homo sapiens
gtacatttttaaaga

SEQ ID NO: 285674 - DNA, 15 bp, Homo sapiens
tgtacatttttaaag

SEQ ID NO: 285675 - DNA, 15 bp, Homo sapiens
atgtacatttttaaa

SEQ ID NO: 285676 - DNA, 15 bp, Homo sapiens
aatgtacatttttaa

SEQ ID NO: 285677 - DNA, 15 bp, Homo sapiens
aaatgtacattttta

SEQ ID NO: 285678 - DNA, 15 bp, Homo sapiens
aaaatgtacattttt

SEQ ID NO: 285679 - DNA, 15 bp, Homo sapiens
aaaaatgtacatttt

SEQ ID NO: 285680 - DNA, 15 bp, Homo sapiens
aaaaaatgtacattt

SEQ ID NO: 285681 - DNA, 15 bp, Homo sapiens
aaaaaaatgtacatt

SEQ ID NO: 285682 - DNA, 15 bp, Homo sapiens
aaaaaaaatgtacat

SEQ ID NO: 285683 - DNA, 15 bp, Homo sapiens
aaaaaaaaatgtaca

SEQ ID NO: 285684 - DNA, 15 bp, Homo sapiens
gaaaaaaaaatgtac

SEQ ID NO: 285685 - DNA, 15 bp, Homo sapiens
tgaaaaaaaaatgta

SEQ ID NO: 285686 - DNA, 15 bp, Homo sapiens
ctgaaaaaaaaatgt

SEQ ID NO: 285687 - DNA, 15 bp, Homo sapiens
cctgaaaaaaaaatg

SEQ ID NO: 285688 - DNA, 15 bp, Homo sapiens
ccctgaaaaaaaaat

SEQ ID NO: 285689 - DNA, 15 bp, Homo sapiens
cccctgaaaaaaaaa

SEQ ID NO: 285690 - DNA, 15 bp, Homo sapiens
tcccctgaaaaaaaa

SEQ ID NO: 285691 - DNA, 15 bp, Homo sapiens
ttcccctgaaaaaaa

SEQ ID NO: 285692 - DNA, 15 bp, Homo sapiens
cttcccctgaaaaaa

SEQ ID NO: 285693 - DNA, 15 bp, Homo sapiens
acttcccctgaaaaa

SEQ ID NO: 285694 - DNA, 15 bp, Homo sapiens
tacttcccctgaaaa

SEQ ID NO: 285695 - DNA, 15 bp, Homo sapiens
atacttcccctgaaa

SEQ ID NO: 285696 - DNA, 15 bp, Homo sapiens
aatacttcccctgaa

SEQ ID NO: 285697 - DNA, 15 bp, Homo sapiens
taatacttcccctga

SEQ ID NO: 285698 - DNA, 15 bp, Homo sapiens
gtaatacttcccctg

SEQ ID NO: 285699 - DNA, 15 bp, Homo sapiens
tgtaatacttcccct

SEQ ID NO: 285700 - DNA, 15 bp, Homo sapiens
ttgtaatacttcccc

SEQ ID NO: 285701 - DNA, 15 bp, Homo sapiens
tttgtaatacttccc

SEQ ID NO: 285702 - DNA, 15 bp, Homo sapiens
atttgtaatacttcc

SEQ ID NO: 285703 - DNA, 15 bp, Homo sapiens
catttgtaatacttc

SEQ ID NO: 285704 - DNA, 15 bp, Homo sapiens
ccatttgtaatactt

SEQ ID NO: 285705 - DNA, 15 bp, Homo sapiens
tccatttgtaatact

SEQ ID NO: 285706 - DNA, 15 bp, Homo sapiens
ttccatttgtaatac

SEQ ID NO: 285707 - DNA, 15 bp, Homo sapiens
cttccatttgtaata

SEQ ID NO: 285708 - DNA, 15 bp, Homo sapiens
tcttccatttgtaat

SEQ ID NO: 285709 - DNA, 15 bp, Homo sapiens
atcttccatttgtaa

SEQ ID NO: 285710 - DNA, 15 bp, Homo sapiens
catcttccatttgta

SEQ ID NO: 285711 - DNA, 15 bp, Homo sapiens
tcatcttccatttgt

SEQ ID NO: 285712 - DNA, 15 bp, Homo sapiens
atcatcttccatttg

SEQ ID NO: 285713 - DNA, 15 bp, Homo sapiens
gatcatcttccattt

SEQ ID NO: 285714 - DNA, 15 bp, Homo sapiens
agatcatcttccatt

SEQ ID NO: 285715 - DNA, 15 bp, Homo sapiens
cagatcatcttccat

SEQ ID NO: 285716 - DNA, 15 bp, Homo sapiens
ccagatcatcttcca

SEQ ID NO: 285717 - DNA, 15 bp, Homo sapiens
accagatcatcttcc

SEQ ID NO: 285718 - DNA, 15 bp, Homo sapiens
caccagatcatcttc

SEQ ID NO: 285719 - DNA, 15 bp, Homo sapiens
tcaccagatcatctt

SEQ ID NO: 285720 - DNA, 15 bp, Homo sapiens
atcaccagatcatct

SEQ ID NO: 285721 - DNA, 15 bp, Homo sapiens
aatcaccagatcatc

SEQ ID NO: 285722 - DNA, 15 bp, Homo sapiens
aaatcaccagatcat

SEQ ID NO: 285723 - DNA, 15 bp, Homo sapiens
gaaatcaccagatca

SEQ ID NO: 285724 - DNA, 15 bp, Homo sapiens
tgaaatcaccagatc

SEQ ID NO: 285725 - DNA, 15 bp, Homo sapiens
atgaaatcaccagat

SEQ ID NO: 285726 - DNA, 15 bp, Homo sapiens
aatgaaatcaccaga

SEQ ID NO: 285727 - DNA, 15 bp, Homo sapiens
aaatgaaatcaccag

SEQ ID NO: 285728 - DNA, 15 bp, Homo sapiens
gaaatgaaatcacca

SEQ ID NO: 285729 - DNA, 15 bp, Homo sapiens
tgaaatgaaatcacc

SEQ ID NO: 285730 - DNA, 15 bp, Homo sapiens
ctgaaatgaaatcac

SEQ ID NO: 285731 - DNA, 15 bp, Homo sapiens
actgaaatgaaatca

SEQ ID NO: 285732 - DNA, 15 bp, Homo sapiens
aactgaaatgaaatc

SEQ ID NO: 285733 - DNA, 15 bp, Homo sapiens
taactgaaatgaaat

SEQ ID NO: 285734 - DNA, 15 bp, Homo sapiens
ttaactgaaatgaaa

SEQ ID NO: 285735 - DNA, 15 bp, Homo sapiens
attaactgaaatgaa

SEQ ID NO: 285736 - DNA, 15 bp, Homo sapiens
cattaactgaaatga

SEQ ID NO: 285737 - DNA, 15 bp, Homo sapiens
gcattaactgaaatg

SEQ ID NO: 285738 - DNA, 15 bp, Homo sapiens
agcattaactgaaat

SEQ ID NO: 285739 - DNA, 15 bp, Homo sapiens
tagcattaactgaaa

SEQ ID NO: 285740 - DNA, 15 bp, Homo sapiens
atagcattaactgaa

SEQ ID NO: 285741 - DNA, 15 bp, Homo sapiens
catagcattaactga

SEQ ID NO: 285742 - DNA, 15 bp, Homo sapiens
acatagcattaactg

SEQ ID NO: 285743 - DNA, 15 bp, Homo sapiens
cacatagcattaact

SEQ ID NO: 285744 - DNA, 15 bp, Homo sapiens
acacatagcattaac

SEQ ID NO: 285745 - DNA, 15 bp, Homo sapiens
gacacatagcattaa

SEQ ID NO: 285746 - DNA, 15 bp, Homo sapiens
ggacacatagcatta

SEQ ID NO: 285747 - DNA, 15 bp, Homo sapiens
aggacacatagcatt

SEQ ID NO: 285748 - DNA, 15 bp, Homo sapiens
aaggacacatagcat

SEQ ID NO: 285749 - DNA, 15 bp, Homo sapiens
caaggacacatagca

SEQ ID NO: 285750 - DNA, 15 bp, Homo sapiens
tcaaggacacatagc

SEQ ID NO: 285751 - DNA, 15 bp, Homo sapiens
gtcaaggacacatag

SEQ ID NO: 285752 - DNA, 15 bp, Homo sapiens
agtcaaggacacata

SEQ ID NO: 285753 - DNA, 15 bp, Homo sapiens
tagtcaaggacacat

SEQ ID NO: 285754 - DNA, 15 bp, Homo sapiens
atagtcaaggacaca

SEQ ID NO: 285755 - DNA, 15 bp, Homo sapiens
aatagtcaaggacac

SEQ ID NO: 285756 - DNA, 15 bp, Homo sapiens
aaatagtcaaggaca

SEQ ID NO: 285757 - DNA, 15 bp, Homo sapiens
aaaatagtcaaggac

SEQ ID NO: 285758 - DNA, 15 bp, Homo sapiens
taaaatagtcaagga

SEQ ID NO: 285759 - DNA, 15 bp, Homo sapiens
ataaaatagtcaagg

SEQ ID NO: 285760 - DNA, 15 bp, Homo sapiens
aataaaatagtcaag

SEQ ID NO: 285761 - DNA, 15 bp, Homo sapiens
taataaaatagtcaa

SEQ ID NO: 285762 - DNA, 15 bp, Homo sapiens
ttaataaaatagtca

SEQ ID NO: 285763 - DNA, 15 bp, Homo sapiens
tttaataaaatagtc

SEQ ID NO: 285764 - DNA, 15 bp, Homo sapiens
gtttaataaaatagt

SEQ ID NO: 285765 - DNA, 15 bp, Homo sapiens
agtttaataaaatag

SEQ ID NO: 285766 - DNA, 15 bp, Homo sapiens
gagtttaataaaata

SEQ ID NO: 285767 - DNA, 15 bp, Homo sapiens
agagtttaataaaat

SEQ ID NO: 285768 - DNA, 15 bp, Homo sapiens
gagagtttaataaaa

SEQ ID NO: 285769 - DNA, 15 bp, Homo sapiens
tgagagtttaataaa

SEQ ID NO: 285770 - DNA, 15 bp, Homo sapiens
gtgagagtttaataa

SEQ ID NO: 285771 - DNA, 15 bp, Homo sapiens
ggtgagagtttaata

SEQ ID NO: 285772 - DNA, 15 bp, Homo sapiens
aggtgagagtttaat

SEQ ID NO: 285773 - DNA, 15 bp, Homo sapiens
gaggtgagagtttaa

SEQ ID NO: 285774 - DNA, 15 bp, Homo sapiens
ggaggtgagagttta

SEQ ID NO: 285775 - DNA, 15 bp, Homo sapiens
gggaggtgagagttt

SEQ ID NO: 285776 - DNA, 15 bp, Homo sapiens
tgggaggtgagagtt

SEQ ID NO: 285777 - DNA, 15 bp, Homo sapiens
atgggaggtgagagt

SEQ ID NO: 285778 - DNA, 15 bp, Homo sapiens
catgggaggtgagag

SEQ ID NO: 285779 - DNA, 15 bp, Homo sapiens
acatgggaggtgaga

SEQ ID NO: 285780 - DNA, 15 bp, Homo sapiens
aacatgggaggtgag

SEQ ID NO: 285781 - DNA, 15 bp, Homo sapiens
caacatgggaggtga

SEQ ID NO: 285782 - DNA, 15 bp, Homo sapiens
gcaacatgggaggtg

SEQ ID NO: 285783 - DNA, 15 bp, Homo sapiens
agcaacatgggaggt

SEQ ID NO: 285784 - DNA, 15 bp, Homo sapiens
gagcaacatgggagg

SEQ ID NO: 285785 - DNA, 15 bp, Homo sapiens
tgagcaacatgggag

SEQ ID NO: 285786 - DNA, 15 bp, Homo sapiens
ttgagcaacatggga

SEQ ID NO: 285787 - DNA, 15 bp, Homo sapiens
tttgagcaacatggg

SEQ ID NO: 285788 - DNA, 15 bp, Homo sapiens
ctttgagcaacatgg

SEQ ID NO: 285789 - DNA, 15 bp, Homo sapiens
tctttgagcaacatg

SEQ ID NO: 285790 - DNA, 15 bp, Homo sapiens
ttctttgagcaacat

SEQ ID NO: 285791 - DNA, 15 bp, Homo sapiens
gttctttgagcaaca

SEQ ID NO: 285792 - DNA, 15 bp, Homo sapiens
ggttctttgagcaac

SEQ ID NO: 285793 - DNA, 15 bp, Homo sapiens
tggttctttgagcaa

SEQ ID NO: 285794 - DNA, 15 bp, Homo sapiens
atggttctttgagca

SEQ ID NO: 285795 - DNA, 15 bp, Homo sapiens
tatggttctttgagc

SEQ ID NO: 285796 - DNA, 15 bp, Homo sapiens
atatggttctttgag

SEQ ID NO: 285797 - DNA, 15 bp, Homo sapiens
tatatggttctttga

SEQ ID NO: 285798 - DNA, 15 bp, Homo sapiens
ctatatggttctttg

SEQ ID NO: 285799 - DNA, 15 bp, Homo sapiens
actatatggttcttt

SEQ ID NO: 285800 - DNA, 15 bp, Homo sapiens
tactatatggttctt

SEQ ID NO: 285801 - DNA, 15 bp, Homo sapiens
ttactatatggttct

SEQ ID NO: 285802 - DNA, 15 bp, Homo sapiens
cttactatatggttc

SEQ ID NO: 285803 - DNA, 15 bp, Homo sapiens
acttactatatggtt

SEQ ID NO: 285804 - DNA, 15 bp, Homo sapiens
tacttactatatggt

SEQ ID NO: 285805 - DNA, 15 bp, Homo sapiens
atacttactatatgg

SEQ ID NO: 285806 - DNA, 15 bp, Homo sapiens
aatacttactatatg

SEQ ID NO: 285807 - DNA, 15 bp, Homo sapiens
aaatacttactatat

SEQ ID NO: 285808 - DNA, 15 bp, Homo sapiens
taaatacttactata

SEQ ID NO: 285809 - DNA, 15 bp, Homo sapiens
ttaaatacttactat

SEQ ID NO: 285810 - DNA, 15 bp, Homo sapiens
attaaatacttacta

SEQ ID NO: 285811 - DNA, 15 bp, Homo sapiens
aattaaatacttact

SEQ ID NO: 285812 - DNA, 15 bp, Homo sapiens
aaattaaatacttac

SEQ ID NO: 285813 - DNA, 15 bp, Homo sapiens
taaattaaatactta

SEQ ID NO: 285814 - DNA, 15 bp, Homo sapiens
ataaattaaatactt

SEQ ID NO: 285815 - DNA, 15 bp, Homo sapiens
cataaattaaatact

SEQ ID NO: 285816 - DNA, 15 bp, Homo sapiens
gcataaattaaatac

SEQ ID NO: 285817 - DNA, 15 bp, Homo sapiens
ggcataaattaaata

SEQ ID NO: 285818 - DNA, 15 bp, Homo sapiens
gggcataaattaaat

SEQ ID NO: 285819 - DNA, 15 bp, Homo sapiens
ggggcataaattaaa

SEQ ID NO: 285820 - DNA, 15 bp, Homo sapiens
aggggcataaattaa

SEQ ID NO: 285821 - DNA, 15 bp, Homo sapiens
aaggggcataaatta

SEQ ID NO: 285822 - DNA, 15 bp, Homo sapiens
aaaggggcataaatt

SEQ ID NO: 285823 - DNA, 15 bp, Homo sapiens
aaaaggggcataaat

SEQ ID NO: 285824 - DNA, 15 bp, Homo sapiens
taaaaggggcataaa

SEQ ID NO: 285825 - DNA, 15 bp, Homo sapiens
gtaaaaggggcataa

SEQ ID NO: 285826 - DNA, 15 bp, Homo sapiens
agtaaaaggggcata

SEQ ID NO: 285827 - DNA, 15 bp, Homo sapiens
aagtaaaaggggcat

SEQ ID NO: 285828 - DNA, 15 bp, Homo sapiens
aaagtaaaaggggca

SEQ ID NO: 285829 - DNA, 15 bp, Homo sapiens
gaaagtaaaaggggc

SEQ ID NO: 285830 - DNA, 15 bp, Homo sapiens
agaaagtaaaagggg

SEQ ID NO: 285831 - DNA, 15 bp, Homo sapiens
gagaaagtaaaaggg

SEQ ID NO: 285832 - DNA, 15 bp, Homo sapiens
tgagaaagtaaaagg

SEQ ID NO: 285833 - DNA, 15 bp, Homo sapiens
atgagaaagtaaaag

SEQ ID NO: 285834 - DNA, 15 bp, Homo sapiens
aatgagaaagtaaaa

SEQ ID NO: 285835 - DNA, 15 bp, Homo sapiens
gaatgagaaagtaaa

SEQ ID NO: 285836 - DNA, 15 bp, Homo sapiens
tgaatgagaaagtaa

SEQ ID NO: 285837 - DNA, 15 bp, Homo sapiens
ctgaatgagaaagta

SEQ ID NO: 285838 - DNA, 15 bp, Homo sapiens
gctgaatgagaaagt

SEQ ID NO: 285839 - DNA, 15 bp, Homo sapiens
tgctgaatgagaaag

SEQ ID NO: 285840 - DNA, 15 bp, Homo sapiens
ctgctgaatgagaaa

SEQ ID NO: 285841 - DNA, 15 bp, Homo sapiens
actgctgaatgagaa

SEQ ID NO: 285842 - DNA, 15 bp, Homo sapiens
aactgctgaatgaga

SEQ ID NO: 285843 - DNA, 15 bp, Homo sapiens
caactgctgaatgag

SEQ ID NO: 285844 - DNA, 15 bp, Homo sapiens
gcaactgctgaatga

SEQ ID NO: 285845 - DNA, 15 bp, Homo sapiens
agcaactgctgaatg

SEQ ID NO: 285846 - DNA, 15 bp, Homo sapiens
aagcaactgctgaat

SEQ ID NO: 285847 - DNA, 15 bp, Homo sapiens
taagcaactgctgaa

SEQ ID NO: 285848 - DNA, 15 bp, Homo sapiens
ataagcaactgctga

SEQ ID NO: 285849 - DNA, 15 bp, Homo sapiens
aataagcaactgctg

SEQ ID NO: 285850 - DNA, 15 bp, Homo sapiens
caataagcaactgct

SEQ ID NO: 285851 - DNA, 15 bp, Homo sapiens
tcaataagcaactgc

SEQ ID NO: 285852 - DNA, 15 bp, Homo sapiens
ttcaataagcaactg

SEQ ID NO: 285853 - DNA, 15 bp, Homo sapiens
attcaataagcaact

SEQ ID NO: 285854 - DNA, 15 bp, Homo sapiens
cattcaataagcaac

SEQ ID NO: 285855 - DNA, 15 bp, Homo sapiens
acattcaataagcaa

SEQ ID NO: 285856 - DNA, 15 bp, Homo sapiens
gacattcaataagca

SEQ ID NO: 285857 - DNA, 15 bp, Homo sapiens
agacattcaataagc

SEQ ID NO: 285858 - DNA, 15 bp, Homo sapiens
tagacattcaataag

SEQ ID NO: 285859 - DNA, 15 bp, Homo sapiens
ctagacattcaataa

SEQ ID NO: 285860 - DNA, 15 bp, Homo sapiens
actagacattcaata

SEQ ID NO: 285861 - DNA, 15 bp, Homo sapiens
cactagacattcaat

SEQ ID NO: 285862 - DNA, 15 bp, Homo sapiens
ccactagacattcaa

SEQ ID NO: 285863 - DNA, 15 bp, Homo sapiens
cccactagacattca

SEQ ID NO: 285864 - DNA, 15 bp, Homo sapiens
acccactagacattc

SEQ ID NO: 285865 - DNA, 15 bp, Homo sapiens
tacccactagacatt

SEQ ID NO: 285866 - DNA, 15 bp, Homo sapiens
gtacccactagacat

SEQ ID NO: 285867 - DNA, 15 bp, Homo sapiens
ggtacccactagaca

SEQ ID NO: 285868 - DNA, 15 bp, Homo sapiens
tggtacccactagac

SEQ ID NO: 285869 - DNA, 15 bp, Homo sapiens
ttggtacccactaga

SEQ ID NO: 285870 - DNA, 15 bp, Homo sapiens
tttggtacccactag

SEQ ID NO: 285871 - DNA, 15 bp, Homo sapiens
gtttggtacccacta

SEQ ID NO: 285872 - DNA, 15 bp, Homo sapiens
tgtttggtacccact

SEQ ID NO: 285873 - DNA, 15 bp, Homo sapiens
atgtttggtacccac

SEQ ID NO: 285874 - DNA, 15 bp, Homo sapiens
catgtttggtaccca

SEQ ID NO: 285875 - DNA, 15 bp, Homo sapiens
ccatgtttggtaccc

SEQ ID NO: 285876 - DNA, 15 bp, Homo sapiens
accatgtttggtacc

SEQ ID NO: 285877 - DNA, 15 bp, Homo sapiens
aaccatgtttggtac

SEQ ID NO: 285878 - DNA, 15 bp, Homo sapiens
gaaccatgtttggta

SEQ ID NO: 285879 - DNA, 15 bp, Homo sapiens
agaaccatgtttggt

SEQ ID NO: 285880 - DNA, 15 bp, Homo sapiens
tagaaccatgtttgg

SEQ ID NO: 285881 - DNA, 15 bp, Homo sapiens
ttagaaccatgtttg

SEQ ID NO: 285882 - DNA, 15 bp, Homo sapiens
cttagaaccatgttt

SEQ ID NO: 285883 - DNA, 15 bp, Homo sapiens
ccttagaaccatgtt

SEQ ID NO: 285884 - DNA, 15 bp, Homo sapiens
gccttagaaccatgt

SEQ ID NO: 285885 - DNA, 15 bp, Homo sapiens
agccttagaaccatg

SEQ ID NO: 285886 - DNA, 15 bp, Homo sapiens
cagccttagaaccat

SEQ ID NO: 285887 - DNA, 15 bp, Homo sapiens
tcagccttagaacca

SEQ ID NO: 285888 - DNA, 15 bp, Homo sapiens
gtcagccttagaacc

SEQ ID NO: 285889 - DNA, 15 bp, Homo sapiens
tgtcagccttagaac

SEQ ID NO: 285890 - DNA, 15 bp, Homo sapiens
ctgtcagccttagaa

SEQ ID NO: 285891 - DNA, 15 bp, Homo sapiens
cctgtcagccttaga

SEQ ID NO: 285892 - DNA, 15 bp, Homo sapiens
tcctgtcagccttag

SEQ ID NO: 285893 - DNA, 15 bp, Homo sapiens
atcctgtcagcctta

SEQ ID NO: 285894 - DNA, 15 bp, Homo sapiens
catcctgtcagcctt

SEQ ID NO: 285895 - DNA, 15 bp, Homo sapiens
tcatcctgtcagcct

SEQ ID NO: 285896 - DNA, 15 bp, Homo sapiens
atcatcctgtcagcc

SEQ ID NO: 285897 - DNA, 15 bp, Homo sapiens
tatcatcctgtcagc

SEQ ID NO: 285898 - DNA, 15 bp, Homo sapiens
ttatcatcctgtcag

SEQ ID NO: 285899 - DNA, 15 bp, Homo sapiens
tttatcatcctgtca

SEQ ID NO: 285900 - DNA, 15 bp, Homo sapiens
ttttatcatcctgtc

SEQ ID NO: 285901 - DNA, 15 bp, Homo sapiens
tttttatcatcctgt

SEQ ID NO: 285902 - DNA, 15 bp, Homo sapiens
ttttttatcatcctg

SEQ ID NO: 285903 - DNA, 15 bp, Homo sapiens
attttttatcatcct

SEQ ID NO: 285904 - DNA, 15 bp, Homo sapiens
tattttttatcatcc

SEQ ID NO: 285905 - DNA, 15 bp, Homo sapiens
ttattttttatcatc

SEQ ID NO: 285906 - DNA, 15 bp, Homo sapiens
tttattttttatcat

SEQ ID NO: 285907 - DNA, 15 bp, Homo sapiens
atttattttttatca

SEQ ID NO: 285908 - DNA, 15 bp, Homo sapiens
gatttattttttatc

SEQ ID NO: 285909 - DNA, 15 bp, Homo sapiens
tgatttattttttat

SEQ ID NO: 285910 - DNA, 15 bp, Homo sapiens
ctgatttatttttta

SEQ ID NO: 285911 - DNA, 15 bp, Homo sapiens
tctgatttatttttt

SEQ ID NO: 285912 - DNA, 15 bp, Homo sapiens
gtctgatttattttt

SEQ ID NO: 285913 - DNA, 15 bp, Homo sapiens
tgtctgatttatttt

SEQ ID NO: 285914 - DNA, 15 bp, Homo sapiens
atgtctgatttattt

SEQ ID NO: 285915 - DNA, 15 bp, Homo sapiens
catgtctgatttatt

SEQ ID NO: 285916 - DNA, 15 bp, Homo sapiens
ccatgtctgatttat

SEQ ID NO: 285917 - DNA, 15 bp, Homo sapiens
tccatgtctgattta

SEQ ID NO: 285918 - DNA, 15 bp, Homo sapiens
gtccatgtctgattt

SEQ ID NO: 285919 - DNA, 15 bp, Homo sapiens
agtccatgtctgatt

SEQ ID NO: 285920 - DNA, 15 bp, Homo sapiens
aagtccatgtctgat

SEQ ID NO: 285921 - DNA, 15 bp, Homo sapiens
aaagtccatgtctga

SEQ ID NO: 285922 - DNA, 15 bp, Homo sapiens
caaagtccatgtctg

SEQ ID NO: 285923 - DNA, 15 bp, Homo sapiens
gcaaagtccatgtct

SEQ ID NO: 285924 - DNA, 15 bp, Homo sapiens
ggcaaagtccatgtc

SEQ ID NO: 285925 - DNA, 15 bp, Homo sapiens
gggcaaagtccatgt

SEQ ID NO: 285926 - DNA, 15 bp, Homo sapiens
tgggcaaagtccatg

SEQ ID NO: 285927 - DNA, 15 bp, Homo sapiens
atgggcaaagtccat

SEQ ID NO: 285928 - DNA, 15 bp, Homo sapiens
tatgggcaaagtcca

SEQ ID NO: 285929 - DNA, 15 bp, Homo sapiens
ttatgggcaaagtcc

SEQ ID NO: 285930 - DNA, 15 bp, Homo sapiens
cttatgggcaaagtc

SEQ ID NO: 285931 - DNA, 15 bp, Homo sapiens
acttatgggcaaagt

SEQ ID NO: 285932 - DNA, 15 bp, Homo sapiens
tacttatgggcaaag

SEQ ID NO: 285933 - DNA, 15 bp, Homo sapiens
ctacttatgggcaaa

SEQ ID NO: 285934 - DNA, 15 bp, Homo sapiens
actacttatgggcaa

SEQ ID NO: 285935 - DNA, 15 bp, Homo sapiens
cactacttatgggca

SEQ ID NO: 285936 - DNA, 15 bp, Homo sapiens
acactacttatgggc

SEQ ID NO: 285937 - DNA, 15 bp, Homo sapiens
tacactacttatggg

SEQ ID NO: 285938 - DNA, 15 bp, Homo sapiens
ttacactacttatgg

SEQ ID NO: 285939 - DNA, 15 bp, Homo sapiens
cttacactacttatg

SEQ ID NO: 285940 - DNA, 15 bp, Homo sapiens
acttacactacttat

SEQ ID NO: 285941 - DNA, 15 bp, Homo sapiens
aacttacactactta

SEQ ID NO: 285942 - DNA, 15 bp, Homo sapiens
taacttacactactt

SEQ ID NO: 285943 - DNA, 15 bp, Homo sapiens
ataacttacactact

SEQ ID NO: 285944 - DNA, 15 bp, Homo sapiens
tataacttacactac

SEQ ID NO: 285945 - DNA, 15 bp, Homo sapiens
ctataacttacacta

SEQ ID NO: 285946 - DNA, 15 bp, Homo sapiens
tctataacttacact

SEQ ID NO: 285947 - DNA, 15 bp, Homo sapiens
ttctataacttacac

SEQ ID NO: 285948 - DNA, 15 bp, Homo sapiens
cttctataacttaca

SEQ ID NO: 285949 - DNA, 15 bp, Homo sapiens
ccttctataacttac

SEQ ID NO: 285950 - DNA, 15 bp, Homo sapiens
tccttctataactta

SEQ ID NO: 285951 - DNA, 15 bp, Homo sapiens
ttccttctataactt

SEQ ID NO: 285952 - DNA, 15 bp, Homo sapiens
tttccttctataact

SEQ ID NO: 285953 - DNA, 15 bp, Homo sapiens
ctttccttctataac

SEQ ID NO: 285954 - DNA, 15 bp, Homo sapiens
tctttccttctataa

SEQ ID NO: 285955 - DNA, 15 bp, Homo sapiens
atctttccttctata

SEQ ID NO: 285956 - DNA, 15 bp, Homo sapiens
tatctttccttctat

SEQ ID NO: 285957 - DNA, 15 bp, Homo sapiens
ttatctttccttcta

SEQ ID NO: 285958 - DNA, 15 bp, Homo sapiens
cttatctttccttct

SEQ ID NO: 285959 - DNA, 15 bp, Homo sapiens
tcttatctttccttc

SEQ ID NO: 285960 - DNA, 15 bp, Homo sapiens
gtcttatctttcctt

SEQ ID NO: 285961 - DNA, 15 bp, Homo sapiens
tgtcttatctttcct

SEQ ID NO: 285962 - DNA, 15 bp, Homo sapiens
atgtcttatctttcc

SEQ ID NO: 285963 - DNA, 15 bp, Homo sapiens
catgtcttatctttc

SEQ ID NO: 285964 - DNA, 15 bp, Homo sapiens
ccatgtcttatcttt

SEQ ID NO: 285965 - DNA, 15 bp, Homo sapiens
tccatgtcttatctt

SEQ ID NO: 285966 - DNA, 15 bp, Homo sapiens
ttccatgtcttatct

SEQ ID NO: 285967 - DNA, 15 bp, Homo sapiens
tttccatgtcttatc

SEQ ID NO: 285968 - DNA, 15 bp, Homo sapiens
gtttccatgtcttat

SEQ ID NO: 285969 - DNA, 15 bp, Homo sapiens
tgtttccatgtctta

SEQ ID NO: 285970 - DNA, 15 bp, Homo sapiens
ttgtttccatgtctt

SEQ ID NO: 285971 - DNA, 15 bp, Homo sapiens
tttgtttccatgtct

SEQ ID NO: 285972 - DNA, 15 bp, Homo sapiens
atttgtttccatgtc

SEQ ID NO: 285973 - DNA, 15 bp, Homo sapiens
catttgtttccatgt

SEQ ID NO: 285974 - DNA, 15 bp, Homo sapiens
tcatttgtttccatg

SEQ ID NO: 285975 - DNA, 15 bp, Homo sapiens
atcatttgtttccat

SEQ ID NO: 285976 - DNA, 15 bp, Homo sapiens
aatcatttgtttcca

SEQ ID NO: 285977 - DNA, 15 bp, Homo sapiens
taatcatttgtttcc

SEQ ID NO: 285978 - DNA, 15 bp, Homo sapiens
ctaatcatttgtttc

SEQ ID NO: 285979 - DNA, 15 bp, Homo sapiens
tctaatcatttgttt

SEQ ID NO: 285980 - DNA, 15 bp, Homo sapiens
ctctaatcatttgtt

SEQ ID NO: 285981 - DNA, 15 bp, Homo sapiens
actctaatcatttgt

SEQ ID NO: 285982 - DNA, 15 bp, Homo sapiens
tactctaatcatttg

SEQ ID NO: 285983 - DNA, 15 bp, Homo sapiens
atactctaatcattt

SEQ ID NO: 285984 - DNA, 15 bp, Homo sapiens
tatactctaatcatt

SEQ ID NO: 285985 - DNA, 15 bp, Homo sapiens
atatactctaatcat

SEQ ID NO: 285986 - DNA, 15 bp, Homo sapiens
catatactctaatca

SEQ ID NO: 285987 - DNA, 15 bp, Homo sapiens
ccatatactctaatc

SEQ ID NO: 285988 - DNA, 15 bp, Homo sapiens
accatatactctaat

SEQ ID NO: 285989 - DNA, 15 bp, Homo sapiens
taccatatactctaa

SEQ ID NO: 285990 - DNA, 15 bp, Homo sapiens
ctaccatatactcta

SEQ ID NO: 285991 - DNA, 15 bp, Homo sapiens
tctaccatatactct

SEQ ID NO: 285992 - DNA, 15 bp, Homo sapiens
ttctaccatatactc

SEQ ID NO: 285993 - DNA, 15 bp, Homo sapiens
tttctaccatatact

SEQ ID NO: 285994 - DNA, 15 bp, Homo sapiens
ctttctaccatatac

SEQ ID NO: 285995 - DNA, 15 bp, Homo sapiens
actttctaccatata

SEQ ID NO: 285996 - DNA, 15 bp, Homo sapiens
cactttctaccatat

SEQ ID NO: 285997 - DNA, 15 bp, Homo sapiens
ccactttctaccata

SEQ ID NO: 285998 - DNA, 15 bp, Homo sapiens
accactttctaccat

SEQ ID NO: 285999 - DNA, 15 bp, Homo sapiens
aaccactttctacca

SEQ ID NO: 286000 - DNA, 15 bp, Homo sapiens
aaaccactttctacc

SEQ ID NO: 286001 - DNA, 15 bp, Homo sapiens
caaaccactttctac

SEQ ID NO: 286002 - DNA, 15 bp, Homo sapiens
ccaaaccactttcta

SEQ ID NO: 286003 - DNA, 15 bp, Homo sapiens
cccaaaccactttct

SEQ ID NO: 286004 - DNA, 15 bp, Homo sapiens
acccaaaccactttc

SEQ ID NO: 286005 - DNA, 15 bp, Homo sapiens
gacccaaaccacttt

SEQ ID NO: 286006 - DNA, 15 bp, Homo sapiens
tgacccaaaccactt

SEQ ID NO: 286007 - DNA, 15 bp, Homo sapiens
ttgacccaaaccact

SEQ ID NO: 286008 - DNA, 15 bp, Homo sapiens
tttgacccaaaccac

SEQ ID NO: 286009 - DNA, 15 bp, Homo sapiens
ttttgacccaaacca

SEQ ID NO: 286010 - DNA, 15 bp, Homo sapiens
attttgacccaaacc

SEQ ID NO: 286011 - DNA, 15 bp, Homo sapiens
tattttgacccaaac

SEQ ID NO: 286012 - DNA, 15 bp, Homo sapiens
gtattttgacccaaa

SEQ ID NO: 286013 - DNA, 15 bp, Homo sapiens
tgtattttgacccaa

SEQ ID NO: 286014 - DNA, 15 bp, Homo sapiens
ttgtattttgaccca

SEQ ID NO: 286015 - DNA, 15 bp, Homo sapiens
gttgtattttgaccc

SEQ ID NO: 286016 - DNA, 15 bp, Homo sapiens
tgttgtattttgacc

SEQ ID NO: 286017 - DNA, 15 bp, Homo sapiens
ttgttgtattttgac

SEQ ID NO: 286018 - DNA, 15 bp, Homo sapiens
tttgttgtattttga

SEQ ID NO: 286019 - DNA, 15 bp, Homo sapiens
atttgttgtattttg

SEQ ID NO: 286020 - DNA, 15 bp, Homo sapiens
catttgttgtatttt

SEQ ID NO: 286021 - DNA, 15 bp, Homo sapiens
ccatttgttgtattt

SEQ ID NO: 286022 - DNA, 15 bp, Homo sapiens
tccatttgttgtatt

SEQ ID NO: 286023 - DNA, 15 bp, Homo sapiens
ctccatttgttgtat

SEQ ID NO: 286024 - DNA, 15 bp, Homo sapiens
cctccatttgttgta

SEQ ID NO: 286025 - DNA, 15 bp, Homo sapiens
acctccatttgttgt

SEQ ID NO: 286026 - DNA, 15 bp, Homo sapiens
aacctccatttgttg

SEQ ID NO: 286027 - DNA, 15 bp, Homo sapiens
aaacctccatttgtt

SEQ ID NO: 286028 - DNA, 15 bp, Homo sapiens
caaacctccatttgt

SEQ ID NO: 286029 - DNA, 15 bp, Homo sapiens
ccaaacctccatttg

SEQ ID NO: 286030 - DNA, 15 bp, Homo sapiens
cccaaacctccattt

SEQ ID NO: 286031 - DNA, 15 bp, Homo sapiens
tcccaaacctccatt

SEQ ID NO: 286032 - DNA, 15 bp, Homo sapiens
ctcccaaacctccat

SEQ ID NO: 286033 - DNA, 15 bp, Homo sapiens
gtctcccaaacctcc

SEQ ID NO: 286034 - DNA, 15 bp, Homo sapiens
tgtctcccaaacctc

SEQ ID NO: 286035 - DNA, 15 bp, Homo sapiens
ttgtctcccaaacct

SEQ ID NO: 286036 - DNA, 15 bp, Homo sapiens
cttgtctcccaaacc

SEQ ID NO: 286037 - DNA, 15 bp, Homo sapiens
tcttgtctcccaaac

SEQ ID NO: 286038 - DNA, 15 bp, Homo sapiens
ttcttgtctcccaaa

SEQ ID NO: 286039 - DNA, 15 bp, Homo sapiens
tttcttgtctcccaa

SEQ ID NO: 286040 - DNA, 15 bp, Homo sapiens
ctttcttgtctccca

SEQ ID NO: 286041 - DNA, 15 bp, Homo sapiens
actttcttgtctccc

SEQ ID NO: 286042 - DNA, 15 bp, Homo sapiens
aactttcttgtctcc

SEQ ID NO: 286043 - DNA, 15 bp, Homo sapiens
aaactttcttgtctc

SEQ ID NO: 286044 - DNA, 15 bp, Homo sapiens
aaaactttcttgtct

SEQ ID NO: 286045 - DNA, 15 bp, Homo sapiens
aaaaactttcttgtc

SEQ ID NO: 286046 - DNA, 15 bp, Homo sapiens
gaaaaactttcttgt

SEQ ID NO: 286047 - DNA, 15 bp, Homo sapiens
ggaaaaactttcttg

SEQ ID NO: 286048 - DNA, 15 bp, Homo sapiens
tggaaaaactttctt

SEQ ID NO: 286049 - DNA, 15 bp, Homo sapiens
ctggaaaaactttct

SEQ ID NO: 286050 - DNA, 15 bp, Homo sapiens
gctggaaaaactttc

SEQ ID NO: 286051 - DNA, 15 bp, Homo sapiens
agctggaaaaacttt

SEQ ID NO: 286052 - DNA, 15 bp, Homo sapiens
cagctggaaaaactt

SEQ ID NO: 286053 - DNA, 15 bp, Homo sapiens
acagctggaaaaact

SEQ ID NO: 286054 - DNA, 15 bp, Homo sapiens
cacagctggaaaaac

SEQ ID NO: 286055 - DNA, 15 bp, Homo sapiens
ccacagctggaaaaa

SEQ ID NO: 286056 - DNA, 15 bp, Homo sapiens
tccacagctggaaaa

SEQ ID NO: 286057 - DNA, 15 bp, Homo sapiens
ttccacagctggaaa

SEQ ID NO: 286058 - DNA, 15 bp, Homo sapiens
cttccacagctggaa

SEQ ID NO: 286059 - DNA, 15 bp, Homo sapiens
tcttccacagctgga

SEQ ID NO: 286060 - DNA, 15 bp, Homo sapiens
gtcttccacagctgg

SEQ ID NO: 286061 - DNA, 15 bp, Homo sapiens
ggtcttccacagctg

SEQ ID NO: 286062 - DNA, 15 bp, Homo sapiens
tggtcttccacagct

SEQ ID NO: 286063 - DNA, 15 bp, Homo sapiens
ttggtcttccacagc

SEQ ID NO: 286064 - DNA, 15 bp, Homo sapiens
tttggtcttccacag

SEQ ID NO: 286065 - DNA, 15 bp, Homo sapiens
ctttggtcttccaca

SEQ ID NO: 286066 - DNA, 15 bp, Homo sapiens
tctttggtcttccac

SEQ ID NO: 286067 - DNA, 15 bp, Homo sapiens
ttctttggtcttcca

SEQ ID NO: 286068 - DNA, 15 bp, Homo sapiens
attctttggtcttcc

SEQ ID NO: 286069 - DNA, 15 bp, Homo sapiens
tattctttggtcttc

SEQ ID NO: 286070 - DNA, 15 bp, Homo sapiens
gtattctttggtctt

SEQ ID NO: 286071 - DNA, 15 bp, Homo sapiens
ggtattctttggtct

SEQ ID NO: 286072 - DNA, 15 bp, Homo sapiens
tggtattctttggtc

SEQ ID NO: 286073 - DNA, 15 bp, Homo sapiens
atggtattctttggt

SEQ ID NO: 286074 - DNA, 15 bp, Homo sapiens
tatggtattctttgg

SEQ ID NO: 286075 - DNA, 15 bp, Homo sapiens
atatggtattctttg

SEQ ID NO: 286076 - DNA, 15 bp, Homo sapiens
tatatggtattcttt

SEQ ID NO: 286077 - DNA, 15 bp, Homo sapiens
ttatatggtattctt

SEQ ID NO: 286078 - DNA, 15 bp, Homo sapiens
tttatatggtattct

SEQ ID NO: 286079 - DNA, 15 bp, Homo sapiens
ttttatatggtattc

SEQ ID NO: 286080 - DNA, 15 bp, Homo sapiens
cttttatatggtatt

SEQ ID NO: 286081 - DNA, 15 bp, Homo sapiens
tcttttatatggtat

SEQ ID NO: 286082 - DNA, 15 bp, Homo sapiens
ttcttttatatggta

SEQ ID NO: 286083 - DNA, 15 bp, Homo sapiens
cttcttttatatggt

SEQ ID NO: 286084 - DNA, 15 bp, Homo sapiens
acttcttttatatgg

SEQ ID NO: 286085 - DNA, 15 bp, Homo sapiens
tacttcttttatatg

SEQ ID NO: 286086 - DNA, 15 bp, Homo sapiens
ctacttcttttatat

SEQ ID NO: 286087 - DNA, 15 bp, Homo sapiens
actacttcttttata

SEQ ID NO: 286088 - DNA, 15 bp, Homo sapiens
tactacttcttttat

SEQ ID NO: 286089 - DNA, 15 bp, Homo sapiens
atactacttctttta

SEQ ID NO: 286090 - DNA, 15 bp, Homo sapiens
aatactacttctttt

SEQ ID NO: 286091 - DNA, 15 bp, Homo sapiens
aaatactacttcttt

SEQ ID NO: 286092 - DNA, 15 bp, Homo sapiens
caaatactacttctt

SEQ ID NO: 286093 - DNA, 15 bp, Homo sapiens
tcaaatactacttct

SEQ ID NO: 286094 - DNA, 15 bp, Homo sapiens
ttcaaatactacttc

SEQ ID NO: 286095 - DNA, 15 bp, Homo sapiens
tttcaaatactactt

SEQ ID NO: 286096 - DNA, 15 bp, Homo sapiens
atttcaaatactact

SEQ ID NO: 286097 - DNA, 15 bp, Homo sapiens
aatttcaaatactac

SEQ ID NO: 286098 - DNA, 15 bp, Homo sapiens
taatttcaaatacta

SEQ ID NO: 286099 - DNA, 15 bp, Homo sapiens
ttaatttcaaatact

SEQ ID NO: 286100 - DNA, 15 bp, Homo sapiens
gttaatttcaaatac

SEQ ID NO: 286101 - DNA, 15 bp, Homo sapiens
tgttaatttcaaata

SEQ ID NO: 286102 - DNA, 15 bp, Homo sapiens
atgttaatttcaaat

SEQ ID NO: 286103 - DNA, 15 bp, Homo sapiens
catgttaatttcaaa

SEQ ID NO: 286104 - DNA, 15 bp, Homo sapiens
ccatgttaatttcaa

SEQ ID NO: 286105 - DNA, 15 bp, Homo sapiens
tccatgttaatttca

SEQ ID NO: 286106 - DNA, 15 bp, Homo sapiens
ttccatgttaatttc

SEQ ID NO: 286107 - DNA, 15 bp, Homo sapiens
cttccatgttaattt

SEQ ID NO: 286108 - DNA, 15 bp, Homo sapiens
tcttccatgttaatt

SEQ ID NO: 286109 - DNA, 15 bp, Homo sapiens
ctcttccatgttaat

SEQ ID NO: 286110 - DNA, 15 bp, Homo sapiens
actcttccatgttaa

SEQ ID NO: 286111 - DNA, 15 bp, Homo sapiens
cactcttccatgtta

SEQ ID NO: 286112 - DNA, 15 bp, Homo sapiens
ccactcttccatgtt

SEQ ID NO: 286113 - DNA, 15 bp, Homo sapiens
accactcttccatgt

SEQ ID NO: 286114 - DNA, 15 bp, Homo sapiens
aaccactcttccatg

SEQ ID NO: 286115 - DNA, 15 bp, Homo sapiens
taaccactcttccat

SEQ ID NO: 286116 - DNA, 15 bp, Homo sapiens
ctaaccactcttcca

SEQ ID NO: 286117 - DNA, 15 bp, Homo sapiens
cctaaccactcttcc

SEQ ID NO: 286118 - DNA, 15 bp, Homo sapiens
tcctaaccactcttc

SEQ ID NO: 286119 - DNA, 15 bp, Homo sapiens
atcctaaccactctt

SEQ ID NO: 286120 - DNA, 15 bp, Homo sapiens
aatcctaaccactct

SEQ ID NO: 286121 - DNA, 15 bp, Homo sapiens
caatcctaaccactc

SEQ ID NO: 286122 - DNA, 15 bp, Homo sapiens
ccaatcctaaccact

SEQ ID NO: 286123 - DNA, 15 bp, Homo sapiens
cccaatcctaaccac

SEQ ID NO: 286124 - DNA, 15 bp, Homo sapiens
ccccaatcctaacca

SEQ ID NO: 286125 - DNA, 15 bp, Homo sapiens
tccccaatcctaacc

SEQ ID NO: 286126 - DNA, 15 bp, Homo sapiens
ttccccaatcctaac

SEQ ID NO: 286127 - DNA, 15 bp, Homo sapiens
tttccccaatcctaa

SEQ ID NO: 286128 - DNA, 15 bp, Homo sapiens
ctttccccaatccta

SEQ ID NO: 286129 - DNA, 15 bp, Homo sapiens
cctttccccaatcct

SEQ ID NO: 286130 - DNA, 15 bp, Homo sapiens
gcctttccccaatcc

SEQ ID NO: 286131 - DNA, 15 bp, Homo sapiens
tgcctttccccaatc

SEQ ID NO: 286132 - DNA, 15 bp, Homo sapiens
atgcctttccccaat

SEQ ID NO: 286133 - DNA, 15 bp, Homo sapiens
aatgcctttccccaa

SEQ ID NO: 286134 - DNA, 15 bp, Homo sapiens
gaatgcctttcccca

SEQ ID NO: 286135 - DNA, 15 bp, Homo sapiens
agaatgcctttcccc

SEQ ID NO: 286136 - DNA, 15 bp, Homo sapiens
gagaatgcctttccc

SEQ ID NO: 286137 - DNA, 15 bp, Homo sapiens
tgagaatgcctttcc

SEQ ID NO: 286138 - DNA, 15 bp, Homo sapiens
ctgagaatgcctttc

SEQ ID NO: 286139 - DNA, 15 bp, Homo sapiens
actgagaatgccttt

SEQ ID NO: 286140 - DNA, 15 bp, Homo sapiens
tactgagaatgcctt

SEQ ID NO: 286141 - DNA, 15 bp, Homo sapiens
ttactgagaatgcct

SEQ ID NO: 286142 - DNA, 15 bp, Homo sapiens
tttactgagaatgcc

SEQ ID NO: 286143 - DNA, 15 bp, Homo sapiens
ctttactgagaatgc

SEQ ID NO: 286144 - DNA, 15 bp, Homo sapiens
actttactgagaatg

SEQ ID NO: 286145 - DNA, 15 bp, Homo sapiens
cactttactgagaat

SEQ ID NO: 286146 - DNA, 15 bp, Homo sapiens
acactttactgagaa

SEQ ID NO: 286147 - DNA, 15 bp, Homo sapiens
aacactttactgaga

SEQ ID NO: 286148 - DNA, 15 bp, Homo sapiens
caacactttactgag

SEQ ID NO: 286149 - DNA, 15 bp, Homo sapiens
ccaacactttactga

SEQ ID NO: 286150 - DNA, 15 bp, Homo sapiens
cccaacactttactg

SEQ ID NO: 286151 - DNA, 15 bp, Homo sapiens
ccccaacactttact

SEQ ID NO: 286152 - DNA, 15 bp, Homo sapiens
cccccaacactttac

SEQ ID NO: 286153 - DNA, 15 bp, Homo sapiens
tcccccaacacttta

SEQ ID NO: 286154 - DNA, 15 bp, Homo sapiens
ctcccccaacacttt

SEQ ID NO: 286155 - DNA, 15 bp, Homo sapiens
cctcccccaacactt

SEQ ID NO: 286156 - DNA, 15 bp, Homo sapiens
ccctcccccaacact

SEQ ID NO: 286157 - DNA, 15 bp, Homo sapiens
gccctcccccaacac

SEQ ID NO: 286158 - DNA, 15 bp, Homo sapiens
tgccctcccccaaca

SEQ ID NO: 286159 - DNA, 15 bp, Homo sapiens
atgccctcccccaac

SEQ ID NO: 286160 - DNA, 15 bp, Homo sapiens
aatgccctcccccaa

SEQ ID NO: 286161 - DNA, 15 bp, Homo sapiens
gaatgccctccccca

SEQ ID NO: 286162 - DNA, 15 bp, Homo sapiens
ggaatgccctccccc

SEQ ID NO: 286163 - DNA, 15 bp, Homo sapiens
gggaatgccctcccc

SEQ ID NO: 286164 - DNA, 15 bp, Homo sapiens
tgggaatgccctccc

SEQ ID NO: 286165 - DNA, 15 bp, Homo sapiens
ctgggaatgccctcc

SEQ ID NO: 286166 - DNA, 15 bp, Homo sapiens
actgggaatgccctc

SEQ ID NO: 286167 - DNA, 15 bp, Homo sapiens
cactgggaatgccct

SEQ ID NO: 286168 - DNA, 15 bp, Homo sapiens
tcactgggaatgccc

SEQ ID NO: 286169 - DNA, 15 bp, Homo sapiens
ttcactgggaatgcc

SEQ ID NO: 286170 - DNA, 15 bp, Homo sapiens
cttcactgggaatgc

SEQ ID NO: 286171 - DNA, 15 bp, Homo sapiens
tcttcactgggaatg

SEQ ID NO: 286172 - DNA, 15 bp, Homo sapiens
ttcttcactgggaat

SEQ ID NO: 286173 - DNA, 15 bp, Homo sapiens
tttcttcactgggaa

SEQ ID NO: 286174 - DNA, 15 bp, Homo sapiens
ttttcttcactggga

SEQ ID NO: 286175 - DNA, 15 bp, Homo sapiens
cttttcttcactggg

SEQ ID NO: 286176 - DNA, 15 bp, Homo sapiens
gcttttcttcactgg

SEQ ID NO: 286177 - DNA, 15 bp, Homo sapiens
tgcttttcttcactg

SEQ ID NO: 286178 - DNA, 15 bp, Homo sapiens
ttgcttttcttcact

SEQ ID NO: 286179 - DNA, 15 bp, Homo sapiens
cttgcttttcttcac

SEQ ID NO: 286180 - DNA, 15 bp, Homo sapiens
tcttgcttttcttca

SEQ ID NO: 286181 - DNA, 15 bp, Homo sapiens
ttcttgcttttcttc

SEQ ID NO: 286182 - DNA, 15 bp, Homo sapiens
tttcttgcttttctt

SEQ ID NO: 286183 - DNA, 15 bp, Homo sapiens
gtttcttgcttttct

SEQ ID NO: 286184 - DNA, 15 bp, Homo sapiens
tgtttcttgcttttc

SEQ ID NO: 286185 - DNA, 15 bp, Homo sapiens
ttgtttcttgctttt

SEQ ID NO: 286186 - DNA, 15 bp, Homo sapiens
cttgtttcttgcttt

SEQ ID NO: 286187 - DNA, 15 bp, Homo sapiens
tcttgtttcttgctt

SEQ ID NO: 286188 - DNA, 15 bp, Homo sapiens
ttcttgtttcttgct

SEQ ID NO: 286189 - DNA, 15 bp, Homo sapiens
tttcttgtttcttgc

SEQ ID NO: 286190 - DNA, 15 bp, Homo sapiens
ttttcttgtttcttg

SEQ ID NO: 286191 - DNA, 15 bp, Homo sapiens
tttttcttgtttctt

SEQ ID NO: 286192 - DNA, 15 bp, Homo sapiens
ctttttcttgtttct

SEQ ID NO: 286193 - DNA, 15 bp, Homo sapiens
tctttttcttgtttc

SEQ ID NO: 286194 - DNA, 15 bp, Homo sapiens
atctttttcttgttt

SEQ ID NO: 286195 - DNA, 15 bp, Homo sapiens
tatctttttcttgtt

SEQ ID NO: 286196 - DNA, 15 bp, Homo sapiens
atatctttttcttgt

SEQ ID NO: 286197 - DNA, 15 bp, Homo sapiens
catatctttttcttg

SEQ ID NO: 286198 - DNA, 15 bp, Homo sapiens
tcatatctttttctt

SEQ ID NO: 286199 - DNA, 15 bp, Homo sapiens
ttcatatctttttct

SEQ ID NO: 286200 - DNA, 15 bp, Homo sapiens
attcatatctttttc

SEQ ID NO: 286201 - DNA, 15 bp, Homo sapiens
cattcatatcttttt

SEQ ID NO: 286202 - DNA, 15 bp, Homo sapiens
tcattcatatctttt

SEQ ID NO: 286203 - DNA, 15 bp, Homo sapiens
ttcattcatatcttt

SEQ ID NO: 286204 - DNA, 15 bp, Homo sapiens
tttcattcatatctt

SEQ ID NO: 286205 - DNA, 15 bp, Homo sapiens
atttcattcatatct

SEQ ID NO: 286206 - DNA, 15 bp, Homo sapiens
aatttcattcatatc

SEQ ID NO: 286207 - DNA, 15 bp, Homo sapiens
caatttcattcatat

SEQ ID NO: 286208 - DNA, 15 bp, Homo sapiens
gcaatttcattcata

SEQ ID NO: 286209 - DNA, 15 bp, Homo sapiens
tgcaatttcattcat

SEQ ID NO: 286210 - DNA, 15 bp, Homo sapiens
atgcaatttcattca

SEQ ID NO: 286211 - DNA, 15 bp, Homo sapiens
catgcaatttcattc

SEQ ID NO: 286212 - DNA, 15 bp, Homo sapiens
ccatgcaatttcatt

SEQ ID NO: 286213 - DNA, 15 bp, Homo sapiens
cccatgcaatttcat

SEQ ID NO: 286214 - DNA, 15 bp, Homo sapiens
ccccatgcaatttca

SEQ ID NO: 286215 - DNA, 15 bp, Homo sapiens
tccccatgcaatttc

SEQ ID NO: 286216 - DNA, 15 bp, Homo sapiens
ttccccatgcaattt

SEQ ID NO: 286217 - DNA, 15 bp, Homo sapiens
cttccccatgcaatt

SEQ ID NO: 286218 - DNA, 15 bp, Homo sapiens
tcttccccatgcaat

SEQ ID NO: 286219 - DNA, 15 bp, Homo sapiens
ctcttccccatgcaa

SEQ ID NO: 286220 - DNA, 15 bp, Homo sapiens
actcttccccatgca

SEQ ID NO: 286221 - DNA, 15 bp, Homo sapiens
cactcttccccatgc

SEQ ID NO: 286222 - DNA, 15 bp, Homo sapiens
ccactcttccccatg

SEQ ID NO: 286223 - DNA, 15 bp, Homo sapiens
gccactcttccccat

SEQ ID NO: 286224 - DNA, 15 bp, Homo sapiens
ggccactcttcccca

SEQ ID NO: 286225 - DNA, 15 bp, Homo sapiens
aggccactcttcccc

SEQ ID NO: 286226 - DNA, 15 bp, Homo sapiens
taggccactcttccc

SEQ ID NO: 286227 - DNA, 15 bp, Homo sapiens
ataggccactcttcc

SEQ ID NO: 286228 - DNA, 15 bp, Homo sapiens
aataggccactcttc

SEQ ID NO: 286229 - DNA, 15 bp, Homo sapiens
gaataggccactctt

SEQ ID NO: 286230 - DNA, 15 bp, Homo sapiens
agaataggccactct

SEQ ID NO: 286231 - DNA, 15 bp, Homo sapiens
tagaataggccactc

SEQ ID NO: 286232 - DNA, 15 bp, Homo sapiens
ttagaataggccact

SEQ ID NO: 286233 - DNA, 15 bp, Homo sapiens
cttagaataggccac

SEQ ID NO: 286234 - DNA, 15 bp, Homo sapiens
ccttagaataggcca

SEQ ID NO: 286235 - DNA, 15 bp, Homo sapiens
cccttagaataggcc

SEQ ID NO: 286236 - DNA, 15 bp, Homo sapiens
tcccttagaataggc

SEQ ID NO: 286237 - DNA, 15 bp, Homo sapiens
ttcccttagaatagg

SEQ ID NO: 286238 - DNA, 15 bp, Homo sapiens
gttcccttagaatag

SEQ ID NO: 286239 - DNA, 15 bp, Homo sapiens
tgttcccttagaata

SEQ ID NO: 286240 - DNA, 15 bp, Homo sapiens
ctgttcccttagaat

SEQ ID NO: 286241 - DNA, 15 bp, Homo sapiens
gctgttcccttagaa

SEQ ID NO: 286242 - DNA, 15 bp, Homo sapiens
agctgttcccttaga

SEQ ID NO: 286243 - DNA, 15 bp, Homo sapiens
aagctgttcccttag

SEQ ID NO: 286244 - DNA, 15 bp, Homo sapiens
taagctgttccctta

SEQ ID NO: 286245 - DNA, 15 bp, Homo sapiens
ttaagctgttccctt

SEQ ID NO: 286246 - DNA, 15 bp, Homo sapiens
gttaagctgttccct

SEQ ID NO: 286247 - DNA, 15 bp, Homo sapiens
agttaagctgttccc

SEQ ID NO: 286248 - DNA, 15 bp, Homo sapiens
tagttaagctgttcc

SEQ ID NO: 286249 - DNA, 15 bp, Homo sapiens
ttagttaagctgttc

SEQ ID NO: 286250 - DNA, 15 bp, Homo sapiens
cttagttaagctgtt

SEQ ID NO: 286251 - DNA, 15 bp, Homo sapiens
acttagttaagctgt

SEQ ID NO: 286252 - DNA, 15 bp, Homo sapiens
aacttagttaagctg

SEQ ID NO: 286253 - DNA, 15 bp, Homo sapiens
aaacttagttaagct

SEQ ID NO: 286254 - DNA, 15 bp, Homo sapiens
aaaacttagttaagc

SEQ ID NO: 286255 - DNA, 15 bp, Homo sapiens
aaaaacttagttaag

SEQ ID NO: 286256 - DNA, 15 bp, Homo sapiens
taaaaacttagttaa

SEQ ID NO: 286257 - DNA, 15 bp, Homo sapiens
ataaaaacttagtta

SEQ ID NO: 286258 - DNA, 15 bp, Homo sapiens
aataaaaacttagtt

SEQ ID NO: 286259 - DNA, 15 bp, Homo sapiens
taataaaaacttagt

SEQ ID NO: 286260 - DNA, 15 bp, Homo sapiens
gtaataaaaacttag

SEQ ID NO: 286261 - DNA, 15 bp, Homo sapiens
agtaataaaaactta

SEQ ID NO: 286262 - DNA, 15 bp, Homo sapiens
tagtaataaaaactt

SEQ ID NO: 286263 - DNA, 15 bp, Homo sapiens
atagtaataaaaact

SEQ ID NO: 286264 - DNA, 15 bp, Homo sapiens
aatagtaataaaaac

SEQ ID NO: 286265 - DNA, 15 bp, Homo sapiens
caatagtaataaaaa

SEQ ID NO: 286266 - DNA, 15 bp, Homo sapiens
ccaatagtaataaaa

SEQ ID NO: 286267 - DNA, 15 bp, Homo sapiens
tccaatagtaataaa

SEQ ID NO: 286268 - DNA, 15 bp, Homo sapiens
atccaatagtaataa

SEQ ID NO: 286269 - DNA, 15 bp, Homo sapiens
catccaatagtaata

SEQ ID NO: 286270 - DNA, 15 bp, Homo sapiens
acatccaatagtaat

SEQ ID NO: 286271 - DNA, 15 bp, Homo sapiens
aacatccaatagtaa

SEQ ID NO: 286272 - DNA, 15 bp, Homo sapiens
caacatccaatagta

SEQ ID NO: 286273 - DNA, 15 bp, Homo sapiens
acaacatccaatagt

SEQ ID NO: 286274 - DNA, 15 bp, Homo sapiens
tacaacatccaatag

SEQ ID NO: 286275 - DNA, 15 bp, Homo sapiens
ttacaacatccaata

SEQ ID NO: 286276 - DNA, 15 bp, Homo sapiens
attacaacatccaat

SEQ ID NO: 286277 - DNA, 15 bp, Homo sapiens
tattacaacatccaa

SEQ ID NO: 286278 - DNA, 15 bp, Homo sapiens
ttattacaacatcca

SEQ ID NO: 286279 - DNA, 15 bp, Homo sapiens
gttattacaacatcc

SEQ ID NO: 286280 - DNA, 15 bp, Homo sapiens
agttattacaacatc

SEQ ID NO: 286281 - DNA, 15 bp, Homo sapiens
tagttattacaacat

SEQ ID NO: 286282 - DNA, 15 bp, Homo sapiens
atagttattacaaca

SEQ ID NO: 286283 - DNA, 15 bp, Homo sapiens
catagttattacaac

SEQ ID NO: 286284 - DNA, 15 bp, Homo sapiens
acatagttattacaa

SEQ ID NO: 286285 - DNA, 15 bp, Homo sapiens
tacatagttattaca

SEQ ID NO: 286286 - DNA, 15 bp, Homo sapiens
atacatagttattac

SEQ ID NO: 286287 - DNA, 15 bp, Homo sapiens
aatacatagttatta

SEQ ID NO: 286288 - DNA, 15 bp, Homo sapiens
aaatacatagttatt

SEQ ID NO: 286289 - DNA, 15 bp, Homo sapiens
aaaatacatagttat

SEQ ID NO: 286290 - DNA, 15 bp, Homo sapiens
aaaaatacatagtta

SEQ ID NO: 286291 - DNA, 15 bp, Homo sapiens
aaaaaatacatagtt

SEQ ID NO: 286292 - DNA, 15 bp, Homo sapiens
aaaaaaatacatagt

SEQ ID NO: 286293 - DNA, 15 bp, Homo sapiens
caaaaaaatacatag

SEQ ID NO: 286294 - DNA, 15 bp, Homo sapiens
acaaaaaaatacata

SEQ ID NO: 286295 - DNA, 15 bp, Homo sapiens
tacaaaaaaatacat

SEQ ID NO: 286296 - DNA, 15 bp, Homo sapiens
atacaaaaaaataca

SEQ ID NO: 286297 - DNA, 15 bp, Homo sapiens
tatacaaaaaaatac

SEQ ID NO: 286298 - DNA, 15 bp, Homo sapiens
atatacaaaaaaata

SEQ ID NO: 286299 - DNA, 15 bp, Homo sapiens
tatatacaaaaaaat

SEQ ID NO: 286300 - DNA, 15 bp, Homo sapiens
ttatatacaaaaaaa

SEQ ID NO: 286301 - DNA, 15 bp, Homo sapiens
cttatatacaaaaaa

SEQ ID NO: 286302 - DNA, 15 bp, Homo sapiens
gcttatatacaaaaa

SEQ ID NO: 286303 - DNA, 15 bp, Homo sapiens
agcttatatacaaaa

SEQ ID NO: 286304 - DNA, 15 bp, Homo sapiens
tagcttatatacaaa

SEQ ID NO: 286305 - DNA, 15 bp, Homo sapiens
atagcttatatacaa

SEQ ID NO: 286306 - DNA, 15 bp, Homo sapiens
tatagcttatataca

SEQ ID NO: 286307 - DNA, 15 bp, Homo sapiens
ttatagcttatatac

SEQ ID NO: 286308 - DNA, 15 bp, Homo sapiens
gttatagcttatata

SEQ ID NO: 286309 - DNA, 15 bp, Homo sapiens
agttatagcttatat

SEQ ID NO: 286310 - DNA, 15 bp, Homo sapiens
gagttatagcttata

SEQ ID NO: 286311 - DNA, 15 bp, Homo sapiens
tgagttatagcttat

SEQ ID NO: 286312 - DNA, 15 bp, Homo sapiens
atgagttatagctta

SEQ ID NO: 286313 - DNA, 15 bp, Homo sapiens
tatgagttatagctt

SEQ ID NO: 286314 - DNA, 15 bp, Homo sapiens
gtatgagttatagct

SEQ ID NO: 286315 - DNA, 15 bp, Homo sapiens
agtatgagttatagc

SEQ ID NO: 286316 - DNA, 15 bp, Homo sapiens
tagtatgagttatag

SEQ ID NO: 286317 - DNA, 15 bp, Homo sapiens
atagtatgagttata

SEQ ID NO: 286318 - DNA, 15 bp, Homo sapiens
aatagtatgagttat

SEQ ID NO: 286319 - DNA, 15 bp, Homo sapiens
aaatagtatgagtta

SEQ ID NO: 286320 - DNA, 15 bp, Homo sapiens
gaaatagtatgagtt

SEQ ID NO: 286321 - DNA, 15 bp, Homo sapiens
tgaaatagtatgagt

SEQ ID NO: 286322 - DNA, 15 bp, Homo sapiens
ctgaaatagtatgag

SEQ ID NO: 286323 - DNA, 15 bp, Homo sapiens
actgaaatagtatga

SEQ ID NO: 286324 - DNA, 15 bp, Homo sapiens
cactgaaatagtatg

SEQ ID NO: 286325 - DNA, 15 bp, Homo sapiens
ccactgaaatagtat

SEQ ID NO: 286326 - DNA, 15 bp, Homo sapiens
cccactgaaatagta

SEQ ID NO: 286327 - DNA, 15 bp, Homo sapiens
acccactgaaatagt

SEQ ID NO: 286328 - DNA, 15 bp, Homo sapiens
cacccactgaaatag

SEQ ID NO: 286329 - DNA, 15 bp, Homo sapiens
tcacccactgaaata

SEQ ID NO: 286330 - DNA, 15 bp, Homo sapiens
atcacccactgaaat

SEQ ID NO: 286331 - DNA, 15 bp, Homo sapiens
catcacccactgaaa

SEQ ID NO: 286332 - DNA, 15 bp, Homo sapiens
tcatcacccactgaa

SEQ ID NO: 286333 - DNA, 15 bp, Homo sapiens
ctcatcacccactga

SEQ ID NO: 286334 - DNA, 15 bp, Homo sapiens
actcatcacccactg

SEQ ID NO: 286335 - DNA, 15 bp, Homo sapiens
cactcatcacccact

SEQ ID NO: 286336 - DNA, 15 bp, Homo sapiens
tcactcatcacccac

SEQ ID NO: 286337 - DNA, 15 bp, Homo sapiens
atcactcatcaccca

SEQ ID NO: 286338 - DNA, 15 bp, Homo sapiens
catcactcatcaccc

SEQ ID NO: 286339 - DNA, 15 bp, Homo sapiens
tcatcactcatcacc

SEQ ID NO: 286340 - DNA, 15 bp, Homo sapiens
ctcatcactcatcac

SEQ ID NO: 286341 - DNA, 15 bp, Homo sapiens
tctcatcactcatca

SEQ ID NO: 286342 - DNA, 15 bp, Homo sapiens
atctcatcactcatc

SEQ ID NO: 286343 - DNA, 15 bp, Homo sapiens
catctcatcactcat

SEQ ID NO: 286344 - DNA, 15 bp, Homo sapiens
ccatctcatcactca

SEQ ID NO: 286345 - DNA, 15 bp, Homo sapiens
cccatctcatcactc

SEQ ID NO: 286346 - DNA, 15 bp, Homo sapiens
tcccatctcatcact

SEQ ID NO: 286347 - DNA, 15 bp, Homo sapiens
ttcccatctcatcac

SEQ ID NO: 286348 - DNA, 15 bp, Homo sapiens
cttcccatctcatca

SEQ ID NO: 286349 - DNA, 15 bp, Homo sapiens
acttcccatctcatc

SEQ ID NO: 286350 - DNA, 15 bp, Homo sapiens
tacttcccatctcat

SEQ ID NO: 286351 - DNA, 15 bp, Homo sapiens
atacttcccatctca

SEQ ID NO: 286352 - DNA, 15 bp, Homo sapiens
tatacttcccatctc

SEQ ID NO: 286353 - DNA, 15 bp, Homo sapiens
atatacttcccatct

SEQ ID NO: 286354 - DNA, 15 bp, Homo sapiens
aatatacttcccatc

SEQ ID NO: 286355 - DNA, 15 bp, Homo sapiens
aaatatacttcccat

SEQ ID NO: 286356 - DNA, 15 bp, Homo sapiens
taaatatacttccca

SEQ ID NO: 286357 - DNA, 15 bp, Homo sapiens
ttaaatatacttccc

SEQ ID NO: 286358 - DNA, 15 bp, Homo sapiens
tttaaatatacttcc

SEQ ID NO: 286359 - DNA, 15 bp, Homo sapiens
atttaaatatacttc

SEQ ID NO: 286360 - DNA, 15 bp, Homo sapiens
tatttaaatatactt

SEQ ID NO: 286361 - DNA, 15 bp, Homo sapiens
ttatttaaatatact

SEQ ID NO: 286362 - DNA, 15 bp, Homo sapiens
tttatttaaatatac

SEQ ID NO: 286363 - DNA, 15 bp, Homo sapiens
ttttatttaaatata

SEQ ID NO: 286364 - DNA, 15 bp, Homo sapiens
tttttatttaaatat

SEQ ID NO: 286365 - DNA, 15 bp, Homo sapiens
atttttatttaaata

SEQ ID NO: 286366 - DNA, 15 bp, Homo sapiens
tatttttatttaaat

SEQ ID NO: 286367 - DNA, 15 bp, Homo sapiens
ttatttttatttaaa

SEQ ID NO: 286368 - DNA, 15 bp, Homo sapiens
gttatttttatttaa

SEQ ID NO: 286369 - DNA, 15 bp, Homo sapiens
agttatttttattta

SEQ ID NO: 286370 - DNA, 15 bp, Homo sapiens
aagttatttttattt

SEQ ID NO: 286371 - DNA, 15 bp, Homo sapiens
caagttatttttatt

SEQ ID NO: 286372 - DNA, 15 bp, Homo sapiens
gcaagttatttttat

SEQ ID NO: 286373 - DNA, 15 bp, Homo sapiens
agcaagttattttta

SEQ ID NO: 286374 - DNA, 15 bp, Homo sapiens
tagcaagttattttt

SEQ ID NO: 286375 - DNA, 15 bp, Homo sapiens
ttagcaagttatttt

SEQ ID NO: 286376 - DNA, 15 bp, Homo sapiens
attagcaagttattt

SEQ ID NO: 286377 - DNA, 15 bp, Homo sapiens
tattagcaagttatt

SEQ ID NO: 286378 - DNA, 15 bp, Homo sapiens
atattagcaagttat

SEQ ID NO: 286379 - DNA, 15 bp, Homo sapiens
tatattagcaagtta

SEQ ID NO: 286380 - DNA, 15 bp, Homo sapiens
ttatattagcaagtt

SEQ ID NO: 286381 - DNA, 15 bp, Homo sapiens
attatattagcaagt

SEQ ID NO: 286382 - DNA, 15 bp, Homo sapiens
aattatattagcaag

SEQ ID NO: 286383 - DNA, 15 bp, Homo sapiens
taattatattagcaa

SEQ ID NO: 286384 - DNA, 15 bp, Homo sapiens
ctaattatattagca

SEQ ID NO: 286385 - DNA, 15 bp, Homo sapiens
tctaattatattagc

SEQ ID NO: 286386 - DNA, 15 bp, Homo sapiens
atctaattatattag

SEQ ID NO: 286387 - DNA, 15 bp, Homo sapiens
tatctaattatatta

SEQ ID NO: 286388 - DNA, 15 bp, Homo sapiens
ctatctaattatatt

SEQ ID NO: 286389 - DNA, 15 bp, Homo sapiens
gctatctaattatat

SEQ ID NO: 286390 - DNA, 15 bp, Homo sapiens
tgctatctaattata

SEQ ID NO: 286391 - DNA, 15 bp, Homo sapiens
atgctatctaattat

SEQ ID NO: 286392 - DNA, 15 bp, Homo sapiens
aatgctatctaatta

SEQ ID NO: 286393 - DNA, 15 bp, Homo sapiens
taatgctatctaatt

SEQ ID NO: 286394 - DNA, 15 bp, Homo sapiens
ttaatgctatctaat

SEQ ID NO: 286395 - DNA, 15 bp, Homo sapiens
cttaatgctatctaa

SEQ ID NO: 286396 - DNA, 15 bp, Homo sapiens
ccttaatgctatcta

SEQ ID NO: 286397 - DNA, 15 bp, Homo sapiens
tccttaatgctatct

SEQ ID NO: 286398 - DNA, 15 bp, Homo sapiens
ttccttaatgctatc

SEQ ID NO: 286399 - DNA, 15 bp, Homo sapiens
cttccttaatgctat

SEQ ID NO: 286400 - DNA, 15 bp, Homo sapiens
acttccttaatgcta

SEQ ID NO: 286401 - DNA, 15 bp, Homo sapiens
tacttccttaatgct

SEQ ID NO: 286402 - DNA, 15 bp, Homo sapiens
atacttccttaatgc

SEQ ID NO: 286403 - DNA, 15 bp, Homo sapiens
catacttccttaatg

SEQ ID NO: 286404 - DNA, 15 bp, Homo sapiens
tcatacttccttaat

SEQ ID NO: 286405 - DNA, 15 bp, Homo sapiens
ctcatacttccttaa

SEQ ID NO: 286406 - DNA, 15 bp, Homo sapiens
actcatacttcctta

SEQ ID NO: 286407 - DNA, 15 bp, Homo sapiens
tactcatacttcctt

SEQ ID NO: 286408 - DNA, 15 bp, Homo sapiens
ttactcatacttcct

SEQ ID NO: 286409 - DNA, 15 bp, Homo sapiens
cttactcatacttcc

SEQ ID NO: 286410 - DNA, 15 bp, Homo sapiens
ccttactcatacttc

SEQ ID NO: 286411 - DNA, 15 bp, Homo sapiens
accttactcatactt

SEQ ID NO: 286412 - DNA, 15 bp, Homo sapiens
taccttactcatact

SEQ ID NO: 286413 - DNA, 15 bp, Homo sapiens
ataccttactcatac

SEQ ID NO: 286414 - DNA, 15 bp, Homo sapiens
tataccttactcata

SEQ ID NO: 286415 - DNA, 15 bp, Homo sapiens
atataccttactcat

SEQ ID NO: 286416 - DNA, 15 bp, Homo sapiens
aatataccttactca

SEQ ID NO: 286417 - DNA, 15 bp, Homo sapiens
gaatataccttactc

SEQ ID NO: 286418 - DNA, 15 bp, Homo sapiens
ggaatataccttact

SEQ ID NO: 286419 - DNA, 15 bp, Homo sapiens
aggaatataccttac

SEQ ID NO: 286420 - DNA, 15 bp, Homo sapiens
aaggaatatacctta

SEQ ID NO: 286421 - DNA, 15 bp, Homo sapiens
aaaggaatatacctt

SEQ ID NO: 286422 - DNA, 15 bp, Homo sapiens
aaaaggaatatacct

SEQ ID NO: 286423 - DNA, 15 bp, Homo sapiens
taaaaggaatatacc

SEQ ID NO: 286424 - DNA, 15 bp, Homo sapiens
ctaaaaggaatatac

SEQ ID NO: 286425 - DNA, 15 bp, Homo sapiens
gctaaaaggaatata

SEQ ID NO: 286426 - DNA, 15 bp, Homo sapiens
ggctaaaaggaatat

SEQ ID NO: 286427 - DNA, 15 bp, Homo sapiens
aggctaaaaggaata

SEQ ID NO: 286428 - DNA, 15 bp, Homo sapiens
taggctaaaaggaat

SEQ ID NO: 286429 - DNA, 15 bp, Homo sapiens
ctaggctaaaaggaa

SEQ ID NO: 286430 - DNA, 15 bp, Homo sapiens
tctaggctaaaagga

SEQ ID NO: 286431 - DNA, 15 bp, Homo sapiens
ttctaggctaaaagg

SEQ ID NO: 286432 - DNA, 15 bp, Homo sapiens
attctaggctaaaag

SEQ ID NO: 286433 - DNA, 15 bp, Homo sapiens
aattctaggctaaaa

SEQ ID NO: 286434 - DNA, 15 bp, Homo sapiens
caattctaggctaaa

SEQ ID NO: 286435 - DNA, 15 bp, Homo sapiens
gcaattctaggctaa

SEQ ID NO: 286436 - DNA, 15 bp, Homo sapiens
agcaattctaggcta

SEQ ID NO: 286437 - DNA, 15 bp, Homo sapiens
aagcaattctaggct

SEQ ID NO: 286438 - DNA, 15 bp, Homo sapiens
gaagcaattctaggc

SEQ ID NO: 286439 - DNA, 15 bp, Homo sapiens
ggaagcaattctagg

SEQ ID NO: 286440 - DNA, 15 bp, Homo sapiens
aggaagcaattctag

SEQ ID NO: 286441 - DNA, 15 bp, Homo sapiens
aaggaagcaattcta

SEQ ID NO: 286442 - DNA, 15 bp, Homo sapiens
aaaggaagcaattct

SEQ ID NO: 286443 - DNA, 15 bp, Homo sapiens
gaaaggaagcaattc

SEQ ID NO: 286444 - DNA, 15 bp, Homo sapiens
tgaaaggaagcaatt

SEQ ID NO: 286445 - DNA, 15 bp, Homo sapiens
atgaaaggaagcaat

SEQ ID NO: 286446 - DNA, 15 bp, Homo sapiens
catgaaaggaagcaa

SEQ ID NO: 286447 - DNA, 15 bp, Homo sapiens
ccatgaaaggaagca

SEQ ID NO: 286448 - DNA, 15 bp, Homo sapiens
gccatgaaaggaagc

SEQ ID NO: 286449 - DNA, 15 bp, Homo sapiens
agccatgaaaggaag

SEQ ID NO: 286450 - DNA, 15 bp, Homo sapiens
aagccatgaaaggaa

SEQ ID NO: 286451 - DNA, 15 bp, Homo sapiens
gaagccatgaaagga

SEQ ID NO: 286452 - DNA, 15 bp, Homo sapiens
tgaagccatgaaagg

SEQ ID NO: 286453 - DNA, 15 bp, Homo sapiens
ttgaagccatgaaag

SEQ ID NO: 286454 - DNA, 15 bp, Homo sapiens
cttgaagccatgaaa

SEQ ID NO: 286455 - DNA, 15 bp, Homo sapiens
tcttgaagccatgaa

SEQ ID NO: 286456 - DNA, 15 bp, Homo sapiens
ctcttgaagccatga

SEQ ID NO: 286457 - DNA, 15 bp, Homo sapiens
actcttgaagccatg

SEQ ID NO: 286458 - DNA, 15 bp, Homo sapiens
tactcttgaagccat

SEQ ID NO: 286459 - DNA, 15 bp, Homo sapiens
ctactcttgaagcca

SEQ ID NO: 286460 - DNA, 15 bp, Homo sapiens
cctactcttgaagcc

SEQ ID NO: 286461 - DNA, 15 bp, Homo sapiens
tcctactcttgaagc

SEQ ID NO: 286462 - DNA, 15 bp, Homo sapiens
atcctactcttgaag

SEQ ID NO: 286463 - DNA, 15 bp, Homo sapiens
aatcctactcttgaa

SEQ ID NO: 286464 - DNA, 15 bp, Homo sapiens
aaatcctactcttga

SEQ ID NO: 286465 - DNA, 15 bp, Homo sapiens
gaaatcctactcttg

SEQ ID NO: 286466 - DNA, 15 bp, Homo sapiens
tgaaatcctactctt

SEQ ID NO: 286467 - DNA, 15 bp, Homo sapiens
ttgaaatcctactct

SEQ ID NO: 286468 - DNA, 15 bp, Homo sapiens
tttgaaatcctactc

SEQ ID NO: 286469 - DNA, 15 bp, Homo sapiens
ctttgaaatcctact

SEQ ID NO: 286470 - DNA, 15 bp, Homo sapiens
actttgaaatcctac

SEQ ID NO: 286471 - DNA, 15 bp, Homo sapiens
gactttgaaatccta

SEQ ID NO: 286472 - DNA, 15 bp, Homo sapiens
tgactttgaaatcct

SEQ ID NO: 286473 - DNA, 15 bp, Homo sapiens
gtgactttgaaatcc

SEQ ID NO: 286474 - DNA, 15 bp, Homo sapiens
agtgactttgaaatc

SEQ ID NO: 286475 - DNA, 15 bp, Homo sapiens
aagtgactttgaaat

SEQ ID NO: 286476 - DNA, 15 bp, Homo sapiens
taagtgactttgaaa

SEQ ID NO: 286477 - DNA, 15 bp, Homo sapiens
ataagtgactttgaa

SEQ ID NO: 286478 - DNA, 15 bp, Homo sapiens
aataagtgactttga

SEQ ID NO: 286479 - DNA, 15 bp, Homo sapiens
taataagtgactttg

SEQ ID NO: 286480 - DNA, 15 bp, Homo sapiens
ataataagtgacttt

SEQ ID NO: 286481 - DNA, 15 bp, Homo sapiens
tataataagtgactt

SEQ ID NO: 286482 - DNA, 15 bp, Homo sapiens
atataataagtgact

SEQ ID NO: 286483 - DNA, 15 bp, Homo sapiens
aatataataagtgac

SEQ ID NO: 286484 - DNA, 15 bp, Homo sapiens
taatataataagtga

SEQ ID NO: 286485 - DNA, 15 bp, Homo sapiens
ataatataataagtg

SEQ ID NO: 286486 - DNA, 15 bp, Homo sapiens
aataatataataagt

SEQ ID NO: 286487 - DNA, 15 bp, Homo sapiens
taataatataataag

SEQ ID NO: 286488 - DNA, 15 bp, Homo sapiens
ataataatataataa

SEQ ID NO: 286489 - DNA, 15 bp, Homo sapiens
tataataatataata

SEQ ID NO: 286490 - DNA, 15 bp, Homo sapiens
atataataatataat

SEQ ID NO: 286491 - DNA, 15 bp, Homo sapiens
tatataataatataa

SEQ ID NO: 286492 - DNA, 15 bp, Homo sapiens
gtatataataatata

SEQ ID NO: 286493 - DNA, 15 bp, Homo sapiens
tgtatataataatat

SEQ ID NO: 286494 - DNA, 15 bp, Homo sapiens
ctgtatataataata

SEQ ID NO: 286495 - DNA, 15 bp, Homo sapiens
tctgtatataataat

SEQ ID NO: 286496 - DNA, 15 bp, Homo sapiens
ttctgtatataataa

SEQ ID NO: 286497 - DNA, 15 bp, Homo sapiens
tttctgtatataata

SEQ ID NO: 286498 - DNA, 15 bp, Homo sapiens
ttttctgtatataat

SEQ ID NO: 286499 - DNA, 15 bp, Homo sapiens
tttttctgtatataa

SEQ ID NO: 286500 - DNA, 15 bp, Homo sapiens
atttttctgtatata

SEQ ID NO: 286501 - DNA, 15 bp, Homo sapiens
catttttctgtatat

SEQ ID NO: 286502 - DNA, 15 bp, Homo sapiens
acatttttctgtata

SEQ ID NO: 286503 - DNA, 15 bp, Homo sapiens
tacatttttctgtat

SEQ ID NO: 286504 - DNA, 15 bp, Homo sapiens
ttacatttttctgta

SEQ ID NO: 286505 - DNA, 15 bp, Homo sapiens
tttacatttttctgt

SEQ ID NO: 286506 - DNA, 15 bp, Homo sapiens
gtttacatttttctg

SEQ ID NO: 286507 - DNA, 15 bp, Homo sapiens
agtttacatttttct

SEQ ID NO: 286508 - DNA, 15 bp, Homo sapiens
aagtttacatttttc

SEQ ID NO: 286509 - DNA, 15 bp, Homo sapiens
taagtttacattttt

SEQ ID NO: 286510 - DNA, 15 bp, Homo sapiens
gtaagtttacatttt

SEQ ID NO: 286511 - DNA, 15 bp, Homo sapiens
agtaagtttacattt

SEQ ID NO: 286512 - DNA, 15 bp, Homo sapiens
aagtaagtttacatt

SEQ ID NO: 286513 - DNA, 15 bp, Homo sapiens
taagtaagtttacat

SEQ ID NO: 286514 - DNA, 15 bp, Homo sapiens
ttaagtaagtttaca

SEQ ID NO: 286515 - DNA, 15 bp, Homo sapiens
cttaagtaagtttac

SEQ ID NO: 286516 - DNA, 15 bp, Homo sapiens
ccttaagtaagttta

SEQ ID NO: 286517 - DNA, 15 bp, Homo sapiens
accttaagtaagttt

SEQ ID NO: 286518 - DNA, 15 bp, Homo sapiens
gaccttaagtaagtt

SEQ ID NO: 286519 - DNA, 15 bp, Homo sapiens
tgaccttaagtaagt

SEQ ID NO: 286520 - DNA, 15 bp, Homo sapiens
ctgaccttaagtaag

SEQ ID NO: 286521 - DNA, 15 bp, Homo sapiens
tctgaccttaagtaa

SEQ ID NO: 286522 - DNA, 15 bp, Homo sapiens
gtctgaccttaagta

SEQ ID NO: 286523 - DNA, 15 bp, Homo sapiens
agtctgaccttaagt

SEQ ID NO: 286524 - DNA, 15 bp, Homo sapiens
tagtctgaccttaag

SEQ ID NO: 286525 - DNA, 15 bp, Homo sapiens
ttagtctgaccttaa

SEQ ID NO: 286526 - DNA, 15 bp, Homo sapiens
attagtctgacctta

SEQ ID NO: 286527 - DNA, 15 bp, Homo sapiens
aattagtctgacctt

SEQ ID NO: 286528 - DNA, 15 bp, Homo sapiens
gaattagtctgacct

SEQ ID NO: 286529 - DNA, 15 bp, Homo sapiens
ggaattagtctgacc

SEQ ID NO: 286530 - DNA, 15 bp, Homo sapiens
aggaattagtctgac

SEQ ID NO: 286531 - DNA, 15 bp, Homo sapiens
aaggaattagtctga

SEQ ID NO: 286532 - DNA, 15 bp, Homo sapiens
caaggaattagtctg

SEQ ID NO: 286533 - DNA, 15 bp, Homo sapiens
gcaaggaattagtct

SEQ ID NO: 286534 - DNA, 15 bp, Homo sapiens
agcaaggaattagtc

SEQ ID NO: 286535 - DNA, 15 bp, Homo sapiens
aagcaaggaattagt

SEQ ID NO: 286536 - DNA, 15 bp, Homo sapiens
gaagcaaggaattag

SEQ ID NO: 286537 - DNA, 15 bp, Homo sapiens
agaagcaaggaatta

SEQ ID NO: 286538 - DNA, 15 bp, Homo sapiens
cagaagcaaggaatt

SEQ ID NO: 286539 - DNA, 15 bp, Homo sapiens
tcagaagcaaggaat

SEQ ID NO: 286540 - DNA, 15 bp, Homo sapiens
ttcagaagcaaggaa

SEQ ID NO: 286541 - DNA, 15 bp, Homo sapiens
tttcagaagcaagga

SEQ ID NO: 286542 - DNA, 15 bp, Homo sapiens
atttcagaagcaagg

SEQ ID NO: 286543 - DNA, 15 bp, Homo sapiens
catttcagaagcaag

SEQ ID NO: 286544 - DNA, 15 bp, Homo sapiens
tcatttcagaagcaa

SEQ ID NO: 286545 - DNA, 15 bp, Homo sapiens
atcatttcagaagca

SEQ ID NO: 286546 - DNA, 15 bp, Homo sapiens
catcatttcagaagc

SEQ ID NO: 286547 - DNA, 15 bp, Homo sapiens
tcatcatttcagaag

SEQ ID NO: 286548 - DNA, 15 bp, Homo sapiens
ttcatcatttcagaa

SEQ ID NO: 286549 - DNA, 15 bp, Homo sapiens
tttcatcatttcaga

SEQ ID NO: 286550 - DNA, 15 bp, Homo sapiens
ctttcatcatttcag

SEQ ID NO: 286551 - DNA, 15 bp, Homo sapiens
actttcatcatttca

SEQ ID NO: 286552 - DNA, 15 bp, Homo sapiens
tactttcatcatttc

SEQ ID NO: 286553 - DNA, 15 bp, Homo sapiens
atactttcatcattt

SEQ ID NO: 286554 - DNA, 15 bp, Homo sapiens
aatactttcatcatt

SEQ ID NO: 286555 - DNA, 15 bp, Homo sapiens
taatactttcatcat

SEQ ID NO: 286556 - DNA, 15 bp, Homo sapiens
ttaatactttcatca

SEQ ID NO: 286557 - DNA, 15 bp, Homo sapiens
attaatactttcatc

SEQ ID NO: 286558 - DNA, 15 bp, Homo sapiens
cattaatactttcat

SEQ ID NO: 286559 - DNA, 15 bp, Homo sapiens
gcattaatactttca

SEQ ID NO: 286560 - DNA, 15 bp, Homo sapiens
agcattaatactttc

SEQ ID NO: 286561 - DNA, 15 bp, Homo sapiens
tagcattaatacttt

SEQ ID NO: 286562 - DNA, 15 bp, Homo sapiens
ttagcattaatactt

SEQ ID NO: 286563 - DNA, 15 bp, Homo sapiens
tttagcattaatact

SEQ ID NO: 286564 - DNA, 15 bp, Homo sapiens
ttttagcattaatac

SEQ ID NO: 286565 - DNA, 15 bp, Homo sapiens
tttttagcattaata

SEQ ID NO: 286566 - DNA, 15 bp, Homo sapiens
atttttagcattaat

SEQ ID NO: 286567 - DNA, 15 bp, Homo sapiens
tatttttagcattaa

SEQ ID NO: 286568 - DNA, 15 bp, Homo sapiens
ttatttttagcatta

SEQ ID NO: 286569 - DNA, 15 bp, Homo sapiens
attatttttagcatt

SEQ ID NO: 286570 - DNA, 15 bp, Homo sapiens
tattatttttagcat

SEQ ID NO: 286571 - DNA, 15 bp, Homo sapiens
ctattatttttagca

SEQ ID NO: 286572 - DNA, 15 bp, Homo sapiens
tctattatttttagc

SEQ ID NO: 286573 - DNA, 15 bp, Homo sapiens
atctattatttttag

SEQ ID NO: 286574 - DNA, 15 bp, Homo sapiens
tatctattattttta

SEQ ID NO: 286575 - DNA, 15 bp, Homo sapiens
ttatctattattttt

SEQ ID NO: 286576 - DNA, 15 bp, Homo sapiens
gttatctattatttt

SEQ ID NO: 286577 - DNA, 15 bp, Homo sapiens
tgttatctattattt

SEQ ID NO: 286578 - DNA, 15 bp, Homo sapiens
atgttatctattatt

SEQ ID NO: 286579 - DNA, 15 bp, Homo sapiens
catgttatctattat

SEQ ID NO: 286580 - DNA, 15 bp, Homo sapiens
ccatgttatctatta

SEQ ID NO: 286581 - DNA, 15 bp, Homo sapiens
tccatgttatctatt

SEQ ID NO: 286582 - DNA, 15 bp, Homo sapiens
ttccatgttatctat

SEQ ID NO: 286583 - DNA, 15 bp, Homo sapiens
cttccatgttatcta

SEQ ID NO: 286584 - DNA, 15 bp, Homo sapiens
acttccatgttatct

SEQ ID NO: 286585 - DNA, 15 bp, Homo sapiens
aacttccatgttatc

SEQ ID NO: 286586 - DNA, 15 bp, Homo sapiens
aaacttccatgttat

SEQ ID NO: 286587 - DNA, 15 bp, Homo sapiens
gaaacttccatgtta

SEQ ID NO: 286588 - DNA, 15 bp, Homo sapiens
tgaaacttccatgtt

SEQ ID NO: 286589 - DNA, 15 bp, Homo sapiens
ttgaaacttccatgt

SEQ ID NO: 286590 - DNA, 15 bp, Homo sapiens
tttgaaacttccatg

SEQ ID NO: 286591 - DNA, 15 bp, Homo sapiens
ctttgaaacttccat

SEQ ID NO: 286592 - DNA, 15 bp, Homo sapiens
actttgaaacttcca

SEQ ID NO: 286593 - DNA, 15 bp, Homo sapiens
cactttgaaacttcc

SEQ ID NO: 286594 - DNA, 15 bp, Homo sapiens
acactttgaaacttc

SEQ ID NO: 286595 - DNA, 15 bp, Homo sapiens
aacactttgaaactt

SEQ ID NO: 286596 - DNA, 15 bp, Homo sapiens
caacactttgaaact

SEQ ID NO: 286597 - DNA, 15 bp, Homo sapiens
acaacactttgaaac

SEQ ID NO: 286598 - DNA, 15 bp, Homo sapiens
aacaacactttgaaa

SEQ ID NO: 286599 - DNA, 15 bp, Homo sapiens
caacaacactttgaa

SEQ ID NO: 286600 - DNA, 15 bp, Homo sapiens
tcaacaacactttga

SEQ ID NO: 286601 - DNA, 15 bp, Homo sapiens
ttcaacaacactttg

SEQ ID NO: 286602 - DNA, 15 bp, Homo sapiens
tttcaacaacacttt

SEQ ID NO: 286603 - DNA, 15 bp, Homo sapiens
atttcaacaacactt

SEQ ID NO: 286604 - DNA, 15 bp, Homo sapiens
catttcaacaacact

SEQ ID NO: 286605 - DNA, 15 bp, Homo sapiens
ccatttcaacaacac

SEQ ID NO: 286606 - DNA, 15 bp, Homo sapiens
tccatttcaacaaca

SEQ ID NO: 286607 - DNA, 15 bp, Homo sapiens
atccatttcaacaac

SEQ ID NO: 286608 - DNA, 15 bp, Homo sapiens
catccatttcaacaa

SEQ ID NO: 286609 - DNA, 15 bp, Homo sapiens
ccatccatttcaaca

SEQ ID NO: 286610 - DNA, 15 bp, Homo sapiens
tccatccatttcaac

SEQ ID NO: 286611 - DNA, 15 bp, Homo sapiens
ttccatccatttcaa

SEQ ID NO: 286612 - DNA, 15 bp, Homo sapiens
cttccatccatttca

SEQ ID NO: 286613 - DNA, 15 bp, Homo sapiens
ccttccatccatttc

SEQ ID NO: 286614 - DNA, 15 bp, Homo sapiens
tccttccatccattt

SEQ ID NO: 286615 - DNA, 15 bp, Homo sapiens
atccttccatccatt

SEQ ID NO: 286616 - DNA, 15 bp, Homo sapiens
catccttccatccat

SEQ ID NO: 286617 - DNA, 15 bp, Homo sapiens
tcatccttccatcca

SEQ ID NO: 286618 - DNA, 15 bp, Homo sapiens
ttcatccttccatcc

SEQ ID NO: 286619 - DNA, 15 bp, Homo sapiens
cttcatccttccatc

SEQ ID NO: 286620 - DNA, 15 bp, Homo sapiens
ccttcatccttccat

SEQ ID NO: 286621 - DNA, 15 bp, Homo sapiens
gccttcatccttcca

SEQ ID NO: 286622 - DNA, 15 bp, Homo sapiens
agccttcatccttcc

SEQ ID NO: 286623 - DNA, 15 bp, Homo sapiens
gagccttcatccttc

SEQ ID NO: 286624 - DNA, 15 bp, Homo sapiens
tgagccttcatcctt

SEQ ID NO: 286625 - DNA, 15 bp, Homo sapiens
atgagccttcatcct

SEQ ID NO: 286626 - DNA, 15 bp, Homo sapiens
aatgagccttcatcc

SEQ ID NO: 286627 - DNA, 15 bp, Homo sapiens
taatgagccttcatc

SEQ ID NO: 286628 - DNA, 15 bp, Homo sapiens
ttaatgagccttcat

SEQ ID NO: 286629 - DNA, 15 bp, Homo sapiens
tttaatgagccttca

SEQ ID NO: 286630 - DNA, 15 bp, Homo sapiens
gtttaatgagccttc

SEQ ID NO: 286631 - DNA, 15 bp, Homo sapiens
agtttaatgagcctt

SEQ ID NO: 286632 - DNA, 15 bp, Homo sapiens
aagtttaatgagcct

SEQ ID NO: 286633 - DNA, 15 bp, Homo sapiens
aaagtttaatgagcc

SEQ ID NO: 286634 - DNA, 15 bp, Homo sapiens
caaagtttaatgagc

SEQ ID NO: 286635 - DNA, 15 bp, Homo sapiens
acaaagtttaatgag

SEQ ID NO: 286636 - DNA, 15 bp, Homo sapiens
cacaaagtttaatga

SEQ ID NO: 286637 - DNA, 15 bp, Homo sapiens
tcacaaagtttaatg

SEQ ID NO: 286638 - DNA, 15 bp, Homo sapiens
ttcacaaagtttaat

SEQ ID NO: 286639 - DNA, 15 bp, Homo sapiens
gttcacaaagtttaa

SEQ ID NO: 286640 - DNA, 15 bp, Homo sapiens
tgttcacaaagttta

SEQ ID NO: 286641 - DNA, 15 bp, Homo sapiens
ttgttcacaaagttt

SEQ ID NO: 286642 - DNA, 15 bp, Homo sapiens
cttgttcacaaagtt

SEQ ID NO: 286643 - DNA, 15 bp, Homo sapiens
tcttgttcacaaagt

SEQ ID NO: 286644 - DNA, 15 bp, Homo sapiens
ttcttgttcacaaag

SEQ ID NO: 286645 - DNA, 15 bp, Homo sapiens
attcttgttcacaaa

SEQ ID NO: 286646 - DNA, 15 bp, Homo sapiens
aattcttgttcacaa

SEQ ID NO: 286647 - DNA, 15 bp, Homo sapiens
aaattcttgttcaca

SEQ ID NO: 286648 - DNA, 15 bp, Homo sapiens
taaattcttgttcac

SEQ ID NO: 286649 - DNA, 15 bp, Homo sapiens
ctaaattcttgttca

SEQ ID NO: 286650 - DNA, 15 bp, Homo sapiens
actaaattcttgttc

SEQ ID NO: 286651 - DNA, 15 bp, Homo sapiens
cactaaattcttgtt

SEQ ID NO: 286652 - DNA, 15 bp, Homo sapiens
ccactaaattcttgt

SEQ ID NO: 286653 - DNA, 15 bp, Homo sapiens
tccactaaattcttg

SEQ ID NO: 286654 - DNA, 15 bp, Homo sapiens
ttccactaaattctt

SEQ ID NO: 286655 - DNA, 15 bp, Homo sapiens
tttccactaaattct

SEQ ID NO: 286656 - DNA, 15 bp, Homo sapiens
ttttccactaaattc

SEQ ID NO: 286657 - DNA, 15 bp, Homo sapiens
tttttccactaaatt

SEQ ID NO: 286658 - DNA, 15 bp, Homo sapiens
atttttccactaaat

SEQ ID NO: 286659 - DNA, 15 bp, Homo sapiens
aatttttccactaaa

SEQ ID NO: 286660 - DNA, 15 bp, Homo sapiens
taatttttccactaa

SEQ ID NO: 286661 - DNA, 15 bp, Homo sapiens
ttaatttttccacta

SEQ ID NO: 286662 - DNA, 15 bp, Homo sapiens
cttaatttttccact

SEQ ID NO: 286663 - DNA, 15 bp, Homo sapiens
acttaatttttccac

SEQ ID NO: 286664 - DNA, 15 bp, Homo sapiens
tacttaatttttcca

SEQ ID NO: 286665 - DNA, 15 bp, Homo sapiens
atacttaatttttcc

SEQ ID NO: 286666 - DNA, 15 bp, Homo sapiens
catacttaatttttc

SEQ ID NO: 286667 - DNA, 15 bp, Homo sapiens
ccatacttaattttt

SEQ ID NO: 286668 - DNA, 15 bp, Homo sapiens
tccatacttaatttt

SEQ ID NO: 286669 - DNA, 15 bp, Homo sapiens
ctccatacttaattt

SEQ ID NO: 286670 - DNA, 15 bp, Homo sapiens
gctccatacttaatt

SEQ ID NO: 286671 - DNA, 15 bp, Homo sapiens
tgctccatacttaat

SEQ ID NO: 286672 - DNA, 15 bp, Homo sapiens
ctgctccatacttaa

SEQ ID NO: 286673 - DNA, 15 bp, Homo sapiens
tctgctccatactta

SEQ ID NO: 286674 - DNA, 15 bp, Homo sapiens
ttctgctccatactt

SEQ ID NO: 286675 - DNA, 15 bp, Homo sapiens
attctgctccatact

SEQ ID NO: 286676 - DNA, 15 bp, Homo sapiens
aattctgctccatac

SEQ ID NO: 286677 - DNA, 15 bp, Homo sapiens
aaattctgctccata

SEQ ID NO: 286678 - DNA, 15 bp, Homo sapiens
aaaattctgctccat

SEQ ID NO: 286679 - DNA, 15 bp, Homo sapiens
caaaattctgctcca

SEQ ID NO: 286680 - DNA, 15 bp, Homo sapiens
tcaaaattctgctcc

SEQ ID NO: 286681 - DNA, 15 bp, Homo sapiens
ttcaaaattctgctc

SEQ ID NO: 286682 - DNA, 15 bp, Homo sapiens
cttcaaaattctgct

SEQ ID NO: 286683 - DNA, 15 bp, Homo sapiens
tcttcaaaattctgc

SEQ ID NO: 286684 - DNA, 15 bp, Homo sapiens
atcttcaaaattctg

SEQ ID NO: 286685 - DNA, 15 bp, Homo sapiens
catcttcaaaattct

SEQ ID NO: 286686 - DNA, 15 bp, Homo sapiens
acatcttcaaaattc

SEQ ID NO: 286687 - DNA, 15 bp, Homo sapiens
cacatcttcaaaatt

SEQ ID NO: 286688 - DNA, 15 bp, Homo sapiens
acacatcttcaaaat

SEQ ID NO: 286689 - DNA, 15 bp, Homo sapiens
aacacatcttcaaaa

SEQ ID NO: 286690 - DNA, 15 bp, Homo sapiens
caacacatcttcaaa

SEQ ID NO: 286691 - DNA, 15 bp, Homo sapiens
tcaacacatcttcaa

SEQ ID NO: 286692 - DNA, 15 bp, Homo sapiens
ttcaacacatcttca

SEQ ID NO: 286693 - DNA, 15 bp, Homo sapiens
gttcaacacatcttc

SEQ ID NO: 286694 - DNA, 15 bp, Homo sapiens
tgttcaacacatctt

SEQ ID NO: 286695 - DNA, 15 bp, Homo sapiens
atgttcaacacatct

SEQ ID NO: 286696 - DNA, 15 bp, Homo sapiens
catgttcaacacatc

SEQ ID NO: 286697 - DNA, 15 bp, Homo sapiens
ccatgttcaacacat

SEQ ID NO: 286698 - DNA, 15 bp, Homo sapiens
accatgttcaacaca

SEQ ID NO: 286699 - DNA, 15 bp, Homo sapiens
aaccatgttcaacac

SEQ ID NO: 286700 - DNA, 15 bp, Homo sapiens
aaaccatgttcaaca

SEQ ID NO: 286701 - DNA, 15 bp, Homo sapiens
caaaccatgttcaac

SEQ ID NO: 286702 - DNA, 15 bp, Homo sapiens
ccaaaccatgttcaa

SEQ ID NO: 286703 - DNA, 15 bp, Homo sapiens
gccaaaccatgttca

SEQ ID NO: 286704 - DNA, 15 bp, Homo sapiens
tgccaaaccatgttc

SEQ ID NO: 286705 - DNA, 15 bp, Homo sapiens
ctgccaaaccatgtt

SEQ ID NO: 286706 - DNA, 15 bp, Homo sapiens
tctgccaaaccatgt

SEQ ID NO: 286707 - DNA, 15 bp, Homo sapiens
ctctgccaaaccatg

SEQ ID NO: 286708 - DNA, 15 bp, Homo sapiens
tctctgccaaaccat

SEQ ID NO: 286709 - DNA, 15 bp, Homo sapiens
ttctctgccaaacca

SEQ ID NO: 286710 - DNA, 15 bp, Homo sapiens
cttctctgccaaacc

SEQ ID NO: 286711 - DNA, 15 bp, Homo sapiens
ccttctctgccaaac

SEQ ID NO: 286712 - DNA, 15 bp, Homo sapiens
gccttctctgccaaa

SEQ ID NO: 286713 - DNA, 15 bp, Homo sapiens
tgccttctctgccaa

SEQ ID NO: 286714 - DNA, 15 bp, Homo sapiens
ctgccttctctgcca

SEQ ID NO: 286715 - DNA, 15 bp, Homo sapiens
tctgccttctctgcc

SEQ ID NO: 286716 - DNA, 15 bp, Homo sapiens
ttctgccttctctgc

SEQ ID NO: 286717 - DNA, 15 bp, Homo sapiens
tttctgccttctctg

SEQ ID NO: 286718 - DNA, 15 bp, Homo sapiens
gtttctgccttctct

SEQ ID NO: 286719 - DNA, 15 bp, Homo sapiens
ggtttctgccttctc

SEQ ID NO: 286720 - DNA, 15 bp, Homo sapiens
aggtttctgccttct

SEQ ID NO: 286721 - DNA, 15 bp, Homo sapiens
aaggtttctgccttc

SEQ ID NO: 286722 - DNA, 15 bp, Homo sapiens
gaaggtttctgcctt

SEQ ID NO: 286723 - DNA, 15 bp, Homo sapiens
tgaaggtttctgcct

SEQ ID NO: 286724 - DNA, 15 bp, Homo sapiens
atgaaggtttctgcc

SEQ ID NO: 286725 - DNA, 15 bp, Homo sapiens
aatgaaggtttctgc

SEQ ID NO: 286726 - DNA, 15 bp, Homo sapiens
aaatgaaggtttctg

SEQ ID NO: 286727 - DNA, 15 bp, Homo sapiens
taaatgaaggtttct

SEQ ID NO: 286728 - DNA, 15 bp, Homo sapiens
ctaaatgaaggtttc

SEQ ID NO: 286729 - DNA, 15 bp, Homo sapiens
gctaaatgaaggttt

SEQ ID NO: 286730 - DNA, 15 bp, Homo sapiens
tgctaaatgaaggtt

SEQ ID NO: 286731 - DNA, 15 bp, Homo sapiens
ctgctaaatgaaggt

SEQ ID NO: 286732 - DNA, 15 bp, Homo sapiens
tctgctaaatgaagg

SEQ ID NO: 286733 - DNA, 15 bp, Homo sapiens
ttctgctaaatgaag

SEQ ID NO: 286734 - DNA, 15 bp, Homo sapiens
tttctgctaaatgaa

SEQ ID NO: 286735 - DNA, 15 bp, Homo sapiens
gtttctgctaaatga

SEQ ID NO: 286736 - DNA, 15 bp, Homo sapiens
ggtttctgctaaatg

SEQ ID NO: 286737 - DNA, 15 bp, Homo sapiens
tggtttctgctaaat

SEQ ID NO: 286738 - DNA, 15 bp, Homo sapiens
gtggtttctgctaaa

SEQ ID NO: 286739 - DNA, 15 bp, Homo sapiens
tgtggtttctgctaa

SEQ ID NO: 286740 - DNA, 15 bp, Homo sapiens
atgtggtttctgcta

SEQ ID NO: 286741 - DNA, 15 bp, Homo sapiens
catgtggtttctgct

SEQ ID NO: 286742 - DNA, 15 bp, Homo sapiens
gcatgtggtttctgc

SEQ ID NO: 286743 - DNA, 15 bp, Homo sapiens
tgcatgtggtttctg

SEQ ID NO: 286744 - DNA, 15 bp, Homo sapiens
ttgcatgtggtttct

SEQ ID NO: 286745 - DNA, 15 bp, Homo sapiens
tttgcatgtggtttc

SEQ ID NO: 286746 - DNA, 15 bp, Homo sapiens
ctttgcatgtggttt

SEQ ID NO: 286747 - DNA, 15 bp, Homo sapiens
tctttgcatgtggtt

SEQ ID NO: 286748 - DNA, 15 bp, Homo sapiens
ttctttgcatgtggt

SEQ ID NO: 286749 - DNA, 15 bp, Homo sapiens
tttctttgcatgtgg

SEQ ID NO: 286750 - DNA, 15 bp, Homo sapiens
ctttctttgcatgtg

SEQ ID NO: 286751 - DNA, 15 bp, Homo sapiens
tctttctttgcatgt

SEQ ID NO: 286752 - DNA, 15 bp, Homo sapiens
ttctttctttgcatg

SEQ ID NO: 286753 - DNA, 15 bp, Homo sapiens
tttctttctttgcat

SEQ ID NO: 286754 - DNA, 15 bp, Homo sapiens
atttctttctttgca

SEQ ID NO: 286755 - DNA, 15 bp, Homo sapiens
tatttctttctttgc

SEQ ID NO: 286756 - DNA, 15 bp, Homo sapiens
ttatttctttctttg

SEQ ID NO: 286757 - DNA, 15 bp, Homo sapiens
tttatttctttcttt

SEQ ID NO: 286758 - DNA, 15 bp, Homo sapiens
ttttatttctttctt

SEQ ID NO: 286759 - DNA, 15 bp, Homo sapiens
tttttatttctttct

SEQ ID NO: 286760 - DNA, 15 bp, Homo sapiens
ttttttatttctttc

SEQ ID NO: 286761 - DNA, 15 bp, Homo sapiens
tttttttatttcttt

SEQ ID NO: 286762 - DNA, 15 bp, Homo sapiens
ttttttttatttctt

SEQ ID NO: 286763 - DNA, 15 bp, Homo sapiens
attttttttatttct

SEQ ID NO: 286764 - DNA, 15 bp, Homo sapiens
aattttttttatttc

SEQ ID NO: 286765 - DNA, 15 bp, Homo sapiens
gaattttttttattt

SEQ ID NO: 286766 - DNA, 15 bp, Homo sapiens
agaattttttttatt

SEQ ID NO: 286767 - DNA, 15 bp, Homo sapiens
tagaattttttttat

SEQ ID NO: 286768 - DNA, 15 bp, Homo sapiens
atagaatttttttta

SEQ ID NO: 286769 - DNA, 15 bp, Homo sapiens
tatagaatttttttt

SEQ ID NO: 286770 - DNA, 15 bp, Homo sapiens
atatagaattttttt

SEQ ID NO: 286771 - DNA, 15 bp, Homo sapiens
tatatagaatttttt

SEQ ID NO: 286772 - DNA, 15 bp, Homo sapiens
ctatatagaattttt

SEQ ID NO: 286773 - DNA, 15 bp, Homo sapiens
tctatatagaatttt

SEQ ID NO: 286774 - DNA, 15 bp, Homo sapiens
ttctatatagaattt

SEQ ID NO: 286775 - DNA, 15 bp, Homo sapiens
tttctatatagaatt

SEQ ID NO: 286776 - DNA, 15 bp, Homo sapiens
ttttctatatagaat

SEQ ID NO: 286777 - DNA, 15 bp, Homo sapiens
gttttctatatagaa

SEQ ID NO: 286778 - DNA, 15 bp, Homo sapiens
tgttttctatataga

SEQ ID NO: 286779 - DNA, 15 bp, Homo sapiens
ttgttttctatatag

SEQ ID NO: 286780 - DNA, 15 bp, Homo sapiens
tttgttttctatata

SEQ ID NO: 286781 - DNA, 15 bp, Homo sapiens
atttgttttctatat

SEQ ID NO: 286782 - DNA, 15 bp, Homo sapiens
tatttgttttctata

SEQ ID NO: 286783 - DNA, 15 bp, Homo sapiens
atatttgttttctat

SEQ ID NO: 286784 - DNA, 15 bp, Homo sapiens
tatatttgttttcta

SEQ ID NO: 286785 - DNA, 15 bp, Homo sapiens
gtatatttgttttct

SEQ ID NO: 286786 - DNA, 15 bp, Homo sapiens
agtatatttgttttc

SEQ ID NO: 286787 - DNA, 15 bp, Homo sapiens
aagtatatttgtttt

SEQ ID NO: 286788 - DNA, 15 bp, Homo sapiens
gaagtatatttgttt

SEQ ID NO: 286789 - DNA, 15 bp, Homo sapiens
tgaagtatatttgtt

SEQ ID NO: 286790 - DNA, 15 bp, Homo sapiens
ttgaagtatatttgt

SEQ ID NO: 286791 - DNA, 15 bp, Homo sapiens
tttgaagtatatttg

SEQ ID NO: 286792 - DNA, 15 bp, Homo sapiens
atttgaagtatattt

SEQ ID NO: 286793 - DNA, 15 bp, Homo sapiens
aatttgaagtatatt

SEQ ID NO: 286794 - DNA, 15 bp, Homo sapiens
aaatttgaagtatat

SEQ ID NO: 286795 - DNA, 15 bp, Homo sapiens
aaaatttgaagtata

SEQ ID NO: 286796 - DNA, 15 bp, Homo sapiens
gaaaatttgaagtat

SEQ ID NO: 286797 - DNA, 15 bp, Homo sapiens
agaaaatttgaagta

SEQ ID NO: 286798 - DNA, 15 bp, Homo sapiens
gagaaaatttgaagt

SEQ ID NO: 286799 - DNA, 15 bp, Homo sapiens
ggagaaaatttgaag

SEQ ID NO: 286800 - DNA, 15 bp, Homo sapiens
gggagaaaatttgaa

SEQ ID NO: 286801 - DNA, 15 bp, Homo sapiens
tgggagaaaatttga

SEQ ID NO: 286802 - DNA, 15 bp, Homo sapiens
ttgggagaaaatttg

SEQ ID NO: 286803 - DNA, 15 bp, Homo sapiens
tttgggagaaaattt

SEQ ID NO: 286804 - DNA, 15 bp, Homo sapiens
atttgggagaaaatt

SEQ ID NO: 286805 - DNA, 15 bp, Homo sapiens
aatttgggagaaaat

SEQ ID NO: 286806 - DNA, 15 bp, Homo sapiens
aaatttgggagaaaa

SEQ ID NO: 286807 - DNA, 15 bp, Homo sapiens
aaaatttgggagaaa

SEQ ID NO: 286808 - DNA, 15 bp, Homo sapiens
taaaatttgggagaa

SEQ ID NO: 286809 - DNA, 15 bp, Homo sapiens
ataaaatttgggaga

SEQ ID NO: 286810 - DNA, 15 bp, Homo sapiens
tataaaatttgggag

SEQ ID NO: 286811 - DNA, 15 bp, Homo sapiens
ttataaaatttggga

SEQ ID NO: 286812 - DNA, 15 bp, Homo sapiens
tttataaaatttggg

SEQ ID NO: 286813 - DNA, 15 bp, Homo sapiens
atttataaaatttgg

SEQ ID NO: 286814 - DNA, 15 bp, Homo sapiens
aatttataaaatttg

SEQ ID NO: 286815 - DNA, 15 bp, Homo sapiens
aaatttataaaattt

SEQ ID NO: 286816 - DNA, 15 bp, Homo sapiens
gaaatttataaaatt

SEQ ID NO: 286817 - DNA, 15 bp, Homo sapiens
ggaaatttataaaat

SEQ ID NO: 286818 - DNA, 15 bp, Homo sapiens
aggaaatttataaaa

SEQ ID NO: 286819 - DNA, 15 bp, Homo sapiens
aaggaaatttataaa

SEQ ID NO: 286820 - DNA, 15 bp, Homo sapiens
aaaggaaatttataa

SEQ ID NO: 286821 - DNA, 15 bp, Homo sapiens
taaaggaaatttata

SEQ ID NO: 286822 - DNA, 15 bp, Homo sapiens
ataaaggaaatttat

SEQ ID NO: 286823 - DNA, 15 bp, Homo sapiens
tataaaggaaattta

SEQ ID NO: 286824 - DNA, 15 bp, Homo sapiens
atataaaggaaattt

SEQ ID NO: 286825 - DNA, 15 bp, Homo sapiens
tatataaaggaaatt

SEQ ID NO: 286826 - DNA, 15 bp, Homo sapiens
gtatataaaggaaat

SEQ ID NO: 286827 - DNA, 15 bp, Homo sapiens
ggtatataaaggaaa

SEQ ID NO: 286828 - DNA, 15 bp, Homo sapiens
gggtatataaaggaa

SEQ ID NO: 286829 - DNA, 15 bp, Homo sapiens
agggtatataaagga

SEQ ID NO: 286830 - DNA, 15 bp, Homo sapiens
aagggtatataaagg

SEQ ID NO: 286831 - DNA, 15 bp, Homo sapiens
aaagggtatataaag

SEQ ID NO: 286832 - DNA, 15 bp, Homo sapiens
gaaagggtatataaa

SEQ ID NO: 286833 - DNA, 15 bp, Homo sapiens
ggaaagggtatataa

SEQ ID NO: 286834 - DNA, 15 bp, Homo sapiens
gggaaagggtatata

SEQ ID NO: 286835 - DNA, 15 bp, Homo sapiens
ggggaaagggtatat

SEQ ID NO: 286836 - DNA, 15 bp, Homo sapiens
tggggaaagggtata

SEQ ID NO: 286837 - DNA, 15 bp, Homo sapiens
gtggggaaagggtat

SEQ ID NO: 286838 - DNA, 15 bp, Homo sapiens
agtggggaaagggta

SEQ ID NO: 286839 - DNA, 15 bp, Homo sapiens
aagtggggaaagggt

SEQ ID NO: 286840 - DNA, 15 bp, Homo sapiens
aaagtggggaaaggg

SEQ ID NO: 286841 - DNA, 15 bp, Homo sapiens
aaaagtggggaaagg

SEQ ID NO: 286842 - DNA, 15 bp, Homo sapiens
aaaaagtggggaaag

SEQ ID NO: 286843 - DNA, 15 bp, Homo sapiens
aaaaaagtggggaaa

SEQ ID NO: 286844 - DNA, 15 bp, Homo sapiens
gaaaaaagtggggaa

SEQ ID NO: 286845 - DNA, 15 bp, Homo sapiens
tgaaaaaagtgggga

SEQ ID NO: 286846 - DNA, 15 bp, Homo sapiens
ttgaaaaaagtgggg

SEQ ID NO: 286847 - DNA, 15 bp, Homo sapiens
attgaaaaaagtggg

SEQ ID NO: 286848 - DNA, 15 bp, Homo sapiens
cattgaaaaaagtgg

SEQ ID NO: 286849 - DNA, 15 bp, Homo sapiens
acattgaaaaaagtg

SEQ ID NO: 286850 - DNA, 15 bp, Homo sapiens
aacattgaaaaaagt

SEQ ID NO: 286851 - DNA, 15 bp, Homo sapiens
taacattgaaaaaag

SEQ ID NO: 286852 - DNA, 15 bp, Homo sapiens
ataacattgaaaaaa

SEQ ID NO: 286853 - DNA, 15 bp, Homo sapiens
tataacattgaaaaa

SEQ ID NO: 286854 - DNA, 15 bp, Homo sapiens
ttataacattgaaaa

SEQ ID NO: 286855 - DNA, 15 bp, Homo sapiens
gttataacattgaaa

SEQ ID NO: 286856 - DNA, 15 bp, Homo sapiens
agttataacattgaa

SEQ ID NO: 286857 - DNA, 15 bp, Homo sapiens
aagttataacattga

SEQ ID NO: 286858 - DNA, 15 bp, Homo sapiens
aaagttataacattg

SEQ ID NO: 286859 - DNA, 15 bp, Homo sapiens
taaagttataacatt

SEQ ID NO: 286860 - DNA, 15 bp, Homo sapiens
ttaaagttataacat

SEQ ID NO: 286861 - DNA, 15 bp, Homo sapiens
attaaagttataaca

SEQ ID NO: 286862 - DNA, 15 bp, Homo sapiens
tattaaagttataac

SEQ ID NO: 286863 - DNA, 15 bp, Homo sapiens
ttattaaagttataa

SEQ ID NO: 286864 - DNA, 15 bp, Homo sapiens
cttattaaagttata

SEQ ID NO: 286865 - DNA, 15 bp, Homo sapiens
acttattaaagttat

SEQ ID NO: 286866 - DNA, 15 bp, Homo sapiens
aacttattaaagtta

SEQ ID NO: 286867 - DNA, 15 bp, Homo sapiens
caacttattaaagtt

SEQ ID NO: 286868 - DNA, 15 bp, Homo sapiens
tcaacttattaaagt

SEQ ID NO: 286869 - DNA, 15 bp, Homo sapiens
atcaacttattaaag

SEQ ID NO: 286870 - DNA, 15 bp, Homo sapiens
catcaacttattaaa

SEQ ID NO: 286871 - DNA, 15 bp, Homo sapiens
acatcaacttattaa

SEQ ID NO: 286872 - DNA, 15 bp, Homo sapiens
aacatcaacttatta

SEQ ID NO: 286873 - DNA, 15 bp, Homo sapiens
caacatcaacttatt

SEQ ID NO: 286874 - DNA, 15 bp, Homo sapiens
gcaacatcaacttat

SEQ ID NO: 286875 - DNA, 15 bp, Homo sapiens
tgcaacatcaactta

SEQ ID NO: 286876 - DNA, 15 bp, Homo sapiens
ttgcaacatcaactt

SEQ ID NO: 286877 - DNA, 15 bp, Homo sapiens
cttgcaacatcaact

SEQ ID NO: 286878 - DNA, 15 bp, Homo sapiens
acttgcaacatcaac

SEQ ID NO: 286879 - DNA, 15 bp, Homo sapiens
aacttgcaacatcaa

SEQ ID NO: 286880 - DNA, 15 bp, Homo sapiens
taacttgcaacatca

SEQ ID NO: 286881 - DNA, 15 bp, Homo sapiens
gtaacttgcaacatc

SEQ ID NO: 286882 - DNA, 15 bp, Homo sapiens
agtaacttgcaacat

SEQ ID NO: 286883 - DNA, 15 bp, Homo sapiens
aagtaacttgcaaca

SEQ ID NO: 286884 - DNA, 15 bp, Homo sapiens
aaagtaacttgcaac

SEQ ID NO: 286885 - DNA, 15 bp, Homo sapiens
taaagtaacttgcaa

SEQ ID NO: 286886 - DNA, 15 bp, Homo sapiens
ctaaagtaacttgca

SEQ ID NO: 286887 - DNA, 15 bp, Homo sapiens
cctaaagtaacttgc

SEQ ID NO: 286888 - DNA, 15 bp, Homo sapiens
acctaaagtaacttg

SEQ ID NO: 286889 - DNA, 15 bp, Homo sapiens
aacctaaagtaactt

SEQ ID NO: 286890 - DNA, 15 bp, Homo sapiens
caacctaaagtaact

SEQ ID NO: 286891 - DNA, 15 bp, Homo sapiens
tcaacctaaagtaac

SEQ ID NO: 286892 - DNA, 15 bp, Homo sapiens
gtcaacctaaagtaa

SEQ ID NO: 286893 - DNA, 15 bp, Homo sapiens
tgtcaacctaaagta

SEQ ID NO: 286894 - DNA, 15 bp, Homo sapiens
ttgtcaacctaaagt

SEQ ID NO: 286895 - DNA, 15 bp, Homo sapiens
attgtcaacctaaag

SEQ ID NO: 286896 - DNA, 15 bp, Homo sapiens
gattgtcaacctaaa

SEQ ID NO: 286897 - DNA, 15 bp, Homo sapiens
agattgtcaacctaa

SEQ ID NO: 286898 - DNA, 15 bp, Homo sapiens
aagattgtcaaccta

SEQ ID NO: 286899 - DNA, 15 bp, Homo sapiens
aaagattgtcaacct

SEQ ID NO: 286900 - DNA, 15 bp, Homo sapiens
caaagattgtcaacc

SEQ ID NO: 286901 - DNA, 15 bp, Homo sapiens
acaaagattgtcaac

SEQ ID NO: 286902 - DNA, 15 bp, Homo sapiens
aacaaagattgtcaa

SEQ ID NO: 286903 - DNA, 15 bp, Homo sapiens
gaacaaagattgtca

SEQ ID NO: 286904 - DNA, 15 bp, Homo sapiens
agaacaaagattgtc

SEQ ID NO: 286905 - DNA, 15 bp, Homo sapiens
aagaacaaagattgt

SEQ ID NO: 286906 - DNA, 15 bp, Homo sapiens
aaagaacaaagattg

SEQ ID NO: 286907 - DNA, 15 bp, Homo sapiens
aaaagaacaaagatt

SEQ ID NO: 286908 - DNA, 15 bp, Homo sapiens
caaaagaacaaagat

SEQ ID NO: 286909 - DNA, 15 bp, Homo sapiens
ccaaaagaacaaaga

SEQ ID NO: 286910 - DNA, 15 bp, Homo sapiens
tccaaaagaacaaag

SEQ ID NO: 286911 - DNA, 15 bp, Homo sapiens
atccaaaagaacaaa

SEQ ID NO: 286912 - DNA, 15 bp, Homo sapiens
tatccaaaagaacaa

SEQ ID NO: 286913 - DNA, 15 bp, Homo sapiens
ttatccaaaagaaca

SEQ ID NO: 286914 - DNA, 15 bp, Homo sapiens
attatccaaaagaac

SEQ ID NO: 286915 - DNA, 15 bp, Homo sapiens
aattatccaaaagaa

SEQ ID NO: 286916 - DNA, 15 bp, Homo sapiens
gaattatccaaaaga

SEQ ID NO: 286917 - DNA, 15 bp, Homo sapiens
tgaattatccaaaag

SEQ ID NO: 286918 - DNA, 15 bp, Homo sapiens
ttgaattatccaaaa

SEQ ID NO: 286919 - DNA, 15 bp, Homo sapiens
tttgaattatccaaa

SEQ ID NO: 286920 - DNA, 15 bp, Homo sapiens
atttgaattatccaa

SEQ ID NO: 286921 - DNA, 15 bp, Homo sapiens
catttgaattatcca

SEQ ID NO: 286922 - DNA, 15 bp, Homo sapiens
acatttgaattatcc

SEQ ID NO: 286923 - DNA, 15 bp, Homo sapiens
tacatttgaattatc

SEQ ID NO: 286924 - DNA, 15 bp, Homo sapiens
gtacatttgaattat

SEQ ID NO: 286925 - DNA, 15 bp, Homo sapiens
tgtacatttgaatta

SEQ ID NO: 286926 - DNA, 15 bp, Homo sapiens
atgtacatttgaatt

SEQ ID NO: 286927 - DNA, 15 bp, Homo sapiens
catgtacatttgaat

SEQ ID NO: 286928 - DNA, 15 bp, Homo sapiens
acatgtacatttgaa

SEQ ID NO: 286929 - DNA, 15 bp, Homo sapiens
cacatgtacatttga

SEQ ID NO: 286930 - DNA, 15 bp, Homo sapiens
tcacatgtacatttg

SEQ ID NO: 286931 - DNA, 15 bp, Homo sapiens
ttcacatgtacattt

SEQ ID NO: 286932 - DNA, 15 bp, Homo sapiens
attcacatgtacatt

SEQ ID NO: 286933 - DNA, 15 bp, Homo sapiens
aattcacatgtacat

SEQ ID NO: 286934 - DNA, 15 bp, Homo sapiens
gaattcacatgtaca

SEQ ID NO: 286935 - DNA, 15 bp, Homo sapiens
agaattcacatgtac

SEQ ID NO: 286936 - DNA, 15 bp, Homo sapiens
gagaattcacatgta

SEQ ID NO: 286937 - DNA, 15 bp, Homo sapiens
agagaattcacatgt

SEQ ID NO: 286938 - DNA, 15 bp, Homo sapiens
tagagaattcacatg

SEQ ID NO: 286939 - DNA, 15 bp, Homo sapiens
ttagagaattcacat

SEQ ID NO: 286940 - DNA, 15 bp, Homo sapiens
cttagagaattcaca

SEQ ID NO: 286941 - DNA, 15 bp, Homo sapiens
acttagagaattcac

SEQ ID NO: 286942 - DNA, 15 bp, Homo sapiens
cacttagagaattca

SEQ ID NO: 286943 - DNA, 15 bp, Homo sapiens
gcacttagagaattc

SEQ ID NO: 286944 - DNA, 15 bp, Homo sapiens
agcacttagagaatt

SEQ ID NO: 286945 - DNA, 15 bp, Homo sapiens
gagcacttagagaat

SEQ ID NO: 286946 - DNA, 15 bp, Homo sapiens
agagcacttagagaa

SEQ ID NO: 286947 - DNA, 15 bp, Homo sapiens
cagagcacttagaga

SEQ ID NO: 286948 - DNA, 15 bp, Homo sapiens
acagagcacttagag

SEQ ID NO: 286949 - DNA, 15 bp, Homo sapiens
aacagagcacttaga

SEQ ID NO: 286950 - DNA, 15 bp, Homo sapiens
taacagagcacttag

SEQ ID NO: 286951 - DNA, 15 bp, Homo sapiens
ttaacagagcactta

SEQ ID NO: 286952 - DNA, 15 bp, Homo sapiens
tttaacagagcactt

SEQ ID NO: 286953 - DNA, 15 bp, Homo sapiens
ctttaacagagcact

SEQ ID NO: 286954 - DNA, 15 bp, Homo sapiens
tctttaacagagcac

SEQ ID NO: 286955 - DNA, 15 bp, Homo sapiens
ctctttaacagagca

SEQ ID NO: 286956 - DNA, 15 bp, Homo sapiens
gctctttaacagagc

SEQ ID NO: 286957 - DNA, 15 bp, Homo sapiens
tgctctttaacagag

SEQ ID NO: 286958 - DNA, 15 bp, Homo sapiens
ttgctctttaacaga

SEQ ID NO: 286959 - DNA, 15 bp, Homo sapiens
attgctctttaacag

SEQ ID NO: 286960 - DNA, 15 bp, Homo sapiens
gattgctctttaaca

SEQ ID NO: 286961 - DNA, 15 bp, Homo sapiens
tgattgctctttaac

SEQ ID NO: 286962 - DNA, 15 bp, Homo sapiens
ctgattgctctttaa

SEQ ID NO: 286963 - DNA, 15 bp, Homo sapiens
gctgattgctcttta

SEQ ID NO: 286964 - DNA, 15 bp, Homo sapiens
tgctgattgctcttt

SEQ ID NO: 286965 - DNA, 15 bp, Homo sapiens
atgctgattgctctt

SEQ ID NO: 286966 - DNA, 15 bp, Homo sapiens
catgctgattgctct

SEQ ID NO: 286967 - DNA, 15 bp, Homo sapiens
ccatgctgattgctc

SEQ ID NO: 286968 - DNA, 15 bp, Homo sapiens
cccatgctgattgct

SEQ ID NO: 286969 - DNA, 15 bp, Homo sapiens
ccccatgctgattgc

SEQ ID NO: 286970 - DNA, 15 bp, Homo sapiens
accccatgctgattg

SEQ ID NO: 286971 - DNA, 15 bp, Homo sapiens
taccccatgctgatt

SEQ ID NO: 286972 - DNA, 15 bp, Homo sapiens
ataccccatgctgat

SEQ ID NO: 286973 - DNA, 15 bp, Homo sapiens
aataccccatgctga

SEQ ID NO: 286974 - DNA, 15 bp, Homo sapiens
taataccccatgctg

SEQ ID NO: 286975 - DNA, 15 bp, Homo sapiens
ataataccccatgct

SEQ ID NO: 286976 - DNA, 15 bp, Homo sapiens
aataataccccatgc

SEQ ID NO: 286977 - DNA, 15 bp, Homo sapiens
caataataccccatg

SEQ ID NO: 286978 - DNA, 15 bp, Homo sapiens
tcaataataccccat

SEQ ID NO: 286979 - DNA, 15 bp, Homo sapiens
ttcaataatacccca

SEQ ID NO: 286980 - DNA, 15 bp, Homo sapiens
gttcaataatacccc

SEQ ID NO: 286981 - DNA, 15 bp, Homo sapiens
agttcaataataccc

SEQ ID NO: 286982 - DNA, 15 bp, Homo sapiens
cagttcaataatacc

SEQ ID NO: 286983 - DNA, 15 bp, Homo sapiens
tcagttcaataatac

SEQ ID NO: 286984 - DNA, 15 bp, Homo sapiens
gtcagttcaataata

SEQ ID NO: 286985 - DNA, 15 bp, Homo sapiens
agtcagttcaataat

SEQ ID NO: 286986 - DNA, 15 bp, Homo sapiens
cagtcagttcaataa

SEQ ID NO: 286987 - DNA, 15 bp, Homo sapiens
tcagtcagttcaata

SEQ ID NO: 286988 - DNA, 15 bp, Homo sapiens
ttcagtcagttcaat

SEQ ID NO: 286989 - DNA, 15 bp, Homo sapiens
attcagtcagttcaa

SEQ ID NO: 286990 - DNA, 15 bp, Homo sapiens
tattcagtcagttca

SEQ ID NO: 286991 - DNA, 15 bp, Homo sapiens
atattcagtcagttc

SEQ ID NO: 286992 - DNA, 15 bp, Homo sapiens
catattcagtcagtt

SEQ ID NO: 286993 - DNA, 15 bp, Homo sapiens
ccatattcagtcagt

SEQ ID NO: 286994 - DNA, 15 bp, Homo sapiens
accatattcagtcag

SEQ ID NO: 286995 - DNA, 15 bp, Homo sapiens
taccatattcagtca

SEQ ID NO: 286996 - DNA, 15 bp, Homo sapiens
ttaccatattcagtc

SEQ ID NO: 286997 - DNA, 15 bp, Homo sapiens
gttaccatattcagt

SEQ ID NO: 286998 - DNA, 15 bp, Homo sapiens
agttaccatattcag

SEQ ID NO: 286999 - DNA, 15 bp, Homo sapiens
gagttaccatattca

SEQ ID NO: 287000 - DNA, 15 bp, Homo sapiens
agagttaccatattc

SEQ ID NO: 287001 - DNA, 15 bp, Homo sapiens
aagagttaccatatt

SEQ ID NO: 287002 - DNA, 15 bp, Homo sapiens
taagagttaccatat

SEQ ID NO: 287003 - DNA, 15 bp, Homo sapiens
ctaagagttaccata

SEQ ID NO: 287004 - DNA, 15 bp, Homo sapiens
actaagagttaccat

SEQ ID NO: 287005 - DNA, 15 bp, Homo sapiens
aactaagagttacca

SEQ ID NO: 287006 - DNA, 15 bp, Homo sapiens
taactaagagttacc

SEQ ID NO: 287007 - DNA, 15 bp, Homo sapiens
ttaactaagagttac

SEQ ID NO: 287008 - DNA, 15 bp, Homo sapiens
attaactaagagtta

SEQ ID NO: 287009 - DNA, 15 bp, Homo sapiens
aattaactaagagtt

SEQ ID NO: 287010 - DNA, 15 bp, Homo sapiens
aaattaactaagagt

SEQ ID NO: 287011 - DNA, 15 bp, Homo sapiens
aaaattaactaagag

SEQ ID NO: 287012 - DNA, 15 bp, Homo sapiens
aaaaattaactaaga

SEQ ID NO: 287013 - DNA, 15 bp, Homo sapiens
caaaaattaactaag

SEQ ID NO: 287014 - DNA, 15 bp, Homo sapiens
acaaaaattaactaa

SEQ ID NO: 287015 - DNA, 15 bp, Homo sapiens
aacaaaaattaacta

SEQ ID NO: 287016 - DNA, 15 bp, Homo sapiens
caacaaaaattaact

SEQ ID NO: 287017 - DNA, 15 bp, Homo sapiens
acaacaaaaattaac

SEQ ID NO: 287018 - DNA, 15 bp, Homo sapiens
tacaacaaaaattaa

SEQ ID NO: 287019 - DNA, 15 bp, Homo sapiens
ctacaacaaaaatta

SEQ ID NO: 287020 - DNA, 15 bp, Homo sapiens
tctacaacaaaaatt

SEQ ID NO: 287021 - DNA, 15 bp, Homo sapiens
ctctacaacaaaaat

SEQ ID NO: 287022 - DNA, 15 bp, Homo sapiens
tctctacaacaaaaa

SEQ ID NO: 287023 - DNA, 15 bp, Homo sapiens
ttctctacaacaaaa

SEQ ID NO: 287024 - DNA, 15 bp, Homo sapiens
attctctacaacaaa

SEQ ID NO: 287025 - DNA, 15 bp, Homo sapiens
aattctctacaacaa

SEQ ID NO: 287026 - DNA, 15 bp, Homo sapiens
aaattctctacaaca

SEQ ID NO: 287027 - DNA, 15 bp, Homo sapiens
gaaattctctacaac

SEQ ID NO: 287028 - DNA, 15 bp, Homo sapiens
tgaaattctctacaa

SEQ ID NO: 287029 - DNA, 15 bp, Homo sapiens
ttgaaattctctaca

SEQ ID NO: 287030 - DNA, 15 bp, Homo sapiens
tttgaaattctctac

SEQ ID NO: 287031 - DNA, 15 bp, Homo sapiens
atttgaaattctcta

SEQ ID NO: 287032 - DNA, 15 bp, Homo sapiens
catttgaaattctct

SEQ ID NO: 287033 - DNA, 15 bp, Homo sapiens
tcatttgaaattctc

SEQ ID NO: 287034 - DNA, 15 bp, Homo sapiens
ttcatttgaaattct

SEQ ID NO: 287035 - DNA, 15 bp, Homo sapiens
attcatttgaaattc

SEQ ID NO: 287036 - DNA, 15 bp, Homo sapiens
tattcatttgaaatt

SEQ ID NO: 287037 - DNA, 15 bp, Homo sapiens
gtattcatttgaaat

SEQ ID NO: 287038 - DNA, 15 bp, Homo sapiens
tgtattcatttgaaa

SEQ ID NO: 287039 - DNA, 15 bp, Homo sapiens
ttgtattcatttgaa

SEQ ID NO: 287040 - DNA, 15 bp, Homo sapiens
tttgtattcatttga

SEQ ID NO: 287041 - DNA, 15 bp, Homo sapiens
ttttgtattcatttg

SEQ ID NO: 287042 - DNA, 15 bp, Homo sapiens
tttttgtattcattt

SEQ ID NO: 287043 - DNA, 15 bp, Homo sapiens
atttttgtattcatt

SEQ ID NO: 287044 - DNA, 15 bp, Homo sapiens
tatttttgtattcat

SEQ ID NO: 287045 - DNA, 15 bp, Homo sapiens
ctatttttgtattca

SEQ ID NO: 287046 - DNA, 15 bp, Homo sapiens
actatttttgtattc

SEQ ID NO: 287047 - DNA, 15 bp, Homo sapiens
tactatttttgtatt

SEQ ID NO: 287048 - DNA, 15 bp, Homo sapiens
ctactatttttgtat

SEQ ID NO: 287049 - DNA, 15 bp, Homo sapiens
actactatttttgta

SEQ ID NO: 287050 - DNA, 15 bp, Homo sapiens
tactactatttttgt

SEQ ID NO: 287051 - DNA, 15 bp, Homo sapiens
atactactatttttg

SEQ ID NO: 287052 - DNA, 15 bp, Homo sapiens
tatactactattttt

SEQ ID NO: 287053 - DNA, 15 bp, Homo sapiens
ttatactactatttt

SEQ ID NO: 287054 - DNA, 15 bp, Homo sapiens
attatactactattt

SEQ ID NO: 287055 - DNA, 15 bp, Homo sapiens
tattatactactatt

SEQ ID NO: 287056 - DNA, 15 bp, Homo sapiens
ttattatactactat

SEQ ID NO: 287057 - DNA, 15 bp, Homo sapiens
cttattatactacta

SEQ ID NO: 287058 - DNA, 15 bp, Homo sapiens
gcttattatactact

SEQ ID NO: 287059 - DNA, 15 bp, Homo sapiens
ggcttattatactac

SEQ ID NO: 287060 - DNA, 15 bp, Homo sapiens
aggcttattatacta

SEQ ID NO: 287061 - DNA, 15 bp, Homo sapiens
gaggcttattatact

SEQ ID NO: 287062 - DNA, 15 bp, Homo sapiens
ggaggcttattatac

SEQ ID NO: 287063 - DNA, 15 bp, Homo sapiens
tggaggcttattata

SEQ ID NO: 287064 - DNA, 15 bp, Homo sapiens
atggaggcttattat

SEQ ID NO: 287065 - DNA, 15 bp, Homo sapiens
catggaggcttatta

SEQ ID NO: 287066 - DNA, 15 bp, Homo sapiens
acatggaggcttatt

SEQ ID NO: 287067 - DNA, 15 bp, Homo sapiens
tacatggaggcttat

SEQ ID NO: 287068 - DNA, 15 bp, Homo sapiens
gtacatggaggctta

SEQ ID NO: 287069 - DNA, 15 bp, Homo sapiens
agtacatggaggctt

SEQ ID NO: 287070 - DNA, 15 bp, Homo sapiens
aagtacatggaggct

SEQ ID NO: 287071 - DNA, 15 bp, Homo sapiens
taagtacatggaggc

SEQ ID NO: 287072 - DNA, 15 bp, Homo sapiens
ataagtacatggagg

SEQ ID NO: 287073 - DNA, 15 bp, Homo sapiens
gataagtacatggag

SEQ ID NO: 287074 - DNA, 15 bp, Homo sapiens
tgataagtacatgga

SEQ ID NO: 287075 - DNA, 15 bp, Homo sapiens
atgataagtacatgg

SEQ ID NO: 287076 - DNA, 15 bp, Homo sapiens
catgataagtacatg

SEQ ID NO: 287077 - DNA, 15 bp, Homo sapiens
acatgataagtacat

SEQ ID NO: 287078 - DNA, 15 bp, Homo sapiens
tacatgataagtaca

SEQ ID NO: 287079 - DNA, 15 bp, Homo sapiens
ttacatgataagtac

SEQ ID NO: 287080 - DNA, 15 bp, Homo sapiens
gttacatgataagta

SEQ ID NO: 287081 - DNA, 15 bp, Homo sapiens
agttacatgataagt

SEQ ID NO: 287082 - DNA, 15 bp, Homo sapiens
aagttacatgataag

SEQ ID NO: 287083 - DNA, 15 bp, Homo sapiens
gaagttacatgataa

SEQ ID NO: 287084 - DNA, 15 bp, Homo sapiens
tgaagttacatgata

SEQ ID NO: 287085 - DNA, 15 bp, Homo sapiens
ttgaagttacatgat

SEQ ID NO: 287086 - DNA, 15 bp, Homo sapiens
gttgaagttacatga

SEQ ID NO: 287087 - DNA, 15 bp, Homo sapiens
tgttgaagttacatg

SEQ ID NO: 287088 - DNA, 15 bp, Homo sapiens
ctgttgaagttacat

SEQ ID NO: 287089 - DNA, 15 bp, Homo sapiens
tctgttgaagttaca

SEQ ID NO: 287090 - DNA, 15 bp, Homo sapiens
atctgttgaagttac

SEQ ID NO: 287091 - DNA, 15 bp, Homo sapiens
tatctgttgaagtta

SEQ ID NO: 287092 - DNA, 15 bp, Homo sapiens
ttatctgttgaagtt

SEQ ID NO: 287093 - DNA, 15 bp, Homo sapiens
attatctgttgaagt

SEQ ID NO: 287094 - DNA, 15 bp, Homo sapiens
aattatctgttgaag

SEQ ID NO: 287095 - DNA, 15 bp, Homo sapiens
aaattatctgttgaa

SEQ ID NO: 287096 - DNA, 15 bp, Homo sapiens
taaattatctgttga

SEQ ID NO: 287097 - DNA, 15 bp, Homo sapiens
gtaaattatctgttg

SEQ ID NO: 287098 - DNA, 15 bp, Homo sapiens
tgtaaattatctgtt

SEQ ID NO: 287099 - DNA, 15 bp, Homo sapiens
ctgtaaattatctgt

SEQ ID NO: 287100 - DNA, 15 bp, Homo sapiens
actgtaaattatctg

SEQ ID NO: 287101 - DNA, 15 bp, Homo sapiens
aactgtaaattatct

SEQ ID NO: 287102 - DNA, 15 bp, Homo sapiens
taactgtaaattatc

SEQ ID NO: 287103 - DNA, 15 bp, Homo sapiens
ttaactgtaaattat

SEQ ID NO: 287104 - DNA, 15 bp, Homo sapiens
attaactgtaaatta

SEQ ID NO: 287105 - DNA, 15 bp, Homo sapiens
gattaactgtaaatt

SEQ ID NO: 287106 - DNA, 15 bp, Homo sapiens
agattaactgtaaat

SEQ ID NO: 287107 - DNA, 15 bp, Homo sapiens
cagattaactgtaaa

SEQ ID NO: 287108 - DNA, 15 bp, Homo sapiens
acagattaactgtaa

SEQ ID NO: 287109 - DNA, 15 bp, Homo sapiens
tacagattaactgta

SEQ ID NO: 287110 - DNA, 15 bp, Homo sapiens
ctacagattaactgt

SEQ ID NO: 287111 - DNA, 15 bp, Homo sapiens
gctacagattaactg

SEQ ID NO: 287112 - DNA, 15 bp, Homo sapiens
ggctacagattaact

SEQ ID NO: 287113 - DNA, 15 bp, Homo sapiens
gggctacagattaac

SEQ ID NO: 287114 - DNA, 15 bp, Homo sapiens
ggggctacagattaa

SEQ ID NO: 287115 - DNA, 15 bp, Homo sapiens
tggggctacagatta

SEQ ID NO: 287116 - DNA, 15 bp, Homo sapiens
atggggctacagatt

SEQ ID NO: 287117 - DNA, 15 bp, Homo sapiens
aatggggctacagat

SEQ ID NO: 287118 - DNA, 15 bp, Homo sapiens
caatggggctacaga

SEQ ID NO: 287119 - DNA, 15 bp, Homo sapiens
gcaatggggctacag

SEQ ID NO: 287120 - DNA, 15 bp, Homo sapiens
ggcaatggggctaca

SEQ ID NO: 287121 - DNA, 15 bp, Homo sapiens
aggcaatggggctac

SEQ ID NO: 287122 - DNA, 15 bp, Homo sapiens
caggcaatggggcta

SEQ ID NO: 287123 - DNA, 15 bp, Homo sapiens
gcaggcaatggggct

SEQ ID NO: 287124 - DNA, 15 bp, Homo sapiens
agcaggcaatggggc

SEQ ID NO: 287125 - DNA, 15 bp, Homo sapiens
gagcaggcaatgggg

SEQ ID NO: 287126 - DNA, 15 bp, Homo sapiens
tgagcaggcaatggg

SEQ ID NO: 287127 - DNA, 15 bp, Homo sapiens
ctgagcaggcaatgg

SEQ ID NO: 287128 - DNA, 15 bp, Homo sapiens
actgagcaggcaatg

SEQ ID NO: 287129 - DNA, 15 bp, Homo sapiens
aactgagcaggcaat

SEQ ID NO: 287130 - DNA, 15 bp, Homo sapiens
gaactgagcaggcaa

SEQ ID NO: 287131 - DNA, 15 bp, Homo sapiens
ggaactgagcaggca

SEQ ID NO: 287132 - DNA, 15 bp, Homo sapiens
gggaactgagcaggc

SEQ ID NO: 287133 - DNA, 15 bp, Homo sapiens
ggggaactgagcagg

SEQ ID NO: 287134 - DNA, 15 bp, Homo sapiens
gggggaactgagcag

SEQ ID NO: 287135 - DNA, 15 bp, Homo sapiens
tgggggaactgagca

SEQ ID NO: 287136 - DNA, 15 bp, Homo sapiens
ctgggggaactgagc

SEQ ID NO: 287137 - DNA, 15 bp, Homo sapiens
gctgggggaactgag

SEQ ID NO: 287138 - DNA, 15 bp, Homo sapiens
agctgggggaactga

SEQ ID NO: 287139 - DNA, 15 bp, Homo sapiens
cagctgggggaactg

SEQ ID NO: 287140 - DNA, 15 bp, Homo sapiens
acagctgggggaact

SEQ ID NO: 287141 - DNA, 15 bp, Homo sapiens
tacagctgggggaac

SEQ ID NO: 287142 - DNA, 15 bp, Homo sapiens
atacagctgggggaa

SEQ ID NO: 287143 - DNA, 15 bp, Homo sapiens
aatacagctggggga

SEQ ID NO: 287144 - DNA, 15 bp, Homo sapiens
taatacagctggggg

SEQ ID NO: 287145 - DNA, 15 bp, Homo sapiens
ataatacagctgggg

SEQ ID NO: 287146 - DNA, 15 bp, Homo sapiens
aataatacagctggg

SEQ ID NO: 287147 - DNA, 15 bp, Homo sapiens
aaataatacagctgg

SEQ ID NO: 287148 - DNA, 15 bp, Homo sapiens
aaaataatacagctg

SEQ ID NO: 287149 - DNA, 15 bp, Homo sapiens
caaaataatacagct

SEQ ID NO: 287150 - DNA, 15 bp, Homo sapiens
tcaaaataatacagc

SEQ ID NO: 287151 - DNA, 15 bp, Homo sapiens
ttcaaaataatacag

SEQ ID NO: 287152 - DNA, 15 bp, Homo sapiens
cttcaaaataataca

SEQ ID NO: 287153 - DNA, 15 bp, Homo sapiens
gcttcaaaataatac

SEQ ID NO: 287154 - DNA, 15 bp, Homo sapiens
tgcttcaaaataata

SEQ ID NO: 287155 - DNA, 15 bp, Homo sapiens
gtgcttcaaaataat

SEQ ID NO: 287156 - DNA, 15 bp, Homo sapiens
tgtgcttcaaaataa

SEQ ID NO: 287157 - DNA, 15 bp, Homo sapiens
atgtgcttcaaaata

SEQ ID NO: 287158 - DNA, 15 bp, Homo sapiens
gatgtgcttcaaaat

SEQ ID NO: 287159 - DNA, 15 bp, Homo sapiens
agatgtgcttcaaaa

SEQ ID NO: 287160 - DNA, 15 bp, Homo sapiens
aagatgtgcttcaaa

SEQ ID NO: 287161 - DNA, 15 bp, Homo sapiens
aaagatgtgcttcaa

SEQ ID NO: 287162 - DNA, 15 bp, Homo sapiens
caaagatgtgcttca

SEQ ID NO: 287163 - DNA, 15 bp, Homo sapiens
gcaaagatgtgcttc

SEQ ID NO: 287164 - DNA, 15 bp, Homo sapiens
tgcaaagatgtgctt

SEQ ID NO: 287165 - DNA, 15 bp, Homo sapiens
atgcaaagatgtgct

SEQ ID NO: 287166 - DNA, 15 bp, Homo sapiens
tatgcaaagatgtgc

SEQ ID NO: 287167 - DNA, 15 bp, Homo sapiens
gtatgcaaagatgtg

SEQ ID NO: 287168 - DNA, 15 bp, Homo sapiens
ggtatgcaaagatgt

SEQ ID NO: 287169 - DNA, 15 bp, Homo sapiens
tggtatgcaaagatg

SEQ ID NO: 287170 - DNA, 15 bp, Homo sapiens
atggtatgcaaagat

SEQ ID NO: 287171 - DNA, 15 bp, Homo sapiens
aatggtatgcaaaga

SEQ ID NO: 287172 - DNA, 15 bp, Homo sapiens
aaatggtatgcaaag

SEQ ID NO: 287173 - DNA, 15 bp, Homo sapiens
gaaatggtatgcaaa

SEQ ID NO: 287174 - DNA, 15 bp, Homo sapiens
tgaaatggtatgcaa

SEQ ID NO: 287175 - DNA, 15 bp, Homo sapiens
atgaaatggtatgca

SEQ ID NO: 287176 - DNA, 15 bp, Homo sapiens
gatgaaatggtatgc

SEQ ID NO: 287177 - DNA, 15 bp, Homo sapiens
ggatgaaatggtatg

SEQ ID NO: 287178 - DNA, 15 bp, Homo sapiens
aggatgaaatggtat

SEQ ID NO: 287179 - DNA, 15 bp, Homo sapiens
aaggatgaaatggta

SEQ ID NO: 287180 - DNA, 15 bp, Homo sapiens
taaggatgaaatggt

SEQ ID NO: 287181 - DNA, 15 bp, Homo sapiens
ataaggatgaaatgg

SEQ ID NO: 287182 - DNA, 15 bp, Homo sapiens
tataaggatgaaatg

SEQ ID NO: 287183 - DNA, 15 bp, Homo sapiens
gtataaggatgaaat

SEQ ID NO: 287184 - DNA, 15 bp, Homo sapiens
tgtataaggatgaaa

SEQ ID NO: 287185 - DNA, 15 bp, Homo sapiens
atgtataaggatgaa

SEQ ID NO: 287186 - DNA, 15 bp, Homo sapiens
gatgtataaggatga

SEQ ID NO: 287187 - DNA, 15 bp, Homo sapiens
agatgtataaggatg

SEQ ID NO: 287188 - DNA, 15 bp, Homo sapiens
gagatgtataaggat

SEQ ID NO: 287189 - DNA, 15 bp, Homo sapiens
tgagatgtataagga

SEQ ID NO: 287190 - DNA, 15 bp, Homo sapiens
ctgagatgtataagg

SEQ ID NO: 287191 - DNA, 15 bp, Homo sapiens
actgagatgtataag

SEQ ID NO: 287192 - DNA, 15 bp, Homo sapiens
tactgagatgtataa

SEQ ID NO: 287193 - DNA, 15 bp, Homo sapiens
atactgagatgtata

SEQ ID NO: 287194 - DNA, 15 bp, Homo sapiens
tatactgagatgtat

SEQ ID NO: 287195 - DNA, 15 bp, Homo sapiens
atatactgagatgta

SEQ ID NO: 287196 - DNA, 15 bp, Homo sapiens
tatatactgagatgt

SEQ ID NO: 287197 - DNA, 15 bp, Homo sapiens
atatatactgagatg

SEQ ID NO: 287198 - DNA, 15 bp, Homo sapiens
gatatatactgagat

SEQ ID NO: 287199 - DNA, 15 bp, Homo sapiens
agatatatactgaga

SEQ ID NO: 287200 - DNA, 15 bp, Homo sapiens
gagatatatactgag

SEQ ID NO: 287201 - DNA, 15 bp, Homo sapiens
agagatatatactga

SEQ ID NO: 287202 - DNA, 15 bp, Homo sapiens
tagagatatatactg

SEQ ID NO: 287203 - DNA, 15 bp, Homo sapiens
ttagagatatatact

SEQ ID NO: 287204 - DNA, 15 bp, Homo sapiens
tttagagatatatac

SEQ ID NO: 287205 - DNA, 15 bp, Homo sapiens
ttttagagatatata

SEQ ID NO: 287206 - DNA, 15 bp, Homo sapiens
tttttagagatatat

SEQ ID NO: 287207 - DNA, 15 bp, Homo sapiens
ttttttagagatata

SEQ ID NO: 287208 - DNA, 15 bp, Homo sapiens
attttttagagatat

SEQ ID NO: 287209 - DNA, 15 bp, Homo sapiens
tattttttagagata

SEQ ID NO: 287210 - DNA, 15 bp, Homo sapiens
gtattttttagagat

SEQ ID NO: 287211 - DNA, 15 bp, Homo sapiens
agtattttttagaga

SEQ ID NO: 287212 - DNA, 15 bp, Homo sapiens
aagtattttttagag

SEQ ID NO: 287213 - DNA, 15 bp, Homo sapiens
aaagtattttttaga

SEQ ID NO: 287214 - DNA, 15 bp, Homo sapiens
aaaagtattttttag

SEQ ID NO: 287215 - DNA, 15 bp, Homo sapiens
aaaaagtatttttta

SEQ ID NO: 287216 - DNA, 15 bp, Homo sapiens
taaaaagtatttttt

SEQ ID NO: 287217 - DNA, 15 bp, Homo sapiens
ttaaaaagtattttt

SEQ ID NO: 287218 - DNA, 15 bp, Homo sapiens
tttaaaaagtatttt

SEQ ID NO: 287219 - DNA, 15 bp, Homo sapiens
ttttaaaaagtattt

SEQ ID NO: 287220 - DNA, 15 bp, Homo sapiens
tttttaaaaagtatt

SEQ ID NO: 287221 - DNA, 15 bp, Homo sapiens
ctttttaaaaagtat

SEQ ID NO: 287222 - DNA, 15 bp, Homo sapiens
gctttttaaaaagta

SEQ ID NO: 287223 - DNA, 15 bp, Homo sapiens
tgctttttaaaaagt

SEQ ID NO: 287224 - DNA, 15 bp, Homo sapiens
atgctttttaaaaag

SEQ ID NO: 287225 - DNA, 15 bp, Homo sapiens
tatgctttttaaaaa

SEQ ID NO: 287226 - DNA, 15 bp, Homo sapiens
ttatgctttttaaaa

SEQ ID NO: 287227 - DNA, 15 bp, Homo sapiens
attatgctttttaaa

SEQ ID NO: 287228 - DNA, 15 bp, Homo sapiens
aattatgctttttaa

SEQ ID NO: 287229 - DNA, 15 bp, Homo sapiens
taattatgcttttta

SEQ ID NO: 287230 - DNA, 15 bp, Homo sapiens
gtaattatgcttttt

SEQ ID NO: 287231 - DNA, 15 bp, Homo sapiens
tgtaattatgctttt

SEQ ID NO: 287232 - DNA, 15 bp, Homo sapiens
ctgtaattatgcttt

SEQ ID NO: 287233 - DNA, 15 bp, Homo sapiens
actgtaattatgctt

SEQ ID NO: 287234 - DNA, 15 bp, Homo sapiens
cactgtaattatgct

SEQ ID NO: 287235 - DNA, 15 bp, Homo sapiens
gcactgtaattatgc

SEQ ID NO: 287236 - DNA, 15 bp, Homo sapiens
agcactgtaattatg

SEQ ID NO: 287237 - DNA, 15 bp, Homo sapiens
gagcactgtaattat

SEQ ID NO: 287238 - DNA, 15 bp, Homo sapiens
agagcactgtaatta

SEQ ID NO: 287239 - DNA, 15 bp, Homo sapiens
aagagcactgtaatt

SEQ ID NO: 287240 - DNA, 15 bp, Homo sapiens
aaagagcactgtaat

SEQ ID NO: 287241 - DNA, 15 bp, Homo sapiens
caaagagcactgtaa

SEQ ID NO: 287242 - DNA, 15 bp, Homo sapiens
acaaagagcactgta

SEQ ID NO: 287243 - DNA, 15 bp, Homo sapiens
aacaaagagcactgt

SEQ ID NO: 287244 - DNA, 15 bp, Homo sapiens
taacaaagagcactg

SEQ ID NO: 287245 - DNA, 15 bp, Homo sapiens
ataacaaagagcact

SEQ ID NO: 287246 - DNA, 15 bp, Homo sapiens
gataacaaagagcac

SEQ ID NO: 287247 - DNA, 15 bp, Homo sapiens
tgataacaaagagca

SEQ ID NO: 287248 - DNA, 15 bp, Homo sapiens
gtgataacaaagagc

SEQ ID NO: 287249 - DNA, 15 bp, Homo sapiens
tgtgataacaaagag

SEQ ID NO: 287250 - DNA, 15 bp, Homo sapiens
gtgtgataacaaaga

SEQ ID NO: 287251 - DNA, 15 bp, Homo sapiens
ggtgtgataacaaag

SEQ ID NO: 287252 - DNA, 15 bp, Homo sapiens
aggtgtgataacaaa

SEQ ID NO: 287253 - DNA, 15 bp, Homo sapiens
taggtgtgataacaa

SEQ ID NO: 287254 - DNA, 15 bp, Homo sapiens
gtaggtgtgataaca

SEQ ID NO: 287255 - DNA, 15 bp, Homo sapiens
tgtaggtgtgataac

SEQ ID NO: 287256 - DNA, 15 bp, Homo sapiens
ttgtaggtgtgataa

SEQ ID NO: 287257 - DNA, 15 bp, Homo sapiens
tttgtaggtgtgata

SEQ ID NO: 287258 - DNA, 15 bp, Homo sapiens
atttgtaggtgtgat

SEQ ID NO: 287259 - DNA, 15 bp, Homo sapiens
gatttgtaggtgtga

SEQ ID NO: 287260 - DNA, 15 bp, Homo sapiens
tgatttgtaggtgtg

SEQ ID NO: 287261 - DNA, 15 bp, Homo sapiens
ttgatttgtaggtgt

SEQ ID NO: 287262 - DNA, 15 bp, Homo sapiens
attgatttgtaggtg

SEQ ID NO: 287263 - DNA, 15 bp, Homo sapiens
tattgatttgtaggt

SEQ ID NO: 287264 - DNA, 15 bp, Homo sapiens
ttattgatttgtagg

SEQ ID NO: 287265 - DNA, 15 bp, Homo sapiens
tttattgatttgtag

SEQ ID NO: 287266 - DNA, 15 bp, Homo sapiens
atttattgatttgta

SEQ ID NO: 287267 - DNA, 15 bp, Homo sapiens
tatttattgatttgt

SEQ ID NO: 287268 - DNA, 15 bp, Homo sapiens
ctatttattgatttg

SEQ ID NO: 287269 - DNA, 15 bp, Homo sapiens
actatttattgattt

SEQ ID NO: 287270 - DNA, 15 bp, Homo sapiens
cactatttattgatt

SEQ ID NO: 287271 - DNA, 15 bp, Homo sapiens
tcactatttattgat

SEQ ID NO: 287272 - DNA, 15 bp, Homo sapiens
gtcactatttattga

SEQ ID NO: 287273 - DNA, 15 bp, Homo sapiens
agtcactatttattg

SEQ ID NO: 287274 - DNA, 15 bp, Homo sapiens
gagtcactatttatt

SEQ ID NO: 287275 - DNA, 15 bp, Homo sapiens
ggagtcactatttat

SEQ ID NO: 287276 - DNA, 15 bp, Homo sapiens
aggagtcactattta

SEQ ID NO: 287277 - DNA, 15 bp, Homo sapiens
aaggagtcactattt

SEQ ID NO: 287278 - DNA, 15 bp, Homo sapiens
taaggagtcactatt

SEQ ID NO: 287279 - DNA, 15 bp, Homo sapiens
ttaaggagtcactat

SEQ ID NO: 287280 - DNA, 15 bp, Homo sapiens
attaaggagtcacta

SEQ ID NO: 287281 - DNA, 15 bp, Homo sapiens
tattaaggagtcact

SEQ ID NO: 287282 - DNA, 15 bp, Homo sapiens
atattaaggagtcac

SEQ ID NO: 287283 - DNA, 15 bp, Homo sapiens
aatattaaggagtca

SEQ ID NO: 287284 - DNA, 15 bp, Homo sapiens
taatattaaggagtc

SEQ ID NO: 287285 - DNA, 15 bp, Homo sapiens
gtaatattaaggagt

SEQ ID NO: 287286 - DNA, 15 bp, Homo sapiens
agtaatattaaggag

SEQ ID NO: 287287 - DNA, 15 bp, Homo sapiens
cagtaatattaagga

SEQ ID NO: 287288 - DNA, 15 bp, Homo sapiens
tcagtaatattaagg

SEQ ID NO: 287289 - DNA, 15 bp, Homo sapiens
ttcagtaatattaag

SEQ ID NO: 287290 - DNA, 15 bp, Homo sapiens
attcagtaatattaa

SEQ ID NO: 287291 - DNA, 15 bp, Homo sapiens
tattcagtaatatta

SEQ ID NO: 287292 - DNA, 15 bp, Homo sapiens
atattcagtaatatt

SEQ ID NO: 287293 - DNA, 15 bp, Homo sapiens
gatattcagtaatat

SEQ ID NO: 287294 - DNA, 15 bp, Homo sapiens
agatattcagtaata

SEQ ID NO: 287295 - DNA, 15 bp, Homo sapiens
tagatattcagtaat

SEQ ID NO: 287296 - DNA, 15 bp, Homo sapiens
ctagatattcagtaa

SEQ ID NO: 287297 - DNA, 15 bp, Homo sapiens
tctagatattcagta

SEQ ID NO: 287298 - DNA, 15 bp, Homo sapiens
ttctagatattcagt

SEQ ID NO: 287299 - DNA, 15 bp, Homo sapiens
tttctagatattcag

SEQ ID NO: 287300 - DNA, 15 bp, Homo sapiens
ctttctagatattca

SEQ ID NO: 287301 - DNA, 15 bp, Homo sapiens
actttctagatattc

SEQ ID NO: 287302 - DNA, 15 bp, Homo sapiens
cactttctagatatt

SEQ ID NO: 287303 - DNA, 15 bp, Homo sapiens
gcactttctagatat

SEQ ID NO: 287304 - DNA, 15 bp, Homo sapiens
agcactttctagata

SEQ ID NO: 287305 - DNA, 15 bp, Homo sapiens
gagcactttctagat

SEQ ID NO: 287306 - DNA, 15 bp, Homo sapiens
tgagcactttctaga

SEQ ID NO: 287307 - DNA, 15 bp, Homo sapiens
ctgagcactttctag

SEQ ID NO: 287308 - DNA, 15 bp, Homo sapiens
tctgagcactttcta

SEQ ID NO: 287309 - DNA, 15 bp, Homo sapiens
atctgagcactttct

SEQ ID NO: 287310 - DNA, 15 bp, Homo sapiens
aatctgagcactttc

SEQ ID NO: 287311 - DNA, 15 bp, Homo sapiens
aaatctgagcacttt

SEQ ID NO: 287312 - DNA, 15 bp, Homo sapiens
aaaatctgagcactt

SEQ ID NO: 287313 - DNA, 15 bp, Homo sapiens
gaaaatctgagcact

SEQ ID NO: 287314 - DNA, 15 bp, Homo sapiens
agaaaatctgagcac

SEQ ID NO: 287315 - DNA, 15 bp, Homo sapiens
aagaaaatctgagca

SEQ ID NO: 287316 - DNA, 15 bp, Homo sapiens
caagaaaatctgagc

SEQ ID NO: 287317 - DNA, 15 bp, Homo sapiens
acaagaaaatctgag

SEQ ID NO: 287318 - DNA, 15 bp, Homo sapiens
tacaagaaaatctga

SEQ ID NO: 287319 - DNA, 15 bp, Homo sapiens
ttacaagaaaatctg

SEQ ID NO: 287320 - DNA, 15 bp, Homo sapiens
tttacaagaaaatct

SEQ ID NO: 287321 - DNA, 15 bp, Homo sapiens
ttttacaagaaaatc

SEQ ID NO: 287322 - DNA, 15 bp, Homo sapiens
tttttacaagaaaat

SEQ ID NO: 287323 - DNA, 15 bp, Homo sapiens
atttttacaagaaaa

SEQ ID NO: 287324 - DNA, 15 bp, Homo sapiens
tatttttacaagaaa

SEQ ID NO: 287325 - DNA, 15 bp, Homo sapiens
ttatttttacaagaa

SEQ ID NO: 287326 - DNA, 15 bp, Homo sapiens
attatttttacaaga

SEQ ID NO: 287327 - DNA, 15 bp, Homo sapiens
aattatttttacaag

SEQ ID NO: 287328 - DNA, 15 bp, Homo sapiens
taattatttttacaa

SEQ ID NO: 287329 - DNA, 15 bp, Homo sapiens
ttaattatttttaca

SEQ ID NO: 287330 - DNA, 15 bp, Homo sapiens
tttaattatttttac

SEQ ID NO: 287331 - DNA, 15 bp, Homo sapiens
ttttaattattttta

SEQ ID NO: 287332 - DNA, 15 bp, Homo sapiens
tttttaattattttt

SEQ ID NO: 287333 - DNA, 15 bp, Homo sapiens
ttttttaattatttt

SEQ ID NO: 287334 - DNA, 15 bp, Homo sapiens
attttttaattattt

SEQ ID NO: 287335 - DNA, 15 bp, Homo sapiens
aattttttaattatt

SEQ ID NO: 287336 - DNA, 15 bp, Homo sapiens
aaattttttaattat

SEQ ID NO: 287337 - DNA, 15 bp, Homo sapiens
aaaattttttaatta

SEQ ID NO: 287338 - DNA, 15 bp, Homo sapiens
aaaaattttttaatt

SEQ ID NO: 287339 - DNA, 15 bp, Homo sapiens
aaaaaattttttaat

SEQ ID NO: 287340 - DNA, 15 bp, Homo sapiens
aaaaaaattttttaa

SEQ ID NO: 287341 - DNA, 15 bp, Homo sapiens
taaaaaaatttttta

SEQ ID NO: 287342 - DNA, 15 bp, Homo sapiens
gtaaaaaaatttttt

SEQ ID NO: 287343 - DNA, 15 bp, Homo sapiens
tgtaaaaaaattttt

SEQ ID NO: 287344 - DNA, 15 bp, Homo sapiens
ctgtaaaaaaatttt

SEQ ID NO: 287345 - DNA, 15 bp, Homo sapiens
actgtaaaaaaattt

SEQ ID NO: 287346 - DNA, 15 bp, Homo sapiens
aactgtaaaaaaatt

SEQ ID NO: 287347 - DNA, 15 bp, Homo sapiens
aaactgtaaaaaaat

SEQ ID NO: 287348 - DNA, 15 bp, Homo sapiens
caaactgtaaaaaaa

SEQ ID NO: 287349 - DNA, 15 bp, Homo sapiens
tcaaactgtaaaaaa

SEQ ID NO: 287350 - DNA, 15 bp, Homo sapiens
ttcaaactgtaaaaa

SEQ ID NO: 287351 - DNA, 15 bp, Homo sapiens
attcaaactgtaaaa

SEQ ID NO: 287352 - DNA, 15 bp, Homo sapiens
cattcaaactgtaaa

SEQ ID NO: 287353 - DNA, 15 bp, Homo sapiens
tcattcaaactgtaa

SEQ ID NO: 287354 - DNA, 15 bp, Homo sapiens
ctcattcaaactgta

SEQ ID NO: 287355 - DNA, 15 bp, Homo sapiens
tctcattcaaactgt

SEQ ID NO: 287356 - DNA, 15 bp, Homo sapiens
ttctcattcaaactg

SEQ ID NO: 287357 - DNA, 15 bp, Homo sapiens
attctcattcaaact

SEQ ID NO: 287358 - DNA, 15 bp, Homo sapiens
gattctcattcaaac

SEQ ID NO: 287359 - DNA, 15 bp, Homo sapiens
agattctcattcaaa

SEQ ID NO: 287360 - DNA, 15 bp, Homo sapiens
tagattctcattcaa

SEQ ID NO: 287361 - DNA, 15 bp, Homo sapiens
ttagattctcattca

SEQ ID NO: 287362 - DNA, 15 bp, Homo sapiens
tttagattctcattc

SEQ ID NO: 287363 - DNA, 15 bp, Homo sapiens
atttagattctcatt

SEQ ID NO: 287364 - DNA, 15 bp, Homo sapiens
tatttagattctcat

SEQ ID NO: 287365 - DNA, 15 bp, Homo sapiens
ttatttagattctca

SEQ ID NO: 287366 - DNA, 15 bp, Homo sapiens
cttatttagattctc

SEQ ID NO: 287367 - DNA, 15 bp, Homo sapiens
tcttatttagattct

SEQ ID NO: 287368 - DNA, 15 bp, Homo sapiens
atcttatttagattc

SEQ ID NO: 287369 - DNA, 15 bp, Homo sapiens
aatcttatttagatt

SEQ ID NO: 287370 - DNA, 15 bp, Homo sapiens
aaatcttatttagat

SEQ ID NO: 287371 - DNA, 15 bp, Homo sapiens
taaatcttatttaga

SEQ ID NO: 287372 - DNA, 15 bp, Homo sapiens
ataaatcttatttag

SEQ ID NO: 287373 - DNA, 15 bp, Homo sapiens
tataaatcttattta

SEQ ID NO: 287374 - DNA, 15 bp, Homo sapiens
gtataaatcttattt

SEQ ID NO: 287375 - DNA, 15 bp, Homo sapiens
agtataaatcttatt

SEQ ID NO: 287376 - DNA, 15 bp, Homo sapiens
aagtataaatcttat

SEQ ID NO: 287377 - DNA, 15 bp, Homo sapiens
ataccaatcattaag

SEQ ID NO: 287378 - DNA, 15 bp, Homo sapiens
tataccaatcattaa

SEQ ID NO: 287379 - DNA, 15 bp, Homo sapiens
gtataccaatcatta

SEQ ID NO: 287380 - DNA, 15 bp, Homo sapiens
ggtataccaatcatt

SEQ ID NO: 287381 - DNA, 15 bp, Homo sapiens
aggtataccaatcat

SEQ ID NO: 287382 - DNA, 15 bp, Homo sapiens
gaggtataccaatca

SEQ ID NO: 287383 - DNA, 15 bp, Homo sapiens
agaggtataccaatc

SEQ ID NO: 287384 - DNA, 15 bp, Homo sapiens
aagaggtataccaat

SEQ ID NO: 287385 - DNA, 15 bp, Homo sapiens
aaagaggtataccaa

SEQ ID NO: 287386 - DNA, 15 bp, Homo sapiens
caaagaggtatacca

SEQ ID NO: 287387 - DNA, 15 bp, Homo sapiens
acaaagaggtatacc

SEQ ID NO: 287388 - DNA, 15 bp, Homo sapiens
gacaaagaggtatac

SEQ ID NO: 287389 - DNA, 15 bp, Homo sapiens
tgacaaagaggtata

SEQ ID NO: 287390 - DNA, 15 bp, Homo sapiens
atgacaaagaggtat

SEQ ID NO: 287391 - DNA, 15 bp, Homo sapiens
tatgacaaagaggta

SEQ ID NO: 287392 - DNA, 15 bp, Homo sapiens
ttatgacaaagaggt

SEQ ID NO: 287393 - DNA, 15 bp, Homo sapiens
tttatgacaaagagg

SEQ ID NO: 287394 - DNA, 15 bp, Homo sapiens
gtttatgacaaagag

SEQ ID NO: 287395 - DNA, 15 bp, Homo sapiens
tgtttatgacaaaga

SEQ ID NO: 287396 - DNA, 15 bp, Homo sapiens
atgtttatgacaaag

SEQ ID NO: 287397 - DNA, 15 bp, Homo sapiens
tatgtttatgacaaa

SEQ ID NO: 287398 - DNA, 15 bp, Homo sapiens
ttatgtttatgacaa

SEQ ID NO: 287399 - DNA, 15 bp, Homo sapiens
attatgtttatgaca

SEQ ID NO: 287400 - DNA, 15 bp, Homo sapiens
cattatgtttatgac

SEQ ID NO: 287401 - DNA, 15 bp, Homo sapiens
ccattatgtttatga

SEQ ID NO: 287402 - DNA, 15 bp, Homo sapiens
tccattatgtttatg

SEQ ID NO: 287403 - DNA, 15 bp, Homo sapiens
ttccattatgtttat

SEQ ID NO: 287404 - DNA, 15 bp, Homo sapiens
tttccattatgttta

SEQ ID NO: 287405 - DNA, 15 bp, Homo sapiens
ctttccattatgttt

SEQ ID NO: 287406 - DNA, 15 bp, Homo sapiens
tctttccattatgtt

SEQ ID NO: 287407 - DNA, 15 bp, Homo sapiens
ctctttccattatgt

SEQ ID NO: 287408 - DNA, 15 bp, Homo sapiens
tctctttccattatg

SEQ ID NO: 287409 - DNA, 15 bp, Homo sapiens
gtctctttccattat

SEQ ID NO: 287410 - DNA, 15 bp, Homo sapiens
ggtctctttccatta

SEQ ID NO: 287411 - DNA, 15 bp, Homo sapiens
gggtctctttccatt

SEQ ID NO: 287412 - DNA, 15 bp, Homo sapiens
tgggtctctttccat

SEQ ID NO: 287413 - DNA, 15 bp, Homo sapiens
gtgggtctctttcca

SEQ ID NO: 287414 - DNA, 15 bp, Homo sapiens
tgtgggtctctttcc

SEQ ID NO: 287415 - DNA, 15 bp, Homo sapiens
ttgtgggtctctttc

SEQ ID NO: 287416 - DNA, 15 bp, Homo sapiens
attgtgggtctcttt

SEQ ID NO: 287417 - DNA, 15 bp, Homo sapiens
aattgtgggtctctt

SEQ ID NO: 287418 - DNA, 15 bp, Homo sapiens
taattgtgggtctct

SEQ ID NO: 287419 - DNA, 15 bp, Homo sapiens
ttaattgtgggtctc

SEQ ID NO: 287420 - DNA, 15 bp, Homo sapiens
tttaattgtgggtct

SEQ ID NO: 287421 - DNA, 15 bp, Homo sapiens
ttttaattgtgggtc

SEQ ID NO: 287422 - DNA, 15 bp, Homo sapiens
tttttaattgtgggt

SEQ ID NO: 287423 - DNA, 15 bp, Homo sapiens
ctttttaattgtggg

SEQ ID NO: 287424 - DNA, 15 bp, Homo sapiens
tctttttaattgtgg

SEQ ID NO: 287425 - DNA, 15 bp, Homo sapiens
ctctttttaattgtg

SEQ ID NO: 287426 - DNA, 15 bp, Homo sapiens
actctttttaattgt

SEQ ID NO: 287427 - DNA, 15 bp, Homo sapiens
tactctttttaattg

SEQ ID NO: 287428 - DNA, 15 bp, Homo sapiens
ctactctttttaatt

SEQ ID NO: 287429 - DNA, 15 bp, Homo sapiens
actactctttttaat

SEQ ID NO: 287430 - DNA, 15 bp, Homo sapiens
cactactctttttaa

SEQ ID NO: 287431 - DNA, 15 bp, Homo sapiens
tcactactcttttta

SEQ ID NO: 287432 - DNA, 15 bp, Homo sapiens
ttcactactcttttt

SEQ ID NO: 287433 - DNA, 15 bp, Homo sapiens
tttcactactctttt

SEQ ID NO: 287434 - DNA, 15 bp, Homo sapiens
ttttcactactcttt

SEQ ID NO: 287435 - DNA, 15 bp, Homo sapiens
tttttcactactctt

SEQ ID NO: 287436 - DNA, 15 bp, Homo sapiens
atttttcactactct

SEQ ID NO: 287437 - DNA, 15 bp, Homo sapiens
tatttttcactactc

SEQ ID NO: 287438 - DNA, 15 bp, Homo sapiens
atatttttcactact

SEQ ID NO: 287439 - DNA, 15 bp, Homo sapiens
aatatttttcactac

SEQ ID NO: 287440 - DNA, 15 bp, Homo sapiens
aaatatttttcacta

SEQ ID NO: 287441 - DNA, 15 bp, Homo sapiens
aaaatatttttcact

SEQ ID NO: 287442 - DNA, 15 bp, Homo sapiens
taaaatatttttcac

SEQ ID NO: 287443 - DNA, 15 bp, Homo sapiens
ataaaatatttttca

SEQ ID NO: 287444 - DNA, 15 bp, Homo sapiens
aataaaatatttttc

SEQ ID NO: 287445 - DNA, 15 bp, Homo sapiens
aaataaaatattttt

SEQ ID NO: 287446 - DNA, 15 bp, Homo sapiens
taaataaaatatttt

SEQ ID NO: 287447 - DNA, 15 bp, Homo sapiens
ttaaataaaatattt

SEQ ID NO: 287448 - DNA, 15 bp, Homo sapiens
cttaaataaaatatt

SEQ ID NO: 287449 - DNA, 15 bp, Homo sapiens
gcttaaataaaatat

SEQ ID NO: 287450 - DNA, 15 bp, Homo sapiens
tgcttaaataaaata

SEQ ID NO: 287451 - DNA, 15 bp, Homo sapiens
ctgcttaaataaaat

SEQ ID NO: 287452 - DNA, 15 bp, Homo sapiens
gctgcttaaataaaa

SEQ ID NO: 287453 - DNA, 15 bp, Homo sapiens
tgctgcttaaataaa

SEQ ID NO: 287454 - DNA, 15 bp, Homo sapiens
ctgctgcttaaataa

SEQ ID NO: 287455 - DNA, 15 bp, Homo sapiens
gctgctgcttaaata

SEQ ID NO: 287456 - DNA, 15 bp, Homo sapiens
agctgctgcttaaat

SEQ ID NO: 287457 - DNA, 15 bp, Homo sapiens
cagctgctgcttaaa

SEQ ID NO: 287458 - DNA, 15 bp, Homo sapiens
ccagctgctgcttaa

SEQ ID NO: 287459 - DNA, 15 bp, Homo sapiens
cccagctgctgctta

SEQ ID NO: 287460 - DNA, 15 bp, Homo sapiens
acccagctgctgctt

SEQ ID NO: 287461 - DNA, 15 bp, Homo sapiens
gacccagctgctgct

SEQ ID NO: 287462 - DNA, 15 bp, Homo sapiens
tgacccagctgctgc

SEQ ID NO: 287463 - DNA, 15 bp, Homo sapiens
atgacccagctgctg

SEQ ID NO: 287464 - DNA, 15 bp, Homo sapiens
gatgacccagctgct

SEQ ID NO: 287465 - DNA, 15 bp, Homo sapiens
agatgacccagctgc

SEQ ID NO: 287466 - DNA, 15 bp, Homo sapiens
tagatgacccagctg

SEQ ID NO: 287467 - DNA, 15 bp, Homo sapiens
atagatgacccagct

SEQ ID NO: 287468 - DNA, 15 bp, Homo sapiens
aatagatgacccagc

SEQ ID NO: 287469 - DNA, 15 bp, Homo sapiens
aaatagatgacccag

SEQ ID NO: 287470 - DNA, 15 bp, Homo sapiens
aaaatagatgaccca

SEQ ID NO: 287471 - DNA, 15 bp, Homo sapiens
gaaaatagatgaccc

SEQ ID NO: 287472 - DNA, 15 bp, Homo sapiens
agaaaatagatgacc

SEQ ID NO: 287473 - DNA, 15 bp, Homo sapiens
tagaaaatagatgac

SEQ ID NO: 287474 - DNA, 15 bp, Homo sapiens
atagaaaatagatga

SEQ ID NO: 287475 - DNA, 15 bp, Homo sapiens
gatagaaaatagatg

SEQ ID NO: 287476 - DNA, 15 bp, Homo sapiens
ggatagaaaatagat

SEQ ID NO: 287477 - DNA, 15 bp, Homo sapiens
aggatagaaaataga

SEQ ID NO: 287478 - DNA, 15 bp, Homo sapiens
taggatagaaaatag

SEQ ID NO: 287479 - DNA, 15 bp, Homo sapiens
ataggatagaaaata

SEQ ID NO: 287480 - DNA, 15 bp, Homo sapiens
gataggatagaaaat

SEQ ID NO: 287481 - DNA, 15 bp, Homo sapiens
agataggatagaaaa

SEQ ID NO: 287482 - DNA, 15 bp, Homo sapiens
tagataggatagaaa

SEQ ID NO: 287483 - DNA, 15 bp, Homo sapiens
atagataggatagaa

SEQ ID NO: 287484 - DNA, 15 bp, Homo sapiens
aatagataggataga

SEQ ID NO: 287485 - DNA, 15 bp, Homo sapiens
taatagataggatag

SEQ ID NO: 287486 - DNA, 15 bp, Homo sapiens
ataatagataggata

SEQ ID NO: 287487 - DNA, 15 bp, Homo sapiens
aataatagataggat

SEQ ID NO: 287488 - DNA, 15 bp, Homo sapiens
caataatagatagga

SEQ ID NO: 287489 - DNA, 15 bp, Homo sapiens
tcaataatagatagg

SEQ ID NO: 287490 - DNA, 15 bp, Homo sapiens
ctcaataatagatag

SEQ ID NO: 287491 - DNA, 15 bp, Homo sapiens
actcaataatagata

SEQ ID NO: 287492 - DNA, 15 bp, Homo sapiens
aactcaataatagat

SEQ ID NO: 287493 - DNA, 15 bp, Homo sapiens
taactcaataataga

SEQ ID NO: 287494 - DNA, 15 bp, Homo sapiens
ataactcaataatag

SEQ ID NO: 287495 - DNA, 15 bp, Homo sapiens
gataactcaataata

SEQ ID NO: 287496 - DNA, 15 bp, Homo sapiens
tgataactcaataat

SEQ ID NO: 287497 - DNA, 15 bp, Homo sapiens
atgataactcaataa

SEQ ID NO: 287498 - DNA, 15 bp, Homo sapiens
aatgataactcaata

SEQ ID NO: 287499 - DNA, 15 bp, Homo sapiens
aaatgataactcaat

SEQ ID NO: 287500 - DNA, 15 bp, Homo sapiens
aaaatgataactcaa

SEQ ID NO: 287501 - DNA, 15 bp, Homo sapiens
taaaatgataactca

SEQ ID NO: 287502 - DNA, 15 bp, Homo sapiens
ataaaatgataactc

SEQ ID NO: 287503 - DNA, 15 bp, Homo sapiens
tataaaatgataact

SEQ ID NO: 287504 - DNA, 15 bp, Homo sapiens
atataaaatgataac

SEQ ID NO: 287505 - DNA, 15 bp, Homo sapiens
catataaaatgataa

SEQ ID NO: 287506 - DNA, 15 bp, Homo sapiens
tcatataaaatgata

SEQ ID NO: 287507 - DNA, 15 bp, Homo sapiens
atcatataaaatgat

SEQ ID NO: 287508 - DNA, 15 bp, Homo sapiens
aatcatataaaatga

SEQ ID NO: 287509 - DNA, 15 bp, Homo sapiens
aaatcatataaaatg

SEQ ID NO: 287510 - DNA, 15 bp, Homo sapiens
aaaatcatataaaat

SEQ ID NO: 287511 - DNA, 15 bp, Homo sapiens
taaaatcatataaaa

SEQ ID NO: 287512 - DNA, 15 bp, Homo sapiens
ataaaatcatataaa

SEQ ID NO: 287513 - DNA, 15 bp, Homo sapiens
cataaaatcatataa

SEQ ID NO: 287514 - DNA, 15 bp, Homo sapiens
tcataaaatcatata

SEQ ID NO: 287515 - DNA, 15 bp, Homo sapiens
ctcataaaatcatat

SEQ ID NO: 287516 - DNA, 15 bp, Homo sapiens
tctcataaaatcata

SEQ ID NO: 287517 - DNA, 15 bp, Homo sapiens
gtctcataaaatcat

SEQ ID NO: 287518 - DNA, 15 bp, Homo sapiens
tgtctcataaaatca

SEQ ID NO: 287519 - DNA, 15 bp, Homo sapiens
ttgtctcataaaatc

SEQ ID NO: 287520 - DNA, 15 bp, Homo sapiens
gttgtctcataaaat

SEQ ID NO: 287521 - DNA, 15 bp, Homo sapiens
tgttgtctcataaaa

SEQ ID NO: 287522 - DNA, 15 bp, Homo sapiens
ctgttgtctcataaa

SEQ ID NO: 287523 - DNA, 15 bp, Homo sapiens
tctgttgtctcataa

SEQ ID NO: 287524 - DNA, 15 bp, Homo sapiens
ttctgttgtctcata

SEQ ID NO: 287525 - DNA, 15 bp, Homo sapiens
cttctgttgtctcat

SEQ ID NO: 287526 - DNA, 15 bp, Homo sapiens
gcttctgttgtctca

SEQ ID NO: 287527 - DNA, 15 bp, Homo sapiens
tgcttctgttgtctc

SEQ ID NO: 287528 - DNA, 15 bp, Homo sapiens
atgcttctgttgtct

SEQ ID NO: 287529 - DNA, 15 bp, Homo sapiens
aatgcttctgttgtc

SEQ ID NO: 287530 - DNA, 15 bp, Homo sapiens
taatgcttctgttgt

SEQ ID NO: 287531 - DNA, 15 bp, Homo sapiens
ataatgcttctgttg

SEQ ID NO: 287532 - DNA, 15 bp, Homo sapiens
tataatgcttctgtt

SEQ ID NO: 287533 - DNA, 15 bp, Homo sapiens
gtataatgcttctgt

SEQ ID NO: 287534 - DNA, 15 bp, Homo sapiens
agtataatgcttctg

SEQ ID NO: 287535 - DNA, 15 bp, Homo sapiens
cagtataatgcttct

SEQ ID NO: 287536 - DNA, 15 bp, Homo sapiens
gcagtataatgcttc

SEQ ID NO: 287537 - DNA, 15 bp, Homo sapiens
agcagtataatgctt

SEQ ID NO: 287538 - DNA, 15 bp, Homo sapiens
aagcagtataatgct

SEQ ID NO: 287539 - DNA, 15 bp, Homo sapiens
aaagcagtataatgc

SEQ ID NO: 287540 - DNA, 15 bp, Homo sapiens
aaaagcagtataatg

SEQ ID NO: 287541 - DNA, 15 bp, Homo sapiens
aaaaagcagtataat

SEQ ID NO: 287542 - DNA, 15 bp, Homo sapiens
aaaaaagcagtataa

SEQ ID NO: 287543 - DNA, 15 bp, Homo sapiens
caaaaaagcagtata

SEQ ID NO: 287544 - DNA, 15 bp, Homo sapiens
tcaaaaaagcagtat

SEQ ID NO: 287545 - DNA, 15 bp, Homo sapiens
atcaaaaaagcagta

SEQ ID NO: 287546 - DNA, 15 bp, Homo sapiens
catcaaaaaagcagt

SEQ ID NO: 287547 - DNA, 15 bp, Homo sapiens
gcatcaaaaaagcag

SEQ ID NO: 287548 - DNA, 15 bp, Homo sapiens
tgcatcaaaaaagca

SEQ ID NO: 287549 - DNA, 15 bp, Homo sapiens
atgcatcaaaaaagc

SEQ ID NO: 287550 - DNA, 15 bp, Homo sapiens
tatgcatcaaaaaag

SEQ ID NO: 287551 - DNA, 15 bp, Homo sapiens
ttatgcatcaaaaaa

SEQ ID NO: 287552 - DNA, 15 bp, Homo sapiens
tttatgcatcaaaaa

SEQ ID NO: 287553 - DNA, 15 bp, Homo sapiens
ctttatgcatcaaaa

SEQ ID NO: 287554 - DNA, 15 bp, Homo sapiens
gctttatgcatcaaa

SEQ ID NO: 287555 - DNA, 15 bp, Homo sapiens
tgctttatgcatcaa

SEQ ID NO: 287556 - DNA, 15 bp, Homo sapiens
gtgctttatgcatca

SEQ ID NO: 287557 - DNA, 15 bp, Homo sapiens
tgtgctttatgcatc

SEQ ID NO: 287558 - DNA, 15 bp, Homo sapiens
ttgtgctttatgcat

SEQ ID NO: 287559 - DNA, 15 bp, Homo sapiens
tttgtgctttatgca

SEQ ID NO: 287560 - DNA, 15 bp, Homo sapiens
atttgtgctttatgc

SEQ ID NO: 287561 - DNA, 15 bp, Homo sapiens
aatttgtgctttatg

SEQ ID NO: 287562 - DNA, 15 bp, Homo sapiens
caatttgtgctttat

SEQ ID NO: 287563 - DNA, 15 bp, Homo sapiens
acaatttgtgcttta

SEQ ID NO: 287564 - DNA, 15 bp, Homo sapiens
tacaatttgtgcttt

SEQ ID NO: 287565 - DNA, 15 bp, Homo sapiens
ttacaatttgtgctt

SEQ ID NO: 287566 - DNA, 15 bp, Homo sapiens
tttacaatttgtgct

SEQ ID NO: 287567 - DNA, 15 bp, Homo sapiens
atttacaatttgtgc

SEQ ID NO: 287568 - DNA, 15 bp, Homo sapiens
aatttacaatttgtg

SEQ ID NO: 287569 - DNA, 15 bp, Homo sapiens
aaatttacaatttgt

SEQ ID NO: 287570 - DNA, 15 bp, Homo sapiens
aaaatttacaatttg

SEQ ID NO: 287571 - DNA, 15 bp, Homo sapiens
gaaaatttacaattt

SEQ ID NO: 287572 - DNA, 15 bp, Homo sapiens
tgaaaatttacaatt

SEQ ID NO: 287573 - DNA, 15 bp, Homo sapiens
ctgaaaatttacaat

SEQ ID NO: 287574 - DNA, 15 bp, Homo sapiens
actgaaaatttacaa

SEQ ID NO: 287575 - DNA, 15 bp, Homo sapiens
tactgaaaatttaca

SEQ ID NO: 287576 - DNA, 15 bp, Homo sapiens
atactgaaaatttac

SEQ ID NO: 287577 - DNA, 15 bp, Homo sapiens
catactgaaaattta

SEQ ID NO: 287578 - DNA, 15 bp, Homo sapiens
acatactgaaaattt

SEQ ID NO: 287579 - DNA, 15 bp, Homo sapiens
cacatactgaaaatt

SEQ ID NO: 287580 - DNA, 15 bp, Homo sapiens
tcacatactgaaaat

SEQ ID NO: 287581 - DNA, 15 bp, Homo sapiens
ttcacatactgaaaa

SEQ ID NO: 287582 - DNA, 15 bp, Homo sapiens
attcacatactgaaa

SEQ ID NO: 287583 - DNA, 15 bp, Homo sapiens
cattcacatactgaa

SEQ ID NO: 287584 - DNA, 15 bp, Homo sapiens
tcattcacatactga

SEQ ID NO: 287585 - DNA, 15 bp, Homo sapiens
gtcattcacatactg

SEQ ID NO: 287586 - DNA, 15 bp, Homo sapiens
agtcattcacatact

SEQ ID NO: 287587 - DNA, 15 bp, Homo sapiens
aagtcattcacatac

SEQ ID NO: 287588 - DNA, 15 bp, Homo sapiens
gaagtcattcacata

SEQ ID NO: 287589 - DNA, 15 bp, Homo sapiens
tgaagtcattcacat

SEQ ID NO: 287590 - DNA, 15 bp, Homo sapiens
gtgaagtcattcaca

SEQ ID NO: 287591 - DNA, 15 bp, Homo sapiens
agtgaagtcattcac

SEQ ID NO: 287592 - DNA, 15 bp, Homo sapiens
aagtgaagtcattca

SEQ ID NO: 287593 - DNA, 15 bp, Homo sapiens
taagtgaagtcattc

SEQ ID NO: 287594 - DNA, 15 bp, Homo sapiens
ataagtgaagtcatt

SEQ ID NO: 287595 - DNA, 15 bp, Homo sapiens
aataagtgaagtcat

SEQ ID NO: 287596 - DNA, 15 bp, Homo sapiens
caataagtgaagtca

SEQ ID NO: 287597 - DNA, 15 bp, Homo sapiens
acaataagtgaagtc

SEQ ID NO: 287598 - DNA, 15 bp, Homo sapiens
aacaataagtgaagt

SEQ ID NO: 287599 - DNA, 15 bp, Homo sapiens
taacaataagtgaag

SEQ ID NO: 287600 - DNA, 15 bp, Homo sapiens
ataacaataagtgaa

SEQ ID NO: 287601 - DNA, 15 bp, Homo sapiens
aataacaataagtga

SEQ ID NO: 287602 - DNA, 15 bp, Homo sapiens
aaataacaataagtg

SEQ ID NO: 287603 - DNA, 15 bp, Homo sapiens
taaataacaataagt

SEQ ID NO: 287604 - DNA, 15 bp, Homo sapiens
ctaaataacaataag

SEQ ID NO: 287605 - DNA, 15 bp, Homo sapiens
actaaataacaataa

SEQ ID NO: 287606 - DNA, 15 bp, Homo sapiens
aactaaataacaata

SEQ ID NO: 287607 - DNA, 15 bp, Homo sapiens
aaactaaataacaat

SEQ ID NO: 287608 - DNA, 15 bp, Homo sapiens
aaaactaaataacaa

SEQ ID NO: 287609 - DNA, 15 bp, Homo sapiens
caaaactaaataaca

SEQ ID NO: 287610 - DNA, 15 bp, Homo sapiens
tcaaaactaaataac

SEQ ID NO: 287611 - DNA, 15 bp, Homo sapiens
ttcaaaactaaataa

SEQ ID NO: 287612 - DNA, 15 bp, Homo sapiens
tttcaaaactaaata

SEQ ID NO: 287613 - DNA, 15 bp, Homo sapiens
gtttcaaaactaaat

SEQ ID NO: 287614 - DNA, 15 bp, Homo sapiens
tgtttcaaaactaaa

SEQ ID NO: 287615 - DNA, 15 bp, Homo sapiens
gtgtttcaaaactaa

SEQ ID NO: 287616 - DNA, 15 bp, Homo sapiens
tgtgtttcaaaacta

SEQ ID NO: 287617 - DNA, 15 bp, Homo sapiens
ctgtgtttcaaaact

SEQ ID NO: 287618 - DNA, 15 bp, Homo sapiens
tctgtgtttcaaaac

SEQ ID NO: 287619 - DNA, 15 bp, Homo sapiens
ctctgtgtttcaaaa

SEQ ID NO: 287620 - DNA, 15 bp, Homo sapiens
tctctgtgtttcaaa

SEQ ID NO: 287621 - DNA, 15 bp, Homo sapiens
ttctctgtgtttcaa

SEQ ID NO: 287622 - DNA, 15 bp, Homo sapiens
gttctctgtgtttca

SEQ ID NO: 287623 - DNA, 15 bp, Homo sapiens
tgttctctgtgtttc

SEQ ID NO: 287624 - DNA, 15 bp, Homo sapiens
gtgttctctgtgttt

SEQ ID NO: 287625 - DNA, 15 bp, Homo sapiens
ggtgttctctgtgtt

SEQ ID NO: 287626 - DNA, 15 bp, Homo sapiens
tggtgttctctgtgt

SEQ ID NO: 287627 - DNA, 15 bp, Homo sapiens
gtggtgttctctgtg

SEQ ID NO: 287628 - DNA, 15 bp, Homo sapiens
cgtggtgttctctgt

SEQ ID NO: 287629 - DNA, 15 bp, Homo sapiens
tcgtggtgttctctg

SEQ ID NO: 287630 - DNA, 15 bp, Homo sapiens
ttcgtggtgttctct

SEQ ID NO: 287631 - DNA, 15 bp, Homo sapiens
tttcgtggtgttctc

SEQ ID NO: 287632 - DNA, 15 bp, Homo sapiens
ttttcgtggtgttct

SEQ ID NO: 287633 - DNA, 15 bp, Homo sapiens
tttttcgtggtgttc

SEQ ID NO: 287634 - DNA, 15 bp, Homo sapiens
ctttttcgtggtgtt

SEQ ID NO: 287635 - DNA, 15 bp, Homo sapiens
actttttcgtggtgt

SEQ ID NO: 287636 - DNA, 15 bp, Homo sapiens
tactttttcgtggtg

SEQ ID NO: 287637 - DNA, 15 bp, Homo sapiens
ttactttttcgtggt

SEQ ID NO: 287638 - DNA, 15 bp, Homo sapiens
gttactttttcgtgg

SEQ ID NO: 287639 - DNA, 15 bp, Homo sapiens
ggttactttttcgtg

SEQ ID NO: 287640 - DNA, 15 bp, Homo sapiens
aggttactttttcgt

SEQ ID NO: 287641 - DNA, 15 bp, Homo sapiens
aaggttactttttcg

SEQ ID NO: 287642 - DNA, 15 bp, Homo sapiens
caaggttactttttc

SEQ ID NO: 287643 - DNA, 15 bp, Homo sapiens
tcaaggttacttttt

SEQ ID NO: 287644 - DNA, 15 bp, Homo sapiens
atcaaggttactttt

SEQ ID NO: 287645 - DNA, 15 bp, Homo sapiens
catcaaggttacttt

SEQ ID NO: 287646 - DNA, 15 bp, Homo sapiens
tcatcaaggttactt

SEQ ID NO: 287647 - DNA, 15 bp, Homo sapiens
ttcatcaaggttact

SEQ ID NO: 287648 - DNA, 15 bp, Homo sapiens
cttcatcaaggttac

SEQ ID NO: 287649 - DNA, 15 bp, Homo sapiens
tcttcatcaaggtta

SEQ ID NO: 287650 - DNA, 15 bp, Homo sapiens
ctcttcatcaaggtt

SEQ ID NO: 287651 - DNA, 15 bp, Homo sapiens
cctcttcatcaaggt

SEQ ID NO: 287652 - DNA, 15 bp, Homo sapiens
acctcttcatcaagg

SEQ ID NO: 287653 - DNA, 15 bp, Homo sapiens
cacctcttcatcaag

SEQ ID NO: 287654 - DNA, 15 bp, Homo sapiens
tcacctcttcatcaa

SEQ ID NO: 287655 - DNA, 15 bp, Homo sapiens
ttcacctcttcatca

SEQ ID NO: 287656 - DNA, 15 bp, Homo sapiens
attcacctcttcatc

SEQ ID NO: 287657 - DNA, 15 bp, Homo sapiens
cattcacctcttcat

SEQ ID NO: 287658 - DNA, 15 bp, Homo sapiens
acattcacctcttca

SEQ ID NO: 287659 - DNA, 15 bp, Homo sapiens
tacattcacctcttc

SEQ ID NO: 287660 - DNA, 15 bp, Homo sapiens
ttacattcacctctt

SEQ ID NO: 287661 - DNA, 15 bp, Homo sapiens
attacattcacctct

SEQ ID NO: 287662 - DNA, 15 bp, Homo sapiens
aattacattcacctc

SEQ ID NO: 287663 - DNA, 15 bp, Homo sapiens
gaattacattcacct

SEQ ID NO: 287664 - DNA, 15 bp, Homo sapiens
ggaattacattcacc

SEQ ID NO: 287665 - DNA, 15 bp, Homo sapiens
aggaattacattcac

SEQ ID NO: 287666 - DNA, 15 bp, Homo sapiens
gaggaattacattca

SEQ ID NO: 287667 - DNA, 15 bp, Homo sapiens
ggaggaattacattc

SEQ ID NO: 287668 - DNA, 15 bp, Homo sapiens
tggaggaattacatt

SEQ ID NO: 287669 - DNA, 15 bp, Homo sapiens
gtggaggaattacat

SEQ ID NO: 287670 - DNA, 15 bp, Homo sapiens
tgtggaggaattaca

SEQ ID NO: 287671 - DNA, 15 bp, Homo sapiens
gtgtggaggaattac

SEQ ID NO: 287672 - DNA, 15 bp, Homo sapiens
tgtgtggaggaatta

SEQ ID NO: 287673 - DNA, 15 bp, Homo sapiens
gtgtgtggaggaatt

SEQ ID NO: 287674 - DNA, 15 bp, Homo sapiens
agtgtgtggaggaat

SEQ ID NO: 287675 - DNA, 15 bp, Homo sapiens
gagtgtgtggaggaa

SEQ ID NO: 287676 - DNA, 15 bp, Homo sapiens
ggagtgtgtggagga

SEQ ID NO: 287677 - DNA, 15 bp, Homo sapiens
tggagtgtgtggagg

SEQ ID NO: 287678 - DNA, 15 bp, Homo sapiens
ctggagtgtgtggag

SEQ ID NO: 287679 - DNA, 15 bp, Homo sapiens
actggagtgtgtgga

SEQ ID NO: 287680 - DNA, 15 bp, Homo sapiens
aactggagtgtgtgg

SEQ ID NO: 287681 - DNA, 15 bp, Homo sapiens
taactggagtgtgtg

SEQ ID NO: 287682 - DNA, 15 bp, Homo sapiens
ctaactggagtgtgt

SEQ ID NO: 287683 - DNA, 15 bp, Homo sapiens
cctaactggagtgtg

SEQ ID NO: 287684 - DNA, 15 bp, Homo sapiens
acctaactggagtgt

SEQ ID NO: 287685 - DNA, 15 bp, Homo sapiens
tacctaactggagtg

SEQ ID NO: 287686 - DNA, 15 bp, Homo sapiens
atacctaactggagt

SEQ ID NO: 287687 - DNA, 15 bp, Homo sapiens
catacctaactggag

SEQ ID NO: 287688 - DNA, 15 bp, Homo sapiens
tcatacctaactgga

SEQ ID NO: 287689 - DNA, 15 bp, Homo sapiens
ttcatacctaactgg

SEQ ID NO: 287690 - DNA, 15 bp, Homo sapiens
attcatacctaactg

SEQ ID NO: 287691 - DNA, 15 bp, Homo sapiens
aattcatacctaact

SEQ ID NO: 287692 - DNA, 15 bp, Homo sapiens
aaattcatacctaac

SEQ ID NO: 287693 - DNA, 15 bp, Homo sapiens
aaaattcatacctaa

SEQ ID NO: 287694 - DNA, 15 bp, Homo sapiens
gaaaattcataccta

SEQ ID NO: 287695 - DNA, 15 bp, Homo sapiens
ggaaaattcatacct

SEQ ID NO: 287696 - DNA, 15 bp, Homo sapiens
aggaaaattcatacc

SEQ ID NO: 287697 - DNA, 15 bp, Homo sapiens
taggaaaattcatac

SEQ ID NO: 287698 - DNA, 15 bp, Homo sapiens
gtaggaaaattcata

SEQ ID NO: 287699 - DNA, 15 bp, Homo sapiens
agtaggaaaattcat

SEQ ID NO: 287700 - DNA, 15 bp, Homo sapiens
aagtaggaaaattca

SEQ ID NO: 287701 - DNA, 15 bp, Homo sapiens
aaagtaggaaaattc

SEQ ID NO: 287702 - DNA, 15 bp, Homo sapiens
aaaagtaggaaaatt

SEQ ID NO: 287703 - DNA, 15 bp, Homo sapiens
taaaagtaggaaaat

SEQ ID NO: 287704 - DNA, 15 bp, Homo sapiens
ttaaaagtaggaaaa

SEQ ID NO: 287705 - DNA, 15 bp, Homo sapiens
attaaaagtaggaaa

SEQ ID NO: 287706 - DNA, 15 bp, Homo sapiens
aattaaaagtaggaa

SEQ ID NO: 287707 - DNA, 15 bp, Homo sapiens
taattaaaagtagga

SEQ ID NO: 287708 - DNA, 15 bp, Homo sapiens
ataattaaaagtagg

SEQ ID NO: 287709 - DNA, 15 bp, Homo sapiens
tataattaaaagtag

SEQ ID NO: 287710 - DNA, 15 bp, Homo sapiens
atataattaaaagta

SEQ ID NO: 287711 - DNA, 15 bp, Homo sapiens
aatataattaaaagt

SEQ ID NO: 287712 - DNA, 15 bp, Homo sapiens
taatataattaaaag

SEQ ID NO: 287713 - DNA, 15 bp, Homo sapiens
ataatataattaaaa

SEQ ID NO: 287714 - DNA, 15 bp, Homo sapiens
tataatataattaaa

SEQ ID NO: 287715 - DNA, 15 bp, Homo sapiens
ttataatataattaa

SEQ ID NO: 287716 - DNA, 15 bp, Homo sapiens
attataatataatta

SEQ ID NO: 287717 - DNA, 15 bp, Homo sapiens
aattataatataatt

SEQ ID NO: 287718 - DNA, 15 bp, Homo sapiens
aaattataatataat

SEQ ID NO: 287719 - DNA, 15 bp, Homo sapiens
aaaattataatataa

SEQ ID NO: 287720 - DNA, 15 bp, Homo sapiens
caaaattataatata

SEQ ID NO: 287721 - DNA, 15 bp, Homo sapiens
acaaaattataatat

SEQ ID NO: 287722 - DNA, 15 bp, Homo sapiens
aacaaaattataata

SEQ ID NO: 287723 - DNA, 15 bp, Homo sapiens
taacaaaattataat

SEQ ID NO: 287724 - DNA, 15 bp, Homo sapiens
ataacaaaattataa

SEQ ID NO: 287725 - DNA, 15 bp, Homo sapiens
aataacaaaattata

SEQ ID NO: 287726 - DNA, 15 bp, Homo sapiens
gaataacaaaattat

SEQ ID NO: 287727 - DNA, 15 bp, Homo sapiens
tgaataacaaaatta

SEQ ID NO: 287728 - DNA, 15 bp, Homo sapiens
atgaataacaaaatt

SEQ ID NO: 287729 - DNA, 15 bp, Homo sapiens
catgaataacaaaat

SEQ ID NO: 287730 - DNA, 15 bp, Homo sapiens
ccatgaataacaaaa

SEQ ID NO: 287731 - DNA, 15 bp, Homo sapiens
gccatgaataacaaa

SEQ ID NO: 287732 - DNA, 15 bp, Homo sapiens
agccatgaataacaa

SEQ ID NO: 287733 - DNA, 15 bp, Homo sapiens
aagccatgaataaca

SEQ ID NO: 287734 - DNA, 15 bp, Homo sapiens
aaagccatgaataac

SEQ ID NO: 287735 - DNA, 15 bp, Homo sapiens
taaagccatgaataa

SEQ ID NO: 287736 - DNA, 15 bp, Homo sapiens
ataaagccatgaata

SEQ ID NO: 287737 - DNA, 15 bp, Homo sapiens
tataaagccatgaat

SEQ ID NO: 287738 - DNA, 15 bp, Homo sapiens
ctataaagccatgaa

SEQ ID NO: 287739 - DNA, 15 bp, Homo sapiens
actataaagccatga

SEQ ID NO: 287740 - DNA, 15 bp, Homo sapiens
cactataaagccatg

SEQ ID NO: 287741 - DNA, 15 bp, Homo sapiens
acactataaagccat

SEQ ID NO: 287742 - DNA, 15 bp, Homo sapiens
aacactataaagcca

SEQ ID NO: 287743 - DNA, 15 bp, Homo sapiens
aaacactataaagcc

SEQ ID NO: 287744 - DNA, 15 bp, Homo sapiens
gaaacactataaagc

SEQ ID NO: 287745 - DNA, 15 bp, Homo sapiens
tgaaacactataaag

SEQ ID NO: 287746 - DNA, 15 bp, Homo sapiens
ctgaaacactataaa

SEQ ID NO: 287747 - DNA, 15 bp, Homo sapiens
tctgaaacactataa

SEQ ID NO: 287748 - DNA, 15 bp, Homo sapiens
atctgaaacactata

SEQ ID NO: 287749 - DNA, 15 bp, Homo sapiens
aatctgaaacactat

SEQ ID NO: 287750 - DNA, 15 bp, Homo sapiens
aaatctgaaacacta

SEQ ID NO: 287751 - DNA, 15 bp, Homo sapiens
caaatctgaaacact

SEQ ID NO: 287752 - DNA, 15 bp, Homo sapiens
acaaatctgaaacac

SEQ ID NO: 287753 - DNA, 15 bp, Homo sapiens
aacaaatctgaaaca

SEQ ID NO: 287754 - DNA, 15 bp, Homo sapiens
gaacaaatctgaaac

SEQ ID NO: 287755 - DNA, 15 bp, Homo sapiens
tgaacaaatctgaaa

SEQ ID NO: 287756 - DNA, 15 bp, Homo sapiens
gtgaacaaatctgaa

SEQ ID NO: 287757 - DNA, 15 bp, Homo sapiens
cgtgaacaaatctga

SEQ ID NO: 287758 - DNA, 15 bp, Homo sapiens
acgtgaacaaatctg

SEQ ID NO: 287759 - DNA, 15 bp, Homo sapiens
aacgtgaacaaatct

SEQ ID NO: 287760 - DNA, 15 bp, Homo sapiens
aaacgtgaacaaatc

SEQ ID NO: 287761 - DNA, 15 bp, Homo sapiens
gaaacgtgaacaaat

SEQ ID NO: 287762 - DNA, 15 bp, Homo sapiens
agaaacgtgaacaaa

SEQ ID NO: 287763 - DNA, 15 bp, Homo sapiens
aagaaacgtgaacaa

SEQ ID NO: 287764 - DNA, 15 bp, Homo sapiens
aaagaaacgtgaaca

SEQ ID NO: 287765 - DNA, 15 bp, Homo sapiens
taaagaaacgtgaac

SEQ ID NO: 287766 - DNA, 15 bp, Homo sapiens
ataaagaaacgtgaa

SEQ ID NO: 287767 - DNA, 15 bp, Homo sapiens
cataaagaaacgtga

SEQ ID NO: 287768 - DNA, 15 bp, Homo sapiens
acataaagaaacgtg

SEQ ID NO: 287769 - DNA, 15 bp, Homo sapiens
tacataaagaaacgt

SEQ ID NO: 287770 - DNA, 15 bp, Homo sapiens
atacataaagaaacg

SEQ ID NO: 287771 - DNA, 15 bp, Homo sapiens
aatacataaagaaac

SEQ ID NO: 287772 - DNA, 15 bp, Homo sapiens
gaatacataaagaaa

SEQ ID NO: 287773 - DNA, 15 bp, Homo sapiens
tgaatacataaagaa

SEQ ID NO: 287774 - DNA, 15 bp, Homo sapiens
atgaatacataaaga

SEQ ID NO: 287775 - DNA, 15 bp, Homo sapiens
tatgaatacataaag

SEQ ID NO: 287776 - DNA, 15 bp, Homo sapiens
gtatgaatacataaa

SEQ ID NO: 287777 - DNA, 15 bp, Homo sapiens
tgtatgaatacataa

SEQ ID NO: 287778 - DNA, 15 bp, Homo sapiens
atgtatgaatacata

SEQ ID NO: 287779 - DNA, 15 bp, Homo sapiens
tatgtatgaatacat

SEQ ID NO: 287780 - DNA, 15 bp, Homo sapiens
gtatgtatgaataca

SEQ ID NO: 287781 - DNA, 15 bp, Homo sapiens
tgtatgtatgaatac

SEQ ID NO: 287782 - DNA, 15 bp, Homo sapiens
atgtatgtatgaata

SEQ ID NO: 287783 - DNA, 15 bp, Homo sapiens
catgtatgtatgaat

SEQ ID NO: 287784 - DNA, 15 bp, Homo sapiens
acatgtatgtatgaa

SEQ ID NO: 287785 - DNA, 15 bp, Homo sapiens
tacatgtatgtatga

SEQ ID NO: 287786 - DNA, 15 bp, Homo sapiens
ttacatgtatgtatg

SEQ ID NO: 287787 - DNA, 15 bp, Homo sapiens
cttacatgtatgtat

SEQ ID NO: 287788 - DNA, 15 bp, Homo sapiens
tcttacatgtatgta

SEQ ID NO: 287789 - DNA, 15 bp, Homo sapiens
ttcttacatgtatgt

SEQ ID NO: 287790 - DNA, 15 bp, Homo sapiens
tttcttacatgtatg

SEQ ID NO: 287791 - DNA, 15 bp, Homo sapiens
atttcttacatgtat

SEQ ID NO: 287792 - DNA, 15 bp, Homo sapiens
tatttcttacatgta

SEQ ID NO: 287793 - DNA, 15 bp, Homo sapiens
atatttcttacatgt

SEQ ID NO: 287794 - DNA, 15 bp, Homo sapiens
tatatttcttacatg

SEQ ID NO: 287795 - DNA, 15 bp, Homo sapiens
atatatttcttacat

SEQ ID NO: 287796 - DNA, 15 bp, Homo sapiens
tatatatttcttaca

SEQ ID NO: 287797 - DNA, 15 bp, Homo sapiens
atatatatttcttac

SEQ ID NO: 287798 - DNA, 15 bp, Homo sapiens
aatatatatttctta

SEQ ID NO: 287799 - DNA, 15 bp, Homo sapiens
caatatatatttctt

SEQ ID NO: 287800 - DNA, 15 bp, Homo sapiens
tcaatatatatttct

SEQ ID NO: 287801 - DNA, 15 bp, Homo sapiens
ttcaatatatatttc

SEQ ID NO: 287802 - DNA, 15 bp, Homo sapiens
cttcaatatatattt

SEQ ID NO: 287803 - DNA, 15 bp, Homo sapiens
ccttcaatatatatt

SEQ ID NO: 287804 - DNA, 15 bp, Homo sapiens
gccttcaatatatat

SEQ ID NO: 287805 - DNA, 15 bp, Homo sapiens
ggccttcaatatata

SEQ ID NO: 287806 - DNA, 15 bp, Homo sapiens
tggccttcaatatat

SEQ ID NO: 287807 - DNA, 15 bp, Homo sapiens
ctggccttcaatata

SEQ ID NO: 287808 - DNA, 15 bp, Homo sapiens
cctggccttcaatat

SEQ ID NO: 287809 - DNA, 15 bp, Homo sapiens
acctggccttcaata

SEQ ID NO: 287810 - DNA, 15 bp, Homo sapiens
cacctggccttcaat

SEQ ID NO: 287811 - DNA, 15 bp, Homo sapiens
acacctggccttcaa

SEQ ID NO: 287812 - DNA, 15 bp, Homo sapiens
cacacctggccttca

SEQ ID NO: 287813 - DNA, 15 bp, Homo sapiens
ccacacctggccttc

SEQ ID NO: 287814 - DNA, 15 bp, Homo sapiens
accacacctggcctt

SEQ ID NO: 287815 - DNA, 15 bp, Homo sapiens
caccacacctggcct

SEQ ID NO: 287816 - DNA, 15 bp, Homo sapiens
ccaccacacctggcc

SEQ ID NO: 287817 - DNA, 15 bp, Homo sapiens
tccaccacacctggc

SEQ ID NO: 287818 - DNA, 15 bp, Homo sapiens
atccaccacacctgg

SEQ ID NO: 287819 - DNA, 15 bp, Homo sapiens
gatccaccacacctg

SEQ ID NO: 287820 - DNA, 15 bp, Homo sapiens
tgatccaccacacct

SEQ ID NO: 287821 - DNA, 15 bp, Homo sapiens
gtgatccaccacacc

SEQ ID NO: 287822 - DNA, 15 bp, Homo sapiens
tgtgatccaccacac

SEQ ID NO: 287823 - DNA, 15 bp, Homo sapiens
gtgtgatccaccaca

SEQ ID NO: 287824 - DNA, 15 bp, Homo sapiens
ggtgtgatccaccac

SEQ ID NO: 287825 - DNA, 15 bp, Homo sapiens
aggtgtgatccacca

SEQ ID NO: 287826 - DNA, 15 bp, Homo sapiens
caggtgtgatccacc

SEQ ID NO: 287827 - DNA, 15 bp, Homo sapiens
acaggtgtgatccac

SEQ ID NO: 287828 - DNA, 15 bp, Homo sapiens
tacaggtgtgatcca

SEQ ID NO: 287829 - DNA, 15 bp, Homo sapiens
ttacaggtgtgatcc

SEQ ID NO: 287830 - DNA, 15 bp, Homo sapiens
attacaggtgtgatc

SEQ ID NO: 287831 - DNA, 15 bp, Homo sapiens
gattacaggtgtgat

SEQ ID NO: 287832 - DNA, 15 bp, Homo sapiens
ccttggcctcccaaa

SEQ ID NO: 287833 - DNA, 15 bp, Homo sapiens
gccttggcctcccaa

SEQ ID NO: 287834 - DNA, 15 bp, Homo sapiens
cgccttggcctccca

SEQ ID NO: 287835 - DNA, 15 bp, Homo sapiens
ccgccttggcctccc

SEQ ID NO: 287836 - DNA, 15 bp, Homo sapiens
cccgccttggcctcc

SEQ ID NO: 287837 - DNA, 15 bp, Homo sapiens
gcccgccttggcctc

SEQ ID NO: 287838 - DNA, 15 bp, Homo sapiens
tgcccgccttggcct

SEQ ID NO: 287839 - DNA, 15 bp, Homo sapiens
ctgcccgccttggcc

SEQ ID NO: 287840 - DNA, 15 bp, Homo sapiens
tctgcccgccttggc

SEQ ID NO: 287841 - DNA, 15 bp, Homo sapiens
atctgcccgccttgg

SEQ ID NO: 287842 - DNA, 15 bp, Homo sapiens
gatctgcccgccttg

SEQ ID NO: 287843 - DNA, 15 bp, Homo sapiens
tgatctgcccgcctt

SEQ ID NO: 287844 - DNA, 15 bp, Homo sapiens
gtgatctgcccgcct

SEQ ID NO: 287845 - DNA, 15 bp, Homo sapiens
ggtgatctgcccgcc

SEQ ID NO: 287846 - DNA, 15 bp, Homo sapiens
aggtgatctgcccgc

SEQ ID NO: 287847 - DNA, 15 bp, Homo sapiens
caggtgatctgcccg

SEQ ID NO: 287848 - DNA, 15 bp, Homo sapiens
tcaggtgatctgccc

SEQ ID NO: 287849 - DNA, 15 bp, Homo sapiens
ctcaggtgatctgcc

SEQ ID NO: 287850 - DNA, 15 bp, Homo sapiens
cctcaggtgatctgc

SEQ ID NO: 287851 - DNA, 15 bp, Homo sapiens
acctcaggtgatctg

SEQ ID NO: 287852 - DNA, 15 bp, Homo sapiens
aacctcaggtgatct

SEQ ID NO: 287853 - DNA, 15 bp, Homo sapiens
taacctcaggtgatc

SEQ ID NO: 287854 - DNA, 15 bp, Homo sapiens
ctaacctcaggtgat

SEQ ID NO: 287855 - DNA, 15 bp, Homo sapiens
cctaacctcaggtga

SEQ ID NO: 287856 - DNA, 15 bp, Homo sapiens
tcctaacctcaggtg

SEQ ID NO: 287857 - DNA, 15 bp, Homo sapiens
ctcctaacctcaggt

SEQ ID NO: 287858 - DNA, 15 bp, Homo sapiens
actcctaacctcagg

SEQ ID NO: 287859 - DNA, 15 bp, Homo sapiens
aactcctaacctcag

SEQ ID NO: 287860 - DNA, 15 bp, Homo sapiens
aaactcctaacctca

SEQ ID NO: 287861 - DNA, 15 bp, Homo sapiens
caaactcctaacctc

SEQ ID NO: 287862 - DNA, 15 bp, Homo sapiens
tcaaactcctaacct

SEQ ID NO: 287863 - DNA, 15 bp, Homo sapiens
ctcaaactcctaacc

SEQ ID NO: 287864 - DNA, 15 bp, Homo sapiens
tctcaaactcctaac

SEQ ID NO: 287865 - DNA, 15 bp, Homo sapiens
gtctcaaactcctaa

SEQ ID NO: 287866 - DNA, 15 bp, Homo sapiens
ggtctcaaactccta

SEQ ID NO: 287867 - DNA, 15 bp, Homo sapiens
cggtctcaaactcct

SEQ ID NO: 287868 - DNA, 15 bp, Homo sapiens
ccggtctcaaactcc

SEQ ID NO: 287869 - DNA, 15 bp, Homo sapiens
gccggtctcaaactc

SEQ ID NO: 287870 - DNA, 15 bp, Homo sapiens
ggccggtctcaaact

SEQ ID NO: 287871 - DNA, 15 bp, Homo sapiens
aggccggtctcaaac

SEQ ID NO: 287872 - DNA, 15 bp, Homo sapiens
caggccggtctcaaa

SEQ ID NO: 287873 - DNA, 15 bp, Homo sapiens
ccaggccggtctcaa

SEQ ID NO: 287874 - DNA, 15 bp, Homo sapiens
gccaggccggtctca

SEQ ID NO: 287875 - DNA, 15 bp, Homo sapiens
ggccaggccggtctc

SEQ ID NO: 287876 - DNA, 15 bp, Homo sapiens
tggccaggccggtct

SEQ ID NO: 287877 - DNA, 15 bp, Homo sapiens
ttggccaggccggtc

SEQ ID NO: 287878 - DNA, 15 bp, Homo sapiens
gttggccaggccggt

SEQ ID NO: 287879 - DNA, 15 bp, Homo sapiens
tgttggccaggccgg

SEQ ID NO: 287880 - DNA, 15 bp, Homo sapiens
atgttggccaggccg

SEQ ID NO: 287881 - DNA, 15 bp, Homo sapiens
catgttggccaggcc

SEQ ID NO: 287882 - DNA, 15 bp, Homo sapiens
cggggtttcaccatg

SEQ ID NO: 287883 - DNA, 15 bp, Homo sapiens
acggggtttcaccat

SEQ ID NO: 287884 - DNA, 15 bp, Homo sapiens
gacggggtttcacca

SEQ ID NO: 287885 - DNA, 15 bp, Homo sapiens
agacggggtttcacc

SEQ ID NO: 287886 - DNA, 15 bp, Homo sapiens
gagacggggtttcac

SEQ ID NO: 287887 - DNA, 15 bp, Homo sapiens
ctagtagagacgggg

SEQ ID NO: 287888 - DNA, 15 bp, Homo sapiens
tctagtagagacggg

SEQ ID NO: 287889 - DNA, 15 bp, Homo sapiens
ttctagtagagacgg

SEQ ID NO: 287890 - DNA, 15 bp, Homo sapiens
tttctagtagagacg

SEQ ID NO: 287891 - DNA, 15 bp, Homo sapiens
atttctagtagagac

SEQ ID NO: 287892 - DNA, 15 bp, Homo sapiens
tatttctagtagaga

SEQ ID NO: 287893 - DNA, 15 bp, Homo sapiens
gtatttctagtagag

SEQ ID NO: 287894 - DNA, 15 bp, Homo sapiens
tgtatttctagtaga

SEQ ID NO: 287895 - DNA, 15 bp, Homo sapiens
ttgtatttctagtag

SEQ ID NO: 287896 - DNA, 15 bp, Homo sapiens
tttgtatttctagta

SEQ ID NO: 287897 - DNA, 15 bp, Homo sapiens
ttttgtatttctagt

SEQ ID NO: 287898 - DNA, 15 bp, Homo sapiens
tttttgtatttctag

SEQ ID NO: 287899 - DNA, 15 bp, Homo sapiens
atttttgtatttcta

SEQ ID NO: 287900 - DNA, 15 bp, Homo sapiens
aatttttgtatttct

SEQ ID NO: 287901 - DNA, 15 bp, Homo sapiens
taatttttgtatttc

SEQ ID NO: 287902 - DNA, 15 bp, Homo sapiens
ccccagctaattttt

SEQ ID NO: 287903 - DNA, 15 bp, Homo sapiens
cccccagctaatttt

SEQ ID NO: 287904 - DNA, 15 bp, Homo sapiens
acccccagctaattt

SEQ ID NO: 287905 - DNA, 15 bp, Homo sapiens
cacccccagctaatt

SEQ ID NO: 287906 - DNA, 15 bp, Homo sapiens
ccacccccagctaat

SEQ ID NO: 287907 - DNA, 15 bp, Homo sapiens
accacccccagctaa

SEQ ID NO: 287908 - DNA, 15 bp, Homo sapiens
caccacccccagcta

SEQ ID NO: 287909 - DNA, 15 bp, Homo sapiens
ccaccacccccagct

SEQ ID NO: 287910 - DNA, 15 bp, Homo sapiens
accaccacccccagc

SEQ ID NO: 287911 - DNA, 15 bp, Homo sapiens
caccaccacccccag

SEQ ID NO: 287912 - DNA, 15 bp, Homo sapiens
acaccaccaccccca

SEQ ID NO: 287913 - DNA, 15 bp, Homo sapiens
cacaccaccaccccc

SEQ ID NO: 287914 - DNA, 15 bp, Homo sapiens
acacaccaccacccc

SEQ ID NO: 287915 - DNA, 15 bp, Homo sapiens
cacacaccaccaccc

SEQ ID NO: 287916 - DNA, 15 bp, Homo sapiens
gcacacaccaccacc

SEQ ID NO: 287917 - DNA, 15 bp, Homo sapiens
ggcacacaccaccac

SEQ ID NO: 287918 - DNA, 15 bp, Homo sapiens
caggcacacaccacc

SEQ ID NO: 287919 - DNA, 15 bp, Homo sapiens
acaggcacacaccac

SEQ ID NO: 287920 - DNA, 15 bp, Homo sapiens
tacaggcacacacca

SEQ ID NO: 287921 - DNA, 15 bp, Homo sapiens
ttacaggcacacacc

SEQ ID NO: 287922 - DNA, 15 bp, Homo sapiens
attacaggcacacac

SEQ ID NO: 287923 - DNA, 15 bp, Homo sapiens
gattacaggcacaca

SEQ ID NO: 287924 - DNA, 15 bp, Homo sapiens
ggattacaggcacac

SEQ ID NO: 287925 - DNA, 15 bp, Homo sapiens
gggattacaggcaca

SEQ ID NO: 287926 - DNA, 15 bp, Homo sapiens
tgggattacaggcac

SEQ ID NO: 287927 - DNA, 15 bp, Homo sapiens
ctgggattacaggca

SEQ ID NO: 287928 - DNA, 15 bp, Homo sapiens
cagctgggattacag

SEQ ID NO: 287929 - DNA, 15 bp, Homo sapiens
gcagctgggattaca

SEQ ID NO: 287930 - DNA, 15 bp, Homo sapiens
agcagctgggattac

SEQ ID NO: 287931 - DNA, 15 bp, Homo sapiens
gagcagctgggatta

SEQ ID NO: 287932 - DNA, 15 bp, Homo sapiens
cgagcagctgggatt

SEQ ID NO: 287933 - DNA, 15 bp, Homo sapiens
ccgagcagctgggat

SEQ ID NO: 287934 - DNA, 15 bp, Homo sapiens
cccgagcagctggga

SEQ ID NO: 287935 - DNA, 15 bp, Homo sapiens
tcccgagcagctggg

SEQ ID NO: 287936 - DNA, 15 bp, Homo sapiens
ctcccgagcagctgg

SEQ ID NO: 287937 - DNA, 15 bp, Homo sapiens
cctcccgagcagctg

SEQ ID NO: 287938 - DNA, 15 bp, Homo sapiens
gcctcccgagcagct

SEQ ID NO: 287939 - DNA, 15 bp, Homo sapiens
agcctcccgagcagc

SEQ ID NO: 287940 - DNA, 15 bp, Homo sapiens
cagcctcccgagcag

SEQ ID NO: 287941 - DNA, 15 bp, Homo sapiens
tcagcctcccgagca

SEQ ID NO: 287942 - DNA, 15 bp, Homo sapiens
ctcagcctcccgagc

SEQ ID NO: 287943 - DNA, 15 bp, Homo sapiens
cgggttcaagcaatt

SEQ ID NO: 287944 - DNA, 15 bp, Homo sapiens
ccgggttcaagcaat

SEQ ID NO: 287945 - DNA, 15 bp, Homo sapiens
cccgggttcaagcaa

SEQ ID NO: 287946 - DNA, 15 bp, Homo sapiens
tcccgggttcaagca

SEQ ID NO: 287947 - DNA, 15 bp, Homo sapiens
tctgcaacctccgcc

SEQ ID NO: 287948 - DNA, 15 bp, Homo sapiens
ctctgcaacctccgc

SEQ ID NO: 287949 - DNA, 15 bp, Homo sapiens
tctctgcaacctccg

SEQ ID NO: 287950 - DNA, 15 bp, Homo sapiens
ctctctgcaacctcc

SEQ ID NO: 287951 - DNA, 15 bp, Homo sapiens
gctctctgcaacctc

SEQ ID NO: 287952 - DNA, 15 bp, Homo sapiens
agctctctgcaacct

SEQ ID NO: 287953 - DNA, 15 bp, Homo sapiens
cagctctctgcaacc

SEQ ID NO: 287954 - DNA, 15 bp, Homo sapiens
tcagctctctgcaac

SEQ ID NO: 287955 - DNA, 15 bp, Homo sapiens
ctcagctctctgcaa

SEQ ID NO: 287956 - DNA, 15 bp, Homo sapiens
tctcagctctctgca

SEQ ID NO: 287957 - DNA, 15 bp, Homo sapiens
atctcagctctctgc

SEQ ID NO: 287958 - DNA, 15 bp, Homo sapiens
gatctcagctctctg

SEQ ID NO: 287959 - DNA, 15 bp, Homo sapiens
cgatctcagctctct

SEQ ID NO: 287960 - DNA, 15 bp, Homo sapiens
acgatctcagctctc

SEQ ID NO: 287961 - DNA, 15 bp, Homo sapiens
cacgatctcagctct

SEQ ID NO: 287962 - DNA, 15 bp, Homo sapiens
gcacgatctcagctc

SEQ ID NO: 287963 - DNA, 15 bp, Homo sapiens
ggcacgatctcagct

SEQ ID NO: 287964 - DNA, 15 bp, Homo sapiens
tggcacgatctcagc

SEQ ID NO: 287965 - DNA, 15 bp, Homo sapiens
atggcacgatctcag

SEQ ID NO: 287966 - DNA, 15 bp, Homo sapiens
aatggcacgatctca

SEQ ID NO: 287967 - DNA, 15 bp, Homo sapiens
caatggcacgatctc

SEQ ID NO: 287968 - DNA, 15 bp, Homo sapiens
gcaatggcacgatct

SEQ ID NO: 287969 - DNA, 15 bp, Homo sapiens
tgcaatggcacgatc

SEQ ID NO: 287970 - DNA, 15 bp, Homo sapiens
gtgcaatggcacgat

SEQ ID NO: 287971 - DNA, 15 bp, Homo sapiens
agtgcaatggcacga

SEQ ID NO: 287972 - DNA, 15 bp, Homo sapiens
aagtgcaatggcacg

SEQ ID NO: 287973 - DNA, 15 bp, Homo sapiens
gaagtgcaatggcac

SEQ ID NO: 287974 - DNA, 15 bp, Homo sapiens
tgaagtgcaatggca

SEQ ID NO: 287975 - DNA, 15 bp, Homo sapiens
ctgaagtgcaatggc

SEQ ID NO: 287976 - DNA, 15 bp, Homo sapiens
gctgaagtgcaatgg

SEQ ID NO: 287977 - DNA, 15 bp, Homo sapiens
ggctgaagtgcaatg

SEQ ID NO: 287978 - DNA, 15 bp, Homo sapiens
aggctgaagtgcaat

SEQ ID NO: 287979 - DNA, 15 bp, Homo sapiens
caggctgaagtgcaa

SEQ ID NO: 287980 - DNA, 15 bp, Homo sapiens
ccaggctgaagtgca

SEQ ID NO: 287981 - DNA, 15 bp, Homo sapiens
cccaggctgaagtgc

SEQ ID NO: 287982 - DNA, 15 bp, Homo sapiens
acccaggctgaagtg

SEQ ID NO: 287983 - DNA, 15 bp, Homo sapiens
cacccaggctgaagt

SEQ ID NO: 287984 - DNA, 15 bp, Homo sapiens
tcacccaggctgaag

SEQ ID NO: 287985 - DNA, 15 bp, Homo sapiens
gtcacccaggctgaa

SEQ ID NO: 287986 - DNA, 15 bp, Homo sapiens
tgtcacccaggctga

SEQ ID NO: 287987 - DNA, 15 bp, Homo sapiens
ttgtcacccaggctg

SEQ ID NO: 287988 - DNA, 15 bp, Homo sapiens
cttgtcacccaggct

SEQ ID NO: 287989 - DNA, 15 bp, Homo sapiens
tcttgtcacccaggc

SEQ ID NO: 287990 - DNA, 15 bp, Homo sapiens
ctcttgtcacccagg

SEQ ID NO: 287991 - DNA, 15 bp, Homo sapiens
gctcttgtcacccag

SEQ ID NO: 287992 - DNA, 15 bp, Homo sapiens
cgctcttgtcaccca

SEQ ID NO: 287993 - DNA, 15 bp, Homo sapiens
tcgctcttgtcaccc

SEQ ID NO: 287994 - DNA, 15 bp, Homo sapiens
ttcgctcttgtcacc

SEQ ID NO: 287995 - DNA, 15 bp, Homo sapiens
tttcgctcttgtcac

SEQ ID NO: 287996 - DNA, 15 bp, Homo sapiens
gtttcgctcttgtca

SEQ ID NO: 287997 - DNA, 15 bp, Homo sapiens
agtttcgctcttgtc

SEQ ID NO: 287998 - DNA, 15 bp, Homo sapiens
gagtttcgctcttgt

SEQ ID NO: 287999 - DNA, 15 bp, Homo sapiens
ggagtttcgctcttg

SEQ ID NO: 288000 - DNA, 15 bp, Homo sapiens
cggagtttcgctctt

SEQ ID NO: 288001 - DNA, 15 bp, Homo sapiens
acggagtttcgctct

SEQ ID NO: 288002 - DNA, 15 bp, Homo sapiens
gacggagtttcgctc

SEQ ID NO: 288003 - DNA, 15 bp, Homo sapiens
agacggagtttcgct

SEQ ID NO: 288004 - DNA, 15 bp, Homo sapiens
gagacggagtttcgc

SEQ ID NO: 288005 - DNA, 15 bp, Homo sapiens
tgagacggagtttcg

SEQ ID NO: 288006 - DNA, 15 bp, Homo sapiens
ttgagacggagtttc

SEQ ID NO: 288007 - DNA, 15 bp, Homo sapiens
tttgagacggagttt

SEQ ID NO: 288008 - DNA, 15 bp, Homo sapiens
ttttgagacggagtt

SEQ ID NO: 288009 - DNA, 15 bp, Homo sapiens
tttttttgagacgga

SEQ ID NO: 288010 - DNA, 15 bp, Homo sapiens
ttttttttgagacgg

SEQ ID NO: 288011 - DNA, 15 bp, Homo sapiens
tttttttttgagacg

SEQ ID NO: 288012 - DNA, 15 bp, Homo sapiens
attttttttttgaga

SEQ ID NO: 288013 - DNA, 15 bp, Homo sapiens
cattttttttttgag

SEQ ID NO: 288014 - DNA, 15 bp, Homo sapiens
acattttttttttga

SEQ ID NO: 288015 - DNA, 15 bp, Homo sapiens
cacattttttttttg

SEQ ID NO: 288016 - DNA, 15 bp, Homo sapiens
acacatttttttttt

SEQ ID NO: 288017 - DNA, 15 bp, Homo sapiens
tacacattttttttt

SEQ ID NO: 288018 - DNA, 15 bp, Homo sapiens
atacacatttttttt

SEQ ID NO: 288019 - DNA, 15 bp, Homo sapiens
tatacacattttttt

SEQ ID NO: 288020 - DNA, 15 bp, Homo sapiens
atatacacatttttt

SEQ ID NO: 288021 - DNA, 15 bp, Homo sapiens
tatatacacattttt

SEQ ID NO: 288022 - DNA, 15 bp, Homo sapiens
atatatacacatttt

SEQ ID NO: 288023 - DNA, 15 bp, Homo sapiens
tatatatacacattt

SEQ ID NO: 288024 - DNA, 15 bp, Homo sapiens
ttatatatacacatt

SEQ ID NO: 288025 - DNA, 15 bp, Homo sapiens
attatatatacacat

SEQ ID NO: 288026 - DNA, 15 bp, Homo sapiens
gattatatatacaca

SEQ ID NO: 288027 - DNA, 15 bp, Homo sapiens
agattatatatacac

SEQ ID NO: 288028 - DNA, 15 bp, Homo sapiens
aagattatatataca

SEQ ID NO: 288029 - DNA, 15 bp, Homo sapiens
aaagattatatatac

SEQ ID NO: 288030 - DNA, 15 bp, Homo sapiens
caaagattatatata

SEQ ID NO: 288031 - DNA, 15 bp, Homo sapiens
acaaagattatatat

SEQ ID NO: 288032 - DNA, 15 bp, Homo sapiens
cacaaagattatata

SEQ ID NO: 288033 - DNA, 15 bp, Homo sapiens
acacaaagattatat

SEQ ID NO: 288034 - DNA, 15 bp, Homo sapiens
cacacaaagattata

SEQ ID NO: 288035 - DNA, 15 bp, Homo sapiens
gcacacaaagattat

SEQ ID NO: 288036 - DNA, 15 bp, Homo sapiens
agcacacaaagatta

SEQ ID NO: 288037 - DNA, 15 bp, Homo sapiens
cagcacacaaagatt

SEQ ID NO: 288038 - DNA, 15 bp, Homo sapiens
ccagcacacaaagat

SEQ ID NO: 288039 - DNA, 15 bp, Homo sapiens
cccagcacacaaaga

SEQ ID NO: 288040 - DNA, 15 bp, Homo sapiens
gcccagcacacaaag

SEQ ID NO: 288041 - DNA, 15 bp, Homo sapiens
tgcccagcacacaaa

SEQ ID NO: 288042 - DNA, 15 bp, Homo sapiens
atgcccagcacacaa

SEQ ID NO: 288043 - DNA, 15 bp, Homo sapiens
aatgcccagcacaca

SEQ ID NO: 288044 - DNA, 15 bp, Homo sapiens
aaatgcccagcacac

SEQ ID NO: 288045 - DNA, 15 bp, Homo sapiens
aaaatgcccagcaca

SEQ ID NO: 288046 - DNA, 15 bp, Homo sapiens
taaaatgcccagcac

SEQ ID NO: 288047 - DNA, 15 bp, Homo sapiens
gtaaaatgcccagca

SEQ ID NO: 288048 - DNA, 15 bp, Homo sapiens
agtaaaatgcccagc

SEQ ID NO: 288049 - DNA, 15 bp, Homo sapiens
cagtaaaatgcccag

SEQ ID NO: 288050 - DNA, 15 bp, Homo sapiens
ccagtaaaatgccca

SEQ ID NO: 288051 - DNA, 15 bp, Homo sapiens
accagtaaaatgccc

SEQ ID NO: 288052 - DNA, 15 bp, Homo sapiens
aaccagtaaaatgcc

SEQ ID NO: 288053 - DNA, 15 bp, Homo sapiens
caaccagtaaaatgc

SEQ ID NO: 288054 - DNA, 15 bp, Homo sapiens
gcaaccagtaaaatg

SEQ ID NO: 288055 - DNA, 15 bp, Homo sapiens
agcaaccagtaaaat

SEQ ID NO: 288056 - DNA, 15 bp, Homo sapiens
cagcaaccagtaaaa

SEQ ID NO: 288057 - DNA, 15 bp, Homo sapiens
tcagcaaccagtaaa

SEQ ID NO: 288058 - DNA, 15 bp, Homo sapiens
ttcagcaaccagtaa

SEQ ID NO: 288059 - DNA, 15 bp, Homo sapiens
cttcagcaaccagta

SEQ ID NO: 288060 - DNA, 15 bp, Homo sapiens
tcttcagcaaccagt

SEQ ID NO: 288061 - DNA, 15 bp, Homo sapiens
atcttcagcaaccag

SEQ ID NO: 288062 - DNA, 15 bp, Homo sapiens
tatcttcagcaacca

SEQ ID NO: 288063 - DNA, 15 bp, Homo sapiens
atatcttcagcaacc

SEQ ID NO: 288064 - DNA, 15 bp, Homo sapiens
catatcttcagcaac

SEQ ID NO: 288065 - DNA, 15 bp, Homo sapiens
ccatatcttcagcaa

SEQ ID NO: 288066 - DNA, 15 bp, Homo sapiens
accatatcttcagca

SEQ ID NO: 288067 - DNA, 15 bp, Homo sapiens
aaccatatcttcagc

SEQ ID NO: 288068 - DNA, 15 bp, Homo sapiens
taaccatatcttcag

SEQ ID NO: 288069 - DNA, 15 bp, Homo sapiens
ataaccatatcttca

SEQ ID NO: 288070 - DNA, 15 bp, Homo sapiens
aataaccatatcttc

SEQ ID NO: 288071 - DNA, 15 bp, Homo sapiens
caataaccatatctt

SEQ ID NO: 288072 - DNA, 15 bp, Homo sapiens
ccaataaccatatct

SEQ ID NO: 288073 - DNA, 15 bp, Homo sapiens
tccaataaccatatc

SEQ ID NO: 288074 - DNA, 15 bp, Homo sapiens
gtccaataaccatat

SEQ ID NO: 288075 - DNA, 15 bp, Homo sapiens
ggtccaataaccata

SEQ ID NO: 288076 - DNA, 15 bp, Homo sapiens
aggtccaataaccat

SEQ ID NO: 288077 - DNA, 15 bp, Homo sapiens
taggtccaataacca

SEQ ID NO: 288078 - DNA, 15 bp, Homo sapiens
ctaggtccaataacc

SEQ ID NO: 288079 - DNA, 15 bp, Homo sapiens
actaggtccaataac

SEQ ID NO: 288080 - DNA, 15 bp, Homo sapiens
aactaggtccaataa

SEQ ID NO: 288081 - DNA, 15 bp, Homo sapiens
aaactaggtccaata

SEQ ID NO: 288082 - DNA, 15 bp, Homo sapiens
aaaactaggtccaat

SEQ ID NO: 288083 - DNA, 15 bp, Homo sapiens
caaaactaggtccaa

SEQ ID NO: 288084 - DNA, 15 bp, Homo sapiens
acaaaactaggtcca

SEQ ID NO: 288085 - DNA, 15 bp, Homo sapiens
gacaaaactaggtcc

SEQ ID NO: 288086 - DNA, 15 bp, Homo sapiens
agacaaaactaggtc

SEQ ID NO: 288087 - DNA, 15 bp, Homo sapiens
cagacaaaactaggt

SEQ ID NO: 288088 - DNA, 15 bp, Homo sapiens
acagacaaaactagg

SEQ ID NO: 288089 - DNA, 15 bp, Homo sapiens
aacagacaaaactag

SEQ ID NO: 288090 - DNA, 15 bp, Homo sapiens
gaacagacaaaacta

SEQ ID NO: 288091 - DNA, 15 bp, Homo sapiens
agaacagacaaaact

SEQ ID NO: 288092 - DNA, 15 bp, Homo sapiens
aagaacagacaaaac

SEQ ID NO: 288093 - DNA, 15 bp, Homo sapiens
taagaacagacaaaa

SEQ ID NO: 288094 - DNA, 15 bp, Homo sapiens
ttaagaacagacaaa

SEQ ID NO: 288095 - DNA, 15 bp, Homo sapiens
tttaagaacagacaa

SEQ ID NO: 288096 - DNA, 15 bp, Homo sapiens
ctttaagaacagaca

SEQ ID NO: 288097 - DNA, 15 bp, Homo sapiens
tctttaagaacagac

SEQ ID NO: 288098 - DNA, 15 bp, Homo sapiens
ttctttaagaacaga

SEQ ID NO: 288099 - DNA, 15 bp, Homo sapiens
gttctttaagaacag

SEQ ID NO: 288100 - DNA, 15 bp, Homo sapiens
tgttctttaagaaca

SEQ ID NO: 288101 - DNA, 15 bp, Homo sapiens
atgttctttaagaac

SEQ ID NO: 288102 - DNA, 15 bp, Homo sapiens
tatgttctttaagaa

SEQ ID NO: 288103 - DNA, 15 bp, Homo sapiens
ttatgttctttaaga

SEQ ID NO: 288104 - DNA, 15 bp, Homo sapiens
gttatgttctttaag

SEQ ID NO: 288105 - DNA, 15 bp, Homo sapiens
ggttatgttctttaa

SEQ ID NO: 288106 - DNA, 15 bp, Homo sapiens
aggttatgttcttta

SEQ ID NO: 288107 - DNA, 15 bp, Homo sapiens
taggttatgttcttt

SEQ ID NO: 288108 - DNA, 15 bp, Homo sapiens
ttaggttatgttctt

SEQ ID NO: 288109 - DNA, 15 bp, Homo sapiens
tttaggttatgttct

SEQ ID NO: 288110 - DNA, 15 bp, Homo sapiens
ttttaggttatgttc

SEQ ID NO: 288111 - DNA, 15 bp, Homo sapiens
attttaggttatgtt

SEQ ID NO: 288112 - DNA, 15 bp, Homo sapiens
tattttaggttatgt

SEQ ID NO: 288113 - DNA, 15 bp, Homo sapiens
ctattttaggttatg

SEQ ID NO: 288114 - DNA, 15 bp, Homo sapiens
cctattttaggttat

SEQ ID NO: 288115 - DNA, 15 bp, Homo sapiens
tcctattttaggtta

SEQ ID NO: 288116 - DNA, 15 bp, Homo sapiens
ttcctattttaggtt

SEQ ID NO: 288117 - DNA, 15 bp, Homo sapiens
attcctattttaggt

SEQ ID NO: 288118 - DNA, 15 bp, Homo sapiens
cattcctattttagg

SEQ ID NO: 288119 - DNA, 15 bp, Homo sapiens
acattcctattttag

SEQ ID NO: 288120 - DNA, 15 bp, Homo sapiens
cacattcctatttta

SEQ ID NO: 288121 - DNA, 15 bp, Homo sapiens
acacattcctatttt

SEQ ID NO: 288122 - DNA, 15 bp, Homo sapiens
aacacattcctattt

SEQ ID NO: 288123 - DNA, 15 bp, Homo sapiens
gaacacattcctatt

SEQ ID NO: 288124 - DNA, 15 bp, Homo sapiens
ggaacacattcctat

SEQ ID NO: 288125 - DNA, 15 bp, Homo sapiens
tggaacacattccta

SEQ ID NO: 288126 - DNA, 15 bp, Homo sapiens
atggaacacattcct

SEQ ID NO: 288127 - DNA, 15 bp, Homo sapiens
aatggaacacattcc

SEQ ID NO: 288128 - DNA, 15 bp, Homo sapiens
aaatggaacacattc

SEQ ID NO: 288129 - DNA, 15 bp, Homo sapiens
gaaatggaacacatt

SEQ ID NO: 288130 - DNA, 15 bp, Homo sapiens
tgaaatggaacacat

SEQ ID NO: 288131 - DNA, 15 bp, Homo sapiens
ctgaaatggaacaca

SEQ ID NO: 288132 - DNA, 15 bp, Homo sapiens
actgaaatggaacac

SEQ ID NO: 288133 - DNA, 15 bp, Homo sapiens
tactgaaatggaaca

SEQ ID NO: 288134 - DNA, 15 bp, Homo sapiens
ttactgaaatggaac

SEQ ID NO: 288135 - DNA, 15 bp, Homo sapiens
tttactgaaatggaa

SEQ ID NO: 288136 - DNA, 15 bp, Homo sapiens
atttactgaaatgga

SEQ ID NO: 288137 - DNA, 15 bp, Homo sapiens
tatttactgaaatgg

SEQ ID NO: 288138 - DNA, 15 bp, Homo sapiens
ttatttactgaaatg

SEQ ID NO: 288139 - DNA, 15 bp, Homo sapiens
tttatttactgaaat

SEQ ID NO: 288140 - DNA, 15 bp, Homo sapiens
ttttatttactgaaa

SEQ ID NO: 288141 - DNA, 15 bp, Homo sapiens
tttttatttactgaa

SEQ ID NO: 288142 - DNA, 15 bp, Homo sapiens
ttttttatttactga

SEQ ID NO: 288143 - DNA, 15 bp, Homo sapiens
cttttttatttactg

SEQ ID NO: 288144 - DNA, 15 bp, Homo sapiens
tcttttttatttact

SEQ ID NO: 288145 - DNA, 15 bp, Homo sapiens
ttcttttttatttac

SEQ ID NO: 288146 - DNA, 15 bp, Homo sapiens
tttcttttttattta

SEQ ID NO: 288147 - DNA, 15 bp, Homo sapiens
ttttcttttttattt

SEQ ID NO: 288148 - DNA, 15 bp, Homo sapiens
tttttcttttttatt

SEQ ID NO: 288149 - DNA, 15 bp, Homo sapiens
ttttttcttttttat

SEQ ID NO: 288150 - DNA, 15 bp, Homo sapiens
attttttctttttta

SEQ ID NO: 288151 - DNA, 15 bp, Homo sapiens
aattttttctttttt

SEQ ID NO: 288152 - DNA, 15 bp, Homo sapiens
taattttttcttttt

SEQ ID NO: 288153 - DNA, 15 bp, Homo sapiens
ttaattttttctttt

SEQ ID NO: 288154 - DNA, 15 bp, Homo sapiens
tttaattttttcttt

SEQ ID NO: 288155 - DNA, 15 bp, Homo sapiens
ctttaattttttctt

SEQ ID NO: 288156 - DNA, 15 bp, Homo sapiens
actttaattttttct

SEQ ID NO: 288157 - DNA, 15 bp, Homo sapiens
tactttaattttttc

SEQ ID NO: 288158 - DNA, 15 bp, Homo sapiens
atactttaatttttt

SEQ ID NO: 288159 - DNA, 15 bp, Homo sapiens
gatactttaattttt

SEQ ID NO: 288160 - DNA, 15 bp, Homo sapiens
tgatactttaatttt

SEQ ID NO: 288161 - DNA, 15 bp, Homo sapiens
gtgatactttaattt

SEQ ID NO: 288162 - DNA, 15 bp, Homo sapiens
agtgatactttaatt

SEQ ID NO: 288163 - DNA, 15 bp, Homo sapiens
tagtgatactttaat

SEQ ID NO: 288164 - DNA, 15 bp, Homo sapiens
atagtgatactttaa

SEQ ID NO: 288165 - DNA, 15 bp, Homo sapiens
aatagtgatacttta

SEQ ID NO: 288166 - DNA, 15 bp, Homo sapiens
aaatagtgatacttt

SEQ ID NO: 288167 - DNA, 15 bp, Homo sapiens
caaatagtgatactt

SEQ ID NO: 288168 - DNA, 15 bp, Homo sapiens
tcaaatagtgatact

SEQ ID NO: 288169 - DNA, 15 bp, Homo sapiens
atcaaatagtgatac

SEQ ID NO: 288170 - DNA, 15 bp, Homo sapiens
gatcaaatagtgata

SEQ ID NO: 288171 - DNA, 15 bp, Homo sapiens
agatcaaatagtgat

SEQ ID NO: 288172 - DNA, 15 bp, Homo sapiens
cagatcaaatagtga

SEQ ID NO: 288173 - DNA, 15 bp, Homo sapiens
gcagatcaaatagtg

SEQ ID NO: 288174 - DNA, 15 bp, Homo sapiens
tgcagatcaaatagt

SEQ ID NO: 288175 - DNA, 15 bp, Homo sapiens
atgcagatcaaatag

SEQ ID NO: 288176 - DNA, 15 bp, Homo sapiens
catgcagatcaaata

SEQ ID NO: 288177 - DNA, 15 bp, Homo sapiens
gcatgcagatcaaat

SEQ ID NO: 288178 - DNA, 15 bp, Homo sapiens
tgcatgcagatcaaa

SEQ ID NO: 288179 - DNA, 15 bp, Homo sapiens
ttgcatgcagatcaa

SEQ ID NO: 288180 - DNA, 15 bp, Homo sapiens
gttgcatgcagatca

SEQ ID NO: 288181 - DNA, 15 bp, Homo sapiens
ggttgcatgcagatc

SEQ ID NO: 288182 - DNA, 15 bp, Homo sapiens
aggttgcatgcagat

SEQ ID NO: 288183 - DNA, 15 bp, Homo sapiens
aaggttgcatgcaga

SEQ ID NO: 288184 - DNA, 15 bp, Homo sapiens
taaggttgcatgcag

SEQ ID NO: 288185 - DNA, 15 bp, Homo sapiens
ttaaggttgcatgca

SEQ ID NO: 288186 - DNA, 15 bp, Homo sapiens
tttaaggttgcatgc

SEQ ID NO: 288187 - DNA, 15 bp, Homo sapiens
ctttaaggttgcatg

SEQ ID NO: 288188 - DNA, 15 bp, Homo sapiens
cctttaaggttgcat

SEQ ID NO: 288189 - DNA, 15 bp, Homo sapiens
tcctttaaggttgca

SEQ ID NO: 288190 - DNA, 15 bp, Homo sapiens
atcctttaaggttgc

SEQ ID NO: 288191 - DNA, 15 bp, Homo sapiens
aatcctttaaggttg

SEQ ID NO: 288192 - DNA, 15 bp, Homo sapiens
taatcctttaaggtt

SEQ ID NO: 288193 - DNA, 15 bp, Homo sapiens
ctaatcctttaaggt

SEQ ID NO: 288194 - DNA, 15 bp, Homo sapiens
tctaatcctttaagg

SEQ ID NO: 288195 - DNA, 15 bp, Homo sapiens
ttctaatcctttaag

SEQ ID NO: 288196 - DNA, 15 bp, Homo sapiens
gttctaatcctttaa

SEQ ID NO: 288197 - DNA, 15 bp, Homo sapiens
agttctaatccttta

SEQ ID NO: 288198 - DNA, 15 bp, Homo sapiens
tagttctaatccttt

SEQ ID NO: 288199 - DNA, 15 bp, Homo sapiens
atagttctaatcctt

SEQ ID NO: 288200 - DNA, 15 bp, Homo sapiens
aatagttctaatcct

SEQ ID NO: 288201 - DNA, 15 bp, Homo sapiens
aaatagttctaatcc

SEQ ID NO: 288202 - DNA, 15 bp, Homo sapiens
aaaatagttctaatc

SEQ ID NO: 288203 - DNA, 15 bp, Homo sapiens
aaaaatagttctaat

SEQ ID NO: 288204 - DNA, 15 bp, Homo sapiens
aaaaaatagttctaa

SEQ ID NO: 288205 - DNA, 15 bp, Homo sapiens
taaaaaatagttcta

SEQ ID NO: 288206 - DNA, 15 bp, Homo sapiens
ataaaaaatagttct

SEQ ID NO: 288207 - DNA, 15 bp, Homo sapiens
cataaaaaatagttc

SEQ ID NO: 288208 - DNA, 15 bp, Homo sapiens
acataaaaaatagtt

SEQ ID NO: 288209 - DNA, 15 bp, Homo sapiens
gacataaaaaatagt

SEQ ID NO: 288210 - DNA, 15 bp, Homo sapiens
agacataaaaaatag

SEQ ID NO: 288211 - DNA, 15 bp, Homo sapiens
aagacataaaaaata

SEQ ID NO: 288212 - DNA, 15 bp, Homo sapiens
aaagacataaaaaat

SEQ ID NO: 288213 - DNA, 15 bp, Homo sapiens
aaaagacataaaaaa

SEQ ID NO: 288214 - DNA, 15 bp, Homo sapiens
aaaaagacataaaaa

SEQ ID NO: 288215 - DNA, 15 bp, Homo sapiens
gaaaaagacataaaa

SEQ ID NO: 288216 - DNA, 15 bp, Homo sapiens
ggaaaaagacataaa

SEQ ID NO: 288217 - DNA, 15 bp, Homo sapiens
aggaaaaagacataa

SEQ ID NO: 288218 - DNA, 15 bp, Homo sapiens
gaggaaaaagacata

SEQ ID NO: 288219 - DNA, 15 bp, Homo sapiens
tgaggaaaaagacat

SEQ ID NO: 288220 - DNA, 15 bp, Homo sapiens
gtgaggaaaaagaca

SEQ ID NO: 288221 - DNA, 15 bp, Homo sapiens
agtgaggaaaaagac

SEQ ID NO: 288222 - DNA, 15 bp, Homo sapiens
gagtgaggaaaaaga

SEQ ID NO: 288223 - DNA, 15 bp, Homo sapiens
tgagtgaggaaaaag

SEQ ID NO: 288224 - DNA, 15 bp, Homo sapiens
atgagtgaggaaaaa

SEQ ID NO: 288225 - DNA, 15 bp, Homo sapiens
aatgagtgaggaaaa

SEQ ID NO: 288226 - DNA, 15 bp, Homo sapiens
aaatgagtgaggaaa

SEQ ID NO: 288227 - DNA, 15 bp, Homo sapiens
gaaatgagtgaggaa

SEQ ID NO: 288228 - DNA, 15 bp, Homo sapiens
ggaaatgagtgagga

SEQ ID NO: 288229 - DNA, 15 bp, Homo sapiens
gggaaatgagtgagg

SEQ ID NO: 288230 - DNA, 15 bp, Homo sapiens
tgggaaatgagtgag

SEQ ID NO: 288231 - DNA, 15 bp, Homo sapiens
gtgggaaatgagtga

SEQ ID NO: 288232 - DNA, 15 bp, Homo sapiens
tgtgggaaatgagtg

SEQ ID NO: 288233 - DNA, 15 bp, Homo sapiens
atgtgggaaatgagt

SEQ ID NO: 288234 - DNA, 15 bp, Homo sapiens
gatgtgggaaatgag

SEQ ID NO: 288235 - DNA, 15 bp, Homo sapiens
tgatgtgggaaatga

SEQ ID NO: 288236 - DNA, 15 bp, Homo sapiens
ttgatgtgggaaatg

SEQ ID NO: 288237 - DNA, 15 bp, Homo sapiens
tttgatgtgggaaat

SEQ ID NO: 288238 - DNA, 15 bp, Homo sapiens
ttttgatgtgggaaa

SEQ ID NO: 288239 - DNA, 15 bp, Homo sapiens
attttgatgtgggaa

SEQ ID NO: 288240 - DNA, 15 bp, Homo sapiens
gattttgatgtggga

SEQ ID NO: 288241 - DNA, 15 bp, Homo sapiens
agattttgatgtggg

SEQ ID NO: 288242 - DNA, 15 bp, Homo sapiens
cagattttgatgtgg

SEQ ID NO: 288243 - DNA, 15 bp, Homo sapiens
acagattttgatgtg

SEQ ID NO: 288244 - DNA, 15 bp, Homo sapiens
aacagattttgatgt

SEQ ID NO: 288245 - DNA, 15 bp, Homo sapiens
taacagattttgatg

SEQ ID NO: 288246 - DNA, 15 bp, Homo sapiens
ataacagattttgat

SEQ ID NO: 288247 - DNA, 15 bp, Homo sapiens
gataacagattttga

SEQ ID NO: 288248 - DNA, 15 bp, Homo sapiens
tgataacagattttg

SEQ ID NO: 288249 - DNA, 15 bp, Homo sapiens
ttgataacagatttt

SEQ ID NO: 288250 - DNA, 15 bp, Homo sapiens
cttgataacagattt

SEQ ID NO: 288251 - DNA, 15 bp, Homo sapiens
ccttgataacagatt

SEQ ID NO: 288252 - DNA, 15 bp, Homo sapiens
gccttgataacagat

SEQ ID NO: 288253 - DNA, 15 bp, Homo sapiens
agccttgataacaga

SEQ ID NO: 288254 - DNA, 15 bp, Homo sapiens
aagccttgataacag

SEQ ID NO: 288255 - DNA, 15 bp, Homo sapiens
caagccttgataaca

SEQ ID NO: 288256 - DNA, 15 bp, Homo sapiens
acaagccttgataac

SEQ ID NO: 288257 - DNA, 15 bp, Homo sapiens
aacaagccttgataa

SEQ ID NO: 288258 - DNA, 15 bp, Homo sapiens
caacaagccttgata

SEQ ID NO: 288259 - DNA, 15 bp, Homo sapiens
tcaacaagccttgat

SEQ ID NO: 288260 - DNA, 15 bp, Homo sapiens
ttcaacaagccttga

SEQ ID NO: 288261 - DNA, 15 bp, Homo sapiens
attcaacaagccttg

SEQ ID NO: 288262 - DNA, 15 bp, Homo sapiens
tattcaacaagcctt

SEQ ID NO: 288263 - DNA, 15 bp, Homo sapiens
ttattcaacaagcct

SEQ ID NO: 288264 - DNA, 15 bp, Homo sapiens
attattcaacaagcc

SEQ ID NO: 288265 - DNA, 15 bp, Homo sapiens
gattattcaacaagc

SEQ ID NO: 288266 - DNA, 15 bp, Homo sapiens
agattattcaacaag

SEQ ID NO: 288267 - DNA, 15 bp, Homo sapiens
tagattattcaacaa

SEQ ID NO: 288268 - DNA, 15 bp, Homo sapiens
gtagattattcaaca

SEQ ID NO: 288269 - DNA, 15 bp, Homo sapiens
ggtagattattcaac

SEQ ID NO: 288270 - DNA, 15 bp, Homo sapiens
aggtagattattcaa

SEQ ID NO: 288271 - DNA, 15 bp, Homo sapiens
gaggtagattattca

SEQ ID NO: 288272 - DNA, 15 bp, Homo sapiens
ggaggtagattattc

SEQ ID NO: 288273 - DNA, 15 bp, Homo sapiens
tggaggtagattatt

SEQ ID NO: 288274 - DNA, 15 bp, Homo sapiens
ttggaggtagattat

SEQ ID NO: 288275 - DNA, 15 bp, Homo sapiens
tttggaggtagatta

SEQ ID NO: 288276 - DNA, 15 bp, Homo sapiens
ttttggaggtagatt

SEQ ID NO: 288277 - DNA, 15 bp, Homo sapiens
attttggaggtagat

SEQ ID NO: 288278 - DNA, 15 bp, Homo sapiens
tattttggaggtaga

SEQ ID NO: 288279 - DNA, 15 bp, Homo sapiens
atattttggaggtag

SEQ ID NO: 288280 - DNA, 15 bp, Homo sapiens
aatattttggaggta

SEQ ID NO: 288281 - DNA, 15 bp, Homo sapiens
aaatattttggaggt

SEQ ID NO: 288282 - DNA, 15 bp, Homo sapiens
gaaatattttggagg

SEQ ID NO: 288283 - DNA, 15 bp, Homo sapiens
ggaaatattttggag

SEQ ID NO: 288284 - DNA, 15 bp, Homo sapiens
aggaaatattttgga

SEQ ID NO: 288285 - DNA, 15 bp, Homo sapiens
caggaaatattttgg

SEQ ID NO: 288286 - DNA, 15 bp, Homo sapiens
tcaggaaatattttg

SEQ ID NO: 288287 - DNA, 15 bp, Homo sapiens
ctcaggaaatatttt

SEQ ID NO: 288288 - DNA, 15 bp, Homo sapiens
actcaggaaatattt

SEQ ID NO: 288289 - DNA, 15 bp, Homo sapiens
cactcaggaaatatt

SEQ ID NO: 288290 - DNA, 15 bp, Homo sapiens
gcactcaggaaatat

SEQ ID NO: 288291 - DNA, 15 bp, Homo sapiens
tgcactcaggaaata

SEQ ID NO: 288292 - DNA, 15 bp, Homo sapiens
atgcactcaggaaat

SEQ ID NO: 288293 - DNA, 15 bp, Homo sapiens
gatgcactcaggaaa

SEQ ID NO: 288294 - DNA, 15 bp, Homo sapiens
agatgcactcaggaa

SEQ ID NO: 288295 - DNA, 15 bp, Homo sapiens
tagatgcactcagga

SEQ ID NO: 288296 - DNA, 15 bp, Homo sapiens
gtagatgcactcagg

SEQ ID NO: 288297 - DNA, 15 bp, Homo sapiens
agtagatgcactcag

SEQ ID NO: 288298 - DNA, 15 bp, Homo sapiens
aagtagatgcactca

SEQ ID NO: 288299 - DNA, 15 bp, Homo sapiens
aaagtagatgcactc

SEQ ID NO: 288300 - DNA, 15 bp, Homo sapiens
aaaagtagatgcact

SEQ ID NO: 288301 - DNA, 15 bp, Homo sapiens
gaaaagtagatgcac

SEQ ID NO: 288302 - DNA, 15 bp, Homo sapiens
agaaaagtagatgca

SEQ ID NO: 288303 - DNA, 15 bp, Homo sapiens
gagaaaagtagatgc

SEQ ID NO: 288304 - DNA, 15 bp, Homo sapiens
ggagaaaagtagatg

SEQ ID NO: 288305 - DNA, 15 bp, Homo sapiens
tggagaaaagtagat

SEQ ID NO: 288306 - DNA, 15 bp, Homo sapiens
atggagaaaagtaga

SEQ ID NO: 288307 - DNA, 15 bp, Homo sapiens
aatggagaaaagtag

SEQ ID NO: 288308 - DNA, 15 bp, Homo sapiens
aaatggagaaaagta

SEQ ID NO: 288309 - DNA, 15 bp, Homo sapiens
gaaatggagaaaagt

SEQ ID NO: 288310 - DNA, 15 bp, Homo sapiens
agaaatggagaaaag

SEQ ID NO: 288311 - DNA, 15 bp, Homo sapiens
cagaaatggagaaaa

SEQ ID NO: 288312 - DNA, 15 bp, Homo sapiens
gcagaaatggagaaa

SEQ ID NO: 288313 - DNA, 15 bp, Homo sapiens
agcagaaatggagaa

SEQ ID NO: 288314 - DNA, 15 bp, Homo sapiens
gagcagaaatggaga

SEQ ID NO: 288315 - DNA, 15 bp, Homo sapiens
agagcagaaatggag

SEQ ID NO: 288316 - DNA, 15 bp, Homo sapiens
gagagcagaaatgga

SEQ ID NO: 288317 - DNA, 15 bp, Homo sapiens
tgagagcagaaatgg

SEQ ID NO: 288318 - DNA, 15 bp, Homo sapiens
gtgagagcagaaatg

SEQ ID NO: 288319 - DNA, 15 bp, Homo sapiens
tgtgagagcagaaat

SEQ ID NO: 288320 - DNA, 15 bp, Homo sapiens
ttgtgagagcagaaa

SEQ ID NO: 288321 - DNA, 15 bp, Homo sapiens
gttgtgagagcagaa

SEQ ID NO: 288322 - DNA, 15 bp, Homo sapiens
agttgtgagagcaga

SEQ ID NO: 288323 - DNA, 15 bp, Homo sapiens
gagttgtgagagcag

SEQ ID NO: 288324 - DNA, 15 bp, Homo sapiens
agagttgtgagagca

SEQ ID NO: 288325 - DNA, 15 bp, Homo sapiens
aagagttgtgagagc

SEQ ID NO: 288326 - DNA, 15 bp, Homo sapiens
caagagttgtgagag

SEQ ID NO: 288327 - DNA, 15 bp, Homo sapiens
acaagagttgtgaga

SEQ ID NO: 288328 - DNA, 15 bp, Homo sapiens
gacaagagttgtgag

SEQ ID NO: 288329 - DNA, 15 bp, Homo sapiens
ggacaagagttgtga

SEQ ID NO: 288330 - DNA, 15 bp, Homo sapiens
tggacaagagttgtg

SEQ ID NO: 288331 - DNA, 15 bp, Homo sapiens
ttggacaagagttgt

SEQ ID NO: 288332 - DNA, 15 bp, Homo sapiens
cttggacaagagttg

SEQ ID NO: 288333 - DNA, 15 bp, Homo sapiens
tcttggacaagagtt

SEQ ID NO: 288334 - DNA, 15 bp, Homo sapiens
gtcttggacaagagt

SEQ ID NO: 288335 - DNA, 15 bp, Homo sapiens
tgtcttggacaagag

SEQ ID NO: 288336 - DNA, 15 bp, Homo sapiens
atgtcttggacaaga

SEQ ID NO: 288337 - DNA, 15 bp, Homo sapiens
aatgtcttggacaag

SEQ ID NO: 288338 - DNA, 15 bp, Homo sapiens
caatgtcttggacaa

SEQ ID NO: 288339 - DNA, 15 bp, Homo sapiens
acaatgtcttggaca

SEQ ID NO: 288340 - DNA, 15 bp, Homo sapiens
aacaatgtcttggac

SEQ ID NO: 288341 - DNA, 15 bp, Homo sapiens
gaacaatgtcttgga

SEQ ID NO: 288342 - DNA, 15 bp, Homo sapiens
agaacaatgtcttgg

SEQ ID NO: 288343 - DNA, 15 bp, Homo sapiens
gagaacaatgtcttg

SEQ ID NO: 288344 - DNA, 15 bp, Homo sapiens
agagaacaatgtctt

SEQ ID NO: 288345 - DNA, 15 bp, Homo sapiens
aagagaacaatgtct

SEQ ID NO: 288346 - DNA, 15 bp, Homo sapiens
aaagagaacaatgtc

SEQ ID NO: 288347 - DNA, 15 bp, Homo sapiens
gaaagagaacaatgt

SEQ ID NO: 288348 - DNA, 15 bp, Homo sapiens
agaaagagaacaatg

SEQ ID NO: 288349 - DNA, 15 bp, Homo sapiens
gagaaagagaacaat

SEQ ID NO: 288350 - DNA, 15 bp, Homo sapiens
agagaaagagaacaa

SEQ ID NO: 288351 - DNA, 15 bp, Homo sapiens
aagagaaagagaaca

SEQ ID NO: 288352 - DNA, 15 bp, Homo sapiens
caagagaaagagaac

SEQ ID NO: 288353 - DNA, 15 bp, Homo sapiens
ccaagagaaagagaa

SEQ ID NO: 288354 - DNA, 15 bp, Homo sapiens
tccaagagaaagaga

SEQ ID NO: 288355 - DNA, 15 bp, Homo sapiens
atccaagagaaagag

SEQ ID NO: 288356 - DNA, 15 bp, Homo sapiens
aatccaagagaaaga

SEQ ID NO: 288357 - DNA, 15 bp, Homo sapiens
aaatccaagagaaag

SEQ ID NO: 288358 - DNA, 15 bp, Homo sapiens
aaaatccaagagaaa

SEQ ID NO: 288359 - DNA, 15 bp, Homo sapiens
aaaaatccaagagaa

SEQ ID NO: 288360 - DNA, 15 bp, Homo sapiens
aaaaaatccaagaga

SEQ ID NO: 288361 - DNA, 15 bp, Homo sapiens
caaaaaatccaagag

SEQ ID NO: 288362 - DNA, 15 bp, Homo sapiens
gcaaaaaatccaaga

SEQ ID NO: 288363 - DNA, 15 bp, Homo sapiens
tgcaaaaaatccaag

SEQ ID NO: 288364 - DNA, 15 bp, Homo sapiens
ctgcaaaaaatccaa

SEQ ID NO: 288365 - DNA, 15 bp, Homo sapiens
actgcaaaaaatcca

SEQ ID NO: 288366 - DNA, 15 bp, Homo sapiens
tactgcaaaaaatcc

SEQ ID NO: 288367 - DNA, 15 bp, Homo sapiens
ctactgcaaaaaatc

SEQ ID NO: 288368 - DNA, 15 bp, Homo sapiens
gctactgcaaaaaat

SEQ ID NO: 288369 - DNA, 15 bp, Homo sapiens
ggctactgcaaaaaa

SEQ ID NO: 288370 - DNA, 15 bp, Homo sapiens
aggctactgcaaaaa

SEQ ID NO: 288371 - DNA, 15 bp, Homo sapiens
taggctactgcaaaa

SEQ ID NO: 288372 - DNA, 15 bp, Homo sapiens
gtaggctactgcaaa

SEQ ID NO: 288373 - DNA, 15 bp, Homo sapiens
agtaggctactgcaa

SEQ ID NO: 288374 - DNA, 15 bp, Homo sapiens
tagtaggctactgca

SEQ ID NO: 288375 - DNA, 15 bp, Homo sapiens
gtagtaggctactgc

SEQ ID NO: 288376 - DNA, 15 bp, Homo sapiens
ggtagtaggctactg

SEQ ID NO: 288377 - DNA, 15 bp, Homo sapiens
aggtagtaggctact

SEQ ID NO: 288378 - DNA, 15 bp, Homo sapiens
caggtagtaggctac

SEQ ID NO: 288379 - DNA, 15 bp, Homo sapiens
tcaggtagtaggcta

SEQ ID NO: 288380 - DNA, 15 bp, Homo sapiens
atcaggtagtaggct

SEQ ID NO: 288381 - DNA, 15 bp, Homo sapiens
gatcaggtagtaggc

SEQ ID NO: 288382 - DNA, 15 bp, Homo sapiens
agatcaggtagtagg

SEQ ID NO: 288383 - DNA, 15 bp, Homo sapiens
aagatcaggtagtag

SEQ ID NO: 288384 - DNA, 15 bp, Homo sapiens
caagatcaggtagta

SEQ ID NO: 288385 - DNA, 15 bp, Homo sapiens
gcaagatcaggtagt

SEQ ID NO: 288386 - DNA, 15 bp, Homo sapiens
agcaagatcaggtag

SEQ ID NO: 288387 - DNA, 15 bp, Homo sapiens
gagcaagatcaggta

SEQ ID NO: 288388 - DNA, 15 bp, Homo sapiens
ggagcaagatcaggt

SEQ ID NO: 288389 - DNA, 15 bp, Homo sapiens
aggagcaagatcagg

SEQ ID NO: 288390 - DNA, 15 bp, Homo sapiens
aaggagcaagatcag

SEQ ID NO: 288391 - DNA, 15 bp, Homo sapiens
gaaggagcaagatca

SEQ ID NO: 288392 - DNA, 15 bp, Homo sapiens
agaaggagcaagatc

SEQ ID NO: 288393 - DNA, 15 bp, Homo sapiens
cagaaggagcaagat

SEQ ID NO: 288394 - DNA, 15 bp, Homo sapiens
ccagaaggagcaaga

SEQ ID NO: 288395 - DNA, 15 bp, Homo sapiens
accagaaggagcaag

SEQ ID NO: 288396 - DNA, 15 bp, Homo sapiens
gaccagaaggagcaa

SEQ ID NO: 288397 - DNA, 15 bp, Homo sapiens
agaccagaaggagca

SEQ ID NO: 288398 - DNA, 15 bp, Homo sapiens
gagaccagaaggagc

SEQ ID NO: 288399 - DNA, 15 bp, Homo sapiens
tgagaccagaaggag

SEQ ID NO: 288400 - DNA, 15 bp, Homo sapiens
atgagaccagaagga

SEQ ID NO: 288401 - DNA, 15 bp, Homo sapiens
gatgagaccagaagg

SEQ ID NO: 288402 - DNA, 15 bp, Homo sapiens
tgatgagaccagaag

SEQ ID NO: 288403 - DNA, 15 bp, Homo sapiens
atgatgagaccagaa

SEQ ID NO: 288404 - DNA, 15 bp, Homo sapiens
aatgatgagaccaga

SEQ ID NO: 288405 - DNA, 15 bp, Homo sapiens
caatgatgagaccag

SEQ ID NO: 288406 - DNA, 15 bp, Homo sapiens
acaatgatgagacca

SEQ ID NO: 288407 - DNA, 15 bp, Homo sapiens
aacaatgatgagacc

SEQ ID NO: 288408 - DNA, 15 bp, Homo sapiens
gaacaatgatgagac

SEQ ID NO: 288409 - DNA, 15 bp, Homo sapiens
ggaacaatgatgaga

SEQ ID NO: 288410 - DNA, 15 bp, Homo sapiens
aggaacaatgatgag

SEQ ID NO: 288411 - DNA, 15 bp, Homo sapiens
caggaacaatgatga

SEQ ID NO: 288412 - DNA, 15 bp, Homo sapiens
acaggaacaatgatg

SEQ ID NO: 288413 - DNA, 15 bp, Homo sapiens
gacaggaacaatgat

SEQ ID NO: 288414 - DNA, 15 bp, Homo sapiens
agacaggaacaatga

SEQ ID NO: 288415 - DNA, 15 bp, Homo sapiens
gagacaggaacaatg

SEQ ID NO: 288416 - DNA, 15 bp, Homo sapiens
ggagacaggaacaat

SEQ ID NO: 288417 - DNA, 15 bp, Homo sapiens
aggagacaggaacaa

SEQ ID NO: 288418 - DNA, 15 bp, Homo sapiens
gaggagacaggaaca

SEQ ID NO: 288419 - DNA, 15 bp, Homo sapiens
tgaggagacaggaac

SEQ ID NO: 288420 - DNA, 15 bp, Homo sapiens
gtgaggagacaggaa

SEQ ID NO: 288421 - DNA, 15 bp, Homo sapiens
ggtgaggagacagga

SEQ ID NO: 288422 - DNA, 15 bp, Homo sapiens
tggtgaggagacagg

SEQ ID NO: 288423 - DNA, 15 bp, Homo sapiens
atggtgaggagacag

SEQ ID NO: 288424 - DNA, 15 bp, Homo sapiens
gatggtgaggagaca

SEQ ID NO: 288425 - DNA, 15 bp, Homo sapiens
tgatggtgaggagac

SEQ ID NO: 288426 - DNA, 15 bp, Homo sapiens
ttgatggtgaggaga

SEQ ID NO: 288427 - DNA, 15 bp, Homo sapiens
tttgatggtgaggag

SEQ ID NO: 288428 - DNA, 15 bp, Homo sapiens
ctttgatggtgagga

SEQ ID NO: 288429 - DNA, 15 bp, Homo sapiens
tctttgatggtgagg

SEQ ID NO: 288430 - DNA, 15 bp, Homo sapiens
atctttgatggtgag

SEQ ID NO: 288431 - DNA, 15 bp, Homo sapiens
tatctttgatggtga

SEQ ID NO: 288432 - DNA, 15 bp, Homo sapiens
atatctttgatggtg

SEQ ID NO: 288433 - DNA, 15 bp, Homo sapiens
aatatctttgatggt

SEQ ID NO: 288434 - DNA, 15 bp, Homo sapiens
gaatatctttgatgg

SEQ ID NO: 288435 - DNA, 15 bp, Homo sapiens
agaatatctttgatg

SEQ ID NO: 288436 - DNA, 15 bp, Homo sapiens
gagaatatctttgat

SEQ ID NO: 288437 - DNA, 15 bp, Homo sapiens
ggagaatatctttga

SEQ ID NO: 288438 - DNA, 15 bp, Homo sapiens
tggagaatatctttg

SEQ ID NO: 288439 - DNA, 15 bp, Homo sapiens
atggagaatatcttt

SEQ ID NO: 288440 - DNA, 15 bp, Homo sapiens
tatggagaatatctt

SEQ ID NO: 288441 - DNA, 15 bp, Homo sapiens
ctatggagaatatct

SEQ ID NO: 288442 - DNA, 15 bp, Homo sapiens
tctatggagaatatc

SEQ ID NO: 288443 - DNA, 15 bp, Homo sapiens
ctctatggagaatat

SEQ ID NO: 288444 - DNA, 15 bp, Homo sapiens
gctctatggagaata

SEQ ID NO: 288445 - DNA, 15 bp, Homo sapiens
ggctctatggagaat

SEQ ID NO: 288446 - DNA, 15 bp, Homo sapiens
gggctctatggagaa

SEQ ID NO: 288447 - DNA, 15 bp, Homo sapiens
ggggctctatggaga

SEQ ID NO: 288448 - DNA, 15 bp, Homo sapiens
gggggctctatggag

SEQ ID NO: 288449 - DNA, 15 bp, Homo sapiens
tgggggctctatgga

SEQ ID NO: 288450 - DNA, 15 bp, Homo sapiens
ctgggggctctatgg

SEQ ID NO: 288451 - DNA, 15 bp, Homo sapiens
tctgggggctctatg

SEQ ID NO: 288452 - DNA, 15 bp, Homo sapiens
ttctgggggctctat

SEQ ID NO: 288453 - DNA, 15 bp, Homo sapiens
attctgggggctcta

SEQ ID NO: 288454 - DNA, 15 bp, Homo sapiens
aattctgggggctct

SEQ ID NO: 288455 - DNA, 15 bp, Homo sapiens
aaattctgggggctc

SEQ ID NO: 288456 - DNA, 15 bp, Homo sapiens
gaaattctgggggct

SEQ ID NO: 288457 - DNA, 15 bp, Homo sapiens
agaaattctgggggc

SEQ ID NO: 288458 - DNA, 15 bp, Homo sapiens
gagaaattctggggg

SEQ ID NO: 288459 - DNA, 15 bp, Homo sapiens
ggagaaattctgggg

SEQ ID NO: 288460 - DNA, 15 bp, Homo sapiens
aggagaaattctggg

SEQ ID NO: 288461 - DNA, 15 bp, Homo sapiens
taggagaaattctgg

SEQ ID NO: 288462 - DNA, 15 bp, Homo sapiens
ctaggagaaattctg

SEQ ID NO: 288463 - DNA, 15 bp, Homo sapiens
tctaggagaaattct

SEQ ID NO: 288464 - DNA, 15 bp, Homo sapiens
ttctaggagaaattc

SEQ ID NO: 288465 - DNA, 15 bp, Homo sapiens
tttctaggagaaatt

SEQ ID NO: 288466 - DNA, 15 bp, Homo sapiens
atttctaggagaaat

SEQ ID NO: 288467 - DNA, 15 bp, Homo sapiens
catttctaggagaaa

SEQ ID NO: 288468 - DNA, 15 bp, Homo sapiens
acatttctaggagaa

SEQ ID NO: 288469 - DNA, 15 bp, Homo sapiens
tacatttctaggaga

SEQ ID NO: 288470 - DNA, 15 bp, Homo sapiens
ttacatttctaggag

SEQ ID NO: 288471 - DNA, 15 bp, Homo sapiens
tttacatttctagga

SEQ ID NO: 288472 - DNA, 15 bp, Homo sapiens
atttacatttctagg

SEQ ID NO: 288473 - DNA, 15 bp, Homo sapiens
gatttacatttctag

SEQ ID NO: 288474 - DNA, 15 bp, Homo sapiens
tgatttacatttcta

SEQ ID NO: 288475 - DNA, 15 bp, Homo sapiens
ctgatttacatttct

SEQ ID NO: 288476 - DNA, 15 bp, Homo sapiens
actgatttacatttc

SEQ ID NO: 288477 - DNA, 15 bp, Homo sapiens
aactgatttacattt

SEQ ID NO: 288478 - DNA, 15 bp, Homo sapiens
taactgatttacatt

SEQ ID NO: 288479 - DNA, 15 bp, Homo sapiens
gtaactgatttacat

SEQ ID NO: 288480 - DNA, 15 bp, Homo sapiens
tgtaactgatttaca

SEQ ID NO: 288481 - DNA, 15 bp, Homo sapiens
atgtaactgatttac

SEQ ID NO: 288482 - DNA, 15 bp, Homo sapiens
aatgtaactgattta

SEQ ID NO: 288483 - DNA, 15 bp, Homo sapiens
gaatgtaactgattt

SEQ ID NO: 288484 - DNA, 15 bp, Homo sapiens
tgaatgtaactgatt

SEQ ID NO: 288485 - DNA, 15 bp, Homo sapiens
gtgaatgtaactgat

SEQ ID NO: 288486 - DNA, 15 bp, Homo sapiens
ggtgaatgtaactga

SEQ ID NO: 288487 - DNA, 15 bp, Homo sapiens
aggtgaatgtaactg

SEQ ID NO: 288488 - DNA, 15 bp, Homo sapiens
aaggtgaatgtaact

SEQ ID NO: 288489 - DNA, 15 bp, Homo sapiens
caaggtgaatgtaac

SEQ ID NO: 288490 - DNA, 15 bp, Homo sapiens
gcaaggtgaatgtaa

SEQ ID NO: 288491 - DNA, 15 bp, Homo sapiens
agcaaggtgaatgta

SEQ ID NO: 288492 - DNA, 15 bp, Homo sapiens
cagcaaggtgaatgt

SEQ ID NO: 288493 - DNA, 15 bp, Homo sapiens
acagcaaggtgaatg

SEQ ID NO: 288494 - DNA, 15 bp, Homo sapiens
aacagcaaggtgaat

SEQ ID NO: 288495 - DNA, 15 bp, Homo sapiens
taacagcaaggtgaa

SEQ ID NO: 288496 - DNA, 15 bp, Homo sapiens
ttaacagcaaggtga

SEQ ID NO: 288497 - DNA, 15 bp, Homo sapiens
tttaacagcaaggtg

SEQ ID NO: 288498 - DNA, 15 bp, Homo sapiens
gtttaacagcaaggt

SEQ ID NO: 288499 - DNA, 15 bp, Homo sapiens
ggtttaacagcaagg

SEQ ID NO: 288500 - DNA, 15 bp, Homo sapiens
gggtttaacagcaag

SEQ ID NO: 288501 - DNA, 15 bp, Homo sapiens
tgggtttaacagcaa

SEQ ID NO: 288502 - DNA, 15 bp, Homo sapiens
gtgggtttaacagca

SEQ ID NO: 288503 - DNA, 15 bp, Homo sapiens
agtgggtttaacagc

SEQ ID NO: 288504 - DNA, 15 bp, Homo sapiens
cagtgggtttaacag

SEQ ID NO: 288505 - DNA, 15 bp, Homo sapiens
tcagtgggtttaaca

SEQ ID NO: 288506 - DNA, 15 bp, Homo sapiens
gtcagtgggtttaac

SEQ ID NO: 288507 - DNA, 15 bp, Homo sapiens
agtcagtgggtttaa

SEQ ID NO: 288508 - DNA, 15 bp, Homo sapiens
cagtcagtgggttta

SEQ ID NO: 288509 - DNA, 15 bp, Homo sapiens
gcagtcagtgggttt

SEQ ID NO: 288510 - DNA, 15 bp, Homo sapiens
agcagtcagtgggtt

SEQ ID NO: 288511 - DNA, 15 bp, Homo sapiens
aagcagtcagtgggt

SEQ ID NO: 288512 - DNA, 15 bp, Homo sapiens
gaagcagtcagtggg

SEQ ID NO: 288513 - DNA, 15 bp, Homo sapiens
ggaagcagtcagtgg

SEQ ID NO: 288514 - DNA, 15 bp, Homo sapiens
gggaagcagtcagtg

SEQ ID NO: 288515 - DNA, 15 bp, Homo sapiens
tgggaagcagtcagt

SEQ ID NO: 288516 - DNA, 15 bp, Homo sapiens
atgggaagcagtcag

SEQ ID NO: 288517 - DNA, 15 bp, Homo sapiens
aatgggaagcagtca

SEQ ID NO: 288518 - DNA, 15 bp, Homo sapiens
caatgggaagcagtc

SEQ ID NO: 288519 - DNA, 15 bp, Homo sapiens
gcaatgggaagcagt

SEQ ID NO: 288520 - DNA, 15 bp, Homo sapiens
tgcaatgggaagcag

SEQ ID NO: 288521 - DNA, 15 bp, Homo sapiens
ttgcaatgggaagca

SEQ ID NO: 288522 - DNA, 15 bp, Homo sapiens
attgcaatgggaagc

SEQ ID NO: 288523 - DNA, 15 bp, Homo sapiens
aattgcaatgggaag

SEQ ID NO: 288524 - DNA, 15 bp, Homo sapiens
caattgcaatgggaa

SEQ ID NO: 288525 - DNA, 15 bp, Homo sapiens
ccaattgcaatggga

SEQ ID NO: 288526 - DNA, 15 bp, Homo sapiens
accaattgcaatggg

SEQ ID NO: 288527 - DNA, 15 bp, Homo sapiens
taccaattgcaatgg

SEQ ID NO: 288528 - DNA, 15 bp, Homo sapiens
ataccaattgcaatg

SEQ ID NO: 288529 - DNA, 15 bp, Homo sapiens
tataccaattgcaat

SEQ ID NO: 288530 - DNA, 15 bp, Homo sapiens
gtataccaattgcaa

SEQ ID NO: 288531 - DNA, 15 bp, Homo sapiens
tgtataccaattgca

SEQ ID NO: 288532 - DNA, 15 bp, Homo sapiens
ctgtataccaattgc

SEQ ID NO: 288533 - DNA, 15 bp, Homo sapiens
actgtataccaattg

SEQ ID NO: 288534 - DNA, 15 bp, Homo sapiens
cactgtataccaatt

SEQ ID NO: 288535 - DNA, 15 bp, Homo sapiens
gcactgtataccaat

SEQ ID NO: 288536 - DNA, 15 bp, Homo sapiens
tgcactgtataccaa

SEQ ID NO: 288537 - DNA, 15 bp, Homo sapiens
ttgcactgtatacca

SEQ ID NO: 288538 - DNA, 15 bp, Homo sapiens
tttgcactgtatacc

SEQ ID NO: 288539 - DNA, 15 bp, Homo sapiens
atttgcactgtatac

SEQ ID NO: 288540 - DNA, 15 bp, Homo sapiens
aatttgcactgtata

SEQ ID NO: 288541 - DNA, 15 bp, Homo sapiens
gaatttgcactgtat

SEQ ID NO: 288542 - DNA, 15 bp, Homo sapiens
ggaatttgcactgta

SEQ ID NO: 288543 - DNA, 15 bp, Homo sapiens
aggaatttgcactgt

SEQ ID NO: 288544 - DNA, 15 bp, Homo sapiens
aaggaatttgcactg

SEQ ID NO: 288545 - DNA, 15 bp, Homo sapiens
taaggaatttgcact

SEQ ID NO: 288546 - DNA, 15 bp, Homo sapiens
ttaaggaatttgcac

SEQ ID NO: 288547 - DNA, 15 bp, Homo sapiens
gttaaggaatttgca

SEQ ID NO: 288548 - DNA, 15 bp, Homo sapiens
tgttaaggaatttgc

SEQ ID NO: 288549 - DNA, 15 bp, Homo sapiens
ttgttaaggaatttg

SEQ ID NO: 288550 - DNA, 15 bp, Homo sapiens
attgttaaggaattt

SEQ ID NO: 288551 - DNA, 15 bp, Homo sapiens
cattgttaaggaatt

SEQ ID NO: 288552 - DNA, 15 bp, Homo sapiens
gcattgttaaggaat

SEQ ID NO: 288553 - DNA, 15 bp, Homo sapiens
ggcattgttaaggaa

SEQ ID NO: 288554 - DNA, 15 bp, Homo sapiens
aggcattgttaagga

SEQ ID NO: 288555 - DNA, 15 bp, Homo sapiens
taggcattgttaagg

SEQ ID NO: 288556 - DNA, 15 bp, Homo sapiens
ttaggcattgttaag

SEQ ID NO: 288557 - DNA, 15 bp, Homo sapiens
tttaggcattgttaa

SEQ ID NO: 288558 - DNA, 15 bp, Homo sapiens
ttttaggcattgtta

SEQ ID NO: 288559 - DNA, 15 bp, Homo sapiens
cttttaggcattgtt

SEQ ID NO: 288560 - DNA, 15 bp, Homo sapiens
tcttttaggcattgt

SEQ ID NO: 288561 - DNA, 15 bp, Homo sapiens
atcttttaggcattg

SEQ ID NO: 288562 - DNA, 15 bp, Homo sapiens
gatcttttaggcatt

SEQ ID NO: 288563 - DNA, 15 bp, Homo sapiens
agatcttttaggcat

SEQ ID NO: 288564 - DNA, 15 bp, Homo sapiens
aagatcttttaggca

SEQ ID NO: 288565 - DNA, 15 bp, Homo sapiens
taagatcttttaggc

SEQ ID NO: 288566 - DNA, 15 bp, Homo sapiens
ataagatcttttagg

SEQ ID NO: 288567 - DNA, 15 bp, Homo sapiens
tataagatcttttag

SEQ ID NO: 288568 - DNA, 15 bp, Homo sapiens
atataagatctttta

SEQ ID NO: 288569 - DNA, 15 bp, Homo sapiens
catataagatctttt

SEQ ID NO: 288570 - DNA, 15 bp, Homo sapiens
ccatataagatcttt

SEQ ID NO: 288571 - DNA, 15 bp, Homo sapiens
accatataagatctt

SEQ ID NO: 288572 - DNA, 15 bp, Homo sapiens
gaccatataagatct

SEQ ID NO: 288573 - DNA, 15 bp, Homo sapiens
agaccatataagatc

SEQ ID NO: 288574 - DNA, 15 bp, Homo sapiens
cagaccatataagat

SEQ ID NO: 288575 - DNA, 15 bp, Homo sapiens
ccagaccatataaga

SEQ ID NO: 288576 - DNA, 15 bp, Homo sapiens
accagaccatataag

SEQ ID NO: 288577 - DNA, 15 bp, Homo sapiens
aaccagaccatataa

SEQ ID NO: 288578 - DNA, 15 bp, Homo sapiens
aaaccagaccatata

SEQ ID NO: 288579 - DNA, 15 bp, Homo sapiens
gaaaccagaccatat

SEQ ID NO: 288580 - DNA, 15 bp, Homo sapiens
agaaaccagaccata

SEQ ID NO: 288581 - DNA, 15 bp, Homo sapiens
cagaaaccagaccat

SEQ ID NO: 288582 - DNA, 15 bp, Homo sapiens
acagaaaccagacca

SEQ ID NO: 288583 - DNA, 15 bp, Homo sapiens
aacagaaaccagacc

SEQ ID NO: 288584 - DNA, 15 bp, Homo sapiens
caacagaaaccagac

SEQ ID NO: 288585 - DNA, 15 bp, Homo sapiens
gcaacagaaaccaga

SEQ ID NO: 288586 - DNA, 15 bp, Homo sapiens
ggcaacagaaaccag

SEQ ID NO: 288587 - DNA, 15 bp, Homo sapiens
aggcaacagaaacca

SEQ ID NO: 288588 - DNA, 15 bp, Homo sapiens
gaggcaacagaaacc

SEQ ID NO: 288589 - DNA, 15 bp, Homo sapiens
agaggcaacagaaac

SEQ ID NO: 288590 - DNA, 15 bp, Homo sapiens
gagaggcaacagaaa

SEQ ID NO: 288591 - DNA, 15 bp, Homo sapiens
ggagaggcaacagaa

SEQ ID NO: 288592 - DNA, 15 bp, Homo sapiens
tggagaggcaacaga

SEQ ID NO: 288593 - DNA, 15 bp, Homo sapiens
ttggagaggcaacag

SEQ ID NO: 288594 - DNA, 15 bp, Homo sapiens
gttggagaggcaaca

SEQ ID NO: 288595 - DNA, 15 bp, Homo sapiens
ggttggagaggcaac

SEQ ID NO: 288596 - DNA, 15 bp, Homo sapiens
aggttggagaggcaa

SEQ ID NO: 288597 - DNA, 15 bp, Homo sapiens
gaggttggagaggca

SEQ ID NO: 288598 - DNA, 15 bp, Homo sapiens
tgaggttggagaggc

SEQ ID NO: 288599 - DNA, 15 bp, Homo sapiens
atgaggttggagagg

SEQ ID NO: 288600 - DNA, 15 bp, Homo sapiens
gatgaggttggagag

SEQ ID NO: 288601 - DNA, 15 bp, Homo sapiens
agatgaggttggaga

SEQ ID NO: 288602 - DNA, 15 bp, Homo sapiens
aagatgaggttggag

SEQ ID NO: 288603 - DNA, 15 bp, Homo sapiens
caagatgaggttgga

SEQ ID NO: 288604 - DNA, 15 bp, Homo sapiens
acaagatgaggttgg

SEQ ID NO: 288605 - DNA, 15 bp, Homo sapiens
aacaagatgaggttg

SEQ ID NO: 288606 - DNA, 15 bp, Homo sapiens
aaacaagatgaggtt

SEQ ID NO: 288607 - DNA, 15 bp, Homo sapiens
aaaacaagatgaggt

SEQ ID NO: 288608 - DNA, 15 bp, Homo sapiens
gaaaacaagatgagg

SEQ ID NO: 288609 - DNA, 15 bp, Homo sapiens
agaaaacaagatgag

SEQ ID NO: 288610 - DNA, 15 bp, Homo sapiens
aagaaaacaagatga

SEQ ID NO: 288611 - DNA, 15 bp, Homo sapiens
aaagaaaacaagatg

SEQ ID NO: 288612 - DNA, 15 bp, Homo sapiens
gaaagaaaacaagat

SEQ ID NO: 288613 - DNA, 15 bp, Homo sapiens
agaaagaaaacaaga

SEQ ID NO: 288614 - DNA, 15 bp, Homo sapiens
gagaaagaaaacaag

SEQ ID NO: 288615 - DNA, 15 bp, Homo sapiens
tgagaaagaaaacaa

SEQ ID NO: 288616 - DNA, 15 bp, Homo sapiens
gtgagaaagaaaaca

SEQ ID NO: 288617 - DNA, 15 bp, Homo sapiens
agtgagaaagaaaac

SEQ ID NO: 288618 - DNA, 15 bp, Homo sapiens
gagtgagaaagaaaa

SEQ ID NO: 288619 - DNA, 15 bp, Homo sapiens
agagtgagaaagaaa

SEQ ID NO: 288620 - DNA, 15 bp, Homo sapiens
cagagtgagaaagaa

SEQ ID NO: 288621 - DNA, 15 bp, Homo sapiens
acagagtgagaaaga

SEQ ID NO: 288622 - DNA, 15 bp, Homo sapiens
cacagagtgagaaag

SEQ ID NO: 288623 - DNA, 15 bp, Homo sapiens
acacagagtgagaaa

SEQ ID NO: 288624 - DNA, 15 bp, Homo sapiens
aacacagagtgagaa

SEQ ID NO: 288625 - DNA, 15 bp, Homo sapiens
taacacagagtgaga

SEQ ID NO: 288626 - DNA, 15 bp, Homo sapiens
ctaacacagagtgag

SEQ ID NO: 288627 - DNA, 15 bp, Homo sapiens
gctaacacagagtga

SEQ ID NO: 288628 - DNA, 15 bp, Homo sapiens
ggctaacacagagtg

SEQ ID NO: 288629 - DNA, 15 bp, Homo sapiens
tggctaacacagagt

SEQ ID NO: 288630 - DNA, 15 bp, Homo sapiens
gtggctaacacagag

SEQ ID NO: 288631 - DNA, 15 bp, Homo sapiens
tgtggctaacacaga

SEQ ID NO: 288632 - DNA, 15 bp, Homo sapiens
gtgtggctaacacag

SEQ ID NO: 288633 - DNA, 15 bp, Homo sapiens
agtgtggctaacaca

SEQ ID NO: 288634 - DNA, 15 bp, Homo sapiens
aagtgtggctaacac

SEQ ID NO: 288635 - DNA, 15 bp, Homo sapiens
aaagtgtggctaaca

SEQ ID NO: 288636 - DNA, 15 bp, Homo sapiens
caaagtgtggctaac

SEQ ID NO: 288637 - DNA, 15 bp, Homo sapiens
ccaaagtgtggctaa

SEQ ID NO: 288638 - DNA, 15 bp, Homo sapiens
gccaaagtgtggcta

SEQ ID NO: 288639 - DNA, 15 bp, Homo sapiens
ggccaaagtgtggct

SEQ ID NO: 288640 - DNA, 15 bp, Homo sapiens
aggccaaagtgtggc

SEQ ID NO: 288641 - DNA, 15 bp, Homo sapiens
aaggccaaagtgtgg

SEQ ID NO: 288642 - DNA, 15 bp, Homo sapiens
gaaggccaaagtgtg

SEQ ID NO: 288643 - DNA, 15 bp, Homo sapiens
agaaggccaaagtgt

SEQ ID NO: 288644 - DNA, 15 bp, Homo sapiens
gagaaggccaaagtg

SEQ ID NO: 288645 - DNA, 15 bp, Homo sapiens
agagaaggccaaagt

SEQ ID NO: 288646 - DNA, 15 bp, Homo sapiens
cagagaaggccaaag

SEQ ID NO: 288647 - DNA, 15 bp, Homo sapiens
acagagaaggccaaa

SEQ ID NO: 288648 - DNA, 15 bp, Homo sapiens
aacagagaaggccaa

SEQ ID NO: 288649 - DNA, 15 bp, Homo sapiens
aaacagagaaggcca

SEQ ID NO: 288650 - DNA, 15 bp, Homo sapiens
gaaacagagaaggcc

SEQ ID NO: 288651 - DNA, 15 bp, Homo sapiens
agaaacagagaaggc

SEQ ID NO: 288652 - DNA, 15 bp, Homo sapiens
aagaaacagagaagg

SEQ ID NO: 288653 - DNA, 15 bp, Homo sapiens
caagaaacagagaag

SEQ ID NO: 288654 - DNA, 15 bp, Homo sapiens
ccaagaaacagagaa

SEQ ID NO: 288655 - DNA, 15 bp, Homo sapiens
cccaagaaacagaga

SEQ ID NO: 288656 - DNA, 15 bp, Homo sapiens
gcccaagaaacagag

SEQ ID NO: 288657 - DNA, 15 bp, Homo sapiens
agcccaagaaacaga

SEQ ID NO: 288658 - DNA, 15 bp, Homo sapiens
aagcccaagaaacag

SEQ ID NO: 288659 - DNA, 15 bp, Homo sapiens
aaagcccaagaaaca

SEQ ID NO: 288660 - DNA, 15 bp, Homo sapiens
gaaagcccaagaaac

SEQ ID NO: 288661 - DNA, 15 bp, Homo sapiens
ggaaagcccaagaaa

SEQ ID NO: 288662 - DNA, 15 bp, Homo sapiens
tggaaagcccaagaa

SEQ ID NO: 288663 - DNA, 15 bp, Homo sapiens
ttggaaagcccaaga

SEQ ID NO: 288664 - DNA, 15 bp, Homo sapiens
cttggaaagcccaag

SEQ ID NO: 288665 - DNA, 15 bp, Homo sapiens
acttggaaagcccaa

SEQ ID NO: 288666 - DNA, 15 bp, Homo sapiens
aacttggaaagccca

SEQ ID NO: 288667 - DNA, 15 bp, Homo sapiens
aaacttggaaagccc

SEQ ID NO: 288668 - DNA, 15 bp, Homo sapiens
aaaacttggaaagcc

SEQ ID NO: 288669 - DNA, 15 bp, Homo sapiens
aaaaacttggaaagc

SEQ ID NO: 288670 - DNA, 15 bp, Homo sapiens
aaaaaacttggaaag

SEQ ID NO: 288671 - DNA, 15 bp, Homo sapiens
caaaaaacttggaaa

SEQ ID NO: 288672 - DNA, 15 bp, Homo sapiens
tcaaaaaacttggaa

SEQ ID NO: 288673 - DNA, 15 bp, Homo sapiens
ttcaaaaaacttgga

SEQ ID NO: 288674 - DNA, 15 bp, Homo sapiens
tttcaaaaaacttgg

SEQ ID NO: 288675 - DNA, 15 bp, Homo sapiens
ttttcaaaaaacttg

SEQ ID NO: 288676 - DNA, 15 bp, Homo sapiens
gttttcaaaaaactt

SEQ ID NO: 288677 - DNA, 15 bp, Homo sapiens
ggttttcaaaaaact

SEQ ID NO: 288678 - DNA, 15 bp, Homo sapiens
gggttttcaaaaaac

SEQ ID NO: 288679 - DNA, 15 bp, Homo sapiens
agggttttcaaaaaa

SEQ ID NO: 288680 - DNA, 15 bp, Homo sapiens
gagggttttcaaaaa

SEQ ID NO: 288681 - DNA, 15 bp, Homo sapiens
cgagggttttcaaaa

SEQ ID NO: 288682 - DNA, 15 bp, Homo sapiens
acgagggttttcaaa

SEQ ID NO: 288683 - DNA, 15 bp, Homo sapiens
tacgagggttttcaa

SEQ ID NO: 288684 - DNA, 15 bp, Homo sapiens
gtacgagggttttca

SEQ ID NO: 288685 - DNA, 15 bp, Homo sapiens
agtacgagggttttc

SEQ ID NO: 288686 - DNA, 15 bp, Homo sapiens
aagtacgagggtttt

SEQ ID NO: 288687 - DNA, 15 bp, Homo sapiens
caagtacgagggttt

SEQ ID NO: 288688 - DNA, 15 bp, Homo sapiens
tcaagtacgagggtt

SEQ ID NO: 288689 - DNA, 15 bp, Homo sapiens
atcaagtacgagggt

SEQ ID NO: 288690 - DNA, 15 bp, Homo sapiens
tatcaagtacgaggg

SEQ ID NO: 288691 - DNA, 15 bp, Homo sapiens
atatcaagtacgagg

SEQ ID NO: 288692 - DNA, 15 bp, Homo sapiens
aatatcaagtacgag

SEQ ID NO: 288693 - DNA, 15 bp, Homo sapiens
gaatatcaagtacga

SEQ ID NO: 288694 - DNA, 15 bp, Homo sapiens
ggaatatcaagtacg

SEQ ID NO: 288695 - DNA, 15 bp, Homo sapiens
gggaatatcaagtac

SEQ ID NO: 288696 - DNA, 15 bp, Homo sapiens
agggaatatcaagta

SEQ ID NO: 288697 - DNA, 15 bp, Homo sapiens
gagggaatatcaagt

SEQ ID NO: 288698 - DNA, 15 bp, Homo sapiens
agagggaatatcaag

SEQ ID NO: 288699 - DNA, 15 bp, Homo sapiens
aagagggaatatcaa

SEQ ID NO: 288700 - DNA, 15 bp, Homo sapiens
gaagagggaatatca

SEQ ID NO: 288701 - DNA, 15 bp, Homo sapiens
agaagagggaatatc

SEQ ID NO: 288702 - DNA, 15 bp, Homo sapiens
aagaagagggaatat

SEQ ID NO: 288703 - DNA, 15 bp, Homo sapiens
caagaagagggaata

SEQ ID NO: 288704 - DNA, 15 bp, Homo sapiens
tcaagaagagggaat

SEQ ID NO: 288705 - DNA, 15 bp, Homo sapiens
ttcaagaagagggaa

SEQ ID NO: 288706 - DNA, 15 bp, Homo sapiens
tttcaagaagaggga

SEQ ID NO: 288707 - DNA, 15 bp, Homo sapiens
atttcaagaagaggg

SEQ ID NO: 288708 - DNA, 15 bp, Homo sapiens
aatttcaagaagagg

SEQ ID NO: 288709 - DNA, 15 bp, Homo sapiens
aaatttcaagaagag

SEQ ID NO: 288710 - DNA, 15 bp, Homo sapiens
gaaatttcaagaaga

SEQ ID NO: 288711 - DNA, 15 bp, Homo sapiens
ggaaatttcaagaag

SEQ ID NO: 288712 - DNA, 15 bp, Homo sapiens
aggaaatttcaagaa

SEQ ID NO: 288713 - DNA, 15 bp, Homo sapiens
gaggaaatttcaaga

SEQ ID NO: 288714 - DNA, 15 bp, Homo sapiens
ggaggaaatttcaag

SEQ ID NO: 288715 - DNA, 15 bp, Homo sapiens
aggaggaaatttcaa

SEQ ID NO: 288716 - DNA, 15 bp, Homo sapiens
aaggaggaaatttca

SEQ ID NO: 288717 - DNA, 15 bp, Homo sapiens
aaaggaggaaatttc

SEQ ID NO: 288718 - DNA, 15 bp, Homo sapiens
aaaaggaggaaattt

SEQ ID NO: 288719 - DNA, 15 bp, Homo sapiens
gaaaaggaggaaatt

SEQ ID NO: 288720 - DNA, 15 bp, Homo sapiens
agaaaaggaggaaat

SEQ ID NO: 288721 - DNA, 15 bp, Homo sapiens
aagaaaaggaggaaa

SEQ ID NO: 288722 - DNA, 15 bp, Homo sapiens
aaagaaaaggaggaa

SEQ ID NO: 288723 - DNA, 15 bp, Homo sapiens
gaaagaaaaggagga

SEQ ID NO: 288724 - DNA, 15 bp, Homo sapiens
ggaaagaaaaggagg

SEQ ID NO: 288725 - DNA, 15 bp, Homo sapiens
tggaaagaaaaggag

SEQ ID NO: 288726 - DNA, 15 bp, Homo sapiens
atggaaagaaaagga

SEQ ID NO: 288727 - DNA, 15 bp, Homo sapiens
catggaaagaaaagg

SEQ ID NO: 288728 - DNA, 15 bp, Homo sapiens
ccatggaaagaaaag

SEQ ID NO: 288729 - DNA, 15 bp, Homo sapiens
tccatggaaagaaaa

SEQ ID NO: 288730 - DNA, 15 bp, Homo sapiens
atccatggaaagaaa

SEQ ID NO: 288731 - DNA, 15 bp, Homo sapiens
aatccatggaaagaa

SEQ ID NO: 288732 - DNA, 15 bp, Homo sapiens
taatccatggaaaga

SEQ ID NO: 288733 - DNA, 15 bp, Homo sapiens
gtaatccatggaaag

SEQ ID NO: 288734 - DNA, 15 bp, Homo sapiens
ggtaatccatggaaa

SEQ ID NO: 288735 - DNA, 15 bp, Homo sapiens
tggtaatccatggaa

SEQ ID NO: 288736 - DNA, 15 bp, Homo sapiens
ttggtaatccatgga

SEQ ID NO: 288737 - DNA, 15 bp, Homo sapiens
gttggtaatccatgg

SEQ ID NO: 288738 - DNA, 15 bp, Homo sapiens
agttggtaatccatg

SEQ ID NO: 288739 - DNA, 15 bp, Homo sapiens
cagttggtaatccat

SEQ ID NO: 288740 - DNA, 15 bp, Homo sapiens
gcagttggtaatcca

SEQ ID NO: 288741 - DNA, 15 bp, Homo sapiens
agcagttggtaatcc

SEQ ID NO: 288742 - DNA, 15 bp, Homo sapiens
tagcagttggtaatc

SEQ ID NO: 288743 - DNA, 15 bp, Homo sapiens
gtagcagttggtaat

SEQ ID NO: 288744 - DNA, 15 bp, Homo sapiens
agtagcagttggtaa

SEQ ID NO: 288745 - DNA, 15 bp, Homo sapiens
gagtagcagttggta

SEQ ID NO: 288746 - DNA, 15 bp, Homo sapiens
agagtagcagttggt

SEQ ID NO: 288747 - DNA, 15 bp, Homo sapiens
aagagtagcagttgg

SEQ ID NO: 288748 - DNA, 15 bp, Homo sapiens
gaagagtagcagttg

SEQ ID NO: 288749 - DNA, 15 bp, Homo sapiens
tgaagagtagcagtt

SEQ ID NO: 288750 - DNA, 15 bp, Homo sapiens
atgaagagtagcagt

SEQ ID NO: 288751 - DNA, 15 bp, Homo sapiens
aatgaagagtagcag

SEQ ID NO: 288752 - DNA, 15 bp, Homo sapiens
gaatgaagagtagca

SEQ ID NO: 288753 - DNA, 15 bp, Homo sapiens
tgaatgaagagtagc

SEQ ID NO: 288754 - DNA, 15 bp, Homo sapiens
ctgaatgaagagtag

SEQ ID NO: 288755 - DNA, 15 bp, Homo sapiens
gctgaatgaagagta

SEQ ID NO: 288756 - DNA, 15 bp, Homo sapiens
tgctgaatgaagagt

SEQ ID NO: 288757 - DNA, 15 bp, Homo sapiens
gtgctgaatgaagag

SEQ ID NO: 288758 - DNA, 15 bp, Homo sapiens
tgtgctgaatgaaga

SEQ ID NO: 288759 - DNA, 15 bp, Homo sapiens
ttgtgctgaatgaag

SEQ ID NO: 288760 - DNA, 15 bp, Homo sapiens
tttgtgctgaatgaa

SEQ ID NO: 288761 - DNA, 15 bp, Homo sapiens
atttgtgctgaatga

SEQ ID NO: 288762 - DNA, 15 bp, Homo sapiens
tatttgtgctgaatg

SEQ ID NO: 288763 - DNA, 15 bp, Homo sapiens
atatttgtgctgaat

SEQ ID NO: 288764 - DNA, 15 bp, Homo sapiens
aatatttgtgctgaa

SEQ ID NO: 288765 - DNA, 15 bp, Homo sapiens
caatatttgtgctga

SEQ ID NO: 288766 - DNA, 15 bp, Homo sapiens
gcaatatttgtgctg

SEQ ID NO: 288767 - DNA, 15 bp, Homo sapiens
agcaatatttgtgct

SEQ ID NO: 288768 - DNA, 15 bp, Homo sapiens
aagcaatatttgtgc

SEQ ID NO: 288769 - DNA, 15 bp, Homo sapiens
aaagcaatatttgtg

SEQ ID NO: 288770 - DNA, 15 bp, Homo sapiens
aaaagcaatatttgt

SEQ ID NO: 288771 - DNA, 15 bp, Homo sapiens
caaaagcaatatttg

SEQ ID NO: 288772 - DNA, 15 bp, Homo sapiens
tcaaaagcaatattt

SEQ ID NO: 288773 - DNA, 15 bp, Homo sapiens
ttcaaaagcaatatt

SEQ ID NO: 288774 - DNA, 15 bp, Homo sapiens
tttcaaaagcaatat

SEQ ID NO: 288775 - DNA, 15 bp, Homo sapiens
ttttcaaaagcaata

SEQ ID NO: 288776 - DNA, 15 bp, Homo sapiens
cttttcaaaagcaat

SEQ ID NO: 288777 - DNA, 15 bp, Homo sapiens
tcttttcaaaagcaa

SEQ ID NO: 288778 - DNA, 15 bp, Homo sapiens
atcttttcaaaagca

SEQ ID NO: 288779 - DNA, 15 bp, Homo sapiens
tatcttttcaaaagc

SEQ ID NO: 288780 - DNA, 15 bp, Homo sapiens
atatcttttcaaaag

SEQ ID NO: 288781 - DNA, 15 bp, Homo sapiens
aatatcttttcaaaa

SEQ ID NO: 288782 - DNA, 15 bp, Homo sapiens
aaatatcttttcaaa

SEQ ID NO: 288783 - DNA, 15 bp, Homo sapiens
gaaatatcttttcaa

SEQ ID NO: 288784 - DNA, 15 bp, Homo sapiens
agaaatatcttttca

SEQ ID NO: 288785 - DNA, 15 bp, Homo sapiens
gagaaatatcttttc

SEQ ID NO: 288786 - DNA, 15 bp, Homo sapiens
agagaaatatctttt

SEQ ID NO: 288787 - DNA, 15 bp, Homo sapiens
gagagaaatatcttt

SEQ ID NO: 288788 - DNA, 15 bp, Homo sapiens
agagagaaatatctt

SEQ ID NO: 288789 - DNA, 15 bp, Homo sapiens
cagagagaaatatct

SEQ ID NO: 288790 - DNA, 15 bp, Homo sapiens
tcagagagaaatatc

SEQ ID NO: 288791 - DNA, 15 bp, Homo sapiens
ttcagagagaaatat

SEQ ID NO: 288792 - DNA, 15 bp, Homo sapiens
cttcagagagaaata

SEQ ID NO: 288793 - DNA, 15 bp, Homo sapiens
acttcagagagaaat

SEQ ID NO: 288794 - DNA, 15 bp, Homo sapiens
tacttcagagagaaa

SEQ ID NO: 288795 - DNA, 15 bp, Homo sapiens
atacttcagagagaa

SEQ ID NO: 288796 - DNA, 15 bp, Homo sapiens
aatacttcagagaga

SEQ ID NO: 288797 - DNA, 15 bp, Homo sapiens
aaatacttcagagag

SEQ ID NO: 288798 - DNA, 15 bp, Homo sapiens
aaaatacttcagaga

SEQ ID NO: 288799 - DNA, 15 bp, Homo sapiens
taaaatacttcagag

SEQ ID NO: 288800 - DNA, 15 bp, Homo sapiens
ataaaatacttcaga

SEQ ID NO: 288801 - DNA, 15 bp, Homo sapiens
aataaaatacttcag

SEQ ID NO: 288802 - DNA, 15 bp, Homo sapiens
taataaaatacttca

SEQ ID NO: 288803 - DNA, 15 bp, Homo sapiens
ataataaaatacttc

SEQ ID NO: 288804 - DNA, 15 bp, Homo sapiens
aataataaaatactt

SEQ ID NO: 288805 - DNA, 15 bp, Homo sapiens
aaataataaaatact

SEQ ID NO: 288806 - DNA, 15 bp, Homo sapiens
gaaataataaaatac

SEQ ID NO: 288807 - DNA, 15 bp, Homo sapiens
agaaataataaaata

SEQ ID NO: 288808 - DNA, 15 bp, Homo sapiens
gagaaataataaaat

SEQ ID NO: 288809 - DNA, 15 bp, Homo sapiens
tgagaaataataaaa

SEQ ID NO: 288810 - DNA, 15 bp, Homo sapiens
atgagaaataataaa

SEQ ID NO: 288811 - DNA, 15 bp, Homo sapiens
tatgagaaataataa

SEQ ID NO: 288812 - DNA, 15 bp, Homo sapiens
atatgagaaataata

SEQ ID NO: 288813 - DNA, 15 bp, Homo sapiens
gatatgagaaataat

SEQ ID NO: 288814 - DNA, 15 bp, Homo sapiens
tgatatgagaaataa

SEQ ID NO: 288815 - DNA, 15 bp, Homo sapiens
atgatatgagaaata

SEQ ID NO: 288816 - DNA, 15 bp, Homo sapiens
gatgatatgagaaat

SEQ ID NO: 288817 - DNA, 15 bp, Homo sapiens
ggatgatatgagaaa

SEQ ID NO: 288818 - DNA, 15 bp, Homo sapiens
aggatgatatgagaa

SEQ ID NO: 288819 - DNA, 15 bp, Homo sapiens
caggatgatatgaga

SEQ ID NO: 288820 - DNA, 15 bp, Homo sapiens
acaggatgatatgag

SEQ ID NO: 288821 - DNA, 15 bp, Homo sapiens
aacaggatgatatga

SEQ ID NO: 288822 - DNA, 15 bp, Homo sapiens
gaacaggatgatatg

SEQ ID NO: 288823 - DNA, 15 bp, Homo sapiens
ggaacaggatgatat

SEQ ID NO: 288824 - DNA, 15 bp, Homo sapiens
tggaacaggatgata

SEQ ID NO: 288825 - DNA, 15 bp, Homo sapiens
atggaacaggatgat

SEQ ID NO: 288826 - DNA, 15 bp, Homo sapiens
aatggaacaggatga

SEQ ID NO: 288827 - DNA, 15 bp, Homo sapiens
gaatggaacaggatg

SEQ ID NO: 288828 - DNA, 15 bp, Homo sapiens
ggaatggaacaggat

SEQ ID NO: 288829 - DNA, 15 bp, Homo sapiens
aggaatggaacagga

SEQ ID NO: 288830 - DNA, 15 bp, Homo sapiens
aaggaatggaacagg

SEQ ID NO: 288831 - DNA, 15 bp, Homo sapiens
aaaggaatggaacag

SEQ ID NO: 288832 - DNA, 15 bp, Homo sapiens
taaaggaatggaaca

SEQ ID NO: 288833 - DNA, 15 bp, Homo sapiens
ataaaggaatggaac

SEQ ID NO: 288834 - DNA, 15 bp, Homo sapiens
tataaaggaatggaa

SEQ ID NO: 288835 - DNA, 15 bp, Homo sapiens
ctataaaggaatgga

SEQ ID NO: 288836 - DNA, 15 bp, Homo sapiens
gctataaaggaatgg

SEQ ID NO: 288837 - DNA, 15 bp, Homo sapiens
tgctataaaggaatg

SEQ ID NO: 288838 - DNA, 15 bp, Homo sapiens
atgctataaaggaat

SEQ ID NO: 288839 - DNA, 15 bp, Homo sapiens
catgctataaaggaa

SEQ ID NO: 288840 - DNA, 15 bp, Homo sapiens
acatgctataaagga

SEQ ID NO: 288841 - DNA, 15 bp, Homo sapiens
tacatgctataaagg

SEQ ID NO: 288842 - DNA, 15 bp, Homo sapiens
atacatgctataaag

SEQ ID NO: 288843 - DNA, 15 bp, Homo sapiens
gatacatgctataaa

SEQ ID NO: 288844 - DNA, 15 bp, Homo sapiens
ggatacatgctataa

SEQ ID NO: 288845 - DNA, 15 bp, Homo sapiens
gggatacatgctata

SEQ ID NO: 288846 - DNA, 15 bp, Homo sapiens
tgggatacatgctat

SEQ ID NO: 288847 - DNA, 15 bp, Homo sapiens
ttgggatacatgcta

SEQ ID NO: 288848 - DNA, 15 bp, Homo sapiens
attgggatacatgct

SEQ ID NO: 288849 - DNA, 15 bp, Homo sapiens
aattgggatacatgc

SEQ ID NO: 288850 - DNA, 15 bp, Homo sapiens
aaattgggatacatg

SEQ ID NO: 288851 - DNA, 15 bp, Homo sapiens
taaattgggatacat

SEQ ID NO: 288852 - DNA, 15 bp, Homo sapiens
ataaattgggataca

SEQ ID NO: 288853 - DNA, 15 bp, Homo sapiens
tataaattgggatac

SEQ ID NO: 288854 - DNA, 15 bp, Homo sapiens
atataaattgggata

SEQ ID NO: 288855 - DNA, 15 bp, Homo sapiens
aatataaattgggat

SEQ ID NO: 288856 - DNA, 15 bp, Homo sapiens
caatataaattggga

SEQ ID NO: 288857 - DNA, 15 bp, Homo sapiens
tcaatataaattggg

SEQ ID NO: 288858 - DNA, 15 bp, Homo sapiens
atcaatataaattgg

SEQ ID NO: 288859 - DNA, 15 bp, Homo sapiens
tatcaatataaattg

SEQ ID NO: 288860 - DNA, 15 bp, Homo sapiens
ctatcaatataaatt

SEQ ID NO: 288861 - DNA, 15 bp, Homo sapiens
tctatcaatataaat

SEQ ID NO: 288862 - DNA, 15 bp, Homo sapiens
atctatcaatataaa

SEQ ID NO: 288863 - DNA, 15 bp, Homo sapiens
aatctatcaatataa

SEQ ID NO: 288864 - DNA, 15 bp, Homo sapiens
gaatctatcaatata

SEQ ID NO: 288865 - DNA, 15 bp, Homo sapiens
tgaatctatcaatat

SEQ ID NO: 288866 - DNA, 15 bp, Homo sapiens
atgaatctatcaata

SEQ ID NO: 288867 - DNA, 15 bp, Homo sapiens
aatgaatctatcaat

SEQ ID NO: 288868 - DNA, 15 bp, Homo sapiens
aaatgaatctatcaa

SEQ ID NO: 288869 - DNA, 15 bp, Homo sapiens
caaatgaatctatca

SEQ ID NO: 288870 - DNA, 15 bp, Homo sapiens
acaaatgaatctatc

SEQ ID NO: 288871 - DNA, 15 bp, Homo sapiens
cacaaatgaatctat

SEQ ID NO: 288872 - DNA, 15 bp, Homo sapiens
acacaaatgaatcta

SEQ ID NO: 288873 - DNA, 15 bp, Homo sapiens
aacacaaatgaatct

SEQ ID NO: 288874 - DNA, 15 bp, Homo sapiens
aaacacaaatgaatc

SEQ ID NO: 288875 - DNA, 15 bp, Homo sapiens
caaacacaaatgaat

SEQ ID NO: 288876 - DNA, 15 bp, Homo sapiens
gcaaacacaaatgaa

SEQ ID NO: 288877 - DNA, 15 bp, Homo sapiens
agcaaacacaaatga

SEQ ID NO: 288878 - DNA, 15 bp, Homo sapiens
aagcaaacacaaatg

SEQ ID NO: 288879 - DNA, 15 bp, Homo sapiens
caagcaaacacaaat

SEQ ID NO: 288880 - DNA, 15 bp, Homo sapiens
gcaagcaaacacaaa

SEQ ID NO: 288881 - DNA, 15 bp, Homo sapiens
agcaagcaaacacaa

SEQ ID NO: 288882 - DNA, 15 bp, Homo sapiens
aagcaagcaaacaca

SEQ ID NO: 288883 - DNA, 15 bp, Homo sapiens
aaagcaagcaaacac

SEQ ID NO: 288884 - DNA, 15 bp, Homo sapiens
aaaagcaagcaaaca

SEQ ID NO: 288885 - DNA, 15 bp, Homo sapiens
taaaagcaagcaaac

SEQ ID NO: 288886 - DNA, 15 bp, Homo sapiens
gtaaaagcaagcaaa

SEQ ID NO: 288887 - DNA, 15 bp, Homo sapiens
agtaaaagcaagcaa

SEQ ID NO: 288888 - DNA, 15 bp, Homo sapiens
tagtaaaagcaagca

SEQ ID NO: 288889 - DNA, 15 bp, Homo sapiens
ttagtaaaagcaagc

SEQ ID NO: 288890 - DNA, 15 bp, Homo sapiens
attagtaaaagcaag

SEQ ID NO: 288891 - DNA, 15 bp, Homo sapiens
tattagtaaaagcaa

SEQ ID NO: 288892 - DNA, 15 bp, Homo sapiens
gtattagtaaaagca

SEQ ID NO: 288893 - DNA, 15 bp, Homo sapiens
ggtattagtaaaagc

SEQ ID NO: 288894 - DNA, 15 bp, Homo sapiens
gggtattagtaaaag

SEQ ID NO: 288895 - DNA, 15 bp, Homo sapiens
tgggtattagtaaaa

SEQ ID NO: 288896 - DNA, 15 bp, Homo sapiens
ttgggtattagtaaa

SEQ ID NO: 288897 - DNA, 15 bp, Homo sapiens
tttgggtattagtaa

SEQ ID NO: 288898 - DNA, 15 bp, Homo sapiens
ttttgggtattagta

SEQ ID NO: 288899 - DNA, 15 bp, Homo sapiens
attttgggtattagt

SEQ ID NO: 288900 - DNA, 15 bp, Homo sapiens
tattttgggtattag

SEQ ID NO: 288901 - DNA, 15 bp, Homo sapiens
ctattttgggtatta

SEQ ID NO: 288902 - DNA, 15 bp, Homo sapiens
gctattttgggtatt

SEQ ID NO: 288903 - DNA, 15 bp, Homo sapiens
ggctattttgggtat

SEQ ID NO: 288904 - DNA, 15 bp, Homo sapiens
aggctattttgggta

SEQ ID NO: 288905 - DNA, 15 bp, Homo sapiens
aaggctattttgggt

SEQ ID NO: 288906 - DNA, 15 bp, Homo sapiens
taaggctattttggg

SEQ ID NO: 288907 - DNA, 15 bp, Homo sapiens
ttaaggctattttgg

SEQ ID NO: 288908 - DNA, 15 bp, Homo sapiens
tttaaggctattttg

SEQ ID NO: 288909 - DNA, 15 bp, Homo sapiens
ttttaaggctatttt

SEQ ID NO: 288910 - DNA, 15 bp, Homo sapiens
attttaaggctattt

SEQ ID NO: 288911 - DNA, 15 bp, Homo sapiens
aattttaaggctatt

SEQ ID NO: 288912 - DNA, 15 bp, Homo sapiens
gaattttaaggctat

SEQ ID NO: 288913 - DNA, 15 bp, Homo sapiens
ggaattttaaggcta

SEQ ID NO: 288914 - DNA, 15 bp, Homo sapiens
tggaattttaaggct

SEQ ID NO: 288915 - DNA, 15 bp, Homo sapiens
atggaattttaaggc

SEQ ID NO: 288916 - DNA, 15 bp, Homo sapiens
tatggaattttaagg

SEQ ID NO: 288917 - DNA, 15 bp, Homo sapiens
atatggaattttaag

SEQ ID NO: 288918 - DNA, 15 bp, Homo sapiens
gatatggaattttaa

SEQ ID NO: 288919 - DNA, 15 bp, Homo sapiens
tgatatggaatttta

SEQ ID NO: 288920 - DNA, 15 bp, Homo sapiens
gtgatatggaatttt

SEQ ID NO: 288921 - DNA, 15 bp, Homo sapiens
tgtgatatggaattt

SEQ ID NO: 288922 - DNA, 15 bp, Homo sapiens
ctgtgatatggaatt

SEQ ID NO: 288923 - DNA, 15 bp, Homo sapiens
tctgtgatatggaat

SEQ ID NO: 288924 - DNA, 15 bp, Homo sapiens
ctctgtgatatggaa

SEQ ID NO: 288925 - DNA, 15 bp, Homo sapiens
tctctgtgatatgga

SEQ ID NO: 288926 - DNA, 15 bp, Homo sapiens
gtctctgtgatatgg

SEQ ID NO: 288927 - DNA, 15 bp, Homo sapiens
ggtctctgtgatatg

SEQ ID NO: 288928 - DNA, 15 bp, Homo sapiens
tggtctctgtgatat

SEQ ID NO: 288929 - DNA, 15 bp, Homo sapiens
atggtctctgtgata

SEQ ID NO: 288930 - DNA, 15 bp, Homo sapiens
tatggtctctgtgat

SEQ ID NO: 288931 - DNA, 15 bp, Homo sapiens
ttatggtctctgtga

SEQ ID NO: 288932 - DNA, 15 bp, Homo sapiens
gttatggtctctgtg

SEQ ID NO: 288933 - DNA, 15 bp, Homo sapiens
ggttatggtctctgt

SEQ ID NO: 288934 - DNA, 15 bp, Homo sapiens
aggttatggtctctg

SEQ ID NO: 288935 - DNA, 15 bp, Homo sapiens
aaggttatggtctct

SEQ ID NO: 288936 - DNA, 15 bp, Homo sapiens
aaaggttatggtctc

SEQ ID NO: 288937 - DNA, 15 bp, Homo sapiens
aaaaggttatggtct

SEQ ID NO: 288938 - DNA, 15 bp, Homo sapiens
aaaaaggttatggtc

SEQ ID NO: 288939 - DNA, 15 bp, Homo sapiens
caaaaaggttatggt

SEQ ID NO: 288940 - DNA, 15 bp, Homo sapiens
acaaaaaggttatgg

SEQ ID NO: 288941 - DNA, 15 bp, Homo sapiens
aacaaaaaggttatg

SEQ ID NO: 288942 - DNA, 15 bp, Homo sapiens
gaacaaaaaggttat

SEQ ID NO: 288943 - DNA, 15 bp, Homo sapiens
tgaacaaaaaggtta

SEQ ID NO: 288944 - DNA, 15 bp, Homo sapiens
gtgaacaaaaaggtt

SEQ ID NO: 288945 - DNA, 15 bp, Homo sapiens
agtgaacaaaaaggt

SEQ ID NO: 288946 - DNA, 15 bp, Homo sapiens
cagtgaacaaaaagg

SEQ ID NO: 288947 - DNA, 15 bp, Homo sapiens
acagtgaacaaaaag

SEQ ID NO: 288948 - DNA, 15 bp, Homo sapiens
gacagtgaacaaaaa

SEQ ID NO: 288949 - DNA, 15 bp, Homo sapiens
agacagtgaacaaaa

SEQ ID NO: 288950 - DNA, 15 bp, Homo sapiens
tagacagtgaacaaa

SEQ ID NO: 288951 - DNA, 15 bp, Homo sapiens
ttagacagtgaacaa

SEQ ID NO: 288952 - DNA, 15 bp, Homo sapiens
attagacagtgaaca

SEQ ID NO: 288953 - DNA, 15 bp, Homo sapiens
tattagacagtgaac

SEQ ID NO: 288954 - DNA, 15 bp, Homo sapiens
ttattagacagtgaa

SEQ ID NO: 288955 - DNA, 15 bp, Homo sapiens
attattagacagtga

SEQ ID NO: 288956 - DNA, 15 bp, Homo sapiens
aattattagacagtg

SEQ ID NO: 288957 - DNA, 15 bp, Homo sapiens
taattattagacagt

SEQ ID NO: 288958 - DNA, 15 bp, Homo sapiens
ctaattattagacag

SEQ ID NO: 288959 - DNA, 15 bp, Homo sapiens
cctaattattagaca

SEQ ID NO: 288960 - DNA, 15 bp, Homo sapiens
ccctaattattagac

SEQ ID NO: 288961 - DNA, 15 bp, Homo sapiens
gccctaattattaga

SEQ ID NO: 288962 - DNA, 15 bp, Homo sapiens
ggccctaattattag

SEQ ID NO: 288963 - DNA, 15 bp, Homo sapiens
aggccctaattatta

SEQ ID NO: 288964 - DNA, 15 bp, Homo sapiens
caggccctaattatt

SEQ ID NO: 288965 - DNA, 15 bp, Homo sapiens
acaggccctaattat

SEQ ID NO: 288966 - DNA, 15 bp, Homo sapiens
aacaggccctaatta

SEQ ID NO: 288967 - DNA, 15 bp, Homo sapiens
taacaggccctaatt

SEQ ID NO: 288968 - DNA, 15 bp, Homo sapiens
ataacaggccctaat

SEQ ID NO: 288969 - DNA, 15 bp, Homo sapiens
tataacaggccctaa

SEQ ID NO: 288970 - DNA, 15 bp, Homo sapiens
ttataacaggcccta

SEQ ID NO: 288971 - DNA, 15 bp, Homo sapiens
tttataacaggccct

SEQ ID NO: 288972 - DNA, 15 bp, Homo sapiens
ttttataacaggccc

SEQ ID NO: 288973 - DNA, 15 bp, Homo sapiens
gttttataacaggcc

SEQ ID NO: 288974 - DNA, 15 bp, Homo sapiens
agttttataacaggc

SEQ ID NO: 288975 - DNA, 15 bp, Homo sapiens
aagttttataacagg

SEQ ID NO: 288976 - DNA, 15 bp, Homo sapiens
caagttttataacag

SEQ ID NO: 288977 - DNA, 15 bp, Homo sapiens
ccaagttttataaca

SEQ ID NO: 288978 - DNA, 15 bp, Homo sapiens
accaagttttataac

SEQ ID NO: 288979 - DNA, 15 bp, Homo sapiens
taccaagttttataa

SEQ ID NO: 288980 - DNA, 15 bp, Homo sapiens
gtaccaagttttata

SEQ ID NO: 288981 - DNA, 15 bp, Homo sapiens
tgtaccaagttttat

SEQ ID NO: 288982 - DNA, 15 bp, Homo sapiens
atgtaccaagtttta

SEQ ID NO: 288983 - DNA, 15 bp, Homo sapiens
tatgtaccaagtttt

SEQ ID NO: 288984 - DNA, 15 bp, Homo sapiens
ctatgtaccaagttt

SEQ ID NO: 288985 - DNA, 15 bp, Homo sapiens
actatgtaccaagtt

SEQ ID NO: 288986 - DNA, 15 bp, Homo sapiens
tactatgtaccaagt

SEQ ID NO: 288987 - DNA, 15 bp, Homo sapiens
ctactatgtaccaag

SEQ ID NO: 288988 - DNA, 15 bp, Homo sapiens
cctactatgtaccaa

SEQ ID NO: 288989 - DNA, 15 bp, Homo sapiens
gcctactatgtacca

SEQ ID NO: 288990 - DNA, 15 bp, Homo sapiens
tgcctactatgtacc

SEQ ID NO: 288991 - DNA, 15 bp, Homo sapiens
ttgcctactatgtac

SEQ ID NO: 288992 - DNA, 15 bp, Homo sapiens
attgcctactatgta

SEQ ID NO: 288993 - DNA, 15 bp, Homo sapiens
gattgcctactatgt

SEQ ID NO: 288994 - DNA, 15 bp, Homo sapiens
tgattgcctactatg

SEQ ID NO: 288995 - DNA, 15 bp, Homo sapiens
ctgattgcctactat

SEQ ID NO: 288996 - DNA, 15 bp, Homo sapiens
actgattgcctacta

SEQ ID NO: 288997 - DNA, 15 bp, Homo sapiens
tactgattgcctact

SEQ ID NO: 288998 - DNA, 15 bp, Homo sapiens
ttactgattgcctac

SEQ ID NO: 288999 - DNA, 15 bp, Homo sapiens
attactgattgccta

SEQ ID NO: 289000 - DNA, 15 bp, Homo sapiens
tattactgattgcct

SEQ ID NO: 289001 - DNA, 15 bp, Homo sapiens
atattactgattgcc

SEQ ID NO: 289002 - DNA, 15 bp, Homo sapiens
tatattactgattgc

SEQ ID NO: 289003 - DNA, 15 bp, Homo sapiens
atatattactgattg

SEQ ID NO: 289004 - DNA, 15 bp, Homo sapiens
aatatattactgatt

SEQ ID NO: 289005 - DNA, 15 bp, Homo sapiens
aaatatattactgat

SEQ ID NO: 289006 - DNA, 15 bp, Homo sapiens
gaaatatattactga

SEQ ID NO: 289007 - DNA, 15 bp, Homo sapiens
tgaaatatattactg

SEQ ID NO: 289008 - DNA, 15 bp, Homo sapiens
ttgaaatatattact

SEQ ID NO: 289009 - DNA, 15 bp, Homo sapiens
tttgaaatatattac

SEQ ID NO: 289010 - DNA, 15 bp, Homo sapiens
atttgaaatatatta

SEQ ID NO: 289011 - DNA, 15 bp, Homo sapiens
catttgaaatatatt

SEQ ID NO: 289012 - DNA, 15 bp, Homo sapiens
tcatttgaaatatat

SEQ ID NO: 289013 - DNA, 15 bp, Homo sapiens
gtcatttgaaatata

SEQ ID NO: 289014 - DNA, 15 bp, Homo sapiens
agtcatttgaaatat

SEQ ID NO: 289015 - DNA, 15 bp, Homo sapiens
cagtcatttgaaata

SEQ ID NO: 289016 - DNA, 15 bp, Homo sapiens
acagtcatttgaaat

SEQ ID NO: 289017 - DNA, 15 bp, Homo sapiens
tacagtcatttgaaa

SEQ ID NO: 289018 - DNA, 15 bp, Homo sapiens
atacagtcatttgaa

SEQ ID NO: 289019 - DNA, 15 bp, Homo sapiens
tatacagtcatttga

SEQ ID NO: 289020 - DNA, 15 bp, Homo sapiens
ctatacagtcatttg

SEQ ID NO: 289021 - DNA, 15 bp, Homo sapiens
tctatacagtcattt

SEQ ID NO: 289022 - DNA, 15 bp, Homo sapiens
atctatacagtcatt

SEQ ID NO: 289023 - DNA, 15 bp, Homo sapiens
tatctatacagtcat

SEQ ID NO: 289024 - DNA, 15 bp, Homo sapiens
atatctatacagtca

SEQ ID NO: 289025 - DNA, 15 bp, Homo sapiens
catatctatacagtc

SEQ ID NO: 289026 - DNA, 15 bp, Homo sapiens
acatatctatacagt

SEQ ID NO: 289027 - DNA, 15 bp, Homo sapiens
tacatatctatacag

SEQ ID NO: 289028 - DNA, 15 bp, Homo sapiens
ttacatatctataca

SEQ ID NO: 289029 - DNA, 15 bp, Homo sapiens
tttacatatctatac

SEQ ID NO: 289030 - DNA, 15 bp, Homo sapiens
atttacatatctata

SEQ ID NO: 289031 - DNA, 15 bp, Homo sapiens
catttacatatctat

SEQ ID NO: 289032 - DNA, 15 bp, Homo sapiens
ccatttacatatcta

SEQ ID NO: 289033 - DNA, 15 bp, Homo sapiens
tccatttacatatct

SEQ ID NO: 289034 - DNA, 15 bp, Homo sapiens
atccatttacatatc

SEQ ID NO: 289035 - DNA, 15 bp, Homo sapiens
tatccatttacatat

SEQ ID NO: 289036 - DNA, 15 bp, Homo sapiens
gtatccatttacata

SEQ ID NO: 289037 - DNA, 15 bp, Homo sapiens
tgtatccatttacat

SEQ ID NO: 289038 - DNA, 15 bp, Homo sapiens
atgtatccatttaca

SEQ ID NO: 289039 - DNA, 15 bp, Homo sapiens
aatgtatccatttac

SEQ ID NO: 289040 - DNA, 15 bp, Homo sapiens
aaatgtatccattta

SEQ ID NO: 289041 - DNA, 15 bp, Homo sapiens
aaaatgtatccattt

SEQ ID NO: 289042 - DNA, 15 bp, Homo sapiens
gaaaatgtatccatt

SEQ ID NO: 289043 - DNA, 15 bp, Homo sapiens
tgaaaatgtatccat

SEQ ID NO: 289044 - DNA, 15 bp, Homo sapiens
atgaaaatgtatcca

SEQ ID NO: 289045 - DNA, 15 bp, Homo sapiens
tatgaaaatgtatcc

SEQ ID NO: 289046 - DNA, 15 bp, Homo sapiens
atatgaaaatgtatc

SEQ ID NO: 289047 - DNA, 15 bp, Homo sapiens
tatatgaaaatgtat

SEQ ID NO: 289048 - DNA, 15 bp, Homo sapiens
ttatatgaaaatgta

SEQ ID NO: 289049 - DNA, 15 bp, Homo sapiens
cttatatgaaaatgt

SEQ ID NO: 289050 - DNA, 15 bp, Homo sapiens
acttatatgaaaatg

SEQ ID NO: 289051 - DNA, 15 bp, Homo sapiens
tacttatatgaaaat

SEQ ID NO: 289052 - DNA, 15 bp, Homo sapiens
atacttatatgaaaa

SEQ ID NO: 289053 - DNA, 15 bp, Homo sapiens
tatacttatatgaaa

SEQ ID NO: 289054 - DNA, 15 bp, Homo sapiens
ctatacttatatgaa

SEQ ID NO: 289055 - DNA, 15 bp, Homo sapiens
actatacttatatga

SEQ ID NO: 289056 - DNA, 15 bp, Homo sapiens
tactatacttatatg

SEQ ID NO: 289057 - DNA, 15 bp, Homo sapiens
atactatacttatat

SEQ ID NO: 289058 - DNA, 15 bp, Homo sapiens
tatactatacttata

SEQ ID NO: 289059 - DNA, 15 bp, Homo sapiens
atatactatacttat

SEQ ID NO: 289060 - DNA, 15 bp, Homo sapiens
tatatactatactta

SEQ ID NO: 289061 - DNA, 15 bp, Homo sapiens
gtatatactatactt

SEQ ID NO: 289062 - DNA, 15 bp, Homo sapiens
agtatatactatact

SEQ ID NO: 289063 - DNA, 15 bp, Homo sapiens
aagtatatactatac

SEQ ID NO: 289064 - DNA, 15 bp, Homo sapiens
aaagtatatactata

SEQ ID NO: 289065 - DNA, 15 bp, Homo sapiens
caaagtatatactat

SEQ ID NO: 289066 - DNA, 15 bp, Homo sapiens
ccaaagtatatacta

SEQ ID NO: 289067 - DNA, 15 bp, Homo sapiens
tccaaagtatatact

SEQ ID NO: 289068 - DNA, 15 bp, Homo sapiens
gtccaaagtatatac

SEQ ID NO: 289069 - DNA, 15 bp, Homo sapiens
tgtccaaagtatata

SEQ ID NO: 289070 - DNA, 15 bp, Homo sapiens
ttgtccaaagtatat

SEQ ID NO: 289071 - DNA, 15 bp, Homo sapiens
cttgtccaaagtata

SEQ ID NO: 289072 - DNA, 15 bp, Homo sapiens
tcttgtccaaagtat

SEQ ID NO: 289073 - DNA, 15 bp, Homo sapiens
atcttgtccaaagta

SEQ ID NO: 289074 - DNA, 15 bp, Homo sapiens
tatcttgtccaaagt

SEQ ID NO: 289075 - DNA, 15 bp, Homo sapiens
ttatcttgtccaaag

SEQ ID NO: 289076 - DNA, 15 bp, Homo sapiens
attatcttgtccaaa

SEQ ID NO: 289077 - DNA, 15 bp, Homo sapiens
cattatcttgtccaa

SEQ ID NO: 289078 - DNA, 15 bp, Homo sapiens
tcattatcttgtcca

SEQ ID NO: 289079 - DNA, 15 bp, Homo sapiens
ctcattatcttgtcc

SEQ ID NO: 289080 - DNA, 15 bp, Homo sapiens
tctcattatcttgtc

SEQ ID NO: 289081 - DNA, 15 bp, Homo sapiens
atctcattatcttgt

SEQ ID NO: 289082 - DNA, 15 bp, Homo sapiens
catctcattatcttg

SEQ ID NO: 289083 - DNA, 15 bp, Homo sapiens
tcatctcattatctt

SEQ ID NO: 289084 - DNA, 15 bp, Homo sapiens
gtcatctcattatct

SEQ ID NO: 289085 - DNA, 15 bp, Homo sapiens
tgtcatctcattatc

SEQ ID NO: 289086 - DNA, 15 bp, Homo sapiens
gtgtcatctcattat

SEQ ID NO: 289087 - DNA, 15 bp, Homo sapiens
tgtgtcatctcatta

SEQ ID NO: 289088 - DNA, 15 bp, Homo sapiens
ctgtgtcatctcatt

SEQ ID NO: 289089 - DNA, 15 bp, Homo sapiens
tctgtgtcatctcat

SEQ ID NO: 289090 - DNA, 15 bp, Homo sapiens
ttctgtgtcatctca

SEQ ID NO: 289091 - DNA, 15 bp, Homo sapiens
cttctgtgtcatctc

SEQ ID NO: 289092 - DNA, 15 bp, Homo sapiens
ccttctgtgtcatct

SEQ ID NO: 289093 - DNA, 15 bp, Homo sapiens
cccttctgtgtcatc

SEQ ID NO: 289094 - DNA, 15 bp, Homo sapiens
tcccttctgtgtcat

SEQ ID NO: 289095 - DNA, 15 bp, Homo sapiens
gtcccttctgtgtca

SEQ ID NO: 289096 - DNA, 15 bp, Homo sapiens
agtcccttctgtgtc

SEQ ID NO: 289097 - DNA, 15 bp, Homo sapiens
tagtcccttctgtgt

SEQ ID NO: 289098 - DNA, 15 bp, Homo sapiens
atagtcccttctgtg

SEQ ID NO: 289099 - DNA, 15 bp, Homo sapiens
tatagtcccttctgt

SEQ ID NO: 289100 - DNA, 15 bp, Homo sapiens
ttatagtcccttctg

SEQ ID NO: 289101 - DNA, 15 bp, Homo sapiens
tttatagtcccttct

SEQ ID NO: 289102 - DNA, 15 bp, Homo sapiens
ctttatagtcccttc

SEQ ID NO: 289103 - DNA, 15 bp, Homo sapiens
gctttatagtccctt

SEQ ID NO: 289104 - DNA, 15 bp, Homo sapiens
tgctttatagtccct

SEQ ID NO: 289105 - DNA, 15 bp, Homo sapiens
ttgctttatagtccc

SEQ ID NO: 289106 - DNA, 15 bp, Homo sapiens
attgctttatagtcc

SEQ ID NO: 289107 - DNA, 15 bp, Homo sapiens
cattgctttatagtc

SEQ ID NO: 289108 - DNA, 15 bp, Homo sapiens
acattgctttatagt

SEQ ID NO: 289109 - DNA, 15 bp, Homo sapiens
gacattgctttatag

SEQ ID NO: 289110 - DNA, 15 bp, Homo sapiens
agacattgctttata

SEQ ID NO: 289111 - DNA, 15 bp, Homo sapiens
cagacattgctttat

SEQ ID NO: 289112 - DNA, 15 bp, Homo sapiens
tcagacattgcttta

SEQ ID NO: 289113 - DNA, 15 bp, Homo sapiens
ttcagacattgcttt

SEQ ID NO: 289114 - DNA, 15 bp, Homo sapiens
gttcagacattgctt

SEQ ID NO: 289115 - DNA, 15 bp, Homo sapiens
agttcagacattgct

SEQ ID NO: 289116 - DNA, 15 bp, Homo sapiens
cagttcagacattgc

SEQ ID NO: 289117 - DNA, 15 bp, Homo sapiens
tcagttcagacattg

SEQ ID NO: 289118 - DNA, 15 bp, Homo sapiens
ttcagttcagacatt

SEQ ID NO: 289119 - DNA, 15 bp, Homo sapiens
attcagttcagacat

SEQ ID NO: 289120 - DNA, 15 bp, Homo sapiens
aattcagttcagaca

SEQ ID NO: 289121 - DNA, 15 bp, Homo sapiens
aaattcagttcagac

SEQ ID NO: 289122 - DNA, 15 bp, Homo sapiens
aaaattcagttcaga

SEQ ID NO: 289123 - DNA, 15 bp, Homo sapiens
caaaattcagttcag

SEQ ID NO: 289124 - DNA, 15 bp, Homo sapiens
tcaaaattcagttca

SEQ ID NO: 289125 - DNA, 15 bp, Homo sapiens
ttcaaaattcagttc

SEQ ID NO: 289126 - DNA, 15 bp, Homo sapiens
tttcaaaattcagtt

SEQ ID NO: 289127 - DNA, 15 bp, Homo sapiens
gtttcaaaattcagt

SEQ ID NO: 289128 - DNA, 15 bp, Homo sapiens
tgtttcaaaattcag

SEQ ID NO: 289129 - DNA, 15 bp, Homo sapiens
atgtttcaaaattca

SEQ ID NO: 289130 - DNA, 15 bp, Homo sapiens
catgtttcaaaattc

SEQ ID NO: 289131 - DNA, 15 bp, Homo sapiens
gcatgtttcaaaatt

SEQ ID NO: 289132 - DNA, 15 bp, Homo sapiens
tgcatgtttcaaaat

SEQ ID NO: 289133 - DNA, 15 bp, Homo sapiens
ttgcatgtttcaaaa

SEQ ID NO: 289134 - DNA, 15 bp, Homo sapiens
tttgcatgtttcaaa

SEQ ID NO: 289135 - DNA, 15 bp, Homo sapiens
ctttgcatgtttcaa

SEQ ID NO: 289136 - DNA, 15 bp, Homo sapiens
cctttgcatgtttca

SEQ ID NO: 289137 - DNA, 15 bp, Homo sapiens
gcctttgcatgtttc

SEQ ID NO: 289138 - DNA, 15 bp, Homo sapiens
ggcctttgcatgttt

SEQ ID NO: 289139 - DNA, 15 bp, Homo sapiens
aggcctttgcatgtt

SEQ ID NO: 289140 - DNA, 15 bp, Homo sapiens
caggcctttgcatgt

SEQ ID NO: 289141 - DNA, 15 bp, Homo sapiens
acaggcctttgcatg

SEQ ID NO: 289142 - DNA, 15 bp, Homo sapiens
cacaggcctttgcat

SEQ ID NO: 289143 - DNA, 15 bp, Homo sapiens
acacaggcctttgca

SEQ ID NO: 289144 - DNA, 15 bp, Homo sapiens
gacacaggcctttgc

SEQ ID NO: 289145 - DNA, 15 bp, Homo sapiens
tgacacaggcctttg

SEQ ID NO: 289146 - DNA, 15 bp, Homo sapiens
gtgacacaggccttt

SEQ ID NO: 289147 - DNA, 15 bp, Homo sapiens
tgtgacacaggcctt

SEQ ID NO: 289148 - DNA, 15 bp, Homo sapiens
ctgtgacacaggcct

SEQ ID NO: 289149 - DNA, 15 bp, Homo sapiens
cctgtgacacaggcc

SEQ ID NO: 289150 - DNA, 15 bp, Homo sapiens
tcctgtgacacaggc

SEQ ID NO: 289151 - DNA, 15 bp, Homo sapiens
atcctgtgacacagg

SEQ ID NO: 289152 - DNA, 15 bp, Homo sapiens
tatcctgtgacacag

SEQ ID NO: 289153 - DNA, 15 bp, Homo sapiens
ttatcctgtgacaca

SEQ ID NO: 289154 - DNA, 15 bp, Homo sapiens
tttatcctgtgacac

SEQ ID NO: 289155 - DNA, 15 bp, Homo sapiens
ctttatcctgtgaca

SEQ ID NO: 289156 - DNA, 15 bp, Homo sapiens
tctttatcctgtgac

SEQ ID NO: 289157 - DNA, 15 bp, Homo sapiens
atctttatcctgtga

SEQ ID NO: 289158 - DNA, 15 bp, Homo sapiens
aatctttatcctgtg

SEQ ID NO: 289159 - DNA, 15 bp, Homo sapiens
aaatctttatcctgt

SEQ ID NO: 289160 - DNA, 15 bp, Homo sapiens
aaaatctttatcctg

SEQ ID NO: 289161 - DNA, 15 bp, Homo sapiens
taaaatctttatcct

SEQ ID NO: 289162 - DNA, 15 bp, Homo sapiens
ctaaaatctttatcc

SEQ ID NO: 289163 - DNA, 15 bp, Homo sapiens
cctaaaatctttatc

SEQ ID NO: 289164 - DNA, 15 bp, Homo sapiens
ccctaaaatctttat

SEQ ID NO: 289165 - DNA, 15 bp, Homo sapiens
tccctaaaatcttta

SEQ ID NO: 289166 - DNA, 15 bp, Homo sapiens
ctccctaaaatcttt

SEQ ID NO: 289167 - DNA, 15 bp, Homo sapiens
actccctaaaatctt

SEQ ID NO: 289168 - DNA, 15 bp, Homo sapiens
cactccctaaaatct

SEQ ID NO: 289169 - DNA, 15 bp, Homo sapiens
ccactccctaaaatc

SEQ ID NO: 289170 - DNA, 15 bp, Homo sapiens
cccactccctaaaat

SEQ ID NO: 289171 - DNA, 15 bp, Homo sapiens
tcccactccctaaaa

SEQ ID NO: 289172 - DNA, 15 bp, Homo sapiens
ttcccactccctaaa

SEQ ID NO: 289173 - DNA, 15 bp, Homo sapiens
gttcccactccctaa

SEQ ID NO: 289174 - DNA, 15 bp, Homo sapiens
tgttcccactcccta

SEQ ID NO: 289175 - DNA, 15 bp, Homo sapiens
ctgttcccactccct

SEQ ID NO: 289176 - DNA, 15 bp, Homo sapiens
gctgttcccactccc

SEQ ID NO: 289177 - DNA, 15 bp, Homo sapiens
tgctgttcccactcc

SEQ ID NO: 289178 - DNA, 15 bp, Homo sapiens
atgctgttcccactc

SEQ ID NO: 289179 - DNA, 15 bp, Homo sapiens
catgctgttcccact

SEQ ID NO: 289180 - DNA, 15 bp, Homo sapiens
acatgctgttcccac

SEQ ID NO: 289181 - DNA, 15 bp, Homo sapiens
aacatgctgttccca

SEQ ID NO: 289182 - DNA, 15 bp, Homo sapiens
gaacatgctgttccc

SEQ ID NO: 289183 - DNA, 15 bp, Homo sapiens
tgaacatgctgttcc

SEQ ID NO: 289184 - DNA, 15 bp, Homo sapiens
ttgaacatgctgttc

SEQ ID NO: 289185 - DNA, 15 bp, Homo sapiens
tttgaacatgctgtt

SEQ ID NO: 289186 - DNA, 15 bp, Homo sapiens
ctttgaacatgctgt

SEQ ID NO: 289187 - DNA, 15 bp, Homo sapiens
cctttgaacatgctg

SEQ ID NO: 289188 - DNA, 15 bp, Homo sapiens
ccctttgaacatgct

SEQ ID NO: 289189 - DNA, 15 bp, Homo sapiens
gccctttgaacatgc

SEQ ID NO: 289190 - DNA, 15 bp, Homo sapiens
agccctttgaacatg

SEQ ID NO: 289191 - DNA, 15 bp, Homo sapiens
cagccctttgaacat

SEQ ID NO: 289192 - DNA, 15 bp, Homo sapiens
ccagccctttgaaca

SEQ ID NO: 289193 - DNA, 15 bp, Homo sapiens
tccagccctttgaac

SEQ ID NO: 289194 - DNA, 15 bp, Homo sapiens
ttccagccctttgaa

SEQ ID NO: 289195 - DNA, 15 bp, Homo sapiens
attccagccctttga

SEQ ID NO: 289196 - DNA, 15 bp, Homo sapiens
aattccagccctttg

SEQ ID NO: 289197 - DNA, 15 bp, Homo sapiens
caattccagcccttt

SEQ ID NO: 289198 - DNA, 15 bp, Homo sapiens
acaattccagccctt

SEQ ID NO: 289199 - DNA, 15 bp, Homo sapiens
cacaattccagccct

SEQ ID NO: 289200 - DNA, 15 bp, Homo sapiens
tcacaattccagccc

SEQ ID NO: 289201 - DNA, 15 bp, Homo sapiens
ttcacaattccagcc

SEQ ID NO: 289202 - DNA, 15 bp, Homo sapiens
tttcacaattccagc

SEQ ID NO: 289203 - DNA, 15 bp, Homo sapiens
gtttcacaattccag

SEQ ID NO: 289204 - DNA, 15 bp, Homo sapiens
tgtttcacaattcca

SEQ ID NO: 289205 - DNA, 15 bp, Homo sapiens
atgtttcacaattcc

SEQ ID NO: 289206 - DNA, 15 bp, Homo sapiens
catgtttcacaattc

SEQ ID NO: 289207 - DNA, 15 bp, Homo sapiens
acatgtttcacaatt

SEQ ID NO: 289208 - DNA, 15 bp, Homo sapiens
tacatgtttcacaat

SEQ ID NO: 289209 - DNA, 15 bp, Homo sapiens
ttacatgtttcacaa

SEQ ID NO: 289210 - DNA, 15 bp, Homo sapiens
cttacatgtttcaca

SEQ ID NO: 289211 - DNA, 15 bp, Homo sapiens
acttacatgtttcac

SEQ ID NO: 289212 - DNA, 15 bp, Homo sapiens
cacttacatgtttca

SEQ ID NO: 289213 - DNA, 15 bp, Homo sapiens
ccacttacatgtttc

SEQ ID NO: 289214 - DNA, 15 bp, Homo sapiens
tccacttacatgttt

SEQ ID NO: 289215 - DNA, 15 bp, Homo sapiens
ctccacttacatgtt

SEQ ID NO: 289216 - DNA, 15 bp, Homo sapiens
tctccacttacatgt

SEQ ID NO: 289217 - DNA, 15 bp, Homo sapiens
ttctccacttacatg

SEQ ID NO: 289218 - DNA, 15 bp, Homo sapiens
tttctccacttacat

SEQ ID NO: 289219 - DNA, 15 bp, Homo sapiens
ttttctccacttaca

SEQ ID NO: 289220 - DNA, 15 bp, Homo sapiens
gttttctccacttac

SEQ ID NO: 289221 - DNA, 15 bp, Homo sapiens
ggttttctccactta

SEQ ID NO: 289222 - DNA, 15 bp, Homo sapiens
gggttttctccactt

SEQ ID NO: 289223 - DNA, 15 bp, Homo sapiens
agggttttctccact

SEQ ID NO: 289224 - DNA, 15 bp, Homo sapiens
cagggttttctccac

SEQ ID NO: 289225 - DNA, 15 bp, Homo sapiens
gcagggttttctcca

SEQ ID NO: 289226 - DNA, 15 bp, Homo sapiens
agcagggttttctcc

SEQ ID NO: 289227 - DNA, 15 bp, Homo sapiens
cagcagggttttctc

SEQ ID NO: 289228 - DNA, 15 bp, Homo sapiens
acagcagggttttct

SEQ ID NO: 289229 - DNA, 15 bp, Homo sapiens
gacagcagggttttc

SEQ ID NO: 289230 - DNA, 15 bp, Homo sapiens
tgacagcagggtttt

SEQ ID NO: 289231 - DNA, 15 bp, Homo sapiens
gtgacagcagggttt

SEQ ID NO: 289232 - DNA, 15 bp, Homo sapiens
tgtgacagcagggtt

SEQ ID NO: 289233 - DNA, 15 bp, Homo sapiens
gtgtgacagcagggt

SEQ ID NO: 289234 - DNA, 15 bp, Homo sapiens
ggtgtgacagcaggg

SEQ ID NO: 289235 - DNA, 15 bp, Homo sapiens
tggtgtgacagcagg

SEQ ID NO: 289236 - DNA, 15 bp, Homo sapiens
gtggtgtgacagcag

SEQ ID NO: 289237 - DNA, 15 bp, Homo sapiens
ggtggtgtgacagca

SEQ ID NO: 289238 - DNA, 15 bp, Homo sapiens
cggtggtgtgacagc

SEQ ID NO: 289239 - DNA, 15 bp, Homo sapiens
tcggtggtgtgacag

SEQ ID NO: 289240 - DNA, 15 bp, Homo sapiens
gtcggtggtgtgaca

SEQ ID NO: 289241 - DNA, 15 bp, Homo sapiens
tgtcggtggtgtgac

SEQ ID NO: 289242 - DNA, 15 bp, Homo sapiens
ttgtcggtggtgtga

SEQ ID NO: 289243 - DNA, 15 bp, Homo sapiens
gttgtcggtggtgtg

SEQ ID NO: 289244 - DNA, 15 bp, Homo sapiens
tgttgtcggtggtgt

SEQ ID NO: 289245 - DNA, 15 bp, Homo sapiens
ttgttgtcggtggtg

SEQ ID NO: 289246 - DNA, 15 bp, Homo sapiens
attgttgtcggtggt

SEQ ID NO: 289247 - DNA, 15 bp, Homo sapiens
gattgttgtcggtgg

SEQ ID NO: 289248 - DNA, 15 bp, Homo sapiens
tgattgttgtcggtg

SEQ ID NO: 289249 - DNA, 15 bp, Homo sapiens
ttgattgttgtcggt

SEQ ID NO: 289250 - DNA, 15 bp, Homo sapiens
gttgattgttgtcgg

SEQ ID NO: 289251 - DNA, 15 bp, Homo sapiens
tgttgattgttgtcg

SEQ ID NO: 289252 - DNA, 15 bp, Homo sapiens
gtgttgattgttgtc

SEQ ID NO: 289253 - DNA, 15 bp, Homo sapiens
tgtgttgattgttgt

SEQ ID NO: 289254 - DNA, 15 bp, Homo sapiens
ctgtgttgattgttg

SEQ ID NO: 289255 - DNA, 15 bp, Homo sapiens
tctgtgttgattgtt

SEQ ID NO: 289256 - DNA, 15 bp, Homo sapiens
ttctgtgttgattgt

SEQ ID NO: 289257 - DNA, 15 bp, Homo sapiens
cttctgtgttgattg

SEQ ID NO: 289258 - DNA, 15 bp, Homo sapiens
tcttctgtgttgatt

SEQ ID NO: 289259 - DNA, 15 bp, Homo sapiens
gtcttctgtgttgat

SEQ ID NO: 289260 - DNA, 15 bp, Homo sapiens
agtcttctgtgttga

SEQ ID NO: 289261 - DNA, 15 bp, Homo sapiens
aagtcttctgtgttg

SEQ ID NO: 289262 - DNA, 15 bp, Homo sapiens
aaagtcttctgtgtt

SEQ ID NO: 289263 - DNA, 15 bp, Homo sapiens
aaaagtcttctgtgt

SEQ ID NO: 289264 - DNA, 15 bp, Homo sapiens
caaaagtcttctgtg

SEQ ID NO: 289265 - DNA, 15 bp, Homo sapiens
acaaaagtcttctgt

SEQ ID NO: 289266 - DNA, 15 bp, Homo sapiens
cacaaaagtcttctg

SEQ ID NO: 289267 - DNA, 15 bp, Homo sapiens
tcacaaaagtcttct

SEQ ID NO: 289268 - DNA, 15 bp, Homo sapiens
gtcacaaaagtcttc

SEQ ID NO: 289269 - DNA, 15 bp, Homo sapiens
ggtcacaaaagtctt

SEQ ID NO: 289270 - DNA, 15 bp, Homo sapiens
tggtcacaaaagtct

SEQ ID NO: 289271 - DNA, 15 bp, Homo sapiens
ttggtcacaaaagtc

SEQ ID NO: 289272 - DNA, 15 bp, Homo sapiens
tttggtcacaaaagt

SEQ ID NO: 289273 - DNA, 15 bp, Homo sapiens
atttggtcacaaaag

SEQ ID NO: 289274 - DNA, 15 bp, Homo sapiens
catttggtcacaaaa

SEQ ID NO: 289275 - DNA, 15 bp, Homo sapiens
acatttggtcacaaa

SEQ ID NO: 289276 - DNA, 15 bp, Homo sapiens
cacatttggtcacaa

SEQ ID NO: 289277 - DNA, 15 bp, Homo sapiens
ccacatttggtcaca

SEQ ID NO: 289278 - DNA, 15 bp, Homo sapiens
cccacatttggtcac

SEQ ID NO: 289279 - DNA, 15 bp, Homo sapiens
tcccacatttggtca

SEQ ID NO: 289280 - DNA, 15 bp, Homo sapiens
ttcccacatttggtc

SEQ ID NO: 289281 - DNA, 15 bp, Homo sapiens
tttcccacatttggt

SEQ ID NO: 289282 - DNA, 15 bp, Homo sapiens
ctttcccacatttgg

SEQ ID NO: 289283 - DNA, 15 bp, Homo sapiens
actttcccacatttg

SEQ ID NO: 289284 - DNA, 15 bp, Homo sapiens
aactttcccacattt

SEQ ID NO: 289285 - DNA, 15 bp, Homo sapiens
aaactttcccacatt

SEQ ID NO: 289286 - DNA, 15 bp, Homo sapiens
aaaactttcccacat

SEQ ID NO: 289287 - DNA, 15 bp, Homo sapiens
gaaaactttcccaca

SEQ ID NO: 289288 - DNA, 15 bp, Homo sapiens
ggaaaactttcccac

SEQ ID NO: 289289 - DNA, 15 bp, Homo sapiens
aggaaaactttccca

SEQ ID NO: 289290 - DNA, 15 bp, Homo sapiens
gaggaaaactttccc

SEQ ID NO: 289291 - DNA, 15 bp, Homo sapiens
tgaggaaaactttcc

SEQ ID NO: 289292 - DNA, 15 bp, Homo sapiens
gtgaggaaaactttc

SEQ ID NO: 289293 - DNA, 15 bp, Homo sapiens
ggtgaggaaaacttt

SEQ ID NO: 289294 - DNA, 15 bp, Homo sapiens
tggtgaggaaaactt

SEQ ID NO: 289295 - DNA, 15 bp, Homo sapiens
ttggtgaggaaaact

SEQ ID NO: 289296 - DNA, 15 bp, Homo sapiens
cttggtgaggaaaac

SEQ ID NO: 289297 - DNA, 15 bp, Homo sapiens
tcttggtgaggaaaa

SEQ ID NO: 289298 - DNA, 15 bp, Homo sapiens
ttcttggtgaggaaa

SEQ ID NO: 289299 - DNA, 15 bp, Homo sapiens
tttcttggtgaggaa

SEQ ID NO: 289300 - DNA, 15 bp, Homo sapiens
gtttcttggtgagga

SEQ ID NO: 289301 - DNA, 15 bp, Homo sapiens
tgtttcttggtgagg

SEQ ID NO: 289302 - DNA, 15 bp, Homo sapiens
ttgtttcttggtgag

SEQ ID NO: 289303 - DNA, 15 bp, Homo sapiens
cttgtttcttggtga

SEQ ID NO: 289304 - DNA, 15 bp, Homo sapiens
gcttgtttcttggtg

SEQ ID NO: 289305 - DNA, 15 bp, Homo sapiens
tgcttgtttcttggt

SEQ ID NO: 289306 - DNA, 15 bp, Homo sapiens
ttgcttgtttcttgg

SEQ ID NO: 289307 - DNA, 15 bp, Homo sapiens
attgcttgtttcttg

SEQ ID NO: 289308 - DNA, 15 bp, Homo sapiens
gattgcttgtttctt

SEQ ID NO: 289309 - DNA, 15 bp, Homo sapiens
tgattgcttgtttct

SEQ ID NO: 289310 - DNA, 15 bp, Homo sapiens
ctgattgcttgtttc

SEQ ID NO: 289311 - DNA, 15 bp, Homo sapiens
actgattgcttgttt

SEQ ID NO: 289312 - DNA, 15 bp, Homo sapiens
aactgattgcttgtt

SEQ ID NO: 289313 - DNA, 15 bp, Homo sapiens
gaactgattgcttgt

SEQ ID NO: 289314 - DNA, 15 bp, Homo sapiens
agaactgattgcttg

SEQ ID NO: 289315 - DNA, 15 bp, Homo sapiens
cagaactgattgctt

SEQ ID NO: 289316 - DNA, 15 bp, Homo sapiens
gcagaactgattgct

SEQ ID NO: 289317 - DNA, 15 bp, Homo sapiens
tgcagaactgattgc

SEQ ID NO: 289318 - DNA, 15 bp, Homo sapiens
ctgcagaactgattg

SEQ ID NO: 289319 - DNA, 15 bp, Homo sapiens
gctgcagaactgatt

SEQ ID NO: 289320 - DNA, 15 bp, Homo sapiens
tgctgcagaactgat

SEQ ID NO: 289321 - DNA, 15 bp, Homo sapiens
ctgctgcagaactga

SEQ ID NO: 289322 - DNA, 15 bp, Homo sapiens
actgctgcagaactg

SEQ ID NO: 289323 - DNA, 15 bp, Homo sapiens
gactgctgcagaact

SEQ ID NO: 289324 - DNA, 15 bp, Homo sapiens
tgactgctgcagaac

SEQ ID NO: 289325 - DNA, 15 bp, Homo sapiens
gtgactgctgcagaa

SEQ ID NO: 289326 - DNA, 15 bp, Homo sapiens
ggtgactgctgcaga

SEQ ID NO: 289327 - DNA, 15 bp, Homo sapiens
tggtgactgctgcag

SEQ ID NO: 289328 - DNA, 15 bp, Homo sapiens
ctggtgactgctgca

SEQ ID NO: 289329 - DNA, 15 bp, Homo sapiens
gctggtgactgctgc

SEQ ID NO: 289330 - DNA, 15 bp, Homo sapiens
agctggtgactgctg

SEQ ID NO: 289331 - DNA, 15 bp, Homo sapiens
cagctggtgactgct

SEQ ID NO: 289332 - DNA, 15 bp, Homo sapiens
ccagctggtgactgc

SEQ ID NO: 289333 - DNA, 15 bp, Homo sapiens
cccagctggtgactg

SEQ ID NO: 289334 - DNA, 15 bp, Homo sapiens
acccagctggtgact

SEQ ID NO: 289335 - DNA, 15 bp, Homo sapiens
cacccagctggtgac

SEQ ID NO: 289336 - DNA, 15 bp, Homo sapiens
acacccagctggtga

SEQ ID NO: 289337 - DNA, 15 bp, Homo sapiens
gacacccagctggtg

SEQ ID NO: 289338 - DNA, 15 bp, Homo sapiens
ggacacccagctggt

SEQ ID NO: 289339 - DNA, 15 bp, Homo sapiens
aggacacccagctgg

SEQ ID NO: 289340 - DNA, 15 bp, Homo sapiens
gaggacacccagctg

SEQ ID NO: 289341 - DNA, 15 bp, Homo sapiens
agaggacacccagct

SEQ ID NO: 289342 - DNA, 15 bp, Homo sapiens
tagaggacacccagc

SEQ ID NO: 289343 - DNA, 15 bp, Homo sapiens
ttagaggacacccag

SEQ ID NO: 289344 - DNA, 15 bp, Homo sapiens
attagaggacaccca

SEQ ID NO: 289345 - DNA, 15 bp, Homo sapiens
aattagaggacaccc

SEQ ID NO: 289346 - DNA, 15 bp, Homo sapiens
aaattagaggacacc

SEQ ID NO: 289347 - DNA, 15 bp, Homo sapiens
taaattagaggacac

SEQ ID NO: 289348 - DNA, 15 bp, Homo sapiens
gtaaattagaggaca

SEQ ID NO: 289349 - DNA, 15 bp, Homo sapiens
agtaaattagaggac

SEQ ID NO: 289350 - DNA, 15 bp, Homo sapiens
aagtaaattagagga

SEQ ID NO: 289351 - DNA, 15 bp, Homo sapiens
gaagtaaattagagg

SEQ ID NO: 289352 - DNA, 15 bp, Homo sapiens
agaagtaaattagag

SEQ ID NO: 289353 - DNA, 15 bp, Homo sapiens
cagaagtaaattaga

SEQ ID NO: 289354 - DNA, 15 bp, Homo sapiens
tcagaagtaaattag

SEQ ID NO: 289355 - DNA, 15 bp, Homo sapiens
gtcagaagtaaatta

SEQ ID NO: 289356 - DNA, 15 bp, Homo sapiens
tgtcagaagtaaatt

SEQ ID NO: 289357 - DNA, 15 bp, Homo sapiens
gtgtcagaagtaaat

SEQ ID NO: 289358 - DNA, 15 bp, Homo sapiens
agtgtcagaagtaaa

SEQ ID NO: 289359 - DNA, 15 bp, Homo sapiens
cagtgtcagaagtaa

SEQ ID NO: 289360 - DNA, 15 bp, Homo sapiens
gcagtgtcagaagta

SEQ ID NO: 289361 - DNA, 15 bp, Homo sapiens
agcagtgtcagaagt

SEQ ID NO: 289362 - DNA, 15 bp, Homo sapiens
aagcagtgtcagaag

SEQ ID NO: 289363 - DNA, 15 bp, Homo sapiens
taagcagtgtcagaa

SEQ ID NO: 289364 - DNA, 15 bp, Homo sapiens
gtaagcagtgtcaga

SEQ ID NO: 289365 - DNA, 15 bp, Homo sapiens
ggtaagcagtgtcag

SEQ ID NO: 289366 - DNA, 15 bp, Homo sapiens
aggtaagcagtgtca

SEQ ID NO: 289367 - DNA, 15 bp, Homo sapiens
caggtaagcagtgtc

SEQ ID NO: 289368 - DNA, 15 bp, Homo sapiens
ccaggtaagcagtgt

SEQ ID NO: 289369 - DNA, 15 bp, Homo sapiens
tccaggtaagcagtg

SEQ ID NO: 289370 - DNA, 15 bp, Homo sapiens
ctccaggtaagcagt

SEQ ID NO: 289371 - DNA, 15 bp, Homo sapiens
tctccaggtaagcag

SEQ ID NO: 289372 - DNA, 15 bp, Homo sapiens
atctccaggtaagca

SEQ ID NO: 289373 - DNA, 15 bp, Homo sapiens
tatctccaggtaagc

SEQ ID NO: 289374 - DNA, 15 bp, Homo sapiens
ctatctccaggtaag

SEQ ID NO: 289375 - DNA, 15 bp, Homo sapiens
actatctccaggtaa

SEQ ID NO: 289376 - DNA, 15 bp, Homo sapiens
cactatctccaggta

SEQ ID NO: 289377 - DNA, 15 bp, Homo sapiens
acactatctccaggt

SEQ ID NO: 289378 - DNA, 15 bp, Homo sapiens
gacactatctccagg

SEQ ID NO: 289379 - DNA, 15 bp, Homo sapiens
tgacactatctccag

SEQ ID NO: 289380 - DNA, 15 bp, Homo sapiens
ctgacactatctcca

SEQ ID NO: 289381 - DNA, 15 bp, Homo sapiens
tctgacactatctcc

SEQ ID NO: 289382 - DNA, 15 bp, Homo sapiens
atctgacactatctc

SEQ ID NO: 289383 - DNA, 15 bp, Homo sapiens
gatctgacactatct

SEQ ID NO: 289384 - DNA, 15 bp, Homo sapiens
ggatctgacactatc

SEQ ID NO: 289385 - DNA, 15 bp, Homo sapiens
gggatctgacactat

SEQ ID NO: 289386 - DNA, 15 bp, Homo sapiens
tgggatctgacacta

SEQ ID NO: 289387 - DNA, 15 bp, Homo sapiens
gtgggatctgacact

SEQ ID NO: 289388 - DNA, 15 bp, Homo sapiens
tgtgggatctgacac

SEQ ID NO: 289389 - DNA, 15 bp, Homo sapiens
ctgtgggatctgaca

SEQ ID NO: 289390 - DNA, 15 bp, Homo sapiens
cctgtgggatctgac

SEQ ID NO: 289391 - DNA, 15 bp, Homo sapiens
acctgtgggatctga

SEQ ID NO: 289392 - DNA, 15 bp, Homo sapiens
aacctgtgggatctg

SEQ ID NO: 289393 - DNA, 15 bp, Homo sapiens
caacctgtgggatct

SEQ ID NO: 289394 - DNA, 15 bp, Homo sapiens
tcaacctgtgggatc

SEQ ID NO: 289395 - DNA, 15 bp, Homo sapiens
ctcaacctgtgggat

SEQ ID NO: 289396 - DNA, 15 bp, Homo sapiens
cctcaacctgtggga

SEQ ID NO: 289397 - DNA, 15 bp, Homo sapiens
ccctcaacctgtggg

SEQ ID NO: 289398 - DNA, 15 bp, Homo sapiens
gccctcaacctgtgg

SEQ ID NO: 289399 - DNA, 15 bp, Homo sapiens
agccctcaacctgtg

SEQ ID NO: 289400 - DNA, 15 bp, Homo sapiens
gagccctcaacctgt

SEQ ID NO: 289401 - DNA, 15 bp, Homo sapiens
tgagccctcaacctg

SEQ ID NO: 289402 - DNA, 15 bp, Homo sapiens
ctgagccctcaacct

SEQ ID NO: 289403 - DNA, 15 bp, Homo sapiens
actgagccctcaacc

SEQ ID NO: 289404 - DNA, 15 bp, Homo sapiens
gactgagccctcaac

SEQ ID NO: 289405 - DNA, 15 bp, Homo sapiens
ggactgagccctcaa

SEQ ID NO: 289406 - DNA, 15 bp, Homo sapiens
gggactgagccctca

SEQ ID NO: 289407 - DNA, 15 bp, Homo sapiens
ggggactgagccctc

SEQ ID NO: 289408 - DNA, 15 bp, Homo sapiens
tggggactgagccct

SEQ ID NO: 289409 - DNA, 15 bp, Homo sapiens
ttggggactgagccc

SEQ ID NO: 289410 - DNA, 15 bp, Homo sapiens
tttggggactgagcc

SEQ ID NO: 289411 - DNA, 15 bp, Homo sapiens
ttttggggactgagc

SEQ ID NO: 289412 - DNA, 15 bp, Homo sapiens
gttttggggactgag

SEQ ID NO: 289413 - DNA, 15 bp, Homo sapiens
agttttggggactga

SEQ ID NO: 289414 - DNA, 15 bp, Homo sapiens
cagttttggggactg

SEQ ID NO: 289415 - DNA, 15 bp, Homo sapiens
ccagttttggggact

SEQ ID NO: 289416 - DNA, 15 bp, Homo sapiens
gccagttttggggac

SEQ ID NO: 289417 - DNA, 15 bp, Homo sapiens
ggccagttttgggga

SEQ ID NO: 289418 - DNA, 15 bp, Homo sapiens
gggccagttttgggg

SEQ ID NO: 289419 - DNA, 15 bp, Homo sapiens
ggggccagttttggg

SEQ ID NO: 289420 - DNA, 15 bp, Homo sapiens
tggggccagttttgg

SEQ ID NO: 289421 - DNA, 15 bp, Homo sapiens
ttggggccagttttg

SEQ ID NO: 289422 - DNA, 15 bp, Homo sapiens
gttggggccagtttt

SEQ ID NO: 289423 - DNA, 15 bp, Homo sapiens
agttggggccagttt

SEQ ID NO: 289424 - DNA, 15 bp, Homo sapiens
aagttggggccagtt

SEQ ID NO: 289425 - DNA, 15 bp, Homo sapiens
gaagttggggccagt

SEQ ID NO: 289426 - DNA, 15 bp, Homo sapiens
tgaagttggggccag

SEQ ID NO: 289427 - DNA, 15 bp, Homo sapiens
ctgaagttggggcca

SEQ ID NO: 289428 - DNA, 15 bp, Homo sapiens
tctgaagttggggcc

SEQ ID NO: 289429 - DNA, 15 bp, Homo sapiens
atctgaagttggggc

SEQ ID NO: 289430 - DNA, 15 bp, Homo sapiens
catctgaagttgggg

SEQ ID NO: 289431 - DNA, 15 bp, Homo sapiens
gcatctgaagttggg

SEQ ID NO: 289432 - DNA, 15 bp, Homo sapiens
ggcatctgaagttgg

SEQ ID NO: 289433 - DNA, 15 bp, Homo sapiens
tggcatctgaagttg

SEQ ID NO: 289434 - DNA, 15 bp, Homo sapiens
ctggcatctgaagtt

SEQ ID NO: 289435 - DNA, 15 bp, Homo sapiens
actggcatctgaagt

SEQ ID NO: 289436 - DNA, 15 bp, Homo sapiens
aactggcatctgaag

SEQ ID NO: 289437 - DNA, 15 bp, Homo sapiens
caactggcatctgaa

SEQ ID NO: 289438 - DNA, 15 bp, Homo sapiens
gcaactggcatctga

SEQ ID NO: 289439 - DNA, 15 bp, Homo sapiens
tgcaactggcatctg

SEQ ID NO: 289440 - DNA, 15 bp, Homo sapiens
ttgcaactggcatct

SEQ ID NO: 289441 - DNA, 15 bp, Homo sapiens
cttgcaactggcatc

SEQ ID NO: 289442 - DNA, 15 bp, Homo sapiens
acttgcaactggcat

SEQ ID NO: 289443 - DNA, 15 bp, Homo sapiens
gacttgcaactggca

SEQ ID NO: 289444 - DNA, 15 bp, Homo sapiens
agacttgcaactggc

SEQ ID NO: 289445 - DNA, 15 bp, Homo sapiens
cagacttgcaactgg

SEQ ID NO: 289446 - DNA, 15 bp, Homo sapiens
ccagacttgcaactg

SEQ ID NO: 289447 - DNA, 15 bp, Homo sapiens
cccagacttgcaact

SEQ ID NO: 289448 - DNA, 15 bp, Homo sapiens
acccagacttgcaac

SEQ ID NO: 289449 - DNA, 15 bp, Homo sapiens
aacccagacttgcaa

SEQ ID NO: 289450 - DNA, 15 bp, Homo sapiens
aaacccagacttgca

SEQ ID NO: 289451 - DNA, 15 bp, Homo sapiens
aaaacccagacttgc

SEQ ID NO: 289452 - DNA, 15 bp, Homo sapiens
aaaaacccagacttg

SEQ ID NO: 289453 - DNA, 15 bp, Homo sapiens
caaaaacccagactt

SEQ ID NO: 289454 - DNA, 15 bp, Homo sapiens
ccaaaaacccagact

SEQ ID NO: 289455 - DNA, 15 bp, Homo sapiens
tccaaaaacccagac

SEQ ID NO: 289456 - DNA, 15 bp, Homo sapiens
atccaaaaacccaga

SEQ ID NO: 289457 - DNA, 15 bp, Homo sapiens
gatccaaaaacccag

SEQ ID NO: 289458 - DNA, 15 bp, Homo sapiens
agatccaaaaaccca

SEQ ID NO: 289459 - DNA, 15 bp, Homo sapiens
aagatccaaaaaccc

SEQ ID NO: 289460 - DNA, 15 bp, Homo sapiens
gaagatccaaaaacc

SEQ ID NO: 289461 - DNA, 15 bp, Homo sapiens
agaagatccaaaaac

SEQ ID NO: 289462 - DNA, 15 bp, Homo sapiens
cagaagatccaaaaa

SEQ ID NO: 289463 - DNA, 15 bp, Homo sapiens
tcagaagatccaaaa

SEQ ID NO: 289464 - DNA, 15 bp, Homo sapiens
gtcagaagatccaaa

SEQ ID NO: 289465 - DNA, 15 bp, Homo sapiens
ggtcagaagatccaa

SEQ ID NO: 289466 - DNA, 15 bp, Homo sapiens
tggtcagaagatcca

SEQ ID NO: 289467 - DNA, 15 bp, Homo sapiens
ttggtcagaagatcc

SEQ ID NO: 289468 - DNA, 15 bp, Homo sapiens
tttggtcagaagatc

SEQ ID NO: 289469 - DNA, 15 bp, Homo sapiens
ctttggtcagaagat

SEQ ID NO: 289470 - DNA, 15 bp, Homo sapiens
cctttggtcagaaga

SEQ ID NO: 289471 - DNA, 15 bp, Homo sapiens
ccctttggtcagaag

SEQ ID NO: 289472 - DNA, 15 bp, Homo sapiens
gccctttggtcagaa

SEQ ID NO: 289473 - DNA, 15 bp, Homo sapiens
agccctttggtcaga

SEQ ID NO: 289474 - DNA, 15 bp, Homo sapiens
aagccctttggtcag

SEQ ID NO: 289475 - DNA, 15 bp, Homo sapiens
gaagccctttggtca

SEQ ID NO: 289476 - DNA, 15 bp, Homo sapiens
tgaagccctttggtc

SEQ ID NO: 289477 - DNA, 15 bp, Homo sapiens
ttgaagccctttggt

SEQ ID NO: 289478 - DNA, 15 bp, Homo sapiens
cttgaagccctttgg

SEQ ID NO: 289479 - DNA, 15 bp, Homo sapiens
acttgaagccctttg

SEQ ID NO: 289480 - DNA, 15 bp, Homo sapiens
aacttgaagcccttt

SEQ ID NO: 289481 - DNA, 15 bp, Homo sapiens
caacttgaagccctt

SEQ ID NO: 289482 - DNA, 15 bp, Homo sapiens
ccaacttgaagccct

SEQ ID NO: 289483 - DNA, 15 bp, Homo sapiens
cccaacttgaagccc

SEQ ID NO: 289484 - DNA, 15 bp, Homo sapiens
ccccaacttgaagcc

SEQ ID NO: 289485 - DNA, 15 bp, Homo sapiens
accccaacttgaagc

SEQ ID NO: 289486 - DNA, 15 bp, Homo sapiens
aaccccaacttgaag

SEQ ID NO: 289487 - DNA, 15 bp, Homo sapiens
gaaccccaacttgaa

SEQ ID NO: 289488 - DNA, 15 bp, Homo sapiens
ggaaccccaacttga

SEQ ID NO: 289489 - DNA, 15 bp, Homo sapiens
gggaaccccaacttg

SEQ ID NO: 289490 - DNA, 15 bp, Homo sapiens
tgggaaccccaactt

SEQ ID NO: 289491 - DNA, 15 bp, Homo sapiens
atgggaaccccaact

SEQ ID NO: 289492 - DNA, 15 bp, Homo sapiens
catgggaaccccaac

SEQ ID NO: 289493 - DNA, 15 bp, Homo sapiens
tcatgggaaccccaa

SEQ ID NO: 289494 - DNA, 15 bp, Homo sapiens
gtcatgggaacccca

SEQ ID NO: 289495 - DNA, 15 bp, Homo sapiens
tgtcatgggaacccc

SEQ ID NO: 289496 - DNA, 15 bp, Homo sapiens
gtgtcatgggaaccc

SEQ ID NO: 289497 - DNA, 15 bp, Homo sapiens
ggtgtcatgggaacc

SEQ ID NO: 289498 - DNA, 15 bp, Homo sapiens
aggtgtcatgggaac

SEQ ID NO: 289499 - DNA, 15 bp, Homo sapiens
gaggtgtcatgggaa

SEQ ID NO: 289500 - DNA, 15 bp, Homo sapiens
agaggtgtcatggga

SEQ ID NO: 289501 - DNA, 15 bp, Homo sapiens
aagaggtgtcatggg

SEQ ID NO: 289502 - DNA, 15 bp, Homo sapiens
taagaggtgtcatgg

SEQ ID NO: 289503 - DNA, 15 bp, Homo sapiens
ctaagaggtgtcatg

SEQ ID NO: 289504 - DNA, 15 bp, Homo sapiens
cctaagaggtgtcat

SEQ ID NO: 289505 - DNA, 15 bp, Homo sapiens
acctaagaggtgtca

SEQ ID NO: 289506 - DNA, 15 bp, Homo sapiens
aacctaagaggtgtc

SEQ ID NO: 289507 - DNA, 15 bp, Homo sapiens
gaacctaagaggtgt

SEQ ID NO: 289508 - DNA, 15 bp, Homo sapiens
cgaacctaagaggtg

SEQ ID NO: 289509 - DNA, 15 bp, Homo sapiens
tcgaacctaagaggt

SEQ ID NO: 289510 - DNA, 15 bp, Homo sapiens
atcgaacctaagagg

SEQ ID NO: 289511 - DNA, 15 bp, Homo sapiens
aatcgaacctaagag

SEQ ID NO: 289512 - DNA, 15 bp, Homo sapiens
taatcgaacctaaga

SEQ ID NO: 289513 - DNA, 15 bp, Homo sapiens
ttaatcgaacctaag

SEQ ID NO: 289514 - DNA, 15 bp, Homo sapiens
attaatcgaacctaa

SEQ ID NO: 289515 - DNA, 15 bp, Homo sapiens
aattaatcgaaccta

SEQ ID NO: 289516 - DNA, 15 bp, Homo sapiens
aaattaatcgaacct

SEQ ID NO: 289517 - DNA, 15 bp, Homo sapiens
caaattaatcgaacc

SEQ ID NO: 289518 - DNA, 15 bp, Homo sapiens
gcaaattaatcgaac

SEQ ID NO: 289519 - DNA, 15 bp, Homo sapiens
agcaaattaatcgaa

SEQ ID NO: 289520 - DNA, 15 bp, Homo sapiens
tagcaaattaatcga

SEQ ID NO: 289521 - DNA, 15 bp, Homo sapiens
ctagcaaattaatcg

SEQ ID NO: 289522 - DNA, 15 bp, Homo sapiens
tctagcaaattaatc

SEQ ID NO: 289523 - DNA, 15 bp, Homo sapiens
ctctagcaaattaat

SEQ ID NO: 289524 - DNA, 15 bp, Homo sapiens
actctagcaaattaa

SEQ ID NO: 289525 - DNA, 15 bp, Homo sapiens
tactctagcaaatta

SEQ ID NO: 289526 - DNA, 15 bp, Homo sapiens
ctactctagcaaatt

SEQ ID NO: 289527 - DNA, 15 bp, Homo sapiens
actactctagcaaat

SEQ ID NO: 289528 - DNA, 15 bp, Homo sapiens
aactactctagcaaa

SEQ ID NO: 289529 - DNA, 15 bp, Homo sapiens
gaactactctagcaa

SEQ ID NO: 289530 - DNA, 15 bp, Homo sapiens
tgaactactctagca

SEQ ID NO: 289531 - DNA, 15 bp, Homo sapiens
gtgaactactctagc

SEQ ID NO: 289532 - DNA, 15 bp, Homo sapiens
tgtgaactactctag

SEQ ID NO: 289533 - DNA, 15 bp, Homo sapiens
ttgtgaactactcta

SEQ ID NO: 289534 - DNA, 15 bp, Homo sapiens
tttgtgaactactct

SEQ ID NO: 289535 - DNA, 15 bp, Homo sapiens
ttttgtgaactactc

SEQ ID NO: 289536 - DNA, 15 bp, Homo sapiens
gttttgtgaactact

SEQ ID NO: 289537 - DNA, 15 bp, Homo sapiens
agttttgtgaactac

SEQ ID NO: 289538 - DNA, 15 bp, Homo sapiens
gagttttgtgaacta

SEQ ID NO: 289539 - DNA, 15 bp, Homo sapiens
tgagttttgtgaact

SEQ ID NO: 289540 - DNA, 15 bp, Homo sapiens
ttgagttttgtgaac

SEQ ID NO: 289541 - DNA, 15 bp, Homo sapiens
cttgagttttgtgaa

SEQ ID NO: 289542 - DNA, 15 bp, Homo sapiens
ccttgagttttgtga

SEQ ID NO: 289543 - DNA, 15 bp, Homo sapiens
tccttgagttttgtg

SEQ ID NO: 289544 - DNA, 15 bp, Homo sapiens
ttccttgagttttgt

SEQ ID NO: 289545 - DNA, 15 bp, Homo sapiens
tttccttgagttttg

SEQ ID NO: 289546 - DNA, 15 bp, Homo sapiens
gtttccttgagtttt

SEQ ID NO: 289547 - DNA, 15 bp, Homo sapiens
tgtttccttgagttt

SEQ ID NO: 289548 - DNA, 15 bp, Homo sapiens
gtgtttccttgagtt

SEQ ID NO: 289549 - DNA, 15 bp, Homo sapiens
agtgtttccttgagt

SEQ ID NO: 289550 - DNA, 15 bp, Homo sapiens
aagtgtttccttgag

SEQ ID NO: 289551 - DNA, 15 bp, Homo sapiens
gaagtgtttccttga

SEQ ID NO: 289552 - DNA, 15 bp, Homo sapiens
agaagtgtttccttg

SEQ ID NO: 289553 - DNA, 15 bp, Homo sapiens
cagaagtgtttcctt

SEQ ID NO: 289554 - DNA, 15 bp, Homo sapiens
acagaagtgtttcct

SEQ ID NO: 289555 - DNA, 15 bp, Homo sapiens
aacagaagtgtttcc

SEQ ID NO: 289556 - DNA, 15 bp, Homo sapiens
aaacagaagtgtttc

SEQ ID NO: 289557 - DNA, 15 bp, Homo sapiens
taaacagaagtgttt

SEQ ID NO: 289558 - DNA, 15 bp, Homo sapiens
gtaaacagaagtgtt

SEQ ID NO: 289559 - DNA, 15 bp, Homo sapiens
agtaaacagaagtgt

SEQ ID NO: 289560 - DNA, 15 bp, Homo sapiens
cagtaaacagaagtg

SEQ ID NO: 289561 - DNA, 15 bp, Homo sapiens
ccagtaaacagaagt

SEQ ID NO: 289562 - DNA, 15 bp, Homo sapiens
accagtaaacagaag

SEQ ID NO: 289563 - DNA, 15 bp, Homo sapiens
aaccagtaaacagaa

SEQ ID NO: 289564 - DNA, 15 bp, Homo sapiens
aaaccagtaaacaga

SEQ ID NO: 289565 - DNA, 15 bp, Homo sapiens
taaaccagtaaacag

SEQ ID NO: 289566 - DNA, 15 bp, Homo sapiens
ataaaccagtaaaca

SEQ ID NO: 289567 - DNA, 15 bp, Homo sapiens
aataaaccagtaaac

SEQ ID NO: 289568 - DNA, 15 bp, Homo sapiens
taataaaccagtaaa

SEQ ID NO: 289569 - DNA, 15 bp, Homo sapiens
ataataaaccagtaa

SEQ ID NO: 289570 - DNA, 15 bp, Homo sapiens
tataataaaccagta

SEQ ID NO: 289571 - DNA, 15 bp, Homo sapiens
ctataataaaccagt

SEQ ID NO: 289572 - DNA, 15 bp, Homo sapiens
tctataataaaccag

SEQ ID NO: 289573 - DNA, 15 bp, Homo sapiens
atctataataaacca

SEQ ID NO: 289574 - DNA, 15 bp, Homo sapiens
catctataataaacc

SEQ ID NO: 289575 - DNA, 15 bp, Homo sapiens
tcatctataataaac

SEQ ID NO: 289576 - DNA, 15 bp, Homo sapiens
atcatctataataaa

SEQ ID NO: 289577 - DNA, 15 bp, Homo sapiens
tatcatctataataa

SEQ ID NO: 289578 - DNA, 15 bp, Homo sapiens
atatcatctataata

SEQ ID NO: 289579 - DNA, 15 bp, Homo sapiens
aatatcatctataat

SEQ ID NO: 289580 - DNA, 15 bp, Homo sapiens
taatatcatctataa

SEQ ID NO: 289581 - DNA, 15 bp, Homo sapiens
gtaatatcatctata

SEQ ID NO: 289582 - DNA, 15 bp, Homo sapiens
tgtaatatcatctat

SEQ ID NO: 289583 - DNA, 15 bp, Homo sapiens
ttgtaatatcatcta

SEQ ID NO: 289584 - DNA, 15 bp, Homo sapiens
tttgtaatatcatct

SEQ ID NO: 289585 - DNA, 15 bp, Homo sapiens
ctttgtaatatcatc

SEQ ID NO: 289586 - DNA, 15 bp, Homo sapiens
cctttgtaatatcat

SEQ ID NO: 289587 - DNA, 15 bp, Homo sapiens
tcctttgtaatatca

SEQ ID NO: 289588 - DNA, 15 bp, Homo sapiens
atcctttgtaatatc

SEQ ID NO: 289589 - DNA, 15 bp, Homo sapiens
catcctttgtaatat

SEQ ID NO: 289590 - DNA, 15 bp, Homo sapiens
gcatcctttgtaata

SEQ ID NO: 289591 - DNA, 15 bp, Homo sapiens
tgcatcctttgtaat

SEQ ID NO: 289592 - DNA, 15 bp, Homo sapiens
ctgcatcctttgtaa

SEQ ID NO: 289593 - DNA, 15 bp, Homo sapiens
tctgcatcctttgta

SEQ ID NO: 289594 - DNA, 15 bp, Homo sapiens
atctgcatcctttgt

SEQ ID NO: 289595 - DNA, 15 bp, Homo sapiens
catctgcatcctttg

SEQ ID NO: 289596 - DNA, 15 bp, Homo sapiens
acatctgcatccttt

SEQ ID NO: 289597 - DNA, 15 bp, Homo sapiens
tacatctgcatcctt

SEQ ID NO: 289598 - DNA, 15 bp, Homo sapiens
ttacatctgcatcct

SEQ ID NO: 289599 - DNA, 15 bp, Homo sapiens
tttacatctgcatcc

SEQ ID NO: 289600 - DNA, 15 bp, Homo sapiens
ctttacatctgcatc

SEQ ID NO: 289601 - DNA, 15 bp, Homo sapiens
tctttacatctgcat

SEQ ID NO: 289602 - DNA, 15 bp, Homo sapiens
atctttacatctgca

SEQ ID NO: 289603 - DNA, 15 bp, Homo sapiens
catctttacatctgc

SEQ ID NO: 289604 - DNA, 15 bp, Homo sapiens
gcatctttacatctg

SEQ ID NO: 289605 - DNA, 15 bp, Homo sapiens
tgcatctttacatct

SEQ ID NO: 289606 - DNA, 15 bp, Homo sapiens
atgcatctttacatc

SEQ ID NO: 289607 - DNA, 15 bp, Homo sapiens
tatgcatctttacat

SEQ ID NO: 289608 - DNA, 15 bp, Homo sapiens
ctatgcatctttaca

SEQ ID NO: 289609 - DNA, 15 bp, Homo sapiens
cctatgcatctttac

SEQ ID NO: 289610 - DNA, 15 bp, Homo sapiens
tcctatgcatcttta

SEQ ID NO: 289611 - DNA, 15 bp, Homo sapiens
atcctatgcatcttt

SEQ ID NO: 289612 - DNA, 15 bp, Homo sapiens
catcctatgcatctt

SEQ ID NO: 289613 - DNA, 15 bp, Homo sapiens
tcatcctatgcatct

SEQ ID NO: 289614 - DNA, 15 bp, Homo sapiens
ctcatcctatgcatc

SEQ ID NO: 289615 - DNA, 15 bp, Homo sapiens
cctcatcctatgcat

SEQ ID NO: 289616 - DNA, 15 bp, Homo sapiens
acctcatcctatgca

SEQ ID NO: 289617 - DNA, 15 bp, Homo sapiens
tacctcatcctatgc

SEQ ID NO: 289618 - DNA, 15 bp, Homo sapiens
atacctcatcctatg

SEQ ID NO: 289619 - DNA, 15 bp, Homo sapiens
catacctcatcctat

SEQ ID NO: 289620 - DNA, 15 bp, Homo sapiens
ccatacctcatccta

SEQ ID NO: 289621 - DNA, 15 bp, Homo sapiens
cccatacctcatcct

SEQ ID NO: 289622 - DNA, 15 bp, Homo sapiens
ccccatacctcatcc

SEQ ID NO: 289623 - DNA, 15 bp, Homo sapiens
cccccatacctcatc

SEQ ID NO: 289624 - DNA, 15 bp, Homo sapiens
tcccccatacctcat

SEQ ID NO: 289625 - DNA, 15 bp, Homo sapiens
atcccccatacctca

SEQ ID NO: 289626 - DNA, 15 bp, Homo sapiens
catcccccatacctc

SEQ ID NO: 289627 - DNA, 15 bp, Homo sapiens
ccatcccccatacct

SEQ ID NO: 289628 - DNA, 15 bp, Homo sapiens
cccatcccccatacc

SEQ ID NO: 289629 - DNA, 15 bp, Homo sapiens
tcccatcccccatac

SEQ ID NO: 289630 - DNA, 15 bp, Homo sapiens
atcccatcccccata

SEQ ID NO: 289631 - DNA, 15 bp, Homo sapiens
catcccatcccccat

SEQ ID NO: 289632 - DNA, 15 bp, Homo sapiens
ccatcccatccccca

SEQ ID NO: 289633 - DNA, 15 bp, Homo sapiens
cccatcccatccccc

SEQ ID NO: 289634 - DNA, 15 bp, Homo sapiens
tcccatcccatcccc

SEQ ID NO: 289635 - DNA, 15 bp, Homo sapiens
ttcccatcccatccc

SEQ ID NO: 289636 - DNA, 15 bp, Homo sapiens
cttcccatcccatcc

SEQ ID NO: 289637 - DNA, 15 bp, Homo sapiens
gcttcccatcccatc

SEQ ID NO: 289638 - DNA, 15 bp, Homo sapiens
agcttcccatcccat

SEQ ID NO: 289639 - DNA, 15 bp, Homo sapiens
aagcttcccatccca

SEQ ID NO: 289640 - DNA, 15 bp, Homo sapiens
gaagcttcccatccc

SEQ ID NO: 289641 - DNA, 15 bp, Homo sapiens
agaagcttcccatcc

SEQ ID NO: 289642 - DNA, 15 bp, Homo sapiens
tagaagcttcccatc

SEQ ID NO: 289643 - DNA, 15 bp, Homo sapiens
atagaagcttcccat

SEQ ID NO: 289644 - DNA, 15 bp, Homo sapiens
catagaagcttccca

SEQ ID NO: 289645 - DNA, 15 bp, Homo sapiens
gcatagaagcttccc

SEQ ID NO: 289646 - DNA, 15 bp, Homo sapiens
ggcatagaagcttcc

SEQ ID NO: 289647 - DNA, 15 bp, Homo sapiens
gggcatagaagcttc

SEQ ID NO: 289648 - DNA, 15 bp, Homo sapiens
agggcatagaagctt

SEQ ID NO: 289649 - DNA, 15 bp, Homo sapiens
gagggcatagaagct

SEQ ID NO: 289650 - DNA, 15 bp, Homo sapiens
ggagggcatagaagc

SEQ ID NO: 289651 - DNA, 15 bp, Homo sapiens
gggagggcatagaag

SEQ ID NO: 289652 - DNA, 15 bp, Homo sapiens
agggagggcatagaa

SEQ ID NO: 289653 - DNA, 15 bp, Homo sapiens
cagggagggcataga

SEQ ID NO: 289654 - DNA, 15 bp, Homo sapiens
ccagggagggcatag

SEQ ID NO: 289655 - DNA, 15 bp, Homo sapiens
gccagggagggcata

SEQ ID NO: 289656 - DNA, 15 bp, Homo sapiens
ggccagggagggcat

SEQ ID NO: 289657 - DNA, 15 bp, Homo sapiens
tggccagggagggca

SEQ ID NO: 289658 - DNA, 15 bp, Homo sapiens
ctggccagggagggc

SEQ ID NO: 289659 - DNA, 15 bp, Homo sapiens
tctggccagggaggg

SEQ ID NO: 289660 - DNA, 15 bp, Homo sapiens
gtctggccagggagg

SEQ ID NO: 289661 - DNA, 15 bp, Homo sapiens
tgtctggccagggag

SEQ ID NO: 289662 - DNA, 15 bp, Homo sapiens
ctgtctggccaggga

SEQ ID NO: 289663 - DNA, 15 bp, Homo sapiens
gctgtctggccaggg

SEQ ID NO: 289664 - DNA, 15 bp, Homo sapiens
agctgtctggccagg

SEQ ID NO: 289665 - DNA, 15 bp, Homo sapiens
cagctgtctggccag

SEQ ID NO: 289666 - DNA, 15 bp, Homo sapiens
acagctgtctggcca

SEQ ID NO: 289667 - DNA, 15 bp, Homo sapiens
gacagctgtctggcc

SEQ ID NO: 289668 - DNA, 15 bp, Homo sapiens
ggacagctgtctggc

SEQ ID NO: 289669 - DNA, 15 bp, Homo sapiens
tggacagctgtctgg

SEQ ID NO: 289670 - DNA, 15 bp, Homo sapiens
ctggacagctgtctg

SEQ ID NO: 289671 - DNA, 15 bp, Homo sapiens
cctggacagctgtct

SEQ ID NO: 289672 - DNA, 15 bp, Homo sapiens
tcctggacagctgtc

SEQ ID NO: 289673 - DNA, 15 bp, Homo sapiens
ctcctggacagctgt

SEQ ID NO: 289674 - DNA, 15 bp, Homo sapiens
gctcctggacagctg

SEQ ID NO: 289675 - DNA, 15 bp, Homo sapiens
ggctcctggacagct

SEQ ID NO: 289676 - DNA, 15 bp, Homo sapiens
aggctcctggacagc

SEQ ID NO: 289677 - DNA, 15 bp, Homo sapiens
gaggctcctggacag

SEQ ID NO: 289678 - DNA, 15 bp, Homo sapiens
ggaggctcctggaca

SEQ ID NO: 289679 - DNA, 15 bp, Homo sapiens
tggaggctcctggac

SEQ ID NO: 289680 - DNA, 15 bp, Homo sapiens
gtggaggctcctgga

SEQ ID NO: 289681 - DNA, 15 bp, Homo sapiens
tgtggaggctcctgg

SEQ ID NO: 289682 - DNA, 15 bp, Homo sapiens
atgtggaggctcctg

SEQ ID NO: 289683 - DNA, 15 bp, Homo sapiens
catgtggaggctcct

SEQ ID NO: 289684 - DNA, 15 bp, Homo sapiens
acatgtggaggctcc

SEQ ID NO: 289685 - DNA, 15 bp, Homo sapiens
aacatgtggaggctc

SEQ ID NO: 289686 - DNA, 15 bp, Homo sapiens
gaacatgtggaggct

SEQ ID NO: 289687 - DNA, 15 bp, Homo sapiens
tgaacatgtggaggc

SEQ ID NO: 289688 - DNA, 15 bp, Homo sapiens
ctgaacatgtggagg

SEQ ID NO: 289689 - DNA, 15 bp, Homo sapiens
gctgaacatgtggag

SEQ ID NO: 289690 - DNA, 15 bp, Homo sapiens
agctgaacatgtgga

SEQ ID NO: 289691 - DNA, 15 bp, Homo sapiens
tagctgaacatgtgg

SEQ ID NO: 289692 - DNA, 15 bp, Homo sapiens
atagctgaacatgtg

SEQ ID NO: 289693 - DNA, 15 bp, Homo sapiens
gatagctgaacatgt

SEQ ID NO: 289694 - DNA, 15 bp, Homo sapiens
ggatagctgaacatg

SEQ ID NO: 289695 - DNA, 15 bp, Homo sapiens
cggatagctgaacat

SEQ ID NO: 289696 - DNA, 15 bp, Homo sapiens
ccggatagctgaaca

SEQ ID NO: 289697 - DNA, 15 bp, Homo sapiens
tccggatagctgaac

SEQ ID NO: 289698 - DNA, 15 bp, Homo sapiens
ttccggatagctgaa

SEQ ID NO: 289699 - DNA, 15 bp, Homo sapiens
cttccggatagctga

SEQ ID NO: 289700 - DNA, 15 bp, Homo sapiens
acttccggatagctg

SEQ ID NO: 289701 - DNA, 15 bp, Homo sapiens
aacttccggatagct

SEQ ID NO: 289702 - DNA, 15 bp, Homo sapiens
gaacttccggatagc

SEQ ID NO: 289703 - DNA, 15 bp, Homo sapiens
agaacttccggatag

SEQ ID NO: 289704 - DNA, 15 bp, Homo sapiens
gagaacttccggata

SEQ ID NO: 289705 - DNA, 15 bp, Homo sapiens
agagaacttccggat

SEQ ID NO: 289706 - DNA, 15 bp, Homo sapiens
cagagaacttccgga

SEQ ID NO: 289707 - DNA, 15 bp, Homo sapiens
tcagagaacttccgg

SEQ ID NO: 289708 - DNA, 15 bp, Homo sapiens
ttcagagaacttccg

SEQ ID NO: 289709 - DNA, 15 bp, Homo sapiens
gttcagagaacttcc

SEQ ID NO: 289710 - DNA, 15 bp, Homo sapiens
ggttcagagaacttc

SEQ ID NO: 289711 - DNA, 15 bp, Homo sapiens
gggttcagagaactt

SEQ ID NO: 289712 - DNA, 15 bp, Homo sapiens
agggttcagagaact

SEQ ID NO: 289713 - DNA, 15 bp, Homo sapiens
cagggttcagagaac

SEQ ID NO: 289714 - DNA, 15 bp, Homo sapiens
gcagggttcagagaa

SEQ ID NO: 289715 - DNA, 15 bp, Homo sapiens
ggcagggttcagaga

SEQ ID NO: 289716 - DNA, 15 bp, Homo sapiens
gggcagggttcagag

SEQ ID NO: 289717 - DNA, 15 bp, Homo sapiens
agggcagggttcaga

SEQ ID NO: 289718 - DNA, 15 bp, Homo sapiens
aagggcagggttcag

SEQ ID NO: 289719 - DNA, 15 bp, Homo sapiens
aaagggcagggttca

SEQ ID NO: 289720 - DNA, 15 bp, Homo sapiens
aaaagggcagggttc

SEQ ID NO: 289721 - DNA, 15 bp, Homo sapiens
caaaagggcagggtt

SEQ ID NO: 289722 - DNA, 15 bp, Homo sapiens
ccaaaagggcagggt

SEQ ID NO: 289723 - DNA, 15 bp, Homo sapiens
cccaaaagggcaggg

SEQ ID NO: 289724 - DNA, 15 bp, Homo sapiens
acccaaaagggcagg

SEQ ID NO: 289725 - DNA, 15 bp, Homo sapiens
aacccaaaagggcag

SEQ ID NO: 289726 - DNA, 15 bp, Homo sapiens
aaacccaaaagggca

SEQ ID NO: 289727 - DNA, 15 bp, Homo sapiens
aaaacccaaaagggc

SEQ ID NO: 289728 - DNA, 15 bp, Homo sapiens
aaaaacccaaaaggg

SEQ ID NO: 289729 - DNA, 15 bp, Homo sapiens
taaaaacccaaaagg

SEQ ID NO: 289730 - DNA, 15 bp, Homo sapiens
ataaaaacccaaaag

SEQ ID NO: 289731 - DNA, 15 bp, Homo sapiens
cataaaaacccaaaa

SEQ ID NO: 289732 - DNA, 15 bp, Homo sapiens
ccataaaaacccaaa

SEQ ID NO: 289733 - DNA, 15 bp, Homo sapiens
tccataaaaacccaa

SEQ ID NO: 289734 - DNA, 15 bp, Homo sapiens
ctccataaaaaccca

SEQ ID NO: 289735 - DNA, 15 bp, Homo sapiens
cctccataaaaaccc

SEQ ID NO: 289736 - DNA, 15 bp, Homo sapiens
gcctccataaaaacc

SEQ ID NO: 289737 - DNA, 15 bp, Homo sapiens
ggcctccataaaaac

SEQ ID NO: 289738 - DNA, 15 bp, Homo sapiens
aggcctccataaaaa

SEQ ID NO: 289739 - DNA, 15 bp, Homo sapiens
gaggcctccataaaa

SEQ ID NO: 289740 - DNA, 15 bp, Homo sapiens
tgaggcctccataaa

SEQ ID NO: 289741 - DNA, 15 bp, Homo sapiens
atgaggcctccataa

SEQ ID NO: 289742 - DNA, 15 bp, Homo sapiens
aatgaggcctccata

SEQ ID NO: 289743 - DNA, 15 bp, Homo sapiens
caatgaggcctccat

SEQ ID NO: 289744 - DNA, 15 bp, Homo sapiens
gcaatgaggcctcca

SEQ ID NO: 289745 - DNA, 15 bp, Homo sapiens
tgcaatgaggcctcc

SEQ ID NO: 289746 - DNA, 15 bp, Homo sapiens
atgcaatgaggcctc

SEQ ID NO: 289747 - DNA, 15 bp, Homo sapiens
tatgcaatgaggcct

SEQ ID NO: 289748 - DNA, 15 bp, Homo sapiens
ctatgcaatgaggcc

SEQ ID NO: 289749 - DNA, 15 bp, Homo sapiens
cctatgcaatgaggc

SEQ ID NO: 289750 - DNA, 15 bp, Homo sapiens
gcctatgcaatgagg

SEQ ID NO: 289751 - DNA, 15 bp, Homo sapiens
tgcctatgcaatgag

SEQ ID NO: 289752 - DNA, 15 bp, Homo sapiens
atgcctatgcaatga

SEQ ID NO: 289753 - DNA, 15 bp, Homo sapiens
catgcctatgcaatg

SEQ ID NO: 289754 - DNA, 15 bp, Homo sapiens
tcatgcctatgcaat

SEQ ID NO: 289755 - DNA, 15 bp, Homo sapiens
gtcatgcctatgcaa

SEQ ID NO: 289756 - DNA, 15 bp, Homo sapiens
tgtcatgcctatgca

SEQ ID NO: 289757 - DNA, 15 bp, Homo sapiens
ctgtcatgcctatgc

SEQ ID NO: 289758 - DNA, 15 bp, Homo sapiens
tctgtcatgcctatg

SEQ ID NO: 289759 - DNA, 15 bp, Homo sapiens
atctgtcatgcctat

SEQ ID NO: 289760 - DNA, 15 bp, Homo sapiens
aatctgtcatgccta

SEQ ID NO: 289761 - DNA, 15 bp, Homo sapiens
taatctgtcatgcct

SEQ ID NO: 289762 - DNA, 15 bp, Homo sapiens
ctaatctgtcatgcc

SEQ ID NO: 289763 - DNA, 15 bp, Homo sapiens
tctaatctgtcatgc

SEQ ID NO: 289764 - DNA, 15 bp, Homo sapiens
atctaatctgtcatg

SEQ ID NO: 289765 - DNA, 15 bp, Homo sapiens
gatctaatctgtcat

SEQ ID NO: 289766 - DNA, 15 bp, Homo sapiens
tgatctaatctgtca

SEQ ID NO: 289767 - DNA, 15 bp, Homo sapiens
atgatctaatctgtc

SEQ ID NO: 289768 - DNA, 15 bp, Homo sapiens
aatgatctaatctgt

SEQ ID NO: 289769 - DNA, 15 bp, Homo sapiens
caatgatctaatctg

SEQ ID NO: 289770 - DNA, 15 bp, Homo sapiens
ccaatgatctaatct

SEQ ID NO: 289771 - DNA, 15 bp, Homo sapiens
gccaatgatctaatc

SEQ ID NO: 289772 - DNA, 15 bp, Homo sapiens
agccaatgatctaat

SEQ ID NO: 289773 - DNA, 15 bp, Homo sapiens
tagccaatgatctaa

SEQ ID NO: 289774 - DNA, 15 bp, Homo sapiens
atagccaatgatcta

SEQ ID NO: 289775 - DNA, 15 bp, Homo sapiens
aatagccaatgatct

SEQ ID NO: 289776 - DNA, 15 bp, Homo sapiens
caatagccaatgatc

SEQ ID NO: 289777 - DNA, 15 bp, Homo sapiens
tcaatagccaatgat

SEQ ID NO: 289778 - DNA, 15 bp, Homo sapiens
atcaatagccaatga

SEQ ID NO: 289779 - DNA, 15 bp, Homo sapiens
aatcaatagccaatg

SEQ ID NO: 289780 - DNA, 15 bp, Homo sapiens
taatcaatagccaat

SEQ ID NO: 289781 - DNA, 15 bp, Homo sapiens
ataatcaatagccaa

SEQ ID NO: 289782 - DNA, 15 bp, Homo sapiens
gataatcaatagcca

SEQ ID NO: 289783 - DNA, 15 bp, Homo sapiens
tgataatcaatagcc

SEQ ID NO: 289784 - DNA, 15 bp, Homo sapiens
ttgataatcaatagc

SEQ ID NO: 289785 - DNA, 15 bp, Homo sapiens
gttgataatcaatag

SEQ ID NO: 289786 - DNA, 15 bp, Homo sapiens
ggttgataatcaata

SEQ ID NO: 289787 - DNA, 15 bp, Homo sapiens
aggttgataatcaat

SEQ ID NO: 289788 - DNA, 15 bp, Homo sapiens
taggttgataatcaa

SEQ ID NO: 289789 - DNA, 15 bp, Homo sapiens
ttaggttgataatca

SEQ ID NO: 289790 - DNA, 15 bp, Homo sapiens
gttaggttgataatc

SEQ ID NO: 289791 - DNA, 15 bp, Homo sapiens
ggttaggttgataat

SEQ ID NO: 289792 - DNA, 15 bp, Homo sapiens
aggttaggttgataa

SEQ ID NO: 289793 - DNA, 15 bp, Homo sapiens
aaggttaggttgata

SEQ ID NO: 289794 - DNA, 15 bp, Homo sapiens
gaaggttaggttgat

SEQ ID NO: 289795 - DNA, 15 bp, Homo sapiens
tgaaggttaggttga

SEQ ID NO: 289796 - DNA, 15 bp, Homo sapiens
ctgaaggttaggttg

SEQ ID NO: 289797 - DNA, 15 bp, Homo sapiens
gctgaaggttaggtt

SEQ ID NO: 289798 - DNA, 15 bp, Homo sapiens
agctgaaggttaggt

SEQ ID NO: 289799 - DNA, 15 bp, Homo sapiens
aagctgaaggttagg

SEQ ID NO: 289800 - DNA, 15 bp, Homo sapiens
gaagctgaaggttag

SEQ ID NO: 289801 - DNA, 15 bp, Homo sapiens
ggaagctgaaggtta

SEQ ID NO: 289802 - DNA, 15 bp, Homo sapiens
gggaagctgaaggtt

SEQ ID NO: 289803 - DNA, 15 bp, Homo sapiens
agggaagctgaaggt

SEQ ID NO: 289804 - DNA, 15 bp, Homo sapiens
gagggaagctgaagg

SEQ ID NO: 289805 - DNA, 15 bp, Homo sapiens
ggagggaagctgaag

SEQ ID NO: 289806 - DNA, 15 bp, Homo sapiens
gggagggaagctgaa

SEQ ID NO: 289807 - DNA, 15 bp, Homo sapiens
ggggagggaagctga

SEQ ID NO: 289808 - DNA, 15 bp, Homo sapiens
aggggagggaagctg

SEQ ID NO: 289809 - DNA, 15 bp, Homo sapiens
aaggggagggaagct

SEQ ID NO: 289810 - DNA, 15 bp, Homo sapiens
gaaggggagggaagc

SEQ ID NO: 289811 - DNA, 15 bp, Homo sapiens
ggaaggggagggaag

SEQ ID NO: 289812 - DNA, 15 bp, Homo sapiens
aggaaggggagggaa

SEQ ID NO: 289813 - DNA, 15 bp, Homo sapiens
taggaaggggaggga

SEQ ID NO: 289814 - DNA, 15 bp, Homo sapiens
ctaggaaggggaggg

SEQ ID NO: 289815 - DNA, 15 bp, Homo sapiens
tctaggaaggggagg

SEQ ID NO: 289816 - DNA, 15 bp, Homo sapiens
ctctaggaaggggag

SEQ ID NO: 289817 - DNA, 15 bp, Homo sapiens
cctctaggaagggga

SEQ ID NO: 289818 - DNA, 15 bp, Homo sapiens
acctctaggaagggg

SEQ ID NO: 289819 - DNA, 15 bp, Homo sapiens
aacctctaggaaggg

SEQ ID NO: 289820 - DNA, 15 bp, Homo sapiens
caacctctaggaagg

SEQ ID NO: 289821 - DNA, 15 bp, Homo sapiens
ccaacctctaggaag

SEQ ID NO: 289822 - DNA, 15 bp, Homo sapiens
cccaacctctaggaa

SEQ ID NO: 289823 - DNA, 15 bp, Homo sapiens
ccccaacctctagga

SEQ ID NO: 289824 - DNA, 15 bp, Homo sapiens
cccccaacctctagg

SEQ ID NO: 289825 - DNA, 15 bp, Homo sapiens
gcccccaacctctag

SEQ ID NO: 289826 - DNA, 15 bp, Homo sapiens
agcccccaacctcta

SEQ ID NO: 289827 - DNA, 15 bp, Homo sapiens
cagcccccaacctct

SEQ ID NO: 289828 - DNA, 15 bp, Homo sapiens
ccagcccccaacctc

SEQ ID NO: 289829 - DNA, 15 bp, Homo sapiens
cccagcccccaacct

SEQ ID NO: 289830 - DNA, 15 bp, Homo sapiens
ccccagcccccaacc

SEQ ID NO: 289831 - DNA, 15 bp, Homo sapiens
gccccagcccccaac

SEQ ID NO: 289832 - DNA, 15 bp, Homo sapiens
agccccagcccccaa

SEQ ID NO: 289833 - DNA, 15 bp, Homo sapiens
cagccccagccccca

SEQ ID NO: 289834 - DNA, 15 bp, Homo sapiens
tcagccccagccccc

SEQ ID NO: 289835 - DNA, 15 bp, Homo sapiens
ttcagccccagcccc

SEQ ID NO: 289836 - DNA, 15 bp, Homo sapiens
cttcagccccagccc

SEQ ID NO: 289837 - DNA, 15 bp, Homo sapiens
ccttcagccccagcc

SEQ ID NO: 289838 - DNA, 15 bp, Homo sapiens
accttcagccccagc

SEQ ID NO: 289839 - DNA, 15 bp, Homo sapiens
aaccttcagccccag

SEQ ID NO: 289840 - DNA, 15 bp, Homo sapiens
gaaccttcagcccca

SEQ ID NO: 289841 - DNA, 15 bp, Homo sapiens
ggaaccttcagcccc

SEQ ID NO: 289842 - DNA, 15 bp, Homo sapiens
tggaaccttcagccc

SEQ ID NO: 289843 - DNA, 15 bp, Homo sapiens
ttggaaccttcagcc

SEQ ID NO: 289844 - DNA, 15 bp, Homo sapiens
gttggaaccttcagc

SEQ ID NO: 289845 - DNA, 15 bp, Homo sapiens
ggttggaaccttcag

SEQ ID NO: 289846 - DNA, 15 bp, Homo sapiens
gggttggaaccttca

SEQ ID NO: 289847 - DNA, 15 bp, Homo sapiens
agggttggaaccttc

SEQ ID NO: 289848 - DNA, 15 bp, Homo sapiens
gagggttggaacctt

SEQ ID NO: 289849 - DNA, 15 bp, Homo sapiens
agagggttggaacct

SEQ ID NO: 289850 - DNA, 15 bp, Homo sapiens
tagagggttggaacc

SEQ ID NO: 289851 - DNA, 15 bp, Homo sapiens
ttagagggttggaac

SEQ ID NO: 289852 - DNA, 15 bp, Homo sapiens
gttagagggttggaa

SEQ ID NO: 289853 - DNA, 15 bp, Homo sapiens
agttagagggttgga

SEQ ID NO: 289854 - DNA, 15 bp, Homo sapiens
gagttagagggttgg

SEQ ID NO: 289855 - DNA, 15 bp, Homo sapiens
agagttagagggttg

SEQ ID NO: 289856 - DNA, 15 bp, Homo sapiens
cagagttagagggtt

SEQ ID NO: 289857 - DNA, 15 bp, Homo sapiens
gcagagttagagggt

SEQ ID NO: 289858 - DNA, 15 bp, Homo sapiens
ggcagagttagaggg

SEQ ID NO: 289859 - DNA, 15 bp, Homo sapiens
aggcagagttagagg

SEQ ID NO: 289860 - DNA, 15 bp, Homo sapiens
gaggcagagttagag

SEQ ID NO: 289861 - DNA, 15 bp, Homo sapiens
cgaggcagagttaga

SEQ ID NO: 289862 - DNA, 15 bp, Homo sapiens
ccgaggcagagttag

SEQ ID NO: 289863 - DNA, 15 bp, Homo sapiens
cccgaggcagagtta

SEQ ID NO: 289864 - DNA, 15 bp, Homo sapiens
gcccgaggcagagtt

SEQ ID NO: 289865 - DNA, 15 bp, Homo sapiens
agcccgaggcagagt

SEQ ID NO: 289866 - DNA, 15 bp, Homo sapiens
aagcccgaggcagag

SEQ ID NO: 289867 - DNA, 15 bp, Homo sapiens
aaagcccgaggcaga

SEQ ID NO: 289868 - DNA, 15 bp, Homo sapiens
gaaagcccgaggcag

SEQ ID NO: 289869 - DNA, 15 bp, Homo sapiens
agaaagcccgaggca

SEQ ID NO: 289870 - DNA, 15 bp, Homo sapiens
tagaaagcccgaggc

SEQ ID NO: 289871 - DNA, 15 bp, Homo sapiens
ctagaaagcccgagg

SEQ ID NO: 289872 - DNA, 15 bp, Homo sapiens
actagaaagcccgag

SEQ ID NO: 289873 - DNA, 15 bp, Homo sapiens
cactagaaagcccga

SEQ ID NO: 289874 - DNA, 15 bp, Homo sapiens
tcactagaaagcccg

SEQ ID NO: 289875 - DNA, 15 bp, Homo sapiens
gtcactagaaagccc

SEQ ID NO: 289876 - DNA, 15 bp, Homo sapiens
ggtcactagaaagcc

SEQ ID NO: 289877 - DNA, 15 bp, Homo sapiens
tggtcactagaaagc

SEQ ID NO: 289878 - DNA, 15 bp, Homo sapiens
ctggtcactagaaag

SEQ ID NO: 289879 - DNA, 15 bp, Homo sapiens
gctggtcactagaaa

SEQ ID NO: 289880 - DNA, 15 bp, Homo sapiens
ggctggtcactagaa

SEQ ID NO: 289881 - DNA, 15 bp, Homo sapiens
gggctggtcactaga

SEQ ID NO: 289882 - DNA, 15 bp, Homo sapiens
ggggctggtcactag

SEQ ID NO: 289883 - DNA, 15 bp, Homo sapiens
gggggctggtcacta

SEQ ID NO: 289884 - DNA, 15 bp, Homo sapiens
tgggggctggtcact

SEQ ID NO: 289885 - DNA, 15 bp, Homo sapiens
atgggggctggtcac

SEQ ID NO: 289886 - DNA, 15 bp, Homo sapiens
gatgggggctggtca

SEQ ID NO: 289887 - DNA, 15 bp, Homo sapiens
ggatgggggctggtc

SEQ ID NO: 289888 - DNA, 15 bp, Homo sapiens
tggatgggggctggt

SEQ ID NO: 289889 - DNA, 15 bp, Homo sapiens
ctggatgggggctgg

SEQ ID NO: 289890 - DNA, 15 bp, Homo sapiens
tctggatgggggctg

SEQ ID NO: 289891 - DNA, 15 bp, Homo sapiens
atctggatgggggct

SEQ ID NO: 289892 - DNA, 15 bp, Homo sapiens
catctggatgggggc

SEQ ID NO: 289893 - DNA, 15 bp, Homo sapiens
gcatctggatggggg

SEQ ID NO: 289894 - DNA, 15 bp, Homo sapiens
agcatctggatgggg

SEQ ID NO: 289895 - DNA, 15 bp, Homo sapiens
aagcatctggatggg

SEQ ID NO: 289896 - DNA, 15 bp, Homo sapiens
gaagcatctggatgg

SEQ ID NO: 289897 - DNA, 15 bp, Homo sapiens
ggaagcatctggatg

SEQ ID NO: 289898 - DNA, 15 bp, Homo sapiens
aggaagcatctggat

SEQ ID NO: 289899 - DNA, 15 bp, Homo sapiens
taggaagcatctgga

SEQ ID NO: 289900 - DNA, 15 bp, Homo sapiens
ctaggaagcatctgg

SEQ ID NO: 289901 - DNA, 15 bp, Homo sapiens
cctaggaagcatctg

SEQ ID NO: 289902 - DNA, 15 bp, Homo sapiens
ccctaggaagcatct

SEQ ID NO: 289903 - DNA, 15 bp, Homo sapiens
cccctaggaagcatc

SEQ ID NO: 289904 - DNA, 15 bp, Homo sapiens
gcccctaggaagcat

SEQ ID NO: 289905 - DNA, 15 bp, Homo sapiens
agcccctaggaagca

SEQ ID NO: 289906 - DNA, 15 bp, Homo sapiens
cagcccctaggaagc

SEQ ID NO: 289907 - DNA, 15 bp, Homo sapiens
gcagcccctaggaag

SEQ ID NO: 289908 - DNA, 15 bp, Homo sapiens
ggcagcccctaggaa

SEQ ID NO: 289909 - DNA, 15 bp, Homo sapiens
tggcagcccctagga

SEQ ID NO: 289910 - DNA, 15 bp, Homo sapiens
ctggcagcccctagg

SEQ ID NO: 289911 - DNA, 15 bp, Homo sapiens
gctggcagcccctag

SEQ ID NO: 289912 - DNA, 15 bp, Homo sapiens
ggctggcagccccta

SEQ ID NO: 289913 - DNA, 15 bp, Homo sapiens
tggctggcagcccct

SEQ ID NO: 289914 - DNA, 15 bp, Homo sapiens
atggctggcagcccc

SEQ ID NO: 289915 - DNA, 15 bp, Homo sapiens
catggctggcagccc

SEQ ID NO: 289916 - DNA, 15 bp, Homo sapiens
acatggctggcagcc

SEQ ID NO: 289917 - DNA, 15 bp, Homo sapiens
gacatggctggcagc

SEQ ID NO: 289918 - DNA, 15 bp, Homo sapiens
tgacatggctggcag

SEQ ID NO: 289919 - DNA, 15 bp, Homo sapiens
ttgacatggctggca

SEQ ID NO: 289920 - DNA, 15 bp, Homo sapiens
attgacatggctggc

SEQ ID NO: 289921 - DNA, 15 bp, Homo sapiens
aattgacatggctgg

SEQ ID NO: 289922 - DNA, 15 bp, Homo sapiens
gaattgacatggctg

SEQ ID NO: 289923 - DNA, 15 bp, Homo sapiens
tgaattgacatggct

SEQ ID NO: 289924 - DNA, 15 bp, Homo sapiens
atgaattgacatggc

SEQ ID NO: 289925 - DNA, 15 bp, Homo sapiens
aatgaattgacatgg

SEQ ID NO: 289926 - DNA, 15 bp, Homo sapiens
taatgaattgacatg

SEQ ID NO: 289927 - DNA, 15 bp, Homo sapiens
ctaatgaattgacat

SEQ ID NO: 289928 - DNA, 15 bp, Homo sapiens
gctaatgaattgaca

SEQ ID NO: 289929 - DNA, 15 bp, Homo sapiens
tgctaatgaattgac

SEQ ID NO: 289930 - DNA, 15 bp, Homo sapiens
gtgctaatgaattga

SEQ ID NO: 289931 - DNA, 15 bp, Homo sapiens
tgtgctaatgaattg

SEQ ID NO: 289932 - DNA, 15 bp, Homo sapiens
gtgtgctaatgaatt

SEQ ID NO: 289933 - DNA, 15 bp, Homo sapiens
tgtgtgctaatgaat

SEQ ID NO: 289934 - DNA, 15 bp, Homo sapiens
ttgtgtgctaatgaa

SEQ ID NO: 289935 - DNA, 15 bp, Homo sapiens
tttgtgtgctaatga

SEQ ID NO: 289936 - DNA, 15 bp, Homo sapiens
ttttgtgtgctaatg

SEQ ID NO: 289937 - DNA, 15 bp, Homo sapiens
cttttgtgtgctaat

SEQ ID NO: 289938 - DNA, 15 bp, Homo sapiens
ccttttgtgtgctaa

SEQ ID NO: 289939 - DNA, 15 bp, Homo sapiens
tccttttgtgtgcta

SEQ ID NO: 289940 - DNA, 15 bp, Homo sapiens
gtccttttgtgtgct

SEQ ID NO: 289941 - DNA, 15 bp, Homo sapiens
tgtccttttgtgtgc

SEQ ID NO: 289942 - DNA, 15 bp, Homo sapiens
atgtccttttgtgtg

SEQ ID NO: 289943 - DNA, 15 bp, Homo sapiens
gatgtccttttgtgt

SEQ ID NO: 289944 - DNA, 15 bp, Homo sapiens
tgatgtccttttgtg

SEQ ID NO: 289945 - DNA, 15 bp, Homo sapiens
gtgatgtccttttgt

SEQ ID NO: 289946 - DNA, 15 bp, Homo sapiens
agtgatgtccttttg

SEQ ID NO: 289947 - DNA, 15 bp, Homo sapiens
cagtgatgtcctttt

SEQ ID NO: 289948 - DNA, 15 bp, Homo sapiens
ccagtgatgtccttt

SEQ ID NO: 289949 - DNA, 15 bp, Homo sapiens
tccagtgatgtcctt

SEQ ID NO: 289950 - DNA, 15 bp, Homo sapiens
ctccagtgatgtcct

SEQ ID NO: 289951 - DNA, 15 bp, Homo sapiens
actccagtgatgtcc

SEQ ID NO: 289952 - DNA, 15 bp, Homo sapiens
aactccagtgatgtc

SEQ ID NO: 289953 - DNA, 15 bp, Homo sapiens
aaactccagtgatgt

SEQ ID NO: 289954 - DNA, 15 bp, Homo sapiens
gaaactccagtgatg

SEQ ID NO: 289955 - DNA, 15 bp, Homo sapiens
agaaactccagtgat

SEQ ID NO: 289956 - DNA, 15 bp, Homo sapiens
tagaaactccagtga

SEQ ID NO: 289957 - DNA, 15 bp, Homo sapiens
ttagaaactccagtg

SEQ ID NO: 289958 - DNA, 15 bp, Homo sapiens
cttagaaactccagt

SEQ ID NO: 289959 - DNA, 15 bp, Homo sapiens
acttagaaactccag

SEQ ID NO: 289960 - DNA, 15 bp, Homo sapiens
tacttagaaactcca

SEQ ID NO: 289961 - DNA, 15 bp, Homo sapiens
atacttagaaactcc

SEQ ID NO: 289962 - DNA, 15 bp, Homo sapiens
aatacttagaaactc

SEQ ID NO: 289963 - DNA, 15 bp, Homo sapiens
aaatacttagaaact

SEQ ID NO: 289964 - DNA, 15 bp, Homo sapiens
aaaatacttagaaac

SEQ ID NO: 289965 - DNA, 15 bp, Homo sapiens
taaaatacttagaaa

SEQ ID NO: 289966 - DNA, 15 bp, Homo sapiens
gtaaaatacttagaa

SEQ ID NO: 289967 - DNA, 15 bp, Homo sapiens
cgtaaaatacttaga

SEQ ID NO: 289968 - DNA, 15 bp, Homo sapiens
tcgtaaaatacttag

SEQ ID NO: 289969 - DNA, 15 bp, Homo sapiens
ctcgtaaaatactta

SEQ ID NO: 289970 - DNA, 15 bp, Homo sapiens
actcgtaaaatactt

SEQ ID NO: 289971 - DNA, 15 bp, Homo sapiens
aactcgtaaaatact

SEQ ID NO: 289972 - DNA, 15 bp, Homo sapiens
caactcgtaaaatac

SEQ ID NO: 289973 - DNA, 15 bp, Homo sapiens
acaactcgtaaaata

SEQ ID NO: 289974 - DNA, 15 bp, Homo sapiens
tacaactcgtaaaat

SEQ ID NO: 289975 - DNA, 15 bp, Homo sapiens
atacaactcgtaaaa

SEQ ID NO: 289976 - DNA, 15 bp, Homo sapiens
catacaactcgtaaa

SEQ ID NO: 289977 - DNA, 15 bp, Homo sapiens
acatacaactcgtaa

SEQ ID NO: 289978 - DNA, 15 bp, Homo sapiens
gacatacaactcgta

SEQ ID NO: 289979 - DNA, 15 bp, Homo sapiens
tgacatacaactcgt

SEQ ID NO: 289980 - DNA, 15 bp, Homo sapiens
ctgacatacaactcg

SEQ ID NO: 289981 - DNA, 15 bp, Homo sapiens
cctgacatacaactc

SEQ ID NO: 289982 - DNA, 15 bp, Homo sapiens
tcctgacatacaact

SEQ ID NO: 289983 - DNA, 15 bp, Homo sapiens
atcctgacatacaac

SEQ ID NO: 289984 - DNA, 15 bp, Homo sapiens
tatcctgacatacaa

SEQ ID NO: 289985 - DNA, 15 bp, Homo sapiens
atatcctgacataca

SEQ ID NO: 289986 - DNA, 15 bp, Homo sapiens
catatcctgacatac

SEQ ID NO: 289987 - DNA, 15 bp, Homo sapiens
ccatatcctgacata

SEQ ID NO: 289988 - DNA, 15 bp, Homo sapiens
cccatatcctgacat

SEQ ID NO: 289989 - DNA, 15 bp, Homo sapiens
ccccatatcctgaca

SEQ ID NO: 289990 - DNA, 15 bp, Homo sapiens
accccatatcctgac

SEQ ID NO: 289991 - DNA, 15 bp, Homo sapiens
gaccccatatcctga

SEQ ID NO: 289992 - DNA, 15 bp, Homo sapiens
tgaccccatatcctg

SEQ ID NO: 289993 - DNA, 15 bp, Homo sapiens
ttgaccccatatcct

SEQ ID NO: 289994 - DNA, 15 bp, Homo sapiens
tttgaccccatatcc

SEQ ID NO: 289995 - DNA, 15 bp, Homo sapiens
ctttgaccccatatc

SEQ ID NO: 289996 - DNA, 15 bp, Homo sapiens
tctttgaccccatat

SEQ ID NO: 289997 - DNA, 15 bp, Homo sapiens
gtctttgaccccata

SEQ ID NO: 289998 - DNA, 15 bp, Homo sapiens
ggtctttgaccccat

SEQ ID NO: 289999 - DNA, 15 bp, Homo sapiens
tggtctttgacccca

SEQ ID NO: 290000 - DNA, 15 bp, Homo sapiens
ttggtctttgacccc

SEQ ID NO: 290001 - DNA, 15 bp, Homo sapiens
tttggtctttgaccc

SEQ ID NO: 290002 - DNA, 15 bp, Homo sapiens
gtttggtctttgacc

SEQ ID NO: 290003 - DNA, 15 bp, Homo sapiens
tgtttggtctttgac

SEQ ID NO: 290004 - DNA, 15 bp, Homo sapiens
atgtttggtctttga

SEQ ID NO: 290005 - DNA, 15 bp, Homo sapiens
gatgtttggtctttg

SEQ ID NO: 290006 - DNA, 15 bp, Homo sapiens
agatgtttggtcttt

SEQ ID NO: 290007 - DNA, 15 bp, Homo sapiens
tagatgtttggtctt

SEQ ID NO: 290008 - DNA, 15 bp, Homo sapiens
atagatgtttggtct

SEQ ID NO: 290009 - DNA, 15 bp, Homo sapiens
aatagatgtttggtc

SEQ ID NO: 290010 - DNA, 15 bp, Homo sapiens
aaatagatgtttggt

SEQ ID NO: 290011 - DNA, 15 bp, Homo sapiens
gaaatagatgtttgg

SEQ ID NO: 290012 - DNA, 15 bp, Homo sapiens
tgaaatagatgtttg

SEQ ID NO: 290013 - DNA, 15 bp, Homo sapiens
gtgaaatagatgttt

SEQ ID NO: 290014 - DNA, 15 bp, Homo sapiens
tgtgaaatagatgtt

SEQ ID NO: 290015 - DNA, 15 bp, Homo sapiens
ttgtgaaatagatgt

SEQ ID NO: 290016 - DNA, 15 bp, Homo sapiens
attgtgaaatagatg

SEQ ID NO: 290017 - DNA, 15 bp, Homo sapiens
tattgtgaaatagat

SEQ ID NO: 290018 - DNA, 15 bp, Homo sapiens
atattgtgaaataga

SEQ ID NO: 290019 - DNA, 15 bp, Homo sapiens
gatattgtgaaatag

SEQ ID NO: 290020 - DNA, 15 bp, Homo sapiens
tgatattgtgaaata

SEQ ID NO: 290021 - DNA, 15 bp, Homo sapiens
gtgatattgtgaaat

SEQ ID NO: 290022 - DNA, 15 bp, Homo sapiens
tgtgatattgtgaaa

SEQ ID NO: 290023 - DNA, 15 bp, Homo sapiens
gtgtgatattgtgaa

SEQ ID NO: 290024 - DNA, 15 bp, Homo sapiens
tgtgtgatattgtga

SEQ ID NO: 290025 - DNA, 15 bp, Homo sapiens
ttgtgtgatattgtg

SEQ ID NO: 290026 - DNA, 15 bp, Homo sapiens
gttgtgtgatattgt

SEQ ID NO: 290027 - DNA, 15 bp, Homo sapiens
tgttgtgtgatattg

SEQ ID NO: 290028 - DNA, 15 bp, Homo sapiens
gtgttgtgtgatatt

SEQ ID NO: 290029 - DNA, 15 bp, Homo sapiens
tgtgttgtgtgatat

SEQ ID NO: 290030 - DNA, 15 bp, Homo sapiens
ttgtgttgtgtgata

SEQ ID NO: 290031 - DNA, 15 bp, Homo sapiens
attgtgttgtgtgat

SEQ ID NO: 290032 - DNA, 15 bp, Homo sapiens
cattgtgttgtgtga

SEQ ID NO: 290033 - DNA, 15 bp, Homo sapiens
acattgtgttgtgtg

SEQ ID NO: 290034 - DNA, 15 bp, Homo sapiens
cacattgtgttgtgt

SEQ ID NO: 290035 - DNA, 15 bp, Homo sapiens
acacattgtgttgtg

SEQ ID NO: 290036 - DNA, 15 bp, Homo sapiens
gacacattgtgttgt

SEQ ID NO: 290037 - DNA, 15 bp, Homo sapiens
agacacattgtgttg

SEQ ID NO: 290038 - DNA, 15 bp, Homo sapiens
cagacacattgtgtt

SEQ ID NO: 290039 - DNA, 15 bp, Homo sapiens
ccagacacattgtgt

SEQ ID NO: 290040 - DNA, 15 bp, Homo sapiens
cccagacacattgtg

SEQ ID NO: 290041 - DNA, 15 bp, Homo sapiens
ccccagacacattgt

SEQ ID NO: 290042 - DNA, 15 bp, Homo sapiens
tccccagacacattg

SEQ ID NO: 290043 - DNA, 15 bp, Homo sapiens
ttccccagacacatt

SEQ ID NO: 290044 - DNA, 15 bp, Homo sapiens
gttccccagacacat

SEQ ID NO: 290045 - DNA, 15 bp, Homo sapiens
agttccccagacaca

SEQ ID NO: 290046 - DNA, 15 bp, Homo sapiens
tagttccccagacac

SEQ ID NO: 290047 - DNA, 15 bp, Homo sapiens
atagttccccagaca

SEQ ID NO: 290048 - DNA, 15 bp, Homo sapiens
aatagttccccagac

SEQ ID NO: 290049 - DNA, 15 bp, Homo sapiens
taatagttccccaga

SEQ ID NO: 290050 - DNA, 15 bp, Homo sapiens
ctaatagttccccag

SEQ ID NO: 290051 - DNA, 15 bp, Homo sapiens
gctaatagttcccca

SEQ ID NO: 290052 - DNA, 15 bp, Homo sapiens
tgctaatagttcccc

SEQ ID NO: 290053 - DNA, 15 bp, Homo sapiens
ctgctaatagttccc

SEQ ID NO: 290054 - DNA, 15 bp, Homo sapiens
gctgctaatagttcc

SEQ ID NO: 290055 - DNA, 15 bp, Homo sapiens
agctgctaatagttc

SEQ ID NO: 290056 - DNA, 15 bp, Homo sapiens
gagctgctaatagtt

SEQ ID NO: 290057 - DNA, 15 bp, Homo sapiens
agagctgctaatagt

SEQ ID NO: 290058 - DNA, 15 bp, Homo sapiens
cagagctgctaatag

SEQ ID NO: 290059 - DNA, 15 bp, Homo sapiens
acagagctgctaata

SEQ ID NO: 290060 - DNA, 15 bp, Homo sapiens
tacagagctgctaat

SEQ ID NO: 290061 - DNA, 15 bp, Homo sapiens
atacagagctgctaa

SEQ ID NO: 290062 - DNA, 15 bp, Homo sapiens
aatacagagctgcta

SEQ ID NO: 290063 - DNA, 15 bp, Homo sapiens
caatacagagctgct

SEQ ID NO: 290064 - DNA, 15 bp, Homo sapiens
tcaatacagagctgc

SEQ ID NO: 290065 - DNA, 15 bp, Homo sapiens
atcaatacagagctg

SEQ ID NO: 290066 - DNA, 15 bp, Homo sapiens
aatcaatacagagct

SEQ ID NO: 290067 - DNA, 15 bp, Homo sapiens
caatcaatacagagc

SEQ ID NO: 290068 - DNA, 15 bp, Homo sapiens
tcaatcaatacagag

SEQ ID NO: 290069 - DNA, 15 bp, Homo sapiens
gtcaatcaatacaga

SEQ ID NO: 290070 - DNA, 15 bp, Homo sapiens
agtcaatcaatacag

SEQ ID NO: 290071 - DNA, 15 bp, Homo sapiens
tagtcaatcaataca

SEQ ID NO: 290072 - DNA, 15 bp, Homo sapiens
atagtcaatcaatac

SEQ ID NO: 290073 - DNA, 15 bp, Homo sapiens
tatagtcaatcaata

SEQ ID NO: 290074 - DNA, 15 bp, Homo sapiens
ttatagtcaatcaat

SEQ ID NO: 290075 - DNA, 15 bp, Homo sapiens
tttatagtcaatcaa

SEQ ID NO: 290076 - DNA, 15 bp, Homo sapiens
ttttatagtcaatca

SEQ ID NO: 290077 - DNA, 15 bp, Homo sapiens
attttatagtcaatc

SEQ ID NO: 290078 - DNA, 15 bp, Homo sapiens
cattttatagtcaat

SEQ ID NO: 290079 - DNA, 15 bp, Homo sapiens
tcattttatagtcaa

SEQ ID NO: 290080 - DNA, 15 bp, Homo sapiens
ctcattttatagtca

SEQ ID NO: 290081 - DNA, 15 bp, Homo sapiens
tctcattttatagtc

SEQ ID NO: 290082 - DNA, 15 bp, Homo sapiens
ctctcattttatagt

SEQ ID NO: 290083 - DNA, 15 bp, Homo sapiens
actctcattttatag

SEQ ID NO: 290084 - DNA, 15 bp, Homo sapiens
tactctcattttata

SEQ ID NO: 290085 - DNA, 15 bp, Homo sapiens
ctactctcattttat

SEQ ID NO: 290086 - DNA, 15 bp, Homo sapiens
cctactctcatttta

SEQ ID NO: 290087 - DNA, 15 bp, Homo sapiens
tcctactctcatttt

SEQ ID NO: 290088 - DNA, 15 bp, Homo sapiens
ttcctactctcattt

SEQ ID NO: 290089 - DNA, 15 bp, Homo sapiens
cttcctactctcatt

SEQ ID NO: 290090 - DNA, 15 bp, Homo sapiens
acttcctactctcat

SEQ ID NO: 290091 - DNA, 15 bp, Homo sapiens
gacttcctactctca

SEQ ID NO: 290092 - DNA, 15 bp, Homo sapiens
tgacttcctactctc

SEQ ID NO: 290093 - DNA, 15 bp, Homo sapiens
gtgacttcctactct

SEQ ID NO: 290094 - DNA, 15 bp, Homo sapiens
tgtgacttcctactc

SEQ ID NO: 290095 - DNA, 15 bp, Homo sapiens
ctgtgacttcctact

SEQ ID NO: 290096 - DNA, 15 bp, Homo sapiens
cctgtgacttcctac

SEQ ID NO: 290097 - DNA, 15 bp, Homo sapiens
tcctgtgacttccta

SEQ ID NO: 290098 - DNA, 15 bp, Homo sapiens
ctcctgtgacttcct

SEQ ID NO: 290099 - DNA, 15 bp, Homo sapiens
tctcctgtgacttcc

SEQ ID NO: 290100 - DNA, 15 bp, Homo sapiens
ctctcctgtgacttc

SEQ ID NO: 290101 - DNA, 15 bp, Homo sapiens
cctctcctgtgactt

SEQ ID NO: 290102 - DNA, 15 bp, Homo sapiens
tcctctcctgtgact

SEQ ID NO: 290103 - DNA, 15 bp, Homo sapiens
ctcctctcctgtgac

SEQ ID NO: 290104 - DNA, 15 bp, Homo sapiens
tctcctctcctgtga

SEQ ID NO: 290105 - DNA, 15 bp, Homo sapiens
ctctcctctcctgtg

SEQ ID NO: 290106 - DNA, 15 bp, Homo sapiens
actctcctctcctgt

SEQ ID NO: 290107 - DNA, 15 bp, Homo sapiens
cactctcctctcctg

SEQ ID NO: 290108 - DNA, 15 bp, Homo sapiens
ccactctcctctcct

SEQ ID NO: 290109 - DNA, 15 bp, Homo sapiens
cccactctcctctcc

SEQ ID NO: 290110 - DNA, 15 bp, Homo sapiens
acccactctcctctc

SEQ ID NO: 290111 - DNA, 15 bp, Homo sapiens
tacccactctcctct

SEQ ID NO: 290112 - DNA, 15 bp, Homo sapiens
gtacccactctcctc

SEQ ID NO: 290113 - DNA, 15 bp, Homo sapiens
agtacccactctcct

SEQ ID NO: 290114 - DNA, 15 bp, Homo sapiens
tagtacccactctcc

SEQ ID NO: 290115 - DNA, 15 bp, Homo sapiens
ctagtacccactctc

SEQ ID NO: 290116 - DNA, 15 bp, Homo sapiens
tctagtacccactct

SEQ ID NO: 290117 - DNA, 15 bp, Homo sapiens
atctagtacccactc

SEQ ID NO: 290118 - DNA, 15 bp, Homo sapiens
tatctagtacccact

SEQ ID NO: 290119 - DNA, 15 bp, Homo sapiens
atatctagtacccac

SEQ ID NO: 290120 - DNA, 15 bp, Homo sapiens
catatctagtaccca

SEQ ID NO: 290121 - DNA, 15 bp, Homo sapiens
tcatatctagtaccc

SEQ ID NO: 290122 - DNA, 15 bp, Homo sapiens
ttcatatctagtacc

SEQ ID NO: 290123 - DNA, 15 bp, Homo sapiens
cttcatatctagtac

SEQ ID NO: 290124 - DNA, 15 bp, Homo sapiens
ccttcatatctagta

SEQ ID NO: 290125 - DNA, 15 bp, Homo sapiens
cccttcatatctagt

SEQ ID NO: 290126 - DNA, 15 bp, Homo sapiens
gcccttcatatctag

SEQ ID NO: 290127 - DNA, 15 bp, Homo sapiens
ggcccttcatatcta

SEQ ID NO: 290128 - DNA, 15 bp, Homo sapiens
aggcccttcatatct

SEQ ID NO: 290129 - DNA, 15 bp, Homo sapiens
aaggcccttcatatc

SEQ ID NO: 290130 - DNA, 15 bp, Homo sapiens
taaggcccttcatat

SEQ ID NO: 290131 - DNA, 15 bp, Homo sapiens
ataaggcccttcata

SEQ ID NO: 290132 - DNA, 15 bp, Homo sapiens
tataaggcccttcat

SEQ ID NO: 290133 - DNA, 15 bp, Homo sapiens
atataaggcccttca

SEQ ID NO: 290134 - DNA, 15 bp, Homo sapiens
catataaggcccttc

SEQ ID NO: 290135 - DNA, 15 bp, Homo sapiens
gcatataaggccctt

SEQ ID NO: 290136 - DNA, 15 bp, Homo sapiens
ggcatataaggccct

SEQ ID NO: 290137 - DNA, 15 bp, Homo sapiens
tggcatataaggccc

SEQ ID NO: 290138 - DNA, 15 bp, Homo sapiens
atggcatataaggcc

SEQ ID NO: 290139 - DNA, 15 bp, Homo sapiens
tatggcatataaggc

SEQ ID NO: 290140 - DNA, 15 bp, Homo sapiens
gtatggcatataagg

SEQ ID NO: 290141 - DNA, 15 bp, Homo sapiens
agtatggcatataag

SEQ ID NO: 290142 - DNA, 15 bp, Homo sapiens
gagtatggcatataa

SEQ ID NO: 290143 - DNA, 15 bp, Homo sapiens
tgagtatggcatata

SEQ ID NO: 290144 - DNA, 15 bp, Homo sapiens
gtgagtatggcatat

SEQ ID NO: 290145 - DNA, 15 bp, Homo sapiens
tgtgagtatggcata

SEQ ID NO: 290146 - DNA, 15 bp, Homo sapiens
ttgtgagtatggcat

SEQ ID NO: 290147 - DNA, 15 bp, Homo sapiens
tttgtgagtatggca

SEQ ID NO: 290148 - DNA, 15 bp, Homo sapiens
atttgtgagtatggc

SEQ ID NO: 290149 - DNA, 15 bp, Homo sapiens
aatttgtgagtatgg

SEQ ID NO: 290150 - DNA, 15 bp, Homo sapiens
aaatttgtgagtatg

SEQ ID NO: 290151 - DNA, 15 bp, Homo sapiens
caaatttgtgagtat

SEQ ID NO: 290152 - DNA, 15 bp, Homo sapiens
ccaaatttgtgagta

SEQ ID NO: 290153 - DNA, 15 bp, Homo sapiens
tccaaatttgtgagt

SEQ ID NO: 290154 - DNA, 15 bp, Homo sapiens
ctccaaatttgtgag

SEQ ID NO: 290155 - DNA, 15 bp, Homo sapiens
actccaaatttgtga

SEQ ID NO: 290156 - DNA, 15 bp, Homo sapiens
cactccaaatttgtg

SEQ ID NO: 290157 - DNA, 15 bp, Homo sapiens
acactccaaatttgt

SEQ ID NO: 290158 - DNA, 15 bp, Homo sapiens
tacactccaaatttg

SEQ ID NO: 290159 - DNA, 15 bp, Homo sapiens
ctacactccaaattt

SEQ ID NO: 290160 - DNA, 15 bp, Homo sapiens
gctacactccaaatt

SEQ ID NO: 290161 - DNA, 15 bp, Homo sapiens
tgctacactccaaat

SEQ ID NO: 290162 - DNA, 15 bp, Homo sapiens
atgctacactccaaa

SEQ ID NO: 290163 - DNA, 15 bp, Homo sapiens
catgctacactccaa

SEQ ID NO: 290164 - DNA, 15 bp, Homo sapiens
acatgctacactcca

SEQ ID NO: 290165 - DNA, 15 bp, Homo sapiens
cacatgctacactcc

SEQ ID NO: 290166 - DNA, 15 bp, Homo sapiens
gcacatgctacactc

SEQ ID NO: 290167 - DNA, 15 bp, Homo sapiens
tgcacatgctacact

SEQ ID NO: 290168 - DNA, 15 bp, Homo sapiens
atgcacatgctacac

SEQ ID NO: 290169 - DNA, 15 bp, Homo sapiens
catgcacatgctaca

SEQ ID NO: 290170 - DNA, 15 bp, Homo sapiens
tcatgcacatgctac

SEQ ID NO: 290171 - DNA, 15 bp, Homo sapiens
atcatgcacatgcta

SEQ ID NO: 290172 - DNA, 15 bp, Homo sapiens
tatcatgcacatgct

SEQ ID NO: 290173 - DNA, 15 bp, Homo sapiens
atatcatgcacatgc

SEQ ID NO: 290174 - DNA, 15 bp, Homo sapiens
tatatcatgcacatg

SEQ ID NO: 290175 - DNA, 15 bp, Homo sapiens
ctatatcatgcacat

SEQ ID NO: 290176 - DNA, 15 bp, Homo sapiens
gctatatcatgcaca

SEQ ID NO: 290177 - DNA, 15 bp, Homo sapiens
ggctatatcatgcac

SEQ ID NO: 290178 - DNA, 15 bp, Homo sapiens
aggctatatcatgca

SEQ ID NO: 290179 - DNA, 15 bp, Homo sapiens
caggctatatcatgc

SEQ ID NO: 290180 - DNA, 15 bp, Homo sapiens
acaggctatatcatg

SEQ ID NO: 290181 - DNA, 15 bp, Homo sapiens
cacaggctatatcat

SEQ ID NO: 290182 - DNA, 15 bp, Homo sapiens
gcacaggctatatca

SEQ ID NO: 290183 - DNA, 15 bp, Homo sapiens
agcacaggctatatc

SEQ ID NO: 290184 - DNA, 15 bp, Homo sapiens
tagcacaggctatat

SEQ ID NO: 290185 - DNA, 15 bp, Homo sapiens
atagcacaggctata

SEQ ID NO: 290186 - DNA, 15 bp, Homo sapiens
tatagcacaggctat

SEQ ID NO: 290187 - DNA, 15 bp, Homo sapiens
ttatagcacaggcta

SEQ ID NO: 290188 - DNA, 15 bp, Homo sapiens
tttatagcacaggct

SEQ ID NO: 290189 - DNA, 15 bp, Homo sapiens
atttatagcacaggc

SEQ ID NO: 290190 - DNA, 15 bp, Homo sapiens
catttatagcacagg

SEQ ID NO: 290191 - DNA, 15 bp, Homo sapiens
ccatttatagcacag

SEQ ID NO: 290192 - DNA, 15 bp, Homo sapiens
tccatttatagcaca

SEQ ID NO: 290193 - DNA, 15 bp, Homo sapiens
atccatttatagcac

SEQ ID NO: 290194 - DNA, 15 bp, Homo sapiens
catccatttatagca

SEQ ID NO: 290195 - DNA, 15 bp, Homo sapiens
acatccatttatagc

SEQ ID NO: 290196 - DNA, 15 bp, Homo sapiens
aacatccatttatag

SEQ ID NO: 290197 - DNA, 15 bp, Homo sapiens
taacatccatttata

SEQ ID NO: 290198 - DNA, 15 bp, Homo sapiens
ttaacatccatttat

SEQ ID NO: 290199 - DNA, 15 bp, Homo sapiens
cttaacatccattta

SEQ ID NO: 290200 - DNA, 15 bp, Homo sapiens
gcttaacatccattt

SEQ ID NO: 290201 - DNA, 15 bp, Homo sapiens
tgcttaacatccatt

SEQ ID NO: 290202 - DNA, 15 bp, Homo sapiens
ctgcttaacatccat

SEQ ID NO: 290203 - DNA, 15 bp, Homo sapiens
cctgcttaacatcca

SEQ ID NO: 290204 - DNA, 15 bp, Homo sapiens
ccctgcttaacatcc

SEQ ID NO: 290205 - DNA, 15 bp, Homo sapiens
cccctgcttaacatc

SEQ ID NO: 290206 - DNA, 15 bp, Homo sapiens
acccctgcttaacat

SEQ ID NO: 290207 - DNA, 15 bp, Homo sapiens
tacccctgcttaaca

SEQ ID NO: 290208 - DNA, 15 bp, Homo sapiens
ttacccctgcttaac

SEQ ID NO: 290209 - DNA, 15 bp, Homo sapiens
cttacccctgcttaa

SEQ ID NO: 290210 - DNA, 15 bp, Homo sapiens
ccttacccctgctta

SEQ ID NO: 290211 - DNA, 15 bp, Homo sapiens
tccttacccctgctt

SEQ ID NO: 290212 - DNA, 15 bp, Homo sapiens
atccttacccctgct

SEQ ID NO: 290213 - DNA, 15 bp, Homo sapiens
tatccttacccctgc

SEQ ID NO: 290214 - DNA, 15 bp, Homo sapiens
ttatccttacccctg

SEQ ID NO: 290215 - DNA, 15 bp, Homo sapiens
tttatccttacccct

SEQ ID NO: 290216 - DNA, 15 bp, Homo sapiens
ttttatccttacccc

SEQ ID NO: 290217 - DNA, 15 bp, Homo sapiens
attttatccttaccc

SEQ ID NO: 290218 - DNA, 15 bp, Homo sapiens
gattttatccttacc

SEQ ID NO: 290219 - DNA, 15 bp, Homo sapiens
tgattttatccttac

SEQ ID NO: 290220 - DNA, 15 bp, Homo sapiens
ctgattttatcctta

SEQ ID NO: 290221 - DNA, 15 bp, Homo sapiens
tctgattttatcctt

SEQ ID NO: 290222 - DNA, 15 bp, Homo sapiens
gtctgattttatcct

SEQ ID NO: 290223 - DNA, 15 bp, Homo sapiens
tgtctgattttatcc

SEQ ID NO: 290224 - DNA, 15 bp, Homo sapiens
atgtctgattttatc

SEQ ID NO: 290225 - DNA, 15 bp, Homo sapiens
tatgtctgattttat

SEQ ID NO: 290226 - DNA, 15 bp, Homo sapiens
ttatgtctgatttta

SEQ ID NO: 290227 - DNA, 15 bp, Homo sapiens
attatgtctgatttt

SEQ ID NO: 290228 - DNA, 15 bp, Homo sapiens
aattatgtctgattt

SEQ ID NO: 290229 - DNA, 15 bp, Homo sapiens
aaattatgtctgatt

SEQ ID NO: 290230 - DNA, 15 bp, Homo sapiens
aaaattatgtctgat

SEQ ID NO: 290231 - DNA, 15 bp, Homo sapiens
aaaaattatgtctga

SEQ ID NO: 290232 - DNA, 15 bp, Homo sapiens
caaaaattatgtctg

SEQ ID NO: 290233 - DNA, 15 bp, Homo sapiens
gcaaaaattatgtct

SEQ ID NO: 290234 - DNA, 15 bp, Homo sapiens
tgcaaaaattatgtc

SEQ ID NO: 290235 - DNA, 15 bp, Homo sapiens
ttgcaaaaattatgt

SEQ ID NO: 290236 - DNA, 15 bp, Homo sapiens
cttgcaaaaattatg

SEQ ID NO: 290237 - DNA, 15 bp, Homo sapiens
acttgcaaaaattat

SEQ ID NO: 290238 - DNA, 15 bp, Homo sapiens
aacttgcaaaaatta

SEQ ID NO: 290239 - DNA, 15 bp, Homo sapiens
gaacttgcaaaaatt

SEQ ID NO: 290240 - DNA, 15 bp, Homo sapiens
tgaacttgcaaaaat

SEQ ID NO: 290241 - DNA, 15 bp, Homo sapiens
gtgaacttgcaaaaa

SEQ ID NO: 290242 - DNA, 15 bp, Homo sapiens
tgtgaacttgcaaaa

SEQ ID NO: 290243 - DNA, 15 bp, Homo sapiens
atgtgaacttgcaaa

SEQ ID NO: 290244 - DNA, 15 bp, Homo sapiens
catgtgaacttgcaa

SEQ ID NO: 290245 - DNA, 15 bp, Homo sapiens
ccatgtgaacttgca

SEQ ID NO: 290246 - DNA, 15 bp, Homo sapiens
accatgtgaacttgc

SEQ ID NO: 290247 - DNA, 15 bp, Homo sapiens
taccatgtgaacttg

SEQ ID NO: 290248 - DNA, 15 bp, Homo sapiens
ttaccatgtgaactt

SEQ ID NO: 290249 - DNA, 15 bp, Homo sapiens
attaccatgtgaact

SEQ ID NO: 290250 - DNA, 15 bp, Homo sapiens
tattaccatgtgaac

SEQ ID NO: 290251 - DNA, 15 bp, Homo sapiens
ctattaccatgtgaa

SEQ ID NO: 290252 - DNA, 15 bp, Homo sapiens
actattaccatgtga

SEQ ID NO: 290253 - DNA, 15 bp, Homo sapiens
gactattaccatgtg

SEQ ID NO: 290254 - DNA, 15 bp, Homo sapiens
tgactattaccatgt

SEQ ID NO: 290255 - DNA, 15 bp, Homo sapiens
ctgactattaccatg

SEQ ID NO: 290256 - DNA, 15 bp, Homo sapiens
actgactattaccat

SEQ ID NO: 290257 - DNA, 15 bp, Homo sapiens
cactgactattacca

SEQ ID NO: 290258 - DNA, 15 bp, Homo sapiens
ccactgactattacc

SEQ ID NO: 290259 - DNA, 15 bp, Homo sapiens
cccactgactattac

SEQ ID NO: 290260 - DNA, 15 bp, Homo sapiens
ccccactgactatta

SEQ ID NO: 290261 - DNA, 15 bp, Homo sapiens
cccccactgactatt

SEQ ID NO: 290262 - DNA, 15 bp, Homo sapiens
ccccccactgactat

SEQ ID NO: 290263 - DNA, 15 bp, Homo sapiens
tccccccactgacta

SEQ ID NO: 290264 - DNA, 15 bp, Homo sapiens
atccccccactgact

SEQ ID NO: 290265 - DNA, 15 bp, Homo sapiens
tatccccccactgac

SEQ ID NO: 290266 - DNA, 15 bp, Homo sapiens
ctatccccccactga

SEQ ID NO: 290267 - DNA, 15 bp, Homo sapiens
tctatccccccactg

SEQ ID NO: 290268 - DNA, 15 bp, Homo sapiens
gtctatccccccact

SEQ ID NO: 290269 - DNA, 15 bp, Homo sapiens
agtctatccccccac

SEQ ID NO: 290270 - DNA, 15 bp, Homo sapiens
cagtctatcccccca

SEQ ID NO: 290271 - DNA, 15 bp, Homo sapiens
tcagtctatcccccc

SEQ ID NO: 290272 - DNA, 15 bp, Homo sapiens
ctcagtctatccccc

SEQ ID NO: 290273 - DNA, 15 bp, Homo sapiens
cctcagtctatcccc

SEQ ID NO: 290274 - DNA, 15 bp, Homo sapiens
tcctcagtctatccc

SEQ ID NO: 290275 - DNA, 15 bp, Homo sapiens
ctcctcagtctatcc

SEQ ID NO: 290276 - DNA, 15 bp, Homo sapiens
tctcctcagtctatc

SEQ ID NO: 290277 - DNA, 15 bp, Homo sapiens
ttctcctcagtctat

SEQ ID NO: 290278 - DNA, 15 bp, Homo sapiens
attctcctcagtcta

SEQ ID NO: 290279 - DNA, 15 bp, Homo sapiens
tattctcctcagtct

SEQ ID NO: 290280 - DNA, 15 bp, Homo sapiens
ttattctcctcagtc

SEQ ID NO: 290281 - DNA, 15 bp, Homo sapiens
cttattctcctcagt

SEQ ID NO: 290282 - DNA, 15 bp, Homo sapiens
tcttattctcctcag

SEQ ID NO: 290283 - DNA, 15 bp, Homo sapiens
ttcttattctcctca

SEQ ID NO: 290284 - DNA, 15 bp, Homo sapiens
tttcttattctcctc

SEQ ID NO: 290285 - DNA, 15 bp, Homo sapiens
ttttcttattctcct

SEQ ID NO: 290286 - DNA, 15 bp, Homo sapiens
tttttcttattctcc

SEQ ID NO: 290287 - DNA, 15 bp, Homo sapiens
ctttttcttattctc

SEQ ID NO: 290288 - DNA, 15 bp, Homo sapiens
actttttcttattct

SEQ ID NO: 290289 - DNA, 15 bp, Homo sapiens
cactttttcttattc

SEQ ID NO: 290290 - DNA, 15 bp, Homo sapiens
tcactttttcttatt

SEQ ID NO: 290291 - DNA, 15 bp, Homo sapiens
ctcactttttcttat

SEQ ID NO: 290292 - DNA, 15 bp, Homo sapiens
tctcactttttctta

SEQ ID NO: 290293 - DNA, 15 bp, Homo sapiens
ttctcactttttctt

SEQ ID NO: 290294 - DNA, 15 bp, Homo sapiens
tttctcactttttct

SEQ ID NO: 290295 - DNA, 15 bp, Homo sapiens
atttctcactttttc

SEQ ID NO: 290296 - DNA, 15 bp, Homo sapiens
tatttctcacttttt

SEQ ID NO: 290297 - DNA, 15 bp, Homo sapiens
ctatttctcactttt

SEQ ID NO: 290298 - DNA, 15 bp, Homo sapiens
tctatttctcacttt

SEQ ID NO: 290299 - DNA, 15 bp, Homo sapiens
gtctatttctcactt

SEQ ID NO: 290300 - DNA, 15 bp, Homo sapiens
ggtctatttctcact

SEQ ID NO: 290301 - DNA, 15 bp, Homo sapiens
aggtctatttctcac

SEQ ID NO: 290302 - DNA, 15 bp, Homo sapiens
caggtctatttctca

SEQ ID NO: 290303 - DNA, 15 bp, Homo sapiens
acaggtctatttctc

SEQ ID NO: 290304 - DNA, 15 bp, Homo sapiens
gacaggtctatttct

SEQ ID NO: 290305 - DNA, 15 bp, Homo sapiens
tgacaggtctatttc

SEQ ID NO: 290306 - DNA, 15 bp, Homo sapiens
ctgacaggtctattt

SEQ ID NO: 290307 - DNA, 15 bp, Homo sapiens
actgacaggtctatt

SEQ ID NO: 290308 - DNA, 15 bp, Homo sapiens
gactgacaggtctat

SEQ ID NO: 290309 - DNA, 15 bp, Homo sapiens
agactgacaggtcta

SEQ ID NO: 290310 - DNA, 15 bp, Homo sapiens
cagactgacaggtct

SEQ ID NO: 290311 - DNA, 15 bp, Homo sapiens
acagactgacaggtc

SEQ ID NO: 290312 - DNA, 15 bp, Homo sapiens
gacagactgacaggt

SEQ ID NO: 290313 - DNA, 15 bp, Homo sapiens
agacagactgacagg

SEQ ID NO: 290314 - DNA, 15 bp, Homo sapiens
gagacagactgacag

SEQ ID NO: 290315 - DNA, 15 bp, Homo sapiens
tgagacagactgaca

SEQ ID NO: 290316 - DNA, 15 bp, Homo sapiens
ctgagacagactgac

SEQ ID NO: 290317 - DNA, 15 bp, Homo sapiens
actgagacagactga

SEQ ID NO: 290318 - DNA, 15 bp, Homo sapiens
cactgagacagactg

SEQ ID NO: 290319 - DNA, 15 bp, Homo sapiens
ccactgagacagact

SEQ ID NO: 290320 - DNA, 15 bp, Homo sapiens
accactgagacagac

SEQ ID NO: 290321 - DNA, 15 bp, Homo sapiens
aaccactgagacaga

SEQ ID NO: 290322 - DNA, 15 bp, Homo sapiens
gaaccactgagacag

SEQ ID NO: 290323 - DNA, 15 bp, Homo sapiens
agaaccactgagaca

SEQ ID NO: 290324 - DNA, 15 bp, Homo sapiens
aagaaccactgagac

SEQ ID NO: 290325 - DNA, 15 bp, Homo sapiens
taagaaccactgaga

SEQ ID NO: 290326 - DNA, 15 bp, Homo sapiens
ttaagaaccactgag

SEQ ID NO: 290327 - DNA, 15 bp, Homo sapiens
gttaagaaccactga

SEQ ID NO: 290328 - DNA, 15 bp, Homo sapiens
ggttaagaaccactg

SEQ ID NO: 290329 - DNA, 15 bp, Homo sapiens
tggttaagaaccact

SEQ ID NO: 290330 - DNA, 15 bp, Homo sapiens
atggttaagaaccac

SEQ ID NO: 290331 - DNA, 15 bp, Homo sapiens
catggttaagaacca

SEQ ID NO: 290332 - DNA, 15 bp, Homo sapiens
acatggttaagaacc

SEQ ID NO: 290333 - DNA, 15 bp, Homo sapiens
cacatggttaagaac

SEQ ID NO: 290334 - DNA, 15 bp, Homo sapiens
acacatggttaagaa

SEQ ID NO: 290335 - DNA, 15 bp, Homo sapiens
cacacatggttaaga

SEQ ID NO: 290336 - DNA, 15 bp, Homo sapiens
gcacacatggttaag

SEQ ID NO: 290337 - DNA, 15 bp, Homo sapiens
tgcacacatggttaa

SEQ ID NO: 290338 - DNA, 15 bp, Homo sapiens
ttgcacacatggtta

SEQ ID NO: 290339 - DNA, 15 bp, Homo sapiens
tttgcacacatggtt

SEQ ID NO: 290340 - DNA, 15 bp, Homo sapiens
atttgcacacatggt

SEQ ID NO: 290341 - DNA, 15 bp, Homo sapiens
aatttgcacacatgg

SEQ ID NO: 290342 - DNA, 15 bp, Homo sapiens
taatttgcacacatg

SEQ ID NO: 290343 - DNA, 15 bp, Homo sapiens
ctaatttgcacacat

SEQ ID NO: 290344 - DNA, 15 bp, Homo sapiens
tctaatttgcacaca

SEQ ID NO: 290345 - DNA, 15 bp, Homo sapiens
ttctaatttgcacac

SEQ ID NO: 290346 - DNA, 15 bp, Homo sapiens
attctaatttgcaca

SEQ ID NO: 290347 - DNA, 15 bp, Homo sapiens
tattctaatttgcac

SEQ ID NO: 290348 - DNA, 15 bp, Homo sapiens
ttattctaatttgca

SEQ ID NO: 290349 - DNA, 15 bp, Homo sapiens
gttattctaatttgc

SEQ ID NO: 290350 - DNA, 15 bp, Homo sapiens
ggttattctaatttg

SEQ ID NO: 290351 - DNA, 15 bp, Homo sapiens
aggttattctaattt

SEQ ID NO: 290352 - DNA, 15 bp, Homo sapiens
caggttattctaatt

SEQ ID NO: 290353 - DNA, 15 bp, Homo sapiens
tcaggttattctaat

SEQ ID NO: 290354 - DNA, 15 bp, Homo sapiens
ctcaggttattctaa

SEQ ID NO: 290355 - DNA, 15 bp, Homo sapiens
cctcaggttattcta

SEQ ID NO: 290356 - DNA, 15 bp, Homo sapiens
tcctcaggttattct

SEQ ID NO: 290357 - DNA, 15 bp, Homo sapiens
ttcctcaggttattc

SEQ ID NO: 290358 - DNA, 15 bp, Homo sapiens
attcctcaggttatt

SEQ ID NO: 290359 - DNA, 15 bp, Homo sapiens
aattcctcaggttat

SEQ ID NO: 290360 - DNA, 15 bp, Homo sapiens
aaattcctcaggtta

SEQ ID NO: 290361 - DNA, 15 bp, Homo sapiens
aaaattcctcaggtt

SEQ ID NO: 290362 - DNA, 15 bp, Homo sapiens
caaaattcctcaggt

SEQ ID NO: 290363 - DNA, 15 bp, Homo sapiens
acaaaattcctcagg

SEQ ID NO: 290364 - DNA, 15 bp, Homo sapiens
aacaaaattcctcag

SEQ ID NO: 290365 - DNA, 15 bp, Homo sapiens
aaacaaaattcctca

SEQ ID NO: 290366 - DNA, 15 bp, Homo sapiens
aaaacaaaattcctc

SEQ ID NO: 290367 - DNA, 15 bp, Homo sapiens
caaaacaaaattcct

SEQ ID NO: 290368 - DNA, 15 bp, Homo sapiens
acaaaacaaaattcc

SEQ ID NO: 290369 - DNA, 15 bp, Homo sapiens
aacaaaacaaaattc

SEQ ID NO: 290370 - DNA, 15 bp, Homo sapiens
aaacaaaacaaaatt

SEQ ID NO: 290371 - DNA, 15 bp, Homo sapiens
aaaacaaaacaaaat

SEQ ID NO: 290372 - DNA, 15 bp, Homo sapiens
aaaaacaaaacaaaa

SEQ ID NO: 290373 - DNA, 15 bp, Homo sapiens
aaaaaacaaaacaaa

SEQ ID NO: 290374 - DNA, 15 bp, Homo sapiens
gaaaaaacaaaacaa

SEQ ID NO: 290375 - DNA, 15 bp, Homo sapiens
agaaaaaacaaaaca

SEQ ID NO: 290376 - DNA, 15 bp, Homo sapiens
aagaaaaaacaaaac

SEQ ID NO: 290377 - DNA, 15 bp, Homo sapiens
aaagaaaaaacaaaa

SEQ ID NO: 290378 - DNA, 15 bp, Homo sapiens
aaaagaaaaaacaaa

SEQ ID NO: 290379 - DNA, 15 bp, Homo sapiens
aaaaagaaaaaacaa

SEQ ID NO: 290380 - DNA, 15 bp, Homo sapiens
taaaaagaaaaaaca

SEQ ID NO: 290381 - DNA, 15 bp, Homo sapiens
ttaaaaagaaaaaac

SEQ ID NO: 290382 - DNA, 15 bp, Homo sapiens
tttaaaaagaaaaaa

SEQ ID NO: 290383 - DNA, 15 bp, Homo sapiens
ttttaaaaagaaaaa

SEQ ID NO: 290384 - DNA, 15 bp, Homo sapiens
tttttaaaaagaaaa

SEQ ID NO: 290385 - DNA, 15 bp, Homo sapiens
atttttaaaaagaaa

SEQ ID NO: 290386 - DNA, 15 bp, Homo sapiens
aatttttaaaaagaa

SEQ ID NO: 290387 - DNA, 15 bp, Homo sapiens
aaatttttaaaaaga

SEQ ID NO: 290388 - DNA, 15 bp, Homo sapiens
aaaatttttaaaaag

SEQ ID NO: 290389 - DNA, 15 bp, Homo sapiens
caaaatttttaaaaa

SEQ ID NO: 290390 - DNA, 15 bp, Homo sapiens
acaaaatttttaaaa

SEQ ID NO: 290391 - DNA, 15 bp, Homo sapiens
cacaaaatttttaaa

SEQ ID NO: 290392 - DNA, 15 bp, Homo sapiens
acacaaaatttttaa

SEQ ID NO: 290393 - DNA, 15 bp, Homo sapiens
gacacaaaattttta

SEQ ID NO: 290394 - DNA, 15 bp, Homo sapiens
ggacacaaaattttt

SEQ ID NO: 290395 - DNA, 15 bp, Homo sapiens
gggacacaaaatttt

SEQ ID NO: 290396 - DNA, 15 bp, Homo sapiens
tgggacacaaaattt

SEQ ID NO: 290397 - DNA, 15 bp, Homo sapiens
atgggacacaaaatt

SEQ ID NO: 290398 - DNA, 15 bp, Homo sapiens
aatgggacacaaaat

SEQ ID NO: 290399 - DNA, 15 bp, Homo sapiens
gaatgggacacaaaa

SEQ ID NO: 290400 - DNA, 15 bp, Homo sapiens
ggaatgggacacaaa

SEQ ID NO: 290401 - DNA, 15 bp, Homo sapiens
tggaatgggacacaa

SEQ ID NO: 290402 - DNA, 15 bp, Homo sapiens
gtggaatgggacaca

SEQ ID NO: 290403 - DNA, 15 bp, Homo sapiens
agtggaatgggacac

SEQ ID NO: 290404 - DNA, 15 bp, Homo sapiens
cagtggaatgggaca

SEQ ID NO: 290405 - DNA, 15 bp, Homo sapiens
tcagtggaatgggac

SEQ ID NO: 290406 - DNA, 15 bp, Homo sapiens
ctcagtggaatggga

SEQ ID NO: 290407 - DNA, 15 bp, Homo sapiens
cctcagtggaatggg

SEQ ID NO: 290408 - DNA, 15 bp, Homo sapiens
tcctcagtggaatgg

SEQ ID NO: 290409 - DNA, 15 bp, Homo sapiens
ttcctcagtggaatg

SEQ ID NO: 290410 - DNA, 15 bp, Homo sapiens
attcctcagtggaat

SEQ ID NO: 290411 - DNA, 15 bp, Homo sapiens
tattcctcagtggaa

SEQ ID NO: 290412 - DNA, 15 bp, Homo sapiens
atattcctcagtgga

SEQ ID NO: 290413 - DNA, 15 bp, Homo sapiens
catattcctcagtgg

SEQ ID NO: 290414 - DNA, 15 bp, Homo sapiens
gcatattcctcagtg

SEQ ID NO: 290415 - DNA, 15 bp, Homo sapiens
ggcatattcctcagt

SEQ ID NO: 290416 - DNA, 15 bp, Homo sapiens
aggcatattcctcag

SEQ ID NO: 290417 - DNA, 15 bp, Homo sapiens
taggcatattcctca

SEQ ID NO: 290418 - DNA, 15 bp, Homo sapiens
ctaggcatattcctc

SEQ ID NO: 290419 - DNA, 15 bp, Homo sapiens
cctaggcatattcct

SEQ ID NO: 290420 - DNA, 15 bp, Homo sapiens
gcctaggcatattcc

SEQ ID NO: 290421 - DNA, 15 bp, Homo sapiens
ggcctaggcatattc

SEQ ID NO: 290422 - DNA, 15 bp, Homo sapiens
aggcctaggcatatt

SEQ ID NO: 290423 - DNA, 15 bp, Homo sapiens
aaggcctaggcatat

SEQ ID NO: 290424 - DNA, 15 bp, Homo sapiens
taaggcctaggcata

SEQ ID NO: 290425 - DNA, 15 bp, Homo sapiens
gtaaggcctaggcat

SEQ ID NO: 290426 - DNA, 15 bp, Homo sapiens
agtaaggcctaggca

SEQ ID NO: 290427 - DNA, 15 bp, Homo sapiens
tagtaaggcctaggc

SEQ ID NO: 290428 - DNA, 15 bp, Homo sapiens
gtagtaaggcctagg

SEQ ID NO: 290429 - DNA, 15 bp, Homo sapiens
ggtagtaaggcctag

SEQ ID NO: 290430 - DNA, 15 bp, Homo sapiens
tggtagtaaggccta

SEQ ID NO: 290431 - DNA, 15 bp, Homo sapiens
gtggtagtaaggcct

SEQ ID NO: 290432 - DNA, 15 bp, Homo sapiens
tgtggtagtaaggcc

SEQ ID NO: 290433 - DNA, 15 bp, Homo sapiens
ctgtggtagtaaggc

SEQ ID NO: 290434 - DNA, 15 bp, Homo sapiens
tctgtggtagtaagg

SEQ ID NO: 290435 - DNA, 15 bp, Homo sapiens
gtctgtggtagtaag

SEQ ID NO: 290436 - DNA, 15 bp, Homo sapiens
tgtctgtggtagtaa

SEQ ID NO: 290437 - DNA, 15 bp, Homo sapiens
atgtctgtggtagta

SEQ ID NO: 290438 - DNA, 15 bp, Homo sapiens
tatgtctgtggtagt

SEQ ID NO: 290439 - DNA, 15 bp, Homo sapiens
ctatgtctgtggtag

SEQ ID NO: 290440 - DNA, 15 bp, Homo sapiens
actatgtctgtggta

SEQ ID NO: 290441 - DNA, 15 bp, Homo sapiens
cactatgtctgtggt

SEQ ID NO: 290442 - DNA, 15 bp, Homo sapiens
acactatgtctgtgg

SEQ ID NO: 290443 - DNA, 15 bp, Homo sapiens
tacactatgtctgtg

SEQ ID NO: 290444 - DNA, 15 bp, Homo sapiens
atacactatgtctgt

SEQ ID NO: 290445 - DNA, 15 bp, Homo sapiens
tatacactatgtctg

SEQ ID NO: 290446 - DNA, 15 bp, Homo sapiens
ttatacactatgtct

SEQ ID NO: 290447 - DNA, 15 bp, Homo sapiens
tttatacactatgtc

SEQ ID NO: 290448 - DNA, 15 bp, Homo sapiens
ttttatacactatgt

SEQ ID NO: 290449 - DNA, 15 bp, Homo sapiens
tttttatacactatg

SEQ ID NO: 290450 - DNA, 15 bp, Homo sapiens
atttttatacactat

SEQ ID NO: 290451 - DNA, 15 bp, Homo sapiens
gatttttatacacta

SEQ ID NO: 290452 - DNA, 15 bp, Homo sapiens
agatttttatacact

SEQ ID NO: 290453 - DNA, 15 bp, Homo sapiens
gagatttttatacac

SEQ ID NO: 290454 - DNA, 15 bp, Homo sapiens
agagatttttataca

SEQ ID NO: 290455 - DNA, 15 bp, Homo sapiens
cagagatttttatac

SEQ ID NO: 290456 - DNA, 15 bp, Homo sapiens
ccagagatttttata

SEQ ID NO: 290457 - DNA, 15 bp, Homo sapiens
cccagagatttttat

SEQ ID NO: 290458 - DNA, 15 bp, Homo sapiens
gcccagagattttta

SEQ ID NO: 290459 - DNA, 15 bp, Homo sapiens
agcccagagattttt

SEQ ID NO: 290460 - DNA, 15 bp, Homo sapiens
aagcccagagatttt

SEQ ID NO: 290461 - DNA, 15 bp, Homo sapiens
caagcccagagattt

SEQ ID NO: 290462 - DNA, 15 bp, Homo sapiens
acaagcccagagatt

SEQ ID NO: 290463 - DNA, 15 bp, Homo sapiens
gacaagcccagagat

SEQ ID NO: 290464 - DNA, 15 bp, Homo sapiens
agacaagcccagaga

SEQ ID NO: 290465 - DNA, 15 bp, Homo sapiens
cagacaagcccagag

SEQ ID NO: 290466 - DNA, 15 bp, Homo sapiens
acagacaagcccaga

SEQ ID NO: 290467 - DNA, 15 bp, Homo sapiens
aacagacaagcccag

SEQ ID NO: 290468 - DNA, 15 bp, Homo sapiens
caacagacaagccca

SEQ ID NO: 290469 - DNA, 15 bp, Homo sapiens
acaacagacaagccc

SEQ ID NO: 290470 - DNA, 15 bp, Homo sapiens
tacaacagacaagcc

SEQ ID NO: 290471 - DNA, 15 bp, Homo sapiens
ctacaacagacaagc

SEQ ID NO: 290472 - DNA, 15 bp, Homo sapiens
gctacaacagacaag

SEQ ID NO: 290473 - DNA, 15 bp, Homo sapiens
tgctacaacagacaa

SEQ ID NO: 290474 - DNA, 15 bp, Homo sapiens
ctgctacaacagaca

SEQ ID NO: 290475 - DNA, 15 bp, Homo sapiens
actgctacaacagac

SEQ ID NO: 290476 - DNA, 15 bp, Homo sapiens
aactgctacaacaga

SEQ ID NO: 290477 - DNA, 15 bp, Homo sapiens
aaactgctacaacag

SEQ ID NO: 290478 - DNA, 15 bp, Homo sapiens
taaactgctacaaca

SEQ ID NO: 290479 - DNA, 15 bp, Homo sapiens
gtaaactgctacaac

SEQ ID NO: 290480 - DNA, 15 bp, Homo sapiens
agtaaactgctacaa

SEQ ID NO: 290481 - DNA, 15 bp, Homo sapiens
aagtaaactgctaca

SEQ ID NO: 290482 - DNA, 15 bp, Homo sapiens
caagtaaactgctac

SEQ ID NO: 290483 - DNA, 15 bp, Homo sapiens
tcaagtaaactgcta

SEQ ID NO: 290484 - DNA, 15 bp, Homo sapiens
ctcaagtaaactgct

SEQ ID NO: 290485 - DNA, 15 bp, Homo sapiens
tctcaagtaaactgc

SEQ ID NO: 290486 - DNA, 15 bp, Homo sapiens
ctctcaagtaaactg

SEQ ID NO: 290487 - DNA, 15 bp, Homo sapiens
actctcaagtaaact

SEQ ID NO: 290488 - DNA, 15 bp, Homo sapiens
aactctcaagtaaac

SEQ ID NO: 290489 - DNA, 15 bp, Homo sapiens
aaactctcaagtaaa

SEQ ID NO: 290490 - DNA, 15 bp, Homo sapiens
aaaactctcaagtaa

SEQ ID NO: 290491 - DNA, 15 bp, Homo sapiens
aaaaactctcaagta

SEQ ID NO: 290492 - DNA, 15 bp, Homo sapiens
taaaaactctcaagt

SEQ ID NO: 290493 - DNA, 15 bp, Homo sapiens
ttaaaaactctcaag

SEQ ID NO: 290494 - DNA, 15 bp, Homo sapiens
tttaaaaactctcaa

SEQ ID NO: 290495 - DNA, 15 bp, Homo sapiens
ctttaaaaactctca

SEQ ID NO: 290496 - DNA, 15 bp, Homo sapiens
tctttaaaaactctc

SEQ ID NO: 290497 - DNA, 15 bp, Homo sapiens
atctttaaaaactct

SEQ ID NO: 290498 - DNA, 15 bp, Homo sapiens
gatctttaaaaactc

SEQ ID NO: 290499 - DNA, 15 bp, Homo sapiens
agatctttaaaaact

SEQ ID NO: 290500 - DNA, 15 bp, Homo sapiens
cagatctttaaaaac

SEQ ID NO: 290501 - DNA, 15 bp, Homo sapiens
tcagatctttaaaaa

SEQ ID NO: 290502 - DNA, 15 bp, Homo sapiens
ttcagatctttaaaa

SEQ ID NO: 290503 - DNA, 15 bp, Homo sapiens
gttcagatctttaaa

SEQ ID NO: 290504 - DNA, 15 bp, Homo sapiens
ggttcagatctttaa

SEQ ID NO: 290505 - DNA, 15 bp, Homo sapiens
tggttcagatcttta

SEQ ID NO: 290506 - DNA, 15 bp, Homo sapiens
ttggttcagatcttt

SEQ ID NO: 290507 - DNA, 15 bp, Homo sapiens
gttggttcagatctt

SEQ ID NO: 290508 - DNA, 15 bp, Homo sapiens
cgttggttcagatct

SEQ ID NO: 290509 - DNA, 15 bp, Homo sapiens
tcgttggttcagatc

SEQ ID NO: 290510 - DNA, 15 bp, Homo sapiens
atcgttggttcagat

SEQ ID NO: 290511 - DNA, 15 bp, Homo sapiens
tatcgttggttcaga

SEQ ID NO: 290512 - DNA, 15 bp, Homo sapiens
ctatcgttggttcag

SEQ ID NO: 290513 - DNA, 15 bp, Homo sapiens
actatcgttggttca

SEQ ID NO: 290514 - DNA, 15 bp, Homo sapiens
cactatcgttggttc

SEQ ID NO: 290515 - DNA, 15 bp, Homo sapiens
ccactatcgttggtt

SEQ ID NO: 290516 - DNA, 15 bp, Homo sapiens
accactatcgttggt

SEQ ID NO: 290517 - DNA, 15 bp, Homo sapiens
caccactatcgttgg

SEQ ID NO: 290518 - DNA, 15 bp, Homo sapiens
ccaccactatcgttg

SEQ ID NO: 290519 - DNA, 15 bp, Homo sapiens
cccaccactatcgtt

SEQ ID NO: 290520 - DNA, 15 bp, Homo sapiens
tcccaccactatcgt

SEQ ID NO: 290521 - DNA, 15 bp, Homo sapiens
ttcccaccactatcg

SEQ ID NO: 290522 - DNA, 15 bp, Homo sapiens
attcccaccactatc

SEQ ID NO: 290523 - DNA, 15 bp, Homo sapiens
cattcccaccactat

SEQ ID NO: 290524 - DNA, 15 bp, Homo sapiens
tcattcccaccacta

SEQ ID NO: 290525 - DNA, 15 bp, Homo sapiens
ttcattcccaccact

SEQ ID NO: 290526 - DNA, 15 bp, Homo sapiens
cttcattcccaccac

SEQ ID NO: 290527 - DNA, 15 bp, Homo sapiens
ccttcattcccacca

SEQ ID NO: 290528 - DNA, 15 bp, Homo sapiens
tccttcattcccacc

SEQ ID NO: 290529 - DNA, 15 bp, Homo sapiens
ttccttcattcccac

SEQ ID NO: 290530 - DNA, 15 bp, Homo sapiens
gttccttcattccca

SEQ ID NO: 290531 - DNA, 15 bp, Homo sapiens
tgttccttcattccc

SEQ ID NO: 290532 - DNA, 15 bp, Homo sapiens
ttgttccttcattcc

SEQ ID NO: 290533 - DNA, 15 bp, Homo sapiens
attgttccttcattc

SEQ ID NO: 290534 - DNA, 15 bp, Homo sapiens
tattgttccttcatt

SEQ ID NO: 290535 - DNA, 15 bp, Homo sapiens
ttattgttccttcat

SEQ ID NO: 290536 - DNA, 15 bp, Homo sapiens
gttattgttccttca

SEQ ID NO: 290537 - DNA, 15 bp, Homo sapiens
tgttattgttccttc

SEQ ID NO: 290538 - DNA, 15 bp, Homo sapiens
ctgttattgttcctt

SEQ ID NO: 290539 - DNA, 15 bp, Homo sapiens
tctgttattgttcct

SEQ ID NO: 290540 - DNA, 15 bp, Homo sapiens
atctgttattgttcc

SEQ ID NO: 290541 - DNA, 15 bp, Homo sapiens
aatctgttattgttc

SEQ ID NO: 290542 - DNA, 15 bp, Homo sapiens
aaatctgttattgtt

SEQ ID NO: 290543 - DNA, 15 bp, Homo sapiens
caaatctgttattgt

SEQ ID NO: 290544 - DNA, 15 bp, Homo sapiens
tcaaatctgttattg

SEQ ID NO: 290545 - DNA, 15 bp, Homo sapiens
atcaaatctgttatt

SEQ ID NO: 290546 - DNA, 15 bp, Homo sapiens
tatcaaatctgttat

SEQ ID NO: 290547 - DNA, 15 bp, Homo sapiens
ttatcaaatctgtta

SEQ ID NO: 290548 - DNA, 15 bp, Homo sapiens
tttatcaaatctgtt

SEQ ID NO: 290549 - DNA, 15 bp, Homo sapiens
atttatcaaatctgt

SEQ ID NO: 290550 - DNA, 15 bp, Homo sapiens
tatttatcaaatctg

SEQ ID NO: 290551 - DNA, 15 bp, Homo sapiens
atatttatcaaatct

SEQ ID NO: 290552 - DNA, 15 bp, Homo sapiens
aatatttatcaaatc

SEQ ID NO: 290553 - DNA, 15 bp, Homo sapiens
aaatatttatcaaat

SEQ ID NO: 290554 - DNA, 15 bp, Homo sapiens
caaatatttatcaaa

SEQ ID NO: 290555 - DNA, 15 bp, Homo sapiens
tcaaatatttatcaa

SEQ ID NO: 290556 - DNA, 15 bp, Homo sapiens
atcaaatatttatca

SEQ ID NO: 290557 - DNA, 15 bp, Homo sapiens
catcaaatatttatc

SEQ ID NO: 290558 - DNA, 15 bp, Homo sapiens
tcatcaaatatttat

SEQ ID NO: 290559 - DNA, 15 bp, Homo sapiens
ttcatcaaatattta

SEQ ID NO: 290560 - DNA, 15 bp, Homo sapiens
attcatcaaatattt

SEQ ID NO: 290561 - DNA, 15 bp, Homo sapiens
aattcatcaaatatt

SEQ ID NO: 290562 - DNA, 15 bp, Homo sapiens
gaattcatcaaatat

SEQ ID NO: 290563 - DNA, 15 bp, Homo sapiens
tgaattcatcaaata

SEQ ID NO: 290564 - DNA, 15 bp, Homo sapiens
atgaattcatcaaat

SEQ ID NO: 290565 - DNA, 15 bp, Homo sapiens
tatgaattcatcaaa

SEQ ID NO: 290566 - DNA, 15 bp, Homo sapiens
gtatgaattcatcaa

SEQ ID NO: 290567 - DNA, 15 bp, Homo sapiens
agtatgaattcatca

SEQ ID NO: 290568 - DNA, 15 bp, Homo sapiens
aagtatgaattcatc

SEQ ID NO: 290569 - DNA, 15 bp, Homo sapiens
taagtatgaattcat

SEQ ID NO: 290570 - DNA, 15 bp, Homo sapiens
ctaagtatgaattca

SEQ ID NO: 290571 - DNA, 15 bp, Homo sapiens
tctaagtatgaattc

SEQ ID NO: 290572 - DNA, 15 bp, Homo sapiens
ttctaagtatgaatt

SEQ ID NO: 290573 - DNA, 15 bp, Homo sapiens
attctaagtatgaat

SEQ ID NO: 290574 - DNA, 15 bp, Homo sapiens
cattctaagtatgaa

SEQ ID NO: 290575 - DNA, 15 bp, Homo sapiens
acattctaagtatga

SEQ ID NO: 290576 - DNA, 15 bp, Homo sapiens
aacattctaagtatg

SEQ ID NO: 290577 - DNA, 15 bp, Homo sapiens
caacattctaagtat

SEQ ID NO: 290578 - DNA, 15 bp, Homo sapiens
acaacattctaagta

SEQ ID NO: 290579 - DNA, 15 bp, Homo sapiens
aacaacattctaagt

SEQ ID NO: 290580 - DNA, 15 bp, Homo sapiens
gaacaacattctaag

SEQ ID NO: 290581 - DNA, 15 bp, Homo sapiens
agaacaacattctaa

SEQ ID NO: 290582 - DNA, 15 bp, Homo sapiens
aagaacaacattcta

SEQ ID NO: 290583 - DNA, 15 bp, Homo sapiens
caagaacaacattct

SEQ ID NO: 290584 - DNA, 15 bp, Homo sapiens
tcaagaacaacattc

SEQ ID NO: 290585 - DNA, 15 bp, Homo sapiens
ctcaagaacaacatt

SEQ ID NO: 290586 - DNA, 15 bp, Homo sapiens
cctcaagaacaacat

SEQ ID NO: 290587 - DNA, 15 bp, Homo sapiens
gcctcaagaacaaca

SEQ ID NO: 290588 - DNA, 15 bp, Homo sapiens
tgcctcaagaacaac

SEQ ID NO: 290589 - DNA, 15 bp, Homo sapiens
atgcctcaagaacaa

SEQ ID NO: 290590 - DNA, 15 bp, Homo sapiens
aatgcctcaagaaca

SEQ ID NO: 290591 - DNA, 15 bp, Homo sapiens
aaatgcctcaagaac

SEQ ID NO: 290592 - DNA, 15 bp, Homo sapiens
gaaatgcctcaagaa

SEQ ID NO: 290593 - DNA, 15 bp, Homo sapiens
agaaatgcctcaaga

SEQ ID NO: 290594 - DNA, 15 bp, Homo sapiens
cagaaatgcctcaag

SEQ ID NO: 290595 - DNA, 15 bp, Homo sapiens
tcagaaatgcctcaa

SEQ ID NO: 290596 - DNA, 15 bp, Homo sapiens
ttcagaaatgcctca

SEQ ID NO: 290597 - DNA, 15 bp, Homo sapiens
cttcagaaatgcctc

SEQ ID NO: 290598 - DNA, 15 bp, Homo sapiens
tcttcagaaatgcct

SEQ ID NO: 290599 - DNA, 15 bp, Homo sapiens
ttcttcagaaatgcc

SEQ ID NO: 290600 - DNA, 15 bp, Homo sapiens
cttcttcagaaatgc

SEQ ID NO: 290601 - DNA, 15 bp, Homo sapiens
tcttcttcagaaatg

SEQ ID NO: 290602 - DNA, 15 bp, Homo sapiens
atcttcttcagaaat

SEQ ID NO: 290603 - DNA, 15 bp, Homo sapiens
tatcttcttcagaaa

SEQ ID NO: 290604 - DNA, 15 bp, Homo sapiens
atatcttcttcagaa

SEQ ID NO: 290605 - DNA, 15 bp, Homo sapiens
gatatcttcttcaga

SEQ ID NO: 290606 - DNA, 15 bp, Homo sapiens
agatatcttcttcag

SEQ ID NO: 290607 - DNA, 15 bp, Homo sapiens
tagatatcttcttca

SEQ ID NO: 290608 - DNA, 15 bp, Homo sapiens
ctagatatcttcttc

SEQ ID NO: 290609 - DNA, 15 bp, Homo sapiens
actagatatcttctt

SEQ ID NO: 290610 - DNA, 15 bp, Homo sapiens
tactagatatcttct

SEQ ID NO: 290611 - DNA, 15 bp, Homo sapiens
ttactagatatcttc

SEQ ID NO: 290612 - DNA, 15 bp, Homo sapiens
cttactagatatctt

SEQ ID NO: 290613 - DNA, 15 bp, Homo sapiens
gcttactagatatct

SEQ ID NO: 290614 - DNA, 15 bp, Homo sapiens
tgcttactagatatc

SEQ ID NO: 290615 - DNA, 15 bp, Homo sapiens
ctgcttactagatat

SEQ ID NO: 290616 - DNA, 15 bp, Homo sapiens
actgcttactagata

SEQ ID NO: 290617 - DNA, 15 bp, Homo sapiens
tactgcttactagat

SEQ ID NO: 290618 - DNA, 15 bp, Homo sapiens
ctactgcttactaga

SEQ ID NO: 290619 - DNA, 15 bp, Homo sapiens
cctactgcttactag

SEQ ID NO: 290620 - DNA, 15 bp, Homo sapiens
tcctactgcttacta

SEQ ID NO: 290621 - DNA, 15 bp, Homo sapiens
atcctactgcttact

SEQ ID NO: 290622 - DNA, 15 bp, Homo sapiens
tatcctactgcttac

SEQ ID NO: 290623 - DNA, 15 bp, Homo sapiens
ctatcctactgctta

SEQ ID NO: 290624 - DNA, 15 bp, Homo sapiens
gctatcctactgctt

SEQ ID NO: 290625 - DNA, 15 bp, Homo sapiens
ggctatcctactgct

SEQ ID NO: 290626 - DNA, 15 bp, Homo sapiens
aggctatcctactgc

SEQ ID NO: 290627 - DNA, 15 bp, Homo sapiens
aaggctatcctactg

SEQ ID NO: 290628 - DNA, 15 bp, Homo sapiens
gaaggctatcctact

SEQ ID NO: 290629 - DNA, 15 bp, Homo sapiens
agaaggctatcctac

SEQ ID NO: 290630 - DNA, 15 bp, Homo sapiens
tagaaggctatccta

SEQ ID NO: 290631 - DNA, 15 bp, Homo sapiens
atagaaggctatcct

SEQ ID NO: 290632 - DNA, 15 bp, Homo sapiens
tatagaaggctatcc

SEQ ID NO: 290633 - DNA, 15 bp, Homo sapiens
ctatagaaggctatc

SEQ ID NO: 290634 - DNA, 15 bp, Homo sapiens
tctatagaaggctat

SEQ ID NO: 290635 - DNA, 15 bp, Homo sapiens
atctatagaaggcta

SEQ ID NO: 290636 - DNA, 15 bp, Homo sapiens
aatctatagaaggct

SEQ ID NO: 290637 - DNA, 15 bp, Homo sapiens
aaatctatagaaggc

SEQ ID NO: 290638 - DNA, 15 bp, Homo sapiens
caaatctatagaagg

SEQ ID NO: 290639 - DNA, 15 bp, Homo sapiens
ccaaatctatagaag

SEQ ID NO: 290640 - DNA, 15 bp, Homo sapiens
cccaaatctatagaa

SEQ ID NO: 290641 - DNA, 15 bp, Homo sapiens
tcccaaatctataga

SEQ ID NO: 290642 - DNA, 15 bp, Homo sapiens
ttcccaaatctatag

SEQ ID NO: 290643 - DNA, 15 bp, Homo sapiens
attcccaaatctata

SEQ ID NO: 290644 - DNA, 15 bp, Homo sapiens
gattcccaaatctat

SEQ ID NO: 290645 - DNA, 15 bp, Homo sapiens
tgattcccaaatcta

SEQ ID NO: 290646 - DNA, 15 bp, Homo sapiens
atgattcccaaatct

SEQ ID NO: 290647 - DNA, 15 bp, Homo sapiens
gatgattcccaaatc

SEQ ID NO: 290648 - DNA, 15 bp, Homo sapiens
tgatgattcccaaat

SEQ ID NO: 290649 - DNA, 15 bp, Homo sapiens
ctgatgattcccaaa

SEQ ID NO: 290650 - DNA, 15 bp, Homo sapiens
cctgatgattcccaa

SEQ ID NO: 290651 - DNA, 15 bp, Homo sapiens
ccctgatgattccca

SEQ ID NO: 290652 - DNA, 15 bp, Homo sapiens
cccctgatgattccc

SEQ ID NO: 290653 - DNA, 15 bp, Homo sapiens
tcccctgatgattcc

SEQ ID NO: 290654 - DNA, 15 bp, Homo sapiens
ctcccctgatgattc

SEQ ID NO: 290655 - DNA, 15 bp, Homo sapiens
actcccctgatgatt

SEQ ID NO: 290656 - DNA, 15 bp, Homo sapiens
aactcccctgatgat

SEQ ID NO: 290657 - DNA, 15 bp, Homo sapiens
taactcccctgatga

SEQ ID NO: 290658 - DNA, 15 bp, Homo sapiens
ttaactcccctgatg

SEQ ID NO: 290659 - DNA, 15 bp, Homo sapiens
tttaactcccctgat

SEQ ID NO: 290660 - DNA, 15 bp, Homo sapiens
gtttaactcccctga

SEQ ID NO: 290661 - DNA, 15 bp, Homo sapiens
ggtttaactcccctg

SEQ ID NO: 290662 - DNA, 15 bp, Homo sapiens
gggtttaactcccct

SEQ ID NO: 290663 - DNA, 15 bp, Homo sapiens
tgggtttaactcccc

SEQ ID NO: 290664 - DNA, 15 bp, Homo sapiens
atgggtttaactccc

SEQ ID NO: 290665 - DNA, 15 bp, Homo sapiens
tatgggtttaactcc

SEQ ID NO: 290666 - DNA, 15 bp, Homo sapiens
ttatgggtttaactc

SEQ ID NO: 290667 - DNA, 15 bp, Homo sapiens
tttatgggtttaact

SEQ ID NO: 290668 - DNA, 15 bp, Homo sapiens
ttttatgggtttaac

SEQ ID NO: 290669 - DNA, 15 bp, Homo sapiens
tttttatgggtttaa

SEQ ID NO: 290670 - DNA, 15 bp, Homo sapiens
ttttttatgggttta

SEQ ID NO: 290671 - DNA, 15 bp, Homo sapiens
tttttttatgggttt

SEQ ID NO: 290672 - DNA, 15 bp, Homo sapiens
ttttttttatgggtt

SEQ ID NO: 290673 - DNA, 15 bp, Homo sapiens
tttttttttatgggt

SEQ ID NO: 290674 - DNA, 15 bp, Homo sapiens
atttttttttatggg

SEQ ID NO: 290675 - DNA, 15 bp, Homo sapiens
catttttttttatgg

SEQ ID NO: 290676 - DNA, 15 bp, Homo sapiens
tcatttttttttatg

SEQ ID NO: 290677 - DNA, 15 bp, Homo sapiens
ctcatttttttttat

SEQ ID NO: 290678 - DNA, 15 bp, Homo sapiens
tctcattttttttta

SEQ ID NO: 290679 - DNA, 15 bp, Homo sapiens
atctcattttttttt

SEQ ID NO: 290680 - DNA, 15 bp, Homo sapiens
aatctcatttttttt

SEQ ID NO: 290681 - DNA, 15 bp, Homo sapiens
caatctcattttttt

SEQ ID NO: 290682 - DNA, 15 bp, Homo sapiens
gcaatctcatttttt

SEQ ID NO: 290683 - DNA, 15 bp, Homo sapiens
agcaatctcattttt

SEQ ID NO: 290684 - DNA, 15 bp, Homo sapiens
aagcaatctcatttt

SEQ ID NO: 290685 - DNA, 15 bp, Homo sapiens
caagcaatctcattt

SEQ ID NO: 290686 - DNA, 15 bp, Homo sapiens
tcaagcaatctcatt

SEQ ID NO: 290687 - DNA, 15 bp, Homo sapiens
ttcaagcaatctcat

SEQ ID NO: 290688 - DNA, 15 bp, Homo sapiens
cttcaagcaatctca

SEQ ID NO: 290689 - DNA, 15 bp, Homo sapiens
ccttcaagcaatctc

SEQ ID NO: 290690 - DNA, 15 bp, Homo sapiens
cccttcaagcaatct

SEQ ID NO: 290691 - DNA, 15 bp, Homo sapiens
tcccttcaagcaatc

SEQ ID NO: 290692 - DNA, 15 bp, Homo sapiens
ctcccttcaagcaat

SEQ ID NO: 290693 - DNA, 15 bp, Homo sapiens
cctcccttcaagcaa

SEQ ID NO: 290694 - DNA, 15 bp, Homo sapiens
ccctcccttcaagca

SEQ ID NO: 290695 - DNA, 15 bp, Homo sapiens
accctcccttcaagc

SEQ ID NO: 290696 - DNA, 15 bp, Homo sapiens
caccctcccttcaag

SEQ ID NO: 290697 - DNA, 15 bp, Homo sapiens
gcaccctcccttcaa

SEQ ID NO: 290698 - DNA, 15 bp, Homo sapiens
tgcaccctcccttca

SEQ ID NO: 290699 - DNA, 15 bp, Homo sapiens
atgcaccctcccttc

SEQ ID NO: 290700 - DNA, 15 bp, Homo sapiens
tatgcaccctccctt

SEQ ID NO: 290701 - DNA, 15 bp, Homo sapiens
ttatgcaccctccct

SEQ ID NO: 290702 - DNA, 15 bp, Homo sapiens
attatgcaccctccc

SEQ ID NO: 290703 - DNA, 15 bp, Homo sapiens
cattatgcaccctcc

SEQ ID NO: 290704 - DNA, 15 bp, Homo sapiens
ccattatgcaccctc

SEQ ID NO: 290705 - DNA, 15 bp, Homo sapiens
gccattatgcaccct

SEQ ID NO: 290706 - DNA, 15 bp, Homo sapiens
tgccattatgcaccc

SEQ ID NO: 290707 - DNA, 15 bp, Homo sapiens
ttgccattatgcacc

SEQ ID NO: 290708 - DNA, 15 bp, Homo sapiens
cttgccattatgcac

SEQ ID NO: 290709 - DNA, 15 bp, Homo sapiens
tcttgccattatgca

SEQ ID NO: 290710 - DNA, 15 bp, Homo sapiens
ctcttgccattatgc

SEQ ID NO: 290711 - DNA, 15 bp, Homo sapiens
actcttgccattatg

SEQ ID NO: 290712 - DNA, 15 bp, Homo sapiens
cactcttgccattat

SEQ ID NO: 290713 - DNA, 15 bp, Homo sapiens
ccactcttgccatta

SEQ ID NO: 290714 - DNA, 15 bp, Homo sapiens
cccactcttgccatt

SEQ ID NO: 290715 - DNA, 15 bp, Homo sapiens
acccactcttgccat

SEQ ID NO: 290716 - DNA, 15 bp, Homo sapiens
cacccactcttgcca

SEQ ID NO: 290717 - DNA, 15 bp, Homo sapiens
ccacccactcttgcc

SEQ ID NO: 290718 - DNA, 15 bp, Homo sapiens
gccacccactcttgc

SEQ ID NO: 290719 - DNA, 15 bp, Homo sapiens
agccacccactcttg

SEQ ID NO: 290720 - DNA, 15 bp, Homo sapiens
tagccacccactctt

SEQ ID NO: 290721 - DNA, 15 bp, Homo sapiens
ttagccacccactct

SEQ ID NO: 290722 - DNA, 15 bp, Homo sapiens
cttagccacccactc

SEQ ID NO: 290723 - DNA, 15 bp, Homo sapiens
ccttagccacccact

SEQ ID NO: 290724 - DNA, 15 bp, Homo sapiens
cccttagccacccac

SEQ ID NO: 290725 - DNA, 15 bp, Homo sapiens
gcccttagccaccca

SEQ ID NO: 290726 - DNA, 15 bp, Homo sapiens
agcccttagccaccc

SEQ ID NO: 290727 - DNA, 15 bp, Homo sapiens
cagcccttagccacc

SEQ ID NO: 290728 - DNA, 15 bp, Homo sapiens
tcagcccttagccac

SEQ ID NO: 290729 - DNA, 15 bp, Homo sapiens
ttcagcccttagcca

SEQ ID NO: 290730 - DNA, 15 bp, Homo sapiens
cttcagcccttagcc

SEQ ID NO: 290731 - DNA, 15 bp, Homo sapiens
gcttcagcccttagc

SEQ ID NO: 290732 - DNA, 15 bp, Homo sapiens
ggcttcagcccttag

SEQ ID NO: 290733 - DNA, 15 bp, Homo sapiens
aggcttcagccctta

SEQ ID NO: 290734 - DNA, 15 bp, Homo sapiens
taggcttcagccctt

SEQ ID NO: 290735 - DNA, 15 bp, Homo sapiens
ttaggcttcagccct

SEQ ID NO: 290736 - DNA, 15 bp, Homo sapiens
tttaggcttcagccc

SEQ ID NO: 290737 - DNA, 15 bp, Homo sapiens
ctttaggcttcagcc

SEQ ID NO: 290738 - DNA, 15 bp, Homo sapiens
cctttaggcttcagc

SEQ ID NO: 290739 - DNA, 15 bp, Homo sapiens
tcctttaggcttcag

SEQ ID NO: 290740 - DNA, 15 bp, Homo sapiens
atcctttaggcttca

SEQ ID NO: 290741 - DNA, 15 bp, Homo sapiens
catcctttaggcttc

SEQ ID NO: 290742 - DNA, 15 bp, Homo sapiens
gcatcctttaggctt

SEQ ID NO: 290743 - DNA, 15 bp, Homo sapiens
agcatcctttaggct

SEQ ID NO: 290744 - DNA, 15 bp, Homo sapiens
tagcatcctttaggc

SEQ ID NO: 290745 - DNA, 15 bp, Homo sapiens
ctagcatcctttagg

SEQ ID NO: 290746 - DNA, 15 bp, Homo sapiens
gctagcatcctttag

SEQ ID NO: 290747 - DNA, 15 bp, Homo sapiens
tgctagcatccttta

SEQ ID NO: 290748 - DNA, 15 bp, Homo sapiens
atgctagcatccttt

SEQ ID NO: 290749 - DNA, 15 bp, Homo sapiens
aatgctagcatcctt

SEQ ID NO: 290750 - DNA, 15 bp, Homo sapiens
taatgctagcatcct

SEQ ID NO: 290751 - DNA, 15 bp, Homo sapiens
ttaatgctagcatcc

SEQ ID NO: 290752 - DNA, 15 bp, Homo sapiens
cttaatgctagcatc

SEQ ID NO: 290753 - DNA, 15 bp, Homo sapiens
ccttaatgctagcat

SEQ ID NO: 290754 - DNA, 15 bp, Homo sapiens
tccttaatgctagca

SEQ ID NO: 290755 - DNA, 15 bp, Homo sapiens
gtccttaatgctagc

SEQ ID NO: 290756 - DNA, 15 bp, Homo sapiens
agtccttaatgctag

SEQ ID NO: 290757 - DNA, 15 bp, Homo sapiens
tagtccttaatgcta

SEQ ID NO: 290758 - DNA, 15 bp, Homo sapiens
ctagtccttaatgct

SEQ ID NO: 290759 - DNA, 15 bp, Homo sapiens
tctagtccttaatgc

SEQ ID NO: 290760 - DNA, 15 bp, Homo sapiens
gtctagtccttaatg

SEQ ID NO: 290761 - DNA, 15 bp, Homo sapiens
tgtctagtccttaat

SEQ ID NO: 290762 - DNA, 15 bp, Homo sapiens
ctgtctagtccttaa

SEQ ID NO: 290763 - DNA, 15 bp, Homo sapiens
tctgtctagtcctta

SEQ ID NO: 290764 - DNA, 15 bp, Homo sapiens
ttctgtctagtcctt

SEQ ID NO: 290765 - DNA, 15 bp, Homo sapiens
tttctgtctagtcct

SEQ ID NO: 290766 - DNA, 15 bp, Homo sapiens
atttctgtctagtcc

SEQ ID NO: 290767 - DNA, 15 bp, Homo sapiens
aatttctgtctagtc

SEQ ID NO: 290768 - DNA, 15 bp, Homo sapiens
caatttctgtctagt

SEQ ID NO: 290769 - DNA, 15 bp, Homo sapiens
acaatttctgtctag

SEQ ID NO: 290770 - DNA, 15 bp, Homo sapiens
aacaatttctgtcta

SEQ ID NO: 290771 - DNA, 15 bp, Homo sapiens
taacaatttctgtct

SEQ ID NO: 290772 - DNA, 15 bp, Homo sapiens
ctaacaatttctgtc

SEQ ID NO: 290773 - DNA, 15 bp, Homo sapiens
cctaacaatttctgt

SEQ ID NO: 290774 - DNA, 15 bp, Homo sapiens
acctaacaatttctg

SEQ ID NO: 290775 - DNA, 15 bp, Homo sapiens
aacctaacaatttct

SEQ ID NO: 290776 - DNA, 15 bp, Homo sapiens
gaacctaacaatttc

SEQ ID NO: 290777 - DNA, 15 bp, Homo sapiens
agaacctaacaattt

SEQ ID NO: 290778 - DNA, 15 bp, Homo sapiens
tagaacctaacaatt

SEQ ID NO: 290779 - DNA, 15 bp, Homo sapiens
ctagaacctaacaat

SEQ ID NO: 290780 - DNA, 15 bp, Homo sapiens
tctagaacctaacaa

SEQ ID NO: 290781 - DNA, 15 bp, Homo sapiens
ctctagaacctaaca

SEQ ID NO: 290782 - DNA, 15 bp, Homo sapiens
gctctagaacctaac

SEQ ID NO: 290783 - DNA, 15 bp, Homo sapiens
tgctctagaacctaa

SEQ ID NO: 290784 - DNA, 15 bp, Homo sapiens
ctgctctagaaccta

SEQ ID NO: 290785 - DNA, 15 bp, Homo sapiens
cctgctctagaacct

SEQ ID NO: 290786 - DNA, 15 bp, Homo sapiens
ccctgctctagaacc

SEQ ID NO: 290787 - DNA, 15 bp, Homo sapiens
cccctgctctagaac

SEQ ID NO: 290788 - DNA, 15 bp, Homo sapiens
acccctgctctagaa

SEQ ID NO: 290789 - DNA, 15 bp, Homo sapiens
gacccctgctctaga

SEQ ID NO: 290790 - DNA, 15 bp, Homo sapiens
ggacccctgctctag

SEQ ID NO: 290791 - DNA, 15 bp, Homo sapiens
gggacccctgctcta

SEQ ID NO: 290792 - DNA, 15 bp, Homo sapiens
ggggacccctgctct

SEQ ID NO: 290793 - DNA, 15 bp, Homo sapiens
tggggacccctgctc

SEQ ID NO: 290794 - DNA, 15 bp, Homo sapiens
ttggggacccctgct

SEQ ID NO: 290795 - DNA, 15 bp, Homo sapiens
attggggacccctgc

SEQ ID NO: 290796 - DNA, 15 bp, Homo sapiens
aattggggacccctg

SEQ ID NO: 290797 - DNA, 15 bp, Homo sapiens
gaattggggacccct

SEQ ID NO: 290798 - DNA, 15 bp, Homo sapiens
ggaattggggacccc

SEQ ID NO: 290799 - DNA, 15 bp, Homo sapiens
gggaattggggaccc

SEQ ID NO: 290800 - DNA, 15 bp, Homo sapiens
cgggaattggggacc

SEQ ID NO: 290801 - DNA, 15 bp, Homo sapiens
ccgggaattggggac

SEQ ID NO: 290802 - DNA, 15 bp, Homo sapiens
cccgggaattgggga

SEQ ID NO: 290803 - DNA, 15 bp, Homo sapiens
gcccgggaattgggg

SEQ ID NO: 290804 - DNA, 15 bp, Homo sapiens
ggcccgggaattggg

SEQ ID NO: 290805 - DNA, 15 bp, Homo sapiens
tggcccgggaattgg

SEQ ID NO: 290806 - DNA, 15 bp, Homo sapiens
ctggcccgggaattg

SEQ ID NO: 290807 - DNA, 15 bp, Homo sapiens
tctggcccgggaatt

SEQ ID NO: 290808 - DNA, 15 bp, Homo sapiens
ctctggcccgggaat

SEQ ID NO: 290809 - DNA, 15 bp, Homo sapiens
tctctggcccgggaa

SEQ ID NO: 290810 - DNA, 15 bp, Homo sapiens
gtctctggcccggga

SEQ ID NO: 290811 - DNA, 15 bp, Homo sapiens
agtctctggcccggg

SEQ ID NO: 290812 - DNA, 15 bp, Homo sapiens
cagtctctggcccgg

SEQ ID NO: 290813 - DNA, 15 bp, Homo sapiens
ccagtctctggcccg

SEQ ID NO: 290814 - DNA, 15 bp, Homo sapiens
accagtctctggccc

SEQ ID NO: 290815 - DNA, 15 bp, Homo sapiens
gaccagtctctggcc

SEQ ID NO: 290816 - DNA, 15 bp, Homo sapiens
agaccagtctctggc

SEQ ID NO: 290817 - DNA, 15 bp, Homo sapiens
cagaccagtctctgg

SEQ ID NO: 290818 - DNA, 15 bp, Homo sapiens
acagaccagtctctg

SEQ ID NO: 290819 - DNA, 15 bp, Homo sapiens
cacagaccagtctct

SEQ ID NO: 290820 - DNA, 15 bp, Homo sapiens
acacagaccagtctc

SEQ ID NO: 290821 - DNA, 15 bp, Homo sapiens
gacacagaccagtct

SEQ ID NO: 290822 - DNA, 15 bp, Homo sapiens
ggacacagaccagtc

SEQ ID NO: 290823 - DNA, 15 bp, Homo sapiens
gggacacagaccagt

SEQ ID NO: 290824 - DNA, 15 bp, Homo sapiens
tgggacacagaccag

SEQ ID NO: 290825 - DNA, 15 bp, Homo sapiens
atgggacacagacca

SEQ ID NO: 290826 - DNA, 15 bp, Homo sapiens
aatgggacacagacc

SEQ ID NO: 290827 - DNA, 15 bp, Homo sapiens
taatgggacacagac

SEQ ID NO: 290828 - DNA, 15 bp, Homo sapiens
gtaatgggacacaga

SEQ ID NO: 290829 - DNA, 15 bp, Homo sapiens
cgtaatgggacacag

SEQ ID NO: 290830 - DNA, 15 bp, Homo sapiens
tcgtaatgggacaca

SEQ ID NO: 290831 - DNA, 15 bp, Homo sapiens
ttcgtaatgggacac

SEQ ID NO: 290832 - DNA, 15 bp, Homo sapiens
gttcgtaatgggaca

SEQ ID NO: 290833 - DNA, 15 bp, Homo sapiens
agttcgtaatgggac

SEQ ID NO: 290834 - DNA, 15 bp, Homo sapiens
cagttcgtaatggga

SEQ ID NO: 290835 - DNA, 15 bp, Homo sapiens
ccagttcgtaatggg

SEQ ID NO: 290836 - DNA, 15 bp, Homo sapiens
cccagttcgtaatgg

SEQ ID NO: 290837 - DNA, 15 bp, Homo sapiens
acccagttcgtaatg

SEQ ID NO: 290838 - DNA, 15 bp, Homo sapiens
cacccagttcgtaat

SEQ ID NO: 290839 - DNA, 15 bp, Homo sapiens
tcacccagttcgtaa

SEQ ID NO: 290840 - DNA, 15 bp, Homo sapiens
atcacccagttcgta

SEQ ID NO: 290841 - DNA, 15 bp, Homo sapiens
tatcacccagttcgt

SEQ ID NO: 290842 - DNA, 15 bp, Homo sapiens
gtatcacccagttcg

SEQ ID NO: 290843 - DNA, 15 bp, Homo sapiens
tgtatcacccagttc

SEQ ID NO: 290844 - DNA, 15 bp, Homo sapiens
ctgtatcacccagtt

SEQ ID NO: 290845 - DNA, 15 bp, Homo sapiens
gctgtatcacccagt

SEQ ID NO: 290846 - DNA, 15 bp, Homo sapiens
tgctgtatcacccag

SEQ ID NO: 290847 - DNA, 15 bp, Homo sapiens
ctgctgtatcaccca

SEQ ID NO: 290848 - DNA, 15 bp, Homo sapiens
cctgctgtatcaccc

SEQ ID NO: 290849 - DNA, 15 bp, Homo sapiens
tcctgctgtatcacc

SEQ ID NO: 290850 - DNA, 15 bp, Homo sapiens
ctcctgctgtatcac

SEQ ID NO: 290851 - DNA, 15 bp, Homo sapiens
cctcctgctgtatca

SEQ ID NO: 290852 - DNA, 15 bp, Homo sapiens
acctcctgctgtatc

SEQ ID NO: 290853 - DNA, 15 bp, Homo sapiens
cacctcctgctgtat

SEQ ID NO: 290854 - DNA, 15 bp, Homo sapiens
tcacctcctgctgta

SEQ ID NO: 290855 - DNA, 15 bp, Homo sapiens
ctcacctcctgctgt

SEQ ID NO: 290856 - DNA, 15 bp, Homo sapiens
actcacctcctgctg

SEQ ID NO: 290857 - DNA, 15 bp, Homo sapiens
cactcacctcctgct

SEQ ID NO: 290858 - DNA, 15 bp, Homo sapiens
ccactcacctcctgc

SEQ ID NO: 290859 - DNA, 15 bp, Homo sapiens
accactcacctcctg

SEQ ID NO: 290860 - DNA, 15 bp, Homo sapiens
taccactcacctcct

SEQ ID NO: 290861 - DNA, 15 bp, Homo sapiens
ctaccactcacctcc

SEQ ID NO: 290862 - DNA, 15 bp, Homo sapiens
tctaccactcacctc

SEQ ID NO: 290863 - DNA, 15 bp, Homo sapiens
gtctaccactcacct

SEQ ID NO: 290864 - DNA, 15 bp, Homo sapiens
tgtctaccactcacc

SEQ ID NO: 290865 - DNA, 15 bp, Homo sapiens
ctgtctaccactcac

SEQ ID NO: 290866 - DNA, 15 bp, Homo sapiens
cctgtctaccactca

SEQ ID NO: 290867 - DNA, 15 bp, Homo sapiens
gcctgtctaccactc

SEQ ID NO: 290868 - DNA, 15 bp, Homo sapiens
tgcctgtctaccact

SEQ ID NO: 290869 - DNA, 15 bp, Homo sapiens
ttgcctgtctaccac

SEQ ID NO: 290870 - DNA, 15 bp, Homo sapiens
cttgcctgtctacca

SEQ ID NO: 290871 - DNA, 15 bp, Homo sapiens
acttgcctgtctacc

SEQ ID NO: 290872 - DNA, 15 bp, Homo sapiens
cacttgcctgtctac

SEQ ID NO: 290873 - DNA, 15 bp, Homo sapiens
tcacttgcctgtcta

SEQ ID NO: 290874 - DNA, 15 bp, Homo sapiens
ctcacttgcctgtct

SEQ ID NO: 290875 - DNA, 15 bp, Homo sapiens
gctcacttgcctgtc

SEQ ID NO: 290876 - DNA, 15 bp, Homo sapiens
tgctcacttgcctgt

SEQ ID NO: 290877 - DNA, 15 bp, Homo sapiens
atgctcacttgcctg

SEQ ID NO: 290878 - DNA, 15 bp, Homo sapiens
aatgctcacttgcct

SEQ ID NO: 290879 - DNA, 15 bp, Homo sapiens
taatgctcacttgcc

SEQ ID NO: 290880 - DNA, 15 bp, Homo sapiens
gtaatgctcacttgc

SEQ ID NO: 290881 - DNA, 15 bp, Homo sapiens
agtaatgctcacttg

SEQ ID NO: 290882 - DNA, 15 bp, Homo sapiens
cagtaatgctcactt

SEQ ID NO: 290883 - DNA, 15 bp, Homo sapiens
gcagtaatgctcact

SEQ ID NO: 290884 - DNA, 15 bp, Homo sapiens
ggcagtaatgctcac

SEQ ID NO: 290885 - DNA, 15 bp, Homo sapiens
aggcagtaatgctca

SEQ ID NO: 290886 - DNA, 15 bp, Homo sapiens
caggcagtaatgctc

SEQ ID NO: 290887 - DNA, 15 bp, Homo sapiens
tcaggcagtaatgct

SEQ ID NO: 290888 - DNA, 15 bp, Homo sapiens
ctcaggcagtaatgc

SEQ ID NO: 290889 - DNA, 15 bp, Homo sapiens
tctcaggcagtaatg

SEQ ID NO: 290890 - DNA, 15 bp, Homo sapiens
atctcaggcagtaat

SEQ ID NO: 290891 - DNA, 15 bp, Homo sapiens
gatctcaggcagtaa

SEQ ID NO: 290892 - DNA, 15 bp, Homo sapiens
agatctcaggcagta

SEQ ID NO: 290893 - DNA, 15 bp, Homo sapiens
tagatctcaggcagt

SEQ ID NO: 290894 - DNA, 15 bp, Homo sapiens
gtagatctcaggcag

SEQ ID NO: 290895 - DNA, 15 bp, Homo sapiens
ggtagatctcaggca

SEQ ID NO: 290896 - DNA, 15 bp, Homo sapiens
aggtagatctcaggc

SEQ ID NO: 290897 - DNA, 15 bp, Homo sapiens
gaggtagatctcagg

SEQ ID NO: 290898 - DNA, 15 bp, Homo sapiens
ggaggtagatctcag

SEQ ID NO: 290899 - DNA, 15 bp, Homo sapiens
aggaggtagatctca

SEQ ID NO: 290900 - DNA, 15 bp, Homo sapiens
caggaggtagatctc

SEQ ID NO: 290901 - DNA, 15 bp, Homo sapiens
acaggaggtagatct

SEQ ID NO: 290902 - DNA, 15 bp, Homo sapiens
gacaggaggtagatc

SEQ ID NO: 290903 - DNA, 15 bp, Homo sapiens
tgacaggaggtagat

SEQ ID NO: 290904 - DNA, 15 bp, Homo sapiens
ctgacaggaggtaga

SEQ ID NO: 290905 - DNA, 15 bp, Homo sapiens
tctgacaggaggtag

SEQ ID NO: 290906 - DNA, 15 bp, Homo sapiens
atctgacaggaggta

SEQ ID NO: 290907 - DNA, 15 bp, Homo sapiens
gatctgacaggaggt

SEQ ID NO: 290908 - DNA, 15 bp, Homo sapiens
tgatctgacaggagg

SEQ ID NO: 290909 - DNA, 15 bp, Homo sapiens
ctgatctgacaggag

SEQ ID NO: 290910 - DNA, 15 bp, Homo sapiens
gctgatctgacagga

SEQ ID NO: 290911 - DNA, 15 bp, Homo sapiens
tgctgatctgacagg

SEQ ID NO: 290912 - DNA, 15 bp, Homo sapiens
ctgctgatctgacag

SEQ ID NO: 290913 - DNA, 15 bp, Homo sapiens
actgctgatctgaca

SEQ ID NO: 290914 - DNA, 15 bp, Homo sapiens
cactgctgatctgac

SEQ ID NO: 290915 - DNA, 15 bp, Homo sapiens
ccactgctgatctga

SEQ ID NO: 290916 - DNA, 15 bp, Homo sapiens
tccactgctgatctg

SEQ ID NO: 290917 - DNA, 15 bp, Homo sapiens
ttccactgctgatct

SEQ ID NO: 290918 - DNA, 15 bp, Homo sapiens
attccactgctgatc

SEQ ID NO: 290919 - DNA, 15 bp, Homo sapiens
aattccactgctgat

SEQ ID NO: 290920 - DNA, 15 bp, Homo sapiens
taattccactgctga

SEQ ID NO: 290921 - DNA, 15 bp, Homo sapiens
ctaattccactgctg

SEQ ID NO: 290922 - DNA, 15 bp, Homo sapiens
tctaattccactgct

SEQ ID NO: 290923 - DNA, 15 bp, Homo sapiens
atctaattccactgc

SEQ ID NO: 290924 - DNA, 15 bp, Homo sapiens
aatctaattccactg

SEQ ID NO: 290925 - DNA, 15 bp, Homo sapiens
gaatctaattccact

SEQ ID NO: 290926 - DNA, 15 bp, Homo sapiens
agaatctaattccac

SEQ ID NO: 290927 - DNA, 15 bp, Homo sapiens
gagaatctaattcca

SEQ ID NO: 290928 - DNA, 15 bp, Homo sapiens
tgagaatctaattcc

SEQ ID NO: 290929 - DNA, 15 bp, Homo sapiens
atgagaatctaattc

SEQ ID NO: 290930 - DNA, 15 bp, Homo sapiens
tatgagaatctaatt

SEQ ID NO: 290931 - DNA, 15 bp, Homo sapiens
ctatgagaatctaat

SEQ ID NO: 290932 - DNA, 15 bp, Homo sapiens
cctatgagaatctaa

SEQ ID NO: 290933 - DNA, 15 bp, Homo sapiens
acctatgagaatcta

SEQ ID NO: 290934 - DNA, 15 bp, Homo sapiens
cacctatgagaatct

SEQ ID NO: 290935 - DNA, 15 bp, Homo sapiens
gcacctatgagaatc

SEQ ID NO: 290936 - DNA, 15 bp, Homo sapiens
tgcacctatgagaat

SEQ ID NO: 290937 - DNA, 15 bp, Homo sapiens
atgcacctatgagaa

SEQ ID NO: 290938 - DNA, 15 bp, Homo sapiens
catgcacctatgaga

SEQ ID NO: 290939 - DNA, 15 bp, Homo sapiens
tcatgcacctatgag

SEQ ID NO: 290940 - DNA, 15 bp, Homo sapiens
ttcatgcacctatga

SEQ ID NO: 290941 - DNA, 15 bp, Homo sapiens
gttcatgcacctatg

SEQ ID NO: 290942 - DNA, 15 bp, Homo sapiens
ggttcatgcacctat

SEQ ID NO: 290943 - DNA, 15 bp, Homo sapiens
aggttcatgcaccta

SEQ ID NO: 290944 - DNA, 15 bp, Homo sapiens
aaggttcatgcacct

SEQ ID NO: 290945 - DNA, 15 bp, Homo sapiens
taaggttcatgcacc

SEQ ID NO: 290946 - DNA, 15 bp, Homo sapiens
ataaggttcatgcac

SEQ ID NO: 290947 - DNA, 15 bp, Homo sapiens
aataaggttcatgca

SEQ ID NO: 290948 - DNA, 15 bp, Homo sapiens
caataaggttcatgc

SEQ ID NO: 290949 - DNA, 15 bp, Homo sapiens
acaataaggttcatg

SEQ ID NO: 290950 - DNA, 15 bp, Homo sapiens
cacaataaggttcat

SEQ ID NO: 290951 - DNA, 15 bp, Homo sapiens
tcacaataaggttca

SEQ ID NO: 290952 - DNA, 15 bp, Homo sapiens
ttcacaataaggttc

SEQ ID NO: 290953 - DNA, 15 bp, Homo sapiens
gttcacaataaggtt

SEQ ID NO: 290954 - DNA, 15 bp, Homo sapiens
agttcacaataaggt

SEQ ID NO: 290955 - DNA, 15 bp, Homo sapiens
cagttcacaataagg

SEQ ID NO: 290956 - DNA, 15 bp, Homo sapiens
gcagttcacaataag

SEQ ID NO: 290957 - DNA, 15 bp, Homo sapiens
cgcagttcacaataa

SEQ ID NO: 290958 - DNA, 15 bp, Homo sapiens
gcgcagttcacaata

SEQ ID NO: 290959 - DNA, 15 bp, Homo sapiens
tgcgcagttcacaat

SEQ ID NO: 290960 - DNA, 15 bp, Homo sapiens
atgcgcagttcacaa

SEQ ID NO: 290961 - DNA, 15 bp, Homo sapiens
catgcgcagttcaca

SEQ ID NO: 290962 - DNA, 15 bp, Homo sapiens
acatgcgcagttcac

SEQ ID NO: 290963 - DNA, 15 bp, Homo sapiens
cacatgcgcagttca

SEQ ID NO: 290964 - DNA, 15 bp, Homo sapiens
tcacatgcgcagttc

SEQ ID NO: 290965 - DNA, 15 bp, Homo sapiens
ctcacatgcgcagtt

SEQ ID NO: 290966 - DNA, 15 bp, Homo sapiens
cctcacatgcgcagt

SEQ ID NO: 290967 - DNA, 15 bp, Homo sapiens
ccctcacatgcgcag

SEQ ID NO: 290968 - DNA, 15 bp, Homo sapiens
tccctcacatgcgca

SEQ ID NO: 290969 - DNA, 15 bp, Homo sapiens
atccctcacatgcgc

SEQ ID NO: 290970 - DNA, 15 bp, Homo sapiens
gatccctcacatgcg

SEQ ID NO: 290971 - DNA, 15 bp, Homo sapiens
agatccctcacatgc

SEQ ID NO: 290972 - DNA, 15 bp, Homo sapiens
tagatccctcacatg

SEQ ID NO: 290973 - DNA, 15 bp, Homo sapiens
ctagatccctcacat

SEQ ID NO: 290974 - DNA, 15 bp, Homo sapiens
tctagatccctcaca

SEQ ID NO: 290975 - DNA, 15 bp, Homo sapiens
atctagatccctcac

SEQ ID NO: 290976 - DNA, 15 bp, Homo sapiens
aatctagatccctca

SEQ ID NO: 290977 - DNA, 15 bp, Homo sapiens
caatctagatccctc

SEQ ID NO: 290978 - DNA, 15 bp, Homo sapiens
acaatctagatccct

SEQ ID NO: 290979 - DNA, 15 bp, Homo sapiens
tacaatctagatccc

SEQ ID NO: 290980 - DNA, 15 bp, Homo sapiens
atacaatctagatcc

SEQ ID NO: 290981 - DNA, 15 bp, Homo sapiens
catacaatctagatc

SEQ ID NO: 290982 - DNA, 15 bp, Homo sapiens
gcatacaatctagat

SEQ ID NO: 290983 - DNA, 15 bp, Homo sapiens
agcatacaatctaga

SEQ ID NO: 290984 - DNA, 15 bp, Homo sapiens
gagcatacaatctag

SEQ ID NO: 290985 - DNA, 15 bp, Homo sapiens
ggagcatacaatcta

SEQ ID NO: 290986 - DNA, 15 bp, Homo sapiens
aggagcatacaatct

SEQ ID NO: 290987 - DNA, 15 bp, Homo sapiens
aaggagcatacaatc

SEQ ID NO: 290988 - DNA, 15 bp, Homo sapiens
taaggagcatacaat

SEQ ID NO: 290989 - DNA, 15 bp, Homo sapiens
ataaggagcatacaa

SEQ ID NO: 290990 - DNA, 15 bp, Homo sapiens
cataaggagcataca

SEQ ID NO: 290991 - DNA, 15 bp, Homo sapiens
tcataaggagcatac

SEQ ID NO: 290992 - DNA, 15 bp, Homo sapiens
ctcataaggagcata

SEQ ID NO: 290993 - DNA, 15 bp, Homo sapiens
tctcataaggagcat

SEQ ID NO: 290994 - DNA, 15 bp, Homo sapiens
ttctcataaggagca

SEQ ID NO: 290995 - DNA, 15 bp, Homo sapiens
attctcataaggagc

SEQ ID NO: 290996 - DNA, 15 bp, Homo sapiens
aattctcataaggag

SEQ ID NO: 290997 - DNA, 15 bp, Homo sapiens
aaattctcataagga

SEQ ID NO: 290998 - DNA, 15 bp, Homo sapiens
taaattctcataagg

SEQ ID NO: 290999 - DNA, 15 bp, Homo sapiens
ttaaattctcataag

SEQ ID NO: 291000 - DNA, 15 bp, Homo sapiens
attaaattctcataa

SEQ ID NO: 291001 - DNA, 15 bp, Homo sapiens
cattaaattctcata

SEQ ID NO: 291002 - DNA, 15 bp, Homo sapiens
ccattaaattctcat

SEQ ID NO: 291003 - DNA, 15 bp, Homo sapiens
gccattaaattctca

SEQ ID NO: 291004 - DNA, 15 bp, Homo sapiens
agccattaaattctc

SEQ ID NO: 291005 - DNA, 15 bp, Homo sapiens
cagccattaaattct

SEQ ID NO: 291006 - DNA, 15 bp, Homo sapiens
tcagccattaaattc

SEQ ID NO: 291007 - DNA, 15 bp, Homo sapiens
atcagccattaaatt

SEQ ID NO: 291008 - DNA, 15 bp, Homo sapiens
catcagccattaaat

SEQ ID NO: 291009 - DNA, 15 bp, Homo sapiens
tcatcagccattaaa

SEQ ID NO: 291010 - DNA, 15 bp, Homo sapiens
atcatcagccattaa

SEQ ID NO: 291011 - DNA, 15 bp, Homo sapiens
aatcatcagccatta

SEQ ID NO: 291012 - DNA, 15 bp, Homo sapiens
aaatcatcagccatt

SEQ ID NO: 291013 - DNA, 15 bp, Homo sapiens
caaatcatcagccat

SEQ ID NO: 291014 - DNA, 15 bp, Homo sapiens
tcaaatcatcagcca

SEQ ID NO: 291015 - DNA, 15 bp, Homo sapiens
ctcaaatcatcagcc

SEQ ID NO: 291016 - DNA, 15 bp, Homo sapiens
cctcaaatcatcagc

SEQ ID NO: 291017 - DNA, 15 bp, Homo sapiens
acctcaaatcatcag

SEQ ID NO: 291018 - DNA, 15 bp, Homo sapiens
tacctcaaatcatca

SEQ ID NO: 291019 - DNA, 15 bp, Homo sapiens
ctacctcaaatcatc

SEQ ID NO: 291020 - DNA, 15 bp, Homo sapiens
tctacctcaaatcat

SEQ ID NO: 291021 - DNA, 15 bp, Homo sapiens
ttctacctcaaatca

SEQ ID NO: 291022 - DNA, 15 bp, Homo sapiens
gttctacctcaaatc

SEQ ID NO: 291023 - DNA, 15 bp, Homo sapiens
tgttctacctcaaat

SEQ ID NO: 291024 - DNA, 15 bp, Homo sapiens
ctgttctacctcaaa

SEQ ID NO: 291025 - DNA, 15 bp, Homo sapiens
actgttctacctcaa

SEQ ID NO: 291026 - DNA, 15 bp, Homo sapiens
aactgttctacctca

SEQ ID NO: 291027 - DNA, 15 bp, Homo sapiens
gaactgttctacctc

SEQ ID NO: 291028 - DNA, 15 bp, Homo sapiens
tgaactgttctacct

SEQ ID NO: 291029 - DNA, 15 bp, Homo sapiens
ttgaactgttctacc

SEQ ID NO: 291030 - DNA, 15 bp, Homo sapiens
tttgaactgttctac

SEQ ID NO: 291031 - DNA, 15 bp, Homo sapiens
ttttgaactgttcta

SEQ ID NO: 291032 - DNA, 15 bp, Homo sapiens
gttttgaactgttct

SEQ ID NO: 291033 - DNA, 15 bp, Homo sapiens
ggttttgaactgttc

SEQ ID NO: 291034 - DNA, 15 bp, Homo sapiens
tggttttgaactgtt

SEQ ID NO: 291035 - DNA, 15 bp, Homo sapiens
atggttttgaactgt

SEQ ID NO: 291036 - DNA, 15 bp, Homo sapiens
aatggttttgaactg

SEQ ID NO: 291037 - DNA, 15 bp, Homo sapiens
gaatggttttgaact

SEQ ID NO: 291038 - DNA, 15 bp, Homo sapiens
ggaatggttttgaac

SEQ ID NO: 291039 - DNA, 15 bp, Homo sapiens
gggaatggttttgaa

SEQ ID NO: 291040 - DNA, 15 bp, Homo sapiens
ggggaatggttttga

SEQ ID NO: 291041 - DNA, 15 bp, Homo sapiens
gggggaatggttttg

SEQ ID NO: 291042 - DNA, 15 bp, Homo sapiens
agggggaatggtttt

SEQ ID NO: 291043 - DNA, 15 bp, Homo sapiens
tagggggaatggttt

SEQ ID NO: 291044 - DNA, 15 bp, Homo sapiens
gtagggggaatggtt

SEQ ID NO: 291045 - DNA, 15 bp, Homo sapiens
agtagggggaatggt

SEQ ID NO: 291046 - DNA, 15 bp, Homo sapiens
gagtagggggaatgg

SEQ ID NO: 291047 - DNA, 15 bp, Homo sapiens
agagtagggggaatg

SEQ ID NO: 291048 - DNA, 15 bp, Homo sapiens
gagagtagggggaat

SEQ ID NO: 291049 - DNA, 15 bp, Homo sapiens
ggagagtagggggaa

SEQ ID NO: 291050 - DNA, 15 bp, Homo sapiens
tggagagtaggggga

SEQ ID NO: 291051 - DNA, 15 bp, Homo sapiens
atggagagtaggggg

SEQ ID NO: 291052 - DNA, 15 bp, Homo sapiens
catggagagtagggg

SEQ ID NO: 291053 - DNA, 15 bp, Homo sapiens
ccatggagagtaggg

SEQ ID NO: 291054 - DNA, 15 bp, Homo sapiens
accatggagagtagg

SEQ ID NO: 291055 - DNA, 15 bp, Homo sapiens
gaccatggagagtag

SEQ ID NO: 291056 - DNA, 15 bp, Homo sapiens
ggaccatggagagta

SEQ ID NO: 291057 - DNA, 15 bp, Homo sapiens
tggaccatggagagt

SEQ ID NO: 291058 - DNA, 15 bp, Homo sapiens
atggaccatggagag

SEQ ID NO: 291059 - DNA, 15 bp, Homo sapiens
catggaccatggaga

SEQ ID NO: 291060 - DNA, 15 bp, Homo sapiens
ccatggaccatggag

SEQ ID NO: 291061 - DNA, 15 bp, Homo sapiens
tccatggaccatgga

SEQ ID NO: 291062 - DNA, 15 bp, Homo sapiens
ttccatggaccatgg

SEQ ID NO: 291063 - DNA, 15 bp, Homo sapiens
tttccatggaccatg

SEQ ID NO: 291064 - DNA, 15 bp, Homo sapiens
ttttccatggaccat

SEQ ID NO: 291065 - DNA, 15 bp, Homo sapiens
tttttccatggacca

SEQ ID NO: 291066 - DNA, 15 bp, Homo sapiens
atttttccatggacc

SEQ ID NO: 291067 - DNA, 15 bp, Homo sapiens
aatttttccatggac

SEQ ID NO: 291068 - DNA, 15 bp, Homo sapiens
caatttttccatgga

SEQ ID NO: 291069 - DNA, 15 bp, Homo sapiens
acaatttttccatgg

SEQ ID NO: 291070 - DNA, 15 bp, Homo sapiens
gacaatttttccatg

SEQ ID NO: 291071 - DNA, 15 bp, Homo sapiens
agacaatttttccat

SEQ ID NO: 291072 - DNA, 15 bp, Homo sapiens
aagacaatttttcca

SEQ ID NO: 291073 - DNA, 15 bp, Homo sapiens
gaagacaatttttcc

SEQ ID NO: 291074 - DNA, 15 bp, Homo sapiens
ggaagacaatttttc

SEQ ID NO: 291075 - DNA, 15 bp, Homo sapiens
tggaagacaattttt

SEQ ID NO: 291076 - DNA, 15 bp, Homo sapiens
atggaagacaatttt

SEQ ID NO: 291077 - DNA, 15 bp, Homo sapiens
catggaagacaattt

SEQ ID NO: 291078 - DNA, 15 bp, Homo sapiens
tcatggaagacaatt

SEQ ID NO: 291079 - DNA, 15 bp, Homo sapiens
ttcatggaagacaat

SEQ ID NO: 291080 - DNA, 15 bp, Homo sapiens
tttcatggaagacaa

SEQ ID NO: 291081 - DNA, 15 bp, Homo sapiens
gtttcatggaagaca

SEQ ID NO: 291082 - DNA, 15 bp, Homo sapiens
ggtttcatggaagac

SEQ ID NO: 291083 - DNA, 15 bp, Homo sapiens
tggtttcatggaaga

SEQ ID NO: 291084 - DNA, 15 bp, Homo sapiens
ctggtttcatggaag

SEQ ID NO: 291085 - DNA, 15 bp, Homo sapiens
actggtttcatggaa

SEQ ID NO: 291086 - DNA, 15 bp, Homo sapiens
gactggtttcatgga

SEQ ID NO: 291087 - DNA, 15 bp, Homo sapiens
ggactggtttcatgg

SEQ ID NO: 291088 - DNA, 15 bp, Homo sapiens
gggactggtttcatg

SEQ ID NO: 291089 - DNA, 15 bp, Homo sapiens
agggactggtttcat

SEQ ID NO: 291090 - DNA, 15 bp, Homo sapiens
cagggactggtttca

SEQ ID NO: 291091 - DNA, 15 bp, Homo sapiens
acagggactggtttc

SEQ ID NO: 291092 - DNA, 15 bp, Homo sapiens
aacagggactggttt

SEQ ID NO: 291093 - DNA, 15 bp, Homo sapiens
caacagggactggtt

SEQ ID NO: 291094 - DNA, 15 bp, Homo sapiens
gcaacagggactggt

SEQ ID NO: 291095 - DNA, 15 bp, Homo sapiens
ggcaacagggactgg

SEQ ID NO: 291096 - DNA, 15 bp, Homo sapiens
tggcaacagggactg

SEQ ID NO: 291097 - DNA, 15 bp, Homo sapiens
ttggcaacagggact

SEQ ID NO: 291098 - DNA, 15 bp, Homo sapiens
tttggcaacagggac

SEQ ID NO: 291099 - DNA, 15 bp, Homo sapiens
ttttggcaacaggga

SEQ ID NO: 291100 - DNA, 15 bp, Homo sapiens
tttttggcaacaggg

SEQ ID NO: 291101 - DNA, 15 bp, Homo sapiens
ctttttggcaacagg

SEQ ID NO: 291102 - DNA, 15 bp, Homo sapiens
cctttttggcaacag

SEQ ID NO: 291103 - DNA, 15 bp, Homo sapiens
acctttttggcaaca

SEQ ID NO: 291104 - DNA, 15 bp, Homo sapiens
aacctttttggcaac

SEQ ID NO: 291105 - DNA, 15 bp, Homo sapiens
caacctttttggcaa

SEQ ID NO: 291106 - DNA, 15 bp, Homo sapiens
ccaacctttttggca

SEQ ID NO: 291107 - DNA, 15 bp, Homo sapiens
cccaacctttttggc

SEQ ID NO: 291108 - DNA, 15 bp, Homo sapiens
ccccaacctttttgg

SEQ ID NO: 291109 - DNA, 15 bp, Homo sapiens
tccccaacctttttg

SEQ ID NO: 291110 - DNA, 15 bp, Homo sapiens
gtccccaaccttttt

SEQ ID NO: 291111 - DNA, 15 bp, Homo sapiens
agtccccaacctttt

SEQ ID NO: 291112 - DNA, 15 bp, Homo sapiens
cagtccccaaccttt

SEQ ID NO: 291113 - DNA, 15 bp, Homo sapiens
gcagtccccaacctt

SEQ ID NO: 291114 - DNA, 15 bp, Homo sapiens
agcagtccccaacct

SEQ ID NO: 291115 - DNA, 15 bp, Homo sapiens
cagcagtccccaacc

SEQ ID NO: 291116 - DNA, 15 bp, Homo sapiens
acagcagtccccaac

SEQ ID NO: 291117 - DNA, 15 bp, Homo sapiens
aacagcagtccccaa

SEQ ID NO: 291118 - DNA, 15 bp, Homo sapiens
gaacagcagtcccca

SEQ ID NO: 291119 - DNA, 15 bp, Homo sapiens
agaacagcagtcccc

SEQ ID NO: 291120 - DNA, 15 bp, Homo sapiens
tagaacagcagtccc

SEQ ID NO: 291121 - DNA, 15 bp, Homo sapiens
ctagaacagcagtcc

SEQ ID NO: 291122 - DNA, 15 bp, Homo sapiens
tctagaacagcagtc

SEQ ID NO: 291123 - DNA, 15 bp, Homo sapiens
ctctagaacagcagt

SEQ ID NO: 291124 - DNA, 15 bp, Homo sapiens
tctctagaacagcag

SEQ ID NO: 291125 - DNA, 15 bp, Homo sapiens
ttctctagaacagca

SEQ ID NO: 291126 - DNA, 15 bp, Homo sapiens
attctctagaacagc

SEQ ID NO: 291127 - DNA, 15 bp, Homo sapiens
cattctctagaacag

SEQ ID NO: 291128 - DNA, 15 bp, Homo sapiens
ccattctctagaaca

SEQ ID NO: 291129 - DNA, 15 bp, Homo sapiens
cccattctctagaac

SEQ ID NO: 291130 - DNA, 15 bp, Homo sapiens
tcccattctctagaa

SEQ ID NO: 291131 - DNA, 15 bp, Homo sapiens
ttcccattctctaga

SEQ ID NO: 291132 - DNA, 15 bp, Homo sapiens
tttcccattctctag

SEQ ID NO: 291133 - DNA, 15 bp, Homo sapiens
ctttcccattctcta

SEQ ID NO: 291134 - DNA, 15 bp, Homo sapiens
actttcccattctct

SEQ ID NO: 291135 - DNA, 15 bp, Homo sapiens
tactttcccattctc

SEQ ID NO: 291136 - DNA, 15 bp, Homo sapiens
atactttcccattct

SEQ ID NO: 291137 - DNA, 15 bp, Homo sapiens
catactttcccattc

SEQ ID NO: 291138 - DNA, 15 bp, Homo sapiens
tcatactttcccatt

SEQ ID NO: 291139 - DNA, 15 bp, Homo sapiens
atcatactttcccat

SEQ ID NO: 291140 - DNA, 15 bp, Homo sapiens
aatcatactttccca

SEQ ID NO: 291141 - DNA, 15 bp, Homo sapiens
caatcatactttccc

SEQ ID NO: 291142 - DNA, 15 bp, Homo sapiens
ccaatcatactttcc

SEQ ID NO: 291143 - DNA, 15 bp, Homo sapiens
cccaatcatactttc

SEQ ID NO: 291144 - DNA, 15 bp, Homo sapiens
ccccaatcatacttt

SEQ ID NO: 291145 - DNA, 15 bp, Homo sapiens
tccccaatcatactt

SEQ ID NO: 291146 - DNA, 15 bp, Homo sapiens
ctccccaatcatact

SEQ ID NO: 291147 - DNA, 15 bp, Homo sapiens
actccccaatcatac

SEQ ID NO: 291148 - DNA, 15 bp, Homo sapiens
cactccccaatcata

SEQ ID NO: 291149 - DNA, 15 bp, Homo sapiens
gcactccccaatcat

SEQ ID NO: 291150 - DNA, 15 bp, Homo sapiens
tgcactccccaatca

SEQ ID NO: 291151 - DNA, 15 bp, Homo sapiens
ctgcactccccaatc

SEQ ID NO: 291152 - DNA, 15 bp, Homo sapiens
tctgcactccccaat

SEQ ID NO: 291153 - DNA, 15 bp, Homo sapiens
ctctgcactccccaa

SEQ ID NO: 291154 - DNA, 15 bp, Homo sapiens
tctctgcactcccca

SEQ ID NO: 291155 - DNA, 15 bp, Homo sapiens
atctctgcactcccc

SEQ ID NO: 291156 - DNA, 15 bp, Homo sapiens
aatctctgcactccc

SEQ ID NO: 291157 - DNA, 15 bp, Homo sapiens
caatctctgcactcc

SEQ ID NO: 291158 - DNA, 15 bp, Homo sapiens
tcaatctctgcactc

SEQ ID NO: 291159 - DNA, 15 bp, Homo sapiens
ttcaatctctgcact

SEQ ID NO: 291160 - DNA, 15 bp, Homo sapiens
cttcaatctctgcac

SEQ ID NO: 291161 - DNA, 15 bp, Homo sapiens
gcttcaatctctgca

SEQ ID NO: 291162 - DNA, 15 bp, Homo sapiens
cgcttcaatctctgc

SEQ ID NO: 291163 - DNA, 15 bp, Homo sapiens
tcgcttcaatctctg

SEQ ID NO: 291164 - DNA, 15 bp, Homo sapiens
ttcgcttcaatctct

SEQ ID NO: 291165 - DNA, 15 bp, Homo sapiens
cttcgcttcaatctc

SEQ ID NO: 291166 - DNA, 15 bp, Homo sapiens
tcttcgcttcaatct

SEQ ID NO: 291167 - DNA, 15 bp, Homo sapiens
ttcttcgcttcaatc

SEQ ID NO: 291168 - DNA, 15 bp, Homo sapiens
tttcttcgcttcaat

SEQ ID NO: 291169 - DNA, 15 bp, Homo sapiens
ctttcttcgcttcaa

SEQ ID NO: 291170 - DNA, 15 bp, Homo sapiens
gctttcttcgcttca

SEQ ID NO: 291171 - DNA, 15 bp, Homo sapiens
agctttcttcgcttc

SEQ ID NO: 291172 - DNA, 15 bp, Homo sapiens
cagctttcttcgctt

SEQ ID NO: 291173 - DNA, 15 bp, Homo sapiens
tcagctttcttcgct

SEQ ID NO: 291174 - DNA, 15 bp, Homo sapiens
ctcagctttcttcgc

SEQ ID NO: 291175 - DNA, 15 bp, Homo sapiens
cctcagctttcttcg

SEQ ID NO: 291176 - DNA, 15 bp, Homo sapiens
ccctcagctttcttc

SEQ ID NO: 291177 - DNA, 15 bp, Homo sapiens
tccctcagctttctt

SEQ ID NO: 291178 - DNA, 15 bp, Homo sapiens
ctccctcagctttct

SEQ ID NO: 291179 - DNA, 15 bp, Homo sapiens
cctccctcagctttc

SEQ ID NO: 291180 - DNA, 15 bp, Homo sapiens
ccctccctcagcttt

SEQ ID NO: 291181 - DNA, 15 bp, Homo sapiens
tccctccctcagctt

SEQ ID NO: 291182 - DNA, 15 bp, Homo sapiens
ctccctccctcagct

SEQ ID NO: 291183 - DNA, 15 bp, Homo sapiens
cctccctccctcagc

SEQ ID NO: 291184 - DNA, 15 bp, Homo sapiens
ccctccctccctcag

SEQ ID NO: 291185 - DNA, 15 bp, Homo sapiens
tccctccctccctca

SEQ ID NO: 291186 - DNA, 15 bp, Homo sapiens
ctccctccctccctc

SEQ ID NO: 291187 - DNA, 15 bp, Homo sapiens
actccctccctccct

SEQ ID NO: 291188 - DNA, 15 bp, Homo sapiens
aactccctccctccc

SEQ ID NO: 291189 - DNA, 15 bp, Homo sapiens
aaactccctccctcc

SEQ ID NO: 291190 - DNA, 15 bp, Homo sapiens
gaaactccctccctc

SEQ ID NO: 291191 - DNA, 15 bp, Homo sapiens
tgaaactccctccct

SEQ ID NO: 291192 - DNA, 15 bp, Homo sapiens
atgaaactccctccc

SEQ ID NO: 291193 - DNA, 15 bp, Homo sapiens
aatgaaactccctcc

SEQ ID NO: 291194 - DNA, 15 bp, Homo sapiens
taatgaaactccctc

SEQ ID NO: 291195 - DNA, 15 bp, Homo sapiens
ttaatgaaactccct

SEQ ID NO: 291196 - DNA, 15 bp, Homo sapiens
cttaatgaaactccc

SEQ ID NO: 291197 - DNA, 15 bp, Homo sapiens
tcttaatgaaactcc

SEQ ID NO: 291198 - DNA, 15 bp, Homo sapiens
ctcttaatgaaactc

SEQ ID NO: 291199 - DNA, 15 bp, Homo sapiens
gctcttaatgaaact

SEQ ID NO: 291200 - DNA, 15 bp, Homo sapiens
tgctcttaatgaaac

SEQ ID NO: 291201 - DNA, 15 bp, Homo sapiens
ttgctcttaatgaaa

SEQ ID NO: 291202 - DNA, 15 bp, Homo sapiens
cttgctcttaatgaa

SEQ ID NO: 291203 - DNA, 15 bp, Homo sapiens
acttgctcttaatga

SEQ ID NO: 291204 - DNA, 15 bp, Homo sapiens
tacttgctcttaatg

SEQ ID NO: 291205 - DNA, 15 bp, Homo sapiens
atacttgctcttaat

SEQ ID NO: 291206 - DNA, 15 bp, Homo sapiens
aatacttgctcttaa

SEQ ID NO: 291207 - DNA, 15 bp, Homo sapiens
aaatacttgctctta

SEQ ID NO: 291208 - DNA, 15 bp, Homo sapiens
gaaatacttgctctt

SEQ ID NO: 291209 - DNA, 15 bp, Homo sapiens
agaaatacttgctct

SEQ ID NO: 291210 - DNA, 15 bp, Homo sapiens
gagaaatacttgctc

SEQ ID NO: 291211 - DNA, 15 bp, Homo sapiens
agagaaatacttgct

SEQ ID NO: 291212 - DNA, 15 bp, Homo sapiens
tagagaaatacttgc

SEQ ID NO: 291213 - DNA, 15 bp, Homo sapiens
ttagagaaatacttg

SEQ ID NO: 291214 - DNA, 15 bp, Homo sapiens
gttagagaaatactt

SEQ ID NO: 291215 - DNA, 15 bp, Homo sapiens
tgttagagaaatact

SEQ ID NO: 291216 - DNA, 15 bp, Homo sapiens
ctgttagagaaatac

SEQ ID NO: 291217 - DNA, 15 bp, Homo sapiens
actgttagagaaata

SEQ ID NO: 291218 - DNA, 15 bp, Homo sapiens
cactgttagagaaat

SEQ ID NO: 291219 - DNA, 15 bp, Homo sapiens
acactgttagagaaa

SEQ ID NO: 291220 - DNA, 15 bp, Homo sapiens
gacactgttagagaa

SEQ ID NO: 291221 - DNA, 15 bp, Homo sapiens
tgacactgttagaga

SEQ ID NO: 291222 - DNA, 15 bp, Homo sapiens
ttgacactgttagag

SEQ ID NO: 291223 - DNA, 15 bp, Homo sapiens
tttgacactgttaga

SEQ ID NO: 291224 - DNA, 15 bp, Homo sapiens
atttgacactgttag

SEQ ID NO: 291225 - DNA, 15 bp, Homo sapiens
catttgacactgtta

SEQ ID NO: 291226 - DNA, 15 bp, Homo sapiens
gcatttgacactgtt

SEQ ID NO: 291227 - DNA, 15 bp, Homo sapiens
agcatttgacactgt

SEQ ID NO: 291228 - DNA, 15 bp, Homo sapiens
aagcatttgacactg

SEQ ID NO: 291229 - DNA, 15 bp, Homo sapiens
gaagcatttgacact

SEQ ID NO: 291230 - DNA, 15 bp, Homo sapiens
tgaagcatttgacac

SEQ ID NO: 291231 - DNA, 15 bp, Homo sapiens
ttgaagcatttgaca

SEQ ID NO: 291232 - DNA, 15 bp, Homo sapiens
cttgaagcatttgac

SEQ ID NO: 291233 - DNA, 15 bp, Homo sapiens
ccttgaagcatttga

SEQ ID NO: 291234 - DNA, 15 bp, Homo sapiens
tccttgaagcatttg

SEQ ID NO: 291235 - DNA, 15 bp, Homo sapiens
ttccttgaagcattt

SEQ ID NO: 291236 - DNA, 15 bp, Homo sapiens
cttccttgaagcatt

SEQ ID NO: 291237 - DNA, 15 bp, Homo sapiens
ccttccttgaagcat

SEQ ID NO: 291238 - DNA, 15 bp, Homo sapiens
accttccttgaagca

SEQ ID NO: 291239 - DNA, 15 bp, Homo sapiens
gaccttccttgaagc

SEQ ID NO: 291240 - DNA, 15 bp, Homo sapiens
tgaccttccttgaag

SEQ ID NO: 291241 - DNA, 15 bp, Homo sapiens
ttgaccttccttgaa

SEQ ID NO: 291242 - DNA, 15 bp, Homo sapiens
cttgaccttccttga

SEQ ID NO: 291243 - DNA, 15 bp, Homo sapiens
acttgaccttccttg

SEQ ID NO: 291244 - DNA, 15 bp, Homo sapiens
tacttgaccttcctt

SEQ ID NO: 291245 - DNA, 15 bp, Homo sapiens
atacttgaccttcct

SEQ ID NO: 291246 - DNA, 15 bp, Homo sapiens
aatacttgaccttcc

SEQ ID NO: 291247 - DNA, 15 bp, Homo sapiens
taatacttgaccttc

SEQ ID NO: 291248 - DNA, 15 bp, Homo sapiens
ctaatacttgacctt

SEQ ID NO: 291249 - DNA, 15 bp, Homo sapiens
tctaatacttgacct

SEQ ID NO: 291250 - DNA, 15 bp, Homo sapiens
ttctaatacttgacc

SEQ ID NO: 291251 - DNA, 15 bp, Homo sapiens
gttctaatacttgac

SEQ ID NO: 291252 - DNA, 15 bp, Homo sapiens
tgttctaatacttga

SEQ ID NO: 291253 - DNA, 15 bp, Homo sapiens
ttgttctaatacttg

SEQ ID NO: 291254 - DNA, 15 bp, Homo sapiens
tttgttctaatactt

SEQ ID NO: 291255 - DNA, 15 bp, Homo sapiens
atttgttctaatact

SEQ ID NO: 291256 - DNA, 15 bp, Homo sapiens
catttgttctaatac

SEQ ID NO: 291257 - DNA, 15 bp, Homo sapiens
tcatttgttctaata

SEQ ID NO: 291258 - DNA, 15 bp, Homo sapiens
ctcatttgttctaat

SEQ ID NO: 291259 - DNA, 15 bp, Homo sapiens
tctcatttgttctaa

SEQ ID NO: 291260 - DNA, 15 bp, Homo sapiens
ttctcatttgttcta

SEQ ID NO: 291261 - DNA, 15 bp, Homo sapiens
tttctcatttgttct

SEQ ID NO: 291262 - DNA, 15 bp, Homo sapiens
ttttctcatttgttc

SEQ ID NO: 291263 - DNA, 15 bp, Homo sapiens
cttttctcatttgtt

SEQ ID NO: 291264 - DNA, 15 bp, Homo sapiens
acttttctcatttgt

SEQ ID NO: 291265 - DNA, 15 bp, Homo sapiens
gacttttctcatttg

SEQ ID NO: 291266 - DNA, 15 bp, Homo sapiens
agacttttctcattt

SEQ ID NO: 291267 - DNA, 15 bp, Homo sapiens
aagacttttctcatt

SEQ ID NO: 291268 - DNA, 15 bp, Homo sapiens
aaagacttttctcat

SEQ ID NO: 291269 - DNA, 15 bp, Homo sapiens
aaaagacttttctca

SEQ ID NO: 291270 - DNA, 15 bp, Homo sapiens
caaaagacttttctc

SEQ ID NO: 291271 - DNA, 15 bp, Homo sapiens
acaaaagacttttct

SEQ ID NO: 291272 - DNA, 15 bp, Homo sapiens
aacaaaagacttttc

SEQ ID NO: 291273 - DNA, 15 bp, Homo sapiens
aaacaaaagactttt

SEQ ID NO: 291274 - DNA, 15 bp, Homo sapiens
aaaacaaaagacttt

SEQ ID NO: 291275 - DNA, 15 bp, Homo sapiens
aaaaacaaaagactt

SEQ ID NO: 291276 - DNA, 15 bp, Homo sapiens
taaaaacaaaagact

SEQ ID NO: 291277 - DNA, 15 bp, Homo sapiens
ataaaaacaaaagac

SEQ ID NO: 291278 - DNA, 15 bp, Homo sapiens
gataaaaacaaaaga

SEQ ID NO: 291279 - DNA, 15 bp, Homo sapiens
tgataaaaacaaaag

SEQ ID NO: 291280 - DNA, 15 bp, Homo sapiens
ctgataaaaacaaaa

SEQ ID NO: 291281 - DNA, 15 bp, Homo sapiens
actgataaaaacaaa

SEQ ID NO: 291282 - DNA, 15 bp, Homo sapiens
aactgataaaaacaa

SEQ ID NO: 291283 - DNA, 15 bp, Homo sapiens
caactgataaaaaca

SEQ ID NO: 291284 - DNA, 15 bp, Homo sapiens
ccaactgataaaaac

SEQ ID NO: 291285 - DNA, 15 bp, Homo sapiens
accaactgataaaaa

SEQ ID NO: 291286 - DNA, 15 bp, Homo sapiens
gaccaactgataaaa

SEQ ID NO: 291287 - DNA, 15 bp, Homo sapiens
tgaccaactgataaa

SEQ ID NO: 291288 - DNA, 15 bp, Homo sapiens
atgaccaactgataa

SEQ ID NO: 291289 - DNA, 15 bp, Homo sapiens
aatgaccaactgata

SEQ ID NO: 291290 - DNA, 15 bp, Homo sapiens
aaatgaccaactgat

SEQ ID NO: 291291 - DNA, 15 bp, Homo sapiens
caaatgaccaactga

SEQ ID NO: 291292 - DNA, 15 bp, Homo sapiens
acaaatgaccaactg

SEQ ID NO: 291293 - DNA, 15 bp, Homo sapiens
cacaaatgaccaact

SEQ ID NO: 291294 - DNA, 15 bp, Homo sapiens
ccacaaatgaccaac

SEQ ID NO: 291295 - DNA, 15 bp, Homo sapiens
gccacaaatgaccaa

SEQ ID NO: 291296 - DNA, 15 bp, Homo sapiens
agccacaaatgacca

SEQ ID NO: 291297 - DNA, 15 bp, Homo sapiens
aagccacaaatgacc

SEQ ID NO: 291298 - DNA, 15 bp, Homo sapiens
aaagccacaaatgac

SEQ ID NO: 291299 - DNA, 15 bp, Homo sapiens
taaagccacaaatga

SEQ ID NO: 291300 - DNA, 15 bp, Homo sapiens
ttaaagccacaaatg

SEQ ID NO: 291301 - DNA, 15 bp, Homo sapiens
attaaagccacaaat

SEQ ID NO: 291302 - DNA, 15 bp, Homo sapiens
gattaaagccacaaa

SEQ ID NO: 291303 - DNA, 15 bp, Homo sapiens
tgattaaagccacaa

SEQ ID NO: 291304 - DNA, 15 bp, Homo sapiens
gtgattaaagccaca

SEQ ID NO: 291305 - DNA, 15 bp, Homo sapiens
agtgattaaagccac

SEQ ID NO: 291306 - DNA, 15 bp, Homo sapiens
cagtgattaaagcca

SEQ ID NO: 291307 - DNA, 15 bp, Homo sapiens
acagtgattaaagcc

SEQ ID NO: 291308 - DNA, 15 bp, Homo sapiens
tacagtgattaaagc

SEQ ID NO: 291309 - DNA, 15 bp, Homo sapiens
ctacagtgattaaag

SEQ ID NO: 291310 - DNA, 15 bp, Homo sapiens
gctacagtgattaaa

SEQ ID NO: 291311 - DNA, 15 bp, Homo sapiens
agctacagtgattaa

SEQ ID NO: 291312 - DNA, 15 bp, Homo sapiens
aagctacagtgatta

SEQ ID NO: 291313 - DNA, 15 bp, Homo sapiens
taagctacagtgatt

SEQ ID NO: 291314 - DNA, 15 bp, Homo sapiens
ttaagctacagtgat

SEQ ID NO: 291315 - DNA, 15 bp, Homo sapiens
tttaagctacagtga

SEQ ID NO: 291316 - DNA, 15 bp, Homo sapiens
atttaagctacagtg

SEQ ID NO: 291317 - DNA, 15 bp, Homo sapiens
tatttaagctacagt

SEQ ID NO: 291318 - DNA, 15 bp, Homo sapiens
atatttaagctacag

SEQ ID NO: 291319 - DNA, 15 bp, Homo sapiens
catatttaagctaca

SEQ ID NO: 291320 - DNA, 15 bp, Homo sapiens
tcatatttaagctac

SEQ ID NO: 291321 - DNA, 15 bp, Homo sapiens
atcatatttaagcta

SEQ ID NO: 291322 - DNA, 15 bp, Homo sapiens
aatcatatttaagct

SEQ ID NO: 291323 - DNA, 15 bp, Homo sapiens
taatcatatttaagc

SEQ ID NO: 291324 - DNA, 15 bp, Homo sapiens
ctaatcatatttaag

SEQ ID NO: 291325 - DNA, 15 bp, Homo sapiens
actaatcatatttaa

SEQ ID NO: 291326 - DNA, 15 bp, Homo sapiens
cactaatcatattta

SEQ ID NO: 291327 - DNA, 15 bp, Homo sapiens
ccactaatcatattt

SEQ ID NO: 291328 - DNA, 15 bp, Homo sapiens
tccactaatcatatt

SEQ ID NO: 291329 - DNA, 15 bp, Homo sapiens
gtccactaatcatat

SEQ ID NO: 291330 - DNA, 15 bp, Homo sapiens
tgtccactaatcata

SEQ ID NO: 291331 - DNA, 15 bp, Homo sapiens
gtgtccactaatcat

SEQ ID NO: 291332 - DNA, 15 bp, Homo sapiens
tgtgtccactaatca

SEQ ID NO: 291333 - DNA, 15 bp, Homo sapiens
ctgtgtccactaatc

SEQ ID NO: 291334 - DNA, 15 bp, Homo sapiens
tctgtgtccactaat

SEQ ID NO: 291335 - DNA, 15 bp, Homo sapiens
ttctgtgtccactaa

SEQ ID NO: 291336 - DNA, 15 bp, Homo sapiens
cttctgtgtccacta

SEQ ID NO: 291337 - DNA, 15 bp, Homo sapiens
gcttctgtgtccact

SEQ ID NO: 291338 - DNA, 15 bp, Homo sapiens
tgcttctgtgtccac

SEQ ID NO: 291339 - DNA, 15 bp, Homo sapiens
atgcttctgtgtcca

SEQ ID NO: 291340 - DNA, 15 bp, Homo sapiens
tatgcttctgtgtcc

SEQ ID NO: 291341 - DNA, 15 bp, Homo sapiens
atatgcttctgtgtc

SEQ ID NO: 291342 - DNA, 15 bp, Homo sapiens
tatatgcttctgtgt

SEQ ID NO: 291343 - DNA, 15 bp, Homo sapiens
ctatatgcttctgtg

SEQ ID NO: 291344 - DNA, 15 bp, Homo sapiens
tctatatgcttctgt

SEQ ID NO: 291345 - DNA, 15 bp, Homo sapiens
ttctatatgcttctg

SEQ ID NO: 291346 - DNA, 15 bp, Homo sapiens
cttctatatgcttct

SEQ ID NO: 291347 - DNA, 15 bp, Homo sapiens
gcttctatatgcttc

SEQ ID NO: 291348 - DNA, 15 bp, Homo sapiens
agcttctatatgctt

SEQ ID NO: 291349 - DNA, 15 bp, Homo sapiens
cagcttctatatgct

SEQ ID NO: 291350 - DNA, 15 bp, Homo sapiens
acagcttctatatgc

SEQ ID NO: 291351 - DNA, 15 bp, Homo sapiens
cacagcttctatatg

SEQ ID NO: 291352 - DNA, 15 bp, Homo sapiens
acacagcttctatat

SEQ ID NO: 291353 - DNA, 15 bp, Homo sapiens
aacacagcttctata

SEQ ID NO: 291354 - DNA, 15 bp, Homo sapiens
caacacagcttctat

SEQ ID NO: 291355 - DNA, 15 bp, Homo sapiens
gcaacacagcttcta

SEQ ID NO: 291356 - DNA, 15 bp, Homo sapiens
tgcaacacagcttct

SEQ ID NO: 291357 - DNA, 15 bp, Homo sapiens
ttgcaacacagcttc

SEQ ID NO: 291358 - DNA, 15 bp, Homo sapiens
attgcaacacagctt

SEQ ID NO: 291359 - DNA, 15 bp, Homo sapiens
tattgcaacacagct

SEQ ID NO: 291360 - DNA, 15 bp, Homo sapiens
atattgcaacacagc

SEQ ID NO: 291361 - DNA, 15 bp, Homo sapiens
tatattgcaacacag

SEQ ID NO: 291362 - DNA, 15 bp, Homo sapiens
atatattgcaacaca

SEQ ID NO: 291363 - DNA, 15 bp, Homo sapiens
aatatattgcaacac

SEQ ID NO: 291364 - DNA, 15 bp, Homo sapiens
aaatatattgcaaca

SEQ ID NO: 291365 - DNA, 15 bp, Homo sapiens
caaatatattgcaac

SEQ ID NO: 291366 - DNA, 15 bp, Homo sapiens
tcaaatatattgcaa

SEQ ID NO: 291367 - DNA, 15 bp, Homo sapiens
ttcaaatatattgca

SEQ ID NO: 291368 - DNA, 15 bp, Homo sapiens
tttcaaatatattgc

SEQ ID NO: 291369 - DNA, 15 bp, Homo sapiens
ctttcaaatatattg

SEQ ID NO: 291370 - DNA, 15 bp, Homo sapiens
tctttcaaatatatt

SEQ ID NO: 291371 - DNA, 15 bp, Homo sapiens
gtctttcaaatatat

SEQ ID NO: 291372 - DNA, 15 bp, Homo sapiens
cgtctttcaaatata

SEQ ID NO: 291373 - DNA, 15 bp, Homo sapiens
tcgtctttcaaatat

SEQ ID NO: 291374 - DNA, 15 bp, Homo sapiens
ctcgtctttcaaata

SEQ ID NO: 291375 - DNA, 15 bp, Homo sapiens
cctcgtctttcaaat

SEQ ID NO: 291376 - DNA, 15 bp, Homo sapiens
gcctcgtctttcaaa

SEQ ID NO: 291377 - DNA, 15 bp, Homo sapiens
agcctcgtctttcaa

SEQ ID NO: 291378 - DNA, 15 bp, Homo sapiens
cagcctcgtctttca

SEQ ID NO: 291379 - DNA, 15 bp, Homo sapiens
ccagcctcgtctttc

SEQ ID NO: 291380 - DNA, 15 bp, Homo sapiens
cccagcctcgtcttt

SEQ ID NO: 291381 - DNA, 15 bp, Homo sapiens
acccagcctcgtctt

SEQ ID NO: 291382 - DNA, 15 bp, Homo sapiens
cacccagcctcgtct

SEQ ID NO: 291383 - DNA, 15 bp, Homo sapiens
acacccagcctcgtc

SEQ ID NO: 291384 - DNA, 15 bp, Homo sapiens
cacacccagcctcgt

SEQ ID NO: 291385 - DNA, 15 bp, Homo sapiens
ccacacccagcctcg

SEQ ID NO: 291386 - DNA, 15 bp, Homo sapiens
accacacccagcctc

SEQ ID NO: 291387 - DNA, 15 bp, Homo sapiens
caccacacccagcct

SEQ ID NO: 291388 - DNA, 15 bp, Homo sapiens
ccaccacacccagcc

SEQ ID NO: 291389 - DNA, 15 bp, Homo sapiens
agccaccacacccag

SEQ ID NO: 291390 - DNA, 15 bp, Homo sapiens
gagccaccacaccca

SEQ ID NO: 291391 - DNA, 15 bp, Homo sapiens
tgagccaccacaccc

SEQ ID NO: 291392 - DNA, 15 bp, Homo sapiens
gtgagccaccacacc

SEQ ID NO: 291393 - DNA, 15 bp, Homo sapiens
cgtgagccaccacac

SEQ ID NO: 291394 - DNA, 15 bp, Homo sapiens
gcgtgagccaccaca

SEQ ID NO: 291395 - DNA, 15 bp, Homo sapiens
ggcgtgagccaccac

SEQ ID NO: 291396 - DNA, 15 bp, Homo sapiens
aggcgtgagccacca

SEQ ID NO: 291397 - DNA, 15 bp, Homo sapiens
ggattacaggcgtga

SEQ ID NO: 291398 - DNA, 15 bp, Homo sapiens
gggattacaggcgtg

SEQ ID NO: 291399 - DNA, 15 bp, Homo sapiens
tgggattacaggcgt

SEQ ID NO: 291400 - DNA, 15 bp, Homo sapiens
gtgggattacaggcg

SEQ ID NO: 291401 - DNA, 15 bp, Homo sapiens
agtgggattacaggc

SEQ ID NO: 291402 - DNA, 15 bp, Homo sapiens
aagtgggattacagg

SEQ ID NO: 291403 - DNA, 15 bp, Homo sapiens
aaagtgggattacag

SEQ ID NO: 291404 - DNA, 15 bp, Homo sapiens
caaagtgggattaca

SEQ ID NO: 291405 - DNA, 15 bp, Homo sapiens
ccaaagtgggattac

SEQ ID NO: 291406 - DNA, 15 bp, Homo sapiens
cccaaagtgggatta

SEQ ID NO: 291407 - DNA, 15 bp, Homo sapiens
tcccaaagtgggatt

SEQ ID NO: 291408 - DNA, 15 bp, Homo sapiens
ctcccaaagtgggat

SEQ ID NO: 291409 - DNA, 15 bp, Homo sapiens
cctcccaaagtggga

SEQ ID NO: 291410 - DNA, 15 bp, Homo sapiens
gcctcccaaagtggg

SEQ ID NO: 291411 - DNA, 15 bp, Homo sapiens
ggcctcccaaagtgg

SEQ ID NO: 291412 - DNA, 15 bp, Homo sapiens
accttggcctcccaa

SEQ ID NO: 291413 - DNA, 15 bp, Homo sapiens
caccttggcctccca

SEQ ID NO: 291414 - DNA, 15 bp, Homo sapiens
ccaccttggcctccc

SEQ ID NO: 291415 - DNA, 15 bp, Homo sapiens
cccaccttggcctcc

SEQ ID NO: 291416 - DNA, 15 bp, Homo sapiens
gcccaccttggcctc

SEQ ID NO: 291417 - DNA, 15 bp, Homo sapiens
cgcccaccttggcct

SEQ ID NO: 291418 - DNA, 15 bp, Homo sapiens
ccgcccaccttggcc

SEQ ID NO: 291419 - DNA, 15 bp, Homo sapiens
tccgcccaccttggc

SEQ ID NO: 291420 - DNA, 15 bp, Homo sapiens
atccgcccaccttgg

SEQ ID NO: 291421 - DNA, 15 bp, Homo sapiens
gatccgcccaccttg

SEQ ID NO: 291422 - DNA, 15 bp, Homo sapiens
tgatccgcccacctt

SEQ ID NO: 291423 - DNA, 15 bp, Homo sapiens
gtgatccgcccacct

SEQ ID NO: 291424 - DNA, 15 bp, Homo sapiens
ggtgatccgcccacc

SEQ ID NO: 291425 - DNA, 15 bp, Homo sapiens
aggtgatccgcccac

SEQ ID NO: 291426 - DNA, 15 bp, Homo sapiens
caggtgatccgccca

SEQ ID NO: 291427 - DNA, 15 bp, Homo sapiens
tcaggtgatccgccc

SEQ ID NO: 291428 - DNA, 15 bp, Homo sapiens
ctcaggtgatccgcc

SEQ ID NO: 291429 - DNA, 15 bp, Homo sapiens
cctcaggtgatccgc

SEQ ID NO: 291430 - DNA, 15 bp, Homo sapiens
tcctcaggtgatccg

SEQ ID NO: 291431 - DNA, 15 bp, Homo sapiens
gtcctcaggtgatcc

SEQ ID NO: 291432 - DNA, 15 bp, Homo sapiens
tgtcctcaggtgatc

SEQ ID NO: 291433 - DNA, 15 bp, Homo sapiens
ctgtcctcaggtgat

SEQ ID NO: 291434 - DNA, 15 bp, Homo sapiens
cctgtcctcaggtga

SEQ ID NO: 291435 - DNA, 15 bp, Homo sapiens
tcctgtcctcaggtg

SEQ ID NO: 291436 - DNA, 15 bp, Homo sapiens
ctcctgtcctcaggt

SEQ ID NO: 291437 - DNA, 15 bp, Homo sapiens
actcctgtcctcagg

SEQ ID NO: 291438 - DNA, 15 bp, Homo sapiens
aactcctgtcctcag

SEQ ID NO: 291439 - DNA, 15 bp, Homo sapiens
gaactcctgtcctca

SEQ ID NO: 291440 - DNA, 15 bp, Homo sapiens
cgaactcctgtcctc

SEQ ID NO: 291441 - DNA, 15 bp, Homo sapiens
tcgaactcctgtcct

SEQ ID NO: 291442 - DNA, 15 bp, Homo sapiens
ttcgaactcctgtcc

SEQ ID NO: 291443 - DNA, 15 bp, Homo sapiens
tttcgaactcctgtc

SEQ ID NO: 291444 - DNA, 15 bp, Homo sapiens
gtttcgaactcctgt

SEQ ID NO: 291445 - DNA, 15 bp, Homo sapiens
ggtttcgaactcctg

SEQ ID NO: 291446 - DNA, 15 bp, Homo sapiens
tggtttcgaactcct

SEQ ID NO: 291447 - DNA, 15 bp, Homo sapiens
ctggtttcgaactcc

SEQ ID NO: 291448 - DNA, 15 bp, Homo sapiens
gctggtttcgaactc

SEQ ID NO: 291449 - DNA, 15 bp, Homo sapiens
ggctggtttcgaact

SEQ ID NO: 291450 - DNA, 15 bp, Homo sapiens
aggctggtttcgaac

SEQ ID NO: 291451 - DNA, 15 bp, Homo sapiens
caggctggtttcgaa

SEQ ID NO: 291452 - DNA, 15 bp, Homo sapiens
ccaggctggtttcga

SEQ ID NO: 291453 - DNA, 15 bp, Homo sapiens
cccaggctggtttcg

SEQ ID NO: 291454 - DNA, 15 bp, Homo sapiens
gcccaggctggtttc

SEQ ID NO: 291455 - DNA, 15 bp, Homo sapiens
tgcccaggctggttt

SEQ ID NO: 291456 - DNA, 15 bp, Homo sapiens
ttgcccaggctggtt

SEQ ID NO: 291457 - DNA, 15 bp, Homo sapiens
gccatgttgcccagg

SEQ ID NO: 291458 - DNA, 15 bp, Homo sapiens
tgccatgttgcccag

SEQ ID NO: 291459 - DNA, 15 bp, Homo sapiens
ttgccatgttgccca

SEQ ID NO: 291460 - DNA, 15 bp, Homo sapiens
tttgccatgttgccc

SEQ ID NO: 291461 - DNA, 15 bp, Homo sapiens
ttttgccatgttgcc

SEQ ID NO: 291462 - DNA, 15 bp, Homo sapiens
gttttgccatgttgc

SEQ ID NO: 291463 - DNA, 15 bp, Homo sapiens
ggttttgccatgttg

SEQ ID NO: 291464 - DNA, 15 bp, Homo sapiens
gggttttgccatgtt

SEQ ID NO: 291465 - DNA, 15 bp, Homo sapiens
ggggttttgccatgt

SEQ ID NO: 291466 - DNA, 15 bp, Homo sapiens
cggggttttgccatg

SEQ ID NO: 291467 - DNA, 15 bp, Homo sapiens
acggggttttgccat

SEQ ID NO: 291468 - DNA, 15 bp, Homo sapiens
gacggggttttgcca

SEQ ID NO: 291469 - DNA, 15 bp, Homo sapiens
agacggggttttgcc

SEQ ID NO: 291470 - DNA, 15 bp, Homo sapiens
gagacggggttttgc

SEQ ID NO: 291471 - DNA, 15 bp, Homo sapiens
agagacggggttttg

SEQ ID NO: 291472 - DNA, 15 bp, Homo sapiens
tagagacggggtttt

SEQ ID NO: 291473 - DNA, 15 bp, Homo sapiens
gggctaatttttgta

SEQ ID NO: 291474 - DNA, 15 bp, Homo sapiens
tgggctaatttttgt

SEQ ID NO: 291475 - DNA, 15 bp, Homo sapiens
ctgggctaatttttg

SEQ ID NO: 291476 - DNA, 15 bp, Homo sapiens
gctgggctaattttt

SEQ ID NO: 291477 - DNA, 15 bp, Homo sapiens
agctgggctaatttt

SEQ ID NO: 291478 - DNA, 15 bp, Homo sapiens
cagctgggctaattt

SEQ ID NO: 291479 - DNA, 15 bp, Homo sapiens
ccagctgggctaatt

SEQ ID NO: 291480 - DNA, 15 bp, Homo sapiens
cccagctgggctaat

SEQ ID NO: 291481 - DNA, 15 bp, Homo sapiens
gcccagctgggctaa

SEQ ID NO: 291482 - DNA, 15 bp, Homo sapiens
tgcccagctgggcta

SEQ ID NO: 291483 - DNA, 15 bp, Homo sapiens
gtgcccagctgggct

SEQ ID NO: 291484 - DNA, 15 bp, Homo sapiens
ggtgcccagctgggc

SEQ ID NO: 291485 - DNA, 15 bp, Homo sapiens
aggtgcccagctggg

SEQ ID NO: 291486 - DNA, 15 bp, Homo sapiens
caggtgcccagctgg

SEQ ID NO: 291487 - DNA, 15 bp, Homo sapiens
acaggtgcccagctg

SEQ ID NO: 291488 - DNA, 15 bp, Homo sapiens
tacaggtgcccagct

SEQ ID NO: 291489 - DNA, 15 bp, Homo sapiens
ttacaggtgcccagc

SEQ ID NO: 291490 - DNA, 15 bp, Homo sapiens
attacaggtgcccag

SEQ ID NO: 291491 - DNA, 15 bp, Homo sapiens
gattacaggtgccca

SEQ ID NO: 291492 - DNA, 15 bp, Homo sapiens
ggattacaggtgccc

SEQ ID NO: 291493 - DNA, 15 bp, Homo sapiens
gggattacaggtgcc

SEQ ID NO: 291494 - DNA, 15 bp, Homo sapiens
tgggattacaggtgc

SEQ ID NO: 291495 - DNA, 15 bp, Homo sapiens
tctgggattacaggt

SEQ ID NO: 291496 - DNA, 15 bp, Homo sapiens
atctgggattacagg

SEQ ID NO: 291497 - DNA, 15 bp, Homo sapiens
tatctgggattacag

SEQ ID NO: 291498 - DNA, 15 bp, Homo sapiens
ttatctgggattaca

SEQ ID NO: 291499 - DNA, 15 bp, Homo sapiens
attatctgggattac

SEQ ID NO: 291500 - DNA, 15 bp, Homo sapiens
gattatctgggatta

SEQ ID NO: 291501 - DNA, 15 bp, Homo sapiens
tgattatctgggatt

SEQ ID NO: 291502 - DNA, 15 bp, Homo sapiens
ctgattatctgggat

SEQ ID NO: 291503 - DNA, 15 bp, Homo sapiens
cctgattatctggga

SEQ ID NO: 291504 - DNA, 15 bp, Homo sapiens
tcctgattatctggg

SEQ ID NO: 291505 - DNA, 15 bp, Homo sapiens
ctcctgattatctgg

SEQ ID NO: 291506 - DNA, 15 bp, Homo sapiens
cctcctgattatctg

SEQ ID NO: 291507 - DNA, 15 bp, Homo sapiens
gcctcctgattatct

SEQ ID NO: 291508 - DNA, 15 bp, Homo sapiens
agcctcctgattatc

SEQ ID NO: 291509 - DNA, 15 bp, Homo sapiens
cagcctcctgattat

SEQ ID NO: 291510 - DNA, 15 bp, Homo sapiens
tcagcctcctgatta

SEQ ID NO: 291511 - DNA, 15 bp, Homo sapiens
ctcagcctcctgatt

SEQ ID NO: 291512 - DNA, 15 bp, Homo sapiens
cctcagcctcctgat

SEQ ID NO: 291513 - DNA, 15 bp, Homo sapiens
tgattctcctgcctc

SEQ ID NO: 291514 - DNA, 15 bp, Homo sapiens
gtgattctcctgcct

SEQ ID NO: 291515 - DNA, 15 bp, Homo sapiens
agtgattctcctgcc

SEQ ID NO: 291516 - DNA, 15 bp, Homo sapiens
aagtgattctcctgc

SEQ ID NO: 291517 - DNA, 15 bp, Homo sapiens
caagtgattctcctg

SEQ ID NO: 291518 - DNA, 15 bp, Homo sapiens
tcaagtgattctcct

SEQ ID NO: 291519 - DNA, 15 bp, Homo sapiens
ttcaagtgattctcc

SEQ ID NO: 291520 - DNA, 15 bp, Homo sapiens
gttcaagtgattctc

SEQ ID NO: 291521 - DNA, 15 bp, Homo sapiens
ggttcaagtgattct

SEQ ID NO: 291522 - DNA, 15 bp, Homo sapiens
gggttcaagtgattc

SEQ ID NO: 291523 - DNA, 15 bp, Homo sapiens
cgggttcaagtgatt

SEQ ID NO: 291524 - DNA, 15 bp, Homo sapiens
ccgggttcaagtgat

SEQ ID NO: 291525 - DNA, 15 bp, Homo sapiens
cccgggttcaagtga

SEQ ID NO: 291526 - DNA, 15 bp, Homo sapiens
tcccgggttcaagtg

SEQ ID NO: 291527 - DNA, 15 bp, Homo sapiens
ttcccgggttcaagt

SEQ ID NO: 291528 - DNA, 15 bp, Homo sapiens
cttcccgggttcaag

SEQ ID NO: 291529 - DNA, 15 bp, Homo sapiens
acttcccgggttcaa

SEQ ID NO: 291530 - DNA, 15 bp, Homo sapiens
cacttcccgggttca

SEQ ID NO: 291531 - DNA, 15 bp, Homo sapiens
ccacttcccgggttc

SEQ ID NO: 291532 - DNA, 15 bp, Homo sapiens
tccacttcccgggtt

SEQ ID NO: 291533 - DNA, 15 bp, Homo sapiens
ctccacttcccgggt

SEQ ID NO: 291534 - DNA, 15 bp, Homo sapiens
cctccacttcccggg

SEQ ID NO: 291535 - DNA, 15 bp, Homo sapiens
acctccacttcccgg

SEQ ID NO: 291536 - DNA, 15 bp, Homo sapiens
aacctccacttcccg

SEQ ID NO: 291537 - DNA, 15 bp, Homo sapiens
caacctccacttccc

SEQ ID NO: 291538 - DNA, 15 bp, Homo sapiens
gcaacctccacttcc

SEQ ID NO: 291539 - DNA, 15 bp, Homo sapiens
tgcaacctccacttc

SEQ ID NO: 291540 - DNA, 15 bp, Homo sapiens
ctgcaacctccactt

SEQ ID NO: 291541 - DNA, 15 bp, Homo sapiens
actgcaacctccact

SEQ ID NO: 291542 - DNA, 15 bp, Homo sapiens
tcttggctcactgca

SEQ ID NO: 291543 - DNA, 15 bp, Homo sapiens
atcttggctcactgc

SEQ ID NO: 291544 - DNA, 15 bp, Homo sapiens
aatcttggctcactg

SEQ ID NO: 291545 - DNA, 15 bp, Homo sapiens
caatcttggctcact

SEQ ID NO: 291546 - DNA, 15 bp, Homo sapiens
gcaatcttggctcac

SEQ ID NO: 291547 - DNA, 15 bp, Homo sapiens
cgcaatcttggctca

SEQ ID NO: 291548 - DNA, 15 bp, Homo sapiens
gcgcaatcttggctc

SEQ ID NO: 291549 - DNA, 15 bp, Homo sapiens
ggcgcaatcttggct

SEQ ID NO: 291550 - DNA, 15 bp, Homo sapiens
tggcgcaatcttggc

SEQ ID NO: 291551 - DNA, 15 bp, Homo sapiens
gtggcgcaatcttgg

SEQ ID NO: 291552 - DNA, 15 bp, Homo sapiens
agtggcgcaatcttg

SEQ ID NO: 291553 - DNA, 15 bp, Homo sapiens
cagtggcgcaatctt

SEQ ID NO: 291554 - DNA, 15 bp, Homo sapiens
gcagtggcgcaatct

SEQ ID NO: 291555 - DNA, 15 bp, Homo sapiens
tgcagtggcgcaatc

SEQ ID NO: 291556 - DNA, 15 bp, Homo sapiens
gtgcagtggcgcaat

SEQ ID NO: 291557 - DNA, 15 bp, Homo sapiens
agtgcagtggcgcaa

SEQ ID NO: 291558 - DNA, 15 bp, Homo sapiens
gagtgcagtggcgca

SEQ ID NO: 291559 - DNA, 15 bp, Homo sapiens
ggagtgcagtggcgc

SEQ ID NO: 291560 - DNA, 15 bp, Homo sapiens
tggagtgcagtggcg

SEQ ID NO: 291561 - DNA, 15 bp, Homo sapiens
gtcgcccaggctgga

SEQ ID NO: 291562 - DNA, 15 bp, Homo sapiens
tgtcgcccaggctgg

SEQ ID NO: 291563 - DNA, 15 bp, Homo sapiens
ctgtcgcccaggctg

SEQ ID NO: 291564 - DNA, 15 bp, Homo sapiens
tctgtcgcccaggct

SEQ ID NO: 291565 - DNA, 15 bp, Homo sapiens
ctctgtcgcccaggc

SEQ ID NO: 291566 - DNA, 15 bp, Homo sapiens
gctctgtcgcccagg

SEQ ID NO: 291567 - DNA, 15 bp, Homo sapiens
tgctctgtcgcccag

SEQ ID NO: 291568 - DNA, 15 bp, Homo sapiens
ttgctctgtcgccca

SEQ ID NO: 291569 - DNA, 15 bp, Homo sapiens
cttgctctgtcgccc

SEQ ID NO: 291570 - DNA, 15 bp, Homo sapiens
ccttgctctgtcgcc

SEQ ID NO: 291571 - DNA, 15 bp, Homo sapiens
gccttgctctgtcgc

SEQ ID NO: 291572 - DNA, 15 bp, Homo sapiens
agccttgctctgtcg

SEQ ID NO: 291573 - DNA, 15 bp, Homo sapiens
gagccttgctctgtc

SEQ ID NO: 291574 - DNA, 15 bp, Homo sapiens
ggagccttgctctgt

SEQ ID NO: 291575 - DNA, 15 bp, Homo sapiens
aggagccttgctctg

SEQ ID NO: 291576 - DNA, 15 bp, Homo sapiens
aaggagccttgctct

SEQ ID NO: 291577 - DNA, 15 bp, Homo sapiens
gaaggagccttgctc

SEQ ID NO: 291578 - DNA, 15 bp, Homo sapiens
agaaggagccttgct

SEQ ID NO: 291579 - DNA, 15 bp, Homo sapiens
gagaaggagccttgc

SEQ ID NO: 291580 - DNA, 15 bp, Homo sapiens
tgagaaggagccttg

SEQ ID NO: 291581 - DNA, 15 bp, Homo sapiens
ttgagaaggagcctt

SEQ ID NO: 291582 - DNA, 15 bp, Homo sapiens
tttgagaaggagcct

SEQ ID NO: 291583 - DNA, 15 bp, Homo sapiens
ttttgagaaggagcc

SEQ ID NO: 291584 - DNA, 15 bp, Homo sapiens
tttttgagaaggagc

SEQ ID NO: 291585 - DNA, 15 bp, Homo sapiens
ttttttgagaaggag

SEQ ID NO: 291586 - DNA, 15 bp, Homo sapiens
tttttttgagaagga

SEQ ID NO: 291587 - DNA, 15 bp, Homo sapiens
ttttttttgagaagg

SEQ ID NO: 291588 - DNA, 15 bp, Homo sapiens
tttttttttgagaag

SEQ ID NO: 291589 - DNA, 15 bp, Homo sapiens
ttttttttttgagaa

SEQ ID NO: 291590 - DNA, 15 bp, Homo sapiens
cttttttttttttga

SEQ ID NO: 291591 - DNA, 15 bp, Homo sapiens
tcttttttttttttg

SEQ ID NO: 291592 - DNA, 15 bp, Homo sapiens
tctttttcttttttt

SEQ ID NO: 291593 - DNA, 15 bp, Homo sapiens
ttctttttctttttt

SEQ ID NO: 291594 - DNA, 15 bp, Homo sapiens
tttctttttcttttt

SEQ ID NO: 291595 - DNA, 15 bp, Homo sapiens
ttttctttttctttt

SEQ ID NO: 291596 - DNA, 15 bp, Homo sapiens
cttttctttttcttt

SEQ ID NO: 291597 - DNA, 15 bp, Homo sapiens
tcttttctttttctt

SEQ ID NO: 291598 - DNA, 15 bp, Homo sapiens
ttcttttctttttct

SEQ ID NO: 291599 - DNA, 15 bp, Homo sapiens
tttcttttctttttc

SEQ ID NO: 291600 - DNA, 15 bp, Homo sapiens
atctttcttttcttt

SEQ ID NO: 291601 - DNA, 15 bp, Homo sapiens
catctttcttttctt

SEQ ID NO: 291602 - DNA, 15 bp, Homo sapiens
tcatctttcttttct

SEQ ID NO: 291603 - DNA, 15 bp, Homo sapiens
ctcatctttcttttc

SEQ ID NO: 291604 - DNA, 15 bp, Homo sapiens
cctcatctttctttt

SEQ ID NO: 291605 - DNA, 15 bp, Homo sapiens
tcctcatctttcttt

SEQ ID NO: 291606 - DNA, 15 bp, Homo sapiens
ttcctcatctttctt

SEQ ID NO: 291607 - DNA, 15 bp, Homo sapiens
cttcctcatctttct

SEQ ID NO: 291608 - DNA, 15 bp, Homo sapiens
acttcctcatctttc

SEQ ID NO: 291609 - DNA, 15 bp, Homo sapiens
cacttcctcatcttt

SEQ ID NO: 291610 - DNA, 15 bp, Homo sapiens
acacttcctcatctt

SEQ ID NO: 291611 - DNA, 15 bp, Homo sapiens
tacacttcctcatct

SEQ ID NO: 291612 - DNA, 15 bp, Homo sapiens
ttacacttcctcatc

SEQ ID NO: 291613 - DNA, 15 bp, Homo sapiens
tttacacttcctcat

SEQ ID NO: 291614 - DNA, 15 bp, Homo sapiens
atttacacttcctca

SEQ ID NO: 291615 - DNA, 15 bp, Homo sapiens
tatttacacttcctc

SEQ ID NO: 291616 - DNA, 15 bp, Homo sapiens
gtatttacacttcct

SEQ ID NO: 291617 - DNA, 15 bp, Homo sapiens
agtatttacacttcc

SEQ ID NO: 291618 - DNA, 15 bp, Homo sapiens
cagtatttacacttc

SEQ ID NO: 291619 - DNA, 15 bp, Homo sapiens
ccagtatttacactt

SEQ ID NO: 291620 - DNA, 15 bp, Homo sapiens
accagtatttacact

SEQ ID NO: 291621 - DNA, 15 bp, Homo sapiens
aaccagtatttacac

SEQ ID NO: 291622 - DNA, 15 bp, Homo sapiens
aaaccagtatttaca

SEQ ID NO: 291623 - DNA, 15 bp, Homo sapiens
taaaccagtatttac

SEQ ID NO: 291624 - DNA, 15 bp, Homo sapiens
ctaaaccagtattta

SEQ ID NO: 291625 - DNA, 15 bp, Homo sapiens
tctaaaccagtattt

SEQ ID NO: 291626 - DNA, 15 bp, Homo sapiens
gtctaaaccagtatt

SEQ ID NO: 291627 - DNA, 15 bp, Homo sapiens
tgtctaaaccagtat

SEQ ID NO: 291628 - DNA, 15 bp, Homo sapiens
atgtctaaaccagta

SEQ ID NO: 291629 - DNA, 15 bp, Homo sapiens
catgtctaaaccagt

SEQ ID NO: 291630 - DNA, 15 bp, Homo sapiens
gcatgtctaaaccag

SEQ ID NO: 291631 - DNA, 15 bp, Homo sapiens
agcatgtctaaacca

SEQ ID NO: 291632 - DNA, 15 bp, Homo sapiens
aagcatgtctaaacc

SEQ ID NO: 291633 - DNA, 15 bp, Homo sapiens
taagcatgtctaaac

SEQ ID NO: 291634 - DNA, 15 bp, Homo sapiens
ctaagcatgtctaaa

SEQ ID NO: 291635 - DNA, 15 bp, Homo sapiens
gctaagcatgtctaa

SEQ ID NO: 291636 - DNA, 15 bp, Homo sapiens
agctaagcatgtcta

SEQ ID NO: 291637 - DNA, 15 bp, Homo sapiens
cagctaagcatgtct

SEQ ID NO: 291638 - DNA, 15 bp, Homo sapiens
tcagctaagcatgtc

SEQ ID NO: 291639 - DNA, 15 bp, Homo sapiens
ctcagctaagcatgt

SEQ ID NO: 291640 - DNA, 15 bp, Homo sapiens
tctcagctaagcatg

SEQ ID NO: 291641 - DNA, 15 bp, Homo sapiens
ttctcagctaagcat

SEQ ID NO: 291642 - DNA, 15 bp, Homo sapiens
gttctcagctaagca

SEQ ID NO: 291643 - DNA, 15 bp, Homo sapiens
tgttctcagctaagc

SEQ ID NO: 291644 - DNA, 15 bp, Homo sapiens
gtgttctcagctaag

SEQ ID NO: 291645 - DNA, 15 bp, Homo sapiens
agtgttctcagctaa

SEQ ID NO: 291646 - DNA, 15 bp, Homo sapiens
cagtgttctcagcta

SEQ ID NO: 291647 - DNA, 15 bp, Homo sapiens
tcagtgttctcagct

SEQ ID NO: 291648 - DNA, 15 bp, Homo sapiens
ctcagtgttctcagc

SEQ ID NO: 291649 - DNA, 15 bp, Homo sapiens
gctcagtgttctcag

SEQ ID NO: 291650 - DNA, 15 bp, Homo sapiens
tgctcagtgttctca

SEQ ID NO: 291651 - DNA, 15 bp, Homo sapiens
atgctcagtgttctc

SEQ ID NO: 291652 - DNA, 15 bp, Homo sapiens
tatgctcagtgttct

SEQ ID NO: 291653 - DNA, 15 bp, Homo sapiens
atatgctcagtgttc

SEQ ID NO: 291654 - DNA, 15 bp, Homo sapiens
aatatgctcagtgtt

SEQ ID NO: 291655 - DNA, 15 bp, Homo sapiens
aaatatgctcagtgt

SEQ ID NO: 291656 - DNA, 15 bp, Homo sapiens
aaaatatgctcagtg

SEQ ID NO: 291657 - DNA, 15 bp, Homo sapiens
taaaatatgctcagt

SEQ ID NO: 291658 - DNA, 15 bp, Homo sapiens
gtaaaatatgctcag

SEQ ID NO: 291659 - DNA, 15 bp, Homo sapiens
agtaaaatatgctca

SEQ ID NO: 291660 - DNA, 15 bp, Homo sapiens
tagtaaaatatgctc

SEQ ID NO: 291661 - DNA, 15 bp, Homo sapiens
ttagtaaaatatgct

SEQ ID NO: 291662 - DNA, 15 bp, Homo sapiens
tttagtaaaatatgc

SEQ ID NO: 291663 - DNA, 15 bp, Homo sapiens
atttagtaaaatatg

SEQ ID NO: 291664 - DNA, 15 bp, Homo sapiens
tatttagtaaaatat

SEQ ID NO: 291665 - DNA, 15 bp, Homo sapiens
ttatttagtaaaata

SEQ ID NO: 291666 - DNA, 15 bp, Homo sapiens
attatttagtaaaat

SEQ ID NO: 291667 - DNA, 15 bp, Homo sapiens
tattatttagtaaaa

SEQ ID NO: 291668 - DNA, 15 bp, Homo sapiens
ctattatttagtaaa

SEQ ID NO: 291669 - DNA, 15 bp, Homo sapiens
actattatttagtaa

SEQ ID NO: 291670 - DNA, 15 bp, Homo sapiens
aactattatttagta

SEQ ID NO: 291671 - DNA, 15 bp, Homo sapiens
caactattatttagt

SEQ ID NO: 291672 - DNA, 15 bp, Homo sapiens
tcaactattatttag

SEQ ID NO: 291673 - DNA, 15 bp, Homo sapiens
ctcaactattattta

SEQ ID NO: 291674 - DNA, 15 bp, Homo sapiens
cctcaactattattt

SEQ ID NO: 291675 - DNA, 15 bp, Homo sapiens
tcctcaactattatt

SEQ ID NO: 291676 - DNA, 15 bp, Homo sapiens
atcctcaactattat

SEQ ID NO: 291677 - DNA, 15 bp, Homo sapiens
gatcctcaactatta

SEQ ID NO: 291678 - DNA, 15 bp, Homo sapiens
agatcctcaactatt

SEQ ID NO: 291679 - DNA, 15 bp, Homo sapiens
aagatcctcaactat

SEQ ID NO: 291680 - DNA, 15 bp, Homo sapiens
aaagatcctcaacta

SEQ ID NO: 291681 - DNA, 15 bp, Homo sapiens
aaaagatcctcaact

SEQ ID NO: 291682 - DNA, 15 bp, Homo sapiens
gaaaagatcctcaac

SEQ ID NO: 291683 - DNA, 15 bp, Homo sapiens
tgaaaagatcctcaa

SEQ ID NO: 291684 - DNA, 15 bp, Homo sapiens
ctgaaaagatcctca

SEQ ID NO: 291685 - DNA, 15 bp, Homo sapiens
gctgaaaagatcctc

SEQ ID NO: 291686 - DNA, 15 bp, Homo sapiens
ggctgaaaagatcct

SEQ ID NO: 291687 - DNA, 15 bp, Homo sapiens
gggctgaaaagatcc

SEQ ID NO: 291688 - DNA, 15 bp, Homo sapiens
agggctgaaaagatc

SEQ ID NO: 291689 - DNA, 15 bp, Homo sapiens
tagggctgaaaagat

SEQ ID NO: 291690 - DNA, 15 bp, Homo sapiens
ttagggctgaaaaga

SEQ ID NO: 291691 - DNA, 15 bp, Homo sapiens
tttagggctgaaaag

SEQ ID NO: 291692 - DNA, 15 bp, Homo sapiens
gtttagggctgaaaa

SEQ ID NO: 291693 - DNA, 15 bp, Homo sapiens
tgtttagggctgaaa

SEQ ID NO: 291694 - DNA, 15 bp, Homo sapiens
atgtttagggctgaa

SEQ ID NO: 291695 - DNA, 15 bp, Homo sapiens
aatgtttagggctga

SEQ ID NO: 291696 - DNA, 15 bp, Homo sapiens
gaatgtttagggctg

SEQ ID NO: 291697 - DNA, 15 bp, Homo sapiens
agaatgtttagggct

SEQ ID NO: 291698 - DNA, 15 bp, Homo sapiens
tagaatgtttagggc

SEQ ID NO: 291699 - DNA, 15 bp, Homo sapiens
gtagaatgtttaggg

SEQ ID NO: 291700 - DNA, 15 bp, Homo sapiens
tgtagaatgtttagg

SEQ ID NO: 291701 - DNA, 15 bp, Homo sapiens
ctgtagaatgtttag

SEQ ID NO: 291702 - DNA, 15 bp, Homo sapiens
actgtagaatgttta

SEQ ID NO: 291703 - DNA, 15 bp, Homo sapiens
aactgtagaatgttt

SEQ ID NO: 291704 - DNA, 15 bp, Homo sapiens
gaactgtagaatgtt

SEQ ID NO: 291705 - DNA, 15 bp, Homo sapiens
agaactgtagaatgt

SEQ ID NO: 291706 - DNA, 15 bp, Homo sapiens
aagaactgtagaatg

SEQ ID NO: 291707 - DNA, 15 bp, Homo sapiens
aaagaactgtagaat

SEQ ID NO: 291708 - DNA, 15 bp, Homo sapiens
caaagaactgtagaa

SEQ ID NO: 291709 - DNA, 15 bp, Homo sapiens
gcaaagaactgtaga

SEQ ID NO: 291710 - DNA, 15 bp, Homo sapiens
tgcaaagaactgtag

SEQ ID NO: 291711 - DNA, 15 bp, Homo sapiens
atgcaaagaactgta

SEQ ID NO: 291712 - DNA, 15 bp, Homo sapiens
tatgcaaagaactgt

SEQ ID NO: 291713 - DNA, 15 bp, Homo sapiens
ttatgcaaagaactg

SEQ ID NO: 291714 - DNA, 15 bp, Homo sapiens
attatgcaaagaact

SEQ ID NO: 291715 - DNA, 15 bp, Homo sapiens
aattatgcaaagaac

SEQ ID NO: 291716 - DNA, 15 bp, Homo sapiens
taattatgcaaagaa

SEQ ID NO: 291717 - DNA, 15 bp, Homo sapiens
ttaattatgcaaaga

SEQ ID NO: 291718 - DNA, 15 bp, Homo sapiens
tttaattatgcaaag

SEQ ID NO: 291719 - DNA, 15 bp, Homo sapiens
ctttaattatgcaaa

SEQ ID NO: 291720 - DNA, 15 bp, Homo sapiens
actttaattatgcaa

SEQ ID NO: 291721 - DNA, 15 bp, Homo sapiens
cactttaattatgca

SEQ ID NO: 291722 - DNA, 15 bp, Homo sapiens
acactttaattatgc

SEQ ID NO: 291723 - DNA, 15 bp, Homo sapiens
gacactttaattatg

SEQ ID NO: 291724 - DNA, 15 bp, Homo sapiens
ggacactttaattat

SEQ ID NO: 291725 - DNA, 15 bp, Homo sapiens
gggacactttaatta

SEQ ID NO: 291726 - DNA, 15 bp, Homo sapiens
tgggacactttaatt

SEQ ID NO: 291727 - DNA, 15 bp, Homo sapiens
ttgggacactttaat

SEQ ID NO: 291728 - DNA, 15 bp, Homo sapiens
tttgggacactttaa

SEQ ID NO: 291729 - DNA, 15 bp, Homo sapiens
atttgggacacttta

SEQ ID NO: 291730 - DNA, 15 bp, Homo sapiens
catttgggacacttt

SEQ ID NO: 291731 - DNA, 15 bp, Homo sapiens
acatttgggacactt

SEQ ID NO: 291732 - DNA, 15 bp, Homo sapiens
aacatttgggacact

SEQ ID NO: 291733 - DNA, 15 bp, Homo sapiens
gaacatttgggacac

SEQ ID NO: 291734 - DNA, 15 bp, Homo sapiens
tgaacatttgggaca

SEQ ID NO: 291735 - DNA, 15 bp, Homo sapiens
ctgaacatttgggac

SEQ ID NO: 291736 - DNA, 15 bp, Homo sapiens
gctgaacatttggga

SEQ ID NO: 291737 - DNA, 15 bp, Homo sapiens
agctgaacatttggg

SEQ ID NO: 291738 - DNA, 15 bp, Homo sapiens
tagctgaacatttgg

SEQ ID NO: 291739 - DNA, 15 bp, Homo sapiens
gtagctgaacatttg

SEQ ID NO: 291740 - DNA, 15 bp, Homo sapiens
agtagctgaacattt

SEQ ID NO: 291741 - DNA, 15 bp, Homo sapiens
gagtagctgaacatt

SEQ ID NO: 291742 - DNA, 15 bp, Homo sapiens
ggagtagctgaacat

SEQ ID NO: 291743 - DNA, 15 bp, Homo sapiens
tggagtagctgaaca

SEQ ID NO: 291744 - DNA, 15 bp, Homo sapiens
ttggagtagctgaac

SEQ ID NO: 291745 - DNA, 15 bp, Homo sapiens
tttggagtagctgaa

SEQ ID NO: 291746 - DNA, 15 bp, Homo sapiens
ttttggagtagctga

SEQ ID NO: 291747 - DNA, 15 bp, Homo sapiens
attttggagtagctg

SEQ ID NO: 291748 - DNA, 15 bp, Homo sapiens
aattttggagtagct

SEQ ID NO: 291749 - DNA, 15 bp, Homo sapiens
caattttggagtagc

SEQ ID NO: 291750 - DNA, 15 bp, Homo sapiens
acaattttggagtag

SEQ ID NO: 291751 - DNA, 15 bp, Homo sapiens
tacaattttggagta

SEQ ID NO: 291752 - DNA, 15 bp, Homo sapiens
ttacaattttggagt

SEQ ID NO: 291753 - DNA, 15 bp, Homo sapiens
gttacaattttggag

SEQ ID NO: 291754 - DNA, 15 bp, Homo sapiens
tgttacaattttgga

SEQ ID NO: 291755 - DNA, 15 bp, Homo sapiens
atgttacaattttgg

SEQ ID NO: 291756 - DNA, 15 bp, Homo sapiens
aatgttacaattttg

SEQ ID NO: 291757 - DNA, 15 bp, Homo sapiens
caatgttacaatttt

SEQ ID NO: 291758 - DNA, 15 bp, Homo sapiens
tcaatgttacaattt

SEQ ID NO: 291759 - DNA, 15 bp, Homo sapiens
atcaatgttacaatt

SEQ ID NO: 291760 - DNA, 15 bp, Homo sapiens
tatcaatgttacaat

SEQ ID NO: 291761 - DNA, 15 bp, Homo sapiens
atatcaatgttacaa

SEQ ID NO: 291762 - DNA, 15 bp, Homo sapiens
aatatcaatgttaca

SEQ ID NO: 291763 - DNA, 15 bp, Homo sapiens
aaatatcaatgttac

SEQ ID NO: 291764 - DNA, 15 bp, Homo sapiens
taaatatcaatgtta

SEQ ID NO: 291765 - DNA, 15 bp, Homo sapiens
gtaaatatcaatgtt

SEQ ID NO: 291766 - DNA, 15 bp, Homo sapiens
ggtaaatatcaatgt

SEQ ID NO: 291767 - DNA, 15 bp, Homo sapiens
tggtaaatatcaatg

SEQ ID NO: 291768 - DNA, 15 bp, Homo sapiens
atggtaaatatcaat

SEQ ID NO: 291769 - DNA, 15 bp, Homo sapiens
tatggtaaatatcaa

SEQ ID NO: 291770 - DNA, 15 bp, Homo sapiens
atatggtaaatatca

SEQ ID NO: 291771 - DNA, 15 bp, Homo sapiens
tatatggtaaatatc

SEQ ID NO: 291772 - DNA, 15 bp, Homo sapiens
gtatatggtaaatat

SEQ ID NO: 291773 - DNA, 15 bp, Homo sapiens
agtatatggtaaata

SEQ ID NO: 291774 - DNA, 15 bp, Homo sapiens
cagtatatggtaaat

SEQ ID NO: 291775 - DNA, 15 bp, Homo sapiens
gcagtatatggtaaa

SEQ ID NO: 291776 - DNA, 15 bp, Homo sapiens
ggcagtatatggtaa

SEQ ID NO: 291777 - DNA, 15 bp, Homo sapiens
gggcagtatatggta

SEQ ID NO: 291778 - DNA, 15 bp, Homo sapiens
ggggcagtatatggt

SEQ ID NO: 291779 - DNA, 15 bp, Homo sapiens
gggggcagtatatgg

SEQ ID NO: 291780 - DNA, 15 bp, Homo sapiens
agggggcagtatatg

SEQ ID NO: 291781 - DNA, 15 bp, Homo sapiens
aagggggcagtatat

SEQ ID NO: 291782 - DNA, 15 bp, Homo sapiens
gaagggggcagtata

SEQ ID NO: 291783 - DNA, 15 bp, Homo sapiens
tgaagggggcagtat

SEQ ID NO: 291784 - DNA, 15 bp, Homo sapiens
atgaagggggcagta

SEQ ID NO: 291785 - DNA, 15 bp, Homo sapiens
tatgaagggggcagt

SEQ ID NO: 291786 - DNA, 15 bp, Homo sapiens
ttatgaagggggcag

SEQ ID NO: 291787 - DNA, 15 bp, Homo sapiens
attatgaagggggca

SEQ ID NO: 291788 - DNA, 15 bp, Homo sapiens
tattatgaagggggc

SEQ ID NO: 291789 - DNA, 15 bp, Homo sapiens
gtattatgaaggggg

SEQ ID NO: 291790 - DNA, 15 bp, Homo sapiens
tgtattatgaagggg

SEQ ID NO: 291791 - DNA, 15 bp, Homo sapiens
gtgtattatgaaggg

SEQ ID NO: 291792 - DNA, 15 bp, Homo sapiens
tgtgtattatgaagg

SEQ ID NO: 291793 - DNA, 15 bp, Homo sapiens
gtgtgtattatgaag

SEQ ID NO: 291794 - DNA, 15 bp, Homo sapiens
tgtgtgtattatgaa

SEQ ID NO: 291795 - DNA, 15 bp, Homo sapiens
gtgtgtgtattatga

SEQ ID NO: 291796 - DNA, 15 bp, Homo sapiens
tgtgtgtgtattatg

SEQ ID NO: 291797 - DNA, 15 bp, Homo sapiens
atgtgtgtgtattat

SEQ ID NO: 291798 - DNA, 15 bp, Homo sapiens
tatgtgtgtgtatta

SEQ ID NO: 291799 - DNA, 15 bp, Homo sapiens
ttatgtgtgtgtatt

SEQ ID NO: 291800 - DNA, 15 bp, Homo sapiens
tttatgtgtgtgtat

SEQ ID NO: 291801 - DNA, 15 bp, Homo sapiens
ttttatgtgtgtgta

SEQ ID NO: 291802 - DNA, 15 bp, Homo sapiens
attttatgtgtgtgt

SEQ ID NO: 291803 - DNA, 15 bp, Homo sapiens
aattttatgtgtgtg

SEQ ID NO: 291804 - DNA, 15 bp, Homo sapiens
taattttatgtgtgt

SEQ ID NO: 291805 - DNA, 15 bp, Homo sapiens
ataattttatgtgtg

SEQ ID NO: 291806 - DNA, 15 bp, Homo sapiens
tataattttatgtgt

SEQ ID NO: 291807 - DNA, 15 bp, Homo sapiens
ctataattttatgtg

SEQ ID NO: 291808 - DNA, 15 bp, Homo sapiens
tctataattttatgt

SEQ ID NO: 291809 - DNA, 15 bp, Homo sapiens
ttctataattttatg

SEQ ID NO: 291810 - DNA, 15 bp, Homo sapiens
attctataattttat

SEQ ID NO: 291811 - DNA, 15 bp, Homo sapiens
aattctataatttta

SEQ ID NO: 291812 - DNA, 15 bp, Homo sapiens
taattctataatttt

SEQ ID NO: 291813 - DNA, 15 bp, Homo sapiens
ttaattctataattt

SEQ ID NO: 291814 - DNA, 15 bp, Homo sapiens
gttaattctataatt

SEQ ID NO: 291815 - DNA, 15 bp, Homo sapiens
tgttaattctataat

SEQ ID NO: 291816 - DNA, 15 bp, Homo sapiens
ttgttaattctataa

SEQ ID NO: 291817 - DNA, 15 bp, Homo sapiens
cttgttaattctata

SEQ ID NO: 291818 - DNA, 15 bp, Homo sapiens
tcttgttaattctat

SEQ ID NO: 291819 - DNA, 15 bp, Homo sapiens
atcttgttaattcta

SEQ ID NO: 291820 - DNA, 15 bp, Homo sapiens
gatcttgttaattct

SEQ ID NO: 291821 - DNA, 15 bp, Homo sapiens
agatcttgttaattc

SEQ ID NO: 291822 - DNA, 15 bp, Homo sapiens
aagatcttgttaatt

SEQ ID NO: 291823 - DNA, 15 bp, Homo sapiens
taagatcttgttaat

SEQ ID NO: 291824 - DNA, 15 bp, Homo sapiens
ttaagatcttgttaa

SEQ ID NO: 291825 - DNA, 15 bp, Homo sapiens
cttaagatcttgtta

SEQ ID NO: 291826 - DNA, 15 bp, Homo sapiens
tcttaagatcttgtt

SEQ ID NO: 291827 - DNA, 15 bp, Homo sapiens
ctcttaagatcttgt

SEQ ID NO: 291828 - DNA, 15 bp, Homo sapiens
tctcttaagatcttg

SEQ ID NO: 291829 - DNA, 15 bp, Homo sapiens
atctcttaagatctt

SEQ ID NO: 291830 - DNA, 15 bp, Homo sapiens
aatctcttaagatct

SEQ ID NO: 291831 - DNA, 15 bp, Homo sapiens
caatctcttaagatc

SEQ ID NO: 291832 - DNA, 15 bp, Homo sapiens
tcaatctcttaagat

SEQ ID NO: 291833 - DNA, 15 bp, Homo sapiens
gtcaatctcttaaga

SEQ ID NO: 291834 - DNA, 15 bp, Homo sapiens
ggtcaatctcttaag

SEQ ID NO: 291835 - DNA, 15 bp, Homo sapiens
aggtcaatctcttaa

SEQ ID NO: 291836 - DNA, 15 bp, Homo sapiens
taggtcaatctctta

SEQ ID NO: 291837 - DNA, 15 bp, Homo sapiens
ttaggtcaatctctt

SEQ ID NO: 291838 - DNA, 15 bp, Homo sapiens
attaggtcaatctct

SEQ ID NO: 291839 - DNA, 15 bp, Homo sapiens
aattaggtcaatctc

SEQ ID NO: 291840 - DNA, 15 bp, Homo sapiens
aaattaggtcaatct

SEQ ID NO: 291841 - DNA, 15 bp, Homo sapiens
aaaattaggtcaatc

SEQ ID NO: 291842 - DNA, 15 bp, Homo sapiens
taaaattaggtcaat

SEQ ID NO: 291843 - DNA, 15 bp, Homo sapiens
ataaaattaggtcaa

SEQ ID NO: 291844 - DNA, 15 bp, Homo sapiens
cataaaattaggtca

SEQ ID NO: 291845 - DNA, 15 bp, Homo sapiens
gcataaaattaggtc

SEQ ID NO: 291846 - DNA, 15 bp, Homo sapiens
agcataaaattaggt

SEQ ID NO: 291847 - DNA, 15 bp, Homo sapiens
cagcataaaattagg

SEQ ID NO: 291848 - DNA, 15 bp, Homo sapiens
acagcataaaattag

SEQ ID NO: 291849 - DNA, 15 bp, Homo sapiens
cacagcataaaatta

SEQ ID NO: 291850 - DNA, 15 bp, Homo sapiens
tcacagcataaaatt

SEQ ID NO: 291851 - DNA, 15 bp, Homo sapiens
ttcacagcataaaat

SEQ ID NO: 291852 - DNA, 15 bp, Homo sapiens
tttcacagcataaaa

SEQ ID NO: 291853 - DNA, 15 bp, Homo sapiens
ctttcacagcataaa

SEQ ID NO: 291854 - DNA, 15 bp, Homo sapiens
actttcacagcataa

SEQ ID NO: 291855 - DNA, 15 bp, Homo sapiens
cactttcacagcata

SEQ ID NO: 291856 - DNA, 15 bp, Homo sapiens
ccactttcacagcat

SEQ ID NO: 291857 - DNA, 15 bp, Homo sapiens
accactttcacagca

SEQ ID NO: 291858 - DNA, 15 bp, Homo sapiens
caccactttcacagc

SEQ ID NO: 291859 - DNA, 15 bp, Homo sapiens
tcaccactttcacag

SEQ ID NO: 291860 - DNA, 15 bp, Homo sapiens
atcaccactttcaca

SEQ ID NO: 291861 - DNA, 15 bp, Homo sapiens
aatcaccactttcac

SEQ ID NO: 291862 - DNA, 15 bp, Homo sapiens
aaatcaccactttca

SEQ ID NO: 291863 - DNA, 15 bp, Homo sapiens
aaaatcaccactttc

SEQ ID NO: 291864 - DNA, 15 bp, Homo sapiens
aaaaatcaccacttt

SEQ ID NO: 291865 - DNA, 15 bp, Homo sapiens
taaaaatcaccactt

SEQ ID NO: 291866 - DNA, 15 bp, Homo sapiens
ttaaaaatcaccact

SEQ ID NO: 291867 - DNA, 15 bp, Homo sapiens
tttaaaaatcaccac

SEQ ID NO: 291868 - DNA, 15 bp, Homo sapiens
atttaaaaatcacca

SEQ ID NO: 291869 - DNA, 15 bp, Homo sapiens
catttaaaaatcacc

SEQ ID NO: 291870 - DNA, 15 bp, Homo sapiens
acatttaaaaatcac

SEQ ID NO: 291871 - DNA, 15 bp, Homo sapiens
tacatttaaaaatca

SEQ ID NO: 291872 - DNA, 15 bp, Homo sapiens
atacatttaaaaatc

SEQ ID NO: 291873 - DNA, 15 bp, Homo sapiens
gatacatttaaaaat

SEQ ID NO: 291874 - DNA, 15 bp, Homo sapiens
ggatacatttaaaaa

SEQ ID NO: 291875 - DNA, 15 bp, Homo sapiens
tggatacatttaaaa

SEQ ID NO: 291876 - DNA, 15 bp, Homo sapiens
ctggatacatttaaa

SEQ ID NO: 291877 - DNA, 15 bp, Homo sapiens
cctggatacatttaa

SEQ ID NO: 291878 - DNA, 15 bp, Homo sapiens
tcctggatacattta

SEQ ID NO: 291879 - DNA, 15 bp, Homo sapiens
atcctggatacattt

SEQ ID NO: 291880 - DNA, 15 bp, Homo sapiens
gatcctggatacatt

SEQ ID NO: 291881 - DNA, 15 bp, Homo sapiens
agatcctggatacat

SEQ ID NO: 291882 - DNA, 15 bp, Homo sapiens
aagatcctggataca

SEQ ID NO: 291883 - DNA, 15 bp, Homo sapiens
taagatcctggatac

SEQ ID NO: 291884 - DNA, 15 bp, Homo sapiens
ctaagatcctggata

SEQ ID NO: 291885 - DNA, 15 bp, Homo sapiens
actaagatcctggat

SEQ ID NO: 291886 - DNA, 15 bp, Homo sapiens
tactaagatcctgga

SEQ ID NO: 291887 - DNA, 15 bp, Homo sapiens
atactaagatcctgg

SEQ ID NO: 291888 - DNA, 15 bp, Homo sapiens
gatactaagatcctg

SEQ ID NO: 291889 - DNA, 15 bp, Homo sapiens
ggatactaagatcct

SEQ ID NO: 291890 - DNA, 15 bp, Homo sapiens
aggatactaagatcc

SEQ ID NO: 291891 - DNA, 15 bp, Homo sapiens
aaggatactaagatc

SEQ ID NO: 291892 - DNA, 15 bp, Homo sapiens
aaaggatactaagat

SEQ ID NO: 291893 - DNA, 15 bp, Homo sapiens
gaaaggatactaaga

SEQ ID NO: 291894 - DNA, 15 bp, Homo sapiens
agaaaggatactaag

SEQ ID NO: 291895 - DNA, 15 bp, Homo sapiens
aagaaaggatactaa

SEQ ID NO: 291896 - DNA, 15 bp, Homo sapiens
gaagaaaggatacta

SEQ ID NO: 291897 - DNA, 15 bp, Homo sapiens
agaagaaaggatact

SEQ ID NO: 291898 - DNA, 15 bp, Homo sapiens
aagaagaaaggatac

SEQ ID NO: 291899 - DNA, 15 bp, Homo sapiens
caagaagaaaggata

SEQ ID NO: 291900 - DNA, 15 bp, Homo sapiens
tcaagaagaaaggat

SEQ ID NO: 291901 - DNA, 15 bp, Homo sapiens
ttcaagaagaaagga

SEQ ID NO: 291902 - DNA, 15 bp, Homo sapiens
cttcaagaagaaagg

SEQ ID NO: 291903 - DNA, 15 bp, Homo sapiens
ccttcaagaagaaag

SEQ ID NO: 291904 - DNA, 15 bp, Homo sapiens
accttcaagaagaaa

SEQ ID NO: 291905 - DNA, 15 bp, Homo sapiens
gaccttcaagaagaa

SEQ ID NO: 291906 - DNA, 15 bp, Homo sapiens
agaccttcaagaaga

SEQ ID NO: 291907 - DNA, 15 bp, Homo sapiens
gagaccttcaagaag

SEQ ID NO: 291908 - DNA, 15 bp, Homo sapiens
agagaccttcaagaa

SEQ ID NO: 291909 - DNA, 15 bp, Homo sapiens
cagagaccttcaaga

SEQ ID NO: 291910 - DNA, 15 bp, Homo sapiens
acagagaccttcaag

SEQ ID NO: 291911 - DNA, 15 bp, Homo sapiens
tacagagaccttcaa

SEQ ID NO: 291912 - DNA, 15 bp, Homo sapiens
ttacagagaccttca

SEQ ID NO: 291913 - DNA, 15 bp, Homo sapiens
tttacagagaccttc

SEQ ID NO: 291914 - DNA, 15 bp, Homo sapiens
ctttacagagacctt

SEQ ID NO: 291915 - DNA, 15 bp, Homo sapiens
tctttacagagacct

SEQ ID NO: 291916 - DNA, 15 bp, Homo sapiens
ttctttacagagacc

SEQ ID NO: 291917 - DNA, 15 bp, Homo sapiens
tttctttacagagac

SEQ ID NO: 291918 - DNA, 15 bp, Homo sapiens
ttttctttacagaga

SEQ ID NO: 291919 - DNA, 15 bp, Homo sapiens
tttttctttacagag

SEQ ID NO: 291920 - DNA, 15 bp, Homo sapiens
atttttctttacaga

SEQ ID NO: 291921 - DNA, 15 bp, Homo sapiens
gatttttctttacag

SEQ ID NO: 291922 - DNA, 15 bp, Homo sapiens
tgatttttctttaca

SEQ ID NO: 291923 - DNA, 15 bp, Homo sapiens
atgatttttctttac

SEQ ID NO: 291924 - DNA, 15 bp, Homo sapiens
gatgatttttcttta

SEQ ID NO: 291925 - DNA, 15 bp, Homo sapiens
agatgatttttcttt

SEQ ID NO: 291926 - DNA, 15 bp, Homo sapiens
cagatgatttttctt

SEQ ID NO: 291927 - DNA, 15 bp, Homo sapiens
tcagatgatttttct

SEQ ID NO: 291928 - DNA, 15 bp, Homo sapiens
atcagatgatttttc

SEQ ID NO: 291929 - DNA, 15 bp, Homo sapiens
aatcagatgattttt

SEQ ID NO: 291930 - DNA, 15 bp, Homo sapiens
gaatcagatgatttt

SEQ ID NO: 291931 - DNA, 15 bp, Homo sapiens
agaatcagatgattt

SEQ ID NO: 291932 - DNA, 15 bp, Homo sapiens
aagaatcagatgatt

SEQ ID NO: 291933 - DNA, 15 bp, Homo sapiens
aaagaatcagatgat

SEQ ID NO: 291934 - DNA, 15 bp, Homo sapiens
taaagaatcagatga

SEQ ID NO: 291935 - DNA, 15 bp, Homo sapiens
gtaaagaatcagatg

SEQ ID NO: 291936 - DNA, 15 bp, Homo sapiens
agtaaagaatcagat

SEQ ID NO: 291937 - DNA, 15 bp, Homo sapiens
aagtaaagaatcaga

SEQ ID NO: 291938 - DNA, 15 bp, Homo sapiens
caagtaaagaatcag

SEQ ID NO: 291939 - DNA, 15 bp, Homo sapiens
tcaagtaaagaatca

SEQ ID NO: 291940 - DNA, 15 bp, Homo sapiens
ctcaagtaaagaatc

SEQ ID NO: 291941 - DNA, 15 bp, Homo sapiens
actcaagtaaagaat

SEQ ID NO: 291942 - DNA, 15 bp, Homo sapiens
aactcaagtaaagaa

SEQ ID NO: 291943 - DNA, 15 bp, Homo sapiens
caactcaagtaaaga

SEQ ID NO: 291944 - DNA, 15 bp, Homo sapiens
gcaactcaagtaaag

SEQ ID NO: 291945 - DNA, 15 bp, Homo sapiens
agcaactcaagtaaa

SEQ ID NO: 291946 - DNA, 15 bp, Homo sapiens
tagcaactcaagtaa

SEQ ID NO: 291947 - DNA, 15 bp, Homo sapiens
ttagcaactcaagta

SEQ ID NO: 291948 - DNA, 15 bp, Homo sapiens
cttagcaactcaagt

SEQ ID NO: 291949 - DNA, 15 bp, Homo sapiens
acttagcaactcaag

SEQ ID NO: 291950 - DNA, 15 bp, Homo sapiens
tacttagcaactcaa

SEQ ID NO: 291951 - DNA, 15 bp, Homo sapiens
atacttagcaactca

SEQ ID NO: 291952 - DNA, 15 bp, Homo sapiens
gatacttagcaactc

SEQ ID NO: 291953 - DNA, 15 bp, Homo sapiens
agatacttagcaact

SEQ ID NO: 291954 - DNA, 15 bp, Homo sapiens
aagatacttagcaac

SEQ ID NO: 291955 - DNA, 15 bp, Homo sapiens
taagatacttagcaa

SEQ ID NO: 291956 - DNA, 15 bp, Homo sapiens
ataagatacttagca

SEQ ID NO: 291957 - DNA, 15 bp, Homo sapiens
aataagatacttagc

SEQ ID NO: 291958 - DNA, 15 bp, Homo sapiens
caataagatacttag

SEQ ID NO: 291959 - DNA, 15 bp, Homo sapiens
acaataagatactta

SEQ ID NO: 291960 - DNA, 15 bp, Homo sapiens
gacaataagatactt

SEQ ID NO: 291961 - DNA, 15 bp, Homo sapiens
agacaataagatact

SEQ ID NO: 291962 - DNA, 15 bp, Homo sapiens
aagacaataagatac

SEQ ID NO: 291963 - DNA, 15 bp, Homo sapiens
aaagacaataagata

SEQ ID NO: 291964 - DNA, 15 bp, Homo sapiens
taaagacaataagat

SEQ ID NO: 291965 - DNA, 15 bp, Homo sapiens
ttaaagacaataaga

SEQ ID NO: 291966 - DNA, 15 bp, Homo sapiens
attaaagacaataag

SEQ ID NO: 291967 - DNA, 15 bp, Homo sapiens
aattaaagacaataa

SEQ ID NO: 291968 - DNA, 15 bp, Homo sapiens
aaattaaagacaata

SEQ ID NO: 291969 - DNA, 15 bp, Homo sapiens
caaattaaagacaat

SEQ ID NO: 291970 - DNA, 15 bp, Homo sapiens
tcaaattaaagacaa

SEQ ID NO: 291971 - DNA, 15 bp, Homo sapiens
ttcaaattaaagaca

SEQ ID NO: 291972 - DNA, 15 bp, Homo sapiens
tttcaaattaaagac

SEQ ID NO: 291973 - DNA, 15 bp, Homo sapiens
ttttcaaattaaaga

SEQ ID NO: 291974 - DNA, 15 bp, Homo sapiens
attttcaaattaaag

SEQ ID NO: 291975 - DNA, 15 bp, Homo sapiens
cattttcaaattaaa

SEQ ID NO: 291976 - DNA, 15 bp, Homo sapiens
acattttcaaattaa

SEQ ID NO: 291977 - DNA, 15 bp, Homo sapiens
aacattttcaaatta

SEQ ID NO: 291978 - DNA, 15 bp, Homo sapiens
aaacattttcaaatt

SEQ ID NO: 291979 - DNA, 15 bp, Homo sapiens
taaacattttcaaat

SEQ ID NO: 291980 - DNA, 15 bp, Homo sapiens
ttaaacattttcaaa

SEQ ID NO: 291981 - DNA, 15 bp, Homo sapiens
attaaacattttcaa

SEQ ID NO: 291982 - DNA, 15 bp, Homo sapiens
tattaaacattttca

SEQ ID NO: 291983 - DNA, 15 bp, Homo sapiens
atattaaacattttc

SEQ ID NO: 291984 - DNA, 15 bp, Homo sapiens
aatattaaacatttt

SEQ ID NO: 291985 - DNA, 15 bp, Homo sapiens
aaatattaaacattt

SEQ ID NO: 291986 - DNA, 15 bp, Homo sapiens
caaatattaaacatt

SEQ ID NO: 291987 - DNA, 15 bp, Homo sapiens
ccaaatattaaacat

SEQ ID NO: 291988 - DNA, 15 bp, Homo sapiens
accaaatattaaaca

SEQ ID NO: 291989 - DNA, 15 bp, Homo sapiens
aaccaaatattaaac

SEQ ID NO: 291990 - DNA, 15 bp, Homo sapiens
caaccaaatattaaa

SEQ ID NO: 291991 - DNA, 15 bp, Homo sapiens
acaaccaaatattaa

SEQ ID NO: 291992 - DNA, 15 bp, Homo sapiens
tacaaccaaatatta

SEQ ID NO: 291993 - DNA, 15 bp, Homo sapiens
ttacaaccaaatatt

SEQ ID NO: 291994 - DNA, 15 bp, Homo sapiens
attacaaccaaatat

SEQ ID NO: 291995 - DNA, 15 bp, Homo sapiens
tattacaaccaaata

SEQ ID NO: 291996 - DNA, 15 bp, Homo sapiens
ttattacaaccaaat

SEQ ID NO: 291997 - DNA, 15 bp, Homo sapiens
attattacaaccaaa

SEQ ID NO: 291998 - DNA, 15 bp, Homo sapiens
cattattacaaccaa

SEQ ID NO: 291999 - DNA, 15 bp, Homo sapiens
acattattacaacca

SEQ ID NO: 292000 - DNA, 15 bp, Homo sapiens
aacattattacaacc

SEQ ID NO: 292001 - DNA, 15 bp, Homo sapiens
aaacattattacaac

SEQ ID NO: 292002 - DNA, 15 bp, Homo sapiens
aaaacattattacaa

SEQ ID NO: 292003 - DNA, 15 bp, Homo sapiens
gaaaacattattaca

SEQ ID NO: 292004 - DNA, 15 bp, Homo sapiens
agaaaacattattac

SEQ ID NO: 292005 - DNA, 15 bp, Homo sapiens
aagaaaacattatta

SEQ ID NO: 292006 - DNA, 15 bp, Homo sapiens
taagaaaacattatt

SEQ ID NO: 292007 - DNA, 15 bp, Homo sapiens
ttaagaaaacattat

SEQ ID NO: 292008 - DNA, 15 bp, Homo sapiens
tttaagaaaacatta

SEQ ID NO: 292009 - DNA, 15 bp, Homo sapiens
ttttaagaaaacatt

SEQ ID NO: 292010 - DNA, 15 bp, Homo sapiens
gttttaagaaaacat

SEQ ID NO: 292011 - DNA, 15 bp, Homo sapiens
tgttttaagaaaaca

SEQ ID NO: 292012 - DNA, 15 bp, Homo sapiens
ttgttttaagaaaac

SEQ ID NO: 292013 - DNA, 15 bp, Homo sapiens
attgttttaagaaaa

SEQ ID NO: 292014 - DNA, 15 bp, Homo sapiens
tattgttttaagaaa

SEQ ID NO: 292015 - DNA, 15 bp, Homo sapiens
gtattgttttaagaa

SEQ ID NO: 292016 - DNA, 15 bp, Homo sapiens
ggtattgttttaaga

SEQ ID NO: 292017 - DNA, 15 bp, Homo sapiens
tggtattgttttaag

SEQ ID NO: 292018 - DNA, 15 bp, Homo sapiens
atggtattgttttaa

SEQ ID NO: 292019 - DNA, 15 bp, Homo sapiens
aatggtattgtttta

SEQ ID NO: 292020 - DNA, 15 bp, Homo sapiens
aaatggtattgtttt

SEQ ID NO: 292021 - DNA, 15 bp, Homo sapiens
aaaatggtattgttt

SEQ ID NO: 292022 - DNA, 15 bp, Homo sapiens
caaaatggtattgtt

SEQ ID NO: 292023 - DNA, 15 bp, Homo sapiens
acaaaatggtattgt

SEQ ID NO: 292024 - DNA, 15 bp, Homo sapiens
aacaaaatggtattg

SEQ ID NO: 292025 - DNA, 15 bp, Homo sapiens
caacaaaatggtatt

SEQ ID NO: 292026 - DNA, 15 bp, Homo sapiens
gcaacaaaatggtat

SEQ ID NO: 292027 - DNA, 15 bp, Homo sapiens
ggcaacaaaatggta

SEQ ID NO: 292028 - DNA, 15 bp, Homo sapiens
tggcaacaaaatggt

SEQ ID NO: 292029 - DNA, 15 bp, Homo sapiens
ctggcaacaaaatgg

SEQ ID NO: 292030 - DNA, 15 bp, Homo sapiens
actggcaacaaaatg

SEQ ID NO: 292031 - DNA, 15 bp, Homo sapiens
aactggcaacaaaat

SEQ ID NO: 292032 - DNA, 15 bp, Homo sapiens
aaactggcaacaaaa

SEQ ID NO: 292033 - DNA, 15 bp, Homo sapiens
taaactggcaacaaa

SEQ ID NO: 292034 - DNA, 15 bp, Homo sapiens
ataaactggcaacaa

SEQ ID NO: 292035 - DNA, 15 bp, Homo sapiens
tataaactggcaaca

SEQ ID NO: 292036 - DNA, 15 bp, Homo sapiens
atataaactggcaac

SEQ ID NO: 292037 - DNA, 15 bp, Homo sapiens
tatataaactggcaa

SEQ ID NO: 292038 - DNA, 15 bp, Homo sapiens
ctatataaactggca

SEQ ID NO: 292039 - DNA, 15 bp, Homo sapiens
actatataaactggc

SEQ ID NO: 292040 - DNA, 15 bp, Homo sapiens
aactatataaactgg

SEQ ID NO: 292041 - DNA, 15 bp, Homo sapiens
aaactatataaactg

SEQ ID NO: 292042 - DNA, 15 bp, Homo sapiens
gaaactatataaact

SEQ ID NO: 292043 - DNA, 15 bp, Homo sapiens
agaaactatataaac

SEQ ID NO: 292044 - DNA, 15 bp, Homo sapiens
gagaaactatataaa

SEQ ID NO: 292045 - DNA, 15 bp, Homo sapiens
ggagaaactatataa

SEQ ID NO: 292046 - DNA, 15 bp, Homo sapiens
aggagaaactatata

SEQ ID NO: 292047 - DNA, 15 bp, Homo sapiens
taggagaaactatat

SEQ ID NO: 292048 - DNA, 15 bp, Homo sapiens
ttaggagaaactata

SEQ ID NO: 292049 - DNA, 15 bp, Homo sapiens
tttaggagaaactat

SEQ ID NO: 292050 - DNA, 15 bp, Homo sapiens
ttttaggagaaacta

SEQ ID NO: 292051 - DNA, 15 bp, Homo sapiens
tttttaggagaaact

SEQ ID NO: 292052 - DNA, 15 bp, Homo sapiens
atttttaggagaaac

SEQ ID NO: 292053 - DNA, 15 bp, Homo sapiens
tatttttaggagaaa

SEQ ID NO: 292054 - DNA, 15 bp, Homo sapiens
ttatttttaggagaa

SEQ ID NO: 292055 - DNA, 15 bp, Homo sapiens
attatttttaggaga

SEQ ID NO: 292056 - DNA, 15 bp, Homo sapiens
cattatttttaggag

SEQ ID NO: 292057 - DNA, 15 bp, Homo sapiens
gcattatttttagga

SEQ ID NO: 292058 - DNA, 15 bp, Homo sapiens
ggcattatttttagg

SEQ ID NO: 292059 - DNA, 15 bp, Homo sapiens
tggcattatttttag

SEQ ID NO: 292060 - DNA, 15 bp, Homo sapiens
gtggcattattttta

SEQ ID NO: 292061 - DNA, 15 bp, Homo sapiens
agtggcattattttt

SEQ ID NO: 292062 - DNA, 15 bp, Homo sapiens
tagtggcattatttt

SEQ ID NO: 292063 - DNA, 15 bp, Homo sapiens
atagtggcattattt

SEQ ID NO: 292064 - DNA, 15 bp, Homo sapiens
aatagtggcattatt

SEQ ID NO: 292065 - DNA, 15 bp, Homo sapiens
aaatagtggcattat

SEQ ID NO: 292066 - DNA, 15 bp, Homo sapiens
aaaatagtggcatta

SEQ ID NO: 292067 - DNA, 15 bp, Homo sapiens
taaaatagtggcatt

SEQ ID NO: 292068 - DNA, 15 bp, Homo sapiens
ataaaatagtggcat

SEQ ID NO: 292069 - DNA, 15 bp, Homo sapiens
aataaaatagtggca

SEQ ID NO: 292070 - DNA, 15 bp, Homo sapiens
caataaaatagtggc

SEQ ID NO: 292071 - DNA, 15 bp, Homo sapiens
tcaataaaatagtgg

SEQ ID NO: 292072 - DNA, 15 bp, Homo sapiens
atcaataaaatagtg

SEQ ID NO: 292073 - DNA, 15 bp, Homo sapiens
tatcaataaaatagt

SEQ ID NO: 292074 - DNA, 15 bp, Homo sapiens
atatcaataaaatag

SEQ ID NO: 292075 - DNA, 15 bp, Homo sapiens
catatcaataaaata

SEQ ID NO: 292076 - DNA, 15 bp, Homo sapiens
acatatcaataaaat

SEQ ID NO: 292077 - DNA, 15 bp, Homo sapiens
tacatatcaataaaa

SEQ ID NO: 292078 - DNA, 15 bp, Homo sapiens
ctacatatcaataaa

SEQ ID NO: 292079 - DNA, 15 bp, Homo sapiens
actacatatcaataa

SEQ ID NO: 292080 - DNA, 15 bp, Homo sapiens
aactacatatcaata

SEQ ID NO: 292081 - DNA, 15 bp, Homo sapiens
aaactacatatcaat

SEQ ID NO: 292082 - DNA, 15 bp, Homo sapiens
aaaactacatatcaa

SEQ ID NO: 292083 - DNA, 15 bp, Homo sapiens
taaaactacatatca

SEQ ID NO: 292084 - DNA, 15 bp, Homo sapiens
ataaaactacatatc

SEQ ID NO: 292085 - DNA, 15 bp, Homo sapiens
aataaaactacatat

SEQ ID NO: 292086 - DNA, 15 bp, Homo sapiens
taataaaactacata

SEQ ID NO: 292087 - DNA, 15 bp, Homo sapiens
ctaataaaactacat

SEQ ID NO: 292088 - DNA, 15 bp, Homo sapiens
actaataaaactaca

SEQ ID NO: 292089 - DNA, 15 bp, Homo sapiens
tactaataaaactac

SEQ ID NO: 292090 - DNA, 15 bp, Homo sapiens
ttactaataaaacta

SEQ ID NO: 292091 - DNA, 15 bp, Homo sapiens
tttactaataaaact

SEQ ID NO: 292092 - DNA, 15 bp, Homo sapiens
atttactaataaaac

SEQ ID NO: 292093 - DNA, 15 bp, Homo sapiens
tatttactaataaaa

SEQ ID NO: 292094 - DNA, 15 bp, Homo sapiens
ttatttactaataaa

SEQ ID NO: 292095 - DNA, 15 bp, Homo sapiens
cttatttactaataa

SEQ ID NO: 292096 - DNA, 15 bp, Homo sapiens
acttatttactaata

SEQ ID NO: 292097 - DNA, 15 bp, Homo sapiens
tacttatttactaat

SEQ ID NO: 292098 - DNA, 15 bp, Homo sapiens
atacttatttactaa

SEQ ID NO: 292099 - DNA, 15 bp, Homo sapiens
tatacttatttacta

SEQ ID NO: 292100 - DNA, 15 bp, Homo sapiens
atatacttatttact

SEQ ID NO: 292101 - DNA, 15 bp, Homo sapiens
aatcacagctcactg

SEQ ID NO: 292102 - DNA, 15 bp, Homo sapiens
caatcacagctcact

SEQ ID NO: 292103 - DNA, 15 bp, Homo sapiens
gcaatcacagctcac

SEQ ID NO: 292104 - DNA, 15 bp, Homo sapiens
tgcaatcacagctca

SEQ ID NO: 292105 - DNA, 15 bp, Homo sapiens
gtgcaatcacagctc

SEQ ID NO: 292106 - DNA, 15 bp, Homo sapiens
ggtgcaatcacagct

SEQ ID NO: 292107 - DNA, 15 bp, Homo sapiens
tggtgcaatcacagc

SEQ ID NO: 292108 - DNA, 15 bp, Homo sapiens
gtggtgcaatcacag

SEQ ID NO: 292109 - DNA, 15 bp, Homo sapiens
tgtggtgcaatcaca

SEQ ID NO: 292110 - DNA, 15 bp, Homo sapiens
ctgtggtgcaatcac

SEQ ID NO: 292111 - DNA, 15 bp, Homo sapiens
gctgtggtgcaatca

SEQ ID NO: 292112 - DNA, 15 bp, Homo sapiens
tgctgtggtgcaatc

SEQ ID NO: 292113 - DNA, 15 bp, Homo sapiens
gtgctgtggtgcaat

SEQ ID NO: 292114 - DNA, 15 bp, Homo sapiens
tgtgctgtggtgcaa

SEQ ID NO: 292115 - DNA, 15 bp, Homo sapiens
gtgtgctgtggtgca

SEQ ID NO: 292116 - DNA, 15 bp, Homo sapiens
ggtgtgctgtggtgc

SEQ ID NO: 292117 - DNA, 15 bp, Homo sapiens
tggtgtgctgtggtg

SEQ ID NO: 292118 - DNA, 15 bp, Homo sapiens
ctggtgtgctgtggt

SEQ ID NO: 292119 - DNA, 15 bp, Homo sapiens
gctggtgtgctgtgg

SEQ ID NO: 292120 - DNA, 15 bp, Homo sapiens
ggctggtgtgctgtg

SEQ ID NO: 292121 - DNA, 15 bp, Homo sapiens
aggctggtgtgctgt

SEQ ID NO: 292122 - DNA, 15 bp, Homo sapiens
caggctggtgtgctg

SEQ ID NO: 292123 - DNA, 15 bp, Homo sapiens
ccaggctggtgtgct

SEQ ID NO: 292124 - DNA, 15 bp, Homo sapiens
cccaggctggtgtgc

SEQ ID NO: 292125 - DNA, 15 bp, Homo sapiens
acccaggctggtgtg

SEQ ID NO: 292126 - DNA, 15 bp, Homo sapiens
cacccaggctggtgt

SEQ ID NO: 292127 - DNA, 15 bp, Homo sapiens
ccacccaggctggtg

SEQ ID NO: 292128 - DNA, 15 bp, Homo sapiens
accacccaggctggt

SEQ ID NO: 292129 - DNA, 15 bp, Homo sapiens
taccacccaggctgg

SEQ ID NO: 292130 - DNA, 15 bp, Homo sapiens
ctaccacccaggctg

SEQ ID NO: 292131 - DNA, 15 bp, Homo sapiens
tctaccacccaggct

SEQ ID NO: 292132 - DNA, 15 bp, Homo sapiens
ttctaccacccaggc

SEQ ID NO: 292133 - DNA, 15 bp, Homo sapiens
attctaccacccagg

SEQ ID NO: 292134 - DNA, 15 bp, Homo sapiens
cattctaccacccag

SEQ ID NO: 292135 - DNA, 15 bp, Homo sapiens
tcattctaccaccca

SEQ ID NO: 292136 - DNA, 15 bp, Homo sapiens
ctcattctaccaccc

SEQ ID NO: 292137 - DNA, 15 bp, Homo sapiens
tctcattctaccacc

SEQ ID NO: 292138 - DNA, 15 bp, Homo sapiens
atctcattctaccac

SEQ ID NO: 292139 - DNA, 15 bp, Homo sapiens
gatctcattctacca

SEQ ID NO: 292140 - DNA, 15 bp, Homo sapiens
ggatctcattctacc

SEQ ID NO: 292141 - DNA, 15 bp, Homo sapiens
aggatctcattctac

SEQ ID NO: 292142 - DNA, 15 bp, Homo sapiens
caggatctcattcta

SEQ ID NO: 292143 - DNA, 15 bp, Homo sapiens
gcaggatctcattct

SEQ ID NO: 292144 - DNA, 15 bp, Homo sapiens
ggcaggatctcattc

SEQ ID NO: 292145 - DNA, 15 bp, Homo sapiens
aggcaggatctcatt

SEQ ID NO: 292146 - DNA, 15 bp, Homo sapiens
gaggcaggatctcat

SEQ ID NO: 292147 - DNA, 15 bp, Homo sapiens
tgaggcaggatctca

SEQ ID NO: 292148 - DNA, 15 bp, Homo sapiens
ttgaggcaggatctc

SEQ ID NO: 292149 - DNA, 15 bp, Homo sapiens
tttgaggcaggatct

SEQ ID NO: 292150 - DNA, 15 bp, Homo sapiens
ttttgaggcaggatc

SEQ ID NO: 292151 - DNA, 15 bp, Homo sapiens
tttttgaggcaggat

SEQ ID NO: 292152 - DNA, 15 bp, Homo sapiens
gtttttgaggcagga

SEQ ID NO: 292153 - DNA, 15 bp, Homo sapiens
tgtttttgaggcagg

SEQ ID NO: 292154 - DNA, 15 bp, Homo sapiens
ttgtttttgaggcag

SEQ ID NO: 292155 - DNA, 15 bp, Homo sapiens
tttgtttttgaggca

SEQ ID NO: 292156 - DNA, 15 bp, Homo sapiens
gtttgtttttgaggc

SEQ ID NO: 292157 - DNA, 15 bp, Homo sapiens
tgtttgtttttgagg

SEQ ID NO: 292158 - DNA, 15 bp, Homo sapiens
ttgtttgtttttgag

SEQ ID NO: 292159 - DNA, 15 bp, Homo sapiens
tttgtttgtttttga

SEQ ID NO: 292160 - DNA, 15 bp, Homo sapiens
ttttgtttgtttttg

SEQ ID NO: 292161 - DNA, 15 bp, Homo sapiens
gttttgtttgttttt

SEQ ID NO: 292162 - DNA, 15 bp, Homo sapiens
tgttttgtttgtttt

SEQ ID NO: 292163 - DNA, 15 bp, Homo sapiens
ttgttttgtttgttt

SEQ ID NO: 292164 - DNA, 15 bp, Homo sapiens
cttgttttgtttgtt

SEQ ID NO: 292165 - DNA, 15 bp, Homo sapiens
gcttgttttgtttgt

SEQ ID NO: 292166 - DNA, 15 bp, Homo sapiens
tgcttgttttgtttg

SEQ ID NO: 292167 - DNA, 15 bp, Homo sapiens
ttgcttgttttgttt

SEQ ID NO: 292168 - DNA, 15 bp, Homo sapiens
tttgcttgttttgtt

SEQ ID NO: 292169 - DNA, 15 bp, Homo sapiens
gtttgcttgttttgt

SEQ ID NO: 292170 - DNA, 15 bp, Homo sapiens
tgtttgcttgttttg

SEQ ID NO: 292171 - DNA, 15 bp, Homo sapiens
ttgtttgcttgtttt

SEQ ID NO: 292172 - DNA, 15 bp, Homo sapiens
gttgtttgcttgttt

SEQ ID NO: 292173 - DNA, 15 bp, Homo sapiens
ggttgtttgcttgtt

SEQ ID NO: 292174 - DNA, 15 bp, Homo sapiens
gggttgtttgcttgt

SEQ ID NO: 292175 - DNA, 15 bp, Homo sapiens
ggggttgtttgcttg

SEQ ID NO: 292176 - DNA, 15 bp, Homo sapiens
tggggttgtttgctt

SEQ ID NO: 292177 - DNA, 15 bp, Homo sapiens
ttggggttgtttgct

SEQ ID NO: 292178 - DNA, 15 bp, Homo sapiens
tttggggttgtttgc

SEQ ID NO: 292179 - DNA, 15 bp, Homo sapiens
ttttggggttgtttg

SEQ ID NO: 292180 - DNA, 15 bp, Homo sapiens
gttttggggttgttt

SEQ ID NO: 292181 - DNA, 15 bp, Homo sapiens
tgttttggggttgtt

SEQ ID NO: 292182 - DNA, 15 bp, Homo sapiens
ttgttttggggttgt

SEQ ID NO: 292183 - DNA, 15 bp, Homo sapiens
tttgttttggggttg

SEQ ID NO: 292184 - DNA, 15 bp, Homo sapiens
gtttgttttggggtt

SEQ ID NO: 292185 - DNA, 15 bp, Homo sapiens
tgtttgttttggggt

SEQ ID NO: 292186 - DNA, 15 bp, Homo sapiens
ttgtttgttttgggg

SEQ ID NO: 292187 - DNA, 15 bp, Homo sapiens
tttgtttgttttggg

SEQ ID NO: 292188 - DNA, 15 bp, Homo sapiens
gtttgtttgttttgg

SEQ ID NO: 292189 - DNA, 15 bp, Homo sapiens
tgtttgtttgttttg

SEQ ID NO: 292190 - DNA, 15 bp, Homo sapiens
ttgtttgtttgtttt

SEQ ID NO: 292191 - DNA, 15 bp, Homo sapiens
tttgtttgtttgttt

SEQ ID NO: 292192 - DNA, 15 bp, Homo sapiens
ttttgtttgtttgtt

SEQ ID NO: 292193 - DNA, 15 bp, Homo sapiens
tttttgtttgtttgt

SEQ ID NO: 292194 - DNA, 15 bp, Homo sapiens
ctttttgtttgtttg

SEQ ID NO: 292195 - DNA, 15 bp, Homo sapiens
actttttgtttgttt

SEQ ID NO: 292196 - DNA, 15 bp, Homo sapiens
tactttttgtttgtt

SEQ ID NO: 292197 - DNA, 15 bp, Homo sapiens
ttactttttgtttgt

SEQ ID NO: 292198 - DNA, 15 bp, Homo sapiens
gttactttttgtttg

SEQ ID NO: 292199 - DNA, 15 bp, Homo sapiens
tgttactttttgttt

SEQ ID NO: 292200 - DNA, 15 bp, Homo sapiens
ctgttactttttgtt

SEQ ID NO: 292201 - DNA, 15 bp, Homo sapiens
cctgttactttttgt

SEQ ID NO: 292202 - DNA, 15 bp, Homo sapiens
tcctgttactttttg

SEQ ID NO: 292203 - DNA, 15 bp, Homo sapiens
atcctgttacttttt

SEQ ID NO: 292204 - DNA, 15 bp, Homo sapiens
tatcctgttactttt

SEQ ID NO: 292205 - DNA, 15 bp, Homo sapiens
atatcctgttacttt

SEQ ID NO: 292206 - DNA, 15 bp, Homo sapiens
aatatcctgttactt

SEQ ID NO: 292207 - DNA, 15 bp, Homo sapiens
aaatatcctgttact

SEQ ID NO: 292208 - DNA, 15 bp, Homo sapiens
gaaatatcctgttac

SEQ ID NO: 292209 - DNA, 15 bp, Homo sapiens
tgaaatatcctgtta

SEQ ID NO: 292210 - DNA, 15 bp, Homo sapiens
atgaaatatcctgtt

SEQ ID NO: 292211 - DNA, 15 bp, Homo sapiens
aatgaaatatcctgt

SEQ ID NO: 292212 - DNA, 15 bp, Homo sapiens
taatgaaatatcctg

SEQ ID NO: 292213 - DNA, 15 bp, Homo sapiens
ttaatgaaatatcct

SEQ ID NO: 292214 - DNA, 15 bp, Homo sapiens
tttaatgaaatatcc

SEQ ID NO: 292215 - DNA, 15 bp, Homo sapiens
atttaatgaaatatc

SEQ ID NO: 292216 - DNA, 15 bp, Homo sapiens
tatttaatgaaatat

SEQ ID NO: 292217 - DNA, 15 bp, Homo sapiens
ttatttaatgaaata

SEQ ID NO: 292218 - DNA, 15 bp, Homo sapiens
attatttaatgaaat

SEQ ID NO: 292219 - DNA, 15 bp, Homo sapiens
aattatttaatgaaa

SEQ ID NO: 292220 - DNA, 15 bp, Homo sapiens
gaattatttaatgaa

SEQ ID NO: 292221 - DNA, 15 bp, Homo sapiens
tgaattatttaatga

SEQ ID NO: 292222 - DNA, 15 bp, Homo sapiens
atgaattatttaatg

SEQ ID NO: 292223 - DNA, 15 bp, Homo sapiens
aatgaattatttaat

SEQ ID NO: 292224 - DNA, 15 bp, Homo sapiens
gaatgaattatttaa

SEQ ID NO: 292225 - DNA, 15 bp, Homo sapiens
tgaatgaattattta

SEQ ID NO: 292226 - DNA, 15 bp, Homo sapiens
atgaatgaattattt

SEQ ID NO: 292227 - DNA, 15 bp, Homo sapiens
aatgaatgaattatt

SEQ ID NO: 292228 - DNA, 15 bp, Homo sapiens
taatgaatgaattat

SEQ ID NO: 292229 - DNA, 15 bp, Homo sapiens
ttaatgaatgaatta

SEQ ID NO: 292230 - DNA, 15 bp, Homo sapiens
tttaatgaatgaatt

SEQ ID NO: 292231 - DNA, 15 bp, Homo sapiens
atttaatgaatgaat

SEQ ID NO: 292232 - DNA, 15 bp, Homo sapiens
tatttaatgaatgaa

SEQ ID NO: 292233 - DNA, 15 bp, Homo sapiens
ttatttaatgaatga

SEQ ID NO: 292234 - DNA, 15 bp, Homo sapiens
attatttaatgaatg

SEQ ID NO: 292235 - DNA, 15 bp, Homo sapiens
cattatttaatgaat

SEQ ID NO: 292236 - DNA, 15 bp, Homo sapiens
tcattatttaatgaa

SEQ ID NO: 292237 - DNA, 15 bp, Homo sapiens
ttcattatttaatga

SEQ ID NO: 292238 - DNA, 15 bp, Homo sapiens
cttcattatttaatg

SEQ ID NO: 292239 - DNA, 15 bp, Homo sapiens
acttcattatttaat

SEQ ID NO: 292240 - DNA, 15 bp, Homo sapiens
aacttcattatttaa

SEQ ID NO: 292241 - DNA, 15 bp, Homo sapiens
caacttcattattta

SEQ ID NO: 292242 - DNA, 15 bp, Homo sapiens
tcaacttcattattt

SEQ ID NO: 292243 - DNA, 15 bp, Homo sapiens
ttcaacttcattatt

SEQ ID NO: 292244 - DNA, 15 bp, Homo sapiens
gttcaacttcattat

SEQ ID NO: 292245 - DNA, 15 bp, Homo sapiens
cgttcaacttcatta

SEQ ID NO: 292246 - DNA, 15 bp, Homo sapiens
acgttcaacttcatt

SEQ ID NO: 292247 - DNA, 15 bp, Homo sapiens
tacgttcaacttcat

SEQ ID NO: 292248 - DNA, 15 bp, Homo sapiens
ttacgttcaacttca

SEQ ID NO: 292249 - DNA, 15 bp, Homo sapiens
attacgttcaacttc

SEQ ID NO: 292250 - DNA, 15 bp, Homo sapiens
cattacgttcaactt

SEQ ID NO: 292251 - DNA, 15 bp, Homo sapiens
tcattacgttcaact

SEQ ID NO: 292252 - DNA, 15 bp, Homo sapiens
ttcattacgttcaac

SEQ ID NO: 292253 - DNA, 15 bp, Homo sapiens
attcattacgttcaa

SEQ ID NO: 292254 - DNA, 15 bp, Homo sapiens
aattcattacgttca

SEQ ID NO: 292255 - DNA, 15 bp, Homo sapiens
aaattcattacgttc

SEQ ID NO: 292256 - DNA, 15 bp, Homo sapiens
taaattcattacgtt

SEQ ID NO: 292257 - DNA, 15 bp, Homo sapiens
ttaaattcattacgt

SEQ ID NO: 292258 - DNA, 15 bp, Homo sapiens
attaaattcattacg

SEQ ID NO: 292259 - DNA, 15 bp, Homo sapiens
cattaaattcattac

SEQ ID NO: 292260 - DNA, 15 bp, Homo sapiens
tcattaaattcatta

SEQ ID NO: 292261 - DNA, 15 bp, Homo sapiens
ttcattaaattcatt

SEQ ID NO: 292262 - DNA, 15 bp, Homo sapiens
cttcattaaattcat

SEQ ID NO: 292263 - DNA, 15 bp, Homo sapiens
acttcattaaattca

SEQ ID NO: 292264 - DNA, 15 bp, Homo sapiens
aacttcattaaattc

SEQ ID NO: 292265 - DNA, 15 bp, Homo sapiens
aaacttcattaaatt

SEQ ID NO: 292266 - DNA, 15 bp, Homo sapiens
taaacttcattaaat

SEQ ID NO: 292267 - DNA, 15 bp, Homo sapiens
ttaaacttcattaaa

SEQ ID NO: 292268 - DNA, 15 bp, Homo sapiens
attaaacttcattaa

SEQ ID NO: 292269 - DNA, 15 bp, Homo sapiens
tattaaacttcatta

SEQ ID NO: 292270 - DNA, 15 bp, Homo sapiens
ctattaaacttcatt

SEQ ID NO: 292271 - DNA, 15 bp, Homo sapiens
cctattaaacttcat

SEQ ID NO: 292272 - DNA, 15 bp, Homo sapiens
acctattaaacttca

SEQ ID NO: 292273 - DNA, 15 bp, Homo sapiens
cacctattaaacttc

SEQ ID NO: 292274 - DNA, 15 bp, Homo sapiens
acacctattaaactt

SEQ ID NO: 292275 - DNA, 15 bp, Homo sapiens
tacacctattaaact

SEQ ID NO: 292276 - DNA, 15 bp, Homo sapiens
ctacacctattaaac

SEQ ID NO: 292277 - DNA, 15 bp, Homo sapiens
actacacctattaaa

SEQ ID NO: 292278 - DNA, 15 bp, Homo sapiens
cactacacctattaa

SEQ ID NO: 292279 - DNA, 15 bp, Homo sapiens
ccactacacctatta

SEQ ID NO: 292280 - DNA, 15 bp, Homo sapiens
cccactacacctatt

SEQ ID NO: 292281 - DNA, 15 bp, Homo sapiens
tcccactacacctat

SEQ ID NO: 292282 - DNA, 15 bp, Homo sapiens
ctcccactacaccta

SEQ ID NO: 292283 - DNA, 15 bp, Homo sapiens
actcccactacacct

SEQ ID NO: 292284 - DNA, 15 bp, Homo sapiens
tactcccactacacc

SEQ ID NO: 292285 - DNA, 15 bp, Homo sapiens
ttactcccactacac

SEQ ID NO: 292286 - DNA, 15 bp, Homo sapiens
gttactcccactaca

SEQ ID NO: 292287 - DNA, 15 bp, Homo sapiens
tgttactcccactac

SEQ ID NO: 292288 - DNA, 15 bp, Homo sapiens
ttgttactcccacta

SEQ ID NO: 292289 - DNA, 15 bp, Homo sapiens
attgttactcccact

SEQ ID NO: 292290 - DNA, 15 bp, Homo sapiens
cattgttactcccac

SEQ ID NO: 292291 - DNA, 15 bp, Homo sapiens
tcattgttactccca

SEQ ID NO: 292292 - DNA, 15 bp, Homo sapiens
ctcattgttactccc

SEQ ID NO: 292293 - DNA, 15 bp, Homo sapiens
tctcattgttactcc

SEQ ID NO: 292294 - DNA, 15 bp, Homo sapiens
ttctcattgttactc

SEQ ID NO: 292295 - DNA, 15 bp, Homo sapiens
attctcattgttact

SEQ ID NO: 292296 - DNA, 15 bp, Homo sapiens
cattctcattgttac

SEQ ID NO: 292297 - DNA, 15 bp, Homo sapiens
tcattctcattgtta

SEQ ID NO: 292298 - DNA, 15 bp, Homo sapiens
ttcattctcattgtt

SEQ ID NO: 292299 - DNA, 15 bp, Homo sapiens
tttcattctcattgt

SEQ ID NO: 292300 - DNA, 15 bp, Homo sapiens
ctttcattctcattg

SEQ ID NO: 292301 - DNA, 15 bp, Homo sapiens
actttcattctcatt

SEQ ID NO: 292302 - DNA, 15 bp, Homo sapiens
cactttcattctcat

SEQ ID NO: 292303 - DNA, 15 bp, Homo sapiens
acactttcattctca

SEQ ID NO: 292304 - DNA, 15 bp, Homo sapiens
tacactttcattctc

SEQ ID NO: 292305 - DNA, 15 bp, Homo sapiens
ctacactttcattct

SEQ ID NO: 292306 - DNA, 15 bp, Homo sapiens
cctacactttcattc

SEQ ID NO: 292307 - DNA, 15 bp, Homo sapiens
tcctacactttcatt

SEQ ID NO: 292308 - DNA, 15 bp, Homo sapiens
ctcctacactttcat

SEQ ID NO: 292309 - DNA, 15 bp, Homo sapiens
cctcctacactttca

SEQ ID NO: 292310 - DNA, 15 bp, Homo sapiens
acctcctacactttc

SEQ ID NO: 292311 - DNA, 15 bp, Homo sapiens
aacctcctacacttt

SEQ ID NO: 292312 - DNA, 15 bp, Homo sapiens
caacctcctacactt

SEQ ID NO: 292313 - DNA, 15 bp, Homo sapiens
acaacctcctacact

SEQ ID NO: 292314 - DNA, 15 bp, Homo sapiens
tacaacctcctacac

SEQ ID NO: 292315 - DNA, 15 bp, Homo sapiens
ctacaacctcctaca

SEQ ID NO: 292316 - DNA, 15 bp, Homo sapiens
actacaacctcctac

SEQ ID NO: 292317 - DNA, 15 bp, Homo sapiens
gactacaacctccta

SEQ ID NO: 292318 - DNA, 15 bp, Homo sapiens
tgactacaacctcct

SEQ ID NO: 292319 - DNA, 15 bp, Homo sapiens
ttgactacaacctcc

SEQ ID NO: 292320 - DNA, 15 bp, Homo sapiens
tttgactacaacctc

SEQ ID NO: 292321 - DNA, 15 bp, Homo sapiens
ctttgactacaacct

SEQ ID NO: 292322 - DNA, 15 bp, Homo sapiens
tctttgactacaacc

SEQ ID NO: 292323 - DNA, 15 bp, Homo sapiens
ctctttgactacaac

SEQ ID NO: 292324 - DNA, 15 bp, Homo sapiens
actctttgactacaa

SEQ ID NO: 292325 - DNA, 15 bp, Homo sapiens
aactctttgactaca

SEQ ID NO: 292326 - DNA, 15 bp, Homo sapiens
caactctttgactac

SEQ ID NO: 292327 - DNA, 15 bp, Homo sapiens
acaactctttgacta

SEQ ID NO: 292328 - DNA, 15 bp, Homo sapiens
aacaactctttgact

SEQ ID NO: 292329 - DNA, 15 bp, Homo sapiens
aaacaactctttgac

SEQ ID NO: 292330 - DNA, 15 bp, Homo sapiens
gaaacaactctttga

SEQ ID NO: 292331 - DNA, 15 bp, Homo sapiens
tgaaacaactctttg

SEQ ID NO: 292332 - DNA, 15 bp, Homo sapiens
gtgaaacaactcttt

SEQ ID NO: 292333 - DNA, 15 bp, Homo sapiens
ggtgaaacaactctt

SEQ ID NO: 292334 - DNA, 15 bp, Homo sapiens
aggtgaaacaactct

SEQ ID NO: 292335 - DNA, 15 bp, Homo sapiens
aaggtgaaacaactc

SEQ ID NO: 292336 - DNA, 15 bp, Homo sapiens
taaggtgaaacaact

SEQ ID NO: 292337 - DNA, 15 bp, Homo sapiens
ctaaggtgaaacaac

SEQ ID NO: 292338 - DNA, 15 bp, Homo sapiens
tctaaggtgaaacaa

SEQ ID NO: 292339 - DNA, 15 bp, Homo sapiens
ttctaaggtgaaaca

SEQ ID NO: 292340 - DNA, 15 bp, Homo sapiens
attctaaggtgaaac

SEQ ID NO: 292341 - DNA, 15 bp, Homo sapiens
aattctaaggtgaaa

SEQ ID NO: 292342 - DNA, 15 bp, Homo sapiens
aaattctaaggtgaa

SEQ ID NO: 292343 - DNA, 15 bp, Homo sapiens
gaaattctaaggtga

SEQ ID NO: 292344 - DNA, 15 bp, Homo sapiens
agaaattctaaggtg

SEQ ID NO: 292345 - DNA, 15 bp, Homo sapiens
cagaaattctaaggt

SEQ ID NO: 292346 - DNA, 15 bp, Homo sapiens
ccagaaattctaagg

SEQ ID NO: 292347 - DNA, 15 bp, Homo sapiens
tccagaaattctaag

SEQ ID NO: 292348 - DNA, 15 bp, Homo sapiens
ctccagaaattctaa

SEQ ID NO: 292349 - DNA, 15 bp, Homo sapiens
tctccagaaattcta

SEQ ID NO: 292350 - DNA, 15 bp, Homo sapiens
gtctccagaaattct

SEQ ID NO: 292351 - DNA, 15 bp, Homo sapiens
tgtctccagaaattc

SEQ ID NO: 292352 - DNA, 15 bp, Homo sapiens
ctgtctccagaaatt

SEQ ID NO: 292353 - DNA, 15 bp, Homo sapiens
tctgtctccagaaat

SEQ ID NO: 292354 - DNA, 15 bp, Homo sapiens
ttctgtctccagaaa

SEQ ID NO: 292355 - DNA, 15 bp, Homo sapiens
gttctgtctccagaa

SEQ ID NO: 292356 - DNA, 15 bp, Homo sapiens
tgttctgtctccaga

SEQ ID NO: 292357 - DNA, 15 bp, Homo sapiens
atgttctgtctccag

SEQ ID NO: 292358 - DNA, 15 bp, Homo sapiens
aatgttctgtctcca

SEQ ID NO: 292359 - DNA, 15 bp, Homo sapiens
aaatgttctgtctcc

SEQ ID NO: 292360 - DNA, 15 bp, Homo sapiens
gaaatgttctgtctc

SEQ ID NO: 292361 - DNA, 15 bp, Homo sapiens
agaaatgttctgtct

SEQ ID NO: 292362 - DNA, 15 bp, Homo sapiens
cagaaatgttctgtc

SEQ ID NO: 292363 - DNA, 15 bp, Homo sapiens
ccagaaatgttctgt

SEQ ID NO: 292364 - DNA, 15 bp, Homo sapiens
cccagaaatgttctg

SEQ ID NO: 292365 - DNA, 15 bp, Homo sapiens
acccagaaatgttct

SEQ ID NO: 292366 - DNA, 15 bp, Homo sapiens
tacccagaaatgttc

SEQ ID NO: 292367 - DNA, 15 bp, Homo sapiens
ctacccagaaatgtt

SEQ ID NO: 292368 - DNA, 15 bp, Homo sapiens
actacccagaaatgt

SEQ ID NO: 292369 - DNA, 15 bp, Homo sapiens
aactacccagaaatg

SEQ ID NO: 292370 - DNA, 15 bp, Homo sapiens
aaactacccagaaat

SEQ ID NO: 292371 - DNA, 15 bp, Homo sapiens
taaactacccagaaa

SEQ ID NO: 292372 - DNA, 15 bp, Homo sapiens
gtaaactacccagaa

SEQ ID NO: 292373 - DNA, 15 bp, Homo sapiens
agtaaactacccaga

SEQ ID NO: 292374 - DNA, 15 bp, Homo sapiens
cagtaaactacccag

SEQ ID NO: 292375 - DNA, 15 bp, Homo sapiens
acagtaaactaccca

SEQ ID NO: 292376 - DNA, 15 bp, Homo sapiens
tacagtaaactaccc

SEQ ID NO: 292377 - DNA, 15 bp, Homo sapiens
atacagtaaactacc

SEQ ID NO: 292378 - DNA, 15 bp, Homo sapiens
aatacagtaaactac

SEQ ID NO: 292379 - DNA, 15 bp, Homo sapiens
aaatacagtaaacta

SEQ ID NO: 292380 - DNA, 15 bp, Homo sapiens
aaaatacagtaaact

SEQ ID NO: 292381 - DNA, 15 bp, Homo sapiens
taaaatacagtaaac

SEQ ID NO: 292382 - DNA, 15 bp, Homo sapiens
ttaaaatacagtaaa

SEQ ID NO: 292383 - DNA, 15 bp, Homo sapiens
cttaaaatacagtaa

SEQ ID NO: 292384 - DNA, 15 bp, Homo sapiens
tcttaaaatacagta

SEQ ID NO: 292385 - DNA, 15 bp, Homo sapiens
ttcttaaaatacagt

SEQ ID NO: 292386 - DNA, 15 bp, Homo sapiens
tttcttaaaatacag

SEQ ID NO: 292387 - DNA, 15 bp, Homo sapiens
atttcttaaaataca

SEQ ID NO: 292388 - DNA, 15 bp, Homo sapiens
catttcttaaaatac

SEQ ID NO: 292389 - DNA, 15 bp, Homo sapiens
tcatttcttaaaata

SEQ ID NO: 292390 - DNA, 15 bp, Homo sapiens
atcatttcttaaaat

SEQ ID NO: 292391 - DNA, 15 bp, Homo sapiens
gatcatttcttaaaa

SEQ ID NO: 292392 - DNA, 15 bp, Homo sapiens
agatcatttcttaaa

SEQ ID NO: 292393 - DNA, 15 bp, Homo sapiens
aagatcatttcttaa

SEQ ID NO: 292394 - DNA, 15 bp, Homo sapiens
caagatcatttctta

SEQ ID NO: 292395 - DNA, 15 bp, Homo sapiens
ccaagatcatttctt

SEQ ID NO: 292396 - DNA, 15 bp, Homo sapiens
cccaagatcatttct

SEQ ID NO: 292397 - DNA, 15 bp, Homo sapiens
tcccaagatcatttc

SEQ ID NO: 292398 - DNA, 15 bp, Homo sapiens
ctcccaagatcattt

SEQ ID NO: 292399 - DNA, 15 bp, Homo sapiens
actcccaagatcatt

SEQ ID NO: 292400 - DNA, 15 bp, Homo sapiens
cactcccaagatcat

SEQ ID NO: 292401 - DNA, 15 bp, Homo sapiens
gcactcccaagatca

SEQ ID NO: 292402 - DNA, 15 bp, Homo sapiens
tgcactcccaagatc

SEQ ID NO: 292403 - DNA, 15 bp, Homo sapiens
atgcactcccaagat

SEQ ID NO: 292404 - DNA, 15 bp, Homo sapiens
catgcactcccaaga

SEQ ID NO: 292405 - DNA, 15 bp, Homo sapiens
tcatgcactcccaag

SEQ ID NO: 292406 - DNA, 15 bp, Homo sapiens
ctcatgcactcccaa

SEQ ID NO: 292407 - DNA, 15 bp, Homo sapiens
cctcatgcactccca

SEQ ID NO: 292408 - DNA, 15 bp, Homo sapiens
tcctcatgcactccc

SEQ ID NO: 292409 - DNA, 15 bp, Homo sapiens
atcctcatgcactcc

SEQ ID NO: 292410 - DNA, 15 bp, Homo sapiens
gatcctcatgcactc

SEQ ID NO: 292411 - DNA, 15 bp, Homo sapiens
ggatcctcatgcact

SEQ ID NO: 292412 - DNA, 15 bp, Homo sapiens
aggatcctcatgcac

SEQ ID NO: 292413 - DNA, 15 bp, Homo sapiens
caggatcctcatgca

SEQ ID NO: 292414 - DNA, 15 bp, Homo sapiens
ccaggatcctcatgc

SEQ ID NO: 292415 - DNA, 15 bp, Homo sapiens
gccaggatcctcatg

SEQ ID NO: 292416 - DNA, 15 bp, Homo sapiens
ggccaggatcctcat

SEQ ID NO: 292417 - DNA, 15 bp, Homo sapiens
tggccaggatcctca

SEQ ID NO: 292418 - DNA, 15 bp, Homo sapiens
ttggccaggatcctc

SEQ ID NO: 292419 - DNA, 15 bp, Homo sapiens
cttggccaggatcct

SEQ ID NO: 292420 - DNA, 15 bp, Homo sapiens
ccttggccaggatcc

SEQ ID NO: 292421 - DNA, 15 bp, Homo sapiens
tccttggccaggatc

SEQ ID NO: 292422 - DNA, 15 bp, Homo sapiens
ctccttggccaggat

SEQ ID NO: 292423 - DNA, 15 bp, Homo sapiens
gctccttggccagga

SEQ ID NO: 292424 - DNA, 15 bp, Homo sapiens
ggctccttggccagg

SEQ ID NO: 292425 - DNA, 15 bp, Homo sapiens
tggctccttggccag

SEQ ID NO: 292426 - DNA, 15 bp, Homo sapiens
ctggctccttggcca

SEQ ID NO: 292427 - DNA, 15 bp, Homo sapiens
tctggctccttggcc

SEQ ID NO: 292428 - DNA, 15 bp, Homo sapiens
ttctggctccttggc

SEQ ID NO: 292429 - DNA, 15 bp, Homo sapiens
tttctggctccttgg

SEQ ID NO: 292430 - DNA, 15 bp, Homo sapiens
ctttctggctccttg

SEQ ID NO: 292431 - DNA, 15 bp, Homo sapiens
actttctggctcctt

SEQ ID NO: 292432 - DNA, 15 bp, Homo sapiens
tactttctggctcct

SEQ ID NO: 292433 - DNA, 15 bp, Homo sapiens
gtactttctggctcc

SEQ ID NO: 292434 - DNA, 15 bp, Homo sapiens
tgtactttctggctc

SEQ ID NO: 292435 - DNA, 15 bp, Homo sapiens
ctgtactttctggct

SEQ ID NO: 292436 - DNA, 15 bp, Homo sapiens
actgtactttctggc

SEQ ID NO: 292437 - DNA, 15 bp, Homo sapiens
cactgtactttctgg

SEQ ID NO: 292438 - DNA, 15 bp, Homo sapiens
tcactgtactttctg

SEQ ID NO: 292439 - DNA, 15 bp, Homo sapiens
ctcactgtactttct

SEQ ID NO: 292440 - DNA, 15 bp, Homo sapiens
gctcactgtactttc

SEQ ID NO: 292441 - DNA, 15 bp, Homo sapiens
tgctcactgtacttt

SEQ ID NO: 292442 - DNA, 15 bp, Homo sapiens
ttgctcactgtactt

SEQ ID NO: 292443 - DNA, 15 bp, Homo sapiens
cttgctcactgtact

SEQ ID NO: 292444 - DNA, 15 bp, Homo sapiens
tcttgctcactgtac

SEQ ID NO: 292445 - DNA, 15 bp, Homo sapiens
ctcttgctcactgta

SEQ ID NO: 292446 - DNA, 15 bp, Homo sapiens
actcttgctcactgt

SEQ ID NO: 292447 - DNA, 15 bp, Homo sapiens
gactcttgctcactg

SEQ ID NO: 292448 - DNA, 15 bp, Homo sapiens
ggactcttgctcact

SEQ ID NO: 292449 - DNA, 15 bp, Homo sapiens
tggactcttgctcac

SEQ ID NO: 292450 - DNA, 15 bp, Homo sapiens
ctggactcttgctca

SEQ ID NO: 292451 - DNA, 15 bp, Homo sapiens
cctggactcttgctc

SEQ ID NO: 292452 - DNA, 15 bp, Homo sapiens
tcctggactcttgct

SEQ ID NO: 292453 - DNA, 15 bp, Homo sapiens
gtcctggactcttgc

SEQ ID NO: 292454 - DNA, 15 bp, Homo sapiens
tgtcctggactcttg

SEQ ID NO: 292455 - DNA, 15 bp, Homo sapiens
atgtcctggactctt

SEQ ID NO: 292456 - DNA, 15 bp, Homo sapiens
catgtcctggactct

SEQ ID NO: 292457 - DNA, 15 bp, Homo sapiens
acatgtcctggactc

SEQ ID NO: 292458 - DNA, 15 bp, Homo sapiens
tacatgtcctggact

SEQ ID NO: 292459 - DNA, 15 bp, Homo sapiens
ctacatgtcctggac

SEQ ID NO: 292460 - DNA, 15 bp, Homo sapiens
gctacatgtcctgga

SEQ ID NO: 292461 - DNA, 15 bp, Homo sapiens
tgctacatgtcctgg

SEQ ID NO: 292462 - DNA, 15 bp, Homo sapiens
ttgctacatgtcctg

SEQ ID NO: 292463 - DNA, 15 bp, Homo sapiens
cttgctacatgtcct

SEQ ID NO: 292464 - DNA, 15 bp, Homo sapiens
ccttgctacatgtcc

SEQ ID NO: 292465 - DNA, 15 bp, Homo sapiens
tccttgctacatgtc

SEQ ID NO: 292466 - DNA, 15 bp, Homo sapiens
ctccttgctacatgt

SEQ ID NO: 292467 - DNA, 15 bp, Homo sapiens
cctccttgctacatg

SEQ ID NO: 292468 - DNA, 15 bp, Homo sapiens
tcctccttgctacat

SEQ ID NO: 292469 - DNA, 15 bp, Homo sapiens
ttcctccttgctaca

SEQ ID NO: 292470 - DNA, 15 bp, Homo sapiens
attcctccttgctac

SEQ ID NO: 292471 - DNA, 15 bp, Homo sapiens
cattcctccttgcta

SEQ ID NO: 292472 - DNA, 15 bp, Homo sapiens
acattcctccttgct

SEQ ID NO: 292473 - DNA, 15 bp, Homo sapiens
cacattcctccttgc

SEQ ID NO: 292474 - DNA, 15 bp, Homo sapiens
tcacattcctccttg

SEQ ID NO: 292475 - DNA, 15 bp, Homo sapiens
gtcacattcctcctt

SEQ ID NO: 292476 - DNA, 15 bp, Homo sapiens
agtcacattcctcct

SEQ ID NO: 292477 - DNA, 15 bp, Homo sapiens
cagtcacattcctcc

SEQ ID NO: 292478 - DNA, 15 bp, Homo sapiens
tcagtcacattcctc

SEQ ID NO: 292479 - DNA, 15 bp, Homo sapiens
ttcagtcacattcct

SEQ ID NO: 292480 - DNA, 15 bp, Homo sapiens
tttcagtcacattcc

SEQ ID NO: 292481 - DNA, 15 bp, Homo sapiens
atttcagtcacattc

SEQ ID NO: 292482 - DNA, 15 bp, Homo sapiens
tatttcagtcacatt

SEQ ID NO: 292483 - DNA, 15 bp, Homo sapiens
ttatttcagtcacat

SEQ ID NO: 292484 - DNA, 15 bp, Homo sapiens
tttatttcagtcaca

SEQ ID NO: 292485 - DNA, 15 bp, Homo sapiens
ctttatttcagtcac

SEQ ID NO: 292486 - DNA, 15 bp, Homo sapiens
tctttatttcagtca

SEQ ID NO: 292487 - DNA, 15 bp, Homo sapiens
gtctttatttcagtc

SEQ ID NO: 292488 - DNA, 15 bp, Homo sapiens
agtctttatttcagt

SEQ ID NO: 292489 - DNA, 15 bp, Homo sapiens
tagtctttatttcag

SEQ ID NO: 292490 - DNA, 15 bp, Homo sapiens
ttagtctttatttca

SEQ ID NO: 292491 - DNA, 15 bp, Homo sapiens
attagtctttatttc

SEQ ID NO: 292492 - DNA, 15 bp, Homo sapiens
cattagtctttattt

SEQ ID NO: 292493 - DNA, 15 bp, Homo sapiens
acattagtctttatt

SEQ ID NO: 292494 - DNA, 15 bp, Homo sapiens
gacattagtctttat

SEQ ID NO: 292495 - DNA, 15 bp, Homo sapiens
agacattagtcttta

SEQ ID NO: 292496 - DNA, 15 bp, Homo sapiens
aagacattagtcttt

SEQ ID NO: 292497 - DNA, 15 bp, Homo sapiens
gaagacattagtctt

SEQ ID NO: 292498 - DNA, 15 bp, Homo sapiens
tgaagacattagtct

SEQ ID NO: 292499 - DNA, 15 bp, Homo sapiens
ctgaagacattagtc

SEQ ID NO: 292500 - DNA, 15 bp, Homo sapiens
actgaagacattagt

SEQ ID NO: 292501 - DNA, 15 bp, Homo sapiens
cactgaagacattag

SEQ ID NO: 292502 - DNA, 15 bp, Homo sapiens
gcactgaagacatta

SEQ ID NO: 292503 - DNA, 15 bp, Homo sapiens
agcactgaagacatt

SEQ ID NO: 292504 - DNA, 15 bp, Homo sapiens
aagcactgaagacat

SEQ ID NO: 292505 - DNA, 15 bp, Homo sapiens
caagcactgaagaca

SEQ ID NO: 292506 - DNA, 15 bp, Homo sapiens
tcaagcactgaagac

SEQ ID NO: 292507 - DNA, 15 bp, Homo sapiens
ctcaagcactgaaga

SEQ ID NO: 292508 - DNA, 15 bp, Homo sapiens
cctcaagcactgaag

SEQ ID NO: 292509 - DNA, 15 bp, Homo sapiens
ccctcaagcactgaa

SEQ ID NO: 292510 - DNA, 15 bp, Homo sapiens
cccctcaagcactga

SEQ ID NO: 292511 - DNA, 15 bp, Homo sapiens
tcccctcaagcactg

SEQ ID NO: 292512 - DNA, 15 bp, Homo sapiens
ctcccctcaagcact

SEQ ID NO: 292513 - DNA, 15 bp, Homo sapiens
actcccctcaagcac

SEQ ID NO: 292514 - DNA, 15 bp, Homo sapiens
tactcccctcaagca

SEQ ID NO: 292515 - DNA, 15 bp, Homo sapiens
ttactcccctcaagc

SEQ ID NO: 292516 - DNA, 15 bp, Homo sapiens
gttactcccctcaag

SEQ ID NO: 292517 - DNA, 15 bp, Homo sapiens
ggttactcccctcaa

SEQ ID NO: 292518 - DNA, 15 bp, Homo sapiens
tggttactcccctca

SEQ ID NO: 292519 - DNA, 15 bp, Homo sapiens
ctggttactcccctc

SEQ ID NO: 292520 - DNA, 15 bp, Homo sapiens
cctggttactcccct

SEQ ID NO: 292521 - DNA, 15 bp, Homo sapiens
tcctggttactcccc

SEQ ID NO: 292522 - DNA, 15 bp, Homo sapiens
ctcctggttactccc

SEQ ID NO: 292523 - DNA, 15 bp, Homo sapiens
tctcctggttactcc

SEQ ID NO: 292524 - DNA, 15 bp, Homo sapiens
gtctcctggttactc

SEQ ID NO: 292525 - DNA, 15 bp, Homo sapiens
tgtctcctggttact

SEQ ID NO: 292526 - DNA, 15 bp, Homo sapiens
ttgtctcctggttac

SEQ ID NO: 292527 - DNA, 15 bp, Homo sapiens
cttgtctcctggtta

SEQ ID NO: 292528 - DNA, 15 bp, Homo sapiens
acttgtctcctggtt

SEQ ID NO: 292529 - DNA, 15 bp, Homo sapiens
cacttgtctcctggt

SEQ ID NO: 292530 - DNA, 15 bp, Homo sapiens
ccacttgtctcctgg

SEQ ID NO: 292531 - DNA, 15 bp, Homo sapiens
cccacttgtctcctg

SEQ ID NO: 292532 - DNA, 15 bp, Homo sapiens
tcccacttgtctcct

SEQ ID NO: 292533 - DNA, 15 bp, Homo sapiens
gtcccacttgtctcc

SEQ ID NO: 292534 - DNA, 15 bp, Homo sapiens
agtcccacttgtctc

SEQ ID NO: 292535 - DNA, 15 bp, Homo sapiens
tagtcccacttgtct

SEQ ID NO: 292536 - DNA, 15 bp, Homo sapiens
ttagtcccacttgtc

SEQ ID NO: 292537 - DNA, 15 bp, Homo sapiens
tttagtcccacttgt

SEQ ID NO: 292538 - DNA, 15 bp, Homo sapiens
atttagtcccacttg

SEQ ID NO: 292539 - DNA, 15 bp, Homo sapiens
catttagtcccactt

SEQ ID NO: 292540 - DNA, 15 bp, Homo sapiens
ccatttagtcccact

SEQ ID NO: 292541 - DNA, 15 bp, Homo sapiens
cccatttagtcccac

SEQ ID NO: 292542 - DNA, 15 bp, Homo sapiens
ccccatttagtccca

SEQ ID NO: 292543 - DNA, 15 bp, Homo sapiens
gccccatttagtccc

SEQ ID NO: 292544 - DNA, 15 bp, Homo sapiens
tgccccatttagtcc

SEQ ID NO: 292545 - DNA, 15 bp, Homo sapiens
ctgccccatttagtc

SEQ ID NO: 292546 - DNA, 15 bp, Homo sapiens
tctgccccatttagt

SEQ ID NO: 292547 - DNA, 15 bp, Homo sapiens
ctctgccccatttag

SEQ ID NO: 292548 - DNA, 15 bp, Homo sapiens
cctctgccccattta

SEQ ID NO: 292549 - DNA, 15 bp, Homo sapiens
ccctctgccccattt

SEQ ID NO: 292550 - DNA, 15 bp, Homo sapiens
gccctctgccccatt

SEQ ID NO: 292551 - DNA, 15 bp, Homo sapiens
agccctctgccccat

SEQ ID NO: 292552 - DNA, 15 bp, Homo sapiens
tagccctctgcccca

SEQ ID NO: 292553 - DNA, 15 bp, Homo sapiens
ctagccctctgcccc

SEQ ID NO: 292554 - DNA, 15 bp, Homo sapiens
tctagccctctgccc

SEQ ID NO: 292555 - DNA, 15 bp, Homo sapiens
ctctagccctctgcc

SEQ ID NO: 292556 - DNA, 15 bp, Homo sapiens
tctctagccctctgc

SEQ ID NO: 292557 - DNA, 15 bp, Homo sapiens
ctctctagccctctg

SEQ ID NO: 292558 - DNA, 15 bp, Homo sapiens
cctctctagccctct

SEQ ID NO: 292559 - DNA, 15 bp, Homo sapiens
acctctctagccctc

SEQ ID NO: 292560 - DNA, 15 bp, Homo sapiens
gacctctctagccct

SEQ ID NO: 292561 - DNA, 15 bp, Homo sapiens
ggacctctctagccc

SEQ ID NO: 292562 - DNA, 15 bp, Homo sapiens
aggacctctctagcc

SEQ ID NO: 292563 - DNA, 15 bp, Homo sapiens
caggacctctctagc

SEQ ID NO: 292564 - DNA, 15 bp, Homo sapiens
tcaggacctctctag

SEQ ID NO: 292565 - DNA, 15 bp, Homo sapiens
ttcaggacctctcta

SEQ ID NO: 292566 - DNA, 15 bp, Homo sapiens
tttcaggacctctct

SEQ ID NO: 292567 - DNA, 15 bp, Homo sapiens
ctttcaggacctctc

SEQ ID NO: 292568 - DNA, 15 bp, Homo sapiens
gctttcaggacctct

SEQ ID NO: 292569 - DNA, 15 bp, Homo sapiens
tgctttcaggacctc

SEQ ID NO: 292570 - DNA, 15 bp, Homo sapiens
ttgctttcaggacct

SEQ ID NO: 292571 - DNA, 15 bp, Homo sapiens
tttgctttcaggacc

SEQ ID NO: 292572 - DNA, 15 bp, Homo sapiens
ttttgctttcaggac

SEQ ID NO: 292573 - DNA, 15 bp, Homo sapiens
gttttgctttcagga

SEQ ID NO: 292574 - DNA, 15 bp, Homo sapiens
agttttgctttcagg

SEQ ID NO: 292575 - DNA, 15 bp, Homo sapiens
gagttttgctttcag

SEQ ID NO: 292576 - DNA, 15 bp, Homo sapiens
ggagttttgctttca

SEQ ID NO: 292577 - DNA, 15 bp, Homo sapiens
aggagttttgctttc

SEQ ID NO: 292578 - DNA, 15 bp, Homo sapiens
caggagttttgcttt

SEQ ID NO: 292579 - DNA, 15 bp, Homo sapiens
ccaggagttttgctt

SEQ ID NO: 292580 - DNA, 15 bp, Homo sapiens
gccaggagttttgct

SEQ ID NO: 292581 - DNA, 15 bp, Homo sapiens
agccaggagttttgc

SEQ ID NO: 292582 - DNA, 15 bp, Homo sapiens
gagccaggagttttg

SEQ ID NO: 292583 - DNA, 15 bp, Homo sapiens
tgagccaggagtttt

SEQ ID NO: 292584 - DNA, 15 bp, Homo sapiens
gtgagccaggagttt

SEQ ID NO: 292585 - DNA, 15 bp, Homo sapiens
agtgagccaggagtt

SEQ ID NO: 292586 - DNA, 15 bp, Homo sapiens
aagtgagccaggagt

SEQ ID NO: 292587 - DNA, 15 bp, Homo sapiens
taagtgagccaggag

SEQ ID NO: 292588 - DNA, 15 bp, Homo sapiens
ttaagtgagccagga

SEQ ID NO: 292589 - DNA, 15 bp, Homo sapiens
tttaagtgagccagg

SEQ ID NO: 292590 - DNA, 15 bp, Homo sapiens
ttttaagtgagccag

SEQ ID NO: 292591 - DNA, 15 bp, Homo sapiens
tttttaagtgagcca

SEQ ID NO: 292592 - DNA, 15 bp, Homo sapiens
ttttttaagtgagcc

SEQ ID NO: 292593 - DNA, 15 bp, Homo sapiens
tttttttaagtgagc

SEQ ID NO: 292594 - DNA, 15 bp, Homo sapiens
ttttttttaagtgag

SEQ ID NO: 292595 - DNA, 15 bp, Homo sapiens
gtttttttttaagtg

SEQ ID NO: 292596 - DNA, 15 bp, Homo sapiens
agtttttttttaagt

SEQ ID NO: 292597 - DNA, 15 bp, Homo sapiens
tagtttttttttaag

SEQ ID NO: 292598 - DNA, 15 bp, Homo sapiens
ttagtttttttttaa

SEQ ID NO: 292599 - DNA, 15 bp, Homo sapiens
attagttttttttta

SEQ ID NO: 292600 - DNA, 15 bp, Homo sapiens
gattagttttttttt

SEQ ID NO: 292601 - DNA, 15 bp, Homo sapiens
agattagtttttttt

SEQ ID NO: 292602 - DNA, 15 bp, Homo sapiens
gagattagttttttt

SEQ ID NO: 292603 - DNA, 15 bp, Homo sapiens
agagattagtttttt

SEQ ID NO: 292604 - DNA, 15 bp, Homo sapiens
gagagattagttttt

SEQ ID NO: 292605 - DNA, 15 bp, Homo sapiens
agagagattagtttt

SEQ ID NO: 292606 - DNA, 15 bp, Homo sapiens
gagagagattagttt

SEQ ID NO: 292607 - DNA, 15 bp, Homo sapiens
agagagagattagtt

SEQ ID NO: 292608 - DNA, 15 bp, Homo sapiens
gagagagagattagt

SEQ ID NO: 292609 - DNA, 15 bp, Homo sapiens
tgagagagagattag

SEQ ID NO: 292610 - DNA, 15 bp, Homo sapiens
ttgagagagagatta

SEQ ID NO: 292611 - DNA, 15 bp, Homo sapiens
attgagagagagatt

SEQ ID NO: 292612 - DNA, 15 bp, Homo sapiens
tattgagagagagat

SEQ ID NO: 292613 - DNA, 15 bp, Homo sapiens
gtattgagagagaga

SEQ ID NO: 292614 - DNA, 15 bp, Homo sapiens
ggtattgagagagag

SEQ ID NO: 292615 - DNA, 15 bp, Homo sapiens
aggtattgagagaga

SEQ ID NO: 292616 - DNA, 15 bp, Homo sapiens
taggtattgagagag

SEQ ID NO: 292617 - DNA, 15 bp, Homo sapiens
ttaggtattgagaga

SEQ ID NO: 292618 - DNA, 15 bp, Homo sapiens
attaggtattgagag

SEQ ID NO: 292619 - DNA, 15 bp, Homo sapiens
gattaggtattgaga

SEQ ID NO: 292620 - DNA, 15 bp, Homo sapiens
agattaggtattgag

SEQ ID NO: 292621 - DNA, 15 bp, Homo sapiens
tagattaggtattga

SEQ ID NO: 292622 - DNA, 15 bp, Homo sapiens
ttagattaggtattg

SEQ ID NO: 292623 - DNA, 15 bp, Homo sapiens
attagattaggtatt

SEQ ID NO: 292624 - DNA, 15 bp, Homo sapiens
cattagattaggtat

SEQ ID NO: 292625 - DNA, 15 bp, Homo sapiens
acattagattaggta

SEQ ID NO: 292626 - DNA, 15 bp, Homo sapiens
gacattagattaggt

SEQ ID NO: 292627 - DNA, 15 bp, Homo sapiens
agacattagattagg

SEQ ID NO: 292628 - DNA, 15 bp, Homo sapiens
tagacattagattag

SEQ ID NO: 292629 - DNA, 15 bp, Homo sapiens
ttagacattagatta

SEQ ID NO: 292630 - DNA, 15 bp, Homo sapiens
gttagacattagatt

SEQ ID NO: 292631 - DNA, 15 bp, Homo sapiens
tgttagacattagat

SEQ ID NO: 292632 - DNA, 15 bp, Homo sapiens
atgttagacattaga

SEQ ID NO: 292633 - DNA, 15 bp, Homo sapiens
tatgttagacattag

SEQ ID NO: 292634 - DNA, 15 bp, Homo sapiens
atatgttagacatta

SEQ ID NO: 292635 - DNA, 15 bp, Homo sapiens
tatatgttagacatt

SEQ ID NO: 292636 - DNA, 15 bp, Homo sapiens
ctatatgttagacat

SEQ ID NO: 292637 - DNA, 15 bp, Homo sapiens
tctatatgttagaca

SEQ ID NO: 292638 - DNA, 15 bp, Homo sapiens
ttctatatgttagac

SEQ ID NO: 292639 - DNA, 15 bp, Homo sapiens
attctatatgttaga

SEQ ID NO: 292640 - DNA, 15 bp, Homo sapiens
aattctatatgttag

SEQ ID NO: 292641 - DNA, 15 bp, Homo sapiens
aaattctatatgtta

SEQ ID NO: 292642 - DNA, 15 bp, Homo sapiens
taaattctatatgtt

SEQ ID NO: 292643 - DNA, 15 bp, Homo sapiens
ctaaattctatatgt

SEQ ID NO: 292644 - DNA, 15 bp, Homo sapiens
cctaaattctatatg

SEQ ID NO: 292645 - DNA, 15 bp, Homo sapiens
acctaaattctatat

SEQ ID NO: 292646 - DNA, 15 bp, Homo sapiens
cacctaaattctata

SEQ ID NO: 292647 - DNA, 15 bp, Homo sapiens
gcacctaaattctat

SEQ ID NO: 292648 - DNA, 15 bp, Homo sapiens
tgcacctaaattcta

SEQ ID NO: 292649 - DNA, 15 bp, Homo sapiens
atgcacctaaattct

SEQ ID NO: 292650 - DNA, 15 bp, Homo sapiens
tatgcacctaaattc

SEQ ID NO: 292651 - DNA, 15 bp, Homo sapiens
ttatgcacctaaatt

SEQ ID NO: 292652 - DNA, 15 bp, Homo sapiens
tttatgcacctaaat

SEQ ID NO: 292653 - DNA, 15 bp, Homo sapiens
ctttatgcacctaaa

SEQ ID NO: 292654 - DNA, 15 bp, Homo sapiens
gctttatgcacctaa

SEQ ID NO: 292655 - DNA, 15 bp, Homo sapiens
tgctttatgcaccta

SEQ ID NO: 292656 - DNA, 15 bp, Homo sapiens
atgctttatgcacct

SEQ ID NO: 292657 - DNA, 15 bp, Homo sapiens
aatgctttatgcacc

SEQ ID NO: 292658 - DNA, 15 bp, Homo sapiens
taatgctttatgcac

SEQ ID NO: 292659 - DNA, 15 bp, Homo sapiens
ctaatgctttatgca

SEQ ID NO: 292660 - DNA, 15 bp, Homo sapiens
tctaatgctttatgc

SEQ ID NO: 292661 - DNA, 15 bp, Homo sapiens
atctaatgctttatg

SEQ ID NO: 292662 - DNA, 15 bp, Homo sapiens
aatctaatgctttat

SEQ ID NO: 292663 - DNA, 15 bp, Homo sapiens
aaatctaatgcttta

SEQ ID NO: 292664 - DNA, 15 bp, Homo sapiens
caaatctaatgcttt

SEQ ID NO: 292665 - DNA, 15 bp, Homo sapiens
acaaatctaatgctt

SEQ ID NO: 292666 - DNA, 15 bp, Homo sapiens
tacaaatctaatgct

SEQ ID NO: 292667 - DNA, 15 bp, Homo sapiens
ttacaaatctaatgc

SEQ ID NO: 292668 - DNA, 15 bp, Homo sapiens
attacaaatctaatg

SEQ ID NO: 292669 - DNA, 15 bp, Homo sapiens
cattacaaatctaat

SEQ ID NO: 292670 - DNA, 15 bp, Homo sapiens
acattacaaatctaa

SEQ ID NO: 292671 - DNA, 15 bp, Homo sapiens
gacattacaaatcta

SEQ ID NO: 292672 - DNA, 15 bp, Homo sapiens
ggacattacaaatct

SEQ ID NO: 292673 - DNA, 15 bp, Homo sapiens
aggacattacaaatc

SEQ ID NO: 292674 - DNA, 15 bp, Homo sapiens
aaggacattacaaat

SEQ ID NO: 292675 - DNA, 15 bp, Homo sapiens
aaaggacattacaaa

SEQ ID NO: 292676 - DNA, 15 bp, Homo sapiens
caaaggacattacaa

SEQ ID NO: 292677 - DNA, 15 bp, Homo sapiens
tcaaaggacattaca

SEQ ID NO: 292678 - DNA, 15 bp, Homo sapiens
atcaaaggacattac

SEQ ID NO: 292679 - DNA, 15 bp, Homo sapiens
catcaaaggacatta

SEQ ID NO: 292680 - DNA, 15 bp, Homo sapiens
tcatcaaaggacatt

SEQ ID NO: 292681 - DNA, 15 bp, Homo sapiens
ttcatcaaaggacat

SEQ ID NO: 292682 - DNA, 15 bp, Homo sapiens
attcatcaaaggaca

SEQ ID NO: 292683 - DNA, 15 bp, Homo sapiens
aattcatcaaaggac

SEQ ID NO: 292684 - DNA, 15 bp, Homo sapiens
aaattcatcaaagga

SEQ ID NO: 292685 - DNA, 15 bp, Homo sapiens
taaattcatcaaagg

SEQ ID NO: 292686 - DNA, 15 bp, Homo sapiens
gtaaattcatcaaag

SEQ ID NO: 292687 - DNA, 15 bp, Homo sapiens
ggtaaattcatcaaa

SEQ ID NO: 292688 - DNA, 15 bp, Homo sapiens
aggtaaattcatcaa

SEQ ID NO: 292689 - DNA, 15 bp, Homo sapiens
gaggtaaattcatca

SEQ ID NO: 292690 - DNA, 15 bp, Homo sapiens
agaggtaaattcatc

SEQ ID NO: 292691 - DNA, 15 bp, Homo sapiens
aagaggtaaattcat

SEQ ID NO: 292692 - DNA, 15 bp, Homo sapiens
aaagaggtaaattca

SEQ ID NO: 292693 - DNA, 15 bp, Homo sapiens
taaagaggtaaattc

SEQ ID NO: 292694 - DNA, 15 bp, Homo sapiens
ttaaagaggtaaatt

SEQ ID NO: 292695 - DNA, 15 bp, Homo sapiens
attaaagaggtaaat

SEQ ID NO: 292696 - DNA, 15 bp, Homo sapiens
gattaaagaggtaaa

SEQ ID NO: 292697 - DNA, 15 bp, Homo sapiens
tgattaaagaggtaa

SEQ ID NO: 292698 - DNA, 15 bp, Homo sapiens
atgattaaagaggta

SEQ ID NO: 292699 - DNA, 15 bp, Homo sapiens
aatgattaaagaggt

SEQ ID NO: 292700 - DNA, 15 bp, Homo sapiens
taatgattaaagagg

SEQ ID NO: 292701 - DNA, 15 bp, Homo sapiens
ataatgattaaagag

SEQ ID NO: 292702 - DNA, 15 bp, Homo sapiens
tataatgattaaaga

SEQ ID NO: 292703 - DNA, 15 bp, Homo sapiens
ttataatgattaaag

SEQ ID NO: 292704 - DNA, 15 bp, Homo sapiens
tttataatgattaaa

SEQ ID NO: 292705 - DNA, 15 bp, Homo sapiens
ttttataatgattaa

SEQ ID NO: 292706 - DNA, 15 bp, Homo sapiens
attttataatgatta

SEQ ID NO: 292707 - DNA, 15 bp, Homo sapiens
cattttataatgatt

SEQ ID NO: 292708 - DNA, 15 bp, Homo sapiens
tcattttataatgat

SEQ ID NO: 292709 - DNA, 15 bp, Homo sapiens
gtcattttataatga

SEQ ID NO: 292710 - DNA, 15 bp, Homo sapiens
ggtcattttataatg

SEQ ID NO: 292711 - DNA, 15 bp, Homo sapiens
gggtcattttataat

SEQ ID NO: 292712 - DNA, 15 bp, Homo sapiens
agggtcattttataa

SEQ ID NO: 292713 - DNA, 15 bp, Homo sapiens
gagggtcattttata

SEQ ID NO: 292714 - DNA, 15 bp, Homo sapiens
agagggtcattttat

SEQ ID NO: 292715 - DNA, 15 bp, Homo sapiens
gagagggtcatttta

SEQ ID NO: 292716 - DNA, 15 bp, Homo sapiens
agagagggtcatttt

SEQ ID NO: 292717 - DNA, 15 bp, Homo sapiens
aagagagggtcattt

SEQ ID NO: 292718 - DNA, 15 bp, Homo sapiens
aaagagagggtcatt

SEQ ID NO: 292719 - DNA, 15 bp, Homo sapiens
taaagagagggtcat

SEQ ID NO: 292720 - DNA, 15 bp, Homo sapiens
ataaagagagggtca

SEQ ID NO: 292721 - DNA, 15 bp, Homo sapiens
gataaagagagggtc

SEQ ID NO: 292722 - DNA, 15 bp, Homo sapiens
ggataaagagagggt

SEQ ID NO: 292723 - DNA, 15 bp, Homo sapiens
gggataaagagaggg

SEQ ID NO: 292724 - DNA, 15 bp, Homo sapiens
agggataaagagagg

SEQ ID NO: 292725 - DNA, 15 bp, Homo sapiens
gagggataaagagag

SEQ ID NO: 292726 - DNA, 15 bp, Homo sapiens
cgagggataaagaga

SEQ ID NO: 292727 - DNA, 15 bp, Homo sapiens
acgagggataaagag

SEQ ID NO: 292728 - DNA, 15 bp, Homo sapiens
tacgagggataaaga

SEQ ID NO: 292729 - DNA, 15 bp, Homo sapiens
ttacgagggataaag

SEQ ID NO: 292730 - DNA, 15 bp, Homo sapiens
attacgagggataaa

SEQ ID NO: 292731 - DNA, 15 bp, Homo sapiens
tattacgagggataa

SEQ ID NO: 292732 - DNA, 15 bp, Homo sapiens
atattacgagggata

SEQ ID NO: 292733 - DNA, 15 bp, Homo sapiens
aatattacgagggat

SEQ ID NO: 292734 - DNA, 15 bp, Homo sapiens
caatattacgaggga

SEQ ID NO: 292735 - DNA, 15 bp, Homo sapiens
acaatattacgaggg

SEQ ID NO: 292736 - DNA, 15 bp, Homo sapiens
aacaatattacgagg

SEQ ID NO: 292737 - DNA, 15 bp, Homo sapiens
aaacaatattacgag

SEQ ID NO: 292738 - DNA, 15 bp, Homo sapiens
caaacaatattacga

SEQ ID NO: 292739 - DNA, 15 bp, Homo sapiens
gcaaacaatattacg

SEQ ID NO: 292740 - DNA, 15 bp, Homo sapiens
agcaaacaatattac

SEQ ID NO: 292741 - DNA, 15 bp, Homo sapiens
gagcaaacaatatta

SEQ ID NO: 292742 - DNA, 15 bp, Homo sapiens
agagcaaacaatatt

SEQ ID NO: 292743 - DNA, 15 bp, Homo sapiens
cagagcaaacaatat

SEQ ID NO: 292744 - DNA, 15 bp, Homo sapiens
tcagagcaaacaata

SEQ ID NO: 292745 - DNA, 15 bp, Homo sapiens
ttcagagcaaacaat

SEQ ID NO: 292746 - DNA, 15 bp, Homo sapiens
tttcagagcaaacaa

SEQ ID NO: 292747 - DNA, 15 bp, Homo sapiens
ttttcagagcaaaca

SEQ ID NO: 292748 - DNA, 15 bp, Homo sapiens
gttttcagagcaaac

SEQ ID NO: 292749 - DNA, 15 bp, Homo sapiens
agttttcagagcaaa

SEQ ID NO: 292750 - DNA, 15 bp, Homo sapiens
tagttttcagagcaa

SEQ ID NO: 292751 - DNA, 15 bp, Homo sapiens
gtagttttcagagca

SEQ ID NO: 292752 - DNA, 15 bp, Homo sapiens
agtagttttcagagc

SEQ ID NO: 292753 - DNA, 15 bp, Homo sapiens
aagtagttttcagag

SEQ ID NO: 292754 - DNA, 15 bp, Homo sapiens
caagtagttttcaga

SEQ ID NO: 292755 - DNA, 15 bp, Homo sapiens
acaagtagttttcag

SEQ ID NO: 292756 - DNA, 15 bp, Homo sapiens
cacaagtagttttca

SEQ ID NO: 292757 - DNA, 15 bp, Homo sapiens
gcacaagtagttttc

SEQ ID NO: 292758 - DNA, 15 bp, Homo sapiens
ggcacaagtagtttt

SEQ ID NO: 292759 - DNA, 15 bp, Homo sapiens
aggcacaagtagttt

SEQ ID NO: 292760 - DNA, 15 bp, Homo sapiens
caggcacaagtagtt

SEQ ID NO: 292761 - DNA, 15 bp, Homo sapiens
tcaggcacaagtagt

SEQ ID NO: 292762 - DNA, 15 bp, Homo sapiens
atcaggcacaagtag

SEQ ID NO: 292763 - DNA, 15 bp, Homo sapiens
tatcaggcacaagta

SEQ ID NO: 292764 - DNA, 15 bp, Homo sapiens
gtatcaggcacaagt

SEQ ID NO: 292765 - DNA, 15 bp, Homo sapiens
agtatcaggcacaag

SEQ ID NO: 292766 - DNA, 15 bp, Homo sapiens
tagtatcaggcacaa

SEQ ID NO: 292767 - DNA, 15 bp, Homo sapiens
ctagtatcaggcaca

SEQ ID NO: 292768 - DNA, 15 bp, Homo sapiens
actagtatcaggcac

SEQ ID NO: 292769 - DNA, 15 bp, Homo sapiens
cactagtatcaggca

SEQ ID NO: 292770 - DNA, 15 bp, Homo sapiens
tcactagtatcaggc

SEQ ID NO: 292771 - DNA, 15 bp, Homo sapiens
ttcactagtatcagg

SEQ ID NO: 292772 - DNA, 15 bp, Homo sapiens
cttcactagtatcag

SEQ ID NO: 292773 - DNA, 15 bp, Homo sapiens
gcttcactagtatca

SEQ ID NO: 292774 - DNA, 15 bp, Homo sapiens
ggcttcactagtatc

SEQ ID NO: 292775 - DNA, 15 bp, Homo sapiens
tggcttcactagtat

SEQ ID NO: 292776 - DNA, 15 bp, Homo sapiens
atggcttcactagta

SEQ ID NO: 292777 - DNA, 15 bp, Homo sapiens
aatggcttcactagt

SEQ ID NO: 292778 - DNA, 15 bp, Homo sapiens
gaatggcttcactag

SEQ ID NO: 292779 - DNA, 15 bp, Homo sapiens
ggaatggcttcacta

SEQ ID NO: 292780 - DNA, 15 bp, Homo sapiens
tggaatggcttcact

SEQ ID NO: 292781 - DNA, 15 bp, Homo sapiens
ctggaatggcttcac

SEQ ID NO: 292782 - DNA, 15 bp, Homo sapiens
gctggaatggcttca

SEQ ID NO: 292783 - DNA, 15 bp, Homo sapiens
agctggaatggcttc

SEQ ID NO: 292784 - DNA, 15 bp, Homo sapiens
aagctggaatggctt

SEQ ID NO: 292785 - DNA, 15 bp, Homo sapiens
aaagctggaatggct

SEQ ID NO: 292786 - DNA, 15 bp, Homo sapiens
gaaagctggaatggc

SEQ ID NO: 292787 - DNA, 15 bp, Homo sapiens
agaaagctggaatgg

SEQ ID NO: 292788 - DNA, 15 bp, Homo sapiens
aagaaagctggaatg

SEQ ID NO: 292789 - DNA, 15 bp, Homo sapiens
gaagaaagctggaat

SEQ ID NO: 292790 - DNA, 15 bp, Homo sapiens
ggaagaaagctggaa

SEQ ID NO: 292791 - DNA, 15 bp, Homo sapiens
gggaagaaagctgga

SEQ ID NO: 292792 - DNA, 15 bp, Homo sapiens
tgggaagaaagctgg

SEQ ID NO: 292793 - DNA, 15 bp, Homo sapiens
atgggaagaaagctg

SEQ ID NO: 292794 - DNA, 15 bp, Homo sapiens
aatgggaagaaagct

SEQ ID NO: 292795 - DNA, 15 bp, Homo sapiens
taatgggaagaaagc

SEQ ID NO: 292796 - DNA, 15 bp, Homo sapiens
ttaatgggaagaaag

SEQ ID NO: 292797 - DNA, 15 bp, Homo sapiens
attaatgggaagaaa

SEQ ID NO: 292798 - DNA, 15 bp, Homo sapiens
tattaatgggaagaa

SEQ ID NO: 292799 - DNA, 15 bp, Homo sapiens
atattaatgggaaga

SEQ ID NO: 292800 - DNA, 15 bp, Homo sapiens
gatattaatgggaag

SEQ ID NO: 292801 - DNA, 15 bp, Homo sapiens
tgatattaatgggaa

SEQ ID NO: 292802 - DNA, 15 bp, Homo sapiens
ttgatattaatggga

SEQ ID NO: 292803 - DNA, 15 bp, Homo sapiens
gttgatattaatggg

SEQ ID NO: 292804 - DNA, 15 bp, Homo sapiens
tgttgatattaatgg

SEQ ID NO: 292805 - DNA, 15 bp, Homo sapiens
atgttgatattaatg

SEQ ID NO: 292806 - DNA, 15 bp, Homo sapiens
catgttgatattaat

SEQ ID NO: 292807 - DNA, 15 bp, Homo sapiens
ccatgttgatattaa

SEQ ID NO: 292808 - DNA, 15 bp, Homo sapiens
gccatgttgatatta

SEQ ID NO: 292809 - DNA, 15 bp, Homo sapiens
tgccatgttgatatt

SEQ ID NO: 292810 - DNA, 15 bp, Homo sapiens
atgccatgttgatat

SEQ ID NO: 292811 - DNA, 15 bp, Homo sapiens
tatgccatgttgata

SEQ ID NO: 292812 - DNA, 15 bp, Homo sapiens
atatgccatgttgat

SEQ ID NO: 292813 - DNA, 15 bp, Homo sapiens
aatatgccatgttga

SEQ ID NO: 292814 - DNA, 15 bp, Homo sapiens
aaatatgccatgttg

SEQ ID NO: 292815 - DNA, 15 bp, Homo sapiens
aaaatatgccatgtt

SEQ ID NO: 292816 - DNA, 15 bp, Homo sapiens
gaaaatatgccatgt

SEQ ID NO: 292817 - DNA, 15 bp, Homo sapiens
ggaaaatatgccatg

SEQ ID NO: 292818 - DNA, 15 bp, Homo sapiens
gggaaaatatgccat

SEQ ID NO: 292819 - DNA, 15 bp, Homo sapiens
ggggaaaatatgcca

SEQ ID NO: 292820 - DNA, 15 bp, Homo sapiens
tggggaaaatatgcc

SEQ ID NO: 292821 - DNA, 15 bp, Homo sapiens
atggggaaaatatgc

SEQ ID NO: 292822 - DNA, 15 bp, Homo sapiens
aatggggaaaatatg

SEQ ID NO: 292823 - DNA, 15 bp, Homo sapiens
gaatggggaaaatat

SEQ ID NO: 292824 - DNA, 15 bp, Homo sapiens
agaatggggaaaata

SEQ ID NO: 292825 - DNA, 15 bp, Homo sapiens
aagaatggggaaaat

SEQ ID NO: 292826 - DNA, 15 bp, Homo sapiens
aaagaatggggaaaa

SEQ ID NO: 292827 - DNA, 15 bp, Homo sapiens
taaagaatggggaaa

SEQ ID NO: 292828 - DNA, 15 bp, Homo sapiens
ataaagaatggggaa

SEQ ID NO: 292829 - DNA, 15 bp, Homo sapiens
aataaagaatgggga

SEQ ID NO: 292830 - DNA, 15 bp, Homo sapiens
aaataaagaatgggg

SEQ ID NO: 292831 - DNA, 15 bp, Homo sapiens
taaataaagaatggg

SEQ ID NO: 292832 - DNA, 15 bp, Homo sapiens
ttaaataaagaatgg

SEQ ID NO: 292833 - DNA, 15 bp, Homo sapiens
gttaaataaagaatg

SEQ ID NO: 292834 - DNA, 15 bp, Homo sapiens
agttaaataaagaat

SEQ ID NO: 292835 - DNA, 15 bp, Homo sapiens
aagttaaataaagaa

SEQ ID NO: 292836 - DNA, 15 bp, Homo sapiens
taagttaaataaaga

SEQ ID NO: 292837 - DNA, 15 bp, Homo sapiens
ataagttaaataaag

SEQ ID NO: 292838 - DNA, 15 bp, Homo sapiens
tataagttaaataaa

SEQ ID NO: 292839 - DNA, 15 bp, Homo sapiens
gtataagttaaataa

SEQ ID NO: 292840 - DNA, 15 bp, Homo sapiens
cgtataagttaaata

SEQ ID NO: 292841 - DNA, 15 bp, Homo sapiens
acgtataagttaaat

SEQ ID NO: 292842 - DNA, 15 bp, Homo sapiens
cacgtataagttaaa

SEQ ID NO: 292843 - DNA, 15 bp, Homo sapiens
acacgtataagttaa

SEQ ID NO: 292844 - DNA, 15 bp, Homo sapiens
gacacgtataagtta

SEQ ID NO: 292845 - DNA, 15 bp, Homo sapiens
agacacgtataagtt

SEQ ID NO: 292846 - DNA, 15 bp, Homo sapiens
aagacacgtataagt

SEQ ID NO: 292847 - DNA, 15 bp, Homo sapiens
aaagacacgtataag

SEQ ID NO: 292848 - DNA, 15 bp, Homo sapiens
taaagacacgtataa

SEQ ID NO: 292849 - DNA, 15 bp, Homo sapiens
ataaagacacgtata

SEQ ID NO: 292850 - DNA, 15 bp, Homo sapiens
aataaagacacgtat

SEQ ID NO: 292851 - DNA, 15 bp, Homo sapiens
gaataaagacacgta

SEQ ID NO: 292852 - DNA, 15 bp, Homo sapiens
agaataaagacacgt

SEQ ID NO: 292853 - DNA, 15 bp, Homo sapiens
aagaataaagacacg

SEQ ID NO: 292854 - DNA, 15 bp, Homo sapiens
taagaataaagacac

SEQ ID NO: 292855 - DNA, 15 bp, Homo sapiens
ttaagaataaagaca

SEQ ID NO: 292856 - DNA, 15 bp, Homo sapiens
tttaagaataaagac

SEQ ID NO: 292857 - DNA, 15 bp, Homo sapiens
ctttaagaataaaga

SEQ ID NO: 292858 - DNA, 15 bp, Homo sapiens
tctttaagaataaag

SEQ ID NO: 292859 - DNA, 15 bp, Homo sapiens
ttctttaagaataaa

SEQ ID NO: 292860 - DNA, 15 bp, Homo sapiens
cttctttaagaataa

SEQ ID NO: 292861 - DNA, 15 bp, Homo sapiens
acttctttaagaata

SEQ ID NO: 292862 - DNA, 15 bp, Homo sapiens
cacttctttaagaat

SEQ ID NO: 292863 - DNA, 15 bp, Homo sapiens
tcacttctttaagaa

SEQ ID NO: 292864 - DNA, 15 bp, Homo sapiens
atcacttctttaaga

SEQ ID NO: 292865 - DNA, 15 bp, Homo sapiens
aatcacttctttaag

SEQ ID NO: 292866 - DNA, 15 bp, Homo sapiens
aaatcacttctttaa

SEQ ID NO: 292867 - DNA, 15 bp, Homo sapiens
aaaatcacttcttta

SEQ ID NO: 292868 - DNA, 15 bp, Homo sapiens
gaaaatcacttcttt

SEQ ID NO: 292869 - DNA, 15 bp, Homo sapiens
agaaaatcacttctt

SEQ ID NO: 292870 - DNA, 15 bp, Homo sapiens
aagaaaatcacttct

SEQ ID NO: 292871 - DNA, 15 bp, Homo sapiens
taagaaaatcacttc

SEQ ID NO: 292872 - DNA, 15 bp, Homo sapiens
ataagaaaatcactt

SEQ ID NO: 292873 - DNA, 15 bp, Homo sapiens
tataagaaaatcact

SEQ ID NO: 292874 - DNA, 15 bp, Homo sapiens
ctataagaaaatcac

SEQ ID NO: 292875 - DNA, 15 bp, Homo sapiens
cctataagaaaatca

SEQ ID NO: 292876 - DNA, 15 bp, Homo sapiens
gcctataagaaaatc

SEQ ID NO: 292877 - DNA, 15 bp, Homo sapiens
tgcctataagaaaat

SEQ ID NO: 292878 - DNA, 15 bp, Homo sapiens
ctgcctataagaaaa

SEQ ID NO: 292879 - DNA, 15 bp, Homo sapiens
gctgcctataagaaa

SEQ ID NO: 292880 - DNA, 15 bp, Homo sapiens
tgctgcctataagaa

SEQ ID NO: 292881 - DNA, 15 bp, Homo sapiens
atgctgcctataaga

SEQ ID NO: 292882 - DNA, 15 bp, Homo sapiens
tatgctgcctataag

SEQ ID NO: 292883 - DNA, 15 bp, Homo sapiens
atatgctgcctataa

SEQ ID NO: 292884 - DNA, 15 bp, Homo sapiens
aatatgctgcctata

SEQ ID NO: 292885 - DNA, 15 bp, Homo sapiens
caatatgctgcctat

SEQ ID NO: 292886 - DNA, 15 bp, Homo sapiens
acaatatgctgccta

SEQ ID NO: 292887 - DNA, 15 bp, Homo sapiens
aacaatatgctgcct

SEQ ID NO: 292888 - DNA, 15 bp, Homo sapiens
caacaatatgctgcc

SEQ ID NO: 292889 - DNA, 15 bp, Homo sapiens
ccaacaatatgctgc

SEQ ID NO: 292890 - DNA, 15 bp, Homo sapiens
cccaacaatatgctg

SEQ ID NO: 292891 - DNA, 15 bp, Homo sapiens
acccaacaatatgct

SEQ ID NO: 292892 - DNA, 15 bp, Homo sapiens
cacccaacaatatgc

SEQ ID NO: 292893 - DNA, 15 bp, Homo sapiens
acacccaacaatatg

SEQ ID NO: 292894 - DNA, 15 bp, Homo sapiens
aacacccaacaatat

SEQ ID NO: 292895 - DNA, 15 bp, Homo sapiens
caacacccaacaata

SEQ ID NO: 292896 - DNA, 15 bp, Homo sapiens
gcaacacccaacaat

SEQ ID NO: 292897 - DNA, 15 bp, Homo sapiens
agcaacacccaacaa

SEQ ID NO: 292898 - DNA, 15 bp, Homo sapiens
aagcaacacccaaca

SEQ ID NO: 292899 - DNA, 15 bp, Homo sapiens
aaagcaacacccaac

SEQ ID NO: 292900 - DNA, 15 bp, Homo sapiens
gaaagcaacacccaa

SEQ ID NO: 292901 - DNA, 15 bp, Homo sapiens
agaaagcaacaccca

SEQ ID NO: 292902 - DNA, 15 bp, Homo sapiens
aagaaagcaacaccc

SEQ ID NO: 292903 - DNA, 15 bp, Homo sapiens
taagaaagcaacacc

SEQ ID NO: 292904 - DNA, 15 bp, Homo sapiens
ttaagaaagcaacac

SEQ ID NO: 292905 - DNA, 15 bp, Homo sapiens
tttaagaaagcaaca

SEQ ID NO: 292906 - DNA, 15 bp, Homo sapiens
atttaagaaagcaac

SEQ ID NO: 292907 - DNA, 15 bp, Homo sapiens
gatttaagaaagcaa

SEQ ID NO: 292908 - DNA, 15 bp, Homo sapiens
agatttaagaaagca

SEQ ID NO: 292909 - DNA, 15 bp, Homo sapiens
aagatttaagaaagc

SEQ ID NO: 292910 - DNA, 15 bp, Homo sapiens
caagatttaagaaag

SEQ ID NO: 292911 - DNA, 15 bp, Homo sapiens
gcaagatttaagaaa

SEQ ID NO: 292912 - DNA, 15 bp, Homo sapiens
ggcaagatttaagaa

SEQ ID NO: 292913 - DNA, 15 bp, Homo sapiens
aggcaagatttaaga

SEQ ID NO: 292914 - DNA, 15 bp, Homo sapiens
taggcaagatttaag

SEQ ID NO: 292915 - DNA, 15 bp, Homo sapiens
ttaggcaagatttaa

SEQ ID NO: 292916 - DNA, 15 bp, Homo sapiens
gttaggcaagattta

SEQ ID NO: 292917 - DNA, 15 bp, Homo sapiens
tgttaggcaagattt

SEQ ID NO: 292918 - DNA, 15 bp, Homo sapiens
ctgttaggcaagatt

SEQ ID NO: 292919 - DNA, 15 bp, Homo sapiens
actgttaggcaagat

SEQ ID NO: 292920 - DNA, 15 bp, Homo sapiens
tactgttaggcaaga

SEQ ID NO: 292921 - DNA, 15 bp, Homo sapiens
atactgttaggcaag

SEQ ID NO: 292922 - DNA, 15 bp, Homo sapiens
gatactgttaggcaa

SEQ ID NO: 292923 - DNA, 15 bp, Homo sapiens
agatactgttaggca

SEQ ID NO: 292924 - DNA, 15 bp, Homo sapiens
cagatactgttaggc

SEQ ID NO: 292925 - DNA, 15 bp, Homo sapiens
gcagatactgttagg

SEQ ID NO: 292926 - DNA, 15 bp, Homo sapiens
ggcagatactgttag

SEQ ID NO: 292927 - DNA, 15 bp, Homo sapiens
aggcagatactgtta

SEQ ID NO: 292928 - DNA, 15 bp, Homo sapiens
aaggcagatactgtt

SEQ ID NO: 292929 - DNA, 15 bp, Homo sapiens
aaaggcagatactgt

SEQ ID NO: 292930 - DNA, 15 bp, Homo sapiens
aaaaggcagatactg

SEQ ID NO: 292931 - DNA, 15 bp, Homo sapiens
taaaaggcagatact

SEQ ID NO: 292932 - DNA, 15 bp, Homo sapiens
ttaaaaggcagatac

SEQ ID NO: 292933 - DNA, 15 bp, Homo sapiens
attaaaaggcagata

SEQ ID NO: 292934 - DNA, 15 bp, Homo sapiens
aattaaaaggcagat

SEQ ID NO: 292935 - DNA, 15 bp, Homo sapiens
caattaaaaggcaga

SEQ ID NO: 292936 - DNA, 15 bp, Homo sapiens
ccaattaaaaggcag

SEQ ID NO: 292937 - DNA, 15 bp, Homo sapiens
cccaattaaaaggca

SEQ ID NO: 292938 - DNA, 15 bp, Homo sapiens
tcccaattaaaaggc

SEQ ID NO: 292939 - DNA, 15 bp, Homo sapiens
atcccaattaaaagg

SEQ ID NO: 292940 - DNA, 15 bp, Homo sapiens
catcccaattaaaag

SEQ ID NO: 292941 - DNA, 15 bp, Homo sapiens
acatcccaattaaaa

SEQ ID NO: 292942 - DNA, 15 bp, Homo sapiens
aacatcccaattaaa

SEQ ID NO: 292943 - DNA, 15 bp, Homo sapiens
aaacatcccaattaa

SEQ ID NO: 292944 - DNA, 15 bp, Homo sapiens
taaacatcccaatta

SEQ ID NO: 292945 - DNA, 15 bp, Homo sapiens
ctaaacatcccaatt

SEQ ID NO: 292946 - DNA, 15 bp, Homo sapiens
tctaaacatcccaat

SEQ ID NO: 292947 - DNA, 15 bp, Homo sapiens
atctaaacatcccaa

SEQ ID NO: 292948 - DNA, 15 bp, Homo sapiens
aatctaaacatccca

SEQ ID NO: 292949 - DNA, 15 bp, Homo sapiens
aaatctaaacatccc

SEQ ID NO: 292950 - DNA, 15 bp, Homo sapiens
taaatctaaacatcc

SEQ ID NO: 292951 - DNA, 15 bp, Homo sapiens
ttaaatctaaacatc

SEQ ID NO: 292952 - DNA, 15 bp, Homo sapiens
tttaaatctaaacat

SEQ ID NO: 292953 - DNA, 15 bp, Homo sapiens
atttaaatctaaaca

SEQ ID NO: 292954 - DNA, 15 bp, Homo sapiens
aatttaaatctaaac

SEQ ID NO: 292955 - DNA, 15 bp, Homo sapiens
aaatttaaatctaaa

SEQ ID NO: 292956 - DNA, 15 bp, Homo sapiens
taaatttaaatctaa

SEQ ID NO: 292957 - DNA, 15 bp, Homo sapiens
ttaaatttaaatcta

SEQ ID NO: 292958 - DNA, 15 bp, Homo sapiens
attaaatttaaatct

SEQ ID NO: 292959 - DNA, 15 bp, Homo sapiens
cattaaatttaaatc

SEQ ID NO: 292960 - DNA, 15 bp, Homo sapiens
acattaaatttaaat

SEQ ID NO: 292961 - DNA, 15 bp, Homo sapiens
cacattaaatttaaa

SEQ ID NO: 292962 - DNA, 15 bp, Homo sapiens
tcacattaaatttaa

SEQ ID NO: 292963 - DNA, 15 bp, Homo sapiens
gtcacattaaattta

SEQ ID NO: 292964 - DNA, 15 bp, Homo sapiens
agtcacattaaattt

SEQ ID NO: 292965 - DNA, 15 bp, Homo sapiens
tagtcacattaaatt

SEQ ID NO: 292966 - DNA, 15 bp, Homo sapiens
atagtcacattaaat

SEQ ID NO: 292967 - DNA, 15 bp, Homo sapiens
aatagtcacattaaa

SEQ ID NO: 292968 - DNA, 15 bp, Homo sapiens
caatagtcacattaa

SEQ ID NO: 292969 - DNA, 15 bp, Homo sapiens
tcaatagtcacatta

SEQ ID NO: 292970 - DNA, 15 bp, Homo sapiens
atcaatagtcacatt

SEQ ID NO: 292971 - DNA, 15 bp, Homo sapiens
tatcaatagtcacat

SEQ ID NO: 292972 - DNA, 15 bp, Homo sapiens
atatcaatagtcaca

SEQ ID NO: 292973 - DNA, 15 bp, Homo sapiens
catatcaatagtcac

SEQ ID NO: 292974 - DNA, 15 bp, Homo sapiens
ccatatcaatagtca

SEQ ID NO: 292975 - DNA, 15 bp, Homo sapiens
accatatcaatagtc

SEQ ID NO: 292976 - DNA, 15 bp, Homo sapiens
aaccatatcaatagt

SEQ ID NO: 292977 - DNA, 15 bp, Homo sapiens
caaccatatcaatag

SEQ ID NO: 292978 - DNA, 15 bp, Homo sapiens
ccaaccatatcaata

SEQ ID NO: 292979 - DNA, 15 bp, Homo sapiens
cccaaccatatcaat

SEQ ID NO: 292980 - DNA, 15 bp, Homo sapiens
acccaaccatatcaa

SEQ ID NO: 292981 - DNA, 15 bp, Homo sapiens
aacccaaccatatca

SEQ ID NO: 292982 - DNA, 15 bp, Homo sapiens
aaacccaaccatatc

SEQ ID NO: 292983 - DNA, 15 bp, Homo sapiens
taaacccaaccatat

SEQ ID NO: 292984 - DNA, 15 bp, Homo sapiens
ttaaacccaaccata

SEQ ID NO: 292985 - DNA, 15 bp, Homo sapiens
tttaaacccaaccat

SEQ ID NO: 292986 - DNA, 15 bp, Homo sapiens
atttaaacccaacca

SEQ ID NO: 292987 - DNA, 15 bp, Homo sapiens
aatttaaacccaacc

SEQ ID NO: 292988 - DNA, 15 bp, Homo sapiens
gaatttaaacccaac

SEQ ID NO: 292989 - DNA, 15 bp, Homo sapiens
agaatttaaacccaa

SEQ ID NO: 292990 - DNA, 15 bp, Homo sapiens
gagaatttaaaccca

SEQ ID NO: 292991 - DNA, 15 bp, Homo sapiens
ggagaatttaaaccc

SEQ ID NO: 292992 - DNA, 15 bp, Homo sapiens
tggagaatttaaacc

SEQ ID NO: 292993 - DNA, 15 bp, Homo sapiens
atggagaatttaaac

SEQ ID NO: 292994 - DNA, 15 bp, Homo sapiens
gatggagaatttaaa

SEQ ID NO: 292995 - DNA, 15 bp, Homo sapiens
agatggagaatttaa

SEQ ID NO: 292996 - DNA, 15 bp, Homo sapiens
aagatggagaattta

SEQ ID NO: 292997 - DNA, 15 bp, Homo sapiens
taagatggagaattt

SEQ ID NO: 292998 - DNA, 15 bp, Homo sapiens
ataagatggagaatt

SEQ ID NO: 292999 - DNA, 15 bp, Homo sapiens
aataagatggagaat

SEQ ID NO: 293000 - DNA, 15 bp, Homo sapiens
taataagatggagaa

SEQ ID NO: 293001 - DNA, 15 bp, Homo sapiens
ataataagatggaga

SEQ ID NO: 293002 - DNA, 15 bp, Homo sapiens
aataataagatggag

SEQ ID NO: 293003 - DNA, 15 bp, Homo sapiens
gaataataagatgga

SEQ ID NO: 293004 - DNA, 15 bp, Homo sapiens
tgaataataagatgg

SEQ ID NO: 293005 - DNA, 15 bp, Homo sapiens
atgaataataagatg

SEQ ID NO: 293006 - DNA, 15 bp, Homo sapiens
aatgaataataagat

SEQ ID NO: 293007 - DNA, 15 bp, Homo sapiens
aaatgaataataaga

SEQ ID NO: 293008 - DNA, 15 bp, Homo sapiens
aaaatgaataataag

SEQ ID NO: 293009 - DNA, 15 bp, Homo sapiens
gaaaatgaataataa

SEQ ID NO: 293010 - DNA, 15 bp, Homo sapiens
agaaaatgaataata

SEQ ID NO: 293011 - DNA, 15 bp, Homo sapiens
tagaaaatgaataat

SEQ ID NO: 293012 - DNA, 15 bp, Homo sapiens
atagaaaatgaataa

SEQ ID NO: 293013 - DNA, 15 bp, Homo sapiens
aatagaaaatgaata

SEQ ID NO: 293014 - DNA, 15 bp, Homo sapiens
aaatagaaaatgaat

SEQ ID NO: 293015 - DNA, 15 bp, Homo sapiens
caaatagaaaatgaa

SEQ ID NO: 293016 - DNA, 15 bp, Homo sapiens
acaaatagaaaatga

SEQ ID NO: 293017 - DNA, 15 bp, Homo sapiens
gacaaatagaaaatg

SEQ ID NO: 293018 - DNA, 15 bp, Homo sapiens
agacaaatagaaaat

SEQ ID NO: 293019 - DNA, 15 bp, Homo sapiens
gagacaaatagaaaa

SEQ ID NO: 293020 - DNA, 15 bp, Homo sapiens
tgagacaaatagaaa

SEQ ID NO: 293021 - DNA, 15 bp, Homo sapiens
atgagacaaatagaa

SEQ ID NO: 293022 - DNA, 15 bp, Homo sapiens
gatgagacaaataga

SEQ ID NO: 293023 - DNA, 15 bp, Homo sapiens
agatgagacaaatag

SEQ ID NO: 293024 - DNA, 15 bp, Homo sapiens
gagatgagacaaata

SEQ ID NO: 293025 - DNA, 15 bp, Homo sapiens
ggagatgagacaaat

SEQ ID NO: 293026 - DNA, 15 bp, Homo sapiens
gggagatgagacaaa

SEQ ID NO: 293027 - DNA, 15 bp, Homo sapiens
agggagatgagacaa

SEQ ID NO: 293028 - DNA, 15 bp, Homo sapiens
aagggagatgagaca

SEQ ID NO: 293029 - DNA, 15 bp, Homo sapiens
aaagggagatgagac

SEQ ID NO: 293030 - DNA, 15 bp, Homo sapiens
aaaagggagatgaga

SEQ ID NO: 293031 - DNA, 15 bp, Homo sapiens
gaaaagggagatgag

SEQ ID NO: 293032 - DNA, 15 bp, Homo sapiens
ggaaaagggagatga

SEQ ID NO: 293033 - DNA, 15 bp, Homo sapiens
aggaaaagggagatg

SEQ ID NO: 293034 - DNA, 15 bp, Homo sapiens
gaggaaaagggagat

SEQ ID NO: 293035 - DNA, 15 bp, Homo sapiens
ggaggaaaagggaga

SEQ ID NO: 293036 - DNA, 15 bp, Homo sapiens
gggaggaaaagggag

SEQ ID NO: 293037 - DNA, 15 bp, Homo sapiens
agggaggaaaaggga

SEQ ID NO: 293038 - DNA, 15 bp, Homo sapiens
aagggaggaaaaggg

SEQ ID NO: 293039 - DNA, 15 bp, Homo sapiens
aaagggaggaaaagg

SEQ ID NO: 293040 - DNA, 15 bp, Homo sapiens
gaaagggaggaaaag

SEQ ID NO: 293041 - DNA, 15 bp, Homo sapiens
ggaaagggaggaaaa

SEQ ID NO: 293042 - DNA, 15 bp, Homo sapiens
aggaaagggaggaaa

SEQ ID NO: 293043 - DNA, 15 bp, Homo sapiens
gaggaaagggaggaa

SEQ ID NO: 293044 - DNA, 15 bp, Homo sapiens
agaggaaagggagga

SEQ ID NO: 293045 - DNA, 15 bp, Homo sapiens
aagaggaaagggagg

SEQ ID NO: 293046 - DNA, 15 bp, Homo sapiens
aaagaggaaagggag

SEQ ID NO: 293047 - DNA, 15 bp, Homo sapiens
aaaagaggaaaggga

SEQ ID NO: 293048 - DNA, 15 bp, Homo sapiens
aaaaagaggaaaggg

SEQ ID NO: 293049 - DNA, 15 bp, Homo sapiens
gaaaaagaggaaagg

SEQ ID NO: 293050 - DNA, 15 bp, Homo sapiens
agaaaaagaggaaag

SEQ ID NO: 293051 - DNA, 15 bp, Homo sapiens
cagaaaaagaggaaa

SEQ ID NO: 293052 - DNA, 15 bp, Homo sapiens
gcagaaaaagaggaa

SEQ ID NO: 293053 - DNA, 15 bp, Homo sapiens
ggcagaaaaagagga

SEQ ID NO: 293054 - DNA, 15 bp, Homo sapiens
aggcagaaaaagagg

SEQ ID NO: 293055 - DNA, 15 bp, Homo sapiens
aaggcagaaaaagag

SEQ ID NO: 293056 - DNA, 15 bp, Homo sapiens
gaaggcagaaaaaga

SEQ ID NO: 293057 - DNA, 15 bp, Homo sapiens
agaaggcagaaaaag

SEQ ID NO: 293058 - DNA, 15 bp, Homo sapiens
aagaaggcagaaaaa

SEQ ID NO: 293059 - DNA, 15 bp, Homo sapiens
aaagaaggcagaaaa

SEQ ID NO: 293060 - DNA, 15 bp, Homo sapiens
aaaagaaggcagaaa

SEQ ID NO: 293061 - DNA, 15 bp, Homo sapiens
caaaagaaggcagaa

SEQ ID NO: 293062 - DNA, 15 bp, Homo sapiens
ccaaaagaaggcaga

SEQ ID NO: 293063 - DNA, 15 bp, Homo sapiens
tccaaaagaaggcag

SEQ ID NO: 293064 - DNA, 15 bp, Homo sapiens
atccaaaagaaggca

SEQ ID NO: 293065 - DNA, 15 bp, Homo sapiens
aatccaaaagaaggc

SEQ ID NO: 293066 - DNA, 15 bp, Homo sapiens
caatccaaaagaagg

SEQ ID NO: 293067 - DNA, 15 bp, Homo sapiens
tcaatccaaaagaag

SEQ ID NO: 293068 - DNA, 15 bp, Homo sapiens
ttcaatccaaaagaa

SEQ ID NO: 293069 - DNA, 15 bp, Homo sapiens
attcaatccaaaaga

SEQ ID NO: 293070 - DNA, 15 bp, Homo sapiens
aattcaatccaaaag

SEQ ID NO: 293071 - DNA, 15 bp, Homo sapiens
aaattcaatccaaaa

SEQ ID NO: 293072 - DNA, 15 bp, Homo sapiens
aaaattcaatccaaa

SEQ ID NO: 293073 - DNA, 15 bp, Homo sapiens
aaaaattcaatccaa

SEQ ID NO: 293074 - DNA, 15 bp, Homo sapiens
taaaaattcaatcca

SEQ ID NO: 293075 - DNA, 15 bp, Homo sapiens
ttaaaaattcaatcc

SEQ ID NO: 293076 - DNA, 15 bp, Homo sapiens
tttaaaaattcaatc

SEQ ID NO: 293077 - DNA, 15 bp, Homo sapiens
ttttaaaaattcaat

SEQ ID NO: 293078 - DNA, 15 bp, Homo sapiens
attttaaaaattcaa

SEQ ID NO: 293079 - DNA, 15 bp, Homo sapiens
aattttaaaaattca

SEQ ID NO: 293080 - DNA, 15 bp, Homo sapiens
gaattttaaaaattc

SEQ ID NO: 293081 - DNA, 15 bp, Homo sapiens
agaattttaaaaatt

SEQ ID NO: 293082 - DNA, 15 bp, Homo sapiens
cagaattttaaaaat

SEQ ID NO: 293083 - DNA, 15 bp, Homo sapiens
acagaattttaaaaa

SEQ ID NO: 293084 - DNA, 15 bp, Homo sapiens
aacagaattttaaaa

SEQ ID NO: 293085 - DNA, 15 bp, Homo sapiens
aaacagaattttaaa

SEQ ID NO: 293086 - DNA, 15 bp, Homo sapiens
aaaacagaattttaa

SEQ ID NO: 293087 - DNA, 15 bp, Homo sapiens
taaaacagaatttta

SEQ ID NO: 293088 - DNA, 15 bp, Homo sapiens
ataaaacagaatttt

SEQ ID NO: 293089 - DNA, 15 bp, Homo sapiens
gataaaacagaattt

SEQ ID NO: 293090 - DNA, 15 bp, Homo sapiens
agataaaacagaatt

SEQ ID NO: 293091 - DNA, 15 bp, Homo sapiens
aagataaaacagaat

SEQ ID NO: 293092 - DNA, 15 bp, Homo sapiens
gaagataaaacagaa

SEQ ID NO: 293093 - DNA, 15 bp, Homo sapiens
agaagataaaacaga

SEQ ID NO: 293094 - DNA, 15 bp, Homo sapiens
aagaagataaaacag

SEQ ID NO: 293095 - DNA, 15 bp, Homo sapiens
aaagaagataaaaca

SEQ ID NO: 293096 - DNA, 15 bp, Homo sapiens
caaagaagataaaac

SEQ ID NO: 293097 - DNA, 15 bp, Homo sapiens
acaaagaagataaaa

SEQ ID NO: 293098 - DNA, 15 bp, Homo sapiens
tacaaagaagataaa

SEQ ID NO: 293099 - DNA, 15 bp, Homo sapiens
ctacaaagaagataa

SEQ ID NO: 293100 - DNA, 15 bp, Homo sapiens
cctacaaagaagata

SEQ ID NO: 293101 - DNA, 15 bp, Homo sapiens
gcctacaaagaagat

SEQ ID NO: 293102 - DNA, 15 bp, Homo sapiens
agcctacaaagaaga

SEQ ID NO: 293103 - DNA, 15 bp, Homo sapiens
aagcctacaaagaag

SEQ ID NO: 293104 - DNA, 15 bp, Homo sapiens
taagcctacaaagaa

SEQ ID NO: 293105 - DNA, 15 bp, Homo sapiens
gtaagcctacaaaga

SEQ ID NO: 293106 - DNA, 15 bp, Homo sapiens
agtaagcctacaaag

SEQ ID NO: 293107 - DNA, 15 bp, Homo sapiens
cagtaagcctacaaa

SEQ ID NO: 293108 - DNA, 15 bp, Homo sapiens
acagtaagcctacaa

SEQ ID NO: 293109 - DNA, 15 bp, Homo sapiens
gacagtaagcctaca

SEQ ID NO: 293110 - DNA, 15 bp, Homo sapiens
agacagtaagcctac

SEQ ID NO: 293111 - DNA, 15 bp, Homo sapiens
tagacagtaagccta

SEQ ID NO: 293112 - DNA, 15 bp, Homo sapiens
atagacagtaagcct

SEQ ID NO: 293113 - DNA, 15 bp, Homo sapiens
tatagacagtaagcc

SEQ ID NO: 293114 - DNA, 15 bp, Homo sapiens
gtatagacagtaagc

SEQ ID NO: 293115 - DNA, 15 bp, Homo sapiens
agtatagacagtaag

SEQ ID NO: 293116 - DNA, 15 bp, Homo sapiens
aagtatagacagtaa

SEQ ID NO: 293117 - DNA, 15 bp, Homo sapiens
gaagtatagacagta

SEQ ID NO: 293118 - DNA, 15 bp, Homo sapiens
agaagtatagacagt

SEQ ID NO: 293119 - DNA, 15 bp, Homo sapiens
aagaagtatagacag

SEQ ID NO: 293120 - DNA, 15 bp, Homo sapiens
aaagaagtatagaca

SEQ ID NO: 293121 - DNA, 15 bp, Homo sapiens
taaagaagtatagac

SEQ ID NO: 293122 - DNA, 15 bp, Homo sapiens
ataaagaagtataga

SEQ ID NO: 293123 - DNA, 15 bp, Homo sapiens
aataaagaagtatag

SEQ ID NO: 293124 - DNA, 15 bp, Homo sapiens
aaataaagaagtata

SEQ ID NO: 293125 - DNA, 15 bp, Homo sapiens
aaaataaagaagtat

SEQ ID NO: 293126 - DNA, 15 bp, Homo sapiens
caaaataaagaagta

SEQ ID NO: 293127 - DNA, 15 bp, Homo sapiens
acaaaataaagaagt

SEQ ID NO: 293128 - DNA, 15 bp, Homo sapiens
tacaaaataaagaag

SEQ ID NO: 293129 - DNA, 15 bp, Homo sapiens
ttacaaaataaagaa

SEQ ID NO: 293130 - DNA, 15 bp, Homo sapiens
attacaaaataaaga

SEQ ID NO: 293131 - DNA, 15 bp, Homo sapiens
aattacaaaataaag

SEQ ID NO: 293132 - DNA, 15 bp, Homo sapiens
caattacaaaataaa

SEQ ID NO: 293133 - DNA, 15 bp, Homo sapiens
acaattacaaaataa

SEQ ID NO: 293134 - DNA, 15 bp, Homo sapiens
aacaattacaaaata

SEQ ID NO: 293135 - DNA, 15 bp, Homo sapiens
aaacaattacaaaat

SEQ ID NO: 293136 - DNA, 15 bp, Homo sapiens
aaaacaattacaaaa

SEQ ID NO: 293137 - DNA, 15 bp, Homo sapiens
aaaaacaattacaaa

SEQ ID NO: 293138 - DNA, 15 bp, Homo sapiens
aaaaaacaattacaa

SEQ ID NO: 293139 - DNA, 15 bp, Homo sapiens
caaaaaacaattaca

SEQ ID NO: 293140 - DNA, 15 bp, Homo sapiens
tcaaaaaacaattac

SEQ ID NO: 293141 - DNA, 15 bp, Homo sapiens
atcaaaaaacaatta

SEQ ID NO: 293142 - DNA, 15 bp, Homo sapiens
aatcaaaaaacaatt

SEQ ID NO: 293143 - DNA, 15 bp, Homo sapiens
aaatcaaaaaacaat

SEQ ID NO: 293144 - DNA, 15 bp, Homo sapiens
taaatcaaaaaacaa

SEQ ID NO: 293145 - DNA, 15 bp, Homo sapiens
ataaatcaaaaaaca

SEQ ID NO: 293146 - DNA, 15 bp, Homo sapiens
tataaatcaaaaaac

SEQ ID NO: 293147 - DNA, 15 bp, Homo sapiens
ttataaatcaaaaaa

SEQ ID NO: 293148 - DNA, 15 bp, Homo sapiens
attataaatcaaaaa

SEQ ID NO: 293149 - DNA, 15 bp, Homo sapiens
tattataaatcaaaa

SEQ ID NO: 293150 - DNA, 15 bp, Homo sapiens
atattataaatcaaa

SEQ ID NO: 293151 - DNA, 15 bp, Homo sapiens
catattataaatcaa

SEQ ID NO: 293152 - DNA, 15 bp, Homo sapiens
tcatattataaatca

SEQ ID NO: 293153 - DNA, 15 bp, Homo sapiens
ttcatattataaatc

SEQ ID NO: 293154 - DNA, 15 bp, Homo sapiens
attcatattataaat

SEQ ID NO: 293155 - DNA, 15 bp, Homo sapiens
gattcatattataaa

SEQ ID NO: 293156 - DNA, 15 bp, Homo sapiens
agattcatattataa

SEQ ID NO: 293157 - DNA, 15 bp, Homo sapiens
aagattcatattata

SEQ ID NO: 293158 - DNA, 15 bp, Homo sapiens
aaagattcatattat

SEQ ID NO: 293159 - DNA, 15 bp, Homo sapiens
taaagattcatatta

SEQ ID NO: 293160 - DNA, 15 bp, Homo sapiens
ttaaagattcatatt

SEQ ID NO: 293161 - DNA, 15 bp, Homo sapiens
attaaagattcatat

SEQ ID NO: 293162 - DNA, 15 bp, Homo sapiens
gattaaagattcata

SEQ ID NO: 293163 - DNA, 15 bp, Homo sapiens
agattaaagattcat

SEQ ID NO: 293164 - DNA, 15 bp, Homo sapiens
aagattaaagattca

SEQ ID NO: 293165 - DNA, 15 bp, Homo sapiens
aaagattaaagattc

SEQ ID NO: 293166 - DNA, 15 bp, Homo sapiens
taaagattaaagatt

SEQ ID NO: 293167 - DNA, 15 bp, Homo sapiens
ttaaagattaaagat

SEQ ID NO: 293168 - DNA, 15 bp, Homo sapiens
attaaagattaaaga

SEQ ID NO: 293169 - DNA, 15 bp, Homo sapiens
tattaaagattaaag

SEQ ID NO: 293170 - DNA, 15 bp, Homo sapiens
ctattaaagattaaa

SEQ ID NO: 293171 - DNA, 15 bp, Homo sapiens
actattaaagattaa

SEQ ID NO: 293172 - DNA, 15 bp, Homo sapiens
gactattaaagatta

SEQ ID NO: 293173 - DNA, 15 bp, Homo sapiens
agactattaaagatt

SEQ ID NO: 293174 - DNA, 15 bp, Homo sapiens
aagactattaaagat

SEQ ID NO: 293175 - DNA, 15 bp, Homo sapiens
aaagactattaaaga

SEQ ID NO: 293176 - DNA, 15 bp, Homo sapiens
gaaagactattaaag

SEQ ID NO: 293177 - DNA, 15 bp, Homo sapiens
agaaagactattaaa

SEQ ID NO: 293178 - DNA, 15 bp, Homo sapiens
aagaaagactattaa

SEQ ID NO: 293179 - DNA, 15 bp, Homo sapiens
aaagaaagactatta

SEQ ID NO: 293180 - DNA, 15 bp, Homo sapiens
taaagaaagactatt

SEQ ID NO: 293181 - DNA, 15 bp, Homo sapiens
ttaaagaaagactat

SEQ ID NO: 293182 - DNA, 15 bp, Homo sapiens
tttaaagaaagacta

SEQ ID NO: 293183 - DNA, 15 bp, Homo sapiens
atttaaagaaagact

SEQ ID NO: 293184 - DNA, 15 bp, Homo sapiens
tatttaaagaaagac

SEQ ID NO: 293185 - DNA, 15 bp, Homo sapiens
ctatttaaagaaaga

SEQ ID NO: 293186 - DNA, 15 bp, Homo sapiens
actatttaaagaaag

SEQ ID NO: 293187 - DNA, 15 bp, Homo sapiens
tactatttaaagaaa

SEQ ID NO: 293188 - DNA, 15 bp, Homo sapiens
atactatttaaagaa

SEQ ID NO: 293189 - DNA, 15 bp, Homo sapiens
aatactatttaaaga

SEQ ID NO: 293190 - DNA, 15 bp, Homo sapiens
taatactatttaaag

SEQ ID NO: 293191 - DNA, 15 bp, Homo sapiens
gtaatactatttaaa

SEQ ID NO: 293192 - DNA, 15 bp, Homo sapiens
tgtaatactatttaa

SEQ ID NO: 293193 - DNA, 15 bp, Homo sapiens
gtgtaatactattta

SEQ ID NO: 293194 - DNA, 15 bp, Homo sapiens
agtgtaatactattt

SEQ ID NO: 293195 - DNA, 15 bp, Homo sapiens
tagtgtaatactatt

SEQ ID NO: 293196 - DNA, 15 bp, Homo sapiens
gtagtgtaatactat

SEQ ID NO: 293197 - DNA, 15 bp, Homo sapiens
agtagtgtaatacta

SEQ ID NO: 293198 - DNA, 15 bp, Homo sapiens
aagtagtgtaatact

SEQ ID NO: 293199 - DNA, 15 bp, Homo sapiens
gaagtagtgtaatac

SEQ ID NO: 293200 - DNA, 15 bp, Homo sapiens
tgaagtagtgtaata

SEQ ID NO: 293201 - DNA, 15 bp, Homo sapiens
gtgaagtagtgtaat

SEQ ID NO: 293202 - DNA, 15 bp, Homo sapiens
tgtgaagtagtgtaa

SEQ ID NO: 293203 - DNA, 15 bp, Homo sapiens
atgtgaagtagtgta

SEQ ID NO: 293204 - DNA, 15 bp, Homo sapiens
tatgtgaagtagtgt

SEQ ID NO: 293205 - DNA, 15 bp, Homo sapiens
gtatgtgaagtagtg

SEQ ID NO: 293206 - DNA, 15 bp, Homo sapiens
tgtatgtgaagtagt

SEQ ID NO: 293207 - DNA, 15 bp, Homo sapiens
ctgtatgtgaagtag

SEQ ID NO: 293208 - DNA, 15 bp, Homo sapiens
actgtatgtgaagta

SEQ ID NO: 293209 - DNA, 15 bp, Homo sapiens
tactgtatgtgaagt

SEQ ID NO: 293210 - DNA, 15 bp, Homo sapiens
atactgtatgtgaag

SEQ ID NO: 293211 - DNA, 15 bp, Homo sapiens
tatactgtatgtgaa

SEQ ID NO: 293212 - DNA, 15 bp, Homo sapiens
ttatactgtatgtga

SEQ ID NO: 293213 - DNA, 15 bp, Homo sapiens
cttatactgtatgtg

SEQ ID NO: 293214 - DNA, 15 bp, Homo sapiens
tcttatactgtatgt

SEQ ID NO: 293215 - DNA, 15 bp, Homo sapiens
ttcttatactgtatg

SEQ ID NO: 293216 - DNA, 15 bp, Homo sapiens
attcttatactgtat

SEQ ID NO: 293217 - DNA, 15 bp, Homo sapiens
gattcttatactgta

SEQ ID NO: 293218 - DNA, 15 bp, Homo sapiens
agattcttatactgt

SEQ ID NO: 293219 - DNA, 15 bp, Homo sapiens
aagattcttatactg

SEQ ID NO: 293220 - DNA, 15 bp, Homo sapiens
taagattcttatact

SEQ ID NO: 293221 - DNA, 15 bp, Homo sapiens
ctaagattcttatac

SEQ ID NO: 293222 - DNA, 15 bp, Homo sapiens
tctaagattcttata

SEQ ID NO: 293223 - DNA, 15 bp, Homo sapiens
ttctaagattcttat

SEQ ID NO: 293224 - DNA, 15 bp, Homo sapiens
attctaagattctta

SEQ ID NO: 293225 - DNA, 15 bp, Homo sapiens
tattctaagattctt

SEQ ID NO: 293226 - DNA, 15 bp, Homo sapiens
ctattctaagattct

SEQ ID NO: 293227 - DNA, 15 bp, Homo sapiens
actattctaagattc

SEQ ID NO: 293228 - DNA, 15 bp, Homo sapiens
tactattctaagatt

SEQ ID NO: 293229 - DNA, 15 bp, Homo sapiens
atactattctaagat

SEQ ID NO: 293230 - DNA, 15 bp, Homo sapiens
tatactattctaaga

SEQ ID NO: 293231 - DNA, 15 bp, Homo sapiens
atatactattctaag

SEQ ID NO: 293232 - DNA, 15 bp, Homo sapiens
aatatactattctaa

SEQ ID NO: 293233 - DNA, 15 bp, Homo sapiens
aaatatactattcta

SEQ ID NO: 293234 - DNA, 15 bp, Homo sapiens
gaaatatactattct

SEQ ID NO: 293235 - DNA, 15 bp, Homo sapiens
ggaaatatactattc

SEQ ID NO: 293236 - DNA, 15 bp, Homo sapiens
tggaaatatactatt

SEQ ID NO: 293237 - DNA, 15 bp, Homo sapiens
atggaaatatactat

SEQ ID NO: 293238 - DNA, 15 bp, Homo sapiens
aatggaaatatacta

SEQ ID NO: 293239 - DNA, 15 bp, Homo sapiens
aaatggaaatatact

SEQ ID NO: 293240 - DNA, 15 bp, Homo sapiens
aaaatggaaatatac

SEQ ID NO: 293241 - DNA, 15 bp, Homo sapiens
gaaaatggaaatata

SEQ ID NO: 293242 - DNA, 15 bp, Homo sapiens
ggaaaatggaaatat

SEQ ID NO: 293243 - DNA, 15 bp, Homo sapiens
gggaaaatggaaata

SEQ ID NO: 293244 - DNA, 15 bp, Homo sapiens
agggaaaatggaaat

SEQ ID NO: 293245 - DNA, 15 bp, Homo sapiens
aagggaaaatggaaa

SEQ ID NO: 293246 - DNA, 15 bp, Homo sapiens
aaagggaaaatggaa

SEQ ID NO: 293247 - DNA, 15 bp, Homo sapiens
aaaagggaaaatgga

SEQ ID NO: 293248 - DNA, 15 bp, Homo sapiens
gaaaagggaaaatgg

SEQ ID NO: 293249 - DNA, 15 bp, Homo sapiens
ggaaaagggaaaatg

SEQ ID NO: 293250 - DNA, 15 bp, Homo sapiens
tggaaaagggaaaat

SEQ ID NO: 293251 - DNA, 15 bp, Homo sapiens
ttggaaaagggaaaa

SEQ ID NO: 293252 - DNA, 15 bp, Homo sapiens
gttggaaaagggaaa

SEQ ID NO: 293253 - DNA, 15 bp, Homo sapiens
ggttggaaaagggaa

SEQ ID NO: 293254 - DNA, 15 bp, Homo sapiens
aggttggaaaaggga

SEQ ID NO: 293255 - DNA, 15 bp, Homo sapiens
aaggttggaaaaggg

SEQ ID NO: 293256 - DNA, 15 bp, Homo sapiens
aaaggttggaaaagg

SEQ ID NO: 293257 - DNA, 15 bp, Homo sapiens
caaaggttggaaaag

SEQ ID NO: 293258 - DNA, 15 bp, Homo sapiens
ccaaaggttggaaaa

SEQ ID NO: 293259 - DNA, 15 bp, Homo sapiens
cccaaaggttggaaa

SEQ ID NO: 293260 - DNA, 15 bp, Homo sapiens
gcccaaaggttggaa

SEQ ID NO: 293261 - DNA, 15 bp, Homo sapiens
agcccaaaggttgga

SEQ ID NO: 293262 - DNA, 15 bp, Homo sapiens
cagcccaaaggttgg

SEQ ID NO: 293263 - DNA, 15 bp, Homo sapiens
acagcccaaaggttg

SEQ ID NO: 293264 - DNA, 15 bp, Homo sapiens
aacagcccaaaggtt

SEQ ID NO: 293265 - DNA, 15 bp, Homo sapiens
caacagcccaaaggt

SEQ ID NO: 293266 - DNA, 15 bp, Homo sapiens
acaacagcccaaagg

SEQ ID NO: 293267 - DNA, 15 bp, Homo sapiens
aacaacagcccaaag

SEQ ID NO: 293268 - DNA, 15 bp, Homo sapiens
caacaacagcccaaa

SEQ ID NO: 293269 - DNA, 15 bp, Homo sapiens
acaacaacagcccaa

SEQ ID NO: 293270 - DNA, 15 bp, Homo sapiens
gacaacaacagccca

SEQ ID NO: 293271 - DNA, 15 bp, Homo sapiens
tgacaacaacagccc

SEQ ID NO: 293272 - DNA, 15 bp, Homo sapiens
atgacaacaacagcc

SEQ ID NO: 293273 - DNA, 15 bp, Homo sapiens
tatgacaacaacagc

SEQ ID NO: 293274 - DNA, 15 bp, Homo sapiens
gtatgacaacaacag

SEQ ID NO: 293275 - DNA, 15 bp, Homo sapiens
tgtatgacaacaaca

SEQ ID NO: 293276 - DNA, 15 bp, Homo sapiens
atgtatgacaacaac

SEQ ID NO: 293277 - DNA, 15 bp, Homo sapiens
aatgtatgacaacaa

SEQ ID NO: 293278 - DNA, 15 bp, Homo sapiens
aaatgtatgacaaca

SEQ ID NO: 293279 - DNA, 15 bp, Homo sapiens
aaaatgtatgacaac

SEQ ID NO: 293280 - DNA, 15 bp, Homo sapiens
caaaatgtatgacaa

SEQ ID NO: 293281 - DNA, 15 bp, Homo sapiens
gcaaaatgtatgaca

SEQ ID NO: 293282 - DNA, 15 bp, Homo sapiens
agcaaaatgtatgac

SEQ ID NO: 293283 - DNA, 15 bp, Homo sapiens
aagcaaaatgtatga

SEQ ID NO: 293284 - DNA, 15 bp, Homo sapiens
gaagcaaaatgtatg

SEQ ID NO: 293285 - DNA, 15 bp, Homo sapiens
cgaagcaaaatgtat

SEQ ID NO: 293286 - DNA, 15 bp, Homo sapiens
tcgaagcaaaatgta

SEQ ID NO: 293287 - DNA, 15 bp, Homo sapiens
gtcgaagcaaaatgt

SEQ ID NO: 293288 - DNA, 15 bp, Homo sapiens
tgtcgaagcaaaatg

SEQ ID NO: 293289 - DNA, 15 bp, Homo sapiens
ctgtcgaagcaaaat

SEQ ID NO: 293290 - DNA, 15 bp, Homo sapiens
tctgtcgaagcaaaa

SEQ ID NO: 293291 - DNA, 15 bp, Homo sapiens
ttctgtcgaagcaaa

SEQ ID NO: 293292 - DNA, 15 bp, Homo sapiens
cttctgtcgaagcaa

SEQ ID NO: 293293 - DNA, 15 bp, Homo sapiens
acttctgtcgaagca

SEQ ID NO: 293294 - DNA, 15 bp, Homo sapiens
aacttctgtcgaagc

SEQ ID NO: 293295 - DNA, 15 bp, Homo sapiens
taacttctgtcgaag

SEQ ID NO: 293296 - DNA, 15 bp, Homo sapiens
ataacttctgtcgaa

SEQ ID NO: 293297 - DNA, 15 bp, Homo sapiens
tataacttctgtcga

SEQ ID NO: 293298 - DNA, 15 bp, Homo sapiens
ttataacttctgtcg

SEQ ID NO: 293299 - DNA, 15 bp, Homo sapiens
cttataacttctgtc

SEQ ID NO: 293300 - DNA, 15 bp, Homo sapiens
gcttataacttctgt

SEQ ID NO: 293301 - DNA, 15 bp, Homo sapiens
agcttataacttctg

SEQ ID NO: 293302 - DNA, 15 bp, Homo sapiens
gagcttataacttct

SEQ ID NO: 293303 - DNA, 15 bp, Homo sapiens
agagcttataacttc

SEQ ID NO: 293304 - DNA, 15 bp, Homo sapiens
tagagcttataactt

SEQ ID NO: 293305 - DNA, 15 bp, Homo sapiens
gtagagcttataact

SEQ ID NO: 293306 - DNA, 15 bp, Homo sapiens
tgtagagcttataac

SEQ ID NO: 293307 - DNA, 15 bp, Homo sapiens
ttgtagagcttataa

SEQ ID NO: 293308 - DNA, 15 bp, Homo sapiens
attgtagagcttata

SEQ ID NO: 293309 - DNA, 15 bp, Homo sapiens
tattgtagagcttat

SEQ ID NO: 293310 - DNA, 15 bp, Homo sapiens
gtattgtagagctta

SEQ ID NO: 293311 - DNA, 15 bp, Homo sapiens
tgtattgtagagctt

SEQ ID NO: 293312 - DNA, 15 bp, Homo sapiens
gtgtattgtagagct

SEQ ID NO: 293313 - DNA, 15 bp, Homo sapiens
agtgtattgtagagc

SEQ ID NO: 293314 - DNA, 15 bp, Homo sapiens
gagtgtattgtagag

SEQ ID NO: 293315 - DNA, 15 bp, Homo sapiens
tgagtgtattgtaga

SEQ ID NO: 293316 - DNA, 15 bp, Homo sapiens
atgagtgtattgtag

SEQ ID NO: 293317 - DNA, 15 bp, Homo sapiens
tatgagtgtattgta

SEQ ID NO: 293318 - DNA, 15 bp, Homo sapiens
ttatgagtgtattgt

SEQ ID NO: 293319 - DNA, 15 bp, Homo sapiens
gttatgagtgtattg

SEQ ID NO: 293320 - DNA, 15 bp, Homo sapiens
agttatgagtgtatt

SEQ ID NO: 293321 - DNA, 15 bp, Homo sapiens
aagttatgagtgtat

SEQ ID NO: 293322 - DNA, 15 bp, Homo sapiens
aaagttatgagtgta

SEQ ID NO: 293323 - DNA, 15 bp, Homo sapiens
aaaagttatgagtgt

SEQ ID NO: 293324 - DNA, 15 bp, Homo sapiens
caaaagttatgagtg

SEQ ID NO: 293325 - DNA, 15 bp, Homo sapiens
acaaaagttatgagt

SEQ ID NO: 293326 - DNA, 15 bp, Homo sapiens
aacaaaagttatgag

SEQ ID NO: 293327 - DNA, 15 bp, Homo sapiens
aaacaaaagttatga

SEQ ID NO: 293328 - DNA, 15 bp, Homo sapiens
aaaacaaaagttatg

SEQ ID NO: 293329 - DNA, 15 bp, Homo sapiens
taaaacaaaagttat

SEQ ID NO: 293330 - DNA, 15 bp, Homo sapiens
ttaaaacaaaagtta

SEQ ID NO: 293331 - DNA, 15 bp, Homo sapiens
tttaaaacaaaagtt

SEQ ID NO: 293332 - DNA, 15 bp, Homo sapiens
gtttaaaacaaaagt

SEQ ID NO: 293333 - DNA, 15 bp, Homo sapiens
ggtttaaaacaaaag

SEQ ID NO: 293334 - DNA, 15 bp, Homo sapiens
tggtttaaaacaaaa

SEQ ID NO: 293335 - DNA, 15 bp, Homo sapiens
ttggtttaaaacaaa

SEQ ID NO: 293336 - DNA, 15 bp, Homo sapiens
attggtttaaaacaa

SEQ ID NO: 293337 - DNA, 15 bp, Homo sapiens
aattggtttaaaaca

SEQ ID NO: 293338 - DNA, 15 bp, Homo sapiens
taattggtttaaaac

SEQ ID NO: 293339 - DNA, 15 bp, Homo sapiens
ataattggtttaaaa

SEQ ID NO: 293340 - DNA, 15 bp, Homo sapiens
gataattggtttaaa

SEQ ID NO: 293341 - DNA, 15 bp, Homo sapiens
agataattggtttaa

SEQ ID NO: 293342 - DNA, 15 bp, Homo sapiens
gagataattggttta

SEQ ID NO: 293343 - DNA, 15 bp, Homo sapiens
agagataattggttt

SEQ ID NO: 293344 - DNA, 15 bp, Homo sapiens
aagagataattggtt

SEQ ID NO: 293345 - DNA, 15 bp, Homo sapiens
taagagataattggt

SEQ ID NO: 293346 - DNA, 15 bp, Homo sapiens
ttaagagataattgg

SEQ ID NO: 293347 - DNA, 15 bp, Homo sapiens
tttaagagataattg

SEQ ID NO: 293348 - DNA, 15 bp, Homo sapiens
ctttaagagataatt

SEQ ID NO: 293349 - DNA, 15 bp, Homo sapiens
tctttaagagataat

SEQ ID NO: 293350 - DNA, 15 bp, Homo sapiens
ctctttaagagataa

SEQ ID NO: 293351 - DNA, 15 bp, Homo sapiens
tctctttaagagata

SEQ ID NO: 293352 - DNA, 15 bp, Homo sapiens
ttctctttaagagat

SEQ ID NO: 293353 - DNA, 15 bp, Homo sapiens
attctctttaagaga

SEQ ID NO: 293354 - DNA, 15 bp, Homo sapiens
aattctctttaagag

SEQ ID NO: 293355 - DNA, 15 bp, Homo sapiens
gaattctctttaaga

SEQ ID NO: 293356 - DNA, 15 bp, Homo sapiens
tgaattctctttaag

SEQ ID NO: 293357 - DNA, 15 bp, Homo sapiens
ttgaattctctttaa

SEQ ID NO: 293358 - DNA, 15 bp, Homo sapiens
tttgaattctcttta

SEQ ID NO: 293359 - DNA, 15 bp, Homo sapiens
ttttgaattctcttt

SEQ ID NO: 293360 - DNA, 15 bp, Homo sapiens
gttttgaattctctt

SEQ ID NO: 293361 - DNA, 15 bp, Homo sapiens
tgttttgaattctct

SEQ ID NO: 293362 - DNA, 15 bp, Homo sapiens
ttgttttgaattctc

SEQ ID NO: 293363 - DNA, 15 bp, Homo sapiens
cttgttttgaattct

SEQ ID NO: 293364 - DNA, 15 bp, Homo sapiens
tcttgttttgaattc

SEQ ID NO: 293365 - DNA, 15 bp, Homo sapiens
ctcttgttttgaatt

SEQ ID NO: 293366 - DNA, 15 bp, Homo sapiens
tctcttgttttgaat

SEQ ID NO: 293367 - DNA, 15 bp, Homo sapiens
ttctcttgttttgaa

SEQ ID NO: 293368 - DNA, 15 bp, Homo sapiens
tttctcttgttttga

SEQ ID NO: 293369 - DNA, 15 bp, Homo sapiens
ttttctcttgttttg

SEQ ID NO: 293370 - DNA, 15 bp, Homo sapiens
tttttctcttgtttt

SEQ ID NO: 293371 - DNA, 15 bp, Homo sapiens
ttttttctcttgttt

SEQ ID NO: 293372 - DNA, 15 bp, Homo sapiens
cttttttctcttgtt

SEQ ID NO: 293373 - DNA, 15 bp, Homo sapiens
tcttttttctcttgt

SEQ ID NO: 293374 - DNA, 15 bp, Homo sapiens
atcttttttctcttg

SEQ ID NO: 293375 - DNA, 15 bp, Homo sapiens
catcttttttctctt

SEQ ID NO: 293376 - DNA, 15 bp, Homo sapiens
acatcttttttctct

SEQ ID NO: 293377 - DNA, 15 bp, Homo sapiens
aacatcttttttctc

SEQ ID NO: 293378 - DNA, 15 bp, Homo sapiens
aaacatcttttttct

SEQ ID NO: 293379 - DNA, 15 bp, Homo sapiens
aaaacatcttttttc

SEQ ID NO: 293380 - DNA, 15 bp, Homo sapiens
aaaaacatctttttt

SEQ ID NO: 293381 - DNA, 15 bp, Homo sapiens
taaaaacatcttttt

SEQ ID NO: 293382 - DNA, 15 bp, Homo sapiens
ataaaaacatctttt

SEQ ID NO: 293383 - DNA, 15 bp, Homo sapiens
aataaaaacatcttt

SEQ ID NO: 293384 - DNA, 15 bp, Homo sapiens
aaataaaaacatctt

SEQ ID NO: 293385 - DNA, 15 bp, Homo sapiens
caaataaaaacatct

SEQ ID NO: 293386 - DNA, 15 bp, Homo sapiens
tcaaataaaaacatc

SEQ ID NO: 293387 - DNA, 15 bp, Homo sapiens
atcaaataaaaacat

SEQ ID NO: 293388 - DNA, 15 bp, Homo sapiens
aatcaaataaaaaca

SEQ ID NO: 293389 - DNA, 15 bp, Homo sapiens
taatcaaataaaaac

SEQ ID NO: 293390 - DNA, 15 bp, Homo sapiens
gtaatcaaataaaaa

SEQ ID NO: 293391 - DNA, 15 bp, Homo sapiens
tgtaatcaaataaaa

SEQ ID NO: 293392 - DNA, 15 bp, Homo sapiens
atgtaatcaaataaa

SEQ ID NO: 293393 - DNA, 15 bp, Homo sapiens
tatgtaatcaaataa

SEQ ID NO: 293394 - DNA, 15 bp, Homo sapiens
atatgtaatcaaata

SEQ ID NO: 293395 - DNA, 15 bp, Homo sapiens
aatatgtaatcaaat

SEQ ID NO: 293396 - DNA, 15 bp, Homo sapiens
aaatatgtaatcaaa

SEQ ID NO: 293397 - DNA, 15 bp, Homo sapiens
taaatatgtaatcaa

SEQ ID NO: 293398 - DNA, 15 bp, Homo sapiens
gtaaatatgtaatca

SEQ ID NO: 293399 - DNA, 15 bp, Homo sapiens
ggtaaatatgtaatc

SEQ ID NO: 293400 - DNA, 15 bp, Homo sapiens
aggtaaatatgtaat

SEQ ID NO: 293401 - DNA, 15 bp, Homo sapiens
aaggtaaatatgtaa

SEQ ID NO: 293402 - DNA, 15 bp, Homo sapiens
aaaggtaaatatgta

SEQ ID NO: 293403 - DNA, 15 bp, Homo sapiens
gaaaggtaaatatgt

SEQ ID NO: 293404 - DNA, 15 bp, Homo sapiens
ggaaaggtaaatatg

SEQ ID NO: 293405 - DNA, 15 bp, Homo sapiens
tggaaaggtaaatat

SEQ ID NO: 293406 - DNA, 15 bp, Homo sapiens
ctggaaaggtaaata

SEQ ID NO: 293407 - DNA, 15 bp, Homo sapiens
actggaaaggtaaat

SEQ ID NO: 293408 - DNA, 15 bp, Homo sapiens
tactggaaaggtaaa

SEQ ID NO: 293409 - DNA, 15 bp, Homo sapiens
gtactggaaaggtaa

SEQ ID NO: 293410 - DNA, 15 bp, Homo sapiens
agtactggaaaggta

SEQ ID NO: 293411 - DNA, 15 bp, Homo sapiens
gagtactggaaaggt

SEQ ID NO: 293412 - DNA, 15 bp, Homo sapiens
agagtactggaaagg

SEQ ID NO: 293413 - DNA, 15 bp, Homo sapiens
aagagtactggaaag

SEQ ID NO: 293414 - DNA, 15 bp, Homo sapiens
gaagagtactggaaa

SEQ ID NO: 293415 - DNA, 15 bp, Homo sapiens
tgaagagtactggaa

SEQ ID NO: 293416 - DNA, 15 bp, Homo sapiens
atgaagagtactgga

SEQ ID NO: 293417 - DNA, 15 bp, Homo sapiens
aatgaagagtactgg

SEQ ID NO: 293418 - DNA, 15 bp, Homo sapiens
gaatgaagagtactg

SEQ ID NO: 293419 - DNA, 15 bp, Homo sapiens
ggaatgaagagtact

SEQ ID NO: 293420 - DNA, 15 bp, Homo sapiens
aggaatgaagagtac

SEQ ID NO: 293421 - DNA, 15 bp, Homo sapiens
aaggaatgaagagta

SEQ ID NO: 293422 - DNA, 15 bp, Homo sapiens
caaggaatgaagagt

SEQ ID NO: 293423 - DNA, 15 bp, Homo sapiens
acaaggaatgaagag

SEQ ID NO: 293424 - DNA, 15 bp, Homo sapiens
cacaaggaatgaaga

SEQ ID NO: 293425 - DNA, 15 bp, Homo sapiens
acacaaggaatgaag

SEQ ID NO: 293426 - DNA, 15 bp, Homo sapiens
tacacaaggaatgaa

SEQ ID NO: 293427 - DNA, 15 bp, Homo sapiens
ctacacaaggaatga

SEQ ID NO: 293428 - DNA, 15 bp, Homo sapiens
tctacacaaggaatg

SEQ ID NO: 293429 - DNA, 15 bp, Homo sapiens
atctacacaaggaat

SEQ ID NO: 293430 - DNA, 15 bp, Homo sapiens
gatctacacaaggaa

SEQ ID NO: 293431 - DNA, 15 bp, Homo sapiens
ggatctacacaagga

SEQ ID NO: 293432 - DNA, 15 bp, Homo sapiens
tggatctacacaagg

SEQ ID NO: 293433 - DNA, 15 bp, Homo sapiens
ctggatctacacaag

SEQ ID NO: 293434 - DNA, 15 bp, Homo sapiens
tctggatctacacaa

SEQ ID NO: 293435 - DNA, 15 bp, Homo sapiens
atctggatctacaca

SEQ ID NO: 293436 - DNA, 15 bp, Homo sapiens
aatctggatctacac

SEQ ID NO: 293437 - DNA, 15 bp, Homo sapiens
gaatctggatctaca

SEQ ID NO: 293438 - DNA, 15 bp, Homo sapiens
ggaatctggatctac

SEQ ID NO: 293439 - DNA, 15 bp, Homo sapiens
aggaatctggatcta

SEQ ID NO: 293440 - DNA, 15 bp, Homo sapiens
aaggaatctggatct

SEQ ID NO: 293441 - DNA, 15 bp, Homo sapiens
aaaggaatctggatc

SEQ ID NO: 293442 - DNA, 15 bp, Homo sapiens
aaaaggaatctggat

SEQ ID NO: 293443 - DNA, 15 bp, Homo sapiens
caaaaggaatctgga

SEQ ID NO: 293444 - DNA, 15 bp, Homo sapiens
acaaaaggaatctgg

SEQ ID NO: 293445 - DNA, 15 bp, Homo sapiens
aacaaaaggaatctg

SEQ ID NO: 293446 - DNA, 15 bp, Homo sapiens
aaacaaaaggaatct

SEQ ID NO: 293447 - DNA, 15 bp, Homo sapiens
aaaacaaaaggaatc

SEQ ID NO: 293448 - DNA, 15 bp, Homo sapiens
gaaaacaaaaggaat

SEQ ID NO: 293449 - DNA, 15 bp, Homo sapiens
ggaaaacaaaaggaa

SEQ ID NO: 293450 - DNA, 15 bp, Homo sapiens
aggaaaacaaaagga

SEQ ID NO: 293451 - DNA, 15 bp, Homo sapiens
aaggaaaacaaaagg

SEQ ID NO: 293452 - DNA, 15 bp, Homo sapiens
gaaggaaaacaaaag

SEQ ID NO: 293453 - DNA, 15 bp, Homo sapiens
agaaggaaaacaaaa

SEQ ID NO: 293454 - DNA, 15 bp, Homo sapiens
cagaaggaaaacaaa

SEQ ID NO: 293455 - DNA, 15 bp, Homo sapiens
tcagaaggaaaacaa

SEQ ID NO: 293456 - DNA, 15 bp, Homo sapiens
gtcagaaggaaaaca

SEQ ID NO: 293457 - DNA, 15 bp, Homo sapiens
agtcagaaggaaaac

SEQ ID NO: 293458 - DNA, 15 bp, Homo sapiens
cagtcagaaggaaaa

SEQ ID NO: 293459 - DNA, 15 bp, Homo sapiens
acagtcagaaggaaa

SEQ ID NO: 293460 - DNA, 15 bp, Homo sapiens
tacagtcagaaggaa

SEQ ID NO: 293461 - DNA, 15 bp, Homo sapiens
ttacagtcagaagga

SEQ ID NO: 293462 - DNA, 15 bp, Homo sapiens
tttacagtcagaagg

SEQ ID NO: 293463 - DNA, 15 bp, Homo sapiens
ttttacagtcagaag

SEQ ID NO: 293464 - DNA, 15 bp, Homo sapiens
gttttacagtcagaa

SEQ ID NO: 293465 - DNA, 15 bp, Homo sapiens
agttttacagtcaga

SEQ ID NO: 293466 - DNA, 15 bp, Homo sapiens
aagttttacagtcag

SEQ ID NO: 293467 - DNA, 15 bp, Homo sapiens
aaagttttacagtca

SEQ ID NO: 293468 - DNA, 15 bp, Homo sapiens
aaaagttttacagtc

SEQ ID NO: 293469 - DNA, 15 bp, Homo sapiens
aaaaagttttacagt

SEQ ID NO: 293470 - DNA, 15 bp, Homo sapiens
aaaaaagttttacag

SEQ ID NO: 293471 - DNA, 15 bp, Homo sapiens
aaaaaaagttttaca

SEQ ID NO: 293472 - DNA, 15 bp, Homo sapiens
caaaaaaagttttac

SEQ ID NO: 293473 - DNA, 15 bp, Homo sapiens
ccaaaaaaagtttta

SEQ ID NO: 293474 - DNA, 15 bp, Homo sapiens
gccaaaaaaagtttt

SEQ ID NO: 293475 - DNA, 15 bp, Homo sapiens
ggccaaaaaaagttt

SEQ ID NO: 293476 - DNA, 15 bp, Homo sapiens
tggccaaaaaaagtt

SEQ ID NO: 293477 - DNA, 15 bp, Homo sapiens
ctggccaaaaaaagt

SEQ ID NO: 293478 - DNA, 15 bp, Homo sapiens
cctggccaaaaaaag

SEQ ID NO: 293479 - DNA, 15 bp, Homo sapiens
ccctggccaaaaaaa

SEQ ID NO: 293480 - DNA, 15 bp, Homo sapiens
cccctggccaaaaaa

SEQ ID NO: 293481 - DNA, 15 bp, Homo sapiens
gcccctggccaaaaa

SEQ ID NO: 293482 - DNA, 15 bp, Homo sapiens
tgcccctggccaaaa

SEQ ID NO: 293483 - DNA, 15 bp, Homo sapiens
ctgcccctggccaaa

SEQ ID NO: 293484 - DNA, 15 bp, Homo sapiens
actgcccctggccaa

SEQ ID NO: 293485 - DNA, 15 bp, Homo sapiens
cactgcccctggcca

SEQ ID NO: 293486 - DNA, 15 bp, Homo sapiens
ccactgcccctggcc

SEQ ID NO: 293487 - DNA, 15 bp, Homo sapiens
gccactgcccctggc

SEQ ID NO: 293488 - DNA, 15 bp, Homo sapiens
agccactgcccctgg

SEQ ID NO: 293489 - DNA, 15 bp, Homo sapiens
gagccactgcccctg

SEQ ID NO: 293490 - DNA, 15 bp, Homo sapiens
tgagccactgcccct

SEQ ID NO: 293491 - DNA, 15 bp, Homo sapiens
atgagccactgcccc

SEQ ID NO: 293492 - DNA, 15 bp, Homo sapiens
tatgagccactgccc

SEQ ID NO: 293493 - DNA, 15 bp, Homo sapiens
gtatgagccactgcc

SEQ ID NO: 293494 - DNA, 15 bp, Homo sapiens
ggtatgagccactgc

SEQ ID NO: 293495 - DNA, 15 bp, Homo sapiens
gggtatgagccactg

SEQ ID NO: 293496 - DNA, 15 bp, Homo sapiens
cgggtatgagccact

SEQ ID NO: 293497 - DNA, 15 bp, Homo sapiens
acgggtatgagccac

SEQ ID NO: 293498 - DNA, 15 bp, Homo sapiens
tacgggtatgagcca

SEQ ID NO: 293499 - DNA, 15 bp, Homo sapiens
ttacgggtatgagcc

SEQ ID NO: 293500 - DNA, 15 bp, Homo sapiens
attacgggtatgagc

SEQ ID NO: 293501 - DNA, 15 bp, Homo sapiens
gattacgggtatgag

SEQ ID NO: 293502 - DNA, 15 bp, Homo sapiens
ggattacgggtatga

SEQ ID NO: 293503 - DNA, 15 bp, Homo sapiens
gggattacgggtatg

SEQ ID NO: 293504 - DNA, 15 bp, Homo sapiens
tgggattacgggtat

SEQ ID NO: 293505 - DNA, 15 bp, Homo sapiens
ttgggattacgggta

SEQ ID NO: 293506 - DNA, 15 bp, Homo sapiens
gttgggattacgggt

SEQ ID NO: 293507 - DNA, 15 bp, Homo sapiens
tgttgggattacggg

SEQ ID NO: 293508 - DNA, 15 bp, Homo sapiens
gtgttgggattacgg

SEQ ID NO: 293509 - DNA, 15 bp, Homo sapiens
agtgttgggattacg

SEQ ID NO: 293510 - DNA, 15 bp, Homo sapiens
aagtgttgggattac

SEQ ID NO: 293511 - DNA, 15 bp, Homo sapiens
taagtgttgggatta

SEQ ID NO: 293512 - DNA, 15 bp, Homo sapiens
ctaagtgttgggatt

SEQ ID NO: 293513 - DNA, 15 bp, Homo sapiens
actaagtgttgggat

SEQ ID NO: 293514 - DNA, 15 bp, Homo sapiens
cactaagtgttggga

SEQ ID NO: 293515 - DNA, 15 bp, Homo sapiens
ccactaagtgttggg

SEQ ID NO: 293516 - DNA, 15 bp, Homo sapiens
cccactaagtgttgg

SEQ ID NO: 293517 - DNA, 15 bp, Homo sapiens
ccccactaagtgttg

SEQ ID NO: 293518 - DNA, 15 bp, Homo sapiens
gccccactaagtgtt

SEQ ID NO: 293519 - DNA, 15 bp, Homo sapiens
agccccactaagtgt

SEQ ID NO: 293520 - DNA, 15 bp, Homo sapiens
cagccccactaagtg

SEQ ID NO: 293521 - DNA, 15 bp, Homo sapiens
tcagccccactaagt

SEQ ID NO: 293522 - DNA, 15 bp, Homo sapiens
ctcagccccactaag

SEQ ID NO: 293523 - DNA, 15 bp, Homo sapiens
cctcagccccactaa

SEQ ID NO: 293524 - DNA, 15 bp, Homo sapiens
gcctcagccccacta

SEQ ID NO: 293525 - DNA, 15 bp, Homo sapiens
cgcctcagccccact

SEQ ID NO: 293526 - DNA, 15 bp, Homo sapiens
ccgcctcagccccac

SEQ ID NO: 293527 - DNA, 15 bp, Homo sapiens
cccgcctcagcccca

SEQ ID NO: 293528 - DNA, 15 bp, Homo sapiens
tcccgcctcagcccc

SEQ ID NO: 293529 - DNA, 15 bp, Homo sapiens
ctcccgcctcagccc

SEQ ID NO: 293530 - DNA, 15 bp, Homo sapiens
cctcccgcctcagcc

SEQ ID NO: 293531 - DNA, 15 bp, Homo sapiens
tcctcccgcctcagc

SEQ ID NO: 293532 - DNA, 15 bp, Homo sapiens
atcctcccgcctcag

SEQ ID NO: 293533 - DNA, 15 bp, Homo sapiens
gatcctcccgcctca

SEQ ID NO: 293534 - DNA, 15 bp, Homo sapiens
agatcctcccgcctc

SEQ ID NO: 293535 - DNA, 15 bp, Homo sapiens
gagatcctcccgcct

SEQ ID NO: 293536 - DNA, 15 bp, Homo sapiens
agagatcctcccgcc

SEQ ID NO: 293537 - DNA, 15 bp, Homo sapiens
aagagatcctcccgc

SEQ ID NO: 293538 - DNA, 15 bp, Homo sapiens
caagagatcctcccg

SEQ ID NO: 293539 - DNA, 15 bp, Homo sapiens
tcaagagatcctccc

SEQ ID NO: 293540 - DNA, 15 bp, Homo sapiens
ttcaagagatcctcc

SEQ ID NO: 293541 - DNA, 15 bp, Homo sapiens
cttcaagagatcctc

SEQ ID NO: 293542 - DNA, 15 bp, Homo sapiens
gcttcaagagatcct

SEQ ID NO: 293543 - DNA, 15 bp, Homo sapiens
ggcttcaagagatcc

SEQ ID NO: 293544 - DNA, 15 bp, Homo sapiens
tggcttcaagagatc

SEQ ID NO: 293545 - DNA, 15 bp, Homo sapiens
ctggcttcaagagat

SEQ ID NO: 293546 - DNA, 15 bp, Homo sapiens
cctggcttcaagaga

SEQ ID NO: 293547 - DNA, 15 bp, Homo sapiens
tcctggcttcaagag

SEQ ID NO: 293548 - DNA, 15 bp, Homo sapiens
ctcctggcttcaaga

SEQ ID NO: 293549 - DNA, 15 bp, Homo sapiens
actcctggcttcaag

SEQ ID NO: 293550 - DNA, 15 bp, Homo sapiens
aactcctggcttcaa

SEQ ID NO: 293551 - DNA, 15 bp, Homo sapiens
gaactcctggcttca

SEQ ID NO: 293552 - DNA, 15 bp, Homo sapiens
tgaactcctggcttc

SEQ ID NO: 293553 - DNA, 15 bp, Homo sapiens
ttgaactcctggctt

SEQ ID NO: 293554 - DNA, 15 bp, Homo sapiens
tttgaactcctggct

SEQ ID NO: 293555 - DNA, 15 bp, Homo sapiens
ttttgaactcctggc

SEQ ID NO: 293556 - DNA, 15 bp, Homo sapiens
gttttgaactcctgg

SEQ ID NO: 293557 - DNA, 15 bp, Homo sapiens
ggttttgaactcctg

SEQ ID NO: 293558 - DNA, 15 bp, Homo sapiens
tggttttgaactcct

SEQ ID NO: 293559 - DNA, 15 bp, Homo sapiens
ctggttttgaactcc

SEQ ID NO: 293560 - DNA, 15 bp, Homo sapiens
gctggttttgaactc

SEQ ID NO: 293561 - DNA, 15 bp, Homo sapiens
ggctggttttgaact

SEQ ID NO: 293562 - DNA, 15 bp, Homo sapiens
aggctggttttgaac

SEQ ID NO: 293563 - DNA, 15 bp, Homo sapiens
taggctggttttgaa

SEQ ID NO: 293564 - DNA, 15 bp, Homo sapiens
ctaggctggttttga

SEQ ID NO: 293565 - DNA, 15 bp, Homo sapiens
cctaggctggttttg

SEQ ID NO: 293566 - DNA, 15 bp, Homo sapiens
gcctaggctggtttt

SEQ ID NO: 293567 - DNA, 15 bp, Homo sapiens
tgcctaggctggttt

SEQ ID NO: 293568 - DNA, 15 bp, Homo sapiens
ttgcctaggctggtt

SEQ ID NO: 293569 - DNA, 15 bp, Homo sapiens
gttgcctaggctggt

SEQ ID NO: 293570 - DNA, 15 bp, Homo sapiens
tgttgcctaggctgg

SEQ ID NO: 293571 - DNA, 15 bp, Homo sapiens
ttgttgcctaggctg

SEQ ID NO: 293572 - DNA, 15 bp, Homo sapiens
tttgttgcctaggct

SEQ ID NO: 293573 - DNA, 15 bp, Homo sapiens
ctttgttgcctaggc

SEQ ID NO: 293574 - DNA, 15 bp, Homo sapiens
gctttgttgcctagg

SEQ ID NO: 293575 - DNA, 15 bp, Homo sapiens
tgctttgttgcctag

SEQ ID NO: 293576 - DNA, 15 bp, Homo sapiens
ttgctttgttgccta

SEQ ID NO: 293577 - DNA, 15 bp, Homo sapiens
tttgctttgttgcct

SEQ ID NO: 293578 - DNA, 15 bp, Homo sapiens
ttttgctttgttgcc

SEQ ID NO: 293579 - DNA, 15 bp, Homo sapiens
gttttgctttgttgc

SEQ ID NO: 293580 - DNA, 15 bp, Homo sapiens
agttttgctttgttg

SEQ ID NO: 293581 - DNA, 15 bp, Homo sapiens
gagttttgctttgtt

SEQ ID NO: 293582 - DNA, 15 bp, Homo sapiens
agagttttgctttgt

SEQ ID NO: 293583 - DNA, 15 bp, Homo sapiens
cagagttttgctttg

SEQ ID NO: 293584 - DNA, 15 bp, Homo sapiens
acagagttttgcttt

SEQ ID NO: 293585 - DNA, 15 bp, Homo sapiens
gacagagttttgctt

SEQ ID NO: 293586 - DNA, 15 bp, Homo sapiens
agacagagttttgct

SEQ ID NO: 293587 - DNA, 15 bp, Homo sapiens
gagacagagttttgc

SEQ ID NO: 293588 - DNA, 15 bp, Homo sapiens
agagacagagttttg

SEQ ID NO: 293589 - DNA, 15 bp, Homo sapiens
tagagacagagtttt

SEQ ID NO: 293590 - DNA, 15 bp, Homo sapiens
atagagacagagttt

SEQ ID NO: 293591 - DNA, 15 bp, Homo sapiens
aatagagacagagtt

SEQ ID NO: 293592 - DNA, 15 bp, Homo sapiens
gaatagagacagagt

SEQ ID NO: 293593 - DNA, 15 bp, Homo sapiens
agaatagagacagag

SEQ ID NO: 293594 - DNA, 15 bp, Homo sapiens
aagaatagagacaga

SEQ ID NO: 293595 - DNA, 15 bp, Homo sapiens
taagaatagagacag

SEQ ID NO: 293596 - DNA, 15 bp, Homo sapiens
ataagaatagagaca

SEQ ID NO: 293597 - DNA, 15 bp, Homo sapiens
tataagaatagagac

SEQ ID NO: 293598 - DNA, 15 bp, Homo sapiens
ttataagaatagaga

SEQ ID NO: 293599 - DNA, 15 bp, Homo sapiens
tttataagaatagag

SEQ ID NO: 293600 - DNA, 15 bp, Homo sapiens
ttttataagaataga

SEQ ID NO: 293601 - DNA, 15 bp, Homo sapiens
gttttataagaatag

SEQ ID NO: 293602 - DNA, 15 bp, Homo sapiens
tgttttataagaata

SEQ ID NO: 293603 - DNA, 15 bp, Homo sapiens
ttgttttataagaat

SEQ ID NO: 293604 - DNA, 15 bp, Homo sapiens
tttgttttataagaa

SEQ ID NO: 293605 - DNA, 15 bp, Homo sapiens
gtttgttttataaga

SEQ ID NO: 293606 - DNA, 15 bp, Homo sapiens
tgtttgttttataag

SEQ ID NO: 293607 - DNA, 15 bp, Homo sapiens
ttgtttgttttataa

SEQ ID NO: 293608 - DNA, 15 bp, Homo sapiens
tttgtttgttttata

SEQ ID NO: 293609 - DNA, 15 bp, Homo sapiens
ttttgtttgttttat

SEQ ID NO: 293610 - DNA, 15 bp, Homo sapiens
tttttgtttgtttta

SEQ ID NO: 293611 - DNA, 15 bp, Homo sapiens
ctttttgtttgtttt

SEQ ID NO: 293612 - DNA, 15 bp, Homo sapiens
gctttttgtttgttt

SEQ ID NO: 293613 - DNA, 15 bp, Homo sapiens
tgctttttgtttgtt

SEQ ID NO: 293614 - DNA, 15 bp, Homo sapiens
atgctttttgtttgt

SEQ ID NO: 293615 - DNA, 15 bp, Homo sapiens
aatgctttttgtttg

SEQ ID NO: 293616 - DNA, 15 bp, Homo sapiens
aaatgctttttgttt

SEQ ID NO: 293617 - DNA, 15 bp, Homo sapiens
gaaatgctttttgtt

SEQ ID NO: 293618 - DNA, 15 bp, Homo sapiens
agaaatgctttttgt

SEQ ID NO: 293619 - DNA, 15 bp, Homo sapiens
tagaaatgctttttg

SEQ ID NO: 293620 - DNA, 15 bp, Homo sapiens
atagaaatgcttttt

SEQ ID NO: 293621 - DNA, 15 bp, Homo sapiens
aatagaaatgctttt

SEQ ID NO: 293622 - DNA, 15 bp, Homo sapiens
aaatagaaatgcttt

SEQ ID NO: 293623 - DNA, 15 bp, Homo sapiens
aaaatagaaatgctt

SEQ ID NO: 293624 - DNA, 15 bp, Homo sapiens
aaaaatagaaatgct

SEQ ID NO: 293625 - DNA, 15 bp, Homo sapiens
aaaaaatagaaatgc

SEQ ID NO: 293626 - DNA, 15 bp, Homo sapiens
aaaaaaatagaaatg

SEQ ID NO: 293627 - DNA, 15 bp, Homo sapiens
aaaaaaaatagaaat

SEQ ID NO: 293628 - DNA, 15 bp, Homo sapiens
gaaaaaaaaaataga

SEQ ID NO: 293629 - DNA, 15 bp, Homo sapiens
agaaaaaaaaaatag

SEQ ID NO: 293630 - DNA, 15 bp, Homo sapiens
aagaaaaaaaaaata

SEQ ID NO: 293631 - DNA, 15 bp, Homo sapiens
caaaaagaaaaaaaa

SEQ ID NO: 293632 - DNA, 15 bp, Homo sapiens
tcaaaaagaaaaaaa

SEQ ID NO: 293633 - DNA, 15 bp, Homo sapiens
ctcaaaaagaaaaaa

SEQ ID NO: 293634 - DNA, 15 bp, Homo sapiens
catctcaaaaagaaa

SEQ ID NO: 293635 - DNA, 15 bp, Homo sapiens
ccatctcaaaaagaa

SEQ ID NO: 293636 - DNA, 15 bp, Homo sapiens
tccatctcaaaaaga

SEQ ID NO: 293637 - DNA, 15 bp, Homo sapiens
ctccatctcaaaaag

SEQ ID NO: 293638 - DNA, 15 bp, Homo sapiens
actccatctcaaaaa

SEQ ID NO: 293639 - DNA, 15 bp, Homo sapiens
gagactccatctcaa

SEQ ID NO: 293640 - DNA, 15 bp, Homo sapiens
agagactccatctca

SEQ ID NO: 293641 - DNA, 15 bp, Homo sapiens
gagagactccatctc

SEQ ID NO: 293642 - DNA, 15 bp, Homo sapiens
agagagactccatct

SEQ ID NO: 293643 - DNA, 15 bp, Homo sapiens
gagagagactccatc

SEQ ID NO: 293644 - DNA, 15 bp, Homo sapiens
agagagagactccat

SEQ ID NO: 293645 - DNA, 15 bp, Homo sapiens
cagagagagactcca

SEQ ID NO: 293646 - DNA, 15 bp, Homo sapiens
acagagagagactcc

SEQ ID NO: 293647 - DNA, 15 bp, Homo sapiens
gacagagagagactc

SEQ ID NO: 293648 - DNA, 15 bp, Homo sapiens
tgacagagagagact

SEQ ID NO: 293649 - DNA, 15 bp, Homo sapiens
gtgacagagagagac

SEQ ID NO: 293650 - DNA, 15 bp, Homo sapiens
ggtgacagagagaga

SEQ ID NO: 293651 - DNA, 15 bp, Homo sapiens
gggtgacagagagag

SEQ ID NO: 293652 - DNA, 15 bp, Homo sapiens
tgggtgacagagaga

SEQ ID NO: 293653 - DNA, 15 bp, Homo sapiens
ctgggtgacagagag

SEQ ID NO: 293654 - DNA, 15 bp, Homo sapiens
cctgggtgacagaga

SEQ ID NO: 293655 - DNA, 15 bp, Homo sapiens
cgccactgcactcca

SEQ ID NO: 293656 - DNA, 15 bp, Homo sapiens
gcgccactgcactcc

SEQ ID NO: 293657 - DNA, 15 bp, Homo sapiens
cgcgccactgcactc

SEQ ID NO: 293658 - DNA, 15 bp, Homo sapiens
tcgcgccactgcact

SEQ ID NO: 293659 - DNA, 15 bp, Homo sapiens
atcgcgccactgcac

SEQ ID NO: 293660 - DNA, 15 bp, Homo sapiens
gatcgcgccactgca

SEQ ID NO: 293661 - DNA, 15 bp, Homo sapiens
agatcgcgccactgc

SEQ ID NO: 293662 - DNA, 15 bp, Homo sapiens
aagatcgcgccactg

SEQ ID NO: 293663 - DNA, 15 bp, Homo sapiens
caagatcgcgccact

SEQ ID NO: 293664 - DNA, 15 bp, Homo sapiens
ccaagatcgcgccac

SEQ ID NO: 293665 - DNA, 15 bp, Homo sapiens
gccaagatcgcgcca

SEQ ID NO: 293666 - DNA, 15 bp, Homo sapiens
agccaagatcgcgcc

SEQ ID NO: 293667 - DNA, 15 bp, Homo sapiens
gagccaagatcgcgc

SEQ ID NO: 293668 - DNA, 15 bp, Homo sapiens
tgagccaagatcgcg

SEQ ID NO: 293669 - DNA, 15 bp, Homo sapiens
gtgagccaagatcgc

SEQ ID NO: 293670 - DNA, 15 bp, Homo sapiens
agtgagccaagatcg

SEQ ID NO: 293671 - DNA, 15 bp, Homo sapiens
cagtgagccaagatc

SEQ ID NO: 293672 - DNA, 15 bp, Homo sapiens
gcagtgagccaagat

SEQ ID NO: 293673 - DNA, 15 bp, Homo sapiens
tgcagtgagccaaga

SEQ ID NO: 293674 - DNA, 15 bp, Homo sapiens
ttgcagtgagccaag

SEQ ID NO: 293675 - DNA, 15 bp, Homo sapiens
gttgcagtgagccaa

SEQ ID NO: 293676 - DNA, 15 bp, Homo sapiens
ggttgcagtgagcca

SEQ ID NO: 293677 - DNA, 15 bp, Homo sapiens
ggaggttgcagtgag

SEQ ID NO: 293678 - DNA, 15 bp, Homo sapiens
tggaggttgcagtga

SEQ ID NO: 293679 - DNA, 15 bp, Homo sapiens
gtggaggttgcagtg

SEQ ID NO: 293680 - DNA, 15 bp, Homo sapiens
ggtggaggttgcagt

SEQ ID NO: 293681 - DNA, 15 bp, Homo sapiens
aggtggaggttgcag

SEQ ID NO: 293682 - DNA, 15 bp, Homo sapiens
gaggtggaggttgca

SEQ ID NO: 293683 - DNA, 15 bp, Homo sapiens
ggaggtggaggttgc

SEQ ID NO: 293684 - DNA, 15 bp, Homo sapiens
aggaggtggaggttg

SEQ ID NO: 293685 - DNA, 15 bp, Homo sapiens
caggaggtggaggtt

SEQ ID NO: 293686 - DNA, 15 bp, Homo sapiens
ccaggaggtggaggt

SEQ ID NO: 293687 - DNA, 15 bp, Homo sapiens
cccaggaggtggagg

SEQ ID NO: 293688 - DNA, 15 bp, Homo sapiens
acccaggaggtggag

SEQ ID NO: 293689 - DNA, 15 bp, Homo sapiens
aacccaggaggtgga

SEQ ID NO: 293690 - DNA, 15 bp, Homo sapiens
gaacccaggaggtgg

SEQ ID NO: 293691 - DNA, 15 bp, Homo sapiens
tgaacccaggaggtg

SEQ ID NO: 293692 - DNA, 15 bp, Homo sapiens
ttgaacccaggaggt

SEQ ID NO: 293693 - DNA, 15 bp, Homo sapiens
gagaatcgcttgaac

SEQ ID NO: 293694 - DNA, 15 bp, Homo sapiens
ggagaatcgcttgaa

SEQ ID NO: 293695 - DNA, 15 bp, Homo sapiens
aggagaatcgcttga

SEQ ID NO: 293696 - DNA, 15 bp, Homo sapiens
gcaggagaatcgctt

SEQ ID NO: 293697 - DNA, 15 bp, Homo sapiens
ggcaggagaatcgct

SEQ ID NO: 293698 - DNA, 15 bp, Homo sapiens
aggcaggagaatcgc

SEQ ID NO: 293699 - DNA, 15 bp, Homo sapiens
gaggcaggagaatcg

SEQ ID NO: 293700 - DNA, 15 bp, Homo sapiens
aggaggctgaggcag

SEQ ID NO: 293701 - DNA, 15 bp, Homo sapiens
ctactcaggaggctg

SEQ ID NO: 293702 - DNA, 15 bp, Homo sapiens
gctactcaggaggct

SEQ ID NO: 293703 - DNA, 15 bp, Homo sapiens
agctactcaggaggc

SEQ ID NO: 293704 - DNA, 15 bp, Homo sapiens
cagctactcaggagg

SEQ ID NO: 293705 - DNA, 15 bp, Homo sapiens
ccagctactcaggag

SEQ ID NO: 293706 - DNA, 15 bp, Homo sapiens
cccagctactcagga

SEQ ID NO: 293707 - DNA, 15 bp, Homo sapiens
tcccagctactcagg

SEQ ID NO: 293708 - DNA, 15 bp, Homo sapiens
atcccagctactcag

SEQ ID NO: 293709 - DNA, 15 bp, Homo sapiens
aatcccagctactca

SEQ ID NO: 293710 - DNA, 15 bp, Homo sapiens
tgtgcctgtaatccc

SEQ ID NO: 293711 - DNA, 15 bp, Homo sapiens
gtgtgcctgtaatcc

SEQ ID NO: 293712 - DNA, 15 bp, Homo sapiens
cgtgtgcctgtaatc

SEQ ID NO: 293713 - DNA, 15 bp, Homo sapiens
gcgtgtgcctgtaat

SEQ ID NO: 293714 - DNA, 15 bp, Homo sapiens
ggcgtgtgcctgtaa

SEQ ID NO: 293715 - DNA, 15 bp, Homo sapiens
tggcgtgtgcctgta

SEQ ID NO: 293716 - DNA, 15 bp, Homo sapiens
gtggcgtgtgcctgt

SEQ ID NO: 293717 - DNA, 15 bp, Homo sapiens
ggtggcgtgtgcctg

SEQ ID NO: 293718 - DNA, 15 bp, Homo sapiens
tggtggcgtgtgcct

SEQ ID NO: 293719 - DNA, 15 bp, Homo sapiens
atggtggcgtgtgcc

SEQ ID NO: 293720 - DNA, 15 bp, Homo sapiens
catggtggcgtgtgc

SEQ ID NO: 293721 - DNA, 15 bp, Homo sapiens
gcatggtggcgtgtg

SEQ ID NO: 293722 - DNA, 15 bp, Homo sapiens
ggcatggtggcgtgt

SEQ ID NO: 293723 - DNA, 15 bp, Homo sapiens
aggcatggtggcgtg

SEQ ID NO: 293724 - DNA, 15 bp, Homo sapiens
taggcatggtggcgt

SEQ ID NO: 293725 - DNA, 15 bp, Homo sapiens
ctaggcatggtggcg

SEQ ID NO: 293726 - DNA, 15 bp, Homo sapiens
gctaggcatggtggc

SEQ ID NO: 293727 - DNA, 15 bp, Homo sapiens
agctaggcatggtgg

SEQ ID NO: 293728 - DNA, 15 bp, Homo sapiens
tagctaggcatggtg

SEQ ID NO: 293729 - DNA, 15 bp, Homo sapiens
ttagctaggcatggt

SEQ ID NO: 293730 - DNA, 15 bp, Homo sapiens
attagctaggcatgg

SEQ ID NO: 293731 - DNA, 15 bp, Homo sapiens
aattagctaggcatg

SEQ ID NO: 293732 - DNA, 15 bp, Homo sapiens
aaattagctaggcat

SEQ ID NO: 293733 - DNA, 15 bp, Homo sapiens
aaaattagctaggca

SEQ ID NO: 293734 - DNA, 15 bp, Homo sapiens
aaaaattagctaggc

SEQ ID NO: 293735 - DNA, 15 bp, Homo sapiens
taaaaattagctagg

SEQ ID NO: 293736 - DNA, 15 bp, Homo sapiens
ataaaaattagctag

SEQ ID NO: 293737 - DNA, 15 bp, Homo sapiens
tataaaaattagcta

SEQ ID NO: 293738 - DNA, 15 bp, Homo sapiens
atataaaaattagct

SEQ ID NO: 293739 - DNA, 15 bp, Homo sapiens
aatataaaaattagc

SEQ ID NO: 293740 - DNA, 15 bp, Homo sapiens
aaatataaaaattag

SEQ ID NO: 293741 - DNA, 15 bp, Homo sapiens
aaaatataaaaatta

SEQ ID NO: 293742 - DNA, 15 bp, Homo sapiens
aaaaatataaaaatt

SEQ ID NO: 293743 - DNA, 15 bp, Homo sapiens
taaaaatataaaaat

SEQ ID NO: 293744 - DNA, 15 bp, Homo sapiens
ctaaaaatataaaaa

SEQ ID NO: 293745 - DNA, 15 bp, Homo sapiens
actaaaaatataaaa

SEQ ID NO: 293746 - DNA, 15 bp, Homo sapiens
tactaaaaatataaa

SEQ ID NO: 293747 - DNA, 15 bp, Homo sapiens
ctactaaaaatataa

SEQ ID NO: 293748 - DNA, 15 bp, Homo sapiens
tctactaaaaatata

SEQ ID NO: 293749 - DNA, 15 bp, Homo sapiens
ctctactaaaaatat

SEQ ID NO: 293750 - DNA, 15 bp, Homo sapiens
ttctctactaaaaat

SEQ ID NO: 293751 - DNA, 15 bp, Homo sapiens
tttctctactaaaaa

SEQ ID NO: 293752 - DNA, 15 bp, Homo sapiens
ctttctctactaaaa

SEQ ID NO: 293753 - DNA, 15 bp, Homo sapiens
cctttctctactaaa

SEQ ID NO: 293754 - DNA, 15 bp, Homo sapiens
ccctttctctactaa

SEQ ID NO: 293755 - DNA, 15 bp, Homo sapiens
accctttctctacta

SEQ ID NO: 293756 - DNA, 15 bp, Homo sapiens
aaccctttctctact

SEQ ID NO: 293757 - DNA, 15 bp, Homo sapiens
aaaccctttctctac

SEQ ID NO: 293758 - DNA, 15 bp, Homo sapiens
gaaaccctttctcta

SEQ ID NO: 293759 - DNA, 15 bp, Homo sapiens
tgaaaccctttctct

SEQ ID NO: 293760 - DNA, 15 bp, Homo sapiens
gtgaaaccctttctc

SEQ ID NO: 293761 - DNA, 15 bp, Homo sapiens
ggtgaaaccctttct

SEQ ID NO: 293762 - DNA, 15 bp, Homo sapiens
tggtgaaaccctttc

SEQ ID NO: 293763 - DNA, 15 bp, Homo sapiens
atggtgaaacccttt

SEQ ID NO: 293764 - DNA, 15 bp, Homo sapiens
catggtgaaaccctt

SEQ ID NO: 293765 - DNA, 15 bp, Homo sapiens
acatggtgaaaccct

SEQ ID NO: 293766 - DNA, 15 bp, Homo sapiens
aacatggtgaaaccc

SEQ ID NO: 293767 - DNA, 15 bp, Homo sapiens
caacatggtgaaacc

SEQ ID NO: 293768 - DNA, 15 bp, Homo sapiens
tcaacatggtgaaac

SEQ ID NO: 293769 - DNA, 15 bp, Homo sapiens
atcaacatggtgaaa

SEQ ID NO: 293770 - DNA, 15 bp, Homo sapiens
gatcaacatggtgaa

SEQ ID NO: 293771 - DNA, 15 bp, Homo sapiens
tgatcaacatggtga

SEQ ID NO: 293772 - DNA, 15 bp, Homo sapiens
ctgatcaacatggtg

SEQ ID NO: 293773 - DNA, 15 bp, Homo sapiens
cctgatcaacatggt

SEQ ID NO: 293774 - DNA, 15 bp, Homo sapiens
gcctgatcaacatgg

SEQ ID NO: 293775 - DNA, 15 bp, Homo sapiens
agcctgatcaacatg

SEQ ID NO: 293776 - DNA, 15 bp, Homo sapiens
cagcctgatcaacat

SEQ ID NO: 293777 - DNA, 15 bp, Homo sapiens
ccagcctgatcaaca

SEQ ID NO: 293778 - DNA, 15 bp, Homo sapiens
accagcctgatcaac

SEQ ID NO: 293779 - DNA, 15 bp, Homo sapiens
gaccagcctgatcaa

SEQ ID NO: 293780 - DNA, 15 bp, Homo sapiens
agaccagcctgatca

SEQ ID NO: 293781 - DNA, 15 bp, Homo sapiens
gagaccagcctgatc

SEQ ID NO: 293782 - DNA, 15 bp, Homo sapiens
cgagaccagcctgat

SEQ ID NO: 293783 - DNA, 15 bp, Homo sapiens
cgaggtcaggagttc

SEQ ID NO: 293784 - DNA, 15 bp, Homo sapiens
acgaggtcaggagtt

SEQ ID NO: 293785 - DNA, 15 bp, Homo sapiens
cacgaggtcaggagt

SEQ ID NO: 293786 - DNA, 15 bp, Homo sapiens
aatcacgaggtcagg

SEQ ID NO: 293787 - DNA, 15 bp, Homo sapiens
aaatcacgaggtcag

SEQ ID NO: 293788 - DNA, 15 bp, Homo sapiens
caaatcacgaggtca

SEQ ID NO: 293789 - DNA, 15 bp, Homo sapiens
gcaaatcacgaggtc

SEQ ID NO: 293790 - DNA, 15 bp, Homo sapiens
ggcaaatcacgaggt

SEQ ID NO: 293791 - DNA, 15 bp, Homo sapiens
aggcaaatcacgagg

SEQ ID NO: 293792 - DNA, 15 bp, Homo sapiens
caggcaaatcacgag

SEQ ID NO: 293793 - DNA, 15 bp, Homo sapiens
gcaggcaaatcacga

SEQ ID NO: 293794 - DNA, 15 bp, Homo sapiens
ggcaggcaaatcacg

SEQ ID NO: 293795 - DNA, 15 bp, Homo sapiens
aggcaggcaaatcac

SEQ ID NO: 293796 - DNA, 15 bp, Homo sapiens
gaggcaggcaaatca

SEQ ID NO: 293797 - DNA, 15 bp, Homo sapiens
cgaggcaggcaaatc

SEQ ID NO: 293798 - DNA, 15 bp, Homo sapiens
ccgaggcaggcaaat

SEQ ID NO: 293799 - DNA, 15 bp, Homo sapiens
gccgaggcaggcaaa

SEQ ID NO: 293800 - DNA, 15 bp, Homo sapiens
ggccgaggcaggcaa

SEQ ID NO: 293801 - DNA, 15 bp, Homo sapiens
aggccgaggcaggca

SEQ ID NO: 293802 - DNA, 15 bp, Homo sapiens
gaggccgaggcaggc

SEQ ID NO: 293803 - DNA, 15 bp, Homo sapiens
ggaggccgaggcagg

SEQ ID NO: 293804 - DNA, 15 bp, Homo sapiens
aggaggccgaggcag

SEQ ID NO: 293805 - DNA, 15 bp, Homo sapiens
gaggaggccgaggca

SEQ ID NO: 293806 - DNA, 15 bp, Homo sapiens
ggaggaggccgaggc

SEQ ID NO: 293807 - DNA, 15 bp, Homo sapiens
gggaggaggccgagg

SEQ ID NO: 293808 - DNA, 15 bp, Homo sapiens
tgggaggaggccgag

SEQ ID NO: 293809 - DNA, 15 bp, Homo sapiens
ttgggaggaggccga

SEQ ID NO: 293810 - DNA, 15 bp, Homo sapiens
tttgggaggaggccg

SEQ ID NO: 293811 - DNA, 15 bp, Homo sapiens
ctttgggaggaggcc

SEQ ID NO: 293812 - DNA, 15 bp, Homo sapiens
cctttgggaggaggc

SEQ ID NO: 293813 - DNA, 15 bp, Homo sapiens
ccctttgggaggagg

SEQ ID NO: 293814 - DNA, 15 bp, Homo sapiens
gccctttgggaggag

SEQ ID NO: 293815 - DNA, 15 bp, Homo sapiens
agccctttgggagga

SEQ ID NO: 293816 - DNA, 15 bp, Homo sapiens
cagccctttgggagg

SEQ ID NO: 293817 - DNA, 15 bp, Homo sapiens
ccagccctttgggag

SEQ ID NO: 293818 - DNA, 15 bp, Homo sapiens
cccagccctttggga

SEQ ID NO: 293819 - DNA, 15 bp, Homo sapiens
tcccagccctttggg

SEQ ID NO: 293820 - DNA, 15 bp, Homo sapiens
atcccagccctttgg

SEQ ID NO: 293821 - DNA, 15 bp, Homo sapiens
aatcccagccctttg

SEQ ID NO: 293822 - DNA, 15 bp, Homo sapiens
taatcccagcccttt

SEQ ID NO: 293823 - DNA, 15 bp, Homo sapiens
gtaatcccagccctt

SEQ ID NO: 293824 - DNA, 15 bp, Homo sapiens
agtaatcccagccct

SEQ ID NO: 293825 - DNA, 15 bp, Homo sapiens
cagtaatcccagccc

SEQ ID NO: 293826 - DNA, 15 bp, Homo sapiens
ccagtaatcccagcc

SEQ ID NO: 293827 - DNA, 15 bp, Homo sapiens
gccagtaatcccagc

SEQ ID NO: 293828 - DNA, 15 bp, Homo sapiens
tgccagtaatcccag

SEQ ID NO: 293829 - DNA, 15 bp, Homo sapiens
atgccagtaatccca

SEQ ID NO: 293830 - DNA, 15 bp, Homo sapiens
catgccagtaatccc

SEQ ID NO: 293831 - DNA, 15 bp, Homo sapiens
tcatgccagtaatcc

SEQ ID NO: 293832 - DNA, 15 bp, Homo sapiens
ctcatgccagtaatc

SEQ ID NO: 293833 - DNA, 15 bp, Homo sapiens
gctcatgccagtaat

SEQ ID NO: 293834 - DNA, 15 bp, Homo sapiens
ggctcatgccagtaa

SEQ ID NO: 293835 - DNA, 15 bp, Homo sapiens
tggctcatgccagta

SEQ ID NO: 293836 - DNA, 15 bp, Homo sapiens
gtggctcatgccagt

SEQ ID NO: 293837 - DNA, 15 bp, Homo sapiens
ggtggctcatgccag

SEQ ID NO: 293838 - DNA, 15 bp, Homo sapiens
cggtggctcatgcca

SEQ ID NO: 293839 - DNA, 15 bp, Homo sapiens
gcggtggctcatgcc

SEQ ID NO: 293840 - DNA, 15 bp, Homo sapiens
tgcggtggctcatgc

SEQ ID NO: 293841 - DNA, 15 bp, Homo sapiens
gtgcggtggctcatg

SEQ ID NO: 293842 - DNA, 15 bp, Homo sapiens
ggtgcggtggctcat

SEQ ID NO: 293843 - DNA, 15 bp, Homo sapiens
gggtgcggtggctca

SEQ ID NO: 293844 - DNA, 15 bp, Homo sapiens
tgggtgcggtggctc

SEQ ID NO: 293845 - DNA, 15 bp, Homo sapiens
ctgggtgcggtggct

SEQ ID NO: 293846 - DNA, 15 bp, Homo sapiens
gctgggtgcggtggc

SEQ ID NO: 293847 - DNA, 15 bp, Homo sapiens
ggctgggtgcggtgg

SEQ ID NO: 293848 - DNA, 15 bp, Homo sapiens
tggctgggtgcggtg

SEQ ID NO: 293849 - DNA, 15 bp, Homo sapiens
ttggctgggtgcggt

SEQ ID NO: 293850 - DNA, 15 bp, Homo sapiens
gttggctgggtgcgg

SEQ ID NO: 293851 - DNA, 15 bp, Homo sapiens
tgttggctgggtgcg

SEQ ID NO: 293852 - DNA, 15 bp, Homo sapiens
ttgttggctgggtgc

SEQ ID NO: 293853 - DNA, 15 bp, Homo sapiens
tttgttggctgggtg

SEQ ID NO: 293854 - DNA, 15 bp, Homo sapiens
ttttgttggctgggt

SEQ ID NO: 293855 - DNA, 15 bp, Homo sapiens
tttttgttggctggg

SEQ ID NO: 293856 - DNA, 15 bp, Homo sapiens
ttttttgttggctgg

SEQ ID NO: 293857 - DNA, 15 bp, Homo sapiens
gttttttgttggctg

SEQ ID NO: 293858 - DNA, 15 bp, Homo sapiens
tgttttttgttggct

SEQ ID NO: 293859 - DNA, 15 bp, Homo sapiens
atgttttttgttggc

SEQ ID NO: 293860 - DNA, 15 bp, Homo sapiens
aatgttttttgttgg

SEQ ID NO: 293861 - DNA, 15 bp, Homo sapiens
aaatgttttttgttg

SEQ ID NO: 293862 - DNA, 15 bp, Homo sapiens
gaaatgttttttgtt

SEQ ID NO: 293863 - DNA, 15 bp, Homo sapiens
agaaatgttttttgt

SEQ ID NO: 293864 - DNA, 15 bp, Homo sapiens
aagaaatgttttttg

SEQ ID NO: 293865 - DNA, 15 bp, Homo sapiens
caagaaatgtttttt

SEQ ID NO: 293866 - DNA, 15 bp, Homo sapiens
acaagaaatgttttt

SEQ ID NO: 293867 - DNA, 15 bp, Homo sapiens
cacaagaaatgtttt

SEQ ID NO: 293868 - DNA, 15 bp, Homo sapiens
acacaagaaatgttt

SEQ ID NO: 293869 - DNA, 15 bp, Homo sapiens
cacacaagaaatgtt

SEQ ID NO: 293870 - DNA, 15 bp, Homo sapiens
gcacacaagaaatgt

SEQ ID NO: 293871 - DNA, 15 bp, Homo sapiens
tgcacacaagaaatg

SEQ ID NO: 293872 - DNA, 15 bp, Homo sapiens
atgcacacaagaaat

SEQ ID NO: 293873 - DNA, 15 bp, Homo sapiens
catgcacacaagaaa

SEQ ID NO: 293874 - DNA, 15 bp, Homo sapiens
acatgcacacaagaa

SEQ ID NO: 293875 - DNA, 15 bp, Homo sapiens
gacatgcacacaaga

SEQ ID NO: 293876 - DNA, 15 bp, Homo sapiens
agacatgcacacaag

SEQ ID NO: 293877 - DNA, 15 bp, Homo sapiens
tagacatgcacacaa

SEQ ID NO: 293878 - DNA, 15 bp, Homo sapiens
gtagacatgcacaca

SEQ ID NO: 293879 - DNA, 15 bp, Homo sapiens
agtagacatgcacac

SEQ ID NO: 293880 - DNA, 15 bp, Homo sapiens
tagtagacatgcaca

SEQ ID NO: 293881 - DNA, 15 bp, Homo sapiens
ctagtagacatgcac

SEQ ID NO: 293882 - DNA, 15 bp, Homo sapiens
actagtagacatgca

SEQ ID NO: 293883 - DNA, 15 bp, Homo sapiens
cactagtagacatgc

SEQ ID NO: 293884 - DNA, 15 bp, Homo sapiens
tcactagtagacatg

SEQ ID NO: 293885 - DNA, 15 bp, Homo sapiens
atcactagtagacat

SEQ ID NO: 293886 - DNA, 15 bp, Homo sapiens
catcactagtagaca

SEQ ID NO: 293887 - DNA, 15 bp, Homo sapiens
tcatcactagtagac

SEQ ID NO: 293888 - DNA, 15 bp, Homo sapiens
ttcatcactagtaga

SEQ ID NO: 293889 - DNA, 15 bp, Homo sapiens
attcatcactagtag

SEQ ID NO: 293890 - DNA, 15 bp, Homo sapiens
aattcatcactagta

SEQ ID NO: 293891 - DNA, 15 bp, Homo sapiens
gaattcatcactagt

SEQ ID NO: 293892 - DNA, 15 bp, Homo sapiens
agaattcatcactag

SEQ ID NO: 293893 - DNA, 15 bp, Homo sapiens
aagaattcatcacta

SEQ ID NO: 293894 - DNA, 15 bp, Homo sapiens
gaagaattcatcact

SEQ ID NO: 293895 - DNA, 15 bp, Homo sapiens
ggaagaattcatcac

SEQ ID NO: 293896 - DNA, 15 bp, Homo sapiens
tggaagaattcatca

SEQ ID NO: 293897 - DNA, 15 bp, Homo sapiens
ctggaagaattcatc

SEQ ID NO: 293898 - DNA, 15 bp, Homo sapiens
gctggaagaattcat

SEQ ID NO: 293899 - DNA, 15 bp, Homo sapiens
agctggaagaattca

SEQ ID NO: 293900 - DNA, 15 bp, Homo sapiens
aagctggaagaattc

SEQ ID NO: 293901 - DNA, 15 bp, Homo sapiens
aaagctggaagaatt

SEQ ID NO: 293902 - DNA, 15 bp, Homo sapiens
aaaagctggaagaat

SEQ ID NO: 293903 - DNA, 15 bp, Homo sapiens
taaaagctggaagaa

SEQ ID NO: 293904 - DNA, 15 bp, Homo sapiens
ataaaagctggaaga

SEQ ID NO: 293905 - DNA, 15 bp, Homo sapiens
cataaaagctggaag

SEQ ID NO: 293906 - DNA, 15 bp, Homo sapiens
acataaaagctggaa

SEQ ID NO: 293907 - DNA, 15 bp, Homo sapiens
gacataaaagctgga

SEQ ID NO: 293908 - DNA, 15 bp, Homo sapiens
agacataaaagctgg

SEQ ID NO: 293909 - DNA, 15 bp, Homo sapiens
cagacataaaagctg

SEQ ID NO: 293910 - DNA, 15 bp, Homo sapiens
ccagacataaaagct

SEQ ID NO: 293911 - DNA, 15 bp, Homo sapiens
tccagacataaaagc

SEQ ID NO: 293912 - DNA, 15 bp, Homo sapiens
ttccagacataaaag

SEQ ID NO: 293913 - DNA, 15 bp, Homo sapiens
tttccagacataaaa

SEQ ID NO: 293914 - DNA, 15 bp, Homo sapiens
ttttccagacataaa

SEQ ID NO: 293915 - DNA, 15 bp, Homo sapiens
tttttccagacataa

SEQ ID NO: 293916 - DNA, 15 bp, Homo sapiens
ttttttccagacata

SEQ ID NO: 293917 - DNA, 15 bp, Homo sapiens
tttttttccagacat

SEQ ID NO: 293918 - DNA, 15 bp, Homo sapiens
gtttttttccagaca

SEQ ID NO: 293919 - DNA, 15 bp, Homo sapiens
tgtttttttccagac

SEQ ID NO: 293920 - DNA, 15 bp, Homo sapiens
atgtttttttccaga

SEQ ID NO: 293921 - DNA, 15 bp, Homo sapiens
aatgtttttttccag

SEQ ID NO: 293922 - DNA, 15 bp, Homo sapiens
aaatgtttttttcca

SEQ ID NO: 293923 - DNA, 15 bp, Homo sapiens
aaaatgtttttttcc

SEQ ID NO: 293924 - DNA, 15 bp, Homo sapiens
taaaatgtttttttc

SEQ ID NO: 293925 - DNA, 15 bp, Homo sapiens
gtaaaatgttttttt

SEQ ID NO: 293926 - DNA, 15 bp, Homo sapiens
ggtaaaatgtttttt

SEQ ID NO: 293927 - DNA, 15 bp, Homo sapiens
aggtaaaatgttttt

SEQ ID NO: 293928 - DNA, 15 bp, Homo sapiens
aaggtaaaatgtttt

SEQ ID NO: 293929 - DNA, 15 bp, Homo sapiens
aaaggtaaaatgttt

SEQ ID NO: 293930 - DNA, 15 bp, Homo sapiens
taaaggtaaaatgtt

SEQ ID NO: 293931 - DNA, 15 bp, Homo sapiens
ataaaggtaaaatgt

SEQ ID NO: 293932 - DNA, 15 bp, Homo sapiens
aataaaggtaaaatg

SEQ ID NO: 293933 - DNA, 15 bp, Homo sapiens
aaataaaggtaaaat

SEQ ID NO: 293934 - DNA, 15 bp, Homo sapiens
aaaataaaggtaaaa

SEQ ID NO: 293935 - DNA, 15 bp, Homo sapiens
aaaaataaaggtaaa

SEQ ID NO: 293936 - DNA, 15 bp, Homo sapiens
taaaaataaaggtaa

SEQ ID NO: 293937 - DNA, 15 bp, Homo sapiens
ttaaaaataaaggta

SEQ ID NO: 293938 - DNA, 15 bp, Homo sapiens
tttaaaaataaaggt

SEQ ID NO: 293939 - DNA, 15 bp, Homo sapiens
ttttaaaaataaagg

SEQ ID NO: 293940 - DNA, 15 bp, Homo sapiens
cttttaaaaataaag

SEQ ID NO: 293941 - DNA, 15 bp, Homo sapiens
ccttttaaaaataaa

SEQ ID NO: 293942 - DNA, 15 bp, Homo sapiens
accttttaaaaataa

SEQ ID NO: 293943 - DNA, 15 bp, Homo sapiens
gaccttttaaaaata

SEQ ID NO: 293944 - DNA, 15 bp, Homo sapiens
agaccttttaaaaat

SEQ ID NO: 293945 - DNA, 15 bp, Homo sapiens
aagaccttttaaaaa

SEQ ID NO: 293946 - DNA, 15 bp, Homo sapiens
aaagaccttttaaaa

SEQ ID NO: 293947 - DNA, 15 bp, Homo sapiens
aaaagaccttttaaa

SEQ ID NO: 293948 - DNA, 15 bp, Homo sapiens
caaaagaccttttaa

SEQ ID NO: 293949 - DNA, 15 bp, Homo sapiens
gcaaaagacctttta

SEQ ID NO: 293950 - DNA, 15 bp, Homo sapiens
agcaaaagacctttt

SEQ ID NO: 293951 - DNA, 15 bp, Homo sapiens
cagcaaaagaccttt

SEQ ID NO: 293952 - DNA, 15 bp, Homo sapiens
ccagcaaaagacctt

SEQ ID NO: 293953 - DNA, 15 bp, Homo sapiens
cccagcaaaagacct

SEQ ID NO: 293954 - DNA, 15 bp, Homo sapiens
acccagcaaaagacc

SEQ ID NO: 293955 - DNA, 15 bp, Homo sapiens
tacccagcaaaagac

SEQ ID NO: 293956 - DNA, 15 bp, Homo sapiens
atacccagcaaaaga

SEQ ID NO: 293957 - DNA, 15 bp, Homo sapiens
aatacccagcaaaag

SEQ ID NO: 293958 - DNA, 15 bp, Homo sapiens
caatacccagcaaaa

SEQ ID NO: 293959 - DNA, 15 bp, Homo sapiens
tcaatacccagcaaa

SEQ ID NO: 293960 - DNA, 15 bp, Homo sapiens
ttcaatacccagcaa

SEQ ID NO: 293961 - DNA, 15 bp, Homo sapiens
attcaatacccagca

SEQ ID NO: 293962 - DNA, 15 bp, Homo sapiens
aattcaatacccagc

SEQ ID NO: 293963 - DNA, 15 bp, Homo sapiens
gaattcaatacccag

SEQ ID NO: 293964 - DNA, 15 bp, Homo sapiens
agaattcaataccca

SEQ ID NO: 293965 - DNA, 15 bp, Homo sapiens
tagaattcaataccc

SEQ ID NO: 293966 - DNA, 15 bp, Homo sapiens
ctagaattcaatacc

SEQ ID NO: 293967 - DNA, 15 bp, Homo sapiens
cctagaattcaatac

SEQ ID NO: 293968 - DNA, 15 bp, Homo sapiens
acctagaattcaata

SEQ ID NO: 293969 - DNA, 15 bp, Homo sapiens
aacctagaattcaat

SEQ ID NO: 293970 - DNA, 15 bp, Homo sapiens
caacctagaattcaa

SEQ ID NO: 293971 - DNA, 15 bp, Homo sapiens
tcaacctagaattca

SEQ ID NO: 293972 - DNA, 15 bp, Homo sapiens
gtcaacctagaattc

SEQ ID NO: 293973 - DNA, 15 bp, Homo sapiens
tgtcaacctagaatt

SEQ ID NO: 293974 - DNA, 15 bp, Homo sapiens
ctgtcaacctagaat

SEQ ID NO: 293975 - DNA, 15 bp, Homo sapiens
actgtcaacctagaa

SEQ ID NO: 293976 - DNA, 15 bp, Homo sapiens
gactgtcaacctaga

SEQ ID NO: 293977 - DNA, 15 bp, Homo sapiens
agactgtcaacctag

SEQ ID NO: 293978 - DNA, 15 bp, Homo sapiens
aagactgtcaaccta

SEQ ID NO: 293979 - DNA, 15 bp, Homo sapiens
aaagactgtcaacct

SEQ ID NO: 293980 - DNA, 15 bp, Homo sapiens
aaaagactgtcaacc

SEQ ID NO: 293981 - DNA, 15 bp, Homo sapiens
aaaaagactgtcaac

SEQ ID NO: 293982 - DNA, 15 bp, Homo sapiens
caaaaagactgtcaa

SEQ ID NO: 293983 - DNA, 15 bp, Homo sapiens
acaaaaagactgtca

SEQ ID NO: 293984 - DNA, 15 bp, Homo sapiens
aacaaaaagactgtc

SEQ ID NO: 293985 - DNA, 15 bp, Homo sapiens
aaacaaaaagactgt

SEQ ID NO: 293986 - DNA, 15 bp, Homo sapiens
aaaacaaaaagactg

SEQ ID NO: 293987 - DNA, 15 bp, Homo sapiens
aaaaacaaaaagact

SEQ ID NO: 293988 - DNA, 15 bp, Homo sapiens
aaaaaacaaaaagac

SEQ ID NO: 293989 - DNA, 15 bp, Homo sapiens
gaaaaaacaaaaaga

SEQ ID NO: 293990 - DNA, 15 bp, Homo sapiens
agaaaaaacaaaaag

SEQ ID NO: 293991 - DNA, 15 bp, Homo sapiens
aagaaaaaacaaaaa

SEQ ID NO: 293992 - DNA, 15 bp, Homo sapiens
caaagaaaaaacaaa

SEQ ID NO: 293993 - DNA, 15 bp, Homo sapiens
tcaaagaaaaaacaa

SEQ ID NO: 293994 - DNA, 15 bp, Homo sapiens
ctcaaagaaaaaaca

SEQ ID NO: 293995 - DNA, 15 bp, Homo sapiens
actcaaagaaaaaac

SEQ ID NO: 293996 - DNA, 15 bp, Homo sapiens
cactcaaagaaaaaa

SEQ ID NO: 293997 - DNA, 15 bp, Homo sapiens
gcactcaaagaaaaa

SEQ ID NO: 293998 - DNA, 15 bp, Homo sapiens
agcactcaaagaaaa

SEQ ID NO: 293999 - DNA, 15 bp, Homo sapiens
aagcactcaaagaaa

SEQ ID NO: 294000 - DNA, 15 bp, Homo sapiens
aaagcactcaaagaa

SEQ ID NO: 294001 - DNA, 15 bp, Homo sapiens
taaagcactcaaaga

SEQ ID NO: 294002 - DNA, 15 bp, Homo sapiens
ttaaagcactcaaag

SEQ ID NO: 294003 - DNA, 15 bp, Homo sapiens
tttaaagcactcaaa

SEQ ID NO: 294004 - DNA, 15 bp, Homo sapiens
ttttaaagcactcaa

SEQ ID NO: 294005 - DNA, 15 bp, Homo sapiens
tttttaaagcactca

SEQ ID NO: 294006 - DNA, 15 bp, Homo sapiens
atttttaaagcactc

SEQ ID NO: 294007 - DNA, 15 bp, Homo sapiens
tatttttaaagcact

SEQ ID NO: 294008 - DNA, 15 bp, Homo sapiens
atatttttaaagcac

SEQ ID NO: 294009 - DNA, 15 bp, Homo sapiens
aatatttttaaagca

SEQ ID NO: 294010 - DNA, 15 bp, Homo sapiens
caatatttttaaagc

SEQ ID NO: 294011 - DNA, 15 bp, Homo sapiens
gcaatatttttaaag

SEQ ID NO: 294012 - DNA, 15 bp, Homo sapiens
agcaatatttttaaa

SEQ ID NO: 294013 - DNA, 15 bp, Homo sapiens
gagcaatatttttaa

SEQ ID NO: 294014 - DNA, 15 bp, Homo sapiens
ggagcaatattttta

SEQ ID NO: 294015 - DNA, 15 bp, Homo sapiens
tggagcaatattttt

SEQ ID NO: 294016 - DNA, 15 bp, Homo sapiens
gtggagcaatatttt

SEQ ID NO: 294017 - DNA, 15 bp, Homo sapiens
agtggagcaatattt

SEQ ID NO: 294018 - DNA, 15 bp, Homo sapiens
cagtggagcaatatt

SEQ ID NO: 294019 - DNA, 15 bp, Homo sapiens
acagtggagcaatat

SEQ ID NO: 294020 - DNA, 15 bp, Homo sapiens
gacagtggagcaata

SEQ ID NO: 294021 - DNA, 15 bp, Homo sapiens
agacagtggagcaat

SEQ ID NO: 294022 - DNA, 15 bp, Homo sapiens
aagacagtggagcaa

SEQ ID NO: 294023 - DNA, 15 bp, Homo sapiens
gaagacagtggagca

SEQ ID NO: 294024 - DNA, 15 bp, Homo sapiens
agaagacagtggagc

SEQ ID NO: 294025 - DNA, 15 bp, Homo sapiens
cagaagacagtggag

SEQ ID NO: 294026 - DNA, 15 bp, Homo sapiens
ccagaagacagtgga

SEQ ID NO: 294027 - DNA, 15 bp, Homo sapiens
accagaagacagtgg

SEQ ID NO: 294028 - DNA, 15 bp, Homo sapiens
aaccagaagacagtg

SEQ ID NO: 294029 - DNA, 15 bp, Homo sapiens
aaaccagaagacagt

SEQ ID NO: 294030 - DNA, 15 bp, Homo sapiens
caaaccagaagacag

SEQ ID NO: 294031 - DNA, 15 bp, Homo sapiens
gcaaaccagaagaca

SEQ ID NO: 294032 - DNA, 15 bp, Homo sapiens
ggcaaaccagaagac

SEQ ID NO: 294033 - DNA, 15 bp, Homo sapiens
aggcaaaccagaaga

SEQ ID NO: 294034 - DNA, 15 bp, Homo sapiens
aaggcaaaccagaag

SEQ ID NO: 294035 - DNA, 15 bp, Homo sapiens
caaggcaaaccagaa

SEQ ID NO: 294036 - DNA, 15 bp, Homo sapiens
acaaggcaaaccaga

SEQ ID NO: 294037 - DNA, 15 bp, Homo sapiens
aacaaggcaaaccag

SEQ ID NO: 294038 - DNA, 15 bp, Homo sapiens
aaacaaggcaaacca

SEQ ID NO: 294039 - DNA, 15 bp, Homo sapiens
gaaacaaggcaaacc

SEQ ID NO: 294040 - DNA, 15 bp, Homo sapiens
agaaacaaggcaaac

SEQ ID NO: 294041 - DNA, 15 bp, Homo sapiens
aagaaacaaggcaaa

SEQ ID NO: 294042 - DNA, 15 bp, Homo sapiens
aaagaaacaaggcaa

SEQ ID NO: 294043 - DNA, 15 bp, Homo sapiens
aaaagaaacaaggca

SEQ ID NO: 294044 - DNA, 15 bp, Homo sapiens
aaaaagaaacaaggc

SEQ ID NO: 294045 - DNA, 15 bp, Homo sapiens
aaaaaagaaacaagg

SEQ ID NO: 294046 - DNA, 15 bp, Homo sapiens
aaaaaaagaaacaag

SEQ ID NO: 294047 - DNA, 15 bp, Homo sapiens
gaaaaaaagaaacaa

SEQ ID NO: 294048 - DNA, 15 bp, Homo sapiens
agaaaaaaagaaaca

SEQ ID NO: 294049 - DNA, 15 bp, Homo sapiens
aagaaaaaaagaaac

SEQ ID NO: 294050 - DNA, 15 bp, Homo sapiens
aaagaaaaaaagaaa

SEQ ID NO: 294051 - DNA, 15 bp, Homo sapiens
aaaagaaaaaaagaa

SEQ ID NO: 294052 - DNA, 15 bp, Homo sapiens
aaaaagaaaaaaaga

SEQ ID NO: 294053 - DNA, 15 bp, Homo sapiens
aaaaaagaaaaaaag

SEQ ID NO: 294054 - DNA, 15 bp, Homo sapiens
aaaaaaagaaaaaaa

SEQ ID NO: 294055 - DNA, 15 bp, Homo sapiens
aaaaaaaagaaaaaa

SEQ ID NO: 294056 - DNA, 15 bp, Homo sapiens
caaaaaaaagaaaaa

SEQ ID NO: 294057 - DNA, 15 bp, Homo sapiens
tcaaaaaaaagaaaa

SEQ ID NO: 294058 - DNA, 15 bp, Homo sapiens
ctcaaaaaaaagaaa

SEQ ID NO: 294059 - DNA, 15 bp, Homo sapiens
tctcaaaaaaaagaa

SEQ ID NO: 294060 - DNA, 15 bp, Homo sapiens
atctcaaaaaaaaga

SEQ ID NO: 294061 - DNA, 15 bp, Homo sapiens
catctcaaaaaaaag

SEQ ID NO: 294062 - DNA, 15 bp, Homo sapiens
tcatctcaaaaaaaa

SEQ ID NO: 294063 - DNA, 15 bp, Homo sapiens
ttcatctcaaaaaaa

SEQ ID NO: 294064 - DNA, 15 bp, Homo sapiens
cttcatctcaaaaaa

SEQ ID NO: 294065 - DNA, 15 bp, Homo sapiens
gcttcatctcaaaaa

SEQ ID NO: 294066 - DNA, 15 bp, Homo sapiens
ggcttcatctcaaaa

SEQ ID NO: 294067 - DNA, 15 bp, Homo sapiens
aggcttcatctcaaa

SEQ ID NO: 294068 - DNA, 15 bp, Homo sapiens
gaggcttcatctcaa

SEQ ID NO: 294069 - DNA, 15 bp, Homo sapiens
cgaggcttcatctca

SEQ ID NO: 294070 - DNA, 15 bp, Homo sapiens
gcgaggcttcatctc

SEQ ID NO: 294071 - DNA, 15 bp, Homo sapiens
agcgaggcttcatct

SEQ ID NO: 294072 - DNA, 15 bp, Homo sapiens
gagcgaggcttcatc

SEQ ID NO: 294073 - DNA, 15 bp, Homo sapiens
agagcgaggcttcat

SEQ ID NO: 294074 - DNA, 15 bp, Homo sapiens
aagagcgaggcttca

SEQ ID NO: 294075 - DNA, 15 bp, Homo sapiens
aaagagcgaggcttc

SEQ ID NO: 294076 - DNA, 15 bp, Homo sapiens
aaaagagcgaggctt

SEQ ID NO: 294077 - DNA, 15 bp, Homo sapiens
caaaagagcgaggct

SEQ ID NO: 294078 - DNA, 15 bp, Homo sapiens
gcaaaagagcgaggc

SEQ ID NO: 294079 - DNA, 15 bp, Homo sapiens
ggcaaaagagcgagg

SEQ ID NO: 294080 - DNA, 15 bp, Homo sapiens
gggcaaaagagcgag

SEQ ID NO: 294081 - DNA, 15 bp, Homo sapiens
tgggcaaaagagcga

SEQ ID NO: 294082 - DNA, 15 bp, Homo sapiens
ctgggcaaaagagcg

SEQ ID NO: 294083 - DNA, 15 bp, Homo sapiens
cctgggcaaaagagc

SEQ ID NO: 294084 - DNA, 15 bp, Homo sapiens
gcctgggcaaaagag

SEQ ID NO: 294085 - DNA, 15 bp, Homo sapiens
agcctgggcaaaaga

SEQ ID NO: 294086 - DNA, 15 bp, Homo sapiens
cagcctgggcaaaag

SEQ ID NO: 294087 - DNA, 15 bp, Homo sapiens
ccagcctgggcaaaa

SEQ ID NO: 294088 - DNA, 15 bp, Homo sapiens
tccagcctgggcaaa

SEQ ID NO: 294089 - DNA, 15 bp, Homo sapiens
ggatcatgccactgc

SEQ ID NO: 294090 - DNA, 15 bp, Homo sapiens
gggatcatgccactg

SEQ ID NO: 294091 - DNA, 15 bp, Homo sapiens
tgggatcatgccact

SEQ ID NO: 294092 - DNA, 15 bp, Homo sapiens
ctgggatcatgccac

SEQ ID NO: 294093 - DNA, 15 bp, Homo sapiens
gctgggatcatgcca

SEQ ID NO: 294094 - DNA, 15 bp, Homo sapiens
agctgggatcatgcc

SEQ ID NO: 294095 - DNA, 15 bp, Homo sapiens
gagctgggatcatgc

SEQ ID NO: 294096 - DNA, 15 bp, Homo sapiens
tgagctgggatcatg

SEQ ID NO: 294097 - DNA, 15 bp, Homo sapiens
gtgagctgggatcat

SEQ ID NO: 294098 - DNA, 15 bp, Homo sapiens
agtgagctgggatca

SEQ ID NO: 294099 - DNA, 15 bp, Homo sapiens
cagtgagctgggatc

SEQ ID NO: 294100 - DNA, 15 bp, Homo sapiens
gcagtgagctgggat

SEQ ID NO: 294101 - DNA, 15 bp, Homo sapiens
tgcagtgagctggga

SEQ ID NO: 294102 - DNA, 15 bp, Homo sapiens
ttgcagtgagctggg

SEQ ID NO: 294103 - DNA, 15 bp, Homo sapiens
gttgcagtgagctgg

SEQ ID NO: 294104 - DNA, 15 bp, Homo sapiens
tgggaggcagaggtt

SEQ ID NO: 294105 - DNA, 15 bp, Homo sapiens
ctgggaggcagaggt

SEQ ID NO: 294106 - DNA, 15 bp, Homo sapiens
cctgggaggcagagg

SEQ ID NO: 294107 - DNA, 15 bp, Homo sapiens
acctgggaggcagag

SEQ ID NO: 294108 - DNA, 15 bp, Homo sapiens
aacctgggaggcaga

SEQ ID NO: 294109 - DNA, 15 bp, Homo sapiens
gaacctgggaggcag

SEQ ID NO: 294110 - DNA, 15 bp, Homo sapiens
tgaacctgggaggca

SEQ ID NO: 294111 - DNA, 15 bp, Homo sapiens
ttgaacctgggaggc

SEQ ID NO: 294112 - DNA, 15 bp, Homo sapiens
cttgaacctgggagg

SEQ ID NO: 294113 - DNA, 15 bp, Homo sapiens
gcttgaacctgggag

SEQ ID NO: 294114 - DNA, 15 bp, Homo sapiens
cgcttgaacctggga

SEQ ID NO: 294115 - DNA, 15 bp, Homo sapiens
tcgcttgaacctggg

SEQ ID NO: 294116 - DNA, 15 bp, Homo sapiens
atcgcttgaacctgg

SEQ ID NO: 294117 - DNA, 15 bp, Homo sapiens
aatcgcttgaacctg

SEQ ID NO: 294118 - DNA, 15 bp, Homo sapiens
gaatcgcttgaacct

SEQ ID NO: 294119 - DNA, 15 bp, Homo sapiens
gaagaatcgcttgaa

SEQ ID NO: 294120 - DNA, 15 bp, Homo sapiens
agaagaatcgcttga

SEQ ID NO: 294121 - DNA, 15 bp, Homo sapiens
cagaagaatcgcttg

SEQ ID NO: 294122 - DNA, 15 bp, Homo sapiens
gcagaagaatcgctt

SEQ ID NO: 294123 - DNA, 15 bp, Homo sapiens
ggcagaagaatcgct

SEQ ID NO: 294124 - DNA, 15 bp, Homo sapiens
aggcagaagaatcgc

SEQ ID NO: 294125 - DNA, 15 bp, Homo sapiens
gaggcagaagaatcg

SEQ ID NO: 294126 - DNA, 15 bp, Homo sapiens
tgaggcagaagaatc

SEQ ID NO: 294127 - DNA, 15 bp, Homo sapiens
ctgaggcagaagaat

SEQ ID NO: 294128 - DNA, 15 bp, Homo sapiens
gctgaggcagaagaa

SEQ ID NO: 294129 - DNA, 15 bp, Homo sapiens
ggctgaggcagaaga

SEQ ID NO: 294130 - DNA, 15 bp, Homo sapiens
aggctgaggcagaag

SEQ ID NO: 294131 - DNA, 15 bp, Homo sapiens
gaggctgaggcagaa

SEQ ID NO: 294132 - DNA, 15 bp, Homo sapiens
ggaggctgaggcaga

SEQ ID NO: 294133 - DNA, 15 bp, Homo sapiens
cactcaggaggctga

SEQ ID NO: 294134 - DNA, 15 bp, Homo sapiens
tcactcaggaggctg

SEQ ID NO: 294135 - DNA, 15 bp, Homo sapiens
gtcactcaggaggct

SEQ ID NO: 294136 - DNA, 15 bp, Homo sapiens
agtcactcaggaggc

SEQ ID NO: 294137 - DNA, 15 bp, Homo sapiens
cagtcactcaggagg

SEQ ID NO: 294138 - DNA, 15 bp, Homo sapiens
ccagtcactcaggag

SEQ ID NO: 294139 - DNA, 15 bp, Homo sapiens
cccagtcactcagga

SEQ ID NO: 294140 - DNA, 15 bp, Homo sapiens
tcccagtcactcagg

SEQ ID NO: 294141 - DNA, 15 bp, Homo sapiens
gtcccagtcactcag

SEQ ID NO: 294142 - DNA, 15 bp, Homo sapiens
agtcccagtcactca

SEQ ID NO: 294143 - DNA, 15 bp, Homo sapiens
tagtcccagtcactc

SEQ ID NO: 294144 - DNA, 15 bp, Homo sapiens
ttagtcccagtcact

SEQ ID NO: 294145 - DNA, 15 bp, Homo sapiens
tttagtcccagtcac

SEQ ID NO: 294146 - DNA, 15 bp, Homo sapiens
ctttagtcccagtca

SEQ ID NO: 294147 - DNA, 15 bp, Homo sapiens
cctttagtcccagtc

SEQ ID NO: 294148 - DNA, 15 bp, Homo sapiens
gcctttagtcccagt

SEQ ID NO: 294149 - DNA, 15 bp, Homo sapiens
tgcctttagtcccag

SEQ ID NO: 294150 - DNA, 15 bp, Homo sapiens
gtgcctttagtccca

SEQ ID NO: 294151 - DNA, 15 bp, Homo sapiens
tgtgcctttagtccc

SEQ ID NO: 294152 - DNA, 15 bp, Homo sapiens
atgtgcctttagtcc

SEQ ID NO: 294153 - DNA, 15 bp, Homo sapiens
catgtgcctttagtc

SEQ ID NO: 294154 - DNA, 15 bp, Homo sapiens
gcatgtgcctttagt

SEQ ID NO: 294155 - DNA, 15 bp, Homo sapiens
ggcatgtgcctttag

SEQ ID NO: 294156 - DNA, 15 bp, Homo sapiens
tggcatgtgccttta

SEQ ID NO: 294157 - DNA, 15 bp, Homo sapiens
gtggcatgtgccttt

SEQ ID NO: 294158 - DNA, 15 bp, Homo sapiens
ggtggcatgtgcctt

SEQ ID NO: 294159 - DNA, 15 bp, Homo sapiens
tggtggcatgtgcct

SEQ ID NO: 294160 - DNA, 15 bp, Homo sapiens
atggtggcatgtgcc

SEQ ID NO: 294161 - DNA, 15 bp, Homo sapiens
catggtggcatgtgc

SEQ ID NO: 294162 - DNA, 15 bp, Homo sapiens
gcatggtggcatgtg

SEQ ID NO: 294163 - DNA, 15 bp, Homo sapiens
ggcatggtggcatgt

SEQ ID NO: 294164 - DNA, 15 bp, Homo sapiens
gggcatggtggcatg

SEQ ID NO: 294165 - DNA, 15 bp, Homo sapiens
cgggcatggtggcat

SEQ ID NO: 294166 - DNA, 15 bp, Homo sapiens
ccgggcatggtggca

SEQ ID NO: 294167 - DNA, 15 bp, Homo sapiens
gccgggcatggtggc

SEQ ID NO: 294168 - DNA, 15 bp, Homo sapiens
ttactaaaaatacaa

SEQ ID NO: 294169 - DNA, 15 bp, Homo sapiens
tttactaaaaataca

SEQ ID NO: 294170 - DNA, 15 bp, Homo sapiens
ctttactaaaaatac

SEQ ID NO: 294171 - DNA, 15 bp, Homo sapiens
tctttactaaaaata

SEQ ID NO: 294172 - DNA, 15 bp, Homo sapiens
atctttactaaaaat

SEQ ID NO: 294173 - DNA, 15 bp, Homo sapiens
catctttactaaaaa

SEQ ID NO: 294174 - DNA, 15 bp, Homo sapiens
ccatctttactaaaa

SEQ ID NO: 294175 - DNA, 15 bp, Homo sapiens
cccatctttactaaa

SEQ ID NO: 294176 - DNA, 15 bp, Homo sapiens
ccccatctttactaa

SEQ ID NO: 294177 - DNA, 15 bp, Homo sapiens
accccatctttacta

SEQ ID NO: 294178 - DNA, 15 bp, Homo sapiens
aaccccatctttact

SEQ ID NO: 294179 - DNA, 15 bp, Homo sapiens
aaaccccatctttac

SEQ ID NO: 294180 - DNA, 15 bp, Homo sapiens
gaaaccccatcttta

SEQ ID NO: 294181 - DNA, 15 bp, Homo sapiens
tgaaaccccatcttt

SEQ ID NO: 294182 - DNA, 15 bp, Homo sapiens
gtgaaaccccatctt

SEQ ID NO: 294183 - DNA, 15 bp, Homo sapiens
ggtgaaaccccatct

SEQ ID NO: 294184 - DNA, 15 bp, Homo sapiens
tggtgaaaccccatc

SEQ ID NO: 294185 - DNA, 15 bp, Homo sapiens
atggtgaaaccccat

SEQ ID NO: 294186 - DNA, 15 bp, Homo sapiens
catggtgaaacccca

SEQ ID NO: 294187 - DNA, 15 bp, Homo sapiens
gcatggtgaaacccc

SEQ ID NO: 294188 - DNA, 15 bp, Homo sapiens
agcatggtgaaaccc

SEQ ID NO: 294189 - DNA, 15 bp, Homo sapiens
cagcatggtgaaacc

SEQ ID NO: 294190 - DNA, 15 bp, Homo sapiens
ccagcatggtgaaac

SEQ ID NO: 294191 - DNA, 15 bp, Homo sapiens
gccagcatggtgaaa

SEQ ID NO: 294192 - DNA, 15 bp, Homo sapiens
ggccagcatggtgaa

SEQ ID NO: 294193 - DNA, 15 bp, Homo sapiens
tggccagcatggtga

SEQ ID NO: 294194 - DNA, 15 bp, Homo sapiens
ctggccagcatggtg

SEQ ID NO: 294195 - DNA, 15 bp, Homo sapiens
cctggccagcatggt

SEQ ID NO: 294196 - DNA, 15 bp, Homo sapiens
gcctggccagcatgg

SEQ ID NO: 294197 - DNA, 15 bp, Homo sapiens
agcctggccagcatg

SEQ ID NO: 294198 - DNA, 15 bp, Homo sapiens
cagcctggccagcat

SEQ ID NO: 294199 - DNA, 15 bp, Homo sapiens
ccagcctggccagca

SEQ ID NO: 294200 - DNA, 15 bp, Homo sapiens
accagcctggccagc

SEQ ID NO: 294201 - DNA, 15 bp, Homo sapiens
gaccagcctggccag

SEQ ID NO: 294202 - DNA, 15 bp, Homo sapiens
gagaccagcctggcc

SEQ ID NO: 294203 - DNA, 15 bp, Homo sapiens
cgagaccagcctggc

SEQ ID NO: 294204 - DNA, 15 bp, Homo sapiens
tcgagaccagcctgg

SEQ ID NO: 294205 - DNA, 15 bp, Homo sapiens
atcaggagttcgaga

SEQ ID NO: 294206 - DNA, 15 bp, Homo sapiens
gatcaggagttcgag

SEQ ID NO: 294207 - DNA, 15 bp, Homo sapiens
agatcaggagttcga

SEQ ID NO: 294208 - DNA, 15 bp, Homo sapiens
gagatcaggagttcg

SEQ ID NO: 294209 - DNA, 15 bp, Homo sapiens
tgagatcaggagttc

SEQ ID NO: 294210 - DNA, 15 bp, Homo sapiens
ctgagatcaggagtt

SEQ ID NO: 294211 - DNA, 15 bp, Homo sapiens
cctgagatcaggagt

SEQ ID NO: 294212 - DNA, 15 bp, Homo sapiens
acctgagatcaggag

SEQ ID NO: 294213 - DNA, 15 bp, Homo sapiens
cacctgagatcagga

SEQ ID NO: 294214 - DNA, 15 bp, Homo sapiens
tcacctgagatcagg

SEQ ID NO: 294215 - DNA, 15 bp, Homo sapiens
gtcacctgagatcag

SEQ ID NO: 294216 - DNA, 15 bp, Homo sapiens
ggtcacctgagatca

SEQ ID NO: 294217 - DNA, 15 bp, Homo sapiens
gggtcacctgagatc

SEQ ID NO: 294218 - DNA, 15 bp, Homo sapiens
tgggtcacctgagat

SEQ ID NO: 294219 - DNA, 15 bp, Homo sapiens
gtgggtcacctgaga

SEQ ID NO: 294220 - DNA, 15 bp, Homo sapiens
ggtgggtcacctgag

SEQ ID NO: 294221 - DNA, 15 bp, Homo sapiens
gggtgggtcacctga

SEQ ID NO: 294222 - DNA, 15 bp, Homo sapiens
tgggtgggtcacctg

SEQ ID NO: 294223 - DNA, 15 bp, Homo sapiens
gtgggtgggtcacct

SEQ ID NO: 294224 - DNA, 15 bp, Homo sapiens
ggtgggtgggtcacc

SEQ ID NO: 294225 - DNA, 15 bp, Homo sapiens
aggtgggtgggtcac

SEQ ID NO: 294226 - DNA, 15 bp, Homo sapiens
aaggtgggtgggtca

SEQ ID NO: 294227 - DNA, 15 bp, Homo sapiens
caaggtgggtgggtc

SEQ ID NO: 294228 - DNA, 15 bp, Homo sapiens
ccaaggtgggtgggt

SEQ ID NO: 294229 - DNA, 15 bp, Homo sapiens
gccaaggtgggtggg

SEQ ID NO: 294230 - DNA, 15 bp, Homo sapiens
agccaaggtgggtgg

SEQ ID NO: 294231 - DNA, 15 bp, Homo sapiens
aagccaaggtgggtg

SEQ ID NO: 294232 - DNA, 15 bp, Homo sapiens
gaagccaaggtgggt

SEQ ID NO: 294233 - DNA, 15 bp, Homo sapiens
ggaagccaaggtggg

SEQ ID NO: 294234 - DNA, 15 bp, Homo sapiens
gggaagccaaggtgg

SEQ ID NO: 294235 - DNA, 15 bp, Homo sapiens
tgggaagccaaggtg

SEQ ID NO: 294236 - DNA, 15 bp, Homo sapiens
ttgggaagccaaggt

SEQ ID NO: 294237 - DNA, 15 bp, Homo sapiens
tttgggaagccaagg

SEQ ID NO: 294238 - DNA, 15 bp, Homo sapiens
ctttgggaagccaag

SEQ ID NO: 294239 - DNA, 15 bp, Homo sapiens
actttgggaagccaa

SEQ ID NO: 294240 - DNA, 15 bp, Homo sapiens
cactttgggaagcca

SEQ ID NO: 294241 - DNA, 15 bp, Homo sapiens
gcactttgggaagcc

SEQ ID NO: 294242 - DNA, 15 bp, Homo sapiens
agcactttgggaagc

SEQ ID NO: 294243 - DNA, 15 bp, Homo sapiens
cagcactttgggaag

SEQ ID NO: 294244 - DNA, 15 bp, Homo sapiens
ccagcactttgggaa

SEQ ID NO: 294245 - DNA, 15 bp, Homo sapiens
ttgtaatcccagcac

SEQ ID NO: 294246 - DNA, 15 bp, Homo sapiens
cttgtaatcccagca

SEQ ID NO: 294247 - DNA, 15 bp, Homo sapiens
gcttgtaatcccagc

SEQ ID NO: 294248 - DNA, 15 bp, Homo sapiens
tgcttgtaatcccag

SEQ ID NO: 294249 - DNA, 15 bp, Homo sapiens
atgcttgtaatccca

SEQ ID NO: 294250 - DNA, 15 bp, Homo sapiens
catgcttgtaatccc

SEQ ID NO: 294251 - DNA, 15 bp, Homo sapiens
tcatgcttgtaatcc

SEQ ID NO: 294252 - DNA, 15 bp, Homo sapiens
ctcatgcttgtaatc

SEQ ID NO: 294253 - DNA, 15 bp, Homo sapiens
gctcatgcttgtaat

SEQ ID NO: 294254 - DNA, 15 bp, Homo sapiens
ggctcatgcttgtaa

SEQ ID NO: 294255 - DNA, 15 bp, Homo sapiens
tggctcatgcttgta

SEQ ID NO: 294256 - DNA, 15 bp, Homo sapiens
gtggctcatgcttgt

SEQ ID NO: 294257 - DNA, 15 bp, Homo sapiens
ggtggctcatgcttg

SEQ ID NO: 294258 - DNA, 15 bp, Homo sapiens
tggtggctcatgctt

SEQ ID NO: 294259 - DNA, 15 bp, Homo sapiens
gtggtggctcatgct

SEQ ID NO: 294260 - DNA, 15 bp, Homo sapiens
cgtggtggctcatgc

SEQ ID NO: 294261 - DNA, 15 bp, Homo sapiens
gcgtggtggctcatg

SEQ ID NO: 294262 - DNA, 15 bp, Homo sapiens
ggcgtggtggctcat

SEQ ID NO: 294263 - DNA, 15 bp, Homo sapiens
aggcgtggtggctca

SEQ ID NO: 294264 - DNA, 15 bp, Homo sapiens
caggcgtggtggctc

SEQ ID NO: 294265 - DNA, 15 bp, Homo sapiens
ccaggcgtggtggct

SEQ ID NO: 294266 - DNA, 15 bp, Homo sapiens
gccaggcgtggtggc

SEQ ID NO: 294267 - DNA, 15 bp, Homo sapiens
ggccaggcgtggtgg

SEQ ID NO: 294268 - DNA, 15 bp, Homo sapiens
aggccaggcgtggtg

SEQ ID NO: 294269 - DNA, 15 bp, Homo sapiens
aaggccaggcgtggt

SEQ ID NO: 294270 - DNA, 15 bp, Homo sapiens
caaggccaggcgtgg

SEQ ID NO: 294271 - DNA, 15 bp, Homo sapiens
acaaggccaggcgtg

SEQ ID NO: 294272 - DNA, 15 bp, Homo sapiens
aacaaggccaggcgt

SEQ ID NO: 294273 - DNA, 15 bp, Homo sapiens
gaacaaggccaggcg

SEQ ID NO: 294274 - DNA, 15 bp, Homo sapiens
agaacaaggccaggc

SEQ ID NO: 294275 - DNA, 15 bp, Homo sapiens
aagaacaaggccagg

SEQ ID NO: 294276 - DNA, 15 bp, Homo sapiens
aaagaacaaggccag

SEQ ID NO: 294277 - DNA, 15 bp, Homo sapiens
aaaagaacaaggcca

SEQ ID NO: 294278 - DNA, 15 bp, Homo sapiens
aaaaagaacaaggcc

SEQ ID NO: 294279 - DNA, 15 bp, Homo sapiens
aaaaaagaacaaggc

SEQ ID NO: 294280 - DNA, 15 bp, Homo sapiens
aaaaaaagaacaagg

SEQ ID NO: 294281 - DNA, 15 bp, Homo sapiens
caaaaaaagaacaag

SEQ ID NO: 294282 - DNA, 15 bp, Homo sapiens
gcaaaaaaagaacaa

SEQ ID NO: 294283 - DNA, 15 bp, Homo sapiens
agcaaaaaaagaaca

SEQ ID NO: 294284 - DNA, 15 bp, Homo sapiens
cagcaaaaaaagaac

SEQ ID NO: 294285 - DNA, 15 bp, Homo sapiens
acagcaaaaaaagaa

SEQ ID NO: 294286 - DNA, 15 bp, Homo sapiens
tacagcaaaaaaaga

SEQ ID NO: 294287 - DNA, 15 bp, Homo sapiens
atacagcaaaaaaag

SEQ ID NO: 294288 - DNA, 15 bp, Homo sapiens
gatacagcaaaaaaa

SEQ ID NO: 294289 - DNA, 15 bp, Homo sapiens
agatacagcaaaaaa

SEQ ID NO: 294290 - DNA, 15 bp, Homo sapiens
aagatacagcaaaaa

SEQ ID NO: 294291 - DNA, 15 bp, Homo sapiens
aaagatacagcaaaa

SEQ ID NO: 294292 - DNA, 15 bp, Homo sapiens
aaaagatacagcaaa

SEQ ID NO: 294293 - DNA, 15 bp, Homo sapiens
aaaaagatacagcaa

SEQ ID NO: 294294 - DNA, 15 bp, Homo sapiens
gaaaaagatacagca

SEQ ID NO: 294295 - DNA, 15 bp, Homo sapiens
ggaaaaagatacagc

SEQ ID NO: 294296 - DNA, 15 bp, Homo sapiens
aggaaaaagatacag

SEQ ID NO: 294297 - DNA, 15 bp, Homo sapiens
caggaaaaagataca

SEQ ID NO: 294298 - DNA, 15 bp, Homo sapiens
gcaggaaaaagatac

SEQ ID NO: 294299 - DNA, 15 bp, Homo sapiens
tgcaggaaaaagata

SEQ ID NO: 294300 - DNA, 15 bp, Homo sapiens
ctgcaggaaaaagat

SEQ ID NO: 294301 - DNA, 15 bp, Homo sapiens
cctgcaggaaaaaga

SEQ ID NO: 294302 - DNA, 15 bp, Homo sapiens
acctgcaggaaaaag

SEQ ID NO: 294303 - DNA, 15 bp, Homo sapiens
aacctgcaggaaaaa

SEQ ID NO: 294304 - DNA, 15 bp, Homo sapiens
aaacctgcaggaaaa

SEQ ID NO: 294305 - DNA, 15 bp, Homo sapiens
aaaacctgcaggaaa

SEQ ID NO: 294306 - DNA, 15 bp, Homo sapiens
aaaaacctgcaggaa

SEQ ID NO: 294307 - DNA, 15 bp, Homo sapiens
gaaaaacctgcagga

SEQ ID NO: 294308 - DNA, 15 bp, Homo sapiens
agaaaaacctgcagg

SEQ ID NO: 294309 - DNA, 15 bp, Homo sapiens
aagaaaaacctgcag

SEQ ID NO: 294310 - DNA, 15 bp, Homo sapiens
aaagaaaaacctgca

SEQ ID NO: 294311 - DNA, 15 bp, Homo sapiens
gaaagaaaaacctgc

SEQ ID NO: 294312 - DNA, 15 bp, Homo sapiens
agaaagaaaaacctg

SEQ ID NO: 294313 - DNA, 15 bp, Homo sapiens
cagaaagaaaaacct

SEQ ID NO: 294314 - DNA, 15 bp, Homo sapiens
acagaaagaaaaacc

SEQ ID NO: 294315 - DNA, 15 bp, Homo sapiens
tacagaaagaaaaac

SEQ ID NO: 294316 - DNA, 15 bp, Homo sapiens
atacagaaagaaaaa

SEQ ID NO: 294317 - DNA, 15 bp, Homo sapiens
aatacagaaagaaaa

SEQ ID NO: 294318 - DNA, 15 bp, Homo sapiens
aaatacagaaagaaa

SEQ ID NO: 294319 - DNA, 15 bp, Homo sapiens
gaaatacagaaagaa

SEQ ID NO: 294320 - DNA, 15 bp, Homo sapiens
tgaaatacagaaaga

SEQ ID NO: 294321 - DNA, 15 bp, Homo sapiens
atgaaatacagaaag

SEQ ID NO: 294322 - DNA, 15 bp, Homo sapiens
catgaaatacagaaa

SEQ ID NO: 294323 - DNA, 15 bp, Homo sapiens
acatgaaatacagaa

SEQ ID NO: 294324 - DNA, 15 bp, Homo sapiens
aacatgaaatacaga

SEQ ID NO: 294325 - DNA, 15 bp, Homo sapiens
caacatgaaatacag

SEQ ID NO: 294326 - DNA, 15 bp, Homo sapiens
tcaacatgaaataca

SEQ ID NO: 294327 - DNA, 15 bp, Homo sapiens
ttcaacatgaaatac

SEQ ID NO: 294328 - DNA, 15 bp, Homo sapiens
attcaacatgaaata

SEQ ID NO: 294329 - DNA, 15 bp, Homo sapiens
tattcaacatgaaat

SEQ ID NO: 294330 - DNA, 15 bp, Homo sapiens
gtattcaacatgaaa

SEQ ID NO: 294331 - DNA, 15 bp, Homo sapiens
ggtattcaacatgaa

SEQ ID NO: 294332 - DNA, 15 bp, Homo sapiens
aggtattcaacatga

SEQ ID NO: 294333 - DNA, 15 bp, Homo sapiens
aaggtattcaacatg

SEQ ID NO: 294334 - DNA, 15 bp, Homo sapiens
gaaggtattcaacat

SEQ ID NO: 294335 - DNA, 15 bp, Homo sapiens
agaaggtattcaaca

SEQ ID NO: 294336 - DNA, 15 bp, Homo sapiens
tagaaggtattcaac

SEQ ID NO: 294337 - DNA, 15 bp, Homo sapiens
ttagaaggtattcaa

SEQ ID NO: 294338 - DNA, 15 bp, Homo sapiens
tttagaaggtattca

SEQ ID NO: 294339 - DNA, 15 bp, Homo sapiens
ctttagaaggtattc

SEQ ID NO: 294340 - DNA, 15 bp, Homo sapiens
gctttagaaggtatt

SEQ ID NO: 294341 - DNA, 15 bp, Homo sapiens
agctttagaaggtat

SEQ ID NO: 294342 - DNA, 15 bp, Homo sapiens
tagctttagaaggta

SEQ ID NO: 294343 - DNA, 15 bp, Homo sapiens
atagctttagaaggt

SEQ ID NO: 294344 - DNA, 15 bp, Homo sapiens
catagctttagaagg

SEQ ID NO: 294345 - DNA, 15 bp, Homo sapiens
acatagctttagaag

SEQ ID NO: 294346 - DNA, 15 bp, Homo sapiens
gacatagctttagaa

SEQ ID NO: 294347 - DNA, 15 bp, Homo sapiens
agacatagctttaga

SEQ ID NO: 294348 - DNA, 15 bp, Homo sapiens
aagacatagctttag

SEQ ID NO: 294349 - DNA, 15 bp, Homo sapiens
gaagacatagcttta

SEQ ID NO: 294350 - DNA, 15 bp, Homo sapiens
tgaagacatagcttt

SEQ ID NO: 294351 - DNA, 15 bp, Homo sapiens
ttgaagacatagctt

SEQ ID NO: 294352 - DNA, 15 bp, Homo sapiens
cttgaagacatagct

SEQ ID NO: 294353 - DNA, 15 bp, Homo sapiens
acttgaagacatagc

SEQ ID NO: 294354 - DNA, 15 bp, Homo sapiens
aacttgaagacatag

SEQ ID NO: 294355 - DNA, 15 bp, Homo sapiens
aaacttgaagacata

SEQ ID NO: 294356 - DNA, 15 bp, Homo sapiens
taaacttgaagacat

SEQ ID NO: 294357 - DNA, 15 bp, Homo sapiens
ataaacttgaagaca

SEQ ID NO: 294358 - DNA, 15 bp, Homo sapiens
aataaacttgaagac

SEQ ID NO: 294359 - DNA, 15 bp, Homo sapiens
taataaacttgaaga

SEQ ID NO: 294360 - DNA, 15 bp, Homo sapiens
ttaataaacttgaag

SEQ ID NO: 294361 - DNA, 15 bp, Homo sapiens
attaataaacttgaa

SEQ ID NO: 294362 - DNA, 15 bp, Homo sapiens
aattaataaacttga

SEQ ID NO: 294363 - DNA, 15 bp, Homo sapiens
aaattaataaacttg

SEQ ID NO: 294364 - DNA, 15 bp, Homo sapiens
aaaattaataaactt

SEQ ID NO: 294365 - DNA, 15 bp, Homo sapiens
aaaaattaataaact

SEQ ID NO: 294366 - DNA, 15 bp, Homo sapiens
aaaaaattaataaac

SEQ ID NO: 294367 - DNA, 15 bp, Homo sapiens
aaaaaaattaataaa

SEQ ID NO: 294368 - DNA, 15 bp, Homo sapiens
gaaaaaaattaataa

SEQ ID NO: 294369 - DNA, 15 bp, Homo sapiens
agaaaaaaattaata

SEQ ID NO: 294370 - DNA, 15 bp, Homo sapiens
aagaaaaaaattaat

SEQ ID NO: 294371 - DNA, 15 bp, Homo sapiens
gaagaaaaaaattaa

SEQ ID NO: 294372 - DNA, 15 bp, Homo sapiens
cagaagaaaaaaatt

SEQ ID NO: 294373 - DNA, 15 bp, Homo sapiens
tcagaagaaaaaaat

SEQ ID NO: 294374 - DNA, 15 bp, Homo sapiens
ctcagaagaaaaaaa

SEQ ID NO: 294375 - DNA, 15 bp, Homo sapiens
cctcagaagaaaaaa

SEQ ID NO: 294376 - DNA, 15 bp, Homo sapiens
acctcagaagaaaaa

SEQ ID NO: 294377 - DNA, 15 bp, Homo sapiens
tacctcagaagaaaa

SEQ ID NO: 294378 - DNA, 15 bp, Homo sapiens
atacctcagaagaaa

SEQ ID NO: 294379 - DNA, 15 bp, Homo sapiens
gatacctcagaagaa

SEQ ID NO: 294380 - DNA, 15 bp, Homo sapiens
agatacctcagaaga

SEQ ID NO: 294381 - DNA, 15 bp, Homo sapiens
tagatacctcagaag

SEQ ID NO: 294382 - DNA, 15 bp, Homo sapiens
ttagatacctcagaa

SEQ ID NO: 294383 - DNA, 15 bp, Homo sapiens
attagatacctcaga

SEQ ID NO: 294384 - DNA, 15 bp, Homo sapiens
gattagatacctcag

SEQ ID NO: 294385 - DNA, 15 bp, Homo sapiens
agattagatacctca

SEQ ID NO: 294386 - DNA, 15 bp, Homo sapiens
cagattagatacctc

SEQ ID NO: 294387 - DNA, 15 bp, Homo sapiens
gcagattagatacct

SEQ ID NO: 294388 - DNA, 15 bp, Homo sapiens
agcagattagatacc

SEQ ID NO: 294389 - DNA, 15 bp, Homo sapiens
tagcagattagatac

SEQ ID NO: 294390 - DNA, 15 bp, Homo sapiens
atagcagattagata

SEQ ID NO: 294391 - DNA, 15 bp, Homo sapiens
aatagcagattagat

SEQ ID NO: 294392 - DNA, 15 bp, Homo sapiens
taatagcagattaga

SEQ ID NO: 294393 - DNA, 15 bp, Homo sapiens
ttaatagcagattag

SEQ ID NO: 294394 - DNA, 15 bp, Homo sapiens
attaatagcagatta

SEQ ID NO: 294395 - DNA, 15 bp, Homo sapiens
gattaatagcagatt

SEQ ID NO: 294396 - DNA, 15 bp, Homo sapiens
agattaatagcagat

SEQ ID NO: 294397 - DNA, 15 bp, Homo sapiens
gagattaatagcaga

SEQ ID NO: 294398 - DNA, 15 bp, Homo sapiens
tgagattaatagcag

SEQ ID NO: 294399 - DNA, 15 bp, Homo sapiens
atgagattaatagca

SEQ ID NO: 294400 - DNA, 15 bp, Homo sapiens
aatgagattaatagc

SEQ ID NO: 294401 - DNA, 15 bp, Homo sapiens
aaatgagattaatag

SEQ ID NO: 294402 - DNA, 15 bp, Homo sapiens
taaatgagattaata

SEQ ID NO: 294403 - DNA, 15 bp, Homo sapiens
ataaatgagattaat

SEQ ID NO: 294404 - DNA, 15 bp, Homo sapiens
aataaatgagattaa

SEQ ID NO: 294405 - DNA, 15 bp, Homo sapiens
caataaatgagatta

SEQ ID NO: 294406 - DNA, 15 bp, Homo sapiens
acaataaatgagatt

SEQ ID NO: 294407 - DNA, 15 bp, Homo sapiens
tacaataaatgagat

SEQ ID NO: 294408 - DNA, 15 bp, Homo sapiens
atacaataaatgaga

SEQ ID NO: 294409 - DNA, 15 bp, Homo sapiens
aatacaataaatgag

SEQ ID NO: 294410 - DNA, 15 bp, Homo sapiens
aaatacaataaatga

SEQ ID NO: 294411 - DNA, 15 bp, Homo sapiens
aaaatacaataaatg

SEQ ID NO: 294412 - DNA, 15 bp, Homo sapiens
aaaaatacaataaat

SEQ ID NO: 294413 - DNA, 15 bp, Homo sapiens
taaaaatacaataaa

SEQ ID NO: 294414 - DNA, 15 bp, Homo sapiens
ctaaaaatacaataa

SEQ ID NO: 294415 - DNA, 15 bp, Homo sapiens
actaaaaatacaata

SEQ ID NO: 294416 - DNA, 15 bp, Homo sapiens
gactaaaaatacaat

SEQ ID NO: 294417 - DNA, 15 bp, Homo sapiens
agactaaaaatacaa

SEQ ID NO: 294418 - DNA, 15 bp, Homo sapiens
aagactaaaaataca

SEQ ID NO: 294419 - DNA, 15 bp, Homo sapiens
taagactaaaaatac

SEQ ID NO: 294420 - DNA, 15 bp, Homo sapiens
gtaagactaaaaata

SEQ ID NO: 294421 - DNA, 15 bp, Homo sapiens
agtaagactaaaaat

SEQ ID NO: 294422 - DNA, 15 bp, Homo sapiens
tagtaagactaaaaa

SEQ ID NO: 294423 - DNA, 15 bp, Homo sapiens
atagtaagactaaaa

SEQ ID NO: 294424 - DNA, 15 bp, Homo sapiens
tatagtaagactaaa

SEQ ID NO: 294425 - DNA, 15 bp, Homo sapiens
ctatagtaagactaa

SEQ ID NO: 294426 - DNA, 15 bp, Homo sapiens
actatagtaagacta

SEQ ID NO: 294427 - DNA, 15 bp, Homo sapiens
aactatagtaagact

SEQ ID NO: 294428 - DNA, 15 bp, Homo sapiens
aaactatagtaagac

SEQ ID NO: 294429 - DNA, 15 bp, Homo sapiens
aaaactatagtaaga

SEQ ID NO: 294430 - DNA, 15 bp, Homo sapiens
gaaaactatagtaag

SEQ ID NO: 294431 - DNA, 15 bp, Homo sapiens
tgaaaactatagtaa

SEQ ID NO: 294432 - DNA, 15 bp, Homo sapiens
atgaaaactatagta

SEQ ID NO: 294433 - DNA, 15 bp, Homo sapiens
aatgaaaactatagt

SEQ ID NO: 294434 - DNA, 15 bp, Homo sapiens
aaatgaaaactatag

SEQ ID NO: 294435 - DNA, 15 bp, Homo sapiens
gaaatgaaaactata

SEQ ID NO: 294436 - DNA, 15 bp, Homo sapiens
agaaatgaaaactat

SEQ ID NO: 294437 - DNA, 15 bp, Homo sapiens
tagaaatgaaaacta

SEQ ID NO: 294438 - DNA, 15 bp, Homo sapiens
ctagaaatgaaaact

SEQ ID NO: 294439 - DNA, 15 bp, Homo sapiens
tctagaaatgaaaac

SEQ ID NO: 294440 - DNA, 15 bp, Homo sapiens
ttctagaaatgaaaa

SEQ ID NO: 294441 - DNA, 15 bp, Homo sapiens
tttctagaaatgaaa

SEQ ID NO: 294442 - DNA, 15 bp, Homo sapiens
atttctagaaatgaa

SEQ ID NO: 294443 - DNA, 15 bp, Homo sapiens
aatttctagaaatga

SEQ ID NO: 294444 - DNA, 15 bp, Homo sapiens
aaatttctagaaatg

SEQ ID NO: 294445 - DNA, 15 bp, Homo sapiens
caaatttctagaaat

SEQ ID NO: 294446 - DNA, 15 bp, Homo sapiens
tcaaatttctagaaa

SEQ ID NO: 294447 - DNA, 15 bp, Homo sapiens
atcaaatttctagaa

SEQ ID NO: 294448 - DNA, 15 bp, Homo sapiens
aatcaaatttctaga

SEQ ID NO: 294449 - DNA, 15 bp, Homo sapiens
aaatcaaatttctag

SEQ ID NO: 294450 - DNA, 15 bp, Homo sapiens
caaatcaaatttcta

SEQ ID NO: 294451 - DNA, 15 bp, Homo sapiens
ccaaatcaaatttct

SEQ ID NO: 294452 - DNA, 15 bp, Homo sapiens
cccaaatcaaatttc

SEQ ID NO: 294453 - DNA, 15 bp, Homo sapiens
acccaaatcaaattt

SEQ ID NO: 294454 - DNA, 15 bp, Homo sapiens
gacccaaatcaaatt

SEQ ID NO: 294455 - DNA, 15 bp, Homo sapiens
ggacccaaatcaaat

SEQ ID NO: 294456 - DNA, 15 bp, Homo sapiens
aggacccaaatcaaa

SEQ ID NO: 294457 - DNA, 15 bp, Homo sapiens
aaggacccaaatcaa

SEQ ID NO: 294458 - DNA, 15 bp, Homo sapiens
aaaggacccaaatca

SEQ ID NO: 294459 - DNA, 15 bp, Homo sapiens
aaaaggacccaaatc

SEQ ID NO: 294460 - DNA, 15 bp, Homo sapiens
aaaaaggacccaaat

SEQ ID NO: 294461 - DNA, 15 bp, Homo sapiens
taaaaaggacccaaa

SEQ ID NO: 294462 - DNA, 15 bp, Homo sapiens
ataaaaaggacccaa

SEQ ID NO: 294463 - DNA, 15 bp, Homo sapiens
tataaaaaggaccca

SEQ ID NO: 294464 - DNA, 15 bp, Homo sapiens
atataaaaaggaccc

SEQ ID NO: 294465 - DNA, 15 bp, Homo sapiens
gatataaaaaggacc

SEQ ID NO: 294466 - DNA, 15 bp, Homo sapiens
agatataaaaaggac

SEQ ID NO: 294467 - DNA, 15 bp, Homo sapiens
aagatataaaaagga

SEQ ID NO: 294468 - DNA, 15 bp, Homo sapiens
gaagatataaaaagg

SEQ ID NO: 294469 - DNA, 15 bp, Homo sapiens
ggaagatataaaaag

SEQ ID NO: 294470 - DNA, 15 bp, Homo sapiens
tggaagatataaaaa

SEQ ID NO: 294471 - DNA, 15 bp, Homo sapiens
atggaagatataaaa

SEQ ID NO: 294472 - DNA, 15 bp, Homo sapiens
tatggaagatataaa

SEQ ID NO: 294473 - DNA, 15 bp, Homo sapiens
atatggaagatataa

SEQ ID NO: 294474 - DNA, 15 bp, Homo sapiens
gatatggaagatata

SEQ ID NO: 294475 - DNA, 15 bp, Homo sapiens
agatatggaagatat

SEQ ID NO: 294476 - DNA, 15 bp, Homo sapiens
tagatatggaagata

SEQ ID NO: 294477 - DNA, 15 bp, Homo sapiens
atagatatggaagat

SEQ ID NO: 294478 - DNA, 15 bp, Homo sapiens
aatagatatggaaga

SEQ ID NO: 294479 - DNA, 15 bp, Homo sapiens
aaatagatatggaag

SEQ ID NO: 294480 - DNA, 15 bp, Homo sapiens
aaaatagatatggaa

SEQ ID NO: 294481 - DNA, 15 bp, Homo sapiens
aaaaatagatatgga

SEQ ID NO: 294482 - DNA, 15 bp, Homo sapiens
taaaaatagatatgg

SEQ ID NO: 294483 - DNA, 15 bp, Homo sapiens
ataaaaatagatatg

SEQ ID NO: 294484 - DNA, 15 bp, Homo sapiens
aataaaaatagatat

SEQ ID NO: 294485 - DNA, 15 bp, Homo sapiens
taataaaaatagata

SEQ ID NO: 294486 - DNA, 15 bp, Homo sapiens
ataataaaaatagat

SEQ ID NO: 294487 - DNA, 15 bp, Homo sapiens
cataataaaaataga

SEQ ID NO: 294488 - DNA, 15 bp, Homo sapiens
acataataaaaatag

SEQ ID NO: 294489 - DNA, 15 bp, Homo sapiens
aacataataaaaata

SEQ ID NO: 294490 - DNA, 15 bp, Homo sapiens
aaacataataaaaat

SEQ ID NO: 294491 - DNA, 15 bp, Homo sapiens
taaacataataaaaa

SEQ ID NO: 294492 - DNA, 15 bp, Homo sapiens
ataaacataataaaa

SEQ ID NO: 294493 - DNA, 15 bp, Homo sapiens
cataaacataataaa

SEQ ID NO: 294494 - DNA, 15 bp, Homo sapiens
gcataaacataataa

SEQ ID NO: 294495 - DNA, 15 bp, Homo sapiens
agcataaacataata

SEQ ID NO: 294496 - DNA, 15 bp, Homo sapiens
aagcataaacataat

SEQ ID NO: 294497 - DNA, 15 bp, Homo sapiens
aaagcataaacataa

SEQ ID NO: 294498 - DNA, 15 bp, Homo sapiens
aaaagcataaacata

SEQ ID NO: 294499 - DNA, 15 bp, Homo sapiens
gaaaagcataaacat

SEQ ID NO: 294500 - DNA, 15 bp, Homo sapiens
agaaaagcataaaca

SEQ ID NO: 294501 - DNA, 15 bp, Homo sapiens
aagaaaagcataaac

SEQ ID NO: 294502 - DNA, 15 bp, Homo sapiens
aaagaaaagcataaa

SEQ ID NO: 294503 - DNA, 15 bp, Homo sapiens
taaagaaaagcataa

SEQ ID NO: 294504 - DNA, 15 bp, Homo sapiens
gtaaagaaaagcata

SEQ ID NO: 294505 - DNA, 15 bp, Homo sapiens
ggtaaagaaaagcat

SEQ ID NO: 294506 - DNA, 15 bp, Homo sapiens
aggtaaagaaaagca

SEQ ID NO: 294507 - DNA, 15 bp, Homo sapiens
aaggtaaagaaaagc

SEQ ID NO: 294508 - DNA, 15 bp, Homo sapiens
gaaggtaaagaaaag

SEQ ID NO: 294509 - DNA, 15 bp, Homo sapiens
agaaggtaaagaaaa

SEQ ID NO: 294510 - DNA, 15 bp, Homo sapiens
aagaaggtaaagaaa

SEQ ID NO: 294511 - DNA, 15 bp, Homo sapiens
caagaaggtaaagaa

SEQ ID NO: 294512 - DNA, 15 bp, Homo sapiens
tcaagaaggtaaaga

SEQ ID NO: 294513 - DNA, 15 bp, Homo sapiens
ttcaagaaggtaaag

SEQ ID NO: 294514 - DNA, 15 bp, Homo sapiens
gttcaagaaggtaaa

SEQ ID NO: 294515 - DNA, 15 bp, Homo sapiens
tgttcaagaaggtaa

SEQ ID NO: 294516 - DNA, 15 bp, Homo sapiens
atgttcaagaaggta

SEQ ID NO: 294517 - DNA, 15 bp, Homo sapiens
tatgttcaagaaggt

SEQ ID NO: 294518 - DNA, 15 bp, Homo sapiens
atatgttcaagaagg

SEQ ID NO: 294519 - DNA, 15 bp, Homo sapiens
catatgttcaagaag

SEQ ID NO: 294520 - DNA, 15 bp, Homo sapiens
ccatatgttcaagaa

SEQ ID NO: 294521 - DNA, 15 bp, Homo sapiens
cccatatgttcaaga

SEQ ID NO: 294522 - DNA, 15 bp, Homo sapiens
tcccatatgttcaag

SEQ ID NO: 294523 - DNA, 15 bp, Homo sapiens
atcccatatgttcaa

SEQ ID NO: 294524 - DNA, 15 bp, Homo sapiens
tatcccatatgttca

SEQ ID NO: 294525 - DNA, 15 bp, Homo sapiens
atatcccatatgttc

SEQ ID NO: 294526 - DNA, 15 bp, Homo sapiens
tatatcccatatgtt

SEQ ID NO: 294527 - DNA, 15 bp, Homo sapiens
ctatatcccatatgt

SEQ ID NO: 294528 - DNA, 15 bp, Homo sapiens
cctatatcccatatg

SEQ ID NO: 294529 - DNA, 15 bp, Homo sapiens
acctatatcccatat

SEQ ID NO: 294530 - DNA, 15 bp, Homo sapiens
tacctatatcccata

SEQ ID NO: 294531 - DNA, 15 bp, Homo sapiens
atacctatatcccat

SEQ ID NO: 294532 - DNA, 15 bp, Homo sapiens
aatacctatatccca

SEQ ID NO: 294533 - DNA, 15 bp, Homo sapiens
taatacctatatccc

SEQ ID NO: 294534 - DNA, 15 bp, Homo sapiens
ataatacctatatcc

SEQ ID NO: 294535 - DNA, 15 bp, Homo sapiens
tataatacctatatc

SEQ ID NO: 294536 - DNA, 15 bp, Homo sapiens
ttataatacctatat

SEQ ID NO: 294537 - DNA, 15 bp, Homo sapiens
gttataatacctata

SEQ ID NO: 294538 - DNA, 15 bp, Homo sapiens
agttataatacctat

SEQ ID NO: 294539 - DNA, 15 bp, Homo sapiens
aagttataataccta

SEQ ID NO: 294540 - DNA, 15 bp, Homo sapiens
aaagttataatacct

SEQ ID NO: 294541 - DNA, 15 bp, Homo sapiens
aaaagttataatacc

SEQ ID NO: 294542 - DNA, 15 bp, Homo sapiens
aaaaagttataatac

SEQ ID NO: 294543 - DNA, 15 bp, Homo sapiens
taaaaagttataata

SEQ ID NO: 294544 - DNA, 15 bp, Homo sapiens
ttaaaaagttataat

SEQ ID NO: 294545 - DNA, 15 bp, Homo sapiens
tttaaaaagttataa

SEQ ID NO: 294546 - DNA, 15 bp, Homo sapiens
atttaaaaagttata

SEQ ID NO: 294547 - DNA, 15 bp, Homo sapiens
catttaaaaagttat

SEQ ID NO: 294548 - DNA, 15 bp, Homo sapiens
acatttaaaaagtta

SEQ ID NO: 294549 - DNA, 15 bp, Homo sapiens
gacatttaaaaagtt

SEQ ID NO: 294550 - DNA, 15 bp, Homo sapiens
ggacatttaaaaagt

SEQ ID NO: 294551 - DNA, 15 bp, Homo sapiens
gggacatttaaaaag

SEQ ID NO: 294552 - DNA, 15 bp, Homo sapiens
agggacatttaaaaa

SEQ ID NO: 294553 - DNA, 15 bp, Homo sapiens
cagggacatttaaaa

SEQ ID NO: 294554 - DNA, 15 bp, Homo sapiens
acagggacatttaaa

SEQ ID NO: 294555 - DNA, 15 bp, Homo sapiens
aacagggacatttaa

SEQ ID NO: 294556 - DNA, 15 bp, Homo sapiens
taacagggacattta

SEQ ID NO: 294557 - DNA, 15 bp, Homo sapiens
gtaacagggacattt

SEQ ID NO: 294558 - DNA, 15 bp, Homo sapiens
agtaacagggacatt

SEQ ID NO: 294559 - DNA, 15 bp, Homo sapiens
tagtaacagggacat

SEQ ID NO: 294560 - DNA, 15 bp, Homo sapiens
ttagtaacagggaca

SEQ ID NO: 294561 - DNA, 15 bp, Homo sapiens
cttagtaacagggac

SEQ ID NO: 294562 - DNA, 15 bp, Homo sapiens
acttagtaacaggga

SEQ ID NO: 294563 - DNA, 15 bp, Homo sapiens
gacttagtaacaggg

SEQ ID NO: 294564 - DNA, 15 bp, Homo sapiens
agacttagtaacagg

SEQ ID NO: 294565 - DNA, 15 bp, Homo sapiens
tagacttagtaacag

SEQ ID NO: 294566 - DNA, 15 bp, Homo sapiens
ctagacttagtaaca

SEQ ID NO: 294567 - DNA, 15 bp, Homo sapiens
actagacttagtaac

SEQ ID NO: 294568 - DNA, 15 bp, Homo sapiens
tactagacttagtaa

SEQ ID NO: 294569 - DNA, 15 bp, Homo sapiens
gtactagacttagta

SEQ ID NO: 294570 - DNA, 15 bp, Homo sapiens
ggtactagacttagt

SEQ ID NO: 294571 - DNA, 15 bp, Homo sapiens
aggtactagacttag

SEQ ID NO: 294572 - DNA, 15 bp, Homo sapiens
taggtactagactta

SEQ ID NO: 294573 - DNA, 15 bp, Homo sapiens
ataggtactagactt

SEQ ID NO: 294574 - DNA, 15 bp, Homo sapiens
cataggtactagact

SEQ ID NO: 294575 - DNA, 15 bp, Homo sapiens
acataggtactagac

SEQ ID NO: 294576 - DNA, 15 bp, Homo sapiens
gacataggtactaga

SEQ ID NO: 294577 - DNA, 15 bp, Homo sapiens
agacataggtactag

SEQ ID NO: 294578 - DNA, 15 bp, Homo sapiens
aagacataggtacta

SEQ ID NO: 294579 - DNA, 15 bp, Homo sapiens
aaagacataggtact

SEQ ID NO: 294580 - DNA, 15 bp, Homo sapiens
aaaagacataggtac

SEQ ID NO: 294581 - DNA, 15 bp, Homo sapiens
aaaaagacataggta

SEQ ID NO: 294582 - DNA, 15 bp, Homo sapiens
taaaaagacataggt

SEQ ID NO: 294583 - DNA, 15 bp, Homo sapiens
ctaaaaagacatagg

SEQ ID NO: 294584 - DNA, 15 bp, Homo sapiens
cctaaaaagacatag

SEQ ID NO: 294585 - DNA, 15 bp, Homo sapiens
acctaaaaagacata

SEQ ID NO: 294586 - DNA, 15 bp, Homo sapiens
gacctaaaaagacat

SEQ ID NO: 294587 - DNA, 15 bp, Homo sapiens
agacctaaaaagaca

SEQ ID NO: 294588 - DNA, 15 bp, Homo sapiens
cagacctaaaaagac

SEQ ID NO: 294589 - DNA, 15 bp, Homo sapiens
acagacctaaaaaga

SEQ ID NO: 294590 - DNA, 15 bp, Homo sapiens
aacagacctaaaaag

SEQ ID NO: 294591 - DNA, 15 bp, Homo sapiens
aaacagacctaaaaa

SEQ ID NO: 294592 - DNA, 15 bp, Homo sapiens
gaaacagacctaaaa

SEQ ID NO: 294593 - DNA, 15 bp, Homo sapiens
agaaacagacctaaa

SEQ ID NO: 294594 - DNA, 15 bp, Homo sapiens
gagaaacagacctaa

SEQ ID NO: 294595 - DNA, 15 bp, Homo sapiens
agagaaacagaccta

SEQ ID NO: 294596 - DNA, 15 bp, Homo sapiens
aagagaaacagacct

SEQ ID NO: 294597 - DNA, 15 bp, Homo sapiens
caagagaaacagacc

SEQ ID NO: 294598 - DNA, 15 bp, Homo sapiens
tcaagagaaacagac

SEQ ID NO: 294599 - DNA, 15 bp, Homo sapiens
gtcaagagaaacaga

SEQ ID NO: 294600 - DNA, 15 bp, Homo sapiens
agtcaagagaaacag

SEQ ID NO: 294601 - DNA, 15 bp, Homo sapiens
cagtcaagagaaaca

SEQ ID NO: 294602 - DNA, 15 bp, Homo sapiens
tcagtcaagagaaac

SEQ ID NO: 294603 - DNA, 15 bp, Homo sapiens
atcagtcaagagaaa

SEQ ID NO: 294604 - DNA, 15 bp, Homo sapiens
tatcagtcaagagaa

SEQ ID NO: 294605 - DNA, 15 bp, Homo sapiens
ctatcagtcaagaga

SEQ ID NO: 294606 - DNA, 15 bp, Homo sapiens
actatcagtcaagag

SEQ ID NO: 294607 - DNA, 15 bp, Homo sapiens
aactatcagtcaaga

SEQ ID NO: 294608 - DNA, 15 bp, Homo sapiens
gaactatcagtcaag

SEQ ID NO: 294609 - DNA, 15 bp, Homo sapiens
agaactatcagtcaa

SEQ ID NO: 294610 - DNA, 15 bp, Homo sapiens
gagaactatcagtca

SEQ ID NO: 294611 - DNA, 15 bp, Homo sapiens
agagaactatcagtc

SEQ ID NO: 294612 - DNA, 15 bp, Homo sapiens
gagagaactatcagt

SEQ ID NO: 294613 - DNA, 15 bp, Homo sapiens
agagagaactatcag

SEQ ID NO: 294614 - DNA, 15 bp, Homo sapiens
gagagagaactatca

SEQ ID NO: 294615 - DNA, 15 bp, Homo sapiens
agagagagaactatc

SEQ ID NO: 294616 - DNA, 15 bp, Homo sapiens
gagagagagaactat

SEQ ID NO: 294617 - DNA, 15 bp, Homo sapiens
agagagagagaacta

SEQ ID NO: 294618 - DNA, 15 bp, Homo sapiens
gagagagagagaact

SEQ ID NO: 294619 - DNA, 15 bp, Homo sapiens
agagagagagagaac

SEQ ID NO: 294620 - DNA, 15 bp, Homo sapiens
gagagagagagagaa

SEQ ID NO: 294621 - DNA, 15 bp, Homo sapiens
agagagagagagaga

SEQ ID NO: 294622 - DNA, 15 bp, Homo sapiens
gagagagagagagag

SEQ ID NO: 294623 - DNA, 15 bp, Homo sapiens
aagagagagagagag

SEQ ID NO: 294624 - DNA, 15 bp, Homo sapiens
aaagagagagagaga

SEQ ID NO: 294625 - DNA, 15 bp, Homo sapiens
aaaagagagagagag

SEQ ID NO: 294626 - DNA, 15 bp, Homo sapiens
aaaaagagagagaga

SEQ ID NO: 294627 - DNA, 15 bp, Homo sapiens
aaaaaagagagagag

SEQ ID NO: 294628 - DNA, 15 bp, Homo sapiens
aaaaaaagagagaga

SEQ ID NO: 294629 - DNA, 15 bp, Homo sapiens
aaaaaaaagagagag

SEQ ID NO: 294630 - DNA, 15 bp, Homo sapiens
taaaaaaaagagaga

SEQ ID NO: 294631 - DNA, 15 bp, Homo sapiens
ttaaaaaaaagagag

SEQ ID NO: 294632 - DNA, 15 bp, Homo sapiens
cttaaaaaaaagaga

SEQ ID NO: 294633 - DNA, 15 bp, Homo sapiens
tcttaaaaaaaagag

SEQ ID NO: 294634 - DNA, 15 bp, Homo sapiens
ctcttaaaaaaaaga

SEQ ID NO: 294635 - DNA, 15 bp, Homo sapiens
actcttaaaaaaaag

SEQ ID NO: 294636 - DNA, 15 bp, Homo sapiens
gactcttaaaaaaaa

SEQ ID NO: 294637 - DNA, 15 bp, Homo sapiens
cgactcttaaaaaaa

SEQ ID NO: 294638 - DNA, 15 bp, Homo sapiens
acgactcttaaaaaa

SEQ ID NO: 294639 - DNA, 15 bp, Homo sapiens
tacgactcttaaaaa

SEQ ID NO: 294640 - DNA, 15 bp, Homo sapiens
atacgactcttaaaa

SEQ ID NO: 294641 - DNA, 15 bp, Homo sapiens
catacgactcttaaa

SEQ ID NO: 294642 - DNA, 15 bp, Homo sapiens
acatacgactcttaa

SEQ ID NO: 294643 - DNA, 15 bp, Homo sapiens
aacatacgactctta

SEQ ID NO: 294644 - DNA, 15 bp, Homo sapiens
aaacatacgactctt

SEQ ID NO: 294645 - DNA, 15 bp, Homo sapiens
gaaacatacgactct

SEQ ID NO: 294646 - DNA, 15 bp, Homo sapiens
agaaacatacgactc

SEQ ID NO: 294647 - DNA, 15 bp, Homo sapiens
cagaaacatacgact

SEQ ID NO: 294648 - DNA, 15 bp, Homo sapiens
gcagaaacatacgac

SEQ ID NO: 294649 - DNA, 15 bp, Homo sapiens
agcagaaacatacga

SEQ ID NO: 294650 - DNA, 15 bp, Homo sapiens
aagcagaaacatacg

SEQ ID NO: 294651 - DNA, 15 bp, Homo sapiens
aaagcagaaacatac

SEQ ID NO: 294652 - DNA, 15 bp, Homo sapiens
aaaagcagaaacata

SEQ ID NO: 294653 - DNA, 15 bp, Homo sapiens
aaaaagcagaaacat

SEQ ID NO: 294654 - DNA, 15 bp, Homo sapiens
aaaaaagcagaaaca

SEQ ID NO: 294655 - DNA, 15 bp, Homo sapiens
caaaaaagcagaaac

SEQ ID NO: 294656 - DNA, 15 bp, Homo sapiens
tcaaaaaagcagaaa

SEQ ID NO: 294657 - DNA, 15 bp, Homo sapiens
gtcaaaaaagcagaa

SEQ ID NO: 294658 - DNA, 15 bp, Homo sapiens
agtcaaaaaagcaga

SEQ ID NO: 294659 - DNA, 15 bp, Homo sapiens
cagtcaaaaaagcag

SEQ ID NO: 294660 - DNA, 15 bp, Homo sapiens
gcagtcaaaaaagca

SEQ ID NO: 294661 - DNA, 15 bp, Homo sapiens
agcagtcaaaaaagc

SEQ ID NO: 294662 - DNA, 15 bp, Homo sapiens
aagcagtcaaaaaag

SEQ ID NO: 294663 - DNA, 15 bp, Homo sapiens
caagcagtcaaaaaa

SEQ ID NO: 294664 - DNA, 15 bp, Homo sapiens
ccaagcagtcaaaaa

SEQ ID NO: 294665 - DNA, 15 bp, Homo sapiens
accaagcagtcaaaa

SEQ ID NO: 294666 - DNA, 15 bp, Homo sapiens
caccaagcagtcaaa

SEQ ID NO: 294667 - DNA, 15 bp, Homo sapiens
tcaccaagcagtcaa

SEQ ID NO: 294668 - DNA, 15 bp, Homo sapiens
atcaccaagcagtca

SEQ ID NO: 294669 - DNA, 15 bp, Homo sapiens
aatcaccaagcagtc

SEQ ID NO: 294670 - DNA, 15 bp, Homo sapiens
aaatcaccaagcagt

SEQ ID NO: 294671 - DNA, 15 bp, Homo sapiens
aaaatcaccaagcag

SEQ ID NO: 294672 - DNA, 15 bp, Homo sapiens
aaaaatcaccaagca

SEQ ID NO: 294673 - DNA, 15 bp, Homo sapiens
aaaaaatcaccaagc

SEQ ID NO: 294674 - DNA, 15 bp, Homo sapiens
aaaaaaatcaccaag

SEQ ID NO: 294675 - DNA, 15 bp, Homo sapiens
caaaaaaatcaccaa

SEQ ID NO: 294676 - DNA, 15 bp, Homo sapiens
acaaaaaaatcacca

SEQ ID NO: 294677 - DNA, 15 bp, Homo sapiens
aacaaaaaaatcacc

SEQ ID NO: 294678 - DNA, 15 bp, Homo sapiens
taacaaaaaaatcac

SEQ ID NO: 294679 - DNA, 15 bp, Homo sapiens
ctaacaaaaaaatca

SEQ ID NO: 294680 - DNA, 15 bp, Homo sapiens
cctaacaaaaaaatc

SEQ ID NO: 294681 - DNA, 15 bp, Homo sapiens
acctaacaaaaaaat

SEQ ID NO: 294682 - DNA, 15 bp, Homo sapiens
cacctaacaaaaaaa

SEQ ID NO: 294683 - DNA, 15 bp, Homo sapiens
gcacctaacaaaaaa

SEQ ID NO: 294684 - DNA, 15 bp, Homo sapiens
ggcacctaacaaaaa

SEQ ID NO: 294685 - DNA, 15 bp, Homo sapiens
tggcacctaacaaaa

SEQ ID NO: 294686 - DNA, 15 bp, Homo sapiens
ctggcacctaacaaa

SEQ ID NO: 294687 - DNA, 15 bp, Homo sapiens
tctggcacctaacaa

SEQ ID NO: 294688 - DNA, 15 bp, Homo sapiens
atctggcacctaaca

SEQ ID NO: 294689 - DNA, 15 bp, Homo sapiens
tatctggcacctaac

SEQ ID NO: 294690 - DNA, 15 bp, Homo sapiens
atatctggcacctaa

SEQ ID NO: 294691 - DNA, 15 bp, Homo sapiens
gatatctggcaccta

SEQ ID NO: 294692 - DNA, 15 bp, Homo sapiens
tgatatctggcacct

SEQ ID NO: 294693 - DNA, 15 bp, Homo sapiens
atgatatctggcacc

SEQ ID NO: 294694 - DNA, 15 bp, Homo sapiens
catgatatctggcac

SEQ ID NO: 294695 - DNA, 15 bp, Homo sapiens
tcatgatatctggca

SEQ ID NO: 294696 - DNA, 15 bp, Homo sapiens
ttcatgatatctggc

SEQ ID NO: 294697 - DNA, 15 bp, Homo sapiens
attcatgatatctgg

SEQ ID NO: 294698 - DNA, 15 bp, Homo sapiens
aattcatgatatctg

SEQ ID NO: 294699 - DNA, 15 bp, Homo sapiens
aaattcatgatatct

SEQ ID NO: 294700 - DNA, 15 bp, Homo sapiens
aaaattcatgatatc

SEQ ID NO: 294701 - DNA, 15 bp, Homo sapiens
caaaattcatgatat

SEQ ID NO: 294702 - DNA, 15 bp, Homo sapiens
gcaaaattcatgata

SEQ ID NO: 294703 - DNA, 15 bp, Homo sapiens
agcaaaattcatgat

SEQ ID NO: 294704 - DNA, 15 bp, Homo sapiens
aagcaaaattcatga

SEQ ID NO: 294705 - DNA, 15 bp, Homo sapiens
aaagcaaaattcatg

SEQ ID NO: 294706 - DNA, 15 bp, Homo sapiens
taaagcaaaattcat

SEQ ID NO: 294707 - DNA, 15 bp, Homo sapiens
ctaaagcaaaattca

SEQ ID NO: 294708 - DNA, 15 bp, Homo sapiens
actaaagcaaaattc

SEQ ID NO: 294709 - DNA, 15 bp, Homo sapiens
cactaaagcaaaatt

SEQ ID NO: 294710 - DNA, 15 bp, Homo sapiens
ccactaaagcaaaat

SEQ ID NO: 294711 - DNA, 15 bp, Homo sapiens
cccactaaagcaaaa

SEQ ID NO: 294712 - DNA, 15 bp, Homo sapiens
acccactaaagcaaa

SEQ ID NO: 294713 - DNA, 15 bp, Homo sapiens
gacccactaaagcaa

SEQ ID NO: 294714 - DNA, 15 bp, Homo sapiens
ggacccactaaagca

SEQ ID NO: 294715 - DNA, 15 bp, Homo sapiens
aggacccactaaagc

SEQ ID NO: 294716 - DNA, 15 bp, Homo sapiens
caggacccactaaag

SEQ ID NO: 294717 - DNA, 15 bp, Homo sapiens
ccaggacccactaaa

SEQ ID NO: 294718 - DNA, 15 bp, Homo sapiens
tccaggacccactaa

SEQ ID NO: 294719 - DNA, 15 bp, Homo sapiens
atccaggacccacta

SEQ ID NO: 294720 - DNA, 15 bp, Homo sapiens
tatccaggacccact

SEQ ID NO: 294721 - DNA, 15 bp, Homo sapiens
atatccaggacccac

SEQ ID NO: 294722 - DNA, 15 bp, Homo sapiens
aatatccaggaccca

SEQ ID NO: 294723 - DNA, 15 bp, Homo sapiens
aaatatccaggaccc

SEQ ID NO: 294724 - DNA, 15 bp, Homo sapiens
aaaatatccaggacc

SEQ ID NO: 294725 - DNA, 15 bp, Homo sapiens
aaaaatatccaggac

SEQ ID NO: 294726 - DNA, 15 bp, Homo sapiens
caaaaatatccagga

SEQ ID NO: 294727 - DNA, 15 bp, Homo sapiens
acaaaaatatccagg

SEQ ID NO: 294728 - DNA, 15 bp, Homo sapiens
tacaaaaatatccag

SEQ ID NO: 294729 - DNA, 15 bp, Homo sapiens
atacaaaaatatcca

SEQ ID NO: 294730 - DNA, 15 bp, Homo sapiens
aatacaaaaatatcc

SEQ ID NO: 294731 - DNA, 15 bp, Homo sapiens
gaatacaaaaatatc

SEQ ID NO: 294732 - DNA, 15 bp, Homo sapiens
ggaatacaaaaatat

SEQ ID NO: 294733 - DNA, 15 bp, Homo sapiens
aggaatacaaaaata

SEQ ID NO: 294734 - DNA, 15 bp, Homo sapiens
aaggaatacaaaaat

SEQ ID NO: 294735 - DNA, 15 bp, Homo sapiens
aaaggaatacaaaaa

SEQ ID NO: 294736 - DNA, 15 bp, Homo sapiens
gaaaggaatacaaaa

SEQ ID NO: 294737 - DNA, 15 bp, Homo sapiens
tgaaaggaatacaaa

SEQ ID NO: 294738 - DNA, 15 bp, Homo sapiens
gtgaaaggaatacaa

SEQ ID NO: 294739 - DNA, 15 bp, Homo sapiens
agtgaaaggaataca

SEQ ID NO: 294740 - DNA, 15 bp, Homo sapiens
tagtgaaaggaatac

SEQ ID NO: 294741 - DNA, 15 bp, Homo sapiens
atagtgaaaggaata

SEQ ID NO: 294742 - DNA, 15 bp, Homo sapiens
aatagtgaaaggaat

SEQ ID NO: 294743 - DNA, 15 bp, Homo sapiens
aaatagtgaaaggaa

SEQ ID NO: 294744 - DNA, 15 bp, Homo sapiens
aaaatagtgaaagga

SEQ ID NO: 294745 - DNA, 15 bp, Homo sapiens
caaaatagtgaaagg

SEQ ID NO: 294746 - DNA, 15 bp, Homo sapiens
tcaaaatagtgaaag

SEQ ID NO: 294747 - DNA, 15 bp, Homo sapiens
gtcaaaatagtgaaa

SEQ ID NO: 294748 - DNA, 15 bp, Homo sapiens
ggtcaaaatagtgaa

SEQ ID NO: 294749 - DNA, 15 bp, Homo sapiens
aggtcaaaatagtga

SEQ ID NO: 294750 - DNA, 15 bp, Homo sapiens
caggtcaaaatagtg

SEQ ID NO: 294751 - DNA, 15 bp, Homo sapiens
acaggtcaaaatagt

SEQ ID NO: 294752 - DNA, 15 bp, Homo sapiens
cacaggtcaaaatag

SEQ ID NO: 294753 - DNA, 15 bp, Homo sapiens
acacaggtcaaaata

SEQ ID NO: 294754 - DNA, 15 bp, Homo sapiens
aacacaggtcaaaat

SEQ ID NO: 294755 - DNA, 15 bp, Homo sapiens
aaacacaggtcaaaa

SEQ ID NO: 294756 - DNA, 15 bp, Homo sapiens
aaaacacaggtcaaa

SEQ ID NO: 294757 - DNA, 15 bp, Homo sapiens
caaaacacaggtcaa

SEQ ID NO: 294758 - DNA, 15 bp, Homo sapiens
ccaaaacacaggtca

SEQ ID NO: 294759 - DNA, 15 bp, Homo sapiens
tccaaaacacaggtc

SEQ ID NO: 294760 - DNA, 15 bp, Homo sapiens
ttccaaaacacaggt

SEQ ID NO: 294761 - DNA, 15 bp, Homo sapiens
gttccaaaacacagg

SEQ ID NO: 294762 - DNA, 15 bp, Homo sapiens
tgttccaaaacacag

SEQ ID NO: 294763 - DNA, 15 bp, Homo sapiens
gtgttccaaaacaca

SEQ ID NO: 294764 - DNA, 15 bp, Homo sapiens
tgtgttccaaaacac

SEQ ID NO: 294765 - DNA, 15 bp, Homo sapiens
ttgtgttccaaaaca

SEQ ID NO: 294766 - DNA, 15 bp, Homo sapiens
attgtgttccaaaac

SEQ ID NO: 294767 - DNA, 15 bp, Homo sapiens
aattgtgttccaaaa

SEQ ID NO: 294768 - DNA, 15 bp, Homo sapiens
taattgtgttccaaa

SEQ ID NO: 294769 - DNA, 15 bp, Homo sapiens
ttaattgtgttccaa

SEQ ID NO: 294770 - DNA, 15 bp, Homo sapiens
tttaattgtgttcca

SEQ ID NO: 294771 - DNA, 15 bp, Homo sapiens
atttaattgtgttcc

SEQ ID NO: 294772 - DNA, 15 bp, Homo sapiens
aatttaattgtgttc

SEQ ID NO: 294773 - DNA, 15 bp, Homo sapiens
taatttaattgtgtt

SEQ ID NO: 294774 - DNA, 15 bp, Homo sapiens
ataatttaattgtgt

SEQ ID NO: 294775 - DNA, 15 bp, Homo sapiens
gataatttaattgtg

SEQ ID NO: 294776 - DNA, 15 bp, Homo sapiens
agataatttaattgt

SEQ ID NO: 294777 - DNA, 15 bp, Homo sapiens
cagataatttaattg

SEQ ID NO: 294778 - DNA, 15 bp, Homo sapiens
ccagataatttaatt

SEQ ID NO: 294779 - DNA, 15 bp, Homo sapiens
tccagataatttaat

SEQ ID NO: 294780 - DNA, 15 bp, Homo sapiens
ttccagataatttaa

SEQ ID NO: 294781 - DNA, 15 bp, Homo sapiens
tttccagataattta

SEQ ID NO: 294782 - DNA, 15 bp, Homo sapiens
atttccagataattt

SEQ ID NO: 294783 - DNA, 15 bp, Homo sapiens
tatttccagataatt

SEQ ID NO: 294784 - DNA, 15 bp, Homo sapiens
ttatttccagataat

SEQ ID NO: 294785 - DNA, 15 bp, Homo sapiens
attatttccagataa

SEQ ID NO: 294786 - DNA, 15 bp, Homo sapiens
aattatttccagata

SEQ ID NO: 294787 - DNA, 15 bp, Homo sapiens
aaattatttccagat

SEQ ID NO: 294788 - DNA, 15 bp, Homo sapiens
caaattatttccaga

SEQ ID NO: 294789 - DNA, 15 bp, Homo sapiens
tcaaattatttccag

SEQ ID NO: 294790 - DNA, 15 bp, Homo sapiens
gtcaaattatttcca

SEQ ID NO: 294791 - DNA, 15 bp, Homo sapiens
agtcaaattatttcc

SEQ ID NO: 294792 - DNA, 15 bp, Homo sapiens
aagtcaaattatttc

SEQ ID NO: 294793 - DNA, 15 bp, Homo sapiens
aaagtcaaattattt

SEQ ID NO: 294794 - DNA, 15 bp, Homo sapiens
aaaagtcaaattatt

SEQ ID NO: 294795 - DNA, 15 bp, Homo sapiens
aaaaagtcaaattat

SEQ ID NO: 294796 - DNA, 15 bp, Homo sapiens
aaaaaagtcaaatta

SEQ ID NO: 294797 - DNA, 15 bp, Homo sapiens
taaaaaagtcaaatt

SEQ ID NO: 294798 - DNA, 15 bp, Homo sapiens
ttaaaaaagtcaaat

SEQ ID NO: 294799 - DNA, 15 bp, Homo sapiens
cttaaaaaagtcaaa

SEQ ID NO: 294800 - DNA, 15 bp, Homo sapiens
ccttaaaaaagtcaa

SEQ ID NO: 294801 - DNA, 15 bp, Homo sapiens
gccttaaaaaagtca

SEQ ID NO: 294802 - DNA, 15 bp, Homo sapiens
agccttaaaaaagtc

SEQ ID NO: 294803 - DNA, 15 bp, Homo sapiens
aagccttaaaaaagt

SEQ ID NO: 294804 - DNA, 15 bp, Homo sapiens
gaagccttaaaaaag

SEQ ID NO: 294805 - DNA, 15 bp, Homo sapiens
tgaagccttaaaaaa

SEQ ID NO: 294806 - DNA, 15 bp, Homo sapiens
atgaagccttaaaaa

SEQ ID NO: 294807 - DNA, 15 bp, Homo sapiens
aatgaagccttaaaa

SEQ ID NO: 294808 - DNA, 15 bp, Homo sapiens
aaatgaagccttaaa

SEQ ID NO: 294809 - DNA, 15 bp, Homo sapiens
taaatgaagccttaa

SEQ ID NO: 294810 - DNA, 15 bp, Homo sapiens
ataaatgaagcctta

SEQ ID NO: 294811 - DNA, 15 bp, Homo sapiens
aataaatgaagcctt

SEQ ID NO: 294812 - DNA, 15 bp, Homo sapiens
aaataaatgaagcct

SEQ ID NO: 294813 - DNA, 15 bp, Homo sapiens
taaataaatgaagcc

SEQ ID NO: 294814 - DNA, 15 bp, Homo sapiens
ataaataaatgaagc

SEQ ID NO: 294815 - DNA, 15 bp, Homo sapiens
aataaataaatgaag

SEQ ID NO: 294816 - DNA, 15 bp, Homo sapiens
aaataaataaatgaa

SEQ ID NO: 294817 - DNA, 15 bp, Homo sapiens
taaataaataaatga

SEQ ID NO: 294818 - DNA, 15 bp, Homo sapiens
ataaataaataaatg

SEQ ID NO: 294819 - DNA, 15 bp, Homo sapiens
gataaataaataaat

SEQ ID NO: 294820 - DNA, 15 bp, Homo sapiens
agataaataaataaa

SEQ ID NO: 294821 - DNA, 15 bp, Homo sapiens
cagataaataaataa

SEQ ID NO: 294822 - DNA, 15 bp, Homo sapiens
ccagataaataaata

SEQ ID NO: 294823 - DNA, 15 bp, Homo sapiens
accagataaataaat

SEQ ID NO: 294824 - DNA, 15 bp, Homo sapiens
aaccagataaataaa

SEQ ID NO: 294825 - DNA, 15 bp, Homo sapiens
aaaccagataaataa

SEQ ID NO: 294826 - DNA, 15 bp, Homo sapiens
aaaaccagataaata

SEQ ID NO: 294827 - DNA, 15 bp, Homo sapiens
aaaaaccagataaat

SEQ ID NO: 294828 - DNA, 15 bp, Homo sapiens
caaaaaccagataaa

SEQ ID NO: 294829 - DNA, 15 bp, Homo sapiens
acaaaaaccagataa

SEQ ID NO: 294830 - DNA, 15 bp, Homo sapiens
aacaaaaaccagata

SEQ ID NO: 294831 - DNA, 15 bp, Homo sapiens
aaacaaaaaccagat

SEQ ID NO: 294832 - DNA, 15 bp, Homo sapiens
aaaacaaaaaccaga

SEQ ID NO: 294833 - DNA, 15 bp, Homo sapiens
aaaaacaaaaaccag

SEQ ID NO: 294834 - DNA, 15 bp, Homo sapiens
caaaaacaaaaacca

SEQ ID NO: 294835 - DNA, 15 bp, Homo sapiens
ccaaaaacaaaaacc

SEQ ID NO: 294836 - DNA, 15 bp, Homo sapiens
tccaaaaacaaaaac

SEQ ID NO: 294837 - DNA, 15 bp, Homo sapiens
gtccaaaaacaaaaa

SEQ ID NO: 294838 - DNA, 15 bp, Homo sapiens
tgtccaaaaacaaaa

SEQ ID NO: 294839 - DNA, 15 bp, Homo sapiens
gtgtccaaaaacaaa

SEQ ID NO: 294840 - DNA, 15 bp, Homo sapiens
tgtgtccaaaaacaa

SEQ ID NO: 294841 - DNA, 15 bp, Homo sapiens
ctgtgtccaaaaaca

SEQ ID NO: 294842 - DNA, 15 bp, Homo sapiens
tctgtgtccaaaaac

SEQ ID NO: 294843 - DNA, 15 bp, Homo sapiens
ctctgtgtccaaaaa

SEQ ID NO: 294844 - DNA, 15 bp, Homo sapiens
gctctgtgtccaaaa

SEQ ID NO: 294845 - DNA, 15 bp, Homo sapiens
tgctctgtgtccaaa

SEQ ID NO: 294846 - DNA, 15 bp, Homo sapiens
ctgctctgtgtccaa

SEQ ID NO: 294847 - DNA, 15 bp, Homo sapiens
actgctctgtgtcca

SEQ ID NO: 294848 - DNA, 15 bp, Homo sapiens
gactgctctgtgtcc

SEQ ID NO: 294849 - DNA, 15 bp, Homo sapiens
agactgctctgtgtc

SEQ ID NO: 294850 - DNA, 15 bp, Homo sapiens
aagactgctctgtgt

SEQ ID NO: 294851 - DNA, 15 bp, Homo sapiens
aaagactgctctgtg

SEQ ID NO: 294852 - DNA, 15 bp, Homo sapiens
taaagactgctctgt

SEQ ID NO: 294853 - DNA, 15 bp, Homo sapiens
ttaaagactgctctg

SEQ ID NO: 294854 - DNA, 15 bp, Homo sapiens
attaaagactgctct

SEQ ID NO: 294855 - DNA, 15 bp, Homo sapiens
gattaaagactgctc

SEQ ID NO: 294856 - DNA, 15 bp, Homo sapiens
tgattaaagactgct

SEQ ID NO: 294857 - DNA, 15 bp, Homo sapiens
ttgattaaagactgc

SEQ ID NO: 294858 - DNA, 15 bp, Homo sapiens
attgattaaagactg

SEQ ID NO: 294859 - DNA, 15 bp, Homo sapiens
tattgattaaagact

SEQ ID NO: 294860 - DNA, 15 bp, Homo sapiens
ctattgattaaagac

SEQ ID NO: 294861 - DNA, 15 bp, Homo sapiens
gctattgattaaaga

SEQ ID NO: 294862 - DNA, 15 bp, Homo sapiens
ggctattgattaaag

SEQ ID NO: 294863 - DNA, 15 bp, Homo sapiens
cggctattgattaaa

SEQ ID NO: 294864 - DNA, 15 bp, Homo sapiens
tcggctattgattaa

SEQ ID NO: 294865 - DNA, 15 bp, Homo sapiens
atcggctattgatta

SEQ ID NO: 294866 - DNA, 15 bp, Homo sapiens
aatcggctattgatt

SEQ ID NO: 294867 - DNA, 15 bp, Homo sapiens
aaatcggctattgat

SEQ ID NO: 294868 - DNA, 15 bp, Homo sapiens
aaaatcggctattga

SEQ ID NO: 294869 - DNA, 15 bp, Homo sapiens
gaaaatcggctattg

SEQ ID NO: 294870 - DNA, 15 bp, Homo sapiens
ggaaaatcggctatt

SEQ ID NO: 294871 - DNA, 15 bp, Homo sapiens
aggaaaatcggctat

SEQ ID NO: 294872 - DNA, 15 bp, Homo sapiens
aaggaaaatcggcta

SEQ ID NO: 294873 - DNA, 15 bp, Homo sapiens
gaaggaaaatcggct

SEQ ID NO: 294874 - DNA, 15 bp, Homo sapiens
tgaaggaaaatcggc

SEQ ID NO: 294875 - DNA, 15 bp, Homo sapiens
gtgaaggaaaatcgg

SEQ ID NO: 294876 - DNA, 15 bp, Homo sapiens
agtgaaggaaaatcg

SEQ ID NO: 294877 - DNA, 15 bp, Homo sapiens
tagtgaaggaaaatc

SEQ ID NO: 294878 - DNA, 15 bp, Homo sapiens
atagtgaaggaaaat

SEQ ID NO: 294879 - DNA, 15 bp, Homo sapiens
gatagtgaaggaaaa

SEQ ID NO: 294880 - DNA, 15 bp, Homo sapiens
ggatagtgaaggaaa

SEQ ID NO: 294881 - DNA, 15 bp, Homo sapiens
tggatagtgaaggaa

SEQ ID NO: 294882 - DNA, 15 bp, Homo sapiens
ctggatagtgaagga

SEQ ID NO: 294883 - DNA, 15 bp, Homo sapiens
cctggatagtgaagg

SEQ ID NO: 294884 - DNA, 15 bp, Homo sapiens
gcctggatagtgaag

SEQ ID NO: 294885 - DNA, 15 bp, Homo sapiens
tgcctggatagtgaa

SEQ ID NO: 294886 - DNA, 15 bp, Homo sapiens
atgcctggatagtga

SEQ ID NO: 294887 - DNA, 15 bp, Homo sapiens
aatgcctggatagtg

SEQ ID NO: 294888 - DNA, 15 bp, Homo sapiens
caatgcctggatagt

SEQ ID NO: 294889 - DNA, 15 bp, Homo sapiens
gcaatgcctggatag

SEQ ID NO: 294890 - DNA, 15 bp, Homo sapiens
agcaatgcctggata

SEQ ID NO: 294891 - DNA, 15 bp, Homo sapiens
gagcaatgcctggat

SEQ ID NO: 294892 - DNA, 15 bp, Homo sapiens
agagcaatgcctgga

SEQ ID NO: 294893 - DNA, 15 bp, Homo sapiens
aagagcaatgcctgg

SEQ ID NO: 294894 - DNA, 15 bp, Homo sapiens
gaagagcaatgcctg

SEQ ID NO: 294895 - DNA, 15 bp, Homo sapiens
agaagagcaatgcct

SEQ ID NO: 294896 - DNA, 15 bp, Homo sapiens
cagaagagcaatgcc

SEQ ID NO: 294897 - DNA, 15 bp, Homo sapiens
tcagaagagcaatgc

SEQ ID NO: 294898 - DNA, 15 bp, Homo sapiens
ctcagaagagcaatg

SEQ ID NO: 294899 - DNA, 15 bp, Homo sapiens
actcagaagagcaat

SEQ ID NO: 294900 - DNA, 15 bp, Homo sapiens
tactcagaagagcaa

SEQ ID NO: 294901 - DNA, 15 bp, Homo sapiens
gtactcagaagagca

SEQ ID NO: 294902 - DNA, 15 bp, Homo sapiens
agtactcagaagagc

SEQ ID NO: 294903 - DNA, 15 bp, Homo sapiens
gagtactcagaagag

SEQ ID NO: 294904 - DNA, 15 bp, Homo sapiens
agagtactcagaaga

SEQ ID NO: 294905 - DNA, 15 bp, Homo sapiens
tagagtactcagaag

SEQ ID NO: 294906 - DNA, 15 bp, Homo sapiens
gtagagtactcagaa

SEQ ID NO: 294907 - DNA, 15 bp, Homo sapiens
agtagagtactcaga

SEQ ID NO: 294908 - DNA, 15 bp, Homo sapiens
cagtagagtactcag

SEQ ID NO: 294909 - DNA, 15 bp, Homo sapiens
tcagtagagtactca

SEQ ID NO: 294910 - DNA, 15 bp, Homo sapiens
ttcagtagagtactc

SEQ ID NO: 294911 - DNA, 15 bp, Homo sapiens
attcagtagagtact

SEQ ID NO: 294912 - DNA, 15 bp, Homo sapiens
tattcagtagagtac

SEQ ID NO: 294913 - DNA, 15 bp, Homo sapiens
atattcagtagagta

SEQ ID NO: 294914 - DNA, 15 bp, Homo sapiens
gatattcagtagagt

SEQ ID NO: 294915 - DNA, 15 bp, Homo sapiens
ggatattcagtagag

SEQ ID NO: 294916 - DNA, 15 bp, Homo sapiens
gggatattcagtaga

SEQ ID NO: 294917 - DNA, 15 bp, Homo sapiens
tgggatattcagtag

SEQ ID NO: 294918 - DNA, 15 bp, Homo sapiens
atgggatattcagta

SEQ ID NO: 294919 - DNA, 15 bp, Homo sapiens
tatgggatattcagt

SEQ ID NO: 294920 - DNA, 15 bp, Homo sapiens
atatgggatattcag

SEQ ID NO: 294921 - DNA, 15 bp, Homo sapiens
tatatgggatattca

SEQ ID NO: 294922 - DNA, 15 bp, Homo sapiens
atatatgggatattc

SEQ ID NO: 294923 - DNA, 15 bp, Homo sapiens
catatatgggatatt

SEQ ID NO: 294924 - DNA, 15 bp, Homo sapiens
tcatatatgggatat

SEQ ID NO: 294925 - DNA, 15 bp, Homo sapiens
gtcatatatgggata

SEQ ID NO: 294926 - DNA, 15 bp, Homo sapiens
tgtcatatatgggat

SEQ ID NO: 294927 - DNA, 15 bp, Homo sapiens
ttgtcatatatggga

SEQ ID NO: 294928 - DNA, 15 bp, Homo sapiens
cttgtcatatatggg

SEQ ID NO: 294929 - DNA, 15 bp, Homo sapiens
ccttgtcatatatgg

SEQ ID NO: 294930 - DNA, 15 bp, Homo sapiens
accttgtcatatatg

SEQ ID NO: 294931 - DNA, 15 bp, Homo sapiens
aaccttgtcatatat

SEQ ID NO: 294932 - DNA, 15 bp, Homo sapiens
aaaccttgtcatata

SEQ ID NO: 294933 - DNA, 15 bp, Homo sapiens
aaaaccttgtcatat

SEQ ID NO: 294934 - DNA, 15 bp, Homo sapiens
aaaaaccttgtcata

SEQ ID NO: 294935 - DNA, 15 bp, Homo sapiens
gaaaaaccttgtcat

SEQ ID NO: 294936 - DNA, 15 bp, Homo sapiens
ggaaaaaccttgtca

SEQ ID NO: 294937 - DNA, 15 bp, Homo sapiens
tggaaaaaccttgtc

SEQ ID NO: 294938 - DNA, 15 bp, Homo sapiens
gtggaaaaaccttgt

SEQ ID NO: 294939 - DNA, 15 bp, Homo sapiens
agtggaaaaaccttg

SEQ ID NO: 294940 - DNA, 15 bp, Homo sapiens
gagtggaaaaacctt

SEQ ID NO: 294941 - DNA, 15 bp, Homo sapiens
agagtggaaaaacct

SEQ ID NO: 294942 - DNA, 15 bp, Homo sapiens
cagagtggaaaaacc

SEQ ID NO: 294943 - DNA, 15 bp, Homo sapiens
ccagagtggaaaaac

SEQ ID NO: 294944 - DNA, 15 bp, Homo sapiens
gccagagtggaaaaa

SEQ ID NO: 294945 - DNA, 15 bp, Homo sapiens
agccagagtggaaaa

SEQ ID NO: 294946 - DNA, 15 bp, Homo sapiens
tagccagagtggaaa

SEQ ID NO: 294947 - DNA, 15 bp, Homo sapiens
ctagccagagtggaa

SEQ ID NO: 294948 - DNA, 15 bp, Homo sapiens
actagccagagtgga

SEQ ID NO: 294949 - DNA, 15 bp, Homo sapiens
aactagccagagtgg

SEQ ID NO: 294950 - DNA, 15 bp, Homo sapiens
caactagccagagtg

SEQ ID NO: 294951 - DNA, 15 bp, Homo sapiens
tcaactagccagagt

SEQ ID NO: 294952 - DNA, 15 bp, Homo sapiens
ttcaactagccagag

SEQ ID NO: 294953 - DNA, 15 bp, Homo sapiens
tttcaactagccaga

SEQ ID NO: 294954 - DNA, 15 bp, Homo sapiens
ctttcaactagccag

SEQ ID NO: 294955 - DNA, 15 bp, Homo sapiens
gctttcaactagcca

SEQ ID NO: 294956 - DNA, 15 bp, Homo sapiens
tgctttcaactagcc

SEQ ID NO: 294957 - DNA, 15 bp, Homo sapiens
ctgctttcaactagc

SEQ ID NO: 294958 - DNA, 15 bp, Homo sapiens
tctgctttcaactag

SEQ ID NO: 294959 - DNA, 15 bp, Homo sapiens
ttctgctttcaacta

SEQ ID NO: 294960 - DNA, 15 bp, Homo sapiens
gttctgctttcaact

SEQ ID NO: 294961 - DNA, 15 bp, Homo sapiens
agttctgctttcaac

SEQ ID NO: 294962 - DNA, 15 bp, Homo sapiens
gagttctgctttcaa

SEQ ID NO: 294963 - DNA, 15 bp, Homo sapiens
agagttctgctttca

SEQ ID NO: 294964 - DNA, 15 bp, Homo sapiens
aagagttctgctttc

SEQ ID NO: 294965 - DNA, 15 bp, Homo sapiens
gaagagttctgcttt

SEQ ID NO: 294966 - DNA, 15 bp, Homo sapiens
ggaagagttctgctt

SEQ ID NO: 294967 - DNA, 15 bp, Homo sapiens
aggaagagttctgct

SEQ ID NO: 294968 - DNA, 15 bp, Homo sapiens
caggaagagttctgc

SEQ ID NO: 294969 - DNA, 15 bp, Homo sapiens
tcaggaagagttctg

SEQ ID NO: 294970 - DNA, 15 bp, Homo sapiens
gtcaggaagagttct

SEQ ID NO: 294971 - DNA, 15 bp, Homo sapiens
ggtcaggaagagttc

SEQ ID NO: 294972 - DNA, 15 bp, Homo sapiens
gggtcaggaagagtt

SEQ ID NO: 294973 - DNA, 15 bp, Homo sapiens
agggtcaggaagagt

SEQ ID NO: 294974 - DNA, 15 bp, Homo sapiens
cagggtcaggaagag

SEQ ID NO: 294975 - DNA, 15 bp, Homo sapiens
acagggtcaggaaga

SEQ ID NO: 294976 - DNA, 15 bp, Homo sapiens
cacagggtcaggaag

SEQ ID NO: 294977 - DNA, 15 bp, Homo sapiens
acacagggtcaggaa

SEQ ID NO: 294978 - DNA, 15 bp, Homo sapiens
gacacagggtcagga

SEQ ID NO: 294979 - DNA, 15 bp, Homo sapiens
tgacacagggtcagg

SEQ ID NO: 294980 - DNA, 15 bp, Homo sapiens
ctgacacagggtcag

SEQ ID NO: 294981 - DNA, 15 bp, Homo sapiens
gctgacacagggtca

SEQ ID NO: 294982 - DNA, 15 bp, Homo sapiens
agctgacacagggtc

SEQ ID NO: 294983 - DNA, 15 bp, Homo sapiens
gagctgacacagggt

SEQ ID NO: 294984 - DNA, 15 bp, Homo sapiens
ggagctgacacaggg

SEQ ID NO: 294985 - DNA, 15 bp, Homo sapiens
aggagctgacacagg

SEQ ID NO: 294986 - DNA, 15 bp, Homo sapiens
caggagctgacacag

SEQ ID NO: 294987 - DNA, 15 bp, Homo sapiens
ccaggagctgacaca

SEQ ID NO: 294988 - DNA, 15 bp, Homo sapiens
tccaggagctgacac

SEQ ID NO: 294989 - DNA, 15 bp, Homo sapiens
ttccaggagctgaca

SEQ ID NO: 294990 - DNA, 15 bp, Homo sapiens
cttccaggagctgac

SEQ ID NO: 294991 - DNA, 15 bp, Homo sapiens
ccttccaggagctga

SEQ ID NO: 294992 - DNA, 15 bp, Homo sapiens
tccttccaggagctg

SEQ ID NO: 294993 - DNA, 15 bp, Homo sapiens
atccttccaggagct

SEQ ID NO: 294994 - DNA, 15 bp, Homo sapiens
aatccttccaggagc

SEQ ID NO: 294995 - DNA, 15 bp, Homo sapiens
gaatccttccaggag

SEQ ID NO: 294996 - DNA, 15 bp, Homo sapiens
agaatccttccagga

SEQ ID NO: 294997 - DNA, 15 bp, Homo sapiens
tagaatccttccagg

SEQ ID NO: 294998 - DNA, 15 bp, Homo sapiens
gtagaatccttccag

SEQ ID NO: 294999 - DNA, 15 bp, Homo sapiens
agtagaatccttcca

SEQ ID NO: 295000 - DNA, 15 bp, Homo sapiens
gagtagaatccttcc

SEQ ID NO: 295001 - DNA, 15 bp, Homo sapiens
ggagtagaatccttc

SEQ ID NO: 295002 - DNA, 15 bp, Homo sapiens
aggagtagaatcctt

SEQ ID NO: 295003 - DNA, 15 bp, Homo sapiens
aaggagtagaatcct

SEQ ID NO: 295004 - DNA, 15 bp, Homo sapiens
gaaggagtagaatcc

SEQ ID NO: 295005 - DNA, 15 bp, Homo sapiens
ggaaggagtagaatc

SEQ ID NO: 295006 - DNA, 15 bp, Homo sapiens
gggaaggagtagaat

SEQ ID NO: 295007 - DNA, 15 bp, Homo sapiens
tgggaaggagtagaa

SEQ ID NO: 295008 - DNA, 15 bp, Homo sapiens
atgggaaggagtaga

SEQ ID NO: 295009 - DNA, 15 bp, Homo sapiens
catgggaaggagtag

SEQ ID NO: 295010 - DNA, 15 bp, Homo sapiens
ccatgggaaggagta

SEQ ID NO: 295011 - DNA, 15 bp, Homo sapiens
accatgggaaggagt

SEQ ID NO: 295012 - DNA, 15 bp, Homo sapiens
aaccatgggaaggag

SEQ ID NO: 295013 - DNA, 15 bp, Homo sapiens
gaaccatgggaagga

SEQ ID NO: 295014 - DNA, 15 bp, Homo sapiens
agaaccatgggaagg

SEQ ID NO: 295015 - DNA, 15 bp, Homo sapiens
aagaaccatgggaag

SEQ ID NO: 295016 - DNA, 15 bp, Homo sapiens
gaagaaccatgggaa

SEQ ID NO: 295017 - DNA, 15 bp, Homo sapiens
ggaagaaccatggga

SEQ ID NO: 295018 - DNA, 15 bp, Homo sapiens
gggaagaaccatggg

SEQ ID NO: 295019 - DNA, 15 bp, Homo sapiens
agggaagaaccatgg

SEQ ID NO: 295020 - DNA, 15 bp, Homo sapiens
cagggaagaaccatg

SEQ ID NO: 295021 - DNA, 15 bp, Homo sapiens
ccagggaagaaccat

SEQ ID NO: 295022 - DNA, 15 bp, Homo sapiens
accagggaagaacca

SEQ ID NO: 295023 - DNA, 15 bp, Homo sapiens
aaccagggaagaacc

SEQ ID NO: 295024 - DNA, 15 bp, Homo sapiens
aaaccagggaagaac

SEQ ID NO: 295025 - DNA, 15 bp, Homo sapiens
aaaaccagggaagaa

SEQ ID NO: 295026 - DNA, 15 bp, Homo sapiens
caaaaccagggaaga

SEQ ID NO: 295027 - DNA, 15 bp, Homo sapiens
tcaaaaccagggaag

SEQ ID NO: 295028 - DNA, 15 bp, Homo sapiens
ctcaaaaccagggaa

SEQ ID NO: 295029 - DNA, 15 bp, Homo sapiens
actcaaaaccaggga

SEQ ID NO: 295030 - DNA, 15 bp, Homo sapiens
tactcaaaaccaggg

SEQ ID NO: 295031 - DNA, 15 bp, Homo sapiens
ctactcaaaaccagg

SEQ ID NO: 295032 - DNA, 15 bp, Homo sapiens
actactcaaaaccag

SEQ ID NO: 295033 - DNA, 15 bp, Homo sapiens
tactactcaaaacca

SEQ ID NO: 295034 - DNA, 15 bp, Homo sapiens
atactactcaaaacc

SEQ ID NO: 295035 - DNA, 15 bp, Homo sapiens
gatactactcaaaac

SEQ ID NO: 295036 - DNA, 15 bp, Homo sapiens
tgatactactcaaaa

SEQ ID NO: 295037 - DNA, 15 bp, Homo sapiens
atgatactactcaaa

SEQ ID NO: 295038 - DNA, 15 bp, Homo sapiens
gatgatactactcaa

SEQ ID NO: 295039 - DNA, 15 bp, Homo sapiens
tgatgatactactca

SEQ ID NO: 295040 - DNA, 15 bp, Homo sapiens
gtgatgatactactc

SEQ ID NO: 295041 - DNA, 15 bp, Homo sapiens
tgtgatgatactact

SEQ ID NO: 295042 - DNA, 15 bp, Homo sapiens
atgtgatgatactac

SEQ ID NO: 295043 - DNA, 15 bp, Homo sapiens
gatgtgatgatacta

SEQ ID NO: 295044 - DNA, 15 bp, Homo sapiens
ggatgtgatgatact

SEQ ID NO: 295045 - DNA, 15 bp, Homo sapiens
tggatgtgatgatac

SEQ ID NO: 295046 - DNA, 15 bp, Homo sapiens
atggatgtgatgata

SEQ ID NO: 295047 - DNA, 15 bp, Homo sapiens
catggatgtgatgat

SEQ ID NO: 295048 - DNA, 15 bp, Homo sapiens
gcatggatgtgatga

SEQ ID NO: 295049 - DNA, 15 bp, Homo sapiens
tgcatggatgtgatg

SEQ ID NO: 295050 - DNA, 15 bp, Homo sapiens
gtgcatggatgtgat

SEQ ID NO: 295051 - DNA, 15 bp, Homo sapiens
agtgcatggatgtga

SEQ ID NO: 295052 - DNA, 15 bp, Homo sapiens
cagtgcatggatgtg

SEQ ID NO: 295053 - DNA, 15 bp, Homo sapiens
tcagtgcatggatgt

SEQ ID NO: 295054 - DNA, 15 bp, Homo sapiens
atcagtgcatggatg

SEQ ID NO: 295055 - DNA, 15 bp, Homo sapiens
gatcagtgcatggat

SEQ ID NO: 295056 - DNA, 15 bp, Homo sapiens
tgatcagtgcatgga

SEQ ID NO: 295057 - DNA, 15 bp, Homo sapiens
ctgatcagtgcatgg

SEQ ID NO: 295058 - DNA, 15 bp, Homo sapiens
actgatcagtgcatg

SEQ ID NO: 295059 - DNA, 15 bp, Homo sapiens
tactgatcagtgcat

SEQ ID NO: 295060 - DNA, 15 bp, Homo sapiens
gtactgatcagtgca

SEQ ID NO: 295061 - DNA, 15 bp, Homo sapiens
agtactgatcagtgc

SEQ ID NO: 295062 - DNA, 15 bp, Homo sapiens
gagtactgatcagtg

SEQ ID NO: 295063 - DNA, 15 bp, Homo sapiens
tgagtactgatcagt

SEQ ID NO: 295064 - DNA, 15 bp, Homo sapiens
ctgagtactgatcag

SEQ ID NO: 295065 - DNA, 15 bp, Homo sapiens
gctgagtactgatca

SEQ ID NO: 295066 - DNA, 15 bp, Homo sapiens
agctgagtactgatc

SEQ ID NO: 295067 - DNA, 15 bp, Homo sapiens
cagctgagtactgat

SEQ ID NO: 295068 - DNA, 15 bp, Homo sapiens
tcagctgagtactga

SEQ ID NO: 295069 - DNA, 15 bp, Homo sapiens
ttcagctgagtactg

SEQ ID NO: 295070 - DNA, 15 bp, Homo sapiens
cttcagctgagtact

SEQ ID NO: 295071 - DNA, 15 bp, Homo sapiens
tcttcagctgagtac

SEQ ID NO: 295072 - DNA, 15 bp, Homo sapiens
gtcttcagctgagta

SEQ ID NO: 295073 - DNA, 15 bp, Homo sapiens
agtcttcagctgagt

SEQ ID NO: 295074 - DNA, 15 bp, Homo sapiens
gagtcttcagctgag

SEQ ID NO: 295075 - DNA, 15 bp, Homo sapiens
tgagtcttcagctga

SEQ ID NO: 295076 - DNA, 15 bp, Homo sapiens
ttgagtcttcagctg

SEQ ID NO: 295077 - DNA, 15 bp, Homo sapiens
cttgagtcttcagct

SEQ ID NO: 295078 - DNA, 15 bp, Homo sapiens
gcttgagtcttcagc

SEQ ID NO: 295079 - DNA, 15 bp, Homo sapiens
agcttgagtcttcag

SEQ ID NO: 295080 - DNA, 15 bp, Homo sapiens
aagcttgagtcttca

SEQ ID NO: 295081 - DNA, 15 bp, Homo sapiens
taagcttgagtcttc

SEQ ID NO: 295082 - DNA, 15 bp, Homo sapiens
ttaagcttgagtctt

SEQ ID NO: 295083 - DNA, 15 bp, Homo sapiens
gttaagcttgagtct

SEQ ID NO: 295084 - DNA, 15 bp, Homo sapiens
ggttaagcttgagtc

SEQ ID NO: 295085 - DNA, 15 bp, Homo sapiens
gggttaagcttgagt

SEQ ID NO: 295086 - DNA, 15 bp, Homo sapiens
agggttaagcttgag

SEQ ID NO: 295087 - DNA, 15 bp, Homo sapiens
gagggttaagcttga

SEQ ID NO: 295088 - DNA, 15 bp, Homo sapiens
agagggttaagcttg

SEQ ID NO: 295089 - DNA, 15 bp, Homo sapiens
cagagggttaagctt

SEQ ID NO: 295090 - DNA, 15 bp, Homo sapiens
gcagagggttaagct

SEQ ID NO: 295091 - DNA, 15 bp, Homo sapiens
tgcagagggttaagc

SEQ ID NO: 295092 - DNA, 15 bp, Homo sapiens
ctgcagagggttaag

SEQ ID NO: 295093 - DNA, 15 bp, Homo sapiens
tctgcagagggttaa

SEQ ID NO: 295094 - DNA, 15 bp, Homo sapiens
gtctgcagagggtta

SEQ ID NO: 295095 - DNA, 15 bp, Homo sapiens
ggtctgcagagggtt

SEQ ID NO: 295096 - DNA, 15 bp, Homo sapiens
aggtctgcagagggt

SEQ ID NO: 295097 - DNA, 15 bp, Homo sapiens
gaggtctgcagaggg

SEQ ID NO: 295098 - DNA, 15 bp, Homo sapiens
agaggtctgcagagg

SEQ ID NO: 295099 - DNA, 15 bp, Homo sapiens
cagaggtctgcagag

SEQ ID NO: 295100 - DNA, 15 bp, Homo sapiens
ccagaggtctgcaga

SEQ ID NO: 295101 - DNA, 15 bp, Homo sapiens
tccagaggtctgcag

SEQ ID NO: 295102 - DNA, 15 bp, Homo sapiens
ctccagaggtctgca

SEQ ID NO: 295103 - DNA, 15 bp, Homo sapiens
actccagaggtctgc

SEQ ID NO: 295104 - DNA, 15 bp, Homo sapiens
aactccagaggtctg

SEQ ID NO: 295105 - DNA, 15 bp, Homo sapiens
gaactccagaggtct

SEQ ID NO: 295106 - DNA, 15 bp, Homo sapiens
agaactccagaggtc

SEQ ID NO: 295107 - DNA, 15 bp, Homo sapiens
gagaactccagaggt

SEQ ID NO: 295108 - DNA, 15 bp, Homo sapiens
agagaactccagagg

SEQ ID NO: 295109 - DNA, 15 bp, Homo sapiens
aagagaactccagag

SEQ ID NO: 295110 - DNA, 15 bp, Homo sapiens
aaagagaactccaga

SEQ ID NO: 295111 - DNA, 15 bp, Homo sapiens
aaaagagaactccag

SEQ ID NO: 295112 - DNA, 15 bp, Homo sapiens
aaaaagagaactcca

SEQ ID NO: 295113 - DNA, 15 bp, Homo sapiens
caaaaagagaactcc

SEQ ID NO: 295114 - DNA, 15 bp, Homo sapiens
acaaaaagagaactc

SEQ ID NO: 295115 - DNA, 15 bp, Homo sapiens
tacaaaaagagaact

SEQ ID NO: 295116 - DNA, 15 bp, Homo sapiens
ctacaaaaagagaac

SEQ ID NO: 295117 - DNA, 15 bp, Homo sapiens
gctacaaaaagagaa

SEQ ID NO: 295118 - DNA, 15 bp, Homo sapiens
agctacaaaaagaga

SEQ ID NO: 295119 - DNA, 15 bp, Homo sapiens
aagctacaaaaagag

SEQ ID NO: 295120 - DNA, 15 bp, Homo sapiens
aaagctacaaaaaga

SEQ ID NO: 295121 - DNA, 15 bp, Homo sapiens
gaaagctacaaaaag

SEQ ID NO: 295122 - DNA, 15 bp, Homo sapiens
agaaagctacaaaaa

SEQ ID NO: 295123 - DNA, 15 bp, Homo sapiens
aagaaagctacaaaa

SEQ ID NO: 295124 - DNA, 15 bp, Homo sapiens
gaagaaagctacaaa

SEQ ID NO: 295125 - DNA, 15 bp, Homo sapiens
agaagaaagctacaa

SEQ ID NO: 295126 - DNA, 15 bp, Homo sapiens
gagaagaaagctaca

SEQ ID NO: 295127 - DNA, 15 bp, Homo sapiens
agagaagaaagctac

SEQ ID NO: 295128 - DNA, 15 bp, Homo sapiens
gagagaagaaagcta

SEQ ID NO: 295129 - DNA, 15 bp, Homo sapiens
agagagaagaaagct

SEQ ID NO: 295130 - DNA, 15 bp, Homo sapiens
tagagagaagaaagc

SEQ ID NO: 295131 - DNA, 15 bp, Homo sapiens
ctagagagaagaaag

SEQ ID NO: 295132 - DNA, 15 bp, Homo sapiens
actagagagaagaaa

SEQ ID NO: 295133 - DNA, 15 bp, Homo sapiens
tactagagagaagaa

SEQ ID NO: 295134 - DNA, 15 bp, Homo sapiens
atactagagagaaga

SEQ ID NO: 295135 - DNA, 15 bp, Homo sapiens
aatactagagagaag

SEQ ID NO: 295136 - DNA, 15 bp, Homo sapiens
gaatactagagagaa

SEQ ID NO: 295137 - DNA, 15 bp, Homo sapiens
agaatactagagaga

SEQ ID NO: 295138 - DNA, 15 bp, Homo sapiens
cagaatactagagag

SEQ ID NO: 295139 - DNA, 15 bp, Homo sapiens
acagaatactagaga

SEQ ID NO: 295140 - DNA, 15 bp, Homo sapiens
gacagaatactagag

SEQ ID NO: 295141 - DNA, 15 bp, Homo sapiens
ggacagaatactaga

SEQ ID NO: 295142 - DNA, 15 bp, Homo sapiens
aggacagaatactag

SEQ ID NO: 295143 - DNA, 15 bp, Homo sapiens
caggacagaatacta

SEQ ID NO: 295144 - DNA, 15 bp, Homo sapiens
gcaggacagaatact

SEQ ID NO: 295145 - DNA, 15 bp, Homo sapiens
agcaggacagaatac

SEQ ID NO: 295146 - DNA, 15 bp, Homo sapiens
tagcaggacagaata

SEQ ID NO: 295147 - DNA, 15 bp, Homo sapiens
ttagcaggacagaat

SEQ ID NO: 295148 - DNA, 15 bp, Homo sapiens
attagcaggacagaa

SEQ ID NO: 295149 - DNA, 15 bp, Homo sapiens
aattagcaggacaga

SEQ ID NO: 295150 - DNA, 15 bp, Homo sapiens
aaattagcaggacag

SEQ ID NO: 295151 - DNA, 15 bp, Homo sapiens
aaaattagcaggaca

SEQ ID NO: 295152 - DNA, 15 bp, Homo sapiens
taaaattagcaggac

SEQ ID NO: 295153 - DNA, 15 bp, Homo sapiens
ctaaaattagcagga

SEQ ID NO: 295154 - DNA, 15 bp, Homo sapiens
actaaaattagcagg

SEQ ID NO: 295155 - DNA, 15 bp, Homo sapiens
aactaaaattagcag

SEQ ID NO: 295156 - DNA, 15 bp, Homo sapiens
aaactaaaattagca

SEQ ID NO: 295157 - DNA, 15 bp, Homo sapiens
caaactaaaattagc

SEQ ID NO: 295158 - DNA, 15 bp, Homo sapiens
gcaaactaaaattag

SEQ ID NO: 295159 - DNA, 15 bp, Homo sapiens
ggcaaactaaaatta

SEQ ID NO: 295160 - DNA, 15 bp, Homo sapiens
aggcaaactaaaatt

SEQ ID NO: 295161 - DNA, 15 bp, Homo sapiens
aaggcaaactaaaat

SEQ ID NO: 295162 - DNA, 15 bp, Homo sapiens
caaggcaaactaaaa

SEQ ID NO: 295163 - DNA, 15 bp, Homo sapiens
ccaaggcaaactaaa

SEQ ID NO: 295164 - DNA, 15 bp, Homo sapiens
gccaaggcaaactaa

SEQ ID NO: 295165 - DNA, 15 bp, Homo sapiens
tgccaaggcaaacta

SEQ ID NO: 295166 - DNA, 15 bp, Homo sapiens
atgccaaggcaaact

SEQ ID NO: 295167 - DNA, 15 bp, Homo sapiens
gatgccaaggcaaac

SEQ ID NO: 295168 - DNA, 15 bp, Homo sapiens
agatgccaaggcaaa

SEQ ID NO: 295169 - DNA, 15 bp, Homo sapiens
gagatgccaaggcaa

SEQ ID NO: 295170 - DNA, 15 bp, Homo sapiens
ggagatgccaaggca

SEQ ID NO: 295171 - DNA, 15 bp, Homo sapiens
gggagatgccaaggc

SEQ ID NO: 295172 - DNA, 15 bp, Homo sapiens
tgggagatgccaagg

SEQ ID NO: 295173 - DNA, 15 bp, Homo sapiens
atgggagatgccaag

SEQ ID NO: 295174 - DNA, 15 bp, Homo sapiens
aatgggagatgccaa

SEQ ID NO: 295175 - DNA, 15 bp, Homo sapiens
aaatgggagatgcca

SEQ ID NO: 295176 - DNA, 15 bp, Homo sapiens
gaaatgggagatgcc

SEQ ID NO: 295177 - DNA, 15 bp, Homo sapiens
agaaatgggagatgc

SEQ ID NO: 295178 - DNA, 15 bp, Homo sapiens
aagaaatgggagatg

SEQ ID NO: 295179 - DNA, 15 bp, Homo sapiens
taagaaatgggagat

SEQ ID NO: 295180 - DNA, 15 bp, Homo sapiens
ttaagaaatgggaga

SEQ ID NO: 295181 - DNA, 15 bp, Homo sapiens
gttaagaaatgggag

SEQ ID NO: 295182 - DNA, 15 bp, Homo sapiens
agttaagaaatggga

SEQ ID NO: 295183 - DNA, 15 bp, Homo sapiens
gagttaagaaatggg

SEQ ID NO: 295184 - DNA, 15 bp, Homo sapiens
agagttaagaaatgg

SEQ ID NO: 295185 - DNA, 15 bp, Homo sapiens
cagagttaagaaatg

SEQ ID NO: 295186 - DNA, 15 bp, Homo sapiens
acagagttaagaaat

SEQ ID NO: 295187 - DNA, 15 bp, Homo sapiens
aacagagttaagaaa

SEQ ID NO: 295188 - DNA, 15 bp, Homo sapiens
aaacagagttaagaa

SEQ ID NO: 295189 - DNA, 15 bp, Homo sapiens
gaaacagagttaaga

SEQ ID NO: 295190 - DNA, 15 bp, Homo sapiens
agaaacagagttaag

SEQ ID NO: 295191 - DNA, 15 bp, Homo sapiens
aagaaacagagttaa

SEQ ID NO: 295192 - DNA, 15 bp, Homo sapiens
gaagaaacagagtta

SEQ ID NO: 295193 - DNA, 15 bp, Homo sapiens
tgaagaaacagagtt

SEQ ID NO: 295194 - DNA, 15 bp, Homo sapiens
ttgaagaaacagagt

SEQ ID NO: 295195 - DNA, 15 bp, Homo sapiens
gttgaagaaacagag

SEQ ID NO: 295196 - DNA, 15 bp, Homo sapiens
agttgaagaaacaga

SEQ ID NO: 295197 - DNA, 15 bp, Homo sapiens
cagttgaagaaacag

SEQ ID NO: 295198 - DNA, 15 bp, Homo sapiens
ccagttgaagaaaca

SEQ ID NO: 295199 - DNA, 15 bp, Homo sapiens
cccagttgaagaaac

SEQ ID NO: 295200 - DNA, 15 bp, Homo sapiens
ccccagttgaagaaa

SEQ ID NO: 295201 - DNA, 15 bp, Homo sapiens
cccccagttgaagaa

SEQ ID NO: 295202 - DNA, 15 bp, Homo sapiens
tcccccagttgaaga

SEQ ID NO: 295203 - DNA, 15 bp, Homo sapiens
gtcccccagttgaag

SEQ ID NO: 295204 - DNA, 15 bp, Homo sapiens
ggtcccccagttgaa

SEQ ID NO: 295205 - DNA, 15 bp, Homo sapiens
tggtcccccagttga

SEQ ID NO: 295206 - DNA, 15 bp, Homo sapiens
gtggtcccccagttg

SEQ ID NO: 295207 - DNA, 15 bp, Homo sapiens
agtggtcccccagtt

SEQ ID NO: 295208 - DNA, 15 bp, Homo sapiens
cagtggtcccccagt

SEQ ID NO: 295209 - DNA, 15 bp, Homo sapiens
ccagtggtcccccag

SEQ ID NO: 295210 - DNA, 15 bp, Homo sapiens
cccagtggtccccca

SEQ ID NO: 295211 - DNA, 15 bp, Homo sapiens
gcccagtggtccccc

SEQ ID NO: 295212 - DNA, 15 bp, Homo sapiens
agcccagtggtcccc

SEQ ID NO: 295213 - DNA, 15 bp, Homo sapiens
cagcccagtggtccc

SEQ ID NO: 295214 - DNA, 15 bp, Homo sapiens
gcagcccagtggtcc

SEQ ID NO: 295215 - DNA, 15 bp, Homo sapiens
tgcagcccagtggtc

SEQ ID NO: 295216 - DNA, 15 bp, Homo sapiens
atgcagcccagtggt

SEQ ID NO: 295217 - DNA, 15 bp, Homo sapiens
aatgcagcccagtgg

SEQ ID NO: 295218 - DNA, 15 bp, Homo sapiens
gaatgcagcccagtg

SEQ ID NO: 295219 - DNA, 15 bp, Homo sapiens
ggaatgcagcccagt

SEQ ID NO: 295220 - DNA, 15 bp, Homo sapiens
tggaatgcagcccag

SEQ ID NO: 295221 - DNA, 15 bp, Homo sapiens
ctggaatgcagccca

SEQ ID NO: 295222 - DNA, 15 bp, Homo sapiens
actggaatgcagccc

SEQ ID NO: 295223 - DNA, 15 bp, Homo sapiens
aactggaatgcagcc

SEQ ID NO: 295224 - DNA, 15 bp, Homo sapiens
aaactggaatgcagc

SEQ ID NO: 295225 - DNA, 15 bp, Homo sapiens
gaaactggaatgcag

SEQ ID NO: 295226 - DNA, 15 bp, Homo sapiens
agaaactggaatgca

SEQ ID NO: 295227 - DNA, 15 bp, Homo sapiens
gagaaactggaatgc

SEQ ID NO: 295228 - DNA, 15 bp, Homo sapiens
tgagaaactggaatg

SEQ ID NO: 295229 - DNA, 15 bp, Homo sapiens
atgagaaactggaat

SEQ ID NO: 295230 - DNA, 15 bp, Homo sapiens
gatgagaaactggaa

SEQ ID NO: 295231 - DNA, 15 bp, Homo sapiens
agatgagaaactgga

SEQ ID NO: 295232 - DNA, 15 bp, Homo sapiens
gagatgagaaactgg

SEQ ID NO: 295233 - DNA, 15 bp, Homo sapiens
agagatgagaaactg

SEQ ID NO: 295234 - DNA, 15 bp, Homo sapiens
cagagatgagaaact

SEQ ID NO: 295235 - DNA, 15 bp, Homo sapiens
ccagagatgagaaac

SEQ ID NO: 295236 - DNA, 15 bp, Homo sapiens
tccagagatgagaaa

SEQ ID NO: 295237 - DNA, 15 bp, Homo sapiens
gtccagagatgagaa

SEQ ID NO: 295238 - DNA, 15 bp, Homo sapiens
agtccagagatgaga

SEQ ID NO: 295239 - DNA, 15 bp, Homo sapiens
cagtccagagatgag

SEQ ID NO: 295240 - DNA, 15 bp, Homo sapiens
acagtccagagatga

SEQ ID NO: 295241 - DNA, 15 bp, Homo sapiens
cacagtccagagatg

SEQ ID NO: 295242 - DNA, 15 bp, Homo sapiens
ccacagtccagagat

SEQ ID NO: 295243 - DNA, 15 bp, Homo sapiens
tccacagtccagaga

SEQ ID NO: 295244 - DNA, 15 bp, Homo sapiens
gtccacagtccagag

SEQ ID NO: 295245 - DNA, 15 bp, Homo sapiens
ggtccacagtccaga

SEQ ID NO: 295246 - DNA, 15 bp, Homo sapiens
tggtccacagtccag

SEQ ID NO: 295247 - DNA, 15 bp, Homo sapiens
atggtccacagtcca

SEQ ID NO: 295248 - DNA, 15 bp, Homo sapiens
tatggtccacagtcc

SEQ ID NO: 295249 - DNA, 15 bp, Homo sapiens
ttatggtccacagtc

SEQ ID NO: 295250 - DNA, 15 bp, Homo sapiens
tttatggtccacagt

SEQ ID NO: 295251 - DNA, 15 bp, Homo sapiens
gtttatggtccacag

SEQ ID NO: 295252 - DNA, 15 bp, Homo sapiens
agtttatggtccaca

SEQ ID NO: 295253 - DNA, 15 bp, Homo sapiens
cagtttatggtccac

SEQ ID NO: 295254 - DNA, 15 bp, Homo sapiens
acagtttatggtcca

SEQ ID NO: 295255 - DNA, 15 bp, Homo sapiens
gacagtttatggtcc

SEQ ID NO: 295256 - DNA, 15 bp, Homo sapiens
ggacagtttatggtc

SEQ ID NO: 295257 - DNA, 15 bp, Homo sapiens
gggacagtttatggt

SEQ ID NO: 295258 - DNA, 15 bp, Homo sapiens
ggggacagtttatgg

SEQ ID NO: 295259 - DNA, 15 bp, Homo sapiens
tggggacagtttatg

SEQ ID NO: 295260 - DNA, 15 bp, Homo sapiens
ctggggacagtttat

SEQ ID NO: 295261 - DNA, 15 bp, Homo sapiens
cctggggacagttta

SEQ ID NO: 295262 - DNA, 15 bp, Homo sapiens
gcctggggacagttt

SEQ ID NO: 295263 - DNA, 15 bp, Homo sapiens
tgcctggggacagtt

SEQ ID NO: 295264 - DNA, 15 bp, Homo sapiens
ctgcctggggacagt

SEQ ID NO: 295265 - DNA, 15 bp, Homo sapiens
actgcctggggacag

SEQ ID NO: 295266 - DNA, 15 bp, Homo sapiens
tactgcctggggaca

SEQ ID NO: 295267 - DNA, 15 bp, Homo sapiens
ttactgcctggggac

SEQ ID NO: 295268 - DNA, 15 bp, Homo sapiens
cttactgcctgggga

SEQ ID NO: 295269 - DNA, 15 bp, Homo sapiens
gcttactgcctgggg

SEQ ID NO: 295270 - DNA, 15 bp, Homo sapiens
agcttactgcctggg

SEQ ID NO: 295271 - DNA, 15 bp, Homo sapiens
cagcttactgcctgg

SEQ ID NO: 295272 - DNA, 15 bp, Homo sapiens
acagcttactgcctg

SEQ ID NO: 295273 - DNA, 15 bp, Homo sapiens
cacagcttactgcct

SEQ ID NO: 295274 - DNA, 15 bp, Homo sapiens
ccacagcttactgcc

SEQ ID NO: 295275 - DNA, 15 bp, Homo sapiens
gccacagcttactgc

SEQ ID NO: 295276 - DNA, 15 bp, Homo sapiens
tgccacagcttactg

SEQ ID NO: 295277 - DNA, 15 bp, Homo sapiens
ttgccacagcttact

SEQ ID NO: 295278 - DNA, 15 bp, Homo sapiens
attgccacagcttac

SEQ ID NO: 295279 - DNA, 15 bp, Homo sapiens
tattgccacagctta

SEQ ID NO: 295280 - DNA, 15 bp, Homo sapiens
ttattgccacagctt

SEQ ID NO: 295281 - DNA, 15 bp, Homo sapiens
attattgccacagct

SEQ ID NO: 295282 - DNA, 15 bp, Homo sapiens
cattattgccacagc

SEQ ID NO: 295283 - DNA, 15 bp, Homo sapiens
tcattattgccacag

SEQ ID NO: 295284 - DNA, 15 bp, Homo sapiens
ctcattattgccaca

SEQ ID NO: 295285 - DNA, 15 bp, Homo sapiens
cctcattattgccac

SEQ ID NO: 295286 - DNA, 15 bp, Homo sapiens
gcctcattattgcca

SEQ ID NO: 295287 - DNA, 15 bp, Homo sapiens
agcctcattattgcc

SEQ ID NO: 295288 - DNA, 15 bp, Homo sapiens
gagcctcattattgc

SEQ ID NO: 295289 - DNA, 15 bp, Homo sapiens
tgagcctcattattg

SEQ ID NO: 295290 - DNA, 15 bp, Homo sapiens
gtgagcctcattatt

SEQ ID NO: 295291 - DNA, 15 bp, Homo sapiens
ggtgagcctcattat

SEQ ID NO: 295292 - DNA, 15 bp, Homo sapiens
tggtgagcctcatta

SEQ ID NO: 295293 - DNA, 15 bp, Homo sapiens
atggtgagcctcatt

SEQ ID NO: 295294 - DNA, 15 bp, Homo sapiens
aatggtgagcctcat

SEQ ID NO: 295295 - DNA, 15 bp, Homo sapiens
aaatggtgagcctca

SEQ ID NO: 295296 - DNA, 15 bp, Homo sapiens
caaatggtgagcctc

SEQ ID NO: 295297 - DNA, 15 bp, Homo sapiens
acaaatggtgagcct

SEQ ID NO: 295298 - DNA, 15 bp, Homo sapiens
aacaaatggtgagcc

SEQ ID NO: 295299 - DNA, 15 bp, Homo sapiens
aaacaaatggtgagc

SEQ ID NO: 295300 - DNA, 15 bp, Homo sapiens
aaaacaaatggtgag

SEQ ID NO: 295301 - DNA, 15 bp, Homo sapiens
gaaaacaaatggtga

SEQ ID NO: 295302 - DNA, 15 bp, Homo sapiens
ggaaaacaaatggtg

SEQ ID NO: 295303 - DNA, 15 bp, Homo sapiens
aggaaaacaaatggt

SEQ ID NO: 295304 - DNA, 15 bp, Homo sapiens
aaggaaaacaaatgg

SEQ ID NO: 295305 - DNA, 15 bp, Homo sapiens
gaaggaaaacaaatg

SEQ ID NO: 295306 - DNA, 15 bp, Homo sapiens
agaaggaaaacaaat

SEQ ID NO: 295307 - DNA, 15 bp, Homo sapiens
gagaaggaaaacaaa

SEQ ID NO: 295308 - DNA, 15 bp, Homo sapiens
ggagaaggaaaacaa

SEQ ID NO: 295309 - DNA, 15 bp, Homo sapiens
gggagaaggaaaaca

SEQ ID NO: 295310 - DNA, 15 bp, Homo sapiens
tgggagaaggaaaac

SEQ ID NO: 295311 - DNA, 15 bp, Homo sapiens
ctgggagaaggaaaa

SEQ ID NO: 295312 - DNA, 15 bp, Homo sapiens
cctgggagaaggaaa

SEQ ID NO: 295313 - DNA, 15 bp, Homo sapiens
ccctgggagaaggaa

SEQ ID NO: 295314 - DNA, 15 bp, Homo sapiens
tccctgggagaagga

SEQ ID NO: 295315 - DNA, 15 bp, Homo sapiens
atccctgggagaagg

SEQ ID NO: 295316 - DNA, 15 bp, Homo sapiens
aatccctgggagaag

SEQ ID NO: 295317 - DNA, 15 bp, Homo sapiens
caatccctgggagaa

SEQ ID NO: 295318 - DNA, 15 bp, Homo sapiens
gcaatccctgggaga

SEQ ID NO: 295319 - DNA, 15 bp, Homo sapiens
agcaatccctgggag

SEQ ID NO: 295320 - DNA, 15 bp, Homo sapiens
cagcaatccctggga

SEQ ID NO: 295321 - DNA, 15 bp, Homo sapiens
acagcaatccctggg

SEQ ID NO: 295322 - DNA, 15 bp, Homo sapiens
aacagcaatccctgg

SEQ ID NO: 295323 - DNA, 15 bp, Homo sapiens
gaacagcaatccctg

SEQ ID NO: 295324 - DNA, 15 bp, Homo sapiens
agaacagcaatccct

SEQ ID NO: 295325 - DNA, 15 bp, Homo sapiens
cagaacagcaatccc

SEQ ID NO: 295326 - DNA, 15 bp, Homo sapiens
acagaacagcaatcc

SEQ ID NO: 295327 - DNA, 15 bp, Homo sapiens
tacagaacagcaatc

SEQ ID NO: 295328 - DNA, 15 bp, Homo sapiens
gtacagaacagcaat

SEQ ID NO: 295329 - DNA, 15 bp, Homo sapiens
agtacagaacagcaa

SEQ ID NO: 295330 - DNA, 15 bp, Homo sapiens
cagtacagaacagca

SEQ ID NO: 295331 - DNA, 15 bp, Homo sapiens
gcagtacagaacagc

SEQ ID NO: 295332 - DNA, 15 bp, Homo sapiens
ggcagtacagaacag

SEQ ID NO: 295333 - DNA, 15 bp, Homo sapiens
aggcagtacagaaca

SEQ ID NO: 295334 - DNA, 15 bp, Homo sapiens
caggcagtacagaac

SEQ ID NO: 295335 - DNA, 15 bp, Homo sapiens
acaggcagtacagaa

SEQ ID NO: 295336 - DNA, 15 bp, Homo sapiens
aacaggcagtacaga

SEQ ID NO: 295337 - DNA, 15 bp, Homo sapiens
caacaggcagtacag

SEQ ID NO: 295338 - DNA, 15 bp, Homo sapiens
acaacaggcagtaca

SEQ ID NO: 295339 - DNA, 15 bp, Homo sapiens
aacaacaggcagtac

SEQ ID NO: 295340 - DNA, 15 bp, Homo sapiens
aaacaacaggcagta

SEQ ID NO: 295341 - DNA, 15 bp, Homo sapiens
taaacaacaggcagt

SEQ ID NO: 295342 - DNA, 15 bp, Homo sapiens
ataaacaacaggcag

SEQ ID NO: 295343 - DNA, 15 bp, Homo sapiens
aataaacaacaggca

SEQ ID NO: 295344 - DNA, 15 bp, Homo sapiens
caataaacaacaggc

SEQ ID NO: 295345 - DNA, 15 bp, Homo sapiens
acaataaacaacagg

SEQ ID NO: 295346 - DNA, 15 bp, Homo sapiens
cacaataaacaacag

SEQ ID NO: 295347 - DNA, 15 bp, Homo sapiens
acacaataaacaaca

SEQ ID NO: 295348 - DNA, 15 bp, Homo sapiens
tacacaataaacaac

SEQ ID NO: 295349 - DNA, 15 bp, Homo sapiens
ttacacaataaacaa

SEQ ID NO: 295350 - DNA, 15 bp, Homo sapiens
tttacacaataaaca

SEQ ID NO: 295351 - DNA, 15 bp, Homo sapiens
ttttacacaataaac

SEQ ID NO: 295352 - DNA, 15 bp, Homo sapiens
tttttacacaataaa

SEQ ID NO: 295353 - DNA, 15 bp, Homo sapiens
ctttttacacaataa

SEQ ID NO: 295354 - DNA, 15 bp, Homo sapiens
tctttttacacaata

SEQ ID NO: 295355 - DNA, 15 bp, Homo sapiens
ttctttttacacaat

SEQ ID NO: 295356 - DNA, 15 bp, Homo sapiens
attctttttacacaa

SEQ ID NO: 295357 - DNA, 15 bp, Homo sapiens
aattctttttacaca

SEQ ID NO: 295358 - DNA, 15 bp, Homo sapiens
gaattctttttacac

SEQ ID NO: 295359 - DNA, 15 bp, Homo sapiens
agaattctttttaca

SEQ ID NO: 295360 - DNA, 15 bp, Homo sapiens
aagaattctttttac

SEQ ID NO: 295361 - DNA, 15 bp, Homo sapiens
aaagaattcttttta

SEQ ID NO: 295362 - DNA, 15 bp, Homo sapiens
aaaagaattcttttt

SEQ ID NO: 295363 - DNA, 15 bp, Homo sapiens
taaaagaattctttt

SEQ ID NO: 295364 - DNA, 15 bp, Homo sapiens
ataaaagaattcttt

SEQ ID NO: 295365 - DNA, 15 bp, Homo sapiens
aataaaagaattctt

SEQ ID NO: 295366 - DNA, 15 bp, Homo sapiens
aaataaaagaattct

SEQ ID NO: 295367 - DNA, 15 bp, Homo sapiens
taaataaaagaattc

SEQ ID NO: 295368 - DNA, 15 bp, Homo sapiens
ataaataaaagaatt

SEQ ID NO: 295369 - DNA, 15 bp, Homo sapiens
cataaataaaagaat

SEQ ID NO: 295370 - DNA, 15 bp, Homo sapiens
acataaataaaagaa

SEQ ID NO: 295371 - DNA, 15 bp, Homo sapiens
aacataaataaaaga

SEQ ID NO: 295372 - DNA, 15 bp, Homo sapiens
caacataaataaaag

SEQ ID NO: 295373 - DNA, 15 bp, Homo sapiens
acaacataaataaaa

SEQ ID NO: 295374 - DNA, 15 bp, Homo sapiens
aacaacataaataaa

SEQ ID NO: 295375 - DNA, 15 bp, Homo sapiens
gaacaacataaataa

SEQ ID NO: 295376 - DNA, 15 bp, Homo sapiens
tgaacaacataaata

SEQ ID NO: 295377 - DNA, 15 bp, Homo sapiens
ttgaacaacataaat

SEQ ID NO: 295378 - DNA, 15 bp, Homo sapiens
attgaacaacataaa

SEQ ID NO: 295379 - DNA, 15 bp, Homo sapiens
aattgaacaacataa

SEQ ID NO: 295380 - DNA, 15 bp, Homo sapiens
aaattgaacaacata

SEQ ID NO: 295381 - DNA, 15 bp, Homo sapiens
aaaattgaacaacat

SEQ ID NO: 295382 - DNA, 15 bp, Homo sapiens
caaaattgaacaaca

SEQ ID NO: 295383 - DNA, 15 bp, Homo sapiens
acaaaattgaacaac

SEQ ID NO: 295384 - DNA, 15 bp, Homo sapiens
cacaaaattgaacaa

SEQ ID NO: 295385 - DNA, 15 bp, Homo sapiens
ccacaaaattgaaca

SEQ ID NO: 295386 - DNA, 15 bp, Homo sapiens
accacaaaattgaac

SEQ ID NO: 295387 - DNA, 15 bp, Homo sapiens
aaccacaaaattgaa

SEQ ID NO: 295388 - DNA, 15 bp, Homo sapiens
caaccacaaaattga

SEQ ID NO: 295389 - DNA, 15 bp, Homo sapiens
acaaccacaaaattg

SEQ ID NO: 295390 - DNA, 15 bp, Homo sapiens
aacaaccacaaaatt

SEQ ID NO: 295391 - DNA, 15 bp, Homo sapiens
aaacaaccacaaaat

SEQ ID NO: 295392 - DNA, 15 bp, Homo sapiens
taaacaaccacaaaa

SEQ ID NO: 295393 - DNA, 15 bp, Homo sapiens
ttaaacaaccacaaa

SEQ ID NO: 295394 - DNA, 15 bp, Homo sapiens
tttaaacaaccacaa

SEQ ID NO: 295395 - DNA, 15 bp, Homo sapiens
gtttaaacaaccaca

SEQ ID NO: 295396 - DNA, 15 bp, Homo sapiens
cgtttaaacaaccac

SEQ ID NO: 295397 - DNA, 15 bp, Homo sapiens
tcgtttaaacaacca

SEQ ID NO: 295398 - DNA, 15 bp, Homo sapiens
ttcgtttaaacaacc

SEQ ID NO: 295399 - DNA, 15 bp, Homo sapiens
attcgtttaaacaac

SEQ ID NO: 295400 - DNA, 15 bp, Homo sapiens
gattcgtttaaacaa

SEQ ID NO: 295401 - DNA, 15 bp, Homo sapiens
agattcgtttaaaca

SEQ ID NO: 295402 - DNA, 15 bp, Homo sapiens
cagattcgtttaaac

SEQ ID NO: 295403 - DNA, 15 bp, Homo sapiens
ccagattcgtttaaa

SEQ ID NO: 295404 - DNA, 15 bp, Homo sapiens
accagattcgtttaa

SEQ ID NO: 295405 - DNA, 15 bp, Homo sapiens
gaccagattcgttta

SEQ ID NO: 295406 - DNA, 15 bp, Homo sapiens
ggaccagattcgttt

SEQ ID NO: 295407 - DNA, 15 bp, Homo sapiens
gggaccagattcgtt

SEQ ID NO: 295408 - DNA, 15 bp, Homo sapiens
agggaccagattcgt

SEQ ID NO: 295409 - DNA, 15 bp, Homo sapiens
cagggaccagattcg

SEQ ID NO: 295410 - DNA, 15 bp, Homo sapiens
acagggaccagattc

SEQ ID NO: 295411 - DNA, 15 bp, Homo sapiens
aacagggaccagatt

SEQ ID NO: 295412 - DNA, 15 bp, Homo sapiens
aaacagggaccagat

SEQ ID NO: 295413 - DNA, 15 bp, Homo sapiens
gaaacagggaccaga

SEQ ID NO: 295414 - DNA, 15 bp, Homo sapiens
agaaacagggaccag

SEQ ID NO: 295415 - DNA, 15 bp, Homo sapiens
aagaaacagggacca

SEQ ID NO: 295416 - DNA, 15 bp, Homo sapiens
gaagaaacagggacc

SEQ ID NO: 295417 - DNA, 15 bp, Homo sapiens
tgaagaaacagggac

SEQ ID NO: 295418 - DNA, 15 bp, Homo sapiens
atgaagaaacaggga

SEQ ID NO: 295419 - DNA, 15 bp, Homo sapiens
gatgaagaaacaggg

SEQ ID NO: 295420 - DNA, 15 bp, Homo sapiens
tgatgaagaaacagg

SEQ ID NO: 295421 - DNA, 15 bp, Homo sapiens
ctgatgaagaaacag

SEQ ID NO: 295422 - DNA, 15 bp, Homo sapiens
tctgatgaagaaaca

SEQ ID NO: 295423 - DNA, 15 bp, Homo sapiens
ctctgatgaagaaac

SEQ ID NO: 295424 - DNA, 15 bp, Homo sapiens
gctctgatgaagaaa

SEQ ID NO: 295425 - DNA, 15 bp, Homo sapiens
agctctgatgaagaa

SEQ ID NO: 295426 - DNA, 15 bp, Homo sapiens
cagctctgatgaaga

SEQ ID NO: 295427 - DNA, 15 bp, Homo sapiens
ccagctctgatgaag

SEQ ID NO: 295428 - DNA, 15 bp, Homo sapiens
gccagctctgatgaa

SEQ ID NO: 295429 - DNA, 15 bp, Homo sapiens
tgccagctctgatga

SEQ ID NO: 295430 - DNA, 15 bp, Homo sapiens
ctgccagctctgatg

SEQ ID NO: 295431 - DNA, 15 bp, Homo sapiens
cctgccagctctgat

SEQ ID NO: 295432 - DNA, 15 bp, Homo sapiens
ccctgccagctctga

SEQ ID NO: 295433 - DNA, 15 bp, Homo sapiens
accctgccagctctg

SEQ ID NO: 295434 - DNA, 15 bp, Homo sapiens
aaccctgccagctct

SEQ ID NO: 295435 - DNA, 15 bp, Homo sapiens
taaccctgccagctc

SEQ ID NO: 295436 - DNA, 15 bp, Homo sapiens
gtaaccctgccagct

SEQ ID NO: 295437 - DNA, 15 bp, Homo sapiens
agtaaccctgccagc

SEQ ID NO: 295438 - DNA, 15 bp, Homo sapiens
tagtaaccctgccag

SEQ ID NO: 295439 - DNA, 15 bp, Homo sapiens
ttagtaaccctgcca

SEQ ID NO: 295440 - DNA, 15 bp, Homo sapiens
tttagtaaccctgcc

SEQ ID NO: 295441 - DNA, 15 bp, Homo sapiens
gtttagtaaccctgc

SEQ ID NO: 295442 - DNA, 15 bp, Homo sapiens
cgtttagtaaccctg

SEQ ID NO: 295443 - DNA, 15 bp, Homo sapiens
acgtttagtaaccct

SEQ ID NO: 295444 - DNA, 15 bp, Homo sapiens
tacgtttagtaaccc

SEQ ID NO: 295445 - DNA, 15 bp, Homo sapiens
ttacgtttagtaacc

SEQ ID NO: 295446 - DNA, 15 bp, Homo sapiens
cttacgtttagtaac

SEQ ID NO: 295447 - DNA, 15 bp, Homo sapiens
ccttacgtttagtaa

SEQ ID NO: 295448 - DNA, 15 bp, Homo sapiens
gccttacgtttagta

SEQ ID NO: 295449 - DNA, 15 bp, Homo sapiens
agccttacgtttagt

SEQ ID NO: 295450 - DNA, 15 bp, Homo sapiens
aagccttacgtttag

SEQ ID NO: 295451 - DNA, 15 bp, Homo sapiens
taagccttacgttta

SEQ ID NO: 295452 - DNA, 15 bp, Homo sapiens
ctaagccttacgttt

SEQ ID NO: 295453 - DNA, 15 bp, Homo sapiens
actaagccttacgtt

SEQ ID NO: 295454 - DNA, 15 bp, Homo sapiens
cactaagccttacgt

SEQ ID NO: 295455 - DNA, 15 bp, Homo sapiens
tcactaagccttacg

SEQ ID NO: 295456 - DNA, 15 bp, Homo sapiens
atcactaagccttac

SEQ ID NO: 295457 - DNA, 15 bp, Homo sapiens
aatcactaagcctta

SEQ ID NO: 295458 - DNA, 15 bp, Homo sapiens
caatcactaagcctt

SEQ ID NO: 295459 - DNA, 15 bp, Homo sapiens
tcaatcactaagcct

SEQ ID NO: 295460 - DNA, 15 bp, Homo sapiens
atcaatcactaagcc

SEQ ID NO: 295461 - DNA, 15 bp, Homo sapiens
catcaatcactaagc

SEQ ID NO: 295462 - DNA, 15 bp, Homo sapiens
tcatcaatcactaag

SEQ ID NO: 295463 - DNA, 15 bp, Homo sapiens
ttcatcaatcactaa

SEQ ID NO: 295464 - DNA, 15 bp, Homo sapiens
cttcatcaatcacta

SEQ ID NO: 295465 - DNA, 15 bp, Homo sapiens
acttcatcaatcact

SEQ ID NO: 295466 - DNA, 15 bp, Homo sapiens
tacttcatcaatcac

SEQ ID NO: 295467 - DNA, 15 bp, Homo sapiens
atacttcatcaatca

SEQ ID NO: 295468 - DNA, 15 bp, Homo sapiens
aatacttcatcaatc

SEQ ID NO: 295469 - DNA, 15 bp, Homo sapiens
aaatacttcatcaat

SEQ ID NO: 295470 - DNA, 15 bp, Homo sapiens
taaatacttcatcaa

SEQ ID NO: 295471 - DNA, 15 bp, Homo sapiens
gtaaatacttcatca

SEQ ID NO: 295472 - DNA, 15 bp, Homo sapiens
tgtaaatacttcatc

SEQ ID NO: 295473 - DNA, 15 bp, Homo sapiens
ttgtaaatacttcat

SEQ ID NO: 295474 - DNA, 15 bp, Homo sapiens
tttgtaaatacttca

SEQ ID NO: 295475 - DNA, 15 bp, Homo sapiens
atttgtaaatacttc

SEQ ID NO: 295476 - DNA, 15 bp, Homo sapiens
tatttgtaaatactt

SEQ ID NO: 295477 - DNA, 15 bp, Homo sapiens
atatttgtaaatact

SEQ ID NO: 295478 - DNA, 15 bp, Homo sapiens
catatttgtaaatac

SEQ ID NO: 295479 - DNA, 15 bp, Homo sapiens
tcatatttgtaaata

SEQ ID NO: 295480 - DNA, 15 bp, Homo sapiens
ttcatatttgtaaat

SEQ ID NO: 295481 - DNA, 15 bp, Homo sapiens
tttcatatttgtaaa

SEQ ID NO: 295482 - DNA, 15 bp, Homo sapiens
atttcatatttgtaa

SEQ ID NO: 295483 - DNA, 15 bp, Homo sapiens
tatttcatatttgta

SEQ ID NO: 295484 - DNA, 15 bp, Homo sapiens
atatttcatatttgt

SEQ ID NO: 295485 - DNA, 15 bp, Homo sapiens
catatttcatatttg

SEQ ID NO: 295486 - DNA, 15 bp, Homo sapiens
acatatttcatattt

SEQ ID NO: 295487 - DNA, 15 bp, Homo sapiens
tacatatttcatatt

SEQ ID NO: 295488 - DNA, 15 bp, Homo sapiens
gtacatatttcatat

SEQ ID NO: 295489 - DNA, 15 bp, Homo sapiens
tgtacatatttcata

SEQ ID NO: 295490 - DNA, 15 bp, Homo sapiens
gtgtacatatttcat

SEQ ID NO: 295491 - DNA, 15 bp, Homo sapiens
agtgtacatatttca

SEQ ID NO: 295492 - DNA, 15 bp, Homo sapiens
aagtgtacatatttc

SEQ ID NO: 295493 - DNA, 15 bp, Homo sapiens
taagtgtacatattt

SEQ ID NO: 295494 - DNA, 15 bp, Homo sapiens
gtaagtgtacatatt

SEQ ID NO: 295495 - DNA, 15 bp, Homo sapiens
tgtaagtgtacatat

SEQ ID NO: 295496 - DNA, 15 bp, Homo sapiens
ctgtaagtgtacata

SEQ ID NO: 295497 - DNA, 15 bp, Homo sapiens
tctgtaagtgtacat

SEQ ID NO: 295498 - DNA, 15 bp, Homo sapiens
ttctgtaagtgtaca

SEQ ID NO: 295499 - DNA, 15 bp, Homo sapiens
attctgtaagtgtac

SEQ ID NO: 295500 - DNA, 15 bp, Homo sapiens
tattctgtaagtgta

SEQ ID NO: 295501 - DNA, 15 bp, Homo sapiens
atattctgtaagtgt

SEQ ID NO: 295502 - DNA, 15 bp, Homo sapiens
aatattctgtaagtg

SEQ ID NO: 295503 - DNA, 15 bp, Homo sapiens
aaatattctgtaagt

SEQ ID NO: 295504 - DNA, 15 bp, Homo sapiens
taaatattctgtaag

SEQ ID NO: 295505 - DNA, 15 bp, Homo sapiens
ctaaatattctgtaa

SEQ ID NO: 295506 - DNA, 15 bp, Homo sapiens
cctaaatattctgta

SEQ ID NO: 295507 - DNA, 15 bp, Homo sapiens
ccctaaatattctgt

SEQ ID NO: 295508 - DNA, 15 bp, Homo sapiens
accctaaatattctg

SEQ ID NO: 295509 - DNA, 15 bp, Homo sapiens
taccctaaatattct

SEQ ID NO: 295510 - DNA, 15 bp, Homo sapiens
ataccctaaatattc

SEQ ID NO: 295511 - DNA, 15 bp, Homo sapiens
gataccctaaatatt

SEQ ID NO: 295512 - DNA, 15 bp, Homo sapiens
tgataccctaaatat

SEQ ID NO: 295513 - DNA, 15 bp, Homo sapiens
atgataccctaaata

SEQ ID NO: 295514 - DNA, 15 bp, Homo sapiens
aatgataccctaaat

SEQ ID NO: 295515 - DNA, 15 bp, Homo sapiens
aaatgataccctaaa

SEQ ID NO: 295516 - DNA, 15 bp, Homo sapiens
gaaatgataccctaa

SEQ ID NO: 295517 - DNA, 15 bp, Homo sapiens
ggaaatgatacccta

SEQ ID NO: 295518 - DNA, 15 bp, Homo sapiens
cggaaatgataccct

SEQ ID NO: 295519 - DNA, 15 bp, Homo sapiens
gcggaaatgataccc

SEQ ID NO: 295520 - DNA, 15 bp, Homo sapiens
agcggaaatgatacc

SEQ ID NO: 295521 - DNA, 15 bp, Homo sapiens
aagcggaaatgatac

SEQ ID NO: 295522 - DNA, 15 bp, Homo sapiens
gaagcggaaatgata

SEQ ID NO: 295523 - DNA, 15 bp, Homo sapiens
ggaagcggaaatgat

SEQ ID NO: 295524 - DNA, 15 bp, Homo sapiens
aggaagcggaaatga

SEQ ID NO: 295525 - DNA, 15 bp, Homo sapiens
aaggaagcggaaatg

SEQ ID NO: 295526 - DNA, 15 bp, Homo sapiens
caaggaagcggaaat

SEQ ID NO: 295527 - DNA, 15 bp, Homo sapiens
acaaggaagcggaaa

SEQ ID NO: 295528 - DNA, 15 bp, Homo sapiens
cacaaggaagcggaa

SEQ ID NO: 295529 - DNA, 15 bp, Homo sapiens
acacaaggaagcgga

SEQ ID NO: 295530 - DNA, 15 bp, Homo sapiens
aacacaaggaagcgg

SEQ ID NO: 295531 - DNA, 15 bp, Homo sapiens
taacacaaggaagcg

SEQ ID NO: 295532 - DNA, 15 bp, Homo sapiens
ttaacacaaggaagc

SEQ ID NO: 295533 - DNA, 15 bp, Homo sapiens
tttaacacaaggaag

SEQ ID NO: 295534 - DNA, 15 bp, Homo sapiens
atttaacacaaggaa

SEQ ID NO: 295535 - DNA, 15 bp, Homo sapiens
catttaacacaagga

SEQ ID NO: 295536 - DNA, 15 bp, Homo sapiens
gcatttaacacaagg

SEQ ID NO: 295537 - DNA, 15 bp, Homo sapiens
tgcatttaacacaag

SEQ ID NO: 295538 - DNA, 15 bp, Homo sapiens
atgcatttaacacaa

SEQ ID NO: 295539 - DNA, 15 bp, Homo sapiens
gatgcatttaacaca

SEQ ID NO: 295540 - DNA, 15 bp, Homo sapiens
tgatgcatttaacac

SEQ ID NO: 295541 - DNA, 15 bp, Homo sapiens
ctgatgcatttaaca

SEQ ID NO: 295542 - DNA, 15 bp, Homo sapiens
cctgatgcatttaac

SEQ ID NO: 295543 - DNA, 15 bp, Homo sapiens
acctgatgcatttaa

SEQ ID NO: 295544 - DNA, 15 bp, Homo sapiens
gacctgatgcattta

SEQ ID NO: 295545 - DNA, 15 bp, Homo sapiens
agacctgatgcattt

SEQ ID NO: 295546 - DNA, 15 bp, Homo sapiens
aagacctgatgcatt

SEQ ID NO: 295547 - DNA, 15 bp, Homo sapiens
gaagacctgatgcat

SEQ ID NO: 295548 - DNA, 15 bp, Homo sapiens
agaagacctgatgca

SEQ ID NO: 295549 - DNA, 15 bp, Homo sapiens
cagaagacctgatgc

SEQ ID NO: 295550 - DNA, 15 bp, Homo sapiens
tcagaagacctgatg

SEQ ID NO: 295551 - DNA, 15 bp, Homo sapiens
gtcagaagacctgat

SEQ ID NO: 295552 - DNA, 15 bp, Homo sapiens
agtcagaagacctga

SEQ ID NO: 295553 - DNA, 15 bp, Homo sapiens
cagtcagaagacctg

SEQ ID NO: 295554 - DNA, 15 bp, Homo sapiens
tcagtcagaagacct

SEQ ID NO: 295555 - DNA, 15 bp, Homo sapiens
atcagtcagaagacc

SEQ ID NO: 295556 - DNA, 15 bp, Homo sapiens
catcagtcagaagac

SEQ ID NO: 295557 - DNA, 15 bp, Homo sapiens
gcatcagtcagaaga

SEQ ID NO: 295558 - DNA, 15 bp, Homo sapiens
tgcatcagtcagaag

SEQ ID NO: 295559 - DNA, 15 bp, Homo sapiens
atgcatcagtcagaa

SEQ ID NO: 295560 - DNA, 15 bp, Homo sapiens
aatgcatcagtcaga

SEQ ID NO: 295561 - DNA, 15 bp, Homo sapiens
taatgcatcagtcag

SEQ ID NO: 295562 - DNA, 15 bp, Homo sapiens
ataatgcatcagtca

SEQ ID NO: 295563 - DNA, 15 bp, Homo sapiens
tataatgcatcagtc

SEQ ID NO: 295564 - DNA, 15 bp, Homo sapiens
gtataatgcatcagt

SEQ ID NO: 295565 - DNA, 15 bp, Homo sapiens
agtataatgcatcag

SEQ ID NO: 295566 - DNA, 15 bp, Homo sapiens
cagtataatgcatca

SEQ ID NO: 295567 - DNA, 15 bp, Homo sapiens
acagtataatgcatc

SEQ ID NO: 295568 - DNA, 15 bp, Homo sapiens
aacagtataatgcat

SEQ ID NO: 295569 - DNA, 15 bp, Homo sapiens
aaacagtataatgca

SEQ ID NO: 295570 - DNA, 15 bp, Homo sapiens
gaaacagtataatgc

SEQ ID NO: 295571 - DNA, 15 bp, Homo sapiens
tgaaacagtataatg

SEQ ID NO: 295572 - DNA, 15 bp, Homo sapiens
ctgaaacagtataat

SEQ ID NO: 295573 - DNA, 15 bp, Homo sapiens
tctgaaacagtataa

SEQ ID NO: 295574 - DNA, 15 bp, Homo sapiens
ctctgaaacagtata

SEQ ID NO: 295575 - DNA, 15 bp, Homo sapiens
cctctgaaacagtat

SEQ ID NO: 295576 - DNA, 15 bp, Homo sapiens
ccctctgaaacagta

SEQ ID NO: 295577 - DNA, 15 bp, Homo sapiens
cccctctgaaacagt

SEQ ID NO: 295578 - DNA, 15 bp, Homo sapiens
acccctctgaaacag

SEQ ID NO: 295579 - DNA, 15 bp, Homo sapiens
cacccctctgaaaca

SEQ ID NO: 295580 - DNA, 15 bp, Homo sapiens
gcacccctctgaaac

SEQ ID NO: 295581 - DNA, 15 bp, Homo sapiens
agcacccctctgaaa

SEQ ID NO: 295582 - DNA, 15 bp, Homo sapiens
aagcacccctctgaa

SEQ ID NO: 295583 - DNA, 15 bp, Homo sapiens
taagcacccctctga

SEQ ID NO: 295584 - DNA, 15 bp, Homo sapiens
gtaagcacccctctg

SEQ ID NO: 295585 - DNA, 15 bp, Homo sapiens
agtaagcacccctct

SEQ ID NO: 295586 - DNA, 15 bp, Homo sapiens
tagtaagcacccctc

SEQ ID NO: 295587 - DNA, 15 bp, Homo sapiens
atagtaagcacccct

SEQ ID NO: 295588 - DNA, 15 bp, Homo sapiens
tatagtaagcacccc

SEQ ID NO: 295589 - DNA, 15 bp, Homo sapiens
atatagtaagcaccc

SEQ ID NO: 295590 - DNA, 15 bp, Homo sapiens
catatagtaagcacc

SEQ ID NO: 295591 - DNA, 15 bp, Homo sapiens
ccatatagtaagcac

SEQ ID NO: 295592 - DNA, 15 bp, Homo sapiens
tccatatagtaagca

SEQ ID NO: 295593 - DNA, 15 bp, Homo sapiens
ctccatatagtaagc

SEQ ID NO: 295594 - DNA, 15 bp, Homo sapiens
tctccatatagtaag

SEQ ID NO: 295595 - DNA, 15 bp, Homo sapiens
ttctccatatagtaa

SEQ ID NO: 295596 - DNA, 15 bp, Homo sapiens
gttctccatatagta

SEQ ID NO: 295597 - DNA, 15 bp, Homo sapiens
tgttctccatatagt

SEQ ID NO: 295598 - DNA, 15 bp, Homo sapiens
atgttctccatatag

SEQ ID NO: 295599 - DNA, 15 bp, Homo sapiens
tatgttctccatata

SEQ ID NO: 295600 - DNA, 15 bp, Homo sapiens
ctatgttctccatat

SEQ ID NO: 295601 - DNA, 15 bp, Homo sapiens
tctatgttctccata

SEQ ID NO: 295602 - DNA, 15 bp, Homo sapiens
ttctatgttctccat

SEQ ID NO: 295603 - DNA, 15 bp, Homo sapiens
cttctatgttctcca

SEQ ID NO: 295604 - DNA, 15 bp, Homo sapiens
acttctatgttctcc

SEQ ID NO: 295605 - DNA, 15 bp, Homo sapiens
tacttctatgttctc

SEQ ID NO: 295606 - DNA, 15 bp, Homo sapiens
gtacttctatgttct

SEQ ID NO: 295607 - DNA, 15 bp, Homo sapiens
agtacttctatgttc

SEQ ID NO: 295608 - DNA, 15 bp, Homo sapiens
tagtacttctatgtt

SEQ ID NO: 295609 - DNA, 15 bp, Homo sapiens
ctagtacttctatgt

SEQ ID NO: 295610 - DNA, 15 bp, Homo sapiens
actagtacttctatg

SEQ ID NO: 295611 - DNA, 15 bp, Homo sapiens
aactagtacttctat

SEQ ID NO: 295612 - DNA, 15 bp, Homo sapiens
taactagtacttcta

SEQ ID NO: 295613 - DNA, 15 bp, Homo sapiens
ataactagtacttct

SEQ ID NO: 295614 - DNA, 15 bp, Homo sapiens
aataactagtacttc

SEQ ID NO: 295615 - DNA, 15 bp, Homo sapiens
taataactagtactt

SEQ ID NO: 295616 - DNA, 15 bp, Homo sapiens
ttaataactagtact

SEQ ID NO: 295617 - DNA, 15 bp, Homo sapiens
gttaataactagtac

SEQ ID NO: 295618 - DNA, 15 bp, Homo sapiens
agttaataactagta

SEQ ID NO: 295619 - DNA, 15 bp, Homo sapiens
tagttaataactagt

SEQ ID NO: 295620 - DNA, 15 bp, Homo sapiens
atagttaataactag

SEQ ID NO: 295621 - DNA, 15 bp, Homo sapiens
aatagttaataacta

SEQ ID NO: 295622 - DNA, 15 bp, Homo sapiens
aaatagttaataact

SEQ ID NO: 295623 - DNA, 15 bp, Homo sapiens
aaaatagttaataac

SEQ ID NO: 295624 - DNA, 15 bp, Homo sapiens
aaaaatagttaataa

SEQ ID NO: 295625 - DNA, 15 bp, Homo sapiens
aaaaaatagttaata

SEQ ID NO: 295626 - DNA, 15 bp, Homo sapiens
aaaaaaatagttaat

SEQ ID NO: 295627 - DNA, 15 bp, Homo sapiens
caaaaaaatagttaa

SEQ ID NO: 295628 - DNA, 15 bp, Homo sapiens
acaaaaaaatagtta

SEQ ID NO: 295629 - DNA, 15 bp, Homo sapiens
tacaaaaaaatagtt

SEQ ID NO: 295630 - DNA, 15 bp, Homo sapiens
atacaaaaaaatagt

SEQ ID NO: 295631 - DNA, 15 bp, Homo sapiens
aatacaaaaaaatag

SEQ ID NO: 295632 - DNA, 15 bp, Homo sapiens
taatacaaaaaaata

SEQ ID NO: 295633 - DNA, 15 bp, Homo sapiens
ttaatacaaaaaaat

SEQ ID NO: 295634 - DNA, 15 bp, Homo sapiens
tttaatacaaaaaaa

SEQ ID NO: 295635 - DNA, 15 bp, Homo sapiens
atttaatacaaaaaa

SEQ ID NO: 295636 - DNA, 15 bp, Homo sapiens
aatttaatacaaaaa

SEQ ID NO: 295637 - DNA, 15 bp, Homo sapiens
aaatttaatacaaaa

SEQ ID NO: 295638 - DNA, 15 bp, Homo sapiens
aaaatttaatacaaa

SEQ ID NO: 295639 - DNA, 15 bp, Homo sapiens
caaaatttaatacaa

SEQ ID NO: 295640 - DNA, 15 bp, Homo sapiens
ccaaaatttaataca

SEQ ID NO: 295641 - DNA, 15 bp, Homo sapiens
accaaaatttaatac

SEQ ID NO: 295642 - DNA, 15 bp, Homo sapiens
taccaaaatttaata

SEQ ID NO: 295643 - DNA, 15 bp, Homo sapiens
gtaccaaaatttaat

SEQ ID NO: 295644 - DNA, 15 bp, Homo sapiens
cgtaccaaaatttaa

SEQ ID NO: 295645 - DNA, 15 bp, Homo sapiens
acgtaccaaaattta

SEQ ID NO: 295646 - DNA, 15 bp, Homo sapiens
gacgtaccaaaattt

SEQ ID NO: 295647 - DNA, 15 bp, Homo sapiens
tgacgtaccaaaatt

SEQ ID NO: 295648 - DNA, 15 bp, Homo sapiens
gtgacgtaccaaaat

SEQ ID NO: 295649 - DNA, 15 bp, Homo sapiens
tgtgacgtaccaaaa

SEQ ID NO: 295650 - DNA, 15 bp, Homo sapiens
atgtgacgtaccaaa

SEQ ID NO: 295651 - DNA, 15 bp, Homo sapiens
tatgtgacgtaccaa

SEQ ID NO: 295652 - DNA, 15 bp, Homo sapiens
ttatgtgacgtacca

SEQ ID NO: 295653 - DNA, 15 bp, Homo sapiens
tttatgtgacgtacc

SEQ ID NO: 295654 - DNA, 15 bp, Homo sapiens
gtttatgtgacgtac

SEQ ID NO: 295655 - DNA, 15 bp, Homo sapiens
tgtttatgtgacgta

SEQ ID NO: 295656 - DNA, 15 bp, Homo sapiens
atgtttatgtgacgt

SEQ ID NO: 295657 - DNA, 15 bp, Homo sapiens
aatgtttatgtgacg

SEQ ID NO: 295658 - DNA, 15 bp, Homo sapiens
caatgtttatgtgac

SEQ ID NO: 295659 - DNA, 15 bp, Homo sapiens
tcaatgtttatgtga

SEQ ID NO: 295660 - DNA, 15 bp, Homo sapiens
ctcaatgtttatgtg

SEQ ID NO: 295661 - DNA, 15 bp, Homo sapiens
actcaatgtttatgt

SEQ ID NO: 295662 - DNA, 15 bp, Homo sapiens
gactcaatgtttatg

SEQ ID NO: 295663 - DNA, 15 bp, Homo sapiens
agactcaatgtttat

SEQ ID NO: 295664 - DNA, 15 bp, Homo sapiens
gagactcaatgttta

SEQ ID NO: 295665 - DNA, 15 bp, Homo sapiens
ggagactcaatgttt

SEQ ID NO: 295666 - DNA, 15 bp, Homo sapiens
aggagactcaatgtt

SEQ ID NO: 295667 - DNA, 15 bp, Homo sapiens
aaggagactcaatgt

SEQ ID NO: 295668 - DNA, 15 bp, Homo sapiens
aaaggagactcaatg

SEQ ID NO: 295669 - DNA, 15 bp, Homo sapiens
taaaggagactcaat

SEQ ID NO: 295670 - DNA, 15 bp, Homo sapiens
ttaaaggagactcaa

SEQ ID NO: 295671 - DNA, 15 bp, Homo sapiens
tttaaaggagactca

SEQ ID NO: 295672 - DNA, 15 bp, Homo sapiens
atttaaaggagactc

SEQ ID NO: 295673 - DNA, 15 bp, Homo sapiens
catttaaaggagact

SEQ ID NO: 295674 - DNA, 15 bp, Homo sapiens
acatttaaaggagac

SEQ ID NO: 295675 - DNA, 15 bp, Homo sapiens
cacatttaaaggaga

SEQ ID NO: 295676 - DNA, 15 bp, Homo sapiens
acacatttaaaggag

SEQ ID NO: 295677 - DNA, 15 bp, Homo sapiens
gacacatttaaagga

SEQ ID NO: 295678 - DNA, 15 bp, Homo sapiens
tgacacatttaaagg

SEQ ID NO: 295679 - DNA, 15 bp, Homo sapiens
ttgacacatttaaag

SEQ ID NO: 295680 - DNA, 15 bp, Homo sapiens
tttgacacatttaaa

SEQ ID NO: 295681 - DNA, 15 bp, Homo sapiens
atttgacacatttaa

SEQ ID NO: 295682 - DNA, 15 bp, Homo sapiens
catttgacacattta

SEQ ID NO: 295683 - DNA, 15 bp, Homo sapiens
acatttgacacattt

SEQ ID NO: 295684 - DNA, 15 bp, Homo sapiens
tacatttgacacatt

SEQ ID NO: 295685 - DNA, 15 bp, Homo sapiens
ctacatttgacacat

SEQ ID NO: 295686 - DNA, 15 bp, Homo sapiens
gctacatttgacaca

SEQ ID NO: 295687 - DNA, 15 bp, Homo sapiens
agctacatttgacac

SEQ ID NO: 295688 - DNA, 15 bp, Homo sapiens
cagctacatttgaca

SEQ ID NO: 295689 - DNA, 15 bp, Homo sapiens
tcagctacatttgac

SEQ ID NO: 295690 - DNA, 15 bp, Homo sapiens
gtcagctacatttga

SEQ ID NO: 295691 - DNA, 15 bp, Homo sapiens
agtcagctacatttg

SEQ ID NO: 295692 - DNA, 15 bp, Homo sapiens
aagtcagctacattt

SEQ ID NO: 295693 - DNA, 15 bp, Homo sapiens
taagtcagctacatt

SEQ ID NO: 295694 - DNA, 15 bp, Homo sapiens
gtaagtcagctacat

SEQ ID NO: 295695 - DNA, 15 bp, Homo sapiens
agtaagtcagctaca

SEQ ID NO: 295696 - DNA, 15 bp, Homo sapiens
tagtaagtcagctac

SEQ ID NO: 295697 - DNA, 15 bp, Homo sapiens
ttagtaagtcagcta

SEQ ID NO: 295698 - DNA, 15 bp, Homo sapiens
attagtaagtcagct

SEQ ID NO: 295699 - DNA, 15 bp, Homo sapiens
aattagtaagtcagc

SEQ ID NO: 295700 - DNA, 15 bp, Homo sapiens
caattagtaagtcag

SEQ ID NO: 295701 - DNA, 15 bp, Homo sapiens
ccaattagtaagtca

SEQ ID NO: 295702 - DNA, 15 bp, Homo sapiens
tccaattagtaagtc

SEQ ID NO: 295703 - DNA, 15 bp, Homo sapiens
atccaattagtaagt

SEQ ID NO: 295704 - DNA, 15 bp, Homo sapiens
aatccaattagtaag

SEQ ID NO: 295705 - DNA, 15 bp, Homo sapiens
gaatccaattagtaa

SEQ ID NO: 295706 - DNA, 15 bp, Homo sapiens
agaatccaattagta

SEQ ID NO: 295707 - DNA, 15 bp, Homo sapiens
cagaatccaattagt

SEQ ID NO: 295708 - DNA, 15 bp, Homo sapiens
acagaatccaattag

SEQ ID NO: 295709 - DNA, 15 bp, Homo sapiens
gacagaatccaatta

SEQ ID NO: 295710 - DNA, 15 bp, Homo sapiens
tgacagaatccaatt

SEQ ID NO: 295711 - DNA, 15 bp, Homo sapiens
atgacagaatccaat

SEQ ID NO: 295712 - DNA, 15 bp, Homo sapiens
tatgacagaatccaa

SEQ ID NO: 295713 - DNA, 15 bp, Homo sapiens
gtatgacagaatcca

SEQ ID NO: 295714 - DNA, 15 bp, Homo sapiens
agtatgacagaatcc

SEQ ID NO: 295715 - DNA, 15 bp, Homo sapiens
gagtatgacagaatc

SEQ ID NO: 295716 - DNA, 15 bp, Homo sapiens
agagtatgacagaat

SEQ ID NO: 295717 - DNA, 15 bp, Homo sapiens
aagagtatgacagaa

SEQ ID NO: 295718 - DNA, 15 bp, Homo sapiens
aaagagtatgacaga

SEQ ID NO: 295719 - DNA, 15 bp, Homo sapiens
aaaagagtatgacag

SEQ ID NO: 295720 - DNA, 15 bp, Homo sapiens
aaaaagagtatgaca

SEQ ID NO: 295721 - DNA, 15 bp, Homo sapiens
gaaaaagagtatgac

SEQ ID NO: 295722 - DNA, 15 bp, Homo sapiens
agaaaaagagtatga

SEQ ID NO: 295723 - DNA, 15 bp, Homo sapiens
cagaaaaagagtatg

SEQ ID NO: 295724 - DNA, 15 bp, Homo sapiens
acagaaaaagagtat

SEQ ID NO: 295725 - DNA, 15 bp, Homo sapiens
cacagaaaaagagta

SEQ ID NO: 295726 - DNA, 15 bp, Homo sapiens
ccacagaaaaagagt

SEQ ID NO: 295727 - DNA, 15 bp, Homo sapiens
accacagaaaaagag

SEQ ID NO: 295728 - DNA, 15 bp, Homo sapiens
gaccacagaaaaaga

SEQ ID NO: 295729 - DNA, 15 bp, Homo sapiens
tgaccacagaaaaag

SEQ ID NO: 295730 - DNA, 15 bp, Homo sapiens
gtgaccacagaaaaa

SEQ ID NO: 295731 - DNA, 15 bp, Homo sapiens
ggtgaccacagaaaa

SEQ ID NO: 295732 - DNA, 15 bp, Homo sapiens
tggtgaccacagaaa

SEQ ID NO: 295733 - DNA, 15 bp, Homo sapiens
ttggtgaccacagaa

SEQ ID NO: 295734 - DNA, 15 bp, Homo sapiens
tttggtgaccacaga

SEQ ID NO: 295735 - DNA, 15 bp, Homo sapiens
atttggtgaccacag

SEQ ID NO: 295736 - DNA, 15 bp, Homo sapiens
tatttggtgaccaca

SEQ ID NO: 295737 - DNA, 15 bp, Homo sapiens
atatttggtgaccac

SEQ ID NO: 295738 - DNA, 15 bp, Homo sapiens
aatatttggtgacca

SEQ ID NO: 295739 - DNA, 15 bp, Homo sapiens
taatatttggtgacc

SEQ ID NO: 295740 - DNA, 15 bp, Homo sapiens
ctaatatttggtgac

SEQ ID NO: 295741 - DNA, 15 bp, Homo sapiens
gctaatatttggtga

SEQ ID NO: 295742 - DNA, 15 bp, Homo sapiens
tgctaatatttggtg

SEQ ID NO: 295743 - DNA, 15 bp, Homo sapiens
ttgctaatatttggt

SEQ ID NO: 295744 - DNA, 15 bp, Homo sapiens
tttgctaatatttgg

SEQ ID NO: 295745 - DNA, 15 bp, Homo sapiens
atttgctaatatttg

SEQ ID NO: 295746 - DNA, 15 bp, Homo sapiens
aatttgctaatattt

SEQ ID NO: 295747 - DNA, 15 bp, Homo sapiens
aaatttgctaatatt

SEQ ID NO: 295748 - DNA, 15 bp, Homo sapiens
gaaatttgctaatat

SEQ ID NO: 295749 - DNA, 15 bp, Homo sapiens
agaaatttgctaata

SEQ ID NO: 295750 - DNA, 15 bp, Homo sapiens
aagaaatttgctaat

SEQ ID NO: 295751 - DNA, 15 bp, Homo sapiens
gaagaaatttgctaa

SEQ ID NO: 295752 - DNA, 15 bp, Homo sapiens
tgaagaaatttgcta

SEQ ID NO: 295753 - DNA, 15 bp, Homo sapiens
atgaagaaatttgct

SEQ ID NO: 295754 - DNA, 15 bp, Homo sapiens
aatgaagaaatttgc

SEQ ID NO: 295755 - DNA, 15 bp, Homo sapiens
gaatgaagaaatttg

SEQ ID NO: 295756 - DNA, 15 bp, Homo sapiens
tgaatgaagaaattt

SEQ ID NO: 295757 - DNA, 15 bp, Homo sapiens
ctgaatgaagaaatt

SEQ ID NO: 295758 - DNA, 15 bp, Homo sapiens
actgaatgaagaaat

SEQ ID NO: 295759 - DNA, 15 bp, Homo sapiens
aactgaatgaagaaa

SEQ ID NO: 295760 - DNA, 15 bp, Homo sapiens
taactgaatgaagaa

SEQ ID NO: 295761 - DNA, 15 bp, Homo sapiens
gtaactgaatgaaga

SEQ ID NO: 295762 - DNA, 15 bp, Homo sapiens
tgtaactgaatgaag

SEQ ID NO: 295763 - DNA, 15 bp, Homo sapiens
gtgtaactgaatgaa

SEQ ID NO: 295764 - DNA, 15 bp, Homo sapiens
tgtgtaactgaatga

SEQ ID NO: 295765 - DNA, 15 bp, Homo sapiens
ttgtgtaactgaatg

SEQ ID NO: 295766 - DNA, 15 bp, Homo sapiens
cttgtgtaactgaat

SEQ ID NO: 295767 - DNA, 15 bp, Homo sapiens
acttgtgtaactgaa

SEQ ID NO: 295768 - DNA, 15 bp, Homo sapiens
tacttgtgtaactga

SEQ ID NO: 295769 - DNA, 15 bp, Homo sapiens
gtacttgtgtaactg

SEQ ID NO: 295770 - DNA, 15 bp, Homo sapiens
agtacttgtgtaact

SEQ ID NO: 295771 - DNA, 15 bp, Homo sapiens
aagtacttgtgtaac

SEQ ID NO: 295772 - DNA, 15 bp, Homo sapiens
caagtacttgtgtaa

SEQ ID NO: 295773 - DNA, 15 bp, Homo sapiens
ccaagtacttgtgta

SEQ ID NO: 295774 - DNA, 15 bp, Homo sapiens
gccaagtacttgtgt

SEQ ID NO: 295775 - DNA, 15 bp, Homo sapiens
ggccaagtacttgtg

SEQ ID NO: 295776 - DNA, 15 bp, Homo sapiens
tggccaagtacttgt

SEQ ID NO: 295777 - DNA, 15 bp, Homo sapiens
ttggccaagtacttg

SEQ ID NO: 295778 - DNA, 15 bp, Homo sapiens
gttggccaagtactt

SEQ ID NO: 295779 - DNA, 15 bp, Homo sapiens
tgttggccaagtact

SEQ ID NO: 295780 - DNA, 15 bp, Homo sapiens
atgttggccaagtac

SEQ ID NO: 295781 - DNA, 15 bp, Homo sapiens
tatgttggccaagta

SEQ ID NO: 295782 - DNA, 15 bp, Homo sapiens
gtatgttggccaagt

SEQ ID NO: 295783 - DNA, 15 bp, Homo sapiens
agtatgttggccaag

SEQ ID NO: 295784 - DNA, 15 bp, Homo sapiens
aagtatgttggccaa

SEQ ID NO: 295785 - DNA, 15 bp, Homo sapiens
aaagtatgttggcca

SEQ ID NO: 295786 - DNA, 15 bp, Homo sapiens
aaaagtatgttggcc

SEQ ID NO: 295787 - DNA, 15 bp, Homo sapiens
taaaagtatgttggc

SEQ ID NO: 295788 - DNA, 15 bp, Homo sapiens
gtaaaagtatgttgg

SEQ ID NO: 295789 - DNA, 15 bp, Homo sapiens
tgtaaaagtatgttg

SEQ ID NO: 295790 - DNA, 15 bp, Homo sapiens
atgtaaaagtatgtt

SEQ ID NO: 295791 - DNA, 15 bp, Homo sapiens
tatgtaaaagtatgt

SEQ ID NO: 295792 - DNA, 15 bp, Homo sapiens
ttatgtaaaagtatg

SEQ ID NO: 295793 - DNA, 15 bp, Homo sapiens
cttatgtaaaagtat

SEQ ID NO: 295794 - DNA, 15 bp, Homo sapiens
tcttatgtaaaagta

SEQ ID NO: 295795 - DNA, 15 bp, Homo sapiens
ttcttatgtaaaagt

SEQ ID NO: 295796 - DNA, 15 bp, Homo sapiens
tttcttatgtaaaag

SEQ ID NO: 295797 - DNA, 15 bp, Homo sapiens
ttttcttatgtaaaa

SEQ ID NO: 295798 - DNA, 15 bp, Homo sapiens
attttcttatgtaaa

SEQ ID NO: 295799 - DNA, 15 bp, Homo sapiens
tattttcttatgtaa

SEQ ID NO: 295800 - DNA, 15 bp, Homo sapiens
gtattttcttatgta

SEQ ID NO: 295801 - DNA, 15 bp, Homo sapiens
agtattttcttatgt

SEQ ID NO: 295802 - DNA, 15 bp, Homo sapiens
aagtattttcttatg

SEQ ID NO: 295803 - DNA, 15 bp, Homo sapiens
taagtattttcttat

SEQ ID NO: 295804 - DNA, 15 bp, Homo sapiens
ctaagtattttctta

SEQ ID NO: 295805 - DNA, 15 bp, Homo sapiens
cctaagtattttctt

SEQ ID NO: 295806 - DNA, 15 bp, Homo sapiens
tcctaagtattttct

SEQ ID NO: 295807 - DNA, 15 bp, Homo sapiens
atcctaagtattttc

SEQ ID NO: 295808 - DNA, 15 bp, Homo sapiens
catcctaagtatttt

SEQ ID NO: 295809 - DNA, 15 bp, Homo sapiens
ccatcctaagtattt

SEQ ID NO: 295810 - DNA, 15 bp, Homo sapiens
cccatcctaagtatt

SEQ ID NO: 295811 - DNA, 15 bp, Homo sapiens
gcccatcctaagtat

SEQ ID NO: 295812 - DNA, 15 bp, Homo sapiens
agcccatcctaagta

SEQ ID NO: 295813 - DNA, 15 bp, Homo sapiens
cagcccatcctaagt

SEQ ID NO: 295814 - DNA, 15 bp, Homo sapiens
ccagcccatcctaag

SEQ ID NO: 295815 - DNA, 15 bp, Homo sapiens
gccagcccatcctaa

SEQ ID NO: 295816 - DNA, 15 bp, Homo sapiens
tgccagcccatccta

SEQ ID NO: 295817 - DNA, 15 bp, Homo sapiens
ttgccagcccatcct

SEQ ID NO: 295818 - DNA, 15 bp, Homo sapiens
cttgccagcccatcc

SEQ ID NO: 295819 - DNA, 15 bp, Homo sapiens
tcttgccagcccatc

SEQ ID NO: 295820 - DNA, 15 bp, Homo sapiens
atcttgccagcccat

SEQ ID NO: 295821 - DNA, 15 bp, Homo sapiens
tatcttgccagccca

SEQ ID NO: 295822 - DNA, 15 bp, Homo sapiens
ctatcttgccagccc

SEQ ID NO: 295823 - DNA, 15 bp, Homo sapiens
gctatcttgccagcc

SEQ ID NO: 295824 - DNA, 15 bp, Homo sapiens
ggctatcttgccagc

SEQ ID NO: 295825 - DNA, 15 bp, Homo sapiens
tggctatcttgccag

SEQ ID NO: 295826 - DNA, 15 bp, Homo sapiens
ttggctatcttgcca

SEQ ID NO: 295827 - DNA, 15 bp, Homo sapiens
tttggctatcttgcc

SEQ ID NO: 295828 - DNA, 15 bp, Homo sapiens
atttggctatcttgc

SEQ ID NO: 295829 - DNA, 15 bp, Homo sapiens
tatttggctatcttg

SEQ ID NO: 295830 - DNA, 15 bp, Homo sapiens
ctatttggctatctt

SEQ ID NO: 295831 - DNA, 15 bp, Homo sapiens
cctatttggctatct

SEQ ID NO: 295832 - DNA, 15 bp, Homo sapiens
tcctatttggctatc

SEQ ID NO: 295833 - DNA, 15 bp, Homo sapiens
ttcctatttggctat

SEQ ID NO: 295834 - DNA, 15 bp, Homo sapiens
gttcctatttggcta

SEQ ID NO: 295835 - DNA, 15 bp, Homo sapiens
tgttcctatttggct

SEQ ID NO: 295836 - DNA, 15 bp, Homo sapiens
ctgttcctatttggc

SEQ ID NO: 295837 - DNA, 15 bp, Homo sapiens
gctgttcctatttgg

SEQ ID NO: 295838 - DNA, 15 bp, Homo sapiens
agctgttcctatttg

SEQ ID NO: 295839 - DNA, 15 bp, Homo sapiens
gagctgttcctattt

SEQ ID NO: 295840 - DNA, 15 bp, Homo sapiens
agagctgttcctatt

SEQ ID NO: 295841 - DNA, 15 bp, Homo sapiens
cagagctgttcctat

SEQ ID NO: 295842 - DNA, 15 bp, Homo sapiens
ccagagctgttccta

SEQ ID NO: 295843 - DNA, 15 bp, Homo sapiens
accagagctgttcct

SEQ ID NO: 295844 - DNA, 15 bp, Homo sapiens
gaccagagctgttcc

SEQ ID NO: 295845 - DNA, 15 bp, Homo sapiens
agaccagagctgttc

SEQ ID NO: 295846 - DNA, 15 bp, Homo sapiens
cagaccagagctgtt

SEQ ID NO: 295847 - DNA, 15 bp, Homo sapiens
gcagaccagagctgt

SEQ ID NO: 295848 - DNA, 15 bp, Homo sapiens
tgcagaccagagctg

SEQ ID NO: 295849 - DNA, 15 bp, Homo sapiens
ctgcagaccagagct

SEQ ID NO: 295850 - DNA, 15 bp, Homo sapiens
gctgcagaccagagc

SEQ ID NO: 295851 - DNA, 15 bp, Homo sapiens
agctgcagaccagag

SEQ ID NO: 295852 - DNA, 15 bp, Homo sapiens
cagctgcagaccaga

SEQ ID NO: 295853 - DNA, 15 bp, Homo sapiens
gcagctgcagaccag

SEQ ID NO: 295854 - DNA, 15 bp, Homo sapiens
ggcagctgcagacca

SEQ ID NO: 295855 - DNA, 15 bp, Homo sapiens
tggcagctgcagacc

SEQ ID NO: 295856 - DNA, 15 bp, Homo sapiens
ctggcagctgcagac

SEQ ID NO: 295857 - DNA, 15 bp, Homo sapiens
gctggcagctgcaga

SEQ ID NO: 295858 - DNA, 15 bp, Homo sapiens
cgctggcagctgcag

SEQ ID NO: 295859 - DNA, 15 bp, Homo sapiens
tcgctggcagctgca

SEQ ID NO: 295860 - DNA, 15 bp, Homo sapiens
ctcgctggcagctgc

SEQ ID NO: 295861 - DNA, 15 bp, Homo sapiens
tctcgctggcagctg

SEQ ID NO: 295862 - DNA, 15 bp, Homo sapiens
atctcgctggcagct

SEQ ID NO: 295863 - DNA, 15 bp, Homo sapiens
gatctcgctggcagc

SEQ ID NO: 295864 - DNA, 15 bp, Homo sapiens
tgatctcgctggcag

SEQ ID NO: 295865 - DNA, 15 bp, Homo sapiens
ttgatctcgctggca

SEQ ID NO: 295866 - DNA, 15 bp, Homo sapiens
gttgatctcgctggc

SEQ ID NO: 295867 - DNA, 15 bp, Homo sapiens
ggttgatctcgctgg

SEQ ID NO: 295868 - DNA, 15 bp, Homo sapiens
gggttgatctcgctg

SEQ ID NO: 295869 - DNA, 15 bp, Homo sapiens
tgggttgatctcgct

SEQ ID NO: 295870 - DNA, 15 bp, Homo sapiens
ctgggttgatctcgc

SEQ ID NO: 295871 - DNA, 15 bp, Homo sapiens
tctgggttgatctcg

SEQ ID NO: 295872 - DNA, 15 bp, Homo sapiens
ttctgggttgatctc

SEQ ID NO: 295873 - DNA, 15 bp, Homo sapiens
cttctgggttgatct

SEQ ID NO: 295874 - DNA, 15 bp, Homo sapiens
ccttctgggttgatc

SEQ ID NO: 295875 - DNA, 15 bp, Homo sapiens
gccttctgggttgat

SEQ ID NO: 295876 - DNA, 15 bp, Homo sapiens
tgccttctgggttga

SEQ ID NO: 295877 - DNA, 15 bp, Homo sapiens
ctgccttctgggttg

SEQ ID NO: 295878 - DNA, 15 bp, Homo sapiens
cctgccttctgggtt

SEQ ID NO: 295879 - DNA, 15 bp, Homo sapiens
acctgccttctgggt

SEQ ID NO: 295880 - DNA, 15 bp, Homo sapiens
cacctgccttctggg

SEQ ID NO: 295881 - DNA, 15 bp, Homo sapiens
tcacctgccttctgg

SEQ ID NO: 295882 - DNA, 15 bp, Homo sapiens
atcacctgccttctg

SEQ ID NO: 295883 - DNA, 15 bp, Homo sapiens
aatcacctgccttct

SEQ ID NO: 295884 - DNA, 15 bp, Homo sapiens
aaatcacctgccttc

SEQ ID NO: 295885 - DNA, 15 bp, Homo sapiens
gaaatcacctgcctt

SEQ ID NO: 295886 - DNA, 15 bp, Homo sapiens
agaaatcacctgcct

SEQ ID NO: 295887 - DNA, 15 bp, Homo sapiens
gagaaatcacctgcc

SEQ ID NO: 295888 - DNA, 15 bp, Homo sapiens
ggagaaatcacctgc

SEQ ID NO: 295889 - DNA, 15 bp, Homo sapiens
tggagaaatcacctg

SEQ ID NO: 295890 - DNA, 15 bp, Homo sapiens
atggagaaatcacct

SEQ ID NO: 295891 - DNA, 15 bp, Homo sapiens
aatggagaaatcacc

SEQ ID NO: 295892 - DNA, 15 bp, Homo sapiens
aaatggagaaatcac

SEQ ID NO: 295893 - DNA, 15 bp, Homo sapiens
gaaatggagaaatca

SEQ ID NO: 295894 - DNA, 15 bp, Homo sapiens
ggaaatggagaaatc

SEQ ID NO: 295895 - DNA, 15 bp, Homo sapiens
tggaaatggagaaat

SEQ ID NO: 295896 - DNA, 15 bp, Homo sapiens
ttggaaatggagaaa

SEQ ID NO: 295897 - DNA, 15 bp, Homo sapiens
gttggaaatggagaa

SEQ ID NO: 295898 - DNA, 15 bp, Homo sapiens
agttggaaatggaga

SEQ ID NO: 295899 - DNA, 15 bp, Homo sapiens
cagttggaaatggag

SEQ ID NO: 295900 - DNA, 15 bp, Homo sapiens
tcagttggaaatgga

SEQ ID NO: 295901 - DNA, 15 bp, Homo sapiens
ctcagttggaaatgg

SEQ ID NO: 295902 - DNA, 15 bp, Homo sapiens
cctcagttggaaatg

SEQ ID NO: 295903 - DNA, 15 bp, Homo sapiens
acctcagttggaaat

SEQ ID NO: 295904 - DNA, 15 bp, Homo sapiens
tacctcagttggaaa

SEQ ID NO: 295905 - DNA, 15 bp, Homo sapiens
gtacctcagttggaa

SEQ ID NO: 295906 - DNA, 15 bp, Homo sapiens
ggtacctcagttgga

SEQ ID NO: 295907 - DNA, 15 bp, Homo sapiens
aggtacctcagttgg

SEQ ID NO: 295908 - DNA, 15 bp, Homo sapiens
caggtacctcagttg

SEQ ID NO: 295909 - DNA, 15 bp, Homo sapiens
ccaggtacctcagtt

SEQ ID NO: 295910 - DNA, 15 bp, Homo sapiens
gccaggtacctcagt

SEQ ID NO: 295911 - DNA, 15 bp, Homo sapiens
agccaggtacctcag

SEQ ID NO: 295912 - DNA, 15 bp, Homo sapiens
gagccaggtacctca

SEQ ID NO: 295913 - DNA, 15 bp, Homo sapiens
tgagccaggtacctc

SEQ ID NO: 295914 - DNA, 15 bp, Homo sapiens
atgagccaggtacct

SEQ ID NO: 295915 - DNA, 15 bp, Homo sapiens
gatgagccaggtacc

SEQ ID NO: 295916 - DNA, 15 bp, Homo sapiens
agatgagccaggtac

SEQ ID NO: 295917 - DNA, 15 bp, Homo sapiens
gagatgagccaggta

SEQ ID NO: 295918 - DNA, 15 bp, Homo sapiens
tgagatgagccaggt

SEQ ID NO: 295919 - DNA, 15 bp, Homo sapiens
atgagatgagccagg

SEQ ID NO: 295920 - DNA, 15 bp, Homo sapiens
aatgagatgagccag

SEQ ID NO: 295921 - DNA, 15 bp, Homo sapiens
caatgagatgagcca

SEQ ID NO: 295922 - DNA, 15 bp, Homo sapiens
ccaatgagatgagcc

SEQ ID NO: 295923 - DNA, 15 bp, Homo sapiens
cccaatgagatgagc

SEQ ID NO: 295924 - DNA, 15 bp, Homo sapiens
tcccaatgagatgag

SEQ ID NO: 295925 - DNA, 15 bp, Homo sapiens
gtcccaatgagatga

SEQ ID NO: 295926 - DNA, 15 bp, Homo sapiens
agtcccaatgagatg

SEQ ID NO: 295927 - DNA, 15 bp, Homo sapiens
cagtcccaatgagat

SEQ ID NO: 295928 - DNA, 15 bp, Homo sapiens
ccagtcccaatgaga

SEQ ID NO: 295929 - DNA, 15 bp, Homo sapiens
accagtcccaatgag

SEQ ID NO: 295930 - DNA, 15 bp, Homo sapiens
aaccagtcccaatga

SEQ ID NO: 295931 - DNA, 15 bp, Homo sapiens
taaccagtcccaatg

SEQ ID NO: 295932 - DNA, 15 bp, Homo sapiens
ctaaccagtcccaat

SEQ ID NO: 295933 - DNA, 15 bp, Homo sapiens
tctaaccagtcccaa

SEQ ID NO: 295934 - DNA, 15 bp, Homo sapiens
gtctaaccagtccca

SEQ ID NO: 295935 - DNA, 15 bp, Homo sapiens
tgtctaaccagtccc

SEQ ID NO: 295936 - DNA, 15 bp, Homo sapiens
ctgtctaaccagtcc

SEQ ID NO: 295937 - DNA, 15 bp, Homo sapiens
actgtctaaccagtc

SEQ ID NO: 295938 - DNA, 15 bp, Homo sapiens
cactgtctaaccagt

SEQ ID NO: 295939 - DNA, 15 bp, Homo sapiens
ccactgtctaaccag

SEQ ID NO: 295940 - DNA, 15 bp, Homo sapiens
tccactgtctaacca

SEQ ID NO: 295941 - DNA, 15 bp, Homo sapiens
atccactgtctaacc

SEQ ID NO: 295942 - DNA, 15 bp, Homo sapiens
catccactgtctaac

SEQ ID NO: 295943 - DNA, 15 bp, Homo sapiens
gcatccactgtctaa

SEQ ID NO: 295944 - DNA, 15 bp, Homo sapiens
tgcatccactgtcta

SEQ ID NO: 295945 - DNA, 15 bp, Homo sapiens
ctgcatccactgtct

SEQ ID NO: 295946 - DNA, 15 bp, Homo sapiens
gctgcatccactgtc

SEQ ID NO: 295947 - DNA, 15 bp, Homo sapiens
ggctgcatccactgt

SEQ ID NO: 295948 - DNA, 15 bp, Homo sapiens
gggctgcatccactg

SEQ ID NO: 295949 - DNA, 15 bp, Homo sapiens
tgggctgcatccact

SEQ ID NO: 295950 - DNA, 15 bp, Homo sapiens
gtgggctgcatccac

SEQ ID NO: 295951 - DNA, 15 bp, Homo sapiens
cgtgggctgcatcca

SEQ ID NO: 295952 - DNA, 15 bp, Homo sapiens
ccgtgggctgcatcc

SEQ ID NO: 295953 - DNA, 15 bp, Homo sapiens
tccgtgggctgcatc

SEQ ID NO: 295954 - DNA, 15 bp, Homo sapiens
ctccgtgggctgcat

SEQ ID NO: 295955 - DNA, 15 bp, Homo sapiens
cctccgtgggctgca

SEQ ID NO: 295956 - DNA, 15 bp, Homo sapiens
ccctccgtgggctgc

SEQ ID NO: 295957 - DNA, 15 bp, Homo sapiens
gccctccgtgggctg

SEQ ID NO: 295958 - DNA, 15 bp, Homo sapiens
tgccctccgtgggct

SEQ ID NO: 295959 - DNA, 15 bp, Homo sapiens
ttgccctccgtgggc

SEQ ID NO: 295960 - DNA, 15 bp, Homo sapiens
cttgccctccgtggg

SEQ ID NO: 295961 - DNA, 15 bp, Homo sapiens
gcttgccctccgtgg

SEQ ID NO: 295962 - DNA, 15 bp, Homo sapiens
agcttgccctccgtg

SEQ ID NO: 295963 - DNA, 15 bp, Homo sapiens
cagcttgccctccgt

SEQ ID NO: 295964 - DNA, 15 bp, Homo sapiens
tcagcttgccctccg

SEQ ID NO: 295965 - DNA, 15 bp, Homo sapiens
ttcagcttgccctcc

SEQ ID NO: 295966 - DNA, 15 bp, Homo sapiens
cttcagcttgccctc

SEQ ID NO: 295967 - DNA, 15 bp, Homo sapiens
gcttcagcttgccct

SEQ ID NO: 295968 - DNA, 15 bp, Homo sapiens
tgcttcagcttgccc

SEQ ID NO: 295969 - DNA, 15 bp, Homo sapiens
ctgcttcagcttgcc

SEQ ID NO: 295970 - DNA, 15 bp, Homo sapiens
cctgcttcagcttgc

SEQ ID NO: 295971 - DNA, 15 bp, Homo sapiens
tcctgcttcagcttg

SEQ ID NO: 295972 - DNA, 15 bp, Homo sapiens
atcctgcttcagctt

SEQ ID NO: 295973 - DNA, 15 bp, Homo sapiens
catcctgcttcagct

SEQ ID NO: 295974 - DNA, 15 bp, Homo sapiens
ccatcctgcttcagc

SEQ ID NO: 295975 - DNA, 15 bp, Homo sapiens
cccatcctgcttcag

SEQ ID NO: 295976 - DNA, 15 bp, Homo sapiens
ccccatcctgcttca

SEQ ID NO: 295977 - DNA, 15 bp, Homo sapiens
gccccatcctgcttc

SEQ ID NO: 295978 - DNA, 15 bp, Homo sapiens
tgccccatcctgctt

SEQ ID NO: 295979 - DNA, 15 bp, Homo sapiens
atgccccatcctgct

SEQ ID NO: 295980 - DNA, 15 bp, Homo sapiens
gatgccccatcctgc

SEQ ID NO: 295981 - DNA, 15 bp, Homo sapiens
tgatgccccatcctg

SEQ ID NO: 295982 - DNA, 15 bp, Homo sapiens
gtgatgccccatcct

SEQ ID NO: 295983 - DNA, 15 bp, Homo sapiens
ggtgatgccccatcc

SEQ ID NO: 295984 - DNA, 15 bp, Homo sapiens
aggtgatgccccatc

SEQ ID NO: 295985 - DNA, 15 bp, Homo sapiens
gaggtgatgccccat

SEQ ID NO: 295986 - DNA, 15 bp, Homo sapiens
tgaggtgatgcccca

SEQ ID NO: 295987 - DNA, 15 bp, Homo sapiens
gtgaggtgatgcccc

SEQ ID NO: 295988 - DNA, 15 bp, Homo sapiens
ggtgaggtgatgccc

SEQ ID NO: 295989 - DNA, 15 bp, Homo sapiens
gggtgaggtgatgcc

SEQ ID NO: 295990 - DNA, 15 bp, Homo sapiens
cgggtgaggtgatgc

SEQ ID NO: 295991 - DNA, 15 bp, Homo sapiens
ccgggtgaggtgatg

SEQ ID NO: 295992 - DNA, 15 bp, Homo sapiens
cccgggtgaggtgat

SEQ ID NO: 295993 - DNA, 15 bp, Homo sapiens
tcccgggtgaggtga

SEQ ID NO: 295994 - DNA, 15 bp, Homo sapiens
ttcccgggtgaggtg

SEQ ID NO: 295995 - DNA, 15 bp, Homo sapiens
cttcccgggtgaggt

SEQ ID NO: 295996 - DNA, 15 bp, Homo sapiens
gcttcccgggtgagg

SEQ ID NO: 295997 - DNA, 15 bp, Homo sapiens
tgcttcccgggtgag

SEQ ID NO: 295998 - DNA, 15 bp, Homo sapiens
gtgcttcccgggtga

SEQ ID NO: 295999 - DNA, 15 bp, Homo sapiens
tgtgcttcccgggtg

SEQ ID NO: 296000 - DNA, 15 bp, Homo sapiens
ttgtgcttcccgggt

SEQ ID NO: 296001 - DNA, 15 bp, Homo sapiens
cttgtgcttcccggg

SEQ ID NO: 296002 - DNA, 15 bp, Homo sapiens
ccttgtgcttcccgg

SEQ ID NO: 296003 - DNA, 15 bp, Homo sapiens
cccttgtgcttcccg

SEQ ID NO: 296004 - DNA, 15 bp, Homo sapiens
ccccttgtgcttccc

SEQ ID NO: 296005 - DNA, 15 bp, Homo sapiens
accccttgtgcttcc

SEQ ID NO: 296006 - DNA, 15 bp, Homo sapiens
aaccccttgtgcttc

SEQ ID NO: 296007 - DNA, 15 bp, Homo sapiens
caaccccttgtgctt

SEQ ID NO: 296008 - DNA, 15 bp, Homo sapiens
ccaaccccttgtgct

SEQ ID NO: 296009 - DNA, 15 bp, Homo sapiens
cccaaccccttgtgc

SEQ ID NO: 296010 - DNA, 15 bp, Homo sapiens
ccccaaccccttgtg

SEQ ID NO: 296011 - DNA, 15 bp, Homo sapiens
tccccaaccccttgt

SEQ ID NO: 296012 - DNA, 15 bp, Homo sapiens
ttccccaaccccttg

SEQ ID NO: 296013 - DNA, 15 bp, Homo sapiens
gttccccaacccctt

SEQ ID NO: 296014 - DNA, 15 bp, Homo sapiens
agttccccaacccct

SEQ ID NO: 296015 - DNA, 15 bp, Homo sapiens
gagttccccaacccc

SEQ ID NO: 296016 - DNA, 15 bp, Homo sapiens
ggagttccccaaccc

SEQ ID NO: 296017 - DNA, 15 bp, Homo sapiens
gggagttccccaacc

SEQ ID NO: 296018 - DNA, 15 bp, Homo sapiens
agggagttccccaac

SEQ ID NO: 296019 - DNA, 15 bp, Homo sapiens
gagggagttccccaa

SEQ ID NO: 296020 - DNA, 15 bp, Homo sapiens
ggagggagttcccca

SEQ ID NO: 296021 - DNA, 15 bp, Homo sapiens
gggagggagttcccc

SEQ ID NO: 296022 - DNA, 15 bp, Homo sapiens
ggggagggagttccc

SEQ ID NO: 296023 - DNA, 15 bp, Homo sapiens
aggggagggagttcc

SEQ ID NO: 296024 - DNA, 15 bp, Homo sapiens
taggggagggagttc

SEQ ID NO: 296025 - DNA, 15 bp, Homo sapiens
ctaggggagggagtt

SEQ ID NO: 296026 - DNA, 15 bp, Homo sapiens
gctaggggagggagt

SEQ ID NO: 296027 - DNA, 15 bp, Homo sapiens
ggctaggggagggag

SEQ ID NO: 296028 - DNA, 15 bp, Homo sapiens
tggctaggggaggga

SEQ ID NO: 296029 - DNA, 15 bp, Homo sapiens
ttggctaggggaggg

SEQ ID NO: 296030 - DNA, 15 bp, Homo sapiens
cttggctaggggagg

SEQ ID NO: 296031 - DNA, 15 bp, Homo sapiens
ccttggctaggggag

SEQ ID NO: 296032 - DNA, 15 bp, Homo sapiens
cccttggctagggga

SEQ ID NO: 296033 - DNA, 15 bp, Homo sapiens
tcccttggctagggg

SEQ ID NO: 296034 - DNA, 15 bp, Homo sapiens
ttcccttggctaggg

SEQ ID NO: 296035 - DNA, 15 bp, Homo sapiens
cttcccttggctagg

SEQ ID NO: 296036 - DNA, 15 bp, Homo sapiens
gcttcccttggctag

SEQ ID NO: 296037 - DNA, 15 bp, Homo sapiens
agcttcccttggcta

SEQ ID NO: 296038 - DNA, 15 bp, Homo sapiens
cagcttcccttggct

SEQ ID NO: 296039 - DNA, 15 bp, Homo sapiens
acagcttcccttggc

SEQ ID NO: 296040 - DNA, 15 bp, Homo sapiens
cacagcttcccttgg

SEQ ID NO: 296041 - DNA, 15 bp, Homo sapiens
tcacagcttcccttg

SEQ ID NO: 296042 - DNA, 15 bp, Homo sapiens
gtcacagcttccctt

SEQ ID NO: 296043 - DNA, 15 bp, Homo sapiens
tgtcacagcttccct

SEQ ID NO: 296044 - DNA, 15 bp, Homo sapiens
ctgtcacagcttccc

SEQ ID NO: 296045 - DNA, 15 bp, Homo sapiens
tctgtcacagcttcc

SEQ ID NO: 296046 - DNA, 15 bp, Homo sapiens
gtctgtcacagcttc

SEQ ID NO: 296047 - DNA, 15 bp, Homo sapiens
agtctgtcacagctt

SEQ ID NO: 296048 - DNA, 15 bp, Homo sapiens
cagtctgtcacagct

SEQ ID NO: 296049 - DNA, 15 bp, Homo sapiens
acagtctgtcacagc

SEQ ID NO: 296050 - DNA, 15 bp, Homo sapiens
cacagtctgtcacag

SEQ ID NO: 296051 - DNA, 15 bp, Homo sapiens
acacagtctgtcaca

SEQ ID NO: 296052 - DNA, 15 bp, Homo sapiens
gacacagtctgtcac

SEQ ID NO: 296053 - DNA, 15 bp, Homo sapiens
tgacacagtctgtca

SEQ ID NO: 296054 - DNA, 15 bp, Homo sapiens
atgacacagtctgtc

SEQ ID NO: 296055 - DNA, 15 bp, Homo sapiens
catgacacagtctgt

SEQ ID NO: 296056 - DNA, 15 bp, Homo sapiens
tcatgacacagtctg

SEQ ID NO: 296057 - DNA, 15 bp, Homo sapiens
ctcatgacacagtct

SEQ ID NO: 296058 - DNA, 15 bp, Homo sapiens
cctcatgacacagtc

SEQ ID NO: 296059 - DNA, 15 bp, Homo sapiens
tcctcatgacacagt

SEQ ID NO: 296060 - DNA, 15 bp, Homo sapiens
ttcctcatgacacag

SEQ ID NO: 296061 - DNA, 15 bp, Homo sapiens
gttcctcatgacaca

SEQ ID NO: 296062 - DNA, 15 bp, Homo sapiens
tgttcctcatgacac

SEQ ID NO: 296063 - DNA, 15 bp, Homo sapiens
atgttcctcatgaca

SEQ ID NO: 296064 - DNA, 15 bp, Homo sapiens
aatgttcctcatgac

SEQ ID NO: 296065 - DNA, 15 bp, Homo sapiens
caatgttcctcatga

SEQ ID NO: 296066 - DNA, 15 bp, Homo sapiens
gcaatgttcctcatg

SEQ ID NO: 296067 - DNA, 15 bp, Homo sapiens
tgcaatgttcctcat

SEQ ID NO: 296068 - DNA, 15 bp, Homo sapiens
atgcaatgttcctca

SEQ ID NO: 296069 - DNA, 15 bp, Homo sapiens
aatgcaatgttcctc

SEQ ID NO: 296070 - DNA, 15 bp, Homo sapiens
gaatgcaatgttcct

SEQ ID NO: 296071 - DNA, 15 bp, Homo sapiens
ggaatgcaatgttcc

SEQ ID NO: 296072 - DNA, 15 bp, Homo sapiens
tggaatgcaatgttc

SEQ ID NO: 296073 - DNA, 15 bp, Homo sapiens
ctggaatgcaatgtt

SEQ ID NO: 296074 - DNA, 15 bp, Homo sapiens
gctggaatgcaatgt

SEQ ID NO: 296075 - DNA, 15 bp, Homo sapiens
ggctggaatgcaatg

SEQ ID NO: 296076 - DNA, 15 bp, Homo sapiens
gggctggaatgcaat

SEQ ID NO: 296077 - DNA, 15 bp, Homo sapiens
tgggctggaatgcaa

SEQ ID NO: 296078 - DNA, 15 bp, Homo sapiens
ctgggctggaatgca

SEQ ID NO: 296079 - DNA, 15 bp, Homo sapiens
tctgggctggaatgc

SEQ ID NO: 296080 - DNA, 15 bp, Homo sapiens
atctgggctggaatg

SEQ ID NO: 296081 - DNA, 15 bp, Homo sapiens
tatctgggctggaat

SEQ ID NO: 296082 - DNA, 15 bp, Homo sapiens
gtatctgggctggaa

SEQ ID NO: 296083 - DNA, 15 bp, Homo sapiens
agtatctgggctgga

SEQ ID NO: 296084 - DNA, 15 bp, Homo sapiens
tagtatctgggctgg

SEQ ID NO: 296085 - DNA, 15 bp, Homo sapiens
atagtatctgggctg

SEQ ID NO: 296086 - DNA, 15 bp, Homo sapiens
catagtatctgggct

SEQ ID NO: 296087 - DNA, 15 bp, Homo sapiens
gcatagtatctgggc

SEQ ID NO: 296088 - DNA, 15 bp, Homo sapiens
agcatagtatctggg

SEQ ID NO: 296089 - DNA, 15 bp, Homo sapiens
aagcatagtatctgg

SEQ ID NO: 296090 - DNA, 15 bp, Homo sapiens
aaagcatagtatctg

SEQ ID NO: 296091 - DNA, 15 bp, Homo sapiens
aaaagcatagtatct

SEQ ID NO: 296092 - DNA, 15 bp, Homo sapiens
gaaaagcatagtatc

SEQ ID NO: 296093 - DNA, 15 bp, Homo sapiens
ggaaaagcatagtat

SEQ ID NO: 296094 - DNA, 15 bp, Homo sapiens
gggaaaagcatagta

SEQ ID NO: 296095 - DNA, 15 bp, Homo sapiens
tgggaaaagcatagt

SEQ ID NO: 296096 - DNA, 15 bp, Homo sapiens
gtgggaaaagcatag

SEQ ID NO: 296097 - DNA, 15 bp, Homo sapiens
tgtgggaaaagcata

SEQ ID NO: 296098 - DNA, 15 bp, Homo sapiens
ctgtgggaaaagcat

SEQ ID NO: 296099 - DNA, 15 bp, Homo sapiens
actgtgggaaaagca

SEQ ID NO: 296100 - DNA, 15 bp, Homo sapiens
gactgtgggaaaagc

SEQ ID NO: 296101 - DNA, 15 bp, Homo sapiens
agactgtgggaaaag

SEQ ID NO: 296102 - DNA, 15 bp, Homo sapiens
aagactgtgggaaaa

SEQ ID NO: 296103 - DNA, 15 bp, Homo sapiens
gaagactgtgggaaa

SEQ ID NO: 296104 - DNA, 15 bp, Homo sapiens
cgaagactgtgggaa

SEQ ID NO: 296105 - DNA, 15 bp, Homo sapiens
gcgaagactgtggga

SEQ ID NO: 296106 - DNA, 15 bp, Homo sapiens
tgcgaagactgtggg

SEQ ID NO: 296107 - DNA, 15 bp, Homo sapiens
ttgcgaagactgtgg

SEQ ID NO: 296108 - DNA, 15 bp, Homo sapiens
gttgcgaagactgtg

SEQ ID NO: 296109 - DNA, 15 bp, Homo sapiens
ggttgcgaagactgt

SEQ ID NO: 296110 - DNA, 15 bp, Homo sapiens
gggttgcgaagactg

SEQ ID NO: 296111 - DNA, 15 bp, Homo sapiens
tgggttgcgaagact

SEQ ID NO: 296112 - DNA, 15 bp, Homo sapiens
gtgggttgcgaagac

SEQ ID NO: 296113 - DNA, 15 bp, Homo sapiens
tgtgggttgcgaaga

SEQ ID NO: 296114 - DNA, 15 bp, Homo sapiens
ctgtgggttgcgaag

SEQ ID NO: 296115 - DNA, 15 bp, Homo sapiens
tctgtgggttgcgaa

SEQ ID NO: 296116 - DNA, 15 bp, Homo sapiens
gtctgtgggttgcga

SEQ ID NO: 296117 - DNA, 15 bp, Homo sapiens
ggtctgtgggttgcg

SEQ ID NO: 296118 - DNA, 15 bp, Homo sapiens
tggtctgtgggttgc

SEQ ID NO: 296119 - DNA, 15 bp, Homo sapiens
ctggtctgtgggttg

SEQ ID NO: 296120 - DNA, 15 bp, Homo sapiens
cctggtctgtgggtt

SEQ ID NO: 296121 - DNA, 15 bp, Homo sapiens
tcctggtctgtgggt

SEQ ID NO: 296122 - DNA, 15 bp, Homo sapiens
ctcctggtctgtggg

SEQ ID NO: 296123 - DNA, 15 bp, Homo sapiens
tctcctggtctgtgg

SEQ ID NO: 296124 - DNA, 15 bp, Homo sapiens
atctcctggtctgtg

SEQ ID NO: 296125 - DNA, 15 bp, Homo sapiens
aatctcctggtctgt

SEQ ID NO: 296126 - DNA, 15 bp, Homo sapiens
gaatctcctggtctg

SEQ ID NO: 296127 - DNA, 15 bp, Homo sapiens
ggaatctcctggtct

SEQ ID NO: 296128 - DNA, 15 bp, Homo sapiens
gggaatctcctggtc

SEQ ID NO: 296129 - DNA, 15 bp, Homo sapiens
agggaatctcctggt

SEQ ID NO: 296130 - DNA, 15 bp, Homo sapiens
gagggaatctcctgg

SEQ ID NO: 296131 - DNA, 15 bp, Homo sapiens
cgagggaatctcctg

SEQ ID NO: 296132 - DNA, 15 bp, Homo sapiens
ccgagggaatctcct

SEQ ID NO: 296133 - DNA, 15 bp, Homo sapiens
cccgagggaatctcc

SEQ ID NO: 296134 - DNA, 15 bp, Homo sapiens
acccgagggaatctc

SEQ ID NO: 296135 - DNA, 15 bp, Homo sapiens
cacccgagggaatct

SEQ ID NO: 296136 - DNA, 15 bp, Homo sapiens
gcacccgagggaatc

SEQ ID NO: 296137 - DNA, 15 bp, Homo sapiens
ggcacccgagggaat

SEQ ID NO: 296138 - DNA, 15 bp, Homo sapiens
aggcacccgagggaa

SEQ ID NO: 296139 - DNA, 15 bp, Homo sapiens
taggcacccgaggga

SEQ ID NO: 296140 - DNA, 15 bp, Homo sapiens
gtaggcacccgaggg

SEQ ID NO: 296141 - DNA, 15 bp, Homo sapiens
tgtaggcacccgagg

SEQ ID NO: 296142 - DNA, 15 bp, Homo sapiens
gtgtaggcacccgag

SEQ ID NO: 296143 - DNA, 15 bp, Homo sapiens
ggtgtaggcacccga

SEQ ID NO: 296144 - DNA, 15 bp, Homo sapiens
tggtgtaggcacccg

SEQ ID NO: 296145 - DNA, 15 bp, Homo sapiens
gtggtgtaggcaccc

SEQ ID NO: 296146 - DNA, 15 bp, Homo sapiens
ggtggtgtaggcacc

SEQ ID NO: 296147 - DNA, 15 bp, Homo sapiens
tggtggtgtaggcac

SEQ ID NO: 296148 - DNA, 15 bp, Homo sapiens
ctggtggtgtaggca

SEQ ID NO: 296149 - DNA, 15 bp, Homo sapiens
cctggtggtgtaggc

SEQ ID NO: 296150 - DNA, 15 bp, Homo sapiens
ccctggtggtgtagg

SEQ ID NO: 296151 - DNA, 15 bp, Homo sapiens
gccctggtggtgtag

SEQ ID NO: 296152 - DNA, 15 bp, Homo sapiens
ggccctggtggtgta

SEQ ID NO: 296153 - DNA, 15 bp, Homo sapiens
gggccctggtggtgt

SEQ ID NO: 296154 - DNA, 15 bp, Homo sapiens
agggccctggtggtg

SEQ ID NO: 296155 - DNA, 15 bp, Homo sapiens
cagggccctggtggt

SEQ ID NO: 296156 - DNA, 15 bp, Homo sapiens
ccagggccctggtgg

SEQ ID NO: 296157 - DNA, 15 bp, Homo sapiens
cccagggccctggtg

SEQ ID NO: 296158 - DNA, 15 bp, Homo sapiens
acccagggccctggt

SEQ ID NO: 296159 - DNA, 15 bp, Homo sapiens
aacccagggccctgg

SEQ ID NO: 296160 - DNA, 15 bp, Homo sapiens
aaacccagggccctg

SEQ ID NO: 296161 - DNA, 15 bp, Homo sapiens
gaaacccagggccct

SEQ ID NO: 296162 - DNA, 15 bp, Homo sapiens
tgaaacccagggccc

SEQ ID NO: 296163 - DNA, 15 bp, Homo sapiens
ttgaaacccagggcc

SEQ ID NO: 296164 - DNA, 15 bp, Homo sapiens
cttgaaacccagggc

SEQ ID NO: 296165 - DNA, 15 bp, Homo sapiens
gcttgaaacccaggg

SEQ ID NO: 296166 - DNA, 15 bp, Homo sapiens
tgcttgaaacccagg

SEQ ID NO: 296167 - DNA, 15 bp, Homo sapiens
gtgcttgaaacccag

SEQ ID NO: 296168 - DNA, 15 bp, Homo sapiens
tgtgcttgaaaccca

SEQ ID NO: 296169 - DNA, 15 bp, Homo sapiens
ttgtgcttgaaaccc

SEQ ID NO: 296170 - DNA, 15 bp, Homo sapiens
tttgtgcttgaaacc

SEQ ID NO: 296171 - DNA, 15 bp, Homo sapiens
ttttgtgcttgaaac

SEQ ID NO: 296172 - DNA, 15 bp, Homo sapiens
gttttgtgcttgaaa

SEQ ID NO: 296173 - DNA, 15 bp, Homo sapiens
agttttgtgcttgaa

SEQ ID NO: 296174 - DNA, 15 bp, Homo sapiens
cagttttgtgcttga

SEQ ID NO: 296175 - DNA, 15 bp, Homo sapiens
ccagttttgtgcttg

SEQ ID NO: 296176 - DNA, 15 bp, Homo sapiens
cccagttttgtgctt

SEQ ID NO: 296177 - DNA, 15 bp, Homo sapiens
gcccagttttgtgct

SEQ ID NO: 296178 - DNA, 15 bp, Homo sapiens
tgcccagttttgtgc

SEQ ID NO: 296179 - DNA, 15 bp, Homo sapiens
ctgcccagttttgtg

SEQ ID NO: 296180 - DNA, 15 bp, Homo sapiens
gctgcccagttttgt

SEQ ID NO: 296181 - DNA, 15 bp, Homo sapiens
agctgcccagttttg

SEQ ID NO: 296182 - DNA, 15 bp, Homo sapiens
cagctgcccagtttt

SEQ ID NO: 296183 - DNA, 15 bp, Homo sapiens
acagctgcccagttt

SEQ ID NO: 296184 - DNA, 15 bp, Homo sapiens
aacagctgcccagtt

SEQ ID NO: 296185 - DNA, 15 bp, Homo sapiens
aaacagctgcccagt

SEQ ID NO: 296186 - DNA, 15 bp, Homo sapiens
caaacagctgcccag

SEQ ID NO: 296187 - DNA, 15 bp, Homo sapiens
ccaaacagctgccca

SEQ ID NO: 296188 - DNA, 15 bp, Homo sapiens
cccaaacagctgccc

SEQ ID NO: 296189 - DNA, 15 bp, Homo sapiens
gcccaaacagctgcc

SEQ ID NO: 296190 - DNA, 15 bp, Homo sapiens
tgcccaaacagctgc

SEQ ID NO: 296191 - DNA, 15 bp, Homo sapiens
ctgcccaaacagctg

SEQ ID NO: 296192 - DNA, 15 bp, Homo sapiens
tctgcccaaacagct

SEQ ID NO: 296193 - DNA, 15 bp, Homo sapiens
atctgcccaaacagc

SEQ ID NO: 296194 - DNA, 15 bp, Homo sapiens
tatctgcccaaacag

SEQ ID NO: 296195 - DNA, 15 bp, Homo sapiens
gtatctgcccaaaca

SEQ ID NO: 296196 - DNA, 15 bp, Homo sapiens
ggtatctgcccaaac

SEQ ID NO: 296197 - DNA, 15 bp, Homo sapiens
cggtatctgcccaaa

SEQ ID NO: 296198 - DNA, 15 bp, Homo sapiens
tcggtatctgcccaa

SEQ ID NO: 296199 - DNA, 15 bp, Homo sapiens
ctcggtatctgccca

SEQ ID NO: 296200 - DNA, 15 bp, Homo sapiens
gctcggtatctgccc

SEQ ID NO: 296201 - DNA, 15 bp, Homo sapiens
agctcggtatctgcc

SEQ ID NO: 296202 - DNA, 15 bp, Homo sapiens
tagctcggtatctgc

SEQ ID NO: 296203 - DNA, 15 bp, Homo sapiens
ctagctcggtatctg

SEQ ID NO: 296204 - DNA, 15 bp, Homo sapiens
gctagctcggtatct

SEQ ID NO: 296205 - DNA, 15 bp, Homo sapiens
agctagctcggtatc

SEQ ID NO: 296206 - DNA, 15 bp, Homo sapiens
cagctagctcggtat

SEQ ID NO: 296207 - DNA, 15 bp, Homo sapiens
acagctagctcggta

SEQ ID NO: 296208 - DNA, 15 bp, Homo sapiens
tacagctagctcggt

SEQ ID NO: 296209 - DNA, 15 bp, Homo sapiens
ctacagctagctcgg

SEQ ID NO: 296210 - DNA, 15 bp, Homo sapiens
cctacagctagctcg

SEQ ID NO: 296211 - DNA, 15 bp, Homo sapiens
tcctacagctagctc

SEQ ID NO: 296212 - DNA, 15 bp, Homo sapiens
ctcctacagctagct

SEQ ID NO: 296213 - DNA, 15 bp, Homo sapiens
actcctacagctagc

SEQ ID NO: 296214 - DNA, 15 bp, Homo sapiens
aactcctacagctag

SEQ ID NO: 296215 - DNA, 15 bp, Homo sapiens
aaactcctacagcta

SEQ ID NO: 296216 - DNA, 15 bp, Homo sapiens
aaaactcctacagct

SEQ ID NO: 296217 - DNA, 15 bp, Homo sapiens
gaaaactcctacagc

SEQ ID NO: 296218 - DNA, 15 bp, Homo sapiens
agaaaactcctacag

SEQ ID NO: 296219 - DNA, 15 bp, Homo sapiens
aagaaaactcctaca

SEQ ID NO: 296220 - DNA, 15 bp, Homo sapiens
aaagaaaactcctac

SEQ ID NO: 296221 - DNA, 15 bp, Homo sapiens
gaaagaaaactccta

SEQ ID NO: 296222 - DNA, 15 bp, Homo sapiens
cgaaagaaaactcct

SEQ ID NO: 296223 - DNA, 15 bp, Homo sapiens
acgaaagaaaactcc

SEQ ID NO: 296224 - DNA, 15 bp, Homo sapiens
tacgaaagaaaactc

SEQ ID NO: 296225 - DNA, 15 bp, Homo sapiens
gtacgaaagaaaact

SEQ ID NO: 296226 - DNA, 15 bp, Homo sapiens
agtacgaaagaaaac

SEQ ID NO: 296227 - DNA, 15 bp, Homo sapiens
gagtacgaaagaaaa

SEQ ID NO: 296228 - DNA, 15 bp, Homo sapiens
ggagtacgaaagaaa

SEQ ID NO: 296229 - DNA, 15 bp, Homo sapiens
tggagtacgaaagaa

SEQ ID NO: 296230 - DNA, 15 bp, Homo sapiens
ctggagtacgaaaga

SEQ ID NO: 296231 - DNA, 15 bp, Homo sapiens
actggagtacgaaag

SEQ ID NO: 296232 - DNA, 15 bp, Homo sapiens
cactggagtacgaaa

SEQ ID NO: 296233 - DNA, 15 bp, Homo sapiens
ccactggagtacgaa

SEQ ID NO: 296234 - DNA, 15 bp, Homo sapiens
accactggagtacga

SEQ ID NO: 296235 - DNA, 15 bp, Homo sapiens
caccactggagtacg

SEQ ID NO: 296236 - DNA, 15 bp, Homo sapiens
gcaccactggagtac

SEQ ID NO: 296237 - DNA, 15 bp, Homo sapiens
ggcaccactggagta

SEQ ID NO: 296238 - DNA, 15 bp, Homo sapiens
aggcaccactggagt

SEQ ID NO: 296239 - DNA, 15 bp, Homo sapiens
caggcaccactggag

SEQ ID NO: 296240 - DNA, 15 bp, Homo sapiens
ccaggcaccactgga

SEQ ID NO: 296241 - DNA, 15 bp, Homo sapiens
tccaggcaccactgg

SEQ ID NO: 296242 - DNA, 15 bp, Homo sapiens
ttccaggcaccactg

SEQ ID NO: 296243 - DNA, 15 bp, Homo sapiens
attccaggcaccact

SEQ ID NO: 296244 - DNA, 15 bp, Homo sapiens
cattccaggcaccac

SEQ ID NO: 296245 - DNA, 15 bp, Homo sapiens
tcattccaggcacca

SEQ ID NO: 296246 - DNA, 15 bp, Homo sapiens
gtcattccaggcacc

SEQ ID NO: 296247 - DNA, 15 bp, Homo sapiens
tgtcattccaggcac

SEQ ID NO: 296248 - DNA, 15 bp, Homo sapiens
ctgtcattccaggca

SEQ ID NO: 296249 - DNA, 15 bp, Homo sapiens
gctgtcattccaggc

SEQ ID NO: 296250 - DNA, 15 bp, Homo sapiens
cgctgtcattccagg

SEQ ID NO: 296251 - DNA, 15 bp, Homo sapiens
tcgctgtcattccag

SEQ ID NO: 296252 - DNA, 15 bp, Homo sapiens
ctcgctgtcattcca

SEQ ID NO: 296253 - DNA, 15 bp, Homo sapiens
actcgctgtcattcc

SEQ ID NO: 296254 - DNA, 15 bp, Homo sapiens
aactcgctgtcattc

SEQ ID NO: 296255 - DNA, 15 bp, Homo sapiens
taactcgctgtcatt

SEQ ID NO: 296256 - DNA, 15 bp, Homo sapiens
ctaactcgctgtcat

SEQ ID NO: 296257 - DNA, 15 bp, Homo sapiens
tctaactcgctgtca

SEQ ID NO: 296258 - DNA, 15 bp, Homo sapiens
ttctaactcgctgtc

SEQ ID NO: 296259 - DNA, 15 bp, Homo sapiens
gttctaactcgctgt

SEQ ID NO: 296260 - DNA, 15 bp, Homo sapiens
ggttctaactcgctg

SEQ ID NO: 296261 - DNA, 15 bp, Homo sapiens
tggttctaactcgct

SEQ ID NO: 296262 - DNA, 15 bp, Homo sapiens
atggttctaactcgc

SEQ ID NO: 296263 - DNA, 15 bp, Homo sapiens
aatggttctaactcg

SEQ ID NO: 296264 - DNA, 15 bp, Homo sapiens
gaatggttctaactc

SEQ ID NO: 296265 - DNA, 15 bp, Homo sapiens
tgaatggttctaact

SEQ ID NO: 296266 - DNA, 15 bp, Homo sapiens
gtgaatggttctaac

SEQ ID NO: 296267 - DNA, 15 bp, Homo sapiens
agtgaatggttctaa

SEQ ID NO: 296268 - DNA, 15 bp, Homo sapiens
gagtgaatggttcta

SEQ ID NO: 296269 - DNA, 15 bp, Homo sapiens
ggagtgaatggttct

SEQ ID NO: 296270 - DNA, 15 bp, Homo sapiens
gggagtgaatggttc

SEQ ID NO: 296271 - DNA, 15 bp, Homo sapiens
ggggagtgaatggtt

SEQ ID NO: 296272 - DNA, 15 bp, Homo sapiens
gggggagtgaatggt

SEQ ID NO: 296273 - DNA, 15 bp, Homo sapiens
cgggggagtgaatgg

SEQ ID NO: 296274 - DNA, 15 bp, Homo sapiens
ccgggggagtgaatg

SEQ ID NO: 296275 - DNA, 15 bp, Homo sapiens
tccgggggagtgaat

SEQ ID NO: 296276 - DNA, 15 bp, Homo sapiens
ttccgggggagtgaa

SEQ ID NO: 296277 - DNA, 15 bp, Homo sapiens
tttccgggggagtga

SEQ ID NO: 296278 - DNA, 15 bp, Homo sapiens
ctttccgggggagtg

SEQ ID NO: 296279 - DNA, 15 bp, Homo sapiens
cctttccgggggagt

SEQ ID NO: 296280 - DNA, 15 bp, Homo sapiens
ccctttccgggggag

SEQ ID NO: 296281 - DNA, 15 bp, Homo sapiens
cccctttccggggga

SEQ ID NO: 296282 - DNA, 15 bp, Homo sapiens
ccccctttccggggg

SEQ ID NO: 296283 - DNA, 15 bp, Homo sapiens
gccccctttccgggg

SEQ ID NO: 296284 - DNA, 15 bp, Homo sapiens
agccccctttccggg

SEQ ID NO: 296285 - DNA, 15 bp, Homo sapiens
cagccccctttccgg

SEQ ID NO: 296286 - DNA, 15 bp, Homo sapiens
tcagccccctttccg

SEQ ID NO: 296287 - DNA, 15 bp, Homo sapiens
ttcagccccctttcc

SEQ ID NO: 296288 - DNA, 15 bp, Homo sapiens
cttcagccccctttc

SEQ ID NO: 296289 - DNA, 15 bp, Homo sapiens
gcttcagcccccttt

SEQ ID NO: 296290 - DNA, 15 bp, Homo sapiens
ggcttcagccccctt

SEQ ID NO: 296291 - DNA, 15 bp, Homo sapiens
tggcttcagccccct

SEQ ID NO: 296292 - DNA, 15 bp, Homo sapiens
ctggcttcagccccc

SEQ ID NO: 296293 - DNA, 15 bp, Homo sapiens
cctggcttcagcccc

SEQ ID NO: 296294 - DNA, 15 bp, Homo sapiens
ccctggcttcagccc

SEQ ID NO: 296295 - DNA, 15 bp, Homo sapiens
tccctggcttcagcc

SEQ ID NO: 296296 - DNA, 15 bp, Homo sapiens
ctccctggcttcagc

SEQ ID NO: 296297 - DNA, 15 bp, Homo sapiens
gctccctggcttcag

SEQ ID NO: 296298 - DNA, 15 bp, Homo sapiens
ggctccctggcttca

SEQ ID NO: 296299 - DNA, 15 bp, Homo sapiens
tggctccctggcttc

SEQ ID NO: 296300 - DNA, 15 bp, Homo sapiens
ttggctccctggctt

SEQ ID NO: 296301 - DNA, 15 bp, Homo sapiens
cttggctccctggct

SEQ ID NO: 296302 - DNA, 15 bp, Homo sapiens
acttggctccctggc

SEQ ID NO: 296303 - DNA, 15 bp, Homo sapiens
cacttggctccctgg

SEQ ID NO: 296304 - DNA, 15 bp, Homo sapiens
ccacttggctccctg

SEQ ID NO: 296305 - DNA, 15 bp, Homo sapiens
accacttggctccct

SEQ ID NO: 296306 - DNA, 15 bp, Homo sapiens
gaccacttggctccc

SEQ ID NO: 296307 - DNA, 15 bp, Homo sapiens
agaccacttggctcc

SEQ ID NO: 296308 - DNA, 15 bp, Homo sapiens
tagaccacttggctc

SEQ ID NO: 296309 - DNA, 15 bp, Homo sapiens
gtagaccacttggct

SEQ ID NO: 296310 - DNA, 15 bp, Homo sapiens
ggtagaccacttggc

SEQ ID NO: 296311 - DNA, 15 bp, Homo sapiens
aggtagaccacttgg

SEQ ID NO: 296312 - DNA, 15 bp, Homo sapiens
gaggtagaccacttg

SEQ ID NO: 296313 - DNA, 15 bp, Homo sapiens
tgaggtagaccactt

SEQ ID NO: 296314 - DNA, 15 bp, Homo sapiens
ctgaggtagaccact

SEQ ID NO: 296315 - DNA, 15 bp, Homo sapiens
gctgaggtagaccac

SEQ ID NO: 296316 - DNA, 15 bp, Homo sapiens
cgctgaggtagacca

SEQ ID NO: 296317 - DNA, 15 bp, Homo sapiens
ccgctgaggtagacc

SEQ ID NO: 296318 - DNA, 15 bp, Homo sapiens
tccgctgaggtagac

SEQ ID NO: 296319 - DNA, 15 bp, Homo sapiens
atccgctgaggtaga

SEQ ID NO: 296320 - DNA, 15 bp, Homo sapiens
gatccgctgaggtag

SEQ ID NO: 296321 - DNA, 15 bp, Homo sapiens
ggatccgctgaggta

SEQ ID NO: 296322 - DNA, 15 bp, Homo sapiens
gggatccgctgaggt

SEQ ID NO: 296323 - DNA, 15 bp, Homo sapiens
tgggatccgctgagg

SEQ ID NO: 296324 - DNA, 15 bp, Homo sapiens
gtgggatccgctgag

SEQ ID NO: 296325 - DNA, 15 bp, Homo sapiens
ggtgggatccgctga

SEQ ID NO: 296326 - DNA, 15 bp, Homo sapiens
gggtgggatccgctg

SEQ ID NO: 296327 - DNA, 15 bp, Homo sapiens
ggggtgggatccgct

SEQ ID NO: 296328 - DNA, 15 bp, Homo sapiens
gggggtgggatccgc

SEQ ID NO: 296329 - DNA, 15 bp, Homo sapiens
tgggggtgggatccg

SEQ ID NO: 296330 - DNA, 15 bp, Homo sapiens
atgggggtgggatcc

SEQ ID NO: 296331 - DNA, 15 bp, Homo sapiens
catgggggtgggatc

SEQ ID NO: 296332 - DNA, 15 bp, Homo sapiens
ccatgggggtgggat

SEQ ID NO: 296333 - DNA, 15 bp, Homo sapiens
tccatgggggtggga

SEQ ID NO: 296334 - DNA, 15 bp, Homo sapiens
ctccatgggggtggg

SEQ ID NO: 296335 - DNA, 15 bp, Homo sapiens
gctccatgggggtgg

SEQ ID NO: 296336 - DNA, 15 bp, Homo sapiens
ggctccatgggggtg

SEQ ID NO: 296337 - DNA, 15 bp, Homo sapiens
tggctccatgggggt

SEQ ID NO: 296338 - DNA, 15 bp, Homo sapiens
ttggctccatggggg

SEQ ID NO: 296339 - DNA, 15 bp, Homo sapiens
cttggctccatgggg

SEQ ID NO: 296340 - DNA, 15 bp, Homo sapiens
gcttggctccatggg

SEQ ID NO: 296341 - DNA, 15 bp, Homo sapiens
tgcttggctccatgg

SEQ ID NO: 296342 - DNA, 15 bp, Homo sapiens
ttgcttggctccatg

SEQ ID NO: 296343 - DNA, 15 bp, Homo sapiens
cttgcttggctccat

SEQ ID NO: 296344 - DNA, 15 bp, Homo sapiens
gcttgcttggctcca

SEQ ID NO: 296345 - DNA, 15 bp, Homo sapiens
agcttgcttggctcc

SEQ ID NO: 296346 - DNA, 15 bp, Homo sapiens
tagcttgcttggctc

SEQ ID NO: 296347 - DNA, 15 bp, Homo sapiens
ttagcttgcttggct

SEQ ID NO: 296348 - DNA, 15 bp, Homo sapiens
cttagcttgcttggc

SEQ ID NO: 296349 - DNA, 15 bp, Homo sapiens
tcttagcttgcttgg

SEQ ID NO: 296350 - DNA, 15 bp, Homo sapiens
atcttagcttgcttg

SEQ ID NO: 296351 - DNA, 15 bp, Homo sapiens
gatcttagcttgctt

SEQ ID NO: 296352 - DNA, 15 bp, Homo sapiens
ggatcttagcttgct

SEQ ID NO: 296353 - DNA, 15 bp, Homo sapiens
tggatcttagcttgc

SEQ ID NO: 296354 - DNA, 15 bp, Homo sapiens
gtggatcttagcttg

SEQ ID NO: 296355 - DNA, 15 bp, Homo sapiens
agtggatcttagctt

SEQ ID NO: 296356 - DNA, 15 bp, Homo sapiens
cagtggatcttagct

SEQ ID NO: 296357 - DNA, 15 bp, Homo sapiens
ccagtggatcttagc

SEQ ID NO: 296358 - DNA, 15 bp, Homo sapiens
gccagtggatcttag

SEQ ID NO: 296359 - DNA, 15 bp, Homo sapiens
agccagtggatctta

SEQ ID NO: 296360 - DNA, 15 bp, Homo sapiens
aagccagtggatctt

SEQ ID NO: 296361 - DNA, 15 bp, Homo sapiens
caagccagtggatct

SEQ ID NO: 296362 - DNA, 15 bp, Homo sapiens
tcaagccagtggatc

SEQ ID NO: 296363 - DNA, 15 bp, Homo sapiens
ttcaagccagtggat

SEQ ID NO: 296364 - DNA, 15 bp, Homo sapiens
tttcaagccagtgga

SEQ ID NO: 296365 - DNA, 15 bp, Homo sapiens
atttcaagccagtgg

SEQ ID NO: 296366 - DNA, 15 bp, Homo sapiens
aatttcaagccagtg

SEQ ID NO: 296367 - DNA, 15 bp, Homo sapiens
gaatttcaagccagt

SEQ ID NO: 296368 - DNA, 15 bp, Homo sapiens
agaatttcaagccag

SEQ ID NO: 296369 - DNA, 15 bp, Homo sapiens
gagaatttcaagcca

SEQ ID NO: 296370 - DNA, 15 bp, Homo sapiens
cgagaatttcaagcc

SEQ ID NO: 296371 - DNA, 15 bp, Homo sapiens
gcgagaatttcaagc

SEQ ID NO: 296372 - DNA, 15 bp, Homo sapiens
agcgagaatttcaag

SEQ ID NO: 296373 - DNA, 15 bp, Homo sapiens
cagcgagaatttcaa

SEQ ID NO: 296374 - DNA, 15 bp, Homo sapiens
gcagcgagaatttca

SEQ ID NO: 296375 - DNA, 15 bp, Homo sapiens
ggcagcgagaatttc

SEQ ID NO: 296376 - DNA, 15 bp, Homo sapiens
tggcagcgagaattt

SEQ ID NO: 296377 - DNA, 15 bp, Homo sapiens
atggcagcgagaatt

SEQ ID NO: 296378 - DNA, 15 bp, Homo sapiens
gatggcagcgagaat

SEQ ID NO: 296379 - DNA, 15 bp, Homo sapiens
tgatggcagcgagaa

SEQ ID NO: 296380 - DNA, 15 bp, Homo sapiens
gtgatggcagcgaga

SEQ ID NO: 296381 - DNA, 15 bp, Homo sapiens
tgtgatggcagcgag

SEQ ID NO: 296382 - DNA, 15 bp, Homo sapiens
ctgtgatggcagcga

SEQ ID NO: 296383 - DNA, 15 bp, Homo sapiens
gctgtgatggcagcg

SEQ ID NO: 296384 - DNA, 15 bp, Homo sapiens
tgctgtgatggcagc

SEQ ID NO: 296385 - DNA, 15 bp, Homo sapiens
ctgctgtgatggcag

SEQ ID NO: 296386 - DNA, 15 bp, Homo sapiens
actgctgtgatggca

SEQ ID NO: 296387 - DNA, 15 bp, Homo sapiens
gactgctgtgatggc

SEQ ID NO: 296388 - DNA, 15 bp, Homo sapiens
agactgctgtgatgg

SEQ ID NO: 296389 - DNA, 15 bp, Homo sapiens
cagactgctgtgatg

SEQ ID NO: 296390 - DNA, 15 bp, Homo sapiens
tcagactgctgtgat

SEQ ID NO: 296391 - DNA, 15 bp, Homo sapiens
ctcagactgctgtga

SEQ ID NO: 296392 - DNA, 15 bp, Homo sapiens
cctcagactgctgtg

SEQ ID NO: 296393 - DNA, 15 bp, Homo sapiens
acctcagactgctgt

SEQ ID NO: 296394 - DNA, 15 bp, Homo sapiens
gacctcagactgctg

SEQ ID NO: 296395 - DNA, 15 bp, Homo sapiens
cgacctcagactgct

SEQ ID NO: 296396 - DNA, 15 bp, Homo sapiens
tcgacctcagactgc

SEQ ID NO: 296397 - DNA, 15 bp, Homo sapiens
gtcgacctcagactg

SEQ ID NO: 296398 - DNA, 15 bp, Homo sapiens
ggtcgacctcagact

SEQ ID NO: 296399 - DNA, 15 bp, Homo sapiens
aggtcgacctcagac

SEQ ID NO: 296400 - DNA, 15 bp, Homo sapiens
caggtcgacctcaga

SEQ ID NO: 296401 - DNA, 15 bp, Homo sapiens
ccaggtcgacctcag

SEQ ID NO: 296402 - DNA, 15 bp, Homo sapiens
cccaggtcgacctca

SEQ ID NO: 296403 - DNA, 15 bp, Homo sapiens
tcccaggtcgacctc

SEQ ID NO: 296404 - DNA, 15 bp, Homo sapiens
atcccaggtcgacct

SEQ ID NO: 296405 - DNA, 15 bp, Homo sapiens
catcccaggtcgacc

SEQ ID NO: 296406 - DNA, 15 bp, Homo sapiens
ccatcccaggtcgac

SEQ ID NO: 296407 - DNA, 15 bp, Homo sapiens
accatcccaggtcga

SEQ ID NO: 296408 - DNA, 15 bp, Homo sapiens
taccatcccaggtcg

SEQ ID NO: 296409 - DNA, 15 bp, Homo sapiens
ctaccatcccaggtc

SEQ ID NO: 296410 - DNA, 15 bp, Homo sapiens
tctaccatcccaggt

SEQ ID NO: 296411 - DNA, 15 bp, Homo sapiens
ctctaccatcccagg

SEQ ID NO: 296412 - DNA, 15 bp, Homo sapiens
gctctaccatcccag

SEQ ID NO: 296413 - DNA, 15 bp, Homo sapiens
agctctaccatccca

SEQ ID NO: 296414 - DNA, 15 bp, Homo sapiens
tagctctaccatccc

SEQ ID NO: 296415 - DNA, 15 bp, Homo sapiens
ctagctctaccatcc

SEQ ID NO: 296416 - DNA, 15 bp, Homo sapiens
cctagctctaccatc

SEQ ID NO: 296417 - DNA, 15 bp, Homo sapiens
acctagctctaccat

SEQ ID NO: 296418 - DNA, 15 bp, Homo sapiens
tacctagctctacca

SEQ ID NO: 296419 - DNA, 15 bp, Homo sapiens
ctacctagctctacc

SEQ ID NO: 296420 - DNA, 15 bp, Homo sapiens
cctacctagctctac

SEQ ID NO: 296421 - DNA, 15 bp, Homo sapiens
ccctacctagctcta

SEQ ID NO: 296422 - DNA, 15 bp, Homo sapiens
cccctacctagctct

SEQ ID NO: 296423 - DNA, 15 bp, Homo sapiens
ccccctacctagctc

SEQ ID NO: 296424 - DNA, 15 bp, Homo sapiens
tccccctacctagct

SEQ ID NO: 296425 - DNA, 15 bp, Homo sapiens
ctccccctacctagc

SEQ ID NO: 296426 - DNA, 15 bp, Homo sapiens
cctccccctacctag

SEQ ID NO: 296427 - DNA, 15 bp, Homo sapiens
ccctccccctaccta

SEQ ID NO: 296428 - DNA, 15 bp, Homo sapiens
cccctccccctacct

SEQ ID NO: 296429 - DNA, 15 bp, Homo sapiens
gcccctccccctacc

SEQ ID NO: 296430 - DNA, 15 bp, Homo sapiens
tgcccctccccctac

SEQ ID NO: 296431 - DNA, 15 bp, Homo sapiens
atgcccctcccccta

SEQ ID NO: 296432 - DNA, 15 bp, Homo sapiens
aatgcccctccccct

SEQ ID NO: 296433 - DNA, 15 bp, Homo sapiens
gaatgcccctccccc

SEQ ID NO: 296434 - DNA, 15 bp, Homo sapiens
ggaatgcccctcccc

SEQ ID NO: 296435 - DNA, 15 bp, Homo sapiens
gggaatgcccctccc

SEQ ID NO: 296436 - DNA, 15 bp, Homo sapiens
ggggaatgcccctcc

SEQ ID NO: 296437 - DNA, 15 bp, Homo sapiens
tggggaatgcccctc

SEQ ID NO: 296438 - DNA, 15 bp, Homo sapiens
atggggaatgcccct

SEQ ID NO: 296439 - DNA, 15 bp, Homo sapiens
aatggggaatgcccc

SEQ ID NO: 296440 - DNA, 15 bp, Homo sapiens
taatggggaatgccc

SEQ ID NO: 296441 - DNA, 15 bp, Homo sapiens
gtaatggggaatgcc

SEQ ID NO: 296442 - DNA, 15 bp, Homo sapiens
agtaatggggaatgc

SEQ ID NO: 296443 - DNA, 15 bp, Homo sapiens
cagtaatggggaatg

SEQ ID NO: 296444 - DNA, 15 bp, Homo sapiens
tcagtaatggggaat

SEQ ID NO: 296445 - DNA, 15 bp, Homo sapiens
ctcagtaatggggaa

SEQ ID NO: 296446 - DNA, 15 bp, Homo sapiens
cctcagtaatgggga

SEQ ID NO: 296447 - DNA, 15 bp, Homo sapiens
gcctcagtaatgggg

SEQ ID NO: 296448 - DNA, 15 bp, Homo sapiens
agcctcagtaatggg

SEQ ID NO: 296449 - DNA, 15 bp, Homo sapiens
aagcctcagtaatgg

SEQ ID NO: 296450 - DNA, 15 bp, Homo sapiens
caagcctcagtaatg

SEQ ID NO: 296451 - DNA, 15 bp, Homo sapiens
tcaagcctcagtaat

SEQ ID NO: 296452 - DNA, 15 bp, Homo sapiens
ctcaagcctcagtaa

SEQ ID NO: 296453 - DNA, 15 bp, Homo sapiens
actcaagcctcagta

SEQ ID NO: 296454 - DNA, 15 bp, Homo sapiens
aactcaagcctcagt

SEQ ID NO: 296455 - DNA, 15 bp, Homo sapiens
aaactcaagcctcag

SEQ ID NO: 296456 - DNA, 15 bp, Homo sapiens
aaaactcaagcctca

SEQ ID NO: 296457 - DNA, 15 bp, Homo sapiens
gaaaactcaagcctc

SEQ ID NO: 296458 - DNA, 15 bp, Homo sapiens
ggaaaactcaagcct

SEQ ID NO: 296459 - DNA, 15 bp, Homo sapiens
gggaaaactcaagcc

SEQ ID NO: 296460 - DNA, 15 bp, Homo sapiens
ggggaaaactcaagc

SEQ ID NO: 296461 - DNA, 15 bp, Homo sapiens
aggggaaaactcaag

SEQ ID NO: 296462 - DNA, 15 bp, Homo sapiens
gaggggaaaactcaa

SEQ ID NO: 296463 - DNA, 15 bp, Homo sapiens
tgaggggaaaactca

SEQ ID NO: 296464 - DNA, 15 bp, Homo sapiens
gtgaggggaaaactc

SEQ ID NO: 296465 - DNA, 15 bp, Homo sapiens
tgtgaggggaaaact

SEQ ID NO: 296466 - DNA, 15 bp, Homo sapiens
ctgtgaggggaaaac

SEQ ID NO: 296467 - DNA, 15 bp, Homo sapiens
actgtgaggggaaaa

SEQ ID NO: 296468 - DNA, 15 bp, Homo sapiens
cactgtgaggggaaa

SEQ ID NO: 296469 - DNA, 15 bp, Homo sapiens
acactgtgaggggaa

SEQ ID NO: 296470 - DNA, 15 bp, Homo sapiens
tacactgtgagggga

SEQ ID NO: 296471 - DNA, 15 bp, Homo sapiens
ttacactgtgagggg

SEQ ID NO: 296472 - DNA, 15 bp, Homo sapiens
tttacactgtgaggg

SEQ ID NO: 296473 - DNA, 15 bp, Homo sapiens
gtttacactgtgagg

SEQ ID NO: 296474 - DNA, 15 bp, Homo sapiens
tgtttacactgtgag

SEQ ID NO: 296475 - DNA, 15 bp, Homo sapiens
ttgtttacactgtga

SEQ ID NO: 296476 - DNA, 15 bp, Homo sapiens
tttgtttacactgtg

SEQ ID NO: 296477 - DNA, 15 bp, Homo sapiens
ctttgtttacactgt

SEQ ID NO: 296478 - DNA, 15 bp, Homo sapiens
gctttgtttacactg

SEQ ID NO: 296479 - DNA, 15 bp, Homo sapiens
ggctttgtttacact

SEQ ID NO: 296480 - DNA, 15 bp, Homo sapiens
tggctttgtttacac

SEQ ID NO: 296481 - DNA, 15 bp, Homo sapiens
gtggctttgtttaca

SEQ ID NO: 296482 - DNA, 15 bp, Homo sapiens
ggtggctttgtttac

SEQ ID NO: 296483 - DNA, 15 bp, Homo sapiens
tggtggctttgttta

SEQ ID NO: 296484 - DNA, 15 bp, Homo sapiens
ctggtggctttgttt

SEQ ID NO: 296485 - DNA, 15 bp, Homo sapiens
cctggtggctttgtt

SEQ ID NO: 296486 - DNA, 15 bp, Homo sapiens
tcctggtggctttgt

SEQ ID NO: 296487 - DNA, 15 bp, Homo sapiens
ttcctggtggctttg

SEQ ID NO: 296488 - DNA, 15 bp, Homo sapiens
cttcctggtggcttt

SEQ ID NO: 296489 - DNA, 15 bp, Homo sapiens
acttcctggtggctt

SEQ ID NO: 296490 - DNA, 15 bp, Homo sapiens
aacttcctggtggct

SEQ ID NO: 296491 - DNA, 15 bp, Homo sapiens
gaacttcctggtggc

SEQ ID NO: 296492 - DNA, 15 bp, Homo sapiens
tgaacttcctggtgg

SEQ ID NO: 296493 - DNA, 15 bp, Homo sapiens
ttgaacttcctggtg

SEQ ID NO: 296494 - DNA, 15 bp, Homo sapiens
tttgaacttcctggt

SEQ ID NO: 296495 - DNA, 15 bp, Homo sapiens
gtttgaacttcctgg

SEQ ID NO: 296496 - DNA, 15 bp, Homo sapiens
agtttgaacttcctg

SEQ ID NO: 296497 - DNA, 15 bp, Homo sapiens
cagtttgaacttcct

SEQ ID NO: 296498 - DNA, 15 bp, Homo sapiens
ccagtttgaacttcc

SEQ ID NO: 296499 - DNA, 15 bp, Homo sapiens
cccagtttgaacttc

SEQ ID NO: 296500 - DNA, 15 bp, Homo sapiens
gcccagtttgaactt

SEQ ID NO: 296501 - DNA, 15 bp, Homo sapiens
tgcccagtttgaact

SEQ ID NO: 296502 - DNA, 15 bp, Homo sapiens
ctgcccagtttgaac

SEQ ID NO: 296503 - DNA, 15 bp, Homo sapiens
tctgcccagtttgaa

SEQ ID NO: 296504 - DNA, 15 bp, Homo sapiens
ctctgcccagtttga

SEQ ID NO: 296505 - DNA, 15 bp, Homo sapiens
gctctgcccagtttg

SEQ ID NO: 296506 - DNA, 15 bp, Homo sapiens
ggctctgcccagttt

SEQ ID NO: 296507 - DNA, 15 bp, Homo sapiens
aggctctgcccagtt

SEQ ID NO: 296508 - DNA, 15 bp, Homo sapiens
taggctctgcccagt

SEQ ID NO: 296509 - DNA, 15 bp, Homo sapiens
gtaggctctgcccag

SEQ ID NO: 296510 - DNA, 15 bp, Homo sapiens
ggtaggctctgccca

SEQ ID NO: 296511 - DNA, 15 bp, Homo sapiens
tggtaggctctgccc

SEQ ID NO: 296512 - DNA, 15 bp, Homo sapiens
gtggtaggctctgcc

SEQ ID NO: 296513 - DNA, 15 bp, Homo sapiens
tgtggtaggctctgc

SEQ ID NO: 296514 - DNA, 15 bp, Homo sapiens
ctgtggtaggctctg

SEQ ID NO: 296515 - DNA, 15 bp, Homo sapiens
gctgtggtaggctct

SEQ ID NO: 296516 - DNA, 15 bp, Homo sapiens
agctgtggtaggctc

SEQ ID NO: 296517 - DNA, 15 bp, Homo sapiens
gagctgtggtaggct

SEQ ID NO: 296518 - DNA, 15 bp, Homo sapiens
ggagctgtggtaggc

SEQ ID NO: 296519 - DNA, 15 bp, Homo sapiens
gggagctgtggtagg

SEQ ID NO: 296520 - DNA, 15 bp, Homo sapiens
agggagctgtggtag

SEQ ID NO: 296521 - DNA, 15 bp, Homo sapiens
tagggagctgtggta

SEQ ID NO: 296522 - DNA, 15 bp, Homo sapiens
ttagggagctgtggt

SEQ ID NO: 296523 - DNA, 15 bp, Homo sapiens
tttagggagctgtgg

SEQ ID NO: 296524 - DNA, 15 bp, Homo sapiens
atttagggagctgtg

SEQ ID NO: 296525 - DNA, 15 bp, Homo sapiens
gatttagggagctgt

SEQ ID NO: 296526 - DNA, 15 bp, Homo sapiens
ggatttagggagctg

SEQ ID NO: 296527 - DNA, 15 bp, Homo sapiens
cggatttagggagct

SEQ ID NO: 296528 - DNA, 15 bp, Homo sapiens
gcggatttagggagc

SEQ ID NO: 296529 - DNA, 15 bp, Homo sapiens
agcggatttagggag

SEQ ID NO: 296530 - DNA, 15 bp, Homo sapiens
cagcggatttaggga

SEQ ID NO: 296531 - DNA, 15 bp, Homo sapiens
acagcggatttaggg

SEQ ID NO: 296532 - DNA, 15 bp, Homo sapiens
tacagcggatttagg

SEQ ID NO: 296533 - DNA, 15 bp, Homo sapiens
ctacagcggatttag

SEQ ID NO: 296534 - DNA, 15 bp, Homo sapiens
gctacagcggattta

SEQ ID NO: 296535 - DNA, 15 bp, Homo sapiens
ggctacagcggattt

SEQ ID NO: 296536 - DNA, 15 bp, Homo sapiens
tggctacagcggatt

SEQ ID NO: 296537 - DNA, 15 bp, Homo sapiens
ctggctacagcggat

SEQ ID NO: 296538 - DNA, 15 bp, Homo sapiens
tctggctacagcgga

SEQ ID NO: 296539 - DNA, 15 bp, Homo sapiens
gtctggctacagcgg

SEQ ID NO: 296540 - DNA, 15 bp, Homo sapiens
agtctggctacagcg

SEQ ID NO: 296541 - DNA, 15 bp, Homo sapiens
cagtctggctacagc

SEQ ID NO: 296542 - DNA, 15 bp, Homo sapiens
gcagtctggctacag

SEQ ID NO: 296543 - DNA, 15 bp, Homo sapiens
ggcagtctggctaca

SEQ ID NO: 296544 - DNA, 15 bp, Homo sapiens
aggcagtctggctac

SEQ ID NO: 296545 - DNA, 15 bp, Homo sapiens
aaggcagtctggcta

SEQ ID NO: 296546 - DNA, 15 bp, Homo sapiens
aaaggcagtctggct

SEQ ID NO: 296547 - DNA, 15 bp, Homo sapiens
gaaaggcagtctggc

SEQ ID NO: 296548 - DNA, 15 bp, Homo sapiens
agaaaggcagtctgg

SEQ ID NO: 296549 - DNA, 15 bp, Homo sapiens
tagaaaggcagtctg

SEQ ID NO: 296550 - DNA, 15 bp, Homo sapiens
ctagaaaggcagtct

SEQ ID NO: 296551 - DNA, 15 bp, Homo sapiens
tctagaaaggcagtc

SEQ ID NO: 296552 - DNA, 15 bp, Homo sapiens
atctagaaaggcagt

SEQ ID NO: 296553 - DNA, 15 bp, Homo sapiens
aatctagaaaggcag

SEQ ID NO: 296554 - DNA, 15 bp, Homo sapiens
gaatctagaaaggca

SEQ ID NO: 296555 - DNA, 15 bp, Homo sapiens
ggaatctagaaaggc

SEQ ID NO: 296556 - DNA, 15 bp, Homo sapiens
aggaatctagaaagg

SEQ ID NO: 296557 - DNA, 15 bp, Homo sapiens
gaggaatctagaaag

SEQ ID NO: 296558 - DNA, 15 bp, Homo sapiens
ggaggaatctagaaa

SEQ ID NO: 296559 - DNA, 15 bp, Homo sapiens
aggaggaatctagaa

SEQ ID NO: 296560 - DNA, 15 bp, Homo sapiens
gaggaggaatctaga

SEQ ID NO: 296561 - DNA, 15 bp, Homo sapiens
agaggaggaatctag

SEQ ID NO: 296562 - DNA, 15 bp, Homo sapiens
gagaggaggaatcta

SEQ ID NO: 296563 - DNA, 15 bp, Homo sapiens
agagaggaggaatct

SEQ ID NO: 296564 - DNA, 15 bp, Homo sapiens
cagagaggaggaatc

SEQ ID NO: 296565 - DNA, 15 bp, Homo sapiens
ccagagaggaggaat

SEQ ID NO: 296566 - DNA, 15 bp, Homo sapiens
cccagagaggaggaa

SEQ ID NO: 296567 - DNA, 15 bp, Homo sapiens
gcccagagaggagga

SEQ ID NO: 296568 - DNA, 15 bp, Homo sapiens
tgcccagagaggagg

SEQ ID NO: 296569 - DNA, 15 bp, Homo sapiens
ctgcccagagaggag

SEQ ID NO: 296570 - DNA, 15 bp, Homo sapiens
cctgcccagagagga

SEQ ID NO: 296571 - DNA, 15 bp, Homo sapiens
ccctgcccagagagg

SEQ ID NO: 296572 - DNA, 15 bp, Homo sapiens
gccctgcccagagag

SEQ ID NO: 296573 - DNA, 15 bp, Homo sapiens
tgccctgcccagaga

SEQ ID NO: 296574 - DNA, 15 bp, Homo sapiens
atgccctgcccagag

SEQ ID NO: 296575 - DNA, 15 bp, Homo sapiens
gatgccctgcccaga

SEQ ID NO: 296576 - DNA, 15 bp, Homo sapiens
agatgccctgcccag

SEQ ID NO: 296577 - DNA, 15 bp, Homo sapiens
gagatgccctgccca

SEQ ID NO: 296578 - DNA, 15 bp, Homo sapiens
agagatgccctgccc

SEQ ID NO: 296579 - DNA, 15 bp, Homo sapiens
cagagatgccctgcc

SEQ ID NO: 296580 - DNA, 15 bp, Homo sapiens
tcagagatgccctgc

SEQ ID NO: 296581 - DNA, 15 bp, Homo sapiens
ttcagagatgccctg

SEQ ID NO: 296582 - DNA, 15 bp, Homo sapiens
tttcagagatgccct

SEQ ID NO: 296583 - DNA, 15 bp, Homo sapiens
ctttcagagatgccc

SEQ ID NO: 296584 - DNA, 15 bp, Homo sapiens
tctttcagagatgcc

SEQ ID NO: 296585 - DNA, 15 bp, Homo sapiens
ttctttcagagatgc

SEQ ID NO: 296586 - DNA, 15 bp, Homo sapiens
tttctttcagagatg

SEQ ID NO: 296587 - DNA, 15 bp, Homo sapiens
ctttctttcagagat

SEQ ID NO: 296588 - DNA, 15 bp, Homo sapiens
cctttctttcagaga

SEQ ID NO: 296589 - DNA, 15 bp, Homo sapiens
gcctttctttcagag

SEQ ID NO: 296590 - DNA, 15 bp, Homo sapiens
tgcctttctttcaga

SEQ ID NO: 296591 - DNA, 15 bp, Homo sapiens
ctgcctttctttcag

SEQ ID NO: 296592 - DNA, 15 bp, Homo sapiens
gctgcctttctttca

SEQ ID NO: 296593 - DNA, 15 bp, Homo sapiens
tgctgcctttctttc

SEQ ID NO: 296594 - DNA, 15 bp, Homo sapiens
ctgctgcctttcttt

SEQ ID NO: 296595 - DNA, 15 bp, Homo sapiens
gctgctgcctttctt

SEQ ID NO: 296596 - DNA, 15 bp, Homo sapiens
ggctgctgcctttct

SEQ ID NO: 296597 - DNA, 15 bp, Homo sapiens
gggctgctgcctttc

SEQ ID NO: 296598 - DNA, 15 bp, Homo sapiens
ggggctgctgccttt

SEQ ID NO: 296599 - DNA, 15 bp, Homo sapiens
tggggctgctgcctt

SEQ ID NO: 296600 - DNA, 15 bp, Homo sapiens
ctggggctgctgcct

SEQ ID NO: 296601 - DNA, 15 bp, Homo sapiens
actggggctgctgcc

SEQ ID NO: 296602 - DNA, 15 bp, Homo sapiens
gactggggctgctgc

SEQ ID NO: 296603 - DNA, 15 bp, Homo sapiens
tgactggggctgctg

SEQ ID NO: 296604 - DNA, 15 bp, Homo sapiens
ctgactggggctgct

SEQ ID NO: 296605 - DNA, 15 bp, Homo sapiens
cctgactggggctgc

SEQ ID NO: 296606 - DNA, 15 bp, Homo sapiens
ccctgactggggctg

SEQ ID NO: 296607 - DNA, 15 bp, Homo sapiens
cccctgactggggct

SEQ ID NO: 296608 - DNA, 15 bp, Homo sapiens
gcccctgactggggc

SEQ ID NO: 296609 - DNA, 15 bp, Homo sapiens
ggcccctgactgggg

SEQ ID NO: 296610 - DNA, 15 bp, Homo sapiens
aggcccctgactggg

SEQ ID NO: 296611 - DNA, 15 bp, Homo sapiens
taggcccctgactgg

SEQ ID NO: 296612 - DNA, 15 bp, Homo sapiens
ataggcccctgactg

SEQ ID NO: 296613 - DNA, 15 bp, Homo sapiens
tataggcccctgact

SEQ ID NO: 296614 - DNA, 15 bp, Homo sapiens
ctataggcccctgac

SEQ ID NO: 296615 - DNA, 15 bp, Homo sapiens
tctataggcccctga

SEQ ID NO: 296616 - DNA, 15 bp, Homo sapiens
atctataggcccctg

SEQ ID NO: 296617 - DNA, 15 bp, Homo sapiens
tatctataggcccct

SEQ ID NO: 296618 - DNA, 15 bp, Homo sapiens
ttatctataggcccc

SEQ ID NO: 296619 - DNA, 15 bp, Homo sapiens
tttatctataggccc

SEQ ID NO: 296620 - DNA, 15 bp, Homo sapiens
ttttatctataggcc

SEQ ID NO: 296621 - DNA, 15 bp, Homo sapiens
gttttatctataggc

SEQ ID NO: 296622 - DNA, 15 bp, Homo sapiens
agttttatctatagg

SEQ ID NO: 296623 - DNA, 15 bp, Homo sapiens
gagttttatctatag

SEQ ID NO: 296624 - DNA, 15 bp, Homo sapiens
ggagttttatctata

SEQ ID NO: 296625 - DNA, 15 bp, Homo sapiens
gggagttttatctat

SEQ ID NO: 296626 - DNA, 15 bp, Homo sapiens
tgggagttttatcta

SEQ ID NO: 296627 - DNA, 15 bp, Homo sapiens
atgggagttttatct

SEQ ID NO: 296628 - DNA, 15 bp, Homo sapiens
gatgggagttttatc

SEQ ID NO: 296629 - DNA, 15 bp, Homo sapiens
agatgggagttttat

SEQ ID NO: 296630 - DNA, 15 bp, Homo sapiens
tagatgggagtttta

SEQ ID NO: 296631 - DNA, 15 bp, Homo sapiens
gtagatgggagtttt

SEQ ID NO: 296632 - DNA, 15 bp, Homo sapiens
ggtagatgggagttt

SEQ ID NO: 296633 - DNA, 15 bp, Homo sapiens
aggtagatgggagtt

SEQ ID NO: 296634 - DNA, 15 bp, Homo sapiens
caggtagatgggagt

SEQ ID NO: 296635 - DNA, 15 bp, Homo sapiens
ccaggtagatgggag

SEQ ID NO: 296636 - DNA, 15 bp, Homo sapiens
cccaggtagatggga

SEQ ID NO: 296637 - DNA, 15 bp, Homo sapiens
tcccaggtagatggg

SEQ ID NO: 296638 - DNA, 15 bp, Homo sapiens
gtcccaggtagatgg

SEQ ID NO: 296639 - DNA, 15 bp, Homo sapiens
tgtcccaggtagatg

SEQ ID NO: 296640 - DNA, 15 bp, Homo sapiens
ctgtcccaggtagat

SEQ ID NO: 296641 - DNA, 15 bp, Homo sapiens
tctgtcccaggtaga

SEQ ID NO: 296642 - DNA, 15 bp, Homo sapiens
ctctgtcccaggtag

SEQ ID NO: 296643 - DNA, 15 bp, Homo sapiens
gctctgtcccaggta

SEQ ID NO: 296644 - DNA, 15 bp, Homo sapiens
tgctctgtcccaggt

SEQ ID NO: 296645 - DNA, 15 bp, Homo sapiens
gtgctctgtcccagg

SEQ ID NO: 296646 - DNA, 15 bp, Homo sapiens
cgtgctctgtcccag

SEQ ID NO: 296647 - DNA, 15 bp, Homo sapiens
acgtgctctgtccca

SEQ ID NO: 296648 - DNA, 15 bp, Homo sapiens
cacgtgctctgtccc

SEQ ID NO: 296649 - DNA, 15 bp, Homo sapiens
ccacgtgctctgtcc

SEQ ID NO: 296650 - DNA, 15 bp, Homo sapiens
cccacgtgctctgtc

SEQ ID NO: 296651 - DNA, 15 bp, Homo sapiens
ccccacgtgctctgt

SEQ ID NO: 296652 - DNA, 15 bp, Homo sapiens
cccccacgtgctctg

SEQ ID NO: 296653 - DNA, 15 bp, Homo sapiens
tcccccacgtgctct

SEQ ID NO: 296654 - DNA, 15 bp, Homo sapiens
ttcccccacgtgctc

SEQ ID NO: 296655 - DNA, 15 bp, Homo sapiens
cttcccccacgtgct

SEQ ID NO: 296656 - DNA, 15 bp, Homo sapiens
ccttcccccacgtgc

SEQ ID NO: 296657 - DNA, 15 bp, Homo sapiens
gccttcccccacgtg

SEQ ID NO: 296658 - DNA, 15 bp, Homo sapiens
cgccttcccccacgt

SEQ ID NO: 296659 - DNA, 15 bp, Homo sapiens
gcgccttcccccacg

SEQ ID NO: 296660 - DNA, 15 bp, Homo sapiens
tgcgccttcccccac

SEQ ID NO: 296661 - DNA, 15 bp, Homo sapiens
ctgcgccttccccca

SEQ ID NO: 296662 - DNA, 15 bp, Homo sapiens
gctgcgccttccccc

SEQ ID NO: 296663 - DNA, 15 bp, Homo sapiens
agctgcgccttcccc

SEQ ID NO: 296664 - DNA, 15 bp, Homo sapiens
cagctgcgccttccc

SEQ ID NO: 296665 - DNA, 15 bp, Homo sapiens
acagctgcgccttcc

SEQ ID NO: 296666 - DNA, 15 bp, Homo sapiens
cacagctgcgccttc

SEQ ID NO: 296667 - DNA, 15 bp, Homo sapiens
ccacagctgcgcctt

SEQ ID NO: 296668 - DNA, 15 bp, Homo sapiens
tccacagctgcgcct

SEQ ID NO: 296669 - DNA, 15 bp, Homo sapiens
gtccacagctgcgcc

SEQ ID NO: 296670 - DNA, 15 bp, Homo sapiens
tgtccacagctgcgc

SEQ ID NO: 296671 - DNA, 15 bp, Homo sapiens
gtgtccacagctgcg

SEQ ID NO: 296672 - DNA, 15 bp, Homo sapiens
tgtgtccacagctgc

SEQ ID NO: 296673 - DNA, 15 bp, Homo sapiens
atgtgtccacagctg

SEQ ID NO: 296674 - DNA, 15 bp, Homo sapiens
gatgtgtccacagct

SEQ ID NO: 296675 - DNA, 15 bp, Homo sapiens
agatgtgtccacagc

SEQ ID NO: 296676 - DNA, 15 bp, Homo sapiens
aagatgtgtccacag

SEQ ID NO: 296677 - DNA, 15 bp, Homo sapiens
gaagatgtgtccaca

SEQ ID NO: 296678 - DNA, 15 bp, Homo sapiens
tgaagatgtgtccac

SEQ ID NO: 296679 - DNA, 15 bp, Homo sapiens
ctgaagatgtgtcca

SEQ ID NO: 296680 - DNA, 15 bp, Homo sapiens
gctgaagatgtgtcc

SEQ ID NO: 296681 - DNA, 15 bp, Homo sapiens
tgctgaagatgtgtc

SEQ ID NO: 296682 - DNA, 15 bp, Homo sapiens
ctgctgaagatgtgt

SEQ ID NO: 296683 - DNA, 15 bp, Homo sapiens
tctgctgaagatgtg

SEQ ID NO: 296684 - DNA, 15 bp, Homo sapiens
gtctgctgaagatgt

SEQ ID NO: 296685 - DNA, 15 bp, Homo sapiens
agtctgctgaagatg

SEQ ID NO: 296686 - DNA, 15 bp, Homo sapiens
aagtctgctgaagat

SEQ ID NO: 296687 - DNA, 15 bp, Homo sapiens
taagtctgctgaaga

SEQ ID NO: 296688 - DNA, 15 bp, Homo sapiens
ttaagtctgctgaag

SEQ ID NO: 296689 - DNA, 15 bp, Homo sapiens
tttaagtctgctgaa

SEQ ID NO: 296690 - DNA, 15 bp, Homo sapiens
gtttaagtctgctga

SEQ ID NO: 296691 - DNA, 15 bp, Homo sapiens
tgtttaagtctgctg

SEQ ID NO: 296692 - DNA, 15 bp, Homo sapiens
atgtttaagtctgct

SEQ ID NO: 296693 - DNA, 15 bp, Homo sapiens
aatgtttaagtctgc

SEQ ID NO: 296694 - DNA, 15 bp, Homo sapiens
gaatgtttaagtctg

SEQ ID NO: 296695 - DNA, 15 bp, Homo sapiens
ggaatgtttaagtct

SEQ ID NO: 296696 - DNA, 15 bp, Homo sapiens
aggaatgtttaagtc

SEQ ID NO: 296697 - DNA, 15 bp, Homo sapiens
caggaatgtttaagt

SEQ ID NO: 296698 - DNA, 15 bp, Homo sapiens
gcaggaatgtttaag

SEQ ID NO: 296699 - DNA, 15 bp, Homo sapiens
ggcaggaatgtttaa

SEQ ID NO: 296700 - DNA, 15 bp, Homo sapiens
aggcaggaatgttta

SEQ ID NO: 296701 - DNA, 15 bp, Homo sapiens
caggcaggaatgttt

SEQ ID NO: 296702 - DNA, 15 bp, Homo sapiens
gcaggcaggaatgtt

SEQ ID NO: 296703 - DNA, 15 bp, Homo sapiens
agcaggcaggaatgt

SEQ ID NO: 296704 - DNA, 15 bp, Homo sapiens
cagcaggcaggaatg

SEQ ID NO: 296705 - DNA, 15 bp, Homo sapiens
ccagcaggcaggaat

SEQ ID NO: 296706 - DNA, 15 bp, Homo sapiens
gccagcaggcaggaa

SEQ ID NO: 296707 - DNA, 15 bp, Homo sapiens
agccagcaggcagga

SEQ ID NO: 296708 - DNA, 15 bp, Homo sapiens
gagccagcaggcagg

SEQ ID NO: 296709 - DNA, 15 bp, Homo sapiens
agagccagcaggcag

SEQ ID NO: 296710 - DNA, 15 bp, Homo sapiens
cagagccagcaggca

SEQ ID NO: 296711 - DNA, 15 bp, Homo sapiens
tcagagccagcaggc

SEQ ID NO: 296712 - DNA, 15 bp, Homo sapiens
ttcagagccagcagg

SEQ ID NO: 296713 - DNA, 15 bp, Homo sapiens
cttcagagccagcag

SEQ ID NO: 296714 - DNA, 15 bp, Homo sapiens
tcttcagagccagca

SEQ ID NO: 296715 - DNA, 15 bp, Homo sapiens
ctcttcagagccagc

SEQ ID NO: 296716 - DNA, 15 bp, Homo sapiens
tctcttcagagccag

SEQ ID NO: 296717 - DNA, 15 bp, Homo sapiens
ctctcttcagagcca

SEQ ID NO: 296718 - DNA, 15 bp, Homo sapiens
gctctcttcagagcc

SEQ ID NO: 296719 - DNA, 15 bp, Homo sapiens
tgctctcttcagagc

SEQ ID NO: 296720 - DNA, 15 bp, Homo sapiens
ctgctctcttcagag

SEQ ID NO: 296721 - DNA, 15 bp, Homo sapiens
gctgctctcttcaga

SEQ ID NO: 296722 - DNA, 15 bp, Homo sapiens
tgctgctctcttcag

SEQ ID NO: 296723 - DNA, 15 bp, Homo sapiens
ctgctgctctcttca

SEQ ID NO: 296724 - DNA, 15 bp, Homo sapiens
tctgctgctctcttc

SEQ ID NO: 296725 - DNA, 15 bp, Homo sapiens
atctgctgctctctt

SEQ ID NO: 296726 - DNA, 15 bp, Homo sapiens
gatctgctgctctct

SEQ ID NO: 296727 - DNA, 15 bp, Homo sapiens
agatctgctgctctc

SEQ ID NO: 296728 - DNA, 15 bp, Homo sapiens
gagatctgctgctct

SEQ ID NO: 296729 - DNA, 15 bp, Homo sapiens
ggagatctgctgctc

SEQ ID NO: 296730 - DNA, 15 bp, Homo sapiens
gggagatctgctgct

SEQ ID NO: 296731 - DNA, 15 bp, Homo sapiens
tgggagatctgctgc

SEQ ID NO: 296732 - DNA, 15 bp, Homo sapiens
ctgggagatctgctg

SEQ ID NO: 296733 - DNA, 15 bp, Homo sapiens
gctgggagatctgct

SEQ ID NO: 296734 - DNA, 15 bp, Homo sapiens
tgctgggagatctgc

SEQ ID NO: 296735 - DNA, 15 bp, Homo sapiens
gtgctgggagatctg

SEQ ID NO: 296736 - DNA, 15 bp, Homo sapiens
tgtgctgggagatct

SEQ ID NO: 296737 - DNA, 15 bp, Homo sapiens
ctgtgctgggagatc

SEQ ID NO: 296738 - DNA, 15 bp, Homo sapiens
actgtgctgggagat

SEQ ID NO: 296739 - DNA, 15 bp, Homo sapiens
cactgtgctgggaga

SEQ ID NO: 296740 - DNA, 15 bp, Homo sapiens
gcactgtgctgggag

SEQ ID NO: 296741 - DNA, 15 bp, Homo sapiens
agcactgtgctggga

SEQ ID NO: 296742 - DNA, 15 bp, Homo sapiens
gagcactgtgctggg

SEQ ID NO: 296743 - DNA, 15 bp, Homo sapiens
tgagcactgtgctgg

SEQ ID NO: 296744 - DNA, 15 bp, Homo sapiens
ttgagcactgtgctg

SEQ ID NO: 296745 - DNA, 15 bp, Homo sapiens
cttgagcactgtgct

SEQ ID NO: 296746 - DNA, 15 bp, Homo sapiens
gcttgagcactgtgc

SEQ ID NO: 296747 - DNA, 15 bp, Homo sapiens
agcttgagcactgtg

SEQ ID NO: 296748 - DNA, 15 bp, Homo sapiens
gagcttgagcactgt

SEQ ID NO: 296749 - DNA, 15 bp, Homo sapiens
agagcttgagcactg

SEQ ID NO: 296750 - DNA, 15 bp, Homo sapiens
cagagcttgagcact

SEQ ID NO: 296751 - DNA, 15 bp, Homo sapiens
gcagagcttgagcac

SEQ ID NO: 296752 - DNA, 15 bp, Homo sapiens
agcagagcttgagca

SEQ ID NO: 296753 - DNA, 15 bp, Homo sapiens
tagcagagcttgagc

SEQ ID NO: 296754 - DNA, 15 bp, Homo sapiens
ttagcagagcttgag

SEQ ID NO: 296755 - DNA, 15 bp, Homo sapiens
cttagcagagcttga

SEQ ID NO: 296756 - DNA, 15 bp, Homo sapiens
ccttagcagagcttg

SEQ ID NO: 296757 - DNA, 15 bp, Homo sapiens
cccttagcagagctt

SEQ ID NO: 296758 - DNA, 15 bp, Homo sapiens
tcccttagcagagct

SEQ ID NO: 296759 - DNA, 15 bp, Homo sapiens
gtcccttagcagagc

SEQ ID NO: 296760 - DNA, 15 bp, Homo sapiens
tgtcccttagcagag

SEQ ID NO: 296761 - DNA, 15 bp, Homo sapiens
ctgtcccttagcaga

SEQ ID NO: 296762 - DNA, 15 bp, Homo sapiens
tctgtcccttagcag

SEQ ID NO: 296763 - DNA, 15 bp, Homo sapiens
gtctgtcccttagca

SEQ ID NO: 296764 - DNA, 15 bp, Homo sapiens
agtctgtcccttagc

SEQ ID NO: 296765 - DNA, 15 bp, Homo sapiens
cagtctgtcccttag

SEQ ID NO: 296766 - DNA, 15 bp, Homo sapiens
acagtctgtccctta

SEQ ID NO: 296767 - DNA, 15 bp, Homo sapiens
gacagtctgtccctt

SEQ ID NO: 296768 - DNA, 15 bp, Homo sapiens
agacagtctgtccct

SEQ ID NO: 296769 - DNA, 15 bp, Homo sapiens
gagacagtctgtccc

SEQ ID NO: 296770 - DNA, 15 bp, Homo sapiens
ggagacagtctgtcc

SEQ ID NO: 296771 - DNA, 15 bp, Homo sapiens
aggagacagtctgtc

SEQ ID NO: 296772 - DNA, 15 bp, Homo sapiens
gaggagacagtctgt

SEQ ID NO: 296773 - DNA, 15 bp, Homo sapiens
tgaggagacagtctg

SEQ ID NO: 296774 - DNA, 15 bp, Homo sapiens
ttgaggagacagtct

SEQ ID NO: 296775 - DNA, 15 bp, Homo sapiens
cttgaggagacagtc

SEQ ID NO: 296776 - DNA, 15 bp, Homo sapiens
acttgaggagacagt

SEQ ID NO: 296777 - DNA, 15 bp, Homo sapiens
cacttgaggagacag

SEQ ID NO: 296778 - DNA, 15 bp, Homo sapiens
ccacttgaggagaca

SEQ ID NO: 296779 - DNA, 15 bp, Homo sapiens
cccacttgaggagac

SEQ ID NO: 296780 - DNA, 15 bp, Homo sapiens
acccacttgaggaga

SEQ ID NO: 296781 - DNA, 15 bp, Homo sapiens
gacccacttgaggag

SEQ ID NO: 296782 - DNA, 15 bp, Homo sapiens
ggacccacttgagga

SEQ ID NO: 296783 - DNA, 15 bp, Homo sapiens
gggacccacttgagg

SEQ ID NO: 296784 - DNA, 15 bp, Homo sapiens
agggacccacttgag

SEQ ID NO: 296785 - DNA, 15 bp, Homo sapiens
cagggacccacttga

SEQ ID NO: 296786 - DNA, 15 bp, Homo sapiens
tcagggacccacttg

SEQ ID NO: 296787 - DNA, 15 bp, Homo sapiens
gtcagggacccactt

SEQ ID NO: 296788 - DNA, 15 bp, Homo sapiens
ggtcagggacccact

SEQ ID NO: 296789 - DNA, 15 bp, Homo sapiens
gggtcagggacccac

SEQ ID NO: 296790 - DNA, 15 bp, Homo sapiens
ggggtcagggaccca

SEQ ID NO: 296791 - DNA, 15 bp, Homo sapiens
aggggtcagggaccc

SEQ ID NO: 296792 - DNA, 15 bp, Homo sapiens
caggggtcagggacc

SEQ ID NO: 296793 - DNA, 15 bp, Homo sapiens
acaggggtcagggac

SEQ ID NO: 296794 - DNA, 15 bp, Homo sapiens
cacaggggtcaggga

SEQ ID NO: 296795 - DNA, 15 bp, Homo sapiens
gcacaggggtcaggg

SEQ ID NO: 296796 - DNA, 15 bp, Homo sapiens
ggcacaggggtcagg

SEQ ID NO: 296797 - DNA, 15 bp, Homo sapiens
aggcacaggggtcag

SEQ ID NO: 296798 - DNA, 15 bp, Homo sapiens
gaggcacaggggtca

SEQ ID NO: 296799 - DNA, 15 bp, Homo sapiens
ggaggcacaggggtc

SEQ ID NO: 296800 - DNA, 15 bp, Homo sapiens
aggaggcacaggggt

SEQ ID NO: 296801 - DNA, 15 bp, Homo sapiens
caggaggcacagggg

SEQ ID NO: 296802 - DNA, 15 bp, Homo sapiens
tcaggaggcacaggg

SEQ ID NO: 296803 - DNA, 15 bp, Homo sapiens
gtcaggaggcacagg

SEQ ID NO: 296804 - DNA, 15 bp, Homo sapiens
agtcaggaggcacag

SEQ ID NO: 296805 - DNA, 15 bp, Homo sapiens
cagtcaggaggcaca

SEQ ID NO: 296806 - DNA, 15 bp, Homo sapiens
ccagtcaggaggcac

SEQ ID NO: 296807 - DNA, 15 bp, Homo sapiens
cccagtcaggaggca

SEQ ID NO: 296808 - DNA, 15 bp, Homo sapiens
tcccagtcaggaggc

SEQ ID NO: 296809 - DNA, 15 bp, Homo sapiens
ttcccagtcaggagg

SEQ ID NO: 296810 - DNA, 15 bp, Homo sapiens
tttcccagtcaggag

SEQ ID NO: 296811 - DNA, 15 bp, Homo sapiens
gtttcccagtcagga

SEQ ID NO: 296812 - DNA, 15 bp, Homo sapiens
tgtttcccagtcagg

SEQ ID NO: 296813 - DNA, 15 bp, Homo sapiens
gtgtttcccagtcag

SEQ ID NO: 296814 - DNA, 15 bp, Homo sapiens
ggtgtttcccagtca

SEQ ID NO: 296815 - DNA, 15 bp, Homo sapiens
aggtgtttcccagtc

SEQ ID NO: 296816 - DNA, 15 bp, Homo sapiens
gaggtgtttcccagt

SEQ ID NO: 296817 - DNA, 15 bp, Homo sapiens
ggaggtgtttcccag

SEQ ID NO: 296818 - DNA, 15 bp, Homo sapiens
aggaggtgtttccca

SEQ ID NO: 296819 - DNA, 15 bp, Homo sapiens
caggaggtgtttccc

SEQ ID NO: 296820 - DNA, 15 bp, Homo sapiens
ccaggaggtgtttcc

SEQ ID NO: 296821 - DNA, 15 bp, Homo sapiens
gccaggaggtgtttc

SEQ ID NO: 296822 - DNA, 15 bp, Homo sapiens
tgccaggaggtgttt

SEQ ID NO: 296823 - DNA, 15 bp, Homo sapiens
ctgccaggaggtgtt

SEQ ID NO: 296824 - DNA, 15 bp, Homo sapiens
cctgccaggaggtgt

SEQ ID NO: 296825 - DNA, 15 bp, Homo sapiens
tcctgccaggaggtg

SEQ ID NO: 296826 - DNA, 15 bp, Homo sapiens
ttcctgccaggaggt

SEQ ID NO: 296827 - DNA, 15 bp, Homo sapiens
attcctgccaggagg

SEQ ID NO: 296828 - DNA, 15 bp, Homo sapiens
gattcctgccaggag

SEQ ID NO: 296829 - DNA, 15 bp, Homo sapiens
tgattcctgccagga

SEQ ID NO: 296830 - DNA, 15 bp, Homo sapiens
ttgattcctgccagg

SEQ ID NO: 296831 - DNA, 15 bp, Homo sapiens
gttgattcctgccag

SEQ ID NO: 296832 - DNA, 15 bp, Homo sapiens
tgttgattcctgcca

SEQ ID NO: 296833 - DNA, 15 bp, Homo sapiens
ctgttgattcctgcc

SEQ ID NO: 296834 - DNA, 15 bp, Homo sapiens
tctgttgattcctgc

SEQ ID NO: 296835 - DNA, 15 bp, Homo sapiens
gtctgttgattcctg

SEQ ID NO: 296836 - DNA, 15 bp, Homo sapiens
tgtctgttgattcct

SEQ ID NO: 296837 - DNA, 15 bp, Homo sapiens
gtgtctgttgattcc

SEQ ID NO: 296838 - DNA, 15 bp, Homo sapiens
ggtgtctgttgattc

SEQ ID NO: 296839 - DNA, 15 bp, Homo sapiens
aggtgtctgttgatt

SEQ ID NO: 296840 - DNA, 15 bp, Homo sapiens
gaggtgtctgttgat

SEQ ID NO: 296841 - DNA, 15 bp, Homo sapiens
tgaggtgtctgttga

SEQ ID NO: 296842 - DNA, 15 bp, Homo sapiens
atgaggtgtctgttg

SEQ ID NO: 296843 - DNA, 15 bp, Homo sapiens
tatgaggtgtctgtt

SEQ ID NO: 296844 - DNA, 15 bp, Homo sapiens
gtatgaggtgtctgt

SEQ ID NO: 296845 - DNA, 15 bp, Homo sapiens
tgtatgaggtgtctg

SEQ ID NO: 296846 - DNA, 15 bp, Homo sapiens
ctgtatgaggtgtct

SEQ ID NO: 296847 - DNA, 15 bp, Homo sapiens
cctgtatgaggtgtc

SEQ ID NO: 296848 - DNA, 15 bp, Homo sapiens
tcctgtatgaggtgt

SEQ ID NO: 296849 - DNA, 15 bp, Homo sapiens
ctcctgtatgaggtg

SEQ ID NO: 296850 - DNA, 15 bp, Homo sapiens
tctcctgtatgaggt

SEQ ID NO: 296851 - DNA, 15 bp, Homo sapiens
ctctcctgtatgagg

SEQ ID NO: 296852 - DNA, 15 bp, Homo sapiens
actctcctgtatgag

SEQ ID NO: 296853 - DNA, 15 bp, Homo sapiens
aactctcctgtatga

SEQ ID NO: 296854 - DNA, 15 bp, Homo sapiens
gaactctcctgtatg

SEQ ID NO: 296855 - DNA, 15 bp, Homo sapiens
ggaactctcctgtat

SEQ ID NO: 296856 - DNA, 15 bp, Homo sapiens
tggaactctcctgta

SEQ ID NO: 296857 - DNA, 15 bp, Homo sapiens
ctggaactctcctgt

SEQ ID NO: 296858 - DNA, 15 bp, Homo sapiens
gctggaactctcctg

SEQ ID NO: 296859 - DNA, 15 bp, Homo sapiens
agctggaactctcct

SEQ ID NO: 296860 - DNA, 15 bp, Homo sapiens
cagctggaactctcc

SEQ ID NO: 296861 - DNA, 15 bp, Homo sapiens
gcagctggaactctc

SEQ ID NO: 296862 - DNA, 15 bp, Homo sapiens
ggcagctggaactct

SEQ ID NO: 296863 - DNA, 15 bp, Homo sapiens
tggcagctggaactc

SEQ ID NO: 296864 - DNA, 15 bp, Homo sapiens
atggcagctggaact

SEQ ID NO: 296865 - DNA, 15 bp, Homo sapiens
gatggcagctggaac

SEQ ID NO: 296866 - DNA, 15 bp, Homo sapiens
agatggcagctggaa

SEQ ID NO: 296867 - DNA, 15 bp, Homo sapiens
cagatggcagctgga

SEQ ID NO: 296868 - DNA, 15 bp, Homo sapiens
ccagatggcagctgg

SEQ ID NO: 296869 - DNA, 15 bp, Homo sapiens
accagatggcagctg

SEQ ID NO: 296870 - DNA, 15 bp, Homo sapiens
caccagatggcagct

SEQ ID NO: 296871 - DNA, 15 bp, Homo sapiens
ccaccagatggcagc

SEQ ID NO: 296872 - DNA, 15 bp, Homo sapiens
cccaccagatggcag

SEQ ID NO: 296873 - DNA, 15 bp, Homo sapiens
acccaccagatggca

SEQ ID NO: 296874 - DNA, 15 bp, Homo sapiens
tacccaccagatggc

SEQ ID NO: 296875 - DNA, 15 bp, Homo sapiens
gtacccaccagatgg

SEQ ID NO: 296876 - DNA, 15 bp, Homo sapiens
ggtacccaccagatg

SEQ ID NO: 296877 - DNA, 15 bp, Homo sapiens
gggtacccaccagat

SEQ ID NO: 296878 - DNA, 15 bp, Homo sapiens
ggggtacccaccaga

SEQ ID NO: 296879 - DNA, 15 bp, Homo sapiens
aggggtacccaccag

SEQ ID NO: 296880 - DNA, 15 bp, Homo sapiens
gaggggtacccacca

SEQ ID NO: 296881 - DNA, 15 bp, Homo sapiens
agaggggtacccacc

SEQ ID NO: 296882 - DNA, 15 bp, Homo sapiens
cagaggggtacccac

SEQ ID NO: 296883 - DNA, 15 bp, Homo sapiens
ccagaggggtaccca

SEQ ID NO: 296884 - DNA, 15 bp, Homo sapiens
cccagaggggtaccc

SEQ ID NO: 296885 - DNA, 15 bp, Homo sapiens
tcccagaggggtacc

SEQ ID NO: 296886 - DNA, 15 bp, Homo sapiens
gtcccagaggggtac

SEQ ID NO: 296887 - DNA, 15 bp, Homo sapiens
cgtcccagaggggta

SEQ ID NO: 296888 - DNA, 15 bp, Homo sapiens
tcgtcccagaggggt

SEQ ID NO: 296889 - DNA, 15 bp, Homo sapiens
ttcgtcccagagggg

SEQ ID NO: 296890 - DNA, 15 bp, Homo sapiens
cttcgtcccagaggg

SEQ ID NO: 296891 - DNA, 15 bp, Homo sapiens
gcttcgtcccagagg

SEQ ID NO: 296892 - DNA, 15 bp, Homo sapiens
agcttcgtcccagag

SEQ ID NO: 296893 - DNA, 15 bp, Homo sapiens
aagcttcgtcccaga

SEQ ID NO: 296894 - DNA, 15 bp, Homo sapiens
gaagcttcgtcccag

SEQ ID NO: 296895 - DNA, 15 bp, Homo sapiens
ggaagcttcgtccca

SEQ ID NO: 296896 - DNA, 15 bp, Homo sapiens
tggaagcttcgtccc

SEQ ID NO: 296897 - DNA, 15 bp, Homo sapiens
ctggaagcttcgtcc

SEQ ID NO: 296898 - DNA, 15 bp, Homo sapiens
tctggaagcttcgtc

SEQ ID NO: 296899 - DNA, 15 bp, Homo sapiens
ctctggaagcttcgt

SEQ ID NO: 296900 - DNA, 15 bp, Homo sapiens
cctctggaagcttcg

SEQ ID NO: 296901 - DNA, 15 bp, Homo sapiens
tcctctggaagcttc

SEQ ID NO: 296902 - DNA, 15 bp, Homo sapiens
ttcctctggaagctt

SEQ ID NO: 296903 - DNA, 15 bp, Homo sapiens
cttcctctggaagct

SEQ ID NO: 296904 - DNA, 15 bp, Homo sapiens
ccttcctctggaagc

SEQ ID NO: 296905 - DNA, 15 bp, Homo sapiens
tccttcctctggaag

SEQ ID NO: 296906 - DNA, 15 bp, Homo sapiens
ttccttcctctggaa

SEQ ID NO: 296907 - DNA, 15 bp, Homo sapiens
gttccttcctctgga

SEQ ID NO: 296908 - DNA, 15 bp, Homo sapiens
tgttccttcctctgg

SEQ ID NO: 296909 - DNA, 15 bp, Homo sapiens
ctgttccttcctctg

SEQ ID NO: 296910 - DNA, 15 bp, Homo sapiens
cctgttccttcctct

SEQ ID NO: 296911 - DNA, 15 bp, Homo sapiens
gcctgttccttcctc

SEQ ID NO: 296912 - DNA, 15 bp, Homo sapiens
tgcctgttccttcct

SEQ ID NO: 296913 - DNA, 15 bp, Homo sapiens
ctgcctgttccttcc

SEQ ID NO: 296914 - DNA, 15 bp, Homo sapiens
gctgcctgttccttc

SEQ ID NO: 296915 - DNA, 15 bp, Homo sapiens
tgctgcctgttcctt

SEQ ID NO: 296916 - DNA, 15 bp, Homo sapiens
ttgctgcctgttcct

SEQ ID NO: 296917 - DNA, 15 bp, Homo sapiens
attgctgcctgttcc

SEQ ID NO: 296918 - DNA, 15 bp, Homo sapiens
gattgctgcctgttc

SEQ ID NO: 296919 - DNA, 15 bp, Homo sapiens
agattgctgcctgtt

SEQ ID NO: 296920 - DNA, 15 bp, Homo sapiens
aagattgctgcctgt

SEQ ID NO: 296921 - DNA, 15 bp, Homo sapiens
aaagattgctgcctg

SEQ ID NO: 296922 - DNA, 15 bp, Homo sapiens
caaagattgctgcct

SEQ ID NO: 296923 - DNA, 15 bp, Homo sapiens
gcaaagattgctgcc

SEQ ID NO: 296924 - DNA, 15 bp, Homo sapiens
agcaaagattgctgc

SEQ ID NO: 296925 - DNA, 15 bp, Homo sapiens
gagcaaagattgctg

SEQ ID NO: 296926 - DNA, 15 bp, Homo sapiens
agagcaaagattgct

SEQ ID NO: 296927 - DNA, 15 bp, Homo sapiens
aagagcaaagattgc

SEQ ID NO: 296928 - DNA, 15 bp, Homo sapiens
gaagagcaaagattg

SEQ ID NO: 296929 - DNA, 15 bp, Homo sapiens
agaagagcaaagatt

SEQ ID NO: 296930 - DNA, 15 bp, Homo sapiens
cagaagagcaaagat

SEQ ID NO: 296931 - DNA, 15 bp, Homo sapiens
gcagaagagcaaaga

SEQ ID NO: 296932 - DNA, 15 bp, Homo sapiens
tgcagaagagcaaag

SEQ ID NO: 296933 - DNA, 15 bp, Homo sapiens
ttgcagaagagcaaa

SEQ ID NO: 296934 - DNA, 15 bp, Homo sapiens
gttgcagaagagcaa

SEQ ID NO: 296935 - DNA, 15 bp, Homo sapiens
ggttgcagaagagca

SEQ ID NO: 296936 - DNA, 15 bp, Homo sapiens
aggttgcagaagagc

SEQ ID NO: 296937 - DNA, 15 bp, Homo sapiens
gaggttgcagaagag

SEQ ID NO: 296938 - DNA, 15 bp, Homo sapiens
ggaggttgcagaaga

SEQ ID NO: 296939 - DNA, 15 bp, Homo sapiens
tggaggttgcagaag

SEQ ID NO: 296940 - DNA, 15 bp, Homo sapiens
gtggaggttgcagaa

SEQ ID NO: 296941 - DNA, 15 bp, Homo sapiens
agtggaggttgcaga

SEQ ID NO: 296942 - DNA, 15 bp, Homo sapiens
cagtggaggttgcag

SEQ ID NO: 296943 - DNA, 15 bp, Homo sapiens
ccagtggaggttgca

SEQ ID NO: 296944 - DNA, 15 bp, Homo sapiens
accagtggaggttgc

SEQ ID NO: 296945 - DNA, 15 bp, Homo sapiens
caccagtggaggttg

SEQ ID NO: 296946 - DNA, 15 bp, Homo sapiens
tcaccagtggaggtt

SEQ ID NO: 296947 - DNA, 15 bp, Homo sapiens
atcaccagtggaggt

SEQ ID NO: 296948 - DNA, 15 bp, Homo sapiens
tatcaccagtggagg

SEQ ID NO: 296949 - DNA, 15 bp, Homo sapiens
gtatcaccagtggag

SEQ ID NO: 296950 - DNA, 15 bp, Homo sapiens
ggtatcaccagtgga

SEQ ID NO: 296951 - DNA, 15 bp, Homo sapiens
tggtatcaccagtgg

SEQ ID NO: 296952 - DNA, 15 bp, Homo sapiens
ctggtatcaccagtg

SEQ ID NO: 296953 - DNA, 15 bp, Homo sapiens
cctggtatcaccagt

SEQ ID NO: 296954 - DNA, 15 bp, Homo sapiens
gcctggtatcaccag

SEQ ID NO: 296955 - DNA, 15 bp, Homo sapiens
tgcctggtatcacca

SEQ ID NO: 296956 - DNA, 15 bp, Homo sapiens
ttgcctggtatcacc

SEQ ID NO: 296957 - DNA, 15 bp, Homo sapiens
tttgcctggtatcac

SEQ ID NO: 296958 - DNA, 15 bp, Homo sapiens
gtttgcctggtatca

SEQ ID NO: 296959 - DNA, 15 bp, Homo sapiens
tgtttgcctggtatc

SEQ ID NO: 296960 - DNA, 15 bp, Homo sapiens
ctgtttgcctggtat

SEQ ID NO: 296961 - DNA, 15 bp, Homo sapiens
cctgtttgcctggta

SEQ ID NO: 296962 - DNA, 15 bp, Homo sapiens
ccctgtttgcctggt

SEQ ID NO: 296963 - DNA, 15 bp, Homo sapiens
accctgtttgcctgg

SEQ ID NO: 296964 - DNA, 15 bp, Homo sapiens
gaccctgtttgcctg

SEQ ID NO: 296965 - DNA, 15 bp, Homo sapiens
agaccctgtttgcct

SEQ ID NO: 296966 - DNA, 15 bp, Homo sapiens
cagaccctgtttgcc

SEQ ID NO: 296967 - DNA, 15 bp, Homo sapiens
ccagaccctgtttgc

SEQ ID NO: 296968 - DNA, 15 bp, Homo sapiens
tccagaccctgtttg

SEQ ID NO: 296969 - DNA, 15 bp, Homo sapiens
ctccagaccctgttt

SEQ ID NO: 296970 - DNA, 15 bp, Homo sapiens
actccagaccctgtt

SEQ ID NO: 296971 - DNA, 15 bp, Homo sapiens
cactccagaccctgt

SEQ ID NO: 296972 - DNA, 15 bp, Homo sapiens
ccactccagaccctg

SEQ ID NO: 296973 - DNA, 15 bp, Homo sapiens
tccactccagaccct

SEQ ID NO: 296974 - DNA, 15 bp, Homo sapiens
gtccactccagaccc

SEQ ID NO: 296975 - DNA, 15 bp, Homo sapiens
ggtccactccagacc

SEQ ID NO: 296976 - DNA, 15 bp, Homo sapiens
aggtccactccagac

SEQ ID NO: 296977 - DNA, 15 bp, Homo sapiens
gaggtccactccaga

SEQ ID NO: 296978 - DNA, 15 bp, Homo sapiens
ggaggtccactccag

SEQ ID NO: 296979 - DNA, 15 bp, Homo sapiens
tggaggtccactcca

SEQ ID NO: 296980 - DNA, 15 bp, Homo sapiens
ctggaggtccactcc

SEQ ID NO: 296981 - DNA, 15 bp, Homo sapiens
gctggaggtccactc

SEQ ID NO: 296982 - DNA, 15 bp, Homo sapiens
tgctggaggtccact

SEQ ID NO: 296983 - DNA, 15 bp, Homo sapiens
ttgctggaggtccac

SEQ ID NO: 296984 - DNA, 15 bp, Homo sapiens
tttgctggaggtcca

SEQ ID NO: 296985 - DNA, 15 bp, Homo sapiens
gtttgctggaggtcc

SEQ ID NO: 296986 - DNA, 15 bp, Homo sapiens
agtttgctggaggtc

SEQ ID NO: 296987 - DNA, 15 bp, Homo sapiens
gagtttgctggaggt

SEQ ID NO: 296988 - DNA, 15 bp, Homo sapiens
ggagtttgctggagg

SEQ ID NO: 296989 - DNA, 15 bp, Homo sapiens
tggagtttgctggag

SEQ ID NO: 296990 - DNA, 15 bp, Homo sapiens
ctggagtttgctgga

SEQ ID NO: 296991 - DNA, 15 bp, Homo sapiens
gctggagtttgctgg

SEQ ID NO: 296992 - DNA, 15 bp, Homo sapiens
tgctggagtttgctg

SEQ ID NO: 296993 - DNA, 15 bp, Homo sapiens
gtgctggagtttgct

SEQ ID NO: 296994 - DNA, 15 bp, Homo sapiens
tgtgctggagtttgc

SEQ ID NO: 296995 - DNA, 15 bp, Homo sapiens
gtgtgctggagtttg

SEQ ID NO: 296996 - DNA, 15 bp, Homo sapiens
ggtgtgctggagttt

SEQ ID NO: 296997 - DNA, 15 bp, Homo sapiens
aggtgtgctggagtt

SEQ ID NO: 296998 - DNA, 15 bp, Homo sapiens
caggtgtgctggagt

SEQ ID NO: 296999 - DNA, 15 bp, Homo sapiens
gcaggtgtgctggag

SEQ ID NO: 297000 - DNA, 15 bp, Homo sapiens
tgcaggtgtgctgga

SEQ ID NO: 297001 - DNA, 15 bp, Homo sapiens
ctgcaggtgtgctgg

SEQ ID NO: 297002 - DNA, 15 bp, Homo sapiens
gctgcaggtgtgctg

SEQ ID NO: 297003 - DNA, 15 bp, Homo sapiens
tgctgcaggtgtgct

SEQ ID NO: 297004 - DNA, 15 bp, Homo sapiens
ctgctgcaggtgtgc

SEQ ID NO: 297005 - DNA, 15 bp, Homo sapiens
tctgctgcaggtgtg

SEQ ID NO: 297006 - DNA, 15 bp, Homo sapiens
ctctgctgcaggtgt

SEQ ID NO: 297007 - DNA, 15 bp, Homo sapiens
cctctgctgcaggtg

SEQ ID NO: 297008 - DNA, 15 bp, Homo sapiens
ccctctgctgcaggt

SEQ ID NO: 297009 - DNA, 15 bp, Homo sapiens
cccctctgctgcagg

SEQ ID NO: 297010 - DNA, 15 bp, Homo sapiens
gcccctctgctgcag

SEQ ID NO: 297011 - DNA, 15 bp, Homo sapiens
ggcccctctgctgca

SEQ ID NO: 297012 - DNA, 15 bp, Homo sapiens
aggcccctctgctgc

SEQ ID NO: 297013 - DNA, 15 bp, Homo sapiens
caggcccctctgctg

SEQ ID NO: 297014 - DNA, 15 bp, Homo sapiens
tcaggcccctctgct

SEQ ID NO: 297015 - DNA, 15 bp, Homo sapiens
gtcaggcccctctgc

SEQ ID NO: 297016 - DNA, 15 bp, Homo sapiens
agtcaggcccctctg

SEQ ID NO: 297017 - DNA, 15 bp, Homo sapiens
cagtcaggcccctct

SEQ ID NO: 297018 - DNA, 15 bp, Homo sapiens
acagtcaggcccctc

SEQ ID NO: 297019 - DNA, 15 bp, Homo sapiens
aacagtcaggcccct

SEQ ID NO: 297020 - DNA, 15 bp, Homo sapiens
taacagtcaggcccc

SEQ ID NO: 297021 - DNA, 15 bp, Homo sapiens
ctaacagtcaggccc

SEQ ID NO: 297022 - DNA, 15 bp, Homo sapiens
tctaacagtcaggcc

SEQ ID NO: 297023 - DNA, 15 bp, Homo sapiens
ttctaacagtcaggc

SEQ ID NO: 297024 - DNA, 15 bp, Homo sapiens
cttctaacagtcagg

SEQ ID NO: 297025 - DNA, 15 bp, Homo sapiens
ccttctaacagtcag

SEQ ID NO: 297026 - DNA, 15 bp, Homo sapiens
tccttctaacagtca

SEQ ID NO: 297027 - DNA, 15 bp, Homo sapiens
ctccttctaacagtc

SEQ ID NO: 297028 - DNA, 15 bp, Homo sapiens
tctccttctaacagt

SEQ ID NO: 297029 - DNA, 15 bp, Homo sapiens
ttctccttctaacag

SEQ ID NO: 297030 - DNA, 15 bp, Homo sapiens
gttctccttctaaca

SEQ ID NO: 297031 - DNA, 15 bp, Homo sapiens
agttctccttctaac

SEQ ID NO: 297032 - DNA, 15 bp, Homo sapiens
tagttctccttctaa

SEQ ID NO: 297033 - DNA, 15 bp, Homo sapiens
ttagttctccttcta

SEQ ID NO: 297034 - DNA, 15 bp, Homo sapiens
gttagttctccttct

SEQ ID NO: 297035 - DNA, 15 bp, Homo sapiens
tgttagttctccttc

SEQ ID NO: 297036 - DNA, 15 bp, Homo sapiens
ttgttagttctcctt

SEQ ID NO: 297037 - DNA, 15 bp, Homo sapiens
tttgttagttctcct

SEQ ID NO: 297038 - DNA, 15 bp, Homo sapiens
gtttgttagttctcc

SEQ ID NO: 297039 - DNA, 15 bp, Homo sapiens
tgtttgttagttctc

SEQ ID NO: 297040 - DNA, 15 bp, Homo sapiens
ctgtttgttagttct

SEQ ID NO: 297041 - DNA, 15 bp, Homo sapiens
tctgtttgttagttc

SEQ ID NO: 297042 - DNA, 15 bp, Homo sapiens
ttctgtttgttagtt

SEQ ID NO: 297043 - DNA, 15 bp, Homo sapiens
tttctgtttgttagt

SEQ ID NO: 297044 - DNA, 15 bp, Homo sapiens
atttctgtttgttag

SEQ ID NO: 297045 - DNA, 15 bp, Homo sapiens
catttctgtttgtta

SEQ ID NO: 297046 - DNA, 15 bp, Homo sapiens
tcatttctgtttgtt

SEQ ID NO: 297047 - DNA, 15 bp, Homo sapiens
ttcatttctgtttgt

SEQ ID NO: 297048 - DNA, 15 bp, Homo sapiens
attcatttctgtttg

SEQ ID NO: 297049 - DNA, 15 bp, Homo sapiens
tattcatttctgttt

SEQ ID NO: 297050 - DNA, 15 bp, Homo sapiens
ctattcatttctgtt

SEQ ID NO: 297051 - DNA, 15 bp, Homo sapiens
gctattcatttctgt

SEQ ID NO: 297052 - DNA, 15 bp, Homo sapiens
tgctattcatttctg

SEQ ID NO: 297053 - DNA, 15 bp, Homo sapiens
atgctattcatttct

SEQ ID NO: 297054 - DNA, 15 bp, Homo sapiens
gatgctattcatttc

SEQ ID NO: 297055 - DNA, 15 bp, Homo sapiens
tgatgctattcattt

SEQ ID NO: 297056 - DNA, 15 bp, Homo sapiens
ttgatgctattcatt

SEQ ID NO: 297057 - DNA, 15 bp, Homo sapiens
gttgatgctattcat

SEQ ID NO: 297058 - DNA, 15 bp, Homo sapiens
tgttgatgctattca

SEQ ID NO: 297059 - DNA, 15 bp, Homo sapiens
atgttgatgctattc

SEQ ID NO: 297060 - DNA, 15 bp, Homo sapiens
gatgttgatgctatt

SEQ ID NO: 297061 - DNA, 15 bp, Homo sapiens
tgatgttgatgctat

SEQ ID NO: 297062 - DNA, 15 bp, Homo sapiens
ttgatgttgatgcta

SEQ ID NO: 297063 - DNA, 15 bp, Homo sapiens
gttgatgttgatgct

SEQ ID NO: 297064 - DNA, 15 bp, Homo sapiens
tgttgatgttgatgc

SEQ ID NO: 297065 - DNA, 15 bp, Homo sapiens
ttgttgatgttgatg

SEQ ID NO: 297066 - DNA, 15 bp, Homo sapiens
tttgttgatgttgat

SEQ ID NO: 297067 - DNA, 15 bp, Homo sapiens
ttttgttgatgttga

SEQ ID NO: 297068 - DNA, 15 bp, Homo sapiens
tttttgttgatgttg

SEQ ID NO: 297069 - DNA, 15 bp, Homo sapiens
ctttttgttgatgtt

SEQ ID NO: 297070 - DNA, 15 bp, Homo sapiens
cctttttgttgatgt

SEQ ID NO: 297071 - DNA, 15 bp, Homo sapiens
tcctttttgttgatg

SEQ ID NO: 297072 - DNA, 15 bp, Homo sapiens
gtcctttttgttgat

SEQ ID NO: 297073 - DNA, 15 bp, Homo sapiens
cgtcctttttgttga

SEQ ID NO: 297074 - DNA, 15 bp, Homo sapiens
acgtcctttttgttg

SEQ ID NO: 297075 - DNA, 15 bp, Homo sapiens
gacgtcctttttgtt

SEQ ID NO: 297076 - DNA, 15 bp, Homo sapiens
ggacgtcctttttgt

SEQ ID NO: 297077 - DNA, 15 bp, Homo sapiens
tggacgtcctttttg

SEQ ID NO: 297078 - DNA, 15 bp, Homo sapiens
gtggacgtccttttt

SEQ ID NO: 297079 - DNA, 15 bp, Homo sapiens
tgtggacgtcctttt

SEQ ID NO: 297080 - DNA, 15 bp, Homo sapiens
gtgtggacgtccttt

SEQ ID NO: 297081 - DNA, 15 bp, Homo sapiens
tgtgtggacgtcctt

SEQ ID NO: 297082 - DNA, 15 bp, Homo sapiens
ctgtgtggacgtcct

SEQ ID NO: 297083 - DNA, 15 bp, Homo sapiens
tctgtgtggacgtcc

SEQ ID NO: 297084 - DNA, 15 bp, Homo sapiens
ttctgtgtggacgtc

SEQ ID NO: 297085 - DNA, 15 bp, Homo sapiens
tttctgtgtggacgt

SEQ ID NO: 297086 - DNA, 15 bp, Homo sapiens
gtttctgtgtggacg

SEQ ID NO: 297087 - DNA, 15 bp, Homo sapiens
ggtttctgtgtggac

SEQ ID NO: 297088 - DNA, 15 bp, Homo sapiens
gggtttctgtgtgga

SEQ ID NO: 297089 - DNA, 15 bp, Homo sapiens
ggggtttctgtgtgg

SEQ ID NO: 297090 - DNA, 15 bp, Homo sapiens
tggggtttctgtgtg

SEQ ID NO: 297091 - DNA, 15 bp, Homo sapiens
atggggtttctgtgt

SEQ ID NO: 297092 - DNA, 15 bp, Homo sapiens
aatggggtttctgtg

SEQ ID NO: 297093 - DNA, 15 bp, Homo sapiens
aaatggggtttctgt

SEQ ID NO: 297094 - DNA, 15 bp, Homo sapiens
caaatggggtttctg

SEQ ID NO: 297095 - DNA, 15 bp, Homo sapiens
tcaaatggggtttct

SEQ ID NO: 297096 - DNA, 15 bp, Homo sapiens
ttcaaatggggtttc

SEQ ID NO: 297097 - DNA, 15 bp, Homo sapiens
cttcaaatggggttt

SEQ ID NO: 297098 - DNA, 15 bp, Homo sapiens
ccttcaaatggggtt

SEQ ID NO: 297099 - DNA, 15 bp, Homo sapiens
accttcaaatggggt

SEQ ID NO: 297100 - DNA, 15 bp, Homo sapiens
gaccttcaaatgggg

SEQ ID NO: 297101 - DNA, 15 bp, Homo sapiens
tgaccttcaaatggg

SEQ ID NO: 297102 - DNA, 15 bp, Homo sapiens
atgaccttcaaatgg

SEQ ID NO: 297103 - DNA, 15 bp, Homo sapiens
gatgaccttcaaatg

SEQ ID NO: 297104 - DNA, 15 bp, Homo sapiens
tgatgaccttcaaat

SEQ ID NO: 297105 - DNA, 15 bp, Homo sapiens
ttgatgaccttcaaa

SEQ ID NO: 297106 - DNA, 15 bp, Homo sapiens
gttgatgaccttcaa

SEQ ID NO: 297107 - DNA, 15 bp, Homo sapiens
tgttgatgaccttca

SEQ ID NO: 297108 - DNA, 15 bp, Homo sapiens
atgttgatgaccttc

SEQ ID NO: 297109 - DNA, 15 bp, Homo sapiens
gatgttgatgacctt

SEQ ID NO: 297110 - DNA, 15 bp, Homo sapiens
tgatgttgatgacct

SEQ ID NO: 297111 - DNA, 15 bp, Homo sapiens
ttgatgttgatgacc

SEQ ID NO: 297112 - DNA, 15 bp, Homo sapiens
tttgatgttgatgac

SEQ ID NO: 297113 - DNA, 15 bp, Homo sapiens
ctttgatgttgatga

SEQ ID NO: 297114 - DNA, 15 bp, Homo sapiens
tctttgatgttgatg

SEQ ID NO: 297115 - DNA, 15 bp, Homo sapiens
gtctttgatgttgat

SEQ ID NO: 297116 - DNA, 15 bp, Homo sapiens
ggtctttgatgttga

SEQ ID NO: 297117 - DNA, 15 bp, Homo sapiens
tggtctttgatgttg

SEQ ID NO: 297118 - DNA, 15 bp, Homo sapiens
ttggtctttgatgtt

SEQ ID NO: 297119 - DNA, 15 bp, Homo sapiens
tttggtctttgatgt

SEQ ID NO: 297120 - DNA, 15 bp, Homo sapiens
ctttggtctttgatg

SEQ ID NO: 297121 - DNA, 15 bp, Homo sapiens
cctttggtctttgat

SEQ ID NO: 297122 - DNA, 15 bp, Homo sapiens
acctttggtctttga

SEQ ID NO: 297123 - DNA, 15 bp, Homo sapiens
tacctttggtctttg

SEQ ID NO: 297124 - DNA, 15 bp, Homo sapiens
ctacctttggtcttt

SEQ ID NO: 297125 - DNA, 15 bp, Homo sapiens
tctacctttggtctt

SEQ ID NO: 297126 - DNA, 15 bp, Homo sapiens
atctacctttggtct

SEQ ID NO: 297127 - DNA, 15 bp, Homo sapiens
tatctacctttggtc

SEQ ID NO: 297128 - DNA, 15 bp, Homo sapiens
ttatctacctttggt

SEQ ID NO: 297129 - DNA, 15 bp, Homo sapiens
tttatctacctttgg

SEQ ID NO: 297130 - DNA, 15 bp, Homo sapiens
atttatctacctttg

SEQ ID NO: 297131 - DNA, 15 bp, Homo sapiens
gatttatctaccttt

SEQ ID NO: 297132 - DNA, 15 bp, Homo sapiens
ggatttatctacctt

SEQ ID NO: 297133 - DNA, 15 bp, Homo sapiens
tggatttatctacct

SEQ ID NO: 297134 - DNA, 15 bp, Homo sapiens
atggatttatctacc

SEQ ID NO: 297135 - DNA, 15 bp, Homo sapiens
catggatttatctac

SEQ ID NO: 297136 - DNA, 15 bp, Homo sapiens
tcatggatttatcta

SEQ ID NO: 297137 - DNA, 15 bp, Homo sapiens
ttcatggatttatct

SEQ ID NO: 297138 - DNA, 15 bp, Homo sapiens
cttcatggatttatc

SEQ ID NO: 297139 - DNA, 15 bp, Homo sapiens
tcttcatggatttat

SEQ ID NO: 297140 - DNA, 15 bp, Homo sapiens
atcttcatggattta

SEQ ID NO: 297141 - DNA, 15 bp, Homo sapiens
catcttcatggattt

SEQ ID NO: 297142 - DNA, 15 bp, Homo sapiens
tcatcttcatggatt

SEQ ID NO: 297143 - DNA, 15 bp, Homo sapiens
ctcatcttcatggat

SEQ ID NO: 297144 - DNA, 15 bp, Homo sapiens
cctcatcttcatgga

SEQ ID NO: 297145 - DNA, 15 bp, Homo sapiens
tcctcatcttcatgg

SEQ ID NO: 297146 - DNA, 15 bp, Homo sapiens
ttcctcatcttcatg

SEQ ID NO: 297147 - DNA, 15 bp, Homo sapiens
tttcctcatcttcat

SEQ ID NO: 297148 - DNA, 15 bp, Homo sapiens
ttttcctcatcttca

SEQ ID NO: 297149 - DNA, 15 bp, Homo sapiens
tttttcctcatcttc

SEQ ID NO: 297150 - DNA, 15 bp, Homo sapiens
gtttttcctcatctt

SEQ ID NO: 297151 - DNA, 15 bp, Homo sapiens
ggtttttcctcatct

SEQ ID NO: 297152 - DNA, 15 bp, Homo sapiens
tggtttttcctcatc

SEQ ID NO: 297153 - DNA, 15 bp, Homo sapiens
ctggtttttcctcat

SEQ ID NO: 297154 - DNA, 15 bp, Homo sapiens
gctggtttttcctca

SEQ ID NO: 297155 - DNA, 15 bp, Homo sapiens
tgctggtttttcctc

SEQ ID NO: 297156 - DNA, 15 bp, Homo sapiens
gtgctggtttttcct

SEQ ID NO: 297157 - DNA, 15 bp, Homo sapiens
tgtgctggtttttcc

SEQ ID NO: 297158 - DNA, 15 bp, Homo sapiens
ttgtgctggtttttc

SEQ ID NO: 297159 - DNA, 15 bp, Homo sapiens
tttgtgctggttttt

SEQ ID NO: 297160 - DNA, 15 bp, Homo sapiens
ttttgtgctggtttt

SEQ ID NO: 297161 - DNA, 15 bp, Homo sapiens
tttttgtgctggttt

SEQ ID NO: 297162 - DNA, 15 bp, Homo sapiens
ctttttgtgctggtt

SEQ ID NO: 297163 - DNA, 15 bp, Homo sapiens
cctttttgtgctggt

SEQ ID NO: 297164 - DNA, 15 bp, Homo sapiens
gcctttttgtgctgg

SEQ ID NO: 297165 - DNA, 15 bp, Homo sapiens
agcctttttgtgctg

SEQ ID NO: 297166 - DNA, 15 bp, Homo sapiens
cagcctttttgtgct

SEQ ID NO: 297167 - DNA, 15 bp, Homo sapiens
tcagcctttttgtgc

SEQ ID NO: 297168 - DNA, 15 bp, Homo sapiens
ttcagcctttttgtg

SEQ ID NO: 297169 - DNA, 15 bp, Homo sapiens
tttcagcctttttgt

SEQ ID NO: 297170 - DNA, 15 bp, Homo sapiens
ttttcagcctttttg

SEQ ID NO: 297171 - DNA, 15 bp, Homo sapiens
attttcagccttttt

SEQ ID NO: 297172 - DNA, 15 bp, Homo sapiens
aattttcagcctttt

SEQ ID NO: 297173 - DNA, 15 bp, Homo sapiens
gaattttcagccttt

SEQ ID NO: 297174 - DNA, 15 bp, Homo sapiens
ggaattttcagcctt

SEQ ID NO: 297175 - DNA, 15 bp, Homo sapiens
tggaattttcagcct

SEQ ID NO: 297176 - DNA, 15 bp, Homo sapiens
ttggaattttcagcc

SEQ ID NO: 297177 - DNA, 15 bp, Homo sapiens
tttggaattttcagc

SEQ ID NO: 297178 - DNA, 15 bp, Homo sapiens
ttttggaattttcag

SEQ ID NO: 297179 - DNA, 15 bp, Homo sapiens
tttttggaattttca

SEQ ID NO: 297180 - DNA, 15 bp, Homo sapiens
gtttttggaattttc

SEQ ID NO: 297181 - DNA, 15 bp, Homo sapiens
ggtttttggaatttt

SEQ ID NO: 297182 - DNA, 15 bp, Homo sapiens
tggtttttggaattt

SEQ ID NO: 297183 - DNA, 15 bp, Homo sapiens
ctggtttttggaatt

SEQ ID NO: 297184 - DNA, 15 bp, Homo sapiens
tctggtttttggaat

SEQ ID NO: 297185 - DNA, 15 bp, Homo sapiens
ctctggtttttggaa

SEQ ID NO: 297186 - DNA, 15 bp, Homo sapiens
gctctggtttttgga

SEQ ID NO: 297187 - DNA, 15 bp, Homo sapiens
cgctctggtttttgg

SEQ ID NO: 297188 - DNA, 15 bp, Homo sapiens
gcgctctggtttttg

SEQ ID NO: 297189 - DNA, 15 bp, Homo sapiens
ggcgctctggttttt

SEQ ID NO: 297190 - DNA, 15 bp, Homo sapiens
aggcgctctggtttt

SEQ ID NO: 297191 - DNA, 15 bp, Homo sapiens
aaggcgctctggttt

SEQ ID NO: 297192 - DNA, 15 bp, Homo sapiens
aaaggcgctctggtt

SEQ ID NO: 297193 - DNA, 15 bp, Homo sapiens
aaaaggcgctctggt

SEQ ID NO: 297194 - DNA, 15 bp, Homo sapiens
gaaaaggcgctctgg

SEQ ID NO: 297195 - DNA, 15 bp, Homo sapiens
agaaaaggcgctctg

SEQ ID NO: 297196 - DNA, 15 bp, Homo sapiens
gagaaaaggcgctct

SEQ ID NO: 297197 - DNA, 15 bp, Homo sapiens
agagaaaaggcgctc

SEQ ID NO: 297198 - DNA, 15 bp, Homo sapiens
aagagaaaaggcgct

SEQ ID NO: 297199 - DNA, 15 bp, Homo sapiens
gaagagaaaaggcgc

SEQ ID NO: 297200 - DNA, 15 bp, Homo sapiens
ggaagagaaaaggcg

SEQ ID NO: 297201 - DNA, 15 bp, Homo sapiens
tggaagagaaaaggc

SEQ ID NO: 297202 - DNA, 15 bp, Homo sapiens
ttggaagagaaaagg

SEQ ID NO: 297203 - DNA, 15 bp, Homo sapiens
tttggaagagaaaag

SEQ ID NO: 297204 - DNA, 15 bp, Homo sapiens
ctttggaagagaaaa

SEQ ID NO: 297205 - DNA, 15 bp, Homo sapiens
tctttggaagagaaa

SEQ ID NO: 297206 - DNA, 15 bp, Homo sapiens
ttctttggaagagaa

SEQ ID NO: 297207 - DNA, 15 bp, Homo sapiens
attctttggaagaga

SEQ ID NO: 297208 - DNA, 15 bp, Homo sapiens
cattctttggaagag

SEQ ID NO: 297209 - DNA, 15 bp, Homo sapiens
tcattctttggaaga

SEQ ID NO: 297210 - DNA, 15 bp, Homo sapiens
gtcattctttggaag

SEQ ID NO: 297211 - DNA, 15 bp, Homo sapiens
tgtcattctttggaa

SEQ ID NO: 297212 - DNA, 15 bp, Homo sapiens
ttgtcattctttgga

SEQ ID NO: 297213 - DNA, 15 bp, Homo sapiens
gttgtcattctttgg

SEQ ID NO: 297214 - DNA, 15 bp, Homo sapiens
agttgtcattctttg

SEQ ID NO: 297215 - DNA, 15 bp, Homo sapiens
gagttgtcattcttt

SEQ ID NO: 297216 - DNA, 15 bp, Homo sapiens
ggagttgtcattctt

SEQ ID NO: 297217 - DNA, 15 bp, Homo sapiens
aggagttgtcattct

SEQ ID NO: 297218 - DNA, 15 bp, Homo sapiens
gaggagttgtcattc

SEQ ID NO: 297219 - DNA, 15 bp, Homo sapiens
ggaggagttgtcatt

SEQ ID NO: 297220 - DNA, 15 bp, Homo sapiens
gggaggagttgtcat

SEQ ID NO: 297221 - DNA, 15 bp, Homo sapiens
ggggaggagttgtca

SEQ ID NO: 297222 - DNA, 15 bp, Homo sapiens
tggggaggagttgtc

SEQ ID NO: 297223 - DNA, 15 bp, Homo sapiens
ctggggaggagttgt

SEQ ID NO: 297224 - DNA, 15 bp, Homo sapiens
gctggggaggagttg

SEQ ID NO: 297225 - DNA, 15 bp, Homo sapiens
tgctggggaggagtt

SEQ ID NO: 297226 - DNA, 15 bp, Homo sapiens
ttgctggggaggagt

SEQ ID NO: 297227 - DNA, 15 bp, Homo sapiens
cttgctggggaggag

SEQ ID NO: 297228 - DNA, 15 bp, Homo sapiens
ccttgctggggagga

SEQ ID NO: 297229 - DNA, 15 bp, Homo sapiens
cccttgctggggagg

SEQ ID NO: 297230 - DNA, 15 bp, Homo sapiens
ccccttgctggggag

SEQ ID NO: 297231 - DNA, 15 bp, Homo sapiens
tccccttgctgggga

SEQ ID NO: 297232 - DNA, 15 bp, Homo sapiens
ctccccttgctgggg

SEQ ID NO: 297233 - DNA, 15 bp, Homo sapiens
actccccttgctggg

SEQ ID NO: 297234 - DNA, 15 bp, Homo sapiens
aactccccttgctgg

SEQ ID NO: 297235 - DNA, 15 bp, Homo sapiens
aaactccccttgctg

SEQ ID NO: 297236 - DNA, 15 bp, Homo sapiens
caaactccccttgct

SEQ ID NO: 297237 - DNA, 15 bp, Homo sapiens
tcaaactccccttgc

SEQ ID NO: 297238 - DNA, 15 bp, Homo sapiens
gtcaaactccccttg

SEQ ID NO: 297239 - DNA, 15 bp, Homo sapiens
cgtcaaactcccctt

SEQ ID NO: 297240 - DNA, 15 bp, Homo sapiens
tcgtcaaactcccct

SEQ ID NO: 297241 - DNA, 15 bp, Homo sapiens
ttcgtcaaactcccc

SEQ ID NO: 297242 - DNA, 15 bp, Homo sapiens
attcgtcaaactccc

SEQ ID NO: 297243 - DNA, 15 bp, Homo sapiens
aattcgtcaaactcc

SEQ ID NO: 297244 - DNA, 15 bp, Homo sapiens
caattcgtcaaactc

SEQ ID NO: 297245 - DNA, 15 bp, Homo sapiens
tcaattcgtcaaact

SEQ ID NO: 297246 - DNA, 15 bp, Homo sapiens
gtcaattcgtcaaac

SEQ ID NO: 297247 - DNA, 15 bp, Homo sapiens
tgtcaattcgtcaaa

SEQ ID NO: 297248 - DNA, 15 bp, Homo sapiens
ctgtcaattcgtcaa

SEQ ID NO: 297249 - DNA, 15 bp, Homo sapiens
tctgtcaattcgtca

SEQ ID NO: 297250 - DNA, 15 bp, Homo sapiens
ttctgtcaattcgtc

SEQ ID NO: 297251 - DNA, 15 bp, Homo sapiens
cttctgtcaattcgt

SEQ ID NO: 297252 - DNA, 15 bp, Homo sapiens
acttctgtcaattcg

SEQ ID NO: 297253 - DNA, 15 bp, Homo sapiens
tacttctgtcaattc

SEQ ID NO: 297254 - DNA, 15 bp, Homo sapiens
ctacttctgtcaatt

SEQ ID NO: 297255 - DNA, 15 bp, Homo sapiens
cctacttctgtcaat

SEQ ID NO: 297256 - DNA, 15 bp, Homo sapiens
gcctacttctgtcaa

SEQ ID NO: 297257 - DNA, 15 bp, Homo sapiens
agcctacttctgtca

SEQ ID NO: 297258 - DNA, 15 bp, Homo sapiens
aagcctacttctgtc

SEQ ID NO: 297259 - DNA, 15 bp, Homo sapiens
gaagcctacttctgt

SEQ ID NO: 297260 - DNA, 15 bp, Homo sapiens
tgaagcctacttctg

SEQ ID NO: 297261 - DNA, 15 bp, Homo sapiens
ctgaagcctacttct

SEQ ID NO: 297262 - DNA, 15 bp, Homo sapiens
tctgaagcctacttc

SEQ ID NO: 297263 - DNA, 15 bp, Homo sapiens
ttctgaagcctactt

SEQ ID NO: 297264 - DNA, 15 bp, Homo sapiens
cttctgaagcctact

SEQ ID NO: 297265 - DNA, 15 bp, Homo sapiens
ccttctgaagcctac

SEQ ID NO: 297266 - DNA, 15 bp, Homo sapiens
accttctgaagccta

SEQ ID NO: 297267 - DNA, 15 bp, Homo sapiens
caccttctgaagcct

SEQ ID NO: 297268 - DNA, 15 bp, Homo sapiens
ccaccttctgaagcc

SEQ ID NO: 297269 - DNA, 15 bp, Homo sapiens
cccaccttctgaagc

SEQ ID NO: 297270 - DNA, 15 bp, Homo sapiens
acccaccttctgaag

SEQ ID NO: 297271 - DNA, 15 bp, Homo sapiens
tacccaccttctgaa

SEQ ID NO: 297272 - DNA, 15 bp, Homo sapiens
ttacccaccttctga

SEQ ID NO: 297273 - DNA, 15 bp, Homo sapiens
attacccaccttctg

SEQ ID NO: 297274 - DNA, 15 bp, Homo sapiens
tattacccaccttct

SEQ ID NO: 297275 - DNA, 15 bp, Homo sapiens
ttattacccaccttc

SEQ ID NO: 297276 - DNA, 15 bp, Homo sapiens
gttattacccacctt

SEQ ID NO: 297277 - DNA, 15 bp, Homo sapiens
tgttattacccacct

SEQ ID NO: 297278 - DNA, 15 bp, Homo sapiens
ttgttattacccacc

SEQ ID NO: 297279 - DNA, 15 bp, Homo sapiens
tttgttattacccac

SEQ ID NO: 297280 - DNA, 15 bp, Homo sapiens
gtttgttattaccca

SEQ ID NO: 297281 - DNA, 15 bp, Homo sapiens
agtttgttattaccc

SEQ ID NO: 297282 - DNA, 15 bp, Homo sapiens
gagtttgttattacc

SEQ ID NO: 297283 - DNA, 15 bp, Homo sapiens
ggagtttgttattac

SEQ ID NO: 297284 - DNA, 15 bp, Homo sapiens
aggagtttgttatta

SEQ ID NO: 297285 - DNA, 15 bp, Homo sapiens
gaggagtttgttatt

SEQ ID NO: 297286 - DNA, 15 bp, Homo sapiens
ggaggagtttgttat

SEQ ID NO: 297287 - DNA, 15 bp, Homo sapiens
cggaggagtttgtta

SEQ ID NO: 297288 - DNA, 15 bp, Homo sapiens
tcggaggagtttgtt

SEQ ID NO: 297289 - DNA, 15 bp, Homo sapiens
ctcggaggagtttgt

SEQ ID NO: 297290 - DNA, 15 bp, Homo sapiens
gctcggaggagtttg

SEQ ID NO: 297291 - DNA, 15 bp, Homo sapiens
agctcggaggagttt

SEQ ID NO: 297292 - DNA, 15 bp, Homo sapiens
tagctcggaggagtt

SEQ ID NO: 297293 - DNA, 15 bp, Homo sapiens
ttagctcggaggagt

SEQ ID NO: 297294 - DNA, 15 bp, Homo sapiens
tttagctcggaggag

SEQ ID NO: 297295 - DNA, 15 bp, Homo sapiens
ctttagctcggagga

SEQ ID NO: 297296 - DNA, 15 bp, Homo sapiens
cctttagctcggagg

SEQ ID NO: 297297 - DNA, 15 bp, Homo sapiens
tcctttagctcggag

SEQ ID NO: 297298 - DNA, 15 bp, Homo sapiens
gtcctttagctcgga

SEQ ID NO: 297299 - DNA, 15 bp, Homo sapiens
ggtcctttagctcgg

SEQ ID NO: 297300 - DNA, 15 bp, Homo sapiens
tggtcctttagctcg

SEQ ID NO: 297301 - DNA, 15 bp, Homo sapiens
atggtcctttagctc

SEQ ID NO: 297302 - DNA, 15 bp, Homo sapiens
catggtcctttagct

SEQ ID NO: 297303 - DNA, 15 bp, Homo sapiens
acatggtcctttagc

SEQ ID NO: 297304 - DNA, 15 bp, Homo sapiens
aacatggtcctttag

SEQ ID NO: 297305 - DNA, 15 bp, Homo sapiens
gaacatggtccttta

SEQ ID NO: 297306 - DNA, 15 bp, Homo sapiens
agaacatggtccttt

SEQ ID NO: 297307 - DNA, 15 bp, Homo sapiens
tagaacatggtcctt

SEQ ID NO: 297308 - DNA, 15 bp, Homo sapiens
ttagaacatggtcct

SEQ ID NO: 297309 - DNA, 15 bp, Homo sapiens
gttagaacatggtcc

SEQ ID NO: 297310 - DNA, 15 bp, Homo sapiens
ggttagaacatggtc

SEQ ID NO: 297311 - DNA, 15 bp, Homo sapiens
gggttagaacatggt

SEQ ID NO: 297312 - DNA, 15 bp, Homo sapiens
tgggttagaacatgg

SEQ ID NO: 297313 - DNA, 15 bp, Homo sapiens
ttgggttagaacatg

SEQ ID NO: 297314 - DNA, 15 bp, Homo sapiens
attgggttagaacat

SEQ ID NO: 297315 - DNA, 15 bp, Homo sapiens
cattgggttagaaca

SEQ ID NO: 297316 - DNA, 15 bp, Homo sapiens
gcattgggttagaac

SEQ ID NO: 297317 - DNA, 15 bp, Homo sapiens
tgcattgggttagaa

SEQ ID NO: 297318 - DNA, 15 bp, Homo sapiens
ttgcattgggttaga

SEQ ID NO: 297319 - DNA, 15 bp, Homo sapiens
cttgcattgggttag

SEQ ID NO: 297320 - DNA, 15 bp, Homo sapiens
ccttgcattgggtta

SEQ ID NO: 297321 - DNA, 15 bp, Homo sapiens
tccttgcattgggtt

SEQ ID NO: 297322 - DNA, 15 bp, Homo sapiens
ttccttgcattgggt

SEQ ID NO: 297323 - DNA, 15 bp, Homo sapiens
cttccttgcattggg

SEQ ID NO: 297324 - DNA, 15 bp, Homo sapiens
gcttccttgcattgg

SEQ ID NO: 297325 - DNA, 15 bp, Homo sapiens
agcttccttgcattg

SEQ ID NO: 297326 - DNA, 15 bp, Homo sapiens
tagcttccttgcatt

SEQ ID NO: 297327 - DNA, 15 bp, Homo sapiens
ttagcttccttgcat

SEQ ID NO: 297328 - DNA, 15 bp, Homo sapiens
cttagcttccttgca

SEQ ID NO: 297329 - DNA, 15 bp, Homo sapiens
tcttagcttccttgc

SEQ ID NO: 297330 - DNA, 15 bp, Homo sapiens
ttcttagcttccttg

SEQ ID NO: 297331 - DNA, 15 bp, Homo sapiens
gttcttagcttcctt

SEQ ID NO: 297332 - DNA, 15 bp, Homo sapiens
agttcttagcttcct

SEQ ID NO: 297333 - DNA, 15 bp, Homo sapiens
aagttcttagcttcc

SEQ ID NO: 297334 - DNA, 15 bp, Homo sapiens
aaagttcttagcttc

SEQ ID NO: 297335 - DNA, 15 bp, Homo sapiens
caaagttcttagctt

SEQ ID NO: 297336 - DNA, 15 bp, Homo sapiens
tcaaagttcttagct

SEQ ID NO: 297337 - DNA, 15 bp, Homo sapiens
ttcaaagttcttagc

SEQ ID NO: 297338 - DNA, 15 bp, Homo sapiens
tttcaaagttcttag

SEQ ID NO: 297339 - DNA, 15 bp, Homo sapiens
ttttcaaagttctta

SEQ ID NO: 297340 - DNA, 15 bp, Homo sapiens
tttttcaaagttctt

SEQ ID NO: 297341 - DNA, 15 bp, Homo sapiens
ttttttcaaagttct

SEQ ID NO: 297342 - DNA, 15 bp, Homo sapiens
cttttttcaaagttc

SEQ ID NO: 297343 - DNA, 15 bp, Homo sapiens
ccttttttcaaagtt

SEQ ID NO: 297344 - DNA, 15 bp, Homo sapiens
accttttttcaaagt

SEQ ID NO: 297345 - DNA, 15 bp, Homo sapiens
aaccttttttcaaag

SEQ ID NO: 297346 - DNA, 15 bp, Homo sapiens
taaccttttttcaaa

SEQ ID NO: 297347 - DNA, 15 bp, Homo sapiens
ctaaccttttttcaa

SEQ ID NO: 297348 - DNA, 15 bp, Homo sapiens
tctaaccttttttca

SEQ ID NO: 297349 - DNA, 15 bp, Homo sapiens
ctctaaccttttttc

SEQ ID NO: 297350 - DNA, 15 bp, Homo sapiens
cctctaacctttttt

SEQ ID NO: 297351 - DNA, 15 bp, Homo sapiens
tcctctaaccttttt

SEQ ID NO: 297352 - DNA, 15 bp, Homo sapiens
ttcctctaacctttt

SEQ ID NO: 297353 - DNA, 15 bp, Homo sapiens
attcctctaaccttt

SEQ ID NO: 297354 - DNA, 15 bp, Homo sapiens
aattcctctaacctt

SEQ ID NO: 297355 - DNA, 15 bp, Homo sapiens
caattcctctaacct

SEQ ID NO: 297356 - DNA, 15 bp, Homo sapiens
gcaattcctctaacc

SEQ ID NO: 297357 - DNA, 15 bp, Homo sapiens
agcaattcctctaac

SEQ ID NO: 297358 - DNA, 15 bp, Homo sapiens
tagcaattcctctaa

SEQ ID NO: 297359 - DNA, 15 bp, Homo sapiens
ttagcaattcctcta

SEQ ID NO: 297360 - DNA, 15 bp, Homo sapiens
gttagcaattcctct

SEQ ID NO: 297361 - DNA, 15 bp, Homo sapiens
agttagcaattcctc

SEQ ID NO: 297362 - DNA, 15 bp, Homo sapiens
tagttagcaattcct

SEQ ID NO: 297363 - DNA, 15 bp, Homo sapiens
ctagttagcaattcc

SEQ ID NO: 297364 - DNA, 15 bp, Homo sapiens
tctagttagcaattc

SEQ ID NO: 297365 - DNA, 15 bp, Homo sapiens
ttctagttagcaatt

SEQ ID NO: 297366 - DNA, 15 bp, Homo sapiens
attctagttagcaat

SEQ ID NO: 297367 - DNA, 15 bp, Homo sapiens
tattctagttagcaa

SEQ ID NO: 297368 - DNA, 15 bp, Homo sapiens
ttattctagttagca

SEQ ID NO: 297369 - DNA, 15 bp, Homo sapiens
gttattctagttagc

SEQ ID NO: 297370 - DNA, 15 bp, Homo sapiens
ggttattctagttag

SEQ ID NO: 297371 - DNA, 15 bp, Homo sapiens
tggttattctagtta

SEQ ID NO: 297372 - DNA, 15 bp, Homo sapiens
ctggttattctagtt

SEQ ID NO: 297373 - DNA, 15 bp, Homo sapiens
actggttattctagt

SEQ ID NO: 297374 - DNA, 15 bp, Homo sapiens
aactggttattctag

SEQ ID NO: 297375 - DNA, 15 bp, Homo sapiens
aaactggttattcta

SEQ ID NO: 297376 - DNA, 15 bp, Homo sapiens
taaactggttattct

SEQ ID NO: 297377 - DNA, 15 bp, Homo sapiens
ctaaactggttattc

SEQ ID NO: 297378 - DNA, 15 bp, Homo sapiens
tctaaactggttatt

SEQ ID NO: 297379 - DNA, 15 bp, Homo sapiens
ctctaaactggttat

SEQ ID NO: 297380 - DNA, 15 bp, Homo sapiens
tctctaaactggtta

SEQ ID NO: 297381 - DNA, 15 bp, Homo sapiens
ttctctaaactggtt

SEQ ID NO: 297382 - DNA, 15 bp, Homo sapiens
cttctctaaactggt

SEQ ID NO: 297383 - DNA, 15 bp, Homo sapiens
tcttctctaaactgg

SEQ ID NO: 297384 - DNA, 15 bp, Homo sapiens
ttcttctctaaactg

SEQ ID NO: 297385 - DNA, 15 bp, Homo sapiens
gttcttctctaaact

SEQ ID NO: 297386 - DNA, 15 bp, Homo sapiens
tgttcttctctaaac

SEQ ID NO: 297387 - DNA, 15 bp, Homo sapiens
atgttcttctctaaa

SEQ ID NO: 297388 - DNA, 15 bp, Homo sapiens
tatgttcttctctaa

SEQ ID NO: 297389 - DNA, 15 bp, Homo sapiens
ttatgttcttctcta

SEQ ID NO: 297390 - DNA, 15 bp, Homo sapiens
tttatgttcttctct

SEQ ID NO: 297391 - DNA, 15 bp, Homo sapiens
atttatgttcttctc

SEQ ID NO: 297392 - DNA, 15 bp, Homo sapiens
catttatgttcttct

SEQ ID NO: 297393 - DNA, 15 bp, Homo sapiens
tcatttatgttcttc

SEQ ID NO: 297394 - DNA, 15 bp, Homo sapiens
gtcatttatgttctt

SEQ ID NO: 297395 - DNA, 15 bp, Homo sapiens
ggtcatttatgttct

SEQ ID NO: 297396 - DNA, 15 bp, Homo sapiens
aggtcatttatgttc

SEQ ID NO: 297397 - DNA, 15 bp, Homo sapiens
caggtcatttatgtt

SEQ ID NO: 297398 - DNA, 15 bp, Homo sapiens
tcaggtcatttatgt

SEQ ID NO: 297399 - DNA, 15 bp, Homo sapiens
gtcaggtcatttatg

SEQ ID NO: 297400 - DNA, 15 bp, Homo sapiens
cgtcaggtcatttat

SEQ ID NO: 297401 - DNA, 15 bp, Homo sapiens
ccgtcaggtcattta

SEQ ID NO: 297402 - DNA, 15 bp, Homo sapiens
tccgtcaggtcattt

SEQ ID NO: 297403 - DNA, 15 bp, Homo sapiens
ttccgtcaggtcatt

SEQ ID NO: 297404 - DNA, 15 bp, Homo sapiens
gttccgtcaggtcat

SEQ ID NO: 297405 - DNA, 15 bp, Homo sapiens
agttccgtcaggtca

SEQ ID NO: 297406 - DNA, 15 bp, Homo sapiens
cagttccgtcaggtc

SEQ ID NO: 297407 - DNA, 15 bp, Homo sapiens
tcagttccgtcaggt

SEQ ID NO: 297408 - DNA, 15 bp, Homo sapiens
ttcagttccgtcagg

SEQ ID NO: 297409 - DNA, 15 bp, Homo sapiens
tttcagttccgtcag

SEQ ID NO: 297410 - DNA, 15 bp, Homo sapiens
ttttcagttccgtca

SEQ ID NO: 297411 - DNA, 15 bp, Homo sapiens
tttttcagttccgtc

SEQ ID NO: 297412 - DNA, 15 bp, Homo sapiens
ttttttcagttccgt

SEQ ID NO: 297413 - DNA, 15 bp, Homo sapiens
gttttttcagttccg

SEQ ID NO: 297414 - DNA, 15 bp, Homo sapiens
tgttttttcagttcc

SEQ ID NO: 297415 - DNA, 15 bp, Homo sapiens
gtgttttttcagttc

SEQ ID NO: 297416 - DNA, 15 bp, Homo sapiens
tgtgttttttcagtt

SEQ ID NO: 297417 - DNA, 15 bp, Homo sapiens
ttgtgttttttcagt

SEQ ID NO: 297418 - DNA, 15 bp, Homo sapiens
gttgtgttttttcag

SEQ ID NO: 297419 - DNA, 15 bp, Homo sapiens
tgttgtgttttttca

SEQ ID NO: 297420 - DNA, 15 bp, Homo sapiens
gtgttgtgttttttc

SEQ ID NO: 297421 - DNA, 15 bp, Homo sapiens
cgtgttgtgtttttt

SEQ ID NO: 297422 - DNA, 15 bp, Homo sapiens
tcgtgttgtgttttt

SEQ ID NO: 297423 - DNA, 15 bp, Homo sapiens
ctcgtgttgtgtttt

SEQ ID NO: 297424 - DNA, 15 bp, Homo sapiens
cctcgtgttgtgttt

SEQ ID NO: 297425 - DNA, 15 bp, Homo sapiens
tcctcgtgttgtgtt

SEQ ID NO: 297426 - DNA, 15 bp, Homo sapiens
gtcctcgtgttgtgt

SEQ ID NO: 297427 - DNA, 15 bp, Homo sapiens
agtcctcgtgttgtg

SEQ ID NO: 297428 - DNA, 15 bp, Homo sapiens
aagtcctcgtgttgt

SEQ ID NO: 297429 - DNA, 15 bp, Homo sapiens
aaagtcctcgtgttg

SEQ ID NO: 297430 - DNA, 15 bp, Homo sapiens
caaagtcctcgtgtt

SEQ ID NO: 297431 - DNA, 15 bp, Homo sapiens
acaaagtcctcgtgt

SEQ ID NO: 297432 - DNA, 15 bp, Homo sapiens
cacaaagtcctcgtg

SEQ ID NO: 297433 - DNA, 15 bp, Homo sapiens
tcacaaagtcctcgt

SEQ ID NO: 297434 - DNA, 15 bp, Homo sapiens
ttcacaaagtcctcg

SEQ ID NO: 297435 - DNA, 15 bp, Homo sapiens
cttcacaaagtcctc

SEQ ID NO: 297436 - DNA, 15 bp, Homo sapiens
gcttcacaaagtcct

SEQ ID NO: 297437 - DNA, 15 bp, Homo sapiens
tgcttcacaaagtcc

SEQ ID NO: 297438 - DNA, 15 bp, Homo sapiens
atgcttcacaaagtc

SEQ ID NO: 297439 - DNA, 15 bp, Homo sapiens
tatgcttcacaaagt

SEQ ID NO: 297440 - DNA, 15 bp, Homo sapiens
gtatgcttcacaaag

SEQ ID NO: 297441 - DNA, 15 bp, Homo sapiens
tgtatgcttcacaaa

SEQ ID NO: 297442 - DNA, 15 bp, Homo sapiens
gtgtatgcttcacaa

SEQ ID NO: 297443 - DNA, 15 bp, Homo sapiens
tgtgtatgcttcaca

SEQ ID NO: 297444 - DNA, 15 bp, Homo sapiens
ttgtgtatgcttcac

SEQ ID NO: 297445 - DNA, 15 bp, Homo sapiens
cttgtgtatgcttca

SEQ ID NO: 297446 - DNA, 15 bp, Homo sapiens
acttgtgtatgcttc

SEQ ID NO: 297447 - DNA, 15 bp, Homo sapiens
tacttgtgtatgctt

SEQ ID NO: 297448 - DNA, 15 bp, Homo sapiens
gtacttgtgtatgct

SEQ ID NO: 297449 - DNA, 15 bp, Homo sapiens
ggtacttgtgtatgc

SEQ ID NO: 297450 - DNA, 15 bp, Homo sapiens
tggtacttgtgtatg

SEQ ID NO: 297451 - DNA, 15 bp, Homo sapiens
ttggtacttgtgtat

SEQ ID NO: 297452 - DNA, 15 bp, Homo sapiens
attggtacttgtgta

SEQ ID NO: 297453 - DNA, 15 bp, Homo sapiens
tattggtacttgtgt

SEQ ID NO: 297454 - DNA, 15 bp, Homo sapiens
ctattggtacttgtg

SEQ ID NO: 297455 - DNA, 15 bp, Homo sapiens
gctattggtacttgt

SEQ ID NO: 297456 - DNA, 15 bp, Homo sapiens
agctattggtacttg

SEQ ID NO: 297457 - DNA, 15 bp, Homo sapiens
cagctattggtactt

SEQ ID NO: 297458 - DNA, 15 bp, Homo sapiens
tcagctattggtact

SEQ ID NO: 297459 - DNA, 15 bp, Homo sapiens
ttcagctattggtac

SEQ ID NO: 297460 - DNA, 15 bp, Homo sapiens
attcagctattggta

SEQ ID NO: 297461 - DNA, 15 bp, Homo sapiens
gattcagctattggt

SEQ ID NO: 297462 - DNA, 15 bp, Homo sapiens
cgattcagctattgg

SEQ ID NO: 297463 - DNA, 15 bp, Homo sapiens
tcgattcagctattg

SEQ ID NO: 297464 - DNA, 15 bp, Homo sapiens
atcgattcagctatt

SEQ ID NO: 297465 - DNA, 15 bp, Homo sapiens
gatcgattcagctat

SEQ ID NO: 297466 - DNA, 15 bp, Homo sapiens
tgatcgattcagcta

SEQ ID NO: 297467 - DNA, 15 bp, Homo sapiens
ttgatcgattcagct

SEQ ID NO: 297468 - DNA, 15 bp, Homo sapiens
cttgatcgattcagc

SEQ ID NO: 297469 - DNA, 15 bp, Homo sapiens
gcttgatcgattcag

SEQ ID NO: 297470 - DNA, 15 bp, Homo sapiens
tgcttgatcgattca

SEQ ID NO: 297471 - DNA, 15 bp, Homo sapiens
ctgcttgatcgattc

SEQ ID NO: 297472 - DNA, 15 bp, Homo sapiens
tctgcttgatcgatt

SEQ ID NO: 297473 - DNA, 15 bp, Homo sapiens
ttctgcttgatcgat

SEQ ID NO: 297474 - DNA, 15 bp, Homo sapiens
tttctgcttgatcga

SEQ ID NO: 297475 - DNA, 15 bp, Homo sapiens
ttttctgcttgatcg

SEQ ID NO: 297476 - DNA, 15 bp, Homo sapiens
tttttctgcttgatc

SEQ ID NO: 297477 - DNA, 15 bp, Homo sapiens
ttttttctgcttgat

SEQ ID NO: 297478 - DNA, 15 bp, Homo sapiens
tttttttctgcttga

SEQ ID NO: 297479 - DNA, 15 bp, Homo sapiens
ctttttttctgcttg

SEQ ID NO: 297480 - DNA, 15 bp, Homo sapiens
cctttttttctgctt

SEQ ID NO: 297481 - DNA, 15 bp, Homo sapiens
tcctttttttctgct

SEQ ID NO: 297482 - DNA, 15 bp, Homo sapiens
atcctttttttctgc

SEQ ID NO: 297483 - DNA, 15 bp, Homo sapiens
tatcctttttttctg

SEQ ID NO: 297484 - DNA, 15 bp, Homo sapiens
atatcctttttttct

SEQ ID NO: 297485 - DNA, 15 bp, Homo sapiens
gatatcctttttttc

SEQ ID NO: 297486 - DNA, 15 bp, Homo sapiens
tgatatccttttttt

SEQ ID NO: 297487 - DNA, 15 bp, Homo sapiens
ctgatatcctttttt

SEQ ID NO: 297488 - DNA, 15 bp, Homo sapiens
tctgatatccttttt

SEQ ID NO: 297489 - DNA, 15 bp, Homo sapiens
ctctgatatcctttt

SEQ ID NO: 297490 - DNA, 15 bp, Homo sapiens
tctctgatatccttt

SEQ ID NO: 297491 - DNA, 15 bp, Homo sapiens
atctctgatatcctt

SEQ ID NO: 297492 - DNA, 15 bp, Homo sapiens
aatctctgatatcct

SEQ ID NO: 297493 - DNA, 15 bp, Homo sapiens
caatctctgatatcc

SEQ ID NO: 297494 - DNA, 15 bp, Homo sapiens
tcaatctctgatatc

SEQ ID NO: 297495 - DNA, 15 bp, Homo sapiens
ttcaatctctgatat

SEQ ID NO: 297496 - DNA, 15 bp, Homo sapiens
cttcaatctctgata

SEQ ID NO: 297497 - DNA, 15 bp, Homo sapiens
tcttcaatctctgat

SEQ ID NO: 297498 - DNA, 15 bp, Homo sapiens
atcttcaatctctga

SEQ ID NO: 297499 - DNA, 15 bp, Homo sapiens
gatcttcaatctctg

SEQ ID NO: 297500 - DNA, 15 bp, Homo sapiens
tgatcttcaatctct

SEQ ID NO: 297501 - DNA, 15 bp, Homo sapiens
ctgatcttcaatctc

SEQ ID NO: 297502 - DNA, 15 bp, Homo sapiens
gctgatcttcaatct

SEQ ID NO: 297503 - DNA, 15 bp, Homo sapiens
agctgatcttcaatc

SEQ ID NO: 297504 - DNA, 15 bp, Homo sapiens
aagctgatcttcaat

SEQ ID NO: 297505 - DNA, 15 bp, Homo sapiens
taagctgatcttcaa

SEQ ID NO: 297506 - DNA, 15 bp, Homo sapiens
ttaagctgatcttca

SEQ ID NO: 297507 - DNA, 15 bp, Homo sapiens
attaagctgatcttc

SEQ ID NO: 297508 - DNA, 15 bp, Homo sapiens
cattaagctgatctt

SEQ ID NO: 297509 - DNA, 15 bp, Homo sapiens
tcattaagctgatct

SEQ ID NO: 297510 - DNA, 15 bp, Homo sapiens
ttcattaagctgatc

SEQ ID NO: 297511 - DNA, 15 bp, Homo sapiens
tttcattaagctgat

SEQ ID NO: 297512 - DNA, 15 bp, Homo sapiens
atttcattaagctga

SEQ ID NO: 297513 - DNA, 15 bp, Homo sapiens
tatttcattaagctg

SEQ ID NO: 297514 - DNA, 15 bp, Homo sapiens
ttatttcattaagct

SEQ ID NO: 297515 - DNA, 15 bp, Homo sapiens
tttatttcattaagc

SEQ ID NO: 297516 - DNA, 15 bp, Homo sapiens
ctttatttcattaag

SEQ ID NO: 297517 - DNA, 15 bp, Homo sapiens
gctttatttcattaa

SEQ ID NO: 297518 - DNA, 15 bp, Homo sapiens
cgctttatttcatta

SEQ ID NO: 297519 - DNA, 15 bp, Homo sapiens
acgctttatttcatt

SEQ ID NO: 297520 - DNA, 15 bp, Homo sapiens
cacgctttatttcat

SEQ ID NO: 297521 - DNA, 15 bp, Homo sapiens
tcacgctttatttca

SEQ ID NO: 297522 - DNA, 15 bp, Homo sapiens
atcacgctttatttc

SEQ ID NO: 297523 - DNA, 15 bp, Homo sapiens
catcacgctttattt

SEQ ID NO: 297524 - DNA, 15 bp, Homo sapiens
tcatcacgctttatt

SEQ ID NO: 297525 - DNA, 15 bp, Homo sapiens
gtcatcacgctttat

SEQ ID NO: 297526 - DNA, 15 bp, Homo sapiens
tgtcatcacgcttta

SEQ ID NO: 297527 - DNA, 15 bp, Homo sapiens
ttgtcatcacgcttt

SEQ ID NO: 297528 - DNA, 15 bp, Homo sapiens
cttgtcatcacgctt

SEQ ID NO: 297529 - DNA, 15 bp, Homo sapiens
tcttgtcatcacgct

SEQ ID NO: 297530 - DNA, 15 bp, Homo sapiens
atcttgtcatcacgc

SEQ ID NO: 297531 - DNA, 15 bp, Homo sapiens
aatcttgtcatcacg

SEQ ID NO: 297532 - DNA, 15 bp, Homo sapiens
taatcttgtcatcac

SEQ ID NO: 297533 - DNA, 15 bp, Homo sapiens
ctaatcttgtcatca

SEQ ID NO: 297534 - DNA, 15 bp, Homo sapiens
tctaatcttgtcatc

SEQ ID NO: 297535 - DNA, 15 bp, Homo sapiens
ctctaatcttgtcat

SEQ ID NO: 297536 - DNA, 15 bp, Homo sapiens
tctctaatcttgtca

SEQ ID NO: 297537 - DNA, 15 bp, Homo sapiens
ttctctaatcttgtc

SEQ ID NO: 297538 - DNA, 15 bp, Homo sapiens
tttctctaatcttgt

SEQ ID NO: 297539 - DNA, 15 bp, Homo sapiens
ttttctctaatcttg

SEQ ID NO: 297540 - DNA, 15 bp, Homo sapiens
tttttctctaatctt

SEQ ID NO: 297541 - DNA, 15 bp, Homo sapiens
ttttttctctaatct

SEQ ID NO: 297542 - DNA, 15 bp, Homo sapiens
cttttttctctaatc

SEQ ID NO: 297543 - DNA, 15 bp, Homo sapiens
tcttttttctctaat

SEQ ID NO: 297544 - DNA, 15 bp, Homo sapiens
ttcttttttctctaa

SEQ ID NO: 297545 - DNA, 15 bp, Homo sapiens
attcttttttctcta

SEQ ID NO: 297546 - DNA, 15 bp, Homo sapiens
cattcttttttctct

SEQ ID NO: 297547 - DNA, 15 bp, Homo sapiens
tcattcttttttctc

SEQ ID NO: 297548 - DNA, 15 bp, Homo sapiens
ttcattcttttttct

SEQ ID NO: 297549 - DNA, 15 bp, Homo sapiens
tttcattcttttttc

SEQ ID NO: 297550 - DNA, 15 bp, Homo sapiens
ttttcattctttttt

SEQ ID NO: 297551 - DNA, 15 bp, Homo sapiens
cttttcattcttttt

SEQ ID NO: 297552 - DNA, 15 bp, Homo sapiens
ccttttcattctttt

SEQ ID NO: 297553 - DNA, 15 bp, Homo sapiens
tccttttcattcttt

SEQ ID NO: 297554 - DNA, 15 bp, Homo sapiens
ttccttttcattctt

SEQ ID NO: 297555 - DNA, 15 bp, Homo sapiens
attccttttcattct

SEQ ID NO: 297556 - DNA, 15 bp, Homo sapiens
cattccttttcattc

SEQ ID NO: 297557 - DNA, 15 bp, Homo sapiens
tcattccttttcatt

SEQ ID NO: 297558 - DNA, 15 bp, Homo sapiens
ttcattccttttcat

SEQ ID NO: 297559 - DNA, 15 bp, Homo sapiens
gttcattccttttca

SEQ ID NO: 297560 - DNA, 15 bp, Homo sapiens
tgttcattccttttc

SEQ ID NO: 297561 - DNA, 15 bp, Homo sapiens
ttgttcattcctttt

SEQ ID NO: 297562 - DNA, 15 bp, Homo sapiens
tttgttcattccttt

SEQ ID NO: 297563 - DNA, 15 bp, Homo sapiens
ctttgttcattcctt

SEQ ID NO: 297564 - DNA, 15 bp, Homo sapiens
gctttgttcattcct

SEQ ID NO: 297565 - DNA, 15 bp, Homo sapiens
ggctttgttcattcc

SEQ ID NO: 297566 - DNA, 15 bp, Homo sapiens
aggctttgttcattc

SEQ ID NO: 297567 - DNA, 15 bp, Homo sapiens
gaggctttgttcatt

SEQ ID NO: 297568 - DNA, 15 bp, Homo sapiens
ggaggctttgttcat

SEQ ID NO: 297569 - DNA, 15 bp, Homo sapiens
tggaggctttgttca

SEQ ID NO: 297570 - DNA, 15 bp, Homo sapiens
ttggaggctttgttc

SEQ ID NO: 297571 - DNA, 15 bp, Homo sapiens
cttggaggctttgtt

SEQ ID NO: 297572 - DNA, 15 bp, Homo sapiens
tcttggaggctttgt

SEQ ID NO: 297573 - DNA, 15 bp, Homo sapiens
ttcttggaggctttg

SEQ ID NO: 297574 - DNA, 15 bp, Homo sapiens
tttcttggaggcttt

SEQ ID NO: 297575 - DNA, 15 bp, Homo sapiens
atttcttggaggctt

SEQ ID NO: 297576 - DNA, 15 bp, Homo sapiens
tatttcttggaggct

SEQ ID NO: 297577 - DNA, 15 bp, Homo sapiens
ctatttcttggaggc

SEQ ID NO: 297578 - DNA, 15 bp, Homo sapiens
cctatttcttggagg

SEQ ID NO: 297579 - DNA, 15 bp, Homo sapiens
ccctatttcttggag

SEQ ID NO: 297580 - DNA, 15 bp, Homo sapiens
cccctatttcttgga

SEQ ID NO: 297581 - DNA, 15 bp, Homo sapiens
tcccctatttcttgg

SEQ ID NO: 297582 - DNA, 15 bp, Homo sapiens
gtcccctatttcttg

SEQ ID NO: 297583 - DNA, 15 bp, Homo sapiens
agtcccctatttctt

SEQ ID NO: 297584 - DNA, 15 bp, Homo sapiens
tagtcccctatttct

SEQ ID NO: 297585 - DNA, 15 bp, Homo sapiens
atagtcccctatttc

SEQ ID NO: 297586 - DNA, 15 bp, Homo sapiens
catagtcccctattt

SEQ ID NO: 297587 - DNA, 15 bp, Homo sapiens
acatagtcccctatt

SEQ ID NO: 297588 - DNA, 15 bp, Homo sapiens
cacatagtcccctat

SEQ ID NO: 297589 - DNA, 15 bp, Homo sapiens
tcacatagtccccta

SEQ ID NO: 297590 - DNA, 15 bp, Homo sapiens
ttcacatagtcccct

SEQ ID NO: 297591 - DNA, 15 bp, Homo sapiens
tttcacatagtcccc

SEQ ID NO: 297592 - DNA, 15 bp, Homo sapiens
ttttcacatagtccc

SEQ ID NO: 297593 - DNA, 15 bp, Homo sapiens
cttttcacatagtcc

SEQ ID NO: 297594 - DNA, 15 bp, Homo sapiens
tcttttcacatagtc

SEQ ID NO: 297595 - DNA, 15 bp, Homo sapiens
gtcttttcacatagt

SEQ ID NO: 297596 - DNA, 15 bp, Homo sapiens
ggtcttttcacatag

SEQ ID NO: 297597 - DNA, 15 bp, Homo sapiens
tggtcttttcacata

SEQ ID NO: 297598 - DNA, 15 bp, Homo sapiens
ttggtcttttcacat

SEQ ID NO: 297599 - DNA, 15 bp, Homo sapiens
tttggtcttttcaca

SEQ ID NO: 297600 - DNA, 15 bp, Homo sapiens
gtttggtcttttcac

SEQ ID NO: 297601 - DNA, 15 bp, Homo sapiens
ggtttggtcttttca

SEQ ID NO: 297602 - DNA, 15 bp, Homo sapiens
aggtttggtcttttc

SEQ ID NO: 297603 - DNA, 15 bp, Homo sapiens
taggtttggtctttt

SEQ ID NO: 297604 - DNA, 15 bp, Homo sapiens
ataggtttggtcttt

SEQ ID NO: 297605 - DNA, 15 bp, Homo sapiens
cataggtttggtctt

SEQ ID NO: 297606 - DNA, 15 bp, Homo sapiens
acataggtttggtct

SEQ ID NO: 297607 - DNA, 15 bp, Homo sapiens
aacataggtttggtc

SEQ ID NO: 297608 - DNA, 15 bp, Homo sapiens
aaacataggtttggt

SEQ ID NO: 297609 - DNA, 15 bp, Homo sapiens
caaacataggtttgg

SEQ ID NO: 297610 - DNA, 15 bp, Homo sapiens
tcaaacataggtttg

SEQ ID NO: 297611 - DNA, 15 bp, Homo sapiens
atcaaacataggttt

SEQ ID NO: 297612 - DNA, 15 bp, Homo sapiens
aatcaaacataggtt

SEQ ID NO: 297613 - DNA, 15 bp, Homo sapiens
caatcaaacataggt

SEQ ID NO: 297614 - DNA, 15 bp, Homo sapiens
ccaatcaaacatagg

SEQ ID NO: 297615 - DNA, 15 bp, Homo sapiens
accaatcaaacatag

SEQ ID NO: 297616 - DNA, 15 bp, Homo sapiens
caccaatcaaacata

SEQ ID NO: 297617 - DNA, 15 bp, Homo sapiens
acaccaatcaaacat

SEQ ID NO: 297618 - DNA, 15 bp, Homo sapiens
tacaccaatcaaaca

SEQ ID NO: 297619 - DNA, 15 bp, Homo sapiens
gtacaccaatcaaac

SEQ ID NO: 297620 - DNA, 15 bp, Homo sapiens
ggtacaccaatcaaa

SEQ ID NO: 297621 - DNA, 15 bp, Homo sapiens
aggtacaccaatcaa

SEQ ID NO: 297622 - DNA, 15 bp, Homo sapiens
caggtacaccaatca

SEQ ID NO: 297623 - DNA, 15 bp, Homo sapiens
tcaggtacaccaatc

SEQ ID NO: 297624 - DNA, 15 bp, Homo sapiens
ttcaggtacaccaat

SEQ ID NO: 297625 - DNA, 15 bp, Homo sapiens
tttcaggtacaccaa

SEQ ID NO: 297626 - DNA, 15 bp, Homo sapiens
ctttcaggtacacca

SEQ ID NO: 297627 - DNA, 15 bp, Homo sapiens
actttcaggtacacc

SEQ ID NO: 297628 - DNA, 15 bp, Homo sapiens
cactttcaggtacac

SEQ ID NO: 297629 - DNA, 15 bp, Homo sapiens
tcctttttaacatat

SEQ ID NO: 297630 - DNA, 15 bp, Homo sapiens
gtcctttttaacata

SEQ ID NO: 297631 - DNA, 15 bp, Homo sapiens
tgtcctttttaacat

SEQ ID NO: 297632 - DNA, 15 bp, Homo sapiens
ttgtcctttttaaca

SEQ ID NO: 297633 - DNA, 15 bp, Homo sapiens
gttgtcctttttaac

SEQ ID NO: 297634 - DNA, 15 bp, Homo sapiens
tgttgtcctttttaa

SEQ ID NO: 297635 - DNA, 15 bp, Homo sapiens
ttgttgtccttttta

SEQ ID NO: 297636 - DNA, 15 bp, Homo sapiens
attgttgtccttttt

SEQ ID NO: 297637 - DNA, 15 bp, Homo sapiens
tattgttgtcctttt

SEQ ID NO: 297638 - DNA, 15 bp, Homo sapiens
ttattgttgtccttt

SEQ ID NO: 297639 - DNA, 15 bp, Homo sapiens
cttattgttgtcctt

SEQ ID NO: 297640 - DNA, 15 bp, Homo sapiens
tcttattgttgtcct

SEQ ID NO: 297641 - DNA, 15 bp, Homo sapiens
ttcttattgttgtcc

SEQ ID NO: 297642 - DNA, 15 bp, Homo sapiens
tttcttattgttgtc

SEQ ID NO: 297643 - DNA, 15 bp, Homo sapiens
ttttcttattgttgt

SEQ ID NO: 297644 - DNA, 15 bp, Homo sapiens
attttcttattgttg

SEQ ID NO: 297645 - DNA, 15 bp, Homo sapiens
gattttcttattgtt

SEQ ID NO: 297646 - DNA, 15 bp, Homo sapiens
agattttcttattgt

SEQ ID NO: 297647 - DNA, 15 bp, Homo sapiens
tagattttcttattg

SEQ ID NO: 297648 - DNA, 15 bp, Homo sapiens
ttagattttcttatt

SEQ ID NO: 297649 - DNA, 15 bp, Homo sapiens
tttagattttcttat

SEQ ID NO: 297650 - DNA, 15 bp, Homo sapiens
ctttagattttctta

SEQ ID NO: 297651 - DNA, 15 bp, Homo sapiens
tctttagattttctt

SEQ ID NO: 297652 - DNA, 15 bp, Homo sapiens
ttctttagattttct

SEQ ID NO: 297653 - DNA, 15 bp, Homo sapiens
tttctttagattttc

SEQ ID NO: 297654 - DNA, 15 bp, Homo sapiens
gtttctttagatttt

SEQ ID NO: 297655 - DNA, 15 bp, Homo sapiens
agtttctttagattt

SEQ ID NO: 297656 - DNA, 15 bp, Homo sapiens
cagtttctttagatt

SEQ ID NO: 297657 - DNA, 15 bp, Homo sapiens
tcagtttctttagat

SEQ ID NO: 297658 - DNA, 15 bp, Homo sapiens
ctcagtttctttaga

SEQ ID NO: 297659 - DNA, 15 bp, Homo sapiens
tctcagtttctttag

SEQ ID NO: 297660 - DNA, 15 bp, Homo sapiens
atctcagtttcttta

SEQ ID NO: 297661 - DNA, 15 bp, Homo sapiens
tatctcagtttcttt

SEQ ID NO: 297662 - DNA, 15 bp, Homo sapiens
ttatctcagtttctt

SEQ ID NO: 297663 - DNA, 15 bp, Homo sapiens
gttatctcagtttct

SEQ ID NO: 297664 - DNA, 15 bp, Homo sapiens
agttatctcagtttc

SEQ ID NO: 297665 - DNA, 15 bp, Homo sapiens
aagttatctcagttt

SEQ ID NO: 297666 - DNA, 15 bp, Homo sapiens
taagttatctcagtt

SEQ ID NO: 297667 - DNA, 15 bp, Homo sapiens
ataagttatctcagt

SEQ ID NO: 297668 - DNA, 15 bp, Homo sapiens
tataagttatctcag

SEQ ID NO: 297669 - DNA, 15 bp, Homo sapiens
ttataagttatctca

SEQ ID NO: 297670 - DNA, 15 bp, Homo sapiens
tttataagttatctc

SEQ ID NO: 297671 - DNA, 15 bp, Homo sapiens
atttataagttatct

SEQ ID NO: 297672 - DNA, 15 bp, Homo sapiens
gatttataagttatc

SEQ ID NO: 297673 - DNA, 15 bp, Homo sapiens
tgatttataagttat

SEQ ID NO: 297674 - DNA, 15 bp, Homo sapiens
ttgatttataagtta

SEQ ID NO: 297675 - DNA, 15 bp, Homo sapiens
attgatttataagtt

SEQ ID NO: 297676 - DNA, 15 bp, Homo sapiens
cattgatttataagt

SEQ ID NO: 297677 - DNA, 15 bp, Homo sapiens
gcattgatttataag

SEQ ID NO: 297678 - DNA, 15 bp, Homo sapiens
tgcattgatttataa

SEQ ID NO: 297679 - DNA, 15 bp, Homo sapiens
ctgcattgatttata

SEQ ID NO: 297680 - DNA, 15 bp, Homo sapiens
cctgcattgatttat

SEQ ID NO: 297681 - DNA, 15 bp, Homo sapiens
acctgcattgattta

SEQ ID NO: 297682 - DNA, 15 bp, Homo sapiens
tacctgcattgattt

SEQ ID NO: 297683 - DNA, 15 bp, Homo sapiens
atacctgcattgatt

SEQ ID NO: 297684 - DNA, 15 bp, Homo sapiens
aatacctgcattgat

SEQ ID NO: 297685 - DNA, 15 bp, Homo sapiens
gaatacctgcattga

SEQ ID NO: 297686 - DNA, 15 bp, Homo sapiens
agaatacctgcattg

SEQ ID NO: 297687 - DNA, 15 bp, Homo sapiens
cagaatacctgcatt

SEQ ID NO: 297688 - DNA, 15 bp, Homo sapiens
acagaatacctgcat

SEQ ID NO: 297689 - DNA, 15 bp, Homo sapiens
cacagaatacctgca

SEQ ID NO: 297690 - DNA, 15 bp, Homo sapiens
acacagaatacctgc

SEQ ID NO: 297691 - DNA, 15 bp, Homo sapiens
aacacagaatacctg

SEQ ID NO: 297692 - DNA, 15 bp, Homo sapiens
taacacagaatacct

SEQ ID NO: 297693 - DNA, 15 bp, Homo sapiens
ttaacacagaatacc

SEQ ID NO: 297694 - DNA, 15 bp, Homo sapiens
tttaacacagaatac

SEQ ID NO: 297695 - DNA, 15 bp, Homo sapiens
atttaacacagaata

SEQ ID NO: 297696 - DNA, 15 bp, Homo sapiens
catttaacacagaat

SEQ ID NO: 297697 - DNA, 15 bp, Homo sapiens
gcatttaacacagaa

SEQ ID NO: 297698 - DNA, 15 bp, Homo sapiens
agcatttaacacaga

SEQ ID NO: 297699 - DNA, 15 bp, Homo sapiens
aagcatttaacacag

SEQ ID NO: 297700 - DNA, 15 bp, Homo sapiens
taagcatttaacaca

SEQ ID NO: 297701 - DNA, 15 bp, Homo sapiens
ataagcatttaacac

SEQ ID NO: 297702 - DNA, 15 bp, Homo sapiens
cataagcatttaaca

SEQ ID NO: 297703 - DNA, 15 bp, Homo sapiens
acataagcatttaac

SEQ ID NO: 297704 - DNA, 15 bp, Homo sapiens
tacataagcatttaa

SEQ ID NO: 297705 - DNA, 15 bp, Homo sapiens
ttacataagcattta

SEQ ID NO: 297706 - DNA, 15 bp, Homo sapiens
cttacataagcattt

SEQ ID NO: 297707 - DNA, 15 bp, Homo sapiens
gcttacataagcatt

SEQ ID NO: 297708 - DNA, 15 bp, Homo sapiens
ggcttacataagcat

SEQ ID NO: 297709 - DNA, 15 bp, Homo sapiens
aggcttacataagca

SEQ ID NO: 297710 - DNA, 15 bp, Homo sapiens
caggcttacataagc

SEQ ID NO: 297711 - DNA, 15 bp, Homo sapiens
tcaggcttacataag

SEQ ID NO: 297712 - DNA, 15 bp, Homo sapiens
ctcaggcttacataa

SEQ ID NO: 297713 - DNA, 15 bp, Homo sapiens
actcaggcttacata

SEQ ID NO: 297714 - DNA, 15 bp, Homo sapiens
aactcaggcttacat

SEQ ID NO: 297715 - DNA, 15 bp, Homo sapiens
gaactcaggcttaca

SEQ ID NO: 297716 - DNA, 15 bp, Homo sapiens
agaactcaggcttac

SEQ ID NO: 297717 - DNA, 15 bp, Homo sapiens
aagaactcaggctta

SEQ ID NO: 297718 - DNA, 15 bp, Homo sapiens
gaagaactcaggctt

SEQ ID NO: 297719 - DNA, 15 bp, Homo sapiens
tgaagaactcaggct

SEQ ID NO: 297720 - DNA, 15 bp, Homo sapiens
atgaagaactcaggc

SEQ ID NO: 297721 - DNA, 15 bp, Homo sapiens
gatgaagaactcagg

SEQ ID NO: 297722 - DNA, 15 bp, Homo sapiens
ggatgaagaactcag

SEQ ID NO: 297723 - DNA, 15 bp, Homo sapiens
tggatgaagaactca

SEQ ID NO: 297724 - DNA, 15 bp, Homo sapiens
ctggatgaagaactc

SEQ ID NO: 297725 - DNA, 15 bp, Homo sapiens
tctggatgaagaact

SEQ ID NO: 297726 - DNA, 15 bp, Homo sapiens
atctggatgaagaac

SEQ ID NO: 297727 - DNA, 15 bp, Homo sapiens
gatctggatgaagaa

SEQ ID NO: 297728 - DNA, 15 bp, Homo sapiens
agatctggatgaaga

SEQ ID NO: 297729 - DNA, 15 bp, Homo sapiens
cagatctggatgaag

SEQ ID NO: 297730 - DNA, 15 bp, Homo sapiens
acagatctggatgaa

SEQ ID NO: 297731 - DNA, 15 bp, Homo sapiens
aacagatctggatga

SEQ ID NO: 297732 - DNA, 15 bp, Homo sapiens
aaacagatctggatg

SEQ ID NO: 297733 - DNA, 15 bp, Homo sapiens
taaacagatctggat

SEQ ID NO: 297734 - DNA, 15 bp, Homo sapiens
ataaacagatctgga

SEQ ID NO: 297735 - DNA, 15 bp, Homo sapiens
cataaacagatctgg

SEQ ID NO: 297736 - DNA, 15 bp, Homo sapiens
tcataaacagatctg

SEQ ID NO: 297737 - DNA, 15 bp, Homo sapiens
atcataaacagatct

SEQ ID NO: 297738 - DNA, 15 bp, Homo sapiens
aatcataaacagatc

SEQ ID NO: 297739 - DNA, 15 bp, Homo sapiens
aaatcataaacagat

SEQ ID NO: 297740 - DNA, 15 bp, Homo sapiens
aaaatcataaacaga

SEQ ID NO: 297741 - DNA, 15 bp, Homo sapiens
taaaatcataaacag

SEQ ID NO: 297742 - DNA, 15 bp, Homo sapiens
ttaaaatcataaaca

SEQ ID NO: 297743 - DNA, 15 bp, Homo sapiens
tttaaaatcataaac

SEQ ID NO: 297744 - DNA, 15 bp, Homo sapiens
gtttaaaatcataaa

SEQ ID NO: 297745 - DNA, 15 bp, Homo sapiens
tgtttaaaatcataa

SEQ ID NO: 297746 - DNA, 15 bp, Homo sapiens
atgtttaaaatcata

SEQ ID NO: 297747 - DNA, 15 bp, Homo sapiens
tatgtttaaaatcat

SEQ ID NO: 297748 - DNA, 15 bp, Homo sapiens
ttatgtttaaaatca

SEQ ID NO: 297749 - DNA, 15 bp, Homo sapiens
tttatgtttaaaatc

SEQ ID NO: 297750 - DNA, 15 bp, Homo sapiens
ttttatgtttaaaat

SEQ ID NO: 297751 - DNA, 15 bp, Homo sapiens
attttatgtttaaaa

SEQ ID NO: 297752 - DNA, 15 bp, Homo sapiens
gattttatgtttaaa

SEQ ID NO: 297753 - DNA, 15 bp, Homo sapiens
tgattttatgtttaa

SEQ ID NO: 297754 - DNA, 15 bp, Homo sapiens
atgattttatgttta

SEQ ID NO: 297755 - DNA, 15 bp, Homo sapiens
aatgattttatgttt

SEQ ID NO: 297756 - DNA, 15 bp, Homo sapiens
aaatgattttatgtt

SEQ ID NO: 297757 - DNA, 15 bp, Homo sapiens
aaaatgattttatgt

SEQ ID NO: 297758 - DNA, 15 bp, Homo sapiens
gaaaatgattttatg

SEQ ID NO: 297759 - DNA, 15 bp, Homo sapiens
tgaaaatgattttat

SEQ ID NO: 297760 - DNA, 15 bp, Homo sapiens
atgaaaatgatttta

SEQ ID NO: 297761 - DNA, 15 bp, Homo sapiens
aatgaaaatgatttt

SEQ ID NO: 297762 - DNA, 15 bp, Homo sapiens
aaatgaaaatgattt

SEQ ID NO: 297763 - DNA, 15 bp, Homo sapiens
gaaatgaaaatgatt

SEQ ID NO: 297764 - DNA, 15 bp, Homo sapiens
agaaatgaaaatgat

SEQ ID NO: 297765 - DNA, 15 bp, Homo sapiens
tagaaatgaaaatga

SEQ ID NO: 297766 - DNA, 15 bp, Homo sapiens
ttagaaatgaaaatg

SEQ ID NO: 297767 - DNA, 15 bp, Homo sapiens
tttagaaatgaaaat

SEQ ID NO: 297768 - DNA, 15 bp, Homo sapiens
gtttagaaatgaaaa

SEQ ID NO: 297769 - DNA, 15 bp, Homo sapiens
ggtttagaaatgaaa

SEQ ID NO: 297770 - DNA, 15 bp, Homo sapiens
aggtttagaaatgaa

SEQ ID NO: 297771 - DNA, 15 bp, Homo sapiens
aaggtttagaaatga

SEQ ID NO: 297772 - DNA, 15 bp, Homo sapiens
aaaggtttagaaatg

SEQ ID NO: 297773 - DNA, 15 bp, Homo sapiens
caaaggtttagaaat

SEQ ID NO: 297774 - DNA, 15 bp, Homo sapiens
gcaaaggtttagaaa

SEQ ID NO: 297775 - DNA, 15 bp, Homo sapiens
agcaaaggtttagaa

SEQ ID NO: 297776 - DNA, 15 bp, Homo sapiens
gagcaaaggtttaga

SEQ ID NO: 297777 - DNA, 15 bp, Homo sapiens
tgagcaaaggtttag

SEQ ID NO: 297778 - DNA, 15 bp, Homo sapiens
ttgagcaaaggttta

SEQ ID NO: 297779 - DNA, 15 bp, Homo sapiens
cttgagcaaaggttt

SEQ ID NO: 297780 - DNA, 15 bp, Homo sapiens
acttgagcaaaggtt

SEQ ID NO: 297781 - DNA, 15 bp, Homo sapiens
tacttgagcaaaggt

SEQ ID NO: 297782 - DNA, 15 bp, Homo sapiens
ttacttgagcaaagg

SEQ ID NO: 297783 - DNA, 15 bp, Homo sapiens
gttacttgagcaaag

SEQ ID NO: 297784 - DNA, 15 bp, Homo sapiens
agttacttgagcaaa

SEQ ID NO: 297785 - DNA, 15 bp, Homo sapiens
aagttacttgagcaa

SEQ ID NO: 297786 - DNA, 15 bp, Homo sapiens
caagttacttgagca

SEQ ID NO: 297787 - DNA, 15 bp, Homo sapiens
acaagttacttgagc

SEQ ID NO: 297788 - DNA, 15 bp, Homo sapiens
tacaagttacttgag

SEQ ID NO: 297789 - DNA, 15 bp, Homo sapiens
ctacaagttacttga

SEQ ID NO: 297790 - DNA, 15 bp, Homo sapiens
actacaagttacttg

SEQ ID NO: 297791 - DNA, 15 bp, Homo sapiens
tactacaagttactt

SEQ ID NO: 297792 - DNA, 15 bp, Homo sapiens
gtactacaagttact

SEQ ID NO: 297793 - DNA, 15 bp, Homo sapiens
ggtactacaagttac

SEQ ID NO: 297794 - DNA, 15 bp, Homo sapiens
aggtactacaagtta

SEQ ID NO: 297795 - DNA, 15 bp, Homo sapiens
caggtactacaagtt

SEQ ID NO: 297796 - DNA, 15 bp, Homo sapiens
tcaggtactacaagt

SEQ ID NO: 297797 - DNA, 15 bp, Homo sapiens
ctcaggtactacaag

SEQ ID NO: 297798 - DNA, 15 bp, Homo sapiens
actcaggtactacaa

SEQ ID NO: 297799 - DNA, 15 bp, Homo sapiens
gactcaggtactaca

SEQ ID NO: 297800 - DNA, 15 bp, Homo sapiens
ggactcaggtactac

SEQ ID NO: 297801 - DNA, 15 bp, Homo sapiens
aggactcaggtacta

SEQ ID NO: 297802 - DNA, 15 bp, Homo sapiens
taggactcaggtact

SEQ ID NO: 297803 - DNA, 15 bp, Homo sapiens
ataggactcaggtac

SEQ ID NO: 297804 - DNA, 15 bp, Homo sapiens
cataggactcaggta

SEQ ID NO: 297805 - DNA, 15 bp, Homo sapiens
acataggactcaggt

SEQ ID NO: 297806 - DNA, 15 bp, Homo sapiens
gacataggactcagg

SEQ ID NO: 297807 - DNA, 15 bp, Homo sapiens
agacataggactcag

SEQ ID NO: 297808 - DNA, 15 bp, Homo sapiens
cagacataggactca

SEQ ID NO: 297809 - DNA, 15 bp, Homo sapiens
tcagacataggactc

SEQ ID NO: 297810 - DNA, 15 bp, Homo sapiens
atcagacataggact

SEQ ID NO: 297811 - DNA, 15 bp, Homo sapiens
gatcagacataggac

SEQ ID NO: 297812 - DNA, 15 bp, Homo sapiens
ggatcagacatagga

SEQ ID NO: 297813 - DNA, 15 bp, Homo sapiens
gggatcagacatagg

SEQ ID NO: 297814 - DNA, 15 bp, Homo sapiens
agggatcagacatag

SEQ ID NO: 297815 - DNA, 15 bp, Homo sapiens
tagggatcagacata

SEQ ID NO: 297816 - DNA, 15 bp, Homo sapiens
ttagggatcagacat

SEQ ID NO: 297817 - DNA, 15 bp, Homo sapiens
cttagggatcagaca

SEQ ID NO: 297818 - DNA, 15 bp, Homo sapiens
acttagggatcagac

SEQ ID NO: 297819 - DNA, 15 bp, Homo sapiens
gacttagggatcaga

SEQ ID NO: 297820 - DNA, 15 bp, Homo sapiens
agacttagggatcag

SEQ ID NO: 297821 - DNA, 15 bp, Homo sapiens
tagacttagggatca

SEQ ID NO: 297822 - DNA, 15 bp, Homo sapiens
atagacttagggatc

SEQ ID NO: 297823 - DNA, 15 bp, Homo sapiens
aatagacttagggat

SEQ ID NO: 297824 - DNA, 15 bp, Homo sapiens
gaatagacttaggga

SEQ ID NO: 297825 - DNA, 15 bp, Homo sapiens
agaatagacttaggg

SEQ ID NO: 297826 - DNA, 15 bp, Homo sapiens
aagaatagacttagg

SEQ ID NO: 297827 - DNA, 15 bp, Homo sapiens
aaagaatagacttag

SEQ ID NO: 297828 - DNA, 15 bp, Homo sapiens
aaaagaatagactta

SEQ ID NO: 297829 - DNA, 15 bp, Homo sapiens
gaaaagaatagactt

SEQ ID NO: 297830 - DNA, 15 bp, Homo sapiens
agaaaagaatagact

SEQ ID NO: 297831 - DNA, 15 bp, Homo sapiens
gagaaaagaatagac

SEQ ID NO: 297832 - DNA, 15 bp, Homo sapiens
agagaaaagaataga

SEQ ID NO: 297833 - DNA, 15 bp, Homo sapiens
tagagaaaagaatag

SEQ ID NO: 297834 - DNA, 15 bp, Homo sapiens
atagagaaaagaata

SEQ ID NO: 297835 - DNA, 15 bp, Homo sapiens
catagagaaaagaat

SEQ ID NO: 297836 - DNA, 15 bp, Homo sapiens
acatagagaaaagaa

SEQ ID NO: 297837 - DNA, 15 bp, Homo sapiens
tacatagagaaaaga

SEQ ID NO: 297838 - DNA, 15 bp, Homo sapiens
atacatagagaaaag

SEQ ID NO: 297839 - DNA, 15 bp, Homo sapiens
gatacatagagaaaa

SEQ ID NO: 297840 - DNA, 15 bp, Homo sapiens
agatacatagagaaa

SEQ ID NO: 297841 - DNA, 15 bp, Homo sapiens
tagatacatagagaa

SEQ ID NO: 297842 - DNA, 15 bp, Homo sapiens
atagatacatagaga

SEQ ID NO: 297843 - DNA, 15 bp, Homo sapiens
tatagatacatagag

SEQ ID NO: 297844 - DNA, 15 bp, Homo sapiens
gtatagatacataga

SEQ ID NO: 297845 - DNA, 15 bp, Homo sapiens
ggtatagatacatag

SEQ ID NO: 297846 - DNA, 15 bp, Homo sapiens
gggtatagatacata

SEQ ID NO: 297847 - DNA, 15 bp, Homo sapiens
agggtatagatacat

SEQ ID NO: 297848 - DNA, 15 bp, Homo sapiens
aagggtatagataca

SEQ ID NO: 297849 - DNA, 15 bp, Homo sapiens
gaagggtatagatac

SEQ ID NO: 297850 - DNA, 15 bp, Homo sapiens
agaagggtatagata

SEQ ID NO: 297851 - DNA, 15 bp, Homo sapiens
aagaagggtatagat

SEQ ID NO: 297852 - DNA, 15 bp, Homo sapiens
aaagaagggtataga

SEQ ID NO: 297853 - DNA, 15 bp, Homo sapiens
taaagaagggtatag

SEQ ID NO: 297854 - DNA, 15 bp, Homo sapiens
ttaaagaagggtata

SEQ ID NO: 297855 - DNA, 15 bp, Homo sapiens
attaaagaagggtat

SEQ ID NO: 297856 - DNA, 15 bp, Homo sapiens
aattaaagaagggta

SEQ ID NO: 297857 - DNA, 15 bp, Homo sapiens
aaattaaagaagggt

SEQ ID NO: 297858 - DNA, 15 bp, Homo sapiens
aaaattaaagaaggg

SEQ ID NO: 297859 - DNA, 15 bp, Homo sapiens
taaaattaaagaagg

SEQ ID NO: 297860 - DNA, 15 bp, Homo sapiens
ttaaaattaaagaag

SEQ ID NO: 297861 - DNA, 15 bp, Homo sapiens
tttaaaattaaagaa

SEQ ID NO: 297862 - DNA, 15 bp, Homo sapiens
ttttaaaattaaaga

SEQ ID NO: 297863 - DNA, 15 bp, Homo sapiens
gttttaaaattaaag

SEQ ID NO: 297864 - DNA, 15 bp, Homo sapiens
tgttttaaaattaaa

SEQ ID NO: 297865 - DNA, 15 bp, Homo sapiens
gtgttttaaaattaa

SEQ ID NO: 297866 - DNA, 15 bp, Homo sapiens
agtgttttaaaatta

SEQ ID NO: 297867 - DNA, 15 bp, Homo sapiens
gagtgttttaaaatt

SEQ ID NO: 297868 - DNA, 15 bp, Homo sapiens
agagtgttttaaaat

SEQ ID NO: 297869 - DNA, 15 bp, Homo sapiens
cagagtgttttaaaa

SEQ ID NO: 297870 - DNA, 15 bp, Homo sapiens
tcagagtgttttaaa

SEQ ID NO: 297871 - DNA, 15 bp, Homo sapiens
gtcagagtgttttaa

SEQ ID NO: 297872 - DNA, 15 bp, Homo sapiens
tgtcagagtgtttta

SEQ ID NO: 297873 - DNA, 15 bp, Homo sapiens
atgtcagagtgtttt

SEQ ID NO: 297874 - DNA, 15 bp, Homo sapiens
tatgtcagagtgttt

SEQ ID NO: 297875 - DNA, 15 bp, Homo sapiens
atatgtcagagtgtt

SEQ ID NO: 297876 - DNA, 15 bp, Homo sapiens
catatgtcagagtgt

SEQ ID NO: 297877 - DNA, 15 bp, Homo sapiens
tcatatgtcagagtg

SEQ ID NO: 297878 - DNA, 15 bp, Homo sapiens
ttcatatgtcagagt

SEQ ID NO: 297879 - DNA, 15 bp, Homo sapiens
tttcatatgtcagag

SEQ ID NO: 297880 - DNA, 15 bp, Homo sapiens
ttttcatatgtcaga

SEQ ID NO: 297881 - DNA, 15 bp, Homo sapiens
tttttcatatgtcag

SEQ ID NO: 297882 - DNA, 15 bp, Homo sapiens
ttttttcatatgtca

SEQ ID NO: 297883 - DNA, 15 bp, Homo sapiens
attttttcatatgtc

SEQ ID NO: 297884 - DNA, 15 bp, Homo sapiens
cattttttcatatgt

SEQ ID NO: 297885 - DNA, 15 bp, Homo sapiens
gcattttttcatatg

SEQ ID NO: 297886 - DNA, 15 bp, Homo sapiens
ggcattttttcatat

SEQ ID NO: 297887 - DNA, 15 bp, Homo sapiens
tggcattttttcata

SEQ ID NO: 297888 - DNA, 15 bp, Homo sapiens
ctggcattttttcat

SEQ ID NO: 297889 - DNA, 15 bp, Homo sapiens
tctggcattttttca

SEQ ID NO: 297890 - DNA, 15 bp, Homo sapiens
ctctggcattttttc

SEQ ID NO: 297891 - DNA, 15 bp, Homo sapiens
actctggcatttttt

SEQ ID NO: 297892 - DNA, 15 bp, Homo sapiens
aactctggcattttt

SEQ ID NO: 297893 - DNA, 15 bp, Homo sapiens
aaactctggcatttt

SEQ ID NO: 297894 - DNA, 15 bp, Homo sapiens
taaactctggcattt

SEQ ID NO: 297895 - DNA, 15 bp, Homo sapiens
gtaaactctggcatt

SEQ ID NO: 297896 - DNA, 15 bp, Homo sapiens
agtaaactctggcat

SEQ ID NO: 297897 - DNA, 15 bp, Homo sapiens
cagtaaactctggca

SEQ ID NO: 297898 - DNA, 15 bp, Homo sapiens
acagtaaactctggc

SEQ ID NO: 297899 - DNA, 15 bp, Homo sapiens
tacagtaaactctgg

SEQ ID NO: 297900 - DNA, 15 bp, Homo sapiens
ctacagtaaactctg

SEQ ID NO: 297901 - DNA, 15 bp, Homo sapiens
tctacagtaaactct

SEQ ID NO: 297902 - DNA, 15 bp, Homo sapiens
ctctacagtaaactc

SEQ ID NO: 297903 - DNA, 15 bp, Homo sapiens
tctctacagtaaact

SEQ ID NO: 297904 - DNA, 15 bp, Homo sapiens
ttctctacagtaaac

SEQ ID NO: 297905 - DNA, 15 bp, Homo sapiens
tttctctacagtaaa

SEQ ID NO: 297906 - DNA, 15 bp, Homo sapiens
atttctctacagtaa

SEQ ID NO: 297907 - DNA, 15 bp, Homo sapiens
tatttctctacagta

SEQ ID NO: 297908 - DNA, 15 bp, Homo sapiens
atatttctctacagt

SEQ ID NO: 297909 - DNA, 15 bp, Homo sapiens
aatatttctctacag

SEQ ID NO: 297910 - DNA, 15 bp, Homo sapiens
gaatatttctctaca

SEQ ID NO: 297911 - DNA, 15 bp, Homo sapiens
tgaatatttctctac

SEQ ID NO: 297912 - DNA, 15 bp, Homo sapiens
atgaatatttctcta

SEQ ID NO: 297913 - DNA, 15 bp, Homo sapiens
tatgaatatttctct

SEQ ID NO: 297914 - DNA, 15 bp, Homo sapiens
ttatgaatatttctc

SEQ ID NO: 297915 - DNA, 15 bp, Homo sapiens
gttatgaatatttct

SEQ ID NO: 297916 - DNA, 15 bp, Homo sapiens
agttatgaatatttc

SEQ ID NO: 297917 - DNA, 15 bp, Homo sapiens
aagttatgaatattt

SEQ ID NO: 297918 - DNA, 15 bp, Homo sapiens
caagttatgaatatt

SEQ ID NO: 297919 - DNA, 15 bp, Homo sapiens
acaagttatgaatat

SEQ ID NO: 297920 - DNA, 15 bp, Homo sapiens
gacaagttatgaata

SEQ ID NO: 297921 - DNA, 15 bp, Homo sapiens
agacaagttatgaat

SEQ ID NO: 297922 - DNA, 15 bp, Homo sapiens
tagacaagttatgaa

SEQ ID NO: 297923 - DNA, 15 bp, Homo sapiens
atagacaagttatga

SEQ ID NO: 297924 - DNA, 15 bp, Homo sapiens
aatagacaagttatg

SEQ ID NO: 297925 - DNA, 15 bp, Homo sapiens
gaatagacaagttat

SEQ ID NO: 297926 - DNA, 15 bp, Homo sapiens
tgaatagacaagtta

SEQ ID NO: 297927 - DNA, 15 bp, Homo sapiens
atgaatagacaagtt

SEQ ID NO: 297928 - DNA, 15 bp, Homo sapiens
catgaatagacaagt

SEQ ID NO: 297929 - DNA, 15 bp, Homo sapiens
acatgaatagacaag

SEQ ID NO: 297930 - DNA, 15 bp, Homo sapiens
gacatgaatagacaa

SEQ ID NO: 297931 - DNA, 15 bp, Homo sapiens
tgacatgaatagaca

SEQ ID NO: 297932 - DNA, 15 bp, Homo sapiens
gtgacatgaatagac

SEQ ID NO: 297933 - DNA, 15 bp, Homo sapiens
agtgacatgaataga

SEQ ID NO: 297934 - DNA, 15 bp, Homo sapiens
gagtgacatgaatag

SEQ ID NO: 297935 - DNA, 15 bp, Homo sapiens
ggagtgacatgaata

SEQ ID NO: 297936 - DNA, 15 bp, Homo sapiens
aggagtgacatgaat

SEQ ID NO: 297937 - DNA, 15 bp, Homo sapiens
gaggagtgacatgaa

SEQ ID NO: 297938 - DNA, 15 bp, Homo sapiens
ggaggagtgacatga

SEQ ID NO: 297939 - DNA, 15 bp, Homo sapiens
gggaggagtgacatg

SEQ ID NO: 297940 - DNA, 15 bp, Homo sapiens
ggggaggagtgacat

SEQ ID NO: 297941 - DNA, 15 bp, Homo sapiens
tggggaggagtgaca

SEQ ID NO: 297942 - DNA, 15 bp, Homo sapiens
gtggggaggagtgac

SEQ ID NO: 297943 - DNA, 15 bp, Homo sapiens
ggtggggaggagtga

SEQ ID NO: 297944 - DNA, 15 bp, Homo sapiens
tggtggggaggagtg

SEQ ID NO: 297945 - DNA, 15 bp, Homo sapiens
gtggtggggaggagt

SEQ ID NO: 297946 - DNA, 15 bp, Homo sapiens
tgtggtggggaggag

SEQ ID NO: 297947 - DNA, 15 bp, Homo sapiens
gtgtggtggggagga

SEQ ID NO: 297948 - DNA, 15 bp, Homo sapiens
ggtgtggtggggagg

SEQ ID NO: 297949 - DNA, 15 bp, Homo sapiens
tggtgtggtggggag

SEQ ID NO: 297950 - DNA, 15 bp, Homo sapiens
atggtgtggtgggga

SEQ ID NO: 297951 - DNA, 15 bp, Homo sapiens
gatggtgtggtgggg

SEQ ID NO: 297952 - DNA, 15 bp, Homo sapiens
ggatggtgtggtggg

SEQ ID NO: 297953 - DNA, 15 bp, Homo sapiens
tggatggtgtggtgg

SEQ ID NO: 297954 - DNA, 15 bp, Homo sapiens
atggatggtgtggtg

SEQ ID NO: 297955 - DNA, 15 bp, Homo sapiens
tatggatggtgtggt

SEQ ID NO: 297956 - DNA, 15 bp, Homo sapiens
atatggatggtgtgg

SEQ ID NO: 297957 - DNA, 15 bp, Homo sapiens
aatatggatggtgtg

SEQ ID NO: 297958 - DNA, 15 bp, Homo sapiens
taatatggatggtgt

SEQ ID NO: 297959 - DNA, 15 bp, Homo sapiens
ataatatggatggtg

SEQ ID NO: 297960 - DNA, 15 bp, Homo sapiens
tataatatggatggt

SEQ ID NO: 297961 - DNA, 15 bp, Homo sapiens
gtataatatggatgg

SEQ ID NO: 297962 - DNA, 15 bp, Homo sapiens
tgtataatatggatg

SEQ ID NO: 297963 - DNA, 15 bp, Homo sapiens
gtgtataatatggat

SEQ ID NO: 297964 - DNA, 15 bp, Homo sapiens
tgtgtataatatgga

SEQ ID NO: 297965 - DNA, 15 bp, Homo sapiens
atgtgtataatatgg

SEQ ID NO: 297966 - DNA, 15 bp, Homo sapiens
aatgtgtataatatg

SEQ ID NO: 297967 - DNA, 15 bp, Homo sapiens
taatgtgtataatat

SEQ ID NO: 297968 - DNA, 15 bp, Homo sapiens
gtaatgtgtataata

SEQ ID NO: 297969 - DNA, 15 bp, Homo sapiens
ggtaatgtgtataat

SEQ ID NO: 297970 - DNA, 15 bp, Homo sapiens
gggtaatgtgtataa

SEQ ID NO: 297971 - DNA, 15 bp, Homo sapiens
tgggtaatgtgtata

SEQ ID NO: 297972 - DNA, 15 bp, Homo sapiens
atgggtaatgtgtat

SEQ ID NO: 297973 - DNA, 15 bp, Homo sapiens
aatgggtaatgtgta

SEQ ID NO: 297974 - DNA, 15 bp, Homo sapiens
gaatgggtaatgtgt

SEQ ID NO: 297975 - DNA, 15 bp, Homo sapiens
agaatgggtaatgtg

SEQ ID NO: 297976 - DNA, 15 bp, Homo sapiens
gagaatgggtaatgt

SEQ ID NO: 297977 - DNA, 15 bp, Homo sapiens
agagaatgggtaatg

SEQ ID NO: 297978 - DNA, 15 bp, Homo sapiens
aagagaatgggtaat

SEQ ID NO: 297979 - DNA, 15 bp, Homo sapiens
aaagagaatgggtaa

SEQ ID NO: 297980 - DNA, 15 bp, Homo sapiens
caaagagaatgggta

SEQ ID NO: 297981 - DNA, 15 bp, Homo sapiens
acaaagagaatgggt

SEQ ID NO: 297982 - DNA, 15 bp, Homo sapiens
aacaaagagaatggg

SEQ ID NO: 297983 - DNA, 15 bp, Homo sapiens
gaacaaagagaatgg

SEQ ID NO: 297984 - DNA, 15 bp, Homo sapiens
tgaacaaagagaatg

SEQ ID NO: 297985 - DNA, 15 bp, Homo sapiens
atgaacaaagagaat

SEQ ID NO: 297986 - DNA, 15 bp, Homo sapiens
aatgaacaaagagaa

SEQ ID NO: 297987 - DNA, 15 bp, Homo sapiens
taatgaacaaagaga

SEQ ID NO: 297988 - DNA, 15 bp, Homo sapiens
ttaatgaacaaagag

SEQ ID NO: 297989 - DNA, 15 bp, Homo sapiens
attaatgaacaaaga

SEQ ID NO: 297990 - DNA, 15 bp, Homo sapiens
aattaatgaacaaag

SEQ ID NO: 297991 - DNA, 15 bp, Homo sapiens
caattaatgaacaaa

SEQ ID NO: 297992 - DNA, 15 bp, Homo sapiens
ccaattaatgaacaa

SEQ ID NO: 297993 - DNA, 15 bp, Homo sapiens
gccaattaatgaaca

SEQ ID NO: 297994 - DNA, 15 bp, Homo sapiens
tgccaattaatgaac

SEQ ID NO: 297995 - DNA, 15 bp, Homo sapiens
ttgccaattaatgaa

SEQ ID NO: 297996 - DNA, 15 bp, Homo sapiens
tttgccaattaatga

SEQ ID NO: 297997 - DNA, 15 bp, Homo sapiens
ttttgccaattaatg

SEQ ID NO: 297998 - DNA, 15 bp, Homo sapiens
cttttgccaattaat

SEQ ID NO: 297999 - DNA, 15 bp, Homo sapiens
ccttttgccaattaa

SEQ ID NO: 298000 - DNA, 15 bp, Homo sapiens
cccttttgccaatta

SEQ ID NO: 298001 - DNA, 15 bp, Homo sapiens
tcccttttgccaatt

SEQ ID NO: 298002 - DNA, 15 bp, Homo sapiens
gtcccttttgccaat

SEQ ID NO: 298003 - DNA, 15 bp, Homo sapiens
agtcccttttgccaa

SEQ ID NO: 298004 - DNA, 15 bp, Homo sapiens
tagtcccttttgcca

SEQ ID NO: 298005 - DNA, 15 bp, Homo sapiens
ttagtcccttttgcc

SEQ ID NO: 298006 - DNA, 15 bp, Homo sapiens
cttagtcccttttgc

SEQ ID NO: 298007 - DNA, 15 bp, Homo sapiens
tcttagtcccttttg

SEQ ID NO: 298008 - DNA, 15 bp, Homo sapiens
ttcttagtccctttt

SEQ ID NO: 298009 - DNA, 15 bp, Homo sapiens
tttcttagtcccttt

SEQ ID NO: 298010 - DNA, 15 bp, Homo sapiens
atttcttagtccctt

SEQ ID NO: 298011 - DNA, 15 bp, Homo sapiens
aatttcttagtccct

SEQ ID NO: 298012 - DNA, 15 bp, Homo sapiens
gaatttcttagtccc

SEQ ID NO: 298013 - DNA, 15 bp, Homo sapiens
tgaatttcttagtcc

SEQ ID NO: 298014 - DNA, 15 bp, Homo sapiens
ttgaatttcttagtc

SEQ ID NO: 298015 - DNA, 15 bp, Homo sapiens
cttgaatttcttagt

SEQ ID NO: 298016 - DNA, 15 bp, Homo sapiens
ccttgaatttcttag

SEQ ID NO: 298017 - DNA, 15 bp, Homo sapiens
tccttgaatttctta

SEQ ID NO: 298018 - DNA, 15 bp, Homo sapiens
atccttgaatttctt

SEQ ID NO: 298019 - DNA, 15 bp, Homo sapiens
catccttgaatttct

SEQ ID NO: 298020 - DNA, 15 bp, Homo sapiens
acatccttgaatttc

SEQ ID NO: 298021 - DNA, 15 bp, Homo sapiens
gacatccttgaattt

SEQ ID NO: 298022 - DNA, 15 bp, Homo sapiens
ggacatccttgaatt

SEQ ID NO: 298023 - DNA, 15 bp, Homo sapiens
tggacatccttgaat

SEQ ID NO: 298024 - DNA, 15 bp, Homo sapiens
ttggacatccttgaa

SEQ ID NO: 298025 - DNA, 15 bp, Homo sapiens
tttggacatccttga

SEQ ID NO: 298026 - DNA, 15 bp, Homo sapiens
ttttggacatccttg

SEQ ID NO: 298027 - DNA, 15 bp, Homo sapiens
tttttggacatcctt

SEQ ID NO: 298028 - DNA, 15 bp, Homo sapiens
atttttggacatcct

SEQ ID NO: 298029 - DNA, 15 bp, Homo sapiens
tatttttggacatcc

SEQ ID NO: 298030 - DNA, 15 bp, Homo sapiens
ttatttttggacatc

SEQ ID NO: 298031 - DNA, 15 bp, Homo sapiens
tttatttttggacat

SEQ ID NO: 298032 - DNA, 15 bp, Homo sapiens
ttttatttttggaca

SEQ ID NO: 298033 - DNA, 15 bp, Homo sapiens
tttttatttttggac

SEQ ID NO: 298034 - DNA, 15 bp, Homo sapiens
ttttttatttttgga

SEQ ID NO: 298035 - DNA, 15 bp, Homo sapiens
gttttttatttttgg

SEQ ID NO: 298036 - DNA, 15 bp, Homo sapiens
tgttttttatttttg

SEQ ID NO: 298037 - DNA, 15 bp, Homo sapiens
ttgttttttattttt

SEQ ID NO: 298038 - DNA, 15 bp, Homo sapiens
tttgttttttatttt

SEQ ID NO: 298039 - DNA, 15 bp, Homo sapiens
gtttgttttttattt

SEQ ID NO: 298040 - DNA, 15 bp, Homo sapiens
tgtttgttttttatt

SEQ ID NO: 298041 - DNA, 15 bp, Homo sapiens
ttgtttgttttttat

SEQ ID NO: 298042 - DNA, 15 bp, Homo sapiens
tttgtttgtttttta

SEQ ID NO: 298043 - DNA, 15 bp, Homo sapiens
ttttgtttgtttttt

SEQ ID NO: 298044 - DNA, 15 bp, Homo sapiens
tttttgtttgttttt

SEQ ID NO: 298045 - DNA, 15 bp, Homo sapiens
atttttgtttgtttt

SEQ ID NO: 298046 - DNA, 15 bp, Homo sapiens
gatttttgtttgttt

SEQ ID NO: 298047 - DNA, 15 bp, Homo sapiens
agatttttgtttgtt

SEQ ID NO: 298048 - DNA, 15 bp, Homo sapiens
tagatttttgtttgt

SEQ ID NO: 298049 - DNA, 15 bp, Homo sapiens
ttagatttttgtttg

SEQ ID NO: 298050 - DNA, 15 bp, Homo sapiens
gttagatttttgttt

SEQ ID NO: 298051 - DNA, 15 bp, Homo sapiens
tgttagatttttgtt

SEQ ID NO: 298052 - DNA, 15 bp, Homo sapiens
ttgttagatttttgt

SEQ ID NO: 298053 - DNA, 15 bp, Homo sapiens
gttgttagatttttg

SEQ ID NO: 298054 - DNA, 15 bp, Homo sapiens
agttgttagattttt

SEQ ID NO: 298055 - DNA, 15 bp, Homo sapiens
gagttgttagatttt

SEQ ID NO: 298056 - DNA, 15 bp, Homo sapiens
tgagttgttagattt

SEQ ID NO: 298057 - DNA, 15 bp, Homo sapiens
ctgagttgttagatt

SEQ ID NO: 298058 - DNA, 15 bp, Homo sapiens
cctgagttgttagat

SEQ ID NO: 298059 - DNA, 15 bp, Homo sapiens
tcctgagttgttaga

SEQ ID NO: 298060 - DNA, 15 bp, Homo sapiens
ttcctgagttgttag

SEQ ID NO: 298061 - DNA, 15 bp, Homo sapiens
attcctgagttgtta

SEQ ID NO: 298062 - DNA, 15 bp, Homo sapiens
cattcctgagttgtt

SEQ ID NO: 298063 - DNA, 15 bp, Homo sapiens
acattcctgagttgt

SEQ ID NO: 298064 - DNA, 15 bp, Homo sapiens
gacattcctgagttg

SEQ ID NO: 298065 - DNA, 15 bp, Homo sapiens
ggacattcctgagtt

SEQ ID NO: 298066 - DNA, 15 bp, Homo sapiens
aggacattcctgagt

SEQ ID NO: 298067 - DNA, 15 bp, Homo sapiens
caggacattcctgag

SEQ ID NO: 298068 - DNA, 15 bp, Homo sapiens
acaggacattcctga

SEQ ID NO: 298069 - DNA, 15 bp, Homo sapiens
tacaggacattcctg

SEQ ID NO: 298070 - DNA, 15 bp, Homo sapiens
ctacaggacattcct

SEQ ID NO: 298071 - DNA, 15 bp, Homo sapiens
cctacaggacattcc

SEQ ID NO: 298072 - DNA, 15 bp, Homo sapiens
acctacaggacattc

SEQ ID NO: 298073 - DNA, 15 bp, Homo sapiens
tacctacaggacatt

SEQ ID NO: 298074 - DNA, 15 bp, Homo sapiens
ctacctacaggacat

SEQ ID NO: 298075 - DNA, 15 bp, Homo sapiens
gctacctacaggaca

SEQ ID NO: 298076 - DNA, 15 bp, Homo sapiens
agctacctacaggac

SEQ ID NO: 298077 - DNA, 15 bp, Homo sapiens
gagctacctacagga

SEQ ID NO: 298078 - DNA, 15 bp, Homo sapiens
tgagctacctacagg

SEQ ID NO: 298079 - DNA, 15 bp, Homo sapiens
atgagctacctacag

SEQ ID NO: 298080 - DNA, 15 bp, Homo sapiens
tatgagctacctaca

SEQ ID NO: 298081 - DNA, 15 bp, Homo sapiens
ctatgagctacctac

SEQ ID NO: 298082 - DNA, 15 bp, Homo sapiens
tctatgagctaccta

SEQ ID NO: 298083 - DNA, 15 bp, Homo sapiens
ttctatgagctacct

SEQ ID NO: 298084 - DNA, 15 bp, Homo sapiens
tttctatgagctacc

SEQ ID NO: 298085 - DNA, 15 bp, Homo sapiens
gtttctatgagctac

SEQ ID NO: 298086 - DNA, 15 bp, Homo sapiens
agtttctatgagcta

SEQ ID NO: 298087 - DNA, 15 bp, Homo sapiens
aagtttctatgagct

SEQ ID NO: 298088 - DNA, 15 bp, Homo sapiens
taagtttctatgagc

SEQ ID NO: 298089 - DNA, 15 bp, Homo sapiens
ctaagtttctatgag

SEQ ID NO: 298090 - DNA, 15 bp, Homo sapiens
actaagtttctatga

SEQ ID NO: 298091 - DNA, 15 bp, Homo sapiens
aactaagtttctatg

SEQ ID NO: 298092 - DNA, 15 bp, Homo sapiens
aaactaagtttctat

SEQ ID NO: 298093 - DNA, 15 bp, Homo sapiens
taaactaagtttcta

SEQ ID NO: 298094 - DNA, 15 bp, Homo sapiens
ctaaactaagtttct

SEQ ID NO: 298095 - DNA, 15 bp, Homo sapiens
cctaaactaagtttc

SEQ ID NO: 298096 - DNA, 15 bp, Homo sapiens
tcctaaactaagttt

SEQ ID NO: 298097 - DNA, 15 bp, Homo sapiens
ttcctaaactaagtt

SEQ ID NO: 298098 - DNA, 15 bp, Homo sapiens
cttcctaaactaagt

SEQ ID NO: 298099 - DNA, 15 bp, Homo sapiens
acttcctaaactaag

SEQ ID NO: 298100 - DNA, 15 bp, Homo sapiens
tacttcctaaactaa

SEQ ID NO: 298101 - DNA, 15 bp, Homo sapiens
ctacttcctaaacta

SEQ ID NO: 298102 - DNA, 15 bp, Homo sapiens
actacttcctaaact

SEQ ID NO: 298103 - DNA, 15 bp, Homo sapiens
cactacttcctaaac

SEQ ID NO: 298104 - DNA, 15 bp, Homo sapiens
gcactacttcctaaa

SEQ ID NO: 298105 - DNA, 15 bp, Homo sapiens
agcactacttcctaa

SEQ ID NO: 298106 - DNA, 15 bp, Homo sapiens
gagcactacttccta

SEQ ID NO: 298107 - DNA, 15 bp, Homo sapiens
tgagcactacttcct

SEQ ID NO: 298108 - DNA, 15 bp, Homo sapiens
atgagcactacttcc

SEQ ID NO: 298109 - DNA, 15 bp, Homo sapiens
gatgagcactacttc

SEQ ID NO: 298110 - DNA, 15 bp, Homo sapiens
tgatgagcactactt

SEQ ID NO: 298111 - DNA, 15 bp, Homo sapiens
gtgatgagcactact

SEQ ID NO: 298112 - DNA, 15 bp, Homo sapiens
agtgatgagcactac

SEQ ID NO: 298113 - DNA, 15 bp, Homo sapiens
aagtgatgagcacta

SEQ ID NO: 298114 - DNA, 15 bp, Homo sapiens
caagtgatgagcact

SEQ ID NO: 298115 - DNA, 15 bp, Homo sapiens
gcaagtgatgagcac

SEQ ID NO: 298116 - DNA, 15 bp, Homo sapiens
agcaagtgatgagca

SEQ ID NO: 298117 - DNA, 15 bp, Homo sapiens
aagcaagtgatgagc

SEQ ID NO: 298118 - DNA, 15 bp, Homo sapiens
taagcaagtgatgag

SEQ ID NO: 298119 - DNA, 15 bp, Homo sapiens
gtaagcaagtgatga

SEQ ID NO: 298120 - DNA, 15 bp, Homo sapiens
agtaagcaagtgatg

SEQ ID NO: 298121 - DNA, 15 bp, Homo sapiens
aagtaagcaagtgat

SEQ ID NO: 298122 - DNA, 15 bp, Homo sapiens
gaagtaagcaagtga

SEQ ID NO: 298123 - DNA, 15 bp, Homo sapiens
agaagtaagcaagtg

SEQ ID NO: 298124 - DNA, 15 bp, Homo sapiens
aagaagtaagcaagt

SEQ ID NO: 298125 - DNA, 15 bp, Homo sapiens
aaagaagtaagcaag

SEQ ID NO: 298126 - DNA, 15 bp, Homo sapiens
caaagaagtaagcaa

SEQ ID NO: 298127 - DNA, 15 bp, Homo sapiens
ccaaagaagtaagca

SEQ ID NO: 298128 - DNA, 15 bp, Homo sapiens
tccaaagaagtaagc

SEQ ID NO: 298129 - DNA, 15 bp, Homo sapiens
ttccaaagaagtaag

SEQ ID NO: 298130 - DNA, 15 bp, Homo sapiens
cttccaaagaagtaa

SEQ ID NO: 298131 - DNA, 15 bp, Homo sapiens
acttccaaagaagta

SEQ ID NO: 298132 - DNA, 15 bp, Homo sapiens
aacttccaaagaagt

SEQ ID NO: 298133 - DNA, 15 bp, Homo sapiens
aaacttccaaagaag

SEQ ID NO: 298134 - DNA, 15 bp, Homo sapiens
caaacttccaaagaa

SEQ ID NO: 298135 - DNA, 15 bp, Homo sapiens
acaaacttccaaaga

SEQ ID NO: 298136 - DNA, 15 bp, Homo sapiens
gacaaacttccaaag

SEQ ID NO: 298137 - DNA, 15 bp, Homo sapiens
agacaaacttccaaa

SEQ ID NO: 298138 - DNA, 15 bp, Homo sapiens
cagacaaacttccaa

SEQ ID NO: 298139 - DNA, 15 bp, Homo sapiens
tcagacaaacttcca

SEQ ID NO: 298140 - DNA, 15 bp, Homo sapiens
atcagacaaacttcc

SEQ ID NO: 298141 - DNA, 15 bp, Homo sapiens
tatcagacaaacttc

SEQ ID NO: 298142 - DNA, 15 bp, Homo sapiens
ttatcagacaaactt

SEQ ID NO: 298143 - DNA, 15 bp, Homo sapiens
attatcagacaaact

SEQ ID NO: 298144 - DNA, 15 bp, Homo sapiens
aattatcagacaaac

SEQ ID NO: 298145 - DNA, 15 bp, Homo sapiens
taattatcagacaaa

SEQ ID NO: 298146 - DNA, 15 bp, Homo sapiens
ataattatcagacaa

SEQ ID NO: 298147 - DNA, 15 bp, Homo sapiens
tataattatcagaca

SEQ ID NO: 298148 - DNA, 15 bp, Homo sapiens
gtataattatcagac

SEQ ID NO: 298149 - DNA, 15 bp, Homo sapiens
tgtataattatcaga

SEQ ID NO: 298150 - DNA, 15 bp, Homo sapiens
ctgtataattatcag

SEQ ID NO: 298151 - DNA, 15 bp, Homo sapiens
tctgtataattatca

SEQ ID NO: 298152 - DNA, 15 bp, Homo sapiens
gtctgtataattatc

SEQ ID NO: 298153 - DNA, 15 bp, Homo sapiens
ggtctgtataattat

SEQ ID NO: 298154 - DNA, 15 bp, Homo sapiens
tggtctgtataatta

SEQ ID NO: 298155 - DNA, 15 bp, Homo sapiens
ctggtctgtataatt

SEQ ID NO: 298156 - DNA, 15 bp, Homo sapiens
gctggtctgtataat

SEQ ID NO: 298157 - DNA, 15 bp, Homo sapiens
tgctggtctgtataa

SEQ ID NO: 298158 - DNA, 15 bp, Homo sapiens
atgctggtctgtata

SEQ ID NO: 298159 - DNA, 15 bp, Homo sapiens
gatgctggtctgtat

SEQ ID NO: 298160 - DNA, 15 bp, Homo sapiens
tgatgctggtctgta

SEQ ID NO: 298161 - DNA, 15 bp, Homo sapiens
ttgatgctggtctgt

SEQ ID NO: 298162 - DNA, 15 bp, Homo sapiens
tttgatgctggtctg

SEQ ID NO: 298163 - DNA, 15 bp, Homo sapiens
ttttgatgctggtct

SEQ ID NO: 298164 - DNA, 15 bp, Homo sapiens
attttgatgctggtc

SEQ ID NO: 298165 - DNA, 15 bp, Homo sapiens
tattttgatgctggt

SEQ ID NO: 298166 - DNA, 15 bp, Homo sapiens
ttattttgatgctgg

SEQ ID NO: 298167 - DNA, 15 bp, Homo sapiens
gttattttgatgctg

SEQ ID NO: 298168 - DNA, 15 bp, Homo sapiens
agttattttgatgct

SEQ ID NO: 298169 - DNA, 15 bp, Homo sapiens
gagttattttgatgc

SEQ ID NO: 298170 - DNA, 15 bp, Homo sapiens
agagttattttgatg

SEQ ID NO: 298171 - DNA, 15 bp, Homo sapiens
gagagttattttgat

SEQ ID NO: 298172 - DNA, 15 bp, Homo sapiens
tgagagttattttga

SEQ ID NO: 298173 - DNA, 15 bp, Homo sapiens
atgagagttattttg

SEQ ID NO: 298174 - DNA, 15 bp, Homo sapiens
aatgagagttatttt

SEQ ID NO: 298175 - DNA, 15 bp, Homo sapiens
aaatgagagttattt

SEQ ID NO: 298176 - DNA, 15 bp, Homo sapiens
taaatgagagttatt

SEQ ID NO: 298177 - DNA, 15 bp, Homo sapiens
ataaatgagagttat

SEQ ID NO: 298178 - DNA, 15 bp, Homo sapiens
cataaatgagagtta

SEQ ID NO: 298179 - DNA, 15 bp, Homo sapiens
acataaatgagagtt

SEQ ID NO: 298180 - DNA, 15 bp, Homo sapiens
cacataaatgagagt

SEQ ID NO: 298181 - DNA, 15 bp, Homo sapiens
acacataaatgagag

SEQ ID NO: 298182 - DNA, 15 bp, Homo sapiens
cacacataaatgaga

SEQ ID NO: 298183 - DNA, 15 bp, Homo sapiens
acacacataaatgag

SEQ ID NO: 298184 - DNA, 15 bp, Homo sapiens
cacacacataaatga

SEQ ID NO: 298185 - DNA, 15 bp, Homo sapiens
tcacacacataaatg

SEQ ID NO: 298186 - DNA, 15 bp, Homo sapiens
gtcacacacataaat

SEQ ID NO: 298187 - DNA, 15 bp, Homo sapiens
tgtcacacacataaa

SEQ ID NO: 298188 - DNA, 15 bp, Homo sapiens
atgtcacacacataa

SEQ ID NO: 298189 - DNA, 15 bp, Homo sapiens
aatgtcacacacata

SEQ ID NO: 298190 - DNA, 15 bp, Homo sapiens
aaatgtcacacacat

SEQ ID NO: 298191 - DNA, 15 bp, Homo sapiens
gaaatgtcacacaca

SEQ ID NO: 298192 - DNA, 15 bp, Homo sapiens
tgaaatgtcacacac

SEQ ID NO: 298193 - DNA, 15 bp, Homo sapiens
ctgaaatgtcacaca

SEQ ID NO: 298194 - DNA, 15 bp, Homo sapiens
actgaaatgtcacac

SEQ ID NO: 298195 - DNA, 15 bp, Homo sapiens
cactgaaatgtcaca

SEQ ID NO: 298196 - DNA, 15 bp, Homo sapiens
acactgaaatgtcac

SEQ ID NO: 298197 - DNA, 15 bp, Homo sapiens
tacactgaaatgtca

SEQ ID NO: 298198 - DNA, 15 bp, Homo sapiens
ctacactgaaatgtc

SEQ ID NO: 298199 - DNA, 15 bp, Homo sapiens
tctacactgaaatgt

SEQ ID NO: 298200 - DNA, 15 bp, Homo sapiens
ttctacactgaaatg

SEQ ID NO: 298201 - DNA, 15 bp, Homo sapiens
cttctacactgaaat

SEQ ID NO: 298202 - DNA, 15 bp, Homo sapiens
acttctacactgaaa

SEQ ID NO: 298203 - DNA, 15 bp, Homo sapiens
tacttctacactgaa

SEQ ID NO: 298204 - DNA, 15 bp, Homo sapiens
ttacttctacactga

SEQ ID NO: 298205 - DNA, 15 bp, Homo sapiens
attacttctacactg

SEQ ID NO: 298206 - DNA, 15 bp, Homo sapiens
tattacttctacact

SEQ ID NO: 298207 - DNA, 15 bp, Homo sapiens
ttattacttctacac

SEQ ID NO: 298208 - DNA, 15 bp, Homo sapiens
attattacttctaca

SEQ ID NO: 298209 - DNA, 15 bp, Homo sapiens
tattattacttctac

SEQ ID NO: 298210 - DNA, 15 bp, Homo sapiens
ctattattacttcta

SEQ ID NO: 298211 - DNA, 15 bp, Homo sapiens
cctattattacttct

SEQ ID NO: 298212 - DNA, 15 bp, Homo sapiens
acctattattacttc

SEQ ID NO: 298213 - DNA, 15 bp, Homo sapiens
tacctattattactt

SEQ ID NO: 298214 - DNA, 15 bp, Homo sapiens
ttacctattattact

SEQ ID NO: 298215 - DNA, 15 bp, Homo sapiens
attacctattattac

SEQ ID NO: 298216 - DNA, 15 bp, Homo sapiens
cattacctattatta

SEQ ID NO: 298217 - DNA, 15 bp, Homo sapiens
acattacctattatt

SEQ ID NO: 298218 - DNA, 15 bp, Homo sapiens
aacattacctattat

SEQ ID NO: 298219 - DNA, 15 bp, Homo sapiens
aaacattacctatta

SEQ ID NO: 298220 - DNA, 15 bp, Homo sapiens
aaaacattacctatt

SEQ ID NO: 298221 - DNA, 15 bp, Homo sapiens
aaaaacattacctat

SEQ ID NO: 298222 - DNA, 15 bp, Homo sapiens
caaaaacattaccta

SEQ ID NO: 298223 - DNA, 15 bp, Homo sapiens
gcaaaaacattacct

SEQ ID NO: 298224 - DNA, 15 bp, Homo sapiens
tgcaaaaacattacc

SEQ ID NO: 298225 - DNA, 15 bp, Homo sapiens
atgcaaaaacattac

SEQ ID NO: 298226 - DNA, 15 bp, Homo sapiens
tatgcaaaaacatta

SEQ ID NO: 298227 - DNA, 15 bp, Homo sapiens
atatgcaaaaacatt

SEQ ID NO: 298228 - DNA, 15 bp, Homo sapiens
catatgcaaaaacat

SEQ ID NO: 298229 - DNA, 15 bp, Homo sapiens
acatatgcaaaaaca

SEQ ID NO: 298230 - DNA, 15 bp, Homo sapiens
gacatatgcaaaaac

SEQ ID NO: 298231 - DNA, 15 bp, Homo sapiens
ggacatatgcaaaaa

SEQ ID NO: 298232 - DNA, 15 bp, Homo sapiens
aggacatatgcaaaa

SEQ ID NO: 298233 - DNA, 15 bp, Homo sapiens
taggacatatgcaaa

SEQ ID NO: 298234 - DNA, 15 bp, Homo sapiens
ataggacatatgcaa

SEQ ID NO: 298235 - DNA, 15 bp, Homo sapiens
aataggacatatgca

SEQ ID NO: 298236 - DNA, 15 bp, Homo sapiens
taataggacatatgc

SEQ ID NO: 298237 - DNA, 15 bp, Homo sapiens
ataataggacatatg

SEQ ID NO: 298238 - DNA, 15 bp, Homo sapiens
tataataggacatat

SEQ ID NO: 298239 - DNA, 15 bp, Homo sapiens
ctataataggacata

SEQ ID NO: 298240 - DNA, 15 bp, Homo sapiens
cctataataggacat

SEQ ID NO: 298241 - DNA, 15 bp, Homo sapiens
acctataataggaca

SEQ ID NO: 298242 - DNA, 15 bp, Homo sapiens
tacctataataggac

SEQ ID NO: 298243 - DNA, 15 bp, Homo sapiens
gtacctataatagga

SEQ ID NO: 298244 - DNA, 15 bp, Homo sapiens
agtacctataatagg

SEQ ID NO: 298245 - DNA, 15 bp, Homo sapiens
cagtacctataatag

SEQ ID NO: 298246 - DNA, 15 bp, Homo sapiens
acagtacctataata

SEQ ID NO: 298247 - DNA, 15 bp, Homo sapiens
aacagtacctataat

SEQ ID NO: 298248 - DNA, 15 bp, Homo sapiens
taacagtacctataa

SEQ ID NO: 298249 - DNA, 15 bp, Homo sapiens
ttaacagtacctata

SEQ ID NO: 298250 - DNA, 15 bp, Homo sapiens
tttaacagtacctat

SEQ ID NO: 298251 - DNA, 15 bp, Homo sapiens
ttttaacagtaccta

SEQ ID NO: 298252 - DNA, 15 bp, Homo sapiens
cttttaacagtacct

SEQ ID NO: 298253 - DNA, 15 bp, Homo sapiens
acttttaacagtacc

SEQ ID NO: 298254 - DNA, 15 bp, Homo sapiens
cacttttaacagtac

SEQ ID NO: 298255 - DNA, 15 bp, Homo sapiens
gcacttttaacagta

SEQ ID NO: 298256 - DNA, 15 bp, Homo sapiens
agcacttttaacagt

SEQ ID NO: 298257 - DNA, 15 bp, Homo sapiens
aagcacttttaacag

SEQ ID NO: 298258 - DNA, 15 bp, Homo sapiens
gaagcacttttaaca

SEQ ID NO: 298259 - DNA, 15 bp, Homo sapiens
tgaagcacttttaac

SEQ ID NO: 298260 - DNA, 15 bp, Homo sapiens
ctgaagcacttttaa

SEQ ID NO: 298261 - DNA, 15 bp, Homo sapiens
actgaagcactttta

SEQ ID NO: 298262 - DNA, 15 bp, Homo sapiens
cactgaagcactttt

SEQ ID NO: 298263 - DNA, 15 bp, Homo sapiens
acactgaagcacttt

SEQ ID NO: 298264 - DNA, 15 bp, Homo sapiens
tacactgaagcactt

SEQ ID NO: 298265 - DNA, 15 bp, Homo sapiens
atacactgaagcact

SEQ ID NO: 298266 - DNA, 15 bp, Homo sapiens
aatacactgaagcac

SEQ ID NO: 298267 - DNA, 15 bp, Homo sapiens
taatacactgaagca

SEQ ID NO: 298268 - DNA, 15 bp, Homo sapiens
ttaatacactgaagc

SEQ ID NO: 298269 - DNA, 15 bp, Homo sapiens
gttaatacactgaag

SEQ ID NO: 298270 - DNA, 15 bp, Homo sapiens
agttaatacactgaa

SEQ ID NO: 298271 - DNA, 15 bp, Homo sapiens
gagttaatacactga

SEQ ID NO: 298272 - DNA, 15 bp, Homo sapiens
tgagttaatacactg

SEQ ID NO: 298273 - DNA, 15 bp, Homo sapiens
atgagttaatacact

SEQ ID NO: 298274 - DNA, 15 bp, Homo sapiens
tatgagttaatacac

SEQ ID NO: 298275 - DNA, 15 bp, Homo sapiens
ttatgagttaataca

SEQ ID NO: 298276 - DNA, 15 bp, Homo sapiens
gttatgagttaatac

SEQ ID NO: 298277 - DNA, 15 bp, Homo sapiens
agttatgagttaata

SEQ ID NO: 298278 - DNA, 15 bp, Homo sapiens
aagttatgagttaat

SEQ ID NO: 298279 - DNA, 15 bp, Homo sapiens
gaagttatgagttaa

SEQ ID NO: 298280 - DNA, 15 bp, Homo sapiens
agaagttatgagtta

SEQ ID NO: 298281 - DNA, 15 bp, Homo sapiens
gagaagttatgagtt

SEQ ID NO: 298282 - DNA, 15 bp, Homo sapiens
tgagaagttatgagt

SEQ ID NO: 298283 - DNA, 15 bp, Homo sapiens
gtgagaagttatgag

SEQ ID NO: 298284 - DNA, 15 bp, Homo sapiens
tgtgagaagttatga

SEQ ID NO: 298285 - DNA, 15 bp, Homo sapiens
ttgtgagaagttatg

SEQ ID NO: 298286 - DNA, 15 bp, Homo sapiens
gttgtgagaagttat

SEQ ID NO: 298287 - DNA, 15 bp, Homo sapiens
agttgtgagaagtta

SEQ ID NO: 298288 - DNA, 15 bp, Homo sapiens
gagttgtgagaagtt

SEQ ID NO: 298289 - DNA, 15 bp, Homo sapiens
agagttgtgagaagt

SEQ ID NO: 298290 - DNA, 15 bp, Homo sapiens
tagagttgtgagaag

SEQ ID NO: 298291 - DNA, 15 bp, Homo sapiens
atagagttgtgagaa

SEQ ID NO: 298292 - DNA, 15 bp, Homo sapiens
catagagttgtgaga

SEQ ID NO: 298293 - DNA, 15 bp, Homo sapiens
tcatagagttgtgag

SEQ ID NO: 298294 - DNA, 15 bp, Homo sapiens
ttcatagagttgtga

SEQ ID NO: 298295 - DNA, 15 bp, Homo sapiens
tttcatagagttgtg

SEQ ID NO: 298296 - DNA, 15 bp, Homo sapiens
atttcatagagttgt

SEQ ID NO: 298297 - DNA, 15 bp, Homo sapiens
tatttcatagagttg

SEQ ID NO: 298298 - DNA, 15 bp, Homo sapiens
ctatttcatagagtt

SEQ ID NO: 298299 - DNA, 15 bp, Homo sapiens
tctatttcatagagt

SEQ ID NO: 298300 - DNA, 15 bp, Homo sapiens
atctatttcatagag

SEQ ID NO: 298301 - DNA, 15 bp, Homo sapiens
aatctatttcataga

SEQ ID NO: 298302 - DNA, 15 bp, Homo sapiens
gaatctatttcatag

SEQ ID NO: 298303 - DNA, 15 bp, Homo sapiens
agaatctatttcata

SEQ ID NO: 298304 - DNA, 15 bp, Homo sapiens
cagaatctatttcat

SEQ ID NO: 298305 - DNA, 15 bp, Homo sapiens
acagaatctatttca

SEQ ID NO: 298306 - DNA, 15 bp, Homo sapiens
gacagaatctatttc

SEQ ID NO: 298307 - DNA, 15 bp, Homo sapiens
tgacagaatctattt

SEQ ID NO: 298308 - DNA, 15 bp, Homo sapiens
atgacagaatctatt

SEQ ID NO: 298309 - DNA, 15 bp, Homo sapiens
gatgacagaatctat

SEQ ID NO: 298310 - DNA, 15 bp, Homo sapiens
tgatgacagaatcta

SEQ ID NO: 298311 - DNA, 15 bp, Homo sapiens
gtgatgacagaatct

SEQ ID NO: 298312 - DNA, 15 bp, Homo sapiens
agtgatgacagaatc

SEQ ID NO: 298313 - DNA, 15 bp, Homo sapiens
cagtgatgacagaat

SEQ ID NO: 298314 - DNA, 15 bp, Homo sapiens
acagtgatgacagaa

SEQ ID NO: 298315 - DNA, 15 bp, Homo sapiens
aacagtgatgacaga

SEQ ID NO: 298316 - DNA, 15 bp, Homo sapiens
aaacagtgatgacag

SEQ ID NO: 298317 - DNA, 15 bp, Homo sapiens
gaaacagtgatgaca

SEQ ID NO: 298318 - DNA, 15 bp, Homo sapiens
tgaaacagtgatgac

SEQ ID NO: 298319 - DNA, 15 bp, Homo sapiens
gtgaaacagtgatga

SEQ ID NO: 298320 - DNA, 15 bp, Homo sapiens
tgtgaaacagtgatg

SEQ ID NO: 298321 - DNA, 15 bp, Homo sapiens
ctgtgaaacagtgat

SEQ ID NO: 298322 - DNA, 15 bp, Homo sapiens
tctgtgaaacagtga

SEQ ID NO: 298323 - DNA, 15 bp, Homo sapiens
atctgtgaaacagtg

SEQ ID NO: 298324 - DNA, 15 bp, Homo sapiens
catctgtgaaacagt

SEQ ID NO: 298325 - DNA, 15 bp, Homo sapiens
ccatctgtgaaacag

SEQ ID NO: 298326 - DNA, 15 bp, Homo sapiens
tccatctgtgaaaca

SEQ ID NO: 298327 - DNA, 15 bp, Homo sapiens
ctccatctgtgaaac

SEQ ID NO: 298328 - DNA, 15 bp, Homo sapiens
tctccatctgtgaaa

SEQ ID NO: 298329 - DNA, 15 bp, Homo sapiens
ttctccatctgtgaa

SEQ ID NO: 298330 - DNA, 15 bp, Homo sapiens
tttctccatctgtga

SEQ ID NO: 298331 - DNA, 15 bp, Homo sapiens
gtttctccatctgtg

SEQ ID NO: 298332 - DNA, 15 bp, Homo sapiens
agtttctccatctgt

SEQ ID NO: 298333 - DNA, 15 bp, Homo sapiens
aagtttctccatctg

SEQ ID NO: 298334 - DNA, 15 bp, Homo sapiens
aaagtttctccatct

SEQ ID NO: 298335 - DNA, 15 bp, Homo sapiens
gaaagtttctccatc

SEQ ID NO: 298336 - DNA, 15 bp, Homo sapiens
ggaaagtttctccat

SEQ ID NO: 298337 - DNA, 15 bp, Homo sapiens
aggaaagtttctcca

SEQ ID NO: 298338 - DNA, 15 bp, Homo sapiens
caggaaagtttctcc

SEQ ID NO: 298339 - DNA, 15 bp, Homo sapiens
acaggaaagtttctc

SEQ ID NO: 298340 - DNA, 15 bp, Homo sapiens
cacaggaaagtttct

SEQ ID NO: 298341 - DNA, 15 bp, Homo sapiens
acacaggaaagtttc

SEQ ID NO: 298342 - DNA, 15 bp, Homo sapiens
gacacaggaaagttt

SEQ ID NO: 298343 - DNA, 15 bp, Homo sapiens
ggacacaggaaagtt

SEQ ID NO: 298344 - DNA, 15 bp, Homo sapiens
tggacacaggaaagt

SEQ ID NO: 298345 - DNA, 15 bp, Homo sapiens
gtggacacaggaaag

SEQ ID NO: 298346 - DNA, 15 bp, Homo sapiens
tgtggacacaggaaa

SEQ ID NO: 298347 - DNA, 15 bp, Homo sapiens
ttgtggacacaggaa

SEQ ID NO: 298348 - DNA, 15 bp, Homo sapiens
tttgtggacacagga

SEQ ID NO: 298349 - DNA, 15 bp, Homo sapiens
ttttgtggacacagg

SEQ ID NO: 298350 - DNA, 15 bp, Homo sapiens
gttttgtggacacag

SEQ ID NO: 298351 - DNA, 15 bp, Homo sapiens
agttttgtggacaca

SEQ ID NO: 298352 - DNA, 15 bp, Homo sapiens
cagttttgtggacac

SEQ ID NO: 298353 - DNA, 15 bp, Homo sapiens
ccagttttgtggaca

SEQ ID NO: 298354 - DNA, 15 bp, Homo sapiens
accagttttgtggac

SEQ ID NO: 298355 - DNA, 15 bp, Homo sapiens
aaccagttttgtgga

SEQ ID NO: 298356 - DNA, 15 bp, Homo sapiens
caaccagttttgtgg

SEQ ID NO: 298357 - DNA, 15 bp, Homo sapiens
ccaaccagttttgtg

SEQ ID NO: 298358 - DNA, 15 bp, Homo sapiens
accaaccagttttgt

SEQ ID NO: 298359 - DNA, 15 bp, Homo sapiens
caccaaccagttttg

SEQ ID NO: 298360 - DNA, 15 bp, Homo sapiens
tcaccaaccagtttt

SEQ ID NO: 298361 - DNA, 15 bp, Homo sapiens
gtcaccaaccagttt

SEQ ID NO: 298362 - DNA, 15 bp, Homo sapiens
tgtcaccaaccagtt

SEQ ID NO: 298363 - DNA, 15 bp, Homo sapiens
ctgtcaccaaccagt

SEQ ID NO: 298364 - DNA, 15 bp, Homo sapiens
tctgtcaccaaccag

SEQ ID NO: 298365 - DNA, 15 bp, Homo sapiens
ctctgtcaccaacca

SEQ ID NO: 298366 - DNA, 15 bp, Homo sapiens
gctctgtcaccaacc

SEQ ID NO: 298367 - DNA, 15 bp, Homo sapiens
ggctctgtcaccaac

SEQ ID NO: 298368 - DNA, 15 bp, Homo sapiens
tggctctgtcaccaa

SEQ ID NO: 298369 - DNA, 15 bp, Homo sapiens
ctggctctgtcacca

SEQ ID NO: 298370 - DNA, 15 bp, Homo sapiens
tctggctctgtcacc

SEQ ID NO: 298371 - DNA, 15 bp, Homo sapiens
ttctggctctgtcac

SEQ ID NO: 298372 - DNA, 15 bp, Homo sapiens
attctggctctgtca

SEQ ID NO: 298373 - DNA, 15 bp, Homo sapiens
aattctggctctgtc

SEQ ID NO: 298374 - DNA, 15 bp, Homo sapiens
aaattctggctctgt

SEQ ID NO: 298375 - DNA, 15 bp, Homo sapiens
aaaattctggctctg

SEQ ID NO: 298376 - DNA, 15 bp, Homo sapiens
taaaattctggctct

SEQ ID NO: 298377 - DNA, 15 bp, Homo sapiens
ttaaaattctggctc

SEQ ID NO: 298378 - DNA, 15 bp, Homo sapiens
gttaaaattctggct

SEQ ID NO: 298379 - DNA, 15 bp, Homo sapiens
agttaaaattctggc

SEQ ID NO: 298380 - DNA, 15 bp, Homo sapiens
gagttaaaattctgg

SEQ ID NO: 298381 - DNA, 15 bp, Homo sapiens
tgagttaaaattctg

SEQ ID NO: 298382 - DNA, 15 bp, Homo sapiens
ctgagttaaaattct

SEQ ID NO: 298383 - DNA, 15 bp, Homo sapiens
cctgagttaaaattc

SEQ ID NO: 298384 - DNA, 15 bp, Homo sapiens
gcctgagttaaaatt

SEQ ID NO: 298385 - DNA, 15 bp, Homo sapiens
agcctgagttaaaat

SEQ ID NO: 298386 - DNA, 15 bp, Homo sapiens
tagcctgagttaaaa

SEQ ID NO: 298387 - DNA, 15 bp, Homo sapiens
atagcctgagttaaa

SEQ ID NO: 298388 - DNA, 15 bp, Homo sapiens
gatagcctgagttaa

SEQ ID NO: 298389 - DNA, 15 bp, Homo sapiens
agatagcctgagtta

SEQ ID NO: 298390 - DNA, 15 bp, Homo sapiens
cagatagcctgagtt

SEQ ID NO: 298391 - DNA, 15 bp, Homo sapiens
ccagatagcctgagt

SEQ ID NO: 298392 - DNA, 15 bp, Homo sapiens
accagatagcctgag

SEQ ID NO: 298393 - DNA, 15 bp, Homo sapiens
aaccagatagcctga

SEQ ID NO: 298394 - DNA, 15 bp, Homo sapiens
gaaccagatagcctg

SEQ ID NO: 298395 - DNA, 15 bp, Homo sapiens
ggaaccagatagcct

SEQ ID NO: 298396 - DNA, 15 bp, Homo sapiens
tggaaccagatagcc

SEQ ID NO: 298397 - DNA, 15 bp, Homo sapiens
ctggaaccagatagc

SEQ ID NO: 298398 - DNA, 15 bp, Homo sapiens
tctggaaccagatag

SEQ ID NO: 298399 - DNA, 15 bp, Homo sapiens
ctctggaaccagata

SEQ ID NO: 298400 - DNA, 15 bp, Homo sapiens
tctctggaaccagat

SEQ ID NO: 298401 - DNA, 15 bp, Homo sapiens
gtctctggaaccaga

SEQ ID NO: 298402 - DNA, 15 bp, Homo sapiens
agtctctggaaccag

SEQ ID NO: 298403 - DNA, 15 bp, Homo sapiens
tagtctctggaacca

SEQ ID NO: 298404 - DNA, 15 bp, Homo sapiens
atagtctctggaacc

SEQ ID NO: 298405 - DNA, 15 bp, Homo sapiens
tatagtctctggaac

SEQ ID NO: 298406 - DNA, 15 bp, Homo sapiens
gtatagtctctggaa

SEQ ID NO: 298407 - DNA, 15 bp, Homo sapiens
agtatagtctctgga

SEQ ID NO: 298408 - DNA, 15 bp, Homo sapiens
aagtatagtctctgg

SEQ ID NO: 298409 - DNA, 15 bp, Homo sapiens
aaagtatagtctctg

SEQ ID NO: 298410 - DNA, 15 bp, Homo sapiens
aaaagtatagtctct

SEQ ID NO: 298411 - DNA, 15 bp, Homo sapiens
taaaagtatagtctc

SEQ ID NO: 298412 - DNA, 15 bp, Homo sapiens
ctaaaagtatagtct

SEQ ID NO: 298413 - DNA, 15 bp, Homo sapiens
gctaaaagtatagtc

SEQ ID NO: 298414 - DNA, 15 bp, Homo sapiens
ggctaaaagtatagt

SEQ ID NO: 298415 - DNA, 15 bp, Homo sapiens
aggctaaaagtatag

SEQ ID NO: 298416 - DNA, 15 bp, Homo sapiens
gaggctaaaagtata

SEQ ID NO: 298417 - DNA, 15 bp, Homo sapiens
agaggctaaaagtat

SEQ ID NO: 298418 - DNA, 15 bp, Homo sapiens
tagaggctaaaagta

SEQ ID NO: 298419 - DNA, 15 bp, Homo sapiens
atagaggctaaaagt

SEQ ID NO: 298420 - DNA, 15 bp, Homo sapiens
catagaggctaaaag

SEQ ID NO: 298421 - DNA, 15 bp, Homo sapiens
acatagaggctaaaa

SEQ ID NO: 298422 - DNA, 15 bp, Homo sapiens
aacatagaggctaaa

SEQ ID NO: 298423 - DNA, 15 bp, Homo sapiens
caacatagaggctaa

SEQ ID NO: 298424 - DNA, 15 bp, Homo sapiens
gcaacatagaggcta

SEQ ID NO: 298425 - DNA, 15 bp, Homo sapiens
ggcaacatagaggct

SEQ ID NO: 298426 - DNA, 15 bp, Homo sapiens
aggcaacatagaggc

SEQ ID NO: 298427 - DNA, 15 bp, Homo sapiens
aaggcaacatagagg

SEQ ID NO: 298428 - DNA, 15 bp, Homo sapiens
aaaggcaacatagag

SEQ ID NO: 298429 - DNA, 15 bp, Homo sapiens
aaaaggcaacataga

SEQ ID NO: 298430 - DNA, 15 bp, Homo sapiens
taaaaggcaacatag

SEQ ID NO: 298431 - DNA, 15 bp, Homo sapiens
ctaaaaggcaacata

SEQ ID NO: 298432 - DNA, 15 bp, Homo sapiens
actaaaaggcaacat

SEQ ID NO: 298433 - DNA, 15 bp, Homo sapiens
cactaaaaggcaaca

SEQ ID NO: 298434 - DNA, 15 bp, Homo sapiens
acactaaaaggcaac

SEQ ID NO: 298435 - DNA, 15 bp, Homo sapiens
tacactaaaaggcaa

SEQ ID NO: 298436 - DNA, 15 bp, Homo sapiens
atacactaaaaggca

SEQ ID NO: 298437 - DNA, 15 bp, Homo sapiens
tatacactaaaaggc

SEQ ID NO: 298438 - DNA, 15 bp, Homo sapiens
atatacactaaaagg

SEQ ID NO: 298439 - DNA, 15 bp, Homo sapiens
aatatacactaaaag

SEQ ID NO: 298440 - DNA, 15 bp, Homo sapiens
taatatacactaaaa

SEQ ID NO: 298441 - DNA, 15 bp, Homo sapiens
ctaatatacactaaa

SEQ ID NO: 298442 - DNA, 15 bp, Homo sapiens
actaatatacactaa

SEQ ID NO: 298443 - DNA, 15 bp, Homo sapiens
aactaatatacacta

SEQ ID NO: 298444 - DNA, 15 bp, Homo sapiens
aaactaatatacact

SEQ ID NO: 298445 - DNA, 15 bp, Homo sapiens
taaactaatatacac

SEQ ID NO: 298446 - DNA, 15 bp, Homo sapiens
gtaaactaatataca

SEQ ID NO: 298447 - DNA, 15 bp, Homo sapiens
agtaaactaatatac

SEQ ID NO: 298448 - DNA, 15 bp, Homo sapiens
cagtaaactaatata

SEQ ID NO: 298449 - DNA, 15 bp, Homo sapiens
acagtaaactaatat

SEQ ID NO: 298450 - DNA, 15 bp, Homo sapiens
aacagtaaactaata

SEQ ID NO: 298451 - DNA, 15 bp, Homo sapiens
aaacagtaaactaat

SEQ ID NO: 298452 - DNA, 15 bp, Homo sapiens
caaacagtaaactaa

SEQ ID NO: 298453 - DNA, 15 bp, Homo sapiens
ccaaacagtaaacta

SEQ ID NO: 298454 - DNA, 15 bp, Homo sapiens
accaaacagtaaact

SEQ ID NO: 298455 - DNA, 15 bp, Homo sapiens
taccaaacagtaaac

SEQ ID NO: 298456 - DNA, 15 bp, Homo sapiens
ataccaaacagtaaa

SEQ ID NO: 298457 - DNA, 15 bp, Homo sapiens
cataccaaacagtaa

SEQ ID NO: 298458 - DNA, 15 bp, Homo sapiens
acataccaaacagta

SEQ ID NO: 298459 - DNA, 15 bp, Homo sapiens
cacataccaaacagt

SEQ ID NO: 298460 - DNA, 15 bp, Homo sapiens
gcacataccaaacag

SEQ ID NO: 298461 - DNA, 15 bp, Homo sapiens
tgcacataccaaaca

SEQ ID NO: 298462 - DNA, 15 bp, Homo sapiens
atgcacataccaaac

SEQ ID NO: 298463 - DNA, 15 bp, Homo sapiens
aatgcacataccaaa

SEQ ID NO: 298464 - DNA, 15 bp, Homo sapiens
caatgcacataccaa

SEQ ID NO: 298465 - DNA, 15 bp, Homo sapiens
acaatgcacatacca

SEQ ID NO: 298466 - DNA, 15 bp, Homo sapiens
gacaatgcacatacc

SEQ ID NO: 298467 - DNA, 15 bp, Homo sapiens
tgacaatgcacatac

SEQ ID NO: 298468 - DNA, 15 bp, Homo sapiens
atgacaatgcacata

SEQ ID NO: 298469 - DNA, 15 bp, Homo sapiens
catgacaatgcacat

SEQ ID NO: 298470 - DNA, 15 bp, Homo sapiens
tcatgacaatgcaca

SEQ ID NO: 298471 - DNA, 15 bp, Homo sapiens
atcatgacaatgcac

SEQ ID NO: 298472 - DNA, 15 bp, Homo sapiens
aatcatgacaatgca

SEQ ID NO: 298473 - DNA, 15 bp, Homo sapiens
gaatcatgacaatgc

SEQ ID NO: 298474 - DNA, 15 bp, Homo sapiens
cgaatcatgacaatg

SEQ ID NO: 298475 - DNA, 15 bp, Homo sapiens
acgaatcatgacaat

SEQ ID NO: 298476 - DNA, 15 bp, Homo sapiens
aacgaatcatgacaa

SEQ ID NO: 298477 - DNA, 15 bp, Homo sapiens
aaacgaatcatgaca

SEQ ID NO: 298478 - DNA, 15 bp, Homo sapiens
taaacgaatcatgac

SEQ ID NO: 298479 - DNA, 15 bp, Homo sapiens
ataaacgaatcatga

SEQ ID NO: 298480 - DNA, 15 bp, Homo sapiens
aataaacgaatcatg

SEQ ID NO: 298481 - DNA, 15 bp, Homo sapiens
aaataaacgaatcat

SEQ ID NO: 298482 - DNA, 15 bp, Homo sapiens
caaataaacgaatca

SEQ ID NO: 298483 - DNA, 15 bp, Homo sapiens
gcaaataaacgaatc

SEQ ID NO: 298484 - DNA, 15 bp, Homo sapiens
agcaaataaacgaat

SEQ ID NO: 298485 - DNA, 15 bp, Homo sapiens
gagcaaataaacgaa

SEQ ID NO: 298486 - DNA, 15 bp, Homo sapiens
tgagcaaataaacga

SEQ ID NO: 298487 - DNA, 15 bp, Homo sapiens
atgagcaaataaacg

SEQ ID NO: 298488 - DNA, 15 bp, Homo sapiens
catgagcaaataaac

SEQ ID NO: 298489 - DNA, 15 bp, Homo sapiens
acatgagcaaataaa

SEQ ID NO: 298490 - DNA, 15 bp, Homo sapiens
aacatgagcaaataa

SEQ ID NO: 298491 - DNA, 15 bp, Homo sapiens
aaacatgagcaaata

SEQ ID NO: 298492 - DNA, 15 bp, Homo sapiens
aaaacatgagcaaat

SEQ ID NO: 298493 - DNA, 15 bp, Homo sapiens
taaaacatgagcaaa

SEQ ID NO: 298494 - DNA, 15 bp, Homo sapiens
ataaaacatgagcaa

SEQ ID NO: 298495 - DNA, 15 bp, Homo sapiens
gataaaacatgagca

SEQ ID NO: 298496 - DNA, 15 bp, Homo sapiens
agataaaacatgagc

SEQ ID NO: 298497 - DNA, 15 bp, Homo sapiens
cagataaaacatgag

SEQ ID NO: 298498 - DNA, 15 bp, Homo sapiens
acagataaaacatga

SEQ ID NO: 298499 - DNA, 15 bp, Homo sapiens
cacagataaaacatg

SEQ ID NO: 298500 - DNA, 15 bp, Homo sapiens
acacagataaaacat

SEQ ID NO: 298501 - DNA, 15 bp, Homo sapiens
aacacagataaaaca

SEQ ID NO: 298502 - DNA, 15 bp, Homo sapiens
aaacacagataaaac

SEQ ID NO: 298503 - DNA, 15 bp, Homo sapiens
caaacacagataaaa

SEQ ID NO: 298504 - DNA, 15 bp, Homo sapiens
acaaacacagataaa

SEQ ID NO: 298505 - DNA, 15 bp, Homo sapiens
tacaaacacagataa

SEQ ID NO: 298506 - DNA, 15 bp, Homo sapiens
atacaaacacagata

SEQ ID NO: 298507 - DNA, 15 bp, Homo sapiens
aatacaaacacagat

SEQ ID NO: 298508 - DNA, 15 bp, Homo sapiens
aaatacaaacacaga

SEQ ID NO: 298509 - DNA, 15 bp, Homo sapiens
aaaatacaaacacag

SEQ ID NO: 298510 - DNA, 15 bp, Homo sapiens
aaaaatacaaacaca

SEQ ID NO: 298511 - DNA, 15 bp, Homo sapiens
caaaaatacaaacac

SEQ ID NO: 298512 - DNA, 15 bp, Homo sapiens
acaaaaatacaaaca

SEQ ID NO: 298513 - DNA, 15 bp, Homo sapiens
cacaaaaatacaaac

SEQ ID NO: 298514 - DNA, 15 bp, Homo sapiens
acacaaaaatacaaa

SEQ ID NO: 298515 - DNA, 15 bp, Homo sapiens
aacacaaaaatacaa

SEQ ID NO: 298516 - DNA, 15 bp, Homo sapiens
aaacacaaaaataca

SEQ ID NO: 298517 - DNA, 15 bp, Homo sapiens
caaacacaaaaatac

SEQ ID NO: 298518 - DNA, 15 bp, Homo sapiens
acaaacacaaaaata

SEQ ID NO: 298519 - DNA, 15 bp, Homo sapiens
cacaaacacaaaaat

SEQ ID NO: 298520 - DNA, 15 bp, Homo sapiens
tcacaaacacaaaaa

SEQ ID NO: 298521 - DNA, 15 bp, Homo sapiens
ctcacaaacacaaaa

SEQ ID NO: 298522 - DNA, 15 bp, Homo sapiens
actcacaaacacaaa

SEQ ID NO: 298523 - DNA, 15 bp, Homo sapiens
cactcacaaacacaa

SEQ ID NO: 298524 - DNA, 15 bp, Homo sapiens
acactcacaaacaca

SEQ ID NO: 298525 - DNA, 15 bp, Homo sapiens
aacactcacaaacac

SEQ ID NO: 298526 - DNA, 15 bp, Homo sapiens
taacactcacaaaca

SEQ ID NO: 298527 - DNA, 15 bp, Homo sapiens
gtaacactcacaaac

SEQ ID NO: 298528 - DNA, 15 bp, Homo sapiens
agtaacactcacaaa

SEQ ID NO: 298529 - DNA, 15 bp, Homo sapiens
tagtaacactcacaa

SEQ ID NO: 298530 - DNA, 15 bp, Homo sapiens
atagtaacactcaca

SEQ ID NO: 298531 - DNA, 15 bp, Homo sapiens
catagtaacactcac

SEQ ID NO: 298532 - DNA, 15 bp, Homo sapiens
gcatagtaacactca

SEQ ID NO: 298533 - DNA, 15 bp, Homo sapiens
agcatagtaacactc

SEQ ID NO: 298534 - DNA, 15 bp, Homo sapiens
tagcatagtaacact

SEQ ID NO: 298535 - DNA, 15 bp, Homo sapiens
atagcatagtaacac

SEQ ID NO: 298536 - DNA, 15 bp, Homo sapiens
catagcatagtaaca

SEQ ID NO: 298537 - DNA, 15 bp, Homo sapiens
ccatagcatagtaac

SEQ ID NO: 298538 - DNA, 15 bp, Homo sapiens
gccatagcatagtaa

SEQ ID NO: 298539 - DNA, 15 bp, Homo sapiens
tgccatagcatagta

SEQ ID NO: 298540 - DNA, 15 bp, Homo sapiens
ttgccatagcatagt

SEQ ID NO: 298541 - DNA, 15 bp, Homo sapiens
tttgccatagcatag

SEQ ID NO: 298542 - DNA, 15 bp, Homo sapiens
ttttgccatagcata

SEQ ID NO: 298543 - DNA, 15 bp, Homo sapiens
tttttgccatagcat

SEQ ID NO: 298544 - DNA, 15 bp, Homo sapiens
ctttttgccatagca

SEQ ID NO: 298545 - DNA, 15 bp, Homo sapiens
cctttttgccatagc

SEQ ID NO: 298546 - DNA, 15 bp, Homo sapiens
ccctttttgccatag

SEQ ID NO: 298547 - DNA, 15 bp, Homo sapiens
gccctttttgccata

SEQ ID NO: 298548 - DNA, 15 bp, Homo sapiens
ggccctttttgccat

SEQ ID NO: 298549 - DNA, 15 bp, Homo sapiens
aggccctttttgcca

SEQ ID NO: 298550 - DNA, 15 bp, Homo sapiens
taggccctttttgcc

SEQ ID NO: 298551 - DNA, 15 bp, Homo sapiens
ctaggccctttttgc

SEQ ID NO: 298552 - DNA, 15 bp, Homo sapiens
tctaggccctttttg

SEQ ID NO: 298553 - DNA, 15 bp, Homo sapiens
gtctaggcccttttt

SEQ ID NO: 298554 - DNA, 15 bp, Homo sapiens
agtctaggccctttt

SEQ ID NO: 298555 - DNA, 15 bp, Homo sapiens
aagtctaggcccttt

SEQ ID NO: 298556 - DNA, 15 bp, Homo sapiens
aaagtctaggccctt

SEQ ID NO: 298557 - DNA, 15 bp, Homo sapiens
caaagtctaggccct

SEQ ID NO: 298558 - DNA, 15 bp, Homo sapiens
tcaaagtctaggccc

SEQ ID NO: 298559 - DNA, 15 bp, Homo sapiens
ttcaaagtctaggcc

SEQ ID NO: 298560 - DNA, 15 bp, Homo sapiens
attcaaagtctaggc

SEQ ID NO: 298561 - DNA, 15 bp, Homo sapiens
aattcaaagtctagg

SEQ ID NO: 298562 - DNA, 15 bp, Homo sapiens
taattcaaagtctag

SEQ ID NO: 298563 - DNA, 15 bp, Homo sapiens
ctaattcaaagtcta

SEQ ID NO: 298564 - DNA, 15 bp, Homo sapiens
gctaattcaaagtct

SEQ ID NO: 298565 - DNA, 15 bp, Homo sapiens
cgctaattcaaagtc

SEQ ID NO: 298566 - DNA, 15 bp, Homo sapiens
ccgctaattcaaagt

SEQ ID NO: 298567 - DNA, 15 bp, Homo sapiens
tccgctaattcaaag

SEQ ID NO: 298568 - DNA, 15 bp, Homo sapiens
atccgctaattcaaa

SEQ ID NO: 298569 - DNA, 15 bp, Homo sapiens
gatccgctaattcaa

SEQ ID NO: 298570 - DNA, 15 bp, Homo sapiens
agatccgctaattca

SEQ ID NO: 298571 - DNA, 15 bp, Homo sapiens
aagatccgctaattc

SEQ ID NO: 298572 - DNA, 15 bp, Homo sapiens
taagatccgctaatt

SEQ ID NO: 298573 - DNA, 15 bp, Homo sapiens
gtaagatccgctaat

SEQ ID NO: 298574 - DNA, 15 bp, Homo sapiens
agtaagatccgctaa

SEQ ID NO: 298575 - DNA, 15 bp, Homo sapiens
aagtaagatccgcta

SEQ ID NO: 298576 - DNA, 15 bp, Homo sapiens
taagtaagatccgct

SEQ ID NO: 298577 - DNA, 15 bp, Homo sapiens
ttaagtaagatccgc

SEQ ID NO: 298578 - DNA, 15 bp, Homo sapiens
attaagtaagatccg

SEQ ID NO: 298579 - DNA, 15 bp, Homo sapiens
tattaagtaagatcc

SEQ ID NO: 298580 - DNA, 15 bp, Homo sapiens
atattaagtaagatc

SEQ ID NO: 298581 - DNA, 15 bp, Homo sapiens
aatattaagtaagat

SEQ ID NO: 298582 - DNA, 15 bp, Homo sapiens
gaatattaagtaaga

SEQ ID NO: 298583 - DNA, 15 bp, Homo sapiens
tgaatattaagtaag

SEQ ID NO: 298584 - DNA, 15 bp, Homo sapiens
gtgaatattaagtaa

SEQ ID NO: 298585 - DNA, 15 bp, Homo sapiens
tgtgaatattaagta

SEQ ID NO: 298586 - DNA, 15 bp, Homo sapiens
ctgtgaatattaagt

SEQ ID NO: 298587 - DNA, 15 bp, Homo sapiens
tctgtgaatattaag

SEQ ID NO: 298588 - DNA, 15 bp, Homo sapiens
ttctgtgaatattaa

SEQ ID NO: 298589 - DNA, 15 bp, Homo sapiens
cttctgtgaatatta

SEQ ID NO: 298590 - DNA, 15 bp, Homo sapiens
gcttctgtgaatatt

SEQ ID NO: 298591 - DNA, 15 bp, Homo sapiens
ggcttctgtgaatat

SEQ ID NO: 298592 - DNA, 15 bp, Homo sapiens
aggcttctgtgaata

SEQ ID NO: 298593 - DNA, 15 bp, Homo sapiens
caggcttctgtgaat

SEQ ID NO: 298594 - DNA, 15 bp, Homo sapiens
ccaggcttctgtgaa

SEQ ID NO: 298595 - DNA, 15 bp, Homo sapiens
tccaggcttctgtga

SEQ ID NO: 298596 - DNA, 15 bp, Homo sapiens
ttccaggcttctgtg

SEQ ID NO: 298597 - DNA, 15 bp, Homo sapiens
cttccaggcttctgt

SEQ ID NO: 298598 - DNA, 15 bp, Homo sapiens
acttccaggcttctg

SEQ ID NO: 298599 - DNA, 15 bp, Homo sapiens
cacttccaggcttct

SEQ ID NO: 298600 - DNA, 15 bp, Homo sapiens
acacttccaggcttc

SEQ ID NO: 298601 - DNA, 15 bp, Homo sapiens
tacacttccaggctt

SEQ ID NO: 298602 - DNA, 15 bp, Homo sapiens
ttacacttccaggct

SEQ ID NO: 298603 - DNA, 15 bp, Homo sapiens
tttacacttccaggc

SEQ ID NO: 298604 - DNA, 15 bp, Homo sapiens
gtttacacttccagg

SEQ ID NO: 298605 - DNA, 15 bp, Homo sapiens
tgtttacacttccag

SEQ ID NO: 298606 - DNA, 15 bp, Homo sapiens
gtgtttacacttcca

SEQ ID NO: 298607 - DNA, 15 bp, Homo sapiens
agtgtttacacttcc

SEQ ID NO: 298608 - DNA, 15 bp, Homo sapiens
cagtgtttacacttc

SEQ ID NO: 298609 - DNA, 15 bp, Homo sapiens
gcagtgtttacactt

SEQ ID NO: 298610 - DNA, 15 bp, Homo sapiens
agcagtgtttacact

SEQ ID NO: 298611 - DNA, 15 bp, Homo sapiens
tagcagtgtttacac

SEQ ID NO: 298612 - DNA, 15 bp, Homo sapiens
atagcagtgtttaca

SEQ ID NO: 298613 - DNA, 15 bp, Homo sapiens
gatagcagtgtttac

SEQ ID NO: 298614 - DNA, 15 bp, Homo sapiens
ggatagcagtgttta

SEQ ID NO: 298615 - DNA, 15 bp, Homo sapiens
gggatagcagtgttt

SEQ ID NO: 298616 - DNA, 15 bp, Homo sapiens
agggatagcagtgtt

SEQ ID NO: 298617 - DNA, 15 bp, Homo sapiens
tagggatagcagtgt

SEQ ID NO: 298618 - DNA, 15 bp, Homo sapiens
atagggatagcagtg

SEQ ID NO: 298619 - DNA, 15 bp, Homo sapiens
aatagggatagcagt

SEQ ID NO: 298620 - DNA, 15 bp, Homo sapiens
aaatagggatagcag

SEQ ID NO: 298621 - DNA, 15 bp, Homo sapiens
aaaatagggatagca

SEQ ID NO: 298622 - DNA, 15 bp, Homo sapiens
taaaatagggatagc

SEQ ID NO: 298623 - DNA, 15 bp, Homo sapiens
ataaaatagggatag

SEQ ID NO: 298624 - DNA, 15 bp, Homo sapiens
tataaaatagggata

SEQ ID NO: 298625 - DNA, 15 bp, Homo sapiens
ctataaaatagggat

SEQ ID NO: 298626 - DNA, 15 bp, Homo sapiens
tctataaaataggga

SEQ ID NO: 298627 - DNA, 15 bp, Homo sapiens
atctataaaataggg

SEQ ID NO: 298628 - DNA, 15 bp, Homo sapiens
tatctataaaatagg

SEQ ID NO: 298629 - DNA, 15 bp, Homo sapiens
ttatctataaaatag

SEQ ID NO: 298630 - DNA, 15 bp, Homo sapiens
tttatctataaaata

SEQ ID NO: 298631 - DNA, 15 bp, Homo sapiens
ctttatctataaaat

SEQ ID NO: 298632 - DNA, 15 bp, Homo sapiens
tctttatctataaaa

SEQ ID NO: 298633 - DNA, 15 bp, Homo sapiens
ctctttatctataaa

SEQ ID NO: 298634 - DNA, 15 bp, Homo sapiens
tctctttatctataa

SEQ ID NO: 298635 - DNA, 15 bp, Homo sapiens
gtctctttatctata

SEQ ID NO: 298636 - DNA, 15 bp, Homo sapiens
ggtctctttatctat

SEQ ID NO: 298637 - DNA, 15 bp, Homo sapiens
aggtctctttatcta

SEQ ID NO: 298638 - DNA, 15 bp, Homo sapiens
caggtctctttatct

SEQ ID NO: 298639 - DNA, 15 bp, Homo sapiens
tcaggtctctttatc

SEQ ID NO: 298640 - DNA, 15 bp, Homo sapiens
ctcaggtctctttat

SEQ ID NO: 298641 - DNA, 15 bp, Homo sapiens
cctcaggtctcttta

SEQ ID NO: 298642 - DNA, 15 bp, Homo sapiens
acctcaggtctcttt

SEQ ID NO: 298643 - DNA, 15 bp, Homo sapiens
gacctcaggtctctt

SEQ ID NO: 298644 - DNA, 15 bp, Homo sapiens
ggacctcaggtctct

SEQ ID NO: 298645 - DNA, 15 bp, Homo sapiens
tggacctcaggtctc

SEQ ID NO: 298646 - DNA, 15 bp, Homo sapiens
ctggacctcaggtct

SEQ ID NO: 298647 - DNA, 15 bp, Homo sapiens
tctggacctcaggtc

SEQ ID NO: 298648 - DNA, 15 bp, Homo sapiens
ctctggacctcaggt

SEQ ID NO: 298649 - DNA, 15 bp, Homo sapiens
tctctggacctcagg

SEQ ID NO: 298650 - DNA, 15 bp, Homo sapiens
atctctggacctcag

SEQ ID NO: 298651 - DNA, 15 bp, Homo sapiens
catctctggacctca

SEQ ID NO: 298652 - DNA, 15 bp, Homo sapiens
acatctctggacctc

SEQ ID NO: 298653 - DNA, 15 bp, Homo sapiens
gacatctctggacct

SEQ ID NO: 298654 - DNA, 15 bp, Homo sapiens
tgacatctctggacc

SEQ ID NO: 298655 - DNA, 15 bp, Homo sapiens
atgacatctctggac

SEQ ID NO: 298656 - DNA, 15 bp, Homo sapiens
catgacatctctgga

SEQ ID NO: 298657 - DNA, 15 bp, Homo sapiens
acatgacatctctgg

SEQ ID NO: 298658 - DNA, 15 bp, Homo sapiens
tacatgacatctctg

SEQ ID NO: 298659 - DNA, 15 bp, Homo sapiens
ttacatgacatctct

SEQ ID NO: 298660 - DNA, 15 bp, Homo sapiens
gttacatgacatctc

SEQ ID NO: 298661 - DNA, 15 bp, Homo sapiens
agttacatgacatct

SEQ ID NO: 298662 - DNA, 15 bp, Homo sapiens
aagttacatgacatc

SEQ ID NO: 298663 - DNA, 15 bp, Homo sapiens
caagttacatgacat

SEQ ID NO: 298664 - DNA, 15 bp, Homo sapiens
gcaagttacatgaca

SEQ ID NO: 298665 - DNA, 15 bp, Homo sapiens
agcaagttacatgac

SEQ ID NO: 298666 - DNA, 15 bp, Homo sapiens
aagcaagttacatga

SEQ ID NO: 298667 - DNA, 15 bp, Homo sapiens
aaagcaagttacatg

SEQ ID NO: 298668 - DNA, 15 bp, Homo sapiens
caaagcaagttacat

SEQ ID NO: 298669 - DNA, 15 bp, Homo sapiens
ccaaagcaagttaca

SEQ ID NO: 298670 - DNA, 15 bp, Homo sapiens
accaaagcaagttac

SEQ ID NO: 298671 - DNA, 15 bp, Homo sapiens
caccaaagcaagtta

SEQ ID NO: 298672 - DNA, 15 bp, Homo sapiens
acaccaaagcaagtt

SEQ ID NO: 298673 - DNA, 15 bp, Homo sapiens
cacaccaaagcaagt

SEQ ID NO: 298674 - DNA, 15 bp, Homo sapiens
ccacaccaaagcaag

SEQ ID NO: 298675 - DNA, 15 bp, Homo sapiens
accacaccaaagcaa

SEQ ID NO: 298676 - DNA, 15 bp, Homo sapiens
aaccacaccaaagca

SEQ ID NO: 298677 - DNA, 15 bp, Homo sapiens
gaaccacaccaaagc

SEQ ID NO: 298678 - DNA, 15 bp, Homo sapiens
agaaccacaccaaag

SEQ ID NO: 298679 - DNA, 15 bp, Homo sapiens
cagaaccacaccaaa

SEQ ID NO: 298680 - DNA, 15 bp, Homo sapiens
tcagaaccacaccaa

SEQ ID NO: 298681 - DNA, 15 bp, Homo sapiens
ttcagaaccacacca

SEQ ID NO: 298682 - DNA, 15 bp, Homo sapiens
gttcagaaccacacc

SEQ ID NO: 298683 - DNA, 15 bp, Homo sapiens
tgttcagaaccacac

SEQ ID NO: 298684 - DNA, 15 bp, Homo sapiens
ttgttcagaaccaca

SEQ ID NO: 298685 - DNA, 15 bp, Homo sapiens
tttgttcagaaccac

SEQ ID NO: 298686 - DNA, 15 bp, Homo sapiens
atttgttcagaacca

SEQ ID NO: 298687 - DNA, 15 bp, Homo sapiens
aatttgttcagaacc

SEQ ID NO: 298688 - DNA, 15 bp, Homo sapiens
taatttgttcagaac

SEQ ID NO: 298689 - DNA, 15 bp, Homo sapiens
ataatttgttcagaa

SEQ ID NO: 298690 - DNA, 15 bp, Homo sapiens
cataatttgttcaga

SEQ ID NO: 298691 - DNA, 15 bp, Homo sapiens
acataatttgttcag

SEQ ID NO: 298692 - DNA, 15 bp, Homo sapiens
gacataatttgttca

SEQ ID NO: 298693 - DNA, 15 bp, Homo sapiens
agacataatttgttc

SEQ ID NO: 298694 - DNA, 15 bp, Homo sapiens
gagacataatttgtt

SEQ ID NO: 298695 - DNA, 15 bp, Homo sapiens
agagacataatttgt

SEQ ID NO: 298696 - DNA, 15 bp, Homo sapiens
cagagacataatttg

SEQ ID NO: 298697 - DNA, 15 bp, Homo sapiens
acagagacataattt

SEQ ID NO: 298698 - DNA, 15 bp, Homo sapiens
tacagagacataatt

SEQ ID NO: 298699 - DNA, 15 bp, Homo sapiens
atacagagacataat

SEQ ID NO: 298700 - DNA, 15 bp, Homo sapiens
gatacagagacataa

SEQ ID NO: 298701 - DNA, 15 bp, Homo sapiens
agatacagagacata

SEQ ID NO: 298702 - DNA, 15 bp, Homo sapiens
gagatacagagacat

SEQ ID NO: 298703 - DNA, 15 bp, Homo sapiens
tgagatacagagaca

SEQ ID NO: 298704 - DNA, 15 bp, Homo sapiens
ctgagatacagagac

SEQ ID NO: 298705 - DNA, 15 bp, Homo sapiens
cctgagatacagaga

SEQ ID NO: 298706 - DNA, 15 bp, Homo sapiens
acctgagatacagag

SEQ ID NO: 298707 - DNA, 15 bp, Homo sapiens
aacctgagatacaga

SEQ ID NO: 298708 - DNA, 15 bp, Homo sapiens
aaacctgagatacag

SEQ ID NO: 298709 - DNA, 15 bp, Homo sapiens
gaaacctgagataca

SEQ ID NO: 298710 - DNA, 15 bp, Homo sapiens
ggaaacctgagatac

SEQ ID NO: 298711 - DNA, 15 bp, Homo sapiens
aggaaacctgagata

SEQ ID NO: 298712 - DNA, 15 bp, Homo sapiens
aaggaaacctgagat

SEQ ID NO: 298713 - DNA, 15 bp, Homo sapiens
caaggaaacctgaga

SEQ ID NO: 298714 - DNA, 15 bp, Homo sapiens
acaaggaaacctgag

SEQ ID NO: 298715 - DNA, 15 bp, Homo sapiens
tacaaggaaacctga

SEQ ID NO: 298716 - DNA, 15 bp, Homo sapiens
atacaaggaaacctg

SEQ ID NO: 298717 - DNA, 15 bp, Homo sapiens
catacaaggaaacct

SEQ ID NO: 298718 - DNA, 15 bp, Homo sapiens
acatacaaggaaacc

SEQ ID NO: 298719 - DNA, 15 bp, Homo sapiens
tacatacaaggaaac

SEQ ID NO: 298720 - DNA, 15 bp, Homo sapiens
ttacatacaaggaaa

SEQ ID NO: 298721 - DNA, 15 bp, Homo sapiens
tttacatacaaggaa

SEQ ID NO: 298722 - DNA, 15 bp, Homo sapiens
ttttacatacaagga

SEQ ID NO: 298723 - DNA, 15 bp, Homo sapiens
attttacatacaagg

SEQ ID NO: 298724 - DNA, 15 bp, Homo sapiens
tattttacatacaag

SEQ ID NO: 298725 - DNA, 15 bp, Homo sapiens
ctattttacatacaa

SEQ ID NO: 298726 - DNA, 15 bp, Homo sapiens
cctattttacataca

SEQ ID NO: 298727 - DNA, 15 bp, Homo sapiens
ccctattttacatac

SEQ ID NO: 298728 - DNA, 15 bp, Homo sapiens
tccctattttacata

SEQ ID NO: 298729 - DNA, 15 bp, Homo sapiens
atccctattttacat

SEQ ID NO: 298730 - DNA, 15 bp, Homo sapiens
tatccctattttaca

SEQ ID NO: 298731 - DNA, 15 bp, Homo sapiens
ttatccctattttac

SEQ ID NO: 298732 - DNA, 15 bp, Homo sapiens
gttatccctatttta

SEQ ID NO: 298733 - DNA, 15 bp, Homo sapiens
agttatccctatttt

SEQ ID NO: 298734 - DNA, 15 bp, Homo sapiens
aagttatccctattt

SEQ ID NO: 298735 - DNA, 15 bp, Homo sapiens
aaagttatccctatt

SEQ ID NO: 298736 - DNA, 15 bp, Homo sapiens
gaaagttatccctat

SEQ ID NO: 298737 - DNA, 15 bp, Homo sapiens
tgaaagttatcccta

SEQ ID NO: 298738 - DNA, 15 bp, Homo sapiens
ctgaaagttatccct

SEQ ID NO: 298739 - DNA, 15 bp, Homo sapiens
actgaaagttatccc

SEQ ID NO: 298740 - DNA, 15 bp, Homo sapiens
aactgaaagttatcc

SEQ ID NO: 298741 - DNA, 15 bp, Homo sapiens
caactgaaagttatc

SEQ ID NO: 298742 - DNA, 15 bp, Homo sapiens
acaactgaaagttat

SEQ ID NO: 298743 - DNA, 15 bp, Homo sapiens
aacaactgaaagtta

SEQ ID NO: 298744 - DNA, 15 bp, Homo sapiens
caacaactgaaagtt

SEQ ID NO: 298745 - DNA, 15 bp, Homo sapiens
acaacaactgaaagt

SEQ ID NO: 298746 - DNA, 15 bp, Homo sapiens
cacaacaactgaaag

SEQ ID NO: 298747 - DNA, 15 bp, Homo sapiens
tcacaacaactgaaa

SEQ ID NO: 298748 - DNA, 15 bp, Homo sapiens
ctcacaacaactgaa

SEQ ID NO: 298749 - DNA, 15 bp, Homo sapiens
cctcacaacaactga

SEQ ID NO: 298750 - DNA, 15 bp, Homo sapiens
tcctcacaacaactg

SEQ ID NO: 298751 - DNA, 15 bp, Homo sapiens
ttcctcacaacaact

SEQ ID NO: 298752 - DNA, 15 bp, Homo sapiens
attcctcacaacaac

SEQ ID NO: 298753 - DNA, 15 bp, Homo sapiens
tattcctcacaacaa

SEQ ID NO: 298754 - DNA, 15 bp, Homo sapiens
ttattcctcacaaca

SEQ ID NO: 298755 - DNA, 15 bp, Homo sapiens
tttattcctcacaac

SEQ ID NO: 298756 - DNA, 15 bp, Homo sapiens
atttattcctcacaa

SEQ ID NO: 298757 - DNA, 15 bp, Homo sapiens
catttattcctcaca

SEQ ID NO: 298758 - DNA, 15 bp, Homo sapiens
tcatttattcctcac

SEQ ID NO: 298759 - DNA, 15 bp, Homo sapiens
ctcatttattcctca

SEQ ID NO: 298760 - DNA, 15 bp, Homo sapiens
gctcatttattcctc

SEQ ID NO: 298761 - DNA, 15 bp, Homo sapiens
tgctcatttattcct

SEQ ID NO: 298762 - DNA, 15 bp, Homo sapiens
atgctcatttattcc

SEQ ID NO: 298763 - DNA, 15 bp, Homo sapiens
aatgctcatttattc

SEQ ID NO: 298764 - DNA, 15 bp, Homo sapiens
aaatgctcatttatt

SEQ ID NO: 298765 - DNA, 15 bp, Homo sapiens
taaatgctcatttat

SEQ ID NO: 298766 - DNA, 15 bp, Homo sapiens
ataaatgctcattta

SEQ ID NO: 298767 - DNA, 15 bp, Homo sapiens
cataaatgctcattt

SEQ ID NO: 298768 - DNA, 15 bp, Homo sapiens
tcataaatgctcatt

SEQ ID NO: 298769 - DNA, 15 bp, Homo sapiens
ctcataaatgctcat

SEQ ID NO: 298770 - DNA, 15 bp, Homo sapiens
tctcataaatgctca

SEQ ID NO: 298771 - DNA, 15 bp, Homo sapiens
ttctcataaatgctc

SEQ ID NO: 298772 - DNA, 15 bp, Homo sapiens
attctcataaatgct

SEQ ID NO: 298773 - DNA, 15 bp, Homo sapiens
tattctcataaatgc

SEQ ID NO: 298774 - DNA, 15 bp, Homo sapiens
ctattctcataaatg

SEQ ID NO: 298775 - DNA, 15 bp, Homo sapiens
actattctcataaat

SEQ ID NO: 298776 - DNA, 15 bp, Homo sapiens
tactattctcataaa

SEQ ID NO: 298777 - DNA, 15 bp, Homo sapiens
ttactattctcataa

SEQ ID NO: 298778 - DNA, 15 bp, Homo sapiens
attactattctcata

SEQ ID NO: 298779 - DNA, 15 bp, Homo sapiens
aattactattctcat

SEQ ID NO: 298780 - DNA, 15 bp, Homo sapiens
taattactattctca

SEQ ID NO: 298781 - DNA, 15 bp, Homo sapiens
ctaattactattctc

SEQ ID NO: 298782 - DNA, 15 bp, Homo sapiens
tctaattactattct

SEQ ID NO: 298783 - DNA, 15 bp, Homo sapiens
ttctaattactattc

SEQ ID NO: 298784 - DNA, 15 bp, Homo sapiens
tttctaattactatt

SEQ ID NO: 298785 - DNA, 15 bp, Homo sapiens
gtttctaattactat

SEQ ID NO: 298786 - DNA, 15 bp, Homo sapiens
tgtttctaattacta

SEQ ID NO: 298787 - DNA, 15 bp, Homo sapiens
atgtttctaattact

SEQ ID NO: 298788 - DNA, 15 bp, Homo sapiens
tatgtttctaattac

SEQ ID NO: 298789 - DNA, 15 bp, Homo sapiens
ttatgtttctaatta

SEQ ID NO: 298790 - DNA, 15 bp, Homo sapiens
gttatgtttctaatt

SEQ ID NO: 298791 - DNA, 15 bp, Homo sapiens
tgttatgtttctaat

SEQ ID NO: 298792 - DNA, 15 bp, Homo sapiens
ttgttatgtttctaa

SEQ ID NO: 298793 - DNA, 15 bp, Homo sapiens
attgttatgtttcta

SEQ ID NO: 298794 - DNA, 15 bp, Homo sapiens
aattgttatgtttct

SEQ ID NO: 298795 - DNA, 15 bp, Homo sapiens
taattgttatgtttc

SEQ ID NO: 298796 - DNA, 15 bp, Homo sapiens
ttaattgttatgttt

SEQ ID NO: 298797 - DNA, 15 bp, Homo sapiens
attaattgttatgtt

SEQ ID NO: 298798 - DNA, 15 bp, Homo sapiens
aattaattgttatgt

SEQ ID NO: 298799 - DNA, 15 bp, Homo sapiens
caattaattgttatg

SEQ ID NO: 298800 - DNA, 15 bp, Homo sapiens
acaattaattgttat

SEQ ID NO: 298801 - DNA, 15 bp, Homo sapiens
aacaattaattgtta

SEQ ID NO: 298802 - DNA, 15 bp, Homo sapiens
taacaattaattgtt

SEQ ID NO: 298803 - DNA, 15 bp, Homo sapiens
ctaacaattaattgt

SEQ ID NO: 298804 - DNA, 15 bp, Homo sapiens
actaacaattaattg

SEQ ID NO: 298805 - DNA, 15 bp, Homo sapiens
tactaacaattaatt

SEQ ID NO: 298806 - DNA, 15 bp, Homo sapiens
gtactaacaattaat

SEQ ID NO: 298807 - DNA, 15 bp, Homo sapiens
ggtactaacaattaa

SEQ ID NO: 298808 - DNA, 15 bp, Homo sapiens
gggtactaacaatta

SEQ ID NO: 298809 - DNA, 15 bp, Homo sapiens
agggtactaacaatt

SEQ ID NO: 298810 - DNA, 15 bp, Homo sapiens
aagggtactaacaat

SEQ ID NO: 298811 - DNA, 15 bp, Homo sapiens
gaagggtactaacaa

SEQ ID NO: 298812 - DNA, 15 bp, Homo sapiens
tgaagggtactaaca

SEQ ID NO: 298813 - DNA, 15 bp, Homo sapiens
atgaagggtactaac

SEQ ID NO: 298814 - DNA, 15 bp, Homo sapiens
aatgaagggtactaa

SEQ ID NO: 298815 - DNA, 15 bp, Homo sapiens
gaatgaagggtacta

SEQ ID NO: 298816 - DNA, 15 bp, Homo sapiens
ggaatgaagggtact

SEQ ID NO: 298817 - DNA, 15 bp, Homo sapiens
aggaatgaagggtac

SEQ ID NO: 298818 - DNA, 15 bp, Homo sapiens
aaggaatgaagggta

SEQ ID NO: 298819 - DNA, 15 bp, Homo sapiens
aaaggaatgaagggt

SEQ ID NO: 298820 - DNA, 15 bp, Homo sapiens
aaaaggaatgaaggg

SEQ ID NO: 298821 - DNA, 15 bp, Homo sapiens
gaaaaggaatgaagg

SEQ ID NO: 298822 - DNA, 15 bp, Homo sapiens
ggaaaaggaatgaag

SEQ ID NO: 298823 - DNA, 15 bp, Homo sapiens
aggaaaaggaatgaa

SEQ ID NO: 298824 - DNA, 15 bp, Homo sapiens
gaggaaaaggaatga

SEQ ID NO: 298825 - DNA, 15 bp, Homo sapiens
agaggaaaaggaatg

SEQ ID NO: 298826 - DNA, 15 bp, Homo sapiens
cagaggaaaaggaat

SEQ ID NO: 298827 - DNA, 15 bp, Homo sapiens
gcagaggaaaaggaa

SEQ ID NO: 298828 - DNA, 15 bp, Homo sapiens
agcagaggaaaagga

SEQ ID NO: 298829 - DNA, 15 bp, Homo sapiens
tagcagaggaaaagg

SEQ ID NO: 298830 - DNA, 15 bp, Homo sapiens
atagcagaggaaaag

SEQ ID NO: 298831 - DNA, 15 bp, Homo sapiens
tatagcagaggaaaa

SEQ ID NO: 298832 - DNA, 15 bp, Homo sapiens
gtatagcagaggaaa

SEQ ID NO: 298833 - DNA, 15 bp, Homo sapiens
tgtatagcagaggaa

SEQ ID NO: 298834 - DNA, 15 bp, Homo sapiens
ctgtatagcagagga

SEQ ID NO: 298835 - DNA, 15 bp, Homo sapiens
actgtatagcagagg

SEQ ID NO: 298836 - DNA, 15 bp, Homo sapiens
cactgtatagcagag

SEQ ID NO: 298837 - DNA, 15 bp, Homo sapiens
tcactgtatagcaga

SEQ ID NO: 298838 - DNA, 15 bp, Homo sapiens
atcactgtatagcag

SEQ ID NO: 298839 - DNA, 15 bp, Homo sapiens
aatcactgtatagca

SEQ ID NO: 298840 - DNA, 15 bp, Homo sapiens
aaatcactgtatagc

SEQ ID NO: 298841 - DNA, 15 bp, Homo sapiens
gaaatcactgtatag

SEQ ID NO: 298842 - DNA, 15 bp, Homo sapiens
tgaaatcactgtata

SEQ ID NO: 298843 - DNA, 15 bp, Homo sapiens
atgaaatcactgtat

SEQ ID NO: 298844 - DNA, 15 bp, Homo sapiens
tatgaaatcactgta

SEQ ID NO: 298845 - DNA, 15 bp, Homo sapiens
ttatgaaatcactgt

SEQ ID NO: 298846 - DNA, 15 bp, Homo sapiens
cttatgaaatcactg

SEQ ID NO: 298847 - DNA, 15 bp, Homo sapiens
tcttatgaaatcact

SEQ ID NO: 298848 - DNA, 15 bp, Homo sapiens
ttcttatgaaatcac

SEQ ID NO: 298849 - DNA, 15 bp, Homo sapiens
gttcttatgaaatca

SEQ ID NO: 298850 - DNA, 15 bp, Homo sapiens
tgttcttatgaaatc

SEQ ID NO: 298851 - DNA, 15 bp, Homo sapiens
ctgttcttatgaaat

SEQ ID NO: 298852 - DNA, 15 bp, Homo sapiens
tctgttcttatgaaa

SEQ ID NO: 298853 - DNA, 15 bp, Homo sapiens
ctctgttcttatgaa

SEQ ID NO: 298854 - DNA, 15 bp, Homo sapiens
tctctgttcttatga

SEQ ID NO: 298855 - DNA, 15 bp, Homo sapiens
ttctctgttcttatg

SEQ ID NO: 298856 - DNA, 15 bp, Homo sapiens
gttctctgttcttat

SEQ ID NO: 298857 - DNA, 15 bp, Homo sapiens
ggttctctgttctta

SEQ ID NO: 298858 - DNA, 15 bp, Homo sapiens
cggttctctgttctt

SEQ ID NO: 298859 - DNA, 15 bp, Homo sapiens
tcggttctctgttct

SEQ ID NO: 298860 - DNA, 15 bp, Homo sapiens
ctcggttctctgttc

SEQ ID NO: 298861 - DNA, 15 bp, Homo sapiens
cctcggttctctgtt

SEQ ID NO: 298862 - DNA, 15 bp, Homo sapiens
tcctcggttctctgt

SEQ ID NO: 298863 - DNA, 15 bp, Homo sapiens
atcctcggttctctg

SEQ ID NO: 298864 - DNA, 15 bp, Homo sapiens
aatcctcggttctct

SEQ ID NO: 298865 - DNA, 15 bp, Homo sapiens
gaatcctcggttctc

SEQ ID NO: 298866 - DNA, 15 bp, Homo sapiens
tgaatcctcggttct

SEQ ID NO: 298867 - DNA, 15 bp, Homo sapiens
ctgaatcctcggttc

SEQ ID NO: 298868 - DNA, 15 bp, Homo sapiens
actgaatcctcggtt

SEQ ID NO: 298869 - DNA, 15 bp, Homo sapiens
aactgaatcctcggt

SEQ ID NO: 298870 - DNA, 15 bp, Homo sapiens
taactgaatcctcgg

SEQ ID NO: 298871 - DNA, 15 bp, Homo sapiens
gtaactgaatcctcg

SEQ ID NO: 298872 - DNA, 15 bp, Homo sapiens
tgtaactgaatcctc

SEQ ID NO: 298873 - DNA, 15 bp, Homo sapiens
gtgtaactgaatcct

SEQ ID NO: 298874 - DNA, 15 bp, Homo sapiens
tgtgtaactgaatcc

SEQ ID NO: 298875 - DNA, 15 bp, Homo sapiens
ctgtgtaactgaatc

SEQ ID NO: 298876 - DNA, 15 bp, Homo sapiens
actgtgtaactgaat

SEQ ID NO: 298877 - DNA, 15 bp, Homo sapiens
tactgtgtaactgaa

SEQ ID NO: 298878 - DNA, 15 bp, Homo sapiens
atactgtgtaactga

SEQ ID NO: 298879 - DNA, 15 bp, Homo sapiens
aatactgtgtaactg

SEQ ID NO: 298880 - DNA, 15 bp, Homo sapiens
taatactgtgtaact

SEQ ID NO: 298881 - DNA, 15 bp, Homo sapiens
ttaatactgtgtaac

SEQ ID NO: 298882 - DNA, 15 bp, Homo sapiens
gttaatactgtgtaa

SEQ ID NO: 298883 - DNA, 15 bp, Homo sapiens
ggttaatactgtgta

SEQ ID NO: 298884 - DNA, 15 bp, Homo sapiens
aggttaatactgtgt

SEQ ID NO: 298885 - DNA, 15 bp, Homo sapiens
caggttaatactgtg

SEQ ID NO: 298886 - DNA, 15 bp, Homo sapiens
acaggttaatactgt

SEQ ID NO: 298887 - DNA, 15 bp, Homo sapiens
aacaggttaatactg

SEQ ID NO: 298888 - DNA, 15 bp, Homo sapiens
aaacaggttaatact

SEQ ID NO: 298889 - DNA, 15 bp, Homo sapiens
taaacaggttaatac

SEQ ID NO: 298890 - DNA, 15 bp, Homo sapiens
ataaacaggttaata

SEQ ID NO: 298891 - DNA, 15 bp, Homo sapiens
gataaacaggttaat

SEQ ID NO: 298892 - DNA, 15 bp, Homo sapiens
agataaacaggttaa

SEQ ID NO: 298893 - DNA, 15 bp, Homo sapiens
aagataaacaggtta

SEQ ID NO: 298894 - DNA, 15 bp, Homo sapiens
caagataaacaggtt

SEQ ID NO: 298895 - DNA, 15 bp, Homo sapiens
ccaagataaacaggt

SEQ ID NO: 298896 - DNA, 15 bp, Homo sapiens
gccaagataaacagg

SEQ ID NO: 298897 - DNA, 15 bp, Homo sapiens
agccaagataaacag

SEQ ID NO: 298898 - DNA, 15 bp, Homo sapiens
aagccaagataaaca

SEQ ID NO: 298899 - DNA, 15 bp, Homo sapiens
taagccaagataaac

SEQ ID NO: 298900 - DNA, 15 bp, Homo sapiens
gtaagccaagataaa

SEQ ID NO: 298901 - DNA, 15 bp, Homo sapiens
agtaagccaagataa

SEQ ID NO: 298902 - DNA, 15 bp, Homo sapiens
tagtaagccaagata

SEQ ID NO: 298903 - DNA, 15 bp, Homo sapiens
atagtaagccaagat

SEQ ID NO: 298904 - DNA, 15 bp, Homo sapiens
tatagtaagccaaga

SEQ ID NO: 298905 - DNA, 15 bp, Homo sapiens
ttatagtaagccaag

SEQ ID NO: 298906 - DNA, 15 bp, Homo sapiens
cttatagtaagccaa

SEQ ID NO: 298907 - DNA, 15 bp, Homo sapiens
acttatagtaagcca

SEQ ID NO: 298908 - DNA, 15 bp, Homo sapiens
tacttatagtaagcc

SEQ ID NO: 298909 - DNA, 15 bp, Homo sapiens
gtacttatagtaagc

SEQ ID NO: 298910 - DNA, 15 bp, Homo sapiens
tgtacttatagtaag

SEQ ID NO: 298911 - DNA, 15 bp, Homo sapiens
ctgtacttatagtaa

SEQ ID NO: 298912 - DNA, 15 bp, Homo sapiens
tctgtacttatagta

SEQ ID NO: 298913 - DNA, 15 bp, Homo sapiens
ctctgtacttatagt

SEQ ID NO: 298914 - DNA, 15 bp, Homo sapiens
tctctgtacttatag

SEQ ID NO: 298915 - DNA, 15 bp, Homo sapiens
ttctctgtacttata

SEQ ID NO: 298916 - DNA, 15 bp, Homo sapiens
attctctgtacttat

SEQ ID NO: 298917 - DNA, 15 bp, Homo sapiens
aattctctgtactta

SEQ ID NO: 298918 - DNA, 15 bp, Homo sapiens
aaattctctgtactt

SEQ ID NO: 298919 - DNA, 15 bp, Homo sapiens
aaaattctctgtact

SEQ ID NO: 298920 - DNA, 15 bp, Homo sapiens
aaaaattctctgtac

SEQ ID NO: 298921 - DNA, 15 bp, Homo sapiens
gaaaaattctctgta

SEQ ID NO: 298922 - DNA, 15 bp, Homo sapiens
agaaaaattctctgt

SEQ ID NO: 298923 - DNA, 15 bp, Homo sapiens
gagaaaaattctctg

SEQ ID NO: 298924 - DNA, 15 bp, Homo sapiens
agagaaaaattctct

SEQ ID NO: 298925 - DNA, 15 bp, Homo sapiens
aagagaaaaattctc

SEQ ID NO: 298926 - DNA, 15 bp, Homo sapiens
gaagagaaaaattct

SEQ ID NO: 298927 - DNA, 15 bp, Homo sapiens
agaagagaaaaattc

SEQ ID NO: 298928 - DNA, 15 bp, Homo sapiens
gagaagagaaaaatt

SEQ ID NO: 298929 - DNA, 15 bp, Homo sapiens
agagaagagaaaaat

SEQ ID NO: 298930 - DNA, 15 bp, Homo sapiens
aagagaagagaaaaa

SEQ ID NO: 298931 - DNA, 15 bp, Homo sapiens
caagagaagagaaaa

SEQ ID NO: 298932 - DNA, 15 bp, Homo sapiens
tcaagagaagagaaa

SEQ ID NO: 298933 - DNA, 15 bp, Homo sapiens
ctcaagagaagagaa

SEQ ID NO: 298934 - DNA, 15 bp, Homo sapiens
cctcaagagaagaga

SEQ ID NO: 298935 - DNA, 15 bp, Homo sapiens
gcctcaagagaagag

SEQ ID NO: 298936 - DNA, 15 bp, Homo sapiens
tgcctcaagagaaga

SEQ ID NO: 298937 - DNA, 15 bp, Homo sapiens
gtgcctcaagagaag

SEQ ID NO: 298938 - DNA, 15 bp, Homo sapiens
ggtgcctcaagagaa

SEQ ID NO: 298939 - DNA, 15 bp, Homo sapiens
gggtgcctcaagaga

SEQ ID NO: 298940 - DNA, 15 bp, Homo sapiens
ggggtgcctcaagag

SEQ ID NO: 298941 - DNA, 15 bp, Homo sapiens
aggggtgcctcaaga

SEQ ID NO: 298942 - DNA, 15 bp, Homo sapiens
gaggggtgcctcaag

SEQ ID NO: 298943 - DNA, 15 bp, Homo sapiens
ggaggggtgcctcaa

SEQ ID NO: 298944 - DNA, 15 bp, Homo sapiens
aggaggggtgcctca

SEQ ID NO: 298945 - DNA, 15 bp, Homo sapiens
gaggaggggtgcctc

SEQ ID NO: 298946 - DNA, 15 bp, Homo sapiens
ggaggaggggtgcct

SEQ ID NO: 298947 - DNA, 15 bp, Homo sapiens
gggaggaggggtgcc

SEQ ID NO: 298948 - DNA, 15 bp, Homo sapiens
ggggaggaggggtgc

SEQ ID NO: 298949 - DNA, 15 bp, Homo sapiens
gggggaggaggggtg

SEQ ID NO: 298950 - DNA, 15 bp, Homo sapiens
tgggggaggaggggt

SEQ ID NO: 298951 - DNA, 15 bp, Homo sapiens
atgggggaggagggg

SEQ ID NO: 298952 - DNA, 15 bp, Homo sapiens
gatgggggaggaggg

SEQ ID NO: 298953 - DNA, 15 bp, Homo sapiens
tgatgggggaggagg

SEQ ID NO: 298954 - DNA, 15 bp, Homo sapiens
gtgatgggggaggag

SEQ ID NO: 298955 - DNA, 15 bp, Homo sapiens
ggtgatgggggagga

SEQ ID NO: 298956 - DNA, 15 bp, Homo sapiens
aggtgatgggggagg

SEQ ID NO: 298957 - DNA, 15 bp, Homo sapiens
aaggtgatgggggag

SEQ ID NO: 298958 - DNA, 15 bp, Homo sapiens
gaaggtgatggggga

SEQ ID NO: 298959 - DNA, 15 bp, Homo sapiens
agaaggtgatggggg

SEQ ID NO: 298960 - DNA, 15 bp, Homo sapiens
gagaaggtgatgggg

SEQ ID NO: 298961 - DNA, 15 bp, Homo sapiens
tgagaaggtgatggg

SEQ ID NO: 298962 - DNA, 15 bp, Homo sapiens
ttgagaaggtgatgg

SEQ ID NO: 298963 - DNA, 15 bp, Homo sapiens
tttgagaaggtgatg

SEQ ID NO: 298964 - DNA, 15 bp, Homo sapiens
ttttgagaaggtgat

SEQ ID NO: 298965 - DNA, 15 bp, Homo sapiens
attttgagaaggtga

SEQ ID NO: 298966 - DNA, 15 bp, Homo sapiens
cattttgagaaggtg

SEQ ID NO: 298967 - DNA, 15 bp, Homo sapiens
ccattttgagaaggt

SEQ ID NO: 298968 - DNA, 15 bp, Homo sapiens
tccattttgagaagg

SEQ ID NO: 298969 - DNA, 15 bp, Homo sapiens
ttccattttgagaag

SEQ ID NO: 298970 - DNA, 15 bp, Homo sapiens
tttccattttgagaa

SEQ ID NO: 298971 - DNA, 15 bp, Homo sapiens
ttttccattttgaga

SEQ ID NO: 298972 - DNA, 15 bp, Homo sapiens
tttttccattttgag

SEQ ID NO: 298973 - DNA, 15 bp, Homo sapiens
ctttttccattttga

SEQ ID NO: 298974 - DNA, 15 bp, Homo sapiens
actttttccattttg

SEQ ID NO: 298975 - DNA, 15 bp, Homo sapiens
aactttttccatttt

SEQ ID NO: 298976 - DNA, 15 bp, Homo sapiens
gaactttttccattt

SEQ ID NO: 298977 - DNA, 15 bp, Homo sapiens
tgaactttttccatt

SEQ ID NO: 298978 - DNA, 15 bp, Homo sapiens
ctgaactttttccat

SEQ ID NO: 298979 - DNA, 15 bp, Homo sapiens
cctgaactttttcca

SEQ ID NO: 298980 - DNA, 15 bp, Homo sapiens
ccctgaactttttcc

SEQ ID NO: 298981 - DNA, 15 bp, Homo sapiens
cccctgaactttttc

SEQ ID NO: 298982 - DNA, 15 bp, Homo sapiens
ccccctgaacttttt

SEQ ID NO: 298983 - DNA, 15 bp, Homo sapiens
tccccctgaactttt

SEQ ID NO: 298984 - DNA, 15 bp, Homo sapiens
ttccccctgaacttt

SEQ ID NO: 298985 - DNA, 15 bp, Homo sapiens
tttccccctgaactt

SEQ ID NO: 298986 - DNA, 15 bp, Homo sapiens
ttttccccctgaact

SEQ ID NO: 298987 - DNA, 15 bp, Homo sapiens
cttttccccctgaac

SEQ ID NO: 298988 - DNA, 15 bp, Homo sapiens
ccttttccccctgaa

SEQ ID NO: 298989 - DNA, 15 bp, Homo sapiens
gccttttccccctga

SEQ ID NO: 298990 - DNA, 15 bp, Homo sapiens
tgccttttccccctg

SEQ ID NO: 298991 - DNA, 15 bp, Homo sapiens
atgccttttccccct

SEQ ID NO: 298992 - DNA, 15 bp, Homo sapiens
gatgccttttccccc

SEQ ID NO: 298993 - DNA, 15 bp, Homo sapiens
tgatgccttttcccc

SEQ ID NO: 298994 - DNA, 15 bp, Homo sapiens
atgatgccttttccc

SEQ ID NO: 298995 - DNA, 15 bp, Homo sapiens
catgatgccttttcc

SEQ ID NO: 298996 - DNA, 15 bp, Homo sapiens
ccatgatgccttttc

SEQ ID NO: 298997 - DNA, 15 bp, Homo sapiens
cccatgatgcctttt

SEQ ID NO: 298998 - DNA, 15 bp, Homo sapiens
tcccatgatgccttt

SEQ ID NO: 298999 - DNA, 15 bp, Homo sapiens
gtcccatgatgcctt

SEQ ID NO: 299000 - DNA, 15 bp, Homo sapiens
agtcccatgatgcct

SEQ ID NO: 299001 - DNA, 15 bp, Homo sapiens
gagtcccatgatgcc

SEQ ID NO: 299002 - DNA, 15 bp, Homo sapiens
ggagtcccatgatgc

SEQ ID NO: 299003 - DNA, 15 bp, Homo sapiens
tggagtcccatgatg

SEQ ID NO: 299004 - DNA, 15 bp, Homo sapiens
ctggagtcccatgat

SEQ ID NO: 299005 - DNA, 15 bp, Homo sapiens
gctggagtcccatga

SEQ ID NO: 299006 - DNA, 15 bp, Homo sapiens
tgctggagtcccatg

SEQ ID NO: 299007 - DNA, 15 bp, Homo sapiens
atgctggagtcccat

SEQ ID NO: 299008 - DNA, 15 bp, Homo sapiens
aatgctggagtccca

SEQ ID NO: 299009 - DNA, 15 bp, Homo sapiens
caatgctggagtccc

SEQ ID NO: 299010 - DNA, 15 bp, Homo sapiens
acaatgctggagtcc

SEQ ID NO: 299011 - DNA, 15 bp, Homo sapiens
aacaatgctggagtc

SEQ ID NO: 299012 - DNA, 15 bp, Homo sapiens
taacaatgctggagt

SEQ ID NO: 299013 - DNA, 15 bp, Homo sapiens
ttaacaatgctggag

SEQ ID NO: 299014 - DNA, 15 bp, Homo sapiens
cttaacaatgctgga

SEQ ID NO: 299015 - DNA, 15 bp, Homo sapiens
acttaacaatgctgg

SEQ ID NO: 299016 - DNA, 15 bp, Homo sapiens
tacttaacaatgctg

SEQ ID NO: 299017 - DNA, 15 bp, Homo sapiens
atacttaacaatgct

SEQ ID NO: 299018 - DNA, 15 bp, Homo sapiens
catacttaacaatgc

SEQ ID NO: 299019 - DNA, 15 bp, Homo sapiens
ccatacttaacaatg

SEQ ID NO: 299020 - DNA, 15 bp, Homo sapiens
cccatacttaacaat

SEQ ID NO: 299021 - DNA, 15 bp, Homo sapiens
gcccatacttaacaa

SEQ ID NO: 299022 - DNA, 15 bp, Homo sapiens
tgcccatacttaaca

SEQ ID NO: 299023 - DNA, 15 bp, Homo sapiens
ctgcccatacttaac

SEQ ID NO: 299024 - DNA, 15 bp, Homo sapiens
actgcccatacttaa

SEQ ID NO: 299025 - DNA, 15 bp, Homo sapiens
cactgcccatactta

SEQ ID NO: 299026 - DNA, 15 bp, Homo sapiens
acactgcccatactt

SEQ ID NO: 299027 - DNA, 15 bp, Homo sapiens
aacactgcccatact

SEQ ID NO: 299028 - DNA, 15 bp, Homo sapiens
gaacactgcccatac

SEQ ID NO: 299029 - DNA, 15 bp, Homo sapiens
tgaacactgcccata

SEQ ID NO: 299030 - DNA, 15 bp, Homo sapiens
gtgaacactgcccat

SEQ ID NO: 299031 - DNA, 15 bp, Homo sapiens
agtgaacactgccca

SEQ ID NO: 299032 - DNA, 15 bp, Homo sapiens
cagtgaacactgccc

SEQ ID NO: 299033 - DNA, 15 bp, Homo sapiens
acagtgaacactgcc

SEQ ID NO: 299034 - DNA, 15 bp, Homo sapiens
aacagtgaacactgc

SEQ ID NO: 299035 - DNA, 15 bp, Homo sapiens
taacagtgaacactg

SEQ ID NO: 299036 - DNA, 15 bp, Homo sapiens
ataacagtgaacact

SEQ ID NO: 299037 - DNA, 15 bp, Homo sapiens
tataacagtgaacac

SEQ ID NO: 299038 - DNA, 15 bp, Homo sapiens
atataacagtgaaca

SEQ ID NO: 299039 - DNA, 15 bp, Homo sapiens
aatataacagtgaac

SEQ ID NO: 299040 - DNA, 15 bp, Homo sapiens
taatataacagtgaa

SEQ ID NO: 299041 - DNA, 15 bp, Homo sapiens
gtaatataacagtga

SEQ ID NO: 299042 - DNA, 15 bp, Homo sapiens
tgtaatataacagtg

SEQ ID NO: 299043 - DNA, 15 bp, Homo sapiens
ctgtaatataacagt

SEQ ID NO: 299044 - DNA, 15 bp, Homo sapiens
actgtaatataacag

SEQ ID NO: 299045 - DNA, 15 bp, Homo sapiens
aactgtaatataaca

SEQ ID NO: 299046 - DNA, 15 bp, Homo sapiens
caactgtaatataac

SEQ ID NO: 299047 - DNA, 15 bp, Homo sapiens
ccaactgtaatataa

SEQ ID NO: 299048 - DNA, 15 bp, Homo sapiens
tccaactgtaatata

SEQ ID NO: 299049 - DNA, 15 bp, Homo sapiens
ttccaactgtaatat

SEQ ID NO: 299050 - DNA, 15 bp, Homo sapiens
attccaactgtaata

SEQ ID NO: 299051 - DNA, 15 bp, Homo sapiens
aattccaactgtaat

SEQ ID NO: 299052 - DNA, 15 bp, Homo sapiens
aaattccaactgtaa

SEQ ID NO: 299053 - DNA, 15 bp, Homo sapiens
caaattccaactgta

SEQ ID NO: 299054 - DNA, 15 bp, Homo sapiens
acaaattccaactgt

SEQ ID NO: 299055 - DNA, 15 bp, Homo sapiens
aacaaattccaactg

SEQ ID NO: 299056 - DNA, 15 bp, Homo sapiens
taacaaattccaact

SEQ ID NO: 299057 - DNA, 15 bp, Homo sapiens
ataacaaattccaac

SEQ ID NO: 299058 - DNA, 15 bp, Homo sapiens
cataacaaattccaa

SEQ ID NO: 299059 - DNA, 15 bp, Homo sapiens
acataacaaattcca

SEQ ID NO: 299060 - DNA, 15 bp, Homo sapiens
aacataacaaattcc

SEQ ID NO: 299061 - DNA, 15 bp, Homo sapiens
caacataacaaattc

SEQ ID NO: 299062 - DNA, 15 bp, Homo sapiens
gcaacataacaaatt

SEQ ID NO: 299063 - DNA, 15 bp, Homo sapiens
agcaacataacaaat

SEQ ID NO: 299064 - DNA, 15 bp, Homo sapiens
aagcaacataacaaa

SEQ ID NO: 299065 - DNA, 15 bp, Homo sapiens
aaagcaacataacaa

SEQ ID NO: 299066 - DNA, 15 bp, Homo sapiens
taaagcaacataaca

SEQ ID NO: 299067 - DNA, 15 bp, Homo sapiens
ctaaagcaacataac

SEQ ID NO: 299068 - DNA, 15 bp, Homo sapiens
actaaagcaacataa

SEQ ID NO: 299069 - DNA, 15 bp, Homo sapiens
aactaaagcaacata

SEQ ID NO: 299070 - DNA, 15 bp, Homo sapiens
taactaaagcaacat

SEQ ID NO: 299071 - DNA, 15 bp, Homo sapiens
ataactaaagcaaca

SEQ ID NO: 299072 - DNA, 15 bp, Homo sapiens
cataactaaagcaac

SEQ ID NO: 299073 - DNA, 15 bp, Homo sapiens
tcataactaaagcaa

SEQ ID NO: 299074 - DNA, 15 bp, Homo sapiens
ttcataactaaagca

SEQ ID NO: 299075 - DNA, 15 bp, Homo sapiens
attcataactaaagc

SEQ ID NO: 299076 - DNA, 15 bp, Homo sapiens
gattcataactaaag

SEQ ID NO: 299077 - DNA, 15 bp, Homo sapiens
tgattcataactaaa

SEQ ID NO: 299078 - DNA, 15 bp, Homo sapiens
atgattcataactaa

SEQ ID NO: 299079 - DNA, 15 bp, Homo sapiens
catgattcataacta

SEQ ID NO: 299080 - DNA, 15 bp, Homo sapiens
acatgattcataact

SEQ ID NO: 299081 - DNA, 15 bp, Homo sapiens
gacatgattcataac

SEQ ID NO: 299082 - DNA, 15 bp, Homo sapiens
tgacatgattcataa

SEQ ID NO: 299083 - DNA, 15 bp, Homo sapiens
ctgacatgattcata

SEQ ID NO: 299084 - DNA, 15 bp, Homo sapiens
actgacatgattcat

SEQ ID NO: 299085 - DNA, 15 bp, Homo sapiens
tactgacatgattca

SEQ ID NO: 299086 - DNA, 15 bp, Homo sapiens
ttactgacatgattc

SEQ ID NO: 299087 - DNA, 15 bp, Homo sapiens
attactgacatgatt

SEQ ID NO: 299088 - DNA, 15 bp, Homo sapiens
aattactgacatgat

SEQ ID NO: 299089 - DNA, 15 bp, Homo sapiens
taattactgacatga

SEQ ID NO: 299090 - DNA, 15 bp, Homo sapiens
gtaattactgacatg

SEQ ID NO: 299091 - DNA, 15 bp, Homo sapiens
ggtaattactgacat

SEQ ID NO: 299092 - DNA, 15 bp, Homo sapiens
gggtaattactgaca

SEQ ID NO: 299093 - DNA, 15 bp, Homo sapiens
agggtaattactgac

SEQ ID NO: 299094 - DNA, 15 bp, Homo sapiens
cagggtaattactga

SEQ ID NO: 299095 - DNA, 15 bp, Homo sapiens
tcagggtaattactg

SEQ ID NO: 299096 - DNA, 15 bp, Homo sapiens
ctcagggtaattact

SEQ ID NO: 299097 - DNA, 15 bp, Homo sapiens
cctcagggtaattac

SEQ ID NO: 299098 - DNA, 15 bp, Homo sapiens
ccctcagggtaatta

SEQ ID NO: 299099 - DNA, 15 bp, Homo sapiens
accctcagggtaatt

SEQ ID NO: 299100 - DNA, 15 bp, Homo sapiens
caccctcagggtaat

SEQ ID NO: 299101 - DNA, 15 bp, Homo sapiens
ccaccctcagggtaa

SEQ ID NO: 299102 - DNA, 15 bp, Homo sapiens
accaccctcagggta

SEQ ID NO: 299103 - DNA, 15 bp, Homo sapiens
caccaccctcagggt

SEQ ID NO: 299104 - DNA, 15 bp, Homo sapiens
acaccaccctcaggg

SEQ ID NO: 299105 - DNA, 15 bp, Homo sapiens
aacaccaccctcagg

SEQ ID NO: 299106 - DNA, 15 bp, Homo sapiens
taacaccaccctcag

SEQ ID NO: 299107 - DNA, 15 bp, Homo sapiens
ctaacaccaccctca

SEQ ID NO: 299108 - DNA, 15 bp, Homo sapiens
actaacaccaccctc

SEQ ID NO: 299109 - DNA, 15 bp, Homo sapiens
aactaacaccaccct

SEQ ID NO: 299110 - DNA, 15 bp, Homo sapiens
gaactaacaccaccc

SEQ ID NO: 299111 - DNA, 15 bp, Homo sapiens
tgaactaacaccacc

SEQ ID NO: 299112 - DNA, 15 bp, Homo sapiens
gtgaactaacaccac

SEQ ID NO: 299113 - DNA, 15 bp, Homo sapiens
agtgaactaacacca

SEQ ID NO: 299114 - DNA, 15 bp, Homo sapiens
tagtgaactaacacc

SEQ ID NO: 299115 - DNA, 15 bp, Homo sapiens
atagtgaactaacac

SEQ ID NO: 299116 - DNA, 15 bp, Homo sapiens
aatagtgaactaaca

SEQ ID NO: 299117 - DNA, 15 bp, Homo sapiens
gaatagtgaactaac

SEQ ID NO: 299118 - DNA, 15 bp, Homo sapiens
tgaatagtgaactaa

SEQ ID NO: 299119 - DNA, 15 bp, Homo sapiens
ttgaatagtgaacta

SEQ ID NO: 299120 - DNA, 15 bp, Homo sapiens
cttgaatagtgaact

SEQ ID NO: 299121 - DNA, 15 bp, Homo sapiens
acttgaatagtgaac

SEQ ID NO: 299122 - DNA, 15 bp, Homo sapiens
tacttgaatagtgaa

SEQ ID NO: 299123 - DNA, 15 bp, Homo sapiens
gtacttgaatagtga

SEQ ID NO: 299124 - DNA, 15 bp, Homo sapiens
tgtacttgaatagtg

SEQ ID NO: 299125 - DNA, 15 bp, Homo sapiens
ttgtacttgaatagt

SEQ ID NO: 299126 - DNA, 15 bp, Homo sapiens
tttgtacttgaatag

SEQ ID NO: 299127 - DNA, 15 bp, Homo sapiens
gtttgtacttgaata

SEQ ID NO: 299128 - DNA, 15 bp, Homo sapiens
tgtttgtacttgaat

SEQ ID NO: 299129 - DNA, 15 bp, Homo sapiens
ttgtttgtacttgaa

SEQ ID NO: 299130 - DNA, 15 bp, Homo sapiens
cttgtttgtacttga

SEQ ID NO: 299131 - DNA, 15 bp, Homo sapiens
tcttgtttgtacttg

SEQ ID NO: 299132 - DNA, 15 bp, Homo sapiens
ttcttgtttgtactt

SEQ ID NO: 299133 - DNA, 15 bp, Homo sapiens
cttcttgtttgtact

SEQ ID NO: 299134 - DNA, 15 bp, Homo sapiens
ccttcttgtttgtac

SEQ ID NO: 299135 - DNA, 15 bp, Homo sapiens
cccttcttgtttgta

SEQ ID NO: 299136 - DNA, 15 bp, Homo sapiens
tcccttcttgtttgt

SEQ ID NO: 299137 - DNA, 15 bp, Homo sapiens
ttcccttcttgtttg

SEQ ID NO: 299138 - DNA, 15 bp, Homo sapiens
cttcccttcttgttt

SEQ ID NO: 299139 - DNA, 15 bp, Homo sapiens
acttcccttcttgtt

SEQ ID NO: 299140 - DNA, 15 bp, Homo sapiens
tacttcccttcttgt

SEQ ID NO: 299141 - DNA, 15 bp, Homo sapiens
ctacttcccttcttg

SEQ ID NO: 299142 - DNA, 15 bp, Homo sapiens
gctacttcccttctt

SEQ ID NO: 299143 - DNA, 15 bp, Homo sapiens
tgctacttcccttct

SEQ ID NO: 299144 - DNA, 15 bp, Homo sapiens
ttgctacttcccttc

SEQ ID NO: 299145 - DNA, 15 bp, Homo sapiens
attgctacttccctt

SEQ ID NO: 299146 - DNA, 15 bp, Homo sapiens
cattgctacttccct

SEQ ID NO: 299147 - DNA, 15 bp, Homo sapiens
ccattgctacttccc

SEQ ID NO: 299148 - DNA, 15 bp, Homo sapiens
accattgctacttcc

SEQ ID NO: 299149 - DNA, 15 bp, Homo sapiens
taccattgctacttc

SEQ ID NO: 299150 - DNA, 15 bp, Homo sapiens
ctaccattgctactt

SEQ ID NO: 299151 - DNA, 15 bp, Homo sapiens
tctaccattgctact

SEQ ID NO: 299152 - DNA, 15 bp, Homo sapiens
ttctaccattgctac

SEQ ID NO: 299153 - DNA, 15 bp, Homo sapiens
cttctaccattgcta

SEQ ID NO: 299154 - DNA, 15 bp, Homo sapiens
tcttctaccattgct

SEQ ID NO: 299155 - DNA, 15 bp, Homo sapiens
ttcttctaccattgc

SEQ ID NO: 299156 - DNA, 15 bp, Homo sapiens
attcttctaccattg

SEQ ID NO: 299157 - DNA, 15 bp, Homo sapiens
tattcttctaccatt

SEQ ID NO: 299158 - DNA, 15 bp, Homo sapiens
ctattcttctaccat

SEQ ID NO: 299159 - DNA, 15 bp, Homo sapiens
gctattcttctacca

SEQ ID NO: 299160 - DNA, 15 bp, Homo sapiens
agctattcttctacc

SEQ ID NO: 299161 - DNA, 15 bp, Homo sapiens
tagctattcttctac

SEQ ID NO: 299162 - DNA, 15 bp, Homo sapiens
ctagctattcttcta

SEQ ID NO: 299163 - DNA, 15 bp, Homo sapiens
cctagctattcttct

SEQ ID NO: 299164 - DNA, 15 bp, Homo sapiens
tcctagctattcttc

SEQ ID NO: 299165 - DNA, 15 bp, Homo sapiens
gtcctagctattctt

SEQ ID NO: 299166 - DNA, 15 bp, Homo sapiens
tgtcctagctattct

SEQ ID NO: 299167 - DNA, 15 bp, Homo sapiens
atgtcctagctattc

SEQ ID NO: 299168 - DNA, 15 bp, Homo sapiens
tatgtcctagctatt

SEQ ID NO: 299169 - DNA, 15 bp, Homo sapiens
gtatgtcctagctat

SEQ ID NO: 299170 - DNA, 15 bp, Homo sapiens
agtatgtcctagcta

SEQ ID NO: 299171 - DNA, 15 bp, Homo sapiens
gagtatgtcctagct

SEQ ID NO: 299172 - DNA, 15 bp, Homo sapiens
agagtatgtcctagc

SEQ ID NO: 299173 - DNA, 15 bp, Homo sapiens
gagagtatgtcctag

SEQ ID NO: 299174 - DNA, 15 bp, Homo sapiens
agagagtatgtccta

SEQ ID NO: 299175 - DNA, 15 bp, Homo sapiens
cagagagtatgtcct

SEQ ID NO: 299176 - DNA, 15 bp, Homo sapiens
acagagagtatgtcc

SEQ ID NO: 299177 - DNA, 15 bp, Homo sapiens
tacagagagtatgtc

SEQ ID NO: 299178 - DNA, 15 bp, Homo sapiens
gtacagagagtatgt

SEQ ID NO: 299179 - DNA, 15 bp, Homo sapiens
ggtacagagagtatg

SEQ ID NO: 299180 - DNA, 15 bp, Homo sapiens
aggtacagagagtat

SEQ ID NO: 299181 - DNA, 15 bp, Homo sapiens
taggtacagagagta

SEQ ID NO: 299182 - DNA, 15 bp, Homo sapiens
ttaggtacagagagt

SEQ ID NO: 299183 - DNA, 15 bp, Homo sapiens
gttaggtacagagag

SEQ ID NO: 299184 - DNA, 15 bp, Homo sapiens
ggttaggtacagaga

SEQ ID NO: 299185 - DNA, 15 bp, Homo sapiens
aggttaggtacagag

SEQ ID NO: 299186 - DNA, 15 bp, Homo sapiens
caggttaggtacaga

SEQ ID NO: 299187 - DNA, 15 bp, Homo sapiens
acaggttaggtacag

SEQ ID NO: 299188 - DNA, 15 bp, Homo sapiens
cacaggttaggtaca

SEQ ID NO: 299189 - DNA, 15 bp, Homo sapiens
ccacaggttaggtac

SEQ ID NO: 299190 - DNA, 15 bp, Homo sapiens
cccacaggttaggta

SEQ ID NO: 299191 - DNA, 15 bp, Homo sapiens
tcccacaggttaggt

SEQ ID NO: 299192 - DNA, 15 bp, Homo sapiens
atcccacaggttagg

SEQ ID NO: 299193 - DNA, 15 bp, Homo sapiens
catcccacaggttag

SEQ ID NO: 299194 - DNA, 15 bp, Homo sapiens
ccatcccacaggtta

SEQ ID NO: 299195 - DNA, 15 bp, Homo sapiens
tccatcccacaggtt

SEQ ID NO: 299196 - DNA, 15 bp, Homo sapiens
ttccatcccacaggt

SEQ ID NO: 299197 - DNA, 15 bp, Homo sapiens
cttccatcccacagg

SEQ ID NO: 299198 - DNA, 15 bp, Homo sapiens
gcttccatcccacag

SEQ ID NO: 299199 - DNA, 15 bp, Homo sapiens
tgcttccatcccaca

SEQ ID NO: 299200 - DNA, 15 bp, Homo sapiens
gtgcttccatcccac

SEQ ID NO: 299201 - DNA, 15 bp, Homo sapiens
tgtgcttccatccca

SEQ ID NO: 299202 - DNA, 15 bp, Homo sapiens
atgtgcttccatccc

SEQ ID NO: 299203 - DNA, 15 bp, Homo sapiens
tatgtgcttccatcc

SEQ ID NO: 299204 - DNA, 15 bp, Homo sapiens
atatgtgcttccatc

SEQ ID NO: 299205 - DNA, 15 bp, Homo sapiens
tatatgtgcttccat

SEQ ID NO: 299206 - DNA, 15 bp, Homo sapiens
gtatatgtgcttcca

SEQ ID NO: 299207 - DNA, 15 bp, Homo sapiens
agtatatgtgcttcc

SEQ ID NO: 299208 - DNA, 15 bp, Homo sapiens
gagtatatgtgcttc

SEQ ID NO: 299209 - DNA, 15 bp, Homo sapiens
agagtatatgtgctt

SEQ ID NO: 299210 - DNA, 15 bp, Homo sapiens
aagagtatatgtgct

SEQ ID NO: 299211 - DNA, 15 bp, Homo sapiens
taagagtatatgtgc

SEQ ID NO: 299212 - DNA, 15 bp, Homo sapiens
ataagagtatatgtg

SEQ ID NO: 299213 - DNA, 15 bp, Homo sapiens
aataagagtatatgt

SEQ ID NO: 299214 - DNA, 15 bp, Homo sapiens
gaataagagtatatg

SEQ ID NO: 299215 - DNA, 15 bp, Homo sapiens
tgaataagagtatat

SEQ ID NO: 299216 - DNA, 15 bp, Homo sapiens
ctgaataagagtata

SEQ ID NO: 299217 - DNA, 15 bp, Homo sapiens
tctgaataagagtat

SEQ ID NO: 299218 - DNA, 15 bp, Homo sapiens
ctctgaataagagta

SEQ ID NO: 299219 - DNA, 15 bp, Homo sapiens
tctctgaataagagt

SEQ ID NO: 299220 - DNA, 15 bp, Homo sapiens
ttctctgaataagag

SEQ ID NO: 299221 - DNA, 15 bp, Homo sapiens
attctctgaataaga

SEQ ID NO: 299222 - DNA, 15 bp, Homo sapiens
aattctctgaataag

SEQ ID NO: 299223 - DNA, 15 bp, Homo sapiens
aaattctctgaataa

SEQ ID NO: 299224 - DNA, 15 bp, Homo sapiens
aaaattctctgaata

SEQ ID NO: 299225 - DNA, 15 bp, Homo sapiens
taaaattctctgaat

SEQ ID NO: 299226 - DNA, 15 bp, Homo sapiens
ataaaattctctgaa

SEQ ID NO: 299227 - DNA, 15 bp, Homo sapiens
tataaaattctctga

SEQ ID NO: 299228 - DNA, 15 bp, Homo sapiens
ttataaaattctctg

SEQ ID NO: 299229 - DNA, 15 bp, Homo sapiens
tttataaaattctct

SEQ ID NO: 299230 - DNA, 15 bp, Homo sapiens
ctttataaaattctc

SEQ ID NO: 299231 - DNA, 15 bp, Homo sapiens
tctttataaaattct

SEQ ID NO: 299232 - DNA, 15 bp, Homo sapiens
ctctttataaaattc

SEQ ID NO: 299233 - DNA, 15 bp, Homo sapiens
actctttataaaatt

SEQ ID NO: 299234 - DNA, 15 bp, Homo sapiens
gactctttataaaat

SEQ ID NO: 299235 - DNA, 15 bp, Homo sapiens
tgactctttataaaa

SEQ ID NO: 299236 - DNA, 15 bp, Homo sapiens
atgactctttataaa

SEQ ID NO: 299237 - DNA, 15 bp, Homo sapiens
catgactctttataa

SEQ ID NO: 299238 - DNA, 15 bp, Homo sapiens
tcatgactctttata

SEQ ID NO: 299239 - DNA, 15 bp, Homo sapiens
atcatgactctttat

SEQ ID NO: 299240 - DNA, 15 bp, Homo sapiens
catcatgactcttta

SEQ ID NO: 299241 - DNA, 15 bp, Homo sapiens
acatcatgactcttt

SEQ ID NO: 299242 - DNA, 15 bp, Homo sapiens
aacatcatgactctt

SEQ ID NO: 299243 - DNA, 15 bp, Homo sapiens
taacatcatgactct

SEQ ID NO: 299244 - DNA, 15 bp, Homo sapiens
ctaacatcatgactc

SEQ ID NO: 299245 - DNA, 15 bp, Homo sapiens
tctaacatcatgact

SEQ ID NO: 299246 - DNA, 15 bp, Homo sapiens
atctaacatcatgac

SEQ ID NO: 299247 - DNA, 15 bp, Homo sapiens
tatctaacatcatga

SEQ ID NO: 299248 - DNA, 15 bp, Homo sapiens
ttatctaacatcatg

SEQ ID NO: 299249 - DNA, 15 bp, Homo sapiens
attatctaacatcat

SEQ ID NO: 299250 - DNA, 15 bp, Homo sapiens
aattatctaacatca

SEQ ID NO: 299251 - DNA, 15 bp, Homo sapiens
taattatctaacatc

SEQ ID NO: 299252 - DNA, 15 bp, Homo sapiens
gtaattatctaacat

SEQ ID NO: 299253 - DNA, 15 bp, Homo sapiens
agtaattatctaaca

SEQ ID NO: 299254 - DNA, 15 bp, Homo sapiens
aagtaattatctaac

SEQ ID NO: 299255 - DNA, 15 bp, Homo sapiens
caagtaattatctaa

SEQ ID NO: 299256 - DNA, 15 bp, Homo sapiens
tcaagtaattatcta

SEQ ID NO: 299257 - DNA, 15 bp, Homo sapiens
ttcaagtaattatct

SEQ ID NO: 299258 - DNA, 15 bp, Homo sapiens
attcaagtaattatc

SEQ ID NO: 299259 - DNA, 15 bp, Homo sapiens
aattcaagtaattat

SEQ ID NO: 299260 - DNA, 15 bp, Homo sapiens
aaattcaagtaatta

SEQ ID NO: 299261 - DNA, 15 bp, Homo sapiens
taaattcaagtaatt

SEQ ID NO: 299262 - DNA, 15 bp, Homo sapiens
ctaaattcaagtaat

SEQ ID NO: 299263 - DNA, 15 bp, Homo sapiens
actaaattcaagtaa

SEQ ID NO: 299264 - DNA, 15 bp, Homo sapiens
aactaaattcaagta

SEQ ID NO: 299265 - DNA, 15 bp, Homo sapiens
aaactaaattcaagt

SEQ ID NO: 299266 - DNA, 15 bp, Homo sapiens
aaaactaaattcaag

SEQ ID NO: 299267 - DNA, 15 bp, Homo sapiens
taaaactaaattcaa

SEQ ID NO: 299268 - DNA, 15 bp, Homo sapiens
ctaaaactaaattca

SEQ ID NO: 299269 - DNA, 15 bp, Homo sapiens
tctaaaactaaattc

SEQ ID NO: 299270 - DNA, 15 bp, Homo sapiens
ttctaaaactaaatt

SEQ ID NO: 299271 - DNA, 15 bp, Homo sapiens
attctaaaactaaat

SEQ ID NO: 299272 - DNA, 15 bp, Homo sapiens
aattctaaaactaaa

SEQ ID NO: 299273 - DNA, 15 bp, Homo sapiens
aaattctaaaactaa

SEQ ID NO: 299274 - DNA, 15 bp, Homo sapiens
aaaattctaaaacta

SEQ ID NO: 299275 - DNA, 15 bp, Homo sapiens
gaaaattctaaaact

SEQ ID NO: 299276 - DNA, 15 bp, Homo sapiens
tgaaaattctaaaac

SEQ ID NO: 299277 - DNA, 15 bp, Homo sapiens
actgaaaattctaaa

SEQ ID NO: 299278 - DNA, 15 bp, Homo sapiens
aactgaaaattctaa

SEQ ID NO: 299279 - DNA, 15 bp, Homo sapiens
aaactgaaaattcta

SEQ ID NO: 299280 - DNA, 15 bp, Homo sapiens
caaactgaaaattct

SEQ ID NO: 299281 - DNA, 15 bp, Homo sapiens
acaaactgaaaattc

SEQ ID NO: 299282 - DNA, 15 bp, Homo sapiens
tacaaactgaaaatt

SEQ ID NO: 299283 - DNA, 15 bp, Homo sapiens
ttacaaactgaaaat

SEQ ID NO: 299284 - DNA, 15 bp, Homo sapiens
tttacaaactgaaaa

SEQ ID NO: 299285 - DNA, 15 bp, Homo sapiens
gtttacaaactgaaa

SEQ ID NO: 299286 - DNA, 15 bp, Homo sapiens
agtttacaaactgaa

SEQ ID NO: 299287 - DNA, 15 bp, Homo sapiens
aagtttacaaactga

SEQ ID NO: 299288 - DNA, 15 bp, Homo sapiens
taagtttacaaactg

SEQ ID NO: 299289 - DNA, 15 bp, Homo sapiens
gtaagtttacaaact

SEQ ID NO: 299290 - DNA, 15 bp, Homo sapiens
tgtaagtttacaaac

SEQ ID NO: 299291 - DNA, 15 bp, Homo sapiens
ctgtaagtttacaaa

SEQ ID NO: 299292 - DNA, 15 bp, Homo sapiens
actgtaagtttacaa

SEQ ID NO: 299293 - DNA, 15 bp, Homo sapiens
gactgtaagtttaca

SEQ ID NO: 299294 - DNA, 15 bp, Homo sapiens
tgactgtaagtttac

SEQ ID NO: 299295 - DNA, 15 bp, Homo sapiens
ttgactgtaagttta

SEQ ID NO: 299296 - DNA, 15 bp, Homo sapiens
tttgactgtaagttt

SEQ ID NO: 299297 - DNA, 15 bp, Homo sapiens
atttgactgtaagtt

SEQ ID NO: 299298 - DNA, 15 bp, Homo sapiens
gatttgactgtaagt

SEQ ID NO: 299299 - DNA, 15 bp, Homo sapiens
agatttgactgtaag

SEQ ID NO: 299300 - DNA, 15 bp, Homo sapiens
aagatttgactgtaa

SEQ ID NO: 299301 - DNA, 15 bp, Homo sapiens
taagatttgactgta

SEQ ID NO: 299302 - DNA, 15 bp, Homo sapiens
ttaagatttgactgt

SEQ ID NO: 299303 - DNA, 15 bp, Homo sapiens
gttaagatttgactg

SEQ ID NO: 299304 - DNA, 15 bp, Homo sapiens
agttaagatttgact

SEQ ID NO: 299305 - DNA, 15 bp, Homo sapiens
cagttaagatttgac

SEQ ID NO: 299306 - DNA, 15 bp, Homo sapiens
ccagttaagatttga

SEQ ID NO: 299307 - DNA, 15 bp, Homo sapiens
tccagttaagatttg

SEQ ID NO: 299308 - DNA, 15 bp, Homo sapiens
ttccagttaagattt

SEQ ID NO: 299309 - DNA, 15 bp, Homo sapiens
attccagttaagatt

SEQ ID NO: 299310 - DNA, 15 bp, Homo sapiens
aattccagttaagat

SEQ ID NO: 299311 - DNA, 15 bp, Homo sapiens
caattccagttaaga

SEQ ID NO: 299312 - DNA, 15 bp, Homo sapiens
acaattccagttaag

SEQ ID NO: 299313 - DNA, 15 bp, Homo sapiens
cacaattccagttaa

SEQ ID NO: 299314 - DNA, 15 bp, Homo sapiens
tcacaattccagtta

SEQ ID NO: 299315 - DNA, 15 bp, Homo sapiens
ctcacaattccagtt

SEQ ID NO: 299316 - DNA, 15 bp, Homo sapiens
cctcacaattccagt

SEQ ID NO: 299317 - DNA, 15 bp, Homo sapiens
tcctcacaattccag

SEQ ID NO: 299318 - DNA, 15 bp, Homo sapiens
ttcctcacaattcca

SEQ ID NO: 299319 - DNA, 15 bp, Homo sapiens
cttcctcacaattcc

SEQ ID NO: 299320 - DNA, 15 bp, Homo sapiens
ccttcctcacaattc

SEQ ID NO: 299321 - DNA, 15 bp, Homo sapiens
cccttcctcacaatt

SEQ ID NO: 299322 - DNA, 15 bp, Homo sapiens
gcccttcctcacaat

SEQ ID NO: 299323 - DNA, 15 bp, Homo sapiens
agcccttcctcacaa

SEQ ID NO: 299324 - DNA, 15 bp, Homo sapiens
gagcccttcctcaca

SEQ ID NO: 299325 - DNA, 15 bp, Homo sapiens
agagcccttcctcac

SEQ ID NO: 299326 - DNA, 15 bp, Homo sapiens
tagagcccttcctca

SEQ ID NO: 299327 - DNA, 15 bp, Homo sapiens
ctagagcccttcctc

SEQ ID NO: 299328 - DNA, 15 bp, Homo sapiens
tctagagcccttcct

SEQ ID NO: 299329 - DNA, 15 bp, Homo sapiens
ttctagagcccttcc

SEQ ID NO: 299330 - DNA, 15 bp, Homo sapiens
attctagagcccttc

SEQ ID NO: 299331 - DNA, 15 bp, Homo sapiens
aattctagagccctt

SEQ ID NO: 299332 - DNA, 15 bp, Homo sapiens
gaattctagagccct

SEQ ID NO: 299333 - DNA, 15 bp, Homo sapiens
agaattctagagccc

SEQ ID NO: 299334 - DNA, 15 bp, Homo sapiens
cagaattctagagcc

SEQ ID NO: 299335 - DNA, 15 bp, Homo sapiens
ccagaattctagagc

SEQ ID NO: 299336 - DNA, 15 bp, Homo sapiens
tccagaattctagag

SEQ ID NO: 299337 - DNA, 15 bp, Homo sapiens
atccagaattctaga

SEQ ID NO: 299338 - DNA, 15 bp, Homo sapiens
tatccagaattctag

SEQ ID NO: 299339 - DNA, 15 bp, Homo sapiens
atatccagaattcta

SEQ ID NO: 299340 - DNA, 15 bp, Homo sapiens
catatccagaattct

SEQ ID NO: 299341 - DNA, 15 bp, Homo sapiens
gcatatccagaattc

SEQ ID NO: 299342 - DNA, 15 bp, Homo sapiens
tgcatatccagaatt

SEQ ID NO: 299343 - DNA, 15 bp, Homo sapiens
ttgcatatccagaat

SEQ ID NO: 299344 - DNA, 15 bp, Homo sapiens
cttgcatatccagaa

SEQ ID NO: 299345 - DNA, 15 bp, Homo sapiens
tcttgcatatccaga

SEQ ID NO: 299346 - DNA, 15 bp, Homo sapiens
ttcttgcatatccag

SEQ ID NO: 299347 - DNA, 15 bp, Homo sapiens
tttcttgcatatcca

SEQ ID NO: 299348 - DNA, 15 bp, Homo sapiens
gtttcttgcatatcc

SEQ ID NO: 299349 - DNA, 15 bp, Homo sapiens
tgtttcttgcatatc

SEQ ID NO: 299350 - DNA, 15 bp, Homo sapiens
ttgtttcttgcatat

SEQ ID NO: 299351 - DNA, 15 bp, Homo sapiens
tttgtttcttgcata

SEQ ID NO: 299352 - DNA, 15 bp, Homo sapiens
ctttgtttcttgcat

SEQ ID NO: 299353 - DNA, 15 bp, Homo sapiens
tctttgtttcttgca

SEQ ID NO: 299354 - DNA, 15 bp, Homo sapiens
ttctttgtttcttgc

SEQ ID NO: 299355 - DNA, 15 bp, Homo sapiens
cttctttgtttcttg

SEQ ID NO: 299356 - DNA, 15 bp, Homo sapiens
tcttctttgtttctt

SEQ ID NO: 299357 - DNA, 15 bp, Homo sapiens
ctcttctttgtttct

SEQ ID NO: 299358 - DNA, 15 bp, Homo sapiens
tctcttctttgtttc

SEQ ID NO: 299359 - DNA, 15 bp, Homo sapiens
ttctcttctttgttt

SEQ ID NO: 299360 - DNA, 15 bp, Homo sapiens
tttctcttctttgtt

SEQ ID NO: 299361 - DNA, 15 bp, Homo sapiens
atttctcttctttgt

SEQ ID NO: 299362 - DNA, 15 bp, Homo sapiens
tatttctcttctttg

SEQ ID NO: 299363 - DNA, 15 bp, Homo sapiens
ctatttctcttcttt

SEQ ID NO: 299364 - DNA, 15 bp, Homo sapiens
cctatttctcttctt

SEQ ID NO: 299365 - DNA, 15 bp, Homo sapiens
tcctatttctcttct

SEQ ID NO: 299366 - DNA, 15 bp, Homo sapiens
ctcctatttctcttc

SEQ ID NO: 299367 - DNA, 15 bp, Homo sapiens
tctcctatttctctt

SEQ ID NO: 299368 - DNA, 15 bp, Homo sapiens
ttctcctatttctct

SEQ ID NO: 299369 - DNA, 15 bp, Homo sapiens
tttctcctatttctc

SEQ ID NO: 299370 - DNA, 15 bp, Homo sapiens
atttctcctatttct

SEQ ID NO: 299371 - DNA, 15 bp, Homo sapiens
gatttctcctatttc

SEQ ID NO: 299372 - DNA, 15 bp, Homo sapiens
cgatttctcctattt

SEQ ID NO: 299373 - DNA, 15 bp, Homo sapiens
tcgatttctcctatt

SEQ ID NO: 299374 - DNA, 15 bp, Homo sapiens
atcgatttctcctat

SEQ ID NO: 299375 - DNA, 15 bp, Homo sapiens
gatcgatttctccta

SEQ ID NO: 299376 - DNA, 15 bp, Homo sapiens
ggatcgatttctcct

SEQ ID NO: 299377 - DNA, 15 bp, Homo sapiens
aggatcgatttctcc

SEQ ID NO: 299378 - DNA, 15 bp, Homo sapiens
taggatcgatttctc

SEQ ID NO: 299379 - DNA, 15 bp, Homo sapiens
ttaggatcgatttct

SEQ ID NO: 299380 - DNA, 15 bp, Homo sapiens
attaggatcgatttc

SEQ ID NO: 299381 - DNA, 15 bp, Homo sapiens
aattaggatcgattt

SEQ ID NO: 299382 - DNA, 15 bp, Homo sapiens
taattaggatcgatt

SEQ ID NO: 299383 - DNA, 15 bp, Homo sapiens
ctaattaggatcgat

SEQ ID NO: 299384 - DNA, 15 bp, Homo sapiens
actaattaggatcga

SEQ ID NO: 299385 - DNA, 15 bp, Homo sapiens
cactaattaggatcg

SEQ ID NO: 299386 - DNA, 15 bp, Homo sapiens
acactaattaggatc

SEQ ID NO: 299387 - DNA, 15 bp, Homo sapiens
cacactaattaggat

SEQ ID NO: 299388 - DNA, 15 bp, Homo sapiens
ccacactaattagga

SEQ ID NO: 299389 - DNA, 15 bp, Homo sapiens
gccacactaattagg

SEQ ID NO: 299390 - DNA, 15 bp, Homo sapiens
agccacactaattag

SEQ ID NO: 299391 - DNA, 15 bp, Homo sapiens
aagccacactaatta

SEQ ID NO: 299392 - DNA, 15 bp, Homo sapiens
gaagccacactaatt

SEQ ID NO: 299393 - DNA, 15 bp, Homo sapiens
agaagccacactaat

SEQ ID NO: 299394 - DNA, 15 bp, Homo sapiens
cagaagccacactaa

SEQ ID NO: 299395 - DNA, 15 bp, Homo sapiens
tcagaagccacacta

SEQ ID NO: 299396 - DNA, 15 bp, Homo sapiens
ttcagaagccacact

SEQ ID NO: 299397 - DNA, 15 bp, Homo sapiens
attcagaagccacac

SEQ ID NO: 299398 - DNA, 15 bp, Homo sapiens
aattcagaagccaca

SEQ ID NO: 299399 - DNA, 15 bp, Homo sapiens
aaattcagaagccac

SEQ ID NO: 299400 - DNA, 15 bp, Homo sapiens
gaaattcagaagcca

SEQ ID NO: 299401 - DNA, 15 bp, Homo sapiens
agaaattcagaagcc

SEQ ID NO: 299402 - DNA, 15 bp, Homo sapiens
cagaaattcagaagc

SEQ ID NO: 299403 - DNA, 15 bp, Homo sapiens
gcagaaattcagaag

SEQ ID NO: 299404 - DNA, 15 bp, Homo sapiens
tgcagaaattcagaa

SEQ ID NO: 299405 - DNA, 15 bp, Homo sapiens
ctgcagaaattcaga

SEQ ID NO: 299406 - DNA, 15 bp, Homo sapiens
gctgcagaaattcag

SEQ ID NO: 299407 - DNA, 15 bp, Homo sapiens
tgctgcagaaattca

SEQ ID NO: 299408 - DNA, 15 bp, Homo sapiens
ttgctgcagaaattc

SEQ ID NO: 299409 - DNA, 15 bp, Homo sapiens
tttgctgcagaaatt

SEQ ID NO: 299410 - DNA, 15 bp, Homo sapiens
ttttgctgcagaaat

SEQ ID NO: 299411 - DNA, 15 bp, Homo sapiens
attttgctgcagaaa

SEQ ID NO: 299412 - DNA, 15 bp, Homo sapiens
tattttgctgcagaa

SEQ ID NO: 299413 - DNA, 15 bp, Homo sapiens
ttattttgctgcaga

SEQ ID NO: 299414 - DNA, 15 bp, Homo sapiens
tttattttgctgcag

SEQ ID NO: 299415 - DNA, 15 bp, Homo sapiens
ttttattttgctgca

SEQ ID NO: 299416 - DNA, 15 bp, Homo sapiens
cttttattttgctgc

SEQ ID NO: 299417 - DNA, 15 bp, Homo sapiens
ccttttattttgctg

SEQ ID NO: 299418 - DNA, 15 bp, Homo sapiens
gccttttattttgct

SEQ ID NO: 299419 - DNA, 15 bp, Homo sapiens
agccttttattttgc

SEQ ID NO: 299420 - DNA, 15 bp, Homo sapiens
cagccttttattttg

SEQ ID NO: 299421 - DNA, 15 bp, Homo sapiens
acagccttttatttt

SEQ ID NO: 299422 - DNA, 15 bp, Homo sapiens
aacagccttttattt

SEQ ID NO: 299423 - DNA, 15 bp, Homo sapiens
taacagccttttatt

SEQ ID NO: 299424 - DNA, 15 bp, Homo sapiens
ataacagccttttat

SEQ ID NO: 299425 - DNA, 15 bp, Homo sapiens
aataacagcctttta

SEQ ID NO: 299426 - DNA, 15 bp, Homo sapiens
taataacagcctttt

SEQ ID NO: 299427 - DNA, 15 bp, Homo sapiens
ttaataacagccttt

SEQ ID NO: 299428 - DNA, 15 bp, Homo sapiens
attaataacagcctt

SEQ ID NO: 299429 - DNA, 15 bp, Homo sapiens
aattaataacagcct

SEQ ID NO: 299430 - DNA, 15 bp, Homo sapiens
taattaataacagcc

SEQ ID NO: 299431 - DNA, 15 bp, Homo sapiens
ataattaataacagc

SEQ ID NO: 299432 - DNA, 15 bp, Homo sapiens
aataattaataacag

SEQ ID NO: 299433 - DNA, 15 bp, Homo sapiens
caataattaataaca

SEQ ID NO: 299434 - DNA, 15 bp, Homo sapiens
tcaataattaataac

SEQ ID NO: 299435 - DNA, 15 bp, Homo sapiens
ctcaataattaataa

SEQ ID NO: 299436 - DNA, 15 bp, Homo sapiens
actcaataattaata

SEQ ID NO: 299437 - DNA, 15 bp, Homo sapiens
aactcaataattaat

SEQ ID NO: 299438 - DNA, 15 bp, Homo sapiens
aaactcaataattaa

SEQ ID NO: 299439 - DNA, 15 bp, Homo sapiens
taaactcaataatta

SEQ ID NO: 299440 - DNA, 15 bp, Homo sapiens
gtaaactcaataatt

SEQ ID NO: 299441 - DNA, 15 bp, Homo sapiens
agtaaactcaataat

SEQ ID NO: 299442 - DNA, 15 bp, Homo sapiens
tagtaaactcaataa

SEQ ID NO: 299443 - DNA, 15 bp, Homo sapiens
ttagtaaactcaata

SEQ ID NO: 299444 - DNA, 15 bp, Homo sapiens
tttagtaaactcaat

SEQ ID NO: 299445 - DNA, 15 bp, Homo sapiens
ttttagtaaactcaa

SEQ ID NO: 299446 - DNA, 15 bp, Homo sapiens
attttagtaaactca

SEQ ID NO: 299447 - DNA, 15 bp, Homo sapiens
aattttagtaaactc

SEQ ID NO: 299448 - DNA, 15 bp, Homo sapiens
aaattttagtaaact

SEQ ID NO: 299449 - DNA, 15 bp, Homo sapiens
aaaattttagtaaac

SEQ ID NO: 299450 - DNA, 15 bp, Homo sapiens
taaaattttagtaaa

SEQ ID NO: 299451 - DNA, 15 bp, Homo sapiens
ctaaaattttagtaa

SEQ ID NO: 299452 - DNA, 15 bp, Homo sapiens
tctaaaattttagta

SEQ ID NO: 299453 - DNA, 15 bp, Homo sapiens
ttctaaaattttagt

SEQ ID NO: 299454 - DNA, 15 bp, Homo sapiens
gttctaaaattttag

SEQ ID NO: 299455 - DNA, 15 bp, Homo sapiens
agttctaaaatttta

SEQ ID NO: 299456 - DNA, 15 bp, Homo sapiens
tagttctaaaatttt

SEQ ID NO: 299457 - DNA, 15 bp, Homo sapiens
gtagttctaaaattt

SEQ ID NO: 299458 - DNA, 15 bp, Homo sapiens
agtagttctaaaatt

SEQ ID NO: 299459 - DNA, 15 bp, Homo sapiens
gagtagttctaaaat

SEQ ID NO: 299460 - DNA, 15 bp, Homo sapiens
agagtagttctaaaa

SEQ ID NO: 299461 - DNA, 15 bp, Homo sapiens
tagagtagttctaaa

SEQ ID NO: 299462 - DNA, 15 bp, Homo sapiens
ttagagtagttctaa

SEQ ID NO: 299463 - DNA, 15 bp, Homo sapiens
cttagagtagttcta

SEQ ID NO: 299464 - DNA, 15 bp, Homo sapiens
ccttagagtagttct

SEQ ID NO: 299465 - DNA, 15 bp, Homo sapiens
gccttagagtagttc

SEQ ID NO: 299466 - DNA, 15 bp, Homo sapiens
tgccttagagtagtt

SEQ ID NO: 299467 - DNA, 15 bp, Homo sapiens
ttgccttagagtagt

SEQ ID NO: 299468 - DNA, 15 bp, Homo sapiens
attgccttagagtag

SEQ ID NO: 299469 - DNA, 15 bp, Homo sapiens
aattgccttagagta

SEQ ID NO: 299470 - DNA, 15 bp, Homo sapiens
taattgccttagagt

SEQ ID NO: 299471 - DNA, 15 bp, Homo sapiens
ataattgccttagag

SEQ ID NO: 299472 - DNA, 15 bp, Homo sapiens
cataattgccttaga

SEQ ID NO: 299473 - DNA, 15 bp, Homo sapiens
gcataattgccttag

SEQ ID NO: 299474 - DNA, 15 bp, Homo sapiens
agcataattgcctta

SEQ ID NO: 299475 - DNA, 15 bp, Homo sapiens
aagcataattgcctt

SEQ ID NO: 299476 - DNA, 15 bp, Homo sapiens
gaagcataattgcct

SEQ ID NO: 299477 - DNA, 15 bp, Homo sapiens
tgaagcataattgcc

SEQ ID NO: 299478 - DNA, 15 bp, Homo sapiens
ttgaagcataattgc

SEQ ID NO: 299479 - DNA, 15 bp, Homo sapiens
attgaagcataattg

SEQ ID NO: 299480 - DNA, 15 bp, Homo sapiens
gattgaagcataatt

SEQ ID NO: 299481 - DNA, 15 bp, Homo sapiens
tgattgaagcataat

SEQ ID NO: 299482 - DNA, 15 bp, Homo sapiens
atgattgaagcataa

SEQ ID NO: 299483 - DNA, 15 bp, Homo sapiens
gatgattgaagcata

SEQ ID NO: 299484 - DNA, 15 bp, Homo sapiens
agatgattgaagcat

SEQ ID NO: 299485 - DNA, 15 bp, Homo sapiens
tagatgattgaagca

SEQ ID NO: 299486 - DNA, 15 bp, Homo sapiens
ttagatgattgaagc

SEQ ID NO: 299487 - DNA, 15 bp, Homo sapiens
cttagatgattgaag

SEQ ID NO: 299488 - DNA, 15 bp, Homo sapiens
gcttagatgattgaa

SEQ ID NO: 299489 - DNA, 15 bp, Homo sapiens
agcttagatgattga

SEQ ID NO: 299490 - DNA, 15 bp, Homo sapiens
aagcttagatgattg

SEQ ID NO: 299491 - DNA, 15 bp, Homo sapiens
taagcttagatgatt

SEQ ID NO: 299492 - DNA, 15 bp, Homo sapiens
gtaagcttagatgat

SEQ ID NO: 299493 - DNA, 15 bp, Homo sapiens
agtaagcttagatga

SEQ ID NO: 299494 - DNA, 15 bp, Homo sapiens
aagtaagcttagatg

SEQ ID NO: 299495 - DNA, 15 bp, Homo sapiens
taagtaagcttagat

SEQ ID NO: 299496 - DNA, 15 bp, Homo sapiens
gtaagtaagcttaga

SEQ ID NO: 299497 - DNA, 15 bp, Homo sapiens
ggtaagtaagcttag

SEQ ID NO: 299498 - DNA, 15 bp, Homo sapiens
aggtaagtaagctta

SEQ ID NO: 299499 - DNA, 15 bp, Homo sapiens
aaggtaagtaagctt

SEQ ID NO: 299500 - DNA, 15 bp, Homo sapiens
aaaggtaagtaagct

SEQ ID NO: 299501 - DNA, 15 bp, Homo sapiens
taaaggtaagtaagc

SEQ ID NO: 299502 - DNA, 15 bp, Homo sapiens
ttaaaggtaagtaag

SEQ ID NO: 299503 - DNA, 15 bp, Homo sapiens
attaaaggtaagtaa

SEQ ID NO: 299504 - DNA, 15 bp, Homo sapiens
aattaaaggtaagta

SEQ ID NO: 299505 - DNA, 15 bp, Homo sapiens
taattaaaggtaagt

SEQ ID NO: 299506 - DNA, 15 bp, Homo sapiens
ataattaaaggtaag

SEQ ID NO: 299507 - DNA, 15 bp, Homo sapiens
tataattaaaggtaa

SEQ ID NO: 299508 - DNA, 15 bp, Homo sapiens
ttataattaaaggta

SEQ ID NO: 299509 - DNA, 15 bp, Homo sapiens
tttataattaaaggt

SEQ ID NO: 299510 - DNA, 15 bp, Homo sapiens
ttttataattaaagg

SEQ ID NO: 299511 - DNA, 15 bp, Homo sapiens
attttataattaaag

SEQ ID NO: 299512 - DNA, 15 bp, Homo sapiens
tattttataattaaa

SEQ ID NO: 299513 - DNA, 15 bp, Homo sapiens
ctattttataattaa

SEQ ID NO: 299514 - DNA, 15 bp, Homo sapiens
tctattttataatta

SEQ ID NO: 299515 - DNA, 15 bp, Homo sapiens
ttctattttataatt

SEQ ID NO: 299516 - DNA, 15 bp, Homo sapiens
gttctattttataat

SEQ ID NO: 299517 - DNA, 15 bp, Homo sapiens
tgttctattttataa

SEQ ID NO: 299518 - DNA, 15 bp, Homo sapiens
ttgttctattttata

SEQ ID NO: 299519 - DNA, 15 bp, Homo sapiens
gttgttctattttat

SEQ ID NO: 299520 - DNA, 15 bp, Homo sapiens
agttgttctatttta

SEQ ID NO: 299521 - DNA, 15 bp, Homo sapiens
aagttgttctatttt

SEQ ID NO: 299522 - DNA, 15 bp, Homo sapiens
aaagttgttctattt

SEQ ID NO: 299523 - DNA, 15 bp, Homo sapiens
aaaagttgttctatt

SEQ ID NO: 299524 - DNA, 15 bp, Homo sapiens
aaaaagttgttctat

SEQ ID NO: 299525 - DNA, 15 bp, Homo sapiens
caaaaagttgttcta

SEQ ID NO: 299526 - DNA, 15 bp, Homo sapiens
ccaaaaagttgttct

SEQ ID NO: 299527 - DNA, 15 bp, Homo sapiens
gccaaaaagttgttc

SEQ ID NO: 299528 - DNA, 15 bp, Homo sapiens
tgccaaaaagttgtt

SEQ ID NO: 299529 - DNA, 15 bp, Homo sapiens
atgccaaaaagttgt

SEQ ID NO: 299530 - DNA, 15 bp, Homo sapiens
aatgccaaaaagttg

SEQ ID NO: 299531 - DNA, 15 bp, Homo sapiens
aaatgccaaaaagtt

SEQ ID NO: 299532 - DNA, 15 bp, Homo sapiens
gaaatgccaaaaagt

SEQ ID NO: 299533 - DNA, 15 bp, Homo sapiens
tgaaatgccaaaaag

SEQ ID NO: 299534 - DNA, 15 bp, Homo sapiens
atgaaatgccaaaaa

SEQ ID NO: 299535 - DNA, 15 bp, Homo sapiens
aatgaaatgccaaaa

SEQ ID NO: 299536 - DNA, 15 bp, Homo sapiens
aaatgaaatgccaaa

SEQ ID NO: 299537 - DNA, 15 bp, Homo sapiens
aaaatgaaatgccaa

SEQ ID NO: 299538 - DNA, 15 bp, Homo sapiens
aaaaatgaaatgcca

SEQ ID NO: 299539 - DNA, 15 bp, Homo sapiens
gaaaaatgaaatgcc

SEQ ID NO: 299540 - DNA, 15 bp, Homo sapiens
ggaaaaatgaaatgc

SEQ ID NO: 299541 - DNA, 15 bp, Homo sapiens
tggaaaaatgaaatg

SEQ ID NO: 299542 - DNA, 15 bp, Homo sapiens
ttggaaaaatgaaat

SEQ ID NO: 299543 - DNA, 15 bp, Homo sapiens
gttggaaaaatgaaa

SEQ ID NO: 299544 - DNA, 15 bp, Homo sapiens
agttggaaaaatgaa

SEQ ID NO: 299545 - DNA, 15 bp, Homo sapiens
tagttggaaaaatga

SEQ ID NO: 299546 - DNA, 15 bp, Homo sapiens
atagttggaaaaatg

SEQ ID NO: 299547 - DNA, 15 bp, Homo sapiens
aatagttggaaaaat

SEQ ID NO: 299548 - DNA, 15 bp, Homo sapiens
aaatagttggaaaaa

SEQ ID NO: 299549 - DNA, 15 bp, Homo sapiens
taaatagttggaaaa

SEQ ID NO: 299550 - DNA, 15 bp, Homo sapiens
ataaatagttggaaa

SEQ ID NO: 299551 - DNA, 15 bp, Homo sapiens
tataaatagttggaa

SEQ ID NO: 299552 - DNA, 15 bp, Homo sapiens
ctataaatagttgga

SEQ ID NO: 299553 - DNA, 15 bp, Homo sapiens
gctataaatagttgg

SEQ ID NO: 299554 - DNA, 15 bp, Homo sapiens
tgctataaatagttg

SEQ ID NO: 299555 - DNA, 15 bp, Homo sapiens
atgctataaatagtt

SEQ ID NO: 299556 - DNA, 15 bp, Homo sapiens
catgctataaatagt

SEQ ID NO: 299557 - DNA, 15 bp, Homo sapiens
acatgctataaatag

SEQ ID NO: 299558 - DNA, 15 bp, Homo sapiens
aacatgctataaata

SEQ ID NO: 299559 - DNA, 15 bp, Homo sapiens
aaacatgctataaat

SEQ ID NO: 299560 - DNA, 15 bp, Homo sapiens
aaaacatgctataaa

SEQ ID NO: 299561 - DNA, 15 bp, Homo sapiens
taaaacatgctataa

SEQ ID NO: 299562 - DNA, 15 bp, Homo sapiens
ttaaaacatgctata

SEQ ID NO: 299563 - DNA, 15 bp, Homo sapiens
tttaaaacatgctat

SEQ ID NO: 299564 - DNA, 15 bp, Homo sapiens
ttttaaaacatgcta

SEQ ID NO: 299565 - DNA, 15 bp, Homo sapiens
tttttaaaacatgct

SEQ ID NO: 299566 - DNA, 15 bp, Homo sapiens
gtttttaaaacatgc

SEQ ID NO: 299567 - DNA, 15 bp, Homo sapiens
cagagtttttaaaac

SEQ ID NO: 299568 - DNA, 15 bp, Homo sapiens
tcagagtttttaaaa

SEQ ID NO: 299569 - DNA, 15 bp, Homo sapiens
ttcagagtttttaaa

SEQ ID NO: 299570 - DNA, 15 bp, Homo sapiens
gttcagagtttttaa

SEQ ID NO: 299571 - DNA, 15 bp, Homo sapiens
agttcagagttttta

SEQ ID NO: 299572 - DNA, 15 bp, Homo sapiens
cagttcagagttttt

SEQ ID NO: 299573 - DNA, 15 bp, Homo sapiens
acagttcagagtttt

SEQ ID NO: 299574 - DNA, 15 bp, Homo sapiens
gacagttcagagttt

SEQ ID NO: 299575 - DNA, 15 bp, Homo sapiens
tgacagttcagagtt

SEQ ID NO: 299576 - DNA, 15 bp, Homo sapiens
gtgacagttcagagt

SEQ ID NO: 299577 - DNA, 15 bp, Homo sapiens
cgtgacagttcagag

SEQ ID NO: 299578 - DNA, 15 bp, Homo sapiens
tcgtgacagttcaga

SEQ ID NO: 299579 - DNA, 15 bp, Homo sapiens
gtcgtgacagttcag

SEQ ID NO: 299580 - DNA, 15 bp, Homo sapiens
ggtcgtgacagttca

SEQ ID NO: 299581 - DNA, 15 bp, Homo sapiens
gggtcgtgacagttc

SEQ ID NO: 299582 - DNA, 15 bp, Homo sapiens
tgggtcgtgacagtt

SEQ ID NO: 299583 - DNA, 15 bp, Homo sapiens
ctgggtcgtgacagt

SEQ ID NO: 299584 - DNA, 15 bp, Homo sapiens
actgggtcgtgacag

SEQ ID NO: 299585 - DNA, 15 bp, Homo sapiens
gactgggtcgtgaca

SEQ ID NO: 299586 - DNA, 15 bp, Homo sapiens
agactgggtcgtgac

SEQ ID NO: 299587 - DNA, 15 bp, Homo sapiens
cagactgggtcgtga

SEQ ID NO: 299588 - DNA, 15 bp, Homo sapiens
acagactgggtcgtg

SEQ ID NO: 299589 - DNA, 15 bp, Homo sapiens
aacagactgggtcgt

SEQ ID NO: 299590 - DNA, 15 bp, Homo sapiens
aaacagactgggtcg

SEQ ID NO: 299591 - DNA, 15 bp, Homo sapiens
gaaacagactgggtc

SEQ ID NO: 299592 - DNA, 15 bp, Homo sapiens
tgaaacagactgggt

SEQ ID NO: 299593 - DNA, 15 bp, Homo sapiens
ttgaaacagactggg

SEQ ID NO: 299594 - DNA, 15 bp, Homo sapiens
gttgaaacagactgg

SEQ ID NO: 299595 - DNA, 15 bp, Homo sapiens
tgttgaaacagactg

SEQ ID NO: 299596 - DNA, 15 bp, Homo sapiens
atgttgaaacagact

SEQ ID NO: 299597 - DNA, 15 bp, Homo sapiens
tatgttgaaacagac

SEQ ID NO: 299598 - DNA, 15 bp, Homo sapiens
gtatgttgaaacaga

SEQ ID NO: 299599 - DNA, 15 bp, Homo sapiens
tgtatgttgaaacag

SEQ ID NO: 299600 - DNA, 15 bp, Homo sapiens
gtgtatgttgaaaca

SEQ ID NO: 299601 - DNA, 15 bp, Homo sapiens
tgtgtatgttgaaac

SEQ ID NO: 299602 - DNA, 15 bp, Homo sapiens
atgtgtatgttgaaa

SEQ ID NO: 299603 - DNA, 15 bp, Homo sapiens
aatgtgtatgttgaa

SEQ ID NO: 299604 - DNA, 15 bp, Homo sapiens
aaatgtgtatgttga

SEQ ID NO: 299605 - DNA, 15 bp, Homo sapiens
caaatgtgtatgttg

SEQ ID NO: 299606 - DNA, 15 bp, Homo sapiens
acaaatgtgtatgtt

SEQ ID NO: 299607 - DNA, 15 bp, Homo sapiens
cacaaatgtgtatgt

SEQ ID NO: 299608 - DNA, 15 bp, Homo sapiens
ccacaaatgtgtatg

SEQ ID NO: 299609 - DNA, 15 bp, Homo sapiens
accacaaatgtgtat

SEQ ID NO: 299610 - DNA, 15 bp, Homo sapiens
gaccacaaatgtgta

SEQ ID NO: 299611 - DNA, 15 bp, Homo sapiens
ggaccacaaatgtgt

SEQ ID NO: 299612 - DNA, 15 bp, Homo sapiens
aggaccacaaatgtg

SEQ ID NO: 299613 - DNA, 15 bp, Homo sapiens
aaggaccacaaatgt

SEQ ID NO: 299614 - DNA, 15 bp, Homo sapiens
caaggaccacaaatg

SEQ ID NO: 299615 - DNA, 15 bp, Homo sapiens
ccaaggaccacaaat

SEQ ID NO: 299616 - DNA, 15 bp, Homo sapiens
accaaggaccacaaa

SEQ ID NO: 299617 - DNA, 15 bp, Homo sapiens
caccaaggaccacaa

SEQ ID NO: 299618 - DNA, 15 bp, Homo sapiens
acaccaaggaccaca

SEQ ID NO: 299619 - DNA, 15 bp, Homo sapiens
aacaccaaggaccac

SEQ ID NO: 299620 - DNA, 15 bp, Homo sapiens
caacaccaaggacca

SEQ ID NO: 299621 - DNA, 15 bp, Homo sapiens
acaacaccaaggacc

SEQ ID NO: 299622 - DNA, 15 bp, Homo sapiens
aacaacaccaaggac

SEQ ID NO: 299623 - DNA, 15 bp, Homo sapiens
taacaacaccaagga

SEQ ID NO: 299624 - DNA, 15 bp, Homo sapiens
gtaacaacaccaagg

SEQ ID NO: 299625 - DNA, 15 bp, Homo sapiens
agtaacaacaccaag

SEQ ID NO: 299626 - DNA, 15 bp, Homo sapiens
tagtaacaacaccaa

SEQ ID NO: 299627 - DNA, 15 bp, Homo sapiens
ttagtaacaacacca

SEQ ID NO: 299628 - DNA, 15 bp, Homo sapiens
attagtaacaacacc

SEQ ID NO: 299629 - DNA, 15 bp, Homo sapiens
aattagtaacaacac

SEQ ID NO: 299630 - DNA, 15 bp, Homo sapiens
aaattagtaacaaca

SEQ ID NO: 299631 - DNA, 15 bp, Homo sapiens
taaattagtaacaac

SEQ ID NO: 299632 - DNA, 15 bp, Homo sapiens
gtaaattagtaacaa

SEQ ID NO: 299633 - DNA, 15 bp, Homo sapiens
agtaaattagtaaca

SEQ ID NO: 299634 - DNA, 15 bp, Homo sapiens
aagtaaattagtaac

SEQ ID NO: 299635 - DNA, 15 bp, Homo sapiens
taagtaaattagtaa

SEQ ID NO: 299636 - DNA, 15 bp, Homo sapiens
ttaagtaaattagta

SEQ ID NO: 299637 - DNA, 15 bp, Homo sapiens
attaagtaaattagt

SEQ ID NO: 299638 - DNA, 15 bp, Homo sapiens
aattaagtaaattag

SEQ ID NO: 299639 - DNA, 15 bp, Homo sapiens
caattaagtaaatta

SEQ ID NO: 299640 - DNA, 15 bp, Homo sapiens
ccaattaagtaaatt

SEQ ID NO: 299641 - DNA, 15 bp, Homo sapiens
cccaattaagtaaat

SEQ ID NO: 299642 - DNA, 15 bp, Homo sapiens
acccaattaagtaaa

SEQ ID NO: 299643 - DNA, 15 bp, Homo sapiens
gacccaattaagtaa

SEQ ID NO: 299644 - DNA, 15 bp, Homo sapiens
agacccaattaagta

SEQ ID NO: 299645 - DNA, 15 bp, Homo sapiens
aagacccaattaagt

SEQ ID NO: 299646 - DNA, 15 bp, Homo sapiens
gaagacccaattaag

SEQ ID NO: 299647 - DNA, 15 bp, Homo sapiens
tgaagacccaattaa

SEQ ID NO: 299648 - DNA, 15 bp, Homo sapiens
atgaagacccaatta

SEQ ID NO: 299649 - DNA, 15 bp, Homo sapiens
tatgaagacccaatt

SEQ ID NO: 299650 - DNA, 15 bp, Homo sapiens
atatgaagacccaat

SEQ ID NO: 299651 - DNA, 15 bp, Homo sapiens
aatatgaagacccaa

SEQ ID NO: 299652 - DNA, 15 bp, Homo sapiens
aaatatgaagaccca

SEQ ID NO: 299653 - DNA, 15 bp, Homo sapiens
aaaatatgaagaccc

SEQ ID NO: 299654 - DNA, 15 bp, Homo sapiens
gaaaatatgaagacc

SEQ ID NO: 299655 - DNA, 15 bp, Homo sapiens
tgaaaatatgaagac

SEQ ID NO: 299656 - DNA, 15 bp, Homo sapiens
ctgaaaatatgaaga

SEQ ID NO: 299657 - DNA, 15 bp, Homo sapiens
gctgaaaatatgaag

SEQ ID NO: 299658 - DNA, 15 bp, Homo sapiens
agctgaaaatatgaa

SEQ ID NO: 299659 - DNA, 15 bp, Homo sapiens
aagctgaaaatatga

SEQ ID NO: 299660 - DNA, 15 bp, Homo sapiens
aaagctgaaaatatg

SEQ ID NO: 299661 - DNA, 15 bp, Homo sapiens
aaaagctgaaaatat

SEQ ID NO: 299662 - DNA, 15 bp, Homo sapiens
gaaaagctgaaaata

SEQ ID NO: 299663 - DNA, 15 bp, Homo sapiens
gagaaaagctgaaaa

SEQ ID NO: 299664 - DNA, 15 bp, Homo sapiens
tgagaaaagctgaaa

SEQ ID NO: 299665 - DNA, 15 bp, Homo sapiens
ctgagaaaagctgaa

SEQ ID NO: 299666 - DNA, 15 bp, Homo sapiens
tctgagaaaagctga

SEQ ID NO: 299667 - DNA, 15 bp, Homo sapiens
ttctgagaaaagctg

SEQ ID NO: 299668 - DNA, 15 bp, Homo sapiens
tttctgagaaaagct

SEQ ID NO: 299669 - DNA, 15 bp, Homo sapiens
atttctgagaaaagc

SEQ ID NO: 299670 - DNA, 15 bp, Homo sapiens
catttctgagaaaag

SEQ ID NO: 299671 - DNA, 15 bp, Homo sapiens
ccatttctgagaaaa

SEQ ID NO: 299672 - DNA, 15 bp, Homo sapiens
gccatttctgagaaa

SEQ ID NO: 299673 - DNA, 15 bp, Homo sapiens
ggccatttctgagaa

SEQ ID NO: 299674 - DNA, 15 bp, Homo sapiens
tggccatttctgaga

SEQ ID NO: 299675 - DNA, 15 bp, Homo sapiens
ttggccatttctgag

SEQ ID NO: 299676 - DNA, 15 bp, Homo sapiens
tttggccatttctga

SEQ ID NO: 299677 - DNA, 15 bp, Homo sapiens
atttggccatttctg

SEQ ID NO: 299678 - DNA, 15 bp, Homo sapiens
tatttggccatttct

SEQ ID NO: 299679 - DNA, 15 bp, Homo sapiens
atatttggccatttc

SEQ ID NO: 299680 - DNA, 15 bp, Homo sapiens
gatatttggccattt

SEQ ID NO: 299681 - DNA, 15 bp, Homo sapiens
tgatatttggccatt

SEQ ID NO: 299682 - DNA, 15 bp, Homo sapiens
ttgatatttggccat

SEQ ID NO: 299683 - DNA, 15 bp, Homo sapiens
tttgatatttggcca

SEQ ID NO: 299684 - DNA, 15 bp, Homo sapiens
ctttgatatttggcc

SEQ ID NO: 299685 - DNA, 15 bp, Homo sapiens
cctttgatatttggc

SEQ ID NO: 299686 - DNA, 15 bp, Homo sapiens
acctttgatatttgg

SEQ ID NO: 299687 - DNA, 15 bp, Homo sapiens
tacctttgatatttg

SEQ ID NO: 299688 - DNA, 15 bp, Homo sapiens
atacctttgatattt

SEQ ID NO: 299689 - DNA, 15 bp, Homo sapiens
aatacctttgatatt

SEQ ID NO: 299690 - DNA, 15 bp, Homo sapiens
aaatacctttgatat

SEQ ID NO: 299691 - DNA, 15 bp, Homo sapiens
aaaatacctttgata

SEQ ID NO: 299692 - DNA, 15 bp, Homo sapiens
aaaaatacctttgat

SEQ ID NO: 299693 - DNA, 15 bp, Homo sapiens
caaaaatacctttga

SEQ ID NO: 299694 - DNA, 15 bp, Homo sapiens
ccaaaaatacctttg

SEQ ID NO: 299695 - DNA, 15 bp, Homo sapiens
accaaaaataccttt

SEQ ID NO: 299696 - DNA, 15 bp, Homo sapiens
caccaaaaatacctt

SEQ ID NO: 299697 - DNA, 15 bp, Homo sapiens
acaccaaaaatacct

SEQ ID NO: 299698 - DNA, 15 bp, Homo sapiens
gacaccaaaaatacc

SEQ ID NO: 299699 - DNA, 15 bp, Homo sapiens
agacaccaaaaatac

SEQ ID NO: 299700 - DNA, 15 bp, Homo sapiens
aagacaccaaaaata

SEQ ID NO: 299701 - DNA, 15 bp, Homo sapiens
gaagacaccaaaaat

SEQ ID NO: 299702 - DNA, 15 bp, Homo sapiens
ggaagacaccaaaaa

SEQ ID NO: 299703 - DNA, 15 bp, Homo sapiens
aggaagacaccaaaa

SEQ ID NO: 299704 - DNA, 15 bp, Homo sapiens
caggaagacaccaaa

SEQ ID NO: 299705 - DNA, 15 bp, Homo sapiens
acaggaagacaccaa

SEQ ID NO: 299706 - DNA, 15 bp, Homo sapiens
tacaggaagacacca

SEQ ID NO: 299707 - DNA, 15 bp, Homo sapiens
ttacaggaagacacc

SEQ ID NO: 299708 - DNA, 15 bp, Homo sapiens
cttacaggaagacac

SEQ ID NO: 299709 - DNA, 15 bp, Homo sapiens
acttacaggaagaca

SEQ ID NO: 299710 - DNA, 15 bp, Homo sapiens
cacttacaggaagac

SEQ ID NO: 299711 - DNA, 15 bp, Homo sapiens
gcacttacaggaaga

SEQ ID NO: 299712 - DNA, 15 bp, Homo sapiens
agcacttacaggaag

SEQ ID NO: 299713 - DNA, 15 bp, Homo sapiens
tagcacttacaggaa

SEQ ID NO: 299714 - DNA, 15 bp, Homo sapiens
ctagcacttacagga

SEQ ID NO: 299715 - DNA, 15 bp, Homo sapiens
tctagcacttacagg

SEQ ID NO: 299716 - DNA, 15 bp, Homo sapiens
atctagcacttacag

SEQ ID NO: 299717 - DNA, 15 bp, Homo sapiens
aatctagcacttaca

SEQ ID NO: 299718 - DNA, 15 bp, Homo sapiens
aaatctagcacttac

SEQ ID NO: 299719 - DNA, 15 bp, Homo sapiens
taaatctagcactta

SEQ ID NO: 299720 - DNA, 15 bp, Homo sapiens
ctaaatctagcactt

SEQ ID NO: 299721 - DNA, 15 bp, Homo sapiens
tctaaatctagcact

SEQ ID NO: 299722 - DNA, 15 bp, Homo sapiens
ttctaaatctagcac

SEQ ID NO: 299723 - DNA, 15 bp, Homo sapiens
gttctaaatctagca

SEQ ID NO: 299724 - DNA, 15 bp, Homo sapiens
tgttctaaatctagc

SEQ ID NO: 299725 - DNA, 15 bp, Homo sapiens
atgttctaaatctag

SEQ ID NO: 299726 - DNA, 15 bp, Homo sapiens
catgttctaaatcta

SEQ ID NO: 299727 - DNA, 15 bp, Homo sapiens
tcatgttctaaatct

SEQ ID NO: 299728 - DNA, 15 bp, Homo sapiens
atcatgttctaaatc

SEQ ID NO: 299729 - DNA, 15 bp, Homo sapiens
tatcatgttctaaat

SEQ ID NO: 299730 - DNA, 15 bp, Homo sapiens
ttatcatgttctaaa

SEQ ID NO: 299731 - DNA, 15 bp, Homo sapiens
cttatcatgttctaa

SEQ ID NO: 299732 - DNA, 15 bp, Homo sapiens
ccttatcatgttcta

SEQ ID NO: 299733 - DNA, 15 bp, Homo sapiens
tccttatcatgttct

SEQ ID NO: 299734 - DNA, 15 bp, Homo sapiens
ttccttatcatgttc

SEQ ID NO: 299735 - DNA, 15 bp, Homo sapiens
tttccttatcatgtt

SEQ ID NO: 299736 - DNA, 15 bp, Homo sapiens
gtttccttatcatgt

SEQ ID NO: 299737 - DNA, 15 bp, Homo sapiens
cgtttccttatcatg

SEQ ID NO: 299738 - DNA, 15 bp, Homo sapiens
acgtttccttatcat

SEQ ID NO: 299739 - DNA, 15 bp, Homo sapiens
tacgtttccttatca

SEQ ID NO: 299740 - DNA, 15 bp, Homo sapiens
ctacgtttccttatc

SEQ ID NO: 299741 - DNA, 15 bp, Homo sapiens
tctacgtttccttat

SEQ ID NO: 299742 - DNA, 15 bp, Homo sapiens
ttctacgtttcctta

SEQ ID NO: 299743 - DNA, 15 bp, Homo sapiens
attctacgtttcctt

SEQ ID NO: 299744 - DNA, 15 bp, Homo sapiens
tattctacgtttcct

SEQ ID NO: 299745 - DNA, 15 bp, Homo sapiens
ctattctacgtttcc

SEQ ID NO: 299746 - DNA, 15 bp, Homo sapiens
cctattctacgtttc

SEQ ID NO: 299747 - DNA, 15 bp, Homo sapiens
tcctattctacgttt

SEQ ID NO: 299748 - DNA, 15 bp, Homo sapiens
ttcctattctacgtt

SEQ ID NO: 299749 - DNA, 15 bp, Homo sapiens
tttcctattctacgt

SEQ ID NO: 299750 - DNA, 15 bp, Homo sapiens
gtttcctattctacg

SEQ ID NO: 299751 - DNA, 15 bp, Homo sapiens
tgtttcctattctac

SEQ ID NO: 299752 - DNA, 15 bp, Homo sapiens
ctgtttcctattcta

SEQ ID NO: 299753 - DNA, 15 bp, Homo sapiens
gctgtttcctattct

SEQ ID NO: 299754 - DNA, 15 bp, Homo sapiens
agctgtttcctattc

SEQ ID NO: 299755 - DNA, 15 bp, Homo sapiens
cagctgtttcctatt

SEQ ID NO: 299756 - DNA, 15 bp, Homo sapiens
ccagctgtttcctat

SEQ ID NO: 299757 - DNA, 15 bp, Homo sapiens
tccagctgtttccta

SEQ ID NO: 299758 - DNA, 15 bp, Homo sapiens
atccagctgtttcct

SEQ ID NO: 299759 - DNA, 15 bp, Homo sapiens
aatccagctgtttcc

SEQ ID NO: 299760 - DNA, 15 bp, Homo sapiens
aaatccagctgtttc

SEQ ID NO: 299761 - DNA, 15 bp, Homo sapiens
caaatccagctgttt

SEQ ID NO: 299762 - DNA, 15 bp, Homo sapiens
acaaatccagctgtt

SEQ ID NO: 299763 - DNA, 15 bp, Homo sapiens
aacaaatccagctgt

SEQ ID NO: 299764 - DNA, 15 bp, Homo sapiens
aaacaaatccagctg

SEQ ID NO: 299765 - DNA, 15 bp, Homo sapiens
gaaacaaatccagct

SEQ ID NO: 299766 - DNA, 15 bp, Homo sapiens
agaaacaaatccagc

SEQ ID NO: 299767 - DNA, 15 bp, Homo sapiens
aagaaacaaatccag

SEQ ID NO: 299768 - DNA, 15 bp, Homo sapiens
taagaaacaaatcca

SEQ ID NO: 299769 - DNA, 15 bp, Homo sapiens
ctaagaaacaaatcc

SEQ ID NO: 299770 - DNA, 15 bp, Homo sapiens
gctaagaaacaaatc

SEQ ID NO: 299771 - DNA, 15 bp, Homo sapiens
ggctaagaaacaaat

SEQ ID NO: 299772 - DNA, 15 bp, Homo sapiens
aggctaagaaacaaa

SEQ ID NO: 299773 - DNA, 15 bp, Homo sapiens
aaggctaagaaacaa

SEQ ID NO: 299774 - DNA, 15 bp, Homo sapiens
aaaggctaagaaaca

SEQ ID NO: 299775 - DNA, 15 bp, Homo sapiens
aaaaggctaagaaac

SEQ ID NO: 299776 - DNA, 15 bp, Homo sapiens
gaaaaggctaagaaa

SEQ ID NO: 299777 - DNA, 15 bp, Homo sapiens
tgaaaaggctaagaa

SEQ ID NO: 299778 - DNA, 15 bp, Homo sapiens
ttgaaaaggctaaga

SEQ ID NO: 299779 - DNA, 15 bp, Homo sapiens
tttgaaaaggctaag

SEQ ID NO: 299780 - DNA, 15 bp, Homo sapiens
ttttgaaaaggctaa

SEQ ID NO: 299781 - DNA, 15 bp, Homo sapiens
tttttgaaaaggcta

SEQ ID NO: 299782 - DNA, 15 bp, Homo sapiens
ttttttgaaaaggct

SEQ ID NO: 299783 - DNA, 15 bp, Homo sapiens
cttttttgaaaaggc

SEQ ID NO: 299784 - DNA, 15 bp, Homo sapiens
gcttttttgaaaagg

SEQ ID NO: 299785 - DNA, 15 bp, Homo sapiens
ggcttttttgaaaag

SEQ ID NO: 299786 - DNA, 15 bp, Homo sapiens
aggcttttttgaaaa

SEQ ID NO: 299787 - DNA, 15 bp, Homo sapiens
aaggcttttttgaaa

SEQ ID NO: 299788 - DNA, 15 bp, Homo sapiens
aaaggcttttttgaa

SEQ ID NO: 299789 - DNA, 15 bp, Homo sapiens
aaaaggcttttttga

SEQ ID NO: 299790 - DNA, 15 bp, Homo sapiens
gaaaaggcttttttg

SEQ ID NO: 299791 - DNA, 15 bp, Homo sapiens
agaaaaggctttttt

SEQ ID NO: 299792 - DNA, 15 bp, Homo sapiens
aagaaaaggcttttt

SEQ ID NO: 299793 - DNA, 15 bp, Homo sapiens
taagaaaaggctttt

SEQ ID NO: 299794 - DNA, 15 bp, Homo sapiens
gtaagaaaaggcttt

SEQ ID NO: 299795 - DNA, 15 bp, Homo sapiens
agtaagaaaaggctt

SEQ ID NO: 299796 - DNA, 15 bp, Homo sapiens
aagtaagaaaaggct

SEQ ID NO: 299797 - DNA, 15 bp, Homo sapiens
aaagtaagaaaaggc

SEQ ID NO: 299798 - DNA, 15 bp, Homo sapiens
caaagtaagaaaagg

SEQ ID NO: 299799 - DNA, 15 bp, Homo sapiens
gcaaagtaagaaaag

SEQ ID NO: 299800 - DNA, 15 bp, Homo sapiens
agcaaagtaagaaaa

SEQ ID NO: 299801 - DNA, 15 bp, Homo sapiens
tagcaaagtaagaaa

SEQ ID NO: 299802 - DNA, 15 bp, Homo sapiens
ttagcaaagtaagaa

SEQ ID NO: 299803 - DNA, 15 bp, Homo sapiens
cttagcaaagtaaga

SEQ ID NO: 299804 - DNA, 15 bp, Homo sapiens
acttagcaaagtaag

SEQ ID NO: 299805 - DNA, 15 bp, Homo sapiens
aacttagcaaagtaa

SEQ ID NO: 299806 - DNA, 15 bp, Homo sapiens
aaacttagcaaagta

SEQ ID NO: 299807 - DNA, 15 bp, Homo sapiens
gaaacttagcaaagt

SEQ ID NO: 299808 - DNA, 15 bp, Homo sapiens
tgaaacttagcaaag

SEQ ID NO: 299809 - DNA, 15 bp, Homo sapiens
ctgaaacttagcaaa

SEQ ID NO: 299810 - DNA, 15 bp, Homo sapiens
actgaaacttagcaa

SEQ ID NO: 299811 - DNA, 15 bp, Homo sapiens
cactgaaacttagca

SEQ ID NO: 299812 - DNA, 15 bp, Homo sapiens
ccactgaaacttagc

SEQ ID NO: 299813 - DNA, 15 bp, Homo sapiens
accactgaaacttag

SEQ ID NO: 299814 - DNA, 15 bp, Homo sapiens
aaccactgaaactta

SEQ ID NO: 299815 - DNA, 15 bp, Homo sapiens
gaaccactgaaactt

SEQ ID NO: 299816 - DNA, 15 bp, Homo sapiens
agaaccactgaaact

SEQ ID NO: 299817 - DNA, 15 bp, Homo sapiens
aagaaccactgaaac

SEQ ID NO: 299818 - DNA, 15 bp, Homo sapiens
taagaaccactgaaa

SEQ ID NO: 299819 - DNA, 15 bp, Homo sapiens
ataagaaccactgaa

SEQ ID NO: 299820 - DNA, 15 bp, Homo sapiens
gataagaaccactga

SEQ ID NO: 299821 - DNA, 15 bp, Homo sapiens
agataagaaccactg

SEQ ID NO: 299822 - DNA, 15 bp, Homo sapiens
gagataagaaccact

SEQ ID NO: 299823 - DNA, 15 bp, Homo sapiens
ggagataagaaccac

SEQ ID NO: 299824 - DNA, 15 bp, Homo sapiens
tggagataagaacca

SEQ ID NO: 299825 - DNA, 15 bp, Homo sapiens
gtggagataagaacc

SEQ ID NO: 299826 - DNA, 15 bp, Homo sapiens
agtggagataagaac

SEQ ID NO: 299827 - DNA, 15 bp, Homo sapiens
tagtggagataagaa

SEQ ID NO: 299828 - DNA, 15 bp, Homo sapiens
ttagtggagataaga

SEQ ID NO: 299829 - DNA, 15 bp, Homo sapiens
tttagtggagataag

SEQ ID NO: 299830 - DNA, 15 bp, Homo sapiens
atttagtggagataa

SEQ ID NO: 299831 - DNA, 15 bp, Homo sapiens
tatttagtggagata

SEQ ID NO: 299832 - DNA, 15 bp, Homo sapiens
atatttagtggagat

SEQ ID NO: 299833 - DNA, 15 bp, Homo sapiens
tatatttagtggaga

SEQ ID NO: 299834 - DNA, 15 bp, Homo sapiens
ttatatttagtggag

SEQ ID NO: 299835 - DNA, 15 bp, Homo sapiens
gttatatttagtgga

SEQ ID NO: 299836 - DNA, 15 bp, Homo sapiens
tgttatatttagtgg

SEQ ID NO: 299837 - DNA, 15 bp, Homo sapiens
ttgttatatttagtg

SEQ ID NO: 299838 - DNA, 15 bp, Homo sapiens
gttgttatatttagt

SEQ ID NO: 299839 - DNA, 15 bp, Homo sapiens
tgttgttatatttag

SEQ ID NO: 299840 - DNA, 15 bp, Homo sapiens
ttgttgttatattta

SEQ ID NO: 299841 - DNA, 15 bp, Homo sapiens
tttgttgttatattt

SEQ ID NO: 299842 - DNA, 15 bp, Homo sapiens
atttgttgttatatt

SEQ ID NO: 299843 - DNA, 15 bp, Homo sapiens
aatttgttgttatat

SEQ ID NO: 299844 - DNA, 15 bp, Homo sapiens
aaatttgttgttata

SEQ ID NO: 299845 - DNA, 15 bp, Homo sapiens
taaatttgttgttat

SEQ ID NO: 299846 - DNA, 15 bp, Homo sapiens
ataaatttgttgtta

SEQ ID NO: 299847 - DNA, 15 bp, Homo sapiens
gataaatttgttgtt

SEQ ID NO: 299848 - DNA, 15 bp, Homo sapiens
agataaatttgttgt

SEQ ID NO: 299849 - DNA, 15 bp, Homo sapiens
aagataaatttgttg

SEQ ID NO: 299850 - DNA, 15 bp, Homo sapiens
aaagataaatttgtt

SEQ ID NO: 299851 - DNA, 15 bp, Homo sapiens
taaagataaatttgt

SEQ ID NO: 299852 - DNA, 15 bp, Homo sapiens
ttaaagataaatttg

SEQ ID NO: 299853 - DNA, 15 bp, Homo sapiens
cttaaagataaattt

SEQ ID NO: 299854 - DNA, 15 bp, Homo sapiens
tcttaaagataaatt

SEQ ID NO: 299855 - DNA, 15 bp, Homo sapiens
atcttaaagataaat

SEQ ID NO: 299856 - DNA, 15 bp, Homo sapiens
aatcttaaagataaa

SEQ ID NO: 299857 - DNA, 15 bp, Homo sapiens
aaatcttaaagataa

SEQ ID NO: 299858 - DNA, 15 bp, Homo sapiens
aaaatcttaaagata

SEQ ID NO: 299859 - DNA, 15 bp, Homo sapiens
caaaatcttaaagat

SEQ ID NO: 299860 - DNA, 15 bp, Homo sapiens
tcaaaatcttaaaga

SEQ ID NO: 299861 - DNA, 15 bp, Homo sapiens
atcaaaatcttaaag

SEQ ID NO: 299862 - DNA, 15 bp, Homo sapiens
aatcaaaatcttaaa

SEQ ID NO: 299863 - DNA, 15 bp, Homo sapiens
taatcaaaatcttaa

SEQ ID NO: 299864 - DNA, 15 bp, Homo sapiens
ataatcaaaatctta

SEQ ID NO: 299865 - DNA, 15 bp, Homo sapiens
tataatcaaaatctt

SEQ ID NO: 299866 - DNA, 15 bp, Homo sapiens
atataatcaaaatct

SEQ ID NO: 299867 - DNA, 15 bp, Homo sapiens
aatataatcaaaatc

SEQ ID NO: 299868 - DNA, 15 bp, Homo sapiens
gaatataatcaaaat

SEQ ID NO: 299869 - DNA, 15 bp, Homo sapiens
ggaatataatcaaaa

SEQ ID NO: 299870 - DNA, 15 bp, Homo sapiens
aggaatataatcaaa

SEQ ID NO: 299871 - DNA, 15 bp, Homo sapiens
aaggaatataatcaa

SEQ ID NO: 299872 - DNA, 15 bp, Homo sapiens
taaggaatataatca

SEQ ID NO: 299873 - DNA, 15 bp, Homo sapiens
ttaaggaatataatc

SEQ ID NO: 299874 - DNA, 15 bp, Homo sapiens
cttaaggaatataat

SEQ ID NO: 299875 - DNA, 15 bp, Homo sapiens
tcttaaggaatataa

SEQ ID NO: 299876 - DNA, 15 bp, Homo sapiens
ttcttaaggaatata

SEQ ID NO: 299877 - DNA, 15 bp, Homo sapiens
attcttaaggaatat

SEQ ID NO: 299878 - DNA, 15 bp, Homo sapiens
aattcttaaggaata

SEQ ID NO: 299879 - DNA, 15 bp, Homo sapiens
gaattcttaaggaat

SEQ ID NO: 299880 - DNA, 15 bp, Homo sapiens
agaattcttaaggaa

SEQ ID NO: 299881 - DNA, 15 bp, Homo sapiens
aagaattcttaagga

SEQ ID NO: 299882 - DNA, 15 bp, Homo sapiens
gaagaattcttaagg

SEQ ID NO: 299883 - DNA, 15 bp, Homo sapiens
tgaagaattcttaag

SEQ ID NO: 299884 - DNA, 15 bp, Homo sapiens
ttgaagaattcttaa

SEQ ID NO: 299885 - DNA, 15 bp, Homo sapiens
tttgaagaattctta

SEQ ID NO: 299886 - DNA, 15 bp, Homo sapiens
ctttgaagaattctt

SEQ ID NO: 299887 - DNA, 15 bp, Homo sapiens
tctttgaagaattct

SEQ ID NO: 299888 - DNA, 15 bp, Homo sapiens
gtctttgaagaattc

SEQ ID NO: 299889 - DNA, 15 bp, Homo sapiens
agtctttgaagaatt

SEQ ID NO: 299890 - DNA, 15 bp, Homo sapiens
tagtctttgaagaat

SEQ ID NO: 299891 - DNA, 15 bp, Homo sapiens
ttagtctttgaagaa

SEQ ID NO: 299892 - DNA, 15 bp, Homo sapiens
gttagtctttgaaga

SEQ ID NO: 299893 - DNA, 15 bp, Homo sapiens
tgttagtctttgaag

SEQ ID NO: 299894 - DNA, 15 bp, Homo sapiens
atgttagtctttgaa

SEQ ID NO: 299895 - DNA, 15 bp, Homo sapiens
tatgttagtctttga

SEQ ID NO: 299896 - DNA, 15 bp, Homo sapiens
ttatgttagtctttg

SEQ ID NO: 299897 - DNA, 15 bp, Homo sapiens
tttatgttagtcttt

SEQ ID NO: 299898 - DNA, 15 bp, Homo sapiens
atttatgttagtctt

SEQ ID NO: 299899 - DNA, 15 bp, Homo sapiens
gatttatgttagtct

SEQ ID NO: 299900 - DNA, 15 bp, Homo sapiens
agatttatgttagtc

SEQ ID NO: 299901 - DNA, 15 bp, Homo sapiens
cagatttatgttagt

SEQ ID NO: 299902 - DNA, 15 bp, Homo sapiens
acagatttatgttag

SEQ ID NO: 299903 - DNA, 15 bp, Homo sapiens
gacagatttatgtta

SEQ ID NO: 299904 - DNA, 15 bp, Homo sapiens
agacagatttatgtt

SEQ ID NO: 299905 - DNA, 15 bp, Homo sapiens
aagacagatttatgt

SEQ ID NO: 299906 - DNA, 15 bp, Homo sapiens
caagacagatttatg

SEQ ID NO: 299907 - DNA, 15 bp, Homo sapiens
gcaagacagatttat

SEQ ID NO: 299908 - DNA, 15 bp, Homo sapiens
agcaagacagattta

SEQ ID NO: 299909 - DNA, 15 bp, Homo sapiens
tagcaagacagattt

SEQ ID NO: 299910 - DNA, 15 bp, Homo sapiens
atagcaagacagatt

SEQ ID NO: 299911 - DNA, 15 bp, Homo sapiens
gatagcaagacagat

SEQ ID NO: 299912 - DNA, 15 bp, Homo sapiens
agatagcaagacaga

SEQ ID NO: 299913 - DNA, 15 bp, Homo sapiens
aagatagcaagacag

SEQ ID NO: 299914 - DNA, 15 bp, Homo sapiens
aaagatagcaagaca

SEQ ID NO: 299915 - DNA, 15 bp, Homo sapiens
aaaagatagcaagac

SEQ ID NO: 299916 - DNA, 15 bp, Homo sapiens
taaaagatagcaaga

SEQ ID NO: 299917 - DNA, 15 bp, Homo sapiens
ttaaaagatagcaag

SEQ ID NO: 299918 - DNA, 15 bp, Homo sapiens
cttaaaagatagcaa

SEQ ID NO: 299919 - DNA, 15 bp, Homo sapiens
acttaaaagatagca

SEQ ID NO: 299920 - DNA, 15 bp, Homo sapiens
gacttaaaagatagc

SEQ ID NO: 299921 - DNA, 15 bp, Homo sapiens
agacttaaaagatag

SEQ ID NO: 299922 - DNA, 15 bp, Homo sapiens
cagacttaaaagata

SEQ ID NO: 299923 - DNA, 15 bp, Homo sapiens
ccagacttaaaagat

SEQ ID NO: 299924 - DNA, 15 bp, Homo sapiens
accagacttaaaaga

SEQ ID NO: 299925 - DNA, 15 bp, Homo sapiens
gaccagacttaaaag

SEQ ID NO: 299926 - DNA, 15 bp, Homo sapiens
tgaccagacttaaaa

SEQ ID NO: 299927 - DNA, 15 bp, Homo sapiens
atgaccagacttaaa

SEQ ID NO: 299928 - DNA, 15 bp, Homo sapiens
aatgaccagacttaa

SEQ ID NO: 299929 - DNA, 15 bp, Homo sapiens
aaatgaccagactta

SEQ ID NO: 299930 - DNA, 15 bp, Homo sapiens
aaaatgaccagactt

SEQ ID NO: 299931 - DNA, 15 bp, Homo sapiens
taaaatgaccagact

SEQ ID NO: 299932 - DNA, 15 bp, Homo sapiens
ataaaatgaccagac

SEQ ID NO: 299933 - DNA, 15 bp, Homo sapiens
gataaaatgaccaga

SEQ ID NO: 299934 - DNA, 15 bp, Homo sapiens
tgataaaatgaccag

SEQ ID NO: 299935 - DNA, 15 bp, Homo sapiens
atgataaaatgacca

SEQ ID NO: 299936 - DNA, 15 bp, Homo sapiens
aatgataaaatgacc

SEQ ID NO: 299937 - DNA, 15 bp, Homo sapiens
taatgataaaatgac

SEQ ID NO: 299938 - DNA, 15 bp, Homo sapiens
ataatgataaaatga

SEQ ID NO: 299939 - DNA, 15 bp, Homo sapiens
cataatgataaaatg

SEQ ID NO: 299940 - DNA, 15 bp, Homo sapiens
gcataatgataaaat

SEQ ID NO: 299941 - DNA, 15 bp, Homo sapiens
ggcataatgataaaa

SEQ ID NO: 299942 - DNA, 15 bp, Homo sapiens
gggcataatgataaa

SEQ ID NO: 299943 - DNA, 15 bp, Homo sapiens
agggcataatgataa

SEQ ID NO: 299944 - DNA, 15 bp, Homo sapiens
aagggcataatgata

SEQ ID NO: 299945 - DNA, 15 bp, Homo sapiens
aaagggcataatgat

SEQ ID NO: 299946 - DNA, 15 bp, Homo sapiens
aaaagggcataatga

SEQ ID NO: 299947 - DNA, 15 bp, Homo sapiens
gaaaagggcataatg

SEQ ID NO: 299948 - DNA, 15 bp, Homo sapiens
agaaaagggcataat

SEQ ID NO: 299949 - DNA, 15 bp, Homo sapiens
aagaaaagggcataa

SEQ ID NO: 299950 - DNA, 15 bp, Homo sapiens
taagaaaagggcata

SEQ ID NO: 299951 - DNA, 15 bp, Homo sapiens
ataagaaaagggcat

SEQ ID NO: 299952 - DNA, 15 bp, Homo sapiens
aataagaaaagggca

SEQ ID NO: 299953 - DNA, 15 bp, Homo sapiens
aaataagaaaagggc

SEQ ID NO: 299954 - DNA, 15 bp, Homo sapiens
aaaataagaaaaggg

SEQ ID NO: 299955 - DNA, 15 bp, Homo sapiens
taaaataagaaaagg

SEQ ID NO: 299956 - DNA, 15 bp, Homo sapiens
ttaaaataagaaaag

SEQ ID NO: 299957 - DNA, 15 bp, Homo sapiens
cttaaaataagaaaa

SEQ ID NO: 299958 - DNA, 15 bp, Homo sapiens
tcttaaaataagaaa

SEQ ID NO: 299959 - DNA, 15 bp, Homo sapiens
atcttaaaataagaa

SEQ ID NO: 299960 - DNA, 15 bp, Homo sapiens
tatcttaaaataaga

SEQ ID NO: 299961 - DNA, 15 bp, Homo sapiens
ttatcttaaaataag

SEQ ID NO: 299962 - DNA, 15 bp, Homo sapiens
attatcttaaaataa

SEQ ID NO: 299963 - DNA, 15 bp, Homo sapiens
aattatcttaaaata

SEQ ID NO: 299964 - DNA, 15 bp, Homo sapiens
aaattatcttaaaat

SEQ ID NO: 299965 - DNA, 15 bp, Homo sapiens
taaattatcttaaaa

SEQ ID NO: 299966 - DNA, 15 bp, Homo sapiens
ttaaattatcttaaa

SEQ ID NO: 299967 - DNA, 15 bp, Homo sapiens
attaaattatcttaa

SEQ ID NO: 299968 - DNA, 15 bp, Homo sapiens
aattaaattatctta

SEQ ID NO: 299969 - DNA, 15 bp, Homo sapiens
caattaaattatctt

SEQ ID NO: 299970 - DNA, 15 bp, Homo sapiens
acaattaaattatct

SEQ ID NO: 299971 - DNA, 15 bp, Homo sapiens
gacaattaaattatc

SEQ ID NO: 299972 - DNA, 15 bp, Homo sapiens
agacaattaaattat

SEQ ID NO: 299973 - DNA, 15 bp, Homo sapiens
tagacaattaaatta

SEQ ID NO: 299974 - DNA, 15 bp, Homo sapiens
ttagacaattaaatt

SEQ ID NO: 299975 - DNA, 15 bp, Homo sapiens
tttagacaattaaat

SEQ ID NO: 299976 - DNA, 15 bp, Homo sapiens
ttttagacaattaaa

SEQ ID NO: 299977 - DNA, 15 bp, Homo sapiens
cttttagacaattaa

SEQ ID NO: 299978 - DNA, 15 bp, Homo sapiens
acttttagacaatta

SEQ ID NO: 299979 - DNA, 15 bp, Homo sapiens
aacttttagacaatt

SEQ ID NO: 299980 - DNA, 15 bp, Homo sapiens
aaacttttagacaat

SEQ ID NO: 299981 - DNA, 15 bp, Homo sapiens
aaaacttttagacaa

SEQ ID NO: 299982 - DNA, 15 bp, Homo sapiens
aaaaacttttagaca

SEQ ID NO: 299983 - DNA, 15 bp, Homo sapiens
taaaaacttttagac

SEQ ID NO: 299984 - DNA, 15 bp, Homo sapiens
ttaaaaacttttaga

SEQ ID NO: 299985 - DNA, 15 bp, Homo sapiens
tttaaaaacttttag

SEQ ID NO: 299986 - DNA, 15 bp, Homo sapiens
atttaaaaactttta

SEQ ID NO: 299987 - DNA, 15 bp, Homo sapiens
aatttaaaaactttt

SEQ ID NO: 299988 - DNA, 15 bp, Homo sapiens
aaatttaaaaacttt

SEQ ID NO: 299989 - DNA, 15 bp, Homo sapiens
taaatttaaaaactt

SEQ ID NO: 299990 - DNA, 15 bp, Homo sapiens
gtaaatttaaaaact

SEQ ID NO: 299991 - DNA, 15 bp, Homo sapiens
tgtaaatttaaaaac

SEQ ID NO: 299992 - DNA, 15 bp, Homo sapiens
atgtaaatttaaaaa

SEQ ID NO: 299993 - DNA, 15 bp, Homo sapiens
tatgtaaatttaaaa

SEQ ID NO: 299994 - DNA, 15 bp, Homo sapiens
atatgtaaatttaaa

SEQ ID NO: 299995 - DNA, 15 bp, Homo sapiens
aatatgtaaatttaa

SEQ ID NO: 299996 - DNA, 15 bp, Homo sapiens
taatatgtaaattta

SEQ ID NO: 299997 - DNA, 15 bp, Homo sapiens
ttaatatgtaaattt

SEQ ID NO: 299998 - DNA, 15 bp, Homo sapiens
cttaatatgtaaatt

SEQ ID NO: 299999 - DNA, 15 bp, Homo sapiens
acttaatatgtaaat

SEQ ID NO: 300000 - DNA, 15 bp, Homo sapiens
tacttaatatgtaaa

SEQ ID NO: 300001 - DNA, 15 bp, Homo sapiens
ttacttaatatgtaa

SEQ ID NO: 300002 - DNA, 15 bp, Homo sapiens
attacttaatatgta

SEQ ID NO: 300003 - DNA, 15 bp, Homo sapiens
cattacttaatatgt

SEQ ID NO: 300004 - DNA, 15 bp, Homo sapiens
tcattacttaatatg

SEQ ID NO: 300005 - DNA, 15 bp, Homo sapiens
atcattacttaatat

SEQ ID NO: 300006 - DNA, 15 bp, Homo sapiens
tatcattacttaata

SEQ ID NO: 300007 - DNA, 15 bp, Homo sapiens
ctatcattacttaat

SEQ ID NO: 300008 - DNA, 15 bp, Homo sapiens
actatcattacttaa

SEQ ID NO: 300009 - DNA, 15 bp, Homo sapiens
aactatcattactta

SEQ ID NO: 300010 - DNA, 15 bp, Homo sapiens
aaactatcattactt

SEQ ID NO: 300011 - DNA, 15 bp, Homo sapiens
aaaactatcattact

SEQ ID NO: 300012 - DNA, 15 bp, Homo sapiens
aaaaactatcattac

SEQ ID NO: 300013 - DNA, 15 bp, Homo sapiens
taaaaactatcatta

SEQ ID NO: 300014 - DNA, 15 bp, Homo sapiens
ataaaaactatcatt

SEQ ID NO: 300015 - DNA, 15 bp, Homo sapiens
tataaaaactatcat

SEQ ID NO: 300016 - DNA, 15 bp, Homo sapiens
atataaaaactatca

SEQ ID NO: 300017 - DNA, 15 bp, Homo sapiens
aatataaaaactatc

SEQ ID NO: 300018 - DNA, 15 bp, Homo sapiens
taatataaaaactat

SEQ ID NO: 300019 - DNA, 15 bp, Homo sapiens
ctaatataaaaacta

SEQ ID NO: 300020 - DNA, 15 bp, Homo sapiens
cctaatataaaaact

SEQ ID NO: 300021 - DNA, 15 bp, Homo sapiens
acctaatataaaaac

SEQ ID NO: 300022 - DNA, 15 bp, Homo sapiens
aacctaatataaaaa

SEQ ID NO: 300023 - DNA, 15 bp, Homo sapiens
aaacctaatataaaa

SEQ ID NO: 300024 - DNA, 15 bp, Homo sapiens
aaaacctaatataaa

SEQ ID NO: 300025 - DNA, 15 bp, Homo sapiens
taaaacctaatataa

SEQ ID NO: 300026 - DNA, 15 bp, Homo sapiens
ataaaacctaatata

SEQ ID NO: 300027 - DNA, 15 bp, Homo sapiens
gataaaacctaatat

SEQ ID NO: 300028 - DNA, 15 bp, Homo sapiens
tgataaaacctaata

SEQ ID NO: 300029 - DNA, 15 bp, Homo sapiens
atgataaaacctaat

SEQ ID NO: 300030 - DNA, 15 bp, Homo sapiens
aatgataaaacctaa

SEQ ID NO: 300031 - DNA, 15 bp, Homo sapiens
aaatgataaaaccta

SEQ ID NO: 300032 - DNA, 15 bp, Homo sapiens
taaatgataaaacct

SEQ ID NO: 300033 - DNA, 15 bp, Homo sapiens
ctaaatgataaaacc

SEQ ID NO: 300034 - DNA, 15 bp, Homo sapiens
actaaatgataaaac

SEQ ID NO: 300035 - DNA, 15 bp, Homo sapiens
aactaaatgataaaa

SEQ ID NO: 300036 - DNA, 15 bp, Homo sapiens
aaactaaatgataaa

SEQ ID NO: 300037 - DNA, 15 bp, Homo sapiens
aaaactaaatgataa

SEQ ID NO: 300038 - DNA, 15 bp, Homo sapiens
aaaaactaaatgata

SEQ ID NO: 300039 - DNA, 15 bp, Homo sapiens
aaaaaactaaatgat

SEQ ID NO: 300040 - DNA, 15 bp, Homo sapiens
aaaaaaactaaatga

SEQ ID NO: 300041 - DNA, 15 bp, Homo sapiens
gaaaaaaactaaatg

SEQ ID NO: 300042 - DNA, 15 bp, Homo sapiens
agaaaaaaactaaat

SEQ ID NO: 300043 - DNA, 15 bp, Homo sapiens
aagaaaaaaactaaa

SEQ ID NO: 300044 - DNA, 15 bp, Homo sapiens
aaagaaaaaaactaa

SEQ ID NO: 300045 - DNA, 15 bp, Homo sapiens
aaaagaaaaaaacta

SEQ ID NO: 300046 - DNA, 15 bp, Homo sapiens
taaaagaaaaaaact

SEQ ID NO: 300047 - DNA, 15 bp, Homo sapiens
ttaaaagaaaaaaac

SEQ ID NO: 300048 - DNA, 15 bp, Homo sapiens
tttaaaagaaaaaaa

SEQ ID NO: 300049 - DNA, 15 bp, Homo sapiens
gtttaaaagaaaaaa

SEQ ID NO: 300050 - DNA, 15 bp, Homo sapiens
tgtttaaaagaaaaa

SEQ ID NO: 300051 - DNA, 15 bp, Homo sapiens
atgtttaaaagaaaa

SEQ ID NO: 300052 - DNA, 15 bp, Homo sapiens
aatgtttaaaagaaa

SEQ ID NO: 300053 - DNA, 15 bp, Homo sapiens
taatgtttaaaagaa

SEQ ID NO: 300054 - DNA, 15 bp, Homo sapiens
ttaatgtttaaaaga

SEQ ID NO: 300055 - DNA, 15 bp, Homo sapiens
cttaatgtttaaaag

SEQ ID NO: 300056 - DNA, 15 bp, Homo sapiens
tcttaatgtttaaaa

SEQ ID NO: 300057 - DNA, 15 bp, Homo sapiens
atcttaatgtttaaa

SEQ ID NO: 300058 - DNA, 15 bp, Homo sapiens
catcttaatgtttaa

SEQ ID NO: 300059 - DNA, 15 bp, Homo sapiens
tcatcttaatgttta

SEQ ID NO: 300060 - DNA, 15 bp, Homo sapiens
ttcatcttaatgttt

SEQ ID NO: 300061 - DNA, 15 bp, Homo sapiens
tttcatcttaatgtt

SEQ ID NO: 300062 - DNA, 15 bp, Homo sapiens
ttttcatcttaatgt

SEQ ID NO: 300063 - DNA, 15 bp, Homo sapiens
tttttcatcttaatg

SEQ ID NO: 300064 - DNA, 15 bp, Homo sapiens
ctttttcatcttaat

SEQ ID NO: 300065 - DNA, 15 bp, Homo sapiens
cctttttcatcttaa

SEQ ID NO: 300066 - DNA, 15 bp, Homo sapiens
acctttttcatctta

SEQ ID NO: 300067 - DNA, 15 bp, Homo sapiens
cacctttttcatctt

SEQ ID NO: 300068 - DNA, 15 bp, Homo sapiens
ccacctttttcatct

SEQ ID NO: 300069 - DNA, 15 bp, Homo sapiens
tccacctttttcatc

SEQ ID NO: 300070 - DNA, 15 bp, Homo sapiens
ctccacctttttcat

SEQ ID NO: 300071 - DNA, 15 bp, Homo sapiens
tctccacctttttca

SEQ ID NO: 300072 - DNA, 15 bp, Homo sapiens
ttctccacctttttc

SEQ ID NO: 300073 - DNA, 15 bp, Homo sapiens
cttctccaccttttt

SEQ ID NO: 300074 - DNA, 15 bp, Homo sapiens
acttctccacctttt

SEQ ID NO: 300075 - DNA, 15 bp, Homo sapiens
cacttctccaccttt

SEQ ID NO: 300076 - DNA, 15 bp, Homo sapiens
tcacttctccacctt

SEQ ID NO: 300077 - DNA, 15 bp, Homo sapiens
ttcacttctccacct

SEQ ID NO: 300078 - DNA, 15 bp, Homo sapiens
tttcacttctccacc

SEQ ID NO: 300079 - DNA, 15 bp, Homo sapiens
atttcacttctccac

SEQ ID NO: 300080 - DNA, 15 bp, Homo sapiens
aatttcacttctcca

SEQ ID NO: 300081 - DNA, 15 bp, Homo sapiens
taatttcacttctcc

SEQ ID NO: 300082 - DNA, 15 bp, Homo sapiens
gtaatttcacttctc

SEQ ID NO: 300083 - DNA, 15 bp, Homo sapiens
agtaatttcacttct

SEQ ID NO: 300084 - DNA, 15 bp, Homo sapiens
aagtaatttcacttc

SEQ ID NO: 300085 - DNA, 15 bp, Homo sapiens
caagtaatttcactt

SEQ ID NO: 300086 - DNA, 15 bp, Homo sapiens
acaagtaatttcact

SEQ ID NO: 300087 - DNA, 15 bp, Homo sapiens
gacaagtaatttcac

SEQ ID NO: 300088 - DNA, 15 bp, Homo sapiens
agacaagtaatttca

SEQ ID NO: 300089 - DNA, 15 bp, Homo sapiens
aagacaagtaatttc

SEQ ID NO: 300090 - DNA, 15 bp, Homo sapiens
aaagacaagtaattt

SEQ ID NO: 300091 - DNA, 15 bp, Homo sapiens
aaaagacaagtaatt

SEQ ID NO: 300092 - DNA, 15 bp, Homo sapiens
taaaagacaagtaat

SEQ ID NO: 300093 - DNA, 15 bp, Homo sapiens
gtaaaagacaagtaa

SEQ ID NO: 300094 - DNA, 15 bp, Homo sapiens
tgtaaaagacaagta

SEQ ID NO: 300095 - DNA, 15 bp, Homo sapiens
atgtaaaagacaagt

SEQ ID NO: 300096 - DNA, 15 bp, Homo sapiens
catgtaaaagacaag

SEQ ID NO: 300097 - DNA, 15 bp, Homo sapiens
tcatgtaaaagacaa

SEQ ID NO: 300098 - DNA, 15 bp, Homo sapiens
ctcatgtaaaagaca

SEQ ID NO: 300099 - DNA, 15 bp, Homo sapiens
actcatgtaaaagac

SEQ ID NO: 300100 - DNA, 15 bp, Homo sapiens
gactcatgtaaaaga

SEQ ID NO: 300101 - DNA, 15 bp, Homo sapiens
tgactcatgtaaaag

SEQ ID NO: 300102 - DNA, 15 bp, Homo sapiens
atgactcatgtaaaa

SEQ ID NO: 300103 - DNA, 15 bp, Homo sapiens
tatgactcatgtaaa

SEQ ID NO: 300104 - DNA, 15 bp, Homo sapiens
ttatgactcatgtaa

SEQ ID NO: 300105 - DNA, 15 bp, Homo sapiens
tttatgactcatgta

SEQ ID NO: 300106 - DNA, 15 bp, Homo sapiens
gtttatgactcatgt

SEQ ID NO: 300107 - DNA, 15 bp, Homo sapiens
tgtttatgactcatg

SEQ ID NO: 300108 - DNA, 15 bp, Homo sapiens
ttgtttatgactcat

SEQ ID NO: 300109 - DNA, 15 bp, Homo sapiens
tttgtttatgactca

SEQ ID NO: 300110 - DNA, 15 bp, Homo sapiens
ttttgtttatgactc

SEQ ID NO: 300111 - DNA, 15 bp, Homo sapiens
tttttgtttatgact

SEQ ID NO: 300112 - DNA, 15 bp, Homo sapiens
atttttgtttatgac

SEQ ID NO: 300113 - DNA, 15 bp, Homo sapiens
catttttgtttatga

SEQ ID NO: 300114 - DNA, 15 bp, Homo sapiens
tcatttttgtttatg

SEQ ID NO: 300115 - DNA, 15 bp, Homo sapiens
ttcatttttgtttat

SEQ ID NO: 300116 - DNA, 15 bp, Homo sapiens
gttcatttttgttta

SEQ ID NO: 300117 - DNA, 15 bp, Homo sapiens
tgttcatttttgttt

SEQ ID NO: 300118 - DNA, 15 bp, Homo sapiens
atgttcatttttgtt

SEQ ID NO: 300119 - DNA, 15 bp, Homo sapiens
tatgttcatttttgt

SEQ ID NO: 300120 - DNA, 15 bp, Homo sapiens
ctatgttcatttttg

SEQ ID NO: 300121 - DNA, 15 bp, Homo sapiens
cctatgttcattttt

SEQ ID NO: 300122 - DNA, 15 bp, Homo sapiens
tcctatgttcatttt

SEQ ID NO: 300123 - DNA, 15 bp, Homo sapiens
atcctatgttcattt

SEQ ID NO: 300124 - DNA, 15 bp, Homo sapiens
tatcctatgttcatt

SEQ ID NO: 300125 - DNA, 15 bp, Homo sapiens
gtatcctatgttcat

SEQ ID NO: 300126 - DNA, 15 bp, Homo sapiens
tgtatcctatgttca

SEQ ID NO: 300127 - DNA, 15 bp, Homo sapiens
gtgtatcctatgttc

SEQ ID NO: 300128 - DNA, 15 bp, Homo sapiens
agtgtatcctatgtt

SEQ ID NO: 300129 - DNA, 15 bp, Homo sapiens
tagtgtatcctatgt

SEQ ID NO: 300130 - DNA, 15 bp, Homo sapiens
ttagtgtatcctatg

SEQ ID NO: 300131 - DNA, 15 bp, Homo sapiens
attagtgtatcctat

SEQ ID NO: 300132 - DNA, 15 bp, Homo sapiens
gattagtgtatccta

SEQ ID NO: 300133 - DNA, 15 bp, Homo sapiens
ggattagtgtatcct

SEQ ID NO: 300134 - DNA, 15 bp, Homo sapiens
tggattagtgtatcc

SEQ ID NO: 300135 - DNA, 15 bp, Homo sapiens
ttggattagtgtatc

SEQ ID NO: 300136 - DNA, 15 bp, Homo sapiens
attggattagtgtat

SEQ ID NO: 300137 - DNA, 15 bp, Homo sapiens
tattggattagtgta

SEQ ID NO: 300138 - DNA, 15 bp, Homo sapiens
gtattggattagtgt

SEQ ID NO: 300139 - DNA, 15 bp, Homo sapiens
agtattggattagtg

SEQ ID NO: 300140 - DNA, 15 bp, Homo sapiens
cagtattggattagt

SEQ ID NO: 300141 - DNA, 15 bp, Homo sapiens
tcagtattggattag

SEQ ID NO: 300142 - DNA, 15 bp, Homo sapiens
ttcagtattggatta

SEQ ID NO: 300143 - DNA, 15 bp, Homo sapiens
gttcagtattggatt

SEQ ID NO: 300144 - DNA, 15 bp, Homo sapiens
agttcagtattggat

SEQ ID NO: 300145 - DNA, 15 bp, Homo sapiens
aagttcagtattgga

SEQ ID NO: 300146 - DNA, 15 bp, Homo sapiens
taagttcagtattgg

SEQ ID NO: 300147 - DNA, 15 bp, Homo sapiens
gtaagttcagtattg

SEQ ID NO: 300148 - DNA, 15 bp, Homo sapiens
agtaagttcagtatt

SEQ ID NO: 300149 - DNA, 15 bp, Homo sapiens
tagtaagttcagtat

SEQ ID NO: 300150 - DNA, 15 bp, Homo sapiens
atagtaagttcagta

SEQ ID NO: 300151 - DNA, 15 bp, Homo sapiens
gatagtaagttcagt

SEQ ID NO: 300152 - DNA, 15 bp, Homo sapiens
agatagtaagttcag

SEQ ID NO: 300153 - DNA, 15 bp, Homo sapiens
cagatagtaagttca

SEQ ID NO: 300154 - DNA, 15 bp, Homo sapiens
acagatagtaagttc

SEQ ID NO: 300155 - DNA, 15 bp, Homo sapiens
aacagatagtaagtt

SEQ ID NO: 300156 - DNA, 15 bp, Homo sapiens
gaacagatagtaagt

SEQ ID NO: 300157 - DNA, 15 bp, Homo sapiens
agaacagatagtaag

SEQ ID NO: 300158 - DNA, 15 bp, Homo sapiens
aagaacagatagtaa

SEQ ID NO: 300159 - DNA, 15 bp, Homo sapiens
caagaacagatagta

SEQ ID NO: 300160 - DNA, 15 bp, Homo sapiens
tcaagaacagatagt

SEQ ID NO: 300161 - DNA, 15 bp, Homo sapiens
ttcaagaacagatag

SEQ ID NO: 300162 - DNA, 15 bp, Homo sapiens
tttcaagaacagata

SEQ ID NO: 300163 - DNA, 15 bp, Homo sapiens
ttttcaagaacagat

SEQ ID NO: 300164 - DNA, 15 bp, Homo sapiens
attttcaagaacaga

SEQ ID NO: 300165 - DNA, 15 bp, Homo sapiens
tattttcaagaacag

SEQ ID NO: 300166 - DNA, 15 bp, Homo sapiens
atattttcaagaaca

SEQ ID NO: 300167 - DNA, 15 bp, Homo sapiens
tatattttcaagaac

SEQ ID NO: 300168 - DNA, 15 bp, Homo sapiens
ttatattttcaagaa

SEQ ID NO: 300169 - DNA, 15 bp, Homo sapiens
attatattttcaaga

SEQ ID NO: 300170 - DNA, 15 bp, Homo sapiens
aattatattttcaag

SEQ ID NO: 300171 - DNA, 15 bp, Homo sapiens
aaattatattttcaa

SEQ ID NO: 300172 - DNA, 15 bp, Homo sapiens
aaaattatattttca

SEQ ID NO: 300173 - DNA, 15 bp, Homo sapiens
aaaaattatattttc

SEQ ID NO: 300174 - DNA, 15 bp, Homo sapiens
aaaaaattatatttt

SEQ ID NO: 300175 - DNA, 15 bp, Homo sapiens
aaaaaaattatattt

SEQ ID NO: 300176 - DNA, 15 bp, Homo sapiens
caaaaaaattatatt

SEQ ID NO: 300177 - DNA, 15 bp, Homo sapiens
gcaaaaaaattatat

SEQ ID NO: 300178 - DNA, 15 bp, Homo sapiens
tgcaaaaaaattata

SEQ ID NO: 300179 - DNA, 15 bp, Homo sapiens
atgcaaaaaaattat

SEQ ID NO: 300180 - DNA, 15 bp, Homo sapiens
aatgcaaaaaaatta

SEQ ID NO: 300181 - DNA, 15 bp, Homo sapiens
taatgcaaaaaaatt

SEQ ID NO: 300182 - DNA, 15 bp, Homo sapiens
ataatgcaaaaaaat

SEQ ID NO: 300183 - DNA, 15 bp, Homo sapiens
gataatgcaaaaaaa

SEQ ID NO: 300184 - DNA, 15 bp, Homo sapiens
agataatgcaaaaaa

SEQ ID NO: 300185 - DNA, 15 bp, Homo sapiens
aagataatgcaaaaa

SEQ ID NO: 300186 - DNA, 15 bp, Homo sapiens
aaagataatgcaaaa

SEQ ID NO: 300187 - DNA, 15 bp, Homo sapiens
aaaagataatgcaaa

SEQ ID NO: 300188 - DNA, 15 bp, Homo sapiens
aaaaagataatgcaa

SEQ ID NO: 300189 - DNA, 15 bp, Homo sapiens
gaaaaagataatgca

SEQ ID NO: 300190 - DNA, 15 bp, Homo sapiens
tgaaaaagataatgc

SEQ ID NO: 300191 - DNA, 15 bp, Homo sapiens
atgaaaaagataatg

SEQ ID NO: 300192 - DNA, 15 bp, Homo sapiens
tatgaaaaagataat

SEQ ID NO: 300193 - DNA, 15 bp, Homo sapiens
ctatgaaaaagataa

SEQ ID NO: 300194 - DNA, 15 bp, Homo sapiens
cctatgaaaaagata

SEQ ID NO: 300195 - DNA, 15 bp, Homo sapiens
tcctatgaaaaagat

SEQ ID NO: 300196 - DNA, 15 bp, Homo sapiens
ttcctatgaaaaaga

SEQ ID NO: 300197 - DNA, 15 bp, Homo sapiens
attcctatgaaaaag

SEQ ID NO: 300198 - DNA, 15 bp, Homo sapiens
tattcctatgaaaaa

SEQ ID NO: 300199 - DNA, 15 bp, Homo sapiens
atattcctatgaaaa

SEQ ID NO: 300200 - DNA, 15 bp, Homo sapiens
gatattcctatgaaa

SEQ ID NO: 300201 - DNA, 15 bp, Homo sapiens
tgatattcctatgaa

SEQ ID NO: 300202 - DNA, 15 bp, Homo sapiens
ctgatattcctatga

SEQ ID NO: 300203 - DNA, 15 bp, Homo sapiens
tctgatattcctatg

SEQ ID NO: 300204 - DNA, 15 bp, Homo sapiens
gtctgatattcctat

SEQ ID NO: 300205 - DNA, 15 bp, Homo sapiens
tgtctgatattccta

SEQ ID NO: 300206 - DNA, 15 bp, Homo sapiens
gtgtctgatattcct

SEQ ID NO: 300207 - DNA, 15 bp, Homo sapiens
ggtgtctgatattcc

SEQ ID NO: 300208 - DNA, 15 bp, Homo sapiens
aggtgtctgatattc

SEQ ID NO: 300209 - DNA, 15 bp, Homo sapiens
aaggtgtctgatatt

SEQ ID NO: 300210 - DNA, 15 bp, Homo sapiens
aaaggtgtctgatat

SEQ ID NO: 300211 - DNA, 15 bp, Homo sapiens
taaaggtgtctgata

SEQ ID NO: 300212 - DNA, 15 bp, Homo sapiens
ttaaaggtgtctgat

SEQ ID NO: 300213 - DNA, 15 bp, Homo sapiens
attaaaggtgtctga

SEQ ID NO: 300214 - DNA, 15 bp, Homo sapiens
tattaaaggtgtctg

SEQ ID NO: 300215 - DNA, 15 bp, Homo sapiens
ctattaaaggtgtct

SEQ ID NO: 300216 - DNA, 15 bp, Homo sapiens
actattaaaggtgtc

SEQ ID NO: 300217 - DNA, 15 bp, Homo sapiens
cactattaaaggtgt

SEQ ID NO: 300218 - DNA, 15 bp, Homo sapiens
acactattaaaggtg

SEQ ID NO: 300219 - DNA, 15 bp, Homo sapiens
tacactattaaaggt

SEQ ID NO: 300220 - DNA, 15 bp, Homo sapiens
gtacactattaaagg

SEQ ID NO: 300221 - DNA, 15 bp, Homo sapiens
tgtacactattaaag

SEQ ID NO: 300222 - DNA, 15 bp, Homo sapiens
gtgtacactattaaa

SEQ ID NO: 300223 - DNA, 15 bp, Homo sapiens
agtgtacactattaa

SEQ ID NO: 300224 - DNA, 15 bp, Homo sapiens
aagtgtacactatta

SEQ ID NO: 300225 - DNA, 15 bp, Homo sapiens
aaagtgtacactatt

SEQ ID NO: 300226 - DNA, 15 bp, Homo sapiens
aaaagtgtacactat

SEQ ID NO: 300227 - DNA, 15 bp, Homo sapiens
taaaagtgtacacta

SEQ ID NO: 300228 - DNA, 15 bp, Homo sapiens
ctaaaagtgtacact

SEQ ID NO: 300229 - DNA, 15 bp, Homo sapiens
tctaaaagtgtacac

SEQ ID NO: 300230 - DNA, 15 bp, Homo sapiens
atctaaaagtgtaca

SEQ ID NO: 300231 - DNA, 15 bp, Homo sapiens
aatctaaaagtgtac

SEQ ID NO: 300232 - DNA, 15 bp, Homo sapiens
caatctaaaagtgta

SEQ ID NO: 300233 - DNA, 15 bp, Homo sapiens
ccaatctaaaagtgt

SEQ ID NO: 300234 - DNA, 15 bp, Homo sapiens
gccaatctaaaagtg

SEQ ID NO: 300235 - DNA, 15 bp, Homo sapiens
tgccaatctaaaagt

SEQ ID NO: 300236 - DNA, 15 bp, Homo sapiens
atgccaatctaaaag

SEQ ID NO: 300237 - DNA, 15 bp, Homo sapiens
gatgccaatctaaaa

SEQ ID NO: 300238 - DNA, 15 bp, Homo sapiens
agatgccaatctaaa

SEQ ID NO: 300239 - DNA, 15 bp, Homo sapiens
cagatgccaatctaa

SEQ ID NO: 300240 - DNA, 15 bp, Homo sapiens
tcagatgccaatcta

SEQ ID NO: 300241 - DNA, 15 bp, Homo sapiens
atcagatgccaatct

SEQ ID NO: 300242 - DNA, 15 bp, Homo sapiens
aatcagatgccaatc

SEQ ID NO: 300243 - DNA, 15 bp, Homo sapiens
aaatcagatgccaat

SEQ ID NO: 300244 - DNA, 15 bp, Homo sapiens
taaatcagatgccaa

SEQ ID NO: 300245 - DNA, 15 bp, Homo sapiens
ctaaatcagatgcca

SEQ ID NO: 300246 - DNA, 15 bp, Homo sapiens
actaaatcagatgcc

SEQ ID NO: 300247 - DNA, 15 bp, Homo sapiens
aactaaatcagatgc

SEQ ID NO: 300248 - DNA, 15 bp, Homo sapiens
caactaaatcagatg

SEQ ID NO: 300249 - DNA, 15 bp, Homo sapiens
tcaactaaatcagat

SEQ ID NO: 300250 - DNA, 15 bp, Homo sapiens
ttcaactaaatcaga

SEQ ID NO: 300251 - DNA, 15 bp, Homo sapiens
gttcaactaaatcag

SEQ ID NO: 300252 - DNA, 15 bp, Homo sapiens
ggttcaactaaatca

SEQ ID NO: 300253 - DNA, 15 bp, Homo sapiens
gggttcaactaaatc

SEQ ID NO: 300254 - DNA, 15 bp, Homo sapiens
tgggttcaactaaat

SEQ ID NO: 300255 - DNA, 15 bp, Homo sapiens
gtgggttcaactaaa

SEQ ID NO: 300256 - DNA, 15 bp, Homo sapiens
tgtgggttcaactaa

SEQ ID NO: 300257 - DNA, 15 bp, Homo sapiens
atgtgggttcaacta

SEQ ID NO: 300258 - DNA, 15 bp, Homo sapiens
tatgtgggttcaact

SEQ ID NO: 300259 - DNA, 15 bp, Homo sapiens
atatgtgggttcaac

SEQ ID NO: 300260 - DNA, 15 bp, Homo sapiens
aatatgtgggttcaa

SEQ ID NO: 300261 - DNA, 15 bp, Homo sapiens
aaatatgtgggttca

SEQ ID NO: 300262 - DNA, 15 bp, Homo sapiens
aaaatatgtgggttc

SEQ ID NO: 300263 - DNA, 15 bp, Homo sapiens
taaaatatgtgggtt

SEQ ID NO: 300264 - DNA, 15 bp, Homo sapiens
ttaaaatatgtgggt

SEQ ID NO: 300265 - DNA, 15 bp, Homo sapiens
gttaaaatatgtggg

SEQ ID NO: 300266 - DNA, 15 bp, Homo sapiens
cgttaaaatatgtgg

SEQ ID NO: 300267 - DNA, 15 bp, Homo sapiens
ccgttaaaatatgtg

SEQ ID NO: 300268 - DNA, 15 bp, Homo sapiens
cccgttaaaatatgt

SEQ ID NO: 300269 - DNA, 15 bp, Homo sapiens
ccccgttaaaatatg

SEQ ID NO: 300270 - DNA, 15 bp, Homo sapiens
accccgttaaaatat

SEQ ID NO: 300271 - DNA, 15 bp, Homo sapiens
gaccccgttaaaata

SEQ ID NO: 300272 - DNA, 15 bp, Homo sapiens
agaccccgttaaaat

SEQ ID NO: 300273 - DNA, 15 bp, Homo sapiens
aagaccccgttaaaa

SEQ ID NO: 300274 - DNA, 15 bp, Homo sapiens
gaagaccccgttaaa

SEQ ID NO: 300275 - DNA, 15 bp, Homo sapiens
agaagaccccgttaa

SEQ ID NO: 300276 - DNA, 15 bp, Homo sapiens
cagaagaccccgtta

SEQ ID NO: 300277 - DNA, 15 bp, Homo sapiens
tcagaagaccccgtt

SEQ ID NO: 300278 - DNA, 15 bp, Homo sapiens
ttcagaagaccccgt

SEQ ID NO: 300279 - DNA, 15 bp, Homo sapiens
tttcagaagaccccg

SEQ ID NO: 300280 - DNA, 15 bp, Homo sapiens
ttttcagaagacccc

SEQ ID NO: 300281 - DNA, 15 bp, Homo sapiens
attttcagaagaccc

SEQ ID NO: 300282 - DNA, 15 bp, Homo sapiens
tattttcagaagacc

SEQ ID NO: 300283 - DNA, 15 bp, Homo sapiens
ttattttcagaagac

SEQ ID NO: 300284 - DNA, 15 bp, Homo sapiens
tttattttcagaaga

SEQ ID NO: 300285 - DNA, 15 bp, Homo sapiens
gtttattttcagaag

SEQ ID NO: 300286 - DNA, 15 bp, Homo sapiens
cgtttattttcagaa

SEQ ID NO: 300287 - DNA, 15 bp, Homo sapiens
acgtttattttcaga

SEQ ID NO: 300288 - DNA, 15 bp, Homo sapiens
aacgtttattttcag

SEQ ID NO: 300289 - DNA, 15 bp, Homo sapiens
aaacgtttattttca

SEQ ID NO: 300290 - DNA, 15 bp, Homo sapiens
caaacgtttattttc

SEQ ID NO: 300291 - DNA, 15 bp, Homo sapiens
gcaaacgtttatttt

SEQ ID NO: 300292 - DNA, 15 bp, Homo sapiens
tgcaaacgtttattt

SEQ ID NO: 300293 - DNA, 15 bp, Homo sapiens
gtgcaaacgtttatt

SEQ ID NO: 300294 - DNA, 15 bp, Homo sapiens
tgtgcaaacgtttat

SEQ ID NO: 300295 - DNA, 15 bp, Homo sapiens
atgtgcaaacgttta

SEQ ID NO: 300296 - DNA, 15 bp, Homo sapiens
aatgtgcaaacgttt

SEQ ID NO: 300297 - DNA, 15 bp, Homo sapiens
aaatgtgcaaacgtt

SEQ ID NO: 300298 - DNA, 15 bp, Homo sapiens
gaaatgtgcaaacgt

SEQ ID NO: 300299 - DNA, 15 bp, Homo sapiens
tgaaatgtgcaaacg

SEQ ID NO: 300300 - DNA, 15 bp, Homo sapiens
ctgaaatgtgcaaac

SEQ ID NO: 300301 - DNA, 15 bp, Homo sapiens
actgaaatgtgcaaa

SEQ ID NO: 300302 - DNA, 15 bp, Homo sapiens
aactgaaatgtgcaa

SEQ ID NO: 300303 - DNA, 15 bp, Homo sapiens
gaactgaaatgtgca

SEQ ID NO: 300304 - DNA, 15 bp, Homo sapiens
ggaactgaaatgtgc

SEQ ID NO: 300305 - DNA, 15 bp, Homo sapiens
tggaactgaaatgtg

SEQ ID NO: 300306 - DNA, 15 bp, Homo sapiens
ttggaactgaaatgt

SEQ ID NO: 300307 - DNA, 15 bp, Homo sapiens
attggaactgaaatg

SEQ ID NO: 300308 - DNA, 15 bp, Homo sapiens
cattggaactgaaat

SEQ ID NO: 300309 - DNA, 15 bp, Homo sapiens
tcattggaactgaaa

SEQ ID NO: 300310 - DNA, 15 bp, Homo sapiens
ttcattggaactgaa

SEQ ID NO: 300311 - DNA, 15 bp, Homo sapiens
cttcattggaactga

SEQ ID NO: 300312 - DNA, 15 bp, Homo sapiens
tcttcattggaactg

SEQ ID NO: 300313 - DNA, 15 bp, Homo sapiens
ttcttcattggaact

SEQ ID NO: 300314 - DNA, 15 bp, Homo sapiens
gttcttcattggaac

SEQ ID NO: 300315 - DNA, 15 bp, Homo sapiens
tgttcttcattggaa

SEQ ID NO: 300316 - DNA, 15 bp, Homo sapiens
ttgttcttcattgga

SEQ ID NO: 300317 - DNA, 15 bp, Homo sapiens
tttgttcttcattgg

SEQ ID NO: 300318 - DNA, 15 bp, Homo sapiens
atttgttcttcattg

SEQ ID NO: 300319 - DNA, 15 bp, Homo sapiens
catttgttcttcatt

SEQ ID NO: 300320 - DNA, 15 bp, Homo sapiens
ccatttgttcttcat

SEQ ID NO: 300321 - DNA, 15 bp, Homo sapiens
gccatttgttcttca

SEQ ID NO: 300322 - DNA, 15 bp, Homo sapiens
ggccatttgttcttc

SEQ ID NO: 300323 - DNA, 15 bp, Homo sapiens
aggccatttgttctt

SEQ ID NO: 300324 - DNA, 15 bp, Homo sapiens
caggccatttgttct

SEQ ID NO: 300325 - DNA, 15 bp, Homo sapiens
ccaggccatttgttc

SEQ ID NO: 300326 - DNA, 15 bp, Homo sapiens
cccaggccatttgtt

SEQ ID NO: 300327 - DNA, 15 bp, Homo sapiens
ccccaggccatttgt

SEQ ID NO: 300328 - DNA, 15 bp, Homo sapiens
tccccaggccatttg

SEQ ID NO: 300329 - DNA, 15 bp, Homo sapiens
ttccccaggccattt

SEQ ID NO: 300330 - DNA, 15 bp, Homo sapiens
cttccccaggccatt

SEQ ID NO: 300331 - DNA, 15 bp, Homo sapiens
ccttccccaggccat

SEQ ID NO: 300332 - DNA, 15 bp, Homo sapiens
cccttccccaggcca

SEQ ID NO: 300333 - DNA, 15 bp, Homo sapiens
tcccttccccaggcc

SEQ ID NO: 300334 - DNA, 15 bp, Homo sapiens
atcccttccccaggc

SEQ ID NO: 300335 - DNA, 15 bp, Homo sapiens
catcccttccccagg

SEQ ID NO: 300336 - DNA, 15 bp, Homo sapiens
ccatcccttccccag

SEQ ID NO: 300337 - DNA, 15 bp, Homo sapiens
tccatcccttcccca

SEQ ID NO: 300338 - DNA, 15 bp, Homo sapiens
ctccatcccttcccc

SEQ ID NO: 300339 - DNA, 15 bp, Homo sapiens
tctccatcccttccc

SEQ ID NO: 300340 - DNA, 15 bp, Homo sapiens
ctctccatcccttcc

SEQ ID NO: 300341 - DNA, 15 bp, Homo sapiens
actctccatcccttc

SEQ ID NO: 300342 - DNA, 15 bp, Homo sapiens
cactctccatccctt

SEQ ID NO: 300343 - DNA, 15 bp, Homo sapiens
ccactctccatccct

SEQ ID NO: 300344 - DNA, 15 bp, Homo sapiens
accactctccatccc

SEQ ID NO: 300345 - DNA, 15 bp, Homo sapiens
taccactctccatcc

SEQ ID NO: 300346 - DNA, 15 bp, Homo sapiens
ttaccactctccatc

SEQ ID NO: 300347 - DNA, 15 bp, Homo sapiens
tttaccactctccat

SEQ ID NO: 300348 - DNA, 15 bp, Homo sapiens
ctttaccactctcca

SEQ ID NO: 300349 - DNA, 15 bp, Homo sapiens
tctttaccactctcc

SEQ ID NO: 300350 - DNA, 15 bp, Homo sapiens
ttctttaccactctc

SEQ ID NO: 300351 - DNA, 15 bp, Homo sapiens
tttctttaccactct

SEQ ID NO: 300352 - DNA, 15 bp, Homo sapiens
atttctttaccactc

SEQ ID NO: 300353 - DNA, 15 bp, Homo sapiens
gatttctttaccact

SEQ ID NO: 300354 - DNA, 15 bp, Homo sapiens
ggatttctttaccac

SEQ ID NO: 300355 - DNA, 15 bp, Homo sapiens
gggatttctttacca

SEQ ID NO: 300356 - DNA, 15 bp, Homo sapiens
agggatttctttacc

SEQ ID NO: 300357 - DNA, 15 bp, Homo sapiens
aagggatttctttac

SEQ ID NO: 300358 - DNA, 15 bp, Homo sapiens
caagggatttcttta

SEQ ID NO: 300359 - DNA, 15 bp, Homo sapiens
acaagggatttcttt

SEQ ID NO: 300360 - DNA, 15 bp, Homo sapiens
tacaagggatttctt

SEQ ID NO: 300361 - DNA, 15 bp, Homo sapiens
ctacaagggatttct

SEQ ID NO: 300362 - DNA, 15 bp, Homo sapiens
tctacaagggatttc

SEQ ID NO: 300363 - DNA, 15 bp, Homo sapiens
ttctacaagggattt

SEQ ID NO: 300364 - DNA, 15 bp, Homo sapiens
tttctacaagggatt

SEQ ID NO: 300365 - DNA, 15 bp, Homo sapiens
ttttctacaagggat

SEQ ID NO: 300366 - DNA, 15 bp, Homo sapiens
gttttctacaaggga

SEQ ID NO: 300367 - DNA, 15 bp, Homo sapiens
ggttttctacaaggg

SEQ ID NO: 300368 - DNA, 15 bp, Homo sapiens
aggttttctacaagg

SEQ ID NO: 300369 - DNA, 15 bp, Homo sapiens
aaggttttctacaag

SEQ ID NO: 300370 - DNA, 15 bp, Homo sapiens
aaaggttttctacaa

SEQ ID NO: 300371 - DNA, 15 bp, Homo sapiens
aaaaggttttctaca

SEQ ID NO: 300372 - DNA, 15 bp, Homo sapiens
aaaaaggttttctac

SEQ ID NO: 300373 - DNA, 15 bp, Homo sapiens
aaaaaaggttttcta

SEQ ID NO: 300374 - DNA, 15 bp, Homo sapiens
aaaaaaaggttttct

SEQ ID NO: 300375 - DNA, 15 bp, Homo sapiens
aaaaaaaaggttttc

SEQ ID NO: 300376 - DNA, 15 bp, Homo sapiens
aaaaaaaaaggtttt

SEQ ID NO: 300377 - DNA, 15 bp, Homo sapiens
aaaaaaaaaaggttt

SEQ ID NO: 300378 - DNA, 15 bp, Homo sapiens
aaaaaaaaaaaggtt

SEQ ID NO: 300379 - DNA, 15 bp, Homo sapiens
aaaaaaaaaaaaggt

SEQ ID NO: 300380 - DNA, 15 bp, Homo sapiens
aaaaaaaaaaaaagg

SEQ ID NO: 300381 - DNA, 15 bp, Homo sapiens
gtttaaaaaaaaaaa

SEQ ID NO: 300382 - DNA, 15 bp, Homo sapiens
tgtttaaaaaaaaaa

SEQ ID NO: 300383 - DNA, 15 bp, Homo sapiens
ctgtttaaaaaaaaa

SEQ ID NO: 300384 - DNA, 15 bp, Homo sapiens
tctgtttaaaaaaaa

SEQ ID NO: 300385 - DNA, 15 bp, Homo sapiens
atctgtttaaaaaaa

SEQ ID NO: 300386 - DNA, 15 bp, Homo sapiens
catctgtttaaaaaa

SEQ ID NO: 300387 - DNA, 15 bp, Homo sapiens
tcatctgtttaaaaa

SEQ ID NO: 300388 - DNA, 15 bp, Homo sapiens
ctcatctgtttaaaa

SEQ ID NO: 300389 - DNA, 15 bp, Homo sapiens
actcatctgtttaaa

SEQ ID NO: 300390 - DNA, 15 bp, Homo sapiens
gactcatctgtttaa

SEQ ID NO: 300391 - DNA, 15 bp, Homo sapiens
agactcatctgttta

SEQ ID NO: 300392 - DNA, 15 bp, Homo sapiens
gagactcatctgttt

SEQ ID NO: 300393 - DNA, 15 bp, Homo sapiens
tgagactcatctgtt

SEQ ID NO: 300394 - DNA, 15 bp, Homo sapiens
gtgagactcatctgt

SEQ ID NO: 300395 - DNA, 15 bp, Homo sapiens
agtgagactcatctg

SEQ ID NO: 300396 - DNA, 15 bp, Homo sapiens
gagtgagactcatct

SEQ ID NO: 300397 - DNA, 15 bp, Homo sapiens
agagtgagactcatc

SEQ ID NO: 300398 - DNA, 15 bp, Homo sapiens
cagagtgagactcat

SEQ ID NO: 300399 - DNA, 15 bp, Homo sapiens
acagagtgagactca

SEQ ID NO: 300400 - DNA, 15 bp, Homo sapiens
aaacagagtgagact

SEQ ID NO: 300401 - DNA, 15 bp, Homo sapiens
aaaacagagtgagac

SEQ ID NO: 300402 - DNA, 15 bp, Homo sapiens
gaaaacagagtgaga

SEQ ID NO: 300403 - DNA, 15 bp, Homo sapiens
ggaaaacagagtgag

SEQ ID NO: 300404 - DNA, 15 bp, Homo sapiens
gggaaaacagagtga

SEQ ID NO: 300405 - DNA, 15 bp, Homo sapiens
tgggaaaacagagtg

SEQ ID NO: 300406 - DNA, 15 bp, Homo sapiens
ctgggaaaacagagt

SEQ ID NO: 300407 - DNA, 15 bp, Homo sapiens
cctgggaaaacagag

SEQ ID NO: 300408 - DNA, 15 bp, Homo sapiens
gcctgggaaaacaga

SEQ ID NO: 300409 - DNA, 15 bp, Homo sapiens
agcctgggaaaacag

SEQ ID NO: 300410 - DNA, 15 bp, Homo sapiens
cagcctgggaaaaca

SEQ ID NO: 300411 - DNA, 15 bp, Homo sapiens
ccagcctgggaaaac

SEQ ID NO: 300412 - DNA, 15 bp, Homo sapiens
tccagcctgggaaaa

SEQ ID NO: 300413 - DNA, 15 bp, Homo sapiens
ctccagcctgggaaa

SEQ ID NO: 300414 - DNA, 15 bp, Homo sapiens
actccagcctgggaa

SEQ ID NO: 300415 - DNA, 15 bp, Homo sapiens
cactccagcctggga

SEQ ID NO: 300416 - DNA, 15 bp, Homo sapiens
ttgcactccagcctg

SEQ ID NO: 300417 - DNA, 15 bp, Homo sapiens
attgcactccagcct

SEQ ID NO: 300418 - DNA, 15 bp, Homo sapiens
cattgcactccagcc

SEQ ID NO: 300419 - DNA, 15 bp, Homo sapiens
tcattgcactccagc

SEQ ID NO: 300420 - DNA, 15 bp, Homo sapiens
gtcattgcactccag

SEQ ID NO: 300421 - DNA, 15 bp, Homo sapiens
tgtcattgcactcca

SEQ ID NO: 300422 - DNA, 15 bp, Homo sapiens
gtgtcattgcactcc

SEQ ID NO: 300423 - DNA, 15 bp, Homo sapiens
tgtgtcattgcactc

SEQ ID NO: 300424 - DNA, 15 bp, Homo sapiens
ttgtgtcattgcact

SEQ ID NO: 300425 - DNA, 15 bp, Homo sapiens
attgtgtcattgcac

SEQ ID NO: 300426 - DNA, 15 bp, Homo sapiens
gattgtgtcattgca

SEQ ID NO: 300427 - DNA, 15 bp, Homo sapiens
tgattgtgtcattgc

SEQ ID NO: 300428 - DNA, 15 bp, Homo sapiens
atgattgtgtcattg

SEQ ID NO: 300429 - DNA, 15 bp, Homo sapiens
tatgattgtgtcatt

SEQ ID NO: 300430 - DNA, 15 bp, Homo sapiens
ctatgattgtgtcat

SEQ ID NO: 300431 - DNA, 15 bp, Homo sapiens
gctatgattgtgtca

SEQ ID NO: 300432 - DNA, 15 bp, Homo sapiens
agctatgattgtgtc

SEQ ID NO: 300433 - DNA, 15 bp, Homo sapiens
gagctatgattgtgt

SEQ ID NO: 300434 - DNA, 15 bp, Homo sapiens
tgagctatgattgtg

SEQ ID NO: 300435 - DNA, 15 bp, Homo sapiens
gtgagctatgattgt

SEQ ID NO: 300436 - DNA, 15 bp, Homo sapiens
agtgagctatgattg

SEQ ID NO: 300437 - DNA, 15 bp, Homo sapiens
cagtgagctatgatt

SEQ ID NO: 300438 - DNA, 15 bp, Homo sapiens
tcagtgagctatgat

SEQ ID NO: 300439 - DNA, 15 bp, Homo sapiens
ttcagtgagctatga

SEQ ID NO: 300440 - DNA, 15 bp, Homo sapiens
cttcagtgagctatg

SEQ ID NO: 300441 - DNA, 15 bp, Homo sapiens
gcttcagtgagctat

SEQ ID NO: 300442 - DNA, 15 bp, Homo sapiens
ggcttcagtgagcta

SEQ ID NO: 300443 - DNA, 15 bp, Homo sapiens
aggcttcagtgagct

SEQ ID NO: 300444 - DNA, 15 bp, Homo sapiens
aaggcttcagtgagc

SEQ ID NO: 300445 - DNA, 15 bp, Homo sapiens
caaggcttcagtgag

SEQ ID NO: 300446 - DNA, 15 bp, Homo sapiens
tcaaggcttcagtga

SEQ ID NO: 300447 - DNA, 15 bp, Homo sapiens
ttcaaggcttcagtg

SEQ ID NO: 300448 - DNA, 15 bp, Homo sapiens
gttcaaggcttcagt

SEQ ID NO: 300449 - DNA, 15 bp, Homo sapiens
agttcaaggcttcag

SEQ ID NO: 300450 - DNA, 15 bp, Homo sapiens
gagttcaaggcttca

SEQ ID NO: 300451 - DNA, 15 bp, Homo sapiens
agagttcaaggcttc

SEQ ID NO: 300452 - DNA, 15 bp, Homo sapiens
aagagttcaaggctt

SEQ ID NO: 300453 - DNA, 15 bp, Homo sapiens
caagagttcaaggct

SEQ ID NO: 300454 - DNA, 15 bp, Homo sapiens
ccaagagttcaaggc

SEQ ID NO: 300455 - DNA, 15 bp, Homo sapiens
cccaagagttcaagg

SEQ ID NO: 300456 - DNA, 15 bp, Homo sapiens
gcccaagagttcaag

SEQ ID NO: 300457 - DNA, 15 bp, Homo sapiens
agcccaagagttcaa

SEQ ID NO: 300458 - DNA, 15 bp, Homo sapiens
gagcccaagagttca

SEQ ID NO: 300459 - DNA, 15 bp, Homo sapiens
tgagcccaagagttc

SEQ ID NO: 300460 - DNA, 15 bp, Homo sapiens
ttgagcccaagagtt

SEQ ID NO: 300461 - DNA, 15 bp, Homo sapiens
cttgagcccaagagt

SEQ ID NO: 300462 - DNA, 15 bp, Homo sapiens
acttgagcccaagag

SEQ ID NO: 300463 - DNA, 15 bp, Homo sapiens
cacttgagcccaaga

SEQ ID NO: 300464 - DNA, 15 bp, Homo sapiens
tcacttgagcccaag

SEQ ID NO: 300465 - DNA, 15 bp, Homo sapiens
atcacttgagcccaa

SEQ ID NO: 300466 - DNA, 15 bp, Homo sapiens
gatcacttgagccca

SEQ ID NO: 300467 - DNA, 15 bp, Homo sapiens
ggatcacttgagccc

SEQ ID NO: 300468 - DNA, 15 bp, Homo sapiens
aggatcacttgagcc

SEQ ID NO: 300469 - DNA, 15 bp, Homo sapiens
gaggatcacttgagc

SEQ ID NO: 300470 - DNA, 15 bp, Homo sapiens
ggaggatcacttgag

SEQ ID NO: 300471 - DNA, 15 bp, Homo sapiens
gggaggatcacttga

SEQ ID NO: 300472 - DNA, 15 bp, Homo sapiens
tgggaggatcacttg

SEQ ID NO: 300473 - DNA, 15 bp, Homo sapiens
gtgggaggatcactt

SEQ ID NO: 300474 - DNA, 15 bp, Homo sapiens
ggtgggaggatcact

SEQ ID NO: 300475 - DNA, 15 bp, Homo sapiens
aggtgggaggatcac

SEQ ID NO: 300476 - DNA, 15 bp, Homo sapiens
gaggtgggaggatca

SEQ ID NO: 300477 - DNA, 15 bp, Homo sapiens
tgaggtgggaggatc

SEQ ID NO: 300478 - DNA, 15 bp, Homo sapiens
ctgaggtgggaggat

SEQ ID NO: 300479 - DNA, 15 bp, Homo sapiens
gctgaggtgggagga

SEQ ID NO: 300480 - DNA, 15 bp, Homo sapiens
ggctgaggtgggagg

SEQ ID NO: 300481 - DNA, 15 bp, Homo sapiens
aggctgaggtgggag

SEQ ID NO: 300482 - DNA, 15 bp, Homo sapiens
gaggctgaggtggga

SEQ ID NO: 300483 - DNA, 15 bp, Homo sapiens
ggaggctgaggtggg

SEQ ID NO: 300484 - DNA, 15 bp, Homo sapiens
aggaggctgaggtgg

SEQ ID NO: 300485 - DNA, 15 bp, Homo sapiens
aaggaggctgaggtg

SEQ ID NO: 300486 - DNA, 15 bp, Homo sapiens
taaggaggctgaggt

SEQ ID NO: 300487 - DNA, 15 bp, Homo sapiens
ctaaggaggctgagg

SEQ ID NO: 300488 - DNA, 15 bp, Homo sapiens
actaaggaggctgag

SEQ ID NO: 300489 - DNA, 15 bp, Homo sapiens
tactaaggaggctga

SEQ ID NO: 300490 - DNA, 15 bp, Homo sapiens
ctactaaggaggctg

SEQ ID NO: 300491 - DNA, 15 bp, Homo sapiens
tctactaaggaggct

SEQ ID NO: 300492 - DNA, 15 bp, Homo sapiens
atctactaaggaggc

SEQ ID NO: 300493 - DNA, 15 bp, Homo sapiens
catctactaaggagg

SEQ ID NO: 300494 - DNA, 15 bp, Homo sapiens
acatctactaaggag

SEQ ID NO: 300495 - DNA, 15 bp, Homo sapiens
cacatctactaagga

SEQ ID NO: 300496 - DNA, 15 bp, Homo sapiens
tcacatctactaagg

SEQ ID NO: 300497 - DNA, 15 bp, Homo sapiens
gtcacatctactaag

SEQ ID NO: 300498 - DNA, 15 bp, Homo sapiens
agtcacatctactaa

SEQ ID NO: 300499 - DNA, 15 bp, Homo sapiens
tagtcacatctacta

SEQ ID NO: 300500 - DNA, 15 bp, Homo sapiens
gtagtcacatctact

SEQ ID NO: 300501 - DNA, 15 bp, Homo sapiens
tgtagtcacatctac

SEQ ID NO: 300502 - DNA, 15 bp, Homo sapiens
ctgtagtcacatcta

SEQ ID NO: 300503 - DNA, 15 bp, Homo sapiens
cctgtagtcacatct

SEQ ID NO: 300504 - DNA, 15 bp, Homo sapiens
acctgtagtcacatc

SEQ ID NO: 300505 - DNA, 15 bp, Homo sapiens
cacctgtagtcacat

SEQ ID NO: 300506 - DNA, 15 bp, Homo sapiens
acacctgtagtcaca

SEQ ID NO: 300507 - DNA, 15 bp, Homo sapiens
cacacctgtagtcac

SEQ ID NO: 300508 - DNA, 15 bp, Homo sapiens
tcacacctgtagtca

SEQ ID NO: 300509 - DNA, 15 bp, Homo sapiens
ctcacacctgtagtc

SEQ ID NO: 300510 - DNA, 15 bp, Homo sapiens
gctcacacctgtagt

SEQ ID NO: 300511 - DNA, 15 bp, Homo sapiens
ggctcacacctgtag

SEQ ID NO: 300512 - DNA, 15 bp, Homo sapiens
tggctcacacctgta

SEQ ID NO: 300513 - DNA, 15 bp, Homo sapiens
ttggctcacacctgt

SEQ ID NO: 300514 - DNA, 15 bp, Homo sapiens
gttggctcacacctg

SEQ ID NO: 300515 - DNA, 15 bp, Homo sapiens
tgttggctcacacct

SEQ ID NO: 300516 - DNA, 15 bp, Homo sapiens
gtgttggctcacacc

SEQ ID NO: 300517 - DNA, 15 bp, Homo sapiens
tgtgttggctcacac

SEQ ID NO: 300518 - DNA, 15 bp, Homo sapiens
gtgtgttggctcaca

SEQ ID NO: 300519 - DNA, 15 bp, Homo sapiens
ggtgtgttggctcac

SEQ ID NO: 300520 - DNA, 15 bp, Homo sapiens
gggtgtgttggctca

SEQ ID NO: 300521 - DNA, 15 bp, Homo sapiens
tgggtgtgttggctc

SEQ ID NO: 300522 - DNA, 15 bp, Homo sapiens
ctgggtgtgttggct

SEQ ID NO: 300523 - DNA, 15 bp, Homo sapiens
gctgggtgtgttggc

SEQ ID NO: 300524 - DNA, 15 bp, Homo sapiens
agctgggtgtgttgg

SEQ ID NO: 300525 - DNA, 15 bp, Homo sapiens
tagctgggtgtgttg

SEQ ID NO: 300526 - DNA, 15 bp, Homo sapiens
ttagctgggtgtgtt

SEQ ID NO: 300527 - DNA, 15 bp, Homo sapiens
attagctgggtgtgt

SEQ ID NO: 300528 - DNA, 15 bp, Homo sapiens
aattagctgggtgtg

SEQ ID NO: 300529 - DNA, 15 bp, Homo sapiens
aaattagctgggtgt

SEQ ID NO: 300530 - DNA, 15 bp, Homo sapiens
aaaattagctgggtg

SEQ ID NO: 300531 - DNA, 15 bp, Homo sapiens
aaaaattagctgggt

SEQ ID NO: 300532 - DNA, 15 bp, Homo sapiens
aaaaaattagctggg

SEQ ID NO: 300533 - DNA, 15 bp, Homo sapiens
aaaaaaattagctgg

SEQ ID NO: 300534 - DNA, 15 bp, Homo sapiens
aaaaaaaattagctg

SEQ ID NO: 300535 - DNA, 15 bp, Homo sapiens
taaaaaaaattagct

SEQ ID NO: 300536 - DNA, 15 bp, Homo sapiens
ataaaaaaaattagc

SEQ ID NO: 300537 - DNA, 15 bp, Homo sapiens
aataaaaaaaattag

SEQ ID NO: 300538 - DNA, 15 bp, Homo sapiens
gaataaaaaaaatta

SEQ ID NO: 300539 - DNA, 15 bp, Homo sapiens
agaataaaaaaaatt

SEQ ID NO: 300540 - DNA, 15 bp, Homo sapiens
aagaataaaaaaaat

SEQ ID NO: 300541 - DNA, 15 bp, Homo sapiens
aaagaataaaaaaaa

SEQ ID NO: 300542 - DNA, 15 bp, Homo sapiens
caaagaataaaaaaa

SEQ ID NO: 300543 - DNA, 15 bp, Homo sapiens
acaaagaataaaaaa

SEQ ID NO: 300544 - DNA, 15 bp, Homo sapiens
tacaaagaataaaaa

SEQ ID NO: 300545 - DNA, 15 bp, Homo sapiens
ctacaaagaataaaa

SEQ ID NO: 300546 - DNA, 15 bp, Homo sapiens
tctacaaagaataaa

SEQ ID NO: 300547 - DNA, 15 bp, Homo sapiens
ctctacaaagaataa

SEQ ID NO: 300548 - DNA, 15 bp, Homo sapiens
tctctacaaagaata

SEQ ID NO: 300549 - DNA, 15 bp, Homo sapiens
gtctctacaaagaat

SEQ ID NO: 300550 - DNA, 15 bp, Homo sapiens
cgtctctacaaagaa

SEQ ID NO: 300551 - DNA, 15 bp, Homo sapiens
ccgtctctacaaaga

SEQ ID NO: 300552 - DNA, 15 bp, Homo sapiens
cccgtctctacaaag

SEQ ID NO: 300553 - DNA, 15 bp, Homo sapiens
ccccgtctctacaaa

SEQ ID NO: 300554 - DNA, 15 bp, Homo sapiens
accccgtctctacaa

SEQ ID NO: 300555 - DNA, 15 bp, Homo sapiens
gaccccgtctctaca

SEQ ID NO: 300556 - DNA, 15 bp, Homo sapiens
agaccccgtctctac

SEQ ID NO: 300557 - DNA, 15 bp, Homo sapiens
aagaccccgtctcta

SEQ ID NO: 300558 - DNA, 15 bp, Homo sapiens
caagaccccgtctct

SEQ ID NO: 300559 - DNA, 15 bp, Homo sapiens
gcaagaccccgtctc

SEQ ID NO: 300560 - DNA, 15 bp, Homo sapiens
agcaagaccccgtct

SEQ ID NO: 300561 - DNA, 15 bp, Homo sapiens
cagcaagaccccgtc

SEQ ID NO: 300562 - DNA, 15 bp, Homo sapiens
acagcaagaccccgt

SEQ ID NO: 300563 - DNA, 15 bp, Homo sapiens
aacagcaagaccccg

SEQ ID NO: 300564 - DNA, 15 bp, Homo sapiens
caacagcaagacccc

SEQ ID NO: 300565 - DNA, 15 bp, Homo sapiens
gcaacagcaagaccc

SEQ ID NO: 300566 - DNA, 15 bp, Homo sapiens
ggcaacagcaagacc

SEQ ID NO: 300567 - DNA, 15 bp, Homo sapiens
gggcaacagcaagac

SEQ ID NO: 300568 - DNA, 15 bp, Homo sapiens
tgggcaacagcaaga

SEQ ID NO: 300569 - DNA, 15 bp, Homo sapiens
ctgggcaacagcaag

SEQ ID NO: 300570 - DNA, 15 bp, Homo sapiens
cctgggcaacagcaa

SEQ ID NO: 300571 - DNA, 15 bp, Homo sapiens
gcctgggcaacagca

SEQ ID NO: 300572 - DNA, 15 bp, Homo sapiens
agcctgggcaacagc

SEQ ID NO: 300573 - DNA, 15 bp, Homo sapiens
accagcctgggcaac

SEQ ID NO: 300574 - DNA, 15 bp, Homo sapiens
gaccagcctgggcaa

SEQ ID NO: 300575 - DNA, 15 bp, Homo sapiens
agaccagcctgggca

SEQ ID NO: 300576 - DNA, 15 bp, Homo sapiens
gagaccagcctgggc

SEQ ID NO: 300577 - DNA, 15 bp, Homo sapiens
taggagtttgagacc

SEQ ID NO: 300578 - DNA, 15 bp, Homo sapiens
ctaggagtttgagac

SEQ ID NO: 300579 - DNA, 15 bp, Homo sapiens
tctaggagtttgaga

SEQ ID NO: 300580 - DNA, 15 bp, Homo sapiens
gtctaggagtttgag

SEQ ID NO: 300581 - DNA, 15 bp, Homo sapiens
agtctaggagtttga

SEQ ID NO: 300582 - DNA, 15 bp, Homo sapiens
gagtctaggagtttg

SEQ ID NO: 300583 - DNA, 15 bp, Homo sapiens
tgagtctaggagttt

SEQ ID NO: 300584 - DNA, 15 bp, Homo sapiens
ttgagtctaggagtt

SEQ ID NO: 300585 - DNA, 15 bp, Homo sapiens
cttgagtctaggagt

SEQ ID NO: 300586 - DNA, 15 bp, Homo sapiens
acttgagtctaggag

SEQ ID NO: 300587 - DNA, 15 bp, Homo sapiens
cacttgagtctagga

SEQ ID NO: 300588 - DNA, 15 bp, Homo sapiens
tcacttgagtctagg

SEQ ID NO: 300589 - DNA, 15 bp, Homo sapiens
atcacttgagtctag

SEQ ID NO: 300590 - DNA, 15 bp, Homo sapiens
gatcacttgagtcta

SEQ ID NO: 300591 - DNA, 15 bp, Homo sapiens
ggatcacttgagtct

SEQ ID NO: 300592 - DNA, 15 bp, Homo sapiens
aggatcacttgagtc

SEQ ID NO: 300593 - DNA, 15 bp, Homo sapiens
taggatcacttgagt

SEQ ID NO: 300594 - DNA, 15 bp, Homo sapiens
ataggatcacttgag

SEQ ID NO: 300595 - DNA, 15 bp, Homo sapiens
aataggatcacttga

SEQ ID NO: 300596 - DNA, 15 bp, Homo sapiens
caataggatcacttg

SEQ ID NO: 300597 - DNA, 15 bp, Homo sapiens
gcaataggatcactt

SEQ ID NO: 300598 - DNA, 15 bp, Homo sapiens
agcaataggatcact

SEQ ID NO: 300599 - DNA, 15 bp, Homo sapiens
aagcaataggatcac

SEQ ID NO: 300600 - DNA, 15 bp, Homo sapiens
aaagcaataggatca

SEQ ID NO: 300601 - DNA, 15 bp, Homo sapiens
caaagcaataggatc

SEQ ID NO: 300602 - DNA, 15 bp, Homo sapiens
ccaaagcaataggat

SEQ ID NO: 300603 - DNA, 15 bp, Homo sapiens
gccaaagcaatagga

SEQ ID NO: 300604 - DNA, 15 bp, Homo sapiens
agccaaagcaatagg

SEQ ID NO: 300605 - DNA, 15 bp, Homo sapiens
aagccaaagcaatag

SEQ ID NO: 300606 - DNA, 15 bp, Homo sapiens
gaagccaaagcaata

SEQ ID NO: 300607 - DNA, 15 bp, Homo sapiens
ggaagccaaagcaat

SEQ ID NO: 300608 - DNA, 15 bp, Homo sapiens
gggaagccaaagcaa

SEQ ID NO: 300609 - DNA, 15 bp, Homo sapiens
tgggaagccaaagca

SEQ ID NO: 300610 - DNA, 15 bp, Homo sapiens
ttgggaagccaaagc

SEQ ID NO: 300611 - DNA, 15 bp, Homo sapiens
tttgggaagccaaag

SEQ ID NO: 300612 - DNA, 15 bp, Homo sapiens
ctttgggaagccaaa

SEQ ID NO: 300613 - DNA, 15 bp, Homo sapiens
ctaatcccagcactt

SEQ ID NO: 300614 - DNA, 15 bp, Homo sapiens
actaatcccagcact

SEQ ID NO: 300615 - DNA, 15 bp, Homo sapiens
gactaatcccagcac

SEQ ID NO: 300616 - DNA, 15 bp, Homo sapiens
tgactaatcccagca

SEQ ID NO: 300617 - DNA, 15 bp, Homo sapiens
atgactaatcccagc

SEQ ID NO: 300618 - DNA, 15 bp, Homo sapiens
catgactaatcccag

SEQ ID NO: 300619 - DNA, 15 bp, Homo sapiens
tcatgactaatccca

SEQ ID NO: 300620 - DNA, 15 bp, Homo sapiens
ctcatgactaatccc

SEQ ID NO: 300621 - DNA, 15 bp, Homo sapiens
gctcatgactaatcc

SEQ ID NO: 300622 - DNA, 15 bp, Homo sapiens
agctcatgactaatc

SEQ ID NO: 300623 - DNA, 15 bp, Homo sapiens
cagctcatgactaat

SEQ ID NO: 300624 - DNA, 15 bp, Homo sapiens
gcagctcatgactaa

SEQ ID NO: 300625 - DNA, 15 bp, Homo sapiens
ggcagctcatgacta

SEQ ID NO: 300626 - DNA, 15 bp, Homo sapiens
tggcagctcatgact

SEQ ID NO: 300627 - DNA, 15 bp, Homo sapiens
gtggcagctcatgac

SEQ ID NO: 300628 - DNA, 15 bp, Homo sapiens
agtggcagctcatga

SEQ ID NO: 300629 - DNA, 15 bp, Homo sapiens
gagtggcagctcatg

SEQ ID NO: 300630 - DNA, 15 bp, Homo sapiens
agagtggcagctcat

SEQ ID NO: 300631 - DNA, 15 bp, Homo sapiens
aagagtggcagctca

SEQ ID NO: 300632 - DNA, 15 bp, Homo sapiens
caagagtggcagctc

SEQ ID NO: 300633 - DNA, 15 bp, Homo sapiens
ccaagagtggcagct

SEQ ID NO: 300634 - DNA, 15 bp, Homo sapiens
gccaagagtggcagc

SEQ ID NO: 300635 - DNA, 15 bp, Homo sapiens
ggccaagagtggcag

SEQ ID NO: 300636 - DNA, 15 bp, Homo sapiens
aggccaagagtggca

SEQ ID NO: 300637 - DNA, 15 bp, Homo sapiens
taggccaagagtggc

SEQ ID NO: 300638 - DNA, 15 bp, Homo sapiens
gtaggccaagagtgg

SEQ ID NO: 300639 - DNA, 15 bp, Homo sapiens
tgtaggccaagagtg

SEQ ID NO: 300640 - DNA, 15 bp, Homo sapiens
ctgtaggccaagagt

SEQ ID NO: 300641 - DNA, 15 bp, Homo sapiens
tctgtaggccaagag

SEQ ID NO: 300642 - DNA, 15 bp, Homo sapiens
ttctgtaggccaaga

SEQ ID NO: 300643 - DNA, 15 bp, Homo sapiens
tttctgtaggccaag

SEQ ID NO: 300644 - DNA, 15 bp, Homo sapiens
gtttctgtaggccaa

SEQ ID NO: 300645 - DNA, 15 bp, Homo sapiens
agtttctgtaggcca

SEQ ID NO: 300646 - DNA, 15 bp, Homo sapiens
tagtttctgtaggcc

SEQ ID NO: 300647 - DNA, 15 bp, Homo sapiens
atagtttctgtaggc

SEQ ID NO: 300648 - DNA, 15 bp, Homo sapiens
aatagtttctgtagg

SEQ ID NO: 300649 - DNA, 15 bp, Homo sapiens
aaatagtttctgtag

SEQ ID NO: 300650 - DNA, 15 bp, Homo sapiens
taaatagtttctgta

SEQ ID NO: 300651 - DNA, 15 bp, Homo sapiens
ataaatagtttctgt

SEQ ID NO: 300652 - DNA, 15 bp, Homo sapiens
tataaatagtttctg

SEQ ID NO: 300653 - DNA, 15 bp, Homo sapiens
atataaatagtttct

SEQ ID NO: 300654 - DNA, 15 bp, Homo sapiens
catataaatagtttc

SEQ ID NO: 300655 - DNA, 15 bp, Homo sapiens
acatataaatagttt

SEQ ID NO: 300656 - DNA, 15 bp, Homo sapiens
cacatataaatagtt

SEQ ID NO: 300657 - DNA, 15 bp, Homo sapiens
acacatataaatagt

SEQ ID NO: 300658 - DNA, 15 bp, Homo sapiens
gacacatataaatag

SEQ ID NO: 300659 - DNA, 15 bp, Homo sapiens
ggacacatataaata

SEQ ID NO: 300660 - DNA, 15 bp, Homo sapiens
aggacacatataaat

SEQ ID NO: 300661 - DNA, 15 bp, Homo sapiens
aaggacacatataaa

SEQ ID NO: 300662 - DNA, 15 bp, Homo sapiens
aaaggacacatataa

SEQ ID NO: 300663 - DNA, 15 bp, Homo sapiens
caaaggacacatata

SEQ ID NO: 300664 - DNA, 15 bp, Homo sapiens
gcaaaggacacatat

SEQ ID NO: 300665 - DNA, 15 bp, Homo sapiens
agcaaaggacacata

SEQ ID NO: 300666 - DNA, 15 bp, Homo sapiens
aagcaaaggacacat

SEQ ID NO: 300667 - DNA, 15 bp, Homo sapiens
aaagcaaaggacaca

SEQ ID NO: 300668 - DNA, 15 bp, Homo sapiens
taaagcaaaggacac

SEQ ID NO: 300669 - DNA, 15 bp, Homo sapiens
ataaagcaaaggaca

SEQ ID NO: 300670 - DNA, 15 bp, Homo sapiens
aataaagcaaaggac

SEQ ID NO: 300671 - DNA, 15 bp, Homo sapiens
aaataaagcaaagga

SEQ ID NO: 300672 - DNA, 15 bp, Homo sapiens
aaaataaagcaaagg

SEQ ID NO: 300673 - DNA, 15 bp, Homo sapiens
aaaaataaagcaaag

SEQ ID NO: 300674 - DNA, 15 bp, Homo sapiens
gaaaaataaagcaaa

SEQ ID NO: 300675 - DNA, 15 bp, Homo sapiens
agaaaaataaagcaa

SEQ ID NO: 300676 - DNA, 15 bp, Homo sapiens
aagaaaaataaagca

SEQ ID NO: 300677 - DNA, 15 bp, Homo sapiens
aaagaaaaataaagc

SEQ ID NO: 300678 - DNA, 15 bp, Homo sapiens
taaagaaaaataaag

SEQ ID NO: 300679 - DNA, 15 bp, Homo sapiens
ttaaagaaaaataaa

SEQ ID NO: 300680 - DNA, 15 bp, Homo sapiens
tttaaagaaaaataa

SEQ ID NO: 300681 - DNA, 15 bp, Homo sapiens
atttaaagaaaaata

SEQ ID NO: 300682 - DNA, 15 bp, Homo sapiens
catttaaagaaaaat

SEQ ID NO: 300683 - DNA, 15 bp, Homo sapiens
gcatttaaagaaaaa

SEQ ID NO: 300684 - DNA, 15 bp, Homo sapiens
tgcatttaaagaaaa

SEQ ID NO: 300685 - DNA, 15 bp, Homo sapiens
ctgcatttaaagaaa

SEQ ID NO: 300686 - DNA, 15 bp, Homo sapiens
cctgcatttaaagaa

SEQ ID NO: 300687 - DNA, 15 bp, Homo sapiens
acctgcatttaaaga

SEQ ID NO: 300688 - DNA, 15 bp, Homo sapiens
gacctgcatttaaag

SEQ ID NO: 300689 - DNA, 15 bp, Homo sapiens
ggacctgcatttaaa

SEQ ID NO: 300690 - DNA, 15 bp, Homo sapiens
tggacctgcatttaa

SEQ ID NO: 300691 - DNA, 15 bp, Homo sapiens
atggacctgcattta

SEQ ID NO: 300692 - DNA, 15 bp, Homo sapiens
aatggacctgcattt

SEQ ID NO: 300693 - DNA, 15 bp, Homo sapiens
aaatggacctgcatt

SEQ ID NO: 300694 - DNA, 15 bp, Homo sapiens
aaaatggacctgcat

SEQ ID NO: 300695 - DNA, 15 bp, Homo sapiens
aaaaatggacctgca

SEQ ID NO: 300696 - DNA, 15 bp, Homo sapiens
aaaaaatggacctgc

SEQ ID NO: 300697 - DNA, 15 bp, Homo sapiens
gaaaaaatggacctg

SEQ ID NO: 300698 - DNA, 15 bp, Homo sapiens
ggaaaaaatggacct

SEQ ID NO: 300699 - DNA, 15 bp, Homo sapiens
gggaaaaaatggacc

SEQ ID NO: 300700 - DNA, 15 bp, Homo sapiens
ggggaaaaaatggac

SEQ ID NO: 300701 - DNA, 15 bp, Homo sapiens
aggggaaaaaatgga

SEQ ID NO: 300702 - DNA, 15 bp, Homo sapiens
gaggggaaaaaatgg

SEQ ID NO: 300703 - DNA, 15 bp, Homo sapiens
cgaggggaaaaaatg

SEQ ID NO: 300704 - DNA, 15 bp, Homo sapiens
acgaggggaaaaaat

SEQ ID NO: 300705 - DNA, 15 bp, Homo sapiens
aacgaggggaaaaaa

SEQ ID NO: 300706 - DNA, 15 bp, Homo sapiens
aaacgaggggaaaaa

SEQ ID NO: 300707 - DNA, 15 bp, Homo sapiens
aaaacgaggggaaaa

SEQ ID NO: 300708 - DNA, 15 bp, Homo sapiens
taaaacgaggggaaa

SEQ ID NO: 300709 - DNA, 15 bp, Homo sapiens
ctaaaacgaggggaa

SEQ ID NO: 300710 - DNA, 15 bp, Homo sapiens
cctaaaacgagggga

SEQ ID NO: 300711 - DNA, 15 bp, Homo sapiens
acctaaaacgagggg

SEQ ID NO: 300712 - DNA, 15 bp, Homo sapiens
tacctaaaacgaggg

SEQ ID NO: 300713 - DNA, 15 bp, Homo sapiens
ctacctaaaacgagg

SEQ ID NO: 300714 - DNA, 15 bp, Homo sapiens
gctacctaaaacgag

SEQ ID NO: 300715 - DNA, 15 bp, Homo sapiens
agctacctaaaacga

SEQ ID NO: 300716 - DNA, 15 bp, Homo sapiens
tagctacctaaaacg

SEQ ID NO: 300717 - DNA, 15 bp, Homo sapiens
ttagctacctaaaac

SEQ ID NO: 300718 - DNA, 15 bp, Homo sapiens
cttagctacctaaaa

SEQ ID NO: 300719 - DNA, 15 bp, Homo sapiens
tcttagctacctaaa

SEQ ID NO: 300720 - DNA, 15 bp, Homo sapiens
atcttagctacctaa

SEQ ID NO: 300721 - DNA, 15 bp, Homo sapiens
aatcttagctaccta

SEQ ID NO: 300722 - DNA, 15 bp, Homo sapiens
taatcttagctacct

SEQ ID NO: 300723 - DNA, 15 bp, Homo sapiens
ataatcttagctacc

SEQ ID NO: 300724 - DNA, 15 bp, Homo sapiens
tataatcttagctac

SEQ ID NO: 300725 - DNA, 15 bp, Homo sapiens
atataatcttagcta

SEQ ID NO: 300726 - DNA, 15 bp, Homo sapiens
aatataatcttagct

SEQ ID NO: 300727 - DNA, 15 bp, Homo sapiens
caatataatcttagc

SEQ ID NO: 300728 - DNA, 15 bp, Homo sapiens
tcaatataatcttag

SEQ ID NO: 300729 - DNA, 15 bp, Homo sapiens
ttcaatataatctta

SEQ ID NO: 300730 - DNA, 15 bp, Homo sapiens
attcaatataatctt

SEQ ID NO: 300731 - DNA, 15 bp, Homo sapiens
gattcaatataatct

SEQ ID NO: 300732 - DNA, 15 bp, Homo sapiens
tgattcaatataatc

SEQ ID NO: 300733 - DNA, 15 bp, Homo sapiens
atgattcaatataat

SEQ ID NO: 300734 - DNA, 15 bp, Homo sapiens
catgattcaatataa

SEQ ID NO: 300735 - DNA, 15 bp, Homo sapiens
acatgattcaatata

SEQ ID NO: 300736 - DNA, 15 bp, Homo sapiens
cacatgattcaatat

SEQ ID NO: 300737 - DNA, 15 bp, Homo sapiens
acacatgattcaata

SEQ ID NO: 300738 - DNA, 15 bp, Homo sapiens
cacacatgattcaat

SEQ ID NO: 300739 - DNA, 15 bp, Homo sapiens
acacacatgattcaa

SEQ ID NO: 300740 - DNA, 15 bp, Homo sapiens
aacacacatgattca

SEQ ID NO: 300741 - DNA, 15 bp, Homo sapiens
aaacacacatgattc

SEQ ID NO: 300742 - DNA, 15 bp, Homo sapiens
gaaacacacatgatt

SEQ ID NO: 300743 - DNA, 15 bp, Homo sapiens
tgaaacacacatgat

SEQ ID NO: 300744 - DNA, 15 bp, Homo sapiens
ctgaaacacacatga

SEQ ID NO: 300745 - DNA, 15 bp, Homo sapiens
actgaaacacacatg

SEQ ID NO: 300746 - DNA, 15 bp, Homo sapiens
gactgaaacacacat

SEQ ID NO: 300747 - DNA, 15 bp, Homo sapiens
agactgaaacacaca

SEQ ID NO: 300748 - DNA, 15 bp, Homo sapiens
aagactgaaacacac

SEQ ID NO: 300749 - DNA, 15 bp, Homo sapiens
aaagactgaaacaca

SEQ ID NO: 300750 - DNA, 15 bp, Homo sapiens
caaagactgaaacac

SEQ ID NO: 300751 - DNA, 15 bp, Homo sapiens
acaaagactgaaaca

SEQ ID NO: 300752 - DNA, 15 bp, Homo sapiens
gacaaagactgaaac

SEQ ID NO: 300753 - DNA, 15 bp, Homo sapiens
tgacaaagactgaaa

SEQ ID NO: 300754 - DNA, 15 bp, Homo sapiens
atgacaaagactgaa

SEQ ID NO: 300755 - DNA, 15 bp, Homo sapiens
gatgacaaagactga

SEQ ID NO: 300756 - DNA, 15 bp, Homo sapiens
agatgacaaagactg

SEQ ID NO: 300757 - DNA, 15 bp, Homo sapiens
gagatgacaaagact

SEQ ID NO: 300758 - DNA, 15 bp, Homo sapiens
tgagatgacaaagac

SEQ ID NO: 300759 - DNA, 15 bp, Homo sapiens
ctgagatgacaaaga

SEQ ID NO: 300760 - DNA, 15 bp, Homo sapiens
cctgagatgacaaag

SEQ ID NO: 300761 - DNA, 15 bp, Homo sapiens
tcctgagatgacaaa

SEQ ID NO: 300762 - DNA, 15 bp, Homo sapiens
ttcctgagatgacaa

SEQ ID NO: 300763 - DNA, 15 bp, Homo sapiens
cttcctgagatgaca

SEQ ID NO: 300764 - DNA, 15 bp, Homo sapiens
acttcctgagatgac

SEQ ID NO: 300765 - DNA, 15 bp, Homo sapiens
gacttcctgagatga

SEQ ID NO: 300766 - DNA, 15 bp, Homo sapiens
agacttcctgagatg

SEQ ID NO: 300767 - DNA, 15 bp, Homo sapiens
aagacttcctgagat

SEQ ID NO: 300768 - DNA, 15 bp, Homo sapiens
taagacttcctgaga

SEQ ID NO: 300769 - DNA, 15 bp, Homo sapiens
ataagacttcctgag

SEQ ID NO: 300770 - DNA, 15 bp, Homo sapiens
cataagacttcctga

SEQ ID NO: 300771 - DNA, 15 bp, Homo sapiens
tcataagacttcctg

SEQ ID NO: 300772 - DNA, 15 bp, Homo sapiens
ctcataagacttcct

SEQ ID NO: 300773 - DNA, 15 bp, Homo sapiens
tctcataagacttcc

SEQ ID NO: 300774 - DNA, 15 bp, Homo sapiens
gtctcataagacttc

SEQ ID NO: 300775 - DNA, 15 bp, Homo sapiens
ggtctcataagactt

SEQ ID NO: 300776 - DNA, 15 bp, Homo sapiens
tggtctcataagact

SEQ ID NO: 300777 - DNA, 15 bp, Homo sapiens
gtggtctcataagac

SEQ ID NO: 300778 - DNA, 15 bp, Homo sapiens
tgtggtctcataaga

SEQ ID NO: 300779 - DNA, 15 bp, Homo sapiens
ttgtggtctcataag

SEQ ID NO: 300780 - DNA, 15 bp, Homo sapiens
gttgtggtctcataa

SEQ ID NO: 300781 - DNA, 15 bp, Homo sapiens
tgttgtggtctcata

SEQ ID NO: 300782 - DNA, 15 bp, Homo sapiens
atgttgtggtctcat

SEQ ID NO: 300783 - DNA, 15 bp, Homo sapiens
tatgttgtggtctca

SEQ ID NO: 300784 - DNA, 15 bp, Homo sapiens
ttatgttgtggtctc

SEQ ID NO: 300785 - DNA, 15 bp, Homo sapiens
tttatgttgtggtct

SEQ ID NO: 300786 - DNA, 15 bp, Homo sapiens
ctttatgttgtggtc

SEQ ID NO: 300787 - DNA, 15 bp, Homo sapiens
actttatgttgtggt

SEQ ID NO: 300788 - DNA, 15 bp, Homo sapiens
tactttatgttgtgg

SEQ ID NO: 300789 - DNA, 15 bp, Homo sapiens
atactttatgttgtg

SEQ ID NO: 300790 - DNA, 15 bp, Homo sapiens
tatactttatgttgt

SEQ ID NO: 300791 - DNA, 15 bp, Homo sapiens
ctatactttatgttg

SEQ ID NO: 300792 - DNA, 15 bp, Homo sapiens
actatactttatgtt

SEQ ID NO: 300793 - DNA, 15 bp, Homo sapiens
tactatactttatgt

SEQ ID NO: 300794 - DNA, 15 bp, Homo sapiens
ttactatactttatg

SEQ ID NO: 300795 - DNA, 15 bp, Homo sapiens
attactatactttat

SEQ ID NO: 300796 - DNA, 15 bp, Homo sapiens
aattactatacttta

SEQ ID NO: 300797 - DNA, 15 bp, Homo sapiens
aaattactatacttt

SEQ ID NO: 300798 - DNA, 15 bp, Homo sapiens
aaaattactatactt

SEQ ID NO: 300799 - DNA, 15 bp, Homo sapiens
aaaaattactatact

SEQ ID NO: 300800 - DNA, 15 bp, Homo sapiens
caaaaattactatac

SEQ ID NO: 300801 - DNA, 15 bp, Homo sapiens
acaaaaattactata

SEQ ID NO: 300802 - DNA, 15 bp, Homo sapiens
gacaaaaattactat

SEQ ID NO: 300803 - DNA, 15 bp, Homo sapiens
ggacaaaaattacta

SEQ ID NO: 300804 - DNA, 15 bp, Homo sapiens
tggacaaaaattact

SEQ ID NO: 300805 - DNA, 15 bp, Homo sapiens
ttggacaaaaattac

SEQ ID NO: 300806 - DNA, 15 bp, Homo sapiens
attggacaaaaatta

SEQ ID NO: 300807 - DNA, 15 bp, Homo sapiens
tattggacaaaaatt

SEQ ID NO: 300808 - DNA, 15 bp, Homo sapiens
ttattggacaaaaat

SEQ ID NO: 300809 - DNA, 15 bp, Homo sapiens
attattggacaaaaa

SEQ ID NO: 300810 - DNA, 15 bp, Homo sapiens
aattattggacaaaa

SEQ ID NO: 300811 - DNA, 15 bp, Homo sapiens
aaattattggacaaa

SEQ ID NO: 300812 - DNA, 15 bp, Homo sapiens
aaaattattggacaa

SEQ ID NO: 300813 - DNA, 15 bp, Homo sapiens
caaaattattggaca

SEQ ID NO: 300814 - DNA, 15 bp, Homo sapiens
ccaaaattattggac

SEQ ID NO: 300815 - DNA, 15 bp, Homo sapiens
gccaaaattattgga

SEQ ID NO: 300816 - DNA, 15 bp, Homo sapiens
ggccaaaattattgg

SEQ ID NO: 300817 - DNA, 15 bp, Homo sapiens
tggccaaaattattg

SEQ ID NO: 300818 - DNA, 15 bp, Homo sapiens
atggccaaaattatt

SEQ ID NO: 300819 - DNA, 15 bp, Homo sapiens
aatggccaaaattat

SEQ ID NO: 300820 - DNA, 15 bp, Homo sapiens
taatggccaaaatta

SEQ ID NO: 300821 - DNA, 15 bp, Homo sapiens
ctaatggccaaaatt

SEQ ID NO: 300822 - DNA, 15 bp, Homo sapiens
gctaatggccaaaat

SEQ ID NO: 300823 - DNA, 15 bp, Homo sapiens
tgctaatggccaaaa

SEQ ID NO: 300824 - DNA, 15 bp, Homo sapiens
ttgctaatggccaaa

SEQ ID NO: 300825 - DNA, 15 bp, Homo sapiens
tttgctaatggccaa

SEQ ID NO: 300826 - DNA, 15 bp, Homo sapiens
ttttgctaatggcca

SEQ ID NO: 300827 - DNA, 15 bp, Homo sapiens
tttttgctaatggcc

SEQ ID NO: 300828 - DNA, 15 bp, Homo sapiens
atttttgctaatggc

SEQ ID NO: 300829 - DNA, 15 bp, Homo sapiens
aatttttgctaatgg

SEQ ID NO: 300830 - DNA, 15 bp, Homo sapiens
taatttttgctaatg

SEQ ID NO: 300831 - DNA, 15 bp, Homo sapiens
gtaatttttgctaat

SEQ ID NO: 300832 - DNA, 15 bp, Homo sapiens
ggtaatttttgctaa

SEQ ID NO: 300833 - DNA, 15 bp, Homo sapiens
aggtaatttttgcta

SEQ ID NO: 300834 - DNA, 15 bp, Homo sapiens
taggtaatttttgct

SEQ ID NO: 300835 - DNA, 15 bp, Homo sapiens
ataggtaatttttgc

SEQ ID NO: 300836 - DNA, 15 bp, Homo sapiens
tataggtaatttttg

SEQ ID NO: 300837 - DNA, 15 bp, Homo sapiens
atataggtaattttt

SEQ ID NO: 300838 - DNA, 15 bp, Homo sapiens
catataggtaatttt

SEQ ID NO: 300839 - DNA, 15 bp, Homo sapiens
tcatataggtaattt

SEQ ID NO: 300840 - DNA, 15 bp, Homo sapiens
gtcatataggtaatt

SEQ ID NO: 300841 - DNA, 15 bp, Homo sapiens
tgtcatataggtaat

SEQ ID NO: 300842 - DNA, 15 bp, Homo sapiens
atgtcatataggtaa

SEQ ID NO: 300843 - DNA, 15 bp, Homo sapiens
tatgtcatataggta

SEQ ID NO: 300844 - DNA, 15 bp, Homo sapiens
atatgtcatataggt

SEQ ID NO: 300845 - DNA, 15 bp, Homo sapiens
tatatgtcatatagg

SEQ ID NO: 300846 - DNA, 15 bp, Homo sapiens
ttatatgtcatatag

SEQ ID NO: 300847 - DNA, 15 bp, Homo sapiens
tttatatgtcatata

SEQ ID NO: 300848 - DNA, 15 bp, Homo sapiens
atttatatgtcatat

SEQ ID NO: 300849 - DNA, 15 bp, Homo sapiens
gatttatatgtcata

SEQ ID NO: 300850 - DNA, 15 bp, Homo sapiens
tgatttatatgtcat

SEQ ID NO: 300851 - DNA, 15 bp, Homo sapiens
ttgatttatatgtca

SEQ ID NO: 300852 - DNA, 15 bp, Homo sapiens
tttgatttatatgtc

SEQ ID NO: 300853 - DNA, 15 bp, Homo sapiens
atttgatttatatgt

SEQ ID NO: 300854 - DNA, 15 bp, Homo sapiens
catttgatttatatg

SEQ ID NO: 300855 - DNA, 15 bp, Homo sapiens
ccatttgatttatat

SEQ ID NO: 300856 - DNA, 15 bp, Homo sapiens
accatttgatttata

SEQ ID NO: 300857 - DNA, 15 bp, Homo sapiens
taccatttgatttat

SEQ ID NO: 300858 - DNA, 15 bp, Homo sapiens
ataccatttgattta

SEQ ID NO: 300859 - DNA, 15 bp, Homo sapiens
tataccatttgattt

SEQ ID NO: 300860 - DNA, 15 bp, Homo sapiens
ttataccatttgatt

SEQ ID NO: 300861 - DNA, 15 bp, Homo sapiens
attataccatttgat

SEQ ID NO: 300862 - DNA, 15 bp, Homo sapiens
aattataccatttga

SEQ ID NO: 300863 - DNA, 15 bp, Homo sapiens
aaattataccatttg

SEQ ID NO: 300864 - DNA, 15 bp, Homo sapiens
aaaattataccattt

SEQ ID NO: 300865 - DNA, 15 bp, Homo sapiens
aaaaattataccatt

SEQ ID NO: 300866 - DNA, 15 bp, Homo sapiens
aaaaaattataccat

SEQ ID NO: 300867 - DNA, 15 bp, Homo sapiens
taaaaaattatacca

SEQ ID NO: 300868 - DNA, 15 bp, Homo sapiens
ctaaaaaattatacc

SEQ ID NO: 300869 - DNA, 15 bp, Homo sapiens
actaaaaaattatac

SEQ ID NO: 300870 - DNA, 15 bp, Homo sapiens
cactaaaaaattata

SEQ ID NO: 300871 - DNA, 15 bp, Homo sapiens
gcactaaaaaattat

SEQ ID NO: 300872 - DNA, 15 bp, Homo sapiens
agcactaaaaaatta

SEQ ID NO: 300873 - DNA, 15 bp, Homo sapiens
tagcactaaaaaatt

SEQ ID NO: 300874 - DNA, 15 bp, Homo sapiens
ttagcactaaaaaat

SEQ ID NO: 300875 - DNA, 15 bp, Homo sapiens
cttagcactaaaaaa

SEQ ID NO: 300876 - DNA, 15 bp, Homo sapiens
acttagcactaaaaa

SEQ ID NO: 300877 - DNA, 15 bp, Homo sapiens
gacttagcactaaaa

SEQ ID NO: 300878 - DNA, 15 bp, Homo sapiens
agacttagcactaaa

SEQ ID NO: 300879 - DNA, 15 bp, Homo sapiens
aagacttagcactaa

SEQ ID NO: 300880 - DNA, 15 bp, Homo sapiens
taagacttagcacta

SEQ ID NO: 300881 - DNA, 15 bp, Homo sapiens
ttaagacttagcact

SEQ ID NO: 300882 - DNA, 15 bp, Homo sapiens
cttaagacttagcac

SEQ ID NO: 300883 - DNA, 15 bp, Homo sapiens
acttaagacttagca

SEQ ID NO: 300884 - DNA, 15 bp, Homo sapiens
tacttaagacttagc

SEQ ID NO: 300885 - DNA, 15 bp, Homo sapiens
ctacttaagacttag

SEQ ID NO: 300886 - DNA, 15 bp, Homo sapiens
actacttaagactta

SEQ ID NO: 300887 - DNA, 15 bp, Homo sapiens
tactacttaagactt

SEQ ID NO: 300888 - DNA, 15 bp, Homo sapiens
atactacttaagact

SEQ ID NO: 300889 - DNA, 15 bp, Homo sapiens
aatactacttaagac

SEQ ID NO: 300890 - DNA, 15 bp, Homo sapiens
gaatactacttaaga

SEQ ID NO: 300891 - DNA, 15 bp, Homo sapiens
tgaatactacttaag

SEQ ID NO: 300892 - DNA, 15 bp, Homo sapiens
atgaatactacttaa

SEQ ID NO: 300893 - DNA, 15 bp, Homo sapiens
aatgaatactactta

SEQ ID NO: 300894 - DNA, 15 bp, Homo sapiens
aaatgaatactactt

SEQ ID NO: 300895 - DNA, 15 bp, Homo sapiens
aaaatgaatactact

SEQ ID NO: 300896 - DNA, 15 bp, Homo sapiens
aaaaatgaatactac

SEQ ID NO: 300897 - DNA, 15 bp, Homo sapiens
taaaaatgaatacta

SEQ ID NO: 300898 - DNA, 15 bp, Homo sapiens
ataaaaatgaatact

SEQ ID NO: 300899 - DNA, 15 bp, Homo sapiens
aataaaaatgaatac

SEQ ID NO: 300900 - DNA, 15 bp, Homo sapiens
aaataaaaatgaata

SEQ ID NO: 300901 - DNA, 15 bp, Homo sapiens
taaataaaaatgaat

SEQ ID NO: 300902 - DNA, 15 bp, Homo sapiens
ttaaataaaaatgaa

SEQ ID NO: 300903 - DNA, 15 bp, Homo sapiens
tttaaataaaaatga

SEQ ID NO: 300904 - DNA, 15 bp, Homo sapiens
atttaaataaaaatg

SEQ ID NO: 300905 - DNA, 15 bp, Homo sapiens
tatttaaataaaaat

SEQ ID NO: 300906 - DNA, 15 bp, Homo sapiens
ttatttaaataaaaa

SEQ ID NO: 300907 - DNA, 15 bp, Homo sapiens
tttatttaaataaaa

SEQ ID NO: 300908 - DNA, 15 bp, Homo sapiens
atttatttaaataaa

SEQ ID NO: 300909 - DNA, 15 bp, Homo sapiens
aatttatttaaataa

SEQ ID NO: 300910 - DNA, 15 bp, Homo sapiens
caatttatttaaata

SEQ ID NO: 300911 - DNA, 15 bp, Homo sapiens
gcaatttatttaaat

SEQ ID NO: 300912 - DNA, 15 bp, Homo sapiens
agcaatttatttaaa

SEQ ID NO: 300913 - DNA, 15 bp, Homo sapiens
aagcaatttatttaa

SEQ ID NO: 300914 - DNA, 15 bp, Homo sapiens
gaagcaatttattta

SEQ ID NO: 300915 - DNA, 15 bp, Homo sapiens
agaagcaatttattt

SEQ ID NO: 300916 - DNA, 15 bp, Homo sapiens
cagaagcaatttatt

SEQ ID NO: 300917 - DNA, 15 bp, Homo sapiens
acagaagcaatttat

SEQ ID NO: 300918 - DNA, 15 bp, Homo sapiens
aacagaagcaattta

SEQ ID NO: 300919 - DNA, 15 bp, Homo sapiens
gaacagaagcaattt

SEQ ID NO: 300920 - DNA, 15 bp, Homo sapiens
cgaacagaagcaatt

SEQ ID NO: 300921 - DNA, 15 bp, Homo sapiens
acgaacagaagcaat

SEQ ID NO: 300922 - DNA, 15 bp, Homo sapiens
tacgaacagaagcaa

SEQ ID NO: 300923 - DNA, 15 bp, Homo sapiens
ttacgaacagaagca

SEQ ID NO: 300924 - DNA, 15 bp, Homo sapiens
tttacgaacagaagc

SEQ ID NO: 300925 - DNA, 15 bp, Homo sapiens
ctttacgaacagaag

SEQ ID NO: 300926 - DNA, 15 bp, Homo sapiens
actttacgaacagaa

SEQ ID NO: 300927 - DNA, 15 bp, Homo sapiens
tactttacgaacaga

SEQ ID NO: 300928 - DNA, 15 bp, Homo sapiens
gtactttacgaacag

SEQ ID NO: 300929 - DNA, 15 bp, Homo sapiens
agtactttacgaaca

SEQ ID NO: 300930 - DNA, 15 bp, Homo sapiens
tagtactttacgaac

SEQ ID NO: 300931 - DNA, 15 bp, Homo sapiens
atagtactttacgaa

SEQ ID NO: 300932 - DNA, 15 bp, Homo sapiens
tatagtactttacga

SEQ ID NO: 300933 - DNA, 15 bp, Homo sapiens
atatagtactttacg

SEQ ID NO: 300934 - DNA, 15 bp, Homo sapiens
tatatagtactttac

SEQ ID NO: 300935 - DNA, 15 bp, Homo sapiens
atatatagtacttta

SEQ ID NO: 300936 - DNA, 15 bp, Homo sapiens
tatatatagtacttt

SEQ ID NO: 300937 - DNA, 15 bp, Homo sapiens
ttatatatagtactt

SEQ ID NO: 300938 - DNA, 15 bp, Homo sapiens
tttatatatagtact

SEQ ID NO: 300939 - DNA, 15 bp, Homo sapiens
ttttatatatagtac

SEQ ID NO: 300940 - DNA, 15 bp, Homo sapiens
gttttatatatagta

SEQ ID NO: 300941 - DNA, 15 bp, Homo sapiens
ggttttatatatagt

SEQ ID NO: 300942 - DNA, 15 bp, Homo sapiens
aggttttatatatag

SEQ ID NO: 300943 - DNA, 15 bp, Homo sapiens
aaggttttatatata

SEQ ID NO: 300944 - DNA, 15 bp, Homo sapiens
aaaggttttatatat

SEQ ID NO: 300945 - DNA, 15 bp, Homo sapiens
aaaaggttttatata

SEQ ID NO: 300946 - DNA, 15 bp, Homo sapiens
aaaaaggttttatat

SEQ ID NO: 300947 - DNA, 15 bp, Homo sapiens
taaaaaggttttata

SEQ ID NO: 300948 - DNA, 15 bp, Homo sapiens
gtaaaaaggttttat

SEQ ID NO: 300949 - DNA, 15 bp, Homo sapiens
ggtaaaaaggtttta

SEQ ID NO: 300950 - DNA, 15 bp, Homo sapiens
aggtaaaaaggtttt

SEQ ID NO: 300951 - DNA, 15 bp, Homo sapiens
aaggtaaaaaggttt

SEQ ID NO: 300952 - DNA, 15 bp, Homo sapiens
aaaggtaaaaaggtt

SEQ ID NO: 300953 - DNA, 15 bp, Homo sapiens
aaaaggtaaaaaggt

SEQ ID NO: 300954 - DNA, 15 bp, Homo sapiens
aaaaaggtaaaaagg

SEQ ID NO: 300955 - DNA, 15 bp, Homo sapiens
aaaaaaggtaaaaag

SEQ ID NO: 300956 - DNA, 15 bp, Homo sapiens
taaaaaaggtaaaaa

SEQ ID NO: 300957 - DNA, 15 bp, Homo sapiens
ataaaaaaggtaaaa

SEQ ID NO: 300958 - DNA, 15 bp, Homo sapiens
tataaaaaaggtaaa

SEQ ID NO: 300959 - DNA, 15 bp, Homo sapiens
atataaaaaaggtaa

SEQ ID NO: 300960 - DNA, 15 bp, Homo sapiens
tatataaaaaaggta

SEQ ID NO: 300961 - DNA, 15 bp, Homo sapiens
atatataaaaaaggt

SEQ ID NO: 300962 - DNA, 15 bp, Homo sapiens
tatatataaaaaagg

SEQ ID NO: 300963 - DNA, 15 bp, Homo sapiens
ttatatataaaaaag

SEQ ID NO: 300964 - DNA, 15 bp, Homo sapiens
tttatatataaaaaa

SEQ ID NO: 300965 - DNA, 15 bp, Homo sapiens
ttttatatataaaaa

SEQ ID NO: 300966 - DNA, 15 bp, Homo sapiens
gttttatatataaaa

SEQ ID NO: 300967 - DNA, 15 bp, Homo sapiens
ggttttatatataaa

SEQ ID NO: 300968 - DNA, 15 bp, Homo sapiens
aggttttatatataa

SEQ ID NO: 300969 - DNA, 15 bp, Homo sapiens
taggttttatatata

SEQ ID NO: 300970 - DNA, 15 bp, Homo sapiens
ataggttttatatat

SEQ ID NO: 300971 - DNA, 15 bp, Homo sapiens
cataggttttatata

SEQ ID NO: 300972 - DNA, 15 bp, Homo sapiens
tcataggttttatat

SEQ ID NO: 300973 - DNA, 15 bp, Homo sapiens
atcataggttttata

SEQ ID NO: 300974 - DNA, 15 bp, Homo sapiens
aatcataggttttat

SEQ ID NO: 300975 - DNA, 15 bp, Homo sapiens
gaatcataggtttta

SEQ ID NO: 300976 - DNA, 15 bp, Homo sapiens
tgaatcataggtttt

SEQ ID NO: 300977 - DNA, 15 bp, Homo sapiens
atgaatcataggttt

SEQ ID NO: 300978 - DNA, 15 bp, Homo sapiens
tatgaatcataggtt

SEQ ID NO: 300979 - DNA, 15 bp, Homo sapiens
ctatgaatcataggt

SEQ ID NO: 300980 - DNA, 15 bp, Homo sapiens
cctatgaatcatagg

SEQ ID NO: 300981 - DNA, 15 bp, Homo sapiens
acctatgaatcatag

SEQ ID NO: 300982 - DNA, 15 bp, Homo sapiens
aacctatgaatcata

SEQ ID NO: 300983 - DNA, 15 bp, Homo sapiens
aaacctatgaatcat

SEQ ID NO: 300984 - DNA, 15 bp, Homo sapiens
aaaacctatgaatca

SEQ ID NO: 300985 - DNA, 15 bp, Homo sapiens
taaaacctatgaatc

SEQ ID NO: 300986 - DNA, 15 bp, Homo sapiens
ataaaacctatgaat

SEQ ID NO: 300987 - DNA, 15 bp, Homo sapiens
cataaaacctatgaa

SEQ ID NO: 300988 - DNA, 15 bp, Homo sapiens
acataaaacctatga

SEQ ID NO: 300989 - DNA, 15 bp, Homo sapiens
gacataaaacctatg

SEQ ID NO: 300990 - DNA, 15 bp, Homo sapiens
ggacataaaacctat

SEQ ID NO: 300991 - DNA, 15 bp, Homo sapiens
aggacataaaaccta

SEQ ID NO: 300992 - DNA, 15 bp, Homo sapiens
taggacataaaacct

SEQ ID NO: 300993 - DNA, 15 bp, Homo sapiens
ataggacataaaacc

SEQ ID NO: 300994 - DNA, 15 bp, Homo sapiens
aataggacataaaac

SEQ ID NO: 300995 - DNA, 15 bp, Homo sapiens
taataggacataaaa

SEQ ID NO: 300996 - DNA, 15 bp, Homo sapiens
ttaataggacataaa

SEQ ID NO: 300997 - DNA, 15 bp, Homo sapiens
tttaataggacataa

SEQ ID NO: 300998 - DNA, 15 bp, Homo sapiens
ttttaataggacata

SEQ ID NO: 300999 - DNA, 15 bp, Homo sapiens
attttaataggacat

SEQ ID NO: 301000 - DNA, 15 bp, Homo sapiens
tattttaataggaca

SEQ ID NO: 301001 - DNA, 15 bp, Homo sapiens
atattttaataggac

SEQ ID NO: 301002 - DNA, 15 bp, Homo sapiens
catattttaatagga

SEQ ID NO: 301003 - DNA, 15 bp, Homo sapiens
tcatattttaatagg

SEQ ID NO: 301004 - DNA, 15 bp, Homo sapiens
ctcatattttaatag

SEQ ID NO: 301005 - DNA, 15 bp, Homo sapiens
gctcatattttaata

SEQ ID NO: 301006 - DNA, 15 bp, Homo sapiens
agctcatattttaat

SEQ ID NO: 301007 - DNA, 15 bp, Homo sapiens
tagctcatattttaa

SEQ ID NO: 301008 - DNA, 15 bp, Homo sapiens
ttagctcatatttta

SEQ ID NO: 301009 - DNA, 15 bp, Homo sapiens
gttagctcatatttt

SEQ ID NO: 301010 - DNA, 15 bp, Homo sapiens
tgttagctcatattt

SEQ ID NO: 301011 - DNA, 15 bp, Homo sapiens
ttgttagctcatatt

SEQ ID NO: 301012 - DNA, 15 bp, Homo sapiens
attgttagctcatat

SEQ ID NO: 301013 - DNA, 15 bp, Homo sapiens
tattgttagctcata

SEQ ID NO: 301014 - DNA, 15 bp, Homo sapiens
ttattgttagctcat

SEQ ID NO: 301015 - DNA, 15 bp, Homo sapiens
attattgttagctca

SEQ ID NO: 301016 - DNA, 15 bp, Homo sapiens
aattattgttagctc

SEQ ID NO: 301017 - DNA, 15 bp, Homo sapiens
caattattgttagct

SEQ ID NO: 301018 - DNA, 15 bp, Homo sapiens
ccaattattgttagc

SEQ ID NO: 301019 - DNA, 15 bp, Homo sapiens
accaattattgttag

SEQ ID NO: 301020 - DNA, 15 bp, Homo sapiens
taccaattattgtta

SEQ ID NO: 301021 - DNA, 15 bp, Homo sapiens
ttaccaattattgtt

SEQ ID NO: 301022 - DNA, 15 bp, Homo sapiens
tttaccaattattgt

SEQ ID NO: 301023 - DNA, 15 bp, Homo sapiens
ttttaccaattattg

SEQ ID NO: 301024 - DNA, 15 bp, Homo sapiens
attttaccaattatt

SEQ ID NO: 301025 - DNA, 15 bp, Homo sapiens
aattttaccaattat

SEQ ID NO: 301026 - DNA, 15 bp, Homo sapiens
taattttaccaatta

SEQ ID NO: 301027 - DNA, 15 bp, Homo sapiens
ctaattttaccaatt

SEQ ID NO: 301028 - DNA, 15 bp, Homo sapiens
actaattttaccaat

SEQ ID NO: 301029 - DNA, 15 bp, Homo sapiens
aactaattttaccaa

SEQ ID NO: 301030 - DNA, 15 bp, Homo sapiens
caactaattttacca

SEQ ID NO: 301031 - DNA, 15 bp, Homo sapiens
ccaactaattttacc

SEQ ID NO: 301032 - DNA, 15 bp, Homo sapiens
tccaactaattttac

SEQ ID NO: 301033 - DNA, 15 bp, Homo sapiens
ttccaactaatttta

SEQ ID NO: 301034 - DNA, 15 bp, Homo sapiens
tttccaactaatttt

SEQ ID NO: 301035 - DNA, 15 bp, Homo sapiens
ttttccaactaattt

SEQ ID NO: 301036 - DNA, 15 bp, Homo sapiens
attttccaactaatt

SEQ ID NO: 301037 - DNA, 15 bp, Homo sapiens
aattttccaactaat

SEQ ID NO: 301038 - DNA, 15 bp, Homo sapiens
taattttccaactaa

SEQ ID NO: 301039 - DNA, 15 bp, Homo sapiens
ataattttccaacta

SEQ ID NO: 301040 - DNA, 15 bp, Homo sapiens
gataattttccaact

SEQ ID NO: 301041 - DNA, 15 bp, Homo sapiens
tgataattttccaac

SEQ ID NO: 301042 - DNA, 15 bp, Homo sapiens
ctgataattttccaa

SEQ ID NO: 301043 - DNA, 15 bp, Homo sapiens
actgataattttcca

SEQ ID NO: 301044 - DNA, 15 bp, Homo sapiens
aactgataattttcc

SEQ ID NO: 301045 - DNA, 15 bp, Homo sapiens
aaactgataattttc

SEQ ID NO: 301046 - DNA, 15 bp, Homo sapiens
aaaactgataatttt

SEQ ID NO: 301047 - DNA, 15 bp, Homo sapiens
taaaactgataattt

SEQ ID NO: 301048 - DNA, 15 bp, Homo sapiens
ttaaaactgataatt

SEQ ID NO: 301049 - DNA, 15 bp, Homo sapiens
tttaaaactgataat

SEQ ID NO: 301050 - DNA, 15 bp, Homo sapiens
ttttaaaactgataa

SEQ ID NO: 301051 - DNA, 15 bp, Homo sapiens
cttttaaaactgata

SEQ ID NO: 301052 - DNA, 15 bp, Homo sapiens
tcttttaaaactgat

SEQ ID NO: 301053 - DNA, 15 bp, Homo sapiens
ttcttttaaaactga

SEQ ID NO: 301054 - DNA, 15 bp, Homo sapiens
tttcttttaaaactg

SEQ ID NO: 301055 - DNA, 15 bp, Homo sapiens
ttttcttttaaaact

SEQ ID NO: 301056 - DNA, 15 bp, Homo sapiens
attttcttttaaaac

SEQ ID NO: 301057 - DNA, 15 bp, Homo sapiens
aattttcttttaaaa

SEQ ID NO: 301058 - DNA, 15 bp, Homo sapiens
taattttcttttaaa

SEQ ID NO: 301059 - DNA, 15 bp, Homo sapiens
ttaattttcttttaa

SEQ ID NO: 301060 - DNA, 15 bp, Homo sapiens
tttaattttctttta

SEQ ID NO: 301061 - DNA, 15 bp, Homo sapiens
atttaattttctttt

SEQ ID NO: 301062 - DNA, 15 bp, Homo sapiens
aatttaattttcttt

SEQ ID NO: 301063 - DNA, 15 bp, Homo sapiens
caatttaattttctt

SEQ ID NO: 301064 - DNA, 15 bp, Homo sapiens
tcaatttaattttct

SEQ ID NO: 301065 - DNA, 15 bp, Homo sapiens
ttcaatttaattttc

SEQ ID NO: 301066 - DNA, 15 bp, Homo sapiens
cttcaatttaatttt

SEQ ID NO: 301067 - DNA, 15 bp, Homo sapiens
ccttcaatttaattt

SEQ ID NO: 301068 - DNA, 15 bp, Homo sapiens
accttcaatttaatt

SEQ ID NO: 301069 - DNA, 15 bp, Homo sapiens
aaccttcaatttaat

SEQ ID NO: 301070 - DNA, 15 bp, Homo sapiens
taaccttcaatttaa

SEQ ID NO: 301071 - DNA, 15 bp, Homo sapiens
ataaccttcaattta

SEQ ID NO: 301072 - DNA, 15 bp, Homo sapiens
cataaccttcaattt

SEQ ID NO: 301073 - DNA, 15 bp, Homo sapiens
acataaccttcaatt

SEQ ID NO: 301074 - DNA, 15 bp, Homo sapiens
aacataaccttcaat

SEQ ID NO: 301075 - DNA, 15 bp, Homo sapiens
caacataaccttcaa

SEQ ID NO: 301076 - DNA, 15 bp, Homo sapiens
acaacataaccttca

SEQ ID NO: 301077 - DNA, 15 bp, Homo sapiens
aacaacataaccttc

SEQ ID NO: 301078 - DNA, 15 bp, Homo sapiens
taacaacataacctt

SEQ ID NO: 301079 - DNA, 15 bp, Homo sapiens
ctaacaacataacct

SEQ ID NO: 301080 - DNA, 15 bp, Homo sapiens
actaacaacataacc

SEQ ID NO: 301081 - DNA, 15 bp, Homo sapiens
tactaacaacataac

SEQ ID NO: 301082 - DNA, 15 bp, Homo sapiens
ttactaacaacataa

SEQ ID NO: 301083 - DNA, 15 bp, Homo sapiens
attactaacaacata

SEQ ID NO: 301084 - DNA, 15 bp, Homo sapiens
aattactaacaacat

SEQ ID NO: 301085 - DNA, 15 bp, Homo sapiens
aaattactaacaaca

SEQ ID NO: 301086 - DNA, 15 bp, Homo sapiens
taaattactaacaac

SEQ ID NO: 301087 - DNA, 15 bp, Homo sapiens
ttaaattactaacaa

SEQ ID NO: 301088 - DNA, 15 bp, Homo sapiens
tttaaattactaaca

SEQ ID NO: 301089 - DNA, 15 bp, Homo sapiens
ctttaaattactaac

SEQ ID NO: 301090 - DNA, 15 bp, Homo sapiens
tctttaaattactaa

SEQ ID NO: 301091 - DNA, 15 bp, Homo sapiens
atctttaaattacta

SEQ ID NO: 301092 - DNA, 15 bp, Homo sapiens
gatctttaaattact

SEQ ID NO: 301093 - DNA, 15 bp, Homo sapiens
agatctttaaattac

SEQ ID NO: 301094 - DNA, 15 bp, Homo sapiens
gagatctttaaatta

SEQ ID NO: 301095 - DNA, 15 bp, Homo sapiens
ggagatctttaaatt

SEQ ID NO: 301096 - DNA, 15 bp, Homo sapiens
aggagatctttaaat

SEQ ID NO: 301097 - DNA, 15 bp, Homo sapiens
caggagatctttaaa

SEQ ID NO: 301098 - DNA, 15 bp, Homo sapiens
acaggagatctttaa

SEQ ID NO: 301099 - DNA, 15 bp, Homo sapiens
cacaggagatcttta

SEQ ID NO: 301100 - DNA, 15 bp, Homo sapiens
acacaggagatcttt

SEQ ID NO: 301101 - DNA, 15 bp, Homo sapiens
aacacaggagatctt

SEQ ID NO: 301102 - DNA, 15 bp, Homo sapiens
aaacacaggagatct

SEQ ID NO: 301103 - DNA, 15 bp, Homo sapiens
aaaacacaggagatc

SEQ ID NO: 301104 - DNA, 15 bp, Homo sapiens
caaaacacaggagat

SEQ ID NO: 301105 - DNA, 15 bp, Homo sapiens
tcaaaacacaggaga

SEQ ID NO: 301106 - DNA, 15 bp, Homo sapiens
atcaaaacacaggag

SEQ ID NO: 301107 - DNA, 15 bp, Homo sapiens
catcaaaacacagga

SEQ ID NO: 301108 - DNA, 15 bp, Homo sapiens
acatcaaaacacagg

SEQ ID NO: 301109 - DNA, 15 bp, Homo sapiens
tacatcaaaacacag

SEQ ID NO: 301110 - DNA, 15 bp, Homo sapiens
ttacatcaaaacaca

SEQ ID NO: 301111 - DNA, 15 bp, Homo sapiens
tttacatcaaaacac

SEQ ID NO: 301112 - DNA, 15 bp, Homo sapiens
ttttacatcaaaaca

SEQ ID NO: 301113 - DNA, 15 bp, Homo sapiens
tttttacatcaaaac

SEQ ID NO: 301114 - DNA, 15 bp, Homo sapiens
gtttttacatcaaaa

SEQ ID NO: 301115 - DNA, 15 bp, Homo sapiens
tgtttttacatcaaa

SEQ ID NO: 301116 - DNA, 15 bp, Homo sapiens
gtgtttttacatcaa

SEQ ID NO: 301117 - DNA, 15 bp, Homo sapiens
agtgtttttacatca

SEQ ID NO: 301118 - DNA, 15 bp, Homo sapiens
tagtgtttttacatc

SEQ ID NO: 301119 - DNA, 15 bp, Homo sapiens
atagtgtttttacat

SEQ ID NO: 301120 - DNA, 15 bp, Homo sapiens
aatagtgtttttaca

SEQ ID NO: 301121 - DNA, 15 bp, Homo sapiens
aaatagtgtttttac

SEQ ID NO: 301122 - DNA, 15 bp, Homo sapiens
aaaatagtgttttta

SEQ ID NO: 301123 - DNA, 15 bp, Homo sapiens
aaaaatagtgttttt

SEQ ID NO: 301124 - DNA, 15 bp, Homo sapiens
aaaaaatagtgtttt

SEQ ID NO: 301125 - DNA, 15 bp, Homo sapiens
taaaaaatagtgttt

SEQ ID NO: 301126 - DNA, 15 bp, Homo sapiens
ctaaaaaatagtgtt

SEQ ID NO: 301127 - DNA, 15 bp, Homo sapiens
gctaaaaaatagtgt

SEQ ID NO: 301128 - DNA, 15 bp, Homo sapiens
tgctaaaaaatagtg

SEQ ID NO: 301129 - DNA, 15 bp, Homo sapiens
ctgctaaaaaatagt

SEQ ID NO: 301130 - DNA, 15 bp, Homo sapiens
gctgctaaaaaatag

SEQ ID NO: 301131 - DNA, 15 bp, Homo sapiens
tgctgctaaaaaata

SEQ ID NO: 301132 - DNA, 15 bp, Homo sapiens
ctgctgctaaaaaat

SEQ ID NO: 301133 - DNA, 15 bp, Homo sapiens
actgctgctaaaaaa

SEQ ID NO: 301134 - DNA, 15 bp, Homo sapiens
gactgctgctaaaaa

SEQ ID NO: 301135 - DNA, 15 bp, Homo sapiens
tgactgctgctaaaa

SEQ ID NO: 301136 - DNA, 15 bp, Homo sapiens
ttgactgctgctaaa

SEQ ID NO: 301137 - DNA, 15 bp, Homo sapiens
tttgactgctgctaa

SEQ ID NO: 301138 - DNA, 15 bp, Homo sapiens
ctttgactgctgcta

SEQ ID NO: 301139 - DNA, 15 bp, Homo sapiens
cctttgactgctgct

SEQ ID NO: 301140 - DNA, 15 bp, Homo sapiens
ccctttgactgctgc

SEQ ID NO: 301141 - DNA, 15 bp, Homo sapiens
gccctttgactgctg

SEQ ID NO: 301142 - DNA, 15 bp, Homo sapiens
agccctttgactgct

SEQ ID NO: 301143 - DNA, 15 bp, Homo sapiens
aagccctttgactgc

SEQ ID NO: 301144 - DNA, 15 bp, Homo sapiens
taagccctttgactg

SEQ ID NO: 301145 - DNA, 15 bp, Homo sapiens
ttaagccctttgact

SEQ ID NO: 301146 - DNA, 15 bp, Homo sapiens
cttaagccctttgac

SEQ ID NO: 301147 - DNA, 15 bp, Homo sapiens
acttaagccctttga

SEQ ID NO: 301148 - DNA, 15 bp, Homo sapiens
tacttaagccctttg

SEQ ID NO: 301149 - DNA, 15 bp, Homo sapiens
ctacttaagcccttt

SEQ ID NO: 301150 - DNA, 15 bp, Homo sapiens
actacttaagccctt

SEQ ID NO: 301151 - DNA, 15 bp, Homo sapiens
tactacttaagccct

SEQ ID NO: 301152 - DNA, 15 bp, Homo sapiens
atactacttaagccc

SEQ ID NO: 301153 - DNA, 15 bp, Homo sapiens
catactacttaagcc

SEQ ID NO: 301154 - DNA, 15 bp, Homo sapiens
tcatactacttaagc

SEQ ID NO: 301155 - DNA, 15 bp, Homo sapiens
gtcatactacttaag

SEQ ID NO: 301156 - DNA, 15 bp, Homo sapiens
agtcatactacttaa

SEQ ID NO: 301157 - DNA, 15 bp, Homo sapiens
aagtcatactactta

SEQ ID NO: 301158 - DNA, 15 bp, Homo sapiens
aaagtcatactactt

SEQ ID NO: 301159 - DNA, 15 bp, Homo sapiens
aaaagtcatactact

SEQ ID NO: 301160 - DNA, 15 bp, Homo sapiens
aaaaagtcatactac

SEQ ID NO: 301161 - DNA, 15 bp, Homo sapiens
caaaaagtcatacta

SEQ ID NO: 301162 - DNA, 15 bp, Homo sapiens
acaaaaagtcatact

SEQ ID NO: 301163 - DNA, 15 bp, Homo sapiens
cacaaaaagtcatac

SEQ ID NO: 301164 - DNA, 15 bp, Homo sapiens
acacaaaaagtcata

SEQ ID NO: 301165 - DNA, 15 bp, Homo sapiens
tacacaaaaagtcat

SEQ ID NO: 301166 - DNA, 15 bp, Homo sapiens
ttacacaaaaagtca

SEQ ID NO: 301167 - DNA, 15 bp, Homo sapiens
gttacacaaaaagtc

SEQ ID NO: 301168 - DNA, 15 bp, Homo sapiens
agttacacaaaaagt

SEQ ID NO: 301169 - DNA, 15 bp, Homo sapiens
aagttacacaaaaag

SEQ ID NO: 301170 - DNA, 15 bp, Homo sapiens
caagttacacaaaaa

SEQ ID NO: 301171 - DNA, 15 bp, Homo sapiens
ccaagttacacaaaa

SEQ ID NO: 301172 - DNA, 15 bp, Homo sapiens
tccaagttacacaaa

SEQ ID NO: 301173 - DNA, 15 bp, Homo sapiens
atccaagttacacaa

SEQ ID NO: 301174 - DNA, 15 bp, Homo sapiens
aatccaagttacaca

SEQ ID NO: 301175 - DNA, 15 bp, Homo sapiens
caatccaagttacac

SEQ ID NO: 301176 - DNA, 15 bp, Homo sapiens
acaatccaagttaca

SEQ ID NO: 301177 - DNA, 15 bp, Homo sapiens
cacaatccaagttac

SEQ ID NO: 301178 - DNA, 15 bp, Homo sapiens
gcacaatccaagtta

SEQ ID NO: 301179 - DNA, 15 bp, Homo sapiens
tgcacaatccaagtt

SEQ ID NO: 301180 - DNA, 15 bp, Homo sapiens
ttgcacaatccaagt

SEQ ID NO: 301181 - DNA, 15 bp, Homo sapiens
attgcacaatccaag

SEQ ID NO: 301182 - DNA, 15 bp, Homo sapiens
aattgcacaatccaa

SEQ ID NO: 301183 - DNA, 15 bp, Homo sapiens
caattgcacaatcca

SEQ ID NO: 301184 - DNA, 15 bp, Homo sapiens
gcaattgcacaatcc

SEQ ID NO: 301185 - DNA, 15 bp, Homo sapiens
agcaattgcacaatc

SEQ ID NO: 301186 - DNA, 15 bp, Homo sapiens
aagcaattgcacaat

SEQ ID NO: 301187 - DNA, 15 bp, Homo sapiens
aaagcaattgcacaa

SEQ ID NO: 301188 - DNA, 15 bp, Homo sapiens
aaaagcaattgcaca

SEQ ID NO: 301189 - DNA, 15 bp, Homo sapiens
taaaagcaattgcac

SEQ ID NO: 301190 - DNA, 15 bp, Homo sapiens
ttaaaagcaattgca

SEQ ID NO: 301191 - DNA, 15 bp, Homo sapiens
tttaaaagcaattgc

SEQ ID NO: 301192 - DNA, 15 bp, Homo sapiens
ttttaaaagcaattg

SEQ ID NO: 301193 - DNA, 15 bp, Homo sapiens
tttttaaaagcaatt

SEQ ID NO: 301194 - DNA, 15 bp, Homo sapiens
atttttaaaagcaat

SEQ ID NO: 301195 - DNA, 15 bp, Homo sapiens
catttttaaaagcaa

SEQ ID NO: 301196 - DNA, 15 bp, Homo sapiens
tcatttttaaaagca

SEQ ID NO: 301197 - DNA, 15 bp, Homo sapiens
ttcatttttaaaagc

SEQ ID NO: 301198 - DNA, 15 bp, Homo sapiens
tttcatttttaaaag

SEQ ID NO: 301199 - DNA, 15 bp, Homo sapiens
gtttcatttttaaaa

SEQ ID NO: 301200 - DNA, 15 bp, Homo sapiens
agtttcatttttaaa

SEQ ID NO: 301201 - DNA, 15 bp, Homo sapiens
tagtttcatttttaa

SEQ ID NO: 301202 - DNA, 15 bp, Homo sapiens
atagtttcattttta

SEQ ID NO: 301203 - DNA, 15 bp, Homo sapiens
gaaatagtttcattt

SEQ ID NO: 301204 - DNA, 15 bp, Homo sapiens
agaaatagtttcatt

SEQ ID NO: 301205 - DNA, 15 bp, Homo sapiens
gagaaatagtttcat

SEQ ID NO: 301206 - DNA, 15 bp, Homo sapiens
tgagaaatagtttca

SEQ ID NO: 301207 - DNA, 15 bp, Homo sapiens
atgagaaatagtttc

SEQ ID NO: 301208 - DNA, 15 bp, Homo sapiens
aatgagaaatagttt

SEQ ID NO: 301209 - DNA, 15 bp, Homo sapiens
aaatgagaaatagtt

SEQ ID NO: 301210 - DNA, 15 bp, Homo sapiens
taaatgagaaatagt

SEQ ID NO: 301211 - DNA, 15 bp, Homo sapiens
ataaatgagaaatag

SEQ ID NO: 301212 - DNA, 15 bp, Homo sapiens
tataaatgagaaata

SEQ ID NO: 301213 - DNA, 15 bp, Homo sapiens
ttataaatgagaaat

SEQ ID NO: 301214 - DNA, 15 bp, Homo sapiens
attataaatgagaaa

SEQ ID NO: 301215 - DNA, 15 bp, Homo sapiens
cattataaatgagaa

SEQ ID NO: 301216 - DNA, 15 bp, Homo sapiens
tcattataaatgaga

SEQ ID NO: 301217 - DNA, 15 bp, Homo sapiens
ctcattataaatgag

SEQ ID NO: 301218 - DNA, 15 bp, Homo sapiens
tctcattataaatga

SEQ ID NO: 301219 - DNA, 15 bp, Homo sapiens
atctcattataaatg

SEQ ID NO: 301220 - DNA, 15 bp, Homo sapiens
tatctcattataaat

SEQ ID NO: 301221 - DNA, 15 bp, Homo sapiens
ttatctcattataaa

SEQ ID NO: 301222 - DNA, 15 bp, Homo sapiens
attatctcattataa

SEQ ID NO: 301223 - DNA, 15 bp, Homo sapiens
cattatctcattata

SEQ ID NO: 301224 - DNA, 15 bp, Homo sapiens
ccattatctcattat

SEQ ID NO: 301225 - DNA, 15 bp, Homo sapiens
tccattatctcatta

SEQ ID NO: 301226 - DNA, 15 bp, Homo sapiens
ttccattatctcatt

SEQ ID NO: 301227 - DNA, 15 bp, Homo sapiens
gttccattatctcat

SEQ ID NO: 301228 - DNA, 15 bp, Homo sapiens
agttccattatctca

SEQ ID NO: 301229 - DNA, 15 bp, Homo sapiens
gagttccattatctc

SEQ ID NO: 301230 - DNA, 15 bp, Homo sapiens
tgagttccattatct

SEQ ID NO: 301231 - DNA, 15 bp, Homo sapiens
ctgagttccattatc

SEQ ID NO: 301232 - DNA, 15 bp, Homo sapiens
actgagttccattat

SEQ ID NO: 301233 - DNA, 15 bp, Homo sapiens
cactgagttccatta

SEQ ID NO: 301234 - DNA, 15 bp, Homo sapiens
acactgagttccatt

SEQ ID NO: 301235 - DNA, 15 bp, Homo sapiens
tacactgagttccat

SEQ ID NO: 301236 - DNA, 15 bp, Homo sapiens
atacactgagttcca

SEQ ID NO: 301237 - DNA, 15 bp, Homo sapiens
gatacactgagttcc

SEQ ID NO: 301238 - DNA, 15 bp, Homo sapiens
cgatacactgagttc

SEQ ID NO: 301239 - DNA, 15 bp, Homo sapiens
ccgatacactgagtt

SEQ ID NO: 301240 - DNA, 15 bp, Homo sapiens
tccgatacactgagt

SEQ ID NO: 301241 - DNA, 15 bp, Homo sapiens
ttccgatacactgag

SEQ ID NO: 301242 - DNA, 15 bp, Homo sapiens
cttccgatacactga

SEQ ID NO: 301243 - DNA, 15 bp, Homo sapiens
tcttccgatacactg

SEQ ID NO: 301244 - DNA, 15 bp, Homo sapiens
ctcttccgatacact

SEQ ID NO: 301245 - DNA, 15 bp, Homo sapiens
gctcttccgatacac

SEQ ID NO: 301246 - DNA, 15 bp, Homo sapiens
tgctcttccgataca

SEQ ID NO: 301247 - DNA, 15 bp, Homo sapiens
ctgctcttccgatac

SEQ ID NO: 301248 - DNA, 15 bp, Homo sapiens
tctgctcttccgata

SEQ ID NO: 301249 - DNA, 15 bp, Homo sapiens
gtctgctcttccgat

SEQ ID NO: 301250 - DNA, 15 bp, Homo sapiens
agtctgctcttccga

SEQ ID NO: 301251 - DNA, 15 bp, Homo sapiens
cagtctgctcttccg

SEQ ID NO: 301252 - DNA, 15 bp, Homo sapiens
tcagtctgctcttcc

SEQ ID NO: 301253 - DNA, 15 bp, Homo sapiens
ttcagtctgctcttc

SEQ ID NO: 301254 - DNA, 15 bp, Homo sapiens
gttcagtctgctctt

SEQ ID NO: 301255 - DNA, 15 bp, Homo sapiens
tgttcagtctgctct

SEQ ID NO: 301256 - DNA, 15 bp, Homo sapiens
gtgttcagtctgctc

SEQ ID NO: 301257 - DNA, 15 bp, Homo sapiens
tgtgttcagtctgct

SEQ ID NO: 301258 - DNA, 15 bp, Homo sapiens
gtgtgttcagtctgc

SEQ ID NO: 301259 - DNA, 15 bp, Homo sapiens
tgtgtgttcagtctg

SEQ ID NO: 301260 - DNA, 15 bp, Homo sapiens
gtgtgtgttcagtct

SEQ ID NO: 301261 - DNA, 15 bp, Homo sapiens
agtgtgtgttcagtc

SEQ ID NO: 301262 - DNA, 15 bp, Homo sapiens
aagtgtgtgttcagt

SEQ ID NO: 301263 - DNA, 15 bp, Homo sapiens
gaagtgtgtgttcag

SEQ ID NO: 301264 - DNA, 15 bp, Homo sapiens
agaagtgtgtgttca

SEQ ID NO: 301265 - DNA, 15 bp, Homo sapiens
tagaagtgtgtgttc

SEQ ID NO: 301266 - DNA, 15 bp, Homo sapiens
gtagaagtgtgtgtt

SEQ ID NO: 301267 - DNA, 15 bp, Homo sapiens
ggtagaagtgtgtgt

SEQ ID NO: 301268 - DNA, 15 bp, Homo sapiens
aggtagaagtgtgtg

SEQ ID NO: 301269 - DNA, 15 bp, Homo sapiens
gaggtagaagtgtgt

SEQ ID NO: 301270 - DNA, 15 bp, Homo sapiens
ggaggtagaagtgtg

SEQ ID NO: 301271 - DNA, 15 bp, Homo sapiens
aggaggtagaagtgt

SEQ ID NO: 301272 - DNA, 15 bp, Homo sapiens
aaggaggtagaagtg

SEQ ID NO: 301273 - DNA, 15 bp, Homo sapiens
aaaggaggtagaagt

SEQ ID NO: 301274 - DNA, 15 bp, Homo sapiens
gaaaggaggtagaag

SEQ ID NO: 301275 - DNA, 15 bp, Homo sapiens
agaaaggaggtagaa

SEQ ID NO: 301276 - DNA, 15 bp, Homo sapiens
gagaaaggaggtaga

SEQ ID NO: 301277 - DNA, 15 bp, Homo sapiens
ggagaaaggaggtag

SEQ ID NO: 301278 - DNA, 15 bp, Homo sapiens
gggagaaaggaggta

SEQ ID NO: 301279 - DNA, 15 bp, Homo sapiens
ggggagaaaggaggt

SEQ ID NO: 301280 - DNA, 15 bp, Homo sapiens
cggggagaaaggagg

SEQ ID NO: 301281 - DNA, 15 bp, Homo sapiens
gcggggagaaaggag

SEQ ID NO: 301282 - DNA, 15 bp, Homo sapiens
tgcggggagaaagga

SEQ ID NO: 301283 - DNA, 15 bp, Homo sapiens
ttgcggggagaaagg

SEQ ID NO: 301284 - DNA, 15 bp, Homo sapiens
tttgcggggagaaag

SEQ ID NO: 301285 - DNA, 15 bp, Homo sapiens
gtttgcggggagaaa

SEQ ID NO: 301286 - DNA, 15 bp, Homo sapiens
ggtttgcggggagaa

SEQ ID NO: 301287 - DNA, 15 bp, Homo sapiens
gggtttgcggggaga

SEQ ID NO: 301288 - DNA, 15 bp, Homo sapiens
agggtttgcggggag

SEQ ID NO: 301289 - DNA, 15 bp, Homo sapiens
tagggtttgcgggga

SEQ ID NO: 301290 - DNA, 15 bp, Homo sapiens
gtagggtttgcgggg

SEQ ID NO: 301291 - DNA, 15 bp, Homo sapiens
tgtagggtttgcggg

SEQ ID NO: 301292 - DNA, 15 bp, Homo sapiens
ctgtagggtttgcgg

SEQ ID NO: 301293 - DNA, 15 bp, Homo sapiens
tctgtagggtttgcg

SEQ ID NO: 301294 - DNA, 15 bp, Homo sapiens
ttctgtagggtttgc

SEQ ID NO: 301295 - DNA, 15 bp, Homo sapiens
cttctgtagggtttg

SEQ ID NO: 301296 - DNA, 15 bp, Homo sapiens
acttctgtagggttt

SEQ ID NO: 301297 - DNA, 15 bp, Homo sapiens
cacttctgtagggtt

SEQ ID NO: 301298 - DNA, 15 bp, Homo sapiens
tcacttctgtagggt

SEQ ID NO: 301299 - DNA, 15 bp, Homo sapiens
gtcacttctgtaggg

SEQ ID NO: 301300 - DNA, 15 bp, Homo sapiens
tgtcacttctgtagg

SEQ ID NO: 301301 - DNA, 15 bp, Homo sapiens
ttgtcacttctgtag

SEQ ID NO: 301302 - DNA, 15 bp, Homo sapiens
tttgtcacttctgta

SEQ ID NO: 301303 - DNA, 15 bp, Homo sapiens
ttttgtcacttctgt

SEQ ID NO: 301304 - DNA, 15 bp, Homo sapiens
tttttgtcacttctg

SEQ ID NO: 301305 - DNA, 15 bp, Homo sapiens
ttttttgtcacttct

SEQ ID NO: 301306 - DNA, 15 bp, Homo sapiens
cttttttgtcacttc

SEQ ID NO: 301307 - DNA, 15 bp, Homo sapiens
tcttttttgtcactt

SEQ ID NO: 301308 - DNA, 15 bp, Homo sapiens
gtcttttttgtcact

SEQ ID NO: 301309 - DNA, 15 bp, Homo sapiens
tgtcttttttgtcac

SEQ ID NO: 301310 - DNA, 15 bp, Homo sapiens
gtgtcttttttgtca

SEQ ID NO: 301311 - DNA, 15 bp, Homo sapiens
tgtgtcttttttgtc

SEQ ID NO: 301312 - DNA, 15 bp, Homo sapiens
atgtgtcttttttgt

SEQ ID NO: 301313 - DNA, 15 bp, Homo sapiens
tatgtgtcttttttg

SEQ ID NO: 301314 - DNA, 15 bp, Homo sapiens
atatgtgtctttttt

SEQ ID NO: 301315 - DNA, 15 bp, Homo sapiens
gatatgtgtcttttt

SEQ ID NO: 301316 - DNA, 15 bp, Homo sapiens
tgatatgtgtctttt

SEQ ID NO: 301317 - DNA, 15 bp, Homo sapiens
gtgatatgtgtcttt

SEQ ID NO: 301318 - DNA, 15 bp, Homo sapiens
tgtgatatgtgtctt

SEQ ID NO: 301319 - DNA, 15 bp, Homo sapiens
ctgtgatatgtgtct

SEQ ID NO: 301320 - DNA, 15 bp, Homo sapiens
cctgtgatatgtgtc

SEQ ID NO: 301321 - DNA, 15 bp, Homo sapiens
ccctgtgatatgtgt

SEQ ID NO: 301322 - DNA, 15 bp, Homo sapiens
cccctgtgatatgtg

SEQ ID NO: 301323 - DNA, 15 bp, Homo sapiens
tcccctgtgatatgt

SEQ ID NO: 301324 - DNA, 15 bp, Homo sapiens
ctcccctgtgatatg

SEQ ID NO: 301325 - DNA, 15 bp, Homo sapiens
actcccctgtgatat

SEQ ID NO: 301326 - DNA, 15 bp, Homo sapiens
cactcccctgtgata

SEQ ID NO: 301327 - DNA, 15 bp, Homo sapiens
tcactcccctgtgat

SEQ ID NO: 301328 - DNA, 15 bp, Homo sapiens
ttcactcccctgtga

SEQ ID NO: 301329 - DNA, 15 bp, Homo sapiens
tttcactcccctgtg

SEQ ID NO: 301330 - DNA, 15 bp, Homo sapiens
gtttcactcccctgt

SEQ ID NO: 301331 - DNA, 15 bp, Homo sapiens
ggtttcactcccctg

SEQ ID NO: 301332 - DNA, 15 bp, Homo sapiens
gggtttcactcccct

SEQ ID NO: 301333 - DNA, 15 bp, Homo sapiens
tgggtttcactcccc

SEQ ID NO: 301334 - DNA, 15 bp, Homo sapiens
ctgggtttcactccc

SEQ ID NO: 301335 - DNA, 15 bp, Homo sapiens
gctgggtttcactcc

SEQ ID NO: 301336 - DNA, 15 bp, Homo sapiens
tgctgggtttcactc

SEQ ID NO: 301337 - DNA, 15 bp, Homo sapiens
ctgctgggtttcact

SEQ ID NO: 301338 - DNA, 15 bp, Homo sapiens
actgctgggtttcac

SEQ ID NO: 301339 - DNA, 15 bp, Homo sapiens
tactgctgggtttca

SEQ ID NO: 301340 - DNA, 15 bp, Homo sapiens
gtactgctgggtttc

SEQ ID NO: 301341 - DNA, 15 bp, Homo sapiens
agtactgctgggttt

SEQ ID NO: 301342 - DNA, 15 bp, Homo sapiens
gagtactgctgggtt

SEQ ID NO: 301343 - DNA, 15 bp, Homo sapiens
tgagtactgctgggt

SEQ ID NO: 301344 - DNA, 15 bp, Homo sapiens
ctgagtactgctggg

SEQ ID NO: 301345 - DNA, 15 bp, Homo sapiens
tctgagtactgctgg

SEQ ID NO: 301346 - DNA, 15 bp, Homo sapiens
gtctgagtactgctg

SEQ ID NO: 301347 - DNA, 15 bp, Homo sapiens
agtctgagtactgct

SEQ ID NO: 301348 - DNA, 15 bp, Homo sapiens
cagtctgagtactgc

SEQ ID NO: 301349 - DNA, 15 bp, Homo sapiens
acagtctgagtactg

SEQ ID NO: 301350 - DNA, 15 bp, Homo sapiens
cacagtctgagtact

SEQ ID NO: 301351 - DNA, 15 bp, Homo sapiens
tcacagtctgagtac

SEQ ID NO: 301352 - DNA, 15 bp, Homo sapiens
ttcacagtctgagta

SEQ ID NO: 301353 - DNA, 15 bp, Homo sapiens
cttcacagtctgagt

SEQ ID NO: 301354 - DNA, 15 bp, Homo sapiens
gcttcacagtctgag

SEQ ID NO: 301355 - DNA, 15 bp, Homo sapiens
tgcttcacagtctga

SEQ ID NO: 301356 - DNA, 15 bp, Homo sapiens
ctgcttcacagtctg

SEQ ID NO: 301357 - DNA, 15 bp, Homo sapiens
tctgcttcacagtct

SEQ ID NO: 301358 - DNA, 15 bp, Homo sapiens
ttctgcttcacagtc

SEQ ID NO: 301359 - DNA, 15 bp, Homo sapiens
tttctgcttcacagt

SEQ ID NO: 301360 - DNA, 15 bp, Homo sapiens
ttttctgcttcacag

SEQ ID NO: 301361 - DNA, 15 bp, Homo sapiens
tttttctgcttcaca

SEQ ID NO: 301362 - DNA, 15 bp, Homo sapiens
gtttttctgcttcac

SEQ ID NO: 301363 - DNA, 15 bp, Homo sapiens
agtttttctgcttca

SEQ ID NO: 301364 - DNA, 15 bp, Homo sapiens
cagtttttctgcttc

SEQ ID NO: 301365 - DNA, 15 bp, Homo sapiens
acagtttttctgctt

SEQ ID NO: 301366 - DNA, 15 bp, Homo sapiens
cacagtttttctgct

SEQ ID NO: 301367 - DNA, 15 bp, Homo sapiens
ccacagtttttctgc

SEQ ID NO: 301368 - DNA, 15 bp, Homo sapiens
tccacagtttttctg

SEQ ID NO: 301369 - DNA, 15 bp, Homo sapiens
ctccacagtttttct

SEQ ID NO: 301370 - DNA, 15 bp, Homo sapiens
cctccacagtttttc

SEQ ID NO: 301371 - DNA, 15 bp, Homo sapiens
ccctccacagttttt

SEQ ID NO: 301372 - DNA, 15 bp, Homo sapiens
tccctccacagtttt

SEQ ID NO: 301373 - DNA, 15 bp, Homo sapiens
ttccctccacagttt

SEQ ID NO: 301374 - DNA, 15 bp, Homo sapiens
cttccctccacagtt

SEQ ID NO: 301375 - DNA, 15 bp, Homo sapiens
acttccctccacagt

SEQ ID NO: 301376 - DNA, 15 bp, Homo sapiens
cacttccctccacag

SEQ ID NO: 301377 - DNA, 15 bp, Homo sapiens
ccacttccctccaca

SEQ ID NO: 301378 - DNA, 15 bp, Homo sapiens
tccacttccctccac

SEQ ID NO: 301379 - DNA, 15 bp, Homo sapiens
ctccacttccctcca

SEQ ID NO: 301380 - DNA, 15 bp, Homo sapiens
cctccacttccctcc

SEQ ID NO: 301381 - DNA, 15 bp, Homo sapiens
tcctccacttccctc

SEQ ID NO: 301382 - DNA, 15 bp, Homo sapiens
ctcctccacttccct

SEQ ID NO: 301383 - DNA, 15 bp, Homo sapiens
actcctccacttccc

SEQ ID NO: 301384 - DNA, 15 bp, Homo sapiens
aactcctccacttcc

SEQ ID NO: 301385 - DNA, 15 bp, Homo sapiens
caactcctccacttc

SEQ ID NO: 301386 - DNA, 15 bp, Homo sapiens
tcaactcctccactt

SEQ ID NO: 301387 - DNA, 15 bp, Homo sapiens
atcaactcctccact

SEQ ID NO: 301388 - DNA, 15 bp, Homo sapiens
aatcaactcctccac

SEQ ID NO: 301389 - DNA, 15 bp, Homo sapiens
gaatcaactcctcca

SEQ ID NO: 301390 - DNA, 15 bp, Homo sapiens
tgaatcaactcctcc

SEQ ID NO: 301391 - DNA, 15 bp, Homo sapiens
atgaatcaactcctc

SEQ ID NO: 301392 - DNA, 15 bp, Homo sapiens
aatgaatcaactcct

SEQ ID NO: 301393 - DNA, 15 bp, Homo sapiens
aaatgaatcaactcc

SEQ ID NO: 301394 - DNA, 15 bp, Homo sapiens
aaaatgaatcaactc

SEQ ID NO: 301395 - DNA, 15 bp, Homo sapiens
aaaaatgaatcaact

SEQ ID NO: 301396 - DNA, 15 bp, Homo sapiens
aaaaaatgaatcaac

SEQ ID NO: 301397 - DNA, 15 bp, Homo sapiens
aaaaaaatgaatcaa

SEQ ID NO: 301398 - DNA, 15 bp, Homo sapiens
taaaaaaatgaatca

SEQ ID NO: 301399 - DNA, 15 bp, Homo sapiens
ctaaaaaaatgaatc

SEQ ID NO: 301400 - DNA, 15 bp, Homo sapiens
actaaaaaaatgaat

SEQ ID NO: 301401 - DNA, 15 bp, Homo sapiens
tactaaaaaaatgaa

SEQ ID NO: 301402 - DNA, 15 bp, Homo sapiens
atactaaaaaaatga

SEQ ID NO: 301403 - DNA, 15 bp, Homo sapiens
tatactaaaaaaatg

SEQ ID NO: 301404 - DNA, 15 bp, Homo sapiens
ttatactaaaaaaat

SEQ ID NO: 301405 - DNA, 15 bp, Homo sapiens
tttatactaaaaaaa

SEQ ID NO: 301406 - DNA, 15 bp, Homo sapiens
ttttatactaaaaaa

SEQ ID NO: 301407 - DNA, 15 bp, Homo sapiens
tttttatactaaaaa

SEQ ID NO: 301408 - DNA, 15 bp, Homo sapiens
ttttttatactaaaa

SEQ ID NO: 301409 - DNA, 15 bp, Homo sapiens
attttttatactaaa

SEQ ID NO: 301410 - DNA, 15 bp, Homo sapiens
tattttttatactaa

SEQ ID NO: 301411 - DNA, 15 bp, Homo sapiens
ttattttttatacta

SEQ ID NO: 301412 - DNA, 15 bp, Homo sapiens
tttattttttatact

SEQ ID NO: 301413 - DNA, 15 bp, Homo sapiens
atttattttttatac

SEQ ID NO: 301414 - DNA, 15 bp, Homo sapiens
catttattttttata

SEQ ID NO: 301415 - DNA, 15 bp, Homo sapiens
tcatttattttttat

SEQ ID NO: 301416 - DNA, 15 bp, Homo sapiens
atcatttatttttta

SEQ ID NO: 301417 - DNA, 15 bp, Homo sapiens
catcatttatttttt

SEQ ID NO: 301418 - DNA, 15 bp, Homo sapiens
tcatcatttattttt

SEQ ID NO: 301419 - DNA, 15 bp, Homo sapiens
ctcatcatttatttt

SEQ ID NO: 301420 - DNA, 15 bp, Homo sapiens
actcatcatttattt

SEQ ID NO: 301421 - DNA, 15 bp, Homo sapiens
cactcatcatttatt

SEQ ID NO: 301422 - DNA, 15 bp, Homo sapiens
acactcatcatttat

SEQ ID NO: 301423 - DNA, 15 bp, Homo sapiens
tacactcatcattta

SEQ ID NO: 301424 - DNA, 15 bp, Homo sapiens
atacactcatcattt

SEQ ID NO: 301425 - DNA, 15 bp, Homo sapiens
aatacactcatcatt

SEQ ID NO: 301426 - DNA, 15 bp, Homo sapiens
caatacactcatcat

SEQ ID NO: 301427 - DNA, 15 bp, Homo sapiens
acaatacactcatca

SEQ ID NO: 301428 - DNA, 15 bp, Homo sapiens
cacaatacactcatc

SEQ ID NO: 301429 - DNA, 15 bp, Homo sapiens
ccacaatacactcat

SEQ ID NO: 301430 - DNA, 15 bp, Homo sapiens
tccacaatacactca

SEQ ID NO: 301431 - DNA, 15 bp, Homo sapiens
atccacaatacactc

SEQ ID NO: 301432 - DNA, 15 bp, Homo sapiens
tatccacaatacact

SEQ ID NO: 301433 - DNA, 15 bp, Homo sapiens
gtatccacaatacac

SEQ ID NO: 301434 - DNA, 15 bp, Homo sapiens
tgtatccacaataca

SEQ ID NO: 301435 - DNA, 15 bp, Homo sapiens
ttgtatccacaatac

SEQ ID NO: 301436 - DNA, 15 bp, Homo sapiens
attgtatccacaata

SEQ ID NO: 301437 - DNA, 15 bp, Homo sapiens
tattgtatccacaat

SEQ ID NO: 301438 - DNA, 15 bp, Homo sapiens
ttattgtatccacaa

SEQ ID NO: 301439 - DNA, 15 bp, Homo sapiens
tttattgtatccaca

SEQ ID NO: 301440 - DNA, 15 bp, Homo sapiens
ctttattgtatccac

SEQ ID NO: 301441 - DNA, 15 bp, Homo sapiens
actttattgtatcca

SEQ ID NO: 301442 - DNA, 15 bp, Homo sapiens
tactttattgtatcc

SEQ ID NO: 301443 - DNA, 15 bp, Homo sapiens
ctactttattgtatc

SEQ ID NO: 301444 - DNA, 15 bp, Homo sapiens
tctactttattgtat

SEQ ID NO: 301445 - DNA, 15 bp, Homo sapiens
ctctactttattgta

SEQ ID NO: 301446 - DNA, 15 bp, Homo sapiens
tctctactttattgt

SEQ ID NO: 301447 - DNA, 15 bp, Homo sapiens
ttctctactttattg

SEQ ID NO: 301448 - DNA, 15 bp, Homo sapiens
tttctctactttatt

SEQ ID NO: 301449 - DNA, 15 bp, Homo sapiens
ttttctctactttat

SEQ ID NO: 301450 - DNA, 15 bp, Homo sapiens
gttttctctacttta

SEQ ID NO: 301451 - DNA, 15 bp, Homo sapiens
ggttttctctacttt

SEQ ID NO: 301452 - DNA, 15 bp, Homo sapiens
tggttttctctactt

SEQ ID NO: 301453 - DNA, 15 bp, Homo sapiens
gtggttttctctact

SEQ ID NO: 301454 - DNA, 15 bp, Homo sapiens
tgtggttttctctac

SEQ ID NO: 301455 - DNA, 15 bp, Homo sapiens
ctgtggttttctcta

SEQ ID NO: 301456 - DNA, 15 bp, Homo sapiens
gctgtggttttctct

SEQ ID NO: 301457 - DNA, 15 bp, Homo sapiens
tgctgtggttttctc

SEQ ID NO: 301458 - DNA, 15 bp, Homo sapiens
gtgctgtggttttct

SEQ ID NO: 301459 - DNA, 15 bp, Homo sapiens
tgtgctgtggttttc

SEQ ID NO: 301460 - DNA, 15 bp, Homo sapiens
gtgtgctgtggtttt

SEQ ID NO: 301461 - DNA, 15 bp, Homo sapiens
tgtgtgctgtggttt

SEQ ID NO: 301462 - DNA, 15 bp, Homo sapiens
ttgtgtgctgtggtt

SEQ ID NO: 301463 - DNA, 15 bp, Homo sapiens
gttgtgtgctgtggt

SEQ ID NO: 301464 - DNA, 15 bp, Homo sapiens
tgttgtgtgctgtgg

SEQ ID NO: 301465 - DNA, 15 bp, Homo sapiens
gtgttgtgtgctgtg

SEQ ID NO: 301466 - DNA, 15 bp, Homo sapiens
ggtgttgtgtgctgt

SEQ ID NO: 301467 - DNA, 15 bp, Homo sapiens
gggtgttgtgtgctg

SEQ ID NO: 301468 - DNA, 15 bp, Homo sapiens
ggggtgttgtgtgct

SEQ ID NO: 301469 - DNA, 15 bp, Homo sapiens
gggggtgttgtgtgc

SEQ ID NO: 301470 - DNA, 15 bp, Homo sapiens
tgggggtgttgtgtg

SEQ ID NO: 301471 - DNA, 15 bp, Homo sapiens
ctgggggtgttgtgt

SEQ ID NO: 301472 - DNA, 15 bp, Homo sapiens
cctgggggtgttgtg

SEQ ID NO: 301473 - DNA, 15 bp, Homo sapiens
tcctgggggtgttgt

SEQ ID NO: 301474 - DNA, 15 bp, Homo sapiens
ttcctgggggtgttg

SEQ ID NO: 301475 - DNA, 15 bp, Homo sapiens
tttcctgggggtgtt

SEQ ID NO: 301476 - DNA, 15 bp, Homo sapiens
ctttcctgggggtgt

SEQ ID NO: 301477 - DNA, 15 bp, Homo sapiens
cctttcctgggggtg

SEQ ID NO: 301478 - DNA, 15 bp, Homo sapiens
ccctttcctgggggt

SEQ ID NO: 301479 - DNA, 15 bp, Homo sapiens
cccctttcctggggg

SEQ ID NO: 301480 - DNA, 15 bp, Homo sapiens
tcccctttcctgggg

SEQ ID NO: 301481 - DNA, 15 bp, Homo sapiens
gtcccctttcctggg

SEQ ID NO: 301482 - DNA, 15 bp, Homo sapiens
agtcccctttcctgg

SEQ ID NO: 301483 - DNA, 15 bp, Homo sapiens
cagtcccctttcctg

SEQ ID NO: 301484 - DNA, 15 bp, Homo sapiens
ccagtcccctttcct

SEQ ID NO: 301485 - DNA, 15 bp, Homo sapiens
accagtcccctttcc

SEQ ID NO: 301486 - DNA, 15 bp, Homo sapiens
caccagtcccctttc

SEQ ID NO: 301487 - DNA, 15 bp, Homo sapiens
ccaccagtccccttt

SEQ ID NO: 301488 - DNA, 15 bp, Homo sapiens
tccaccagtcccctt

SEQ ID NO: 301489 - DNA, 15 bp, Homo sapiens
ttccaccagtcccct

SEQ ID NO: 301490 - DNA, 15 bp, Homo sapiens
cttccaccagtcccc

SEQ ID NO: 301491 - DNA, 15 bp, Homo sapiens
acttccaccagtccc

SEQ ID NO: 301492 - DNA, 15 bp, Homo sapiens
cacttccaccagtcc

SEQ ID NO: 301493 - DNA, 15 bp, Homo sapiens
ccacttccaccagtc

SEQ ID NO: 301494 - DNA, 15 bp, Homo sapiens
cccacttccaccagt

SEQ ID NO: 301495 - DNA, 15 bp, Homo sapiens
tcccacttccaccag

SEQ ID NO: 301496 - DNA, 15 bp, Homo sapiens
ctcccacttccacca

SEQ ID NO: 301497 - DNA, 15 bp, Homo sapiens
actcccacttccacc

SEQ ID NO: 301498 - DNA, 15 bp, Homo sapiens
gactcccacttccac

SEQ ID NO: 301499 - DNA, 15 bp, Homo sapiens
agactcccacttcca

SEQ ID NO: 301500 - DNA, 15 bp, Homo sapiens
aagactcccacttcc

SEQ ID NO: 301501 - DNA, 15 bp, Homo sapiens
taagactcccacttc

SEQ ID NO: 301502 - DNA, 15 bp, Homo sapiens
ctaagactcccactt

SEQ ID NO: 301503 - DNA, 15 bp, Homo sapiens
tctaagactcccact

SEQ ID NO: 301504 - DNA, 15 bp, Homo sapiens
ctctaagactcccac

SEQ ID NO: 301505 - DNA, 15 bp, Homo sapiens
tctctaagactccca

SEQ ID NO: 301506 - DNA, 15 bp, Homo sapiens
ctctctaagactccc

SEQ ID NO: 301507 - DNA, 15 bp, Homo sapiens
gctctctaagactcc

SEQ ID NO: 301508 - DNA, 15 bp, Homo sapiens
ggctctctaagactc

SEQ ID NO: 301509 - DNA, 15 bp, Homo sapiens
gggctctctaagact

SEQ ID NO: 301510 - DNA, 15 bp, Homo sapiens
ggggctctctaagac

SEQ ID NO: 301511 - DNA, 15 bp, Homo sapiens
gggggctctctaaga

SEQ ID NO: 301512 - DNA, 15 bp, Homo sapiens
tgggggctctctaag

SEQ ID NO: 301513 - DNA, 15 bp, Homo sapiens
ttgggggctctctaa

SEQ ID NO: 301514 - DNA, 15 bp, Homo sapiens
cttgggggctctcta

SEQ ID NO: 301515 - DNA, 15 bp, Homo sapiens
gcttgggggctctct

SEQ ID NO: 301516 - DNA, 15 bp, Homo sapiens
agcttgggggctctc

SEQ ID NO: 301517 - DNA, 15 bp, Homo sapiens
gagcttgggggctct

SEQ ID NO: 301518 - DNA, 15 bp, Homo sapiens
tgagcttgggggctc

SEQ ID NO: 301519 - DNA, 15 bp, Homo sapiens
ttgagcttgggggct

SEQ ID NO: 301520 - DNA, 15 bp, Homo sapiens
tttgagcttgggggc

SEQ ID NO: 301521 - DNA, 15 bp, Homo sapiens
ctttgagcttggggg

SEQ ID NO: 301522 - DNA, 15 bp, Homo sapiens
actttgagcttgggg

SEQ ID NO: 301523 - DNA, 15 bp, Homo sapiens
tactttgagcttggg

SEQ ID NO: 301524 - DNA, 15 bp, Homo sapiens
ctactttgagcttgg

SEQ ID NO: 301525 - DNA, 15 bp, Homo sapiens
gctactttgagcttg

SEQ ID NO: 301526 - DNA, 15 bp, Homo sapiens
tgctactttgagctt

SEQ ID NO: 301527 - DNA, 15 bp, Homo sapiens
ctgctactttgagct

SEQ ID NO: 301528 - DNA, 15 bp, Homo sapiens
tctgctactttgagc

SEQ ID NO: 301529 - DNA, 15 bp, Homo sapiens
atctgctactttgag

SEQ ID NO: 301530 - DNA, 15 bp, Homo sapiens
tatctgctactttga

SEQ ID NO: 301531 - DNA, 15 bp, Homo sapiens
gtatctgctactttg

SEQ ID NO: 301532 - DNA, 15 bp, Homo sapiens
tgtatctgctacttt

SEQ ID NO: 301533 - DNA, 15 bp, Homo sapiens
ctgtatctgctactt

SEQ ID NO: 301534 - DNA, 15 bp, Homo sapiens
tctgtatctgctact

SEQ ID NO: 301535 - DNA, 15 bp, Homo sapiens
ctctgtatctgctac

SEQ ID NO: 301536 - DNA, 15 bp, Homo sapiens
tctctgtatctgcta

SEQ ID NO: 301537 - DNA, 15 bp, Homo sapiens
ctctctgtatctgct

SEQ ID NO: 301538 - DNA, 15 bp, Homo sapiens
actctctgtatctgc

SEQ ID NO: 301539 - DNA, 15 bp, Homo sapiens
cactctctgtatctg

SEQ ID NO: 301540 - DNA, 15 bp, Homo sapiens
ccactctctgtatct

SEQ ID NO: 301541 - DNA, 15 bp, Homo sapiens
cccactctctgtatc

SEQ ID NO: 301542 - DNA, 15 bp, Homo sapiens
ccccactctctgtat

SEQ ID NO: 301543 - DNA, 15 bp, Homo sapiens
gccccactctctgta

SEQ ID NO: 301544 - DNA, 15 bp, Homo sapiens
tgccccactctctgt

SEQ ID NO: 301545 - DNA, 15 bp, Homo sapiens
ttgccccactctctg

SEQ ID NO: 301546 - DNA, 15 bp, Homo sapiens
attgccccactctct

SEQ ID NO: 301547 - DNA, 15 bp, Homo sapiens
tattgccccactctc

SEQ ID NO: 301548 - DNA, 15 bp, Homo sapiens
ttattgccccactct

SEQ ID NO: 301549 - DNA, 15 bp, Homo sapiens
attattgccccactc

SEQ ID NO: 301550 - DNA, 15 bp, Homo sapiens
gattattgccccact

SEQ ID NO: 301551 - DNA, 15 bp, Homo sapiens
tgattattgccccac

SEQ ID NO: 301552 - DNA, 15 bp, Homo sapiens
ctgattattgcccca

SEQ ID NO: 301553 - DNA, 15 bp, Homo sapiens
cctgattattgcccc

SEQ ID NO: 301554 - DNA, 15 bp, Homo sapiens
tcctgattattgccc

SEQ ID NO: 301555 - DNA, 15 bp, Homo sapiens
ttcctgattattgcc

SEQ ID NO: 301556 - DNA, 15 bp, Homo sapiens
cttcctgattattgc

SEQ ID NO: 301557 - DNA, 15 bp, Homo sapiens
ccttcctgattattg

SEQ ID NO: 301558 - DNA, 15 bp, Homo sapiens
accttcctgattatt

SEQ ID NO: 301559 - DNA, 15 bp, Homo sapiens
aaccttcctgattat

SEQ ID NO: 301560 - DNA, 15 bp, Homo sapiens
aaaccttcctgatta

SEQ ID NO: 301561 - DNA, 15 bp, Homo sapiens
aaaaccttcctgatt

SEQ ID NO: 301562 - DNA, 15 bp, Homo sapiens
gaaaaccttcctgat

SEQ ID NO: 301563 - DNA, 15 bp, Homo sapiens
agaaaaccttcctga

SEQ ID NO: 301564 - DNA, 15 bp, Homo sapiens
tagaaaaccttcctg

SEQ ID NO: 301565 - DNA, 15 bp, Homo sapiens
ttagaaaaccttcct

SEQ ID NO: 301566 - DNA, 15 bp, Homo sapiens
tttagaaaaccttcc

SEQ ID NO: 301567 - DNA, 15 bp, Homo sapiens
ctttagaaaaccttc

SEQ ID NO: 301568 - DNA, 15 bp, Homo sapiens
actttagaaaacctt

SEQ ID NO: 301569 - DNA, 15 bp, Homo sapiens
cactttagaaaacct

SEQ ID NO: 301570 - DNA, 15 bp, Homo sapiens
gcactttagaaaacc

SEQ ID NO: 301571 - DNA, 15 bp, Homo sapiens
agcactttagaaaac

SEQ ID NO: 301572 - DNA, 15 bp, Homo sapiens
cagcactttagaaaa

SEQ ID NO: 301573 - DNA, 15 bp, Homo sapiens
acagcactttagaaa

SEQ ID NO: 301574 - DNA, 15 bp, Homo sapiens
aacagcactttagaa

SEQ ID NO: 301575 - DNA, 15 bp, Homo sapiens
aaacagcactttaga

SEQ ID NO: 301576 - DNA, 15 bp, Homo sapiens
caaacagcactttag

SEQ ID NO: 301577 - DNA, 15 bp, Homo sapiens
ccaaacagcacttta

SEQ ID NO: 301578 - DNA, 15 bp, Homo sapiens
gccaaacagcacttt

SEQ ID NO: 301579 - DNA, 15 bp, Homo sapiens
tgccaaacagcactt

SEQ ID NO: 301580 - DNA, 15 bp, Homo sapiens
ttgccaaacagcact

SEQ ID NO: 301581 - DNA, 15 bp, Homo sapiens
attgccaaacagcac

SEQ ID NO: 301582 - DNA, 15 bp, Homo sapiens
cattgccaaacagca

SEQ ID NO: 301583 - DNA, 15 bp, Homo sapiens
ccattgccaaacagc

SEQ ID NO: 301584 - DNA, 15 bp, Homo sapiens
accattgccaaacag

SEQ ID NO: 301585 - DNA, 15 bp, Homo sapiens
gaccattgccaaaca

SEQ ID NO: 301586 - DNA, 15 bp, Homo sapiens
ggaccattgccaaac

SEQ ID NO: 301587 - DNA, 15 bp, Homo sapiens
aggaccattgccaaa

SEQ ID NO: 301588 - DNA, 15 bp, Homo sapiens
gaggaccattgccaa

SEQ ID NO: 301589 - DNA, 15 bp, Homo sapiens
tgaggaccattgcca

SEQ ID NO: 301590 - DNA, 15 bp, Homo sapiens
ttgaggaccattgcc

SEQ ID NO: 301591 - DNA, 15 bp, Homo sapiens
tttgaggaccattgc

SEQ ID NO: 301592 - DNA, 15 bp, Homo sapiens
gtttgaggaccattg

SEQ ID NO: 301593 - DNA, 15 bp, Homo sapiens
agtttgaggaccatt

SEQ ID NO: 301594 - DNA, 15 bp, Homo sapiens
aagtttgaggaccat

SEQ ID NO: 301595 - DNA, 15 bp, Homo sapiens
caagtttgaggacca

SEQ ID NO: 301596 - DNA, 15 bp, Homo sapiens
tcaagtttgaggacc

SEQ ID NO: 301597 - DNA, 15 bp, Homo sapiens
ctcaagtttgaggac

SEQ ID NO: 301598 - DNA, 15 bp, Homo sapiens
gctcaagtttgagga

SEQ ID NO: 301599 - DNA, 15 bp, Homo sapiens
tgctcaagtttgagg

SEQ ID NO: 301600 - DNA, 15 bp, Homo sapiens
atgctcaagtttgag

SEQ ID NO: 301601 - DNA, 15 bp, Homo sapiens
catgctcaagtttga

SEQ ID NO: 301602 - DNA, 15 bp, Homo sapiens
gcatgctcaagtttg

SEQ ID NO: 301603 - DNA, 15 bp, Homo sapiens
tgcatgctcaagttt

SEQ ID NO: 301604 - DNA, 15 bp, Homo sapiens
atgcatgctcaagtt

SEQ ID NO: 301605 - DNA, 15 bp, Homo sapiens
gatgcatgctcaagt

SEQ ID NO: 301606 - DNA, 15 bp, Homo sapiens
tgatgcatgctcaag

SEQ ID NO: 301607 - DNA, 15 bp, Homo sapiens
ttgatgcatgctcaa

SEQ ID NO: 301608 - DNA, 15 bp, Homo sapiens
tttgatgcatgctca

SEQ ID NO: 301609 - DNA, 15 bp, Homo sapiens
ttttgatgcatgctc

SEQ ID NO: 301610 - DNA, 15 bp, Homo sapiens
attttgatgcatgct

SEQ ID NO: 301611 - DNA, 15 bp, Homo sapiens
aattttgatgcatgc

SEQ ID NO: 301612 - DNA, 15 bp, Homo sapiens
taattttgatgcatg

SEQ ID NO: 301613 - DNA, 15 bp, Homo sapiens
gtaattttgatgcat

SEQ ID NO: 301614 - DNA, 15 bp, Homo sapiens
ggtaattttgatgca

SEQ ID NO: 301615 - DNA, 15 bp, Homo sapiens
tggtaattttgatgc

SEQ ID NO: 301616 - DNA, 15 bp, Homo sapiens
ctggtaattttgatg

SEQ ID NO: 301617 - DNA, 15 bp, Homo sapiens
cctggtaattttgat

SEQ ID NO: 301618 - DNA, 15 bp, Homo sapiens
tcctggtaattttga

SEQ ID NO: 301619 - DNA, 15 bp, Homo sapiens
ctcctggtaattttg

SEQ ID NO: 301620 - DNA, 15 bp, Homo sapiens
cctcctggtaatttt

SEQ ID NO: 301621 - DNA, 15 bp, Homo sapiens
ccctcctggtaattt

SEQ ID NO: 301622 - DNA, 15 bp, Homo sapiens
gccctcctggtaatt

SEQ ID NO: 301623 - DNA, 15 bp, Homo sapiens
agccctcctggtaat

SEQ ID NO: 301624 - DNA, 15 bp, Homo sapiens
aagccctcctggtaa

SEQ ID NO: 301625 - DNA, 15 bp, Homo sapiens
caagccctcctggta

SEQ ID NO: 301626 - DNA, 15 bp, Homo sapiens
acaagccctcctggt

SEQ ID NO: 301627 - DNA, 15 bp, Homo sapiens
aacaagccctcctgg

SEQ ID NO: 301628 - DNA, 15 bp, Homo sapiens
taacaagccctcctg

SEQ ID NO: 301629 - DNA, 15 bp, Homo sapiens
ttaacaagccctcct

SEQ ID NO: 301630 - DNA, 15 bp, Homo sapiens
tttaacaagccctcc

SEQ ID NO: 301631 - DNA, 15 bp, Homo sapiens
ttttaacaagccctc

SEQ ID NO: 301632 - DNA, 15 bp, Homo sapiens
gttttaacaagccct

SEQ ID NO: 301633 - DNA, 15 bp, Homo sapiens
tgttttaacaagccc

SEQ ID NO: 301634 - DNA, 15 bp, Homo sapiens
gtgttttaacaagcc

SEQ ID NO: 301635 - DNA, 15 bp, Homo sapiens
tgtgttttaacaagc

SEQ ID NO: 301636 - DNA, 15 bp, Homo sapiens
atgtgttttaacaag

SEQ ID NO: 301637 - DNA, 15 bp, Homo sapiens
tatgtgttttaacaa

SEQ ID NO: 301638 - DNA, 15 bp, Homo sapiens
atatgtgttttaaca

SEQ ID NO: 301639 - DNA, 15 bp, Homo sapiens
aatatgtgttttaac

SEQ ID NO: 301640 - DNA, 15 bp, Homo sapiens
taatatgtgttttaa

SEQ ID NO: 301641 - DNA, 15 bp, Homo sapiens
gtaatatgtgtttta

SEQ ID NO: 301642 - DNA, 15 bp, Homo sapiens
tgtaatatgtgtttt

SEQ ID NO: 301643 - DNA, 15 bp, Homo sapiens
ctgtaatatgtgttt

SEQ ID NO: 301644 - DNA, 15 bp, Homo sapiens
tctgtaatatgtgtt

SEQ ID NO: 301645 - DNA, 15 bp, Homo sapiens
atctgtaatatgtgt

SEQ ID NO: 301646 - DNA, 15 bp, Homo sapiens
aatctgtaatatgtg

SEQ ID NO: 301647 - DNA, 15 bp, Homo sapiens
caatctgtaatatgt

SEQ ID NO: 301648 - DNA, 15 bp, Homo sapiens
gcaatctgtaatatg

SEQ ID NO: 301649 - DNA, 15 bp, Homo sapiens
agcaatctgtaatat

SEQ ID NO: 301650 - DNA, 15 bp, Homo sapiens
cagcaatctgtaata

SEQ ID NO: 301651 - DNA, 15 bp, Homo sapiens
ccagcaatctgtaat

SEQ ID NO: 301652 - DNA, 15 bp, Homo sapiens
cccagcaatctgtaa

SEQ ID NO: 301653 - DNA, 15 bp, Homo sapiens
gcccagcaatctgta

SEQ ID NO: 301654 - DNA, 15 bp, Homo sapiens
ggcccagcaatctgt

SEQ ID NO: 301655 - DNA, 15 bp, Homo sapiens
gggcccagcaatctg

SEQ ID NO: 301656 - DNA, 15 bp, Homo sapiens
tgggcccagcaatct

SEQ ID NO: 301657 - DNA, 15 bp, Homo sapiens
ctgggcccagcaatc

SEQ ID NO: 301658 - DNA, 15 bp, Homo sapiens
actgggcccagcaat

SEQ ID NO: 301659 - DNA, 15 bp, Homo sapiens
gactgggcccagcaa

SEQ ID NO: 301660 - DNA, 15 bp, Homo sapiens
tgactgggcccagca

SEQ ID NO: 301661 - DNA, 15 bp, Homo sapiens
gtgactgggcccagc

SEQ ID NO: 301662 - DNA, 15 bp, Homo sapiens
tgtgactgggcccag

SEQ ID NO: 301663 - DNA, 15 bp, Homo sapiens
ttgtgactgggccca

SEQ ID NO: 301664 - DNA, 15 bp, Homo sapiens
tttgtgactgggccc

SEQ ID NO: 301665 - DNA, 15 bp, Homo sapiens
ctttgtgactgggcc

SEQ ID NO: 301666 - DNA, 15 bp, Homo sapiens
actttgtgactgggc

SEQ ID NO: 301667 - DNA, 15 bp, Homo sapiens
aactttgtgactggg

SEQ ID NO: 301668 - DNA, 15 bp, Homo sapiens
aaactttgtgactgg

SEQ ID NO: 301669 - DNA, 15 bp, Homo sapiens
gaaactttgtgactg

SEQ ID NO: 301670 - DNA, 15 bp, Homo sapiens
ggaaactttgtgact

SEQ ID NO: 301671 - DNA, 15 bp, Homo sapiens
tggaaactttgtgac

SEQ ID NO: 301672 - DNA, 15 bp, Homo sapiens
ctggaaactttgtga

SEQ ID NO: 301673 - DNA, 15 bp, Homo sapiens
actggaaactttgtg

SEQ ID NO: 301674 - DNA, 15 bp, Homo sapiens
cactggaaactttgt

SEQ ID NO: 301675 - DNA, 15 bp, Homo sapiens
acactggaaactttg

SEQ ID NO: 301676 - DNA, 15 bp, Homo sapiens
tacactggaaacttt

SEQ ID NO: 301677 - DNA, 15 bp, Homo sapiens
ctacactggaaactt

SEQ ID NO: 301678 - DNA, 15 bp, Homo sapiens
cctacactggaaact

SEQ ID NO: 301679 - DNA, 15 bp, Homo sapiens
ccctacactggaaac

SEQ ID NO: 301680 - DNA, 15 bp, Homo sapiens
accctacactggaaa

SEQ ID NO: 301681 - DNA, 15 bp, Homo sapiens
gaccctacactggaa

SEQ ID NO: 301682 - DNA, 15 bp, Homo sapiens
ggaccctacactgga

SEQ ID NO: 301683 - DNA, 15 bp, Homo sapiens
tggaccctacactgg

SEQ ID NO: 301684 - DNA, 15 bp, Homo sapiens
ttggaccctacactg

SEQ ID NO: 301685 - DNA, 15 bp, Homo sapiens
cttggaccctacact

SEQ ID NO: 301686 - DNA, 15 bp, Homo sapiens
tcttggaccctacac

SEQ ID NO: 301687 - DNA, 15 bp, Homo sapiens
ttcttggaccctaca

SEQ ID NO: 301688 - DNA, 15 bp, Homo sapiens
attcttggaccctac

SEQ ID NO: 301689 - DNA, 15 bp, Homo sapiens
aattcttggacccta

SEQ ID NO: 301690 - DNA, 15 bp, Homo sapiens
aaattcttggaccct

SEQ ID NO: 301691 - DNA, 15 bp, Homo sapiens
caaattcttggaccc

SEQ ID NO: 301692 - DNA, 15 bp, Homo sapiens
acaaattcttggacc

SEQ ID NO: 301693 - DNA, 15 bp, Homo sapiens
tacaaattcttggac

SEQ ID NO: 301694 - DNA, 15 bp, Homo sapiens
atacaaattcttgga

SEQ ID NO: 301695 - DNA, 15 bp, Homo sapiens
aatacaaattcttgg

SEQ ID NO: 301696 - DNA, 15 bp, Homo sapiens
aaatacaaattcttg

SEQ ID NO: 301697 - DNA, 15 bp, Homo sapiens
gaaatacaaattctt

SEQ ID NO: 301698 - DNA, 15 bp, Homo sapiens
agaaatacaaattct

SEQ ID NO: 301699 - DNA, 15 bp, Homo sapiens
cagaaatacaaattc

SEQ ID NO: 301700 - DNA, 15 bp, Homo sapiens
tcagaaatacaaatt

SEQ ID NO: 301701 - DNA, 15 bp, Homo sapiens
atcagaaatacaaat

SEQ ID NO: 301702 - DNA, 15 bp, Homo sapiens
tatcagaaatacaaa

SEQ ID NO: 301703 - DNA, 15 bp, Homo sapiens
atatcagaaatacaa

SEQ ID NO: 301704 - DNA, 15 bp, Homo sapiens
catatcagaaataca

SEQ ID NO: 301705 - DNA, 15 bp, Homo sapiens
acatatcagaaatac

SEQ ID NO: 301706 - DNA, 15 bp, Homo sapiens
aacatatcagaaata

SEQ ID NO: 301707 - DNA, 15 bp, Homo sapiens
aaacatatcagaaat

SEQ ID NO: 301708 - DNA, 15 bp, Homo sapiens
gaaacatatcagaaa

SEQ ID NO: 301709 - DNA, 15 bp, Homo sapiens
ggaaacatatcagaa

SEQ ID NO: 301710 - DNA, 15 bp, Homo sapiens
tggaaacatatcaga

SEQ ID NO: 301711 - DNA, 15 bp, Homo sapiens
ctggaaacatatcag

SEQ ID NO: 301712 - DNA, 15 bp, Homo sapiens
cctggaaacatatca

SEQ ID NO: 301713 - DNA, 15 bp, Homo sapiens
acctggaaacatatc

SEQ ID NO: 301714 - DNA, 15 bp, Homo sapiens
cacctggaaacatat

SEQ ID NO: 301715 - DNA, 15 bp, Homo sapiens
tcacctggaaacata

SEQ ID NO: 301716 - DNA, 15 bp, Homo sapiens
atcacctggaaacat

SEQ ID NO: 301717 - DNA, 15 bp, Homo sapiens
tatcacctggaaaca

SEQ ID NO: 301718 - DNA, 15 bp, Homo sapiens
gtatcacctggaaac

SEQ ID NO: 301719 - DNA, 15 bp, Homo sapiens
agtatcacctggaaa

SEQ ID NO: 301720 - DNA, 15 bp, Homo sapiens
cagtatcacctggaa

SEQ ID NO: 301721 - DNA, 15 bp, Homo sapiens
tcagtatcacctgga

SEQ ID NO: 301722 - DNA, 15 bp, Homo sapiens
atcagtatcacctgg

SEQ ID NO: 301723 - DNA, 15 bp, Homo sapiens
catcagtatcacctg

SEQ ID NO: 301724 - DNA, 15 bp, Homo sapiens
gcatcagtatcacct

SEQ ID NO: 301725 - DNA, 15 bp, Homo sapiens
agcatcagtatcacc

SEQ ID NO: 301726 - DNA, 15 bp, Homo sapiens
cagcatcagtatcac

SEQ ID NO: 301727 - DNA, 15 bp, Homo sapiens
gcagcatcagtatca

SEQ ID NO: 301728 - DNA, 15 bp, Homo sapiens
agcagcatcagtatc

SEQ ID NO: 301729 - DNA, 15 bp, Homo sapiens
cagcagcatcagtat

SEQ ID NO: 301730 - DNA, 15 bp, Homo sapiens
ccagcagcatcagta

SEQ ID NO: 301731 - DNA, 15 bp, Homo sapiens
accagcagcatcagt

SEQ ID NO: 301732 - DNA, 15 bp, Homo sapiens
gaccagcagcatcag

SEQ ID NO: 301733 - DNA, 15 bp, Homo sapiens
agaccagcagcatca

SEQ ID NO: 301734 - DNA, 15 bp, Homo sapiens
cagaccagcagcatc

SEQ ID NO: 301735 - DNA, 15 bp, Homo sapiens
ccagaccagcagcat

SEQ ID NO: 301736 - DNA, 15 bp, Homo sapiens
cccagaccagcagca

SEQ ID NO: 301737 - DNA, 15 bp, Homo sapiens
acccagaccagcagc

SEQ ID NO: 301738 - DNA, 15 bp, Homo sapiens
tacccagaccagcag

SEQ ID NO: 301739 - DNA, 15 bp, Homo sapiens
gtacccagaccagca

SEQ ID NO: 301740 - DNA, 15 bp, Homo sapiens
agtacccagaccagc

SEQ ID NO: 301741 - DNA, 15 bp, Homo sapiens
tagtacccagaccag

SEQ ID NO: 301742 - DNA, 15 bp, Homo sapiens
gtagtacccagacca

SEQ ID NO: 301743 - DNA, 15 bp, Homo sapiens
tgtagtacccagacc

SEQ ID NO: 301744 - DNA, 15 bp, Homo sapiens
gtgtagtacccagac

SEQ ID NO: 301745 - DNA, 15 bp, Homo sapiens
agtgtagtacccaga

SEQ ID NO: 301746 - DNA, 15 bp, Homo sapiens
aagtgtagtacccag

SEQ ID NO: 301747 - DNA, 15 bp, Homo sapiens
aaagtgtagtaccca

SEQ ID NO: 301748 - DNA, 15 bp, Homo sapiens
caaagtgtagtaccc

SEQ ID NO: 301749 - DNA, 15 bp, Homo sapiens
acaaagtgtagtacc

SEQ ID NO: 301750 - DNA, 15 bp, Homo sapiens
cacaaagtgtagtac

SEQ ID NO: 301751 - DNA, 15 bp, Homo sapiens
tcacaaagtgtagta

SEQ ID NO: 301752 - DNA, 15 bp, Homo sapiens
ctcacaaagtgtagt

SEQ ID NO: 301753 - DNA, 15 bp, Homo sapiens
gctcacaaagtgtag

SEQ ID NO: 301754 - DNA, 15 bp, Homo sapiens
tgctcacaaagtgta

SEQ ID NO: 301755 - DNA, 15 bp, Homo sapiens
ttgctcacaaagtgt

SEQ ID NO: 301756 - DNA, 15 bp, Homo sapiens
gttgctcacaaagtg

SEQ ID NO: 301757 - DNA, 15 bp, Homo sapiens
tgttgctcacaaagt

SEQ ID NO: 301758 - DNA, 15 bp, Homo sapiens
atgttgctcacaaag

SEQ ID NO: 301759 - DNA, 15 bp, Homo sapiens
aatgttgctcacaaa

SEQ ID NO: 301760 - DNA, 15 bp, Homo sapiens
aaatgttgctcacaa

SEQ ID NO: 301761 - DNA, 15 bp, Homo sapiens
aaaatgttgctcaca

SEQ ID NO: 301762 - DNA, 15 bp, Homo sapiens
taaaatgttgctcac

SEQ ID NO: 301763 - DNA, 15 bp, Homo sapiens
ttaaaatgttgctca

SEQ ID NO: 301764 - DNA, 15 bp, Homo sapiens
cttaaaatgttgctc

SEQ ID NO: 301765 - DNA, 15 bp, Homo sapiens
tcttaaaatgttgct

SEQ ID NO: 301766 - DNA, 15 bp, Homo sapiens
ttcttaaaatgttgc

SEQ ID NO: 301767 - DNA, 15 bp, Homo sapiens
gttcttaaaatgttg

SEQ ID NO: 301768 - DNA, 15 bp, Homo sapiens
tgttcttaaaatgtt

SEQ ID NO: 301769 - DNA, 15 bp, Homo sapiens
atgttcttaaaatgt

SEQ ID NO: 301770 - DNA, 15 bp, Homo sapiens
catgttcttaaaatg

SEQ ID NO: 301771 - DNA, 15 bp, Homo sapiens
tcatgttcttaaaat

SEQ ID NO: 301772 - DNA, 15 bp, Homo sapiens
ttcatgttcttaaaa

SEQ ID NO: 301773 - DNA, 15 bp, Homo sapiens
tttcatgttcttaaa

SEQ ID NO: 301774 - DNA, 15 bp, Homo sapiens
gtttcatgttcttaa

SEQ ID NO: 301775 - DNA, 15 bp, Homo sapiens
tgtttcatgttctta

SEQ ID NO: 301776 - DNA, 15 bp, Homo sapiens
gtgtttcatgttctt

SEQ ID NO: 301777 - DNA, 15 bp, Homo sapiens
ggtgtttcatgttct

SEQ ID NO: 301778 - DNA, 15 bp, Homo sapiens
aggtgtttcatgttc

SEQ ID NO: 301779 - DNA, 15 bp, Homo sapiens
caggtgtttcatgtt

SEQ ID NO: 301780 - DNA, 15 bp, Homo sapiens
ccaggtgtttcatgt

SEQ ID NO: 301781 - DNA, 15 bp, Homo sapiens
tccaggtgtttcatg

SEQ ID NO: 301782 - DNA, 15 bp, Homo sapiens
gtccaggtgtttcat

SEQ ID NO: 301783 - DNA, 15 bp, Homo sapiens
ggtccaggtgtttca

SEQ ID NO: 301784 - DNA, 15 bp, Homo sapiens
tggtccaggtgtttc

SEQ ID NO: 301785 - DNA, 15 bp, Homo sapiens
ctggtccaggtgttt

SEQ ID NO: 301786 - DNA, 15 bp, Homo sapiens
actggtccaggtgtt

SEQ ID NO: 301787 - DNA, 15 bp, Homo sapiens
gactggtccaggtgt

SEQ ID NO: 301788 - DNA, 15 bp, Homo sapiens
ggactggtccaggtg

SEQ ID NO: 301789 - DNA, 15 bp, Homo sapiens
gggactggtccaggt

SEQ ID NO: 301790 - DNA, 15 bp, Homo sapiens
ggggactggtccagg

SEQ ID NO: 301791 - DNA, 15 bp, Homo sapiens
gggggactggtccag

SEQ ID NO: 301792 - DNA, 15 bp, Homo sapiens
tgggggactggtcca

SEQ ID NO: 301793 - DNA, 15 bp, Homo sapiens
atgggggactggtcc

SEQ ID NO: 301794 - DNA, 15 bp, Homo sapiens
gatgggggactggtc

SEQ ID NO: 301795 - DNA, 15 bp, Homo sapiens
agatgggggactggt

SEQ ID NO: 301796 - DNA, 15 bp, Homo sapiens
tagatgggggactgg

SEQ ID NO: 301797 - DNA, 15 bp, Homo sapiens
ttagatgggggactg

SEQ ID NO: 301798 - DNA, 15 bp, Homo sapiens
cttagatgggggact

SEQ ID NO: 301799 - DNA, 15 bp, Homo sapiens
ccttagatgggggac

SEQ ID NO: 301800 - DNA, 15 bp, Homo sapiens
gccttagatggggga

SEQ ID NO: 301801 - DNA, 15 bp, Homo sapiens
ggccttagatggggg

SEQ ID NO: 301802 - DNA, 15 bp, Homo sapiens
tggccttagatgggg

SEQ ID NO: 301803 - DNA, 15 bp, Homo sapiens
atggccttagatggg

SEQ ID NO: 301804 - DNA, 15 bp, Homo sapiens
catggccttagatgg

SEQ ID NO: 301805 - DNA, 15 bp, Homo sapiens
gcatggccttagatg

SEQ ID NO: 301806 - DNA, 15 bp, Homo sapiens
ggcatggccttagat

SEQ ID NO: 301807 - DNA, 15 bp, Homo sapiens
tggcatggccttaga

SEQ ID NO: 301808 - DNA, 15 bp, Homo sapiens
ctggcatggccttag

SEQ ID NO: 301809 - DNA, 15 bp, Homo sapiens
gctggcatggcctta

SEQ ID NO: 301810 - DNA, 15 bp, Homo sapiens
ggctggcatggcctt

SEQ ID NO: 301811 - DNA, 15 bp, Homo sapiens
aggctggcatggcct

SEQ ID NO: 301812 - DNA, 15 bp, Homo sapiens
taggctggcatggcc

SEQ ID NO: 301813 - DNA, 15 bp, Homo sapiens
ataggctggcatggc

SEQ ID NO: 301814 - DNA, 15 bp, Homo sapiens
cataggctggcatgg

SEQ ID NO: 301815 - DNA, 15 bp, Homo sapiens
tcataggctggcatg

SEQ ID NO: 301816 - DNA, 15 bp, Homo sapiens
ctcataggctggcat

SEQ ID NO: 301817 - DNA, 15 bp, Homo sapiens
tctcataggctggca

SEQ ID NO: 301818 - DNA, 15 bp, Homo sapiens
ttctcataggctggc

SEQ ID NO: 301819 - DNA, 15 bp, Homo sapiens
attctcataggctgg

SEQ ID NO: 301820 - DNA, 15 bp, Homo sapiens
tattctcataggctg

SEQ ID NO: 301821 - DNA, 15 bp, Homo sapiens
ttattctcataggct

SEQ ID NO: 301822 - DNA, 15 bp, Homo sapiens
tttattctcataggc

SEQ ID NO: 301823 - DNA, 15 bp, Homo sapiens
ttttattctcatagg

SEQ ID NO: 301824 - DNA, 15 bp, Homo sapiens
tttttattctcatag

SEQ ID NO: 301825 - DNA, 15 bp, Homo sapiens
ttttttattctcata

SEQ ID NO: 301826 - DNA, 15 bp, Homo sapiens
tttttttattctcat

SEQ ID NO: 301827 - DNA, 15 bp, Homo sapiens
ttttttttattctca

SEQ ID NO: 301828 - DNA, 15 bp, Homo sapiens
attttttttattctc

SEQ ID NO: 301829 - DNA, 15 bp, Homo sapiens
cattttttttattct

SEQ ID NO: 301830 - DNA, 15 bp, Homo sapiens
gcattttttttattc

SEQ ID NO: 301831 - DNA, 15 bp, Homo sapiens
tgcattttttttatt

SEQ ID NO: 301832 - DNA, 15 bp, Homo sapiens
gtgcattttttttat

SEQ ID NO: 301833 - DNA, 15 bp, Homo sapiens
ggtgcatttttttta

SEQ ID NO: 301834 - DNA, 15 bp, Homo sapiens
aggtgcatttttttt

SEQ ID NO: 301835 - DNA, 15 bp, Homo sapiens
gaggtgcattttttt

SEQ ID NO: 301836 - DNA, 15 bp, Homo sapiens
agaggtgcatttttt

SEQ ID NO: 301837 - DNA, 15 bp, Homo sapiens
cagaggtgcattttt

SEQ ID NO: 301838 - DNA, 15 bp, Homo sapiens
acagaggtgcatttt

SEQ ID NO: 301839 - DNA, 15 bp, Homo sapiens
tacagaggtgcattt

SEQ ID NO: 301840 - DNA, 15 bp, Homo sapiens
ctacagaggtgcatt

SEQ ID NO: 301841 - DNA, 15 bp, Homo sapiens
actacagaggtgcat

SEQ ID NO: 301842 - DNA, 15 bp, Homo sapiens
gactacagaggtgca

SEQ ID NO: 301843 - DNA, 15 bp, Homo sapiens
ggactacagaggtgc

SEQ ID NO: 301844 - DNA, 15 bp, Homo sapiens
gggactacagaggtg

SEQ ID NO: 301845 - DNA, 15 bp, Homo sapiens
tgggactacagaggt

SEQ ID NO: 301846 - DNA, 15 bp, Homo sapiens
ctgggactacagagg

SEQ ID NO: 301847 - DNA, 15 bp, Homo sapiens
gctgggactacagag

SEQ ID NO: 301848 - DNA, 15 bp, Homo sapiens
agctgggactacaga

SEQ ID NO: 301849 - DNA, 15 bp, Homo sapiens
tcctcagcctcccaa

SEQ ID NO: 301850 - DNA, 15 bp, Homo sapiens
ctcctcagcctccca

SEQ ID NO: 301851 - DNA, 15 bp, Homo sapiens
cctcctcagcctccc

SEQ ID NO: 301852 - DNA, 15 bp, Homo sapiens
ccctcctcagcctcc

SEQ ID NO: 301853 - DNA, 15 bp, Homo sapiens
tccctcctcagcctc

SEQ ID NO: 301854 - DNA, 15 bp, Homo sapiens
ctccctcctcagcct

SEQ ID NO: 301855 - DNA, 15 bp, Homo sapiens
cctccctcctcagcc

SEQ ID NO: 301856 - DNA, 15 bp, Homo sapiens
tcctccctcctcagc

SEQ ID NO: 301857 - DNA, 15 bp, Homo sapiens
atcctccctcctcag

SEQ ID NO: 301858 - DNA, 15 bp, Homo sapiens
aatcctccctcctca

SEQ ID NO: 301859 - DNA, 15 bp, Homo sapiens
caatcctccctcctc

SEQ ID NO: 301860 - DNA, 15 bp, Homo sapiens
gcaatcctccctcct

SEQ ID NO: 301861 - DNA, 15 bp, Homo sapiens
agcaatcctccctcc

SEQ ID NO: 301862 - DNA, 15 bp, Homo sapiens
aagcaatcctccctc

SEQ ID NO: 301863 - DNA, 15 bp, Homo sapiens
caagcaatcctccct

SEQ ID NO: 301864 - DNA, 15 bp, Homo sapiens
tcaagcaatcctccc

SEQ ID NO: 301865 - DNA, 15 bp, Homo sapiens
ctcaagcaatcctcc

SEQ ID NO: 301866 - DNA, 15 bp, Homo sapiens
aggctcaagcaatcc

SEQ ID NO: 301867 - DNA, 15 bp, Homo sapiens
caggctcaagcaatc

SEQ ID NO: 301868 - DNA, 15 bp, Homo sapiens
ccaggctcaagcaat

SEQ ID NO: 301869 - DNA, 15 bp, Homo sapiens
cccaggctcaagcaa

SEQ ID NO: 301870 - DNA, 15 bp, Homo sapiens
tcccaggctcaagca

SEQ ID NO: 301871 - DNA, 15 bp, Homo sapiens
ttcccaggctcaagc

SEQ ID NO: 301872 - DNA, 15 bp, Homo sapiens
cttcccaggctcaag

SEQ ID NO: 301873 - DNA, 15 bp, Homo sapiens
acttcccaggctcaa

SEQ ID NO: 301874 - DNA, 15 bp, Homo sapiens
aacttcccaggctca

SEQ ID NO: 301875 - DNA, 15 bp, Homo sapiens
caacttcccaggctc

SEQ ID NO: 301876 - DNA, 15 bp, Homo sapiens
tcaacttcccaggct

SEQ ID NO: 301877 - DNA, 15 bp, Homo sapiens
ctcaacttcccaggc

SEQ ID NO: 301878 - DNA, 15 bp, Homo sapiens
cctcaacttcccagg

SEQ ID NO: 301879 - DNA, 15 bp, Homo sapiens
gcctcaacttcccag

SEQ ID NO: 301880 - DNA, 15 bp, Homo sapiens
agcctcaacttccca

SEQ ID NO: 301881 - DNA, 15 bp, Homo sapiens
cagcctcaacttccc

SEQ ID NO: 301882 - DNA, 15 bp, Homo sapiens
gcagcctcaacttcc

SEQ ID NO: 301883 - DNA, 15 bp, Homo sapiens
tgcagcctcaacttc

SEQ ID NO: 301884 - DNA, 15 bp, Homo sapiens
ctgcagcctcaactt

SEQ ID NO: 301885 - DNA, 15 bp, Homo sapiens
cctgcagcctcaact

SEQ ID NO: 301886 - DNA, 15 bp, Homo sapiens
ccctgcagcctcaac

SEQ ID NO: 301887 - DNA, 15 bp, Homo sapiens
tccctgcagcctcaa

SEQ ID NO: 301888 - DNA, 15 bp, Homo sapiens
ctccctgcagcctca

SEQ ID NO: 301889 - DNA, 15 bp, Homo sapiens
gctccctgcagcctc

SEQ ID NO: 301890 - DNA, 15 bp, Homo sapiens
ggctccctgcagcct

SEQ ID NO: 301891 - DNA, 15 bp, Homo sapiens
cggctccctgcagcc

SEQ ID NO: 301892 - DNA, 15 bp, Homo sapiens
acggctccctgcagc

SEQ ID NO: 301893 - DNA, 15 bp, Homo sapiens
cacggctccctgcag

SEQ ID NO: 301894 - DNA, 15 bp, Homo sapiens
tcacggctccctgca

SEQ ID NO: 301895 - DNA, 15 bp, Homo sapiens
gtcacggctccctgc

SEQ ID NO: 301896 - DNA, 15 bp, Homo sapiens
agtcacggctccctg

SEQ ID NO: 301897 - DNA, 15 bp, Homo sapiens
cagtcacggctccct

SEQ ID NO: 301898 - DNA, 15 bp, Homo sapiens
gcagtcacggctccc

SEQ ID NO: 301899 - DNA, 15 bp, Homo sapiens
tgcagtcacggctcc

SEQ ID NO: 301900 - DNA, 15 bp, Homo sapiens
gtgcagtcacggctc

SEQ ID NO: 301901 - DNA, 15 bp, Homo sapiens
agtgcagtcacggct

SEQ ID NO: 301902 - DNA, 15 bp, Homo sapiens
tagtgcagtcacggc

SEQ ID NO: 301903 - DNA, 15 bp, Homo sapiens
gtagtgcagtcacgg

SEQ ID NO: 301904 - DNA, 15 bp, Homo sapiens
agtagtgcagtcacg

SEQ ID NO: 301905 - DNA, 15 bp, Homo sapiens
cagtagtgcagtcac

SEQ ID NO: 301906 - DNA, 15 bp, Homo sapiens
gcagtagtgcagtca

SEQ ID NO: 301907 - DNA, 15 bp, Homo sapiens
tgcagtagtgcagtc

SEQ ID NO: 301908 - DNA, 15 bp, Homo sapiens
atgcagtagtgcagt

SEQ ID NO: 301909 - DNA, 15 bp, Homo sapiens
aatgcagtagtgcag

SEQ ID NO: 301910 - DNA, 15 bp, Homo sapiens
gaatgcagtagtgca

SEQ ID NO: 301911 - DNA, 15 bp, Homo sapiens
ggaatgcagtagtgc

SEQ ID NO: 301912 - DNA, 15 bp, Homo sapiens
tggaatgcagtagtg

SEQ ID NO: 301913 - DNA, 15 bp, Homo sapiens
ctggaatgcagtagt

SEQ ID NO: 301914 - DNA, 15 bp, Homo sapiens
actggaatgcagtag

SEQ ID NO: 301915 - DNA, 15 bp, Homo sapiens
gactggaatgcagta

SEQ ID NO: 301916 - DNA, 15 bp, Homo sapiens
agactggaatgcagt

SEQ ID NO: 301917 - DNA, 15 bp, Homo sapiens
cagactggaatgcag

SEQ ID NO: 301918 - DNA, 15 bp, Homo sapiens
ccagactggaatgca

SEQ ID NO: 301919 - DNA, 15 bp, Homo sapiens
cccagactggaatgc

SEQ ID NO: 301920 - DNA, 15 bp, Homo sapiens
acccagactggaatg

SEQ ID NO: 301921 - DNA, 15 bp, Homo sapiens
cacccagactggaat

SEQ ID NO: 301922 - DNA, 15 bp, Homo sapiens
tcacccagactggaa

SEQ ID NO: 301923 - DNA, 15 bp, Homo sapiens
ttctgtcacccagac

SEQ ID NO: 301924 - DNA, 15 bp, Homo sapiens
attctgtcacccaga

SEQ ID NO: 301925 - DNA, 15 bp, Homo sapiens
cattctgtcacccag

SEQ ID NO: 301926 - DNA, 15 bp, Homo sapiens
tcattctgtcaccca

SEQ ID NO: 301927 - DNA, 15 bp, Homo sapiens
ctcattctgtcaccc

SEQ ID NO: 301928 - DNA, 15 bp, Homo sapiens
tctcattctgtcacc

SEQ ID NO: 301929 - DNA, 15 bp, Homo sapiens
gtctcattctgtcac

SEQ ID NO: 301930 - DNA, 15 bp, Homo sapiens
tgtctcattctgtca

SEQ ID NO: 301931 - DNA, 15 bp, Homo sapiens
gtgtctcattctgtc

SEQ ID NO: 301932 - DNA, 15 bp, Homo sapiens
agtgtctcattctgt

SEQ ID NO: 301933 - DNA, 15 bp, Homo sapiens
cagtgtctcattctg

SEQ ID NO: 301934 - DNA, 15 bp, Homo sapiens
acagtgtctcattct

SEQ ID NO: 301935 - DNA, 15 bp, Homo sapiens
gacagtgtctcattc

SEQ ID NO: 301936 - DNA, 15 bp, Homo sapiens
agacagtgtctcatt

SEQ ID NO: 301937 - DNA, 15 bp, Homo sapiens
gagacagtgtctcat

SEQ ID NO: 301938 - DNA, 15 bp, Homo sapiens
tgagacagtgtctca

SEQ ID NO: 301939 - DNA, 15 bp, Homo sapiens
ttgagacagtgtctc

SEQ ID NO: 301940 - DNA, 15 bp, Homo sapiens
tttgagacagtgtct

SEQ ID NO: 301941 - DNA, 15 bp, Homo sapiens
ctttgagacagtgtc

SEQ ID NO: 301942 - DNA, 15 bp, Homo sapiens
tctttgagacagtgt

SEQ ID NO: 301943 - DNA, 15 bp, Homo sapiens
ttctttgagacagtg

SEQ ID NO: 301944 - DNA, 15 bp, Homo sapiens
tttctttgagacagt

SEQ ID NO: 301945 - DNA, 15 bp, Homo sapiens
ttttctttgagacag

SEQ ID NO: 301946 - DNA, 15 bp, Homo sapiens
tttttctttgagaca

SEQ ID NO: 301947 - DNA, 15 bp, Homo sapiens
gtttttctttgagac

SEQ ID NO: 301948 - DNA, 15 bp, Homo sapiens
cgtttttctttgaga

SEQ ID NO: 301949 - DNA, 15 bp, Homo sapiens
tcgtttttctttgag

SEQ ID NO: 301950 - DNA, 15 bp, Homo sapiens
ttcgtttttctttga

SEQ ID NO: 301951 - DNA, 15 bp, Homo sapiens
tttcgtttttctttg

SEQ ID NO: 301952 - DNA, 15 bp, Homo sapiens
ttttcgtttttcttt

SEQ ID NO: 301953 - DNA, 15 bp, Homo sapiens
tttttcgtttttctt

SEQ ID NO: 301954 - DNA, 15 bp, Homo sapiens
ttttttcgtttttct

SEQ ID NO: 301955 - DNA, 15 bp, Homo sapiens
tttttttcgtttttc

SEQ ID NO: 301956 - DNA, 15 bp, Homo sapiens
ttttttttcgttttt

SEQ ID NO: 301957 - DNA, 15 bp, Homo sapiens
cttttttttcgtttt

SEQ ID NO: 301958 - DNA, 15 bp, Homo sapiens
gcttttttttcgttt

SEQ ID NO: 301959 - DNA, 15 bp, Homo sapiens
tgcttttttttcgtt

SEQ ID NO: 301960 - DNA, 15 bp, Homo sapiens
gtgcttttttttcgt

SEQ ID NO: 301961 - DNA, 15 bp, Homo sapiens
ggtgcttttttttcg

SEQ ID NO: 301962 - DNA, 15 bp, Homo sapiens
aggtgcttttttttc

SEQ ID NO: 301963 - DNA, 15 bp, Homo sapiens
aaggtgctttttttt

SEQ ID NO: 301964 - DNA, 15 bp, Homo sapiens
gaaggtgcttttttt

SEQ ID NO: 301965 - DNA, 15 bp, Homo sapiens
ggaaggtgctttttt

SEQ ID NO: 301966 - DNA, 15 bp, Homo sapiens
aggaaggtgcttttt

SEQ ID NO: 301967 - DNA, 15 bp, Homo sapiens
gaggaaggtgctttt

SEQ ID NO: 301968 - DNA, 15 bp, Homo sapiens
agaggaaggtgcttt

SEQ ID NO: 301969 - DNA, 15 bp, Homo sapiens
aagaggaaggtgctt

SEQ ID NO: 301970 - DNA, 15 bp, Homo sapiens
aaagaggaaggtgct

SEQ ID NO: 301971 - DNA, 15 bp, Homo sapiens
taaagaggaaggtgc

SEQ ID NO: 301972 - DNA, 15 bp, Homo sapiens
gtaaagaggaaggtg

SEQ ID NO: 301973 - DNA, 15 bp, Homo sapiens
agtaaagaggaaggt

SEQ ID NO: 301974 - DNA, 15 bp, Homo sapiens
tagtaaagaggaagg

SEQ ID NO: 301975 - DNA, 15 bp, Homo sapiens
ttagtaaagaggaag

SEQ ID NO: 301976 - DNA, 15 bp, Homo sapiens
attagtaaagaggaa

SEQ ID NO: 301977 - DNA, 15 bp, Homo sapiens
cattagtaaagagga

SEQ ID NO: 301978 - DNA, 15 bp, Homo sapiens
ccattagtaaagagg

SEQ ID NO: 301979 - DNA, 15 bp, Homo sapiens
tccattagtaaagag

SEQ ID NO: 301980 - DNA, 15 bp, Homo sapiens
atccattagtaaaga

SEQ ID NO: 301981 - DNA, 15 bp, Homo sapiens
aatccattagtaaag

SEQ ID NO: 301982 - DNA, 15 bp, Homo sapiens
taatccattagtaaa

SEQ ID NO: 301983 - DNA, 15 bp, Homo sapiens
ataatccattagtaa

SEQ ID NO: 301984 - DNA, 15 bp, Homo sapiens
tataatccattagta

SEQ ID NO: 301985 - DNA, 15 bp, Homo sapiens
ttataatccattagt

SEQ ID NO: 301986 - DNA, 15 bp, Homo sapiens
tttataatccattag

SEQ ID NO: 301987 - DNA, 15 bp, Homo sapiens
ttttataatccatta

SEQ ID NO: 301988 - DNA, 15 bp, Homo sapiens
tttttataatccatt

SEQ ID NO: 301989 - DNA, 15 bp, Homo sapiens
ctttttataatccat

SEQ ID NO: 301990 - DNA, 15 bp, Homo sapiens
tctttttataatcca

SEQ ID NO: 301991 - DNA, 15 bp, Homo sapiens
atctttttataatcc

SEQ ID NO: 301992 - DNA, 15 bp, Homo sapiens
catctttttataatc

SEQ ID NO: 301993 - DNA, 15 bp, Homo sapiens
gcatctttttataat

SEQ ID NO: 301994 - DNA, 15 bp, Homo sapiens
ggcatctttttataa

SEQ ID NO: 301995 - DNA, 15 bp, Homo sapiens
cggcatctttttata

SEQ ID NO: 301996 - DNA, 15 bp, Homo sapiens
acggcatctttttat

SEQ ID NO: 301997 - DNA, 15 bp, Homo sapiens
gacggcatcttttta

SEQ ID NO: 301998 - DNA, 15 bp, Homo sapiens
ggacggcatcttttt

SEQ ID NO: 301999 - DNA, 15 bp, Homo sapiens
cggacggcatctttt

SEQ ID NO: 302000 - DNA, 15 bp, Homo sapiens
ccggacggcatcttt

SEQ ID NO: 302001 - DNA, 15 bp, Homo sapiens
tccggacggcatctt

SEQ ID NO: 302002 - DNA, 15 bp, Homo sapiens
gtccggacggcatct

SEQ ID NO: 302003 - DNA, 15 bp, Homo sapiens
tgtccggacggcatc

SEQ ID NO: 302004 - DNA, 15 bp, Homo sapiens
gtgtccggacggcat

SEQ ID NO: 302005 - DNA, 15 bp, Homo sapiens
tgtgtccggacggca

SEQ ID NO: 302006 - DNA, 15 bp, Homo sapiens
ctgtgtccggacggc

SEQ ID NO: 302007 - DNA, 15 bp, Homo sapiens
gctgtgtccggacgg

SEQ ID NO: 302008 - DNA, 15 bp, Homo sapiens
tgctgtgtccggacg

SEQ ID NO: 302009 - DNA, 15 bp, Homo sapiens
ttgctgtgtccggac

SEQ ID NO: 302010 - DNA, 15 bp, Homo sapiens
gttgctgtgtccgga

SEQ ID NO: 302011 - DNA, 15 bp, Homo sapiens
ggttgctgtgtccgg

SEQ ID NO: 302012 - DNA, 15 bp, Homo sapiens
gggttgctgtgtccg

SEQ ID NO: 302013 - DNA, 15 bp, Homo sapiens
agggttgctgtgtcc

SEQ ID NO: 302014 - DNA, 15 bp, Homo sapiens
tagggttgctgtgtc

SEQ ID NO: 302015 - DNA, 15 bp, Homo sapiens
ttagggttgctgtgt

SEQ ID NO: 302016 - DNA, 15 bp, Homo sapiens
cttagggttgctgtg

SEQ ID NO: 302017 - DNA, 15 bp, Homo sapiens
gcttagggttgctgt

SEQ ID NO: 302018 - DNA, 15 bp, Homo sapiens
agcttagggttgctg

SEQ ID NO: 302019 - DNA, 15 bp, Homo sapiens
aagcttagggttgct

SEQ ID NO: 302020 - DNA, 15 bp, Homo sapiens
caagcttagggttgc

SEQ ID NO: 302021 - DNA, 15 bp, Homo sapiens
ccaagcttagggttg

SEQ ID NO: 302022 - DNA, 15 bp, Homo sapiens
accaagcttagggtt

SEQ ID NO: 302023 - DNA, 15 bp, Homo sapiens
taccaagcttagggt

SEQ ID NO: 302024 - DNA, 15 bp, Homo sapiens
ataccaagcttaggg

SEQ ID NO: 302025 - DNA, 15 bp, Homo sapiens
cataccaagcttagg

SEQ ID NO: 302026 - DNA, 15 bp, Homo sapiens
gcataccaagcttag

SEQ ID NO: 302027 - DNA, 15 bp, Homo sapiens
tgcataccaagctta

SEQ ID NO: 302028 - DNA, 15 bp, Homo sapiens
ctgcataccaagctt

SEQ ID NO: 302029 - DNA, 15 bp, Homo sapiens
tctgcataccaagct

SEQ ID NO: 302030 - DNA, 15 bp, Homo sapiens
ctctgcataccaagc

SEQ ID NO: 302031 - DNA, 15 bp, Homo sapiens
actctgcataccaag

SEQ ID NO: 302032 - DNA, 15 bp, Homo sapiens
aactctgcataccaa

SEQ ID NO: 302033 - DNA, 15 bp, Homo sapiens
aaactctgcatacca

SEQ ID NO: 302034 - DNA, 15 bp, Homo sapiens
taaactctgcatacc

SEQ ID NO: 302035 - DNA, 15 bp, Homo sapiens
ctaaactctgcatac

SEQ ID NO: 302036 - DNA, 15 bp, Homo sapiens
cctaaactctgcata

SEQ ID NO: 302037 - DNA, 15 bp, Homo sapiens
gcctaaactctgcat

SEQ ID NO: 302038 - DNA, 15 bp, Homo sapiens
agcctaaactctgca

SEQ ID NO: 302039 - DNA, 15 bp, Homo sapiens
cagcctaaactctgc

SEQ ID NO: 302040 - DNA, 15 bp, Homo sapiens
tcagcctaaactctg

SEQ ID NO: 302041 - DNA, 15 bp, Homo sapiens
ttcagcctaaactct

SEQ ID NO: 302042 - DNA, 15 bp, Homo sapiens
cttcagcctaaactc

SEQ ID NO: 302043 - DNA, 15 bp, Homo sapiens
gcttcagcctaaact

SEQ ID NO: 302044 - DNA, 15 bp, Homo sapiens
ggcttcagcctaaac

SEQ ID NO: 302045 - DNA, 15 bp, Homo sapiens
gggcttcagcctaaa

SEQ ID NO: 302046 - DNA, 15 bp, Homo sapiens
ggggcttcagcctaa

SEQ ID NO: 302047 - DNA, 15 bp, Homo sapiens
tggggcttcagccta

SEQ ID NO: 302048 - DNA, 15 bp, Homo sapiens
atggggcttcagcct

SEQ ID NO: 302049 - DNA, 15 bp, Homo sapiens
catggggcttcagcc

SEQ ID NO: 302050 - DNA, 15 bp, Homo sapiens
gcatggggcttcagc

SEQ ID NO: 302051 - DNA, 15 bp, Homo sapiens
agcatggggcttcag

SEQ ID NO: 302052 - DNA, 15 bp, Homo sapiens
cagcatggggcttca

SEQ ID NO: 302053 - DNA, 15 bp, Homo sapiens
acagcatggggcttc

SEQ ID NO: 302054 - DNA, 15 bp, Homo sapiens
aacagcatggggctt

SEQ ID NO: 302055 - DNA, 15 bp, Homo sapiens
caacagcatggggct

SEQ ID NO: 302056 - DNA, 15 bp, Homo sapiens
acaacagcatggggc

SEQ ID NO: 302057 - DNA, 15 bp, Homo sapiens
cacaacagcatgggg

SEQ ID NO: 302058 - DNA, 15 bp, Homo sapiens
gcacaacagcatggg

SEQ ID NO: 302059 - DNA, 15 bp, Homo sapiens
tgcacaacagcatgg

SEQ ID NO: 302060 - DNA, 15 bp, Homo sapiens
ctgcacaacagcatg

SEQ ID NO: 302061 - DNA, 15 bp, Homo sapiens
actgcacaacagcat

SEQ ID NO: 302062 - DNA, 15 bp, Homo sapiens
cactgcacaacagca

SEQ ID NO: 302063 - DNA, 15 bp, Homo sapiens
gcactgcacaacagc

SEQ ID NO: 302064 - DNA, 15 bp, Homo sapiens
tgcactgcacaacag

SEQ ID NO: 302065 - DNA, 15 bp, Homo sapiens
atgcactgcacaaca

SEQ ID NO: 302066 - DNA, 15 bp, Homo sapiens
tatgcactgcacaac

SEQ ID NO: 302067 - DNA, 15 bp, Homo sapiens
ttatgcactgcacaa

SEQ ID NO: 302068 - DNA, 15 bp, Homo sapiens
tttatgcactgcaca

SEQ ID NO: 302069 - DNA, 15 bp, Homo sapiens
gtttatgcactgcac

SEQ ID NO: 302070 - DNA, 15 bp, Homo sapiens
agtttatgcactgca

SEQ ID NO: 302071 - DNA, 15 bp, Homo sapiens
cagtttatgcactgc

SEQ ID NO: 302072 - DNA, 15 bp, Homo sapiens
acagtttatgcactg

SEQ ID NO: 302073 - DNA, 15 bp, Homo sapiens
tacagtttatgcact

SEQ ID NO: 302074 - DNA, 15 bp, Homo sapiens
gtacagtttatgcac

SEQ ID NO: 302075 - DNA, 15 bp, Homo sapiens
tgtacagtttatgca

SEQ ID NO: 302076 - DNA, 15 bp, Homo sapiens
ctgtacagtttatgc

SEQ ID NO: 302077 - DNA, 15 bp, Homo sapiens
tctgtacagtttatg

SEQ ID NO: 302078 - DNA, 15 bp, Homo sapiens
atctgtacagtttat

SEQ ID NO: 302079 - DNA, 15 bp, Homo sapiens
tatctgtacagttta

SEQ ID NO: 302080 - DNA, 15 bp, Homo sapiens
ttgtatctgtacagt

SEQ ID NO: 302081 - DNA, 15 bp, Homo sapiens
cttgtatctgtacag

SEQ ID NO: 302082 - DNA, 15 bp, Homo sapiens
gcttgtatctgtaca

SEQ ID NO: 302083 - DNA, 15 bp, Homo sapiens
ggcttgtatctgtac

SEQ ID NO: 302084 - DNA, 15 bp, Homo sapiens
gggcttgtatctgta

SEQ ID NO: 302085 - DNA, 15 bp, Homo sapiens
cgggcttgtatctgt

SEQ ID NO: 302086 - DNA, 15 bp, Homo sapiens
gcgggcttgtatctg

SEQ ID NO: 302087 - DNA, 15 bp, Homo sapiens
cgcgggcttgtatct

SEQ ID NO: 302088 - DNA, 15 bp, Homo sapiens
gcgcgggcttgtatc

SEQ ID NO: 302089 - DNA, 15 bp, Homo sapiens
ggcgcgggcttgtat

SEQ ID NO: 302090 - DNA, 15 bp, Homo sapiens
gggcgcgggcttgta

SEQ ID NO: 302091 - DNA, 15 bp, Homo sapiens
tgggcgcgggcttgt

SEQ ID NO: 302092 - DNA, 15 bp, Homo sapiens
gtgggcgcgggcttg

SEQ ID NO: 302093 - DNA, 15 bp, Homo sapiens
ggtgggcgcgggctt

SEQ ID NO: 302094 - DNA, 15 bp, Homo sapiens
aggtgggcgcgggct

SEQ ID NO: 302095 - DNA, 15 bp, Homo sapiens
aaggtgggcgcgggc

SEQ ID NO: 302096 - DNA, 15 bp, Homo sapiens
gaaggtgggcgcggg

SEQ ID NO: 302097 - DNA, 15 bp, Homo sapiens
tgaaggtgggcgcgg

SEQ ID NO: 302098 - DNA, 15 bp, Homo sapiens
ttgaaggtgggcgcg

SEQ ID NO: 302099 - DNA, 15 bp, Homo sapiens
tttgaaggtgggcgc

SEQ ID NO: 302100 - DNA, 15 bp, Homo sapiens
atttgaaggtgggcg

SEQ ID NO: 302101 - DNA, 15 bp, Homo sapiens
aatttgaaggtgggc

SEQ ID NO: 302102 - DNA, 15 bp, Homo sapiens
aaatttgaaggtggg

SEQ ID NO: 302103 - DNA, 15 bp, Homo sapiens
aaaatttgaaggtgg

SEQ ID NO: 302104 - DNA, 15 bp, Homo sapiens
caaaatttgaaggtg

SEQ ID NO: 302105 - DNA, 15 bp, Homo sapiens
acaaaatttgaaggt

SEQ ID NO: 302106 - DNA, 15 bp, Homo sapiens
cacaaaatttgaagg

SEQ ID NO: 302107 - DNA, 15 bp, Homo sapiens
acacaaaatttgaag

SEQ ID NO: 302108 - DNA, 15 bp, Homo sapiens
tacacaaaatttgaa

SEQ ID NO: 302109 - DNA, 15 bp, Homo sapiens
gtacacaaaatttga

SEQ ID NO: 302110 - DNA, 15 bp, Homo sapiens
tgtacacaaaatttg

SEQ ID NO: 302111 - DNA, 15 bp, Homo sapiens
gtgtacacaaaattt

SEQ ID NO: 302112 - DNA, 15 bp, Homo sapiens
agtgtacacaaaatt

SEQ ID NO: 302113 - DNA, 15 bp, Homo sapiens
aagtgtacacaaaat

SEQ ID NO: 302114 - DNA, 15 bp, Homo sapiens
taagtgtacacaaaa

SEQ ID NO: 302115 - DNA, 15 bp, Homo sapiens
gtaagtgtacacaaa

SEQ ID NO: 302116 - DNA, 15 bp, Homo sapiens
tgtaagtgtacacaa

SEQ ID NO: 302117 - DNA, 15 bp, Homo sapiens
ctgtaagtgtacaca

SEQ ID NO: 302118 - DNA, 15 bp, Homo sapiens
tctgtaagtgtacac

SEQ ID NO: 302119 - DNA, 15 bp, Homo sapiens
gtctgtaagtgtaca

SEQ ID NO: 302120 - DNA, 15 bp, Homo sapiens
tgtctgtaagtgtac

SEQ ID NO: 302121 - DNA, 15 bp, Homo sapiens
gtgtctgtaagtgta

SEQ ID NO: 302122 - DNA, 15 bp, Homo sapiens
cgtgtctgtaagtgt

SEQ ID NO: 302123 - DNA, 15 bp, Homo sapiens
ccgtgtctgtaagtg

SEQ ID NO: 302124 - DNA, 15 bp, Homo sapiens
cccgtgtctgtaagt

SEQ ID NO: 302125 - DNA, 15 bp, Homo sapiens
ccccgtgtctgtaag

SEQ ID NO: 302126 - DNA, 15 bp, Homo sapiens
gccccgtgtctgtaa

SEQ ID NO: 302127 - DNA, 15 bp, Homo sapiens
agccccgtgtctgta

SEQ ID NO: 302128 - DNA, 15 bp, Homo sapiens
tagccccgtgtctgt

SEQ ID NO: 302129 - DNA, 15 bp, Homo sapiens
ctagccccgtgtctg

SEQ ID NO: 302130 - DNA, 15 bp, Homo sapiens
cctagccccgtgtct

SEQ ID NO: 302131 - DNA, 15 bp, Homo sapiens
ccctagccccgtgtc

SEQ ID NO: 302132 - DNA, 15 bp, Homo sapiens
accctagccccgtgt

SEQ ID NO: 302133 - DNA, 15 bp, Homo sapiens
aaccctagccccgtg

SEQ ID NO: 302134 - DNA, 15 bp, Homo sapiens
aaaccctagccccgt

SEQ ID NO: 302135 - DNA, 15 bp, Homo sapiens
gaaaccctagccccg

SEQ ID NO: 302136 - DNA, 15 bp, Homo sapiens
ggaaaccctagcccc

SEQ ID NO: 302137 - DNA, 15 bp, Homo sapiens
aggaaaccctagccc

SEQ ID NO: 302138 - DNA, 15 bp, Homo sapiens
caggaaaccctagcc

SEQ ID NO: 302139 - DNA, 15 bp, Homo sapiens
tcaggaaaccctagc

SEQ ID NO: 302140 - DNA, 15 bp, Homo sapiens
atcaggaaaccctag

SEQ ID NO: 302141 - DNA, 15 bp, Homo sapiens
catcaggaaacccta

SEQ ID NO: 302142 - DNA, 15 bp, Homo sapiens
ccatcaggaaaccct

SEQ ID NO: 302143 - DNA, 15 bp, Homo sapiens
accatcaggaaaccc

SEQ ID NO: 302144 - DNA, 15 bp, Homo sapiens
caccatcaggaaacc

SEQ ID NO: 302145 - DNA, 15 bp, Homo sapiens
gcaccatcaggaaac

SEQ ID NO: 302146 - DNA, 15 bp, Homo sapiens
ggcaccatcaggaaa

SEQ ID NO: 302147 - DNA, 15 bp, Homo sapiens
tggcaccatcaggaa

SEQ ID NO: 302148 - DNA, 15 bp, Homo sapiens
ttggcaccatcagga

SEQ ID NO: 302149 - DNA, 15 bp, Homo sapiens
tttggcaccatcagg

SEQ ID NO: 302150 - DNA, 15 bp, Homo sapiens
ctttggcaccatcag

SEQ ID NO: 302151 - DNA, 15 bp, Homo sapiens
tctttggcaccatca

SEQ ID NO: 302152 - DNA, 15 bp, Homo sapiens
ctctttggcaccatc

SEQ ID NO: 302153 - DNA, 15 bp, Homo sapiens
tctctttggcaccat

SEQ ID NO: 302154 - DNA, 15 bp, Homo sapiens
ctctctttggcacca

SEQ ID NO: 302155 - DNA, 15 bp, Homo sapiens
tctctctttggcacc

SEQ ID NO: 302156 - DNA, 15 bp, Homo sapiens
ttctctctttggcac

SEQ ID NO: 302157 - DNA, 15 bp, Homo sapiens
cttctctctttggca

SEQ ID NO: 302158 - DNA, 15 bp, Homo sapiens
gcttctctctttggc

SEQ ID NO: 302159 - DNA, 15 bp, Homo sapiens
tgcttctctctttgg

SEQ ID NO: 302160 - DNA, 15 bp, Homo sapiens
ctgcttctctctttg

SEQ ID NO: 302161 - DNA, 15 bp, Homo sapiens
tctgcttctctcttt

SEQ ID NO: 302162 - DNA, 15 bp, Homo sapiens
ttctgcttctctctt

SEQ ID NO: 302163 - DNA, 15 bp, Homo sapiens
gttctgcttctctct

SEQ ID NO: 302164 - DNA, 15 bp, Homo sapiens
tgttctgcttctctc

SEQ ID NO: 302165 - DNA, 15 bp, Homo sapiens
ctgttctgcttctct

SEQ ID NO: 302166 - DNA, 15 bp, Homo sapiens
tctgttctgcttctc

SEQ ID NO: 302167 - DNA, 15 bp, Homo sapiens
ttctgttctgcttct

SEQ ID NO: 302168 - DNA, 15 bp, Homo sapiens
tttctgttctgcttc

SEQ ID NO: 302169 - DNA, 15 bp, Homo sapiens
atttctgttctgctt

SEQ ID NO: 302170 - DNA, 15 bp, Homo sapiens
aatttctgttctgct

SEQ ID NO: 302171 - DNA, 15 bp, Homo sapiens
caatttctgttctgc

SEQ ID NO: 302172 - DNA, 15 bp, Homo sapiens
tcaatttctgttctg

SEQ ID NO: 302173 - DNA, 15 bp, Homo sapiens
ttcaatttctgttct

SEQ ID NO: 302174 - DNA, 15 bp, Homo sapiens
cttcaatttctgttc

SEQ ID NO: 302175 - DNA, 15 bp, Homo sapiens
acttcaatttctgtt

SEQ ID NO: 302176 - DNA, 15 bp, Homo sapiens
tacttcaatttctgt

SEQ ID NO: 302177 - DNA, 15 bp, Homo sapiens
ttacttcaatttctg

SEQ ID NO: 302178 - DNA, 15 bp, Homo sapiens
tttacttcaatttct

SEQ ID NO: 302179 - DNA, 15 bp, Homo sapiens
gtttacttcaatttc

SEQ ID NO: 302180 - DNA, 15 bp, Homo sapiens
ggtttacttcaattt

SEQ ID NO: 302181 - DNA, 15 bp, Homo sapiens
cggtttacttcaatt

SEQ ID NO: 302182 - DNA, 15 bp, Homo sapiens
tcggtttacttcaat

SEQ ID NO: 302183 - DNA, 15 bp, Homo sapiens
ctcggtttacttcaa

SEQ ID NO: 302184 - DNA, 15 bp, Homo sapiens
tctcggtttacttca

SEQ ID NO: 302185 - DNA, 15 bp, Homo sapiens
gtctcggtttacttc

SEQ ID NO: 302186 - DNA, 15 bp, Homo sapiens
agtctcggtttactt

SEQ ID NO: 302187 - DNA, 15 bp, Homo sapiens
aagtctcggtttact

SEQ ID NO: 302188 - DNA, 15 bp, Homo sapiens
gaagtctcggtttac

SEQ ID NO: 302189 - DNA, 15 bp, Homo sapiens
agaagtctcggttta

SEQ ID NO: 302190 - DNA, 15 bp, Homo sapiens
cagaagtctcggttt

SEQ ID NO: 302191 - DNA, 15 bp, Homo sapiens
acagaagtctcggtt

SEQ ID NO: 302192 - DNA, 15 bp, Homo sapiens
tacagaagtctcggt

SEQ ID NO: 302193 - DNA, 15 bp, Homo sapiens
ttacagaagtctcgg

SEQ ID NO: 302194 - DNA, 15 bp, Homo sapiens
gttacagaagtctcg

SEQ ID NO: 302195 - DNA, 15 bp, Homo sapiens
tgttacagaagtctc

SEQ ID NO: 302196 - DNA, 15 bp, Homo sapiens
ctgttacagaagtct

SEQ ID NO: 302197 - DNA, 15 bp, Homo sapiens
tctgttacagaagtc

SEQ ID NO: 302198 - DNA, 15 bp, Homo sapiens
gtctgttacagaagt

SEQ ID NO: 302199 - DNA, 15 bp, Homo sapiens
ggtctgttacagaag

SEQ ID NO: 302200 - DNA, 15 bp, Homo sapiens
aggtctgttacagaa

SEQ ID NO: 302201 - DNA, 15 bp, Homo sapiens
taggtctgttacaga

SEQ ID NO: 302202 - DNA, 15 bp, Homo sapiens
ttaggtctgttacag

SEQ ID NO: 302203 - DNA, 15 bp, Homo sapiens
tttaggtctgttaca

SEQ ID NO: 302204 - DNA, 15 bp, Homo sapiens
ctttaggtctgttac

SEQ ID NO: 302205 - DNA, 15 bp, Homo sapiens
tctttaggtctgtta

SEQ ID NO: 302206 - DNA, 15 bp, Homo sapiens
ttctttaggtctgtt

SEQ ID NO: 302207 - DNA, 15 bp, Homo sapiens
tttctttaggtctgt

SEQ ID NO: 302208 - DNA, 15 bp, Homo sapiens
ttttctttaggtctg

SEQ ID NO: 302209 - DNA, 15 bp, Homo sapiens
tttttctttaggtct

SEQ ID NO: 302210 - DNA, 15 bp, Homo sapiens
ctttttctttaggtc

SEQ ID NO: 302211 - DNA, 15 bp, Homo sapiens
tctttttctttaggt

SEQ ID NO: 302212 - DNA, 15 bp, Homo sapiens
ttctttttctttagg

SEQ ID NO: 302213 - DNA, 15 bp, Homo sapiens
tttctttttctttag

SEQ ID NO: 302214 - DNA, 15 bp, Homo sapiens
atttctttttcttta

SEQ ID NO: 302215 - DNA, 15 bp, Homo sapiens
tatttctttttcttt

SEQ ID NO: 302216 - DNA, 15 bp, Homo sapiens
ctatttctttttctt

SEQ ID NO: 302217 - DNA, 15 bp, Homo sapiens
cctatttctttttct

SEQ ID NO: 302218 - DNA, 15 bp, Homo sapiens
tcctatttctttttc

SEQ ID NO: 302219 - DNA, 15 bp, Homo sapiens
ttcctatttcttttt

SEQ ID NO: 302220 - DNA, 15 bp, Homo sapiens
tttcctatttctttt

SEQ ID NO: 302221 - DNA, 15 bp, Homo sapiens
ctttcctatttcttt

SEQ ID NO: 302222 - DNA, 15 bp, Homo sapiens
cctttcctatttctt

SEQ ID NO: 302223 - DNA, 15 bp, Homo sapiens
gcctttcctatttct

SEQ ID NO: 302224 - DNA, 15 bp, Homo sapiens
tgcctttcctatttc

SEQ ID NO: 302225 - DNA, 15 bp, Homo sapiens
ctgcctttcctattt

SEQ ID NO: 302226 - DNA, 15 bp, Homo sapiens
actgcctttcctatt

SEQ ID NO: 302227 - DNA, 15 bp, Homo sapiens
aactgcctttcctat

SEQ ID NO: 302228 - DNA, 15 bp, Homo sapiens
gaactgcctttccta

SEQ ID NO: 302229 - DNA, 15 bp, Homo sapiens
agaactgcctttcct

SEQ ID NO: 302230 - DNA, 15 bp, Homo sapiens
aagaactgcctttcc

SEQ ID NO: 302231 - DNA, 15 bp, Homo sapiens
gaagaactgcctttc

SEQ ID NO: 302232 - DNA, 15 bp, Homo sapiens
aggaagaactgcctt

SEQ ID NO: 302233 - DNA, 15 bp, Homo sapiens
taggaagaactgcct

SEQ ID NO: 302234 - DNA, 15 bp, Homo sapiens
ctaggaagaactgcc

SEQ ID NO: 302235 - DNA, 15 bp, Homo sapiens
cctaggaagaactgc

SEQ ID NO: 302236 - DNA, 15 bp, Homo sapiens
tcctaggaagaactg

SEQ ID NO: 302237 - DNA, 15 bp, Homo sapiens
ctcctaggaagaact

SEQ ID NO: 302238 - DNA, 15 bp, Homo sapiens
cctcctaggaagaac

SEQ ID NO: 302239 - DNA, 15 bp, Homo sapiens
tcctcctaggaagaa

SEQ ID NO: 302240 - DNA, 15 bp, Homo sapiens
ttcctcctaggaaga

SEQ ID NO: 302241 - DNA, 15 bp, Homo sapiens
tttcctcctaggaag

SEQ ID NO: 302242 - DNA, 15 bp, Homo sapiens
ttttcctcctaggaa

SEQ ID NO: 302243 - DNA, 15 bp, Homo sapiens
attttcctcctagga

SEQ ID NO: 302244 - DNA, 15 bp, Homo sapiens
tattttcctcctagg

SEQ ID NO: 302245 - DNA, 15 bp, Homo sapiens
gtattttcctcctag

SEQ ID NO: 302246 - DNA, 15 bp, Homo sapiens
tgtattttcctccta

SEQ ID NO: 302247 - DNA, 15 bp, Homo sapiens
ttgtattttcctcct

SEQ ID NO: 302248 - DNA, 15 bp, Homo sapiens
gttgtattttcctcc

SEQ ID NO: 302249 - DNA, 15 bp, Homo sapiens
tgttgtattttcctc

SEQ ID NO: 302250 - DNA, 15 bp, Homo sapiens
ttgttgtattttcct

SEQ ID NO: 302251 - DNA, 15 bp, Homo sapiens
tttgttgtattttcc

SEQ ID NO: 302252 - DNA, 15 bp, Homo sapiens
ctttgttgtattttc

SEQ ID NO: 302253 - DNA, 15 bp, Homo sapiens
actttgttgtatttt

SEQ ID NO: 302254 - DNA, 15 bp, Homo sapiens
tactttgttgtattt

SEQ ID NO: 302255 - DNA, 15 bp, Homo sapiens
atactttgttgtatt

SEQ ID NO: 302256 - DNA, 15 bp, Homo sapiens
aatactttgttgtat

SEQ ID NO: 302257 - DNA, 15 bp, Homo sapiens
caatactttgttgta

SEQ ID NO: 302258 - DNA, 15 bp, Homo sapiens
acaatactttgttgt

SEQ ID NO: 302259 - DNA, 15 bp, Homo sapiens
tacaatactttgttg

SEQ ID NO: 302260 - DNA, 15 bp, Homo sapiens
gtacaatactttgtt

SEQ ID NO: 302261 - DNA, 15 bp, Homo sapiens
agtacaatactttgt

SEQ ID NO: 302262 - DNA, 15 bp, Homo sapiens
cagtacaatactttg

SEQ ID NO: 302263 - DNA, 15 bp, Homo sapiens
ccagtacaatacttt

SEQ ID NO: 302264 - DNA, 15 bp, Homo sapiens
accagtacaatactt

SEQ ID NO: 302265 - DNA, 15 bp, Homo sapiens
taccagtacaatact

SEQ ID NO: 302266 - DNA, 15 bp, Homo sapiens
ctaccagtacaatac

SEQ ID NO: 302267 - DNA, 15 bp, Homo sapiens
cctaccagtacaata

SEQ ID NO: 302268 - DNA, 15 bp, Homo sapiens
acctaccagtacaat

SEQ ID NO: 302269 - DNA, 15 bp, Homo sapiens
aacctaccagtacaa

SEQ ID NO: 302270 - DNA, 15 bp, Homo sapiens
taacctaccagtaca

SEQ ID NO: 302271 - DNA, 15 bp, Homo sapiens
ataacctaccagtac

SEQ ID NO: 302272 - DNA, 15 bp, Homo sapiens
cataacctaccagta

SEQ ID NO: 302273 - DNA, 15 bp, Homo sapiens
acataacctaccagt

SEQ ID NO: 302274 - DNA, 15 bp, Homo sapiens
tacataacctaccag

SEQ ID NO: 302275 - DNA, 15 bp, Homo sapiens
ctacataacctacca

SEQ ID NO: 302276 - DNA, 15 bp, Homo sapiens
actacataacctacc

SEQ ID NO: 302277 - DNA, 15 bp, Homo sapiens
aactacataacctac

SEQ ID NO: 302278 - DNA, 15 bp, Homo sapiens
gaactacataaccta

SEQ ID NO: 302279 - DNA, 15 bp, Homo sapiens
ggaactacataacct

SEQ ID NO: 302280 - DNA, 15 bp, Homo sapiens
aggaactacataacc

SEQ ID NO: 302281 - DNA, 15 bp, Homo sapiens
aaggaactacataac

SEQ ID NO: 302282 - DNA, 15 bp, Homo sapiens
taaggaactacataa

SEQ ID NO: 302283 - DNA, 15 bp, Homo sapiens
gtaaggaactacata

SEQ ID NO: 302284 - DNA, 15 bp, Homo sapiens
agtaaggaactacat

SEQ ID NO: 302285 - DNA, 15 bp, Homo sapiens
aagtaaggaactaca

SEQ ID NO: 302286 - DNA, 15 bp, Homo sapiens
aaagtaaggaactac

SEQ ID NO: 302287 - DNA, 15 bp, Homo sapiens
caaagtaaggaacta

SEQ ID NO: 302288 - DNA, 15 bp, Homo sapiens
ccaaagtaaggaact

SEQ ID NO: 302289 - DNA, 15 bp, Homo sapiens
accaaagtaaggaac

SEQ ID NO: 302290 - DNA, 15 bp, Homo sapiens
taccaaagtaaggaa

SEQ ID NO: 302291 - DNA, 15 bp, Homo sapiens
ataccaaagtaagga

SEQ ID NO: 302292 - DNA, 15 bp, Homo sapiens
aataccaaagtaagg

SEQ ID NO: 302293 - DNA, 15 bp, Homo sapiens
aaataccaaagtaag

SEQ ID NO: 302294 - DNA, 15 bp, Homo sapiens
aaaataccaaagtaa

SEQ ID NO: 302295 - DNA, 15 bp, Homo sapiens
gaaaataccaaagta

SEQ ID NO: 302296 - DNA, 15 bp, Homo sapiens
tgaaaataccaaagt

SEQ ID NO: 302297 - DNA, 15 bp, Homo sapiens
ctgaaaataccaaag

SEQ ID NO: 302298 - DNA, 15 bp, Homo sapiens
cctgaaaataccaaa

SEQ ID NO: 302299 - DNA, 15 bp, Homo sapiens
acctgaaaataccaa

SEQ ID NO: 302300 - DNA, 15 bp, Homo sapiens
tacctgaaaatacca

SEQ ID NO: 302301 - DNA, 15 bp, Homo sapiens
gtacctgaaaatacc

SEQ ID NO: 302302 - DNA, 15 bp, Homo sapiens
ggtacctgaaaatac

SEQ ID NO: 302303 - DNA, 15 bp, Homo sapiens
aggtacctgaaaata

SEQ ID NO: 302304 - DNA, 15 bp, Homo sapiens
gaggtacctgaaaat

SEQ ID NO: 302305 - DNA, 15 bp, Homo sapiens
tgaggtacctgaaaa

SEQ ID NO: 302306 - DNA, 15 bp, Homo sapiens
ctgaggtacctgaaa

SEQ ID NO: 302307 - DNA, 15 bp, Homo sapiens
actgaggtacctgaa

SEQ ID NO: 302308 - DNA, 15 bp, Homo sapiens
aactgaggtacctga

SEQ ID NO: 302309 - DNA, 15 bp, Homo sapiens
gaactgaggtacctg

SEQ ID NO: 302310 - DNA, 15 bp, Homo sapiens
tgaactgaggtacct

SEQ ID NO: 302311 - DNA, 15 bp, Homo sapiens
ttgaactgaggtacc

SEQ ID NO: 302312 - DNA, 15 bp, Homo sapiens
attgaactgaggtac

SEQ ID NO: 302313 - DNA, 15 bp, Homo sapiens
tattgaactgaggta

SEQ ID NO: 302314 - DNA, 15 bp, Homo sapiens
atattgaactgaggt

SEQ ID NO: 302315 - DNA, 15 bp, Homo sapiens
aatattgaactgagg

SEQ ID NO: 302316 - DNA, 15 bp, Homo sapiens
aaatattgaactgag

SEQ ID NO: 302317 - DNA, 15 bp, Homo sapiens
taaatattgaactga

SEQ ID NO: 302318 - DNA, 15 bp, Homo sapiens
ataaatattgaactg

SEQ ID NO: 302319 - DNA, 15 bp, Homo sapiens
aataaatattgaact

SEQ ID NO: 302320 - DNA, 15 bp, Homo sapiens
gaataaatattgaac

SEQ ID NO: 302321 - DNA, 15 bp, Homo sapiens
tgaataaatattgaa

SEQ ID NO: 302322 - DNA, 15 bp, Homo sapiens
atgaataaatattga

SEQ ID NO: 302323 - DNA, 15 bp, Homo sapiens
aatgaataaatattg

SEQ ID NO: 302324 - DNA, 15 bp, Homo sapiens
taatgaataaatatt

SEQ ID NO: 302325 - DNA, 15 bp, Homo sapiens
gtaatgaataaatat

SEQ ID NO: 302326 - DNA, 15 bp, Homo sapiens
ggtaatgaataaata

SEQ ID NO: 302327 - DNA, 15 bp, Homo sapiens
tggtaatgaataaat

SEQ ID NO: 302328 - DNA, 15 bp, Homo sapiens
atggtaatgaataaa

SEQ ID NO: 302329 - DNA, 15 bp, Homo sapiens
tatggtaatgaataa

SEQ ID NO: 302330 - DNA, 15 bp, Homo sapiens
ttatggtaatgaata

SEQ ID NO: 302331 - DNA, 15 bp, Homo sapiens
cttatggtaatgaat

SEQ ID NO: 302332 - DNA, 15 bp, Homo sapiens
tcttatggtaatgaa

SEQ ID NO: 302333 - DNA, 15 bp, Homo sapiens
ttcttatggtaatga

SEQ ID NO: 302334 - DNA, 15 bp, Homo sapiens
tttcttatggtaatg

SEQ ID NO: 302335 - DNA, 15 bp, Homo sapiens
ctttcttatggtaat

SEQ ID NO: 302336 - DNA, 15 bp, Homo sapiens
tctttcttatggtaa

SEQ ID NO: 302337 - DNA, 15 bp, Homo sapiens
gtctttcttatggta

SEQ ID NO: 302338 - DNA, 15 bp, Homo sapiens
ggtctttcttatggt

SEQ ID NO: 302339 - DNA, 15 bp, Homo sapiens
tggtctttcttatgg

SEQ ID NO: 302340 - DNA, 15 bp, Homo sapiens
ctggtctttcttatg

SEQ ID NO: 302341 - DNA, 15 bp, Homo sapiens
tctggtctttcttat

SEQ ID NO: 302342 - DNA, 15 bp, Homo sapiens
ctctggtctttctta

SEQ ID NO: 302343 - DNA, 15 bp, Homo sapiens
cctctggtctttctt

SEQ ID NO: 302344 - DNA, 15 bp, Homo sapiens
tcctctggtctttct

SEQ ID NO: 302345 - DNA, 15 bp, Homo sapiens
ttcctctggtctttc

SEQ ID NO: 302346 - DNA, 15 bp, Homo sapiens
tttcctctggtcttt

SEQ ID NO: 302347 - DNA, 15 bp, Homo sapiens
atttcctctggtctt

SEQ ID NO: 302348 - DNA, 15 bp, Homo sapiens
catttcctctggtct

SEQ ID NO: 302349 - DNA, 15 bp, Homo sapiens
ccatttcctctggtc

SEQ ID NO: 302350 - DNA, 15 bp, Homo sapiens
tccatttcctctggt

SEQ ID NO: 302351 - DNA, 15 bp, Homo sapiens
ctccatttcctctgg

SEQ ID NO: 302352 - DNA, 15 bp, Homo sapiens
cctccatttcctctg

SEQ ID NO: 302353 - DNA, 15 bp, Homo sapiens
tcctccatttcctct

SEQ ID NO: 302354 - DNA, 15 bp, Homo sapiens
ctcctccatttcctc

SEQ ID NO: 302355 - DNA, 15 bp, Homo sapiens
tctcctccatttcct

SEQ ID NO: 302356 - DNA, 15 bp, Homo sapiens
ctctcctccatttcc

SEQ ID NO: 302357 - DNA, 15 bp, Homo sapiens
tctctcctccatttc

SEQ ID NO: 302358 - DNA, 15 bp, Homo sapiens
ttctctcctccattt

SEQ ID NO: 302359 - DNA, 15 bp, Homo sapiens
tttctctcctccatt

SEQ ID NO: 302360 - DNA, 15 bp, Homo sapiens
ttttctctcctccat

SEQ ID NO: 302361 - DNA, 15 bp, Homo sapiens
attttctctcctcca

SEQ ID NO: 302362 - DNA, 15 bp, Homo sapiens
tattttctctcctcc

SEQ ID NO: 302363 - DNA, 15 bp, Homo sapiens
ttattttctctcctc

SEQ ID NO: 302364 - DNA, 15 bp, Homo sapiens
attattttctctcct

SEQ ID NO: 302365 - DNA, 15 bp, Homo sapiens
tattattttctctcc

SEQ ID NO: 302366 - DNA, 15 bp, Homo sapiens
ttattattttctctc

SEQ ID NO: 302367 - DNA, 15 bp, Homo sapiens
tttattattttctct

SEQ ID NO: 302368 - DNA, 15 bp, Homo sapiens
ttttattattttctc

SEQ ID NO: 302369 - DNA, 15 bp, Homo sapiens
cttttttattatttt

SEQ ID NO: 302370 - DNA, 15 bp, Homo sapiens
tcttttttattattt

SEQ ID NO: 302371 - DNA, 15 bp, Homo sapiens
ttcttttttattatt

SEQ ID NO: 302372 - DNA, 15 bp, Homo sapiens
gttcttttttattat

SEQ ID NO: 302373 - DNA, 15 bp, Homo sapiens
tgttcttttttatta

SEQ ID NO: 302374 - DNA, 15 bp, Homo sapiens
ctgttcttttttatt

SEQ ID NO: 302375 - DNA, 15 bp, Homo sapiens
tctgttcttttttat

SEQ ID NO: 302376 - DNA, 15 bp, Homo sapiens
ttctgttctttttta

SEQ ID NO: 302377 - DNA, 15 bp, Homo sapiens
tttctgttctttttt

SEQ ID NO: 302378 - DNA, 15 bp, Homo sapiens
ttttctgttcttttt

SEQ ID NO: 302379 - DNA, 15 bp, Homo sapiens
tttttctgttctttt

SEQ ID NO: 302380 - DNA, 15 bp, Homo sapiens
ttttttctgttcttt

SEQ ID NO: 302381 - DNA, 15 bp, Homo sapiens
tttttttctgttctt

SEQ ID NO: 302382 - DNA, 15 bp, Homo sapiens
ttttttttctgttct

SEQ ID NO: 302383 - DNA, 15 bp, Homo sapiens
tttttttttctgttc

SEQ ID NO: 302384 - DNA, 15 bp, Homo sapiens
ttttttttttctgtt

SEQ ID NO: 302385 - DNA, 15 bp, Homo sapiens
attttttttttctgt

SEQ ID NO: 302386 - DNA, 15 bp, Homo sapiens
aattttttttttctg

SEQ ID NO: 302387 - DNA, 15 bp, Homo sapiens
gaattttttttttct

SEQ ID NO: 302388 - DNA, 15 bp, Homo sapiens
ggaattttttttttc

SEQ ID NO: 302389 - DNA, 15 bp, Homo sapiens
tggaatttttttttt

SEQ ID NO: 302390 - DNA, 15 bp, Homo sapiens
ttggaattttttttt

SEQ ID NO: 302391 - DNA, 15 bp, Homo sapiens
tttggaatttttttt

SEQ ID NO: 302392 - DNA, 15 bp, Homo sapiens
ttttggaattttttt

SEQ ID NO: 302393 - DNA, 15 bp, Homo sapiens
gttttggaatttttt

SEQ ID NO: 302394 - DNA, 15 bp, Homo sapiens
agttttggaattttt

SEQ ID NO: 302395 - DNA, 15 bp, Homo sapiens
tagttttggaatttt

SEQ ID NO: 302396 - DNA, 15 bp, Homo sapiens
ttagttttggaattt

SEQ ID NO: 302397 - DNA, 15 bp, Homo sapiens
attagttttggaatt

SEQ ID NO: 302398 - DNA, 15 bp, Homo sapiens
cattagttttggaat

SEQ ID NO: 302399 - DNA, 15 bp, Homo sapiens
tcattagttttggaa

SEQ ID NO: 302400 - DNA, 15 bp, Homo sapiens
ttcattagttttgga

SEQ ID NO: 302401 - DNA, 15 bp, Homo sapiens
tttcattagttttgg

SEQ ID NO: 302402 - DNA, 15 bp, Homo sapiens
ttttcattagttttg

SEQ ID NO: 302403 - DNA, 15 bp, Homo sapiens
gttttcattagtttt

SEQ ID NO: 302404 - DNA, 15 bp, Homo sapiens
ggttttcattagttt

SEQ ID NO: 302405 - DNA, 15 bp, Homo sapiens
tggttttcattagtt

SEQ ID NO: 302406 - DNA, 15 bp, Homo sapiens
ctggttttcattagt

SEQ ID NO: 302407 - DNA, 15 bp, Homo sapiens
cctggttttcattag

SEQ ID NO: 302408 - DNA, 15 bp, Homo sapiens
ccctggttttcatta

SEQ ID NO: 302409 - DNA, 15 bp, Homo sapiens
cccctggttttcatt

SEQ ID NO: 302410 - DNA, 15 bp, Homo sapiens
ccccctggttttcat

SEQ ID NO: 302411 - DNA, 15 bp, Homo sapiens
gccccctggttttca

SEQ ID NO: 302412 - DNA, 15 bp, Homo sapiens
agccccctggttttc

SEQ ID NO: 302413 - DNA, 15 bp, Homo sapiens
aagccccctggtttt

SEQ ID NO: 302414 - DNA, 15 bp, Homo sapiens
gaagccccctggttt

SEQ ID NO: 302415 - DNA, 15 bp, Homo sapiens
tgaagccccctggtt

SEQ ID NO: 302416 - DNA, 15 bp, Homo sapiens
ctgaagccccctggt

SEQ ID NO: 302417 - DNA, 15 bp, Homo sapiens
tctgaagccccctgg

SEQ ID NO: 302418 - DNA, 15 bp, Homo sapiens
atctgaagccccctg

SEQ ID NO: 302419 - DNA, 15 bp, Homo sapiens
catctgaagccccct

SEQ ID NO: 302420 - DNA, 15 bp, Homo sapiens
ccatctgaagccccc

SEQ ID NO: 302421 - DNA, 15 bp, Homo sapiens
tccatctgaagcccc

SEQ ID NO: 302422 - DNA, 15 bp, Homo sapiens
ttccatctgaagccc

SEQ ID NO: 302423 - DNA, 15 bp, Homo sapiens
tttccatctgaagcc

SEQ ID NO: 302424 - DNA, 15 bp, Homo sapiens
ctttccatctgaagc

SEQ ID NO: 302425 - DNA, 15 bp, Homo sapiens
cctttccatctgaag

SEQ ID NO: 302426 - DNA, 15 bp, Homo sapiens
ccctttccatctgaa

SEQ ID NO: 302427 - DNA, 15 bp, Homo sapiens
gccctttccatctga

SEQ ID NO: 302428 - DNA, 15 bp, Homo sapiens
ggccctttccatctg

SEQ ID NO: 302429 - DNA, 15 bp, Homo sapiens
gggccctttccatct

SEQ ID NO: 302430 - DNA, 15 bp, Homo sapiens
tgggccctttccatc

SEQ ID NO: 302431 - DNA, 15 bp, Homo sapiens
atgggccctttccat

SEQ ID NO: 302432 - DNA, 15 bp, Homo sapiens
tatgggccctttcca

SEQ ID NO: 302433 - DNA, 15 bp, Homo sapiens
ctatgggccctttcc

SEQ ID NO: 302434 - DNA, 15 bp, Homo sapiens
actatgggccctttc

SEQ ID NO: 302435 - DNA, 15 bp, Homo sapiens
cactatgggcccttt

SEQ ID NO: 302436 - DNA, 15 bp, Homo sapiens
gcactatgggccctt

SEQ ID NO: 302437 - DNA, 15 bp, Homo sapiens
ggcactatgggccct

SEQ ID NO: 302438 - DNA, 15 bp, Homo sapiens
tggcactatgggccc

SEQ ID NO: 302439 - DNA, 15 bp, Homo sapiens
ttggcactatgggcc

SEQ ID NO: 302440 - DNA, 15 bp, Homo sapiens
cttggcactatgggc

SEQ ID NO: 302441 - DNA, 15 bp, Homo sapiens
gcttggcactatggg

SEQ ID NO: 302442 - DNA, 15 bp, Homo sapiens
tgcttggcactatgg

SEQ ID NO: 302443 - DNA, 15 bp, Homo sapiens
atgcttggcactatg

SEQ ID NO: 302444 - DNA, 15 bp, Homo sapiens
catgcttggcactat

SEQ ID NO: 302445 - DNA, 15 bp, Homo sapiens
tcatgcttggcacta

SEQ ID NO: 302446 - DNA, 15 bp, Homo sapiens
atcatgcttggcact

SEQ ID NO: 302447 - DNA, 15 bp, Homo sapiens
catcatgcttggcac

SEQ ID NO: 302448 - DNA, 15 bp, Homo sapiens
tcatcatgcttggca

SEQ ID NO: 302449 - DNA, 15 bp, Homo sapiens
ttcatcatgcttggc

SEQ ID NO: 302450 - DNA, 15 bp, Homo sapiens
attcatcatgcttgg

SEQ ID NO: 302451 - DNA, 15 bp, Homo sapiens
cattcatcatgcttg

SEQ ID NO: 302452 - DNA, 15 bp, Homo sapiens
tcattcatcatgctt

SEQ ID NO: 302453 - DNA, 15 bp, Homo sapiens
ttcattcatcatgct

SEQ ID NO: 302454 - DNA, 15 bp, Homo sapiens
attcattcatcatgc

SEQ ID NO: 302455 - DNA, 15 bp, Homo sapiens
cattcattcatcatg

SEQ ID NO: 302456 - DNA, 15 bp, Homo sapiens
acattcattcatcat

SEQ ID NO: 302457 - DNA, 15 bp, Homo sapiens
cacattcattcatca

SEQ ID NO: 302458 - DNA, 15 bp, Homo sapiens
ccacattcattcatc

SEQ ID NO: 302459 - DNA, 15 bp, Homo sapiens
tccacattcattcat

SEQ ID NO: 302460 - DNA, 15 bp, Homo sapiens
atccacattcattca

SEQ ID NO: 302461 - DNA, 15 bp, Homo sapiens
tatccacattcattc

SEQ ID NO: 302462 - DNA, 15 bp, Homo sapiens
gtatccacattcatt

SEQ ID NO: 302463 - DNA, 15 bp, Homo sapiens
agtatccacattcat

SEQ ID NO: 302464 - DNA, 15 bp, Homo sapiens
aagtatccacattca

SEQ ID NO: 302465 - DNA, 15 bp, Homo sapiens
aaagtatccacattc

SEQ ID NO: 302466 - DNA, 15 bp, Homo sapiens
aaaagtatccacatt

SEQ ID NO: 302467 - DNA, 15 bp, Homo sapiens
aaaaagtatccacat

SEQ ID NO: 302468 - DNA, 15 bp, Homo sapiens
caaaaagtatccaca

SEQ ID NO: 302469 - DNA, 15 bp, Homo sapiens
acaaaaagtatccac

SEQ ID NO: 302470 - DNA, 15 bp, Homo sapiens
aacaaaaagtatcca

SEQ ID NO: 302471 - DNA, 15 bp, Homo sapiens
aaacaaaaagtatcc

SEQ ID NO: 302472 - DNA, 15 bp, Homo sapiens
aaaacaaaaagtatc

SEQ ID NO: 302473 - DNA, 15 bp, Homo sapiens
aaaaacaaaaagtat

SEQ ID NO: 302474 - DNA, 15 bp, Homo sapiens
aaaaaacaaaaagta

SEQ ID NO: 302475 - DNA, 15 bp, Homo sapiens
aaaaaaacaaaaagt

SEQ ID NO: 302476 - DNA, 15 bp, Homo sapiens
aaaaaaaacaaaaag

SEQ ID NO: 302477 - DNA, 15 bp, Homo sapiens
ttaaaaaaaaacaaa

SEQ ID NO: 302478 - DNA, 15 bp, Homo sapiens
attaaaaaaaaacaa

SEQ ID NO: 302479 - DNA, 15 bp, Homo sapiens
cattaaaaaaaaaca

SEQ ID NO: 302480 - DNA, 15 bp, Homo sapiens
tcattaaaaaaaaac

SEQ ID NO: 302481 - DNA, 15 bp, Homo sapiens
gtcattaaaaaaaaa

SEQ ID NO: 302482 - DNA, 15 bp, Homo sapiens
tgtcattaaaaaaaa

SEQ ID NO: 302483 - DNA, 15 bp, Homo sapiens
ctgtcattaaaaaaa

SEQ ID NO: 302484 - DNA, 15 bp, Homo sapiens
actgtcattaaaaaa

SEQ ID NO: 302485 - DNA, 15 bp, Homo sapiens
gactgtcattaaaaa

SEQ ID NO: 302486 - DNA, 15 bp, Homo sapiens
agactgtcattaaaa

SEQ ID NO: 302487 - DNA, 15 bp, Homo sapiens
gagactgtcattaaa

SEQ ID NO: 302488 - DNA, 15 bp, Homo sapiens
cgagactgtcattaa

SEQ ID NO: 302489 - DNA, 15 bp, Homo sapiens
gcgagactgtcatta

SEQ ID NO: 302490 - DNA, 15 bp, Homo sapiens
agcgagactgtcatt

SEQ ID NO: 302491 - DNA, 15 bp, Homo sapiens
gagcgagactgtcat

SEQ ID NO: 302492 - DNA, 15 bp, Homo sapiens
agagcgagactgtca

SEQ ID NO: 302493 - DNA, 15 bp, Homo sapiens
cagagcgagactgtc

SEQ ID NO: 302494 - DNA, 15 bp, Homo sapiens
acagagcgagactgt

SEQ ID NO: 302495 - DNA, 15 bp, Homo sapiens
gacagagcgagactg

SEQ ID NO: 302496 - DNA, 15 bp, Homo sapiens
ccattgcactccagc

SEQ ID NO: 302497 - DNA, 15 bp, Homo sapiens
accattgcactccag

SEQ ID NO: 302498 - DNA, 15 bp, Homo sapiens
caccattgcactcca

SEQ ID NO: 302499 - DNA, 15 bp, Homo sapiens
acaccattgcactcc

SEQ ID NO: 302500 - DNA, 15 bp, Homo sapiens
cacaccattgcactc

SEQ ID NO: 302501 - DNA, 15 bp, Homo sapiens
tcacaccattgcact

SEQ ID NO: 302502 - DNA, 15 bp, Homo sapiens
atcacaccattgcac

SEQ ID NO: 302503 - DNA, 15 bp, Homo sapiens
gatcacaccattgca

SEQ ID NO: 302504 - DNA, 15 bp, Homo sapiens
agatcacaccattgc

SEQ ID NO: 302505 - DNA, 15 bp, Homo sapiens
gagatcacaccattg

SEQ ID NO: 302506 - DNA, 15 bp, Homo sapiens
ggagatcacaccatt

SEQ ID NO: 302507 - DNA, 15 bp, Homo sapiens
cggagatcacaccat

SEQ ID NO: 302508 - DNA, 15 bp, Homo sapiens
gcggagatcacacca

SEQ ID NO: 302509 - DNA, 15 bp, Homo sapiens
agcggagatcacacc

SEQ ID NO: 302510 - DNA, 15 bp, Homo sapiens
gagcggagatcacac

SEQ ID NO: 302511 - DNA, 15 bp, Homo sapiens
tgagcggagatcaca

SEQ ID NO: 302512 - DNA, 15 bp, Homo sapiens
gtgagcggagatcac

SEQ ID NO: 302513 - DNA, 15 bp, Homo sapiens
agtgagcggagatca

SEQ ID NO: 302514 - DNA, 15 bp, Homo sapiens
cagtgagcggagatc

SEQ ID NO: 302515 - DNA, 15 bp, Homo sapiens
gcagtgagcggagat

SEQ ID NO: 302516 - DNA, 15 bp, Homo sapiens
tgcagtgagcggaga

SEQ ID NO: 302517 - DNA, 15 bp, Homo sapiens
ttgcagtgagcggag

SEQ ID NO: 302518 - DNA, 15 bp, Homo sapiens
gttgcagtgagcgga

SEQ ID NO: 302519 - DNA, 15 bp, Homo sapiens
ggttgcagtgagcgg

SEQ ID NO: 302520 - DNA, 15 bp, Homo sapiens
cggttgcagtgagcg

SEQ ID NO: 302521 - DNA, 15 bp, Homo sapiens
gcggttgcagtgagc

SEQ ID NO: 302522 - DNA, 15 bp, Homo sapiens
agcggttgcagtgag

SEQ ID NO: 302523 - DNA, 15 bp, Homo sapiens
cagcggttgcagtga

SEQ ID NO: 302524 - DNA, 15 bp, Homo sapiens
gcagcggttgcagtg

SEQ ID NO: 302525 - DNA, 15 bp, Homo sapiens
ggcagcggttgcagt

SEQ ID NO: 302526 - DNA, 15 bp, Homo sapiens
aggcagcggttgcag

SEQ ID NO: 302527 - DNA, 15 bp, Homo sapiens
gaggcagcggttgca

SEQ ID NO: 302528 - DNA, 15 bp, Homo sapiens
ggaggcagcggttgc

SEQ ID NO: 302529 - DNA, 15 bp, Homo sapiens
aggaggcagcggttg

SEQ ID NO: 302530 - DNA, 15 bp, Homo sapiens
taggaggcagcggtt

SEQ ID NO: 302531 - DNA, 15 bp, Homo sapiens
ctaggaggcagcggt

SEQ ID NO: 302532 - DNA, 15 bp, Homo sapiens
cctaggaggcagcgg

SEQ ID NO: 302533 - DNA, 15 bp, Homo sapiens
acctaggaggcagcg

SEQ ID NO: 302534 - DNA, 15 bp, Homo sapiens
aacctaggaggcagc

SEQ ID NO: 302535 - DNA, 15 bp, Homo sapiens
gaacctaggaggcag

SEQ ID NO: 302536 - DNA, 15 bp, Homo sapiens
tgaacctaggaggca

SEQ ID NO: 302537 - DNA, 15 bp, Homo sapiens
ttgaacctaggaggc

SEQ ID NO: 302538 - DNA, 15 bp, Homo sapiens
tttgaacctaggagg

SEQ ID NO: 302539 - DNA, 15 bp, Homo sapiens
gtttgaacctaggag

SEQ ID NO: 302540 - DNA, 15 bp, Homo sapiens
cgtttgaacctagga

SEQ ID NO: 302541 - DNA, 15 bp, Homo sapiens
tcgtttgaacctagg

SEQ ID NO: 302542 - DNA, 15 bp, Homo sapiens
atcgtttgaacctag

SEQ ID NO: 302543 - DNA, 15 bp, Homo sapiens
aatcgtttgaaccta

SEQ ID NO: 302544 - DNA, 15 bp, Homo sapiens
gaatcgtttgaacct

SEQ ID NO: 302545 - DNA, 15 bp, Homo sapiens
agaatcgtttgaacc

SEQ ID NO: 302546 - DNA, 15 bp, Homo sapiens
gagaatcgtttgaac

SEQ ID NO: 302547 - DNA, 15 bp, Homo sapiens
ggagaatcgtttgaa

SEQ ID NO: 302548 - DNA, 15 bp, Homo sapiens
aggagaatcgtttga

SEQ ID NO: 302549 - DNA, 15 bp, Homo sapiens
caggagaatcgtttg

SEQ ID NO: 302550 - DNA, 15 bp, Homo sapiens
gcaggagaatcgttt

SEQ ID NO: 302551 - DNA, 15 bp, Homo sapiens
ggcaggagaatcgtt

SEQ ID NO: 302552 - DNA, 15 bp, Homo sapiens
aggcaggagaatcgt

SEQ ID NO: 302553 - DNA, 15 bp, Homo sapiens
aaggcaggagaatcg

SEQ ID NO: 302554 - DNA, 15 bp, Homo sapiens
taaggcaggagaatc

SEQ ID NO: 302555 - DNA, 15 bp, Homo sapiens
ctaaggcaggagaat

SEQ ID NO: 302556 - DNA, 15 bp, Homo sapiens
gctaaggcaggagaa

SEQ ID NO: 302557 - DNA, 15 bp, Homo sapiens
ggctaaggcaggaga

SEQ ID NO: 302558 - DNA, 15 bp, Homo sapiens
aggctaaggcaggag

SEQ ID NO: 302559 - DNA, 15 bp, Homo sapiens
gaggctaaggcagga

SEQ ID NO: 302560 - DNA, 15 bp, Homo sapiens
ggaggctaaggcagg

SEQ ID NO: 302561 - DNA, 15 bp, Homo sapiens
aggaggctaaggcag

SEQ ID NO: 302562 - DNA, 15 bp, Homo sapiens
tactcaggaggctaa

SEQ ID NO: 302563 - DNA, 15 bp, Homo sapiens
ctactcaggaggcta

SEQ ID NO: 302564 - DNA, 15 bp, Homo sapiens
cgtgcctgtaatccc

SEQ ID NO: 302565 - DNA, 15 bp, Homo sapiens
tcgtgcctgtaatcc

SEQ ID NO: 302566 - DNA, 15 bp, Homo sapiens
ctcgtgcctgtaatc

SEQ ID NO: 302567 - DNA, 15 bp, Homo sapiens
tctcgtgcctgtaat

SEQ ID NO: 302568 - DNA, 15 bp, Homo sapiens
gtctcgtgcctgtaa

SEQ ID NO: 302569 - DNA, 15 bp, Homo sapiens
tgtctcgtgcctgta

SEQ ID NO: 302570 - DNA, 15 bp, Homo sapiens
ttgtctcgtgcctgt

SEQ ID NO: 302571 - DNA, 15 bp, Homo sapiens
gttgtctcgtgcctg

SEQ ID NO: 302572 - DNA, 15 bp, Homo sapiens
cgttgtctcgtgcct

SEQ ID NO: 302573 - DNA, 15 bp, Homo sapiens
gcgttgtctcgtgcc

SEQ ID NO: 302574 - DNA, 15 bp, Homo sapiens
cgcgttgtctcgtgc

SEQ ID NO: 302575 - DNA, 15 bp, Homo sapiens
gcgcgttgtctcgtg

SEQ ID NO: 302576 - DNA, 15 bp, Homo sapiens
ggcgcgttgtctcgt

SEQ ID NO: 302577 - DNA, 15 bp, Homo sapiens
gggcgcgttgtctcg

SEQ ID NO: 302578 - DNA, 15 bp, Homo sapiens
tgggcgcgttgtctc

SEQ ID NO: 302579 - DNA, 15 bp, Homo sapiens
ctgggcgcgttgtct

SEQ ID NO: 302580 - DNA, 15 bp, Homo sapiens
tctgggcgcgttgtc

SEQ ID NO: 302581 - DNA, 15 bp, Homo sapiens
atctgggcgcgttgt

SEQ ID NO: 302582 - DNA, 15 bp, Homo sapiens
tatctgggcgcgttg

SEQ ID NO: 302583 - DNA, 15 bp, Homo sapiens
ttatctgggcgcgtt

SEQ ID NO: 302584 - DNA, 15 bp, Homo sapiens
attatctgggcgcgt

SEQ ID NO: 302585 - DNA, 15 bp, Homo sapiens
aattatctgggcgcg

SEQ ID NO: 302586 - DNA, 15 bp, Homo sapiens
aaattatctgggcgc

SEQ ID NO: 302587 - DNA, 15 bp, Homo sapiens
aaaattatctgggcg

SEQ ID NO: 302588 - DNA, 15 bp, Homo sapiens
aaaaattatctgggc

SEQ ID NO: 302589 - DNA, 15 bp, Homo sapiens
caaaaattatctggg

SEQ ID NO: 302590 - DNA, 15 bp, Homo sapiens
acaaaaattatctgg

SEQ ID NO: 302591 - DNA, 15 bp, Homo sapiens
tacaaaaattatctg

SEQ ID NO: 302592 - DNA, 15 bp, Homo sapiens
atacaaaaattatct

SEQ ID NO: 302593 - DNA, 15 bp, Homo sapiens
aatacaaaaattatc

SEQ ID NO: 302594 - DNA, 15 bp, Homo sapiens
aaatacaaaaattat

SEQ ID NO: 302595 - DNA, 15 bp, Homo sapiens
acccgtctctactaa

SEQ ID NO: 302596 - DNA, 15 bp, Homo sapiens
aacccgtctctacta

SEQ ID NO: 302597 - DNA, 15 bp, Homo sapiens
aaacccgtctctact

SEQ ID NO: 302598 - DNA, 15 bp, Homo sapiens
aaaacccgtctctac

SEQ ID NO: 302599 - DNA, 15 bp, Homo sapiens
gaaaacccgtctcta

SEQ ID NO: 302600 - DNA, 15 bp, Homo sapiens
tgaaaacccgtctct

SEQ ID NO: 302601 - DNA, 15 bp, Homo sapiens
gtgaaaacccgtctc

SEQ ID NO: 302602 - DNA, 15 bp, Homo sapiens
ggtgaaaacccgtct

SEQ ID NO: 302603 - DNA, 15 bp, Homo sapiens
tggtgaaaacccgtc

SEQ ID NO: 302604 - DNA, 15 bp, Homo sapiens
atggtgaaaacccgt

SEQ ID NO: 302605 - DNA, 15 bp, Homo sapiens
catggtgaaaacccg

SEQ ID NO: 302606 - DNA, 15 bp, Homo sapiens
acatggtgaaaaccc

SEQ ID NO: 302607 - DNA, 15 bp, Homo sapiens
aacatggtgaaaacc

SEQ ID NO: 302608 - DNA, 15 bp, Homo sapiens
caacatggtgaaaac

SEQ ID NO: 302609 - DNA, 15 bp, Homo sapiens
ccaacatggtgaaaa

SEQ ID NO: 302610 - DNA, 15 bp, Homo sapiens
accaacatggtgaaa

SEQ ID NO: 302611 - DNA, 15 bp, Homo sapiens
aaccaacatggtgaa

SEQ ID NO: 302612 - DNA, 15 bp, Homo sapiens
taaccaacatggtga

SEQ ID NO: 302613 - DNA, 15 bp, Homo sapiens
ctaaccaacatggtg

SEQ ID NO: 302614 - DNA, 15 bp, Homo sapiens
gctaaccaacatggt

SEQ ID NO: 302615 - DNA, 15 bp, Homo sapiens
ggctaaccaacatgg

SEQ ID NO: 302616 - DNA, 15 bp, Homo sapiens
aggctaaccaacatg

SEQ ID NO: 302617 - DNA, 15 bp, Homo sapiens
caggctaaccaacat

SEQ ID NO: 302618 - DNA, 15 bp, Homo sapiens
tcaggctaaccaaca

SEQ ID NO: 302619 - DNA, 15 bp, Homo sapiens
atcaggctaaccaac

SEQ ID NO: 302620 - DNA, 15 bp, Homo sapiens
gatcaggctaaccaa

SEQ ID NO: 302621 - DNA, 15 bp, Homo sapiens
agatcaggctaacca

SEQ ID NO: 302622 - DNA, 15 bp, Homo sapiens
aagatcaggctaacc

SEQ ID NO: 302623 - DNA, 15 bp, Homo sapiens
taagatcaggctaac

SEQ ID NO: 302624 - DNA, 15 bp, Homo sapiens
ttaagatcaggctaa

SEQ ID NO: 302625 - DNA, 15 bp, Homo sapiens
tttaagatcaggcta

SEQ ID NO: 302626 - DNA, 15 bp, Homo sapiens
gtttaagatcaggct

SEQ ID NO: 302627 - DNA, 15 bp, Homo sapiens
agtttaagatcaggc

SEQ ID NO: 302628 - DNA, 15 bp, Homo sapiens
gagtttaagatcagg

SEQ ID NO: 302629 - DNA, 15 bp, Homo sapiens
ggagtttaagatcag

SEQ ID NO: 302630 - DNA, 15 bp, Homo sapiens
aggagtttaagatca

SEQ ID NO: 302631 - DNA, 15 bp, Homo sapiens
caggagtttaagatc

SEQ ID NO: 302632 - DNA, 15 bp, Homo sapiens
tcaggagtttaagat

SEQ ID NO: 302633 - DNA, 15 bp, Homo sapiens
gtcaggagtttaaga

SEQ ID NO: 302634 - DNA, 15 bp, Homo sapiens
tgtcaggagtttaag

SEQ ID NO: 302635 - DNA, 15 bp, Homo sapiens
atgtcaggagtttaa

SEQ ID NO: 302636 - DNA, 15 bp, Homo sapiens
gatgtcaggagttta

SEQ ID NO: 302637 - DNA, 15 bp, Homo sapiens
cgatgtcaggagttt

SEQ ID NO: 302638 - DNA, 15 bp, Homo sapiens
acgatgtcaggagtt

SEQ ID NO: 302639 - DNA, 15 bp, Homo sapiens
cacgatgtcaggagt

SEQ ID NO: 302640 - DNA, 15 bp, Homo sapiens
tcacgatgtcaggag

SEQ ID NO: 302641 - DNA, 15 bp, Homo sapiens
atcacgatgtcagga

SEQ ID NO: 302642 - DNA, 15 bp, Homo sapiens
gatcacgatgtcagg

SEQ ID NO: 302643 - DNA, 15 bp, Homo sapiens
ggatcacgatgtcag

SEQ ID NO: 302644 - DNA, 15 bp, Homo sapiens
cggatcacgatgtca

SEQ ID NO: 302645 - DNA, 15 bp, Homo sapiens
gcggatcacgatgtc

SEQ ID NO: 302646 - DNA, 15 bp, Homo sapiens
ggcggatcacgatgt

SEQ ID NO: 302647 - DNA, 15 bp, Homo sapiens
aggcggatcacgatg

SEQ ID NO: 302648 - DNA, 15 bp, Homo sapiens
caggcggatcacgat

SEQ ID NO: 302649 - DNA, 15 bp, Homo sapiens
gcaggcggatcacga

SEQ ID NO: 302650 - DNA, 15 bp, Homo sapiens
ggcaggcggatcacg

SEQ ID NO: 302651 - DNA, 15 bp, Homo sapiens
aggcaggcggatcac

SEQ ID NO: 302652 - DNA, 15 bp, Homo sapiens
gaggcaggcggatca

SEQ ID NO: 302653 - DNA, 15 bp, Homo sapiens
cgaggcaggcggatc

SEQ ID NO: 302654 - DNA, 15 bp, Homo sapiens
ccgaggcaggcggat

SEQ ID NO: 302655 - DNA, 15 bp, Homo sapiens
gccgaggcaggcgga

SEQ ID NO: 302656 - DNA, 15 bp, Homo sapiens
ggccgaggcaggcgg

SEQ ID NO: 302657 - DNA, 15 bp, Homo sapiens
aggccgaggcaggcg

SEQ ID NO: 302658 - DNA, 15 bp, Homo sapiens
gggaggccgaggcag

SEQ ID NO: 302659 - DNA, 15 bp, Homo sapiens
tgggaggccgaggca

SEQ ID NO: 302660 - DNA, 15 bp, Homo sapiens
ttgggaggccgaggc

SEQ ID NO: 302661 - DNA, 15 bp, Homo sapiens
tccagcactttggga

SEQ ID NO: 302662 - DNA, 15 bp, Homo sapiens
ttccagcactttggg

SEQ ID NO: 302663 - DNA, 15 bp, Homo sapiens
attccagcactttgg

SEQ ID NO: 302664 - DNA, 15 bp, Homo sapiens
aattccagcactttg

SEQ ID NO: 302665 - DNA, 15 bp, Homo sapiens
taattccagcacttt

SEQ ID NO: 302666 - DNA, 15 bp, Homo sapiens
ataattccagcactt

SEQ ID NO: 302667 - DNA, 15 bp, Homo sapiens
tataattccagcact

SEQ ID NO: 302668 - DNA, 15 bp, Homo sapiens
ctataattccagcac

SEQ ID NO: 302669 - DNA, 15 bp, Homo sapiens
cctataattccagca

SEQ ID NO: 302670 - DNA, 15 bp, Homo sapiens
acctataattccagc

SEQ ID NO: 302671 - DNA, 15 bp, Homo sapiens
cacctataattccag

SEQ ID NO: 302672 - DNA, 15 bp, Homo sapiens
acacctataattcca

SEQ ID NO: 302673 - DNA, 15 bp, Homo sapiens
cacacctataattcc

SEQ ID NO: 302674 - DNA, 15 bp, Homo sapiens
tcacacctataattc

SEQ ID NO: 302675 - DNA, 15 bp, Homo sapiens
ctcacacctataatt

SEQ ID NO: 302676 - DNA, 15 bp, Homo sapiens
gctcacacctataat

SEQ ID NO: 302677 - DNA, 15 bp, Homo sapiens
ggctcacacctataa

SEQ ID NO: 302678 - DNA, 15 bp, Homo sapiens
tggctcacacctata

SEQ ID NO: 302679 - DNA, 15 bp, Homo sapiens
gtggctcacacctat

SEQ ID NO: 302680 - DNA, 15 bp, Homo sapiens
ggtggctcacaccta

SEQ ID NO: 302681 - DNA, 15 bp, Homo sapiens
gggtggctcacacct

SEQ ID NO: 302682 - DNA, 15 bp, Homo sapiens
ggggtggctcacacc

SEQ ID NO: 302683 - DNA, 15 bp, Homo sapiens
tggggtggctcacac

SEQ ID NO: 302684 - DNA, 15 bp, Homo sapiens
gtggggtggctcaca

SEQ ID NO: 302685 - DNA, 15 bp, Homo sapiens
ggtggggtggctcac

SEQ ID NO: 302686 - DNA, 15 bp, Homo sapiens
gggtggggtggctca

SEQ ID NO: 302687 - DNA, 15 bp, Homo sapiens
tgggtggggtggctc

SEQ ID NO: 302688 - DNA, 15 bp, Homo sapiens
ctgggtggggtggct

SEQ ID NO: 302689 - DNA, 15 bp, Homo sapiens
gctgggtggggtggc

SEQ ID NO: 302690 - DNA, 15 bp, Homo sapiens
tgctgggtggggtgg

SEQ ID NO: 302691 - DNA, 15 bp, Homo sapiens
ttgctgggtggggtg

SEQ ID NO: 302692 - DNA, 15 bp, Homo sapiens
tttgctgggtggggt

SEQ ID NO: 302693 - DNA, 15 bp, Homo sapiens
ttttgctgggtgggg

SEQ ID NO: 302694 - DNA, 15 bp, Homo sapiens
tttttgctgggtggg

SEQ ID NO: 302695 - DNA, 15 bp, Homo sapiens
ttttttgctgggtgg

SEQ ID NO: 302696 - DNA, 15 bp, Homo sapiens
attttttgctgggtg

SEQ ID NO: 302697 - DNA, 15 bp, Homo sapiens
aattttttgctgggt

SEQ ID NO: 302698 - DNA, 15 bp, Homo sapiens
gaattttttgctggg

SEQ ID NO: 302699 - DNA, 15 bp, Homo sapiens
tgaattttttgctgg

SEQ ID NO: 302700 - DNA, 15 bp, Homo sapiens
ctgaattttttgctg

SEQ ID NO: 302701 - DNA, 15 bp, Homo sapiens
tctgaattttttgct

SEQ ID NO: 302702 - DNA, 15 bp, Homo sapiens
ttctgaattttttgc

SEQ ID NO: 302703 - DNA, 15 bp, Homo sapiens
attctgaattttttg

SEQ ID NO: 302704 - DNA, 15 bp, Homo sapiens
aattctgaatttttt

SEQ ID NO: 302705 - DNA, 15 bp, Homo sapiens
gaattctgaattttt

SEQ ID NO: 302706 - DNA, 15 bp, Homo sapiens
agaattctgaatttt

SEQ ID NO: 302707 - DNA, 15 bp, Homo sapiens
tagaattctgaattt

SEQ ID NO: 302708 - DNA, 15 bp, Homo sapiens
ttagaattctgaatt

SEQ ID NO: 302709 - DNA, 15 bp, Homo sapiens
tttagaattctgaat

SEQ ID NO: 302710 - DNA, 15 bp, Homo sapiens
ctttagaattctgaa

SEQ ID NO: 302711 - DNA, 15 bp, Homo sapiens
tctttagaattctga

SEQ ID NO: 302712 - DNA, 15 bp, Homo sapiens
atctttagaattctg

SEQ ID NO: 302713 - DNA, 15 bp, Homo sapiens
tatctttagaattct

SEQ ID NO: 302714 - DNA, 15 bp, Homo sapiens
ttatctttagaattc

SEQ ID NO: 302715 - DNA, 15 bp, Homo sapiens
attatctttagaatt

SEQ ID NO: 302716 - DNA, 15 bp, Homo sapiens
cattatctttagaat

SEQ ID NO: 302717 - DNA, 15 bp, Homo sapiens
ctcattatctttaga

SEQ ID NO: 302718 - DNA, 15 bp, Homo sapiens
tctcattatctttag

SEQ ID NO: 302719 - DNA, 15 bp, Homo sapiens
ttctcattatcttta

SEQ ID NO: 302720 - DNA, 15 bp, Homo sapiens
tttctcattatcttt

SEQ ID NO: 302721 - DNA, 15 bp, Homo sapiens
ttttctcattatctt

SEQ ID NO: 302722 - DNA, 15 bp, Homo sapiens
attttctcattatct

SEQ ID NO: 302723 - DNA, 15 bp, Homo sapiens
aattttctcattatc

SEQ ID NO: 302724 - DNA, 15 bp, Homo sapiens
taattttctcattat

SEQ ID NO: 302725 - DNA, 15 bp, Homo sapiens
ataattttctcatta

SEQ ID NO: 302726 - DNA, 15 bp, Homo sapiens
tataattttctcatt

SEQ ID NO: 302727 - DNA, 15 bp, Homo sapiens
ttataattttctcat

SEQ ID NO: 302728 - DNA, 15 bp, Homo sapiens
tttataattttctca

SEQ ID NO: 302729 - DNA, 15 bp, Homo sapiens
ttttataattttctc

SEQ ID NO: 302730 - DNA, 15 bp, Homo sapiens
cttttataattttct

SEQ ID NO: 302731 - DNA, 15 bp, Homo sapiens
gcttttataattttc

SEQ ID NO: 302732 - DNA, 15 bp, Homo sapiens
agcttttataatttt

SEQ ID NO: 302733 - DNA, 15 bp, Homo sapiens
aagcttttataattt

SEQ ID NO: 302734 - DNA, 15 bp, Homo sapiens
gaagcttttataatt

SEQ ID NO: 302735 - DNA, 15 bp, Homo sapiens
ggaagcttttataat

SEQ ID NO: 302736 - DNA, 15 bp, Homo sapiens
tggaagcttttataa

SEQ ID NO: 302737 - DNA, 15 bp, Homo sapiens
ctggaagcttttata

SEQ ID NO: 302738 - DNA, 15 bp, Homo sapiens
tctggaagcttttat

SEQ ID NO: 302739 - DNA, 15 bp, Homo sapiens
ctctggaagctttta

SEQ ID NO: 302740 - DNA, 15 bp, Homo sapiens
tctctggaagctttt

SEQ ID NO: 302741 - DNA, 15 bp, Homo sapiens
ctctctggaagcttt

SEQ ID NO: 302742 - DNA, 15 bp, Homo sapiens
tctctctggaagctt

SEQ ID NO: 302743 - DNA, 15 bp, Homo sapiens
ttctctctggaagct

SEQ ID NO: 302744 - DNA, 15 bp, Homo sapiens
tttctctctggaagc

SEQ ID NO: 302745 - DNA, 15 bp, Homo sapiens
ttttctctctggaag

SEQ ID NO: 302746 - DNA, 15 bp, Homo sapiens
tttttctctctggaa

SEQ ID NO: 302747 - DNA, 15 bp, Homo sapiens
ctttttctctctgga

SEQ ID NO: 302748 - DNA, 15 bp, Homo sapiens
actttttctctctgg

SEQ ID NO: 302749 - DNA, 15 bp, Homo sapiens
tactttttctctctg

SEQ ID NO: 302750 - DNA, 15 bp, Homo sapiens
ttactttttctctct

SEQ ID NO: 302751 - DNA, 15 bp, Homo sapiens
cttactttttctctc

SEQ ID NO: 302752 - DNA, 15 bp, Homo sapiens
gcttactttttctct

SEQ ID NO: 302753 - DNA, 15 bp, Homo sapiens
agcttactttttctc

SEQ ID NO: 302754 - DNA, 15 bp, Homo sapiens
tagcttactttttct

SEQ ID NO: 302755 - DNA, 15 bp, Homo sapiens
atagcttactttttc

SEQ ID NO: 302756 - DNA, 15 bp, Homo sapiens
aatagcttacttttt

SEQ ID NO: 302757 - DNA, 15 bp, Homo sapiens
aaatagcttactttt

SEQ ID NO: 302758 - DNA, 15 bp, Homo sapiens
aaaatagcttacttt

SEQ ID NO: 302759 - DNA, 15 bp, Homo sapiens
taaaatagcttactt

SEQ ID NO: 302760 - DNA, 15 bp, Homo sapiens
ctaaaatagcttact

SEQ ID NO: 302761 - DNA, 15 bp, Homo sapiens
cctaaaatagcttac

SEQ ID NO: 302762 - DNA, 15 bp, Homo sapiens
ccctaaaatagctta

SEQ ID NO: 302763 - DNA, 15 bp, Homo sapiens
cccctaaaatagctt

SEQ ID NO: 302764 - DNA, 15 bp, Homo sapiens
tcccctaaaatagct

SEQ ID NO: 302765 - DNA, 15 bp, Homo sapiens
ttcccctaaaatagc

SEQ ID NO: 302766 - DNA, 15 bp, Homo sapiens
attcccctaaaatag

SEQ ID NO: 302767 - DNA, 15 bp, Homo sapiens
cattcccctaaaata

SEQ ID NO: 302768 - DNA, 15 bp, Homo sapiens
tcattcccctaaaat

SEQ ID NO: 302769 - DNA, 15 bp, Homo sapiens
ctcattcccctaaaa

SEQ ID NO: 302770 - DNA, 15 bp, Homo sapiens
tctcattcccctaaa

SEQ ID NO: 302771 - DNA, 15 bp, Homo sapiens
atctcattcccctaa

SEQ ID NO: 302772 - DNA, 15 bp, Homo sapiens
gatctcattccccta

SEQ ID NO: 302773 - DNA, 15 bp, Homo sapiens
ggatctcattcccct

SEQ ID NO: 302774 - DNA, 15 bp, Homo sapiens
tggatctcattcccc

SEQ ID NO: 302775 - DNA, 15 bp, Homo sapiens
ctggatctcattccc

SEQ ID NO: 302776 - DNA, 15 bp, Homo sapiens
tctggatctcattcc

SEQ ID NO: 302777 - DNA, 15 bp, Homo sapiens
atctggatctcattc

SEQ ID NO: 302778 - DNA, 15 bp, Homo sapiens
gatctggatctcatt

SEQ ID NO: 302779 - DNA, 15 bp, Homo sapiens
tgatctggatctcat

SEQ ID NO: 302780 - DNA, 15 bp, Homo sapiens
ctgatctggatctca

SEQ ID NO: 302781 - DNA, 15 bp, Homo sapiens
gctgatctggatctc

SEQ ID NO: 302782 - DNA, 15 bp, Homo sapiens
tgctgatctggatct

SEQ ID NO: 302783 - DNA, 15 bp, Homo sapiens
gtgctgatctggatc

SEQ ID NO: 302784 - DNA, 15 bp, Homo sapiens
tgtgctgatctggat

SEQ ID NO: 302785 - DNA, 15 bp, Homo sapiens
ctgtgctgatctgga

SEQ ID NO: 302786 - DNA, 15 bp, Homo sapiens
tctgtgctgatctgg

SEQ ID NO: 302787 - DNA, 15 bp, Homo sapiens
ttctgtgctgatctg

SEQ ID NO: 302788 - DNA, 15 bp, Homo sapiens
cttctgtgctgatct

SEQ ID NO: 302789 - DNA, 15 bp, Homo sapiens
acttctgtgctgatc

SEQ ID NO: 302790 - DNA, 15 bp, Homo sapiens
aacttctgtgctgat

SEQ ID NO: 302791 - DNA, 15 bp, Homo sapiens
gaacttctgtgctga

SEQ ID NO: 302792 - DNA, 15 bp, Homo sapiens
agaacttctgtgctg

SEQ ID NO: 302793 - DNA, 15 bp, Homo sapiens
gagaacttctgtgct

SEQ ID NO: 302794 - DNA, 15 bp, Homo sapiens
tgagaacttctgtgc

SEQ ID NO: 302795 - DNA, 15 bp, Homo sapiens
atgagaacttctgtg

SEQ ID NO: 302796 - DNA, 15 bp, Homo sapiens
aatgagaacttctgt

SEQ ID NO: 302797 - DNA, 15 bp, Homo sapiens
taatgagaacttctg

SEQ ID NO: 302798 - DNA, 15 bp, Homo sapiens
ctaatgagaacttct

SEQ ID NO: 302799 - DNA, 15 bp, Homo sapiens
cctaatgagaacttc

SEQ ID NO: 302800 - DNA, 15 bp, Homo sapiens
tcctaatgagaactt

SEQ ID NO: 302801 - DNA, 15 bp, Homo sapiens
ttcctaatgagaact

SEQ ID NO: 302802 - DNA, 15 bp, Homo sapiens
attcctaatgagaac

SEQ ID NO: 302803 - DNA, 15 bp, Homo sapiens
tattcctaatgagaa

SEQ ID NO: 302804 - DNA, 15 bp, Homo sapiens
gtattcctaatgaga

SEQ ID NO: 302805 - DNA, 15 bp, Homo sapiens
agtattcctaatgag

SEQ ID NO: 302806 - DNA, 15 bp, Homo sapiens
cagtattcctaatga

SEQ ID NO: 302807 - DNA, 15 bp, Homo sapiens
ccagtattcctaatg

SEQ ID NO: 302808 - DNA, 15 bp, Homo sapiens
tccagtattcctaat

SEQ ID NO: 302809 - DNA, 15 bp, Homo sapiens
atccagtattcctaa

SEQ ID NO: 302810 - DNA, 15 bp, Homo sapiens
tatccagtattccta

SEQ ID NO: 302811 - DNA, 15 bp, Homo sapiens
atatccagtattcct

SEQ ID NO: 302812 - DNA, 15 bp, Homo sapiens
aatatccagtattcc

SEQ ID NO: 302813 - DNA, 15 bp, Homo sapiens
aaatatccagtattc

SEQ ID NO: 302814 - DNA, 15 bp, Homo sapiens
aaaatatccagtatt

SEQ ID NO: 302815 - DNA, 15 bp, Homo sapiens
taaaatatccagtat

SEQ ID NO: 302816 - DNA, 15 bp, Homo sapiens
ataaaatatccagta

SEQ ID NO: 302817 - DNA, 15 bp, Homo sapiens
tataaaatatccagt

SEQ ID NO: 302818 - DNA, 15 bp, Homo sapiens
ttataaaatatccag

SEQ ID NO: 302819 - DNA, 15 bp, Homo sapiens
gttataaaatatcca

SEQ ID NO: 302820 - DNA, 15 bp, Homo sapiens
ggttataaaatatcc

SEQ ID NO: 302821 - DNA, 15 bp, Homo sapiens
aggttataaaatatc

SEQ ID NO: 302822 - DNA, 15 bp, Homo sapiens
taggttataaaatat

SEQ ID NO: 302823 - DNA, 15 bp, Homo sapiens
ttaggttataaaata

SEQ ID NO: 302824 - DNA, 15 bp, Homo sapiens
tttaggttataaaat

SEQ ID NO: 302825 - DNA, 15 bp, Homo sapiens
ttttaggttataaaa

SEQ ID NO: 302826 - DNA, 15 bp, Homo sapiens
attttaggttataaa

SEQ ID NO: 302827 - DNA, 15 bp, Homo sapiens
aattttaggttataa

SEQ ID NO: 302828 - DNA, 15 bp, Homo sapiens
aaattttaggttata

SEQ ID NO: 302829 - DNA, 15 bp, Homo sapiens
caaattttaggttat

SEQ ID NO: 302830 - DNA, 15 bp, Homo sapiens
acaaattttaggtta

SEQ ID NO: 302831 - DNA, 15 bp, Homo sapiens
gacaaattttaggtt

SEQ ID NO: 302832 - DNA, 15 bp, Homo sapiens
tgacaaattttaggt

SEQ ID NO: 302833 - DNA, 15 bp, Homo sapiens
ttgacaaattttagg

SEQ ID NO: 302834 - DNA, 15 bp, Homo sapiens
tttgacaaattttag

SEQ ID NO: 302835 - DNA, 15 bp, Homo sapiens
atttgacaaatttta

SEQ ID NO: 302836 - DNA, 15 bp, Homo sapiens
tatttgacaaatttt

SEQ ID NO: 302837 - DNA, 15 bp, Homo sapiens
atatttgacaaattt

SEQ ID NO: 302838 - DNA, 15 bp, Homo sapiens
catatttgacaaatt

SEQ ID NO: 302839 - DNA, 15 bp, Homo sapiens
tcatatttgacaaat

SEQ ID NO: 302840 - DNA, 15 bp, Homo sapiens
gtcatatttgacaaa

SEQ ID NO: 302841 - DNA, 15 bp, Homo sapiens
tgtcatatttgacaa

SEQ ID NO: 302842 - DNA, 15 bp, Homo sapiens
ctgtcatatttgaca

SEQ ID NO: 302843 - DNA, 15 bp, Homo sapiens
gctgtcatatttgac

SEQ ID NO: 302844 - DNA, 15 bp, Homo sapiens
tgctgtcatatttga

SEQ ID NO: 302845 - DNA, 15 bp, Homo sapiens
ttgctgtcatatttg

SEQ ID NO: 302846 - DNA, 15 bp, Homo sapiens
tttgctgtcatattt

SEQ ID NO: 302847 - DNA, 15 bp, Homo sapiens
ttttgctgtcatatt

SEQ ID NO: 302848 - DNA, 15 bp, Homo sapiens
attttgctgtcatat

SEQ ID NO: 302849 - DNA, 15 bp, Homo sapiens
cattttgctgtcata

SEQ ID NO: 302850 - DNA, 15 bp, Homo sapiens
tcattttgctgtcat

SEQ ID NO: 302851 - DNA, 15 bp, Homo sapiens
ttcattttgctgtca

SEQ ID NO: 302852 - DNA, 15 bp, Homo sapiens
tttcattttgctgtc

SEQ ID NO: 302853 - DNA, 15 bp, Homo sapiens
atttcattttgctgt

SEQ ID NO: 302854 - DNA, 15 bp, Homo sapiens
aatttcattttgctg

SEQ ID NO: 302855 - DNA, 15 bp, Homo sapiens
aaatttcattttgct

SEQ ID NO: 302856 - DNA, 15 bp, Homo sapiens
caaatttcattttgc

SEQ ID NO: 302857 - DNA, 15 bp, Homo sapiens
ccaaatttcattttg

SEQ ID NO: 302858 - DNA, 15 bp, Homo sapiens
tccaaatttcatttt

SEQ ID NO: 302859 - DNA, 15 bp, Homo sapiens
ttccaaatttcattt

SEQ ID NO: 302860 - DNA, 15 bp, Homo sapiens
tttccaaatttcatt

SEQ ID NO: 302861 - DNA, 15 bp, Homo sapiens
atttccaaatttcat

SEQ ID NO: 302862 - DNA, 15 bp, Homo sapiens
catttccaaatttca

SEQ ID NO: 302863 - DNA, 15 bp, Homo sapiens
gcatttccaaatttc

SEQ ID NO: 302864 - DNA, 15 bp, Homo sapiens
tgcatttccaaattt

SEQ ID NO: 302865 - DNA, 15 bp, Homo sapiens
ttgcatttccaaatt

SEQ ID NO: 302866 - DNA, 15 bp, Homo sapiens
cttgcatttccaaat

SEQ ID NO: 302867 - DNA, 15 bp, Homo sapiens
ccttgcatttccaaa

SEQ ID NO: 302868 - DNA, 15 bp, Homo sapiens
tccttgcatttccaa

SEQ ID NO: 302869 - DNA, 15 bp, Homo sapiens
gtccttgcatttcca

SEQ ID NO: 302870 - DNA, 15 bp, Homo sapiens
agtccttgcatttcc

SEQ ID NO: 302871 - DNA, 15 bp, Homo sapiens
gagtccttgcatttc

SEQ ID NO: 302872 - DNA, 15 bp, Homo sapiens
tgagtccttgcattt

SEQ ID NO: 302873 - DNA, 15 bp, Homo sapiens
ctgagtccttgcatt

SEQ ID NO: 302874 - DNA, 15 bp, Homo sapiens
tctgagtccttgcat

SEQ ID NO: 302875 - DNA, 15 bp, Homo sapiens
ttctgagtccttgca

SEQ ID NO: 302876 - DNA, 15 bp, Homo sapiens
attctgagtccttgc

SEQ ID NO: 302877 - DNA, 15 bp, Homo sapiens
cattctgagtccttg

SEQ ID NO: 302878 - DNA, 15 bp, Homo sapiens
acattctgagtcctt

SEQ ID NO: 302879 - DNA, 15 bp, Homo sapiens
aacattctgagtcct

SEQ ID NO: 302880 - DNA, 15 bp, Homo sapiens
aaacattctgagtcc

SEQ ID NO: 302881 - DNA, 15 bp, Homo sapiens
taaacattctgagtc

SEQ ID NO: 302882 - DNA, 15 bp, Homo sapiens
ataaacattctgagt

SEQ ID NO: 302883 - DNA, 15 bp, Homo sapiens
gataaacattctgag

SEQ ID NO: 302884 - DNA, 15 bp, Homo sapiens
agataaacattctga

SEQ ID NO: 302885 - DNA, 15 bp, Homo sapiens
aagataaacattctg

SEQ ID NO: 302886 - DNA, 15 bp, Homo sapiens
aaagataaacattct

SEQ ID NO: 302887 - DNA, 15 bp, Homo sapiens
aaaagataaacattc

SEQ ID NO: 302888 - DNA, 15 bp, Homo sapiens
caaaagataaacatt

SEQ ID NO: 302889 - DNA, 15 bp, Homo sapiens
tcaaaagataaacat

SEQ ID NO: 302890 - DNA, 15 bp, Homo sapiens
gtcaaaagataaaca

SEQ ID NO: 302891 - DNA, 15 bp, Homo sapiens
agtcaaaagataaac

SEQ ID NO: 302892 - DNA, 15 bp, Homo sapiens
cagtcaaaagataaa

SEQ ID NO: 302893 - DNA, 15 bp, Homo sapiens
gcagtcaaaagataa

SEQ ID NO: 302894 - DNA, 15 bp, Homo sapiens
ggcagtcaaaagata

SEQ ID NO: 302895 - DNA, 15 bp, Homo sapiens
gggcagtcaaaagat

SEQ ID NO: 302896 - DNA, 15 bp, Homo sapiens
agggcagtcaaaaga

SEQ ID NO: 302897 - DNA, 15 bp, Homo sapiens
aagggcagtcaaaag

SEQ ID NO: 302898 - DNA, 15 bp, Homo sapiens
aaagggcagtcaaaa

SEQ ID NO: 302899 - DNA, 15 bp, Homo sapiens
aaaagggcagtcaaa

SEQ ID NO: 302900 - DNA, 15 bp, Homo sapiens
caaaagggcagtcaa

SEQ ID NO: 302901 - DNA, 15 bp, Homo sapiens
tcaaaagggcagtca

SEQ ID NO: 302902 - DNA, 15 bp, Homo sapiens
ttcaaaagggcagtc

SEQ ID NO: 302903 - DNA, 15 bp, Homo sapiens
tttcaaaagggcagt

SEQ ID NO: 302904 - DNA, 15 bp, Homo sapiens
atttcaaaagggcag

SEQ ID NO: 302905 - DNA, 15 bp, Homo sapiens
catttcaaaagggca

SEQ ID NO: 302906 - DNA, 15 bp, Homo sapiens
tcatttcaaaagggc

SEQ ID NO: 302907 - DNA, 15 bp, Homo sapiens
ttcatttcaaaaggg

SEQ ID NO: 302908 - DNA, 15 bp, Homo sapiens
tttcatttcaaaagg

SEQ ID NO: 302909 - DNA, 15 bp, Homo sapiens
atttcatttcaaaag

SEQ ID NO: 302910 - DNA, 15 bp, Homo sapiens
aatttcatttcaaaa

SEQ ID NO: 302911 - DNA, 15 bp, Homo sapiens
taatttcatttcaaa

SEQ ID NO: 302912 - DNA, 15 bp, Homo sapiens
gtaatttcatttcaa

SEQ ID NO: 302913 - DNA, 15 bp, Homo sapiens
agtaatttcatttca

SEQ ID NO: 302914 - DNA, 15 bp, Homo sapiens
tagtaatttcatttc

SEQ ID NO: 302915 - DNA, 15 bp, Homo sapiens
ctagtaatttcattt

SEQ ID NO: 302916 - DNA, 15 bp, Homo sapiens
cctagtaatttcatt

SEQ ID NO: 302917 - DNA, 15 bp, Homo sapiens
ccctagtaatttcat

SEQ ID NO: 302918 - DNA, 15 bp, Homo sapiens
tccctagtaatttca

SEQ ID NO: 302919 - DNA, 15 bp, Homo sapiens
ttccctagtaatttc

SEQ ID NO: 302920 - DNA, 15 bp, Homo sapiens
attccctagtaattt

SEQ ID NO: 302921 - DNA, 15 bp, Homo sapiens
tattccctagtaatt

SEQ ID NO: 302922 - DNA, 15 bp, Homo sapiens
atattccctagtaat

SEQ ID NO: 302923 - DNA, 15 bp, Homo sapiens
catattccctagtaa

SEQ ID NO: 302924 - DNA, 15 bp, Homo sapiens
gcatattccctagta

SEQ ID NO: 302925 - DNA, 15 bp, Homo sapiens
agcatattccctagt

SEQ ID NO: 302926 - DNA, 15 bp, Homo sapiens
aagcatattccctag

SEQ ID NO: 302927 - DNA, 15 bp, Homo sapiens
aaagcatattcccta

SEQ ID NO: 302928 - DNA, 15 bp, Homo sapiens
taaagcatattccct

SEQ ID NO: 302929 - DNA, 15 bp, Homo sapiens
ttaaagcatattccc

SEQ ID NO: 302930 - DNA, 15 bp, Homo sapiens
tttaaagcatattcc

SEQ ID NO: 302931 - DNA, 15 bp, Homo sapiens
ttttaaagcatattc

SEQ ID NO: 302932 - DNA, 15 bp, Homo sapiens
tttttaaagcatatt

SEQ ID NO: 302933 - DNA, 15 bp, Homo sapiens
ttttttaaagcatat

SEQ ID NO: 302934 - DNA, 15 bp, Homo sapiens
tttttttaaagcata

SEQ ID NO: 302935 - DNA, 15 bp, Homo sapiens
atttttttaaagcat

SEQ ID NO: 302936 - DNA, 15 bp, Homo sapiens
catttttttaaagca

SEQ ID NO: 302937 - DNA, 15 bp, Homo sapiens
tcatttttttaaagc

SEQ ID NO: 302938 - DNA, 15 bp, Homo sapiens
ttcatttttttaaag

SEQ ID NO: 302939 - DNA, 15 bp, Homo sapiens
tttcatttttttaaa

SEQ ID NO: 302940 - DNA, 15 bp, Homo sapiens
ttttcatttttttaa

SEQ ID NO: 302941 - DNA, 15 bp, Homo sapiens
tttttcattttttta

SEQ ID NO: 302942 - DNA, 15 bp, Homo sapiens
ttttttcattttttt

SEQ ID NO: 302943 - DNA, 15 bp, Homo sapiens
cttttttcatttttt

SEQ ID NO: 302944 - DNA, 15 bp, Homo sapiens
tcttttttcattttt

SEQ ID NO: 302945 - DNA, 15 bp, Homo sapiens
ttcttttttcatttt

SEQ ID NO: 302946 - DNA, 15 bp, Homo sapiens
attcttttttcattt

SEQ ID NO: 302947 - DNA, 15 bp, Homo sapiens
gattcttttttcatt

SEQ ID NO: 302948 - DNA, 15 bp, Homo sapiens
ggattcttttttcat

SEQ ID NO: 302949 - DNA, 15 bp, Homo sapiens
tggattcttttttca

SEQ ID NO: 302950 - DNA, 15 bp, Homo sapiens
gtggattcttttttc

SEQ ID NO: 302951 - DNA, 15 bp, Homo sapiens
tgtggattctttttt

SEQ ID NO: 302952 - DNA, 15 bp, Homo sapiens
ttgtggattcttttt

SEQ ID NO: 302953 - DNA, 15 bp, Homo sapiens
tttgtggattctttt

SEQ ID NO: 302954 - DNA, 15 bp, Homo sapiens
ttttgtggattcttt

SEQ ID NO: 302955 - DNA, 15 bp, Homo sapiens
cttttgtggattctt

SEQ ID NO: 302956 - DNA, 15 bp, Homo sapiens
ccttttgtggattct

SEQ ID NO: 302957 - DNA, 15 bp, Homo sapiens
cccttttgtggattc

SEQ ID NO: 302958 - DNA, 15 bp, Homo sapiens
tcccttttgtggatt

SEQ ID NO: 302959 - DNA, 15 bp, Homo sapiens
ttcccttttgtggat

SEQ ID NO: 302960 - DNA, 15 bp, Homo sapiens
tttcccttttgtgga

SEQ ID NO: 302961 - DNA, 15 bp, Homo sapiens
atttcccttttgtgg

SEQ ID NO: 302962 - DNA, 15 bp, Homo sapiens
gatttcccttttgtg

SEQ ID NO: 302963 - DNA, 15 bp, Homo sapiens
tgatttcccttttgt

SEQ ID NO: 302964 - DNA, 15 bp, Homo sapiens
atgatttcccttttg

SEQ ID NO: 302965 - DNA, 15 bp, Homo sapiens
tatgatttccctttt

SEQ ID NO: 302966 - DNA, 15 bp, Homo sapiens
ttatgatttcccttt

SEQ ID NO: 302967 - DNA, 15 bp, Homo sapiens
cttatgatttccctt

SEQ ID NO: 302968 - DNA, 15 bp, Homo sapiens
tcttatgatttccct

SEQ ID NO: 302969 - DNA, 15 bp, Homo sapiens
gtcttatgatttccc

SEQ ID NO: 302970 - DNA, 15 bp, Homo sapiens
ggtcttatgatttcc

SEQ ID NO: 302971 - DNA, 15 bp, Homo sapiens
aggtcttatgatttc

SEQ ID NO: 302972 - DNA, 15 bp, Homo sapiens
taggtcttatgattt

SEQ ID NO: 302973 - DNA, 15 bp, Homo sapiens
ttaggtcttatgatt

SEQ ID NO: 302974 - DNA, 15 bp, Homo sapiens
attaggtcttatgat

SEQ ID NO: 302975 - DNA, 15 bp, Homo sapiens
tattaggtcttatga

SEQ ID NO: 302976 - DNA, 15 bp, Homo sapiens
ttattaggtcttatg

SEQ ID NO: 302977 - DNA, 15 bp, Homo sapiens
tttattaggtcttat

SEQ ID NO: 302978 - DNA, 15 bp, Homo sapiens
ttttattaggtctta

SEQ ID NO: 302979 - DNA, 15 bp, Homo sapiens
tttttattaggtctt

SEQ ID NO: 302980 - DNA, 15 bp, Homo sapiens
ttttttattaggtct

SEQ ID NO: 302981 - DNA, 15 bp, Homo sapiens
tttttttattaggtc

SEQ ID NO: 302982 - DNA, 15 bp, Homo sapiens
gtttttttattaggt

SEQ ID NO: 302983 - DNA, 15 bp, Homo sapiens
agtttttttattagg

SEQ ID NO: 302984 - DNA, 15 bp, Homo sapiens
cagtttttttattag

SEQ ID NO: 302985 - DNA, 15 bp, Homo sapiens
acagtttttttatta

SEQ ID NO: 302986 - DNA, 15 bp, Homo sapiens
gacagtttttttatt

SEQ ID NO: 302987 - DNA, 15 bp, Homo sapiens
tgacagtttttttat

SEQ ID NO: 302988 - DNA, 15 bp, Homo sapiens
gtgacagttttttta

SEQ ID NO: 302989 - DNA, 15 bp, Homo sapiens
tgtgacagttttttt

SEQ ID NO: 302990 - DNA, 15 bp, Homo sapiens
gtgtgacagtttttt

SEQ ID NO: 302991 - DNA, 15 bp, Homo sapiens
ggtgtgacagttttt

SEQ ID NO: 302992 - DNA, 15 bp, Homo sapiens
tggtgtgacagtttt

SEQ ID NO: 302993 - DNA, 15 bp, Homo sapiens
ctggtgtgacagttt

SEQ ID NO: 302994 - DNA, 15 bp, Homo sapiens
tctggtgtgacagtt

SEQ ID NO: 302995 - DNA, 15 bp, Homo sapiens
ctctggtgtgacagt

SEQ ID NO: 302996 - DNA, 15 bp, Homo sapiens
gctctggtgtgacag

SEQ ID NO: 302997 - DNA, 15 bp, Homo sapiens
tgctctggtgtgaca

SEQ ID NO: 302998 - DNA, 15 bp, Homo sapiens
ctgctctggtgtgac

SEQ ID NO: 302999 - DNA, 15 bp, Homo sapiens
tctgctctggtgtga

SEQ ID NO: 303000 - DNA, 15 bp, Homo sapiens
ctctgctctggtgtg

SEQ ID NO: 303001 - DNA, 15 bp, Homo sapiens
tctctgctctggtgt

SEQ ID NO: 303002 - DNA, 15 bp, Homo sapiens
ctctctgctctggtg

SEQ ID NO: 303003 - DNA, 15 bp, Homo sapiens
tctctctgctctggt

SEQ ID NO: 303004 - DNA, 15 bp, Homo sapiens
ttctctctgctctgg

SEQ ID NO: 303005 - DNA, 15 bp, Homo sapiens
tttctctctgctctg

SEQ ID NO: 303006 - DNA, 15 bp, Homo sapiens
ttttctctctgctct

SEQ ID NO: 303007 - DNA, 15 bp, Homo sapiens
tttttctctctgctc

SEQ ID NO: 303008 - DNA, 15 bp, Homo sapiens
atttttctctctgct

SEQ ID NO: 303009 - DNA, 15 bp, Homo sapiens
catttttctctctgc

SEQ ID NO: 303010 - DNA, 15 bp, Homo sapiens
gcatttttctctctg

SEQ ID NO: 303011 - DNA, 15 bp, Homo sapiens
tgcatttttctctct

SEQ ID NO: 303012 - DNA, 15 bp, Homo sapiens
ttgcatttttctctc

SEQ ID NO: 303013 - DNA, 15 bp, Homo sapiens
tttgcatttttctct

SEQ ID NO: 303014 - DNA, 15 bp, Homo sapiens
ttttgcatttttctc

SEQ ID NO: 303015 - DNA, 15 bp, Homo sapiens
tttttgcatttttct

SEQ ID NO: 303016 - DNA, 15 bp, Homo sapiens
ttttttgcatttttc

SEQ ID NO: 303017 - DNA, 15 bp, Homo sapiens
attttttgcattttt

SEQ ID NO: 303018 - DNA, 15 bp, Homo sapiens
gattttttgcatttt

SEQ ID NO: 303019 - DNA, 15 bp, Homo sapiens
ggattttttgcattt

SEQ ID NO: 303020 - DNA, 15 bp, Homo sapiens
aggattttttgcatt

SEQ ID NO: 303021 - DNA, 15 bp, Homo sapiens
taggattttttgcat

SEQ ID NO: 303022 - DNA, 15 bp, Homo sapiens
gtaggattttttgca

SEQ ID NO: 303023 - DNA, 15 bp, Homo sapiens
cgtaggattttttgc

SEQ ID NO: 303024 - DNA, 15 bp, Homo sapiens
tcgtaggattttttg

SEQ ID NO: 303025 - DNA, 15 bp, Homo sapiens
atcgtaggatttttt

SEQ ID NO: 303026 - DNA, 15 bp, Homo sapiens
catcgtaggattttt

SEQ ID NO: 303027 - DNA, 15 bp, Homo sapiens
gcatcgtaggatttt

SEQ ID NO: 303028 - DNA, 15 bp, Homo sapiens
tgcatcgtaggattt

SEQ ID NO: 303029 - DNA, 15 bp, Homo sapiens
ttgcatcgtaggatt

SEQ ID NO: 303030 - DNA, 15 bp, Homo sapiens
gttgcatcgtaggat

SEQ ID NO: 303031 - DNA, 15 bp, Homo sapiens
tgttgcatcgtagga

SEQ ID NO: 303032 - DNA, 15 bp, Homo sapiens
ttgttgcatcgtagg

SEQ ID NO: 303033 - DNA, 15 bp, Homo sapiens
cttgttgcatcgtag

SEQ ID NO: 303034 - DNA, 15 bp, Homo sapiens
gcttgttgcatcgta

SEQ ID NO: 303035 - DNA, 15 bp, Homo sapiens
ggcttgttgcatcgt

SEQ ID NO: 303036 - DNA, 15 bp, Homo sapiens
gggcttgttgcatcg

SEQ ID NO: 303037 - DNA, 15 bp, Homo sapiens
tgggcttgttgcatc

SEQ ID NO: 303038 - DNA, 15 bp, Homo sapiens
ctgggcttgttgcat

SEQ ID NO: 303039 - DNA, 15 bp, Homo sapiens
tctgggcttgttgca

SEQ ID NO: 303040 - DNA, 15 bp, Homo sapiens
ttctgggcttgttgc

SEQ ID NO: 303041 - DNA, 15 bp, Homo sapiens
tttctgggcttgttg

SEQ ID NO: 303042 - DNA, 15 bp, Homo sapiens
ttttctgggcttgtt

SEQ ID NO: 303043 - DNA, 15 bp, Homo sapiens
attttctgggcttgt

SEQ ID NO: 303044 - DNA, 15 bp, Homo sapiens
cattttctgggcttg

SEQ ID NO: 303045 - DNA, 15 bp, Homo sapiens
acattttctgggctt

SEQ ID NO: 303046 - DNA, 15 bp, Homo sapiens
aacattttctgggct

SEQ ID NO: 303047 - DNA, 15 bp, Homo sapiens
aaacattttctgggc

SEQ ID NO: 303048 - DNA, 15 bp, Homo sapiens
caaacattttctggg

SEQ ID NO: 303049 - DNA, 15 bp, Homo sapiens
acaaacattttctgg

SEQ ID NO: 303050 - DNA, 15 bp, Homo sapiens
aacaaacattttctg

SEQ ID NO: 303051 - DNA, 15 bp, Homo sapiens
gaacaaacattttct

SEQ ID NO: 303052 - DNA, 15 bp, Homo sapiens
ggaacaaacattttc

SEQ ID NO: 303053 - DNA, 15 bp, Homo sapiens
tggaacaaacatttt

SEQ ID NO: 303054 - DNA, 15 bp, Homo sapiens
gtggaacaaacattt

SEQ ID NO: 303055 - DNA, 15 bp, Homo sapiens
tgtggaacaaacatt

SEQ ID NO: 303056 - DNA, 15 bp, Homo sapiens
atgtggaacaaacat

SEQ ID NO: 303057 - DNA, 15 bp, Homo sapiens
catgtggaacaaaca

SEQ ID NO: 303058 - DNA, 15 bp, Homo sapiens
tcatgtggaacaaac

SEQ ID NO: 303059 - DNA, 15 bp, Homo sapiens
ctcatgtggaacaaa

SEQ ID NO: 303060 - DNA, 15 bp, Homo sapiens
tctcatgtggaacaa

SEQ ID NO: 303061 - DNA, 15 bp, Homo sapiens
ttctcatgtggaaca

SEQ ID NO: 303062 - DNA, 15 bp, Homo sapiens
tttctcatgtggaac

SEQ ID NO: 303063 - DNA, 15 bp, Homo sapiens
atttctcatgtggaa

SEQ ID NO: 303064 - DNA, 15 bp, Homo sapiens
gatttctcatgtgga

SEQ ID NO: 303065 - DNA, 15 bp, Homo sapiens
tgatttctcatgtgg

SEQ ID NO: 303066 - DNA, 15 bp, Homo sapiens
ctgatttctcatgtg

SEQ ID NO: 303067 - DNA, 15 bp, Homo sapiens
tctgatttctcatgt

SEQ ID NO: 303068 - DNA, 15 bp, Homo sapiens
atctgatttctcatg

SEQ ID NO: 303069 - DNA, 15 bp, Homo sapiens
tatctgatttctcat

SEQ ID NO: 303070 - DNA, 15 bp, Homo sapiens
ctatctgatttctca

SEQ ID NO: 303071 - DNA, 15 bp, Homo sapiens
actatctgatttctc

SEQ ID NO: 303072 - DNA, 15 bp, Homo sapiens
aactatctgatttct

SEQ ID NO: 303073 - DNA, 15 bp, Homo sapiens
aaactatctgatttc

SEQ ID NO: 303074 - DNA, 15 bp, Homo sapiens
gaaactatctgattt

SEQ ID NO: 303075 - DNA, 15 bp, Homo sapiens
tgaaactatctgatt

SEQ ID NO: 303076 - DNA, 15 bp, Homo sapiens
atgaaactatctgat

SEQ ID NO: 303077 - DNA, 15 bp, Homo sapiens
tatgaaactatctga

SEQ ID NO: 303078 - DNA, 15 bp, Homo sapiens
ttatgaaactatctg

SEQ ID NO: 303079 - DNA, 15 bp, Homo sapiens
tttatgaaactatct

SEQ ID NO: 303080 - DNA, 15 bp, Homo sapiens
ctttatgaaactatc

SEQ ID NO: 303081 - DNA, 15 bp, Homo sapiens
tctttatgaaactat

SEQ ID NO: 303082 - DNA, 15 bp, Homo sapiens
ttctttatgaaacta

SEQ ID NO: 303083 - DNA, 15 bp, Homo sapiens
attctttatgaaact

SEQ ID NO: 303084 - DNA, 15 bp, Homo sapiens
cattctttatgaaac

SEQ ID NO: 303085 - DNA, 15 bp, Homo sapiens
gcattctttatgaaa

SEQ ID NO: 303086 - DNA, 15 bp, Homo sapiens
ggcattctttatgaa

SEQ ID NO: 303087 - DNA, 15 bp, Homo sapiens
aggcattctttatga

SEQ ID NO: 303088 - DNA, 15 bp, Homo sapiens
aaggcattctttatg

SEQ ID NO: 303089 - DNA, 15 bp, Homo sapiens
gaaggcattctttat

SEQ ID NO: 303090 - DNA, 15 bp, Homo sapiens
tgaaggcattcttta

SEQ ID NO: 303091 - DNA, 15 bp, Homo sapiens
ttgaaggcattcttt

SEQ ID NO: 303092 - DNA, 15 bp, Homo sapiens
gttgaaggcattctt

SEQ ID NO: 303093 - DNA, 15 bp, Homo sapiens
tgttgaaggcattct

SEQ ID NO: 303094 - DNA, 15 bp, Homo sapiens
ttgttgaaggcattc

SEQ ID NO: 303095 - DNA, 15 bp, Homo sapiens
gttgttgaaggcatt

SEQ ID NO: 303096 - DNA, 15 bp, Homo sapiens
tgttgttgaaggcat

SEQ ID NO: 303097 - DNA, 15 bp, Homo sapiens
ttgttgttgaaggca

SEQ ID NO: 303098 - DNA, 15 bp, Homo sapiens
tttgttgttgaaggc

SEQ ID NO: 303099 - DNA, 15 bp, Homo sapiens
ttttgttgttgaagg

SEQ ID NO: 303100 - DNA, 15 bp, Homo sapiens
attttgttgttgaag

SEQ ID NO: 303101 - DNA, 15 bp, Homo sapiens
cattttgttgttgaa

SEQ ID NO: 303102 - DNA, 15 bp, Homo sapiens
ccattttgttgttga

SEQ ID NO: 303103 - DNA, 15 bp, Homo sapiens
accattttgttgttg

SEQ ID NO: 303104 - DNA, 15 bp, Homo sapiens
aaccattttgttgtt

SEQ ID NO: 303105 - DNA, 15 bp, Homo sapiens
aaaccattttgttgt

SEQ ID NO: 303106 - DNA, 15 bp, Homo sapiens
gaaaccattttgttg

SEQ ID NO: 303107 - DNA, 15 bp, Homo sapiens
agaaaccattttgtt

SEQ ID NO: 303108 - DNA, 15 bp, Homo sapiens
aagaaaccattttgt

SEQ ID NO: 303109 - DNA, 15 bp, Homo sapiens
aaagaaaccattttg

SEQ ID NO: 303110 - DNA, 15 bp, Homo sapiens
aaaagaaaccatttt

SEQ ID NO: 303111 - DNA, 15 bp, Homo sapiens
taaaagaaaccattt

SEQ ID NO: 303112 - DNA, 15 bp, Homo sapiens
ttaaaagaaaccatt

SEQ ID NO: 303113 - DNA, 15 bp, Homo sapiens
gttaaaagaaaccat

SEQ ID NO: 303114 - DNA, 15 bp, Homo sapiens
tgttaaaagaaacca

SEQ ID NO: 303115 - DNA, 15 bp, Homo sapiens
ttgttaaaagaaacc

SEQ ID NO: 303116 - DNA, 15 bp, Homo sapiens
attgttaaaagaaac

SEQ ID NO: 303117 - DNA, 15 bp, Homo sapiens
aattgttaaaagaaa

SEQ ID NO: 303118 - DNA, 15 bp, Homo sapiens
caattgttaaaagaa

SEQ ID NO: 303119 - DNA, 15 bp, Homo sapiens
acaattgttaaaaga

SEQ ID NO: 303120 - DNA, 15 bp, Homo sapiens
tacaattgttaaaag

SEQ ID NO: 303121 - DNA, 15 bp, Homo sapiens
atacaattgttaaaa

SEQ ID NO: 303122 - DNA, 15 bp, Homo sapiens
tatacaattgttaaa

SEQ ID NO: 303123 - DNA, 15 bp, Homo sapiens
ttatacaattgttaa

SEQ ID NO: 303124 - DNA, 15 bp, Homo sapiens
gttatacaattgtta

SEQ ID NO: 303125 - DNA, 15 bp, Homo sapiens
ggttatacaattgtt

SEQ ID NO: 303126 - DNA, 15 bp, Homo sapiens
aggttatacaattgt

SEQ ID NO: 303127 - DNA, 15 bp, Homo sapiens
gaggttatacaattg

SEQ ID NO: 303128 - DNA, 15 bp, Homo sapiens
tgaggttatacaatt

SEQ ID NO: 303129 - DNA, 15 bp, Homo sapiens
atgaggttatacaat

SEQ ID NO: 303130 - DNA, 15 bp, Homo sapiens
gatgaggttatacaa

SEQ ID NO: 303131 - DNA, 15 bp, Homo sapiens
agatgaggttataca

SEQ ID NO: 303132 - DNA, 15 bp, Homo sapiens
tagatgaggttatac

SEQ ID NO: 303133 - DNA, 15 bp, Homo sapiens
ttagatgaggttata

SEQ ID NO: 303134 - DNA, 15 bp, Homo sapiens
tttagatgaggttat

SEQ ID NO: 303135 - DNA, 15 bp, Homo sapiens
atttagatgaggtta

SEQ ID NO: 303136 - DNA, 15 bp, Homo sapiens
catttagatgaggtt

SEQ ID NO: 303137 - DNA, 15 bp, Homo sapiens
ccatttagatgaggt

SEQ ID NO: 303138 - DNA, 15 bp, Homo sapiens
accatttagatgagg

SEQ ID NO: 303139 - DNA, 15 bp, Homo sapiens
caccatttagatgag

SEQ ID NO: 303140 - DNA, 15 bp, Homo sapiens
ccaccatttagatga

SEQ ID NO: 303141 - DNA, 15 bp, Homo sapiens
cccaccatttagatg

SEQ ID NO: 303142 - DNA, 15 bp, Homo sapiens
tcccaccatttagat

SEQ ID NO: 303143 - DNA, 15 bp, Homo sapiens
ttcccaccatttaga

SEQ ID NO: 303144 - DNA, 15 bp, Homo sapiens
attcccaccatttag

SEQ ID NO: 303145 - DNA, 15 bp, Homo sapiens
aattcccaccattta

SEQ ID NO: 303146 - DNA, 15 bp, Homo sapiens
aaattcccaccattt

SEQ ID NO: 303147 - DNA, 15 bp, Homo sapiens
taaattcccaccatt

SEQ ID NO: 303148 - DNA, 15 bp, Homo sapiens
ttaaattcccaccat

SEQ ID NO: 303149 - DNA, 15 bp, Homo sapiens
gttaaattcccacca

SEQ ID NO: 303150 - DNA, 15 bp, Homo sapiens
tgttaaattcccacc

SEQ ID NO: 303151 - DNA, 15 bp, Homo sapiens
ttgttaaattcccac

SEQ ID NO: 303152 - DNA, 15 bp, Homo sapiens
tttgttaaattccca

SEQ ID NO: 303153 - DNA, 15 bp, Homo sapiens
atttgttaaattccc

SEQ ID NO: 303154 - DNA, 15 bp, Homo sapiens
tatttgttaaattcc

SEQ ID NO: 303155 - DNA, 15 bp, Homo sapiens
gtatttgttaaattc

SEQ ID NO: 303156 - DNA, 15 bp, Homo sapiens
tgtatttgttaaatt

SEQ ID NO: 303157 - DNA, 15 bp, Homo sapiens
ctgtatttgttaaat

SEQ ID NO: 303158 - DNA, 15 bp, Homo sapiens
actgtatttgttaaa

SEQ ID NO: 303159 - DNA, 15 bp, Homo sapiens
aactgtatttgttaa

SEQ ID NO: 303160 - DNA, 15 bp, Homo sapiens
aaactgtatttgtta

SEQ ID NO: 303161 - DNA, 15 bp, Homo sapiens
taaactgtatttgtt

SEQ ID NO: 303162 - DNA, 15 bp, Homo sapiens
ttaaactgtatttgt

SEQ ID NO: 303163 - DNA, 15 bp, Homo sapiens
tttaaactgtatttg

SEQ ID NO: 303164 - DNA, 15 bp, Homo sapiens
ctttaaactgtattt

SEQ ID NO: 303165 - DNA, 15 bp, Homo sapiens
actttaaactgtatt

SEQ ID NO: 303166 - DNA, 15 bp, Homo sapiens
aactttaaactgtat

SEQ ID NO: 303167 - DNA, 15 bp, Homo sapiens
caactttaaactgta

SEQ ID NO: 303168 - DNA, 15 bp, Homo sapiens
tcaactttaaactgt

SEQ ID NO: 303169 - DNA, 15 bp, Homo sapiens
atcaactttaaactg

SEQ ID NO: 303170 - DNA, 15 bp, Homo sapiens
tatcaactttaaact

SEQ ID NO: 303171 - DNA, 15 bp, Homo sapiens
ttatcaactttaaac

SEQ ID NO: 303172 - DNA, 15 bp, Homo sapiens
tttatcaactttaaa

SEQ ID NO: 303173 - DNA, 15 bp, Homo sapiens
atttatcaactttaa

SEQ ID NO: 303174 - DNA, 15 bp, Homo sapiens
gatttatcaacttta

SEQ ID NO: 303175 - DNA, 15 bp, Homo sapiens
tgatttatcaacttt

SEQ ID NO: 303176 - DNA, 15 bp, Homo sapiens
ttgatttatcaactt

SEQ ID NO: 303177 - DNA, 15 bp, Homo sapiens
cttgatttatcaact

SEQ ID NO: 303178 - DNA, 15 bp, Homo sapiens
acttgatttatcaac

SEQ ID NO: 303179 - DNA, 15 bp, Homo sapiens
tacttgatttatcaa

SEQ ID NO: 303180 - DNA, 15 bp, Homo sapiens
ttacttgatttatca

SEQ ID NO: 303181 - DNA, 15 bp, Homo sapiens
attacttgatttatc

SEQ ID NO: 303182 - DNA, 15 bp, Homo sapiens
tattacttgatttat

SEQ ID NO: 303183 - DNA, 15 bp, Homo sapiens
ttattacttgattta

SEQ ID NO: 303184 - DNA, 15 bp, Homo sapiens
cttattacttgattt

SEQ ID NO: 303185 - DNA, 15 bp, Homo sapiens
tcttattacttgatt

SEQ ID NO: 303186 - DNA, 15 bp, Homo sapiens
ctcttattacttgat

SEQ ID NO: 303187 - DNA, 15 bp, Homo sapiens
actcttattacttga

SEQ ID NO: 303188 - DNA, 15 bp, Homo sapiens
tactcttattacttg

SEQ ID NO: 303189 - DNA, 15 bp, Homo sapiens
ttactcttattactt

SEQ ID NO: 303190 - DNA, 15 bp, Homo sapiens
attactcttattact

SEQ ID NO: 303191 - DNA, 15 bp, Homo sapiens
tattactcttattac

SEQ ID NO: 303192 - DNA, 15 bp, Homo sapiens
ttattactcttatta

SEQ ID NO: 303193 - DNA, 15 bp, Homo sapiens
attattactcttatt

SEQ ID NO: 303194 - DNA, 15 bp, Homo sapiens
cattattactcttat

SEQ ID NO: 303195 - DNA, 15 bp, Homo sapiens
tcattattactctta

SEQ ID NO: 303196 - DNA, 15 bp, Homo sapiens
ttcattattactctt

SEQ ID NO: 303197 - DNA, 15 bp, Homo sapiens
attcattattactct

SEQ ID NO: 303198 - DNA, 15 bp, Homo sapiens
aattcattattactc

SEQ ID NO: 303199 - DNA, 15 bp, Homo sapiens
aaattcattattact

SEQ ID NO: 303200 - DNA, 15 bp, Homo sapiens
caaattcattattac

SEQ ID NO: 303201 - DNA, 15 bp, Homo sapiens
acaaattcattatta

SEQ ID NO: 303202 - DNA, 15 bp, Homo sapiens
cacaaattcattatt

SEQ ID NO: 303203 - DNA, 15 bp, Homo sapiens
acacaaattcattat

SEQ ID NO: 303204 - DNA, 15 bp, Homo sapiens
tacacaaattcatta

SEQ ID NO: 303205 - DNA, 15 bp, Homo sapiens
atacacaaattcatt

SEQ ID NO: 303206 - DNA, 15 bp, Homo sapiens
aatacacaaattcat

SEQ ID NO: 303207 - DNA, 15 bp, Homo sapiens
taatacacaaattca

SEQ ID NO: 303208 - DNA, 15 bp, Homo sapiens
ttaatacacaaattc

SEQ ID NO: 303209 - DNA, 15 bp, Homo sapiens
gttaatacacaaatt

SEQ ID NO: 303210 - DNA, 15 bp, Homo sapiens
tgttaatacacaaat

SEQ ID NO: 303211 - DNA, 15 bp, Homo sapiens
ttgttaatacacaaa

SEQ ID NO: 303212 - DNA, 15 bp, Homo sapiens
tttgttaatacacaa

SEQ ID NO: 303213 - DNA, 15 bp, Homo sapiens
ttttgttaatacaca

SEQ ID NO: 303214 - DNA, 15 bp, Homo sapiens
cttttgttaatacac

SEQ ID NO: 303215 - DNA, 15 bp, Homo sapiens
tcttttgttaataca

SEQ ID NO: 303216 - DNA, 15 bp, Homo sapiens
ttcttttgttaatac

SEQ ID NO: 303217 - DNA, 15 bp, Homo sapiens
tttcttttgttaata

SEQ ID NO: 303218 - DNA, 15 bp, Homo sapiens
ttttcttttgttaat

SEQ ID NO: 303219 - DNA, 15 bp, Homo sapiens
attttcttttgttaa

SEQ ID NO: 303220 - DNA, 15 bp, Homo sapiens
aattttcttttgtta

SEQ ID NO: 303221 - DNA, 15 bp, Homo sapiens
aaattttcttttgtt

SEQ ID NO: 303222 - DNA, 15 bp, Homo sapiens
caaattttcttttgt

SEQ ID NO: 303223 - DNA, 15 bp, Homo sapiens
gcaaattttcttttg

SEQ ID NO: 303224 - DNA, 15 bp, Homo sapiens
ggcaaattttctttt

SEQ ID NO: 303225 - DNA, 15 bp, Homo sapiens
aggcaaattttcttt

SEQ ID NO: 303226 - DNA, 15 bp, Homo sapiens
aaggcaaattttctt

SEQ ID NO: 303227 - DNA, 15 bp, Homo sapiens
aaaggcaaattttct

SEQ ID NO: 303228 - DNA, 15 bp, Homo sapiens
aaaaggcaaattttc

SEQ ID NO: 303229 - DNA, 15 bp, Homo sapiens
aaaaaggcaaatttt

SEQ ID NO: 303230 - DNA, 15 bp, Homo sapiens
aaaaaaggcaaattt

SEQ ID NO: 303231 - DNA, 15 bp, Homo sapiens
gaaaaaaggcaaatt

SEQ ID NO: 303232 - DNA, 15 bp, Homo sapiens
ggaaaaaaggcaaat

SEQ ID NO: 303233 - DNA, 15 bp, Homo sapiens
aggaaaaaaggcaaa

SEQ ID NO: 303234 - DNA, 15 bp, Homo sapiens
gaggaaaaaaggcaa

SEQ ID NO: 303235 - DNA, 15 bp, Homo sapiens
cgaggaaaaaaggca

SEQ ID NO: 303236 - DNA, 15 bp, Homo sapiens
ccgaggaaaaaaggc

SEQ ID NO: 303237 - DNA, 15 bp, Homo sapiens
cccgaggaaaaaagg

SEQ ID NO: 303238 - DNA, 15 bp, Homo sapiens
gcccgaggaaaaaag

SEQ ID NO: 303239 - DNA, 15 bp, Homo sapiens
agcccgaggaaaaaa

SEQ ID NO: 303240 - DNA, 15 bp, Homo sapiens
aagcccgaggaaaaa

SEQ ID NO: 303241 - DNA, 15 bp, Homo sapiens
aaagcccgaggaaaa

SEQ ID NO: 303242 - DNA, 15 bp, Homo sapiens
aaaagcccgaggaaa

SEQ ID NO: 303243 - DNA, 15 bp, Homo sapiens
caaaagcccgaggaa

SEQ ID NO: 303244 - DNA, 15 bp, Homo sapiens
tcaaaagcccgagga

SEQ ID NO: 303245 - DNA, 15 bp, Homo sapiens
ttcaaaagcccgagg

SEQ ID NO: 303246 - DNA, 15 bp, Homo sapiens
cttcaaaagcccgag

SEQ ID NO: 303247 - DNA, 15 bp, Homo sapiens
tcttcaaaagcccga

SEQ ID NO: 303248 - DNA, 15 bp, Homo sapiens
ttcttcaaaagcccg

SEQ ID NO: 303249 - DNA, 15 bp, Homo sapiens
attcttcaaaagccc

SEQ ID NO: 303250 - DNA, 15 bp, Homo sapiens
aattcttcaaaagcc

SEQ ID NO: 303251 - DNA, 15 bp, Homo sapiens
aaattcttcaaaagc

SEQ ID NO: 303252 - DNA, 15 bp, Homo sapiens
aaaattcttcaaaag

SEQ ID NO: 303253 - DNA, 15 bp, Homo sapiens
taaaattcttcaaaa

SEQ ID NO: 303254 - DNA, 15 bp, Homo sapiens
ttaaaattcttcaaa

SEQ ID NO: 303255 - DNA, 15 bp, Homo sapiens
cttaaaattcttcaa

SEQ ID NO: 303256 - DNA, 15 bp, Homo sapiens
tcttaaaattcttca

SEQ ID NO: 303257 - DNA, 15 bp, Homo sapiens
atcttaaaattcttc

SEQ ID NO: 303258 - DNA, 15 bp, Homo sapiens
aatcttaaaattctt

SEQ ID NO: 303259 - DNA, 15 bp, Homo sapiens
gaatcttaaaattct

SEQ ID NO: 303260 - DNA, 15 bp, Homo sapiens
tgaatcttaaaattc

SEQ ID NO: 303261 - DNA, 15 bp, Homo sapiens
atgaatcttaaaatt

SEQ ID NO: 303262 - DNA, 15 bp, Homo sapiens
aatgaatcttaaaat

SEQ ID NO: 303263 - DNA, 15 bp, Homo sapiens
gaatgaatcttaaaa

SEQ ID NO: 303264 - DNA, 15 bp, Homo sapiens
agaatgaatcttaaa

SEQ ID NO: 303265 - DNA, 15 bp, Homo sapiens
tagaatgaatcttaa

SEQ ID NO: 303266 - DNA, 15 bp, Homo sapiens
ttagaatgaatctta

SEQ ID NO: 303267 - DNA, 15 bp, Homo sapiens
attagaatgaatctt

SEQ ID NO: 303268 - DNA, 15 bp, Homo sapiens
aattagaatgaatct

SEQ ID NO: 303269 - DNA, 15 bp, Homo sapiens
taattagaatgaatc

SEQ ID NO: 303270 - DNA, 15 bp, Homo sapiens
ataattagaatgaat

SEQ ID NO: 303271 - DNA, 15 bp, Homo sapiens
aataattagaatgaa

SEQ ID NO: 303272 - DNA, 15 bp, Homo sapiens
caataattagaatga

SEQ ID NO: 303273 - DNA, 15 bp, Homo sapiens
tcaataattagaatg

SEQ ID NO: 303274 - DNA, 15 bp, Homo sapiens
ctcaataattagaat

SEQ ID NO: 303275 - DNA, 15 bp, Homo sapiens
tctcaataattagaa

SEQ ID NO: 303276 - DNA, 15 bp, Homo sapiens
gtctcaataattaga

SEQ ID NO: 303277 - DNA, 15 bp, Homo sapiens
ggtctcaataattag

SEQ ID NO: 303278 - DNA, 15 bp, Homo sapiens
tggtctcaataatta

SEQ ID NO: 303279 - DNA, 15 bp, Homo sapiens
ttggtctcaataatt

SEQ ID NO: 303280 - DNA, 15 bp, Homo sapiens
attggtctcaataat

SEQ ID NO: 303281 - DNA, 15 bp, Homo sapiens
aattggtctcaataa

SEQ ID NO: 303282 - DNA, 15 bp, Homo sapiens
taattggtctcaata

SEQ ID NO: 303283 - DNA, 15 bp, Homo sapiens
ataattggtctcaat

SEQ ID NO: 303284 - DNA, 15 bp, Homo sapiens
cataattggtctcaa

SEQ ID NO: 303285 - DNA, 15 bp, Homo sapiens
acataattggtctca

SEQ ID NO: 303286 - DNA, 15 bp, Homo sapiens
cacataattggtctc

SEQ ID NO: 303287 - DNA, 15 bp, Homo sapiens
gcacataattggtct

SEQ ID NO: 303288 - DNA, 15 bp, Homo sapiens
ggcacataattggtc

SEQ ID NO: 303289 - DNA, 15 bp, Homo sapiens
tggcacataattggt

SEQ ID NO: 303290 - DNA, 15 bp, Homo sapiens
ctggcacataattgg

SEQ ID NO: 303291 - DNA, 15 bp, Homo sapiens
tctggcacataattg

SEQ ID NO: 303292 - DNA, 15 bp, Homo sapiens
gtctggcacataatt

SEQ ID NO: 303293 - DNA, 15 bp, Homo sapiens
tgtctggcacataat

SEQ ID NO: 303294 - DNA, 15 bp, Homo sapiens
gtgtctggcacataa

SEQ ID NO: 303295 - DNA, 15 bp, Homo sapiens
agtgtctggcacata

SEQ ID NO: 303296 - DNA, 15 bp, Homo sapiens
tagtgtctggcacat

SEQ ID NO: 303297 - DNA, 15 bp, Homo sapiens
ttagtgtctggcaca

SEQ ID NO: 303298 - DNA, 15 bp, Homo sapiens
tttagtgtctggcac

SEQ ID NO: 303299 - DNA, 15 bp, Homo sapiens
ttttagtgtctggca

SEQ ID NO: 303300 - DNA, 15 bp, Homo sapiens
attttagtgtctggc

SEQ ID NO: 303301 - DNA, 15 bp, Homo sapiens
tattttagtgtctgg

SEQ ID NO: 303302 - DNA, 15 bp, Homo sapiens
ttattttagtgtctg

SEQ ID NO: 303303 - DNA, 15 bp, Homo sapiens
tttattttagtgtct

SEQ ID NO: 303304 - DNA, 15 bp, Homo sapiens
atttattttagtgtc

SEQ ID NO: 303305 - DNA, 15 bp, Homo sapiens
catttattttagtgt

SEQ ID NO: 303306 - DNA, 15 bp, Homo sapiens
tcatttattttagtg

SEQ ID NO: 303307 - DNA, 15 bp, Homo sapiens
ttcatttattttagt

SEQ ID NO: 303308 - DNA, 15 bp, Homo sapiens
cttcatttattttag

SEQ ID NO: 303309 - DNA, 15 bp, Homo sapiens
acttcatttatttta

SEQ ID NO: 303310 - DNA, 15 bp, Homo sapiens
aacttcatttatttt

SEQ ID NO: 303311 - DNA, 15 bp, Homo sapiens
gaacttcatttattt

SEQ ID NO: 303312 - DNA, 15 bp, Homo sapiens
agaacttcatttatt

SEQ ID NO: 303313 - DNA, 15 bp, Homo sapiens
tagaacttcatttat

SEQ ID NO: 303314 - DNA, 15 bp, Homo sapiens
ctagaacttcattta

SEQ ID NO: 303315 - DNA, 15 bp, Homo sapiens
cctagaacttcattt

SEQ ID NO: 303316 - DNA, 15 bp, Homo sapiens
ccctagaacttcatt

SEQ ID NO: 303317 - DNA, 15 bp, Homo sapiens
accctagaacttcat

SEQ ID NO: 303318 - DNA, 15 bp, Homo sapiens
caccctagaacttca

SEQ ID NO: 303319 - DNA, 15 bp, Homo sapiens
acaccctagaacttc

SEQ ID NO: 303320 - DNA, 15 bp, Homo sapiens
aacaccctagaactt

SEQ ID NO: 303321 - DNA, 15 bp, Homo sapiens
aaacaccctagaact

SEQ ID NO: 303322 - DNA, 15 bp, Homo sapiens
aaaacaccctagaac

SEQ ID NO: 303323 - DNA, 15 bp, Homo sapiens
aaaaacaccctagaa

SEQ ID NO: 303324 - DNA, 15 bp, Homo sapiens
gaaaaacaccctaga

SEQ ID NO: 303325 - DNA, 15 bp, Homo sapiens
agaaaaacaccctag

SEQ ID NO: 303326 - DNA, 15 bp, Homo sapiens
gagaaaaacacccta

SEQ ID NO: 303327 - DNA, 15 bp, Homo sapiens
ggagaaaaacaccct

SEQ ID NO: 303328 - DNA, 15 bp, Homo sapiens
gggagaaaaacaccc

SEQ ID NO: 303329 - DNA, 15 bp, Homo sapiens
tgggagaaaaacacc

SEQ ID NO: 303330 - DNA, 15 bp, Homo sapiens
atgggagaaaaacac

SEQ ID NO: 303331 - DNA, 15 bp, Homo sapiens
gatgggagaaaaaca

SEQ ID NO: 303332 - DNA, 15 bp, Homo sapiens
ggatgggagaaaaac

SEQ ID NO: 303333 - DNA, 15 bp, Homo sapiens
aggatgggagaaaaa

SEQ ID NO: 303334 - DNA, 15 bp, Homo sapiens
aaggatgggagaaaa

SEQ ID NO: 303335 - DNA, 15 bp, Homo sapiens
caaggatgggagaaa

SEQ ID NO: 303336 - DNA, 15 bp, Homo sapiens
acaaggatgggagaa

SEQ ID NO: 303337 - DNA, 15 bp, Homo sapiens
aacaaggatgggaga

SEQ ID NO: 303338 - DNA, 15 bp, Homo sapiens
caacaaggatgggag

SEQ ID NO: 303339 - DNA, 15 bp, Homo sapiens
ccaacaaggatggga

SEQ ID NO: 303340 - DNA, 15 bp, Homo sapiens
gccaacaaggatggg

SEQ ID NO: 303341 - DNA, 15 bp, Homo sapiens
ggccaacaaggatgg

SEQ ID NO: 303342 - DNA, 15 bp, Homo sapiens
gggccaacaaggatg

SEQ ID NO: 303343 - DNA, 15 bp, Homo sapiens
tgggccaacaaggat

SEQ ID NO: 303344 - DNA, 15 bp, Homo sapiens
atgggccaacaagga

SEQ ID NO: 303345 - DNA, 15 bp, Homo sapiens
tatgggccaacaagg

SEQ ID NO: 303346 - DNA, 15 bp, Homo sapiens
ctatgggccaacaag

SEQ ID NO: 303347 - DNA, 15 bp, Homo sapiens
actatgggccaacaa

SEQ ID NO: 303348 - DNA, 15 bp, Homo sapiens
aactatgggccaaca

SEQ ID NO: 303349 - DNA, 15 bp, Homo sapiens
aaactatgggccaac

SEQ ID NO: 303350 - DNA, 15 bp, Homo sapiens
aaaactatgggccaa

SEQ ID NO: 303351 - DNA, 15 bp, Homo sapiens
caaaactatgggcca

SEQ ID NO: 303352 - DNA, 15 bp, Homo sapiens
tcaaaactatgggcc

SEQ ID NO: 303353 - DNA, 15 bp, Homo sapiens
gtcaaaactatgggc

SEQ ID NO: 303354 - DNA, 15 bp, Homo sapiens
agtcaaaactatggg

SEQ ID NO: 303355 - DNA, 15 bp, Homo sapiens
cagtcaaaactatgg

SEQ ID NO: 303356 - DNA, 15 bp, Homo sapiens
gcagtcaaaactatg

SEQ ID NO: 303357 - DNA, 15 bp, Homo sapiens
tgcagtcaaaactat

SEQ ID NO: 303358 - DNA, 15 bp, Homo sapiens
atgcagtcaaaacta

SEQ ID NO: 303359 - DNA, 15 bp, Homo sapiens
tatgcagtcaaaact

SEQ ID NO: 303360 - DNA, 15 bp, Homo sapiens
atatgcagtcaaaac

SEQ ID NO: 303361 - DNA, 15 bp, Homo sapiens
tatatgcagtcaaaa

SEQ ID NO: 303362 - DNA, 15 bp, Homo sapiens
ttatatgcagtcaaa

SEQ ID NO: 303363 - DNA, 15 bp, Homo sapiens
gttatatgcagtcaa

SEQ ID NO: 303364 - DNA, 15 bp, Homo sapiens
tgttatatgcagtca

SEQ ID NO: 303365 - DNA, 15 bp, Homo sapiens
ctgttatatgcagtc

SEQ ID NO: 303366 - DNA, 15 bp, Homo sapiens
cctgttatatgcagt

SEQ ID NO: 303367 - DNA, 15 bp, Homo sapiens
tcctgttatatgcag

SEQ ID NO: 303368 - DNA, 15 bp, Homo sapiens
ctcctgttatatgca

SEQ ID NO: 303369 - DNA, 15 bp, Homo sapiens
tctcctgttatatgc

SEQ ID NO: 303370 - DNA, 15 bp, Homo sapiens
atctcctgttatatg

SEQ ID NO: 303371 - DNA, 15 bp, Homo sapiens
catctcctgttatat

SEQ ID NO: 303372 - DNA, 15 bp, Homo sapiens
ccatctcctgttata

SEQ ID NO: 303373 - DNA, 15 bp, Homo sapiens
gccatctcctgttat

SEQ ID NO: 303374 - DNA, 15 bp, Homo sapiens
tgccatctcctgtta

SEQ ID NO: 303375 - DNA, 15 bp, Homo sapiens
atgccatctcctgtt

SEQ ID NO: 303376 - DNA, 15 bp, Homo sapiens
catgccatctcctgt

SEQ ID NO: 303377 - DNA, 15 bp, Homo sapiens
gcatgccatctcctg

SEQ ID NO: 303378 - DNA, 15 bp, Homo sapiens
tgcatgccatctcct

SEQ ID NO: 303379 - DNA, 15 bp, Homo sapiens
gtgcatgccatctcc

SEQ ID NO: 303380 - DNA, 15 bp, Homo sapiens
tgtgcatgccatctc

SEQ ID NO: 303381 - DNA, 15 bp, Homo sapiens
ctgtgcatgccatct

SEQ ID NO: 303382 - DNA, 15 bp, Homo sapiens
gctgtgcatgccatc

SEQ ID NO: 303383 - DNA, 15 bp, Homo sapiens
ggctgtgcatgccat

SEQ ID NO: 303384 - DNA, 15 bp, Homo sapiens
gggctgtgcatgcca

SEQ ID NO: 303385 - DNA, 15 bp, Homo sapiens
tgggctgtgcatgcc

SEQ ID NO: 303386 - DNA, 15 bp, Homo sapiens
gtgggctgtgcatgc

SEQ ID NO: 303387 - DNA, 15 bp, Homo sapiens
tgtgggctgtgcatg

SEQ ID NO: 303388 - DNA, 15 bp, Homo sapiens
ctgtgggctgtgcat

SEQ ID NO: 303389 - DNA, 15 bp, Homo sapiens
tctgtgggctgtgca

SEQ ID NO: 303390 - DNA, 15 bp, Homo sapiens
gtctgtgggctgtgc

SEQ ID NO: 303391 - DNA, 15 bp, Homo sapiens
ggtctgtgggctgtg

SEQ ID NO: 303392 - DNA, 15 bp, Homo sapiens
tggtctgtgggctgt

SEQ ID NO: 303393 - DNA, 15 bp, Homo sapiens
atggtctgtgggctg

SEQ ID NO: 303394 - DNA, 15 bp, Homo sapiens
tatggtctgtgggct

SEQ ID NO: 303395 - DNA, 15 bp, Homo sapiens
ttatggtctgtgggc

SEQ ID NO: 303396 - DNA, 15 bp, Homo sapiens
tttatggtctgtggg

SEQ ID NO: 303397 - DNA, 15 bp, Homo sapiens
atttatggtctgtgg

SEQ ID NO: 303398 - DNA, 15 bp, Homo sapiens
aatttatggtctgtg

SEQ ID NO: 303399 - DNA, 15 bp, Homo sapiens
aaatttatggtctgt

SEQ ID NO: 303400 - DNA, 15 bp, Homo sapiens
aaaatttatggtctg

SEQ ID NO: 303401 - DNA, 15 bp, Homo sapiens
caaaatttatggtct

SEQ ID NO: 303402 - DNA, 15 bp, Homo sapiens
acaaaatttatggtc

SEQ ID NO: 303403 - DNA, 15 bp, Homo sapiens
aacaaaatttatggt

SEQ ID NO: 303404 - DNA, 15 bp, Homo sapiens
aaacaaaatttatgg

SEQ ID NO: 303405 - DNA, 15 bp, Homo sapiens
aaaacaaaatttatg

SEQ ID NO: 303406 - DNA, 15 bp, Homo sapiens
taaaacaaaatttat

SEQ ID NO: 303407 - DNA, 15 bp, Homo sapiens
ttaaaacaaaattta

SEQ ID NO: 303408 - DNA, 15 bp, Homo sapiens
gttaaaacaaaattt

SEQ ID NO: 303409 - DNA, 15 bp, Homo sapiens
tgttaaaacaaaatt

SEQ ID NO: 303410 - DNA, 15 bp, Homo sapiens
gtgttaaaacaaaat

SEQ ID NO: 303411 - DNA, 15 bp, Homo sapiens
tgtgttaaaacaaaa

SEQ ID NO: 303412 - DNA, 15 bp, Homo sapiens
ctgtgttaaaacaaa

SEQ ID NO: 303413 - DNA, 15 bp, Homo sapiens
gctgtgttaaaacaa

SEQ ID NO: 303414 - DNA, 15 bp, Homo sapiens
ggctgtgttaaaaca

SEQ ID NO: 303415 - DNA, 15 bp, Homo sapiens
cggctgtgttaaaac

SEQ ID NO: 303416 - DNA, 15 bp, Homo sapiens
gcggctgtgttaaaa

SEQ ID NO: 303417 - DNA, 15 bp, Homo sapiens
agcggctgtgttaaa

SEQ ID NO: 303418 - DNA, 15 bp, Homo sapiens
aagcggctgtgttaa

SEQ ID NO: 303419 - DNA, 15 bp, Homo sapiens
aaagcggctgtgtta

SEQ ID NO: 303420 - DNA, 15 bp, Homo sapiens
taaagcggctgtgtt

SEQ ID NO: 303421 - DNA, 15 bp, Homo sapiens
ataaagcggctgtgt

SEQ ID NO: 303422 - DNA, 15 bp, Homo sapiens
aataaagcggctgtg

SEQ ID NO: 303423 - DNA, 15 bp, Homo sapiens
gaataaagcggctgt

SEQ ID NO: 303424 - DNA, 15 bp, Homo sapiens
tgaataaagcggctg

SEQ ID NO: 303425 - DNA, 15 bp, Homo sapiens
atgaataaagcggct

SEQ ID NO: 303426 - DNA, 15 bp, Homo sapiens
aatgaataaagcggc

SEQ ID NO: 303427 - DNA, 15 bp, Homo sapiens
aaatgaataaagcgg

SEQ ID NO: 303428 - DNA, 15 bp, Homo sapiens
taaatgaataaagcg

SEQ ID NO: 303429 - DNA, 15 bp, Homo sapiens
ataaatgaataaagc

SEQ ID NO: 303430 - DNA, 15 bp, Homo sapiens
tataaatgaataaag

SEQ ID NO: 303431 - DNA, 15 bp, Homo sapiens
atataaatgaataaa

SEQ ID NO: 303432 - DNA, 15 bp, Homo sapiens
tatataaatgaataa

SEQ ID NO: 303433 - DNA, 15 bp, Homo sapiens
atatataaatgaata

SEQ ID NO: 303434 - DNA, 15 bp, Homo sapiens
aatatataaatgaat

SEQ ID NO: 303435 - DNA, 15 bp, Homo sapiens
caatatataaatgaa

SEQ ID NO: 303436 - DNA, 15 bp, Homo sapiens
acaatatataaatga

SEQ ID NO: 303437 - DNA, 15 bp, Homo sapiens
gacaatatataaatg

SEQ ID NO: 303438 - DNA, 15 bp, Homo sapiens
agacaatatataaat

SEQ ID NO: 303439 - DNA, 15 bp, Homo sapiens
cagacaatatataaa

SEQ ID NO: 303440 - DNA, 15 bp, Homo sapiens
acagacaatatataa

SEQ ID NO: 303441 - DNA, 15 bp, Homo sapiens
cacagacaatatata

SEQ ID NO: 303442 - DNA, 15 bp, Homo sapiens
ccacagacaatatat

SEQ ID NO: 303443 - DNA, 15 bp, Homo sapiens
gccacagacaatata

SEQ ID NO: 303444 - DNA, 15 bp, Homo sapiens
agccacagacaatat

SEQ ID NO: 303445 - DNA, 15 bp, Homo sapiens
cagccacagacaata

SEQ ID NO: 303446 - DNA, 15 bp, Homo sapiens
gcagccacagacaat

SEQ ID NO: 303447 - DNA, 15 bp, Homo sapiens
agcagccacagacaa

SEQ ID NO: 303448 - DNA, 15 bp, Homo sapiens
aagcagccacagaca

SEQ ID NO: 303449 - DNA, 15 bp, Homo sapiens
aaagcagccacagac

SEQ ID NO: 303450 - DNA, 15 bp, Homo sapiens
aaaagcagccacaga

SEQ ID NO: 303451 - DNA, 15 bp, Homo sapiens
caaaagcagccacag

SEQ ID NO: 303452 - DNA, 15 bp, Homo sapiens
gcaaaagcagccaca

SEQ ID NO: 303453 - DNA, 15 bp, Homo sapiens
tgcaaaagcagccac

SEQ ID NO: 303454 - DNA, 15 bp, Homo sapiens
gtgcaaaagcagcca

SEQ ID NO: 303455 - DNA, 15 bp, Homo sapiens
agtgcaaaagcagcc

SEQ ID NO: 303456 - DNA, 15 bp, Homo sapiens
cagtgcaaaagcagc

SEQ ID NO: 303457 - DNA, 15 bp, Homo sapiens
gcagtgcaaaagcag

SEQ ID NO: 303458 - DNA, 15 bp, Homo sapiens
tgcagtgcaaaagca

SEQ ID NO: 303459 - DNA, 15 bp, Homo sapiens
ctgcagtgcaaaagc

SEQ ID NO: 303460 - DNA, 15 bp, Homo sapiens
actgcagtgcaaaag

SEQ ID NO: 303461 - DNA, 15 bp, Homo sapiens
tactgcagtgcaaaa

SEQ ID NO: 303462 - DNA, 15 bp, Homo sapiens
gtactgcagtgcaaa

SEQ ID NO: 303463 - DNA, 15 bp, Homo sapiens
tgtactgcagtgcaa

SEQ ID NO: 303464 - DNA, 15 bp, Homo sapiens
ctgtactgcagtgca

SEQ ID NO: 303465 - DNA, 15 bp, Homo sapiens
tctgtactgcagtgc

SEQ ID NO: 303466 - DNA, 15 bp, Homo sapiens
ctctgtactgcagtg

SEQ ID NO: 303467 - DNA, 15 bp, Homo sapiens
gctctgtactgcagt

SEQ ID NO: 303468 - DNA, 15 bp, Homo sapiens
agctctgtactgcag

SEQ ID NO: 303469 - DNA, 15 bp, Homo sapiens
cagctctgtactgca

SEQ ID NO: 303470 - DNA, 15 bp, Homo sapiens
tcagctctgtactgc

SEQ ID NO: 303471 - DNA, 15 bp, Homo sapiens
ctcagctctgtactg

SEQ ID NO: 303472 - DNA, 15 bp, Homo sapiens
tctcagctctgtact

SEQ ID NO: 303473 - DNA, 15 bp, Homo sapiens
ttctcagctctgtac

SEQ ID NO: 303474 - DNA, 15 bp, Homo sapiens
cttctcagctctgta

SEQ ID NO: 303475 - DNA, 15 bp, Homo sapiens
acttctcagctctgt

SEQ ID NO: 303476 - DNA, 15 bp, Homo sapiens
aacttctcagctctg

SEQ ID NO: 303477 - DNA, 15 bp, Homo sapiens
caacttctcagctct

SEQ ID NO: 303478 - DNA, 15 bp, Homo sapiens
gcaacttctcagctc

SEQ ID NO: 303479 - DNA, 15 bp, Homo sapiens
tgcaacttctcagct

SEQ ID NO: 303480 - DNA, 15 bp, Homo sapiens
ctgcaacttctcagc

SEQ ID NO: 303481 - DNA, 15 bp, Homo sapiens
gctgcaacttctcag

SEQ ID NO: 303482 - DNA, 15 bp, Homo sapiens
ggctgcaacttctca

SEQ ID NO: 303483 - DNA, 15 bp, Homo sapiens
tggctgcaacttctc

SEQ ID NO: 303484 - DNA, 15 bp, Homo sapiens
ctggctgcaacttct

SEQ ID NO: 303485 - DNA, 15 bp, Homo sapiens
tctggctgcaacttc

SEQ ID NO: 303486 - DNA, 15 bp, Homo sapiens
ttctggctgcaactt

SEQ ID NO: 303487 - DNA, 15 bp, Homo sapiens
tttctggctgcaact

SEQ ID NO: 303488 - DNA, 15 bp, Homo sapiens
ctttctggctgcaac

SEQ ID NO: 303489 - DNA, 15 bp, Homo sapiens
actttctggctgcaa

SEQ ID NO: 303490 - DNA, 15 bp, Homo sapiens
tactttctggctgca

SEQ ID NO: 303491 - DNA, 15 bp, Homo sapiens
ctactttctggctgc

SEQ ID NO: 303492 - DNA, 15 bp, Homo sapiens
tctactttctggctg

SEQ ID NO: 303493 - DNA, 15 bp, Homo sapiens
ctctactttctggct

SEQ ID NO: 303494 - DNA, 15 bp, Homo sapiens
gctctactttctggc

SEQ ID NO: 303495 - DNA, 15 bp, Homo sapiens
ggctctactttctgg

SEQ ID NO: 303496 - DNA, 15 bp, Homo sapiens
aggctctactttctg

SEQ ID NO: 303497 - DNA, 15 bp, Homo sapiens
caggctctactttct

SEQ ID NO: 303498 - DNA, 15 bp, Homo sapiens
gcaggctctactttc

SEQ ID NO: 303499 - DNA, 15 bp, Homo sapiens
tgcaggctctacttt

SEQ ID NO: 303500 - DNA, 15 bp, Homo sapiens
ttgcaggctctactt

SEQ ID NO: 303501 - DNA, 15 bp, Homo sapiens
tttgcaggctctact

SEQ ID NO: 303502 - DNA, 15 bp, Homo sapiens
gtttgcaggctctac

SEQ ID NO: 303503 - DNA, 15 bp, Homo sapiens
ggtttgcaggctcta

SEQ ID NO: 303504 - DNA, 15 bp, Homo sapiens
cggtttgcaggctct

SEQ ID NO: 303505 - DNA, 15 bp, Homo sapiens
tcggtttgcaggctc

SEQ ID NO: 303506 - DNA, 15 bp, Homo sapiens
ttcggtttgcaggct

SEQ ID NO: 303507 - DNA, 15 bp, Homo sapiens
tttcggtttgcaggc

SEQ ID NO: 303508 - DNA, 15 bp, Homo sapiens
ttttcggtttgcagg

SEQ ID NO: 303509 - DNA, 15 bp, Homo sapiens
attttcggtttgcag

SEQ ID NO: 303510 - DNA, 15 bp, Homo sapiens
tattttcggtttgca

SEQ ID NO: 303511 - DNA, 15 bp, Homo sapiens
atattttcggtttgc

SEQ ID NO: 303512 - DNA, 15 bp, Homo sapiens
aatattttcggtttg

SEQ ID NO: 303513 - DNA, 15 bp, Homo sapiens
aaatattttcggttt

SEQ ID NO: 303514 - DNA, 15 bp, Homo sapiens
taaatattttcggtt

SEQ ID NO: 303515 - DNA, 15 bp, Homo sapiens
gtaaatattttcggt

SEQ ID NO: 303516 - DNA, 15 bp, Homo sapiens
agtaaatattttcgg

SEQ ID NO: 303517 - DNA, 15 bp, Homo sapiens
tagtaaatattttcg

SEQ ID NO: 303518 - DNA, 15 bp, Homo sapiens
atagtaaatattttc

SEQ ID NO: 303519 - DNA, 15 bp, Homo sapiens
gatagtaaatatttt

SEQ ID NO: 303520 - DNA, 15 bp, Homo sapiens
agatagtaaatattt

SEQ ID NO: 303521 - DNA, 15 bp, Homo sapiens
tagatagtaaatatt

SEQ ID NO: 303522 - DNA, 15 bp, Homo sapiens
gtagatagtaaatat

SEQ ID NO: 303523 - DNA, 15 bp, Homo sapiens
agtagatagtaaata

SEQ ID NO: 303524 - DNA, 15 bp, Homo sapiens
gagtagatagtaaat

SEQ ID NO: 303525 - DNA, 15 bp, Homo sapiens
ggagtagatagtaaa

SEQ ID NO: 303526 - DNA, 15 bp, Homo sapiens
aggagtagatagtaa

SEQ ID NO: 303527 - DNA, 15 bp, Homo sapiens
aaggagtagatagta

SEQ ID NO: 303528 - DNA, 15 bp, Homo sapiens
caaggagtagatagt

SEQ ID NO: 303529 - DNA, 15 bp, Homo sapiens
tcaaggagtagatag

SEQ ID NO: 303530 - DNA, 15 bp, Homo sapiens
ctcaaggagtagata

SEQ ID NO: 303531 - DNA, 15 bp, Homo sapiens
tctcaaggagtagat

SEQ ID NO: 303532 - DNA, 15 bp, Homo sapiens
ttctcaaggagtaga

SEQ ID NO: 303533 - DNA, 15 bp, Homo sapiens
cttctcaaggagtag

SEQ ID NO: 303534 - DNA, 15 bp, Homo sapiens
tcttctcaaggagta

SEQ ID NO: 303535 - DNA, 15 bp, Homo sapiens
ttcttctcaaggagt

SEQ ID NO: 303536 - DNA, 15 bp, Homo sapiens
tttcttctcaaggag

SEQ ID NO: 303537 - DNA, 15 bp, Homo sapiens
ctttcttctcaagga

SEQ ID NO: 303538 - DNA, 15 bp, Homo sapiens
actttcttctcaagg

SEQ ID NO: 303539 - DNA, 15 bp, Homo sapiens
aactttcttctcaag

SEQ ID NO: 303540 - DNA, 15 bp, Homo sapiens
aaactttcttctcaa

SEQ ID NO: 303541 - DNA, 15 bp, Homo sapiens
caaactttcttctca

SEQ ID NO: 303542 - DNA, 15 bp, Homo sapiens
acaaactttcttctc

SEQ ID NO: 303543 - DNA, 15 bp, Homo sapiens
gacaaactttcttct

SEQ ID NO: 303544 - DNA, 15 bp, Homo sapiens
tgacaaactttcttc

SEQ ID NO: 303545 - DNA, 15 bp, Homo sapiens
ttgacaaactttctt

SEQ ID NO: 303546 - DNA, 15 bp, Homo sapiens
attgacaaactttct

SEQ ID NO: 303547 - DNA, 15 bp, Homo sapiens
tattgacaaactttc

SEQ ID NO: 303548 - DNA, 15 bp, Homo sapiens
gtattgacaaacttt

SEQ ID NO: 303549 - DNA, 15 bp, Homo sapiens
ggtattgacaaactt

SEQ ID NO: 303550 - DNA, 15 bp, Homo sapiens
gggtattgacaaact

SEQ ID NO: 303551 - DNA, 15 bp, Homo sapiens
tgggtattgacaaac

SEQ ID NO: 303552 - DNA, 15 bp, Homo sapiens
ttgggtattgacaaa

SEQ ID NO: 303553 - DNA, 15 bp, Homo sapiens
attgggtattgacaa

SEQ ID NO: 303554 - DNA, 15 bp, Homo sapiens
tattgggtattgaca

SEQ ID NO: 303555 - DNA, 15 bp, Homo sapiens
atattgggtattgac

SEQ ID NO: 303556 - DNA, 15 bp, Homo sapiens
tatattgggtattga

SEQ ID NO: 303557 - DNA, 15 bp, Homo sapiens
ttatattgggtattg

SEQ ID NO: 303558 - DNA, 15 bp, Homo sapiens
tttatattgggtatt

SEQ ID NO: 303559 - DNA, 15 bp, Homo sapiens
ctttatattgggtat

SEQ ID NO: 303560 - DNA, 15 bp, Homo sapiens
gctttatattgggta

SEQ ID NO: 303561 - DNA, 15 bp, Homo sapiens
tgctttatattgggt

SEQ ID NO: 303562 - DNA, 15 bp, Homo sapiens
atgctttatattggg

SEQ ID NO: 303563 - DNA, 15 bp, Homo sapiens
aatgctttatattgg

SEQ ID NO: 303564 - DNA, 15 bp, Homo sapiens
taatgctttatattg

SEQ ID NO: 303565 - DNA, 15 bp, Homo sapiens
ttaatgctttatatt

SEQ ID NO: 303566 - DNA, 15 bp, Homo sapiens
gttaatgctttatat

SEQ ID NO: 303567 - DNA, 15 bp, Homo sapiens
tgttaatgctttata

SEQ ID NO: 303568 - DNA, 15 bp, Homo sapiens
atgttaatgctttat

SEQ ID NO: 303569 - DNA, 15 bp, Homo sapiens
catgttaatgcttta

SEQ ID NO: 303570 - DNA, 15 bp, Homo sapiens
acatgttaatgcttt

SEQ ID NO: 303571 - DNA, 15 bp, Homo sapiens
aacatgttaatgctt

SEQ ID NO: 303572 - DNA, 15 bp, Homo sapiens
aaacatgttaatgct

SEQ ID NO: 303573 - DNA, 15 bp, Homo sapiens
gaaacatgttaatgc

SEQ ID NO: 303574 - DNA, 15 bp, Homo sapiens
ggaaacatgttaatg

SEQ ID NO: 303575 - DNA, 15 bp, Homo sapiens
gggaaacatgttaat

SEQ ID NO: 303576 - DNA, 15 bp, Homo sapiens
tgggaaacatgttaa

SEQ ID NO: 303577 - DNA, 15 bp, Homo sapiens
ttgggaaacatgtta

SEQ ID NO: 303578 - DNA, 15 bp, Homo sapiens
tttgggaaacatgtt

SEQ ID NO: 303579 - DNA, 15 bp, Homo sapiens
ctttgggaaacatgt

SEQ ID NO: 303580 - DNA, 15 bp, Homo sapiens
actttgggaaacatg

SEQ ID NO: 303581 - DNA, 15 bp, Homo sapiens
gactttgggaaacat

SEQ ID NO: 303582 - DNA, 15 bp, Homo sapiens
cgactttgggaaaca

SEQ ID NO: 303583 - DNA, 15 bp, Homo sapiens
acgactttgggaaac

SEQ ID NO: 303584 - DNA, 15 bp, Homo sapiens
tacgactttgggaaa

SEQ ID NO: 303585 - DNA, 15 bp, Homo sapiens
ttacgactttgggaa

SEQ ID NO: 303586 - DNA, 15 bp, Homo sapiens
gttacgactttggga

SEQ ID NO: 303587 - DNA, 15 bp, Homo sapiens
agttacgactttggg

SEQ ID NO: 303588 - DNA, 15 bp, Homo sapiens
tagttacgactttgg

SEQ ID NO: 303589 - DNA, 15 bp, Homo sapiens
atagttacgactttg

SEQ ID NO: 303590 - DNA, 15 bp, Homo sapiens
tatagttacgacttt

SEQ ID NO: 303591 - DNA, 15 bp, Homo sapiens
gtatagttacgactt

SEQ ID NO: 303592 - DNA, 15 bp, Homo sapiens
tgtatagttacgact

SEQ ID NO: 303593 - DNA, 15 bp, Homo sapiens
ttgtatagttacgac

SEQ ID NO: 303594 - DNA, 15 bp, Homo sapiens
tttgtatagttacga

SEQ ID NO: 303595 - DNA, 15 bp, Homo sapiens
ttttgtatagttacg

SEQ ID NO: 303596 - DNA, 15 bp, Homo sapiens
tttttgtatagttac

SEQ ID NO: 303597 - DNA, 15 bp, Homo sapiens
ctttttgtatagtta

SEQ ID NO: 303598 - DNA, 15 bp, Homo sapiens
cctttttgtatagtt

SEQ ID NO: 303599 - DNA, 15 bp, Homo sapiens
acctttttgtatagt

SEQ ID NO: 303600 - DNA, 15 bp, Homo sapiens
tacctttttgtatag

SEQ ID NO: 303601 - DNA, 15 bp, Homo sapiens
atacctttttgtata

SEQ ID NO: 303602 - DNA, 15 bp, Homo sapiens
tatacctttttgtat

SEQ ID NO: 303603 - DNA, 15 bp, Homo sapiens
ttatacctttttgta

SEQ ID NO: 303604 - DNA, 15 bp, Homo sapiens
attatacctttttgt

SEQ ID NO: 303605 - DNA, 15 bp, Homo sapiens
gattatacctttttg

SEQ ID NO: 303606 - DNA, 15 bp, Homo sapiens
agattataccttttt

SEQ ID NO: 303607 - DNA, 15 bp, Homo sapiens
cagattatacctttt

SEQ ID NO: 303608 - DNA, 15 bp, Homo sapiens
tcagattataccttt

SEQ ID NO: 303609 - DNA, 15 bp, Homo sapiens
ttcagattatacctt

SEQ ID NO: 303610 - DNA, 15 bp, Homo sapiens
tttcagattatacct

SEQ ID NO: 303611 - DNA, 15 bp, Homo sapiens
ttttcagattatacc

SEQ ID NO: 303612 - DNA, 15 bp, Homo sapiens
tttttcagattatac

SEQ ID NO: 303613 - DNA, 15 bp, Homo sapiens
atttttcagattata

SEQ ID NO: 303614 - DNA, 15 bp, Homo sapiens
catttttcagattat

SEQ ID NO: 303615 - DNA, 15 bp, Homo sapiens
acatttttcagatta

SEQ ID NO: 303616 - DNA, 15 bp, Homo sapiens
gacatttttcagatt

SEQ ID NO: 303617 - DNA, 15 bp, Homo sapiens
tgacatttttcagat

SEQ ID NO: 303618 - DNA, 15 bp, Homo sapiens
atgacatttttcaga

SEQ ID NO: 303619 - DNA, 15 bp, Homo sapiens
tatgacatttttcag

SEQ ID NO: 303620 - DNA, 15 bp, Homo sapiens
atatgacatttttca

SEQ ID NO: 303621 - DNA, 15 bp, Homo sapiens
aatatgacatttttc

SEQ ID NO: 303622 - DNA, 15 bp, Homo sapiens
gaatatgacattttt

SEQ ID NO: 303623 - DNA, 15 bp, Homo sapiens
agaatatgacatttt

SEQ ID NO: 303624 - DNA, 15 bp, Homo sapiens
aagaatatgacattt

SEQ ID NO: 303625 - DNA, 15 bp, Homo sapiens
aaagaatatgacatt

SEQ ID NO: 303626 - DNA, 15 bp, Homo sapiens
caaagaatatgacat

SEQ ID NO: 303627 - DNA, 15 bp, Homo sapiens
tcaaagaatatgaca

SEQ ID NO: 303628 - DNA, 15 bp, Homo sapiens
atcaaagaatatgac

SEQ ID NO: 303629 - DNA, 15 bp, Homo sapiens
tatcaaagaatatga

SEQ ID NO: 303630 - DNA, 15 bp, Homo sapiens
atatcaaagaatatg

SEQ ID NO: 303631 - DNA, 15 bp, Homo sapiens
aatatcaaagaatat

SEQ ID NO: 303632 - DNA, 15 bp, Homo sapiens
gaatatcaaagaata

SEQ ID NO: 303633 - DNA, 15 bp, Homo sapiens
ggaatatcaaagaat

SEQ ID NO: 303634 - DNA, 15 bp, Homo sapiens
aggaatatcaaagaa

SEQ ID NO: 303635 - DNA, 15 bp, Homo sapiens
aaggaatatcaaaga

SEQ ID NO: 303636 - DNA, 15 bp, Homo sapiens
gaaggaatatcaaag

SEQ ID NO: 303637 - DNA, 15 bp, Homo sapiens
agaaggaatatcaaa

SEQ ID NO: 303638 - DNA, 15 bp, Homo sapiens
tagaaggaatatcaa

SEQ ID NO: 303639 - DNA, 15 bp, Homo sapiens
atagaaggaatatca

SEQ ID NO: 303640 - DNA, 15 bp, Homo sapiens
gatagaaggaatatc

SEQ ID NO: 303641 - DNA, 15 bp, Homo sapiens
ggatagaaggaatat

SEQ ID NO: 303642 - DNA, 15 bp, Homo sapiens
gggatagaaggaata

SEQ ID NO: 303643 - DNA, 15 bp, Homo sapiens
tgggatagaaggaat

SEQ ID NO: 303644 - DNA, 15 bp, Homo sapiens
atgggatagaaggaa

SEQ ID NO: 303645 - DNA, 15 bp, Homo sapiens
aatgggatagaagga

SEQ ID NO: 303646 - DNA, 15 bp, Homo sapiens
aaatgggatagaagg

SEQ ID NO: 303647 - DNA, 15 bp, Homo sapiens
gaaatgggatagaag

SEQ ID NO: 303648 - DNA, 15 bp, Homo sapiens
ggaaatgggatagaa

SEQ ID NO: 303649 - DNA, 15 bp, Homo sapiens
tggaaatgggataga

SEQ ID NO: 303650 - DNA, 15 bp, Homo sapiens
ttggaaatgggatag

SEQ ID NO: 303651 - DNA, 15 bp, Homo sapiens
gttggaaatgggata

SEQ ID NO: 303652 - DNA, 15 bp, Homo sapiens
ggttggaaatgggat

SEQ ID NO: 303653 - DNA, 15 bp, Homo sapiens
gggttggaaatggga

SEQ ID NO: 303654 - DNA, 15 bp, Homo sapiens
ggggttggaaatggg

SEQ ID NO: 303655 - DNA, 15 bp, Homo sapiens
tggggttggaaatgg

SEQ ID NO: 303656 - DNA, 15 bp, Homo sapiens
gtggggttggaaatg

SEQ ID NO: 303657 - DNA, 15 bp, Homo sapiens
ggtggggttggaaat

SEQ ID NO: 303658 - DNA, 15 bp, Homo sapiens
gggtggggttggaaa

SEQ ID NO: 303659 - DNA, 15 bp, Homo sapiens
agggtggggttggaa

SEQ ID NO: 303660 - DNA, 15 bp, Homo sapiens
aagggtggggttgga

SEQ ID NO: 303661 - DNA, 15 bp, Homo sapiens
caagggtggggttgg

SEQ ID NO: 303662 - DNA, 15 bp, Homo sapiens
acaagggtggggttg

SEQ ID NO: 303663 - DNA, 15 bp, Homo sapiens
aacaagggtggggtt

SEQ ID NO: 303664 - DNA, 15 bp, Homo sapiens
aaacaagggtggggt

SEQ ID NO: 303665 - DNA, 15 bp, Homo sapiens
aaaacaagggtgggg

SEQ ID NO: 303666 - DNA, 15 bp, Homo sapiens
aaaaacaagggtggg

SEQ ID NO: 303667 - DNA, 15 bp, Homo sapiens
aaaaaacaagggtgg

SEQ ID NO: 303668 - DNA, 15 bp, Homo sapiens
caaaaaacaagggtg

SEQ ID NO: 303669 - DNA, 15 bp, Homo sapiens
ccaaaaaacaagggt

SEQ ID NO: 303670 - DNA, 15 bp, Homo sapiens
accaaaaaacaaggg

SEQ ID NO: 303671 - DNA, 15 bp, Homo sapiens
aaccaaaaaacaagg

SEQ ID NO: 303672 - DNA, 15 bp, Homo sapiens
aaaccaaaaaacaag

SEQ ID NO: 303673 - DNA, 15 bp, Homo sapiens
taaaccaaaaaacaa

SEQ ID NO: 303674 - DNA, 15 bp, Homo sapiens
ataaaccaaaaaaca

SEQ ID NO: 303675 - DNA, 15 bp, Homo sapiens
gataaaccaaaaaac

SEQ ID NO: 303676 - DNA, 15 bp, Homo sapiens
agataaaccaaaaaa

SEQ ID NO: 303677 - DNA, 15 bp, Homo sapiens
aagataaaccaaaaa

SEQ ID NO: 303678 - DNA, 15 bp, Homo sapiens
aaagataaaccaaaa

SEQ ID NO: 303679 - DNA, 15 bp, Homo sapiens
gaaagataaaccaaa

SEQ ID NO: 303680 - DNA, 15 bp, Homo sapiens
ggaaagataaaccaa

SEQ ID NO: 303681 - DNA, 15 bp, Homo sapiens
aggaaagataaacca

SEQ ID NO: 303682 - DNA, 15 bp, Homo sapiens
caggaaagataaacc

SEQ ID NO: 303683 - DNA, 15 bp, Homo sapiens
acaggaaagataaac

SEQ ID NO: 303684 - DNA, 15 bp, Homo sapiens
cacaggaaagataaa

SEQ ID NO: 303685 - DNA, 15 bp, Homo sapiens
cattttaagaacata

SEQ ID NO: 303686 - DNA, 15 bp, Homo sapiens
acattttaagaacat

SEQ ID NO: 303687 - DNA, 15 bp, Homo sapiens
aacattttaagaaca

SEQ ID NO: 303688 - DNA, 15 bp, Homo sapiens
caacattttaagaac

SEQ ID NO: 303689 - DNA, 15 bp, Homo sapiens
tcaacattttaagaa

SEQ ID NO: 303690 - DNA, 15 bp, Homo sapiens
ctcaacattttaaga

SEQ ID NO: 303691 - DNA, 15 bp, Homo sapiens
tctcaacattttaag

SEQ ID NO: 303692 - DNA, 15 bp, Homo sapiens
ttctcaacattttaa

SEQ ID NO: 303693 - DNA, 15 bp, Homo sapiens
attctcaacatttta

SEQ ID NO: 303694 - DNA, 15 bp, Homo sapiens
aattctcaacatttt

SEQ ID NO: 303695 - DNA, 15 bp, Homo sapiens
taattctcaacattt

SEQ ID NO: 303696 - DNA, 15 bp, Homo sapiens
ttaattctcaacatt

SEQ ID NO: 303697 - DNA, 15 bp, Homo sapiens
tttaattctcaacat

SEQ ID NO: 303698 - DNA, 15 bp, Homo sapiens
ttttaattctcaaca

SEQ ID NO: 303699 - DNA, 15 bp, Homo sapiens
attttaattctcaac

SEQ ID NO: 303700 - DNA, 15 bp, Homo sapiens
tattttaattctcaa

SEQ ID NO: 303701 - DNA, 15 bp, Homo sapiens
ttattttaattctca

SEQ ID NO: 303702 - DNA, 15 bp, Homo sapiens
tttattttaattctc

SEQ ID NO: 303703 - DNA, 15 bp, Homo sapiens
atttattttaattct

SEQ ID NO: 303704 - DNA, 15 bp, Homo sapiens
tatttattttaattc

SEQ ID NO: 303705 - DNA, 15 bp, Homo sapiens
ttatttattttaatt

SEQ ID NO: 303706 - DNA, 15 bp, Homo sapiens
attatttattttaat

SEQ ID NO: 303707 - DNA, 15 bp, Homo sapiens
aattatttattttaa

SEQ ID NO: 303708 - DNA, 15 bp, Homo sapiens
aaattatttatttta

SEQ ID NO: 303709 - DNA, 15 bp, Homo sapiens
gaaattatttatttt

SEQ ID NO: 303710 - DNA, 15 bp, Homo sapiens
agaaattatttattt

SEQ ID NO: 303711 - DNA, 15 bp, Homo sapiens
gagaaattatttatt

SEQ ID NO: 303712 - DNA, 15 bp, Homo sapiens
ggagaaattatttat

SEQ ID NO: 303713 - DNA, 15 bp, Homo sapiens
tggagaaattattta

SEQ ID NO: 303714 - DNA, 15 bp, Homo sapiens
ttggagaaattattt

SEQ ID NO: 303715 - DNA, 15 bp, Homo sapiens
attggagaaattatt

SEQ ID NO: 303716 - DNA, 15 bp, Homo sapiens
gattggagaaattat

SEQ ID NO: 303717 - DNA, 15 bp, Homo sapiens
tgattggagaaatta

SEQ ID NO: 303718 - DNA, 15 bp, Homo sapiens
atgattggagaaatt

SEQ ID NO: 303719 - DNA, 15 bp, Homo sapiens
tatgattggagaaat

SEQ ID NO: 303720 - DNA, 15 bp, Homo sapiens
ttatgattggagaaa

SEQ ID NO: 303721 - DNA, 15 bp, Homo sapiens
attatgattggagaa

SEQ ID NO: 303722 - DNA, 15 bp, Homo sapiens
tattatgattggaga

SEQ ID NO: 303723 - DNA, 15 bp, Homo sapiens
ctattatgattggag

SEQ ID NO: 303724 - DNA, 15 bp, Homo sapiens
gctattatgattgga

SEQ ID NO: 303725 - DNA, 15 bp, Homo sapiens
agctattatgattgg

SEQ ID NO: 303726 - DNA, 15 bp, Homo sapiens
aagctattatgattg

SEQ ID NO: 303727 - DNA, 15 bp, Homo sapiens
aaagctattatgatt

SEQ ID NO: 303728 - DNA, 15 bp, Homo sapiens
caaagctattatgat

SEQ ID NO: 303729 - DNA, 15 bp, Homo sapiens
acaaagctattatga

SEQ ID NO: 303730 - DNA, 15 bp, Homo sapiens
tacaaagctattatg

SEQ ID NO: 303731 - DNA, 15 bp, Homo sapiens
atacaaagctattat

SEQ ID NO: 303732 - DNA, 15 bp, Homo sapiens
aatacaaagctatta

SEQ ID NO: 303733 - DNA, 15 bp, Homo sapiens
aaatacaaagctatt

SEQ ID NO: 303734 - DNA, 15 bp, Homo sapiens
aaaatacaaagctat

SEQ ID NO: 303735 - DNA, 15 bp, Homo sapiens
taaaatacaaagcta

SEQ ID NO: 303736 - DNA, 15 bp, Homo sapiens
ataaaatacaaagct

SEQ ID NO: 303737 - DNA, 15 bp, Homo sapiens
aataaaatacaaagc

SEQ ID NO: 303738 - DNA, 15 bp, Homo sapiens
taataaaatacaaag

SEQ ID NO: 303739 - DNA, 15 bp, Homo sapiens
ataataaaatacaaa

SEQ ID NO: 303740 - DNA, 15 bp, Homo sapiens
tataataaaatacaa

SEQ ID NO: 303741 - DNA, 15 bp, Homo sapiens
atataataaaataca

SEQ ID NO: 303742 - DNA, 15 bp, Homo sapiens
aatataataaaatac

SEQ ID NO: 303743 - DNA, 15 bp, Homo sapiens
taatataataaaata

SEQ ID NO: 303744 - DNA, 15 bp, Homo sapiens
ataatataataaaat

SEQ ID NO: 303745 - DNA, 15 bp, Homo sapiens
tataatataataaaa

SEQ ID NO: 303746 - DNA, 15 bp, Homo sapiens
ttataatataataaa

SEQ ID NO: 303747 - DNA, 15 bp, Homo sapiens
tttataatataataa

SEQ ID NO: 303748 - DNA, 15 bp, Homo sapiens
atttataatataata

SEQ ID NO: 303749 - DNA, 15 bp, Homo sapiens
aatttataatataat

SEQ ID NO: 303750 - DNA, 15 bp, Homo sapiens
caatttataatataa

SEQ ID NO: 303751 - DNA, 15 bp, Homo sapiens
tcaatttataatata

SEQ ID NO: 303752 - DNA, 15 bp, Homo sapiens
ttcaatttataatat

SEQ ID NO: 303753 - DNA, 15 bp, Homo sapiens
tttcaatttataata

SEQ ID NO: 303754 - DNA, 15 bp, Homo sapiens
gtttcaatttataat

SEQ ID NO: 303755 - DNA, 15 bp, Homo sapiens
tgtttcaatttataa

SEQ ID NO: 303756 - DNA, 15 bp, Homo sapiens
atgtttcaatttata

SEQ ID NO: 303757 - DNA, 15 bp, Homo sapiens
aatgtttcaatttat

SEQ ID NO: 303758 - DNA, 15 bp, Homo sapiens
caatgtttcaattta

SEQ ID NO: 303759 - DNA, 15 bp, Homo sapiens
tcaatgtttcaattt

SEQ ID NO: 303760 - DNA, 15 bp, Homo sapiens
ttcaatgtttcaatt

SEQ ID NO: 303761 - DNA, 15 bp, Homo sapiens
cttcaatgtttcaat

SEQ ID NO: 303762 - DNA, 15 bp, Homo sapiens
acttcaatgtttcaa

SEQ ID NO: 303763 - DNA, 15 bp, Homo sapiens
aacttcaatgtttca

SEQ ID NO: 303764 - DNA, 15 bp, Homo sapiens
aaacttcaatgtttc

SEQ ID NO: 303765 - DNA, 15 bp, Homo sapiens
aaaacttcaatgttt

SEQ ID NO: 303766 - DNA, 15 bp, Homo sapiens
taaaacttcaatgtt

SEQ ID NO: 303767 - DNA, 15 bp, Homo sapiens
ttaaaacttcaatgt

SEQ ID NO: 303768 - DNA, 15 bp, Homo sapiens
tttaaaacttcaatg

SEQ ID NO: 303769 - DNA, 15 bp, Homo sapiens
ttttaaaacttcaat

SEQ ID NO: 303770 - DNA, 15 bp, Homo sapiens
attttaaaacttcaa

SEQ ID NO: 303771 - DNA, 15 bp, Homo sapiens
aattttaaaacttca

SEQ ID NO: 303772 - DNA, 15 bp, Homo sapiens
gaattttaaaacttc

SEQ ID NO: 303773 - DNA, 15 bp, Homo sapiens
agaattttaaaactt

SEQ ID NO: 303774 - DNA, 15 bp, Homo sapiens
aagaattttaaaact

SEQ ID NO: 303775 - DNA, 15 bp, Homo sapiens
gaagaattttaaaac

SEQ ID NO: 303776 - DNA, 15 bp, Homo sapiens
agaagaattttaaaa

SEQ ID NO: 303777 - DNA, 15 bp, Homo sapiens
aagaagaattttaaa

SEQ ID NO: 303778 - DNA, 15 bp, Homo sapiens
gaagaagaattttaa

SEQ ID NO: 303779 - DNA, 15 bp, Homo sapiens
tgaagaagaatttta

SEQ ID NO: 303780 - DNA, 15 bp, Homo sapiens
ttgaagaagaatttt

SEQ ID NO: 303781 - DNA, 15 bp, Homo sapiens
attgaagaagaattt

SEQ ID NO: 303782 - DNA, 15 bp, Homo sapiens
cattgaagaagaatt

SEQ ID NO: 303783 - DNA, 15 bp, Homo sapiens
tcattgaagaagaat

SEQ ID NO: 303784 - DNA, 15 bp, Homo sapiens
ctcattgaagaagaa

SEQ ID NO: 303785 - DNA, 15 bp, Homo sapiens
gctcattgaagaaga

SEQ ID NO: 303786 - DNA, 15 bp, Homo sapiens
ggctcattgaagaag

SEQ ID NO: 303787 - DNA, 15 bp, Homo sapiens
tggctcattgaagaa

SEQ ID NO: 303788 - DNA, 15 bp, Homo sapiens
ctggctcattgaaga

SEQ ID NO: 303789 - DNA, 15 bp, Homo sapiens
cctggctcattgaag

SEQ ID NO: 303790 - DNA, 15 bp, Homo sapiens
gcctggctcattgaa

SEQ ID NO: 303791 - DNA, 15 bp, Homo sapiens
ggcctggctcattga

SEQ ID NO: 303792 - DNA, 15 bp, Homo sapiens
aggcctggctcattg

SEQ ID NO: 303793 - DNA, 15 bp, Homo sapiens
caggcctggctcatt

SEQ ID NO: 303794 - DNA, 15 bp, Homo sapiens
ccaggcctggctcat

SEQ ID NO: 303795 - DNA, 15 bp, Homo sapiens
accaggcctggctca

SEQ ID NO: 303796 - DNA, 15 bp, Homo sapiens
caccaggcctggctc

SEQ ID NO: 303797 - DNA, 15 bp, Homo sapiens
ccaccaggcctggct

SEQ ID NO: 303798 - DNA, 15 bp, Homo sapiens
gccaccaggcctggc

SEQ ID NO: 303799 - DNA, 15 bp, Homo sapiens
agccaccaggcctgg

SEQ ID NO: 303800 - DNA, 15 bp, Homo sapiens
gagccaccaggcctg

SEQ ID NO: 303801 - DNA, 15 bp, Homo sapiens
tgagccaccaggcct

SEQ ID NO: 303802 - DNA, 15 bp, Homo sapiens
atgagccaccaggcc

SEQ ID NO: 303803 - DNA, 15 bp, Homo sapiens
catgagccaccaggc

SEQ ID NO: 303804 - DNA, 15 bp, Homo sapiens
gcatgagccaccagg

SEQ ID NO: 303805 - DNA, 15 bp, Homo sapiens
ggcatgagccaccag

SEQ ID NO: 303806 - DNA, 15 bp, Homo sapiens
aggcatgagccacca

SEQ ID NO: 303807 - DNA, 15 bp, Homo sapiens
caggcatgagccacc

SEQ ID NO: 303808 - DNA, 15 bp, Homo sapiens
acaggcatgagccac

SEQ ID NO: 303809 - DNA, 15 bp, Homo sapiens
tacaggcatgagcca

SEQ ID NO: 303810 - DNA, 15 bp, Homo sapiens
ttacaggcatgagcc

SEQ ID NO: 303811 - DNA, 15 bp, Homo sapiens
attacaggcatgagc

SEQ ID NO: 303812 - DNA, 15 bp, Homo sapiens
gattacaggcatgag

SEQ ID NO: 303813 - DNA, 15 bp, Homo sapiens
aaggattacaggcat

SEQ ID NO: 303814 - DNA, 15 bp, Homo sapiens
taaggattacaggca

SEQ ID NO: 303815 - DNA, 15 bp, Homo sapiens
gtaaggattacaggc

SEQ ID NO: 303816 - DNA, 15 bp, Homo sapiens
tgtaaggattacagg

SEQ ID NO: 303817 - DNA, 15 bp, Homo sapiens
gtgtaaggattacag

SEQ ID NO: 303818 - DNA, 15 bp, Homo sapiens
agtgtaaggattaca

SEQ ID NO: 303819 - DNA, 15 bp, Homo sapiens
aagtgtaaggattac

SEQ ID NO: 303820 - DNA, 15 bp, Homo sapiens
aaagtgtaaggatta

SEQ ID NO: 303821 - DNA, 15 bp, Homo sapiens
caaagtgtaaggatt

SEQ ID NO: 303822 - DNA, 15 bp, Homo sapiens
ccaaagtgtaaggat

SEQ ID NO: 303823 - DNA, 15 bp, Homo sapiens
cccaaagtgtaagga

SEQ ID NO: 303824 - DNA, 15 bp, Homo sapiens
tcccaaagtgtaagg

SEQ ID NO: 303825 - DNA, 15 bp, Homo sapiens
ctcccaaagtgtaag

SEQ ID NO: 303826 - DNA, 15 bp, Homo sapiens
cctcccaaagtgtaa

SEQ ID NO: 303827 - DNA, 15 bp, Homo sapiens
gcctcccaaagtgta

SEQ ID NO: 303828 - DNA, 15 bp, Homo sapiens
ctgatcctcctgcct

SEQ ID NO: 303829 - DNA, 15 bp, Homo sapiens
actgatcctcctgcc

SEQ ID NO: 303830 - DNA, 15 bp, Homo sapiens
aactgatcctcctgc

SEQ ID NO: 303831 - DNA, 15 bp, Homo sapiens
caactgatcctcctg

SEQ ID NO: 303832 - DNA, 15 bp, Homo sapiens
tcaactgatcctcct

SEQ ID NO: 303833 - DNA, 15 bp, Homo sapiens
ctcaactgatcctcc

SEQ ID NO: 303834 - DNA, 15 bp, Homo sapiens
cctcaactgatcctc

SEQ ID NO: 303835 - DNA, 15 bp, Homo sapiens
gcctcaactgatcct

SEQ ID NO: 303836 - DNA, 15 bp, Homo sapiens
ggcctcaactgatcc

SEQ ID NO: 303837 - DNA, 15 bp, Homo sapiens
tggcctcaactgatc

SEQ ID NO: 303838 - DNA, 15 bp, Homo sapiens
ctggcctcaactgat

SEQ ID NO: 303839 - DNA, 15 bp, Homo sapiens
actggcctcaactga

SEQ ID NO: 303840 - DNA, 15 bp, Homo sapiens
tactggcctcaactg

SEQ ID NO: 303841 - DNA, 15 bp, Homo sapiens
ctactggcctcaact

SEQ ID NO: 303842 - DNA, 15 bp, Homo sapiens
actactggcctcaac

SEQ ID NO: 303843 - DNA, 15 bp, Homo sapiens
aactactggcctcaa

SEQ ID NO: 303844 - DNA, 15 bp, Homo sapiens
aaactactggcctca

SEQ ID NO: 303845 - DNA, 15 bp, Homo sapiens
caaactactggcctc

SEQ ID NO: 303846 - DNA, 15 bp, Homo sapiens
tcaaactactggcct

SEQ ID NO: 303847 - DNA, 15 bp, Homo sapiens
ctcaaactactggcc

SEQ ID NO: 303848 - DNA, 15 bp, Homo sapiens
tctcaaactactggc

SEQ ID NO: 303849 - DNA, 15 bp, Homo sapiens
ttctcaaactactgg

SEQ ID NO: 303850 - DNA, 15 bp, Homo sapiens
gttctcaaactactg

SEQ ID NO: 303851 - DNA, 15 bp, Homo sapiens
cgttctcaaactact

SEQ ID NO: 303852 - DNA, 15 bp, Homo sapiens
ccgttctcaaactac

SEQ ID NO: 303853 - DNA, 15 bp, Homo sapiens
gccgttctcaaacta

SEQ ID NO: 303854 - DNA, 15 bp, Homo sapiens
ggccgttctcaaact

SEQ ID NO: 303855 - DNA, 15 bp, Homo sapiens
aggccgttctcaaac

SEQ ID NO: 303856 - DNA, 15 bp, Homo sapiens
caggccgttctcaaa

SEQ ID NO: 303857 - DNA, 15 bp, Homo sapiens
ccaggccgttctcaa

SEQ ID NO: 303858 - DNA, 15 bp, Homo sapiens
tccaggccgttctca

SEQ ID NO: 303859 - DNA, 15 bp, Homo sapiens
gtccaggccgttctc

SEQ ID NO: 303860 - DNA, 15 bp, Homo sapiens
tgtccaggccgttct

SEQ ID NO: 303861 - DNA, 15 bp, Homo sapiens
ttgtccaggccgttc

SEQ ID NO: 303862 - DNA, 15 bp, Homo sapiens
gttgtccaggccgtt

SEQ ID NO: 303863 - DNA, 15 bp, Homo sapiens
tgttgtccaggccgt

SEQ ID NO: 303864 - DNA, 15 bp, Homo sapiens
atgttgtccaggccg

SEQ ID NO: 303865 - DNA, 15 bp, Homo sapiens
tatgttgtccaggcc

SEQ ID NO: 303866 - DNA, 15 bp, Homo sapiens
ctatgttgtccaggc

SEQ ID NO: 303867 - DNA, 15 bp, Homo sapiens
actatgttgtccagg

SEQ ID NO: 303868 - DNA, 15 bp, Homo sapiens
cactatgttgtccag

SEQ ID NO: 303869 - DNA, 15 bp, Homo sapiens
tcactatgttgtcca

SEQ ID NO: 303870 - DNA, 15 bp, Homo sapiens
ctcactatgttgtcc

SEQ ID NO: 303871 - DNA, 15 bp, Homo sapiens
tctcactatgttgtc

SEQ ID NO: 303872 - DNA, 15 bp, Homo sapiens
ttctcactatgttgt

SEQ ID NO: 303873 - DNA, 15 bp, Homo sapiens
attctcactatgttg

SEQ ID NO: 303874 - DNA, 15 bp, Homo sapiens
gattctcactatgtt

SEQ ID NO: 303875 - DNA, 15 bp, Homo sapiens
agattctcactatgt

SEQ ID NO: 303876 - DNA, 15 bp, Homo sapiens
gagattctcactatg

SEQ ID NO: 303877 - DNA, 15 bp, Homo sapiens
agagattctcactat

SEQ ID NO: 303878 - DNA, 15 bp, Homo sapiens
gagagattctcacta

SEQ ID NO: 303879 - DNA, 15 bp, Homo sapiens
agagagattctcact

SEQ ID NO: 303880 - DNA, 15 bp, Homo sapiens
gagagagattctcac

SEQ ID NO: 303881 - DNA, 15 bp, Homo sapiens
ggagagagattctca

SEQ ID NO: 303882 - DNA, 15 bp, Homo sapiens
tggagagagattctc

SEQ ID NO: 303883 - DNA, 15 bp, Homo sapiens
atggagagagattct

SEQ ID NO: 303884 - DNA, 15 bp, Homo sapiens
aatggagagagattc

SEQ ID NO: 303885 - DNA, 15 bp, Homo sapiens
aaatggagagagatt

SEQ ID NO: 303886 - DNA, 15 bp, Homo sapiens
taaatggagagagat

SEQ ID NO: 303887 - DNA, 15 bp, Homo sapiens
ttaaatggagagaga

SEQ ID NO: 303888 - DNA, 15 bp, Homo sapiens
attaaatggagagag

SEQ ID NO: 303889 - DNA, 15 bp, Homo sapiens
tattaaatggagaga

SEQ ID NO: 303890 - DNA, 15 bp, Homo sapiens
ttattaaatggagag

SEQ ID NO: 303891 - DNA, 15 bp, Homo sapiens
tttattaaatggaga

SEQ ID NO: 303892 - DNA, 15 bp, Homo sapiens
atttattaaatggag

SEQ ID NO: 303893 - DNA, 15 bp, Homo sapiens
tatttattaaatgga

SEQ ID NO: 303894 - DNA, 15 bp, Homo sapiens
ttatttattaaatgg

SEQ ID NO: 303895 - DNA, 15 bp, Homo sapiens
tttatttattaaatg

SEQ ID NO: 303896 - DNA, 15 bp, Homo sapiens
atttatttattaaat

SEQ ID NO: 303897 - DNA, 15 bp, Homo sapiens
tatttatttattaaa

SEQ ID NO: 303898 - DNA, 15 bp, Homo sapiens
ttatttatttattaa

SEQ ID NO: 303899 - DNA, 15 bp, Homo sapiens
tttatttatttatta

SEQ ID NO: 303900 - DNA, 15 bp, Homo sapiens
atttatttatttatt

SEQ ID NO: 303901 - DNA, 15 bp, Homo sapiens
tatttatttatttat

SEQ ID NO: 303902 - DNA, 15 bp, Homo sapiens
ttatttatttattta

SEQ ID NO: 303903 - DNA, 15 bp, Homo sapiens
tttatttatttattt

SEQ ID NO: 303904 - DNA, 15 bp, Homo sapiens
ttttatttatttatt

SEQ ID NO: 303905 - DNA, 15 bp, Homo sapiens
attttatttatttat

SEQ ID NO: 303906 - DNA, 15 bp, Homo sapiens
aattttatttattta

SEQ ID NO: 303907 - DNA, 15 bp, Homo sapiens
taattttatttattt

SEQ ID NO: 303908 - DNA, 15 bp, Homo sapiens
ataattttatttatt

SEQ ID NO: 303909 - DNA, 15 bp, Homo sapiens
aataattttatttat

SEQ ID NO: 303910 - DNA, 15 bp, Homo sapiens
gaataattttattta

SEQ ID NO: 303911 - DNA, 15 bp, Homo sapiens
agaataattttattt

SEQ ID NO: 303912 - DNA, 15 bp, Homo sapiens
aagaataattttatt

SEQ ID NO: 303913 - DNA, 15 bp, Homo sapiens
gaagaataattttat

SEQ ID NO: 303914 - DNA, 15 bp, Homo sapiens
tgaagaataatttta

SEQ ID NO: 303915 - DNA, 15 bp, Homo sapiens
ctgaagaataatttt

SEQ ID NO: 303916 - DNA, 15 bp, Homo sapiens
actgaagaataattt

SEQ ID NO: 303917 - DNA, 15 bp, Homo sapiens
cactgaagaataatt

SEQ ID NO: 303918 - DNA, 15 bp, Homo sapiens
tcactgaagaataat

SEQ ID NO: 303919 - DNA, 15 bp, Homo sapiens
ttcactgaagaataa

SEQ ID NO: 303920 - DNA, 15 bp, Homo sapiens
attcactgaagaata

SEQ ID NO: 303921 - DNA, 15 bp, Homo sapiens
gattcactgaagaat

SEQ ID NO: 303922 - DNA, 15 bp, Homo sapiens
agattcactgaagaa

SEQ ID NO: 303923 - DNA, 15 bp, Homo sapiens
cagattcactgaaga

SEQ ID NO: 303924 - DNA, 15 bp, Homo sapiens
acagattcactgaag

SEQ ID NO: 303925 - DNA, 15 bp, Homo sapiens
aacagattcactgaa

SEQ ID NO: 303926 - DNA, 15 bp, Homo sapiens
aaacagattcactga

SEQ ID NO: 303927 - DNA, 15 bp, Homo sapiens
aaaacagattcactg

SEQ ID NO: 303928 - DNA, 15 bp, Homo sapiens
aaaaacagattcact

SEQ ID NO: 303929 - DNA, 15 bp, Homo sapiens
caaaaacagattcac

SEQ ID NO: 303930 - DNA, 15 bp, Homo sapiens
ccaaaaacagattca

SEQ ID NO: 303931 - DNA, 15 bp, Homo sapiens
tccaaaaacagattc

SEQ ID NO: 303932 - DNA, 15 bp, Homo sapiens
atccaaaaacagatt

SEQ ID NO: 303933 - DNA, 15 bp, Homo sapiens
aatccaaaaacagat

SEQ ID NO: 303934 - DNA, 15 bp, Homo sapiens
gaatccaaaaacaga

SEQ ID NO: 303935 - DNA, 15 bp, Homo sapiens
tgaatccaaaaacag

SEQ ID NO: 303936 - DNA, 15 bp, Homo sapiens
ctgaatccaaaaaca

SEQ ID NO: 303937 - DNA, 15 bp, Homo sapiens
actgaatccaaaaac

SEQ ID NO: 303938 - DNA, 15 bp, Homo sapiens
gactgaatccaaaaa

SEQ ID NO: 303939 - DNA, 15 bp, Homo sapiens
agactgaatccaaaa

SEQ ID NO: 303940 - DNA, 15 bp, Homo sapiens
aagactgaatccaaa

SEQ ID NO: 303941 - DNA, 15 bp, Homo sapiens
caagactgaatccaa

SEQ ID NO: 303942 - DNA, 15 bp, Homo sapiens
tcaagactgaatcca

SEQ ID NO: 303943 - DNA, 15 bp, Homo sapiens
atcaagactgaatcc

SEQ ID NO: 303944 - DNA, 15 bp, Homo sapiens
tatcaagactgaatc

SEQ ID NO: 303945 - DNA, 15 bp, Homo sapiens
ttatcaagactgaat

SEQ ID NO: 303946 - DNA, 15 bp, Homo sapiens
attatcaagactgaa

SEQ ID NO: 303947 - DNA, 15 bp, Homo sapiens
tattatcaagactga

SEQ ID NO: 303948 - DNA, 15 bp, Homo sapiens
ttattatcaagactg

SEQ ID NO: 303949 - DNA, 15 bp, Homo sapiens
tttattatcaagact

SEQ ID NO: 303950 - DNA, 15 bp, Homo sapiens
ttttattatcaagac

SEQ ID NO: 303951 - DNA, 15 bp, Homo sapiens
tttttattatcaaga

SEQ ID NO: 303952 - DNA, 15 bp, Homo sapiens
gtttttattatcaag

SEQ ID NO: 303953 - DNA, 15 bp, Homo sapiens
cgtttttattatcaa

SEQ ID NO: 303954 - DNA, 15 bp, Homo sapiens
ccgtttttattatca

SEQ ID NO: 303955 - DNA, 15 bp, Homo sapiens
tccgtttttattatc

SEQ ID NO: 303956 - DNA, 15 bp, Homo sapiens
ctccgtttttattat

SEQ ID NO: 303957 - DNA, 15 bp, Homo sapiens
tctccgtttttatta

SEQ ID NO: 303958 - DNA, 15 bp, Homo sapiens
ttctccgtttttatt

SEQ ID NO: 303959 - DNA, 15 bp, Homo sapiens
tttctccgtttttat

SEQ ID NO: 303960 - DNA, 15 bp, Homo sapiens
ttttctccgttttta

SEQ ID NO: 303961 - DNA, 15 bp, Homo sapiens
tttttctccgttttt

SEQ ID NO: 303962 - DNA, 15 bp, Homo sapiens
ttttttctccgtttt

SEQ ID NO: 303963 - DNA, 15 bp, Homo sapiens
tttttttctccgttt

SEQ ID NO: 303964 - DNA, 15 bp, Homo sapiens
ttttttttctccgtt

SEQ ID NO: 303965 - DNA, 15 bp, Homo sapiens
attttttttctccgt

SEQ ID NO: 303966 - DNA, 15 bp, Homo sapiens
aattttttttctccg

SEQ ID NO: 303967 - DNA, 15 bp, Homo sapiens
aaattttttttctcc

SEQ ID NO: 303968 - DNA, 15 bp, Homo sapiens
aaaattttttttctc

SEQ ID NO: 303969 - DNA, 15 bp, Homo sapiens
taaaattttttttct

SEQ ID NO: 303970 - DNA, 15 bp, Homo sapiens
ttaaaattttttttc

SEQ ID NO: 303971 - DNA, 15 bp, Homo sapiens
gttaaaatttttttt

SEQ ID NO: 303972 - DNA, 15 bp, Homo sapiens
tgttaaaattttttt

SEQ ID NO: 303973 - DNA, 15 bp, Homo sapiens
ctgttaaaatttttt

SEQ ID NO: 303974 - DNA, 15 bp, Homo sapiens
tctgttaaaattttt

SEQ ID NO: 303975 - DNA, 15 bp, Homo sapiens
atctgttaaaatttt

SEQ ID NO: 303976 - DNA, 15 bp, Homo sapiens
tatctgttaaaattt

SEQ ID NO: 303977 - DNA, 15 bp, Homo sapiens
ctatctgttaaaatt

SEQ ID NO: 303978 - DNA, 15 bp, Homo sapiens
tctatctgttaaaat

SEQ ID NO: 303979 - DNA, 15 bp, Homo sapiens
atctatctgttaaaa

SEQ ID NO: 303980 - DNA, 15 bp, Homo sapiens
aatctatctgttaaa

SEQ ID NO: 303981 - DNA, 15 bp, Homo sapiens
taatctatctgttaa

SEQ ID NO: 303982 - DNA, 15 bp, Homo sapiens
ataatctatctgtta

SEQ ID NO: 303983 - DNA, 15 bp, Homo sapiens
aataatctatctgtt

SEQ ID NO: 303984 - DNA, 15 bp, Homo sapiens
aaataatctatctgt

SEQ ID NO: 303985 - DNA, 15 bp, Homo sapiens
gaaataatctatctg

SEQ ID NO: 303986 - DNA, 15 bp, Homo sapiens
tgaaataatctatct

SEQ ID NO: 303987 - DNA, 15 bp, Homo sapiens
ttgaaataatctatc

SEQ ID NO: 303988 - DNA, 15 bp, Homo sapiens
attgaaataatctat

SEQ ID NO: 303989 - DNA, 15 bp, Homo sapiens
tattgaaataatcta

SEQ ID NO: 303990 - DNA, 15 bp, Homo sapiens
atattgaaataatct

SEQ ID NO: 303991 - DNA, 15 bp, Homo sapiens
aatattgaaataatc

SEQ ID NO: 303992 - DNA, 15 bp, Homo sapiens
caatattgaaataat

SEQ ID NO: 303993 - DNA, 15 bp, Homo sapiens
gcaatattgaaataa

SEQ ID NO: 303994 - DNA, 15 bp, Homo sapiens
agcaatattgaaata

SEQ ID NO: 303995 - DNA, 15 bp, Homo sapiens
gagcaatattgaaat

SEQ ID NO: 303996 - DNA, 15 bp, Homo sapiens
agagcaatattgaaa

SEQ ID NO: 303997 - DNA, 15 bp, Homo sapiens
cagagcaatattgaa

SEQ ID NO: 303998 - DNA, 15 bp, Homo sapiens
acagagcaatattga

SEQ ID NO: 303999 - DNA, 15 bp, Homo sapiens
gacagagcaatattg

SEQ ID NO: 304000 - DNA, 15 bp, Homo sapiens
tgacagagcaatatt

SEQ ID NO: 304001 - DNA, 15 bp, Homo sapiens
ctgacagagcaatat

SEQ ID NO: 304002 - DNA, 15 bp, Homo sapiens
gctgacagagcaata

SEQ ID NO: 304003 - DNA, 15 bp, Homo sapiens
tgctgacagagcaat

SEQ ID NO: 304004 - DNA, 15 bp, Homo sapiens
ttgctgacagagcaa

SEQ ID NO: 304005 - DNA, 15 bp, Homo sapiens
attgctgacagagca

SEQ ID NO: 304006 - DNA, 15 bp, Homo sapiens
tattgctgacagagc

SEQ ID NO: 304007 - DNA, 15 bp, Homo sapiens
atattgctgacagag

SEQ ID NO: 304008 - DNA, 15 bp, Homo sapiens
gatattgctgacaga

SEQ ID NO: 304009 - DNA, 15 bp, Homo sapiens
agatattgctgacag

SEQ ID NO: 304010 - DNA, 15 bp, Homo sapiens
cagatattgctgaca

SEQ ID NO: 304011 - DNA, 15 bp, Homo sapiens
ccagatattgctgac

SEQ ID NO: 304012 - DNA, 15 bp, Homo sapiens
tccagatattgctga

SEQ ID NO: 304013 - DNA, 15 bp, Homo sapiens
ttccagatattgctg

SEQ ID NO: 304014 - DNA, 15 bp, Homo sapiens
tttccagatattgct

SEQ ID NO: 304015 - DNA, 15 bp, Homo sapiens
atttccagatattgc

SEQ ID NO: 304016 - DNA, 15 bp, Homo sapiens
tatttccagatattg

SEQ ID NO: 304017 - DNA, 15 bp, Homo sapiens
ctatttccagatatt

SEQ ID NO: 304018 - DNA, 15 bp, Homo sapiens
gctatttccagatat

SEQ ID NO: 304019 - DNA, 15 bp, Homo sapiens
tgctatttccagata

SEQ ID NO: 304020 - DNA, 15 bp, Homo sapiens
atgctatttccagat

SEQ ID NO: 304021 - DNA, 15 bp, Homo sapiens
aatgctatttccaga

SEQ ID NO: 304022 - DNA, 15 bp, Homo sapiens
taatgctatttccag

SEQ ID NO: 304023 - DNA, 15 bp, Homo sapiens
ctaatgctatttcca

SEQ ID NO: 304024 - DNA, 15 bp, Homo sapiens
actaatgctatttcc

SEQ ID NO: 304025 - DNA, 15 bp, Homo sapiens
gactaatgctatttc

SEQ ID NO: 304026 - DNA, 15 bp, Homo sapiens
tgactaatgctattt

SEQ ID NO: 304027 - DNA, 15 bp, Homo sapiens
atgactaatgctatt

SEQ ID NO: 304028 - DNA, 15 bp, Homo sapiens
aatgactaatgctat

SEQ ID NO: 304029 - DNA, 15 bp, Homo sapiens
aaatgactaatgcta

SEQ ID NO: 304030 - DNA, 15 bp, Homo sapiens
aaaatgactaatgct

SEQ ID NO: 304031 - DNA, 15 bp, Homo sapiens
aaaaatgactaatgc

SEQ ID NO: 304032 - DNA, 15 bp, Homo sapiens
gaaaaatgactaatg

SEQ ID NO: 304033 - DNA, 15 bp, Homo sapiens
agaaaaatgactaat

SEQ ID NO: 304034 - DNA, 15 bp, Homo sapiens
aagaaaaatgactaa

SEQ ID NO: 304035 - DNA, 15 bp, Homo sapiens
gaagaaaaatgacta

SEQ ID NO: 304036 - DNA, 15 bp, Homo sapiens
tgaagaaaaatgact

SEQ ID NO: 304037 - DNA, 15 bp, Homo sapiens
ctgaagaaaaatgac

SEQ ID NO: 304038 - DNA, 15 bp, Homo sapiens
cctgaagaaaaatga

SEQ ID NO: 304039 - DNA, 15 bp, Homo sapiens
acctgaagaaaaatg

SEQ ID NO: 304040 - DNA, 15 bp, Homo sapiens
cacctgaagaaaaat

SEQ ID NO: 304041 - DNA, 15 bp, Homo sapiens
gcacctgaagaaaaa

SEQ ID NO: 304042 - DNA, 15 bp, Homo sapiens
agcacctgaagaaaa

SEQ ID NO: 304043 - DNA, 15 bp, Homo sapiens
aagcacctgaagaaa

SEQ ID NO: 304044 - DNA, 15 bp, Homo sapiens
aaagcacctgaagaa

SEQ ID NO: 304045 - DNA, 15 bp, Homo sapiens
aaaagcacctgaaga

SEQ ID NO: 304046 - DNA, 15 bp, Homo sapiens
taaaagcacctgaag

SEQ ID NO: 304047 - DNA, 15 bp, Homo sapiens
ataaaagcacctgaa

SEQ ID NO: 304048 - DNA, 15 bp, Homo sapiens
gataaaagcacctga

SEQ ID NO: 304049 - DNA, 15 bp, Homo sapiens
ggataaaagcacctg

SEQ ID NO: 304050 - DNA, 15 bp, Homo sapiens
tggataaaagcacct

SEQ ID NO: 304051 - DNA, 15 bp, Homo sapiens
ttggataaaagcacc

SEQ ID NO: 304052 - DNA, 15 bp, Homo sapiens
gttggataaaagcac

SEQ ID NO: 304053 - DNA, 15 bp, Homo sapiens
tgttggataaaagca

SEQ ID NO: 304054 - DNA, 15 bp, Homo sapiens
ttgttggataaaagc

SEQ ID NO: 304055 - DNA, 15 bp, Homo sapiens
cttgttggataaaag

SEQ ID NO: 304056 - DNA, 15 bp, Homo sapiens
gcttgttggataaaa

SEQ ID NO: 304057 - DNA, 15 bp, Homo sapiens
ggcttgttggataaa

SEQ ID NO: 304058 - DNA, 15 bp, Homo sapiens
aggcttgttggataa

SEQ ID NO: 304059 - DNA, 15 bp, Homo sapiens
taggcttgttggata

SEQ ID NO: 304060 - DNA, 15 bp, Homo sapiens
ttaggcttgttggat

SEQ ID NO: 304061 - DNA, 15 bp, Homo sapiens
cttaggcttgttgga

SEQ ID NO: 304062 - DNA, 15 bp, Homo sapiens
tcttaggcttgttgg

SEQ ID NO: 304063 - DNA, 15 bp, Homo sapiens
gtcttaggcttgttg

SEQ ID NO: 304064 - DNA, 15 bp, Homo sapiens
agtcttaggcttgtt

SEQ ID NO: 304065 - DNA, 15 bp, Homo sapiens
gagtcttaggcttgt

SEQ ID NO: 304066 - DNA, 15 bp, Homo sapiens
ggagtcttaggcttg

SEQ ID NO: 304067 - DNA, 15 bp, Homo sapiens
aggagtcttaggctt

SEQ ID NO: 304068 - DNA, 15 bp, Homo sapiens
taggagtcttaggct

SEQ ID NO: 304069 - DNA, 15 bp, Homo sapiens
ttaggagtcttaggc

SEQ ID NO: 304070 - DNA, 15 bp, Homo sapiens
cttaggagtcttagg

SEQ ID NO: 304071 - DNA, 15 bp, Homo sapiens
tcttaggagtcttag

SEQ ID NO: 304072 - DNA, 15 bp, Homo sapiens
atcttaggagtctta

SEQ ID NO: 304073 - DNA, 15 bp, Homo sapiens
aatcttaggagtctt

SEQ ID NO: 304074 - DNA, 15 bp, Homo sapiens
gaatcttaggagtct

SEQ ID NO: 304075 - DNA, 15 bp, Homo sapiens
ggaatcttaggagtc

SEQ ID NO: 304076 - DNA, 15 bp, Homo sapiens
gggaatcttaggagt

SEQ ID NO: 304077 - DNA, 15 bp, Homo sapiens
agggaatcttaggag

SEQ ID NO: 304078 - DNA, 15 bp, Homo sapiens
aagggaatcttagga

SEQ ID NO: 304079 - DNA, 15 bp, Homo sapiens
gaagggaatcttagg

SEQ ID NO: 304080 - DNA, 15 bp, Homo sapiens
ggaagggaatcttag

SEQ ID NO: 304081 - DNA, 15 bp, Homo sapiens
gggaagggaatctta

SEQ ID NO: 304082 - DNA, 15 bp, Homo sapiens
ggggaagggaatctt

SEQ ID NO: 304083 - DNA, 15 bp, Homo sapiens
tggggaagggaatct

SEQ ID NO: 304084 - DNA, 15 bp, Homo sapiens
atggggaagggaatc

SEQ ID NO: 304085 - DNA, 15 bp, Homo sapiens
aatggggaagggaat

SEQ ID NO: 304086 - DNA, 15 bp, Homo sapiens
taatggggaagggaa

SEQ ID NO: 304087 - DNA, 15 bp, Homo sapiens
ctaatggggaaggga

SEQ ID NO: 304088 - DNA, 15 bp, Homo sapiens
cctaatggggaaggg

SEQ ID NO: 304089 - DNA, 15 bp, Homo sapiens
tcctaatggggaagg

SEQ ID NO: 304090 - DNA, 15 bp, Homo sapiens
ttcctaatggggaag

SEQ ID NO: 304091 - DNA, 15 bp, Homo sapiens
cttcctaatggggaa

SEQ ID NO: 304092 - DNA, 15 bp, Homo sapiens
gcttcctaatgggga

SEQ ID NO: 304093 - DNA, 15 bp, Homo sapiens
agcttcctaatgggg

SEQ ID NO: 304094 - DNA, 15 bp, Homo sapiens
gagcttcctaatggg

SEQ ID NO: 304095 - DNA, 15 bp, Homo sapiens
ggagcttcctaatgg

SEQ ID NO: 304096 - DNA, 15 bp, Homo sapiens
tggagcttcctaatg

SEQ ID NO: 304097 - DNA, 15 bp, Homo sapiens
ctggagcttcctaat

SEQ ID NO: 304098 - DNA, 15 bp, Homo sapiens
cctggagcttcctaa

SEQ ID NO: 304099 - DNA, 15 bp, Homo sapiens
gcctggagcttccta

SEQ ID NO: 304100 - DNA, 15 bp, Homo sapiens
tgcctggagcttcct

SEQ ID NO: 304101 - DNA, 15 bp, Homo sapiens
ttgcctggagcttcc

SEQ ID NO: 304102 - DNA, 15 bp, Homo sapiens
cttgcctggagcttc

SEQ ID NO: 304103 - DNA, 15 bp, Homo sapiens
gcttgcctggagctt

SEQ ID NO: 304104 - DNA, 15 bp, Homo sapiens
tgcttgcctggagct

SEQ ID NO: 304105 - DNA, 15 bp, Homo sapiens
ttgcttgcctggagc

SEQ ID NO: 304106 - DNA, 15 bp, Homo sapiens
cttgcttgcctggag

SEQ ID NO: 304107 - DNA, 15 bp, Homo sapiens
acttgcttgcctgga

SEQ ID NO: 304108 - DNA, 15 bp, Homo sapiens
cacttgcttgcctgg

SEQ ID NO: 304109 - DNA, 15 bp, Homo sapiens
tcacttgcttgcctg

SEQ ID NO: 304110 - DNA, 15 bp, Homo sapiens
ttcacttgcttgcct

SEQ ID NO: 304111 - DNA, 15 bp, Homo sapiens
tttcacttgcttgcc

SEQ ID NO: 304112 - DNA, 15 bp, Homo sapiens
gtttcacttgcttgc

SEQ ID NO: 304113 - DNA, 15 bp, Homo sapiens
ggtttcacttgcttg

SEQ ID NO: 304114 - DNA, 15 bp, Homo sapiens
tggtttcacttgctt

SEQ ID NO: 304115 - DNA, 15 bp, Homo sapiens
ctggtttcacttgct

SEQ ID NO: 304116 - DNA, 15 bp, Homo sapiens
gctggtttcacttgc

SEQ ID NO: 304117 - DNA, 15 bp, Homo sapiens
tgctggtttcacttg

SEQ ID NO: 304118 - DNA, 15 bp, Homo sapiens
ctgctggtttcactt

SEQ ID NO: 304119 - DNA, 15 bp, Homo sapiens
tctgctggtttcact

SEQ ID NO: 304120 - DNA, 15 bp, Homo sapiens
ttctgctggtttcac

SEQ ID NO: 304121 - DNA, 15 bp, Homo sapiens
cttctgctggtttca

SEQ ID NO: 304122 - DNA, 15 bp, Homo sapiens
ccttctgctggtttc

SEQ ID NO: 304123 - DNA, 15 bp, Homo sapiens
gccttctgctggttt

SEQ ID NO: 304124 - DNA, 15 bp, Homo sapiens
tgccttctgctggtt

SEQ ID NO: 304125 - DNA, 15 bp, Homo sapiens
gtgccttctgctggt

SEQ ID NO: 304126 - DNA, 15 bp, Homo sapiens
ggtgccttctgctgg

SEQ ID NO: 304127 - DNA, 15 bp, Homo sapiens
gggtgccttctgctg

SEQ ID NO: 304128 - DNA, 15 bp, Homo sapiens
tgggtgccttctgct

SEQ ID NO: 304129 - DNA, 15 bp, Homo sapiens
ctgggtgccttctgc

SEQ ID NO: 304130 - DNA, 15 bp, Homo sapiens
gctgggtgccttctg

SEQ ID NO: 304131 - DNA, 15 bp, Homo sapiens
ggctgggtgccttct

SEQ ID NO: 304132 - DNA, 15 bp, Homo sapiens
tggctgggtgccttc

SEQ ID NO: 304133 - DNA, 15 bp, Homo sapiens
gtggctgggtgcctt

SEQ ID NO: 304134 - DNA, 15 bp, Homo sapiens
tgtggctgggtgcct

SEQ ID NO: 304135 - DNA, 15 bp, Homo sapiens
ttgtggctgggtgcc

SEQ ID NO: 304136 - DNA, 15 bp, Homo sapiens
tttgtggctgggtgc

SEQ ID NO: 304137 - DNA, 15 bp, Homo sapiens
ttttgtggctgggtg

SEQ ID NO: 304138 - DNA, 15 bp, Homo sapiens
tttttgtggctgggt

SEQ ID NO: 304139 - DNA, 15 bp, Homo sapiens
ttttttgtggctggg

SEQ ID NO: 304140 - DNA, 15 bp, Homo sapiens
gttttttgtggctgg

SEQ ID NO: 304141 - DNA, 15 bp, Homo sapiens
tgttttttgtggctg

SEQ ID NO: 304142 - DNA, 15 bp, Homo sapiens
gtgttttttgtggct

SEQ ID NO: 304143 - DNA, 15 bp, Homo sapiens
ggtgttttttgtggc

SEQ ID NO: 304144 - DNA, 15 bp, Homo sapiens
gggtgttttttgtgg

SEQ ID NO: 304145 - DNA, 15 bp, Homo sapiens
agggtgttttttgtg

SEQ ID NO: 304146 - DNA, 15 bp, Homo sapiens
cagggtgttttttgt

SEQ ID NO: 304147 - DNA, 15 bp, Homo sapiens
ccagggtgttttttg

SEQ ID NO: 304148 - DNA, 15 bp, Homo sapiens
gccagggtgtttttt

SEQ ID NO: 304149 - DNA, 15 bp, Homo sapiens
ggccagggtgttttt

SEQ ID NO: 304150 - DNA, 15 bp, Homo sapiens
gggccagggtgtttt

SEQ ID NO: 304151 - DNA, 15 bp, Homo sapiens
tgggccagggtgttt

SEQ ID NO: 304152 - DNA, 15 bp, Homo sapiens
ctgggccagggtgtt

SEQ ID NO: 304153 - DNA, 15 bp, Homo sapiens
cctgggccagggtgt

SEQ ID NO: 304154 - DNA, 15 bp, Homo sapiens
tcctgggccagggtg

SEQ ID NO: 304155 - DNA, 15 bp, Homo sapiens
ttcctgggccagggt

SEQ ID NO: 304156 - DNA, 15 bp, Homo sapiens
cttcctgggccaggg

SEQ ID NO: 304157 - DNA, 15 bp, Homo sapiens
acttcctgggccagg

SEQ ID NO: 304158 - DNA, 15 bp, Homo sapiens
gacttcctgggccag

SEQ ID NO: 304159 - DNA, 15 bp, Homo sapiens
agacttcctgggcca

SEQ ID NO: 304160 - DNA, 15 bp, Homo sapiens
gagacttcctgggcc

SEQ ID NO: 304161 - DNA, 15 bp, Homo sapiens
agagacttcctgggc

SEQ ID NO: 304162 - DNA, 15 bp, Homo sapiens
aagagacttcctggg

SEQ ID NO: 304163 - DNA, 15 bp, Homo sapiens
aaagagacttcctgg

SEQ ID NO: 304164 - DNA, 15 bp, Homo sapiens
taaagagacttcctg

SEQ ID NO: 304165 - DNA, 15 bp, Homo sapiens
ttaaagagacttcct

SEQ ID NO: 304166 - DNA, 15 bp, Homo sapiens
gttaaagagacttcc

SEQ ID NO: 304167 - DNA, 15 bp, Homo sapiens
ggttaaagagacttc

SEQ ID NO: 304168 - DNA, 15 bp, Homo sapiens
gggttaaagagactt

SEQ ID NO: 304169 - DNA, 15 bp, Homo sapiens
agggttaaagagact

SEQ ID NO: 304170 - DNA, 15 bp, Homo sapiens
tagggttaaagagac

SEQ ID NO: 304171 - DNA, 15 bp, Homo sapiens
gtagggttaaagaga

SEQ ID NO: 304172 - DNA, 15 bp, Homo sapiens
tgtagggttaaagag

SEQ ID NO: 304173 - DNA, 15 bp, Homo sapiens
ctgtagggttaaaga

SEQ ID NO: 304174 - DNA, 15 bp, Homo sapiens
gctgtagggttaaag

SEQ ID NO: 304175 - DNA, 15 bp, Homo sapiens
ggctgtagggttaaa

SEQ ID NO: 304176 - DNA, 15 bp, Homo sapiens
cggctgtagggttaa

SEQ ID NO: 304177 - DNA, 15 bp, Homo sapiens
tcggctgtagggtta

SEQ ID NO: 304178 - DNA, 15 bp, Homo sapiens
ctcggctgtagggtt

SEQ ID NO: 304179 - DNA, 15 bp, Homo sapiens
tctcggctgtagggt

SEQ ID NO: 304180 - DNA, 15 bp, Homo sapiens
gtctcggctgtaggg

SEQ ID NO: 304181 - DNA, 15 bp, Homo sapiens
agtctcggctgtagg

SEQ ID NO: 304182 - DNA, 15 bp, Homo sapiens
gagtctcggctgtag

SEQ ID NO: 304183 - DNA, 15 bp, Homo sapiens
agagtctcggctgta

SEQ ID NO: 304184 - DNA, 15 bp, Homo sapiens
aagagtctcggctgt

SEQ ID NO: 304185 - DNA, 15 bp, Homo sapiens
aaagagtctcggctg

SEQ ID NO: 304186 - DNA, 15 bp, Homo sapiens
gaaagagtctcggct

SEQ ID NO: 304187 - DNA, 15 bp, Homo sapiens
agaaagagtctcggc

SEQ ID NO: 304188 - DNA, 15 bp, Homo sapiens
gagaaagagtctcgg

SEQ ID NO: 304189 - DNA, 15 bp, Homo sapiens
tgagaaagagtctcg

SEQ ID NO: 304190 - DNA, 15 bp, Homo sapiens
ctgagaaagagtctc

SEQ ID NO: 304191 - DNA, 15 bp, Homo sapiens
gctgagaaagagtct

SEQ ID NO: 304192 - DNA, 15 bp, Homo sapiens
ggctgagaaagagtc

SEQ ID NO: 304193 - DNA, 15 bp, Homo sapiens
gggctgagaaagagt

SEQ ID NO: 304194 - DNA, 15 bp, Homo sapiens
tgggctgagaaagag

SEQ ID NO: 304195 - DNA, 15 bp, Homo sapiens
ctgggctgagaaaga

SEQ ID NO: 304196 - DNA, 15 bp, Homo sapiens
cctgggctgagaaag

SEQ ID NO: 304197 - DNA, 15 bp, Homo sapiens
tcctgggctgagaaa

SEQ ID NO: 304198 - DNA, 15 bp, Homo sapiens
ttcctgggctgagaa

SEQ ID NO: 304199 - DNA, 15 bp, Homo sapiens
gttcctgggctgaga

SEQ ID NO: 304200 - DNA, 15 bp, Homo sapiens
tgttcctgggctgag

SEQ ID NO: 304201 - DNA, 15 bp, Homo sapiens
gtgttcctgggctga

SEQ ID NO: 304202 - DNA, 15 bp, Homo sapiens
ggtgttcctgggctg

SEQ ID NO: 304203 - DNA, 15 bp, Homo sapiens
tggtgttcctgggct

SEQ ID NO: 304204 - DNA, 15 bp, Homo sapiens
ctggtgttcctgggc

SEQ ID NO: 304205 - DNA, 15 bp, Homo sapiens
cctggtgttcctggg

SEQ ID NO: 304206 - DNA, 15 bp, Homo sapiens
gcctggtgttcctgg

SEQ ID NO: 304207 - DNA, 15 bp, Homo sapiens
ggcctggtgttcctg

SEQ ID NO: 304208 - DNA, 15 bp, Homo sapiens
aggcctggtgttcct

SEQ ID NO: 304209 - DNA, 15 bp, Homo sapiens
caggcctggtgttcc

SEQ ID NO: 304210 - DNA, 15 bp, Homo sapiens
acaggcctggtgttc

SEQ ID NO: 304211 - DNA, 15 bp, Homo sapiens
tacaggcctggtgtt

SEQ ID NO: 304212 - DNA, 15 bp, Homo sapiens
ctacaggcctggtgt

SEQ ID NO: 304213 - DNA, 15 bp, Homo sapiens
tctacaggcctggtg

SEQ ID NO: 304214 - DNA, 15 bp, Homo sapiens
ctctacaggcctggt

SEQ ID NO: 304215 - DNA, 15 bp, Homo sapiens
tctctacaggcctgg

SEQ ID NO: 304216 - DNA, 15 bp, Homo sapiens
ctctctacaggcctg

SEQ ID NO: 304217 - DNA, 15 bp, Homo sapiens
tctctctacaggcct

SEQ ID NO: 304218 - DNA, 15 bp, Homo sapiens
gtctctctacaggcc

SEQ ID NO: 304219 - DNA, 15 bp, Homo sapiens
tgtctctctacaggc

SEQ ID NO: 304220 - DNA, 15 bp, Homo sapiens
gtgtctctctacagg

SEQ ID NO: 304221 - DNA, 15 bp, Homo sapiens
agtgtctctctacag

SEQ ID NO: 304222 - DNA, 15 bp, Homo sapiens
tagtgtctctctaca

SEQ ID NO: 304223 - DNA, 15 bp, Homo sapiens
atagtgtctctctac

SEQ ID NO: 304224 - DNA, 15 bp, Homo sapiens
aatagtgtctctcta

SEQ ID NO: 304225 - DNA, 15 bp, Homo sapiens
gaatagtgtctctct

SEQ ID NO: 304226 - DNA, 15 bp, Homo sapiens
tgaatagtgtctctc

SEQ ID NO: 304227 - DNA, 15 bp, Homo sapiens
ctgaatagtgtctct

SEQ ID NO: 304228 - DNA, 15 bp, Homo sapiens
cctgaatagtgtctc

SEQ ID NO: 304229 - DNA, 15 bp, Homo sapiens
ccctgaatagtgtct

SEQ ID NO: 304230 - DNA, 15 bp, Homo sapiens
cccctgaatagtgtc

SEQ ID NO: 304231 - DNA, 15 bp, Homo sapiens
acccctgaatagtgt

SEQ ID NO: 304232 - DNA, 15 bp, Homo sapiens
aacccctgaatagtg

SEQ ID NO: 304233 - DNA, 15 bp, Homo sapiens
aaacccctgaatagt

SEQ ID NO: 304234 - DNA, 15 bp, Homo sapiens
gaaacccctgaatag

SEQ ID NO: 304235 - DNA, 15 bp, Homo sapiens
ggaaacccctgaata

SEQ ID NO: 304236 - DNA, 15 bp, Homo sapiens
tggaaacccctgaat

SEQ ID NO: 304237 - DNA, 15 bp, Homo sapiens
gtggaaacccctgaa

SEQ ID NO: 304238 - DNA, 15 bp, Homo sapiens
agtggaaacccctga

SEQ ID NO: 304239 - DNA, 15 bp, Homo sapiens
tagtggaaacccctg

SEQ ID NO: 304240 - DNA, 15 bp, Homo sapiens
atagtggaaacccct

SEQ ID NO: 304241 - DNA, 15 bp, Homo sapiens
tatagtggaaacccc

SEQ ID NO: 304242 - DNA, 15 bp, Homo sapiens
gtatagtggaaaccc

SEQ ID NO: 304243 - DNA, 15 bp, Homo sapiens
tgtatagtggaaacc

SEQ ID NO: 304244 - DNA, 15 bp, Homo sapiens
gtgtatagtggaaac

SEQ ID NO: 304245 - DNA, 15 bp, Homo sapiens
ggtgtatagtggaaa

SEQ ID NO: 304246 - DNA, 15 bp, Homo sapiens
tggtgtatagtggaa

SEQ ID NO: 304247 - DNA, 15 bp, Homo sapiens
atggtgtatagtgga

SEQ ID NO: 304248 - DNA, 15 bp, Homo sapiens
aatggtgtatagtgg

SEQ ID NO: 304249 - DNA, 15 bp, Homo sapiens
gaatggtgtatagtg

SEQ ID NO: 304250 - DNA, 15 bp, Homo sapiens
ggaatggtgtatagt

SEQ ID NO: 304251 - DNA, 15 bp, Homo sapiens
tggaatggtgtatag

SEQ ID NO: 304252 - DNA, 15 bp, Homo sapiens
gtggaatggtgtata

SEQ ID NO: 304253 - DNA, 15 bp, Homo sapiens
ggtggaatggtgtat

SEQ ID NO: 304254 - DNA, 15 bp, Homo sapiens
tggtggaatggtgta

SEQ ID NO: 304255 - DNA, 15 bp, Homo sapiens
ctggtggaatggtgt

SEQ ID NO: 304256 - DNA, 15 bp, Homo sapiens
cctggtggaatggtg

SEQ ID NO: 304257 - DNA, 15 bp, Homo sapiens
gcctggtggaatggt

SEQ ID NO: 304258 - DNA, 15 bp, Homo sapiens
tgcctggtggaatgg

SEQ ID NO: 304259 - DNA, 15 bp, Homo sapiens
ctgcctggtggaatg

SEQ ID NO: 304260 - DNA, 15 bp, Homo sapiens
gctgcctggtggaat

SEQ ID NO: 304261 - DNA, 15 bp, Homo sapiens
agctgcctggtggaa

SEQ ID NO: 304262 - DNA, 15 bp, Homo sapiens
aagctgcctggtgga

SEQ ID NO: 304263 - DNA, 15 bp, Homo sapiens
caagctgcctggtgg

SEQ ID NO: 304264 - DNA, 15 bp, Homo sapiens
tcaagctgcctggtg

SEQ ID NO: 304265 - DNA, 15 bp, Homo sapiens
gtcaagctgcctggt

SEQ ID NO: 304266 - DNA, 15 bp, Homo sapiens
ggtcaagctgcctgg

SEQ ID NO: 304267 - DNA, 15 bp, Homo sapiens
aggtcaagctgcctg

SEQ ID NO: 304268 - DNA, 15 bp, Homo sapiens
caggtcaagctgcct

SEQ ID NO: 304269 - DNA, 15 bp, Homo sapiens
ccaggtcaagctgcc

SEQ ID NO: 304270 - DNA, 15 bp, Homo sapiens
accaggtcaagctgc

SEQ ID NO: 304271 - DNA, 15 bp, Homo sapiens
caccaggtcaagctg

SEQ ID NO: 304272 - DNA, 15 bp, Homo sapiens
tcaccaggtcaagct

SEQ ID NO: 304273 - DNA, 15 bp, Homo sapiens
ttcaccaggtcaagc

SEQ ID NO: 304274 - DNA, 15 bp, Homo sapiens
tttcaccaggtcaag

SEQ ID NO: 304275 - DNA, 15 bp, Homo sapiens
ttttcaccaggtcaa

SEQ ID NO: 304276 - DNA, 15 bp, Homo sapiens
attttcaccaggtca

SEQ ID NO: 304277 - DNA, 15 bp, Homo sapiens
cattttcaccaggtc

SEQ ID NO: 304278 - DNA, 15 bp, Homo sapiens
acattttcaccaggt

SEQ ID NO: 304279 - DNA, 15 bp, Homo sapiens
cacattttcaccagg

SEQ ID NO: 304280 - DNA, 15 bp, Homo sapiens
acacattttcaccag

SEQ ID NO: 304281 - DNA, 15 bp, Homo sapiens
tacacattttcacca

SEQ ID NO: 304282 - DNA, 15 bp, Homo sapiens
ctacacattttcacc

SEQ ID NO: 304283 - DNA, 15 bp, Homo sapiens
cctacacattttcac

SEQ ID NO: 304284 - DNA, 15 bp, Homo sapiens
acctacacattttca

SEQ ID NO: 304285 - DNA, 15 bp, Homo sapiens
gacctacacattttc

SEQ ID NO: 304286 - DNA, 15 bp, Homo sapiens
ggacctacacatttt

SEQ ID NO: 304287 - DNA, 15 bp, Homo sapiens
tggacctacacattt

SEQ ID NO: 304288 - DNA, 15 bp, Homo sapiens
atggacctacacatt

SEQ ID NO: 304289 - DNA, 15 bp, Homo sapiens
catggacctacacat

SEQ ID NO: 304290 - DNA, 15 bp, Homo sapiens
acatggacctacaca

SEQ ID NO: 304291 - DNA, 15 bp, Homo sapiens
tacatggacctacac

SEQ ID NO: 304292 - DNA, 15 bp, Homo sapiens
atacatggacctaca

SEQ ID NO: 304293 - DNA, 15 bp, Homo sapiens
gatacatggacctac

SEQ ID NO: 304294 - DNA, 15 bp, Homo sapiens
ggatacatggaccta

SEQ ID NO: 304295 - DNA, 15 bp, Homo sapiens
tggatacatggacct

SEQ ID NO: 304296 - DNA, 15 bp, Homo sapiens
gtggatacatggacc

SEQ ID NO: 304297 - DNA, 15 bp, Homo sapiens
ggtggatacatggac

SEQ ID NO: 304298 - DNA, 15 bp, Homo sapiens
tggtggatacatgga

SEQ ID NO: 304299 - DNA, 15 bp, Homo sapiens
gtggtggatacatgg

SEQ ID NO: 304300 - DNA, 15 bp, Homo sapiens
ggtggtggatacatg

SEQ ID NO: 304301 - DNA, 15 bp, Homo sapiens
tggtggtggatacat

SEQ ID NO: 304302 - DNA, 15 bp, Homo sapiens
gtggtggtggataca

SEQ ID NO: 304303 - DNA, 15 bp, Homo sapiens
tgtggtggtggatac

SEQ ID NO: 304304 - DNA, 15 bp, Homo sapiens
ttgtggtggtggata

SEQ ID NO: 304305 - DNA, 15 bp, Homo sapiens
cttgtggtggtggat

SEQ ID NO: 304306 - DNA, 15 bp, Homo sapiens
gcttgtggtggtgga

SEQ ID NO: 304307 - DNA, 15 bp, Homo sapiens
tgcttgtggtggtgg

SEQ ID NO: 304308 - DNA, 15 bp, Homo sapiens
ttgcttgtggtggtg

SEQ ID NO: 304309 - DNA, 15 bp, Homo sapiens
attgcttgtggtggt

SEQ ID NO: 304310 - DNA, 15 bp, Homo sapiens
aattgcttgtggtgg

SEQ ID NO: 304311 - DNA, 15 bp, Homo sapiens
caattgcttgtggtg

SEQ ID NO: 304312 - DNA, 15 bp, Homo sapiens
gcaattgcttgtggt

SEQ ID NO: 304313 - DNA, 15 bp, Homo sapiens
tgcaattgcttgtgg

SEQ ID NO: 304314 - DNA, 15 bp, Homo sapiens
gtgcaattgcttgtg

SEQ ID NO: 304315 - DNA, 15 bp, Homo sapiens
ggtgcaattgcttgt

SEQ ID NO: 304316 - DNA, 15 bp, Homo sapiens
gggtgcaattgcttg

SEQ ID NO: 304317 - DNA, 15 bp, Homo sapiens
tgggtgcaattgctt

SEQ ID NO: 304318 - DNA, 15 bp, Homo sapiens
atgggtgcaattgct

SEQ ID NO: 304319 - DNA, 15 bp, Homo sapiens
tatgggtgcaattgc

SEQ ID NO: 304320 - DNA, 15 bp, Homo sapiens
atatgggtgcaattg

SEQ ID NO: 304321 - DNA, 15 bp, Homo sapiens
gatatgggtgcaatt

SEQ ID NO: 304322 - DNA, 15 bp, Homo sapiens
ggatatgggtgcaat

SEQ ID NO: 304323 - DNA, 15 bp, Homo sapiens
gggatatgggtgcaa

SEQ ID NO: 304324 - DNA, 15 bp, Homo sapiens
agggatatgggtgca

SEQ ID NO: 304325 - DNA, 15 bp, Homo sapiens
gagggatatgggtgc

SEQ ID NO: 304326 - DNA, 15 bp, Homo sapiens
ggagggatatgggtg

SEQ ID NO: 304327 - DNA, 15 bp, Homo sapiens
tggagggatatgggt

SEQ ID NO: 304328 - DNA, 15 bp, Homo sapiens
ctggagggatatggg

SEQ ID NO: 304329 - DNA, 15 bp, Homo sapiens
gctggagggatatgg

SEQ ID NO: 304330 - DNA, 15 bp, Homo sapiens
ggctggagggatatg

SEQ ID NO: 304331 - DNA, 15 bp, Homo sapiens
aggctggagggatat

SEQ ID NO: 304332 - DNA, 15 bp, Homo sapiens
gaggctggagggata

SEQ ID NO: 304333 - DNA, 15 bp, Homo sapiens
agaggctggagggat

SEQ ID NO: 304334 - DNA, 15 bp, Homo sapiens
gagaggctggaggga

SEQ ID NO: 304335 - DNA, 15 bp, Homo sapiens
agagaggctggaggg

SEQ ID NO: 304336 - DNA, 15 bp, Homo sapiens
tagagaggctggagg

SEQ ID NO: 304337 - DNA, 15 bp, Homo sapiens
gtagagaggctggag

SEQ ID NO: 304338 - DNA, 15 bp, Homo sapiens
ggtagagaggctgga

SEQ ID NO: 304339 - DNA, 15 bp, Homo sapiens
gggtagagaggctgg

SEQ ID NO: 304340 - DNA, 15 bp, Homo sapiens
ggggtagagaggctg

SEQ ID NO: 304341 - DNA, 15 bp, Homo sapiens
aggggtagagaggct

SEQ ID NO: 304342 - DNA, 15 bp, Homo sapiens
caggggtagagaggc

SEQ ID NO: 304343 - DNA, 15 bp, Homo sapiens
acaggggtagagagg

SEQ ID NO: 304344 - DNA, 15 bp, Homo sapiens
gacaggggtagagag

SEQ ID NO: 304345 - DNA, 15 bp, Homo sapiens
ggacaggggtagaga

SEQ ID NO: 304346 - DNA, 15 bp, Homo sapiens
gggacaggggtagag

SEQ ID NO: 304347 - DNA, 15 bp, Homo sapiens
agggacaggggtaga

SEQ ID NO: 304348 - DNA, 15 bp, Homo sapiens
tagggacaggggtag

SEQ ID NO: 304349 - DNA, 15 bp, Homo sapiens
ttagggacaggggta

SEQ ID NO: 304350 - DNA, 15 bp, Homo sapiens
gttagggacaggggt

SEQ ID NO: 304351 - DNA, 15 bp, Homo sapiens
tgttagggacagggg

SEQ ID NO: 304352 - DNA, 15 bp, Homo sapiens
gtgttagggacaggg

SEQ ID NO: 304353 - DNA, 15 bp, Homo sapiens
ggtgttagggacagg

SEQ ID NO: 304354 - DNA, 15 bp, Homo sapiens
aggtgttagggacag

SEQ ID NO: 304355 - DNA, 15 bp, Homo sapiens
caggtgttagggaca

SEQ ID NO: 304356 - DNA, 15 bp, Homo sapiens
ccaggtgttagggac

SEQ ID NO: 304357 - DNA, 15 bp, Homo sapiens
gccaggtgttaggga

SEQ ID NO: 304358 - DNA, 15 bp, Homo sapiens
ggccaggtgttaggg

SEQ ID NO: 304359 - DNA, 15 bp, Homo sapiens
tggccaggtgttagg

SEQ ID NO: 304360 - DNA, 15 bp, Homo sapiens
gtggccaggtgttag

SEQ ID NO: 304361 - DNA, 15 bp, Homo sapiens
agtggccaggtgtta

SEQ ID NO: 304362 - DNA, 15 bp, Homo sapiens
cagtggccaggtgtt

SEQ ID NO: 304363 - DNA, 15 bp, Homo sapiens
gcagtggccaggtgt

SEQ ID NO: 304364 - DNA, 15 bp, Homo sapiens
agcagtggccaggtg

SEQ ID NO: 304365 - DNA, 15 bp, Homo sapiens
tagcagtggccaggt

SEQ ID NO: 304366 - DNA, 15 bp, Homo sapiens
ttagcagtggccagg

SEQ ID NO: 304367 - DNA, 15 bp, Homo sapiens
attagcagtggccag

SEQ ID NO: 304368 - DNA, 15 bp, Homo sapiens
gattagcagtggcca

SEQ ID NO: 304369 - DNA, 15 bp, Homo sapiens
agattagcagtggcc

SEQ ID NO: 304370 - DNA, 15 bp, Homo sapiens
cagattagcagtggc

SEQ ID NO: 304371 - DNA, 15 bp, Homo sapiens
gcagattagcagtgg

SEQ ID NO: 304372 - DNA, 15 bp, Homo sapiens
ggcagattagcagtg

SEQ ID NO: 304373 - DNA, 15 bp, Homo sapiens
gggcagattagcagt

SEQ ID NO: 304374 - DNA, 15 bp, Homo sapiens
agggcagattagcag

SEQ ID NO: 304375 - DNA, 15 bp, Homo sapiens
aagggcagattagca

SEQ ID NO: 304376 - DNA, 15 bp, Homo sapiens
gaagggcagattagc

SEQ ID NO: 304377 - DNA, 15 bp, Homo sapiens
tgaagggcagattag

SEQ ID NO: 304378 - DNA, 15 bp, Homo sapiens
ttgaagggcagatta

SEQ ID NO: 304379 - DNA, 15 bp, Homo sapiens
attgaagggcagatt

SEQ ID NO: 304380 - DNA, 15 bp, Homo sapiens
aattgaagggcagat

SEQ ID NO: 304381 - DNA, 15 bp, Homo sapiens
gaattgaagggcaga

SEQ ID NO: 304382 - DNA, 15 bp, Homo sapiens
agaattgaagggcag

SEQ ID NO: 304383 - DNA, 15 bp, Homo sapiens
gagaattgaagggca

SEQ ID NO: 304384 - DNA, 15 bp, Homo sapiens
tgagaattgaagggc

SEQ ID NO: 304385 - DNA, 15 bp, Homo sapiens
ttgagaattgaaggg

SEQ ID NO: 304386 - DNA, 15 bp, Homo sapiens
tttgagaattgaagg

SEQ ID NO: 304387 - DNA, 15 bp, Homo sapiens
atttgagaattgaag

SEQ ID NO: 304388 - DNA, 15 bp, Homo sapiens
aatttgagaattgaa

SEQ ID NO: 304389 - DNA, 15 bp, Homo sapiens
aaatttgagaattga

SEQ ID NO: 304390 - DNA, 15 bp, Homo sapiens
aaaatttgagaattg

SEQ ID NO: 304391 - DNA, 15 bp, Homo sapiens
caaaatttgagaatt

SEQ ID NO: 304392 - DNA, 15 bp, Homo sapiens
acaaaatttgagaat

SEQ ID NO: 304393 - DNA, 15 bp, Homo sapiens
gacaaaatttgagaa

SEQ ID NO: 304394 - DNA, 15 bp, Homo sapiens
tgacaaaatttgaga

SEQ ID NO: 304395 - DNA, 15 bp, Homo sapiens
atgacaaaatttgag

SEQ ID NO: 304396 - DNA, 15 bp, Homo sapiens
aatgacaaaatttga

SEQ ID NO: 304397 - DNA, 15 bp, Homo sapiens
aaatgacaaaatttg

SEQ ID NO: 304398 - DNA, 15 bp, Homo sapiens
gaaatgacaaaattt

SEQ ID NO: 304399 - DNA, 15 bp, Homo sapiens
tgaaatgacaaaatt

SEQ ID NO: 304400 - DNA, 15 bp, Homo sapiens
ttgaaatgacaaaat

SEQ ID NO: 304401 - DNA, 15 bp, Homo sapiens
tttgaaatgacaaaa

SEQ ID NO: 304402 - DNA, 15 bp, Homo sapiens
ttttgaaatgacaaa

SEQ ID NO: 304403 - DNA, 15 bp, Homo sapiens
tttttgaaatgacaa

SEQ ID NO: 304404 - DNA, 15 bp, Homo sapiens
atttttgaaatgaca

SEQ ID NO: 304405 - DNA, 15 bp, Homo sapiens
catttttgaaatgac

SEQ ID NO: 304406 - DNA, 15 bp, Homo sapiens
acatttttgaaatga

SEQ ID NO: 304407 - DNA, 15 bp, Homo sapiens
aacatttttgaaatg

SEQ ID NO: 304408 - DNA, 15 bp, Homo sapiens
taacatttttgaaat

SEQ ID NO: 304409 - DNA, 15 bp, Homo sapiens
ataacatttttgaaa

SEQ ID NO: 304410 - DNA, 15 bp, Homo sapiens
cataacatttttgaa

SEQ ID NO: 304411 - DNA, 15 bp, Homo sapiens
acataacatttttga

SEQ ID NO: 304412 - DNA, 15 bp, Homo sapiens
tacataacatttttg

SEQ ID NO: 304413 - DNA, 15 bp, Homo sapiens
ttacataacattttt

SEQ ID NO: 304414 - DNA, 15 bp, Homo sapiens
cttacataacatttt

SEQ ID NO: 304415 - DNA, 15 bp, Homo sapiens
acttacataacattt

SEQ ID NO: 304416 - DNA, 15 bp, Homo sapiens
cacttacataacatt

SEQ ID NO: 304417 - DNA, 15 bp, Homo sapiens
ccacttacataacat

SEQ ID NO: 304418 - DNA, 15 bp, Homo sapiens
tccacttacataaca

SEQ ID NO: 304419 - DNA, 15 bp, Homo sapiens
ttccacttacataac

SEQ ID NO: 304420 - DNA, 15 bp, Homo sapiens
attccacttacataa

SEQ ID NO: 304421 - DNA, 15 bp, Homo sapiens
gattccacttacata

SEQ ID NO: 304422 - DNA, 15 bp, Homo sapiens
tgattccacttacat

SEQ ID NO: 304423 - DNA, 15 bp, Homo sapiens
ttgattccacttaca

SEQ ID NO: 304424 - DNA, 15 bp, Homo sapiens
tttgattccacttac

SEQ ID NO: 304425 - DNA, 15 bp, Homo sapiens
gtttgattccactta

SEQ ID NO: 304426 - DNA, 15 bp, Homo sapiens
tgtttgattccactt

SEQ ID NO: 304427 - DNA, 15 bp, Homo sapiens
ctgtttgattccact

SEQ ID NO: 304428 - DNA, 15 bp, Homo sapiens
cctgtttgattccac

SEQ ID NO: 304429 - DNA, 15 bp, Homo sapiens
tcctgtttgattcca

SEQ ID NO: 304430 - DNA, 15 bp, Homo sapiens
atcctgtttgattcc

SEQ ID NO: 304431 - DNA, 15 bp, Homo sapiens
aatcctgtttgattc

SEQ ID NO: 304432 - DNA, 15 bp, Homo sapiens
taatcctgtttgatt

SEQ ID NO: 304433 - DNA, 15 bp, Homo sapiens
ctaatcctgtttgat

SEQ ID NO: 304434 - DNA, 15 bp, Homo sapiens
actaatcctgtttga

SEQ ID NO: 304435 - DNA, 15 bp, Homo sapiens
aactaatcctgtttg

SEQ ID NO: 304436 - DNA, 15 bp, Homo sapiens
aaactaatcctgttt

SEQ ID NO: 304437 - DNA, 15 bp, Homo sapiens
aaaactaatcctgtt

SEQ ID NO: 304438 - DNA, 15 bp, Homo sapiens
aaaaactaatcctgt

SEQ ID NO: 304439 - DNA, 15 bp, Homo sapiens
aaaaaactaatcctg

SEQ ID NO: 304440 - DNA, 15 bp, Homo sapiens
aaaaaaactaatcct

SEQ ID NO: 304441 - DNA, 15 bp, Homo sapiens
aaaaaaaactaatcc

SEQ ID NO: 304442 - DNA, 15 bp, Homo sapiens
gaaaaaaaactaatc

SEQ ID NO: 304443 - DNA, 15 bp, Homo sapiens
agaaaaaaaactaat

SEQ ID NO: 304444 - DNA, 15 bp, Homo sapiens
gagaaaaaaaactaa

SEQ ID NO: 304445 - DNA, 15 bp, Homo sapiens
tgagaaaaaaaacta

SEQ ID NO: 304446 - DNA, 15 bp, Homo sapiens
atgagaaaaaaaact

SEQ ID NO: 304447 - DNA, 15 bp, Homo sapiens
aatgagaaaaaaaac

SEQ ID NO: 304448 - DNA, 15 bp, Homo sapiens
gaatgagaaaaaaaa

SEQ ID NO: 304449 - DNA, 15 bp, Homo sapiens
tgaatgagaaaaaaa

SEQ ID NO: 304450 - DNA, 15 bp, Homo sapiens
ctgaatgagaaaaaa

SEQ ID NO: 304451 - DNA, 15 bp, Homo sapiens
actgaatgagaaaaa

SEQ ID NO: 304452 - DNA, 15 bp, Homo sapiens
tactgaatgagaaaa

SEQ ID NO: 304453 - DNA, 15 bp, Homo sapiens
atactgaatgagaaa

SEQ ID NO: 304454 - DNA, 15 bp, Homo sapiens
tatactgaatgagaa

SEQ ID NO: 304455 - DNA, 15 bp, Homo sapiens
ttatactgaatgaga

SEQ ID NO: 304456 - DNA, 15 bp, Homo sapiens
attatactgaatgag

SEQ ID NO: 304457 - DNA, 15 bp, Homo sapiens
aattatactgaatga

SEQ ID NO: 304458 - DNA, 15 bp, Homo sapiens
aaattatactgaatg

SEQ ID NO: 304459 - DNA, 15 bp, Homo sapiens
aaaattatactgaat

SEQ ID NO: 304460 - DNA, 15 bp, Homo sapiens
gaaaattatactgaa

SEQ ID NO: 304461 - DNA, 15 bp, Homo sapiens
agaaaattatactga

SEQ ID NO: 304462 - DNA, 15 bp, Homo sapiens
cagaaaattatactg

SEQ ID NO: 304463 - DNA, 15 bp, Homo sapiens
ccagaaaattatact

SEQ ID NO: 304464 - DNA, 15 bp, Homo sapiens
tccagaaaattatac

SEQ ID NO: 304465 - DNA, 15 bp, Homo sapiens
ctccagaaaattata

SEQ ID NO: 304466 - DNA, 15 bp, Homo sapiens
tctccagaaaattat

SEQ ID NO: 304467 - DNA, 15 bp, Homo sapiens
atctccagaaaatta

SEQ ID NO: 304468 - DNA, 15 bp, Homo sapiens
gatctccagaaaatt

SEQ ID NO: 304469 - DNA, 15 bp, Homo sapiens
ggatctccagaaaat

SEQ ID NO: 304470 - DNA, 15 bp, Homo sapiens
tggatctccagaaaa

SEQ ID NO: 304471 - DNA, 15 bp, Homo sapiens
atggatctccagaaa

SEQ ID NO: 304472 - DNA, 15 bp, Homo sapiens
aatggatctccagaa

SEQ ID NO: 304473 - DNA, 15 bp, Homo sapiens
gaatggatctccaga

SEQ ID NO: 304474 - DNA, 15 bp, Homo sapiens
tgaatggatctccag

SEQ ID NO: 304475 - DNA, 15 bp, Homo sapiens
gtgaatggatctcca

SEQ ID NO: 304476 - DNA, 15 bp, Homo sapiens
cgtgaatggatctcc

SEQ ID NO: 304477 - DNA, 15 bp, Homo sapiens
tcgtgaatggatctc

SEQ ID NO: 304478 - DNA, 15 bp, Homo sapiens
atcgtgaatggatct

SEQ ID NO: 304479 - DNA, 15 bp, Homo sapiens
tatcgtgaatggatc

SEQ ID NO: 304480 - DNA, 15 bp, Homo sapiens
atatcgtgaatggat

SEQ ID NO: 304481 - DNA, 15 bp, Homo sapiens
aatatcgtgaatgga

SEQ ID NO: 304482 - DNA, 15 bp, Homo sapiens
caatatcgtgaatgg

SEQ ID NO: 304483 - DNA, 15 bp, Homo sapiens
gcaatatcgtgaatg

SEQ ID NO: 304484 - DNA, 15 bp, Homo sapiens
tgcaatatcgtgaat

SEQ ID NO: 304485 - DNA, 15 bp, Homo sapiens
atgcaatatcgtgaa

SEQ ID NO: 304486 - DNA, 15 bp, Homo sapiens
catgcaatatcgtga

SEQ ID NO: 304487 - DNA, 15 bp, Homo sapiens
acatgcaatatcgtg

SEQ ID NO: 304488 - DNA, 15 bp, Homo sapiens
tacatgcaatatcgt

SEQ ID NO: 304489 - DNA, 15 bp, Homo sapiens
atacatgcaatatcg

SEQ ID NO: 304490 - DNA, 15 bp, Homo sapiens
gatacatgcaatatc

SEQ ID NO: 304491 - DNA, 15 bp, Homo sapiens
tgatacatgcaatat

SEQ ID NO: 304492 - DNA, 15 bp, Homo sapiens
ttgatacatgcaata

SEQ ID NO: 304493 - DNA, 15 bp, Homo sapiens
attgatacatgcaat

SEQ ID NO: 304494 - DNA, 15 bp, Homo sapiens
tattgatacatgcaa

SEQ ID NO: 304495 - DNA, 15 bp, Homo sapiens
ctattgatacatgca

SEQ ID NO: 304496 - DNA, 15 bp, Homo sapiens
actattgatacatgc

SEQ ID NO: 304497 - DNA, 15 bp, Homo sapiens
aactattgatacatg

SEQ ID NO: 304498 - DNA, 15 bp, Homo sapiens
gaactattgatacat

SEQ ID NO: 304499 - DNA, 15 bp, Homo sapiens
tgaactattgataca

SEQ ID NO: 304500 - DNA, 15 bp, Homo sapiens
atgaactattgatac

SEQ ID NO: 304501 - DNA, 15 bp, Homo sapiens
tatgaactattgata

SEQ ID NO: 304502 - DNA, 15 bp, Homo sapiens
gtatgaactattgat

SEQ ID NO: 304503 - DNA, 15 bp, Homo sapiens
ggtatgaactattga

SEQ ID NO: 304504 - DNA, 15 bp, Homo sapiens
aggtatgaactattg

SEQ ID NO: 304505 - DNA, 15 bp, Homo sapiens
aaggtatgaactatt

SEQ ID NO: 304506 - DNA, 15 bp, Homo sapiens
aaaggtatgaactat

SEQ ID NO: 304507 - DNA, 15 bp, Homo sapiens
aaaaggtatgaacta

SEQ ID NO: 304508 - DNA, 15 bp, Homo sapiens
aaaaaggtatgaact

SEQ ID NO: 304509 - DNA, 15 bp, Homo sapiens
taaaaaggtatgaac

SEQ ID NO: 304510 - DNA, 15 bp, Homo sapiens
ataaaaaggtatgaa

SEQ ID NO: 304511 - DNA, 15 bp, Homo sapiens
aataaaaaggtatga

SEQ ID NO: 304512 - DNA, 15 bp, Homo sapiens
caataaaaaggtatg

SEQ ID NO: 304513 - DNA, 15 bp, Homo sapiens
gcaataaaaaggtat

SEQ ID NO: 304514 - DNA, 15 bp, Homo sapiens
agcaataaaaaggta

SEQ ID NO: 304515 - DNA, 15 bp, Homo sapiens
cagcaataaaaaggt

SEQ ID NO: 304516 - DNA, 15 bp, Homo sapiens
tcagcaataaaaagg

SEQ ID NO: 304517 - DNA, 15 bp, Homo sapiens
gtcagcaataaaaag

SEQ ID NO: 304518 - DNA, 15 bp, Homo sapiens
agtcagcaataaaaa

SEQ ID NO: 304519 - DNA, 15 bp, Homo sapiens
tagtcagcaataaaa

SEQ ID NO: 304520 - DNA, 15 bp, Homo sapiens
ctagtcagcaataaa

SEQ ID NO: 304521 - DNA, 15 bp, Homo sapiens
actagtcagcaataa

SEQ ID NO: 304522 - DNA, 15 bp, Homo sapiens
tactagtcagcaata

SEQ ID NO: 304523 - DNA, 15 bp, Homo sapiens
atactagtcagcaat

SEQ ID NO: 304524 - DNA, 15 bp, Homo sapiens
aatactagtcagcaa

SEQ ID NO: 304525 - DNA, 15 bp, Homo sapiens
aaatactagtcagca

SEQ ID NO: 304526 - DNA, 15 bp, Homo sapiens
aaaatactagtcagc

SEQ ID NO: 304527 - DNA, 15 bp, Homo sapiens
caaaatactagtcag

SEQ ID NO: 304528 - DNA, 15 bp, Homo sapiens
acaaaatactagtca

SEQ ID NO: 304529 - DNA, 15 bp, Homo sapiens
tacaaaatactagtc

SEQ ID NO: 304530 - DNA, 15 bp, Homo sapiens
ctacaaaatactagt

SEQ ID NO: 304531 - DNA, 15 bp, Homo sapiens
gctacaaaatactag

SEQ ID NO: 304532 - DNA, 15 bp, Homo sapiens
tgctacaaaatacta

SEQ ID NO: 304533 - DNA, 15 bp, Homo sapiens
atgctacaaaatact

SEQ ID NO: 304534 - DNA, 15 bp, Homo sapiens
catgctacaaaatac

SEQ ID NO: 304535 - DNA, 15 bp, Homo sapiens
tcatgctacaaaata

SEQ ID NO: 304536 - DNA, 15 bp, Homo sapiens
ttcatgctacaaaat

SEQ ID NO: 304537 - DNA, 15 bp, Homo sapiens
attcatgctacaaaa

SEQ ID NO: 304538 - DNA, 15 bp, Homo sapiens
cattcatgctacaaa

SEQ ID NO: 304539 - DNA, 15 bp, Homo sapiens
acattcatgctacaa

SEQ ID NO: 304540 - DNA, 15 bp, Homo sapiens
tacattcatgctaca

SEQ ID NO: 304541 - DNA, 15 bp, Homo sapiens
gtacattcatgctac

SEQ ID NO: 304542 - DNA, 15 bp, Homo sapiens
agtacattcatgcta

SEQ ID NO: 304543 - DNA, 15 bp, Homo sapiens
tagtacattcatgct

SEQ ID NO: 304544 - DNA, 15 bp, Homo sapiens
gtagtacattcatgc

SEQ ID NO: 304545 - DNA, 15 bp, Homo sapiens
tgtagtacattcatg

SEQ ID NO: 304546 - DNA, 15 bp, Homo sapiens
ctgtagtacattcat

SEQ ID NO: 304547 - DNA, 15 bp, Homo sapiens
actgtagtacattca

SEQ ID NO: 304548 - DNA, 15 bp, Homo sapiens
aactgtagtacattc

SEQ ID NO: 304549 - DNA, 15 bp, Homo sapiens
aaactgtagtacatt

SEQ ID NO: 304550 - DNA, 15 bp, Homo sapiens
gaaactgtagtacat

SEQ ID NO: 304551 - DNA, 15 bp, Homo sapiens
agaaactgtagtaca

SEQ ID NO: 304552 - DNA, 15 bp, Homo sapiens
aagaaactgtagtac

SEQ ID NO: 304553 - DNA, 15 bp, Homo sapiens
aaagaaactgtagta

SEQ ID NO: 304554 - DNA, 15 bp, Homo sapiens
caaagaaactgtagt

SEQ ID NO: 304555 - DNA, 15 bp, Homo sapiens
ccaaagaaactgtag

SEQ ID NO: 304556 - DNA, 15 bp, Homo sapiens
gccaaagaaactgta

SEQ ID NO: 304557 - DNA, 15 bp, Homo sapiens
ggccaaagaaactgt

SEQ ID NO: 304558 - DNA, 15 bp, Homo sapiens
tggccaaagaaactg

SEQ ID NO: 304559 - DNA, 15 bp, Homo sapiens
ctggccaaagaaact

SEQ ID NO: 304560 - DNA, 15 bp, Homo sapiens
tctggccaaagaaac

SEQ ID NO: 304561 - DNA, 15 bp, Homo sapiens
gtctggccaaagaaa

SEQ ID NO: 304562 - DNA, 15 bp, Homo sapiens
tgtctggccaaagaa

SEQ ID NO: 304563 - DNA, 15 bp, Homo sapiens
gtgtctggccaaaga

SEQ ID NO: 304564 - DNA, 15 bp, Homo sapiens
tgtgtctggccaaag

SEQ ID NO: 304565 - DNA, 15 bp, Homo sapiens
atgtgtctggccaaa

SEQ ID NO: 304566 - DNA, 15 bp, Homo sapiens
catgtgtctggccaa

SEQ ID NO: 304567 - DNA, 15 bp, Homo sapiens
acatgtgtctggcca

SEQ ID NO: 304568 - DNA, 15 bp, Homo sapiens
aacatgtgtctggcc

SEQ ID NO: 304569 - DNA, 15 bp, Homo sapiens
caacatgtgtctggc

SEQ ID NO: 304570 - DNA, 15 bp, Homo sapiens
tcaacatgtgtctgg

SEQ ID NO: 304571 - DNA, 15 bp, Homo sapiens
ttcaacatgtgtctg

SEQ ID NO: 304572 - DNA, 15 bp, Homo sapiens
cttcaacatgtgtct

SEQ ID NO: 304573 - DNA, 15 bp, Homo sapiens
tcttcaacatgtgtc

SEQ ID NO: 304574 - DNA, 15 bp, Homo sapiens
ttcttcaacatgtgt

SEQ ID NO: 304575 - DNA, 15 bp, Homo sapiens
attcttcaacatgtg

SEQ ID NO: 304576 - DNA, 15 bp, Homo sapiens
tattcttcaacatgt

SEQ ID NO: 304577 - DNA, 15 bp, Homo sapiens
atattcttcaacatg

SEQ ID NO: 304578 - DNA, 15 bp, Homo sapiens
gatattcttcaacat

SEQ ID NO: 304579 - DNA, 15 bp, Homo sapiens
tgatattcttcaaca

SEQ ID NO: 304580 - DNA, 15 bp, Homo sapiens
ctgatattcttcaac

SEQ ID NO: 304581 - DNA, 15 bp, Homo sapiens
cctgatattcttcaa

SEQ ID NO: 304582 - DNA, 15 bp, Homo sapiens
tcctgatattcttca

SEQ ID NO: 304583 - DNA, 15 bp, Homo sapiens
gtcctgatattcttc

SEQ ID NO: 304584 - DNA, 15 bp, Homo sapiens
tgtcctgatattctt

SEQ ID NO: 304585 - DNA, 15 bp, Homo sapiens
ctgtcctgatattct

SEQ ID NO: 304586 - DNA, 15 bp, Homo sapiens
cctgtcctgatattc

SEQ ID NO: 304587 - DNA, 15 bp, Homo sapiens
acctgtcctgatatt

SEQ ID NO: 304588 - DNA, 15 bp, Homo sapiens
aacctgtcctgatat

SEQ ID NO: 304589 - DNA, 15 bp, Homo sapiens
gaacctgtcctgata

SEQ ID NO: 304590 - DNA, 15 bp, Homo sapiens
agaacctgtcctgat

SEQ ID NO: 304591 - DNA, 15 bp, Homo sapiens
tagaacctgtcctga

SEQ ID NO: 304592 - DNA, 15 bp, Homo sapiens
ctagaacctgtcctg

SEQ ID NO: 304593 - DNA, 15 bp, Homo sapiens
actagaacctgtcct

SEQ ID NO: 304594 - DNA, 15 bp, Homo sapiens
aactagaacctgtcc

SEQ ID NO: 304595 - DNA, 15 bp, Homo sapiens
aaactagaacctgtc

SEQ ID NO: 304596 - DNA, 15 bp, Homo sapiens
aaaactagaacctgt

SEQ ID NO: 304597 - DNA, 15 bp, Homo sapiens
aaaaactagaacctg

SEQ ID NO: 304598 - DNA, 15 bp, Homo sapiens
caaaaactagaacct

SEQ ID NO: 304599 - DNA, 15 bp, Homo sapiens
ccaaaaactagaacc

SEQ ID NO: 304600 - DNA, 15 bp, Homo sapiens
gccaaaaactagaac

SEQ ID NO: 304601 - DNA, 15 bp, Homo sapiens
agccaaaaactagaa

SEQ ID NO: 304602 - DNA, 15 bp, Homo sapiens
tagccaaaaactaga

SEQ ID NO: 304603 - DNA, 15 bp, Homo sapiens
atagccaaaaactag

SEQ ID NO: 304604 - DNA, 15 bp, Homo sapiens
gatagccaaaaacta

SEQ ID NO: 304605 - DNA, 15 bp, Homo sapiens
tgatagccaaaaact

SEQ ID NO: 304606 - DNA, 15 bp, Homo sapiens
gtgatagccaaaaac

SEQ ID NO: 304607 - DNA, 15 bp, Homo sapiens
tgtgatagccaaaaa

SEQ ID NO: 304608 - DNA, 15 bp, Homo sapiens
ttgtgatagccaaaa

SEQ ID NO: 304609 - DNA, 15 bp, Homo sapiens
tttgtgatagccaaa

SEQ ID NO: 304610 - DNA, 15 bp, Homo sapiens
atttgtgatagccaa

SEQ ID NO: 304611 - DNA, 15 bp, Homo sapiens
tatttgtgatagcca

SEQ ID NO: 304612 - DNA, 15 bp, Homo sapiens
ttatttgtgatagcc

SEQ ID NO: 304613 - DNA, 15 bp, Homo sapiens
tttatttgtgatagc

SEQ ID NO: 304614 - DNA, 15 bp, Homo sapiens
ctttatttgtgatag

SEQ ID NO: 304615 - DNA, 15 bp, Homo sapiens
gctttatttgtgata

SEQ ID NO: 304616 - DNA, 15 bp, Homo sapiens
agctttatttgtgat

SEQ ID NO: 304617 - DNA, 15 bp, Homo sapiens
cagctttatttgtga

SEQ ID NO: 304618 - DNA, 15 bp, Homo sapiens
gcagctttatttgtg

SEQ ID NO: 304619 - DNA, 15 bp, Homo sapiens
agcagctttatttgt

SEQ ID NO: 304620 - DNA, 15 bp, Homo sapiens
tagcagctttatttg

SEQ ID NO: 304621 - DNA, 15 bp, Homo sapiens
atagcagctttattt

SEQ ID NO: 304622 - DNA, 15 bp, Homo sapiens
catagcagctttatt

SEQ ID NO: 304623 - DNA, 15 bp, Homo sapiens
tcatagcagctttat

SEQ ID NO: 304624 - DNA, 15 bp, Homo sapiens
ttcatagcagcttta

SEQ ID NO: 304625 - DNA, 15 bp, Homo sapiens
gttcatagcagcttt

SEQ ID NO: 304626 - DNA, 15 bp, Homo sapiens
aaatgttcatagcag

SEQ ID NO: 304627 - DNA, 15 bp, Homo sapiens
taaatgttcatagca

SEQ ID NO: 304628 - DNA, 15 bp, Homo sapiens
ataaatgttcatagc

SEQ ID NO: 304629 - DNA, 15 bp, Homo sapiens
cataaatgttcatag

SEQ ID NO: 304630 - DNA, 15 bp, Homo sapiens
acataaatgttcata

SEQ ID NO: 304631 - DNA, 15 bp, Homo sapiens
aacataaatgttcat

SEQ ID NO: 304632 - DNA, 15 bp, Homo sapiens
aaacataaatgttca

SEQ ID NO: 304633 - DNA, 15 bp, Homo sapiens
taaacataaatgttc

SEQ ID NO: 304634 - DNA, 15 bp, Homo sapiens
ctaaacataaatgtt

SEQ ID NO: 304635 - DNA, 15 bp, Homo sapiens
actaaacataaatgt

SEQ ID NO: 304636 - DNA, 15 bp, Homo sapiens
tactaaacataaatg

SEQ ID NO: 304637 - DNA, 15 bp, Homo sapiens
atactaaacataaat

SEQ ID NO: 304638 - DNA, 15 bp, Homo sapiens
gatactaaacataaa

SEQ ID NO: 304639 - DNA, 15 bp, Homo sapiens
tgatactaaacataa

SEQ ID NO: 304640 - DNA, 15 bp, Homo sapiens
ctgatactaaacata

SEQ ID NO: 304641 - DNA, 15 bp, Homo sapiens
actgatactaaacat

SEQ ID NO: 304642 - DNA, 15 bp, Homo sapiens
tactgatactaaaca

SEQ ID NO: 304643 - DNA, 15 bp, Homo sapiens
atactgatactaaac

SEQ ID NO: 304644 - DNA, 15 bp, Homo sapiens
catactgatactaaa

SEQ ID NO: 304645 - DNA, 15 bp, Homo sapiens
ccatactgatactaa

SEQ ID NO: 304646 - DNA, 15 bp, Homo sapiens
cccatactgatacta

SEQ ID NO: 304647 - DNA, 15 bp, Homo sapiens
acccatactgatact

SEQ ID NO: 304648 - DNA, 15 bp, Homo sapiens
aacccatactgatac

SEQ ID NO: 304649 - DNA, 15 bp, Homo sapiens
aaacccatactgata

SEQ ID NO: 304650 - DNA, 15 bp, Homo sapiens
aaaacccatactgat

SEQ ID NO: 304651 - DNA, 15 bp, Homo sapiens
gaaaacccatactga

SEQ ID NO: 304652 - DNA, 15 bp, Homo sapiens
agaaaacccatactg

SEQ ID NO: 304653 - DNA, 15 bp, Homo sapiens
aagaaaacccatact

SEQ ID NO: 304654 - DNA, 15 bp, Homo sapiens
aaagaaaacccatac

SEQ ID NO: 304655 - DNA, 15 bp, Homo sapiens
aaaagaaaacccata

SEQ ID NO: 304656 - DNA, 15 bp, Homo sapiens
gaaaagaaaacccat

SEQ ID NO: 304657 - DNA, 15 bp, Homo sapiens
agaaaagaaaaccca

SEQ ID NO: 304658 - DNA, 15 bp, Homo sapiens
gagaaaagaaaaccc

SEQ ID NO: 304659 - DNA, 15 bp, Homo sapiens
agagaaaagaaaacc

SEQ ID NO: 304660 - DNA, 15 bp, Homo sapiens
cagagaaaagaaaac

SEQ ID NO: 304661 - DNA, 15 bp, Homo sapiens
ccagagaaaagaaaa

SEQ ID NO: 304662 - DNA, 15 bp, Homo sapiens
cccagagaaaagaaa

SEQ ID NO: 304663 - DNA, 15 bp, Homo sapiens
tcccagagaaaagaa

SEQ ID NO: 304664 - DNA, 15 bp, Homo sapiens
atcccagagaaaaga

SEQ ID NO: 304665 - DNA, 15 bp, Homo sapiens
tatcccagagaaaag

SEQ ID NO: 304666 - DNA, 15 bp, Homo sapiens
ttatcccagagaaaa

SEQ ID NO: 304667 - DNA, 15 bp, Homo sapiens
tttatcccagagaaa

SEQ ID NO: 304668 - DNA, 15 bp, Homo sapiens
atttatcccagagaa

SEQ ID NO: 304669 - DNA, 15 bp, Homo sapiens
catttatcccagaga

SEQ ID NO: 304670 - DNA, 15 bp, Homo sapiens
gcatttatcccagag

SEQ ID NO: 304671 - DNA, 15 bp, Homo sapiens
ggcatttatcccaga

SEQ ID NO: 304672 - DNA, 15 bp, Homo sapiens
aggcatttatcccag

SEQ ID NO: 304673 - DNA, 15 bp, Homo sapiens
taggcatttatccca

SEQ ID NO: 304674 - DNA, 15 bp, Homo sapiens
ttaggcatttatccc

SEQ ID NO: 304675 - DNA, 15 bp, Homo sapiens
attaggcatttatcc

SEQ ID NO: 304676 - DNA, 15 bp, Homo sapiens
cattaggcatttatc

SEQ ID NO: 304677 - DNA, 15 bp, Homo sapiens
tcattaggcatttat

SEQ ID NO: 304678 - DNA, 15 bp, Homo sapiens
ctcattaggcattta

SEQ ID NO: 304679 - DNA, 15 bp, Homo sapiens
actcattaggcattt

SEQ ID NO: 304680 - DNA, 15 bp, Homo sapiens
tactcattaggcatt

SEQ ID NO: 304681 - DNA, 15 bp, Homo sapiens
ttactcattaggcat

SEQ ID NO: 304682 - DNA, 15 bp, Homo sapiens
tttactcattaggca

SEQ ID NO: 304683 - DNA, 15 bp, Homo sapiens
ttttactcattaggc

SEQ ID NO: 304684 - DNA, 15 bp, Homo sapiens
attttactcattagg

SEQ ID NO: 304685 - DNA, 15 bp, Homo sapiens
aattttactcattag

SEQ ID NO: 304686 - DNA, 15 bp, Homo sapiens
caattttactcatta

SEQ ID NO: 304687 - DNA, 15 bp, Homo sapiens
tcaattttactcatt

SEQ ID NO: 304688 - DNA, 15 bp, Homo sapiens
ttcaattttactcat

SEQ ID NO: 304689 - DNA, 15 bp, Homo sapiens
cttcaattttactca

SEQ ID NO: 304690 - DNA, 15 bp, Homo sapiens
tcttcaattttactc

SEQ ID NO: 304691 - DNA, 15 bp, Homo sapiens
ctcttcaattttact

SEQ ID NO: 304692 - DNA, 15 bp, Homo sapiens
actcttcaattttac

SEQ ID NO: 304693 - DNA, 15 bp, Homo sapiens
aactcttcaatttta

SEQ ID NO: 304694 - DNA, 15 bp, Homo sapiens
caactcttcaatttt

SEQ ID NO: 304695 - DNA, 15 bp, Homo sapiens
acaactcttcaattt

SEQ ID NO: 304696 - DNA, 15 bp, Homo sapiens
tacaactcttcaatt

SEQ ID NO: 304697 - DNA, 15 bp, Homo sapiens
atacaactcttcaat

SEQ ID NO: 304698 - DNA, 15 bp, Homo sapiens
catacaactcttcaa

SEQ ID NO: 304699 - DNA, 15 bp, Homo sapiens
ccatacaactcttca

SEQ ID NO: 304700 - DNA, 15 bp, Homo sapiens
accatacaactcttc

SEQ ID NO: 304701 - DNA, 15 bp, Homo sapiens
aaccatacaactctt

SEQ ID NO: 304702 - DNA, 15 bp, Homo sapiens
taaccatacaactct

SEQ ID NO: 304703 - DNA, 15 bp, Homo sapiens
ataaccatacaactc

SEQ ID NO: 304704 - DNA, 15 bp, Homo sapiens
aataaccatacaact

SEQ ID NO: 304705 - DNA, 15 bp, Homo sapiens
aaataaccatacaac

SEQ ID NO: 304706 - DNA, 15 bp, Homo sapiens
aaaataaccatacaa

SEQ ID NO: 304707 - DNA, 15 bp, Homo sapiens
caaaataaccataca

SEQ ID NO: 304708 - DNA, 15 bp, Homo sapiens
gcaaaataaccatac

SEQ ID NO: 304709 - DNA, 15 bp, Homo sapiens
tgcaaaataaccata

SEQ ID NO: 304710 - DNA, 15 bp, Homo sapiens
atgcaaaataaccat

SEQ ID NO: 304711 - DNA, 15 bp, Homo sapiens
aatgcaaaataacca

SEQ ID NO: 304712 - DNA, 15 bp, Homo sapiens
aaatgcaaaataacc

SEQ ID NO: 304713 - DNA, 15 bp, Homo sapiens
aaaatgcaaaataac

SEQ ID NO: 304714 - DNA, 15 bp, Homo sapiens
gaaaatgcaaaataa

SEQ ID NO: 304715 - DNA, 15 bp, Homo sapiens
agaaaatgcaaaata

SEQ ID NO: 304716 - DNA, 15 bp, Homo sapiens
aagaaaatgcaaaat

SEQ ID NO: 304717 - DNA, 15 bp, Homo sapiens
aaagaaaatgcaaaa

SEQ ID NO: 304718 - DNA, 15 bp, Homo sapiens
caaagaaaatgcaaa

SEQ ID NO: 304719 - DNA, 15 bp, Homo sapiens
tcaaagaaaatgcaa

SEQ ID NO: 304720 - DNA, 15 bp, Homo sapiens
atcaaagaaaatgca

SEQ ID NO: 304721 - DNA, 15 bp, Homo sapiens
tatcaaagaaaatgc

SEQ ID NO: 304722 - DNA, 15 bp, Homo sapiens
ttatcaaagaaaatg

SEQ ID NO: 304723 - DNA, 15 bp, Homo sapiens
tttatcaaagaaaat

SEQ ID NO: 304724 - DNA, 15 bp, Homo sapiens
ttttatcaaagaaaa

SEQ ID NO: 304725 - DNA, 15 bp, Homo sapiens
cttttatcaaagaaa

SEQ ID NO: 304726 - DNA, 15 bp, Homo sapiens
tcttttatcaaagaa

SEQ ID NO: 304727 - DNA, 15 bp, Homo sapiens
gtcttttatcaaaga

SEQ ID NO: 304728 - DNA, 15 bp, Homo sapiens
agtcttttatcaaag

SEQ ID NO: 304729 - DNA, 15 bp, Homo sapiens
cagtcttttatcaaa

SEQ ID NO: 304730 - DNA, 15 bp, Homo sapiens
gcagtcttttatcaa

SEQ ID NO: 304731 - DNA, 15 bp, Homo sapiens
tgcagtcttttatca

SEQ ID NO: 304732 - DNA, 15 bp, Homo sapiens
ttgcagtcttttatc

SEQ ID NO: 304733 - DNA, 15 bp, Homo sapiens
tttgcagtcttttat

SEQ ID NO: 304734 - DNA, 15 bp, Homo sapiens
ttttgcagtctttta

SEQ ID NO: 304735 - DNA, 15 bp, Homo sapiens
cttttgcagtctttt

SEQ ID NO: 304736 - DNA, 15 bp, Homo sapiens
acttttgcagtcttt

SEQ ID NO: 304737 - DNA, 15 bp, Homo sapiens
tacttttgcagtctt

SEQ ID NO: 304738 - DNA, 15 bp, Homo sapiens
atacttttgcagtct

SEQ ID NO: 304739 - DNA, 15 bp, Homo sapiens
aatacttttgcagtc

SEQ ID NO: 304740 - DNA, 15 bp, Homo sapiens
aaatacttttgcagt

SEQ ID NO: 304741 - DNA, 15 bp, Homo sapiens
aaaatacttttgcag

SEQ ID NO: 304742 - DNA, 15 bp, Homo sapiens
gaaaatacttttgca

SEQ ID NO: 304743 - DNA, 15 bp, Homo sapiens
ggaaaatacttttgc

SEQ ID NO: 304744 - DNA, 15 bp, Homo sapiens
tggaaaatacttttg

SEQ ID NO: 304745 - DNA, 15 bp, Homo sapiens
ctggaaaatactttt

SEQ ID NO: 304746 - DNA, 15 bp, Homo sapiens
tctggaaaatacttt

SEQ ID NO: 304747 - DNA, 15 bp, Homo sapiens
ctctggaaaatactt

SEQ ID NO: 304748 - DNA, 15 bp, Homo sapiens
actctggaaaatact

SEQ ID NO: 304749 - DNA, 15 bp, Homo sapiens
cactctggaaaatac

SEQ ID NO: 304750 - DNA, 15 bp, Homo sapiens
ccactctggaaaata

SEQ ID NO: 304751 - DNA, 15 bp, Homo sapiens
accactctggaaaat

SEQ ID NO: 304752 - DNA, 15 bp, Homo sapiens
aaccactctggaaaa

SEQ ID NO: 304753 - DNA, 15 bp, Homo sapiens
caaccactctggaaa

SEQ ID NO: 304754 - DNA, 15 bp, Homo sapiens
tcaaccactctggaa

SEQ ID NO: 304755 - DNA, 15 bp, Homo sapiens
ttcaaccactctgga

SEQ ID NO: 304756 - DNA, 15 bp, Homo sapiens
attcaaccactctgg

SEQ ID NO: 304757 - DNA, 15 bp, Homo sapiens
gattcaaccactctg

SEQ ID NO: 304758 - DNA, 15 bp, Homo sapiens
tgattcaaccactct

SEQ ID NO: 304759 - DNA, 15 bp, Homo sapiens
atgattcaaccactc

SEQ ID NO: 304760 - DNA, 15 bp, Homo sapiens
aatgattcaaccact

SEQ ID NO: 304761 - DNA, 15 bp, Homo sapiens
aaatgattcaaccac

SEQ ID NO: 304762 - DNA, 15 bp, Homo sapiens
aaaatgattcaacca

SEQ ID NO: 304763 - DNA, 15 bp, Homo sapiens
taaaatgattcaacc

SEQ ID NO: 304764 - DNA, 15 bp, Homo sapiens
ttaaaatgattcaac

SEQ ID NO: 304765 - DNA, 15 bp, Homo sapiens
tttaaaatgattcaa

SEQ ID NO: 304766 - DNA, 15 bp, Homo sapiens
atttaaaatgattca

SEQ ID NO: 304767 - DNA, 15 bp, Homo sapiens
aatttaaaatgattc

SEQ ID NO: 304768 - DNA, 15 bp, Homo sapiens
aaatttaaaatgatt

SEQ ID NO: 304769 - DNA, 15 bp, Homo sapiens
gaaatttaaaatgat

SEQ ID NO: 304770 - DNA, 15 bp, Homo sapiens
ggaaatttaaaatga

SEQ ID NO: 304771 - DNA, 15 bp, Homo sapiens
cggaaatttaaaatg

SEQ ID NO: 304772 - DNA, 15 bp, Homo sapiens
gcggaaatttaaaat

SEQ ID NO: 304773 - DNA, 15 bp, Homo sapiens
ggcggaaatttaaaa

SEQ ID NO: 304774 - DNA, 15 bp, Homo sapiens
tggcggaaatttaaa

SEQ ID NO: 304775 - DNA, 15 bp, Homo sapiens
ctggcggaaatttaa

SEQ ID NO: 304776 - DNA, 15 bp, Homo sapiens
gctggcggaaattta

SEQ ID NO: 304777 - DNA, 15 bp, Homo sapiens
tgctggcggaaattt

SEQ ID NO: 304778 - DNA, 15 bp, Homo sapiens
ttgctggcggaaatt

SEQ ID NO: 304779 - DNA, 15 bp, Homo sapiens
attgctggcggaaat

SEQ ID NO: 304780 - DNA, 15 bp, Homo sapiens
tattgctggcggaaa

SEQ ID NO: 304781 - DNA, 15 bp, Homo sapiens
atattgctggcggaa

SEQ ID NO: 304782 - DNA, 15 bp, Homo sapiens
tatattgctggcgga

SEQ ID NO: 304783 - DNA, 15 bp, Homo sapiens
gtatattgctggcgg

SEQ ID NO: 304784 - DNA, 15 bp, Homo sapiens
cgtatattgctggcg

SEQ ID NO: 304785 - DNA, 15 bp, Homo sapiens
tcgtatattgctggc

SEQ ID NO: 304786 - DNA, 15 bp, Homo sapiens
ctcgtatattgctgg

SEQ ID NO: 304787 - DNA, 15 bp, Homo sapiens
actcgtatattgctg

SEQ ID NO: 304788 - DNA, 15 bp, Homo sapiens
cactcgtatattgct

SEQ ID NO: 304789 - DNA, 15 bp, Homo sapiens
tcactcgtatattgc

SEQ ID NO: 304790 - DNA, 15 bp, Homo sapiens
ctcactcgtatattg

SEQ ID NO: 304791 - DNA, 15 bp, Homo sapiens
actcactcgtatatt

SEQ ID NO: 304792 - DNA, 15 bp, Homo sapiens
cactcactcgtatat

SEQ ID NO: 304793 - DNA, 15 bp, Homo sapiens
tcactcactcgtata

SEQ ID NO: 304794 - DNA, 15 bp, Homo sapiens
atcactcactcgtat

SEQ ID NO: 304795 - DNA, 15 bp, Homo sapiens
gatcactcactcgta

SEQ ID NO: 304796 - DNA, 15 bp, Homo sapiens
ggatcactcactcgt

SEQ ID NO: 304797 - DNA, 15 bp, Homo sapiens
tggatcactcactcg

SEQ ID NO: 304798 - DNA, 15 bp, Homo sapiens
ctggatcactcactc

SEQ ID NO: 304799 - DNA, 15 bp, Homo sapiens
actggatcactcact

SEQ ID NO: 304800 - DNA, 15 bp, Homo sapiens
aactggatcactcac

SEQ ID NO: 304801 - DNA, 15 bp, Homo sapiens
aaactggatcactca

SEQ ID NO: 304802 - DNA, 15 bp, Homo sapiens
gaaactggatcactc

SEQ ID NO: 304803 - DNA, 15 bp, Homo sapiens
agaaactggatcact

SEQ ID NO: 304804 - DNA, 15 bp, Homo sapiens
gagaaactggatcac

SEQ ID NO: 304805 - DNA, 15 bp, Homo sapiens
agagaaactggatca

SEQ ID NO: 304806 - DNA, 15 bp, Homo sapiens
cagagaaactggatc

SEQ ID NO: 304807 - DNA, 15 bp, Homo sapiens
gcagagaaactggat

SEQ ID NO: 304808 - DNA, 15 bp, Homo sapiens
tgcagagaaactgga

SEQ ID NO: 304809 - DNA, 15 bp, Homo sapiens
atgcagagaaactgg

SEQ ID NO: 304810 - DNA, 15 bp, Homo sapiens
aatgcagagaaactg

SEQ ID NO: 304811 - DNA, 15 bp, Homo sapiens
gaatgcagagaaact

SEQ ID NO: 304812 - DNA, 15 bp, Homo sapiens
agaatgcagagaaac

SEQ ID NO: 304813 - DNA, 15 bp, Homo sapiens
aagaatgcagagaaa

SEQ ID NO: 304814 - DNA, 15 bp, Homo sapiens
aaagaatgcagagaa

SEQ ID NO: 304815 - DNA, 15 bp, Homo sapiens
gaaagaatgcagaga

SEQ ID NO: 304816 - DNA, 15 bp, Homo sapiens
ggaaagaatgcagag

SEQ ID NO: 304817 - DNA, 15 bp, Homo sapiens
tggaaagaatgcaga

SEQ ID NO: 304818 - DNA, 15 bp, Homo sapiens
atggaaagaatgcag

SEQ ID NO: 304819 - DNA, 15 bp, Homo sapiens
gatggaaagaatgca

SEQ ID NO: 304820 - DNA, 15 bp, Homo sapiens
tgatggaaagaatgc

SEQ ID NO: 304821 - DNA, 15 bp, Homo sapiens
atgatggaaagaatg

SEQ ID NO: 304822 - DNA, 15 bp, Homo sapiens
aatgatggaaagaat

SEQ ID NO: 304823 - DNA, 15 bp, Homo sapiens
aaatgatggaaagaa

SEQ ID NO: 304824 - DNA, 15 bp, Homo sapiens
caaatgatggaaaga

SEQ ID NO: 304825 - DNA, 15 bp, Homo sapiens
ccaaatgatggaaag

SEQ ID NO: 304826 - DNA, 15 bp, Homo sapiens
accaaatgatggaaa

SEQ ID NO: 304827 - DNA, 15 bp, Homo sapiens
caccaaatgatggaa

SEQ ID NO: 304828 - DNA, 15 bp, Homo sapiens
tcaccaaatgatgga

SEQ ID NO: 304829 - DNA, 15 bp, Homo sapiens
atcaccaaatgatgg

SEQ ID NO: 304830 - DNA, 15 bp, Homo sapiens
catcaccaaatgatg

SEQ ID NO: 304831 - DNA, 15 bp, Homo sapiens
acatcaccaaatgat

SEQ ID NO: 304832 - DNA, 15 bp, Homo sapiens
gacatcaccaaatga

SEQ ID NO: 304833 - DNA, 15 bp, Homo sapiens
agacatcaccaaatg

SEQ ID NO: 304834 - DNA, 15 bp, Homo sapiens
aagacatcaccaaat

SEQ ID NO: 304835 - DNA, 15 bp, Homo sapiens
aaagacatcaccaaa

SEQ ID NO: 304836 - DNA, 15 bp, Homo sapiens
taaagacatcaccaa

SEQ ID NO: 304837 - DNA, 15 bp, Homo sapiens
ataaagacatcacca

SEQ ID NO: 304838 - DNA, 15 bp, Homo sapiens
aataaagacatcacc

SEQ ID NO: 304839 - DNA, 15 bp, Homo sapiens
aaataaagacatcac

SEQ ID NO: 304840 - DNA, 15 bp, Homo sapiens
aaaataaagacatca

SEQ ID NO: 304841 - DNA, 15 bp, Homo sapiens
aaaaataaagacatc

SEQ ID NO: 304842 - DNA, 15 bp, Homo sapiens
aaaaaataaagacat

SEQ ID NO: 304843 - DNA, 15 bp, Homo sapiens
taaaaaataaagaca

SEQ ID NO: 304844 - DNA, 15 bp, Homo sapiens
ataaaaaataaagac

SEQ ID NO: 304845 - DNA, 15 bp, Homo sapiens
aataaaaaataaaga

SEQ ID NO: 304846 - DNA, 15 bp, Homo sapiens
aaataaaaaataaag

SEQ ID NO: 304847 - DNA, 15 bp, Homo sapiens
aaaataaaaaataaa

SEQ ID NO: 304848 - DNA, 15 bp, Homo sapiens
taaaataaaaaataa

SEQ ID NO: 304849 - DNA, 15 bp, Homo sapiens
ctaaaataaaaaata

SEQ ID NO: 304850 - DNA, 15 bp, Homo sapiens
actaaaataaaaaat

SEQ ID NO: 304851 - DNA, 15 bp, Homo sapiens
gactaaaataaaaaa

SEQ ID NO: 304852 - DNA, 15 bp, Homo sapiens
tgactaaaataaaaa

SEQ ID NO: 304853 - DNA, 15 bp, Homo sapiens
atgactaaaataaaa

SEQ ID NO: 304854 - DNA, 15 bp, Homo sapiens
aatgactaaaataaa

SEQ ID NO: 304855 - DNA, 15 bp, Homo sapiens
gaatgactaaaataa

SEQ ID NO: 304856 - DNA, 15 bp, Homo sapiens
agaatgactaaaata

SEQ ID NO: 304857 - DNA, 15 bp, Homo sapiens
cagaatgactaaaat

SEQ ID NO: 304858 - DNA, 15 bp, Homo sapiens
tcagaatgactaaaa

SEQ ID NO: 304859 - DNA, 15 bp, Homo sapiens
atcagaatgactaaa

SEQ ID NO: 304860 - DNA, 15 bp, Homo sapiens
tatcagaatgactaa

SEQ ID NO: 304861 - DNA, 15 bp, Homo sapiens
ctatcagaatgacta

SEQ ID NO: 304862 - DNA, 15 bp, Homo sapiens
actatcagaatgact

SEQ ID NO: 304863 - DNA, 15 bp, Homo sapiens
cactatcagaatgac

SEQ ID NO: 304864 - DNA, 15 bp, Homo sapiens
acactatcagaatga

SEQ ID NO: 304865 - DNA, 15 bp, Homo sapiens
tacactatcagaatg

SEQ ID NO: 304866 - DNA, 15 bp, Homo sapiens
ttacactatcagaat

SEQ ID NO: 304867 - DNA, 15 bp, Homo sapiens
cttacactatcagaa

SEQ ID NO: 304868 - DNA, 15 bp, Homo sapiens
ccttacactatcaga

SEQ ID NO: 304869 - DNA, 15 bp, Homo sapiens
tccttacactatcag

SEQ ID NO: 304870 - DNA, 15 bp, Homo sapiens
atccttacactatca

SEQ ID NO: 304871 - DNA, 15 bp, Homo sapiens
tatccttacactatc

SEQ ID NO: 304872 - DNA, 15 bp, Homo sapiens
atatccttacactat

SEQ ID NO: 304873 - DNA, 15 bp, Homo sapiens
gatatccttacacta

SEQ ID NO: 304874 - DNA, 15 bp, Homo sapiens
agatatccttacact

SEQ ID NO: 304875 - DNA, 15 bp, Homo sapiens
gagatatccttacac

SEQ ID NO: 304876 - DNA, 15 bp, Homo sapiens
tgagatatccttaca

SEQ ID NO: 304877 - DNA, 15 bp, Homo sapiens
ctgagatatccttac

SEQ ID NO: 304878 - DNA, 15 bp, Homo sapiens
actgagatatcctta

SEQ ID NO: 304879 - DNA, 15 bp, Homo sapiens
cactgagatatcctt

SEQ ID NO: 304880 - DNA, 15 bp, Homo sapiens
tcactgagatatcct

SEQ ID NO: 304881 - DNA, 15 bp, Homo sapiens
ctcactgagatatcc

SEQ ID NO: 304882 - DNA, 15 bp, Homo sapiens
cctcactgagatatc

SEQ ID NO: 304883 - DNA, 15 bp, Homo sapiens
acctcactgagatat

SEQ ID NO: 304884 - DNA, 15 bp, Homo sapiens
aacctcactgagata

SEQ ID NO: 304885 - DNA, 15 bp, Homo sapiens
taacctcactgagat

SEQ ID NO: 304886 - DNA, 15 bp, Homo sapiens
ataacctcactgaga

SEQ ID NO: 304887 - DNA, 15 bp, Homo sapiens
tataacctcactgag

SEQ ID NO: 304888 - DNA, 15 bp, Homo sapiens
ttataacctcactga

SEQ ID NO: 304889 - DNA, 15 bp, Homo sapiens
attataacctcactg

SEQ ID NO: 304890 - DNA, 15 bp, Homo sapiens
aattataacctcact

SEQ ID NO: 304891 - DNA, 15 bp, Homo sapiens
aaattataacctcac

SEQ ID NO: 304892 - DNA, 15 bp, Homo sapiens
caaattataacctca

SEQ ID NO: 304893 - DNA, 15 bp, Homo sapiens
gcaaattataacctc

SEQ ID NO: 304894 - DNA, 15 bp, Homo sapiens
tgcaaattataacct

SEQ ID NO: 304895 - DNA, 15 bp, Homo sapiens
atgcaaattataacc

SEQ ID NO: 304896 - DNA, 15 bp, Homo sapiens
aatgcaaattataac

SEQ ID NO: 304897 - DNA, 15 bp, Homo sapiens
aaatgcaaattataa

SEQ ID NO: 304898 - DNA, 15 bp, Homo sapiens
gaaatgcaaattata

SEQ ID NO: 304899 - DNA, 15 bp, Homo sapiens
ggaaatgcaaattat

SEQ ID NO: 304900 - DNA, 15 bp, Homo sapiens
gggaaatgcaaatta

SEQ ID NO: 304901 - DNA, 15 bp, Homo sapiens
tgggaaatgcaaatt

SEQ ID NO: 304902 - DNA, 15 bp, Homo sapiens
atgggaaatgcaaat

SEQ ID NO: 304903 - DNA, 15 bp, Homo sapiens
gatgggaaatgcaaa

SEQ ID NO: 304904 - DNA, 15 bp, Homo sapiens
tgatgggaaatgcaa

SEQ ID NO: 304905 - DNA, 15 bp, Homo sapiens
ctgatgggaaatgca

SEQ ID NO: 304906 - DNA, 15 bp, Homo sapiens
cctgatgggaaatgc

SEQ ID NO: 304907 - DNA, 15 bp, Homo sapiens
tcctgatgggaaatg

SEQ ID NO: 304908 - DNA, 15 bp, Homo sapiens
atcctgatgggaaat

SEQ ID NO: 304909 - DNA, 15 bp, Homo sapiens
catcctgatgggaaa

SEQ ID NO: 304910 - DNA, 15 bp, Homo sapiens
tcatcctgatgggaa

SEQ ID NO: 304911 - DNA, 15 bp, Homo sapiens
atcatcctgatggga

SEQ ID NO: 304912 - DNA, 15 bp, Homo sapiens
tatcatcctgatggg

SEQ ID NO: 304913 - DNA, 15 bp, Homo sapiens
ctatcatcctgatgg

SEQ ID NO: 304914 - DNA, 15 bp, Homo sapiens
gctatcatcctgatg

SEQ ID NO: 304915 - DNA, 15 bp, Homo sapiens
agctatcatcctgat

SEQ ID NO: 304916 - DNA, 15 bp, Homo sapiens
tagctatcatcctga

SEQ ID NO: 304917 - DNA, 15 bp, Homo sapiens
ttagctatcatcctg

SEQ ID NO: 304918 - DNA, 15 bp, Homo sapiens
attagctatcatcct

SEQ ID NO: 304919 - DNA, 15 bp, Homo sapiens
cattagctatcatcc

SEQ ID NO: 304920 - DNA, 15 bp, Homo sapiens
tcattagctatcatc

SEQ ID NO: 304921 - DNA, 15 bp, Homo sapiens
atcattagctatcat

SEQ ID NO: 304922 - DNA, 15 bp, Homo sapiens
tatcattagctatca

SEQ ID NO: 304923 - DNA, 15 bp, Homo sapiens
atatcattagctatc

SEQ ID NO: 304924 - DNA, 15 bp, Homo sapiens
aatatcattagctat

SEQ ID NO: 304925 - DNA, 15 bp, Homo sapiens
caatatcattagcta

SEQ ID NO: 304926 - DNA, 15 bp, Homo sapiens
tcaatatcattagct

SEQ ID NO: 304927 - DNA, 15 bp, Homo sapiens
atcaatatcattagc

SEQ ID NO: 304928 - DNA, 15 bp, Homo sapiens
aatcaatatcattag

SEQ ID NO: 304929 - DNA, 15 bp, Homo sapiens
taatcaatatcatta

SEQ ID NO: 304930 - DNA, 15 bp, Homo sapiens
ttaatcaatatcatt

SEQ ID NO: 304931 - DNA, 15 bp, Homo sapiens
gttaatcaatatcat

SEQ ID NO: 304932 - DNA, 15 bp, Homo sapiens
ggttaatcaatatca

SEQ ID NO: 304933 - DNA, 15 bp, Homo sapiens
aggttaatcaatatc

SEQ ID NO: 304934 - DNA, 15 bp, Homo sapiens
aaggttaatcaatat

SEQ ID NO: 304935 - DNA, 15 bp, Homo sapiens
aaaggttaatcaata

SEQ ID NO: 304936 - DNA, 15 bp, Homo sapiens
gaaaggttaatcaat

SEQ ID NO: 304937 - DNA, 15 bp, Homo sapiens
ggaaaggttaatcaa

SEQ ID NO: 304938 - DNA, 15 bp, Homo sapiens
gggaaaggttaatca

SEQ ID NO: 304939 - DNA, 15 bp, Homo sapiens
agggaaaggttaatc

SEQ ID NO: 304940 - DNA, 15 bp, Homo sapiens
cagggaaaggttaat

SEQ ID NO: 304941 - DNA, 15 bp, Homo sapiens
acagggaaaggttaa

SEQ ID NO: 304942 - DNA, 15 bp, Homo sapiens
aacagggaaaggtta

SEQ ID NO: 304943 - DNA, 15 bp, Homo sapiens
aaacagggaaaggtt

SEQ ID NO: 304944 - DNA, 15 bp, Homo sapiens
taaacagggaaaggt

SEQ ID NO: 304945 - DNA, 15 bp, Homo sapiens
ataaacagggaaagg

SEQ ID NO: 304946 - DNA, 15 bp, Homo sapiens
aataaacagggaaag

SEQ ID NO: 304947 - DNA, 15 bp, Homo sapiens
aaataaacagggaaa

SEQ ID NO: 304948 - DNA, 15 bp, Homo sapiens
caaataaacagggaa

SEQ ID NO: 304949 - DNA, 15 bp, Homo sapiens
acaaataaacaggga

SEQ ID NO: 304950 - DNA, 15 bp, Homo sapiens
cacaaataaacaggg

SEQ ID NO: 304951 - DNA, 15 bp, Homo sapiens
tcacaaataaacagg

SEQ ID NO: 304952 - DNA, 15 bp, Homo sapiens
gtcacaaataaacag

SEQ ID NO: 304953 - DNA, 15 bp, Homo sapiens
ggtcacaaataaaca

SEQ ID NO: 304954 - DNA, 15 bp, Homo sapiens
aggtcacaaataaac

SEQ ID NO: 304955 - DNA, 15 bp, Homo sapiens
caggtcacaaataaa

SEQ ID NO: 304956 - DNA, 15 bp, Homo sapiens
acaggtcacaaataa

SEQ ID NO: 304957 - DNA, 15 bp, Homo sapiens
tacaggtcacaaata

SEQ ID NO: 304958 - DNA, 15 bp, Homo sapiens
atacaggtcacaaat

SEQ ID NO: 304959 - DNA, 15 bp, Homo sapiens
aatacaggtcacaaa

SEQ ID NO: 304960 - DNA, 15 bp, Homo sapiens
aaatacaggtcacaa

SEQ ID NO: 304961 - DNA, 15 bp, Homo sapiens
gaaatacaggtcaca

SEQ ID NO: 304962 - DNA, 15 bp, Homo sapiens
ggaaatacaggtcac

SEQ ID NO: 304963 - DNA, 15 bp, Homo sapiens
aggaaatacaggtca

SEQ ID NO: 304964 - DNA, 15 bp, Homo sapiens
gaggaaatacaggtc

SEQ ID NO: 304965 - DNA, 15 bp, Homo sapiens
agaggaaatacaggt

SEQ ID NO: 304966 - DNA, 15 bp, Homo sapiens
gagaggaaatacagg

SEQ ID NO: 304967 - DNA, 15 bp, Homo sapiens
agagaggaaatacag

SEQ ID NO: 304968 - DNA, 15 bp, Homo sapiens
cagagaggaaataca

SEQ ID NO: 304969 - DNA, 15 bp, Homo sapiens
ccagagaggaaatac

SEQ ID NO: 304970 - DNA, 15 bp, Homo sapiens
accagagaggaaata

SEQ ID NO: 304971 - DNA, 15 bp, Homo sapiens
caccagagaggaaat

SEQ ID NO: 304972 - DNA, 15 bp, Homo sapiens
tcaccagagaggaaa

SEQ ID NO: 304973 - DNA, 15 bp, Homo sapiens
ttcaccagagaggaa

SEQ ID NO: 304974 - DNA, 15 bp, Homo sapiens
tttcaccagagagga

SEQ ID NO: 304975 - DNA, 15 bp, Homo sapiens
atttcaccagagagg

SEQ ID NO: 304976 - DNA, 15 bp, Homo sapiens
aatttcaccagagag

SEQ ID NO: 304977 - DNA, 15 bp, Homo sapiens
aaatttcaccagaga

SEQ ID NO: 304978 - DNA, 15 bp, Homo sapiens
gaaatttcaccagag

SEQ ID NO: 304979 - DNA, 15 bp, Homo sapiens
agaaatttcaccaga

SEQ ID NO: 304980 - DNA, 15 bp, Homo sapiens
gagaaatttcaccag

SEQ ID NO: 304981 - DNA, 15 bp, Homo sapiens
agagaaatttcacca

SEQ ID NO: 304982 - DNA, 15 bp, Homo sapiens
aagagaaatttcacc

SEQ ID NO: 304983 - DNA, 15 bp, Homo sapiens
gaagagaaatttcac

SEQ ID NO: 304984 - DNA, 15 bp, Homo sapiens
tgaagagaaatttca

SEQ ID NO: 304985 - DNA, 15 bp, Homo sapiens
atgaagagaaatttc

SEQ ID NO: 304986 - DNA, 15 bp, Homo sapiens
catgaagagaaattt

SEQ ID NO: 304987 - DNA, 15 bp, Homo sapiens
acatgaagagaaatt

SEQ ID NO: 304988 - DNA, 15 bp, Homo sapiens
gacatgaagagaaat

SEQ ID NO: 304989 - DNA, 15 bp, Homo sapiens
agacatgaagagaaa

SEQ ID NO: 304990 - DNA, 15 bp, Homo sapiens
aagacatgaagagaa

SEQ ID NO: 304991 - DNA, 15 bp, Homo sapiens
aaagacatgaagaga

SEQ ID NO: 304992 - DNA, 15 bp, Homo sapiens
caaagacatgaagag

SEQ ID NO: 304993 - DNA, 15 bp, Homo sapiens
gcaaagacatgaaga

SEQ ID NO: 304994 - DNA, 15 bp, Homo sapiens
agcaaagacatgaag

SEQ ID NO: 304995 - DNA, 15 bp, Homo sapiens
gagcaaagacatgaa

SEQ ID NO: 304996 - DNA, 15 bp, Homo sapiens
tgagcaaagacatga

SEQ ID NO: 304997 - DNA, 15 bp, Homo sapiens
atgagcaaagacatg

SEQ ID NO: 304998 - DNA, 15 bp, Homo sapiens
aatgagcaaagacat

SEQ ID NO: 304999 - DNA, 15 bp, Homo sapiens
aaatgagcaaagaca

SEQ ID NO: 305000 - DNA, 15 bp, Homo sapiens
aaaatgagcaaagac

SEQ ID NO: 305001 - DNA, 15 bp, Homo sapiens
gaaaatgagcaaaga

SEQ ID NO: 305002 - DNA, 15 bp, Homo sapiens
agaaaatgagcaaag

SEQ ID NO: 305003 - DNA, 15 bp, Homo sapiens
cagaaaatgagcaaa

SEQ ID NO: 305004 - DNA, 15 bp, Homo sapiens
tcagaaaatgagcaa

SEQ ID NO: 305005 - DNA, 15 bp, Homo sapiens
atcagaaaatgagca

SEQ ID NO: 305006 - DNA, 15 bp, Homo sapiens
aatcagaaaatgagc

SEQ ID NO: 305007 - DNA, 15 bp, Homo sapiens
caatcagaaaatgag

SEQ ID NO: 305008 - DNA, 15 bp, Homo sapiens
ccaatcagaaaatga

SEQ ID NO: 305009 - DNA, 15 bp, Homo sapiens
tccaatcagaaaatg

SEQ ID NO: 305010 - DNA, 15 bp, Homo sapiens
atccaatcagaaaat

SEQ ID NO: 305011 - DNA, 15 bp, Homo sapiens
aatccaatcagaaaa

SEQ ID NO: 305012 - DNA, 15 bp, Homo sapiens
caatccaatcagaaa

SEQ ID NO: 305013 - DNA, 15 bp, Homo sapiens
acaatccaatcagaa

SEQ ID NO: 305014 - DNA, 15 bp, Homo sapiens
aacaatccaatcaga

SEQ ID NO: 305015 - DNA, 15 bp, Homo sapiens
aaacaatccaatcag

SEQ ID NO: 305016 - DNA, 15 bp, Homo sapiens
caaacaatccaatca

SEQ ID NO: 305017 - DNA, 15 bp, Homo sapiens
acaaacaatccaatc

SEQ ID NO: 305018 - DNA, 15 bp, Homo sapiens
aacaaacaatccaat

SEQ ID NO: 305019 - DNA, 15 bp, Homo sapiens
aaacaaacaatccaa

SEQ ID NO: 305020 - DNA, 15 bp, Homo sapiens
aaaacaaacaatcca

SEQ ID NO: 305021 - DNA, 15 bp, Homo sapiens
aaaaacaaacaatcc

SEQ ID NO: 305022 - DNA, 15 bp, Homo sapiens
aaaaaacaaacaatc

SEQ ID NO: 305023 - DNA, 15 bp, Homo sapiens
taaaaaacaaacaat

SEQ ID NO: 305024 - DNA, 15 bp, Homo sapiens
gtaaaaaacaaacaa

SEQ ID NO: 305025 - DNA, 15 bp, Homo sapiens
ggtaaaaaacaaaca

SEQ ID NO: 305026 - DNA, 15 bp, Homo sapiens
tggtaaaaaacaaac

SEQ ID NO: 305027 - DNA, 15 bp, Homo sapiens
atggtaaaaaacaaa

SEQ ID NO: 305028 - DNA, 15 bp, Homo sapiens
aatggtaaaaaacaa

SEQ ID NO: 305029 - DNA, 15 bp, Homo sapiens
caatggtaaaaaaca

SEQ ID NO: 305030 - DNA, 15 bp, Homo sapiens
tcaatggtaaaaaac

SEQ ID NO: 305031 - DNA, 15 bp, Homo sapiens
ctcaatggtaaaaaa

SEQ ID NO: 305032 - DNA, 15 bp, Homo sapiens
actcaatggtaaaaa

SEQ ID NO: 305033 - DNA, 15 bp, Homo sapiens
aactcaatggtaaaa

SEQ ID NO: 305034 - DNA, 15 bp, Homo sapiens
aaactcaatggtaaa

SEQ ID NO: 305035 - DNA, 15 bp, Homo sapiens
aaaactcaatggtaa

SEQ ID NO: 305036 - DNA, 15 bp, Homo sapiens
caaaactcaatggta

SEQ ID NO: 305037 - DNA, 15 bp, Homo sapiens
tcaaaactcaatggt

SEQ ID NO: 305038 - DNA, 15 bp, Homo sapiens
ctcaaaactcaatgg

SEQ ID NO: 305039 - DNA, 15 bp, Homo sapiens
cctcaaaactcaatg

SEQ ID NO: 305040 - DNA, 15 bp, Homo sapiens
ccctcaaaactcaat

SEQ ID NO: 305041 - DNA, 15 bp, Homo sapiens
accctcaaaactcaa

SEQ ID NO: 305042 - DNA, 15 bp, Homo sapiens
aaccctcaaaactca

SEQ ID NO: 305043 - DNA, 15 bp, Homo sapiens
gaaccctcaaaactc

SEQ ID NO: 305044 - DNA, 15 bp, Homo sapiens
agaaccctcaaaact

SEQ ID NO: 305045 - DNA, 15 bp, Homo sapiens
aagaaccctcaaaac

SEQ ID NO: 305046 - DNA, 15 bp, Homo sapiens
aaagaaccctcaaaa

SEQ ID NO: 305047 - DNA, 15 bp, Homo sapiens
taaagaaccctcaaa

SEQ ID NO: 305048 - DNA, 15 bp, Homo sapiens
ataaagaaccctcaa

SEQ ID NO: 305049 - DNA, 15 bp, Homo sapiens
tataaagaaccctca

SEQ ID NO: 305050 - DNA, 15 bp, Homo sapiens
atataaagaaccctc

SEQ ID NO: 305051 - DNA, 15 bp, Homo sapiens
catataaagaaccct

SEQ ID NO: 305052 - DNA, 15 bp, Homo sapiens
acatataaagaaccc

SEQ ID NO: 305053 - DNA, 15 bp, Homo sapiens
aacatataaagaacc

SEQ ID NO: 305054 - DNA, 15 bp, Homo sapiens
gaacatataaagaac

SEQ ID NO: 305055 - DNA, 15 bp, Homo sapiens
agaacatataaagaa

SEQ ID NO: 305056 - DNA, 15 bp, Homo sapiens
gagaacatataaaga

SEQ ID NO: 305057 - DNA, 15 bp, Homo sapiens
tgagaacatataaag

SEQ ID NO: 305058 - DNA, 15 bp, Homo sapiens
ttgagaacatataaa

SEQ ID NO: 305059 - DNA, 15 bp, Homo sapiens
attgagaacatataa

SEQ ID NO: 305060 - DNA, 15 bp, Homo sapiens
tattgagaacatata

SEQ ID NO: 305061 - DNA, 15 bp, Homo sapiens
gtattgagaacatat

SEQ ID NO: 305062 - DNA, 15 bp, Homo sapiens
agtattgagaacata

SEQ ID NO: 305063 - DNA, 15 bp, Homo sapiens
tagtattgagaacat

SEQ ID NO: 305064 - DNA, 15 bp, Homo sapiens
ctagtattgagaaca

SEQ ID NO: 305065 - DNA, 15 bp, Homo sapiens
actagtattgagaac

SEQ ID NO: 305066 - DNA, 15 bp, Homo sapiens
gactagtattgagaa

SEQ ID NO: 305067 - DNA, 15 bp, Homo sapiens
agactagtattgaga

SEQ ID NO: 305068 - DNA, 15 bp, Homo sapiens
aagactagtattgag

SEQ ID NO: 305069 - DNA, 15 bp, Homo sapiens
aaagactagtattga

SEQ ID NO: 305070 - DNA, 15 bp, Homo sapiens
aaaagactagtattg

SEQ ID NO: 305071 - DNA, 15 bp, Homo sapiens
aaaaagactagtatt

SEQ ID NO: 305072 - DNA, 15 bp, Homo sapiens
aaaaaagactagtat

SEQ ID NO: 305073 - DNA, 15 bp, Homo sapiens
caaaaaagactagta

SEQ ID NO: 305074 - DNA, 15 bp, Homo sapiens
acaaaaaagactagt

SEQ ID NO: 305075 - DNA, 15 bp, Homo sapiens
aacaaaaaagactag

SEQ ID NO: 305076 - DNA, 15 bp, Homo sapiens
taacaaaaaagacta

SEQ ID NO: 305077 - DNA, 15 bp, Homo sapiens
ctaacaaaaaagact

SEQ ID NO: 305078 - DNA, 15 bp, Homo sapiens
tctaacaaaaaagac

SEQ ID NO: 305079 - DNA, 15 bp, Homo sapiens
atctaacaaaaaaga

SEQ ID NO: 305080 - DNA, 15 bp, Homo sapiens
tatctaacaaaaaag

SEQ ID NO: 305081 - DNA, 15 bp, Homo sapiens
atatctaacaaaaaa

SEQ ID NO: 305082 - DNA, 15 bp, Homo sapiens
catatctaacaaaaa

SEQ ID NO: 305083 - DNA, 15 bp, Homo sapiens
acatatctaacaaaa

SEQ ID NO: 305084 - DNA, 15 bp, Homo sapiens
cacatatctaacaaa

SEQ ID NO: 305085 - DNA, 15 bp, Homo sapiens
ccacatatctaacaa

SEQ ID NO: 305086 - DNA, 15 bp, Homo sapiens
accacatatctaaca

SEQ ID NO: 305087 - DNA, 15 bp, Homo sapiens
aaccacatatctaac

SEQ ID NO: 305088 - DNA, 15 bp, Homo sapiens
taaccacatatctaa

SEQ ID NO: 305089 - DNA, 15 bp, Homo sapiens
ctaaccacatatcta

SEQ ID NO: 305090 - DNA, 15 bp, Homo sapiens
gctaaccacatatct

SEQ ID NO: 305091 - DNA, 15 bp, Homo sapiens
tgctaaccacatatc

SEQ ID NO: 305092 - DNA, 15 bp, Homo sapiens
ttgctaaccacatat

SEQ ID NO: 305093 - DNA, 15 bp, Homo sapiens
tttgctaaccacata

SEQ ID NO: 305094 - DNA, 15 bp, Homo sapiens
atttgctaaccacat

SEQ ID NO: 305095 - DNA, 15 bp, Homo sapiens
tatttgctaaccaca

SEQ ID NO: 305096 - DNA, 15 bp, Homo sapiens
atatttgctaaccac

SEQ ID NO: 305097 - DNA, 15 bp, Homo sapiens
aatatttgctaacca

SEQ ID NO: 305098 - DNA, 15 bp, Homo sapiens
aaatatttgctaacc

SEQ ID NO: 305099 - DNA, 15 bp, Homo sapiens
aaaatatttgctaac

SEQ ID NO: 305100 - DNA, 15 bp, Homo sapiens
gaaaatatttgctaa

SEQ ID NO: 305101 - DNA, 15 bp, Homo sapiens
agaaaatatttgcta

SEQ ID NO: 305102 - DNA, 15 bp, Homo sapiens
gagaaaatatttgct

SEQ ID NO: 305103 - DNA, 15 bp, Homo sapiens
agagaaaatatttgc

SEQ ID NO: 305104 - DNA, 15 bp, Homo sapiens
aagagaaaatatttg

SEQ ID NO: 305105 - DNA, 15 bp, Homo sapiens
caagagaaaatattt

SEQ ID NO: 305106 - DNA, 15 bp, Homo sapiens
ccaagagaaaatatt

SEQ ID NO: 305107 - DNA, 15 bp, Homo sapiens
gccaagagaaaatat

SEQ ID NO: 305108 - DNA, 15 bp, Homo sapiens
ggccaagagaaaata

SEQ ID NO: 305109 - DNA, 15 bp, Homo sapiens
aggccaagagaaaat

SEQ ID NO: 305110 - DNA, 15 bp, Homo sapiens
caggccaagagaaaa

SEQ ID NO: 305111 - DNA, 15 bp, Homo sapiens
acaggccaagagaaa

SEQ ID NO: 305112 - DNA, 15 bp, Homo sapiens
tacaggccaagagaa

SEQ ID NO: 305113 - DNA, 15 bp, Homo sapiens
ctacaggccaagaga

SEQ ID NO: 305114 - DNA, 15 bp, Homo sapiens
gctacaggccaagag

SEQ ID NO: 305115 - DNA, 15 bp, Homo sapiens
agctacaggccaaga

SEQ ID NO: 305116 - DNA, 15 bp, Homo sapiens
aagctacaggccaag

SEQ ID NO: 305117 - DNA, 15 bp, Homo sapiens
gaagctacaggccaa

SEQ ID NO: 305118 - DNA, 15 bp, Homo sapiens
agaagctacaggcca

SEQ ID NO: 305119 - DNA, 15 bp, Homo sapiens
aagaagctacaggcc

SEQ ID NO: 305120 - DNA, 15 bp, Homo sapiens
aaagaagctacaggc

SEQ ID NO: 305121 - DNA, 15 bp, Homo sapiens
gaaagaagctacagg

SEQ ID NO: 305122 - DNA, 15 bp, Homo sapiens
agaaagaagctacag

SEQ ID NO: 305123 - DNA, 15 bp, Homo sapiens
aagaaagaagctaca

SEQ ID NO: 305124 - DNA, 15 bp, Homo sapiens
gaagaaagaagctac

SEQ ID NO: 305125 - DNA, 15 bp, Homo sapiens
tgaagaaagaagcta

SEQ ID NO: 305126 - DNA, 15 bp, Homo sapiens
atgaagaaagaagct

SEQ ID NO: 305127 - DNA, 15 bp, Homo sapiens
gatgaagaaagaagc

SEQ ID NO: 305128 - DNA, 15 bp, Homo sapiens
agatgaagaaagaag

SEQ ID NO: 305129 - DNA, 15 bp, Homo sapiens
aagatgaagaaagaa

SEQ ID NO: 305130 - DNA, 15 bp, Homo sapiens
gaagatgaagaaaga

SEQ ID NO: 305131 - DNA, 15 bp, Homo sapiens
agaagatgaagaaag

SEQ ID NO: 305132 - DNA, 15 bp, Homo sapiens
aagaagatgaagaaa

SEQ ID NO: 305133 - DNA, 15 bp, Homo sapiens
gaagaagatgaagaa

SEQ ID NO: 305134 - DNA, 15 bp, Homo sapiens
tgaagaagatgaaga

SEQ ID NO: 305135 - DNA, 15 bp, Homo sapiens
gtgaagaagatgaag

SEQ ID NO: 305136 - DNA, 15 bp, Homo sapiens
tgtgaagaagatgaa

SEQ ID NO: 305137 - DNA, 15 bp, Homo sapiens
atgtgaagaagatga

SEQ ID NO: 305138 - DNA, 15 bp, Homo sapiens
gatgtgaagaagatg

SEQ ID NO: 305139 - DNA, 15 bp, Homo sapiens
tgatgtgaagaagat

SEQ ID NO: 305140 - DNA, 15 bp, Homo sapiens
atgatgtgaagaaga

SEQ ID NO: 305141 - DNA, 15 bp, Homo sapiens
catgatgtgaagaag

SEQ ID NO: 305142 - DNA, 15 bp, Homo sapiens
acatgatgtgaagaa

SEQ ID NO: 305143 - DNA, 15 bp, Homo sapiens
aacatgatgtgaaga

SEQ ID NO: 305144 - DNA, 15 bp, Homo sapiens
aaacatgatgtgaag

SEQ ID NO: 305145 - DNA, 15 bp, Homo sapiens
gaaacatgatgtgaa

SEQ ID NO: 305146 - DNA, 15 bp, Homo sapiens
agaaacatgatgtga

SEQ ID NO: 305147 - DNA, 15 bp, Homo sapiens
gagaaacatgatgtg

SEQ ID NO: 305148 - DNA, 15 bp, Homo sapiens
tgagaaacatgatgt

SEQ ID NO: 305149 - DNA, 15 bp, Homo sapiens
atgagaaacatgatg

SEQ ID NO: 305150 - DNA, 15 bp, Homo sapiens
gatgagaaacatgat

SEQ ID NO: 305151 - DNA, 15 bp, Homo sapiens
ggatgagaaacatga

SEQ ID NO: 305152 - DNA, 15 bp, Homo sapiens
tggatgagaaacatg

SEQ ID NO: 305153 - DNA, 15 bp, Homo sapiens
ttggatgagaaacat

SEQ ID NO: 305154 - DNA, 15 bp, Homo sapiens
tttggatgagaaaca

SEQ ID NO: 305155 - DNA, 15 bp, Homo sapiens
ttttggatgagaaac

SEQ ID NO: 305156 - DNA, 15 bp, Homo sapiens
cttttggatgagaaa

SEQ ID NO: 305157 - DNA, 15 bp, Homo sapiens
acttttggatgagaa

SEQ ID NO: 305158 - DNA, 15 bp, Homo sapiens
aacttttggatgaga

SEQ ID NO: 305159 - DNA, 15 bp, Homo sapiens
aaacttttggatgag

SEQ ID NO: 305160 - DNA, 15 bp, Homo sapiens
aaaacttttggatga

SEQ ID NO: 305161 - DNA, 15 bp, Homo sapiens
aaaaacttttggatg

SEQ ID NO: 305162 - DNA, 15 bp, Homo sapiens
taaaaacttttggat

SEQ ID NO: 305163 - DNA, 15 bp, Homo sapiens
ttaaaaacttttgga

SEQ ID NO: 305164 - DNA, 15 bp, Homo sapiens
attaaaaacttttgg

SEQ ID NO: 305165 - DNA, 15 bp, Homo sapiens
aattaaaaacttttg

SEQ ID NO: 305166 - DNA, 15 bp, Homo sapiens
aaattaaaaactttt

SEQ ID NO: 305167 - DNA, 15 bp, Homo sapiens
aaaattaaaaacttt

SEQ ID NO: 305168 - DNA, 15 bp, Homo sapiens
gaaaattaaaaactt

SEQ ID NO: 305169 - DNA, 15 bp, Homo sapiens
tgaaaattaaaaact

SEQ ID NO: 305170 - DNA, 15 bp, Homo sapiens
atgaaaattaaaaac

SEQ ID NO: 305171 - DNA, 15 bp, Homo sapiens
tatgaaaattaaaaa

SEQ ID NO: 305172 - DNA, 15 bp, Homo sapiens
ttatgaaaattaaaa

SEQ ID NO: 305173 - DNA, 15 bp, Homo sapiens
tttatgaaaattaaa

SEQ ID NO: 305174 - DNA, 15 bp, Homo sapiens
ctttatgaaaattaa

SEQ ID NO: 305175 - DNA, 15 bp, Homo sapiens
actttatgaaaatta

SEQ ID NO: 305176 - DNA, 15 bp, Homo sapiens
gactttatgaaaatt

SEQ ID NO: 305177 - DNA, 15 bp, Homo sapiens
ggactttatgaaaat

SEQ ID NO: 305178 - DNA, 15 bp, Homo sapiens
tggactttatgaaaa

SEQ ID NO: 305179 - DNA, 15 bp, Homo sapiens
ctggactttatgaaa

SEQ ID NO: 305180 - DNA, 15 bp, Homo sapiens
actggactttatgaa

SEQ ID NO: 305181 - DNA, 15 bp, Homo sapiens
aactggactttatga

SEQ ID NO: 305182 - DNA, 15 bp, Homo sapiens
aaactggactttatg

SEQ ID NO: 305183 - DNA, 15 bp, Homo sapiens
taaactggactttat

SEQ ID NO: 305184 - DNA, 15 bp, Homo sapiens
ataaactggacttta

SEQ ID NO: 305185 - DNA, 15 bp, Homo sapiens
gataaactggacttt

SEQ ID NO: 305186 - DNA, 15 bp, Homo sapiens
tgataaactggactt

SEQ ID NO: 305187 - DNA, 15 bp, Homo sapiens
gtgataaactggact

SEQ ID NO: 305188 - DNA, 15 bp, Homo sapiens
agtgataaactggac

SEQ ID NO: 305189 - DNA, 15 bp, Homo sapiens
aagtgataaactgga

SEQ ID NO: 305190 - DNA, 15 bp, Homo sapiens
aaagtgataaactgg

SEQ ID NO: 305191 - DNA, 15 bp, Homo sapiens
aaaagtgataaactg

SEQ ID NO: 305192 - DNA, 15 bp, Homo sapiens
aaaaagtgataaact

SEQ ID NO: 305193 - DNA, 15 bp, Homo sapiens
gaaaaagtgataaac

SEQ ID NO: 305194 - DNA, 15 bp, Homo sapiens
ggaaaaagtgataaa

SEQ ID NO: 305195 - DNA, 15 bp, Homo sapiens
aggaaaaagtgataa

SEQ ID NO: 305196 - DNA, 15 bp, Homo sapiens
aaggaaaaagtgata

SEQ ID NO: 305197 - DNA, 15 bp, Homo sapiens
aaaggaaaaagtgat

SEQ ID NO: 305198 - DNA, 15 bp, Homo sapiens
aaaaggaaaaagtga

SEQ ID NO: 305199 - DNA, 15 bp, Homo sapiens
taaaaggaaaaagtg

SEQ ID NO: 305200 - DNA, 15 bp, Homo sapiens
ataaaaggaaaaagt

SEQ ID NO: 305201 - DNA, 15 bp, Homo sapiens
cataaaaggaaaaag

SEQ ID NO: 305202 - DNA, 15 bp, Homo sapiens
ccataaaaggaaaaa

SEQ ID NO: 305203 - DNA, 15 bp, Homo sapiens
tccataaaaggaaaa

SEQ ID NO: 305204 - DNA, 15 bp, Homo sapiens
atccataaaaggaaa

SEQ ID NO: 305205 - DNA, 15 bp, Homo sapiens
aatccataaaaggaa

SEQ ID NO: 305206 - DNA, 15 bp, Homo sapiens
taatccataaaagga

SEQ ID NO: 305207 - DNA, 15 bp, Homo sapiens
ataatccataaaagg

SEQ ID NO: 305208 - DNA, 15 bp, Homo sapiens
cataatccataaaag

SEQ ID NO: 305209 - DNA, 15 bp, Homo sapiens
gcataatccataaaa

SEQ ID NO: 305210 - DNA, 15 bp, Homo sapiens
agcataatccataaa

SEQ ID NO: 305211 - DNA, 15 bp, Homo sapiens
aagcataatccataa

SEQ ID NO: 305212 - DNA, 15 bp, Homo sapiens
aaagcataatccata

SEQ ID NO: 305213 - DNA, 15 bp, Homo sapiens
aaaagcataatccat

SEQ ID NO: 305214 - DNA, 15 bp, Homo sapiens
caaaagcataatcca

SEQ ID NO: 305215 - DNA, 15 bp, Homo sapiens
ccaaaagcataatcc

SEQ ID NO: 305216 - DNA, 15 bp, Homo sapiens
accaaaagcataatc

SEQ ID NO: 305217 - DNA, 15 bp, Homo sapiens
caccaaaagcataat

SEQ ID NO: 305218 - DNA, 15 bp, Homo sapiens
acaccaaaagcataa

SEQ ID NO: 305219 - DNA, 15 bp, Homo sapiens
gacaccaaaagcata

SEQ ID NO: 305220 - DNA, 15 bp, Homo sapiens
tgacaccaaaagcat

SEQ ID NO: 305221 - DNA, 15 bp, Homo sapiens
ttgacaccaaaagca

SEQ ID NO: 305222 - DNA, 15 bp, Homo sapiens
tttgacaccaaaagc

SEQ ID NO: 305223 - DNA, 15 bp, Homo sapiens
atttgacaccaaaag

SEQ ID NO: 305224 - DNA, 15 bp, Homo sapiens
gatttgacaccaaaa

SEQ ID NO: 305225 - DNA, 15 bp, Homo sapiens
agatttgacaccaaa

SEQ ID NO: 305226 - DNA, 15 bp, Homo sapiens
tagatttgacaccaa

SEQ ID NO: 305227 - DNA, 15 bp, Homo sapiens
ttagatttgacacca

SEQ ID NO: 305228 - DNA, 15 bp, Homo sapiens
cttagatttgacacc

SEQ ID NO: 305229 - DNA, 15 bp, Homo sapiens
tcttagatttgacac

SEQ ID NO: 305230 - DNA, 15 bp, Homo sapiens
ttcttagatttgaca

SEQ ID NO: 305231 - DNA, 15 bp, Homo sapiens
gttcttagatttgac

SEQ ID NO: 305232 - DNA, 15 bp, Homo sapiens
agttcttagatttga

SEQ ID NO: 305233 - DNA, 15 bp, Homo sapiens
gagttcttagatttg

SEQ ID NO: 305234 - DNA, 15 bp, Homo sapiens
ggagttcttagattt

SEQ ID NO: 305235 - DNA, 15 bp, Homo sapiens
tggagttcttagatt

SEQ ID NO: 305236 - DNA, 15 bp, Homo sapiens
ctggagttcttagat

SEQ ID NO: 305237 - DNA, 15 bp, Homo sapiens
tctggagttcttaga

SEQ ID NO: 305238 - DNA, 15 bp, Homo sapiens
atctggagttcttag

SEQ ID NO: 305239 - DNA, 15 bp, Homo sapiens
gatctggagttctta

SEQ ID NO: 305240 - DNA, 15 bp, Homo sapiens
ggatctggagttctt

SEQ ID NO: 305241 - DNA, 15 bp, Homo sapiens
aggatctggagttct

SEQ ID NO: 305242 - DNA, 15 bp, Homo sapiens
caggatctggagttc

SEQ ID NO: 305243 - DNA, 15 bp, Homo sapiens
tcaggatctggagtt

SEQ ID NO: 305244 - DNA, 15 bp, Homo sapiens
ttcaggatctggagt

SEQ ID NO: 305245 - DNA, 15 bp, Homo sapiens
cttcaggatctggag

SEQ ID NO: 305246 - DNA, 15 bp, Homo sapiens
tcttcaggatctgga

SEQ ID NO: 305247 - DNA, 15 bp, Homo sapiens
atcttcaggatctgg

SEQ ID NO: 305248 - DNA, 15 bp, Homo sapiens
aatcttcaggatctg

SEQ ID NO: 305249 - DNA, 15 bp, Homo sapiens
aaatcttcaggatct

SEQ ID NO: 305250 - DNA, 15 bp, Homo sapiens
aaaatcttcaggatc

SEQ ID NO: 305251 - DNA, 15 bp, Homo sapiens
gaaaatcttcaggat

SEQ ID NO: 305252 - DNA, 15 bp, Homo sapiens
ggaaaatcttcagga

SEQ ID NO: 305253 - DNA, 15 bp, Homo sapiens
gggaaaatcttcagg

SEQ ID NO: 305254 - DNA, 15 bp, Homo sapiens
agggaaaatcttcag

SEQ ID NO: 305255 - DNA, 15 bp, Homo sapiens
aagggaaaatcttca

SEQ ID NO: 305256 - DNA, 15 bp, Homo sapiens
taagggaaaatcttc

SEQ ID NO: 305257 - DNA, 15 bp, Homo sapiens
ataagggaaaatctt

SEQ ID NO: 305258 - DNA, 15 bp, Homo sapiens
tataagggaaaatct

SEQ ID NO: 305259 - DNA, 15 bp, Homo sapiens
gtataagggaaaatc

SEQ ID NO: 305260 - DNA, 15 bp, Homo sapiens
agtataagggaaaat

SEQ ID NO: 305261 - DNA, 15 bp, Homo sapiens
aagtataagggaaaa

SEQ ID NO: 305262 - DNA, 15 bp, Homo sapiens
taagtataagggaaa

SEQ ID NO: 305263 - DNA, 15 bp, Homo sapiens
ttaagtataagggaa

SEQ ID NO: 305264 - DNA, 15 bp, Homo sapiens
tttaagtataaggga

SEQ ID NO: 305265 - DNA, 15 bp, Homo sapiens
ttttaagtataaggg

SEQ ID NO: 305266 - DNA, 15 bp, Homo sapiens
tttttaagtataagg

SEQ ID NO: 305267 - DNA, 15 bp, Homo sapiens
ttttttaagtataag

SEQ ID NO: 305268 - DNA, 15 bp, Homo sapiens
attttttaagtataa

SEQ ID NO: 305269 - DNA, 15 bp, Homo sapiens
aattttttaagtata

SEQ ID NO: 305270 - DNA, 15 bp, Homo sapiens
taattttttaagtat

SEQ ID NO: 305271 - DNA, 15 bp, Homo sapiens
ataattttttaagta

SEQ ID NO: 305272 - DNA, 15 bp, Homo sapiens
tataattttttaagt

SEQ ID NO: 305273 - DNA, 15 bp, Homo sapiens
ctataattttttaag

SEQ ID NO: 305274 - DNA, 15 bp, Homo sapiens
actataattttttaa

SEQ ID NO: 305275 - DNA, 15 bp, Homo sapiens
aactataatttttta

SEQ ID NO: 305276 - DNA, 15 bp, Homo sapiens
aaactataatttttt

SEQ ID NO: 305277 - DNA, 15 bp, Homo sapiens
gaaactataattttt

SEQ ID NO: 305278 - DNA, 15 bp, Homo sapiens
tgaaactataatttt

SEQ ID NO: 305279 - DNA, 15 bp, Homo sapiens
gtgaaactataattt

SEQ ID NO: 305280 - DNA, 15 bp, Homo sapiens
tgtgaaactataatt

SEQ ID NO: 305281 - DNA, 15 bp, Homo sapiens
atgtgaaactataat

SEQ ID NO: 305282 - DNA, 15 bp, Homo sapiens
aatgtgaaactataa

SEQ ID NO: 305283 - DNA, 15 bp, Homo sapiens
aaatgtgaaactata

SEQ ID NO: 305284 - DNA, 15 bp, Homo sapiens
aaaatgtgaaactat

SEQ ID NO: 305285 - DNA, 15 bp, Homo sapiens
taaaatgtgaaacta

SEQ ID NO: 305286 - DNA, 15 bp, Homo sapiens
ttaaaatgtgaaact

SEQ ID NO: 305287 - DNA, 15 bp, Homo sapiens
cttaaaatgtgaaac

SEQ ID NO: 305288 - DNA, 15 bp, Homo sapiens
acttaaaatgtgaaa

SEQ ID NO: 305289 - DNA, 15 bp, Homo sapiens
gacttaaaatgtgaa

SEQ ID NO: 305290 - DNA, 15 bp, Homo sapiens
ggacttaaaatgtga

SEQ ID NO: 305291 - DNA, 15 bp, Homo sapiens
tggacttaaaatgtg

SEQ ID NO: 305292 - DNA, 15 bp, Homo sapiens
atggacttaaaatgt

SEQ ID NO: 305293 - DNA, 15 bp, Homo sapiens
catggacttaaaatg

SEQ ID NO: 305294 - DNA, 15 bp, Homo sapiens
tcatggacttaaaat

SEQ ID NO: 305295 - DNA, 15 bp, Homo sapiens
atcatggacttaaaa

SEQ ID NO: 305296 - DNA, 15 bp, Homo sapiens
gatcatggacttaaa

SEQ ID NO: 305297 - DNA, 15 bp, Homo sapiens
ggatcatggacttaa

SEQ ID NO: 305298 - DNA, 15 bp, Homo sapiens
tggatcatggactta

SEQ ID NO: 305299 - DNA, 15 bp, Homo sapiens
atggatcatggactt

SEQ ID NO: 305300 - DNA, 15 bp, Homo sapiens
aatggatcatggact

SEQ ID NO: 305301 - DNA, 15 bp, Homo sapiens
aaatggatcatggac

SEQ ID NO: 305302 - DNA, 15 bp, Homo sapiens
aaaatggatcatgga

SEQ ID NO: 305303 - DNA, 15 bp, Homo sapiens
taaaatggatcatgg

SEQ ID NO: 305304 - DNA, 15 bp, Homo sapiens
ttaaaatggatcatg

SEQ ID NO: 305305 - DNA, 15 bp, Homo sapiens
cttaaaatggatcat

SEQ ID NO: 305306 - DNA, 15 bp, Homo sapiens
acttaaaatggatca

SEQ ID NO: 305307 - DNA, 15 bp, Homo sapiens
aacttaaaatggatc

SEQ ID NO: 305308 - DNA, 15 bp, Homo sapiens
aaacttaaaatggat

SEQ ID NO: 305309 - DNA, 15 bp, Homo sapiens
taaacttaaaatgga

SEQ ID NO: 305310 - DNA, 15 bp, Homo sapiens
ataaacttaaaatgg

SEQ ID NO: 305311 - DNA, 15 bp, Homo sapiens
aataaacttaaaatg

SEQ ID NO: 305312 - DNA, 15 bp, Homo sapiens
aaataaacttaaaat

SEQ ID NO: 305313 - DNA, 15 bp, Homo sapiens
aaaataaacttaaaa

SEQ ID NO: 305314 - DNA, 15 bp, Homo sapiens
aaaaataaacttaaa

SEQ ID NO: 305315 - DNA, 15 bp, Homo sapiens
caaaaataaacttaa

SEQ ID NO: 305316 - DNA, 15 bp, Homo sapiens
acaaaaataaactta

SEQ ID NO: 305317 - DNA, 15 bp, Homo sapiens
tacaaaaataaactt

SEQ ID NO: 305318 - DNA, 15 bp, Homo sapiens
gtacaaaaataaact

SEQ ID NO: 305319 - DNA, 15 bp, Homo sapiens
tgtacaaaaataaac

SEQ ID NO: 305320 - DNA, 15 bp, Homo sapiens
ttgtacaaaaataaa

SEQ ID NO: 305321 - DNA, 15 bp, Homo sapiens
tttgtacaaaaataa

SEQ ID NO: 305322 - DNA, 15 bp, Homo sapiens
ctttgtacaaaaata

SEQ ID NO: 305323 - DNA, 15 bp, Homo sapiens
actttgtacaaaaat

SEQ ID NO: 305324 - DNA, 15 bp, Homo sapiens
aactttgtacaaaaa

SEQ ID NO: 305325 - DNA, 15 bp, Homo sapiens
aaactttgtacaaaa

SEQ ID NO: 305326 - DNA, 15 bp, Homo sapiens
caaactttgtacaaa

SEQ ID NO: 305327 - DNA, 15 bp, Homo sapiens
tcaaactttgtacaa

SEQ ID NO: 305328 - DNA, 15 bp, Homo sapiens
ctcaaactttgtaca

SEQ ID NO: 305329 - DNA, 15 bp, Homo sapiens
tctcaaactttgtac

SEQ ID NO: 305330 - DNA, 15 bp, Homo sapiens
atctcaaactttgta

SEQ ID NO: 305331 - DNA, 15 bp, Homo sapiens
aatctcaaactttgt

SEQ ID NO: 305332 - DNA, 15 bp, Homo sapiens
aaatctcaaactttg

SEQ ID NO: 305333 - DNA, 15 bp, Homo sapiens
caaatctcaaacttt

SEQ ID NO: 305334 - DNA, 15 bp, Homo sapiens
ccaaatctcaaactt

SEQ ID NO: 305335 - DNA, 15 bp, Homo sapiens
cccaaatctcaaact

SEQ ID NO: 305336 - DNA, 15 bp, Homo sapiens
acccaaatctcaaac

SEQ ID NO: 305337 - DNA, 15 bp, Homo sapiens
aacccaaatctcaaa

SEQ ID NO: 305338 - DNA, 15 bp, Homo sapiens
caacccaaatctcaa

SEQ ID NO: 305339 - DNA, 15 bp, Homo sapiens
tcaacccaaatctca

SEQ ID NO: 305340 - DNA, 15 bp, Homo sapiens
ctcaacccaaatctc

SEQ ID NO: 305341 - DNA, 15 bp, Homo sapiens
cctcaacccaaatct

SEQ ID NO: 305342 - DNA, 15 bp, Homo sapiens
acctcaacccaaatc

SEQ ID NO: 305343 - DNA, 15 bp, Homo sapiens
aacctcaacccaaat

SEQ ID NO: 305344 - DNA, 15 bp, Homo sapiens
aaacctcaacccaaa

SEQ ID NO: 305345 - DNA, 15 bp, Homo sapiens
aaaacctcaacccaa

SEQ ID NO: 305346 - DNA, 15 bp, Homo sapiens
aaaaacctcaaccca

SEQ ID NO: 305347 - DNA, 15 bp, Homo sapiens
aaaaaacctcaaccc

SEQ ID NO: 305348 - DNA, 15 bp, Homo sapiens
aaaaaaacctcaacc

SEQ ID NO: 305349 - DNA, 15 bp, Homo sapiens
taaaaaaacctcaac

SEQ ID NO: 305350 - DNA, 15 bp, Homo sapiens
ctaaaaaaacctcaa

SEQ ID NO: 305351 - DNA, 15 bp, Homo sapiens
cctaaaaaaacctca

SEQ ID NO: 305352 - DNA, 15 bp, Homo sapiens
ccctaaaaaaacctc

SEQ ID NO: 305353 - DNA, 15 bp, Homo sapiens
cccctaaaaaaacct

SEQ ID NO: 305354 - DNA, 15 bp, Homo sapiens
ccccctaaaaaaacc

SEQ ID NO: 305355 - DNA, 15 bp, Homo sapiens
accccctaaaaaaac

SEQ ID NO: 305356 - DNA, 15 bp, Homo sapiens
caccccctaaaaaaa

SEQ ID NO: 305357 - DNA, 15 bp, Homo sapiens
gcaccccctaaaaaa

SEQ ID NO: 305358 - DNA, 15 bp, Homo sapiens
agcaccccctaaaaa

SEQ ID NO: 305359 - DNA, 15 bp, Homo sapiens
cagcaccccctaaaa

SEQ ID NO: 305360 - DNA, 15 bp, Homo sapiens
tcagcaccccctaaa

SEQ ID NO: 305361 - DNA, 15 bp, Homo sapiens
ctcagcaccccctaa

SEQ ID NO: 305362 - DNA, 15 bp, Homo sapiens
actcagcacccccta

SEQ ID NO: 305363 - DNA, 15 bp, Homo sapiens
aactcagcaccccct

SEQ ID NO: 305364 - DNA, 15 bp, Homo sapiens
caactcagcaccccc

SEQ ID NO: 305365 - DNA, 15 bp, Homo sapiens
ccaactcagcacccc

SEQ ID NO: 305366 - DNA, 15 bp, Homo sapiens
cccaactcagcaccc

SEQ ID NO: 305367 - DNA, 15 bp, Homo sapiens
gcccaactcagcacc

SEQ ID NO: 305368 - DNA, 15 bp, Homo sapiens
tgcccaactcagcac

SEQ ID NO: 305369 - DNA, 15 bp, Homo sapiens
gtgcccaactcagca

SEQ ID NO: 305370 - DNA, 15 bp, Homo sapiens
ggtgcccaactcagc

SEQ ID NO: 305371 - DNA, 15 bp, Homo sapiens
tggtgcccaactcag

SEQ ID NO: 305372 - DNA, 15 bp, Homo sapiens
atggtgcccaactca

SEQ ID NO: 305373 - DNA, 15 bp, Homo sapiens
catggtgcccaactc

SEQ ID NO: 305374 - DNA, 15 bp, Homo sapiens
ccatggtgcccaact

SEQ ID NO: 305375 - DNA, 15 bp, Homo sapiens
tccatggtgcccaac

SEQ ID NO: 305376 - DNA, 15 bp, Homo sapiens
atccatggtgcccaa

SEQ ID NO: 305377 - DNA, 15 bp, Homo sapiens
catccatggtgccca

SEQ ID NO: 305378 - DNA, 15 bp, Homo sapiens
acatccatggtgccc

SEQ ID NO: 305379 - DNA, 15 bp, Homo sapiens
aacatccatggtgcc

SEQ ID NO: 305380 - DNA, 15 bp, Homo sapiens
gaacatccatggtgc

SEQ ID NO: 305381 - DNA, 15 bp, Homo sapiens
tgaacatccatggtg

SEQ ID NO: 305382 - DNA, 15 bp, Homo sapiens
ctgaacatccatggt

SEQ ID NO: 305383 - DNA, 15 bp, Homo sapiens
actgaacatccatgg

SEQ ID NO: 305384 - DNA, 15 bp, Homo sapiens
aactgaacatccatg

SEQ ID NO: 305385 - DNA, 15 bp, Homo sapiens
caactgaacatccat

SEQ ID NO: 305386 - DNA, 15 bp, Homo sapiens
acaactgaacatcca

SEQ ID NO: 305387 - DNA, 15 bp, Homo sapiens
aacaactgaacatcc

SEQ ID NO: 305388 - DNA, 15 bp, Homo sapiens
aaacaactgaacatc

SEQ ID NO: 305389 - DNA, 15 bp, Homo sapiens
gaaacaactgaacat

SEQ ID NO: 305390 - DNA, 15 bp, Homo sapiens
tgaaacaactgaaca

SEQ ID NO: 305391 - DNA, 15 bp, Homo sapiens
ctgaaacaactgaac

SEQ ID NO: 305392 - DNA, 15 bp, Homo sapiens
gctgaaacaactgaa

SEQ ID NO: 305393 - DNA, 15 bp, Homo sapiens
tgctgaaacaactga

SEQ ID NO: 305394 - DNA, 15 bp, Homo sapiens
gtgctgaaacaactg

SEQ ID NO: 305395 - DNA, 15 bp, Homo sapiens
ggtgctgaaacaact

SEQ ID NO: 305396 - DNA, 15 bp, Homo sapiens
tggtgctgaaacaac

SEQ ID NO: 305397 - DNA, 15 bp, Homo sapiens
atggtgctgaaacaa

SEQ ID NO: 305398 - DNA, 15 bp, Homo sapiens
aatggtgctgaaaca

SEQ ID NO: 305399 - DNA, 15 bp, Homo sapiens
aaatggtgctgaaac

SEQ ID NO: 305400 - DNA, 15 bp, Homo sapiens
taaatggtgctgaaa

SEQ ID NO: 305401 - DNA, 15 bp, Homo sapiens
ataaatggtgctgaa

SEQ ID NO: 305402 - DNA, 15 bp, Homo sapiens
aataaatggtgctga

SEQ ID NO: 305403 - DNA, 15 bp, Homo sapiens
aaataaatggtgctg

SEQ ID NO: 305404 - DNA, 15 bp, Homo sapiens
aaaataaatggtgct

SEQ ID NO: 305405 - DNA, 15 bp, Homo sapiens
taaaataaatggtgc

SEQ ID NO: 305406 - DNA, 15 bp, Homo sapiens
ttaaaataaatggtg

SEQ ID NO: 305407 - DNA, 15 bp, Homo sapiens
tttaaaataaatggt

SEQ ID NO: 305408 - DNA, 15 bp, Homo sapiens
ctttaaaataaatgg

SEQ ID NO: 305409 - DNA, 15 bp, Homo sapiens
cctttaaaataaatg

SEQ ID NO: 305410 - DNA, 15 bp, Homo sapiens
gcctttaaaataaat

SEQ ID NO: 305411 - DNA, 15 bp, Homo sapiens
agcctttaaaataaa

SEQ ID NO: 305412 - DNA, 15 bp, Homo sapiens
tagcctttaaaataa

SEQ ID NO: 305413 - DNA, 15 bp, Homo sapiens
atagcctttaaaata

SEQ ID NO: 305414 - DNA, 15 bp, Homo sapiens
gatagcctttaaaat

SEQ ID NO: 305415 - DNA, 15 bp, Homo sapiens
ggatagcctttaaaa

SEQ ID NO: 305416 - DNA, 15 bp, Homo sapiens
aggatagcctttaaa

SEQ ID NO: 305417 - DNA, 15 bp, Homo sapiens
aaggatagcctttaa

SEQ ID NO: 305418 - DNA, 15 bp, Homo sapiens
aaaggatagccttta

SEQ ID NO: 305419 - DNA, 15 bp, Homo sapiens
aaaaggatagccttt

SEQ ID NO: 305420 - DNA, 15 bp, Homo sapiens
aaaaaggatagcctt

SEQ ID NO: 305421 - DNA, 15 bp, Homo sapiens
gaaaaaggatagcct

SEQ ID NO: 305422 - DNA, 15 bp, Homo sapiens
agaaaaaggatagcc

SEQ ID NO: 305423 - DNA, 15 bp, Homo sapiens
tagaaaaaggatagc

SEQ ID NO: 305424 - DNA, 15 bp, Homo sapiens
atagaaaaaggatag

SEQ ID NO: 305425 - DNA, 15 bp, Homo sapiens
aatagaaaaaggata

SEQ ID NO: 305426 - DNA, 15 bp, Homo sapiens
caatagaaaaaggat

SEQ ID NO: 305427 - DNA, 15 bp, Homo sapiens
tcaatagaaaaagga

SEQ ID NO: 305428 - DNA, 15 bp, Homo sapiens
atcaatagaaaaagg

SEQ ID NO: 305429 - DNA, 15 bp, Homo sapiens
aaatcaatagaaaaa

SEQ ID NO: 305430 - DNA, 15 bp, Homo sapiens
caaatcaatagaaaa

SEQ ID NO: 305431 - DNA, 15 bp, Homo sapiens
gcaaatcaatagaaa

SEQ ID NO: 305432 - DNA, 15 bp, Homo sapiens
agcaaatcaatagaa

SEQ ID NO: 305433 - DNA, 15 bp, Homo sapiens
aagcaaatcaataga

SEQ ID NO: 305434 - DNA, 15 bp, Homo sapiens
aaagcaaatcaatag

SEQ ID NO: 305435 - DNA, 15 bp, Homo sapiens
aaaagcaaatcaata

SEQ ID NO: 305436 - DNA, 15 bp, Homo sapiens
caaaagcaaatcaat

SEQ ID NO: 305437 - DNA, 15 bp, Homo sapiens
acaaaagcaaatcaa

SEQ ID NO: 305438 - DNA, 15 bp, Homo sapiens
tacaaaagcaaatca

SEQ ID NO: 305439 - DNA, 15 bp, Homo sapiens
atacaaaagcaaatc

SEQ ID NO: 305440 - DNA, 15 bp, Homo sapiens
gatacaaaagcaaat

SEQ ID NO: 305441 - DNA, 15 bp, Homo sapiens
agatacaaaagcaaa

SEQ ID NO: 305442 - DNA, 15 bp, Homo sapiens
aagatacaaaagcaa

SEQ ID NO: 305443 - DNA, 15 bp, Homo sapiens
aaagatacaaaagca

SEQ ID NO: 305444 - DNA, 15 bp, Homo sapiens
caaagatacaaaagc

SEQ ID NO: 305445 - DNA, 15 bp, Homo sapiens
acaaagatacaaaag

SEQ ID NO: 305446 - DNA, 15 bp, Homo sapiens
gacaaagatacaaaa

SEQ ID NO: 305447 - DNA, 15 bp, Homo sapiens
tgacaaagatacaaa

SEQ ID NO: 305448 - DNA, 15 bp, Homo sapiens
ttgacaaagatacaa

SEQ ID NO: 305449 - DNA, 15 bp, Homo sapiens
tttgacaaagataca

SEQ ID NO: 305450 - DNA, 15 bp, Homo sapiens
ttttgacaaagatac

SEQ ID NO: 305451 - DNA, 15 bp, Homo sapiens
tttttgacaaagata

SEQ ID NO: 305452 - DNA, 15 bp, Homo sapiens
ctttttgacaaagat

SEQ ID NO: 305453 - DNA, 15 bp, Homo sapiens
cctttttgacaaaga

SEQ ID NO: 305454 - DNA, 15 bp, Homo sapiens
ccctttttgacaaag

SEQ ID NO: 305455 - DNA, 15 bp, Homo sapiens
tccctttttgacaaa

SEQ ID NO: 305456 - DNA, 15 bp, Homo sapiens
ttccctttttgacaa

SEQ ID NO: 305457 - DNA, 15 bp, Homo sapiens
gttccctttttgaca

SEQ ID NO: 305458 - DNA, 15 bp, Homo sapiens
tgttccctttttgac

SEQ ID NO: 305459 - DNA, 15 bp, Homo sapiens
ttgttccctttttga

SEQ ID NO: 305460 - DNA, 15 bp, Homo sapiens
tttgttccctttttg

SEQ ID NO: 305461 - DNA, 15 bp, Homo sapiens
ctttgttcccttttt

SEQ ID NO: 305462 - DNA, 15 bp, Homo sapiens
tctttgttccctttt

SEQ ID NO: 305463 - DNA, 15 bp, Homo sapiens
ttctttgttcccttt

SEQ ID NO: 305464 - DNA, 15 bp, Homo sapiens
tttctttgttccctt

SEQ ID NO: 305465 - DNA, 15 bp, Homo sapiens
ttttctttgttccct

SEQ ID NO: 305466 - DNA, 15 bp, Homo sapiens
cttttctttgttccc

SEQ ID NO: 305467 - DNA, 15 bp, Homo sapiens
tcttttctttgttcc

SEQ ID NO: 305468 - DNA, 15 bp, Homo sapiens
atcttttctttgttc

SEQ ID NO: 305469 - DNA, 15 bp, Homo sapiens
catcttttctttgtt

SEQ ID NO: 305470 - DNA, 15 bp, Homo sapiens
tcatcttttctttgt

SEQ ID NO: 305471 - DNA, 15 bp, Homo sapiens
ctcatcttttctttg

SEQ ID NO: 305472 - DNA, 15 bp, Homo sapiens
tctcatcttttcttt

SEQ ID NO: 305473 - DNA, 15 bp, Homo sapiens
gtctcatcttttctt

SEQ ID NO: 305474 - DNA, 15 bp, Homo sapiens
tgtctcatcttttct

SEQ ID NO: 305475 - DNA, 15 bp, Homo sapiens
ttgtctcatcttttc

SEQ ID NO: 305476 - DNA, 15 bp, Homo sapiens
tttgtctcatctttt

SEQ ID NO: 305477 - DNA, 15 bp, Homo sapiens
atttgtctcatcttt

SEQ ID NO: 305478 - DNA, 15 bp, Homo sapiens
tatttgtctcatctt

SEQ ID NO: 305479 - DNA, 15 bp, Homo sapiens
ctatttgtctcatct

SEQ ID NO: 305480 - DNA, 15 bp, Homo sapiens
tctatttgtctcatc

SEQ ID NO: 305481 - DNA, 15 bp, Homo sapiens
atctatttgtctcat

SEQ ID NO: 305482 - DNA, 15 bp, Homo sapiens
catctatttgtctca

SEQ ID NO: 305483 - DNA, 15 bp, Homo sapiens
acatctatttgtctc

SEQ ID NO: 305484 - DNA, 15 bp, Homo sapiens
tacatctatttgtct

SEQ ID NO: 305485 - DNA, 15 bp, Homo sapiens
ctacatctatttgtc

SEQ ID NO: 305486 - DNA, 15 bp, Homo sapiens
tctacatctatttgt

SEQ ID NO: 305487 - DNA, 15 bp, Homo sapiens
ttctacatctatttg

SEQ ID NO: 305488 - DNA, 15 bp, Homo sapiens
attctacatctattt

SEQ ID NO: 305489 - DNA, 15 bp, Homo sapiens
aattctacatctatt

SEQ ID NO: 305490 - DNA, 15 bp, Homo sapiens
aaattctacatctat

SEQ ID NO: 305491 - DNA, 15 bp, Homo sapiens
taaattctacatcta

SEQ ID NO: 305492 - DNA, 15 bp, Homo sapiens
ttaaattctacatct

SEQ ID NO: 305493 - DNA, 15 bp, Homo sapiens
tttaaattctacatc

SEQ ID NO: 305494 - DNA, 15 bp, Homo sapiens
gtttaaattctacat

SEQ ID NO: 305495 - DNA, 15 bp, Homo sapiens
agtttaaattctaca

SEQ ID NO: 305496 - DNA, 15 bp, Homo sapiens
tagtttaaattctac

SEQ ID NO: 305497 - DNA, 15 bp, Homo sapiens
ttagtttaaattcta

SEQ ID NO: 305498 - DNA, 15 bp, Homo sapiens
attagtttaaattct

SEQ ID NO: 305499 - DNA, 15 bp, Homo sapiens
aattagtttaaattc

SEQ ID NO: 305500 - DNA, 15 bp, Homo sapiens
taattagtttaaatt

SEQ ID NO: 305501 - DNA, 15 bp, Homo sapiens
ataattagtttaaat

SEQ ID NO: 305502 - DNA, 15 bp, Homo sapiens
tataattagtttaaa

SEQ ID NO: 305503 - DNA, 15 bp, Homo sapiens
atataattagtttaa

SEQ ID NO: 305504 - DNA, 15 bp, Homo sapiens
aatataattagttta

SEQ ID NO: 305505 - DNA, 15 bp, Homo sapiens
taatataattagttt

SEQ ID NO: 305506 - DNA, 15 bp, Homo sapiens
ttaatataattagtt

SEQ ID NO: 305507 - DNA, 15 bp, Homo sapiens
attaatataattagt

SEQ ID NO: 305508 - DNA, 15 bp, Homo sapiens
tattaatataattag

SEQ ID NO: 305509 - DNA, 15 bp, Homo sapiens
ttattaatataatta

SEQ ID NO: 305510 - DNA, 15 bp, Homo sapiens
attattaatataatt

SEQ ID NO: 305511 - DNA, 15 bp, Homo sapiens
aattattaatataat

SEQ ID NO: 305512 - DNA, 15 bp, Homo sapiens
caattattaatataa

SEQ ID NO: 305513 - DNA, 15 bp, Homo sapiens
gcaattattaatata

SEQ ID NO: 305514 - DNA, 15 bp, Homo sapiens
tgcaattattaatat

SEQ ID NO: 305515 - DNA, 15 bp, Homo sapiens
atgcaattattaata

SEQ ID NO: 305516 - DNA, 15 bp, Homo sapiens
aatgcaattattaat

SEQ ID NO: 305517 - DNA, 15 bp, Homo sapiens
taatgcaattattaa

SEQ ID NO: 305518 - DNA, 15 bp, Homo sapiens
ttaatgcaattatta

SEQ ID NO: 305519 - DNA, 15 bp, Homo sapiens
tttaatgcaattatt

SEQ ID NO: 305520 - DNA, 15 bp, Homo sapiens
atttaatgcaattat

SEQ ID NO: 305521 - DNA, 15 bp, Homo sapiens
catttaatgcaatta

SEQ ID NO: 305522 - DNA, 15 bp, Homo sapiens
acatttaatgcaatt

SEQ ID NO: 305523 - DNA, 15 bp, Homo sapiens
gacatttaatgcaat

SEQ ID NO: 305524 - DNA, 15 bp, Homo sapiens
tgacatttaatgcaa

SEQ ID NO: 305525 - DNA, 15 bp, Homo sapiens
ctgacatttaatgca

SEQ ID NO: 305526 - DNA, 15 bp, Homo sapiens
actgacatttaatgc

SEQ ID NO: 305527 - DNA, 15 bp, Homo sapiens
cactgacatttaatg

SEQ ID NO: 305528 - DNA, 15 bp, Homo sapiens
gcactgacatttaat

SEQ ID NO: 305529 - DNA, 15 bp, Homo sapiens
agcactgacatttaa

SEQ ID NO: 305530 - DNA, 15 bp, Homo sapiens
gagcactgacattta

SEQ ID NO: 305531 - DNA, 15 bp, Homo sapiens
agagcactgacattt

SEQ ID NO: 305532 - DNA, 15 bp, Homo sapiens
tagagcactgacatt

SEQ ID NO: 305533 - DNA, 15 bp, Homo sapiens
ttagagcactgacat

SEQ ID NO: 305534 - DNA, 15 bp, Homo sapiens
cttagagcactgaca

SEQ ID NO: 305535 - DNA, 15 bp, Homo sapiens
gcttagagcactgac

SEQ ID NO: 305536 - DNA, 15 bp, Homo sapiens
tgcttagagcactga

SEQ ID NO: 305537 - DNA, 15 bp, Homo sapiens
ctgcttagagcactg

SEQ ID NO: 305538 - DNA, 15 bp, Homo sapiens
gctgcttagagcact

SEQ ID NO: 305539 - DNA, 15 bp, Homo sapiens
ggctgcttagagcac

SEQ ID NO: 305540 - DNA, 15 bp, Homo sapiens
gggctgcttagagca

SEQ ID NO: 305541 - DNA, 15 bp, Homo sapiens
tgggctgcttagagc

SEQ ID NO: 305542 - DNA, 15 bp, Homo sapiens
ttgggctgcttagag

SEQ ID NO: 305543 - DNA, 15 bp, Homo sapiens
attgggctgcttaga

SEQ ID NO: 305544 - DNA, 15 bp, Homo sapiens
aattgggctgcttag

SEQ ID NO: 305545 - DNA, 15 bp, Homo sapiens
taattgggctgctta

SEQ ID NO: 305546 - DNA, 15 bp, Homo sapiens
ttaattgggctgctt

SEQ ID NO: 305547 - DNA, 15 bp, Homo sapiens
tttaattgggctgct

SEQ ID NO: 305548 - DNA, 15 bp, Homo sapiens
ttttaattgggctgc

SEQ ID NO: 305549 - DNA, 15 bp, Homo sapiens
cttttaattgggctg

SEQ ID NO: 305550 - DNA, 15 bp, Homo sapiens
ccttttaattgggct

SEQ ID NO: 305551 - DNA, 15 bp, Homo sapiens
gccttttaattgggc

SEQ ID NO: 305552 - DNA, 15 bp, Homo sapiens
tgccttttaattggg

SEQ ID NO: 305553 - DNA, 15 bp, Homo sapiens
ctgccttttaattgg

SEQ ID NO: 305554 - DNA, 15 bp, Homo sapiens
tctgccttttaattg

SEQ ID NO: 305555 - DNA, 15 bp, Homo sapiens
ctctgccttttaatt

SEQ ID NO: 305556 - DNA, 15 bp, Homo sapiens
tctctgccttttaat

SEQ ID NO: 305557 - DNA, 15 bp, Homo sapiens
atctctgccttttaa

SEQ ID NO: 305558 - DNA, 15 bp, Homo sapiens
aatctctgcctttta

SEQ ID NO: 305559 - DNA, 15 bp, Homo sapiens
taatctctgcctttt

SEQ ID NO: 305560 - DNA, 15 bp, Homo sapiens
ataatctctgccttt

SEQ ID NO: 305561 - DNA, 15 bp, Homo sapiens
gataatctctgcctt

SEQ ID NO: 305562 - DNA, 15 bp, Homo sapiens
tgataatctctgcct

SEQ ID NO: 305563 - DNA, 15 bp, Homo sapiens
ctgataatctctgcc

SEQ ID NO: 305564 - DNA, 15 bp, Homo sapiens
tctgataatctctgc

SEQ ID NO: 305565 - DNA, 15 bp, Homo sapiens
ctctgataatctctg

SEQ ID NO: 305566 - DNA, 15 bp, Homo sapiens
actctgataatctct

SEQ ID NO: 305567 - DNA, 15 bp, Homo sapiens
cactctgataatctc

SEQ ID NO: 305568 - DNA, 15 bp, Homo sapiens
ccactctgataatct

SEQ ID NO: 305569 - DNA, 15 bp, Homo sapiens
tccactctgataatc

SEQ ID NO: 305570 - DNA, 15 bp, Homo sapiens
atccactctgataat

SEQ ID NO: 305571 - DNA, 15 bp, Homo sapiens
catccactctgataa

SEQ ID NO: 305572 - DNA, 15 bp, Homo sapiens
tcatccactctgata

SEQ ID NO: 305573 - DNA, 15 bp, Homo sapiens
ttcatccactctgat

SEQ ID NO: 305574 - DNA, 15 bp, Homo sapiens
tttcatccactctga

SEQ ID NO: 305575 - DNA, 15 bp, Homo sapiens
ttttcatccactctg

SEQ ID NO: 305576 - DNA, 15 bp, Homo sapiens
tttttcatccactct

SEQ ID NO: 305577 - DNA, 15 bp, Homo sapiens
gtttttcatccactc

SEQ ID NO: 305578 - DNA, 15 bp, Homo sapiens
tgtttttcatccact

SEQ ID NO: 305579 - DNA, 15 bp, Homo sapiens
ttgtttttcatccac

SEQ ID NO: 305580 - DNA, 15 bp, Homo sapiens
tttgtttttcatcca

SEQ ID NO: 305581 - DNA, 15 bp, Homo sapiens
ttttgtttttcatcc

SEQ ID NO: 305582 - DNA, 15 bp, Homo sapiens
gttttgtttttcatc

SEQ ID NO: 305583 - DNA, 15 bp, Homo sapiens
ggttttgtttttcat

SEQ ID NO: 305584 - DNA, 15 bp, Homo sapiens
gggttttgtttttca

SEQ ID NO: 305585 - DNA, 15 bp, Homo sapiens
tgggttttgtttttc

SEQ ID NO: 305586 - DNA, 15 bp, Homo sapiens
ttgggttttgttttt

SEQ ID NO: 305587 - DNA, 15 bp, Homo sapiens
gttgggttttgtttt

SEQ ID NO: 305588 - DNA, 15 bp, Homo sapiens
agttgggttttgttt

SEQ ID NO: 305589 - DNA, 15 bp, Homo sapiens
gagttgggttttgtt

SEQ ID NO: 305590 - DNA, 15 bp, Homo sapiens
agagttgggttttgt

SEQ ID NO: 305591 - DNA, 15 bp, Homo sapiens
tagagttgggttttg

SEQ ID NO: 305592 - DNA, 15 bp, Homo sapiens
atagagttgggtttt

SEQ ID NO: 305593 - DNA, 15 bp, Homo sapiens
catagagttgggttt

SEQ ID NO: 305594 - DNA, 15 bp, Homo sapiens
gcatagagttgggtt

SEQ ID NO: 305595 - DNA, 15 bp, Homo sapiens
agcatagagttgggt

SEQ ID NO: 305596 - DNA, 15 bp, Homo sapiens
tagcatagagttggg

SEQ ID NO: 305597 - DNA, 15 bp, Homo sapiens
atagcatagagttgg

SEQ ID NO: 305598 - DNA, 15 bp, Homo sapiens
gatagcatagagttg

SEQ ID NO: 305599 - DNA, 15 bp, Homo sapiens
agatagcatagagtt

SEQ ID NO: 305600 - DNA, 15 bp, Homo sapiens
tagatagcatagagt

SEQ ID NO: 305601 - DNA, 15 bp, Homo sapiens
ttagatagcatagag

SEQ ID NO: 305602 - DNA, 15 bp, Homo sapiens
tttagatagcataga

SEQ ID NO: 305603 - DNA, 15 bp, Homo sapiens
ttttagatagcatag

SEQ ID NO: 305604 - DNA, 15 bp, Homo sapiens
cttttagatagcata

SEQ ID NO: 305605 - DNA, 15 bp, Homo sapiens
tcttttagatagcat

SEQ ID NO: 305606 - DNA, 15 bp, Homo sapiens
ttcttttagatagca

SEQ ID NO: 305607 - DNA, 15 bp, Homo sapiens
tttcttttagatagc

SEQ ID NO: 305608 - DNA, 15 bp, Homo sapiens
atttcttttagatag

SEQ ID NO: 305609 - DNA, 15 bp, Homo sapiens
gatttcttttagata

SEQ ID NO: 305610 - DNA, 15 bp, Homo sapiens
agatttcttttagat

SEQ ID NO: 305611 - DNA, 15 bp, Homo sapiens
tagatttcttttaga

SEQ ID NO: 305612 - DNA, 15 bp, Homo sapiens
atagatttcttttag

SEQ ID NO: 305613 - DNA, 15 bp, Homo sapiens
aatagatttctttta

SEQ ID NO: 305614 - DNA, 15 bp, Homo sapiens
caatagatttctttt

SEQ ID NO: 305615 - DNA, 15 bp, Homo sapiens
acaatagatttcttt

SEQ ID NO: 305616 - DNA, 15 bp, Homo sapiens
tacaatagatttctt

SEQ ID NO: 305617 - DNA, 15 bp, Homo sapiens
ttacaatagatttct

SEQ ID NO: 305618 - DNA, 15 bp, Homo sapiens
tttacaatagatttc

SEQ ID NO: 305619 - DNA, 15 bp, Homo sapiens
atttacaatagattt

SEQ ID NO: 305620 - DNA, 15 bp, Homo sapiens
tatttacaatagatt

SEQ ID NO: 305621 - DNA, 15 bp, Homo sapiens
atatttacaatagat

SEQ ID NO: 305622 - DNA, 15 bp, Homo sapiens
tatatttacaataga

SEQ ID NO: 305623 - DNA, 15 bp, Homo sapiens
ttatatttacaatag

SEQ ID NO: 305624 - DNA, 15 bp, Homo sapiens
tttatatttacaata

SEQ ID NO: 305625 - DNA, 15 bp, Homo sapiens
ctttatatttacaat

SEQ ID NO: 305626 - DNA, 15 bp, Homo sapiens
tctttatatttacaa

SEQ ID NO: 305627 - DNA, 15 bp, Homo sapiens
gtctttatatttaca

SEQ ID NO: 305628 - DNA, 15 bp, Homo sapiens
tgtctttatatttac

SEQ ID NO: 305629 - DNA, 15 bp, Homo sapiens
gtgtctttatattta

SEQ ID NO: 305630 - DNA, 15 bp, Homo sapiens
cgtgtctttatattt

SEQ ID NO: 305631 - DNA, 15 bp, Homo sapiens
tcgtgtctttatatt

SEQ ID NO: 305632 - DNA, 15 bp, Homo sapiens
ttcgtgtctttatat

SEQ ID NO: 305633 - DNA, 15 bp, Homo sapiens
attcgtgtctttata

SEQ ID NO: 305634 - DNA, 15 bp, Homo sapiens
tattcgtgtctttat

SEQ ID NO: 305635 - DNA, 15 bp, Homo sapiens
atattcgtgtcttta

SEQ ID NO: 305636 - DNA, 15 bp, Homo sapiens
catattcgtgtcttt

SEQ ID NO: 305637 - DNA, 15 bp, Homo sapiens
acatattcgtgtctt

SEQ ID NO: 305638 - DNA, 15 bp, Homo sapiens
aacatattcgtgtct

SEQ ID NO: 305639 - DNA, 15 bp, Homo sapiens
taacatattcgtgtc

SEQ ID NO: 305640 - DNA, 15 bp, Homo sapiens
ttaacatattcgtgt

SEQ ID NO: 305641 - DNA, 15 bp, Homo sapiens
tttaacatattcgtg

SEQ ID NO: 305642 - DNA, 15 bp, Homo sapiens
ttttaacatattcgt

SEQ ID NO: 305643 - DNA, 15 bp, Homo sapiens
cttttaacatattcg

SEQ ID NO: 305644 - DNA, 15 bp, Homo sapiens
ccttttaacatattc

SEQ ID NO: 305645 - DNA, 15 bp, Homo sapiens
tccttttaacatatt

SEQ ID NO: 305646 - DNA, 15 bp, Homo sapiens
atccttttaacatat

SEQ ID NO: 305647 - DNA, 15 bp, Homo sapiens
catccttttaacata

SEQ ID NO: 305648 - DNA, 15 bp, Homo sapiens
tcatccttttaacat

SEQ ID NO: 305649 - DNA, 15 bp, Homo sapiens
ttcatccttttaaca

SEQ ID NO: 305650 - DNA, 15 bp, Homo sapiens
attcatccttttaac

SEQ ID NO: 305651 - DNA, 15 bp, Homo sapiens
cattcatccttttaa

SEQ ID NO: 305652 - DNA, 15 bp, Homo sapiens
tcattcatcctttta

SEQ ID NO: 305653 - DNA, 15 bp, Homo sapiens
ttcattcatcctttt

SEQ ID NO: 305654 - DNA, 15 bp, Homo sapiens
tttcattcatccttt

SEQ ID NO: 305655 - DNA, 15 bp, Homo sapiens
ttttcattcatcctt

SEQ ID NO: 305656 - DNA, 15 bp, Homo sapiens
cttttcattcatcct

SEQ ID NO: 305657 - DNA, 15 bp, Homo sapiens
tcttttcattcatcc

SEQ ID NO: 305658 - DNA, 15 bp, Homo sapiens
atcttttcattcatc

SEQ ID NO: 305659 - DNA, 15 bp, Homo sapiens
aatcttttcattcat

SEQ ID NO: 305660 - DNA, 15 bp, Homo sapiens
taatcttttcattca

SEQ ID NO: 305661 - DNA, 15 bp, Homo sapiens
ctaatcttttcattc

SEQ ID NO: 305662 - DNA, 15 bp, Homo sapiens
cctaatcttttcatt

SEQ ID NO: 305663 - DNA, 15 bp, Homo sapiens
acctaatcttttcat

SEQ ID NO: 305664 - DNA, 15 bp, Homo sapiens
gacctaatcttttca

SEQ ID NO: 305665 - DNA, 15 bp, Homo sapiens
ggacctaatcttttc

SEQ ID NO: 305666 - DNA, 15 bp, Homo sapiens
aggacctaatctttt

SEQ ID NO: 305667 - DNA, 15 bp, Homo sapiens
caggacctaatcttt

SEQ ID NO: 305668 - DNA, 15 bp, Homo sapiens
ccaggacctaatctt

SEQ ID NO: 305669 - DNA, 15 bp, Homo sapiens
tccaggacctaatct

SEQ ID NO: 305670 - DNA, 15 bp, Homo sapiens
atccaggacctaatc

SEQ ID NO: 305671 - DNA, 15 bp, Homo sapiens
catccaggacctaat

SEQ ID NO: 305672 - DNA, 15 bp, Homo sapiens
ccatccaggacctaa

SEQ ID NO: 305673 - DNA, 15 bp, Homo sapiens
tccatccaggaccta

SEQ ID NO: 305674 - DNA, 15 bp, Homo sapiens
ttccatccaggacct

SEQ ID NO: 305675 - DNA, 15 bp, Homo sapiens
gttccatccaggacc

SEQ ID NO: 305676 - DNA, 15 bp, Homo sapiens
agttccatccaggac

SEQ ID NO: 305677 - DNA, 15 bp, Homo sapiens
cagttccatccagga

SEQ ID NO: 305678 - DNA, 15 bp, Homo sapiens
tcagttccatccagg

SEQ ID NO: 305679 - DNA, 15 bp, Homo sapiens
ctcagttccatccag

SEQ ID NO: 305680 - DNA, 15 bp, Homo sapiens
cctcagttccatcca

SEQ ID NO: 305681 - DNA, 15 bp, Homo sapiens
acctcagttccatcc

SEQ ID NO: 305682 - DNA, 15 bp, Homo sapiens
aacctcagttccatc

SEQ ID NO: 305683 - DNA, 15 bp, Homo sapiens
taacctcagttccat

SEQ ID NO: 305684 - DNA, 15 bp, Homo sapiens
ttaacctcagttcca

SEQ ID NO: 305685 - DNA, 15 bp, Homo sapiens
gttaacctcagttcc

SEQ ID NO: 305686 - DNA, 15 bp, Homo sapiens
agttaacctcagttc

SEQ ID NO: 305687 - DNA, 15 bp, Homo sapiens
cagttaacctcagtt

SEQ ID NO: 305688 - DNA, 15 bp, Homo sapiens
tcagttaacctcagt

SEQ ID NO: 305689 - DNA, 15 bp, Homo sapiens
ctcagttaacctcag

SEQ ID NO: 305690 - DNA, 15 bp, Homo sapiens
cctcagttaacctca

SEQ ID NO: 305691 - DNA, 15 bp, Homo sapiens
tcctcagttaacctc

SEQ ID NO: 305692 - DNA, 15 bp, Homo sapiens
atcctcagttaacct

SEQ ID NO: 305693 - DNA, 15 bp, Homo sapiens
tatcctcagttaacc

SEQ ID NO: 305694 - DNA, 15 bp, Homo sapiens
ttatcctcagttaac

SEQ ID NO: 305695 - DNA, 15 bp, Homo sapiens
attatcctcagttaa

SEQ ID NO: 305696 - DNA, 15 bp, Homo sapiens
aattatcctcagtta

SEQ ID NO: 305697 - DNA, 15 bp, Homo sapiens
aaattatcctcagtt

SEQ ID NO: 305698 - DNA, 15 bp, Homo sapiens
aaaattatcctcagt

SEQ ID NO: 305699 - DNA, 15 bp, Homo sapiens
taaaattatcctcag

SEQ ID NO: 305700 - DNA, 15 bp, Homo sapiens
ttaaaattatcctca

SEQ ID NO: 305701 - DNA, 15 bp, Homo sapiens
cttaaaattatcctc

SEQ ID NO: 305702 - DNA, 15 bp, Homo sapiens
tcttaaaattatcct

SEQ ID NO: 305703 - DNA, 15 bp, Homo sapiens
atcttaaaattatcc

SEQ ID NO: 305704 - DNA, 15 bp, Homo sapiens
aatcttaaaattatc

SEQ ID NO: 305705 - DNA, 15 bp, Homo sapiens
aaatcttaaaattat

SEQ ID NO: 305706 - DNA, 15 bp, Homo sapiens
caaatcttaaaatta

SEQ ID NO: 305707 - DNA, 15 bp, Homo sapiens
acaaatcttaaaatt

SEQ ID NO: 305708 - DNA, 15 bp, Homo sapiens
tacaaatcttaaaat

SEQ ID NO: 305709 - DNA, 15 bp, Homo sapiens
gtacaaatcttaaaa

SEQ ID NO: 305710 - DNA, 15 bp, Homo sapiens
agtacaaatcttaaa

SEQ ID NO: 305711 - DNA, 15 bp, Homo sapiens
tagtacaaatcttaa

SEQ ID NO: 305712 - DNA, 15 bp, Homo sapiens
atagtacaaatctta

SEQ ID NO: 305713 - DNA, 15 bp, Homo sapiens
catagtacaaatctt

SEQ ID NO: 305714 - DNA, 15 bp, Homo sapiens
ccatagtacaaatct

SEQ ID NO: 305715 - DNA, 15 bp, Homo sapiens
cccatagtacaaatc

SEQ ID NO: 305716 - DNA, 15 bp, Homo sapiens
acccatagtacaaat

SEQ ID NO: 305717 - DNA, 15 bp, Homo sapiens
cacccatagtacaaa

SEQ ID NO: 305718 - DNA, 15 bp, Homo sapiens
tcacccatagtacaa

SEQ ID NO: 305719 - DNA, 15 bp, Homo sapiens
atcacccatagtaca

SEQ ID NO: 305720 - DNA, 15 bp, Homo sapiens
aatcacccatagtac

SEQ ID NO: 305721 - DNA, 15 bp, Homo sapiens
taatcacccatagta

SEQ ID NO: 305722 - DNA, 15 bp, Homo sapiens
ctaatcacccatagt

SEQ ID NO: 305723 - DNA, 15 bp, Homo sapiens
cctaatcacccatag

SEQ ID NO: 305724 - DNA, 15 bp, Homo sapiens
acctaatcacccata

SEQ ID NO: 305725 - DNA, 15 bp, Homo sapiens
cacctaatcacccat

SEQ ID NO: 305726 - DNA, 15 bp, Homo sapiens
ccacctaatcaccca

SEQ ID NO: 305727 - DNA, 15 bp, Homo sapiens
accacctaatcaccc

SEQ ID NO: 305728 - DNA, 15 bp, Homo sapiens
aaccacctaatcacc

SEQ ID NO: 305729 - DNA, 15 bp, Homo sapiens
caaccacctaatcac

SEQ ID NO: 305730 - DNA, 15 bp, Homo sapiens
tcaaccacctaatca

SEQ ID NO: 305731 - DNA, 15 bp, Homo sapiens
atcaaccacctaatc

SEQ ID NO: 305732 - DNA, 15 bp, Homo sapiens
tatcaaccacctaat

SEQ ID NO: 305733 - DNA, 15 bp, Homo sapiens
ttatcaaccacctaa

SEQ ID NO: 305734 - DNA, 15 bp, Homo sapiens
gttatcaaccaccta

SEQ ID NO: 305735 - DNA, 15 bp, Homo sapiens
tgttatcaaccacct

SEQ ID NO: 305736 - DNA, 15 bp, Homo sapiens
gtgttatcaaccacc

SEQ ID NO: 305737 - DNA, 15 bp, Homo sapiens
tgtgttatcaaccac

SEQ ID NO: 305738 - DNA, 15 bp, Homo sapiens
ttgtgttatcaacca

SEQ ID NO: 305739 - DNA, 15 bp, Homo sapiens
attgtgttatcaacc

SEQ ID NO: 305740 - DNA, 15 bp, Homo sapiens
aattgtgttatcaac

SEQ ID NO: 305741 - DNA, 15 bp, Homo sapiens
taattgtgttatcaa

SEQ ID NO: 305742 - DNA, 15 bp, Homo sapiens
ttaattgtgttatca

SEQ ID NO: 305743 - DNA, 15 bp, Homo sapiens
gttaattgtgttatc

SEQ ID NO: 305744 - DNA, 15 bp, Homo sapiens
ggttaattgtgttat

SEQ ID NO: 305745 - DNA, 15 bp, Homo sapiens
tggttaattgtgtta

SEQ ID NO: 305746 - DNA, 15 bp, Homo sapiens
ttggttaattgtgtt

SEQ ID NO: 305747 - DNA, 15 bp, Homo sapiens
tttggttaattgtgt

SEQ ID NO: 305748 - DNA, 15 bp, Homo sapiens
ctttggttaattgtg

SEQ ID NO: 305749 - DNA, 15 bp, Homo sapiens
actttggttaattgt

SEQ ID NO: 305750 - DNA, 15 bp, Homo sapiens
tactttggttaattg

SEQ ID NO: 305751 - DNA, 15 bp, Homo sapiens
ctactttggttaatt

SEQ ID NO: 305752 - DNA, 15 bp, Homo sapiens
cctactttggttaat

SEQ ID NO: 305753 - DNA, 15 bp, Homo sapiens
acctactttggttaa

SEQ ID NO: 305754 - DNA, 15 bp, Homo sapiens
tacctactttggtta

SEQ ID NO: 305755 - DNA, 15 bp, Homo sapiens
atacctactttggtt

SEQ ID NO: 305756 - DNA, 15 bp, Homo sapiens
aatacctactttggt

SEQ ID NO: 305757 - DNA, 15 bp, Homo sapiens
caatacctactttgg

SEQ ID NO: 305758 - DNA, 15 bp, Homo sapiens
tcaatacctactttg

SEQ ID NO: 305759 - DNA, 15 bp, Homo sapiens
ttcaatacctacttt

SEQ ID NO: 305760 - DNA, 15 bp, Homo sapiens
tttcaatacctactt

SEQ ID NO: 305761 - DNA, 15 bp, Homo sapiens
ctttcaatacctact

SEQ ID NO: 305762 - DNA, 15 bp, Homo sapiens
tctttcaatacctac

SEQ ID NO: 305763 - DNA, 15 bp, Homo sapiens
gtctttcaataccta

SEQ ID NO: 305764 - DNA, 15 bp, Homo sapiens
ggtctttcaatacct

SEQ ID NO: 305765 - DNA, 15 bp, Homo sapiens
tggtctttcaatacc

SEQ ID NO: 305766 - DNA, 15 bp, Homo sapiens
atggtctttcaatac

SEQ ID NO: 305767 - DNA, 15 bp, Homo sapiens
gatggtctttcaata

SEQ ID NO: 305768 - DNA, 15 bp, Homo sapiens
agatggtctttcaat

SEQ ID NO: 305769 - DNA, 15 bp, Homo sapiens
gagatggtctttcaa

SEQ ID NO: 305770 - DNA, 15 bp, Homo sapiens
tgagatggtctttca

SEQ ID NO: 305771 - DNA, 15 bp, Homo sapiens
atgagatggtctttc

SEQ ID NO: 305772 - DNA, 15 bp, Homo sapiens
tatgagatggtcttt

SEQ ID NO: 305773 - DNA, 15 bp, Homo sapiens
ctatgagatggtctt

SEQ ID NO: 305774 - DNA, 15 bp, Homo sapiens
gctatgagatggtct

SEQ ID NO: 305775 - DNA, 15 bp, Homo sapiens
agctatgagatggtc

SEQ ID NO: 305776 - DNA, 15 bp, Homo sapiens
cagctatgagatggt

SEQ ID NO: 305777 - DNA, 15 bp, Homo sapiens
ccagctatgagatgg

SEQ ID NO: 305778 - DNA, 15 bp, Homo sapiens
accagctatgagatg

SEQ ID NO: 305779 - DNA, 15 bp, Homo sapiens
aaccagctatgagat

SEQ ID NO: 305780 - DNA, 15 bp, Homo sapiens
caaccagctatgaga

SEQ ID NO: 305781 - DNA, 15 bp, Homo sapiens
ccaaccagctatgag

SEQ ID NO: 305782 - DNA, 15 bp, Homo sapiens
accaaccagctatga

SEQ ID NO: 305783 - DNA, 15 bp, Homo sapiens
caccaaccagctatg

SEQ ID NO: 305784 - DNA, 15 bp, Homo sapiens
tcaccaaccagctat

SEQ ID NO: 305785 - DNA, 15 bp, Homo sapiens
atcaccaaccagcta

SEQ ID NO: 305786 - DNA, 15 bp, Homo sapiens
catcaccaaccagct

SEQ ID NO: 305787 - DNA, 15 bp, Homo sapiens
tcatcaccaaccagc

SEQ ID NO: 305788 - DNA, 15 bp, Homo sapiens
ttcatcaccaaccag

SEQ ID NO: 305789 - DNA, 15 bp, Homo sapiens
cttcatcaccaacca

SEQ ID NO: 305790 - DNA, 15 bp, Homo sapiens
ccttcatcaccaacc

SEQ ID NO: 305791 - DNA, 15 bp, Homo sapiens
tccttcatcaccaac

SEQ ID NO: 305792 - DNA, 15 bp, Homo sapiens
ttccttcatcaccaa

SEQ ID NO: 305793 - DNA, 15 bp, Homo sapiens
tttccttcatcacca

SEQ ID NO: 305794 - DNA, 15 bp, Homo sapiens
atttccttcatcacc

SEQ ID NO: 305795 - DNA, 15 bp, Homo sapiens
catttccttcatcac

SEQ ID NO: 305796 - DNA, 15 bp, Homo sapiens
tcatttccttcatca

SEQ ID NO: 305797 - DNA, 15 bp, Homo sapiens
ctcatttccttcatc

SEQ ID NO: 305798 - DNA, 15 bp, Homo sapiens
actcatttccttcat

SEQ ID NO: 305799 - DNA, 15 bp, Homo sapiens
aactcatttccttca

SEQ ID NO: 305800 - DNA, 15 bp, Homo sapiens
gaactcatttccttc

SEQ ID NO: 305801 - DNA, 15 bp, Homo sapiens
tgaactcatttcctt

SEQ ID NO: 305802 - DNA, 15 bp, Homo sapiens
atgaactcatttcct

SEQ ID NO: 305803 - DNA, 15 bp, Homo sapiens
catgaactcatttcc

SEQ ID NO: 305804 - DNA, 15 bp, Homo sapiens
acatgaactcatttc

SEQ ID NO: 305805 - DNA, 15 bp, Homo sapiens
aacatgaactcattt

SEQ ID NO: 305806 - DNA, 15 bp, Homo sapiens
taacatgaactcatt

SEQ ID NO: 305807 - DNA, 15 bp, Homo sapiens
ttaacatgaactcat

SEQ ID NO: 305808 - DNA, 15 bp, Homo sapiens
attaacatgaactca

SEQ ID NO: 305809 - DNA, 15 bp, Homo sapiens
cattaacatgaactc

SEQ ID NO: 305810 - DNA, 15 bp, Homo sapiens
acattaacatgaact

SEQ ID NO: 305811 - DNA, 15 bp, Homo sapiens
aacattaacatgaac

SEQ ID NO: 305812 - DNA, 15 bp, Homo sapiens
aaacattaacatgaa

SEQ ID NO: 305813 - DNA, 15 bp, Homo sapiens
caaacattaacatga

SEQ ID NO: 305814 - DNA, 15 bp, Homo sapiens
tcaaacattaacatg

SEQ ID NO: 305815 - DNA, 15 bp, Homo sapiens
ttcaaacattaacat

SEQ ID NO: 305816 - DNA, 15 bp, Homo sapiens
gttcaaacattaaca

SEQ ID NO: 305817 - DNA, 15 bp, Homo sapiens
ggttcaaacattaac

SEQ ID NO: 305818 - DNA, 15 bp, Homo sapiens
aggttcaaacattaa

SEQ ID NO: 305819 - DNA, 15 bp, Homo sapiens
taggttcaaacatta

SEQ ID NO: 305820 - DNA, 15 bp, Homo sapiens
ataggttcaaacatt

SEQ ID NO: 305821 - DNA, 15 bp, Homo sapiens
aataggttcaaacat

SEQ ID NO: 305822 - DNA, 15 bp, Homo sapiens
taataggttcaaaca

SEQ ID NO: 305823 - DNA, 15 bp, Homo sapiens
ataataggttcaaac

SEQ ID NO: 305824 - DNA, 15 bp, Homo sapiens
tataataggttcaaa

SEQ ID NO: 305825 - DNA, 15 bp, Homo sapiens
atataataggttcaa

SEQ ID NO: 305826 - DNA, 15 bp, Homo sapiens
aatataataggttca

SEQ ID NO: 305827 - DNA, 15 bp, Homo sapiens
aaatataataggttc

SEQ ID NO: 305828 - DNA, 15 bp, Homo sapiens
caaatataataggtt

SEQ ID NO: 305829 - DNA, 15 bp, Homo sapiens
tcaaatataataggt

SEQ ID NO: 305830 - DNA, 15 bp, Homo sapiens
ctcaaatataatagg

SEQ ID NO: 305831 - DNA, 15 bp, Homo sapiens
tctcaaatataatag

SEQ ID NO: 305832 - DNA, 15 bp, Homo sapiens
atctcaaatataata

SEQ ID NO: 305833 - DNA, 15 bp, Homo sapiens
catctcaaatataat

SEQ ID NO: 305834 - DNA, 15 bp, Homo sapiens
acatctcaaatataa

SEQ ID NO: 305835 - DNA, 15 bp, Homo sapiens
aacatctcaaatata

SEQ ID NO: 305836 - DNA, 15 bp, Homo sapiens
aaacatctcaaatat

SEQ ID NO: 305837 - DNA, 15 bp, Homo sapiens
caaacatctcaaata

SEQ ID NO: 305838 - DNA, 15 bp, Homo sapiens
gcaaacatctcaaat

SEQ ID NO: 305839 - DNA, 15 bp, Homo sapiens
ggcaaacatctcaaa

SEQ ID NO: 305840 - DNA, 15 bp, Homo sapiens
tggcaaacatctcaa

SEQ ID NO: 305841 - DNA, 15 bp, Homo sapiens
gtggcaaacatctca

SEQ ID NO: 305842 - DNA, 15 bp, Homo sapiens
tgtggcaaacatctc

SEQ ID NO: 305843 - DNA, 15 bp, Homo sapiens
atgtggcaaacatct

SEQ ID NO: 305844 - DNA, 15 bp, Homo sapiens
tatgtggcaaacatc

SEQ ID NO: 305845 - DNA, 15 bp, Homo sapiens
atatgtggcaaacat

SEQ ID NO: 305846 - DNA, 15 bp, Homo sapiens
aatatgtggcaaaca

SEQ ID NO: 305847 - DNA, 15 bp, Homo sapiens
gaatatgtggcaaac

SEQ ID NO: 305848 - DNA, 15 bp, Homo sapiens
tgaatatgtggcaaa

SEQ ID NO: 305849 - DNA, 15 bp, Homo sapiens
atgaatatgtggcaa

SEQ ID NO: 305850 - DNA, 15 bp, Homo sapiens
catgaatatgtggca

SEQ ID NO: 305851 - DNA, 15 bp, Homo sapiens
acatgaatatgtggc

SEQ ID NO: 305852 - DNA, 15 bp, Homo sapiens
cacatgaatatgtgg

SEQ ID NO: 305853 - DNA, 15 bp, Homo sapiens
ccacatgaatatgtg

SEQ ID NO: 305854 - DNA, 15 bp, Homo sapiens
tccacatgaatatgt

SEQ ID NO: 305855 - DNA, 15 bp, Homo sapiens
atccacatgaatatg

SEQ ID NO: 305856 - DNA, 15 bp, Homo sapiens
tatccacatgaatat

SEQ ID NO: 305857 - DNA, 15 bp, Homo sapiens
atatccacatgaata

SEQ ID NO: 305858 - DNA, 15 bp, Homo sapiens
gatatccacatgaat

SEQ ID NO: 305859 - DNA, 15 bp, Homo sapiens
agatatccacatgaa

SEQ ID NO: 305860 - DNA, 15 bp, Homo sapiens
aagatatccacatga

SEQ ID NO: 305861 - DNA, 15 bp, Homo sapiens
aaagatatccacatg

SEQ ID NO: 305862 - DNA, 15 bp, Homo sapiens
caaagatatccacat

SEQ ID NO: 305863 - DNA, 15 bp, Homo sapiens
ccaaagatatccaca

SEQ ID NO: 305864 - DNA, 15 bp, Homo sapiens
accaaagatatccac

SEQ ID NO: 305865 - DNA, 15 bp, Homo sapiens
caccaaagatatcca

SEQ ID NO: 305866 - DNA, 15 bp, Homo sapiens
acaccaaagatatcc

SEQ ID NO: 305867 - DNA, 15 bp, Homo sapiens
gacaccaaagatatc

SEQ ID NO: 305868 - DNA, 15 bp, Homo sapiens
ggacaccaaagatat

SEQ ID NO: 305869 - DNA, 15 bp, Homo sapiens
tggacaccaaagata

SEQ ID NO: 305870 - DNA, 15 bp, Homo sapiens
ctggacaccaaagat

SEQ ID NO: 305871 - DNA, 15 bp, Homo sapiens
actggacaccaaaga

SEQ ID NO: 305872 - DNA, 15 bp, Homo sapiens
aactggacaccaaag

SEQ ID NO: 305873 - DNA, 15 bp, Homo sapiens
caactggacaccaaa

SEQ ID NO: 305874 - DNA, 15 bp, Homo sapiens
ccaactggacaccaa

SEQ ID NO: 305875 - DNA, 15 bp, Homo sapiens
tccaactggacacca

SEQ ID NO: 305876 - DNA, 15 bp, Homo sapiens
ttccaactggacacc

SEQ ID NO: 305877 - DNA, 15 bp, Homo sapiens
tttccaactggacac

SEQ ID NO: 305878 - DNA, 15 bp, Homo sapiens
atttccaactggaca

SEQ ID NO: 305879 - DNA, 15 bp, Homo sapiens
tatttccaactggac

SEQ ID NO: 305880 - DNA, 15 bp, Homo sapiens
atatttccaactgga

SEQ ID NO: 305881 - DNA, 15 bp, Homo sapiens
catatttccaactgg

SEQ ID NO: 305882 - DNA, 15 bp, Homo sapiens
ccatatttccaactg

SEQ ID NO: 305883 - DNA, 15 bp, Homo sapiens
tccatatttccaact

SEQ ID NO: 305884 - DNA, 15 bp, Homo sapiens
atccatatttccaac

SEQ ID NO: 305885 - DNA, 15 bp, Homo sapiens
gatccatatttccaa

SEQ ID NO: 305886 - DNA, 15 bp, Homo sapiens
agatccatatttcca

SEQ ID NO: 305887 - DNA, 15 bp, Homo sapiens
tagatccatatttcc

SEQ ID NO: 305888 - DNA, 15 bp, Homo sapiens
ctagatccatatttc

SEQ ID NO: 305889 - DNA, 15 bp, Homo sapiens
tctagatccatattt

SEQ ID NO: 305890 - DNA, 15 bp, Homo sapiens
ttctagatccatatt

SEQ ID NO: 305891 - DNA, 15 bp, Homo sapiens
gttctagatccatat

SEQ ID NO: 305892 - DNA, 15 bp, Homo sapiens
agttctagatccata

SEQ ID NO: 305893 - DNA, 15 bp, Homo sapiens
aagttctagatccat

SEQ ID NO: 305894 - DNA, 15 bp, Homo sapiens
caagttctagatcca

SEQ ID NO: 305895 - DNA, 15 bp, Homo sapiens
tcaagttctagatcc

SEQ ID NO: 305896 - DNA, 15 bp, Homo sapiens
ttcaagttctagatc

SEQ ID NO: 305897 - DNA, 15 bp, Homo sapiens
tttcaagttctagat

SEQ ID NO: 305898 - DNA, 15 bp, Homo sapiens
ctttcaagttctaga

SEQ ID NO: 305899 - DNA, 15 bp, Homo sapiens
gctttcaagttctag

SEQ ID NO: 305900 - DNA, 15 bp, Homo sapiens
tgctttcaagttcta

SEQ ID NO: 305901 - DNA, 15 bp, Homo sapiens
atgctttcaagttct

SEQ ID NO: 305902 - DNA, 15 bp, Homo sapiens
tatgctttcaagttc

SEQ ID NO: 305903 - DNA, 15 bp, Homo sapiens
ctatgctttcaagtt

SEQ ID NO: 305904 - DNA, 15 bp, Homo sapiens
actatgctttcaagt

SEQ ID NO: 305905 - DNA, 15 bp, Homo sapiens
aactatgctttcaag

SEQ ID NO: 305906 - DNA, 15 bp, Homo sapiens
aaactatgctttcaa

SEQ ID NO: 305907 - DNA, 15 bp, Homo sapiens
aaaactatgctttca

SEQ ID NO: 305908 - DNA, 15 bp, Homo sapiens
taaaactatgctttc

SEQ ID NO: 305909 - DNA, 15 bp, Homo sapiens
ctaaaactatgcttt

SEQ ID NO: 305910 - DNA, 15 bp, Homo sapiens
actaaaactatgctt

SEQ ID NO: 305911 - DNA, 15 bp, Homo sapiens
gactaaaactatgct

SEQ ID NO: 305912 - DNA, 15 bp, Homo sapiens
tgactaaaactatgc

SEQ ID NO: 305913 - DNA, 15 bp, Homo sapiens
ctgactaaaactatg

SEQ ID NO: 305914 - DNA, 15 bp, Homo sapiens
tctgactaaaactat

SEQ ID NO: 305915 - DNA, 15 bp, Homo sapiens
ttctgactaaaacta

SEQ ID NO: 305916 - DNA, 15 bp, Homo sapiens
tttctgactaaaact

SEQ ID NO: 305917 - DNA, 15 bp, Homo sapiens
atttctgactaaaac

SEQ ID NO: 305918 - DNA, 15 bp, Homo sapiens
catttctgactaaaa

SEQ ID NO: 305919 - DNA, 15 bp, Homo sapiens
acatttctgactaaa

SEQ ID NO: 305920 - DNA, 15 bp, Homo sapiens
tacatttctgactaa

SEQ ID NO: 305921 - DNA, 15 bp, Homo sapiens
ctacatttctgacta

SEQ ID NO: 305922 - DNA, 15 bp, Homo sapiens
tctacatttctgact

SEQ ID NO: 305923 - DNA, 15 bp, Homo sapiens
gtctacatttctgac

SEQ ID NO: 305924 - DNA, 15 bp, Homo sapiens
agtctacatttctga

SEQ ID NO: 305925 - DNA, 15 bp, Homo sapiens
aagtctacatttctg

SEQ ID NO: 305926 - DNA, 15 bp, Homo sapiens
taagtctacatttct

SEQ ID NO: 305927 - DNA, 15 bp, Homo sapiens
ctaagtctacatttc

SEQ ID NO: 305928 - DNA, 15 bp, Homo sapiens
cctaagtctacattt

SEQ ID NO: 305929 - DNA, 15 bp, Homo sapiens
tcctaagtctacatt

SEQ ID NO: 305930 - DNA, 15 bp, Homo sapiens
ttcctaagtctacat

SEQ ID NO: 305931 - DNA, 15 bp, Homo sapiens
attcctaagtctaca

SEQ ID NO: 305932 - DNA, 15 bp, Homo sapiens
tattcctaagtctac

SEQ ID NO: 305933 - DNA, 15 bp, Homo sapiens
ttattcctaagtcta

SEQ ID NO: 305934 - DNA, 15 bp, Homo sapiens
attattcctaagtct

SEQ ID NO: 305935 - DNA, 15 bp, Homo sapiens
tattattcctaagtc

SEQ ID NO: 305936 - DNA, 15 bp, Homo sapiens
atattattcctaagt

SEQ ID NO: 305937 - DNA, 15 bp, Homo sapiens
tatattattcctaag

SEQ ID NO: 305938 - DNA, 15 bp, Homo sapiens
ctatattattcctaa

SEQ ID NO: 305939 - DNA, 15 bp, Homo sapiens
tctatattattccta

SEQ ID NO: 305940 - DNA, 15 bp, Homo sapiens
atctatattattcct

SEQ ID NO: 305941 - DNA, 15 bp, Homo sapiens
tatctatattattcc

SEQ ID NO: 305942 - DNA, 15 bp, Homo sapiens
atatctatattattc

SEQ ID NO: 305943 - DNA, 15 bp, Homo sapiens
tatatctatattatt

SEQ ID NO: 305944 - DNA, 15 bp, Homo sapiens
ctatatctatattat

SEQ ID NO: 305945 - DNA, 15 bp, Homo sapiens
actatatctatatta

SEQ ID NO: 305946 - DNA, 15 bp, Homo sapiens
aactatatctatatt

SEQ ID NO: 305947 - DNA, 15 bp, Homo sapiens
taactatatctatat

SEQ ID NO: 305948 - DNA, 15 bp, Homo sapiens
ttaactatatctata

SEQ ID NO: 305949 - DNA, 15 bp, Homo sapiens
tttaactatatctat

SEQ ID NO: 305950 - DNA, 15 bp, Homo sapiens
ttttaactatatcta

SEQ ID NO: 305951 - DNA, 15 bp, Homo sapiens
attttaactatatct

SEQ ID NO: 305952 - DNA, 15 bp, Homo sapiens
gattttaactatatc

SEQ ID NO: 305953 - DNA, 15 bp, Homo sapiens
tgattttaactatat

SEQ ID NO: 305954 - DNA, 15 bp, Homo sapiens
atgattttaactata

SEQ ID NO: 305955 - DNA, 15 bp, Homo sapiens
catgattttaactat

SEQ ID NO: 305956 - DNA, 15 bp, Homo sapiens
tcatgattttaacta

SEQ ID NO: 305957 - DNA, 15 bp, Homo sapiens
ctcatgattttaact

SEQ ID NO: 305958 - DNA, 15 bp, Homo sapiens
cctcatgattttaac

SEQ ID NO: 305959 - DNA, 15 bp, Homo sapiens
gcctcatgattttaa

SEQ ID NO: 305960 - DNA, 15 bp, Homo sapiens
ggcctcatgatttta

SEQ ID NO: 305961 - DNA, 15 bp, Homo sapiens
tggcctcatgatttt

SEQ ID NO: 305962 - DNA, 15 bp, Homo sapiens
ttggcctcatgattt

SEQ ID NO: 305963 - DNA, 15 bp, Homo sapiens
attggcctcatgatt

SEQ ID NO: 305964 - DNA, 15 bp, Homo sapiens
aattggcctcatgat

SEQ ID NO: 305965 - DNA, 15 bp, Homo sapiens
caattggcctcatga

SEQ ID NO: 305966 - DNA, 15 bp, Homo sapiens
gcaattggcctcatg

SEQ ID NO: 305967 - DNA, 15 bp, Homo sapiens
agcaattggcctcat

SEQ ID NO: 305968 - DNA, 15 bp, Homo sapiens
cagcaattggcctca

SEQ ID NO: 305969 - DNA, 15 bp, Homo sapiens
acagcaattggcctc

SEQ ID NO: 305970 - DNA, 15 bp, Homo sapiens
cacagcaattggcct

SEQ ID NO: 305971 - DNA, 15 bp, Homo sapiens
ccacagcaattggcc

SEQ ID NO: 305972 - DNA, 15 bp, Homo sapiens
gccacagcaattggc

SEQ ID NO: 305973 - DNA, 15 bp, Homo sapiens
agccacagcaattgg

SEQ ID NO: 305974 - DNA, 15 bp, Homo sapiens
gagccacagcaattg

SEQ ID NO: 305975 - DNA, 15 bp, Homo sapiens
tgagccacagcaatt

SEQ ID NO: 305976 - DNA, 15 bp, Homo sapiens
atgagccacagcaat

SEQ ID NO: 305977 - DNA, 15 bp, Homo sapiens
catgagccacagcaa

SEQ ID NO: 305978 - DNA, 15 bp, Homo sapiens
gcatgagccacagca

SEQ ID NO: 305979 - DNA, 15 bp, Homo sapiens
agcatgagccacagc

SEQ ID NO: 305980 - DNA, 15 bp, Homo sapiens
aagcatgagccacag

SEQ ID NO: 305981 - DNA, 15 bp, Homo sapiens
caagcatgagccaca

SEQ ID NO: 305982 - DNA, 15 bp, Homo sapiens
acaagcatgagccac

SEQ ID NO: 305983 - DNA, 15 bp, Homo sapiens
tacaagcatgagcca

SEQ ID NO: 305984 - DNA, 15 bp, Homo sapiens
ttacaagcatgagcc

SEQ ID NO: 305985 - DNA, 15 bp, Homo sapiens
attacaagcatgagc

SEQ ID NO: 305986 - DNA, 15 bp, Homo sapiens
gattacaagcatgag

SEQ ID NO: 305987 - DNA, 15 bp, Homo sapiens
agattacaagcatga

SEQ ID NO: 305988 - DNA, 15 bp, Homo sapiens
gagattacaagcatg

SEQ ID NO: 305989 - DNA, 15 bp, Homo sapiens
tgagattacaagcat

SEQ ID NO: 305990 - DNA, 15 bp, Homo sapiens
ctgagattacaagca

SEQ ID NO: 305991 - DNA, 15 bp, Homo sapiens
gctgagattacaagc

SEQ ID NO: 305992 - DNA, 15 bp, Homo sapiens
tgctgagattacaag

SEQ ID NO: 305993 - DNA, 15 bp, Homo sapiens
gtgctgagattacaa

SEQ ID NO: 305994 - DNA, 15 bp, Homo sapiens
agtgctgagattaca

SEQ ID NO: 305995 - DNA, 15 bp, Homo sapiens
aagtgctgagattac

SEQ ID NO: 305996 - DNA, 15 bp, Homo sapiens
aaagtgctgagatta

SEQ ID NO: 305997 - DNA, 15 bp, Homo sapiens
caaagtgctgagatt

SEQ ID NO: 305998 - DNA, 15 bp, Homo sapiens
tcaaagtgctgagat

SEQ ID NO: 305999 - DNA, 15 bp, Homo sapiens
ctcaaagtgctgaga

SEQ ID NO: 306000 - DNA, 15 bp, Homo sapiens
tctcaaagtgctgag

SEQ ID NO: 306001 - DNA, 15 bp, Homo sapiens
ctctcaaagtgctga

SEQ ID NO: 306002 - DNA, 15 bp, Homo sapiens
tggcctctcaaagtg

SEQ ID NO: 306003 - DNA, 15 bp, Homo sapiens
ttggcctctcaaagt

SEQ ID NO: 306004 - DNA, 15 bp, Homo sapiens
cttggcctctcaaag

SEQ ID NO: 306005 - DNA, 15 bp, Homo sapiens
ccttggcctctcaaa

SEQ ID NO: 306006 - DNA, 15 bp, Homo sapiens
gccttggcctctcaa

SEQ ID NO: 306007 - DNA, 15 bp, Homo sapiens
tgccttggcctctca

SEQ ID NO: 306008 - DNA, 15 bp, Homo sapiens
ctgccttggcctctc

SEQ ID NO: 306009 - DNA, 15 bp, Homo sapiens
cctgccttggcctct

SEQ ID NO: 306010 - DNA, 15 bp, Homo sapiens
gcctgccttggcctc

SEQ ID NO: 306011 - DNA, 15 bp, Homo sapiens
cgcctgccttggcct

SEQ ID NO: 306012 - DNA, 15 bp, Homo sapiens
ccgcctgccttggcc

SEQ ID NO: 306013 - DNA, 15 bp, Homo sapiens
tccgcctgccttggc

SEQ ID NO: 306014 - DNA, 15 bp, Homo sapiens
atccgcctgccttgg

SEQ ID NO: 306015 - DNA, 15 bp, Homo sapiens
gatccgcctgccttg

SEQ ID NO: 306016 - DNA, 15 bp, Homo sapiens
tgatccgcctgcctt

SEQ ID NO: 306017 - DNA, 15 bp, Homo sapiens
gtgatccgcctgcct

SEQ ID NO: 306018 - DNA, 15 bp, Homo sapiens
ggtgatccgcctgcc

SEQ ID NO: 306019 - DNA, 15 bp, Homo sapiens
aggtgatccgcctgc

SEQ ID NO: 306020 - DNA, 15 bp, Homo sapiens
caggtgatccgcctg

SEQ ID NO: 306021 - DNA, 15 bp, Homo sapiens
gcaggtgatccgcct

SEQ ID NO: 306022 - DNA, 15 bp, Homo sapiens
cgcaggtgatccgcc

SEQ ID NO: 306023 - DNA, 15 bp, Homo sapiens
ccgcaggtgatccgc

SEQ ID NO: 306024 - DNA, 15 bp, Homo sapiens
accgcaggtgatccg

SEQ ID NO: 306025 - DNA, 15 bp, Homo sapiens
gaccgcaggtgatcc

SEQ ID NO: 306026 - DNA, 15 bp, Homo sapiens
tgaccgcaggtgatc

SEQ ID NO: 306027 - DNA, 15 bp, Homo sapiens
ctgaccgcaggtgat

SEQ ID NO: 306028 - DNA, 15 bp, Homo sapiens
tctgaccgcaggtga

SEQ ID NO: 306029 - DNA, 15 bp, Homo sapiens
ttctgaccgcaggtg

SEQ ID NO: 306030 - DNA, 15 bp, Homo sapiens
cttctgaccgcaggt

SEQ ID NO: 306031 - DNA, 15 bp, Homo sapiens
acttctgaccgcagg

SEQ ID NO: 306032 - DNA, 15 bp, Homo sapiens
aacttctgaccgcag

SEQ ID NO: 306033 - DNA, 15 bp, Homo sapiens
gaacttctgaccgca

SEQ ID NO: 306034 - DNA, 15 bp, Homo sapiens
cgaacttctgaccgc

SEQ ID NO: 306035 - DNA, 15 bp, Homo sapiens
tcgaacttctgaccg

SEQ ID NO: 306036 - DNA, 15 bp, Homo sapiens
ctcgaacttctgacc

SEQ ID NO: 306037 - DNA, 15 bp, Homo sapiens
tctcgaacttctgac

SEQ ID NO: 306038 - DNA, 15 bp, Homo sapiens
gtctcgaacttctga

SEQ ID NO: 306039 - DNA, 15 bp, Homo sapiens
ggtctcgaacttctg

SEQ ID NO: 306040 - DNA, 15 bp, Homo sapiens
tggtctcgaacttct

SEQ ID NO: 306041 - DNA, 15 bp, Homo sapiens
ctggtctcgaacttc

SEQ ID NO: 306042 - DNA, 15 bp, Homo sapiens
gctggtctcgaactt

SEQ ID NO: 306043 - DNA, 15 bp, Homo sapiens
aggtttcaccatgtt

SEQ ID NO: 306044 - DNA, 15 bp, Homo sapiens
gaggtttcaccatgt

SEQ ID NO: 306045 - DNA, 15 bp, Homo sapiens
tgaggtttcaccatg

SEQ ID NO: 306046 - DNA, 15 bp, Homo sapiens
atgaggtttcaccat

SEQ ID NO: 306047 - DNA, 15 bp, Homo sapiens
gatgaggtttcacca

SEQ ID NO: 306048 - DNA, 15 bp, Homo sapiens
agatgaggtttcacc

SEQ ID NO: 306049 - DNA, 15 bp, Homo sapiens
gagatgaggtttcac

SEQ ID NO: 306050 - DNA, 15 bp, Homo sapiens
agagatgaggtttca

SEQ ID NO: 306051 - DNA, 15 bp, Homo sapiens
tagagatgaggtttc

SEQ ID NO: 306052 - DNA, 15 bp, Homo sapiens
gtagagatgaggttt

SEQ ID NO: 306053 - DNA, 15 bp, Homo sapiens
agtagagatgaggtt

SEQ ID NO: 306054 - DNA, 15 bp, Homo sapiens
tagtagagatgaggt

SEQ ID NO: 306055 - DNA, 15 bp, Homo sapiens
ttagtagagatgagg

SEQ ID NO: 306056 - DNA, 15 bp, Homo sapiens
tttagtagagatgag

SEQ ID NO: 306057 - DNA, 15 bp, Homo sapiens
ttttagtagagatga

SEQ ID NO: 306058 - DNA, 15 bp, Homo sapiens
tcagctaatttttgt

SEQ ID NO: 306059 - DNA, 15 bp, Homo sapiens
ctcagctaatttttg

SEQ ID NO: 306060 - DNA, 15 bp, Homo sapiens
actcagctaattttt

SEQ ID NO: 306061 - DNA, 15 bp, Homo sapiens
tactcagctaatttt

SEQ ID NO: 306062 - DNA, 15 bp, Homo sapiens
atactcagctaattt

SEQ ID NO: 306063 - DNA, 15 bp, Homo sapiens
catactcagctaatt

SEQ ID NO: 306064 - DNA, 15 bp, Homo sapiens
ccatactcagctaat

SEQ ID NO: 306065 - DNA, 15 bp, Homo sapiens
accatactcagctaa

SEQ ID NO: 306066 - DNA, 15 bp, Homo sapiens
caccatactcagcta

SEQ ID NO: 306067 - DNA, 15 bp, Homo sapiens
ccaccatactcagct

SEQ ID NO: 306068 - DNA, 15 bp, Homo sapiens
gccaccatactcagc

SEQ ID NO: 306069 - DNA, 15 bp, Homo sapiens
tgccaccatactcag

SEQ ID NO: 306070 - DNA, 15 bp, Homo sapiens
gtgccaccatactca

SEQ ID NO: 306071 - DNA, 15 bp, Homo sapiens
tgtgccaccatactc

SEQ ID NO: 306072 - DNA, 15 bp, Homo sapiens
atgtgccaccatact

SEQ ID NO: 306073 - DNA, 15 bp, Homo sapiens
catgtgccaccatac

SEQ ID NO: 306074 - DNA, 15 bp, Homo sapiens
gcatgtgccaccata

SEQ ID NO: 306075 - DNA, 15 bp, Homo sapiens
ggcatgtgccaccat

SEQ ID NO: 306076 - DNA, 15 bp, Homo sapiens
aggcatgtgccacca

SEQ ID NO: 306077 - DNA, 15 bp, Homo sapiens
caggcatgtgccacc

SEQ ID NO: 306078 - DNA, 15 bp, Homo sapiens
acaggcatgtgccac

SEQ ID NO: 306079 - DNA, 15 bp, Homo sapiens
tacaggcatgtgcca

SEQ ID NO: 306080 - DNA, 15 bp, Homo sapiens
ttacaggcatgtgcc

SEQ ID NO: 306081 - DNA, 15 bp, Homo sapiens
attacaggcatgtgc

SEQ ID NO: 306082 - DNA, 15 bp, Homo sapiens
gattacaggcatgtg

SEQ ID NO: 306083 - DNA, 15 bp, Homo sapiens
ggattacaggcatgt

SEQ ID NO: 306084 - DNA, 15 bp, Homo sapiens
gggattacaggcatg

SEQ ID NO: 306085 - DNA, 15 bp, Homo sapiens
tgggattacaggcat

SEQ ID NO: 306086 - DNA, 15 bp, Homo sapiens
tctcccgggttcaag

SEQ ID NO: 306087 - DNA, 15 bp, Homo sapiens
gtctcccgggttcaa

SEQ ID NO: 306088 - DNA, 15 bp, Homo sapiens
cgtctcccgggttca

SEQ ID NO: 306089 - DNA, 15 bp, Homo sapiens
ccgtctcccgggttc

SEQ ID NO: 306090 - DNA, 15 bp, Homo sapiens
tccgtctcccgggtt

SEQ ID NO: 306091 - DNA, 15 bp, Homo sapiens
ctccgtctcccgggt

SEQ ID NO: 306092 - DNA, 15 bp, Homo sapiens
cctccgtctcccggg

SEQ ID NO: 306093 - DNA, 15 bp, Homo sapiens
acctccgtctcccgg

SEQ ID NO: 306094 - DNA, 15 bp, Homo sapiens
aacctccgtctcccg

SEQ ID NO: 306095 - DNA, 15 bp, Homo sapiens
caacctccgtctccc

SEQ ID NO: 306096 - DNA, 15 bp, Homo sapiens
gcaacctccgtctcc

SEQ ID NO: 306097 - DNA, 15 bp, Homo sapiens
tgcaacctccgtctc

SEQ ID NO: 306098 - DNA, 15 bp, Homo sapiens
ctgcaacctccgtct

SEQ ID NO: 306099 - DNA, 15 bp, Homo sapiens
actgcaacctccgtc

SEQ ID NO: 306100 - DNA, 15 bp, Homo sapiens
cactgcaacctccgt

SEQ ID NO: 306101 - DNA, 15 bp, Homo sapiens
tgcaatcttggctca

SEQ ID NO: 306102 - DNA, 15 bp, Homo sapiens
gtgcaatcttggctc

SEQ ID NO: 306103 - DNA, 15 bp, Homo sapiens
ggtgcaatcttggct

SEQ ID NO: 306104 - DNA, 15 bp, Homo sapiens
tggtgcaatcttggc

SEQ ID NO: 306105 - DNA, 15 bp, Homo sapiens
gtggtgcaatcttgg

SEQ ID NO: 306106 - DNA, 15 bp, Homo sapiens
agtggtgcaatcttg

SEQ ID NO: 306107 - DNA, 15 bp, Homo sapiens
cagtggtgcaatctt

SEQ ID NO: 306108 - DNA, 15 bp, Homo sapiens
gcagtggtgcaatct

SEQ ID NO: 306109 - DNA, 15 bp, Homo sapiens
tgctcttgtcaccca

SEQ ID NO: 306110 - DNA, 15 bp, Homo sapiens
ttgctcttgtcaccc

SEQ ID NO: 306111 - DNA, 15 bp, Homo sapiens
cttgctcttgtcacc

SEQ ID NO: 306112 - DNA, 15 bp, Homo sapiens
tcttgctcttgtcac

SEQ ID NO: 306113 - DNA, 15 bp, Homo sapiens
gtcttgctcttgtca

SEQ ID NO: 306114 - DNA, 15 bp, Homo sapiens
agtcttgctcttgtc

SEQ ID NO: 306115 - DNA, 15 bp, Homo sapiens
gagtcttgctcttgt

SEQ ID NO: 306116 - DNA, 15 bp, Homo sapiens
agagtcttgctcttg

SEQ ID NO: 306117 - DNA, 15 bp, Homo sapiens
gagagtcttgctctt

SEQ ID NO: 306118 - DNA, 15 bp, Homo sapiens
agagagtcttgctct

SEQ ID NO: 306119 - DNA, 15 bp, Homo sapiens
gagagagtcttgctc

SEQ ID NO: 306120 - DNA, 15 bp, Homo sapiens
agagagagtcttgct

SEQ ID NO: 306121 - DNA, 15 bp, Homo sapiens
aagagagagtcttgc

SEQ ID NO: 306122 - DNA, 15 bp, Homo sapiens
taagagagagtcttg

SEQ ID NO: 306123 - DNA, 15 bp, Homo sapiens
ttaagagagagtctt

SEQ ID NO: 306124 - DNA, 15 bp, Homo sapiens
tttaagagagagtct

SEQ ID NO: 306125 - DNA, 15 bp, Homo sapiens
ttttaagagagagtc

SEQ ID NO: 306126 - DNA, 15 bp, Homo sapiens
tttttaagagagagt

SEQ ID NO: 306127 - DNA, 15 bp, Homo sapiens
ttttttaagagagag

SEQ ID NO: 306128 - DNA, 15 bp, Homo sapiens
tttttttaagagaga

SEQ ID NO: 306129 - DNA, 15 bp, Homo sapiens
ttttttttaagagag

SEQ ID NO: 306130 - DNA, 15 bp, Homo sapiens
atttttttttttaag

SEQ ID NO: 306131 - DNA, 15 bp, Homo sapiens
gatttttttttttaa

SEQ ID NO: 306132 - DNA, 15 bp, Homo sapiens
tgattttttttttta

SEQ ID NO: 306133 - DNA, 15 bp, Homo sapiens
atgattttttttttt

SEQ ID NO: 306134 - DNA, 15 bp, Homo sapiens
catgatttttttttt

SEQ ID NO: 306135 - DNA, 15 bp, Homo sapiens
tcatgattttttttt

SEQ ID NO: 306136 - DNA, 15 bp, Homo sapiens
atcatgatttttttt

SEQ ID NO: 306137 - DNA, 15 bp, Homo sapiens
tatcatgattttttt

SEQ ID NO: 306138 - DNA, 15 bp, Homo sapiens
ctatcatgatttttt

SEQ ID NO: 306139 - DNA, 15 bp, Homo sapiens
actatcatgattttt

SEQ ID NO: 306140 - DNA, 15 bp, Homo sapiens
cactatcatgatttt

SEQ ID NO: 306141 - DNA, 15 bp, Homo sapiens
ccactatcatgattt

SEQ ID NO: 306142 - DNA, 15 bp, Homo sapiens
gccactatcatgatt

SEQ ID NO: 306143 - DNA, 15 bp, Homo sapiens
agccactatcatgat

SEQ ID NO: 306144 - DNA, 15 bp, Homo sapiens
gagccactatcatga

SEQ ID NO: 306145 - DNA, 15 bp, Homo sapiens
tgagccactatcatg

SEQ ID NO: 306146 - DNA, 15 bp, Homo sapiens
ctgagccactatcat

SEQ ID NO: 306147 - DNA, 15 bp, Homo sapiens
gctgagccactatca

SEQ ID NO: 306148 - DNA, 15 bp, Homo sapiens
ggctgagccactatc

SEQ ID NO: 306149 - DNA, 15 bp, Homo sapiens
tggctgagccactat

SEQ ID NO: 306150 - DNA, 15 bp, Homo sapiens
ctggctgagccacta

SEQ ID NO: 306151 - DNA, 15 bp, Homo sapiens
gctggctgagccact

SEQ ID NO: 306152 - DNA, 15 bp, Homo sapiens
tgctggctgagccac

SEQ ID NO: 306153 - DNA, 15 bp, Homo sapiens
atgctggctgagcca

SEQ ID NO: 306154 - DNA, 15 bp, Homo sapiens
tatgctggctgagcc

SEQ ID NO: 306155 - DNA, 15 bp, Homo sapiens
atatgctggctgagc

SEQ ID NO: 306156 - DNA, 15 bp, Homo sapiens
catatgctggctgag

SEQ ID NO: 306157 - DNA, 15 bp, Homo sapiens
acatatgctggctga

SEQ ID NO: 306158 - DNA, 15 bp, Homo sapiens
tacatatgctggctg

SEQ ID NO: 306159 - DNA, 15 bp, Homo sapiens
atacatatgctggct

SEQ ID NO: 306160 - DNA, 15 bp, Homo sapiens
aatacatatgctggc

SEQ ID NO: 306161 - DNA, 15 bp, Homo sapiens
caatacatatgctgg

SEQ ID NO: 306162 - DNA, 15 bp, Homo sapiens
ccaatacatatgctg

SEQ ID NO: 306163 - DNA, 15 bp, Homo sapiens
gccaatacatatgct

SEQ ID NO: 306164 - DNA, 15 bp, Homo sapiens
tgccaatacatatgc

SEQ ID NO: 306165 - DNA, 15 bp, Homo sapiens
ttgccaatacatatg

SEQ ID NO: 306166 - DNA, 15 bp, Homo sapiens
cttgccaatacatat

SEQ ID NO: 306167 - DNA, 15 bp, Homo sapiens
gcttgccaatacata

SEQ ID NO: 306168 - DNA, 15 bp, Homo sapiens
tgcttgccaatacat

SEQ ID NO: 306169 - DNA, 15 bp, Homo sapiens
ctgcttgccaataca

SEQ ID NO: 306170 - DNA, 15 bp, Homo sapiens
tctgcttgccaatac

SEQ ID NO: 306171 - DNA, 15 bp, Homo sapiens
atctgcttgccaata

SEQ ID NO: 306172 - DNA, 15 bp, Homo sapiens
gatctgcttgccaat

SEQ ID NO: 306173 - DNA, 15 bp, Homo sapiens
agatctgcttgccaa

SEQ ID NO: 306174 - DNA, 15 bp, Homo sapiens
cagatctgcttgcca

SEQ ID NO: 306175 - DNA, 15 bp, Homo sapiens
gcagatctgcttgcc

SEQ ID NO: 306176 - DNA, 15 bp, Homo sapiens
tgcagatctgcttgc

SEQ ID NO: 306177 - DNA, 15 bp, Homo sapiens
ctgcagatctgcttg

SEQ ID NO: 306178 - DNA, 15 bp, Homo sapiens
tctgcagatctgctt

SEQ ID NO: 306179 - DNA, 15 bp, Homo sapiens
ttctgcagatctgct

SEQ ID NO: 306180 - DNA, 15 bp, Homo sapiens
tttctgcagatctgc

SEQ ID NO: 306181 - DNA, 15 bp, Homo sapiens
atttctgcagatctg

SEQ ID NO: 306182 - DNA, 15 bp, Homo sapiens
tatttctgcagatct

SEQ ID NO: 306183 - DNA, 15 bp, Homo sapiens
atatttctgcagatc

SEQ ID NO: 306184 - DNA, 15 bp, Homo sapiens
aatatttctgcagat

SEQ ID NO: 306185 - DNA, 15 bp, Homo sapiens
taatatttctgcaga

SEQ ID NO: 306186 - DNA, 15 bp, Homo sapiens
ctaatatttctgcag

SEQ ID NO: 306187 - DNA, 15 bp, Homo sapiens
actaatatttctgca

SEQ ID NO: 306188 - DNA, 15 bp, Homo sapiens
tactaatatttctgc

SEQ ID NO: 306189 - DNA, 15 bp, Homo sapiens
atactaatatttctg

SEQ ID NO: 306190 - DNA, 15 bp, Homo sapiens
aatactaatatttct

SEQ ID NO: 306191 - DNA, 15 bp, Homo sapiens
taatactaatatttc

SEQ ID NO: 306192 - DNA, 15 bp, Homo sapiens
ttaatactaatattt

SEQ ID NO: 306193 - DNA, 15 bp, Homo sapiens
tttaatactaatatt

SEQ ID NO: 306194 - DNA, 15 bp, Homo sapiens
ctttaatactaatat

SEQ ID NO: 306195 - DNA, 15 bp, Homo sapiens
cctttaatactaata

SEQ ID NO: 306196 - DNA, 15 bp, Homo sapiens
tcctttaatactaat

SEQ ID NO: 306197 - DNA, 15 bp, Homo sapiens
gtcctttaatactaa

SEQ ID NO: 306198 - DNA, 15 bp, Homo sapiens
ggtcctttaatacta

SEQ ID NO: 306199 - DNA, 15 bp, Homo sapiens
tggtcctttaatact

SEQ ID NO: 306200 - DNA, 15 bp, Homo sapiens
ctggtcctttaatac

SEQ ID NO: 306201 - DNA, 15 bp, Homo sapiens
gctggtcctttaata

SEQ ID NO: 306202 - DNA, 15 bp, Homo sapiens
tgctggtcctttaat

SEQ ID NO: 306203 - DNA, 15 bp, Homo sapiens
ttgctggtcctttaa

SEQ ID NO: 306204 - DNA, 15 bp, Homo sapiens
cttgctggtccttta

SEQ ID NO: 306205 - DNA, 15 bp, Homo sapiens
ccttgctggtccttt

SEQ ID NO: 306206 - DNA, 15 bp, Homo sapiens
accttgctggtcctt

SEQ ID NO: 306207 - DNA, 15 bp, Homo sapiens
taccttgctggtcct

SEQ ID NO: 306208 - DNA, 15 bp, Homo sapiens
ttaccttgctggtcc

SEQ ID NO: 306209 - DNA, 15 bp, Homo sapiens
tttaccttgctggtc

SEQ ID NO: 306210 - DNA, 15 bp, Homo sapiens
ttttaccttgctggt

SEQ ID NO: 306211 - DNA, 15 bp, Homo sapiens
attttaccttgctgg

SEQ ID NO: 306212 - DNA, 15 bp, Homo sapiens
cattttaccttgctg

SEQ ID NO: 306213 - DNA, 15 bp, Homo sapiens
ccattttaccttgct

SEQ ID NO: 306214 - DNA, 15 bp, Homo sapiens
tccattttaccttgc

SEQ ID NO: 306215 - DNA, 15 bp, Homo sapiens
ttccattttaccttg

SEQ ID NO: 306216 - DNA, 15 bp, Homo sapiens
tttccattttacctt

SEQ ID NO: 306217 - DNA, 15 bp, Homo sapiens
ttttccattttacct

SEQ ID NO: 306218 - DNA, 15 bp, Homo sapiens
cttttccattttacc

SEQ ID NO: 306219 - DNA, 15 bp, Homo sapiens
tcttttccattttac

SEQ ID NO: 306220 - DNA, 15 bp, Homo sapiens
atcttttccatttta

SEQ ID NO: 306221 - DNA, 15 bp, Homo sapiens
gatcttttccatttt

SEQ ID NO: 306222 - DNA, 15 bp, Homo sapiens
agatcttttccattt

SEQ ID NO: 306223 - DNA, 15 bp, Homo sapiens
aagatcttttccatt

SEQ ID NO: 306224 - DNA, 15 bp, Homo sapiens
gaagatcttttccat

SEQ ID NO: 306225 - DNA, 15 bp, Homo sapiens
tgaagatcttttcca

SEQ ID NO: 306226 - DNA, 15 bp, Homo sapiens
ctgaagatcttttcc

SEQ ID NO: 306227 - DNA, 15 bp, Homo sapiens
tctgaagatcttttc

SEQ ID NO: 306228 - DNA, 15 bp, Homo sapiens
ttctgaagatctttt

SEQ ID NO: 306229 - DNA, 15 bp, Homo sapiens
tttctgaagatcttt

SEQ ID NO: 306230 - DNA, 15 bp, Homo sapiens
ctttctgaagatctt

SEQ ID NO: 306231 - DNA, 15 bp, Homo sapiens
cctttctgaagatct

SEQ ID NO: 306232 - DNA, 15 bp, Homo sapiens
gcctttctgaagatc

SEQ ID NO: 306233 - DNA, 15 bp, Homo sapiens
ggcctttctgaagat

SEQ ID NO: 306234 - DNA, 15 bp, Homo sapiens
tggcctttctgaaga

SEQ ID NO: 306235 - DNA, 15 bp, Homo sapiens
ttggcctttctgaag

SEQ ID NO: 306236 - DNA, 15 bp, Homo sapiens
cttggcctttctgaa

SEQ ID NO: 306237 - DNA, 15 bp, Homo sapiens
ccttggcctttctga

SEQ ID NO: 306238 - DNA, 15 bp, Homo sapiens
accttggcctttctg

SEQ ID NO: 306239 - DNA, 15 bp, Homo sapiens
gaccttggcctttct

SEQ ID NO: 306240 - DNA, 15 bp, Homo sapiens
agaccttggcctttc

SEQ ID NO: 306241 - DNA, 15 bp, Homo sapiens
cagaccttggccttt

SEQ ID NO: 306242 - DNA, 15 bp, Homo sapiens
gcagaccttggcctt

SEQ ID NO: 306243 - DNA, 15 bp, Homo sapiens
ggcagaccttggcct

SEQ ID NO: 306244 - DNA, 15 bp, Homo sapiens
tggcagaccttggcc

SEQ ID NO: 306245 - DNA, 15 bp, Homo sapiens
ttggcagaccttggc

SEQ ID NO: 306246 - DNA, 15 bp, Homo sapiens
tttggcagaccttgg

SEQ ID NO: 306247 - DNA, 15 bp, Homo sapiens
ttttggcagaccttg

SEQ ID NO: 306248 - DNA, 15 bp, Homo sapiens
attttggcagacctt

SEQ ID NO: 306249 - DNA, 15 bp, Homo sapiens
aattttggcagacct

SEQ ID NO: 306250 - DNA, 15 bp, Homo sapiens
gaattttggcagacc

SEQ ID NO: 306251 - DNA, 15 bp, Homo sapiens
agaattttggcagac

SEQ ID NO: 306252 - DNA, 15 bp, Homo sapiens
aagaattttggcaga

SEQ ID NO: 306253 - DNA, 15 bp, Homo sapiens
gaagaattttggcag

SEQ ID NO: 306254 - DNA, 15 bp, Homo sapiens
agaagaattttggca

SEQ ID NO: 306255 - DNA, 15 bp, Homo sapiens
tagaagaattttggc

SEQ ID NO: 306256 - DNA, 15 bp, Homo sapiens
atagaagaattttgg

SEQ ID NO: 306257 - DNA, 15 bp, Homo sapiens
aatagaagaattttg

SEQ ID NO: 306258 - DNA, 15 bp, Homo sapiens
aaatagaagaatttt

SEQ ID NO: 306259 - DNA, 15 bp, Homo sapiens
aaaatagaagaattt

SEQ ID NO: 306260 - DNA, 15 bp, Homo sapiens
gaaaatagaagaatt

SEQ ID NO: 306261 - DNA, 15 bp, Homo sapiens
agaaaatagaagaat

SEQ ID NO: 306262 - DNA, 15 bp, Homo sapiens
tagaaaatagaagaa

SEQ ID NO: 306263 - DNA, 15 bp, Homo sapiens
atagaaaatagaaga

SEQ ID NO: 306264 - DNA, 15 bp, Homo sapiens
aatagaaaatagaag

SEQ ID NO: 306265 - DNA, 15 bp, Homo sapiens
gaatagaaaatagaa

SEQ ID NO: 306266 - DNA, 15 bp, Homo sapiens
agaatagaaaataga

SEQ ID NO: 306267 - DNA, 15 bp, Homo sapiens
tagaatagaaaatag

SEQ ID NO: 306268 - DNA, 15 bp, Homo sapiens
ctagaatagaaaata

SEQ ID NO: 306269 - DNA, 15 bp, Homo sapiens
actagaatagaaaat

SEQ ID NO: 306270 - DNA, 15 bp, Homo sapiens
aactagaatagaaaa

SEQ ID NO: 306271 - DNA, 15 bp, Homo sapiens
aaactagaatagaaa

SEQ ID NO: 306272 - DNA, 15 bp, Homo sapiens
gaaactagaatagaa

SEQ ID NO: 306273 - DNA, 15 bp, Homo sapiens
ggaaactagaataga

SEQ ID NO: 306274 - DNA, 15 bp, Homo sapiens
aggaaactagaatag

SEQ ID NO: 306275 - DNA, 15 bp, Homo sapiens
gaggaaactagaata

SEQ ID NO: 306276 - DNA, 15 bp, Homo sapiens
agaggaaactagaat

SEQ ID NO: 306277 - DNA, 15 bp, Homo sapiens
aagaggaaactagaa

SEQ ID NO: 306278 - DNA, 15 bp, Homo sapiens
caagaggaaactaga

SEQ ID NO: 306279 - DNA, 15 bp, Homo sapiens
gcaagaggaaactag

SEQ ID NO: 306280 - DNA, 15 bp, Homo sapiens
cgcaagaggaaacta

SEQ ID NO: 306281 - DNA, 15 bp, Homo sapiens
tcgcaagaggaaact

SEQ ID NO: 306282 - DNA, 15 bp, Homo sapiens
ctcgcaagaggaaac

SEQ ID NO: 306283 - DNA, 15 bp, Homo sapiens
cctcgcaagaggaaa

SEQ ID NO: 306284 - DNA, 15 bp, Homo sapiens
gcctcgcaagaggaa

SEQ ID NO: 306285 - DNA, 15 bp, Homo sapiens
tgcctcgcaagagga

SEQ ID NO: 306286 - DNA, 15 bp, Homo sapiens
ttgcctcgcaagagg

SEQ ID NO: 306287 - DNA, 15 bp, Homo sapiens
tttgcctcgcaagag

SEQ ID NO: 306288 - DNA, 15 bp, Homo sapiens
ttttgcctcgcaaga

SEQ ID NO: 306289 - DNA, 15 bp, Homo sapiens
gttttgcctcgcaag

SEQ ID NO: 306290 - DNA, 15 bp, Homo sapiens
tgttttgcctcgcaa

SEQ ID NO: 306291 - DNA, 15 bp, Homo sapiens
ctgttttgcctcgca

SEQ ID NO: 306292 - DNA, 15 bp, Homo sapiens
actgttttgcctcgc

SEQ ID NO: 306293 - DNA, 15 bp, Homo sapiens
gactgttttgcctcg

SEQ ID NO: 306294 - DNA, 15 bp, Homo sapiens
agactgttttgcctc

SEQ ID NO: 306295 - DNA, 15 bp, Homo sapiens
aagactgttttgcct

SEQ ID NO: 306296 - DNA, 15 bp, Homo sapiens
taagactgttttgcc

SEQ ID NO: 306297 - DNA, 15 bp, Homo sapiens
ctaagactgttttgc

SEQ ID NO: 306298 - DNA, 15 bp, Homo sapiens
tctaagactgttttg

SEQ ID NO: 306299 - DNA, 15 bp, Homo sapiens
ttctaagactgtttt

SEQ ID NO: 306300 - DNA, 15 bp, Homo sapiens
attctaagactgttt

SEQ ID NO: 306301 - DNA, 15 bp, Homo sapiens
aattctaagactgtt

SEQ ID NO: 306302 - DNA, 15 bp, Homo sapiens
aaattctaagactgt

SEQ ID NO: 306303 - DNA, 15 bp, Homo sapiens
taaattctaagactg

SEQ ID NO: 306304 - DNA, 15 bp, Homo sapiens
ctaaattctaagact

SEQ ID NO: 306305 - DNA, 15 bp, Homo sapiens
gctaaattctaagac

SEQ ID NO: 306306 - DNA, 15 bp, Homo sapiens
agctaaattctaaga

SEQ ID NO: 306307 - DNA, 15 bp, Homo sapiens
aagctaaattctaag

SEQ ID NO: 306308 - DNA, 15 bp, Homo sapiens
taagctaaattctaa

SEQ ID NO: 306309 - DNA, 15 bp, Homo sapiens
ctaagctaaattcta

SEQ ID NO: 306310 - DNA, 15 bp, Homo sapiens
cctaagctaaattct

SEQ ID NO: 306311 - DNA, 15 bp, Homo sapiens
ccctaagctaaattc

SEQ ID NO: 306312 - DNA, 15 bp, Homo sapiens
accctaagctaaatt

SEQ ID NO: 306313 - DNA, 15 bp, Homo sapiens
caccctaagctaaat

SEQ ID NO: 306314 - DNA, 15 bp, Homo sapiens
ccaccctaagctaaa

SEQ ID NO: 306315 - DNA, 15 bp, Homo sapiens
gccaccctaagctaa

SEQ ID NO: 306316 - DNA, 15 bp, Homo sapiens
tgccaccctaagcta

SEQ ID NO: 306317 - DNA, 15 bp, Homo sapiens
gtgccaccctaagct

SEQ ID NO: 306318 - DNA, 15 bp, Homo sapiens
tgtgccaccctaagc

SEQ ID NO: 306319 - DNA, 15 bp, Homo sapiens
ttgtgccaccctaag

SEQ ID NO: 306320 - DNA, 15 bp, Homo sapiens
tttgtgccaccctaa

SEQ ID NO: 306321 - DNA, 15 bp, Homo sapiens
ttttgtgccacccta

SEQ ID NO: 306322 - DNA, 15 bp, Homo sapiens
tttttgtgccaccct

SEQ ID NO: 306323 - DNA, 15 bp, Homo sapiens
gtttttgtgccaccc

SEQ ID NO: 306324 - DNA, 15 bp, Homo sapiens
tgtttttgtgccacc

SEQ ID NO: 306325 - DNA, 15 bp, Homo sapiens
atgtttttgtgccac

SEQ ID NO: 306326 - DNA, 15 bp, Homo sapiens
aatgtttttgtgcca

SEQ ID NO: 306327 - DNA, 15 bp, Homo sapiens
aaatgtttttgtgcc

SEQ ID NO: 306328 - DNA, 15 bp, Homo sapiens
gaaatgtttttgtgc

SEQ ID NO: 306329 - DNA, 15 bp, Homo sapiens
ggaaatgtttttgtg

SEQ ID NO: 306330 - DNA, 15 bp, Homo sapiens
aggaaatgtttttgt

SEQ ID NO: 306331 - DNA, 15 bp, Homo sapiens
caggaaatgtttttg

SEQ ID NO: 306332 - DNA, 15 bp, Homo sapiens
acaggaaatgttttt

SEQ ID NO: 306333 - DNA, 15 bp, Homo sapiens
tacaggaaatgtttt

SEQ ID NO: 306334 - DNA, 15 bp, Homo sapiens
ttacaggaaatgttt

SEQ ID NO: 306335 - DNA, 15 bp, Homo sapiens
attacaggaaatgtt

SEQ ID NO: 306336 - DNA, 15 bp, Homo sapiens
cattacaggaaatgt

SEQ ID NO: 306337 - DNA, 15 bp, Homo sapiens
acattacaggaaatg

SEQ ID NO: 306338 - DNA, 15 bp, Homo sapiens
tacattacaggaaat

SEQ ID NO: 306339 - DNA, 15 bp, Homo sapiens
ctacattacaggaaa

SEQ ID NO: 306340 - DNA, 15 bp, Homo sapiens
actacattacaggaa

SEQ ID NO: 306341 - DNA, 15 bp, Homo sapiens
aactacattacagga

SEQ ID NO: 306342 - DNA, 15 bp, Homo sapiens
gaactacattacagg

SEQ ID NO: 306343 - DNA, 15 bp, Homo sapiens
agaactacattacag

SEQ ID NO: 306344 - DNA, 15 bp, Homo sapiens
tagaactacattaca

SEQ ID NO: 306345 - DNA, 15 bp, Homo sapiens
ttagaactacattac

SEQ ID NO: 306346 - DNA, 15 bp, Homo sapiens
attagaactacatta

SEQ ID NO: 306347 - DNA, 15 bp, Homo sapiens
tattagaactacatt

SEQ ID NO: 306348 - DNA, 15 bp, Homo sapiens
ttattagaactacat

SEQ ID NO: 306349 - DNA, 15 bp, Homo sapiens
attattagaactaca

SEQ ID NO: 306350 - DNA, 15 bp, Homo sapiens
tattattagaactac

SEQ ID NO: 306351 - DNA, 15 bp, Homo sapiens
atattattagaacta

SEQ ID NO: 306352 - DNA, 15 bp, Homo sapiens
aatattattagaact

SEQ ID NO: 306353 - DNA, 15 bp, Homo sapiens
gaatattattagaac

SEQ ID NO: 306354 - DNA, 15 bp, Homo sapiens
ggaatattattagaa

SEQ ID NO: 306355 - DNA, 15 bp, Homo sapiens
aggaatattattaga

SEQ ID NO: 306356 - DNA, 15 bp, Homo sapiens
aaggaatattattag

SEQ ID NO: 306357 - DNA, 15 bp, Homo sapiens
taaggaatattatta

SEQ ID NO: 306358 - DNA, 15 bp, Homo sapiens
ttaaggaatattatt

SEQ ID NO: 306359 - DNA, 15 bp, Homo sapiens
tttaaggaatattat

SEQ ID NO: 306360 - DNA, 15 bp, Homo sapiens
ttttaaggaatatta

SEQ ID NO: 306361 - DNA, 15 bp, Homo sapiens
attttaaggaatatt

SEQ ID NO: 306362 - DNA, 15 bp, Homo sapiens
tattttaaggaatat

SEQ ID NO: 306363 - DNA, 15 bp, Homo sapiens
gtattttaaggaata

SEQ ID NO: 306364 - DNA, 15 bp, Homo sapiens
ggtattttaaggaat

SEQ ID NO: 306365 - DNA, 15 bp, Homo sapiens
gggtattttaaggaa

SEQ ID NO: 306366 - DNA, 15 bp, Homo sapiens
tgggtattttaagga

SEQ ID NO: 306367 - DNA, 15 bp, Homo sapiens
ctgggtattttaagg

SEQ ID NO: 306368 - DNA, 15 bp, Homo sapiens
tctgggtattttaag

SEQ ID NO: 306369 - DNA, 15 bp, Homo sapiens
ttctgggtattttaa

SEQ ID NO: 306370 - DNA, 15 bp, Homo sapiens
tttctgggtatttta

SEQ ID NO: 306371 - DNA, 15 bp, Homo sapiens
ttttctgggtatttt

SEQ ID NO: 306372 - DNA, 15 bp, Homo sapiens
gttttctgggtattt

SEQ ID NO: 306373 - DNA, 15 bp, Homo sapiens
tgttttctgggtatt

SEQ ID NO: 306374 - DNA, 15 bp, Homo sapiens
ttgttttctgggtat

SEQ ID NO: 306375 - DNA, 15 bp, Homo sapiens
attgttttctgggta

SEQ ID NO: 306376 - DNA, 15 bp, Homo sapiens
tattgttttctgggt

SEQ ID NO: 306377 - DNA, 15 bp, Homo sapiens
ctattgttttctggg

SEQ ID NO: 306378 - DNA, 15 bp, Homo sapiens
gctattgttttctgg

SEQ ID NO: 306379 - DNA, 15 bp, Homo sapiens
tgctattgttttctg

SEQ ID NO: 306380 - DNA, 15 bp, Homo sapiens
ttgctattgttttct

SEQ ID NO: 306381 - DNA, 15 bp, Homo sapiens
attgctattgttttc

SEQ ID NO: 306382 - DNA, 15 bp, Homo sapiens
aattgctattgtttt

SEQ ID NO: 306383 - DNA, 15 bp, Homo sapiens
aaattgctattgttt

SEQ ID NO: 306384 - DNA, 15 bp, Homo sapiens
gaaattgctattgtt

SEQ ID NO: 306385 - DNA, 15 bp, Homo sapiens
agaaattgctattgt

SEQ ID NO: 306386 - DNA, 15 bp, Homo sapiens
cagaaattgctattg

SEQ ID NO: 306387 - DNA, 15 bp, Homo sapiens
gcagaaattgctatt

SEQ ID NO: 306388 - DNA, 15 bp, Homo sapiens
ggcagaaattgctat

SEQ ID NO: 306389 - DNA, 15 bp, Homo sapiens
aggcagaaattgcta

SEQ ID NO: 306390 - DNA, 15 bp, Homo sapiens
aaggcagaaattgct

SEQ ID NO: 306391 - DNA, 15 bp, Homo sapiens
gaaggcagaaattgc

SEQ ID NO: 306392 - DNA, 15 bp, Homo sapiens
ggaaggcagaaattg

SEQ ID NO: 306393 - DNA, 15 bp, Homo sapiens
tggaaggcagaaatt

SEQ ID NO: 306394 - DNA, 15 bp, Homo sapiens
gtggaaggcagaaat

SEQ ID NO: 306395 - DNA, 15 bp, Homo sapiens
agtggaaggcagaaa

SEQ ID NO: 306396 - DNA, 15 bp, Homo sapiens
aagtggaaggcagaa

SEQ ID NO: 306397 - DNA, 15 bp, Homo sapiens
gaagtggaaggcaga

SEQ ID NO: 306398 - DNA, 15 bp, Homo sapiens
ggaagtggaaggcag

SEQ ID NO: 306399 - DNA, 15 bp, Homo sapiens
aggaagtggaaggca

SEQ ID NO: 306400 - DNA, 15 bp, Homo sapiens
gaggaagtggaaggc

SEQ ID NO: 306401 - DNA, 15 bp, Homo sapiens
agaggaagtggaagg

SEQ ID NO: 306402 - DNA, 15 bp, Homo sapiens
tagaggaagtggaag

SEQ ID NO: 306403 - DNA, 15 bp, Homo sapiens
atagaggaagtggaa

SEQ ID NO: 306404 - DNA, 15 bp, Homo sapiens
aatagaggaagtgga

SEQ ID NO: 306405 - DNA, 15 bp, Homo sapiens
caatagaggaagtgg

SEQ ID NO: 306406 - DNA, 15 bp, Homo sapiens
acaatagaggaagtg

SEQ ID NO: 306407 - DNA, 15 bp, Homo sapiens
aacaatagaggaagt

SEQ ID NO: 306408 - DNA, 15 bp, Homo sapiens
taacaatagaggaag

SEQ ID NO: 306409 - DNA, 15 bp, Homo sapiens
ttaacaatagaggaa

SEQ ID NO: 306410 - DNA, 15 bp, Homo sapiens
attaacaatagagga

SEQ ID NO: 306411 - DNA, 15 bp, Homo sapiens
aattaacaatagagg

SEQ ID NO: 306412 - DNA, 15 bp, Homo sapiens
aaattaacaatagag

SEQ ID NO: 306413 - DNA, 15 bp, Homo sapiens
aaaattaacaataga

SEQ ID NO: 306414 - DNA, 15 bp, Homo sapiens
aaaaattaacaatag

SEQ ID NO: 306415 - DNA, 15 bp, Homo sapiens
gaaaaattaacaata

SEQ ID NO: 306416 - DNA, 15 bp, Homo sapiens
agaaaaattaacaat

SEQ ID NO: 306417 - DNA, 15 bp, Homo sapiens
tagaaaaattaacaa

SEQ ID NO: 306418 - DNA, 15 bp, Homo sapiens
gtagaaaaattaaca

SEQ ID NO: 306419 - DNA, 15 bp, Homo sapiens
agtagaaaaattaac

SEQ ID NO: 306420 - DNA, 15 bp, Homo sapiens
tagtagaaaaattaa

SEQ ID NO: 306421 - DNA, 15 bp, Homo sapiens
ctagtagaaaaatta

SEQ ID NO: 306422 - DNA, 15 bp, Homo sapiens
gctagtagaaaaatt

SEQ ID NO: 306423 - DNA, 15 bp, Homo sapiens
tgctagtagaaaaat

SEQ ID NO: 306424 - DNA, 15 bp, Homo sapiens
gtgctagtagaaaaa

SEQ ID NO: 306425 - DNA, 15 bp, Homo sapiens
agtgctagtagaaaa

SEQ ID NO: 306426 - DNA, 15 bp, Homo sapiens
tagtgctagtagaaa

SEQ ID NO: 306427 - DNA, 15 bp, Homo sapiens
gtagtgctagtagaa

SEQ ID NO: 306428 - DNA, 15 bp, Homo sapiens
agtagtgctagtaga

SEQ ID NO: 306429 - DNA, 15 bp, Homo sapiens
cagtagtgctagtag

SEQ ID NO: 306430 - DNA, 15 bp, Homo sapiens
tcagtagtgctagta

SEQ ID NO: 306431 - DNA, 15 bp, Homo sapiens
gtcagtagtgctagt

SEQ ID NO: 306432 - DNA, 15 bp, Homo sapiens
agtcagtagtgctag

SEQ ID NO: 306433 - DNA, 15 bp, Homo sapiens
aagtcagtagtgcta

SEQ ID NO: 306434 - DNA, 15 bp, Homo sapiens
caagtcagtagtgct

SEQ ID NO: 306435 - DNA, 15 bp, Homo sapiens
acaagtcagtagtgc

SEQ ID NO: 306436 - DNA, 15 bp, Homo sapiens
tacaagtcagtagtg

SEQ ID NO: 306437 - DNA, 15 bp, Homo sapiens
gtacaagtcagtagt

SEQ ID NO: 306438 - DNA, 15 bp, Homo sapiens
agtacaagtcagtag

SEQ ID NO: 306439 - DNA, 15 bp, Homo sapiens
aagtacaagtcagta

SEQ ID NO: 306440 - DNA, 15 bp, Homo sapiens
taagtacaagtcagt

SEQ ID NO: 306441 - DNA, 15 bp, Homo sapiens
gtaagtacaagtcag

SEQ ID NO: 306442 - DNA, 15 bp, Homo sapiens
agtaagtacaagtca

SEQ ID NO: 306443 - DNA, 15 bp, Homo sapiens
aagtaagtacaagtc

SEQ ID NO: 306444 - DNA, 15 bp, Homo sapiens
aaagtaagtacaagt

SEQ ID NO: 306445 - DNA, 15 bp, Homo sapiens
caaagtaagtacaag

SEQ ID NO: 306446 - DNA, 15 bp, Homo sapiens
tcaaagtaagtacaa

SEQ ID NO: 306447 - DNA, 15 bp, Homo sapiens
atcaaagtaagtaca

SEQ ID NO: 306448 - DNA, 15 bp, Homo sapiens
tatcaaagtaagtac

SEQ ID NO: 306449 - DNA, 15 bp, Homo sapiens
ttatcaaagtaagta

SEQ ID NO: 306450 - DNA, 15 bp, Homo sapiens
attatcaaagtaagt

SEQ ID NO: 306451 - DNA, 15 bp, Homo sapiens
gattatcaaagtaag

SEQ ID NO: 306452 - DNA, 15 bp, Homo sapiens
tgattatcaaagtaa

SEQ ID NO: 306453 - DNA, 15 bp, Homo sapiens
ctgattatcaaagta

SEQ ID NO: 306454 - DNA, 15 bp, Homo sapiens
tctgattatcaaagt

SEQ ID NO: 306455 - DNA, 15 bp, Homo sapiens
ttctgattatcaaag

SEQ ID NO: 306456 - DNA, 15 bp, Homo sapiens
attctgattatcaaa

SEQ ID NO: 306457 - DNA, 15 bp, Homo sapiens
gattctgattatcaa

SEQ ID NO: 306458 - DNA, 15 bp, Homo sapiens
agattctgattatca

SEQ ID NO: 306459 - DNA, 15 bp, Homo sapiens
gagattctgattatc

SEQ ID NO: 306460 - DNA, 15 bp, Homo sapiens
agagattctgattat

SEQ ID NO: 306461 - DNA, 15 bp, Homo sapiens
aagagattctgatta

SEQ ID NO: 306462 - DNA, 15 bp, Homo sapiens
aaagagattctgatt

SEQ ID NO: 306463 - DNA, 15 bp, Homo sapiens
aaaagagattctgat

SEQ ID NO: 306464 - DNA, 15 bp, Homo sapiens
taaaagagattctga

SEQ ID NO: 306465 - DNA, 15 bp, Homo sapiens
ctaaaagagattctg

SEQ ID NO: 306466 - DNA, 15 bp, Homo sapiens
cctaaaagagattct

SEQ ID NO: 306467 - DNA, 15 bp, Homo sapiens
tcctaaaagagattc

SEQ ID NO: 306468 - DNA, 15 bp, Homo sapiens
ctcctaaaagagatt

SEQ ID NO: 306469 - DNA, 15 bp, Homo sapiens
gctcctaaaagagat

SEQ ID NO: 306470 - DNA, 15 bp, Homo sapiens
tgctcctaaaagaga

SEQ ID NO: 306471 - DNA, 15 bp, Homo sapiens
gtgctcctaaaagag

SEQ ID NO: 306472 - DNA, 15 bp, Homo sapiens
ggtgctcctaaaaga

SEQ ID NO: 306473 - DNA, 15 bp, Homo sapiens
aggtgctcctaaaag

SEQ ID NO: 306474 - DNA, 15 bp, Homo sapiens
aaggtgctcctaaaa

SEQ ID NO: 306475 - DNA, 15 bp, Homo sapiens
caaggtgctcctaaa

SEQ ID NO: 306476 - DNA, 15 bp, Homo sapiens
tcaaggtgctcctaa

SEQ ID NO: 306477 - DNA, 15 bp, Homo sapiens
gtcaaggtgctccta

SEQ ID NO: 306478 - DNA, 15 bp, Homo sapiens
agtcaaggtgctcct

SEQ ID NO: 306479 - DNA, 15 bp, Homo sapiens
aagtcaaggtgctcc

SEQ ID NO: 306480 - DNA, 15 bp, Homo sapiens
taagtcaaggtgctc

SEQ ID NO: 306481 - DNA, 15 bp, Homo sapiens
ttaagtcaaggtgct

SEQ ID NO: 306482 - DNA, 15 bp, Homo sapiens
attaagtcaaggtgc

SEQ ID NO: 306483 - DNA, 15 bp, Homo sapiens
tattaagtcaaggtg

SEQ ID NO: 306484 - DNA, 15 bp, Homo sapiens
ctattaagtcaaggt

SEQ ID NO: 306485 - DNA, 15 bp, Homo sapiens
gctattaagtcaagg

SEQ ID NO: 306486 - DNA, 15 bp, Homo sapiens
ggctattaagtcaag

SEQ ID NO: 306487 - DNA, 15 bp, Homo sapiens
aggctattaagtcaa

SEQ ID NO: 306488 - DNA, 15 bp, Homo sapiens
aaggctattaagtca

SEQ ID NO: 306489 - DNA, 15 bp, Homo sapiens
caaggctattaagtc

SEQ ID NO: 306490 - DNA, 15 bp, Homo sapiens
ccaaggctattaagt

SEQ ID NO: 306491 - DNA, 15 bp, Homo sapiens
tccaaggctattaag

SEQ ID NO: 306492 - DNA, 15 bp, Homo sapiens
ctccaaggctattaa

SEQ ID NO: 306493 - DNA, 15 bp, Homo sapiens
actccaaggctatta

SEQ ID NO: 306494 - DNA, 15 bp, Homo sapiens
gactccaaggctatt

SEQ ID NO: 306495 - DNA, 15 bp, Homo sapiens
ggactccaaggctat

SEQ ID NO: 306496 - DNA, 15 bp, Homo sapiens
aggactccaaggcta

SEQ ID NO: 306497 - DNA, 15 bp, Homo sapiens
aaggactccaaggct

SEQ ID NO: 306498 - DNA, 15 bp, Homo sapiens
aaaggactccaaggc

SEQ ID NO: 306499 - DNA, 15 bp, Homo sapiens
taaaggactccaagg

SEQ ID NO: 306500 - DNA, 15 bp, Homo sapiens
gtaaaggactccaag

SEQ ID NO: 306501 - DNA, 15 bp, Homo sapiens
agtaaaggactccaa

SEQ ID NO: 306502 - DNA, 15 bp, Homo sapiens
aagtaaaggactcca

SEQ ID NO: 306503 - DNA, 15 bp, Homo sapiens
aaagtaaaggactcc

SEQ ID NO: 306504 - DNA, 15 bp, Homo sapiens
gaaagtaaaggactc

SEQ ID NO: 306505 - DNA, 15 bp, Homo sapiens
agaaagtaaaggact

SEQ ID NO: 306506 - DNA, 15 bp, Homo sapiens
tagaaagtaaaggac

SEQ ID NO: 306507 - DNA, 15 bp, Homo sapiens
ctagaaagtaaagga

SEQ ID NO: 306508 - DNA, 15 bp, Homo sapiens
tctagaaagtaaagg

SEQ ID NO: 306509 - DNA, 15 bp, Homo sapiens
gtctagaaagtaaag

SEQ ID NO: 306510 - DNA, 15 bp, Homo sapiens
tgtctagaaagtaaa

SEQ ID NO: 306511 - DNA, 15 bp, Homo sapiens
ttgtctagaaagtaa

SEQ ID NO: 306512 - DNA, 15 bp, Homo sapiens
cttgtctagaaagta

SEQ ID NO: 306513 - DNA, 15 bp, Homo sapiens
acttgtctagaaagt

SEQ ID NO: 306514 - DNA, 15 bp, Homo sapiens
aacttgtctagaaag

SEQ ID NO: 306515 - DNA, 15 bp, Homo sapiens
gaacttgtctagaaa

SEQ ID NO: 306516 - DNA, 15 bp, Homo sapiens
tgaacttgtctagaa

SEQ ID NO: 306517 - DNA, 15 bp, Homo sapiens
atgaacttgtctaga

SEQ ID NO: 306518 - DNA, 15 bp, Homo sapiens
catgaacttgtctag

SEQ ID NO: 306519 - DNA, 15 bp, Homo sapiens
gcatgaacttgtcta

SEQ ID NO: 306520 - DNA, 15 bp, Homo sapiens
agcatgaacttgtct

SEQ ID NO: 306521 - DNA, 15 bp, Homo sapiens
aagcatgaacttgtc

SEQ ID NO: 306522 - DNA, 15 bp, Homo sapiens
caagcatgaacttgt

SEQ ID NO: 306523 - DNA, 15 bp, Homo sapiens
gcaagcatgaacttg

SEQ ID NO: 306524 - DNA, 15 bp, Homo sapiens
ggcaagcatgaactt

SEQ ID NO: 306525 - DNA, 15 bp, Homo sapiens
aggcaagcatgaact

SEQ ID NO: 306526 - DNA, 15 bp, Homo sapiens
aaggcaagcatgaac

SEQ ID NO: 306527 - DNA, 15 bp, Homo sapiens
taaggcaagcatgaa

SEQ ID NO: 306528 - DNA, 15 bp, Homo sapiens
ctaaggcaagcatga

SEQ ID NO: 306529 - DNA, 15 bp, Homo sapiens
tctaaggcaagcatg

SEQ ID NO: 306530 - DNA, 15 bp, Homo sapiens
ttctaaggcaagcat

SEQ ID NO: 306531 - DNA, 15 bp, Homo sapiens
tttctaaggcaagca

SEQ ID NO: 306532 - DNA, 15 bp, Homo sapiens
atttctaaggcaagc

SEQ ID NO: 306533 - DNA, 15 bp, Homo sapiens
catttctaaggcaag

SEQ ID NO: 306534 - DNA, 15 bp, Homo sapiens
acatttctaaggcaa

SEQ ID NO: 306535 - DNA, 15 bp, Homo sapiens
tacatttctaaggca

SEQ ID NO: 306536 - DNA, 15 bp, Homo sapiens
atacatttctaaggc

SEQ ID NO: 306537 - DNA, 15 bp, Homo sapiens
catacatttctaagg

SEQ ID NO: 306538 - DNA, 15 bp, Homo sapiens
acatacatttctaag

SEQ ID NO: 306539 - DNA, 15 bp, Homo sapiens
aacatacatttctaa

SEQ ID NO: 306540 - DNA, 15 bp, Homo sapiens
taacatacatttcta

SEQ ID NO: 306541 - DNA, 15 bp, Homo sapiens
ctaacatacatttct

SEQ ID NO: 306542 - DNA, 15 bp, Homo sapiens
actaacatacatttc

SEQ ID NO: 306543 - DNA, 15 bp, Homo sapiens
aactaacatacattt

SEQ ID NO: 306544 - DNA, 15 bp, Homo sapiens
taactaacatacatt

SEQ ID NO: 306545 - DNA, 15 bp, Homo sapiens
ataactaacatacat

SEQ ID NO: 306546 - DNA, 15 bp, Homo sapiens
cataactaacataca

SEQ ID NO: 306547 - DNA, 15 bp, Homo sapiens
tcataactaacatac

SEQ ID NO: 306548 - DNA, 15 bp, Homo sapiens
ttcataactaacata

SEQ ID NO: 306549 - DNA, 15 bp, Homo sapiens
tttcataactaacat

SEQ ID NO: 306550 - DNA, 15 bp, Homo sapiens
ttttcataactaaca

SEQ ID NO: 306551 - DNA, 15 bp, Homo sapiens
cttttcataactaac

SEQ ID NO: 306552 - DNA, 15 bp, Homo sapiens
acttttcataactaa

SEQ ID NO: 306553 - DNA, 15 bp, Homo sapiens
gacttttcataacta

SEQ ID NO: 306554 - DNA, 15 bp, Homo sapiens
tgacttttcataact

SEQ ID NO: 306555 - DNA, 15 bp, Homo sapiens
atgacttttcataac

SEQ ID NO: 306556 - DNA, 15 bp, Homo sapiens
catgacttttcataa

SEQ ID NO: 306557 - DNA, 15 bp, Homo sapiens
acatgacttttcata

SEQ ID NO: 306558 - DNA, 15 bp, Homo sapiens
tacatgacttttcat

SEQ ID NO: 306559 - DNA, 15 bp, Homo sapiens
ctacatgacttttca

SEQ ID NO: 306560 - DNA, 15 bp, Homo sapiens
tctacatgacttttc

SEQ ID NO: 306561 - DNA, 15 bp, Homo sapiens
ttctacatgactttt

SEQ ID NO: 306562 - DNA, 15 bp, Homo sapiens
gttctacatgacttt

SEQ ID NO: 306563 - DNA, 15 bp, Homo sapiens
tgttctacatgactt

SEQ ID NO: 306564 - DNA, 15 bp, Homo sapiens
ctgttctacatgact

SEQ ID NO: 306565 - DNA, 15 bp, Homo sapiens
tctgttctacatgac

SEQ ID NO: 306566 - DNA, 15 bp, Homo sapiens
gtctgttctacatga

SEQ ID NO: 306567 - DNA, 15 bp, Homo sapiens
agtctgttctacatg

SEQ ID NO: 306568 - DNA, 15 bp, Homo sapiens
aagtctgttctacat

SEQ ID NO: 306569 - DNA, 15 bp, Homo sapiens
taagtctgttctaca

SEQ ID NO: 306570 - DNA, 15 bp, Homo sapiens
ataagtctgttctac

SEQ ID NO: 306571 - DNA, 15 bp, Homo sapiens
tataagtctgttcta

SEQ ID NO: 306572 - DNA, 15 bp, Homo sapiens
ctataagtctgttct

SEQ ID NO: 306573 - DNA, 15 bp, Homo sapiens
gctataagtctgttc

SEQ ID NO: 306574 - DNA, 15 bp, Homo sapiens
agctataagtctgtt

SEQ ID NO: 306575 - DNA, 15 bp, Homo sapiens
aagctataagtctgt

SEQ ID NO: 306576 - DNA, 15 bp, Homo sapiens
gaagctataagtctg

SEQ ID NO: 306577 - DNA, 15 bp, Homo sapiens
agaagctataagtct

SEQ ID NO: 306578 - DNA, 15 bp, Homo sapiens
tagaagctataagtc

SEQ ID NO: 306579 - DNA, 15 bp, Homo sapiens
gtagaagctataagt

SEQ ID NO: 306580 - DNA, 15 bp, Homo sapiens
agtagaagctataag

SEQ ID NO: 306581 - DNA, 15 bp, Homo sapiens
aagtagaagctataa

SEQ ID NO: 306582 - DNA, 15 bp, Homo sapiens
aaagtagaagctata

SEQ ID NO: 306583 - DNA, 15 bp, Homo sapiens
aaaagtagaagctat

SEQ ID NO: 306584 - DNA, 15 bp, Homo sapiens
aaaaagtagaagcta

SEQ ID NO: 306585 - DNA, 15 bp, Homo sapiens
gaaaaagtagaagct

SEQ ID NO: 306586 - DNA, 15 bp, Homo sapiens
agaaaaagtagaagc

SEQ ID NO: 306587 - DNA, 15 bp, Homo sapiens
tagaaaaagtagaag

SEQ ID NO: 306588 - DNA, 15 bp, Homo sapiens
atagaaaaagtagaa

SEQ ID NO: 306589 - DNA, 15 bp, Homo sapiens
gatagaaaaagtaga

SEQ ID NO: 306590 - DNA, 15 bp, Homo sapiens
tgatagaaaaagtag

SEQ ID NO: 306591 - DNA, 15 bp, Homo sapiens
ttgatagaaaaagta

SEQ ID NO: 306592 - DNA, 15 bp, Homo sapiens
attgatagaaaaagt

SEQ ID NO: 306593 - DNA, 15 bp, Homo sapiens
tattgatagaaaaag

SEQ ID NO: 306594 - DNA, 15 bp, Homo sapiens
atattgatagaaaaa

SEQ ID NO: 306595 - DNA, 15 bp, Homo sapiens
aatattgatagaaaa

SEQ ID NO: 306596 - DNA, 15 bp, Homo sapiens
taatattgatagaaa

SEQ ID NO: 306597 - DNA, 15 bp, Homo sapiens
ataatattgatagaa

SEQ ID NO: 306598 - DNA, 15 bp, Homo sapiens
aataatattgataga

SEQ ID NO: 306599 - DNA, 15 bp, Homo sapiens
aaataatattgatag

SEQ ID NO: 306600 - DNA, 15 bp, Homo sapiens
taaataatattgata

SEQ ID NO: 306601 - DNA, 15 bp, Homo sapiens
gtaaataatattgat

SEQ ID NO: 306602 - DNA, 15 bp, Homo sapiens
ggtaaataatattga

SEQ ID NO: 306603 - DNA, 15 bp, Homo sapiens
gggtaaataatattg

SEQ ID NO: 306604 - DNA, 15 bp, Homo sapiens
tgggtaaataatatt

SEQ ID NO: 306605 - DNA, 15 bp, Homo sapiens
ctgggtaaataatat

SEQ ID NO: 306606 - DNA, 15 bp, Homo sapiens
actgggtaaataata

SEQ ID NO: 306607 - DNA, 15 bp, Homo sapiens
cactgggtaaataat

SEQ ID NO: 306608 - DNA, 15 bp, Homo sapiens
tcactgggtaaataa

SEQ ID NO: 306609 - DNA, 15 bp, Homo sapiens
ttcactgggtaaata

SEQ ID NO: 306610 - DNA, 15 bp, Homo sapiens
tttcactgggtaaat

SEQ ID NO: 306611 - DNA, 15 bp, Homo sapiens
atttcactgggtaaa

SEQ ID NO: 306612 - DNA, 15 bp, Homo sapiens
aatttcactgggtaa

SEQ ID NO: 306613 - DNA, 15 bp, Homo sapiens
aaatttcactgggta

SEQ ID NO: 306614 - DNA, 15 bp, Homo sapiens
taaatttcactgggt

SEQ ID NO: 306615 - DNA, 15 bp, Homo sapiens
ataaatttcactggg

SEQ ID NO: 306616 - DNA, 15 bp, Homo sapiens
tataaatttcactgg

SEQ ID NO: 306617 - DNA, 15 bp, Homo sapiens
gtataaatttcactg

SEQ ID NO: 306618 - DNA, 15 bp, Homo sapiens
agtataaatttcact

SEQ ID NO: 306619 - DNA, 15 bp, Homo sapiens
tagtataaatttcac

SEQ ID NO: 306620 - DNA, 15 bp, Homo sapiens
ttagtataaatttca

SEQ ID NO: 306621 - DNA, 15 bp, Homo sapiens
attagtataaatttc

SEQ ID NO: 306622 - DNA, 15 bp, Homo sapiens
gattagtataaattt

SEQ ID NO: 306623 - DNA, 15 bp, Homo sapiens
agattagtataaatt

SEQ ID NO: 306624 - DNA, 15 bp, Homo sapiens
aagattagtataaat

SEQ ID NO: 306625 - DNA, 15 bp, Homo sapiens
caagattagtataaa

SEQ ID NO: 306626 - DNA, 15 bp, Homo sapiens
gcaagattagtataa

SEQ ID NO: 306627 - DNA, 15 bp, Homo sapiens
agcaagattagtata

SEQ ID NO: 306628 - DNA, 15 bp, Homo sapiens
cagcaagattagtat

SEQ ID NO: 306629 - DNA, 15 bp, Homo sapiens
tcagcaagattagta

SEQ ID NO: 306630 - DNA, 15 bp, Homo sapiens
gtcagcaagattagt

SEQ ID NO: 306631 - DNA, 15 bp, Homo sapiens
tgtcagcaagattag

SEQ ID NO: 306632 - DNA, 15 bp, Homo sapiens
ctgtcagcaagatta

SEQ ID NO: 306633 - DNA, 15 bp, Homo sapiens
actgtcagcaagatt

SEQ ID NO: 306634 - DNA, 15 bp, Homo sapiens
cactgtcagcaagat

SEQ ID NO: 306635 - DNA, 15 bp, Homo sapiens
tcactgtcagcaaga

SEQ ID NO: 306636 - DNA, 15 bp, Homo sapiens
ctcactgtcagcaag

SEQ ID NO: 306637 - DNA, 15 bp, Homo sapiens
tctcactgtcagcaa

SEQ ID NO: 306638 - DNA, 15 bp, Homo sapiens
ctctcactgtcagca

SEQ ID NO: 306639 - DNA, 15 bp, Homo sapiens
gctctcactgtcagc

SEQ ID NO: 306640 - DNA, 15 bp, Homo sapiens
ggctctcactgtcag

SEQ ID NO: 306641 - DNA, 15 bp, Homo sapiens
aggctctcactgtca

SEQ ID NO: 306642 - DNA, 15 bp, Homo sapiens
caggctctcactgtc

SEQ ID NO: 306643 - DNA, 15 bp, Homo sapiens
ccaggctctcactgt

SEQ ID NO: 306644 - DNA, 15 bp, Homo sapiens
accaggctctcactg

SEQ ID NO: 306645 - DNA, 15 bp, Homo sapiens
aaccaggctctcact

SEQ ID NO: 306646 - DNA, 15 bp, Homo sapiens
aaaccaggctctcac

SEQ ID NO: 306647 - DNA, 15 bp, Homo sapiens
gaaaccaggctctca

SEQ ID NO: 306648 - DNA, 15 bp, Homo sapiens
ggaaaccaggctctc

SEQ ID NO: 306649 - DNA, 15 bp, Homo sapiens
aggaaaccaggctct

SEQ ID NO: 306650 - DNA, 15 bp, Homo sapiens
aaggaaaccaggctc

SEQ ID NO: 306651 - DNA, 15 bp, Homo sapiens
gaaggaaaccaggct

SEQ ID NO: 306652 - DNA, 15 bp, Homo sapiens
tgaaggaaaccaggc

SEQ ID NO: 306653 - DNA, 15 bp, Homo sapiens
gtgaaggaaaccagg

SEQ ID NO: 306654 - DNA, 15 bp, Homo sapiens
tgtgaaggaaaccag

SEQ ID NO: 306655 - DNA, 15 bp, Homo sapiens
ttgtgaaggaaacca

SEQ ID NO: 306656 - DNA, 15 bp, Homo sapiens
cttgtgaaggaaacc

SEQ ID NO: 306657 - DNA, 15 bp, Homo sapiens
tcttgtgaaggaaac

SEQ ID NO: 306658 - DNA, 15 bp, Homo sapiens
gtcttgtgaaggaaa

SEQ ID NO: 306659 - DNA, 15 bp, Homo sapiens
agtcttgtgaaggaa

SEQ ID NO: 306660 - DNA, 15 bp, Homo sapiens
tagtcttgtgaagga

SEQ ID NO: 306661 - DNA, 15 bp, Homo sapiens
ttagtcttgtgaagg

SEQ ID NO: 306662 - DNA, 15 bp, Homo sapiens
cttagtcttgtgaag

SEQ ID NO: 306663 - DNA, 15 bp, Homo sapiens
acttagtcttgtgaa

SEQ ID NO: 306664 - DNA, 15 bp, Homo sapiens
tacttagtcttgtga

SEQ ID NO: 306665 - DNA, 15 bp, Homo sapiens
ctacttagtcttgtg

SEQ ID NO: 306666 - DNA, 15 bp, Homo sapiens
gctacttagtcttgt

SEQ ID NO: 306667 - DNA, 15 bp, Homo sapiens
tgctacttagtcttg

SEQ ID NO: 306668 - DNA, 15 bp, Homo sapiens
ttgctacttagtctt

SEQ ID NO: 306669 - DNA, 15 bp, Homo sapiens
tttgctacttagtct

SEQ ID NO: 306670 - DNA, 15 bp, Homo sapiens
ttttgctacttagtc

SEQ ID NO: 306671 - DNA, 15 bp, Homo sapiens
gttttgctacttagt

SEQ ID NO: 306672 - DNA, 15 bp, Homo sapiens
tgttttgctacttag

SEQ ID NO: 306673 - DNA, 15 bp, Homo sapiens
ctgttttgctactta

SEQ ID NO: 306674 - DNA, 15 bp, Homo sapiens
tctgttttgctactt

SEQ ID NO: 306675 - DNA, 15 bp, Homo sapiens
ctctgttttgctact

SEQ ID NO: 306676 - DNA, 15 bp, Homo sapiens
actctgttttgctac

SEQ ID NO: 306677 - DNA, 15 bp, Homo sapiens
cactctgttttgcta

SEQ ID NO: 306678 - DNA, 15 bp, Homo sapiens
tcactctgttttgct

SEQ ID NO: 306679 - DNA, 15 bp, Homo sapiens
ttcactctgttttgc

SEQ ID NO: 306680 - DNA, 15 bp, Homo sapiens
cttcactctgttttg

SEQ ID NO: 306681 - DNA, 15 bp, Homo sapiens
gcttcactctgtttt

SEQ ID NO: 306682 - DNA, 15 bp, Homo sapiens
cgcttcactctgttt

SEQ ID NO: 306683 - DNA, 15 bp, Homo sapiens
acgcttcactctgtt

SEQ ID NO: 306684 - DNA, 15 bp, Homo sapiens
aacgcttcactctgt

SEQ ID NO: 306685 - DNA, 15 bp, Homo sapiens
caacgcttcactctg

SEQ ID NO: 306686 - DNA, 15 bp, Homo sapiens
acaacgcttcactct

SEQ ID NO: 306687 - DNA, 15 bp, Homo sapiens
aacaacgcttcactc

SEQ ID NO: 306688 - DNA, 15 bp, Homo sapiens
gaacaacgcttcact

SEQ ID NO: 306689 - DNA, 15 bp, Homo sapiens
tgaacaacgcttcac

SEQ ID NO: 306690 - DNA, 15 bp, Homo sapiens
ctgaacaacgcttca

SEQ ID NO: 306691 - DNA, 15 bp, Homo sapiens
tctgaacaacgcttc

SEQ ID NO: 306692 - DNA, 15 bp, Homo sapiens
ctctgaacaacgctt

SEQ ID NO: 306693 - DNA, 15 bp, Homo sapiens
tctctgaacaacgct

SEQ ID NO: 306694 - DNA, 15 bp, Homo sapiens
ctctctgaacaacgc

SEQ ID NO: 306695 - DNA, 15 bp, Homo sapiens
gctctctgaacaacg

SEQ ID NO: 306696 - DNA, 15 bp, Homo sapiens
tgctctctgaacaac

SEQ ID NO: 306697 - DNA, 15 bp, Homo sapiens
ttgctctctgaacaa

SEQ ID NO: 306698 - DNA, 15 bp, Homo sapiens
attgctctctgaaca

SEQ ID NO: 306699 - DNA, 15 bp, Homo sapiens
aattgctctctgaac

SEQ ID NO: 306700 - DNA, 15 bp, Homo sapiens
taattgctctctgaa

SEQ ID NO: 306701 - DNA, 15 bp, Homo sapiens
ctaattgctctctga

SEQ ID NO: 306702 - DNA, 15 bp, Homo sapiens
cctaattgctctctg

SEQ ID NO: 306703 - DNA, 15 bp, Homo sapiens
gcctaattgctctct

SEQ ID NO: 306704 - DNA, 15 bp, Homo sapiens
agcctaattgctctc

SEQ ID NO: 306705 - DNA, 15 bp, Homo sapiens
cagcctaattgctct

SEQ ID NO: 306706 - DNA, 15 bp, Homo sapiens
tcagcctaattgctc

SEQ ID NO: 306707 - DNA, 15 bp, Homo sapiens
gtcagcctaattgct

SEQ ID NO: 306708 - DNA, 15 bp, Homo sapiens
tgtcagcctaattgc

SEQ ID NO: 306709 - DNA, 15 bp, Homo sapiens
ctgtcagcctaattg

SEQ ID NO: 306710 - DNA, 15 bp, Homo sapiens
actgtcagcctaatt

SEQ ID NO: 306711 - DNA, 15 bp, Homo sapiens
aactgtcagcctaat

SEQ ID NO: 306712 - DNA, 15 bp, Homo sapiens
taactgtcagcctaa

SEQ ID NO: 306713 - DNA, 15 bp, Homo sapiens
ttaactgtcagccta

SEQ ID NO: 306714 - DNA, 15 bp, Homo sapiens
attaactgtcagcct

SEQ ID NO: 306715 - DNA, 15 bp, Homo sapiens
aattaactgtcagcc

SEQ ID NO: 306716 - DNA, 15 bp, Homo sapiens
aaattaactgtcagc

SEQ ID NO: 306717 - DNA, 15 bp, Homo sapiens
caaattaactgtcag

SEQ ID NO: 306718 - DNA, 15 bp, Homo sapiens
tcaaattaactgtca

SEQ ID NO: 306719 - DNA, 15 bp, Homo sapiens
ctcaaattaactgtc

SEQ ID NO: 306720 - DNA, 15 bp, Homo sapiens
actcaaattaactgt

SEQ ID NO: 306721 - DNA, 15 bp, Homo sapiens
tactcaaattaactg

SEQ ID NO: 306722 - DNA, 15 bp, Homo sapiens
ctactcaaattaact

SEQ ID NO: 306723 - DNA, 15 bp, Homo sapiens
tctactcaaattaac

SEQ ID NO: 306724 - DNA, 15 bp, Homo sapiens
atctactcaaattaa

SEQ ID NO: 306725 - DNA, 15 bp, Homo sapiens
tatctactcaaatta

SEQ ID NO: 306726 - DNA, 15 bp, Homo sapiens
ttatctactcaaatt

SEQ ID NO: 306727 - DNA, 15 bp, Homo sapiens
cttatctactcaaat

SEQ ID NO: 306728 - DNA, 15 bp, Homo sapiens
acttatctactcaaa

SEQ ID NO: 306729 - DNA, 15 bp, Homo sapiens
tacttatctactcaa

SEQ ID NO: 306730 - DNA, 15 bp, Homo sapiens
ttacttatctactca

SEQ ID NO: 306731 - DNA, 15 bp, Homo sapiens
attacttatctactc

SEQ ID NO: 306732 - DNA, 15 bp, Homo sapiens
tattacttatctact

SEQ ID NO: 306733 - DNA, 15 bp, Homo sapiens
ttattacttatctac

SEQ ID NO: 306734 - DNA, 15 bp, Homo sapiens
gttattacttatcta

SEQ ID NO: 306735 - DNA, 15 bp, Homo sapiens
tgttattacttatct

SEQ ID NO: 306736 - DNA, 15 bp, Homo sapiens
atgttattacttatc

SEQ ID NO: 306737 - DNA, 15 bp, Homo sapiens
catgttattacttat

SEQ ID NO: 306738 - DNA, 15 bp, Homo sapiens
tcatgttattactta

SEQ ID NO: 306739 - DNA, 15 bp, Homo sapiens
ctcatgttattactt

SEQ ID NO: 306740 - DNA, 15 bp, Homo sapiens
actcatgttattact

SEQ ID NO: 306741 - DNA, 15 bp, Homo sapiens
aactcatgttattac

SEQ ID NO: 306742 - DNA, 15 bp, Homo sapiens
caactcatgttatta

SEQ ID NO: 306743 - DNA, 15 bp, Homo sapiens
tcaactcatgttatt

SEQ ID NO: 306744 - DNA, 15 bp, Homo sapiens
ctcaactcatgttat

SEQ ID NO: 306745 - DNA, 15 bp, Homo sapiens
actcaactcatgtta

SEQ ID NO: 306746 - DNA, 15 bp, Homo sapiens
tactcaactcatgtt

SEQ ID NO: 306747 - DNA, 15 bp, Homo sapiens
gtactcaactcatgt

SEQ ID NO: 306748 - DNA, 15 bp, Homo sapiens
tgtactcaactcatg

SEQ ID NO: 306749 - DNA, 15 bp, Homo sapiens
ttgtactcaactcat

SEQ ID NO: 306750 - DNA, 15 bp, Homo sapiens
cttgtactcaactca

SEQ ID NO: 306751 - DNA, 15 bp, Homo sapiens
tcttgtactcaactc

SEQ ID NO: 306752 - DNA, 15 bp, Homo sapiens
ctcttgtactcaact

SEQ ID NO: 306753 - DNA, 15 bp, Homo sapiens
tctcttgtactcaac

SEQ ID NO: 306754 - DNA, 15 bp, Homo sapiens
ttctcttgtactcaa

SEQ ID NO: 306755 - DNA, 15 bp, Homo sapiens
tttctcttgtactca

SEQ ID NO: 306756 - DNA, 15 bp, Homo sapiens
ttttctcttgtactc

SEQ ID NO: 306757 - DNA, 15 bp, Homo sapiens
gttttctcttgtact

SEQ ID NO: 306758 - DNA, 15 bp, Homo sapiens
agttttctcttgtac

SEQ ID NO: 306759 - DNA, 15 bp, Homo sapiens
tagttttctcttgta

SEQ ID NO: 306760 - DNA, 15 bp, Homo sapiens
gtagttttctcttgt

SEQ ID NO: 306761 - DNA, 15 bp, Homo sapiens
agtagttttctcttg

SEQ ID NO: 306762 - DNA, 15 bp, Homo sapiens
cagtagttttctctt

SEQ ID NO: 306763 - DNA, 15 bp, Homo sapiens
gcagtagttttctct

SEQ ID NO: 306764 - DNA, 15 bp, Homo sapiens
ggcagtagttttctc

SEQ ID NO: 306765 - DNA, 15 bp, Homo sapiens
gggcagtagttttct

SEQ ID NO: 306766 - DNA, 15 bp, Homo sapiens
tgggcagtagttttc

SEQ ID NO: 306767 - DNA, 15 bp, Homo sapiens
ttgggcagtagtttt

SEQ ID NO: 306768 - DNA, 15 bp, Homo sapiens
cttgggcagtagttt

SEQ ID NO: 306769 - DNA, 15 bp, Homo sapiens
acttgggcagtagtt

SEQ ID NO: 306770 - DNA, 15 bp, Homo sapiens
gacttgggcagtagt

SEQ ID NO: 306771 - DNA, 15 bp, Homo sapiens
ggacttgggcagtag

SEQ ID NO: 306772 - DNA, 15 bp, Homo sapiens
aggacttgggcagta

SEQ ID NO: 306773 - DNA, 15 bp, Homo sapiens
caggacttgggcagt

SEQ ID NO: 306774 - DNA, 15 bp, Homo sapiens
ccaggacttgggcag

SEQ ID NO: 306775 - DNA, 15 bp, Homo sapiens
tccaggacttgggca

SEQ ID NO: 306776 - DNA, 15 bp, Homo sapiens
atccaggacttgggc

SEQ ID NO: 306777 - DNA, 15 bp, Homo sapiens
tatccaggacttggg

SEQ ID NO: 306778 - DNA, 15 bp, Homo sapiens
ctatccaggacttgg

SEQ ID NO: 306779 - DNA, 15 bp, Homo sapiens
tctatccaggacttg

SEQ ID NO: 306780 - DNA, 15 bp, Homo sapiens
ttctatccaggactt

SEQ ID NO: 306781 - DNA, 15 bp, Homo sapiens
tttctatccaggact

SEQ ID NO: 306782 - DNA, 15 bp, Homo sapiens
gtttctatccaggac

SEQ ID NO: 306783 - DNA, 15 bp, Homo sapiens
tgtttctatccagga

SEQ ID NO: 306784 - DNA, 15 bp, Homo sapiens
ttgtttctatccagg

SEQ ID NO: 306785 - DNA, 15 bp, Homo sapiens
attgtttctatccag

SEQ ID NO: 306786 - DNA, 15 bp, Homo sapiens
cattgtttctatcca

SEQ ID NO: 306787 - DNA, 15 bp, Homo sapiens
gcattgtttctatcc

SEQ ID NO: 306788 - DNA, 15 bp, Homo sapiens
agcattgtttctatc

SEQ ID NO: 306789 - DNA, 15 bp, Homo sapiens
aagcattgtttctat

SEQ ID NO: 306790 - DNA, 15 bp, Homo sapiens
aaagcattgtttcta

SEQ ID NO: 306791 - DNA, 15 bp, Homo sapiens
taaagcattgtttct

SEQ ID NO: 306792 - DNA, 15 bp, Homo sapiens
ctaaagcattgtttc

SEQ ID NO: 306793 - DNA, 15 bp, Homo sapiens
tctaaagcattgttt

SEQ ID NO: 306794 - DNA, 15 bp, Homo sapiens
ttctaaagcattgtt

SEQ ID NO: 306795 - DNA, 15 bp, Homo sapiens
tttctaaagcattgt

SEQ ID NO: 306796 - DNA, 15 bp, Homo sapiens
ctttctaaagcattg

SEQ ID NO: 306797 - DNA, 15 bp, Homo sapiens
tctttctaaagcatt

SEQ ID NO: 306798 - DNA, 15 bp, Homo sapiens
ttctttctaaagcat

SEQ ID NO: 306799 - DNA, 15 bp, Homo sapiens
tttctttctaaagca

SEQ ID NO: 306800 - DNA, 15 bp, Homo sapiens
atttctttctaaagc

SEQ ID NO: 306801 - DNA, 15 bp, Homo sapiens
tatttctttctaaag

SEQ ID NO: 306802 - DNA, 15 bp, Homo sapiens
atatttctttctaaa

SEQ ID NO: 306803 - DNA, 15 bp, Homo sapiens
tatatttctttctaa

SEQ ID NO: 306804 - DNA, 15 bp, Homo sapiens
gtatatttctttcta

SEQ ID NO: 306805 - DNA, 15 bp, Homo sapiens
tgtatatttctttct

SEQ ID NO: 306806 - DNA, 15 bp, Homo sapiens
atgtatatttctttc

SEQ ID NO: 306807 - DNA, 15 bp, Homo sapiens
tatgtatatttcttt

SEQ ID NO: 306808 - DNA, 15 bp, Homo sapiens
atatgtatatttctt

SEQ ID NO: 306809 - DNA, 15 bp, Homo sapiens
aatatgtatatttct

SEQ ID NO: 306810 - DNA, 15 bp, Homo sapiens
aaatatgtatatttc

SEQ ID NO: 306811 - DNA, 15 bp, Homo sapiens
aaaatatgtatattt

SEQ ID NO: 306812 - DNA, 15 bp, Homo sapiens
taaaatatgtatatt

SEQ ID NO: 306813 - DNA, 15 bp, Homo sapiens
gtaaaatatgtatat

SEQ ID NO: 306814 - DNA, 15 bp, Homo sapiens
agtaaaatatgtata

SEQ ID NO: 306815 - DNA, 15 bp, Homo sapiens
aagtaaaatatgtat

SEQ ID NO: 306816 - DNA, 15 bp, Homo sapiens
aaagtaaaatatgta

SEQ ID NO: 306817 - DNA, 15 bp, Homo sapiens
gaaagtaaaatatgt

SEQ ID NO: 306818 - DNA, 15 bp, Homo sapiens
tgaaagtaaaatatg

SEQ ID NO: 306819 - DNA, 15 bp, Homo sapiens
ttgaaagtaaaatat

SEQ ID NO: 306820 - DNA, 15 bp, Homo sapiens
tttgaaagtaaaata

SEQ ID NO: 306821 - DNA, 15 bp, Homo sapiens
ttttgaaagtaaaat

SEQ ID NO: 306822 - DNA, 15 bp, Homo sapiens
cttttgaaagtaaaa

SEQ ID NO: 306823 - DNA, 15 bp, Homo sapiens
acttttgaaagtaaa

SEQ ID NO: 306824 - DNA, 15 bp, Homo sapiens
aacttttgaaagtaa

SEQ ID NO: 306825 - DNA, 15 bp, Homo sapiens
taacttttgaaagta

SEQ ID NO: 306826 - DNA, 15 bp, Homo sapiens
ttaacttttgaaagt

SEQ ID NO: 306827 - DNA, 15 bp, Homo sapiens
cttaacttttgaaag

SEQ ID NO: 306828 - DNA, 15 bp, Homo sapiens
acttaacttttgaaa

SEQ ID NO: 306829 - DNA, 15 bp, Homo sapiens
tacttaacttttgaa

SEQ ID NO: 306830 - DNA, 15 bp, Homo sapiens
atacttaacttttga

SEQ ID NO: 306831 - DNA, 15 bp, Homo sapiens
aatacttaacttttg

SEQ ID NO: 306832 - DNA, 15 bp, Homo sapiens
gaatacttaactttt

SEQ ID NO: 306833 - DNA, 15 bp, Homo sapiens
ggaatacttaacttt

SEQ ID NO: 306834 - DNA, 15 bp, Homo sapiens
tggaatacttaactt

SEQ ID NO: 306835 - DNA, 15 bp, Homo sapiens
atggaatacttaact

SEQ ID NO: 306836 - DNA, 15 bp, Homo sapiens
catggaatacttaac

SEQ ID NO: 306837 - DNA, 15 bp, Homo sapiens
tcatggaatacttaa

SEQ ID NO: 306838 - DNA, 15 bp, Homo sapiens
ttcatggaatactta

SEQ ID NO: 306839 - DNA, 15 bp, Homo sapiens
tttcatggaatactt

SEQ ID NO: 306840 - DNA, 15 bp, Homo sapiens
atttcatggaatact

SEQ ID NO: 306841 - DNA, 15 bp, Homo sapiens
tatttcatggaatac

SEQ ID NO: 306842 - DNA, 15 bp, Homo sapiens
atatttcatggaata

SEQ ID NO: 306843 - DNA, 15 bp, Homo sapiens
aatatttcatggaat

SEQ ID NO: 306844 - DNA, 15 bp, Homo sapiens
aaatatttcatggaa

SEQ ID NO: 306845 - DNA, 15 bp, Homo sapiens
aaaatatttcatgga

SEQ ID NO: 306846 - DNA, 15 bp, Homo sapiens
gaaaatatttcatgg

SEQ ID NO: 306847 - DNA, 15 bp, Homo sapiens
agaaaatatttcatg

SEQ ID NO: 306848 - DNA, 15 bp, Homo sapiens
aagaaaatatttcat

SEQ ID NO: 306849 - DNA, 15 bp, Homo sapiens
aaagaaaatatttca

SEQ ID NO: 306850 - DNA, 15 bp, Homo sapiens
taaagaaaatatttc

SEQ ID NO: 306851 - DNA, 15 bp, Homo sapiens
ataaagaaaatattt

SEQ ID NO: 306852 - DNA, 15 bp, Homo sapiens
tataaagaaaatatt

SEQ ID NO: 306853 - DNA, 15 bp, Homo sapiens
ctataaagaaaatat

SEQ ID NO: 306854 - DNA, 15 bp, Homo sapiens
actataaagaaaata

SEQ ID NO: 306855 - DNA, 15 bp, Homo sapiens
aactataaagaaaat

SEQ ID NO: 306856 - DNA, 15 bp, Homo sapiens
taactataaagaaaa

SEQ ID NO: 306857 - DNA, 15 bp, Homo sapiens
ttaactataaagaaa

SEQ ID NO: 306858 - DNA, 15 bp, Homo sapiens
tttaactataaagaa

SEQ ID NO: 306859 - DNA, 15 bp, Homo sapiens
ttttaactataaaga

SEQ ID NO: 306860 - DNA, 15 bp, Homo sapiens
tttttaactataaag

SEQ ID NO: 306861 - DNA, 15 bp, Homo sapiens
ttttttaactataaa

SEQ ID NO: 306862 - DNA, 15 bp, Homo sapiens
cttttttaactataa

SEQ ID NO: 306863 - DNA, 15 bp, Homo sapiens
tcttttttaactata

SEQ ID NO: 306864 - DNA, 15 bp, Homo sapiens
atcttttttaactat

SEQ ID NO: 306865 - DNA, 15 bp, Homo sapiens
gatcttttttaacta

SEQ ID NO: 306866 - DNA, 15 bp, Homo sapiens
tgatcttttttaact

SEQ ID NO: 306867 - DNA, 15 bp, Homo sapiens
ttgatcttttttaac

SEQ ID NO: 306868 - DNA, 15 bp, Homo sapiens
attgatcttttttaa

SEQ ID NO: 306869 - DNA, 15 bp, Homo sapiens
aattgatctttttta

SEQ ID NO: 306870 - DNA, 15 bp, Homo sapiens
caattgatctttttt

SEQ ID NO: 306871 - DNA, 15 bp, Homo sapiens
gcaattgatcttttt

SEQ ID NO: 306872 - DNA, 15 bp, Homo sapiens
agcaattgatctttt

SEQ ID NO: 306873 - DNA, 15 bp, Homo sapiens
tagcaattgatcttt

SEQ ID NO: 306874 - DNA, 15 bp, Homo sapiens
atagcaattgatctt

SEQ ID NO: 306875 - DNA, 15 bp, Homo sapiens
tatagcaattgatct

SEQ ID NO: 306876 - DNA, 15 bp, Homo sapiens
atatagcaattgatc

SEQ ID NO: 306877 - DNA, 15 bp, Homo sapiens
aatatagcaattgat

SEQ ID NO: 306878 - DNA, 15 bp, Homo sapiens
taatatagcaattga

SEQ ID NO: 306879 - DNA, 15 bp, Homo sapiens
ttaatatagcaattg

SEQ ID NO: 306880 - DNA, 15 bp, Homo sapiens
attaatatagcaatt

SEQ ID NO: 306881 - DNA, 15 bp, Homo sapiens
aattaatatagcaat

SEQ ID NO: 306882 - DNA, 15 bp, Homo sapiens
taattaatatagcaa

SEQ ID NO: 306883 - DNA, 15 bp, Homo sapiens
ataattaatatagca

SEQ ID NO: 306884 - DNA, 15 bp, Homo sapiens
gataattaatatagc

SEQ ID NO: 306885 - DNA, 15 bp, Homo sapiens
agataattaatatag

SEQ ID NO: 306886 - DNA, 15 bp, Homo sapiens
cagataattaatata

SEQ ID NO: 306887 - DNA, 15 bp, Homo sapiens
acagataattaatat

SEQ ID NO: 306888 - DNA, 15 bp, Homo sapiens
aacagataattaata

SEQ ID NO: 306889 - DNA, 15 bp, Homo sapiens
taacagataattaat

SEQ ID NO: 306890 - DNA, 15 bp, Homo sapiens
ctaacagataattaa

SEQ ID NO: 306891 - DNA, 15 bp, Homo sapiens
tctaacagataatta

SEQ ID NO: 306892 - DNA, 15 bp, Homo sapiens
ttctaacagataatt

SEQ ID NO: 306893 - DNA, 15 bp, Homo sapiens
gttctaacagataat

SEQ ID NO: 306894 - DNA, 15 bp, Homo sapiens
tgttctaacagataa

SEQ ID NO: 306895 - DNA, 15 bp, Homo sapiens
ttgttctaacagata

SEQ ID NO: 306896 - DNA, 15 bp, Homo sapiens
gttgttctaacagat

SEQ ID NO: 306897 - DNA, 15 bp, Homo sapiens
agttgttctaacaga

SEQ ID NO: 306898 - DNA, 15 bp, Homo sapiens
tagttgttctaacag

SEQ ID NO: 306899 - DNA, 15 bp, Homo sapiens
ttagttgttctaaca

SEQ ID NO: 306900 - DNA, 15 bp, Homo sapiens
gttagttgttctaac

SEQ ID NO: 306901 - DNA, 15 bp, Homo sapiens
tgttagttgttctaa

SEQ ID NO: 306902 - DNA, 15 bp, Homo sapiens
atgttagttgttcta

SEQ ID NO: 306903 - DNA, 15 bp, Homo sapiens
aatgttagttgttct

SEQ ID NO: 306904 - DNA, 15 bp, Homo sapiens
aaatgttagttgttc

SEQ ID NO: 306905 - DNA, 15 bp, Homo sapiens
taaatgttagttgtt

SEQ ID NO: 306906 - DNA, 15 bp, Homo sapiens
ataaatgttagttgt

SEQ ID NO: 306907 - DNA, 15 bp, Homo sapiens
aataaatgttagttg

SEQ ID NO: 306908 - DNA, 15 bp, Homo sapiens
taataaatgttagtt

SEQ ID NO: 306909 - DNA, 15 bp, Homo sapiens
ataataaatgttagt

SEQ ID NO: 306910 - DNA, 15 bp, Homo sapiens
gataataaatgttag

SEQ ID NO: 306911 - DNA, 15 bp, Homo sapiens
agataataaatgtta

SEQ ID NO: 306912 - DNA, 15 bp, Homo sapiens
gagataataaatgtt

SEQ ID NO: 306913 - DNA, 15 bp, Homo sapiens
tgagataataaatgt

SEQ ID NO: 306914 - DNA, 15 bp, Homo sapiens
gtgagataataaatg

SEQ ID NO: 306915 - DNA, 15 bp, Homo sapiens
tgtgagataataaat

SEQ ID NO: 306916 - DNA, 15 bp, Homo sapiens
gtgtgagataataaa

SEQ ID NO: 306917 - DNA, 15 bp, Homo sapiens
tgtgtgagataataa

SEQ ID NO: 306918 - DNA, 15 bp, Homo sapiens
ttgtgtgagataata

SEQ ID NO: 306919 - DNA, 15 bp, Homo sapiens
tttgtgtgagataat

SEQ ID NO: 306920 - DNA, 15 bp, Homo sapiens
atttgtgtgagataa

SEQ ID NO: 306921 - DNA, 15 bp, Homo sapiens
aatttgtgtgagata

SEQ ID NO: 306922 - DNA, 15 bp, Homo sapiens
gaatttgtgtgagat

SEQ ID NO: 306923 - DNA, 15 bp, Homo sapiens
agaatttgtgtgaga

SEQ ID NO: 306924 - DNA, 15 bp, Homo sapiens
cagaatttgtgtgag

SEQ ID NO: 306925 - DNA, 15 bp, Homo sapiens
tcagaatttgtgtga

SEQ ID NO: 306926 - DNA, 15 bp, Homo sapiens
ttcagaatttgtgtg

SEQ ID NO: 306927 - DNA, 15 bp, Homo sapiens
tttcagaatttgtgt

SEQ ID NO: 306928 - DNA, 15 bp, Homo sapiens
ctttcagaatttgtg

SEQ ID NO: 306929 - DNA, 15 bp, Homo sapiens
actttcagaatttgt

SEQ ID NO: 306930 - DNA, 15 bp, Homo sapiens
gactttcagaatttg

SEQ ID NO: 306931 - DNA, 15 bp, Homo sapiens
cgactttcagaattt

SEQ ID NO: 306932 - DNA, 15 bp, Homo sapiens
ccgactttcagaatt

SEQ ID NO: 306933 - DNA, 15 bp, Homo sapiens
cccgactttcagaat

SEQ ID NO: 306934 - DNA, 15 bp, Homo sapiens
tcccgactttcagaa

SEQ ID NO: 306935 - DNA, 15 bp, Homo sapiens
ttcccgactttcaga

SEQ ID NO: 306936 - DNA, 15 bp, Homo sapiens
tttcccgactttcag

SEQ ID NO: 306937 - DNA, 15 bp, Homo sapiens
gtttcccgactttca

SEQ ID NO: 306938 - DNA, 15 bp, Homo sapiens
agtttcccgactttc

SEQ ID NO: 306939 - DNA, 15 bp, Homo sapiens
cagtttcccgacttt

SEQ ID NO: 306940 - DNA, 15 bp, Homo sapiens
ccagtttcccgactt

SEQ ID NO: 306941 - DNA, 15 bp, Homo sapiens
cccagtttcccgact

SEQ ID NO: 306942 - DNA, 15 bp, Homo sapiens
tcccagtttcccgac

SEQ ID NO: 306943 - DNA, 15 bp, Homo sapiens
ctcccagtttcccga

SEQ ID NO: 306944 - DNA, 15 bp, Homo sapiens
actcccagtttcccg

SEQ ID NO: 306945 - DNA, 15 bp, Homo sapiens
cactcccagtttccc

SEQ ID NO: 306946 - DNA, 15 bp, Homo sapiens
ccactcccagtttcc

SEQ ID NO: 306947 - DNA, 15 bp, Homo sapiens
gccactcccagtttc

SEQ ID NO: 306948 - DNA, 15 bp, Homo sapiens
agccactcccagttt

SEQ ID NO: 306949 - DNA, 15 bp, Homo sapiens
aagccactcccagtt

SEQ ID NO: 306950 - DNA, 15 bp, Homo sapiens
aaagccactcccagt

SEQ ID NO: 306951 - DNA, 15 bp, Homo sapiens
taaagccactcccag

SEQ ID NO: 306952 - DNA, 15 bp, Homo sapiens
gtaaagccactccca

SEQ ID NO: 306953 - DNA, 15 bp, Homo sapiens
agtaaagccactccc

SEQ ID NO: 306954 - DNA, 15 bp, Homo sapiens
cagtaaagccactcc

SEQ ID NO: 306955 - DNA, 15 bp, Homo sapiens
acagtaaagccactc

SEQ ID NO: 306956 - DNA, 15 bp, Homo sapiens
cacagtaaagccact

SEQ ID NO: 306957 - DNA, 15 bp, Homo sapiens
acacagtaaagccac

SEQ ID NO: 306958 - DNA, 15 bp, Homo sapiens
cacacagtaaagcca

SEQ ID NO: 306959 - DNA, 15 bp, Homo sapiens
tcacacagtaaagcc

SEQ ID NO: 306960 - DNA, 15 bp, Homo sapiens
atcacacagtaaagc

SEQ ID NO: 306961 - DNA, 15 bp, Homo sapiens
aatcacacagtaaag

SEQ ID NO: 306962 - DNA, 15 bp, Homo sapiens
aaatcacacagtaaa

SEQ ID NO: 306963 - DNA, 15 bp, Homo sapiens
aaaatcacacagtaa

SEQ ID NO: 306964 - DNA, 15 bp, Homo sapiens
caaaatcacacagta

SEQ ID NO: 306965 - DNA, 15 bp, Homo sapiens
tcaaaatcacacagt

SEQ ID NO: 306966 - DNA, 15 bp, Homo sapiens
gtcaaaatcacacag

SEQ ID NO: 306967 - DNA, 15 bp, Homo sapiens
agtcaaaatcacaca

SEQ ID NO: 306968 - DNA, 15 bp, Homo sapiens
gagtcaaaatcacac

SEQ ID NO: 306969 - DNA, 15 bp, Homo sapiens
tgagtcaaaatcaca

SEQ ID NO: 306970 - DNA, 15 bp, Homo sapiens
atgagtcaaaatcac

SEQ ID NO: 306971 - DNA, 15 bp, Homo sapiens
catgagtcaaaatca

SEQ ID NO: 306972 - DNA, 15 bp, Homo sapiens
acatgagtcaaaatc

SEQ ID NO: 306973 - DNA, 15 bp, Homo sapiens
aacatgagtcaaaat

SEQ ID NO: 306974 - DNA, 15 bp, Homo sapiens
aaacatgagtcaaaa

SEQ ID NO: 306975 - DNA, 15 bp, Homo sapiens
gaaacatgagtcaaa

SEQ ID NO: 306976 - DNA, 15 bp, Homo sapiens
ggaaacatgagtcaa

SEQ ID NO: 306977 - DNA, 15 bp, Homo sapiens
aggaaacatgagtca

SEQ ID NO: 306978 - DNA, 15 bp, Homo sapiens
gaggaaacatgagtc

SEQ ID NO: 306979 - DNA, 15 bp, Homo sapiens
tgaggaaacatgagt

SEQ ID NO: 306980 - DNA, 15 bp, Homo sapiens
atgaggaaacatgag

SEQ ID NO: 306981 - DNA, 15 bp, Homo sapiens
catgaggaaacatga

SEQ ID NO: 306982 - DNA, 15 bp, Homo sapiens
tcatgaggaaacatg

SEQ ID NO: 306983 - DNA, 15 bp, Homo sapiens
ctcatgaggaaacat

SEQ ID NO: 306984 - DNA, 15 bp, Homo sapiens
tctcatgaggaaaca

SEQ ID NO: 306985 - DNA, 15 bp, Homo sapiens
ctctcatgaggaaac

SEQ ID NO: 306986 - DNA, 15 bp, Homo sapiens
tctctcatgaggaaa

SEQ ID NO: 306987 - DNA, 15 bp, Homo sapiens
atctctcatgaggaa

SEQ ID NO: 306988 - DNA, 15 bp, Homo sapiens
aatctctcatgagga

SEQ ID NO: 306989 - DNA, 15 bp, Homo sapiens
gaatctctcatgagg

SEQ ID NO: 306990 - DNA, 15 bp, Homo sapiens
agaatctctcatgag

SEQ ID NO: 306991 - DNA, 15 bp, Homo sapiens
aagaatctctcatga

SEQ ID NO: 306992 - DNA, 15 bp, Homo sapiens
taagaatctctcatg

SEQ ID NO: 306993 - DNA, 15 bp, Homo sapiens
ttaagaatctctcat

SEQ ID NO: 306994 - DNA, 15 bp, Homo sapiens
tttaagaatctctca

SEQ ID NO: 306995 - DNA, 15 bp, Homo sapiens
atttaagaatctctc

SEQ ID NO: 306996 - DNA, 15 bp, Homo sapiens
aatttaagaatctct

SEQ ID NO: 306997 - DNA, 15 bp, Homo sapiens
caatttaagaatctc

SEQ ID NO: 306998 - DNA, 15 bp, Homo sapiens
acaatttaagaatct

SEQ ID NO: 306999 - DNA, 15 bp, Homo sapiens
gacaatttaagaatc

SEQ ID NO: 307000 - DNA, 15 bp, Homo sapiens
tgacaatttaagaat

SEQ ID NO: 307001 - DNA, 15 bp, Homo sapiens
ttgacaatttaagaa

SEQ ID NO: 307002 - DNA, 15 bp, Homo sapiens
gttgacaatttaaga

SEQ ID NO: 307003 - DNA, 15 bp, Homo sapiens
ggttgacaatttaag

SEQ ID NO: 307004 - DNA, 15 bp, Homo sapiens
tggttgacaatttaa

SEQ ID NO: 307005 - DNA, 15 bp, Homo sapiens
ttggttgacaattta

SEQ ID NO: 307006 - DNA, 15 bp, Homo sapiens
cttggttgacaattt

SEQ ID NO: 307007 - DNA, 15 bp, Homo sapiens
ccttggttgacaatt

SEQ ID NO: 307008 - DNA, 15 bp, Homo sapiens
gccttggttgacaat

SEQ ID NO: 307009 - DNA, 15 bp, Homo sapiens
agccttggttgacaa

SEQ ID NO: 307010 - DNA, 15 bp, Homo sapiens
cagccttggttgaca

SEQ ID NO: 307011 - DNA, 15 bp, Homo sapiens
gcagccttggttgac

SEQ ID NO: 307012 - DNA, 15 bp, Homo sapiens
tgcagccttggttga

SEQ ID NO: 307013 - DNA, 15 bp, Homo sapiens
ctgcagccttggttg

SEQ ID NO: 307014 - DNA, 15 bp, Homo sapiens
gctgcagccttggtt

SEQ ID NO: 307015 - DNA, 15 bp, Homo sapiens
agctgcagccttggt

SEQ ID NO: 307016 - DNA, 15 bp, Homo sapiens
tagctgcagccttgg

SEQ ID NO: 307017 - DNA, 15 bp, Homo sapiens
ctagctgcagccttg

SEQ ID NO: 307018 - DNA, 15 bp, Homo sapiens
actagctgcagcctt

SEQ ID NO: 307019 - DNA, 15 bp, Homo sapiens
aactagctgcagcct

SEQ ID NO: 307020 - DNA, 15 bp, Homo sapiens
aaactagctgcagcc

SEQ ID NO: 307021 - DNA, 15 bp, Homo sapiens
taaactagctgcagc

SEQ ID NO: 307022 - DNA, 15 bp, Homo sapiens
ttaaactagctgcag

SEQ ID NO: 307023 - DNA, 15 bp, Homo sapiens
cttaaactagctgca

SEQ ID NO: 307024 - DNA, 15 bp, Homo sapiens
ccttaaactagctgc

SEQ ID NO: 307025 - DNA, 15 bp, Homo sapiens
gccttaaactagctg

SEQ ID NO: 307026 - DNA, 15 bp, Homo sapiens
agccttaaactagct

SEQ ID NO: 307027 - DNA, 15 bp, Homo sapiens
aagccttaaactagc

SEQ ID NO: 307028 - DNA, 15 bp, Homo sapiens
gaagccttaaactag

SEQ ID NO: 307029 - DNA, 15 bp, Homo sapiens
tgaagccttaaacta

SEQ ID NO: 307030 - DNA, 15 bp, Homo sapiens
gtgaagccttaaact

SEQ ID NO: 307031 - DNA, 15 bp, Homo sapiens
agtgaagccttaaac

SEQ ID NO: 307032 - DNA, 15 bp, Homo sapiens
cagtgaagccttaaa

SEQ ID NO: 307033 - DNA, 15 bp, Homo sapiens
ccagtgaagccttaa

SEQ ID NO: 307034 - DNA, 15 bp, Homo sapiens
cccagtgaagcctta

SEQ ID NO: 307035 - DNA, 15 bp, Homo sapiens
tcccagtgaagcctt

SEQ ID NO: 307036 - DNA, 15 bp, Homo sapiens
atcccagtgaagcct

SEQ ID NO: 307037 - DNA, 15 bp, Homo sapiens
aatcccagtgaagcc

SEQ ID NO: 307038 - DNA, 15 bp, Homo sapiens
caatcccagtgaagc

SEQ ID NO: 307039 - DNA, 15 bp, Homo sapiens
ccaatcccagtgaag

SEQ ID NO: 307040 - DNA, 15 bp, Homo sapiens
tccaatcccagtgaa

SEQ ID NO: 307041 - DNA, 15 bp, Homo sapiens
ctccaatcccagtga

SEQ ID NO: 307042 - DNA, 15 bp, Homo sapiens
tctccaatcccagtg

SEQ ID NO: 307043 - DNA, 15 bp, Homo sapiens
ctctccaatcccagt

SEQ ID NO: 307044 - DNA, 15 bp, Homo sapiens
actctccaatcccag

SEQ ID NO: 307045 - DNA, 15 bp, Homo sapiens
gactctccaatccca

SEQ ID NO: 307046 - DNA, 15 bp, Homo sapiens
agactctccaatccc

SEQ ID NO: 307047 - DNA, 15 bp, Homo sapiens
tagactctccaatcc

SEQ ID NO: 307048 - DNA, 15 bp, Homo sapiens
gtagactctccaatc

SEQ ID NO: 307049 - DNA, 15 bp, Homo sapiens
agtagactctccaat

SEQ ID NO: 307050 - DNA, 15 bp, Homo sapiens
aagtagactctccaa

SEQ ID NO: 307051 - DNA, 15 bp, Homo sapiens
gaagtagactctcca

SEQ ID NO: 307052 - DNA, 15 bp, Homo sapiens
ggaagtagactctcc

SEQ ID NO: 307053 - DNA, 15 bp, Homo sapiens
tggaagtagactctc

SEQ ID NO: 307054 - DNA, 15 bp, Homo sapiens
ttggaagtagactct

SEQ ID NO: 307055 - DNA, 15 bp, Homo sapiens
cttggaagtagactc

SEQ ID NO: 307056 - DNA, 15 bp, Homo sapiens
acttggaagtagact

SEQ ID NO: 307057 - DNA, 15 bp, Homo sapiens
aacttggaagtagac

SEQ ID NO: 307058 - DNA, 15 bp, Homo sapiens
gaacttggaagtaga

SEQ ID NO: 307059 - DNA, 15 bp, Homo sapiens
tgaacttggaagtag

SEQ ID NO: 307060 - DNA, 15 bp, Homo sapiens
gtgaacttggaagta

SEQ ID NO: 307061 - DNA, 15 bp, Homo sapiens
agtgaacttggaagt

SEQ ID NO: 307062 - DNA, 15 bp, Homo sapiens
gagtgaacttggaag

SEQ ID NO: 307063 - DNA, 15 bp, Homo sapiens
cgagtgaacttggaa

SEQ ID NO: 307064 - DNA, 15 bp, Homo sapiens
acgagtgaacttgga

SEQ ID NO: 307065 - DNA, 15 bp, Homo sapiens
cacgagtgaacttgg

SEQ ID NO: 307066 - DNA, 15 bp, Homo sapiens
acacgagtgaacttg

SEQ ID NO: 307067 - DNA, 15 bp, Homo sapiens
cacacgagtgaactt

SEQ ID NO: 307068 - DNA, 15 bp, Homo sapiens
ccacacgagtgaact

SEQ ID NO: 307069 - DNA, 15 bp, Homo sapiens
accacacgagtgaac

SEQ ID NO: 307070 - DNA, 15 bp, Homo sapiens
aaccacacgagtgaa

SEQ ID NO: 307071 - DNA, 15 bp, Homo sapiens
caaccacacgagtga

SEQ ID NO: 307072 - DNA, 15 bp, Homo sapiens
acaaccacacgagtg

SEQ ID NO: 307073 - DNA, 15 bp, Homo sapiens
aacaaccacacgagt

SEQ ID NO: 307074 - DNA, 15 bp, Homo sapiens
caacaaccacacgag

SEQ ID NO: 307075 - DNA, 15 bp, Homo sapiens
ccaacaaccacacga

SEQ ID NO: 307076 - DNA, 15 bp, Homo sapiens
gccaacaaccacacg

SEQ ID NO: 307077 - DNA, 15 bp, Homo sapiens
tgccaacaaccacac

SEQ ID NO: 307078 - DNA, 15 bp, Homo sapiens
ctgccaacaaccaca

SEQ ID NO: 307079 - DNA, 15 bp, Homo sapiens
cctgccaacaaccac

SEQ ID NO: 307080 - DNA, 15 bp, Homo sapiens
gcctgccaacaacca

SEQ ID NO: 307081 - DNA, 15 bp, Homo sapiens
ggcctgccaacaacc

SEQ ID NO: 307082 - DNA, 15 bp, Homo sapiens
aggcctgccaacaac

SEQ ID NO: 307083 - DNA, 15 bp, Homo sapiens
gaggcctgccaacaa

SEQ ID NO: 307084 - DNA, 15 bp, Homo sapiens
tgaggcctgccaaca

SEQ ID NO: 307085 - DNA, 15 bp, Homo sapiens
ctgaggcctgccaac

SEQ ID NO: 307086 - DNA, 15 bp, Homo sapiens
actgaggcctgccaa

SEQ ID NO: 307087 - DNA, 15 bp, Homo sapiens
aactgaggcctgcca

SEQ ID NO: 307088 - DNA, 15 bp, Homo sapiens
gaactgaggcctgcc

SEQ ID NO: 307089 - DNA, 15 bp, Homo sapiens
agaactgaggcctgc

SEQ ID NO: 307090 - DNA, 15 bp, Homo sapiens
aagaactgaggcctg

SEQ ID NO: 307091 - DNA, 15 bp, Homo sapiens
aaagaactgaggcct

SEQ ID NO: 307092 - DNA, 15 bp, Homo sapiens
caaagaactgaggcc

SEQ ID NO: 307093 - DNA, 15 bp, Homo sapiens
gcaaagaactgaggc

SEQ ID NO: 307094 - DNA, 15 bp, Homo sapiens
agcaaagaactgagg

SEQ ID NO: 307095 - DNA, 15 bp, Homo sapiens
cagcaaagaactgag

SEQ ID NO: 307096 - DNA, 15 bp, Homo sapiens
ccagcaaagaactga

SEQ ID NO: 307097 - DNA, 15 bp, Homo sapiens
gccagcaaagaactg

SEQ ID NO: 307098 - DNA, 15 bp, Homo sapiens
agccagcaaagaact

SEQ ID NO: 307099 - DNA, 15 bp, Homo sapiens
cagccagcaaagaac

SEQ ID NO: 307100 - DNA, 15 bp, Homo sapiens
tcagccagcaaagaa

SEQ ID NO: 307101 - DNA, 15 bp, Homo sapiens
atcagccagcaaaga

SEQ ID NO: 307102 - DNA, 15 bp, Homo sapiens
catcagccagcaaag

SEQ ID NO: 307103 - DNA, 15 bp, Homo sapiens
ccatcagccagcaaa

SEQ ID NO: 307104 - DNA, 15 bp, Homo sapiens
gccatcagccagcaa

SEQ ID NO: 307105 - DNA, 15 bp, Homo sapiens
ggccatcagccagca

SEQ ID NO: 307106 - DNA, 15 bp, Homo sapiens
tggccatcagccagc

SEQ ID NO: 307107 - DNA, 15 bp, Homo sapiens
ctggccatcagccag

SEQ ID NO: 307108 - DNA, 15 bp, Homo sapiens
cctggccatcagcca

SEQ ID NO: 307109 - DNA, 15 bp, Homo sapiens
ccctggccatcagcc

SEQ ID NO: 307110 - DNA, 15 bp, Homo sapiens
cccctggccatcagc

SEQ ID NO: 307111 - DNA, 15 bp, Homo sapiens
gcccctggccatcag

SEQ ID NO: 307112 - DNA, 15 bp, Homo sapiens
agcccctggccatca

SEQ ID NO: 307113 - DNA, 15 bp, Homo sapiens
aagcccctggccatc

SEQ ID NO: 307114 - DNA, 15 bp, Homo sapiens
gaagcccctggccat

SEQ ID NO: 307115 - DNA, 15 bp, Homo sapiens
tgaagcccctggcca

SEQ ID NO: 307116 - DNA, 15 bp, Homo sapiens
atgaagcccctggcc

SEQ ID NO: 307117 - DNA, 15 bp, Homo sapiens
aatgaagcccctggc

SEQ ID NO: 307118 - DNA, 15 bp, Homo sapiens
aaatgaagcccctgg

SEQ ID NO: 307119 - DNA, 15 bp, Homo sapiens
aaaatgaagcccctg

SEQ ID NO: 307120 - DNA, 15 bp, Homo sapiens
aaaaatgaagcccct

SEQ ID NO: 307121 - DNA, 15 bp, Homo sapiens
aaaaaatgaagcccc

SEQ ID NO: 307122 - DNA, 15 bp, Homo sapiens
aaaaaaatgaagccc

SEQ ID NO: 307123 - DNA, 15 bp, Homo sapiens
aaaaaaaatgaagcc

SEQ ID NO: 307124 - DNA, 15 bp, Homo sapiens
caaaaaaaatgaagc

SEQ ID NO: 307125 - DNA, 15 bp, Homo sapiens
gcaaaaaaaatgaag

SEQ ID NO: 307126 - DNA, 15 bp, Homo sapiens
ggcaaaaaaaatgaa

SEQ ID NO: 307127 - DNA, 15 bp, Homo sapiens
tggcaaaaaaaatga

SEQ ID NO: 307128 - DNA, 15 bp, Homo sapiens
atggcaaaaaaaatg

SEQ ID NO: 307129 - DNA, 15 bp, Homo sapiens
catggcaaaaaaaat

SEQ ID NO: 307130 - DNA, 15 bp, Homo sapiens
acatggcaaaaaaaa

SEQ ID NO: 307131 - DNA, 15 bp, Homo sapiens
cacatggcaaaaaaa

SEQ ID NO: 307132 - DNA, 15 bp, Homo sapiens
tcacatggcaaaaaa

SEQ ID NO: 307133 - DNA, 15 bp, Homo sapiens
ctcacatggcaaaaa

SEQ ID NO: 307134 - DNA, 15 bp, Homo sapiens
gctcacatggcaaaa

SEQ ID NO: 307135 - DNA, 15 bp, Homo sapiens
ggctcacatggcaaa

SEQ ID NO: 307136 - DNA, 15 bp, Homo sapiens
aggctcacatggcaa

SEQ ID NO: 307137 - DNA, 15 bp, Homo sapiens
gaggctcacatggca

SEQ ID NO: 307138 - DNA, 15 bp, Homo sapiens
agaggctcacatggc

SEQ ID NO: 307139 - DNA, 15 bp, Homo sapiens
gagaggctcacatgg

SEQ ID NO: 307140 - DNA, 15 bp, Homo sapiens
ggagaggctcacatg

SEQ ID NO: 307141 - DNA, 15 bp, Homo sapiens
cggagaggctcacat

SEQ ID NO: 307142 - DNA, 15 bp, Homo sapiens
acggagaggctcaca

SEQ ID NO: 307143 - DNA, 15 bp, Homo sapiens
tacggagaggctcac

SEQ ID NO: 307144 - DNA, 15 bp, Homo sapiens
ctacggagaggctca

SEQ ID NO: 307145 - DNA, 15 bp, Homo sapiens
cctacggagaggctc

SEQ ID NO: 307146 - DNA, 15 bp, Homo sapiens
ccctacggagaggct

SEQ ID NO: 307147 - DNA, 15 bp, Homo sapiens
gccctacggagaggc

SEQ ID NO: 307148 - DNA, 15 bp, Homo sapiens
agccctacggagagg

SEQ ID NO: 307149 - DNA, 15 bp, Homo sapiens
tagccctacggagag

SEQ ID NO: 307150 - DNA, 15 bp, Homo sapiens
gtagccctacggaga

SEQ ID NO: 307151 - DNA, 15 bp, Homo sapiens
agtagccctacggag

SEQ ID NO: 307152 - DNA, 15 bp, Homo sapiens
gagtagccctacgga

SEQ ID NO: 307153 - DNA, 15 bp, Homo sapiens
ggagtagccctacgg

SEQ ID NO: 307154 - DNA, 15 bp, Homo sapiens
tggagtagccctacg

SEQ ID NO: 307155 - DNA, 15 bp, Homo sapiens
atggagtagccctac

SEQ ID NO: 307156 - DNA, 15 bp, Homo sapiens
tatggagtagcccta

SEQ ID NO: 307157 - DNA, 15 bp, Homo sapiens
ctatggagtagccct

SEQ ID NO: 307158 - DNA, 15 bp, Homo sapiens
gctatggagtagccc

SEQ ID NO: 307159 - DNA, 15 bp, Homo sapiens
tgctatggagtagcc

SEQ ID NO: 307160 - DNA, 15 bp, Homo sapiens
ctgctatggagtagc

SEQ ID NO: 307161 - DNA, 15 bp, Homo sapiens
gctgctatggagtag

SEQ ID NO: 307162 - DNA, 15 bp, Homo sapiens
agctgctatggagta

SEQ ID NO: 307163 - DNA, 15 bp, Homo sapiens
gagctgctatggagt

SEQ ID NO: 307164 - DNA, 15 bp, Homo sapiens
ggagctgctatggag

SEQ ID NO: 307165 - DNA, 15 bp, Homo sapiens
gggagctgctatgga

SEQ ID NO: 307166 - DNA, 15 bp, Homo sapiens
agggagctgctatgg

SEQ ID NO: 307167 - DNA, 15 bp, Homo sapiens
cagggagctgctatg

SEQ ID NO: 307168 - DNA, 15 bp, Homo sapiens
gcagggagctgctat

SEQ ID NO: 307169 - DNA, 15 bp, Homo sapiens
ggcagggagctgcta

SEQ ID NO: 307170 - DNA, 15 bp, Homo sapiens
aggcagggagctgct

SEQ ID NO: 307171 - DNA, 15 bp, Homo sapiens
gaggcagggagctgc

SEQ ID NO: 307172 - DNA, 15 bp, Homo sapiens
tgaggcagggagctg

SEQ ID NO: 307173 - DNA, 15 bp, Homo sapiens
ttgaggcagggagct

SEQ ID NO: 307174 - DNA, 15 bp, Homo sapiens
gttgaggcagggagc

SEQ ID NO: 307175 - DNA, 15 bp, Homo sapiens
ggttgaggcagggag

SEQ ID NO: 307176 - DNA, 15 bp, Homo sapiens
gggttgaggcaggga

SEQ ID NO: 307177 - DNA, 15 bp, Homo sapiens
ggggttgaggcaggg

SEQ ID NO: 307178 - DNA, 15 bp, Homo sapiens
tggggttgaggcagg

SEQ ID NO: 307179 - DNA, 15 bp, Homo sapiens
ctggggttgaggcag

SEQ ID NO: 307180 - DNA, 15 bp, Homo sapiens
actggggttgaggca

SEQ ID NO: 307181 - DNA, 15 bp, Homo sapiens
cactggggttgaggc

SEQ ID NO: 307182 - DNA, 15 bp, Homo sapiens
ccactggggttgagg

SEQ ID NO: 307183 - DNA, 15 bp, Homo sapiens
tccactggggttgag

SEQ ID NO: 307184 - DNA, 15 bp, Homo sapiens
ttccactggggttga

SEQ ID NO: 307185 - DNA, 15 bp, Homo sapiens
cttccactggggttg

SEQ ID NO: 307186 - DNA, 15 bp, Homo sapiens
tcttccactggggtt

SEQ ID NO: 307187 - DNA, 15 bp, Homo sapiens
ctcttccactggggt

SEQ ID NO: 307188 - DNA, 15 bp, Homo sapiens
tctcttccactgggg

SEQ ID NO: 307189 - DNA, 15 bp, Homo sapiens
atctcttccactggg

SEQ ID NO: 307190 - DNA, 15 bp, Homo sapiens
gatctcttccactgg

SEQ ID NO: 307191 - DNA, 15 bp, Homo sapiens
ggatctcttccactg

SEQ ID NO: 307192 - DNA, 15 bp, Homo sapiens
aggatctcttccact

SEQ ID NO: 307193 - DNA, 15 bp, Homo sapiens
taggatctcttccac

SEQ ID NO: 307194 - DNA, 15 bp, Homo sapiens
ctaggatctcttcca

SEQ ID NO: 307195 - DNA, 15 bp, Homo sapiens
tctaggatctcttcc

SEQ ID NO: 307196 - DNA, 15 bp, Homo sapiens
ctctaggatctcttc

SEQ ID NO: 307197 - DNA, 15 bp, Homo sapiens
tctctaggatctctt

SEQ ID NO: 307198 - DNA, 15 bp, Homo sapiens
ctctctaggatctct

SEQ ID NO: 307199 - DNA, 15 bp, Homo sapiens
cctctctaggatctc

SEQ ID NO: 307200 - DNA, 15 bp, Homo sapiens
ccctctctaggatct

SEQ ID NO: 307201 - DNA, 15 bp, Homo sapiens
tccctctctaggatc

SEQ ID NO: 307202 - DNA, 15 bp, Homo sapiens
ctccctctctaggat

SEQ ID NO: 307203 - DNA, 15 bp, Homo sapiens
tctccctctctagga

SEQ ID NO: 307204 - DNA, 15 bp, Homo sapiens
ctctccctctctagg

SEQ ID NO: 307205 - DNA, 15 bp, Homo sapiens
tctctccctctctag

SEQ ID NO: 307206 - DNA, 15 bp, Homo sapiens
ttctctccctctcta

SEQ ID NO: 307207 - DNA, 15 bp, Homo sapiens
gttctctccctctct

SEQ ID NO: 307208 - DNA, 15 bp, Homo sapiens
ggttctctccctctc

SEQ ID NO: 307209 - DNA, 15 bp, Homo sapiens
aggttctctccctct

SEQ ID NO: 307210 - DNA, 15 bp, Homo sapiens
taggttctctccctc

SEQ ID NO: 307211 - DNA, 15 bp, Homo sapiens
ttaggttctctccct

SEQ ID NO: 307212 - DNA, 15 bp, Homo sapiens
cttaggttctctccc

SEQ ID NO: 307213 - DNA, 15 bp, Homo sapiens
tcttaggttctctcc

SEQ ID NO: 307214 - DNA, 15 bp, Homo sapiens
atcttaggttctctc

SEQ ID NO: 307215 - DNA, 15 bp, Homo sapiens
catcttaggttctct

SEQ ID NO: 307216 - DNA, 15 bp, Homo sapiens
ccatcttaggttctc

SEQ ID NO: 307217 - DNA, 15 bp, Homo sapiens
tccatcttaggttct

SEQ ID NO: 307218 - DNA, 15 bp, Homo sapiens
ttccatcttaggttc

SEQ ID NO: 307219 - DNA, 15 bp, Homo sapiens
tttccatcttaggtt

SEQ ID NO: 307220 - DNA, 15 bp, Homo sapiens
gtttccatcttaggt

SEQ ID NO: 307221 - DNA, 15 bp, Homo sapiens
agtttccatcttagg

SEQ ID NO: 307222 - DNA, 15 bp, Homo sapiens
cagtttccatcttag

SEQ ID NO: 307223 - DNA, 15 bp, Homo sapiens
gcagtttccatctta

SEQ ID NO: 307224 - DNA, 15 bp, Homo sapiens
tgcagtttccatctt

SEQ ID NO: 307225 - DNA, 15 bp, Homo sapiens
ctgcagtttccatct

SEQ ID NO: 307226 - DNA, 15 bp, Homo sapiens
tctgcagtttccatc

SEQ ID NO: 307227 - DNA, 15 bp, Homo sapiens
atctgcagtttccat

SEQ ID NO: 307228 - DNA, 15 bp, Homo sapiens
aatctgcagtttcca

SEQ ID NO: 307229 - DNA, 15 bp, Homo sapiens
aaatctgcagtttcc

SEQ ID NO: 307230 - DNA, 15 bp, Homo sapiens
aaaatctgcagtttc

SEQ ID NO: 307231 - DNA, 15 bp, Homo sapiens
aaaaatctgcagttt

SEQ ID NO: 307232 - DNA, 15 bp, Homo sapiens
taaaaatctgcagtt

SEQ ID NO: 307233 - DNA, 15 bp, Homo sapiens
ataaaaatctgcagt

SEQ ID NO: 307234 - DNA, 15 bp, Homo sapiens
tataaaaatctgcag

SEQ ID NO: 307235 - DNA, 15 bp, Homo sapiens
ttataaaaatctgca

SEQ ID NO: 307236 - DNA, 15 bp, Homo sapiens
tttataaaaatctgc

SEQ ID NO: 307237 - DNA, 15 bp, Homo sapiens
atttataaaaatctg

SEQ ID NO: 307238 - DNA, 15 bp, Homo sapiens
aatttataaaaatct

SEQ ID NO: 307239 - DNA, 15 bp, Homo sapiens
gaatttataaaaatc

SEQ ID NO: 307240 - DNA, 15 bp, Homo sapiens
tgaatttataaaaat

SEQ ID NO: 307241 - DNA, 15 bp, Homo sapiens
atgaatttataaaaa

SEQ ID NO: 307242 - DNA, 15 bp, Homo sapiens
gatgaatttataaaa

SEQ ID NO: 307243 - DNA, 15 bp, Homo sapiens
agatgaatttataaa

SEQ ID NO: 307244 - DNA, 15 bp, Homo sapiens
gagatgaatttataa

SEQ ID NO: 307245 - DNA, 15 bp, Homo sapiens
tgagatgaatttata

SEQ ID NO: 307246 - DNA, 15 bp, Homo sapiens
ctgagatgaatttat

SEQ ID NO: 307247 - DNA, 15 bp, Homo sapiens
tctgagatgaattta

SEQ ID NO: 307248 - DNA, 15 bp, Homo sapiens
ttctgagatgaattt

SEQ ID NO: 307249 - DNA, 15 bp, Homo sapiens
cttctgagatgaatt

SEQ ID NO: 307250 - DNA, 15 bp, Homo sapiens
acttctgagatgaat

SEQ ID NO: 307251 - DNA, 15 bp, Homo sapiens
cacttctgagatgaa

SEQ ID NO: 307252 - DNA, 15 bp, Homo sapiens
tcacttctgagatga

SEQ ID NO: 307253 - DNA, 15 bp, Homo sapiens
gtcacttctgagatg

SEQ ID NO: 307254 - DNA, 15 bp, Homo sapiens
tgtcacttctgagat

SEQ ID NO: 307255 - DNA, 15 bp, Homo sapiens
atgtcacttctgaga

SEQ ID NO: 307256 - DNA, 15 bp, Homo sapiens
catgtcacttctgag

SEQ ID NO: 307257 - DNA, 15 bp, Homo sapiens
gcatgtcacttctga

SEQ ID NO: 307258 - DNA, 15 bp, Homo sapiens
ggcatgtcacttctg

SEQ ID NO: 307259 - DNA, 15 bp, Homo sapiens
tggcatgtcacttct

SEQ ID NO: 307260 - DNA, 15 bp, Homo sapiens
atggcatgtcacttc

SEQ ID NO: 307261 - DNA, 15 bp, Homo sapiens
gatggcatgtcactt

SEQ ID NO: 307262 - DNA, 15 bp, Homo sapiens
tgatggcatgtcact

SEQ ID NO: 307263 - DNA, 15 bp, Homo sapiens
gtgatggcatgtcac

SEQ ID NO: 307264 - DNA, 15 bp, Homo sapiens
agtgatggcatgtca

SEQ ID NO: 307265 - DNA, 15 bp, Homo sapiens
aagtgatggcatgtc

SEQ ID NO: 307266 - DNA, 15 bp, Homo sapiens
gaagtgatggcatgt

SEQ ID NO: 307267 - DNA, 15 bp, Homo sapiens
agaagtgatggcatg

SEQ ID NO: 307268 - DNA, 15 bp, Homo sapiens
cagaagtgatggcat

SEQ ID NO: 307269 - DNA, 15 bp, Homo sapiens
gcagaagtgatggca

SEQ ID NO: 307270 - DNA, 15 bp, Homo sapiens
ggcagaagtgatggc

SEQ ID NO: 307271 - DNA, 15 bp, Homo sapiens
gggcagaagtgatgg

SEQ ID NO: 307272 - DNA, 15 bp, Homo sapiens
agggcagaagtgatg

SEQ ID NO: 307273 - DNA, 15 bp, Homo sapiens
tagggcagaagtgat

SEQ ID NO: 307274 - DNA, 15 bp, Homo sapiens
atagggcagaagtga

SEQ ID NO: 307275 - DNA, 15 bp, Homo sapiens
catagggcagaagtg

SEQ ID NO: 307276 - DNA, 15 bp, Homo sapiens
acatagggcagaagt

SEQ ID NO: 307277 - DNA, 15 bp, Homo sapiens
gacatagggcagaag

SEQ ID NO: 307278 - DNA, 15 bp, Homo sapiens
tgacatagggcagaa

SEQ ID NO: 307279 - DNA, 15 bp, Homo sapiens
atgacatagggcaga

SEQ ID NO: 307280 - DNA, 15 bp, Homo sapiens
aatgacatagggcag

SEQ ID NO: 307281 - DNA, 15 bp, Homo sapiens
caatgacatagggca

SEQ ID NO: 307282 - DNA, 15 bp, Homo sapiens
ccaatgacatagggc

SEQ ID NO: 307283 - DNA, 15 bp, Homo sapiens
gccaatgacataggg

SEQ ID NO: 307284 - DNA, 15 bp, Homo sapiens
ggccaatgacatagg

SEQ ID NO: 307285 - DNA, 15 bp, Homo sapiens
gggccaatgacatag

SEQ ID NO: 307286 - DNA, 15 bp, Homo sapiens
tgggccaatgacata

SEQ ID NO: 307287 - DNA, 15 bp, Homo sapiens
gtgggccaatgacat

SEQ ID NO: 307288 - DNA, 15 bp, Homo sapiens
tgtgggccaatgaca

SEQ ID NO: 307289 - DNA, 15 bp, Homo sapiens
ctgtgggccaatgac

SEQ ID NO: 307290 - DNA, 15 bp, Homo sapiens
tctgtgggccaatga

SEQ ID NO: 307291 - DNA, 15 bp, Homo sapiens
gtctgtgggccaatg

SEQ ID NO: 307292 - DNA, 15 bp, Homo sapiens
agtctgtgggccaat

SEQ ID NO: 307293 - DNA, 15 bp, Homo sapiens
tagtctgtgggccaa

SEQ ID NO: 307294 - DNA, 15 bp, Homo sapiens
ttagtctgtgggcca

SEQ ID NO: 307295 - DNA, 15 bp, Homo sapiens
gttagtctgtgggcc

SEQ ID NO: 307296 - DNA, 15 bp, Homo sapiens
ggttagtctgtgggc

SEQ ID NO: 307297 - DNA, 15 bp, Homo sapiens
gggttagtctgtggg

SEQ ID NO: 307298 - DNA, 15 bp, Homo sapiens
agggttagtctgtgg

SEQ ID NO: 307299 - DNA, 15 bp, Homo sapiens
cagggttagtctgtg

SEQ ID NO: 307300 - DNA, 15 bp, Homo sapiens
ccagggttagtctgt

SEQ ID NO: 307301 - DNA, 15 bp, Homo sapiens
accagggttagtctg

SEQ ID NO: 307302 - DNA, 15 bp, Homo sapiens
taccagggttagtct

SEQ ID NO: 307303 - DNA, 15 bp, Homo sapiens
gtaccagggttagtc

SEQ ID NO: 307304 - DNA, 15 bp, Homo sapiens
tgtaccagggttagt

SEQ ID NO: 307305 - DNA, 15 bp, Homo sapiens
ctgtaccagggttag

SEQ ID NO: 307306 - DNA, 15 bp, Homo sapiens
actgtaccagggtta

SEQ ID NO: 307307 - DNA, 15 bp, Homo sapiens
aactgtaccagggtt

SEQ ID NO: 307308 - DNA, 15 bp, Homo sapiens
aaactgtaccagggt

SEQ ID NO: 307309 - DNA, 15 bp, Homo sapiens
taaactgtaccaggg

SEQ ID NO: 307310 - DNA, 15 bp, Homo sapiens
ctaaactgtaccagg

SEQ ID NO: 307311 - DNA, 15 bp, Homo sapiens
cctaaactgtaccag

SEQ ID NO: 307312 - DNA, 15 bp, Homo sapiens
tcctaaactgtacca

SEQ ID NO: 307313 - DNA, 15 bp, Homo sapiens
ttcctaaactgtacc

SEQ ID NO: 307314 - DNA, 15 bp, Homo sapiens
gttcctaaactgtac

SEQ ID NO: 307315 - DNA, 15 bp, Homo sapiens
agttcctaaactgta

SEQ ID NO: 307316 - DNA, 15 bp, Homo sapiens
cagttcctaaactgt

SEQ ID NO: 307317 - DNA, 15 bp, Homo sapiens
acagttcctaaactg

SEQ ID NO: 307318 - DNA, 15 bp, Homo sapiens
gacagttcctaaact

SEQ ID NO: 307319 - DNA, 15 bp, Homo sapiens
agacagttcctaaac

SEQ ID NO: 307320 - DNA, 15 bp, Homo sapiens
cagacagttcctaaa

SEQ ID NO: 307321 - DNA, 15 bp, Homo sapiens
gcagacagttcctaa

SEQ ID NO: 307322 - DNA, 15 bp, Homo sapiens
tgcagacagttccta

SEQ ID NO: 307323 - DNA, 15 bp, Homo sapiens
gtgcagacagttcct

SEQ ID NO: 307324 - DNA, 15 bp, Homo sapiens
tgtgcagacagttcc

SEQ ID NO: 307325 - DNA, 15 bp, Homo sapiens
ttgtgcagacagttc

SEQ ID NO: 307326 - DNA, 15 bp, Homo sapiens
cttgtgcagacagtt

SEQ ID NO: 307327 - DNA, 15 bp, Homo sapiens
ccttgtgcagacagt

SEQ ID NO: 307328 - DNA, 15 bp, Homo sapiens
tccttgtgcagacag

SEQ ID NO: 307329 - DNA, 15 bp, Homo sapiens
atccttgtgcagaca

SEQ ID NO: 307330 - DNA, 15 bp, Homo sapiens
tatccttgtgcagac

SEQ ID NO: 307331 - DNA, 15 bp, Homo sapiens
atatccttgtgcaga

SEQ ID NO: 307332 - DNA, 15 bp, Homo sapiens
tatatccttgtgcag

SEQ ID NO: 307333 - DNA, 15 bp, Homo sapiens
ttatatccttgtgca

SEQ ID NO: 307334 - DNA, 15 bp, Homo sapiens
tttatatccttgtgc

SEQ ID NO: 307335 - DNA, 15 bp, Homo sapiens
atttatatccttgtg

SEQ ID NO: 307336 - DNA, 15 bp, Homo sapiens
tatttatatccttgt

SEQ ID NO: 307337 - DNA, 15 bp, Homo sapiens
gtatttatatccttg

SEQ ID NO: 307338 - DNA, 15 bp, Homo sapiens
ggtatttatatcctt

SEQ ID NO: 307339 - DNA, 15 bp, Homo sapiens
gggtatttatatcct

SEQ ID NO: 307340 - DNA, 15 bp, Homo sapiens
tgggtatttatatcc

SEQ ID NO: 307341 - DNA, 15 bp, Homo sapiens
ctgggtatttatatc

SEQ ID NO: 307342 - DNA, 15 bp, Homo sapiens
actgggtatttatat

SEQ ID NO: 307343 - DNA, 15 bp, Homo sapiens
cactgggtatttata

SEQ ID NO: 307344 - DNA, 15 bp, Homo sapiens
acactgggtatttat

SEQ ID NO: 307345 - DNA, 15 bp, Homo sapiens
gacactgggtattta

SEQ ID NO: 307346 - DNA, 15 bp, Homo sapiens
tgacactgggtattt

SEQ ID NO: 307347 - DNA, 15 bp, Homo sapiens
ctgacactgggtatt

SEQ ID NO: 307348 - DNA, 15 bp, Homo sapiens
tctgacactgggtat

SEQ ID NO: 307349 - DNA, 15 bp, Homo sapiens
ctctgacactgggta

SEQ ID NO: 307350 - DNA, 15 bp, Homo sapiens
tctctgacactgggt

SEQ ID NO: 307351 - DNA, 15 bp, Homo sapiens
atctctgacactggg

SEQ ID NO: 307352 - DNA, 15 bp, Homo sapiens
aatctctgacactgg

SEQ ID NO: 307353 - DNA, 15 bp, Homo sapiens
taatctctgacactg

SEQ ID NO: 307354 - DNA, 15 bp, Homo sapiens
ataatctctgacact

SEQ ID NO: 307355 - DNA, 15 bp, Homo sapiens
aataatctctgacac

SEQ ID NO: 307356 - DNA, 15 bp, Homo sapiens
caataatctctgaca

SEQ ID NO: 307357 - DNA, 15 bp, Homo sapiens
ccaataatctctgac

SEQ ID NO: 307358 - DNA, 15 bp, Homo sapiens
cccaataatctctga

SEQ ID NO: 307359 - DNA, 15 bp, Homo sapiens
ccccaataatctctg

SEQ ID NO: 307360 - DNA, 15 bp, Homo sapiens
accccaataatctct

SEQ ID NO: 307361 - DNA, 15 bp, Homo sapiens
caccccaataatctc

SEQ ID NO: 307362 - DNA, 15 bp, Homo sapiens
tcaccccaataatct

SEQ ID NO: 307363 - DNA, 15 bp, Homo sapiens
atcaccccaataatc

SEQ ID NO: 307364 - DNA, 15 bp, Homo sapiens
gatcaccccaataat

SEQ ID NO: 307365 - DNA, 15 bp, Homo sapiens
agatcaccccaataa

SEQ ID NO: 307366 - DNA, 15 bp, Homo sapiens
aagatcaccccaata

SEQ ID NO: 307367 - DNA, 15 bp, Homo sapiens
caagatcaccccaat

SEQ ID NO: 307368 - DNA, 15 bp, Homo sapiens
ccaagatcaccccaa

SEQ ID NO: 307369 - DNA, 15 bp, Homo sapiens
tccaagatcacccca

SEQ ID NO: 307370 - DNA, 15 bp, Homo sapiens
ctccaagatcacccc

SEQ ID NO: 307371 - DNA, 15 bp, Homo sapiens
cctccaagatcaccc

SEQ ID NO: 307372 - DNA, 15 bp, Homo sapiens
gcctccaagatcacc

SEQ ID NO: 307373 - DNA, 15 bp, Homo sapiens
agcctccaagatcac

SEQ ID NO: 307374 - DNA, 15 bp, Homo sapiens
cagcctccaagatca

SEQ ID NO: 307375 - DNA, 15 bp, Homo sapiens
ccagcctccaagatc

SEQ ID NO: 307376 - DNA, 15 bp, Homo sapiens
gccagcctccaagat

SEQ ID NO: 307377 - DNA, 15 bp, Homo sapiens
agccagcctccaaga

SEQ ID NO: 307378 - DNA, 15 bp, Homo sapiens
cagccagcctccaag

SEQ ID NO: 307379 - DNA, 15 bp, Homo sapiens
gcagccagcctccaa

SEQ ID NO: 307380 - DNA, 15 bp, Homo sapiens
ggcagccagcctcca

SEQ ID NO: 307381 - DNA, 15 bp, Homo sapiens
tggcagccagcctcc

SEQ ID NO: 307382 - DNA, 15 bp, Homo sapiens
atggcagccagcctc

SEQ ID NO: 307383 - DNA, 15 bp, Homo sapiens
tatggcagccagcct

SEQ ID NO: 307384 - DNA, 15 bp, Homo sapiens
ctatggcagccagcc

SEQ ID NO: 307385 - DNA, 15 bp, Homo sapiens
actatggcagccagc

SEQ ID NO: 307386 - DNA, 15 bp, Homo sapiens
aactatggcagccag

SEQ ID NO: 307387 - DNA, 15 bp, Homo sapiens
taactatggcagcca

SEQ ID NO: 307388 - DNA, 15 bp, Homo sapiens
ataactatggcagcc

SEQ ID NO: 307389 - DNA, 15 bp, Homo sapiens
cataactatggcagc

SEQ ID NO: 307390 - DNA, 15 bp, Homo sapiens
tcataactatggcag

SEQ ID NO: 307391 - DNA, 15 bp, Homo sapiens
gtcataactatggca

SEQ ID NO: 307392 - DNA, 15 bp, Homo sapiens
agtcataactatggc

SEQ ID NO: 307393 - DNA, 15 bp, Homo sapiens
aagtcataactatgg

SEQ ID NO: 307394 - DNA, 15 bp, Homo sapiens
taagtcataactatg

SEQ ID NO: 307395 - DNA, 15 bp, Homo sapiens
ctaagtcataactat

SEQ ID NO: 307396 - DNA, 15 bp, Homo sapiens
actaagtcataacta

SEQ ID NO: 307397 - DNA, 15 bp, Homo sapiens
cactaagtcataact

SEQ ID NO: 307398 - DNA, 15 bp, Homo sapiens
acactaagtcataac

SEQ ID NO: 307399 - DNA, 15 bp, Homo sapiens
gacactaagtcataa

SEQ ID NO: 307400 - DNA, 15 bp, Homo sapiens
tgacactaagtcata

SEQ ID NO: 307401 - DNA, 15 bp, Homo sapiens
ttgacactaagtcat

SEQ ID NO: 307402 - DNA, 15 bp, Homo sapiens
attgacactaagtca

SEQ ID NO: 307403 - DNA, 15 bp, Homo sapiens
aattgacactaagtc

SEQ ID NO: 307404 - DNA, 15 bp, Homo sapiens
taattgacactaagt

SEQ ID NO: 307405 - DNA, 15 bp, Homo sapiens
ctaattgacactaag

SEQ ID NO: 307406 - DNA, 15 bp, Homo sapiens
tctaattgacactaa

SEQ ID NO: 307407 - DNA, 15 bp, Homo sapiens
ttctaattgacacta

SEQ ID NO: 307408 - DNA, 15 bp, Homo sapiens
tttctaattgacact

SEQ ID NO: 307409 - DNA, 15 bp, Homo sapiens
ttttctaattgacac

SEQ ID NO: 307410 - DNA, 15 bp, Homo sapiens
gttttctaattgaca

SEQ ID NO: 307411 - DNA, 15 bp, Homo sapiens
tgttttctaattgac

SEQ ID NO: 307412 - DNA, 15 bp, Homo sapiens
ttgttttctaattga

SEQ ID NO: 307413 - DNA, 15 bp, Homo sapiens
tttgttttctaattg

SEQ ID NO: 307414 - DNA, 15 bp, Homo sapiens
atttgttttctaatt

SEQ ID NO: 307415 - DNA, 15 bp, Homo sapiens
gatttgttttctaat

SEQ ID NO: 307416 - DNA, 15 bp, Homo sapiens
ggatttgttttctaa

SEQ ID NO: 307417 - DNA, 15 bp, Homo sapiens
aggatttgttttcta

SEQ ID NO: 307418 - DNA, 15 bp, Homo sapiens
taggatttgttttct

SEQ ID NO: 307419 - DNA, 15 bp, Homo sapiens
ataggatttgttttc

SEQ ID NO: 307420 - DNA, 15 bp, Homo sapiens
aataggatttgtttt

SEQ ID NO: 307421 - DNA, 15 bp, Homo sapiens
taataggatttgttt

SEQ ID NO: 307422 - DNA, 15 bp, Homo sapiens
ataataggatttgtt

SEQ ID NO: 307423 - DNA, 15 bp, Homo sapiens
gataataggatttgt

SEQ ID NO: 307424 - DNA, 15 bp, Homo sapiens
tgataataggatttg

SEQ ID NO: 307425 - DNA, 15 bp, Homo sapiens
ctgataataggattt

SEQ ID NO: 307426 - DNA, 15 bp, Homo sapiens
actgataataggatt

SEQ ID NO: 307427 - DNA, 15 bp, Homo sapiens
aactgataataggat

SEQ ID NO: 307428 - DNA, 15 bp, Homo sapiens
aaactgataatagga

SEQ ID NO: 307429 - DNA, 15 bp, Homo sapiens
aaaactgataatagg

SEQ ID NO: 307430 - DNA, 15 bp, Homo sapiens
gaaaactgataatag

SEQ ID NO: 307431 - DNA, 15 bp, Homo sapiens
agaaaactgataata

SEQ ID NO: 307432 - DNA, 15 bp, Homo sapiens
aagaaaactgataat

SEQ ID NO: 307433 - DNA, 15 bp, Homo sapiens
caagaaaactgataa

SEQ ID NO: 307434 - DNA, 15 bp, Homo sapiens
acaagaaaactgata

SEQ ID NO: 307435 - DNA, 15 bp, Homo sapiens
aacaagaaaactgat

SEQ ID NO: 307436 - DNA, 15 bp, Homo sapiens
aaacaagaaaactga

SEQ ID NO: 307437 - DNA, 15 bp, Homo sapiens
caaacaagaaaactg

SEQ ID NO: 307438 - DNA, 15 bp, Homo sapiens
acaaacaagaaaact

SEQ ID NO: 307439 - DNA, 15 bp, Homo sapiens
cacaaacaagaaaac

SEQ ID NO: 307440 - DNA, 15 bp, Homo sapiens
gcacaaacaagaaaa

SEQ ID NO: 307441 - DNA, 15 bp, Homo sapiens
agcacaaacaagaaa

SEQ ID NO: 307442 - DNA, 15 bp, Homo sapiens
aagcacaaacaagaa

SEQ ID NO: 307443 - DNA, 15 bp, Homo sapiens
aaagcacaaacaaga

SEQ ID NO: 307444 - DNA, 15 bp, Homo sapiens
caaagcacaaacaag

SEQ ID NO: 307445 - DNA, 15 bp, Homo sapiens
gcaaagcacaaacaa

SEQ ID NO: 307446 - DNA, 15 bp, Homo sapiens
agcaaagcacaaaca

SEQ ID NO: 307447 - DNA, 15 bp, Homo sapiens
cagcaaagcacaaac

SEQ ID NO: 307448 - DNA, 15 bp, Homo sapiens
acagcaaagcacaaa

SEQ ID NO: 307449 - DNA, 15 bp, Homo sapiens
tacagcaaagcacaa

SEQ ID NO: 307450 - DNA, 15 bp, Homo sapiens
ctacagcaaagcaca

SEQ ID NO: 307451 - DNA, 15 bp, Homo sapiens
actacagcaaagcac

SEQ ID NO: 307452 - DNA, 15 bp, Homo sapiens
aactacagcaaagca

SEQ ID NO: 307453 - DNA, 15 bp, Homo sapiens
taactacagcaaagc

SEQ ID NO: 307454 - DNA, 15 bp, Homo sapiens
ttaactacagcaaag

SEQ ID NO: 307455 - DNA, 15 bp, Homo sapiens
attaactacagcaaa

SEQ ID NO: 307456 - DNA, 15 bp, Homo sapiens
aattaactacagcaa

SEQ ID NO: 307457 - DNA, 15 bp, Homo sapiens
aaattaactacagca

SEQ ID NO: 307458 - DNA, 15 bp, Homo sapiens
caaattaactacagc

SEQ ID NO: 307459 - DNA, 15 bp, Homo sapiens
tcaaattaactacag

SEQ ID NO: 307460 - DNA, 15 bp, Homo sapiens
gtcaaattaactaca

SEQ ID NO: 307461 - DNA, 15 bp, Homo sapiens
agtcaaattaactac

SEQ ID NO: 307462 - DNA, 15 bp, Homo sapiens
gagtcaaattaacta

SEQ ID NO: 307463 - DNA, 15 bp, Homo sapiens
tgagtcaaattaact

SEQ ID NO: 307464 - DNA, 15 bp, Homo sapiens
atgagtcaaattaac

SEQ ID NO: 307465 - DNA, 15 bp, Homo sapiens
catgagtcaaattaa

SEQ ID NO: 307466 - DNA, 15 bp, Homo sapiens
tcatgagtcaaatta

SEQ ID NO: 307467 - DNA, 15 bp, Homo sapiens
atcatgagtcaaatt

SEQ ID NO: 307468 - DNA, 15 bp, Homo sapiens
tatcatgagtcaaat

SEQ ID NO: 307469 - DNA, 15 bp, Homo sapiens
atatcatgagtcaaa

SEQ ID NO: 307470 - DNA, 15 bp, Homo sapiens
catatcatgagtcaa

SEQ ID NO: 307471 - DNA, 15 bp, Homo sapiens
ccatatcatgagtca

SEQ ID NO: 307472 - DNA, 15 bp, Homo sapiens
gccatatcatgagtc

SEQ ID NO: 307473 - DNA, 15 bp, Homo sapiens
agccatatcatgagt

SEQ ID NO: 307474 - DNA, 15 bp, Homo sapiens
cagccatatcatgag

SEQ ID NO: 307475 - DNA, 15 bp, Homo sapiens
gcagccatatcatga

SEQ ID NO: 307476 - DNA, 15 bp, Homo sapiens
tgcagccatatcatg

SEQ ID NO: 307477 - DNA, 15 bp, Homo sapiens
atgcagccatatcat

SEQ ID NO: 307478 - DNA, 15 bp, Homo sapiens
gatgcagccatatca

SEQ ID NO: 307479 - DNA, 15 bp, Homo sapiens
tgatgcagccatatc

SEQ ID NO: 307480 - DNA, 15 bp, Homo sapiens
atgatgcagccatat

SEQ ID NO: 307481 - DNA, 15 bp, Homo sapiens
tatgatgcagccata

SEQ ID NO: 307482 - DNA, 15 bp, Homo sapiens
atatgatgcagccat

SEQ ID NO: 307483 - DNA, 15 bp, Homo sapiens
catatgatgcagcca

SEQ ID NO: 307484 - DNA, 15 bp, Homo sapiens
acatatgatgcagcc

SEQ ID NO: 307485 - DNA, 15 bp, Homo sapiens
gacatatgatgcagc

SEQ ID NO: 307486 - DNA, 15 bp, Homo sapiens
tgacatatgatgcag

SEQ ID NO: 307487 - DNA, 15 bp, Homo sapiens
ttgacatatgatgca

SEQ ID NO: 307488 - DNA, 15 bp, Homo sapiens
attgacatatgatgc

SEQ ID NO: 307489 - DNA, 15 bp, Homo sapiens
tattgacatatgatg

SEQ ID NO: 307490 - DNA, 15 bp, Homo sapiens
atattgacatatgat

SEQ ID NO: 307491 - DNA, 15 bp, Homo sapiens
aatattgacatatga

SEQ ID NO: 307492 - DNA, 15 bp, Homo sapiens
gaatattgacatatg

SEQ ID NO: 307493 - DNA, 15 bp, Homo sapiens
agaatattgacatat

SEQ ID NO: 307494 - DNA, 15 bp, Homo sapiens
tagaatattgacata

SEQ ID NO: 307495 - DNA, 15 bp, Homo sapiens
ctagaatattgacat

SEQ ID NO: 307496 - DNA, 15 bp, Homo sapiens
tctagaatattgaca

SEQ ID NO: 307497 - DNA, 15 bp, Homo sapiens
ttctagaatattgac

SEQ ID NO: 307498 - DNA, 15 bp, Homo sapiens
tttctagaatattga

SEQ ID NO: 307499 - DNA, 15 bp, Homo sapiens
atttctagaatattg

SEQ ID NO: 307500 - DNA, 15 bp, Homo sapiens
tatttctagaatatt

SEQ ID NO: 307501 - DNA, 15 bp, Homo sapiens
atatttctagaatat

SEQ ID NO: 307502 - DNA, 15 bp, Homo sapiens
aatatttctagaata

SEQ ID NO: 307503 - DNA, 15 bp, Homo sapiens
aaatatttctagaat

SEQ ID NO: 307504 - DNA, 15 bp, Homo sapiens
taaatatttctagaa

SEQ ID NO: 307505 - DNA, 15 bp, Homo sapiens
gtaaatatttctaga

SEQ ID NO: 307506 - DNA, 15 bp, Homo sapiens
ggtaaatatttctag

SEQ ID NO: 307507 - DNA, 15 bp, Homo sapiens
tggtaaatatttcta

SEQ ID NO: 307508 - DNA, 15 bp, Homo sapiens
ttggtaaatatttct

SEQ ID NO: 307509 - DNA, 15 bp, Homo sapiens
cttggtaaatatttc

SEQ ID NO: 307510 - DNA, 15 bp, Homo sapiens
acttggtaaatattt

SEQ ID NO: 307511 - DNA, 15 bp, Homo sapiens
cacttggtaaatatt

SEQ ID NO: 307512 - DNA, 15 bp, Homo sapiens
acacttggtaaatat

SEQ ID NO: 307513 - DNA, 15 bp, Homo sapiens
gacacttggtaaata

SEQ ID NO: 307514 - DNA, 15 bp, Homo sapiens
ggacacttggtaaat

SEQ ID NO: 307515 - DNA, 15 bp, Homo sapiens
tggacacttggtaaa

SEQ ID NO: 307516 - DNA, 15 bp, Homo sapiens
atggacacttggtaa

SEQ ID NO: 307517 - DNA, 15 bp, Homo sapiens
aatggacacttggta

SEQ ID NO: 307518 - DNA, 15 bp, Homo sapiens
taatggacacttggt

SEQ ID NO: 307519 - DNA, 15 bp, Homo sapiens
ataatggacacttgg

SEQ ID NO: 307520 - DNA, 15 bp, Homo sapiens
tataatggacacttg

SEQ ID NO: 307521 - DNA, 15 bp, Homo sapiens
atataatggacactt

SEQ ID NO: 307522 - DNA, 15 bp, Homo sapiens
catataatggacact

SEQ ID NO: 307523 - DNA, 15 bp, Homo sapiens
gcatataatggacac

SEQ ID NO: 307524 - DNA, 15 bp, Homo sapiens
agcatataatggaca

SEQ ID NO: 307525 - DNA, 15 bp, Homo sapiens
aagcatataatggac

SEQ ID NO: 307526 - DNA, 15 bp, Homo sapiens
caagcatataatgga

SEQ ID NO: 307527 - DNA, 15 bp, Homo sapiens
ccaagcatataatgg

SEQ ID NO: 307528 - DNA, 15 bp, Homo sapiens
gccaagcatataatg

SEQ ID NO: 307529 - DNA, 15 bp, Homo sapiens
tgccaagcatataat

SEQ ID NO: 307530 - DNA, 15 bp, Homo sapiens
gtgccaagcatataa

SEQ ID NO: 307531 - DNA, 15 bp, Homo sapiens
agtgccaagcatata

SEQ ID NO: 307532 - DNA, 15 bp, Homo sapiens
cagtgccaagcatat

SEQ ID NO: 307533 - DNA, 15 bp, Homo sapiens
ccagtgccaagcata

SEQ ID NO: 307534 - DNA, 15 bp, Homo sapiens
tccagtgccaagcat

SEQ ID NO: 307535 - DNA, 15 bp, Homo sapiens
ttccagtgccaagca

SEQ ID NO: 307536 - DNA, 15 bp, Homo sapiens
attccagtgccaagc

SEQ ID NO: 307537 - DNA, 15 bp, Homo sapiens
aattccagtgccaag

SEQ ID NO: 307538 - DNA, 15 bp, Homo sapiens
aaattccagtgccaa

SEQ ID NO: 307539 - DNA, 15 bp, Homo sapiens
aaaattccagtgcca

SEQ ID NO: 307540 - DNA, 15 bp, Homo sapiens
taaaattccagtgcc

SEQ ID NO: 307541 - DNA, 15 bp, Homo sapiens
ataaaattccagtgc

SEQ ID NO: 307542 - DNA, 15 bp, Homo sapiens
aataaaattccagtg

SEQ ID NO: 307543 - DNA, 15 bp, Homo sapiens
aaataaaattccagt

SEQ ID NO: 307544 - DNA, 15 bp, Homo sapiens
aaaataaaattccag

SEQ ID NO: 307545 - DNA, 15 bp, Homo sapiens
taaaataaaattcca

SEQ ID NO: 307546 - DNA, 15 bp, Homo sapiens
ttaaaataaaattcc

SEQ ID NO: 307547 - DNA, 15 bp, Homo sapiens
cttaaaataaaattc

SEQ ID NO: 307548 - DNA, 15 bp, Homo sapiens
tcttaaaataaaatt

SEQ ID NO: 307549 - DNA, 15 bp, Homo sapiens
ttcttaaaataaaat

SEQ ID NO: 307550 - DNA, 15 bp, Homo sapiens
gttcttaaaataaaa

SEQ ID NO: 307551 - DNA, 15 bp, Homo sapiens
agttcttaaaataaa

SEQ ID NO: 307552 - DNA, 15 bp, Homo sapiens
gagttcttaaaataa

SEQ ID NO: 307553 - DNA, 15 bp, Homo sapiens
ggagttcttaaaata

SEQ ID NO: 307554 - DNA, 15 bp, Homo sapiens
gggagttcttaaaat

SEQ ID NO: 307555 - DNA, 15 bp, Homo sapiens
agggagttcttaaaa

SEQ ID NO: 307556 - DNA, 15 bp, Homo sapiens
cagggagttcttaaa

SEQ ID NO: 307557 - DNA, 15 bp, Homo sapiens
tcagggagttcttaa

SEQ ID NO: 307558 - DNA, 15 bp, Homo sapiens
ttcagggagttctta

SEQ ID NO: 307559 - DNA, 15 bp, Homo sapiens
tttcagggagttctt

SEQ ID NO: 307560 - DNA, 15 bp, Homo sapiens
ctttcagggagttct

SEQ ID NO: 307561 - DNA, 15 bp, Homo sapiens
actttcagggagttc

SEQ ID NO: 307562 - DNA, 15 bp, Homo sapiens
gactttcagggagtt

SEQ ID NO: 307563 - DNA, 15 bp, Homo sapiens
ggactttcagggagt

SEQ ID NO: 307564 - DNA, 15 bp, Homo sapiens
gggactttcagggag

SEQ ID NO: 307565 - DNA, 15 bp, Homo sapiens
tgggactttcaggga

SEQ ID NO: 307566 - DNA, 15 bp, Homo sapiens
atgggactttcaggg

SEQ ID NO: 307567 - DNA, 15 bp, Homo sapiens
gatgggactttcagg

SEQ ID NO: 307568 - DNA, 15 bp, Homo sapiens
agatgggactttcag

SEQ ID NO: 307569 - DNA, 15 bp, Homo sapiens
cagatgggactttca

SEQ ID NO: 307570 - DNA, 15 bp, Homo sapiens
tcagatgggactttc

SEQ ID NO: 307571 - DNA, 15 bp, Homo sapiens
ttcagatgggacttt

SEQ ID NO: 307572 - DNA, 15 bp, Homo sapiens
gttcagatgggactt

SEQ ID NO: 307573 - DNA, 15 bp, Homo sapiens
ggttcagatgggact

SEQ ID NO: 307574 - DNA, 15 bp, Homo sapiens
gggttcagatgggac

SEQ ID NO: 307575 - DNA, 15 bp, Homo sapiens
agggttcagatggga

SEQ ID NO: 307576 - DNA, 15 bp, Homo sapiens
cagggttcagatggg

SEQ ID NO: 307577 - DNA, 15 bp, Homo sapiens
ccagggttcagatgg

SEQ ID NO: 307578 - DNA, 15 bp, Homo sapiens
accagggttcagatg

SEQ ID NO: 307579 - DNA, 15 bp, Homo sapiens
taccagggttcagat

SEQ ID NO: 307580 - DNA, 15 bp, Homo sapiens
ctaccagggttcaga

SEQ ID NO: 307581 - DNA, 15 bp, Homo sapiens
actaccagggttcag

SEQ ID NO: 307582 - DNA, 15 bp, Homo sapiens
gactaccagggttca

SEQ ID NO: 307583 - DNA, 15 bp, Homo sapiens
tgactaccagggttc

SEQ ID NO: 307584 - DNA, 15 bp, Homo sapiens
gtgactaccagggtt

SEQ ID NO: 307585 - DNA, 15 bp, Homo sapiens
ggtgactaccagggt

SEQ ID NO: 307586 - DNA, 15 bp, Homo sapiens
aggtgactaccaggg

SEQ ID NO: 307587 - DNA, 15 bp, Homo sapiens
caggtgactaccagg

SEQ ID NO: 307588 - DNA, 15 bp, Homo sapiens
acaggtgactaccag

SEQ ID NO: 307589 - DNA, 15 bp, Homo sapiens
gacaggtgactacca

SEQ ID NO: 307590 - DNA, 15 bp, Homo sapiens
agacaggtgactacc

SEQ ID NO: 307591 - DNA, 15 bp, Homo sapiens
tagacaggtgactac

SEQ ID NO: 307592 - DNA, 15 bp, Homo sapiens
ttagacaggtgacta

SEQ ID NO: 307593 - DNA, 15 bp, Homo sapiens
tttagacaggtgact

SEQ ID NO: 307594 - DNA, 15 bp, Homo sapiens
ttttagacaggtgac

SEQ ID NO: 307595 - DNA, 15 bp, Homo sapiens
attttagacaggtga

SEQ ID NO: 307596 - DNA, 15 bp, Homo sapiens
gattttagacaggtg

SEQ ID NO: 307597 - DNA, 15 bp, Homo sapiens
ggattttagacaggt

SEQ ID NO: 307598 - DNA, 15 bp, Homo sapiens
aggattttagacagg

SEQ ID NO: 307599 - DNA, 15 bp, Homo sapiens
aaggattttagacag

SEQ ID NO: 307600 - DNA, 15 bp, Homo sapiens
gaaggattttagaca

SEQ ID NO: 307601 - DNA, 15 bp, Homo sapiens
tgaaggattttagac

SEQ ID NO: 307602 - DNA, 15 bp, Homo sapiens
ctgaaggattttaga

SEQ ID NO: 307603 - DNA, 15 bp, Homo sapiens
ttcctacacagaatt

SEQ ID NO: 307604 - DNA, 15 bp, Homo sapiens
gttcctacacagaat

SEQ ID NO: 307605 - DNA, 15 bp, Homo sapiens
agttcctacacagaa

SEQ ID NO: 307606 - DNA, 15 bp, Homo sapiens
cagttcctacacaga

SEQ ID NO: 307607 - DNA, 15 bp, Homo sapiens
tcagttcctacacag

SEQ ID NO: 307608 - DNA, 15 bp, Homo sapiens
gtcagttcctacaca

SEQ ID NO: 307609 - DNA, 15 bp, Homo sapiens
tgtcagttcctacac

SEQ ID NO: 307610 - DNA, 15 bp, Homo sapiens
atgtcagttcctaca

SEQ ID NO: 307611 - DNA, 15 bp, Homo sapiens
aatgtcagttcctac

SEQ ID NO: 307612 - DNA, 15 bp, Homo sapiens
taatgtcagttccta

SEQ ID NO: 307613 - DNA, 15 bp, Homo sapiens
gtaatgtcagttcct

SEQ ID NO: 307614 - DNA, 15 bp, Homo sapiens
tgtaatgtcagttcc

SEQ ID NO: 307615 - DNA, 15 bp, Homo sapiens
ctgtaatgtcagttc

SEQ ID NO: 307616 - DNA, 15 bp, Homo sapiens
actgtaatgtcagtt

SEQ ID NO: 307617 - DNA, 15 bp, Homo sapiens
tactgtaatgtcagt

SEQ ID NO: 307618 - DNA, 15 bp, Homo sapiens
atactgtaatgtcag

SEQ ID NO: 307619 - DNA, 15 bp, Homo sapiens
aatactgtaatgtca

SEQ ID NO: 307620 - DNA, 15 bp, Homo sapiens
gaatactgtaatgtc

SEQ ID NO: 307621 - DNA, 15 bp, Homo sapiens
agaatactgtaatgt

SEQ ID NO: 307622 - DNA, 15 bp, Homo sapiens
cagaatactgtaatg

SEQ ID NO: 307623 - DNA, 15 bp, Homo sapiens
acagaatactgtaat

SEQ ID NO: 307624 - DNA, 15 bp, Homo sapiens
tacagaatactgtaa

SEQ ID NO: 307625 - DNA, 15 bp, Homo sapiens
atacagaatactgta

SEQ ID NO: 307626 - DNA, 15 bp, Homo sapiens
aatacagaatactgt

SEQ ID NO: 307627 - DNA, 15 bp, Homo sapiens
taatacagaatactg

SEQ ID NO: 307628 - DNA, 15 bp, Homo sapiens
ctaatacagaatact

SEQ ID NO: 307629 - DNA, 15 bp, Homo sapiens
actaatacagaatac

SEQ ID NO: 307630 - DNA, 15 bp, Homo sapiens
cactaatacagaata

SEQ ID NO: 307631 - DNA, 15 bp, Homo sapiens
gcactaatacagaat

SEQ ID NO: 307632 - DNA, 15 bp, Homo sapiens
tgcactaatacagaa

SEQ ID NO: 307633 - DNA, 15 bp, Homo sapiens
ctgcactaatacaga

SEQ ID NO: 307634 - DNA, 15 bp, Homo sapiens
cctgcactaatacag

SEQ ID NO: 307635 - DNA, 15 bp, Homo sapiens
ccctgcactaataca

SEQ ID NO: 307636 - DNA, 15 bp, Homo sapiens
cccctgcactaatac

SEQ ID NO: 307637 - DNA, 15 bp, Homo sapiens
gcccctgcactaata

SEQ ID NO: 307638 - DNA, 15 bp, Homo sapiens
ggcccctgcactaat

SEQ ID NO: 307639 - DNA, 15 bp, Homo sapiens
tggcccctgcactaa

SEQ ID NO: 307640 - DNA, 15 bp, Homo sapiens
atggcccctgcacta

SEQ ID NO: 307641 - DNA, 15 bp, Homo sapiens
aatggcccctgcact

SEQ ID NO: 307642 - DNA, 15 bp, Homo sapiens
aaatggcccctgcac

SEQ ID NO: 307643 - DNA, 15 bp, Homo sapiens
aaaatggcccctgca

SEQ ID NO: 307644 - DNA, 15 bp, Homo sapiens
gaaaatggcccctgc

SEQ ID NO: 307645 - DNA, 15 bp, Homo sapiens
ggaaaatggcccctg

SEQ ID NO: 307646 - DNA, 15 bp, Homo sapiens
tggaaaatggcccct

SEQ ID NO: 307647 - DNA, 15 bp, Homo sapiens
ctggaaaatggcccc

SEQ ID NO: 307648 - DNA, 15 bp, Homo sapiens
tctggaaaatggccc

SEQ ID NO: 307649 - DNA, 15 bp, Homo sapiens
ctctggaaaatggcc

SEQ ID NO: 307650 - DNA, 15 bp, Homo sapiens
tctctggaaaatggc

SEQ ID NO: 307651 - DNA, 15 bp, Homo sapiens
atctctggaaaatgg

SEQ ID NO: 307652 - DNA, 15 bp, Homo sapiens
catctctggaaaatg

SEQ ID NO: 307653 - DNA, 15 bp, Homo sapiens
acatctctggaaaat

SEQ ID NO: 307654 - DNA, 15 bp, Homo sapiens
gacatctctggaaaa

SEQ ID NO: 307655 - DNA, 15 bp, Homo sapiens
tgacatctctggaaa

SEQ ID NO: 307656 - DNA, 15 bp, Homo sapiens
atgacatctctggaa

SEQ ID NO: 307657 - DNA, 15 bp, Homo sapiens
aatgacatctctgga

SEQ ID NO: 307658 - DNA, 15 bp, Homo sapiens
aaatgacatctctgg

SEQ ID NO: 307659 - DNA, 15 bp, Homo sapiens
aaaatgacatctctg

SEQ ID NO: 307660 - DNA, 15 bp, Homo sapiens
gaaaatgacatctct

SEQ ID NO: 307661 - DNA, 15 bp, Homo sapiens
tgaaaatgacatctc

SEQ ID NO: 307662 - DNA, 15 bp, Homo sapiens
atgaaaatgacatct

SEQ ID NO: 307663 - DNA, 15 bp, Homo sapiens
catgaaaatgacatc

SEQ ID NO: 307664 - DNA, 15 bp, Homo sapiens
gcatgaaaatgacat

SEQ ID NO: 307665 - DNA, 15 bp, Homo sapiens
agcatgaaaatgaca

SEQ ID NO: 307666 - DNA, 15 bp, Homo sapiens
tagcatgaaaatgac

SEQ ID NO: 307667 - DNA, 15 bp, Homo sapiens
ttagcatgaaaatga

SEQ ID NO: 307668 - DNA, 15 bp, Homo sapiens
gttagcatgaaaatg

SEQ ID NO: 307669 - DNA, 15 bp, Homo sapiens
agttagcatgaaaat

SEQ ID NO: 307670 - DNA, 15 bp, Homo sapiens
aagttagcatgaaaa

SEQ ID NO: 307671 - DNA, 15 bp, Homo sapiens
caagttagcatgaaa

SEQ ID NO: 307672 - DNA, 15 bp, Homo sapiens
acaagttagcatgaa

SEQ ID NO: 307673 - DNA, 15 bp, Homo sapiens
tacaagttagcatga

SEQ ID NO: 307674 - DNA, 15 bp, Homo sapiens
gtacaagttagcatg

SEQ ID NO: 307675 - DNA, 15 bp, Homo sapiens
ggtacaagttagcat

SEQ ID NO: 307676 - DNA, 15 bp, Homo sapiens
gggtacaagttagca

SEQ ID NO: 307677 - DNA, 15 bp, Homo sapiens
tgggtacaagttagc

SEQ ID NO: 307678 - DNA, 15 bp, Homo sapiens
ttgggtacaagttag

SEQ ID NO: 307679 - DNA, 15 bp, Homo sapiens
tttgggtacaagtta

SEQ ID NO: 307680 - DNA, 15 bp, Homo sapiens
ctttgggtacaagtt

SEQ ID NO: 307681 - DNA, 15 bp, Homo sapiens
actttgggtacaagt

SEQ ID NO: 307682 - DNA, 15 bp, Homo sapiens
cactttgggtacaag

SEQ ID NO: 307683 - DNA, 15 bp, Homo sapiens
acactttgggtacaa

SEQ ID NO: 307684 - DNA, 15 bp, Homo sapiens
aacactttgggtaca

SEQ ID NO: 307685 - DNA, 15 bp, Homo sapiens
aaacactttgggtac

SEQ ID NO: 307686 - DNA, 15 bp, Homo sapiens
gaaacactttgggta

SEQ ID NO: 307687 - DNA, 15 bp, Homo sapiens
agaaacactttgggt

SEQ ID NO: 307688 - DNA, 15 bp, Homo sapiens
cagaaacactttggg

SEQ ID NO: 307689 - DNA, 15 bp, Homo sapiens
ccagaaacactttgg

SEQ ID NO: 307690 - DNA, 15 bp, Homo sapiens
gccagaaacactttg

SEQ ID NO: 307691 - DNA, 15 bp, Homo sapiens
tgccagaaacacttt

SEQ ID NO: 307692 - DNA, 15 bp, Homo sapiens
atgccagaaacactt

SEQ ID NO: 307693 - DNA, 15 bp, Homo sapiens
tatgccagaaacact

SEQ ID NO: 307694 - DNA, 15 bp, Homo sapiens
atatgccagaaacac

SEQ ID NO: 307695 - DNA, 15 bp, Homo sapiens
catatgccagaaaca

SEQ ID NO: 307696 - DNA, 15 bp, Homo sapiens
ccatatgccagaaac

SEQ ID NO: 307697 - DNA, 15 bp, Homo sapiens
tccatatgccagaaa

SEQ ID NO: 307698 - DNA, 15 bp, Homo sapiens
ctccatatgccagaa

SEQ ID NO: 307699 - DNA, 15 bp, Homo sapiens
tctccatatgccaga

SEQ ID NO: 307700 - DNA, 15 bp, Homo sapiens
gtctccatatgccag

SEQ ID NO: 307701 - DNA, 15 bp, Homo sapiens
ggtctccatatgcca

SEQ ID NO: 307702 - DNA, 15 bp, Homo sapiens
gggtctccatatgcc

SEQ ID NO: 307703 - DNA, 15 bp, Homo sapiens
agggtctccatatgc

SEQ ID NO: 307704 - DNA, 15 bp, Homo sapiens
cagggtctccatatg

SEQ ID NO: 307705 - DNA, 15 bp, Homo sapiens
gcagggtctccatat

SEQ ID NO: 307706 - DNA, 15 bp, Homo sapiens
ggcagggtctccata

SEQ ID NO: 307707 - DNA, 15 bp, Homo sapiens
aggcagggtctccat

SEQ ID NO: 307708 - DNA, 15 bp, Homo sapiens
aaggcagggtctcca

SEQ ID NO: 307709 - DNA, 15 bp, Homo sapiens
gaaggcagggtctcc

SEQ ID NO: 307710 - DNA, 15 bp, Homo sapiens
tgaaggcagggtctc

SEQ ID NO: 307711 - DNA, 15 bp, Homo sapiens
atgaaggcagggtct

SEQ ID NO: 307712 - DNA, 15 bp, Homo sapiens
catgaaggcagggtc

SEQ ID NO: 307713 - DNA, 15 bp, Homo sapiens
acatgaaggcagggt

SEQ ID NO: 307714 - DNA, 15 bp, Homo sapiens
tacatgaaggcaggg

SEQ ID NO: 307715 - DNA, 15 bp, Homo sapiens
atacatgaaggcagg

SEQ ID NO: 307716 - DNA, 15 bp, Homo sapiens
tatacatgaaggcag

SEQ ID NO: 307717 - DNA, 15 bp, Homo sapiens
gtatacatgaaggca

SEQ ID NO: 307718 - DNA, 15 bp, Homo sapiens
tgtatacatgaaggc

SEQ ID NO: 307719 - DNA, 15 bp, Homo sapiens
atgtatacatgaagg

SEQ ID NO: 307720 - DNA, 15 bp, Homo sapiens
aatgtatacatgaag

SEQ ID NO: 307721 - DNA, 15 bp, Homo sapiens
aaatgtatacatgaa

SEQ ID NO: 307722 - DNA, 15 bp, Homo sapiens
caaatgtatacatga

SEQ ID NO: 307723 - DNA, 15 bp, Homo sapiens
acaaatgtatacatg

SEQ ID NO: 307724 - DNA, 15 bp, Homo sapiens
aacaaatgtatacat

SEQ ID NO: 307725 - DNA, 15 bp, Homo sapiens
aaacaaatgtataca

SEQ ID NO: 307726 - DNA, 15 bp, Homo sapiens
gaaacaaatgtatac

SEQ ID NO: 307727 - DNA, 15 bp, Homo sapiens
ggaaacaaatgtata

SEQ ID NO: 307728 - DNA, 15 bp, Homo sapiens
aggaaacaaatgtat

SEQ ID NO: 307729 - DNA, 15 bp, Homo sapiens
taggaaacaaatgta

SEQ ID NO: 307730 - DNA, 15 bp, Homo sapiens
ttaggaaacaaatgt

SEQ ID NO: 307731 - DNA, 15 bp, Homo sapiens
cttaggaaacaaatg

SEQ ID NO: 307732 - DNA, 15 bp, Homo sapiens
acttaggaaacaaat

SEQ ID NO: 307733 - DNA, 15 bp, Homo sapiens
tacttaggaaacaaa

SEQ ID NO: 307734 - DNA, 15 bp, Homo sapiens
ttacttaggaaacaa

SEQ ID NO: 307735 - DNA, 15 bp, Homo sapiens
attacttaggaaaca

SEQ ID NO: 307736 - DNA, 15 bp, Homo sapiens
cattacttaggaaac

SEQ ID NO: 307737 - DNA, 15 bp, Homo sapiens
gcattacttaggaaa

SEQ ID NO: 307738 - DNA, 15 bp, Homo sapiens
tgcattacttaggaa

SEQ ID NO: 307739 - DNA, 15 bp, Homo sapiens
atgcattacttagga

SEQ ID NO: 307740 - DNA, 15 bp, Homo sapiens
aatgcattacttagg

SEQ ID NO: 307741 - DNA, 15 bp, Homo sapiens
caatgcattacttag

SEQ ID NO: 307742 - DNA, 15 bp, Homo sapiens
acaatgcattactta

SEQ ID NO: 307743 - DNA, 15 bp, Homo sapiens
tacaatgcattactt

SEQ ID NO: 307744 - DNA, 15 bp, Homo sapiens
atacaatgcattact

SEQ ID NO: 307745 - DNA, 15 bp, Homo sapiens
tatacaatgcattac

SEQ ID NO: 307746 - DNA, 15 bp, Homo sapiens
ttatacaatgcatta

SEQ ID NO: 307747 - DNA, 15 bp, Homo sapiens
tttatacaatgcatt

SEQ ID NO: 307748 - DNA, 15 bp, Homo sapiens
atttatacaatgcat

SEQ ID NO: 307749 - DNA, 15 bp, Homo sapiens
tatttatacaatgca

SEQ ID NO: 307750 - DNA, 15 bp, Homo sapiens
ttatttatacaatgc

SEQ ID NO: 307751 - DNA, 15 bp, Homo sapiens
cttatttatacaatg

SEQ ID NO: 307752 - DNA, 15 bp, Homo sapiens
acttatttatacaat

SEQ ID NO: 307753 - DNA, 15 bp, Homo sapiens
aacttatttatacaa

SEQ ID NO: 307754 - DNA, 15 bp, Homo sapiens
taacttatttataca

SEQ ID NO: 307755 - DNA, 15 bp, Homo sapiens
ttaacttatttatac

SEQ ID NO: 307756 - DNA, 15 bp, Homo sapiens
cttaacttatttata

SEQ ID NO: 307757 - DNA, 15 bp, Homo sapiens
gcttaacttatttat

SEQ ID NO: 307758 - DNA, 15 bp, Homo sapiens
ggcttaacttattta

SEQ ID NO: 307759 - DNA, 15 bp, Homo sapiens
aggcttaacttattt

SEQ ID NO: 307760 - DNA, 15 bp, Homo sapiens
aaggcttaacttatt

SEQ ID NO: 307761 - DNA, 15 bp, Homo sapiens
caaggcttaacttat

SEQ ID NO: 307762 - DNA, 15 bp, Homo sapiens
acaaggcttaactta

SEQ ID NO: 307763 - DNA, 15 bp, Homo sapiens
aacaaggcttaactt

SEQ ID NO: 307764 - DNA, 15 bp, Homo sapiens
aaacaaggcttaact

SEQ ID NO: 307765 - DNA, 15 bp, Homo sapiens
aaaacaaggcttaac

SEQ ID NO: 307766 - DNA, 15 bp, Homo sapiens
aaaaacaaggcttaa

SEQ ID NO: 307767 - DNA, 15 bp, Homo sapiens
aaaaaacaaggctta

SEQ ID NO: 307768 - DNA, 15 bp, Homo sapiens
aaaaaaacaaggctt

SEQ ID NO: 307769 - DNA, 15 bp, Homo sapiens
taaaaaaacaaggct

SEQ ID NO: 307770 - DNA, 15 bp, Homo sapiens
ttaaaaaaacaaggc

SEQ ID NO: 307771 - DNA, 15 bp, Homo sapiens
tttaaaaaaacaagg

SEQ ID NO: 307772 - DNA, 15 bp, Homo sapiens
ttttaaaaaaacaag

SEQ ID NO: 307773 - DNA, 15 bp, Homo sapiens
attttaaaaaaacaa

SEQ ID NO: 307774 - DNA, 15 bp, Homo sapiens
aattttaaaaaaaca

SEQ ID NO: 307775 - DNA, 15 bp, Homo sapiens
gaattttaaaaaaac

SEQ ID NO: 307776 - DNA, 15 bp, Homo sapiens
tgaattttaaaaaaa

SEQ ID NO: 307777 - DNA, 15 bp, Homo sapiens
ttgaattttaaaaaa

SEQ ID NO: 307778 - DNA, 15 bp, Homo sapiens
cttgaattttaaaaa

SEQ ID NO: 307779 - DNA, 15 bp, Homo sapiens
tcttgaattttaaaa

SEQ ID NO: 307780 - DNA, 15 bp, Homo sapiens
ttcttgaattttaaa

SEQ ID NO: 307781 - DNA, 15 bp, Homo sapiens
cttcttgaattttaa

SEQ ID NO: 307782 - DNA, 15 bp, Homo sapiens
gcttcttgaatttta

SEQ ID NO: 307783 - DNA, 15 bp, Homo sapiens
tgcttcttgaatttt

SEQ ID NO: 307784 - DNA, 15 bp, Homo sapiens
ctgcttcttgaattt

SEQ ID NO: 307785 - DNA, 15 bp, Homo sapiens
actgcttcttgaatt

SEQ ID NO: 307786 - DNA, 15 bp, Homo sapiens
gactgcttcttgaat

SEQ ID NO: 307787 - DNA, 15 bp, Homo sapiens
tgactgcttcttgaa

SEQ ID NO: 307788 - DNA, 15 bp, Homo sapiens
atgactgcttcttga

SEQ ID NO: 307789 - DNA, 15 bp, Homo sapiens
gatgactgcttcttg

SEQ ID NO: 307790 - DNA, 15 bp, Homo sapiens
agatgactgcttctt

SEQ ID NO: 307791 - DNA, 15 bp, Homo sapiens
cagatgactgcttct

SEQ ID NO: 307792 - DNA, 15 bp, Homo sapiens
acagatgactgcttc

SEQ ID NO: 307793 - DNA, 15 bp, Homo sapiens
tacagatgactgctt

SEQ ID NO: 307794 - DNA, 15 bp, Homo sapiens
ttacagatgactgct

SEQ ID NO: 307795 - DNA, 15 bp, Homo sapiens
tttacagatgactgc

SEQ ID NO: 307796 - DNA, 15 bp, Homo sapiens
gtttacagatgactg

SEQ ID NO: 307797 - DNA, 15 bp, Homo sapiens
agtttacagatgact

SEQ ID NO: 307798 - DNA, 15 bp, Homo sapiens
cagtttacagatgac

SEQ ID NO: 307799 - DNA, 15 bp, Homo sapiens
gcagtttacagatga

SEQ ID NO: 307800 - DNA, 15 bp, Homo sapiens
ggcagtttacagatg

SEQ ID NO: 307801 - DNA, 15 bp, Homo sapiens
tggcagtttacagat

SEQ ID NO: 307802 - DNA, 15 bp, Homo sapiens
ctggcagtttacaga

SEQ ID NO: 307803 - DNA, 15 bp, Homo sapiens
cctggcagtttacag

SEQ ID NO: 307804 - DNA, 15 bp, Homo sapiens
tcctggcagtttaca

SEQ ID NO: 307805 - DNA, 15 bp, Homo sapiens
ttcctggcagtttac

SEQ ID NO: 307806 - DNA, 15 bp, Homo sapiens
cttcctggcagttta

SEQ ID NO: 307807 - DNA, 15 bp, Homo sapiens
acttcctggcagttt

SEQ ID NO: 307808 - DNA, 15 bp, Homo sapiens
cacttcctggcagtt

SEQ ID NO: 307809 - DNA, 15 bp, Homo sapiens
ccacttcctggcagt

SEQ ID NO: 307810 - DNA, 15 bp, Homo sapiens
accacttcctggcag

SEQ ID NO: 307811 - DNA, 15 bp, Homo sapiens
caccacttcctggca

SEQ ID NO: 307812 - DNA, 15 bp, Homo sapiens
acaccacttcctggc

SEQ ID NO: 307813 - DNA, 15 bp, Homo sapiens
tacaccacttcctgg

SEQ ID NO: 307814 - DNA, 15 bp, Homo sapiens
ctacaccacttcctg

SEQ ID NO: 307815 - DNA, 15 bp, Homo sapiens
cctacaccacttcct

SEQ ID NO: 307816 - DNA, 15 bp, Homo sapiens
gcctacaccacttcc

SEQ ID NO: 307817 - DNA, 15 bp, Homo sapiens
tgcctacaccacttc

SEQ ID NO: 307818 - DNA, 15 bp, Homo sapiens
gtgcctacaccactt

SEQ ID NO: 307819 - DNA, 15 bp, Homo sapiens
agtgcctacaccact

SEQ ID NO: 307820 - DNA, 15 bp, Homo sapiens
cagtgcctacaccac

SEQ ID NO: 307821 - DNA, 15 bp, Homo sapiens
ccagtgcctacacca

SEQ ID NO: 307822 - DNA, 15 bp, Homo sapiens
cccagtgcctacacc

SEQ ID NO: 307823 - DNA, 15 bp, Homo sapiens
tcccagtgcctacac

SEQ ID NO: 307824 - DNA, 15 bp, Homo sapiens
ttcccagtgcctaca

SEQ ID NO: 307825 - DNA, 15 bp, Homo sapiens
attcccagtgcctac

SEQ ID NO: 307826 - DNA, 15 bp, Homo sapiens
tattcccagtgccta

SEQ ID NO: 307827 - DNA, 15 bp, Homo sapiens
gtattcccagtgcct

SEQ ID NO: 307828 - DNA, 15 bp, Homo sapiens
tgtattcccagtgcc

SEQ ID NO: 307829 - DNA, 15 bp, Homo sapiens
ctgtattcccagtgc

SEQ ID NO: 307830 - DNA, 15 bp, Homo sapiens
tctgtattcccagtg

SEQ ID NO: 307831 - DNA, 15 bp, Homo sapiens
ttctgtattcccagt

SEQ ID NO: 307832 - DNA, 15 bp, Homo sapiens
cttctgtattcccag

SEQ ID NO: 307833 - DNA, 15 bp, Homo sapiens
acttctgtattccca

SEQ ID NO: 307834 - DNA, 15 bp, Homo sapiens
tacttctgtattccc

SEQ ID NO: 307835 - DNA, 15 bp, Homo sapiens
ttacttctgtattcc

SEQ ID NO: 307836 - DNA, 15 bp, Homo sapiens
cttacttctgtattc

SEQ ID NO: 307837 - DNA, 15 bp, Homo sapiens
tcttacttctgtatt

SEQ ID NO: 307838 - DNA, 15 bp, Homo sapiens
atcttacttctgtat

SEQ ID NO: 307839 - DNA, 15 bp, Homo sapiens
catcttacttctgta

SEQ ID NO: 307840 - DNA, 15 bp, Homo sapiens
ccatcttacttctgt

SEQ ID NO: 307841 - DNA, 15 bp, Homo sapiens
gccatcttacttctg

SEQ ID NO: 307842 - DNA, 15 bp, Homo sapiens
ggccatcttacttct

SEQ ID NO: 307843 - DNA, 15 bp, Homo sapiens
aggccatcttacttc

SEQ ID NO: 307844 - DNA, 15 bp, Homo sapiens
caggccatcttactt

SEQ ID NO: 307845 - DNA, 15 bp, Homo sapiens
ccaggccatcttact

SEQ ID NO: 307846 - DNA, 15 bp, Homo sapiens
cccaggccatcttac

SEQ ID NO: 307847 - DNA, 15 bp, Homo sapiens
acccaggccatctta

SEQ ID NO: 307848 - DNA, 15 bp, Homo sapiens
gacccaggccatctt

SEQ ID NO: 307849 - DNA, 15 bp, Homo sapiens
ggacccaggccatct

SEQ ID NO: 307850 - DNA, 15 bp, Homo sapiens
aggacccaggccatc

SEQ ID NO: 307851 - DNA, 15 bp, Homo sapiens
aaggacccaggccat

SEQ ID NO: 307852 - DNA, 15 bp, Homo sapiens
gaaggacccaggcca

SEQ ID NO: 307853 - DNA, 15 bp, Homo sapiens
ggaaggacccaggcc

SEQ ID NO: 307854 - DNA, 15 bp, Homo sapiens
gggaaggacccaggc

SEQ ID NO: 307855 - DNA, 15 bp, Homo sapiens
ggggaaggacccagg

SEQ ID NO: 307856 - DNA, 15 bp, Homo sapiens
aggggaaggacccag

SEQ ID NO: 307857 - DNA, 15 bp, Homo sapiens
gaggggaaggaccca

SEQ ID NO: 307858 - DNA, 15 bp, Homo sapiens
tgaggggaaggaccc

SEQ ID NO: 307859 - DNA, 15 bp, Homo sapiens
atgaggggaaggacc

SEQ ID NO: 307860 - DNA, 15 bp, Homo sapiens
tatgaggggaaggac

SEQ ID NO: 307861 - DNA, 15 bp, Homo sapiens
ctatgaggggaagga

SEQ ID NO: 307862 - DNA, 15 bp, Homo sapiens
tctatgaggggaagg

SEQ ID NO: 307863 - DNA, 15 bp, Homo sapiens
ctctatgaggggaag

SEQ ID NO: 307864 - DNA, 15 bp, Homo sapiens
gctctatgaggggaa

SEQ ID NO: 307865 - DNA, 15 bp, Homo sapiens
agctctatgagggga

SEQ ID NO: 307866 - DNA, 15 bp, Homo sapiens
aagctctatgagggg

SEQ ID NO: 307867 - DNA, 15 bp, Homo sapiens
taagctctatgaggg

SEQ ID NO: 307868 - DNA, 15 bp, Homo sapiens
gtaagctctatgagg

SEQ ID NO: 307869 - DNA, 15 bp, Homo sapiens
tgtaagctctatgag

SEQ ID NO: 307870 - DNA, 15 bp, Homo sapiens
atgtaagctctatga

SEQ ID NO: 307871 - DNA, 15 bp, Homo sapiens
aatgtaagctctatg

SEQ ID NO: 307872 - DNA, 15 bp, Homo sapiens
gaatgtaagctctat

SEQ ID NO: 307873 - DNA, 15 bp, Homo sapiens
agaatgtaagctcta

SEQ ID NO: 307874 - DNA, 15 bp, Homo sapiens
cagaatgtaagctct

SEQ ID NO: 307875 - DNA, 15 bp, Homo sapiens
ccagaatgtaagctc

SEQ ID NO: 307876 - DNA, 15 bp, Homo sapiens
tccagaatgtaagct

SEQ ID NO: 307877 - DNA, 15 bp, Homo sapiens
ctccagaatgtaagc

SEQ ID NO: 307878 - DNA, 15 bp, Homo sapiens
cctccagaatgtaag

SEQ ID NO: 307879 - DNA, 15 bp, Homo sapiens
tcctccagaatgtaa

SEQ ID NO: 307880 - DNA, 15 bp, Homo sapiens
ctcctccagaatgta

SEQ ID NO: 307881 - DNA, 15 bp, Homo sapiens
cctcctccagaatgt

SEQ ID NO: 307882 - DNA, 15 bp, Homo sapiens
tcctcctccagaatg

SEQ ID NO: 307883 - DNA, 15 bp, Homo sapiens
ttcctcctccagaat

SEQ ID NO: 307884 - DNA, 15 bp, Homo sapiens
gttcctcctccagaa

SEQ ID NO: 307885 - DNA, 15 bp, Homo sapiens
tgttcctcctccaga

SEQ ID NO: 307886 - DNA, 15 bp, Homo sapiens
gtgttcctcctccag

SEQ ID NO: 307887 - DNA, 15 bp, Homo sapiens
tgtgttcctcctcca

SEQ ID NO: 307888 - DNA, 15 bp, Homo sapiens
ctgtgttcctcctcc

SEQ ID NO: 307889 - DNA, 15 bp, Homo sapiens
cctgtgttcctcctc

SEQ ID NO: 307890 - DNA, 15 bp, Homo sapiens
gcctgtgttcctcct

SEQ ID NO: 307891 - DNA, 15 bp, Homo sapiens
tgcctgtgttcctcc

SEQ ID NO: 307892 - DNA, 15 bp, Homo sapiens
ttgcctgtgttcctc

SEQ ID NO: 307893 - DNA, 15 bp, Homo sapiens
attgcctgtgttcct

SEQ ID NO: 307894 - DNA, 15 bp, Homo sapiens
cattgcctgtgttcc

SEQ ID NO: 307895 - DNA, 15 bp, Homo sapiens
tcattgcctgtgttc

SEQ ID NO: 307896 - DNA, 15 bp, Homo sapiens
ttcattgcctgtgtt

SEQ ID NO: 307897 - DNA, 15 bp, Homo sapiens
gttcattgcctgtgt

SEQ ID NO: 307898 - DNA, 15 bp, Homo sapiens
tgttcattgcctgtg

SEQ ID NO: 307899 - DNA, 15 bp, Homo sapiens
ttgttcattgcctgt

SEQ ID NO: 307900 - DNA, 15 bp, Homo sapiens
cttgttcattgcctg

SEQ ID NO: 307901 - DNA, 15 bp, Homo sapiens
acttgttcattgcct

SEQ ID NO: 307902 - DNA, 15 bp, Homo sapiens
tacttgttcattgcc

SEQ ID NO: 307903 - DNA, 15 bp, Homo sapiens
ttacttgttcattgc

SEQ ID NO: 307904 - DNA, 15 bp, Homo sapiens
tttacttgttcattg

SEQ ID NO: 307905 - DNA, 15 bp, Homo sapiens
gtttacttgttcatt

SEQ ID NO: 307906 - DNA, 15 bp, Homo sapiens
ggtttacttgttcat

SEQ ID NO: 307907 - DNA, 15 bp, Homo sapiens
tggtttacttgttca

SEQ ID NO: 307908 - DNA, 15 bp, Homo sapiens
ttggtttacttgttc

SEQ ID NO: 307909 - DNA, 15 bp, Homo sapiens
cttggtttacttgtt

SEQ ID NO: 307910 - DNA, 15 bp, Homo sapiens
tcttggtttacttgt

SEQ ID NO: 307911 - DNA, 15 bp, Homo sapiens
atcttggtttacttg

SEQ ID NO: 307912 - DNA, 15 bp, Homo sapiens
catcttggtttactt

SEQ ID NO: 307913 - DNA, 15 bp, Homo sapiens
acatcttggtttact

SEQ ID NO: 307914 - DNA, 15 bp, Homo sapiens
tacatcttggtttac

SEQ ID NO: 307915 - DNA, 15 bp, Homo sapiens
ttacatcttggttta

SEQ ID NO: 307916 - DNA, 15 bp, Homo sapiens
cttacatcttggttt

SEQ ID NO: 307917 - DNA, 15 bp, Homo sapiens
tcttacatcttggtt

SEQ ID NO: 307918 - DNA, 15 bp, Homo sapiens
atcttacatcttggt

SEQ ID NO: 307919 - DNA, 15 bp, Homo sapiens
catcttacatcttgg

SEQ ID NO: 307920 - DNA, 15 bp, Homo sapiens
tcatcttacatcttg

SEQ ID NO: 307921 - DNA, 15 bp, Homo sapiens
atcatcttacatctt

SEQ ID NO: 307922 - DNA, 15 bp, Homo sapiens
aatcatcttacatct

SEQ ID NO: 307923 - DNA, 15 bp, Homo sapiens
aaatcatcttacatc

SEQ ID NO: 307924 - DNA, 15 bp, Homo sapiens
aaaatcatcttacat

SEQ ID NO: 307925 - DNA, 15 bp, Homo sapiens
taaaatcatcttaca

SEQ ID NO: 307926 - DNA, 15 bp, Homo sapiens
ctaaaatcatcttac

SEQ ID NO: 307927 - DNA, 15 bp, Homo sapiens
tctaaaatcatctta

SEQ ID NO: 307928 - DNA, 15 bp, Homo sapiens
ctctaaaatcatctt

SEQ ID NO: 307929 - DNA, 15 bp, Homo sapiens
actctaaaatcatct

SEQ ID NO: 307930 - DNA, 15 bp, Homo sapiens
tactctaaaatcatc

SEQ ID NO: 307931 - DNA, 15 bp, Homo sapiens
atactctaaaatcat

SEQ ID NO: 307932 - DNA, 15 bp, Homo sapiens
tatactctaaaatca

SEQ ID NO: 307933 - DNA, 15 bp, Homo sapiens
ttatactctaaaatc

SEQ ID NO: 307934 - DNA, 15 bp, Homo sapiens
attatactctaaaat

SEQ ID NO: 307935 - DNA, 15 bp, Homo sapiens
tattatactctaaaa

SEQ ID NO: 307936 - DNA, 15 bp, Homo sapiens
ttattatactctaaa

SEQ ID NO: 307937 - DNA, 15 bp, Homo sapiens
cttattatactctaa

SEQ ID NO: 307938 - DNA, 15 bp, Homo sapiens
acttattatactcta

SEQ ID NO: 307939 - DNA, 15 bp, Homo sapiens
cacttattatactct

SEQ ID NO: 307940 - DNA, 15 bp, Homo sapiens
gcacttattatactc

SEQ ID NO: 307941 - DNA, 15 bp, Homo sapiens
agcacttattatact

SEQ ID NO: 307942 - DNA, 15 bp, Homo sapiens
tagcacttattatac

SEQ ID NO: 307943 - DNA, 15 bp, Homo sapiens
gtagcacttattata

SEQ ID NO: 307944 - DNA, 15 bp, Homo sapiens
tgtagcacttattat

SEQ ID NO: 307945 - DNA, 15 bp, Homo sapiens
ttgtagcacttatta

SEQ ID NO: 307946 - DNA, 15 bp, Homo sapiens
tttgtagcacttatt

SEQ ID NO: 307947 - DNA, 15 bp, Homo sapiens
ctttgtagcacttat

SEQ ID NO: 307948 - DNA, 15 bp, Homo sapiens
cctttgtagcactta

SEQ ID NO: 307949 - DNA, 15 bp, Homo sapiens
tcctttgtagcactt

SEQ ID NO: 307950 - DNA, 15 bp, Homo sapiens
ttcctttgtagcact

SEQ ID NO: 307951 - DNA, 15 bp, Homo sapiens
tttcctttgtagcac

SEQ ID NO: 307952 - DNA, 15 bp, Homo sapiens
atttcctttgtagca

SEQ ID NO: 307953 - DNA, 15 bp, Homo sapiens
tatttcctttgtagc

SEQ ID NO: 307954 - DNA, 15 bp, Homo sapiens
ttatttcctttgtag

SEQ ID NO: 307955 - DNA, 15 bp, Homo sapiens
tttatttcctttgta

SEQ ID NO: 307956 - DNA, 15 bp, Homo sapiens
gtttatttcctttgt

SEQ ID NO: 307957 - DNA, 15 bp, Homo sapiens
tgtttatttcctttg

SEQ ID NO: 307958 - DNA, 15 bp, Homo sapiens
ctgtttatttccttt

SEQ ID NO: 307959 - DNA, 15 bp, Homo sapiens
tctgtttatttcctt

SEQ ID NO: 307960 - DNA, 15 bp, Homo sapiens
ctctgtttatttcct

SEQ ID NO: 307961 - DNA, 15 bp, Homo sapiens
actctgtttatttcc

SEQ ID NO: 307962 - DNA, 15 bp, Homo sapiens
cactctgtttatttc

SEQ ID NO: 307963 - DNA, 15 bp, Homo sapiens
ccactctgtttattt

SEQ ID NO: 307964 - DNA, 15 bp, Homo sapiens
accactctgtttatt

SEQ ID NO: 307965 - DNA, 15 bp, Homo sapiens
caccactctgtttat

SEQ ID NO: 307966 - DNA, 15 bp, Homo sapiens
acaccactctgttta

SEQ ID NO: 307967 - DNA, 15 bp, Homo sapiens
cacaccactctgttt

SEQ ID NO: 307968 - DNA, 15 bp, Homo sapiens
tcacaccactctgtt

SEQ ID NO: 307969 - DNA, 15 bp, Homo sapiens
ttcacaccactctgt

SEQ ID NO: 307970 - DNA, 15 bp, Homo sapiens
tttcacaccactctg

SEQ ID NO: 307971 - DNA, 15 bp, Homo sapiens
ctttcacaccactct

SEQ ID NO: 307972 - DNA, 15 bp, Homo sapiens
tctttcacaccactc

SEQ ID NO: 307973 - DNA, 15 bp, Homo sapiens
ctctttcacaccact

SEQ ID NO: 307974 - DNA, 15 bp, Homo sapiens
tctctttcacaccac

SEQ ID NO: 307975 - DNA, 15 bp, Homo sapiens
ctctctttcacacca

SEQ ID NO: 307976 - DNA, 15 bp, Homo sapiens
tctctctttcacacc

SEQ ID NO: 307977 - DNA, 15 bp, Homo sapiens
ttctctctttcacac

SEQ ID NO: 307978 - DNA, 15 bp, Homo sapiens
tttctctctttcaca

SEQ ID NO: 307979 - DNA, 15 bp, Homo sapiens
gtttctctctttcac

SEQ ID NO: 307980 - DNA, 15 bp, Homo sapiens
cgtttctctctttca

SEQ ID NO: 307981 - DNA, 15 bp, Homo sapiens
ccgtttctctctttc

SEQ ID NO: 307982 - DNA, 15 bp, Homo sapiens
tccgtttctctcttt

SEQ ID NO: 307983 - DNA, 15 bp, Homo sapiens
ctccgtttctctctt

SEQ ID NO: 307984 - DNA, 15 bp, Homo sapiens
tctccgtttctctct

SEQ ID NO: 307985 - DNA, 15 bp, Homo sapiens
ctctccgtttctctc

SEQ ID NO: 307986 - DNA, 15 bp, Homo sapiens
cctctccgtttctct

SEQ ID NO: 307987 - DNA, 15 bp, Homo sapiens
gcctctccgtttctc

SEQ ID NO: 307988 - DNA, 15 bp, Homo sapiens
agcctctccgtttct

SEQ ID NO: 307989 - DNA, 15 bp, Homo sapiens
cagcctctccgtttc

SEQ ID NO: 307990 - DNA, 15 bp, Homo sapiens
tcagcctctccgttt

SEQ ID NO: 307991 - DNA, 15 bp, Homo sapiens
atcagcctctccgtt

SEQ ID NO: 307992 - DNA, 15 bp, Homo sapiens
tatcagcctctccgt

SEQ ID NO: 307993 - DNA, 15 bp, Homo sapiens
ctatcagcctctccg

SEQ ID NO: 307994 - DNA, 15 bp, Homo sapiens
tctatcagcctctcc

SEQ ID NO: 307995 - DNA, 15 bp, Homo sapiens
ttctatcagcctctc

SEQ ID NO: 307996 - DNA, 15 bp, Homo sapiens
attctatcagcctct

SEQ ID NO: 307997 - DNA, 15 bp, Homo sapiens
cattctatcagcctc

SEQ ID NO: 307998 - DNA, 15 bp, Homo sapiens
gcattctatcagcct

SEQ ID NO: 307999 - DNA, 15 bp, Homo sapiens
agcattctatcagcc

SEQ ID NO: 308000 - DNA, 15 bp, Homo sapiens
aagcattctatcagc

SEQ ID NO: 308001 - DNA, 15 bp, Homo sapiens
taagcattctatcag

SEQ ID NO: 308002 - DNA, 15 bp, Homo sapiens
ctaagcattctatca

SEQ ID NO: 308003 - DNA, 15 bp, Homo sapiens
actaagcattctatc

SEQ ID NO: 308004 - DNA, 15 bp, Homo sapiens
cactaagcattctat

SEQ ID NO: 308005 - DNA, 15 bp, Homo sapiens
ccactaagcattcta

SEQ ID NO: 308006 - DNA, 15 bp, Homo sapiens
gccactaagcattct

SEQ ID NO: 308007 - DNA, 15 bp, Homo sapiens
tgccactaagcattc

SEQ ID NO: 308008 - DNA, 15 bp, Homo sapiens
gtgccactaagcatt

SEQ ID NO: 308009 - DNA, 15 bp, Homo sapiens
agtgccactaagcat

SEQ ID NO: 308010 - DNA, 15 bp, Homo sapiens
aagtgccactaagca

SEQ ID NO: 308011 - DNA, 15 bp, Homo sapiens
aaagtgccactaagc

SEQ ID NO: 308012 - DNA, 15 bp, Homo sapiens
gaaagtgccactaag

SEQ ID NO: 308013 - DNA, 15 bp, Homo sapiens
ggaaagtgccactaa

SEQ ID NO: 308014 - DNA, 15 bp, Homo sapiens
aggaaagtgccacta

SEQ ID NO: 308015 - DNA, 15 bp, Homo sapiens
aaggaaagtgccact

SEQ ID NO: 308016 - DNA, 15 bp, Homo sapiens
aaaggaaagtgccac

SEQ ID NO: 308017 - DNA, 15 bp, Homo sapiens
gaaaggaaagtgcca

SEQ ID NO: 308018 - DNA, 15 bp, Homo sapiens
agaaaggaaagtgcc

SEQ ID NO: 308019 - DNA, 15 bp, Homo sapiens
gagaaaggaaagtgc

SEQ ID NO: 308020 - DNA, 15 bp, Homo sapiens
agagaaaggaaagtg

SEQ ID NO: 308021 - DNA, 15 bp, Homo sapiens
cagagaaaggaaagt

SEQ ID NO: 308022 - DNA, 15 bp, Homo sapiens
tcagagaaaggaaag

SEQ ID NO: 308023 - DNA, 15 bp, Homo sapiens
atcagagaaaggaaa

SEQ ID NO: 308024 - DNA, 15 bp, Homo sapiens
tatcagagaaaggaa

SEQ ID NO: 308025 - DNA, 15 bp, Homo sapiens
ttatcagagaaagga

SEQ ID NO: 308026 - DNA, 15 bp, Homo sapiens
tttatcagagaaagg

SEQ ID NO: 308027 - DNA, 15 bp, Homo sapiens
ctttatcagagaaag

SEQ ID NO: 308028 - DNA, 15 bp, Homo sapiens
actttatcagagaaa

SEQ ID NO: 308029 - DNA, 15 bp, Homo sapiens
cactttatcagagaa

SEQ ID NO: 308030 - DNA, 15 bp, Homo sapiens
tcactttatcagaga

SEQ ID NO: 308031 - DNA, 15 bp, Homo sapiens
atcactttatcagag

SEQ ID NO: 308032 - DNA, 15 bp, Homo sapiens
tatcactttatcaga

SEQ ID NO: 308033 - DNA, 15 bp, Homo sapiens
atatcactttatcag

SEQ ID NO: 308034 - DNA, 15 bp, Homo sapiens
aatatcactttatca

SEQ ID NO: 308035 - DNA, 15 bp, Homo sapiens
aaatatcactttatc

SEQ ID NO: 308036 - DNA, 15 bp, Homo sapiens
aaaatatcactttat

SEQ ID NO: 308037 - DNA, 15 bp, Homo sapiens
caaaatatcacttta

SEQ ID NO: 308038 - DNA, 15 bp, Homo sapiens
tcaaaatatcacttt

SEQ ID NO: 308039 - DNA, 15 bp, Homo sapiens
gtcaaaatatcactt

SEQ ID NO: 308040 - DNA, 15 bp, Homo sapiens
cgtcaaaatatcact

SEQ ID NO: 308041 - DNA, 15 bp, Homo sapiens
acgtcaaaatatcac

SEQ ID NO: 308042 - DNA, 15 bp, Homo sapiens
gacgtcaaaatatca

SEQ ID NO: 308043 - DNA, 15 bp, Homo sapiens
tgacgtcaaaatatc

SEQ ID NO: 308044 - DNA, 15 bp, Homo sapiens
gtgacgtcaaaatat

SEQ ID NO: 308045 - DNA, 15 bp, Homo sapiens
tgtgacgtcaaaata

SEQ ID NO: 308046 - DNA, 15 bp, Homo sapiens
gtgtgacgtcaaaat

SEQ ID NO: 308047 - DNA, 15 bp, Homo sapiens
ggtgtgacgtcaaaa

SEQ ID NO: 308048 - DNA, 15 bp, Homo sapiens
aggtgtgacgtcaaa

SEQ ID NO: 308049 - DNA, 15 bp, Homo sapiens
caggtgtgacgtcaa

SEQ ID NO: 308050 - DNA, 15 bp, Homo sapiens
tcaggtgtgacgtca

SEQ ID NO: 308051 - DNA, 15 bp, Homo sapiens
ttcaggtgtgacgtc

SEQ ID NO: 308052 - DNA, 15 bp, Homo sapiens
cttcaggtgtgacgt

SEQ ID NO: 308053 - DNA, 15 bp, Homo sapiens
ccttcaggtgtgacg

SEQ ID NO: 308054 - DNA, 15 bp, Homo sapiens
cccttcaggtgtgac

SEQ ID NO: 308055 - DNA, 15 bp, Homo sapiens
gcccttcaggtgtga

SEQ ID NO: 308056 - DNA, 15 bp, Homo sapiens
tgcccttcaggtgtg

SEQ ID NO: 308057 - DNA, 15 bp, Homo sapiens
ttgcccttcaggtgt

SEQ ID NO: 308058 - DNA, 15 bp, Homo sapiens
cttgcccttcaggtg

SEQ ID NO: 308059 - DNA, 15 bp, Homo sapiens
gcttgcccttcaggt

SEQ ID NO: 308060 - DNA, 15 bp, Homo sapiens
agcttgcccttcagg

SEQ ID NO: 308061 - DNA, 15 bp, Homo sapiens
cagcttgcccttcag

SEQ ID NO: 308062 - DNA, 15 bp, Homo sapiens
tcagcttgcccttca

SEQ ID NO: 308063 - DNA, 15 bp, Homo sapiens
atcagcttgcccttc

SEQ ID NO: 308064 - DNA, 15 bp, Homo sapiens
catcagcttgccctt

SEQ ID NO: 308065 - DNA, 15 bp, Homo sapiens
gcatcagcttgccct

SEQ ID NO: 308066 - DNA, 15 bp, Homo sapiens
agcatcagcttgccc

SEQ ID NO: 308067 - DNA, 15 bp, Homo sapiens
tagcatcagcttgcc

SEQ ID NO: 308068 - DNA, 15 bp, Homo sapiens
ctagcatcagcttgc

SEQ ID NO: 308069 - DNA, 15 bp, Homo sapiens
gctagcatcagcttg

SEQ ID NO: 308070 - DNA, 15 bp, Homo sapiens
agctagcatcagctt

SEQ ID NO: 308071 - DNA, 15 bp, Homo sapiens
tagctagcatcagct

SEQ ID NO: 308072 - DNA, 15 bp, Homo sapiens
ctagctagcatcagc

SEQ ID NO: 308073 - DNA, 15 bp, Homo sapiens
cctagctagcatcag

SEQ ID NO: 308074 - DNA, 15 bp, Homo sapiens
gcctagctagcatca

SEQ ID NO: 308075 - DNA, 15 bp, Homo sapiens
tgcctagctagcatc

SEQ ID NO: 308076 - DNA, 15 bp, Homo sapiens
ttgcctagctagcat

SEQ ID NO: 308077 - DNA, 15 bp, Homo sapiens
tttgcctagctagca

SEQ ID NO: 308078 - DNA, 15 bp, Homo sapiens
ttttgcctagctagc

SEQ ID NO: 308079 - DNA, 15 bp, Homo sapiens
tttttgcctagctag

SEQ ID NO: 308080 - DNA, 15 bp, Homo sapiens
gtttttgcctagcta

SEQ ID NO: 308081 - DNA, 15 bp, Homo sapiens
ggtttttgcctagct

SEQ ID NO: 308082 - DNA, 15 bp, Homo sapiens
aggtttttgcctagc

SEQ ID NO: 308083 - DNA, 15 bp, Homo sapiens
caggtttttgcctag

SEQ ID NO: 308084 - DNA, 15 bp, Homo sapiens
gcaggtttttgccta

SEQ ID NO: 308085 - DNA, 15 bp, Homo sapiens
tgcaggtttttgcct

SEQ ID NO: 308086 - DNA, 15 bp, Homo sapiens
atgcaggtttttgcc

SEQ ID NO: 308087 - DNA, 15 bp, Homo sapiens
catgcaggtttttgc

SEQ ID NO: 308088 - DNA, 15 bp, Homo sapiens
tcatgcaggtttttg

SEQ ID NO: 308089 - DNA, 15 bp, Homo sapiens
atcatgcaggttttt

SEQ ID NO: 308090 - DNA, 15 bp, Homo sapiens
catcatgcaggtttt

SEQ ID NO: 308091 - DNA, 15 bp, Homo sapiens
acatcatgcaggttt

SEQ ID NO: 308092 - DNA, 15 bp, Homo sapiens
cacatcatgcaggtt

SEQ ID NO: 308093 - DNA, 15 bp, Homo sapiens
gcacatcatgcaggt

SEQ ID NO: 308094 - DNA, 15 bp, Homo sapiens
tgcacatcatgcagg

SEQ ID NO: 308095 - DNA, 15 bp, Homo sapiens
atgcacatcatgcag

SEQ ID NO: 308096 - DNA, 15 bp, Homo sapiens
aatgcacatcatgca

SEQ ID NO: 308097 - DNA, 15 bp, Homo sapiens
gaatgcacatcatgc

SEQ ID NO: 308098 - DNA, 15 bp, Homo sapiens
ggaatgcacatcatg

SEQ ID NO: 308099 - DNA, 15 bp, Homo sapiens
tggaatgcacatcat

SEQ ID NO: 308100 - DNA, 15 bp, Homo sapiens
ctggaatgcacatca

SEQ ID NO: 308101 - DNA, 15 bp, Homo sapiens
cctggaatgcacatc

SEQ ID NO: 308102 - DNA, 15 bp, Homo sapiens
gcctggaatgcacat

SEQ ID NO: 308103 - DNA, 15 bp, Homo sapiens
tgcctggaatgcaca

SEQ ID NO: 308104 - DNA, 15 bp, Homo sapiens
ctgcctggaatgcac

SEQ ID NO: 308105 - DNA, 15 bp, Homo sapiens
tctgcctggaatgca

SEQ ID NO: 308106 - DNA, 15 bp, Homo sapiens
ttctgcctggaatgc

SEQ ID NO: 308107 - DNA, 15 bp, Homo sapiens
gttctgcctggaatg

SEQ ID NO: 308108 - DNA, 15 bp, Homo sapiens
tgttctgcctggaat

SEQ ID NO: 308109 - DNA, 15 bp, Homo sapiens
ttgttctgcctggaa

SEQ ID NO: 308110 - DNA, 15 bp, Homo sapiens
tttgttctgcctgga

SEQ ID NO: 308111 - DNA, 15 bp, Homo sapiens
gtttgttctgcctgg

SEQ ID NO: 308112 - DNA, 15 bp, Homo sapiens
tgtttgttctgcctg

SEQ ID NO: 308113 - DNA, 15 bp, Homo sapiens
ctgtttgttctgcct

SEQ ID NO: 308114 - DNA, 15 bp, Homo sapiens
gctgtttgttctgcc

SEQ ID NO: 308115 - DNA, 15 bp, Homo sapiens
tgctgtttgttctgc

SEQ ID NO: 308116 - DNA, 15 bp, Homo sapiens
ttgctgtttgttctg

SEQ ID NO: 308117 - DNA, 15 bp, Homo sapiens
cttgctgtttgttct

SEQ ID NO: 308118 - DNA, 15 bp, Homo sapiens
acttgctgtttgttc

SEQ ID NO: 308119 - DNA, 15 bp, Homo sapiens
cacttgctgtttgtt

SEQ ID NO: 308120 - DNA, 15 bp, Homo sapiens
gcacttgctgtttgt

SEQ ID NO: 308121 - DNA, 15 bp, Homo sapiens
tgcacttgctgtttg

SEQ ID NO: 308122 - DNA, 15 bp, Homo sapiens
ctgcacttgctgttt

SEQ ID NO: 308123 - DNA, 15 bp, Homo sapiens
actgcacttgctgtt

SEQ ID NO: 308124 - DNA, 15 bp, Homo sapiens
cactgcacttgctgt

SEQ ID NO: 308125 - DNA, 15 bp, Homo sapiens
ccactgcacttgctg

SEQ ID NO: 308126 - DNA, 15 bp, Homo sapiens
gccactgcacttgct

SEQ ID NO: 308127 - DNA, 15 bp, Homo sapiens
agccactgcacttgc

SEQ ID NO: 308128 - DNA, 15 bp, Homo sapiens
cagccactgcacttg

SEQ ID NO: 308129 - DNA, 15 bp, Homo sapiens
acagccactgcactt

SEQ ID NO: 308130 - DNA, 15 bp, Homo sapiens
tacagccactgcact

SEQ ID NO: 308131 - DNA, 15 bp, Homo sapiens
ctacagccactgcac

SEQ ID NO: 308132 - DNA, 15 bp, Homo sapiens
cctacagccactgca

SEQ ID NO: 308133 - DNA, 15 bp, Homo sapiens
ccctacagccactgc

SEQ ID NO: 308134 - DNA, 15 bp, Homo sapiens
gccctacagccactg

SEQ ID NO: 308135 - DNA, 15 bp, Homo sapiens
tgccctacagccact

SEQ ID NO: 308136 - DNA, 15 bp, Homo sapiens
ctgccctacagccac

SEQ ID NO: 308137 - DNA, 15 bp, Homo sapiens
tctgccctacagcca

SEQ ID NO: 308138 - DNA, 15 bp, Homo sapiens
atctgccctacagcc

SEQ ID NO: 308139 - DNA, 15 bp, Homo sapiens
gatctgccctacagc

SEQ ID NO: 308140 - DNA, 15 bp, Homo sapiens
tgatctgccctacag

SEQ ID NO: 308141 - DNA, 15 bp, Homo sapiens
ttgatctgccctaca

SEQ ID NO: 308142 - DNA, 15 bp, Homo sapiens
tttgatctgccctac

SEQ ID NO: 308143 - DNA, 15 bp, Homo sapiens
gtttgatctgcccta

SEQ ID NO: 308144 - DNA, 15 bp, Homo sapiens
agtttgatctgccct

SEQ ID NO: 308145 - DNA, 15 bp, Homo sapiens
aagtttgatctgccc

SEQ ID NO: 308146 - DNA, 15 bp, Homo sapiens
taagtttgatctgcc

SEQ ID NO: 308147 - DNA, 15 bp, Homo sapiens
ctaagtttgatctgc

SEQ ID NO: 308148 - DNA, 15 bp, Homo sapiens
gctaagtttgatctg

SEQ ID NO: 308149 - DNA, 15 bp, Homo sapiens
agctaagtttgatct

SEQ ID NO: 308150 - DNA, 15 bp, Homo sapiens
cagctaagtttgatc

SEQ ID NO: 308151 - DNA, 15 bp, Homo sapiens
ccagctaagtttgat

SEQ ID NO: 308152 - DNA, 15 bp, Homo sapiens
tccagctaagtttga

SEQ ID NO: 308153 - DNA, 15 bp, Homo sapiens
atccagctaagtttg

SEQ ID NO: 308154 - DNA, 15 bp, Homo sapiens
aatccagctaagttt

SEQ ID NO: 308155 - DNA, 15 bp, Homo sapiens
aaatccagctaagtt

SEQ ID NO: 308156 - DNA, 15 bp, Homo sapiens
taaatccagctaagt

SEQ ID NO: 308157 - DNA, 15 bp, Homo sapiens
ctaaatccagctaag

SEQ ID NO: 308158 - DNA, 15 bp, Homo sapiens
cctaaatccagctaa

SEQ ID NO: 308159 - DNA, 15 bp, Homo sapiens
tcctaaatccagcta

SEQ ID NO: 308160 - DNA, 15 bp, Homo sapiens
ttcctaaatccagct

SEQ ID NO: 308161 - DNA, 15 bp, Homo sapiens
gttcctaaatccagc

SEQ ID NO: 308162 - DNA, 15 bp, Homo sapiens
tgttcctaaatccag

SEQ ID NO: 308163 - DNA, 15 bp, Homo sapiens
ctgttcctaaatcca

SEQ ID NO: 308164 - DNA, 15 bp, Homo sapiens
tctgttcctaaatcc

SEQ ID NO: 308165 - DNA, 15 bp, Homo sapiens
ttctgttcctaaatc

SEQ ID NO: 308166 - DNA, 15 bp, Homo sapiens
tttctgttcctaaat

SEQ ID NO: 308167 - DNA, 15 bp, Homo sapiens
ctttctgttcctaaa

SEQ ID NO: 308168 - DNA, 15 bp, Homo sapiens
tctttctgttcctaa

SEQ ID NO: 308169 - DNA, 15 bp, Homo sapiens
ttctttctgttccta

SEQ ID NO: 308170 - DNA, 15 bp, Homo sapiens
tttctttctgttcct

SEQ ID NO: 308171 - DNA, 15 bp, Homo sapiens
ctttctttctgttcc

SEQ ID NO: 308172 - DNA, 15 bp, Homo sapiens
tctttctttctgttc

SEQ ID NO: 308173 - DNA, 15 bp, Homo sapiens
ttctttctttctgtt

SEQ ID NO: 308174 - DNA, 15 bp, Homo sapiens
tttctttctttctgt

SEQ ID NO: 308175 - DNA, 15 bp, Homo sapiens
atttctttctttctg

SEQ ID NO: 308176 - DNA, 15 bp, Homo sapiens
gatttctttctttct

SEQ ID NO: 308177 - DNA, 15 bp, Homo sapiens
ggatttctttctttc

SEQ ID NO: 308178 - DNA, 15 bp, Homo sapiens
aggatttctttcttt

SEQ ID NO: 308179 - DNA, 15 bp, Homo sapiens
taggatttctttctt

SEQ ID NO: 308180 - DNA, 15 bp, Homo sapiens
ctaggatttctttct

SEQ ID NO: 308181 - DNA, 15 bp, Homo sapiens
actaggatttctttc

SEQ ID NO: 308182 - DNA, 15 bp, Homo sapiens
cactaggatttcttt

SEQ ID NO: 308183 - DNA, 15 bp, Homo sapiens
acactaggatttctt

SEQ ID NO: 308184 - DNA, 15 bp, Homo sapiens
cacactaggatttct

SEQ ID NO: 308185 - DNA, 15 bp, Homo sapiens
ccacactaggatttc

SEQ ID NO: 308186 - DNA, 15 bp, Homo sapiens
gccacactaggattt

SEQ ID NO: 308187 - DNA, 15 bp, Homo sapiens
agccacactaggatt

SEQ ID NO: 308188 - DNA, 15 bp, Homo sapiens
cagccacactaggat

SEQ ID NO: 308189 - DNA, 15 bp, Homo sapiens
ccagccacactagga

SEQ ID NO: 308190 - DNA, 15 bp, Homo sapiens
cccagccacactagg

SEQ ID NO: 308191 - DNA, 15 bp, Homo sapiens
ccccagccacactag

SEQ ID NO: 308192 - DNA, 15 bp, Homo sapiens
accccagccacacta

SEQ ID NO: 308193 - DNA, 15 bp, Homo sapiens
taccccagccacact

SEQ ID NO: 308194 - DNA, 15 bp, Homo sapiens
ataccccagccacac

SEQ ID NO: 308195 - DNA, 15 bp, Homo sapiens
aataccccagccaca

SEQ ID NO: 308196 - DNA, 15 bp, Homo sapiens
caataccccagccac

SEQ ID NO: 308197 - DNA, 15 bp, Homo sapiens
ccaataccccagcca

SEQ ID NO: 308198 - DNA, 15 bp, Homo sapiens
tccaataccccagcc

SEQ ID NO: 308199 - DNA, 15 bp, Homo sapiens
ttccaataccccagc

SEQ ID NO: 308200 - DNA, 15 bp, Homo sapiens
cttccaataccccag

SEQ ID NO: 308201 - DNA, 15 bp, Homo sapiens
tcttccaatacccca

SEQ ID NO: 308202 - DNA, 15 bp, Homo sapiens
ctcttccaatacccc

SEQ ID NO: 308203 - DNA, 15 bp, Homo sapiens
cctcttccaataccc

SEQ ID NO: 308204 - DNA, 15 bp, Homo sapiens
tcctcttccaatacc

SEQ ID NO: 308205 - DNA, 15 bp, Homo sapiens
ctcctcttccaatac

SEQ ID NO: 308206 - DNA, 15 bp, Homo sapiens
tctcctcttccaata

SEQ ID NO: 308207 - DNA, 15 bp, Homo sapiens
ttctcctcttccaat

SEQ ID NO: 308208 - DNA, 15 bp, Homo sapiens
attctcctcttccaa

SEQ ID NO: 308209 - DNA, 15 bp, Homo sapiens
cattctcctcttcca

SEQ ID NO: 308210 - DNA, 15 bp, Homo sapiens
ccattctcctcttcc

SEQ ID NO: 308211 - DNA, 15 bp, Homo sapiens
accattctcctcttc

SEQ ID NO: 308212 - DNA, 15 bp, Homo sapiens
caccattctcctctt

SEQ ID NO: 308213 - DNA, 15 bp, Homo sapiens
gcaccattctcctct

SEQ ID NO: 308214 - DNA, 15 bp, Homo sapiens
tgcaccattctcctc

SEQ ID NO: 308215 - DNA, 15 bp, Homo sapiens
ttgcaccattctcct

SEQ ID NO: 308216 - DNA, 15 bp, Homo sapiens
cttgcaccattctcc

SEQ ID NO: 308217 - DNA, 15 bp, Homo sapiens
tcttgcaccattctc

SEQ ID NO: 308218 - DNA, 15 bp, Homo sapiens
atcttgcaccattct

SEQ ID NO: 308219 - DNA, 15 bp, Homo sapiens
catcttgcaccattc

SEQ ID NO: 308220 - DNA, 15 bp, Homo sapiens
tcatcttgcaccatt

SEQ ID NO: 308221 - DNA, 15 bp, Homo sapiens
ctcatcttgcaccat

SEQ ID NO: 308222 - DNA, 15 bp, Homo sapiens
tctcatcttgcacca

SEQ ID NO: 308223 - DNA, 15 bp, Homo sapiens
gtctcatcttgcacc

SEQ ID NO: 308224 - DNA, 15 bp, Homo sapiens
agtctcatcttgcac

SEQ ID NO: 308225 - DNA, 15 bp, Homo sapiens
cagtctcatcttgca

SEQ ID NO: 308226 - DNA, 15 bp, Homo sapiens
tcagtctcatcttgc

SEQ ID NO: 308227 - DNA, 15 bp, Homo sapiens
ttcagtctcatcttg

SEQ ID NO: 308228 - DNA, 15 bp, Homo sapiens
cttcagtctcatctt

SEQ ID NO: 308229 - DNA, 15 bp, Homo sapiens
tcttcagtctcatct

SEQ ID NO: 308230 - DNA, 15 bp, Homo sapiens
ctcttcagtctcatc

SEQ ID NO: 308231 - DNA, 15 bp, Homo sapiens
gctcttcagtctcat

SEQ ID NO: 308232 - DNA, 15 bp, Homo sapiens
agctcttcagtctca

SEQ ID NO: 308233 - DNA, 15 bp, Homo sapiens
tagctcttcagtctc

SEQ ID NO: 308234 - DNA, 15 bp, Homo sapiens
ttagctcttcagtct

SEQ ID NO: 308235 - DNA, 15 bp, Homo sapiens
cttagctcttcagtc

SEQ ID NO: 308236 - DNA, 15 bp, Homo sapiens
gcttagctcttcagt

SEQ ID NO: 308237 - DNA, 15 bp, Homo sapiens
agcttagctcttcag

SEQ ID NO: 308238 - DNA, 15 bp, Homo sapiens
cagcttagctcttca

SEQ ID NO: 308239 - DNA, 15 bp, Homo sapiens
ccagcttagctcttc

SEQ ID NO: 308240 - DNA, 15 bp, Homo sapiens
cccagcttagctctt

SEQ ID NO: 308241 - DNA, 15 bp, Homo sapiens
ccccagcttagctct

SEQ ID NO: 308242 - DNA, 15 bp, Homo sapiens
accccagcttagctc

SEQ ID NO: 308243 - DNA, 15 bp, Homo sapiens
taccccagcttagct

SEQ ID NO: 308244 - DNA, 15 bp, Homo sapiens
ctaccccagcttagc

SEQ ID NO: 308245 - DNA, 15 bp, Homo sapiens
tctaccccagcttag

SEQ ID NO: 308246 - DNA, 15 bp, Homo sapiens
atctaccccagctta

SEQ ID NO: 308247 - DNA, 15 bp, Homo sapiens
gatctaccccagctt

SEQ ID NO: 308248 - DNA, 15 bp, Homo sapiens
agatctaccccagct

SEQ ID NO: 308249 - DNA, 15 bp, Homo sapiens
aagatctaccccagc

SEQ ID NO: 308250 - DNA, 15 bp, Homo sapiens
caagatctaccccag

SEQ ID NO: 308251 - DNA, 15 bp, Homo sapiens
acaagatctacccca

SEQ ID NO: 308252 - DNA, 15 bp, Homo sapiens
tacaagatctacccc

SEQ ID NO: 308253 - DNA, 15 bp, Homo sapiens
ctacaagatctaccc

SEQ ID NO: 308254 - DNA, 15 bp, Homo sapiens
tctacaagatctacc

SEQ ID NO: 308255 - DNA, 15 bp, Homo sapiens
ctctacaagatctac

SEQ ID NO: 308256 - DNA, 15 bp, Homo sapiens
tctctacaagatcta

SEQ ID NO: 308257 - DNA, 15 bp, Homo sapiens
atctctacaagatct

SEQ ID NO: 308258 - DNA, 15 bp, Homo sapiens
gatctctacaagatc

SEQ ID NO: 308259 - DNA, 15 bp, Homo sapiens
agatctctacaagat

SEQ ID NO: 308260 - DNA, 15 bp, Homo sapiens
gagatctctacaaga

SEQ ID NO: 308261 - DNA, 15 bp, Homo sapiens
ggagatctctacaag

SEQ ID NO: 308262 - DNA, 15 bp, Homo sapiens
tggagatctctacaa

SEQ ID NO: 308263 - DNA, 15 bp, Homo sapiens
gtggagatctctaca

SEQ ID NO: 308264 - DNA, 15 bp, Homo sapiens
agtggagatctctac

SEQ ID NO: 308265 - DNA, 15 bp, Homo sapiens
gagtggagatctcta

SEQ ID NO: 308266 - DNA, 15 bp, Homo sapiens
agagtggagatctct

SEQ ID NO: 308267 - DNA, 15 bp, Homo sapiens
gagagtggagatctc

SEQ ID NO: 308268 - DNA, 15 bp, Homo sapiens
agagagtggagatct

SEQ ID NO: 308269 - DNA, 15 bp, Homo sapiens
tagagagtggagatc

SEQ ID NO: 308270 - DNA, 15 bp, Homo sapiens
ctagagagtggagat

SEQ ID NO: 308271 - DNA, 15 bp, Homo sapiens
gctagagagtggaga

SEQ ID NO: 308272 - DNA, 15 bp, Homo sapiens
agctagagagtggag

SEQ ID NO: 308273 - DNA, 15 bp, Homo sapiens
cagctagagagtgga

SEQ ID NO: 308274 - DNA, 15 bp, Homo sapiens
gcagctagagagtgg

SEQ ID NO: 308275 - DNA, 15 bp, Homo sapiens
agcagctagagagtg

SEQ ID NO: 308276 - DNA, 15 bp, Homo sapiens
tagcagctagagagt

SEQ ID NO: 308277 - DNA, 15 bp, Homo sapiens
atagcagctagagag

SEQ ID NO: 308278 - DNA, 15 bp, Homo sapiens
gatagcagctagaga

SEQ ID NO: 308279 - DNA, 15 bp, Homo sapiens
agatagcagctagag

SEQ ID NO: 308280 - DNA, 15 bp, Homo sapiens
cagatagcagctaga

SEQ ID NO: 308281 - DNA, 15 bp, Homo sapiens
tcagatagcagctag

SEQ ID NO: 308282 - DNA, 15 bp, Homo sapiens
ttcagatagcagcta

SEQ ID NO: 308283 - DNA, 15 bp, Homo sapiens
cttcagatagcagct

SEQ ID NO: 308284 - DNA, 15 bp, Homo sapiens
acttcagatagcagc

SEQ ID NO: 308285 - DNA, 15 bp, Homo sapiens
tacttcagatagcag

SEQ ID NO: 308286 - DNA, 15 bp, Homo sapiens
gtacttcagatagca

SEQ ID NO: 308287 - DNA, 15 bp, Homo sapiens
tgtacttcagatagc

SEQ ID NO: 308288 - DNA, 15 bp, Homo sapiens
ctgtacttcagatag

SEQ ID NO: 308289 - DNA, 15 bp, Homo sapiens
cctgtacttcagata

SEQ ID NO: 308290 - DNA, 15 bp, Homo sapiens
acctgtacttcagat

SEQ ID NO: 308291 - DNA, 15 bp, Homo sapiens
cacctgtacttcaga

SEQ ID NO: 308292 - DNA, 15 bp, Homo sapiens
ccacctgtacttcag

SEQ ID NO: 308293 - DNA, 15 bp, Homo sapiens
cccacctgtacttca

SEQ ID NO: 308294 - DNA, 15 bp, Homo sapiens
acccacctgtacttc

SEQ ID NO: 308295 - DNA, 15 bp, Homo sapiens
aacccacctgtactt

SEQ ID NO: 308296 - DNA, 15 bp, Homo sapiens
aaacccacctgtact

SEQ ID NO: 308297 - DNA, 15 bp, Homo sapiens
caaacccacctgtac

SEQ ID NO: 308298 - DNA, 15 bp, Homo sapiens
ccaaacccacctgta

SEQ ID NO: 308299 - DNA, 15 bp, Homo sapiens
tccaaacccacctgt

SEQ ID NO: 308300 - DNA, 15 bp, Homo sapiens
ctccaaacccacctg

SEQ ID NO: 308301 - DNA, 15 bp, Homo sapiens
cctccaaacccacct

SEQ ID NO: 308302 - DNA, 15 bp, Homo sapiens
tcctccaaacccacc

SEQ ID NO: 308303 - DNA, 15 bp, Homo sapiens
ttcctccaaacccac

SEQ ID NO: 308304 - DNA, 15 bp, Homo sapiens
tttcctccaaaccca

SEQ ID NO: 308305 - DNA, 15 bp, Homo sapiens
ctttcctccaaaccc

SEQ ID NO: 308306 - DNA, 15 bp, Homo sapiens
cctttcctccaaacc

SEQ ID NO: 308307 - DNA, 15 bp, Homo sapiens
ccctttcctccaaac

SEQ ID NO: 308308 - DNA, 15 bp, Homo sapiens
tccctttcctccaaa

SEQ ID NO: 308309 - DNA, 15 bp, Homo sapiens
gtccctttcctccaa

SEQ ID NO: 308310 - DNA, 15 bp, Homo sapiens
tgtccctttcctcca

SEQ ID NO: 308311 - DNA, 15 bp, Homo sapiens
ctgtccctttcctcc

SEQ ID NO: 308312 - DNA, 15 bp, Homo sapiens
cctgtccctttcctc

SEQ ID NO: 308313 - DNA, 15 bp, Homo sapiens
ccctgtccctttcct

SEQ ID NO: 308314 - DNA, 15 bp, Homo sapiens
gccctgtccctttcc

SEQ ID NO: 308315 - DNA, 15 bp, Homo sapiens
tgccctgtccctttc

SEQ ID NO: 308316 - DNA, 15 bp, Homo sapiens
ttgccctgtcccttt

SEQ ID NO: 308317 - DNA, 15 bp, Homo sapiens
cttgccctgtccctt

SEQ ID NO: 308318 - DNA, 15 bp, Homo sapiens
ccttgccctgtccct

SEQ ID NO: 308319 - DNA, 15 bp, Homo sapiens
gccttgccctgtccc

SEQ ID NO: 308320 - DNA, 15 bp, Homo sapiens
tgccttgccctgtcc

SEQ ID NO: 308321 - DNA, 15 bp, Homo sapiens
ttgccttgccctgtc

SEQ ID NO: 308322 - DNA, 15 bp, Homo sapiens
tttgccttgccctgt

SEQ ID NO: 308323 - DNA, 15 bp, Homo sapiens
ttttgccttgccctg

SEQ ID NO: 308324 - DNA, 15 bp, Homo sapiens
tttttgccttgccct

SEQ ID NO: 308325 - DNA, 15 bp, Homo sapiens
ctttttgccttgccc

SEQ ID NO: 308326 - DNA, 15 bp, Homo sapiens
gctttttgccttgcc

SEQ ID NO: 308327 - DNA, 15 bp, Homo sapiens
cgctttttgccttgc

SEQ ID NO: 308328 - DNA, 15 bp, Homo sapiens
tcgctttttgccttg

SEQ ID NO: 308329 - DNA, 15 bp, Homo sapiens
ctcgctttttgcctt

SEQ ID NO: 308330 - DNA, 15 bp, Homo sapiens
cctcgctttttgcct

SEQ ID NO: 308331 - DNA, 15 bp, Homo sapiens
tcctcgctttttgcc

SEQ ID NO: 308332 - DNA, 15 bp, Homo sapiens
ttcctcgctttttgc

SEQ ID NO: 308333 - DNA, 15 bp, Homo sapiens
tttcctcgctttttg

SEQ ID NO: 308334 - DNA, 15 bp, Homo sapiens
gtttcctcgcttttt

SEQ ID NO: 308335 - DNA, 15 bp, Homo sapiens
ggtttcctcgctttt

SEQ ID NO: 308336 - DNA, 15 bp, Homo sapiens
tggtttcctcgcttt

SEQ ID NO: 308337 - DNA, 15 bp, Homo sapiens
ttggtttcctcgctt

SEQ ID NO: 308338 - DNA, 15 bp, Homo sapiens
attggtttcctcgct

SEQ ID NO: 308339 - DNA, 15 bp, Homo sapiens
aattggtttcctcgc

SEQ ID NO: 308340 - DNA, 15 bp, Homo sapiens
aaattggtttcctcg

SEQ ID NO: 308341 - DNA, 15 bp, Homo sapiens
caaattggtttcctc

SEQ ID NO: 308342 - DNA, 15 bp, Homo sapiens
ccaaattggtttcct

SEQ ID NO: 308343 - DNA, 15 bp, Homo sapiens
tccaaattggtttcc

SEQ ID NO: 308344 - DNA, 15 bp, Homo sapiens
ctccaaattggtttc

SEQ ID NO: 308345 - DNA, 15 bp, Homo sapiens
tctccaaattggttt

SEQ ID NO: 308346 - DNA, 15 bp, Homo sapiens
gtctccaaattggtt

SEQ ID NO: 308347 - DNA, 15 bp, Homo sapiens
agtctccaaattggt

SEQ ID NO: 308348 - DNA, 15 bp, Homo sapiens
tagtctccaaattgg

SEQ ID NO: 308349 - DNA, 15 bp, Homo sapiens
atagtctccaaattg

SEQ ID NO: 308350 - DNA, 15 bp, Homo sapiens
aatagtctccaaatt

SEQ ID NO: 308351 - DNA, 15 bp, Homo sapiens
aaatagtctccaaat

SEQ ID NO: 308352 - DNA, 15 bp, Homo sapiens
gaaatagtctccaaa

SEQ ID NO: 308353 - DNA, 15 bp, Homo sapiens
agaaatagtctccaa

SEQ ID NO: 308354 - DNA, 15 bp, Homo sapiens
cagaaatagtctcca

SEQ ID NO: 308355 - DNA, 15 bp, Homo sapiens
acagaaatagtctcc

SEQ ID NO: 308356 - DNA, 15 bp, Homo sapiens
tacagaaatagtctc

SEQ ID NO: 308357 - DNA, 15 bp, Homo sapiens
ctacagaaatagtct

SEQ ID NO: 308358 - DNA, 15 bp, Homo sapiens
actacagaaatagtc

SEQ ID NO: 308359 - DNA, 15 bp, Homo sapiens
aactacagaaatagt

SEQ ID NO: 308360 - DNA, 15 bp, Homo sapiens
gaactacagaaatag

SEQ ID NO: 308361 - DNA, 15 bp, Homo sapiens
tgaactacagaaata

SEQ ID NO: 308362 - DNA, 15 bp, Homo sapiens
ctgaactacagaaat

SEQ ID NO: 308363 - DNA, 15 bp, Homo sapiens
tctgaactacagaaa

SEQ ID NO: 308364 - DNA, 15 bp, Homo sapiens
atctgaactacagaa

SEQ ID NO: 308365 - DNA, 15 bp, Homo sapiens
catctgaactacaga

SEQ ID NO: 308366 - DNA, 15 bp, Homo sapiens
tcatctgaactacag

SEQ ID NO: 308367 - DNA, 15 bp, Homo sapiens
ctcatctgaactaca

SEQ ID NO: 308368 - DNA, 15 bp, Homo sapiens
cctcatctgaactac

SEQ ID NO: 308369 - DNA, 15 bp, Homo sapiens
ccctcatctgaacta

SEQ ID NO: 308370 - DNA, 15 bp, Homo sapiens
tccctcatctgaact

SEQ ID NO: 308371 - DNA, 15 bp, Homo sapiens
atccctcatctgaac

SEQ ID NO: 308372 - DNA, 15 bp, Homo sapiens
catccctcatctgaa

SEQ ID NO: 308373 - DNA, 15 bp, Homo sapiens
acatccctcatctga

SEQ ID NO: 308374 - DNA, 15 bp, Homo sapiens
tacatccctcatctg

SEQ ID NO: 308375 - DNA, 15 bp, Homo sapiens
ctacatccctcatct

SEQ ID NO: 308376 - DNA, 15 bp, Homo sapiens
cctacatccctcatc

SEQ ID NO: 308377 - DNA, 15 bp, Homo sapiens
acctacatccctcat

SEQ ID NO: 308378 - DNA, 15 bp, Homo sapiens
cacctacatccctca

SEQ ID NO: 308379 - DNA, 15 bp, Homo sapiens
tcacctacatccctc

SEQ ID NO: 308380 - DNA, 15 bp, Homo sapiens
gtcacctacatccct

SEQ ID NO: 308381 - DNA, 15 bp, Homo sapiens
agtcacctacatccc

SEQ ID NO: 308382 - DNA, 15 bp, Homo sapiens
aagtcacctacatcc

SEQ ID NO: 308383 - DNA, 15 bp, Homo sapiens
caagtcacctacatc

SEQ ID NO: 308384 - DNA, 15 bp, Homo sapiens
ccaagtcacctacat

SEQ ID NO: 308385 - DNA, 15 bp, Homo sapiens
accaagtcacctaca

SEQ ID NO: 308386 - DNA, 15 bp, Homo sapiens
gaccaagtcacctac

SEQ ID NO: 308387 - DNA, 15 bp, Homo sapiens
agaccaagtcaccta

SEQ ID NO: 308388 - DNA, 15 bp, Homo sapiens
tagaccaagtcacct

SEQ ID NO: 308389 - DNA, 15 bp, Homo sapiens
ttagaccaagtcacc

SEQ ID NO: 308390 - DNA, 15 bp, Homo sapiens
cttagaccaagtcac

SEQ ID NO: 308391 - DNA, 15 bp, Homo sapiens
ccttagaccaagtca

SEQ ID NO: 308392 - DNA, 15 bp, Homo sapiens
accttagaccaagtc

SEQ ID NO: 308393 - DNA, 15 bp, Homo sapiens
taccttagaccaagt

SEQ ID NO: 308394 - DNA, 15 bp, Homo sapiens
ataccttagaccaag

SEQ ID NO: 308395 - DNA, 15 bp, Homo sapiens
cataccttagaccaa

SEQ ID NO: 308396 - DNA, 15 bp, Homo sapiens
ccataccttagacca

SEQ ID NO: 308397 - DNA, 15 bp, Homo sapiens
accataccttagacc

SEQ ID NO: 308398 - DNA, 15 bp, Homo sapiens
taccataccttagac

SEQ ID NO: 308399 - DNA, 15 bp, Homo sapiens
ataccataccttaga

SEQ ID NO: 308400 - DNA, 15 bp, Homo sapiens
aataccataccttag

SEQ ID NO: 308401 - DNA, 15 bp, Homo sapiens
taataccatacctta

SEQ ID NO: 308402 - DNA, 15 bp, Homo sapiens
ctaataccatacctt

SEQ ID NO: 308403 - DNA, 15 bp, Homo sapiens
tctaataccatacct

SEQ ID NO: 308404 - DNA, 15 bp, Homo sapiens
ttctaataccatacc

SEQ ID NO: 308405 - DNA, 15 bp, Homo sapiens
tttctaataccatac

SEQ ID NO: 308406 - DNA, 15 bp, Homo sapiens
atttctaataccata

SEQ ID NO: 308407 - DNA, 15 bp, Homo sapiens
tatttctaataccat

SEQ ID NO: 308408 - DNA, 15 bp, Homo sapiens
ctatttctaatacca

SEQ ID NO: 308409 - DNA, 15 bp, Homo sapiens
tctatttctaatacc

SEQ ID NO: 308410 - DNA, 15 bp, Homo sapiens
ttctatttctaatac

SEQ ID NO: 308411 - DNA, 15 bp, Homo sapiens
tttctatttctaata

SEQ ID NO: 308412 - DNA, 15 bp, Homo sapiens
atttctatttctaat

SEQ ID NO: 308413 - DNA, 15 bp, Homo sapiens
catttctatttctaa

SEQ ID NO: 308414 - DNA, 15 bp, Homo sapiens
ccatttctatttcta

SEQ ID NO: 308415 - DNA, 15 bp, Homo sapiens
tccatttctatttct

SEQ ID NO: 308416 - DNA, 15 bp, Homo sapiens
ctccatttctatttc

SEQ ID NO: 308417 - DNA, 15 bp, Homo sapiens
tctccatttctattt

SEQ ID NO: 308418 - DNA, 15 bp, Homo sapiens
ctctccatttctatt

SEQ ID NO: 308419 - DNA, 15 bp, Homo sapiens
tctctccatttctat

SEQ ID NO: 308420 - DNA, 15 bp, Homo sapiens
atctctccatttcta

SEQ ID NO: 308421 - DNA, 15 bp, Homo sapiens
gatctctccatttct

SEQ ID NO: 308422 - DNA, 15 bp, Homo sapiens
agatctctccatttc

SEQ ID NO: 308423 - DNA, 15 bp, Homo sapiens
cagatctctccattt

SEQ ID NO: 308424 - DNA, 15 bp, Homo sapiens
ccagatctctccatt

SEQ ID NO: 308425 - DNA, 15 bp, Homo sapiens
cccagatctctccat

SEQ ID NO: 308426 - DNA, 15 bp, Homo sapiens
ccccagatctctcca

SEQ ID NO: 308427 - DNA, 15 bp, Homo sapiens
accccagatctctcc

SEQ ID NO: 308428 - DNA, 15 bp, Homo sapiens
caccccagatctctc

SEQ ID NO: 308429 - DNA, 15 bp, Homo sapiens
acaccccagatctct

SEQ ID NO: 308430 - DNA, 15 bp, Homo sapiens
tacaccccagatctc

SEQ ID NO: 308431 - DNA, 15 bp, Homo sapiens
atacaccccagatct

SEQ ID NO: 308432 - DNA, 15 bp, Homo sapiens
aatacaccccagatc

SEQ ID NO: 308433 - DNA, 15 bp, Homo sapiens
aaatacaccccagat

SEQ ID NO: 308434 - DNA, 15 bp, Homo sapiens
taaatacaccccaga

SEQ ID NO: 308435 - DNA, 15 bp, Homo sapiens
ctaaatacaccccag

SEQ ID NO: 308436 - DNA, 15 bp, Homo sapiens
tctaaatacacccca

SEQ ID NO: 308437 - DNA, 15 bp, Homo sapiens
ctctaaatacacccc

SEQ ID NO: 308438 - DNA, 15 bp, Homo sapiens
tctctaaatacaccc

SEQ ID NO: 308439 - DNA, 15 bp, Homo sapiens
atctctaaatacacc

SEQ ID NO: 308440 - DNA, 15 bp, Homo sapiens
tatctctaaatacac

SEQ ID NO: 308441 - DNA, 15 bp, Homo sapiens
ttatctctaaataca

SEQ ID NO: 308442 - DNA, 15 bp, Homo sapiens
tttatctctaaatac

SEQ ID NO: 308443 - DNA, 15 bp, Homo sapiens
atttatctctaaata

SEQ ID NO: 308444 - DNA, 15 bp, Homo sapiens
aatttatctctaaat

SEQ ID NO: 308445 - DNA, 15 bp, Homo sapiens
taatttatctctaaa

SEQ ID NO: 308446 - DNA, 15 bp, Homo sapiens
ttaatttatctctaa

SEQ ID NO: 308447 - DNA, 15 bp, Homo sapiens
attaatttatctcta

SEQ ID NO: 308448 - DNA, 15 bp, Homo sapiens
tattaatttatctct

SEQ ID NO: 308449 - DNA, 15 bp, Homo sapiens
ctattaatttatctc

SEQ ID NO: 308450 - DNA, 15 bp, Homo sapiens
cctattaatttatct

SEQ ID NO: 308451 - DNA, 15 bp, Homo sapiens
acctattaatttatc

SEQ ID NO: 308452 - DNA, 15 bp, Homo sapiens
aacctattaatttat

SEQ ID NO: 308453 - DNA, 15 bp, Homo sapiens
aaacctattaattta

SEQ ID NO: 308454 - DNA, 15 bp, Homo sapiens
aaaacctattaattt

SEQ ID NO: 308455 - DNA, 15 bp, Homo sapiens
taaaacctattaatt

SEQ ID NO: 308456 - DNA, 15 bp, Homo sapiens
gtaaaacctattaat

SEQ ID NO: 308457 - DNA, 15 bp, Homo sapiens
tgtaaaacctattaa

SEQ ID NO: 308458 - DNA, 15 bp, Homo sapiens
atgtaaaacctatta

SEQ ID NO: 308459 - DNA, 15 bp, Homo sapiens
aatgtaaaacctatt

SEQ ID NO: 308460 - DNA, 15 bp, Homo sapiens
caatgtaaaacctat

SEQ ID NO: 308461 - DNA, 15 bp, Homo sapiens
ccaatgtaaaaccta

SEQ ID NO: 308462 - DNA, 15 bp, Homo sapiens
accaatgtaaaacct

SEQ ID NO: 308463 - DNA, 15 bp, Homo sapiens
aaccaatgtaaaacc

SEQ ID NO: 308464 - DNA, 15 bp, Homo sapiens
aaaccaatgtaaaac

SEQ ID NO: 308465 - DNA, 15 bp, Homo sapiens
aaaaccaatgtaaaa

SEQ ID NO: 308466 - DNA, 15 bp, Homo sapiens
taaaaccaatgtaaa

SEQ ID NO: 308467 - DNA, 15 bp, Homo sapiens
ataaaaccaatgtaa

SEQ ID NO: 308468 - DNA, 15 bp, Homo sapiens
cataaaaccaatgta

SEQ ID NO: 308469 - DNA, 15 bp, Homo sapiens
acataaaaccaatgt

SEQ ID NO: 308470 - DNA, 15 bp, Homo sapiens
aacataaaaccaatg

SEQ ID NO: 308471 - DNA, 15 bp, Homo sapiens
caacataaaaccaat

SEQ ID NO: 308472 - DNA, 15 bp, Homo sapiens
ccaacataaaaccaa

SEQ ID NO: 308473 - DNA, 15 bp, Homo sapiens
tccaacataaaacca

SEQ ID NO: 308474 - DNA, 15 bp, Homo sapiens
atccaacataaaacc

SEQ ID NO: 308475 - DNA, 15 bp, Homo sapiens
aatccaacataaaac

SEQ ID NO: 308476 - DNA, 15 bp, Homo sapiens
aaatccaacataaaa

SEQ ID NO: 308477 - DNA, 15 bp, Homo sapiens
gaaatccaacataaa

SEQ ID NO: 308478 - DNA, 15 bp, Homo sapiens
tgaaatccaacataa

SEQ ID NO: 308479 - DNA, 15 bp, Homo sapiens
ctgaaatccaacata

SEQ ID NO: 308480 - DNA, 15 bp, Homo sapiens
cctgaaatccaacat

SEQ ID NO: 308481 - DNA, 15 bp, Homo sapiens
tcctgaaatccaaca

SEQ ID NO: 308482 - DNA, 15 bp, Homo sapiens
ttcctgaaatccaac

SEQ ID NO: 308483 - DNA, 15 bp, Homo sapiens
attcctgaaatccaa

SEQ ID NO: 308484 - DNA, 15 bp, Homo sapiens
aattcctgaaatcca

SEQ ID NO: 308485 - DNA, 15 bp, Homo sapiens
aaattcctgaaatcc

SEQ ID NO: 308486 - DNA, 15 bp, Homo sapiens
caaattcctgaaatc

SEQ ID NO: 308487 - DNA, 15 bp, Homo sapiens
ccaaattcctgaaat

SEQ ID NO: 308488 - DNA, 15 bp, Homo sapiens
tccaaattcctgaaa

SEQ ID NO: 308489 - DNA, 15 bp, Homo sapiens
ttccaaattcctgaa

SEQ ID NO: 308490 - DNA, 15 bp, Homo sapiens
tttccaaattcctga

SEQ ID NO: 308491 - DNA, 15 bp, Homo sapiens
ttttccaaattcctg

SEQ ID NO: 308492 - DNA, 15 bp, Homo sapiens
attttccaaattcct

SEQ ID NO: 308493 - DNA, 15 bp, Homo sapiens
cattttccaaattcc

SEQ ID NO: 308494 - DNA, 15 bp, Homo sapiens
ccattttccaaattc

SEQ ID NO: 308495 - DNA, 15 bp, Homo sapiens
tccattttccaaatt

SEQ ID NO: 308496 - DNA, 15 bp, Homo sapiens
ctccattttccaaat

SEQ ID NO: 308497 - DNA, 15 bp, Homo sapiens
tctccattttccaaa

SEQ ID NO: 308498 - DNA, 15 bp, Homo sapiens
ttctccattttccaa

SEQ ID NO: 308499 - DNA, 15 bp, Homo sapiens
tttctccattttcca

SEQ ID NO: 308500 - DNA, 15 bp, Homo sapiens
atttctccattttcc

SEQ ID NO: 308501 - DNA, 15 bp, Homo sapiens
aatttctccattttc

SEQ ID NO: 308502 - DNA, 15 bp, Homo sapiens
taatttctccatttt

SEQ ID NO: 308503 - DNA, 15 bp, Homo sapiens
ttaatttctccattt

SEQ ID NO: 308504 - DNA, 15 bp, Homo sapiens
tttaatttctccatt

SEQ ID NO: 308505 - DNA, 15 bp, Homo sapiens
ttttaatttctccat

SEQ ID NO: 308506 - DNA, 15 bp, Homo sapiens
tttttaatttctcca

SEQ ID NO: 308507 - DNA, 15 bp, Homo sapiens
atttttaatttctcc

SEQ ID NO: 308508 - DNA, 15 bp, Homo sapiens
tatttttaatttctc

SEQ ID NO: 308509 - DNA, 15 bp, Homo sapiens
ttatttttaatttct

SEQ ID NO: 308510 - DNA, 15 bp, Homo sapiens
gttatttttaatttc

SEQ ID NO: 308511 - DNA, 15 bp, Homo sapiens
ggttatttttaattt

SEQ ID NO: 308512 - DNA, 15 bp, Homo sapiens
gggttatttttaatt

SEQ ID NO: 308513 - DNA, 15 bp, Homo sapiens
agggttatttttaat

SEQ ID NO: 308514 - DNA, 15 bp, Homo sapiens
tagggttatttttaa

SEQ ID NO: 308515 - DNA, 15 bp, Homo sapiens
ctagggttattttta

SEQ ID NO: 308516 - DNA, 15 bp, Homo sapiens
cctagggttattttt

SEQ ID NO: 308517 - DNA, 15 bp, Homo sapiens
acctagggttatttt

SEQ ID NO: 308518 - DNA, 15 bp, Homo sapiens
aacctagggttattt

SEQ ID NO: 308519 - DNA, 15 bp, Homo sapiens
aaacctagggttatt

SEQ ID NO: 308520 - DNA, 15 bp, Homo sapiens
aaaacctagggttat

SEQ ID NO: 308521 - DNA, 15 bp, Homo sapiens
aaaaacctagggtta

SEQ ID NO: 308522 - DNA, 15 bp, Homo sapiens
caaaaacctagggtt

SEQ ID NO: 308523 - DNA, 15 bp, Homo sapiens
tcaaaaacctagggt

SEQ ID NO: 308524 - DNA, 15 bp, Homo sapiens
gtcaaaaacctaggg

SEQ ID NO: 308525 - DNA, 15 bp, Homo sapiens
agtcaaaaacctagg

SEQ ID NO: 308526 - DNA, 15 bp, Homo sapiens
aagtcaaaaacctag

SEQ ID NO: 308527 - DNA, 15 bp, Homo sapiens
taagtcaaaaaccta

SEQ ID NO: 308528 - DNA, 15 bp, Homo sapiens
ttaagtcaaaaacct

SEQ ID NO: 308529 - DNA, 15 bp, Homo sapiens
cttaagtcaaaaacc

SEQ ID NO: 308530 - DNA, 15 bp, Homo sapiens
tcttaagtcaaaaac

SEQ ID NO: 308531 - DNA, 15 bp, Homo sapiens
gtcttaagtcaaaaa

SEQ ID NO: 308532 - DNA, 15 bp, Homo sapiens
tgtcttaagtcaaaa

SEQ ID NO: 308533 - DNA, 15 bp, Homo sapiens
gtgtcttaagtcaaa

SEQ ID NO: 308534 - DNA, 15 bp, Homo sapiens
agtgtcttaagtcaa

SEQ ID NO: 308535 - DNA, 15 bp, Homo sapiens
tagtgtcttaagtca

SEQ ID NO: 308536 - DNA, 15 bp, Homo sapiens
ctagtgtcttaagtc

SEQ ID NO: 308537 - DNA, 15 bp, Homo sapiens
tctagtgtcttaagt

SEQ ID NO: 308538 - DNA, 15 bp, Homo sapiens
atctagtgtcttaag

SEQ ID NO: 308539 - DNA, 15 bp, Homo sapiens
catctagtgtcttaa

SEQ ID NO: 308540 - DNA, 15 bp, Homo sapiens
acatctagtgtctta

SEQ ID NO: 308541 - DNA, 15 bp, Homo sapiens
tacatctagtgtctt

SEQ ID NO: 308542 - DNA, 15 bp, Homo sapiens
ttacatctagtgtct

SEQ ID NO: 308543 - DNA, 15 bp, Homo sapiens
attacatctagtgtc

SEQ ID NO: 308544 - DNA, 15 bp, Homo sapiens
cattacatctagtgt

SEQ ID NO: 308545 - DNA, 15 bp, Homo sapiens
acattacatctagtg

SEQ ID NO: 308546 - DNA, 15 bp, Homo sapiens
cacattacatctagt

SEQ ID NO: 308547 - DNA, 15 bp, Homo sapiens
ccacattacatctag

SEQ ID NO: 308548 - DNA, 15 bp, Homo sapiens
tccacattacatcta

SEQ ID NO: 308549 - DNA, 15 bp, Homo sapiens
ctccacattacatct

SEQ ID NO: 308550 - DNA, 15 bp, Homo sapiens
gctccacattacatc

SEQ ID NO: 308551 - DNA, 15 bp, Homo sapiens
agctccacattacat

SEQ ID NO: 308552 - DNA, 15 bp, Homo sapiens
tagctccacattaca

SEQ ID NO: 308553 - DNA, 15 bp, Homo sapiens
atagctccacattac

SEQ ID NO: 308554 - DNA, 15 bp, Homo sapiens
aatagctccacatta

SEQ ID NO: 308555 - DNA, 15 bp, Homo sapiens
gaatagctccacatt

SEQ ID NO: 308556 - DNA, 15 bp, Homo sapiens
agaatagctccacat

SEQ ID NO: 308557 - DNA, 15 bp, Homo sapiens
aagaatagctccaca

SEQ ID NO: 308558 - DNA, 15 bp, Homo sapiens
aaagaatagctccac

SEQ ID NO: 308559 - DNA, 15 bp, Homo sapiens
caaagaatagctcca

SEQ ID NO: 308560 - DNA, 15 bp, Homo sapiens
tcaaagaatagctcc

SEQ ID NO: 308561 - DNA, 15 bp, Homo sapiens
ctcaaagaatagctc

SEQ ID NO: 308562 - DNA, 15 bp, Homo sapiens
tctcaaagaatagct

SEQ ID NO: 308563 - DNA, 15 bp, Homo sapiens
atctcaaagaatagc

SEQ ID NO: 308564 - DNA, 15 bp, Homo sapiens
catctcaaagaatag

SEQ ID NO: 308565 - DNA, 15 bp, Homo sapiens
ccatctcaaagaata

SEQ ID NO: 308566 - DNA, 15 bp, Homo sapiens
cccatctcaaagaat

SEQ ID NO: 308567 - DNA, 15 bp, Homo sapiens
tcccatctcaaagaa

SEQ ID NO: 308568 - DNA, 15 bp, Homo sapiens
ttcccatctcaaaga

SEQ ID NO: 308569 - DNA, 15 bp, Homo sapiens
tttcccatctcaaag

SEQ ID NO: 308570 - DNA, 15 bp, Homo sapiens
ttttcccatctcaaa

SEQ ID NO: 308571 - DNA, 15 bp, Homo sapiens
attttcccatctcaa

SEQ ID NO: 308572 - DNA, 15 bp, Homo sapiens
tattttcccatctca

SEQ ID NO: 308573 - DNA, 15 bp, Homo sapiens
ttattttcccatctc

SEQ ID NO: 308574 - DNA, 15 bp, Homo sapiens
tttattttcccatct

SEQ ID NO: 308575 - DNA, 15 bp, Homo sapiens
atttattttcccatc

SEQ ID NO: 308576 - DNA, 15 bp, Homo sapiens
gatttattttcccat

SEQ ID NO: 308577 - DNA, 15 bp, Homo sapiens
ggatttattttccca

SEQ ID NO: 308578 - DNA, 15 bp, Homo sapiens
tggatttattttccc

SEQ ID NO: 308579 - DNA, 15 bp, Homo sapiens
ctggatttattttcc

SEQ ID NO: 308580 - DNA, 15 bp, Homo sapiens
tctggatttattttc

SEQ ID NO: 308581 - DNA, 15 bp, Homo sapiens
ctctggatttatttt

SEQ ID NO: 308582 - DNA, 15 bp, Homo sapiens
gctctggatttattt

SEQ ID NO: 308583 - DNA, 15 bp, Homo sapiens
agctctggatttatt

SEQ ID NO: 308584 - DNA, 15 bp, Homo sapiens
gagctctggatttat

SEQ ID NO: 308585 - DNA, 15 bp, Homo sapiens
agagctctggattta

SEQ ID NO: 308586 - DNA, 15 bp, Homo sapiens
cagagctctggattt

SEQ ID NO: 308587 - DNA, 15 bp, Homo sapiens
gcagagctctggatt

SEQ ID NO: 308588 - DNA, 15 bp, Homo sapiens
agcagagctctggat

SEQ ID NO: 308589 - DNA, 15 bp, Homo sapiens
aagcagagctctgga

SEQ ID NO: 308590 - DNA, 15 bp, Homo sapiens
aaagcagagctctgg

SEQ ID NO: 308591 - DNA, 15 bp, Homo sapiens
caaagcagagctctg

SEQ ID NO: 308592 - DNA, 15 bp, Homo sapiens
acaaagcagagctct

SEQ ID NO: 308593 - DNA, 15 bp, Homo sapiens
aacaaagcagagctc

SEQ ID NO: 308594 - DNA, 15 bp, Homo sapiens
gaacaaagcagagct

SEQ ID NO: 308595 - DNA, 15 bp, Homo sapiens
agaacaaagcagagc

SEQ ID NO: 308596 - DNA, 15 bp, Homo sapiens
aagaacaaagcagag

SEQ ID NO: 308597 - DNA, 15 bp, Homo sapiens
taagaacaaagcaga

SEQ ID NO: 308598 - DNA, 15 bp, Homo sapiens
ataagaacaaagcag

SEQ ID NO: 308599 - DNA, 15 bp, Homo sapiens
aataagaacaaagca

SEQ ID NO: 308600 - DNA, 15 bp, Homo sapiens
taataagaacaaagc

SEQ ID NO: 308601 - DNA, 15 bp, Homo sapiens
ttaataagaacaaag

SEQ ID NO: 308602 - DNA, 15 bp, Homo sapiens
cttaataagaacaaa

SEQ ID NO: 308603 - DNA, 15 bp, Homo sapiens
acttaataagaacaa

SEQ ID NO: 308604 - DNA, 15 bp, Homo sapiens
gacttaataagaaca

SEQ ID NO: 308605 - DNA, 15 bp, Homo sapiens
agacttaataagaac

SEQ ID NO: 308606 - DNA, 15 bp, Homo sapiens
cagacttaataagaa

SEQ ID NO: 308607 - DNA, 15 bp, Homo sapiens
tcagacttaataaga

SEQ ID NO: 308608 - DNA, 15 bp, Homo sapiens
ctcagacttaataag

SEQ ID NO: 308609 - DNA, 15 bp, Homo sapiens
tctcagacttaataa

SEQ ID NO: 308610 - DNA, 15 bp, Homo sapiens
atctcagacttaata

SEQ ID NO: 308611 - DNA, 15 bp, Homo sapiens
aatctcagacttaat

SEQ ID NO: 308612 - DNA, 15 bp, Homo sapiens
gaatctcagacttaa

SEQ ID NO: 308613 - DNA, 15 bp, Homo sapiens
cgaatctcagactta

SEQ ID NO: 308614 - DNA, 15 bp, Homo sapiens
tcgaatctcagactt

SEQ ID NO: 308615 - DNA, 15 bp, Homo sapiens
ctcgaatctcagact

SEQ ID NO: 308616 - DNA, 15 bp, Homo sapiens
actcgaatctcagac

SEQ ID NO: 308617 - DNA, 15 bp, Homo sapiens
tactcgaatctcaga

SEQ ID NO: 308618 - DNA, 15 bp, Homo sapiens
ctactcgaatctcag

SEQ ID NO: 308619 - DNA, 15 bp, Homo sapiens
actactcgaatctca

SEQ ID NO: 308620 - DNA, 15 bp, Homo sapiens
aactactcgaatctc

SEQ ID NO: 308621 - DNA, 15 bp, Homo sapiens
taactactcgaatct

SEQ ID NO: 308622 - DNA, 15 bp, Homo sapiens
ataactactcgaatc

SEQ ID NO: 308623 - DNA, 15 bp, Homo sapiens
tataactactcgaat

SEQ ID NO: 308624 - DNA, 15 bp, Homo sapiens
atataactactcgaa

SEQ ID NO: 308625 - DNA, 15 bp, Homo sapiens
gatataactactcga

SEQ ID NO: 308626 - DNA, 15 bp, Homo sapiens
ggatataactactcg

SEQ ID NO: 308627 - DNA, 15 bp, Homo sapiens
cggatataactactc

SEQ ID NO: 308628 - DNA, 15 bp, Homo sapiens
ccggatataactact

SEQ ID NO: 308629 - DNA, 15 bp, Homo sapiens
accggatataactac

SEQ ID NO: 308630 - DNA, 15 bp, Homo sapiens
taccggatataacta

SEQ ID NO: 308631 - DNA, 15 bp, Homo sapiens
ctaccggatataact

SEQ ID NO: 308632 - DNA, 15 bp, Homo sapiens
cctaccggatataac

SEQ ID NO: 308633 - DNA, 15 bp, Homo sapiens
acctaccggatataa

SEQ ID NO: 308634 - DNA, 15 bp, Homo sapiens
tacctaccggatata

SEQ ID NO: 308635 - DNA, 15 bp, Homo sapiens
ttacctaccggatat

SEQ ID NO: 308636 - DNA, 15 bp, Homo sapiens
attacctaccggata

SEQ ID NO: 308637 - DNA, 15 bp, Homo sapiens
aattacctaccggat

SEQ ID NO: 308638 - DNA, 15 bp, Homo sapiens
caattacctaccgga

SEQ ID NO: 308639 - DNA, 15 bp, Homo sapiens
ccaattacctaccgg

SEQ ID NO: 308640 - DNA, 15 bp, Homo sapiens
tccaattacctaccg

SEQ ID NO: 308641 - DNA, 15 bp, Homo sapiens
ctccaattacctacc

SEQ ID NO: 308642 - DNA, 15 bp, Homo sapiens
tctccaattacctac

SEQ ID NO: 308643 - DNA, 15 bp, Homo sapiens
atctccaattaccta

SEQ ID NO: 308644 - DNA, 15 bp, Homo sapiens
aatctccaattacct

SEQ ID NO: 308645 - DNA, 15 bp, Homo sapiens
aaatctccaattacc

SEQ ID NO: 308646 - DNA, 15 bp, Homo sapiens
taaatctccaattac

SEQ ID NO: 308647 - DNA, 15 bp, Homo sapiens
gtaaatctccaatta

SEQ ID NO: 308648 - DNA, 15 bp, Homo sapiens
tgtaaatctccaatt

SEQ ID NO: 308649 - DNA, 15 bp, Homo sapiens
gtgtaaatctccaat

SEQ ID NO: 308650 - DNA, 15 bp, Homo sapiens
ggtgtaaatctccaa

SEQ ID NO: 308651 - DNA, 15 bp, Homo sapiens
aggtgtaaatctcca

SEQ ID NO: 308652 - DNA, 15 bp, Homo sapiens
taggtgtaaatctcc

SEQ ID NO: 308653 - DNA, 15 bp, Homo sapiens
ctaggtgtaaatctc

SEQ ID NO: 308654 - DNA, 15 bp, Homo sapiens
tctaggtgtaaatct

SEQ ID NO: 308655 - DNA, 15 bp, Homo sapiens
ttctaggtgtaaatc

SEQ ID NO: 308656 - DNA, 15 bp, Homo sapiens
gttctaggtgtaaat

SEQ ID NO: 308657 - DNA, 15 bp, Homo sapiens
agttctaggtgtaaa

SEQ ID NO: 308658 - DNA, 15 bp, Homo sapiens
aagttctaggtgtaa

SEQ ID NO: 308659 - DNA, 15 bp, Homo sapiens
gaagttctaggtgta

SEQ ID NO: 308660 - DNA, 15 bp, Homo sapiens
tgaagttctaggtgt

SEQ ID NO: 308661 - DNA, 15 bp, Homo sapiens
ctgaagttctaggtg

SEQ ID NO: 308662 - DNA, 15 bp, Homo sapiens
tctgaagttctaggt

SEQ ID NO: 308663 - DNA, 15 bp, Homo sapiens
ctctgaagttctagg

SEQ ID NO: 308664 - DNA, 15 bp, Homo sapiens
tctctgaagttctag

SEQ ID NO: 308665 - DNA, 15 bp, Homo sapiens
gtctctgaagttcta

SEQ ID NO: 308666 - DNA, 15 bp, Homo sapiens
agtctctgaagttct

SEQ ID NO: 308667 - DNA, 15 bp, Homo sapiens
tagtctctgaagttc

SEQ ID NO: 308668 - DNA, 15 bp, Homo sapiens
ttagtctctgaagtt

SEQ ID NO: 308669 - DNA, 15 bp, Homo sapiens
gttagtctctgaagt

SEQ ID NO: 308670 - DNA, 15 bp, Homo sapiens
agttagtctctgaag

SEQ ID NO: 308671 - DNA, 15 bp, Homo sapiens
aagttagtctctgaa

SEQ ID NO: 308672 - DNA, 15 bp, Homo sapiens
aaagttagtctctga

SEQ ID NO: 308673 - DNA, 15 bp, Homo sapiens
caaagttagtctctg

SEQ ID NO: 308674 - DNA, 15 bp, Homo sapiens
gcaaagttagtctct

SEQ ID NO: 308675 - DNA, 15 bp, Homo sapiens
ggcaaagttagtctc

SEQ ID NO: 308676 - DNA, 15 bp, Homo sapiens
gggcaaagttagtct

SEQ ID NO: 308677 - DNA, 15 bp, Homo sapiens
tgggcaaagttagtc

SEQ ID NO: 308678 - DNA, 15 bp, Homo sapiens
ttgggcaaagttagt

SEQ ID NO: 308679 - DNA, 15 bp, Homo sapiens
cttgggcaaagttag

SEQ ID NO: 308680 - DNA, 15 bp, Homo sapiens
acttgggcaaagtta

SEQ ID NO: 308681 - DNA, 15 bp, Homo sapiens
aacttgggcaaagtt

SEQ ID NO: 308682 - DNA, 15 bp, Homo sapiens
taacttgggcaaagt

SEQ ID NO: 308683 - DNA, 15 bp, Homo sapiens
ctaacttgggcaaag

SEQ ID NO: 308684 - DNA, 15 bp, Homo sapiens
cctaacttgggcaaa

SEQ ID NO: 308685 - DNA, 15 bp, Homo sapiens
gcctaacttgggcaa

SEQ ID NO: 308686 - DNA, 15 bp, Homo sapiens
ggcctaacttgggca

SEQ ID NO: 308687 - DNA, 15 bp, Homo sapiens
tggcctaacttgggc

SEQ ID NO: 308688 - DNA, 15 bp, Homo sapiens
ctggcctaacttggg

SEQ ID NO: 308689 - DNA, 15 bp, Homo sapiens
actggcctaacttgg

SEQ ID NO: 308690 - DNA, 15 bp, Homo sapiens
aactggcctaacttg

SEQ ID NO: 308691 - DNA, 15 bp, Homo sapiens
aaactggcctaactt

SEQ ID NO: 308692 - DNA, 15 bp, Homo sapiens
taaactggcctaact

SEQ ID NO: 308693 - DNA, 15 bp, Homo sapiens
gtaaactggcctaac

SEQ ID NO: 308694 - DNA, 15 bp, Homo sapiens
cgtaaactggcctaa

SEQ ID NO: 308695 - DNA, 15 bp, Homo sapiens
tcgtaaactggccta

SEQ ID NO: 308696 - DNA, 15 bp, Homo sapiens
atcgtaaactggcct

SEQ ID NO: 308697 - DNA, 15 bp, Homo sapiens
tatcgtaaactggcc

SEQ ID NO: 308698 - DNA, 15 bp, Homo sapiens
gtatcgtaaactggc

SEQ ID NO: 308699 - DNA, 15 bp, Homo sapiens
agtatcgtaaactgg

SEQ ID NO: 308700 - DNA, 15 bp, Homo sapiens
cagtatcgtaaactg

SEQ ID NO: 308701 - DNA, 15 bp, Homo sapiens
acagtatcgtaaact

SEQ ID NO: 308702 - DNA, 15 bp, Homo sapiens
gacagtatcgtaaac

SEQ ID NO: 308703 - DNA, 15 bp, Homo sapiens
tgacagtatcgtaaa

SEQ ID NO: 308704 - DNA, 15 bp, Homo sapiens
ctgacagtatcgtaa

SEQ ID NO: 308705 - DNA, 15 bp, Homo sapiens
actgacagtatcgta

SEQ ID NO: 308706 - DNA, 15 bp, Homo sapiens
cactgacagtatcgt

SEQ ID NO: 308707 - DNA, 15 bp, Homo sapiens
tcactgacagtatcg

SEQ ID NO: 308708 - DNA, 15 bp, Homo sapiens
ttcactgacagtatc

SEQ ID NO: 308709 - DNA, 15 bp, Homo sapiens
gttcactgacagtat

SEQ ID NO: 308710 - DNA, 15 bp, Homo sapiens
agttcactgacagta

SEQ ID NO: 308711 - DNA, 15 bp, Homo sapiens
cagttcactgacagt

SEQ ID NO: 308712 - DNA, 15 bp, Homo sapiens
tcagttcactgacag

SEQ ID NO: 308713 - DNA, 15 bp, Homo sapiens
ttcagttcactgaca

SEQ ID NO: 308714 - DNA, 15 bp, Homo sapiens
attcagttcactgac

SEQ ID NO: 308715 - DNA, 15 bp, Homo sapiens
cattcagttcactga

SEQ ID NO: 308716 - DNA, 15 bp, Homo sapiens
tcattcagttcactg

SEQ ID NO: 308717 - DNA, 15 bp, Homo sapiens
ttcattcagttcact

SEQ ID NO: 308718 - DNA, 15 bp, Homo sapiens
tttcattcagttcac

SEQ ID NO: 308719 - DNA, 15 bp, Homo sapiens
ttttcattcagttca

SEQ ID NO: 308720 - DNA, 15 bp, Homo sapiens
attttcattcagttc

SEQ ID NO: 308721 - DNA, 15 bp, Homo sapiens
gattttcattcagtt

SEQ ID NO: 308722 - DNA, 15 bp, Homo sapiens
ggattttcattcagt

SEQ ID NO: 308723 - DNA, 15 bp, Homo sapiens
tggattttcattcag

SEQ ID NO: 308724 - DNA, 15 bp, Homo sapiens
ttggattttcattca

SEQ ID NO: 308725 - DNA, 15 bp, Homo sapiens
tttggattttcattc

SEQ ID NO: 308726 - DNA, 15 bp, Homo sapiens
ctttggattttcatt

SEQ ID NO: 308727 - DNA, 15 bp, Homo sapiens
actttggattttcat

SEQ ID NO: 308728 - DNA, 15 bp, Homo sapiens
cactttggattttca

SEQ ID NO: 308729 - DNA, 15 bp, Homo sapiens
ccactttggattttc

SEQ ID NO: 308730 - DNA, 15 bp, Homo sapiens
tccactttggatttt

SEQ ID NO: 308731 - DNA, 15 bp, Homo sapiens
atccactttggattt

SEQ ID NO: 308732 - DNA, 15 bp, Homo sapiens
tatccactttggatt

SEQ ID NO: 308733 - DNA, 15 bp, Homo sapiens
gtatccactttggat

SEQ ID NO: 308734 - DNA, 15 bp, Homo sapiens
agtatccactttgga

SEQ ID NO: 308735 - DNA, 15 bp, Homo sapiens
tagtatccactttgg

SEQ ID NO: 308736 - DNA, 15 bp, Homo sapiens
ctagtatccactttg

SEQ ID NO: 308737 - DNA, 15 bp, Homo sapiens
tctagtatccacttt

SEQ ID NO: 308738 - DNA, 15 bp, Homo sapiens
gtctagtatccactt

SEQ ID NO: 308739 - DNA, 15 bp, Homo sapiens
ggtctagtatccact

SEQ ID NO: 308740 - DNA, 15 bp, Homo sapiens
tggtctagtatccac

SEQ ID NO: 308741 - DNA, 15 bp, Homo sapiens
ctggtctagtatcca

SEQ ID NO: 308742 - DNA, 15 bp, Homo sapiens
tctggtctagtatcc

SEQ ID NO: 308743 - DNA, 15 bp, Homo sapiens
gtctggtctagtatc

SEQ ID NO: 308744 - DNA, 15 bp, Homo sapiens
tgtctggtctagtat

SEQ ID NO: 308745 - DNA, 15 bp, Homo sapiens
gtgtctggtctagta

SEQ ID NO: 308746 - DNA, 15 bp, Homo sapiens
agtgtctggtctagt

SEQ ID NO: 308747 - DNA, 15 bp, Homo sapiens
cagtgtctggtctag

SEQ ID NO: 308748 - DNA, 15 bp, Homo sapiens
ccagtgtctggtcta

SEQ ID NO: 308749 - DNA, 15 bp, Homo sapiens
accagtgtctggtct

SEQ ID NO: 308750 - DNA, 15 bp, Homo sapiens
gaccagtgtctggtc

SEQ ID NO: 308751 - DNA, 15 bp, Homo sapiens
ggaccagtgtctggt

SEQ ID NO: 308752 - DNA, 15 bp, Homo sapiens
aggaccagtgtctgg

SEQ ID NO: 308753 - DNA, 15 bp, Homo sapiens
aaggaccagtgtctg

SEQ ID NO: 308754 - DNA, 15 bp, Homo sapiens
gaaggaccagtgtct

SEQ ID NO: 308755 - DNA, 15 bp, Homo sapiens
agaaggaccagtgtc

SEQ ID NO: 308756 - DNA, 15 bp, Homo sapiens
tagaaggaccagtgt

SEQ ID NO: 308757 - DNA, 15 bp, Homo sapiens
ttagaaggaccagtg

SEQ ID NO: 308758 - DNA, 15 bp, Homo sapiens
tttagaaggaccagt

SEQ ID NO: 308759 - DNA, 15 bp, Homo sapiens
ttttagaaggaccag

SEQ ID NO: 308760 - DNA, 15 bp, Homo sapiens
attttagaaggacca

SEQ ID NO: 308761 - DNA, 15 bp, Homo sapiens
gattttagaaggacc

SEQ ID NO: 308762 - DNA, 15 bp, Homo sapiens
tgattttagaaggac

SEQ ID NO: 308763 - DNA, 15 bp, Homo sapiens
atgattttagaagga

SEQ ID NO: 308764 - DNA, 15 bp, Homo sapiens
aatgattttagaagg

SEQ ID NO: 308765 - DNA, 15 bp, Homo sapiens
caatgattttagaag

SEQ ID NO: 308766 - DNA, 15 bp, Homo sapiens
acaatgattttagaa

SEQ ID NO: 308767 - DNA, 15 bp, Homo sapiens
cacaatgattttaga

SEQ ID NO: 308768 - DNA, 15 bp, Homo sapiens
tcacaatgattttag

SEQ ID NO: 308769 - DNA, 15 bp, Homo sapiens
atcacaatgatttta

SEQ ID NO: 308770 - DNA, 15 bp, Homo sapiens
tatcacaatgatttt

SEQ ID NO: 308771 - DNA, 15 bp, Homo sapiens
ttatcacaatgattt

SEQ ID NO: 308772 - DNA, 15 bp, Homo sapiens
attatcacaatgatt

SEQ ID NO: 308773 - DNA, 15 bp, Homo sapiens
cattatcacaatgat

SEQ ID NO: 308774 - DNA, 15 bp, Homo sapiens
ccattatcacaatga

SEQ ID NO: 308775 - DNA, 15 bp, Homo sapiens
cccattatcacaatg

SEQ ID NO: 308776 - DNA, 15 bp, Homo sapiens
acccattatcacaat

SEQ ID NO: 308777 - DNA, 15 bp, Homo sapiens
gacccattatcacaa

SEQ ID NO: 308778 - DNA, 15 bp, Homo sapiens
cgacccattatcaca

SEQ ID NO: 308779 - DNA, 15 bp, Homo sapiens
gcgacccattatcac

SEQ ID NO: 308780 - DNA, 15 bp, Homo sapiens
agcgacccattatca

SEQ ID NO: 308781 - DNA, 15 bp, Homo sapiens
aagcgacccattatc

SEQ ID NO: 308782 - DNA, 15 bp, Homo sapiens
aaagcgacccattat

SEQ ID NO: 308783 - DNA, 15 bp, Homo sapiens
aaaagcgacccatta

SEQ ID NO: 308784 - DNA, 15 bp, Homo sapiens
gaaaagcgacccatt

SEQ ID NO: 308785 - DNA, 15 bp, Homo sapiens
agaaaagcgacccat

SEQ ID NO: 308786 - DNA, 15 bp, Homo sapiens
aagaaaagcgaccca

SEQ ID NO: 308787 - DNA, 15 bp, Homo sapiens
taagaaaagcgaccc

SEQ ID NO: 308788 - DNA, 15 bp, Homo sapiens
ctaagaaaagcgacc

SEQ ID NO: 308789 - DNA, 15 bp, Homo sapiens
actaagaaaagcgac

SEQ ID NO: 308790 - DNA, 15 bp, Homo sapiens
cactaagaaaagcga

SEQ ID NO: 308791 - DNA, 15 bp, Homo sapiens
acactaagaaaagcg

SEQ ID NO: 308792 - DNA, 15 bp, Homo sapiens
tacactaagaaaagc

SEQ ID NO: 308793 - DNA, 15 bp, Homo sapiens
gtacactaagaaaag

SEQ ID NO: 308794 - DNA, 15 bp, Homo sapiens
agtacactaagaaaa

SEQ ID NO: 308795 - DNA, 15 bp, Homo sapiens
cagtacactaagaaa

SEQ ID NO: 308796 - DNA, 15 bp, Homo sapiens
ccagtacactaagaa

SEQ ID NO: 308797 - DNA, 15 bp, Homo sapiens
accagtacactaaga

SEQ ID NO: 308798 - DNA, 15 bp, Homo sapiens
aaccagtacactaag

SEQ ID NO: 308799 - DNA, 15 bp, Homo sapiens
taaccagtacactaa

SEQ ID NO: 308800 - DNA, 15 bp, Homo sapiens
ttaaccagtacacta

SEQ ID NO: 308801 - DNA, 15 bp, Homo sapiens
attaaccagtacact

SEQ ID NO: 308802 - DNA, 15 bp, Homo sapiens
tattaaccagtacac

SEQ ID NO: 308803 - DNA, 15 bp, Homo sapiens
atattaaccagtaca

SEQ ID NO: 308804 - DNA, 15 bp, Homo sapiens
tatattaaccagtac

SEQ ID NO: 308805 - DNA, 15 bp, Homo sapiens
gtatattaaccagta

SEQ ID NO: 308806 - DNA, 15 bp, Homo sapiens
agtatattaaccagt

SEQ ID NO: 308807 - DNA, 15 bp, Homo sapiens
tagtatattaaccag

SEQ ID NO: 308808 - DNA, 15 bp, Homo sapiens
gtagtatattaacca

SEQ ID NO: 308809 - DNA, 15 bp, Homo sapiens
cgtagtatattaacc

SEQ ID NO: 308810 - DNA, 15 bp, Homo sapiens
acgtagtatattaac

SEQ ID NO: 308811 - DNA, 15 bp, Homo sapiens
cacgtagtatattaa

SEQ ID NO: 308812 - DNA, 15 bp, Homo sapiens
acacgtagtatatta

SEQ ID NO: 308813 - DNA, 15 bp, Homo sapiens
aacacgtagtatatt

SEQ ID NO: 308814 - DNA, 15 bp, Homo sapiens
caacacgtagtatat

SEQ ID NO: 308815 - DNA, 15 bp, Homo sapiens
acaacacgtagtata

SEQ ID NO: 308816 - DNA, 15 bp, Homo sapiens
tacaacacgtagtat

SEQ ID NO: 308817 - DNA, 15 bp, Homo sapiens
ctacaacacgtagta

SEQ ID NO: 308818 - DNA, 15 bp, Homo sapiens
tctacaacacgtagt

SEQ ID NO: 308819 - DNA, 15 bp, Homo sapiens
ttctacaacacgtag

SEQ ID NO: 308820 - DNA, 15 bp, Homo sapiens
tttctacaacacgta

SEQ ID NO: 308821 - DNA, 15 bp, Homo sapiens
gtttctacaacacgt

SEQ ID NO: 308822 - DNA, 15 bp, Homo sapiens
tgtttctacaacacg

SEQ ID NO: 308823 - DNA, 15 bp, Homo sapiens
atgtttctacaacac

SEQ ID NO: 308824 - DNA, 15 bp, Homo sapiens
gatgtttctacaaca

SEQ ID NO: 308825 - DNA, 15 bp, Homo sapiens
ggatgtttctacaac

SEQ ID NO: 308826 - DNA, 15 bp, Homo sapiens
tggatgtttctacaa

SEQ ID NO: 308827 - DNA, 15 bp, Homo sapiens
atggatgtttctaca

SEQ ID NO: 308828 - DNA, 15 bp, Homo sapiens
tatggatgtttctac

SEQ ID NO: 308829 - DNA, 15 bp, Homo sapiens
ctatggatgtttcta

SEQ ID NO: 308830 - DNA, 15 bp, Homo sapiens
actatggatgtttct

SEQ ID NO: 308831 - DNA, 15 bp, Homo sapiens
tactatggatgtttc

SEQ ID NO: 308832 - DNA, 15 bp, Homo sapiens
ttactatggatgttt

SEQ ID NO: 308833 - DNA, 15 bp, Homo sapiens
cttactatggatgtt

SEQ ID NO: 308834 - DNA, 15 bp, Homo sapiens
ccttactatggatgt

SEQ ID NO: 308835 - DNA, 15 bp, Homo sapiens
accttactatggatg

SEQ ID NO: 308836 - DNA, 15 bp, Homo sapiens
taccttactatggat

SEQ ID NO: 308837 - DNA, 15 bp, Homo sapiens
gtaccttactatgga

SEQ ID NO: 308838 - DNA, 15 bp, Homo sapiens
tgtaccttactatgg

SEQ ID NO: 308839 - DNA, 15 bp, Homo sapiens
ttgtaccttactatg

SEQ ID NO: 308840 - DNA, 15 bp, Homo sapiens
tttgtaccttactat

SEQ ID NO: 308841 - DNA, 15 bp, Homo sapiens
atttgtaccttacta

SEQ ID NO: 308842 - DNA, 15 bp, Homo sapiens
aatttgtaccttact

SEQ ID NO: 308843 - DNA, 15 bp, Homo sapiens
gaatttgtaccttac

SEQ ID NO: 308844 - DNA, 15 bp, Homo sapiens
agaatttgtacctta

SEQ ID NO: 308845 - DNA, 15 bp, Homo sapiens
tagaatttgtacctt

SEQ ID NO: 308846 - DNA, 15 bp, Homo sapiens
gtagaatttgtacct

SEQ ID NO: 308847 - DNA, 15 bp, Homo sapiens
agtagaatttgtacc

SEQ ID NO: 308848 - DNA, 15 bp, Homo sapiens
aagtagaatttgtac

SEQ ID NO: 308849 - DNA, 15 bp, Homo sapiens
gaagtagaatttgta

SEQ ID NO: 308850 - DNA, 15 bp, Homo sapiens
ggaagtagaatttgt

SEQ ID NO: 308851 - DNA, 15 bp, Homo sapiens
aggaagtagaatttg

SEQ ID NO: 308852 - DNA, 15 bp, Homo sapiens
caggaagtagaattt

SEQ ID NO: 308853 - DNA, 15 bp, Homo sapiens
acaggaagtagaatt

SEQ ID NO: 308854 - DNA, 15 bp, Homo sapiens
aacaggaagtagaat

SEQ ID NO: 308855 - DNA, 15 bp, Homo sapiens
gaacaggaagtagaa

SEQ ID NO: 308856 - DNA, 15 bp, Homo sapiens
agaacaggaagtaga

SEQ ID NO: 308857 - DNA, 15 bp, Homo sapiens
gagaacaggaagtag

SEQ ID NO: 308858 - DNA, 15 bp, Homo sapiens
agagaacaggaagta

SEQ ID NO: 308859 - DNA, 15 bp, Homo sapiens
aagagaacaggaagt

SEQ ID NO: 308860 - DNA, 15 bp, Homo sapiens
aaagagaacaggaag

SEQ ID NO: 308861 - DNA, 15 bp, Homo sapiens
caaagagaacaggaa

SEQ ID NO: 308862 - DNA, 15 bp, Homo sapiens
acaaagagaacagga

SEQ ID NO: 308863 - DNA, 15 bp, Homo sapiens
aacaaagagaacagg

SEQ ID NO: 308864 - DNA, 15 bp, Homo sapiens
gaacaaagagaacag

SEQ ID NO: 308865 - DNA, 15 bp, Homo sapiens
agaacaaagagaaca

SEQ ID NO: 308866 - DNA, 15 bp, Homo sapiens
aagaacaaagagaac

SEQ ID NO: 308867 - DNA, 15 bp, Homo sapiens
taagaacaaagagaa

SEQ ID NO: 308868 - DNA, 15 bp, Homo sapiens
ttaagaacaaagaga

SEQ ID NO: 308869 - DNA, 15 bp, Homo sapiens
tttaagaacaaagag

SEQ ID NO: 308870 - DNA, 15 bp, Homo sapiens
ctttaagaacaaaga

SEQ ID NO: 308871 - DNA, 15 bp, Homo sapiens
actttaagaacaaag

SEQ ID NO: 308872 - DNA, 15 bp, Homo sapiens
aactttaagaacaaa

SEQ ID NO: 308873 - DNA, 15 bp, Homo sapiens
aaactttaagaacaa

SEQ ID NO: 308874 - DNA, 15 bp, Homo sapiens
caaactttaagaaca

SEQ ID NO: 308875 - DNA, 15 bp, Homo sapiens
acaaactttaagaac

SEQ ID NO: 308876 - DNA, 15 bp, Homo sapiens
gacaaactttaagaa

SEQ ID NO: 308877 - DNA, 15 bp, Homo sapiens
agacaaactttaaga

SEQ ID NO: 308878 - DNA, 15 bp, Homo sapiens
aagacaaactttaag

SEQ ID NO: 308879 - DNA, 15 bp, Homo sapiens
aaagacaaactttaa

SEQ ID NO: 308880 - DNA, 15 bp, Homo sapiens
taaagacaaacttta

SEQ ID NO: 308881 - DNA, 15 bp, Homo sapiens
ttaaagacaaacttt

SEQ ID NO: 308882 - DNA, 15 bp, Homo sapiens
tttaaagacaaactt

SEQ ID NO: 308883 - DNA, 15 bp, Homo sapiens
ttttaaagacaaact

SEQ ID NO: 308884 - DNA, 15 bp, Homo sapiens
tttttaaagacaaac

SEQ ID NO: 308885 - DNA, 15 bp, Homo sapiens
atttttaaagacaaa

SEQ ID NO: 308886 - DNA, 15 bp, Homo sapiens
tatttttaaagacaa

SEQ ID NO: 308887 - DNA, 15 bp, Homo sapiens
ttatttttaaagaca

SEQ ID NO: 308888 - DNA, 15 bp, Homo sapiens
cttatttttaaagac

SEQ ID NO: 308889 - DNA, 15 bp, Homo sapiens
acttatttttaaaga

SEQ ID NO: 308890 - DNA, 15 bp, Homo sapiens
aacttatttttaaag

SEQ ID NO: 308891 - DNA, 15 bp, Homo sapiens
gaacttatttttaaa

SEQ ID NO: 308892 - DNA, 15 bp, Homo sapiens
tgaacttatttttaa

SEQ ID NO: 308893 - DNA, 15 bp, Homo sapiens
atgaacttattttta

SEQ ID NO: 308894 - DNA, 15 bp, Homo sapiens
aatgaacttattttt

SEQ ID NO: 308895 - DNA, 15 bp, Homo sapiens
aaatgaacttatttt

SEQ ID NO: 308896 - DNA, 15 bp, Homo sapiens
caaatgaacttattt

SEQ ID NO: 308897 - DNA, 15 bp, Homo sapiens
gcaaatgaacttatt

SEQ ID NO: 308898 - DNA, 15 bp, Homo sapiens
ggcaaatgaacttat

SEQ ID NO: 308899 - DNA, 15 bp, Homo sapiens
tggcaaatgaactta

SEQ ID NO: 308900 - DNA, 15 bp, Homo sapiens
ctggcaaatgaactt

SEQ ID NO: 308901 - DNA, 15 bp, Homo sapiens
gctggcaaatgaact

SEQ ID NO: 308902 - DNA, 15 bp, Homo sapiens
agctggcaaatgaac

SEQ ID NO: 308903 - DNA, 15 bp, Homo sapiens
tagctggcaaatgaa

SEQ ID NO: 308904 - DNA, 15 bp, Homo sapiens
gtagctggcaaatga

SEQ ID NO: 308905 - DNA, 15 bp, Homo sapiens
ggtagctggcaaatg

SEQ ID NO: 308906 - DNA, 15 bp, Homo sapiens
tggtagctggcaaat

SEQ ID NO: 308907 - DNA, 15 bp, Homo sapiens
ttggtagctggcaaa

SEQ ID NO: 308908 - DNA, 15 bp, Homo sapiens
tttggtagctggcaa

SEQ ID NO: 308909 - DNA, 15 bp, Homo sapiens
ttttggtagctggca

SEQ ID NO: 308910 - DNA, 15 bp, Homo sapiens
cttttggtagctggc

SEQ ID NO: 308911 - DNA, 15 bp, Homo sapiens
tcttttggtagctgg

SEQ ID NO: 308912 - DNA, 15 bp, Homo sapiens
ttcttttggtagctg

SEQ ID NO: 308913 - DNA, 15 bp, Homo sapiens
tttcttttggtagct

SEQ ID NO: 308914 - DNA, 15 bp, Homo sapiens
ttttcttttggtagc

SEQ ID NO: 308915 - DNA, 15 bp, Homo sapiens
attttcttttggtag

SEQ ID NO: 308916 - DNA, 15 bp, Homo sapiens
gattttcttttggta

SEQ ID NO: 308917 - DNA, 15 bp, Homo sapiens
tgattttcttttggt

SEQ ID NO: 308918 - DNA, 15 bp, Homo sapiens
ctgattttcttttgg

SEQ ID NO: 308919 - DNA, 15 bp, Homo sapiens
tctgattttcttttg

SEQ ID NO: 308920 - DNA, 15 bp, Homo sapiens
ttctgattttctttt

SEQ ID NO: 308921 - DNA, 15 bp, Homo sapiens
tttctgattttcttt

SEQ ID NO: 308922 - DNA, 15 bp, Homo sapiens
ctttctgattttctt

SEQ ID NO: 308923 - DNA, 15 bp, Homo sapiens
actttctgattttct

SEQ ID NO: 308924 - DNA, 15 bp, Homo sapiens
tactttctgattttc

SEQ ID NO: 308925 - DNA, 15 bp, Homo sapiens
ctactttctgatttt

SEQ ID NO: 308926 - DNA, 15 bp, Homo sapiens
tctactttctgattt

SEQ ID NO: 308927 - DNA, 15 bp, Homo sapiens
atctactttctgatt

SEQ ID NO: 308928 - DNA, 15 bp, Homo sapiens
gatctactttctgat

SEQ ID NO: 308929 - DNA, 15 bp, Homo sapiens
agatctactttctga

SEQ ID NO: 308930 - DNA, 15 bp, Homo sapiens
tagatctactttctg

SEQ ID NO: 308931 - DNA, 15 bp, Homo sapiens
ctagatctactttct

SEQ ID NO: 308932 - DNA, 15 bp, Homo sapiens
tctagatctactttc

SEQ ID NO: 308933 - DNA, 15 bp, Homo sapiens
atctagatctacttt

SEQ ID NO: 308934 - DNA, 15 bp, Homo sapiens
aatctagatctactt

SEQ ID NO: 308935 - DNA, 15 bp, Homo sapiens
taatctagatctact

SEQ ID NO: 308936 - DNA, 15 bp, Homo sapiens
ataatctagatctac

SEQ ID NO: 308937 - DNA, 15 bp, Homo sapiens
aataatctagatcta

SEQ ID NO: 308938 - DNA, 15 bp, Homo sapiens
gaataatctagatct

SEQ ID NO: 308939 - DNA, 15 bp, Homo sapiens
agaataatctagatc

SEQ ID NO: 308940 - DNA, 15 bp, Homo sapiens
cagaataatctagat

SEQ ID NO: 308941 - DNA, 15 bp, Homo sapiens
acagaataatctaga

SEQ ID NO: 308942 - DNA, 15 bp, Homo sapiens
aacagaataatctag

SEQ ID NO: 308943 - DNA, 15 bp, Homo sapiens
taacagaataatcta

SEQ ID NO: 308944 - DNA, 15 bp, Homo sapiens
ttaacagaataatct

SEQ ID NO: 308945 - DNA, 15 bp, Homo sapiens
tttaacagaataatc

SEQ ID NO: 308946 - DNA, 15 bp, Homo sapiens
atttaacagaataat

SEQ ID NO: 308947 - DNA, 15 bp, Homo sapiens
tatttaacagaataa

SEQ ID NO: 308948 - DNA, 15 bp, Homo sapiens
ctatttaacagaata

SEQ ID NO: 308949 - DNA, 15 bp, Homo sapiens
cctatttaacagaat

SEQ ID NO: 308950 - DNA, 15 bp, Homo sapiens
ccctatttaacagaa

SEQ ID NO: 308951 - DNA, 15 bp, Homo sapiens
cccctatttaacaga

SEQ ID NO: 308952 - DNA, 15 bp, Homo sapiens
gcccctatttaacag

SEQ ID NO: 308953 - DNA, 15 bp, Homo sapiens
tgcccctatttaaca

SEQ ID NO: 308954 - DNA, 15 bp, Homo sapiens
ctgcccctatttaac

SEQ ID NO: 308955 - DNA, 15 bp, Homo sapiens
gctgcccctatttaa

SEQ ID NO: 308956 - DNA, 15 bp, Homo sapiens
tgctgcccctattta

SEQ ID NO: 308957 - DNA, 15 bp, Homo sapiens
gtgctgcccctattt

SEQ ID NO: 308958 - DNA, 15 bp, Homo sapiens
tgtgctgcccctatt

SEQ ID NO: 308959 - DNA, 15 bp, Homo sapiens
ctgtgctgcccctat

SEQ ID NO: 308960 - DNA, 15 bp, Homo sapiens
tctgtgctgccccta

SEQ ID NO: 308961 - DNA, 15 bp, Homo sapiens
ttctgtgctgcccct

SEQ ID NO: 308962 - DNA, 15 bp, Homo sapiens
gttctgtgctgcccc

SEQ ID NO: 308963 - DNA, 15 bp, Homo sapiens
cgttctgtgctgccc

SEQ ID NO: 308964 - DNA, 15 bp, Homo sapiens
tcgttctgtgctgcc

SEQ ID NO: 308965 - DNA, 15 bp, Homo sapiens
atcgttctgtgctgc

SEQ ID NO: 308966 - DNA, 15 bp, Homo sapiens
tatcgttctgtgctg

SEQ ID NO: 308967 - DNA, 15 bp, Homo sapiens
ttatcgttctgtgct

SEQ ID NO: 308968 - DNA, 15 bp, Homo sapiens
attatcgttctgtgc

SEQ ID NO: 308969 - DNA, 15 bp, Homo sapiens
tattatcgttctgtg

SEQ ID NO: 308970 - DNA, 15 bp, Homo sapiens
atattatcgttctgt

SEQ ID NO: 308971 - DNA, 15 bp, Homo sapiens
aatattatcgttctg

SEQ ID NO: 308972 - DNA, 15 bp, Homo sapiens
aaatattatcgttct

SEQ ID NO: 308973 - DNA, 15 bp, Homo sapiens
caaatattatcgttc

SEQ ID NO: 308974 - DNA, 15 bp, Homo sapiens
acaaatattatcgtt

SEQ ID NO: 308975 - DNA, 15 bp, Homo sapiens
tacaaatattatcgt

SEQ ID NO: 308976 - DNA, 15 bp, Homo sapiens
ttacaaatattatcg

SEQ ID NO: 308977 - DNA, 15 bp, Homo sapiens
attacaaatattatc

SEQ ID NO: 308978 - DNA, 15 bp, Homo sapiens
tattacaaatattat

SEQ ID NO: 308979 - DNA, 15 bp, Homo sapiens
atattacaaatatta

SEQ ID NO: 308980 - DNA, 15 bp, Homo sapiens
gatattacaaatatt

SEQ ID NO: 308981 - DNA, 15 bp, Homo sapiens
agatattacaaatat

SEQ ID NO: 308982 - DNA, 15 bp, Homo sapiens
gagatattacaaata

SEQ ID NO: 308983 - DNA, 15 bp, Homo sapiens
agagatattacaaat

SEQ ID NO: 308984 - DNA, 15 bp, Homo sapiens
cagagatattacaaa

SEQ ID NO: 308985 - DNA, 15 bp, Homo sapiens
gcagagatattacaa

SEQ ID NO: 308986 - DNA, 15 bp, Homo sapiens
ggcagagatattaca

SEQ ID NO: 308987 - DNA, 15 bp, Homo sapiens
aggcagagatattac

SEQ ID NO: 308988 - DNA, 15 bp, Homo sapiens
aaggcagagatatta

SEQ ID NO: 308989 - DNA, 15 bp, Homo sapiens
caaggcagagatatt

SEQ ID NO: 308990 - DNA, 15 bp, Homo sapiens
tcaaggcagagatat

SEQ ID NO: 308991 - DNA, 15 bp, Homo sapiens
ctcaaggcagagata

SEQ ID NO: 308992 - DNA, 15 bp, Homo sapiens
actcaaggcagagat

SEQ ID NO: 308993 - DNA, 15 bp, Homo sapiens
aactcaaggcagaga

SEQ ID NO: 308994 - DNA, 15 bp, Homo sapiens
taactcaaggcagag

SEQ ID NO: 308995 - DNA, 15 bp, Homo sapiens
ataactcaaggcaga

SEQ ID NO: 308996 - DNA, 15 bp, Homo sapiens
cataactcaaggcag

SEQ ID NO: 308997 - DNA, 15 bp, Homo sapiens
gcataactcaaggca

SEQ ID NO: 308998 - DNA, 15 bp, Homo sapiens
ggcataactcaaggc

SEQ ID NO: 308999 - DNA, 15 bp, Homo sapiens
aggcataactcaagg

SEQ ID NO: 309000 - DNA, 15 bp, Homo sapiens
caggcataactcaag

SEQ ID NO: 309001 - DNA, 15 bp, Homo sapiens
tcaggcataactcaa

SEQ ID NO: 309002 - DNA, 15 bp, Homo sapiens
gtcaggcataactca

SEQ ID NO: 309003 - DNA, 15 bp, Homo sapiens
tgtcaggcataactc

SEQ ID NO: 309004 - DNA, 15 bp, Homo sapiens
atgtcaggcataact

SEQ ID NO: 309005 - DNA, 15 bp, Homo sapiens
tatgtcaggcataac

SEQ ID NO: 309006 - DNA, 15 bp, Homo sapiens
atatgtcaggcataa

SEQ ID NO: 309007 - DNA, 15 bp, Homo sapiens
aatatgtcaggcata

SEQ ID NO: 309008 - DNA, 15 bp, Homo sapiens
aaatatgtcaggcat

SEQ ID NO: 309009 - DNA, 15 bp, Homo sapiens
taaatatgtcaggca

SEQ ID NO: 309010 - DNA, 15 bp, Homo sapiens
ctaaatatgtcaggc

SEQ ID NO: 309011 - DNA, 15 bp, Homo sapiens
actaaatatgtcagg

SEQ ID NO: 309012 - DNA, 15 bp, Homo sapiens
tactaaatatgtcag

SEQ ID NO: 309013 - DNA, 15 bp, Homo sapiens
atactaaatatgtca

SEQ ID NO: 309014 - DNA, 15 bp, Homo sapiens
catactaaatatgtc

SEQ ID NO: 309015 - DNA, 15 bp, Homo sapiens
ccatactaaatatgt

SEQ ID NO: 309016 - DNA, 15 bp, Homo sapiens
accatactaaatatg

SEQ ID NO: 309017 - DNA, 15 bp, Homo sapiens
caccatactaaatat

SEQ ID NO: 309018 - DNA, 15 bp, Homo sapiens
acaccatactaaata

SEQ ID NO: 309019 - DNA, 15 bp, Homo sapiens
tacaccatactaaat

SEQ ID NO: 309020 - DNA, 15 bp, Homo sapiens
ttacaccatactaaa

SEQ ID NO: 309021 - DNA, 15 bp, Homo sapiens
tttacaccatactaa

SEQ ID NO: 309022 - DNA, 15 bp, Homo sapiens
atttacaccatacta

SEQ ID NO: 309023 - DNA, 15 bp, Homo sapiens
gatttacaccatact

SEQ ID NO: 309024 - DNA, 15 bp, Homo sapiens
agatttacaccatac

SEQ ID NO: 309025 - DNA, 15 bp, Homo sapiens
cagatttacaccata

SEQ ID NO: 309026 - DNA, 15 bp, Homo sapiens
acagatttacaccat

SEQ ID NO: 309027 - DNA, 15 bp, Homo sapiens
gacagatttacacca

SEQ ID NO: 309028 - DNA, 15 bp, Homo sapiens
agacagatttacacc

SEQ ID NO: 309029 - DNA, 15 bp, Homo sapiens
cagacagatttacac

SEQ ID NO: 309030 - DNA, 15 bp, Homo sapiens
tcagacagatttaca

SEQ ID NO: 309031 - DNA, 15 bp, Homo sapiens
ttcagacagatttac

SEQ ID NO: 309032 - DNA, 15 bp, Homo sapiens
attcagacagattta

SEQ ID NO: 309033 - DNA, 15 bp, Homo sapiens
tattcagacagattt

SEQ ID NO: 309034 - DNA, 15 bp, Homo sapiens
ttattcagacagatt

SEQ ID NO: 309035 - DNA, 15 bp, Homo sapiens
attattcagacagat

SEQ ID NO: 309036 - DNA, 15 bp, Homo sapiens
cattattcagacaga

SEQ ID NO: 309037 - DNA, 15 bp, Homo sapiens
acattattcagacag

SEQ ID NO: 309038 - DNA, 15 bp, Homo sapiens
aacattattcagaca

SEQ ID NO: 309039 - DNA, 15 bp, Homo sapiens
taacattattcagac

SEQ ID NO: 309040 - DNA, 15 bp, Homo sapiens
ataacattattcaga

SEQ ID NO: 309041 - DNA, 15 bp, Homo sapiens
aataacattattcag

SEQ ID NO: 309042 - DNA, 15 bp, Homo sapiens
caaataacattattc

SEQ ID NO: 309043 - DNA, 15 bp, Homo sapiens
tcaaataacattatt

SEQ ID NO: 309044 - DNA, 15 bp, Homo sapiens
ttcaaataacattat

SEQ ID NO: 309045 - DNA, 15 bp, Homo sapiens
cttcaaataacatta

SEQ ID NO: 309046 - DNA, 15 bp, Homo sapiens
acttcaaataacatt

SEQ ID NO: 309047 - DNA, 15 bp, Homo sapiens
tacttcaaataacat

SEQ ID NO: 309048 - DNA, 15 bp, Homo sapiens
atacttcaaataaca

SEQ ID NO: 309049 - DNA, 15 bp, Homo sapiens
aatacttcaaataac

SEQ ID NO: 309050 - DNA, 15 bp, Homo sapiens
taatacttcaaataa

SEQ ID NO: 309051 - DNA, 15 bp, Homo sapiens
ttaatacttcaaata

SEQ ID NO: 309052 - DNA, 15 bp, Homo sapiens
attaatacttcaaat

SEQ ID NO: 309053 - DNA, 15 bp, Homo sapiens
aattaatacttcaaa

SEQ ID NO: 309054 - DNA, 15 bp, Homo sapiens
gaattaatacttcaa

SEQ ID NO: 309055 - DNA, 15 bp, Homo sapiens
tgaattaatacttca

SEQ ID NO: 309056 - DNA, 15 bp, Homo sapiens
atgaattaatacttc

SEQ ID NO: 309057 - DNA, 15 bp, Homo sapiens
tatgaattaatactt

SEQ ID NO: 309058 - DNA, 15 bp, Homo sapiens
ctatgaattaatact

SEQ ID NO: 309059 - DNA, 15 bp, Homo sapiens
tctatgaattaatac

SEQ ID NO: 309060 - DNA, 15 bp, Homo sapiens
ttctatgaattaata

SEQ ID NO: 309061 - DNA, 15 bp, Homo sapiens
attctatgaattaat

SEQ ID NO: 309062 - DNA, 15 bp, Homo sapiens
aattctatgaattaa

SEQ ID NO: 309063 - DNA, 15 bp, Homo sapiens
gaattctatgaatta

SEQ ID NO: 309064 - DNA, 15 bp, Homo sapiens
agaattctatgaatt

SEQ ID NO: 309065 - DNA, 15 bp, Homo sapiens
cagaattctatgaat

SEQ ID NO: 309066 - DNA, 15 bp, Homo sapiens
acagaattctatgaa

SEQ ID NO: 309067 - DNA, 15 bp, Homo sapiens
tacagaattctatga

SEQ ID NO: 309068 - DNA, 15 bp, Homo sapiens
gtacagaattctatg

SEQ ID NO: 309069 - DNA, 15 bp, Homo sapiens
agtacagaattctat

SEQ ID NO: 309070 - DNA, 15 bp, Homo sapiens
cagtacagaattcta

SEQ ID NO: 309071 - DNA, 15 bp, Homo sapiens
acagtacagaattct

SEQ ID NO: 309072 - DNA, 15 bp, Homo sapiens
cacagtacagaattc

SEQ ID NO: 309073 - DNA, 15 bp, Homo sapiens
acacagtacagaatt

SEQ ID NO: 309074 - DNA, 15 bp, Homo sapiens
tacacagtacagaat

SEQ ID NO: 309075 - DNA, 15 bp, Homo sapiens
ttacacagtacagaa

SEQ ID NO: 309076 - DNA, 15 bp, Homo sapiens
attacacagtacaga

SEQ ID NO: 309077 - DNA, 15 bp, Homo sapiens
aattacacagtacag

SEQ ID NO: 309078 - DNA, 15 bp, Homo sapiens
aaattacacagtaca

SEQ ID NO: 309079 - DNA, 15 bp, Homo sapiens
taaattacacagtac

SEQ ID NO: 309080 - DNA, 15 bp, Homo sapiens
ctaaattacacagta

SEQ ID NO: 309081 - DNA, 15 bp, Homo sapiens
cctaaattacacagt

SEQ ID NO: 309082 - DNA, 15 bp, Homo sapiens
acctaaattacacag

SEQ ID NO: 309083 - DNA, 15 bp, Homo sapiens
cacctaaattacaca

SEQ ID NO: 309084 - DNA, 15 bp, Homo sapiens
acacctaaattacac

SEQ ID NO: 309085 - DNA, 15 bp, Homo sapiens
cacacctaaattaca

SEQ ID NO: 309086 - DNA, 15 bp, Homo sapiens
acacacctaaattac

SEQ ID NO: 309087 - DNA, 15 bp, Homo sapiens
cacacacctaaatta

SEQ ID NO: 309088 - DNA, 15 bp, Homo sapiens
acacacacctaaatt

SEQ ID NO: 309089 - DNA, 15 bp, Homo sapiens
tacacacacctaaat

SEQ ID NO: 309090 - DNA, 15 bp, Homo sapiens
ttacacacacctaaa

SEQ ID NO: 309091 - DNA, 15 bp, Homo sapiens
tttacacacacctaa

SEQ ID NO: 309092 - DNA, 15 bp, Homo sapiens
atttacacacaccta

SEQ ID NO: 309093 - DNA, 15 bp, Homo sapiens
gatttacacacacct

SEQ ID NO: 309094 - DNA, 15 bp, Homo sapiens
agatttacacacacc

SEQ ID NO: 309095 - DNA, 15 bp, Homo sapiens
cagatttacacacac

SEQ ID NO: 309096 - DNA, 15 bp, Homo sapiens
acagatttacacaca

SEQ ID NO: 309097 - DNA, 15 bp, Homo sapiens
cacagatttacacac

SEQ ID NO: 309098 - DNA, 15 bp, Homo sapiens
acacagatttacaca

SEQ ID NO: 309099 - DNA, 15 bp, Homo sapiens
cacacagatttacac

SEQ ID NO: 309100 - DNA, 15 bp, Homo sapiens
acacacagatttaca

SEQ ID NO: 309101 - DNA, 15 bp, Homo sapiens
tacacacagatttac

SEQ ID NO: 309102 - DNA, 15 bp, Homo sapiens
atacacacagattta

SEQ ID NO: 309103 - DNA, 15 bp, Homo sapiens
tatacacacagattt

SEQ ID NO: 309104 - DNA, 15 bp, Homo sapiens
ttatacacacagatt

SEQ ID NO: 309105 - DNA, 15 bp, Homo sapiens
gttatacacacagat

SEQ ID NO: 309106 - DNA, 15 bp, Homo sapiens
agttatacacacaga

SEQ ID NO: 309107 - DNA, 15 bp, Homo sapiens
cagttatacacacag

SEQ ID NO: 309108 - DNA, 15 bp, Homo sapiens
tcagttatacacaca

SEQ ID NO: 309109 - DNA, 15 bp, Homo sapiens
ttcagttatacacac

SEQ ID NO: 309110 - DNA, 15 bp, Homo sapiens
tttcagttatacaca

SEQ ID NO: 309111 - DNA, 15 bp, Homo sapiens
atttcagttatacac

SEQ ID NO: 309112 - DNA, 15 bp, Homo sapiens
gatttcagttataca

SEQ ID NO: 309113 - DNA, 15 bp, Homo sapiens
agatttcagttatac

SEQ ID NO: 309114 - DNA, 15 bp, Homo sapiens
aagatttcagttata

SEQ ID NO: 309115 - DNA, 15 bp, Homo sapiens
taagatttcagttat

SEQ ID NO: 309116 - DNA, 15 bp, Homo sapiens
ctaagatttcagtta

SEQ ID NO: 309117 - DNA, 15 bp, Homo sapiens
tctaagatttcagtt

SEQ ID NO: 309118 - DNA, 15 bp, Homo sapiens
atctaagatttcagt

SEQ ID NO: 309119 - DNA, 15 bp, Homo sapiens
tatctaagatttcag

SEQ ID NO: 309120 - DNA, 15 bp, Homo sapiens
atatctaagatttca

SEQ ID NO: 309121 - DNA, 15 bp, Homo sapiens
catatctaagatttc

SEQ ID NO: 309122 - DNA, 15 bp, Homo sapiens
tcatatctaagattt

SEQ ID NO: 309123 - DNA, 15 bp, Homo sapiens
ttcatatctaagatt

SEQ ID NO: 309124 - DNA, 15 bp, Homo sapiens
gttcatatctaagat

SEQ ID NO: 309125 - DNA, 15 bp, Homo sapiens
ggttcatatctaaga

SEQ ID NO: 309126 - DNA, 15 bp, Homo sapiens
tggttcatatctaag

SEQ ID NO: 309127 - DNA, 15 bp, Homo sapiens
atggttcatatctaa

SEQ ID NO: 309128 - DNA, 15 bp, Homo sapiens
tatggttcatatcta

SEQ ID NO: 309129 - DNA, 15 bp, Homo sapiens
ctatggttcatatct

SEQ ID NO: 309130 - DNA, 15 bp, Homo sapiens
actatggttcatatc

SEQ ID NO: 309131 - DNA, 15 bp, Homo sapiens
aactatggttcatat

SEQ ID NO: 309132 - DNA, 15 bp, Homo sapiens
taactatggttcata

SEQ ID NO: 309133 - DNA, 15 bp, Homo sapiens
ataactatggttcat

SEQ ID NO: 309134 - DNA, 15 bp, Homo sapiens
gataactatggttca

SEQ ID NO: 309135 - DNA, 15 bp, Homo sapiens
cgataactatggttc

SEQ ID NO: 309136 - DNA, 15 bp, Homo sapiens
gcgataactatggtt

SEQ ID NO: 309137 - DNA, 15 bp, Homo sapiens
agcgataactatggt

SEQ ID NO: 309138 - DNA, 15 bp, Homo sapiens
tagcgataactatgg

SEQ ID NO: 309139 - DNA, 15 bp, Homo sapiens
ttagcgataactatg

SEQ ID NO: 309140 - DNA, 15 bp, Homo sapiens
tttagcgataactat

SEQ ID NO: 309141 - DNA, 15 bp, Homo sapiens
ttttagcgataacta

SEQ ID NO: 309142 - DNA, 15 bp, Homo sapiens
tttttagcgataact

SEQ ID NO: 309143 - DNA, 15 bp, Homo sapiens
ttttttagcgataac

SEQ ID NO: 309144 - DNA, 15 bp, Homo sapiens
tttttttagcgataa

SEQ ID NO: 309145 - DNA, 15 bp, Homo sapiens
atttttttagcgata

SEQ ID NO: 309146 - DNA, 15 bp, Homo sapiens
aatttttttagcgat

SEQ ID NO: 309147 - DNA, 15 bp, Homo sapiens
aaatttttttagcga

SEQ ID NO: 309148 - DNA, 15 bp, Homo sapiens
aaaatttttttagcg

SEQ ID NO: 309149 - DNA, 15 bp, Homo sapiens
aaaaatttttttagc

SEQ ID NO: 309150 - DNA, 15 bp, Homo sapiens
taaaaatttttttag

SEQ ID NO: 309151 - DNA, 15 bp, Homo sapiens
ctaaaaattttttta

SEQ ID NO: 309152 - DNA, 15 bp, Homo sapiens
tctaaaaattttttt

SEQ ID NO: 309153 - DNA, 15 bp, Homo sapiens
ttctaaaaatttttt

SEQ ID NO: 309154 - DNA, 15 bp, Homo sapiens
cttctaaaaattttt

SEQ ID NO: 309155 - DNA, 15 bp, Homo sapiens
ccttctaaaaatttt

SEQ ID NO: 309156 - DNA, 15 bp, Homo sapiens
tccttctaaaaattt

SEQ ID NO: 309157 - DNA, 15 bp, Homo sapiens
ctccttctaaaaatt

SEQ ID NO: 309158 - DNA, 15 bp, Homo sapiens
tctccttctaaaaat

SEQ ID NO: 309159 - DNA, 15 bp, Homo sapiens
ttctccttctaaaaa

SEQ ID NO: 309160 - DNA, 15 bp, Homo sapiens
attctccttctaaaa

SEQ ID NO: 309161 - DNA, 15 bp, Homo sapiens
gattctccttctaaa

SEQ ID NO: 309162 - DNA, 15 bp, Homo sapiens
tgattctccttctaa

SEQ ID NO: 309163 - DNA, 15 bp, Homo sapiens
gtgattctccttcta

SEQ ID NO: 309164 - DNA, 15 bp, Homo sapiens
tgtgattctccttct

SEQ ID NO: 309165 - DNA, 15 bp, Homo sapiens
ttgtgattctccttc

SEQ ID NO: 309166 - DNA, 15 bp, Homo sapiens
tttgtgattctcctt

SEQ ID NO: 309167 - DNA, 15 bp, Homo sapiens
ttttgtgattctcct

SEQ ID NO: 309168 - DNA, 15 bp, Homo sapiens
tttttgtgattctcc

SEQ ID NO: 309169 - DNA, 15 bp, Homo sapiens
gtttttgtgattctc

SEQ ID NO: 309170 - DNA, 15 bp, Homo sapiens
tgtttttgtgattct

SEQ ID NO: 309171 - DNA, 15 bp, Homo sapiens
ttgtttttgtgattc

SEQ ID NO: 309172 - DNA, 15 bp, Homo sapiens
cttgtttttgtgatt

SEQ ID NO: 309173 - DNA, 15 bp, Homo sapiens
tcttgtttttgtgat

SEQ ID NO: 309174 - DNA, 15 bp, Homo sapiens
atcttgtttttgtga

SEQ ID NO: 309175 - DNA, 15 bp, Homo sapiens
tatcttgtttttgtg

SEQ ID NO: 309176 - DNA, 15 bp, Homo sapiens
ttatcttgtttttgt

SEQ ID NO: 309177 - DNA, 15 bp, Homo sapiens
gttatcttgtttttg

SEQ ID NO: 309178 - DNA, 15 bp, Homo sapiens
tgttatcttgttttt

SEQ ID NO: 309179 - DNA, 15 bp, Homo sapiens
ctgttatcttgtttt

SEQ ID NO: 309180 - DNA, 15 bp, Homo sapiens
actgttatcttgttt

SEQ ID NO: 309181 - DNA, 15 bp, Homo sapiens
tactgttatcttgtt

SEQ ID NO: 309182 - DNA, 15 bp, Homo sapiens
atactgttatcttgt

SEQ ID NO: 309183 - DNA, 15 bp, Homo sapiens
aatactgttatcttg

SEQ ID NO: 309184 - DNA, 15 bp, Homo sapiens
aaatactgttatctt

SEQ ID NO: 309185 - DNA, 15 bp, Homo sapiens
taaatactgttatct

SEQ ID NO: 309186 - DNA, 15 bp, Homo sapiens
ttaaatactgttatc

SEQ ID NO: 309187 - DNA, 15 bp, Homo sapiens
attaaatactgttat

SEQ ID NO: 309188 - DNA, 15 bp, Homo sapiens
tattaaatactgtta

SEQ ID NO: 309189 - DNA, 15 bp, Homo sapiens
atattaaatactgtt

SEQ ID NO: 309190 - DNA, 15 bp, Homo sapiens
gatattaaatactgt

SEQ ID NO: 309191 - DNA, 15 bp, Homo sapiens
tgatattaaatactg

SEQ ID NO: 309192 - DNA, 15 bp, Homo sapiens
ttgatattaaatact

SEQ ID NO: 309193 - DNA, 15 bp, Homo sapiens
attgatattaaatac

SEQ ID NO: 309194 - DNA, 15 bp, Homo sapiens
tattgatattaaata

SEQ ID NO: 309195 - DNA, 15 bp, Homo sapiens
ttattgatattaaat

SEQ ID NO: 309196 - DNA, 15 bp, Homo sapiens
tttattgatattaaa

SEQ ID NO: 309197 - DNA, 15 bp, Homo sapiens
atttattgatattaa

SEQ ID NO: 309198 - DNA, 15 bp, Homo sapiens
aatttattgatatta

SEQ ID NO: 309199 - DNA, 15 bp, Homo sapiens
caatttattgatatt

SEQ ID NO: 309200 - DNA, 15 bp, Homo sapiens
acaatttattgatat

SEQ ID NO: 309201 - DNA, 15 bp, Homo sapiens
aacaatttattgata

SEQ ID NO: 309202 - DNA, 15 bp, Homo sapiens
aaacaatttattgat

SEQ ID NO: 309203 - DNA, 15 bp, Homo sapiens
aaaacaatttattga

SEQ ID NO: 309204 - DNA, 15 bp, Homo sapiens
aaaaacaatttattg

SEQ ID NO: 309205 - DNA, 15 bp, Homo sapiens
aaaaaacaatttatt

SEQ ID NO: 309206 - DNA, 15 bp, Homo sapiens
taaaaaacaatttat

SEQ ID NO: 309207 - DNA, 15 bp, Homo sapiens
ttaaaaaacaattta

SEQ ID NO: 309208 - DNA, 15 bp, Homo sapiens
cttaaaaaacaattt

SEQ ID NO: 309209 - DNA, 15 bp, Homo sapiens
gcttaaaaaacaatt

SEQ ID NO: 309210 - DNA, 15 bp, Homo sapiens
agcttaaaaaacaat

SEQ ID NO: 309211 - DNA, 15 bp, Homo sapiens
cagcttaaaaaacaa

SEQ ID NO: 309212 - DNA, 15 bp, Homo sapiens
ccagcttaaaaaaca

SEQ ID NO: 309213 - DNA, 15 bp, Homo sapiens
tccagcttaaaaaac

SEQ ID NO: 309214 - DNA, 15 bp, Homo sapiens
ttccagcttaaaaaa

SEQ ID NO: 309215 - DNA, 15 bp, Homo sapiens
attccagcttaaaaa

SEQ ID NO: 309216 - DNA, 15 bp, Homo sapiens
gattccagcttaaaa

SEQ ID NO: 309217 - DNA, 15 bp, Homo sapiens
tgattccagcttaaa

SEQ ID NO: 309218 - DNA, 15 bp, Homo sapiens
gtgattccagcttaa

SEQ ID NO: 309219 - DNA, 15 bp, Homo sapiens
ggtgattccagctta

SEQ ID NO: 309220 - DNA, 15 bp, Homo sapiens
aggtgattccagctt

SEQ ID NO: 309221 - DNA, 15 bp, Homo sapiens
aaggtgattccagct

SEQ ID NO: 309222 - DNA, 15 bp, Homo sapiens
taaggtgattccagc

SEQ ID NO: 309223 - DNA, 15 bp, Homo sapiens
ataaggtgattccag

SEQ ID NO: 309224 - DNA, 15 bp, Homo sapiens
cataaggtgattcca

SEQ ID NO: 309225 - DNA, 15 bp, Homo sapiens
ccataaggtgattcc

SEQ ID NO: 309226 - DNA, 15 bp, Homo sapiens
accataaggtgattc

SEQ ID NO: 309227 - DNA, 15 bp, Homo sapiens
gaccataaggtgatt

SEQ ID NO: 309228 - DNA, 15 bp, Homo sapiens
agaccataaggtgat

SEQ ID NO: 309229 - DNA, 15 bp, Homo sapiens
gagaccataaggtga

SEQ ID NO: 309230 - DNA, 15 bp, Homo sapiens
tgagaccataaggtg

SEQ ID NO: 309231 - DNA, 15 bp, Homo sapiens
ttgagaccataaggt

SEQ ID NO: 309232 - DNA, 15 bp, Homo sapiens
attgagaccataagg

SEQ ID NO: 309233 - DNA, 15 bp, Homo sapiens
tattgagaccataag

SEQ ID NO: 309234 - DNA, 15 bp, Homo sapiens
gtattgagaccataa

SEQ ID NO: 309235 - DNA, 15 bp, Homo sapiens
ggtattgagaccata

SEQ ID NO: 309236 - DNA, 15 bp, Homo sapiens
tggtattgagaccat

SEQ ID NO: 309237 - DNA, 15 bp, Homo sapiens
gtggtattgagacca

SEQ ID NO: 309238 - DNA, 15 bp, Homo sapiens
agtggtattgagacc

SEQ ID NO: 309239 - DNA, 15 bp, Homo sapiens
tagtggtattgagac

SEQ ID NO: 309240 - DNA, 15 bp, Homo sapiens
atagtggtattgaga

SEQ ID NO: 309241 - DNA, 15 bp, Homo sapiens
tatagtggtattgag

SEQ ID NO: 309242 - DNA, 15 bp, Homo sapiens
ttatagtggtattga

SEQ ID NO: 309243 - DNA, 15 bp, Homo sapiens
attatagtggtattg

SEQ ID NO: 309244 - DNA, 15 bp, Homo sapiens
aattatagtggtatt

SEQ ID NO: 309245 - DNA, 15 bp, Homo sapiens
taattatagtggtat

SEQ ID NO: 309246 - DNA, 15 bp, Homo sapiens
ataattatagtggta

SEQ ID NO: 309247 - DNA, 15 bp, Homo sapiens
aataattatagtggt

SEQ ID NO: 309248 - DNA, 15 bp, Homo sapiens
taataattatagtgg

SEQ ID NO: 309249 - DNA, 15 bp, Homo sapiens
ttaataattatagtg

SEQ ID NO: 309250 - DNA, 15 bp, Homo sapiens
tttaataattatagt

SEQ ID NO: 309251 - DNA, 15 bp, Homo sapiens
ttttaataattatag

SEQ ID NO: 309252 - DNA, 15 bp, Homo sapiens
attttaataattata

SEQ ID NO: 309253 - DNA, 15 bp, Homo sapiens
aattttaataattat

SEQ ID NO: 309254 - DNA, 15 bp, Homo sapiens
caattttaataatta

SEQ ID NO: 309255 - DNA, 15 bp, Homo sapiens
acaattttaataatt

SEQ ID NO: 309256 - DNA, 15 bp, Homo sapiens
tacaattttaataat

SEQ ID NO: 309257 - DNA, 15 bp, Homo sapiens
gtacaattttaataa

SEQ ID NO: 309258 - DNA, 15 bp, Homo sapiens
tgtacaattttaata

SEQ ID NO: 309259 - DNA, 15 bp, Homo sapiens
atgtacaattttaat

SEQ ID NO: 309260 - DNA, 15 bp, Homo sapiens
aatgtacaattttaa

SEQ ID NO: 309261 - DNA, 15 bp, Homo sapiens
taatgtacaatttta

SEQ ID NO: 309262 - DNA, 15 bp, Homo sapiens
ataatgtacaatttt

SEQ ID NO: 309263 - DNA, 15 bp, Homo sapiens
tataatgtacaattt

SEQ ID NO: 309264 - DNA, 15 bp, Homo sapiens
gtataatgtacaatt

SEQ ID NO: 309265 - DNA, 15 bp, Homo sapiens
tgtataatgtacaat

SEQ ID NO: 309266 - DNA, 15 bp, Homo sapiens
atgtataatgtacaa

SEQ ID NO: 309267 - DNA, 15 bp, Homo sapiens
tatgtataatgtaca

SEQ ID NO: 309268 - DNA, 15 bp, Homo sapiens
atatgtataatgtac

SEQ ID NO: 309269 - DNA, 15 bp, Homo sapiens
tatatgtataatgta

SEQ ID NO: 309270 - DNA, 15 bp, Homo sapiens
atatatgtataatgt

SEQ ID NO: 309271 - DNA, 15 bp, Homo sapiens
tatatatgtataatg

SEQ ID NO: 309272 - DNA, 15 bp, Homo sapiens
ctatatatgtataat

SEQ ID NO: 309273 - DNA, 15 bp, Homo sapiens
gctatatatgtataa

SEQ ID NO: 309274 - DNA, 15 bp, Homo sapiens
agctatatatgtata

SEQ ID NO: 309275 - DNA, 15 bp, Homo sapiens
tagctatatatgtat

SEQ ID NO: 309276 - DNA, 15 bp, Homo sapiens
atagctatatatgta

SEQ ID NO: 309277 - DNA, 15 bp, Homo sapiens
aatagctatatatgt

SEQ ID NO: 309278 - DNA, 15 bp, Homo sapiens
aaatagctatatatg

SEQ ID NO: 309279 - DNA, 15 bp, Homo sapiens
aaaatagctatatat

SEQ ID NO: 309280 - DNA, 15 bp, Homo sapiens
aaaaatagctatata

SEQ ID NO: 309281 - DNA, 15 bp, Homo sapiens
aaaaaatagctatat

SEQ ID NO: 309282 - DNA, 15 bp, Homo sapiens
aaaaaaatagctata

SEQ ID NO: 309283 - DNA, 15 bp, Homo sapiens
gaaaaaaatagctat

SEQ ID NO: 309284 - DNA, 15 bp, Homo sapiens
agaaaaaaatagcta

SEQ ID NO: 309285 - DNA, 15 bp, Homo sapiens
tagaaaaaaatagct

SEQ ID NO: 309286 - DNA, 15 bp, Homo sapiens
ttagaaaaaaatagc

SEQ ID NO: 309287 - DNA, 15 bp, Homo sapiens
attagaaaaaaatag

SEQ ID NO: 309288 - DNA, 15 bp, Homo sapiens
tattagaaaaaaata

SEQ ID NO: 309289 - DNA, 15 bp, Homo sapiens
ttattagaaaaaaat

SEQ ID NO: 309290 - DNA, 15 bp, Homo sapiens
cttattagaaaaaaa

SEQ ID NO: 309291 - DNA, 15 bp, Homo sapiens
ccttattagaaaaaa

SEQ ID NO: 309292 - DNA, 15 bp, Homo sapiens
gccttattagaaaaa

SEQ ID NO: 309293 - DNA, 15 bp, Homo sapiens
tgccttattagaaaa

SEQ ID NO: 309294 - DNA, 15 bp, Homo sapiens
ctgccttattagaaa

SEQ ID NO: 309295 - DNA, 15 bp, Homo sapiens
actgccttattagaa

SEQ ID NO: 309296 - DNA, 15 bp, Homo sapiens
tactgccttattaga

SEQ ID NO: 309297 - DNA, 15 bp, Homo sapiens
ttactgccttattag

SEQ ID NO: 309298 - DNA, 15 bp, Homo sapiens
attactgccttatta

SEQ ID NO: 309299 - DNA, 15 bp, Homo sapiens
gattactgccttatt

SEQ ID NO: 309300 - DNA, 15 bp, Homo sapiens
ggattactgccttat

SEQ ID NO: 309301 - DNA, 15 bp, Homo sapiens
gggattactgcctta

SEQ ID NO: 309302 - DNA, 15 bp, Homo sapiens
ggggattactgcctt

SEQ ID NO: 309303 - DNA, 15 bp, Homo sapiens
tggggattactgcct

SEQ ID NO: 309304 - DNA, 15 bp, Homo sapiens
ctggggattactgcc

SEQ ID NO: 309305 - DNA, 15 bp, Homo sapiens
cctggggattactgc

SEQ ID NO: 309306 - DNA, 15 bp, Homo sapiens
tcctggggattactg

SEQ ID NO: 309307 - DNA, 15 bp, Homo sapiens
ttcctggggattact

SEQ ID NO: 309308 - DNA, 15 bp, Homo sapiens
tttcctggggattac

SEQ ID NO: 309309 - DNA, 15 bp, Homo sapiens
ttttcctggggatta

SEQ ID NO: 309310 - DNA, 15 bp, Homo sapiens
cttttcctggggatt

SEQ ID NO: 309311 - DNA, 15 bp, Homo sapiens
gcttttcctggggat

SEQ ID NO: 309312 - DNA, 15 bp, Homo sapiens
ggcttttcctgggga

SEQ ID NO: 309313 - DNA, 15 bp, Homo sapiens
tggcttttcctgggg

SEQ ID NO: 309314 - DNA, 15 bp, Homo sapiens
atggcttttcctggg

SEQ ID NO: 309315 - DNA, 15 bp, Homo sapiens
aatggcttttcctgg

SEQ ID NO: 309316 - DNA, 15 bp, Homo sapiens
aaatggcttttcctg

SEQ ID NO: 309317 - DNA, 15 bp, Homo sapiens
taaatggcttttcct

SEQ ID NO: 309318 - DNA, 15 bp, Homo sapiens
ataaatggcttttcc

SEQ ID NO: 309319 - DNA, 15 bp, Homo sapiens
aataaatggcttttc

SEQ ID NO: 309320 - DNA, 15 bp, Homo sapiens
taataaatggctttt

SEQ ID NO: 309321 - DNA, 15 bp, Homo sapiens
ttaataaatggcttt

SEQ ID NO: 309322 - DNA, 15 bp, Homo sapiens
tttaataaatggctt

SEQ ID NO: 309323 - DNA, 15 bp, Homo sapiens
ttttaataaatggct

SEQ ID NO: 309324 - DNA, 15 bp, Homo sapiens
attttaataaatggc

SEQ ID NO: 309325 - DNA, 15 bp, Homo sapiens
tattttaataaatgg

SEQ ID NO: 309326 - DNA, 15 bp, Homo sapiens
ctattttaataaatg

SEQ ID NO: 309327 - DNA, 15 bp, Homo sapiens
tctattttaataaat

SEQ ID NO: 309328 - DNA, 15 bp, Homo sapiens
ttctattttaataaa

SEQ ID NO: 309329 - DNA, 15 bp, Homo sapiens
attctattttaataa

SEQ ID NO: 309330 - DNA, 15 bp, Homo sapiens
aattctattttaata

SEQ ID NO: 309331 - DNA, 15 bp, Homo sapiens
taattctattttaat

SEQ ID NO: 309332 - DNA, 15 bp, Homo sapiens
ctaattctattttaa

SEQ ID NO: 309333 - DNA, 15 bp, Homo sapiens
tctaattctatttta

SEQ ID NO: 309334 - DNA, 15 bp, Homo sapiens
atctaattctatttt

SEQ ID NO: 309335 - DNA, 15 bp, Homo sapiens
tatctaattctattt

SEQ ID NO: 309336 - DNA, 15 bp, Homo sapiens
atatctaattctatt

SEQ ID NO: 309337 - DNA, 15 bp, Homo sapiens
catatctaattctat

SEQ ID NO: 309338 - DNA, 15 bp, Homo sapiens
tcatatctaattcta

SEQ ID NO: 309339 - DNA, 15 bp, Homo sapiens
atcatatctaattct

SEQ ID NO: 309340 - DNA, 15 bp, Homo sapiens
catcatatctaattc

SEQ ID NO: 309341 - DNA, 15 bp, Homo sapiens
tcatcatatctaatt

SEQ ID NO: 309342 - DNA, 15 bp, Homo sapiens
atcatcatatctaat

SEQ ID NO: 309343 - DNA, 15 bp, Homo sapiens
catcatcatatctaa

SEQ ID NO: 309344 - DNA, 15 bp, Homo sapiens
tcatcatcatatcta

SEQ ID NO: 309345 - DNA, 15 bp, Homo sapiens
gtcatcatcatatct

SEQ ID NO: 309346 - DNA, 15 bp, Homo sapiens
tgtcatcatcatatc

SEQ ID NO: 309347 - DNA, 15 bp, Homo sapiens
ttgtcatcatcatat

SEQ ID NO: 309348 - DNA, 15 bp, Homo sapiens
cttgtcatcatcata

SEQ ID NO: 309349 - DNA, 15 bp, Homo sapiens
gcttgtcatcatcat

SEQ ID NO: 309350 - DNA, 15 bp, Homo sapiens
tgcttgtcatcatca

SEQ ID NO: 309351 - DNA, 15 bp, Homo sapiens
ctgcttgtcatcatc

SEQ ID NO: 309352 - DNA, 15 bp, Homo sapiens
actgcttgtcatcat

SEQ ID NO: 309353 - DNA, 15 bp, Homo sapiens
aactgcttgtcatca

SEQ ID NO: 309354 - DNA, 15 bp, Homo sapiens
aaactgcttgtcatc

SEQ ID NO: 309355 - DNA, 15 bp, Homo sapiens
aaaactgcttgtcat

SEQ ID NO: 309356 - DNA, 15 bp, Homo sapiens
gaaaactgcttgtca

SEQ ID NO: 309357 - DNA, 15 bp, Homo sapiens
ggaaaactgcttgtc

SEQ ID NO: 309358 - DNA, 15 bp, Homo sapiens
aggaaaactgcttgt

SEQ ID NO: 309359 - DNA, 15 bp, Homo sapiens
taggaaaactgcttg

SEQ ID NO: 309360 - DNA, 15 bp, Homo sapiens
ataggaaaactgctt

SEQ ID NO: 309361 - DNA, 15 bp, Homo sapiens
aataggaaaactgct

SEQ ID NO: 309362 - DNA, 15 bp, Homo sapiens
taataggaaaactgc

SEQ ID NO: 309363 - DNA, 15 bp, Homo sapiens
ttaataggaaaactg

SEQ ID NO: 309364 - DNA, 15 bp, Homo sapiens
attaataggaaaact

SEQ ID NO: 309365 - DNA, 15 bp, Homo sapiens
tattaataggaaaac

SEQ ID NO: 309366 - DNA, 15 bp, Homo sapiens
atattaataggaaaa

SEQ ID NO: 309367 - DNA, 15 bp, Homo sapiens
tatattaataggaaa

SEQ ID NO: 309368 - DNA, 15 bp, Homo sapiens
atatattaataggaa

SEQ ID NO: 309369 - DNA, 15 bp, Homo sapiens
gatatattaatagga

SEQ ID NO: 309370 - DNA, 15 bp, Homo sapiens
agatatattaatagg

SEQ ID NO: 309371 - DNA, 15 bp, Homo sapiens
aagatatattaatag

SEQ ID NO: 309372 - DNA, 15 bp, Homo sapiens
aaagatatattaata

SEQ ID NO: 309373 - DNA, 15 bp, Homo sapiens
gaaagatatattaat

SEQ ID NO: 309374 - DNA, 15 bp, Homo sapiens
ggaaagatatattaa

SEQ ID NO: 309375 - DNA, 15 bp, Homo sapiens
gggaaagatatatta

SEQ ID NO: 309376 - DNA, 15 bp, Homo sapiens
tgggaaagatatatt

SEQ ID NO: 309377 - DNA, 15 bp, Homo sapiens
ctgggaaagatatat

SEQ ID NO: 309378 - DNA, 15 bp, Homo sapiens
gctgggaaagatata

SEQ ID NO: 309379 - DNA, 15 bp, Homo sapiens
agctgggaaagatat

SEQ ID NO: 309380 - DNA, 15 bp, Homo sapiens
aagctgggaaagata

SEQ ID NO: 309381 - DNA, 15 bp, Homo sapiens
caagctgggaaagat

SEQ ID NO: 309382 - DNA, 15 bp, Homo sapiens
gcaagctgggaaaga

SEQ ID NO: 309383 - DNA, 15 bp, Homo sapiens
tgcaagctgggaaag

SEQ ID NO: 309384 - DNA, 15 bp, Homo sapiens
atgcaagctgggaaa

SEQ ID NO: 309385 - DNA, 15 bp, Homo sapiens
aatgcaagctgggaa

SEQ ID NO: 309386 - DNA, 15 bp, Homo sapiens
aaatgcaagctggga

SEQ ID NO: 309387 - DNA, 15 bp, Homo sapiens
taaatgcaagctggg

SEQ ID NO: 309388 - DNA, 15 bp, Homo sapiens
ttaaatgcaagctgg

SEQ ID NO: 309389 - DNA, 15 bp, Homo sapiens
tttaaatgcaagctg

SEQ ID NO: 309390 - DNA, 15 bp, Homo sapiens
atttaaatgcaagct

SEQ ID NO: 309391 - DNA, 15 bp, Homo sapiens
tatttaaatgcaagc

SEQ ID NO: 309392 - DNA, 15 bp, Homo sapiens
ctatttaaatgcaag

SEQ ID NO: 309393 - DNA, 15 bp, Homo sapiens
actatttaaatgcaa

SEQ ID NO: 309394 - DNA, 15 bp, Homo sapiens
gactatttaaatgca

SEQ ID NO: 309395 - DNA, 15 bp, Homo sapiens
agactatttaaatgc

SEQ ID NO: 309396 - DNA, 15 bp, Homo sapiens
cagactatttaaatg

SEQ ID NO: 309397 - DNA, 15 bp, Homo sapiens
gcagactatttaaat

SEQ ID NO: 309398 - DNA, 15 bp, Homo sapiens
agcagactatttaaa

SEQ ID NO: 309399 - DNA, 15 bp, Homo sapiens
tagcagactatttaa

SEQ ID NO: 309400 - DNA, 15 bp, Homo sapiens
atagcagactattta

SEQ ID NO: 309401 - DNA, 15 bp, Homo sapiens
tatagcagactattt

SEQ ID NO: 309402 - DNA, 15 bp, Homo sapiens
ttatagcagactatt

SEQ ID NO: 309403 - DNA, 15 bp, Homo sapiens
attatagcagactat

SEQ ID NO: 309404 - DNA, 15 bp, Homo sapiens
tattatagcagacta

SEQ ID NO: 309405 - DNA, 15 bp, Homo sapiens
gtattatagcagact

SEQ ID NO: 309406 - DNA, 15 bp, Homo sapiens
ggtattatagcagac

SEQ ID NO: 309407 - DNA, 15 bp, Homo sapiens
tggtattatagcaga

SEQ ID NO: 309408 - DNA, 15 bp, Homo sapiens
ttggtattatagcag

SEQ ID NO: 309409 - DNA, 15 bp, Homo sapiens
attggtattatagca

SEQ ID NO: 309410 - DNA, 15 bp, Homo sapiens
aattggtattatagc

SEQ ID NO: 309411 - DNA, 15 bp, Homo sapiens
taattggtattatag

SEQ ID NO: 309412 - DNA, 15 bp, Homo sapiens
ttaattggtattata

SEQ ID NO: 309413 - DNA, 15 bp, Homo sapiens
tttaattggtattat

SEQ ID NO: 309414 - DNA, 15 bp, Homo sapiens
atttaattggtatta

SEQ ID NO: 309415 - DNA, 15 bp, Homo sapiens
tatttaattggtatt

SEQ ID NO: 309416 - DNA, 15 bp, Homo sapiens
ctatttaattggtat

SEQ ID NO: 309417 - DNA, 15 bp, Homo sapiens
tctatttaattggta

SEQ ID NO: 309418 - DNA, 15 bp, Homo sapiens
gtctatttaattggt

SEQ ID NO: 309419 - DNA, 15 bp, Homo sapiens
tgtctatttaattgg

SEQ ID NO: 309420 - DNA, 15 bp, Homo sapiens
ttgtctatttaattg

SEQ ID NO: 309421 - DNA, 15 bp, Homo sapiens
cttgtctatttaatt

SEQ ID NO: 309422 - DNA, 15 bp, Homo sapiens
tcttgtctatttaat

SEQ ID NO: 309423 - DNA, 15 bp, Homo sapiens
atcttgtctatttaa

SEQ ID NO: 309424 - DNA, 15 bp, Homo sapiens
catcttgtctattta

SEQ ID NO: 309425 - DNA, 15 bp, Homo sapiens
acatcttgtctattt

SEQ ID NO: 309426 - DNA, 15 bp, Homo sapiens
tacatcttgtctatt

SEQ ID NO: 309427 - DNA, 15 bp, Homo sapiens
atacatcttgtctat

SEQ ID NO: 309428 - DNA, 15 bp, Homo sapiens
gatacatcttgtcta

SEQ ID NO: 309429 - DNA, 15 bp, Homo sapiens
agatacatcttgtct

SEQ ID NO: 309430 - DNA, 15 bp, Homo sapiens
cagatacatcttgtc

SEQ ID NO: 309431 - DNA, 15 bp, Homo sapiens
ccagatacatcttgt

SEQ ID NO: 309432 - DNA, 15 bp, Homo sapiens
cccagatacatcttg

SEQ ID NO: 309433 - DNA, 15 bp, Homo sapiens
acccagatacatctt

SEQ ID NO: 309434 - DNA, 15 bp, Homo sapiens
cacccagatacatct

SEQ ID NO: 309435 - DNA, 15 bp, Homo sapiens
acacccagatacatc

SEQ ID NO: 309436 - DNA, 15 bp, Homo sapiens
tacacccagatacat

SEQ ID NO: 309437 - DNA, 15 bp, Homo sapiens
gtacacccagataca

SEQ ID NO: 309438 - DNA, 15 bp, Homo sapiens
tgtacacccagatac

SEQ ID NO: 309439 - DNA, 15 bp, Homo sapiens
ttgtacacccagata

SEQ ID NO: 309440 - DNA, 15 bp, Homo sapiens
gttgtacacccagat

SEQ ID NO: 309441 - DNA, 15 bp, Homo sapiens
ggttgtacacccaga

SEQ ID NO: 309442 - DNA, 15 bp, Homo sapiens
aggttgtacacccag

SEQ ID NO: 309443 - DNA, 15 bp, Homo sapiens
aaggttgtacaccca

SEQ ID NO: 309444 - DNA, 15 bp, Homo sapiens
caaggttgtacaccc

SEQ ID NO: 309445 - DNA, 15 bp, Homo sapiens
tcaaggttgtacacc

SEQ ID NO: 309446 - DNA, 15 bp, Homo sapiens
ttcaaggttgtacac

SEQ ID NO: 309447 - DNA, 15 bp, Homo sapiens
cttcaaggttgtaca

SEQ ID NO: 309448 - DNA, 15 bp, Homo sapiens
acttcaaggttgtac

SEQ ID NO: 309449 - DNA, 15 bp, Homo sapiens
cacttcaaggttgta

SEQ ID NO: 309450 - DNA, 15 bp, Homo sapiens
acacttcaaggttgt

SEQ ID NO: 309451 - DNA, 15 bp, Homo sapiens
tacacttcaaggttg

SEQ ID NO: 309452 - DNA, 15 bp, Homo sapiens
atacacttcaaggtt

SEQ ID NO: 309453 - DNA, 15 bp, Homo sapiens
catacacttcaaggt

SEQ ID NO: 309454 - DNA, 15 bp, Homo sapiens
acatacacttcaagg

SEQ ID NO: 309455 - DNA, 15 bp, Homo sapiens
tacatacacttcaag

SEQ ID NO: 309456 - DNA, 15 bp, Homo sapiens
atacatacacttcaa

SEQ ID NO: 309457 - DNA, 15 bp, Homo sapiens
tatacatacacttca

SEQ ID NO: 309458 - DNA, 15 bp, Homo sapiens
ttatacatacacttc

SEQ ID NO: 309459 - DNA, 15 bp, Homo sapiens
attatacatacactt

SEQ ID NO: 309460 - DNA, 15 bp, Homo sapiens
gattatacatacact

SEQ ID NO: 309461 - DNA, 15 bp, Homo sapiens
agattatacatacac

SEQ ID NO: 309462 - DNA, 15 bp, Homo sapiens
cagattatacataca

SEQ ID NO: 309463 - DNA, 15 bp, Homo sapiens
acagattatacatac

SEQ ID NO: 309464 - DNA, 15 bp, Homo sapiens
cacagattatacata

SEQ ID NO: 309465 - DNA, 15 bp, Homo sapiens
tcacagattatacat

SEQ ID NO: 309466 - DNA, 15 bp, Homo sapiens
atcacagattataca

SEQ ID NO: 309467 - DNA, 15 bp, Homo sapiens
aatcacagattatac

SEQ ID NO: 309468 - DNA, 15 bp, Homo sapiens
gaatcacagattata

SEQ ID NO: 309469 - DNA, 15 bp, Homo sapiens
agaatcacagattat

SEQ ID NO: 309470 - DNA, 15 bp, Homo sapiens
aagaatcacagatta

SEQ ID NO: 309471 - DNA, 15 bp, Homo sapiens
taagaatcacagatt

SEQ ID NO: 309472 - DNA, 15 bp, Homo sapiens
ctaagaatcacagat

SEQ ID NO: 309473 - DNA, 15 bp, Homo sapiens
gctaagaatcacaga

SEQ ID NO: 309474 - DNA, 15 bp, Homo sapiens
ggctaagaatcacag

SEQ ID NO: 309475 - DNA, 15 bp, Homo sapiens
tggctaagaatcaca

SEQ ID NO: 309476 - DNA, 15 bp, Homo sapiens
ttggctaagaatcac

SEQ ID NO: 309477 - DNA, 15 bp, Homo sapiens
gttggctaagaatca

SEQ ID NO: 309478 - DNA, 15 bp, Homo sapiens
agttggctaagaatc

SEQ ID NO: 309479 - DNA, 15 bp, Homo sapiens
aagttggctaagaat

SEQ ID NO: 309480 - DNA, 15 bp, Homo sapiens
caagttggctaagaa

SEQ ID NO: 309481 - DNA, 15 bp, Homo sapiens
tcaagttggctaaga

SEQ ID NO: 309482 - DNA, 15 bp, Homo sapiens
ttcaagttggctaag

SEQ ID NO: 309483 - DNA, 15 bp, Homo sapiens
tttcaagttggctaa

SEQ ID NO: 309484 - DNA, 15 bp, Homo sapiens
atttcaagttggcta

SEQ ID NO: 309485 - DNA, 15 bp, Homo sapiens
catttcaagttggct

SEQ ID NO: 309486 - DNA, 15 bp, Homo sapiens
tcatttcaagttggc

SEQ ID NO: 309487 - DNA, 15 bp, Homo sapiens
ttcatttcaagttgg

SEQ ID NO: 309488 - DNA, 15 bp, Homo sapiens
cttcatttcaagttg

SEQ ID NO: 309489 - DNA, 15 bp, Homo sapiens
tcttcatttcaagtt

SEQ ID NO: 309490 - DNA, 15 bp, Homo sapiens
gtcttcatttcaagt

SEQ ID NO: 309491 - DNA, 15 bp, Homo sapiens
agtcttcatttcaag

SEQ ID NO: 309492 - DNA, 15 bp, Homo sapiens
aagtcttcatttcaa

SEQ ID NO: 309493 - DNA, 15 bp, Homo sapiens
aaagtcttcatttca

SEQ ID NO: 309494 - DNA, 15 bp, Homo sapiens
aaaagtcttcatttc

SEQ ID NO: 309495 - DNA, 15 bp, Homo sapiens
gaaaagtcttcattt

SEQ ID NO: 309496 - DNA, 15 bp, Homo sapiens
ggaaaagtcttcatt

SEQ ID NO: 309497 - DNA, 15 bp, Homo sapiens
aggaaaagtcttcat

SEQ ID NO: 309498 - DNA, 15 bp, Homo sapiens
aaggaaaagtcttca

SEQ ID NO: 309499 - DNA, 15 bp, Homo sapiens
aaaggaaaagtcttc

SEQ ID NO: 309500 - DNA, 15 bp, Homo sapiens
taaaggaaaagtctt

SEQ ID NO: 309501 - DNA, 15 bp, Homo sapiens
ttaaaggaaaagtct

SEQ ID NO: 309502 - DNA, 15 bp, Homo sapiens
tttaaaggaaaagtc

SEQ ID NO: 309503 - DNA, 15 bp, Homo sapiens
atttaaaggaaaagt

SEQ ID NO: 309504 - DNA, 15 bp, Homo sapiens
tatttaaaggaaaag

SEQ ID NO: 309505 - DNA, 15 bp, Homo sapiens
atatttaaaggaaaa

SEQ ID NO: 309506 - DNA, 15 bp, Homo sapiens
tatatttaaaggaaa

SEQ ID NO: 309507 - DNA, 15 bp, Homo sapiens
atatatttaaaggaa

SEQ ID NO: 309508 - DNA, 15 bp, Homo sapiens
gatatatttaaagga

SEQ ID NO: 309509 - DNA, 15 bp, Homo sapiens
agatatatttaaagg

SEQ ID NO: 309510 - DNA, 15 bp, Homo sapiens
tagatatatttaaag

SEQ ID NO: 309511 - DNA, 15 bp, Homo sapiens
ctagatatatttaaa

SEQ ID NO: 309512 - DNA, 15 bp, Homo sapiens
cctagatatatttaa

SEQ ID NO: 309513 - DNA, 15 bp, Homo sapiens
acctagatatattta

SEQ ID NO: 309514 - DNA, 15 bp, Homo sapiens
tacctagatatattt

SEQ ID NO: 309515 - DNA, 15 bp, Homo sapiens
atacctagatatatt

SEQ ID NO: 309516 - DNA, 15 bp, Homo sapiens
gatacctagatatat

SEQ ID NO: 309517 - DNA, 15 bp, Homo sapiens
agatacctagatata

SEQ ID NO: 309518 - DNA, 15 bp, Homo sapiens
aagatacctagatat

SEQ ID NO: 309519 - DNA, 15 bp, Homo sapiens
aaagatacctagata

SEQ ID NO: 309520 - DNA, 15 bp, Homo sapiens
gaaagatacctagat

SEQ ID NO: 309521 - DNA, 15 bp, Homo sapiens
agaaagatacctaga

SEQ ID NO: 309522 - DNA, 15 bp, Homo sapiens
gagaaagatacctag

SEQ ID NO: 309523 - DNA, 15 bp, Homo sapiens
ggagaaagataccta

SEQ ID NO: 309524 - DNA, 15 bp, Homo sapiens
aggagaaagatacct

SEQ ID NO: 309525 - DNA, 15 bp, Homo sapiens
caggagaaagatacc

SEQ ID NO: 309526 - DNA, 15 bp, Homo sapiens
acaggagaaagatac

SEQ ID NO: 309527 - DNA, 15 bp, Homo sapiens
tacaggagaaagata

SEQ ID NO: 309528 - DNA, 15 bp, Homo sapiens
ttacaggagaaagat

SEQ ID NO: 309529 - DNA, 15 bp, Homo sapiens
cttacaggagaaaga

SEQ ID NO: 309530 - DNA, 15 bp, Homo sapiens
tcttacaggagaaag

SEQ ID NO: 309531 - DNA, 15 bp, Homo sapiens
atcttacaggagaaa

SEQ ID NO: 309532 - DNA, 15 bp, Homo sapiens
gatcttacaggagaa

SEQ ID NO: 309533 - DNA, 15 bp, Homo sapiens
agatcttacaggaga

SEQ ID NO: 309534 - DNA, 15 bp, Homo sapiens
gagatcttacaggag

SEQ ID NO: 309535 - DNA, 15 bp, Homo sapiens
ggagatcttacagga

SEQ ID NO: 309536 - DNA, 15 bp, Homo sapiens
tggagatcttacagg

SEQ ID NO: 309537 - DNA, 15 bp, Homo sapiens
ttggagatcttacag

SEQ ID NO: 309538 - DNA, 15 bp, Homo sapiens
tttggagatcttaca

SEQ ID NO: 309539 - DNA, 15 bp, Homo sapiens
ctttggagatcttac

SEQ ID NO: 309540 - DNA, 15 bp, Homo sapiens
tctttggagatctta

SEQ ID NO: 309541 - DNA, 15 bp, Homo sapiens
ttctttggagatctt

SEQ ID NO: 309542 - DNA, 15 bp, Homo sapiens
tttctttggagatct

SEQ ID NO: 309543 - DNA, 15 bp, Homo sapiens
ttttctttggagatc

SEQ ID NO: 309544 - DNA, 15 bp, Homo sapiens
tttttctttggagat

SEQ ID NO: 309545 - DNA, 15 bp, Homo sapiens
ttttttctttggaga

SEQ ID NO: 309546 - DNA, 15 bp, Homo sapiens
cttttttctttggag

SEQ ID NO: 309547 - DNA, 15 bp, Homo sapiens
ccttttttctttgga

SEQ ID NO: 309548 - DNA, 15 bp, Homo sapiens
accttttttctttgg

SEQ ID NO: 309549 - DNA, 15 bp, Homo sapiens
aaccttttttctttg

SEQ ID NO: 309550 - DNA, 15 bp, Homo sapiens
gaaccttttttcttt

SEQ ID NO: 309551 - DNA, 15 bp, Homo sapiens
tgaaccttttttctt

SEQ ID NO: 309552 - DNA, 15 bp, Homo sapiens
ttgaaccttttttct

SEQ ID NO: 309553 - DNA, 15 bp, Homo sapiens
gttgaaccttttttc

SEQ ID NO: 309554 - DNA, 15 bp, Homo sapiens
agttgaacctttttt

SEQ ID NO: 309555 - DNA, 15 bp, Homo sapiens
tagttgaaccttttt

SEQ ID NO: 309556 - DNA, 15 bp, Homo sapiens
gtagttgaacctttt

SEQ ID NO: 309557 - DNA, 15 bp, Homo sapiens
cgtagttgaaccttt

SEQ ID NO: 309558 - DNA, 15 bp, Homo sapiens
gcgtagttgaacctt

SEQ ID NO: 309559 - DNA, 15 bp, Homo sapiens
cgcgtagttgaacct

SEQ ID NO: 309560 - DNA, 15 bp, Homo sapiens
acgcgtagttgaacc

SEQ ID NO: 309561 - DNA, 15 bp, Homo sapiens
cacgcgtagttgaac

SEQ ID NO: 309562 - DNA, 15 bp, Homo sapiens
acacgcgtagttgaa

SEQ ID NO: 309563 - DNA, 15 bp, Homo sapiens
tacacgcgtagttga

SEQ ID NO: 309564 - DNA, 15 bp, Homo sapiens
ttacacgcgtagttg

SEQ ID NO: 309565 - DNA, 15 bp, Homo sapiens
tttacacgcgtagtt

SEQ ID NO: 309566 - DNA, 15 bp, Homo sapiens
atttacacgcgtagt

SEQ ID NO: 309567 - DNA, 15 bp, Homo sapiens
aatttacacgcgtag

SEQ ID NO: 309568 - DNA, 15 bp, Homo sapiens
gaatttacacgcgta

SEQ ID NO: 309569 - DNA, 15 bp, Homo sapiens
agaatttacacgcgt

SEQ ID NO: 309570 - DNA, 15 bp, Homo sapiens
tagaatttacacgcg

SEQ ID NO: 309571 - DNA, 15 bp, Homo sapiens
gtagaatttacacgc

SEQ ID NO: 309572 - DNA, 15 bp, Homo sapiens
agtagaatttacacg

SEQ ID NO: 309573 - DNA, 15 bp, Homo sapiens
cagtagaatttacac

SEQ ID NO: 309574 - DNA, 15 bp, Homo sapiens
gcagtagaatttaca

SEQ ID NO: 309575 - DNA, 15 bp, Homo sapiens
tgcagtagaatttac

SEQ ID NO: 309576 - DNA, 15 bp, Homo sapiens
ttgcagtagaattta

SEQ ID NO: 309577 - DNA, 15 bp, Homo sapiens
tttgcagtagaattt

SEQ ID NO: 309578 - DNA, 15 bp, Homo sapiens
atttgcagtagaatt

SEQ ID NO: 309579 - DNA, 15 bp, Homo sapiens
catttgcagtagaat

SEQ ID NO: 309580 - DNA, 15 bp, Homo sapiens
gcatttgcagtagaa

SEQ ID NO: 309581 - DNA, 15 bp, Homo sapiens
tgcatttgcagtaga

SEQ ID NO: 309582 - DNA, 15 bp, Homo sapiens
ctgcatttgcagtag

SEQ ID NO: 309583 - DNA, 15 bp, Homo sapiens
tctgcatttgcagta

SEQ ID NO: 309584 - DNA, 15 bp, Homo sapiens
ctctgcatttgcagt

SEQ ID NO: 309585 - DNA, 15 bp, Homo sapiens
tctctgcatttgcag

SEQ ID NO: 309586 - DNA, 15 bp, Homo sapiens
gtctctgcatttgca

SEQ ID NO: 309587 - DNA, 15 bp, Homo sapiens
tgtctctgcatttgc

SEQ ID NO: 309588 - DNA, 15 bp, Homo sapiens
gtgtctctgcatttg

SEQ ID NO: 309589 - DNA, 15 bp, Homo sapiens
tgtgtctctgcattt

SEQ ID NO: 309590 - DNA, 15 bp, Homo sapiens
ttgtgtctctgcatt

SEQ ID NO: 309591 - DNA, 15 bp, Homo sapiens
cttgtgtctctgcat

SEQ ID NO: 309592 - DNA, 15 bp, Homo sapiens
gcttgtgtctctgca

SEQ ID NO: 309593 - DNA, 15 bp, Homo sapiens
tgcttgtgtctctgc

SEQ ID NO: 309594 - DNA, 15 bp, Homo sapiens
ttgcttgtgtctctg

SEQ ID NO: 309595 - DNA, 15 bp, Homo sapiens
gttgcttgtgtctct

SEQ ID NO: 309596 - DNA, 15 bp, Homo sapiens
ggttgcttgtgtctc

SEQ ID NO: 309597 - DNA, 15 bp, Homo sapiens
aggttgcttgtgtct

SEQ ID NO: 309598 - DNA, 15 bp, Homo sapiens
gaggttgcttgtgtc

SEQ ID NO: 309599 - DNA, 15 bp, Homo sapiens
tgaggttgcttgtgt

SEQ ID NO: 309600 - DNA, 15 bp, Homo sapiens
ctgaggttgcttgtg

SEQ ID NO: 309601 - DNA, 15 bp, Homo sapiens
gctgaggttgcttgt

SEQ ID NO: 309602 - DNA, 15 bp, Homo sapiens
ggctgaggttgcttg

SEQ ID NO: 309603 - DNA, 15 bp, Homo sapiens
aggctgaggttgctt

SEQ ID NO: 309604 - DNA, 15 bp, Homo sapiens
aaggctgaggttgct

SEQ ID NO: 309605 - DNA, 15 bp, Homo sapiens
gaaggctgaggttgc

SEQ ID NO: 309606 - DNA, 15 bp, Homo sapiens
ggaaggctgaggttg

SEQ ID NO: 309607 - DNA, 15 bp, Homo sapiens
tggaaggctgaggtt

SEQ ID NO: 309608 - DNA, 15 bp, Homo sapiens
ctggaaggctgaggt

SEQ ID NO: 309609 - DNA, 15 bp, Homo sapiens
tctggaaggctgagg

SEQ ID NO: 309610 - DNA, 15 bp, Homo sapiens
gtctggaaggctgag

SEQ ID NO: 309611 - DNA, 15 bp, Homo sapiens
ggtctggaaggctga

SEQ ID NO: 309612 - DNA, 15 bp, Homo sapiens
gggtctggaaggctg

SEQ ID NO: 309613 - DNA, 15 bp, Homo sapiens
tgggtctggaaggct

SEQ ID NO: 309614 - DNA, 15 bp, Homo sapiens
ctgggtctggaaggc

SEQ ID NO: 309615 - DNA, 15 bp, Homo sapiens
tctgggtctggaagg

SEQ ID NO: 309616 - DNA, 15 bp, Homo sapiens
ttctgggtctggaag

SEQ ID NO: 309617 - DNA, 15 bp, Homo sapiens
cttctgggtctggaa

SEQ ID NO: 309618 - DNA, 15 bp, Homo sapiens
gcttctgggtctgga

SEQ ID NO: 309619 - DNA, 15 bp, Homo sapiens
ggcttctgggtctgg

SEQ ID NO: 309620 - DNA, 15 bp, Homo sapiens
tggcttctgggtctg

SEQ ID NO: 309621 - DNA, 15 bp, Homo sapiens
atggcttctgggtct

SEQ ID NO: 309622 - DNA, 15 bp, Homo sapiens
aatggcttctgggtc

SEQ ID NO: 309623 - DNA, 15 bp, Homo sapiens
caatggcttctgggt

SEQ ID NO: 309624 - DNA, 15 bp, Homo sapiens
tcaatggcttctggg

SEQ ID NO: 309625 - DNA, 15 bp, Homo sapiens
ttcaatggcttctgg

SEQ ID NO: 309626 - DNA, 15 bp, Homo sapiens
tttcaatggcttctg

SEQ ID NO: 309627 - DNA, 15 bp, Homo sapiens
atttcaatggcttct

SEQ ID NO: 309628 - DNA, 15 bp, Homo sapiens
gatttcaatggcttc

SEQ ID NO: 309629 - DNA, 15 bp, Homo sapiens
agatttcaatggctt

SEQ ID NO: 309630 - DNA, 15 bp, Homo sapiens
tagatttcaatggct

SEQ ID NO: 309631 - DNA, 15 bp, Homo sapiens
gtagatttcaatggc

SEQ ID NO: 309632 - DNA, 15 bp, Homo sapiens
ggtagatttcaatgg

SEQ ID NO: 309633 - DNA, 15 bp, Homo sapiens
aggtagatttcaatg

SEQ ID NO: 309634 - DNA, 15 bp, Homo sapiens
gaggtagatttcaat

SEQ ID NO: 309635 - DNA, 15 bp, Homo sapiens
agaggtagatttcaa

SEQ ID NO: 309636 - DNA, 15 bp, Homo sapiens
gagaggtagatttca

SEQ ID NO: 309637 - DNA, 15 bp, Homo sapiens
agagaggtagatttc

SEQ ID NO: 309638 - DNA, 15 bp, Homo sapiens
aagagaggtagattt

SEQ ID NO: 309639 - DNA, 15 bp, Homo sapiens
aaagagaggtagatt

SEQ ID NO: 309640 - DNA, 15 bp, Homo sapiens
gaaagagaggtagat

SEQ ID NO: 309641 - DNA, 15 bp, Homo sapiens
tgaaagagaggtaga

SEQ ID NO: 309642 - DNA, 15 bp, Homo sapiens
gtgaaagagaggtag

SEQ ID NO: 309643 - DNA, 15 bp, Homo sapiens
agtgaaagagaggta

SEQ ID NO: 309644 - DNA, 15 bp, Homo sapiens
cagtgaaagagaggt

SEQ ID NO: 309645 - DNA, 15 bp, Homo sapiens
acagtgaaagagagg

SEQ ID NO: 309646 - DNA, 15 bp, Homo sapiens
aacagtgaaagagag

SEQ ID NO: 309647 - DNA, 15 bp, Homo sapiens
aaacagtgaaagaga

SEQ ID NO: 309648 - DNA, 15 bp, Homo sapiens
aaaacagtgaaagag

SEQ ID NO: 309649 - DNA, 15 bp, Homo sapiens
caataaccctgattt

SEQ ID NO: 309650 - DNA, 15 bp, Homo sapiens
ccaataaccctgatt

SEQ ID NO: 309651 - DNA, 15 bp, Homo sapiens
cccaataaccctgat

SEQ ID NO: 309652 - DNA, 15 bp, Homo sapiens
tcccaataaccctga

SEQ ID NO: 309653 - DNA, 15 bp, Homo sapiens
atcccaataaccctg

SEQ ID NO: 309654 - DNA, 15 bp, Homo sapiens
tatcccaataaccct

SEQ ID NO: 309655 - DNA, 15 bp, Homo sapiens
atatcccaataaccc

SEQ ID NO: 309656 - DNA, 15 bp, Homo sapiens
tatatcccaataacc

SEQ ID NO: 309657 - DNA, 15 bp, Homo sapiens
atatatcccaataac

SEQ ID NO: 309658 - DNA, 15 bp, Homo sapiens
tatatatcccaataa

SEQ ID NO: 309659 - DNA, 15 bp, Homo sapiens
atatatatcccaata

SEQ ID NO: 309660 - DNA, 15 bp, Homo sapiens
gatatatatcccaat

SEQ ID NO: 309661 - DNA, 15 bp, Homo sapiens
tgatatatatcccaa

SEQ ID NO: 309662 - DNA, 15 bp, Homo sapiens
gtgatatatatccca

SEQ ID NO: 309663 - DNA, 15 bp, Homo sapiens
ggtgatatatatccc

SEQ ID NO: 309664 - DNA, 15 bp, Homo sapiens
aggtgatatatatcc

SEQ ID NO: 309665 - DNA, 15 bp, Homo sapiens
gaggtgatatatatc

SEQ ID NO: 309666 - DNA, 15 bp, Homo sapiens
tgaggtgatatatat

SEQ ID NO: 309667 - DNA, 15 bp, Homo sapiens
ttgaggtgatatata

SEQ ID NO: 309668 - DNA, 15 bp, Homo sapiens
tttgaggtgatatat

SEQ ID NO: 309669 - DNA, 15 bp, Homo sapiens
gtttgaggtgatata

SEQ ID NO: 309670 - DNA, 15 bp, Homo sapiens
tgtttgaggtgatat

SEQ ID NO: 309671 - DNA, 15 bp, Homo sapiens
atgtttgaggtgata

SEQ ID NO: 309672 - DNA, 15 bp, Homo sapiens
aatgtttgaggtgat

SEQ ID NO: 309673 - DNA, 15 bp, Homo sapiens
aaatgtttgaggtga

SEQ ID NO: 309674 - DNA, 15 bp, Homo sapiens
aaaatgtttgaggtg

SEQ ID NO: 309675 - DNA, 15 bp, Homo sapiens
aaaaatgtttgaggt

SEQ ID NO: 309676 - DNA, 15 bp, Homo sapiens
gaaaaatgtttgagg

SEQ ID NO: 309677 - DNA, 15 bp, Homo sapiens
agaaaaatgtttgag

SEQ ID NO: 309678 - DNA, 15 bp, Homo sapiens
aagaaaaatgtttga

SEQ ID NO: 309679 - DNA, 15 bp, Homo sapiens
aaagaaaaatgtttg

SEQ ID NO: 309680 - DNA, 15 bp, Homo sapiens
caaagaaaaatgttt

SEQ ID NO: 309681 - DNA, 15 bp, Homo sapiens
gcaaagaaaaatgtt

SEQ ID NO: 309682 - DNA, 15 bp, Homo sapiens
tgcaaagaaaaatgt

SEQ ID NO: 309683 - DNA, 15 bp, Homo sapiens
atgcaaagaaaaatg

SEQ ID NO: 309684 - DNA, 15 bp, Homo sapiens
aatgcaaagaaaaat

SEQ ID NO: 309685 - DNA, 15 bp, Homo sapiens
caatgcaaagaaaaa

SEQ ID NO: 309686 - DNA, 15 bp, Homo sapiens
ccaatgcaaagaaaa

SEQ ID NO: 309687 - DNA, 15 bp, Homo sapiens
cccaatgcaaagaaa

SEQ ID NO: 309688 - DNA, 15 bp, Homo sapiens
tcccaatgcaaagaa

SEQ ID NO: 309689 - DNA, 15 bp, Homo sapiens
ttcccaatgcaaaga

SEQ ID NO: 309690 - DNA, 15 bp, Homo sapiens
gttcccaatgcaaag

SEQ ID NO: 309691 - DNA, 15 bp, Homo sapiens
tgttcccaatgcaaa

SEQ ID NO: 309692 - DNA, 15 bp, Homo sapiens
atgttcccaatgcaa

SEQ ID NO: 309693 - DNA, 15 bp, Homo sapiens
aatgttcccaatgca

SEQ ID NO: 309694 - DNA, 15 bp, Homo sapiens
taatgttcccaatgc

SEQ ID NO: 309695 - DNA, 15 bp, Homo sapiens
gtaatgttcccaatg

SEQ ID NO: 309696 - DNA, 15 bp, Homo sapiens
tgtaatgttcccaat

SEQ ID NO: 309697 - DNA, 15 bp, Homo sapiens
ttgtaatgttcccaa

SEQ ID NO: 309698 - DNA, 15 bp, Homo sapiens
attgtaatgttccca

SEQ ID NO: 309699 - DNA, 15 bp, Homo sapiens
aattgtaatgttccc

SEQ ID NO: 309700 - DNA, 15 bp, Homo sapiens
gaattgtaatgttcc

SEQ ID NO: 309701 - DNA, 15 bp, Homo sapiens
agaattgtaatgttc

SEQ ID NO: 309702 - DNA, 15 bp, Homo sapiens
tagaattgtaatgtt

SEQ ID NO: 309703 - DNA, 15 bp, Homo sapiens
ctagaattgtaatgt

SEQ ID NO: 309704 - DNA, 15 bp, Homo sapiens
gctagaattgtaatg

SEQ ID NO: 309705 - DNA, 15 bp, Homo sapiens
agctagaattgtaat

SEQ ID NO: 309706 - DNA, 15 bp, Homo sapiens
tagctagaattgtaa

SEQ ID NO: 309707 - DNA, 15 bp, Homo sapiens
atagctagaattgta

SEQ ID NO: 309708 - DNA, 15 bp, Homo sapiens
aatagctagaattgt

SEQ ID NO: 309709 - DNA, 15 bp, Homo sapiens
aaatagctagaattg

SEQ ID NO: 309710 - DNA, 15 bp, Homo sapiens
aaaatagctagaatt

SEQ ID NO: 309711 - DNA, 15 bp, Homo sapiens
caaaatagctagaat

SEQ ID NO: 309712 - DNA, 15 bp, Homo sapiens
tcaaaatagctagaa

SEQ ID NO: 309713 - DNA, 15 bp, Homo sapiens
ttcaaaatagctaga

SEQ ID NO: 309714 - DNA, 15 bp, Homo sapiens
tttcaaaatagctag

SEQ ID NO: 309715 - DNA, 15 bp, Homo sapiens
atttcaaaatagcta

SEQ ID NO: 309716 - DNA, 15 bp, Homo sapiens
tatttcaaaatagct

SEQ ID NO: 309717 - DNA, 15 bp, Homo sapiens
atatttcaaaatagc

SEQ ID NO: 309718 - DNA, 15 bp, Homo sapiens
catatttcaaaatag

SEQ ID NO: 309719 - DNA, 15 bp, Homo sapiens
gcatatttcaaaata

SEQ ID NO: 309720 - DNA, 15 bp, Homo sapiens
tgcatatttcaaaat

SEQ ID NO: 309721 - DNA, 15 bp, Homo sapiens
ctgcatatttcaaaa

SEQ ID NO: 309722 - DNA, 15 bp, Homo sapiens
actgcatatttcaaa

SEQ ID NO: 309723 - DNA, 15 bp, Homo sapiens
tactgcatatttcaa

SEQ ID NO: 309724 - DNA, 15 bp, Homo sapiens
ttactgcatatttca

SEQ ID NO: 309725 - DNA, 15 bp, Homo sapiens
tttactgcatatttc

SEQ ID NO: 309726 - DNA, 15 bp, Homo sapiens
atttactgcatattt

SEQ ID NO: 309727 - DNA, 15 bp, Homo sapiens
aatttactgcatatt

SEQ ID NO: 309728 - DNA, 15 bp, Homo sapiens
taatttactgcatat

SEQ ID NO: 309729 - DNA, 15 bp, Homo sapiens
ttaatttactgcata

SEQ ID NO: 309730 - DNA, 15 bp, Homo sapiens
gttaatttactgcat

SEQ ID NO: 309731 - DNA, 15 bp, Homo sapiens
agttaatttactgca

SEQ ID NO: 309732 - DNA, 15 bp, Homo sapiens
cagttaatttactgc

SEQ ID NO: 309733 - DNA, 15 bp, Homo sapiens
acagttaatttactg

SEQ ID NO: 309734 - DNA, 15 bp, Homo sapiens
tacagttaatttact

SEQ ID NO: 309735 - DNA, 15 bp, Homo sapiens
ttacagttaatttac

SEQ ID NO: 309736 - DNA, 15 bp, Homo sapiens
gttacagttaattta

SEQ ID NO: 309737 - DNA, 15 bp, Homo sapiens
agttacagttaattt

SEQ ID NO: 309738 - DNA, 15 bp, Homo sapiens
gagttacagttaatt

SEQ ID NO: 309739 - DNA, 15 bp, Homo sapiens
ggagttacagttaat

SEQ ID NO: 309740 - DNA, 15 bp, Homo sapiens
gggagttacagttaa

SEQ ID NO: 309741 - DNA, 15 bp, Homo sapiens
agggagttacagtta

SEQ ID NO: 309742 - DNA, 15 bp, Homo sapiens
tagggagttacagtt

SEQ ID NO: 309743 - DNA, 15 bp, Homo sapiens
gtagggagttacagt

SEQ ID NO: 309744 - DNA, 15 bp, Homo sapiens
cgtagggagttacag

SEQ ID NO: 309745 - DNA, 15 bp, Homo sapiens
ccgtagggagttaca

SEQ ID NO: 309746 - DNA, 15 bp, Homo sapiens
accgtagggagttac

SEQ ID NO: 309747 - DNA, 15 bp, Homo sapiens
taccgtagggagtta

SEQ ID NO: 309748 - DNA, 15 bp, Homo sapiens
gtaccgtagggagtt

SEQ ID NO: 309749 - DNA, 15 bp, Homo sapiens
agtaccgtagggagt

SEQ ID NO: 309750 - DNA, 15 bp, Homo sapiens
cagtaccgtagggag

SEQ ID NO: 309751 - DNA, 15 bp, Homo sapiens
acagtaccgtaggga

SEQ ID NO: 309752 - DNA, 15 bp, Homo sapiens
gacagtaccgtaggg

SEQ ID NO: 309753 - DNA, 15 bp, Homo sapiens
tgacagtaccgtagg

SEQ ID NO: 309754 - DNA, 15 bp, Homo sapiens
ttgacagtaccgtag

SEQ ID NO: 309755 - DNA, 15 bp, Homo sapiens
tttgacagtaccgta

SEQ ID NO: 309756 - DNA, 15 bp, Homo sapiens
atttgacagtaccgt

SEQ ID NO: 309757 - DNA, 15 bp, Homo sapiens
tatttgacagtaccg

SEQ ID NO: 309758 - DNA, 15 bp, Homo sapiens
gtatttgacagtacc

SEQ ID NO: 309759 - DNA, 15 bp, Homo sapiens
agtatttgacagtac

SEQ ID NO: 309760 - DNA, 15 bp, Homo sapiens
tagtatttgacagta

SEQ ID NO: 309761 - DNA, 15 bp, Homo sapiens
ctagtatttgacagt

SEQ ID NO: 309762 - DNA, 15 bp, Homo sapiens
tctagtatttgacag

SEQ ID NO: 309763 - DNA, 15 bp, Homo sapiens
ttctagtatttgaca

SEQ ID NO: 309764 - DNA, 15 bp, Homo sapiens
attctagtatttgac

SEQ ID NO: 309765 - DNA, 15 bp, Homo sapiens
cattctagtatttga

SEQ ID NO: 309766 - DNA, 15 bp, Homo sapiens
tcattctagtatttg

SEQ ID NO: 309767 - DNA, 15 bp, Homo sapiens
ttcattctagtattt

SEQ ID NO: 309768 - DNA, 15 bp, Homo sapiens
cttcattctagtatt

SEQ ID NO: 309769 - DNA, 15 bp, Homo sapiens
tcttcattctagtat

SEQ ID NO: 309770 - DNA, 15 bp, Homo sapiens
gtcttcattctagta

SEQ ID NO: 309771 - DNA, 15 bp, Homo sapiens
ggtcttcattctagt

SEQ ID NO: 309772 - DNA, 15 bp, Homo sapiens
tggtcttcattctag

SEQ ID NO: 309773 - DNA, 15 bp, Homo sapiens
gtggtcttcattcta

SEQ ID NO: 309774 - DNA, 15 bp, Homo sapiens
agtggtcttcattct

SEQ ID NO: 309775 - DNA, 15 bp, Homo sapiens
cagtggtcttcattc

SEQ ID NO: 309776 - DNA, 15 bp, Homo sapiens
gcagtggtcttcatt

SEQ ID NO: 309777 - DNA, 15 bp, Homo sapiens
agcagtggtcttcat

SEQ ID NO: 309778 - DNA, 15 bp, Homo sapiens
aagcagtggtcttca

SEQ ID NO: 309779 - DNA, 15 bp, Homo sapiens
aaagcagtggtcttc

SEQ ID NO: 309780 - DNA, 15 bp, Homo sapiens
aaaagcagtggtctt

SEQ ID NO: 309781 - DNA, 15 bp, Homo sapiens
caaaagcagtggtct

SEQ ID NO: 309782 - DNA, 15 bp, Homo sapiens
gcaaaagcagtggtc

SEQ ID NO: 309783 - DNA, 15 bp, Homo sapiens
tgcaaaagcagtggt

SEQ ID NO: 309784 - DNA, 15 bp, Homo sapiens
ttgcaaaagcagtgg

SEQ ID NO: 309785 - DNA, 15 bp, Homo sapiens
cttgcaaaagcagtg

SEQ ID NO: 309786 - DNA, 15 bp, Homo sapiens
ccttgcaaaagcagt

SEQ ID NO: 309787 - DNA, 15 bp, Homo sapiens
accttgcaaaagcag

SEQ ID NO: 309788 - DNA, 15 bp, Homo sapiens
gaccttgcaaaagca

SEQ ID NO: 309789 - DNA, 15 bp, Homo sapiens
ggaccttgcaaaagc

SEQ ID NO: 309790 - DNA, 15 bp, Homo sapiens
aggaccttgcaaaag

SEQ ID NO: 309791 - DNA, 15 bp, Homo sapiens
caggaccttgcaaaa

SEQ ID NO: 309792 - DNA, 15 bp, Homo sapiens
tcaggaccttgcaaa

SEQ ID NO: 309793 - DNA, 15 bp, Homo sapiens
ctcaggaccttgcaa

SEQ ID NO: 309794 - DNA, 15 bp, Homo sapiens
gctcaggaccttgca

SEQ ID NO: 309795 - DNA, 15 bp, Homo sapiens
cgctcaggaccttgc

SEQ ID NO: 309796 - DNA, 15 bp, Homo sapiens
gcgctcaggaccttg

SEQ ID NO: 309797 - DNA, 15 bp, Homo sapiens
ggcgctcaggacctt

SEQ ID NO: 309798 - DNA, 15 bp, Homo sapiens
tggcgctcaggacct

SEQ ID NO: 309799 - DNA, 15 bp, Homo sapiens
atggcgctcaggacc

SEQ ID NO: 309800 - DNA, 15 bp, Homo sapiens
gatggcgctcaggac

SEQ ID NO: 309801 - DNA, 15 bp, Homo sapiens
tgatggcgctcagga

SEQ ID NO: 309802 - DNA, 15 bp, Homo sapiens
ctgatggcgctcagg

SEQ ID NO: 309803 - DNA, 15 bp, Homo sapiens
actgatggcgctcag

SEQ ID NO: 309804 - DNA, 15 bp, Homo sapiens
aactgatggcgctca

SEQ ID NO: 309805 - DNA, 15 bp, Homo sapiens
aaactgatggcgctc

SEQ ID NO: 309806 - DNA, 15 bp, Homo sapiens
caaactgatggcgct

SEQ ID NO: 309807 - DNA, 15 bp, Homo sapiens
tcaaactgatggcgc

SEQ ID NO: 309808 - DNA, 15 bp, Homo sapiens
gtcaaactgatggcg

SEQ ID NO: 309809 - DNA, 15 bp, Homo sapiens
tgtcaaactgatggc

SEQ ID NO: 309810 - DNA, 15 bp, Homo sapiens
atgtcaaactgatgg

SEQ ID NO: 309811 - DNA, 15 bp, Homo sapiens
catgtcaaactgatg

SEQ ID NO: 309812 - DNA, 15 bp, Homo sapiens
tcatgtcaaactgat

SEQ ID NO: 309813 - DNA, 15 bp, Homo sapiens
ctcatgtcaaactga

SEQ ID NO: 309814 - DNA, 15 bp, Homo sapiens
gctcatgtcaaactg

SEQ ID NO: 309815 - DNA, 15 bp, Homo sapiens
tgctcatgtcaaact

SEQ ID NO: 309816 - DNA, 15 bp, Homo sapiens
atgctcatgtcaaac

SEQ ID NO: 309817 - DNA, 15 bp, Homo sapiens
tatgctcatgtcaaa

SEQ ID NO: 309818 - DNA, 15 bp, Homo sapiens
ttatgctcatgtcaa

SEQ ID NO: 309819 - DNA, 15 bp, Homo sapiens
attatgctcatgtca

SEQ ID NO: 309820 - DNA, 15 bp, Homo sapiens
tattatgctcatgtc

SEQ ID NO: 309821 - DNA, 15 bp, Homo sapiens
atattatgctcatgt

SEQ ID NO: 309822 - DNA, 15 bp, Homo sapiens
tatattatgctcatg

SEQ ID NO: 309823 - DNA, 15 bp, Homo sapiens
atatattatgctcat

SEQ ID NO: 309824 - DNA, 15 bp, Homo sapiens
tatatattatgctca

SEQ ID NO: 309825 - DNA, 15 bp, Homo sapiens
atatatattatgctc

SEQ ID NO: 309826 - DNA, 15 bp, Homo sapiens
catatatattatgct

SEQ ID NO: 309827 - DNA, 15 bp, Homo sapiens
ccatatatattatgc

SEQ ID NO: 309828 - DNA, 15 bp, Homo sapiens
gccatatatattatg

SEQ ID NO: 309829 - DNA, 15 bp, Homo sapiens
tgccatatatattat

SEQ ID NO: 309830 - DNA, 15 bp, Homo sapiens
ctgccatatatatta

SEQ ID NO: 309831 - DNA, 15 bp, Homo sapiens
gctgccatatatatt

SEQ ID NO: 309832 - DNA, 15 bp, Homo sapiens
ggctgccatatatat

SEQ ID NO: 309833 - DNA, 15 bp, Homo sapiens
tggctgccatatata

SEQ ID NO: 309834 - DNA, 15 bp, Homo sapiens
gtggctgccatatat

SEQ ID NO: 309835 - DNA, 15 bp, Homo sapiens
agtggctgccatata

SEQ ID NO: 309836 - DNA, 15 bp, Homo sapiens
aagtggctgccatat

SEQ ID NO: 309837 - DNA, 15 bp, Homo sapiens
caagtggctgccata

SEQ ID NO: 309838 - DNA, 15 bp, Homo sapiens
gcaagtggctgccat

SEQ ID NO: 309839 - DNA, 15 bp, Homo sapiens
ggcaagtggctgcca

SEQ ID NO: 309840 - DNA, 15 bp, Homo sapiens
tggcaagtggctgcc

SEQ ID NO: 309841 - DNA, 15 bp, Homo sapiens
ttggcaagtggctgc

SEQ ID NO: 309842 - DNA, 15 bp, Homo sapiens
gttggcaagtggctg

SEQ ID NO: 309843 - DNA, 15 bp, Homo sapiens
agttggcaagtggct

SEQ ID NO: 309844 - DNA, 15 bp, Homo sapiens
aagttggcaagtggc

SEQ ID NO: 309845 - DNA, 15 bp, Homo sapiens
taagttggcaagtgg

SEQ ID NO: 309846 - DNA, 15 bp, Homo sapiens
gtaagttggcaagtg

SEQ ID NO: 309847 - DNA, 15 bp, Homo sapiens
ggtaagttggcaagt

SEQ ID NO: 309848 - DNA, 15 bp, Homo sapiens
gggtaagttggcaag

SEQ ID NO: 309849 - DNA, 15 bp, Homo sapiens
tgggtaagttggcaa

SEQ ID NO: 309850 - DNA, 15 bp, Homo sapiens
ctgggtaagttggca

SEQ ID NO: 309851 - DNA, 15 bp, Homo sapiens
actgggtaagttggc

SEQ ID NO: 309852 - DNA, 15 bp, Homo sapiens
tactgggtaagttgg

SEQ ID NO: 309853 - DNA, 15 bp, Homo sapiens
gtactgggtaagttg

SEQ ID NO: 309854 - DNA, 15 bp, Homo sapiens
ggtactgggtaagtt

SEQ ID NO: 309855 - DNA, 15 bp, Homo sapiens
tggtactgggtaagt

SEQ ID NO: 309856 - DNA, 15 bp, Homo sapiens
atggtactgggtaag

SEQ ID NO: 309857 - DNA, 15 bp, Homo sapiens
gatggtactgggtaa

SEQ ID NO: 309858 - DNA, 15 bp, Homo sapiens
tgatggtactgggta

SEQ ID NO: 309859 - DNA, 15 bp, Homo sapiens
ttgatggtactgggt

SEQ ID NO: 309860 - DNA, 15 bp, Homo sapiens
attgatggtactggg

SEQ ID NO: 309861 - DNA, 15 bp, Homo sapiens
cattgatggtactgg

SEQ ID NO: 309862 - DNA, 15 bp, Homo sapiens
gcattgatggtactg

SEQ ID NO: 309863 - DNA, 15 bp, Homo sapiens
agcattgatggtact

SEQ ID NO: 309864 - DNA, 15 bp, Homo sapiens
cagcattgatggtac

SEQ ID NO: 309865 - DNA, 15 bp, Homo sapiens
acagcattgatggta

SEQ ID NO: 309866 - DNA, 15 bp, Homo sapiens
aacagcattgatggt

SEQ ID NO: 309867 - DNA, 15 bp, Homo sapiens
taacagcattgatgg

SEQ ID NO: 309868 - DNA, 15 bp, Homo sapiens
ttaacagcattgatg

SEQ ID NO: 309869 - DNA, 15 bp, Homo sapiens
gttaacagcattgat

SEQ ID NO: 309870 - DNA, 15 bp, Homo sapiens
tgttaacagcattga

SEQ ID NO: 309871 - DNA, 15 bp, Homo sapiens
ctgttaacagcattg

SEQ ID NO: 309872 - DNA, 15 bp, Homo sapiens
actgttaacagcatt

SEQ ID NO: 309873 - DNA, 15 bp, Homo sapiens
aactgttaacagcat

SEQ ID NO: 309874 - DNA, 15 bp, Homo sapiens
gaactgttaacagca

SEQ ID NO: 309875 - DNA, 15 bp, Homo sapiens
agaactgttaacagc

SEQ ID NO: 309876 - DNA, 15 bp, Homo sapiens
aagaactgttaacag

SEQ ID NO: 309877 - DNA, 15 bp, Homo sapiens
gaagaactgttaaca

SEQ ID NO: 309878 - DNA, 15 bp, Homo sapiens
tgaagaactgttaac

SEQ ID NO: 309879 - DNA, 15 bp, Homo sapiens
atgaagaactgttaa

SEQ ID NO: 309880 - DNA, 15 bp, Homo sapiens
gatgaagaactgtta

SEQ ID NO: 309881 - DNA, 15 bp, Homo sapiens
ggatgaagaactgtt

SEQ ID NO: 309882 - DNA, 15 bp, Homo sapiens
aggatgaagaactgt

SEQ ID NO: 309883 - DNA, 15 bp, Homo sapiens
aaggatgaagaactg

SEQ ID NO: 309884 - DNA, 15 bp, Homo sapiens
aaaggatgaagaact

SEQ ID NO: 309885 - DNA, 15 bp, Homo sapiens
aaaaggatgaagaac

SEQ ID NO: 309886 - DNA, 15 bp, Homo sapiens
aaaaaggatgaagaa

SEQ ID NO: 309887 - DNA, 15 bp, Homo sapiens
gaaaaaggatgaaga

SEQ ID NO: 309888 - DNA, 15 bp, Homo sapiens
ggaaaaaggatgaag

SEQ ID NO: 309889 - DNA, 15 bp, Homo sapiens
tggaaaaaggatgaa

SEQ ID NO: 309890 - DNA, 15 bp, Homo sapiens
ctggaaaaaggatga

SEQ ID NO: 309891 - DNA, 15 bp, Homo sapiens
gctggaaaaaggatg

SEQ ID NO: 309892 - DNA, 15 bp, Homo sapiens
agctggaaaaaggat

SEQ ID NO: 309893 - DNA, 15 bp, Homo sapiens
aagctggaaaaagga

SEQ ID NO: 309894 - DNA, 15 bp, Homo sapiens
gaagctggaaaaagg

SEQ ID NO: 309895 - DNA, 15 bp, Homo sapiens
agaagctggaaaaag

SEQ ID NO: 309896 - DNA, 15 bp, Homo sapiens
tagaagctggaaaaa

SEQ ID NO: 309897 - DNA, 15 bp, Homo sapiens
gtagaagctggaaaa

SEQ ID NO: 309898 - DNA, 15 bp, Homo sapiens
agtagaagctggaaa

SEQ ID NO: 309899 - DNA, 15 bp, Homo sapiens
gagtagaagctggaa

SEQ ID NO: 309900 - DNA, 15 bp, Homo sapiens
cgagtagaagctgga

SEQ ID NO: 309901 - DNA, 15 bp, Homo sapiens
tcgagtagaagctgg

SEQ ID NO: 309902 - DNA, 15 bp, Homo sapiens
ttcgagtagaagctg

SEQ ID NO: 309903 - DNA, 15 bp, Homo sapiens
gttcgagtagaagct

SEQ ID NO: 309904 - DNA, 15 bp, Homo sapiens
tgttcgagtagaagc

SEQ ID NO: 309905 - DNA, 15 bp, Homo sapiens
gtgttcgagtagaag

SEQ ID NO: 309906 - DNA, 15 bp, Homo sapiens
cgtgttcgagtagaa

SEQ ID NO: 309907 - DNA, 15 bp, Homo sapiens
tcgtgttcgagtaga

SEQ ID NO: 309908 - DNA, 15 bp, Homo sapiens
ttcgtgttcgagtag

SEQ ID NO: 309909 - DNA, 15 bp, Homo sapiens
attcgtgttcgagta

SEQ ID NO: 309910 - DNA, 15 bp, Homo sapiens
cattcgtgttcgagt

SEQ ID NO: 309911 - DNA, 15 bp, Homo sapiens
gcattcgtgttcgag

SEQ ID NO: 309912 - DNA, 15 bp, Homo sapiens
tgcattcgtgttcga

SEQ ID NO: 309913 - DNA, 15 bp, Homo sapiens
ttgcattcgtgttcg

SEQ ID NO: 309914 - DNA, 15 bp, Homo sapiens
tttgcattcgtgttc

SEQ ID NO: 309915 - DNA, 15 bp, Homo sapiens
ttttgcattcgtgtt

SEQ ID NO: 309916 - DNA, 15 bp, Homo sapiens
cttttgcattcgtgt

SEQ ID NO: 309917 - DNA, 15 bp, Homo sapiens
gcttttgcattcgtg

SEQ ID NO: 309918 - DNA, 15 bp, Homo sapiens
tgcttttgcattcgt

SEQ ID NO: 309919 - DNA, 15 bp, Homo sapiens
ctgcttttgcattcg

SEQ ID NO: 309920 - DNA, 15 bp, Homo sapiens
tctgcttttgcattc

SEQ ID NO: 309921 - DNA, 15 bp, Homo sapiens
ttctgcttttgcatt

SEQ ID NO: 309922 - DNA, 15 bp, Homo sapiens
tttctgcttttgcat

SEQ ID NO: 309923 - DNA, 15 bp, Homo sapiens
ttttctgcttttgca

SEQ ID NO: 309924 - DNA, 15 bp, Homo sapiens
attttctgcttttgc

SEQ ID NO: 309925 - DNA, 15 bp, Homo sapiens
cattttctgcttttg

SEQ ID NO: 309926 - DNA, 15 bp, Homo sapiens
tcattttctgctttt

SEQ ID NO: 309927 - DNA, 15 bp, Homo sapiens
ttcattttctgcttt

SEQ ID NO: 309928 - DNA, 15 bp, Homo sapiens
attcattttctgctt

SEQ ID NO: 309929 - DNA, 15 bp, Homo sapiens
cattcattttctgct

SEQ ID NO: 309930 - DNA, 15 bp, Homo sapiens
tcattcattttctgc

SEQ ID NO: 309931 - DNA, 15 bp, Homo sapiens
atcattcattttctg

SEQ ID NO: 309932 - DNA, 15 bp, Homo sapiens
tatcattcattttct

SEQ ID NO: 309933 - DNA, 15 bp, Homo sapiens
ctatcattcattttc

SEQ ID NO: 309934 - DNA, 15 bp, Homo sapiens
gctatcattcatttt

SEQ ID NO: 309935 - DNA, 15 bp, Homo sapiens
tgctatcattcattt

SEQ ID NO: 309936 - DNA, 15 bp, Homo sapiens
atgctatcattcatt

SEQ ID NO: 309937 - DNA, 15 bp, Homo sapiens
catgctatcattcat

SEQ ID NO: 309938 - DNA, 15 bp, Homo sapiens
ccatgctatcattca

SEQ ID NO: 309939 - DNA, 15 bp, Homo sapiens
tccatgctatcattc

SEQ ID NO: 309940 - DNA, 15 bp, Homo sapiens
atccatgctatcatt

SEQ ID NO: 309941 - DNA, 15 bp, Homo sapiens
tatccatgctatcat

SEQ ID NO: 309942 - DNA, 15 bp, Homo sapiens
gtatccatgctatca

SEQ ID NO: 309943 - DNA, 15 bp, Homo sapiens
ggtatccatgctatc

SEQ ID NO: 309944 - DNA, 15 bp, Homo sapiens
aggtatccatgctat

SEQ ID NO: 309945 - DNA, 15 bp, Homo sapiens
gaggtatccatgcta

SEQ ID NO: 309946 - DNA, 15 bp, Homo sapiens
tgaggtatccatgct

SEQ ID NO: 309947 - DNA, 15 bp, Homo sapiens
ttgaggtatccatgc

SEQ ID NO: 309948 - DNA, 15 bp, Homo sapiens
tttgaggtatccatg

SEQ ID NO: 309949 - DNA, 15 bp, Homo sapiens
gtttgaggtatccat

SEQ ID NO: 309950 - DNA, 15 bp, Homo sapiens
tgtttgaggtatcca

SEQ ID NO: 309951 - DNA, 15 bp, Homo sapiens
ttgtttgaggtatcc

SEQ ID NO: 309952 - DNA, 15 bp, Homo sapiens
cttgtttgaggtatc

SEQ ID NO: 309953 - DNA, 15 bp, Homo sapiens
ccttgtttgaggtat

SEQ ID NO: 309954 - DNA, 15 bp, Homo sapiens
tccttgtttgaggta

SEQ ID NO: 309955 - DNA, 15 bp, Homo sapiens
ttccttgtttgaggt

SEQ ID NO: 309956 - DNA, 15 bp, Homo sapiens
cttccttgtttgagg

SEQ ID NO: 309957 - DNA, 15 bp, Homo sapiens
tcttccttgtttgag

SEQ ID NO: 309958 - DNA, 15 bp, Homo sapiens
ctcttccttgtttga

SEQ ID NO: 309959 - DNA, 15 bp, Homo sapiens
tctcttccttgtttg

SEQ ID NO: 309960 - DNA, 15 bp, Homo sapiens
ttctcttccttgttt

SEQ ID NO: 309961 - DNA, 15 bp, Homo sapiens
tttctcttccttgtt

SEQ ID NO: 309962 - DNA, 15 bp, Homo sapiens
atttctcttccttgt

SEQ ID NO: 309963 - DNA, 15 bp, Homo sapiens
catttctcttccttg

SEQ ID NO: 309964 - DNA, 15 bp, Homo sapiens
tcatttctcttcctt

SEQ ID NO: 309965 - DNA, 15 bp, Homo sapiens
ctcatttctcttcct

SEQ ID NO: 309966 - DNA, 15 bp, Homo sapiens
cctcatttctcttcc

SEQ ID NO: 309967 - DNA, 15 bp, Homo sapiens
tcctcatttctcttc

SEQ ID NO: 309968 - DNA, 15 bp, Homo sapiens
atcctcatttctctt

SEQ ID NO: 309969 - DNA, 15 bp, Homo sapiens
gatcctcatttctct

SEQ ID NO: 309970 - DNA, 15 bp, Homo sapiens
agatcctcatttctc

SEQ ID NO: 309971 - DNA, 15 bp, Homo sapiens
gagatcctcatttct

SEQ ID NO: 309972 - DNA, 15 bp, Homo sapiens
tgagatcctcatttc

SEQ ID NO: 309973 - DNA, 15 bp, Homo sapiens
ctgagatcctcattt

SEQ ID NO: 309974 - DNA, 15 bp, Homo sapiens
cctgagatcctcatt

SEQ ID NO: 309975 - DNA, 15 bp, Homo sapiens
tcctgagatcctcat

SEQ ID NO: 309976 - DNA, 15 bp, Homo sapiens
gtcctgagatcctca

SEQ ID NO: 309977 - DNA, 15 bp, Homo sapiens
ggtcctgagatcctc

SEQ ID NO: 309978 - DNA, 15 bp, Homo sapiens
aggtcctgagatcct

SEQ ID NO: 309979 - DNA, 15 bp, Homo sapiens
aaggtcctgagatcc

SEQ ID NO: 309980 - DNA, 15 bp, Homo sapiens
caaggtcctgagatc

SEQ ID NO: 309981 - DNA, 15 bp, Homo sapiens
ccaaggtcctgagat

SEQ ID NO: 309982 - DNA, 15 bp, Homo sapiens
accaaggtcctgaga

SEQ ID NO: 309983 - DNA, 15 bp, Homo sapiens
caccaaggtcctgag

SEQ ID NO: 309984 - DNA, 15 bp, Homo sapiens
ccaccaaggtcctga

SEQ ID NO: 309985 - DNA, 15 bp, Homo sapiens
tccaccaaggtcctg

SEQ ID NO: 309986 - DNA, 15 bp, Homo sapiens
gtccaccaaggtcct

SEQ ID NO: 309987 - DNA, 15 bp, Homo sapiens
tgtccaccaaggtcc

SEQ ID NO: 309988 - DNA, 15 bp, Homo sapiens
gtgtccaccaaggtc

SEQ ID NO: 309989 - DNA, 15 bp, Homo sapiens
agtgtccaccaaggt

SEQ ID NO: 309990 - DNA, 15 bp, Homo sapiens
cagtgtccaccaagg

SEQ ID NO: 309991 - DNA, 15 bp, Homo sapiens
acagtgtccaccaag

SEQ ID NO: 309992 - DNA, 15 bp, Homo sapiens
cacagtgtccaccaa

SEQ ID NO: 309993 - DNA, 15 bp, Homo sapiens
acacagtgtccacca

SEQ ID NO: 309994 - DNA, 15 bp, Homo sapiens
tacacagtgtccacc

SEQ ID NO: 309995 - DNA, 15 bp, Homo sapiens
gtacacagtgtccac

SEQ ID NO: 309996 - DNA, 15 bp, Homo sapiens
tgtacacagtgtcca

SEQ ID NO: 309997 - DNA, 15 bp, Homo sapiens
gtgtacacagtgtcc

SEQ ID NO: 309998 - DNA, 15 bp, Homo sapiens
ggtgtacacagtgtc

SEQ ID NO: 309999 - DNA, 15 bp, Homo sapiens
aggtgtacacagtgt

SEQ ID NO: 310000 - DNA, 15 bp, Homo sapiens
gaggtgtacacagtg

SEQ ID NO: 310001 - DNA, 15 bp, Homo sapiens
agaggtgtacacagt

SEQ ID NO: 310002 - DNA, 15 bp, Homo sapiens
cagaggtgtacacag

SEQ ID NO: 310003 - DNA, 15 bp, Homo sapiens
ccagaggtgtacaca

SEQ ID NO: 310004 - DNA, 15 bp, Homo sapiens
tccagaggtgtacac

SEQ ID NO: 310005 - DNA, 15 bp, Homo sapiens
atccagaggtgtaca

SEQ ID NO: 310006 - DNA, 15 bp, Homo sapiens
aatccagaggtgtac

SEQ ID NO: 310007 - DNA, 15 bp, Homo sapiens
gaatccagaggtgta

SEQ ID NO: 310008 - DNA, 15 bp, Homo sapiens
tgaatccagaggtgt

SEQ ID NO: 310009 - DNA, 15 bp, Homo sapiens
atgaatccagaggtg

SEQ ID NO: 310010 - DNA, 15 bp, Homo sapiens
aatgaatccagaggt

SEQ ID NO: 310011 - DNA, 15 bp, Homo sapiens
caatgaatccagagg

SEQ ID NO: 310012 - DNA, 15 bp, Homo sapiens
acaatgaatccagag

SEQ ID NO: 310013 - DNA, 15 bp, Homo sapiens
gacaatgaatccaga

SEQ ID NO: 310014 - DNA, 15 bp, Homo sapiens
agacaatgaatccag

SEQ ID NO: 310015 - DNA, 15 bp, Homo sapiens
gagacaatgaatcca

SEQ ID NO: 310016 - DNA, 15 bp, Homo sapiens
agagacaatgaatcc

SEQ ID NO: 310017 - DNA, 15 bp, Homo sapiens
gagagacaatgaatc

SEQ ID NO: 310018 - DNA, 15 bp, Homo sapiens
tgagagacaatgaat

SEQ ID NO: 310019 - DNA, 15 bp, Homo sapiens
gtgagagacaatgaa

SEQ ID NO: 310020 - DNA, 15 bp, Homo sapiens
tgtgagagacaatga

SEQ ID NO: 310021 - DNA, 15 bp, Homo sapiens
ctgtgagagacaatg

SEQ ID NO: 310022 - DNA, 15 bp, Homo sapiens
tctgtgagagacaat

SEQ ID NO: 310023 - DNA, 15 bp, Homo sapiens
atctgtgagagacaa

SEQ ID NO: 310024 - DNA, 15 bp, Homo sapiens
catctgtgagagaca

SEQ ID NO: 310025 - DNA, 15 bp, Homo sapiens
acatctgtgagagac

SEQ ID NO: 310026 - DNA, 15 bp, Homo sapiens
cacatctgtgagaga

SEQ ID NO: 310027 - DNA, 15 bp, Homo sapiens
tcacatctgtgagag

SEQ ID NO: 310028 - DNA, 15 bp, Homo sapiens
gtcacatctgtgaga

SEQ ID NO: 310029 - DNA, 15 bp, Homo sapiens
agtcacatctgtgag

SEQ ID NO: 310030 - DNA, 15 bp, Homo sapiens
cagtcacatctgtga

SEQ ID NO: 310031 - DNA, 15 bp, Homo sapiens
acagtcacatctgtg

SEQ ID NO: 310032 - DNA, 15 bp, Homo sapiens
tacagtcacatctgt

SEQ ID NO: 310033 - DNA, 15 bp, Homo sapiens
atacagtcacatctg

SEQ ID NO: 310034 - DNA, 15 bp, Homo sapiens
tatacagtcacatct

SEQ ID NO: 310035 - DNA, 15 bp, Homo sapiens
ttatacagtcacatc

SEQ ID NO: 310036 - DNA, 15 bp, Homo sapiens
gttatacagtcacat

SEQ ID NO: 310037 - DNA, 15 bp, Homo sapiens
agttatacagtcaca

SEQ ID NO: 310038 - DNA, 15 bp, Homo sapiens
aagttatacagtcac

SEQ ID NO: 310039 - DNA, 15 bp, Homo sapiens
aaagttatacagtca

SEQ ID NO: 310040 - DNA, 15 bp, Homo sapiens
gaaagttatacagtc

SEQ ID NO: 310041 - DNA, 15 bp, Homo sapiens
ggaaagttatacagt

SEQ ID NO: 310042 - DNA, 15 bp, Homo sapiens
gggaaagttatacag

SEQ ID NO: 310043 - DNA, 15 bp, Homo sapiens
tgggaaagttataca

SEQ ID NO: 310044 - DNA, 15 bp, Homo sapiens
ctgggaaagttatac

SEQ ID NO: 310045 - DNA, 15 bp, Homo sapiens
cctgggaaagttata

SEQ ID NO: 310046 - DNA, 15 bp, Homo sapiens
acctgggaaagttat

SEQ ID NO: 310047 - DNA, 15 bp, Homo sapiens
aacctgggaaagtta

SEQ ID NO: 310048 - DNA, 15 bp, Homo sapiens
gaacctgggaaagtt

SEQ ID NO: 310049 - DNA, 15 bp, Homo sapiens
agaacctgggaaagt

SEQ ID NO: 310050 - DNA, 15 bp, Homo sapiens
cagaacctgggaaag

SEQ ID NO: 310051 - DNA, 15 bp, Homo sapiens
acagaacctgggaaa

SEQ ID NO: 310052 - DNA, 15 bp, Homo sapiens
aacagaacctgggaa

SEQ ID NO: 310053 - DNA, 15 bp, Homo sapiens
aaacagaacctggga

SEQ ID NO: 310054 - DNA, 15 bp, Homo sapiens
taaacagaacctggg

SEQ ID NO: 310055 - DNA, 15 bp, Homo sapiens
ataaacagaacctgg

SEQ ID NO: 310056 - DNA, 15 bp, Homo sapiens
cataaacagaacctg

SEQ ID NO: 310057 - DNA, 15 bp, Homo sapiens
ccataaacagaacct

SEQ ID NO: 310058 - DNA, 15 bp, Homo sapiens
gccataaacagaacc

SEQ ID NO: 310059 - DNA, 15 bp, Homo sapiens
ggccataaacagaac

SEQ ID NO: 310060 - DNA, 15 bp, Homo sapiens
tggccataaacagaa

SEQ ID NO: 310061 - DNA, 15 bp, Homo sapiens
gtggccataaacaga

SEQ ID NO: 310062 - DNA, 15 bp, Homo sapiens
tgtggccataaacag

SEQ ID NO: 310063 - DNA, 15 bp, Homo sapiens
atgtggccataaaca

SEQ ID NO: 310064 - DNA, 15 bp, Homo sapiens
aatgtggccataaac

SEQ ID NO: 310065 - DNA, 15 bp, Homo sapiens
aaatgtggccataaa

SEQ ID NO: 310066 - DNA, 15 bp, Homo sapiens
taaatgtggccataa

SEQ ID NO: 310067 - DNA, 15 bp, Homo sapiens
ttaaatgtggccata

SEQ ID NO: 310068 - DNA, 15 bp, Homo sapiens
attaaatgtggccat

SEQ ID NO: 310069 - DNA, 15 bp, Homo sapiens
tattaaatgtggcca

SEQ ID NO: 310070 - DNA, 15 bp, Homo sapiens
atattaaatgtggcc

SEQ ID NO: 310071 - DNA, 15 bp, Homo sapiens
gatattaaatgtggc

SEQ ID NO: 310072 - DNA, 15 bp, Homo sapiens
agatattaaatgtgg

SEQ ID NO: 310073 - DNA, 15 bp, Homo sapiens
aagatattaaatgtg

SEQ ID NO: 310074 - DNA, 15 bp, Homo sapiens
gaagatattaaatgt

SEQ ID NO: 310075 - DNA, 15 bp, Homo sapiens
tgaagatattaaatg

SEQ ID NO: 310076 - DNA, 15 bp, Homo sapiens
ctgaagatattaaat

SEQ ID NO: 310077 - DNA, 15 bp, Homo sapiens
gctgaagatattaaa

SEQ ID NO: 310078 - DNA, 15 bp, Homo sapiens
agctgaagatattaa

SEQ ID NO: 310079 - DNA, 15 bp, Homo sapiens
gagctgaagatatta

SEQ ID NO: 310080 - DNA, 15 bp, Homo sapiens
agagctgaagatatt

SEQ ID NO: 310081 - DNA, 15 bp, Homo sapiens
aagagctgaagatat

SEQ ID NO: 310082 - DNA, 15 bp, Homo sapiens
aaagagctgaagata

SEQ ID NO: 310083 - DNA, 15 bp, Homo sapiens
aaaagagctgaagat

SEQ ID NO: 310084 - DNA, 15 bp, Homo sapiens
aaaaagagctgaaga

SEQ ID NO: 310085 - DNA, 15 bp, Homo sapiens
caaaaagagctgaag

SEQ ID NO: 310086 - DNA, 15 bp, Homo sapiens
acaaaaagagctgaa

SEQ ID NO: 310087 - DNA, 15 bp, Homo sapiens
cacaaaaagagctga

SEQ ID NO: 310088 - DNA, 15 bp, Homo sapiens
ccacaaaaagagctg

SEQ ID NO: 310089 - DNA, 15 bp, Homo sapiens
tccacaaaaagagct

SEQ ID NO: 310090 - DNA, 15 bp, Homo sapiens
atccacaaaaagagc

SEQ ID NO: 310091 - DNA, 15 bp, Homo sapiens
tatccacaaaaagag

SEQ ID NO: 310092 - DNA, 15 bp, Homo sapiens
atatccacaaaaaga

SEQ ID NO: 310093 - DNA, 15 bp, Homo sapiens
tatatccacaaaaag

SEQ ID NO: 310094 - DNA, 15 bp, Homo sapiens
ttatatccacaaaaa

SEQ ID NO: 310095 - DNA, 15 bp, Homo sapiens
tttatatccacaaaa

SEQ ID NO: 310096 - DNA, 15 bp, Homo sapiens
ttttatatccacaaa

SEQ ID NO: 310097 - DNA, 15 bp, Homo sapiens
attttatatccacaa

SEQ ID NO: 310098 - DNA, 15 bp, Homo sapiens
cattttatatccaca

SEQ ID NO: 310099 - DNA, 15 bp, Homo sapiens
acattttatatccac

SEQ ID NO: 310100 - DNA, 15 bp, Homo sapiens
cacattttatatcca

SEQ ID NO: 310101 - DNA, 15 bp, Homo sapiens
gcacattttatatcc

SEQ ID NO: 310102 - DNA, 15 bp, Homo sapiens
tgcacattttatatc

SEQ ID NO: 310103 - DNA, 15 bp, Homo sapiens
ctgcacattttatat

SEQ ID NO: 310104 - DNA, 15 bp, Homo sapiens
tctgcacattttata

SEQ ID NO: 310105 - DNA, 15 bp, Homo sapiens
atctgcacattttat

SEQ ID NO: 310106 - DNA, 15 bp, Homo sapiens
catctgcacatttta

SEQ ID NO: 310107 - DNA, 15 bp, Homo sapiens
gcatctgcacatttt

SEQ ID NO: 310108 - DNA, 15 bp, Homo sapiens
tgcatctgcacattt

SEQ ID NO: 310109 - DNA, 15 bp, Homo sapiens
ttgcatctgcacatt

SEQ ID NO: 310110 - DNA, 15 bp, Homo sapiens
attgcatctgcacat

SEQ ID NO: 310111 - DNA, 15 bp, Homo sapiens
aattgcatctgcaca

SEQ ID NO: 310112 - DNA, 15 bp, Homo sapiens
caattgcatctgcac

SEQ ID NO: 310113 - DNA, 15 bp, Homo sapiens
acaattgcatctgca

SEQ ID NO: 310114 - DNA, 15 bp, Homo sapiens
aacaattgcatctgc

SEQ ID NO: 310115 - DNA, 15 bp, Homo sapiens
aaacaattgcatctg

SEQ ID NO: 310116 - DNA, 15 bp, Homo sapiens
caaacaattgcatct

SEQ ID NO: 310117 - DNA, 15 bp, Homo sapiens
ccaaacaattgcatc

SEQ ID NO: 310118 - DNA, 15 bp, Homo sapiens
cccaaacaattgcat

SEQ ID NO: 310119 - DNA, 15 bp, Homo sapiens
acccaaacaattgca

SEQ ID NO: 310120 - DNA, 15 bp, Homo sapiens
cacccaaacaattgc

SEQ ID NO: 310121 - DNA, 15 bp, Homo sapiens
tcacccaaacaattg

SEQ ID NO: 310122 - DNA, 15 bp, Homo sapiens
atcacccaaacaatt

SEQ ID NO: 310123 - DNA, 15 bp, Homo sapiens
aatcacccaaacaat

SEQ ID NO: 310124 - DNA, 15 bp, Homo sapiens
gaatcacccaaacaa

SEQ ID NO: 310125 - DNA, 15 bp, Homo sapiens
ggaatcacccaaaca

SEQ ID NO: 310126 - DNA, 15 bp, Homo sapiens
aggaatcacccaaac

SEQ ID NO: 310127 - DNA, 15 bp, Homo sapiens
taggaatcacccaaa

SEQ ID NO: 310128 - DNA, 15 bp, Homo sapiens
ttaggaatcacccaa

SEQ ID NO: 310129 - DNA, 15 bp, Homo sapiens
cttaggaatcaccca

SEQ ID NO: 310130 - DNA, 15 bp, Homo sapiens
gcttaggaatcaccc

SEQ ID NO: 310131 - DNA, 15 bp, Homo sapiens
ggcttaggaatcacc

SEQ ID NO: 310132 - DNA, 15 bp, Homo sapiens
tggcttaggaatcac

SEQ ID NO: 310133 - DNA, 15 bp, Homo sapiens
gtggcttaggaatca

SEQ ID NO: 310134 - DNA, 15 bp, Homo sapiens
agtggcttaggaatc

SEQ ID NO: 310135 - DNA, 15 bp, Homo sapiens
aagtggcttaggaat

SEQ ID NO: 310136 - DNA, 15 bp, Homo sapiens
caagtggcttaggaa

SEQ ID NO: 310137 - DNA, 15 bp, Homo sapiens
tcaagtggcttagga

SEQ ID NO: 310138 - DNA, 15 bp, Homo sapiens
ttcaagtggcttagg

SEQ ID NO: 310139 - DNA, 15 bp, Homo sapiens
tttcaagtggcttag

SEQ ID NO: 310140 - DNA, 15 bp, Homo sapiens
atttcaagtggctta

SEQ ID NO: 310141 - DNA, 15 bp, Homo sapiens
catttcaagtggctt

SEQ ID NO: 310142 - DNA, 15 bp, Homo sapiens
acatttcaagtggct

SEQ ID NO: 310143 - DNA, 15 bp, Homo sapiens
aacatttcaagtggc

SEQ ID NO: 310144 - DNA, 15 bp, Homo sapiens
taacatttcaagtgg

SEQ ID NO: 310145 - DNA, 15 bp, Homo sapiens
ctaacatttcaagtg

SEQ ID NO: 310146 - DNA, 15 bp, Homo sapiens
actaacatttcaagt

SEQ ID NO: 310147 - DNA, 15 bp, Homo sapiens
gactaacatttcaag

SEQ ID NO: 310148 - DNA, 15 bp, Homo sapiens
tgactaacatttcaa

SEQ ID NO: 310149 - DNA, 15 bp, Homo sapiens
atgactaacatttca

SEQ ID NO: 310150 - DNA, 15 bp, Homo sapiens
aatgactaacatttc

SEQ ID NO: 310151 - DNA, 15 bp, Homo sapiens
caatgactaacattt

SEQ ID NO: 310152 - DNA, 15 bp, Homo sapiens
acaatgactaacatt

SEQ ID NO: 310153 - DNA, 15 bp, Homo sapiens
aacaatgactaacat

SEQ ID NO: 310154 - DNA, 15 bp, Homo sapiens
taacaatgactaaca

SEQ ID NO: 310155 - DNA, 15 bp, Homo sapiens
ataacaatgactaac

SEQ ID NO: 310156 - DNA, 15 bp, Homo sapiens
aataacaatgactaa

SEQ ID NO: 310157 - DNA, 15 bp, Homo sapiens
aaataacaatgacta

SEQ ID NO: 310158 - DNA, 15 bp, Homo sapiens
taaataacaatgact

SEQ ID NO: 310159 - DNA, 15 bp, Homo sapiens
ataaataacaatgac

SEQ ID NO: 310160 - DNA, 15 bp, Homo sapiens
tataaataacaatga

SEQ ID NO: 310161 - DNA, 15 bp, Homo sapiens
gtataaataacaatg

SEQ ID NO: 310162 - DNA, 15 bp, Homo sapiens
tgtataaataacaat

SEQ ID NO: 310163 - DNA, 15 bp, Homo sapiens
ttgtataaataacaa

SEQ ID NO: 310164 - DNA, 15 bp, Homo sapiens
cttgtataaataaca

SEQ ID NO: 310165 - DNA, 15 bp, Homo sapiens
tcttgtataaataac

SEQ ID NO: 310166 - DNA, 15 bp, Homo sapiens
atcttgtataaataa

SEQ ID NO: 310167 - DNA, 15 bp, Homo sapiens
aatcttgtataaata

SEQ ID NO: 310168 - DNA, 15 bp, Homo sapiens
caatcttgtataaat

SEQ ID NO: 310169 - DNA, 15 bp, Homo sapiens
tcaatcttgtataaa

SEQ ID NO: 310170 - DNA, 15 bp, Homo sapiens
ttcaatcttgtataa

SEQ ID NO: 310171 - DNA, 15 bp, Homo sapiens
tttcaatcttgtata

SEQ ID NO: 310172 - DNA, 15 bp, Homo sapiens
ttttcaatcttgtat

SEQ ID NO: 310173 - DNA, 15 bp, Homo sapiens
attttcaatcttgta

SEQ ID NO: 310174 - DNA, 15 bp, Homo sapiens
gattttcaatcttgt

SEQ ID NO: 310175 - DNA, 15 bp, Homo sapiens
agattttcaatcttg

SEQ ID NO: 310176 - DNA, 15 bp, Homo sapiens
aagattttcaatctt

SEQ ID NO: 310177 - DNA, 15 bp, Homo sapiens
caagattttcaatct

SEQ ID NO: 310178 - DNA, 15 bp, Homo sapiens
acaagattttcaatc

SEQ ID NO: 310179 - DNA, 15 bp, Homo sapiens
cacaagattttcaat

SEQ ID NO: 310180 - DNA, 15 bp, Homo sapiens
acacaagattttcaa

SEQ ID NO: 310181 - DNA, 15 bp, Homo sapiens
tacacaagattttca

SEQ ID NO: 310182 - DNA, 15 bp, Homo sapiens
ttacacaagattttc

SEQ ID NO: 310183 - DNA, 15 bp, Homo sapiens
tttacacaagatttt

SEQ ID NO: 310184 - DNA, 15 bp, Homo sapiens
atttacacaagattt

SEQ ID NO: 310185 - DNA, 15 bp, Homo sapiens
gatttacacaagatt

SEQ ID NO: 310186 - DNA, 15 bp, Homo sapiens
ggatttacacaagat

SEQ ID NO: 310187 - DNA, 15 bp, Homo sapiens
aggatttacacaaga

SEQ ID NO: 310188 - DNA, 15 bp, Homo sapiens
caggatttacacaag

SEQ ID NO: 310189 - DNA, 15 bp, Homo sapiens
gcaggatttacacaa

SEQ ID NO: 310190 - DNA, 15 bp, Homo sapiens
ggcaggatttacaca

SEQ ID NO: 310191 - DNA, 15 bp, Homo sapiens
tggcaggatttacac

SEQ ID NO: 310192 - DNA, 15 bp, Homo sapiens
atggcaggatttaca

SEQ ID NO: 310193 - DNA, 15 bp, Homo sapiens
aatggcaggatttac

SEQ ID NO: 310194 - DNA, 15 bp, Homo sapiens
aaatggcaggattta

SEQ ID NO: 310195 - DNA, 15 bp, Homo sapiens
taaatggcaggattt

SEQ ID NO: 310196 - DNA, 15 bp, Homo sapiens
ttaaatggcaggatt

SEQ ID NO: 310197 - DNA, 15 bp, Homo sapiens
tttaaatggcaggat

SEQ ID NO: 310198 - DNA, 15 bp, Homo sapiens
ttttaaatggcagga

SEQ ID NO: 310199 - DNA, 15 bp, Homo sapiens
tttttaaatggcagg

SEQ ID NO: 310200 - DNA, 15 bp, Homo sapiens
ctttttaaatggcag

SEQ ID NO: 310201 - DNA, 15 bp, Homo sapiens
actttttaaatggca

SEQ ID NO: 310202 - DNA, 15 bp, Homo sapiens
aactttttaaatggc

SEQ ID NO: 310203 - DNA, 15 bp, Homo sapiens
caactttttaaatgg

SEQ ID NO: 310204 - DNA, 15 bp, Homo sapiens
acaactttttaaatg

SEQ ID NO: 310205 - DNA, 15 bp, Homo sapiens
tacaactttttaaat

SEQ ID NO: 310206 - DNA, 15 bp, Homo sapiens
ctacaactttttaaa

SEQ ID NO: 310207 - DNA, 15 bp, Homo sapiens
gctacaactttttaa

SEQ ID NO: 310208 - DNA, 15 bp, Homo sapiens
tgctacaacttttta

SEQ ID NO: 310209 - DNA, 15 bp, Homo sapiens
ctgctacaacttttt

SEQ ID NO: 310210 - DNA, 15 bp, Homo sapiens
tctgctacaactttt

SEQ ID NO: 310211 - DNA, 15 bp, Homo sapiens
atctgctacaacttt

SEQ ID NO: 310212 - DNA, 15 bp, Homo sapiens
aatctgctacaactt

SEQ ID NO: 310213 - DNA, 15 bp, Homo sapiens
caatctgctacaact

SEQ ID NO: 310214 - DNA, 15 bp, Homo sapiens
acaatctgctacaac

SEQ ID NO: 310215 - DNA, 15 bp, Homo sapiens
aacaatctgctacaa

SEQ ID NO: 310216 - DNA, 15 bp, Homo sapiens
aaacaatctgctaca

SEQ ID NO: 310217 - DNA, 15 bp, Homo sapiens
gaaacaatctgctac

SEQ ID NO: 310218 - DNA, 15 bp, Homo sapiens
ggaaacaatctgcta

SEQ ID NO: 310219 - DNA, 15 bp, Homo sapiens
aggaaacaatctgct

SEQ ID NO: 310220 - DNA, 15 bp, Homo sapiens
gaggaaacaatctgc

SEQ ID NO: 310221 - DNA, 15 bp, Homo sapiens
agaggaaacaatctg

SEQ ID NO: 310222 - DNA, 15 bp, Homo sapiens
aagaggaaacaatct

SEQ ID NO: 310223 - DNA, 15 bp, Homo sapiens
gaagaggaaacaatc

SEQ ID NO: 310224 - DNA, 15 bp, Homo sapiens
ggaagaggaaacaat

SEQ ID NO: 310225 - DNA, 15 bp, Homo sapiens
tggaagaggaaacaa

SEQ ID NO: 310226 - DNA, 15 bp, Homo sapiens
ttggaagaggaaaca

SEQ ID NO: 310227 - DNA, 15 bp, Homo sapiens
tttggaagaggaaac

SEQ ID NO: 310228 - DNA, 15 bp, Homo sapiens
ctttggaagaggaaa

SEQ ID NO: 310229 - DNA, 15 bp, Homo sapiens
actttggaagaggaa

SEQ ID NO: 310230 - DNA, 15 bp, Homo sapiens
tactttggaagagga

SEQ ID NO: 310231 - DNA, 15 bp, Homo sapiens
ttactttggaagagg

SEQ ID NO: 310232 - DNA, 15 bp, Homo sapiens
tttactttggaagag

SEQ ID NO: 310233 - DNA, 15 bp, Homo sapiens
ttttactttggaaga

SEQ ID NO: 310234 - DNA, 15 bp, Homo sapiens
attttactttggaag

SEQ ID NO: 310235 - DNA, 15 bp, Homo sapiens
aattttactttggaa

SEQ ID NO: 310236 - DNA, 15 bp, Homo sapiens
caattttactttgga

SEQ ID NO: 310237 - DNA, 15 bp, Homo sapiens
gcaattttactttgg

SEQ ID NO: 310238 - DNA, 15 bp, Homo sapiens
agcaattttactttg

SEQ ID NO: 310239 - DNA, 15 bp, Homo sapiens
cagcaattttacttt

SEQ ID NO: 310240 - DNA, 15 bp, Homo sapiens
acagcaattttactt

SEQ ID NO: 310241 - DNA, 15 bp, Homo sapiens
cacagcaattttact

SEQ ID NO: 310242 - DNA, 15 bp, Homo sapiens
gcacagcaattttac

SEQ ID NO: 310243 - DNA, 15 bp, Homo sapiens
agcacagcaatttta

SEQ ID NO: 310244 - DNA, 15 bp, Homo sapiens
aagcacagcaatttt

SEQ ID NO: 310245 - DNA, 15 bp, Homo sapiens
aaagcacagcaattt

SEQ ID NO: 310246 - DNA, 15 bp, Homo sapiens
taaagcacagcaatt

SEQ ID NO: 310247 - DNA, 15 bp, Homo sapiens
ataaagcacagcaat

SEQ ID NO: 310248 - DNA, 15 bp, Homo sapiens
cataaagcacagcaa

SEQ ID NO: 310249 - DNA, 15 bp, Homo sapiens
ccataaagcacagca

SEQ ID NO: 310250 - DNA, 15 bp, Homo sapiens
tccataaagcacagc

SEQ ID NO: 310251 - DNA, 15 bp, Homo sapiens
atccataaagcacag

SEQ ID NO: 310252 - DNA, 15 bp, Homo sapiens
tatccataaagcaca

SEQ ID NO: 310253 - DNA, 15 bp, Homo sapiens
ctatccataaagcac

SEQ ID NO: 310254 - DNA, 15 bp, Homo sapiens
actatccataaagca

SEQ ID NO: 310255 - DNA, 15 bp, Homo sapiens
tactatccataaagc

SEQ ID NO: 310256 - DNA, 15 bp, Homo sapiens
ttactatccataaag

SEQ ID NO: 310257 - DNA, 15 bp, Homo sapiens
cttactatccataaa

SEQ ID NO: 310258 - DNA, 15 bp, Homo sapiens
tcttactatccataa

SEQ ID NO: 310259 - DNA, 15 bp, Homo sapiens
ttcttactatccata

SEQ ID NO: 310260 - DNA, 15 bp, Homo sapiens
attcttactatccat

SEQ ID NO: 310261 - DNA, 15 bp, Homo sapiens
cattcttactatcca

SEQ ID NO: 310262 - DNA, 15 bp, Homo sapiens
ccattcttactatcc

SEQ ID NO: 310263 - DNA, 15 bp, Homo sapiens
gccattcttactatc

SEQ ID NO: 310264 - DNA, 15 bp, Homo sapiens
ggccattcttactat

SEQ ID NO: 310265 - DNA, 15 bp, Homo sapiens
gggccattcttacta

SEQ ID NO: 310266 - DNA, 15 bp, Homo sapiens
agggccattcttact

SEQ ID NO: 310267 - DNA, 15 bp, Homo sapiens
tagggccattcttac

SEQ ID NO: 310268 - DNA, 15 bp, Homo sapiens
ctagggccattctta

SEQ ID NO: 310269 - DNA, 15 bp, Homo sapiens
tctagggccattctt

SEQ ID NO: 310270 - DNA, 15 bp, Homo sapiens
ctctagggccattct

SEQ ID NO: 310271 - DNA, 15 bp, Homo sapiens
actctagggccattc

SEQ ID NO: 310272 - DNA, 15 bp, Homo sapiens
cactctagggccatt

SEQ ID NO: 310273 - DNA, 15 bp, Homo sapiens
ccactctagggccat

SEQ ID NO: 310274 - DNA, 15 bp, Homo sapiens
cccactctagggcca

SEQ ID NO: 310275 - DNA, 15 bp, Homo sapiens
tcccactctagggcc

SEQ ID NO: 310276 - DNA, 15 bp, Homo sapiens
ctcccactctagggc

SEQ ID NO: 310277 - DNA, 15 bp, Homo sapiens
actcccactctaggg

SEQ ID NO: 310278 - DNA, 15 bp, Homo sapiens
gactcccactctagg

SEQ ID NO: 310279 - DNA, 15 bp, Homo sapiens
ggactcccactctag

SEQ ID NO: 310280 - DNA, 15 bp, Homo sapiens
aggactcccactcta

SEQ ID NO: 310281 - DNA, 15 bp, Homo sapiens
caggactcccactct

SEQ ID NO: 310282 - DNA, 15 bp, Homo sapiens
tcaggactcccactc

SEQ ID NO: 310283 - DNA, 15 bp, Homo sapiens
atcaggactcccact

SEQ ID NO: 310284 - DNA, 15 bp, Homo sapiens
tatcaggactcccac

SEQ ID NO: 310285 - DNA, 15 bp, Homo sapiens
ttatcaggactccca

SEQ ID NO: 310286 - DNA, 15 bp, Homo sapiens
gttatcaggactccc

SEQ ID NO: 310287 - DNA, 15 bp, Homo sapiens
ggttatcaggactcc

SEQ ID NO: 310288 - DNA, 15 bp, Homo sapiens
gggttatcaggactc

SEQ ID NO: 310289 - DNA, 15 bp, Homo sapiens
tgggttatcaggact

SEQ ID NO: 310290 - DNA, 15 bp, Homo sapiens
ctgggttatcaggac

SEQ ID NO: 310291 - DNA, 15 bp, Homo sapiens
cctgggttatcagga

SEQ ID NO: 310292 - DNA, 15 bp, Homo sapiens
gcctgggttatcagg

SEQ ID NO: 310293 - DNA, 15 bp, Homo sapiens
ggcctgggttatcag

SEQ ID NO: 310294 - DNA, 15 bp, Homo sapiens
aggcctgggttatca

SEQ ID NO: 310295 - DNA, 15 bp, Homo sapiens
caggcctgggttatc

SEQ ID NO: 310296 - DNA, 15 bp, Homo sapiens
acaggcctgggttat

SEQ ID NO: 310297 - DNA, 15 bp, Homo sapiens
gacaggcctgggtta

SEQ ID NO: 310298 - DNA, 15 bp, Homo sapiens
agacaggcctgggtt

SEQ ID NO: 310299 - DNA, 15 bp, Homo sapiens
cagacaggcctgggt

SEQ ID NO: 310300 - DNA, 15 bp, Homo sapiens
tcagacaggcctggg

SEQ ID NO: 310301 - DNA, 15 bp, Homo sapiens
gtcagacaggcctgg

SEQ ID NO: 310302 - DNA, 15 bp, Homo sapiens
agtcagacaggcctg

SEQ ID NO: 310303 - DNA, 15 bp, Homo sapiens
tagtcagacaggcct

SEQ ID NO: 310304 - DNA, 15 bp, Homo sapiens
gtagtcagacaggcc

SEQ ID NO: 310305 - DNA, 15 bp, Homo sapiens
agtagtcagacaggc

SEQ ID NO: 310306 - DNA, 15 bp, Homo sapiens
aagtagtcagacagg

SEQ ID NO: 310307 - DNA, 15 bp, Homo sapiens
aaagtagtcagacag

SEQ ID NO: 310308 - DNA, 15 bp, Homo sapiens
caaagtagtcagaca

SEQ ID NO: 310309 - DNA, 15 bp, Homo sapiens
gcaaagtagtcagac

SEQ ID NO: 310310 - DNA, 15 bp, Homo sapiens
ggcaaagtagtcaga

SEQ ID NO: 310311 - DNA, 15 bp, Homo sapiens
aggcaaagtagtcag

SEQ ID NO: 310312 - DNA, 15 bp, Homo sapiens
aaggcaaagtagtca

SEQ ID NO: 310313 - DNA, 15 bp, Homo sapiens
gaaggcaaagtagtc

SEQ ID NO: 310314 - DNA, 15 bp, Homo sapiens
agaaggcaaagtagt

SEQ ID NO: 310315 - DNA, 15 bp, Homo sapiens
aagaaggcaaagtag

SEQ ID NO: 310316 - DNA, 15 bp, Homo sapiens
aaagaaggcaaagta

SEQ ID NO: 310317 - DNA, 15 bp, Homo sapiens
aaaagaaggcaaagt

SEQ ID NO: 310318 - DNA, 15 bp, Homo sapiens
caaaagaaggcaaag

SEQ ID NO: 310319 - DNA, 15 bp, Homo sapiens
acaaaagaaggcaaa

SEQ ID NO: 310320 - DNA, 15 bp, Homo sapiens
tacaaaagaaggcaa

SEQ ID NO: 310321 - DNA, 15 bp, Homo sapiens
ctacaaaagaaggca

SEQ ID NO: 310322 - DNA, 15 bp, Homo sapiens
gctacaaaagaaggc

SEQ ID NO: 310323 - DNA, 15 bp, Homo sapiens
tgctacaaaagaagg

SEQ ID NO: 310324 - DNA, 15 bp, Homo sapiens
atgctacaaaagaag

SEQ ID NO: 310325 - DNA, 15 bp, Homo sapiens
tatgctacaaaagaa

SEQ ID NO: 310326 - DNA, 15 bp, Homo sapiens
atatgctacaaaaga

SEQ ID NO: 310327 - DNA, 15 bp, Homo sapiens
tatatgctacaaaag

SEQ ID NO: 310328 - DNA, 15 bp, Homo sapiens
ctatatgctacaaaa

SEQ ID NO: 310329 - DNA, 15 bp, Homo sapiens
cctatatgctacaaa

SEQ ID NO: 310330 - DNA, 15 bp, Homo sapiens
acctatatgctacaa

SEQ ID NO: 310331 - DNA, 15 bp, Homo sapiens
cacctatatgctaca

SEQ ID NO: 310332 - DNA, 15 bp, Homo sapiens
tcacctatatgctac

SEQ ID NO: 310333 - DNA, 15 bp, Homo sapiens
atcacctatatgcta

SEQ ID NO: 310334 - DNA, 15 bp, Homo sapiens
catcacctatatgct

SEQ ID NO: 310335 - DNA, 15 bp, Homo sapiens
acatcacctatatgc

SEQ ID NO: 310336 - DNA, 15 bp, Homo sapiens
aacatcacctatatg

SEQ ID NO: 310337 - DNA, 15 bp, Homo sapiens
aaacatcacctatat

SEQ ID NO: 310338 - DNA, 15 bp, Homo sapiens
caaacatcacctata

SEQ ID NO: 310339 - DNA, 15 bp, Homo sapiens
gcaaacatcacctat

SEQ ID NO: 310340 - DNA, 15 bp, Homo sapiens
agcaaacatcaccta

SEQ ID NO: 310341 - DNA, 15 bp, Homo sapiens
gagcaaacatcacct

SEQ ID NO: 310342 - DNA, 15 bp, Homo sapiens
agagcaaacatcacc

SEQ ID NO: 310343 - DNA, 15 bp, Homo sapiens
aagagcaaacatcac

SEQ ID NO: 310344 - DNA, 15 bp, Homo sapiens
caagagcaaacatca

SEQ ID NO: 310345 - DNA, 15 bp, Homo sapiens
acaagagcaaacatc

SEQ ID NO: 310346 - DNA, 15 bp, Homo sapiens
aacaagagcaaacat

SEQ ID NO: 310347 - DNA, 15 bp, Homo sapiens
aaacaagagcaaaca

SEQ ID NO: 310348 - DNA, 15 bp, Homo sapiens
aaaacaagagcaaac

SEQ ID NO: 310349 - DNA, 15 bp, Homo sapiens
aaaaacaagagcaaa

SEQ ID NO: 310350 - DNA, 15 bp, Homo sapiens
taaaaacaagagcaa

SEQ ID NO: 310351 - DNA, 15 bp, Homo sapiens
ataaaaacaagagca

SEQ ID NO: 310352 - DNA, 15 bp, Homo sapiens
aataaaaacaagagc

SEQ ID NO: 310353 - DNA, 15 bp, Homo sapiens
taataaaaacaagag

SEQ ID NO: 310354 - DNA, 15 bp, Homo sapiens
ttaataaaaacaaga

SEQ ID NO: 310355 - DNA, 15 bp, Homo sapiens
attaataaaaacaag

SEQ ID NO: 310356 - DNA, 15 bp, Homo sapiens
aattaataaaaacaa

SEQ ID NO: 310357 - DNA, 15 bp, Homo sapiens
aaattaataaaaaca

SEQ ID NO: 310358 - DNA, 15 bp, Homo sapiens
taaattaataaaaac

SEQ ID NO: 310359 - DNA, 15 bp, Homo sapiens
ataaattaataaaaa

SEQ ID NO: 310360 - DNA, 15 bp, Homo sapiens
tataaattaataaaa

SEQ ID NO: 310361 - DNA, 15 bp, Homo sapiens
atataaattaataaa

SEQ ID NO: 310362 - DNA, 15 bp, Homo sapiens
catataaattaataa

SEQ ID NO: 310363 - DNA, 15 bp, Homo sapiens
acatataaattaata

SEQ ID NO: 310364 - DNA, 15 bp, Homo sapiens
tacatataaattaat

SEQ ID NO: 310365 - DNA, 15 bp, Homo sapiens
atacatataaattaa

SEQ ID NO: 310366 - DNA, 15 bp, Homo sapiens
tatacatataaatta

SEQ ID NO: 310367 - DNA, 15 bp, Homo sapiens
atatacatataaatt

SEQ ID NO: 310368 - DNA, 15 bp, Homo sapiens
aatatacatataaat

SEQ ID NO: 310369 - DNA, 15 bp, Homo sapiens
aaatatacatataaa

SEQ ID NO: 310370 - DNA, 15 bp, Homo sapiens
aaaatatacatataa

SEQ ID NO: 310371 - DNA, 15 bp, Homo sapiens
aaaaatatacatata

SEQ ID NO: 310372 - DNA, 15 bp, Homo sapiens
aaaaaatatacatat

SEQ ID NO: 310373 - DNA, 15 bp, Homo sapiens
aaaaaaatatacata

SEQ ID NO: 310374 - DNA, 15 bp, Homo sapiens
taaaaaaatatacat

SEQ ID NO: 310375 - DNA, 15 bp, Homo sapiens
ttaaaaaaatataca

SEQ ID NO: 310376 - DNA, 15 bp, Homo sapiens
attaaaaaaatatac

SEQ ID NO: 310377 - DNA, 15 bp, Homo sapiens
aattaaaaaaatata

SEQ ID NO: 310378 - DNA, 15 bp, Homo sapiens
aaattaaaaaaatat

SEQ ID NO: 310379 - DNA, 15 bp, Homo sapiens
taaattaaaaaaata

SEQ ID NO: 310380 - DNA, 15 bp, Homo sapiens
ttaaattaaaaaaat

SEQ ID NO: 310381 - DNA, 15 bp, Homo sapiens
gttaaattaaaaaaa

SEQ ID NO: 310382 - DNA, 15 bp, Homo sapiens
tgttaaattaaaaaa

SEQ ID NO: 310383 - DNA, 15 bp, Homo sapiens
atgttaaattaaaaa

SEQ ID NO: 310384 - DNA, 15 bp, Homo sapiens
catgttaaattaaaa

SEQ ID NO: 310385 - DNA, 15 bp, Homo sapiens
tcatgttaaattaaa

SEQ ID NO: 310386 - DNA, 15 bp, Homo sapiens
ttcatgttaaattaa

SEQ ID NO: 310387 - DNA, 15 bp, Homo sapiens
gttcatgttaaatta

SEQ ID NO: 310388 - DNA, 15 bp, Homo sapiens
tgttcatgttaaatt

SEQ ID NO: 310389 - DNA, 15 bp, Homo sapiens
gtgttcatgttaaat

SEQ ID NO: 310390 - DNA, 15 bp, Homo sapiens
ggtgttcatgttaaa

SEQ ID NO: 310391 - DNA, 15 bp, Homo sapiens
gggtgttcatgttaa

SEQ ID NO: 310392 - DNA, 15 bp, Homo sapiens
agggtgttcatgtta

SEQ ID NO: 310393 - DNA, 15 bp, Homo sapiens
aagggtgttcatgtt

SEQ ID NO: 310394 - DNA, 15 bp, Homo sapiens
taagggtgttcatgt

SEQ ID NO: 310395 - DNA, 15 bp, Homo sapiens
ctaagggtgttcatg

SEQ ID NO: 310396 - DNA, 15 bp, Homo sapiens
tctaagggtgttcat

SEQ ID NO: 310397 - DNA, 15 bp, Homo sapiens
ttctaagggtgttca

SEQ ID NO: 310398 - DNA, 15 bp, Homo sapiens
tttctaagggtgttc

SEQ ID NO: 310399 - DNA, 15 bp, Homo sapiens
ttttctaagggtgtt

SEQ ID NO: 310400 - DNA, 15 bp, Homo sapiens
attttctaagggtgt

SEQ ID NO: 310401 - DNA, 15 bp, Homo sapiens
cattttctaagggtg

SEQ ID NO: 310402 - DNA, 15 bp, Homo sapiens
acattttctaagggt

SEQ ID NO: 310403 - DNA, 15 bp, Homo sapiens
cacattttctaaggg

SEQ ID NO: 310404 - DNA, 15 bp, Homo sapiens
acacattttctaagg

SEQ ID NO: 310405 - DNA, 15 bp, Homo sapiens
gacacattttctaag

SEQ ID NO: 310406 - DNA, 15 bp, Homo sapiens
ggacacattttctaa

SEQ ID NO: 310407 - DNA, 15 bp, Homo sapiens
aggacacattttcta

SEQ ID NO: 310408 - DNA, 15 bp, Homo sapiens
taggacacattttct

SEQ ID NO: 310409 - DNA, 15 bp, Homo sapiens
ataggacacattttc

SEQ ID NO: 310410 - DNA, 15 bp, Homo sapiens
gataggacacatttt

SEQ ID NO: 310411 - DNA, 15 bp, Homo sapiens
agataggacacattt

SEQ ID NO: 310412 - DNA, 15 bp, Homo sapiens
tagataggacacatt

SEQ ID NO: 310413 - DNA, 15 bp, Homo sapiens
atagataggacacat

SEQ ID NO: 310414 - DNA, 15 bp, Homo sapiens
gatagataggacaca

SEQ ID NO: 310415 - DNA, 15 bp, Homo sapiens
agatagataggacac

SEQ ID NO: 310416 - DNA, 15 bp, Homo sapiens
aagatagataggaca

SEQ ID NO: 310417 - DNA, 15 bp, Homo sapiens
gaagatagataggac

SEQ ID NO: 310418 - DNA, 15 bp, Homo sapiens
ggaagatagatagga

SEQ ID NO: 310419 - DNA, 15 bp, Homo sapiens
tggaagatagatagg

SEQ ID NO: 310420 - DNA, 15 bp, Homo sapiens
ttggaagatagatag

SEQ ID NO: 310421 - DNA, 15 bp, Homo sapiens
tttggaagatagata

SEQ ID NO: 310422 - DNA, 15 bp, Homo sapiens
atttggaagatagat

SEQ ID NO: 310423 - DNA, 15 bp, Homo sapiens
catttggaagataga

SEQ ID NO: 310424 - DNA, 15 bp, Homo sapiens
gcatttggaagatag

SEQ ID NO: 310425 - DNA, 15 bp, Homo sapiens
tgcatttggaagata

SEQ ID NO: 310426 - DNA, 15 bp, Homo sapiens
ttgcatttggaagat

SEQ ID NO: 310427 - DNA, 15 bp, Homo sapiens
attgcatttggaaga

SEQ ID NO: 310428 - DNA, 15 bp, Homo sapiens
aattgcatttggaag

SEQ ID NO: 310429 - DNA, 15 bp, Homo sapiens
aaattgcatttggaa

SEQ ID NO: 310430 - DNA, 15 bp, Homo sapiens
caaattgcatttgga

SEQ ID NO: 310431 - DNA, 15 bp, Homo sapiens
tcaaattgcatttgg

SEQ ID NO: 310432 - DNA, 15 bp, Homo sapiens
atcaaattgcatttg

SEQ ID NO: 310433 - DNA, 15 bp, Homo sapiens
aatcaaattgcattt

SEQ ID NO: 310434 - DNA, 15 bp, Homo sapiens
caatcaaattgcatt

SEQ ID NO: 310435 - DNA, 15 bp, Homo sapiens
tcaatcaaattgcat

SEQ ID NO: 310436 - DNA, 15 bp, Homo sapiens
gtcaatcaaattgca

SEQ ID NO: 310437 - DNA, 15 bp, Homo sapiens
agtcaatcaaattgc

SEQ ID NO: 310438 - DNA, 15 bp, Homo sapiens
cagtcaatcaaattg

SEQ ID NO: 310439 - DNA, 15 bp, Homo sapiens
gcagtcaatcaaatt

SEQ ID NO: 310440 - DNA, 15 bp, Homo sapiens
ggcagtcaatcaaat

SEQ ID NO: 310441 - DNA, 15 bp, Homo sapiens
gggcagtcaatcaaa

SEQ ID NO: 310442 - DNA, 15 bp, Homo sapiens
tgggcagtcaatcaa

SEQ ID NO: 310443 - DNA, 15 bp, Homo sapiens
atgggcagtcaatca

SEQ ID NO: 310444 - DNA, 15 bp, Homo sapiens
aatgggcagtcaatc

SEQ ID NO: 310445 - DNA, 15 bp, Homo sapiens
gaatgggcagtcaat

SEQ ID NO: 310446 - DNA, 15 bp, Homo sapiens
tgaatgggcagtcaa

SEQ ID NO: 310447 - DNA, 15 bp, Homo sapiens
gtgaatgggcagtca

SEQ ID NO: 310448 - DNA, 15 bp, Homo sapiens
ggtgaatgggcagtc

SEQ ID NO: 310449 - DNA, 15 bp, Homo sapiens
tggtgaatgggcagt

SEQ ID NO: 310450 - DNA, 15 bp, Homo sapiens
ttggtgaatgggcag

SEQ ID NO: 310451 - DNA, 15 bp, Homo sapiens
tttggtgaatgggca

SEQ ID NO: 310452 - DNA, 15 bp, Homo sapiens
ttttggtgaatgggc

SEQ ID NO: 310453 - DNA, 15 bp, Homo sapiens
attttggtgaatggg

SEQ ID NO: 310454 - DNA, 15 bp, Homo sapiens
aattttggtgaatgg

SEQ ID NO: 310455 - DNA, 15 bp, Homo sapiens
taattttggtgaatg

SEQ ID NO: 310456 - DNA, 15 bp, Homo sapiens
ataattttggtgaat

SEQ ID NO: 310457 - DNA, 15 bp, Homo sapiens
gataattttggtgaa

SEQ ID NO: 310458 - DNA, 15 bp, Homo sapiens
ggataattttggtga

SEQ ID NO: 310459 - DNA, 15 bp, Homo sapiens
aggataattttggtg

SEQ ID NO: 310460 - DNA, 15 bp, Homo sapiens
caggataattttggt

SEQ ID NO: 310461 - DNA, 15 bp, Homo sapiens
tcaggataattttgg

SEQ ID NO: 310462 - DNA, 15 bp, Homo sapiens
ttcaggataattttg

SEQ ID NO: 310463 - DNA, 15 bp, Homo sapiens
gttcaggataatttt

SEQ ID NO: 310464 - DNA, 15 bp, Homo sapiens
agttcaggataattt

SEQ ID NO: 310465 - DNA, 15 bp, Homo sapiens
gagttcaggataatt

SEQ ID NO: 310466 - DNA, 15 bp, Homo sapiens
agagttcaggataat

SEQ ID NO: 310467 - DNA, 15 bp, Homo sapiens
aagagttcaggataa

SEQ ID NO: 310468 - DNA, 15 bp, Homo sapiens
gaagagttcaggata

SEQ ID NO: 310469 - DNA, 15 bp, Homo sapiens
agaagagttcaggat

SEQ ID NO: 310470 - DNA, 15 bp, Homo sapiens
cagaagagttcagga

SEQ ID NO: 310471 - DNA, 15 bp, Homo sapiens
gcagaagagttcagg

SEQ ID NO: 310472 - DNA, 15 bp, Homo sapiens
tgcagaagagttcag

SEQ ID NO: 310473 - DNA, 15 bp, Homo sapiens
ttgcagaagagttca

SEQ ID NO: 310474 - DNA, 15 bp, Homo sapiens
tttgcagaagagttc

SEQ ID NO: 310475 - DNA, 15 bp, Homo sapiens
ttttgcagaagagtt

SEQ ID NO: 310476 - DNA, 15 bp, Homo sapiens
tttttgcagaagagt

SEQ ID NO: 310477 - DNA, 15 bp, Homo sapiens
atttttgcagaagag

SEQ ID NO: 310478 - DNA, 15 bp, Homo sapiens
catttttgcagaaga

SEQ ID NO: 310479 - DNA, 15 bp, Homo sapiens
ccatttttgcagaag

SEQ ID NO: 310480 - DNA, 15 bp, Homo sapiens
tccatttttgcagaa

SEQ ID NO: 310481 - DNA, 15 bp, Homo sapiens
atccatttttgcaga

SEQ ID NO: 310482 - DNA, 15 bp, Homo sapiens
tatccatttttgcag

SEQ ID NO: 310483 - DNA, 15 bp, Homo sapiens
atatccatttttgca

SEQ ID NO: 310484 - DNA, 15 bp, Homo sapiens
aatatccatttttgc

SEQ ID NO: 310485 - DNA, 15 bp, Homo sapiens
taatatccatttttg

SEQ ID NO: 310486 - DNA, 15 bp, Homo sapiens
ataatatccattttt

SEQ ID NO: 310487 - DNA, 15 bp, Homo sapiens
aataatatccatttt

SEQ ID NO: 310488 - DNA, 15 bp, Homo sapiens
taataatatccattt

SEQ ID NO: 310489 - DNA, 15 bp, Homo sapiens
ctaataatatccatt

SEQ ID NO: 310490 - DNA, 15 bp, Homo sapiens
tctaataatatccat

SEQ ID NO: 310491 - DNA, 15 bp, Homo sapiens
ttctaataatatcca

SEQ ID NO: 310492 - DNA, 15 bp, Homo sapiens
tttctaataatatcc

SEQ ID NO: 310493 - DNA, 15 bp, Homo sapiens
atttctaataatatc

SEQ ID NO: 310494 - DNA, 15 bp, Homo sapiens
aatttctaataatat

SEQ ID NO: 310495 - DNA, 15 bp, Homo sapiens
taatttctaataata

SEQ ID NO: 310496 - DNA, 15 bp, Homo sapiens
ctaatttctaataat

SEQ ID NO: 310497 - DNA, 15 bp, Homo sapiens
tctaatttctaataa

SEQ ID NO: 310498 - DNA, 15 bp, Homo sapiens
ttctaatttctaata

SEQ ID NO: 310499 - DNA, 15 bp, Homo sapiens
tttctaatttctaat

SEQ ID NO: 310500 - DNA, 15 bp, Homo sapiens
ttttctaatttctaa

SEQ ID NO: 310501 - DNA, 15 bp, Homo sapiens
tttttctaatttcta

SEQ ID NO: 310502 - DNA, 15 bp, Homo sapiens
ttttttctaatttct

SEQ ID NO: 310503 - DNA, 15 bp, Homo sapiens
tttttttctaatttc

SEQ ID NO: 310504 - DNA, 15 bp, Homo sapiens
atttttttctaattt

SEQ ID NO: 310505 - DNA, 15 bp, Homo sapiens
aatttttttctaatt

SEQ ID NO: 310506 - DNA, 15 bp, Homo sapiens
taatttttttctaat

SEQ ID NO: 310507 - DNA, 15 bp, Homo sapiens
gtaatttttttctaa

SEQ ID NO: 310508 - DNA, 15 bp, Homo sapiens
agtaatttttttcta

SEQ ID NO: 310509 - DNA, 15 bp, Homo sapiens
tagtaatttttttct

SEQ ID NO: 310510 - DNA, 15 bp, Homo sapiens
ttagtaatttttttc

SEQ ID NO: 310511 - DNA, 15 bp, Homo sapiens
attagtaattttttt

SEQ ID NO: 310512 - DNA, 15 bp, Homo sapiens
aattagtaatttttt

SEQ ID NO: 310513 - DNA, 15 bp, Homo sapiens
aaattagtaattttt

SEQ ID NO: 310514 - DNA, 15 bp, Homo sapiens
aaaattagtaatttt

SEQ ID NO: 310515 - DNA, 15 bp, Homo sapiens
taaaattagtaattt

SEQ ID NO: 310516 - DNA, 15 bp, Homo sapiens
gtaaaattagtaatt

SEQ ID NO: 310517 - DNA, 15 bp, Homo sapiens
tgtaaaattagtaat

SEQ ID NO: 310518 - DNA, 15 bp, Homo sapiens
gtgtaaaattagtaa

SEQ ID NO: 310519 - DNA, 15 bp, Homo sapiens
tgtgtaaaattagta

SEQ ID NO: 310520 - DNA, 15 bp, Homo sapiens
atgtgtaaaattagt

SEQ ID NO: 310521 - DNA, 15 bp, Homo sapiens
aatgtgtaaaattag

SEQ ID NO: 310522 - DNA, 15 bp, Homo sapiens
taatgtgtaaaatta

SEQ ID NO: 310523 - DNA, 15 bp, Homo sapiens
ctaatgtgtaaaatt

SEQ ID NO: 310524 - DNA, 15 bp, Homo sapiens
tctaatgtgtaaaat

SEQ ID NO: 310525 - DNA, 15 bp, Homo sapiens
atctaatgtgtaaaa

SEQ ID NO: 310526 - DNA, 15 bp, Homo sapiens
aatctaatgtgtaaa

SEQ ID NO: 310527 - DNA, 15 bp, Homo sapiens
aaatctaatgtgtaa

SEQ ID NO: 310528 - DNA, 15 bp, Homo sapiens
aaaatctaatgtgta

SEQ ID NO: 310529 - DNA, 15 bp, Homo sapiens
taaaatctaatgtgt

SEQ ID NO: 310530 - DNA, 15 bp, Homo sapiens
ataaaatctaatgtg

SEQ ID NO: 310531 - DNA, 15 bp, Homo sapiens
aataaaatctaatgt

SEQ ID NO: 310532 - DNA, 15 bp, Homo sapiens
aaataaaatctaatg

SEQ ID NO: 310533 - DNA, 15 bp, Homo sapiens
aaaataaaatctaat

SEQ ID NO: 310534 - DNA, 15 bp, Homo sapiens
taaaataaaatctaa

SEQ ID NO: 310535 - DNA, 15 bp, Homo sapiens
gtaaaataaaatcta

SEQ ID NO: 310536 - DNA, 15 bp, Homo sapiens
agtaaaataaaatct

SEQ ID NO: 310537 - DNA, 15 bp, Homo sapiens
tagtaaaataaaatc

SEQ ID NO: 310538 - DNA, 15 bp, Homo sapiens
atagtaaaataaaat

SEQ ID NO: 310539 - DNA, 15 bp, Homo sapiens
aatagtaaaataaaa

SEQ ID NO: 310540 - DNA, 15 bp, Homo sapiens
caatagtaaaataaa

SEQ ID NO: 310541 - DNA, 15 bp, Homo sapiens
ccaatagtaaaataa

SEQ ID NO: 310542 - DNA, 15 bp, Homo sapiens
tccaatagtaaaata

SEQ ID NO: 310543 - DNA, 15 bp, Homo sapiens
ttccaatagtaaaat

SEQ ID NO: 310544 - DNA, 15 bp, Homo sapiens
attccaatagtaaaa

SEQ ID NO: 310545 - DNA, 15 bp, Homo sapiens
gattccaatagtaaa

SEQ ID NO: 310546 - DNA, 15 bp, Homo sapiens
agattccaatagtaa

SEQ ID NO: 310547 - DNA, 15 bp, Homo sapiens
cagattccaatagta

SEQ ID NO: 310548 - DNA, 15 bp, Homo sapiens
tcagattccaatagt

SEQ ID NO: 310549 - DNA, 15 bp, Homo sapiens
atcagattccaatag

SEQ ID NO: 310550 - DNA, 15 bp, Homo sapiens
tatcagattccaata

SEQ ID NO: 310551 - DNA, 15 bp, Homo sapiens
atatcagattccaat

SEQ ID NO: 310552 - DNA, 15 bp, Homo sapiens
tatatcagattccaa

SEQ ID NO: 310553 - DNA, 15 bp, Homo sapiens
gtatatcagattcca

SEQ ID NO: 310554 - DNA, 15 bp, Homo sapiens
agtatatcagattcc

SEQ ID NO: 310555 - DNA, 15 bp, Homo sapiens
cagtatatcagattc

SEQ ID NO: 310556 - DNA, 15 bp, Homo sapiens
acagtatatcagatt

SEQ ID NO: 310557 - DNA, 15 bp, Homo sapiens
cacagtatatcagat

SEQ ID NO: 310558 - DNA, 15 bp, Homo sapiens
acacagtatatcaga

SEQ ID NO: 310559 - DNA, 15 bp, Homo sapiens
cacacagtatatcag

SEQ ID NO: 310560 - DNA, 15 bp, Homo sapiens
gcacacagtatatca

SEQ ID NO: 310561 - DNA, 15 bp, Homo sapiens
agcacacagtatatc

SEQ ID NO: 310562 - DNA, 15 bp, Homo sapiens
aagcacacagtatat

SEQ ID NO: 310563 - DNA, 15 bp, Homo sapiens
caagcacacagtata

SEQ ID NO: 310564 - DNA, 15 bp, Homo sapiens
acaagcacacagtat

SEQ ID NO: 310565 - DNA, 15 bp, Homo sapiens
aacaagcacacagta

SEQ ID NO: 310566 - DNA, 15 bp, Homo sapiens
aaacaagcacacagt

SEQ ID NO: 310567 - DNA, 15 bp, Homo sapiens
aaaacaagcacacag

SEQ ID NO: 310568 - DNA, 15 bp, Homo sapiens
taaaacaagcacaca

SEQ ID NO: 310569 - DNA, 15 bp, Homo sapiens
ataaaacaagcacac

SEQ ID NO: 310570 - DNA, 15 bp, Homo sapiens
tataaaacaagcaca

SEQ ID NO: 310571 - DNA, 15 bp, Homo sapiens
ttataaaacaagcac

SEQ ID NO: 310572 - DNA, 15 bp, Homo sapiens
tttataaaacaagca

SEQ ID NO: 310573 - DNA, 15 bp, Homo sapiens
ttttataaaacaagc

SEQ ID NO: 310574 - DNA, 15 bp, Homo sapiens
attttataaaacaag

SEQ ID NO: 310575 - DNA, 15 bp, Homo sapiens
aattttataaaacaa

SEQ ID NO: 310576 - DNA, 15 bp, Homo sapiens
aaattttataaaaca

SEQ ID NO: 310577 - DNA, 15 bp, Homo sapiens
aaaattttataaaac

SEQ ID NO: 310578 - DNA, 15 bp, Homo sapiens
caaaattttataaaa

SEQ ID NO: 310579 - DNA, 15 bp, Homo sapiens
gcaaaattttataaa

SEQ ID NO: 310580 - DNA, 15 bp, Homo sapiens
agcaaaattttataa

SEQ ID NO: 310581 - DNA, 15 bp, Homo sapiens
aagcaaaattttata

SEQ ID NO: 310582 - DNA, 15 bp, Homo sapiens
aaagcaaaattttat

SEQ ID NO: 310583 - DNA, 15 bp, Homo sapiens
aaaagcaaaatttta

SEQ ID NO: 310584 - DNA, 15 bp, Homo sapiens
taaaagcaaaatttt

SEQ ID NO: 310585 - DNA, 15 bp, Homo sapiens
ttaaaagcaaaattt

SEQ ID NO: 310586 - DNA, 15 bp, Homo sapiens
attaaaagcaaaatt

SEQ ID NO: 310587 - DNA, 15 bp, Homo sapiens
aattaaaagcaaaat

SEQ ID NO: 310588 - DNA, 15 bp, Homo sapiens
taattaaaagcaaaa

SEQ ID NO: 310589 - DNA, 15 bp, Homo sapiens
ttaattaaaagcaaa

SEQ ID NO: 310590 - DNA, 15 bp, Homo sapiens
tttaattaaaagcaa

SEQ ID NO: 310591 - DNA, 15 bp, Homo sapiens
atttaattaaaagca

SEQ ID NO: 310592 - DNA, 15 bp, Homo sapiens
tatttaattaaaagc

SEQ ID NO: 310593 - DNA, 15 bp, Homo sapiens
ttatttaattaaaag

SEQ ID NO: 310594 - DNA, 15 bp, Homo sapiens
tttatttaattaaaa

SEQ ID NO: 310595 - DNA, 15 bp, Homo sapiens
ttttatttaattaaa

SEQ ID NO: 310596 - DNA, 15 bp, Homo sapiens
cttttatttaattaa

SEQ ID NO: 310597 - DNA, 15 bp, Homo sapiens
gcttttatttaatta

SEQ ID NO: 310598 - DNA, 15 bp, Homo sapiens
agcttttatttaatt

SEQ ID NO: 310599 - DNA, 15 bp, Homo sapiens
cagcttttatttaat

SEQ ID NO: 310600 - DNA, 15 bp, Homo sapiens
ccagcttttatttaa

SEQ ID NO: 310601 - DNA, 15 bp, Homo sapiens
tccagcttttattta

SEQ ID NO: 310602 - DNA, 15 bp, Homo sapiens
ttccagcttttattt

SEQ ID NO: 310603 - DNA, 15 bp, Homo sapiens
cttccagcttttatt

SEQ ID NO: 310604 - DNA, 15 bp, Homo sapiens
gcttccagcttttat

SEQ ID NO: 310605 - DNA, 15 bp, Homo sapiens
tgcttccagctttta

SEQ ID NO: 310606 - DNA, 15 bp, Homo sapiens
ttgcttccagctttt

SEQ ID NO: 310607 - DNA, 15 bp, Homo sapiens
tttgcttccagcttt

SEQ ID NO: 310608 - DNA, 15 bp, Homo sapiens
ctttgcttccagctt

SEQ ID NO: 310609 - DNA, 15 bp, Homo sapiens
actttgcttccagct

SEQ ID NO: 310610 - DNA, 15 bp, Homo sapiens
tactttgcttccagc

SEQ ID NO: 310611 - DNA, 15 bp, Homo sapiens
atactttgcttccag

SEQ ID NO: 310612 - DNA, 15 bp, Homo sapiens
tatactttgcttcca

SEQ ID NO: 310613 - DNA, 15 bp, Homo sapiens
ttatactttgcttcc

SEQ ID NO: 310614 - DNA, 15 bp, Homo sapiens
gttatactttgcttc

SEQ ID NO: 310615 - DNA, 15 bp, Homo sapiens
ggttatactttgctt

SEQ ID NO: 310616 - DNA, 15 bp, Homo sapiens
tggttatactttgct

SEQ ID NO: 310617 - DNA, 15 bp, Homo sapiens
atggttatactttgc

SEQ ID NO: 310618 - DNA, 15 bp, Homo sapiens
tatggttatactttg

SEQ ID NO: 310619 - DNA, 15 bp, Homo sapiens
atatggttatacttt

SEQ ID NO: 310620 - DNA, 15 bp, Homo sapiens
catatggttatactt

SEQ ID NO: 310621 - DNA, 15 bp, Homo sapiens
tcatatggttatact

SEQ ID NO: 310622 - DNA, 15 bp, Homo sapiens
atcatatggttatac

SEQ ID NO: 310623 - DNA, 15 bp, Homo sapiens
tatcatatggttata

SEQ ID NO: 310624 - DNA, 15 bp, Homo sapiens
gtatcatatggttat

SEQ ID NO: 310625 - DNA, 15 bp, Homo sapiens
agtatcatatggtta

SEQ ID NO: 310626 - DNA, 15 bp, Homo sapiens
tagtatcatatggtt

SEQ ID NO: 310627 - DNA, 15 bp, Homo sapiens
atagtatcatatggt

SEQ ID NO: 310628 - DNA, 15 bp, Homo sapiens
gatagtatcatatgg

SEQ ID NO: 310629 - DNA, 15 bp, Homo sapiens
tgatagtatcatatg

SEQ ID NO: 310630 - DNA, 15 bp, Homo sapiens
atgatagtatcatat

SEQ ID NO: 310631 - DNA, 15 bp, Homo sapiens
tatgatagtatcata

SEQ ID NO: 310632 - DNA, 15 bp, Homo sapiens
gtatgatagtatcat

SEQ ID NO: 310633 - DNA, 15 bp, Homo sapiens
agtatgatagtatca

SEQ ID NO: 310634 - DNA, 15 bp, Homo sapiens
tagtatgatagtatc

SEQ ID NO: 310635 - DNA, 15 bp, Homo sapiens
gtagtatgatagtat

SEQ ID NO: 310636 - DNA, 15 bp, Homo sapiens
agtagtatgatagta

SEQ ID NO: 310637 - DNA, 15 bp, Homo sapiens
cagtagtatgatagt

SEQ ID NO: 310638 - DNA, 15 bp, Homo sapiens
tcagtagtatgatag

SEQ ID NO: 310639 - DNA, 15 bp, Homo sapiens
ttcagtagtatgata

SEQ ID NO: 310640 - DNA, 15 bp, Homo sapiens
tttcagtagtatgat

SEQ ID NO: 310641 - DNA, 15 bp, Homo sapiens
gtttcagtagtatga

SEQ ID NO: 310642 - DNA, 15 bp, Homo sapiens
tgtttcagtagtatg

SEQ ID NO: 310643 - DNA, 15 bp, Homo sapiens
ctgtttcagtagtat

SEQ ID NO: 310644 - DNA, 15 bp, Homo sapiens
tctgtttcagtagta

SEQ ID NO: 310645 - DNA, 15 bp, Homo sapiens
atctgtttcagtagt

SEQ ID NO: 310646 - DNA, 15 bp, Homo sapiens
aatctgtttcagtag

SEQ ID NO: 310647 - DNA, 15 bp, Homo sapiens
aaatctgtttcagta

SEQ ID NO: 310648 - DNA, 15 bp, Homo sapiens
gaaatctgtttcagt

SEQ ID NO: 310649 - DNA, 15 bp, Homo sapiens
tgaaatctgtttcag

SEQ ID NO: 310650 - DNA, 15 bp, Homo sapiens
atgaaatctgtttca

SEQ ID NO: 310651 - DNA, 15 bp, Homo sapiens
tatgaaatctgtttc

SEQ ID NO: 310652 - DNA, 15 bp, Homo sapiens
gtatgaaatctgttt

SEQ ID NO: 310653 - DNA, 15 bp, Homo sapiens
ggtatgaaatctgtt

SEQ ID NO: 310654 - DNA, 15 bp, Homo sapiens
aggtatgaaatctgt

SEQ ID NO: 310655 - DNA, 15 bp, Homo sapiens
gaggtatgaaatctg

SEQ ID NO: 310656 - DNA, 15 bp, Homo sapiens
tgaggtatgaaatct

SEQ ID NO: 310657 - DNA, 15 bp, Homo sapiens
ctgaggtatgaaatc

SEQ ID NO: 310658 - DNA, 15 bp, Homo sapiens
tctgaggtatgaaat

SEQ ID NO: 310659 - DNA, 15 bp, Homo sapiens
ttctgaggtatgaaa

SEQ ID NO: 310660 - DNA, 15 bp, Homo sapiens
attctgaggtatgaa

SEQ ID NO: 310661 - DNA, 15 bp, Homo sapiens
cattctgaggtatga

SEQ ID NO: 310662 - DNA, 15 bp, Homo sapiens
acattctgaggtatg

SEQ ID NO: 310663 - DNA, 15 bp, Homo sapiens
tacattctgaggtat

SEQ ID NO: 310664 - DNA, 15 bp, Homo sapiens
ttacattctgaggta

SEQ ID NO: 310665 - DNA, 15 bp, Homo sapiens
tttacattctgaggt

SEQ ID NO: 310666 - DNA, 15 bp, Homo sapiens
ttttacattctgagg

SEQ ID NO: 310667 - DNA, 15 bp, Homo sapiens
cttttacattctgag

SEQ ID NO: 310668 - DNA, 15 bp, Homo sapiens
tcttttacattctga

SEQ ID NO: 310669 - DNA, 15 bp, Homo sapiens
ttcttttacattctg

SEQ ID NO: 310670 - DNA, 15 bp, Homo sapiens
gttcttttacattct

SEQ ID NO: 310671 - DNA, 15 bp, Homo sapiens
agttcttttacattc

SEQ ID NO: 310672 - DNA, 15 bp, Homo sapiens
aagttcttttacatt

SEQ ID NO: 310673 - DNA, 15 bp, Homo sapiens
taagttcttttacat

SEQ ID NO: 310674 - DNA, 15 bp, Homo sapiens
gtaagttcttttaca

SEQ ID NO: 310675 - DNA, 15 bp, Homo sapiens
agtaagttcttttac

SEQ ID NO: 310676 - DNA, 15 bp, Homo sapiens
cagtaagttctttta

SEQ ID NO: 310677 - DNA, 15 bp, Homo sapiens
tcagtaagttctttt

SEQ ID NO: 310678 - DNA, 15 bp, Homo sapiens
atcagtaagttcttt

SEQ ID NO: 310679 - DNA, 15 bp, Homo sapiens
aatcagtaagttctt

SEQ ID NO: 310680 - DNA, 15 bp, Homo sapiens
taatcagtaagttct

SEQ ID NO: 310681 - DNA, 15 bp, Homo sapiens
ataatcagtaagttc

SEQ ID NO: 310682 - DNA, 15 bp, Homo sapiens
aataatcagtaagtt

SEQ ID NO: 310683 - DNA, 15 bp, Homo sapiens
aaataatcagtaagt

SEQ ID NO: 310684 - DNA, 15 bp, Homo sapiens
aaaataatcagtaag

SEQ ID NO: 310685 - DNA, 15 bp, Homo sapiens
gaaaataatcagtaa

SEQ ID NO: 310686 - DNA, 15 bp, Homo sapiens
agaaaataatcagta

SEQ ID NO: 310687 - DNA, 15 bp, Homo sapiens
aagaaaataatcagt

SEQ ID NO: 310688 - DNA, 15 bp, Homo sapiens
gaagaaaataatcag

SEQ ID NO: 310689 - DNA, 15 bp, Homo sapiens
tgaagaaaataatca

SEQ ID NO: 310690 - DNA, 15 bp, Homo sapiens
atgaagaaaataatc

SEQ ID NO: 310691 - DNA, 15 bp, Homo sapiens
gatgaagaaaataat

SEQ ID NO: 310692 - DNA, 15 bp, Homo sapiens
ggatgaagaaaataa

SEQ ID NO: 310693 - DNA, 15 bp, Homo sapiens
tggatgaagaaaata

SEQ ID NO: 310694 - DNA, 15 bp, Homo sapiens
ttggatgaagaaaat

SEQ ID NO: 310695 - DNA, 15 bp, Homo sapiens
gttggatgaagaaaa

SEQ ID NO: 310696 - DNA, 15 bp, Homo sapiens
agttggatgaagaaa

SEQ ID NO: 310697 - DNA, 15 bp, Homo sapiens
aagttggatgaagaa

SEQ ID NO: 310698 - DNA, 15 bp, Homo sapiens
taagttggatgaaga

SEQ ID NO: 310699 - DNA, 15 bp, Homo sapiens
ataagttggatgaag

SEQ ID NO: 310700 - DNA, 15 bp, Homo sapiens
cataagttggatgaa

SEQ ID NO: 310701 - DNA, 15 bp, Homo sapiens
acataagttggatga

SEQ ID NO: 310702 - DNA, 15 bp, Homo sapiens
aacataagttggatg

SEQ ID NO: 310703 - DNA, 15 bp, Homo sapiens
aaacataagttggat

SEQ ID NO: 310704 - DNA, 15 bp, Homo sapiens
aaaacataagttgga

SEQ ID NO: 310705 - DNA, 15 bp, Homo sapiens
aaaaacataagttgg

SEQ ID NO: 310706 - DNA, 15 bp, Homo sapiens
taaaaacataagttg

SEQ ID NO: 310707 - DNA, 15 bp, Homo sapiens
ttaaaaacataagtt

SEQ ID NO: 310708 - DNA, 15 bp, Homo sapiens
tttaaaaacataagt

SEQ ID NO: 310709 - DNA, 15 bp, Homo sapiens
atttaaaaacataag

SEQ ID NO: 310710 - DNA, 15 bp, Homo sapiens
catttaaaaacataa

SEQ ID NO: 310711 - DNA, 15 bp, Homo sapiens
tcatttaaaaacata

SEQ ID NO: 310712 - DNA, 15 bp, Homo sapiens
ctcatttaaaaacat

SEQ ID NO: 310713 - DNA, 15 bp, Homo sapiens
cctcatttaaaaaca

SEQ ID NO: 310714 - DNA, 15 bp, Homo sapiens
tcctcatttaaaaac

SEQ ID NO: 310715 - DNA, 15 bp, Homo sapiens
atcctcatttaaaaa

SEQ ID NO: 310716 - DNA, 15 bp, Homo sapiens
aatcctcatttaaaa

SEQ ID NO: 310717 - DNA, 15 bp, Homo sapiens
taatcctcatttaaa

SEQ ID NO: 310718 - DNA, 15 bp, Homo sapiens
ataatcctcatttaa

SEQ ID NO: 310719 - DNA, 15 bp, Homo sapiens
aataatcctcattta

SEQ ID NO: 310720 - DNA, 15 bp, Homo sapiens
caataatcctcattt

SEQ ID NO: 310721 - DNA, 15 bp, Homo sapiens
tcaataatcctcatt

SEQ ID NO: 310722 - DNA, 15 bp, Homo sapiens
atcaataatcctcat

SEQ ID NO: 310723 - DNA, 15 bp, Homo sapiens
tatcaataatcctca

SEQ ID NO: 310724 - DNA, 15 bp, Homo sapiens
ctatcaataatcctc

SEQ ID NO: 310725 - DNA, 15 bp, Homo sapiens
actatcaataatcct

SEQ ID NO: 310726 - DNA, 15 bp, Homo sapiens
tactatcaataatcc

SEQ ID NO: 310727 - DNA, 15 bp, Homo sapiens
gtactatcaataatc

SEQ ID NO: 310728 - DNA, 15 bp, Homo sapiens
agtactatcaataat

SEQ ID NO: 310729 - DNA, 15 bp, Homo sapiens
gagtactatcaataa

SEQ ID NO: 310730 - DNA, 15 bp, Homo sapiens
agagtactatcaata

SEQ ID NO: 310731 - DNA, 15 bp, Homo sapiens
aagagtactatcaat

SEQ ID NO: 310732 - DNA, 15 bp, Homo sapiens
caagagtactatcaa

SEQ ID NO: 310733 - DNA, 15 bp, Homo sapiens
ccaagagtactatca

SEQ ID NO: 310734 - DNA, 15 bp, Homo sapiens
accaagagtactatc

SEQ ID NO: 310735 - DNA, 15 bp, Homo sapiens
aaccaagagtactat

SEQ ID NO: 310736 - DNA, 15 bp, Homo sapiens
aaaccaagagtacta

SEQ ID NO: 310737 - DNA, 15 bp, Homo sapiens
aaaaccaagagtact

SEQ ID NO: 310738 - DNA, 15 bp, Homo sapiens
aaaaaccaagagtac

SEQ ID NO: 310739 - DNA, 15 bp, Homo sapiens
taaaaaccaagagta

SEQ ID NO: 310740 - DNA, 15 bp, Homo sapiens
ataaaaaccaagagt

SEQ ID NO: 310741 - DNA, 15 bp, Homo sapiens
tataaaaaccaagag

SEQ ID NO: 310742 - DNA, 15 bp, Homo sapiens
gtataaaaaccaaga

SEQ ID NO: 310743 - DNA, 15 bp, Homo sapiens
ggtataaaaaccaag

SEQ ID NO: 310744 - DNA, 15 bp, Homo sapiens
tggtataaaaaccaa

SEQ ID NO: 310745 - DNA, 15 bp, Homo sapiens
atggtataaaaacca

SEQ ID NO: 310746 - DNA, 15 bp, Homo sapiens
aatggtataaaaacc

SEQ ID NO: 310747 - DNA, 15 bp, Homo sapiens
gaatggtataaaaac

SEQ ID NO: 310748 - DNA, 15 bp, Homo sapiens
tgaatggtataaaaa

SEQ ID NO: 310749 - DNA, 15 bp, Homo sapiens
ctgaatggtataaaa

SEQ ID NO: 310750 - DNA, 15 bp, Homo sapiens
tctgaatggtataaa

SEQ ID NO: 310751 - DNA, 15 bp, Homo sapiens
atctgaatggtataa

SEQ ID NO: 310752 - DNA, 15 bp, Homo sapiens
gatctgaatggtata

SEQ ID NO: 310753 - DNA, 15 bp, Homo sapiens
tgatctgaatggtat

SEQ ID NO: 310754 - DNA, 15 bp, Homo sapiens
gtgatctgaatggta

SEQ ID NO: 310755 - DNA, 15 bp, Homo sapiens
agtgatctgaatggt

SEQ ID NO: 310756 - DNA, 15 bp, Homo sapiens
cagtgatctgaatgg

SEQ ID NO: 310757 - DNA, 15 bp, Homo sapiens
tcagtgatctgaatg

SEQ ID NO: 310758 - DNA, 15 bp, Homo sapiens
ttcagtgatctgaat

SEQ ID NO: 310759 - DNA, 15 bp, Homo sapiens
attcagtgatctgaa

SEQ ID NO: 310760 - DNA, 15 bp, Homo sapiens
aattcagtgatctga

SEQ ID NO: 310761 - DNA, 15 bp, Homo sapiens
aaattcagtgatctg

SEQ ID NO: 310762 - DNA, 15 bp, Homo sapiens
taaattcagtgatct

SEQ ID NO: 310763 - DNA, 15 bp, Homo sapiens
ataaattcagtgatc

SEQ ID NO: 310764 - DNA, 15 bp, Homo sapiens
tataaattcagtgat

SEQ ID NO: 310765 - DNA, 15 bp, Homo sapiens
ttataaattcagtga

SEQ ID NO: 310766 - DNA, 15 bp, Homo sapiens
tttataaattcagtg

SEQ ID NO: 310767 - DNA, 15 bp, Homo sapiens
ctttataaattcagt

SEQ ID NO: 310768 - DNA, 15 bp, Homo sapiens
actttataaattcag

SEQ ID NO: 310769 - DNA, 15 bp, Homo sapiens
tactttataaattca

SEQ ID NO: 310770 - DNA, 15 bp, Homo sapiens
gtactttataaattc

SEQ ID NO: 310771 - DNA, 15 bp, Homo sapiens
ggtactttataaatt

SEQ ID NO: 310772 - DNA, 15 bp, Homo sapiens
gggtactttataaat

SEQ ID NO: 310773 - DNA, 15 bp, Homo sapiens
tgggtactttataaa

SEQ ID NO: 310774 - DNA, 15 bp, Homo sapiens
atgggtactttataa

SEQ ID NO: 310775 - DNA, 15 bp, Homo sapiens
gatgggtactttata

SEQ ID NO: 310776 - DNA, 15 bp, Homo sapiens
agatgggtactttat

SEQ ID NO: 310777 - DNA, 15 bp, Homo sapiens
tagatgggtacttta

SEQ ID NO: 310778 - DNA, 15 bp, Homo sapiens
ctagatgggtacttt

SEQ ID NO: 310779 - DNA, 15 bp, Homo sapiens
actagatgggtactt

SEQ ID NO: 310780 - DNA, 15 bp, Homo sapiens
tactagatgggtact

SEQ ID NO: 310781 - DNA, 15 bp, Homo sapiens
gtactagatgggtac

SEQ ID NO: 310782 - DNA, 15 bp, Homo sapiens
agtactagatgggta

SEQ ID NO: 310783 - DNA, 15 bp, Homo sapiens
aagtactagatgggt

SEQ ID NO: 310784 - DNA, 15 bp, Homo sapiens
caagtactagatggg

SEQ ID NO: 310785 - DNA, 15 bp, Homo sapiens
tcaagtactagatgg

SEQ ID NO: 310786 - DNA, 15 bp, Homo sapiens
ttcaagtactagatg

SEQ ID NO: 310787 - DNA, 15 bp, Homo sapiens
tttcaagtactagat

SEQ ID NO: 310788 - DNA, 15 bp, Homo sapiens
ttttcaagtactaga

SEQ ID NO: 310789 - DNA, 15 bp, Homo sapiens
tttttcaagtactag

SEQ ID NO: 310790 - DNA, 15 bp, Homo sapiens
ctttttcaagtacta

SEQ ID NO: 310791 - DNA, 15 bp, Homo sapiens
actttttcaagtact

SEQ ID NO: 310792 - DNA, 15 bp, Homo sapiens
tactttttcaagtac

SEQ ID NO: 310793 - DNA, 15 bp, Homo sapiens
ttactttttcaagta

SEQ ID NO: 310794 - DNA, 15 bp, Homo sapiens
tttactttttcaagt

SEQ ID NO: 310795 - DNA, 15 bp, Homo sapiens
ctttactttttcaag

SEQ ID NO: 310796 - DNA, 15 bp, Homo sapiens
actttactttttcaa

SEQ ID NO: 310797 - DNA, 15 bp, Homo sapiens
cactttactttttca

SEQ ID NO: 310798 - DNA, 15 bp, Homo sapiens
acactttactttttc

SEQ ID NO: 310799 - DNA, 15 bp, Homo sapiens
aacactttacttttt

SEQ ID NO: 310800 - DNA, 15 bp, Homo sapiens
gaacactttactttt

SEQ ID NO: 310801 - DNA, 15 bp, Homo sapiens
agaacactttacttt

SEQ ID NO: 310802 - DNA, 15 bp, Homo sapiens
cagaacactttactt

SEQ ID NO: 310803 - DNA, 15 bp, Homo sapiens
gcagaacactttact

SEQ ID NO: 310804 - DNA, 15 bp, Homo sapiens
ggcagaacactttac

SEQ ID NO: 310805 - DNA, 15 bp, Homo sapiens
tggcagaacacttta

SEQ ID NO: 310806 - DNA, 15 bp, Homo sapiens
ctggcagaacacttt

SEQ ID NO: 310807 - DNA, 15 bp, Homo sapiens
tctggcagaacactt

SEQ ID NO: 310808 - DNA, 15 bp, Homo sapiens
atctggcagaacact

SEQ ID NO: 310809 - DNA, 15 bp, Homo sapiens
gatctggcagaacac

SEQ ID NO: 310810 - DNA, 15 bp, Homo sapiens
agatctggcagaaca

SEQ ID NO: 310811 - DNA, 15 bp, Homo sapiens
aagatctggcagaac

SEQ ID NO: 310812 - DNA, 15 bp, Homo sapiens
taagatctggcagaa

SEQ ID NO: 310813 - DNA, 15 bp, Homo sapiens
ctaagatctggcaga

SEQ ID NO: 310814 - DNA, 15 bp, Homo sapiens
cctaagatctggcag

SEQ ID NO: 310815 - DNA, 15 bp, Homo sapiens
acctaagatctggca

SEQ ID NO: 310816 - DNA, 15 bp, Homo sapiens
tacctaagatctggc

SEQ ID NO: 310817 - DNA, 15 bp, Homo sapiens
atacctaagatctgg

SEQ ID NO: 310818 - DNA, 15 bp, Homo sapiens
tatacctaagatctg

SEQ ID NO: 310819 - DNA, 15 bp, Homo sapiens
ctatacctaagatct

SEQ ID NO: 310820 - DNA, 15 bp, Homo sapiens
tctatacctaagatc

SEQ ID NO: 310821 - DNA, 15 bp, Homo sapiens
ctctatacctaagat

SEQ ID NO: 310822 - DNA, 15 bp, Homo sapiens
cctctatacctaaga

SEQ ID NO: 310823 - DNA, 15 bp, Homo sapiens
tcctctatacctaag

SEQ ID NO: 310824 - DNA, 15 bp, Homo sapiens
gtcctctatacctaa

SEQ ID NO: 310825 - DNA, 15 bp, Homo sapiens
ggtcctctataccta

SEQ ID NO: 310826 - DNA, 15 bp, Homo sapiens
gggtcctctatacct

SEQ ID NO: 310827 - DNA, 15 bp, Homo sapiens
agggtcctctatacc

SEQ ID NO: 310828 - DNA, 15 bp, Homo sapiens
tagggtcctctatac

SEQ ID NO: 310829 - DNA, 15 bp, Homo sapiens
ttagggtcctctata

SEQ ID NO: 310830 - DNA, 15 bp, Homo sapiens
gttagggtcctctat

SEQ ID NO: 310831 - DNA, 15 bp, Homo sapiens
tgttagggtcctcta

SEQ ID NO: 310832 - DNA, 15 bp, Homo sapiens
gtgttagggtcctct

SEQ ID NO: 310833 - DNA, 15 bp, Homo sapiens
tgtgttagggtcctc

SEQ ID NO: 310834 - DNA, 15 bp, Homo sapiens
ctgtgttagggtcct

SEQ ID NO: 310835 - DNA, 15 bp, Homo sapiens
actgtgttagggtcc

SEQ ID NO: 310836 - DNA, 15 bp, Homo sapiens
tactgtgttagggtc

SEQ ID NO: 310837 - DNA, 15 bp, Homo sapiens
atactgtgttagggt

SEQ ID NO: 310838 - DNA, 15 bp, Homo sapiens
tatactgtgttaggg

SEQ ID NO: 310839 - DNA, 15 bp, Homo sapiens
atatactgtgttagg

SEQ ID NO: 310840 - DNA, 15 bp, Homo sapiens
gatatactgtgttag

SEQ ID NO: 310841 - DNA, 15 bp, Homo sapiens
ggatatactgtgtta

SEQ ID NO: 310842 - DNA, 15 bp, Homo sapiens
gggatatactgtgtt

SEQ ID NO: 310843 - DNA, 15 bp, Homo sapiens
tgggatatactgtgt

SEQ ID NO: 310844 - DNA, 15 bp, Homo sapiens
ttgggatatactgtg

SEQ ID NO: 310845 - DNA, 15 bp, Homo sapiens
cttgggatatactgt

SEQ ID NO: 310846 - DNA, 15 bp, Homo sapiens
acttgggatatactg

SEQ ID NO: 310847 - DNA, 15 bp, Homo sapiens
cacttgggatatact

SEQ ID NO: 310848 - DNA, 15 bp, Homo sapiens
gcacttgggatatac

SEQ ID NO: 310849 - DNA, 15 bp, Homo sapiens
tgcacttgggatata

SEQ ID NO: 310850 - DNA, 15 bp, Homo sapiens
gtgcacttgggatat

SEQ ID NO: 310851 - DNA, 15 bp, Homo sapiens
agtgcacttgggata

SEQ ID NO: 310852 - DNA, 15 bp, Homo sapiens
aagtgcacttgggat

SEQ ID NO: 310853 - DNA, 15 bp, Homo sapiens
aaagtgcacttggga

SEQ ID NO: 310854 - DNA, 15 bp, Homo sapiens
gaaagtgcacttggg

SEQ ID NO: 310855 - DNA, 15 bp, Homo sapiens
agaaagtgcacttgg

SEQ ID NO: 310856 - DNA, 15 bp, Homo sapiens
tagaaagtgcacttg

SEQ ID NO: 310857 - DNA, 15 bp, Homo sapiens
ttagaaagtgcactt

SEQ ID NO: 310858 - DNA, 15 bp, Homo sapiens
attagaaagtgcact

SEQ ID NO: 310859 - DNA, 15 bp, Homo sapiens
cattagaaagtgcac

SEQ ID NO: 310860 - DNA, 15 bp, Homo sapiens
acattagaaagtgca

SEQ ID NO: 310861 - DNA, 15 bp, Homo sapiens
aacattagaaagtgc

SEQ ID NO: 310862 - DNA, 15 bp, Homo sapiens
aaacattagaaagtg

SEQ ID NO: 310863 - DNA, 15 bp, Homo sapiens
gaaacattagaaagt

SEQ ID NO: 310864 - DNA, 15 bp, Homo sapiens
agaaacattagaaag

SEQ ID NO: 310865 - DNA, 15 bp, Homo sapiens
cagaaacattagaaa

SEQ ID NO: 310866 - DNA, 15 bp, Homo sapiens
ccagaaacattagaa

SEQ ID NO: 310867 - DNA, 15 bp, Homo sapiens
cccagaaacattaga

SEQ ID NO: 310868 - DNA, 15 bp, Homo sapiens
acccagaaacattag

SEQ ID NO: 310869 - DNA, 15 bp, Homo sapiens
gacccagaaacatta

SEQ ID NO: 310870 - DNA, 15 bp, Homo sapiens
ggacccagaaacatt

SEQ ID NO: 310871 - DNA, 15 bp, Homo sapiens
aggacccagaaacat

SEQ ID NO: 310872 - DNA, 15 bp, Homo sapiens
caggacccagaaaca

SEQ ID NO: 310873 - DNA, 15 bp, Homo sapiens
tcaggacccagaaac

SEQ ID NO: 310874 - DNA, 15 bp, Homo sapiens
ttcaggacccagaaa

SEQ ID NO: 310875 - DNA, 15 bp, Homo sapiens
cttcaggacccagaa

SEQ ID NO: 310876 - DNA, 15 bp, Homo sapiens
tcttcaggacccaga

SEQ ID NO: 310877 - DNA, 15 bp, Homo sapiens
ttcttcaggacccag

SEQ ID NO: 310878 - DNA, 15 bp, Homo sapiens
attcttcaggaccca

SEQ ID NO: 310879 - DNA, 15 bp, Homo sapiens
aattcttcaggaccc

SEQ ID NO: 310880 - DNA, 15 bp, Homo sapiens
taattcttcaggacc

SEQ ID NO: 310881 - DNA, 15 bp, Homo sapiens
ttaattcttcaggac

SEQ ID NO: 310882 - DNA, 15 bp, Homo sapiens
cttaattcttcagga

SEQ ID NO: 310883 - DNA, 15 bp, Homo sapiens
tcttaattcttcagg

SEQ ID NO: 310884 - DNA, 15 bp, Homo sapiens
atcttaattcttcag

SEQ ID NO: 310885 - DNA, 15 bp, Homo sapiens
tatcttaattcttca

SEQ ID NO: 310886 - DNA, 15 bp, Homo sapiens
gtatcttaattcttc

SEQ ID NO: 310887 - DNA, 15 bp, Homo sapiens
tgtatcttaattctt

SEQ ID NO: 310888 - DNA, 15 bp, Homo sapiens
ttgtatcttaattct

SEQ ID NO: 310889 - DNA, 15 bp, Homo sapiens
tttgtatcttaattc

SEQ ID NO: 310890 - DNA, 15 bp, Homo sapiens
atttgtatcttaatt

SEQ ID NO: 310891 - DNA, 15 bp, Homo sapiens
aatttgtatcttaat

SEQ ID NO: 310892 - DNA, 15 bp, Homo sapiens
taatttgtatcttaa

SEQ ID NO: 310893 - DNA, 15 bp, Homo sapiens
ttaatttgtatctta

SEQ ID NO: 310894 - DNA, 15 bp, Homo sapiens
attaatttgtatctt

SEQ ID NO: 310895 - DNA, 15 bp, Homo sapiens
aattaatttgtatct

SEQ ID NO: 310896 - DNA, 15 bp, Homo sapiens
aaattaatttgtatc

SEQ ID NO: 310897 - DNA, 15 bp, Homo sapiens
aaaattaatttgtat

SEQ ID NO: 310898 - DNA, 15 bp, Homo sapiens
taaaattaatttgta

SEQ ID NO: 310899 - DNA, 15 bp, Homo sapiens
gtaaaattaatttgt

SEQ ID NO: 310900 - DNA, 15 bp, Homo sapiens
agtaaaattaatttg

SEQ ID NO: 310901 - DNA, 15 bp, Homo sapiens
gagtaaaattaattt

SEQ ID NO: 310902 - DNA, 15 bp, Homo sapiens
ggagtaaaattaatt

SEQ ID NO: 310903 - DNA, 15 bp, Homo sapiens
tggagtaaaattaat

SEQ ID NO: 310904 - DNA, 15 bp, Homo sapiens
atggagtaaaattaa

SEQ ID NO: 310905 - DNA, 15 bp, Homo sapiens
tatggagtaaaatta

SEQ ID NO: 310906 - DNA, 15 bp, Homo sapiens
ttatggagtaaaatt

SEQ ID NO: 310907 - DNA, 15 bp, Homo sapiens
tttatggagtaaaat

SEQ ID NO: 310908 - DNA, 15 bp, Homo sapiens
gtttatggagtaaaa

SEQ ID NO: 310909 - DNA, 15 bp, Homo sapiens
tgtttatggagtaaa

SEQ ID NO: 310910 - DNA, 15 bp, Homo sapiens
ctgtttatggagtaa

SEQ ID NO: 310911 - DNA, 15 bp, Homo sapiens
tctgtttatggagta

SEQ ID NO: 310912 - DNA, 15 bp, Homo sapiens
gtctgtttatggagt

SEQ ID NO: 310913 - DNA, 15 bp, Homo sapiens
agtctgtttatggag

SEQ ID NO: 310914 - DNA, 15 bp, Homo sapiens
cagtctgtttatgga

SEQ ID NO: 310915 - DNA, 15 bp, Homo sapiens
acagtctgtttatgg

SEQ ID NO: 310916 - DNA, 15 bp, Homo sapiens
aacagtctgtttatg

SEQ ID NO: 310917 - DNA, 15 bp, Homo sapiens
taacagtctgtttat

SEQ ID NO: 310918 - DNA, 15 bp, Homo sapiens
ttaacagtctgttta

SEQ ID NO: 310919 - DNA, 15 bp, Homo sapiens
attaacagtctgttt

SEQ ID NO: 310920 - DNA, 15 bp, Homo sapiens
aattaacagtctgtt

SEQ ID NO: 310921 - DNA, 15 bp, Homo sapiens
taattaacagtctgt

SEQ ID NO: 310922 - DNA, 15 bp, Homo sapiens
ataattaacagtctg

SEQ ID NO: 310923 - DNA, 15 bp, Homo sapiens
tataattaacagtct

SEQ ID NO: 310924 - DNA, 15 bp, Homo sapiens
ctataattaacagtc

SEQ ID NO: 310925 - DNA, 15 bp, Homo sapiens
cctataattaacagt

SEQ ID NO: 310926 - DNA, 15 bp, Homo sapiens
tcctataattaacag

SEQ ID NO: 310927 - DNA, 15 bp, Homo sapiens
ctcctataattaaca

SEQ ID NO: 310928 - DNA, 15 bp, Homo sapiens
gctcctataattaac

SEQ ID NO: 310929 - DNA, 15 bp, Homo sapiens
ggctcctataattaa

SEQ ID NO: 310930 - DNA, 15 bp, Homo sapiens
aggctcctataatta

SEQ ID NO: 310931 - DNA, 15 bp, Homo sapiens
aaggctcctataatt

SEQ ID NO: 310932 - DNA, 15 bp, Homo sapiens
taaggctcctataat

SEQ ID NO: 310933 - DNA, 15 bp, Homo sapiens
ttaaggctcctataa

SEQ ID NO: 310934 - DNA, 15 bp, Homo sapiens
attaaggctcctata

SEQ ID NO: 310935 - DNA, 15 bp, Homo sapiens
aattaaggctcctat

SEQ ID NO: 310936 - DNA, 15 bp, Homo sapiens
aaattaaggctccta

SEQ ID NO: 310937 - DNA, 15 bp, Homo sapiens
aaaattaaggctcct

SEQ ID NO: 310938 - DNA, 15 bp, Homo sapiens
aaaaattaaggctcc

SEQ ID NO: 310939 - DNA, 15 bp, Homo sapiens
aaaaaattaaggctc

SEQ ID NO: 310940 - DNA, 15 bp, Homo sapiens
aaaaaaattaaggct

SEQ ID NO: 310941 - DNA, 15 bp, Homo sapiens
aaaaaaaattaaggc

SEQ ID NO: 310942 - DNA, 15 bp, Homo sapiens
aaaaaaaaattaagg

SEQ ID NO: 310943 - DNA, 15 bp, Homo sapiens
gaaaaaaaaattaag

SEQ ID NO: 310944 - DNA, 15 bp, Homo sapiens
atgaaaaaaaaatta

SEQ ID NO: 310945 - DNA, 15 bp, Homo sapiens
tatgaaaaaaaaatt

SEQ ID NO: 310946 - DNA, 15 bp, Homo sapiens
ctatgaaaaaaaaat

SEQ ID NO: 310947 - DNA, 15 bp, Homo sapiens
tctatgaaaaaaaaa

SEQ ID NO: 310948 - DNA, 15 bp, Homo sapiens
ctctatgaaaaaaaa

SEQ ID NO: 310949 - DNA, 15 bp, Homo sapiens
tctctatgaaaaaaa

SEQ ID NO: 310950 - DNA, 15 bp, Homo sapiens
atctctatgaaaaaa

SEQ ID NO: 310951 - DNA, 15 bp, Homo sapiens
aatctctatgaaaaa

SEQ ID NO: 310952 - DNA, 15 bp, Homo sapiens
aaatctctatgaaaa

SEQ ID NO: 310953 - DNA, 15 bp, Homo sapiens
caaatctctatgaaa

SEQ ID NO: 310954 - DNA, 15 bp, Homo sapiens
acaaatctctatgaa

SEQ ID NO: 310955 - DNA, 15 bp, Homo sapiens
gacaaatctctatga

SEQ ID NO: 310956 - DNA, 15 bp, Homo sapiens
agacaaatctctatg

SEQ ID NO: 310957 - DNA, 15 bp, Homo sapiens
tagacaaatctctat

SEQ ID NO: 310958 - DNA, 15 bp, Homo sapiens
ttagacaaatctcta

SEQ ID NO: 310959 - DNA, 15 bp, Homo sapiens
attagacaaatctct

SEQ ID NO: 310960 - DNA, 15 bp, Homo sapiens
aattagacaaatctc

SEQ ID NO: 310961 - DNA, 15 bp, Homo sapiens
caattagacaaatct

SEQ ID NO: 310962 - DNA, 15 bp, Homo sapiens
gcaattagacaaatc

SEQ ID NO: 310963 - DNA, 15 bp, Homo sapiens
tgcaattagacaaat

SEQ ID NO: 310964 - DNA, 15 bp, Homo sapiens
atgcaattagacaaa

SEQ ID NO: 310965 - DNA, 15 bp, Homo sapiens
gatgcaattagacaa

SEQ ID NO: 310966 - DNA, 15 bp, Homo sapiens
agatgcaattagaca

SEQ ID NO: 310967 - DNA, 15 bp, Homo sapiens
gagatgcaattagac

SEQ ID NO: 310968 - DNA, 15 bp, Homo sapiens
tgagatgcaattaga

SEQ ID NO: 310969 - DNA, 15 bp, Homo sapiens
ttgagatgcaattag

SEQ ID NO: 310970 - DNA, 15 bp, Homo sapiens
tttgagatgcaatta

SEQ ID NO: 310971 - DNA, 15 bp, Homo sapiens
ttttgagatgcaatt

SEQ ID NO: 310972 - DNA, 15 bp, Homo sapiens
attttgagatgcaat

SEQ ID NO: 310973 - DNA, 15 bp, Homo sapiens
aattttgagatgcaa

SEQ ID NO: 310974 - DNA, 15 bp, Homo sapiens
taattttgagatgca

SEQ ID NO: 310975 - DNA, 15 bp, Homo sapiens
ataattttgagatgc

SEQ ID NO: 310976 - DNA, 15 bp, Homo sapiens
aataattttgagatg

SEQ ID NO: 310977 - DNA, 15 bp, Homo sapiens
gaataattttgagat

SEQ ID NO: 310978 - DNA, 15 bp, Homo sapiens
agaataattttgaga

SEQ ID NO: 310979 - DNA, 15 bp, Homo sapiens
cagaataattttgag

SEQ ID NO: 310980 - DNA, 15 bp, Homo sapiens
gcagaataattttga

SEQ ID NO: 310981 - DNA, 15 bp, Homo sapiens
ggcagaataattttg

SEQ ID NO: 310982 - DNA, 15 bp, Homo sapiens
gggcagaataatttt

SEQ ID NO: 310983 - DNA, 15 bp, Homo sapiens
agggcagaataattt

SEQ ID NO: 310984 - DNA, 15 bp, Homo sapiens
gagggcagaataatt

SEQ ID NO: 310985 - DNA, 15 bp, Homo sapiens
ggagggcagaataat

SEQ ID NO: 310986 - DNA, 15 bp, Homo sapiens
aggagggcagaataa

SEQ ID NO: 310987 - DNA, 15 bp, Homo sapiens
aaggagggcagaata

SEQ ID NO: 310988 - DNA, 15 bp, Homo sapiens
taaggagggcagaat

SEQ ID NO: 310989 - DNA, 15 bp, Homo sapiens
ttaaggagggcagaa

SEQ ID NO: 310990 - DNA, 15 bp, Homo sapiens
attaaggagggcaga

SEQ ID NO: 310991 - DNA, 15 bp, Homo sapiens
aattaaggagggcag

SEQ ID NO: 310992 - DNA, 15 bp, Homo sapiens
aaattaaggagggca

SEQ ID NO: 310993 - DNA, 15 bp, Homo sapiens
caaattaaggagggc

SEQ ID NO: 310994 - DNA, 15 bp, Homo sapiens
ccaaattaaggaggg

SEQ ID NO: 310995 - DNA, 15 bp, Homo sapiens
cccaaattaaggagg

SEQ ID NO: 310996 - DNA, 15 bp, Homo sapiens
tcccaaattaaggag

SEQ ID NO: 310997 - DNA, 15 bp, Homo sapiens
ttcccaaattaagga

SEQ ID NO: 310998 - DNA, 15 bp, Homo sapiens
cttcccaaattaagg

SEQ ID NO: 310999 - DNA, 15 bp, Homo sapiens
ccttcccaaattaag

SEQ ID NO: 311000 - DNA, 15 bp, Homo sapiens
accttcccaaattaa

SEQ ID NO: 311001 - DNA, 15 bp, Homo sapiens
aaccttcccaaatta

SEQ ID NO: 311002 - DNA, 15 bp, Homo sapiens
aaaccttcccaaatt

SEQ ID NO: 311003 - DNA, 15 bp, Homo sapiens
caaaccttcccaaat

SEQ ID NO: 311004 - DNA, 15 bp, Homo sapiens
acaaaccttcccaaa

SEQ ID NO: 311005 - DNA, 15 bp, Homo sapiens
cacaaaccttcccaa

SEQ ID NO: 311006 - DNA, 15 bp, Homo sapiens
acacaaaccttccca

SEQ ID NO: 311007 - DNA, 15 bp, Homo sapiens
aacacaaaccttccc

SEQ ID NO: 311008 - DNA, 15 bp, Homo sapiens
aaacacaaaccttcc

SEQ ID NO: 311009 - DNA, 15 bp, Homo sapiens
aaaacacaaaccttc

SEQ ID NO: 311010 - DNA, 15 bp, Homo sapiens
gaaaacacaaacctt

SEQ ID NO: 311011 - DNA, 15 bp, Homo sapiens
agaaaacacaaacct

SEQ ID NO: 311012 - DNA, 15 bp, Homo sapiens
gagaaaacacaaacc

SEQ ID NO: 311013 - DNA, 15 bp, Homo sapiens
agagaaaacacaaac

SEQ ID NO: 311014 - DNA, 15 bp, Homo sapiens
cagagaaaacacaaa

SEQ ID NO: 311015 - DNA, 15 bp, Homo sapiens
ccagagaaaacacaa

SEQ ID NO: 311016 - DNA, 15 bp, Homo sapiens
tccagagaaaacaca

SEQ ID NO: 311017 - DNA, 15 bp, Homo sapiens
ttccagagaaaacac

SEQ ID NO: 311018 - DNA, 15 bp, Homo sapiens
attccagagaaaaca

SEQ ID NO: 311019 - DNA, 15 bp, Homo sapiens
cattccagagaaaac

SEQ ID NO: 311020 - DNA, 15 bp, Homo sapiens
ccattccagagaaaa

SEQ ID NO: 311021 - DNA, 15 bp, Homo sapiens
accattccagagaaa

SEQ ID NO: 311022 - DNA, 15 bp, Homo sapiens
taccattccagagaa

SEQ ID NO: 311023 - DNA, 15 bp, Homo sapiens
gtaccattccagaga

SEQ ID NO: 311024 - DNA, 15 bp, Homo sapiens
tgtaccattccagag

SEQ ID NO: 311025 - DNA, 15 bp, Homo sapiens
atgtaccattccaga

SEQ ID NO: 311026 - DNA, 15 bp, Homo sapiens
catgtaccattccag

SEQ ID NO: 311027 - DNA, 15 bp, Homo sapiens
acatgtaccattcca

SEQ ID NO: 311028 - DNA, 15 bp, Homo sapiens
gacatgtaccattcc

SEQ ID NO: 311029 - DNA, 15 bp, Homo sapiens
agacatgtaccattc

SEQ ID NO: 311030 - DNA, 15 bp, Homo sapiens
aagacatgtaccatt

SEQ ID NO: 311031 - DNA, 15 bp, Homo sapiens
gaagacatgtaccat

SEQ ID NO: 311032 - DNA, 15 bp, Homo sapiens
ggaagacatgtacca

SEQ ID NO: 311033 - DNA, 15 bp, Homo sapiens
tggaagacatgtacc

SEQ ID NO: 311034 - DNA, 15 bp, Homo sapiens
atggaagacatgtac

SEQ ID NO: 311035 - DNA, 15 bp, Homo sapiens
catggaagacatgta

SEQ ID NO: 311036 - DNA, 15 bp, Homo sapiens
acatggaagacatgt

SEQ ID NO: 311037 - DNA, 15 bp, Homo sapiens
tacatggaagacatg

SEQ ID NO: 311038 - DNA, 15 bp, Homo sapiens
atacatggaagacat

SEQ ID NO: 311039 - DNA, 15 bp, Homo sapiens
gatacatggaagaca

SEQ ID NO: 311040 - DNA, 15 bp, Homo sapiens
agatacatggaagac

SEQ ID NO: 311041 - DNA, 15 bp, Homo sapiens
aagatacatggaaga

SEQ ID NO: 311042 - DNA, 15 bp, Homo sapiens
aaagatacatggaag

SEQ ID NO: 311043 - DNA, 15 bp, Homo sapiens
aaaagatacatggaa

SEQ ID NO: 311044 - DNA, 15 bp, Homo sapiens
caaaagatacatgga

SEQ ID NO: 311045 - DNA, 15 bp, Homo sapiens
tcaaaagatacatgg

SEQ ID NO: 311046 - DNA, 15 bp, Homo sapiens
ttcaaaagatacatg

SEQ ID NO: 311047 - DNA, 15 bp, Homo sapiens
gttcaaaagatacat

SEQ ID NO: 311048 - DNA, 15 bp, Homo sapiens
agttcaaaagataca

SEQ ID NO: 311049 - DNA, 15 bp, Homo sapiens
cagttcaaaagatac

SEQ ID NO: 311050 - DNA, 15 bp, Homo sapiens
ccagttcaaaagata

SEQ ID NO: 311051 - DNA, 15 bp, Homo sapiens
gccagttcaaaagat

SEQ ID NO: 311052 - DNA, 15 bp, Homo sapiens
tgccagttcaaaaga

SEQ ID NO: 311053 - DNA, 15 bp, Homo sapiens
ttgccagttcaaaag

SEQ ID NO: 311054 - DNA, 15 bp, Homo sapiens
attgccagttcaaaa

SEQ ID NO: 311055 - DNA, 15 bp, Homo sapiens
aattgccagttcaaa

SEQ ID NO: 311056 - DNA, 15 bp, Homo sapiens
caattgccagttcaa

SEQ ID NO: 311057 - DNA, 15 bp, Homo sapiens
acaattgccagttca

SEQ ID NO: 311058 - DNA, 15 bp, Homo sapiens
gacaattgccagttc

SEQ ID NO: 311059 - DNA, 15 bp, Homo sapiens
agacaattgccagtt

SEQ ID NO: 311060 - DNA, 15 bp, Homo sapiens
tagacaattgccagt

SEQ ID NO: 311061 - DNA, 15 bp, Homo sapiens
atagacaattgccag

SEQ ID NO: 311062 - DNA, 15 bp, Homo sapiens
aatagacaattgcca

SEQ ID NO: 311063 - DNA, 15 bp, Homo sapiens
aaatagacaattgcc

SEQ ID NO: 311064 - DNA, 15 bp, Homo sapiens
taaatagacaattgc

SEQ ID NO: 311065 - DNA, 15 bp, Homo sapiens
ataaatagacaattg

SEQ ID NO: 311066 - DNA, 15 bp, Homo sapiens
gataaatagacaatt

SEQ ID NO: 311067 - DNA, 15 bp, Homo sapiens
agataaatagacaat

SEQ ID NO: 311068 - DNA, 15 bp, Homo sapiens
aagataaatagacaa

SEQ ID NO: 311069 - DNA, 15 bp, Homo sapiens
aaagataaatagaca

SEQ ID NO: 311070 - DNA, 15 bp, Homo sapiens
aaaagataaatagac

SEQ ID NO: 311071 - DNA, 15 bp, Homo sapiens
taaaagataaataga

SEQ ID NO: 311072 - DNA, 15 bp, Homo sapiens
ataaaagataaatag

SEQ ID NO: 311073 - DNA, 15 bp, Homo sapiens
aataaaagataaata

SEQ ID NO: 311074 - DNA, 15 bp, Homo sapiens
aaataaaagataaat

SEQ ID NO: 311075 - DNA, 15 bp, Homo sapiens
aaaataaaagataaa

SEQ ID NO: 311076 - DNA, 15 bp, Homo sapiens
aaaaataaaagataa

SEQ ID NO: 311077 - DNA, 15 bp, Homo sapiens
aaaaaataaaagata

SEQ ID NO: 311078 - DNA, 15 bp, Homo sapiens
aaaaaaataaaagat

SEQ ID NO: 311079 - DNA, 15 bp, Homo sapiens
taaaaaaataaaaga

SEQ ID NO: 311080 - DNA, 15 bp, Homo sapiens
ttaaaaaaataaaag

SEQ ID NO: 311081 - DNA, 15 bp, Homo sapiens
cttaaaaaaataaaa

SEQ ID NO: 311082 - DNA, 15 bp, Homo sapiens
acttaaaaaaataaa

SEQ ID NO: 311083 - DNA, 15 bp, Homo sapiens
gacttaaaaaaataa

SEQ ID NO: 311084 - DNA, 15 bp, Homo sapiens
tgacttaaaaaaata

SEQ ID NO: 311085 - DNA, 15 bp, Homo sapiens
ctgacttaaaaaaat

SEQ ID NO: 311086 - DNA, 15 bp, Homo sapiens
actgacttaaaaaaa

SEQ ID NO: 311087 - DNA, 15 bp, Homo sapiens
tactgacttaaaaaa

SEQ ID NO: 311088 - DNA, 15 bp, Homo sapiens
atactgacttaaaaa

SEQ ID NO: 311089 - DNA, 15 bp, Homo sapiens
catactgacttaaaa

SEQ ID NO: 311090 - DNA, 15 bp, Homo sapiens
ccatactgacttaaa

SEQ ID NO: 311091 - DNA, 15 bp, Homo sapiens
accatactgacttaa

SEQ ID NO: 311092 - DNA, 15 bp, Homo sapiens
gaccatactgactta

SEQ ID NO: 311093 - DNA, 15 bp, Homo sapiens
agaccatactgactt

SEQ ID NO: 311094 - DNA, 15 bp, Homo sapiens
tagaccatactgact

SEQ ID NO: 311095 - DNA, 15 bp, Homo sapiens
ttagaccatactgac

SEQ ID NO: 311096 - DNA, 15 bp, Homo sapiens
gttagaccatactga

SEQ ID NO: 311097 - DNA, 15 bp, Homo sapiens
tgttagaccatactg

SEQ ID NO: 311098 - DNA, 15 bp, Homo sapiens
gtgttagaccatact

SEQ ID NO: 311099 - DNA, 15 bp, Homo sapiens
agtgttagaccatac

SEQ ID NO: 311100 - DNA, 15 bp, Homo sapiens
cagtgttagaccata

SEQ ID NO: 311101 - DNA, 15 bp, Homo sapiens
ccagtgttagaccat

SEQ ID NO: 311102 - DNA, 15 bp, Homo sapiens
gccagtgttagacca

SEQ ID NO: 311103 - DNA, 15 bp, Homo sapiens
tgccagtgttagacc

SEQ ID NO: 311104 - DNA, 15 bp, Homo sapiens
atgccagtgttagac

SEQ ID NO: 311105 - DNA, 15 bp, Homo sapiens
catgccagtgttaga

SEQ ID NO: 311106 - DNA, 15 bp, Homo sapiens
acatgccagtgttag

SEQ ID NO: 311107 - DNA, 15 bp, Homo sapiens
aacatgccagtgtta

SEQ ID NO: 311108 - DNA, 15 bp, Homo sapiens
gaacatgccagtgtt

SEQ ID NO: 311109 - DNA, 15 bp, Homo sapiens
tgaacatgccagtgt

SEQ ID NO: 311110 - DNA, 15 bp, Homo sapiens
ttgaacatgccagtg

SEQ ID NO: 311111 - DNA, 15 bp, Homo sapiens
tttgaacatgccagt

SEQ ID NO: 311112 - DNA, 15 bp, Homo sapiens
ctttgaacatgccag

SEQ ID NO: 311113 - DNA, 15 bp, Homo sapiens
gctttgaacatgcca

SEQ ID NO: 311114 - DNA, 15 bp, Homo sapiens
ggctttgaacatgcc

SEQ ID NO: 311115 - DNA, 15 bp, Homo sapiens
tggctttgaacatgc

SEQ ID NO: 311116 - DNA, 15 bp, Homo sapiens
gtggctttgaacatg

SEQ ID NO: 311117 - DNA, 15 bp, Homo sapiens
tgtggctttgaacat

SEQ ID NO: 311118 - DNA, 15 bp, Homo sapiens
atgtggctttgaaca

SEQ ID NO: 311119 - DNA, 15 bp, Homo sapiens
aatgtggctttgaac

SEQ ID NO: 311120 - DNA, 15 bp, Homo sapiens
taatgtggctttgaa

SEQ ID NO: 311121 - DNA, 15 bp, Homo sapiens
ataatgtggctttga

SEQ ID NO: 311122 - DNA, 15 bp, Homo sapiens
aataatgtggctttg

SEQ ID NO: 311123 - DNA, 15 bp, Homo sapiens
aaataatgtggcttt

SEQ ID NO: 311124 - DNA, 15 bp, Homo sapiens
gaaataatgtggctt

SEQ ID NO: 311125 - DNA, 15 bp, Homo sapiens
agaaataatgtggct

SEQ ID NO: 311126 - DNA, 15 bp, Homo sapiens
tagaaataatgtggc

SEQ ID NO: 311127 - DNA, 15 bp, Homo sapiens
ctagaaataatgtgg

SEQ ID NO: 311128 - DNA, 15 bp, Homo sapiens
actagaaataatgtg

SEQ ID NO: 311129 - DNA, 15 bp, Homo sapiens
gactagaaataatgt

SEQ ID NO: 311130 - DNA, 15 bp, Homo sapiens
ggactagaaataatg

SEQ ID NO: 311131 - DNA, 15 bp, Homo sapiens
tggactagaaataat

SEQ ID NO: 311132 - DNA, 15 bp, Homo sapiens
ttggactagaaataa

SEQ ID NO: 311133 - DNA, 15 bp, Homo sapiens
tttggactagaaata

SEQ ID NO: 311134 - DNA, 15 bp, Homo sapiens
ttttggactagaaat

SEQ ID NO: 311135 - DNA, 15 bp, Homo sapiens
attttggactagaaa

SEQ ID NO: 311136 - DNA, 15 bp, Homo sapiens
aattttggactagaa

SEQ ID NO: 311137 - DNA, 15 bp, Homo sapiens
taattttggactaga

SEQ ID NO: 311138 - DNA, 15 bp, Homo sapiens
gtaattttggactag

SEQ ID NO: 311139 - DNA, 15 bp, Homo sapiens
tgtaattttggacta

SEQ ID NO: 311140 - DNA, 15 bp, Homo sapiens
ttgtaattttggact

SEQ ID NO: 311141 - DNA, 15 bp, Homo sapiens
cttgtaattttggac

SEQ ID NO: 311142 - DNA, 15 bp, Homo sapiens
acttgtaattttgga

SEQ ID NO: 311143 - DNA, 15 bp, Homo sapiens
tacttgtaattttgg

SEQ ID NO: 311144 - DNA, 15 bp, Homo sapiens
ttacttgtaattttg

SEQ ID NO: 311145 - DNA, 15 bp, Homo sapiens
attacttgtaatttt

SEQ ID NO: 311146 - DNA, 15 bp, Homo sapiens
gattacttgtaattt

SEQ ID NO: 311147 - DNA, 15 bp, Homo sapiens
tgattacttgtaatt

SEQ ID NO: 311148 - DNA, 15 bp, Homo sapiens
ttgattacttgtaat

SEQ ID NO: 311149 - DNA, 15 bp, Homo sapiens
cttgattacttgtaa

SEQ ID NO: 311150 - DNA, 15 bp, Homo sapiens
ccttgattacttgta

SEQ ID NO: 311151 - DNA, 15 bp, Homo sapiens
cccttgattacttgt

SEQ ID NO: 311152 - DNA, 15 bp, Homo sapiens
acccttgattacttg

SEQ ID NO: 311153 - DNA, 15 bp, Homo sapiens
gacccttgattactt

SEQ ID NO: 311154 - DNA, 15 bp, Homo sapiens
tgacccttgattact

SEQ ID NO: 311155 - DNA, 15 bp, Homo sapiens
atgacccttgattac

SEQ ID NO: 311156 - DNA, 15 bp, Homo sapiens
aatgacccttgatta

SEQ ID NO: 311157 - DNA, 15 bp, Homo sapiens
taatgacccttgatt

SEQ ID NO: 311158 - DNA, 15 bp, Homo sapiens
ataatgacccttgat

SEQ ID NO: 311159 - DNA, 15 bp, Homo sapiens
cataatgacccttga

SEQ ID NO: 311160 - DNA, 15 bp, Homo sapiens
ccataatgacccttg

SEQ ID NO: 311161 - DNA, 15 bp, Homo sapiens
cccataatgaccctt

SEQ ID NO: 311162 - DNA, 15 bp, Homo sapiens
acccataatgaccct

SEQ ID NO: 311163 - DNA, 15 bp, Homo sapiens
aacccataatgaccc

SEQ ID NO: 311164 - DNA, 15 bp, Homo sapiens
taacccataatgacc

SEQ ID NO: 311165 - DNA, 15 bp, Homo sapiens
ctaacccataatgac

SEQ ID NO: 311166 - DNA, 15 bp, Homo sapiens
cctaacccataatga

SEQ ID NO: 311167 - DNA, 15 bp, Homo sapiens
gcctaacccataatg

SEQ ID NO: 311168 - DNA, 15 bp, Homo sapiens
tgcctaacccataat

SEQ ID NO: 311169 - DNA, 15 bp, Homo sapiens
atgcctaacccataa

SEQ ID NO: 311170 - DNA, 15 bp, Homo sapiens
aatgcctaacccata

SEQ ID NO: 311171 - DNA, 15 bp, Homo sapiens
taatgcctaacccat

SEQ ID NO: 311172 - DNA, 15 bp, Homo sapiens
ttaatgcctaaccca

SEQ ID NO: 311173 - DNA, 15 bp, Homo sapiens
attaatgcctaaccc

SEQ ID NO: 311174 - DNA, 15 bp, Homo sapiens
cattaatgcctaacc

SEQ ID NO: 311175 - DNA, 15 bp, Homo sapiens
acattaatgcctaac

SEQ ID NO: 311176 - DNA, 15 bp, Homo sapiens
aacattaatgcctaa

SEQ ID NO: 311177 - DNA, 15 bp, Homo sapiens
aaacattaatgccta

SEQ ID NO: 311178 - DNA, 15 bp, Homo sapiens
gaaacattaatgcct

SEQ ID NO: 311179 - DNA, 15 bp, Homo sapiens
agaaacattaatgcc

SEQ ID NO: 311180 - DNA, 15 bp, Homo sapiens
tagaaacattaatgc

SEQ ID NO: 311181 - DNA, 15 bp, Homo sapiens
atagaaacattaatg

SEQ ID NO: 311182 - DNA, 15 bp, Homo sapiens
gatagaaacattaat

SEQ ID NO: 311183 - DNA, 15 bp, Homo sapiens
agatagaaacattaa

SEQ ID NO: 311184 - DNA, 15 bp, Homo sapiens
cagatagaaacatta

SEQ ID NO: 311185 - DNA, 15 bp, Homo sapiens
tcagatagaaacatt

SEQ ID NO: 311186 - DNA, 15 bp, Homo sapiens
atcagatagaaacat

SEQ ID NO: 311187 - DNA, 15 bp, Homo sapiens
aatcagatagaaaca

SEQ ID NO: 311188 - DNA, 15 bp, Homo sapiens
aaatcagatagaaac

SEQ ID NO: 311189 - DNA, 15 bp, Homo sapiens
aaaatcagatagaaa

SEQ ID NO: 311190 - DNA, 15 bp, Homo sapiens
caaaatcagatagaa

SEQ ID NO: 311191 - DNA, 15 bp, Homo sapiens
acaaaatcagataga

SEQ ID NO: 311192 - DNA, 15 bp, Homo sapiens
cacaaaatcagatag

SEQ ID NO: 311193 - DNA, 15 bp, Homo sapiens
gcacaaaatcagata

SEQ ID NO: 311194 - DNA, 15 bp, Homo sapiens
tgcacaaaatcagat

SEQ ID NO: 311195 - DNA, 15 bp, Homo sapiens
ttgcacaaaatcaga

SEQ ID NO: 311196 - DNA, 15 bp, Homo sapiens
tttgcacaaaatcag

SEQ ID NO: 311197 - DNA, 15 bp, Homo sapiens
ttttgcacaaaatca

SEQ ID NO: 311198 - DNA, 15 bp, Homo sapiens
cttttgcacaaaatc

SEQ ID NO: 311199 - DNA, 15 bp, Homo sapiens
gcttttgcacaaaat

SEQ ID NO: 311200 - DNA, 15 bp, Homo sapiens
agcttttgcacaaaa

SEQ ID NO: 311201 - DNA, 15 bp, Homo sapiens
aagcttttgcacaaa

SEQ ID NO: 311202 - DNA, 15 bp, Homo sapiens
gaagcttttgcacaa

SEQ ID NO: 311203 - DNA, 15 bp, Homo sapiens
tgaagcttttgcaca

SEQ ID NO: 311204 - DNA, 15 bp, Homo sapiens
ttgaagcttttgcac

SEQ ID NO: 311205 - DNA, 15 bp, Homo sapiens
tttgaagcttttgca

SEQ ID NO: 311206 - DNA, 15 bp, Homo sapiens
atttgaagcttttgc

SEQ ID NO: 311207 - DNA, 15 bp, Homo sapiens
aatttgaagcttttg

SEQ ID NO: 311208 - DNA, 15 bp, Homo sapiens
taatttgaagctttt

SEQ ID NO: 311209 - DNA, 15 bp, Homo sapiens
ttaatttgaagcttt

SEQ ID NO: 311210 - DNA, 15 bp, Homo sapiens
tttaatttgaagctt

SEQ ID NO: 311211 - DNA, 15 bp, Homo sapiens
ttttaatttgaagct

SEQ ID NO: 311212 - DNA, 15 bp, Homo sapiens
gttttaatttgaagc

SEQ ID NO: 311213 - DNA, 15 bp, Homo sapiens
tgttttaatttgaag

SEQ ID NO: 311214 - DNA, 15 bp, Homo sapiens
ctgttttaatttgaa

SEQ ID NO: 311215 - DNA, 15 bp, Homo sapiens
gctgttttaatttga

SEQ ID NO: 311216 - DNA, 15 bp, Homo sapiens
agctgttttaatttg

SEQ ID NO: 311217 - DNA, 15 bp, Homo sapiens
cagctgttttaattt

SEQ ID NO: 311218 - DNA, 15 bp, Homo sapiens
gcagctgttttaatt

SEQ ID NO: 311219 - DNA, 15 bp, Homo sapiens
tgcagctgttttaat

SEQ ID NO: 311220 - DNA, 15 bp, Homo sapiens
atgcagctgttttaa

SEQ ID NO: 311221 - DNA, 15 bp, Homo sapiens
aatgcagctgtttta

SEQ ID NO: 311222 - DNA, 15 bp, Homo sapiens
taatgcagctgtttt

SEQ ID NO: 311223 - DNA, 15 bp, Homo sapiens
ctaatgcagctgttt

SEQ ID NO: 311224 - DNA, 15 bp, Homo sapiens
tctaatgcagctgtt

SEQ ID NO: 311225 - DNA, 15 bp, Homo sapiens
ttctaatgcagctgt

SEQ ID NO: 311226 - DNA, 15 bp, Homo sapiens
tttctaatgcagctg

SEQ ID NO: 311227 - DNA, 15 bp, Homo sapiens
ttttctaatgcagct

SEQ ID NO: 311228 - DNA, 15 bp, Homo sapiens
tttttctaatgcagc

SEQ ID NO: 311229 - DNA, 15 bp, Homo sapiens
ctttttctaatgcag

SEQ ID NO: 311230 - DNA, 15 bp, Homo sapiens
tctttttctaatgca

SEQ ID NO: 311231 - DNA, 15 bp, Homo sapiens
ctctttttctaatgc

SEQ ID NO: 311232 - DNA, 15 bp, Homo sapiens
cctctttttctaatg

SEQ ID NO: 311233 - DNA, 15 bp, Homo sapiens
gcctctttttctaat

SEQ ID NO: 311234 - DNA, 15 bp, Homo sapiens
cgcctctttttctaa

SEQ ID NO: 311235 - DNA, 15 bp, Homo sapiens
gcgcctctttttcta

SEQ ID NO: 311236 - DNA, 15 bp, Homo sapiens
agcgcctctttttct

SEQ ID NO: 311237 - DNA, 15 bp, Homo sapiens
aagcgcctctttttc

SEQ ID NO: 311238 - DNA, 15 bp, Homo sapiens
gaagcgcctcttttt

SEQ ID NO: 311239 - DNA, 15 bp, Homo sapiens
agaagcgcctctttt

SEQ ID NO: 311240 - DNA, 15 bp, Homo sapiens
gagaagcgcctcttt

SEQ ID NO: 311241 - DNA, 15 bp, Homo sapiens
ggagaagcgcctctt

SEQ ID NO: 311242 - DNA, 15 bp, Homo sapiens
gggagaagcgcctct

SEQ ID NO: 311243 - DNA, 15 bp, Homo sapiens
ggggagaagcgcctc

SEQ ID NO: 311244 - DNA, 15 bp, Homo sapiens
aggggagaagcgcct

SEQ ID NO: 311245 - DNA, 15 bp, Homo sapiens
gaggggagaagcgcc

SEQ ID NO: 311246 - DNA, 15 bp, Homo sapiens
ggaggggagaagcgc

SEQ ID NO: 311247 - DNA, 15 bp, Homo sapiens
gggaggggagaagcg

SEQ ID NO: 311248 - DNA, 15 bp, Homo sapiens
ggggaggggagaagc

SEQ ID NO: 311249 - DNA, 15 bp, Homo sapiens
aggggaggggagaag

SEQ ID NO: 311250 - DNA, 15 bp, Homo sapiens
taggggaggggagaa

SEQ ID NO: 311251 - DNA, 15 bp, Homo sapiens
gtaggggaggggaga

SEQ ID NO: 311252 - DNA, 15 bp, Homo sapiens
tgtaggggaggggag

SEQ ID NO: 311253 - DNA, 15 bp, Homo sapiens
gtgtaggggagggga

SEQ ID NO: 311254 - DNA, 15 bp, Homo sapiens
ggtgtaggggagggg

SEQ ID NO: 311255 - DNA, 15 bp, Homo sapiens
aggtgtaggggaggg

SEQ ID NO: 311256 - DNA, 15 bp, Homo sapiens
taggtgtaggggagg

SEQ ID NO: 311257 - DNA, 15 bp, Homo sapiens
ttaggtgtaggggag

SEQ ID NO: 311258 - DNA, 15 bp, Homo sapiens
tttaggtgtagggga

SEQ ID NO: 311259 - DNA, 15 bp, Homo sapiens
ctttaggtgtagggg

SEQ ID NO: 311260 - DNA, 15 bp, Homo sapiens
cctttaggtgtaggg

SEQ ID NO: 311261 - DNA, 15 bp, Homo sapiens
acctttaggtgtagg

SEQ ID NO: 311262 - DNA, 15 bp, Homo sapiens
cacctttaggtgtag

SEQ ID NO: 311263 - DNA, 15 bp, Homo sapiens
acacctttaggtgta

SEQ ID NO: 311264 - DNA, 15 bp, Homo sapiens
tacacctttaggtgt

SEQ ID NO: 311265 - DNA, 15 bp, Homo sapiens
atacacctttaggtg

SEQ ID NO: 311266 - DNA, 15 bp, Homo sapiens
aatacacctttaggt

SEQ ID NO: 311267 - DNA, 15 bp, Homo sapiens
aaatacacctttagg

SEQ ID NO: 311268 - DNA, 15 bp, Homo sapiens
taaatacacctttag

SEQ ID NO: 311269 - DNA, 15 bp, Homo sapiens
ttaaatacaccttta

SEQ ID NO: 311270 - DNA, 15 bp, Homo sapiens
tttaaatacaccttt

SEQ ID NO: 311271 - DNA, 15 bp, Homo sapiens
gtttaaatacacctt

SEQ ID NO: 311272 - DNA, 15 bp, Homo sapiens
agtttaaatacacct

SEQ ID NO: 311273 - DNA, 15 bp, Homo sapiens
tagtttaaatacacc

SEQ ID NO: 311274 - DNA, 15 bp, Homo sapiens
atagtttaaatacac

SEQ ID NO: 311275 - DNA, 15 bp, Homo sapiens
gatagtttaaataca

SEQ ID NO: 311276 - DNA, 15 bp, Homo sapiens
agatagtttaaatac

SEQ ID NO: 311277 - DNA, 15 bp, Homo sapiens
aagatagtttaaata

SEQ ID NO: 311278 - DNA, 15 bp, Homo sapiens
caagatagtttaaat

SEQ ID NO: 311279 - DNA, 15 bp, Homo sapiens
acaagatagtttaaa

SEQ ID NO: 311280 - DNA, 15 bp, Homo sapiens
cacaagatagtttaa

SEQ ID NO: 311281 - DNA, 15 bp, Homo sapiens
acacaagatagttta

SEQ ID NO: 311282 - DNA, 15 bp, Homo sapiens
cacacaagatagttt

SEQ ID NO: 311283 - DNA, 15 bp, Homo sapiens
tcacacaagatagtt

SEQ ID NO: 311284 - DNA, 15 bp, Homo sapiens
atcacacaagatagt

SEQ ID NO: 311285 - DNA, 15 bp, Homo sapiens
aatcacacaagatag

SEQ ID NO: 311286 - DNA, 15 bp, Homo sapiens
taatcacacaagata

SEQ ID NO: 311287 - DNA, 15 bp, Homo sapiens
ttaatcacacaagat

SEQ ID NO: 311288 - DNA, 15 bp, Homo sapiens
gttaatcacacaaga

SEQ ID NO: 311289 - DNA, 15 bp, Homo sapiens
agttaatcacacaag

SEQ ID NO: 311290 - DNA, 15 bp, Homo sapiens
aagttaatcacacaa

SEQ ID NO: 311291 - DNA, 15 bp, Homo sapiens
taagttaatcacaca

SEQ ID NO: 311292 - DNA, 15 bp, Homo sapiens
ataagttaatcacac

SEQ ID NO: 311293 - DNA, 15 bp, Homo sapiens
aataagttaatcaca

SEQ ID NO: 311294 - DNA, 15 bp, Homo sapiens
aaataagttaatcac

SEQ ID NO: 311295 - DNA, 15 bp, Homo sapiens
taaataagttaatca

SEQ ID NO: 311296 - DNA, 15 bp, Homo sapiens
ctaaataagttaatc

SEQ ID NO: 311297 - DNA, 15 bp, Homo sapiens
tctaaataagttaat

SEQ ID NO: 311298 - DNA, 15 bp, Homo sapiens
ctctaaataagttaa

SEQ ID NO: 311299 - DNA, 15 bp, Homo sapiens
tctctaaataagtta

SEQ ID NO: 311300 - DNA, 15 bp, Homo sapiens
atctctaaataagtt

SEQ ID NO: 311301 - DNA, 15 bp, Homo sapiens
catctctaaataagt

SEQ ID NO: 311302 - DNA, 15 bp, Homo sapiens
gcatctctaaataag

SEQ ID NO: 311303 - DNA, 15 bp, Homo sapiens
agcatctctaaataa

SEQ ID NO: 311304 - DNA, 15 bp, Homo sapiens
cagcatctctaaata

SEQ ID NO: 311305 - DNA, 15 bp, Homo sapiens
acagcatctctaaat

SEQ ID NO: 311306 - DNA, 15 bp, Homo sapiens
tacagcatctctaaa

SEQ ID NO: 311307 - DNA, 15 bp, Homo sapiens
ttacagcatctctaa

SEQ ID NO: 311308 - DNA, 15 bp, Homo sapiens
gttacagcatctcta

SEQ ID NO: 311309 - DNA, 15 bp, Homo sapiens
agttacagcatctct

SEQ ID NO: 311310 - DNA, 15 bp, Homo sapiens
aagttacagcatctc

SEQ ID NO: 311311 - DNA, 15 bp, Homo sapiens
taagttacagcatct

SEQ ID NO: 311312 - DNA, 15 bp, Homo sapiens
ttaagttacagcatc

SEQ ID NO: 311313 - DNA, 15 bp, Homo sapiens
tttaagttacagcat

SEQ ID NO: 311314 - DNA, 15 bp, Homo sapiens
ttttaagttacagca

SEQ ID NO: 311315 - DNA, 15 bp, Homo sapiens
attttaagttacagc

SEQ ID NO: 311316 - DNA, 15 bp, Homo sapiens
tattttaagttacag

SEQ ID NO: 311317 - DNA, 15 bp, Homo sapiens
ctattttaagttaca

SEQ ID NO: 311318 - DNA, 15 bp, Homo sapiens
cctattttaagttac

SEQ ID NO: 311319 - DNA, 15 bp, Homo sapiens
ccctattttaagtta

SEQ ID NO: 311320 - DNA, 15 bp, Homo sapiens
cccctattttaagtt

SEQ ID NO: 311321 - DNA, 15 bp, Homo sapiens
tcccctattttaagt

SEQ ID NO: 311322 - DNA, 15 bp, Homo sapiens
atcccctattttaag

SEQ ID NO: 311323 - DNA, 15 bp, Homo sapiens
tatcccctattttaa

SEQ ID NO: 311324 - DNA, 15 bp, Homo sapiens
atatcccctatttta

SEQ ID NO: 311325 - DNA, 15 bp, Homo sapiens
aatatcccctatttt

SEQ ID NO: 311326 - DNA, 15 bp, Homo sapiens
aaatatcccctattt

SEQ ID NO: 311327 - DNA, 15 bp, Homo sapiens
taaatatcccctatt

SEQ ID NO: 311328 - DNA, 15 bp, Homo sapiens
ttaaatatcccctat

SEQ ID NO: 311329 - DNA, 15 bp, Homo sapiens
cttaaatatccccta

SEQ ID NO: 311330 - DNA, 15 bp, Homo sapiens
ccttaaatatcccct

SEQ ID NO: 311331 - DNA, 15 bp, Homo sapiens
accttaaatatcccc

SEQ ID NO: 311332 - DNA, 15 bp, Homo sapiens
taccttaaatatccc

SEQ ID NO: 311333 - DNA, 15 bp, Homo sapiens
ctaccttaaatatcc

SEQ ID NO: 311334 - DNA, 15 bp, Homo sapiens
gctaccttaaatatc

SEQ ID NO: 311335 - DNA, 15 bp, Homo sapiens
agctaccttaaatat

SEQ ID NO: 311336 - DNA, 15 bp, Homo sapiens
aagctaccttaaata

SEQ ID NO: 311337 - DNA, 15 bp, Homo sapiens
gaagctaccttaaat

SEQ ID NO: 311338 - DNA, 15 bp, Homo sapiens
tgaagctaccttaaa

SEQ ID NO: 311339 - DNA, 15 bp, Homo sapiens
ctgaagctaccttaa

SEQ ID NO: 311340 - DNA, 15 bp, Homo sapiens
gctgaagctacctta

SEQ ID NO: 311341 - DNA, 15 bp, Homo sapiens
agctgaagctacctt

SEQ ID NO: 311342 - DNA, 15 bp, Homo sapiens
tagctgaagctacct

SEQ ID NO: 311343 - DNA, 15 bp, Homo sapiens
ctagctgaagctacc

SEQ ID NO: 311344 - DNA, 15 bp, Homo sapiens
gctagctgaagctac

SEQ ID NO: 311345 - DNA, 15 bp, Homo sapiens
agctagctgaagcta

SEQ ID NO: 311346 - DNA, 15 bp, Homo sapiens
aagctagctgaagct

SEQ ID NO: 311347 - DNA, 15 bp, Homo sapiens
aaagctagctgaagc

SEQ ID NO: 311348 - DNA, 15 bp, Homo sapiens
aaaagctagctgaag

SEQ ID NO: 311349 - DNA, 15 bp, Homo sapiens
taaaagctagctgaa

SEQ ID NO: 311350 - DNA, 15 bp, Homo sapiens
ctaaaagctagctga

SEQ ID NO: 311351 - DNA, 15 bp, Homo sapiens
cctaaaagctagctg

SEQ ID NO: 311352 - DNA, 15 bp, Homo sapiens
tcctaaaagctagct

SEQ ID NO: 311353 - DNA, 15 bp, Homo sapiens
ttcctaaaagctagc

SEQ ID NO: 311354 - DNA, 15 bp, Homo sapiens
tttcctaaaagctag

SEQ ID NO: 311355 - DNA, 15 bp, Homo sapiens
ttttcctaaaagcta

SEQ ID NO: 311356 - DNA, 15 bp, Homo sapiens
attttcctaaaagct

SEQ ID NO: 311357 - DNA, 15 bp, Homo sapiens
gattttcctaaaagc

SEQ ID NO: 311358 - DNA, 15 bp, Homo sapiens
tgattttcctaaaag

SEQ ID NO: 311359 - DNA, 15 bp, Homo sapiens
gtgattttcctaaaa

SEQ ID NO: 311360 - DNA, 15 bp, Homo sapiens
agtgattttcctaaa

SEQ ID NO: 311361 - DNA, 15 bp, Homo sapiens
aagtgattttcctaa

SEQ ID NO: 311362 - DNA, 15 bp, Homo sapiens
aaagtgattttccta

SEQ ID NO: 311363 - DNA, 15 bp, Homo sapiens
caaagtgattttcct

SEQ ID NO: 311364 - DNA, 15 bp, Homo sapiens
acaaagtgattttcc

SEQ ID NO: 311365 - DNA, 15 bp, Homo sapiens
gacaaagtgattttc

SEQ ID NO: 311366 - DNA, 15 bp, Homo sapiens
agacaaagtgatttt

SEQ ID NO: 311367 - DNA, 15 bp, Homo sapiens
tagacaaagtgattt

SEQ ID NO: 311368 - DNA, 15 bp, Homo sapiens
ttagacaaagtgatt

SEQ ID NO: 311369 - DNA, 15 bp, Homo sapiens
gttagacaaagtgat

SEQ ID NO: 311370 - DNA, 15 bp, Homo sapiens
agttagacaaagtga

SEQ ID NO: 311371 - DNA, 15 bp, Homo sapiens
gagttagacaaagtg

SEQ ID NO: 311372 - DNA, 15 bp, Homo sapiens
tgagttagacaaagt

SEQ ID NO: 311373 - DNA, 15 bp, Homo sapiens
ctgagttagacaaag

SEQ ID NO: 311374 - DNA, 15 bp, Homo sapiens
tctgagttagacaaa

SEQ ID NO: 311375 - DNA, 15 bp, Homo sapiens
ttctgagttagacaa

SEQ ID NO: 311376 - DNA, 15 bp, Homo sapiens
attctgagttagaca

SEQ ID NO: 311377 - DNA, 15 bp, Homo sapiens
aattctgagttagac

SEQ ID NO: 311378 - DNA, 15 bp, Homo sapiens
taattctgagttaga

SEQ ID NO: 311379 - DNA, 15 bp, Homo sapiens
ataattctgagttag

SEQ ID NO: 311380 - DNA, 15 bp, Homo sapiens
aataattctgagtta

SEQ ID NO: 311381 - DNA, 15 bp, Homo sapiens
aaataattctgagtt

SEQ ID NO: 311382 - DNA, 15 bp, Homo sapiens
aaaataattctgagt

SEQ ID NO: 311383 - DNA, 15 bp, Homo sapiens
aaaaataattctgag

SEQ ID NO: 311384 - DNA, 15 bp, Homo sapiens
taaaaataattctga

SEQ ID NO: 311385 - DNA, 15 bp, Homo sapiens
ttaaaaataattctg

SEQ ID NO: 311386 - DNA, 15 bp, Homo sapiens
tttaaaaataattct

SEQ ID NO: 311387 - DNA, 15 bp, Homo sapiens
ttttaaaaataattc

SEQ ID NO: 311388 - DNA, 15 bp, Homo sapiens
tttttaaaaataatt

SEQ ID NO: 311389 - DNA, 15 bp, Homo sapiens
ctttttaaaaataat

SEQ ID NO: 311390 - DNA, 15 bp, Homo sapiens
tttctttttaaaaat

SEQ ID NO: 311391 - DNA, 15 bp, Homo sapiens
atttctttttaaaaa

SEQ ID NO: 311392 - DNA, 15 bp, Homo sapiens
gatttctttttaaaa

SEQ ID NO: 311393 - DNA, 15 bp, Homo sapiens
agatttctttttaaa

SEQ ID NO: 311394 - DNA, 15 bp, Homo sapiens
cagatttctttttaa

SEQ ID NO: 311395 - DNA, 15 bp, Homo sapiens
ccagatttcttttta

SEQ ID NO: 311396 - DNA, 15 bp, Homo sapiens
accagatttcttttt

SEQ ID NO: 311397 - DNA, 15 bp, Homo sapiens
gaccagatttctttt

SEQ ID NO: 311398 - DNA, 15 bp, Homo sapiens
agaccagatttcttt

SEQ ID NO: 311399 - DNA, 15 bp, Homo sapiens
aagaccagatttctt

SEQ ID NO: 311400 - DNA, 15 bp, Homo sapiens
caagaccagatttct

SEQ ID NO: 311401 - DNA, 15 bp, Homo sapiens
acaagaccagatttc

SEQ ID NO: 311402 - DNA, 15 bp, Homo sapiens
aacaagaccagattt

SEQ ID NO: 311403 - DNA, 15 bp, Homo sapiens
taacaagaccagatt

SEQ ID NO: 311404 - DNA, 15 bp, Homo sapiens
ctaacaagaccagat

SEQ ID NO: 311405 - DNA, 15 bp, Homo sapiens
tctaacaagaccaga

SEQ ID NO: 311406 - DNA, 15 bp, Homo sapiens
ttctaacaagaccag

SEQ ID NO: 311407 - DNA, 15 bp, Homo sapiens
tttctaacaagacca

SEQ ID NO: 311408 - DNA, 15 bp, Homo sapiens
ttttctaacaagacc

SEQ ID NO: 311409 - DNA, 15 bp, Homo sapiens
gttttctaacaagac

SEQ ID NO: 311410 - DNA, 15 bp, Homo sapiens
tgttttctaacaaga

SEQ ID NO: 311411 - DNA, 15 bp, Homo sapiens
ttgttttctaacaag

SEQ ID NO: 311412 - DNA, 15 bp, Homo sapiens
tttgttttctaacaa

SEQ ID NO: 311413 - DNA, 15 bp, Homo sapiens
ttttgttttctaaca

SEQ ID NO: 311414 - DNA, 15 bp, Homo sapiens
attttgttttctaac

SEQ ID NO: 311415 - DNA, 15 bp, Homo sapiens
aattttgttttctaa

SEQ ID NO: 311416 - DNA, 15 bp, Homo sapiens
aaattttgttttcta

SEQ ID NO: 311417 - DNA, 15 bp, Homo sapiens
aaaattttgttttct

SEQ ID NO: 311418 - DNA, 15 bp, Homo sapiens
taaaattttgttttc

SEQ ID NO: 311419 - DNA, 15 bp, Homo sapiens
ataaaattttgtttt

SEQ ID NO: 311420 - DNA, 15 bp, Homo sapiens
aataaaattttgttt

SEQ ID NO: 311421 - DNA, 15 bp, Homo sapiens
aaataaaattttgtt

SEQ ID NO: 311422 - DNA, 15 bp, Homo sapiens
aaaataaaattttgt

SEQ ID NO: 311423 - DNA, 15 bp, Homo sapiens
caaaataaaattttg

SEQ ID NO: 311424 - DNA, 15 bp, Homo sapiens
acaaaataaaatttt

SEQ ID NO: 311425 - DNA, 15 bp, Homo sapiens
cacaaaataaaattt

SEQ ID NO: 311426 - DNA, 15 bp, Homo sapiens
gcacaaaataaaatt

SEQ ID NO: 311427 - DNA, 15 bp, Homo sapiens
agcacaaaataaaat

SEQ ID NO: 311428 - DNA, 15 bp, Homo sapiens
gagcacaaaataaaa

SEQ ID NO: 311429 - DNA, 15 bp, Homo sapiens
tgagcacaaaataaa

SEQ ID NO: 311430 - DNA, 15 bp, Homo sapiens
atgagcacaaaataa

SEQ ID NO: 311431 - DNA, 15 bp, Homo sapiens
aatgagcacaaaata

SEQ ID NO: 311432 - DNA, 15 bp, Homo sapiens
aaatgagcacaaaat

SEQ ID NO: 311433 - DNA, 15 bp, Homo sapiens
taaatgagcacaaaa

SEQ ID NO: 311434 - DNA, 15 bp, Homo sapiens
ttaaatgagcacaaa

SEQ ID NO: 311435 - DNA, 15 bp, Homo sapiens
cttaaatgagcacaa

SEQ ID NO: 311436 - DNA, 15 bp, Homo sapiens
acttaaatgagcaca

SEQ ID NO: 311437 - DNA, 15 bp, Homo sapiens
aacttaaatgagcac

SEQ ID NO: 311438 - DNA, 15 bp, Homo sapiens
aaacttaaatgagca

SEQ ID NO: 311439 - DNA, 15 bp, Homo sapiens
gaaacttaaatgagc

SEQ ID NO: 311440 - DNA, 15 bp, Homo sapiens
tgaaacttaaatgag

SEQ ID NO: 311441 - DNA, 15 bp, Homo sapiens
ttgaaacttaaatga

SEQ ID NO: 311442 - DNA, 15 bp, Homo sapiens
tttgaaacttaaatg

SEQ ID NO: 311443 - DNA, 15 bp, Homo sapiens
gtttgaaacttaaat

SEQ ID NO: 311444 - DNA, 15 bp, Homo sapiens
agtttgaaacttaaa

SEQ ID NO: 311445 - DNA, 15 bp, Homo sapiens
aagtttgaaacttaa

SEQ ID NO: 311446 - DNA, 15 bp, Homo sapiens
taagtttgaaactta

SEQ ID NO: 311447 - DNA, 15 bp, Homo sapiens
gtaagtttgaaactt

SEQ ID NO: 311448 - DNA, 15 bp, Homo sapiens
agtaagtttgaaact

SEQ ID NO: 311449 - DNA, 15 bp, Homo sapiens
tagtaagtttgaaac

SEQ ID NO: 311450 - DNA, 15 bp, Homo sapiens
atagtaagtttgaaa

SEQ ID NO: 311451 - DNA, 15 bp, Homo sapiens
aatagtaagtttgaa

SEQ ID NO: 311452 - DNA, 15 bp, Homo sapiens
aaatagtaagtttga

SEQ ID NO: 311453 - DNA, 15 bp, Homo sapiens
aaaatagtaagtttg

SEQ ID NO: 311454 - DNA, 15 bp, Homo sapiens
caaaatagtaagttt

SEQ ID NO: 311455 - DNA, 15 bp, Homo sapiens
tcaaaatagtaagtt

SEQ ID NO: 311456 - DNA, 15 bp, Homo sapiens
gtcaaaatagtaagt

SEQ ID NO: 311457 - DNA, 15 bp, Homo sapiens
tgtcaaaatagtaag

SEQ ID NO: 311458 - DNA, 15 bp, Homo sapiens
ctgtcaaaatagtaa

SEQ ID NO: 311459 - DNA, 15 bp, Homo sapiens
actgtcaaaatagta

SEQ ID NO: 311460 - DNA, 15 bp, Homo sapiens
aactgtcaaaatagt

SEQ ID NO: 311461 - DNA, 15 bp, Homo sapiens
taactgtcaaaatag

SEQ ID NO: 311462 - DNA, 15 bp, Homo sapiens
ataactgtcaaaata

SEQ ID NO: 311463 - DNA, 15 bp, Homo sapiens
aataactgtcaaaat

SEQ ID NO: 311464 - DNA, 15 bp, Homo sapiens
aaataactgtcaaaa

SEQ ID NO: 311465 - DNA, 15 bp, Homo sapiens
aaaataactgtcaaa

SEQ ID NO: 311466 - DNA, 15 bp, Homo sapiens
caaaataactgtcaa

SEQ ID NO: 311467 - DNA, 15 bp, Homo sapiens
tcaaaataactgtca

SEQ ID NO: 311468 - DNA, 15 bp, Homo sapiens
atcaaaataactgtc

SEQ ID NO: 311469 - DNA, 15 bp, Homo sapiens
tatcaaaataactgt

SEQ ID NO: 311470 - DNA, 15 bp, Homo sapiens
ttatcaaaataactg

SEQ ID NO: 311471 - DNA, 15 bp, Homo sapiens
gttatcaaaataact

SEQ ID NO: 311472 - DNA, 15 bp, Homo sapiens
tgttatcaaaataac

SEQ ID NO: 311473 - DNA, 15 bp, Homo sapiens
ttgttatcaaaataa

SEQ ID NO: 311474 - DNA, 15 bp, Homo sapiens
attgttatcaaaata

SEQ ID NO: 311475 - DNA, 15 bp, Homo sapiens
cattgttatcaaaat

SEQ ID NO: 311476 - DNA, 15 bp, Homo sapiens
tcattgttatcaaaa

SEQ ID NO: 311477 - DNA, 15 bp, Homo sapiens
gtcattgttatcaaa

SEQ ID NO: 311478 - DNA, 15 bp, Homo sapiens
tgtcattgttatcaa

SEQ ID NO: 311479 - DNA, 15 bp, Homo sapiens
gtgtcattgttatca

SEQ ID NO: 311480 - DNA, 15 bp, Homo sapiens
agtgtcattgttatc

SEQ ID NO: 311481 - DNA, 15 bp, Homo sapiens
tagtgtcattgttat

SEQ ID NO: 311482 - DNA, 15 bp, Homo sapiens
ctagtgtcattgtta

SEQ ID NO: 311483 - DNA, 15 bp, Homo sapiens
tctagtgtcattgtt

SEQ ID NO: 311484 - DNA, 15 bp, Homo sapiens
ttctagtgtcattgt

SEQ ID NO: 311485 - DNA, 15 bp, Homo sapiens
tttctagtgtcattg

SEQ ID NO: 311486 - DNA, 15 bp, Homo sapiens
ttttctagtgtcatt

SEQ ID NO: 311487 - DNA, 15 bp, Homo sapiens
gttttctagtgtcat

SEQ ID NO: 311488 - DNA, 15 bp, Homo sapiens
agttttctagtgtca

SEQ ID NO: 311489 - DNA, 15 bp, Homo sapiens
aagttttctagtgtc

SEQ ID NO: 311490 - DNA, 15 bp, Homo sapiens
caagttttctagtgt

SEQ ID NO: 311491 - DNA, 15 bp, Homo sapiens
tcaagttttctagtg

SEQ ID NO: 311492 - DNA, 15 bp, Homo sapiens
gtcaagttttctagt

SEQ ID NO: 311493 - DNA, 15 bp, Homo sapiens
agtcaagttttctag

SEQ ID NO: 311494 - DNA, 15 bp, Homo sapiens
gagtcaagttttcta

SEQ ID NO: 311495 - DNA, 15 bp, Homo sapiens
ggagtcaagttttct

SEQ ID NO: 311496 - DNA, 15 bp, Homo sapiens
tggagtcaagttttc

SEQ ID NO: 311497 - DNA, 15 bp, Homo sapiens
atggagtcaagtttt

SEQ ID NO: 311498 - DNA, 15 bp, Homo sapiens
aatggagtcaagttt

SEQ ID NO: 311499 - DNA, 15 bp, Homo sapiens
aaatggagtcaagtt

SEQ ID NO: 311500 - DNA, 15 bp, Homo sapiens
gaaatggagtcaagt

SEQ ID NO: 311501 - DNA, 15 bp, Homo sapiens
tgaaatggagtcaag

SEQ ID NO: 311502 - DNA, 15 bp, Homo sapiens
atgaaatggagtcaa

SEQ ID NO: 311503 - DNA, 15 bp, Homo sapiens
gatgaaatggagtca

SEQ ID NO: 311504 - DNA, 15 bp, Homo sapiens
tgatgaaatggagtc

SEQ ID NO: 311505 - DNA, 15 bp, Homo sapiens
atgatgaaatggagt

SEQ ID NO: 311506 - DNA, 15 bp, Homo sapiens
aatgatgaaatggag

SEQ ID NO: 311507 - DNA, 15 bp, Homo sapiens
caatgatgaaatgga

SEQ ID NO: 311508 - DNA, 15 bp, Homo sapiens
acaatgatgaaatgg

SEQ ID NO: 311509 - DNA, 15 bp, Homo sapiens
aacaatgatgaaatg

SEQ ID NO: 311510 - DNA, 15 bp, Homo sapiens
aaacaatgatgaaat

SEQ ID NO: 311511 - DNA, 15 bp, Homo sapiens
gaaacaatgatgaaa

SEQ ID NO: 311512 - DNA, 15 bp, Homo sapiens
agaaacaatgatgaa

SEQ ID NO: 311513 - DNA, 15 bp, Homo sapiens
cagaaacaatgatga

SEQ ID NO: 311514 - DNA, 15 bp, Homo sapiens
gcagaaacaatgatg

SEQ ID NO: 311515 - DNA, 15 bp, Homo sapiens
tgcagaaacaatgat

SEQ ID NO: 311516 - DNA, 15 bp, Homo sapiens
atgcagaaacaatga

SEQ ID NO: 311517 - DNA, 15 bp, Homo sapiens
catgcagaaacaatg

SEQ ID NO: 311518 - DNA, 15 bp, Homo sapiens
tcatgcagaaacaat

SEQ ID NO: 311519 - DNA, 15 bp, Homo sapiens
ttcatgcagaaacaa

SEQ ID NO: 311520 - DNA, 15 bp, Homo sapiens
attcatgcagaaaca

SEQ ID NO: 311521 - DNA, 15 bp, Homo sapiens
tattcatgcagaaac

SEQ ID NO: 311522 - DNA, 15 bp, Homo sapiens
atattcatgcagaaa

SEQ ID NO: 311523 - DNA, 15 bp, Homo sapiens
gatattcatgcagaa

SEQ ID NO: 311524 - DNA, 15 bp, Homo sapiens
tgatattcatgcaga

SEQ ID NO: 311525 - DNA, 15 bp, Homo sapiens
atgatattcatgcag

SEQ ID NO: 311526 - DNA, 15 bp, Homo sapiens
tatgatattcatgca

SEQ ID NO: 311527 - DNA, 15 bp, Homo sapiens
gtatgatattcatgc

SEQ ID NO: 311528 - DNA, 15 bp, Homo sapiens
tgtatgatattcatg

SEQ ID NO: 311529 - DNA, 15 bp, Homo sapiens
ttgtatgatattcat

SEQ ID NO: 311530 - DNA, 15 bp, Homo sapiens
tttgtatgatattca

SEQ ID NO: 311531 - DNA, 15 bp, Homo sapiens
atttgtatgatattc

SEQ ID NO: 311532 - DNA, 15 bp, Homo sapiens
gatttgtatgatatt

SEQ ID NO: 311533 - DNA, 15 bp, Homo sapiens
tgatttgtatgatat

SEQ ID NO: 311534 - DNA, 15 bp, Homo sapiens
ctgatttgtatgata

SEQ ID NO: 311535 - DNA, 15 bp, Homo sapiens
actgatttgtatgat

SEQ ID NO: 311536 - DNA, 15 bp, Homo sapiens
aactgatttgtatga

SEQ ID NO: 311537 - DNA, 15 bp, Homo sapiens
taactgatttgtatg

SEQ ID NO: 311538 - DNA, 15 bp, Homo sapiens
ctaactgatttgtat

SEQ ID NO: 311539 - DNA, 15 bp, Homo sapiens
actaactgatttgta

SEQ ID NO: 311540 - DNA, 15 bp, Homo sapiens
aactaactgatttgt

SEQ ID NO: 311541 - DNA, 15 bp, Homo sapiens
aaactaactgatttg

SEQ ID NO: 311542 - DNA, 15 bp, Homo sapiens
aaaactaactgattt

SEQ ID NO: 311543 - DNA, 15 bp, Homo sapiens
aaaaactaactgatt

SEQ ID NO: 311544 - DNA, 15 bp, Homo sapiens
taaaaactaactgat

SEQ ID NO: 311545 - DNA, 15 bp, Homo sapiens
ctaaaaactaactga

SEQ ID NO: 311546 - DNA, 15 bp, Homo sapiens
cctaaaaactaactg

SEQ ID NO: 311547 - DNA, 15 bp, Homo sapiens
acctaaaaactaact

SEQ ID NO: 311548 - DNA, 15 bp, Homo sapiens
gacctaaaaactaac

SEQ ID NO: 311549 - DNA, 15 bp, Homo sapiens
tgacctaaaaactaa

SEQ ID NO: 311550 - DNA, 15 bp, Homo sapiens
ttgacctaaaaacta

SEQ ID NO: 311551 - DNA, 15 bp, Homo sapiens
cttgacctaaaaact

SEQ ID NO: 311552 - DNA, 15 bp, Homo sapiens
ccttgacctaaaaac

SEQ ID NO: 311553 - DNA, 15 bp, Homo sapiens
cccttgacctaaaaa

SEQ ID NO: 311554 - DNA, 15 bp, Homo sapiens
gcccttgacctaaaa

SEQ ID NO: 311555 - DNA, 15 bp, Homo sapiens
agcccttgacctaaa

SEQ ID NO: 311556 - DNA, 15 bp, Homo sapiens
aagcccttgacctaa

SEQ ID NO: 311557 - DNA, 15 bp, Homo sapiens
taagcccttgaccta

SEQ ID NO: 311558 - DNA, 15 bp, Homo sapiens
gtaagcccttgacct

SEQ ID NO: 311559 - DNA, 15 bp, Homo sapiens
agtaagcccttgacc

SEQ ID NO: 311560 - DNA, 15 bp, Homo sapiens
tagtaagcccttgac

SEQ ID NO: 311561 - DNA, 15 bp, Homo sapiens
atagtaagcccttga

SEQ ID NO: 311562 - DNA, 15 bp, Homo sapiens
aatagtaagcccttg

SEQ ID NO: 311563 - DNA, 15 bp, Homo sapiens
aaatagtaagccctt

SEQ ID NO: 311564 - DNA, 15 bp, Homo sapiens
gaaatagtaagccct

SEQ ID NO: 311565 - DNA, 15 bp, Homo sapiens
agaaatagtaagccc

SEQ ID NO: 311566 - DNA, 15 bp, Homo sapiens
cagaaatagtaagcc

SEQ ID NO: 311567 - DNA, 15 bp, Homo sapiens
ccagaaatagtaagc

SEQ ID NO: 311568 - DNA, 15 bp, Homo sapiens
cccagaaatagtaag

SEQ ID NO: 311569 - DNA, 15 bp, Homo sapiens
acccagaaatagtaa

SEQ ID NO: 311570 - DNA, 15 bp, Homo sapiens
gacccagaaatagta

SEQ ID NO: 311571 - DNA, 15 bp, Homo sapiens
agacccagaaatagt

SEQ ID NO: 311572 - DNA, 15 bp, Homo sapiens
aagacccagaaatag

SEQ ID NO: 311573 - DNA, 15 bp, Homo sapiens
aaagacccagaaata

SEQ ID NO: 311574 - DNA, 15 bp, Homo sapiens
aaaagacccagaaat

SEQ ID NO: 311575 - DNA, 15 bp, Homo sapiens
caaaagacccagaaa

SEQ ID NO: 311576 - DNA, 15 bp, Homo sapiens
gcaaaagacccagaa

SEQ ID NO: 311577 - DNA, 15 bp, Homo sapiens
agcaaaagacccaga

SEQ ID NO: 311578 - DNA, 15 bp, Homo sapiens
tagcaaaagacccag

SEQ ID NO: 311579 - DNA, 15 bp, Homo sapiens
gtagcaaaagaccca

SEQ ID NO: 311580 - DNA, 15 bp, Homo sapiens
agtagcaaaagaccc

SEQ ID NO: 311581 - DNA, 15 bp, Homo sapiens
tagtagcaaaagacc

SEQ ID NO: 311582 - DNA, 15 bp, Homo sapiens
ttagtagcaaaagac

SEQ ID NO: 311583 - DNA, 15 bp, Homo sapiens
cttagtagcaaaaga

SEQ ID NO: 311584 - DNA, 15 bp, Homo sapiens
acttagtagcaaaag

SEQ ID NO: 311585 - DNA, 15 bp, Homo sapiens
aacttagtagcaaaa

SEQ ID NO: 311586 - DNA, 15 bp, Homo sapiens
gaacttagtagcaaa

SEQ ID NO: 311587 - DNA, 15 bp, Homo sapiens
tgaacttagtagcaa

SEQ ID NO: 311588 - DNA, 15 bp, Homo sapiens
gtgaacttagtagca

SEQ ID NO: 311589 - DNA, 15 bp, Homo sapiens
tgtgaacttagtagc

SEQ ID NO: 311590 - DNA, 15 bp, Homo sapiens
atgtgaacttagtag

SEQ ID NO: 311591 - DNA, 15 bp, Homo sapiens
aatgtgaacttagta

SEQ ID NO: 311592 - DNA, 15 bp, Homo sapiens
taatgtgaacttagt

SEQ ID NO: 311593 - DNA, 15 bp, Homo sapiens
ctaatgtgaacttag

SEQ ID NO: 311594 - DNA, 15 bp, Homo sapiens
tctaatgtgaactta

SEQ ID NO: 311595 - DNA, 15 bp, Homo sapiens
ttctaatgtgaactt

SEQ ID NO: 311596 - DNA, 15 bp, Homo sapiens
attctaatgtgaact

SEQ ID NO: 311597 - DNA, 15 bp, Homo sapiens
aattctaatgtgaac

SEQ ID NO: 311598 - DNA, 15 bp, Homo sapiens
taattctaatgtgaa

SEQ ID NO: 311599 - DNA, 15 bp, Homo sapiens
ctaattctaatgtga

SEQ ID NO: 311600 - DNA, 15 bp, Homo sapiens
actaattctaatgtg

SEQ ID NO: 311601 - DNA, 15 bp, Homo sapiens
cactaattctaatgt

SEQ ID NO: 311602 - DNA, 15 bp, Homo sapiens
gcactaattctaatg

SEQ ID NO: 311603 - DNA, 15 bp, Homo sapiens
ggcactaattctaat

SEQ ID NO: 311604 - DNA, 15 bp, Homo sapiens
tggcactaattctaa

SEQ ID NO: 311605 - DNA, 15 bp, Homo sapiens
ctggcactaattcta

SEQ ID NO: 311606 - DNA, 15 bp, Homo sapiens
tctggcactaattct

SEQ ID NO: 311607 - DNA, 15 bp, Homo sapiens
ttctggcactaattc

SEQ ID NO: 311608 - DNA, 15 bp, Homo sapiens
attctggcactaatt

SEQ ID NO: 311609 - DNA, 15 bp, Homo sapiens
aattctggcactaat

SEQ ID NO: 311610 - DNA, 15 bp, Homo sapiens
aaattctggcactaa

SEQ ID NO: 311611 - DNA, 15 bp, Homo sapiens
aaaattctggcacta

SEQ ID NO: 311612 - DNA, 15 bp, Homo sapiens
taaaattctggcact

SEQ ID NO: 311613 - DNA, 15 bp, Homo sapiens
ctaaaattctggcac

SEQ ID NO: 311614 - DNA, 15 bp, Homo sapiens
cctaaaattctggca

SEQ ID NO: 311615 - DNA, 15 bp, Homo sapiens
tcctaaaattctggc

SEQ ID NO: 311616 - DNA, 15 bp, Homo sapiens
ttcctaaaattctgg

SEQ ID NO: 311617 - DNA, 15 bp, Homo sapiens
gttcctaaaattctg

SEQ ID NO: 311618 - DNA, 15 bp, Homo sapiens
agttcctaaaattct

SEQ ID NO: 311619 - DNA, 15 bp, Homo sapiens
aagttcctaaaattc

SEQ ID NO: 311620 - DNA, 15 bp, Homo sapiens
gaagttcctaaaatt

SEQ ID NO: 311621 - DNA, 15 bp, Homo sapiens
tgaagttcctaaaat

SEQ ID NO: 311622 - DNA, 15 bp, Homo sapiens
ctgaagttcctaaaa

SEQ ID NO: 311623 - DNA, 15 bp, Homo sapiens
tctgaagttcctaaa

SEQ ID NO: 311624 - DNA, 15 bp, Homo sapiens
ctctgaagttcctaa

SEQ ID NO: 311625 - DNA, 15 bp, Homo sapiens
tctctgaagttccta

SEQ ID NO: 311626 - DNA, 15 bp, Homo sapiens
atctctgaagttcct

SEQ ID NO: 311627 - DNA, 15 bp, Homo sapiens
gatctctgaagttcc

SEQ ID NO: 311628 - DNA, 15 bp, Homo sapiens
cgatctctgaagttc

SEQ ID NO: 311629 - DNA, 15 bp, Homo sapiens
acgatctctgaagtt

SEQ ID NO: 311630 - DNA, 15 bp, Homo sapiens
cacgatctctgaagt

SEQ ID NO: 311631 - DNA, 15 bp, Homo sapiens
acacgatctctgaag

SEQ ID NO: 311632 - DNA, 15 bp, Homo sapiens
tacacgatctctgaa

SEQ ID NO: 311633 - DNA, 15 bp, Homo sapiens
atacacgatctctga

SEQ ID NO: 311634 - DNA, 15 bp, Homo sapiens
aatacacgatctctg

SEQ ID NO: 311635 - DNA, 15 bp, Homo sapiens
caatacacgatctct

SEQ ID NO: 311636 - DNA, 15 bp, Homo sapiens
tcaatacacgatctc

SEQ ID NO: 311637 - DNA, 15 bp, Homo sapiens
ctcaatacacgatct

SEQ ID NO: 311638 - DNA, 15 bp, Homo sapiens
tctcaatacacgatc

SEQ ID NO: 311639 - DNA, 15 bp, Homo sapiens
atctcaatacacgat

SEQ ID NO: 311640 - DNA, 15 bp, Homo sapiens
aatctcaatacacga

SEQ ID NO: 311641 - DNA, 15 bp, Homo sapiens
aaatctcaatacacg

SEQ ID NO: 311642 - DNA, 15 bp, Homo sapiens
gaaatctcaatacac

SEQ ID NO: 311643 - DNA, 15 bp, Homo sapiens
agaaatctcaataca

SEQ ID NO: 311644 - DNA, 15 bp, Homo sapiens
aagaaatctcaatac

SEQ ID NO: 311645 - DNA, 15 bp, Homo sapiens
taagaaatctcaata

SEQ ID NO: 311646 - DNA, 15 bp, Homo sapiens
ttaagaaatctcaat

SEQ ID NO: 311647 - DNA, 15 bp, Homo sapiens
tttaagaaatctcaa

SEQ ID NO: 311648 - DNA, 15 bp, Homo sapiens
atttaagaaatctca

SEQ ID NO: 311649 - DNA, 15 bp, Homo sapiens
tatttaagaaatctc

SEQ ID NO: 311650 - DNA, 15 bp, Homo sapiens
ttatttaagaaatct

SEQ ID NO: 311651 - DNA, 15 bp, Homo sapiens
attatttaagaaatc

SEQ ID NO: 311652 - DNA, 15 bp, Homo sapiens
cattatttaagaaat

SEQ ID NO: 311653 - DNA, 15 bp, Homo sapiens
gcattatttaagaaa

SEQ ID NO: 311654 - DNA, 15 bp, Homo sapiens
agcattatttaagaa

SEQ ID NO: 311655 - DNA, 15 bp, Homo sapiens
aagcattatttaaga

SEQ ID NO: 311656 - DNA, 15 bp, Homo sapiens
gaagcattatttaag

SEQ ID NO: 311657 - DNA, 15 bp, Homo sapiens
tgaagcattatttaa

SEQ ID NO: 311658 - DNA, 15 bp, Homo sapiens
ctgaagcattattta

SEQ ID NO: 311659 - DNA, 15 bp, Homo sapiens
tctgaagcattattt

SEQ ID NO: 311660 - DNA, 15 bp, Homo sapiens
atctgaagcattatt

SEQ ID NO: 311661 - DNA, 15 bp, Homo sapiens
tatctgaagcattat

SEQ ID NO: 311662 - DNA, 15 bp, Homo sapiens
atatctgaagcatta

SEQ ID NO: 311663 - DNA, 15 bp, Homo sapiens
aatatctgaagcatt

SEQ ID NO: 311664 - DNA, 15 bp, Homo sapiens
taatatctgaagcat

SEQ ID NO: 311665 - DNA, 15 bp, Homo sapiens
ataatatctgaagca

SEQ ID NO: 311666 - DNA, 15 bp, Homo sapiens
aataatatctgaagc

SEQ ID NO: 311667 - DNA, 15 bp, Homo sapiens
caataatatctgaag

SEQ ID NO: 311668 - DNA, 15 bp, Homo sapiens
gcaataatatctgaa

SEQ ID NO: 311669 - DNA, 15 bp, Homo sapiens
agcaataatatctga

SEQ ID NO: 311670 - DNA, 15 bp, Homo sapiens
aagcaataatatctg

SEQ ID NO: 311671 - DNA, 15 bp, Homo sapiens
aaagcaataatatct

SEQ ID NO: 311672 - DNA, 15 bp, Homo sapiens
taaagcaataatatc

SEQ ID NO: 311673 - DNA, 15 bp, Homo sapiens
ataaagcaataatat

SEQ ID NO: 311674 - DNA, 15 bp, Homo sapiens
aataaagcaataata

SEQ ID NO: 311675 - DNA, 15 bp, Homo sapiens
caataaagcaataat

SEQ ID NO: 311676 - DNA, 15 bp, Homo sapiens
gcaataaagcaataa

SEQ ID NO: 311677 - DNA, 15 bp, Homo sapiens
agcaataaagcaata

SEQ ID NO: 311678 - DNA, 15 bp, Homo sapiens
aagcaataaagcaat

SEQ ID NO: 311679 - DNA, 15 bp, Homo sapiens
aaagcaataaagcaa

SEQ ID NO: 311680 - DNA, 15 bp, Homo sapiens
aaaagcaataaagca

SEQ ID NO: 311681 - DNA, 15 bp, Homo sapiens
aaaaagcaataaagc

SEQ ID NO: 311682 - DNA, 15 bp, Homo sapiens
aaaaaagcaataaag

SEQ ID NO: 311683 - DNA, 15 bp, Homo sapiens
caaaaaagcaataaa

SEQ ID NO: 311684 - DNA, 15 bp, Homo sapiens
acaaaaaagcaataa

SEQ ID NO: 311685 - DNA, 15 bp, Homo sapiens
tacaaaaaagcaata

SEQ ID NO: 311686 - DNA, 15 bp, Homo sapiens
atacaaaaaagcaat

SEQ ID NO: 311687 - DNA, 15 bp, Homo sapiens
aatacaaaaaagcaa

SEQ ID NO: 311688 - DNA, 15 bp, Homo sapiens
caatacaaaaaagca

SEQ ID NO: 311689 - DNA, 15 bp, Homo sapiens
ccaatacaaaaaagc

SEQ ID NO: 311690 - DNA, 15 bp, Homo sapiens
accaatacaaaaaag

SEQ ID NO: 311691 - DNA, 15 bp, Homo sapiens
aaccaatacaaaaaa

SEQ ID NO: 311692 - DNA, 15 bp, Homo sapiens
taaccaatacaaaaa

SEQ ID NO: 311693 - DNA, 15 bp, Homo sapiens
ttaaccaatacaaaa

SEQ ID NO: 311694 - DNA, 15 bp, Homo sapiens
tttaaccaatacaaa

SEQ ID NO: 311695 - DNA, 15 bp, Homo sapiens
ttttaaccaatacaa

SEQ ID NO: 311696 - DNA, 15 bp, Homo sapiens
gttttaaccaataca

SEQ ID NO: 311697 - DNA, 15 bp, Homo sapiens
agttttaaccaatac

SEQ ID NO: 311698 - DNA, 15 bp, Homo sapiens
cagttttaaccaata

SEQ ID NO: 311699 - DNA, 15 bp, Homo sapiens
acagttttaaccaat

SEQ ID NO: 311700 - DNA, 15 bp, Homo sapiens
tacagttttaaccaa

SEQ ID NO: 311701 - DNA, 15 bp, Homo sapiens
gtacagttttaacca

SEQ ID NO: 311702 - DNA, 15 bp, Homo sapiens
tgtacagttttaacc

SEQ ID NO: 311703 - DNA, 15 bp, Homo sapiens
atgtacagttttaac

SEQ ID NO: 311704 - DNA, 15 bp, Homo sapiens
aatgtacagttttaa

SEQ ID NO: 311705 - DNA, 15 bp, Homo sapiens
aaatgtacagtttta

SEQ ID NO: 311706 - DNA, 15 bp, Homo sapiens
taaatgtacagtttt

SEQ ID NO: 311707 - DNA, 15 bp, Homo sapiens
ttaaatgtacagttt

SEQ ID NO: 311708 - DNA, 15 bp, Homo sapiens
tttaaatgtacagtt

SEQ ID NO: 311709 - DNA, 15 bp, Homo sapiens
ttttaaatgtacagt

SEQ ID NO: 311710 - DNA, 15 bp, Homo sapiens
attttaaatgtacag

SEQ ID NO: 311711 - DNA, 15 bp, Homo sapiens
aattttaaatgtaca

SEQ ID NO: 311712 - DNA, 15 bp, Homo sapiens
caattttaaatgtac

SEQ ID NO: 311713 - DNA, 15 bp, Homo sapiens
gcaattttaaatgta

SEQ ID NO: 311714 - DNA, 15 bp, Homo sapiens
agcaattttaaatgt

SEQ ID NO: 311715 - DNA, 15 bp, Homo sapiens
tagcaattttaaatg

SEQ ID NO: 311716 - DNA, 15 bp, Homo sapiens
atagcaattttaaat

SEQ ID NO: 311717 - DNA, 15 bp, Homo sapiens
catagcaattttaaa

SEQ ID NO: 311718 - DNA, 15 bp, Homo sapiens
acatagcaattttaa

SEQ ID NO: 311719 - DNA, 15 bp, Homo sapiens
aacatagcaatttta

SEQ ID NO: 311720 - DNA, 15 bp, Homo sapiens
taacatagcaatttt

SEQ ID NO: 311721 - DNA, 15 bp, Homo sapiens
gtaacatagcaattt

SEQ ID NO: 311722 - DNA, 15 bp, Homo sapiens
agtaacatagcaatt

SEQ ID NO: 311723 - DNA, 15 bp, Homo sapiens
tagtaacatagcaat

SEQ ID NO: 311724 - DNA, 15 bp, Homo sapiens
atagtaacatagcaa

SEQ ID NO: 311725 - DNA, 15 bp, Homo sapiens
aatagtaacatagca

SEQ ID NO: 311726 - DNA, 15 bp, Homo sapiens
aaatagtaacatagc

SEQ ID NO: 311727 - DNA, 15 bp, Homo sapiens
aaaatagtaacatag

SEQ ID NO: 311728 - DNA, 15 bp, Homo sapiens
gaaaatagtaacata

SEQ ID NO: 311729 - DNA, 15 bp, Homo sapiens
agaaaatagtaacat

SEQ ID NO: 311730 - DNA, 15 bp, Homo sapiens
tagaaaatagtaaca

SEQ ID NO: 311731 - DNA, 15 bp, Homo sapiens
gtagaaaatagtaac

SEQ ID NO: 311732 - DNA, 15 bp, Homo sapiens
tgtagaaaatagtaa

SEQ ID NO: 311733 - DNA, 15 bp, Homo sapiens
ttgtagaaaatagta

SEQ ID NO: 311734 - DNA, 15 bp, Homo sapiens
attgtagaaaatagt

SEQ ID NO: 311735 - DNA, 15 bp, Homo sapiens
aattgtagaaaatag

SEQ ID NO: 311736 - DNA, 15 bp, Homo sapiens
taattgtagaaaata

SEQ ID NO: 311737 - DNA, 15 bp, Homo sapiens
ttaattgtagaaaat

SEQ ID NO: 311738 - DNA, 15 bp, Homo sapiens
attaattgtagaaaa

SEQ ID NO: 311739 - DNA, 15 bp, Homo sapiens
tattaattgtagaaa

SEQ ID NO: 311740 - DNA, 15 bp, Homo sapiens
ctattaattgtagaa

SEQ ID NO: 311741 - DNA, 15 bp, Homo sapiens
actattaattgtaga

SEQ ID NO: 311742 - DNA, 15 bp, Homo sapiens
aactattaattgtag

SEQ ID NO: 311743 - DNA, 15 bp, Homo sapiens
aaactattaattgta

SEQ ID NO: 311744 - DNA, 15 bp, Homo sapiens
caaactattaattgt

SEQ ID NO: 311745 - DNA, 15 bp, Homo sapiens
acaaactattaattg

SEQ ID NO: 311746 - DNA, 15 bp, Homo sapiens
gacaaactattaatt

SEQ ID NO: 311747 - DNA, 15 bp, Homo sapiens
agacaaactattaat

SEQ ID NO: 311748 - DNA, 15 bp, Homo sapiens
tagacaaactattaa

SEQ ID NO: 311749 - DNA, 15 bp, Homo sapiens
atagacaaactatta

SEQ ID NO: 311750 - DNA, 15 bp, Homo sapiens
aatagacaaactatt

SEQ ID NO: 311751 - DNA, 15 bp, Homo sapiens
aaatagacaaactat

SEQ ID NO: 311752 - DNA, 15 bp, Homo sapiens
aaaatagacaaacta

SEQ ID NO: 311753 - DNA, 15 bp, Homo sapiens
taaaatagacaaact

SEQ ID NO: 311754 - DNA, 15 bp, Homo sapiens
ttaaaatagacaaac

SEQ ID NO: 311755 - DNA, 15 bp, Homo sapiens
tttaaaatagacaaa

SEQ ID NO: 311756 - DNA, 15 bp, Homo sapiens
ttttaaaatagacaa

SEQ ID NO: 311757 - DNA, 15 bp, Homo sapiens
attttaaaatagaca

SEQ ID NO: 311758 - DNA, 15 bp, Homo sapiens
tattttaaaatagac

SEQ ID NO: 311759 - DNA, 15 bp, Homo sapiens
ttattttaaaataga

SEQ ID NO: 311760 - DNA, 15 bp, Homo sapiens
tttattttaaaatag

SEQ ID NO: 311761 - DNA, 15 bp, Homo sapiens
atttattttaaaata

SEQ ID NO: 311762 - DNA, 15 bp, Homo sapiens
aatttattttaaaat

SEQ ID NO: 311763 - DNA, 15 bp, Homo sapiens
taatttattttaaaa

SEQ ID NO: 311764 - DNA, 15 bp, Homo sapiens
ctaatttattttaaa

SEQ ID NO: 311765 - DNA, 15 bp, Homo sapiens
actaatttattttaa

SEQ ID NO: 311766 - DNA, 15 bp, Homo sapiens
aactaatttatttta

SEQ ID NO: 311767 - DNA, 15 bp, Homo sapiens
caactaatttatttt

SEQ ID NO: 311768 - DNA, 15 bp, Homo sapiens
acaactaatttattt

SEQ ID NO: 311769 - DNA, 15 bp, Homo sapiens
aacaactaatttatt

SEQ ID NO: 311770 - DNA, 15 bp, Homo sapiens
taacaactaatttat

SEQ ID NO: 311771 - DNA, 15 bp, Homo sapiens
ttaacaactaattta

SEQ ID NO: 311772 - DNA, 15 bp, Homo sapiens
cttaacaactaattt

SEQ ID NO: 311773 - DNA, 15 bp, Homo sapiens
tcttaacaactaatt

SEQ ID NO: 311774 - DNA, 15 bp, Homo sapiens
ctcttaacaactaat

SEQ ID NO: 311775 - DNA, 15 bp, Homo sapiens
actcttaacaactaa

SEQ ID NO: 311776 - DNA, 15 bp, Homo sapiens
gactcttaacaacta

SEQ ID NO: 311777 - DNA, 15 bp, Homo sapiens
agactcttaacaact

SEQ ID NO: 311778 - DNA, 15 bp, Homo sapiens
aagactcttaacaac

SEQ ID NO: 311779 - DNA, 15 bp, Homo sapiens
taagactcttaacaa

SEQ ID NO: 311780 - DNA, 15 bp, Homo sapiens
ttaagactcttaaca

SEQ ID NO: 311781 - DNA, 15 bp, Homo sapiens
attaagactcttaac

SEQ ID NO: 311782 - DNA, 15 bp, Homo sapiens
cattaagactcttaa

SEQ ID NO: 311783 - DNA, 15 bp, Homo sapiens
ccattaagactctta

SEQ ID NO: 311784 - DNA, 15 bp, Homo sapiens
accattaagactctt

SEQ ID NO: 311785 - DNA, 15 bp, Homo sapiens
gaccattaagactct

SEQ ID NO: 311786 - DNA, 15 bp, Homo sapiens
agaccattaagactc

SEQ ID NO: 311787 - DNA, 15 bp, Homo sapiens
cagaccattaagact

SEQ ID NO: 311788 - DNA, 15 bp, Homo sapiens
tcagaccattaagac

SEQ ID NO: 311789 - DNA, 15 bp, Homo sapiens
atcagaccattaaga

SEQ ID NO: 311790 - DNA, 15 bp, Homo sapiens
catcagaccattaag

SEQ ID NO: 311791 - DNA, 15 bp, Homo sapiens
acatcagaccattaa

SEQ ID NO: 311792 - DNA, 15 bp, Homo sapiens
aacatcagaccatta

SEQ ID NO: 311793 - DNA, 15 bp, Homo sapiens
caacatcagaccatt

SEQ ID NO: 311794 - DNA, 15 bp, Homo sapiens
acaacatcagaccat

SEQ ID NO: 311795 - DNA, 15 bp, Homo sapiens
cacaacatcagacca

SEQ ID NO: 311796 - DNA, 15 bp, Homo sapiens
acacaacatcagacc

SEQ ID NO: 311797 - DNA, 15 bp, Homo sapiens
aacacaacatcagac

SEQ ID NO: 311798 - DNA, 15 bp, Homo sapiens
gaacacaacatcaga

SEQ ID NO: 311799 - DNA, 15 bp, Homo sapiens
agaacacaacatcag

SEQ ID NO: 311800 - DNA, 15 bp, Homo sapiens
aagaacacaacatca

SEQ ID NO: 311801 - DNA, 15 bp, Homo sapiens
aaagaacacaacatc

SEQ ID NO: 311802 - DNA, 15 bp, Homo sapiens
caaagaacacaacat

SEQ ID NO: 311803 - DNA, 15 bp, Homo sapiens
acaaagaacacaaca

SEQ ID NO: 311804 - DNA, 15 bp, Homo sapiens
tacaaagaacacaac

SEQ ID NO: 311805 - DNA, 15 bp, Homo sapiens
atacaaagaacacaa

SEQ ID NO: 311806 - DNA, 15 bp, Homo sapiens
aatacaaagaacaca

SEQ ID NO: 311807 - DNA, 15 bp, Homo sapiens
taatacaaagaacac

SEQ ID NO: 311808 - DNA, 15 bp, Homo sapiens
ttaatacaaagaaca

SEQ ID NO: 311809 - DNA, 15 bp, Homo sapiens
cttaatacaaagaac

SEQ ID NO: 311810 - DNA, 15 bp, Homo sapiens
acttaatacaaagaa

SEQ ID NO: 311811 - DNA, 15 bp, Homo sapiens
tacttaatacaaaga

SEQ ID NO: 311812 - DNA, 15 bp, Homo sapiens
gtacttaatacaaag

SEQ ID NO: 311813 - DNA, 15 bp, Homo sapiens
tgtacttaatacaaa

SEQ ID NO: 311814 - DNA, 15 bp, Homo sapiens
gtgtacttaatacaa

SEQ ID NO: 311815 - DNA, 15 bp, Homo sapiens
agtgtacttaataca

SEQ ID NO: 311816 - DNA, 15 bp, Homo sapiens
tagtgtacttaatac

SEQ ID NO: 311817 - DNA, 15 bp, Homo sapiens
ttagtgtacttaata

SEQ ID NO: 311818 - DNA, 15 bp, Homo sapiens
attagtgtacttaat

SEQ ID NO: 311819 - DNA, 15 bp, Homo sapiens
cattagtgtacttaa

SEQ ID NO: 311820 - DNA, 15 bp, Homo sapiens
acattagtgtactta

SEQ ID NO: 311821 - DNA, 15 bp, Homo sapiens
aacattagtgtactt

SEQ ID NO: 311822 - DNA, 15 bp, Homo sapiens
gaacattagtgtact

SEQ ID NO: 311823 - DNA, 15 bp, Homo sapiens
agaacattagtgtac

SEQ ID NO: 311824 - DNA, 15 bp, Homo sapiens
gagaacattagtgta

SEQ ID NO: 311825 - DNA, 15 bp, Homo sapiens
agagaacattagtgt

SEQ ID NO: 311826 - DNA, 15 bp, Homo sapiens
aagagaacattagtg

SEQ ID NO: 311827 - DNA, 15 bp, Homo sapiens
aaagagaacattagt

SEQ ID NO: 311828 - DNA, 15 bp, Homo sapiens
aaaagagaacattag

SEQ ID NO: 311829 - DNA, 15 bp, Homo sapiens
gaaaagagaacatta

SEQ ID NO: 311830 - DNA, 15 bp, Homo sapiens
agaaaagagaacatt

SEQ ID NO: 311831 - DNA, 15 bp, Homo sapiens
cagaaaagagaacat

SEQ ID NO: 311832 - DNA, 15 bp, Homo sapiens
acagaaaagagaaca

SEQ ID NO: 311833 - DNA, 15 bp, Homo sapiens
gacagaaaagagaac

SEQ ID NO: 311834 - DNA, 15 bp, Homo sapiens
agacagaaaagagaa

SEQ ID NO: 311835 - DNA, 15 bp, Homo sapiens
tagacagaaaagaga

SEQ ID NO: 311836 - DNA, 15 bp, Homo sapiens
ctagacagaaaagag

SEQ ID NO: 311837 - DNA, 15 bp, Homo sapiens
cctagacagaaaaga

SEQ ID NO: 311838 - DNA, 15 bp, Homo sapiens
tcctagacagaaaag

SEQ ID NO: 311839 - DNA, 15 bp, Homo sapiens
ctcctagacagaaaa

SEQ ID NO: 311840 - DNA, 15 bp, Homo sapiens
tctcctagacagaaa

SEQ ID NO: 311841 - DNA, 15 bp, Homo sapiens
ttctcctagacagaa

SEQ ID NO: 311842 - DNA, 15 bp, Homo sapiens
cttctcctagacaga

SEQ ID NO: 311843 - DNA, 15 bp, Homo sapiens
tcttctcctagacag

SEQ ID NO: 311844 - DNA, 15 bp, Homo sapiens
atcttctcctagaca

SEQ ID NO: 311845 - DNA, 15 bp, Homo sapiens
tatcttctcctagac

SEQ ID NO: 311846 - DNA, 15 bp, Homo sapiens
ctatcttctcctaga

SEQ ID NO: 311847 - DNA, 15 bp, Homo sapiens
tctatcttctcctag

SEQ ID NO: 311848 - DNA, 15 bp, Homo sapiens
atctatcttctccta

SEQ ID NO: 311849 - DNA, 15 bp, Homo sapiens
tatctatcttctcct

SEQ ID NO: 311850 - DNA, 15 bp, Homo sapiens
ctatctatcttctcc

SEQ ID NO: 311851 - DNA, 15 bp, Homo sapiens
tctatctatcttctc

SEQ ID NO: 311852 - DNA, 15 bp, Homo sapiens
ttctatctatcttct

SEQ ID NO: 311853 - DNA, 15 bp, Homo sapiens
cttctatctatcttc

SEQ ID NO: 311854 - DNA, 15 bp, Homo sapiens
tcttctatctatctt

SEQ ID NO: 311855 - DNA, 15 bp, Homo sapiens
atcttctatctatct

SEQ ID NO: 311856 - DNA, 15 bp, Homo sapiens
tatcttctatctatc

SEQ ID NO: 311857 - DNA, 15 bp, Homo sapiens
ttatcttctatctat

SEQ ID NO: 311858 - DNA, 15 bp, Homo sapiens
gttatcttctatcta

SEQ ID NO: 311859 - DNA, 15 bp, Homo sapiens
agttatcttctatct

SEQ ID NO: 311860 - DNA, 15 bp, Homo sapiens
gagttatcttctatc

SEQ ID NO: 311861 - DNA, 15 bp, Homo sapiens
agagttatcttctat

SEQ ID NO: 311862 - DNA, 15 bp, Homo sapiens
gagagttatcttcta

SEQ ID NO: 311863 - DNA, 15 bp, Homo sapiens
ggagagttatcttct

SEQ ID NO: 311864 - DNA, 15 bp, Homo sapiens
aggagagttatcttc

SEQ ID NO: 311865 - DNA, 15 bp, Homo sapiens
taggagagttatctt

SEQ ID NO: 311866 - DNA, 15 bp, Homo sapiens
ctaggagagttatct

SEQ ID NO: 311867 - DNA, 15 bp, Homo sapiens
actaggagagttatc

SEQ ID NO: 311868 - DNA, 15 bp, Homo sapiens
tactaggagagttat

SEQ ID NO: 311869 - DNA, 15 bp, Homo sapiens
atactaggagagtta

SEQ ID NO: 311870 - DNA, 15 bp, Homo sapiens
gatactaggagagtt

SEQ ID NO: 311871 - DNA, 15 bp, Homo sapiens
agatactaggagagt

SEQ ID NO: 311872 - DNA, 15 bp, Homo sapiens
gagatactaggagag

SEQ ID NO: 311873 - DNA, 15 bp, Homo sapiens
tgagatactaggaga

SEQ ID NO: 311874 - DNA, 15 bp, Homo sapiens
atgagatactaggag

SEQ ID NO: 311875 - DNA, 15 bp, Homo sapiens
gatgagatactagga

SEQ ID NO: 311876 - DNA, 15 bp, Homo sapiens
ggatgagatactagg

SEQ ID NO: 311877 - DNA, 15 bp, Homo sapiens
tggatgagatactag

SEQ ID NO: 311878 - DNA, 15 bp, Homo sapiens
atggatgagatacta

SEQ ID NO: 311879 - DNA, 15 bp, Homo sapiens
aatggatgagatact

SEQ ID NO: 311880 - DNA, 15 bp, Homo sapiens
gaatggatgagatac

SEQ ID NO: 311881 - DNA, 15 bp, Homo sapiens
ggaatggatgagata

SEQ ID NO: 311882 - DNA, 15 bp, Homo sapiens
aggaatggatgagat

SEQ ID NO: 311883 - DNA, 15 bp, Homo sapiens
taggaatggatgaga

SEQ ID NO: 311884 - DNA, 15 bp, Homo sapiens
ctaggaatggatgag

SEQ ID NO: 311885 - DNA, 15 bp, Homo sapiens
gctaggaatggatga

SEQ ID NO: 311886 - DNA, 15 bp, Homo sapiens
ggctaggaatggatg

SEQ ID NO: 311887 - DNA, 15 bp, Homo sapiens
aggctaggaatggat

SEQ ID NO: 311888 - DNA, 15 bp, Homo sapiens
aaggctaggaatgga

SEQ ID NO: 311889 - DNA, 15 bp, Homo sapiens
aaaggctaggaatgg

SEQ ID NO: 311890 - DNA, 15 bp, Homo sapiens
taaaggctaggaatg

SEQ ID NO: 311891 - DNA, 15 bp, Homo sapiens
ttaaaggctaggaat

SEQ ID NO: 311892 - DNA, 15 bp, Homo sapiens
cttaaaggctaggaa

SEQ ID NO: 311893 - DNA, 15 bp, Homo sapiens
ccttaaaggctagga

SEQ ID NO: 311894 - DNA, 15 bp, Homo sapiens
cccttaaaggctagg

SEQ ID NO: 311895 - DNA, 15 bp, Homo sapiens
ccccttaaaggctag

SEQ ID NO: 311896 - DNA, 15 bp, Homo sapiens
gccccttaaaggcta

SEQ ID NO: 311897 - DNA, 15 bp, Homo sapiens
agccccttaaaggct

SEQ ID NO: 311898 - DNA, 15 bp, Homo sapiens
gagccccttaaaggc

SEQ ID NO: 311899 - DNA, 15 bp, Homo sapiens
agagccccttaaagg

SEQ ID NO: 311900 - DNA, 15 bp, Homo sapiens
tagagccccttaaag

SEQ ID NO: 311901 - DNA, 15 bp, Homo sapiens
atagagccccttaaa

SEQ ID NO: 311902 - DNA, 15 bp, Homo sapiens
tatagagccccttaa

SEQ ID NO: 311903 - DNA, 15 bp, Homo sapiens
atatagagcccctta
